United States Patent Application Publication US 2014/0004565 A1 - sequence listing, part 16

SEQ ID NO: 275191 - RNA, 19 nt, Artificial Sequence
  Description of Artificial Sequence: Synthetic oligonucleotide
ggucgugggaaauaacuuu

SEQ ID NO: 275192 - RNA, 19 nt, Artificial Sequence
  Description of Artificial Sequence: Synthetic oligonucleotide
aaggagcgugcggcauguc

SEQ ID NO: 275193 - RNA, 19 nt, Artificial Sequence
  Description of Artificial Sequence: Synthetic oligonucleotide
gucguagaauucguucaaa

SEQ ID NO: 275194 - RNA, 19 nt, Artificial Sequence
  Description of Artificial Sequence: Synthetic oligonucleotide
guacuggacacgucaucgu

SEQ ID NO: 275195 - RNA, 19 nt, Artificial Sequence
  Description of Artificial Sequence: Synthetic oligonucleotide
gaagcggaauguccuggau

SEQ ID NO: 275196 - RNA, 19 nt, Artificial Sequence
  Description of Artificial Sequence: Synthetic oligonucleotide
gggcgcaucaugccaggac

SEQ ID NO: 275197 - RNA, 19 nt, Artificial Sequence
  Description of Artificial Sequence: Synthetic oligonucleotide
caguugagcccucuucugu

SEQ ID NO: 275198 - RNA, 19 nt, Artificial Sequence
  Description of Artificial Sequence: Synthetic oligonucleotide
agccgugguaaaggcccuc

SEQ ID NO: 275199 - RNA, 19 nt, Artificial Sequence
  Description of Artificial Sequence: Synthetic oligonucleotide
ccauguugacaauuuauau

SEQ ID NO: 275200 - RNA, 19 nt, Artificial Sequence
  Description of Artificial Sequence: Synthetic oligonucleotide
ggacgaggaggagggauac

SEQ ID NO: 275201 - RNA, 19 nt, Artificial Sequence
  Description of Artificial Sequence: Synthetic oligonucleotide
gacgcacucucagugcagu

SEQ ID NO: 275202 - RNA, 19 nt, Artificial Sequence
  Description of Artificial Sequence: Synthetic oligonucleotide
ggacuauacagcaugucuu

SEQ ID NO: 275203 - RNA, 19 nt, Artificial Sequence
  Description of Artificial Sequence: Synthetic oligonucleotide
gugugaccucugccuuggg

SEQ ID NO: 275204 - RNA, 19 nt, Artificial Sequence
  Description of Artificial Sequence: Synthetic oligonucleotide
guacggagacuggaacaga

SEQ ID NO: 275205 - RNA, 19 nt, Artificial Sequence
  Description of Artificial Sequence: Synthetic oligonucleotide
ucgaagcaucauggcuuga

SEQ ID NO: 275206 - RNA, 19 nt, Artificial Sequence
  Description of Artificial Sequence: Synthetic oligonucleotide
ugcccgaguuggcggccca

SEQ ID NO: 275207 - RNA, 19 nt, Artificial Sequence
  Description of Artificial Sequence: Synthetic oligonucleotide
cgcacucucagugcagugg

SEQ ID NO: 275208 - RNA, 19 nt, Artificial Sequence
  Description of Artificial Sequence: Synthetic oligonucleotide
cucgagaguuuaggucgug

SEQ ID NO: 275209 - RNA, 19 nt, Artificial Sequence
  Description of Artificial Sequence: Synthetic oligonucleotide
ggcggguggagguccaaga

SEQ ID NO: 275210 - RNA, 19 nt, Artificial Sequence
  Description of Artificial Sequence: Synthetic oligonucleotide
cccgacgcacucucagugc

SEQ ID NO: 275211 - RNA, 19 nt, Artificial Sequence
  Description of Artificial Sequence: Synthetic oligonucleotide
cgaguuggcggcccauacg

SEQ ID NO: 275212 - RNA, 19 nt, Artificial Sequence
  Description of Artificial Sequence: Synthetic oligonucleotide
cauacgcagagguuuucuu

SEQ ID NO: 275213 - RNA, 19 nt, Artificial Sequence
  Description of Artificial Sequence: Synthetic oligonucleotide
agguggucucaggaaugga

SEQ ID NO: 275214 - RNA, 19 nt, Artificial Sequence
  Description of Artificial Sequence: Synthetic oligonucleotide
gauggucgcuguggcuuuc

SEQ ID NO: 275215 - RNA, 19 nt, Artificial Sequence
  Description of Artificial Sequence: Synthetic oligonucleotide
gauugguaaucuggggcuu

SEQ ID NO: 275216 - RNA, 19 nt, Artificial Sequence
  Description of Artificial Sequence: Synthetic oligonucleotide
cccggugguuuucugccag

SEQ ID NO: 275217 - RNA, 19 nt, Artificial Sequence
  Description of Artificial Sequence: Synthetic oligonucleotide
gggugggcgcaucaugcca

SEQ ID NO: 275218 - RNA, 19 nt, Artificial Sequence
  Description of Artificial Sequence: Synthetic oligonucleotide
ugggcgcaucaugccagga

SEQ ID NO: 275219 - RNA, 19 nt, Artificial Sequence
  Description of Artificial Sequence: Synthetic oligonucleotide
gccgucagagugggaaucc

SEQ ID NO: 275220 - RNA, 19 nt, Artificial Sequence
  Description of Artificial Sequence: Synthetic oligonucleotide
cgugugaccucugccuugg

SEQ ID NO: 275221 - RNA, 19 nt, Artificial Sequence
  Description of Artificial Sequence: Synthetic oligonucleotide
ucgcgcucacuguccucac

SEQ ID NO: 275222 - RNA, 19 nt, Artificial Sequence
  Description of Artificial Sequence: Synthetic oligonucleotide
cggaauguccuggaucaag

SEQ ID NO: 275223 - RNA, 19 nt, Artificial Sequence
  Description of Artificial Sequence: Synthetic oligonucleotide
uccgucccauguugacaau

SEQ ID NO: 275224 - RNA, 19 nt, Artificial Sequence
  Description of Artificial Sequence: Synthetic oligonucleotide
ggucugugggguucauaaa

SEQ ID NO: 275225 - RNA, 19 nt, Artificial Sequence
  Description of Artificial Sequence: Synthetic oligonucleotide
gccguaaggguggggcggg

SEQ ID NO: 275226 - RNA, 19 nt, Artificial Sequence
  Description of Artificial Sequence: Synthetic oligonucleotide
ggauagaaacugcccgagu

SEQ ID NO: 275227 - RNA, 19 nt, Artificial Sequence
  Description of Artificial Sequence: Synthetic oligonucleotide
ugaccucgcugagcaaguu

SEQ ID NO: 275228 - RNA, 19 nt, Artificial Sequence
  Description of Artificial Sequence: Synthetic oligonucleotide
cuagagcaaaacccacuuu

SEQ ID NO: 275229 - RNA, 19 nt, Artificial Sequence
  Description of Artificial Sequence: Synthetic oligonucleotide
aggcaagcguuaggaggcu

SEQ ID NO: 275230 - RNA, 19 nt, Artificial Sequence
  Description of Artificial Sequence: Synthetic oligonucleotide
ccggugguuuucugccagg

SEQ ID NO: 275231 - RNA, 19 nt, Artificial Sequence
  Description of Artificial Sequence: Synthetic oligonucleotide
ggguuaaacuccauuucau

SEQ ID NO: 275232 - RNA, 19 nt, Artificial Sequence
  Description of Artificial Sequence: Synthetic oligonucleotide
gucaaagggaacggguguu

SEQ ID NO: 275233 - RNA, 19 nt, Artificial Sequence
  Description of Artificial Sequence: Synthetic oligonucleotide
ccgaguuggcggcccauac

SEQ ID NO: 275234 - RNA, 19 nt, Artificial Sequence
  Description of Artificial Sequence: Synthetic oligonucleotide
cuucguaaacaucguccuu

SEQ ID NO: 275235 - RNA, 19 nt, Artificial Sequence
  Description of Artificial Sequence: Synthetic oligonucleotide
cugcgacugcuuuucugcu

SEQ ID NO: 275236 - RNA, 19 nt, Artificial Sequence
  Description of Artificial Sequence: Synthetic oligonucleotide
gcggcccauacgcagaggu

SEQ ID NO: 275237 - RNA, 19 nt, Artificial Sequence
  Description of Artificial Sequence: Synthetic oligonucleotide
gcguuaggaggcuccugga

SEQ ID NO: 275238 - RNA, 19 nt, Artificial Sequence
  Description of Artificial Sequence: Synthetic oligonucleotide
cgugguaaaggcccucgga

SEQ ID NO: 275239 - RNA, 19 nt, Artificial Sequence
  Description of Artificial Sequence: Synthetic oligonucleotide
caucgucuucgcugguacu

SEQ ID NO: 275240 - RNA, 19 nt, Artificial Sequence
  Description of Artificial Sequence: Synthetic oligonucleotide
ccgacgcacucucagugca

SEQ ID NO: 275241 - RNA, 19 nt, Artificial Sequence
  Description of Artificial Sequence: Synthetic oligonucleotide
ggguagccaucgucuucgc

SEQ ID NO: 275242 - RNA, 19 nt, Artificial Sequence
  Description of Artificial Sequence: Synthetic oligonucleotide
aggcggcgguccuggcaug

SEQ ID NO: 275243 - RNA, 19 nt, Artificial Sequence
  Description of Artificial Sequence: Synthetic oligonucleotide
ccguccuggucuauuguaa

SEQ ID NO: 275244 - RNA, 19 nt, Artificial Sequence
  Description of Artificial Sequence: Synthetic oligonucleotide
gcacuugcaucauccgccu

SEQ ID NO: 275245 - RNA, 19 nt, Artificial Sequence
  Description of Artificial Sequence: Synthetic oligonucleotide
ggguuaucgcgcucacugu

SEQ ID NO: 275246 - RNA, 19 nt, Artificial Sequence
  Description of Artificial Sequence: Synthetic oligonucleotide
cccuuauucucccgacgca

SEQ ID NO: 275247 - RNA, 19 nt, Artificial Sequence
  Description of Artificial Sequence: Synthetic oligonucleotide
agacuggguggggcacuca

SEQ ID NO: 275248 - RNA, 19 nt, Artificial Sequence
  Description of Artificial Sequence: Synthetic oligonucleotide
cccugacaguggacguugc

SEQ ID NO: 275249 - RNA, 19 nt, Artificial Sequence
  Description of Artificial Sequence: Synthetic oligonucleotide
ggcccauacgcagagguuu

SEQ ID NO: 275250 - RNA, 19 nt, Artificial Sequence
  Description of Artificial Sequence: Synthetic oligonucleotide
cauccgccuucggucgcug

SEQ ID NO: 275251 - RNA, 19 nt, Artificial Sequence
  Description of Artificial Sequence: Synthetic oligonucleotide
caagcguuaggaggcuccu

SEQ ID NO: 275252 - RNA, 19 nt, Artificial Sequence
  Description of Artificial Sequence: Synthetic oligonucleotide
gugcuuccguccuggucua

SEQ ID NO: 275253 - RNA, 19 nt, Artificial Sequence
  Description of Artificial Sequence: Synthetic oligonucleotide
gcgugcggcaugucuggca

SEQ ID NO: 275254 - RNA, 19 nt, Artificial Sequence
  Description of Artificial Sequence: Synthetic oligonucleotide
ccacuucaacaugcugagc

SEQ ID NO: 275255 - RNA, 19 nt, Artificial Sequence
  Description of Artificial Sequence: Synthetic oligonucleotide
ccagugcccauagcacgag

SEQ ID NO: 275256 - RNA, 19 nt, Artificial Sequence
  Description of Artificial Sequence: Synthetic oligonucleotide
cgacgcacucucagugcag

SEQ ID NO: 275257 - RNA, 19 nt, Artificial Sequence
  Description of Artificial Sequence: Synthetic oligonucleotide
guucggcccaucauucguu

SEQ ID NO: 275258 - RNA, 19 nt, Artificial Sequence
  Description of Artificial Sequence: Synthetic oligonucleotide
ggcaagcguuaggaggcuc

SEQ ID NO: 275259 - RNA, 19 nt, Artificial Sequence
  Description of Artificial Sequence: Synthetic oligonucleotide
ccggauaaucuguuuggau

SEQ ID NO: 275260 - RNA, 19 nt, Artificial Sequence
  Description of Artificial Sequence: Synthetic oligonucleotide
gcggcaugucuggcagagg

SEQ ID NO: 275261 - RNA, 19 nt, Artificial Sequence
  Description of Artificial Sequence: Synthetic oligonucleotide
cguccuggucuauuguaaa

SEQ ID NO: 275262 - RNA, 19 nt, Artificial Sequence
  Description of Artificial Sequence: Synthetic oligonucleotide
ccauguccucaggguagcc

SEQ ID NO: 275263 - RNA, 19 nt, Artificial Sequence
  Description of Artificial Sequence: Synthetic oligonucleotide
ugcuuccguccuggucuau

SEQ ID NO: 275264 - RNA, 19 nt, Artificial Sequence
  Description of Artificial Sequence: Synthetic oligonucleotide
ccaagaggcggcgguccug

SEQ ID NO: 275265 - RNA, 19 nt, Artificial Sequence
  Description of Artificial Sequence: Synthetic oligonucleotide
gcccggugguuuucugcca

SEQ ID NO: 275266 - RNA, 19 nt, Artificial Sequence
  Description of Artificial Sequence: Synthetic oligonucleotide
guccgaggagcggaaggau

SEQ ID NO: 275267 - RNA, 19 nt, Artificial Sequence
  Description of Artificial Sequence: Synthetic oligonucleotide
cccauacgcagagguuuuc

SEQ ID NO: 275268 - RNA, 19 nt, Artificial Sequence
  Description of Artificial Sequence: Synthetic oligonucleotide
gcggcgguccuggcauggg

SEQ ID NO: 275269 - RNA, 19 nt, Artificial Sequence
  Description of Artificial Sequence: Synthetic oligonucleotide
cagugcccauagcacgagu

SEQ ID NO: 275270 - RNA, 19 nt, Artificial Sequence
  Description of Artificial Sequence: Synthetic oligonucleotide
gcagacgcgccgucagagu

SEQ ID NO: 275271 - RNA, 19 nt, Artificial Sequence
  Description of Artificial Sequence: Synthetic oligonucleotide
cguaaggguggggcgggug

SEQ ID NO: 275272 - RNA, 19 nt, Artificial Sequence
  Description of Artificial Sequence: Synthetic oligonucleotide
cgcgccgucagagugggaa

SEQ ID NO: 275273 - RNA, 19 nt, Artificial Sequence
  Description of Artificial Sequence: Synthetic oligonucleotide
ccauacgcagagguuuucu

SEQ ID NO: 275274 - RNA, 19 nt, Artificial Sequence
  Description of Artificial Sequence: Synthetic oligonucleotide
caggguuaucgcgcucacu

SEQ ID NO: 275275 - RNA, 19 nt, Artificial Sequence
  Description of Artificial Sequence: Synthetic oligonucleotide
ggagggcccggugguuuuc

SEQ ID NO: 275276 - RNA, 19 nt, Artificial Sequence
  Description of Artificial Sequence: Synthetic oligonucleotide
cgccgucagagugggaauc

SEQ ID NO: 275277 - RNA, 19 nt, Artificial Sequence
  Description of Artificial Sequence: Synthetic oligonucleotide
gccccuggcgguggcccag

SEQ ID NO: 275278 - RNA, 19 nt, Artificial Sequence
  Description of Artificial Sequence: Synthetic oligonucleotide
gcccucggauuccuggcau

SEQ ID NO: 275279 - RNA, 19 nt, Artificial Sequence
  Description of Artificial Sequence: Synthetic oligonucleotide
gcggaauguccuggaucaa

SEQ ID NO: 275280 - RNA, 19 nt, Artificial Sequence
  Description of Artificial Sequence: Synthetic oligonucleotide
gcgccgucagagugggaau

SEQ ID NO: 275281 - RNA, 19 nt, Artificial Sequence
  Description of Artificial Sequence: Synthetic oligonucleotide
gcuuccguccuggucuauu

SEQ ID NO: 275282 - RNA, 19 nt, Artificial Sequence
  Description of Artificial Sequence: Synthetic oligonucleotide
cgaggagcggaaggauaga

SEQ ID NO: 275283 - RNA, 19 nt, Artificial Sequence
  Description of Artificial Sequence: Synthetic oligonucleotide
ggcaaacguggaacaccau

SEQ ID NO: 275284 - RNA, 19 nt, Artificial Sequence
  Description of Artificial Sequence: Synthetic oligonucleotide
ccaagggugggcgcaucau

SEQ ID NO: 275285 - RNA, 19 nt, Artificial Sequence
  Description of Artificial Sequence: Synthetic oligonucleotide
cccgaguuggcggcccaua

SEQ ID NO: 275286 - RNA, 19 nt, Artificial Sequence
  Description of Artificial Sequence: Synthetic oligonucleotide
acgcgccgucagaguggga

SEQ ID NO: 275287 - RNA, 19 nt, Artificial Sequence
  Description of Artificial Sequence: Synthetic oligonucleotide
ccgccuucggucgcugaau

SEQ ID NO: 275288 - RNA, 19 nt, Artificial Sequence
  Description of Artificial Sequence: Synthetic oligonucleotide
cgugcuuguccugguccau

SEQ ID NO: 275289 - RNA, 19 nt, Artificial Sequence
  Description of Artificial Sequence: Synthetic oligonucleotide
cccuggcgguggcccaggu

SEQ ID NO: 275290 - RNA, 19 nt, Artificial Sequence
  Description of Artificial Sequence: Synthetic oligonucleotide
ucagacaucaucuugccgg

SEQ ID NO: 275291 - RNA, 19 nt, Artificial Sequence
  Description of Artificial Sequence: Synthetic oligonucleotide
aacgaggacacauugcugg

SEQ ID NO: 275292 - RNA, 19 nt, Artificial Sequence
  Description of Artificial Sequence: Synthetic oligonucleotide
acaaggaccacaucaaagc

SEQ ID NO: 275293 - RNA, 19 nt, Artificial Sequence
  Description of Artificial Sequence: Synthetic oligonucleotide
uauaucggaagacacagcc

SEQ ID NO: 275294 - RNA, 19 nt, Artificial Sequence
  Description of Artificial Sequence: Synthetic oligonucleotide
cacaaauucaccauagggg

SEQ ID NO: 275295 - RNA, 19 nt, Artificial Sequence
  Description of Artificial Sequence: Synthetic oligonucleotide
gugagcaccacacacaugg

SEQ ID NO: 275296 - RNA, 19 nt, Artificial Sequence
  Description of Artificial Sequence: Synthetic oligonucleotide
uugacaaggccacugaugc

SEQ ID NO: 275297 - RNA, 19 nt, Artificial Sequence
  Description of Artificial Sequence: Synthetic oligonucleotide
gauccgacaaucaaguugg

SEQ ID NO: 275298 - RNA, 19 nt, Artificial Sequence
  Description of Artificial Sequence: Synthetic oligonucleotide
ugacauggcauccucaucc

SEQ ID NO: 275299 - RNA, 19 nt, Artificial Sequence
  Description of Artificial Sequence: Synthetic oligonucleotide
agaucauggaaugucaggc

SEQ ID NO: 275300 - RNA, 19 nt, Artificial Sequence
  Description of Artificial Sequence: Synthetic oligonucleotide
uggaccacagguuaacucg

SEQ ID NO: 275301 - RNA, 19 nt, Artificial Sequence
  Description of Artificial Sequence: Synthetic oligonucleotide
ucugaguugugcuuuaccc

SEQ ID NO: 275302 - RNA, 19 nt, Artificial Sequence
  Description of Artificial Sequence: Synthetic oligonucleotide
uaggagauacucauugggg

SEQ ID NO: 275303 - RNA, 19 nt, Artificial Sequence
  Description of Artificial Sequence: Synthetic oligonucleotide
aauggauugugcuuucccu

SEQ ID NO: 275304 - RNA, 19 nt, Artificial Sequence
  Description of Artificial Sequence: Synthetic oligonucleotide
agauccgacaaucaaguug

SEQ ID NO: 275305 - RNA, 19 nt, Artificial Sequence
  Description of Artificial Sequence: Synthetic oligonucleotide
uccgcuaccaagcagcagc

SEQ ID NO: 275306 - RNA, 19 nt, Artificial Sequence
  Description of Artificial Sequence: Synthetic oligonucleotide
ucauccgcuaccaagcagc

SEQ ID NO: 275307 - RNA, 19 nt, Artificial Sequence
  Description of Artificial Sequence: Synthetic oligonucleotide
ugccuggugguuuagauca

SEQ ID NO: 275308 - RNA, 19 nt, Artificial Sequence
  Description of Artificial Sequence: Synthetic oligonucleotide
uugcgaaucugugacaugg

SEQ ID NO: 275309 - RNA, 19 nt, Artificial Sequence
  Description of Artificial Sequence: Synthetic oligonucleotide
accauagacacgcagugag

SEQ ID NO: 275310 - RNA, 19 nt, Artificial Sequence
  Description of Artificial Sequence: Synthetic oligonucleotide
augggcgacaaucucuugc

SEQ ID NO: 275311 - RNA, 19 nt, Artificial Sequence
  Description of Artificial Sequence: Synthetic oligonucleotide
ugugcggagaauuuuggca

SEQ ID NO: 275312 - RNA, 19 nt, Artificial Sequence
  Description of Artificial Sequence: Synthetic oligonucleotide
gaugcaguuaggcuuguug

SEQ ID NO: 275313 - RNA, 19 nt, Artificial Sequence
  Description of Artificial Sequence: Synthetic oligonucleotide
aaaucugccugauaaguua

SEQ ID NO: 275314 - RNA, 19 nt, Artificial Sequence
  Description of Artificial Sequence: Synthetic oligonucleotide
ucauagaugcggcggagag

SEQ ID NO: 275315 - RNA, 19 nt, Artificial Sequence
  Description of Artificial Sequence: Synthetic oligonucleotide
guuaacucggcagucaucc

SEQ ID NO: 275316 - RNA, 19 nt, Artificial Sequence
  Description of Artificial Sequence: Synthetic oligonucleotide
aaaauggauugugcuuucc

SEQ ID NO: 275317 - RNA, 19 nt, Artificial Sequence
  Description of Artificial Sequence: Synthetic oligonucleotide
cuugccggcugucagaucc

SEQ ID NO: 275318 - RNA, 19 nt, Artificial Sequence
  Description of Artificial Sequence: Synthetic oligonucleotide
guuguuugaagcacagucg

SEQ ID NO: 275319 - RNA, 19 nt, Artificial Sequence
  Description of Artificial Sequence: Synthetic oligonucleotide
ucuugaguuguuugaagca

SEQ ID NO: 275320 - RNA, 19 nt, Artificial Sequence
  Description of Artificial Sequence: Synthetic oligonucleotide
ugaguuguuugaagcacag

SEQ ID NO: 275321 - RNA, 19 nt, Artificial Sequence
  Description of Artificial Sequence: Synthetic oligonucleotide
aaugggcucauuccgugug

SEQ ID NO: 275322 - RNA, 19 nt, Artificial Sequence
  Description of Artificial Sequence: Synthetic oligonucleotide
ugauauuuguguccuggga

SEQ ID NO: 275323 - RNA, 19 nt, Artificial Sequence
  Description of Artificial Sequence: Synthetic oligonucleotide
accauagggguggaaaucc

SEQ ID NO: 275324 - RNA, 19 nt, Artificial Sequence
  Description of Artificial Sequence: Synthetic oligonucleotide
accaguggccaacagucgc

SEQ ID NO: 275325 - RNA, 19 nt, Artificial Sequence
  Description of Artificial Sequence: Synthetic oligonucleotide
acacauugcuggcaugggc

SEQ ID NO: 275326 - RNA, 19 nt, Artificial Sequence
  Description of Artificial Sequence: Synthetic oligonucleotide
aaagcagcgcucaggcucc

SEQ ID NO: 275327 - RNA, 19 nt, Artificial Sequence
  Description of Artificial Sequence: Synthetic oligonucleotide
acuuguguagccucuccuc

SEQ ID NO: 275328 - RNA, 19 nt, Artificial Sequence
  Description of Artificial Sequence: Synthetic oligonucleotide
aguguugaggcggacacuc

SEQ ID NO: 275329 - RNA, 19 nt, Artificial Sequence
  Description of Artificial Sequence: Synthetic oligonucleotide
auaaguuacagcagcagcu

SEQ ID NO: 275330 - RNA, 19 nt, Artificial Sequence
  Description of Artificial Sequence: Synthetic oligonucleotide
gauugugcuuucccugugg

SEQ ID NO: 275331 - RNA, 19 nt, Artificial Sequence
  Description of Artificial Sequence: Synthetic oligonucleotide
uguguagccucuccucccg

SEQ ID NO: 275332 - RNA, 19 nt, Artificial Sequence
  Description of Artificial Sequence: Synthetic oligonucleotide
uuuagaucauccgcuacca

SEQ ID NO: 275333 - RNA, 19 nt, Artificial Sequence
  Description of Artificial Sequence: Synthetic oligonucleotide
gagaaggccacaccuauca

SEQ ID NO: 275334 - RNA, 19 nt, Artificial Sequence
  Description of Artificial Sequence: Synthetic oligonucleotide
ggcuaugucauccucuggg

SEQ ID NO: 275335 - RNA, 19 nt, Artificial Sequence
  Description of Artificial Sequence: Synthetic oligonucleotide
caaacuggccaugaguagg

SEQ ID NO: 275336 - RNA, 19 nt, Artificial Sequence
  Description of Artificial Sequence: Synthetic oligonucleotide
auggaccacagguuaacuc

SEQ ID NO: 275337 - RNA, 19 nt, Artificial Sequence
  Description of Artificial Sequence: Synthetic oligonucleotide
agggcuaaaccgaagacag

SEQ ID NO: 275338 - RNA, 19 nt, Artificial Sequence
  Description of Artificial Sequence: Synthetic oligonucleotide
cagaucauggaaugucagg

SEQ ID NO: 275339 - RNA, 19 nt, Artificial Sequence
  Description of Artificial Sequence: Synthetic oligonucleotide
ggcuaaaccgaagacagcg

SEQ ID NO: 275340 - RNA, 19 nt, Artificial Sequence
  Description of Artificial Sequence: Synthetic oligonucleotide
aggaguggcagucaagacu

SEQ ID NO: 275341 - RNA, 19 nt, Artificial Sequence
  Description of Artificial Sequence: Synthetic oligonucleotide
ggugguuuagaucauccgc

SEQ ID NO: 275342 - RNA, 19 nt, Artificial Sequence
  Description of Artificial Sequence: Synthetic oligonucleotide
agaugcggcggagagagac

SEQ ID NO: 275343 - RNA, 19 nt, Artificial Sequence
  Description of Artificial Sequence: Synthetic oligonucleotide
accggcuacgaugagcucc

SEQ ID NO: 275344 - RNA, 19 nt, Artificial Sequence
  Description of Artificial Sequence: Synthetic oligonucleotide
caugucagugaugaggggc

SEQ ID NO: 275345 - RNA, 19 nt, Artificial Sequence
  Description of Artificial Sequence: Synthetic oligonucleotide
agcgcucaggcucccaacc

SEQ ID NO: 275346 - RNA, 19 nt, Artificial Sequence
  Description of Artificial Sequence: Synthetic oligonucleotide
caaguuggcagggaguucc

SEQ ID NO: 275347 - RNA, 19 nt, Artificial Sequence
  Description of Artificial Sequence: Synthetic oligonucleotide
ccaacagucgcccugacgc

SEQ ID NO: 275348 - RNA, 19 nt, Artificial Sequence
  Description of Artificial Sequence: Synthetic oligonucleotide
ugggcguacagcgaacugg

SEQ ID NO: 275349 - RNA, 19 nt, Artificial Sequence
  Description of Artificial Sequence: Synthetic oligonucleotide
caaucaaguuggcagggag

SEQ ID NO: 275350 - RNA, 19 nt, Artificial Sequence
  Description of Artificial Sequence: Synthetic oligonucleotide
gaugugugaccugucaggc

SEQ ID NO: 275351 - RNA, 19 nt, Artificial Sequence
  Description of Artificial Sequence: Synthetic oligonucleotide
gaagcaaaacugcacagcu

SEQ ID NO: 275352 - RNA, 19 nt, Artificial Sequence
  Description of Artificial Sequence: Synthetic oligonucleotide
uccggugugaccagggaac

SEQ ID NO: 275353 - RNA, 19 nt, Artificial Sequence
  Description of Artificial Sequence: Synthetic oligonucleotide
ccgacaaucaaguuggcag

SEQ ID NO: 275354 - RNA, 19 nt, Artificial Sequence
  Description of Artificial Sequence: Synthetic oligonucleotide
ccacaaauucaccauaggg

SEQ ID NO: 275355 - RNA, 19 nt, Artificial Sequence
  Description of Artificial Sequence: Synthetic oligonucleotide
uuggggugaaacuccacca

SEQ ID NO: 275356 - RNA, 19 nt, Artificial Sequence
  Description of Artificial Sequence: Synthetic oligonucleotide
uguuugaagcacagucggc

SEQ ID NO: 275357 - RNA, 19 nt, Artificial Sequence
  Description of Artificial Sequence: Synthetic oligonucleotide
uacugggccgcucauagau

SEQ ID NO: 275358 - RNA, 19 nt, Artificial Sequence
  Description of Artificial Sequence: Synthetic oligonucleotide
ugggaaccggcuacgauga

SEQ ID NO: 275359 - RNA, 19 nt, Artificial Sequence
  Description of Artificial Sequence: Synthetic oligonucleotide
acaaaauggauugugcuuu

SEQ ID NO: 275360 - RNA, 19 nt, Artificial Sequence
  Description of Artificial Sequence: Synthetic oligonucleotide
uucacggcaggcaggaagu

SEQ ID NO: 275361 - RNA, 19 nt, Artificial Sequence
  Description of Artificial Sequence: Synthetic oligonucleotide
aaaccgaagacagcgcaca

SEQ ID NO: 275362 - RNA, 19 nt, Artificial Sequence
  Description of Artificial Sequence: Synthetic oligonucleotide
cagucaagacuggagaccg

SEQ ID NO: 275363 - RNA, 19 nt, Artificial Sequence
  Description of Artificial Sequence: Synthetic oligonucleotide
aguguaaggugugagggcu

SEQ ID NO: 275364 - RNA, 19 nt, Artificial Sequence
  Description of Artificial Sequence: Synthetic oligonucleotide
uuugaagcacagucggcac

SEQ ID NO: 275365 - RNA, 19 nt, Artificial Sequence
  Description of Artificial Sequence: Synthetic oligonucleotide
ugugacauggcauccucau

SEQ ID NO: 275366 - RNA, 19 nt, Artificial Sequence
  Description of Artificial Sequence: Synthetic oligonucleotide
uguaggaguggcagucaag

SEQ ID NO: 275367 - RNA, 19 nt, Artificial Sequence
  Description of Artificial Sequence: Synthetic oligonucleotide
gaagcuaggagauacucau

SEQ ID NO: 275368 - RNA, 19 nt, Artificial Sequence
  Description of Artificial Sequence: Synthetic oligonucleotide
aaucgcugcaggaucagcu

SEQ ID NO: 275369 - RNA, 19 nt, Artificial Sequence
  Description of Artificial Sequence: Synthetic oligonucleotide
acgaggacacauugcuggc

SEQ ID NO: 275370 - RNA, 19 nt, Artificial Sequence
  Description of Artificial Sequence: Synthetic oligonucleotide
auagcucucauacuugcuu

SEQ ID NO: 275371 - RNA, 19 nt, Artificial Sequence
  Description of Artificial Sequence: Synthetic oligonucleotide
gaguccccagcugugaagg

SEQ ID NO: 275372 - RNA, 19 nt, Artificial Sequence
  Description of Artificial Sequence: Synthetic oligonucleotide
ucgagauuuggcaccggca

SEQ ID NO: 275373 - RNA, 19 nt, Artificial Sequence
  Description of Artificial Sequence: Synthetic oligonucleotide
ugggcgacaaucucuugca

SEQ ID NO: 275374 - RNA, 19 nt, Artificial Sequence
  Description of Artificial Sequence: Synthetic oligonucleotide
aacugcggcaacugcacau

SEQ ID NO: 275375 - RNA, 19 nt, Artificial Sequence
  Description of Artificial Sequence: Synthetic oligonucleotide
auagggguggaaauccagg

SEQ ID NO: 275376 - RNA, 19 nt, Artificial Sequence
  Description of Artificial Sequence: Synthetic oligonucleotide
uccucaguccaaacuggcc

SEQ ID NO: 275377 - RNA, 19 nt, Artificial Sequence
  Description of Artificial Sequence: Synthetic oligonucleotide
cucauacuugcuuuggaga

SEQ ID NO: 275378 - RNA, 19 nt, Artificial Sequence
  Description of Artificial Sequence: Synthetic oligonucleotide
uucaccauagggguggaaa

SEQ ID NO: 275379 - RNA, 19 nt, Artificial Sequence
  Description of Artificial Sequence: Synthetic oligonucleotide
aaucaaguuggcagggagu

SEQ ID NO: 275380 - RNA, 19 nt, Artificial Sequence
  Description of Artificial Sequence: Synthetic oligonucleotide
guuugaagcacagucggca

SEQ ID NO: 275381 - RNA, 19 nt, Artificial Sequence
  Description of Artificial Sequence: Synthetic oligonucleotide
gaccucgagauuuggcacc

SEQ ID NO: 275382 - RNA, 19 nt, Artificial Sequence
  Description of Artificial Sequence: Synthetic oligonucleotide
ggugacucucgucaggucc

SEQ ID NO: 275383 - RNA, 19 nt, Artificial Sequence
  Description of Artificial Sequence: Synthetic oligonucleotide
cugggccgcucauagaugc

SEQ ID NO: 275384 - RNA, 19 nt, Artificial Sequence
  Description of Artificial Sequence: Synthetic oligonucleotide
ugacgccuugcccagcacc

SEQ ID NO: 275385 - RNA, 19 nt, Artificial Sequence
  Description of Artificial Sequence: Synthetic oligonucleotide
uguugaggcggacacucuc

SEQ ID NO: 275386 - RNA, 19 nt, Artificial Sequence
  Description of Artificial Sequence: Synthetic oligonucleotide
aaccgaagacagcgcacag

SEQ ID NO: 275387 - RNA, 19 nt, Artificial Sequence
  Description of Artificial Sequence: Synthetic oligonucleotide
guugauggaccacagguua

SEQ ID NO: 275388 - RNA, 19 nt, Artificial Sequence
  Description of Artificial Sequence: Synthetic oligonucleotide
cuauaucggaagacacagc

SEQ ID NO: 275389 - RNA, 19 nt, Artificial Sequence
  Description of Artificial Sequence: Synthetic oligonucleotide
cuuugcuguggcuauguca

SEQ ID NO: 275390 - RNA, 19 nt, Artificial Sequence
  Description of Artificial Sequence: Synthetic oligonucleotide
aggguuggaggucugcugu

SEQ ID NO: 275391 - RNA, 19 nt, Artificial Sequence
  Description of Artificial Sequence: Synthetic oligonucleotide
ccuauaucggaagacacag

SEQ ID NO: 275392 - RNA, 19 nt, Artificial Sequence
  Description of Artificial Sequence: Synthetic oligonucleotide
uggggugaaacuccaccac

SEQ ID NO: 275393 - RNA, 19 nt, Artificial Sequence
  Description of Artificial Sequence: Synthetic oligonucleotide
uguaaggugugagggcugc

SEQ ID NO: 275394 - RNA, 19 nt, Artificial Sequence
  Description of Artificial Sequence: Synthetic oligonucleotide
uguccccuauaucggaaga

SEQ ID NO: 275395 - RNA, 19 nt, Artificial Sequence
  Description of Artificial Sequence: Synthetic oligonucleotide
aaacagcagccaucggggu

SEQ ID NO: 275396 - RNA, 19 nt, Artificial Sequence
  Description of Artificial Sequence: Synthetic oligonucleotide
guaggugcagcucacggaa

SEQ ID NO: 275397 - RNA, 19 nt, Artificial Sequence
  Description of Artificial Sequence: Synthetic oligonucleotide
accgaagacagcgcacagc

SEQ ID NO: 275398 - RNA, 19 nt, Artificial Sequence
  Description of Artificial Sequence: Synthetic oligonucleotide
aucauccgcuaccaagcag

SEQ ID NO: 275399 - RNA, 19 nt, Artificial Sequence
  Description of Artificial Sequence: Synthetic oligonucleotide
ucaccauagggguggaaau

SEQ ID NO: 275400 - RNA, 19 nt, Artificial Sequence
  Description of Artificial Sequence: Synthetic oligonucleotide
cucgagauuuggcaccggc

SEQ ID NO: 275401 - RNA, 19 nt, Artificial Sequence
  Description of Artificial Sequence: Synthetic oligonucleotide
uaaggugugagggcugcug

SEQ ID NO: 275402 - RNA, 19 nt, Artificial Sequence
  Description of Artificial Sequence: Synthetic oligonucleotide
acguugacagguccggugu

SEQ ID NO: 275403 - RNA, 19 nt, Artificial Sequence
  Description of Artificial Sequence: Synthetic oligonucleotide
acgcagugaguccuggcag

SEQ ID NO: 275404 - RNA, 19 nt, Artificial Sequence
  Description of Artificial Sequence: Synthetic oligonucleotide
aaacuggccaugaguaggu

SEQ ID NO: 275405 - RNA, 19 nt, Artificial Sequence
  Description of Artificial Sequence: Synthetic oligonucleotide
ugcgaaucugugacauggc

SEQ ID NO: 275406 - RNA, 19 nt, Artificial Sequence
  Description of Artificial Sequence: Synthetic oligonucleotide
acagguuaacucggcaguc

SEQ ID NO: 275407 - RNA, 19 nt, Artificial Sequence
  Description of Artificial Sequence: Synthetic oligonucleotide
uuugugccccaugagugug

SEQ ID NO: 275408 - RNA, 19 nt, Artificial Sequence
  Description of Artificial Sequence: Synthetic oligonucleotide
agugugcggagaauuuugg

SEQ ID NO: 275409 - RNA, 19 nt, Artificial Sequence
  Description of Artificial Sequence: Synthetic oligonucleotide
uugaggcggacacucucca

SEQ ID NO: 275410 - RNA, 19 nt, Artificial Sequence
  Description of Artificial Sequence: Synthetic oligonucleotide
gagauacucauugggguga

SEQ ID NO: 275411 - RNA, 19 nt, Artificial Sequence
  Description of Artificial Sequence: Synthetic oligonucleotide
acaugucagugaugagggg

SEQ ID NO: 275412 - RNA, 19 nt, Artificial Sequence
  Description of Artificial Sequence: Synthetic oligonucleotide
agucggcacuuguguagcc

SEQ ID NO: 275413 - RNA, 19 nt, Artificial Sequence
  Description of Artificial Sequence: Synthetic oligonucleotide
ccgaagacagcgcacagcc

SEQ ID NO: 275414 - RNA, 19 nt, Artificial Sequence
  Description of Artificial Sequence: Synthetic oligonucleotide
uguguccccuauaucggaa

SEQ ID NO: 275415 - RNA, 19 nt, Artificial Sequence
  Description of Artificial Sequence: Synthetic oligonucleotide
caagaccccacccacaaaa

SEQ ID NO: 275416 - RNA, 19 nt, Artificial Sequence
  Description of Artificial Sequence: Synthetic oligonucleotide
cauacuugcuuuggagaag

SEQ ID NO: 275417 - RNA, 19 nt, Artificial Sequence
  Description of Artificial Sequence: Synthetic oligonucleotide
aagcacagucggcacuugu

SEQ ID NO: 275418 - RNA, 19 nt, Artificial Sequence
  Description of Artificial Sequence: Synthetic oligonucleotide
accacguaagaggagacau

SEQ ID NO: 275419 - RNA, 19 nt, Artificial Sequence
  Description of Artificial Sequence: Synthetic oligonucleotide
caaaauggauugugcuuuc

SEQ ID NO: 275420 - RNA, 19 nt, Artificial Sequence
  Description of Artificial Sequence: Synthetic oligonucleotide
aaccauagacacgcaguga

SEQ ID NO: 275421 - RNA, 19 nt, Artificial Sequence
  Description of Artificial Sequence: Synthetic oligonucleotide
ugugccccaugagugugcg

SEQ ID NO: 275422 - RNA, 19 nt, Artificial Sequence
  Description of Artificial Sequence: Synthetic oligonucleotide
agaagcuaggagauacuca

SEQ ID NO: 275423 - RNA, 19 nt, Artificial Sequence
  Description of Artificial Sequence: Synthetic oligonucleotide
cacguugacagguccggug

SEQ ID NO: 275424 - RNA, 19 nt, Artificial Sequence
  Description of Artificial Sequence: Synthetic oligonucleotide
gccuuugcgaaucugugac

SEQ ID NO: 275425 - RNA, 19 nt, Artificial Sequence
  Description of Artificial Sequence: Synthetic oligonucleotide
caccacguugacagguccg

SEQ ID NO: 275426 - RNA, 19 nt, Artificial Sequence
  Description of Artificial Sequence: Synthetic oligonucleotide
uccgacaaucaaguuggca

SEQ ID NO: 275427 - RNA, 19 nt, Artificial Sequence
  Description of Artificial Sequence: Synthetic oligonucleotide
acugcggcaacugcacauc

SEQ ID NO: 275428 - RNA, 19 nt, Artificial Sequence
  Description of Artificial Sequence: Synthetic oligonucleotide
ugguuuagaucauccgcua

SEQ ID NO: 275429 - RNA, 19 nt, Artificial Sequence
  Description of Artificial Sequence: Synthetic oligonucleotide
augcggcggagagagacac

SEQ ID NO: 275430 - RNA, 19 nt, Artificial Sequence
  Description of Artificial Sequence: Synthetic oligonucleotide
gugugcggagaauuuuggc

SEQ ID NO: 275431 - RNA, 19 nt, Artificial Sequence
  Description of Artificial Sequence: Synthetic oligonucleotide
gaucauccgcuaccaagca

SEQ ID NO: 275432 - RNA, 19 nt, Artificial Sequence
  Description of Artificial Sequence: Synthetic oligonucleotide
aacuggaguguaaggugug

SEQ ID NO: 275433 - RNA, 19 nt, Artificial Sequence
  Description of Artificial Sequence: Synthetic oligonucleotide
cagccuguacacauagguc

SEQ ID NO: 275434 - RNA, 19 nt, Artificial Sequence
  Description of Artificial Sequence: Synthetic oligonucleotide
acccggucuggacauagcu

SEQ ID NO: 275435 - RNA, 19 nt, Artificial Sequence
  Description of Artificial Sequence: Synthetic oligonucleotide
caacgaggacacauugcug

SEQ ID NO: 275436 - RNA, 19 nt, Artificial Sequence
  Description of Artificial Sequence: Synthetic oligonucleotide
uugggcguacagcgaacug

SEQ ID NO: 275437 - RNA, 19 nt, Artificial Sequence
  Description of Artificial Sequence: Synthetic oligonucleotide
cagcagccuguacacauag

SEQ ID NO: 275438 - RNA, 19 nt, Artificial Sequence
  Description of Artificial Sequence: Synthetic oligonucleotide
ugacugggaaccggcuacg

SEQ ID NO: 275439 - RNA, 19 nt, Artificial Sequence
  Description of Artificial Sequence: Synthetic oligonucleotide
guguccccuauaucggaag

SEQ ID NO: 275440 - RNA, 19 nt, Artificial Sequence
  Description of Artificial Sequence: Synthetic oligonucleotide
guugaggcggacacucucc

SEQ ID NO: 275441 - RNA, 19 nt, Artificial Sequence
  Description of Artificial Sequence: Synthetic oligonucleotide
cagcucaacacugggcugc

SEQ ID NO: 275442 - RNA, 19 nt, Artificial Sequence
  Description of Artificial Sequence: Synthetic oligonucleotide
uggagaccgggcugggacc

SEQ ID NO: 275443 - RNA, 19 nt, Artificial Sequence
  Description of Artificial Sequence: Synthetic oligonucleotide
ugcggcaacugcacaucca

SEQ ID NO: 275444 - RNA, 19 nt, Artificial Sequence
  Description of Artificial Sequence: Synthetic oligonucleotide
acguaagaggagacauuac

SEQ ID NO: 275445 - RNA, 19 nt, Artificial Sequence
  Description of Artificial Sequence: Synthetic oligonucleotide
gggaugugugaccugucag

SEQ ID NO: 275446 - RNA, 19 nt, Artificial Sequence
  Description of Artificial Sequence: Synthetic oligonucleotide
aggucuaccaccacggaua

SEQ ID NO: 275447 - RNA, 19 nt, Artificial Sequence
  Description of Artificial Sequence: Synthetic oligonucleotide
accucgagauuuggcaccg

SEQ ID NO: 275448 - RNA, 19 nt, Artificial Sequence
  Description of Artificial Sequence: Synthetic oligonucleotide
cagccaucgggguugaaga

SEQ ID NO: 275449 - RNA, 19 nt, Artificial Sequence
  Description of Artificial Sequence: Synthetic oligonucleotide
gggaccucgagauuuggca

SEQ ID NO: 275450 - RNA, 19 nt, Artificial Sequence
  Description of Artificial Sequence: Synthetic oligonucleotide
uaucaccugugguccacac

SEQ ID NO: 275451 - RNA, 19 nt, Artificial Sequence
  Description of Artificial Sequence: Synthetic oligonucleotide
ucagggacgugcacccggu

SEQ ID NO: 275452 - RNA, 19 nt, Artificial Sequence
  Description of Artificial Sequence: Synthetic oligonucleotide
gaaccggcuacgaugagcu

SEQ ID NO: 275453 - RNA, 19 nt, Artificial Sequence
  Description of Artificial Sequence: Synthetic oligonucleotide
gcucaugaugcaguuaggc

SEQ ID NO: 275454 - RNA, 19 nt, Artificial Sequence
  Description of Artificial Sequence: Synthetic oligonucleotide
auggccaucugggcaagag

SEQ ID NO: 275455 - RNA, 19 nt, Artificial Sequence
  Description of Artificial Sequence: Synthetic oligonucleotide
agcggauuguccugucaga

SEQ ID NO: 275456 - RNA, 19 nt, Artificial Sequence
  Description of Artificial Sequence: Synthetic oligonucleotide
guggccaacagucgcccug

SEQ ID NO: 275457 - RNA, 19 nt, Artificial Sequence
  Description of Artificial Sequence: Synthetic oligonucleotide
ggcgacaaucucuugcaac

SEQ ID NO: 275458 - RNA, 19 nt, Artificial Sequence
  Description of Artificial Sequence: Synthetic oligonucleotide
cgacaaucaaguuggcagg

SEQ ID NO: 275459 - RNA, 19 nt, Artificial Sequence
  Description of Artificial Sequence: Synthetic oligonucleotide
ucggaagacacagccuuuc

SEQ ID NO: 275460 - RNA, 19 nt, Artificial Sequence
  Description of Artificial Sequence: Synthetic oligonucleotide
aaccggcuacgaugagcuc

SEQ ID NO: 275461 - RNA, 19 nt, Artificial Sequence
  Description of Artificial Sequence: Synthetic oligonucleotide
ugagugugcggagaauuuu

SEQ ID NO: 275462 - RNA, 19 nt, Artificial Sequence
  Description of Artificial Sequence: Synthetic oligonucleotide
gguuuagaucauccgcuac

SEQ ID NO: 275463 - RNA, 19 nt, Artificial Sequence
  Description of Artificial Sequence: Synthetic oligonucleotide
ccacagguuaacucggcag

SEQ ID NO: 275464 - RNA, 19 nt, Artificial Sequence
  Description of Artificial Sequence: Synthetic oligonucleotide
ugagcaccacacacauggu

SEQ ID NO: 275465 - RNA, 19 nt, Artificial Sequence
  Description of Artificial Sequence: Synthetic oligonucleotide
gugguuuagaucauccgcu

SEQ ID NO: 275466 - RNA, 19 nt, Artificial Sequence
  Description of Artificial Sequence: Synthetic oligonucleotide
ccagaucauggaaugucag

SEQ ID NO: 275467 - RNA, 19 nt, Artificial Sequence
  Description of Artificial Sequence: Synthetic oligonucleotide
gaaucgcugcaggaucagc

SEQ ID NO: 275468 - RNA, 19 nt, Artificial Sequence
  Description of Artificial Sequence: Synthetic oligonucleotide
aggaaguugugagucccca

SEQ ID NO: 275469 - RNA, 19 nt, Artificial Sequence
  Description of Artificial Sequence: Synthetic oligonucleotide
cagggcuaaaccgaagaca

SEQ ID NO: 275470 - RNA, 19 nt, Artificial Sequence
  Description of Artificial Sequence: Synthetic oligonucleotide
ucgcccugacgccuugccc

SEQ ID NO: 275471 - RNA, 19 nt, Artificial Sequence
  Description of Artificial Sequence: Synthetic oligonucleotide
ggaccucgagauuuggcac

SEQ ID NO: 275472 - RNA, 19 nt, Artificial Sequence
  Description of Artificial Sequence: Synthetic oligonucleotide
ggccacaaauucaccauag

SEQ ID NO: 275473 - RNA, 19 nt, Artificial Sequence
  Description of Artificial Sequence: Synthetic oligonucleotide
caaugcagcucaccaccug

SEQ ID NO: 275474 - RNA, 19 nt, Artificial Sequence
  Description of Artificial Sequence: Synthetic oligonucleotide
aauucaccauaggggugga

SEQ ID NO: 275475 - RNA, 19 nt, Artificial Sequence
  Description of Artificial Sequence: Synthetic oligonucleotide
gcagucaagacuggagacc

SEQ ID NO: 275476 - RNA, 19 nt, Artificial Sequence
  Description of Artificial Sequence: Synthetic oligonucleotide
gaccugacuugcucuugac

SEQ ID NO: 275477 - RNA, 19 nt, Artificial Sequence
  Description of Artificial Sequence: Synthetic oligonucleotide
agacagcgcacagccuggc

SEQ ID NO: 275478 - RNA, 19 nt, Artificial Sequence
  Description of Artificial Sequence: Synthetic oligonucleotide
aggccacaaauucaccaua

SEQ ID NO: 275479 - RNA, 19 nt, Artificial Sequence
  Description of Artificial Sequence: Synthetic oligonucleotide
guccaaacuggccaugagu

SEQ ID NO: 275480 - RNA, 19 nt, Artificial Sequence
  Description of Artificial Sequence: Synthetic oligonucleotide
guucuuguggcggcuggug

SEQ ID NO: 275481 - RNA, 19 nt, Artificial Sequence
  Description of Artificial Sequence: Synthetic oligonucleotide
cgaacuggaguguaaggug

SEQ ID NO: 275482 - RNA, 19 nt, Artificial Sequence
  Description of Artificial Sequence: Synthetic oligonucleotide
cagucggcacuuguguagc

SEQ ID NO: 275483 - RNA, 19 nt, Artificial Sequence
  Description of Artificial Sequence: Synthetic oligonucleotide
cugcggcaacugcacaucc

SEQ ID NO: 275484 - RNA, 19 nt, Artificial Sequence
  Description of Artificial Sequence: Synthetic oligonucleotide
cacaaaauggauugugcuu

SEQ ID NO: 275485 - RNA, 19 nt, Artificial Sequence
  Description of Artificial Sequence: Synthetic oligonucleotide
aacuggccaugaguaggug

SEQ ID NO: 275486 - RNA, 19 nt, Artificial Sequence
  Description of Artificial Sequence: Synthetic oligonucleotide
uugccggcugucagauccc

SEQ ID NO: 275487 - RNA, 19 nt, Artificial Sequence
  Description of Artificial Sequence: Synthetic oligonucleotide
uuuacccucugaggcuugu

SEQ ID NO: 275488 - RNA, 19 nt, Artificial Sequence
  Description of Artificial Sequence: Synthetic oligonucleotide
caggcagucuuggugacca

SEQ ID NO: 275489 - RNA, 19 nt, Artificial Sequence
  Description of Artificial Sequence: Synthetic oligonucleotide
uacagcgaacuggagugua

SEQ ID NO: 275490 - RNA, 19 nt, Artificial Sequence
  Description of Artificial Sequence: Synthetic oligonucleotide
ggaaccggcuacgaugagc

SEQ ID NO: 275491 - RNA, 19 nt, Artificial Sequence
  Description of Artificial Sequence: Synthetic oligonucleotide
acagguccggugugaccag

SEQ ID NO: 275492 - RNA, 19 nt, Artificial Sequence
  Description of Artificial Sequence: Synthetic oligonucleotide
caccauagggguggaaauc

SEQ ID NO: 275493 - RNA, 19 nt, Artificial Sequence
  Description of Artificial Sequence: Synthetic oligonucleotide
uggcacccaagaccccacc

SEQ ID NO: 275494 - RNA, 19 nt, Artificial Sequence
  Description of Artificial Sequence: Synthetic oligonucleotide
ucgcgcucgucccugucau

SEQ ID NO: 275495 - RNA, 19 nt, Artificial Sequence
  Description of Artificial Sequence: Synthetic oligonucleotide
ucaaguuggcagggaguuc

SEQ ID NO: 275496 - RNA, 19 nt, Artificial Sequence
  Description of Artificial Sequence: Synthetic oligonucleotide
cacagguuaacucggcagu

SEQ ID NO: 275497 - RNA, 19 nt, Artificial Sequence
  Description of Artificial Sequence: Synthetic oligonucleotide
gcggauuguccugucagag

SEQ ID NO: 275498 - RNA, 19 nt, Artificial Sequence
  Description of Artificial Sequence: Synthetic oligonucleotide
cuggcgacgcugucuccag

SEQ ID NO: 275499 - RNA, 19 nt, Artificial Sequence
  Description of Artificial Sequence: Synthetic oligonucleotide
ccccuauaucggaagacac

SEQ ID NO: 275500 - RNA, 19 nt, Artificial Sequence
  Description of Artificial Sequence: Synthetic oligonucleotide
agucaagacuggagaccgg

SEQ ID NO: 275501 - RNA, 19 nt, Artificial Sequence
  Description of Artificial Sequence: Synthetic oligonucleotide
acuucgccggggcgguguc

SEQ ID NO: 275502 - RNA, 19 nt, Artificial Sequence
  Description of Artificial Sequence: Synthetic oligonucleotide
guugcccugagaagcaaaa

SEQ ID NO: 275503 - RNA, 19 nt, Artificial Sequence
  Description of Artificial Sequence: Synthetic oligonucleotide
caagacuggagaccgggcu

SEQ ID NO: 275504 - RNA, 19 nt, Artificial Sequence
  Description of Artificial Sequence: Synthetic oligonucleotide
ugggcuggcgacgcugucu

SEQ ID NO: 275505 - RNA, 19 nt, Artificial Sequence
  Description of Artificial Sequence: Synthetic oligonucleotide
cauugcagauggccagguc

SEQ ID NO: 275506 - RNA, 19 nt, Artificial Sequence
  Description of Artificial Sequence: Synthetic oligonucleotide
cuguguccccuauaucgga

SEQ ID NO: 275507 - RNA, 19 nt, Artificial Sequence
  Description of Artificial Sequence: Synthetic oligonucleotide
gucgcccugacgccuugcc

SEQ ID NO: 275508 - RNA, 19 nt, Artificial Sequence
  Description of Artificial Sequence: Synthetic oligonucleotide
cuaccaagcagcagccugu

SEQ ID NO: 275509 - RNA, 19 nt, Artificial Sequence
  Description of Artificial Sequence: Synthetic oligonucleotide
acacagccuuuccuccuga

SEQ ID NO: 275510 - RNA, 19 nt, Artificial Sequence
  Description of Artificial Sequence: Synthetic oligonucleotide
accaccacggauaggucau

SEQ ID NO: 275511 - RNA, 19 nt, Artificial Sequence
  Description of Artificial Sequence: Synthetic oligonucleotide
acgcggauggagccugacu

SEQ ID NO: 275512 - RNA, 19 nt, Artificial Sequence
  Description of Artificial Sequence: Synthetic oligonucleotide
cgcggauggagccugacug

SEQ ID NO: 275513 - RNA, 19 nt, Artificial Sequence
  Description of Artificial Sequence: Synthetic oligonucleotide
cuuugcgaaucugugacau

SEQ ID NO: 275514 - RNA, 19 nt, Artificial Sequence
  Description of Artificial Sequence: Synthetic oligonucleotide
auccgacaaucaaguuggc

SEQ ID NO: 275515 - RNA, 19 nt, Artificial Sequence
  Description of Artificial Sequence: Synthetic oligonucleotide
auaucaccugugguccaca

SEQ ID NO: 275516 - RNA, 19 nt, Artificial Sequence
  Description of Artificial Sequence: Synthetic oligonucleotide
cuuugugccccaugagugu

SEQ ID NO: 275517 - RNA, 19 nt, Artificial Sequence
  Description of Artificial Sequence: Synthetic oligonucleotide
cugggaccucgagauuugg

SEQ ID NO: 275518 - RNA, 19 nt, Artificial Sequence
  Description of Artificial Sequence: Synthetic oligonucleotide
gccgcucauagaugcggcg

SEQ ID NO: 275519 - RNA, 19 nt, Artificial Sequence
  Description of Artificial Sequence: Synthetic oligonucleotide
acucgcgcucgucccuguc

SEQ ID NO: 275520 - RNA, 19 nt, Artificial Sequence
  Description of Artificial Sequence: Synthetic oligonucleotide
guccggugugaccagggaa

SEQ ID NO: 275521 - RNA, 19 nt, Artificial Sequence
  Description of Artificial Sequence: Synthetic oligonucleotide
cauccgcuaccaagcagca

SEQ ID NO: 275522 - RNA, 19 nt, Artificial Sequence
  Description of Artificial Sequence: Synthetic oligonucleotide
guguaaggugugagggcug

SEQ ID NO: 275523 - RNA, 19 nt, Artificial Sequence
  Description of Artificial Sequence: Synthetic oligonucleotide
caccacggauaggucauug

SEQ ID NO: 275524 - RNA, 19 nt, Artificial Sequence
  Description of Artificial Sequence: Synthetic oligonucleotide
ccagaagcggauuguccug

SEQ ID NO: 275525 - RNA, 19 nt, Artificial Sequence
  Description of Artificial Sequence: Synthetic oligonucleotide
cauagaugcggcggagaga

SEQ ID NO: 275526 - RNA, 19 nt, Artificial Sequence
  Description of Artificial Sequence: Synthetic oligonucleotide
gggccgcucauagaugcgg

SEQ ID NO: 275527 - RNA, 19 nt, Artificial Sequence
  Description of Artificial Sequence: Synthetic oligonucleotide
agucgcccugacgccuugc

SEQ ID NO: 275528 - RNA, 19 nt, Artificial Sequence
  Description of Artificial Sequence: Synthetic oligonucleotide
cagacgcggauggagccug

SEQ ID NO: 275529 - RNA, 19 nt, Artificial Sequence
  Description of Artificial Sequence: Synthetic oligonucleotide
aagcuaggagauacucauu

SEQ ID NO: 275530 - RNA, 19 nt, Artificial Sequence
  Description of Artificial Sequence: Synthetic oligonucleotide
ggggaugugugaccuguca

SEQ ID NO: 275531 - RNA, 19 nt, Artificial Sequence
  Description of Artificial Sequence: Synthetic oligonucleotide
ggccuuugcgaaucuguga

SEQ ID NO: 275532 - RNA, 19 nt, Artificial Sequence
  Description of Artificial Sequence: Synthetic oligonucleotide
cauugcuggcaugggcgac

SEQ ID NO: 275533 - RNA, 19 nt, Artificial Sequence
  Description of Artificial Sequence: Synthetic oligonucleotide
gcucccaaccauagacacg

SEQ ID NO: 275534 - RNA, 19 nt, Artificial Sequence
  Description of Artificial Sequence: Synthetic oligonucleotide
gauggaccacagguuaacu

SEQ ID NO: 275535 - RNA, 19 nt, Artificial Sequence
  Description of Artificial Sequence: Synthetic oligonucleotide
ccaacgaggacacauugcu

SEQ ID NO: 275536 - RNA, 19 nt, Artificial Sequence
  Description of Artificial Sequence: Synthetic oligonucleotide
cagguuaacucggcaguca

SEQ ID NO: 275537 - RNA, 19 nt, Artificial Sequence
  Description of Artificial Sequence: Synthetic oligonucleotide
accggcaacugcggcaacu

SEQ ID NO: 275538 - RNA, 19 nt, Artificial Sequence
  Description of Artificial Sequence: Synthetic oligonucleotide
cuguacaaacagcagccau

SEQ ID NO: 275539 - RNA, 19 nt, Artificial Sequence
  Description of Artificial Sequence: Synthetic oligonucleotide
cauuccguguggcagggau

SEQ ID NO: 275540 - RNA, 19 nt, Artificial Sequence
  Description of Artificial Sequence: Synthetic oligonucleotide
acugggccgcucauagaug

SEQ ID NO: 275541 - RNA, 19 nt, Artificial Sequence
  Description of Artificial Sequence: Synthetic oligonucleotide
gccaucucagcucaacacu

SEQ ID NO: 275542 - RNA, 19 nt, Artificial Sequence
  Description of Artificial Sequence: Synthetic oligonucleotide
uuguacugggccgcucaua

SEQ ID NO: 275543 - RNA, 19 nt, Artificial Sequence
  Description of Artificial Sequence: Synthetic oligonucleotide
cuggugcucccacccgcag

SEQ ID NO: 275544 - RNA, 19 nt, Artificial Sequence
  Description of Artificial Sequence: Synthetic oligonucleotide
cagcucguacaguguccag

SEQ ID NO: 275545 - RNA, 19 nt, Artificial Sequence
  Description of Artificial Sequence: Synthetic oligonucleotide
ggcgacgcugucuccagga

SEQ ID NO: 275546 - RNA, 19 nt, Artificial Sequence
  Description of Artificial Sequence: Synthetic oligonucleotide
ggcucacuucgccggggcg

SEQ ID NO: 275547 - RNA, 19 nt, Artificial Sequence
  Description of Artificial Sequence: Synthetic oligonucleotide
aggggaugugugaccuguc

SEQ ID NO: 275548 - RNA, 19 nt, Artificial Sequence
  Description of Artificial Sequence: Synthetic oligonucleotide
caucgggguugaagagaac

SEQ ID NO: 275549 - RNA, 19 nt, Artificial Sequence
  Description of Artificial Sequence: Synthetic oligonucleotide
ggaaucgcugcaggaucag

SEQ ID NO: 275550 - RNA, 19 nt, Artificial Sequence
  Description of Artificial Sequence: Synthetic oligonucleotide
uaccaagcagcagccugua

SEQ ID NO: 275551 - RNA, 19 nt, Artificial Sequence
  Description of Artificial Sequence: Synthetic oligonucleotide
acagcgaacuggaguguaa

SEQ ID NO: 275552 - RNA, 19 nt, Artificial Sequence
  Description of Artificial Sequence: Synthetic oligonucleotide
auccgcuaccaagcagcag

SEQ ID NO: 275553 - RNA, 19 nt, Artificial Sequence
  Description of Artificial Sequence: Synthetic oligonucleotide
ggcuacgaugagcuccuca

SEQ ID NO: 275554 - RNA, 19 nt, Artificial Sequence
  Description of Artificial Sequence: Synthetic oligonucleotide
cagguccggugugaccagg

SEQ ID NO: 275555 - RNA, 19 nt, Artificial Sequence
  Description of Artificial Sequence: Synthetic oligonucleotide
gcguacagcgaacuggagu

SEQ ID NO: 275556 - RNA, 19 nt, Artificial Sequence
  Description of Artificial Sequence: Synthetic oligonucleotide
ccgcuaccaagcagcagcc

SEQ ID NO: 275557 - RNA, 19 nt, Artificial Sequence
  Description of Artificial Sequence: Synthetic oligonucleotide
cucgcgcucgucccuguca

SEQ ID NO: 275558 - RNA, 19 nt, Artificial Sequence
  Description of Artificial Sequence: Synthetic oligonucleotide
gucuaccaccacggauagg

SEQ ID NO: 275559 - RNA, 19 nt, Artificial Sequence
  Description of Artificial Sequence: Synthetic oligonucleotide
ugccggcugucagauccca

SEQ ID NO: 275560 - RNA, 19 nt, Artificial Sequence
  Description of Artificial Sequence: Synthetic oligonucleotide
agcccgggacucgcgcucg

SEQ ID NO: 275561 - RNA, 19 nt, Artificial Sequence
  Description of Artificial Sequence: Synthetic oligonucleotide
ucuugccggcugucagauc

SEQ ID NO: 275562 - RNA, 19 nt, Artificial Sequence
  Description of Artificial Sequence: Synthetic oligonucleotide
gggcguacagcgaacugga

SEQ ID NO: 275563 - RNA, 19 nt, Artificial Sequence
  Description of Artificial Sequence: Synthetic oligonucleotide
gguuaacucggcagucauc

SEQ ID NO: 275564 - RNA, 19 nt, Artificial Sequence
  Description of Artificial Sequence: Synthetic oligonucleotide
cccggucuggacauagcuc

SEQ ID NO: 275565 - RNA, 19 nt, Artificial Sequence
  Description of Artificial Sequence: Synthetic oligonucleotide
ccacaucaaagcagcgcuc

SEQ ID NO: 275566 - RNA, 19 nt, Artificial Sequence
  Description of Artificial Sequence: Synthetic oligonucleotide
gacgcggauggagccugac

SEQ ID NO: 275567 - RNA, 19 nt, Artificial Sequence
  Description of Artificial Sequence: Synthetic oligonucleotide
cuggugacucucgucaggu

SEQ ID NO: 275568 - RNA, 19 nt, Artificial Sequence
  Description of Artificial Sequence: Synthetic oligonucleotide
ccgggacucgcgcucgucc

SEQ ID NO: 275569 - RNA, 19 nt, Artificial Sequence
  Description of Artificial Sequence: Synthetic oligonucleotide
uuacccucugaggcuuguu

SEQ ID NO: 275570 - RNA, 19 nt, Artificial Sequence
  Description of Artificial Sequence: Synthetic oligonucleotide
gguguaggaguggcaguca

SEQ ID NO: 275571 - RNA, 19 nt, Artificial Sequence
  Description of Artificial Sequence: Synthetic oligonucleotide
ugaugcaguuaggcuuguu

SEQ ID NO: 275572 - RNA, 19 nt, Artificial Sequence
  Description of Artificial Sequence: Synthetic oligonucleotide
ggaucccagaucauggaau

SEQ ID NO: 275573 - RNA, 19 nt, Artificial Sequence
  Description of Artificial Sequence: Synthetic oligonucleotide
gggcucacuucgccggggc

SEQ ID NO: 275574 - RNA, 19 nt, Artificial Sequence
  Description of Artificial Sequence: Synthetic oligonucleotide
gacagcgcacagccuggcu

SEQ ID NO: 275575 - RNA, 19 nt, Artificial Sequence
  Description of Artificial Sequence: Synthetic oligonucleotide
guggcacccaagaccccac

SEQ ID NO: 275576 - RNA, 19 nt, Artificial Sequence
  Description of Artificial Sequence: Synthetic oligonucleotide
gggcuaaaccgaagacagc

SEQ ID NO: 275577 - RNA, 19 nt, Artificial Sequence
  Description of Artificial Sequence: Synthetic oligonucleotide
cuugggcguacagcgaacu

SEQ ID NO: 275578 - RNA, 19 nt, Artificial Sequence
  Description of Artificial Sequence: Synthetic oligonucleotide
gguggaaauccaggcugca

SEQ ID NO: 275579 - RNA, 19 nt, Artificial Sequence
  Description of Artificial Sequence: Synthetic oligonucleotide
gggugaaacuccaccacgu

SEQ ID NO: 275580 - RNA, 19 nt, Artificial Sequence
  Description of Artificial Sequence: Synthetic oligonucleotide
gcccugacgccuugcccag

SEQ ID NO: 275581 - RNA, 19 nt, Artificial Sequence
  Description of Artificial Sequence: Synthetic oligonucleotide
ccuugggcguacagcgaac

SEQ ID NO: 275582 - RNA, 19 nt, Artificial Sequence
  Description of Artificial Sequence: Synthetic oligonucleotide
auucaccauagggguggaa

SEQ ID NO: 275583 - RNA, 19 nt, Artificial Sequence
  Description of Artificial Sequence: Synthetic oligonucleotide
cuucgccggggcggugucc

SEQ ID NO: 275584 - RNA, 19 nt, Artificial Sequence
  Description of Artificial Sequence: Synthetic oligonucleotide
caucuucgcugcuggggcu

SEQ ID NO: 275585 - RNA, 19 nt, Artificial Sequence
  Description of Artificial Sequence: Synthetic oligonucleotide
gcggcaacugcacauccau

SEQ ID NO: 275586 - RNA, 19 nt, Artificial Sequence
  Description of Artificial Sequence: Synthetic oligonucleotide
cagggacgugcacccgguc

SEQ ID NO: 275587 - RNA, 19 nt, Artificial Sequence
  Description of Artificial Sequence: Synthetic oligonucleotide
ggcguacagcgaacuggag

SEQ ID NO: 275588 - RNA, 19 nt, Artificial Sequence
  Description of Artificial Sequence: Synthetic oligonucleotide
cgacgcugucuccaggaug

SEQ ID NO: 275589 - RNA, 19 nt, Artificial Sequence
  Description of Artificial Sequence: Synthetic oligonucleotide
ggugaaacuccaccacguu

SEQ ID NO: 275590 - RNA, 19 nt, Artificial Sequence
  Description of Artificial Sequence: Synthetic oligonucleotide
gggaaccggcuacgaugag

SEQ ID NO: 275591 - RNA, 19 nt, Artificial Sequence
  Description of Artificial Sequence: Synthetic oligonucleotide
cgugcacccggucuggaca

SEQ ID NO: 275592 - RNA, 19 nt, Artificial Sequence
  Description of Artificial Sequence: Synthetic oligonucleotide
ggacucgcgcucgucccug

SEQ ID NO: 275593 - RNA, 19 nt, Artificial Sequence
  Description of Artificial Sequence: Synthetic oligonucleotide
gcagcgcucaggcucccaa

SEQ ID NO: 275594 - RNA, 19 nt, Artificial Sequence
  Description of Artificial Sequence: Synthetic oligonucleotide
gggaaccugaggccacaaa

SEQ ID NO: 275595 - RNA, 19 nt, Artificial Sequence
  Description of Artificial Sequence: Synthetic oligonucleotide
ccggcaacugcggcaacug

SEQ ID NO: 275596 - RNA, 19 nt, Artificial Sequence
  Description of Artificial Sequence: Synthetic oligonucleotide
gugcacccggucuggacau

SEQ ID NO: 275597 - RNA, 19 nt, Artificial Sequence
  Description of Artificial Sequence: Synthetic oligonucleotide
acagucgcccugacgccuu

SEQ ID NO: 275598 - RNA, 19 nt, Artificial Sequence
  Description of Artificial Sequence: Synthetic oligonucleotide
cgucagguccaccacguaa

SEQ ID NO: 275599 - RNA, 19 nt, Artificial Sequence
  Description of Artificial Sequence: Synthetic oligonucleotide
ccaggcagucuuggugacc

SEQ ID NO: 275600 - RNA, 19 nt, Artificial Sequence
  Description of Artificial Sequence: Synthetic oligonucleotide
ccccagauccgacaaucaa

SEQ ID NO: 275601 - RNA, 19 nt, Artificial Sequence
  Description of Artificial Sequence: Synthetic oligonucleotide
gguuggaggucugcugugu

SEQ ID NO: 275602 - RNA, 19 nt, Artificial Sequence
  Description of Artificial Sequence: Synthetic oligonucleotide
cugaggcgcaggggccuug

SEQ ID NO: 275603 - RNA, 19 nt, Artificial Sequence
  Description of Artificial Sequence: Synthetic oligonucleotide
uuaggccaaugggcucauu

SEQ ID NO: 275604 - RNA, 19 nt, Artificial Sequence
  Description of Artificial Sequence: Synthetic oligonucleotide
guaaggugugagggcugcu

SEQ ID NO: 275605 - RNA, 19 nt, Artificial Sequence
  Description of Artificial Sequence: Synthetic oligonucleotide
ggacugccuggugguuuag

SEQ ID NO: 275606 - RNA, 19 nt, Artificial Sequence
  Description of Artificial Sequence: Synthetic oligonucleotide
gacucgcgcucgucccugu

SEQ ID NO: 275607 - RNA, 19 nt, Artificial Sequence
  Description of Artificial Sequence: Synthetic oligonucleotide
ugcacccggucuggacaua

SEQ ID NO: 275608 - RNA, 19 nt, Artificial Sequence
  Description of Artificial Sequence: Synthetic oligonucleotide
gcgcucgucccugucaucu

SEQ ID NO: 275609 - RNA, 19 nt, Artificial Sequence
  Description of Artificial Sequence: Synthetic oligonucleotide
cucacuucgccggggcggu

SEQ ID NO: 275610 - RNA, 19 nt, Artificial Sequence
  Description of Artificial Sequence: Synthetic oligonucleotide
ggcgcugggaagggcucac

SEQ ID NO: 275611 - RNA, 19 nt, Artificial Sequence
  Description of Artificial Sequence: Synthetic oligonucleotide
guguugaggcggacacucu

SEQ ID NO: 275612 - RNA, 19 nt, Artificial Sequence
  Description of Artificial Sequence: Synthetic oligonucleotide
agacgcggauggagccuga

SEQ ID NO: 275613 - RNA, 19 nt, Artificial Sequence
  Description of Artificial Sequence: Synthetic oligonucleotide
cggcaacugcggcaacugc

SEQ ID NO: 275614 - RNA, 19 nt, Artificial Sequence
  Description of Artificial Sequence: Synthetic oligonucleotide
caccggcaacugcggcaac

SEQ ID NO: 275615 - RNA, 19 nt, Artificial Sequence
  Description of Artificial Sequence: Synthetic oligonucleotide
ggagaccgggcugggaccu

SEQ ID NO: 275616 - RNA, 19 nt, Artificial Sequence
  Description of Artificial Sequence: Synthetic oligonucleotide
gaccgggcugggaccucga

SEQ ID NO: 275617 - RNA, 19 nt, Artificial Sequence
  Description of Artificial Sequence: Synthetic oligonucleotide
ccucgagauuuggcaccgg

SEQ ID NO: 275618 - RNA, 19 nt, Artificial Sequence
  Description of Artificial Sequence: Synthetic oligonucleotide
ccggcuacgaugagcuccu

SEQ ID NO: 275619 - RNA, 19 nt, Artificial Sequence
  Description of Artificial Sequence: Synthetic oligonucleotide
gguucuuguggcggcuggu

SEQ ID NO: 275620 - RNA, 19 nt, Artificial Sequence
  Description of Artificial Sequence: Synthetic oligonucleotide
cacuucgccggggcggugu

SEQ ID NO: 275621 - RNA, 19 nt, Artificial Sequence
  Description of Artificial Sequence: Synthetic oligonucleotide
ccggggcgguguccgacug

SEQ ID NO: 275622 - RNA, 19 nt, Artificial Sequence
  Description of Artificial Sequence: Synthetic oligonucleotide
ggguggcacccaagacccc

SEQ ID NO: 275623 - RNA, 19 nt, Artificial Sequence
  Description of Artificial Sequence: Synthetic oligonucleotide
cggcggagagagacaccag

SEQ ID NO: 275624 - RNA, 19 nt, Artificial Sequence
  Description of Artificial Sequence: Synthetic oligonucleotide
ccccaugagugugcggaga

SEQ ID NO: 275625 - RNA, 19 nt, Artificial Sequence
  Description of Artificial Sequence: Synthetic oligonucleotide
ucccacccgcaggcuccuc

SEQ ID NO: 275626 - RNA, 19 nt, Artificial Sequence
  Description of Artificial Sequence: Synthetic oligonucleotide
gcgacgcugucuccaggau

SEQ ID NO: 275627 - RNA, 19 nt, Artificial Sequence
  Description of Artificial Sequence: Synthetic oligonucleotide
gccggggcgguguccgacu

SEQ ID NO: 275628 - RNA, 19 nt, Artificial Sequence
  Description of Artificial Sequence: Synthetic oligonucleotide
ccagacgcggauggagccu

SEQ ID NO: 275629 - RNA, 19 nt, Artificial Sequence
  Description of Artificial Sequence: Synthetic oligonucleotide
ccggugugaccagggaacu

SEQ ID NO: 275630 - RNA, 19 nt, Artificial Sequence
  Description of Artificial Sequence: Synthetic oligonucleotide
cgcgcucgucccugucauc

SEQ ID NO: 275631 - RNA, 19 nt, Artificial Sequence
  Description of Artificial Sequence: Synthetic oligonucleotide
ccacguugacagguccggu

SEQ ID NO: 275632 - RNA, 19 nt, Artificial Sequence
  Description of Artificial Sequence: Synthetic oligonucleotide
gcgcugggaagggcucacu

SEQ ID NO: 275633 - RNA, 19 nt, Artificial Sequence
  Description of Artificial Sequence: Synthetic oligonucleotide
cggcuacgaugagcuccuc

SEQ ID NO: 275634 - RNA, 19 nt, Artificial Sequence
  Description of Artificial Sequence: Synthetic oligonucleotide
cgcaggggccuugggcgua

SEQ ID NO: 275635 - RNA, 19 nt, Artificial Sequence
  Description of Artificial Sequence: Synthetic oligonucleotide
aauaaagcacccuauguac

SEQ ID NO: 275636 - RNA, 19 nt, Artificial Sequence
  Description of Artificial Sequence: Synthetic oligonucleotide
auaaaaggaacacaccacc

SEQ ID NO: 275637 - RNA, 19 nt, Artificial Sequence
  Description of Artificial Sequence: Synthetic oligonucleotide
uaaaugaaccuguagaaga

SEQ ID NO: 275638 - RNA, 19 nt, Artificial Sequence
  Description of Artificial Sequence: Synthetic oligonucleotide
ugcaaguacaaacuucugg

SEQ ID NO: 275639 - RNA, 19 nt, Artificial Sequence
  Description of Artificial Sequence: Synthetic oligonucleotide
ucugccuacgaauauaugc

SEQ ID NO: 275640 - RNA, 19 nt, Artificial Sequence
  Description of Artificial Sequence: Synthetic oligonucleotide
ucaaauagguccaggagug

SEQ ID NO: 275641 - RNA, 19 nt, Artificial Sequence
  Description of Artificial Sequence: Synthetic oligonucleotide
aauauaugccccggaagcc

SEQ ID NO: 275642 - RNA, 19 nt, Artificial Sequence
  Description of Artificial Sequence: Synthetic oligonucleotide
aagaaaaucccgcucgucu

SEQ ID NO: 275643 - RNA, 19 nt, Artificial Sequence
  Description of Artificial Sequence: Synthetic oligonucleotide
uguacuagccacagggagg

SEQ ID NO: 275644 - RNA, 19 nt, Artificial Sequence
  Description of Artificial Sequence: Synthetic oligonucleotide
aguaagacugcucuccuuc

SEQ ID NO: 275645 - RNA, 19 nt, Artificial Sequence
  Description of Artificial Sequence: Synthetic oligonucleotide
ucucauugaguccugcccg

SEQ ID NO: 275646 - RNA, 19 nt, Artificial Sequence
  Description of Artificial Sequence: Synthetic oligonucleotide
ucuuaggccaaaauuugag

SEQ ID NO: 275647 - RNA, 19 nt, Artificial Sequence
  Description of Artificial Sequence: Synthetic oligonucleotide
uagagugcaggaaacauga

SEQ ID NO: 275648 - RNA, 19 nt, Artificial Sequence
  Description of Artificial Sequence: Synthetic oligonucleotide
cuugaugguauacacgucc

SEQ ID NO: 275649 - RNA, 19 nt, Artificial Sequence
  Description of Artificial Sequence: Synthetic oligonucleotide
aauaggugcugcaggagcc

SEQ ID NO: 275650 - RNA, 19 nt, Artificial Sequence
  Description of Artificial Sequence: Synthetic oligonucleotide
aacugagggugguauacac

SEQ ID NO: 275651 - RNA, 19 nt, Artificial Sequence
  Description of Artificial Sequence: Synthetic oligonucleotide
uaaugcuagggcuaggggc

SEQ ID NO: 275652 - RNA, 19 nt, Artificial Sequence
  Description of Artificial Sequence: Synthetic oligonucleotide
aaacaucacuuccuugggg

SEQ ID NO: 275653 - RNA, 19 nt, Artificial Sequence
  Description of Artificial Sequence: Synthetic oligonucleotide
ucugacacaaagucaaaga

SEQ ID NO: 275654 - RNA, 19 nt, Artificial Sequence
  Description of Artificial Sequence: Synthetic oligonucleotide
uuagcauguaucauucugu

SEQ ID NO: 275655 - RNA, 19 nt, Artificial Sequence
  Description of Artificial Sequence: Synthetic oligonucleotide
gaaccuguagaagaugugg

SEQ ID NO: 275656 - RNA, 19 nt, Artificial Sequence
  Description of Artificial Sequence: Synthetic oligonucleotide
agcucuucacuccaagggc

SEQ ID NO: 275657 - RNA, 19 nt, Artificial Sequence
  Description of Artificial Sequence: Synthetic oligonucleotide
aacaugauagggaggacuc

SEQ ID NO: 275658 - RNA, 19 nt, Artificial Sequence
  Description of Artificial Sequence: Synthetic oligonucleotide
ucagagacccacuuuauuc

SEQ ID NO: 275659 - RNA, 19 nt, Artificial Sequence
  Description of Artificial Sequence: Synthetic oligonucleotide
uccauaacauacauuucug

SEQ ID NO: 275660 - RNA, 19 nt, Artificial Sequence
  Description of Artificial Sequence: Synthetic oligonucleotide
ugggccuauauucaucuag

SEQ ID NO: 275661 - RNA, 19 nt, Artificial Sequence
  Description of Artificial Sequence: Synthetic oligonucleotide
guauaaagagcuccucgcg

SEQ ID NO: 275662 - RNA, 19 nt, Artificial Sequence
  Description of Artificial Sequence: Synthetic oligonucleotide
ugguauacacguccugugg

SEQ ID NO: 275663 - RNA, 19 nt, Artificial Sequence
  Description of Artificial Sequence: Synthetic oligonucleotide
uguguugucaugguuaggu

SEQ ID NO: 275664 - RNA, 19 nt, Artificial Sequence
  Description of Artificial Sequence: Synthetic oligonucleotide
cuuagcauguaucauucug

SEQ ID NO: 275665 - RNA, 19 nt, Artificial Sequence
  Description of Artificial Sequence: Synthetic oligonucleotide
cugccuacgaauauaugcc

SEQ ID NO: 275666 - RNA, 19 nt, Artificial Sequence
  Description of Artificial Sequence: Synthetic oligonucleotide
ucuuggacgaucgucgggg

SEQ ID NO: 275667 - RNA, 19 nt, Artificial Sequence
  Description of Artificial Sequence: Synthetic oligonucleotide
aggaagcuuuuguagcucc

SEQ ID NO: 275668 - RNA, 19 nt, Artificial Sequence
  Description of Artificial Sequence: Synthetic oligonucleotide
aagaaacguaagaagaacu

SEQ ID NO: 275669 - RNA, 19 nt, Artificial Sequence
  Description of Artificial Sequence: Synthetic oligonucleotide
agaaacguaagaagaacuc

SEQ ID NO: 275670 - RNA, 19 nt, Artificial Sequence
  Description of Artificial Sequence: Synthetic oligonucleotide
caugaacacauuuagggga

SEQ ID NO: 275671 - RNA, 19 nt, Artificial Sequence
  Description of Artificial Sequence: Synthetic oligonucleotide
uccuauagagugcaggaaa

SEQ ID NO: 275672 - RNA, 19 nt, Artificial Sequence
  Description of Artificial Sequence: Synthetic oligonucleotide
agaaauaggugcugcagga

SEQ ID NO: 275673 - RNA, 19 nt, Artificial Sequence
  Description of Artificial Sequence: Synthetic oligonucleotide
ugaaaccugguccagcccu

SEQ ID NO: 275674 - RNA, 19 nt, Artificial Sequence
  Description of Artificial Sequence: Synthetic oligonucleotide
auucgaugaagguggcagc

SEQ ID NO: 275675 - RNA, 19 nt, Artificial Sequence
  Description of Artificial Sequence: Synthetic oligonucleotide
auauaugccccggaagccc

SEQ ID NO: 275676 - RNA, 19 nt, Artificial Sequence
  Description of Artificial Sequence: Synthetic oligonucleotide
gaacauaggguacugggga

SEQ ID NO: 275677 - RNA, 19 nt, Artificial Sequence
  Description of Artificial Sequence: Synthetic oligonucleotide
uccaucacuuugcugaacu

SEQ ID NO: 275678 - RNA, 19 nt, Artificial Sequence
  Description of Artificial Sequence: Synthetic oligonucleotide
uggagaauaaagcacccua

SEQ ID NO: 275679 - RNA, 19 nt, Artificial Sequence
  Description of Artificial Sequence: Synthetic oligonucleotide
uuguguuucucacaacagu

SEQ ID NO: 275680 - RNA, 19 nt, Artificial Sequence
  Description of Artificial Sequence: Synthetic oligonucleotide
acccacuuuauucaguucu

SEQ ID NO: 275681 - RNA, 19 nt, Artificial Sequence
  Description of Artificial Sequence: Synthetic oligonucleotide
uagaugaguccauggauug

SEQ ID NO: 275682 - RNA, 19 nt, Artificial Sequence
  Description of Artificial Sequence: Synthetic oligonucleotide
aaacgagcuggagaugugg

SEQ ID NO: 275683 - RNA, 19 nt, Artificial Sequence
  Description of Artificial Sequence: Synthetic oligonucleotide
auaaugcuagggcuagggg

SEQ ID NO: 275684 - RNA, 19 nt, Artificial Sequence
  Description of Artificial Sequence: Synthetic oligonucleotide
caagguaggcucaucuucc

SEQ ID NO: 275685 - RNA, 19 nt, Artificial Sequence
  Description of Artificial Sequence: Synthetic oligonucleotide
auagggaggacucgggcag

SEQ ID NO: 275686 - RNA, 19 nt, Artificial Sequence
  Description of Artificial Sequence: Synthetic oligonucleotide
auuggcccgagcccaaccc

SEQ ID NO: 275687 - RNA, 19 nt, Artificial Sequence
  Description of Artificial Sequence: Synthetic oligonucleotide
ucuagugccuugaugguau

SEQ ID NO: 275688 - RNA, 19 nt, Artificial Sequence
  Description of Artificial Sequence: Synthetic oligonucleotide
guuagguggaggauaaaag

SEQ ID NO: 275689 - RNA, 19 nt, Artificial Sequence
  Description of Artificial Sequence: Synthetic oligonucleotide
uccauagcuccacugggcc

SEQ ID NO: 275690 - RNA, 19 nt, Artificial Sequence
  Description of Artificial Sequence: Synthetic oligonucleotide
aguuccuauagagugcagg

SEQ ID NO: 275691 - RNA, 19 nt, Artificial Sequence
  Description of Artificial Sequence: Synthetic oligonucleotide
caggagugcaaguacaaac

SEQ ID NO: 275692 - RNA, 19 nt, Artificial Sequence
  Description of Artificial Sequence: Synthetic oligonucleotide
uuaagaaaaucccgcucgu

SEQ ID NO: 275693 - RNA, 19 nt, Artificial Sequence
  Description of Artificial Sequence: Synthetic oligonucleotide
guguacagucaucaaacag

SEQ ID NO: 275694 - RNA, 19 nt, Artificial Sequence
  Description of Artificial Sequence: Synthetic oligonucleotide
cauaaugcuagggcuaggg

SEQ ID NO: 275695 - RNA, 19 nt, Artificial Sequence
  Description of Artificial Sequence: Synthetic oligonucleotide
agaaaaucccgcucgucug

SEQ ID NO: 275696 - RNA, 19 nt, Artificial Sequence
  Description of Artificial Sequence: Synthetic oligonucleotide
agugcaaguacaaacuucu

SEQ ID NO: 275697 - RNA, 19 nt, Artificial Sequence
  Description of Artificial Sequence: Synthetic oligonucleotide
aaacguaagaagaacucau

SEQ ID NO: 275698 - RNA, 19 nt, Artificial Sequence
  Description of Artificial Sequence: Synthetic oligonucleotide
uuuccuucauucggaaccg

SEQ ID NO: 275699 - RNA, 19 nt, Artificial Sequence
  Description of Artificial Sequence: Synthetic oligonucleotide
uauacacucagggacuuga

SEQ ID NO: 275700 - RNA, 19 nt, Artificial Sequence
  Description of Artificial Sequence: Synthetic oligonucleotide
auaaacgagcuggagaugu

SEQ ID NO: 275701 - RNA, 19 nt, Artificial Sequence
  Description of Artificial Sequence: Synthetic oligonucleotide
aaauagguccaggagugca

SEQ ID NO: 275702 - RNA, 19 nt, Artificial Sequence
  Description of Artificial Sequence: Synthetic oligonucleotide
uuucuuggacgaucgucgg

SEQ ID NO: 275703 - RNA, 19 nt, Artificial Sequence
  Description of Artificial Sequence: Synthetic oligonucleotide
cucaguaagacugcucucc

SEQ ID NO: 275704 - RNA, 19 nt, Artificial Sequence
  Description of Artificial Sequence: Synthetic oligonucleotide
uagcauguaucauucugug

SEQ ID NO: 275705 - RNA, 19 nt, Artificial Sequence
  Description of Artificial Sequence: Synthetic oligonucleotide
gcauguaucauucugugga

SEQ ID NO: 275706 - RNA, 19 nt, Artificial Sequence
  Description of Artificial Sequence: Synthetic oligonucleotide
gaaacguaagaagaacuca

SEQ ID NO: 275707 - RNA, 19 nt, Artificial Sequence
  Description of Artificial Sequence: Synthetic oligonucleotide
acguaagaagaacucauaa

SEQ ID NO: 275708 - RNA, 19 nt, Artificial Sequence
  Description of Artificial Sequence: Synthetic oligonucleotide
ugguauacacucagggacu

SEQ ID NO: 275709 - RNA, 19 nt, Artificial Sequence
  Description of Artificial Sequence: Synthetic oligonucleotide
gcaugaacacauuuagggg

SEQ ID NO: 275710 - RNA, 19 nt, Artificial Sequence
  Description of Artificial Sequence: Synthetic oligonucleotide
ugggucuuaggccaaaauu

SEQ ID NO: 275711 - RNA, 19 nt, Artificial Sequence
  Description of Artificial Sequence: Synthetic oligonucleotide
gagggugguauacacucag

SEQ ID NO: 275712 - RNA, 19 nt, Artificial Sequence
  Description of Artificial Sequence: Synthetic oligonucleotide
aacauggugacagccucag

SEQ ID NO: 275713 - RNA, 19 nt, Artificial Sequence
  Description of Artificial Sequence: Synthetic oligonucleotide
uauuuugcugagcuggguu

SEQ ID NO: 275714 - RNA, 19 nt, Artificial Sequence
  Description of Artificial Sequence: Synthetic oligonucleotide
aguucuguacauaugggga

SEQ ID NO: 275715 - RNA, 19 nt, Artificial Sequence
  Description of Artificial Sequence: Synthetic oligonucleotide
gacuccaagaaacguaaga

SEQ ID NO: 275716 - RNA, 19 nt, Artificial Sequence
  Description of Artificial Sequence: Synthetic oligonucleotide
cuguacuagccacagggag

SEQ ID NO: 275717 - RNA, 19 nt, Artificial Sequence
  Description of Artificial Sequence: Synthetic oligonucleotide
caaucaccggcucaguaag

SEQ ID NO: 275718 - RNA, 19 nt, Artificial Sequence
  Description of Artificial Sequence: Synthetic oligonucleotide
uuuauucaguucuguacau

SEQ ID NO: 275719 - RNA, 19 nt, Artificial Sequence
  Description of Artificial Sequence: Synthetic oligonucleotide
uauaugccccggaagcccc

SEQ ID NO: 275720 - RNA, 19 nt, Artificial Sequence
  Description of Artificial Sequence: Synthetic oligonucleotide
ugcauaaugcuagggcuag

SEQ ID NO: 275721 - RNA, 19 nt, Artificial Sequence
  Description of Artificial Sequence: Synthetic oligonucleotide
uugaugguauacacguccu

SEQ ID NO: 275722 - RNA, 19 nt, Artificial Sequence
  Description of Artificial Sequence: Synthetic oligonucleotide
uggaggauaaaaggaacac

SEQ ID NO: 275723 - RNA, 19 nt, Artificial Sequence
  Description of Artificial Sequence: Synthetic oligonucleotide
uucuuggacgaucgucggg

SEQ ID NO: 275724 - RNA, 19 nt, Artificial Sequence
  Description of Artificial Sequence: Synthetic oligonucleotide
guuccuauagagugcagga

SEQ ID NO: 275725 - RNA, 19 nt, Artificial Sequence
  Description of Artificial Sequence: Synthetic oligonucleotide
aguuggcgaaucuuucaag

SEQ ID NO: 275726 - RNA, 19 nt, Artificial Sequence
  Description of Artificial Sequence: Synthetic oligonucleotide
ugccuacgaauauaugccc

SEQ ID NO: 275727 - RNA, 19 nt, Artificial Sequence
  Description of Artificial Sequence: Synthetic oligonucleotide
guuguguacagucaucaaa

SEQ ID NO: 275728 - RNA, 19 nt, Artificial Sequence
  Description of Artificial Sequence: Synthetic oligonucleotide
accuuagcauguaucauuc

SEQ ID NO: 275729 - RNA, 19 nt, Artificial Sequence
  Description of Artificial Sequence: Synthetic oligonucleotide
aacauaggguacuggggau

SEQ ID NO: 275730 - RNA, 19 nt, Artificial Sequence
  Description of Artificial Sequence: Synthetic oligonucleotide
ucccuguucuugcugaggu

SEQ ID NO: 275731 - RNA, 19 nt, Artificial Sequence
  Description of Artificial Sequence: Synthetic oligonucleotide
ugcgauguaaaauggucuu

SEQ ID NO: 275732 - RNA, 19 nt, Artificial Sequence
  Description of Artificial Sequence: Synthetic oligonucleotide
guagcugugggguggggag

SEQ ID NO: 275733 - RNA, 19 nt, Artificial Sequence
  Description of Artificial Sequence: Synthetic oligonucleotide
aucaccggcucaguaagac

SEQ ID NO: 275734 - RNA, 19 nt, Artificial Sequence
  Description of Artificial Sequence: Synthetic oligonucleotide
agaacucauaaacgagcug

SEQ ID NO: 275735 - RNA, 19 nt, Artificial Sequence
  Description of Artificial Sequence: Synthetic oligonucleotide
uacgaauauaugccccgga

SEQ ID NO: 275736 - RNA, 19 nt, Artificial Sequence
  Description of Artificial Sequence: Synthetic oligonucleotide
agggcuaggggccuauuug

SEQ ID NO: 275737 - RNA, 19 nt, Artificial Sequence
  Description of Artificial Sequence: Synthetic oligonucleotide
agcccaacccaccuuagca

SEQ ID NO: 275738 - RNA, 19 nt, Artificial Sequence
  Description of Artificial Sequence: Synthetic oligonucleotide
augaacacauuuaggggag

SEQ ID NO: 275739 - RNA, 19 nt, Artificial Sequence
  Description of Artificial Sequence: Synthetic oligonucleotide
uggggauugagccgugcca

SEQ ID NO: 275740 - RNA, 19 nt, Artificial Sequence
  Description of Artificial Sequence: Synthetic oligonucleotide
aaaucccgcucgucugggg

SEQ ID NO: 275741 - RNA, 19 nt, Artificial Sequence
  Description of Artificial Sequence: Synthetic oligonucleotide
aaccuguagaagauguggu

SEQ ID NO: 275742 - RNA, 19 nt, Artificial Sequence
  Description of Artificial Sequence: Synthetic oligonucleotide
caccucuuugaacuugagg

SEQ ID NO: 275743 - RNA, 19 nt, Artificial Sequence
  Description of Artificial Sequence: Synthetic oligonucleotide
uccggaagagauucacuga

SEQ ID NO: 275744 - RNA, 19 nt, Artificial Sequence
  Description of Artificial Sequence: Synthetic oligonucleotide
caauggagcuugauguaac

SEQ ID NO: 275745 - RNA, 19 nt, Artificial Sequence
  Description of Artificial Sequence: Synthetic oligonucleotide
uaguguccauaacauacau

SEQ ID NO: 275746 - RNA, 19 nt, Artificial Sequence
  Description of Artificial Sequence: Synthetic oligonucleotide
auauacuccaccaucucau

SEQ ID NO: 275747 - RNA, 19 nt, Artificial Sequence
  Description of Artificial Sequence: Synthetic oligonucleotide
ucacuccaagggccaaugg

SEQ ID NO: 275748 - RNA, 19 nt, Artificial Sequence
  Description of Artificial Sequence: Synthetic oligonucleotide
uucauucggaaccggcccu

SEQ ID NO: 275749 - RNA, 19 nt, Artificial Sequence
  Description of Artificial Sequence: Synthetic oligonucleotide
cagccugucuguacuagcc

SEQ ID NO: 275750 - RNA, 19 nt, Artificial Sequence
  Description of Artificial Sequence: Synthetic oligonucleotide
acgaauauaugccccggaa

SEQ ID NO: 275751 - RNA, 19 nt, Artificial Sequence
  Description of Artificial Sequence: Synthetic oligonucleotide
aggagcuuugccgucguuc

SEQ ID NO: 275752 - RNA, 19 nt, Artificial Sequence
  Description of Artificial Sequence: Synthetic oligonucleotide
gucugacacaaagucaaag

SEQ ID NO: 275753 - RNA, 19 nt, Artificial Sequence
  Description of Artificial Sequence: Synthetic oligonucleotide
cauacauuucugaccucug

SEQ ID NO: 275754 - RNA, 19 nt, Artificial Sequence
  Description of Artificial Sequence: Synthetic oligonucleotide
agcuuuuguagcucccugu

SEQ ID NO: 275755 - RNA, 19 nt, Artificial Sequence
  Description of Artificial Sequence: Synthetic oligonucleotide
uggacgaucgucggggccc

SEQ ID NO: 275756 - RNA, 19 nt, Artificial Sequence
  Description of Artificial Sequence: Synthetic oligonucleotide
uugaucugccuacgaauau

SEQ ID NO: 275757 - RNA, 19 nt, Artificial Sequence
  Description of Artificial Sequence: Synthetic oligonucleotide
cucauugaguccugcccgc

SEQ ID NO: 275758 - RNA, 19 nt, Artificial Sequence
  Description of Artificial Sequence: Synthetic oligonucleotide
ggaugagaaacaucuugug

SEQ ID NO: 275759 - RNA, 19 nt, Artificial Sequence
  Description of Artificial Sequence: Synthetic oligonucleotide
ccuacgaauauaugccccg

SEQ ID NO: 275760 - RNA, 19 nt, Artificial Sequence
  Description of Artificial Sequence: Synthetic oligonucleotide
gagacuccaagaaacguaa

SEQ ID NO: 275761 - RNA, 19 nt, Artificial Sequence
  Description of Artificial Sequence: Synthetic oligonucleotide
cagagacccacuuuauuca

SEQ ID NO: 275762 - RNA, 19 nt, Artificial Sequence
  Description of Artificial Sequence: Synthetic oligonucleotide
cugagugcccaaaggguac

SEQ ID NO: 275763 - RNA, 19 nt, Artificial Sequence
  Description of Artificial Sequence: Synthetic oligonucleotide
gagcuugauguaacuuugg

SEQ ID NO: 275764 - RNA, 19 nt, Artificial Sequence
  Description of Artificial Sequence: Synthetic oligonucleotide
guauacacguccuguggca

SEQ ID NO: 275765 - RNA, 19 nt, Artificial Sequence
  Description of Artificial Sequence: Synthetic oligonucleotide
guugucaugguuaggugga

SEQ ID NO: 275766 - RNA, 19 nt, Artificial Sequence
  Description of Artificial Sequence: Synthetic oligonucleotide
cuacgaauauaugccccgg

SEQ ID NO: 275767 - RNA, 19 nt, Artificial Sequence
  Description of Artificial Sequence: Synthetic oligonucleotide
gaaaggucagagagccucc

SEQ ID NO: 275768 - RNA, 19 nt, Artificial Sequence
  Description of Artificial Sequence: Synthetic oligonucleotide
uagcucauucagaaacauc

SEQ ID NO: 275769 - RNA, 19 nt, Artificial Sequence
  Description of Artificial Sequence: Synthetic oligonucleotide
acaugauagggaggacucg

SEQ ID NO: 275770 - RNA, 19 nt, Artificial Sequence
  Description of Artificial Sequence: Synthetic oligonucleotide
gcaaguacaaacuucuggu

SEQ ID NO: 275771 - RNA, 19 nt, Artificial Sequence
  Description of Artificial Sequence: Synthetic oligonucleotide
uguuguguacagucaucaa

SEQ ID NO: 275772 - RNA, 19 nt, Artificial Sequence
  Description of Artificial Sequence: Synthetic oligonucleotide
aauagguccaggagugcaa

SEQ ID NO: 275773 - RNA, 19 nt, Artificial Sequence
  Description of Artificial Sequence: Synthetic oligonucleotide
gaugguauacacguccugu

SEQ ID NO: 275774 - RNA, 19 nt, Artificial Sequence
  Description of Artificial Sequence: Synthetic oligonucleotide
uuggacgaucgucggggcc

SEQ ID NO: 275775 - RNA, 19 nt, Artificial Sequence
  Description of Artificial Sequence: Synthetic oligonucleotide
aacguaagaagaacucaua

SEQ ID NO: 275776 - RNA, 19 nt, Artificial Sequence
  Description of Artificial Sequence: Synthetic oligonucleotide
agaaacaucuugugcucuu

SEQ ID NO: 275777 - RNA, 19 nt, Artificial Sequence
  Description of Artificial Sequence: Synthetic oligonucleotide
gagcucagcaaucccauua

SEQ ID NO: 275778 - RNA, 19 nt, Artificial Sequence
  Description of Artificial Sequence: Synthetic oligonucleotide
ugccauagaugcgauguaa

SEQ ID NO: 275779 - RNA, 19 nt, Artificial Sequence
  Description of Artificial Sequence: Synthetic oligonucleotide
uuacccugcaugggagagg

SEQ ID NO: 275780 - RNA, 19 nt, Artificial Sequence
  Description of Artificial Sequence: Synthetic oligonucleotide
ucaccucuuugaacuugag

SEQ ID NO: 275781 - RNA, 19 nt, Artificial Sequence
  Description of Artificial Sequence: Synthetic oligonucleotide
ugccgucguucuuucuugg

SEQ ID NO: 275782 - RNA, 19 nt, Artificial Sequence
  Description of Artificial Sequence: Synthetic oligonucleotide
ccuauagagugcaggaaac

SEQ ID NO: 275783 - RNA, 19 nt, Artificial Sequence
  Description of Artificial Sequence: Synthetic oligonucleotide
ugaucugccuacgaauaua

SEQ ID NO: 275784 - RNA, 19 nt, Artificial Sequence
  Description of Artificial Sequence: Synthetic oligonucleotide
ggcgaaucuuucaaggcag

SEQ ID NO: 275785 - RNA, 19 nt, Artificial Sequence
  Description of Artificial Sequence: Synthetic oligonucleotide
ggugguauacacucaggga

SEQ ID NO: 275786 - RNA, 19 nt, Artificial Sequence
  Description of Artificial Sequence: Synthetic oligonucleotide
aaaggucagagagccuccu

SEQ ID NO: 275787 - RNA, 19 nt, Artificial Sequence
  Description of Artificial Sequence: Synthetic oligonucleotide
uuauucaguucuguacaua

SEQ ID NO: 275788 - RNA, 19 nt, Artificial Sequence
  Description of Artificial Sequence: Synthetic oligonucleotide
guaacccugugggaagggg

SEQ ID NO: 275789 - RNA, 19 nt, Artificial Sequence
  Description of Artificial Sequence: Synthetic oligonucleotide
cuuaaggggcaaggcaaag

SEQ ID NO: 275790 - RNA, 19 nt, Artificial Sequence
  Description of Artificial Sequence: Synthetic oligonucleotide
gucguucuuucuuggacga

SEQ ID NO: 275791 - RNA, 19 nt, Artificial Sequence
  Description of Artificial Sequence: Synthetic oligonucleotide
cagagaggugcuguuuugc

SEQ ID NO: 275792 - RNA, 19 nt, Artificial Sequence
  Description of Artificial Sequence: Synthetic oligonucleotide
gcuccugugggauucgaug

SEQ ID NO: 275793 - RNA, 19 nt, Artificial Sequence
  Description of Artificial Sequence: Synthetic oligonucleotide
uuccuauagagugcaggaa

SEQ ID NO: 275794 - RNA, 19 nt, Artificial Sequence
  Description of Artificial Sequence: Synthetic oligonucleotide
agugcccaaaggguacagg

SEQ ID NO: 275795 - RNA, 19 nt, Artificial Sequence
  Description of Artificial Sequence: Synthetic oligonucleotide
gauugagccgugccagcuc

SEQ ID NO: 275796 - RNA, 19 nt, Artificial Sequence
  Description of Artificial Sequence: Synthetic oligonucleotide
uguuuugccccaggucagc

SEQ ID NO: 275797 - RNA, 19 nt, Artificial Sequence
  Description of Artificial Sequence: Synthetic oligonucleotide
auacacucagggacuugac

SEQ ID NO: 275798 - RNA, 19 nt, Artificial Sequence
  Description of Artificial Sequence: Synthetic oligonucleotide
agaugcgauguaaaauggu

SEQ ID NO: 275799 - RNA, 19 nt, Artificial Sequence
  Description of Artificial Sequence: Synthetic oligonucleotide
cuuggacgaucgucggggc

SEQ ID NO: 275800 - RNA, 19 nt, Artificial Sequence
  Description of Artificial Sequence: Synthetic oligonucleotide
gccuauuugugcugcuggg

SEQ ID NO: 275801 - RNA, 19 nt, Artificial Sequence
  Description of Artificial Sequence: Synthetic oligonucleotide
caucuaguguccauaacau

SEQ ID NO: 275802 - RNA, 19 nt, Artificial Sequence
  Description of Artificial Sequence: Synthetic oligonucleotide
caaauagguccaggagugc

SEQ ID NO: 275803 - RNA, 19 nt, Artificial Sequence
  Description of Artificial Sequence: Synthetic oligonucleotide
gaggagcucggaacauagg

SEQ ID NO: 275804 - RNA, 19 nt, Artificial Sequence
  Description of Artificial Sequence: Synthetic oligonucleotide
cgucguucuuucuuggacg

SEQ ID NO: 275805 - RNA, 19 nt, Artificial Sequence
  Description of Artificial Sequence: Synthetic oligonucleotide
aacccaccuuagcauguau

SEQ ID NO: 275806 - RNA, 19 nt, Artificial Sequence
  Description of Artificial Sequence: Synthetic oligonucleotide
ccaagguaggcucaucuuc

SEQ ID NO: 275807 - RNA, 19 nt, Artificial Sequence
  Description of Artificial Sequence: Synthetic oligonucleotide
gagcccaacccaccuuagc

SEQ ID NO: 275808 - RNA, 19 nt, Artificial Sequence
  Description of Artificial Sequence: Synthetic oligonucleotide
accggcucaguaagacugc

SEQ ID NO: 275809 - RNA, 19 nt, Artificial Sequence
  Description of Artificial Sequence: Synthetic oligonucleotide
agcacccuauguacacagc

SEQ ID NO: 275810 - RNA, 19 nt, Artificial Sequence
  Description of Artificial Sequence: Synthetic oligonucleotide
cauuggcccgagcccaacc

SEQ ID NO: 275811 - RNA, 19 nt, Artificial Sequence
  Description of Artificial Sequence: Synthetic oligonucleotide
uuccuucauucggaaccgg

SEQ ID NO: 275812 - RNA, 19 nt, Artificial Sequence
  Description of Artificial Sequence: Synthetic oligonucleotide
ggccuauauucaucuagug

SEQ ID NO: 275813 - RNA, 19 nt, Artificial Sequence
  Description of Artificial Sequence: Synthetic oligonucleotide
ugagugcccaaaggguaca

SEQ ID NO: 275814 - RNA, 19 nt, Artificial Sequence
  Description of Artificial Sequence: Synthetic oligonucleotide
ugaucaggcucaugaugua

SEQ ID NO: 275815 - RNA, 19 nt, Artificial Sequence
  Description of Artificial Sequence: Synthetic oligonucleotide
ggcucaguaagacugcucu

SEQ ID NO: 275816 - RNA, 19 nt, Artificial Sequence
  Description of Artificial Sequence: Synthetic oligonucleotide
ugauuccccuguguuugug

SEQ ID NO: 275817 - RNA, 19 nt, Artificial Sequence
  Description of Artificial Sequence: Synthetic oligonucleotide
ugccacauuuccucucuuu

SEQ ID NO: 275818 - RNA, 19 nt, Artificial Sequence
  Description of Artificial Sequence: Synthetic oligonucleotide
cauagaugcgauguaaaau

SEQ ID NO: 275819 - RNA, 19 nt, Artificial Sequence
  Description of Artificial Sequence: Synthetic oligonucleotide
gggucugacacaaagucaa

SEQ ID NO: 275820 - RNA, 19 nt, Artificial Sequence
  Description of Artificial Sequence: Synthetic oligonucleotide
gagagacaccucauuuuga

SEQ ID NO: 275821 - RNA, 19 nt, Artificial Sequence
  Description of Artificial Sequence: Synthetic oligonucleotide
gacacagcacuggcguagc

SEQ ID NO: 275822 - RNA, 19 nt, Artificial Sequence
  Description of Artificial Sequence: Synthetic oligonucleotide
ucgcgcuccugaguuggcg

SEQ ID NO: 275823 - RNA, 19 nt, Artificial Sequence
  Description of Artificial Sequence: Synthetic oligonucleotide
gugcccaaaggguacaggu

SEQ ID NO: 275824 - RNA, 19 nt, Artificial Sequence
  Description of Artificial Sequence: Synthetic oligonucleotide
auguuuggcuggaaaucug

SEQ ID NO: 275825 - RNA, 19 nt, Artificial Sequence
  Description of Artificial Sequence: Synthetic oligonucleotide
gguuagguggaggauaaaa

SEQ ID NO: 275826 - RNA, 19 nt, Artificial Sequence
  Description of Artificial Sequence: Synthetic oligonucleotide
cugcauaaugcuagggcua

SEQ ID NO: 275827 - RNA, 19 nt, Artificial Sequence
  Description of Artificial Sequence: Synthetic oligonucleotide
cagcguccggaagagauuc

SEQ ID NO: 275828 - RNA, 19 nt, Artificial Sequence
  Description of Artificial Sequence: Synthetic oligonucleotide
gcguagcuucuguauaaag

SEQ ID NO: 275829 - RNA, 19 nt, Artificial Sequence
  Description of Artificial Sequence: Synthetic oligonucleotide
cuaggggccuauuugugcu

SEQ ID NO: 275830 - RNA, 19 nt, Artificial Sequence
  Description of Artificial Sequence: Synthetic oligonucleotide
gcugggugggcuguaaccc

SEQ ID NO: 275831 - RNA, 19 nt, Artificial Sequence
  Description of Artificial Sequence: Synthetic oligonucleotide
gauuccccuguguuugugu

SEQ ID NO: 275832 - RNA, 19 nt, Artificial Sequence
  Description of Artificial Sequence: Synthetic oligonucleotide
aaucaccggcucaguaaga

SEQ ID NO: 275833 - RNA, 19 nt, Artificial Sequence
  Description of Artificial Sequence: Synthetic oligonucleotide
guagaugaguccauggauu

SEQ ID NO: 275834 - RNA, 19 nt, Artificial Sequence
  Description of Artificial Sequence: Synthetic oligonucleotide
guaugccaacugagggugg

SEQ ID NO: 275835 - RNA, 19 nt, Artificial Sequence
  Description of Artificial Sequence: Synthetic oligonucleotide
caacaguuucagguagcug

SEQ ID NO: 275836 - RNA, 19 nt, Artificial Sequence
  Description of Artificial Sequence: Synthetic oligonucleotide
gccuauauucaucuagugu

SEQ ID NO: 275837 - RNA, 19 nt, Artificial Sequence
  Description of Artificial Sequence: Synthetic oligonucleotide
agacuccaagaaacguaag

SEQ ID NO: 275838 - RNA, 19 nt, Artificial Sequence
  Description of Artificial Sequence: Synthetic oligonucleotide
ccaacugagggugguauac

SEQ ID NO: 275839 - RNA, 19 nt, Artificial Sequence
  Description of Artificial Sequence: Synthetic oligonucleotide
gagugcccaaaggguacag

SEQ ID NO: 275840 - RNA, 19 nt, Artificial Sequence
  Description of Artificial Sequence: Synthetic oligonucleotide
aguagccagagaggugcug

SEQ ID NO: 275841 - RNA, 19 nt, Artificial Sequence
  Description of Artificial Sequence: Synthetic oligonucleotide
gccuacgaauauaugcccc

SEQ ID NO: 275842 - RNA, 19 nt, Artificial Sequence
  Description of Artificial Sequence: Synthetic oligonucleotide
gcugugggugauauacucc

SEQ ID NO: 275843 - RNA, 19 nt, Artificial Sequence
  Description of Artificial Sequence: Synthetic oligonucleotide
auggagcuugauguaacuu

SEQ ID NO: 275844 - RNA, 19 nt, Artificial Sequence
  Description of Artificial Sequence: Synthetic oligonucleotide
ugccugcauccucuagagu

SEQ ID NO: 275845 - RNA, 19 nt, Artificial Sequence
  Description of Artificial Sequence: Synthetic oligonucleotide
guaagacugcucuccuucu

SEQ ID NO: 275846 - RNA, 19 nt, Artificial Sequence
  Description of Artificial Sequence: Synthetic oligonucleotide
gugcaaguacaaacuucug

SEQ ID NO: 275847 - RNA, 19 nt, Artificial Sequence
  Description of Artificial Sequence: Synthetic oligonucleotide
ggugugcuguugcugggac

SEQ ID NO: 275848 - RNA, 19 nt, Artificial Sequence
  Description of Artificial Sequence: Synthetic oligonucleotide
caugugauuccccuguguu

SEQ ID NO: 275849 - RNA, 19 nt, Artificial Sequence
  Description of Artificial Sequence: Synthetic oligonucleotide
cuguguugucaugguuagg

SEQ ID NO: 275850 - RNA, 19 nt, Artificial Sequence
  Description of Artificial Sequence: Synthetic oligonucleotide
aggguacaggugauggccu

SEQ ID NO: 275851 - RNA, 19 nt, Artificial Sequence
  Description of Artificial Sequence: Synthetic oligonucleotide
ccugcauaaugcuagggcu

SEQ ID NO: 275852 - RNA, 19 nt, Artificial Sequence
  Description of Artificial Sequence: Synthetic oligonucleotide
ggagacuccaagaaacgua

SEQ ID NO: 275853 - RNA, 19 nt, Artificial Sequence
  Description of Artificial Sequence: Synthetic oligonucleotide
uccucgcgcuccugaguug

SEQ ID NO: 275854 - RNA, 19 nt, Artificial Sequence
  Description of Artificial Sequence: Synthetic oligonucleotide
ugagugggucugacacaaa

SEQ ID NO: 275855 - RNA, 19 nt, Artificial Sequence
  Description of Artificial Sequence: Synthetic oligonucleotide
caccuuagcauguaucauu

SEQ ID NO: 275856 - RNA, 19 nt, Artificial Sequence
  Description of Artificial Sequence: Synthetic oligonucleotide
caccaucucauugaguccu

SEQ ID NO: 275857 - RNA, 19 nt, Artificial Sequence
  Description of Artificial Sequence: Synthetic oligonucleotide
gggucuuaggccaaaauuu

SEQ ID NO: 275858 - RNA, 19 nt, Artificial Sequence
  Description of Artificial Sequence: Synthetic oligonucleotide
gcgaaucuuucaaggcagg

SEQ ID NO: 275859 - RNA, 19 nt, Artificial Sequence
  Description of Artificial Sequence: Synthetic oligonucleotide
ggucagccaauaaggagca

SEQ ID NO: 275860 - RNA, 19 nt, Artificial Sequence
  Description of Artificial Sequence: Synthetic oligonucleotide
aucugccuacgaauauaug

SEQ ID NO: 275861 - RNA, 19 nt, Artificial Sequence
  Description of Artificial Sequence: Synthetic oligonucleotide
uugagccgugccagcuccu

SEQ ID NO: 275862 - RNA, 19 nt, Artificial Sequence
  Description of Artificial Sequence: Synthetic oligonucleotide
gcucagcaaucccauuaug

SEQ ID NO: 275863 - RNA, 19 nt, Artificial Sequence
  Description of Artificial Sequence: Synthetic oligonucleotide
ccauagaugcgauguaaaa

SEQ ID NO: 275864 - RNA, 19 nt, Artificial Sequence
  Description of Artificial Sequence: Synthetic oligonucleotide
ucauucggaaccggcccuu

SEQ ID NO: 275865 - RNA, 19 nt, Artificial Sequence
  Description of Artificial Sequence: Synthetic oligonucleotide
ggacgcuuguuggaugaug

SEQ ID NO: 275866 - RNA, 19 nt, Artificial Sequence
  Description of Artificial Sequence: Synthetic oligonucleotide
ugagccgugccagcuccuc

SEQ ID NO: 275867 - RNA, 19 nt, Artificial Sequence
  Description of Artificial Sequence: Synthetic oligonucleotide
caacugagggugguauaca

SEQ ID NO: 275868 - RNA, 19 nt, Artificial Sequence
  Description of Artificial Sequence: Synthetic oligonucleotide
ccggaagagauucacugaa

SEQ ID NO: 275869 - RNA, 19 nt, Artificial Sequence
  Description of Artificial Sequence: Synthetic oligonucleotide
auaggguacuggggauuga

SEQ ID NO: 275870 - RNA, 19 nt, Artificial Sequence
  Description of Artificial Sequence: Synthetic oligonucleotide
gcucaguaagacugcucuc

SEQ ID NO: 275871 - RNA, 19 nt, Artificial Sequence
  Description of Artificial Sequence: Synthetic oligonucleotide
ccuugaugguauacacguc

SEQ ID NO: 275872 - RNA, 19 nt, Artificial Sequence
  Description of Artificial Sequence: Synthetic oligonucleotide
cucgcgcuccugaguuggc

SEQ ID NO: 275873 - RNA, 19 nt, Artificial Sequence
  Description of Artificial Sequence: Synthetic oligonucleotide
ucguucuuucuuggacgau

SEQ ID NO: 275874 - RNA, 19 nt, Artificial Sequence
  Description of Artificial Sequence: Synthetic oligonucleotide
cuagcucauucagaaacau

SEQ ID NO: 275875 - RNA, 19 nt, Artificial Sequence
  Description of Artificial Sequence: Synthetic oligonucleotide
ggcuaggggccuauuugug

SEQ ID NO: 275876 - RNA, 19 nt, Artificial Sequence
  Description of Artificial Sequence: Synthetic oligonucleotide
cagggcauuguagaugagu

SEQ ID NO: 275877 - RNA, 19 nt, Artificial Sequence
  Description of Artificial Sequence: Synthetic oligonucleotide
aggacucgggcagcauugu

SEQ ID NO: 275878 - RNA, 19 nt, Artificial Sequence
  Description of Artificial Sequence: Synthetic oligonucleotide
ccucgcgcuccugaguugg

SEQ ID NO: 275879 - RNA, 19 nt, Artificial Sequence
  Description of Artificial Sequence: Synthetic oligonucleotide
ccaucacuuugcugaacuc

SEQ ID NO: 275880 - RNA, 19 nt, Artificial Sequence
  Description of Artificial Sequence: Synthetic oligonucleotide
cguucuuucuuggacgauc

SEQ ID NO: 275881 - RNA, 19 nt, Artificial Sequence
  Description of Artificial Sequence: Synthetic oligonucleotide
gagacccacuuuauucagu

SEQ ID NO: 275882 - RNA, 19 nt, Artificial Sequence
  Description of Artificial Sequence: Synthetic oligonucleotide
gugugccucuagugccuug

SEQ ID NO: 275883 - RNA, 19 nt, Artificial Sequence
  Description of Artificial Sequence: Synthetic oligonucleotide
uccuccgaagcagcacuuu

SEQ ID NO: 275884 - RNA, 19 nt, Artificial Sequence
  Description of Artificial Sequence: Synthetic oligonucleotide
agggaggacucgggcagca

SEQ ID NO: 275885 - RNA, 19 nt, Artificial Sequence
  Description of Artificial Sequence: Synthetic oligonucleotide
gccauagaugcgauguaaa

SEQ ID NO: 275886 - RNA, 19 nt, Artificial Sequence
  Description of Artificial Sequence: Synthetic oligonucleotide
ugguuagguggaggauaaa

SEQ ID NO: 275887 - RNA, 19 nt, Artificial Sequence
  Description of Artificial Sequence: Synthetic oligonucleotide
gggcuaggggccuauuugu

SEQ ID NO: 275888 - RNA, 19 nt, Artificial Sequence
  Description of Artificial Sequence: Synthetic oligonucleotide
ggguggugugcuguugcug

SEQ ID NO: 275889 - RNA, 19 nt, Artificial Sequence
  Description of Artificial Sequence: Synthetic oligonucleotide
gagggagcgcucugggcau

SEQ ID NO: 275890 - RNA, 19 nt, Artificial Sequence
  Description of Artificial Sequence: Synthetic oligonucleotide
gacauuggcccgagcccaa

SEQ ID NO: 275891 - RNA, 19 nt, Artificial Sequence
  Description of Artificial Sequence: Synthetic oligonucleotide
gggccuauauucaucuagu

SEQ ID NO: 275892 - RNA, 19 nt, Artificial Sequence
  Description of Artificial Sequence: Synthetic oligonucleotide
gggauucgaugaagguggc

SEQ ID NO: 275893 - RNA, 19 nt, Artificial Sequence
  Description of Artificial Sequence: Synthetic oligonucleotide
uacuagccacagggaggca

SEQ ID NO: 275894 - RNA, 19 nt, Artificial Sequence
  Description of Artificial Sequence: Synthetic oligonucleotide
ccaucucauugaguccugc

SEQ ID NO: 275895 - RNA, 19 nt, Artificial Sequence
  Description of Artificial Sequence: Synthetic oligonucleotide
ccgcuucaccucuuugaac

SEQ ID NO: 275896 - RNA, 19 nt, Artificial Sequence
  Description of Artificial Sequence: Synthetic oligonucleotide
gcguccggaagagauucac

SEQ ID NO: 275897 - RNA, 19 nt, Artificial Sequence
  Description of Artificial Sequence: Synthetic oligonucleotide
gcuccugaguuggcgaauc

SEQ ID NO: 275898 - RNA, 19 nt, Artificial Sequence
  Description of Artificial Sequence: Synthetic oligonucleotide
gcgcucugggcaucccugc

SEQ ID NO: 275899 - RNA, 19 nt, Artificial Sequence
  Description of Artificial Sequence: Synthetic oligonucleotide
ggauucgaugaagguggca

SEQ ID NO: 275900 - RNA, 19 nt, Artificial Sequence
  Description of Artificial Sequence: Synthetic oligonucleotide
ggcagcguccggaagagau

SEQ ID NO: 275901 - RNA, 19 nt, Artificial Sequence
  Description of Artificial Sequence: Synthetic oligonucleotide
cacuggcguagcuucugua

SEQ ID NO: 275902 - RNA, 19 nt, Artificial Sequence
  Description of Artificial Sequence: Synthetic oligonucleotide
cuagugccuugaugguaua

SEQ ID NO: 275903 - RNA, 19 nt, Artificial Sequence
  Description of Artificial Sequence: Synthetic oligonucleotide
uggcuauguuuggcuggaa

SEQ ID NO: 275904 - RNA, 19 nt, Artificial Sequence
  Description of Artificial Sequence: Synthetic oligonucleotide
agcguccggaagagauuca

SEQ ID NO: 275905 - RNA, 19 nt, Artificial Sequence
  Description of Artificial Sequence: Synthetic oligonucleotide
gcgggaggagcuuugccgu

SEQ ID NO: 275906 - RNA, 19 nt, Artificial Sequence
  Description of Artificial Sequence: Synthetic oligonucleotide
gccgucguucuuucuugga

SEQ ID NO: 275907 - RNA, 19 nt, Artificial Sequence
  Description of Artificial Sequence: Synthetic oligonucleotide
gggcuguaacccuguggga

SEQ ID NO: 275908 - RNA, 19 nt, Artificial Sequence
  Description of Artificial Sequence: Synthetic oligonucleotide
cuccucgcgcuccugaguu

SEQ ID NO: 275909 - RNA, 19 nt, Artificial Sequence
  Description of Artificial Sequence: Synthetic oligonucleotide
gcgauguaaaauggucuua

SEQ ID NO: 275910 - RNA, 19 nt, Artificial Sequence
  Description of Artificial Sequence: Synthetic oligonucleotide
acccugugggaaggggaaa

SEQ ID NO: 275911 - RNA, 19 nt, Artificial Sequence
  Description of Artificial Sequence: Synthetic oligonucleotide
cccugaguuacuuguauuu

SEQ ID NO: 275912 - RNA, 19 nt, Artificial Sequence
  Description of Artificial Sequence: Synthetic oligonucleotide
cccgcuucaccucuuugaa

SEQ ID NO: 275913 - RNA, 19 nt, Artificial Sequence
  Description of Artificial Sequence: Synthetic oligonucleotide
cugggccuauauucaucua

SEQ ID NO: 275914 - RNA, 19 nt, Artificial Sequence
  Description of Artificial Sequence: Synthetic oligonucleotide
ggcguagcuucuguauaaa

SEQ ID NO: 275915 - RNA, 19 nt, Artificial Sequence
  Description of Artificial Sequence: Synthetic oligonucleotide
ggacgaucgucggggcccc

SEQ ID NO: 275916 - RNA, 19 nt, Artificial Sequence
  Description of Artificial Sequence: Synthetic oligonucleotide
caguaagacugcucuccuu

SEQ ID NO: 275917 - RNA, 19 nt, Artificial Sequence
  Description of Artificial Sequence: Synthetic oligonucleotide
gccaacugagggugguaua

SEQ ID NO: 275918 - RNA, 19 nt, Artificial Sequence
  Description of Artificial Sequence: Synthetic oligonucleotide
cuuugccgucguucuuucu

SEQ ID NO: 275919 - RNA, 19 nt, Artificial Sequence
  Description of Artificial Sequence: Synthetic oligonucleotide
caacccaccuuagcaugua

SEQ ID NO: 275920 - RNA, 19 nt, Artificial Sequence
  Description of Artificial Sequence: Synthetic oligonucleotide
cauugaguccugcccgcuu

SEQ ID NO: 275921 - RNA, 19 nt, Artificial Sequence
  Description of Artificial Sequence: Synthetic oligonucleotide
ccgugccagcuccucaauc

SEQ ID NO: 275922 - RNA, 19 nt, Artificial Sequence
  Description of Artificial Sequence: Synthetic oligonucleotide
ggcccgagcccaacccacc

SEQ ID NO: 275923 - RNA, 19 nt, Artificial Sequence
  Description of Artificial Sequence: Synthetic oligonucleotide
ccaacccaccuuagcaugu

SEQ ID NO: 275924 - RNA, 19 nt, Artificial Sequence
  Description of Artificial Sequence: Synthetic oligonucleotide
gcgcuccugaguuggcgaa

SEQ ID NO: 275925 - RNA, 19 nt, Artificial Sequence
  Description of Artificial Sequence: Synthetic oligonucleotide
ccgagcccaacccaccuua

SEQ ID NO: 275926 - RNA, 19 nt, Artificial Sequence
  Description of Artificial Sequence: Synthetic oligonucleotide
cuucacuccaagggccaau

SEQ ID NO: 275927 - RNA, 19 nt, Artificial Sequence
  Description of Artificial Sequence: Synthetic oligonucleotide
gcugggacgcuuguuggau

SEQ ID NO: 275928 - RNA, 19 nt, Artificial Sequence
  Description of Artificial Sequence: Synthetic oligonucleotide
ccuuagcauguaucauucu

SEQ ID NO: 275929 - RNA, 19 nt, Artificial Sequence
  Description of Artificial Sequence: Synthetic oligonucleotide
cggcucaguaagacugcuc

SEQ ID NO: 275930 - RNA, 19 nt, Artificial Sequence
  Description of Artificial Sequence: Synthetic oligonucleotide
cacggcugugggugauaua

SEQ ID NO: 275931 - RNA, 19 nt, Artificial Sequence
  Description of Artificial Sequence: Synthetic oligonucleotide
ccauagcuccacugggccu

SEQ ID NO: 275932 - RNA, 19 nt, Artificial Sequence
  Description of Artificial Sequence: Synthetic oligonucleotide
ccaccaaccccugccugca

SEQ ID NO: 275933 - RNA, 19 nt, Artificial Sequence
  Description of Artificial Sequence: Synthetic oligonucleotide
cgggaggagcuuugccguc

SEQ ID NO: 275934 - RNA, 19 nt, Artificial Sequence
  Description of Artificial Sequence: Synthetic oligonucleotide
ggggccuauuugugcugcu

SEQ ID NO: 275935 - RNA, 19 nt, Artificial Sequence
  Description of Artificial Sequence: Synthetic oligonucleotide
gcaaucccauuaugauguu

SEQ ID NO: 275936 - RNA, 19 nt, Artificial Sequence
  Description of Artificial Sequence: Synthetic oligonucleotide
caucacggcugugggugau

SEQ ID NO: 275937 - RNA, 19 nt, Artificial Sequence
  Description of Artificial Sequence: Synthetic oligonucleotide
ccacugggccuauauucau

SEQ ID NO: 275938 - RNA, 19 nt, Artificial Sequence
  Description of Artificial Sequence: Synthetic oligonucleotide
caaccccugccugcauaau

SEQ ID NO: 275939 - RNA, 19 nt, Artificial Sequence
  Description of Artificial Sequence: Synthetic oligonucleotide
cuagggcuaggggccuauu

SEQ ID NO: 275940 - RNA, 19 nt, Artificial Sequence
  Description of Artificial Sequence: Synthetic oligonucleotide
ccggcucaguaagacugcu

SEQ ID NO: 275941 - RNA, 19 nt, Artificial Sequence
  Description of Artificial Sequence: Synthetic oligonucleotide
gggacgcuuguuggaugau

SEQ ID NO: 275942 - RNA, 19 nt, Artificial Sequence
  Description of Artificial Sequence: Synthetic oligonucleotide
cgucugggguccucacuau

SEQ ID NO: 275943 - RNA, 19 nt, Artificial Sequence
  Description of Artificial Sequence: Synthetic oligonucleotide
cccgagcccaacccaccuu

SEQ ID NO: 275944 - RNA, 19 nt, Artificial Sequence
  Description of Artificial Sequence: Synthetic oligonucleotide
agauauauccacuuaaaag

SEQ ID NO: 275945 - RNA, 19 nt, Artificial Sequence
  Description of Artificial Sequence: Synthetic oligonucleotide
accaauguaguauacugcc

SEQ ID NO: 275946 - RNA, 19 nt, Artificial Sequence
  Description of Artificial Sequence: Synthetic oligonucleotide
aauucagccaaguauuuug

SEQ ID NO: 275947 - RNA, 19 nt, Artificial Sequence
  Description of Artificial Sequence: Synthetic oligonucleotide
uauuagguuacauauauau

SEQ ID NO: 275948 - RNA, 19 nt, Artificial Sequence
  Description of Artificial Sequence: Synthetic oligonucleotide
agucagucaaauuacauug

SEQ ID NO: 275949 - RNA, 19 nt, Artificial Sequence
  Description of Artificial Sequence: Synthetic oligonucleotide
aaauucggcucucagugac

SEQ ID NO: 275950 - RNA, 19 nt, Artificial Sequence
  Description of Artificial Sequence: Synthetic oligonucleotide
uucuagaugcaccugaagc

SEQ ID NO: 275951 - RNA, 19 nt, Artificial Sequence
  Description of Artificial Sequence: Synthetic oligonucleotide
uggagugaguuuauuagcg

SEQ ID NO: 275952 - RNA, 19 nt, Artificial Sequence
  Description of Artificial Sequence: Synthetic oligonucleotide
uaagcauugaaauucggcu

SEQ ID NO: 275953 - RNA, 19 nt, Artificial Sequence
  Description of Artificial Sequence: Synthetic oligonucleotide
auaaagaacgcguuaaaga

SEQ ID NO: 275954 - RNA, 19 nt, Artificial Sequence
  Description of Artificial Sequence: Synthetic oligonucleotide
acacauaauugucaugucg

SEQ ID NO: 275955 - RNA, 19 nt, Artificial Sequence
  Description of Artificial Sequence: Synthetic oligonucleotide
ugcguaaucuaguaucugg

SEQ ID NO: 275956 - RNA, 19 nt, Artificial Sequence
  Description of Artificial Sequence: Synthetic oligonucleotide
guuuauuagcgcuagagga

SEQ ID NO: 275957 - RNA, 19 nt, Artificial Sequence
  Description of Artificial Sequence: Synthetic oligonucleotide
aagauguucggacauugug

SEQ ID NO: 275958 - RNA, 19 nt, Artificial Sequence
  Description of Artificial Sequence: Synthetic oligonucleotide
ucugaggcgaacaaaauua

SEQ ID NO: 275959 - RNA, 19 nt, Artificial Sequence
  Description of Artificial Sequence: Synthetic oligonucleotide
uuuauuagcgcuagaggac

SEQ ID NO: 275960 - RNA, 19 nt, Artificial Sequence
  Description of Artificial Sequence: Synthetic oligonucleotide
aucuaggaugaugagaacc

SEQ ID NO: 275961 - RNA, 19 nt, Artificial Sequence
  Description of Artificial Sequence: Synthetic oligonucleotide
  modified_base (7)..(7): a, c, u, g, unknown or other
ucuaacnccaucucucgug

SEQ ID NO: 275962 - RNA, 19 nt, Artificial Sequence
  Description of Artificial Sequence: Synthetic oligonucleotide
uaugauuaucugcaugcag

SEQ ID NO: 275963 - RNA, 19 nt, Artificial Sequence
  Description of Artificial Sequence: Synthetic oligonucleotide
agauaucguauuuucuugg

SEQ ID NO: 275964 - RNA, 19 nt, Artificial Sequence
  Description of Artificial Sequence: Synthetic oligonucleotide
aaaacugcuagugcgaagu

SEQ ID NO: 275965 - RNA, 19 nt, Artificial Sequence
  Description of Artificial Sequence: Synthetic oligonucleotide
ugaagauugcucauuauuu

SEQ ID NO: 275966 - RNA, 19 nt, Artificial Sequence
  Description of Artificial Sequence: Synthetic oligonucleotide
ucuagaugcaccugaagcu

SEQ ID NO: 275967 - RNA, 19 nt, Artificial Sequence
  Description of Artificial Sequence: Synthetic oligonucleotide
uugcucauuauuuauggcu

SEQ ID NO: 275968 - RNA, 19 nt, Artificial Sequence
  Description of Artificial Sequence: Synthetic oligonucleotide
guuccuaagauauauccac

SEQ ID NO: 275969 - RNA, 19 nt, Artificial Sequence
  Description of Artificial Sequence: Synthetic oligonucleotide
cuucaagcaaacgagcucg

SEQ ID NO: 275970 - RNA, 19 nt, Artificial Sequence
  Description of Artificial Sequence: Synthetic oligonucleotide
uauacugccguguugacuu

SEQ ID NO: 275971 - RNA, 19 nt, Artificial Sequence
  Description of Artificial Sequence: Synthetic oligonucleotide
aagaacgcguuaaagagug

SEQ ID NO: 275972 - RNA, 19 nt, Artificial Sequence
  Description of Artificial Sequence: Synthetic oligonucleotide
agugcaaggacucuugagu

SEQ ID NO: 275973 - RNA, 19 nt, Artificial Sequence
  Description of Artificial Sequence: Synthetic oligonucleotide
ucggucuucagaaagugac

SEQ ID NO: 275974 - RNA, 19 nt, Artificial Sequence
  Description of Artificial Sequence: Synthetic oligonucleotide
uaagauauauccacuuaaa

SEQ ID NO: 275975 - RNA, 19 nt, Artificial Sequence
  Description of Artificial Sequence: Synthetic oligonucleotide
cagcaaucaaagauguucg

SEQ ID NO: 275976 - RNA, 19 nt, Artificial Sequence
  Description of Artificial Sequence: Synthetic oligonucleotide
uguuccuaagauauaucca

SEQ ID NO: 275977 - RNA, 19 nt, Artificial Sequence
  Description of Artificial Sequence: Synthetic oligonucleotide
aauguaguauacugccgug

SEQ ID NO: 275978 - RNA, 19 nt, Artificial Sequence
  Description of Artificial Sequence: Synthetic oligonucleotide
ucagauaucguauuuucuu

SEQ ID NO: 275979 - RNA, 19 nt, Artificial Sequence
  Description of Artificial Sequence: Synthetic oligonucleotide
agcgcuagaggacaaauca

SEQ ID NO: 275980 - RNA, 19 nt, Artificial Sequence
  Description of Artificial Sequence: Synthetic oligonucleotide
ucuuugauuuaaccgcuug

SEQ ID NO: 275981 - RNA, 19 nt, Artificial Sequence
  Description of Artificial Sequence: Synthetic oligonucleotide
uccaacuuaaauuccugga

SEQ ID NO: 275982 - RNA, 19 nt, Artificial Sequence
  Description of Artificial Sequence: Synthetic oligonucleotide
agcuaauguuuauuaacag

SEQ ID NO: 275983 - RNA, 19 nt, Artificial Sequence
  Description of Artificial Sequence: Synthetic oligonucleotide
  modified_base (4)..(4): a, c, u, g, unknown or other
aacnccaucucucgugacu

SEQ ID NO: 275984 - RNA, 19 nt, Artificial Sequence
  Description of Artificial Sequence: Synthetic oligonucleotide
auugaaauucggcucucag

SEQ ID NO: 275985 - RNA, 19 nt, Artificial Sequence
  Description of Artificial Sequence: Synthetic oligonucleotide
uuggagugaguuuauuagc

SEQ ID NO: 275986 - RNA, 19 nt, Artificial Sequence
  Description of Artificial Sequence: Synthetic oligonucleotide
acacuuuauaaagaacgcg

SEQ ID NO: 275987 - RNA, 19 nt, Artificial Sequence
  Description of Artificial Sequence: Synthetic oligonucleotide
  modified_base (9)..(9): a, c, u, g, unknown or other
cuucuaacnccaucucucg

SEQ ID NO: 275988 - RNA, 19 nt, Artificial Sequence
  Description of Artificial Sequence: Synthetic oligonucleotide
uaaucuaguaucuggucaa

SEQ ID NO: 275989 - RNA, 19 nt, Artificial Sequence
  Description of Artificial Sequence: Synthetic oligonucleotide
gaggcgaacaaaauuauga

SEQ ID NO: 275990 - RNA, 19 nt, Artificial Sequence
  Description of Artificial Sequence: Synthetic oligonucleotide
gauguucggacauugugca

SEQ ID NO: 275991 - RNA, 19 nt, Artificial Sequence
  Description of Artificial Sequence: Synthetic oligonucleotide
ugaccucuaaauguuaaug

SEQ ID NO: 275992 - RNA, 19 nt, Artificial Sequence
  Description of Artificial Sequence: Synthetic oligonucleotide
ucucucuccaacuuaaauu

SEQ ID NO: 275993 - RNA, 19 nt, Artificial Sequence
  Description of Artificial Sequence: Synthetic oligonucleotide
cuaucaaaucuuugucacg

SEQ ID NO: 275994 - RNA, 19 nt, Artificial Sequence
  Description of Artificial Sequence: Synthetic oligonucleotide
agcauugaaauucggcucu

SEQ ID NO: 275995 - RNA, 19 nt, Artificial Sequence
  Description of Artificial Sequence: Synthetic oligonucleotide
cuaggcuugacgaaucuuc

SEQ ID NO: 275996 - RNA, 19 nt, Artificial Sequence
  Description of Artificial Sequence: Synthetic oligonucleotide
uucagauaucguauuuucu

SEQ ID NO: 275997 - RNA, 19 nt, Artificial Sequence
  Description of Artificial Sequence: Synthetic oligonucleotide
uacauaggauacaaacaac

SEQ ID NO: 275998 - RNA, 19 nt, Artificial Sequence
  Description of Artificial Sequence: Synthetic oligonucleotide
uaguauacugccguguuga

SEQ ID NO: 275999 - RNA, 19 nt, Artificial Sequence
  Description of Artificial Sequence: Synthetic oligonucleotide
acauaggauacaaacaaca

SEQ ID NO: 276000 - RNA, 19 nt, Artificial Sequence
  Description of Artificial Sequence: Synthetic oligonucleotide
uguccguucuagaagcaug

SEQ ID NO: 276001 - RNA, 19 nt, Artificial Sequence
  Description of Artificial Sequence: Synthetic oligonucleotide
ugucuagucagcuaauguu

SEQ ID NO: 276002 - RNA, 19 nt, Artificial Sequence
  Description of Artificial Sequence: Synthetic oligonucleotide
uugaaauucggcucucagu

SEQ ID NO: 276003 - RNA, 19 nt, Artificial Sequence
  Description of Artificial Sequence: Synthetic oligonucleotide
uuauuagcgcuagaggaca

SEQ ID NO: 276004 - RNA, 19 nt, Artificial Sequence
  Description of Artificial Sequence: Synthetic oligonucleotide
uuaucuccauugcugaguc

SEQ ID NO: 276005 - RNA, 19 nt, Artificial Sequence
  Description of Artificial Sequence: Synthetic oligonucleotide
agaauuuguguuagcaguc

SEQ ID NO: 276006 - RNA, 19 nt, Artificial Sequence
  Description of Artificial Sequence: Synthetic oligonucleotide
aguugaggcaugcguaauc

SEQ ID NO: 276007 - RNA, 19 nt, Artificial Sequence
  Description of Artificial Sequence: Synthetic oligonucleotide
cuccaacuuaaauuccugg

SEQ ID NO: 276008 - RNA, 19 nt, Artificial Sequence
  Description of Artificial Sequence: Synthetic oligonucleotide
aagcgcaaccaugaauuac

SEQ ID NO: 276009 - RNA, 19 nt, Artificial Sequence
  Description of Artificial Sequence: Synthetic oligonucleotide
agcaaucaaagauguucgg

SEQ ID NO: 276010 - RNA, 19 nt, Artificial Sequence
  Description of Artificial Sequence: Synthetic oligonucleotide
ucggacauugugcauuucu

SEQ ID NO: 276011 - RNA, 19 nt, Artificial Sequence
  Description of Artificial Sequence: Synthetic oligonucleotide
guuacauaggauacaaaca

SEQ ID NO: 276012 - RNA, 19 nt, Artificial Sequence
  Description of Artificial Sequence: Synthetic oligonucleotide
agaucauuuauuauguuuu

SEQ ID NO: 276013 - RNA, 19 nt, Artificial Sequence
  Description of Artificial Sequence: Synthetic oligonucleotide
ugaggcgaacaaaauuaug

SEQ ID NO: 276014 - RNA, 19 nt, Artificial Sequence
  Description of Artificial Sequence: Synthetic oligonucleotide
caccaauguaguauacugc

SEQ ID NO: 276015 - RNA, 19 nt, Artificial Sequence
  Description of Artificial Sequence: Synthetic oligonucleotide
gauaucguauuuucuugga

SEQ ID NO: 276016 - RNA, 19 nt, Artificial Sequence
  Description of Artificial Sequence: Synthetic oligonucleotide
gacucuaucaaaucuuugu

SEQ ID NO: 276017 - RNA, 19 nt, Artificial Sequence
  Description of Artificial Sequence: Synthetic oligonucleotide
caguguuaaaauuggucug

SEQ ID NO: 276018 - RNA, 19 nt, Artificial Sequence
  Description of Artificial Sequence: Synthetic oligonucleotide
aaagaacgcguuaaagagu

SEQ ID NO: 276019 - RNA, 19 nt, Artificial Sequence
  Description of Artificial Sequence: Synthetic oligonucleotide
uuauugucuuaaaauugua

SEQ ID NO: 276020 - RNA, 19 nt, Artificial Sequence
  Description of Artificial Sequence: Synthetic oligonucleotide
uucuaaagcccuaguuuac

SEQ ID NO: 276021 - RNA, 19 nt, Artificial Sequence
  Description of Artificial Sequence: Synthetic oligonucleotide
ucucguuaaaacaguguua

SEQ ID NO: 276022 - RNA, 19 nt, Artificial Sequence
  Description of Artificial Sequence: Synthetic oligonucleotide
uguaguauacugccguguu

SEQ ID NO: 276023 - RNA, 19 nt, Artificial Sequence
  Description of Artificial Sequence: Synthetic oligonucleotide
uuauuucaaacaguccuaa

SEQ ID NO: 276024 - RNA, 19 nt, Artificial Sequence
  Description of Artificial Sequence: Synthetic oligonucleotide
ucgaaaggcacacguauuu

SEQ ID NO: 276025 - RNA, 19 nt, Artificial Sequence
  Description of Artificial Sequence: Synthetic oligonucleotide
ugacgaaucuucucuggcu

SEQ ID NO: 276026 - RNA, 19 nt, Artificial Sequence
  Description of Artificial Sequence: Synthetic oligonucleotide
ucuagucagcuaauguuua

SEQ ID NO: 276027 - RNA, 19 nt, Artificial Sequence
  Description of Artificial Sequence: Synthetic oligonucleotide
aauaguuuggaaggauuua

SEQ ID NO: 276028 - RNA, 19 nt, Artificial Sequence
  Description of Artificial Sequence: Synthetic oligonucleotide
aguaacuaguuugguccgc

SEQ ID NO: 276029 - RNA, 19 nt, Artificial Sequence
  Description of Artificial Sequence: Synthetic oligonucleotide
uuauuuggguggaaacaaa

SEQ ID NO: 276030 - RNA, 19 nt, Artificial Sequence
  Description of Artificial Sequence: Synthetic oligonucleotide
caguaacuaguuugguccg

SEQ ID NO: 276031 - RNA, 19 nt, Artificial Sequence
  Description of Artificial Sequence: Synthetic oligonucleotide
aaguuguuuggagugaguu

SEQ ID NO: 276032 - RNA, 19 nt, Artificial Sequence
  Description of Artificial Sequence: Synthetic oligonucleotide
ucuaaagcccuaguuuaca

SEQ ID NO: 276033 - RNA, 19 nt, Artificial Sequence
  Description of Artificial Sequence: Synthetic oligonucleotide
gagugcaaggacucuugag

SEQ ID NO: 276034 - RNA, 19 nt, Artificial Sequence
  Description of Artificial Sequence: Synthetic oligonucleotide
agucagcuaauguuuauua

SEQ ID NO: 276035 - RNA, 19 nt, Artificial Sequence
  Description of Artificial Sequence: Synthetic oligonucleotide
aguauacugccguguugac

SEQ ID NO: 276036 - RNA, 19 nt, Artificial Sequence
  Description of Artificial Sequence: Synthetic oligonucleotide
uagugcgaaguuuacucac

SEQ ID NO: 276037 - RNA, 19 nt, Artificial Sequence
  Description of Artificial Sequence: Synthetic oligonucleotide
uuaugauuaucugcaugca

SEQ ID NO: 276038 - RNA, 19 nt, Artificial Sequence
  Description of Artificial Sequence: Synthetic oligonucleotide
aacuaggcuugacgaaucu

SEQ ID NO: 276039 - RNA, 19 nt, Artificial Sequence
  Description of Artificial Sequence: Synthetic oligonucleotide
auaguugaggcaugcguaa

SEQ ID NO: 276040 - RNA, 19 nt, Artificial Sequence
  Description of Artificial Sequence: Synthetic oligonucleotide
uccuaagauauauccacuu

SEQ ID NO: 276041 - RNA, 19 nt, Artificial Sequence
  Description of Artificial Sequence: Synthetic oligonucleotide
aacgagcucggucuucaga

SEQ ID NO: 276042 - RNA, 19 nt, Artificial Sequence
  Description of Artificial Sequence: Synthetic oligonucleotide
caaagauguucggacauug

SEQ ID NO: 276043 - RNA, 19 nt, Artificial Sequence
  Description of Artificial Sequence: Synthetic oligonucleotide
gcuagugcgaaguuuacuc

SEQ ID NO: 276044 - RNA, 19 nt, Artificial Sequence
  Description of Artificial Sequence: Synthetic oligonucleotide
uggcuauuugaaucucaag

SEQ ID NO: 276045 - RNA, 19 nt, Artificial Sequence
  Description of Artificial Sequence: Synthetic oligonucleotide
aacuaguuugguccgcauu

SEQ ID NO: 276046 - RNA, 19 nt, Artificial Sequence
  Description of Artificial Sequence: Synthetic oligonucleotide
aggcgaacaaaauuaugau

SEQ ID NO: 276047 - RNA, 19 nt, Artificial Sequence
  Description of Artificial Sequence: Synthetic oligonucleotide
uuugguccgcauuucuagu

SEQ ID NO: 276048 - RNA, 19 nt, Artificial Sequence
  Description of Artificial Sequence: Synthetic oligonucleotide
gcaugcguaaucuaguauc

SEQ ID NO: 276049 - RNA, 19 nt, Artificial Sequence
  Description of Artificial Sequence: Synthetic oligonucleotide
gauaguugaggcaugcgua

SEQ ID NO: 276050 - RNA, 19 nt, Artificial Sequence
  Description of Artificial Sequence: Synthetic oligonucleotide
cuggucaauucuuuguuga

SEQ ID NO: 276051 - RNA, 19 nt, Artificial Sequence
  Description of Artificial Sequence: Synthetic oligonucleotide
guaguauacugccguguug

SEQ ID NO: 276052 - RNA, 19 nt, Artificial Sequence
  Description of Artificial Sequence: Synthetic oligonucleotide
aguuuacucacuucuucuu

SEQ ID NO: 276053 - RNA, 19 nt, Artificial Sequence
  Description of Artificial Sequence: Synthetic oligonucleotide
uggcuugacaauauuccuu

SEQ ID NO: 276054 - RNA, 19 nt, Artificial Sequence
  Description of Artificial Sequence: Synthetic oligonucleotide
gaacgcguuaaagagugca

SEQ ID NO: 276055 - RNA, 19 nt, Artificial Sequence
  Description of Artificial Sequence: Synthetic oligonucleotide
  modified_base (8)..(8): a, c, u, g, unknown or other
uucuaacnccaucucucgu

SEQ ID NO: 276056 - RNA, 19 nt, Artificial Sequence
  Description of Artificial Sequence: Synthetic oligonucleotide
agcgcaaccaugaauuaca

SEQ ID NO: 276057 - RNA, 19 nt, Artificial Sequence
  Description of Artificial Sequence: Synthetic oligonucleotide
gaggcuagucacaagccac

SEQ ID NO: 276058 - RNA, 19 nt, Artificial Sequence
  Description of Artificial Sequence: Synthetic oligonucleotide
ucaugucgcucaucuagga

SEQ ID NO: 276059 - RNA, 19 nt, Artificial Sequence
  Description of Artificial Sequence: Synthetic oligonucleotide
gagugaguuuauuagcgcu

SEQ ID NO: 276060 - RNA, 19 nt, Artificial Sequence
  Description of Artificial Sequence: Synthetic oligonucleotide
gucaugucgcucaucuagg

SEQ ID NO: 276061 - RNA, 19 nt, Artificial Sequence
  Description of Artificial Sequence: Synthetic oligonucleotide
  modified_base (3)..(3): a, c, u, g, unknown or other
acnccaucucucgugacug

SEQ ID NO: 276062 - RNA, 19 nt, Artificial Sequence
  Description of Artificial Sequence: Synthetic oligonucleotide
ccaccaauguaguauacug

SEQ ID NO: 276063 - RNA, 19 nt, Artificial Sequence
  Description of Artificial Sequence: Synthetic oligonucleotide
uggauaguugaggcaugcg

SEQ ID NO: 276064 - RNA, 19 nt, Artificial Sequence
  Description of Artificial Sequence: Synthetic oligonucleotide
uucuagaagcaugauccuc

SEQ ID NO: 276065 - RNA, 19 nt, Artificial Sequence
  Description of Artificial Sequence: Synthetic oligonucleotide
gucacgcucuuguuguugc

SEQ ID NO: 276066 - RNA, 19 nt, Artificial Sequence
  Description of Artificial Sequence: Synthetic oligonucleotide
aaagauguucggacauugu

SEQ ID NO: 276067 - RNA, 19 nt, Artificial Sequence
  Description of Artificial Sequence: Synthetic oligonucleotide
acgcguuaaagagugcaag

SEQ ID NO: 276068 - RNA, 19 nt, Artificial Sequence
  Description of Artificial Sequence: Synthetic oligonucleotide
gaaauucggcucucaguga

SEQ ID NO: 276069 - RNA, 19 nt, Artificial Sequence
  Description of Artificial Sequence: Synthetic oligonucleotide
ugaguuuauuagcgcuaga

SEQ ID NO: 276070 - RNA, 19 nt, Artificial Sequence
  Description of Artificial Sequence: Synthetic oligonucleotide
gauuaucugcaugcaguac

SEQ ID NO: 276071 - RNA, 19 nt, Artificial Sequence
  Description of Artificial Sequence: Synthetic oligonucleotide
aggcacacguauuuacacu

SEQ ID NO: 276072 - RNA, 19 nt, Artificial Sequence
  Description of Artificial Sequence: Synthetic oligonucleotide
  modified_base (6)..(6): a, c, u, g, unknown or other
cuaacnccaucucucguga

SEQ ID NO: 276073 - RNA, 19 nt, Artificial Sequence
  Description of Artificial Sequence: Synthetic oligonucleotide
uucuaguuauuugggugga

SEQ ID NO: 276074 - RNA, 19 nt, Artificial Sequence
  Description of Artificial Sequence: Synthetic oligonucleotide
aaucucgaauggcuauuuu

SEQ ID NO: 276075 - RNA, 19 nt, Artificial Sequence
  Description of Artificial Sequence: Synthetic oligonucleotide
guagggcuaacaguaaaca

SEQ ID NO: 276076 - RNA, 19 nt, Artificial Sequence
  Description of Artificial Sequence: Synthetic oligonucleotide
guaaccuucgaaaggcaca

SEQ ID NO: 276077 - RNA, 19 nt, Artificial Sequence
  Description of Artificial Sequence: Synthetic oligonucleotide
uuagcgcuagaggacaaau

SEQ ID NO: 276078 - RNA, 19 nt, Artificial Sequence
  Description of Artificial Sequence: Synthetic oligonucleotide
cagcaacuaggcuugacga

SEQ ID NO: 276079 - RNA, 19 nt, Artificial Sequence
  Description of Artificial Sequence: Synthetic oligonucleotide
uuguguuagcagucuucug

SEQ ID NO: 276080 - RNA, 19 nt, Artificial Sequence
  Description of Artificial Sequence: Synthetic oligonucleotide
agugacucuaucaaaucuu

SEQ ID NO: 276081 - RNA, 19 nt, Artificial Sequence
  Description of Artificial Sequence: Synthetic oligonucleotide
ugcgaaguuuacucacuuc

SEQ ID NO: 276082 - RNA, 19 nt, Artificial Sequence
  Description of Artificial Sequence: Synthetic oligonucleotide
augaccucuaaauguuaau

SEQ ID NO: 276083 - RNA, 19 nt, Artificial Sequence
  Description of Artificial Sequence: Synthetic oligonucleotide
ccaauguaguauacugccg

SEQ ID NO: 276084 - RNA, 19 nt, Artificial Sequence
  Description of Artificial Sequence: Synthetic oligonucleotide
uauuagcgcuagaggacaa

SEQ ID NO: 276085 - RNA, 19 nt, Artificial Sequence
  Description of Artificial Sequence: Synthetic oligonucleotide
uucagccaaguauuuugau

SEQ ID NO: 276086 - RNA, 19 nt, Artificial Sequence
  Description of Artificial Sequence: Synthetic oligonucleotide
uccgcauuucuaguuauuu

SEQ ID NO: 276087 - RNA, 19 nt, Artificial Sequence
  Description of Artificial Sequence: Synthetic oligonucleotide
uagcgcuagaggacaaauc

SEQ ID NO: 276088 - RNA, 19 nt, Artificial Sequence
  Description of Artificial Sequence: Synthetic oligonucleotide
agagugcaaggacucuuga

SEQ ID NO: 276089 - RNA, 19 nt, Artificial Sequence
  Description of Artificial Sequence: Synthetic oligonucleotide
auguaguauacugccgugu

SEQ ID NO: 276090 - RNA, 19 nt, Artificial Sequence
  Description of Artificial Sequence: Synthetic oligonucleotide
cuaguaucuggucaauucu

SEQ ID NO: 276091 - RNA, 19 nt, Artificial Sequence
  Description of Artificial Sequence: Synthetic oligonucleotide
caacuaggcuugacgaauc

SEQ ID NO: 276092 - RNA, 19 nt, Artificial Sequence
  Description of Artificial Sequence: Synthetic oligonucleotide
guuauuuaaaugaccucua

SEQ ID NO: 276093 - RNA, 19 nt, Artificial Sequence
  Description of Artificial Sequence: Synthetic oligonucleotide
ugguccgcauuucuaguua

SEQ ID NO: 276094 - RNA, 19 nt, Artificial Sequence
  Description of Artificial Sequence: Synthetic oligonucleotide
aguuugaauccugcacuug

SEQ ID NO: 276095 - RNA, 19 nt, Artificial Sequence
  Description of Artificial Sequence: Synthetic oligonucleotide
aagcccuaguuuacaaggu

SEQ ID NO: 276096 - RNA, 19 nt, Artificial Sequence
  Description of Artificial Sequence: Synthetic oligonucleotide
aacugcuagugcgaaguuu

SEQ ID NO: 276097 - RNA, 19 nt, Artificial Sequence
  Description of Artificial Sequence: Synthetic oligonucleotide
aacgcguuaaagagugcaa

SEQ ID NO: 276098 - RNA, 19 nt, Artificial Sequence
  Description of Artificial Sequence: Synthetic oligonucleotide
uaagcgcaaccaugaauua

SEQ ID NO: 276099 - RNA, 19 nt, Artificial Sequence
  Description of Artificial Sequence: Synthetic oligonucleotide
aaccuucgaaaggcacacg

SEQ ID NO: 276100 - RNA, 19 nt, Artificial Sequence
  Description of Artificial Sequence: Synthetic oligonucleotide
cauucauuguauccucuaa

SEQ ID NO: 276101 - RNA, 19 nt, Artificial Sequence
  Description of Artificial Sequence: Synthetic oligonucleotide
aacugcaauguccguucua

SEQ ID NO: 276102 - RNA, 19 nt, Artificial Sequence
  Description of Artificial Sequence: Synthetic oligonucleotide
uugguccgcauuucuaguu

SEQ ID NO: 276103 - RNA, 19 nt, Artificial Sequence
  Description of Artificial Sequence: Synthetic oligonucleotide
aauguccguucuagaagca

SEQ ID NO: 276104 - RNA, 19 nt, Artificial Sequence
  Description of Artificial Sequence: Synthetic oligonucleotide
cagucaaauuacauuguua

SEQ ID NO: 276105 - RNA, 19 nt, Artificial Sequence
  Description of Artificial Sequence: Synthetic oligonucleotide
caugcguaaucuaguaucu

SEQ ID NO: 276106 - RNA, 19 nt, Artificial Sequence
  Description of Artificial Sequence: Synthetic oligonucleotide
acacguauuuacacuuuca

SEQ ID NO: 276107 - RNA, 19 nt, Artificial Sequence
  Description of Artificial Sequence: Synthetic oligonucleotide
agugaguuuauuagcgcua

SEQ ID NO: 276108 - RNA, 19 nt, Artificial Sequence
  Description of Artificial Sequence: Synthetic oligonucleotide
  modified_base (5)..(5): a, c, u, g, unknown or other
uaacnccaucucucgugac

SEQ ID NO: 276109 - RNA, 19 nt, Artificial Sequence
  Description of Artificial Sequence: Synthetic oligonucleotide
caucuaggaugaugagaac

SEQ ID NO: 276110 - RNA, 19 nt, Artificial Sequence
  Description of Artificial Sequence: Synthetic oligonucleotide
cuucgaaaggcacacguau

SEQ ID NO: 276111 - RNA, 19 nt, Artificial Sequence
  Description of Artificial Sequence: Synthetic oligonucleotide
guaacuaguuugguccgca

SEQ ID NO: 276112 - RNA, 19 nt, Artificial Sequence
  Description of Artificial Sequence: Synthetic oligonucleotide
gcgaaguuuacucacuucu

SEQ ID NO: 276113 - RNA, 19 nt, Artificial Sequence
  Description of Artificial Sequence: Synthetic oligonucleotide
agaacgcguuaaagagugc

SEQ ID NO: 276114 - RNA, 19 nt, Artificial Sequence
  Description of Artificial Sequence: Synthetic oligonucleotide
agugcgaaguuuacucacu

SEQ ID NO: 276115 - RNA, 19 nt, Artificial Sequence
  Description of Artificial Sequence: Synthetic oligonucleotide
cucucguuaaaacaguguu

SEQ ID NO: 276116 - RNA, 19 nt, Artificial Sequence
  Description of Artificial Sequence: Synthetic oligonucleotide
acgguaucagauguagaau

SEQ ID NO: 276117 - RNA, 19 nt, Artificial Sequence
  Description of Artificial Sequence: Synthetic oligonucleotide
ggauaguugaggcaugcgu

SEQ ID NO: 276118 - RNA, 19 nt, Artificial Sequence
  Description of Artificial Sequence: Synthetic oligonucleotide
cgcguuaaagagugcaagg

SEQ ID NO: 276119 - RNA, 19 nt, Artificial Sequence
  Description of Artificial Sequence: Synthetic oligonucleotide
uaacuaguuugguccgcau

SEQ ID NO: 276120 - RNA, 19 nt, Artificial Sequence
  Description of Artificial Sequence: Synthetic oligonucleotide
gugccgaggggauaaaacu

SEQ ID NO: 276121 - RNA, 19 nt, Artificial Sequence
  Description of Artificial Sequence: Synthetic oligonucleotide
aggcaugcguaaucuagua

SEQ ID NO: 276122 - RNA, 19 nt, Artificial Sequence
  Description of Artificial Sequence: Synthetic oligonucleotide
ucuaguuauuuggguggaa

SEQ ID NO: 276123 - RNA, 19 nt, Artificial Sequence
  Description of Artificial Sequence: Synthetic oligonucleotide
cuauuagguuacauauaua

SEQ ID NO: 276124 - RNA, 19 nt, Artificial Sequence
  Description of Artificial Sequence: Synthetic oligonucleotide
augcguaaucuaguaucug

SEQ ID NO: 276125 - RNA, 19 nt, Artificial Sequence
  Description of Artificial Sequence: Synthetic oligonucleotide
uugaggcaugcguaaucua

SEQ ID NO: 276126 - RNA, 19 nt, Artificial Sequence
  Description of Artificial Sequence: Synthetic oligonucleotide
uucagcaacuaggcuugac

SEQ ID NO: 276127 - RNA, 19 nt, Artificial Sequence
  Description of Artificial Sequence: Synthetic oligonucleotide
ucacgcucuuguuguugca

SEQ ID NO: 276128 - RNA, 19 nt, Artificial Sequence
  Description of Artificial Sequence: Synthetic oligonucleotide
guugaggcaugcguaaucu

SEQ ID NO: 276129 - RNA, 19 nt, Artificial Sequence
  Description of Artificial Sequence: Synthetic oligonucleotide
cugcuagugcgaaguuuac

SEQ ID NO: 276130 - RNA, 19 nt, Artificial Sequence
  Description of Artificial Sequence: Synthetic oligonucleotide
  modified_base (2)..(2): a, c, u, g, unknown or other
cnccaucucucgugacugc

SEQ ID NO: 276131 - RNA, 19 nt, Artificial Sequence
  Description of Artificial Sequence: Synthetic oligonucleotide
cucggucuucagaaaguga

SEQ ID NO: 276132 - RNA, 19 nt, Artificial Sequence
  Description of Artificial Sequence: Synthetic oligonucleotide
uguuuggagugaguuuauu

SEQ ID NO: 276133 - RNA, 19 nt, Artificial Sequence
  Description of Artificial Sequence: Synthetic oligonucleotide
ggugccgaggggauaaaac

SEQ ID NO: 276134 - RNA, 19 nt, Artificial Sequence
  Description of Artificial Sequence: Synthetic oligonucleotide
gcguuaaagagugcaagga

SEQ ID NO: 276135 - RNA, 19 nt, Artificial Sequence
  Description of Artificial Sequence: Synthetic oligonucleotide
gccgaggggauaaaacugc

SEQ ID NO: 276136 - RNA, 19 nt, Artificial Sequence
  Description of Artificial Sequence: Synthetic oligonucleotide
guucuagaagcaugauccu

SEQ ID NO: 276137 - RNA, 19 nt, Artificial Sequence
  Description of Artificial Sequence: Synthetic oligonucleotide
aguuugguccgcauuucua

SEQ ID NO: 276138 - RNA, 19 nt, Artificial Sequence
  Description of Artificial Sequence: Synthetic oligonucleotide
agcaaacgagcucggucuu

SEQ ID NO: 276139 - RNA, 19 nt, Artificial Sequence
  Description of Artificial Sequence: Synthetic oligonucleotide
gucuagucagcuaauguuu

SEQ ID NO: 276140 - RNA, 19 nt, Artificial Sequence
  Description of Artificial Sequence: Synthetic oligonucleotide
auuagcgcuagaggacaaa

SEQ ID NO: 276141 - RNA, 19 nt, Artificial Sequence
  Description of Artificial Sequence: Synthetic oligonucleotide
auguccguucuagaagcau

SEQ ID NO: 276142 - RNA, 19 nt, Artificial Sequence
  Description of Artificial Sequence: Synthetic oligonucleotide
uagcagcaacccugaagau

SEQ ID NO: 276143 - RNA, 19 nt, Artificial Sequence
  Description of Artificial Sequence: Synthetic oligonucleotide
gaggcaugcguaaucuagu

SEQ ID NO: 276144 - RNA, 19 nt, Artificial Sequence
  Description of Artificial Sequence: Synthetic oligonucleotide
acuaggcuugacgaaucuu

SEQ ID NO: 276145 - RNA, 19 nt, Artificial Sequence
  Description of Artificial Sequence: Synthetic oligonucleotide
gaacaguaacuaguuuggu

SEQ ID NO: 276146 - RNA, 19 nt, Artificial Sequence
  Description of Artificial Sequence: Synthetic oligonucleotide
gcgcuagaggacaaaucag

SEQ ID NO: 276147 - RNA, 19 nt, Artificial Sequence
  Description of Artificial Sequence: Synthetic oligonucleotide
guaguccaccaauguagua

SEQ ID NO: 276148 - RNA, 19 nt, Artificial Sequence
  Description of Artificial Sequence: Synthetic oligonucleotide
cccaccuagcuacuucagc

SEQ ID NO: 276149 - RNA, 19 nt, Artificial Sequence
  Description of Artificial Sequence: Synthetic oligonucleotide
ggcgaacaaaauuaugauu

SEQ ID NO: 276150 - RNA, 19 nt, Artificial Sequence
  Description of Artificial Sequence: Synthetic oligonucleotide
cugaggcgaacaaaauuau

SEQ ID NO: 276151 - RNA, 19 nt, Artificial Sequence
  Description of Artificial Sequence: Synthetic oligonucleotide
ggcacacguauuuacacuu

SEQ ID NO: 276152 - RNA, 19 nt, Artificial Sequence
  Description of Artificial Sequence: Synthetic oligonucleotide
guauacugccguguugacu

SEQ ID NO: 276153 - RNA, 19 nt, Artificial Sequence
  Description of Artificial Sequence: Synthetic oligonucleotide
ccuaagauauauccacuua

SEQ ID NO: 276154 - RNA, 19 nt, Artificial Sequence
  Description of Artificial Sequence: Synthetic oligonucleotide
cuguaagcacaggugccga

SEQ ID NO: 276155 - RNA, 19 nt, Artificial Sequence
  Description of Artificial Sequence: Synthetic oligonucleotide
auacugccguguugacuuu

SEQ ID NO: 276156 - RNA, 19 nt, Artificial Sequence
  Description of Artificial Sequence: Synthetic oligonucleotide
caugucgcucaucuaggau

SEQ ID NO: 276157 - RNA, 19 nt, Artificial Sequence
  Description of Artificial Sequence: Synthetic oligonucleotide
gguaucagauguagaauuu

SEQ ID NO: 276158 - RNA, 19 nt, Artificial Sequence
  Description of Artificial Sequence: Synthetic oligonucleotide
gcaacuaggcuugacgaau

SEQ ID NO: 276159 - RNA, 19 nt, Artificial Sequence
  Description of Artificial Sequence: Synthetic oligonucleotide
gugcgaaguuuacucacuu

SEQ ID NO: 276160 - RNA, 19 nt, Artificial Sequence
  Description of Artificial Sequence: Synthetic oligonucleotide
gcguaaucuaguaucuggu

SEQ ID NO: 276161 - RNA, 19 nt, Artificial Sequence
  Description of Artificial Sequence: Synthetic oligonucleotide
aggugccgaggggauaaaa

SEQ ID NO: 276162 - RNA, 19 nt, Artificial Sequence
  Description of Artificial Sequence: Synthetic oligonucleotide
ggcaugcguaaucuaguau

SEQ ID NO: 276163 - RNA, 19 nt, Artificial Sequence
  Description of Artificial Sequence: Synthetic oligonucleotide
ggaaggauuuauacacuuu

SEQ ID NO: 276164 - RNA, 19 nt, Artificial Sequence
  Description of Artificial Sequence: Synthetic oligonucleotide
gcuagucacaagccacagu

SEQ ID NO: 276165 - RNA, 19 nt, Artificial Sequence
  Description of Artificial Sequence: Synthetic oligonucleotide
gguccgcauuucuaguuau

SEQ ID NO: 276166 - RNA, 19 nt, Artificial Sequence
  Description of Artificial Sequence: Synthetic oligonucleotide
caugugugugccugacauu

SEQ ID NO: 276167 - RNA, 19 nt, Artificial Sequence
  Description of Artificial Sequence: Synthetic oligonucleotide
caacugcaauguccguucu

SEQ ID NO: 276168 - RNA, 19 nt, Artificial Sequence
  Description of Artificial Sequence: Synthetic oligonucleotide
ggcgcugccuuuggagaac

SEQ ID NO: 276169 - RNA, 19 nt, Artificial Sequence
  Description of Artificial Sequence: Synthetic oligonucleotide
gccaaguauuuugaugaau

SEQ ID NO: 276170 - RNA, 19 nt, Artificial Sequence
  Description of Artificial Sequence: Synthetic oligonucleotide
cuagcuacuucagcacauu

SEQ ID NO: 276171 - RNA, 19 nt, Artificial Sequence
  Description of Artificial Sequence: Synthetic oligonucleotide
ccuagcuacuucagcacau

SEQ ID NO: 276172 - RNA, 19 nt, Artificial Sequence
  Description of Artificial Sequence: Synthetic oligonucleotide
ggcaauuaaugaggcuagu

SEQ ID NO: 276173 - RNA, 19 nt, Artificial Sequence
  Description of Artificial Sequence: Synthetic oligonucleotide
cacgcucuuguuguugcau

SEQ ID NO: 276174 - RNA, 19 nt, Artificial Sequence
  Description of Artificial Sequence: Synthetic oligonucleotide
gcgcaaccaugaauuacaa

SEQ ID NO: 276175 - RNA, 19 nt, Artificial Sequence
  Description of Artificial Sequence: Synthetic oligonucleotide
guccgcauuucuaguuauu

SEQ ID NO: 276176 - RNA, 19 nt, Artificial Sequence
  Description of Artificial Sequence: Synthetic oligonucleotide
uauauauauauuuauauau

SEQ ID NO: 276177 - RNA, 19 nt, Artificial Sequence
  Description of Artificial Sequence: Synthetic oligonucleotide
uauauauuuauauauauuu

SEQ ID NO: 276178 - RNA, 19 nt, Artificial Sequence
  Description of Artificial Sequence: Synthetic oligonucleotide
aauaauauucugcacguca

SEQ ID NO: 276179 - RNA, 19 nt, Artificial Sequence
  Description of Artificial Sequence: Synthetic oligonucleotide
uuuauauauauauuuauau

SEQ ID NO: 276180 - RNA, 19 nt, Artificial Sequence
  Description of Artificial Sequence: Synthetic oligonucleotide
ucauauggugucaagaacc

SEQ ID NO: 276181 - RNA, 19 nt, Artificial Sequence
  Description of Artificial Sequence: Synthetic oligonucleotide
agaaagaccgcgcaguccc

SEQ ID NO: 276182 - RNA, 19 nt, Artificial Sequence
  Description of Artificial Sequence: Synthetic oligonucleotide
uauaccaagcaucaguuug

SEQ ID NO: 276183 - RNA, 19 nt, Artificial Sequence
  Description of Artificial Sequence: Synthetic oligonucleotide
uauucugcacgucagaaug

SEQ ID NO: 276184 - RNA, 19 nt, Artificial Sequence
  Description of Artificial Sequence: Synthetic oligonucleotide
ucaagaaccugccacagcc

SEQ ID NO: 276185 - RNA, 19 nt, Artificial Sequence
  Description of Artificial Sequence: Synthetic oligonucleotide
uauauauauuuauauauau

SEQ ID NO: 276186 - RNA, 19 nt, Artificial Sequence
  Description of Artificial Sequence: Synthetic oligonucleotide
agugauucagaacaggucu

SEQ ID NO: 276187 - RNA, 19 nt, Artificial Sequence
  Description of Artificial Sequence: Synthetic oligonucleotide
cugucggaaaacuugaagg

SEQ ID NO: 276188 - RNA, 19 nt, Artificial Sequence
  Description of Artificial Sequence: Synthetic oligonucleotide
ucuuuagugggucugagaa

SEQ ID NO: 276189 - RNA, 19 nt, Artificial Sequence
  Description of Artificial Sequence: Synthetic oligonucleotide
aaagguguaugccccggcc

SEQ ID NO: 276190 - RNA, 19 nt, Artificial Sequence
  Description of Artificial Sequence: Synthetic oligonucleotide
uggaguucaguucacgcgg

SEQ ID NO: 276191 - RNA, 19 nt, Artificial Sequence
  Description of Artificial Sequence: Synthetic oligonucleotide
uuauauauauauuuauaua

SEQ ID NO: 276192 - RNA, 19 nt, Artificial Sequence
  Description of Artificial Sequence: Synthetic oligonucleotide
auuuaaagguguaugcccc

SEQ ID NO: 276193 - RNA, 19 nt, Artificial Sequence
  Description of Artificial Sequence: Synthetic oligonucleotide
uuuagcugacucaugaagu

SEQ ID NO: 276194 - RNA, 19 nt, Artificial Sequence
  Description of Artificial Sequence: Synthetic oligonucleotide
ucuucuagauagcagguac

SEQ ID NO: 276195 - RNA, 19 nt, Artificial Sequence
  Description of Artificial Sequence: Synthetic oligonucleotide
aagguguaugccccggccc

SEQ ID NO: 276196 - RNA, 19 nt, Artificial Sequence
  Description of Artificial Sequence: Synthetic oligonucleotide
uuggaguucaguucacgcg

SEQ ID NO: 276197 - RNA, 19 nt, Artificial Sequence
  Description of Artificial Sequence: Synthetic oligonucleotide
uuaaucuuuagcugacuca

SEQ ID NO: 276198 - RNA, 19 nt, Artificial Sequence
  Description of Artificial Sequence: Synthetic oligonucleotide
uuagccaacgcuuuccugu

SEQ ID NO: 276199 - RNA, 19 nt, Artificial Sequence
  Description of Artificial Sequence: Synthetic oligonucleotide
aauuccaaaagaaacguuu

SEQ ID NO: 276200 - RNA, 19 nt, Artificial Sequence
  Description of Artificial Sequence: Synthetic oligonucleotide
ucaagcgcauucaaagugc

SEQ ID NO: 276201 - RNA, 19 nt, Artificial Sequence
  Description of Artificial Sequence: Synthetic oligonucleotide
caagccgaggccuuuagcc

SEQ ID NO: 276202 - RNA, 19 nt, Artificial Sequence
  Description of Artificial Sequence: Synthetic oligonucleotide
ucuauaccaagcaucaguu

SEQ ID NO: 276203 - RNA, 19 nt, Artificial Sequence
  Description of Artificial Sequence: Synthetic oligonucleotide
cauucaaagugcugggagg

SEQ ID NO: 276204 - RNA, 19 nt, Artificial Sequence
  Description of Artificial Sequence: Synthetic oligonucleotide
gguagaaccacuugacgcg

SEQ ID NO: 276205 - RNA, 19 nt, Artificial Sequence
  Description of Artificial Sequence: Synthetic oligonucleotide
cacacgugcaugcauacgg

SEQ ID NO: 276206 - RNA, 19 nt, Artificial Sequence
  Description of Artificial Sequence: Synthetic oligonucleotide
cauguggcugacuagcugc

SEQ ID NO: 276207 - RNA, 19 nt, Artificial Sequence
  Description of Artificial Sequence: Synthetic oligonucleotide
cuugacgcgaacuaccaug

SEQ ID NO: 276208 - RNA, 19 nt, Artificial Sequence
  Description of Artificial Sequence: Synthetic oligonucleotide
ucacaaucuaacaggaaau

SEQ ID NO: 276209 - RNA, 19 nt, Artificial Sequence
  Description of Artificial Sequence: Synthetic oligonucleotide
aaacauccguuccuccuuc

SEQ ID NO: 276210 - RNA, 19 nt, Artificial Sequence
  Description of Artificial Sequence: Synthetic oligonucleotide
uuggaacucucccucaccc

SEQ ID NO: 276211 - RNA, 19 nt, Artificial Sequence
  Description of Artificial Sequence: Synthetic oligonucleotide
cuggauccgaccaauguag

SEQ ID NO: 276212 - RNA, 19 nt, Artificial Sequence
  Description of Artificial Sequence: Synthetic oligonucleotide
uacacacucgcacuugccc

SEQ ID NO: 276213 - RNA, 19 nt, Artificial Sequence
  Description of Artificial Sequence: Synthetic oligonucleotide
uccccaucgccgaugaggg

SEQ ID NO: 276214 - RNA, 19 nt, Artificial Sequence
  Description of Artificial Sequence: Synthetic oligonucleotide
augguagaaccacuugacg

SEQ ID NO: 276215 - RNA, 19 nt, Artificial Sequence
  Description of Artificial Sequence: Synthetic oligonucleotide
accgaagucuggcuuuucc

SEQ ID NO: 276216 - RNA, 19 nt, Artificial Sequence
  Description of Artificial Sequence: Synthetic oligonucleotide
acauggggaggacugguac

SEQ ID NO: 276217 - RNA, 19 nt, Artificial Sequence
  Description of Artificial Sequence: Synthetic oligonucleotide
gacgcgaacuaccauguug

SEQ ID NO: 276218 - RNA, 19 nt, Artificial Sequence
  Description of Artificial Sequence: Synthetic oligonucleotide
uauuccgguucccagcuca

SEQ ID NO: 276219 - RNA, 19 nt, Artificial Sequence
  Description of Artificial Sequence: Synthetic oligonucleotide
uccgguucccagcucauag

SEQ ID NO: 276220 - RNA, 19 nt, Artificial Sequence
  Description of Artificial Sequence: Synthetic oligonucleotide
  modified_base (11)..(11): a, c, u, g, unknown or other
agagcuugcgngccuugcc

SEQ ID NO: 276221 - RNA, 19 nt, Artificial Sequence
  Description of Artificial Sequence: Synthetic oligonucleotide
gauccgaccaauguagggc

SEQ ID NO: 276222 - RNA, 19 nt, Artificial Sequence
  Description of Artificial Sequence: Synthetic oligonucleotide
gcaggagugauucagaaca

SEQ ID NO: 276223 - RNA, 19 nt, Artificial Sequence
  Description of Artificial Sequence: Synthetic oligonucleotide
ugcuagacacucacaaucu

SEQ ID NO: 276224 - RNA, 19 nt, Artificial Sequence
  Description of Artificial Sequence: Synthetic oligonucleotide
uguuguugccccacgacuc

SEQ ID NO: 276225 - RNA, 19 nt, Artificial Sequence
  Description of Artificial Sequence: Synthetic oligonucleotide
gcgaccagcagacagaaag

SEQ ID NO: 276226 - RNA, 19 nt, Artificial Sequence
  Description of Artificial Sequence: Synthetic oligonucleotide
gugguaggcucauaggugc

SEQ ID NO: 276227 - RNA, 19 nt, Artificial Sequence
  Description of Artificial Sequence: Synthetic oligonucleotide
uucuagauagcagguacug

SEQ ID NO: 276228 - RNA, 19 nt, Artificial Sequence
  Description of Artificial Sequence: Synthetic oligonucleotide
gugcuagacacucacaauc

SEQ ID NO: 276229 - RNA, 19 nt, Artificial Sequence
  Description of Artificial Sequence: Synthetic oligonucleotide
uuaaagguguaugccccgg

SEQ ID NO: 276230 - RNA, 19 nt, Artificial Sequence
  Description of Artificial Sequence: Synthetic oligonucleotide
uaugcggaucaucuccuug

SEQ ID NO: 276231 - RNA, 19 nt, Artificial Sequence
  Description of Artificial Sequence: Synthetic oligonucleotide
acagaaagaccgcgcaguc

SEQ ID NO: 276232 - RNA, 19 nt, Artificial Sequence
  Description of Artificial Sequence: Synthetic oligonucleotide
ccaagcaucaguuuggguc

SEQ ID NO: 276233 - RNA, 19 nt, Artificial Sequence
  Description of Artificial Sequence: Synthetic oligonucleotide
auauauauauuuauauaua

SEQ ID NO: 276234 - RNA, 19 nt, Artificial Sequence
  Description of Artificial Sequence: Synthetic oligonucleotide
uugacgcgaacuaccaugu

SEQ ID NO: 276235 - RNA, 19 nt, Artificial Sequence
  Description of Artificial Sequence: Synthetic oligonucleotide
uaguaccuccuucagcaug

SEQ ID NO: 276236 - RNA, 19 nt, Artificial Sequence
  Description of Artificial Sequence: Synthetic oligonucleotide
cucauagucaucugauguc

SEQ ID NO: 276237 - RNA, 19 nt, Artificial Sequence
  Description of Artificial Sequence: Synthetic oligonucleotide
aguacacaugggcagggug

SEQ ID NO: 276238 - RNA, 19 nt, Artificial Sequence
  Description of Artificial Sequence: Synthetic oligonucleotide
uucaugccagccaaugggu

SEQ ID NO: 276239 - RNA, 19 nt, Artificial Sequence
  Description of Artificial Sequence: Synthetic oligonucleotide
ugaagccggugcuagacac

SEQ ID NO: 276240 - RNA, 19 nt, Artificial Sequence
  Description of Artificial Sequence: Synthetic oligonucleotide
ggauucaugaucaucccag

SEQ ID NO: 276241 - RNA, 19 nt, Artificial Sequence
  Description of Artificial Sequence: Synthetic oligonucleotide
aaaguugacuccauuuaaa

SEQ ID NO: 276242 - RNA, 19 nt, Artificial Sequence
  Description of Artificial Sequence: Synthetic oligonucleotide
agaaccacuugacgcgaac

SEQ ID NO: 276243 - RNA, 19 nt, Artificial Sequence
  Description of Artificial Sequence: Synthetic oligonucleotide
acuggcaugcacacaacac

SEQ ID NO: 276244 - RNA, 19 nt, Artificial Sequence
  Description of Artificial Sequence: Synthetic oligonucleotide
cuagcuugcuugcuaacug

SEQ ID NO: 276245 - RNA, 19 nt, Artificial Sequence
  Description of Artificial Sequence: Synthetic oligonucleotide
agagcacaggcacaccguc

SEQ ID NO: 276246 - RNA, 19 nt, Artificial Sequence
  Description of Artificial Sequence: Synthetic oligonucleotide
ggugucaagaaccugccac

SEQ ID NO: 276247 - RNA, 19 nt, Artificial Sequence
  Description of Artificial Sequence: Synthetic oligonucleotide
agaugaggauucaugauca

SEQ ID NO: 276248 - RNA, 19 nt, Artificial Sequence
  Description of Artificial Sequence: Synthetic oligonucleotide
gauagcagguacugcccag

SEQ ID NO: 276249 - RNA, 19 nt, Artificial Sequence
  Description of Artificial Sequence: Synthetic oligonucleotide
uccuuauuccgguucccag

SEQ ID NO: 276250 - RNA, 19 nt, Artificial Sequence
  Description of Artificial Sequence: Synthetic oligonucleotide
auaggugcccgcgagguag

SEQ ID NO: 276251 - RNA, 19 nt, Artificial Sequence
  Description of Artificial Sequence: Synthetic oligonucleotide
uggauccgaccaauguagg

SEQ ID NO: 276252 - RNA, 19 nt, Artificial Sequence
  Description of Artificial Sequence: Synthetic oligonucleotide
acaacacacauggucccgc

SEQ ID NO: 276253 - RNA, 19 nt, Artificial Sequence
  Description of Artificial Sequence: Synthetic oligonucleotide
cuuuagugggucugagaag

SEQ ID NO: 276254 - RNA, 19 nt, Artificial Sequence
  Description of Artificial Sequence: Synthetic oligonucleotide
cucagcuaucucaccaggg

SEQ ID NO: 276255 - RNA, 19 nt, Artificial Sequence
  Description of Artificial Sequence: Synthetic oligonucleotide
auguuguugccccacgacu

SEQ ID NO: 276256 - RNA, 19 nt, Artificial Sequence
  Description of Artificial Sequence: Synthetic oligonucleotide
acaagccgaggccuuuagc

SEQ ID NO: 276257 - RNA, 19 nt, Artificial Sequence
  Description of Artificial Sequence: Synthetic oligonucleotide
aagccggugcuagacacuc

SEQ ID NO: 276258 - RNA, 19 nt, Artificial Sequence
  Description of Artificial Sequence: Synthetic oligonucleotide
aaguucuuuagugggucug

SEQ ID NO: 276259 - RNA, 19 nt, Artificial Sequence
  Description of Artificial Sequence: Synthetic oligonucleotide
ugaacgucguuuucaucca

SEQ ID NO: 276260 - RNA, 19 nt, Artificial Sequence
  Description of Artificial Sequence: Synthetic oligonucleotide
gucauauggugucaagaac

SEQ ID NO: 276261 - RNA, 19 nt, Artificial Sequence
  Description of Artificial Sequence: Synthetic oligonucleotide
auauauauuuauauauauu

SEQ ID NO: 276262 - RNA, 19 nt, Artificial Sequence
  Description of Artificial Sequence: Synthetic oligonucleotide
caugcacacgcccacgagc

SEQ ID NO: 276263 - RNA, 19 nt, Artificial Sequence
  Description of Artificial Sequence: Synthetic oligonucleotide
uguuggaguucaguucacg

SEQ ID NO: 276264 - RNA, 19 nt, Artificial Sequence
  Description of Artificial Sequence: Synthetic oligonucleotide
aagccgaggccuuuagcca

SEQ ID NO: 276265 - RNA, 19 nt, Artificial Sequence
  Description of Artificial Sequence: Synthetic oligonucleotide
aggacugucggaaaacuug

SEQ ID NO: 276266 - RNA, 19 nt, Artificial Sequence
  Description of Artificial Sequence: Synthetic oligonucleotide
ggacagguaagucacaguc

SEQ ID NO: 276267 - RNA, 19 nt, Artificial Sequence
  Description of Artificial Sequence: Synthetic oligonucleotide
uaugccccggcccacggug

SEQ ID NO: 276268 - RNA, 19 nt, Artificial Sequence
  Description of Artificial Sequence: Synthetic oligonucleotide
ucuagcuugcuugcuaacu

SEQ ID NO: 276269 - RNA, 19 nt, Artificial Sequence
  Description of Artificial Sequence: Synthetic oligonucleotide
gacacgugucugaacgucg

SEQ ID NO: 276270 - RNA, 19 nt, Artificial Sequence
  Description of Artificial Sequence: Synthetic oligonucleotide
agacagaaagaccgcgcag

SEQ ID NO: 276271 - RNA, 19 nt, Artificial Sequence
  Description of Artificial Sequence: Synthetic oligonucleotide
accacuugacgcgaacuac

SEQ ID NO: 276272 - RNA, 19 nt, Artificial Sequence
  Description of Artificial Sequence: Synthetic oligonucleotide
ugaucaucccagcucuggu

SEQ ID NO: 276273 - RNA, 19 nt, Artificial Sequence
  Description of Artificial Sequence: Synthetic oligonucleotide
agcagacagaaagaccgcg

SEQ ID NO: 276274 - RNA, 19 nt, Artificial Sequence
  Description of Artificial Sequence: Synthetic oligonucleotide
aggugcagccuccuggguc

SEQ ID NO: 276275 - RNA, 19 nt, Artificial Sequence
  Description of Artificial Sequence: Synthetic oligonucleotide
aguuuggguccuuggaacu

SEQ ID NO: 276276 - RNA, 19 nt, Artificial Sequence
  Description of Artificial Sequence: Synthetic oligonucleotide
auaggcggugcucagcaga

SEQ ID NO: 276277 - RNA, 19 nt, Artificial Sequence
  Description of Artificial Sequence: Synthetic oligonucleotide
caugaaaguccuuccucug

SEQ ID NO: 276278 - RNA, 19 nt, Artificial Sequence
  Description of Artificial Sequence: Synthetic oligonucleotide
uccuugccucgaacgaugg

SEQ ID NO: 276279 - RNA, 19 nt, Artificial Sequence
  Description of Artificial Sequence: Synthetic oligonucleotide
cauacgggcacacacaugu

SEQ ID NO: 276280 - RNA, 19 nt, Artificial Sequence
  Description of Artificial Sequence: Synthetic oligonucleotide
uguccugguauuucuuggu

SEQ ID NO: 276281 - RNA, 19 nt, Artificial Sequence
  Description of Artificial Sequence: Synthetic oligonucleotide
ggguuucagagacaagccg

SEQ ID NO: 276282 - RNA, 19 nt, Artificial Sequence
  Description of Artificial Sequence: Synthetic oligonucleotide
auauucugcacgucagaau

SEQ ID NO: 276283 - RNA, 19 nt, Artificial Sequence
  Description of Artificial Sequence: Synthetic oligonucleotide
  modified_base (3)..(3): a, c, u, g, unknown or other
cgngccuugccuuucaugg

SEQ ID NO: 276284 - RNA, 19 nt, Artificial Sequence
  Description of Artificial Sequence: Synthetic oligonucleotide
acgcuuuccuguccuugcc

SEQ ID NO: 276285 - RNA, 19 nt, Artificial Sequence
  Description of Artificial Sequence: Synthetic oligonucleotide
gaccucuauaccaagcauc

SEQ ID NO: 276286 - RNA, 19 nt, Artificial Sequence
  Description of Artificial Sequence: Synthetic oligonucleotide
uaccaagcaucaguuuggg

SEQ ID NO: 276287 - RNA, 19 nt, Artificial Sequence
  Description of Artificial Sequence: Synthetic oligonucleotide
uguaugccccggcccacgg

SEQ ID NO: 276288 - RNA, 19 nt, Artificial Sequence
  Description of Artificial Sequence: Synthetic oligonucleotide
agauagcagguacugccca

SEQ ID NO: 276289 - RNA, 19 nt, Artificial Sequence
  Description of Artificial Sequence: Synthetic oligonucleotide
gaugcccugaaggaagcug

SEQ ID NO: 276290 - RNA, 19 nt, Artificial Sequence
  Description of Artificial Sequence: Synthetic oligonucleotide
ugcggaucaucuccuugcc

SEQ ID NO: 276291 - RNA, 19 nt, Artificial Sequence
  Description of Artificial Sequence: Synthetic oligonucleotide
augaagucagaugaggauu

SEQ ID NO: 276292 - RNA, 19 nt, Artificial Sequence
  Description of Artificial Sequence: Synthetic oligonucleotide
accucuauaccaagcauca

SEQ ID NO: 276293 - RNA, 19 nt, Artificial Sequence
  Description of Artificial Sequence: Synthetic oligonucleotide
uguuugccugggcuggucu

SEQ ID NO: 276294 - RNA, 19 nt, Artificial Sequence
  Description of Artificial Sequence: Synthetic oligonucleotide
gagugauucagaacagguc

SEQ ID NO: 276295 - RNA, 19 nt, Artificial Sequence
  Description of Artificial Sequence: Synthetic oligonucleotide
caugaagccggugcuagac

SEQ ID NO: 276296 - RNA, 19 nt, Artificial Sequence
  Description of Artificial Sequence: Synthetic oligonucleotide
cacacucgcacuugcccgg

SEQ ID NO: 276297 - RNA, 19 nt, Artificial Sequence
  Description of Artificial Sequence: Synthetic oligonucleotide
accgcgcaguccccuaugc

SEQ ID NO: 276298 - RNA, 19 nt, Artificial Sequence
  Description of Artificial Sequence: Synthetic oligonucleotide
cagcauguggcugacuagc

SEQ ID NO: 276299 - RNA, 19 nt, Artificial Sequence
  Description of Artificial Sequence: Synthetic oligonucleotide
guuguugccccacgacucc

SEQ ID NO: 276300 - RNA, 19 nt, Artificial Sequence
  Description of Artificial Sequence: Synthetic oligonucleotide
ggugaugcccugaaggaag

SEQ ID NO: 276301 - RNA, 19 nt, Artificial Sequence
  Description of Artificial Sequence: Synthetic oligonucleotide
ggauccgaccaauguaggg

SEQ ID NO: 276302 - RNA, 19 nt, Artificial Sequence
  Description of Artificial Sequence: Synthetic oligonucleotide
agaaccgaagucuggcuuu

SEQ ID NO: 276303 - RNA, 19 nt, Artificial Sequence
  Description of Artificial Sequence: Synthetic oligonucleotide
acagaaccgaagucuggcu

SEQ ID NO: 276304 - RNA, 19 nt, Artificial Sequence
  Description of Artificial Sequence: Synthetic oligonucleotide
cucggucuagcuugcuugc

SEQ ID NO: 276305 - RNA, 19 nt, Artificial Sequence
  Description of Artificial Sequence: Synthetic oligonucleotide
uggaacucucccucacccc

SEQ ID NO: 276306 - RNA, 19 nt, Artificial Sequence
  Description of Artificial Sequence: Synthetic oligonucleotide
ucugcacgucagaaugugu

SEQ ID NO: 276307 - RNA, 19 nt, Artificial Sequence
  Description of Artificial Sequence: Synthetic oligonucleotide
caacacacauggucccgcg

SEQ ID NO: 276308 - RNA, 19 nt, Artificial Sequence
  Description of Artificial Sequence: Synthetic oligonucleotide
cacgugcaugcauacgggc

SEQ ID NO: 276309 - RNA, 19 nt, Artificial Sequence
  Description of Artificial Sequence: Synthetic oligonucleotide
agccaacgcuuuccugucc

SEQ ID NO: 276310 - RNA, 19 nt, Artificial Sequence
  Description of Artificial Sequence: Synthetic oligonucleotide
ggucuuuagcaucugcuca

SEQ ID NO: 276311 - RNA, 19 nt, Artificial Sequence
  Description of Artificial Sequence: Synthetic oligonucleotide
acgcgaacuaccauguugu

SEQ ID NO: 276312 - RNA, 19 nt, Artificial Sequence
  Description of Artificial Sequence: Synthetic oligonucleotide
gacaagccgaggccuuuag

SEQ ID NO: 276313 - RNA, 19 nt, Artificial Sequence
  Description of Artificial Sequence: Synthetic oligonucleotide
cucuauaccaagcaucagu

SEQ ID NO: 276314 - RNA, 19 nt, Artificial Sequence
  Description of Artificial Sequence: Synthetic oligonucleotide
agcuaucucaccaggguga

SEQ ID NO: 276315 - RNA, 19 nt, Artificial Sequence
  Description of Artificial Sequence: Synthetic oligonucleotide
  modified_base (2)..(2): a, c, u, g, unknown or other
gngccuugccuuucauggc

SEQ ID NO: 276316 - RNA, 19 nt, Artificial Sequence
  Description of Artificial Sequence: Synthetic oligonucleotide
agguguaugccccggccca

SEQ ID NO: 276317 - RNA, 19 nt, Artificial Sequence
  Description of Artificial Sequence: Synthetic oligonucleotide
uccggaugguagaaccacu

SEQ ID NO: 276318 - RNA, 19 nt, Artificial Sequence
  Description of Artificial Sequence: Synthetic oligonucleotide
uuccggaugguagaaccac

SEQ ID NO: 276319 - RNA, 19 nt, Artificial Sequence
  Description of Artificial Sequence: Synthetic oligonucleotide
agagcgcgcuccaugaaag

SEQ ID NO: 276320 - RNA, 19 nt, Artificial Sequence
  Description of Artificial Sequence: Synthetic oligonucleotide
agcgcgcuccaugaaaguc

SEQ ID NO: 276321 - RNA, 19 nt, Artificial Sequence
  Description of Artificial Sequence: Synthetic oligonucleotide
cuccuugccucgaacgaug

SEQ ID NO: 276322 - RNA, 19 nt, Artificial Sequence
  Description of Artificial Sequence: Synthetic oligonucleotide
aacauccguuccuccuucu

SEQ ID NO: 276323 - RNA, 19 nt, Artificial Sequence
  Description of Artificial Sequence: Synthetic oligonucleotide
uuccuuauuccgguuccca

SEQ ID NO: 276324 - RNA, 19 nt, Artificial Sequence
  Description of Artificial Sequence: Synthetic oligonucleotide
ggggcugucuaguaccucc

SEQ ID NO: 276325 - RNA, 19 nt, Artificial Sequence
  Description of Artificial Sequence: Synthetic oligonucleotide
gauaggcggugcucagcag

SEQ ID NO: 276326 - RNA, 19 nt, Artificial Sequence
  Description of Artificial Sequence: Synthetic oligonucleotide
uccgaccaauguagggcag

SEQ ID NO: 276327 - RNA, 19 nt, Artificial Sequence
  Description of Artificial Sequence: Synthetic oligonucleotide
ccuuauuccgguucccagc

SEQ ID NO: 276328 - RNA, 19 nt, Artificial Sequence
  Description of Artificial Sequence: Synthetic oligonucleotide
cccuaugcggaucaucucc

SEQ ID NO: 276329 - RNA, 19 nt, Artificial Sequence
  Description of Artificial Sequence: Synthetic oligonucleotide
guuggggcgaccagcagac

SEQ ID NO: 276330 - RNA, 19 nt, Artificial Sequence
  Description of Artificial Sequence: Synthetic oligonucleotide
ugcacgucagaauguguuu

SEQ ID NO: 276331 - RNA, 19 nt, Artificial Sequence
  Description of Artificial Sequence: Synthetic oligonucleotide
uggaacuguuugccugggc

SEQ ID NO: 276332 - RNA, 19 nt, Artificial Sequence
  Description of Artificial Sequence: Synthetic oligonucleotide
ccgucuguggagaagauca

SEQ ID NO: 276333 - RNA, 19 nt, Artificial Sequence
  Description of Artificial Sequence: Synthetic oligonucleotide
gagacugcgcccugacuuc

SEQ ID NO: 276334 - RNA, 19 nt, Artificial Sequence
  Description of Artificial Sequence: Synthetic oligonucleotide
gcucggucuagcuugcuug

SEQ ID NO: 276335 - RNA, 19 nt, Artificial Sequence
  Description of Artificial Sequence: Synthetic oligonucleotide
cucgcacuugcccggggcg

SEQ ID NO: 276336 - RNA, 19 nt, Artificial Sequence
  Description of Artificial Sequence: Synthetic oligonucleotide
acacgugcaugcauacggg

SEQ ID NO: 276337 - RNA, 19 nt, Artificial Sequence
  Description of Artificial Sequence: Synthetic oligonucleotide
guucuuuagugggucugag

SEQ ID NO: 276338 - RNA, 19 nt, Artificial Sequence
  Description of Artificial Sequence: Synthetic oligonucleotide
ucacgcgggagccgcaagu

SEQ ID NO: 276339 - RNA, 19 nt, Artificial Sequence
  Description of Artificial Sequence: Synthetic oligonucleotide
uggugucaagaaccugcca

SEQ ID NO: 276340 - RNA, 19 nt, Artificial Sequence
  Description of Artificial Sequence: Synthetic oligonucleotide
gucucuuccggaugguaga

SEQ ID NO: 276341 - RNA, 19 nt, Artificial Sequence
  Description of Artificial Sequence: Synthetic oligonucleotide
acgucguuuucauccacau

SEQ ID NO: 276342 - RNA, 19 nt, Artificial Sequence
  Description of Artificial Sequence: Synthetic oligonucleotide
gacagaaagaccgcgcagu

SEQ ID NO: 276343 - RNA, 19 nt, Artificial Sequence
  Description of Artificial Sequence: Synthetic oligonucleotide
gaaagggucuagagaugug

SEQ ID NO: 276344 - RNA, 19 nt, Artificial Sequence
  Description of Artificial Sequence: Synthetic oligonucleotide
ucaguucacgcgggagccg

SEQ ID NO: 276345 - RNA, 19 nt, Artificial Sequence
  Description of Artificial Sequence: Synthetic oligonucleotide
augaagccggugcuagaca

SEQ ID NO: 276346 - RNA, 19 nt, Artificial Sequence
  Description of Artificial Sequence: Synthetic oligonucleotide
cacgagcacacuggcaugc

SEQ ID NO: 276347 - RNA, 19 nt, Artificial Sequence
  Description of Artificial Sequence: Synthetic oligonucleotide
uuaagugcuucgggccgag

SEQ ID NO: 276348 - RNA, 19 nt, Artificial Sequence
  Description of Artificial Sequence: Synthetic oligonucleotide
cagaaagaccgcgcagucc

SEQ ID NO: 276349 - RNA, 19 nt, Artificial Sequence
  Description of Artificial Sequence: Synthetic oligonucleotide
accgucuguggagaagauc

SEQ ID NO: 276350 - RNA, 19 nt, Artificial Sequence
  Description of Artificial Sequence: Synthetic oligonucleotide
ugguacagagcgcgcucca

SEQ ID NO: 276351 - RNA, 19 nt, Artificial Sequence
  Description of Artificial Sequence: Synthetic oligonucleotide
acacacgugcaugcauacg

SEQ ID NO: 276352 - RNA, 19 nt, Artificial Sequence
  Description of Artificial Sequence: Synthetic oligonucleotide
uagccaacgcuuuccuguc

SEQ ID NO: 276353 - RNA, 19 nt, Artificial Sequence
  Description of Artificial Sequence: Synthetic oligonucleotide
uucacgcgggagccgcaag

SEQ ID NO: 276354 - RNA, 19 nt, Artificial Sequence
  Description of Artificial Sequence: Synthetic oligonucleotide
ggauaggcggugcucagca

SEQ ID NO: 276355 - RNA, 19 nt, Artificial Sequence
  Description of Artificial Sequence: Synthetic oligonucleotide
cuuauuccgguucccagcu

SEQ ID NO: 276356 - RNA, 19 nt, Artificial Sequence
  Description of Artificial Sequence: Synthetic oligonucleotide
cuuggggacacgugucuga

SEQ ID NO: 276357 - RNA, 19 nt, Artificial Sequence
  Description of Artificial Sequence: Synthetic oligonucleotide
gugcccgcgagguaguaca

SEQ ID NO: 276358 - RNA, 19 nt, Artificial Sequence
  Description of Artificial Sequence: Synthetic oligonucleotide
uggauaggcggugcucagc

SEQ ID NO: 276359 - RNA, 19 nt, Artificial Sequence
  Description of Artificial Sequence: Synthetic oligonucleotide
cauggggaggacugguaca

SEQ ID NO: 276360 - RNA, 19 nt, Artificial Sequence
  Description of Artificial Sequence: Synthetic oligonucleotide
aaccgaagucuggcuuuuc

SEQ ID NO: 276361 - RNA, 19 nt, Artificial Sequence
  Description of Artificial Sequence: Synthetic oligonucleotide
ggccccgcuggauaggcgg

SEQ ID NO: 276362 - RNA, 19 nt, Artificial Sequence
  Description of Artificial Sequence: Synthetic oligonucleotide
acgcgggagccgcaaguuc

SEQ ID NO: 276363 - RNA, 19 nt, Artificial Sequence
  Description of Artificial Sequence: Synthetic oligonucleotide
uagaaccacuugacgcgaa

SEQ ID NO: 276364 - RNA, 19 nt, Artificial Sequence
  Description of Artificial Sequence: Synthetic oligonucleotide
aggccuuuagccaacgcuu

SEQ ID NO: 276365 - RNA, 19 nt, Artificial Sequence
  Description of Artificial Sequence: Synthetic oligonucleotide
cuugccucgaacgauggcu

SEQ ID NO: 276366 - RNA, 19 nt, Artificial Sequence
  Description of Artificial Sequence: Synthetic oligonucleotide
agccgaggccuuuagccaa

SEQ ID NO: 276367 - RNA, 19 nt, Artificial Sequence
  Description of Artificial Sequence: Synthetic oligonucleotide
acuugacgcgaacuaccau

SEQ ID NO: 276368 - RNA, 19 nt, Artificial Sequence
  Description of Artificial Sequence: Synthetic oligonucleotide
gcgcauucaaagugcuggg

SEQ ID NO: 276369 - RNA, 19 nt, Artificial Sequence
  Description of Artificial Sequence: Synthetic oligonucleotide
ggcaugaagccggugcuag

SEQ ID NO: 276370 - RNA, 19 nt, Artificial Sequence
  Description of Artificial Sequence: Synthetic oligonucleotide
gucacucgccaucuucuuc

SEQ ID NO: 276371 - RNA, 19 nt, Artificial Sequence
  Description of Artificial Sequence: Synthetic oligonucleotide
  modified_base (6)..(6): a, c, u, g, unknown or other
uugcgngccuugccuuuca

SEQ ID NO: 276372 - RNA, 19 nt, Artificial Sequence
  Description of Artificial Sequence: Synthetic oligonucleotide
uaccauguuguugccccac

SEQ ID NO: 276373 - RNA, 19 nt, Artificial Sequence
  Description of Artificial Sequence: Synthetic oligonucleotide
caguucacgcgggagccgc

SEQ ID NO: 276374 - RNA, 19 nt, Artificial Sequence
  Description of Artificial Sequence: Synthetic oligonucleotide
uuauuccgguucccagcuc

SEQ ID NO: 276375 - RNA, 19 nt, Artificial Sequence
  Description of Artificial Sequence: Synthetic oligonucleotide
ugcccgcgagguaguacag

SEQ ID NO: 276376 - RNA, 19 nt, Artificial Sequence
  Description of Artificial Sequence: Synthetic oligonucleotide
guagaaccacuugacgcga

SEQ ID NO: 276377 - RNA, 19 nt, Artificial Sequence
  Description of Artificial Sequence: Synthetic oligonucleotide
cuucuagauagcagguacu

SEQ ID NO: 276378 - RNA, 19 nt, Artificial Sequence
  Description of Artificial Sequence: Synthetic oligonucleotide
cgcgagguaguacaggccc

SEQ ID NO: 276379 - RNA, 19 nt, Artificial Sequence
  Description of Artificial Sequence: Synthetic oligonucleotide
gacagguaagucacagucu

SEQ ID NO: 276380 - RNA, 19 nt, Artificial Sequence
  Description of Artificial Sequence: Synthetic oligonucleotide
ggaguucaguucacgcggg

SEQ ID NO: 276381 - RNA, 19 nt, Artificial Sequence
  Description of Artificial Sequence: Synthetic oligonucleotide
gucuagcuugcuugcuaac

SEQ ID NO: 276382 - RNA, 19 nt, Artificial Sequence
  Description of Artificial Sequence: Synthetic oligonucleotide
  modified_base (7)..(7): a, c, u, g, unknown or other
cuugcgngccuugccuuuc

SEQ ID NO: 276383 - RNA, 19 nt, Artificial Sequence
  Description of Artificial Sequence: Synthetic oligonucleotide
auggucccgcgccauggca

SEQ ID NO: 276384 - RNA, 19 nt, Artificial Sequence
  Description of Artificial Sequence: Synthetic oligonucleotide
gaaagaccgcgcagucccc

SEQ ID NO: 276385 - RNA, 19 nt, Artificial Sequence
  Description of Artificial Sequence: Synthetic oligonucleotide
gcccucguggaacuguuug

SEQ ID NO: 276386 - RNA, 19 nt, Artificial Sequence
  Description of Artificial Sequence: Synthetic oligonucleotide
  modified_base (9)..(9): a, c, u, g, unknown or other
agcuugcgngccuugccuu

SEQ ID NO: 276387 - RNA, 19 nt, Artificial Sequence
  Description of Artificial Sequence: Synthetic oligonucleotide
gcgaacuaccauguuguug

SEQ ID NO: 276388 - RNA, 19 nt, Artificial Sequence
  Description of Artificial Sequence: Synthetic oligonucleotide
acgugucugaacgucguuu

SEQ ID NO: 276389 - RNA, 19 nt, Artificial Sequence
  Description of Artificial Sequence: Synthetic oligonucleotide
uugcccggggcguccaccu

SEQ ID NO: 276390 - RNA, 19 nt, Artificial Sequence
  Description of Artificial Sequence: Synthetic oligonucleotide
guuaagugcuucgggccga

SEQ ID NO: 276391 - RNA, 19 nt, Artificial Sequence
  Description of Artificial Sequence: Synthetic oligonucleotide
aagaccgcgcaguccccua

SEQ ID NO: 276392 - RNA, 19 nt, Artificial Sequence
  Description of Artificial Sequence: Synthetic oligonucleotide
ggacugucggaaaacuuga

SEQ ID NO: 276393 - RNA, 19 nt, Artificial Sequence
  Description of Artificial Sequence: Synthetic oligonucleotide
uggggacacgugucugaac

SEQ ID NO: 276394 - RNA, 19 nt, Artificial Sequence
  Description of Artificial Sequence: Synthetic oligonucleotide
acacgugucugaacgucgu

SEQ ID NO: 276395 - RNA, 19 nt, Artificial Sequence
  Description of Artificial Sequence: Synthetic oligonucleotide
gccggugcuagacacucac

SEQ ID NO: 276396 - RNA, 19 nt, Artificial Sequence
  Description of Artificial Sequence: Synthetic oligonucleotide
cgcgccauggcaguggugg

SEQ ID NO: 276397 - RNA, 19 nt, Artificial Sequence
  Description of Artificial Sequence: Synthetic oligonucleotide
gaccgcgcaguccccuaug

SEQ ID NO: 276398 - RNA, 19 nt, Artificial Sequence
  Description of Artificial Sequence: Synthetic oligonucleotide
guacaggcccucgcugucc

SEQ ID NO: 276399 - RNA, 19 nt, Artificial Sequence
  Description of Artificial Sequence: Synthetic oligonucleotide
ugagggcaccaggggauga

SEQ ID NO: 276400 - RNA, 19 nt, Artificial Sequence
  Description of Artificial Sequence: Synthetic oligonucleotide
cagguaagucacagucuga

SEQ ID NO: 276401 - RNA, 19 nt, Artificial Sequence
  Description of Artificial Sequence: Synthetic oligonucleotide
guguaugccccggcccacg

SEQ ID NO: 276402 - RNA, 19 nt, Artificial Sequence
  Description of Artificial Sequence: Synthetic oligonucleotide
acacucgcacuugcccggg

SEQ ID NO: 276403 - RNA, 19 nt, Artificial Sequence
  Description of Artificial Sequence: Synthetic oligonucleotide
acuugcccggggcguccac

SEQ ID NO: 276404 - RNA, 19 nt, Artificial Sequence
  Description of Artificial Sequence: Synthetic oligonucleotide
ucggucuagcuugcuugcu

SEQ ID NO: 276405 - RNA, 19 nt, Artificial Sequence
  Description of Artificial Sequence: Synthetic oligonucleotide
gcaaacauccguuccuccu

SEQ ID NO: 276406 - RNA, 19 nt, Artificial Sequence
  Description of Artificial Sequence: Synthetic oligonucleotide
  modified_base (5)..(5): a, c, u, g, unknown or other
ugcgngccuugccuuucau

SEQ ID NO: 276407 - RNA, 19 nt, Artificial Sequence
  Description of Artificial Sequence: Synthetic oligonucleotide
acagagcgcgcuccaugaa

SEQ ID NO: 276408 - RNA, 19 nt, Artificial Sequence
  Description of Artificial Sequence: Synthetic oligonucleotide
cugcacgucagaauguguu

SEQ ID NO: 276409 - RNA, 19 nt, Artificial Sequence
  Description of Artificial Sequence: Synthetic oligonucleotide
  modified_base (4)..(4): a, c, u, g, unknown or other
gcgngccuugccuuucaug

SEQ ID NO: 276410 - RNA, 19 nt, Artificial Sequence
  Description of Artificial Sequence: Synthetic oligonucleotide
cucuuccggaugguagaac

SEQ ID NO: 276411 - RNA, 19 nt, Artificial Sequence
  Description of Artificial Sequence: Synthetic oligonucleotide
cgugcaugcauacgggcac

SEQ ID NO: 276412 - RNA, 19 nt, Artificial Sequence
  Description of Artificial Sequence: Synthetic oligonucleotide
gagggcaccaggggaugac

SEQ ID NO: 276413 - RNA, 19 nt, Artificial Sequence
  Description of Artificial Sequence: Synthetic oligonucleotide
cacauggucccgcgccaug

SEQ ID NO: 276414 - RNA, 19 nt, Artificial Sequence
  Description of Artificial Sequence: Synthetic oligonucleotide
gcgcgcuccaugaaagucc

SEQ ID NO: 276415 - RNA, 19 nt, Artificial Sequence
  Description of Artificial Sequence: Synthetic oligonucleotide
ugacgcgaacuaccauguu

SEQ ID NO: 276416 - RNA, 19 nt, Artificial Sequence
  Description of Artificial Sequence: Synthetic oligonucleotide
cgguggaaggccuuugaug

SEQ ID NO: 276417 - RNA, 19 nt, Artificial Sequence
  Description of Artificial Sequence: Synthetic oligonucleotide
cagagcgcgcuccaugaaa

SEQ ID NO: 276418 - RNA, 19 nt, Artificial Sequence
  Description of Artificial Sequence: Synthetic oligonucleotide
gacugucggaaaacuugaa

SEQ ID NO: 276419 - RNA, 19 nt, Artificial Sequence
  Description of Artificial Sequence: Synthetic oligonucleotide
ggacacgugucugaacguc

SEQ ID NO: 276420 - RNA, 19 nt, Artificial Sequence
  Description of Artificial Sequence: Synthetic oligonucleotide
ccaugaaaguccuuccucu

SEQ ID NO: 276421 - RNA, 19 nt, Artificial Sequence
  Description of Artificial Sequence: Synthetic oligonucleotide
cacgguggaaggccuuuga

SEQ ID NO: 276422 - RNA, 19 nt, Artificial Sequence
  Description of Artificial Sequence: Synthetic oligonucleotide
ccgguugggaccccaguac

SEQ ID NO: 276423 - RNA, 19 nt, Artificial Sequence
  Description of Artificial Sequence: Synthetic oligonucleotide
ugccucgaacgauggcuuu

SEQ ID NO: 276424 - RNA, 19 nt, Artificial Sequence
  Description of Artificial Sequence: Synthetic oligonucleotide
agaccgcgcaguccccuau

SEQ ID NO: 276425 - RNA, 19 nt, Artificial Sequence
  Description of Artificial Sequence: Synthetic oligonucleotide
ggccuggcaggagugauuc

SEQ ID NO: 276426 - RNA, 19 nt, Artificial Sequence
  Description of Artificial Sequence: Synthetic oligonucleotide
agagacaagccgaggccuu

SEQ ID NO: 276427 - RNA, 19 nt, Artificial Sequence
  Description of Artificial Sequence: Synthetic oligonucleotide
cuaucucaccagggugaug

SEQ ID NO: 276428 - RNA, 19 nt, Artificial Sequence
  Description of Artificial Sequence: Synthetic oligonucleotide
cacucgcacuugcccgggg

SEQ ID NO: 276429 - RNA, 19 nt, Artificial Sequence
  Description of Artificial Sequence: Synthetic oligonucleotide
gcuagacacucacaaucua

SEQ ID NO: 276430 - RNA, 19 nt, Artificial Sequence
  Description of Artificial Sequence: Synthetic oligonucleotide
cuauaccaagcaucaguuu

SEQ ID NO: 276431 - RNA, 19 nt, Artificial Sequence
  Description of Artificial Sequence: Synthetic oligonucleotide
cagagacaagccgaggccu

SEQ ID NO: 276432 - RNA, 19 nt, Artificial Sequence
  Description of Artificial Sequence: Synthetic oligonucleotide
ccgaccaauguagggcagg

SEQ ID NO: 276433 - RNA, 19 nt, Artificial Sequence
  Description of Artificial Sequence: Synthetic oligonucleotide
gguugggaccccaguacca

SEQ ID NO: 276434 - RNA, 19 nt, Artificial Sequence
  Description of Artificial Sequence: Synthetic oligonucleotide
gacugcgcccugacuucug

SEQ ID NO: 276435 - RNA, 19 nt, Artificial Sequence
  Description of Artificial Sequence: Synthetic oligonucleotide
ccuccucaggcccuuugug

SEQ ID NO: 276436 - RNA, 19 nt, Artificial Sequence
  Description of Artificial Sequence: Synthetic oligonucleotide
gagccgcaaguucuuuagu

SEQ ID NO: 276437 - RNA, 19 nt, Artificial Sequence
  Description of Artificial Sequence: Synthetic oligonucleotide
acgagcacacuggcaugca

SEQ ID NO: 276438 - RNA, 19 nt, Artificial Sequence
  Description of Artificial Sequence: Synthetic oligonucleotide
cagagcacaggcacaccgu

SEQ ID NO: 276439 - RNA, 19 nt, Artificial Sequence
  Description of Artificial Sequence: Synthetic oligonucleotide
guccccuaugcggaucauc

SEQ ID NO: 276440 - RNA, 19 nt, Artificial Sequence
  Description of Artificial Sequence: Synthetic oligonucleotide
cagaaccgaagucuggcuu

SEQ ID NO: 276441 - RNA, 19 nt, Artificial Sequence
  Description of Artificial Sequence: Synthetic oligonucleotide
ggaggguuucagagacaag

SEQ ID NO: 276442 - RNA, 19 nt, Artificial Sequence
  Description of Artificial Sequence: Synthetic oligonucleotide
cggaaaacuugaaggguga

SEQ ID NO: 276443 - RNA, 19 nt, Artificial Sequence
  Description of Artificial Sequence: Synthetic oligonucleotide
gaagccggugcuagacacu

SEQ ID NO: 276444 - RNA, 19 nt, Artificial Sequence
  Description of Artificial Sequence: Synthetic oligonucleotide
ccgcgagguaguacaggcc

SEQ ID NO: 276445 - RNA, 19 nt, Artificial Sequence
  Description of Artificial Sequence: Synthetic oligonucleotide
uuccgguucccagcucaua

SEQ ID NO: 276446 - RNA, 19 nt, Artificial Sequence
  Description of Artificial Sequence: Synthetic oligonucleotide
cgguucccagcucauaguc

SEQ ID NO: 276447 - RNA, 19 nt, Artificial Sequence
  Description of Artificial Sequence: Synthetic oligonucleotide
cggaugguagaaccacuug

SEQ ID NO: 276448 - RNA, 19 nt, Artificial Sequence
  Description of Artificial Sequence: Synthetic oligonucleotide
ccuugccucgaacgauggc

SEQ ID NO: 276449 - RNA, 19 nt, Artificial Sequence
  Description of Artificial Sequence: Synthetic oligonucleotide
cccaggacugucggaaaac

SEQ ID NO: 276450 - RNA, 19 nt, Artificial Sequence
  Description of Artificial Sequence: Synthetic oligonucleotide
auuccgguucccagcucau

SEQ ID NO: 276451 - RNA, 19 nt, Artificial Sequence
  Description of Artificial Sequence: Synthetic oligonucleotide
gagcgcgcuccaugaaagu

SEQ ID NO: 276452 - RNA, 19 nt, Artificial Sequence
  Description of Artificial Sequence: Synthetic oligonucleotide
ccucuauaccaagcaucag

SEQ ID NO: 276453 - RNA, 19 nt, Artificial Sequence
  Description of Artificial Sequence: Synthetic oligonucleotide
gggugaugcccugaaggaa

SEQ ID NO: 276454 - RNA, 19 nt, Artificial Sequence
  Description of Artificial Sequence: Synthetic oligonucleotide
cuaacugcuccuggucacu

SEQ ID NO: 276455 - RNA, 19 nt, Artificial Sequence
  Description of Artificial Sequence: Synthetic oligonucleotide
ccauguuguugccccacga

SEQ ID NO: 276456 - RNA, 19 nt, Artificial Sequence
  Description of Artificial Sequence: Synthetic oligonucleotide
gcaugaagccggugcuaga

SEQ ID NO: 276457 - RNA, 19 nt, Artificial Sequence
  Description of Artificial Sequence: Synthetic oligonucleotide
ggggcgaccagcagacaga

SEQ ID NO: 276458 - RNA, 19 nt, Artificial Sequence
  Description of Artificial Sequence: Synthetic oligonucleotide
cauaggugcccgcgaggua

SEQ ID NO: 276459 - RNA, 19 nt, Artificial Sequence
  Description of Artificial Sequence: Synthetic oligonucleotide
uuggggcgaccagcagaca

SEQ ID NO: 276460 - RNA, 19 nt, Artificial Sequence
  Description of Artificial Sequence: Synthetic oligonucleotide
gcauacgggcacacacaug

SEQ ID NO: 276461 - RNA, 19 nt, Artificial Sequence
  Description of Artificial Sequence: Synthetic oligonucleotide
ccgcgcaguccccuaugcg

SEQ ID NO: 276462 - RNA, 19 nt, Artificial Sequence
  Description of Artificial Sequence: Synthetic oligonucleotide
ggacugguacagagcgcgc

SEQ ID NO: 276463 - RNA, 19 nt, Artificial Sequence
  Description of Artificial Sequence: Synthetic oligonucleotide
gcccgcgagguaguacagg

SEQ ID NO: 276464 - RNA, 19 nt, Artificial Sequence
  Description of Artificial Sequence: Synthetic oligonucleotide
gaaccgaagucuggcuuuu

SEQ ID NO: 276465 - RNA, 19 nt, Artificial Sequence
  Description of Artificial Sequence: Synthetic oligonucleotide
ccuaugcggaucaucuccu

SEQ ID NO: 276466 - RNA, 19 nt, Artificial Sequence
  Description of Artificial Sequence: Synthetic oligonucleotide
ggugcccgcgagguaguac

SEQ ID NO: 276467 - RNA, 19 nt, Artificial Sequence
  Description of Artificial Sequence: Synthetic oligonucleotide
guucacgcgggagccgcaa

SEQ ID NO: 276468 - RNA, 19 nt, Artificial Sequence
  Description of Artificial Sequence: Synthetic oligonucleotide
ggaugaccagaaagggucu

SEQ ID NO: 276469 - RNA, 19 nt, Artificial Sequence
  Description of Artificial Sequence: Synthetic oligonucleotide
ccccacuagcuuuagacuu

SEQ ID NO: 276470 - RNA, 19 nt, Artificial Sequence
  Description of Artificial Sequence: Synthetic oligonucleotide
caccaggcacuuggggaca

SEQ ID NO: 276471 - RNA, 19 nt, Artificial Sequence
  Description of Artificial Sequence: Synthetic oligonucleotide
gggacacgugucugaacgu

SEQ ID NO: 276472 - RNA, 19 nt, Artificial Sequence
  Description of Artificial Sequence: Synthetic oligonucleotide
cccggcccacgguggaagg

SEQ ID NO: 276473 - RNA, 19 nt, Artificial Sequence
  Description of Artificial Sequence: Synthetic oligonucleotide
cuaugcggaucaucuccuu

SEQ ID NO: 276474 - RNA, 19 nt, Artificial Sequence
  Description of Artificial Sequence: Synthetic oligonucleotide
agccggugcuagacacuca

SEQ ID NO: 276475 - RNA, 19 nt, Artificial Sequence
  Description of Artificial Sequence: Synthetic oligonucleotide
aguccccuaugcggaucau

SEQ ID NO: 276476 - RNA, 19 nt, Artificial Sequence
  Description of Artificial Sequence: Synthetic oligonucleotide
gaccaauguagggcagguu

SEQ ID NO: 276477 - RNA, 19 nt, Artificial Sequence
  Description of Artificial Sequence: Synthetic oligonucleotide
cgaggccuuuagccaacgc

SEQ ID NO: 276478 - RNA, 19 nt, Artificial Sequence
  Description of Artificial Sequence: Synthetic oligonucleotide
cccggggcguccaccuggc

SEQ ID NO: 276479 - RNA, 19 nt, Artificial Sequence
  Description of Artificial Sequence: Synthetic oligonucleotide
gcucggggccccuccaucu

SEQ ID NO: 276480 - RNA, 19 nt, Artificial Sequence
  Description of Artificial Sequence: Synthetic oligonucleotide
ccgaggccuuuagccaacg

SEQ ID NO: 276481 - RNA, 19 nt, Artificial Sequence
  Description of Artificial Sequence: Synthetic oligonucleotide
gucccgcgccauggcagug

SEQ ID NO: 276482 - RNA, 19 nt, Artificial Sequence
  Description of Artificial Sequence: Synthetic oligonucleotide
gcggaucaucuccuugccu

SEQ ID NO: 276483 - RNA, 19 nt, Artificial Sequence
  Description of Artificial Sequence: Synthetic oligonucleotide
cccgguugggaccccagua

SEQ ID NO: 276484 - RNA, 19 nt, Artificial Sequence
  Description of Artificial Sequence: Synthetic oligonucleotide
ccccaucgccgaugagggc

SEQ ID NO: 276485 - RNA, 19 nt, Artificial Sequence
  Description of Artificial Sequence: Synthetic oligonucleotide
gcccucgcuguccugguau

SEQ ID NO: 276486 - RNA, 19 nt, Artificial Sequence
  Description of Artificial Sequence: Synthetic oligonucleotide
ggucacucgccaucuucuu

SEQ ID NO: 276487 - RNA, 19 nt, Artificial Sequence
  Description of Artificial Sequence: Synthetic oligonucleotide
ggucccgcgccauggcagu

SEQ ID NO: 276488 - RNA, 19 nt, Artificial Sequence
  Description of Artificial Sequence: Synthetic oligonucleotide
cugcgcccugacuucuggu

SEQ ID NO: 276489 - RNA, 19 nt, Artificial Sequence
  Description of Artificial Sequence: Synthetic oligonucleotide
ccacgguggaaggccuuug

SEQ ID NO: 276490 - RNA, 19 nt, Artificial Sequence
  Description of Artificial Sequence: Synthetic oligonucleotide
cgcauucaaagugcuggga

SEQ ID NO: 276491 - RNA, 19 nt, Artificial Sequence
  Description of Artificial Sequence: Synthetic oligonucleotide
gcacaccgucuguggagaa

SEQ ID NO: 276492 - RNA, 19 nt, Artificial Sequence
  Description of Artificial Sequence: Synthetic oligonucleotide
cccacuagcuuuagacuuu

SEQ ID NO: 276493 - RNA, 19 nt, Artificial Sequence
  Description of Artificial Sequence: Synthetic oligonucleotide
ccccggcccacgguggaag

SEQ ID NO: 276494 - RNA, 19 nt, Artificial Sequence
  Description of Artificial Sequence: Synthetic oligonucleotide
cgugucugaacgucguuuu

SEQ ID NO: 276495 - RNA, 19 nt, Artificial Sequence
  Description of Artificial Sequence: Synthetic oligonucleotide
  modified_base (8)..(8): a, c, u, g, unknown or other
gcuugcgngccuugccuuu

SEQ ID NO: 276496 - RNA, 19 nt, Artificial Sequence
  Description of Artificial Sequence: Synthetic oligonucleotide
gguacagagcgcgcuccau

SEQ ID NO: 276497 - RNA, 19 nt, Artificial Sequence
  Description of Artificial Sequence: Synthetic oligonucleotide
cgcgggagccgcaaguucu

SEQ ID NO: 276498 - RNA, 19 nt, Artificial Sequence
  Description of Artificial Sequence: Synthetic oligonucleotide
cacgugucugaacgucguu

SEQ ID NO: 276499 - RNA, 19 nt, Artificial Sequence
  Description of Artificial Sequence: Synthetic oligonucleotide
ggccuuuagccaacgcuuu

SEQ ID NO: 276500 - RNA, 19 nt, Artificial Sequence
  Description of Artificial Sequence: Synthetic oligonucleotide
ccucgaacgauggcuuugu

SEQ ID NO: 276501 - RNA, 19 nt, Artificial Sequence
  Description of Artificial Sequence: Synthetic oligonucleotide
cggucuagcuugcuugcua

SEQ ID NO: 276502 - RNA, 19 nt, Artificial Sequence
  Description of Artificial Sequence: Synthetic oligonucleotide
ccgguucccagcucauagu

SEQ ID NO: 276503 - RNA, 19 nt, Artificial Sequence
  Description of Artificial Sequence: Synthetic oligonucleotide
cacgcgggagccgcaaguu

SEQ ID NO: 276504 - RNA, 19 nt, Artificial Sequence
  Description of Artificial Sequence: Synthetic oligonucleotide
cgcgcuccaugaaaguccu

SEQ ID NO: 276505 - RNA, 19 nt, Artificial Sequence
  Description of Artificial Sequence: Synthetic oligonucleotide
ggcgaccagcagacagaaa

SEQ ID NO: 276506 - RNA, 19 nt, Artificial Sequence
  Description of Artificial Sequence: Synthetic oligonucleotide
ccgcgccauggcaguggug

SEQ ID NO: 276507 - RNA, 19 nt, Artificial Sequence
  Description of Artificial Sequence: Synthetic oligonucleotide
ggcccacgguggaaggccu

SEQ ID NO: 276508 - RNA, 19 nt, Artificial Sequence
  Description of Artificial Sequence: Synthetic oligonucleotide
ccggggcguccaccuggcc

SEQ ID NO: 276509 - RNA, 19 nt, Artificial Sequence
  Description of Artificial Sequence: Synthetic oligonucleotide
cgaccaauguagggcaggu

SEQ ID NO: 276510 - RNA, 19 nt, Artificial Sequence
  Description of Artificial Sequence: Synthetic oligonucleotide
ccaacgcuuuccuguccuu

SEQ ID NO: 276511 - RNA, 19 nt, Artificial Sequence
  Description of Artificial Sequence: Synthetic oligonucleotide
gcgggagccgcaaguucuu

SEQ ID NO: 276512 - RNA, 19 nt, Artificial Sequence
  Description of Artificial Sequence: Synthetic oligonucleotide
ccccgguugggaccccagu

SEQ ID NO: 276513 - RNA, 19 nt, Artificial Sequence
  Description of Artificial Sequence: Synthetic oligonucleotide
cccucgcuguccugguauu

SEQ ID NO: 276514 - RNA, 19 nt, Artificial Sequence
  Description of Artificial Sequence: Synthetic oligonucleotide
ggcguccaccuggccacau

SEQ ID NO: 276515 - RNA, 19 nt, Artificial Sequence
  Description of Artificial Sequence: Synthetic oligonucleotide
cgcgaacuaccauguuguu

SEQ ID NO: 276516 - RNA, 19 nt, Artificial Sequence
  Description of Artificial Sequence: Synthetic oligonucleotide
gcccacgguggaaggccuu

SEQ ID NO: 276517 - RNA, 19 nt, Artificial Sequence
  Description of Artificial Sequence: Synthetic oligonucleotide
gcgcuccaugaaaguccuu

SEQ ID NO: 276518 - RNA, 19 nt, Artificial Sequence
  Description of Artificial Sequence: Synthetic oligonucleotide
cgggagccgcaaguucuuu

SEQ ID NO: 276519 - RNA, 19 nt, Artificial Sequence
  Description of Artificial Sequence: Synthetic oligonucleotide
auaucugucauacagcucc

SEQ ID NO: 276520 - RNA, 19 nt, Artificial Sequence
  Description of Artificial Sequence: Synthetic oligonucleotide
aacuuaaugagacagagca

SEQ ID NO: 276521 - RNA, 19 nt, Artificial Sequence
  Description of Artificial Sequence: Synthetic oligonucleotide
aaaacuauuaugcugcuga

SEQ ID NO: 276522 - RNA, 19 nt, Artificial Sequence
  Description of Artificial Sequence: Synthetic oligonucleotide
aaauuuaacccucauaggu

SEQ ID NO: 276523 - RNA, 19 nt, Artificial Sequence
  Description of Artificial Sequence: Synthetic oligonucleotide
uaucuuauaugucauaugc

SEQ ID NO: 276524 - RNA, 19 nt, Artificial Sequence
  Description of Artificial Sequence: Synthetic oligonucleotide
cuaaaugauagauacaggc

SEQ ID NO: 276525 - RNA, 19 nt, Artificial Sequence
  Description of Artificial Sequence: Synthetic oligonucleotide
aaugcgcacaccucgaccc

SEQ ID NO: 276526 - RNA, 19 nt, Artificial Sequence
  Description of Artificial Sequence: Synthetic oligonucleotide
ucuacuauucaucugcuag

SEQ ID NO: 276527 - RNA, 19 nt, Artificial Sequence
  Description of Artificial Sequence: Synthetic oligonucleotide
cuuuauguaaagaucaccc

SEQ ID NO: 276528 - RNA, 19 nt, Artificial Sequence
  Description of Artificial Sequence: Synthetic oligonucleotide
uugacaauacuucauacgc

SEQ ID NO: 276529 - RNA, 19 nt, Artificial Sequence
  Description of Artificial Sequence: Synthetic oligonucleotide
aaucuugacuucuuuaauc

SEQ ID NO: 276530 - RNA, 19 nt, Artificial Sequence
  Description of Artificial Sequence: Synthetic oligonucleotide
agagcuaucauuauaggcc

SEQ ID NO: 276531 - RNA, 19 nt, Artificial Sequence
  Description of Artificial Sequence: Synthetic oligonucleotide
aucauuauaggccucgcgc

SEQ ID NO: 276532 - RNA, 19 nt, Artificial Sequence
  Description of Artificial Sequence: Synthetic oligonucleotide
aguuagauaacuuggaugu

SEQ ID NO: 276533 - RNA, 19 nt, Artificial Sequence
  Description of Artificial Sequence: Synthetic oligonucleotide
aaaauuuaacccucauagg

SEQ ID NO: 276534 - RNA, 19 nt, Artificial Sequence
  Description of Artificial Sequence: Synthetic oligonucleotide
uguacaaacuuuacaaugc

SEQ ID NO: 276535 - RNA, 19 nt, Artificial Sequence
  Description of Artificial Sequence: Synthetic oligonucleotide
uacuauaccaauuuuagaa

SEQ ID NO: 276536 - RNA, 19 nt, Artificial Sequence
  Description of Artificial Sequence: Synthetic oligonucleotide
aaaccuuuauuggaaaggc

SEQ ID NO: 276537 - RNA, 19 nt, Artificial Sequence
  Description of Artificial Sequence: Synthetic oligonucleotide
ugcuauuagacucagagau

SEQ ID NO: 276538 - RNA, 19 nt, Artificial Sequence
  Description of Artificial Sequence: Synthetic oligonucleotide
uauaaaaugggcagguacc

SEQ ID NO: 276539 - RNA, 19 nt, Artificial Sequence
  Description of Artificial Sequence: Synthetic oligonucleotide
acugaaauccacauaaagc

SEQ ID NO: 276540 - RNA, 19 nt, Artificial Sequence
  Description of Artificial Sequence: Synthetic oligonucleotide
ucauaaugcgcacaccucg

SEQ ID NO: 276541 - RNA, 19 nt, Artificial Sequence
  Description of Artificial Sequence: Synthetic oligonucleotide
uucaggaaacugcacaucg

SEQ ID NO: 276542 - RNA, 19 nt, Artificial Sequence
  Description of Artificial Sequence: Synthetic oligonucleotide
cuuugauugcccaugaagc

SEQ ID NO: 276543 - RNA, 19 nt, Artificial Sequence
  Description of Artificial Sequence: Synthetic oligonucleotide
gauacuauaccaauuuuag

SEQ ID NO: 276544 - RNA, 19 nt, Artificial Sequence
  Description of Artificial Sequence: Synthetic oligonucleotide
aaaugauagauacaggcua

SEQ ID NO: 276545 - RNA, 19 nt, Artificial Sequence
  Description of Artificial Sequence: Synthetic oligonucleotide
uguaauuuguuucuacugu

SEQ ID NO: 276546 - RNA, 19 nt, Artificial Sequence
  Description of Artificial Sequence: Synthetic oligonucleotide
cacagaauaauuuacacca

SEQ ID NO: 276547 - RNA, 19 nt, Artificial Sequence
  Description of Artificial Sequence: Synthetic oligonucleotide
ugucuugccauuauacagg

SEQ ID NO: 276548 - RNA, 19 nt, Artificial Sequence
  Description of Artificial Sequence: Synthetic oligonucleotide
ugggaguuagauaacuugg

SEQ ID NO: 276549 - RNA, 19 nt, Artificial Sequence
  Description of Artificial Sequence: Synthetic oligonucleotide
uacaugaacuucaagaauc

SEQ ID NO: 276550 - RNA, 19 nt, Artificial Sequence
  Description of Artificial Sequence: Synthetic oligonucleotide
cuaaguuguaguuugguug

SEQ ID NO: 276551 - RNA, 19 nt, Artificial Sequence
  Description of Artificial Sequence: Synthetic oligonucleotide
ucuuauaugucauaugcaa

SEQ ID NO: 276552 - RNA, 19 nt, Artificial Sequence
  Description of Artificial Sequence: Synthetic oligonucleotide
ucugcuacagaacagucga

SEQ ID NO: 276553 - RNA, 19 nt, Artificial Sequence
  Description of Artificial Sequence: Synthetic oligonucleotide
aauuuaacccucauagguc

SEQ ID NO: 276554 - RNA, 19 nt, Artificial Sequence
  Description of Artificial Sequence: Synthetic oligonucleotide
ucuagauggcagaagaucu

SEQ ID NO: 276555 - RNA, 19 nt, Artificial Sequence
  Description of Artificial Sequence: Synthetic oligonucleotide
gagaugguauaauacaccc

SEQ ID NO: 276556 - RNA, 19 nt, Artificial Sequence
  Description of Artificial Sequence: Synthetic oligonucleotide
uuaaaacagcguuaacagg

SEQ ID NO: 276557 - RNA, 19 nt, Artificial Sequence
  Description of Artificial Sequence: Synthetic oligonucleotide
agauguaaagcuuuguggu

SEQ ID NO: 276558 - RNA, 19 nt, Artificial Sequence
  Description of Artificial Sequence: Synthetic oligonucleotide
agcacuacauuucugaaca

SEQ ID NO: 276559 - RNA, 19 nt, Artificial Sequence
  Description of Artificial Sequence: Synthetic oligonucleotide
agccaaacaauccuccacc

SEQ ID NO: 276560 - RNA, 19 nt, Artificial Sequence
  Description of Artificial Sequence: Synthetic oligonucleotide
ucaacuuaaugagacagag

SEQ ID NO: 276561 - RNA, 19 nt, Artificial Sequence
  Description of Artificial Sequence: Synthetic oligonucleotide
uuaaacacgcagaaccaag

SEQ ID NO: 276562 - RNA, 19 nt, Artificial Sequence
  Description of Artificial Sequence: Synthetic oligonucleotide
acuuugauugcccaugaag

SEQ ID NO: 276563 - RNA, 19 nt, Artificial Sequence
  Description of Artificial Sequence: Synthetic oligonucleotide
auacgcaaaacuuauuucu

SEQ ID NO: 276564 - RNA, 19 nt, Artificial Sequence
  Description of Artificial Sequence: Synthetic oligonucleotide
uacauuaggaacuucuggu

SEQ ID NO: 276565 - RNA, 19 nt, Artificial Sequence
  Description of Artificial Sequence: Synthetic oligonucleotide
aacaaguccuaucuuauau

SEQ ID NO: 276566 - RNA, 19 nt, Artificial Sequence
  Description of Artificial Sequence: Synthetic oligonucleotide
acuuauaacccacauguga

SEQ ID NO: 276567 - RNA, 19 nt, Artificial Sequence
  Description of Artificial Sequence: Synthetic oligonucleotide
auuuguagcagcuuaugca

SEQ ID NO: 276568 - RNA, 19 nt, Artificial Sequence
  Description of Artificial Sequence: Synthetic oligonucleotide
uuuauauuaucacugcauu

SEQ ID NO: 276569 - RNA, 19 nt, Artificial Sequence
  Description of Artificial Sequence: Synthetic oligonucleotide
uauuuguagcagcuuaugc

SEQ ID NO: 276570 - RNA, 19 nt, Artificial Sequence
  Description of Artificial Sequence: Synthetic oligonucleotide
ucgaacaacacgaacacau

SEQ ID NO: 276571 - RNA, 19 nt, Artificial Sequence
  Description of Artificial Sequence: Synthetic oligonucleotide
uaauucagaaagcuugucu

SEQ ID NO: 276572 - RNA, 19 nt, Artificial Sequence
  Description of Artificial Sequence: Synthetic oligonucleotide
ucgaaaugaagauguaaag

SEQ ID NO: 276573 - RNA, 19 nt, Artificial Sequence
  Description of Artificial Sequence: Synthetic oligonucleotide
aaacuauaaaaugggcagg

SEQ ID NO: 276574 - RNA, 19 nt, Artificial Sequence
  Description of Artificial Sequence: Synthetic oligonucleotide
gaugguauaauacacccaa

SEQ ID NO: 276575 - RNA, 19 nt, Artificial Sequence
  Description of Artificial Sequence: Synthetic oligonucleotide
acuuuauguaaagaucacc

SEQ ID NO: 276576 - RNA, 19 nt, Artificial Sequence
  Description of Artificial Sequence: Synthetic oligonucleotide
uacucaagugcuauuagac

SEQ ID NO: 276577 - RNA, 19 nt, Artificial Sequence
  Description of Artificial Sequence: Synthetic oligonucleotide
uaggcuuaaaguguugugg

SEQ ID NO: 276578 - RNA, 19 nt, Artificial Sequence
  Description of Artificial Sequence: Synthetic oligonucleotide
uuuacaaccauggcuaaug

SEQ ID NO: 276579 - RNA, 19 nt, Artificial Sequence
  Description of Artificial Sequence: Synthetic oligonucleotide
cuauaaaaugggcagguac

SEQ ID NO: 276580 - RNA, 19 nt, Artificial Sequence
  Description of Artificial Sequence: Synthetic oligonucleotide
auaacuuggauguucuuga

SEQ ID NO: 276581 - RNA, 19 nt, Artificial Sequence
  Description of Artificial Sequence: Synthetic oligonucleotide
uauacaggucuucuaaaga

SEQ ID NO: 276582 - RNA, 19 nt, Artificial Sequence
  Description of Artificial Sequence: Synthetic oligonucleotide
uuugauugcccaugaagcc

SEQ ID NO: 276583 - RNA, 19 nt, Artificial Sequence
  Description of Artificial Sequence: Synthetic oligonucleotide
uucaauuacuuugccaggg

SEQ ID NO: 276584 - RNA, 19 nt, Artificial Sequence
  Description of Artificial Sequence: Synthetic oligonucleotide
cuccauaucugucauacag

SEQ ID NO: 276585 - RNA, 19 nt, Artificial Sequence
  Description of Artificial Sequence: Synthetic oligonucleotide
ugaaagggagucuuauucc

SEQ ID NO: 276586 - RNA, 19 nt, Artificial Sequence
  Description of Artificial Sequence: Synthetic oligonucleotide
cuuuaaauuugucuccggc

SEQ ID NO: 276587 - RNA, 19 nt, Artificial Sequence
  Description of Artificial Sequence: Synthetic oligonucleotide
aaucugacgagcaucaaga

SEQ ID NO: 276588 - RNA, 19 nt, Artificial Sequence
  Description of Artificial Sequence: Synthetic oligonucleotide
auuuaacccucauaggucu

SEQ ID NO: 276589 - RNA, 19 nt, Artificial Sequence
  Description of Artificial Sequence: Synthetic oligonucleotide
uuauguaaagaucacccuu

SEQ ID NO: 276590 - RNA, 19 nt, Artificial Sequence
  Description of Artificial Sequence: Synthetic oligonucleotide
uuuauguaaagaucacccu

SEQ ID NO: 276591 - RNA, 19 nt, Artificial Sequence
  Description of Artificial Sequence: Synthetic oligonucleotide
agaacagucgaaaugaaga

SEQ ID NO: 276592 - RNA, 19 nt, Artificial Sequence
  Description of Artificial Sequence: Synthetic oligonucleotide
acccauugugugcaaagcc

SEQ ID NO: 276593 - RNA, 19 nt, Artificial Sequence
  Description of Artificial Sequence: Synthetic oligonucleotide
ucuaauucagaaagcuugu

SEQ ID NO: 276594 - RNA, 19 nt, Artificial Sequence
  Description of Artificial Sequence: Synthetic oligonucleotide
agagaugguauaauacacc

SEQ ID NO: 276595 - RNA, 19 nt, Artificial Sequence
  Description of Artificial Sequence: Synthetic oligonucleotide
aaggauaacagaggccugg

SEQ ID NO: 276596 - RNA, 19 nt, Artificial Sequence
  Description of Artificial Sequence: Synthetic oligonucleotide
ucauuauaggccucgcgcc

SEQ ID NO: 276597 - RNA, 19 nt, Artificial Sequence
  Description of Artificial Sequence: Synthetic oligonucleotide
aggcuuaaaguguuguggg

SEQ ID NO: 276598 - RNA, 19 nt, Artificial Sequence
  Description of Artificial Sequence: Synthetic oligonucleotide
aaguuacacauagaucaac

SEQ ID NO: 276599 - RNA, 19 nt, Artificial Sequence
  Description of Artificial Sequence: Synthetic oligonucleotide
agaguaucaacugaaguca

SEQ ID NO: 276600 - RNA, 19 nt, Artificial Sequence
  Description of Artificial Sequence: Synthetic oligonucleotide
agauacaggcuaugaauuc

SEQ ID NO: 276601 - RNA, 19 nt, Artificial Sequence
  Description of Artificial Sequence: Synthetic oligonucleotide
uggucuagauggcagaaga

SEQ ID NO: 276602 - RNA, 19 nt, Artificial Sequence
  Description of Artificial Sequence: Synthetic oligonucleotide
aagggguuacgguacugcg

SEQ ID NO: 276603 - RNA, 19 nt, Artificial Sequence
  Description of Artificial Sequence: Synthetic oligonucleotide
uuucaaccaaucuuagugu

SEQ ID NO: 276604 - RNA, 19 nt, Artificial Sequence
  Description of Artificial Sequence: Synthetic oligonucleotide
auucacuccuuacuuuuac

SEQ ID NO: 276605 - RNA, 19 nt, Artificial Sequence
  Description of Artificial Sequence: Synthetic oligonucleotide
uauaacccacaugugaaag

SEQ ID NO: 276606 - RNA, 19 nt, Artificial Sequence
  Description of Artificial Sequence: Synthetic oligonucleotide
agcguuaacagguuugugu

SEQ ID NO: 276607 - RNA, 19 nt, Artificial Sequence
  Description of Artificial Sequence: Synthetic oligonucleotide
ggugcagccaaacacaaag

SEQ ID NO: 276608 - RNA, 19 nt, Artificial Sequence
  Description of Artificial Sequence: Synthetic oligonucleotide
uucgugucggccacguucg

SEQ ID NO: 276609 - RNA, 19 nt, Artificial Sequence
  Description of Artificial Sequence: Synthetic oligonucleotide
aacuauaaaaugggcaggu

SEQ ID NO: 276610 - RNA, 19 nt, Artificial Sequence
  Description of Artificial Sequence: Synthetic oligonucleotide
uguaauucucuguccaugu

SEQ ID NO: 276611 - RNA, 19 nt, Artificial Sequence
  Description of Artificial Sequence: Synthetic oligonucleotide
ucuacuuugauugcccaug

SEQ ID NO: 276612 - RNA, 19 nt, Artificial Sequence
  Description of Artificial Sequence: Synthetic oligonucleotide
ucaagugcuauuagacuca

SEQ ID NO: 276613 - RNA, 19 nt, Artificial Sequence
  Description of Artificial Sequence: Synthetic oligonucleotide
ucugcuaguaucuuauuuu

SEQ ID NO: 276614 - RNA, 19 nt, Artificial Sequence
  Description of Artificial Sequence: Synthetic oligonucleotide
ugaaucuugcccaggcuug

SEQ ID NO: 276615 - RNA, 19 nt, Artificial Sequence
  Description of Artificial Sequence: Synthetic oligonucleotide
uuaauaaccucuccuucuc

SEQ ID NO: 276616 - RNA, 19 nt, Artificial Sequence
  Description of Artificial Sequence: Synthetic oligonucleotide
uaaacacgcagaaccaaga

SEQ ID NO: 276617 - RNA, 19 nt, Artificial Sequence
  Description of Artificial Sequence: Synthetic oligonucleotide
ucugacgagcaucaagaug

SEQ ID NO: 276618 - RNA, 19 nt, Artificial Sequence
  Description of Artificial Sequence: Synthetic oligonucleotide
aguuuauauuaucacugca

SEQ ID NO: 276619 - RNA, 19 nt, Artificial Sequence
  Description of Artificial Sequence: Synthetic oligonucleotide
aaauuccugaagcucuacu

SEQ ID NO: 276620 - RNA, 19 nt, Artificial Sequence
  Description of Artificial Sequence: Synthetic oligonucleotide
ugaaacuuauaacccacau

SEQ ID NO: 276621 - RNA, 19 nt, Artificial Sequence
  Description of Artificial Sequence: Synthetic oligonucleotide
gaucacccuuuucaaaggg

SEQ ID NO: 276622 - RNA, 19 nt, Artificial Sequence
  Description of Artificial Sequence: Synthetic oligonucleotide
cuuuucaaagggguuacgg

SEQ ID NO: 276623 - RNA, 19 nt, Artificial Sequence
  Description of Artificial Sequence: Synthetic oligonucleotide
ugcaucaugucuucgcccc

SEQ ID NO: 276624 - RNA, 19 nt, Artificial Sequence
  Description of Artificial Sequence: Synthetic oligonucleotide
ugggguacaaaggauaaca

SEQ ID NO: 276625 - RNA, 19 nt, Artificial Sequence
  Description of Artificial Sequence: Synthetic oligonucleotide
uuuaucaggaugguauucu

SEQ ID NO: 276626 - RNA, 19 nt, Artificial Sequence
  Description of Artificial Sequence: Synthetic oligonucleotide
ucuuuggcuaacuuucugu

SEQ ID NO: 276627 - RNA, 19 nt, Artificial Sequence
  Description of Artificial Sequence: Synthetic oligonucleotide
uugcuuaggcuuaaagugu

SEQ ID NO: 276628 - RNA, 19 nt, Artificial Sequence
  Description of Artificial Sequence: Synthetic oligonucleotide
acuucuacuuugauugccc

SEQ ID NO: 276629 - RNA, 19 nt, Artificial Sequence
  Description of Artificial Sequence: Synthetic oligonucleotide
gucuugauuagcuugggga

SEQ ID NO: 276630 - RNA, 19 nt, Artificial Sequence
  Description of Artificial Sequence: Synthetic oligonucleotide
acagucgaaaugaagaugu

SEQ ID NO: 276631 - RNA, 19 nt, Artificial Sequence
  Description of Artificial Sequence: Synthetic oligonucleotide
uaaagaucacccuuuucaa

SEQ ID NO: 276632 - RNA, 19 nt, Artificial Sequence
  Description of Artificial Sequence: Synthetic oligonucleotide
acagaguaucaacugaagu

SEQ ID NO: 276633 - RNA, 19 nt, Artificial Sequence
  Description of Artificial Sequence: Synthetic oligonucleotide
uucaacuuaaugagacaga

SEQ ID NO: 276634 - RNA, 19 nt, Artificial Sequence
  Description of Artificial Sequence: Synthetic oligonucleotide
uaguguuuguaaacuauaa

SEQ ID NO: 276635 - RNA, 19 nt, Artificial Sequence
  Description of Artificial Sequence: Synthetic oligonucleotide
agaucaacagauguccauc

SEQ ID NO: 276636 - RNA, 19 nt, Artificial Sequence
  Description of Artificial Sequence: Synthetic oligonucleotide
agauacuuucaggggaugc

SEQ ID NO: 276637 - RNA, 19 nt, Artificial Sequence
  Description of Artificial Sequence: Synthetic oligonucleotide
ugucccaauuuucagggaa

SEQ ID NO: 276638 - RNA, 19 nt, Artificial Sequence
  Description of Artificial Sequence: Synthetic oligonucleotide
acugcggcauuccuucacc

SEQ ID NO: 276639 - RNA, 19 nt, Artificial Sequence
  Description of Artificial Sequence: Synthetic oligonucleotide
cuuauaacccacaugugaa

SEQ ID NO: 276640 - RNA, 19 nt, Artificial Sequence
  Description of Artificial Sequence: Synthetic oligonucleotide
ugcuacagaguaucaacug

SEQ ID NO: 276641 - RNA, 19 nt, Artificial Sequence
  Description of Artificial Sequence: Synthetic oligonucleotide
augucguacagcuucgugu

SEQ ID NO: 276642 - RNA, 19 nt, Artificial Sequence
  Description of Artificial Sequence: Synthetic oligonucleotide
uuaggcuuaaaguguugug

SEQ ID NO: 276643 - RNA, 19 nt, Artificial Sequence
  Description of Artificial Sequence: Synthetic oligonucleotide
augguucuacuauucaucu

SEQ ID NO: 276644 - RNA, 19 nt, Artificial Sequence
  Description of Artificial Sequence: Synthetic oligonucleotide
acaaccauggcuaauguaa

SEQ ID NO: 276645 - RNA, 19 nt, Artificial Sequence
  Description of Artificial Sequence: Synthetic oligonucleotide
cugggaguuagauaacuug

SEQ ID NO: 276646 - RNA, 19 nt, Artificial Sequence
  Description of Artificial Sequence: Synthetic oligonucleotide
guacaaaggauaacagagg

SEQ ID NO: 276647 - RNA, 19 nt, Artificial Sequence
  Description of Artificial Sequence: Synthetic oligonucleotide
uugcccaugaagccaaaca

SEQ ID NO: 276648 - RNA, 19 nt, Artificial Sequence
  Description of Artificial Sequence: Synthetic oligonucleotide
cuugaugcuacagaguauc

SEQ ID NO: 276649 - RNA, 19 nt, Artificial Sequence
  Description of Artificial Sequence: Synthetic oligonucleotide
acaacacgaacacauccug

SEQ ID NO: 276650 - RNA, 19 nt, Artificial Sequence
  Description of Artificial Sequence: Synthetic oligonucleotide
cucugcuacagaacagucg

SEQ ID NO: 276651 - RNA, 19 nt, Artificial Sequence
  Description of Artificial Sequence: Synthetic oligonucleotide
uccauugcaaucagagcac

SEQ ID NO: 276652 - RNA, 19 nt, Artificial Sequence
  Description of Artificial Sequence: Synthetic oligonucleotide
aacaacacgaacacauccu

SEQ ID NO: 276653 - RNA, 19 nt, Artificial Sequence
  Description of Artificial Sequence: Synthetic oligonucleotide
gauaacagaggccugggcu

SEQ ID NO: 276654 - RNA, 19 nt, Artificial Sequence
  Description of Artificial Sequence: Synthetic oligonucleotide
auauuaucacugcauugcu

SEQ ID NO: 276655 - RNA, 19 nt, Artificial Sequence
  Description of Artificial Sequence: Synthetic oligonucleotide
aguguuuguaaacuauaaa

SEQ ID NO: 276656 - RNA, 19 nt, Artificial Sequence
  Description of Artificial Sequence: Synthetic oligonucleotide
uaauaaccucuccuucucc

SEQ ID NO: 276657 - RNA, 19 nt, Artificial Sequence
  Description of Artificial Sequence: Synthetic oligonucleotide
auggagguagagugaauag

SEQ ID NO: 276658 - RNA, 19 nt, Artificial Sequence
  Description of Artificial Sequence: Synthetic oligonucleotide
ugcaucuaaaugauagaua

SEQ ID NO: 276659 - RNA, 19 nt, Artificial Sequence
  Description of Artificial Sequence: Synthetic oligonucleotide
uccuuacuuuuacaguuca

SEQ ID NO: 276660 - RNA, 19 nt, Artificial Sequence
  Description of Artificial Sequence: Synthetic oligonucleotide
agcuucaacaaguccuauc

SEQ ID NO: 276661 - RNA, 19 nt, Artificial Sequence
  Description of Artificial Sequence: Synthetic oligonucleotide
auaaugcgcacaccucgac

SEQ ID NO: 276662 - RNA, 19 nt, Artificial Sequence
  Description of Artificial Sequence: Synthetic oligonucleotide
auacuauaccaauuuuaga

SEQ ID NO: 276663 - RNA, 19 nt, Artificial Sequence
  Description of Artificial Sequence: Synthetic oligonucleotide
uaaugcgcacaccucgacc

SEQ ID NO: 276664 - RNA, 19 nt, Artificial Sequence
  Description of Artificial Sequence: Synthetic oligonucleotide
aaauccggcaaauguggaa

SEQ ID NO: 276665 - RNA, 19 nt, Artificial Sequence
  Description of Artificial Sequence: Synthetic oligonucleotide
aaacacgcagaaccaagau

SEQ ID NO: 276666 - RNA, 19 nt, Artificial Sequence
  Description of Artificial Sequence: Synthetic oligonucleotide
aacagcguuaacagguuug

SEQ ID NO: 276667 - RNA, 19 nt, Artificial Sequence
  Description of Artificial Sequence: Synthetic oligonucleotide
agaacaauaucuccagguu

SEQ ID NO: 276668 - RNA, 19 nt, Artificial Sequence
  Description of Artificial Sequence: Synthetic oligonucleotide
ugucguacagcuucguguc

SEQ ID NO: 276669 - RNA, 19 nt, Artificial Sequence
  Description of Artificial Sequence: Synthetic oligonucleotide
auaaagccuguuucaacca

SEQ ID NO: 276670 - RNA, 19 nt, Artificial Sequence
  Description of Artificial Sequence: Synthetic oligonucleotide
uaauaucucuagaaaugua

SEQ ID NO: 276671 - RNA, 19 nt, Artificial Sequence
  Description of Artificial Sequence: Synthetic oligonucleotide
gaucaacagauguccauca

SEQ ID NO: 276672 - RNA, 19 nt, Artificial Sequence
  Description of Artificial Sequence: Synthetic oligonucleotide
aggaugguauucuuuggcu

SEQ ID NO: 276673 - RNA, 19 nt, Artificial Sequence
  Description of Artificial Sequence: Synthetic oligonucleotide
gguuaguuuaaauuauaca

SEQ ID NO: 276674 - RNA, 19 nt, Artificial Sequence
  Description of Artificial Sequence: Synthetic oligonucleotide
uuauaacccacaugugaaa

SEQ ID NO: 276675 - RNA, 19 nt, Artificial Sequence
  Description of Artificial Sequence: Synthetic oligonucleotide
caacacgaacacauccugg

SEQ ID NO: 276676 - RNA, 19 nt, Artificial Sequence
  Description of Artificial Sequence: Synthetic oligonucleotide
gguucuaauaucucuagaa

SEQ ID NO: 276677 - RNA, 19 nt, Artificial Sequence
  Description of Artificial Sequence: Synthetic oligonucleotide
uugauugcccaugaagcca

SEQ ID NO: 276678 - RNA, 19 nt, Artificial Sequence
  Description of Artificial Sequence: Synthetic oligonucleotide
caacuuaaugagacagagc

SEQ ID NO: 276679 - RNA, 19 nt, Artificial Sequence
  Description of Artificial Sequence: Synthetic oligonucleotide
uggcuaacuuucuguaugc

SEQ ID NO: 276680 - RNA, 19 nt, Artificial Sequence
  Description of Artificial Sequence: Synthetic oligonucleotide
uguuucaaccaaucuuagu

SEQ ID NO: 276681 - RNA, 19 nt, Artificial Sequence
  Description of Artificial Sequence: Synthetic oligonucleotide
ugccguuuacugaugggca

SEQ ID NO: 276682 - RNA, 19 nt, Artificial Sequence
  Description of Artificial Sequence: Synthetic oligonucleotide
cagauaccaggacugaaac

SEQ ID NO: 276683 - RNA, 19 nt, Artificial Sequence
  Description of Artificial Sequence: Synthetic oligonucleotide
uauaugucauaugcaaauc

SEQ ID NO: 276684 - RNA, 19 nt, Artificial Sequence
  Description of Artificial Sequence: Synthetic oligonucleotide
uuacaaccauggcuaaugu

SEQ ID NO: 276685 - RNA, 19 nt, Artificial Sequence
  Description of Artificial Sequence: Synthetic oligonucleotide
uaugcaaaucauucccauc

SEQ ID NO: 276686 - RNA, 19 nt, Artificial Sequence
  Description of Artificial Sequence: Synthetic oligonucleotide
aaguccuaucuuauauguc

SEQ ID NO: 276687 - RNA, 19 nt, Artificial Sequence
  Description of Artificial Sequence: Synthetic oligonucleotide
auaauacacccaaauucag

SEQ ID NO: 276688 - RNA, 19 nt, Artificial Sequence
  Description of Artificial Sequence: Synthetic oligonucleotide
guugucuugccauuauaca

SEQ ID NO: 276689 - RNA, 19 nt, Artificial Sequence
  Description of Artificial Sequence: Synthetic oligonucleotide
cagguucuaauaucucuag

SEQ ID NO: 276690 - RNA, 19 nt, Artificial Sequence
  Description of Artificial Sequence: Synthetic oligonucleotide
cuucgugucggccacguuc

SEQ ID NO: 276691 - RNA, 19 nt, Artificial Sequence
  Description of Artificial Sequence: Synthetic oligonucleotide
gaugucguacagcuucgug

SEQ ID NO: 276692 - RNA, 19 nt, Artificial Sequence
  Description of Artificial Sequence: Synthetic oligonucleotide
acgaacacauccugguuca

SEQ ID NO: 276693 - RNA, 19 nt, Artificial Sequence
  Description of Artificial Sequence: Synthetic oligonucleotide
uucgacuucuacuuugauu

SEQ ID NO: 276694 - RNA, 19 nt, Artificial Sequence
  Description of Artificial Sequence: Synthetic oligonucleotide
accucgaacaacacgaaca

SEQ ID NO: 276695 - RNA, 19 nt, Artificial Sequence
  Description of Artificial Sequence: Synthetic oligonucleotide
aucaacagauguccaucag

SEQ ID NO: 276696 - RNA, 19 nt, Artificial Sequence
  Description of Artificial Sequence: Synthetic oligonucleotide
cuuauaugucauaugcaaa

SEQ ID NO: 276697 - RNA, 19 nt, Artificial Sequence
  Description of Artificial Sequence: Synthetic oligonucleotide
uagaucaacagauguccau

SEQ ID NO: 276698 - RNA, 19 nt, Artificial Sequence
  Description of Artificial Sequence: Synthetic oligonucleotide
uucaaccaaucuuaguguu

SEQ ID NO: 276699 - RNA, 19 nt, Artificial Sequence
  Description of Artificial Sequence: Synthetic oligonucleotide
uaguuugguugucuugcca

SEQ ID NO: 276700 - RNA, 19 nt, Artificial Sequence
  Description of Artificial Sequence: Synthetic oligonucleotide
ggcuacaaaguuuauauua

SEQ ID NO: 276701 - RNA, 19 nt, Artificial Sequence
  Description of Artificial Sequence: Synthetic oligonucleotide
gucgaaaugaagauguaaa

SEQ ID NO: 276702 - RNA, 19 nt, Artificial Sequence
  Description of Artificial Sequence: Synthetic oligonucleotide
caaaggauaacagaggccu

SEQ ID NO: 276703 - RNA, 19 nt, Artificial Sequence
  Description of Artificial Sequence: Synthetic oligonucleotide
augcaucuaaaugauagau

SEQ ID NO: 276704 - RNA, 19 nt, Artificial Sequence
  Description of Artificial Sequence: Synthetic oligonucleotide
gcaaauccggcaaaugugg

SEQ ID NO: 276705 - RNA, 19 nt, Artificial Sequence
  Description of Artificial Sequence: Synthetic oligonucleotide
ugcuuuacucugcuacaga

SEQ ID NO: 276706 - RNA, 19 nt, Artificial Sequence
  Description of Artificial Sequence: Synthetic oligonucleotide
uauuaugcugcugaaucuu

SEQ ID NO: 276707 - RNA, 19 nt, Artificial Sequence
  Description of Artificial Sequence: Synthetic oligonucleotide
uuaggaacuucuggucuag

SEQ ID NO: 276708 - RNA, 19 nt, Artificial Sequence
  Description of Artificial Sequence: Synthetic oligonucleotide
cguacuaucaaauuccuga

SEQ ID NO: 276709 - RNA, 19 nt, Artificial Sequence
  Description of Artificial Sequence: Synthetic oligonucleotide
aucugcuaguaucuuauuu

SEQ ID NO: 276710 - RNA, 19 nt, Artificial Sequence
  Description of Artificial Sequence: Synthetic oligonucleotide
aacuuauaacccacaugug

SEQ ID NO: 276711 - RNA, 19 nt, Artificial Sequence
  Description of Artificial Sequence: Synthetic oligonucleotide
uugaugcuacagaguauca

SEQ ID NO: 276712 - RNA, 19 nt, Artificial Sequence
  Description of Artificial Sequence: Synthetic oligonucleotide
uggauacuauaccaauuuu

SEQ ID NO: 276713 - RNA, 19 nt, Artificial Sequence
  Description of Artificial Sequence: Synthetic oligonucleotide
ucaaccaaucuuaguguuu

SEQ ID NO: 276714 - RNA, 19 nt, Artificial Sequence
  Description of Artificial Sequence: Synthetic oligonucleotide
ugcuacagaacagucgaaa

SEQ ID NO: 276715 - RNA, 19 nt, Artificial Sequence
  Description of Artificial Sequence: Synthetic oligonucleotide
uguuucuacuguucccagu

SEQ ID NO: 276716 - RNA, 19 nt, Artificial Sequence
  Description of Artificial Sequence: Synthetic oligonucleotide
cugccguuuacugaugggc

SEQ ID NO: 276717 - RNA, 19 nt, Artificial Sequence
  Description of Artificial Sequence: Synthetic oligonucleotide
cauugcuuaggcuuaaagu

SEQ ID NO: 276718 - RNA, 19 nt, Artificial Sequence
  Description of Artificial Sequence: Synthetic oligonucleotide
guacucaagugcuauuaga

SEQ ID NO: 276719 - RNA, 19 nt, Artificial Sequence
  Description of Artificial Sequence: Synthetic oligonucleotide
gcugccugaucauaaugcg

SEQ ID NO: 276720 - RNA, 19 nt, Artificial Sequence
  Description of Artificial Sequence: Synthetic oligonucleotide
ugcuuaggcuuaaaguguu

SEQ ID NO: 276721 - RNA, 19 nt, Artificial Sequence
  Description of Artificial Sequence: Synthetic oligonucleotide
aguuuaaauuauacacucu

SEQ ID NO: 276722 - RNA, 19 nt, Artificial Sequence
  Description of Artificial Sequence: Synthetic oligonucleotide
cuacagaguaucaacugaa

SEQ ID NO: 276723 - RNA, 19 nt, Artificial Sequence
  Description of Artificial Sequence: Synthetic oligonucleotide
ggaaacugcacaucgaacu

SEQ ID NO: 276724 - RNA, 19 nt, Artificial Sequence
  Description of Artificial Sequence: Synthetic oligonucleotide
gguacugcggcauuccuuc

SEQ ID NO: 276725 - RNA, 19 nt, Artificial Sequence
  Description of Artificial Sequence: Synthetic oligonucleotide
cagaaccaagauucacucc

SEQ ID NO: 276726 - RNA, 19 nt, Artificial Sequence
  Description of Artificial Sequence: Synthetic oligonucleotide
gucuagauggcagaagauc

SEQ ID NO: 276727 - RNA, 19 nt, Artificial Sequence
  Description of Artificial Sequence: Synthetic oligonucleotide
guaguuugguugucuugcc

SEQ ID NO: 276728 - RNA, 19 nt, Artificial Sequence
  Description of Artificial Sequence: Synthetic oligonucleotide
aaacagcguuaacagguuu

SEQ ID NO: 276729 - RNA, 19 nt, Artificial Sequence
  Description of Artificial Sequence: Synthetic oligonucleotide
acuucauacgcaaaacuua

SEQ ID NO: 276730 - RNA, 19 nt, Artificial Sequence
  Description of Artificial Sequence: Synthetic oligonucleotide
gggguuacgguacugcggc

SEQ ID NO: 276731 - RNA, 19 nt, Artificial Sequence
  Description of Artificial Sequence: Synthetic oligonucleotide
ugaugcuacagaguaucaa

SEQ ID NO: 276732 - RNA, 19 nt, Artificial Sequence
  Description of Artificial Sequence: Synthetic oligonucleotide
ugguucuacuauucaucug

SEQ ID NO: 276733 - RNA, 19 nt, Artificial Sequence
  Description of Artificial Sequence: Synthetic oligonucleotide
aaaggauaacagaggccug

SEQ ID NO: 276734 - RNA, 19 nt, Artificial Sequence
  Description of Artificial Sequence: Synthetic oligonucleotide
gcggcauuccuucaccucg

SEQ ID NO: 276735 - RNA, 19 nt, Artificial Sequence
  Description of Artificial Sequence: Synthetic oligonucleotide
agguucuaauaucucuaga

SEQ ID NO: 276736 - RNA, 19 nt, Artificial Sequence
  Description of Artificial Sequence: Synthetic oligonucleotide
aucuuauaugucauaugca

SEQ ID NO: 276737 - RNA, 19 nt, Artificial Sequence
  Description of Artificial Sequence: Synthetic oligonucleotide
uacuauucaucugcuagua

SEQ ID NO: 276738 - RNA, 19 nt, Artificial Sequence
  Description of Artificial Sequence: Synthetic oligonucleotide
acaauggagguagagugaa

SEQ ID NO: 276739 - RNA, 19 nt, Artificial Sequence
  Description of Artificial Sequence: Synthetic oligonucleotide
agcauaagcuucaagccaa

SEQ ID NO: 276740 - RNA, 19 nt, Artificial Sequence
  Description of Artificial Sequence: Synthetic oligonucleotide
caagaugcuuaaaugugaa

SEQ ID NO: 276741 - RNA, 19 nt, Artificial Sequence
  Description of Artificial Sequence: Synthetic oligonucleotide
caugaagccaaacaauccu

SEQ ID NO: 276742 - RNA, 19 nt, Artificial Sequence
  Description of Artificial Sequence: Synthetic oligonucleotide
cacccaaauucagauauuc

SEQ ID NO: 276743 - RNA, 19 nt, Artificial Sequence
  Description of Artificial Sequence: Synthetic oligonucleotide
caaguccuaucuuauaugu

SEQ ID NO: 276744 - RNA, 19 nt, Artificial Sequence
  Description of Artificial Sequence: Synthetic oligonucleotide
cacauagaucaacagaugu

SEQ ID NO: 276745 - RNA, 19 nt, Artificial Sequence
  Description of Artificial Sequence: Synthetic oligonucleotide
guuuauauuaucacugcau

SEQ ID NO: 276746 - RNA, 19 nt, Artificial Sequence
  Description of Artificial Sequence: Synthetic oligonucleotide
aagugggguacaaaggaua

SEQ ID NO: 276747 - RNA, 19 nt, Artificial Sequence
  Description of Artificial Sequence: Synthetic oligonucleotide
ccgcguacuaucaaauucc

SEQ ID NO: 276748 - RNA, 19 nt, Artificial Sequence
  Description of Artificial Sequence: Synthetic oligonucleotide
uacacucuguggauacuau

SEQ ID NO: 276749 - RNA, 19 nt, Artificial Sequence
  Description of Artificial Sequence: Synthetic oligonucleotide
ugagccccgcguacuauca

SEQ ID NO: 276750 - RNA, 19 nt, Artificial Sequence
  Description of Artificial Sequence: Synthetic oligonucleotide
auccggcaaauguggaaag

SEQ ID NO: 276751 - RNA, 19 nt, Artificial Sequence
  Description of Artificial Sequence: Synthetic oligonucleotide
gguugucuugccauuauac

SEQ ID NO: 276752 - RNA, 19 nt, Artificial Sequence
  Description of Artificial Sequence: Synthetic oligonucleotide
gaacagucgaaaugaagau

SEQ ID NO: 276753 - RNA, 19 nt, Artificial Sequence
  Description of Artificial Sequence: Synthetic oligonucleotide
acaggcuaugaauucuuua

SEQ ID NO: 276754 - RNA, 19 nt, Artificial Sequence
  Description of Artificial Sequence: Synthetic oligonucleotide
acgcaaaacuuauuucuuu

SEQ ID NO: 276755 - RNA, 19 nt, Artificial Sequence
  Description of Artificial Sequence: Synthetic oligonucleotide
gauacaggcuaugaauucu

SEQ ID NO: 276756 - RNA, 19 nt, Artificial Sequence
  Description of Artificial Sequence: Synthetic oligonucleotide
cuaucaaauuccugaagcu

SEQ ID NO: 276757 - RNA, 19 nt, Artificial Sequence
  Description of Artificial Sequence: Synthetic oligonucleotide
uacaaccauggcuaaugua

SEQ ID NO: 276758 - RNA, 19 nt, Artificial Sequence
  Description of Artificial Sequence: Synthetic oligonucleotide
agcuucaaacccauugugu

SEQ ID NO: 276759 - RNA, 19 nt, Artificial Sequence
  Description of Artificial Sequence: Synthetic oligonucleotide
aaaacagcguuaacagguu

SEQ ID NO: 276760 - RNA, 19 nt, Artificial Sequence
  Description of Artificial Sequence: Synthetic oligonucleotide
aguuguaguuugguugucu

SEQ ID NO: 276761 - RNA, 19 nt, Artificial Sequence
  Description of Artificial Sequence: Synthetic oligonucleotide
augcgcacaccucgacccc

SEQ ID NO: 276762 - RNA, 19 nt, Artificial Sequence
  Description of Artificial Sequence: Synthetic oligonucleotide
ggcaaauccggcaaaugug

SEQ ID NO: 276763 - RNA, 19 nt, Artificial Sequence
  Description of Artificial Sequence: Synthetic oligonucleotide
ucccaauuuucagggaaac

SEQ ID NO: 276764 - RNA, 19 nt, Artificial Sequence
  Description of Artificial Sequence: Synthetic oligonucleotide
gcuucaacaaguccuaucu

SEQ ID NO: 276765 - RNA, 19 nt, Artificial Sequence
  Description of Artificial Sequence: Synthetic oligonucleotide
uucauacgcaaaacuuauu

SEQ ID NO: 276766 - RNA, 19 nt, Artificial Sequence
  Description of Artificial Sequence: Synthetic oligonucleotide
gacaaauuguacaaacuuu

SEQ ID NO: 276767 - RNA, 19 nt, Artificial Sequence
  Description of Artificial Sequence: Synthetic oligonucleotide
acucugcuacagaacaguc

SEQ ID NO: 276768 - RNA, 19 nt, Artificial Sequence
  Description of Artificial Sequence: Synthetic oligonucleotide
uuugguugucuugccauua

SEQ ID NO: 276769 - RNA, 19 nt, Artificial Sequence
  Description of Artificial Sequence: Synthetic oligonucleotide
aaagggagucuuauuccaa

SEQ ID NO: 276770 - RNA, 19 nt, Artificial Sequence
  Description of Artificial Sequence: Synthetic oligonucleotide
cauaaugcgcacaccucga

SEQ ID NO: 276771 - RNA, 19 nt, Artificial Sequence
  Description of Artificial Sequence: Synthetic oligonucleotide
auguacucaagugcuauua

SEQ ID NO: 276772 - RNA, 19 nt, Artificial Sequence
  Description of Artificial Sequence: Synthetic oligonucleotide
gagucuuauuccaagugcu

SEQ ID NO: 276773 - RNA, 19 nt, Artificial Sequence
  Description of Artificial Sequence: Synthetic oligonucleotide
aggccucgcgccucugacc

SEQ ID NO: 276774 - RNA, 19 nt, Artificial Sequence
  Description of Artificial Sequence: Synthetic oligonucleotide
ggguacaaaggauaacaga

SEQ ID NO: 276775 - RNA, 19 nt, Artificial Sequence
  Description of Artificial Sequence: Synthetic oligonucleotide
cugaaacuuauaacccaca

SEQ ID NO: 276776 - RNA, 19 nt, Artificial Sequence
  Description of Artificial Sequence: Synthetic oligonucleotide
acccucauaggucuugauu

SEQ ID NO: 276777 - RNA, 19 nt, Artificial Sequence
  Description of Artificial Sequence: Synthetic oligonucleotide
cuucauacgcaaaacuuau

SEQ ID NO: 276778 - RNA, 19 nt, Artificial Sequence
  Description of Artificial Sequence: Synthetic oligonucleotide
cagcuuaugcaggugcagc

SEQ ID NO: 276779 - RNA, 19 nt, Artificial Sequence
  Description of Artificial Sequence: Synthetic oligonucleotide
aaucuacacaaaacugaua

SEQ ID NO: 276780 - RNA, 19 nt, Artificial Sequence
  Description of Artificial Sequence: Synthetic oligonucleotide
uucuacuauucaucugcua

SEQ ID NO: 276781 - RNA, 19 nt, Artificial Sequence
  Description of Artificial Sequence: Synthetic oligonucleotide
cccaaauucagauauucaa

SEQ ID NO: 276782 - RNA, 19 nt, Artificial Sequence
  Description of Artificial Sequence: Synthetic oligonucleotide
gggagggacgcccaggaug

SEQ ID NO: 276783 - RNA, 19 nt, Artificial Sequence
  Description of Artificial Sequence: Synthetic oligonucleotide
uuaugcaggugcagccaaa

SEQ ID NO: 276784 - RNA, 19 nt, Artificial Sequence
  Description of Artificial Sequence: Synthetic oligonucleotide
guggauacuauaccaauuu

SEQ ID NO: 276785 - RNA, 19 nt, Artificial Sequence
  Description of Artificial Sequence: Synthetic oligonucleotide
uacuuugauugcccaugaa

SEQ ID NO: 276786 - RNA, 19 nt, Artificial Sequence
  Description of Artificial Sequence: Synthetic oligonucleotide
uacgguacugcggcauucc

SEQ ID NO: 276787 - RNA, 19 nt, Artificial Sequence
  Description of Artificial Sequence: Synthetic oligonucleotide
uccuaucuuauaugucaua

SEQ ID NO: 276788 - RNA, 19 nt, Artificial Sequence
  Description of Artificial Sequence: Synthetic oligonucleotide
agaugguauaauacaccca

SEQ ID NO: 276789 - RNA, 19 nt, Artificial Sequence
  Description of Artificial Sequence: Synthetic oligonucleotide
gucguacagcuucgugucg

SEQ ID NO: 276790 - RNA, 19 nt, Artificial Sequence
  Description of Artificial Sequence: Synthetic oligonucleotide
caggaaacugcacaucgaa

SEQ ID NO: 276791 - RNA, 19 nt, Artificial Sequence
  Description of Artificial Sequence: Synthetic oligonucleotide
caggcuaugaauucuuuau

SEQ ID NO: 276792 - RNA, 19 nt, Artificial Sequence
  Description of Artificial Sequence: Synthetic oligonucleotide
ugacgagcaucaagaugcu

SEQ ID NO: 276793 - RNA, 19 nt, Artificial Sequence
  Description of Artificial Sequence: Synthetic oligonucleotide
cuugauuagcuuggggaca

SEQ ID NO: 276794 - RNA, 19 nt, Artificial Sequence
  Description of Artificial Sequence: Synthetic oligonucleotide
uacaggcuaugaauucuuu

SEQ ID NO: 276795 - RNA, 19 nt, Artificial Sequence
  Description of Artificial Sequence: Synthetic oligonucleotide
uaggccucgcgccucugac

SEQ ID NO: 276796 - RNA, 19 nt, Artificial Sequence
  Description of Artificial Sequence: Synthetic oligonucleotide
cuacuauucaucugcuagu

SEQ ID NO: 276797 - RNA, 19 nt, Artificial Sequence
  Description of Artificial Sequence: Synthetic oligonucleotide
ggacaaauuguacaaacuu

SEQ ID NO: 276798 - RNA, 19 nt, Artificial Sequence
  Description of Artificial Sequence: Synthetic oligonucleotide
cauggcuaauguaauuugu

SEQ ID NO: 276799 - RNA, 19 nt, Artificial Sequence
  Description of Artificial Sequence: Synthetic oligonucleotide
gugucggccacguucgcca

SEQ ID NO: 276800 - RNA, 19 nt, Artificial Sequence
  Description of Artificial Sequence: Synthetic oligonucleotide
ucaggggaugcaucauguc

SEQ ID NO: 276801 - RNA, 19 nt, Artificial Sequence
  Description of Artificial Sequence: Synthetic oligonucleotide
cuacuuugauugcccauga

SEQ ID NO: 276802 - RNA, 19 nt, Artificial Sequence
  Description of Artificial Sequence: Synthetic oligonucleotide
uccggcaaauguggaaaga

SEQ ID NO: 276803 - RNA, 19 nt, Artificial Sequence
  Description of Artificial Sequence: Synthetic oligonucleotide
gguauaauacacccaaauu

SEQ ID NO: 276804 - RNA, 19 nt, Artificial Sequence
  Description of Artificial Sequence: Synthetic oligonucleotide
ccgacaagcacuacauuuc

SEQ ID NO: 276805 - RNA, 19 nt, Artificial Sequence
  Description of Artificial Sequence: Synthetic oligonucleotide
gggguacaaaggauaacag

SEQ ID NO: 276806 - RNA, 19 nt, Artificial Sequence
  Description of Artificial Sequence: Synthetic oligonucleotide
ugcggcauuccuucaccuc

SEQ ID NO: 276807 - RNA, 19 nt, Artificial Sequence
  Description of Artificial Sequence: Synthetic oligonucleotide
caccucgaacaacacgaac

SEQ ID NO: 276808 - RNA, 19 nt, Artificial Sequence
  Description of Artificial Sequence: Synthetic oligonucleotide
acacucuguggauacuaua

SEQ ID NO: 276809 - RNA, 19 nt, Artificial Sequence
  Description of Artificial Sequence: Synthetic oligonucleotide
ggauuugaguuuaaaauau

SEQ ID NO: 276810 - RNA, 19 nt, Artificial Sequence
  Description of Artificial Sequence: Synthetic oligonucleotide
caagauucacuccuuacuu

SEQ ID NO: 276811 - RNA, 19 nt, Artificial Sequence
  Description of Artificial Sequence: Synthetic oligonucleotide
cuguccauguuucaugccu

SEQ ID NO: 276812 - RNA, 19 nt, Artificial Sequence
  Description of Artificial Sequence: Synthetic oligonucleotide
uagagugaauagggcaaaa

SEQ ID NO: 276813 - RNA, 19 nt, Artificial Sequence
  Description of Artificial Sequence: Synthetic oligonucleotide
ggccacguucgccauggcg

SEQ ID NO: 276814 - RNA, 19 nt, Artificial Sequence
  Description of Artificial Sequence: Synthetic oligonucleotide
aguaucaacugaagucaau

SEQ ID NO: 276815 - RNA, 19 nt, Artificial Sequence
  Description of Artificial Sequence: Synthetic oligonucleotide
agauggcagaagaucuucu

SEQ ID NO: 276816 - RNA, 19 nt, Artificial Sequence
  Description of Artificial Sequence: Synthetic oligonucleotide
acugcauugcuuaggcuua

SEQ ID NO: 276817 - RNA, 19 nt, Artificial Sequence
  Description of Artificial Sequence: Synthetic oligonucleotide
acuauaaaaugggcaggua

SEQ ID NO: 276818 - RNA, 19 nt, Artificial Sequence
  Description of Artificial Sequence: Synthetic oligonucleotide
ggauaacagaggccugggc

SEQ ID NO: 276819 - RNA, 19 nt, Artificial Sequence
  Description of Artificial Sequence: Synthetic oligonucleotide
uuacgguacugcggcauuc

SEQ ID NO: 276820 - RNA, 19 nt, Artificial Sequence
  Description of Artificial Sequence: Synthetic oligonucleotide
cccgcguacuaucaaauuc

SEQ ID NO: 276821 - RNA, 19 nt, Artificial Sequence
  Description of Artificial Sequence: Synthetic oligonucleotide
ucaaacccauugugugcaa

SEQ ID NO: 276822 - RNA, 19 nt, Artificial Sequence
  Description of Artificial Sequence: Synthetic oligonucleotide
gcguuaacagguuugugua

SEQ ID NO: 276823 - RNA, 19 nt, Artificial Sequence
  Description of Artificial Sequence: Synthetic oligonucleotide
ugucuccggcauuuggauu

SEQ ID NO: 276824 - RNA, 19 nt, Artificial Sequence
  Description of Artificial Sequence: Synthetic oligonucleotide
auuagcuuggggacauuuu

SEQ ID NO: 276825 - RNA, 19 nt, Artificial Sequence
  Description of Artificial Sequence: Synthetic oligonucleotide
cugagccccgcguacuauc

SEQ ID NO: 276826 - RNA, 19 nt, Artificial Sequence
  Description of Artificial Sequence: Synthetic oligonucleotide
auacaggcuaugaauucuu

SEQ ID NO: 276827 - RNA, 19 nt, Artificial Sequence
  Description of Artificial Sequence: Synthetic oligonucleotide
guagagugaauagggcaaa

SEQ ID NO: 276828 - RNA, 19 nt, Artificial Sequence
  Description of Artificial Sequence: Synthetic oligonucleotide
auugugugcaaagcccauu

SEQ ID NO: 276829 - RNA, 19 nt, Artificial Sequence
  Description of Artificial Sequence: Synthetic oligonucleotide
agcagauaccaggacugaa

SEQ ID NO: 276830 - RNA, 19 nt, Artificial Sequence
  Description of Artificial Sequence: Synthetic oligonucleotide
ucccguagaccuugcucuc

SEQ ID NO: 276831 - RNA, 19 nt, Artificial Sequence
  Description of Artificial Sequence: Synthetic oligonucleotide
acgguacugcggcauuccu

SEQ ID NO: 276832 - RNA, 19 nt, Artificial Sequence
  Description of Artificial Sequence: Synthetic oligonucleotide
agccccgcguacuaucaaa

SEQ ID NO: 276833 - RNA, 19 nt, Artificial Sequence
  Description of Artificial Sequence: Synthetic oligonucleotide
agucuuauuccaagugcuu

SEQ ID NO: 276834 - RNA, 19 nt, Artificial Sequence
  Description of Artificial Sequence: Synthetic oligonucleotide
ucguucucgcuggcgccgg

SEQ ID NO: 276835 - RNA, 19 nt, Artificial Sequence
  Description of Artificial Sequence: Synthetic oligonucleotide
cugaaucuugcccaggcuu

SEQ ID NO: 276836 - RNA, 19 nt, Artificial Sequence
  Description of Artificial Sequence: Synthetic oligonucleotide
cuguggauacuauaccaau

SEQ ID NO: 276837 - RNA, 19 nt, Artificial Sequence
  Description of Artificial Sequence: Synthetic oligonucleotide
uaggaacuucuggucuaga

SEQ ID NO: 276838 - RNA, 19 nt, Artificial Sequence
  Description of Artificial Sequence: Synthetic oligonucleotide
uccugagccccgcguacua

SEQ ID NO: 276839 - RNA, 19 nt, Artificial Sequence
  Description of Artificial Sequence: Synthetic oligonucleotide
gccguuuacugaugggcac

SEQ ID NO: 276840 - RNA, 19 nt, Artificial Sequence
  Description of Artificial Sequence: Synthetic oligonucleotide
ccagacuucccaccuuggc

SEQ ID NO: 276841 - RNA, 19 nt, Artificial Sequence
  Description of Artificial Sequence: Synthetic oligonucleotide
gauuagcuuggggacauuu

SEQ ID NO: 276842 - RNA, 19 nt, Artificial Sequence
  Description of Artificial Sequence: Synthetic oligonucleotide
aagugcuauuagacucaga

SEQ ID NO: 276843 - RNA, 19 nt, Artificial Sequence
  Description of Artificial Sequence: Synthetic oligonucleotide
ccugccguuuacugauggg

SEQ ID NO: 276844 - RNA, 19 nt, Artificial Sequence
  Description of Artificial Sequence: Synthetic oligonucleotide
gcagauaccaggacugaaa

SEQ ID NO: 276845 - RNA, 19 nt, Artificial Sequence
  Description of Artificial Sequence: Synthetic oligonucleotide
ugcauugcuuaggcuuaaa

SEQ ID NO: 276846 - RNA, 19 nt, Artificial Sequence
  Description of Artificial Sequence: Synthetic oligonucleotide
ggccucgcgccucugacca

SEQ ID NO: 276847 - RNA, 19 nt, Artificial Sequence
  Description of Artificial Sequence: Synthetic oligonucleotide
acguucgccauggcggccu

SEQ ID NO: 276848 - RNA, 19 nt, Artificial Sequence
  Description of Artificial Sequence: Synthetic oligonucleotide
gggaugcaucaugucuucg

SEQ ID NO: 276849 - RNA, 19 nt, Artificial Sequence
  Description of Artificial Sequence: Synthetic oligonucleotide
ccaagauucacuccuuacu

SEQ ID NO: 276850 - RNA, 19 nt, Artificial Sequence
  Description of Artificial Sequence: Synthetic oligonucleotide
gucuuauuccaagugcuuu

SEQ ID NO: 276851 - RNA, 19 nt, Artificial Sequence
  Description of Artificial Sequence: Synthetic oligonucleotide
ucgugucggccacguucgc

SEQ ID NO: 276852 - RNA, 19 nt, Artificial Sequence
  Description of Artificial Sequence: Synthetic oligonucleotide
caaccauggcuaauguaau

SEQ ID NO: 276853 - RNA, 19 nt, Artificial Sequence
  Description of Artificial Sequence: Synthetic oligonucleotide
cauccugguucaauuacuu

SEQ ID NO: 276854 - RNA, 19 nt, Artificial Sequence
  Description of Artificial Sequence: Synthetic oligonucleotide
cagcguuaacagguuugug

SEQ ID NO: 276855 - RNA, 19 nt, Artificial Sequence
  Description of Artificial Sequence: Synthetic oligonucleotide
ccacguucgccauggcggc

SEQ ID NO: 276856 - RNA, 19 nt, Artificial Sequence
  Description of Artificial Sequence: Synthetic oligonucleotide
gcagguaccugaagcauaa

SEQ ID NO: 276857 - RNA, 19 nt, Artificial Sequence
  Description of Artificial Sequence: Synthetic oligonucleotide
ggauuugacaauacuucau

SEQ ID NO: 276858 - RNA, 19 nt, Artificial Sequence
  Description of Artificial Sequence: Synthetic oligonucleotide
gcuuguugcaaaauauuuu

SEQ ID NO: 276859 - RNA, 19 nt, Artificial Sequence
  Description of Artificial Sequence: Synthetic oligonucleotide
gcguacuaucaaauuccug

SEQ ID NO: 276860 - RNA, 19 nt, Artificial Sequence
  Description of Artificial Sequence: Synthetic oligonucleotide
cuggcgccgggagggacgc

SEQ ID NO: 276861 - RNA, 19 nt, Artificial Sequence
  Description of Artificial Sequence: Synthetic oligonucleotide
cagucgaaaugaagaugua

SEQ ID NO: 276862 - RNA, 19 nt, Artificial Sequence
  Description of Artificial Sequence: Synthetic oligonucleotide
cugcuacagaacagucgaa

SEQ ID NO: 276863 - RNA, 19 nt, Artificial Sequence
  Description of Artificial Sequence: Synthetic oligonucleotide
caagugcuuuacucugcua

SEQ ID NO: 276864 - RNA, 19 nt, Artificial Sequence
  Description of Artificial Sequence: Synthetic oligonucleotide
guccuaucuuauaugucau

SEQ ID NO: 276865 - RNA, 19 nt, Artificial Sequence
  Description of Artificial Sequence: Synthetic oligonucleotide
acacccaaauucagauauu

SEQ ID NO: 276866 - RNA, 19 nt, Artificial Sequence
  Description of Artificial Sequence: Synthetic oligonucleotide
ggagggacgcccaggaugu

SEQ ID NO: 276867 - RNA, 19 nt, Artificial Sequence
  Description of Artificial Sequence: Synthetic oligonucleotide
gcuggcgccgggagggacg

SEQ ID NO: 276868 - RNA, 19 nt, Artificial Sequence
  Description of Artificial Sequence: Synthetic oligonucleotide
cacguucgccauggcggcc

SEQ ID NO: 276869 - RNA, 19 nt, Artificial Sequence
  Description of Artificial Sequence: Synthetic oligonucleotide
guuacgguacugcggcauu

SEQ ID NO: 276870 - RNA, 19 nt, Artificial Sequence
  Description of Artificial Sequence: Synthetic oligonucleotide
acugcacaucgaacuuuau

SEQ ID NO: 276871 - RNA, 19 nt, Artificial Sequence
  Description of Artificial Sequence: Synthetic oligonucleotide
cuuuacaaccauggcuaau

SEQ ID NO: 276872 - RNA, 19 nt, Artificial Sequence
  Description of Artificial Sequence: Synthetic oligonucleotide
ccggcaaauguggaaagaa

SEQ ID NO: 276873 - RNA, 19 nt, Artificial Sequence
  Description of Artificial Sequence: Synthetic oligonucleotide
gccgcugccuucccguaga

SEQ ID NO: 276874 - RNA, 19 nt, Artificial Sequence
  Description of Artificial Sequence: Synthetic oligonucleotide
ccucgcgccucugaccacc

SEQ ID NO: 276875 - RNA, 19 nt, Artificial Sequence
  Description of Artificial Sequence: Synthetic oligonucleotide
ggucuucuaaagauacuuu

SEQ ID NO: 276876 - RNA, 19 nt, Artificial Sequence
  Description of Artificial Sequence: Synthetic oligonucleotide
gcacaccucgaccccgaca

SEQ ID NO: 276877 - RNA, 19 nt, Artificial Sequence
  Description of Artificial Sequence: Synthetic oligonucleotide
cugcggcauuccuucaccu

SEQ ID NO: 276878 - RNA, 19 nt, Artificial Sequence
  Description of Artificial Sequence: Synthetic oligonucleotide
ucgcgccucugaccaccuc

SEQ ID NO: 276879 - RNA, 19 nt, Artificial Sequence
  Description of Artificial Sequence: Synthetic oligonucleotide
gguuacgguacugcggcau

SEQ ID NO: 276880 - RNA, 19 nt, Artificial Sequence
  Description of Artificial Sequence: Synthetic oligonucleotide
ccgcuucucuggauuugac

SEQ ID NO: 276881 - RNA, 19 nt, Artificial Sequence
  Description of Artificial Sequence: Synthetic oligonucleotide
ccguuuacugaugggcaca

SEQ ID NO: 276882 - RNA, 19 nt, Artificial Sequence
  Description of Artificial Sequence: Synthetic oligonucleotide
cugcauugcuuaggcuuaa

SEQ ID NO: 276883 - RNA, 19 nt, Artificial Sequence
  Description of Artificial Sequence: Synthetic oligonucleotide
ccguagaccuugcucucca

SEQ ID NO: 276884 - RNA, 19 nt, Artificial Sequence
  Description of Artificial Sequence: Synthetic oligonucleotide
caucugcuaguaucuuauu

SEQ ID NO: 276885 - RNA, 19 nt, Artificial Sequence
  Description of Artificial Sequence: Synthetic oligonucleotide
ggguuacgguacugcggca

SEQ ID NO: 276886 - RNA, 19 nt, Artificial Sequence
  Description of Artificial Sequence: Synthetic oligonucleotide
gcccaugaagccaaacaau

SEQ ID NO: 276887 - RNA, 19 nt, Artificial Sequence
  Description of Artificial Sequence: Synthetic oligonucleotide
cgugucggccacguucgcc

SEQ ID NO: 276888 - RNA, 19 nt, Artificial Sequence
  Description of Artificial Sequence: Synthetic oligonucleotide
gagggacgcccaggauguc

SEQ ID NO: 276889 - RNA, 19 nt, Artificial Sequence
  Description of Artificial Sequence: Synthetic oligonucleotide
cccgcuucucuggauuuga

SEQ ID NO: 276890 - RNA, 19 nt, Artificial Sequence
  Description of Artificial Sequence: Synthetic oligonucleotide
cuccugagccccgcguacu

SEQ ID NO: 276891 - RNA, 19 nt, Artificial Sequence
  Description of Artificial Sequence: Synthetic oligonucleotide
ggaacaccucauguucuuu

SEQ ID NO: 276892 - RNA, 19 nt, Artificial Sequence
  Description of Artificial Sequence: Synthetic oligonucleotide
cgcguacuaucaaauuccu

SEQ ID NO: 276893 - RNA, 19 nt, Artificial Sequence
  Description of Artificial Sequence: Synthetic oligonucleotide
cucgcgccucugaccaccu

SEQ ID NO: 276894 - RNA, 19 nt, Artificial Sequence
  Description of Artificial Sequence: Synthetic oligonucleotide
cguucucgcuggcgccggg

SEQ ID NO: 276895 - RNA, 19 nt, Artificial Sequence
  Description of Artificial Sequence: Synthetic oligonucleotide
uggcgccgggagggacgcc

SEQ ID NO: 276896 - RNA, 19 nt, Artificial Sequence
  Description of Artificial Sequence: Synthetic oligonucleotide
ccauuucgacuucuacuuu

SEQ ID NO: 276897 - RNA, 19 nt, Artificial Sequence
  Description of Artificial Sequence: Synthetic oligonucleotide
ccgcugccuucccguagac

SEQ ID NO: 276898 - RNA, 19 nt, Artificial Sequence
  Description of Artificial Sequence: Synthetic oligonucleotide
gccccgcguacuaucaaau

SEQ ID NO: 276899 - RNA, 19 nt, Artificial Sequence
  Description of Artificial Sequence: Synthetic oligonucleotide
gcgccucugaccaccuccu

SEQ ID NO: 276900 - RNA, 19 nt, Artificial Sequence
  Description of Artificial Sequence: Synthetic oligonucleotide
cguucgccauggcggccug

SEQ ID NO: 276901 - RNA, 19 nt, Artificial Sequence
  Description of Artificial Sequence: Synthetic oligonucleotide
ccccgcguacuaucaaauu

SEQ ID NO: 276902 - RNA, 19 nt, Artificial Sequence
  Description of Artificial Sequence: Synthetic oligonucleotide
gcuucgugucggccacguu

SEQ ID NO: 276903 - RNA, 19 nt, Artificial Sequence
  Description of Artificial Sequence: Synthetic oligonucleotide
cgaccccgacaagcacuac

SEQ ID NO: 276904 - RNA, 19 nt, Artificial Sequence
  Description of Artificial Sequence: Synthetic oligonucleotide
ccccgacaagcacuacauu

SEQ ID NO: 276905 - RNA, 19 nt, Artificial Sequence
  Description of Artificial Sequence: Synthetic oligonucleotide
uauuuagugaauaaugugg

SEQ ID NO: 276906 - RNA, 19 nt, Artificial Sequence
  Description of Artificial Sequence: Synthetic oligonucleotide
aaaucuaagguacaaagug

SEQ ID NO: 276907 - RNA, 19 nt, Artificial Sequence
  Description of Artificial Sequence: Synthetic oligonucleotide
aaauagagaacacauuggg

SEQ ID NO: 276908 - RNA, 19 nt, Artificial Sequence
  Description of Artificial Sequence: Synthetic oligonucleotide
auguauaucacauuucuac

SEQ ID NO: 276909 - RNA, 19 nt, Artificial Sequence
  Description of Artificial Sequence: Synthetic oligonucleotide
auguaaucaauguacacgc

SEQ ID NO: 276910 - RNA, 19 nt, Artificial Sequence
  Description of Artificial Sequence: Synthetic oligonucleotide
aagucugcuaggcaaaugc

SEQ ID NO: 276911 - RNA, 19 nt, Artificial Sequence
  Description of Artificial Sequence: Synthetic oligonucleotide
uucaauagaggguagaugc

SEQ ID NO: 276912 - RNA, 19 nt, Artificial Sequence
  Description of Artificial Sequence: Synthetic oligonucleotide
aauagaacaagucuuccug

SEQ ID NO: 276913 - RNA, 19 nt, Artificial Sequence
  Description of Artificial Sequence: Synthetic oligonucleotide
aauaggacaaaugaucuuc

SEQ ID NO: 276914 - RNA, 19 nt, Artificial Sequence
  Description of Artificial Sequence: Synthetic oligonucleotide
uaauacuauaccuguaucg

SEQ ID NO: 276915 - RNA, 19 nt, Artificial Sequence
  Description of Artificial Sequence: Synthetic oligonucleotide
uaaaucaaggcgauuaaag

SEQ ID NO: 276916 - RNA, 19 nt, Artificial Sequence
  Description of Artificial Sequence: Synthetic oligonucleotide
uuuuaaucaaaucgauugg

SEQ ID NO: 276917 - RNA, 19 nt, Artificial Sequence
  Description of Artificial Sequence: Synthetic oligonucleotide
ucuuuggacaguaagaaga

SEQ ID NO: 276918 - RNA, 19 nt, Artificial Sequence
  Description of Artificial Sequence: Synthetic oligonucleotide
auagagaacacauugggug

SEQ ID NO: 276919 - RNA, 19 nt, Artificial Sequence
  Description of Artificial Sequence: Synthetic oligonucleotide
aaugcaaaagugcacgcag

SEQ ID NO: 276920 - RNA, 19 nt, Artificial Sequence
  Description of Artificial Sequence: Synthetic oligonucleotide
acuaagucaauauauucuc

SEQ ID NO: 276921 - RNA, 19 nt, Artificial Sequence
  Description of Artificial Sequence: Synthetic oligonucleotide
uuauuucagacccauuggg

SEQ ID NO: 276922 - RNA, 19 nt, Artificial Sequence
  Description of Artificial Sequence: Synthetic oligonucleotide
uggaauaucagcuagguuu

SEQ ID NO: 276923 - RNA, 19 nt, Artificial Sequence
  Description of Artificial Sequence: Synthetic oligonucleotide
uucguuaccauuauuucag

SEQ ID NO: 276924 - RNA, 19 nt, Artificial Sequence
  Description of Artificial Sequence: Synthetic oligonucleotide
uguaucgugauuaauucca

SEQ ID NO: 276925 - RNA, 19 nt, Artificial Sequence
  Description of Artificial Sequence: Synthetic oligonucleotide
caaucuagagccuacagag

SEQ ID NO: 276926 - RNA, 19 nt, Artificial Sequence
  Description of Artificial Sequence: Synthetic oligonucleotide
ucuuagaaaacccuagaca

SEQ ID NO: 276927 - RNA, 19 nt, Artificial Sequence
  Description of Artificial Sequence: Synthetic oligonucleotide
cugaaaaucagucuaaauc

SEQ ID NO: 276928 - RNA, 19 nt, Artificial Sequence
  Description of Artificial Sequence: Synthetic oligonucleotide
aacgucgacaucuccaagg

SEQ ID NO: 276929 - RNA, 19 nt, Artificial Sequence
  Description of Artificial Sequence: Synthetic oligonucleotide
uuuaaaagugguccaaugu

SEQ ID NO: 276930 - RNA, 19 nt, Artificial Sequence
  Description of Artificial Sequence: Synthetic oligonucleotide
auaauuacucgauagcaug

SEQ ID NO: 276931 - RNA, 19 nt, Artificial Sequence
  Description of Artificial Sequence: Synthetic oligonucleotide
uuauaauuacucgauagca

SEQ ID NO: 276932 - RNA, 19 nt, Artificial Sequence
  Description of Artificial Sequence: Synthetic oligonucleotide
ucuggcgagaccaugagca

SEQ ID NO: 276933 - RNA, 19 nt, Artificial Sequence
  Description of Artificial Sequence: Synthetic oligonucleotide
aaauacaccuugcagcuca

SEQ ID NO: 276934 - RNA, 19 nt, Artificial Sequence
  Description of Artificial Sequence: Synthetic oligonucleotide
accaguugagaauuggugg

SEQ ID NO: 276935 - RNA, 19 nt, Artificial Sequence
  Description of Artificial Sequence: Synthetic oligonucleotide
aaucgauuggaagaaguuc

SEQ ID NO: 276936 - RNA, 19 nt, Artificial Sequence
  Description of Artificial Sequence: Synthetic oligonucleotide
uguauaucacauuucuacc

SEQ ID NO: 276937 - RNA, 19 nt, Artificial Sequence
  Description of Artificial Sequence: Synthetic oligonucleotide
uucguauggagguaaauca

SEQ ID NO: 276938 - RNA, 19 nt, Artificial Sequence
  Description of Artificial Sequence: Synthetic oligonucleotide
aauacuauaccuguaucgu

SEQ ID NO: 276939 - RNA, 19 nt, Artificial Sequence
  Description of Artificial Sequence: Synthetic oligonucleotide
aauggucggaugaagaauc

SEQ ID NO: 276940 - RNA, 19 nt, Artificial Sequence
  Description of Artificial Sequence: Synthetic oligonucleotide
ugagaauugguggugaaag

SEQ ID NO: 276941 - RNA, 19 nt, Artificial Sequence
  Description of Artificial Sequence: Synthetic oligonucleotide
ugugagaugcacaaguggu

SEQ ID NO: 276942 - RNA, 19 nt, Artificial Sequence
  Description of Artificial Sequence: Synthetic oligonucleotide
ugcaagaauagaaaauaga

SEQ ID NO: 276943 - RNA, 19 nt, Artificial Sequence
  Description of Artificial Sequence: Synthetic oligonucleotide
uggagguaaaucaaggcga

SEQ ID NO: 276944 - RNA, 19 nt, Artificial Sequence
  Description of Artificial Sequence: Synthetic oligonucleotide
aaucaauguacacgccaac

SEQ ID NO: 276945 - RNA, 19 nt, Artificial Sequence
  Description of Artificial Sequence: Synthetic oligonucleotide
uccaauguauaucacauuu

SEQ ID NO: 276946 - RNA, 19 nt, Artificial Sequence
  Description of Artificial Sequence: Synthetic oligonucleotide
uacuauaccuguaucguga

SEQ ID NO: 276947 - RNA, 19 nt, Artificial Sequence
  Description of Artificial Sequence: Synthetic oligonucleotide
ucaaucuagagccuacaga

SEQ ID NO: 276948 - RNA, 19 nt, Artificial Sequence
  Description of Artificial Sequence: Synthetic oligonucleotide
auucaaacucaauccauag

SEQ ID NO: 276949 - RNA, 19 nt, Artificial Sequence
  Description of Artificial Sequence: Synthetic oligonucleotide
caaagguuucguauggagg

SEQ ID NO: 276950 - RNA, 19 nt, Artificial Sequence
  Description of Artificial Sequence: Synthetic oligonucleotide
uucuuagaaaacccuagac

SEQ ID NO: 276951 - RNA, 19 nt, Artificial Sequence
  Description of Artificial Sequence: Synthetic oligonucleotide
uugggauugaucugaagug

SEQ ID NO: 276952 - RNA, 19 nt, Artificial Sequence
  Description of Artificial Sequence: Synthetic oligonucleotide
uguccuaacacuacggcuc

SEQ ID NO: 276953 - RNA, 19 nt, Artificial Sequence
  Description of Artificial Sequence: Synthetic oligonucleotide
agugguccaauguauauca

SEQ ID NO: 276954 - RNA, 19 nt, Artificial Sequence
  Description of Artificial Sequence: Synthetic oligonucleotide
uaaaagugguccaauguau

SEQ ID NO: 276955 - RNA, 19 nt, Artificial Sequence
  Description of Artificial Sequence: Synthetic oligonucleotide
cuaagauccacuucaaaga

SEQ ID NO: 276956 - RNA, 19 nt, Artificial Sequence
  Description of Artificial Sequence: Synthetic oligonucleotide
auuacucgauagcaugugg

SEQ ID NO: 276957 - RNA, 19 nt, Artificial Sequence
  Description of Artificial Sequence: Synthetic oligonucleotide
uaagguacaaaguggaguu

SEQ ID NO: 276958 - RNA, 19 nt, Artificial Sequence
  Description of Artificial Sequence: Synthetic oligonucleotide
uucaaucuagagccuacag

SEQ ID NO: 276959 - RNA, 19 nt, Artificial Sequence
  Description of Artificial Sequence: Synthetic oligonucleotide
ugacuaagucaauauauuc

SEQ ID NO: 276960 - RNA, 19 nt, Artificial Sequence
  Description of Artificial Sequence: Synthetic oligonucleotide
uauaccuguaucgugauua

SEQ ID NO: 276961 - RNA, 19 nt, Artificial Sequence
  Description of Artificial Sequence: Synthetic oligonucleotide
auucguuaccauuauuuca

SEQ ID NO: 276962 - RNA, 19 nt, Artificial Sequence
  Description of Artificial Sequence: Synthetic oligonucleotide
ucuuaccuaaguuagucua

SEQ ID NO: 276963 - RNA, 19 nt, Artificial Sequence
  Description of Artificial Sequence: Synthetic oligonucleotide
ucgugauuaauuccauuca

SEQ ID NO: 276964 - RNA, 19 nt, Artificial Sequence
  Description of Artificial Sequence: Synthetic oligonucleotide
aauagagaacacauugggu

SEQ ID NO: 276965 - RNA, 19 nt, Artificial Sequence
  Description of Artificial Sequence: Synthetic oligonucleotide
aucuguuaaccacaggaga

SEQ ID NO: 276966 - RNA, 19 nt, Artificial Sequence
  Description of Artificial Sequence: Synthetic oligonucleotide
agagccuacagaguuacag

SEQ ID NO: 276967 - RNA, 19 nt, Artificial Sequence
  Description of Artificial Sequence: Synthetic oligonucleotide
aauuacucgauagcaugug

SEQ ID NO: 276968 - RNA, 19 nt, Artificial Sequence
  Description of Artificial Sequence: Synthetic oligonucleotide
uuucuuaccuaaguuaguc

SEQ ID NO: 276969 - RNA, 19 nt, Artificial Sequence
  Description of Artificial Sequence: Synthetic oligonucleotide
uguaaucaauguacacgcc

SEQ ID NO: 276970 - RNA, 19 nt, Artificial Sequence
  Description of Artificial Sequence: Synthetic oligonucleotide
caaagaguuguaguacucg

SEQ ID NO: 276971 - RNA, 19 nt, Artificial Sequence
  Description of Artificial Sequence: Synthetic oligonucleotide
auuuagugaauaauguggu

SEQ ID NO: 276972 - RNA, 19 nt, Artificial Sequence
  Description of Artificial Sequence: Synthetic oligonucleotide
uuucaauagaggguagaug

SEQ ID NO: 276973 - RNA, 19 nt, Artificial Sequence
  Description of Artificial Sequence: Synthetic oligonucleotide
gcaaaugcaaaagugcacg

SEQ ID NO: 276974 - RNA, 19 nt, Artificial Sequence
  Description of Artificial Sequence: Synthetic oligonucleotide
uuucguauggagguaaauc

SEQ ID NO: 276975 - RNA, 19 nt, Artificial Sequence
  Description of Artificial Sequence: Synthetic oligonucleotide
uuaacgucgacaucuccaa

SEQ ID NO: 276976 - RNA, 19 nt, Artificial Sequence
  Description of Artificial Sequence: Synthetic oligonucleotide
cccacuucggguuaaaggg

SEQ ID NO: 276977 - RNA, 19 nt, Artificial Sequence
  Description of Artificial Sequence: Synthetic oligonucleotide
ugguccaauguauaucaca

SEQ ID NO: 276978 - RNA, 19 nt, Artificial Sequence
  Description of Artificial Sequence: Synthetic oligonucleotide
aaaugcaaaagugcacgca

SEQ ID NO: 276979 - RNA, 19 nt, Artificial Sequence
  Description of Artificial Sequence: Synthetic oligonucleotide
aaguuagucuauauuucug

SEQ ID NO: 276980 - RNA, 19 nt, Artificial Sequence
  Description of Artificial Sequence: Synthetic oligonucleotide
auacuauaccuguaucgug

SEQ ID NO: 276981 - RNA, 19 nt, Artificial Sequence
  Description of Artificial Sequence: Synthetic oligonucleotide
auuucuacccaguuuuaaa

SEQ ID NO: 276982 - RNA, 19 nt, Artificial Sequence
  Description of Artificial Sequence: Synthetic oligonucleotide
aucgauuggaagaaguucu

SEQ ID NO: 276983 - RNA, 19 nt, Artificial Sequence
  Description of Artificial Sequence: Synthetic oligonucleotide
ucaaagaguuguaguacuc

SEQ ID NO: 276984 - RNA, 19 nt, Artificial Sequence
  Description of Artificial Sequence: Synthetic oligonucleotide
aucuagagccuacagaguu

SEQ ID NO: 276985 - RNA, 19 nt, Artificial Sequence
  Description of Artificial Sequence: Synthetic oligonucleotide
guugggauugaucugaagu

SEQ ID NO: 276986 - RNA, 19 nt, Artificial Sequence
  Description of Artificial Sequence: Synthetic oligonucleotide
uaccccauugcucuauugu

SEQ ID NO: 276987 - RNA, 19 nt, Artificial Sequence
  Description of Artificial Sequence: Synthetic oligonucleotide
acaucgggucuuuucacag

SEQ ID NO: 276988 - RNA, 19 nt, Artificial Sequence
  Description of Artificial Sequence: Synthetic oligonucleotide
ggguugaacauuucuuugg

SEQ ID NO: 276989 - RNA, 19 nt, Artificial Sequence
  Description of Artificial Sequence: Synthetic oligonucleotide
acuguaguaaccggauccg

SEQ ID NO: 276990 - RNA, 19 nt, Artificial Sequence
  Description of Artificial Sequence: Synthetic oligonucleotide
guacacgccaaccaguuga

SEQ ID NO: 276991 - RNA, 19 nt, Artificial Sequence
  Description of Artificial Sequence: Synthetic oligonucleotide
cuagccuuuaggacaucgg

SEQ ID NO: 276992 - RNA, 19 nt, Artificial Sequence
  Description of Artificial Sequence: Synthetic oligonucleotide
agagauuguuaauuguuuu

SEQ ID NO: 276993 - RNA, 19 nt, Artificial Sequence
  Description of Artificial Sequence: Synthetic oligonucleotide
uucuuaccuaaguuagucu

SEQ ID NO: 276994 - RNA, 19 nt, Artificial Sequence
  Description of Artificial Sequence: Synthetic oligonucleotide
ucguauggagguaaaucaa

SEQ ID NO: 276995 - RNA, 19 nt, Artificial Sequence
  Description of Artificial Sequence: Synthetic oligonucleotide
gucauuaacgucgacaucu

SEQ ID NO: 276996 - RNA, 19 nt, Artificial Sequence
  Description of Artificial Sequence: Synthetic oligonucleotide
aucuggcgagaccaugagc

SEQ ID NO: 276997 - RNA, 19 nt, Artificial Sequence
  Description of Artificial Sequence: Synthetic oligonucleotide
gugugugugugugugagag

SEQ ID NO: 276998 - RNA, 19 nt, Artificial Sequence
  Description of Artificial Sequence: Synthetic oligonucleotide
aacauuucuuuggacagua

SEQ ID NO: 276999 - RNA, 19 nt, Artificial Sequence
  Description of Artificial Sequence: Synthetic oligonucleotide
uucuacccaguuuuaaaau

SEQ ID NO: 277000 - RNA, 19 nt, Artificial Sequence
  Description of Artificial Sequence: Synthetic oligonucleotide
guagcugagcaaccuaggc

SEQ ID NO: 277001 - RNA, 19 nt, Artificial Sequence
  Description of Artificial Sequence: Synthetic oligonucleotide
agcuagguuucuuuaauuu

SEQ ID NO: 277002 - RNA, 19 nt, Artificial Sequence
  Description of Artificial Sequence: Synthetic oligonucleotide
uaacacuacggcucuuucu

SEQ ID NO: 277003 - RNA, 19 nt, Artificial Sequence
  Description of Artificial Sequence: Synthetic oligonucleotide
uuuagugaauaaugugguu

SEQ ID NO: 277004 - RNA, 19 nt, Artificial Sequence
  Description of Artificial Sequence: Synthetic oligonucleotide
aaaucgauuggaagaaguu

SEQ ID NO: 277005 - RNA, 19 nt, Artificial Sequence
  Description of Artificial Sequence: Synthetic oligonucleotide
ugugugugugugugagagg

SEQ ID NO: 277006 - RNA, 19 nt, Artificial Sequence
  Description of Artificial Sequence: Synthetic oligonucleotide
uacacgccaaccaguugag

SEQ ID NO: 277007 - RNA, 19 nt, Artificial Sequence
  Description of Artificial Sequence: Synthetic oligonucleotide
aagaguuguaguacucgcu

SEQ ID NO: 277008 - RNA, 19 nt, Artificial Sequence
  Description of Artificial Sequence: Synthetic oligonucleotide
uguuaaccacaggagaaaa

SEQ ID NO: 277009 - RNA, 19 nt, Artificial Sequence
  Description of Artificial Sequence: Synthetic oligonucleotide
guagaagucaguucucucu

SEQ ID NO: 277010 - RNA, 19 nt, Artificial Sequence
  Description of Artificial Sequence: Synthetic oligonucleotide
gaagaaccauucccuggcc

SEQ ID NO: 277011 - RNA, 19 nt, Artificial Sequence
  Description of Artificial Sequence: Synthetic oligonucleotide
ucauuaacgucgacaucuc

SEQ ID NO: 277012 - RNA, 19 nt, Artificial Sequence
  Description of Artificial Sequence: Synthetic oligonucleotide
uguacacgccaaccaguug

SEQ ID NO: 277013 - RNA, 19 nt, Artificial Sequence
  Description of Artificial Sequence: Synthetic oligonucleotide
cauuaacgucgacaucucc

SEQ ID NO: 277014 - RNA, 19 nt, Artificial Sequence
  Description of Artificial Sequence: Synthetic oligonucleotide
uaucagcuagguuucuuua

SEQ ID NO: 277015 - RNA, 19 nt, Artificial Sequence
  Description of Artificial Sequence: Synthetic oligonucleotide
ucgauagcauguggaaaag

SEQ ID NO: 277016 - RNA, 19 nt, Artificial Sequence
  Description of Artificial Sequence: Synthetic oligonucleotide
guaguuguccguggcagag

SEQ ID NO: 277017 - RNA, 19 nt, Artificial Sequence
  Description of Artificial Sequence: Synthetic oligonucleotide
gacgcccuuagauuccuac

SEQ ID NO: 277018 - RNA, 19 nt, Artificial Sequence
  Description of Artificial Sequence: Synthetic oligonucleotide
uaacgucgacaucuccaag

SEQ ID NO: 277019 - RNA, 19 nt, Artificial Sequence
  Description of Artificial Sequence: Synthetic oligonucleotide
uaggacaucgggucuuuuc

SEQ ID NO: 277020 - RNA, 19 nt, Artificial Sequence
  Description of Artificial Sequence: Synthetic oligonucleotide
cuguaaaucccuccaagaa

SEQ ID NO: 277021 - RNA, 19 nt, Artificial Sequence
  Description of Artificial Sequence: Synthetic oligonucleotide
ugcagcgggccuuaaucca

SEQ ID NO: 277022 - RNA, 19 nt, Artificial Sequence
  Description of Artificial Sequence: Synthetic oligonucleotide
ccuguaucgugauuaauuc

SEQ ID NO: 277023 - RNA, 19 nt, Artificial Sequence
  Description of Artificial Sequence: Synthetic oligonucleotide
auggucggaugaagaaucc

SEQ ID NO: 277024 - RNA, 19 nt, Artificial Sequence
  Description of Artificial Sequence: Synthetic oligonucleotide
acagacgcccuuagauucc

SEQ ID NO: 277025 - RNA, 19 nt, Artificial Sequence
  Description of Artificial Sequence: Synthetic oligonucleotide
cauguugcuucaaacacgu

SEQ ID NO: 277026 - RNA, 19 nt, Artificial Sequence
  Description of Artificial Sequence: Synthetic oligonucleotide
cauuaaggcuuauauaaau

SEQ ID NO: 277027 - RNA, 19 nt, Artificial Sequence
  Description of Artificial Sequence: Synthetic oligonucleotide
gugugugugugugugugag

SEQ ID NO: 277028 - RNA, 19 nt, Artificial Sequence
  Description of Artificial Sequence: Synthetic oligonucleotide
uguguguguguguguguga

SEQ ID NO: 277029 - RNA, 19 nt, Artificial Sequence
  Description of Artificial Sequence: Synthetic oligonucleotide
agacccauugggcuuuaga

SEQ ID NO: 277030 - RNA, 19 nt, Artificial Sequence
  Description of Artificial Sequence: Synthetic oligonucleotide
accuguaucgugauuaauu

SEQ ID NO: 277031 - RNA, 19 nt, Artificial Sequence
  Description of Artificial Sequence: Synthetic oligonucleotide
cccaacaucuguuaaccac

SEQ ID NO: 277032 - RNA, 19 nt, Artificial Sequence
  Description of Artificial Sequence: Synthetic oligonucleotide
caaaucgauuggaagaagu

SEQ ID NO: 277033 - RNA, 19 nt, Artificial Sequence
  Description of Artificial Sequence: Synthetic oligonucleotide
auaggacaaaugaucuuca

SEQ ID NO: 277034 - RNA, 19 nt, Artificial Sequence
  Description of Artificial Sequence: Synthetic oligonucleotide
ucguuaccauuauuucaga

SEQ ID NO: 277035 - RNA, 19 nt, Artificial Sequence
  Description of Artificial Sequence: Synthetic oligonucleotide
uaucgugauuaauuccauu

SEQ ID NO: 277036 - RNA, 19 nt, Artificial Sequence
  Description of Artificial Sequence: Synthetic oligonucleotide
aguucuuagaacagauuuu

SEQ ID NO: 277037 - RNA, 19 nt, Artificial Sequence
  Description of Artificial Sequence: Synthetic oligonucleotide
guugcuucaaacacgugcu

SEQ ID NO: 277038 - RNA, 19 nt, Artificial Sequence
  Description of Artificial Sequence: Synthetic oligonucleotide
ugugugugugugugugugu

SEQ ID NO: 277039 - RNA, 19 nt, Artificial Sequence
  Description of Artificial Sequence: Synthetic oligonucleotide
gauugaucugaagugugua

SEQ ID NO: 277040 - RNA, 19 nt, Artificial Sequence
  Description of Artificial Sequence: Synthetic oligonucleotide
cacgccaaccaguugagaa

SEQ ID NO: 277041 - RNA, 19 nt, Artificial Sequence
  Description of Artificial Sequence: Synthetic oligonucleotide
ugugugugugugugugaga

SEQ ID NO: 277042 - RNA, 19 nt, Artificial Sequence
  Description of Artificial Sequence: Synthetic oligonucleotide
ggaauaucagcuagguuuc

SEQ ID NO: 277043 - RNA, 19 nt, Artificial Sequence
  Description of Artificial Sequence: Synthetic oligonucleotide
cacuacggcucuuucucug

SEQ ID NO: 277044 - RNA, 19 nt, Artificial Sequence
  Description of Artificial Sequence: Synthetic oligonucleotide
cuaagguacaaaguggagu

SEQ ID NO: 277045 - RNA, 19 nt, Artificial Sequence
  Description of Artificial Sequence: Synthetic oligonucleotide
uugcaacccacuucggguu

SEQ ID NO: 277046 - RNA, 19 nt, Artificial Sequence
  Description of Artificial Sequence: Synthetic oligonucleotide
auaccuguaucgugauuaa

SEQ ID NO: 277047 - RNA, 19 nt, Artificial Sequence
  Description of Artificial Sequence: Synthetic oligonucleotide
aggaccauuggaaccauaa

SEQ ID NO: 277048 - RNA, 19 nt, Artificial Sequence
  Description of Artificial Sequence: Synthetic oligonucleotide
gugugugugugugugugug

SEQ ID NO: 277049 - RNA, 19 nt, Artificial Sequence
  Description of Artificial Sequence: Synthetic oligonucleotide
aacccacuucggguuaaag

SEQ ID NO: 277050 - RNA, 19 nt, Artificial Sequence
  Description of Artificial Sequence: Synthetic oligonucleotide
acgccaaccaguugagaau

SEQ ID NO: 277051 - RNA, 19 nt, Artificial Sequence
  Description of Artificial Sequence: Synthetic oligonucleotide
cagucauuaacgucgacau

SEQ ID NO: 277052 - RNA, 19 nt, Artificial Sequence
  Description of Artificial Sequence: Synthetic oligonucleotide
auagaggguagaugcugaa

SEQ ID NO: 277053 - RNA, 19 nt, Artificial Sequence
  Description of Artificial Sequence: Synthetic oligonucleotide
cguauggagguaaaucaag

SEQ ID NO: 277054 - RNA, 19 nt, Artificial Sequence
  Description of Artificial Sequence: Synthetic oligonucleotide
guucccuggcggaacuugg

SEQ ID NO: 277055 - RNA, 19 nt, Artificial Sequence
  Description of Artificial Sequence: Synthetic oligonucleotide
aauccauagucuagccuuu

SEQ ID NO: 277056 - RNA, 19 nt, Artificial Sequence
  Description of Artificial Sequence: Synthetic oligonucleotide
acgcccuuagauuccuaca

SEQ ID NO: 277057 - RNA, 19 nt, Artificial Sequence
  Description of Artificial Sequence: Synthetic oligonucleotide
ugugugugugugagagguc

SEQ ID NO: 277058 - RNA, 19 nt, Artificial Sequence
  Description of Artificial Sequence: Synthetic oligonucleotide
cuguaguaaccggauccgc

SEQ ID NO: 277059 - RNA, 19 nt, Artificial Sequence
  Description of Artificial Sequence: Synthetic oligonucleotide
acucgauagcauguggaaa

SEQ ID NO: 277060 - RNA, 19 nt, Artificial Sequence
  Description of Artificial Sequence: Synthetic oligonucleotide
ugguucaaucuagagccua

SEQ ID NO: 277061 - RNA, 19 nt, Artificial Sequence
  Description of Artificial Sequence: Synthetic oligonucleotide
guaguacucgcuguccaca

SEQ ID NO: 277062 - RNA, 19 nt, Artificial Sequence
  Description of Artificial Sequence: Synthetic oligonucleotide
gugugugugugugagaggu

SEQ ID NO: 277063 - RNA, 19 nt, Artificial Sequence
  Description of Artificial Sequence: Synthetic oligonucleotide
cuaccccauugcucuauug

SEQ ID NO: 277064 - RNA, 19 nt, Artificial Sequence
  Description of Artificial Sequence: Synthetic oligonucleotide
ggugagaugcaagaauaga

SEQ ID NO: 277065 - RNA, 19 nt, Artificial Sequence
  Description of Artificial Sequence: Synthetic oligonucleotide
accggcucugcaaaagucu

SEQ ID NO: 277066 - RNA, 19 nt, Artificial Sequence
  Description of Artificial Sequence: Synthetic oligonucleotide
uggcgagaccaugagcaac

SEQ ID NO: 277067 - RNA, 19 nt, Artificial Sequence
  Description of Artificial Sequence: Synthetic oligonucleotide
agaugcacaagugguuaaa

SEQ ID NO: 277068 - RNA, 19 nt, Artificial Sequence
  Description of Artificial Sequence: Synthetic oligonucleotide
ggcaaaugcaaaagugcac

SEQ ID NO: 277069 - RNA, 19 nt, Artificial Sequence
  Description of Artificial Sequence: Synthetic oligonucleotide
uucucccgcaaaucuucaa

SEQ ID NO: 277070 - RNA, 19 nt, Artificial Sequence
  Description of Artificial Sequence: Synthetic oligonucleotide
ugcaacccacuucggguua

SEQ ID NO: 277071 - RNA, 19 nt, Artificial Sequence
  Description of Artificial Sequence: Synthetic oligonucleotide
guucaaucuagagccuaca

SEQ ID NO: 277072 - RNA, 19 nt, Artificial Sequence
  Description of Artificial Sequence: Synthetic oligonucleotide
gaauggucggaugaagaau

SEQ ID NO: 277073 - RNA, 19 nt, Artificial Sequence
  Description of Artificial Sequence: Synthetic oligonucleotide
cuuaccuaaguuagucuau

SEQ ID NO: 277074 - RNA, 19 nt, Artificial Sequence
  Description of Artificial Sequence: Synthetic oligonucleotide
agguuucguauggagguaa

SEQ ID NO: 277075 - RNA, 19 nt, Artificial Sequence
  Description of Artificial Sequence: Synthetic oligonucleotide
cuuuucaggacuaccccau

SEQ ID NO: 277076 - RNA, 19 nt, Artificial Sequence
  Description of Artificial Sequence: Synthetic oligonucleotide
ccacuucggguuaaagggc

SEQ ID NO: 277077 - RNA, 19 nt, Artificial Sequence
  Description of Artificial Sequence: Synthetic oligonucleotide
uuuaggacaucgggucuuu

SEQ ID NO: 277078 - RNA, 19 nt, Artificial Sequence
  Description of Artificial Sequence: Synthetic oligonucleotide
gguucaaucuagagccuac

SEQ ID NO: 277079 - RNA, 19 nt, Artificial Sequence
  Description of Artificial Sequence: Synthetic oligonucleotide
cuguuaaccacaggagaaa

SEQ ID NO: 277080 - RNA, 19 nt, Artificial Sequence
  Description of Artificial Sequence: Synthetic oligonucleotide
caaccaguugagaauuggu

SEQ ID NO: 277081 - RNA, 19 nt, Artificial Sequence
  Description of Artificial Sequence: Synthetic oligonucleotide
guaguaaccggauccgcuu

SEQ ID NO: 277082 - RNA, 19 nt, Artificial Sequence
  Description of Artificial Sequence: Synthetic oligonucleotide
gguccaauguauaucacau

SEQ ID NO: 277083 - RNA, 19 nt, Artificial Sequence
  Description of Artificial Sequence: Synthetic oligonucleotide
aacacgugcuugggagggu

SEQ ID NO: 277084 - RNA, 19 nt, Artificial Sequence
  Description of Artificial Sequence: Synthetic oligonucleotide
cguuaccauuauuucagac

SEQ ID NO: 277085 - RNA, 19 nt, Artificial Sequence
  Description of Artificial Sequence: Synthetic oligonucleotide
gaugcacaagugguuaaau

SEQ ID NO: 277086 - RNA, 19 nt, Artificial Sequence
  Description of Artificial Sequence: Synthetic oligonucleotide
caucgggucuuuucacaga

SEQ ID NO: 277087 - RNA, 19 nt, Artificial Sequence
  Description of Artificial Sequence: Synthetic oligonucleotide
uaccuguaucgugauuaau

SEQ ID NO: 277088 - RNA, 19 nt, Artificial Sequence
  Description of Artificial Sequence: Synthetic oligonucleotide
cccaugaaacacugccaag

SEQ ID NO: 277089 - RNA, 19 nt, Artificial Sequence
  Description of Artificial Sequence: Synthetic oligonucleotide
ggcgagaccaugagcaaca

SEQ ID NO: 277090 - RNA, 19 nt, Artificial Sequence
  Description of Artificial Sequence: Synthetic oligonucleotide
guccguggcagaguacuca

SEQ ID NO: 277091 - RNA, 19 nt, Artificial Sequence
  Description of Artificial Sequence: Synthetic oligonucleotide
ccuccgauaggacucuuca

SEQ ID NO: 277092 - RNA, 19 nt, Artificial Sequence
  Description of Artificial Sequence: Synthetic oligonucleotide
guccuaacacuacggcucu

SEQ ID NO: 277093 - RNA, 19 nt, Artificial Sequence
  Description of Artificial Sequence: Synthetic oligonucleotide
caacagacgcccuuagauu

SEQ ID NO: 277094 - RNA, 19 nt, Artificial Sequence
  Description of Artificial Sequence: Synthetic oligonucleotide
gcuuuagauccacuuggua

SEQ ID NO: 277095 - RNA, 19 nt, Artificial Sequence
  Description of Artificial Sequence: Synthetic oligonucleotide
cacaagugguuaaauuauu

SEQ ID NO: 277096 - RNA, 19 nt, Artificial Sequence
  Description of Artificial Sequence: Synthetic oligonucleotide
gaguugggauugaucugaa

SEQ ID NO: 277097 - RNA, 19 nt, Artificial Sequence
  Description of Artificial Sequence: Synthetic oligonucleotide
guuguccguggcagaguac

SEQ ID NO: 277098 - RNA, 19 nt, Artificial Sequence
  Description of Artificial Sequence: Synthetic oligonucleotide
ggccuuaauccaccccuuc

SEQ ID NO: 277099 - RNA, 19 nt, Artificial Sequence
  Description of Artificial Sequence: Synthetic oligonucleotide
cuggcgagaccaugagcaa

SEQ ID NO: 277100 - RNA, 19 nt, Artificial Sequence
  Description of Artificial Sequence: Synthetic oligonucleotide
ggcggaacuugggugcggc

SEQ ID NO: 277101 - RNA, 19 nt, Artificial Sequence
  Description of Artificial Sequence: Synthetic oligonucleotide
guccaauguauaucacauu

SEQ ID NO: 277102 - RNA, 19 nt, Artificial Sequence
  Description of Artificial Sequence: Synthetic oligonucleotide
cugcguucccuggcggaac

SEQ ID NO: 277103 - RNA, 19 nt, Artificial Sequence
  Description of Artificial Sequence: Synthetic oligonucleotide
acacgccaaccaguugaga

SEQ ID NO: 277104 - RNA, 19 nt, Artificial Sequence
  Description of Artificial Sequence: Synthetic oligonucleotide
gcagcgggccuuaauccac

SEQ ID NO: 277105 - RNA, 19 nt, Artificial Sequence
  Description of Artificial Sequence: Synthetic oligonucleotide
gggcugcguucccuggcgg

SEQ ID NO: 277106 - RNA, 19 nt, Artificial Sequence
  Description of Artificial Sequence: Synthetic oligonucleotide
caugagcaacaggucaugu

SEQ ID NO: 277107 - RNA, 19 nt, Artificial Sequence
  Description of Artificial Sequence: Synthetic oligonucleotide
gggugcggccuggacaagc

SEQ ID NO: 277108 - RNA, 19 nt, Artificial Sequence
  Description of Artificial Sequence: Synthetic oligonucleotide
gcgggccuuaauccacccc

SEQ ID NO: 277109 - RNA, 19 nt, Artificial Sequence
  Description of Artificial Sequence: Synthetic oligonucleotide
gguuucguauggagguaaa

SEQ ID NO: 277110 - RNA, 19 nt, Artificial Sequence
  Description of Artificial Sequence: Synthetic oligonucleotide
ggcugcguucccuggcgga

SEQ ID NO: 277111 - RNA, 19 nt, Artificial Sequence
  Description of Artificial Sequence: Synthetic oligonucleotide
ugggugcggccuggacaag

SEQ ID NO: 277112 - RNA, 19 nt, Artificial Sequence
  Description of Artificial Sequence: Synthetic oligonucleotide
uccuaacacuacggcucuu

SEQ ID NO: 277113 - RNA, 19 nt, Artificial Sequence
  Description of Artificial Sequence: Synthetic oligonucleotide
cccauaguccaagccuuuc

SEQ ID NO: 277114 - RNA, 19 nt, Artificial Sequence
  Description of Artificial Sequence: Synthetic oligonucleotide
ccgcaaaucuucaaagguu

SEQ ID NO: 277115 - RNA, 19 nt, Artificial Sequence
  Description of Artificial Sequence: Synthetic oligonucleotide
gugguucaaucuagagccu

SEQ ID NO: 277116 - RNA, 19 nt, Artificial Sequence
  Description of Artificial Sequence: Synthetic oligonucleotide
cuauaccuguaucgugauu

SEQ ID NO: 277117 - RNA, 19 nt, Artificial Sequence
  Description of Artificial Sequence: Synthetic oligonucleotide
gcugcguucccuggcggaa

SEQ ID NO: 277118 - RNA, 19 nt, Artificial Sequence
  Description of Artificial Sequence: Synthetic oligonucleotide
cgggccuuaauccaccccu

SEQ ID NO: 277119 - RNA, 19 nt, Artificial Sequence
  Description of Artificial Sequence: Synthetic oligonucleotide
cagacgcccuuagauuccu

SEQ ID NO: 277120 - RNA, 19 nt, Artificial Sequence
  Description of Artificial Sequence: Synthetic oligonucleotide
gcaacccacuucggguuaa

SEQ ID NO: 277121 - RNA, 19 nt, Artificial Sequence
  Description of Artificial Sequence: Synthetic oligonucleotide
agacgcccuuagauuccua

SEQ ID NO: 277122 - RNA, 19 nt, Artificial Sequence
  Description of Artificial Sequence: Synthetic oligonucleotide
ccauuauuucagacccauu

SEQ ID NO: 277123 - RNA, 19 nt, Artificial Sequence
  Description of Artificial Sequence: Synthetic oligonucleotide
gggccuuaauccaccccuu

SEQ ID NO: 277124 - RNA, 19 nt, Artificial Sequence
  Description of Artificial Sequence: Synthetic oligonucleotide
cccgaugcagcgggccuua

SEQ ID NO: 277125 - RNA, 19 nt, Artificial Sequence
  Description of Artificial Sequence: Synthetic oligonucleotide
caaguuccguggggucauu

SEQ ID NO: 277126 - RNA, 19 nt, Artificial Sequence
  Description of Artificial Sequence: Synthetic oligonucleotide
gcguucccuggcggaacuu

SEQ ID NO: 277127 - RNA, 19 nt, Artificial Sequence
  Description of Artificial Sequence: Synthetic oligonucleotide
ccccgaugcagcgggccuu

SEQ ID NO: 277128 - RNA, 19 nt, Artificial Sequence
  Description of Artificial Sequence: Synthetic oligonucleotide
agugcugacaaauagaagg

SEQ ID NO: 277129 - RNA, 19 nt, Artificial Sequence
  Description of Artificial Sequence: Synthetic oligonucleotide
ugaacaauaaguuuccggg

SEQ ID NO: 277130 - RNA, 19 nt, Artificial Sequence
  Description of Artificial Sequence: Synthetic oligonucleotide
aaauagaaggguuagcauc

SEQ ID NO: 277131 - RNA, 19 nt, Artificial Sequence
  Description of Artificial Sequence: Synthetic oligonucleotide
agaaauaggugguaacucc

SEQ ID NO: 277132 - RNA, 19 nt, Artificial Sequence
  Description of Artificial Sequence: Synthetic oligonucleotide
aaguaauacacgaagagca

SEQ ID NO: 277133 - RNA, 19 nt, Artificial Sequence
  Description of Artificial Sequence: Synthetic oligonucleotide
aaggguuagcaucaccacc

SEQ ID NO: 277134 - RNA, 19 nt, Artificial Sequence
  Description of Artificial Sequence: Synthetic oligonucleotide
aacuuauccuucucaaagg

SEQ ID NO: 277135 - RNA, 19 nt, Artificial Sequence
  Description of Artificial Sequence: Synthetic oligonucleotide
uugcauaccccucauacag

SEQ ID NO: 277136 - RNA, 19 nt, Artificial Sequence
  Description of Artificial Sequence: Synthetic oligonucleotide
aaaucgagccugcaugugg

SEQ ID NO: 277137 - RNA, 19 nt, Artificial Sequence
  Description of Artificial Sequence: Synthetic oligonucleotide
aacucauagcucuucaucu

SEQ ID NO: 277138 - RNA, 19 nt, Artificial Sequence
  Description of Artificial Sequence: Synthetic oligonucleotide
auaccccucauacagggcc

SEQ ID NO: 277139 - RNA, 19 nt, Artificial Sequence
  Description of Artificial Sequence: Synthetic oligonucleotide
agagcauuggauuugguga

SEQ ID NO: 277140 - RNA, 19 nt, Artificial Sequence
  Description of Artificial Sequence: Synthetic oligonucleotide
uguaacucucuacaauagg

SEQ ID NO: 277141 - RNA, 19 nt, Artificial Sequence
  Description of Artificial Sequence: Synthetic oligonucleotide
cucaggaucacaaaucgag

SEQ ID NO: 277142 - RNA, 19 nt, Artificial Sequence
  Description of Artificial Sequence: Synthetic oligonucleotide
aaaggacuuauaguugccc

SEQ ID NO: 277143 - RNA, 19 nt, Artificial Sequence
  Description of Artificial Sequence: Synthetic oligonucleotide
auaccaagcagcccuagac

SEQ ID NO: 277144 - RNA, 19 nt, Artificial Sequence
  Description of Artificial Sequence: Synthetic oligonucleotide
ugagaguccagaaaguccu

SEQ ID NO: 277145 - RNA, 19 nt, Artificial Sequence
  Description of Artificial Sequence: Synthetic oligonucleotide
uccugaauccagaagcggg

SEQ ID NO: 277146 - RNA, 19 nt, Artificial Sequence
  Description of Artificial Sequence: Synthetic oligonucleotide
aucagugacgguugcauac

SEQ ID NO: 277147 - RNA, 19 nt, Artificial Sequence
  Description of Artificial Sequence: Synthetic oligonucleotide
acugaccggaucuugcugc

SEQ ID NO: 277148 - RNA, 19 nt, Artificial Sequence
  Description of Artificial Sequence: Synthetic oligonucleotide
auaggugguaacucccucc

SEQ ID NO: 277149 - RNA, 19 nt, Artificial Sequence
  Description of Artificial Sequence: Synthetic oligonucleotide
guuguaugcacugagauuc

SEQ ID NO: 277150 - RNA, 19 nt, Artificial Sequence
  Description of Artificial Sequence: Synthetic oligonucleotide
aauagaaggguuagcauca

SEQ ID NO: 277151 - RNA, 19 nt, Artificial Sequence
  Description of Artificial Sequence: Synthetic oligonucleotide
aauuugcuaucccacgucu

SEQ ID NO: 277152 - RNA, 19 nt, Artificial Sequence
  Description of Artificial Sequence: Synthetic oligonucleotide
cugaacaauaaguuuccgg

SEQ ID NO: 277153 - RNA, 19 nt, Artificial Sequence
  Description of Artificial Sequence: Synthetic oligonucleotide
agagccguguguuguaugc

SEQ ID NO: 277154 - RNA, 19 nt, Artificial Sequence
  Description of Artificial Sequence: Synthetic oligonucleotide
guagauuacaucuucugca

SEQ ID NO: 277155 - RNA, 19 nt, Artificial Sequence
  Description of Artificial Sequence: Synthetic oligonucleotide
aauaaguuuccgggauucc

SEQ ID NO: 277156 - RNA, 19 nt, Artificial Sequence
  Description of Artificial Sequence: Synthetic oligonucleotide
uugggcacggaagagacgg

SEQ ID NO: 277157 - RNA, 19 nt, Artificial Sequence
  Description of Artificial Sequence: Synthetic oligonucleotide
agucgcaccucauaguggg

SEQ ID NO: 277158 - RNA, 19 nt, Artificial Sequence
  Description of Artificial Sequence: Synthetic oligonucleotide
cagguuaggaacaaacuug

SEQ ID NO: 277159 - RNA, 19 nt, Artificial Sequence
  Description of Artificial Sequence: Synthetic oligonucleotide
aaggugucgaagccuuggc

SEQ ID NO: 277160 - RNA, 19 nt, Artificial Sequence
  Description of Artificial Sequence: Synthetic oligonucleotide
aaccacauccccuguggac

SEQ ID NO: 277161 - RNA, 19 nt, Artificial Sequence
  Description of Artificial Sequence: Synthetic oligonucleotide
uacuucugagccuucgagg

SEQ ID NO: 277162 - RNA, 19 nt, Artificial Sequence
  Description of Artificial Sequence: Synthetic oligonucleotide
ugaauuugcuaucccacgu

SEQ ID NO: 277163 - RNA, 19 nt, Artificial Sequence
  Description of Artificial Sequence: Synthetic oligonucleotide
aacuggacuaggcagccug

SEQ ID NO: 277164 - RNA, 19 nt, Artificial Sequence
  Description of Artificial Sequence: Synthetic oligonucleotide
cauagugggacuuuccuuc

SEQ ID NO: 277165 - RNA, 19 nt, Artificial Sequence
  Description of Artificial Sequence: Synthetic oligonucleotide
accguaacgaguccuucgc

SEQ ID NO: 277166 - RNA, 19 nt, Artificial Sequence
  Description of Artificial Sequence: Synthetic oligonucleotide
aaggacuuauaguugccca

SEQ ID NO: 277167 - RNA, 19 nt, Artificial Sequence
  Description of Artificial Sequence: Synthetic oligonucleotide
acucuucguagcuggaggc

SEQ ID NO: 277168 - RNA, 19 nt, Artificial Sequence
  Description of Artificial Sequence: Synthetic oligonucleotide
uuggugagaacgcuuugag

SEQ ID NO: 277169 - RNA, 19 nt, Artificial Sequence
  Description of Artificial Sequence: Synthetic oligonucleotide
gagaacauaagcuccccac

SEQ ID NO: 277170 - RNA, 19 nt, Artificial Sequence
  Description of Artificial Sequence: Synthetic oligonucleotide
agccaguucacguagauua

SEQ ID NO: 277171 - RNA, 19 nt, Artificial Sequence
  Description of Artificial Sequence: Synthetic oligonucleotide
auguugucgaaguugguca

SEQ ID NO: 277172 - RNA, 19 nt, Artificial Sequence
  Description of Artificial Sequence: Synthetic oligonucleotide
ucaggaucacaaaucgagc

SEQ ID NO: 277173 - RNA, 19 nt, Artificial Sequence
  Description of Artificial Sequence: Synthetic oligonucleotide
aguaaaacccucaggauca

SEQ ID NO: 277174 - RNA, 19 nt, Artificial Sequence
  Description of Artificial Sequence: Synthetic oligonucleotide
aauacacgaagagcauugg

SEQ ID NO: 277175 - RNA, 19 nt, Artificial Sequence
  Description of Artificial Sequence: Synthetic oligonucleotide
gucacgguagcucucaaug

SEQ ID NO: 277176 - RNA, 19 nt, Artificial Sequence
  Description of Artificial Sequence: Synthetic oligonucleotide
ucauagcucuucaucuuag

SEQ ID NO: 277177 - RNA, 19 nt, Artificial Sequence
  Description of Artificial Sequence: Synthetic oligonucleotide
gaaauaggugguaacuccc

SEQ ID NO: 277178 - RNA, 19 nt, Artificial Sequence
  Description of Artificial Sequence: Synthetic oligonucleotide
gaagagacggcuaagcaga

SEQ ID NO: 277179 - RNA, 19 nt, Artificial Sequence
  Description of Artificial Sequence: Synthetic oligonucleotide
ucaccaaaggacuuauagu

SEQ ID NO: 277180 - RNA, 19 nt, Artificial Sequence
  Description of Artificial Sequence: Synthetic oligonucleotide
uguugggcugaacaauaag

SEQ ID NO: 277181 - RNA, 19 nt, Artificial Sequence
  Description of Artificial Sequence: Synthetic oligonucleotide
caacaguccagcccgaacc

SEQ ID NO: 277182 - RNA, 19 nt, Artificial Sequence
  Description of Artificial Sequence: Synthetic oligonucleotide
aaguugaacgcaccuuucu

SEQ ID NO: 277183 - RNA, 19 nt, Artificial Sequence
  Description of Artificial Sequence: Synthetic oligonucleotide
gaucggaugagaccagcag

SEQ ID NO: 277184 - RNA, 19 nt, Artificial Sequence
  Description of Artificial Sequence: Synthetic oligonucleotide
auacucuacaagcuguacu

SEQ ID NO: 277185 - RNA, 19 nt, Artificial Sequence
  Description of Artificial Sequence: Synthetic oligonucleotide
ugcugaauuugcuauccca

SEQ ID NO: 277186 - RNA, 19 nt, Artificial Sequence
  Description of Artificial Sequence: Synthetic oligonucleotide
agcaggaucuguguugagc

SEQ ID NO: 277187 - RNA, 19 nt, Artificial Sequence
  Description of Artificial Sequence: Synthetic oligonucleotide
aaucgagccugcauguggg

SEQ ID NO: 277188 - RNA, 19 nt, Artificial Sequence
  Description of Artificial Sequence: Synthetic oligonucleotide
aagaucggaugagaccagc

SEQ ID NO: 277189 - RNA, 19 nt, Artificial Sequence
  Description of Artificial Sequence: Synthetic oligonucleotide
agguuaggaacaaacuugg

SEQ ID NO: 277190 - RNA, 19 nt, Artificial Sequence
  Description of Artificial Sequence: Synthetic oligonucleotide
ggaaaacgcucacagaaag

SEQ ID NO: 277191 - RNA, 19 nt, Artificial Sequence
  Description of Artificial Sequence: Synthetic oligonucleotide
uccuaaugacacacaaucu

SEQ ID NO: 277192 - RNA, 19 nt, Artificial Sequence
  Description of Artificial Sequence: Synthetic oligonucleotide
auacgccuuggcuuucucc

SEQ ID NO: 277193 - RNA, 19 nt, Artificial Sequence
  Description of Artificial Sequence: Synthetic oligonucleotide
uuccuugcgcagcagaacu

SEQ ID NO: 277194 - RNA, 19 nt, Artificial Sequence
  Description of Artificial Sequence: Synthetic oligonucleotide
aacugcauugucccaugug

SEQ ID NO: 277195 - RNA, 19 nt, Artificial Sequence
  Description of Artificial Sequence: Synthetic oligonucleotide
uacgccuuggcuuucucca

SEQ ID NO: 277196 - RNA, 19 nt, Artificial Sequence
  Description of Artificial Sequence: Synthetic oligonucleotide
aaaguugaacgcaccuuuc

SEQ ID NO: 277197 - RNA, 19 nt, Artificial Sequence
  Description of Artificial Sequence: Synthetic oligonucleotide
gauggacacgggcaucugg

SEQ ID NO: 277198 - RNA, 19 nt, Artificial Sequence
  Description of Artificial Sequence: Synthetic oligonucleotide
uuagcaucaccacccucag

SEQ ID NO: 277199 - RNA, 19 nt, Artificial Sequence
  Description of Artificial Sequence: Synthetic oligonucleotide
cagagcauagauguagggg

SEQ ID NO: 277200 - RNA, 19 nt, Artificial Sequence
  Description of Artificial Sequence: Synthetic oligonucleotide
agagaucccuaacuucuuc

SEQ ID NO: 277201 - RNA, 19 nt, Artificial Sequence
  Description of Artificial Sequence: Synthetic oligonucleotide
uagauuacaucuucugcau

SEQ ID NO: 277202 - RNA, 19 nt, Artificial Sequence
  Description of Artificial Sequence: Synthetic oligonucleotide
acguagauuacaucuucug

SEQ ID NO: 277203 - RNA, 19 nt, Artificial Sequence
  Description of Artificial Sequence: Synthetic oligonucleotide
uggacuaggcagccugugg

SEQ ID NO: 277204 - RNA, 19 nt, Artificial Sequence
  Description of Artificial Sequence: Synthetic oligonucleotide
auaagcuccccacagguuu

SEQ ID NO: 277205 - RNA, 19 nt, Artificial Sequence
  Description of Artificial Sequence: Synthetic oligonucleotide
ggaagagacggcuaagcag

SEQ ID NO: 277206 - RNA, 19 nt, Artificial Sequence
  Description of Artificial Sequence: Synthetic oligonucleotide
uguugucgaaguuggucag

SEQ ID NO: 277207 - RNA, 19 nt, Artificial Sequence
  Description of Artificial Sequence: Synthetic oligonucleotide
aauucagagucuagagcag

SEQ ID NO: 277208 - RNA, 19 nt, Artificial Sequence
  Description of Artificial Sequence: Synthetic oligonucleotide
ucacguagauuacaucuuc

SEQ ID NO: 277209 - RNA, 19 nt, Artificial Sequence
  Description of Artificial Sequence: Synthetic oligonucleotide
uggaguguagaacuccaaa

SEQ ID NO: 277210 - RNA, 19 nt, Artificial Sequence
  Description of Artificial Sequence: Synthetic oligonucleotide
aguuuccgggauuccuugc

SEQ ID NO: 277211 - RNA, 19 nt, Artificial Sequence
  Description of Artificial Sequence: Synthetic oligonucleotide
uauaguugcccauguugga

SEQ ID NO: 277212 - RNA, 19 nt, Artificial Sequence
  Description of Artificial Sequence: Synthetic oligonucleotide
ugaggccucauacucuaca

SEQ ID NO: 277213 - RNA, 19 nt, Artificial Sequence
  Description of Artificial Sequence: Synthetic oligonucleotide
cuccucgggagccaaaggg

SEQ ID NO: 277214 - RNA, 19 nt, Artificial Sequence
  Description of Artificial Sequence: Synthetic oligonucleotide
gguugcauaccccucauac

SEQ ID NO: 277215 - RNA, 19 nt, Artificial Sequence
  Description of Artificial Sequence: Synthetic oligonucleotide
ucaggggugaggaacuuau

SEQ ID NO: 277216 - RNA, 19 nt, Artificial Sequence
  Description of Artificial Sequence: Synthetic oligonucleotide
uaucccacgucucuccacu

SEQ ID NO: 277217 - RNA, 19 nt, Artificial Sequence
  Description of Artificial Sequence: Synthetic oligonucleotide
aggaucacaaaucgagccu

SEQ ID NO: 277218 - RNA, 19 nt, Artificial Sequence
  Description of Artificial Sequence: Synthetic oligonucleotide
ucuccguaggaaccgcucc

SEQ ID NO: 277219 - RNA, 19 nt, Artificial Sequence
  Description of Artificial Sequence: Synthetic oligonucleotide
ucugucucaggucaucgua

SEQ ID NO: 277220 - RNA, 19 nt, Artificial Sequence
  Description of Artificial Sequence: Synthetic oligonucleotide
guugaacgcaccuuucuca

SEQ ID NO: 277221 - RNA, 19 nt, Artificial Sequence
  Description of Artificial Sequence: Synthetic oligonucleotide
guaacgaguccuucgccag

SEQ ID NO: 277222 - RNA, 19 nt, Artificial Sequence
  Description of Artificial Sequence: Synthetic oligonucleotide
cauguuggaguagaccccg

SEQ ID NO: 277223 - RNA, 19 nt, Artificial Sequence
  Description of Artificial Sequence: Synthetic oligonucleotide
uguaaccccaccugcacau

SEQ ID NO: 277224 - RNA, 19 nt, Artificial Sequence
  Description of Artificial Sequence: Synthetic oligonucleotide
aggaucacacguuccaacu

SEQ ID NO: 277225 - RNA, 19 nt, Artificial Sequence
  Description of Artificial Sequence: Synthetic oligonucleotide
gaauuugcuaucccacguc

SEQ ID NO: 277226 - RNA, 19 nt, Artificial Sequence
  Description of Artificial Sequence: Synthetic oligonucleotide
gacacgggcaucugggcgc

SEQ ID NO: 277227 - RNA, 19 nt, Artificial Sequence
  Description of Artificial Sequence: Synthetic oligonucleotide
uuccagcggauauacaggu

SEQ ID NO: 277228 - RNA, 19 nt, Artificial Sequence
  Description of Artificial Sequence: Synthetic oligonucleotide
gaaggguuagcaucaccac

SEQ ID NO: 277229 - RNA, 19 nt, Artificial Sequence
  Description of Artificial Sequence: Synthetic oligonucleotide
gagaaauaggugguaacuc

SEQ ID NO: 277230 - RNA, 19 nt, Artificial Sequence
  Description of Artificial Sequence: Synthetic oligonucleotide
aaaccagaaagugcugaca

SEQ ID NO: 277231 - RNA, 19 nt, Artificial Sequence
  Description of Artificial Sequence: Synthetic oligonucleotide
agucaauucagagucuaga

SEQ ID NO: 277232 - RNA, 19 nt, Artificial Sequence
  Description of Artificial Sequence: Synthetic oligonucleotide
agaucccuaacuucuucug

SEQ ID NO: 277233 - RNA, 19 nt, Artificial Sequence
  Description of Artificial Sequence: Synthetic oligonucleotide
ugcauugucccauguggga

SEQ ID NO: 277234 - RNA, 19 nt, Artificial Sequence
  Description of Artificial Sequence: Synthetic oligonucleotide
uaggugguaacucccuccu

SEQ ID NO: 277235 - RNA, 19 nt, Artificial Sequence
  Description of Artificial Sequence: Synthetic oligonucleotide
agcccuagacaggugaugg

SEQ ID NO: 277236 - RNA, 19 nt, Artificial Sequence
  Description of Artificial Sequence: Synthetic oligonucleotide
aggcuagacacaccaaugu

SEQ ID NO: 277237 - RNA, 19 nt, Artificial Sequence
  Description of Artificial Sequence: Synthetic oligonucleotide
gaacgugaguuucucccgc

SEQ ID NO: 277238 - RNA, 19 nt, Artificial Sequence
  Description of Artificial Sequence: Synthetic oligonucleotide
aggaacuuauccuucucaa

SEQ ID NO: 277239 - RNA, 19 nt, Artificial Sequence
  Description of Artificial Sequence: Synthetic oligonucleotide
cagagaaauaggugguaac

SEQ ID NO: 277240 - RNA, 19 nt, Artificial Sequence
  Description of Artificial Sequence: Synthetic oligonucleotide
ugagccuucgaggcgagug

SEQ ID NO: 277241 - RNA, 19 nt, Artificial Sequence
  Description of Artificial Sequence: Synthetic oligonucleotide
aaauaggugguaacucccu

SEQ ID NO: 277242 - RNA, 19 nt, Artificial Sequence
  Description of Artificial Sequence: Synthetic oligonucleotide
uguuguaugcacugagauu

SEQ ID NO: 277243 - RNA, 19 nt, Artificial Sequence
  Description of Artificial Sequence: Synthetic oligonucleotide
uggugagaacgcuuugagc

SEQ ID NO: 277244 - RNA, 19 nt, Artificial Sequence
  Description of Artificial Sequence: Synthetic oligonucleotide
uagaaggguuagcaucacc

SEQ ID NO: 277245 - RNA, 19 nt, Artificial Sequence
  Description of Artificial Sequence: Synthetic oligonucleotide
uguugaugccggcagggau

SEQ ID NO: 277246 - RNA, 19 nt, Artificial Sequence
  Description of Artificial Sequence: Synthetic oligonucleotide
gcccgaaccauguugagcc

SEQ ID NO: 277247 - RNA, 19 nt, Artificial Sequence
  Description of Artificial Sequence: Synthetic oligonucleotide
cucguguaaccccaccugc

SEQ ID NO: 277248 - RNA, 19 nt, Artificial Sequence
  Description of Artificial Sequence: Synthetic oligonucleotide
gacaaauagaaggguuagc

SEQ ID NO: 277249 - RNA, 19 nt, Artificial Sequence
  Description of Artificial Sequence: Synthetic oligonucleotide
ugcgcagcagaacuguguc

SEQ ID NO: 277250 - RNA, 19 nt, Artificial Sequence
  Description of Artificial Sequence: Synthetic oligonucleotide
uaaccccaccugcacauca

SEQ ID NO: 277251 - RNA, 19 nt, Artificial Sequence
  Description of Artificial Sequence: Synthetic oligonucleotide
uccgguaccagcucugaau

SEQ ID NO: 277252 - RNA, 19 nt, Artificial Sequence
  Description of Artificial Sequence: Synthetic oligonucleotide
cuacaauagggccuuuguc

SEQ ID NO: 277253 - RNA, 19 nt, Artificial Sequence
  Description of Artificial Sequence: Synthetic oligonucleotide
acacaccaaugucauuggg

SEQ ID NO: 277254 - RNA, 19 nt, Artificial Sequence
  Description of Artificial Sequence: Synthetic oligonucleotide
auacacgaagagcauugga

SEQ ID NO: 277255 - RNA, 19 nt, Artificial Sequence
  Description of Artificial Sequence: Synthetic oligonucleotide
gcauaccccucauacaggg

SEQ ID NO: 277256 - RNA, 19 nt, Artificial Sequence
  Description of Artificial Sequence: Synthetic oligonucleotide
auguaacucucuacaauag

SEQ ID NO: 277257 - RNA, 19 nt, Artificial Sequence
  Description of Artificial Sequence: Synthetic oligonucleotide
gagcucccuccaaagaugg

SEQ ID NO: 277258 - RNA, 19 nt, Artificial Sequence
  Description of Artificial Sequence: Synthetic oligonucleotide
caagaacgugaguuucucc

SEQ ID NO: 277259 - RNA, 19 nt, Artificial Sequence
  Description of Artificial Sequence: Synthetic oligonucleotide
caggcggaaggccucacgg

SEQ ID NO: 277260 - RNA, 19 nt, Artificial Sequence
  Description of Artificial Sequence: Synthetic oligonucleotide
ucguguaaccccaccugca

SEQ ID NO: 277261 - RNA, 19 nt, Artificial Sequence
  Description of Artificial Sequence: Synthetic oligonucleotide
caggcuagacacaccaaug

SEQ ID NO: 277262 - RNA, 19 nt, Artificial Sequence
  Description of Artificial Sequence: Synthetic oligonucleotide
aggucaucguaguugggga

SEQ ID NO: 277263 - RNA, 19 nt, Artificial Sequence
  Description of Artificial Sequence: Synthetic oligonucleotide
gugagaacgcuuugagccc

SEQ ID NO: 277264 - RNA, 19 nt, Artificial Sequence
  Description of Artificial Sequence: Synthetic oligonucleotide
ugggcugaacaauaaguuu

SEQ ID NO: 277265 - RNA, 19 nt, Artificial Sequence
  Description of Artificial Sequence: Synthetic oligonucleotide
aagagccguguguuguaug

SEQ ID NO: 277266 - RNA, 19 nt, Artificial Sequence
  Description of Artificial Sequence: Synthetic oligonucleotide
uugaacgcaccuuucucau

SEQ ID NO: 277267 - RNA, 19 nt, Artificial Sequence
  Description of Artificial Sequence: Synthetic oligonucleotide
ccagcggauauacaggucc

SEQ ID NO: 277268 - RNA, 19 nt, Artificial Sequence
  Description of Artificial Sequence: Synthetic oligonucleotide
agcagcccuagacagguga

SEQ ID NO: 277269 - RNA, 19 nt, Artificial Sequence
  Description of Artificial Sequence: Synthetic oligonucleotide
uucucagaacugcauuguc

SEQ ID NO: 277270 - RNA, 19 nt, Artificial Sequence
  Description of Artificial Sequence: Synthetic oligonucleotide
gauuuagaccagucacuuc

SEQ ID NO: 277271 - RNA, 19 nt, Artificial Sequence
  Description of Artificial Sequence: Synthetic oligonucleotide
uccaaggugucgaagccuu

SEQ ID NO: 277272 - RNA, 19 nt, Artificial Sequence
  Description of Artificial Sequence: Synthetic oligonucleotide
aacgugaguuucucccgcu

SEQ ID NO: 277273 - RNA, 19 nt, Artificial Sequence
  Description of Artificial Sequence: Synthetic oligonucleotide
aacagcucguguaacccca

SEQ ID NO: 277274 - RNA, 19 nt, Artificial Sequence
  Description of Artificial Sequence: Synthetic oligonucleotide
ugugguuggagugaccgua

SEQ ID NO: 277275 - RNA, 19 nt, Artificial Sequence
  Description of Artificial Sequence: Synthetic oligonucleotide
gguuggagugaccguaacg

SEQ ID NO: 277276 - RNA, 19 nt, Artificial Sequence
  Description of Artificial Sequence: Synthetic oligonucleotide
caaggugucgaagccuugg

SEQ ID NO: 277277 - RNA, 19 nt, Artificial Sequence
  Description of Artificial Sequence: Synthetic oligonucleotide
ucagugacgguugcauacc

SEQ ID NO: 277278 - RNA, 19 nt, Artificial Sequence
  Description of Artificial Sequence: Synthetic oligonucleotide
acggccagcacauucccga

SEQ ID NO: 277279 - RNA, 19 nt, Artificial Sequence
  Description of Artificial Sequence: Synthetic oligonucleotide
aaacccucaggaucacaaa

SEQ ID NO: 277280 - RNA, 19 nt, Artificial Sequence
  Description of Artificial Sequence: Synthetic oligonucleotide
agauuuagaccagucacuu

SEQ ID NO: 277281 - RNA, 19 nt, Artificial Sequence
  Description of Artificial Sequence: Synthetic oligonucleotide
agcccgaaccauguugagc

SEQ ID NO: 277282 - RNA, 19 nt, Artificial Sequence
  Description of Artificial Sequence: Synthetic oligonucleotide
aaccgcuccaaagcagguc

SEQ ID NO: 277283 - RNA, 19 nt, Artificial Sequence
  Description of Artificial Sequence: Synthetic oligonucleotide
uugcgcagcagaacugugu

SEQ ID NO: 277284 - RNA, 19 nt, Artificial Sequence
  Description of Artificial Sequence: Synthetic oligonucleotide
aaagaucggaugagaccag

SEQ ID NO: 277285 - RNA, 19 nt, Artificial Sequence
  Description of Artificial Sequence: Synthetic oligonucleotide
gguaacucccuccuucccc

SEQ ID NO: 277286 - RNA, 19 nt, Artificial Sequence
  Description of Artificial Sequence: Synthetic oligonucleotide
guugaugccggcagggaug

SEQ ID NO: 277287 - RNA, 19 nt, Artificial Sequence
  Description of Artificial Sequence: Synthetic oligonucleotide
aucgagccugcaugugggc

SEQ ID NO: 277288 - RNA, 19 nt, Artificial Sequence
  Description of Artificial Sequence: Synthetic oligonucleotide
ugcaugugggccugucgcc

SEQ ID NO: 277289 - RNA, 19 nt, Artificial Sequence
  Description of Artificial Sequence: Synthetic oligonucleotide
gacgguugcauaccccuca

SEQ ID NO: 277290 - RNA, 19 nt, Artificial Sequence
  Description of Artificial Sequence: Synthetic oligonucleotide
uucccgagagacacauucu

SEQ ID NO: 277291 - RNA, 19 nt, Artificial Sequence
  Description of Artificial Sequence: Synthetic oligonucleotide
agcucguguaaccccaccu

SEQ ID NO: 277292 - RNA, 19 nt, Artificial Sequence
  Description of Artificial Sequence: Synthetic oligonucleotide
cagaacugugucccugagg

SEQ ID NO: 277293 - RNA, 19 nt, Artificial Sequence
  Description of Artificial Sequence: Synthetic oligonucleotide
guugcauaccccucauaca

SEQ ID NO: 277294 - RNA, 19 nt, Artificial Sequence
  Description of Artificial Sequence: Synthetic oligonucleotide
ucgguaaggcccucagcca

SEQ ID NO: 277295 - RNA, 19 nt, Artificial Sequence
  Description of Artificial Sequence: Synthetic oligonucleotide
auagaaggguuagcaucac

SEQ ID NO: 277296 - RNA, 19 nt, Artificial Sequence
  Description of Artificial Sequence: Synthetic oligonucleotide
agagcuugccacugccaug

SEQ ID NO: 277297 - RNA, 19 nt, Artificial Sequence
  Description of Artificial Sequence: Synthetic oligonucleotide
auuugcuaucccacgucuc

SEQ ID NO: 277298 - RNA, 19 nt, Artificial Sequence
  Description of Artificial Sequence: Synthetic oligonucleotide
cacagguagaggcccacac

SEQ ID NO: 277299 - RNA, 19 nt, Artificial Sequence
  Description of Artificial Sequence: Synthetic oligonucleotide
ugagaacgcuuugagcccu

SEQ ID NO: 277300 - RNA, 19 nt, Artificial Sequence
  Description of Artificial Sequence: Synthetic oligonucleotide
cagucgcaccucauagugg

SEQ ID NO: 277301 - RNA, 19 nt, Artificial Sequence
  Description of Artificial Sequence: Synthetic oligonucleotide
ggugcugaauuugcuaucc

SEQ ID NO: 277302 - RNA, 19 nt, Artificial Sequence
  Description of Artificial Sequence: Synthetic oligonucleotide
ggaacugaggaaguacuug

SEQ ID NO: 277303 - RNA, 19 nt, Artificial Sequence
  Description of Artificial Sequence: Synthetic oligonucleotide
cauuggauuuggugagaac

SEQ ID NO: 277304 - RNA, 19 nt, Artificial Sequence
  Description of Artificial Sequence: Synthetic oligonucleotide
caugugggaaacuggacua

SEQ ID NO: 277305 - RNA, 19 nt, Artificial Sequence
  Description of Artificial Sequence: Synthetic oligonucleotide
ucaucguaguuggggaugu

SEQ ID NO: 277306 - RNA, 19 nt, Artificial Sequence
  Description of Artificial Sequence: Synthetic oligonucleotide
aguaauacacgaagagcau

SEQ ID NO: 277307 - RNA, 19 nt, Artificial Sequence
  Description of Artificial Sequence: Synthetic oligonucleotide
caaagauggcagcgcagac

SEQ ID NO: 277308 - RNA, 19 nt, Artificial Sequence
  Description of Artificial Sequence: Synthetic oligonucleotide
cuggucgaccaccuugaag

SEQ ID NO: 277309 - RNA, 19 nt, Artificial Sequence
  Description of Artificial Sequence: Synthetic oligonucleotide
agugaccguaacgaguccu

SEQ ID NO: 277310 - RNA, 19 nt, Artificial Sequence
  Description of Artificial Sequence: Synthetic oligonucleotide
gccagcacauucccgagag

SEQ ID NO: 277311 - RNA, 19 nt, Artificial Sequence
  Description of Artificial Sequence: Synthetic oligonucleotide
ucacacguuccaacuuuuc

SEQ ID NO: 277312 - RNA, 19 nt, Artificial Sequence
  Description of Artificial Sequence: Synthetic oligonucleotide
cauaccccucauacagggc

SEQ ID NO: 277313 - RNA, 19 nt, Artificial Sequence
  Description of Artificial Sequence: Synthetic oligonucleotide
augcacugagauucugaga

SEQ ID NO: 277314 - RNA, 19 nt, Artificial Sequence
  Description of Artificial Sequence: Synthetic oligonucleotide
acggcuaagcagagcauag

SEQ ID NO: 277315 - RNA, 19 nt, Artificial Sequence
  Description of Artificial Sequence: Synthetic oligonucleotide
cugaauccagaagcgggag

SEQ ID NO: 277316 - RNA, 19 nt, Artificial Sequence
  Description of Artificial Sequence: Synthetic oligonucleotide
aagagacggcuaagcagag

SEQ ID NO: 277317 - RNA, 19 nt, Artificial Sequence
  Description of Artificial Sequence: Synthetic oligonucleotide
cuccauaccaagcagcccu

SEQ ID NO: 277318 - RNA, 19 nt, Artificial Sequence
  Description of Artificial Sequence: Synthetic oligonucleotide
aacgcaccuuucucauccu

SEQ ID NO: 277319 - RNA, 19 nt, Artificial Sequence
  Description of Artificial Sequence: Synthetic oligonucleotide
acauucccgagagacacau

SEQ ID NO: 277320 - RNA, 19 nt, Artificial Sequence
  Description of Artificial Sequence: Synthetic oligonucleotide
ggccacgaagccuucaaac

SEQ ID NO: 277321 - RNA, 19 nt, Artificial Sequence
  Description of Artificial Sequence: Synthetic oligonucleotide
ucgagccugcaugugggcc

SEQ ID NO: 277322 - RNA, 19 nt, Artificial Sequence
  Description of Artificial Sequence: Synthetic oligonucleotide
ucgcaccucauagugggac

SEQ ID NO: 277323 - RNA, 19 nt, Artificial Sequence
  Description of Artificial Sequence: Synthetic oligonucleotide
ggagugaccguaacgaguc

SEQ ID NO: 277324 - RNA, 19 nt, Artificial Sequence
  Description of Artificial Sequence: Synthetic oligonucleotide
augugggaaacuggacuag

SEQ ID NO: 277325 - RNA, 19 nt, Artificial Sequence
  Description of Artificial Sequence: Synthetic oligonucleotide
cagagucagagcccacccc

SEQ ID NO: 277326 - RNA, 19 nt, Artificial Sequence
  Description of Artificial Sequence: Synthetic oligonucleotide
cagugacgguugcauaccc

SEQ ID NO: 277327 - RNA, 19 nt, Artificial Sequence
  Description of Artificial Sequence: Synthetic oligonucleotide
cccgcuuuguggcauaggc

SEQ ID NO: 277328 - RNA, 19 nt, Artificial Sequence
  Description of Artificial Sequence: Synthetic oligonucleotide
gacuuauaguugcccaugu

SEQ ID NO: 277329 - RNA, 19 nt, Artificial Sequence
  Description of Artificial Sequence: Synthetic oligonucleotide
cuuccgucugucucagguc

SEQ ID NO: 277330 - RNA, 19 nt, Artificial Sequence
  Description of Artificial Sequence: Synthetic oligonucleotide
acggcaguccaggcuagac

SEQ ID NO: 277331 - RNA, 19 nt, Artificial Sequence
  Description of Artificial Sequence: Synthetic oligonucleotide
gaucacacguuccaacuuu

SEQ ID NO: 277332 - RNA, 19 nt, Artificial Sequence
  Description of Artificial Sequence: Synthetic oligonucleotide
uccagaagcgggagccccu

SEQ ID NO: 277333 - RNA, 19 nt, Artificial Sequence
  Description of Artificial Sequence: Synthetic oligonucleotide
ucgaggcgaguguugggcu

SEQ ID NO: 277334 - RNA, 19 nt, Artificial Sequence
  Description of Artificial Sequence: Synthetic oligonucleotide
gaagcacucuggaggagca

SEQ ID NO: 277335 - RNA, 19 nt, Artificial Sequence
  Description of Artificial Sequence: Synthetic oligonucleotide
cagauuuagaccagucacu

SEQ ID NO: 277336 - RNA, 19 nt, Artificial Sequence
  Description of Artificial Sequence: Synthetic oligonucleotide
ccugucgccaguuggcugc

SEQ ID NO: 277337 - RNA, 19 nt, Artificial Sequence
  Description of Artificial Sequence: Synthetic oligonucleotide
cacuccuaaugacacacaa

SEQ ID NO: 277338 - RNA, 19 nt, Artificial Sequence
  Description of Artificial Sequence: Synthetic oligonucleotide
aguguugggcugaacaaua

SEQ ID NO: 277339 - RNA, 19 nt, Artificial Sequence
  Description of Artificial Sequence: Synthetic oligonucleotide
guaaggcccucagccaggg

SEQ ID NO: 277340 - RNA, 19 nt, Artificial Sequence
  Description of Artificial Sequence: Synthetic oligonucleotide
cauagcucuucaucuuaga

SEQ ID NO: 277341 - RNA, 19 nt, Artificial Sequence
  Description of Artificial Sequence: Synthetic oligonucleotide
ugacgguugcauaccccuc

SEQ ID NO: 277342 - RNA, 19 nt, Artificial Sequence
  Description of Artificial Sequence: Synthetic oligonucleotide
ugaacgcaccuuucucauc

SEQ ID NO: 277343 - RNA, 19 nt, Artificial Sequence
  Description of Artificial Sequence: Synthetic oligonucleotide
ugucgaaguuggucagggu

SEQ ID NO: 277344 - RNA, 19 nt, Artificial Sequence
  Description of Artificial Sequence: Synthetic oligonucleotide
gcgaguguugggcugaaca

SEQ ID NO: 277345 - RNA, 19 nt, Artificial Sequence
  Description of Artificial Sequence: Synthetic oligonucleotide
cucggcccggcacucuucg

SEQ ID NO: 277346 - RNA, 19 nt, Artificial Sequence
  Description of Artificial Sequence: Synthetic oligonucleotide
uccagcggauauacagguc

SEQ ID NO: 277347 - RNA, 19 nt, Artificial Sequence
  Description of Artificial Sequence: Synthetic oligonucleotide
gccugauacucuucuucgg

SEQ ID NO: 277348 - RNA, 19 nt, Artificial Sequence
  Description of Artificial Sequence: Synthetic oligonucleotide
ggcuagcuggguaaggacc

SEQ ID NO: 277349 - RNA, 19 nt, Artificial Sequence
  Description of Artificial Sequence: Synthetic oligonucleotide
ggacuuauaguugcccaug

SEQ ID NO: 277350 - RNA, 19 nt, Artificial Sequence
  Description of Artificial Sequence: Synthetic oligonucleotide
caaaguugaacgcaccuuu

SEQ ID NO: 277351 - RNA, 19 nt, Artificial Sequence
  Description of Artificial Sequence: Synthetic oligonucleotide
ggacuaggcagccugugga

SEQ ID NO: 277352 - RNA, 19 nt, Artificial Sequence
  Description of Artificial Sequence: Synthetic oligonucleotide
auacaggcgcucugugggu

SEQ ID NO: 277353 - RNA, 19 nt, Artificial Sequence
  Description of Artificial Sequence: Synthetic oligonucleotide
agcuguacuucugagccuu

SEQ ID NO: 277354 - RNA, 19 nt, Artificial Sequence
  Description of Artificial Sequence: Synthetic oligonucleotide
caccuggagucuccguagg

SEQ ID NO: 277355 - RNA, 19 nt, Artificial Sequence
  Description of Artificial Sequence: Synthetic oligonucleotide
cuccaaagauggcagcgca

SEQ ID NO: 277356 - RNA, 19 nt, Artificial Sequence
  Description of Artificial Sequence: Synthetic oligonucleotide
cacugaccggaucuugcug

SEQ ID NO: 277357 - RNA, 19 nt, Artificial Sequence
  Description of Artificial Sequence: Synthetic oligonucleotide
gugacgguugcauaccccu

SEQ ID NO: 277358 - RNA, 19 nt, Artificial Sequence
  Description of Artificial Sequence: Synthetic oligonucleotide
uccauaccaagcagcccua

SEQ ID NO: 277359 - RNA, 19 nt, Artificial Sequence
  Description of Artificial Sequence: Synthetic oligonucleotide
cagucacuucucagaacug

SEQ ID NO: 277360 - RNA, 19 nt, Artificial Sequence
  Description of Artificial Sequence: Synthetic oligonucleotide
gagugaccguaacgagucc

SEQ ID NO: 277361 - RNA, 19 nt, Artificial Sequence
  Description of Artificial Sequence: Synthetic oligonucleotide
ggcuagacacaccaauguc

SEQ ID NO: 277362 - RNA, 19 nt, Artificial Sequence
  Description of Artificial Sequence: Synthetic oligonucleotide
cugauacucuucuucggua

SEQ ID NO: 277363 - RNA, 19 nt, Artificial Sequence
  Description of Artificial Sequence: Synthetic oligonucleotide
gcucguguaaccccaccug

SEQ ID NO: 277364 - RNA, 19 nt, Artificial Sequence
  Description of Artificial Sequence: Synthetic oligonucleotide
gaggugaagucagggguga

SEQ ID NO: 277365 - RNA, 19 nt, Artificial Sequence
  Description of Artificial Sequence: Synthetic oligonucleotide
acacgggcaucugggcgcc

SEQ ID NO: 277366 - RNA, 19 nt, Artificial Sequence
  Description of Artificial Sequence: Synthetic oligonucleotide
ggaacuuauccuucucaaa

SEQ ID NO: 277367 - RNA, 19 nt, Artificial Sequence
  Description of Artificial Sequence: Synthetic oligonucleotide
guguaaccccaccugcaca

SEQ ID NO: 277368 - RNA, 19 nt, Artificial Sequence
  Description of Artificial Sequence: Synthetic oligonucleotide
agaucggaugagaccagca

SEQ ID NO: 277369 - RNA, 19 nt, Artificial Sequence
  Description of Artificial Sequence: Synthetic oligonucleotide
ccacgaagccuucaaacuc

SEQ ID NO: 277370 - RNA, 19 nt, Artificial Sequence
  Description of Artificial Sequence: Synthetic oligonucleotide
gcgggagccccucuugugg

SEQ ID NO: 277371 - RNA, 19 nt, Artificial Sequence
  Description of Artificial Sequence: Synthetic oligonucleotide
agaacgcuuugagcccugg

SEQ ID NO: 277372 - RNA, 19 nt, Artificial Sequence
  Description of Artificial Sequence: Synthetic oligonucleotide
gacggcuaagcagagcaua

SEQ ID NO: 277373 - RNA, 19 nt, Artificial Sequence
  Description of Artificial Sequence: Synthetic oligonucleotide
acgcaccuuucucauccug

SEQ ID NO: 277374 - RNA, 19 nt, Artificial Sequence
  Description of Artificial Sequence: Synthetic oligonucleotide
ucgccaguuggcugccucu

SEQ ID NO: 277375 - RNA, 19 nt, Artificial Sequence
  Description of Artificial Sequence: Synthetic oligonucleotide
accacccucaguugaggua

SEQ ID NO: 277376 - RNA, 19 nt, Artificial Sequence
  Description of Artificial Sequence: Synthetic oligonucleotide
ugcgguccagauggacacg

SEQ ID NO: 277377 - RNA, 19 nt, Artificial Sequence
  Description of Artificial Sequence: Synthetic oligonucleotide
cuggaacucauagcucuuc

SEQ ID NO: 277378 - RNA, 19 nt, Artificial Sequence
  Description of Artificial Sequence: Synthetic oligonucleotide
acuccuaaugacacacaau

SEQ ID NO: 277379 - RNA, 19 nt, Artificial Sequence
  Description of Artificial Sequence: Synthetic oligonucleotide
cauaccaagcagcccuaga

SEQ ID NO: 277380 - RNA, 19 nt, Artificial Sequence
  Description of Artificial Sequence: Synthetic oligonucleotide
ugggcacggaagagacggc

SEQ ID NO: 277381 - RNA, 19 nt, Artificial Sequence
  Description of Artificial Sequence: Synthetic oligonucleotide
uuccccaguccaagguguc

SEQ ID NO: 277382 - RNA, 19 nt, Artificial Sequence
  Description of Artificial Sequence: Synthetic oligonucleotide
cgguagcucucaaugaagc

SEQ ID NO: 277383 - RNA, 19 nt, Artificial Sequence
  Description of Artificial Sequence: Synthetic oligonucleotide
acgcucacagaaagaucgg

SEQ ID NO: 277384 - RNA, 19 nt, Artificial Sequence
  Description of Artificial Sequence: Synthetic oligonucleotide
ugaccguaacgaguccuuc

SEQ ID NO: 277385 - RNA, 19 nt, Artificial Sequence
  Description of Artificial Sequence: Synthetic oligonucleotide
agaagcgggagccccucuu

SEQ ID NO: 277386 - RNA, 19 nt, Artificial Sequence
  Description of Artificial Sequence: Synthetic oligonucleotide
uugcuaucccacgucucuc

SEQ ID NO: 277387 - RNA, 19 nt, Artificial Sequence
  Description of Artificial Sequence: Synthetic oligonucleotide
agcauuggauuuggugaga

SEQ ID NO: 277388 - RNA, 19 nt, Artificial Sequence
  Description of Artificial Sequence: Synthetic oligonucleotide
uccguaggaaccgcuccaa

SEQ ID NO: 277389 - RNA, 19 nt, Artificial Sequence
  Description of Artificial Sequence: Synthetic oligonucleotide
agcgcagaccaaggaacug

SEQ ID NO: 277390 - RNA, 19 nt, Artificial Sequence
  Description of Artificial Sequence: Synthetic oligonucleotide
gccaggguagcuccuugag

SEQ ID NO: 277391 - RNA, 19 nt, Artificial Sequence
  Description of Artificial Sequence: Synthetic oligonucleotide
acagcucguguaaccccac

SEQ ID NO: 277392 - RNA, 19 nt, Artificial Sequence
  Description of Artificial Sequence: Synthetic oligonucleotide
cccacugaccggaucuugc

SEQ ID NO: 277393 - RNA, 19 nt, Artificial Sequence
  Description of Artificial Sequence: Synthetic oligonucleotide
guagaacuccaaagccaac

SEQ ID NO: 277394 - RNA, 19 nt, Artificial Sequence
  Description of Artificial Sequence: Synthetic oligonucleotide
ccaggguagcuccuugagc

SEQ ID NO: 277395 - RNA, 19 nt, Artificial Sequence
  Description of Artificial Sequence: Synthetic oligonucleotide
ucccgcuuuguggcauagg

SEQ ID NO: 277396 - RNA, 19 nt, Artificial Sequence
  Description of Artificial Sequence: Synthetic oligonucleotide
gcagccuuacuccccagga

SEQ ID NO: 277397 - RNA, 19 nt, Artificial Sequence
  Description of Artificial Sequence: Synthetic oligonucleotide
auguugaugccggcaggga

SEQ ID NO: 277398 - RNA, 19 nt, Artificial Sequence
  Description of Artificial Sequence: Synthetic oligonucleotide
uccgucugucucaggucau

SEQ ID NO: 277399 - RNA, 19 nt, Artificial Sequence
  Description of Artificial Sequence: Synthetic oligonucleotide
cccacgucucuccacuccg

SEQ ID NO: 277400 - RNA, 19 nt, Artificial Sequence
  Description of Artificial Sequence: Synthetic oligonucleotide
ccgguaccagcucugaauc

SEQ ID NO: 277401 - RNA, 19 nt, Artificial Sequence
  Description of Artificial Sequence: Synthetic oligonucleotide
ggcccggcacucuucguag

SEQ ID NO: 277402 - RNA, 19 nt, Artificial Sequence
  Description of Artificial Sequence: Synthetic oligonucleotide
cuccguaggaaccgcucca

SEQ ID NO: 277403 - RNA, 19 nt, Artificial Sequence
  Description of Artificial Sequence: Synthetic oligonucleotide
ccguguguuguaugcacug

SEQ ID NO: 277404 - RNA, 19 nt, Artificial Sequence
  Description of Artificial Sequence: Synthetic oligonucleotide
cuggacuaggcagccugug

SEQ ID NO: 277405 - RNA, 19 nt, Artificial Sequence
  Description of Artificial Sequence: Synthetic oligonucleotide
acuugccaccagccgcuca

SEQ ID NO: 277406 - RNA, 19 nt, Artificial Sequence
  Description of Artificial Sequence: Synthetic oligonucleotide
caguucacguagauuacau

SEQ ID NO: 277407 - RNA, 19 nt, Artificial Sequence
  Description of Artificial Sequence: Synthetic oligonucleotide
gcgguccagauggacacgg

SEQ ID NO: 277408 - RNA, 19 nt, Artificial Sequence
  Description of Artificial Sequence: Synthetic oligonucleotide
ccgggugaccuggaaaugg

SEQ ID NO: 277409 - RNA, 19 nt, Artificial Sequence
  Description of Artificial Sequence: Synthetic oligonucleotide
aggaacugaggaaguacuu

SEQ ID NO: 277410 - RNA, 19 nt, Artificial Sequence
  Description of Artificial Sequence: Synthetic oligonucleotide
gcccuagacaggugauggg

SEQ ID NO: 277411 - RNA, 19 nt, Artificial Sequence
  Description of Artificial Sequence: Synthetic oligonucleotide
ggccucacggcaguccagg

SEQ ID NO: 277412 - RNA, 19 nt, Artificial Sequence
  Description of Artificial Sequence: Synthetic oligonucleotide
cagcccgaaccauguugag

SEQ ID NO: 277413 - RNA, 19 nt, Artificial Sequence
  Description of Artificial Sequence: Synthetic oligonucleotide
acgugaguuucucccgcuu

SEQ ID NO: 277414 - RNA, 19 nt, Artificial Sequence
  Description of Artificial Sequence: Synthetic oligonucleotide
cauacgccuuggcuuucuc

SEQ ID NO: 277415 - RNA, 19 nt, Artificial Sequence
  Description of Artificial Sequence: Synthetic oligonucleotide
agccuuccgucugucucag

SEQ ID NO: 277416 - RNA, 19 nt, Artificial Sequence
  Description of Artificial Sequence: Synthetic oligonucleotide
gagccuucgaggcgagugu

SEQ ID NO: 277417 - RNA, 19 nt, Artificial Sequence
  Description of Artificial Sequence: Synthetic oligonucleotide
aucacacguuccaacuuuu

SEQ ID NO: 277418 - RNA, 19 nt, Artificial Sequence
  Description of Artificial Sequence: Synthetic oligonucleotide
gagaacgcuuugagcccug

SEQ ID NO: 277419 - RNA, 19 nt, Artificial Sequence
  Description of Artificial Sequence: Synthetic oligonucleotide
cagcccuagacaggugaug

SEQ ID NO: 277420 - RNA, 19 nt, Artificial Sequence
  Description of Artificial Sequence: Synthetic oligonucleotide
gagccguguguuguaugca

SEQ ID NO: 277421 - RNA, 19 nt, Artificial Sequence
  Description of Artificial Sequence: Synthetic oligonucleotide
gaacugcauugucccaugu

SEQ ID NO: 277422 - RNA, 19 nt, Artificial Sequence
  Description of Artificial Sequence: Synthetic oligonucleotide
agauggacacgggcaucug

SEQ ID NO: 277423 - RNA, 19 nt, Artificial Sequence
  Description of Artificial Sequence: Synthetic oligonucleotide
gucuccguaggaaccgcuc

SEQ ID NO: 277424 - RNA, 19 nt, Artificial Sequence
  Description of Artificial Sequence: Synthetic oligonucleotide
cguaacgaguccuucgcca

SEQ ID NO: 277425 - RNA, 19 nt, Artificial Sequence
  Description of Artificial Sequence: Synthetic oligonucleotide
acgccuuggcuuucuccaa

SEQ ID NO: 277426 - RNA, 19 nt, Artificial Sequence
  Description of Artificial Sequence: Synthetic oligonucleotide
gagccaaaggggucacggu

SEQ ID NO: 277427 - RNA, 19 nt, Artificial Sequence
  Description of Artificial Sequence: Synthetic oligonucleotide
ccaacaguccagcccgaac

SEQ ID NO: 277428 - RNA, 19 nt, Artificial Sequence
  Description of Artificial Sequence: Synthetic oligonucleotide
ccaagaacgugaguuucuc

SEQ ID NO: 277429 - RNA, 19 nt, Artificial Sequence
  Description of Artificial Sequence: Synthetic oligonucleotide
ccaugugggaaacuggacu

SEQ ID NO: 277430 - RNA, 19 nt, Artificial Sequence
  Description of Artificial Sequence: Synthetic oligonucleotide
aggggucacgguagcucuc

SEQ ID NO: 277431 - RNA, 19 nt, Artificial Sequence
  Description of Artificial Sequence: Synthetic oligonucleotide
cguguaaccccaccugcac

SEQ ID NO: 277432 - RNA, 19 nt, Artificial Sequence
  Description of Artificial Sequence: Synthetic oligonucleotide
guguugggcugaacaauaa

SEQ ID NO: 277433 - RNA, 19 nt, Artificial Sequence
  Description of Artificial Sequence: Synthetic oligonucleotide
acgaguccuucgccagccu

SEQ ID NO: 277434 - RNA, 19 nt, Artificial Sequence
  Description of Artificial Sequence: Synthetic oligonucleotide
ccguaacgaguccuucgcc

SEQ ID NO: 277435 - RNA, 19 nt, Artificial Sequence
  Description of Artificial Sequence: Synthetic oligonucleotide
gcgcagcagaacugugucc

SEQ ID NO: 277436 - RNA, 19 nt, Artificial Sequence
  Description of Artificial Sequence: Synthetic oligonucleotide
ggcccaacagcucguguaa

SEQ ID NO: 277437 - RNA, 19 nt, Artificial Sequence
  Description of Artificial Sequence: Synthetic oligonucleotide
agcggauauacagguccuu

SEQ ID NO: 277438 - RNA, 19 nt, Artificial Sequence
  Description of Artificial Sequence: Synthetic oligonucleotide
ggcugcauacgccuuggcu

SEQ ID NO: 277439 - RNA, 19 nt, Artificial Sequence
  Description of Artificial Sequence: Synthetic oligonucleotide
ccacgucucuccacuccgg

SEQ ID NO: 277440 - RNA, 19 nt, Artificial Sequence
  Description of Artificial Sequence: Synthetic oligonucleotide
ccgaaccauguugagccag

SEQ ID NO: 277441 - RNA, 19 nt, Artificial Sequence
  Description of Artificial Sequence: Synthetic oligonucleotide
ugcauacgccuuggcuuuc

SEQ ID NO: 277442 - RNA, 19 nt, Artificial Sequence
  Description of Artificial Sequence: Synthetic oligonucleotide
acccucaguugagguagca

SEQ ID NO: 277443 - RNA, 19 nt, Artificial Sequence
  Description of Artificial Sequence: Synthetic oligonucleotide
ggucugcccacugaccgga

SEQ ID NO: 277444 - RNA, 19 nt, Artificial Sequence
  Description of Artificial Sequence: Synthetic oligonucleotide
cucucuacaauagggccuu

SEQ ID NO: 277445 - RNA, 19 nt, Artificial Sequence
  Description of Artificial Sequence: Synthetic oligonucleotide
guaaccccaccugcacauc

SEQ ID NO: 277446 - RNA, 19 nt, Artificial Sequence
  Description of Artificial Sequence: Synthetic oligonucleotide
cugucgccaguuggcugcc

SEQ ID NO: 277447 - RNA, 19 nt, Artificial Sequence
  Description of Artificial Sequence: Synthetic oligonucleotide
gcuagcuggguaaggaccu

SEQ ID NO: 277448 - RNA, 19 nt, Artificial Sequence
  Description of Artificial Sequence: Synthetic oligonucleotide
agccuucgaggcgaguguu

SEQ ID NO: 277449 - RNA, 19 nt, Artificial Sequence
  Description of Artificial Sequence: Synthetic oligonucleotide
cagcggauauacagguccu

SEQ ID NO: 277450 - RNA, 19 nt, Artificial Sequence
  Description of Artificial Sequence: Synthetic oligonucleotide
gaagagcauuggauuuggu

SEQ ID NO: 277451 - RNA, 19 nt, Artificial Sequence
  Description of Artificial Sequence: Synthetic oligonucleotide
caggauguacuggguaucu

SEQ ID NO: 277452 - RNA, 19 nt, Artificial Sequence
  Description of Artificial Sequence: Synthetic oligonucleotide
cucugucacaugccagcua

SEQ ID NO: 277453 - RNA, 19 nt, Artificial Sequence
  Description of Artificial Sequence: Synthetic oligonucleotide
ccccuuccagcggauauac

SEQ ID NO: 277454 - RNA, 19 nt, Artificial Sequence
  Description of Artificial Sequence: Synthetic oligonucleotide
gggcaggauguacugggua

SEQ ID NO: 277455 - RNA, 19 nt, Artificial Sequence
  Description of Artificial Sequence: Synthetic oligonucleotide
gcaugugggccugucgcca

SEQ ID NO: 277456 - RNA, 19 nt, Artificial Sequence
  Description of Artificial Sequence: Synthetic oligonucleotide
ccaaggugucgaagccuug

SEQ ID NO: 277457 - RNA, 19 nt, Artificial Sequence
  Description of Artificial Sequence: Synthetic oligonucleotide
ggaucacacguuccaacuu

SEQ ID NO: 277458 - RNA, 19 nt, Artificial Sequence
  Description of Artificial Sequence: Synthetic oligonucleotide
cggaagagacggcuaagca

SEQ ID NO: 277459 - RNA, 19 nt, Artificial Sequence
  Description of Artificial Sequence: Synthetic oligonucleotide
caccacccucaguugaggu

SEQ ID NO: 277460 - RNA, 19 nt, Artificial Sequence
  Description of Artificial Sequence: Synthetic oligonucleotide
ggggucacgguagcucuca

SEQ ID NO: 277461 - RNA, 19 nt, Artificial Sequence
  Description of Artificial Sequence: Synthetic oligonucleotide
gaaccauguugagccaguu

SEQ ID NO: 277462 - RNA, 19 nt, Artificial Sequence
  Description of Artificial Sequence: Synthetic oligonucleotide
cuucgccagccuccaguaa

SEQ ID NO: 277463 - RNA, 19 nt, Artificial Sequence
  Description of Artificial Sequence: Synthetic oligonucleotide
ccauaccaagcagcccuag

SEQ ID NO: 277464 - RNA, 19 nt, Artificial Sequence
  Description of Artificial Sequence: Synthetic oligonucleotide
cacgucucuccacuccggu

SEQ ID NO: 277465 - RNA, 19 nt, Artificial Sequence
  Description of Artificial Sequence: Synthetic oligonucleotide
ugaugccggcagggaugcc

SEQ ID NO: 277466 - RNA, 19 nt, Artificial Sequence
  Description of Artificial Sequence: Synthetic oligonucleotide
cuccgguaccagcucugaa

SEQ ID NO: 277467 - RNA, 19 nt, Artificial Sequence
  Description of Artificial Sequence: Synthetic oligonucleotide
cagagaucccuaacuucuu

SEQ ID NO: 277468 - RNA, 19 nt, Artificial Sequence
  Description of Artificial Sequence: Synthetic oligonucleotide
ucucuacaauagggccuuu

SEQ ID NO: 277469 - RNA, 19 nt, Artificial Sequence
  Description of Artificial Sequence: Synthetic oligonucleotide
gccuucgaggcgaguguug

SEQ ID NO: 277470 - RNA, 19 nt, Artificial Sequence
  Description of Artificial Sequence: Synthetic oligonucleotide
agggcccgcccugcaacca

SEQ ID NO: 277471 - RNA, 19 nt, Artificial Sequence
  Description of Artificial Sequence: Synthetic oligonucleotide
gucgcaccucauaguggga

SEQ ID NO: 277472 - RNA, 19 nt, Artificial Sequence
  Description of Artificial Sequence: Synthetic oligonucleotide
gugaccguaacgaguccuu

SEQ ID NO: 277473 - RNA, 19 nt, Artificial Sequence
  Description of Artificial Sequence: Synthetic oligonucleotide
ccacuccuaaugacacaca

SEQ ID NO: 277474 - RNA, 19 nt, Artificial Sequence
  Description of Artificial Sequence: Synthetic oligonucleotide
ccuguggacuucagcaccu

SEQ ID NO: 277475 - RNA, 19 nt, Artificial Sequence
  Description of Artificial Sequence: Synthetic oligonucleotide
ggucacgguagcucucaau

SEQ ID NO: 277476 - RNA, 19 nt, Artificial Sequence
  Description of Artificial Sequence: Synthetic oligonucleotide
ccagcuuagcaucuuccau

SEQ ID NO: 277477 - RNA, 19 nt, Artificial Sequence
  Description of Artificial Sequence: Synthetic oligonucleotide
ccuucgccagccuccagua

SEQ ID NO: 277478 - RNA, 19 nt, Artificial Sequence
  Description of Artificial Sequence: Synthetic oligonucleotide
gcccaacagcucguguaac

SEQ ID NO: 277479 - RNA, 19 nt, Artificial Sequence
  Description of Artificial Sequence: Synthetic oligonucleotide
gggcagccuuacuccccag

SEQ ID NO: 277480 - RNA, 19 nt, Artificial Sequence
  Description of Artificial Sequence: Synthetic oligonucleotide
cggauauacagguccuugu

SEQ ID NO: 277481 - RNA, 19 nt, Artificial Sequence
  Description of Artificial Sequence: Synthetic oligonucleotide
aggcgcucugugggugaca

SEQ ID NO: 277482 - RNA, 19 nt, Artificial Sequence
  Description of Artificial Sequence: Synthetic oligonucleotide
agguagcaccagagucaga

SEQ ID NO: 277483 - RNA, 19 nt, Artificial Sequence
  Description of Artificial Sequence: Synthetic oligonucleotide
ggccccuuccagcggauau

SEQ ID NO: 277484 - RNA, 19 nt, Artificial Sequence
  Description of Artificial Sequence: Synthetic oligonucleotide
ccccaguccaaggugucga

SEQ ID NO: 277485 - RNA, 19 nt, Artificial Sequence
  Description of Artificial Sequence: Synthetic oligonucleotide
gccagggcauguugucgaa

SEQ ID NO: 277486 - RNA, 19 nt, Artificial Sequence
  Description of Artificial Sequence: Synthetic oligonucleotide
ccuccaauucaggcccauc

SEQ ID NO: 277487 - RNA, 19 nt, Artificial Sequence
  Description of Artificial Sequence: Synthetic oligonucleotide
ccacugaccggaucuugcu

SEQ ID NO: 277488 - RNA, 19 nt, Artificial Sequence
  Description of Artificial Sequence: Synthetic oligonucleotide
gcuguacuucugagccuuc

SEQ ID NO: 277489 - RNA, 19 nt, Artificial Sequence
  Description of Artificial Sequence: Synthetic oligonucleotide
cggcaguccaggcuagaca

SEQ ID NO: 277490 - RNA, 19 nt, Artificial Sequence
  Description of Artificial Sequence: Synthetic oligonucleotide
ccgucugucucaggucauc

SEQ ID NO: 277491 - RNA, 19 nt, Artificial Sequence
  Description of Artificial Sequence: Synthetic oligonucleotide
cacggcaguccaggcuaga

SEQ ID NO: 277492 - RNA, 19 nt, Artificial Sequence
  Description of Artificial Sequence: Synthetic oligonucleotide
ccccacuccuaaugacaca

SEQ ID NO: 277493 - RNA, 19 nt, Artificial Sequence
  Description of Artificial Sequence: Synthetic oligonucleotide
ggcgaguguugggcugaac

SEQ ID NO: 277494 - RNA, 19 nt, Artificial Sequence
  Description of Artificial Sequence: Synthetic oligonucleotide
cauucccgagagacacauu

SEQ ID NO: 277495 - RNA, 19 nt, Artificial Sequence
  Description of Artificial Sequence: Synthetic oligonucleotide
cacgggcaucugggcgccc

SEQ ID NO: 277496 - RNA, 19 nt, Artificial Sequence
  Description of Artificial Sequence: Synthetic oligonucleotide
cgaaccauguugagccagu

SEQ ID NO: 277497 - RNA, 19 nt, Artificial Sequence
  Description of Artificial Sequence: Synthetic oligonucleotide
ccguaggaaccgcuccaaa

SEQ ID NO: 277498 - RNA, 19 nt, Artificial Sequence
  Description of Artificial Sequence: Synthetic oligonucleotide
ggcccgcccugcaaccaca

SEQ ID NO: 277499 - RNA, 19 nt, Artificial Sequence
  Description of Artificial Sequence: Synthetic oligonucleotide
gcagcccuagacaggugau

SEQ ID NO: 277500 - RNA, 19 nt, Artificial Sequence
  Description of Artificial Sequence: Synthetic oligonucleotide
cgugaguuucucccgcuuu

SEQ ID NO: 277501 - RNA, 19 nt, Artificial Sequence
  Description of Artificial Sequence: Synthetic oligonucleotide
ggcgcccaucagaaccugu

SEQ ID NO: 277502 - RNA, 19 nt, Artificial Sequence
  Description of Artificial Sequence: Synthetic oligonucleotide
caucguaguuggggauguu

SEQ ID NO: 277503 - RNA, 19 nt, Artificial Sequence
  Description of Artificial Sequence: Synthetic oligonucleotide
cgguugcauaccccucaua

SEQ ID NO: 277504 - RNA, 19 nt, Artificial Sequence
  Description of Artificial Sequence: Synthetic oligonucleotide
gcccgcccugcaaccacau

SEQ ID NO: 277505 - RNA, 19 nt, Artificial Sequence
  Description of Artificial Sequence: Synthetic oligonucleotide
aaugcuaugguuuagaaga

SEQ ID NO: 277506 - RNA, 19 nt, Artificial Sequence
  Description of Artificial Sequence: Synthetic oligonucleotide
aauaccagguuucauaacc

SEQ ID NO: 277507 - RNA, 19 nt, Artificial Sequence
  Description of Artificial Sequence: Synthetic oligonucleotide
aguuguaccauucugaccc

SEQ ID NO: 277508 - RNA, 19 nt, Artificial Sequence
  Description of Artificial Sequence: Synthetic oligonucleotide
auacuuuagaccuucaggc

SEQ ID NO: 277509 - RNA, 19 nt, Artificial Sequence
  Description of Artificial Sequence: Synthetic oligonucleotide
aauacaacuaagaucauac

SEQ ID NO: 277510 - RNA, 19 nt, Artificial Sequence
  Description of Artificial Sequence: Synthetic oligonucleotide
auuuagguaucuuuuauac

SEQ ID NO: 277511 - RNA, 19 nt, Artificial Sequence
  Description of Artificial Sequence: Synthetic oligonucleotide
uuaaggaacuuucugaugc

SEQ ID NO: 277512 - RNA, 19 nt, Artificial Sequence
  Description of Artificial Sequence: Synthetic oligonucleotide
aaaucugcuagccauuagg

SEQ ID NO: 277513 - RNA, 19 nt, Artificial Sequence
  Description of Artificial Sequence: Synthetic oligonucleotide
aguguauuaguuuaucaac

SEQ ID NO: 277514 - RNA, 19 nt, Artificial Sequence
  Description of Artificial Sequence: Synthetic oligonucleotide
uauacgggcacucaaaagc

SEQ ID NO: 277515 - RNA, 19 nt, Artificial Sequence
  Description of Artificial Sequence: Synthetic oligonucleotide
aacgauuuucuuuaaagca

SEQ ID NO: 277516 - RNA, 19 nt, Artificial Sequence
  Description of Artificial Sequence: Synthetic oligonucleotide
uuaauaagugaaaagguaa

SEQ ID NO: 277517 - RNA, 19 nt, Artificial Sequence
  Description of Artificial Sequence: Synthetic oligonucleotide
auuaacauaugcugaauuc

SEQ ID NO: 277518 - RNA, 19 nt, Artificial Sequence
  Description of Artificial Sequence: Synthetic oligonucleotide
aauaauguauucaagauuu

SEQ ID NO: 277519 - RNA, 19 nt, Artificial Sequence
  Description of Artificial Sequence: Synthetic oligonucleotide
aucuuuuauacuuuggcuc

SEQ ID NO: 277520 - RNA, 19 nt, Artificial Sequence
  Description of Artificial Sequence: Synthetic oligonucleotide
ucaugagucuaucugaugc

SEQ ID NO: 277521 - RNA, 19 nt, Artificial Sequence
  Description of Artificial Sequence: Synthetic oligonucleotide
acuaagaucauacuuccag

SEQ ID NO: 277522 - RNA, 19 nt, Artificial Sequence
  Description of Artificial Sequence: Synthetic oligonucleotide
uuuguaagaaguuccauac

SEQ ID NO: 277523 - RNA, 19 nt, Artificial Sequence
  Description of Artificial Sequence: Synthetic oligonucleotide
aaguuaacaauuuaaugaa

SEQ ID NO: 277524 - RNA, 19 nt, Artificial Sequence
  Description of Artificial Sequence: Synthetic oligonucleotide
uuacuguaaauucacagcu

SEQ ID NO: 277525 - RNA, 19 nt, Artificial Sequence
  Description of Artificial Sequence: Synthetic oligonucleotide
ugcuagauuauacugauuc

SEQ ID NO: 277526 - RNA, 19 nt, Artificial Sequence
  Description of Artificial Sequence: Synthetic oligonucleotide
uucaaaucuucacacaacc

SEQ ID NO: 277527 - RNA, 19 nt, Artificial Sequence
  Description of Artificial Sequence: Synthetic oligonucleotide
uuagauuugggucaucaga

SEQ ID NO: 277528 - RNA, 19 nt, Artificial Sequence
  Description of Artificial Sequence: Synthetic oligonucleotide
ggaauuauaggacuguugg

SEQ ID NO: 277529 - RNA, 19 nt, Artificial Sequence
  Description of Artificial Sequence: Synthetic oligonucleotide
auaauguacugguuugugc

SEQ ID NO: 277530 - RNA, 19 nt, Artificial Sequence
  Description of Artificial Sequence: Synthetic oligonucleotide
aaauuaccaaccaaagagg

SEQ ID NO: 277531 - RNA, 19 nt, Artificial Sequence
  Description of Artificial Sequence: Synthetic oligonucleotide
aauuaccaaccaaagaggg

SEQ ID NO: 277532 - RNA, 19 nt, Artificial Sequence
  Description of Artificial Sequence: Synthetic oligonucleotide
cauacuuuagaccuucagg

SEQ ID NO: 277533 - RNA, 19 nt, Artificial Sequence
  Description of Artificial Sequence: Synthetic oligonucleotide
uuagguaucuuuuauacuu

SEQ ID NO: 277534 - RNA, 19 nt, Artificial Sequence
  Description of Artificial Sequence: Synthetic oligonucleotide
gguuauauaaucugcagag

SEQ ID NO: 277535 - RNA, 19 nt, Artificial Sequence
  Description of Artificial Sequence: Synthetic oligonucleotide
agaccuagaauuccuaaac

SEQ ID NO: 277536 - RNA, 19 nt, Artificial Sequence
  Description of Artificial Sequence: Synthetic oligonucleotide
uugaccaucaguuaaacuu

SEQ ID NO: 277537 - RNA, 19 nt, Artificial Sequence
  Description of Artificial Sequence: Synthetic oligonucleotide
uguauaauguacugguuug

SEQ ID NO: 277538 - RNA, 19 nt, Artificial Sequence
  Description of Artificial Sequence: Synthetic oligonucleotide
ugauacaauacaacuaaga

SEQ ID NO: 277539 - RNA, 19 nt, Artificial Sequence
  Description of Artificial Sequence: Synthetic oligonucleotide
ucuuaguauccucuagucg

SEQ ID NO: 277540 - RNA, 19 nt, Artificial Sequence
  Description of Artificial Sequence: Synthetic oligonucleotide
auugauuuguaucacauuu

SEQ ID NO: 277541 - RNA, 19 nt, Artificial Sequence
  Description of Artificial Sequence: Synthetic oligonucleotide
ucaagaaagaggugguagg

SEQ ID NO: 277542 - RNA, 19 nt, Artificial Sequence
  Description of Artificial Sequence: Synthetic oligonucleotide
guuacuguaaauucacagc

SEQ ID NO: 277543 - RNA, 19 nt, Artificial Sequence
  Description of Artificial Sequence: Synthetic oligonucleotide
augaugaccgauucuauag

SEQ ID NO: 277544 - RNA, 19 nt, Artificial Sequence
  Description of Artificial Sequence: Synthetic oligonucleotide
cauaugucagcguaguuag

SEQ ID NO: 277545 - RNA, 19 nt, Artificial Sequence
  Description of Artificial Sequence: Synthetic oligonucleotide
aagaucacugugcaaagga

SEQ ID NO: 277546 - RNA, 19 nt, Artificial Sequence
  Description of Artificial Sequence: Synthetic oligonucleotide
agugaaaagguaaaaugac

SEQ ID NO: 277547 - RNA, 19 nt, Artificial Sequence
  Description of Artificial Sequence: Synthetic oligonucleotide
aauuccuaaaccaguauug

SEQ ID NO: 277548 - RNA, 19 nt, Artificial Sequence
  Description of Artificial Sequence: Synthetic oligonucleotide
aauugcaacaccccguuaa

SEQ ID NO: 277549 - RNA, 19 nt, Artificial Sequence
  Description of Artificial Sequence: Synthetic oligonucleotide
cagauuauccacuaaauga

SEQ ID NO: 277550 - RNA, 19 nt, Artificial Sequence
  Description of Artificial Sequence: Synthetic oligonucleotide
aagguuacuguaaauucac

SEQ ID NO: 277551 - RNA, 19 nt, Artificial Sequence
  Description of Artificial Sequence: Synthetic oligonucleotide
ggaguuuauauuuaaauca

SEQ ID NO: 277552 - RNA, 19 nt, Artificial Sequence
  Description of Artificial Sequence: Synthetic oligonucleotide
ucaacaauugcaacacccc

SEQ ID NO: 277553 - RNA, 19 nt, Artificial Sequence
  Description of Artificial Sequence: Synthetic oligonucleotide
aauuaacauaugcugaauu

SEQ ID NO: 277554 - RNA, 19 nt, Artificial Sequence
  Description of Artificial Sequence: Synthetic oligonucleotide
augaaaaggcuguaucugg

SEQ ID NO: 277555 - RNA, 19 nt, Artificial Sequence
  Description of Artificial Sequence: Synthetic oligonucleotide
aagaauaccagguuucaua

SEQ ID NO: 277556 - RNA, 19 nt, Artificial Sequence
  Description of Artificial Sequence: Synthetic oligonucleotide
uggaguuuauauuuaaauc

SEQ ID NO: 277557 - RNA, 19 nt, Artificial Sequence
  Description of Artificial Sequence: Synthetic oligonucleotide
acugauguuagauuugggu

SEQ ID NO: 277558 - RNA, 19 nt, Artificial Sequence
  Description of Artificial Sequence: Synthetic oligonucleotide
cucuuaaccaacagaagag

SEQ ID NO: 277559 - RNA, 19 nt, Artificial Sequence
  Description of Artificial Sequence: Synthetic oligonucleotide
uuuauuggcucuaaacgaa

SEQ ID NO: 277560 - RNA, 19 nt, Artificial Sequence
  Description of Artificial Sequence: Synthetic oligonucleotide
uaaacugaugcugacuucc

SEQ ID NO: 277561 - RNA, 19 nt, Artificial Sequence
  Description of Artificial Sequence: Synthetic oligonucleotide
uuaccaaccaaagagggcu

SEQ ID NO: 277562 - RNA, 19 nt, Artificial Sequence
  Description of Artificial Sequence: Synthetic oligonucleotide
aaagagggcugauuuaggu

SEQ ID NO: 277563 - RNA, 19 nt, Artificial Sequence
  Description of Artificial Sequence: Synthetic oligonucleotide
cucaauauaggaagguuac

SEQ ID NO: 277564 - RNA, 19 nt, Artificial Sequence
  Description of Artificial Sequence: Synthetic oligonucleotide
uugaucuagcaucucaaca

SEQ ID NO: 277565 - RNA, 19 nt, Artificial Sequence
  Description of Artificial Sequence: Synthetic oligonucleotide
ugaucuagcaucucaacau

SEQ ID NO: 277566 - RNA, 19 nt, Artificial Sequence
  Description of Artificial Sequence: Synthetic oligonucleotide
acagauuauccacuaaaug

SEQ ID NO: 277567 - RNA, 19 nt, Artificial Sequence
  Description of Artificial Sequence: Synthetic oligonucleotide
uggaggaucaaauggaaaa

SEQ ID NO: 277568 - RNA, 19 nt, Artificial Sequence
  Description of Artificial Sequence: Synthetic oligonucleotide
uaacauaugcugaauuccu

SEQ ID NO: 277569 - RNA, 19 nt, Artificial Sequence
  Description of Artificial Sequence: Synthetic oligonucleotide
uguauucaagauuuugccu

SEQ ID NO: 277570 - RNA, 19 nt, Artificial Sequence
  Description of Artificial Sequence: Synthetic oligonucleotide
auagcuggaguuuauauuu

SEQ ID NO: 277571 - RNA, 19 nt, Artificial Sequence
  Description of Artificial Sequence: Synthetic oligonucleotide
uuaggcuuaaggaacuuuc

SEQ ID NO: 277572 - RNA, 19 nt, Artificial Sequence
  Description of Artificial Sequence: Synthetic oligonucleotide
gaugaccgauucuauagag

SEQ ID NO: 277573 - RNA, 19 nt, Artificial Sequence
  Description of Artificial Sequence: Synthetic oligonucleotide
uuauacugauucuuauuug

SEQ ID NO: 277574 - RNA, 19 nt, Artificial Sequence
  Description of Artificial Sequence: Synthetic oligonucleotide
caacuaagaucauacuucc

SEQ ID NO: 277575 - RNA, 19 nt, Artificial Sequence
  Description of Artificial Sequence: Synthetic oligonucleotide
cuucauaccccauaggcuc

SEQ ID NO: 277576 - RNA, 19 nt, Artificial Sequence
  Description of Artificial Sequence: Synthetic oligonucleotide
acuucaauugcugacgaag

SEQ ID NO: 277577 - RNA, 19 nt, Artificial Sequence
  Description of Artificial Sequence: Synthetic oligonucleotide
uaaccaacagaagagaauc

SEQ ID NO: 277578 - RNA, 19 nt, Artificial Sequence
  Description of Artificial Sequence: Synthetic oligonucleotide
uacauaacgcuccuccacc

SEQ ID NO: 277579 - RNA, 19 nt, Artificial Sequence
  Description of Artificial Sequence: Synthetic oligonucleotide
gcaaucacuuauuuaaagg

SEQ ID NO: 277580 - RNA, 19 nt, Artificial Sequence
  Description of Artificial Sequence: Synthetic oligonucleotide
ucugcuagccauuaggaua

SEQ ID NO: 277581 - RNA, 19 nt, Artificial Sequence
  Description of Artificial Sequence: Synthetic oligonucleotide
uguauuaguuuaucaacaa

SEQ ID NO: 277582 - RNA, 19 nt, Artificial Sequence
  Description of Artificial Sequence: Synthetic oligonucleotide
uuagcuaaugucuucggua

SEQ ID NO: 277583 - RNA, 19 nt, Artificial Sequence
  Description of Artificial Sequence: Synthetic oligonucleotide
ugcaguaaacugaugcuga

SEQ ID NO: 277584 - RNA, 19 nt, Artificial Sequence
  Description of Artificial Sequence: Synthetic oligonucleotide
ugauuuguaucacauuuua

SEQ ID NO: 277585 - RNA, 19 nt, Artificial Sequence
  Description of Artificial Sequence: Synthetic oligonucleotide
uccaauuuagguaucuuuu

SEQ ID NO: 277586 - RNA, 19 nt, Artificial Sequence
  Description of Artificial Sequence: Synthetic oligonucleotide
ugccaaauaaaucuacaau

SEQ ID NO: 277587 - RNA, 19 nt, Artificial Sequence
  Description of Artificial Sequence: Synthetic oligonucleotide
aguauccucuagucguucc

SEQ ID NO: 277588 - RNA, 19 nt, Artificial Sequence
  Description of Artificial Sequence: Synthetic oligonucleotide
cuauuagcuaaugucuucg

SEQ ID NO: 277589 - RNA, 19 nt, Artificial Sequence
  Description of Artificial Sequence: Synthetic oligonucleotide
agaaucuccaauuuaggua

SEQ ID NO: 277590 - RNA, 19 nt, Artificial Sequence
  Description of Artificial Sequence: Synthetic oligonucleotide
uuaaccaacagaagagaau

SEQ ID NO: 277591 - RNA, 19 nt, Artificial Sequence
  Description of Artificial Sequence: Synthetic oligonucleotide
uauuagcuaaugucuucgg

SEQ ID NO: 277592 - RNA, 19 nt, Artificial Sequence
  Description of Artificial Sequence: Synthetic oligonucleotide
uguguacuuaucaggaaaa

SEQ ID NO: 277593 - RNA, 19 nt, Artificial Sequence
  Description of Artificial Sequence: Synthetic oligonucleotide
accgauucuauagaguagg

SEQ ID NO: 277594 - RNA, 19 nt, Artificial Sequence
  Description of Artificial Sequence: Synthetic oligonucleotide
auuuauuaguuccacugaa

SEQ ID NO: 277595 - RNA, 19 nt, Artificial Sequence
  Description of Artificial Sequence: Synthetic oligonucleotide
aauaagugaaaagguaaaa

SEQ ID NO: 277596 - RNA, 19 nt, Artificial Sequence
  Description of Artificial Sequence: Synthetic oligonucleotide
aguuccauacauaacgcuc

SEQ ID NO: 277597 - RNA, 19 nt, Artificial Sequence
  Description of Artificial Sequence: Synthetic oligonucleotide
uggcucuaaacgaacagga

SEQ ID NO: 277598 - RNA, 19 nt, Artificial Sequence
  Description of Artificial Sequence: Synthetic oligonucleotide
ugaccgauucuauagagua

SEQ ID NO: 277599 - RNA, 19 nt, Artificial Sequence
  Description of Artificial Sequence: Synthetic oligonucleotide
aaccaaagagggcugauuu

SEQ ID NO: 277600 - RNA, 19 nt, Artificial Sequence
  Description of Artificial Sequence: Synthetic oligonucleotide
agaauaccagguuucauaa

SEQ ID NO: 277601 - RNA, 19 nt, Artificial Sequence
  Description of Artificial Sequence: Synthetic oligonucleotide
uuagaagaccuagaauucc

SEQ ID NO: 277602 - RNA, 19 nt, Artificial Sequence
  Description of Artificial Sequence: Synthetic oligonucleotide
uuuagguaucuuuuauacu

SEQ ID NO: 277603 - RNA, 19 nt, Artificial Sequence
  Description of Artificial Sequence: Synthetic oligonucleotide
uuuauuaguuccacugaau

SEQ ID NO: 277604 - RNA, 19 nt, Artificial Sequence
  Description of Artificial Sequence: Synthetic oligonucleotide
auuaguuccacugaauaaa

SEQ ID NO: 277605 - RNA, 19 nt, Artificial Sequence
  Description of Artificial Sequence: Synthetic oligonucleotide
ugaauaaaucccugccuug

SEQ ID NO: 277606 - RNA, 19 nt, Artificial Sequence
  Description of Artificial Sequence: Synthetic oligonucleotide
ucgaacaaauggaggauca

SEQ ID NO: 277607 - RNA, 19 nt, Artificial Sequence
  Description of Artificial Sequence: Synthetic oligonucleotide
auuggcucuaaacgaacag

SEQ ID NO: 277608 - RNA, 19 nt, Artificial Sequence
  Description of Artificial Sequence: Synthetic oligonucleotide
acauaacgcuccuccaccc

SEQ ID NO: 277609 - RNA, 19 nt, Artificial Sequence
  Description of Artificial Sequence: Synthetic oligonucleotide
acuugaugcaaguuuacaa

SEQ ID NO: 277610 - RNA, 19 nt, Artificial Sequence
  Description of Artificial Sequence: Synthetic oligonucleotide
uaaaucccugccuuguagc

SEQ ID NO: 277611 - RNA, 19 nt, Artificial Sequence
  Description of Artificial Sequence: Synthetic oligonucleotide
uuauacgggcacucaaaag

SEQ ID NO: 277612 - RNA, 19 nt, Artificial Sequence
  Description of Artificial Sequence: Synthetic oligonucleotide
uuggcucuaaacgaacagg

SEQ ID NO: 277613 - RNA, 19 nt, Artificial Sequence
  Description of Artificial Sequence: Synthetic oligonucleotide
uucgguacugcuguuauac

SEQ ID NO: 277614 - RNA, 19 nt, Artificial Sequence
  Description of Artificial Sequence: Synthetic oligonucleotide
ugcuuaaaauagcuggagu

SEQ ID NO: 277615 - RNA, 19 nt, Artificial Sequence
  Description of Artificial Sequence: Synthetic oligonucleotide
aaugucuaaucaaauguau

SEQ ID NO: 277616 - RNA, 19 nt, Artificial Sequence
  Description of Artificial Sequence: Synthetic oligonucleotide
ccuaaagugagcaaaauga

SEQ ID NO: 277617 - RNA, 19 nt, Artificial Sequence
  Description of Artificial Sequence: Synthetic oligonucleotide
ugcaacaccccguuaauaa

SEQ ID NO: 277618 - RNA, 19 nt, Artificial Sequence
  Description of Artificial Sequence: Synthetic oligonucleotide
aagaccuagaauuccuaaa

SEQ ID NO: 277619 - RNA, 19 nt, Artificial Sequence
  Description of Artificial Sequence: Synthetic oligonucleotide
ugaaugugguuuacaaagu

SEQ ID NO: 277620 - RNA, 19 nt, Artificial Sequence
  Description of Artificial Sequence: Synthetic oligonucleotide
uauaauguacugguuugug

SEQ ID NO: 277621 - RNA, 19 nt, Artificial Sequence
  Description of Artificial Sequence: Synthetic oligonucleotide
ucacuuauuuaaagggaac

SEQ ID NO: 277622 - RNA, 19 nt, Artificial Sequence
  Description of Artificial Sequence: Synthetic oligonucleotide
aaugaucuauuagcuaaug

SEQ ID NO: 277623 - RNA, 19 nt, Artificial Sequence
  Description of Artificial Sequence: Synthetic oligonucleotide
uagcuaaugucuucgguac

SEQ ID NO: 277624 - RNA, 19 nt, Artificial Sequence
  Description of Artificial Sequence: Synthetic oligonucleotide
gaccuagaauuccuaaacc

SEQ ID NO: 277625 - RNA, 19 nt, Artificial Sequence
  Description of Artificial Sequence: Synthetic oligonucleotide
auuaccaaccaaagagggc

SEQ ID NO: 277626 - RNA, 19 nt, Artificial Sequence
  Description of Artificial Sequence: Synthetic oligonucleotide
uguuagauuugggucauca

SEQ ID NO: 277627 - RNA, 19 nt, Artificial Sequence
  Description of Artificial Sequence: Synthetic oligonucleotide
uguccucuuaaccaacaga

SEQ ID NO: 277628 - RNA, 19 nt, Artificial Sequence
  Description of Artificial Sequence: Synthetic oligonucleotide
uauagaguaggcacugcuc

SEQ ID NO: 277629 - RNA, 19 nt, Artificial Sequence
  Description of Artificial Sequence: Synthetic oligonucleotide
ucauacuuccagaaacagu

SEQ ID NO: 277630 - RNA, 19 nt, Artificial Sequence
  Description of Artificial Sequence: Synthetic oligonucleotide
aacagguaacaccacucga

SEQ ID NO: 277631 - RNA, 19 nt, Artificial Sequence
  Description of Artificial Sequence: Synthetic oligonucleotide
uuaggauauuaaagaauuc

SEQ ID NO: 277632 - RNA, 19 nt, Artificial Sequence
  Description of Artificial Sequence: Synthetic oligonucleotide
uauuggcucuaaacgaaca

SEQ ID NO: 277633 - RNA, 19 nt, Artificial Sequence
  Description of Artificial Sequence: Synthetic oligonucleotide
uguuauacgggcacucaaa

SEQ ID NO: 277634 - RNA, 19 nt, Artificial Sequence
  Description of Artificial Sequence: Synthetic oligonucleotide
uccacuaaaugaucuauua

SEQ ID NO: 277635 - RNA, 19 nt, Artificial Sequence
  Description of Artificial Sequence: Synthetic oligonucleotide
gaaucuccaauuuagguau

SEQ ID NO: 277636 - RNA, 19 nt, Artificial Sequence
  Description of Artificial Sequence: Synthetic oligonucleotide
ugguugaucuagcaucuca

SEQ ID NO: 277637 - RNA, 19 nt, Artificial Sequence
  Description of Artificial Sequence: Synthetic oligonucleotide
cuuaguauccucuagucgu

SEQ ID NO: 277638 - RNA, 19 nt, Artificial Sequence
  Description of Artificial Sequence: Synthetic oligonucleotide
guaaaagccacuguaugac

SEQ ID NO: 277639 - RNA, 19 nt, Artificial Sequence
  Description of Artificial Sequence: Synthetic oligonucleotide
aaacuugaugcaaguuuac

SEQ ID NO: 277640 - RNA, 19 nt, Artificial Sequence
  Description of Artificial Sequence: Synthetic oligonucleotide
uucuuaguauccucuaguc

SEQ ID NO: 277641 - RNA, 19 nt, Artificial Sequence
  Description of Artificial Sequence: Synthetic oligonucleotide
uucccugcuugcuuaaaag

SEQ ID NO: 277642 - RNA, 19 nt, Artificial Sequence
  Description of Artificial Sequence: Synthetic oligonucleotide
uccuaauuuucuccaauau

SEQ ID NO: 277643 - RNA, 19 nt, Artificial Sequence
  Description of Artificial Sequence: Synthetic oligonucleotide
uuauuggcucuaaacgaac

SEQ ID NO: 277644 - RNA, 19 nt, Artificial Sequence
  Description of Artificial Sequence: Synthetic oligonucleotide
ccguuaauaagugaaaagg

SEQ ID NO: 277645 - RNA, 19 nt, Artificial Sequence
  Description of Artificial Sequence: Synthetic oligonucleotide
gagucuaucugaugcuugc

SEQ ID NO: 277646 - RNA, 19 nt, Artificial Sequence
  Description of Artificial Sequence: Synthetic oligonucleotide
ugagucuaucugaugcuug

SEQ ID NO: 277647 - RNA, 19 nt, Artificial Sequence
  Description of Artificial Sequence: Synthetic oligonucleotide
agccauuaggauauuaaag

SEQ ID NO: 277648 - RNA, 19 nt, Artificial Sequence
  Description of Artificial Sequence: Synthetic oligonucleotide
augucuucgguacugcugu

SEQ ID NO: 277649 - RNA, 19 nt, Artificial Sequence
  Description of Artificial Sequence: Synthetic oligonucleotide
ugaugaccgauucuauaga

SEQ ID NO: 277650 - RNA, 19 nt, Artificial Sequence
  Description of Artificial Sequence: Synthetic oligonucleotide
aaaugucuaaucaaaugua

SEQ ID NO: 277651 - RNA, 19 nt, Artificial Sequence
  Description of Artificial Sequence: Synthetic oligonucleotide
aucaaauguauaauguacu

SEQ ID NO: 277652 - RNA, 19 nt, Artificial Sequence
  Description of Artificial Sequence: Synthetic oligonucleotide
aaaguacauugauuuguau

SEQ ID NO: 277653 - RNA, 19 nt, Artificial Sequence
  Description of Artificial Sequence: Synthetic oligonucleotide
caguugacagauuauccac

SEQ ID NO: 277654 - RNA, 19 nt, Artificial Sequence
  Description of Artificial Sequence: Synthetic oligonucleotide
agaacagguaacaccacuc

SEQ ID NO: 277655 - RNA, 19 nt, Artificial Sequence
  Description of Artificial Sequence: Synthetic oligonucleotide
uuaguuccacugaauaaau

SEQ ID NO: 277656 - RNA, 19 nt, Artificial Sequence
  Description of Artificial Sequence: Synthetic oligonucleotide
agugauccaaaucuucuau

SEQ ID NO: 277657 - RNA, 19 nt, Artificial Sequence
  Description of Artificial Sequence: Synthetic oligonucleotide
agauuauccacuaaaugau

SEQ ID NO: 277658 - RNA, 19 nt, Artificial Sequence
  Description of Artificial Sequence: Synthetic oligonucleotide
aaaugcugaaccagcaaga

SEQ ID NO: 277659 - RNA, 19 nt, Artificial Sequence
  Description of Artificial Sequence: Synthetic oligonucleotide
gauguugcaguggagugug

SEQ ID NO: 277660 - RNA, 19 nt, Artificial Sequence
  Description of Artificial Sequence: Synthetic oligonucleotide
auuagcuaaugucuucggu

SEQ ID NO: 277661 - RNA, 19 nt, Artificial Sequence
  Description of Artificial Sequence: Synthetic oligonucleotide
cuugcacugacccggacac

SEQ ID NO: 277662 - RNA, 19 nt, Artificial Sequence
  Description of Artificial Sequence: Synthetic oligonucleotide
uccucuuaaccaacagaag

SEQ ID NO: 277663 - RNA, 19 nt, Artificial Sequence
  Description of Artificial Sequence: Synthetic oligonucleotide
uggguagugguugaucuag

SEQ ID NO: 277664 - RNA, 19 nt, Artificial Sequence
  Description of Artificial Sequence: Synthetic oligonucleotide
acaaguguauuaguuuauc

SEQ ID NO: 277665 - RNA, 19 nt, Artificial Sequence
  Description of Artificial Sequence: Synthetic oligonucleotide
ugaccaucaguuaaacuuu

SEQ ID NO: 277666 - RNA, 19 nt, Artificial Sequence
  Description of Artificial Sequence: Synthetic oligonucleotide
cuugaugcaaguuuacaaa

SEQ ID NO: 277667 - RNA, 19 nt, Artificial Sequence
  Description of Artificial Sequence: Synthetic oligonucleotide
aaucugcuagccauuagga

SEQ ID NO: 277668 - RNA, 19 nt, Artificial Sequence
  Description of Artificial Sequence: Synthetic oligonucleotide
augaucuauuagcuaaugu

SEQ ID NO: 277669 - RNA, 19 nt, Artificial Sequence
  Description of Artificial Sequence: Synthetic oligonucleotide
ucuauaucuucagccaucu

SEQ ID NO: 277670 - RNA, 19 nt, Artificial Sequence
  Description of Artificial Sequence: Synthetic oligonucleotide
aggacuguugggcccgugc

SEQ ID NO: 277671 - RNA, 19 nt, Artificial Sequence
  Description of Artificial Sequence: Synthetic oligonucleotide
guuagauuugggucaucag

SEQ ID NO: 277672 - RNA, 19 nt, Artificial Sequence
  Description of Artificial Sequence: Synthetic oligonucleotide
gaguucacauaucaaccac

SEQ ID NO: 277673 - RNA, 19 nt, Artificial Sequence
  Description of Artificial Sequence: Synthetic oligonucleotide
aguuuaucaacaauugcaa

SEQ ID NO: 277674 - RNA, 19 nt, Artificial Sequence
  Description of Artificial Sequence: Synthetic oligonucleotide
ugaucuguagacgucccug

SEQ ID NO: 277675 - RNA, 19 nt, Artificial Sequence
  Description of Artificial Sequence: Synthetic oligonucleotide
ugaugcuugcacugacccg

SEQ ID NO: 277676 - RNA, 19 nt, Artificial Sequence
  Description of Artificial Sequence: Synthetic oligonucleotide
agcuuuaccuaauaugaua

SEQ ID NO: 277677 - RNA, 19 nt, Artificial Sequence
  Description of Artificial Sequence: Synthetic oligonucleotide
aguuaacaauuuaaugaag

SEQ ID NO: 277678 - RNA, 19 nt, Artificial Sequence
  Description of Artificial Sequence: Synthetic oligonucleotide
uuccuaaaccaguauugac

SEQ ID NO: 277679 - RNA, 19 nt, Artificial Sequence
  Description of Artificial Sequence: Synthetic oligonucleotide
uagccauuaggauauuaaa

SEQ ID NO: 277680 - RNA, 19 nt, Artificial Sequence
  Description of Artificial Sequence: Synthetic oligonucleotide
aaguuaagcaaaauauauu

SEQ ID NO: 277681 - RNA, 19 nt, Artificial Sequence
  Description of Artificial Sequence: Synthetic oligonucleotide
uugauuuguaucacauuuu

SEQ ID NO: 277682 - RNA, 19 nt, Artificial Sequence
  Description of Artificial Sequence: Synthetic oligonucleotide
ugugaucuguagacguccc

SEQ ID NO: 277683 - RNA, 19 nt, Artificial Sequence
  Description of Artificial Sequence: Synthetic oligonucleotide
cacucgaacaaauggagga

SEQ ID NO: 277684 - RNA, 19 nt, Artificial Sequence
  Description of Artificial Sequence: Synthetic oligonucleotide
augcugaaccagcaagagg

SEQ ID NO: 277685 - RNA, 19 nt, Artificial Sequence
  Description of Artificial Sequence: Synthetic oligonucleotide
uguaccauucugacccgug

SEQ ID NO: 277686 - RNA, 19 nt, Artificial Sequence
  Description of Artificial Sequence: Synthetic oligonucleotide
aaugugguuuacaaaguua

SEQ ID NO: 277687 - RNA, 19 nt, Artificial Sequence
  Description of Artificial Sequence: Synthetic oligonucleotide
uccagaacugauguuagau

SEQ ID NO: 277688 - RNA, 19 nt, Artificial Sequence
  Description of Artificial Sequence: Synthetic oligonucleotide
gucaaccuuguguaguuug

SEQ ID NO: 277689 - RNA, 19 nt, Artificial Sequence
  Description of Artificial Sequence: Synthetic oligonucleotide
caaagagggcugauuuagg

SEQ ID NO: 277690 - RNA, 19 nt, Artificial Sequence
  Description of Artificial Sequence: Synthetic oligonucleotide
agaucacugugcaaaggac

SEQ ID NO: 277691 - RNA, 19 nt, Artificial Sequence
  Description of Artificial Sequence: Synthetic oligonucleotide
guguauuaguuuaucaaca

SEQ ID NO: 277692 - RNA, 19 nt, Artificial Sequence
  Description of Artificial Sequence: Synthetic oligonucleotide
auacaacuaagaucauacu

SEQ ID NO: 277693 - RNA, 19 nt, Artificial Sequence
  Description of Artificial Sequence: Synthetic oligonucleotide
acauaugucagcguaguua

SEQ ID NO: 277694 - RNA, 19 nt, Artificial Sequence
  Description of Artificial Sequence: Synthetic oligonucleotide
ucccugcuugcuuaaaaga

SEQ ID NO: 277695 - RNA, 19 nt, Artificial Sequence
  Description of Artificial Sequence: Synthetic oligonucleotide
uuauccacuaaaugaucua

SEQ ID NO: 277696 - RNA, 19 nt, Artificial Sequence
  Description of Artificial Sequence: Synthetic oligonucleotide
ugugguuuacaaaguuaaa

SEQ ID NO: 277697 - RNA, 19 nt, Artificial Sequence
  Description of Artificial Sequence: Synthetic oligonucleotide
uauccacuaaaugaucuau

SEQ ID NO: 277698 - RNA, 19 nt, Artificial Sequence
  Description of Artificial Sequence: Synthetic oligonucleotide
cagacauaugucagcguag

SEQ ID NO: 277699 - RNA, 19 nt, Artificial Sequence
  Description of Artificial Sequence: Synthetic oligonucleotide
uggagugugagcggcggcg

SEQ ID NO: 277700 - RNA, 19 nt, Artificial Sequence
  Description of Artificial Sequence: Synthetic oligonucleotide
ucuucgguacugcuguuau

SEQ ID NO: 277701 - RNA, 19 nt, Artificial Sequence
  Description of Artificial Sequence: Synthetic oligonucleotide
uucaugagucuaucugaug

SEQ ID NO: 277702 - RNA, 19 nt, Artificial Sequence
  Description of Artificial Sequence: Synthetic oligonucleotide
uguggcucuucccaagaaa

SEQ ID NO: 277703 - RNA, 19 nt, Artificial Sequence
  Description of Artificial Sequence: Synthetic oligonucleotide
guagggaguggcuacugug

SEQ ID NO: 277704 - RNA, 19 nt, Artificial Sequence
  Description of Artificial Sequence: Synthetic oligonucleotide
agcugucauuuauuaguuc

SEQ ID NO: 277705 - RNA, 19 nt, Artificial Sequence
  Description of Artificial Sequence: Synthetic oligonucleotide
cuuaaccaacagaagagaa

SEQ ID NO: 277706 - RNA, 19 nt, Artificial Sequence
  Description of Artificial Sequence: Synthetic oligonucleotide
auugaccaucaguuaaacu

SEQ ID NO: 277707 - RNA, 19 nt, Artificial Sequence
  Description of Artificial Sequence: Synthetic oligonucleotide
agaaguuaagcaaaauaua

SEQ ID NO: 277708 - RNA, 19 nt, Artificial Sequence
  Description of Artificial Sequence: Synthetic oligonucleotide
gauuauccacuaaaugauc

SEQ ID NO: 277709 - RNA, 19 nt, Artificial Sequence
  Description of Artificial Sequence: Synthetic oligonucleotide
guugaucuagcaucucaac

SEQ ID NO: 277710 - RNA, 19 nt, Artificial Sequence
  Description of Artificial Sequence: Synthetic oligonucleotide
cuagccauuaggauauuaa

SEQ ID NO: 277711 - RNA, 19 nt, Artificial Sequence
  Description of Artificial Sequence: Synthetic oligonucleotide
gaagaccuagaauuccuaa

SEQ ID NO: 277712 - RNA, 19 nt, Artificial Sequence
  Description of Artificial Sequence: Synthetic oligonucleotide
gguaacaccacucgaacaa

SEQ ID NO: 277713 - RNA, 19 nt, Artificial Sequence
  Description of Artificial Sequence: Synthetic oligonucleotide
ccaauauugccaaauuuuc

SEQ ID NO: 277714 - RNA, 19 nt, Artificial Sequence
  Description of Artificial Sequence: Synthetic oligonucleotide
aggauuuugcaaaucuuca

SEQ ID NO: 277715 - RNA, 19 nt, Artificial Sequence
  Description of Artificial Sequence: Synthetic oligonucleotide
ucgguacugcuguuauacg

SEQ ID NO: 277716 - RNA, 19 nt, Artificial Sequence
  Description of Artificial Sequence: Synthetic oligonucleotide
guugcaguggagugugagc

SEQ ID NO: 277717 - RNA, 19 nt, Artificial Sequence
  Description of Artificial Sequence: Synthetic oligonucleotide
aaaugaucuauuagcuaau

SEQ ID NO: 277718 - RNA, 19 nt, Artificial Sequence
  Description of Artificial Sequence: Synthetic oligonucleotide
uuaaauggucuugccuuug

SEQ ID NO: 277719 - RNA, 19 nt, Artificial Sequence
  Description of Artificial Sequence: Synthetic oligonucleotide
gcuuuaccuaauaugauac

SEQ ID NO: 277720 - RNA, 19 nt, Artificial Sequence
  Description of Artificial Sequence: Synthetic oligonucleotide
acaauugcaacaccccguu

SEQ ID NO: 277721 - RNA, 19 nt, Artificial Sequence
  Description of Artificial Sequence: Synthetic oligonucleotide
cauguaucuguacaaugga

SEQ ID NO: 277722 - RNA, 19 nt, Artificial Sequence
  Description of Artificial Sequence: Synthetic oligonucleotide
agugcuuaaaauagcugga

SEQ ID NO: 277723 - RNA, 19 nt, Artificial Sequence
  Description of Artificial Sequence: Synthetic oligonucleotide
gcuuaggaagguuauauaa

SEQ ID NO: 277724 - RNA, 19 nt, Artificial Sequence
  Description of Artificial Sequence: Synthetic oligonucleotide
cagguaacaccacucgaac

SEQ ID NO: 277725 - RNA, 19 nt, Artificial Sequence
  Description of Artificial Sequence: Synthetic oligonucleotide
guguguacuuaucaggaaa

SEQ ID NO: 277726 - RNA, 19 nt, Artificial Sequence
  Description of Artificial Sequence: Synthetic oligonucleotide
guuauacgggcacucaaaa

SEQ ID NO: 277727 - RNA, 19 nt, Artificial Sequence
  Description of Artificial Sequence: Synthetic oligonucleotide
ugcuaugguuuagaagacc

SEQ ID NO: 277728 - RNA, 19 nt, Artificial Sequence
  Description of Artificial Sequence: Synthetic oligonucleotide
gaauaccagguuucauaac

SEQ ID NO: 277729 - RNA, 19 nt, Artificial Sequence
  Description of Artificial Sequence: Synthetic oligonucleotide
agauuugggucaucagagu

SEQ ID NO: 277730 - RNA, 19 nt, Artificial Sequence
  Description of Artificial Sequence: Synthetic oligonucleotide
uuguguaguuugacaugcc

SEQ ID NO: 277731 - RNA, 19 nt, Artificial Sequence
  Description of Artificial Sequence: Synthetic oligonucleotide
agguaacaccacucgaaca

SEQ ID NO: 277732 - RNA, 19 nt, Artificial Sequence
  Description of Artificial Sequence: Synthetic oligonucleotide
gugcuuaaaauagcuggag

SEQ ID NO: 277733 - RNA, 19 nt, Artificial Sequence
  Description of Artificial Sequence: Synthetic oligonucleotide
uuaguauccucuagucguu

SEQ ID NO: 277734 - RNA, 19 nt, Artificial Sequence
  Description of Artificial Sequence: Synthetic oligonucleotide
cugcaguaaacugaugcug

SEQ ID NO: 277735 - RNA, 19 nt, Artificial Sequence
  Description of Artificial Sequence: Synthetic oligonucleotide
caguuguaccauucugacc

SEQ ID NO: 277736 - RNA, 19 nt, Artificial Sequence
  Description of Artificial Sequence: Synthetic oligonucleotide
cuaaacgaacaggauuuug

SEQ ID NO: 277737 - RNA, 19 nt, Artificial Sequence
  Description of Artificial Sequence: Synthetic oligonucleotide
aaccaguauugaccaucag

SEQ ID NO: 277738 - RNA, 19 nt, Artificial Sequence
  Description of Artificial Sequence: Synthetic oligonucleotide
augauacaauacaacuaag

SEQ ID NO: 277739 - RNA, 19 nt, Artificial Sequence
  Description of Artificial Sequence: Synthetic oligonucleotide
aagagaaguuaagcaaaau

SEQ ID NO: 277740 - RNA, 19 nt, Artificial Sequence
  Description of Artificial Sequence: Synthetic oligonucleotide
cuagaauuccuaaaccagu

SEQ ID NO: 277741 - RNA, 19 nt, Artificial Sequence
  Description of Artificial Sequence: Synthetic oligonucleotide
gguaaggcaauaaaaugga

SEQ ID NO: 277742 - RNA, 19 nt, Artificial Sequence
  Description of Artificial Sequence: Synthetic oligonucleotide
uagucguuccagaacugau

SEQ ID NO: 277743 - RNA, 19 nt, Artificial Sequence
  Description of Artificial Sequence: Synthetic oligonucleotide
guuguaccauucugacccg

SEQ ID NO: 277744 - RNA, 19 nt, Artificial Sequence
  Description of Artificial Sequence: Synthetic oligonucleotide
cuacuguguguacuuauca

SEQ ID NO: 277745 - RNA, 19 nt, Artificial Sequence
  Description of Artificial Sequence: Synthetic oligonucleotide
agacauaugucagcguagu

SEQ ID NO: 277746 - RNA, 19 nt, Artificial Sequence
  Description of Artificial Sequence: Synthetic oligonucleotide
agugguugaucuagcaucu

SEQ ID NO: 277747 - RNA, 19 nt, Artificial Sequence
  Description of Artificial Sequence: Synthetic oligonucleotide
cucuaaacgaacaggauuu

SEQ ID NO: 277748 - RNA, 19 nt, Artificial Sequence
  Description of Artificial Sequence: Synthetic oligonucleotide
acuggcaaucacuuauuua

SEQ ID NO: 277749 - RNA, 19 nt, Artificial Sequence
  Description of Artificial Sequence: Synthetic oligonucleotide
gaccgauucuauagaguag

SEQ ID NO: 277750 - RNA, 19 nt, Artificial Sequence
  Description of Artificial Sequence: Synthetic oligonucleotide
cuuuaccuaauaugauaca

SEQ ID NO: 277751 - RNA, 19 nt, Artificial Sequence
  Description of Artificial Sequence: Synthetic oligonucleotide
aguggagugugagcggcgg

SEQ ID NO: 277752 - RNA, 19 nt, Artificial Sequence
  Description of Artificial Sequence: Synthetic oligonucleotide
aagauggguaagauuccgu

SEQ ID NO: 277753 - RNA, 19 nt, Artificial Sequence
  Description of Artificial Sequence: Synthetic oligonucleotide
ugcuuaggaagguuauaua

SEQ ID NO: 277754 - RNA, 19 nt, Artificial Sequence
  Description of Artificial Sequence: Synthetic oligonucleotide
aguugacagauuauccacu

SEQ ID NO: 277755 - RNA, 19 nt, Artificial Sequence
  Description of Artificial Sequence: Synthetic oligonucleotide
acaauuuaaugaagaggcu

SEQ ID NO: 277756 - RNA, 19 nt, Artificial Sequence
  Description of Artificial Sequence: Synthetic oligonucleotide
cccguuaauaagugaaaag

SEQ ID NO: 277757 - RNA, 19 nt, Artificial Sequence
  Description of Artificial Sequence: Synthetic oligonucleotide
augcuaugguuuagaagac

SEQ ID NO: 277758 - RNA, 19 nt, Artificial Sequence
  Description of Artificial Sequence: Synthetic oligonucleotide
uugggcccgugcuagauua

SEQ ID NO: 277759 - RNA, 19 nt, Artificial Sequence
  Description of Artificial Sequence: Synthetic oligonucleotide
aggaucaaauggaaaauua

SEQ ID NO: 277760 - RNA, 19 nt, Artificial Sequence
  Description of Artificial Sequence: Synthetic oligonucleotide
ucuuugugccaaucacuuc

SEQ ID NO: 277761 - RNA, 19 nt, Artificial Sequence
  Description of Artificial Sequence: Synthetic oligonucleotide
acagguaacaccacucgaa

SEQ ID NO: 277762 - RNA, 19 nt, Artificial Sequence
  Description of Artificial Sequence: Synthetic oligonucleotide
cugcagaguucacauauca

SEQ ID NO: 277763 - RNA, 19 nt, Artificial Sequence
  Description of Artificial Sequence: Synthetic oligonucleotide
aucugcuagccauuaggau

SEQ ID NO: 277764 - RNA, 19 nt, Artificial Sequence
  Description of Artificial Sequence: Synthetic oligonucleotide
ccucuuaaccaacagaaga

SEQ ID NO: 277765 - RNA, 19 nt, Artificial Sequence
  Description of Artificial Sequence: Synthetic oligonucleotide
ccacuaaaugaucuauuag

SEQ ID NO: 277766 - RNA, 19 nt, Artificial Sequence
  Description of Artificial Sequence: Synthetic oligonucleotide
agcuggaguuuauauuuaa

SEQ ID NO: 277767 - RNA, 19 nt, Artificial Sequence
  Description of Artificial Sequence: Synthetic oligonucleotide
cuuaggaagguuauauaau

SEQ ID NO: 277768 - RNA, 19 nt, Artificial Sequence
  Description of Artificial Sequence: Synthetic oligonucleotide
aacuaagaucauacuucca

SEQ ID NO: 277769 - RNA, 19 nt, Artificial Sequence
  Description of Artificial Sequence: Synthetic oligonucleotide
cauauaagcugucauuuau

SEQ ID NO: 277770 - RNA, 19 nt, Artificial Sequence
  Description of Artificial Sequence: Synthetic oligonucleotide
auacgggcacucaaaagcu

SEQ ID NO: 277771 - RNA, 19 nt, Artificial Sequence
  Description of Artificial Sequence: Synthetic oligonucleotide
uuaugucugcacguuggaa

SEQ ID NO: 277772 - RNA, 19 nt, Artificial Sequence
  Description of Artificial Sequence: Synthetic oligonucleotide
cucgaacaaauggaggauc

SEQ ID NO: 277773 - RNA, 19 nt, Artificial Sequence
  Description of Artificial Sequence: Synthetic oligonucleotide
agauaccuaaagugagcaa

SEQ ID NO: 277774 - RNA, 19 nt, Artificial Sequence
  Description of Artificial Sequence: Synthetic oligonucleotide
aguggcuacuguguguacu

SEQ ID NO: 277775 - RNA, 19 nt, Artificial Sequence
  Description of Artificial Sequence: Synthetic oligonucleotide
gucguuccagaacugaugu

SEQ ID NO: 277776 - RNA, 19 nt, Artificial Sequence
  Description of Artificial Sequence: Synthetic oligonucleotide
uucuggucuuuugauguaa

SEQ ID NO: 277777 - RNA, 19 nt, Artificial Sequence
  Description of Artificial Sequence: Synthetic oligonucleotide
ucugacccguggguagugg

SEQ ID NO: 277778 - RNA, 19 nt, Artificial Sequence
  Description of Artificial Sequence: Synthetic oligonucleotide
uagcuggaguuuauauuua

SEQ ID NO: 277779 - RNA, 19 nt, Artificial Sequence
  Description of Artificial Sequence: Synthetic oligonucleotide
agcuaaugucuucgguacu

SEQ ID NO: 277780 - RNA, 19 nt, Artificial Sequence
  Description of Artificial Sequence: Synthetic oligonucleotide
aucagaguccacaaaccau

SEQ ID NO: 277781 - RNA, 19 nt, Artificial Sequence
  Description of Artificial Sequence: Synthetic oligonucleotide
caugaugaccgauucuaua

SEQ ID NO: 277782 - RNA, 19 nt, Artificial Sequence
  Description of Artificial Sequence: Synthetic oligonucleotide
gacccguggguagugguug

SEQ ID NO: 277783 - RNA, 19 nt, Artificial Sequence
  Description of Artificial Sequence: Synthetic oligonucleotide
gaccugaaaaugcuauggu

SEQ ID NO: 277784 - RNA, 19 nt, Artificial Sequence
  Description of Artificial Sequence: Synthetic oligonucleotide
ugcuguuauacgggcacuc

SEQ ID NO: 277785 - RNA, 19 nt, Artificial Sequence
  Description of Artificial Sequence: Synthetic oligonucleotide
acugugcaaaggacuauca

SEQ ID NO: 277786 - RNA, 19 nt, Artificial Sequence
  Description of Artificial Sequence: Synthetic oligonucleotide
gguagugguugaucuagca

SEQ ID NO: 277787 - RNA, 19 nt, Artificial Sequence
  Description of Artificial Sequence: Synthetic oligonucleotide
cuauagaguaggcacugcu

SEQ ID NO: 277788 - RNA, 19 nt, Artificial Sequence
  Description of Artificial Sequence: Synthetic oligonucleotide
ucuaaacgaacaggauuuu

SEQ ID NO: 277789 - RNA, 19 nt, Artificial Sequence
  Description of Artificial Sequence: Synthetic oligonucleotide
gcuaugugagcacuggcaa

SEQ ID NO: 277790 - RNA, 19 nt, Artificial Sequence
  Description of Artificial Sequence: Synthetic oligonucleotide
gaaccaagugagcaagaau

SEQ ID NO: 277791 - RNA, 19 nt, Artificial Sequence
  Description of Artificial Sequence: Synthetic oligonucleotide
agguucagcccagcaggac

SEQ ID NO: 277792 - RNA, 19 nt, Artificial Sequence
  Description of Artificial Sequence: Synthetic oligonucleotide
gacuaucagagucaaccuu

SEQ ID NO: 277793 - RNA, 19 nt, Artificial Sequence
  Description of Artificial Sequence: Synthetic oligonucleotide
acaccccguuaauaaguga

SEQ ID NO: 277794 - RNA, 19 nt, Artificial Sequence
  Description of Artificial Sequence: Synthetic oligonucleotide
acuugcuaugugagcacug

SEQ ID NO: 277795 - RNA, 19 nt, Artificial Sequence
  Description of Artificial Sequence: Synthetic oligonucleotide
agucuaucugaugcuugca

SEQ ID NO: 277796 - RNA, 19 nt, Artificial Sequence
  Description of Artificial Sequence: Synthetic oligonucleotide
augagucuaucugaugcuu

SEQ ID NO: 277797 - RNA, 19 nt, Artificial Sequence
  Description of Artificial Sequence: Synthetic oligonucleotide
cacguuggaacgauuuucu

SEQ ID NO: 277798 - RNA, 19 nt, Artificial Sequence
  Description of Artificial Sequence: Synthetic oligonucleotide
caacaccccguuaauaagu

SEQ ID NO: 277799 - RNA, 19 nt, Artificial Sequence
  Description of Artificial Sequence: Synthetic oligonucleotide
uagacgucccugagcuccu

SEQ ID NO: 277800 - RNA, 19 nt, Artificial Sequence
  Description of Artificial Sequence: Synthetic oligonucleotide
cuagucguuccagaacuga

SEQ ID NO: 277801 - RNA, 19 nt, Artificial Sequence
  Description of Artificial Sequence: Synthetic oligonucleotide
ggcacucaaaagcuuaugu

SEQ ID NO: 277802 - RNA, 19 nt, Artificial Sequence
  Description of Artificial Sequence: Synthetic oligonucleotide
ugacccguggguagugguu

SEQ ID NO: 277803 - RNA, 19 nt, Artificial Sequence
  Description of Artificial Sequence: Synthetic oligonucleotide
agaguccacaaaccauauu

SEQ ID NO: 277804 - RNA, 19 nt, Artificial Sequence
  Description of Artificial Sequence: Synthetic oligonucleotide
cuguuauacgggcacucaa

SEQ ID NO: 277805 - RNA, 19 nt, Artificial Sequence
  Description of Artificial Sequence: Synthetic oligonucleotide
uucccauuaauagguucuu

SEQ ID NO: 277806 - RNA, 19 nt, Artificial Sequence
  Description of Artificial Sequence: Synthetic oligonucleotide
gcuguaaaucugcuagcca

SEQ ID NO: 277807 - RNA, 19 nt, Artificial Sequence
  Description of Artificial Sequence: Synthetic oligonucleotide
ggcgagugcgggcugcccg

SEQ ID NO: 277808 - RNA, 19 nt, Artificial Sequence
  Description of Artificial Sequence: Synthetic oligonucleotide
guaguuagccaucuuccuu

SEQ ID NO: 277809 - RNA, 19 nt, Artificial Sequence
  Description of Artificial Sequence: Synthetic oligonucleotide
ugguagggaguggcuacug

SEQ ID NO: 277810 - RNA, 19 nt, Artificial Sequence
  Description of Artificial Sequence: Synthetic oligonucleotide
uaguauccucuagucguuc

SEQ ID NO: 277811 - RNA, 19 nt, Artificial Sequence
  Description of Artificial Sequence: Synthetic oligonucleotide
auaauguauucaagauuuu

SEQ ID NO: 277812 - RNA, 19 nt, Artificial Sequence
  Description of Artificial Sequence: Synthetic oligonucleotide
gcucaauauaggaagguua

SEQ ID NO: 277813 - RNA, 19 nt, Artificial Sequence
  Description of Artificial Sequence: Synthetic oligonucleotide
ucugcacguuggaacgauu

SEQ ID NO: 277814 - RNA, 19 nt, Artificial Sequence
  Description of Artificial Sequence: Synthetic oligonucleotide
guauaauguacugguuugu

SEQ ID NO: 277815 - RNA, 19 nt, Artificial Sequence
  Description of Artificial Sequence: Synthetic oligonucleotide
gaggaucaaauggaaaauu

SEQ ID NO: 277816 - RNA, 19 nt, Artificial Sequence
  Description of Artificial Sequence: Synthetic oligonucleotide
auucugacccguggguagu

SEQ ID NO: 277817 - RNA, 19 nt, Artificial Sequence
  Description of Artificial Sequence: Synthetic oligonucleotide
cauaacgcuccuccaccca

SEQ ID NO: 277818 - RNA, 19 nt, Artificial Sequence
  Description of Artificial Sequence: Synthetic oligonucleotide
cuucccugcuugcuuaaaa

SEQ ID NO: 277819 - RNA, 19 nt, Artificial Sequence
  Description of Artificial Sequence: Synthetic oligonucleotide
gcuaugguuuagaagaccu

SEQ ID NO: 277820 - RNA, 19 nt, Artificial Sequence
  Description of Artificial Sequence: Synthetic oligonucleotide
agaagaccuagaauuccua

SEQ ID NO: 277821 - RNA, 19 nt, Artificial Sequence
  Description of Artificial Sequence: Synthetic oligonucleotide
ggcccagacauaugucagc

SEQ ID NO: 277822 - RNA, 19 nt, Artificial Sequence
  Description of Artificial Sequence: Synthetic oligonucleotide
cugaugcuuugaagaguuc

SEQ ID NO: 277823 - RNA, 19 nt, Artificial Sequence
  Description of Artificial Sequence: Synthetic oligonucleotide
gugcuuaggaagguuauau

SEQ ID NO: 277824 - RNA, 19 nt, Artificial Sequence
  Description of Artificial Sequence: Synthetic oligonucleotide
acguuggaacgauuuucuu

SEQ ID NO: 277825 - RNA, 19 nt, Artificial Sequence
  Description of Artificial Sequence: Synthetic oligonucleotide
gcuagauuauacugauucu

SEQ ID NO: 277826 - RNA, 19 nt, Artificial Sequence
  Description of Artificial Sequence: Synthetic oligonucleotide
ccgauucuauagaguaggc

SEQ ID NO: 277827 - RNA, 19 nt, Artificial Sequence
  Description of Artificial Sequence: Synthetic oligonucleotide
gcucuaaacgaacaggauu

SEQ ID NO: 277828 - RNA, 19 nt, Artificial Sequence
  Description of Artificial Sequence: Synthetic oligonucleotide
uucugacccguggguagug

SEQ ID NO: 277829 - RNA, 19 nt, Artificial Sequence
  Description of Artificial Sequence: Synthetic oligonucleotide
cuaucagagucaaccuugu

SEQ ID NO: 277830 - RNA, 19 nt, Artificial Sequence
  Description of Artificial Sequence: Synthetic oligonucleotide
cguuaauaagugaaaaggu

SEQ ID NO: 277831 - RNA, 19 nt, Artificial Sequence
  Description of Artificial Sequence: Synthetic oligonucleotide
gcacguuggaacgauuuuc

SEQ ID NO: 277832 - RNA, 19 nt, Artificial Sequence
  Description of Artificial Sequence: Synthetic oligonucleotide
gcuugcacugacccggaca

SEQ ID NO: 277833 - RNA, 19 nt, Artificial Sequence
  Description of Artificial Sequence: Synthetic oligonucleotide
gagugcgggcugcccggcg

SEQ ID NO: 277834 - RNA, 19 nt, Artificial Sequence
  Description of Artificial Sequence: Synthetic oligonucleotide
gcugcaguaaacugaugcu

SEQ ID NO: 277835 - RNA, 19 nt, Artificial Sequence
  Description of Artificial Sequence: Synthetic oligonucleotide
guaacaccacucgaacaaa

SEQ ID NO: 277836 - RNA, 19 nt, Artificial Sequence
  Description of Artificial Sequence: Synthetic oligonucleotide
ggaucaaauggaaaauuau

SEQ ID NO: 277837 - RNA, 19 nt, Artificial Sequence
  Description of Artificial Sequence: Synthetic oligonucleotide
ccagacauaugucagcgua

SEQ ID NO: 277838 - RNA, 19 nt, Artificial Sequence
  Description of Artificial Sequence: Synthetic oligonucleotide
guggagugugagcggcggc

SEQ ID NO: 277839 - RNA, 19 nt, Artificial Sequence
  Description of Artificial Sequence: Synthetic oligonucleotide
aggugcuuaggaagguuau

SEQ ID NO: 277840 - RNA, 19 nt, Artificial Sequence
  Description of Artificial Sequence: Synthetic oligonucleotide
ccgugcuagauuauacuga

SEQ ID NO: 277841 - RNA, 19 nt, Artificial Sequence
  Description of Artificial Sequence: Synthetic oligonucleotide
uuagaccuucaggcucuac

SEQ ID NO: 277842 - RNA, 19 nt, Artificial Sequence
  Description of Artificial Sequence: Synthetic oligonucleotide
ggacuaucagagucaaccu

SEQ ID NO: 277843 - RNA, 19 nt, Artificial Sequence
  Description of Artificial Sequence: Synthetic oligonucleotide
acgggcacucaaaagcuua

SEQ ID NO: 277844 - RNA, 19 nt, Artificial Sequence
  Description of Artificial Sequence: Synthetic oligonucleotide
ccucauacuuuagaccuuc

SEQ ID NO: 277845 - RNA, 19 nt, Artificial Sequence
  Description of Artificial Sequence: Synthetic oligonucleotide
ccaacacauacccuccuga

SEQ ID NO: 277846 - RNA, 19 nt, Artificial Sequence
  Description of Artificial Sequence: Synthetic oligonucleotide
cacaaguguauuaguuuau

SEQ ID NO: 277847 - RNA, 19 nt, Artificial Sequence
  Description of Artificial Sequence: Synthetic oligonucleotide
accccguuaauaagugaaa

SEQ ID NO: 277848 - RNA, 19 nt, Artificial Sequence
  Description of Artificial Sequence: Synthetic oligonucleotide
ccugagagaacagguaaca

SEQ ID NO: 277849 - RNA, 19 nt, Artificial Sequence
  Description of Artificial Sequence: Synthetic oligonucleotide
guggguagugguugaucua

SEQ ID NO: 277850 - RNA, 19 nt, Artificial Sequence
  Description of Artificial Sequence: Synthetic oligonucleotide
cacuucaauugcugacgaa

SEQ ID NO: 277851 - RNA, 19 nt, Artificial Sequence
  Description of Artificial Sequence: Synthetic oligonucleotide
caaggaguccugucuuugu

SEQ ID NO: 277852 - RNA, 19 nt, Artificial Sequence
  Description of Artificial Sequence: Synthetic oligonucleotide
gacauaugucagcguaguu

SEQ ID NO: 277853 - RNA, 19 nt, Artificial Sequence
  Description of Artificial Sequence: Synthetic oligonucleotide
ugucuucgguacugcuguu

SEQ ID NO: 277854 - RNA, 19 nt, Artificial Sequence
  Description of Artificial Sequence: Synthetic oligonucleotide
guggcuacuguguguacuu

SEQ ID NO: 277855 - RNA, 19 nt, Artificial Sequence
  Description of Artificial Sequence: Synthetic oligonucleotide
caacauuggcccagacaua

SEQ ID NO: 277856 - RNA, 19 nt, Artificial Sequence
  Description of Artificial Sequence: Synthetic oligonucleotide
ggaggaucaaauggaaaau

SEQ ID NO: 277857 - RNA, 19 nt, Artificial Sequence
  Description of Artificial Sequence: Synthetic oligonucleotide
gugaucuguagacgucccu

SEQ ID NO: 277858 - RNA, 19 nt, Artificial Sequence
  Description of Artificial Sequence: Synthetic oligonucleotide
cagcuuuaccuaauaugau

SEQ ID NO: 277859 - RNA, 19 nt, Artificial Sequence
  Description of Artificial Sequence: Synthetic oligonucleotide
ggguagugguugaucuagc

SEQ ID NO: 277860 - RNA, 19 nt, Artificial Sequence
  Description of Artificial Sequence: Synthetic oligonucleotide
ugggcccgugcuagauuau

SEQ ID NO: 277861 - RNA, 19 nt, Artificial Sequence
  Description of Artificial Sequence: Synthetic oligonucleotide
ggcccgugcuagauuauac

SEQ ID NO: 277862 - RNA, 19 nt, Artificial Sequence
  Description of Artificial Sequence: Synthetic oligonucleotide
gggcacucaaaagcuuaug

SEQ ID NO: 277863 - RNA, 19 nt, Artificial Sequence
  Description of Artificial Sequence: Synthetic oligonucleotide
uugcacugacccggacacu

SEQ ID NO: 277864 - RNA, 19 nt, Artificial Sequence
  Description of Artificial Sequence: Synthetic oligonucleotide
ugccaccccaguggaaauu

SEQ ID NO: 277865 - RNA, 19 nt, Artificial Sequence
  Description of Artificial Sequence: Synthetic oligonucleotide
accucauacuuuagaccuu

SEQ ID NO: 277866 - RNA, 19 nt, Artificial Sequence
  Description of Artificial Sequence: Synthetic oligonucleotide
cuucgguacugcuguuaua

SEQ ID NO: 277867 - RNA, 19 nt, Artificial Sequence
  Description of Artificial Sequence: Synthetic oligonucleotide
cuuaggcuuaaggaacuuu

SEQ ID NO: 277868 - RNA, 19 nt, Artificial Sequence
  Description of Artificial Sequence: Synthetic oligonucleotide
gugguugaucuagcaucuc

SEQ ID NO: 277869 - RNA, 19 nt, Artificial Sequence
  Description of Artificial Sequence: Synthetic oligonucleotide
cugacuucccugcuugcuu

SEQ ID NO: 277870 - RNA, 19 nt, Artificial Sequence
  Description of Artificial Sequence: Synthetic oligonucleotide
caauugcaacaccccguua

SEQ ID NO: 277871 - RNA, 19 nt, Artificial Sequence
  Description of Artificial Sequence: Synthetic oligonucleotide
gguagggaguggcuacugu

SEQ ID NO: 277872 - RNA, 19 nt, Artificial Sequence
  Description of Artificial Sequence: Synthetic oligonucleotide
ccauuaauagguucuucuu

SEQ ID NO: 277873 - RNA, 19 nt, Artificial Sequence
  Description of Artificial Sequence: Synthetic oligonucleotide
cgauucuauagaguaggca

SEQ ID NO: 277874 - RNA, 19 nt, Artificial Sequence
  Description of Artificial Sequence: Synthetic oligonucleotide
ggcuacuguguguacuuau

SEQ ID NO: 277875 - RNA, 19 nt, Artificial Sequence
  Description of Artificial Sequence: Synthetic oligonucleotide
ccagcccuguuuuguaaga

SEQ ID NO: 277876 - RNA, 19 nt, Artificial Sequence
  Description of Artificial Sequence: Synthetic oligonucleotide
ggugcuuaggaagguuaua

SEQ ID NO: 277877 - RNA, 19 nt, Artificial Sequence
  Description of Artificial Sequence: Synthetic oligonucleotide
cugacccguggguaguggu

SEQ ID NO: 277878 - RNA, 19 nt, Artificial Sequence
  Description of Artificial Sequence: Synthetic oligonucleotide
cguggguagugguugaucu

SEQ ID NO: 277879 - RNA, 19 nt, Artificial Sequence
  Description of Artificial Sequence: Synthetic oligonucleotide
gcccgugcuagauuauacu

SEQ ID NO: 277880 - RNA, 19 nt, Artificial Sequence
  Description of Artificial Sequence: Synthetic oligonucleotide
ccugcuugcuuaaaagauu

SEQ ID NO: 277881 - RNA, 19 nt, Artificial Sequence
  Description of Artificial Sequence: Synthetic oligonucleotide
ccccguuaauaagugaaaa

SEQ ID NO: 277882 - RNA, 19 nt, Artificial Sequence
  Description of Artificial Sequence: Synthetic oligonucleotide
cgugcuagauuauacugau

SEQ ID NO: 277883 - RNA, 19 nt, Artificial Sequence
  Description of Artificial Sequence: Synthetic oligonucleotide
ccaccccaguggaaauuac

SEQ ID NO: 277884 - RNA, 19 nt, Artificial Sequence
  Description of Artificial Sequence: Synthetic oligonucleotide
cacucgggccuugccuuuc

SEQ ID NO: 277885 - RNA, 19 nt, Artificial Sequence
  Description of Artificial Sequence: Synthetic oligonucleotide
gcuagccauuaggauauua

SEQ ID NO: 277886 - RNA, 19 nt, Artificial Sequence
  Description of Artificial Sequence: Synthetic oligonucleotide
gugguagggaguggcuacu

SEQ ID NO: 277887 - RNA, 19 nt, Artificial Sequence
  Description of Artificial Sequence: Synthetic oligonucleotide
cguuggaacgauuuucuuu

SEQ ID NO: 277888 - RNA, 19 nt, Artificial Sequence
  Description of Artificial Sequence: Synthetic oligonucleotide
agguggcguugaucugcau

SEQ ID NO: 277889 - RNA, 19 nt, Artificial Sequence
  Description of Artificial Sequence: Synthetic oligonucleotide
guugggcccgugcuagauu

SEQ ID NO: 277890 - RNA, 19 nt, Artificial Sequence
  Description of Artificial Sequence: Synthetic oligonucleotide
gucugcacguuggaacgau

SEQ ID NO: 277891 - RNA, 19 nt, Artificial Sequence
  Description of Artificial Sequence: Synthetic oligonucleotide
ugcuagccauuaggauauu

SEQ ID NO: 277892 - RNA, 19 nt, Artificial Sequence
  Description of Artificial Sequence: Synthetic oligonucleotide
ccguggguagugguugauc

SEQ ID NO: 277893 - RNA, 19 nt, Artificial Sequence
  Description of Artificial Sequence: Synthetic oligonucleotide
ccauucugacccgugggua

SEQ ID NO: 277894 - RNA, 19 nt, Artificial Sequence
  Description of Artificial Sequence: Synthetic oligonucleotide
cgaacaggauuuugcaaau

SEQ ID NO: 277895 - RNA, 19 nt, Artificial Sequence
  Description of Artificial Sequence: Synthetic oligonucleotide
gcaugaugaccgauucuau

SEQ ID NO: 277896 - RNA, 19 nt, Artificial Sequence
  Description of Artificial Sequence: Synthetic oligonucleotide
ggcugcccggcggcggcgg

SEQ ID NO: 277897 - RNA, 19 nt, Artificial Sequence
  Description of Artificial Sequence: Synthetic oligonucleotide
gugcuagauuauacugauu

SEQ ID NO: 277898 - RNA, 19 nt, Artificial Sequence
  Description of Artificial Sequence: Synthetic oligonucleotide
gggcccgugcuagauuaua

SEQ ID NO: 277899 - RNA, 19 nt, Artificial Sequence
  Description of Artificial Sequence: Synthetic oligonucleotide
gcggcgagugcgggcugcc

SEQ ID NO: 277900 - RNA, 19 nt, Artificial Sequence
  Description of Artificial Sequence: Synthetic oligonucleotide
cgagugcgggcugcccggc

SEQ ID NO: 277901 - RNA, 19 nt, Artificial Sequence
  Description of Artificial Sequence: Synthetic oligonucleotide
cgggcacucaaaagcuuau

SEQ ID NO: 277902 - RNA, 19 nt, Artificial Sequence
  Description of Artificial Sequence: Synthetic oligonucleotide
cggcgagugcgggcugccc

SEQ ID NO: 277903 - RNA, 19 nt, Artificial Sequence
  Description of Artificial Sequence: Synthetic oligonucleotide
aaaacuaucaaucaaggca

SEQ ID NO: 277904 - RNA, 19 nt, Artificial Sequence
  Description of Artificial Sequence: Synthetic oligonucleotide
aaauaaaacuauuuggguc

SEQ ID NO: 277905 - RNA, 19 nt, Artificial Sequence
  Description of Artificial Sequence: Synthetic oligonucleotide
aauauuaaguuuuauacaa

SEQ ID NO: 277906 - RNA, 19 nt, Artificial Sequence
  Description of Artificial Sequence: Synthetic oligonucleotide
acuguuuugaaauguagcc

SEQ ID NO: 277907 - RNA, 19 nt, Artificial Sequence
  Description of Artificial Sequence: Synthetic oligonucleotide
aaagagaugauauuguccu

SEQ ID NO: 277908 - RNA, 19 nt, Artificial Sequence
  Description of Artificial Sequence: Synthetic oligonucleotide
aauugugagaaauggaaag

SEQ ID NO: 277909 - RNA, 19 nt, Artificial Sequence
  Description of Artificial Sequence: Synthetic oligonucleotide
aacucugacacauccaugg

SEQ ID NO: 277910 - RNA, 19 nt, Artificial Sequence
  Description of Artificial Sequence: Synthetic oligonucleotide
  modified_base (19)..(19): a, c, u, g, unknown or other
uguacuaccagauuuaaan

SEQ ID NO: 277911 - RNA, 19 nt, Artificial Sequence
  Description of Artificial Sequence: Synthetic oligonucleotide
uuuauagucaaaugaaucu

SEQ ID NO: 277912 - RNA, 19 nt, Artificial Sequence
  Description of Artificial Sequence: Synthetic oligonucleotide
  modified_base (7)..(7): a, c, u, g, unknown or other
uuuaaanaagcauuuaauu

SEQ ID NO: 277913 - RNA, 19 nt, Artificial Sequence
  Description of Artificial Sequence: Synthetic oligonucleotide
aaauggaaagguaauggcc

SEQ ID NO: 277914 - RNA, 19 nt, Artificial Sequence
  Description of Artificial Sequence: Synthetic oligonucleotide
  modified_base (6)..(6): a, c, u, g, unknown or other
uuaaanaagcauuuaauua

SEQ ID NO: 277915 - RNA, 19 nt, Artificial Sequence
  Description of Artificial Sequence: Synthetic oligonucleotide
ugagcaauuaagcaaacac

SEQ ID NO: 277916 - RNA, 19 nt, Artificial Sequence
  Description of Artificial Sequence: Synthetic oligonucleotide
  modified_base (2)..(2): a, c, u, g, unknown or other
anaagcauuuaauuaagau

SEQ ID NO: 277917 - RNA, 19 nt, Artificial Sequence
  Description of Artificial Sequence: Synthetic oligonucleotide
ugauacuuuuacauaaucc

SEQ ID NO: 277918 - RNA, 19 nt, Artificial Sequence
  Description of Artificial Sequence: Synthetic oligonucleotide
uuaguuaggacggaguugg

SEQ ID NO: 277919 - RNA, 19 nt, Artificial Sequence
  Description of Artificial Sequence: Synthetic oligonucleotide
aauaucauagacucugcgu

SEQ ID NO: 277920 - RNA, 19 nt, Artificial Sequence
  Description of Artificial Sequence: Synthetic oligonucleotide
aaacuaucaaucaaggcag

SEQ ID NO: 277921 - RNA, 19 nt, Artificial Sequence
  Description of Artificial Sequence: Synthetic oligonucleotide
aacguuuucauaucgcuca

SEQ ID NO: 277922 - RNA, 19 nt, Artificial Sequence
  Description of Artificial Sequence: Synthetic oligonucleotide
acaaaaugagcaauuaagc

SEQ ID NO: 277923 - RNA, 19 nt, Artificial Sequence
  Description of Artificial Sequence: Synthetic oligonucleotide
uaugaguaaagaaaauaug

SEQ ID NO: 277924 - RNA, 19 nt, Artificial Sequence
  Description of Artificial Sequence: Synthetic oligonucleotide
auuaguguguguuagaaaa

SEQ ID NO: 277925 - RNA, 19 nt, Artificial Sequence
  Description of Artificial Sequence: Synthetic oligonucleotide
ugaucuauuaggaagcccu

SEQ ID NO: 277926 - RNA, 19 nt, Artificial Sequence
  Description of Artificial Sequence: Synthetic oligonucleotide
auugauucaaagaugauug

SEQ ID NO: 277927 - RNA, 19 nt, Artificial Sequence
  Description of Artificial Sequence: Synthetic oligonucleotide
aaagccuguuuccagcuac

SEQ ID NO: 277928 - RNA, 19 nt, Artificial Sequence
  Description of Artificial Sequence: Synthetic oligonucleotide
aauguagccaacgaauauc

SEQ ID NO: 277929 - RNA, 19 nt, Artificial Sequence
  Description of Artificial Sequence: Synthetic oligonucleotide
aaugauuaguguguguuag

SEQ ID NO: 277930 - RNA, 19 nt, Artificial Sequence
  Description of Artificial Sequence: Synthetic oligonucleotide
ugaaauguagccaacgaau

SEQ ID NO: 277931 - RNA, 19 nt, Artificial Sequence
  Description of Artificial Sequence: Synthetic oligonucleotide
  modified_base (4)..(4): a, c, u, g, unknown or other
aaanaagcauuuaauuaag

SEQ ID NO: 277932 - RNA, 19 nt, Artificial Sequence
  Description of Artificial Sequence: Synthetic oligonucleotide
agaaaagccuguuuccagc

SEQ ID NO: 277933 - RNA, 19 nt, Artificial Sequence
  Description of Artificial Sequence: Synthetic oligonucleotide
auagcagauauuuuaaagu

SEQ ID NO: 277934 - RNA, 19 nt, Artificial Sequence
  Description of Artificial Sequence: Synthetic oligonucleotide
gauaauguguuguacauaa

SEQ ID NO: 277935 - RNA, 19 nt, Artificial Sequence
  Description of Artificial Sequence: Synthetic oligonucleotide
aguuccuuaaaauggaugu

SEQ ID NO: 277936 - RNA, 19 nt, Artificial Sequence
  Description of Artificial Sequence: Synthetic oligonucleotide
aaauaugucugaaagguga

SEQ ID NO: 277937 - RNA, 19 nt, Artificial Sequence
  Description of Artificial Sequence: Synthetic oligonucleotide
uuaggggcgacacacaggc

SEQ ID NO: 277938 - RNA, 19 nt, Artificial Sequence
  Description of Artificial Sequence: Synthetic oligonucleotide
auuucugaccccaugaugg

SEQ ID NO: 277939 - RNA, 19 nt, Artificial Sequence
  Description of Artificial Sequence: Synthetic oligonucleotide
aaauuucguauuuuauucu

SEQ ID NO: 277940 - RNA, 19 nt, Artificial Sequence
  Description of Artificial Sequence: Synthetic oligonucleotide
aaggguugcaccuucgaug

SEQ ID NO: 277941 - RNA, 19 nt, Artificial Sequence
  Description of Artificial Sequence: Synthetic oligonucleotide
uauagucaaaugaaucuga

SEQ ID NO: 277942 - RNA, 19 nt, Artificial Sequence
  Description of Artificial Sequence: Synthetic oligonucleotide
accggucugaaccagauag

SEQ ID NO: 277943 - RNA, 19 nt, Artificial Sequence
  Description of Artificial Sequence: Synthetic oligonucleotide
uuugaaauguagccaacga

SEQ ID NO: 277944 - RNA, 19 nt, Artificial Sequence
  Description of Artificial Sequence: Synthetic oligonucleotide
uucguuucuggacauuccg

SEQ ID NO: 277945 - RNA, 19 nt, Artificial Sequence
  Description of Artificial Sequence: Synthetic oligonucleotide
acuacuucauagcagauau

SEQ ID NO: 277946 - RNA, 19 nt, Artificial Sequence
  Description of Artificial Sequence: Synthetic oligonucleotide
uugaugacugggcaguggg

SEQ ID NO: 277947 - RNA, 19 nt, Artificial Sequence
  Description of Artificial Sequence: Synthetic oligonucleotide
aauggaaagguaauggccu

SEQ ID NO: 277948 - RNA, 19 nt, Artificial Sequence
  Description of Artificial Sequence: Synthetic oligonucleotide
gucugaaccagauagccag

SEQ ID NO: 277949 - RNA, 19 nt, Artificial Sequence
  Description of Artificial Sequence: Synthetic oligonucleotide
aauauccagucuugaggac

SEQ ID NO: 277950 - RNA, 19 nt, Artificial Sequence
  Description of Artificial Sequence: Synthetic oligonucleotide
ugcgucaccauuaaaacua

SEQ ID NO: 277951 - RNA, 19 nt, Artificial Sequence
  Description of Artificial Sequence: Synthetic oligonucleotide
guuauggugggauuauuag

SEQ ID NO: 277952 - RNA, 19 nt, Artificial Sequence
  Description of Artificial Sequence: Synthetic oligonucleotide
uggaacauugauucaaaga

SEQ ID NO: 277953 - RNA, 19 nt, Artificial Sequence
  Description of Artificial Sequence: Synthetic oligonucleotide
agagucuugauuaaaagga

SEQ ID NO: 277954 - RNA, 19 nt, Artificial Sequence
  Description of Artificial Sequence: Synthetic oligonucleotide
aaguccauuguucccaugu

SEQ ID NO: 277955 - RNA, 19 nt, Artificial Sequence
  Description of Artificial Sequence: Synthetic oligonucleotide
aagaucaguuccuuaaaau

SEQ ID NO: 277956 - RNA, 19 nt, Artificial Sequence
  Description of Artificial Sequence: Synthetic oligonucleotide
uguaacguuuucauaucgc

SEQ ID NO: 277957 - RNA, 19 nt, Artificial Sequence
  Description of Artificial Sequence: Synthetic oligonucleotide
uucaguugugcucagccca

SEQ ID NO: 277958 - RNA, 19 nt, Artificial Sequence
  Description of Artificial Sequence: Synthetic oligonucleotide
aaauacaccugcucgacuu

SEQ ID NO: 277959 - RNA, 19 nt, Artificial Sequence
  Description of Artificial Sequence: Synthetic oligonucleotide
ugacaauuccugcucaccc

SEQ ID NO: 277960 - RNA, 19 nt, Artificial Sequence
  Description of Artificial Sequence: Synthetic oligonucleotide
aauuucguauuuuauucuu

SEQ ID NO: 277961 - RNA, 19 nt, Artificial Sequence
  Description of Artificial Sequence: Synthetic oligonucleotide
guggaagggauaaagaugc

SEQ ID NO: 277962 - RNA, 19 nt, Artificial Sequence
  Description of Artificial Sequence: Synthetic oligonucleotide
aaaugucuaggguggcaac

SEQ ID NO: 277963 - RNA, 19 nt, Artificial Sequence
  Description of Artificial Sequence: Synthetic oligonucleotide
guagccaacgaauauccag

SEQ ID NO: 277964 - RNA, 19 nt, Artificial Sequence
  Description of Artificial Sequence: Synthetic oligonucleotide
acaaauuucguauuuuauu

SEQ ID NO: 277965 - RNA, 19 nt, Artificial Sequence
  Description of Artificial Sequence: Synthetic oligonucleotide
uguacauaacccugggaca

SEQ ID NO: 277966 - RNA, 19 nt, Artificial Sequence
  Description of Artificial Sequence: Synthetic oligonucleotide
uaguuauuuaauauugcuu

SEQ ID NO: 277967 - RNA, 19 nt, Artificial Sequence
  Description of Artificial Sequence: Synthetic oligonucleotide
aacagugguccuaucauag

SEQ ID NO: 277968 - RNA, 19 nt, Artificial Sequence
  Description of Artificial Sequence: Synthetic oligonucleotide
ucaccauuaaaacuaucaa

SEQ ID NO: 277969 - RNA, 19 nt, Artificial Sequence
  Description of Artificial Sequence: Synthetic oligonucleotide
cuucccuucgagaagcugc

SEQ ID NO: 277970 - RNA, 19 nt, Artificial Sequence
  Description of Artificial Sequence: Synthetic oligonucleotide
gucaaaugaaucugaucgg

SEQ ID NO: 277971 - RNA, 19 nt, Artificial Sequence
  Description of Artificial Sequence: Synthetic oligonucleotide
  modified_base (8)..(8): a, c, u, g, unknown or other
auuuaaanaagcauuuaau

SEQ ID NO: 277972 - RNA, 19 nt, Artificial Sequence
  Description of Artificial Sequence: Synthetic oligonucleotide
aaccugagcaucuugucau

SEQ ID NO: 277973 - RNA, 19 nt, Artificial Sequence
  Description of Artificial Sequence: Synthetic oligonucleotide
ucugcgucaccauuaaaac

SEQ ID NO: 277974 - RNA, 19 nt, Artificial Sequence
  Description of Artificial Sequence: Synthetic oligonucleotide
aggauugccguguugggag

SEQ ID NO: 277975 - RNA, 19 nt, Artificial Sequence
  Description of Artificial Sequence: Synthetic oligonucleotide
uacaaauuucguauuuuau

SEQ ID NO: 277976 - RNA, 19 nt, Artificial Sequence
  Description of Artificial Sequence: Synthetic oligonucleotide
uccguuucguuucuggaca

SEQ ID NO: 277977 - RNA, 19 nt, Artificial Sequence
  Description of Artificial Sequence: Synthetic oligonucleotide
ggauuauuaguuaggacgg

SEQ ID NO: 277978 - RNA, 19 nt, Artificial Sequence
  Description of Artificial Sequence: Synthetic oligonucleotide
aaaauaugucugaaaggug

SEQ ID NO: 277979 - RNA, 19 nt, Artificial Sequence
  Description of Artificial Sequence: Synthetic oligonucleotide
uuauggugggauuauuagu

SEQ ID NO: 277980 - RNA, 19 nt, Artificial Sequence
  Description of Artificial Sequence: Synthetic oligonucleotide
uagccaacgaauauccagu

SEQ ID NO: 277981 - RNA, 19 nt, Artificial Sequence
  Description of Artificial Sequence: Synthetic oligonucleotide
ugauucaaagaugauugcu

SEQ ID NO: 277982 - RNA, 19 nt, Artificial Sequence
  Description of Artificial Sequence: Synthetic oligonucleotide
ucuuacuucuuuccguuuc

SEQ ID NO: 277983 - RNA, 19 nt, Artificial Sequence
  Description of Artificial Sequence: Synthetic oligonucleotide
aaggcaaguguucuccaca

SEQ ID NO: 277984 - RNA, 19 nt, Artificial Sequence
  Description of Artificial Sequence: Synthetic oligonucleotide
guuaggacggaguuggcac

SEQ ID NO: 277985 - RNA, 19 nt, Artificial Sequence
  Description of Artificial Sequence: Synthetic oligonucleotide
auguguuguacauaacccu

SEQ ID NO: 277986 - RNA, 19 nt, Artificial Sequence
  Description of Artificial Sequence: Synthetic oligonucleotide
aaaauacaccugcucgacu

SEQ ID NO: 277987 - RNA, 19 nt, Artificial Sequence
  Description of Artificial Sequence: Synthetic oligonucleotide
guaaaauacaccugcucga

SEQ ID NO: 277988 - RNA, 19 nt, Artificial Sequence
  Description of Artificial Sequence: Synthetic oligonucleotide
uuugauacuuuuacauaau

SEQ ID NO: 277989 - RNA, 19 nt, Artificial Sequence
  Description of Artificial Sequence: Synthetic oligonucleotide
cugcaguacaaguggaagg

SEQ ID NO: 277990 - RNA, 19 nt, Artificial Sequence
  Description of Artificial Sequence: Synthetic oligonucleotide
gugguccuaucauagacag

SEQ ID NO: 277991 - RNA, 19 nt, Artificial Sequence
  Description of Artificial Sequence: Synthetic oligonucleotide
auucaguauccacuguaag

SEQ ID NO: 277992 - RNA, 19 nt, Artificial Sequence
  Description of Artificial Sequence: Synthetic oligonucleotide
uaaugccacauguacuacc

SEQ ID NO: 277993 - RNA, 19 nt, Artificial Sequence
  Description of Artificial Sequence: Synthetic oligonucleotide
aacugccaacaacauuaac

SEQ ID NO: 277994 - RNA, 19 nt, Artificial Sequence
  Description of Artificial Sequence: Synthetic oligonucleotide
uguuucuuggcaugggcgu

SEQ ID NO: 277995 - RNA, 19 nt, Artificial Sequence
  Description of Artificial Sequence: Synthetic oligonucleotide
uggugggauuauuaguuag

SEQ ID NO: 277996 - RNA, 19 nt, Artificial Sequence
  Description of Artificial Sequence: Synthetic oligonucleotide
cuguaacguuuucauaucg

SEQ ID NO: 277997 - RNA, 19 nt, Artificial Sequence
  Description of Artificial Sequence: Synthetic oligonucleotide
cuuuccguuucguuucugg

SEQ ID NO: 277998 - RNA, 19 nt, Artificial Sequence
  Description of Artificial Sequence: Synthetic oligonucleotide
  modified_base (3)..(3): a, c, u, g, unknown or other
aanaagcauuuaauuaaga

SEQ ID NO: 277999 - RNA, 19 nt, Artificial Sequence
  Description of Artificial Sequence: Synthetic oligonucleotide
aaugccacauguacuacca

SEQ ID NO: 278000 - RNA, 19 nt, Artificial Sequence
  Description of Artificial Sequence: Synthetic oligonucleotide
aguacuuugugguggggcu

SEQ ID NO: 278001 - RNA, 19 nt, Artificial Sequence
  Description of Artificial Sequence: Synthetic oligonucleotide
aguacugaaccuguaacgu

SEQ ID NO: 278002 - RNA, 19 nt, Artificial Sequence
  Description of Artificial Sequence: Synthetic oligonucleotide
uuucguuucuggacauucc

SEQ ID NO: 278003 - RNA, 19 nt, Artificial Sequence
  Description of Artificial Sequence: Synthetic oligonucleotide
uaacguuuucauaucgcuc

SEQ ID NO: 278004 - RNA, 19 nt, Artificial Sequence
  Description of Artificial Sequence: Synthetic oligonucleotide
aacuaucaaucaaggcagc

SEQ ID NO: 278005 - RNA, 19 nt, Artificial Sequence
  Description of Artificial Sequence: Synthetic oligonucleotide
ugugcucagcccaauugug

SEQ ID NO: 278006 - RNA, 19 nt, Artificial Sequence
  Description of Artificial Sequence: Synthetic oligonucleotide
uugugcucagcccaauugu

SEQ ID NO: 278007 - RNA, 19 nt, Artificial Sequence
  Description of Artificial Sequence: Synthetic oligonucleotide
acucugacacauccauggc

SEQ ID NO: 278008 - RNA, 19 nt, Artificial Sequence
  Description of Artificial Sequence: Synthetic oligonucleotide
ugauuaguguguguuagaa

SEQ ID NO: 278009 - RNA, 19 nt, Artificial Sequence
  Description of Artificial Sequence: Synthetic oligonucleotide
ugaucgggugagauaaugu

SEQ ID NO: 278010 - RNA, 19 nt, Artificial Sequence
  Description of Artificial Sequence: Synthetic oligonucleotide
accugcucgacuuucgaug

SEQ ID NO: 278011 - RNA, 19 nt, Artificial Sequence
  Description of Artificial Sequence: Synthetic oligonucleotide
augcuuuggggcucucugc

SEQ ID NO: 278012 - RNA, 19 nt, Artificial Sequence
  Description of Artificial Sequence: Synthetic oligonucleotide
aaugucuaggguggcaacu

SEQ ID NO: 278013 - RNA, 19 nt, Artificial Sequence
  Description of Artificial Sequence: Synthetic oligonucleotide
guugugcucagcccaauug

SEQ ID NO: 278014 - RNA, 19 nt, Artificial Sequence
  Description of Artificial Sequence: Synthetic oligonucleotide
aggguugcaccuucgaugu

SEQ ID NO: 278015 - RNA, 19 nt, Artificial Sequence
  Description of Artificial Sequence: Synthetic oligonucleotide
augucaaccagggacagga

SEQ ID NO: 278016 - RNA, 19 nt, Artificial Sequence
  Description of Artificial Sequence: Synthetic oligonucleotide
uccucucccuuaaagagau

SEQ ID NO: 278017 - RNA, 19 nt, Artificial Sequence
  Description of Artificial Sequence: Synthetic oligonucleotide
ucuauuaggaagcccucuu

SEQ ID NO: 278018 - RNA, 19 nt, Artificial Sequence
  Description of Artificial Sequence: Synthetic oligonucleotide
uugaggacucggauuccgg

SEQ ID NO: 278019 - RNA, 19 nt, Artificial Sequence
  Description of Artificial Sequence: Synthetic oligonucleotide
uucgcagagucccggcacg

SEQ ID NO: 278020 - RNA, 19 nt, Artificial Sequence
  Description of Artificial Sequence: Synthetic oligonucleotide
ucgauguuucuuggcaugg

SEQ ID NO: 278021 - RNA, 19 nt, Artificial Sequence
  Description of Artificial Sequence: Synthetic oligonucleotide
ucauagcagauauuuuaaa

SEQ ID NO: 278022 - RNA, 19 nt, Artificial Sequence
  Description of Artificial Sequence: Synthetic oligonucleotide
uacaccugcucgacuuucg

SEQ ID NO: 278023 - RNA, 19 nt, Artificial Sequence
  Description of Artificial Sequence: Synthetic oligonucleotide
auuccgacugcagaguaag

SEQ ID NO: 278024 - RNA, 19 nt, Artificial Sequence
  Description of Artificial Sequence: Synthetic oligonucleotide
gaccaucgcagguaggggc

SEQ ID NO: 278025 - RNA, 19 nt, Artificial Sequence
  Description of Artificial Sequence: Synthetic oligonucleotide
uuccaggugguauuacaug

SEQ ID NO: 278026 - RNA, 19 nt, Artificial Sequence
  Description of Artificial Sequence: Synthetic oligonucleotide
aucugaucgggugagauaa

SEQ ID NO: 278027 - RNA, 19 nt, Artificial Sequence
  Description of Artificial Sequence: Synthetic oligonucleotide
ugcuacuggcuacugguac

SEQ ID NO: 278028 - RNA, 19 nt, Artificial Sequence
  Description of Artificial Sequence: Synthetic oligonucleotide
ucggauuccggcaggccag

SEQ ID NO: 278029 - RNA, 19 nt, Artificial Sequence
  Description of Artificial Sequence: Synthetic oligonucleotide
gagucuggaccaucgcagg

SEQ ID NO: 278030 - RNA, 19 nt, Artificial Sequence
  Description of Artificial Sequence: Synthetic oligonucleotide
ucgggugagauaauguguu

SEQ ID NO: 278031 - RNA, 19 nt, Artificial Sequence
  Description of Artificial Sequence: Synthetic oligonucleotide
uuucgaugcuugcugaauu

SEQ ID NO: 278032 - RNA, 19 nt, Artificial Sequence
  Description of Artificial Sequence: Synthetic oligonucleotide
uuuuaccccugcaguagug

SEQ ID NO: 278033 - RNA, 19 nt, Artificial Sequence
  Description of Artificial Sequence: Synthetic oligonucleotide
gugguggaauaucauagac

SEQ ID NO: 278034 - RNA, 19 nt, Artificial Sequence
  Description of Artificial Sequence: Synthetic oligonucleotide
gguggcaccauucaguauc

SEQ ID NO: 278035 - RNA, 19 nt, Artificial Sequence
  Description of Artificial Sequence: Synthetic oligonucleotide
aaacuauuugggucuuaaa

SEQ ID NO: 278036 - RNA, 19 nt, Artificial Sequence
  Description of Artificial Sequence: Synthetic oligonucleotide
caguuccuuaaaauggaug

SEQ ID NO: 278037 - RNA, 19 nt, Artificial Sequence
  Description of Artificial Sequence: Synthetic oligonucleotide
ugaccgaucuuuccuuucu

SEQ ID NO: 278038 - RNA, 19 nt, Artificial Sequence
  Description of Artificial Sequence: Synthetic oligonucleotide
uuaggacggaguuggcacc

SEQ ID NO: 278039 - RNA, 19 nt, Artificial Sequence
  Description of Artificial Sequence: Synthetic oligonucleotide
acaccugacaauuccugcu

SEQ ID NO: 278040 - RNA, 19 nt, Artificial Sequence
  Description of Artificial Sequence: Synthetic oligonucleotide
agagucuggaccaucgcag

SEQ ID NO: 278041 - RNA, 19 nt, Artificial Sequence
  Description of Artificial Sequence: Synthetic oligonucleotide
ucauaucgcucaguggaag

SEQ ID NO: 278042 - RNA, 19 nt, Artificial Sequence
  Description of Artificial Sequence: Synthetic oligonucleotide
aaugucaaccagggacagg

SEQ ID NO: 278043 - RNA, 19 nt, Artificial Sequence
  Description of Artificial Sequence: Synthetic oligonucleotide
ccuuuggaaguacugaacc

SEQ ID NO: 278044 - RNA, 19 nt, Artificial Sequence
  Description of Artificial Sequence: Synthetic oligonucleotide
uccgggguuagucaucuuc

SEQ ID NO: 278045 - RNA, 19 nt, Artificial Sequence
  Description of Artificial Sequence: Synthetic oligonucleotide
uaguacuuugugguggggc

SEQ ID NO: 278046 - RNA, 19 nt, Artificial Sequence
  Description of Artificial Sequence: Synthetic oligonucleotide
cagugguccuaucauagac

SEQ ID NO: 278047 - RNA, 19 nt, Artificial Sequence
  Description of Artificial Sequence: Synthetic oligonucleotide
aacgaauauccagucuuga

SEQ ID NO: 278048 - RNA, 19 nt, Artificial Sequence
  Description of Artificial Sequence: Synthetic oligonucleotide
aacauuucagaggggcuga

SEQ ID NO: 278049 - RNA, 19 nt, Artificial Sequence
  Description of Artificial Sequence: Synthetic oligonucleotide
auaucgcucaguggaaguc

SEQ ID NO: 278050 - RNA, 19 nt, Artificial Sequence
  Description of Artificial Sequence: Synthetic oligonucleotide
aaucugaucgggugagaua

SEQ ID NO: 278051 - RNA, 19 nt, Artificial Sequence
  Description of Artificial Sequence: Synthetic oligonucleotide
gaugccaggcugcaguaca

SEQ ID NO: 278052 - RNA, 19 nt, Artificial Sequence
  Description of Artificial Sequence: Synthetic oligonucleotide
aaaggugauggcagaucuc

SEQ ID NO: 278053 - RNA, 19 nt, Artificial Sequence
  Description of Artificial Sequence: Synthetic oligonucleotide
ucucugccccacaaaacac

SEQ ID NO: 278054 - RNA, 19 nt, Artificial Sequence
  Description of Artificial Sequence: Synthetic oligonucleotide
auauccagucuugaggacu

SEQ ID NO: 278055 - RNA, 19 nt, Artificial Sequence
  Description of Artificial Sequence: Synthetic oligonucleotide
uaucgcucaguggaagucc

SEQ ID NO: 278056 - RNA, 19 nt, Artificial Sequence
  Description of Artificial Sequence: Synthetic oligonucleotide
uuuaccccugcaguagugc

SEQ ID NO: 278057 - RNA, 19 nt, Artificial Sequence
  Description of Artificial Sequence: Synthetic oligonucleotide
augaaucugaucgggugag

SEQ ID NO: 278058 - RNA, 19 nt, Artificial Sequence
  Description of Artificial Sequence: Synthetic oligonucleotide
caacgaauauccagucuug

SEQ ID NO: 278059 - RNA, 19 nt, Artificial Sequence
  Description of Artificial Sequence: Synthetic oligonucleotide
uaagcagagucuugauuaa

SEQ ID NO: 278060 - RNA, 19 nt, Artificial Sequence
  Description of Artificial Sequence: Synthetic oligonucleotide
cuuuggggcucucugcccc

SEQ ID NO: 278061 - RNA, 19 nt, Artificial Sequence
  Description of Artificial Sequence: Synthetic oligonucleotide
ugucauccgggguuaguca

SEQ ID NO: 278062 - RNA, 19 nt, Artificial Sequence
  Description of Artificial Sequence: Synthetic oligonucleotide
gauuaguguguguuagaaa

SEQ ID NO: 278063 - RNA, 19 nt, Artificial Sequence
  Description of Artificial Sequence: Synthetic oligonucleotide
acccuguuccuguuagggg

SEQ ID NO: 278064 - RNA, 19 nt, Artificial Sequence
  Description of Artificial Sequence: Synthetic oligonucleotide
ggugaaauugugcugaggu

SEQ ID NO: 278065 - RNA, 19 nt, Artificial Sequence
  Description of Artificial Sequence: Synthetic oligonucleotide
gauugcuggugaaauugug

SEQ ID NO: 278066 - RNA, 19 nt, Artificial Sequence
  Description of Artificial Sequence: Synthetic oligonucleotide
uguagccaacgaauaucca

SEQ ID NO: 278067 - RNA, 19 nt, Artificial Sequence
  Description of Artificial Sequence: Synthetic oligonucleotide
guaacguuuucauaucgcu

SEQ ID NO: 278068 - RNA, 19 nt, Artificial Sequence
  Description of Artificial Sequence: Synthetic oligonucleotide
uugguuuuguggugagcug

SEQ ID NO: 278069 - RNA, 19 nt, Artificial Sequence
  Description of Artificial Sequence: Synthetic oligonucleotide
gaaauguagccaacgaaua

SEQ ID NO: 278070 - RNA, 19 nt, Artificial Sequence
  Description of Artificial Sequence: Synthetic oligonucleotide
cuauuaggaagcccucuuc

SEQ ID NO: 278071 - RNA, 19 nt, Artificial Sequence
  Description of Artificial Sequence: Synthetic oligonucleotide
aagaugauugcuggugaaa

SEQ ID NO: 278072 - RNA, 19 nt, Artificial Sequence
  Description of Artificial Sequence: Synthetic oligonucleotide
agacaguuccagaugagga

SEQ ID NO: 278073 - RNA, 19 nt, Artificial Sequence
  Description of Artificial Sequence: Synthetic oligonucleotide
  modified_base (18)..(18): a, c, u, g, unknown or other
guacuaccagauuuaaana

SEQ ID NO: 278074 - RNA, 19 nt, Artificial Sequence
  Description of Artificial Sequence: Synthetic oligonucleotide
aguauccacuguaaguucu

SEQ ID NO: 278075 - RNA, 19 nt, Artificial Sequence
  Description of Artificial Sequence: Synthetic oligonucleotide
uggauuggaugggaugucc

SEQ ID NO: 278076 - RNA, 19 nt, Artificial Sequence
  Description of Artificial Sequence: Synthetic oligonucleotide
gauuccggcaggccagcag

SEQ ID NO: 278077 - RNA, 19 nt, Artificial Sequence
  Description of Artificial Sequence: Synthetic oligonucleotide
caaagaugauugcugguga

SEQ ID NO: 278078 - RNA, 19 nt, Artificial Sequence
  Description of Artificial Sequence: Synthetic oligonucleotide
gaauuuguucuugguuuug

SEQ ID NO: 278079 - RNA, 19 nt, Artificial Sequence
  Description of Artificial Sequence: Synthetic oligonucleotide
agagucccggcacgcacac

SEQ ID NO: 278080 - RNA, 19 nt, Artificial Sequence
  Description of Artificial Sequence: Synthetic oligonucleotide
ggugggauuauuaguuagg

SEQ ID NO: 278081 - RNA, 19 nt, Artificial Sequence
  Description of Artificial Sequence: Synthetic oligonucleotide
ucgacuuucgaugcuugcu

SEQ ID NO: 278082 - RNA, 19 nt, Artificial Sequence
  Description of Artificial Sequence: Synthetic oligonucleotide
augauuaguguguguuaga

SEQ ID NO: 278083 - RNA, 19 nt, Artificial Sequence
  Description of Artificial Sequence: Synthetic oligonucleotide
ugaaaggugauggcagauc

SEQ ID NO: 278084 - RNA, 19 nt, Artificial Sequence
  Description of Artificial Sequence: Synthetic oligonucleotide
guuucguuucuggacauuc

SEQ ID NO: 278085 - RNA, 19 nt, Artificial Sequence
  Description of Artificial Sequence: Synthetic oligonucleotide
uuaccccugcaguagugcu

SEQ ID NO: 278086 - RNA, 19 nt, Artificial Sequence
  Description of Artificial Sequence: Synthetic oligonucleotide
ucgaugcuugcugaauuug

SEQ ID NO: 278087 - RNA, 19 nt, Artificial Sequence
  Description of Artificial Sequence: Synthetic oligonucleotide
accgaucuuuccuuucugu

SEQ ID NO: 278088 - RNA, 19 nt, Artificial Sequence
  Description of Artificial Sequence: Synthetic oligonucleotide
ucucccuuaaagagaugau

SEQ ID NO: 278089 - RNA, 19 nt, Artificial Sequence
  Description of Artificial Sequence: Synthetic oligonucleotide
ugaugaccgaucuuuccuu

SEQ ID NO: 278090 - RNA, 19 nt, Artificial Sequence
  Description of Artificial Sequence: Synthetic oligonucleotide
cugggauaugaguaaagaa

SEQ ID NO: 278091 - RNA, 19 nt, Artificial Sequence
  Description of Artificial Sequence: Synthetic oligonucleotide
uuccgacugcagaguaagg

SEQ ID NO: 278092 - RNA, 19 nt, Artificial Sequence
  Description of Artificial Sequence: Synthetic oligonucleotide
ucaguugugcucagcccaa

SEQ ID NO: 278093 - RNA, 19 nt, Artificial Sequence
  Description of Artificial Sequence: Synthetic oligonucleotide
acuaucaaucaaggcagcu

SEQ ID NO: 278094 - RNA, 19 nt, Artificial Sequence
  Description of Artificial Sequence: Synthetic oligonucleotide
auauuaaguuuuauacaaa

SEQ ID NO: 278095 - RNA, 19 nt, Artificial Sequence
  Description of Artificial Sequence: Synthetic oligonucleotide
gcccaauugugagaaaugg

SEQ ID NO: 278096 - RNA, 19 nt, Artificial Sequence
  Description of Artificial Sequence: Synthetic oligonucleotide
cucucccuuaaagagauga

SEQ ID NO: 278097 - RNA, 19 nt, Artificial Sequence
  Description of Artificial Sequence: Synthetic oligonucleotide
uucgaugcuugcugaauuu

SEQ ID NO: 278098 - RNA, 19 nt, Artificial Sequence
  Description of Artificial Sequence: Synthetic oligonucleotide
gguccuguucuauaagaac

SEQ ID NO: 278099 - RNA, 19 nt, Artificial Sequence
  Description of Artificial Sequence: Synthetic oligonucleotide
cugccgucgcugcugaugc

SEQ ID NO: 278100 - RNA, 19 nt, Artificial Sequence
  Description of Artificial Sequence: Synthetic oligonucleotide
aguuaggacggaguuggca

SEQ ID NO: 278101 - RNA, 19 nt, Artificial Sequence
  Description of Artificial Sequence: Synthetic oligonucleotide
uacuacuucauagcagaua

SEQ ID NO: 278102 - RNA, 19 nt, Artificial Sequence
  Description of Artificial Sequence: Synthetic oligonucleotide
cauucaguauccacuguaa

SEQ ID NO: 278103 - RNA, 19 nt, Artificial Sequence
  Description of Artificial Sequence: Synthetic oligonucleotide
gcaccuucgauguuucuug

SEQ ID NO: 278104 - RNA, 19 nt, Artificial Sequence
  Description of Artificial Sequence: Synthetic oligonucleotide
ggcaguacuguuuugaaau

SEQ ID NO: 278105 - RNA, 19 nt, Artificial Sequence
  Description of Artificial Sequence: Synthetic oligonucleotide
cugaucuauuaggaagccc

SEQ ID NO: 278106 - RNA, 19 nt, Artificial Sequence
  Description of Artificial Sequence: Synthetic oligonucleotide
cucgacuuucgaugcuugc

SEQ ID NO: 278107 - RNA, 19 nt, Artificial Sequence
  Description of Artificial Sequence: Synthetic oligonucleotide
agugguccuaucauagaca

SEQ ID NO: 278108 - RNA, 19 nt, Artificial Sequence
  Description of Artificial Sequence: Synthetic oligonucleotide
guuaggggcgacacacagg

SEQ ID NO: 278109 - RNA, 19 nt, Artificial Sequence
  Description of Artificial Sequence: Synthetic oligonucleotide
caccuucgauguuucuugg

SEQ ID NO: 278110 - RNA, 19 nt, Artificial Sequence
  Description of Artificial Sequence: Synthetic oligonucleotide
aucgggugagauaaugugu

SEQ ID NO: 278111 - RNA, 19 nt, Artificial Sequence
  Description of Artificial Sequence: Synthetic oligonucleotide
acagugguccuaucauaga

SEQ ID NO: 278112 - RNA, 19 nt, Artificial Sequence
  Description of Artificial Sequence: Synthetic oligonucleotide
auagucaaaugaaucugau

SEQ ID NO: 278113 - RNA, 19 nt, Artificial Sequence
  Description of Artificial Sequence: Synthetic oligonucleotide
acuggccaaugauuagugu

SEQ ID NO: 278114 - RNA, 19 nt, Artificial Sequence
  Description of Artificial Sequence: Synthetic oligonucleotide
gaccgaucuuuccuuucug

SEQ ID NO: 278115 - RNA, 19 nt, Artificial Sequence
  Description of Artificial Sequence: Synthetic oligonucleotide
gaacagugguccuaucaua

SEQ ID NO: 278116 - RNA, 19 nt, Artificial Sequence
  Description of Artificial Sequence: Synthetic oligonucleotide
guuguacauaacccuggga

SEQ ID NO: 278117 - RNA, 19 nt, Artificial Sequence
  Description of Artificial Sequence: Synthetic oligonucleotide
cuucgcagagucccggcac

SEQ ID NO: 278118 - RNA, 19 nt, Artificial Sequence
  Description of Artificial Sequence: Synthetic oligonucleotide
accugacaauuccugcuca

SEQ ID NO: 278119 - RNA, 19 nt, Artificial Sequence
  Description of Artificial Sequence: Synthetic oligonucleotide
cugaucgggugagauaaug

SEQ ID NO: 278120 - RNA, 19 nt, Artificial Sequence
  Description of Artificial Sequence: Synthetic oligonucleotide
cuugguuuuguggugagcu

SEQ ID NO: 278121 - RNA, 19 nt, Artificial Sequence
  Description of Artificial Sequence: Synthetic oligonucleotide
gggauaaagaugcugaauu

SEQ ID NO: 278122 - RNA, 19 nt, Artificial Sequence
  Description of Artificial Sequence: Synthetic oligonucleotide
gaucuauuaggaagcccuc

SEQ ID NO: 278123 - RNA, 19 nt, Artificial Sequence
  Description of Artificial Sequence: Synthetic oligonucleotide
cacuagaaaaggcaagugu

SEQ ID NO: 278124 - RNA, 19 nt, Artificial Sequence
  Description of Artificial Sequence: Synthetic oligonucleotide
ggacauugcuuccugaucu

SEQ ID NO: 278125 - RNA, 19 nt, Artificial Sequence
  Description of Artificial Sequence: Synthetic oligonucleotide
agucuggaccaucgcaggu

SEQ ID NO: 278126 - RNA, 19 nt, Artificial Sequence
  Description of Artificial Sequence: Synthetic oligonucleotide
ucuugguuuuguggugagc

SEQ ID NO: 278127 - RNA, 19 nt, Artificial Sequence
  Description of Artificial Sequence: Synthetic oligonucleotide
caauuaagcaaacaccauu

SEQ ID NO: 278128 - RNA, 19 nt, Artificial Sequence
  Description of Artificial Sequence: Synthetic oligonucleotide
caccugacaauuccugcuc

SEQ ID NO: 278129 - RNA, 19 nt, Artificial Sequence
  Description of Artificial Sequence: Synthetic oligonucleotide
uaggacggaguuggcaccc

SEQ ID NO: 278130 - RNA, 19 nt, Artificial Sequence
  Description of Artificial Sequence: Synthetic oligonucleotide
ggcgcaggcacuucuggag

SEQ ID NO: 278131 - RNA, 19 nt, Artificial Sequence
  Description of Artificial Sequence: Synthetic oligonucleotide
acuuaacauuucagagggg

SEQ ID NO: 278132 - RNA, 19 nt, Artificial Sequence
  Description of Artificial Sequence: Synthetic oligonucleotide
ggaaguacugaaccuguaa

SEQ ID NO: 278133 - RNA, 19 nt, Artificial Sequence
  Description of Artificial Sequence: Synthetic oligonucleotide
ggcaccauucaguauccac

SEQ ID NO: 278134 - RNA, 19 nt, Artificial Sequence
  Description of Artificial Sequence: Synthetic oligonucleotide
auuucguauuuuauucuuu

SEQ ID NO: 278135 - RNA, 19 nt, Artificial Sequence
  Description of Artificial Sequence: Synthetic oligonucleotide
cauagacucugcgucacca

SEQ ID NO: 278136 - RNA, 19 nt, Artificial Sequence
  Description of Artificial Sequence: Synthetic oligonucleotide
auggugggauuauuaguua

SEQ ID NO: 278137 - RNA, 19 nt, Artificial Sequence
  Description of Artificial Sequence: Synthetic oligonucleotide
ccugcucgacuuucgaugc

SEQ ID NO: 278138 - RNA, 19 nt, Artificial Sequence
  Description of Artificial Sequence: Synthetic oligonucleotide
cucuggaacauugauucaa

SEQ ID NO: 278139 - RNA, 19 nt, Artificial Sequence
  Description of Artificial Sequence: Synthetic oligonucleotide
gcaguacuguuuugaaaug

SEQ ID NO: 278140 - RNA, 19 nt, Artificial Sequence
  Description of Artificial Sequence: Synthetic oligonucleotide
caaugauuaguguguguua

SEQ ID NO: 278141 - RNA, 19 nt, Artificial Sequence
  Description of Artificial Sequence: Synthetic oligonucleotide
aguacaaguggaagggaua

SEQ ID NO: 278142 - RNA, 19 nt, Artificial Sequence
  Description of Artificial Sequence: Synthetic oligonucleotide
ccugaugaccgaucuuucc

SEQ ID NO: 278143 - RNA, 19 nt, Artificial Sequence
  Description of Artificial Sequence: Synthetic oligonucleotide
agcccaauugugagaaaug

SEQ ID NO: 278144 - RNA, 19 nt, Artificial Sequence
  Description of Artificial Sequence: Synthetic oligonucleotide
uaguuaggacggaguuggc

SEQ ID NO: 278145 - RNA, 19 nt, Artificial Sequence
  Description of Artificial Sequence: Synthetic oligonucleotide
acggcugaugccacugccg

SEQ ID NO: 278146 - RNA, 19 nt, Artificial Sequence
  Description of Artificial Sequence: Synthetic oligonucleotide
uccagcuaccuuccccaaa

SEQ ID NO: 278147 - RNA, 19 nt, Artificial Sequence
  Description of Artificial Sequence: Synthetic oligonucleotide
gguccuaucauagacaguu

SEQ ID NO: 278148 - RNA, 19 nt, Artificial Sequence
  Description of Artificial Sequence: Synthetic oligonucleotide
cauugauucaaagaugauu

SEQ ID NO: 278149 - RNA, 19 nt, Artificial Sequence
  Description of Artificial Sequence: Synthetic oligonucleotide
uccuucgcagagucccggc

SEQ ID NO: 278150 - RNA, 19 nt, Artificial Sequence
  Description of Artificial Sequence: Synthetic oligonucleotide
gacuccugaugaccgaucu

SEQ ID NO: 278151 - RNA, 19 nt, Artificial Sequence
  Description of Artificial Sequence: Synthetic oligonucleotide
aguccauuguucccauguu

SEQ ID NO: 278152 - RNA, 19 nt, Artificial Sequence
  Description of Artificial Sequence: Synthetic oligonucleotide
caaaugaaucugaucgggu

SEQ ID NO: 278153 - RNA, 19 nt, Artificial Sequence
  Description of Artificial Sequence: Synthetic oligonucleotide
auauuguccucuggacugu

SEQ ID NO: 278154 - RNA, 19 nt, Artificial Sequence
  Description of Artificial Sequence: Synthetic oligonucleotide
ccgggguuagucaucuucc

SEQ ID NO: 278155 - RNA, 19 nt, Artificial Sequence
  Description of Artificial Sequence: Synthetic oligonucleotide
guacgagggucuggggugg

SEQ ID NO: 278156 - RNA, 19 nt, Artificial Sequence
  Description of Artificial Sequence: Synthetic oligonucleotide
cugaugaccgaucuuuccu

SEQ ID NO: 278157 - RNA, 19 nt, Artificial Sequence
  Description of Artificial Sequence: Synthetic oligonucleotide
ggugagauaauguguugua

SEQ ID NO: 278158 - RNA, 19 nt, Artificial Sequence
  Description of Artificial Sequence: Synthetic oligonucleotide
ugguccuaucauagacagu

SEQ ID NO: 278159 - RNA, 19 nt, Artificial Sequence
  Description of Artificial Sequence: Synthetic oligonucleotide
uaagaacagugguccuauc

SEQ ID NO: 278160 - RNA, 19 nt, Artificial Sequence
  Description of Artificial Sequence: Synthetic oligonucleotide
caguccguugucauccaca

SEQ ID NO: 278161 - RNA, 19 nt, Artificial Sequence
  Description of Artificial Sequence: Synthetic oligonucleotide
ccugguacgagggucuggg

SEQ ID NO: 278162 - RNA, 19 nt, Artificial Sequence
  Description of Artificial Sequence: Synthetic oligonucleotide
uuccaauuucugaccccau

SEQ ID NO: 278163 - RNA, 19 nt, Artificial Sequence
  Description of Artificial Sequence: Synthetic oligonucleotide
aguugugcucagcccaauu

SEQ ID NO: 278164 - RNA, 19 nt, Artificial Sequence
  Description of Artificial Sequence: Synthetic oligonucleotide
cguuucuggacauuccgac

SEQ ID NO: 278165 - RNA, 19 nt, Artificial Sequence
  Description of Artificial Sequence: Synthetic oligonucleotide
gguuagucaucuuccucuc

SEQ ID NO: 278166 - RNA, 19 nt, Artificial Sequence
  Description of Artificial Sequence: Synthetic oligonucleotide
ccuaucauagacaguucca

SEQ ID NO: 278167 - RNA, 19 nt, Artificial Sequence
  Description of Artificial Sequence: Synthetic oligonucleotide
ccuguaacguuuucauauc

SEQ ID NO: 278168 - RNA, 19 nt, Artificial Sequence
  Description of Artificial Sequence: Synthetic oligonucleotide
ucugaucgggugagauaau

SEQ ID NO: 278169 - RNA, 19 nt, Artificial Sequence
  Description of Artificial Sequence: Synthetic oligonucleotide
cacgcacacugacacugac

SEQ ID NO: 278170 - RNA, 19 nt, Artificial Sequence
  Description of Artificial Sequence: Synthetic oligonucleotide
gaaucugaucgggugagau

SEQ ID NO: 278171 - RNA, 19 nt, Artificial Sequence
  Description of Artificial Sequence: Synthetic oligonucleotide
uaccccugcaguagugcuu

SEQ ID NO: 278172 - RNA, 19 nt, Artificial Sequence
  Description of Artificial Sequence: Synthetic oligonucleotide
gacacauccauggcacuua

SEQ ID NO: 278173 - RNA, 19 nt, Artificial Sequence
  Description of Artificial Sequence: Synthetic oligonucleotide
cauguacuaccagauuuaa

SEQ ID NO: 278174 - RNA, 19 nt, Artificial Sequence
  Description of Artificial Sequence: Synthetic oligonucleotide
gggacauugcuuccugauc

SEQ ID NO: 278175 - RNA, 19 nt, Artificial Sequence
  Description of Artificial Sequence: Synthetic oligonucleotide
guacauaacccugggacau

SEQ ID NO: 278176 - RNA, 19 nt, Artificial Sequence
  Description of Artificial Sequence: Synthetic oligonucleotide
cuuaagcagagucuugauu

SEQ ID NO: 278177 - RNA, 19 nt, Artificial Sequence
  Description of Artificial Sequence: Synthetic oligonucleotide
ggaaagguaauggccuuuc

SEQ ID NO: 278178 - RNA, 19 nt, Artificial Sequence
  Description of Artificial Sequence: Synthetic oligonucleotide
guugcaccuucgauguuuc

SEQ ID NO: 278179 - RNA, 19 nt, Artificial Sequence
  Description of Artificial Sequence: Synthetic oligonucleotide
accaucgcagguaggggcu

SEQ ID NO: 278180 - RNA, 19 nt, Artificial Sequence
  Description of Artificial Sequence: Synthetic oligonucleotide
gccguguugggaguugggg

SEQ ID NO: 278181 - RNA, 19 nt, Artificial Sequence
  Description of Artificial Sequence: Synthetic oligonucleotide
cauaucgcucaguggaagu

SEQ ID NO: 278182 - RNA, 19 nt, Artificial Sequence
  Description of Artificial Sequence: Synthetic oligonucleotide
gguuauggugggauuauua

SEQ ID NO: 278183 - RNA, 19 nt, Artificial Sequence
  Description of Artificial Sequence: Synthetic oligonucleotide
caguacaaguggaagggau

SEQ ID NO: 278184 - RNA, 19 nt, Artificial Sequence
  Description of Artificial Sequence: Synthetic oligonucleotide
ccggcacgcacacugacac

SEQ ID NO: 278185 - RNA, 19 nt, Artificial Sequence
  Description of Artificial Sequence: Synthetic oligonucleotide
cugcgucaccauuaaaacu

SEQ ID NO: 278186 - RNA, 19 nt, Artificial Sequence
  Description of Artificial Sequence: Synthetic oligonucleotide
guaggggcucaguaguacu

SEQ ID NO: 278187 - RNA, 19 nt, Artificial Sequence
  Description of Artificial Sequence: Synthetic oligonucleotide
gggguuagucaucuuccuc

SEQ ID NO: 278188 - RNA, 19 nt, Artificial Sequence
  Description of Artificial Sequence: Synthetic oligonucleotide
gguuuauagucaaaugaau

SEQ ID NO: 278189 - RNA, 19 nt, Artificial Sequence
  Description of Artificial Sequence: Synthetic oligonucleotide
gacauuccgacugcagagu

SEQ ID NO: 278190 - RNA, 19 nt, Artificial Sequence
  Description of Artificial Sequence: Synthetic oligonucleotide
cuggauuggaugggauguc

SEQ ID NO: 278191 - RNA, 19 nt, Artificial Sequence
  Description of Artificial Sequence: Synthetic oligonucleotide
gguaggggcucaguaguac

SEQ ID NO: 278192 - RNA, 19 nt, Artificial Sequence
  Description of Artificial Sequence: Synthetic oligonucleotide
ccugacaauuccugcucac

SEQ ID NO: 278193 - RNA, 19 nt, Artificial Sequence
  Description of Artificial Sequence: Synthetic oligonucleotide
cccaauugugagaaaugga

SEQ ID NO: 278194 - RNA, 19 nt, Artificial Sequence
  Description of Artificial Sequence: Synthetic oligonucleotide
cgacuuucgaugcuugcug

SEQ ID NO: 278195 - RNA, 19 nt, Artificial Sequence
  Description of Artificial Sequence: Synthetic oligonucleotide
uggcaugggcguggaacca

SEQ ID NO: 278196 - RNA, 19 nt, Artificial Sequence
  Description of Artificial Sequence: Synthetic oligonucleotide
agccuguuuccagcuaccu

SEQ ID NO: 278197 - RNA, 19 nt, Artificial Sequence
  Description of Artificial Sequence: Synthetic oligonucleotide
guuccuguuaggggcgaca

SEQ ID NO: 278198 - RNA, 19 nt, Artificial Sequence
  Description of Artificial Sequence: Synthetic oligonucleotide
cugcaggugguggaauauc

SEQ ID NO: 278199 - RNA, 19 nt, Artificial Sequence
  Description of Artificial Sequence: Synthetic oligonucleotide
agaguggucuggccugcuu

SEQ ID NO: 278200 - RNA, 19 nt, Artificial Sequence
  Description of Artificial Sequence: Synthetic oligonucleotide
uacauaacccugggacauu

SEQ ID NO: 278201 - RNA, 19 nt, Artificial Sequence
  Description of Artificial Sequence: Synthetic oligonucleotide
cuuuuaccccugcaguagu

SEQ ID NO: 278202 - RNA, 19 nt, Artificial Sequence
  Description of Artificial Sequence: Synthetic oligonucleotide
cggucugaaccagauagcc

SEQ ID NO: 278203 - RNA, 19 nt, Artificial Sequence
  Description of Artificial Sequence: Synthetic oligonucleotide
ggccaaugauuagugugug

SEQ ID NO: 278204 - RNA, 19 nt, Artificial Sequence
  Description of Artificial Sequence: Synthetic oligonucleotide
uguuccuguuaggggcgac

SEQ ID NO: 278205 - RNA, 19 nt, Artificial Sequence
  Description of Artificial Sequence: Synthetic oligonucleotide
aucugaacucuggaacauu

SEQ ID NO: 278206 - RNA, 19 nt, Artificial Sequence
  Description of Artificial Sequence: Synthetic oligonucleotide
guacugaaccuguaacguu

SEQ ID NO: 278207 - RNA, 19 nt, Artificial Sequence
  Description of Artificial Sequence: Synthetic oligonucleotide
ugguuauggugggauuauu

SEQ ID NO: 278208 - RNA, 19 nt, Artificial Sequence
  Description of Artificial Sequence: Synthetic oligonucleotide
ccggucugaaccagauagc

SEQ ID NO: 278209 - RNA, 19 nt, Artificial Sequence
  Description of Artificial Sequence: Synthetic oligonucleotide
cuggaccggucugaaccag

SEQ ID NO: 278210 - RNA, 19 nt, Artificial Sequence
  Description of Artificial Sequence: Synthetic oligonucleotide
ccacuagaaaaggcaagug

SEQ ID NO: 278211 - RNA, 19 nt, Artificial Sequence
  Description of Artificial Sequence: Synthetic oligonucleotide
acucugcgucaccauuaaa

SEQ ID NO: 278212 - RNA, 19 nt, Artificial Sequence
  Description of Artificial Sequence: Synthetic oligonucleotide
guccauuguucccauguuu

SEQ ID NO: 278213 - RNA, 19 nt, Artificial Sequence
  Description of Artificial Sequence: Synthetic oligonucleotide
gggucuuacuucuuuccgu

SEQ ID NO: 278214 - RNA, 19 nt, Artificial Sequence
  Description of Artificial Sequence: Synthetic oligonucleotide
ggucugaaccagauagcca

SEQ ID NO: 278215 - RNA, 19 nt, Artificial Sequence
  Description of Artificial Sequence: Synthetic oligonucleotide
guccuaucauagacaguuc

SEQ ID NO: 278216 - RNA, 19 nt, Artificial Sequence
  Description of Artificial Sequence: Synthetic oligonucleotide
aucgcagguaggggcucag

SEQ ID NO: 278217 - RNA, 19 nt, Artificial Sequence
  Description of Artificial Sequence: Synthetic oligonucleotide
ggucuuacuucuuuccguu

SEQ ID NO: 278218 - RNA, 19 nt, Artificial Sequence
  Description of Artificial Sequence: Synthetic oligonucleotide
gcgacacacaggcccuucc

SEQ ID NO: 278219 - RNA, 19 nt, Artificial Sequence
  Description of Artificial Sequence: Synthetic oligonucleotide
cccaaacuggaacuaggga

SEQ ID NO: 278220 - RNA, 19 nt, Artificial Sequence
  Description of Artificial Sequence: Synthetic oligonucleotide
gcuacuggcuacugguacu

SEQ ID NO: 278221 - RNA, 19 nt, Artificial Sequence
  Description of Artificial Sequence: Synthetic oligonucleotide
ccccuccaagacuugauga

SEQ ID NO: 278222 - RNA, 19 nt, Artificial Sequence
  Description of Artificial Sequence: Synthetic oligonucleotide
uacgagggucugggguggc

SEQ ID NO: 278223 - RNA, 19 nt, Artificial Sequence
  Description of Artificial Sequence: Synthetic oligonucleotide
cacugacacugacaggccu

SEQ ID NO: 278224 - RNA, 19 nt, Artificial Sequence
  Description of Artificial Sequence: Synthetic oligonucleotide
gaccggucugaaccagaua

SEQ ID NO: 278225 - RNA, 19 nt, Artificial Sequence
  Description of Artificial Sequence: Synthetic oligonucleotide
gcucgacuuucgaugcuug

SEQ ID NO: 278226 - RNA, 19 nt, Artificial Sequence
  Description of Artificial Sequence: Synthetic oligonucleotide
cagcccaauugugagaaau

SEQ ID NO: 278227 - RNA, 19 nt, Artificial Sequence
  Description of Artificial Sequence: Synthetic oligonucleotide
ggacugcaggauugccgug

SEQ ID NO: 278228 - RNA, 19 nt, Artificial Sequence
  Description of Artificial Sequence: Synthetic oligonucleotide
gugguauuacauguucauu

SEQ ID NO: 278229 - RNA, 19 nt, Artificial Sequence
  Description of Artificial Sequence: Synthetic oligonucleotide
ccaaugauuaguguguguu

SEQ ID NO: 278230 - RNA, 19 nt, Artificial Sequence
  Description of Artificial Sequence: Synthetic oligonucleotide
accaggguuuauagucaaa

SEQ ID NO: 278231 - RNA, 19 nt, Artificial Sequence
  Description of Artificial Sequence: Synthetic oligonucleotide
cauccgggguuagucaucu

SEQ ID NO: 278232 - RNA, 19 nt, Artificial Sequence
  Description of Artificial Sequence: Synthetic oligonucleotide
guccugguacgagggucug

SEQ ID NO: 278233 - RNA, 19 nt, Artificial Sequence
  Description of Artificial Sequence: Synthetic oligonucleotide
gccaacgaauauccagucu

SEQ ID NO: 278234 - RNA, 19 nt, Artificial Sequence
  Description of Artificial Sequence: Synthetic oligonucleotide
gguugcaccuucgauguuu

SEQ ID NO: 278235 - RNA, 19 nt, Artificial Sequence
  Description of Artificial Sequence: Synthetic oligonucleotide
gucuuacuucuuuccguuu

SEQ ID NO: 278236 - RNA, 19 nt, Artificial Sequence
  Description of Artificial Sequence: Synthetic oligonucleotide
ggguccagcggaggaggag

SEQ ID NO: 278237 - RNA, 19 nt, Artificial Sequence
  Description of Artificial Sequence: Synthetic oligonucleotide
gccaaugauuagugugugu

SEQ ID NO: 278238 - RNA, 19 nt, Artificial Sequence
  Description of Artificial Sequence: Synthetic oligonucleotide
guauccacuguaaguucuu

SEQ ID NO: 278239 - RNA, 19 nt, Artificial Sequence
  Description of Artificial Sequence: Synthetic oligonucleotide
gugcuacuggcuacuggua

SEQ ID NO: 278240 - RNA, 19 nt, Artificial Sequence
  Description of Artificial Sequence: Synthetic oligonucleotide
caucgcagguaggggcuca

SEQ ID NO: 278241 - RNA, 19 nt, Artificial Sequence
  Description of Artificial Sequence: Synthetic oligonucleotide
gauugccguguugggaguu

SEQ ID NO: 278242 - RNA, 19 nt, Artificial Sequence
  Description of Artificial Sequence: Synthetic oligonucleotide
ccaguccguugucauccac

SEQ ID NO: 278243 - RNA, 19 nt, Artificial Sequence
  Description of Artificial Sequence: Synthetic oligonucleotide
ccuucccuucgagaagcug

SEQ ID NO: 278244 - RNA, 19 nt, Artificial Sequence
  Description of Artificial Sequence: Synthetic oligonucleotide
ccuucgcagagucccggca

SEQ ID NO: 278245 - RNA, 19 nt, Artificial Sequence
  Description of Artificial Sequence: Synthetic oligonucleotide
ggauugccguguugggagu

SEQ ID NO: 278246 - RNA, 19 nt, Artificial Sequence
  Description of Artificial Sequence: Synthetic oligonucleotide
auccgggguuagucaucuu

SEQ ID NO: 278247 - RNA, 19 nt, Artificial Sequence
  Description of Artificial Sequence: Synthetic oligonucleotide
cgggugagggaaaugucua

SEQ ID NO: 278248 - RNA, 19 nt, Artificial Sequence
  Description of Artificial Sequence: Synthetic oligonucleotide
cccggcacgcacacugaca

SEQ ID NO: 278249 - RNA, 19 nt, Artificial Sequence
  Description of Artificial Sequence: Synthetic oligonucleotide
ggcgacacacaggcccuuc

SEQ ID NO: 278250 - RNA, 19 nt, Artificial Sequence
  Description of Artificial Sequence: Synthetic oligonucleotide
cucccaugaccaggcugga

SEQ ID NO: 278251 - RNA, 19 nt, Artificial Sequence
  Description of Artificial Sequence: Synthetic oligonucleotide
ccucucccuuaaagagaug

SEQ ID NO: 278252 - RNA, 19 nt, Artificial Sequence
  Description of Artificial Sequence: Synthetic oligonucleotide
cugcucgacuuucgaugcu

SEQ ID NO: 278253 - RNA, 19 nt, Artificial Sequence
  Description of Artificial Sequence: Synthetic oligonucleotide
cguggaaccaggguuuaua

SEQ ID NO: 278254 - RNA, 19 nt, Artificial Sequence
  Description of Artificial Sequence: Synthetic oligonucleotide
ggaccggucugaaccagau

SEQ ID NO: 278255 - RNA, 19 nt, Artificial Sequence
  Description of Artificial Sequence: Synthetic oligonucleotide
ggguggcgcaggcacuucu

SEQ ID NO: 278256 - RNA, 19 nt, Artificial Sequence
  Description of Artificial Sequence: Synthetic oligonucleotide
ggauuccggcaggccagca

SEQ ID NO: 278257 - RNA, 19 nt, Artificial Sequence
  Description of Artificial Sequence: Synthetic oligonucleotide
ccaucgcagguaggggcuc

SEQ ID NO: 278258 - RNA, 19 nt, Artificial Sequence
  Description of Artificial Sequence: Synthetic oligonucleotide
cggauuccggcaggccagc

SEQ ID NO: 278259 - RNA, 19 nt, Artificial Sequence
  Description of Artificial Sequence: Synthetic oligonucleotide
gagucccggcacgcacacu

SEQ ID NO: 278260 - RNA, 19 nt, Artificial Sequence
  Description of Artificial Sequence: Synthetic oligonucleotide
cgggguuagucaucuuccu

SEQ ID NO: 278261 - RNA, 19 nt, Artificial Sequence
  Description of Artificial Sequence: Synthetic oligonucleotide
ccguuucguuucuggacau

SEQ ID NO: 278262 - RNA, 19 nt, Artificial Sequence
  Description of Artificial Sequence: Synthetic oligonucleotide
cuggguccacucccacguu

SEQ ID NO: 278263 - RNA, 19 nt, Artificial Sequence
  Description of Artificial Sequence: Synthetic oligonucleotide
ggguugcaccuucgauguu

SEQ ID NO: 278264 - RNA, 19 nt, Artificial Sequence
  Description of Artificial Sequence: Synthetic oligonucleotide
gcguggaaccaggguuuau

SEQ ID NO: 278265 - RNA, 19 nt, Artificial Sequence
  Description of Artificial Sequence: Synthetic oligonucleotide
cggcacgcacacugacacu

SEQ ID NO: 278266 - RNA, 19 nt, Artificial Sequence
  Description of Artificial Sequence: Synthetic oligonucleotide
cguuucguuucuggacauu

SEQ ID NO: 278267 - RNA, 19 nt, Artificial Sequence
  Description of Artificial Sequence: Synthetic oligonucleotide
aauuucuauguucugaagc

SEQ ID NO: 278268 - RNA, 19 nt, Artificial Sequence
  Description of Artificial Sequence: Synthetic oligonucleotide
aauuauccccuuuaggacc

SEQ ID NO: 278269 - RNA, 19 nt, Artificial Sequence
  Description of Artificial Sequence: Synthetic oligonucleotide
agaaccauuauguucaggc

SEQ ID NO: 278270 - RNA, 19 nt, Artificial Sequence
  Description of Artificial Sequence: Synthetic oligonucleotide
aaauuauccccuuuaggac

SEQ ID NO: 278271 - RNA, 19 nt, Artificial Sequence
  Description of Artificial Sequence: Synthetic oligonucleotide
ucuacuaucauuucuaagu

SEQ ID NO: 278272 - RNA, 19 nt, Artificial Sequence
  Description of Artificial Sequence: Synthetic oligonucleotide
aaaacuuacaauuuacaau

SEQ ID NO: 278273 - RNA, 19 nt, Artificial Sequence
  Description of Artificial Sequence: Synthetic oligonucleotide
ucuaaaauugccuugcucu

SEQ ID NO: 278274 - RNA, 19 nt, Artificial Sequence
  Description of Artificial Sequence: Synthetic oligonucleotide
uuuacuuacuucuacagcu

SEQ ID NO: 278275 - RNA, 19 nt, Artificial Sequence
  Description of Artificial Sequence: Synthetic oligonucleotide
uugauugaagaauuguugg

SEQ ID NO: 278276 - RNA, 19 nt, Artificial Sequence
  Description of Artificial Sequence: Synthetic oligonucleotide
uuugauugaagaauuguug

SEQ ID NO: 278277 - RNA, 19 nt, Artificial Sequence
  Description of Artificial Sequence: Synthetic oligonucleotide
uuuacaaugauugugaaua

SEQ ID NO: 278278 - RNA, 19 nt, Artificial Sequence
  Description of Artificial Sequence: Synthetic oligonucleotide
agucgagaauuacagaucc

SEQ ID NO: 278279 - RNA, 19 nt, Artificial Sequence
  Description of Artificial Sequence: Synthetic oligonucleotide
aaacuugacacugaaacag

SEQ ID NO: 278280 - RNA, 19 nt, Artificial Sequence
  Description of Artificial Sequence: Synthetic oligonucleotide
gagaauuacagauccaucc

SEQ ID NO: 278281 - RNA, 19 nt, Artificial Sequence
  Description of Artificial Sequence: Synthetic oligonucleotide
aaaacugguugauugaggu

SEQ ID NO: 278282 - RNA, 19 nt, Artificial Sequence
  Description of Artificial Sequence: Synthetic oligonucleotide
auaugacagucuuuuaccc

SEQ ID NO: 278283 - RNA, 19 nt, Artificial Sequence
  Description of Artificial Sequence: Synthetic oligonucleotide
ucuaacuuagccucaagca

SEQ ID NO: 278284 - RNA, 19 nt, Artificial Sequence
  Description of Artificial Sequence: Synthetic oligonucleotide
uucaauacuagaguggaag

SEQ ID NO: 278285 - RNA, 19 nt, Artificial Sequence
  Description of Artificial Sequence: Synthetic oligonucleotide
uguaggacaaccagggugc

SEQ ID NO: 278286 - RNA, 19 nt, Artificial Sequence
  Description of Artificial Sequence: Synthetic oligonucleotide
aauguugcaagaagucucc

SEQ ID NO: 278287 - RNA, 19 nt, Artificial Sequence
  Description of Artificial Sequence: Synthetic oligonucleotide
ggaaucuuaauugugaccg

SEQ ID NO: 278288 - RNA, 19 nt, Artificial Sequence
  Description of Artificial Sequence: Synthetic oligonucleotide
agcauaaucuucuuccuuc

SEQ ID NO: 278289 - RNA, 19 nt, Artificial Sequence
  Description of Artificial Sequence: Synthetic oligonucleotide
ucucuuucggacaaaagcu

SEQ ID NO: 278290 - RNA, 19 nt, Artificial Sequence
  Description of Artificial Sequence: Synthetic oligonucleotide
uccauuaaaaucacuuggc

SEQ ID NO: 278291 - RNA, 19 nt, Artificial Sequence
  Description of Artificial Sequence: Synthetic oligonucleotide
caaauuauccccuuuagga

SEQ ID NO: 278292 - RNA, 19 nt, Artificial Sequence
  Description of Artificial Sequence: Synthetic oligonucleotide
ucaauacuagaguggaagg

SEQ ID NO: 278293 - RNA, 19 nt, Artificial Sequence
  Description of Artificial Sequence: Synthetic oligonucleotide
cugauuauuuaacugcucc

SEQ ID NO: 278294 - RNA, 19 nt, Artificial Sequence
  Description of Artificial Sequence: Synthetic oligonucleotide
uguagcuuuaagcagcgcu

SEQ ID NO: 278295 - RNA, 19 nt, Artificial Sequence
  Description of Artificial Sequence: Synthetic oligonucleotide
caagagucgagaauuacag

SEQ ID NO: 278296 - RNA, 19 nt, Artificial Sequence
  Description of Artificial Sequence: Synthetic oligonucleotide
acagcugagaacuuuggag

SEQ ID NO: 278297 - RNA, 19 nt, Artificial Sequence
  Description of Artificial Sequence: Synthetic oligonucleotide
uggccagauauguugaugg

SEQ ID NO: 278298 - RNA, 19 nt, Artificial Sequence
  Description of Artificial Sequence: Synthetic oligonucleotide
aaauuauuugucaaccgug

SEQ ID NO: 278299 - RNA, 19 nt, Artificial Sequence
  Description of Artificial Sequence: Synthetic oligonucleotide
ucuagcuuuaagauuggca

SEQ ID NO: 278300 - RNA, 19 nt, Artificial Sequence
  Description of Artificial Sequence: Synthetic oligonucleotide
ucuuagaugauggacauaa

SEQ ID NO: 278301 - RNA, 19 nt, Artificial Sequence
  Description of Artificial Sequence: Synthetic oligonucleotide
agaugauggacauaaagaa

SEQ ID NO: 278302 - RNA, 19 nt, Artificial Sequence
  Description of Artificial Sequence: Synthetic oligonucleotide
uauuuaacugcuccuugag

SEQ ID NO: 278303 - RNA, 19 nt, Artificial Sequence
  Description of Artificial Sequence: Synthetic oligonucleotide
uguguucagcaaauuaucc

SEQ ID NO: 278304 - RNA, 19 nt, Artificial Sequence
  Description of Artificial Sequence: Synthetic oligonucleotide
gaagaauuguuggagaaug

SEQ ID NO: 278305 - RNA, 19 nt, Artificial Sequence
  Description of Artificial Sequence: Synthetic oligonucleotide
ugcaaauuauuugucaacc

SEQ ID NO: 278306 - RNA, 19 nt, Artificial Sequence
  Description of Artificial Sequence: Synthetic oligonucleotide
auaaucuucuuccuuccuc

SEQ ID NO: 278307 - RNA, 19 nt, Artificial Sequence
  Description of Artificial Sequence: Synthetic oligonucleotide
ugcuugacaagucacuacc

SEQ ID NO: 278308 - RNA, 19 nt, Artificial Sequence
  Description of Artificial Sequence: Synthetic oligonucleotide
aaacugaaucucuaauuca

SEQ ID NO: 278309 - RNA, 19 nt, Artificial Sequence
  Description of Artificial Sequence: Synthetic oligonucleotide
ucuaguuuccagaucuuug

SEQ ID NO: 278310 - RNA, 19 nt, Artificial Sequence
  Description of Artificial Sequence: Synthetic oligonucleotide
ugacuguuucauaucaugc

SEQ ID NO: 278311 - RNA, 19 nt, Artificial Sequence
  Description of Artificial Sequence: Synthetic oligonucleotide
uaagcggcuacacucaucu

SEQ ID NO: 278312 - RNA, 19 nt, Artificial Sequence
  Description of Artificial Sequence: Synthetic oligonucleotide
agauaccucuuucuguacc

SEQ ID NO: 278313 - RNA, 19 nt, Artificial Sequence
  Description of Artificial Sequence: Synthetic oligonucleotide
uuuggcaucagugaguuuc

SEQ ID NO: 278314 - RNA, 19 nt, Artificial Sequence
  Description of Artificial Sequence: Synthetic oligonucleotide
uuuaagauuggcagauucu

SEQ ID NO: 278315 - RNA, 19 nt, Artificial Sequence
  Description of Artificial Sequence: Synthetic oligonucleotide
agagucgagaauuacagau

SEQ ID NO: 278316 - RNA, 19 nt, Artificial Sequence
  Description of Artificial Sequence: Synthetic oligonucleotide
aagguguaaacugaaucuc

SEQ ID NO: 278317 - RNA, 19 nt, Artificial Sequence
  Description of Artificial Sequence: Synthetic oligonucleotide
aagucgucguuugagaauc

SEQ ID NO: 278318 - RNA, 19 nt, Artificial Sequence
  Description of Artificial Sequence: Synthetic oligonucleotide
aagaguauguuuucuuaga

SEQ ID NO: 278319 - RNA, 19 nt, Artificial Sequence
  Description of Artificial Sequence: Synthetic oligonucleotide
ugcauacucucucauacug

SEQ ID NO: 278320 - RNA, 19 nt, Artificial Sequence
  Description of Artificial Sequence: Synthetic oligonucleotide
acaagucacuaccugaaag

SEQ ID NO: 278321 - RNA, 19 nt, Artificial Sequence
  Description of Artificial Sequence: Synthetic oligonucleotide
uguccuuauagcaugcaac

SEQ ID NO: 278322 - RNA, 19 nt, Artificial Sequence
  Description of Artificial Sequence: Synthetic oligonucleotide
uaacuuagccucaagcacu

SEQ ID NO: 278323 - RNA, 19 nt, Artificial Sequence
  Description of Artificial Sequence: Synthetic oligonucleotide
uuuaggaccacuugacaga

SEQ ID NO: 278324 - RNA, 19 nt, Artificial Sequence
  Description of Artificial Sequence: Synthetic oligonucleotide
uguaaacugaaucucuaau

SEQ ID NO: 278325 - RNA, 19 nt, Artificial Sequence
  Description of Artificial Sequence: Synthetic oligonucleotide
guaagaagagaguuugcag

SEQ ID NO: 278326 - RNA, 19 nt, Artificial Sequence
  Description of Artificial Sequence: Synthetic oligonucleotide
ucuacagcugagaacuuug

SEQ ID NO: 278327 - RNA, 19 nt, Artificial Sequence
  Description of Artificial Sequence: Synthetic oligonucleotide
uuuuacacuuagaucuuug

SEQ ID NO: 278328 - RNA, 19 nt, Artificial Sequence
  Description of Artificial Sequence: Synthetic oligonucleotide
cuugcuucuagcuuuaaga

SEQ ID NO: 278329 - RNA, 19 nt, Artificial Sequence
  Description of Artificial Sequence: Synthetic oligonucleotide
aauuauuugucaaccgugu

SEQ ID NO: 278330 - RNA, 19 nt, Artificial Sequence
  Description of Artificial Sequence: Synthetic oligonucleotide
aauacuagaguggaaggaa

SEQ ID NO: 278331 - RNA, 19 nt, Artificial Sequence
  Description of Artificial Sequence: Synthetic oligonucleotide
caaagguguaaacugaauc

SEQ ID NO: 278332 - RNA, 19 nt, Artificial Sequence
  Description of Artificial Sequence: Synthetic oligonucleotide
ugauugaagaauuguugga

SEQ ID NO: 278333 - RNA, 19 nt, Artificial Sequence
  Description of Artificial Sequence: Synthetic oligonucleotide
ucuugaauaugacagucuu

SEQ ID NO: 278334 - RNA, 19 nt, Artificial Sequence
  Description of Artificial Sequence: Synthetic oligonucleotide
cucucuguuucguagauuc

SEQ ID NO: 278335 - RNA, 19 nt, Artificial Sequence
  Description of Artificial Sequence: Synthetic oligonucleotide
ucgcauuacagauaccucu

SEQ ID NO: 278336 - RNA, 19 nt, Artificial Sequence
  Description of Artificial Sequence: Synthetic oligonucleotide
gaaaucgagugcuuuguac

SEQ ID NO: 278337 - RNA, 19 nt, Artificial Sequence
  Description of Artificial Sequence: Synthetic oligonucleotide
uucaucucgcauuacagau

SEQ ID NO: 278338 - RNA, 19 nt, Artificial Sequence
  Description of Artificial Sequence: Synthetic oligonucleotide
uuuuggcugagacacauuu

SEQ ID NO: 278339 - RNA, 19 nt, Artificial Sequence
  Description of Artificial Sequence: Synthetic oligonucleotide
guuacuggagagcagcgcc

SEQ ID NO: 278340 - RNA, 19 nt, Artificial Sequence
  Description of Artificial Sequence: Synthetic oligonucleotide
uguacauuuucuguugaca

SEQ ID NO: 278341 - RNA, 19 nt, Artificial Sequence
  Description of Artificial Sequence: Synthetic oligonucleotide
ucucucauacugcuguacc

SEQ ID NO: 278342 - RNA, 19 nt, Artificial Sequence
  Description of Artificial Sequence: Synthetic oligonucleotide
ucuguuucguagauucuca

SEQ ID NO: 278343 - RNA, 19 nt, Artificial Sequence
  Description of Artificial Sequence: Synthetic oligonucleotide
ugaucuucuuccuaaguau

SEQ ID NO: 278344 - RNA, 19 nt, Artificial Sequence
  Description of Artificial Sequence: Synthetic oligonucleotide
aauuacagauccauccucu

SEQ ID NO: 278345 - RNA, 19 nt, Artificial Sequence
  Description of Artificial Sequence: Synthetic oligonucleotide
agcaaauuauccccuuuag

SEQ ID NO: 278346 - RNA, 19 nt, Artificial Sequence
  Description of Artificial Sequence: Synthetic oligonucleotide
gaagagaguuugcagcaag

SEQ ID NO: 278347 - RNA, 19 nt, Artificial Sequence
  Description of Artificial Sequence: Synthetic oligonucleotide
cucuaacuuagccucaagc

SEQ ID NO: 278348 - RNA, 19 nt, Artificial Sequence
  Description of Artificial Sequence: Synthetic oligonucleotide
uuacuuacuucuacagcug

SEQ ID NO: 278349 - RNA, 19 nt, Artificial Sequence
  Description of Artificial Sequence: Synthetic oligonucleotide
aacuuuacuugcugucuug

SEQ ID NO: 278350 - RNA, 19 nt, Artificial Sequence
  Description of Artificial Sequence: Synthetic oligonucleotide
uguuucauaucaugcaaau

SEQ ID NO: 278351 - RNA, 19 nt, Artificial Sequence
  Description of Artificial Sequence: Synthetic oligonucleotide
caaaacugguugauugagg

SEQ ID NO: 278352 - RNA, 19 nt, Artificial Sequence
  Description of Artificial Sequence: Synthetic oligonucleotide
uguuucguagauucucagc

SEQ ID NO: 278353 - RNA, 19 nt, Artificial Sequence
  Description of Artificial Sequence: Synthetic oligonucleotide
uaugacagucuuuuaccca

SEQ ID NO: 278354 - RNA, 19 nt, Artificial Sequence
  Description of Artificial Sequence: Synthetic oligonucleotide
aguaagaagagaguuugca

SEQ ID NO: 278355 - RNA, 19 nt, Artificial Sequence
  Description of Artificial Sequence: Synthetic oligonucleotide
ucuaaguuuccuuuauuuu

SEQ ID NO: 278356 - RNA, 19 nt, Artificial Sequence
  Description of Artificial Sequence: Synthetic oligonucleotide
ucuuucggacaaaagcugu

SEQ ID NO: 278357 - RNA, 19 nt, Artificial Sequence
  Description of Artificial Sequence: Synthetic oligonucleotide
uccgcaaugauuucucuuc

SEQ ID NO: 278358 - RNA, 19 nt, Artificial Sequence
  Description of Artificial Sequence: Synthetic oligonucleotide
aauugugaccgguguagga

SEQ ID NO: 278359 - RNA, 19 nt, Artificial Sequence
  Description of Artificial Sequence: Synthetic oligonucleotide
gacacugaaacagucuccc

SEQ ID NO: 278360 - RNA, 19 nt, Artificial Sequence
  Description of Artificial Sequence: Synthetic oligonucleotide
uugcuuauccucacucucc

SEQ ID NO: 278361 - RNA, 19 nt, Artificial Sequence
  Description of Artificial Sequence: Synthetic oligonucleotide
caucucgcauuacagauac

SEQ ID NO: 278362 - RNA, 19 nt, Artificial Sequence
  Description of Artificial Sequence: Synthetic oligonucleotide
acucuguagcuuuaagcag

SEQ ID NO: 278363 - RNA, 19 nt, Artificial Sequence
  Description of Artificial Sequence: Synthetic oligonucleotide
uucguagauucucagcuuc

SEQ ID NO: 278364 - RNA, 19 nt, Artificial Sequence
  Description of Artificial Sequence: Synthetic oligonucleotide
aggugcacauuauuucugg

SEQ ID NO: 278365 - RNA, 19 nt, Artificial Sequence
  Description of Artificial Sequence: Synthetic oligonucleotide
auuauuugucaaccgugug

SEQ ID NO: 278366 - RNA, 19 nt, Artificial Sequence
  Description of Artificial Sequence: Synthetic oligonucleotide
uccuuaugcuuguuacugg

SEQ ID NO: 278367 - RNA, 19 nt, Artificial Sequence
  Description of Artificial Sequence: Synthetic oligonucleotide
uggagugacuguuucauau

SEQ ID NO: 278368 - RNA, 19 nt, Artificial Sequence
  Description of Artificial Sequence: Synthetic oligonucleotide
uuucuuagaugauggacau

SEQ ID NO: 278369 - RNA, 19 nt, Artificial Sequence
  Description of Artificial Sequence: Synthetic oligonucleotide
uggcuagccaaucagcuuc

SEQ ID NO: 278370 - RNA, 19 nt, Artificial Sequence
  Description of Artificial Sequence: Synthetic oligonucleotide
cuuagaucuuugcauacuc

SEQ ID NO: 278371 - RNA, 19 nt, Artificial Sequence
  Description of Artificial Sequence: Synthetic oligonucleotide
uauuugucaaccgugugau

SEQ ID NO: 278372 - RNA, 19 nt, Artificial Sequence
  Description of Artificial Sequence: Synthetic oligonucleotide
ugcacuagcuguaggugcc

SEQ ID NO: 278373 - RNA, 19 nt, Artificial Sequence
  Description of Artificial Sequence: Synthetic oligonucleotide
ucaaacuugcuucuagcuu

SEQ ID NO: 278374 - RNA, 19 nt, Artificial Sequence
  Description of Artificial Sequence: Synthetic oligonucleotide
gugacuguuucauaucaug

SEQ ID NO: 278375 - RNA, 19 nt, Artificial Sequence
  Description of Artificial Sequence: Synthetic oligonucleotide
ugcucuugcucuucuaaug

SEQ ID NO: 278376 - RNA, 19 nt, Artificial Sequence
  Description of Artificial Sequence: Synthetic oligonucleotide
uguucgaagucgucguuug

SEQ ID NO: 278377 - RNA, 19 nt, Artificial Sequence
  Description of Artificial Sequence: Synthetic oligonucleotide
uccuaaguaugucuguguc

SEQ ID NO: 278378 - RNA, 19 nt, Artificial Sequence
  Description of Artificial Sequence: Synthetic oligonucleotide
gauccuggugauuugcuuc

SEQ ID NO: 278379 - RNA, 19 nt, Artificial Sequence
  Description of Artificial Sequence: Synthetic oligonucleotide
uuaauccgcaaugauuucu

SEQ ID NO: 278380 - RNA, 19 nt, Artificial Sequence
  Description of Artificial Sequence: Synthetic oligonucleotide
agcuguaggugccuggcuc

SEQ ID NO: 278381 - RNA, 19 nt, Artificial Sequence
  Description of Artificial Sequence: Synthetic oligonucleotide
uacuuacuucuacagcuga

SEQ ID NO: 278382 - RNA, 19 nt, Artificial Sequence
  Description of Artificial Sequence: Synthetic oligonucleotide
ugcucuucuaaugucaauc

SEQ ID NO: 278383 - RNA, 19 nt, Artificial Sequence
  Description of Artificial Sequence: Synthetic oligonucleotide
auauguugaugggagauga

SEQ ID NO: 278384 - RNA, 19 nt, Artificial Sequence
  Description of Artificial Sequence: Synthetic oligonucleotide
cuuuacuugcugucuuggg

SEQ ID NO: 278385 - RNA, 19 nt, Artificial Sequence
  Description of Artificial Sequence: Synthetic oligonucleotide
guuucguagauucucagcu

SEQ ID NO: 278386 - RNA, 19 nt, Artificial Sequence
  Description of Artificial Sequence: Synthetic oligonucleotide
uuaagauuggcagauucuu

SEQ ID NO: 278387 - RNA, 19 nt, Artificial Sequence
  Description of Artificial Sequence: Synthetic oligonucleotide
aagagucgagaauuacaga

SEQ ID NO: 278388 - RNA, 19 nt, Artificial Sequence
  Description of Artificial Sequence: Synthetic oligonucleotide
accaagaucaaaagaacca

SEQ ID NO: 278389 - RNA, 19 nt, Artificial Sequence
  Description of Artificial Sequence: Synthetic oligonucleotide
uaauccgcaaugauuucuc

SEQ ID NO: 278390 - RNA, 19 nt, Artificial Sequence
  Description of Artificial Sequence: Synthetic oligonucleotide
uccagaguaagaagagagu

SEQ ID NO: 278391 - RNA, 19 nt, Artificial Sequence
  Description of Artificial Sequence: Synthetic oligonucleotide
uuagccucaagcacucggu

SEQ ID NO: 278392 - RNA, 19 nt, Artificial Sequence
  Description of Artificial Sequence: Synthetic oligonucleotide
ugaugaucacuuucuuuca

SEQ ID NO: 278393 - RNA, 19 nt, Artificial Sequence
  Description of Artificial Sequence: Synthetic oligonucleotide
ugggaaucuuaauugugac

SEQ ID NO: 278394 - RNA, 19 nt, Artificial Sequence
  Description of Artificial Sequence: Synthetic oligonucleotide
gcaaauuauccccuuuagg

SEQ ID NO: 278395 - RNA, 19 nt, Artificial Sequence
  Description of Artificial Sequence: Synthetic oligonucleotide
ucggucuuguucuaccuga

SEQ ID NO: 278396 - RNA, 19 nt, Artificial Sequence
  Description of Artificial Sequence: Synthetic oligonucleotide
ugcuuguuacuggagagca

SEQ ID NO: 278397 - RNA, 19 nt, Artificial Sequence
  Description of Artificial Sequence: Synthetic oligonucleotide
uguaccguuucuuccauuu

SEQ ID NO: 278398 - RNA, 19 nt, Artificial Sequence
  Description of Artificial Sequence: Synthetic oligonucleotide
ucgagaauuacagauccau

SEQ ID NO: 278399 - RNA, 19 nt, Artificial Sequence
  Description of Artificial Sequence: Synthetic oligonucleotide
agcuugcucucuuucggac

SEQ ID NO: 278400 - RNA, 19 nt, Artificial Sequence
  Description of Artificial Sequence: Synthetic oligonucleotide
gauauguugaugggagaug

SEQ ID NO: 278401 - RNA, 19 nt, Artificial Sequence
  Description of Artificial Sequence: Synthetic oligonucleotide
auacuagaguggaaggaac

SEQ ID NO: 278402 - RNA, 19 nt, Artificial Sequence
  Description of Artificial Sequence: Synthetic oligonucleotide
uacagcugagaacuuugga

SEQ ID NO: 278403 - RNA, 19 nt, Artificial Sequence
  Description of Artificial Sequence: Synthetic oligonucleotide
gcucuaauucagcuaagcg

SEQ ID NO: 278404 - RNA, 19 nt, Artificial Sequence
  Description of Artificial Sequence: Synthetic oligonucleotide
aacuuagccucaagcacuc

SEQ ID NO: 278405 - RNA, 19 nt, Artificial Sequence
  Description of Artificial Sequence: Synthetic oligonucleotide
ucgucguuugagaaucuga

SEQ ID NO: 278406 - RNA, 19 nt, Artificial Sequence
  Description of Artificial Sequence: Synthetic oligonucleotide
ucagcuaagcggcuacacu

SEQ ID NO: 278407 - RNA, 19 nt, Artificial Sequence
  Description of Artificial Sequence: Synthetic oligonucleotide
acuugcuucuagcuuuaag

SEQ ID NO: 278408 - RNA, 19 nt, Artificial Sequence
  Description of Artificial Sequence: Synthetic oligonucleotide
cuuguucuaccugaguuug

SEQ ID NO: 278409 - RNA, 19 nt, Artificial Sequence
  Description of Artificial Sequence: Synthetic oligonucleotide
ucguccugaagcuuacuga

SEQ ID NO: 278410 - RNA, 19 nt, Artificial Sequence
  Description of Artificial Sequence: Synthetic oligonucleotide
cucuuucggacaaaagcug

SEQ ID NO: 278411 - RNA, 19 nt, Artificial Sequence
  Description of Artificial Sequence: Synthetic oligonucleotide
aauucuuuggcuagccaau

SEQ ID NO: 278412 - RNA, 19 nt, Artificial Sequence
  Description of Artificial Sequence: Synthetic oligonucleotide
ccagauauguugaugggag

SEQ ID NO: 278413 - RNA, 19 nt, Artificial Sequence
  Description of Artificial Sequence: Synthetic oligonucleotide
guccuuauagcaugcaaca

SEQ ID NO: 278414 - RNA, 19 nt, Artificial Sequence
  Description of Artificial Sequence: Synthetic oligonucleotide
auuacagauccauccucug

SEQ ID NO: 278415 - RNA, 19 nt, Artificial Sequence
  Description of Artificial Sequence: Synthetic oligonucleotide
auuuuaauccgcaaugauu

SEQ ID NO: 278416 - RNA, 19 nt, Artificial Sequence
  Description of Artificial Sequence: Synthetic oligonucleotide
agcuuuaagcagcgcuccc

SEQ ID NO: 278417 - RNA, 19 nt, Artificial Sequence
  Description of Artificial Sequence: Synthetic oligonucleotide
uuaagcagcgcucccuguc

SEQ ID NO: 278418 - RNA, 19 nt, Artificial Sequence
  Description of Artificial Sequence: Synthetic oligonucleotide
uucguuugcccugugauua

SEQ ID NO: 278419 - RNA, 19 nt, Artificial Sequence
  Description of Artificial Sequence: Synthetic oligonucleotide
uacuucuacagcugagaac

SEQ ID NO: 278420 - RNA, 19 nt, Artificial Sequence
  Description of Artificial Sequence: Synthetic oligonucleotide
cucuacuaucauuucuaag

SEQ ID NO: 278421 - RNA, 19 nt, Artificial Sequence
  Description of Artificial Sequence: Synthetic oligonucleotide
cagcuaagcggcuacacuc

SEQ ID NO: 278422 - RNA, 19 nt, Artificial Sequence
  Description of Artificial Sequence: Synthetic oligonucleotide
acugaaucucuaauucagg

SEQ ID NO: 278423 - RNA, 19 nt, Artificial Sequence
  Description of Artificial Sequence: Synthetic oligonucleotide
gagaauguugcaagaaguc

SEQ ID NO: 278424 - RNA, 19 nt, Artificial Sequence
  Description of Artificial Sequence: Synthetic oligonucleotide
aauccgcaaugauuucucu

SEQ ID NO: 278425 - RNA, 19 nt, Artificial Sequence
  Description of Artificial Sequence: Synthetic oligonucleotide
ugagagguaaggauuccuu

SEQ ID NO: 278426 - RNA, 19 nt, Artificial Sequence
  Description of Artificial Sequence: Synthetic oligonucleotide
ugugauccuggugauuugc

SEQ ID NO: 278427 - RNA, 19 nt, Artificial Sequence
  Description of Artificial Sequence: Synthetic oligonucleotide
gaccacuugacagauccug

SEQ ID NO: 278428 - RNA, 19 nt, Artificial Sequence
  Description of Artificial Sequence: Synthetic oligonucleotide
ugcucuaauucagcuaagc

SEQ ID NO: 278429 - RNA, 19 nt, Artificial Sequence
  Description of Artificial Sequence: Synthetic oligonucleotide
agaacucauuguuucaauu

SEQ ID NO: 278430 - RNA, 19 nt, Artificial Sequence
  Description of Artificial Sequence: Synthetic oligonucleotide
uccgcuguuucauaucuau

SEQ ID NO: 278431 - RNA, 19 nt, Artificial Sequence
  Description of Artificial Sequence: Synthetic oligonucleotide
acuugacacugaaacaguc

SEQ ID NO: 278432 - RNA, 19 nt, Artificial Sequence
  Description of Artificial Sequence: Synthetic oligonucleotide
gcuguacuugaacacagag

SEQ ID NO: 278433 - RNA, 19 nt, Artificial Sequence
  Description of Artificial Sequence: Synthetic oligonucleotide
uguugcaagaagucuccaa

SEQ ID NO: 278434 - RNA, 19 nt, Artificial Sequence
  Description of Artificial Sequence: Synthetic oligonucleotide
agauauguugaugggagau

SEQ ID NO: 278435 - RNA, 19 nt, Artificial Sequence
  Description of Artificial Sequence: Synthetic oligonucleotide
cuugagauucaugguuugg

SEQ ID NO: 278436 - RNA, 19 nt, Artificial Sequence
  Description of Artificial Sequence: Synthetic oligonucleotide
ucgaagucgucguuugaga

SEQ ID NO: 278437 - RNA, 19 nt, Artificial Sequence
  Description of Artificial Sequence: Synthetic oligonucleotide
uuccuaaguaugucugugu

SEQ ID NO: 278438 - RNA, 19 nt, Artificial Sequence
  Description of Artificial Sequence: Synthetic oligonucleotide
ucuuucugggucucuacua

SEQ ID NO: 278439 - RNA, 19 nt, Artificial Sequence
  Description of Artificial Sequence: Synthetic oligonucleotide
caauucuuuggcuagccaa

SEQ ID NO: 278440 - RNA, 19 nt, Artificial Sequence
  Description of Artificial Sequence: Synthetic oligonucleotide
ugcucguaguucauuguuc

SEQ ID NO: 278441 - RNA, 19 nt, Artificial Sequence
  Description of Artificial Sequence: Synthetic oligonucleotide
uugugaccgguguaggaca

SEQ ID NO: 278442 - RNA, 19 nt, Artificial Sequence
  Description of Artificial Sequence: Synthetic oligonucleotide
uugaugggagaugaaauuu

SEQ ID NO: 278443 - RNA, 19 nt, Artificial Sequence
  Description of Artificial Sequence: Synthetic oligonucleotide
accauuauguucaggcuug

SEQ ID NO: 278444 - RNA, 19 nt, Artificial Sequence
  Description of Artificial Sequence: Synthetic oligonucleotide
uuuaauccgcaaugauuuc

SEQ ID NO: 278445 - RNA, 19 nt, Artificial Sequence
  Description of Artificial Sequence: Synthetic oligonucleotide
agcugauguauuaagacuu

SEQ ID NO: 278446 - RNA, 19 nt, Artificial Sequence
  Description of Artificial Sequence: Synthetic oligonucleotide
uggaaaucgagugcuuugu

SEQ ID NO: 278447 - RNA, 19 nt, Artificial Sequence
  Description of Artificial Sequence: Synthetic oligonucleotide
aacagucucccaaagcaau

SEQ ID NO: 278448 - RNA, 19 nt, Artificial Sequence
  Description of Artificial Sequence: Synthetic oligonucleotide
agcuuuaagauuggcagau

SEQ ID NO: 278449 - RNA, 19 nt, Artificial Sequence
  Description of Artificial Sequence: Synthetic oligonucleotide
uugcuugacaagucacuac

SEQ ID NO: 278450 - RNA, 19 nt, Artificial Sequence
  Description of Artificial Sequence: Synthetic oligonucleotide
gucguuugagaaucugaug

SEQ ID NO: 278451 - RNA, 19 nt, Artificial Sequence
  Description of Artificial Sequence: Synthetic oligonucleotide
agcggcuacacucaucuuu

SEQ ID NO: 278452 - RNA, 19 nt, Artificial Sequence
  Description of Artificial Sequence: Synthetic oligonucleotide
agcucuugaauaugacagu

SEQ ID NO: 278453 - RNA, 19 nt, Artificial Sequence
  Description of Artificial Sequence: Synthetic oligonucleotide
uguuacuggagagcagcgc

SEQ ID NO: 278454 - RNA, 19 nt, Artificial Sequence
  Description of Artificial Sequence: Synthetic oligonucleotide
ugaccgguguaggacaacc

SEQ ID NO: 278455 - RNA, 19 nt, Artificial Sequence
  Description of Artificial Sequence: Synthetic oligonucleotide
ugaaagagcuugcucucuu

SEQ ID NO: 278456 - RNA, 19 nt, Artificial Sequence
  Description of Artificial Sequence: Synthetic oligonucleotide
cuguuucguagauucucag

SEQ ID NO: 278457 - RNA, 19 nt, Artificial Sequence
  Description of Artificial Sequence: Synthetic oligonucleotide
cuucuaaccacuucuuucu

SEQ ID NO: 278458 - RNA, 19 nt, Artificial Sequence
  Description of Artificial Sequence: Synthetic oligonucleotide
ugcuucuagcuuuaagauu

SEQ ID NO: 278459 - RNA, 19 nt, Artificial Sequence
  Description of Artificial Sequence: Synthetic oligonucleotide
cucguccugaagcuuacug

SEQ ID NO: 278460 - RNA, 19 nt, Artificial Sequence
  Description of Artificial Sequence: Synthetic oligonucleotide
auccuggugauuugcuuca

SEQ ID NO: 278461 - RNA, 19 nt, Artificial Sequence
  Description of Artificial Sequence: Synthetic oligonucleotide
ucaucucgcauuacagaua

SEQ ID NO: 278462 - RNA, 19 nt, Artificial Sequence
  Description of Artificial Sequence: Synthetic oligonucleotide
gggaaucuuaauugugacc

SEQ ID NO: 278463 - RNA, 19 nt, Artificial Sequence
  Description of Artificial Sequence: Synthetic oligonucleotide
guagcuuuaagcagcgcuc

SEQ ID NO: 278464 - RNA, 19 nt, Artificial Sequence
  Description of Artificial Sequence: Synthetic oligonucleotide
uugcucguaguucauuguu

SEQ ID NO: 278465 - RNA, 19 nt, Artificial Sequence
  Description of Artificial Sequence: Synthetic oligonucleotide
ugaauaugacagucuuuua

SEQ ID NO: 278466 - RNA, 19 nt, Artificial Sequence
  Description of Artificial Sequence: Synthetic oligonucleotide
ggaacuuucccuacagagc

SEQ ID NO: 278467 - RNA, 19 nt, Artificial Sequence
  Description of Artificial Sequence: Synthetic oligonucleotide
ggcuucaauacuagagugg

SEQ ID NO: 278468 - RNA, 19 nt, Artificial Sequence
  Description of Artificial Sequence: Synthetic oligonucleotide
ucucuguuucguagauucu

SEQ ID NO: 278469 - RNA, 19 nt, Artificial Sequence
  Description of Artificial Sequence: Synthetic oligonucleotide
ccuuauagcaugcaacauc

SEQ ID NO: 278470 - RNA, 19 nt, Artificial Sequence
  Description of Artificial Sequence: Synthetic oligonucleotide
accacuugacagauccugg

SEQ ID NO: 278471 - RNA, 19 nt, Artificial Sequence
  Description of Artificial Sequence: Synthetic oligonucleotide
uuuaagcagcgcucccugu

SEQ ID NO: 278472 - RNA, 19 nt, Artificial Sequence
  Description of Artificial Sequence: Synthetic oligonucleotide
uuaggaccacuugacagau

SEQ ID NO: 278473 - RNA, 19 nt, Artificial Sequence
  Description of Artificial Sequence: Synthetic oligonucleotide
uuucguagauucucagcuu

SEQ ID NO: 278474 - RNA, 19 nt, Artificial Sequence
  Description of Artificial Sequence: Synthetic oligonucleotide
gaggugcacauuauuucug

SEQ ID NO: 278475 - RNA, 19 nt, Artificial Sequence
  Description of Artificial Sequence: Synthetic oligonucleotide
guuugcacuagcuguaggu

SEQ ID NO: 278476 - RNA, 19 nt, Artificial Sequence
  Description of Artificial Sequence: Synthetic oligonucleotide
gagucgagaauuacagauc

SEQ ID NO: 278477 - RNA, 19 nt, Artificial Sequence
  Description of Artificial Sequence: Synthetic oligonucleotide
caauacuagaguggaagga

SEQ ID NO: 278478 - RNA, 19 nt, Artificial Sequence
  Description of Artificial Sequence: Synthetic oligonucleotide
aguugcuugacaagucacu

SEQ ID NO: 278479 - RNA, 19 nt, Artificial Sequence
  Description of Artificial Sequence: Synthetic oligonucleotide
agguguaaacugaaucucu

SEQ ID NO: 278480 - RNA, 19 nt, Artificial Sequence
  Description of Artificial Sequence: Synthetic oligonucleotide
ugugaccgguguaggacaa

SEQ ID NO: 278481 - RNA, 19 nt, Artificial Sequence
  Description of Artificial Sequence: Synthetic oligonucleotide
guguaaacugaaucucuaa

SEQ ID NO: 278482 - RNA, 19 nt, Artificial Sequence
  Description of Artificial Sequence: Synthetic oligonucleotide
ugauccuggugauuugcuu

SEQ ID NO: 278483 - RNA, 19 nt, Artificial Sequence
  Description of Artificial Sequence: Synthetic oligonucleotide
ugauuacuucuaguuucca

SEQ ID NO: 278484 - RNA, 19 nt, Artificial Sequence
  Description of Artificial Sequence: Synthetic oligonucleotide
uucuaaccacuucuuucua

SEQ ID NO: 278485 - RNA, 19 nt, Artificial Sequence
  Description of Artificial Sequence: Synthetic oligonucleotide
ugcgcucucuacagcaguc

SEQ ID NO: 278486 - RNA, 19 nt, Artificial Sequence
  Description of Artificial Sequence: Synthetic oligonucleotide
guggaaggaacuuucccua

SEQ ID NO: 278487 - RNA, 19 nt, Artificial Sequence
  Description of Artificial Sequence: Synthetic oligonucleotide
uucuaguuuccagaucuuu

SEQ ID NO: 278488 - RNA, 19 nt, Artificial Sequence
  Description of Artificial Sequence: Synthetic oligonucleotide
gcuucaauacuagagugga

SEQ ID NO: 278489 - RNA, 19 nt, Artificial Sequence
  Description of Artificial Sequence: Synthetic oligonucleotide
ugaguuugcucuugcucuu

SEQ ID NO: 278490 - RNA, 19 nt, Artificial Sequence
  Description of Artificial Sequence: Synthetic oligonucleotide
gggaggugcacauuauuuc

SEQ ID NO: 278491 - RNA, 19 nt, Artificial Sequence
  Description of Artificial Sequence: Synthetic oligonucleotide
agucacuaccugaaagcug

SEQ ID NO: 278492 - RNA, 19 nt, Artificial Sequence
  Description of Artificial Sequence: Synthetic oligonucleotide
aucguccgcuguuucauau

SEQ ID NO: 278493 - RNA, 19 nt, Artificial Sequence
  Description of Artificial Sequence: Synthetic oligonucleotide
cuaaguaugucugugucau

SEQ ID NO: 278494 - RNA, 19 nt, Artificial Sequence
  Description of Artificial Sequence: Synthetic oligonucleotide
uccuuauagcaugcaacau

SEQ ID NO: 278495 - RNA, 19 nt, Artificial Sequence
  Description of Artificial Sequence: Synthetic oligonucleotide
guugaugggagaugaaauu

SEQ ID NO: 278496 - RNA, 19 nt, Artificial Sequence
  Description of Artificial Sequence: Synthetic oligonucleotide
cuggguuagcucugaaaga

SEQ ID NO: 278497 - RNA, 19 nt, Artificial Sequence
  Description of Artificial Sequence: Synthetic oligonucleotide
cagauaccucuuucuguac

SEQ ID NO: 278498 - RNA, 19 nt, Artificial Sequence
  Description of Artificial Sequence: Synthetic oligonucleotide
auccgcaaugauuucucuu

SEQ ID NO: 278499 - RNA, 19 nt, Artificial Sequence
  Description of Artificial Sequence: Synthetic oligonucleotide
caucucucuguuucguaga

SEQ ID NO: 278500 - RNA, 19 nt, Artificial Sequence
  Description of Artificial Sequence: Synthetic oligonucleotide
uuuuacccaguugcuugac

SEQ ID NO: 278501 - RNA, 19 nt, Artificial Sequence
  Description of Artificial Sequence: Synthetic oligonucleotide
cacuaccugaaagcuguag

SEQ ID NO: 278502 - RNA, 19 nt, Artificial Sequence
  Description of Artificial Sequence: Synthetic oligonucleotide
cacuucacaagagucgaga

SEQ ID NO: 278503 - RNA, 19 nt, Artificial Sequence
  Description of Artificial Sequence: Synthetic oligonucleotide
gaagucgucguuugagaau

SEQ ID NO: 278504 - RNA, 19 nt, Artificial Sequence
  Description of Artificial Sequence: Synthetic oligonucleotide
uuguucgaagucgucguuu

SEQ ID NO: 278505 - RNA, 19 nt, Artificial Sequence
  Description of Artificial Sequence: Synthetic oligonucleotide
gucaaucucauguguucaa

SEQ ID NO: 278506 - RNA, 19 nt, Artificial Sequence
  Description of Artificial Sequence: Synthetic oligonucleotide
ccgguguaggacaaccagg

SEQ ID NO: 278507 - RNA, 19 nt, Artificial Sequence
  Description of Artificial Sequence: Synthetic oligonucleotide
guugcuugacaagucacua

SEQ ID NO: 278508 - RNA, 19 nt, Artificial Sequence
  Description of Artificial Sequence: Synthetic oligonucleotide
ucguuugcccugugauuac

SEQ ID NO: 278509 - RNA, 19 nt, Artificial Sequence
  Description of Artificial Sequence: Synthetic oligonucleotide
cucucucauacugcuguac

SEQ ID NO: 278510 - RNA, 19 nt, Artificial Sequence
  Description of Artificial Sequence: Synthetic oligonucleotide
ucacuuggccagauauguu

SEQ ID NO: 278511 - RNA, 19 nt, Artificial Sequence
  Description of Artificial Sequence: Synthetic oligonucleotide
cuuugcauacucucucaua

SEQ ID NO: 278512 - RNA, 19 nt, Artificial Sequence
  Description of Artificial Sequence: Synthetic oligonucleotide
cauugaaaucuuuggugcu

SEQ ID NO: 278513 - RNA, 19 nt, Artificial Sequence
  Description of Artificial Sequence: Synthetic oligonucleotide
agggaggugcacauuauuu

SEQ ID NO: 278514 - RNA, 19 nt, Artificial Sequence
  Description of Artificial Sequence: Synthetic oligonucleotide
gcuugagauucaugguuug

SEQ ID NO: 278515 - RNA, 19 nt, Artificial Sequence
  Description of Artificial Sequence: Synthetic oligonucleotide
ggagugacuguuucauauc

SEQ ID NO: 278516 - RNA, 19 nt, Artificial Sequence
  Description of Artificial Sequence: Synthetic oligonucleotide
ggagaauguugcaagaagu

SEQ ID NO: 278517 - RNA, 19 nt, Artificial Sequence
  Description of Artificial Sequence: Synthetic oligonucleotide
ggaggugcacauuauuucu

SEQ ID NO: 278518 - RNA, 19 nt, Artificial Sequence
  Description of Artificial Sequence: Synthetic oligonucleotide
ggugccuggcuccguaaag

SEQ ID NO: 278519 - RNA, 19 nt, Artificial Sequence
  Description of Artificial Sequence: Synthetic oligonucleotide
cuacuaucauuucuaaguu

SEQ ID NO: 278520 - RNA, 19 nt, Artificial Sequence
  Description of Artificial Sequence: Synthetic oligonucleotide
cagcaaauuauccccuuua

SEQ ID NO: 278521 - RNA, 19 nt, Artificial Sequence
  Description of Artificial Sequence: Synthetic oligonucleotide
uggcuccguaaagaguaug

SEQ ID NO: 278522 - RNA, 19 nt, Artificial Sequence
  Description of Artificial Sequence: Synthetic oligonucleotide
ccgugugauuucuucuucc

SEQ ID NO: 278523 - RNA, 19 nt, Artificial Sequence
  Description of Artificial Sequence: Synthetic oligonucleotide
gcauacucucucauacugc

SEQ ID NO: 278524 - RNA, 19 nt, Artificial Sequence
  Description of Artificial Sequence: Synthetic oligonucleotide
ucguccgcuguuucauauc

SEQ ID NO: 278525 - RNA, 19 nt, Artificial Sequence
  Description of Artificial Sequence: Synthetic oligonucleotide
ccuggcuccguaaagagua

SEQ ID NO: 278526 - RNA, 19 nt, Artificial Sequence
  Description of Artificial Sequence: Synthetic oligonucleotide
cuucaauacuagaguggaa

SEQ ID NO: 278527 - RNA, 19 nt, Artificial Sequence
  Description of Artificial Sequence: Synthetic oligonucleotide
gucgucguuugagaaucug

SEQ ID NO: 278528 - RNA, 19 nt, Artificial Sequence
  Description of Artificial Sequence: Synthetic oligonucleotide
agcucguccugaagcuuac

SEQ ID NO: 278529 - RNA, 19 nt, Artificial Sequence
  Description of Artificial Sequence: Synthetic oligonucleotide
cuuagaugauggacauaaa

SEQ ID NO: 278530 - RNA, 19 nt, Artificial Sequence
  Description of Artificial Sequence: Synthetic oligonucleotide
auacucucucauacugcug

SEQ ID NO: 278531 - RNA, 19 nt, Artificial Sequence
  Description of Artificial Sequence: Synthetic oligonucleotide
ccuuaugcuuguuacugga

SEQ ID NO: 278532 - RNA, 19 nt, Artificial Sequence
  Description of Artificial Sequence: Synthetic oligonucleotide
cacuugacagauccuggaa

SEQ ID NO: 278533 - RNA, 19 nt, Artificial Sequence
  Description of Artificial Sequence: Synthetic oligonucleotide
gauugagguucaguuucaa

SEQ ID NO: 278534 - RNA, 19 nt, Artificial Sequence
  Description of Artificial Sequence: Synthetic oligonucleotide
caagaucaaaagaaccauu

SEQ ID NO: 278535 - RNA, 19 nt, Artificial Sequence
  Description of Artificial Sequence: Synthetic oligonucleotide
ccuaaguaugucuguguca

SEQ ID NO: 278536 - RNA, 19 nt, Artificial Sequence
  Description of Artificial Sequence: Synthetic oligonucleotide
cuuccgugccuugggaauc

SEQ ID NO: 278537 - RNA, 19 nt, Artificial Sequence
  Description of Artificial Sequence: Synthetic oligonucleotide
ggagaacucauuguuucaa

SEQ ID NO: 278538 - RNA, 19 nt, Artificial Sequence
  Description of Artificial Sequence: Synthetic oligonucleotide
guucgaagucgucguuuga

SEQ ID NO: 278539 - RNA, 19 nt, Artificial Sequence
  Description of Artificial Sequence: Synthetic oligonucleotide
uucuuagaugauggacaua

SEQ ID NO: 278540 - RNA, 19 nt, Artificial Sequence
  Description of Artificial Sequence: Synthetic oligonucleotide
gcaugcaacauccuggguu

SEQ ID NO: 278541 - RNA, 19 nt, Artificial Sequence
  Description of Artificial Sequence: Synthetic oligonucleotide
cuggaucguccgcuguuuc

SEQ ID NO: 278542 - RNA, 19 nt, Artificial Sequence
  Description of Artificial Sequence: Synthetic oligonucleotide
acucucucauacugcugua

SEQ ID NO: 278543 - RNA, 19 nt, Artificial Sequence
  Description of Artificial Sequence: Synthetic oligonucleotide
cuucacaagagucgagaau

SEQ ID NO: 278544 - RNA, 19 nt, Artificial Sequence
  Description of Artificial Sequence: Synthetic oligonucleotide
uauccccuuuaggaccacu

SEQ ID NO: 278545 - RNA, 19 nt, Artificial Sequence
  Description of Artificial Sequence: Synthetic oligonucleotide
gccagauauguugauggga

SEQ ID NO: 278546 - RNA, 19 nt, Artificial Sequence
  Description of Artificial Sequence: Synthetic oligonucleotide
cgagaauuacagauccauc

SEQ ID NO: 278547 - RNA, 19 nt, Artificial Sequence
  Description of Artificial Sequence: Synthetic oligonucleotide
ucacuaccugaaagcugua

SEQ ID NO: 278548 - RNA, 19 nt, Artificial Sequence
  Description of Artificial Sequence: Synthetic oligonucleotide
cugugauuacuucuaguuu

SEQ ID NO: 278549 - RNA, 19 nt, Artificial Sequence
  Description of Artificial Sequence: Synthetic oligonucleotide
cauaaucuucuuccuuccu

SEQ ID NO: 278550 - RNA, 19 nt, Artificial Sequence
  Description of Artificial Sequence: Synthetic oligonucleotide
ucucucuguuucguagauu

SEQ ID NO: 278551 - RNA, 19 nt, Artificial Sequence
  Description of Artificial Sequence: Synthetic oligonucleotide
ucucuucaucucgcauuac

SEQ ID NO: 278552 - RNA, 19 nt, Artificial Sequence
  Description of Artificial Sequence: Synthetic oligonucleotide
uaauuuccguuuggcuuuu

SEQ ID NO: 278553 - RNA, 19 nt, Artificial Sequence
  Description of Artificial Sequence: Synthetic oligonucleotide
acagucucccaaagcaauu

SEQ ID NO: 278554 - RNA, 19 nt, Artificial Sequence
  Description of Artificial Sequence: Synthetic oligonucleotide
gaccgguguaggacaacca

SEQ ID NO: 278555 - RNA, 19 nt, Artificial Sequence
  Description of Artificial Sequence: Synthetic oligonucleotide
gucgagaauuacagaucca

SEQ ID NO: 278556 - RNA, 19 nt, Artificial Sequence
  Description of Artificial Sequence: Synthetic oligonucleotide
gccuuuuacuuccaccugu

SEQ ID NO: 278557 - RNA, 19 nt, Artificial Sequence
  Description of Artificial Sequence: Synthetic oligonucleotide
gaucguccgcuguuucaua

SEQ ID NO: 278558 - RNA, 19 nt, Artificial Sequence
  Description of Artificial Sequence: Synthetic oligonucleotide
uguaggugccuggcuccgu

SEQ ID NO: 278559 - RNA, 19 nt, Artificial Sequence
  Description of Artificial Sequence: Synthetic oligonucleotide
cuguagcuuuaagcagcgc

SEQ ID NO: 278560 - RNA, 19 nt, Artificial Sequence
  Description of Artificial Sequence: Synthetic oligonucleotide
gcggcuacacucaucuuuc

SEQ ID NO: 278561 - RNA, 19 nt, Artificial Sequence
  Description of Artificial Sequence: Synthetic oligonucleotide
guaggugccuggcuccgua

SEQ ID NO: 278562 - RNA, 19 nt, Artificial Sequence
  Description of Artificial Sequence: Synthetic oligonucleotide
ggaaaucgagugcuuugua

SEQ ID NO: 278563 - RNA, 19 nt, Artificial Sequence
  Description of Artificial Sequence: Synthetic oligonucleotide
cacugccauuuuguuuggc

SEQ ID NO: 278564 - RNA, 19 nt, Artificial Sequence
  Description of Artificial Sequence: Synthetic oligonucleotide
agcacucggucuuguucua

SEQ ID NO: 278565 - RNA, 19 nt, Artificial Sequence
  Description of Artificial Sequence: Synthetic oligonucleotide
ccacuugacagauccugga

SEQ ID NO: 278566 - RNA, 19 nt, Artificial Sequence
  Description of Artificial Sequence: Synthetic oligonucleotide
cuucguuugcccugugauu

SEQ ID NO: 278567 - RNA, 19 nt, Artificial Sequence
  Description of Artificial Sequence: Synthetic oligonucleotide
uuauccccuuuaggaccac

SEQ ID NO: 278568 - RNA, 19 nt, Artificial Sequence
  Description of Artificial Sequence: Synthetic oligonucleotide
ccuugggaaucuuaauugu

SEQ ID NO: 278569 - RNA, 19 nt, Artificial Sequence
  Description of Artificial Sequence: Synthetic oligonucleotide
gauccauccucugcugcau

SEQ ID NO: 278570 - RNA, 19 nt, Artificial Sequence
  Description of Artificial Sequence: Synthetic oligonucleotide
cgugugauuucuucuucca

SEQ ID NO: 278571 - RNA, 19 nt, Artificial Sequence
  Description of Artificial Sequence: Synthetic oligonucleotide
agucgucguuugagaaucu

SEQ ID NO: 278572 - RNA, 19 nt, Artificial Sequence
  Description of Artificial Sequence: Synthetic oligonucleotide
caucugcgccuccacagcu

SEQ ID NO: 278573 - RNA, 19 nt, Artificial Sequence
  Description of Artificial Sequence: Synthetic oligonucleotide
gucuuuuacccaguugcuu

SEQ ID NO: 278574 - RNA, 19 nt, Artificial Sequence
  Description of Artificial Sequence: Synthetic oligonucleotide
cccugcgcucucuacagca

SEQ ID NO: 278575 - RNA, 19 nt, Artificial Sequence
  Description of Artificial Sequence: Synthetic oligonucleotide
cucauacugcuguaccguu

SEQ ID NO: 278576 - RNA, 19 nt, Artificial Sequence
  Description of Artificial Sequence: Synthetic oligonucleotide
ggcuccguaaagaguaugu

SEQ ID NO: 278577 - RNA, 19 nt, Artificial Sequence
  Description of Artificial Sequence: Synthetic oligonucleotide
ccaauucuuuggcuagcca

SEQ ID NO: 278578 - RNA, 19 nt, Artificial Sequence
  Description of Artificial Sequence: Synthetic oligonucleotide
ggucccgcuccucucucca

SEQ ID NO: 278579 - RNA, 19 nt, Artificial Sequence
  Description of Artificial Sequence: Synthetic oligonucleotide
cugaaagagcuugcucucu

SEQ ID NO: 278580 - RNA, 19 nt, Artificial Sequence
  Description of Artificial Sequence: Synthetic oligonucleotide
cuuuuacacuuagaucuuu

SEQ ID NO: 278581 - RNA, 19 nt, Artificial Sequence
  Description of Artificial Sequence: Synthetic oligonucleotide
ccaagaucaaaagaaccau

SEQ ID NO: 278582 - RNA, 19 nt, Artificial Sequence
  Description of Artificial Sequence: Synthetic oligonucleotide
guaccguuucuuccauuuu

SEQ ID NO: 278583 - RNA, 19 nt, Artificial Sequence
  Description of Artificial Sequence: Synthetic oligonucleotide
guuagcucugaaagagcuu

SEQ ID NO: 278584 - RNA, 19 nt, Artificial Sequence
  Description of Artificial Sequence: Synthetic oligonucleotide
gugaccgguguaggacaac

SEQ ID NO: 278585 - RNA, 19 nt, Artificial Sequence
  Description of Artificial Sequence: Synthetic oligonucleotide
gguguaggacaaccagggu

SEQ ID NO: 278586 - RNA, 19 nt, Artificial Sequence
  Description of Artificial Sequence: Synthetic oligonucleotide
ccgcaaugauuucucuuca

SEQ ID NO: 278587 - RNA, 19 nt, Artificial Sequence
  Description of Artificial Sequence: Synthetic oligonucleotide
cugcgccuccacagcugug

SEQ ID NO: 278588 - RNA, 19 nt, Artificial Sequence
  Description of Artificial Sequence: Synthetic oligonucleotide
ggacaaccagggugcuuca

SEQ ID NO: 278589 - RNA, 19 nt, Artificial Sequence
  Description of Artificial Sequence: Synthetic oligonucleotide
cuuguucgaagucgucguu

SEQ ID NO: 278590 - RNA, 19 nt, Artificial Sequence
  Description of Artificial Sequence: Synthetic oligonucleotide
cgucguuugagaaucugau

SEQ ID NO: 278591 - RNA, 19 nt, Artificial Sequence
  Description of Artificial Sequence: Synthetic oligonucleotide
gccucaagcacucggucuu

SEQ ID NO: 278592 - RNA, 19 nt, Artificial Sequence
  Description of Artificial Sequence: Synthetic oligonucleotide
cguaaagaguauguuuucu

SEQ ID NO: 278593 - RNA, 19 nt, Artificial Sequence
  Description of Artificial Sequence: Synthetic oligonucleotide
ucccugucuucagcauauu

SEQ ID NO: 278594 - RNA, 19 nt, Artificial Sequence
  Description of Artificial Sequence: Synthetic oligonucleotide
guaggacaaccagggugcu

SEQ ID NO: 278595 - RNA, 19 nt, Artificial Sequence
  Description of Artificial Sequence: Synthetic oligonucleotide
caucuucggggucuucguu

SEQ ID NO: 278596 - RNA, 19 nt, Artificial Sequence
  Description of Artificial Sequence: Synthetic oligonucleotide
guccgcuguuucauaucua

SEQ ID NO: 278597 - RNA, 19 nt, Artificial Sequence
  Description of Artificial Sequence: Synthetic oligonucleotide
gcuaagcggcuacacucau

SEQ ID NO: 278598 - RNA, 19 nt, Artificial Sequence
  Description of Artificial Sequence: Synthetic oligonucleotide
gcuccguaaagaguauguu

SEQ ID NO: 278599 - RNA, 19 nt, Artificial Sequence
  Description of Artificial Sequence: Synthetic oligonucleotide
cgcauuacagauaccucuu

SEQ ID NO: 278600 - RNA, 19 nt, Artificial Sequence
  Description of Artificial Sequence: Synthetic oligonucleotide
gcuuauccucacucuccuu

SEQ ID NO: 278601 - RNA, 19 nt, Artificial Sequence
  Description of Artificial Sequence: Synthetic oligonucleotide
gcuggaucguccgcuguuu

SEQ ID NO: 278602 - RNA, 19 nt, Artificial Sequence
  Description of Artificial Sequence: Synthetic oligonucleotide
ccgcuguuucauaucuauu

SEQ ID NO: 278603 - RNA, 19 nt, Artificial Sequence
  Description of Artificial Sequence: Synthetic oligonucleotide
cccgcuccucucuccacuu

SEQ ID NO: 278604 - RNA, 19 nt, Artificial Sequence
  Description of Artificial Sequence: Synthetic oligonucleotide
ucuaauuuagauuagguag

SEQ ID NO: 278605 - RNA, 19 nt, Artificial Sequence
  Description of Artificial Sequence: Synthetic oligonucleotide
aguuacucaaguuucaggc

SEQ ID NO: 278606 - RNA, 19 nt, Artificial Sequence
  Description of Artificial Sequence: Synthetic oligonucleotide
aaugcaaugggguccaccc

SEQ ID NO: 278607 - RNA, 19 nt, Artificial Sequence
  Description of Artificial Sequence: Synthetic oligonucleotide
ucucuaauuuccaagauac

SEQ ID NO: 278608 - RNA, 19 nt, Artificial Sequence
  Description of Artificial Sequence: Synthetic oligonucleotide
gauaguauuucuucuagcc

SEQ ID NO: 278609 - RNA, 19 nt, Artificial Sequence
  Description of Artificial Sequence: Synthetic oligonucleotide
gaacuuacacacuuggacg

SEQ ID NO: 278610 - RNA, 19 nt, Artificial Sequence
  Description of Artificial Sequence: Synthetic oligonucleotide
ucuuuaacggccuuggggc

SEQ ID NO: 278611 - RNA, 19 nt, Artificial Sequence
  Description of Artificial Sequence: Synthetic oligonucleotide
uuaugaagagcugugaugc

SEQ ID NO: 278612 - RNA, 19 nt, Artificial Sequence
  Description of Artificial Sequence: Synthetic oligonucleotide
uauaguccuagcaaguugc

SEQ ID NO: 278613 - RNA, 19 nt, Artificial Sequence
  Description of Artificial Sequence: Synthetic oligonucleotide
aaauggucccauuucuugg

SEQ ID NO: 278614 - RNA, 19 nt, Artificial Sequence
  Description of Artificial Sequence: Synthetic oligonucleotide
auagauugagcuuguggcc

SEQ ID NO: 278615 - RNA, 19 nt, Artificial Sequence
  Description of Artificial Sequence: Synthetic oligonucleotide
uuuuacgcaaguuuguucu

SEQ ID NO: 278616 - RNA, 19 nt, Artificial Sequence
  Description of Artificial Sequence: Synthetic oligonucleotide
aacuccauaaagaaacugg

SEQ ID NO: 278617 - RNA, 19 nt, Artificial Sequence
  Description of Artificial Sequence: Synthetic oligonucleotide
augaugauaguauuucuuc

SEQ ID NO: 278618 - RNA, 19 nt, Artificial Sequence
  Description of Artificial Sequence: Synthetic oligonucleotide
uggacguuguuacaggacg

SEQ ID NO: 278619 - RNA, 19 nt, Artificial Sequence
  Description of Artificial Sequence: Synthetic oligonucleotide
aaggauuagacaagaaagg

SEQ ID NO: 278620 - RNA, 19 nt, Artificial Sequence
  Description of Artificial Sequence: Synthetic oligonucleotide
uugcuuucaagcuacacug

SEQ ID NO: 278621 - RNA, 19 nt, Artificial Sequence
  Description of Artificial Sequence: Synthetic oligonucleotide
aaugcaagaggguugaauu

SEQ ID NO: 278622 - RNA, 19 nt, Artificial Sequence
  Description of Artificial Sequence: Synthetic oligonucleotide
gaggacuuggucuuggccg

SEQ ID NO: 278623 - RNA, 19 nt, Artificial Sequence
  Description of Artificial Sequence: Synthetic oligonucleotide
uaaaugaggggccucuggg

SEQ ID NO: 278624 - RNA, 19 nt, Artificial Sequence
  Description of Artificial Sequence: Synthetic oligonucleotide
uguaaauauggauuuggga

SEQ ID NO: 278625 - RNA, 19 nt, Artificial Sequence
  Description of Artificial Sequence: Synthetic oligonucleotide
uguuacaggacgcagcaca

SEQ ID NO: 278626 - RNA, 19 nt, Artificial Sequence
  Description of Artificial Sequence: Synthetic oligonucleotide
aggauuagacaagaaaggc

SEQ ID NO: 278627 - RNA, 19 nt, Artificial Sequence
  Description of Artificial Sequence: Synthetic oligonucleotide
ucaaguuucaggccaagcu

SEQ ID NO: 278628 - RNA, 19 nt, Artificial Sequence
  Description of Artificial Sequence: Synthetic oligonucleotide
agugauuucgugcgggcgc

SEQ ID NO: 278629 - RNA, 19 nt, Artificial Sequence
  Description of Artificial Sequence: Synthetic oligonucleotide
uauacauggaauagauuga

SEQ ID NO: 278630 - RNA, 19 nt, Artificial Sequence
  Description of Artificial Sequence: Synthetic oligonucleotide
ucuaauuuccaagauacaa

SEQ ID NO: 278631 - RNA, 19 nt, Artificial Sequence
  Description of Artificial Sequence: Synthetic oligonucleotide
ugucauuaaaguaagucuu

SEQ ID NO: 278632 - RNA, 19 nt, Artificial Sequence
  Description of Artificial Sequence: Synthetic oligonucleotide
uucaugacucucaugaccu

SEQ ID NO: 278633 - RNA, 19 nt, Artificial Sequence
  Description of Artificial Sequence: Synthetic oligonucleotide
uguaagucauugcaaacac

SEQ ID NO: 278634 - RNA, 19 nt, Artificial Sequence
  Description of Artificial Sequence: Synthetic oligonucleotide
ugccauauacacuugaaaa

SEQ ID NO: 278635 - RNA, 19 nt, Artificial Sequence
  Description of Artificial Sequence: Synthetic oligonucleotide
uugagcuuagcucccaugc

SEQ ID NO: 278636 - RNA, 19 nt, Artificial Sequence
  Description of Artificial Sequence: Synthetic oligonucleotide
aacuuacacacuuggacgu

SEQ ID NO: 278637 - RNA, 19 nt, Artificial Sequence
  Description of Artificial Sequence: Synthetic oligonucleotide
ucacugacgauacucaagu

SEQ ID NO: 278638 - RNA, 19 nt, Artificial Sequence
  Description of Artificial Sequence: Synthetic oligonucleotide
uaaauggucccauuucuug

SEQ ID NO: 278639 - RNA, 19 nt, Artificial Sequence
  Description of Artificial Sequence: Synthetic oligonucleotide
auugcuuucaagcuacacu

SEQ ID NO: 278640 - RNA, 19 nt, Artificial Sequence
  Description of Artificial Sequence: Synthetic oligonucleotide
ucucaugaccugaagaaac

SEQ ID NO: 278641 - RNA, 19 nt, Artificial Sequence
  Description of Artificial Sequence: Synthetic oligonucleotide
uucaaguaaaugaggggcc

SEQ ID NO: 278642 - RNA, 19 nt, Artificial Sequence
  Description of Artificial Sequence: Synthetic oligonucleotide
ucuugacaaauacagguaa

SEQ ID NO: 278643 - RNA, 19 nt, Artificial Sequence
  Description of Artificial Sequence: Synthetic oligonucleotide
uguuauagagcuccguuuc

SEQ ID NO: 278644 - RNA, 19 nt, Artificial Sequence
  Description of Artificial Sequence: Synthetic oligonucleotide
cauguaaauauggauuugg

SEQ ID NO: 278645 - RNA, 19 nt, Artificial Sequence
  Description of Artificial Sequence: Synthetic oligonucleotide
acgacggucaugcaauccc

SEQ ID NO: 278646 - RNA, 19 nt, Artificial Sequence
  Description of Artificial Sequence: Synthetic oligonucleotide
ugcugcauuuacauugacg

SEQ ID NO: 278647 - RNA, 19 nt, Artificial Sequence
  Description of Artificial Sequence: Synthetic oligonucleotide
cugaguguagccuucuucc

SEQ ID NO: 278648 - RNA, 19 nt, Artificial Sequence
  Description of Artificial Sequence: Synthetic oligonucleotide
uuggcuuagagacaaaauu

SEQ ID NO: 278649 - RNA, 19 nt, Artificial Sequence
  Description of Artificial Sequence: Synthetic oligonucleotide
cauuccaugagcaauccuc

SEQ ID NO: 278650 - RNA, 19 nt, Artificial Sequence
  Description of Artificial Sequence: Synthetic oligonucleotide
uggguauaguccuagcaag

SEQ ID NO: 278651 - RNA, 19 nt, Artificial Sequence
  Description of Artificial Sequence: Synthetic oligonucleotide
aguuauugcucacugacaa

SEQ ID NO: 278652 - RNA, 19 nt, Artificial Sequence
  Description of Artificial Sequence: Synthetic oligonucleotide
auagccuuccuugucaugg

SEQ ID NO: 278653 - RNA, 19 nt, Artificial Sequence
  Description of Artificial Sequence: Synthetic oligonucleotide
uuagcucccaugcauugag

SEQ ID NO: 278654 - RNA, 19 nt, Artificial Sequence
  Description of Artificial Sequence: Synthetic oligonucleotide
auauaugcauaauucuuca

SEQ ID NO: 278655 - RNA, 19 nt, Artificial Sequence
  Description of Artificial Sequence: Synthetic oligonucleotide
acugacgauacucaagugu

SEQ ID NO: 278656 - RNA, 19 nt, Artificial Sequence
  Description of Artificial Sequence: Synthetic oligonucleotide
cuucuagccuauuauuucc

SEQ ID NO: 278657 - RNA, 19 nt, Artificial Sequence
  Description of Artificial Sequence: Synthetic oligonucleotide
auacaauaguuauugcuca

SEQ ID NO: 278658 - RNA, 19 nt, Artificial Sequence
  Description of Artificial Sequence: Synthetic oligonucleotide
aggaauagauguucucugg

SEQ ID NO: 278659 - RNA, 19 nt, Artificial Sequence
  Description of Artificial Sequence: Synthetic oligonucleotide
agcuccguuucuuuaacgg

SEQ ID NO: 278660 - RNA, 19 nt, Artificial Sequence
  Description of Artificial Sequence: Synthetic oligonucleotide
uucuagguauacuucaagu

SEQ ID NO: 278661 - RNA, 19 nt, Artificial Sequence
  Description of Artificial Sequence: Synthetic oligonucleotide
caaguugcguggaacauag

SEQ ID NO: 278662 - RNA, 19 nt, Artificial Sequence
  Description of Artificial Sequence: Synthetic oligonucleotide
cugacgauacucaagugug

SEQ ID NO: 278663 - RNA, 19 nt, Artificial Sequence
  Description of Artificial Sequence: Synthetic oligonucleotide
uucacugacgauacucaag

SEQ ID NO: 278664 - RNA, 19 nt, Artificial Sequence
  Description of Artificial Sequence: Synthetic oligonucleotide
uaguauuucuucuagccua

SEQ ID NO: 278665 - RNA, 19 nt, Artificial Sequence
  Description of Artificial Sequence: Synthetic oligonucleotide
uccaaagacgaaucuagga

SEQ ID NO: 278666 - RNA, 19 nt, Artificial Sequence
  Description of Artificial Sequence: Synthetic oligonucleotide
uuggguauaguccuagcaa

SEQ ID NO: 278667 - RNA, 19 nt, Artificial Sequence
  Description of Artificial Sequence: Synthetic oligonucleotide
ucuagguauacuucaagua

SEQ ID NO: 278668 - RNA, 19 nt, Artificial Sequence
  Description of Artificial Sequence: Synthetic oligonucleotide
aguuucguugggcugagug

SEQ ID NO: 278669 - RNA, 19 nt, Artificial Sequence
  Description of Artificial Sequence: Synthetic oligonucleotide
gauacucaagugugcagcc

SEQ ID NO: 278670 - RNA, 19 nt, Artificial Sequence
  Description of Artificial Sequence: Synthetic oligonucleotide
uuagauuagguaguauugu

SEQ ID NO: 278671 - RNA, 19 nt, Artificial Sequence
  Description of Artificial Sequence: Synthetic oligonucleotide
ugauaguauuucuucuagc

SEQ ID NO: 278672 - RNA, 19 nt, Artificial Sequence
  Description of Artificial Sequence: Synthetic oligonucleotide
uggcuuagagacaaaauuu

SEQ ID NO: 278673 - RNA, 19 nt, Artificial Sequence
  Description of Artificial Sequence: Synthetic oligonucleotide
auuucgugcgggcgcaugc

SEQ ID NO: 278674 - RNA, 19 nt, Artificial Sequence
  Description of Artificial Sequence: Synthetic oligonucleotide
auugcucacugacaaguag

SEQ ID NO: 278675 - RNA, 19 nt, Artificial Sequence
  Description of Artificial Sequence: Synthetic oligonucleotide
ucuucuagccuauuauuuc

SEQ ID NO: 278676 - RNA, 19 nt, Artificial Sequence
  Description of Artificial Sequence: Synthetic oligonucleotide
ggaacuuacacacuuggac

SEQ ID NO: 278677 - RNA, 19 nt, Artificial Sequence
  Description of Artificial Sequence: Synthetic oligonucleotide
auuagguaguauuguuuag

SEQ ID NO: 278678 - RNA, 19 nt, Artificial Sequence
  Description of Artificial Sequence: Synthetic oligonucleotide
guuucguugggcugagugg

SEQ ID NO: 278679 - RNA, 19 nt, Artificial Sequence
  Description of Artificial Sequence: Synthetic oligonucleotide
cuccguuucuuuaacggcc

SEQ ID NO: 278680 - RNA, 19 nt, Artificial Sequence
  Description of Artificial Sequence: Synthetic oligonucleotide
ugugacuuggucagggcac

SEQ ID NO: 278681 - RNA, 19 nt, Artificial Sequence
  Description of Artificial Sequence: Synthetic oligonucleotide
gguaguauuguuuaguuua

SEQ ID NO: 278682 - RNA, 19 nt, Artificial Sequence
  Description of Artificial Sequence: Synthetic oligonucleotide
augcuacaggaacucauac

SEQ ID NO: 278683 - RNA, 19 nt, Artificial Sequence
  Description of Artificial Sequence: Synthetic oligonucleotide
aaucucuaauuuccaagau

SEQ ID NO: 278684 - RNA, 19 nt, Artificial Sequence
  Description of Artificial Sequence: Synthetic oligonucleotide
ucgguaaggauuagacaag

SEQ ID NO: 278685 - RNA, 19 nt, Artificial Sequence
  Description of Artificial Sequence: Synthetic oligonucleotide
ucuguuauagagcuccguu

SEQ ID NO: 278686 - RNA, 19 nt, Artificial Sequence
  Description of Artificial Sequence: Synthetic oligonucleotide
uuagguaguauuguuuagu

SEQ ID NO: 278687 - RNA, 19 nt, Artificial Sequence
  Description of Artificial Sequence: Synthetic oligonucleotide
caugcaauccccuucucuc

SEQ ID NO: 278688 - RNA, 19 nt, Artificial Sequence
  Description of Artificial Sequence: Synthetic oligonucleotide
auacauggaauagauugag

SEQ ID NO: 278689 - RNA, 19 nt, Artificial Sequence
  Description of Artificial Sequence: Synthetic oligonucleotide
caauaguuauugcucacug

SEQ ID NO: 278690 - RNA, 19 nt, Artificial Sequence
  Description of Artificial Sequence: Synthetic oligonucleotide
uccccauacuccucuaggg

SEQ ID NO: 278691 - RNA, 19 nt, Artificial Sequence
  Description of Artificial Sequence: Synthetic oligonucleotide
ucgucauuggguaggcuug

SEQ ID NO: 278692 - RNA, 19 nt, Artificial Sequence
  Description of Artificial Sequence: Synthetic oligonucleotide
guuucgguaaggauuagac

SEQ ID NO: 278693 - RNA, 19 nt, Artificial Sequence
  Description of Artificial Sequence: Synthetic oligonucleotide
cuagguauacuucaaguaa

SEQ ID NO: 278694 - RNA, 19 nt, Artificial Sequence
  Description of Artificial Sequence: Synthetic oligonucleotide
augagcaauccucucggag

SEQ ID NO: 278695 - RNA, 19 nt, Artificial Sequence
  Description of Artificial Sequence: Synthetic oligonucleotide
gaugauaguauuucuucua

SEQ ID NO: 278696 - RNA, 19 nt, Artificial Sequence
  Description of Artificial Sequence: Synthetic oligonucleotide
augcauugagcagugauug

SEQ ID NO: 278697 - RNA, 19 nt, Artificial Sequence
  Description of Artificial Sequence: Synthetic oligonucleotide
ugacaaguagcuaccaguu

SEQ ID NO: 278698 - RNA, 19 nt, Artificial Sequence
  Description of Artificial Sequence: Synthetic oligonucleotide
uaguuauugcucacugaca

SEQ ID NO: 278699 - RNA, 19 nt, Artificial Sequence
  Description of Artificial Sequence: Synthetic oligonucleotide
cauuggguaggcuuggguc

SEQ ID NO: 278700 - RNA, 19 nt, Artificial Sequence
  Description of Artificial Sequence: Synthetic oligonucleotide
guauaguccuagcaaguug

SEQ ID NO: 278701 - RNA, 19 nt, Artificial Sequence
  Description of Artificial Sequence: Synthetic oligonucleotide
uugccauauacacuugaaa

SEQ ID NO: 278702 - RNA, 19 nt, Artificial Sequence
  Description of Artificial Sequence: Synthetic oligonucleotide
ugugcuauucuggagacuu

SEQ ID NO: 278703 - RNA, 19 nt, Artificial Sequence
  Description of Artificial Sequence: Synthetic oligonucleotide
uucuacuggguucuccgug

SEQ ID NO: 278704 - RNA, 19 nt, Artificial Sequence
  Description of Artificial Sequence: Synthetic oligonucleotide
acaggaauagauguucucu

SEQ ID NO: 278705 - RNA, 19 nt, Artificial Sequence
  Description of Artificial Sequence: Synthetic oligonucleotide
ucaugcaauccccuucucu

SEQ ID NO: 278706 - RNA, 19 nt, Artificial Sequence
  Description of Artificial Sequence: Synthetic oligonucleotide
agagcuccguuucuuuaac

SEQ ID NO: 278707 - RNA, 19 nt, Artificial Sequence
  Description of Artificial Sequence: Synthetic oligonucleotide
guuguuacaggacgcagca

SEQ ID NO: 278708 - RNA, 19 nt, Artificial Sequence
  Description of Artificial Sequence: Synthetic oligonucleotide
ugucuugguuuaauucuug

SEQ ID NO: 278709 - RNA, 19 nt, Artificial Sequence
  Description of Artificial Sequence: Synthetic oligonucleotide
caggaauagauguucucug

SEQ ID NO: 278710 - RNA, 19 nt, Artificial Sequence
  Description of Artificial Sequence: Synthetic oligonucleotide
uagauugagcuuguggcca

SEQ ID NO: 278711 - RNA, 19 nt, Artificial Sequence
  Description of Artificial Sequence: Synthetic oligonucleotide
ucgaggaauccuuucauuu

SEQ ID NO: 278712 - RNA, 19 nt, Artificial Sequence
  Description of Artificial Sequence: Synthetic oligonucleotide
ugcauugagcagugauugg

SEQ ID NO: 278713 - RNA, 19 nt, Artificial Sequence
  Description of Artificial Sequence: Synthetic oligonucleotide
ucuccguguugacagguca

SEQ ID NO: 278714 - RNA, 19 nt, Artificial Sequence
  Description of Artificial Sequence: Synthetic oligonucleotide
cuucuagguauacuucaag

SEQ ID NO: 278715 - RNA, 19 nt, Artificial Sequence
  Description of Artificial Sequence: Synthetic oligonucleotide
uacaauaguuauugcucac

SEQ ID NO: 278716 - RNA, 19 nt, Artificial Sequence
  Description of Artificial Sequence: Synthetic oligonucleotide
agauugagcuuguggccac

SEQ ID NO: 278717 - RNA, 19 nt, Artificial Sequence
  Description of Artificial Sequence: Synthetic oligonucleotide
gacucucaugaccugaaga

SEQ ID NO: 278718 - RNA, 19 nt, Artificial Sequence
  Description of Artificial Sequence: Synthetic oligonucleotide
cuugguuuaauucuugggu

SEQ ID NO: 278719 - RNA, 19 nt, Artificial Sequence
  Description of Artificial Sequence: Synthetic oligonucleotide
ucucggagccaguuuuacg

SEQ ID NO: 278720 - RNA, 19 nt, Artificial Sequence
  Description of Artificial Sequence: Synthetic oligonucleotide
gaacucauacaauaguuau

SEQ ID NO: 278721 - RNA, 19 nt, Artificial Sequence
  Description of Artificial Sequence: Synthetic oligonucleotide
cuaauuuagauuagguagu

SEQ ID NO: 278722 - RNA, 19 nt, Artificial Sequence
  Description of Artificial Sequence: Synthetic oligonucleotide
aaggugcuggcacaucgcu

SEQ ID NO: 278723 - RNA, 19 nt, Artificial Sequence
  Description of Artificial Sequence: Synthetic oligonucleotide
auuguuuaguuuaaguauu

SEQ ID NO: 278724 - RNA, 19 nt, Artificial Sequence
  Description of Artificial Sequence: Synthetic oligonucleotide
cuagggacaacgguucagg

SEQ ID NO: 278725 - RNA, 19 nt, Artificial Sequence
  Description of Artificial Sequence: Synthetic oligonucleotide
uagauuagguaguauuguu

SEQ ID NO: 278726 - RNA, 19 nt, Artificial Sequence
  Description of Artificial Sequence: Synthetic oligonucleotide
uucuggacugccaggcuug

SEQ ID NO: 278727 - RNA, 19 nt, Artificial Sequence
  Description of Artificial Sequence: Synthetic oligonucleotide
guccuagcaaguugcgugg

SEQ ID NO: 278728 - RNA, 19 nt, Artificial Sequence
  Description of Artificial Sequence: Synthetic oligonucleotide
ugagcuuagcucccaugca

SEQ ID NO: 278729 - RNA, 19 nt, Artificial Sequence
  Description of Artificial Sequence: Synthetic oligonucleotide
acgguucaggaacugaaga

SEQ ID NO: 278730 - RNA, 19 nt, Artificial Sequence
  Description of Artificial Sequence: Synthetic oligonucleotide
gaacuccauaaagaaacug

SEQ ID NO: 278731 - RNA, 19 nt, Artificial Sequence
  Description of Artificial Sequence: Synthetic oligonucleotide
auuucacccucauuccaug

SEQ ID NO: 278732 - RNA, 19 nt, Artificial Sequence
  Description of Artificial Sequence: Synthetic oligonucleotide
auuagggccuucugguucu

SEQ ID NO: 278733 - RNA, 19 nt, Artificial Sequence
  Description of Artificial Sequence: Synthetic oligonucleotide
uuguuuaguuuaaguauuu

SEQ ID NO: 278734 - RNA, 19 nt, Artificial Sequence
  Description of Artificial Sequence: Synthetic oligonucleotide
ugcaaugggguccacccau

SEQ ID NO: 278735 - RNA, 19 nt, Artificial Sequence
  Description of Artificial Sequence: Synthetic oligonucleotide
guuuuacgcaaguuuguuc

SEQ ID NO: 278736 - RNA, 19 nt, Artificial Sequence
  Description of Artificial Sequence: Synthetic oligonucleotide
ucaaguaaaugaggggccu

SEQ ID NO: 278737 - RNA, 19 nt, Artificial Sequence
  Description of Artificial Sequence: Synthetic oligonucleotide
uggguauacauggaauaga

SEQ ID NO: 278738 - RNA, 19 nt, Artificial Sequence
  Description of Artificial Sequence: Synthetic oligonucleotide
aacgguucaggaacugaag

SEQ ID NO: 278739 - RNA, 19 nt, Artificial Sequence
  Description of Artificial Sequence: Synthetic oligonucleotide
cuggguauacauggaauag

SEQ ID NO: 278740 - RNA, 19 nt, Artificial Sequence
  Description of Artificial Sequence: Synthetic oligonucleotide
aauuuagauuagguaguau

SEQ ID NO: 278741 - RNA, 19 nt, Artificial Sequence
  Description of Artificial Sequence: Synthetic oligonucleotide
uuggacguuguuacaggac

SEQ ID NO: 278742 - RNA, 19 nt, Artificial Sequence
  Description of Artificial Sequence: Synthetic oligonucleotide
cacacacagcguuaugaag

SEQ ID NO: 278743 - RNA, 19 nt, Artificial Sequence
  Description of Artificial Sequence: Synthetic oligonucleotide
acaauaguuauugcucacu

SEQ ID NO: 278744 - RNA, 19 nt, Artificial Sequence
  Description of Artificial Sequence: Synthetic oligonucleotide
augacuccuuuguucauga

SEQ ID NO: 278745 - RNA, 19 nt, Artificial Sequence
  Description of Artificial Sequence: Synthetic oligonucleotide
ugcuggguauacauggaau

SEQ ID NO: 278746 - RNA, 19 nt, Artificial Sequence
  Description of Artificial Sequence: Synthetic oligonucleotide
uguuuaguuuaaguauuuc

SEQ ID NO: 278747 - RNA, 19 nt, Artificial Sequence
  Description of Artificial Sequence: Synthetic oligonucleotide
ucuguaccggcacucccca

SEQ ID NO: 278748 - RNA, 19 nt, Artificial Sequence
  Description of Artificial Sequence: Synthetic oligonucleotide
acgauacucaagugugcag

SEQ ID NO: 278749 - RNA, 19 nt, Artificial Sequence
  Description of Artificial Sequence: Synthetic oligonucleotide
accacucgauuucauccuc

SEQ ID NO: 278750 - RNA, 19 nt, Artificial Sequence
  Description of Artificial Sequence: Synthetic oligonucleotide
gaauagauguucucugggu

SEQ ID NO: 278751 - RNA, 19 nt, Artificial Sequence
  Description of Artificial Sequence: Synthetic oligonucleotide
gacgcagcacaaugcaaug

SEQ ID NO: 278752 - RNA, 19 nt, Artificial Sequence
  Description of Artificial Sequence: Synthetic oligonucleotide
uaauuuagauuagguagua

SEQ ID NO: 278753 - RNA, 19 nt, Artificial Sequence
  Description of Artificial Sequence: Synthetic oligonucleotide
ucuagggacaacgguucag

SEQ ID NO: 278754 - RNA, 19 nt, Artificial Sequence
  Description of Artificial Sequence: Synthetic oligonucleotide
gagcuccguuucuuuaacg

SEQ ID NO: 278755 - RNA, 19 nt, Artificial Sequence
  Description of Artificial Sequence: Synthetic oligonucleotide
uuugugucuucugugcuau

SEQ ID NO: 278756 - RNA, 19 nt, Artificial Sequence
  Description of Artificial Sequence: Synthetic oligonucleotide
cuuggguauaguccuagca

SEQ ID NO: 278757 - RNA, 19 nt, Artificial Sequence
  Description of Artificial Sequence: Synthetic oligonucleotide
ugacucucaugaccugaag

SEQ ID NO: 278758 - RNA, 19 nt, Artificial Sequence
  Description of Artificial Sequence: Synthetic oligonucleotide
cacagcguuaugaagagcu

SEQ ID NO: 278759 - RNA, 19 nt, Artificial Sequence
  Description of Artificial Sequence: Synthetic oligonucleotide
uuccgcagggcuucuaagu

SEQ ID NO: 278760 - RNA, 19 nt, Artificial Sequence
  Description of Artificial Sequence: Synthetic oligonucleotide
cacuuggacguuguuacag

SEQ ID NO: 278761 - RNA, 19 nt, Artificial Sequence
  Description of Artificial Sequence: Synthetic oligonucleotide
ucuagccuauuauuuccuc

SEQ ID NO: 278762 - RNA, 19 nt, Artificial Sequence
  Description of Artificial Sequence: Synthetic oligonucleotide
uuucacccucauuccauga

SEQ ID NO: 278763 - RNA, 19 nt, Artificial Sequence
  Description of Artificial Sequence: Synthetic oligonucleotide
gacgauacucaagugugca

SEQ ID NO: 278764 - RNA, 19 nt, Artificial Sequence
  Description of Artificial Sequence: Synthetic oligonucleotide
uuggguaugaugggacuga

SEQ ID NO: 278765 - RNA, 19 nt, Artificial Sequence
  Description of Artificial Sequence: Synthetic oligonucleotide
uguaccggcacuccccaua

SEQ ID NO: 278766 - RNA, 19 nt, Artificial Sequence
  Description of Artificial Sequence: Synthetic oligonucleotide
cuagcaaguugcguggaac

SEQ ID NO: 278767 - RNA, 19 nt, Artificial Sequence
  Description of Artificial Sequence: Synthetic oligonucleotide
cauagucaaggccuggaga

SEQ ID NO: 278768 - RNA, 19 nt, Artificial Sequence
  Description of Artificial Sequence: Synthetic oligonucleotide
ucguugggcugaguggucg

SEQ ID NO: 278769 - RNA, 19 nt, Artificial Sequence
  Description of Artificial Sequence: Synthetic oligonucleotide
agcuaucacaggcuugcca

SEQ ID NO: 278770 - RNA, 19 nt, Artificial Sequence
  Description of Artificial Sequence: Synthetic oligonucleotide
gacaaguagcuaccaguuc

SEQ ID NO: 278771 - RNA, 19 nt, Artificial Sequence
  Description of Artificial Sequence: Synthetic oligonucleotide
acaagauucuaaaucuaau

SEQ ID NO: 278772 - RNA, 19 nt, Artificial Sequence
  Description of Artificial Sequence: Synthetic oligonucleotide
ucucccuccaaagacgaau

SEQ ID NO: 278773 - RNA, 19 nt, Artificial Sequence
  Description of Artificial Sequence: Synthetic oligonucleotide
auuccaugagcaauccucu

SEQ ID NO: 278774 - RNA, 19 nt, Artificial Sequence
  Description of Artificial Sequence: Synthetic oligonucleotide
ucauuccaugagcaauccu

SEQ ID NO: 278775 - RNA, 19 nt, Artificial Sequence
  Description of Artificial Sequence: Synthetic oligonucleotide
ugaguggucgaggaauccu

SEQ ID NO: 278776 - RNA, 19 nt, Artificial Sequence
  Description of Artificial Sequence: Synthetic oligonucleotide
cuuggccgccugaaggugc

SEQ ID NO: 278777 - RNA, 19 nt, Artificial Sequence
  Description of Artificial Sequence: Synthetic oligonucleotide
agacuuggacugcugucug

SEQ ID NO: 278778 - RNA, 19 nt, Artificial Sequence
  Description of Artificial Sequence: Synthetic oligonucleotide
uuucgugcgggcgcaugcg

SEQ ID NO: 278779 - RNA, 19 nt, Artificial Sequence
  Description of Artificial Sequence: Synthetic oligonucleotide
ccaugagcaauccucucgg

SEQ ID NO: 278780 - RNA, 19 nt, Artificial Sequence
  Description of Artificial Sequence: Synthetic oligonucleotide
gaggguaugguggguauuc

SEQ ID NO: 278781 - RNA, 19 nt, Artificial Sequence
  Description of Artificial Sequence: Synthetic oligonucleotide
agggacaacgguucaggaa

SEQ ID NO: 278782 - RNA, 19 nt, Artificial Sequence
  Description of Artificial Sequence: Synthetic oligonucleotide
cuuggacguuguuacagga

SEQ ID NO: 278783 - RNA, 19 nt, Artificial Sequence
  Description of Artificial Sequence: Synthetic oligonucleotide
cugguuucgguaaggauua

SEQ ID NO: 278784 - RNA, 19 nt, Artificial Sequence
  Description of Artificial Sequence: Synthetic oligonucleotide
ucggagccaguuuuacgca

SEQ ID NO: 278785 - RNA, 19 nt, Artificial Sequence
  Description of Artificial Sequence: Synthetic oligonucleotide
auaguccuagcaaguugcg

SEQ ID NO: 278786 - RNA, 19 nt, Artificial Sequence
  Description of Artificial Sequence: Synthetic oligonucleotide
cucauuccaugagcaaucc

SEQ ID NO: 278787 - RNA, 19 nt, Artificial Sequence
  Description of Artificial Sequence: Synthetic oligonucleotide
uagggacaacgguucagga

SEQ ID NO: 278788 - RNA, 19 nt, Artificial Sequence
  Description of Artificial Sequence: Synthetic oligonucleotide
gguauacuucaaguaaaug

SEQ ID NO: 278789 - RNA, 19 nt, Artificial Sequence
  Description of Artificial Sequence: Synthetic oligonucleotide
aguuuuacgcaaguuuguu

SEQ ID NO: 278790 - RNA, 19 nt, Artificial Sequence
  Description of Artificial Sequence: Synthetic oligonucleotide
cuugccauauacacuugaa

SEQ ID NO: 278791 - RNA, 19 nt, Artificial Sequence
  Description of Artificial Sequence: Synthetic oligonucleotide
gcuacaggaauagauguuc

SEQ ID NO: 278792 - RNA, 19 nt, Artificial Sequence
  Description of Artificial Sequence: Synthetic oligonucleotide
ccucaguuacucaaguuuc

SEQ ID NO: 278793 - RNA, 19 nt, Artificial Sequence
  Description of Artificial Sequence: Synthetic oligonucleotide
cucccuccaaagacgaauc

SEQ ID NO: 278794 - RNA, 19 nt, Artificial Sequence
  Description of Artificial Sequence: Synthetic oligonucleotide
gaugaugauaguauuucuu

SEQ ID NO: 278795 - RNA, 19 nt, Artificial Sequence
  Description of Artificial Sequence: Synthetic oligonucleotide
acgcagcacaaugcaaugg

SEQ ID NO: 278796 - RNA, 19 nt, Artificial Sequence
  Description of Artificial Sequence: Synthetic oligonucleotide
agacgaaucuaggagcaau

SEQ ID NO: 278797 - RNA, 19 nt, Artificial Sequence
  Description of Artificial Sequence: Synthetic oligonucleotide
uucuguuauagagcuccgu

SEQ ID NO: 278798 - RNA, 19 nt, Artificial Sequence
  Description of Artificial Sequence: Synthetic oligonucleotide
acgcaaguuuguucuuuug

SEQ ID NO: 278799 - RNA, 19 nt, Artificial Sequence
  Description of Artificial Sequence: Synthetic oligonucleotide
agccuauuauuuccucagu

SEQ ID NO: 278800 - RNA, 19 nt, Artificial Sequence
  Description of Artificial Sequence: Synthetic oligonucleotide
acacagcguuaugaagagc

SEQ ID NO: 278801 - RNA, 19 nt, Artificial Sequence
  Description of Artificial Sequence: Synthetic oligonucleotide
uuuacgcaaguuuguucuu

SEQ ID NO: 278802 - RNA, 19 nt, Artificial Sequence
  Description of Artificial Sequence: Synthetic oligonucleotide
gguaugguggguauucuuc

SEQ ID NO: 278803 - RNA, 19 nt, Artificial Sequence
  Description of Artificial Sequence: Synthetic oligonucleotide
uggguaugaugggacugag

SEQ ID NO: 278804 - RNA, 19 nt, Artificial Sequence
  Description of Artificial Sequence: Synthetic oligonucleotide
ggcguaaagggccgaacug

SEQ ID NO: 278805 - RNA, 19 nt, Artificial Sequence
  Description of Artificial Sequence: Synthetic oligonucleotide
caacgguucaggaacugaa

SEQ ID NO: 278806 - RNA, 19 nt, Artificial Sequence
  Description of Artificial Sequence: Synthetic oligonucleotide
uggaggcgugcccaccacc

SEQ ID NO: 278807 - RNA, 19 nt, Artificial Sequence
  Description of Artificial Sequence: Synthetic oligonucleotide
acguuguuacaggacgcag

SEQ ID NO: 278808 - RNA, 19 nt, Artificial Sequence
  Description of Artificial Sequence: Synthetic oligonucleotide
ucggcgacuuuguugggua

SEQ ID NO: 278809 - RNA, 19 nt, Artificial Sequence
  Description of Artificial Sequence: Synthetic oligonucleotide
guucuguuauagagcuccg

SEQ ID NO: 278810 - RNA, 19 nt, Artificial Sequence
  Description of Artificial Sequence: Synthetic oligonucleotide
ggcgcaugcgugcagaguc

SEQ ID NO: 278811 - RNA, 19 nt, Artificial Sequence
  Description of Artificial Sequence: Synthetic oligonucleotide
gacgacggucaugcaaucc

SEQ ID NO: 278812 - RNA, 19 nt, Artificial Sequence
  Description of Artificial Sequence: Synthetic oligonucleotide
cuccguguugacaggucac

SEQ ID NO: 278813 - RNA, 19 nt, Artificial Sequence
  Description of Artificial Sequence: Synthetic oligonucleotide
gacguuguuacaggacgca

SEQ ID NO: 278814 - RNA, 19 nt, Artificial Sequence
  Description of Artificial Sequence: Synthetic oligonucleotide
uuuaacggccuuggggcau

SEQ ID NO: 278815 - RNA, 19 nt, Artificial Sequence
  Description of Artificial Sequence: Synthetic oligonucleotide
ggucagggcacucugcaca

SEQ ID NO: 278816 - RNA, 19 nt, Artificial Sequence
  Description of Artificial Sequence: Synthetic oligonucleotide
uuacgcaaguuuguucuuu

SEQ ID NO: 278817 - RNA, 19 nt, Artificial Sequence
  Description of Artificial Sequence: Synthetic oligonucleotide
uccguguugacaggucacu

SEQ ID NO: 278818 - RNA, 19 nt, Artificial Sequence
  Description of Artificial Sequence: Synthetic oligonucleotide
agguauacuucaaguaaau

SEQ ID NO: 278819 - RNA, 19 nt, Artificial Sequence
  Description of Artificial Sequence: Synthetic oligonucleotide
acaacgguucaggaacuga

SEQ ID NO: 278820 - RNA, 19 nt, Artificial Sequence
  Description of Artificial Sequence: Synthetic oligonucleotide
guaguauuguuuaguuuaa

SEQ ID NO: 278821 - RNA, 19 nt, Artificial Sequence
  Description of Artificial Sequence: Synthetic oligonucleotide
uuccaugagcaauccucuc

SEQ ID NO: 278822 - RNA, 19 nt, Artificial Sequence
  Description of Artificial Sequence: Synthetic oligonucleotide
guuugugucuucugugcua

SEQ ID NO: 278823 - RNA, 19 nt, Artificial Sequence
  Description of Artificial Sequence: Synthetic oligonucleotide
ucuuggccgccugaaggug

SEQ ID NO: 278824 - RNA, 19 nt, Artificial Sequence
  Description of Artificial Sequence: Synthetic oligonucleotide
augcccucgucauugggua

SEQ ID NO: 278825 - RNA, 19 nt, Artificial Sequence
  Description of Artificial Sequence: Synthetic oligonucleotide
cuuuaacggccuuggggca

SEQ ID NO: 278826 - RNA, 19 nt, Artificial Sequence
  Description of Artificial Sequence: Synthetic oligonucleotide
guaccggcacuccccauac

SEQ ID NO: 278827 - RNA, 19 nt, Artificial Sequence
  Description of Artificial Sequence: Synthetic oligonucleotide
cacugacgauacucaagug

SEQ ID NO: 278828 - RNA, 19 nt, Artificial Sequence
  Description of Artificial Sequence: Synthetic oligonucleotide
uguagccuucuuccaucuc

SEQ ID NO: 278829 - RNA, 19 nt, Artificial Sequence
  Description of Artificial Sequence: Synthetic oligonucleotide
gacaacgguucaggaacug

SEQ ID NO: 278830 - RNA, 19 nt, Artificial Sequence
  Description of Artificial Sequence: Synthetic oligonucleotide
guugcguggaacauagccu

SEQ ID NO: 278831 - RNA, 19 nt, Artificial Sequence
  Description of Artificial Sequence: Synthetic oligonucleotide
uucgugcgggcgcaugcgu

SEQ ID NO: 278832 - RNA, 19 nt, Artificial Sequence
  Description of Artificial Sequence: Synthetic oligonucleotide
gauuucgugcgggcgcaug

SEQ ID NO: 278833 - RNA, 19 nt, Artificial Sequence
  Description of Artificial Sequence: Synthetic oligonucleotide
cguuguuacaggacgcagc

SEQ ID NO: 278834 - RNA, 19 nt, Artificial Sequence
  Description of Artificial Sequence: Synthetic oligonucleotide
ugaggggccucuggguuug

SEQ ID NO: 278835 - RNA, 19 nt, Artificial Sequence
  Description of Artificial Sequence: Synthetic oligonucleotide
aagacgaaucuaggagcaa

SEQ ID NO: 278836 - RNA, 19 nt, Artificial Sequence
  Description of Artificial Sequence: Synthetic oligonucleotide
cuucacugacgauacucaa

SEQ ID NO: 278837 - RNA, 19 nt, Artificial Sequence
  Description of Artificial Sequence: Synthetic oligonucleotide
gcguaaagggccgaacugc

SEQ ID NO: 278838 - RNA, 19 nt, Artificial Sequence
  Description of Artificial Sequence: Synthetic oligonucleotide
cauugacgccaaacuggac

SEQ ID NO: 278839 - RNA, 19 nt, Artificial Sequence
  Description of Artificial Sequence: Synthetic oligonucleotide
gagcuuagcucccaugcau

SEQ ID NO: 278840 - RNA, 19 nt, Artificial Sequence
  Description of Artificial Sequence: Synthetic oligonucleotide
caaguaaaugaggggccuc

SEQ ID NO: 278841 - RNA, 19 nt, Artificial Sequence
  Description of Artificial Sequence: Synthetic oligonucleotide
gcucccaugcauugagcag

SEQ ID NO: 278842 - RNA, 19 nt, Artificial Sequence
  Description of Artificial Sequence: Synthetic oligonucleotide
ugcguggaacauagccuuc

SEQ ID NO: 278843 - RNA, 19 nt, Artificial Sequence
  Description of Artificial Sequence: Synthetic oligonucleotide
acugacucguuuguccaaa

SEQ ID NO: 278844 - RNA, 19 nt, Artificial Sequence
  Description of Artificial Sequence: Synthetic oligonucleotide
gguucuccguguugacagg

SEQ ID NO: 278845 - RNA, 19 nt, Artificial Sequence
  Description of Artificial Sequence: Synthetic oligonucleotide
cauggaauagauugagcuu

SEQ ID NO: 278846 - RNA, 19 nt, Artificial Sequence
  Description of Artificial Sequence: Synthetic oligonucleotide
agugcauaaaugacuccuu

SEQ ID NO: 278847 - RNA, 19 nt, Artificial Sequence
  Description of Artificial Sequence: Synthetic oligonucleotide
ugguucuguuauagagcuc

SEQ ID NO: 278848 - RNA, 19 nt, Artificial Sequence
  Description of Artificial Sequence: Synthetic oligonucleotide
ugugcagcccuggggacuc

SEQ ID NO: 278849 - RNA, 19 nt, Artificial Sequence
  Description of Artificial Sequence: Synthetic oligonucleotide
cagugcauaaaugacuccu

SEQ ID NO: 278850 - RNA, 19 nt, Artificial Sequence
  Description of Artificial Sequence: Synthetic oligonucleotide
acucaaguuucaggccaag

SEQ ID NO: 278851 - RNA, 19 nt, Artificial Sequence
  Description of Artificial Sequence: Synthetic oligonucleotide
uucguugggcugagugguc

SEQ ID NO: 278852 - RNA, 19 nt, Artificial Sequence
  Description of Artificial Sequence: Synthetic oligonucleotide
gguauucuucuagguauac

SEQ ID NO: 278853 - RNA, 19 nt, Artificial Sequence
  Description of Artificial Sequence: Synthetic oligonucleotide
ucauggaggcgugcccacc

SEQ ID NO: 278854 - RNA, 19 nt, Artificial Sequence
  Description of Artificial Sequence: Synthetic oligonucleotide
ggcuuagagacaaaauuua

SEQ ID NO: 278855 - RNA, 19 nt, Artificial Sequence
  Description of Artificial Sequence: Synthetic oligonucleotide
uucaagcuacacugucauu

SEQ ID NO: 278856 - RNA, 19 nt, Artificial Sequence
  Description of Artificial Sequence: Synthetic oligonucleotide
caaucucuguguggccugc

SEQ ID NO: 278857 - RNA, 19 nt, Artificial Sequence
  Description of Artificial Sequence: Synthetic oligonucleotide
caugcauugagcagugauu

SEQ ID NO: 278858 - RNA, 19 nt, Artificial Sequence
  Description of Artificial Sequence: Synthetic oligonucleotide
guucucuguaccggcacuc

SEQ ID NO: 278859 - RNA, 19 nt, Artificial Sequence
  Description of Artificial Sequence: Synthetic oligonucleotide
gaguguagccuucuuccau

SEQ ID NO: 278860 - RNA, 19 nt, Artificial Sequence
  Description of Artificial Sequence: Synthetic oligonucleotide
ucuggacugccaggcuugc

SEQ ID NO: 278861 - RNA, 19 nt, Artificial Sequence
  Description of Artificial Sequence: Synthetic oligonucleotide
uuguuacaggacgcagcac

SEQ ID NO: 278862 - RNA, 19 nt, Artificial Sequence
  Description of Artificial Sequence: Synthetic oligonucleotide
uccuagcaaguugcgugga

SEQ ID NO: 278863 - RNA, 19 nt, Artificial Sequence
  Description of Artificial Sequence: Synthetic oligonucleotide
acacccuaagcaggacaag

SEQ ID NO: 278864 - RNA, 19 nt, Artificial Sequence
  Description of Artificial Sequence: Synthetic oligonucleotide
agcagcuaucacaggcuug

SEQ ID NO: 278865 - RNA, 19 nt, Artificial Sequence
  Description of Artificial Sequence: Synthetic oligonucleotide
ggacguuguuacaggacgc

SEQ ID NO: 278866 - RNA, 19 nt, Artificial Sequence
  Description of Artificial Sequence: Synthetic oligonucleotide
caguuuuacgcaaguuugu

SEQ ID NO: 278867 - RNA, 19 nt, Artificial Sequence
  Description of Artificial Sequence: Synthetic oligonucleotide
acggucaugcaauccccuu

SEQ ID NO: 278868 - RNA, 19 nt, Artificial Sequence
  Description of Artificial Sequence: Synthetic oligonucleotide
gucauggaggcgugcccac

SEQ ID NO: 278869 - RNA, 19 nt, Artificial Sequence
  Description of Artificial Sequence: Synthetic oligonucleotide
cucgucauuggguaggcuu

SEQ ID NO: 278870 - RNA, 19 nt, Artificial Sequence
  Description of Artificial Sequence: Synthetic oligonucleotide
cuuagcucccaugcauuga

SEQ ID NO: 278871 - RNA, 19 nt, Artificial Sequence
  Description of Artificial Sequence: Synthetic oligonucleotide
uggcccauuagggccuucu

SEQ ID NO: 278872 - RNA, 19 nt, Artificial Sequence
  Description of Artificial Sequence: Synthetic oligonucleotide
caugagcaauccucucgga

SEQ ID NO: 278873 - RNA, 19 nt, Artificial Sequence
  Description of Artificial Sequence: Synthetic oligonucleotide
uccggcuccccagauggau

SEQ ID NO: 278874 - RNA, 19 nt, Artificial Sequence
  Description of Artificial Sequence: Synthetic oligonucleotide
gcaauccucucggagccag

SEQ ID NO: 278875 - RNA, 19 nt, Artificial Sequence
  Description of Artificial Sequence: Synthetic oligonucleotide
ggucaugcaauccccuucu

SEQ ID NO: 278876 - RNA, 19 nt, Artificial Sequence
  Description of Artificial Sequence: Synthetic oligonucleotide
ugcgggcgcaugcgugcag

SEQ ID NO: 278877 - RNA, 19 nt, Artificial Sequence
  Description of Artificial Sequence: Synthetic oligonucleotide
ugguuucgguaaggauuag

SEQ ID NO: 278878 - RNA, 19 nt, Artificial Sequence
  Description of Artificial Sequence: Synthetic oligonucleotide
gugauuucgugcgggcgca

SEQ ID NO: 278879 - RNA, 19 nt, Artificial Sequence
  Description of Artificial Sequence: Synthetic oligonucleotide
gcugcaaugagcacuuugu

SEQ ID NO: 278880 - RNA, 19 nt, Artificial Sequence
  Description of Artificial Sequence: Synthetic oligonucleotide
aggguaugguggguauucu

SEQ ID NO: 278881 - RNA, 19 nt, Artificial Sequence
  Description of Artificial Sequence: Synthetic oligonucleotide
gcuaugaucuugacaaaua

SEQ ID NO: 278882 - RNA, 19 nt, Artificial Sequence
  Description of Artificial Sequence: Synthetic oligonucleotide
gccgccugaaggugcaccc

SEQ ID NO: 278883 - RNA, 19 nt, Artificial Sequence
  Description of Artificial Sequence: Synthetic oligonucleotide
acuuacacacuuggacguu

SEQ ID NO: 278884 - RNA, 19 nt, Artificial Sequence
  Description of Artificial Sequence: Synthetic oligonucleotide
cucccaugcauugagcagu

SEQ ID NO: 278885 - RNA, 19 nt, Artificial Sequence
  Description of Artificial Sequence: Synthetic oligonucleotide
cacaucgcuguucucugua

SEQ ID NO: 278886 - RNA, 19 nt, Artificial Sequence
  Description of Artificial Sequence: Synthetic oligonucleotide
cuggggacucccaaagccu

SEQ ID NO: 278887 - RNA, 19 nt, Artificial Sequence
  Description of Artificial Sequence: Synthetic oligonucleotide
ggguauacauggaauagau

SEQ ID NO: 278888 - RNA, 19 nt, Artificial Sequence
  Description of Artificial Sequence: Synthetic oligonucleotide
gguuucgguaaggauuaga

SEQ ID NO: 278889 - RNA, 19 nt, Artificial Sequence
  Description of Artificial Sequence: Synthetic oligonucleotide
gagcacugaguguagccuu

SEQ ID NO: 278890 - RNA, 19 nt, Artificial Sequence
  Description of Artificial Sequence: Synthetic oligonucleotide
acgccaaacuggaccagga

SEQ ID NO: 278891 - RNA, 19 nt, Artificial Sequence
  Description of Artificial Sequence: Synthetic oligonucleotide
ugcuggcacaucgcuguuc

SEQ ID NO: 278892 - RNA, 19 nt, Artificial Sequence
  Description of Artificial Sequence: Synthetic oligonucleotide
uuaacggccuuggggcauu

SEQ ID NO: 278893 - RNA, 19 nt, Artificial Sequence
  Description of Artificial Sequence: Synthetic oligonucleotide
ggcgacuuuguuggguaug

SEQ ID NO: 278894 - RNA, 19 nt, Artificial Sequence
  Description of Artificial Sequence: Synthetic oligonucleotide
ggagcaaugcaagaggguu

SEQ ID NO: 278895 - RNA, 19 nt, Artificial Sequence
  Description of Artificial Sequence: Synthetic oligonucleotide
caccacucgauuucauccu

SEQ ID NO: 278896 - RNA, 19 nt, Artificial Sequence
  Description of Artificial Sequence: Synthetic oligonucleotide
gguaaggauuagacaagaa

SEQ ID NO: 278897 - RNA, 19 nt, Artificial Sequence
  Description of Artificial Sequence: Synthetic oligonucleotide
gguuuaauucuuggguaua

SEQ ID NO: 278898 - RNA, 19 nt, Artificial Sequence
  Description of Artificial Sequence: Synthetic oligonucleotide
gcuggggcguaaagggccg

SEQ ID NO: 278899 - RNA, 19 nt, Artificial Sequence
  Description of Artificial Sequence: Synthetic oligonucleotide
augcgugcagagucuucuu

SEQ ID NO: 278900 - RNA, 19 nt, Artificial Sequence
  Description of Artificial Sequence: Synthetic oligonucleotide
aggacgcagcacaaugcaa

SEQ ID NO: 278901 - RNA, 19 nt, Artificial Sequence
  Description of Artificial Sequence: Synthetic oligonucleotide
caaugcaagaggguugaau

SEQ ID NO: 278902 - RNA, 19 nt, Artificial Sequence
  Description of Artificial Sequence: Synthetic oligonucleotide
cagcuauggugguccucug

SEQ ID NO: 278903 - RNA, 19 nt, Artificial Sequence
  Description of Artificial Sequence: Synthetic oligonucleotide
uaccggcacuccccauacu

SEQ ID NO: 278904 - RNA, 19 nt, Artificial Sequence
  Description of Artificial Sequence: Synthetic oligonucleotide
cgacggucaugcaaucccc

SEQ ID NO: 278905 - RNA, 19 nt, Artificial Sequence
  Description of Artificial Sequence: Synthetic oligonucleotide
ucuggauauuuggcccauu

SEQ ID NO: 278906 - RNA, 19 nt, Artificial Sequence
  Description of Artificial Sequence: Synthetic oligonucleotide
gcgacuuuguuggguauga

SEQ ID NO: 278907 - RNA, 19 nt, Artificial Sequence
  Description of Artificial Sequence: Synthetic oligonucleotide
cccauuagggccuucuggu

SEQ ID NO: 278908 - RNA, 19 nt, Artificial Sequence
  Description of Artificial Sequence: Synthetic oligonucleotide
ggcccauuagggccuucug

SEQ ID NO: 278909 - RNA, 19 nt, Artificial Sequence
  Description of Artificial Sequence: Synthetic oligonucleotide
caucaaccucauaaauaau

SEQ ID NO: 278910 - RNA, 19 nt, Artificial Sequence
  Description of Artificial Sequence: Synthetic oligonucleotide
cuggacugccaggcuugcc

SEQ ID NO: 278911 - RNA, 19 nt, Artificial Sequence
  Description of Artificial Sequence: Synthetic oligonucleotide
gcccagugauuucgugcgg

SEQ ID NO: 278912 - RNA, 19 nt, Artificial Sequence
  Description of Artificial Sequence: Synthetic oligonucleotide
gcggacgacggucaugcaa

SEQ ID NO: 278913 - RNA, 19 nt, Artificial Sequence
  Description of Artificial Sequence: Synthetic oligonucleotide
agcaauccucucggagcca

SEQ ID NO: 278914 - RNA, 19 nt, Artificial Sequence
  Description of Artificial Sequence: Synthetic oligonucleotide
gacggucaugcaauccccu

SEQ ID NO: 278915 - RNA, 19 nt, Artificial Sequence
  Description of Artificial Sequence: Synthetic oligonucleotide
cucugguuucgguaaggau

SEQ ID NO: 278916 - RNA, 19 nt, Artificial Sequence
  Description of Artificial Sequence: Synthetic oligonucleotide
ugcggacgacggucaugca

SEQ ID NO: 278917 - RNA, 19 nt, Artificial Sequence
  Description of Artificial Sequence: Synthetic oligonucleotide
ggucgaggaauccuuucau

SEQ ID NO: 278918 - RNA, 19 nt, Artificial Sequence
  Description of Artificial Sequence: Synthetic oligonucleotide
gguauaguccuagcaaguu

SEQ ID NO: 278919 - RNA, 19 nt, Artificial Sequence
  Description of Artificial Sequence: Synthetic oligonucleotide
uaacggccuuggggcauug

SEQ ID NO: 278920 - RNA, 19 nt, Artificial Sequence
  Description of Artificial Sequence: Synthetic oligonucleotide
ggacgcagcacaaugcaau

SEQ ID NO: 278921 - RNA, 19 nt, Artificial Sequence
  Description of Artificial Sequence: Synthetic oligonucleotide
ccuggcgccugaugcuggg

SEQ ID NO: 278922 - RNA, 19 nt, Artificial Sequence
  Description of Artificial Sequence: Synthetic oligonucleotide
ccccauacuccucuaggga

SEQ ID NO: 278923 - RNA, 19 nt, Artificial Sequence
  Description of Artificial Sequence: Synthetic oligonucleotide
gcaguuucguugggcugag

SEQ ID NO: 278924 - RNA, 19 nt, Artificial Sequence
  Description of Artificial Sequence: Synthetic oligonucleotide
ggguauaguccuagcaagu

SEQ ID NO: 278925 - RNA, 19 nt, Artificial Sequence
  Description of Artificial Sequence: Synthetic oligonucleotide
uuuggcccauuagggccuu

SEQ ID NO: 278926 - RNA, 19 nt, Artificial Sequence
  Description of Artificial Sequence: Synthetic oligonucleotide
ggacgacggucaugcaauc

SEQ ID NO: 278927 - RNA, 19 nt, Artificial Sequence
  Description of Artificial Sequence: Synthetic oligonucleotide
cgucauuggguaggcuugg

SEQ ID NO: 278928 - RNA, 19 nt, Artificial Sequence
  Description of Artificial Sequence: Synthetic oligonucleotide
cggucaugcaauccccuuc

SEQ ID NO: 278929 - RNA, 19 nt, Artificial Sequence
  Description of Artificial Sequence: Synthetic oligonucleotide
gucaaggccuggagaaggu

SEQ ID NO: 278930 - RNA, 19 nt, Artificial Sequence
  Description of Artificial Sequence: Synthetic oligonucleotide
ggguauucuucuagguaua

SEQ ID NO: 278931 - RNA, 19 nt, Artificial Sequence
  Description of Artificial Sequence: Synthetic oligonucleotide
ccaguaaauggucccauuu

SEQ ID NO: 278932 - RNA, 19 nt, Artificial Sequence
  Description of Artificial Sequence: Synthetic oligonucleotide
ccguguugacaggucacug

SEQ ID NO: 278933 - RNA, 19 nt, Artificial Sequence
  Description of Artificial Sequence: Synthetic oligonucleotide
ccaugcauugagcagugau

SEQ ID NO: 278934 - RNA, 19 nt, Artificial Sequence
  Description of Artificial Sequence: Synthetic oligonucleotide
cuuggggcauuggacaguu

SEQ ID NO: 278935 - RNA, 19 nt, Artificial Sequence
  Description of Artificial Sequence: Synthetic oligonucleotide
gguauacauggaauagauu

SEQ ID NO: 278936 - RNA, 19 nt, Artificial Sequence
  Description of Artificial Sequence: Synthetic oligonucleotide
gggcucauagucccacagu

SEQ ID NO: 278937 - RNA, 19 nt, Artificial Sequence
  Description of Artificial Sequence: Synthetic oligonucleotide
gcaaugggguccacccauc

SEQ ID NO: 278938 - RNA, 19 nt, Artificial Sequence
  Description of Artificial Sequence: Synthetic oligonucleotide
cucggcgacuuuguugggu

SEQ ID NO: 278939 - RNA, 19 nt, Artificial Sequence
  Description of Artificial Sequence: Synthetic oligonucleotide
cgguaaggauuagacaaga

SEQ ID NO: 278940 - RNA, 19 nt, Artificial Sequence
  Description of Artificial Sequence: Synthetic oligonucleotide
ggguaugguggguauucuu

SEQ ID NO: 278941 - RNA, 19 nt, Artificial Sequence
  Description of Artificial Sequence: Synthetic oligonucleotide
cccucgucauuggguaggc

SEQ ID NO: 278942 - RNA, 19 nt, Artificial Sequence
  Description of Artificial Sequence: Synthetic oligonucleotide
ccuagcaaguugcguggaa

SEQ ID NO: 278943 - RNA, 19 nt, Artificial Sequence
  Description of Artificial Sequence: Synthetic oligonucleotide
ccgccugaaggugcacccg

SEQ ID NO: 278944 - RNA, 19 nt, Artificial Sequence
  Description of Artificial Sequence: Synthetic oligonucleotide
cggacgacggucaugcaau

SEQ ID NO: 278945 - RNA, 19 nt, Artificial Sequence
  Description of Artificial Sequence: Synthetic oligonucleotide
cggagccaguuuuacgcaa

SEQ ID NO: 278946 - RNA, 19 nt, Artificial Sequence
  Description of Artificial Sequence: Synthetic oligonucleotide
gcgggcgcaugcgugcaga

SEQ ID NO: 278947 - RNA, 19 nt, Artificial Sequence
  Description of Artificial Sequence: Synthetic oligonucleotide
cgggcgcaugcgugcagag

SEQ ID NO: 278948 - RNA, 19 nt, Artificial Sequence
  Description of Artificial Sequence: Synthetic oligonucleotide
ccggcuccccagauggaua

SEQ ID NO: 278949 - RNA, 19 nt, Artificial Sequence
  Description of Artificial Sequence: Synthetic oligonucleotide
gcccaguaaauggucccau

SEQ ID NO: 278950 - RNA, 19 nt, Artificial Sequence
  Description of Artificial Sequence: Synthetic oligonucleotide
cuguaccggcacuccccau

SEQ ID NO: 278951 - RNA, 19 nt, Artificial Sequence
  Description of Artificial Sequence: Synthetic oligonucleotide
ccggagacagcagcacucu

SEQ ID NO: 278952 - RNA, 19 nt, Artificial Sequence
  Description of Artificial Sequence: Synthetic oligonucleotide
gggcgcaugcgugcagagu

SEQ ID NO: 278953 - RNA, 19 nt, Artificial Sequence
  Description of Artificial Sequence: Synthetic oligonucleotide
cuggcgccugaugcugggu

SEQ ID NO: 278954 - RNA, 19 nt, Artificial Sequence
  Description of Artificial Sequence: Synthetic oligonucleotide
cggcuccccagauggauau

SEQ ID NO: 278955 - RNA, 19 nt, Artificial Sequence
  Description of Artificial Sequence: Synthetic oligonucleotide
caguuucguugggcugagu

SEQ ID NO: 278956 - RNA, 19 nt, Artificial Sequence
  Description of Artificial Sequence: Synthetic oligonucleotide
ccgcagcagucugcauguc

SEQ ID NO: 278957 - RNA, 19 nt, Artificial Sequence
  Description of Artificial Sequence: Synthetic oligonucleotide
ccucgucauuggguaggcu

SEQ ID NO: 278958 - RNA, 19 nt, Artificial Sequence
  Description of Artificial Sequence: Synthetic oligonucleotide
cggcgacuuuguuggguau

SEQ ID NO: 278959 - RNA, 19 nt, Artificial Sequence
  Description of Artificial Sequence: Synthetic oligonucleotide
cgacuuuguuggguaugau

SEQ ID NO: 278960 - RNA, 19 nt, Artificial Sequence
  Description of Artificial Sequence: Synthetic oligonucleotide
cgcaugcgugcagagucuu

SEQ ID NO: 278961 - RNA, 19 nt, Artificial Sequence
  Description of Artificial Sequence: Synthetic oligonucleotide
aauaaagggaugcugauuc

SEQ ID NO: 278962 - RNA, 19 nt, Artificial Sequence
  Description of Artificial Sequence: Synthetic oligonucleotide
aauauauauauauauauau

SEQ ID NO: 278963 - RNA, 19 nt, Artificial Sequence
  Description of Artificial Sequence: Synthetic oligonucleotide
uauauauauauauuuaucc

SEQ ID NO: 278964 - RNA, 19 nt, Artificial Sequence
  Description of Artificial Sequence: Synthetic oligonucleotide
auguuaaugagacaucugc

SEQ ID NO: 278965 - RNA, 19 nt, Artificial Sequence
  Description of Artificial Sequence: Synthetic oligonucleotide
ucuguuaagacuaaccacc

SEQ ID NO: 278966 - RNA, 19 nt, Artificial Sequence
  Description of Artificial Sequence: Synthetic oligonucleotide
cauacuuacaacaagcccc

SEQ ID NO: 278967 - RNA, 19 nt, Artificial Sequence
  Description of Artificial Sequence: Synthetic oligonucleotide
aaauaugucuuauacagau

SEQ ID NO: 278968 - RNA, 19 nt, Artificial Sequence
  Description of Artificial Sequence: Synthetic oligonucleotide
uauauauauauauauauuu

SEQ ID NO: 278969 - RNA, 19 nt, Artificial Sequence
  Description of Artificial Sequence: Synthetic oligonucleotide
uaggauaacauaaagcaug

SEQ ID NO: 278970 - RNA, 19 nt, Artificial Sequence
  Description of Artificial Sequence: Synthetic oligonucleotide
agaacagcgauccuaaccg

SEQ ID NO: 278971 - RNA, 19 nt, Artificial Sequence
  Description of Artificial Sequence: Synthetic oligonucleotide
aaguuaaugaacuuccaca

SEQ ID NO: 278972 - RNA, 19 nt, Artificial Sequence
  Description of Artificial Sequence: Synthetic oligonucleotide
uacaaauauauauauauau

SEQ ID NO: 278973 - RNA, 19 nt, Artificial Sequence
  Description of Artificial Sequence: Synthetic oligonucleotide
ucggguaacauuauacugg

SEQ ID NO: 278974 - RNA, 19 nt, Artificial Sequence
  Description of Artificial Sequence: Synthetic oligonucleotide
aaaaguucgacaucagacu

SEQ ID NO: 278975 - RNA, 19 nt, Artificial Sequence
  Description of Artificial Sequence: Synthetic oligonucleotide
uauauauauauauauuuau

SEQ ID NO: 278976 - RNA, 19 nt, Artificial Sequence
  Description of Artificial Sequence: Synthetic oligonucleotide
uauacggcaauaaaucuug

SEQ ID NO: 278977 - RNA, 19 nt, Artificial Sequence
  Description of Artificial Sequence: Synthetic oligonucleotide
agcacaacuuucuagcagc

SEQ ID NO: 278978 - RNA, 19 nt, Artificial Sequence
  Description of Artificial Sequence: Synthetic oligonucleotide
ugaauuauggcaugaauaa

SEQ ID NO: 278979 - RNA, 19 nt, Artificial Sequence
  Description of Artificial Sequence: Synthetic oligonucleotide
gauacaaauauauauauau

SEQ ID NO: 278980 - RNA, 19 nt, Artificial Sequence
  Description of Artificial Sequence: Synthetic oligonucleotide
auauauauauauuuaucca

SEQ ID NO: 278981 - RNA, 19 nt, Artificial Sequence
  Description of Artificial Sequence: Synthetic oligonucleotide
uaaaucuugcaguaauggg

SEQ ID NO: 278982 - RNA, 19 nt, Artificial Sequence
  Description of Artificial Sequence: Synthetic oligonucleotide
auuaguuuuccaaauuacc

SEQ ID NO: 278983 - RNA, 19 nt, Artificial Sequence
  Description of Artificial Sequence: Synthetic oligonucleotide
cucaauuaaagaugggucc

SEQ ID NO: 278984 - RNA, 19 nt, Artificial Sequence
  Description of Artificial Sequence: Synthetic oligonucleotide
ucuuauguuaaugagacau

SEQ ID NO: 278985 - RNA, 19 nt, Artificial Sequence
  Description of Artificial Sequence: Synthetic oligonucleotide
acucuuauguuaaugagac

SEQ ID NO: 278986 - RNA, 19 nt, Artificial Sequence
  Description of Artificial Sequence: Synthetic oligonucleotide
ucaucgcuaaaauaaaaca

SEQ ID NO: 278987 - RNA, 19 nt, Artificial Sequence
  Description of Artificial Sequence: Synthetic oligonucleotide
gaaaaggucaccuugcuaa

SEQ ID NO: 278988 - RNA, 19 nt, Artificial Sequence
  Description of Artificial Sequence: Synthetic oligonucleotide
auauauauauauauuuauc

SEQ ID NO: 278989 - RNA, 19 nt, Artificial Sequence
  Description of Artificial Sequence: Synthetic oligonucleotide
uguuaucucgaacaugagc

SEQ ID NO: 278990 - RNA, 19 nt, Artificial Sequence
  Description of Artificial Sequence: Synthetic oligonucleotide
gauguuaucucgaacauga

SEQ ID NO: 278991 - RNA, 19 nt, Artificial Sequence
  Description of Artificial Sequence: Synthetic oligonucleotide
aaagguaagccccagcgau

SEQ ID NO: 278992 - RNA, 19 nt, Artificial Sequence
  Description of Artificial Sequence: Synthetic oligonucleotide
uacaacaagccccauuaag

SEQ ID NO: 278993 - RNA, 19 nt, Artificial Sequence
  Description of Artificial Sequence: Synthetic oligonucleotide
uccaaauuaccugacaccc

SEQ ID NO: 278994 - RNA, 19 nt, Artificial Sequence
  Description of Artificial Sequence: Synthetic oligonucleotide
auaauuaucgccacuagca

SEQ ID NO: 278995 - RNA, 19 nt, Artificial Sequence
  Description of Artificial Sequence: Synthetic oligonucleotide
ucugauacuucucaucgcu

SEQ ID NO: 278996 - RNA, 19 nt, Artificial Sequence
  Description of Artificial Sequence: Synthetic oligonucleotide
ugcuagugcugaaagacag

SEQ ID NO: 278997 - RNA, 19 nt, Artificial Sequence
  Description of Artificial Sequence: Synthetic oligonucleotide
uacucuuauguuaaugaga

SEQ ID NO: 278998 - RNA, 19 nt, Artificial Sequence
  Description of Artificial Sequence: Synthetic oligonucleotide
uaaacggcauuucacuaag

SEQ ID NO: 278999 - RNA, 19 nt, Artificial Sequence
  Description of Artificial Sequence: Synthetic oligonucleotide
auaucauacuuacaacaag

SEQ ID NO: 279000 - RNA, 19 nt, Artificial Sequence
  Description of Artificial Sequence: Synthetic oligonucleotide
aaugggauguaacaccuau

SEQ ID NO: 279001 - RNA, 19 nt, Artificial Sequence
  Description of Artificial Sequence: Synthetic oligonucleotide
aaguuagugcauuaguuuu

SEQ ID NO: 279002 - RNA, 19 nt, Artificial Sequence
  Description of Artificial Sequence: Synthetic oligonucleotide
aguuaaugaacuuccacau

SEQ ID NO: 279003 - RNA, 19 nt, Artificial Sequence
  Description of Artificial Sequence: Synthetic oligonucleotide
aggcauuacguucuaaaag

SEQ ID NO: 279004 - RNA, 19 nt, Artificial Sequence
  Description of Artificial Sequence: Synthetic oligonucleotide
gcuugcgugauacaaaugg

SEQ ID NO: 279005 - RNA, 19 nt, Artificial Sequence
  Description of Artificial Sequence: Synthetic oligonucleotide
aaguuggagauuccucuuc

SEQ ID NO: 279006 - RNA, 19 nt, Artificial Sequence
  Description of Artificial Sequence: Synthetic oligonucleotide
ucgcuaaaauaaaacagac

SEQ ID NO: 279007 - RNA, 19 nt, Artificial Sequence
  Description of Artificial Sequence: Synthetic oligonucleotide
aaauauauauauauauaua

SEQ ID NO: 279008 - RNA, 19 nt, Artificial Sequence
  Description of Artificial Sequence: Synthetic oligonucleotide
ggcaacuuaagccacaggc

SEQ ID NO: 279009 - RNA, 19 nt, Artificial Sequence
  Description of Artificial Sequence: Synthetic oligonucleotide
cucaucgcuaaaauaaaac

SEQ ID NO: 279010 - RNA, 19 nt, Artificial Sequence
  Description of Artificial Sequence: Synthetic oligonucleotide
aaguacuacucuuauguua

SEQ ID NO: 279011 - RNA, 19 nt, Artificial Sequence
  Description of Artificial Sequence: Synthetic oligonucleotide
agacucauuaaacuugcug

SEQ ID NO: 279012 - RNA, 19 nt, Artificial Sequence
  Description of Artificial Sequence: Synthetic oligonucleotide
aaaguucgacaucagacuu

SEQ ID NO: 279013 - RNA, 19 nt, Artificial Sequence
  Description of Artificial Sequence: Synthetic oligonucleotide
aaagggcuauguaaguugg

SEQ ID NO: 279014 - RNA, 19 nt, Artificial Sequence
  Description of Artificial Sequence: Synthetic oligonucleotide
uuccaaauuaccugacacc

SEQ ID NO: 279015 - RNA, 19 nt, Artificial Sequence
  Description of Artificial Sequence: Synthetic oligonucleotide
aaugaaugugccccagaca

SEQ ID NO: 279016 - RNA, 19 nt, Artificial Sequence
  Description of Artificial Sequence: Synthetic oligonucleotide
guagcuaagucuaagcuac

SEQ ID NO: 279017 - RNA, 19 nt, Artificial Sequence
  Description of Artificial Sequence: Synthetic oligonucleotide
gguaacauuauacuggaga

SEQ ID NO: 279018 - RNA, 19 nt, Artificial Sequence
  Description of Artificial Sequence: Synthetic oligonucleotide
caaauauauauauauauau

SEQ ID NO: 279019 - RNA, 19 nt, Artificial Sequence
  Description of Artificial Sequence: Synthetic oligonucleotide
uauguuaaugagacaucug

SEQ ID NO: 279020 - RNA, 19 nt, Artificial Sequence
  Description of Artificial Sequence: Synthetic oligonucleotide
uguagacaagcugacgagg

SEQ ID NO: 279021 - RNA, 19 nt, Artificial Sequence
  Description of Artificial Sequence: Synthetic oligonucleotide
cccuaaacuauucugaagg

SEQ ID NO: 279022 - RNA, 19 nt, Artificial Sequence
  Description of Artificial Sequence: Synthetic oligonucleotide
aaaagguaagccccagcga

SEQ ID NO: 279023 - RNA, 19 nt, Artificial Sequence
  Description of Artificial Sequence: Synthetic oligonucleotide
aaagguggucccuaaacua

SEQ ID NO: 279024 - RNA, 19 nt, Artificial Sequence
  Description of Artificial Sequence: Synthetic oligonucleotide
uguaaguuggagauuccuc

SEQ ID NO: 279025 - RNA, 19 nt, Artificial Sequence
  Description of Artificial Sequence: Synthetic oligonucleotide
aacagcgauccuaaccgcc

SEQ ID NO: 279026 - RNA, 19 nt, Artificial Sequence
  Description of Artificial Sequence: Synthetic oligonucleotide
uccaauauacggcaauaaa

SEQ ID NO: 279027 - RNA, 19 nt, Artificial Sequence
  Description of Artificial Sequence: Synthetic oligonucleotide
ggcaugaauaauuaucgcc

SEQ ID NO: 279028 - RNA, 19 nt, Artificial Sequence
  Description of Artificial Sequence: Synthetic oligonucleotide
cuacucuuauguuaaugag

SEQ ID NO: 279029 - RNA, 19 nt, Artificial Sequence
  Description of Artificial Sequence: Synthetic oligonucleotide
cuauguaaguuggagauuc

SEQ ID NO: 279030 - RNA, 19 nt, Artificial Sequence
  Description of Artificial Sequence: Synthetic oligonucleotide
uuaaacggcauuucacuaa

SEQ ID NO: 279031 - RNA, 19 nt, Artificial Sequence
  Description of Artificial Sequence: Synthetic oligonucleotide
aagcuauaggauaacauaa

SEQ ID NO: 279032 - RNA, 19 nt, Artificial Sequence
  Description of Artificial Sequence: Synthetic oligonucleotide
uuaagacuaaccaccugaa

SEQ ID NO: 279033 - RNA, 19 nt, Artificial Sequence
  Description of Artificial Sequence: Synthetic oligonucleotide
caucaugaaggcuugcgug

SEQ ID NO: 279034 - RNA, 19 nt, Artificial Sequence
  Description of Artificial Sequence: Synthetic oligonucleotide
agacuaaccaccugaauuu

SEQ ID NO: 279035 - RNA, 19 nt, Artificial Sequence
  Description of Artificial Sequence: Synthetic oligonucleotide
ugcauaucauacuuacaac

SEQ ID NO: 279036 - RNA, 19 nt, Artificial Sequence
  Description of Artificial Sequence: Synthetic oligonucleotide
aagucuaagcuacaacauu

SEQ ID NO: 279037 - RNA, 19 nt, Artificial Sequence
  Description of Artificial Sequence: Synthetic oligonucleotide
auauauauauauauauuua

SEQ ID NO: 279038 - RNA, 19 nt, Artificial Sequence
  Description of Artificial Sequence: Synthetic oligonucleotide
uucuuagaaaaggucaccu

SEQ ID NO: 279039 - RNA, 19 nt, Artificial Sequence
  Description of Artificial Sequence: Synthetic oligonucleotide
gagagcuacuacuuuuccc

SEQ ID NO: 279040 - RNA, 19 nt, Artificial Sequence
  Description of Artificial Sequence: Synthetic oligonucleotide
uaauuaucgccacuagcau

SEQ ID NO: 279041 - RNA, 19 nt, Artificial Sequence
  Description of Artificial Sequence: Synthetic oligonucleotide
auuaucgccacuagcaugu

SEQ ID NO: 279042 - RNA, 19 nt, Artificial Sequence
  Description of Artificial Sequence: Synthetic oligonucleotide
cagaaugcucccuccaccg

SEQ ID NO: 279043 - RNA, 19 nt, Artificial Sequence
  Description of Artificial Sequence: Synthetic oligonucleotide
caaguucaaaagguaagcc

SEQ ID NO: 279044 - RNA, 19 nt, Artificial Sequence
  Description of Artificial Sequence: Synthetic oligonucleotide
gaccaauguagacaagcug

SEQ ID NO: 279045 - RNA, 19 nt, Artificial Sequence
  Description of Artificial Sequence: Synthetic oligonucleotide
gucggguaacauuauacug

SEQ ID NO: 279046 - RNA, 19 nt, Artificial Sequence
  Description of Artificial Sequence: Synthetic oligonucleotide
auuaccugacacccuuuuc

SEQ ID NO: 279047 - RNA, 19 nt, Artificial Sequence
  Description of Artificial Sequence: Synthetic oligonucleotide
cuuauguuaaugagacauc

SEQ ID NO: 279048 - RNA, 19 nt, Artificial Sequence
  Description of Artificial Sequence: Synthetic oligonucleotide
accuauaaucacuacuuaa

SEQ ID NO: 279049 - RNA, 19 nt, Artificial Sequence
  Description of Artificial Sequence: Synthetic oligonucleotide
cauuuuacccugaaagaca

SEQ ID NO: 279050 - RNA, 19 nt, Artificial Sequence
  Description of Artificial Sequence: Synthetic oligonucleotide
acaacaagccccauuaaga

SEQ ID NO: 279051 - RNA, 19 nt, Artificial Sequence
  Description of Artificial Sequence: Synthetic oligonucleotide
uggucccuaaacuauucug

SEQ ID NO: 279052 - RNA, 19 nt, Artificial Sequence
  Description of Artificial Sequence: Synthetic oligonucleotide
acgaauucauggcucagca

SEQ ID NO: 279053 - RNA, 19 nt, Artificial Sequence
  Description of Artificial Sequence: Synthetic oligonucleotide
ucucgccaagccaaaacca

SEQ ID NO: 279054 - RNA, 19 nt, Artificial Sequence
  Description of Artificial Sequence: Synthetic oligonucleotide
gaaaaugcacaaaaggacu

SEQ ID NO: 279055 - RNA, 19 nt, Artificial Sequence
  Description of Artificial Sequence: Synthetic oligonucleotide
acggcauuucacuaagaug

SEQ ID NO: 279056 - RNA, 19 nt, Artificial Sequence
  Description of Artificial Sequence: Synthetic oligonucleotide
acaaauauauauauauaua

SEQ ID NO: 279057 - RNA, 19 nt, Artificial Sequence
  Description of Artificial Sequence: Synthetic oligonucleotide
auauauauauauauauauu

SEQ ID NO: 279058 - RNA, 19 nt, Artificial Sequence
  Description of Artificial Sequence: Synthetic oligonucleotide
uguuaagacuaaccaccug

SEQ ID NO: 279059 - RNA, 19 nt, Artificial Sequence
  Description of Artificial Sequence: Synthetic oligonucleotide
aaaucggugagagcaagaa

SEQ ID NO: 279060 - RNA, 19 nt, Artificial Sequence
  Description of Artificial Sequence: Synthetic oligonucleotide
ugugaccgcuccauucacg

SEQ ID NO: 279061 - RNA, 19 nt, Artificial Sequence
  Description of Artificial Sequence: Synthetic oligonucleotide
agcggcggguucuuguugc

SEQ ID NO: 279062 - RNA, 19 nt, Artificial Sequence
  Description of Artificial Sequence: Synthetic oligonucleotide
aucggugagagcaagaaau

SEQ ID NO: 279063 - RNA, 19 nt, Artificial Sequence
  Description of Artificial Sequence: Synthetic oligonucleotide
aguacuacucuuauguuaa

SEQ ID NO: 279064 - RNA, 19 nt, Artificial Sequence
  Description of Artificial Sequence: Synthetic oligonucleotide
gcauaucauacuuacaaca

SEQ ID NO: 279065 - RNA, 19 nt, Artificial Sequence
  Description of Artificial Sequence: Synthetic oligonucleotide
auuacguucuaaaaggguu

SEQ ID NO: 279066 - RNA, 19 nt, Artificial Sequence
  Description of Artificial Sequence: Synthetic oligonucleotide
gacgauguccgcgugauuc

SEQ ID NO: 279067 - RNA, 19 nt, Artificial Sequence
  Description of Artificial Sequence: Synthetic oligonucleotide
auaaagcacacaauuauuu

SEQ ID NO: 279068 - RNA, 19 nt, Artificial Sequence
  Description of Artificial Sequence: Synthetic oligonucleotide
acuacuuuucccaggaagu

SEQ ID NO: 279069 - RNA, 19 nt, Artificial Sequence
  Description of Artificial Sequence: Synthetic oligonucleotide
ucacuaagaugcuaugcau

SEQ ID NO: 279070 - RNA, 19 nt, Artificial Sequence
  Description of Artificial Sequence: Synthetic oligonucleotide
agaaugcucccuccaccgc

SEQ ID NO: 279071 - RNA, 19 nt, Artificial Sequence
  Description of Artificial Sequence: Synthetic oligonucleotide
gauaguuggaucugagaua

SEQ ID NO: 279072 - RNA, 19 nt, Artificial Sequence
  Description of Artificial Sequence: Synthetic oligonucleotide
aaaaggucaccuugcuaau

SEQ ID NO: 279073 - RNA, 19 nt, Artificial Sequence
  Description of Artificial Sequence: Synthetic oligonucleotide
uggggauaagcccuccaca

SEQ ID NO: 279074 - RNA, 19 nt, Artificial Sequence
  Description of Artificial Sequence: Synthetic oligonucleotide
aguuggagauuccucuuca

SEQ ID NO: 279075 - RNA, 19 nt, Artificial Sequence
  Description of Artificial Sequence: Synthetic oligonucleotide
acccauaguaauccuccuc

SEQ ID NO: 279076 - RNA, 19 nt, Artificial Sequence
  Description of Artificial Sequence: Synthetic oligonucleotide
aaucggugagagcaagaaa

SEQ ID NO: 279077 - RNA, 19 nt, Artificial Sequence
  Description of Artificial Sequence: Synthetic oligonucleotide
cuugcgaaucgccauggug

SEQ ID NO: 279078 - RNA, 19 nt, Artificial Sequence
  Description of Artificial Sequence: Synthetic oligonucleotide
ugauguuaucucgaacaug

SEQ ID NO: 279079 - RNA, 19 nt, Artificial Sequence
  Description of Artificial Sequence: Synthetic oligonucleotide
uuauacuggagagcaacaa

SEQ ID NO: 279080 - RNA, 19 nt, Artificial Sequence
  Description of Artificial Sequence: Synthetic oligonucleotide
uucuugcgaaucgccaugg

SEQ ID NO: 279081 - RNA, 19 nt, Artificial Sequence
  Description of Artificial Sequence: Synthetic oligonucleotide
gguaaugcuacagagagcu

SEQ ID NO: 279082 - RNA, 19 nt, Artificial Sequence
  Description of Artificial Sequence: Synthetic oligonucleotide
uuccuaaguacuacucuua

SEQ ID NO: 279083 - RNA, 19 nt, Artificial Sequence
  Description of Artificial Sequence: Synthetic oligonucleotide
caccuugcuaauauuauaa

SEQ ID NO: 279084 - RNA, 19 nt, Artificial Sequence
  Description of Artificial Sequence: Synthetic oligonucleotide
gacgagaaauguggaaaag

SEQ ID NO: 279085 - RNA, 19 nt, Artificial Sequence
  Description of Artificial Sequence: Synthetic oligonucleotide
caguaaugggauguaacac

SEQ ID NO: 279086 - RNA, 19 nt, Artificial Sequence
  Description of Artificial Sequence: Synthetic oligonucleotide
uaucgccacuagcauguag

SEQ ID NO: 279087 - RNA, 19 nt, Artificial Sequence
  Description of Artificial Sequence: Synthetic oligonucleotide
cuaaccgccagcacguuga

SEQ ID NO: 279088 - RNA, 19 nt, Artificial Sequence
  Description of Artificial Sequence: Synthetic oligonucleotide
gcgugauacaaauggaggc

SEQ ID NO: 279089 - RNA, 19 nt, Artificial Sequence
  Description of Artificial Sequence: Synthetic oligonucleotide
uaagacuaaccaccugaau

SEQ ID NO: 279090 - RNA, 19 nt, Artificial Sequence
  Description of Artificial Sequence: Synthetic oligonucleotide
agcgauccuaaccgccagc

SEQ ID NO: 279091 - RNA, 19 nt, Artificial Sequence
  Description of Artificial Sequence: Synthetic oligonucleotide
gcaugaauaauuaucgcca

SEQ ID NO: 279092 - RNA, 19 nt, Artificial Sequence
  Description of Artificial Sequence: Synthetic oligonucleotide
agucuaagcuacaacauuu

SEQ ID NO: 279093 - RNA, 19 nt, Artificial Sequence
  Description of Artificial Sequence: Synthetic oligonucleotide
acaagccccauuaagaauu

SEQ ID NO: 279094 - RNA, 19 nt, Artificial Sequence
  Description of Artificial Sequence: Synthetic oligonucleotide
auaaagggaugcugauuca

SEQ ID NO: 279095 - RNA, 19 nt, Artificial Sequence
  Description of Artificial Sequence: Synthetic oligonucleotide
ggggauaagcccuccacag

SEQ ID NO: 279096 - RNA, 19 nt, Artificial Sequence
  Description of Artificial Sequence: Synthetic oligonucleotide
auacaaauauauauauaua

SEQ ID NO: 279097 - RNA, 19 nt, Artificial Sequence
  Description of Artificial Sequence: Synthetic oligonucleotide
auaggauaacauaaagcau

SEQ ID NO: 279098 - RNA, 19 nt, Artificial Sequence
  Description of Artificial Sequence: Synthetic oligonucleotide
aggauaacauaaagcaugu

SEQ ID NO: 279099 - RNA, 19 nt, Artificial Sequence
  Description of Artificial Sequence: Synthetic oligonucleotide
uaaguacuacucuuauguu

SEQ ID NO: 279100 - RNA, 19 nt, Artificial Sequence
  Description of Artificial Sequence: Synthetic oligonucleotide
uuacccugaaagacaacuu

SEQ ID NO: 279101 - RNA, 19 nt, Artificial Sequence
  Description of Artificial Sequence: Synthetic oligonucleotide
gaccgcuccauucacgcca

SEQ ID NO: 279102 - RNA, 19 nt, Artificial Sequence
  Description of Artificial Sequence: Synthetic oligonucleotide
cagagagcuacuacuuuuc

SEQ ID NO: 279103 - RNA, 19 nt, Artificial Sequence
  Description of Artificial Sequence: Synthetic oligonucleotide
augcuaugcauaucauacu

SEQ ID NO: 279104 - RNA, 19 nt, Artificial Sequence
  Description of Artificial Sequence: Synthetic oligonucleotide
auacuuacaacaagcccca

SEQ ID NO: 279105 - RNA, 19 nt, Artificial Sequence
  Description of Artificial Sequence: Synthetic oligonucleotide
ugcuccaauauacggcaau

SEQ ID NO: 279106 - RNA, 19 nt, Artificial Sequence
  Description of Artificial Sequence: Synthetic oligonucleotide
aagguggucccuaaacuau

SEQ ID NO: 279107 - RNA, 19 nt, Artificial Sequence
  Description of Artificial Sequence: Synthetic oligonucleotide
ugcacguuaaacggcauuu

SEQ ID NO: 279108 - RNA, 19 nt, Artificial Sequence
  Description of Artificial Sequence: Synthetic oligonucleotide
ucgccaagccaaaaccaac

SEQ ID NO: 279109 - RNA, 19 nt, Artificial Sequence
  Description of Artificial Sequence: Synthetic oligonucleotide
gaacagcgauccuaaccgc

SEQ ID NO: 279110 - RNA, 19 nt, Artificial Sequence
  Description of Artificial Sequence: Synthetic oligonucleotide
aaaaucggugagagcaaga

SEQ ID NO: 279111 - RNA, 19 nt, Artificial Sequence
  Description of Artificial Sequence: Synthetic oligonucleotide
gaaucgccaugguggagcc

SEQ ID NO: 279112 - RNA, 19 nt, Artificial Sequence
  Description of Artificial Sequence: Synthetic oligonucleotide
cuuugaaaccauaguaaua

SEQ ID NO: 279113 - RNA, 19 nt, Artificial Sequence
  Description of Artificial Sequence: Synthetic oligonucleotide
gcaguaaugggauguaaca

SEQ ID NO: 279114 - RNA, 19 nt, Artificial Sequence
  Description of Artificial Sequence: Synthetic oligonucleotide
ggauaagcccuccacagga

SEQ ID NO: 279115 - RNA, 19 nt, Artificial Sequence
  Description of Artificial Sequence: Synthetic oligonucleotide
cuucuugcgaaucgccaug

SEQ ID NO: 279116 - RNA, 19 nt, Artificial Sequence
  Description of Artificial Sequence: Synthetic oligonucleotide
uuacaacaagccccauuaa

SEQ ID NO: 279117 - RNA, 19 nt, Artificial Sequence
  Description of Artificial Sequence: Synthetic oligonucleotide
ugcgaaucgccauggugga

SEQ ID NO: 279118 - RNA, 19 nt, Artificial Sequence
  Description of Artificial Sequence: Synthetic oligonucleotide
cugauucucugcucucgcc

SEQ ID NO: 279119 - RNA, 19 nt, Artificial Sequence
  Description of Artificial Sequence: Synthetic oligonucleotide
aggcuugcgugauacaaau

SEQ ID NO: 279120 - RNA, 19 nt, Artificial Sequence
  Description of Artificial Sequence: Synthetic oligonucleotide
auauacggcaauaaaucuu

SEQ ID NO: 279121 - RNA, 19 nt, Artificial Sequence
  Description of Artificial Sequence: Synthetic oligonucleotide
aucgccacuagcauguaga

SEQ ID NO: 279122 - RNA, 19 nt, Artificial Sequence
  Description of Artificial Sequence: Synthetic oligonucleotide
cuugcgugauacaaaugga

SEQ ID NO: 279123 - RNA, 19 nt, Artificial Sequence
  Description of Artificial Sequence: Synthetic oligonucleotide
cccauuaagaauuauuaaa

SEQ ID NO: 279124 - RNA, 19 nt, Artificial Sequence
  Description of Artificial Sequence: Synthetic oligonucleotide
agcacacaauuauuuuggu

SEQ ID NO: 279125 - RNA, 19 nt, Artificial Sequence
  Description of Artificial Sequence: Synthetic oligonucleotide
uuccagguguaaaggcuac

SEQ ID NO: 279126 - RNA, 19 nt, Artificial Sequence
  Description of Artificial Sequence: Synthetic oligonucleotide
acuuacaacaagccccauu

SEQ ID NO: 279127 - RNA, 19 nt, Artificial Sequence
  Description of Artificial Sequence: Synthetic oligonucleotide
accuugcuaauauuauaaa

SEQ ID NO: 279128 - RNA, 19 nt, Artificial Sequence
  Description of Artificial Sequence: Synthetic oligonucleotide
ucggugagagcaagaaaua

SEQ ID NO: 279129 - RNA, 19 nt, Artificial Sequence
  Description of Artificial Sequence: Synthetic oligonucleotide
agguaaagaccaauguaga

SEQ ID NO: 279130 - RNA, 19 nt, Artificial Sequence
  Description of Artificial Sequence: Synthetic oligonucleotide
auguaaguuggagauuccu

SEQ ID NO: 279131 - RNA, 19 nt, Artificial Sequence
  Description of Artificial Sequence: Synthetic oligonucleotide
ggauaguuggaucugagau

SEQ ID NO: 279132 - RNA, 19 nt, Artificial Sequence
  Description of Artificial Sequence: Synthetic oligonucleotide
gauacuucucaucgcuaaa

SEQ ID NO: 279133 - RNA, 19 nt, Artificial Sequence
  Description of Artificial Sequence: Synthetic oligonucleotide
agccaguaugccaacuggg

SEQ ID NO: 279134 - RNA, 19 nt, Artificial Sequence
  Description of Artificial Sequence: Synthetic oligonucleotide
auacggcaauaaaucuugc

SEQ ID NO: 279135 - RNA, 19 nt, Artificial Sequence
  Description of Artificial Sequence: Synthetic oligonucleotide
uuagugcauuaguuuucca

SEQ ID NO: 279136 - RNA, 19 nt, Artificial Sequence
  Description of Artificial Sequence: Synthetic oligonucleotide
cacgaauucauggcucagc

SEQ ID NO: 279137 - RNA, 19 nt, Artificial Sequence
  Description of Artificial Sequence: Synthetic oligonucleotide
aaagaacugcccagagaga

SEQ ID NO: 279138 - RNA, 19 nt, Artificial Sequence
  Description of Artificial Sequence: Synthetic oligonucleotide
gcauuacguucuaaaaggg

SEQ ID NO: 279139 - RNA, 19 nt, Artificial Sequence
  Description of Artificial Sequence: Synthetic oligonucleotide
cacguuaaacggcauuuca

SEQ ID NO: 279140 - RNA, 19 nt, Artificial Sequence
  Description of Artificial Sequence: Synthetic oligonucleotide
uccucuguugcaggucggg

SEQ ID NO: 279141 - RNA, 19 nt, Artificial Sequence
  Description of Artificial Sequence: Synthetic oligonucleotide
gguagcuaagucuaagcua

SEQ ID NO: 279142 - RNA, 19 nt, Artificial Sequence
  Description of Artificial Sequence: Synthetic oligonucleotide
caaguaggcauuacguucu

SEQ ID NO: 279143 - RNA, 19 nt, Artificial Sequence
  Description of Artificial Sequence: Synthetic oligonucleotide
uguuccggggcgagucugc

SEQ ID NO: 279144 - RNA, 19 nt, Artificial Sequence
  Description of Artificial Sequence: Synthetic oligonucleotide
gggauaagcccuccacagg

SEQ ID NO: 279145 - RNA, 19 nt, Artificial Sequence
  Description of Artificial Sequence: Synthetic oligonucleotide
guuggagauuccucuucac

SEQ ID NO: 279146 - RNA, 19 nt, Artificial Sequence
  Description of Artificial Sequence: Synthetic oligonucleotide
ugccaguuuuaauggcaga

SEQ ID NO: 279147 - RNA, 19 nt, Artificial Sequence
  Description of Artificial Sequence: Synthetic oligonucleotide
aguucgacaucagacuuua

SEQ ID NO: 279148 - RNA, 19 nt, Artificial Sequence
  Description of Artificial Sequence: Synthetic oligonucleotide
cugauugccaguugauaaa

SEQ ID NO: 279149 - RNA, 19 nt, Artificial Sequence
  Description of Artificial Sequence: Synthetic oligonucleotide
guaaugggauguaacaccu

SEQ ID NO: 279150 - RNA, 19 nt, Artificial Sequence
  Description of Artificial Sequence: Synthetic oligonucleotide
agcuauaggauaacauaaa

SEQ ID NO: 279151 - RNA, 19 nt, Artificial Sequence
  Description of Artificial Sequence: Synthetic oligonucleotide
cagcacgaauucauggcuc

SEQ ID NO: 279152 - RNA, 19 nt, Artificial Sequence
  Description of Artificial Sequence: Synthetic oligonucleotide
aucgccaggcaggagacga

SEQ ID NO: 279153 - RNA, 19 nt, Artificial Sequence
  Description of Artificial Sequence: Synthetic oligonucleotide
cauuacguucuaaaagggu

SEQ ID NO: 279154 - RNA, 19 nt, Artificial Sequence
  Description of Artificial Sequence: Synthetic oligonucleotide
acaggauaguuggaucuga

SEQ ID NO: 279155 - RNA, 19 nt, Artificial Sequence
  Description of Artificial Sequence: Synthetic oligonucleotide
gucccuaaacuauucugaa

SEQ ID NO: 279156 - RNA, 19 nt, Artificial Sequence
  Description of Artificial Sequence: Synthetic oligonucleotide
cauuagguuauggggauaa

SEQ ID NO: 279157 - RNA, 19 nt, Artificial Sequence
  Description of Artificial Sequence: Synthetic oligonucleotide
uugcacguuaaacggcauu

SEQ ID NO: 279158 - RNA, 19 nt, Artificial Sequence
  Description of Artificial Sequence: Synthetic oligonucleotide
uaaugggauguaacaccua

SEQ ID NO: 279159 - RNA, 19 nt, Artificial Sequence
  Description of Artificial Sequence: Synthetic oligonucleotide
ggucccuaaacuauucuga

SEQ ID NO: 279160 - RNA, 19 nt, Artificial Sequence
  Description of Artificial Sequence: Synthetic oligonucleotide
ucuugcgaaucgccauggu

SEQ ID NO: 279161 - RNA, 19 nt, Artificial Sequence
  Description of Artificial Sequence: Synthetic oligonucleotide
ucccaggaaguuaggucaa

SEQ ID NO: 279162 - RNA, 19 nt, Artificial Sequence
  Description of Artificial Sequence: Synthetic oligonucleotide
aaguucgacaucagacuuu

SEQ ID NO: 279163 - RNA, 19 nt, Artificial Sequence
  Description of Artificial Sequence: Synthetic oligonucleotide
guccaaagcuauaggauaa

SEQ ID NO: 279164 - RNA, 19 nt, Artificial Sequence
  Description of Artificial Sequence: Synthetic oligonucleotide
ugaccgcuccauucacgcc

SEQ ID NO: 279165 - RNA, 19 nt, Artificial Sequence
  Description of Artificial Sequence: Synthetic oligonucleotide
cacaggauaguuggaucug

SEQ ID NO: 279166 - RNA, 19 nt, Artificial Sequence
  Description of Artificial Sequence: Synthetic oligonucleotide
agcagcggcggguucuugu

SEQ ID NO: 279167 - RNA, 19 nt, Artificial Sequence
  Description of Artificial Sequence: Synthetic oligonucleotide
gguuugcacguuaaacggc

SEQ ID NO: 279168 - RNA, 19 nt, Artificial Sequence
  Description of Artificial Sequence: Synthetic oligonucleotide
ugaaggccgguagcuaagu

SEQ ID NO: 279169 - RNA, 19 nt, Artificial Sequence
  Description of Artificial Sequence: Synthetic oligonucleotide
gaaggccgguagcuaaguc

SEQ ID NO: 279170 - RNA, 19 nt, Artificial Sequence
  Description of Artificial Sequence: Synthetic oligonucleotide
acagcgauccuaaccgcca

SEQ ID NO: 279171 - RNA, 19 nt, Artificial Sequence
  Description of Artificial Sequence: Synthetic oligonucleotide
aaguaggcauuacguucua

SEQ ID NO: 279172 - RNA, 19 nt, Artificial Sequence
  Description of Artificial Sequence: Synthetic oligonucleotide
uggccgguuuccucuucag

SEQ ID NO: 279173 - RNA, 19 nt, Artificial Sequence
  Description of Artificial Sequence: Synthetic oligonucleotide
caaauuaccugacacccuu

SEQ ID NO: 279174 - RNA, 19 nt, Artificial Sequence
  Description of Artificial Sequence: Synthetic oligonucleotide
auggccgguuuccucuuca

SEQ ID NO: 279175 - RNA, 19 nt, Artificial Sequence
  Description of Artificial Sequence: Synthetic oligonucleotide
guuauggggauaagcccuc

SEQ ID NO: 279176 - RNA, 19 nt, Artificial Sequence
  Description of Artificial Sequence: Synthetic oligonucleotide
aaauuaccugacacccuuu

SEQ ID NO: 279177 - RNA, 19 nt, Artificial Sequence
  Description of Artificial Sequence: Synthetic oligonucleotide
cuguuaagacuaaccaccu

SEQ ID NO: 279178 - RNA, 19 nt, Artificial Sequence
  Description of Artificial Sequence: Synthetic oligonucleotide
aagggcuauguaaguugga

SEQ ID NO: 279179 - RNA, 19 nt, Artificial Sequence
  Description of Artificial Sequence: Synthetic oligonucleotide
gaaguagaguucagggagu

SEQ ID NO: 279180 - RNA, 19 nt, Artificial Sequence
  Description of Artificial Sequence: Synthetic oligonucleotide
cucuuauguuaaugagaca

SEQ ID NO: 279181 - RNA, 19 nt, Artificial Sequence
  Description of Artificial Sequence: Synthetic oligonucleotide
caguacuuaaauccaacuu

SEQ ID NO: 279182 - RNA, 19 nt, Artificial Sequence
  Description of Artificial Sequence: Synthetic oligonucleotide
ggucggguaacauuauacu

SEQ ID NO: 279183 - RNA, 19 nt, Artificial Sequence
  Description of Artificial Sequence: Synthetic oligonucleotide
agccccauuaagaauuauu

SEQ ID NO: 279184 - RNA, 19 nt, Artificial Sequence
  Description of Artificial Sequence: Synthetic oligonucleotide
ucauuagguuauggggaua

SEQ ID NO: 279185 - RNA, 19 nt, Artificial Sequence
  Description of Artificial Sequence: Synthetic oligonucleotide
cagcgauccuaaccgccag

SEQ ID NO: 279186 - RNA, 19 nt, Artificial Sequence
  Description of Artificial Sequence: Synthetic oligonucleotide
uccccucaaaugcccuuuc

SEQ ID NO: 279187 - RNA, 19 nt, Artificial Sequence
  Description of Artificial Sequence: Synthetic oligonucleotide
uggcagaaauuugguucca

SEQ ID NO: 279188 - RNA, 19 nt, Artificial Sequence
  Description of Artificial Sequence: Synthetic oligonucleotide
cuccaauauacggcaauaa

SEQ ID NO: 279189 - RNA, 19 nt, Artificial Sequence
  Description of Artificial Sequence: Synthetic oligonucleotide
cuagcagcauggcaacuua

SEQ ID NO: 279190 - RNA, 19 nt, Artificial Sequence
  Description of Artificial Sequence: Synthetic oligonucleotide
gucaacggcuggaaagaga

SEQ ID NO: 279191 - RNA, 19 nt, Artificial Sequence
  Description of Artificial Sequence: Synthetic oligonucleotide
cugauacuucucaucgcua

SEQ ID NO: 279192 - RNA, 19 nt, Artificial Sequence
  Description of Artificial Sequence: Synthetic oligonucleotide
gcucucgccaagccaaaac

SEQ ID NO: 279193 - RNA, 19 nt, Artificial Sequence
  Description of Artificial Sequence: Synthetic oligonucleotide
cugcucaccgccgcgcuug

SEQ ID NO: 279194 - RNA, 19 nt, Artificial Sequence
  Description of Artificial Sequence: Synthetic oligonucleotide
aggccgguagcuaagucua

SEQ ID NO: 279195 - RNA, 19 nt, Artificial Sequence
  Description of Artificial Sequence: Synthetic oligonucleotide
uaaccgccagcacguugaa

SEQ ID NO: 279196 - RNA, 19 nt, Artificial Sequence
  Description of Artificial Sequence: Synthetic oligonucleotide
ugcucaccgccgcgcuugc

SEQ ID NO: 279197 - RNA, 19 nt, Artificial Sequence
  Description of Artificial Sequence: Synthetic oligonucleotide
gcagcacgaauucauggcu

SEQ ID NO: 279198 - RNA, 19 nt, Artificial Sequence
  Description of Artificial Sequence: Synthetic oligonucleotide
agcuggccagacucauuaa

SEQ ID NO: 279199 - RNA, 19 nt, Artificial Sequence
  Description of Artificial Sequence: Synthetic oligonucleotide
ccgucaguuucccauccac

SEQ ID NO: 279200 - RNA, 19 nt, Artificial Sequence
  Description of Artificial Sequence: Synthetic oligonucleotide
gccgguagcuaagucuaag

SEQ ID NO: 279201 - RNA, 19 nt, Artificial Sequence
  Description of Artificial Sequence: Synthetic oligonucleotide
cuguuccggggcgagucug

SEQ ID NO: 279202 - RNA, 19 nt, Artificial Sequence
  Description of Artificial Sequence: Synthetic oligonucleotide
uaguuggaucugagauaua

SEQ ID NO: 279203 - RNA, 19 nt, Artificial Sequence
  Description of Artificial Sequence: Synthetic oligonucleotide
augggauguaacaccuaua

SEQ ID NO: 279204 - RNA, 19 nt, Artificial Sequence
  Description of Artificial Sequence: Synthetic oligonucleotide
ucgccaggcaggagacgau

SEQ ID NO: 279205 - RNA, 19 nt, Artificial Sequence
  Description of Artificial Sequence: Synthetic oligonucleotide
ugcucucgccaagccaaaa

SEQ ID NO: 279206 - RNA, 19 nt, Artificial Sequence
  Description of Artificial Sequence: Synthetic oligonucleotide
caucgccaggcaggagacg

SEQ ID NO: 279207 - RNA, 19 nt, Artificial Sequence
  Description of Artificial Sequence: Synthetic oligonucleotide
ccaaagcuauaggauaaca

SEQ ID NO: 279208 - RNA, 19 nt, Artificial Sequence
  Description of Artificial Sequence: Synthetic oligonucleotide
ggguaacauuauacuggag

SEQ ID NO: 279209 - RNA, 19 nt, Artificial Sequence
  Description of Artificial Sequence: Synthetic oligonucleotide
ccuaaccgccagcacguug

SEQ ID NO: 279210 - RNA, 19 nt, Artificial Sequence
  Description of Artificial Sequence: Synthetic oligonucleotide
cggguaacauuauacugga

SEQ ID NO: 279211 - RNA, 19 nt, Artificial Sequence
  Description of Artificial Sequence: Synthetic oligonucleotide
uuccggggcgagucugcuc

SEQ ID NO: 279212 - RNA, 19 nt, Artificial Sequence
  Description of Artificial Sequence: Synthetic oligonucleotide
cuacuacuuuucccaggaa

SEQ ID NO: 279213 - RNA, 19 nt, Artificial Sequence
  Description of Artificial Sequence: Synthetic oligonucleotide
gcgauccuaaccgccagca

SEQ ID NO: 279214 - RNA, 19 nt, Artificial Sequence
  Description of Artificial Sequence: Synthetic oligonucleotide
gucuaagcuacaacauuuu

SEQ ID NO: 279215 - RNA, 19 nt, Artificial Sequence
  Description of Artificial Sequence: Synthetic oligonucleotide
gacuaaccaccugaauuuu

SEQ ID NO: 279216 - RNA, 19 nt, Artificial Sequence
  Description of Artificial Sequence: Synthetic oligonucleotide
gcacgaauucauggcucag

SEQ ID NO: 279217 - RNA, 19 nt, Artificial Sequence
  Description of Artificial Sequence: Synthetic oligonucleotide
uuaucgccacuagcaugua

SEQ ID NO: 279218 - RNA, 19 nt, Artificial Sequence
  Description of Artificial Sequence: Synthetic oligonucleotide
ggaagagguaaagaccaau

SEQ ID NO: 279219 - RNA, 19 nt, Artificial Sequence
  Description of Artificial Sequence: Synthetic oligonucleotide
gcacguuaaacggcauuuc

SEQ ID NO: 279220 - RNA, 19 nt, Artificial Sequence
  Description of Artificial Sequence: Synthetic oligonucleotide
caggucggguaacauuaua

SEQ ID NO: 279221 - RNA, 19 nt, Artificial Sequence
  Description of Artificial Sequence: Synthetic oligonucleotide
gcuccaauauacggcaaua

SEQ ID NO: 279222 - RNA, 19 nt, Artificial Sequence
  Description of Artificial Sequence: Synthetic oligonucleotide
ggccgguuuccucuucaga

SEQ ID NO: 279223 - RNA, 19 nt, Artificial Sequence
  Description of Artificial Sequence: Synthetic oligonucleotide
gcacaacuuucuagcagca

SEQ ID NO: 279224 - RNA, 19 nt, Artificial Sequence
  Description of Artificial Sequence: Synthetic oligonucleotide
gcgugauucugcagcacga

SEQ ID NO: 279225 - RNA, 19 nt, Artificial Sequence
  Description of Artificial Sequence: Synthetic oligonucleotide
gggccauuaauccgucagu

SEQ ID NO: 279226 - RNA, 19 nt, Artificial Sequence
  Description of Artificial Sequence: Synthetic oligonucleotide
ccagcacguugaaguuucc

SEQ ID NO: 279227 - RNA, 19 nt, Artificial Sequence
  Description of Artificial Sequence: Synthetic oligonucleotide
gcauuucacuaagaugcua

SEQ ID NO: 279228 - RNA, 19 nt, Artificial Sequence
  Description of Artificial Sequence: Synthetic oligonucleotide
ccaaauuaccugacacccu

SEQ ID NO: 279229 - RNA, 19 nt, Artificial Sequence
  Description of Artificial Sequence: Synthetic oligonucleotide
accgcuccauucacgccau

SEQ ID NO: 279230 - RNA, 19 nt, Artificial Sequence
  Description of Artificial Sequence: Synthetic oligonucleotide
ggccauuaauccgucaguu

SEQ ID NO: 279231 - RNA, 19 nt, Artificial Sequence
  Description of Artificial Sequence: Synthetic oligonucleotide
caccgccgaagcuggaagu

SEQ ID NO: 279232 - RNA, 19 nt, Artificial Sequence
  Description of Artificial Sequence: Synthetic oligonucleotide
uccuaaccgccagcacguu

SEQ ID NO: 279233 - RNA, 19 nt, Artificial Sequence
  Description of Artificial Sequence: Synthetic oligonucleotide
cgguagcuaagucuaagcu

SEQ ID NO: 279234 - RNA, 19 nt, Artificial Sequence
  Description of Artificial Sequence: Synthetic oligonucleotide
cacaacuuucuagcagcau

SEQ ID NO: 279235 - RNA, 19 nt, Artificial Sequence
  Description of Artificial Sequence: Synthetic oligonucleotide
gccaaaucuuugaaaccau

SEQ ID NO: 279236 - RNA, 19 nt, Artificial Sequence
  Description of Artificial Sequence: Synthetic oligonucleotide
cccaggaaguuaggucaac

SEQ ID NO: 279237 - RNA, 19 nt, Artificial Sequence
  Description of Artificial Sequence: Synthetic oligonucleotide
gcuauguaaguuggagauu

SEQ ID NO: 279238 - RNA, 19 nt, Artificial Sequence
  Description of Artificial Sequence: Synthetic oligonucleotide
guuccggggcgagucugcu

SEQ ID NO: 279239 - RNA, 19 nt, Artificial Sequence
  Description of Artificial Sequence: Synthetic oligonucleotide
ccggucccgcgcucugggc

SEQ ID NO: 279240 - RNA, 19 nt, Artificial Sequence
  Description of Artificial Sequence: Synthetic oligonucleotide
cgugauucugcagcacgaa

SEQ ID NO: 279241 - RNA, 19 nt, Artificial Sequence
  Description of Artificial Sequence: Synthetic oligonucleotide
ccgcgcucugggcugcuca

SEQ ID NO: 279242 - RNA, 19 nt, Artificial Sequence
  Description of Artificial Sequence: Synthetic oligonucleotide
cggugagagcaagaaauau

SEQ ID NO: 279243 - RNA, 19 nt, Artificial Sequence
  Description of Artificial Sequence: Synthetic oligonucleotide
ggggcgagucugcuccauu

SEQ ID NO: 279244 - RNA, 19 nt, Artificial Sequence
  Description of Artificial Sequence: Synthetic oligonucleotide
ccgccgaagcuggaaguua

SEQ ID NO: 279245 - RNA, 19 nt, Artificial Sequence
  Description of Artificial Sequence: Synthetic oligonucleotide
cggcggguucuuguugcuc

SEQ ID NO: 279246 - RNA, 19 nt, Artificial Sequence
  Description of Artificial Sequence: Synthetic oligonucleotide
gcugcucaccgccgcgcuu

SEQ ID NO: 279247 - RNA, 19 nt, Artificial Sequence
  Description of Artificial Sequence: Synthetic oligonucleotide
ccggggcgagucugcucca

SEQ ID NO: 279248 - RNA, 19 nt, Artificial Sequence
  Description of Artificial Sequence: Synthetic oligonucleotide
cggggcgagucugcuccau

SEQ ID NO: 279249 - RNA, 19 nt, Artificial Sequence
  Description of Artificial Sequence: Synthetic oligonucleotide
ccgcuccauucacgccauu

SEQ ID NO: 279250 - RNA, 19 nt, Artificial Sequence
  Description of Artificial Sequence: Synthetic oligonucleotide
gauaguaucacucaucuug

SEQ ID NO: 279251 - RNA, 19 nt, Artificial Sequence
  Description of Artificial Sequence: Synthetic oligonucleotide
gaaagaaagagagagagag

SEQ ID NO: 279252 - RNA, 19 nt, Artificial Sequence
  Description of Artificial Sequence: Synthetic oligonucleotide
uuaacuacgauuauagccu

SEQ ID NO: 279253 - RNA, 19 nt, Artificial Sequence
  Description of Artificial Sequence: Synthetic oligonucleotide
aauucacgaggcuugaaac

SEQ ID NO: 279254 - RNA, 19 nt, Artificial Sequence
  Description of Artificial Sequence: Synthetic oligonucleotide
aagaaagagagagagagag

SEQ ID NO: 279255 - RNA, 19 nt, Artificial Sequence
  Description of Artificial Sequence: Synthetic oligonucleotide
gagagugcaacuuacauug

SEQ ID NO: 279256 - RNA, 19 nt, Artificial Sequence
  Description of Artificial Sequence: Synthetic oligonucleotide
  modified_base (4)..(4): a, c, u, g, unknown or other
aaanaaacucagcccaggg

SEQ ID NO: 279257 - RNA, 19 nt, Artificial Sequence
  Description of Artificial Sequence: Synthetic oligonucleotide
uauacauugaguuccagga

SEQ ID NO: 279258 - RNA, 19 nt, Artificial Sequence
  Description of Artificial Sequence: Synthetic oligonucleotide
acaucaagcccuuaagucc

SEQ ID NO: 279259 - RNA, 19 nt, Artificial Sequence
  Description of Artificial Sequence: Synthetic oligonucleotide
aguaaaacugcccacuagg

SEQ ID NO: 279260 - RNA, 19 nt, Artificial Sequence
  Description of Artificial Sequence: Synthetic oligonucleotide
  modified_base (2)..(2): a, c, u, g, unknown or other
anaaacucagcccagggau

SEQ ID NO: 279261 - RNA, 19 nt, Artificial Sequence
  Description of Artificial Sequence: Synthetic oligonucleotide
uauucaacagugcagugag

SEQ ID NO: 279262 - RNA, 19 nt, Artificial Sequence
  Description of Artificial Sequence: Synthetic oligonucleotide
aagauaguaucacucaucu

SEQ ID NO: 279263 - RNA, 19 nt, Artificial Sequence
  Description of Artificial Sequence: Synthetic oligonucleotide
uuaugcgucccuaacaucc

SEQ ID NO: 279264 - RNA, 19 nt, Artificial Sequence
  Description of Artificial Sequence: Synthetic oligonucleotide
agaagcguaaauaacauuc

SEQ ID NO: 279265 - RNA, 19 nt, Artificial Sequence
  Description of Artificial Sequence: Synthetic oligonucleotide
uuuaagaagcggaagaaaa

SEQ ID NO: 279266 - RNA, 19 nt, Artificial Sequence
  Description of Artificial Sequence: Synthetic oligonucleotide
aacauaagcaguagaagcg

SEQ ID NO: 279267 - RNA, 19 nt, Artificial Sequence
  Description of Artificial Sequence: Synthetic oligonucleotide
acagagacugacccgaugc

SEQ ID NO: 279268 - RNA, 19 nt, Artificial Sequence
  Description of Artificial Sequence: Synthetic oligonucleotide
ucggcuacauaguagauag

SEQ ID NO: 279269 - RNA, 19 nt, Artificial Sequence
  Description of Artificial Sequence: Synthetic oligonucleotide
uacgugaggauacacagcc

SEQ ID NO: 279270 - RNA, 19 nt, Artificial Sequence
  Description of Artificial Sequence: Synthetic oligonucleotide
caacauaagcaguagaagc

SEQ ID NO: 279271 - RNA, 19 nt, Artificial Sequence
  Description of Artificial Sequence: Synthetic oligonucleotide
uaguagauagaauuaagac

SEQ ID NO: 279272 - RNA, 19 nt, Artificial Sequence
  Description of Artificial Sequence: Synthetic oligonucleotide
auagaauuaagacuagccu

SEQ ID NO: 279273 - RNA, 19 nt, Artificial Sequence
  Description of Artificial Sequence: Synthetic oligonucleotide
uuuacaguuugccauguga

SEQ ID NO: 279274 - RNA, 19 nt, Artificial Sequence
  Description of Artificial Sequence: Synthetic oligonucleotide
gugaaagccaucuaaagac

SEQ ID NO: 279275 - RNA, 19 nt, Artificial Sequence
  Description of Artificial Sequence: Synthetic oligonucleotide
gacagagugaucgugaaag

SEQ ID NO: 279276 - RNA, 19 nt, Artificial Sequence
  Description of Artificial Sequence: Synthetic oligonucleotide
ucaucuugacauaugaagu

SEQ ID NO: 279277 - RNA, 19 nt, Artificial Sequence
  Description of Artificial Sequence: Synthetic oligonucleotide
ucccuaacauccauuaagg

SEQ ID NO: 279278 - RNA, 19 nt, Artificial Sequence
  Description of Artificial Sequence: Synthetic oligonucleotide
  modified_base (5)..(5): a, c, u, g, unknown or other
aaaanaaacucagcccagg

SEQ ID NO: 279279 - RNA, 19 nt, Artificial Sequence
  Description of Artificial Sequence: Synthetic oligonucleotide
gacuuaacuacgauuauag

SEQ ID NO: 279280 - RNA, 19 nt, Artificial Sequence
  Description of Artificial Sequence: Synthetic oligonucleotide
uguaccgcugcucagacac

SEQ ID NO: 279281 - RNA, 19 nt, Artificial Sequence
  Description of Artificial Sequence: Synthetic oligonucleotide
gaauccucugccgagagcg

SEQ ID NO: 279282 - RNA, 19 nt, Artificial Sequence
  Description of Artificial Sequence: Synthetic oligonucleotide
aagagagagagagagaaga

SEQ ID NO: 279283 - RNA, 19 nt, Artificial Sequence
  Description of Artificial Sequence: Synthetic oligonucleotide
auuaguugguauucaacag

SEQ ID NO: 279284 - RNA, 19 nt, Artificial Sequence
  Description of Artificial Sequence: Synthetic oligonucleotide
aagaaccacacuuaugcgu

SEQ ID NO: 279285 - RNA, 19 nt, Artificial Sequence
  Description of Artificial Sequence: Synthetic oligonucleotide
  modified_base (3)..(3): a, c, u, g, unknown or other
aanaaacucagcccaggga

SEQ ID NO: 279286 - RNA, 19 nt, Artificial Sequence
  Description of Artificial Sequence: Synthetic oligonucleotide
auaaccuuucacaaugacc

SEQ ID NO: 279287 - RNA, 19 nt, Artificial Sequence
  Description of Artificial Sequence: Synthetic oligonucleotide
aacacaucaagcccuuaag

SEQ ID NO: 279288 - RNA, 19 nt, Artificial Sequence
  Description of Artificial Sequence: Synthetic oligonucleotide
cauacgugaggauacacag

SEQ ID NO: 279289 - RNA, 19 nt, Artificial Sequence
  Description of Artificial Sequence: Synthetic oligonucleotide
guuacaguaucaucaagcc

SEQ ID NO: 279290 - RNA, 19 nt, Artificial Sequence
  Description of Artificial Sequence: Synthetic oligonucleotide
ugcuuuuggacuuaacuac

SEQ ID NO: 279291 - RNA, 19 nt, Artificial Sequence
  Description of Artificial Sequence: Synthetic oligonucleotide
caaguugaguuauuguagg

SEQ ID NO: 279292 - RNA, 19 nt, Artificial Sequence
  Description of Artificial Sequence: Synthetic oligonucleotide
aagcguaaauaacauucag

SEQ ID NO: 279293 - RNA, 19 nt, Artificial Sequence
  Description of Artificial Sequence: Synthetic oligonucleotide
uuugguacuagagacgggc

SEQ ID NO: 279294 - RNA, 19 nt, Artificial Sequence
  Description of Artificial Sequence: Synthetic oligonucleotide
aagcguuccaaacucucuc

SEQ ID NO: 279295 - RNA, 19 nt, Artificial Sequence
  Description of Artificial Sequence: Synthetic oligonucleotide
aacuuacauugacagagug

SEQ ID NO: 279296 - RNA, 19 nt, Artificial Sequence
  Description of Artificial Sequence: Synthetic oligonucleotide
aguacauacgugaggauac

SEQ ID NO: 279297 - RNA, 19 nt, Artificial Sequence
  Description of Artificial Sequence: Synthetic oligonucleotide
uuggcagguauucagguac

SEQ ID NO: 279298 - RNA, 19 nt, Artificial Sequence
  Description of Artificial Sequence: Synthetic oligonucleotide
uaauuucggaguuucuugc

SEQ ID NO: 279299 - RNA, 19 nt, Artificial Sequence
  Description of Artificial Sequence: Synthetic oligonucleotide
ggaucaagagcacacaucc

SEQ ID NO: 279300 - RNA, 19 nt, Artificial Sequence
  Description of Artificial Sequence: Synthetic oligonucleotide
agaacgaguuacucugagc

SEQ ID NO: 279301 - RNA, 19 nt, Artificial Sequence
  Description of Artificial Sequence: Synthetic oligonucleotide
uacgauuauagccuggcau

SEQ ID NO: 279302 - RNA, 19 nt, Artificial Sequence
  Description of Artificial Sequence: Synthetic oligonucleotide
gaaagagagagagagagaa

SEQ ID NO: 279303 - RNA, 19 nt, Artificial Sequence
  Description of Artificial Sequence: Synthetic oligonucleotide
acuacgauuauagccuggc

SEQ ID NO: 279304 - RNA, 19 nt, Artificial Sequence
  Description of Artificial Sequence: Synthetic oligonucleotide
gucccuaacauccauuaag

SEQ ID NO: 279305 - RNA, 19 nt, Artificial Sequence
  Description of Artificial Sequence: Synthetic oligonucleotide
gcguaaauaacauucagac

SEQ ID NO: 279306 - RNA, 19 nt, Artificial Sequence
  Description of Artificial Sequence: Synthetic oligonucleotide
acgauuauagccuggcaug

SEQ ID NO: 279307 - RNA, 19 nt, Artificial Sequence
  Description of Artificial Sequence: Synthetic oligonucleotide
acgggcacuuguuagcugc

SEQ ID NO: 279308 - RNA, 19 nt, Artificial Sequence
  Description of Artificial Sequence: Synthetic oligonucleotide
uuaagaagcggaagaaaau

SEQ ID NO: 279309 - RNA, 19 nt, Artificial Sequence
  Description of Artificial Sequence: Synthetic oligonucleotide
ugaguuauuguaggcaacc

SEQ ID NO: 279310 - RNA, 19 nt, Artificial Sequence
  Description of Artificial Sequence: Synthetic oligonucleotide
acugcauuaguugguauuc

SEQ ID NO: 279311 - RNA, 19 nt, Artificial Sequence
  Description of Artificial Sequence: Synthetic oligonucleotide
acaaguugaguuauuguag

SEQ ID NO: 279312 - RNA, 19 nt, Artificial Sequence
  Description of Artificial Sequence: Synthetic oligonucleotide
auuauagccuggcauggug

SEQ ID NO: 279313 - RNA, 19 nt, Artificial Sequence
  Description of Artificial Sequence: Synthetic oligonucleotide
uuacaguuugccaugugau

SEQ ID NO: 279314 - RNA, 19 nt, Artificial Sequence
  Description of Artificial Sequence: Synthetic oligonucleotide
agauguacccuugauacug

SEQ ID NO: 279315 - RNA, 19 nt, Artificial Sequence
  Description of Artificial Sequence: Synthetic oligonucleotide
ccuaacauccauuaagggc

SEQ ID NO: 279316 - RNA, 19 nt, Artificial Sequence
  Description of Artificial Sequence: Synthetic oligonucleotide
gaauccgagaacgaguuac

SEQ ID NO: 279317 - RNA, 19 nt, Artificial Sequence
  Description of Artificial Sequence: Synthetic oligonucleotide
acagagugaucgugaaagc

SEQ ID NO: 279318 - RNA, 19 nt, Artificial Sequence
  Description of Artificial Sequence: Synthetic oligonucleotide
uagccgcauaauaauuucg

SEQ ID NO: 279319 - RNA, 19 nt, Artificial Sequence
  Description of Artificial Sequence: Synthetic oligonucleotide
ucuggugaaauagcaaagc

SEQ ID NO: 279320 - RNA, 19 nt, Artificial Sequence
  Description of Artificial Sequence: Synthetic oligonucleotide
gaacgaguuacucugagcu

SEQ ID NO: 279321 - RNA, 19 nt, Artificial Sequence
  Description of Artificial Sequence: Synthetic oligonucleotide
acaguagucguucucugug

SEQ ID NO: 279322 - RNA, 19 nt, Artificial Sequence
  Description of Artificial Sequence: Synthetic oligonucleotide
ucgugaaagccaucuaaag

SEQ ID NO: 279323 - RNA, 19 nt, Artificial Sequence
  Description of Artificial Sequence: Synthetic oligonucleotide
aaguggagagccuuacaca

SEQ ID NO: 279324 - RNA, 19 nt, Artificial Sequence
  Description of Artificial Sequence: Synthetic oligonucleotide
auaguagauagaauuaaga

SEQ ID NO: 279325 - RNA, 19 nt, Artificial Sequence
  Description of Artificial Sequence: Synthetic oligonucleotide
ugcagaagagggcuuacac

SEQ ID NO: 279326 - RNA, 19 nt, Artificial Sequence
  Description of Artificial Sequence: Synthetic oligonucleotide
caaguggagagccuuacac

SEQ ID NO: 279327 - RNA, 19 nt, Artificial Sequence
  Description of Artificial Sequence: Synthetic oligonucleotide
ucuuaaauucacucccuuc

SEQ ID NO: 279328 - RNA, 19 nt, Artificial Sequence
  Description of Artificial Sequence: Synthetic oligonucleotide
gucaccaugagacuuacaa

SEQ ID NO: 279329 - RNA, 19 nt, Artificial Sequence
  Description of Artificial Sequence: Synthetic oligonucleotide
uugguacuagagacgggcg

SEQ ID NO: 279330 - RNA, 19 nt, Artificial Sequence
  Description of Artificial Sequence: Synthetic oligonucleotide
uagauagaauuaagacuag

SEQ ID NO: 279331 - RNA, 19 nt, Artificial Sequence
  Description of Artificial Sequence: Synthetic oligonucleotide
augagacuuacaaaaugac

SEQ ID NO: 279332 - RNA, 19 nt, Artificial Sequence
  Description of Artificial Sequence: Synthetic oligonucleotide
uagagagugcaacuuacau

SEQ ID NO: 279333 - RNA, 19 nt, Artificial Sequence
  Description of Artificial Sequence: Synthetic oligonucleotide
acgaguuacucugagcuuc

SEQ ID NO: 279334 - RNA, 19 nt, Artificial Sequence
  Description of Artificial Sequence: Synthetic oligonucleotide
acacuuaugcgucccuaac

SEQ ID NO: 279335 - RNA, 19 nt, Artificial Sequence
  Description of Artificial Sequence: Synthetic oligonucleotide
uccucggcuacauaguaga

SEQ ID NO: 279336 - RNA, 19 nt, Artificial Sequence
  Description of Artificial Sequence: Synthetic oligonucleotide
acuuaugcgucccuaacau

SEQ ID NO: 279337 - RNA, 19 nt, Artificial Sequence
  Description of Artificial Sequence: Synthetic oligonucleotide
uagagacgggcguuggugg

SEQ ID NO: 279338 - RNA, 19 nt, Artificial Sequence
  Description of Artificial Sequence: Synthetic oligonucleotide
uaagaagcggaagaaaaua

SEQ ID NO: 279339 - RNA, 19 nt, Artificial Sequence
  Description of Artificial Sequence: Synthetic oligonucleotide
augagccgucaacauaagc

SEQ ID NO: 279340 - RNA, 19 nt, Artificial Sequence
  Description of Artificial Sequence: Synthetic oligonucleotide
auuaagauguacccuugau

SEQ ID NO: 279341 - RNA, 19 nt, Artificial Sequence
  Description of Artificial Sequence: Synthetic oligonucleotide
uuagccgcauaauaauuuc

SEQ ID NO: 279342 - RNA, 19 nt, Artificial Sequence
  Description of Artificial Sequence: Synthetic oligonucleotide
agccccgagagacaagugg

SEQ ID NO: 279343 - RNA, 19 nt, Artificial Sequence
  Description of Artificial Sequence: Synthetic oligonucleotide
aggagugacgcacauggca

SEQ ID NO: 279344 - RNA, 19 nt, Artificial Sequence
  Description of Artificial Sequence: Synthetic oligonucleotide
auucacgaggcuugaaaca

SEQ ID NO: 279345 - RNA, 19 nt, Artificial Sequence
  Description of Artificial Sequence: Synthetic oligonucleotide
gacgaagucucuuggcaug

SEQ ID NO: 279346 - RNA, 19 nt, Artificial Sequence
  Description of Artificial Sequence: Synthetic oligonucleotide
gagaacgaguuacucugag

SEQ ID NO: 279347 - RNA, 19 nt, Artificial Sequence
  Description of Artificial Sequence: Synthetic oligonucleotide
uucacgaggcuugaaacac

SEQ ID NO: 279348 - RNA, 19 nt, Artificial Sequence
  Description of Artificial Sequence: Synthetic oligonucleotide
cuagauggaacuuuacaaa

SEQ ID NO: 279349 - RNA, 19 nt, Artificial Sequence
  Description of Artificial Sequence: Synthetic oligonucleotide
uccgagaacgaguuacucu

SEQ ID NO: 279350 - RNA, 19 nt, Artificial Sequence
  Description of Artificial Sequence: Synthetic oligonucleotide
gaauucacgaggcuugaaa

SEQ ID NO: 279351 - RNA, 19 nt, Artificial Sequence
  Description of Artificial Sequence: Synthetic oligonucleotide
ugccaugugaucacgugaa

SEQ ID NO: 279352 - RNA, 19 nt, Artificial Sequence
  Description of Artificial Sequence: Synthetic oligonucleotide
agagagagagagaagaaaa

SEQ ID NO: 279353 - RNA, 19 nt, Artificial Sequence
  Description of Artificial Sequence: Synthetic oligonucleotide
aacagagacugacccgaug

SEQ ID NO: 279354 - RNA, 19 nt, Artificial Sequence
  Description of Artificial Sequence: Synthetic oligonucleotide
uaacuacgauuauagccug

SEQ ID NO: 279355 - RNA, 19 nt, Artificial Sequence
  Description of Artificial Sequence: Synthetic oligonucleotide
aaagagagagagagagaag

SEQ ID NO: 279356 - RNA, 19 nt, Artificial Sequence
  Description of Artificial Sequence: Synthetic oligonucleotide
gaauuaagacuagccuggg

SEQ ID NO: 279357 - RNA, 19 nt, Artificial Sequence
  Description of Artificial Sequence: Synthetic oligonucleotide
aagaagcggaagaaaauaa

SEQ ID NO: 279358 - RNA, 19 nt, Artificial Sequence
  Description of Artificial Sequence: Synthetic oligonucleotide
uuuuggacuuaacuacgau

SEQ ID NO: 279359 - RNA, 19 nt, Artificial Sequence
  Description of Artificial Sequence: Synthetic oligonucleotide
agccgcauaauaauuucgg

SEQ ID NO: 279360 - RNA, 19 nt, Artificial Sequence
  Description of Artificial Sequence: Synthetic oligonucleotide
uguuagccgcauaauaauu

SEQ ID NO: 279361 - RNA, 19 nt, Artificial Sequence
  Description of Artificial Sequence: Synthetic oligonucleotide
aaguaaggaccugaauugu

SEQ ID NO: 279362 - RNA, 19 nt, Artificial Sequence
  Description of Artificial Sequence: Synthetic oligonucleotide
aaagaaagagagagagaga

SEQ ID NO: 279363 - RNA, 19 nt, Artificial Sequence
  Description of Artificial Sequence: Synthetic oligonucleotide
cacaauuacuuuaucaacu

SEQ ID NO: 279364 - RNA, 19 nt, Artificial Sequence
  Description of Artificial Sequence: Synthetic oligonucleotide
ugugaucacgugaagcguu

SEQ ID NO: 279365 - RNA, 19 nt, Artificial Sequence
  Description of Artificial Sequence: Synthetic oligonucleotide
ugcauuaguugguauucaa

SEQ ID NO: 279366 - RNA, 19 nt, Artificial Sequence
  Description of Artificial Sequence: Synthetic oligonucleotide
gcuagauggaacuuuacaa

SEQ ID NO: 279367 - RNA, 19 nt, Artificial Sequence
  Description of Artificial Sequence: Synthetic oligonucleotide
gaagcguaaauaacauuca

SEQ ID NO: 279368 - RNA, 19 nt, Artificial Sequence
  Description of Artificial Sequence: Synthetic oligonucleotide
uacaguuugccaugugauc

SEQ ID NO: 279369 - RNA, 19 nt, Artificial Sequence
  Description of Artificial Sequence: Synthetic oligonucleotide
auacgugaggauacacagc

SEQ ID NO: 279370 - RNA, 19 nt, Artificial Sequence
  Description of Artificial Sequence: Synthetic oligonucleotide
ugguacuagagacgggcgu

SEQ ID NO: 279371 - RNA, 19 nt, Artificial Sequence
  Description of Artificial Sequence: Synthetic oligonucleotide
caguagucguucucugugg

SEQ ID NO: 279372 - RNA, 19 nt, Artificial Sequence
  Description of Artificial Sequence: Synthetic oligonucleotide
agcguaaauaacauucaga

SEQ ID NO: 279373 - RNA, 19 nt, Artificial Sequence
  Description of Artificial Sequence: Synthetic oligonucleotide
uauagccuggcaugguggu

SEQ ID NO: 279374 - RNA, 19 nt, Artificial Sequence
  Description of Artificial Sequence: Synthetic oligonucleotide
uaugcgucccuaacaucca

SEQ ID NO: 279375 - RNA, 19 nt, Artificial Sequence
  Description of Artificial Sequence: Synthetic oligonucleotide
auaguaucacucaucuuga

SEQ ID NO: 279376 - RNA, 19 nt, Artificial Sequence
  Description of Artificial Sequence: Synthetic oligonucleotide
uacaguagucguucucugu

SEQ ID NO: 279377 - RNA, 19 nt, Artificial Sequence
  Description of Artificial Sequence: Synthetic oligonucleotide
agugcaacuuacauugaca

SEQ ID NO: 279378 - RNA, 19 nt, Artificial Sequence
  Description of Artificial Sequence: Synthetic oligonucleotide
aacuacgauuauagccugg

SEQ ID NO: 279379 - RNA, 19 nt, Artificial Sequence
  Description of Artificial Sequence: Synthetic oligonucleotide
ccgcauaauaauuucggag

SEQ ID NO: 279380 - RNA, 19 nt, Artificial Sequence
  Description of Artificial Sequence: Synthetic oligonucleotide
ucacaguugauugguuuga

SEQ ID NO: 279381 - RNA, 19 nt, Artificial Sequence
  Description of Artificial Sequence: Synthetic oligonucleotide
uacagaaccuuuggcaggu

SEQ ID NO: 279382 - RNA, 19 nt, Artificial Sequence
  Description of Artificial Sequence: Synthetic oligonucleotide
caguaaaacugcccacuag

SEQ ID NO: 279383 - RNA, 19 nt, Artificial Sequence
  Description of Artificial Sequence: Synthetic oligonucleotide
guaaggaccugaauuguuc

SEQ ID NO: 279384 - RNA, 19 nt, Artificial Sequence
  Description of Artificial Sequence: Synthetic oligonucleotide
aacgaguuacucugagcuu

SEQ ID NO: 279385 - RNA, 19 nt, Artificial Sequence
  Description of Artificial Sequence: Synthetic oligonucleotide
acuuacauugacagaguga

SEQ ID NO: 279386 - RNA, 19 nt, Artificial Sequence
  Description of Artificial Sequence: Synthetic oligonucleotide
cuagagacgggcguuggug

SEQ ID NO: 279387 - RNA, 19 nt, Artificial Sequence
  Description of Artificial Sequence: Synthetic oligonucleotide
uugacauaugaaguuguuu

SEQ ID NO: 279388 - RNA, 19 nt, Artificial Sequence
  Description of Artificial Sequence: Synthetic oligonucleotide
gacuagaaccugaauucac

SEQ ID NO: 279389 - RNA, 19 nt, Artificial Sequence
  Description of Artificial Sequence: Synthetic oligonucleotide
gagugacgcacauggcaag

SEQ ID NO: 279390 - RNA, 19 nt, Artificial Sequence
  Description of Artificial Sequence: Synthetic oligonucleotide
agacgaagucucuuggcau

SEQ ID NO: 279391 - RNA, 19 nt, Artificial Sequence
  Description of Artificial Sequence: Synthetic oligonucleotide
agugacgcacauggcaagg

SEQ ID NO: 279392 - RNA, 19 nt, Artificial Sequence
  Description of Artificial Sequence: Synthetic oligonucleotide
auuuacaguuugccaugug

SEQ ID NO: 279393 - RNA, 19 nt, Artificial Sequence
  Description of Artificial Sequence: Synthetic oligonucleotide
ugggcuagauggaacuuua

SEQ ID NO: 279394 - RNA, 19 nt, Artificial Sequence
  Description of Artificial Sequence: Synthetic oligonucleotide
agcggaauccgagaacgag

SEQ ID NO: 279395 - RNA, 19 nt, Artificial Sequence
  Description of Artificial Sequence: Synthetic oligonucleotide
ccgagaacgaguuacucug

SEQ ID NO: 279396 - RNA, 19 nt, Artificial Sequence
  Description of Artificial Sequence: Synthetic oligonucleotide
gagagagagagagaagaaa

SEQ ID NO: 279397 - RNA, 19 nt, Artificial Sequence
  Description of Artificial Sequence: Synthetic oligonucleotide
uggacuuaacuacgauuau

SEQ ID NO: 279398 - RNA, 19 nt, Artificial Sequence
  Description of Artificial Sequence: Synthetic oligonucleotide
ucacgugaagcguuccaaa

SEQ ID NO: 279399 - RNA, 19 nt, Artificial Sequence
  Description of Artificial Sequence: Synthetic oligonucleotide
aauccgagaacgaguuacu

SEQ ID NO: 279400 - RNA, 19 nt, Artificial Sequence
  Description of Artificial Sequence: Synthetic oligonucleotide
acauacgugaggauacaca

SEQ ID NO: 279401 - RNA, 19 nt, Artificial Sequence
  Description of Artificial Sequence: Synthetic oligonucleotide
gucucguggaauccucugc

SEQ ID NO: 279402 - RNA, 19 nt, Artificial Sequence
  Description of Artificial Sequence: Synthetic oligonucleotide
acaguaaaacugcccacua

SEQ ID NO: 279403 - RNA, 19 nt, Artificial Sequence
  Description of Artificial Sequence: Synthetic oligonucleotide
acaguugauugguuugaau

SEQ ID NO: 279404 - RNA, 19 nt, Artificial Sequence
  Description of Artificial Sequence: Synthetic oligonucleotide
uuacauugacagagugauc

SEQ ID NO: 279405 - RNA, 19 nt, Artificial Sequence
  Description of Artificial Sequence: Synthetic oligonucleotide
uucaagccccgagagacaa

SEQ ID NO: 279406 - RNA, 19 nt, Artificial Sequence
  Description of Artificial Sequence: Synthetic oligonucleotide
cagagacugacccgaugcc

SEQ ID NO: 279407 - RNA, 19 nt, Artificial Sequence
  Description of Artificial Sequence: Synthetic oligonucleotide
uaguaucacucaucuugac

SEQ ID NO: 279408 - RNA, 19 nt, Artificial Sequence
  Description of Artificial Sequence: Synthetic oligonucleotide
cuuaugcgucccuaacauc

SEQ ID NO: 279409 - RNA, 19 nt, Artificial Sequence
  Description of Artificial Sequence: Synthetic oligonucleotide
gcgcccacguuacacaugg

SEQ ID NO: 279410 - RNA, 19 nt, Artificial Sequence
  Description of Artificial Sequence: Synthetic oligonucleotide
gaucacgugaagcguucca

SEQ ID NO: 279411 - RNA, 19 nt, Artificial Sequence
  Description of Artificial Sequence: Synthetic oligonucleotide
auccgagaacgaguuacuc

SEQ ID NO: 279412 - RNA, 19 nt, Artificial Sequence
  Description of Artificial Sequence: Synthetic oligonucleotide
ccgagagacaaguggagag

SEQ ID NO: 279413 - RNA, 19 nt, Artificial Sequence
  Description of Artificial Sequence: Synthetic oligonucleotide
gcacuuguuagcugcauuc

SEQ ID NO: 279414 - RNA, 19 nt, Artificial Sequence
  Description of Artificial Sequence: Synthetic oligonucleotide
ucggcagcggaauccgaga

SEQ ID NO: 279415 - RNA, 19 nt, Artificial Sequence
  Description of Artificial Sequence: Synthetic oligonucleotide
ggcuacauaguagauagaa

SEQ ID NO: 279416 - RNA, 19 nt, Artificial Sequence
  Description of Artificial Sequence: Synthetic oligonucleotide
cacuuaugcgucccuaaca

SEQ ID NO: 279417 - RNA, 19 nt, Artificial Sequence
  Description of Artificial Sequence: Synthetic oligonucleotide
auaagcaguagaagcguaa

SEQ ID NO: 279418 - RNA, 19 nt, Artificial Sequence
  Description of Artificial Sequence: Synthetic oligonucleotide
aaguaugggcuuugcccua

SEQ ID NO: 279419 - RNA, 19 nt, Artificial Sequence
  Description of Artificial Sequence: Synthetic oligonucleotide
cccacguuacacauggaac

SEQ ID NO: 279420 - RNA, 19 nt, Artificial Sequence
  Description of Artificial Sequence: Synthetic oligonucleotide
agaaagagagagagagaga

SEQ ID NO: 279421 - RNA, 19 nt, Artificial Sequence
  Description of Artificial Sequence: Synthetic oligonucleotide
augugaucacgugaagcgu

SEQ ID NO: 279422 - RNA, 19 nt, Artificial Sequence
  Description of Artificial Sequence: Synthetic oligonucleotide
ugaucacgugaagcguucc

SEQ ID NO: 279423 - RNA, 19 nt, Artificial Sequence
  Description of Artificial Sequence: Synthetic oligonucleotide
auagugugccugggcuugc

SEQ ID NO: 279424 - RNA, 19 nt, Artificial Sequence
  Description of Artificial Sequence: Synthetic oligonucleotide
cccuaacauccauuaaggg

SEQ ID NO: 279425 - RNA, 19 nt, Artificial Sequence
  Description of Artificial Sequence: Synthetic oligonucleotide
cgaggcuugaaacacauca

SEQ ID NO: 279426 - RNA, 19 nt, Artificial Sequence
  Description of Artificial Sequence: Synthetic oligonucleotide
gcucagaccuucaagcccc

SEQ ID NO: 279427 - RNA, 19 nt, Artificial Sequence
  Description of Artificial Sequence: Synthetic oligonucleotide
ggcuuacacagcuccuccg

SEQ ID NO: 279428 - RNA, 19 nt, Artificial Sequence
  Description of Artificial Sequence: Synthetic oligonucleotide
gagguuuguucccaaguau

SEQ ID NO: 279429 - RNA, 19 nt, Artificial Sequence
  Description of Artificial Sequence: Synthetic oligonucleotide
agauaguaucacucaucuu

SEQ ID NO: 279430 - RNA, 19 nt, Artificial Sequence
  Description of Artificial Sequence: Synthetic oligonucleotide
aucacgugaagcguuccaa

SEQ ID NO: 279431 - RNA, 19 nt, Artificial Sequence
  Description of Artificial Sequence: Synthetic oligonucleotide
agagagagagagagaagaa

SEQ ID NO: 279432 - RNA, 19 nt, Artificial Sequence
  Description of Artificial Sequence: Synthetic oligonucleotide
ugccucggcagcggaaucc

SEQ ID NO: 279433 - RNA, 19 nt, Artificial Sequence
  Description of Artificial Sequence: Synthetic oligonucleotide
gccaagaugagccgucaac

SEQ ID NO: 279434 - RNA, 19 nt, Artificial Sequence
  Description of Artificial Sequence: Synthetic oligonucleotide
guagaagcguaaauaacau

SEQ ID NO: 279435 - RNA, 19 nt, Artificial Sequence
  Description of Artificial Sequence: Synthetic oligonucleotide
guacuagagacgggcguug

SEQ ID NO: 279436 - RNA, 19 nt, Artificial Sequence
  Description of Artificial Sequence: Synthetic oligonucleotide
ggcaaggucucguggaauc

SEQ ID NO: 279437 - RNA, 19 nt, Artificial Sequence
  Description of Artificial Sequence: Synthetic oligonucleotide
gcauuaguugguauucaac

SEQ ID NO: 279438 - RNA, 19 nt, Artificial Sequence
  Description of Artificial Sequence: Synthetic oligonucleotide
aguaaggaccugaauuguu

SEQ ID NO: 279439 - RNA, 19 nt, Artificial Sequence
  Description of Artificial Sequence: Synthetic oligonucleotide
cugggagacuagaaccuga

SEQ ID NO: 279440 - RNA, 19 nt, Artificial Sequence
  Description of Artificial Sequence: Synthetic oligonucleotide
gacgggcacuuguuagcug

SEQ ID NO: 279441 - RNA, 19 nt, Artificial Sequence
  Description of Artificial Sequence: Synthetic oligonucleotide
uuuccggguccgccuuugc

SEQ ID NO: 279442 - RNA, 19 nt, Artificial Sequence
  Description of Artificial Sequence: Synthetic oligonucleotide
caucuuaaauucacucccu

SEQ ID NO: 279443 - RNA, 19 nt, Artificial Sequence
  Description of Artificial Sequence: Synthetic oligonucleotide
cacacuuaugcgucccuaa

SEQ ID NO: 279444 - RNA, 19 nt, Artificial Sequence
  Description of Artificial Sequence: Synthetic oligonucleotide
cuacgauuauagccuggca

SEQ ID NO: 279445 - RNA, 19 nt, Artificial Sequence
  Description of Artificial Sequence: Synthetic oligonucleotide
cuguuagccgcauaauaau

SEQ ID NO: 279446 - RNA, 19 nt, Artificial Sequence
  Description of Artificial Sequence: Synthetic oligonucleotide
ccugauagugugccugggc

SEQ ID NO: 279447 - RNA, 19 nt, Artificial Sequence
  Description of Artificial Sequence: Synthetic oligonucleotide
ccgagagcgggcauugaag

SEQ ID NO: 279448 - RNA, 19 nt, Artificial Sequence
  Description of Artificial Sequence: Synthetic oligonucleotide
guuagccgcauaauaauuu

SEQ ID NO: 279449 - RNA, 19 nt, Artificial Sequence
  Description of Artificial Sequence: Synthetic oligonucleotide
gaagcguuccaaacucucu

SEQ ID NO: 279450 - RNA, 19 nt, Artificial Sequence
  Description of Artificial Sequence: Synthetic oligonucleotide
gaauuguucuggacugugu

SEQ ID NO: 279451 - RNA, 19 nt, Artificial Sequence
  Description of Artificial Sequence: Synthetic oligonucleotide
ucccaaguaugggcuuugc

SEQ ID NO: 279452 - RNA, 19 nt, Artificial Sequence
  Description of Artificial Sequence: Synthetic oligonucleotide
cgcauaauaauuucggagu

SEQ ID NO: 279453 - RNA, 19 nt, Artificial Sequence
  Description of Artificial Sequence: Synthetic oligonucleotide
gccgcauaauaauuucgga

SEQ ID NO: 279454 - RNA, 19 nt, Artificial Sequence
  Description of Artificial Sequence: Synthetic oligonucleotide
cgauuauagccuggcaugg

SEQ ID NO: 279455 - RNA, 19 nt, Artificial Sequence
  Description of Artificial Sequence: Synthetic oligonucleotide
gugaucacgugaagcguuc

SEQ ID NO: 279456 - RNA, 19 nt, Artificial Sequence
  Description of Artificial Sequence: Synthetic oligonucleotide
cuccuguaccgcugcucag

SEQ ID NO: 279457 - RNA, 19 nt, Artificial Sequence
  Description of Artificial Sequence: Synthetic oligonucleotide
guacauacgugaggauaca

SEQ ID NO: 279458 - RNA, 19 nt, Artificial Sequence
  Description of Artificial Sequence: Synthetic oligonucleotide
ggagugacgcacauggcaa

SEQ ID NO: 279459 - RNA, 19 nt, Artificial Sequence
  Description of Artificial Sequence: Synthetic oligonucleotide
cguuccaaacucucucagc

SEQ ID NO: 279460 - RNA, 19 nt, Artificial Sequence
  Description of Artificial Sequence: Synthetic oligonucleotide
caacuuacauugacagagu

SEQ ID NO: 279461 - RNA, 19 nt, Artificial Sequence
  Description of Artificial Sequence: Synthetic oligonucleotide
cuuccggaucaagagcaca

SEQ ID NO: 279462 - RNA, 19 nt, Artificial Sequence
  Description of Artificial Sequence: Synthetic oligonucleotide
augcgucccuaacauccau

SEQ ID NO: 279463 - RNA, 19 nt, Artificial Sequence
  Description of Artificial Sequence: Synthetic oligonucleotide
cugcauuaguugguauuca

SEQ ID NO: 279464 - RNA, 19 nt, Artificial Sequence
  Description of Artificial Sequence: Synthetic oligonucleotide
ggacuuaacuacgauuaua

SEQ ID NO: 279465 - RNA, 19 nt, Artificial Sequence
  Description of Artificial Sequence: Synthetic oligonucleotide
cuuuccggguccgccuuug

SEQ ID NO: 279466 - RNA, 19 nt, Artificial Sequence
  Description of Artificial Sequence: Synthetic oligonucleotide
gcauaauaauuucggaguu

SEQ ID NO: 279467 - RNA, 19 nt, Artificial Sequence
  Description of Artificial Sequence: Synthetic oligonucleotide
cucggcuacauaguagaua

SEQ ID NO: 279468 - RNA, 19 nt, Artificial Sequence
  Description of Artificial Sequence: Synthetic oligonucleotide
gcaaggucucguggaaucc

SEQ ID NO: 279469 - RNA, 19 nt, Artificial Sequence
  Description of Artificial Sequence: Synthetic oligonucleotide
gcccacguuacacauggaa

SEQ ID NO: 279470 - RNA, 19 nt, Artificial Sequence
  Description of Artificial Sequence: Synthetic oligonucleotide
uggcaaggucucguggaau

SEQ ID NO: 279471 - RNA, 19 nt, Artificial Sequence
  Description of Artificial Sequence: Synthetic oligonucleotide
acgaggcuugaaacacauc

SEQ ID NO: 279472 - RNA, 19 nt, Artificial Sequence
  Description of Artificial Sequence: Synthetic oligonucleotide
cacuguacauagcccaggu

SEQ ID NO: 279473 - RNA, 19 nt, Artificial Sequence
  Description of Artificial Sequence: Synthetic oligonucleotide
cacgaggcuugaaacacau

SEQ ID NO: 279474 - RNA, 19 nt, Artificial Sequence
  Description of Artificial Sequence: Synthetic oligonucleotide
cugccgagagcgggcauug

SEQ ID NO: 279475 - RNA, 19 nt, Artificial Sequence
  Description of Artificial Sequence: Synthetic oligonucleotide
cugcauuaagauguacccu

SEQ ID NO: 279476 - RNA, 19 nt, Artificial Sequence
  Description of Artificial Sequence: Synthetic oligonucleotide
gcgucccuaacauccauua

SEQ ID NO: 279477 - RNA, 19 nt, Artificial Sequence
  Description of Artificial Sequence: Synthetic oligonucleotide
cgugaggauacacagccaa

SEQ ID NO: 279478 - RNA, 19 nt, Artificial Sequence
  Description of Artificial Sequence: Synthetic oligonucleotide
ccgucaacauaagcaguag

SEQ ID NO: 279479 - RNA, 19 nt, Artificial Sequence
  Description of Artificial Sequence: Synthetic oligonucleotide
cacaguugauugguuugaa

SEQ ID NO: 279480 - RNA, 19 nt, Artificial Sequence
  Description of Artificial Sequence: Synthetic oligonucleotide
cagcggaauccgagaacga

SEQ ID NO: 279481 - RNA, 19 nt, Artificial Sequence
  Description of Artificial Sequence: Synthetic oligonucleotide
auagccuggcaugguggua

SEQ ID NO: 279482 - RNA, 19 nt, Artificial Sequence
  Description of Artificial Sequence: Synthetic oligonucleotide
caccgcaggggagcugaag

SEQ ID NO: 279483 - RNA, 19 nt, Artificial Sequence
  Description of Artificial Sequence: Synthetic oligonucleotide
gcuacauaguagauagaau

SEQ ID NO: 279484 - RNA, 19 nt, Artificial Sequence
  Description of Artificial Sequence: Synthetic oligonucleotide
caaggucucguggaauccu

SEQ ID NO: 279485 - RNA, 19 nt, Artificial Sequence
  Description of Artificial Sequence: Synthetic oligonucleotide
gugaagcguuccaaacucu

SEQ ID NO: 279486 - RNA, 19 nt, Artificial Sequence
  Description of Artificial Sequence: Synthetic oligonucleotide
gccgagagcgggcauugaa

SEQ ID NO: 279487 - RNA, 19 nt, Artificial Sequence
  Description of Artificial Sequence: Synthetic oligonucleotide
gguacuagagacgggcguu

SEQ ID NO: 279488 - RNA, 19 nt, Artificial Sequence
  Description of Artificial Sequence: Synthetic oligonucleotide
ggaauccgagaacgaguua

SEQ ID NO: 279489 - RNA, 19 nt, Artificial Sequence
  Description of Artificial Sequence: Synthetic oligonucleotide
ugccgagagcgggcauuga

SEQ ID NO: 279490 - RNA, 19 nt, Artificial Sequence
  Description of Artificial Sequence: Synthetic oligonucleotide
cccugauagugugccuggg

SEQ ID NO: 279491 - RNA, 19 nt, Artificial Sequence
  Description of Artificial Sequence: Synthetic oligonucleotide
gcggaauccgagaacgagu

SEQ ID NO: 279492 - RNA, 19 nt, Artificial Sequence
  Description of Artificial Sequence: Synthetic oligonucleotide
gcaugguucuuccccuggu

SEQ ID NO: 279493 - RNA, 19 nt, Artificial Sequence
  Description of Artificial Sequence: Synthetic oligonucleotide
cgaguuacucugagcuuca

SEQ ID NO: 279494 - RNA, 19 nt, Artificial Sequence
  Description of Artificial Sequence: Synthetic oligonucleotide
ggacgggcacuuguuagcu

SEQ ID NO: 279495 - RNA, 19 nt, Artificial Sequence
  Description of Artificial Sequence: Synthetic oligonucleotide
cacuaggagugacgcacau

SEQ ID NO: 279496 - RNA, 19 nt, Artificial Sequence
  Description of Artificial Sequence: Synthetic oligonucleotide
caacagagacugacccgau

SEQ ID NO: 279497 - RNA, 19 nt, Artificial Sequence
  Description of Artificial Sequence: Synthetic oligonucleotide
cgagaacgaguuacucuga

SEQ ID NO: 279498 - RNA, 19 nt, Artificial Sequence
  Description of Artificial Sequence: Synthetic oligonucleotide
gcccacuaggagugacgca

SEQ ID NO: 279499 - RNA, 19 nt, Artificial Sequence
  Description of Artificial Sequence: Synthetic oligonucleotide
gucuggacgggcacuuguu

SEQ ID NO: 279500 - RNA, 19 nt, Artificial Sequence
  Description of Artificial Sequence: Synthetic oligonucleotide
ccggaucaagagcacacau

SEQ ID NO: 279501 - RNA, 19 nt, Artificial Sequence
  Description of Artificial Sequence: Synthetic oligonucleotide
ccggguccgccuuugcccu

SEQ ID NO: 279502 - RNA, 19 nt, Artificial Sequence
  Description of Artificial Sequence: Synthetic oligonucleotide
cggcagcggaauccgagaa

SEQ ID NO: 279503 - RNA, 19 nt, Artificial Sequence
  Description of Artificial Sequence: Synthetic oligonucleotide
cggcuacauaguagauaga

SEQ ID NO: 279504 - RNA, 19 nt, Artificial Sequence
  Description of Artificial Sequence: Synthetic oligonucleotide
ccucggcuacauaguagau

SEQ ID NO: 279505 - RNA, 19 nt, Artificial Sequence
  Description of Artificial Sequence: Synthetic oligonucleotide
ccaccgcaggggagcugaa

SEQ ID NO: 279506 - RNA, 19 nt, Artificial Sequence
  Description of Artificial Sequence: Synthetic oligonucleotide
cgcccacguuacacaugga

SEQ ID NO: 279507 - RNA, 19 nt, Artificial Sequence
  Description of Artificial Sequence: Synthetic oligonucleotide
gauagcaucugucaggccg

SEQ ID NO: 279508 - RNA, 19 nt, Artificial Sequence
  Description of Artificial Sequence: Synthetic oligonucleotide
uuacuaaagaagcaccacg

SEQ ID NO: 279509 - RNA, 19 nt, Artificial Sequence
  Description of Artificial Sequence: Synthetic oligonucleotide
uuugucuguaacuagaaac

SEQ ID NO: 279510 - RNA, 19 nt, Artificial Sequence
  Description of Artificial Sequence: Synthetic oligonucleotide
uccaauaucauauugucaa

SEQ ID NO: 279511 - RNA, 19 nt, Artificial Sequence
  Description of Artificial Sequence: Synthetic oligonucleotide
acacccaucaccuguaagc

SEQ ID NO: 279512 - RNA, 19 nt, Artificial Sequence
  Description of Artificial Sequence: Synthetic oligonucleotide
cauauugucaagacgagac

SEQ ID NO: 279513 - RNA, 19 nt, Artificial Sequence
  Description of Artificial Sequence: Synthetic oligonucleotide
uuaguaaucaagucaucag

SEQ ID NO: 279514 - RNA, 19 nt, Artificial Sequence
  Description of Artificial Sequence: Synthetic oligonucleotide
uagaaucucucccugaccc

SEQ ID NO: 279515 - RNA, 19 nt, Artificial Sequence
  Description of Artificial Sequence: Synthetic oligonucleotide
ugaauuauaaguguaucac

SEQ ID NO: 279516 - RNA, 19 nt, Artificial Sequence
  Description of Artificial Sequence: Synthetic oligonucleotide
uauccguuggauaagggca

SEQ ID NO: 279517 - RNA, 19 nt, Artificial Sequence
  Description of Artificial Sequence: Synthetic oligonucleotide
ugaacuuuggguaccaccu

SEQ ID NO: 279518 - RNA, 19 nt, Artificial Sequence
  Description of Artificial Sequence: Synthetic oligonucleotide
uacuaaagaagcaccacgc

SEQ ID NO: 279519 - RNA, 19 nt, Artificial Sequence
  Description of Artificial Sequence: Synthetic oligonucleotide
uggauaagggcaauuaaga

SEQ ID NO: 279520 - RNA, 19 nt, Artificial Sequence
  Description of Artificial Sequence: Synthetic oligonucleotide
uuaaauagacgcacuguug

SEQ ID NO: 279521 - RNA, 19 nt, Artificial Sequence
  Description of Artificial Sequence: Synthetic oligonucleotide
aaauggugguaucggcucc

SEQ ID NO: 279522 - RNA, 19 nt, Artificial Sequence
  Description of Artificial Sequence: Synthetic oligonucleotide
aacagcgucgcuucuuacg

SEQ ID NO: 279523 - RNA, 19 nt, Artificial Sequence
  Description of Artificial Sequence: Synthetic oligonucleotide
guauguauuagcagggugg

SEQ ID NO: 279524 - RNA, 19 nt, Artificial Sequence
  Description of Artificial Sequence: Synthetic oligonucleotide
ucgaaggucuaguugagag

SEQ ID NO: 279525 - RNA, 19 nt, Artificial Sequence
  Description of Artificial Sequence: Synthetic oligonucleotide
augaaauacaaguagucaa

SEQ ID NO: 279526 - RNA, 19 nt, Artificial Sequence
  Description of Artificial Sequence: Synthetic oligonucleotide
ucuagcgucucauaccucc

SEQ ID NO: 279527 - RNA, 19 nt, Artificial Sequence
  Description of Artificial Sequence: Synthetic oligonucleotide
aauuaaauagacgcacugu

SEQ ID NO: 279528 - RNA, 19 nt, Artificial Sequence
  Description of Artificial Sequence: Synthetic oligonucleotide
uguuaugaggccaaggcuu

SEQ ID NO: 279529 - RNA, 19 nt, Artificial Sequence
  Description of Artificial Sequence: Synthetic oligonucleotide
cuaguaucagacauugcag

SEQ ID NO: 279530 - RNA, 19 nt, Artificial Sequence
  Description of Artificial Sequence: Synthetic oligonucleotide
ucgauaguguccucuaucc

SEQ ID NO: 279531 - RNA, 19 nt, Artificial Sequence
  Description of Artificial Sequence: Synthetic oligonucleotide
guaggcuuuacaaauaaug

SEQ ID NO: 279532 - RNA, 19 nt, Artificial Sequence
  Description of Artificial Sequence: Synthetic oligonucleotide
auuaaauagacgcacuguu

SEQ ID NO: 279533 - RNA, 19 nt, Artificial Sequence
  Description of Artificial Sequence: Synthetic oligonucleotide
aacuuuagacaucucuaga

SEQ ID NO: 279534 - RNA, 19 nt, Artificial Sequence
  Description of Artificial Sequence: Synthetic oligonucleotide
gaauuauaaguguaucaca

SEQ ID NO: 279535 - RNA, 19 nt, Artificial Sequence
  Description of Artificial Sequence: Synthetic oligonucleotide
agugaauuauaaguguauc

SEQ ID NO: 279536 - RNA, 19 nt, Artificial Sequence
  Description of Artificial Sequence: Synthetic oligonucleotide
auuugucccacccgcauuc

SEQ ID NO: 279537 - RNA, 19 nt, Artificial Sequence
  Description of Artificial Sequence: Synthetic oligonucleotide
gguaaauugauuggaauag

SEQ ID NO: 279538 - RNA, 19 nt, Artificial Sequence
  Description of Artificial Sequence: Synthetic oligonucleotide
gaaauacaaguagucaacc

SEQ ID NO: 279539 - RNA, 19 nt, Artificial Sequence
  Description of Artificial Sequence: Synthetic oligonucleotide
acaauucaggcaguggggc

SEQ ID NO: 279540 - RNA, 19 nt, Artificial Sequence
  Description of Artificial Sequence: Synthetic oligonucleotide
cauaaugcaaauacucauc

SEQ ID NO: 279541 - RNA, 19 nt, Artificial Sequence
  Description of Artificial Sequence: Synthetic oligonucleotide
acuuuagacaucucuagaa

SEQ ID NO: 279542 - RNA, 19 nt, Artificial Sequence
  Description of Artificial Sequence: Synthetic oligonucleotide
aguauguauuagcagggug

SEQ ID NO: 279543 - RNA, 19 nt, Artificial Sequence
  Description of Artificial Sequence: Synthetic oligonucleotide
agagcguucaugcucacga

SEQ ID NO: 279544 - RNA, 19 nt, Artificial Sequence
  Description of Artificial Sequence: Synthetic oligonucleotide
ugguaaauugauuggaaua

SEQ ID NO: 279545 - RNA, 19 nt, Artificial Sequence
  Description of Artificial Sequence: Synthetic oligonucleotide
uauugucaagacgagacac

SEQ ID NO: 279546 - RNA, 19 nt, Artificial Sequence
  Description of Artificial Sequence: Synthetic oligonucleotide
ucuaguugagagcuugggu

SEQ ID NO: 279547 - RNA, 19 nt, Artificial Sequence
  Description of Artificial Sequence: Synthetic oligonucleotide
uuguuaugaggccaaggcu

SEQ ID NO: 279548 - RNA, 19 nt, Artificial Sequence
  Description of Artificial Sequence: Synthetic oligonucleotide
agaguaugcuccugaaaag

SEQ ID NO: 279549 - RNA, 19 nt, Artificial Sequence
  Description of Artificial Sequence: Synthetic oligonucleotide
auuauaaguguaucacagu

SEQ ID NO: 279550 - RNA, 19 nt, Artificial Sequence
  Description of Artificial Sequence: Synthetic oligonucleotide
cuuggaggaacauuacaug

SEQ ID NO: 279551 - RNA, 19 nt, Artificial Sequence
  Description of Artificial Sequence: Synthetic oligonucleotide
aaauagacgcacuguuggu

SEQ ID NO: 279552 - RNA, 19 nt, Artificial Sequence
  Description of Artificial Sequence: Synthetic oligonucleotide
guauccguuggauaagggc

SEQ ID NO: 279553 - RNA, 19 nt, Artificial Sequence
  Description of Artificial Sequence: Synthetic oligonucleotide
gaccagugaauuauaagug

SEQ ID NO: 279554 - RNA, 19 nt, Artificial Sequence
  Description of Artificial Sequence: Synthetic oligonucleotide
aguggggucguuccuuccc

SEQ ID NO: 279555 - RNA, 19 nt, Artificial Sequence
  Description of Artificial Sequence: Synthetic oligonucleotide
uuaguccaugguaaagucu

SEQ ID NO: 279556 - RNA, 19 nt, Artificial Sequence
  Description of Artificial Sequence: Synthetic oligonucleotide
uugucaagacgagacacag

SEQ ID NO: 279557 - RNA, 19 nt, Artificial Sequence
  Description of Artificial Sequence: Synthetic oligonucleotide
uguaucugcucgcggagug

SEQ ID NO: 279558 - RNA, 19 nt, Artificial Sequence
  Description of Artificial Sequence: Synthetic oligonucleotide
cacaauucaggcagugggg

SEQ ID NO: 279559 - RNA, 19 nt, Artificial Sequence
  Description of Artificial Sequence: Synthetic oligonucleotide
agcaccacgcaguuuggac

SEQ ID NO: 279560 - RNA, 19 nt, Artificial Sequence
  Description of Artificial Sequence: Synthetic oligonucleotide
cugguuaguaaucaaguca

SEQ ID NO: 279561 - RNA, 19 nt, Artificial Sequence
  Description of Artificial Sequence: Synthetic oligonucleotide
uguucaugaaagcgcucag

SEQ ID NO: 279562 - RNA, 19 nt, Artificial Sequence
  Description of Artificial Sequence: Synthetic oligonucleotide
cuugccacgcucucgacug

SEQ ID NO: 279563 - RNA, 19 nt, Artificial Sequence
  Description of Artificial Sequence: Synthetic oligonucleotide
cucucuccggcuucgauag

SEQ ID NO: 279564 - RNA, 19 nt, Artificial Sequence
  Description of Artificial Sequence: Synthetic oligonucleotide
aguuaguccaugguaaagu

SEQ ID NO: 279565 - RNA, 19 nt, Artificial Sequence
  Description of Artificial Sequence: Synthetic oligonucleotide
gcggcuaucauuuucuagc

SEQ ID NO: 279566 - RNA, 19 nt, Artificial Sequence
  Description of Artificial Sequence: Synthetic oligonucleotide
uccaaauggugguaucggc

SEQ ID NO: 279567 - RNA, 19 nt, Artificial Sequence
  Description of Artificial Sequence: Synthetic oligonucleotide
aagaucaacuuuagacauc

SEQ ID NO: 279568 - RNA, 19 nt, Artificial Sequence
  Description of Artificial Sequence: Synthetic oligonucleotide
ucgacuguaacagcgucgc

SEQ ID NO: 279569 - RNA, 19 nt, Artificial Sequence
  Description of Artificial Sequence: Synthetic oligonucleotide
ucacgaguaccugucgugg

SEQ ID NO: 279570 - RNA, 19 nt, Artificial Sequence
  Description of Artificial Sequence: Synthetic oligonucleotide
uucgguaaaugcaucucaa

SEQ ID NO: 279571 - RNA, 19 nt, Artificial Sequence
  Description of Artificial Sequence: Synthetic oligonucleotide
caaauggugguaucggcuc

SEQ ID NO: 279572 - RNA, 19 nt, Artificial Sequence
  Description of Artificial Sequence: Synthetic oligonucleotide
uaauuuaaucuggguuugg

SEQ ID NO: 279573 - RNA, 19 nt, Artificial Sequence
  Description of Artificial Sequence: Synthetic oligonucleotide
ugcaaauacucaucauaac

SEQ ID NO: 279574 - RNA, 19 nt, Artificial Sequence
  Description of Artificial Sequence: Synthetic oligonucleotide
gaaauggccgacagccucg

SEQ ID NO: 279575 - RNA, 19 nt, Artificial Sequence
  Description of Artificial Sequence: Synthetic oligonucleotide
acagccucguaguucgagg

SEQ ID NO: 279576 - RNA, 19 nt, Artificial Sequence
  Description of Artificial Sequence: Synthetic oligonucleotide
uaccgguggugucacaaag

SEQ ID NO: 279577 - RNA, 19 nt, Artificial Sequence
  Description of Artificial Sequence: Synthetic oligonucleotide
cagaguaugcuccugaaaa

SEQ ID NO: 279578 - RNA, 19 nt, Artificial Sequence
  Description of Artificial Sequence: Synthetic oligonucleotide
guaguuaagcagcaucuga

SEQ ID NO: 279579 - RNA, 19 nt, Artificial Sequence
  Description of Artificial Sequence: Synthetic oligonucleotide
cucgacuguaacagcgucg

SEQ ID NO: 279580 - RNA, 19 nt, Artificial Sequence
  Description of Artificial Sequence: Synthetic oligonucleotide
uccggcuucgauagugucc

SEQ ID NO: 279581 - RNA, 19 nt, Artificial Sequence
  Description of Artificial Sequence: Synthetic oligonucleotide
aagagcuagugguccuguc

SEQ ID NO: 279582 - RNA, 19 nt, Artificial Sequence
  Description of Artificial Sequence: Synthetic oligonucleotide
gcuaucauuuucuagcguc

SEQ ID NO: 279583 - RNA, 19 nt, Artificial Sequence
  Description of Artificial Sequence: Synthetic oligonucleotide
aguuuggacaaaguuauuu

SEQ ID NO: 279584 - RNA, 19 nt, Artificial Sequence
  Description of Artificial Sequence: Synthetic oligonucleotide
aggcuuuaaucacccuggc

SEQ ID NO: 279585 - RNA, 19 nt, Artificial Sequence
  Description of Artificial Sequence: Synthetic oligonucleotide
agagcuagugguccuguca

SEQ ID NO: 279586 - RNA, 19 nt, Artificial Sequence
  Description of Artificial Sequence: Synthetic oligonucleotide
uguccucuauccacuuucc

SEQ ID NO: 279587 - RNA, 19 nt, Artificial Sequence
  Description of Artificial Sequence: Synthetic oligonucleotide
aauagacgcacuguugguu

SEQ ID NO: 279588 - RNA, 19 nt, Artificial Sequence
  Description of Artificial Sequence: Synthetic oligonucleotide
ccuguaagcacugagggag

SEQ ID NO: 279589 - RNA, 19 nt, Artificial Sequence
  Description of Artificial Sequence: Synthetic oligonucleotide
gaaggucuaguugagagcu

SEQ ID NO: 279590 - RNA, 19 nt, Artificial Sequence
  Description of Artificial Sequence: Synthetic oligonucleotide
auuccuaacccgugaguga

SEQ ID NO: 279591 - RNA, 19 nt, Artificial Sequence
  Description of Artificial Sequence: Synthetic oligonucleotide
gcuuuuacggccccaguag

SEQ ID NO: 279592 - RNA, 19 nt, Artificial Sequence
  Description of Artificial Sequence: Synthetic oligonucleotide
agccucguaguucgagggc

SEQ ID NO: 279593 - RNA, 19 nt, Artificial Sequence
  Description of Artificial Sequence: Synthetic oligonucleotide
ggaccagugaauuauaagu

SEQ ID NO: 279594 - RNA, 19 nt, Artificial Sequence
  Description of Artificial Sequence: Synthetic oligonucleotide
ucgguaaaugcaucucaac

SEQ ID NO: 279595 - RNA, 19 nt, Artificial Sequence
  Description of Artificial Sequence: Synthetic oligonucleotide
cuucuuacgguggcggucc

SEQ ID NO: 279596 - RNA, 19 nt, Artificial Sequence
  Description of Artificial Sequence: Synthetic oligonucleotide
cuaagcggcuaucauuuuc

SEQ ID NO: 279597 - RNA, 19 nt, Artificial Sequence
  Description of Artificial Sequence: Synthetic oligonucleotide
ugcucacgaguaccugucg

SEQ ID NO: 279598 - RNA, 19 nt, Artificial Sequence
  Description of Artificial Sequence: Synthetic oligonucleotide
cuuacgguggcgguccucc

SEQ ID NO: 279599 - RNA, 19 nt, Artificial Sequence
  Description of Artificial Sequence: Synthetic oligonucleotide
gugguaucggcuccagucc

SEQ ID NO: 279600 - RNA, 19 nt, Artificial Sequence
  Description of Artificial Sequence: Synthetic oligonucleotide
acgcucucgacuguaacag

SEQ ID NO: 279601 - RNA, 19 nt, Artificial Sequence
  Description of Artificial Sequence: Synthetic oligonucleotide
agauagcaucugucaggcc

SEQ ID NO: 279602 - RNA, 19 nt, Artificial Sequence
  Description of Artificial Sequence: Synthetic oligonucleotide
cagauuauucagauacaca

SEQ ID NO: 279603 - RNA, 19 nt, Artificial Sequence
  Description of Artificial Sequence: Synthetic oligonucleotide
auaccuccguuuccucggc

SEQ ID NO: 279604 - RNA, 19 nt, Artificial Sequence
  Description of Artificial Sequence: Synthetic oligonucleotide
cuagcgucucauaccuccg

SEQ ID NO: 279605 - RNA, 19 nt, Artificial Sequence
  Description of Artificial Sequence: Synthetic oligonucleotide
gucuaguugagagcuuggg

SEQ ID NO: 279606 - RNA, 19 nt, Artificial Sequence
  Description of Artificial Sequence: Synthetic oligonucleotide
uucucuaagcggcuaucau

SEQ ID NO: 279607 - RNA, 19 nt, Artificial Sequence
  Description of Artificial Sequence: Synthetic oligonucleotide
ugucuuuguguggacgccc

SEQ ID NO: 279608 - RNA, 19 nt, Artificial Sequence
  Description of Artificial Sequence: Synthetic oligonucleotide
cucacgaguaccugucgug

SEQ ID NO: 279609 - RNA, 19 nt, Artificial Sequence
  Description of Artificial Sequence: Synthetic oligonucleotide
gcaguauguauuagcaggg

SEQ ID NO: 279610 - RNA, 19 nt, Artificial Sequence
  Description of Artificial Sequence: Synthetic oligonucleotide
uaucacaguuugauagcau

SEQ ID NO: 279611 - RNA, 19 nt, Artificial Sequence
  Description of Artificial Sequence: Synthetic oligonucleotide
ucccggaaagagcugcugu

SEQ ID NO: 279612 - RNA, 19 nt, Artificial Sequence
  Description of Artificial Sequence: Synthetic oligonucleotide
cuucgguaaaugcaucuca

SEQ ID NO: 279613 - RNA, 19 nt, Artificial Sequence
  Description of Artificial Sequence: Synthetic oligonucleotide
uaccugucgugguaauacc

SEQ ID NO: 279614 - RNA, 19 nt, Artificial Sequence
  Description of Artificial Sequence: Synthetic oligonucleotide
ucucgagggucagagcaag

SEQ ID NO: 279615 - RNA, 19 nt, Artificial Sequence
  Description of Artificial Sequence: Synthetic oligonucleotide
uagcuggaacaacaaugga

SEQ ID NO: 279616 - RNA, 19 nt, Artificial Sequence
  Description of Artificial Sequence: Synthetic oligonucleotide
ugguaucggcuccaguccu

SEQ ID NO: 279617 - RNA, 19 nt, Artificial Sequence
  Description of Artificial Sequence: Synthetic oligonucleotide
agcguucaugcucacgagu

SEQ ID NO: 279618 - RNA, 19 nt, Artificial Sequence
  Description of Artificial Sequence: Synthetic oligonucleotide
ccggaaauggccgacagcc

SEQ ID NO: 279619 - RNA, 19 nt, Artificial Sequence
  Description of Artificial Sequence: Synthetic oligonucleotide
ucccaagguaguaccggug

SEQ ID NO: 279620 - RNA, 19 nt, Artificial Sequence
  Description of Artificial Sequence: Synthetic oligonucleotide
gauuauucagauacacacu

SEQ ID NO: 279621 - RNA, 19 nt, Artificial Sequence
  Description of Artificial Sequence: Synthetic oligonucleotide
aacgcucucuccggcuucg

SEQ ID NO: 279622 - RNA, 19 nt, Artificial Sequence
  Description of Artificial Sequence: Synthetic oligonucleotide
cuccguucuccggaaaugg

SEQ ID NO: 279623 - RNA, 19 nt, Artificial Sequence
  Description of Artificial Sequence: Synthetic oligonucleotide
agcuuuuacggccccagua

SEQ ID NO: 279624 - RNA, 19 nt, Artificial Sequence
  Description of Artificial Sequence: Synthetic oligonucleotide
auugucaagacgagacaca

SEQ ID NO: 279625 - RNA, 19 nt, Artificial Sequence
  Description of Artificial Sequence: Synthetic oligonucleotide
cuguaguuaagcagcaucu

SEQ ID NO: 279626 - RNA, 19 nt, Artificial Sequence
  Description of Artificial Sequence: Synthetic oligonucleotide
guguucaugaaagcgcuca

SEQ ID NO: 279627 - RNA, 19 nt, Artificial Sequence
  Description of Artificial Sequence: Synthetic oligonucleotide
ugucuguaacuagaaacuu

SEQ ID NO: 279628 - RNA, 19 nt, Artificial Sequence
  Description of Artificial Sequence: Synthetic oligonucleotide
ucguaguucgagggcuucg

SEQ ID NO: 279629 - RNA, 19 nt, Artificial Sequence
  Description of Artificial Sequence: Synthetic oligonucleotide
uuccuaacccgugagugau

SEQ ID NO: 279630 - RNA, 19 nt, Artificial Sequence
  Description of Artificial Sequence: Synthetic oligonucleotide
cuguaagcacugagggagc

SEQ ID NO: 279631 - RNA, 19 nt, Artificial Sequence
  Description of Artificial Sequence: Synthetic oligonucleotide
gcucucgacuguaacagcg

SEQ ID NO: 279632 - RNA, 19 nt, Artificial Sequence
  Description of Artificial Sequence: Synthetic oligonucleotide
uaguucgagggcuucggua

SEQ ID NO: 279633 - RNA, 19 nt, Artificial Sequence
  Description of Artificial Sequence: Synthetic oligonucleotide
guaaucaagucaucagggu

SEQ ID NO: 279634 - RNA, 19 nt, Artificial Sequence
  Description of Artificial Sequence: Synthetic oligonucleotide
ucugcucgcggaguggcgc

SEQ ID NO: 279635 - RNA, 19 nt, Artificial Sequence
  Description of Artificial Sequence: Synthetic oligonucleotide
ggaggaacgcucucuccgg

SEQ ID NO: 279636 - RNA, 19 nt, Artificial Sequence
  Description of Artificial Sequence: Synthetic oligonucleotide
acugguaaauugauuggaa

SEQ ID NO: 279637 - RNA, 19 nt, Artificial Sequence
  Description of Artificial Sequence: Synthetic oligonucleotide
acgguggcgguccuccguc

SEQ ID NO: 279638 - RNA, 19 nt, Artificial Sequence
  Description of Artificial Sequence: Synthetic oligonucleotide
ucgugguaauaccugcauu

SEQ ID NO: 279639 - RNA, 19 nt, Artificial Sequence
  Description of Artificial Sequence: Synthetic oligonucleotide
caguguacaaaguauccgu

SEQ ID NO: 279640 - RNA, 19 nt, Artificial Sequence
  Description of Artificial Sequence: Synthetic oligonucleotide
augcucacgaguaccuguc

SEQ ID NO: 279641 - RNA, 19 nt, Artificial Sequence
  Description of Artificial Sequence: Synthetic oligonucleotide
gucaggccggcuuuccacc

SEQ ID NO: 279642 - RNA, 19 nt, Artificial Sequence
  Description of Artificial Sequence: Synthetic oligonucleotide
gaguaugcuccugaaaagu

SEQ ID NO: 279643 - RNA, 19 nt, Artificial Sequence
  Description of Artificial Sequence: Synthetic oligonucleotide
aguaccgguggugucacaa

SEQ ID NO: 279644 - RNA, 19 nt, Artificial Sequence
  Description of Artificial Sequence: Synthetic oligonucleotide
uagcgucucauaccuccgu

SEQ ID NO: 279645 - RNA, 19 nt, Artificial Sequence
  Description of Artificial Sequence: Synthetic oligonucleotide
aucucccaagguaguaccg

SEQ ID NO: 279646 - RNA, 19 nt, Artificial Sequence
  Description of Artificial Sequence: Synthetic oligonucleotide
gaaaggugcccuccguucu

SEQ ID NO: 279647 - RNA, 19 nt, Artificial Sequence
  Description of Artificial Sequence: Synthetic oligonucleotide
cucuaagcggcuaucauuu

SEQ ID NO: 279648 - RNA, 19 nt, Artificial Sequence
  Description of Artificial Sequence: Synthetic oligonucleotide
guccggguagaaucucucc

SEQ ID NO: 279649 - RNA, 19 nt, Artificial Sequence
  Description of Artificial Sequence: Synthetic oligonucleotide
uuacgguggcgguccuccg

SEQ ID NO: 279650 - RNA, 19 nt, Artificial Sequence
  Description of Artificial Sequence: Synthetic oligonucleotide
cguucuccggaaauggccg

SEQ ID NO: 279651 - RNA, 19 nt, Artificial Sequence
  Description of Artificial Sequence: Synthetic oligonucleotide
guaacagcgucgcuucuua

SEQ ID NO: 279652 - RNA, 19 nt, Artificial Sequence
  Description of Artificial Sequence: Synthetic oligonucleotide
ccguucuccggaaauggcc

SEQ ID NO: 279653 - RNA, 19 nt, Artificial Sequence
  Description of Artificial Sequence: Synthetic oligonucleotide
uagucaaccugagucugua

SEQ ID NO: 279654 - RNA, 19 nt, Artificial Sequence
  Description of Artificial Sequence: Synthetic oligonucleotide
aaauggccgacagccucgu

SEQ ID NO: 279655 - RNA, 19 nt, Artificial Sequence
  Description of Artificial Sequence: Synthetic oligonucleotide
guggggucguuccuucccc

SEQ ID NO: 279656 - RNA, 19 nt, Artificial Sequence
  Description of Artificial Sequence: Synthetic oligonucleotide
augaaagcgcucagggaga

SEQ ID NO: 279657 - RNA, 19 nt, Artificial Sequence
  Description of Artificial Sequence: Synthetic oligonucleotide
ucuuuguguggacgcccaa

SEQ ID NO: 279658 - RNA, 19 nt, Artificial Sequence
  Description of Artificial Sequence: Synthetic oligonucleotide
uuucacuacuuggguuggc

SEQ ID NO: 279659 - RNA, 19 nt, Artificial Sequence
  Description of Artificial Sequence: Synthetic oligonucleotide
uuuccucggcuugacacuu

SEQ ID NO: 279660 - RNA, 19 nt, Artificial Sequence
  Description of Artificial Sequence: Synthetic oligonucleotide
acccgcauucuuguccggg

SEQ ID NO: 279661 - RNA, 19 nt, Artificial Sequence
  Description of Artificial Sequence: Synthetic oligonucleotide
acgaguaccugucguggua

SEQ ID NO: 279662 - RNA, 19 nt, Artificial Sequence
  Description of Artificial Sequence: Synthetic oligonucleotide
accugucgugguaauaccu

SEQ ID NO: 279663 - RNA, 19 nt, Artificial Sequence
  Description of Artificial Sequence: Synthetic oligonucleotide
gguaguaccggugguguca

SEQ ID NO: 279664 - RNA, 19 nt, Artificial Sequence
  Description of Artificial Sequence: Synthetic oligonucleotide
gacuguaacagcgucgcuu

SEQ ID NO: 279665 - RNA, 19 nt, Artificial Sequence
  Description of Artificial Sequence: Synthetic oligonucleotide
ucuaagcggcuaucauuuu

SEQ ID NO: 279666 - RNA, 19 nt, Artificial Sequence
  Description of Artificial Sequence: Synthetic oligonucleotide
agcgucucauaccuccguu

SEQ ID NO: 279667 - RNA, 19 nt, Artificial Sequence
  Description of Artificial Sequence: Synthetic oligonucleotide
cucggcuugacacuuuggu

SEQ ID NO: 279668 - RNA, 19 nt, Artificial Sequence
  Description of Artificial Sequence: Synthetic oligonucleotide
gggcaauuaagaaaaggua

SEQ ID NO: 279669 - RNA, 19 nt, Artificial Sequence
  Description of Artificial Sequence: Synthetic oligonucleotide
uccgaugucuguggagguc

SEQ ID NO: 279670 - RNA, 19 nt, Artificial Sequence
  Description of Artificial Sequence: Synthetic oligonucleotide
caugcucacgaguaccugu

SEQ ID NO: 279671 - RNA, 19 nt, Artificial Sequence
  Description of Artificial Sequence: Synthetic oligonucleotide
gaacgcucucuccggcuuc

SEQ ID NO: 279672 - RNA, 19 nt, Artificial Sequence
  Description of Artificial Sequence: Synthetic oligonucleotide
accugagucuguaguuaag

SEQ ID NO: 279673 - RNA, 19 nt, Artificial Sequence
  Description of Artificial Sequence: Synthetic oligonucleotide
uuugucccacccgcauucu

SEQ ID NO: 279674 - RNA, 19 nt, Artificial Sequence
  Description of Artificial Sequence: Synthetic oligonucleotide
uuuccacccuuaagugcuu

SEQ ID NO: 279675 - RNA, 19 nt, Artificial Sequence
  Description of Artificial Sequence: Synthetic oligonucleotide
ccagugaauuauaagugua

SEQ ID NO: 279676 - RNA, 19 nt, Artificial Sequence
  Description of Artificial Sequence: Synthetic oligonucleotide
cuccggcuucgauaguguc

SEQ ID NO: 279677 - RNA, 19 nt, Artificial Sequence
  Description of Artificial Sequence: Synthetic oligonucleotide
gguggcgguccuccguccg

SEQ ID NO: 279678 - RNA, 19 nt, Artificial Sequence
  Description of Artificial Sequence: Synthetic oligonucleotide
ggcagagcguucaugcuca

SEQ ID NO: 279679 - RNA, 19 nt, Artificial Sequence
  Description of Artificial Sequence: Synthetic oligonucleotide
agcugacgacucagacucc

SEQ ID NO: 279680 - RNA, 19 nt, Artificial Sequence
  Description of Artificial Sequence: Synthetic oligonucleotide
ggaucaagcugacgacuca

SEQ ID NO: 279681 - RNA, 19 nt, Artificial Sequence
  Description of Artificial Sequence: Synthetic oligonucleotide
uauccacuuuccggaggcu

SEQ ID NO: 279682 - RNA, 19 nt, Artificial Sequence
  Description of Artificial Sequence: Synthetic oligonucleotide
uucuuacgguggcgguccu

SEQ ID NO: 279683 - RNA, 19 nt, Artificial Sequence
  Description of Artificial Sequence: Synthetic oligonucleotide
cccuucacaagagcuagug

SEQ ID NO: 279684 - RNA, 19 nt, Artificial Sequence
  Description of Artificial Sequence: Synthetic oligonucleotide
aguaccugucgugguaaua

SEQ ID NO: 279685 - RNA, 19 nt, Artificial Sequence
  Description of Artificial Sequence: Synthetic oligonucleotide
guuggccgugcaccagaug

SEQ ID NO: 279686 - RNA, 19 nt, Artificial Sequence
  Description of Artificial Sequence: Synthetic oligonucleotide
agcccucgaaggucuaguu

SEQ ID NO: 279687 - RNA, 19 nt, Artificial Sequence
  Description of Artificial Sequence: Synthetic oligonucleotide
auacucugacagauagcau

SEQ ID NO: 279688 - RNA, 19 nt, Artificial Sequence
  Description of Artificial Sequence: Synthetic oligonucleotide
ccucgaaggucuaguugag

SEQ ID NO: 279689 - RNA, 19 nt, Artificial Sequence
  Description of Artificial Sequence: Synthetic oligonucleotide
cucucgagggucagagcaa

SEQ ID NO: 279690 - RNA, 19 nt, Artificial Sequence
  Description of Artificial Sequence: Synthetic oligonucleotide
uugccacgcucucgacugu

SEQ ID NO: 279691 - RNA, 19 nt, Artificial Sequence
  Description of Artificial Sequence: Synthetic oligonucleotide
guaccgguggugucacaaa

SEQ ID NO: 279692 - RNA, 19 nt, Artificial Sequence
  Description of Artificial Sequence: Synthetic oligonucleotide
ucgcggaguggcgcucagg

SEQ ID NO: 279693 - RNA, 19 nt, Artificial Sequence
  Description of Artificial Sequence: Synthetic oligonucleotide
cccggaaagagcugcuguc

SEQ ID NO: 279694 - RNA, 19 nt, Artificial Sequence
  Description of Artificial Sequence: Synthetic oligonucleotide
cucccggaaagagcugcug

SEQ ID NO: 279695 - RNA, 19 nt, Artificial Sequence
  Description of Artificial Sequence: Synthetic oligonucleotide
gguaccaccuugcuuccgu

SEQ ID NO: 279696 - RNA, 19 nt, Artificial Sequence
  Description of Artificial Sequence: Synthetic oligonucleotide
cucggaccccucugugcug

SEQ ID NO: 279697 - RNA, 19 nt, Artificial Sequence
  Description of Artificial Sequence: Synthetic oligonucleotide
gaacuuuggguaccaccuu

SEQ ID NO: 279698 - RNA, 19 nt, Artificial Sequence
  Description of Artificial Sequence: Synthetic oligonucleotide
ucucuccggcuucgauagu

SEQ ID NO: 279699 - RNA, 19 nt, Artificial Sequence
  Description of Artificial Sequence: Synthetic oligonucleotide
ggcuucgguaaaugcaucu

SEQ ID NO: 279700 - RNA, 19 nt, Artificial Sequence
  Description of Artificial Sequence: Synthetic oligonucleotide
ccaaauggugguaucggcu

SEQ ID NO: 279701 - RNA, 19 nt, Artificial Sequence
  Description of Artificial Sequence: Synthetic oligonucleotide
ggccauuccuaacccguga

SEQ ID NO: 279702 - RNA, 19 nt, Artificial Sequence
  Description of Artificial Sequence: Synthetic oligonucleotide
cucucgacuguaacagcgu

SEQ ID NO: 279703 - RNA, 19 nt, Artificial Sequence
  Description of Artificial Sequence: Synthetic oligonucleotide
cacccgcauucuuguccgg

SEQ ID NO: 279704 - RNA, 19 nt, Artificial Sequence
  Description of Artificial Sequence: Synthetic oligonucleotide
guuaugaggccaaggcuuu

SEQ ID NO: 279705 - RNA, 19 nt, Artificial Sequence
  Description of Artificial Sequence: Synthetic oligonucleotide
gguuagcuggaacaacaau

SEQ ID NO: 279706 - RNA, 19 nt, Artificial Sequence
  Description of Artificial Sequence: Synthetic oligonucleotide
cucccaagguaguaccggu

SEQ ID NO: 279707 - RNA, 19 nt, Artificial Sequence
  Description of Artificial Sequence: Synthetic oligonucleotide
gucccacccgcauucuugu

SEQ ID NO: 279708 - RNA, 19 nt, Artificial Sequence
  Description of Artificial Sequence: Synthetic oligonucleotide
ucccacccgcauucuuguc

SEQ ID NO: 279709 - RNA, 19 nt, Artificial Sequence
  Description of Artificial Sequence: Synthetic oligonucleotide
ugccacgcucucgacugua

SEQ ID NO: 279710 - RNA, 19 nt, Artificial Sequence
  Description of Artificial Sequence: Synthetic oligonucleotide
cgugguaauaccugcauuu

SEQ ID NO: 279711 - RNA, 19 nt, Artificial Sequence
  Description of Artificial Sequence: Synthetic oligonucleotide
cacgaguaccugucguggu

SEQ ID NO: 279712 - RNA, 19 nt, Artificial Sequence
  Description of Artificial Sequence: Synthetic oligonucleotide
ggcuaucauuuucuagcgu

SEQ ID NO: 279713 - RNA, 19 nt, Artificial Sequence
  Description of Artificial Sequence: Synthetic oligonucleotide
gaguaccugucgugguaau

SEQ ID NO: 279714 - RNA, 19 nt, Artificial Sequence
  Description of Artificial Sequence: Synthetic oligonucleotide
gggccauuccuaacccgug

SEQ ID NO: 279715 - RNA, 19 nt, Artificial Sequence
  Description of Artificial Sequence: Synthetic oligonucleotide
gccgacagccucguaguuc

SEQ ID NO: 279716 - RNA, 19 nt, Artificial Sequence
  Description of Artificial Sequence: Synthetic oligonucleotide
gcucacgaguaccugucgu

SEQ ID NO: 279717 - RNA, 19 nt, Artificial Sequence
  Description of Artificial Sequence: Synthetic oligonucleotide
ggaccccucugugcugagg

SEQ ID NO: 279718 - RNA, 19 nt, Artificial Sequence
  Description of Artificial Sequence: Synthetic oligonucleotide
acggccccaguagcugucu

SEQ ID NO: 279719 - RNA, 19 nt, Artificial Sequence
  Description of Artificial Sequence: Synthetic oligonucleotide
caagagcuagugguccugu

SEQ ID NO: 279720 - RNA, 19 nt, Artificial Sequence
  Description of Artificial Sequence: Synthetic oligonucleotide
ggcuucgauaguguccucu

SEQ ID NO: 279721 - RNA, 19 nt, Artificial Sequence
  Description of Artificial Sequence: Synthetic oligonucleotide
gcgguccuccguccgggcc

SEQ ID NO: 279722 - RNA, 19 nt, Artificial Sequence
  Description of Artificial Sequence: Synthetic oligonucleotide
gcuugccacgcucucgacu

SEQ ID NO: 279723 - RNA, 19 nt, Artificial Sequence
  Description of Artificial Sequence: Synthetic oligonucleotide
cucugucgccauggcccag

SEQ ID NO: 279724 - RNA, 19 nt, Artificial Sequence
  Description of Artificial Sequence: Synthetic oligonucleotide
gcagaaaggugcccuccgu

SEQ ID NO: 279725 - RNA, 19 nt, Artificial Sequence
  Description of Artificial Sequence: Synthetic oligonucleotide
ccgggguugcagcucccag

SEQ ID NO: 279726 - RNA, 19 nt, Artificial Sequence
  Description of Artificial Sequence: Synthetic oligonucleotide
cuguaacagcgucgcuucu

SEQ ID NO: 279727 - RNA, 19 nt, Artificial Sequence
  Description of Artificial Sequence: Synthetic oligonucleotide
ccggcuucgauaguguccu

SEQ ID NO: 279728 - RNA, 19 nt, Artificial Sequence
  Description of Artificial Sequence: Synthetic oligonucleotide
ggcgguccuccguccgggc

SEQ ID NO: 279729 - RNA, 19 nt, Artificial Sequence
  Description of Artificial Sequence: Synthetic oligonucleotide
cagcuuuuacggccccagu

SEQ ID NO: 279730 - RNA, 19 nt, Artificial Sequence
  Description of Artificial Sequence: Synthetic oligonucleotide
cugcucgcggaguggcgcu

SEQ ID NO: 279731 - RNA, 19 nt, Artificial Sequence
  Description of Artificial Sequence: Synthetic oligonucleotide
cguccgggcccugccaucc

SEQ ID NO: 279732 - RNA, 19 nt, Artificial Sequence
  Description of Artificial Sequence: Synthetic oligonucleotide
ggccauacucugacagaua

SEQ ID NO: 279733 - RNA, 19 nt, Artificial Sequence
  Description of Artificial Sequence: Synthetic oligonucleotide
cgaguaccugucgugguaa

SEQ ID NO: 279734 - RNA, 19 nt, Artificial Sequence
  Description of Artificial Sequence: Synthetic oligonucleotide
ccacccuuaagugcuuggu

SEQ ID NO: 279735 - RNA, 19 nt, Artificial Sequence
  Description of Artificial Sequence: Synthetic oligonucleotide
gccacgcucucgacuguaa

SEQ ID NO: 279736 - RNA, 19 nt, Artificial Sequence
  Description of Artificial Sequence: Synthetic oligonucleotide
cgguggcgguccuccgucc

SEQ ID NO: 279737 - RNA, 19 nt, Artificial Sequence
  Description of Artificial Sequence: Synthetic oligonucleotide
ccguccgggcccugccauc

SEQ ID NO: 279738 - RNA, 19 nt, Artificial Sequence
  Description of Artificial Sequence: Synthetic oligonucleotide
cccuccguucuccggaaau

SEQ ID NO: 279739 - RNA, 19 nt, Artificial Sequence
  Description of Artificial Sequence: Synthetic oligonucleotide
ccccgggguugcagcuccc

SEQ ID NO: 279740 - RNA, 19 nt, Artificial Sequence
  Description of Artificial Sequence: Synthetic oligonucleotide
cccucgcaggcuccccacu

SEQ ID NO: 279741 - RNA, 19 nt, Artificial Sequence
  Description of Artificial Sequence: Synthetic oligonucleotide
ugaauguacauuaauaccg

SEQ ID NO: 279742 - RNA, 19 nt, Artificial Sequence
  Description of Artificial Sequence: Synthetic oligonucleotide
auaagaacaagcuugcacc

SEQ ID NO: 279743 - RNA, 19 nt, Artificial Sequence
  Description of Artificial Sequence: Synthetic oligonucleotide
auuaauaccgucuaugaac

SEQ ID NO: 279744 - RNA, 19 nt, Artificial Sequence
  Description of Artificial Sequence: Synthetic oligonucleotide
aauaagaacaagcuugcac

SEQ ID NO: 279745 - RNA, 19 nt, Artificial Sequence
  Description of Artificial Sequence: Synthetic oligonucleotide
agugaauguacauuaauac

SEQ ID NO: 279746 - RNA, 19 nt, Artificial Sequence
  Description of Artificial Sequence: Synthetic oligonucleotide
gaaaacuuaaguuggacag

SEQ ID NO: 279747 - RNA, 19 nt, Artificial Sequence
  Description of Artificial Sequence: Synthetic oligonucleotide
cauugaguaaaauacagcc

SEQ ID NO: 279748 - RNA, 19 nt, Artificial Sequence
  Description of Artificial Sequence: Synthetic oligonucleotide
aagcugaacagacuggugc

SEQ ID NO: 279749 - RNA, 19 nt, Artificial Sequence
  Description of Artificial Sequence: Synthetic oligonucleotide
agaguaugcagauaguuac

SEQ ID NO: 279750 - RNA, 19 nt, Artificial Sequence
  Description of Artificial Sequence: Synthetic oligonucleotide
aaaacaacaugacaucuug

SEQ ID NO: 279751 - RNA, 19 nt, Artificial Sequence
  Description of Artificial Sequence: Synthetic oligonucleotide
aauuguaugagcugccaag

SEQ ID NO: 279752 - RNA, 19 nt, Artificial Sequence
  Description of Artificial Sequence: Synthetic oligonucleotide
ucuacuaaugacugcauag

SEQ ID NO: 279753 - RNA, 19 nt, Artificial Sequence
  Description of Artificial Sequence: Synthetic oligonucleotide
aaugaagcauccuucaccu

SEQ ID NO: 279754 - RNA, 19 nt, Artificial Sequence
  Description of Artificial Sequence: Synthetic oligonucleotide
uauacacagaucuccaggg

SEQ ID NO: 279755 - RNA, 19 nt, Artificial Sequence
  Description of Artificial Sequence: Synthetic oligonucleotide
aaaacguuauuuuaugaaa

SEQ ID NO: 279756 - RNA, 19 nt, Artificial Sequence
  Description of Artificial Sequence: Synthetic oligonucleotide
  modified_base (15)..(15): a, c, u, g, unknown or other
uuuuagagaacuccncuag

SEQ ID NO: 279757 - RNA, 19 nt, Artificial Sequence
  Description of Artificial Sequence: Synthetic oligonucleotide
aguccuagaacucuucuac

SEQ ID NO: 279758 - RNA, 19 nt, Artificial Sequence
  Description of Artificial Sequence: Synthetic oligonucleotide
uuaauaccgucuaugaaca

SEQ ID NO: 279759 - RNA, 19 nt, Artificial Sequence
  Description of Artificial Sequence: Synthetic oligonucleotide
aacuucaccaauaaaagca

SEQ ID NO: 279760 - RNA, 19 nt, Artificial Sequence
  Description of Artificial Sequence: Synthetic oligonucleotide
aacuuaucuuccuuuaucu

SEQ ID NO: 279761 - RNA, 19 nt, Artificial Sequence
  Description of Artificial Sequence: Synthetic oligonucleotide
auacuauacacagaucucc

SEQ ID NO: 279762 - RNA, 19 nt, Artificial Sequence
  Description of Artificial Sequence: Synthetic oligonucleotide
augaauguaaauuuuaauu

SEQ ID NO: 279763 - RNA, 19 nt, Artificial Sequence
  Description of Artificial Sequence: Synthetic oligonucleotide
ucuuugugauucaaugugg

SEQ ID NO: 279764 - RNA, 19 nt, Artificial Sequence
  Description of Artificial Sequence: Synthetic oligonucleotide
ugugauuuauucaccaaug

SEQ ID NO: 279765 - RNA, 19 nt, Artificial Sequence
  Description of Artificial Sequence: Synthetic oligonucleotide
auugacauggcaucacugg

SEQ ID NO: 279766 - RNA, 19 nt, Artificial Sequence
  Description of Artificial Sequence: Synthetic oligonucleotide
aacagaucugaucuuaaga

SEQ ID NO: 279767 - RNA, 19 nt, Artificial Sequence
  Description of Artificial Sequence: Synthetic oligonucleotide
  modified_base (3)..(3): a, c, u, g, unknown or other
ucnguaaugccugugcugg

SEQ ID NO: 279768 - RNA, 19 nt, Artificial Sequence
  Description of Artificial Sequence: Synthetic oligonucleotide
  modified_base (9)..(9): a, c, u, g, unknown or other
ucuucuucnguaaugccug

SEQ ID NO: 279769 - RNA, 19 nt, Artificial Sequence
  Description of Artificial Sequence: Synthetic oligonucleotide
agugaugugucacauuggg

SEQ ID NO: 279770 - RNA, 19 nt, Artificial Sequence
  Description of Artificial Sequence: Synthetic oligonucleotide
agauauauaguaaaguuca

SEQ ID NO: 279771 - RNA, 19 nt, Artificial Sequence
  Description of Artificial Sequence: Synthetic oligonucleotide
aacaacacguugcucuugg

SEQ ID NO: 279772 - RNA, 19 nt, Artificial Sequence
  Description of Artificial Sequence: Synthetic oligonucleotide
ucugaucuuaagaaaacgu

SEQ ID NO: 279773 - RNA, 19 nt, Artificial Sequence
  Description of Artificial Sequence: Synthetic oligonucleotide
uauacaccuacuuugcuga

SEQ ID NO: 279774 - RNA, 19 nt, Artificial Sequence
  Description of Artificial Sequence: Synthetic oligonucleotide
uucucuaggcuuaucauca

SEQ ID NO: 279775 - RNA, 19 nt, Artificial Sequence
  Description of Artificial Sequence: Synthetic oligonucleotide
uuucuauccugaaauaacu

SEQ ID NO: 279776 - RNA, 19 nt, Artificial Sequence
  Description of Artificial Sequence: Synthetic oligonucleotide
uuaaaauauacaccuacuu

SEQ ID NO: 279777 - RNA, 19 nt, Artificial Sequence
  Description of Artificial Sequence: Synthetic oligonucleotide
acagacaguauggagaugg

SEQ ID NO: 279778 - RNA, 19 nt, Artificial Sequence
  Description of Artificial Sequence: Synthetic oligonucleotide
gacaucuugaagcugaaca

SEQ ID NO: 279779 - RNA, 19 nt, Artificial Sequence
  Description of Artificial Sequence: Synthetic oligonucleotide
aauacugucuccgugcugu

SEQ ID NO: 279780 - RNA, 19 nt, Artificial Sequence
  Description of Artificial Sequence: Synthetic oligonucleotide
ugcaccuaggaacuuacag

SEQ ID NO: 279781 - RNA, 19 nt, Artificial Sequence
  Description of Artificial Sequence: Synthetic oligonucleotide
ugaaguuaucacuucuucc

SEQ ID NO: 279782 - RNA, 19 nt, Artificial Sequence
  Description of Artificial Sequence: Synthetic oligonucleotide
acagauauauaguaaaguu

SEQ ID NO: 279783 - RNA, 19 nt, Artificial Sequence
  Description of Artificial Sequence: Synthetic oligonucleotide
ugaucuuaagaaaacguua

SEQ ID NO: 279784 - RNA, 19 nt, Artificial Sequence
  Description of Artificial Sequence: Synthetic oligonucleotide
  modified_base (14)..(14): a, c, u, g, unknown or other
uuuagagaacuccncuaga

SEQ ID NO: 279785 - RNA, 19 nt, Artificial Sequence
  Description of Artificial Sequence: Synthetic oligonucleotide
  modified_base (6)..(6): a, c, u, g, unknown or other
ucuucnguaaugccugugc

SEQ ID NO: 279786 - RNA, 19 nt, Artificial Sequence
  Description of Artificial Sequence: Synthetic oligonucleotide
uguccuauuuucuugggac

SEQ ID NO: 279787 - RNA, 19 nt, Artificial Sequence
  Description of Artificial Sequence: Synthetic oligonucleotide
ugauuuauucaccaaugaa

SEQ ID NO: 279788 - RNA, 19 nt, Artificial Sequence
  Description of Artificial Sequence: Synthetic oligonucleotide
agucucagaauacugucuc

SEQ ID NO: 279789 - RNA, 19 nt, Artificial Sequence
  Description of Artificial Sequence: Synthetic oligonucleotide
uguacauuaauaccgucua

SEQ ID NO: 279790 - RNA, 19 nt, Artificial Sequence
  Description of Artificial Sequence: Synthetic oligonucleotide
auuugcugacccuucuacc

SEQ ID NO: 279791 - RNA, 19 nt, Artificial Sequence
  Description of Artificial Sequence: Synthetic oligonucleotide
cuauacacagaucuccagg

SEQ ID NO: 279792 - RNA, 19 nt, Artificial Sequence
  Description of Artificial Sequence: Synthetic oligonucleotide
cagauauauaguaaaguuc

SEQ ID NO: 279793 - RNA, 19 nt, Artificial Sequence
  Description of Artificial Sequence: Synthetic oligonucleotide
uaugccacaugcauucucc

SEQ ID NO: 279794 - RNA, 19 nt, Artificial Sequence
  Description of Artificial Sequence: Synthetic oligonucleotide
uacauuaauaccgucuaug

SEQ ID NO: 279795 - RNA, 19 nt, Artificial Sequence
  Description of Artificial Sequence: Synthetic oligonucleotide
uuauuucuguuccagcacu

SEQ ID NO: 279796 - RNA, 19 nt, Artificial Sequence
  Description of Artificial Sequence: Synthetic oligonucleotide
ucaguuugaauuguaugag

SEQ ID NO: 279797 - RNA, 19 nt, Artificial Sequence
  Description of Artificial Sequence: Synthetic oligonucleotide
caaugaagcauccuucacc

SEQ ID NO: 279798 - RNA, 19 nt, Artificial Sequence
  Description of Artificial Sequence: Synthetic oligonucleotide
uguaugagcugccaaggga

SEQ ID NO: 279799 - RNA, 19 nt, Artificial Sequence
  Description of Artificial Sequence: Synthetic oligonucleotide
uccaagauugacauggcau

SEQ ID NO: 279800 - RNA, 19 nt, Artificial Sequence
  Description of Artificial Sequence: Synthetic oligonucleotide
uauacuauacacagaucuc

SEQ ID NO: 279801 - RNA, 19 nt, Artificial Sequence
  Description of Artificial Sequence: Synthetic oligonucleotide
agaacaagcuugcaccuag

SEQ ID NO: 279802 - RNA, 19 nt, Artificial Sequence
  Description of Artificial Sequence: Synthetic oligonucleotide
  modified_base (7)..(7): a, c, u, g, unknown or other
aacuccncuagaucuccag

SEQ ID NO: 279803 - RNA, 19 nt, Artificial Sequence
  Description of Artificial Sequence: Synthetic oligonucleotide
  modified_base (13)..(13): a, c, u, g, unknown or other
uuagagaacuccncuagau

SEQ ID NO: 279804 - RNA, 19 nt, Artificial Sequence
  Description of Artificial Sequence: Synthetic oligonucleotide
uucuccuauaccccuuugg

SEQ ID NO: 279805 - RNA, 19 nt, Artificial Sequence
  Description of Artificial Sequence: Synthetic oligonucleotide
acaguuuguucauuauggg

SEQ ID NO: 279806 - RNA, 19 nt, Artificial Sequence
  Description of Artificial Sequence: Synthetic oligonucleotide
uaacuuaucuuccuuuauc

SEQ ID NO: 279807 - RNA, 19 nt, Artificial Sequence
  Description of Artificial Sequence: Synthetic oligonucleotide
uugggacccaacuacaucu

SEQ ID NO: 279808 - RNA, 19 nt, Artificial Sequence
  Description of Artificial Sequence: Synthetic oligonucleotide
cucggcuccagaaucaggg

SEQ ID NO: 279809 - RNA, 19 nt, Artificial Sequence
  Description of Artificial Sequence: Synthetic oligonucleotide
auugcauuagugauguguc

SEQ ID NO: 279810 - RNA, 19 nt, Artificial Sequence
  Description of Artificial Sequence: Synthetic oligonucleotide
uugguuaagagaaguuaug

SEQ ID NO: 279811 - RNA, 19 nt, Artificial Sequence
  Description of Artificial Sequence: Synthetic oligonucleotide
uucuauccugaaauaacug

SEQ ID NO: 279812 - RNA, 19 nt, Artificial Sequence
  Description of Artificial Sequence: Synthetic oligonucleotide
uuuuaggaccaacuugugu

SEQ ID NO: 279813 - RNA, 19 nt, Artificial Sequence
  Description of Artificial Sequence: Synthetic oligonucleotide
agaaaacguuauuuuauga

SEQ ID NO: 279814 - RNA, 19 nt, Artificial Sequence
  Description of Artificial Sequence: Synthetic oligonucleotide
uuugugauucaauguggcc

SEQ ID NO: 279815 - RNA, 19 nt, Artificial Sequence
  Description of Artificial Sequence: Synthetic oligonucleotide
ugacauuucuguugaagcu

SEQ ID NO: 279816 - RNA, 19 nt, Artificial Sequence
  Description of Artificial Sequence: Synthetic oligonucleotide
ucuccuauaccccuuuggu

SEQ ID NO: 279817 - RNA, 19 nt, Artificial Sequence
  Description of Artificial Sequence: Synthetic oligonucleotide
uuguaugagcugccaaggg

SEQ ID NO: 279818 - RNA, 19 nt, Artificial Sequence
  Description of Artificial Sequence: Synthetic oligonucleotide
  modified_base (4)..(4): a, c, u, g, unknown or other
uucnguaaugccugugcug

SEQ ID NO: 279819 - RNA, 19 nt, Artificial Sequence
  Description of Artificial Sequence: Synthetic oligonucleotide
auuguaugagcugccaagg

SEQ ID NO: 279820 - RNA, 19 nt, Artificial Sequence
  Description of Artificial Sequence: Synthetic oligonucleotide
ugcugcuaaagucaucucu

SEQ ID NO: 279821 - RNA, 19 nt, Artificial Sequence
  Description of Artificial Sequence: Synthetic oligonucleotide
aaugaacccgcagaguaug

SEQ ID NO: 279822 - RNA, 19 nt, Artificial Sequence
  Description of Artificial Sequence: Synthetic oligonucleotide
ugugucaugcagcucaguc

SEQ ID NO: 279823 - RNA, 19 nt, Artificial Sequence
  Description of Artificial Sequence: Synthetic oligonucleotide
uaaaaugaucucaaucauu

SEQ ID NO: 279824 - RNA, 19 nt, Artificial Sequence
  Description of Artificial Sequence: Synthetic oligonucleotide
uggcgauaaaaccaguuuc

SEQ ID NO: 279825 - RNA, 19 nt, Artificial Sequence
  Description of Artificial Sequence: Synthetic oligonucleotide
aaguaagcuauucucuuuu

SEQ ID NO: 279826 - RNA, 19 nt, Artificial Sequence
  Description of Artificial Sequence: Synthetic oligonucleotide
cuacauuagcacugggucc

SEQ ID NO: 279827 - RNA, 19 nt, Artificial Sequence
  Description of Artificial Sequence: Synthetic oligonucleotide
acugcuuagggcuucugug

SEQ ID NO: 279828 - RNA, 19 nt, Artificial Sequence
  Description of Artificial Sequence: Synthetic oligonucleotide
  modified_base (9)..(9): a, c, u, g, unknown or other
agaacuccncuagaucucc

SEQ ID NO: 279829 - RNA, 19 nt, Artificial Sequence
  Description of Artificial Sequence: Synthetic oligonucleotide
ucaccaauaaaagcagcag

SEQ ID NO: 279830 - RNA, 19 nt, Artificial Sequence
  Description of Artificial Sequence: Synthetic oligonucleotide
cuuggguaaugauagaaga

SEQ ID NO: 279831 - RNA, 19 nt, Artificial Sequence
  Description of Artificial Sequence: Synthetic oligonucleotide
cuguacaauuugcugaccc

SEQ ID NO: 279832 - RNA, 19 nt, Artificial Sequence
  Description of Artificial Sequence: Synthetic oligonucleotide
uuaucacuucuuccuuugg

SEQ ID NO: 279833 - RNA, 19 nt, Artificial Sequence
  Description of Artificial Sequence: Synthetic oligonucleotide
acaccuuggguaaugauag

SEQ ID NO: 279834 - RNA, 19 nt, Artificial Sequence
  Description of Artificial Sequence: Synthetic oligonucleotide
uaggcuuaucaucauuuac

SEQ ID NO: 279835 - RNA, 19 nt, Artificial Sequence
  Description of Artificial Sequence: Synthetic oligonucleotide
agcauuagcuucuugguua

SEQ ID NO: 279836 - RNA, 19 nt, Artificial Sequence
  Description of Artificial Sequence: Synthetic oligonucleotide
uaaaacaacaugacaucuu

SEQ ID NO: 279837 - RNA, 19 nt, Artificial Sequence
  Description of Artificial Sequence: Synthetic oligonucleotide
aaaacuuaaguuggacagu

SEQ ID NO: 279838 - RNA, 19 nt, Artificial Sequence
  Description of Artificial Sequence: Synthetic oligonucleotide
  modified_base (5)..(5): a, c, u, g, unknown or other
cuccncuagaucuccagag

SEQ ID NO: 279839 - RNA, 19 nt, Artificial Sequence
  Description of Artificial Sequence: Synthetic oligonucleotide
uggccagaaacucaugcac

SEQ ID NO: 279840 - RNA, 19 nt, Artificial Sequence
  Description of Artificial Sequence: Synthetic oligonucleotide
cuuauuucuguuccagcac

SEQ ID NO: 279841 - RNA, 19 nt, Artificial Sequence
  Description of Artificial Sequence: Synthetic oligonucleotide
uucacagauaagauuucuc

SEQ ID NO: 279842 - RNA, 19 nt, Artificial Sequence
  Description of Artificial Sequence: Synthetic oligonucleotide
aacaagcuugcaccuagga

SEQ ID NO: 279843 - RNA, 19 nt, Artificial Sequence
  Description of Artificial Sequence: Synthetic oligonucleotide
uguacaauuugcugacccu

SEQ ID NO: 279844 - RNA, 19 nt, Artificial Sequence
  Description of Artificial Sequence: Synthetic oligonucleotide
aagugaauguacauuaaua

SEQ ID NO: 279845 - RNA, 19 nt, Artificial Sequence
  Description of Artificial Sequence: Synthetic oligonucleotide
aaacuuaaguuggacaguu

SEQ ID NO: 279846 - RNA, 19 nt, Artificial Sequence
  Description of Artificial Sequence: Synthetic oligonucleotide
cauugccuaugccacaugc

SEQ ID NO: 279847 - RNA, 19 nt, Artificial Sequence
  Description of Artificial Sequence: Synthetic oligonucleotide
uguaacggcuccaucacuu

SEQ ID NO: 279848 - RNA, 19 nt, Artificial Sequence
  Description of Artificial Sequence: Synthetic oligonucleotide
ugguggugacuccacauug

SEQ ID NO: 279849 - RNA, 19 nt, Artificial Sequence
  Description of Artificial Sequence: Synthetic oligonucleotide
gaaccuggcgauaaaacca

SEQ ID NO: 279850 - RNA, 19 nt, Artificial Sequence
  Description of Artificial Sequence: Synthetic oligonucleotide
aaguguucauugauuagca

SEQ ID NO: 279851 - RNA, 19 nt, Artificial Sequence
  Description of Artificial Sequence: Synthetic oligonucleotide
uccuauuuucuugggaccc

SEQ ID NO: 279852 - RNA, 19 nt, Artificial Sequence
  Description of Artificial Sequence: Synthetic oligonucleotide
gaacccgcagaguaugcag

SEQ ID NO: 279853 - RNA, 19 nt, Artificial Sequence
  Description of Artificial Sequence: Synthetic oligonucleotide
uguguccuauuuucuuggg

SEQ ID NO: 279854 - RNA, 19 nt, Artificial Sequence
  Description of Artificial Sequence: Synthetic oligonucleotide
uugccuaugccacaugcau

SEQ ID NO: 279855 - RNA, 19 nt, Artificial Sequence
  Description of Artificial Sequence: Synthetic oligonucleotide
  modified_base (4)..(4): a, c, u, g, unknown or other
uccncuagaucuccagagu

SEQ ID NO: 279856 - RNA, 19 nt, Artificial Sequence
  Description of Artificial Sequence: Synthetic oligonucleotide
uuugugugauuucuaguuu

SEQ ID NO: 279857 - RNA, 19 nt, Artificial Sequence
  Description of Artificial Sequence: Synthetic oligonucleotide
ugaagugaauguacauuaa

SEQ ID NO: 279858 - RNA, 19 nt, Artificial Sequence
  Description of Artificial Sequence: Synthetic oligonucleotide
guuaagagaaguuaugguu

SEQ ID NO: 279859 - RNA, 19 nt, Artificial Sequence
  Description of Artificial Sequence: Synthetic oligonucleotide
gaucucaaucauuuggcaa

SEQ ID NO: 279860 - RNA, 19 nt, Artificial Sequence
  Description of Artificial Sequence: Synthetic oligonucleotide
aagcucgggcagcauuagc

SEQ ID NO: 279861 - RNA, 19 nt, Artificial Sequence
  Description of Artificial Sequence: Synthetic oligonucleotide
cuuguaacggcuccaucac

SEQ ID NO: 279862 - RNA, 19 nt, Artificial Sequence
  Description of Artificial Sequence: Synthetic oligonucleotide
uuaaguuggacaguuuguu

SEQ ID NO: 279863 - RNA, 19 nt, Artificial Sequence
  Description of Artificial Sequence: Synthetic oligonucleotide
auugaguaaaauacagccu

SEQ ID NO: 279864 - RNA, 19 nt, Artificial Sequence
  Description of Artificial Sequence: Synthetic oligonucleotide
uuugugucaugcagcucag

SEQ ID NO: 279865 - RNA, 19 nt, Artificial Sequence
  Description of Artificial Sequence: Synthetic oligonucleotide
aacaccuuggguaaugaua

SEQ ID NO: 279866 - RNA, 19 nt, Artificial Sequence
  Description of Artificial Sequence: Synthetic oligonucleotide
ucugaagugaauguacauu

SEQ ID NO: 279867 - RNA, 19 nt, Artificial Sequence
  Description of Artificial Sequence: Synthetic oligonucleotide
gaaggauugcauuagugau

SEQ ID NO: 279868 - RNA, 19 nt, Artificial Sequence
  Description of Artificial Sequence: Synthetic oligonucleotide
aaccuggcgauaaaaccag

SEQ ID NO: 279869 - RNA, 19 nt, Artificial Sequence
  Description of Artificial Sequence: Synthetic oligonucleotide
acguuauuuuaugaaaacu

SEQ ID NO: 279870 - RNA, 19 nt, Artificial Sequence
  Description of Artificial Sequence: Synthetic oligonucleotide
ucccaauuuccacuguuaa

SEQ ID NO: 279871 - RNA, 19 nt, Artificial Sequence
  Description of Artificial Sequence: Synthetic oligonucleotide
uggagugacugucuugcac

SEQ ID NO: 279872 - RNA, 19 nt, Artificial Sequence
  Description of Artificial Sequence: Synthetic oligonucleotide
uacaauuugcugacccuuc

SEQ ID NO: 279873 - RNA, 19 nt, Artificial Sequence
  Description of Artificial Sequence: Synthetic oligonucleotide
uuuccaagauugacauggc

SEQ ID NO: 279874 - RNA, 19 nt, Artificial Sequence
  Description of Artificial Sequence: Synthetic oligonucleotide
agcauuuaaaacccucuuu

SEQ ID NO: 279875 - RNA, 19 nt, Artificial Sequence
  Description of Artificial Sequence: Synthetic oligonucleotide
ggagugacugucuugcacc

SEQ ID NO: 279876 - RNA, 19 nt, Artificial Sequence
  Description of Artificial Sequence: Synthetic oligonucleotide
aggcuuaucaucauuuacu

SEQ ID NO: 279877 - RNA, 19 nt, Artificial Sequence
  Description of Artificial Sequence: Synthetic oligonucleotide
uaccgucuaugaacaauag

SEQ ID NO: 279878 - RNA, 19 nt, Artificial Sequence
  Description of Artificial Sequence: Synthetic oligonucleotide
gauugacauggcaucacug

SEQ ID NO: 279879 - RNA, 19 nt, Artificial Sequence
  Description of Artificial Sequence: Synthetic oligonucleotide
uguuucuauucuggaaacc

SEQ ID NO: 279880 - RNA, 19 nt, Artificial Sequence
  Description of Artificial Sequence: Synthetic oligonucleotide
aaaagaaccuggcgauaaa

SEQ ID NO: 279881 - RNA, 19 nt, Artificial Sequence
  Description of Artificial Sequence: Synthetic oligonucleotide
gauauauaguaaaguucac

SEQ ID NO: 279882 - RNA, 19 nt, Artificial Sequence
  Description of Artificial Sequence: Synthetic oligonucleotide
aguuucuauccccucggcu

SEQ ID NO: 279883 - RNA, 19 nt, Artificial Sequence
  Description of Artificial Sequence: Synthetic oligonucleotide
cuugcaccuaggaacuuac

SEQ ID NO: 279884 - RNA, 19 nt, Artificial Sequence
  Description of Artificial Sequence: Synthetic oligonucleotide
uuccuuuaucugaagugaa

SEQ ID NO: 279885 - RNA, 19 nt, Artificial Sequence
  Description of Artificial Sequence: Synthetic oligonucleotide
uucuacuaaugacugcaua

SEQ ID NO: 279886 - RNA, 19 nt, Artificial Sequence
  Description of Artificial Sequence: Synthetic oligonucleotide
uuuggcaacucaucauauc

SEQ ID NO: 279887 - RNA, 19 nt, Artificial Sequence
  Description of Artificial Sequence: Synthetic oligonucleotide
caagggaccugcuacucug

SEQ ID NO: 279888 - RNA, 19 nt, Artificial Sequence
  Description of Artificial Sequence: Synthetic oligonucleotide
uccuuuaucugaagugaau

SEQ ID NO: 279889 - RNA, 19 nt, Artificial Sequence
  Description of Artificial Sequence: Synthetic oligonucleotide
agaguaugaacagagcauu

SEQ ID NO: 279890 - RNA, 19 nt, Artificial Sequence
  Description of Artificial Sequence: Synthetic oligonucleotide
ucucaguugccaaguuggc

SEQ ID NO: 279891 - RNA, 19 nt, Artificial Sequence
  Description of Artificial Sequence: Synthetic oligonucleotide
acaauuugcugacccuucu

SEQ ID NO: 279892 - RNA, 19 nt, Artificial Sequence
  Description of Artificial Sequence: Synthetic oligonucleotide
agugcaacgcugucugucu

SEQ ID NO: 279893 - RNA, 19 nt, Artificial Sequence
  Description of Artificial Sequence: Synthetic oligonucleotide
guccuauuuucuugggacc

SEQ ID NO: 279894 - RNA, 19 nt, Artificial Sequence
  Description of Artificial Sequence: Synthetic oligonucleotide
gauaguuacagggcaggca

SEQ ID NO: 279895 - RNA, 19 nt, Artificial Sequence
  Description of Artificial Sequence: Synthetic oligonucleotide
ucacagauccugcucuuau

SEQ ID NO: 279896 - RNA, 19 nt, Artificial Sequence
  Description of Artificial Sequence: Synthetic oligonucleotide
aguuaugguuuccaagauu

SEQ ID NO: 279897 - RNA, 19 nt, Artificial Sequence
  Description of Artificial Sequence: Synthetic oligonucleotide
agauaagauuucucuguaa

SEQ ID NO: 279898 - RNA, 19 nt, Artificial Sequence
  Description of Artificial Sequence: Synthetic oligonucleotide
ugucugucuuugaacuugu

SEQ ID NO: 279899 - RNA, 19 nt, Artificial Sequence
  Description of Artificial Sequence: Synthetic oligonucleotide
cacucucaccuucuguucc

SEQ ID NO: 279900 - RNA, 19 nt, Artificial Sequence
  Description of Artificial Sequence: Synthetic oligonucleotide
augacugcauagcauuuaa

SEQ ID NO: 279901 - RNA, 19 nt, Artificial Sequence
  Description of Artificial Sequence: Synthetic oligonucleotide
aaugacugcauagcauuua

SEQ ID NO: 279902 - RNA, 19 nt, Artificial Sequence
  Description of Artificial Sequence: Synthetic oligonucleotide
acuuguguccuauuuucuu

SEQ ID NO: 279903 - RNA, 19 nt, Artificial Sequence
  Description of Artificial Sequence: Synthetic oligonucleotide
agcugagcauccuuacuca

SEQ ID NO: 279904 - RNA, 19 nt, Artificial Sequence
  Description of Artificial Sequence: Synthetic oligonucleotide
cuggacaagggagaucacc

SEQ ID NO: 279905 - RNA, 19 nt, Artificial Sequence
  Description of Artificial Sequence: Synthetic oligonucleotide
gaauuguaugagcugccaa

SEQ ID NO: 279906 - RNA, 19 nt, Artificial Sequence
  Description of Artificial Sequence: Synthetic oligonucleotide
cacuggacaagggagauca

SEQ ID NO: 279907 - RNA, 19 nt, Artificial Sequence
  Description of Artificial Sequence: Synthetic oligonucleotide
guuaccaagcagaaacuga

SEQ ID NO: 279908 - RNA, 19 nt, Artificial Sequence
  Description of Artificial Sequence: Synthetic oligonucleotide
aucugaagugaauguacau

SEQ ID NO: 279909 - RNA, 19 nt, Artificial Sequence
  Description of Artificial Sequence: Synthetic oligonucleotide
ucggcuccagaaucagggg

SEQ ID NO: 279910 - RNA, 19 nt, Artificial Sequence
  Description of Artificial Sequence: Synthetic oligonucleotide
  modified_base (7)..(7): a, c, u, g, unknown or other
uucuucnguaaugccugug

SEQ ID NO: 279911 - RNA, 19 nt, Artificial Sequence
  Description of Artificial Sequence: Synthetic oligonucleotide
uccccucaacuguacauga

SEQ ID NO: 279912 - RNA, 19 nt, Artificial Sequence
  Description of Artificial Sequence: Synthetic oligonucleotide
aacggcuccaucacuuuca

SEQ ID NO: 279913 - RNA, 19 nt, Artificial Sequence
  Description of Artificial Sequence: Synthetic oligonucleotide
accgucuaugaacaauagu

SEQ ID NO: 279914 - RNA, 19 nt, Artificial Sequence
  Description of Artificial Sequence: Synthetic oligonucleotide
ucuugggacccaacuacau

SEQ ID NO: 279915 - RNA, 19 nt, Artificial Sequence
  Description of Artificial Sequence: Synthetic oligonucleotide
acuaaugacugcauagcau

SEQ ID NO: 279916 - RNA, 19 nt, Artificial Sequence
  Description of Artificial Sequence: Synthetic oligonucleotide
  modified_base (6)..(6): a, c, u, g, unknown or other
acuccncuagaucuccaga

SEQ ID NO: 279917 - RNA, 19 nt, Artificial Sequence
  Description of Artificial Sequence: Synthetic oligonucleotide
uuuuagacaugugccuuuc

SEQ ID NO: 279918 - RNA, 19 nt, Artificial Sequence
  Description of Artificial Sequence: Synthetic oligonucleotide
aguaugaacagagcauuua

SEQ ID NO: 279919 - RNA, 19 nt, Artificial Sequence
  Description of Artificial Sequence: Synthetic oligonucleotide
ccaagauugacauggcauc

SEQ ID NO: 279920 - RNA, 19 nt, Artificial Sequence
  Description of Artificial Sequence: Synthetic oligonucleotide
uuguaacggcuccaucacu

SEQ ID NO: 279921 - RNA, 19 nt, Artificial Sequence
  Description of Artificial Sequence: Synthetic oligonucleotide
cuaaugacugcauagcauu

SEQ ID NO: 279922 - RNA, 19 nt, Artificial Sequence
  Description of Artificial Sequence: Synthetic oligonucleotide
ccuuggguaaugauagaag

SEQ ID NO: 279923 - RNA, 19 nt, Artificial Sequence
  Description of Artificial Sequence: Synthetic oligonucleotide
  modified_base (15)..(15): a, c, u, g, unknown or other
ugguuacugcaucancuuu

SEQ ID NO: 279924 - RNA, 19 nt, Artificial Sequence
  Description of Artificial Sequence: Synthetic oligonucleotide
uccgugcuguuucuauucu

SEQ ID NO: 279925 - RNA, 19 nt, Artificial Sequence
  Description of Artificial Sequence: Synthetic oligonucleotide
cauccuuacucaggcaaag

SEQ ID NO: 279926 - RNA, 19 nt, Artificial Sequence
  Description of Artificial Sequence: Synthetic oligonucleotide
gaucccacuccaguuacca

SEQ ID NO: 279927 - RNA, 19 nt, Artificial Sequence
  Description of Artificial Sequence: Synthetic oligonucleotide
ugacugcauagcauuuaaa

SEQ ID NO: 279928 - RNA, 19 nt, Artificial Sequence
  Description of Artificial Sequence: Synthetic oligonucleotide
ugggaucccacuccaguua

SEQ ID NO: 279929 - RNA, 19 nt, Artificial Sequence
  Description of Artificial Sequence: Synthetic oligonucleotide
uggacaguuuguucauuau

SEQ ID NO: 279930 - RNA, 19 nt, Artificial Sequence
  Description of Artificial Sequence: Synthetic oligonucleotide
aguguucauugauuagcau

SEQ ID NO: 279931 - RNA, 19 nt, Artificial Sequence
  Description of Artificial Sequence: Synthetic oligonucleotide
auuagugaugugucacauu

SEQ ID NO: 279932 - RNA, 19 nt, Artificial Sequence
  Description of Artificial Sequence: Synthetic oligonucleotide
caccuguaacaacacguug

SEQ ID NO: 279933 - RNA, 19 nt, Artificial Sequence
  Description of Artificial Sequence: Synthetic oligonucleotide
cuuaaguuggacaguuugu

SEQ ID NO: 279934 - RNA, 19 nt, Artificial Sequence
  Description of Artificial Sequence: Synthetic oligonucleotide
cacguugcucuugggaucc

SEQ ID NO: 279935 - RNA, 19 nt, Artificial Sequence
  Description of Artificial Sequence: Synthetic oligonucleotide
auacaccuacuuugcugag

SEQ ID NO: 279936 - RNA, 19 nt, Artificial Sequence
  Description of Artificial Sequence: Synthetic oligonucleotide
ugaacccgcagaguaugca

SEQ ID NO: 279937 - RNA, 19 nt, Artificial Sequence
  Description of Artificial Sequence: Synthetic oligonucleotide
caucauacauugaguaaaa

SEQ ID NO: 279938 - RNA, 19 nt, Artificial Sequence
  Description of Artificial Sequence: Synthetic oligonucleotide
ccgcagaguaugcagauag

SEQ ID NO: 279939 - RNA, 19 nt, Artificial Sequence
  Description of Artificial Sequence: Synthetic oligonucleotide
uugggaucccacuccaguu

SEQ ID NO: 279940 - RNA, 19 nt, Artificial Sequence
  Description of Artificial Sequence: Synthetic oligonucleotide
uauaccccuuuggugguga

SEQ ID NO: 279941 - RNA, 19 nt, Artificial Sequence
  Description of Artificial Sequence: Synthetic oligonucleotide
uccccucggcuccagaauc

SEQ ID NO: 279942 - RNA, 19 nt, Artificial Sequence
  Description of Artificial Sequence: Synthetic oligonucleotide
cuaugccacaugcauucuc

SEQ ID NO: 279943 - RNA, 19 nt, Artificial Sequence
  Description of Artificial Sequence: Synthetic oligonucleotide
gagugacugucuugcacca

SEQ ID NO: 279944 - RNA, 19 nt, Artificial Sequence
  Description of Artificial Sequence: Synthetic oligonucleotide
augaacccgcagaguaugc

SEQ ID NO: 279945 - RNA, 19 nt, Artificial Sequence
  Description of Artificial Sequence: Synthetic oligonucleotide
gcuuaucaucauuuacuug

SEQ ID NO: 279946 - RNA, 19 nt, Artificial Sequence
  Description of Artificial Sequence: Synthetic oligonucleotide
caacacguugcucuuggga

SEQ ID NO: 279947 - RNA, 19 nt, Artificial Sequence
  Description of Artificial Sequence: Synthetic oligonucleotide
ugauucuccuauaccccuu

SEQ ID NO: 279948 - RNA, 19 nt, Artificial Sequence
  Description of Artificial Sequence: Synthetic oligonucleotide
guaagcuauucucuuuugu

SEQ ID NO: 279949 - RNA, 19 nt, Artificial Sequence
  Description of Artificial Sequence: Synthetic oligonucleotide
cacagaugucucaguugcc

SEQ ID NO: 279950 - RNA, 19 nt, Artificial Sequence
  Description of Artificial Sequence: Synthetic oligonucleotide
guuuguucauuaugggagu

SEQ ID NO: 279951 - RNA, 19 nt, Artificial Sequence
  Description of Artificial Sequence: Synthetic oligonucleotide
aacccgcagaguaugcaga

SEQ ID NO: 279952 - RNA, 19 nt, Artificial Sequence
  Description of Artificial Sequence: Synthetic oligonucleotide
cugaucuuaagaaaacguu

SEQ ID NO: 279953 - RNA, 19 nt, Artificial Sequence
  Description of Artificial Sequence: Synthetic oligonucleotide
acuaguccauguaccacug

SEQ ID NO: 279954 - RNA, 19 nt, Artificial Sequence
  Description of Artificial Sequence: Synthetic oligonucleotide
auaguaaaguucacagaua

SEQ ID NO: 279955 - RNA, 19 nt, Artificial Sequence
  Description of Artificial Sequence: Synthetic oligonucleotide
ugccuaugccacaugcauu

SEQ ID NO: 279956 - RNA, 19 nt, Artificial Sequence
  Description of Artificial Sequence: Synthetic oligonucleotide
uacaccuacuuugcugagu

SEQ ID NO: 279957 - RNA, 19 nt, Artificial Sequence
  Description of Artificial Sequence: Synthetic oligonucleotide
uugcugcaacuccauaauu

SEQ ID NO: 279958 - RNA, 19 nt, Artificial Sequence
  Description of Artificial Sequence: Synthetic oligonucleotide
uaauaccgucuaugaacaa

SEQ ID NO: 279959 - RNA, 19 nt, Artificial Sequence
  Description of Artificial Sequence: Synthetic oligonucleotide
cuucugaggagggguaaug

SEQ ID NO: 279960 - RNA, 19 nt, Artificial Sequence
  Description of Artificial Sequence: Synthetic oligonucleotide
auaccccuuugguggugac

SEQ ID NO: 279961 - RNA, 19 nt, Artificial Sequence
  Description of Artificial Sequence: Synthetic oligonucleotide
gccuguacaauuugcugac

SEQ ID NO: 279962 - RNA, 19 nt, Artificial Sequence
  Description of Artificial Sequence: Synthetic oligonucleotide
ucaccagguuccucugacu

SEQ ID NO: 279963 - RNA, 19 nt, Artificial Sequence
  Description of Artificial Sequence: Synthetic oligonucleotide
uugcaccuaggaacuuaca

SEQ ID NO: 279964 - RNA, 19 nt, Artificial Sequence
  Description of Artificial Sequence: Synthetic oligonucleotide
auugccuaugccacaugca

SEQ ID NO: 279965 - RNA, 19 nt, Artificial Sequence
  Description of Artificial Sequence: Synthetic oligonucleotide
cauggcaucacuggcuaca

SEQ ID NO: 279966 - RNA, 19 nt, Artificial Sequence
  Description of Artificial Sequence: Synthetic oligonucleotide
acccaacuacaucuucacu

SEQ ID NO: 279967 - RNA, 19 nt, Artificial Sequence
  Description of Artificial Sequence: Synthetic oligonucleotide
caguuucuauccccucggc

SEQ ID NO: 279968 - RNA, 19 nt, Artificial Sequence
  Description of Artificial Sequence: Synthetic oligonucleotide
cuuuugugugauuucuagu

SEQ ID NO: 279969 - RNA, 19 nt, Artificial Sequence
  Description of Artificial Sequence: Synthetic oligonucleotide
acaugcaacugcugcuaaa

SEQ ID NO: 279970 - RNA, 19 nt, Artificial Sequence
  Description of Artificial Sequence: Synthetic oligonucleotide
agggguaaugcugcuuucu

SEQ ID NO: 279971 - RNA, 19 nt, Artificial Sequence
  Description of Artificial Sequence: Synthetic oligonucleotide
caccaauaaaagcagcagu

SEQ ID NO: 279972 - RNA, 19 nt, Artificial Sequence
  Description of Artificial Sequence: Synthetic oligonucleotide
cagauaagauuucucugua

SEQ ID NO: 279973 - RNA, 19 nt, Artificial Sequence
  Description of Artificial Sequence: Synthetic oligonucleotide
cacuaguccauguaccacu

SEQ ID NO: 279974 - RNA, 19 nt, Artificial Sequence
  Description of Artificial Sequence: Synthetic oligonucleotide
cuggugcaaucucaucuuc

SEQ ID NO: 279975 - RNA, 19 nt, Artificial Sequence
  Description of Artificial Sequence: Synthetic oligonucleotide
uccaguuaccaagcagaaa

SEQ ID NO: 279976 - RNA, 19 nt, Artificial Sequence
  Description of Artificial Sequence: Synthetic oligonucleotide
gcagauaguuacagggcag

SEQ ID NO: 279977 - RNA, 19 nt, Artificial Sequence
  Description of Artificial Sequence: Synthetic oligonucleotide
ucucuaggcuuaucaucau

SEQ ID NO: 279978 - RNA, 19 nt, Artificial Sequence
  Description of Artificial Sequence: Synthetic oligonucleotide
agagccugcacugguuacu

SEQ ID NO: 279979 - RNA, 19 nt, Artificial Sequence
  Description of Artificial Sequence: Synthetic oligonucleotide
cuaggcuuaucaucauuua

SEQ ID NO: 279980 - RNA, 19 nt, Artificial Sequence
  Description of Artificial Sequence: Synthetic oligonucleotide
cagugcaacgcugucuguc

SEQ ID NO: 279981 - RNA, 19 nt, Artificial Sequence
  Description of Artificial Sequence: Synthetic oligonucleotide
ccgucuaugaacaauaguu

SEQ ID NO: 279982 - RNA, 19 nt, Artificial Sequence
  Description of Artificial Sequence: Synthetic oligonucleotide
gaagaggaaugaacccgca

SEQ ID NO: 279983 - RNA, 19 nt, Artificial Sequence
  Description of Artificial Sequence: Synthetic oligonucleotide
  modified_base (5)..(5): a, c, u, g, unknown or other
cuucnguaaugccugugcu

SEQ ID NO: 279984 - RNA, 19 nt, Artificial Sequence
  Description of Artificial Sequence: Synthetic oligonucleotide
aaguuggcugacaguccug

SEQ ID NO: 279985 - RNA, 19 nt, Artificial Sequence
  Description of Artificial Sequence: Synthetic oligonucleotide
acauugccuaugccacaug

SEQ ID NO: 279986 - RNA, 19 nt, Artificial Sequence
  Description of Artificial Sequence: Synthetic oligonucleotide
cacagggguuuucagaugu

SEQ ID NO: 279987 - RNA, 19 nt, Artificial Sequence
  Description of Artificial Sequence: Synthetic oligonucleotide
gcauuagugaugugucaca

SEQ ID NO: 279988 - RNA, 19 nt, Artificial Sequence
  Description of Artificial Sequence: Synthetic oligonucleotide
ggguauucucucauuuggc

SEQ ID NO: 279989 - RNA, 19 nt, Artificial Sequence
  Description of Artificial Sequence: Synthetic oligonucleotide
ugacuccacauugccuaug

SEQ ID NO: 279990 - RNA, 19 nt, Artificial Sequence
  Description of Artificial Sequence: Synthetic oligonucleotide
cagagccugcacugguuac

SEQ ID NO: 279991 - RNA, 19 nt, Artificial Sequence
  Description of Artificial Sequence: Synthetic oligonucleotide
ccucaacuguacaugaaga

SEQ ID NO: 279992 - RNA, 19 nt, Artificial Sequence
  Description of Artificial Sequence: Synthetic oligonucleotide
accugcuacucugucuucu

SEQ ID NO: 279993 - RNA, 19 nt, Artificial Sequence
  Description of Artificial Sequence: Synthetic oligonucleotide
caaguuggcugacaguccu

SEQ ID NO: 279994 - RNA, 19 nt, Artificial Sequence
  Description of Artificial Sequence: Synthetic oligonucleotide
ccaaguuggcugacagucc

SEQ ID NO: 279995 - RNA, 19 nt, Artificial Sequence
  Description of Artificial Sequence: Synthetic oligonucleotide
cugauucuccuauaccccu

SEQ ID NO: 279996 - RNA, 19 nt, Artificial Sequence
  Description of Artificial Sequence: Synthetic oligonucleotide
acccgcagaguaugcagau

SEQ ID NO: 279997 - RNA, 19 nt, Artificial Sequence
  Description of Artificial Sequence: Synthetic oligonucleotide
ugggacccaacuacaucuu

SEQ ID NO: 279998 - RNA, 19 nt, Artificial Sequence
  Description of Artificial Sequence: Synthetic oligonucleotide
cuuugguggugacuccaca

SEQ ID NO: 279999 - RNA, 19 nt, Artificial Sequence
  Description of Artificial Sequence: Synthetic oligonucleotide
gguggugacuccacauugc

SEQ ID NO: 280000 - RNA, 19 nt, Artificial Sequence
  Description of Artificial Sequence: Synthetic oligonucleotide
agugacugucuugcaccag

SEQ ID NO: 280001 - RNA, 19 nt, Artificial Sequence
  Description of Artificial Sequence: Synthetic oligonucleotide
guugcucuugggaucccac

SEQ ID NO: 280002 - RNA, 19 nt, Artificial Sequence
  Description of Artificial Sequence: Synthetic oligonucleotide
cauuagcacuggguccagg

SEQ ID NO: 280003 - RNA, 19 nt, Artificial Sequence
  Description of Artificial Sequence: Synthetic oligonucleotide
caguugcuuccucuuugug

SEQ ID NO: 280004 - RNA, 19 nt, Artificial Sequence
  Description of Artificial Sequence: Synthetic oligonucleotide
gagcaguuucuauccccuc

SEQ ID NO: 280005 - RNA, 19 nt, Artificial Sequence
  Description of Artificial Sequence: Synthetic oligonucleotide
cuuccagugcaacgcuguc

SEQ ID NO: 280006 - RNA, 19 nt, Artificial Sequence
  Description of Artificial Sequence: Synthetic oligonucleotide
cuugggaucccacuccagu

SEQ ID NO: 280007 - RNA, 19 nt, Artificial Sequence
  Description of Artificial Sequence: Synthetic oligonucleotide
  modified_base (16)..(16): a, c, u, g, unknown or other
cugguuacugcaucancuu

SEQ ID NO: 280008 - RNA, 19 nt, Artificial Sequence
  Description of Artificial Sequence: Synthetic oligonucleotide
ccaaugaagcauccuucac

SEQ ID NO: 280009 - RNA, 19 nt, Artificial Sequence
  Description of Artificial Sequence: Synthetic oligonucleotide
caguuucuauccugaaaua

SEQ ID NO: 280010 - RNA, 19 nt, Artificial Sequence
  Description of Artificial Sequence: Synthetic oligonucleotide
cagucucagaauacugucu

SEQ ID NO: 280011 - RNA, 19 nt, Artificial Sequence
  Description of Artificial Sequence: Synthetic oligonucleotide
ggcgauaaaaccaguuucu

SEQ ID NO: 280012 - RNA, 19 nt, Artificial Sequence
  Description of Artificial Sequence: Synthetic oligonucleotide
cuguaacaacacguugcuc

SEQ ID NO: 280013 - RNA, 19 nt, Artificial Sequence
  Description of Artificial Sequence: Synthetic oligonucleotide
aucccaauuuccacuguua

SEQ ID NO: 280014 - RNA, 19 nt, Artificial Sequence
  Description of Artificial Sequence: Synthetic oligonucleotide
cagguuccucugacuuggg

SEQ ID NO: 280015 - RNA, 19 nt, Artificial Sequence
  Description of Artificial Sequence: Synthetic oligonucleotide
acuggacaagggagaucac

SEQ ID NO: 280016 - RNA, 19 nt, Artificial Sequence
  Description of Artificial Sequence: Synthetic oligonucleotide
gauucuccuauaccccuuu

SEQ ID NO: 280017 - RNA, 19 nt, Artificial Sequence
  Description of Artificial Sequence: Synthetic oligonucleotide
cuuuuagacaugugccuuu

SEQ ID NO: 280018 - RNA, 19 nt, Artificial Sequence
  Description of Artificial Sequence: Synthetic oligonucleotide
acggcuccaucacuuucaa

SEQ ID NO: 280019 - RNA, 19 nt, Artificial Sequence
  Description of Artificial Sequence: Synthetic oligonucleotide
ggcuuaucaucauuuacuu

SEQ ID NO: 280020 - RNA, 19 nt, Artificial Sequence
  Description of Artificial Sequence: Synthetic oligonucleotide
cugcaacuccauaauuugu

SEQ ID NO: 280021 - RNA, 19 nt, Artificial Sequence
  Description of Artificial Sequence: Synthetic oligonucleotide
guacauuaauaccgucuau

SEQ ID NO: 280022 - RNA, 19 nt, Artificial Sequence
  Description of Artificial Sequence: Synthetic oligonucleotide
cuggcgauaaaaccaguuu

SEQ ID NO: 280023 - RNA, 19 nt, Artificial Sequence
  Description of Artificial Sequence: Synthetic oligonucleotide
caauuugcugacccuucua

SEQ ID NO: 280024 - RNA, 19 nt, Artificial Sequence
  Description of Artificial Sequence: Synthetic oligonucleotide
ccuagaacucuucuacuaa

SEQ ID NO: 280025 - RNA, 19 nt, Artificial Sequence
  Description of Artificial Sequence: Synthetic oligonucleotide
guacaauuugcugacccuu

SEQ ID NO: 280026 - RNA, 19 nt, Artificial Sequence
  Description of Artificial Sequence: Synthetic oligonucleotide
cugcuacucugucuucuga

SEQ ID NO: 280027 - RNA, 19 nt, Artificial Sequence
  Description of Artificial Sequence: Synthetic oligonucleotide
  modified_base (8)..(8): a, c, u, g, unknown or other
gaacuccncuagaucucca

SEQ ID NO: 280028 - RNA, 19 nt, Artificial Sequence
  Description of Artificial Sequence: Synthetic oligonucleotide
auggcaucacuggcuacau

SEQ ID NO: 280029 - RNA, 19 nt, Artificial Sequence
  Description of Artificial Sequence: Synthetic oligonucleotide
cauuagugaugugucacau

SEQ ID NO: 280030 - RNA, 19 nt, Artificial Sequence
  Description of Artificial Sequence: Synthetic oligonucleotide
guaaugcugcuuucuguuu

SEQ ID NO: 280031 - RNA, 19 nt, Artificial Sequence
  Description of Artificial Sequence: Synthetic oligonucleotide
  modified_base (2)..(2): a, c, u, g, unknown or other
cncuagaucuccagaguuu

SEQ ID NO: 280032 - RNA, 19 nt, Artificial Sequence
  Description of Artificial Sequence: Synthetic oligonucleotide
guggagugacugucuugca

SEQ ID NO: 280033 - RNA, 19 nt, Artificial Sequence
  Description of Artificial Sequence: Synthetic oligonucleotide
acguugcucuugggauccc

SEQ ID NO: 280034 - RNA, 19 nt, Artificial Sequence
  Description of Artificial Sequence: Synthetic oligonucleotide
agcuucaguuugaauugua

SEQ ID NO: 280035 - RNA, 19 nt, Artificial Sequence
  Description of Artificial Sequence: Synthetic oligonucleotide
ggagggguaaugcugcuuu

SEQ ID NO: 280036 - RNA, 19 nt, Artificial Sequence
  Description of Artificial Sequence: Synthetic oligonucleotide
gggacccaacuacaucuuc

SEQ ID NO: 280037 - RNA, 19 nt, Artificial Sequence
  Description of Artificial Sequence: Synthetic oligonucleotide
uuccaacacagggguuuuc

SEQ ID NO: 280038 - RNA, 19 nt, Artificial Sequence
  Description of Artificial Sequence: Synthetic oligonucleotide
cacaugcaacugcugcuaa

SEQ ID NO: 280039 - RNA, 19 nt, Artificial Sequence
  Description of Artificial Sequence: Synthetic oligonucleotide
gaguaugaacagagcauuu

SEQ ID NO: 280040 - RNA, 19 nt, Artificial Sequence
  Description of Artificial Sequence: Synthetic oligonucleotide
ggcauuugacauuucuguu

SEQ ID NO: 280041 - RNA, 19 nt, Artificial Sequence
  Description of Artificial Sequence: Synthetic oligonucleotide
agcaguccccucaacugua

SEQ ID NO: 280042 - RNA, 19 nt, Artificial Sequence
  Description of Artificial Sequence: Synthetic oligonucleotide
cucaguugccaaguuggcu

SEQ ID NO: 280043 - RNA, 19 nt, Artificial Sequence
  Description of Artificial Sequence: Synthetic oligonucleotide
ccucggcuccagaaucagg

SEQ ID NO: 280044 - RNA, 19 nt, Artificial Sequence
  Description of Artificial Sequence: Synthetic oligonucleotide
ccuguaacaacacguugcu

SEQ ID NO: 280045 - RNA, 19 nt, Artificial Sequence
  Description of Artificial Sequence: Synthetic oligonucleotide
caucaucgggagcugugcu

SEQ ID NO: 280046 - RNA, 19 nt, Artificial Sequence
  Description of Artificial Sequence: Synthetic oligonucleotide
ccgugcuguuucuauucug

SEQ ID NO: 280047 - RNA, 19 nt, Artificial Sequence
  Description of Artificial Sequence: Synthetic oligonucleotide
cagcaguccccucaacugu

SEQ ID NO: 280048 - RNA, 19 nt, Artificial Sequence
  Description of Artificial Sequence: Synthetic oligonucleotide
  modified_base (8)..(8): a, c, u, g, unknown or other
cuucuucnguaaugccugu

SEQ ID NO: 280049 - RNA, 19 nt, Artificial Sequence
  Description of Artificial Sequence: Synthetic oligonucleotide
ccuguacaauuugcugacc

SEQ ID NO: 280050 - RNA, 19 nt, Artificial Sequence
  Description of Artificial Sequence: Synthetic oligonucleotide
gcgauaaaaccaguuucua

SEQ ID NO: 280051 - RNA, 19 nt, Artificial Sequence
  Description of Artificial Sequence: Synthetic oligonucleotide
cagcauuagcuucuugguu

SEQ ID NO: 280052 - RNA, 19 nt, Artificial Sequence
  Description of Artificial Sequence: Synthetic oligonucleotide
cagacaguauggagauggu

SEQ ID NO: 280053 - RNA, 19 nt, Artificial Sequence
  Description of Artificial Sequence: Synthetic oligonucleotide
accuggcgauaaaaccagu

SEQ ID NO: 280054 - RNA, 19 nt, Artificial Sequence
  Description of Artificial Sequence: Synthetic oligonucleotide
gcauccuuacucaggcaaa

SEQ ID NO: 280055 - RNA, 19 nt, Artificial Sequence
  Description of Artificial Sequence: Synthetic oligonucleotide
gugacuccacauugccuau

SEQ ID NO: 280056 - RNA, 19 nt, Artificial Sequence
  Description of Artificial Sequence: Synthetic oligonucleotide
gcuacucugucuucugauu

SEQ ID NO: 280057 - RNA, 19 nt, Artificial Sequence
  Description of Artificial Sequence: Synthetic oligonucleotide
cacagauccugcucuuauu

SEQ ID NO: 280058 - RNA, 19 nt, Artificial Sequence
  Description of Artificial Sequence: Synthetic oligonucleotide
  modified_base (2)..(2): a, c, u, g, unknown or other
cnguaaugccugugcuggu

SEQ ID NO: 280059 - RNA, 19 nt, Artificial Sequence
  Description of Artificial Sequence: Synthetic oligonucleotide
cgucuaugaacaauaguuu

SEQ ID NO: 280060 - RNA, 19 nt, Artificial Sequence
  Description of Artificial Sequence: Synthetic oligonucleotide
  modified_base (3)..(3): a, c, u, g, unknown or other
ccncuagaucuccagaguu

SEQ ID NO: 280061 - RNA, 19 nt, Artificial Sequence
  Description of Artificial Sequence: Synthetic oligonucleotide
cuucaccuguucaccugau

SEQ ID NO: 280062 - RNA, 19 nt, Artificial Sequence
  Description of Artificial Sequence: Synthetic oligonucleotide
cagaacagcugagcauccu

SEQ ID NO: 280063 - RNA, 19 nt, Artificial Sequence
  Description of Artificial Sequence: Synthetic oligonucleotide
ggaccaacuuguguccuau

SEQ ID NO: 280064 - RNA, 19 nt, Artificial Sequence
  Description of Artificial Sequence: Synthetic oligonucleotide
gcaccuguaacaacacguu

SEQ ID NO: 280065 - RNA, 19 nt, Artificial Sequence
  Description of Artificial Sequence: Synthetic oligonucleotide
ccuauaccccuuugguggu

SEQ ID NO: 280066 - RNA, 19 nt, Artificial Sequence
  Description of Artificial Sequence: Synthetic oligonucleotide
ccccucaacuguacaugaa

SEQ ID NO: 280067 - RNA, 19 nt, Artificial Sequence
  Description of Artificial Sequence: Synthetic oligonucleotide
gcaacucaucauauccauu

SEQ ID NO: 280068 - RNA, 19 nt, Artificial Sequence
  Description of Artificial Sequence: Synthetic oligonucleotide
cguugcucuugggauccca

SEQ ID NO: 280069 - RNA, 19 nt, Artificial Sequence
  Description of Artificial Sequence: Synthetic oligonucleotide
ccuaugccacaugcauucu

SEQ ID NO: 280070 - RNA, 19 nt, Artificial Sequence
  Description of Artificial Sequence: Synthetic oligonucleotide
  modified_base (1)..(1): a, c, u, g, unknown or other
nguaaugccugugcuggug

SEQ ID NO: 280071 - RNA, 19 nt, Artificial Sequence
  Description of Artificial Sequence: Synthetic oligonucleotide
aaagauaauuccuugcugc

SEQ ID NO: 280072 - RNA, 19 nt, Artificial Sequence
  Description of Artificial Sequence: Synthetic oligonucleotide
acaaagauaacccagauug

SEQ ID NO: 280073 - RNA, 19 nt, Artificial Sequence
  Description of Artificial Sequence: Synthetic oligonucleotide
uguaauucaauauacaaac

SEQ ID NO: 280074 - RNA, 19 nt, Artificial Sequence
  Description of Artificial Sequence: Synthetic oligonucleotide
uuauaacugauuuauaaag

SEQ ID NO: 280075 - RNA, 19 nt, Artificial Sequence
  Description of Artificial Sequence: Synthetic oligonucleotide
uguacaaagggcaaggcgg

SEQ ID NO: 280076 - RNA, 19 nt, Artificial Sequence
  Description of Artificial Sequence: Synthetic oligonucleotide
aguuacacaaaacuguacc

SEQ ID NO: 280077 - RNA, 19 nt, Artificial Sequence
  Description of Artificial Sequence: Synthetic oligonucleotide
ucuaguuuaaauaucuugc

SEQ ID NO: 280078 - RNA, 19 nt, Artificial Sequence
  Description of Artificial Sequence: Synthetic oligonucleotide
acuacuguaacuuaggaca

SEQ ID NO: 280079 - RNA, 19 nt, Artificial Sequence
  Description of Artificial Sequence: Synthetic oligonucleotide
auauuaguauuacagaauc

SEQ ID NO: 280080 - RNA, 19 nt, Artificial Sequence
  Description of Artificial Sequence: Synthetic oligonucleotide
aauaagauauucuaguuua

SEQ ID NO: 280081 - RNA, 19 nt, Artificial Sequence
  Description of Artificial Sequence: Synthetic oligonucleotide
cucacauauauauugaugc

SEQ ID NO: 280082 - RNA, 19 nt, Artificial Sequence
  Description of Artificial Sequence: Synthetic oligonucleotide
agaucaauguaguugauuc

SEQ ID NO: 280083 - RNA, 19 nt, Artificial Sequence
  Description of Artificial Sequence: Synthetic oligonucleotide
uaguauuacagaaucagag

SEQ ID NO: 280084 - RNA, 19 nt, Artificial Sequence
  Description of Artificial Sequence: Synthetic oligonucleotide
aguauuacagaaucagagc

SEQ ID NO: 280085 - RNA, 19 nt, Artificial Sequence
  Description of Artificial Sequence: Synthetic oligonucleotide
ugugcuuaaagauaauucc

SEQ ID NO: 280086 - RNA, 19 nt, Artificial Sequence
  Description of Artificial Sequence: Synthetic oligonucleotide
uuuuagaugaguauauaga

SEQ ID NO: 280087 - RNA, 19 nt, Artificial Sequence
  Description of Artificial Sequence: Synthetic oligonucleotide
agcaaaguaaagaaaaggc

SEQ ID NO: 280088 - RNA, 19 nt, Artificial Sequence
  Description of Artificial Sequence: Synthetic oligonucleotide
aacuacuguaacuuaggac

SEQ ID NO: 280089 - RNA, 19 nt, Artificial Sequence
  Description of Artificial Sequence: Synthetic oligonucleotide
uauucuaguuuaaauaucu

SEQ ID NO: 280090 - RNA, 19 nt, Artificial Sequence
  Description of Artificial Sequence: Synthetic oligonucleotide
uccacuauauagcacaaag

SEQ ID NO: 280091 - RNA, 19 nt, Artificial Sequence
  Description of Artificial Sequence: Synthetic oligonucleotide
uuuaaagacacccuagcgu

SEQ ID NO: 280092 - RNA, 19 nt, Artificial Sequence
  Description of Artificial Sequence: Synthetic oligonucleotide
aauguaguugauucuuuuc

SEQ ID NO: 280093 - RNA, 19 nt, Artificial Sequence
  Description of Artificial Sequence: Synthetic oligonucleotide
aauaucuugcuuacaaugg

SEQ ID NO: 280094 - RNA, 19 nt, Artificial Sequence
  Description of Artificial Sequence: Synthetic oligonucleotide
cuugcugcuaugaaaaucc

SEQ ID NO: 280095 - RNA, 19 nt, Artificial Sequence
  Description of Artificial Sequence: Synthetic oligonucleotide
aacuguaccagugaugcac

SEQ ID NO: 280096 - RNA, 19 nt, Artificial Sequence
  Description of Artificial Sequence: Synthetic oligonucleotide
cuuguacguauuuacaugg

SEQ ID NO: 280097 - RNA, 19 nt, Artificial Sequence
  Description of Artificial Sequence: Synthetic oligonucleotide
uaauccacuauauagcaca

SEQ ID NO: 280098 - RNA, 19 nt, Artificial Sequence
  Description of Artificial Sequence: Synthetic oligonucleotide
aaugcauaagugcagaaua

SEQ ID NO: 280099 - RNA, 19 nt, Artificial Sequence
  Description of Artificial Sequence: Synthetic oligonucleotide
ugagguacaaggcugaccu

SEQ ID NO: 280100 - RNA, 19 nt, Artificial Sequence
  Description of Artificial Sequence: Synthetic oligonucleotide
guuaagaaccaacugauac

SEQ ID NO: 280101 - RNA, 19 nt, Artificial Sequence
  Description of Artificial Sequence: Synthetic oligonucleotide
ugugauguaccaaaacugc

SEQ ID NO: 280102 - RNA, 19 nt, Artificial Sequence
  Description of Artificial Sequence: Synthetic oligonucleotide
ucuccuuagauuaggaggc

SEQ ID NO: 280103 - RNA, 19 nt, Artificial Sequence
  Description of Artificial Sequence: Synthetic oligonucleotide
uuuagaugaguauauagau

SEQ ID NO: 280104 - RNA, 19 nt, Artificial Sequence
  Description of Artificial Sequence: Synthetic oligonucleotide
uacguauuuacauggggcg

SEQ ID NO: 280105 - RNA, 19 nt, Artificial Sequence
  Description of Artificial Sequence: Synthetic oligonucleotide
agaauuauaauccacuaua

SEQ ID NO: 280106 - RNA, 19 nt, Artificial Sequence
  Description of Artificial Sequence: Synthetic oligonucleotide
aaagaacacuccuuaaugu

SEQ ID NO: 280107 - RNA, 19 nt, Artificial Sequence
  Description of Artificial Sequence: Synthetic oligonucleotide
aggagugacacucuuuccc

SEQ ID NO: 280108 - RNA, 19 nt, Artificial Sequence
  Description of Artificial Sequence: Synthetic oligonucleotide
gaggauguaaaccggaaag

SEQ ID NO: 280109 - RNA, 19 nt, Artificial Sequence
  Description of Artificial Sequence: Synthetic oligonucleotide
cuuacaauggacauuucug

SEQ ID NO: 280110 - RNA, 19 nt, Artificial Sequence
  Description of Artificial Sequence: Synthetic oligonucleotide
cucuccuuagauuaggagg

SEQ ID NO: 280111 - RNA, 19 nt, Artificial Sequence
  Description of Artificial Sequence: Synthetic oligonucleotide
uaagaauauaagcaaagua

SEQ ID NO: 280112 - RNA, 19 nt, Artificial Sequence
  Description of Artificial Sequence: Synthetic oligonucleotide
ugaucaaaagccauucuga

SEQ ID NO: 280113 - RNA, 19 nt, Artificial Sequence
  Description of Artificial Sequence: Synthetic oligonucleotide
aagugucuaaugcugaugu

SEQ ID NO: 280114 - RNA, 19 nt, Artificial Sequence
  Description of Artificial Sequence: Synthetic oligonucleotide
uauaauagccaacuacugu

SEQ ID NO: 280115 - RNA, 19 nt, Artificial Sequence
  Description of Artificial Sequence: Synthetic oligonucleotide
aagauauucuaguuuaaau

SEQ ID NO: 280116 - RNA, 19 nt, Artificial Sequence
  Description of Artificial Sequence: Synthetic oligonucleotide
uguaacuuaggacaggcau

SEQ ID NO: 280117 - RNA, 19 nt, Artificial Sequence
  Description of Artificial Sequence: Synthetic oligonucleotide
uuuaaaaguaccagaccca

SEQ ID NO: 280118 - RNA, 19 nt, Artificial Sequence
  Description of Artificial Sequence: Synthetic oligonucleotide
uuuuagugcaaccucacau

SEQ ID NO: 280119 - RNA, 19 nt, Artificial Sequence
  Description of Artificial Sequence: Synthetic oligonucleotide
gaugugugcacuuuccaag

SEQ ID NO: 280120 - RNA, 19 nt, Artificial Sequence
  Description of Artificial Sequence: Synthetic oligonucleotide
guacuauccauuuaaaauc

SEQ ID NO: 280121 - RNA, 19 nt, Artificial Sequence
  Description of Artificial Sequence: Synthetic oligonucleotide
aaagauaacccagauugug

SEQ ID NO: 280122 - RNA, 19 nt, Artificial Sequence
  Description of Artificial Sequence: Synthetic oligonucleotide
acacccaacccucaagucc

SEQ ID NO: 280123 - RNA, 19 nt, Artificial Sequence
  Description of Artificial Sequence: Synthetic oligonucleotide
aggagggugaacuauguag

SEQ ID NO: 280124 - RNA, 19 nt, Artificial Sequence
  Description of Artificial Sequence: Synthetic oligonucleotide
uucuaguuacgcaacagga

SEQ ID NO: 280125 - RNA, 19 nt, Artificial Sequence
  Description of Artificial Sequence: Synthetic oligonucleotide
uguuucaucaauagccgug

SEQ ID NO: 280126 - RNA, 19 nt, Artificial Sequence
  Description of Artificial Sequence: Synthetic oligonucleotide
uaaccauaaggacaggcug

SEQ ID NO: 280127 - RNA, 19 nt, Artificial Sequence
  Description of Artificial Sequence: Synthetic oligonucleotide
aauagcacauuguuuacuu

SEQ ID NO: 280128 - RNA, 19 nt, Artificial Sequence
  Description of Artificial Sequence: Synthetic oligonucleotide
uuaguauuacagaaucaga

SEQ ID NO: 280129 - RNA, 19 nt, Artificial Sequence
  Description of Artificial Sequence: Synthetic oligonucleotide
ucacaaucagcacuuaagu

SEQ ID NO: 280130 - RNA, 19 nt, Artificial Sequence
  Description of Artificial Sequence: Synthetic oligonucleotide
uuacaauggacauuucugu

SEQ ID NO: 280131 - RNA, 19 nt, Artificial Sequence
  Description of Artificial Sequence: Synthetic oligonucleotide
uauauugaugcuguuuugc

SEQ ID NO: 280132 - RNA, 19 nt, Artificial Sequence
  Description of Artificial Sequence: Synthetic oligonucleotide
acucccuuaccucuauucc

SEQ ID NO: 280133 - RNA, 19 nt, Artificial Sequence
  Description of Artificial Sequence: Synthetic oligonucleotide
ugauguaccaaaacugccu

SEQ ID NO: 280134 - RNA, 19 nt, Artificial Sequence
  Description of Artificial Sequence: Synthetic oligonucleotide
aaaauguggagugagcuau

SEQ ID NO: 280135 - RNA, 19 nt, Artificial Sequence
  Description of Artificial Sequence: Synthetic oligonucleotide
aaaguaaagaaaaggcaca

SEQ ID NO: 280136 - RNA, 19 nt, Artificial Sequence
  Description of Artificial Sequence: Synthetic oligonucleotide
uguaaaauguggagugagc

SEQ ID NO: 280137 - RNA, 19 nt, Artificial Sequence
  Description of Artificial Sequence: Synthetic oligonucleotide
uucaauauacaaacuuggu

SEQ ID NO: 280138 - RNA, 19 nt, Artificial Sequence
  Description of Artificial Sequence: Synthetic oligonucleotide
uuagaugaguauauagauc

SEQ ID NO: 280139 - RNA, 19 nt, Artificial Sequence
  Description of Artificial Sequence: Synthetic oligonucleotide
aacccuguaaccauaagga

SEQ ID NO: 280140 - RNA, 19 nt, Artificial Sequence
  Description of Artificial Sequence: Synthetic oligonucleotide
uacgguacuauccauuuaa

SEQ ID NO: 280141 - RNA, 19 nt, Artificial Sequence
  Description of Artificial Sequence: Synthetic oligonucleotide
cuuaguuccagucacucuc

SEQ ID NO: 280142 - RNA, 19 nt, Artificial Sequence
  Description of Artificial Sequence: Synthetic oligonucleotide
ugucuaaugcugaugugug

SEQ ID NO: 280143 - RNA, 19 nt, Artificial Sequence
  Description of Artificial Sequence: Synthetic oligonucleotide
uacuuuaaugcuuuacggu

SEQ ID NO: 280144 - RNA, 19 nt, Artificial Sequence
  Description of Artificial Sequence: Synthetic oligonucleotide
agugcagaauaagauauuc

SEQ ID NO: 280145 - RNA, 19 nt, Artificial Sequence
  Description of Artificial Sequence: Synthetic oligonucleotide
uccaaguguccaaaagagg

SEQ ID NO: 280146 - RNA, 19 nt, Artificial Sequence
  Description of Artificial Sequence: Synthetic oligonucleotide
aauucuacacagucccaug

SEQ ID NO: 280147 - RNA, 19 nt, Artificial Sequence
  Description of Artificial Sequence: Synthetic oligonucleotide
guucuaguuacgcaacagg

SEQ ID NO: 280148 - RNA, 19 nt, Artificial Sequence
  Description of Artificial Sequence: Synthetic oligonucleotide
acuuguacguauuuacaug

SEQ ID NO: 280149 - RNA, 19 nt, Artificial Sequence
  Description of Artificial Sequence: Synthetic oligonucleotide
gaggcgauggcuuuuguac

SEQ ID NO: 280150 - RNA, 19 nt, Artificial Sequence
  Description of Artificial Sequence: Synthetic oligonucleotide
uuaggcugucuucugaugu

SEQ ID NO: 280151 - RNA, 19 nt, Artificial Sequence
  Description of Artificial Sequence: Synthetic oligonucleotide
uguaagucagggugggcgg

SEQ ID NO: 280152 - RNA, 19 nt, Artificial Sequence
  Description of Artificial Sequence: Synthetic oligonucleotide
ugcacuuguacguauuuac

SEQ ID NO: 280153 - RNA, 19 nt, Artificial Sequence
  Description of Artificial Sequence: Synthetic oligonucleotide
agauaacccagauugugug

SEQ ID NO: 280154 - RNA, 19 nt, Artificial Sequence
  Description of Artificial Sequence: Synthetic oligonucleotide
ugcgcaugcgcauacaugu

SEQ ID NO: 280155 - RNA, 19 nt, Artificial Sequence
  Description of Artificial Sequence: Synthetic oligonucleotide
acuuuaaugcuuuacggua

SEQ ID NO: 280156 - RNA, 19 nt, Artificial Sequence
  Description of Artificial Sequence: Synthetic oligonucleotide
uuacgcaacaggaaaucca

SEQ ID NO: 280157 - RNA, 19 nt, Artificial Sequence
  Description of Artificial Sequence: Synthetic oligonucleotide
ucggacuugcugcugagag

SEQ ID NO: 280158 - RNA, 19 nt, Artificial Sequence
  Description of Artificial Sequence: Synthetic oligonucleotide
gacccaauagguuaauuuc

SEQ ID NO: 280159 - RNA, 19 nt, Artificial Sequence
  Description of Artificial Sequence: Synthetic oligonucleotide
cuuuaaugcuuuacgguac

SEQ ID NO: 280160 - RNA, 19 nt, Artificial Sequence
  Description of Artificial Sequence: Synthetic oligonucleotide
uaacuuaggacaggcaugc

SEQ ID NO: 280161 - RNA, 19 nt, Artificial Sequence
  Description of Artificial Sequence: Synthetic oligonucleotide
ugguuucacagaauuauaa

SEQ ID NO: 280162 - RNA, 19 nt, Artificial Sequence
  Description of Artificial Sequence: Synthetic oligonucleotide
ugcuuuacgguacuaucca

SEQ ID NO: 280163 - RNA, 19 nt, Artificial Sequence
  Description of Artificial Sequence: Synthetic oligonucleotide
cugugcuuaaagauaauuc

SEQ ID NO: 280164 - RNA, 19 nt, Artificial Sequence
  Description of Artificial Sequence: Synthetic oligonucleotide
auguaagucagggugggcg

SEQ ID NO: 280165 - RNA, 19 nt, Artificial Sequence
  Description of Artificial Sequence: Synthetic oligonucleotide
uggcaauucgaagugaggc

SEQ ID NO: 280166 - RNA, 19 nt, Artificial Sequence
  Description of Artificial Sequence: Synthetic oligonucleotide
aaguuaagaaccaacugau

SEQ ID NO: 280167 - RNA, 19 nt, Artificial Sequence
  Description of Artificial Sequence: Synthetic oligonucleotide
ucuaguuacgcaacaggaa

SEQ ID NO: 280168 - RNA, 19 nt, Artificial Sequence
  Description of Artificial Sequence: Synthetic oligonucleotide
augcuuuacgguacuaucc

SEQ ID NO: 280169 - RNA, 19 nt, Artificial Sequence
  Description of Artificial Sequence: Synthetic oligonucleotide
uuguacguauuuacauggg

SEQ ID NO: 280170 - RNA, 19 nt, Artificial Sequence
  Description of Artificial Sequence: Synthetic oligonucleotide
ugcgcauacaugugcaugc

SEQ ID NO: 280171 - RNA, 19 nt, Artificial Sequence
  Description of Artificial Sequence: Synthetic oligonucleotide
uuuaaugcuuuacgguacu

SEQ ID NO: 280172 - RNA, 19 nt, Artificial Sequence
  Description of Artificial Sequence: Synthetic oligonucleotide
uaacaaaaguauuuauaau

SEQ ID NO: 280173 - RNA, 19 nt, Artificial Sequence
  Description of Artificial Sequence: Synthetic oligonucleotide
gaugacuuguuaauuuccc

SEQ ID NO: 280174 - RNA, 19 nt, Artificial Sequence
  Description of Artificial Sequence: Synthetic oligonucleotide
agaauaagauauucuaguu

SEQ ID NO: 280175 - RNA, 19 nt, Artificial Sequence
  Description of Artificial Sequence: Synthetic oligonucleotide
cuucccuacuuccacaccc

SEQ ID NO: 280176 - RNA, 19 nt, Artificial Sequence
  Description of Artificial Sequence: Synthetic oligonucleotide
guuucaucaauagccgugg

SEQ ID NO: 280177 - RNA, 19 nt, Artificial Sequence
  Description of Artificial Sequence: Synthetic oligonucleotide
ucacauauauauugaugcu

SEQ ID NO: 280178 - RNA, 19 nt, Artificial Sequence
  Description of Artificial Sequence: Synthetic oligonucleotide
agaauauaagcaaaguaaa

SEQ ID NO: 280179 - RNA, 19 nt, Artificial Sequence
  Description of Artificial Sequence: Synthetic oligonucleotide
auauugaugcuguuuugcu

SEQ ID NO: 280180 - RNA, 19 nt, Artificial Sequence
  Description of Artificial Sequence: Synthetic oligonucleotide
ugcuuaaagauaauuccuu

SEQ ID NO: 280181 - RNA, 19 nt, Artificial Sequence
  Description of Artificial Sequence: Synthetic oligonucleotide
gcuuuacaccauuagaucc

SEQ ID NO: 280182 - RNA, 19 nt, Artificial Sequence
  Description of Artificial Sequence: Synthetic oligonucleotide
uaucaacucccuuaccucu

SEQ ID NO: 280183 - RNA, 19 nt, Artificial Sequence
  Description of Artificial Sequence: Synthetic oligonucleotide
gaugaguauauagaucaac

SEQ ID NO: 280184 - RNA, 19 nt, Artificial Sequence
  Description of Artificial Sequence: Synthetic oligonucleotide
gaaucagagcuguacauaa

SEQ ID NO: 280185 - RNA, 19 nt, Artificial Sequence
  Description of Artificial Sequence: Synthetic oligonucleotide
ugcauaagugcagaauaag

SEQ ID NO: 280186 - RNA, 19 nt, Artificial Sequence
  Description of Artificial Sequence: Synthetic oligonucleotide
aguuauugucaauccagca

SEQ ID NO: 280187 - RNA, 19 nt, Artificial Sequence
  Description of Artificial Sequence: Synthetic oligonucleotide
aacuaaugcauaagugcag

SEQ ID NO: 280188 - RNA, 19 nt, Artificial Sequence
  Description of Artificial Sequence: Synthetic oligonucleotide
uguagggauccuuagugaa

SEQ ID NO: 280189 - RNA, 19 nt, Artificial Sequence
  Description of Artificial Sequence: Synthetic oligonucleotide
ucuguucuaguuacgcaac

SEQ ID NO: 280190 - RNA, 19 nt, Artificial Sequence
  Description of Artificial Sequence: Synthetic oligonucleotide
ugcuccacucuucuggacc

SEQ ID NO: 280191 - RNA, 19 nt, Artificial Sequence
  Description of Artificial Sequence: Synthetic oligonucleotide
gaagacauagucaguagga

SEQ ID NO: 280192 - RNA, 19 nt, Artificial Sequence
  Description of Artificial Sequence: Synthetic oligonucleotide
uuaguuccagucacucucc

SEQ ID NO: 280193 - RNA, 19 nt, Artificial Sequence
  Description of Artificial Sequence: Synthetic oligonucleotide
uguacucuguuucaucaau

SEQ ID NO: 280194 - RNA, 19 nt, Artificial Sequence
  Description of Artificial Sequence: Synthetic oligonucleotide
uuuacgguacuauccauuu

SEQ ID NO: 280195 - RNA, 19 nt, Artificial Sequence
  Description of Artificial Sequence: Synthetic oligonucleotide
uuaaaaguaccagacccaa

SEQ ID NO: 280196 - RNA, 19 nt, Artificial Sequence
  Description of Artificial Sequence: Synthetic oligonucleotide
cacauauauauugaugcug

SEQ ID NO: 280197 - RNA, 19 nt, Artificial Sequence
  Description of Artificial Sequence: Synthetic oligonucleotide
acuauguagaccagaugac

SEQ ID NO: 280198 - RNA, 19 nt, Artificial Sequence
  Description of Artificial Sequence: Synthetic oligonucleotide
ugacuuguuaauuucccua

SEQ ID NO: 280199 - RNA, 19 nt, Artificial Sequence
  Description of Artificial Sequence: Synthetic oligonucleotide
aaccggaaagggccggugg

SEQ ID NO: 280200 - RNA, 19 nt, Artificial Sequence
  Description of Artificial Sequence: Synthetic oligonucleotide
augaguauauagaucaaca

SEQ ID NO: 280201 - RNA, 19 nt, Artificial Sequence
  Description of Artificial Sequence: Synthetic oligonucleotide
aagauaacccagauugugu

SEQ ID NO: 280202 - RNA, 19 nt, Artificial Sequence
  Description of Artificial Sequence: Synthetic oligonucleotide
auauauugaugcuguuuug

SEQ ID NO: 280203 - RNA, 19 nt, Artificial Sequence
  Description of Artificial Sequence: Synthetic oligonucleotide
uguucuaguuacgcaacag

SEQ ID NO: 280204 - RNA, 19 nt, Artificial Sequence
  Description of Artificial Sequence: Synthetic oligonucleotide
aguuacgcaacaggaaauc

SEQ ID NO: 280205 - RNA, 19 nt, Artificial Sequence
  Description of Artificial Sequence: Synthetic oligonucleotide
uacgcaacaggaaauccau

SEQ ID NO: 280206 - RNA, 19 nt, Artificial Sequence
  Description of Artificial Sequence: Synthetic oligonucleotide
cuacuguaacuuaggacag

SEQ ID NO: 280207 - RNA, 19 nt, Artificial Sequence
  Description of Artificial Sequence: Synthetic oligonucleotide
acagaauuauaauccacua

SEQ ID NO: 280208 - RNA, 19 nt, Artificial Sequence
  Description of Artificial Sequence: Synthetic oligonucleotide
cccaauaccaaauuggcuc

SEQ ID NO: 280209 - RNA, 19 nt, Artificial Sequence
  Description of Artificial Sequence: Synthetic oligonucleotide
uacaugugcaugcgugugc

SEQ ID NO: 280210 - RNA, 19 nt, Artificial Sequence
  Description of Artificial Sequence: Synthetic oligonucleotide
uugcuuacaauggacauuu

SEQ ID NO: 280211 - RNA, 19 nt, Artificial Sequence
  Description of Artificial Sequence: Synthetic oligonucleotide
uuuacauggggcggaaugu

SEQ ID NO: 280212 - RNA, 19 nt, Artificial Sequence
  Description of Artificial Sequence: Synthetic oligonucleotide
uuuacaaguuaagaaccaa

SEQ ID NO: 280213 - RNA, 19 nt, Artificial Sequence
  Description of Artificial Sequence: Synthetic oligonucleotide
aauguggagugagcuauug

SEQ ID NO: 280214 - RNA, 19 nt, Artificial Sequence
  Description of Artificial Sequence: Synthetic oligonucleotide
uguacaaauuacugcuaaa

SEQ ID NO: 280215 - RNA, 19 nt, Artificial Sequence
  Description of Artificial Sequence: Synthetic oligonucleotide
uauguacaaauuacugcua

SEQ ID NO: 280216 - RNA, 19 nt, Artificial Sequence
  Description of Artificial Sequence: Synthetic oligonucleotide
cuaucaacucccuuaccuc

SEQ ID NO: 280217 - RNA, 19 nt, Artificial Sequence
  Description of Artificial Sequence: Synthetic oligonucleotide
auucgaagugaggcgaugg

SEQ ID NO: 280218 - RNA, 19 nt, Artificial Sequence
  Description of Artificial Sequence: Synthetic oligonucleotide
augcgugugcacauguugc

SEQ ID NO: 280219 - RNA, 19 nt, Artificial Sequence
  Description of Artificial Sequence: Synthetic oligonucleotide
uccucugugcuuaaagaua

SEQ ID NO: 280220 - RNA, 19 nt, Artificial Sequence
  Description of Artificial Sequence: Synthetic oligonucleotide
cuaguuacgcaacaggaaa

SEQ ID NO: 280221 - RNA, 19 nt, Artificial Sequence
  Description of Artificial Sequence: Synthetic oligonucleotide
uucgaagugaggcgauggc

SEQ ID NO: 280222 - RNA, 19 nt, Artificial Sequence
  Description of Artificial Sequence: Synthetic oligonucleotide
aauagccguggggaggagg

SEQ ID NO: 280223 - RNA, 19 nt, Artificial Sequence
  Description of Artificial Sequence: Synthetic oligonucleotide
aacccagauugugugugcg

SEQ ID NO: 280224 - RNA, 19 nt, Artificial Sequence
  Description of Artificial Sequence: Synthetic oligonucleotide
aaccaacugauacauccuu

SEQ ID NO: 280225 - RNA, 19 nt, Artificial Sequence
  Description of Artificial Sequence: Synthetic oligonucleotide
guaacuuaggacaggcaug

SEQ ID NO: 280226 - RNA, 19 nt, Artificial Sequence
  Description of Artificial Sequence: Synthetic oligonucleotide
gguacuauccauuuaaaau

SEQ ID NO: 280227 - RNA, 19 nt, Artificial Sequence
  Description of Artificial Sequence: Synthetic oligonucleotide
aucaauagccguggggagg

SEQ ID NO: 280228 - RNA, 19 nt, Artificial Sequence
  Description of Artificial Sequence: Synthetic oligonucleotide
cagaauaagauauucuagu

SEQ ID NO: 280229 - RNA, 19 nt, Artificial Sequence
  Description of Artificial Sequence: Synthetic oligonucleotide
ccagugaugcacuuguacg

SEQ ID NO: 280230 - RNA, 19 nt, Artificial Sequence
  Description of Artificial Sequence: Synthetic oligonucleotide
agcguaggucuguagcaac

SEQ ID NO: 280231 - RNA, 19 nt, Artificial Sequence
  Description of Artificial Sequence: Synthetic oligonucleotide
acuaaugcauaagugcaga

SEQ ID NO: 280232 - RNA, 19 nt, Artificial Sequence
  Description of Artificial Sequence: Synthetic oligonucleotide
cauaagaccaaauacuuuu

SEQ ID NO: 280233 - RNA, 19 nt, Artificial Sequence
  Description of Artificial Sequence: Synthetic oligonucleotide
auuagauccaaguguccaa

SEQ ID NO: 280234 - RNA, 19 nt, Artificial Sequence
  Description of Artificial Sequence: Synthetic oligonucleotide
aaggcggcauccccuaaug

SEQ ID NO: 280235 - RNA, 19 nt, Artificial Sequence
  Description of Artificial Sequence: Synthetic oligonucleotide
cacuauauagcacaaagau

SEQ ID NO: 280236 - RNA, 19 nt, Artificial Sequence
  Description of Artificial Sequence: Synthetic oligonucleotide
cacccaugugggcugaucg

SEQ ID NO: 280237 - RNA, 19 nt, Artificial Sequence
  Description of Artificial Sequence: Synthetic oligonucleotide
uaaugcauaagugcagaau

SEQ ID NO: 280238 - RNA, 19 nt, Artificial Sequence
  Description of Artificial Sequence: Synthetic oligonucleotide
uaguugauucuuuucugau

SEQ ID NO: 280239 - RNA, 19 nt, Artificial Sequence
  Description of Artificial Sequence: Synthetic oligonucleotide
cugaguuacacaaaacugu

SEQ ID NO: 280240 - RNA, 19 nt, Artificial Sequence
  Description of Artificial Sequence: Synthetic oligonucleotide
auuuacaaguuaagaacca

SEQ ID NO: 280241 - RNA, 19 nt, Artificial Sequence
  Description of Artificial Sequence: Synthetic oligonucleotide
uuaccucuauuccuagaaa

SEQ ID NO: 280242 - RNA, 19 nt, Artificial Sequence
  Description of Artificial Sequence: Synthetic oligonucleotide
aaucccuccgugcagccuu

SEQ ID NO: 280243 - RNA, 19 nt, Artificial Sequence
  Description of Artificial Sequence: Synthetic oligonucleotide
caauagguuaauuucaaau

SEQ ID NO: 280244 - RNA, 19 nt, Artificial Sequence
  Description of Artificial Sequence: Synthetic oligonucleotide
acccagauugugugugcgc

SEQ ID NO: 280245 - RNA, 19 nt, Artificial Sequence
  Description of Artificial Sequence: Synthetic oligonucleotide
ugaugaagguucagugccu

SEQ ID NO: 280246 - RNA, 19 nt, Artificial Sequence
  Description of Artificial Sequence: Synthetic oligonucleotide
aucggccccaagcagagcu

SEQ ID NO: 280247 - RNA, 19 nt, Artificial Sequence
  Description of Artificial Sequence: Synthetic oligonucleotide
gcagaauaagauauucuag

SEQ ID NO: 280248 - RNA, 19 nt, Artificial Sequence
  Description of Artificial Sequence: Synthetic oligonucleotide
acguauuuacauggggcgg

SEQ ID NO: 280249 - RNA, 19 nt, Artificial Sequence
  Description of Artificial Sequence: Synthetic oligonucleotide
guccaacugaguuacacaa

SEQ ID NO: 280250 - RNA, 19 nt, Artificial Sequence
  Description of Artificial Sequence: Synthetic oligonucleotide
uugguuucacagaauuaua

SEQ ID NO: 280251 - RNA, 19 nt, Artificial Sequence
  Description of Artificial Sequence: Synthetic oligonucleotide
ccuaaugcugauguuaacc

SEQ ID NO: 280252 - RNA, 19 nt, Artificial Sequence
  Description of Artificial Sequence: Synthetic oligonucleotide
cucaugccgccuuggaggg

SEQ ID NO: 280253 - RNA, 19 nt, Artificial Sequence
  Description of Artificial Sequence: Synthetic oligonucleotide
aauucgaagugaggcgaug

SEQ ID NO: 280254 - RNA, 19 nt, Artificial Sequence
  Description of Artificial Sequence: Synthetic oligonucleotide
caucaauagccguggggag

SEQ ID NO: 280255 - RNA, 19 nt, Artificial Sequence
  Description of Artificial Sequence: Synthetic oligonucleotide
acuuaggacaggcaugcua

SEQ ID NO: 280256 - RNA, 19 nt, Artificial Sequence
  Description of Artificial Sequence: Synthetic oligonucleotide
guuacgcaacaggaaaucc

SEQ ID NO: 280257 - RNA, 19 nt, Artificial Sequence
  Description of Artificial Sequence: Synthetic oligonucleotide
gugauguaccaaaacugcc

SEQ ID NO: 280258 - RNA, 19 nt, Artificial Sequence
  Description of Artificial Sequence: Synthetic oligonucleotide
cuaccaagccaccgggccg

SEQ ID NO: 280259 - RNA, 19 nt, Artificial Sequence
  Description of Artificial Sequence: Synthetic oligonucleotide
ccaacuacuguaacuuagg

SEQ ID NO: 280260 - RNA, 19 nt, Artificial Sequence
  Description of Artificial Sequence: Synthetic oligonucleotide
gaaaauccgccuucuucuc

SEQ ID NO: 280261 - RNA, 19 nt, Artificial Sequence
  Description of Artificial Sequence: Synthetic oligonucleotide
uggaggauguaaaccggaa

SEQ ID NO: 280262 - RNA, 19 nt, Artificial Sequence
  Description of Artificial Sequence: Synthetic oligonucleotide
guaaaauguggagugagcu

SEQ ID NO: 280263 - RNA, 19 nt, Artificial Sequence
  Description of Artificial Sequence: Synthetic oligonucleotide
aaaauauguuuuagugcaa

SEQ ID NO: 280264 - RNA, 19 nt, Artificial Sequence
  Description of Artificial Sequence: Synthetic oligonucleotide
agugucuaaugcugaugug

SEQ ID NO: 280265 - RNA, 19 nt, Artificial Sequence
  Description of Artificial Sequence: Synthetic oligonucleotide
aauccucuccuuagauuag

SEQ ID NO: 280266 - RNA, 19 nt, Artificial Sequence
  Description of Artificial Sequence: Synthetic oligonucleotide
cuagcguaggucuguagca

SEQ ID NO: 280267 - RNA, 19 nt, Artificial Sequence
  Description of Artificial Sequence: Synthetic oligonucleotide
uccuuagauuaggaggccc

SEQ ID NO: 280268 - RNA, 19 nt, Artificial Sequence
  Description of Artificial Sequence: Synthetic oligonucleotide
uggggauaggagcucggac

SEQ ID NO: 280269 - RNA, 19 nt, Artificial Sequence
  Description of Artificial Sequence: Synthetic oligonucleotide
acccaugugggcugaucgg

SEQ ID NO: 280270 - RNA, 19 nt, Artificial Sequence
  Description of Artificial Sequence: Synthetic oligonucleotide
cauuagauccaagugucca

SEQ ID NO: 280271 - RNA, 19 nt, Artificial Sequence
  Description of Artificial Sequence: Synthetic oligonucleotide
acugccuaccaagccaccg

SEQ ID NO: 280272 - RNA, 19 nt, Artificial Sequence
  Description of Artificial Sequence: Synthetic oligonucleotide
uaggaaccugagguaaucc

SEQ ID NO: 280273 - RNA, 19 nt, Artificial Sequence
  Description of Artificial Sequence: Synthetic oligonucleotide
agcaaccuaguguccaacu

SEQ ID NO: 280274 - RNA, 19 nt, Artificial Sequence
  Description of Artificial Sequence: Synthetic oligonucleotide
cagccuuaguuccagucac

SEQ ID NO: 280275 - RNA, 19 nt, Artificial Sequence
  Description of Artificial Sequence: Synthetic oligonucleotide
gucuaaugcugaugugugc

SEQ ID NO: 280276 - RNA, 19 nt, Artificial Sequence
  Description of Artificial Sequence: Synthetic oligonucleotide
guagggauccuuagugaag

SEQ ID NO: 280277 - RNA, 19 nt, Artificial Sequence
  Description of Artificial Sequence: Synthetic oligonucleotide
accucacauauauauugau

SEQ ID NO: 280278 - RNA, 19 nt, Artificial Sequence
  Description of Artificial Sequence: Synthetic oligonucleotide
gacacccuagcguaggucu

SEQ ID NO: 280279 - RNA, 19 nt, Artificial Sequence
  Description of Artificial Sequence: Synthetic oligonucleotide
uuuacaccauuagauccaa

SEQ ID NO: 280280 - RNA, 19 nt, Artificial Sequence
  Description of Artificial Sequence: Synthetic oligonucleotide
caaccuaguguccaacuga

SEQ ID NO: 280281 - RNA, 19 nt, Artificial Sequence
  Description of Artificial Sequence: Synthetic oligonucleotide
gaauuauaauccacuauau

SEQ ID NO: 280282 - RNA, 19 nt, Artificial Sequence
  Description of Artificial Sequence: Synthetic oligonucleotide
gaguuacacaaaacuguac

SEQ ID NO: 280283 - RNA, 19 nt, Artificial Sequence
  Description of Artificial Sequence: Synthetic oligonucleotide
uccccuaaugcugauguua

SEQ ID NO: 280284 - RNA, 19 nt, Artificial Sequence
  Description of Artificial Sequence: Synthetic oligonucleotide
ccucacauauauauugaug

SEQ ID NO: 280285 - RNA, 19 nt, Artificial Sequence
  Description of Artificial Sequence: Synthetic oligonucleotide
cuuaggacaggcaugcuau

SEQ ID NO: 280286 - RNA, 19 nt, Artificial Sequence
  Description of Artificial Sequence: Synthetic oligonucleotide
ccuagcguaggucuguagc

SEQ ID NO: 280287 - RNA, 19 nt, Artificial Sequence
  Description of Artificial Sequence: Synthetic oligonucleotide
accgggccggccgauaacc

SEQ ID NO: 280288 - RNA, 19 nt, Artificial Sequence
  Description of Artificial Sequence: Synthetic oligonucleotide
agaccagaugacugcaaaa

SEQ ID NO: 280289 - RNA, 19 nt, Artificial Sequence
  Description of Artificial Sequence: Synthetic oligonucleotide
ccuuagauuaggaggcccc

SEQ ID NO: 280290 - RNA, 19 nt, Artificial Sequence
  Description of Artificial Sequence: Synthetic oligonucleotide
auccucuccuuagauuagg

SEQ ID NO: 280291 - RNA, 19 nt, Artificial Sequence
  Description of Artificial Sequence: Synthetic oligonucleotide
caccauuagauccaagugu

SEQ ID NO: 280292 - RNA, 19 nt, Artificial Sequence
  Description of Artificial Sequence: Synthetic oligonucleotide
aauccacuauauagcacaa

SEQ ID NO: 280293 - RNA, 19 nt, Artificial Sequence
  Description of Artificial Sequence: Synthetic oligonucleotide
guggcaauucgaagugagg

SEQ ID NO: 280294 - RNA, 19 nt, Artificial Sequence
  Description of Artificial Sequence: Synthetic oligonucleotide
guaaaccggaaagggccgg

SEQ ID NO: 280295 - RNA, 19 nt, Artificial Sequence
  Description of Artificial Sequence: Synthetic oligonucleotide
uagauccaaguguccaaaa

SEQ ID NO: 280296 - RNA, 19 nt, Artificial Sequence
  Description of Artificial Sequence: Synthetic oligonucleotide
uuguuucucaugccgccuu

SEQ ID NO: 280297 - RNA, 19 nt, Artificial Sequence
  Description of Artificial Sequence: Synthetic oligonucleotide
aauccaugcuucacauaga

SEQ ID NO: 280298 - RNA, 19 nt, Artificial Sequence
  Description of Artificial Sequence: Synthetic oligonucleotide
uccagaugacuuguuaauu

SEQ ID NO: 280299 - RNA, 19 nt, Artificial Sequence
  Description of Artificial Sequence: Synthetic oligonucleotide
ucaacucccuuaccucuau

SEQ ID NO: 280300 - RNA, 19 nt, Artificial Sequence
  Description of Artificial Sequence: Synthetic oligonucleotide
aaaagccauucugaagguu

SEQ ID NO: 280301 - RNA, 19 nt, Artificial Sequence
  Description of Artificial Sequence: Synthetic oligonucleotide
cuaguguccaacugaguua

SEQ ID NO: 280302 - RNA, 19 nt, Artificial Sequence
  Description of Artificial Sequence: Synthetic oligonucleotide
cauuuaggcugucuucuga

SEQ ID NO: 280303 - RNA, 19 nt, Artificial Sequence
  Description of Artificial Sequence: Synthetic oligonucleotide
ucaggcccgcuaaaguguc

SEQ ID NO: 280304 - RNA, 19 nt, Artificial Sequence
  Description of Artificial Sequence: Synthetic oligonucleotide
ugaggcgauggcuuuugua

SEQ ID NO: 280305 - RNA, 19 nt, Artificial Sequence
  Description of Artificial Sequence: Synthetic oligonucleotide
uuacgguacuauccauuua

SEQ ID NO: 280306 - RNA, 19 nt, Artificial Sequence
  Description of Artificial Sequence: Synthetic oligonucleotide
guguagggauccuuaguga

SEQ ID NO: 280307 - RNA, 19 nt, Artificial Sequence
  Description of Artificial Sequence: Synthetic oligonucleotide
cacauaagaccaaauacuu

SEQ ID NO: 280308 - RNA, 19 nt, Artificial Sequence
  Description of Artificial Sequence: Synthetic oligonucleotide
ccgcuaaagugucuaaugc

SEQ ID NO: 280309 - RNA, 19 nt, Artificial Sequence
  Description of Artificial Sequence: Synthetic oligonucleotide
gcuaucaacucccuuaccu

SEQ ID NO: 280310 - RNA, 19 nt, Artificial Sequence
  Description of Artificial Sequence: Synthetic oligonucleotide
aaaccggaaagggccggug

SEQ ID NO: 280311 - RNA, 19 nt, Artificial Sequence
  Description of Artificial Sequence: Synthetic oligonucleotide
uacauggggcggaauguuu

SEQ ID NO: 280312 - RNA, 19 nt, Artificial Sequence
  Description of Artificial Sequence: Synthetic oligonucleotide
cucacaauagcacauuguu

SEQ ID NO: 280313 - RNA, 19 nt, Artificial Sequence
  Description of Artificial Sequence: Synthetic oligonucleotide
guggguggaggauguaaac

SEQ ID NO: 280314 - RNA, 19 nt, Artificial Sequence
  Description of Artificial Sequence: Synthetic oligonucleotide
cuguagcaaccuagugucc

SEQ ID NO: 280315 - RNA, 19 nt, Artificial Sequence
  Description of Artificial Sequence: Synthetic oligonucleotide
ccaaauuggcucuguuugc

SEQ ID NO: 280316 - RNA, 19 nt, Artificial Sequence
  Description of Artificial Sequence: Synthetic oligonucleotide
gagcuauugcagucuguga

SEQ ID NO: 280317 - RNA, 19 nt, Artificial Sequence
  Description of Artificial Sequence: Synthetic oligonucleotide
uguucccucucuguggcau

SEQ ID NO: 280318 - RNA, 19 nt, Artificial Sequence
  Description of Artificial Sequence: Synthetic oligonucleotide
uguggcauuuaggcugucu

SEQ ID NO: 280319 - RNA, 19 nt, Artificial Sequence
  Description of Artificial Sequence: Synthetic oligonucleotide
gcucuguuugcagauacug

SEQ ID NO: 280320 - RNA, 19 nt, Artificial Sequence
  Description of Artificial Sequence: Synthetic oligonucleotide
gcaaccuaguguccaacug

SEQ ID NO: 280321 - RNA, 19 nt, Artificial Sequence
  Description of Artificial Sequence: Synthetic oligonucleotide
gugucuaaugcugaugugu

SEQ ID NO: 280322 - RNA, 19 nt, Artificial Sequence
  Description of Artificial Sequence: Synthetic oligonucleotide
cuaaugcauaagugcagaa

SEQ ID NO: 280323 - RNA, 19 nt, Artificial Sequence
  Description of Artificial Sequence: Synthetic oligonucleotide
caggaaauccaugcuucac

SEQ ID NO: 280324 - RNA, 19 nt, Artificial Sequence
  Description of Artificial Sequence: Synthetic oligonucleotide
auaccaaauuggcucuguu

SEQ ID NO: 280325 - RNA, 19 nt, Artificial Sequence
  Description of Artificial Sequence: Synthetic oligonucleotide
ccguagagacugaaguagg

SEQ ID NO: 280326 - RNA, 19 nt, Artificial Sequence
  Description of Artificial Sequence: Synthetic oligonucleotide
cccuguaaccauaaggaca

SEQ ID NO: 280327 - RNA, 19 nt, Artificial Sequence
  Description of Artificial Sequence: Synthetic oligonucleotide
agugaggcgauggcuuuug

SEQ ID NO: 280328 - RNA, 19 nt, Artificial Sequence
  Description of Artificial Sequence: Synthetic oligonucleotide
gcacuuaaguuauugucaa

SEQ ID NO: 280329 - RNA, 19 nt, Artificial Sequence
  Description of Artificial Sequence: Synthetic oligonucleotide
acauaagaccaaauacuuu

SEQ ID NO: 280330 - RNA, 19 nt, Artificial Sequence
  Description of Artificial Sequence: Synthetic oligonucleotide
agcacauuguuuacuuuaa

SEQ ID NO: 280331 - RNA, 19 nt, Artificial Sequence
  Description of Artificial Sequence: Synthetic oligonucleotide
gugaacuauguagaccaga

SEQ ID NO: 280332 - RNA, 19 nt, Artificial Sequence
  Description of Artificial Sequence: Synthetic oligonucleotide
cuuagugaaggccuccccu

SEQ ID NO: 280333 - RNA, 19 nt, Artificial Sequence
  Description of Artificial Sequence: Synthetic oligonucleotide
gauccuuagugaaggccuc

SEQ ID NO: 280334 - RNA, 19 nt, Artificial Sequence
  Description of Artificial Sequence: Synthetic oligonucleotide
gcugagaguggaguggaag

SEQ ID NO: 280335 - RNA, 19 nt, Artificial Sequence
  Description of Artificial Sequence: Synthetic oligonucleotide
caagugcaaucccuccgug

SEQ ID NO: 280336 - RNA, 19 nt, Artificial Sequence
  Description of Artificial Sequence: Synthetic oligonucleotide
acgugaggggcuuguuucu

SEQ ID NO: 280337 - RNA, 19 nt, Artificial Sequence
  Description of Artificial Sequence: Synthetic oligonucleotide
aagugcagaauaagauauu

SEQ ID NO: 280338 - RNA, 19 nt, Artificial Sequence
  Description of Artificial Sequence: Synthetic oligonucleotide
uuacauggggcggaauguu

SEQ ID NO: 280339 - RNA, 19 nt, Artificial Sequence
  Description of Artificial Sequence: Synthetic oligonucleotide
uuacagaaucagagcugua

SEQ ID NO: 280340 - RNA, 19 nt, Artificial Sequence
  Description of Artificial Sequence: Synthetic oligonucleotide
uagcguaggucuguagcaa

SEQ ID NO: 280341 - RNA, 19 nt, Artificial Sequence
  Description of Artificial Sequence: Synthetic oligonucleotide
gcaauucgaagugaggcga

SEQ ID NO: 280342 - RNA, 19 nt, Artificial Sequence
  Description of Artificial Sequence: Synthetic oligonucleotide
accauggggauaggagcuc

SEQ ID NO: 280343 - RNA, 19 nt, Artificial Sequence
  Description of Artificial Sequence: Synthetic oligonucleotide
uaaaccggaaagggccggu

SEQ ID NO: 280344 - RNA, 19 nt, Artificial Sequence
  Description of Artificial Sequence: Synthetic oligonucleotide
cauacaugugcaugcgugu

SEQ ID NO: 280345 - RNA, 19 nt, Artificial Sequence
  Description of Artificial Sequence: Synthetic oligonucleotide
guaagucagggugggcggc

SEQ ID NO: 280346 - RNA, 19 nt, Artificial Sequence
  Description of Artificial Sequence: Synthetic oligonucleotide
gccgauaaccaaauucuac

SEQ ID NO: 280347 - RNA, 19 nt, Artificial Sequence
  Description of Artificial Sequence: Synthetic oligonucleotide
ccggccgauaaccaaauuc

SEQ ID NO: 280348 - RNA, 19 nt, Artificial Sequence
  Description of Artificial Sequence: Synthetic oligonucleotide
ugcaaaacgugaggggcuu

SEQ ID NO: 280349 - RNA, 19 nt, Artificial Sequence
  Description of Artificial Sequence: Synthetic oligonucleotide
cagugaugcacuuguacgu

SEQ ID NO: 280350 - RNA, 19 nt, Artificial Sequence
  Description of Artificial Sequence: Synthetic oligonucleotide
gggcugaucggccccaagc

SEQ ID NO: 280351 - RNA, 19 nt, Artificial Sequence
  Description of Artificial Sequence: Synthetic oligonucleotide
cagaauuauaauccacuau

SEQ ID NO: 280352 - RNA, 19 nt, Artificial Sequence
  Description of Artificial Sequence: Synthetic oligonucleotide
gcugaucggccccaagcag

SEQ ID NO: 280353 - RNA, 19 nt, Artificial Sequence
  Description of Artificial Sequence: Synthetic oligonucleotide
gagacugaaguaggaaccu

SEQ ID NO: 280354 - RNA, 19 nt, Artificial Sequence
  Description of Artificial Sequence: Synthetic oligonucleotide
caaagauaacccagauugu

SEQ ID NO: 280355 - RNA, 19 nt, Artificial Sequence
  Description of Artificial Sequence: Synthetic oligonucleotide
ccucuccuuagauuaggag

SEQ ID NO: 280356 - RNA, 19 nt, Artificial Sequence
  Description of Artificial Sequence: Synthetic oligonucleotide
cuauguagaccagaugacu

SEQ ID NO: 280357 - RNA, 19 nt, Artificial Sequence
  Description of Artificial Sequence: Synthetic oligonucleotide
cauguaagucagggugggc

SEQ ID NO: 280358 - RNA, 19 nt, Artificial Sequence
  Description of Artificial Sequence: Synthetic oligonucleotide
cuguucuaguuacgcaaca

SEQ ID NO: 280359 - RNA, 19 nt, Artificial Sequence
  Description of Artificial Sequence: Synthetic oligonucleotide
gcacauguugcuguacccc

SEQ ID NO: 280360 - RNA, 19 nt, Artificial Sequence
  Description of Artificial Sequence: Synthetic oligonucleotide
uagcaaccuaguguccaac

SEQ ID NO: 280361 - RNA, 19 nt, Artificial Sequence
  Description of Artificial Sequence: Synthetic oligonucleotide
ugggcugaucggccccaag

SEQ ID NO: 280362 - RNA, 19 nt, Artificial Sequence
  Description of Artificial Sequence: Synthetic oligonucleotide
uauugcagucugugaugua

SEQ ID NO: 280363 - RNA, 19 nt, Artificial Sequence
  Description of Artificial Sequence: Synthetic oligonucleotide
cuuuacgguacuauccauu

SEQ ID NO: 280364 - RNA, 19 nt, Artificial Sequence
  Description of Artificial Sequence: Synthetic oligonucleotide
agccaacuacuguaacuua

SEQ ID NO: 280365 - RNA, 19 nt, Artificial Sequence
  Description of Artificial Sequence: Synthetic oligonucleotide
aacuuaggacaggcaugcu

SEQ ID NO: 280366 - RNA, 19 nt, Artificial Sequence
  Description of Artificial Sequence: Synthetic oligonucleotide
gcauuuaggcugucuucug

SEQ ID NO: 280367 - RNA, 19 nt, Artificial Sequence
  Description of Artificial Sequence: Synthetic oligonucleotide
auguguccaugcaucucag

SEQ ID NO: 280368 - RNA, 19 nt, Artificial Sequence
  Description of Artificial Sequence: Synthetic oligonucleotide
uauuuacauggggcggaau

SEQ ID NO: 280369 - RNA, 19 nt, Artificial Sequence
  Description of Artificial Sequence: Synthetic oligonucleotide
ggcugaucggccccaagca

SEQ ID NO: 280370 - RNA, 19 nt, Artificial Sequence
  Description of Artificial Sequence: Synthetic oligonucleotide
ggauccuuagugaaggccu

SEQ ID NO: 280371 - RNA, 19 nt, Artificial Sequence
  Description of Artificial Sequence: Synthetic oligonucleotide
gugcgcaugcgcauacaug

SEQ ID NO: 280372 - RNA, 19 nt, Artificial Sequence
  Description of Artificial Sequence: Synthetic oligonucleotide
cacauguugcuguaccccu

SEQ ID NO: 280373 - RNA, 19 nt, Artificial Sequence
  Description of Artificial Sequence: Synthetic oligonucleotide
ucccaugugcuuugccauu

SEQ ID NO: 280374 - RNA, 19 nt, Artificial Sequence
  Description of Artificial Sequence: Synthetic oligonucleotide
ugugggcugaucggcccca

SEQ ID NO: 280375 - RNA, 19 nt, Artificial Sequence
  Description of Artificial Sequence: Synthetic oligonucleotide
ccuuaauguaauucaauau

SEQ ID NO: 280376 - RNA, 19 nt, Artificial Sequence
  Description of Artificial Sequence: Synthetic oligonucleotide
accaacugauacauccuuu

SEQ ID NO: 280377 - RNA, 19 nt, Artificial Sequence
  Description of Artificial Sequence: Synthetic oligonucleotide
acauggggcggaauguuuu

SEQ ID NO: 280378 - RNA, 19 nt, Artificial Sequence
  Description of Artificial Sequence: Synthetic oligonucleotide
ccaugugggcugaucggcc

SEQ ID NO: 280379 - RNA, 19 nt, Artificial Sequence
  Description of Artificial Sequence: Synthetic oligonucleotide
ggugaacuauguagaccag

SEQ ID NO: 280380 - RNA, 19 nt, Artificial Sequence
  Description of Artificial Sequence: Synthetic oligonucleotide
gcggcauccccuaaugcug

SEQ ID NO: 280381 - RNA, 19 nt, Artificial Sequence
  Description of Artificial Sequence: Synthetic oligonucleotide
ggcauuuaggcugucuucu

SEQ ID NO: 280382 - RNA, 19 nt, Artificial Sequence
  Description of Artificial Sequence: Synthetic oligonucleotide
cugcuaugaaaauccgccu

SEQ ID NO: 280383 - RNA, 19 nt, Artificial Sequence
  Description of Artificial Sequence: Synthetic oligonucleotide
cugcaaaacgugaggggcu

SEQ ID NO: 280384 - RNA, 19 nt, Artificial Sequence
  Description of Artificial Sequence: Synthetic oligonucleotide
cgcaugcgcauacaugugc

SEQ ID NO: 280385 - RNA, 19 nt, Artificial Sequence
  Description of Artificial Sequence: Synthetic oligonucleotide
gcacuuguacguauuuaca

SEQ ID NO: 280386 - RNA, 19 nt, Artificial Sequence
  Description of Artificial Sequence: Synthetic oligonucleotide
guauuuacauggggcggaa

SEQ ID NO: 280387 - RNA, 19 nt, Artificial Sequence
  Description of Artificial Sequence: Synthetic oligonucleotide
ggcggcauccccuaaugcu

SEQ ID NO: 280388 - RNA, 19 nt, Artificial Sequence
  Description of Artificial Sequence: Synthetic oligonucleotide
caauagcacauuguuuacu

SEQ ID NO: 280389 - RNA, 19 nt, Artificial Sequence
  Description of Artificial Sequence: Synthetic oligonucleotide
acgguacuauccauuuaaa

SEQ ID NO: 280390 - RNA, 19 nt, Artificial Sequence
  Description of Artificial Sequence: Synthetic oligonucleotide
gcuguaaaauguggaguga

SEQ ID NO: 280391 - RNA, 19 nt, Artificial Sequence
  Description of Artificial Sequence: Synthetic oligonucleotide
ccuguacaaagggcaaggc

SEQ ID NO: 280392 - RNA, 19 nt, Artificial Sequence
  Description of Artificial Sequence: Synthetic oligonucleotide
acacccuagcguaggucug

SEQ ID NO: 280393 - RNA, 19 nt, Artificial Sequence
  Description of Artificial Sequence: Synthetic oligonucleotide
cccaugugggcugaucggc

SEQ ID NO: 280394 - RNA, 19 nt, Artificial Sequence
  Description of Artificial Sequence: Synthetic oligonucleotide
agggguguagggauccuua

SEQ ID NO: 280395 - RNA, 19 nt, Artificial Sequence
  Description of Artificial Sequence: Synthetic oligonucleotide
ccuuuucaccaucauguaa

SEQ ID NO: 280396 - RNA, 19 nt, Artificial Sequence
  Description of Artificial Sequence: Synthetic oligonucleotide
gccuuaguuccagucacuc

SEQ ID NO: 280397 - RNA, 19 nt, Artificial Sequence
  Description of Artificial Sequence: Synthetic oligonucleotide
auccccuaaugcugauguu

SEQ ID NO: 280398 - RNA, 19 nt, Artificial Sequence
  Description of Artificial Sequence: Synthetic oligonucleotide
gcaaucccuccgugcagcc

SEQ ID NO: 280399 - RNA, 19 nt, Artificial Sequence
  Description of Artificial Sequence: Synthetic oligonucleotide
agccuuaguuccagucacu

SEQ ID NO: 280400 - RNA, 19 nt, Artificial Sequence
  Description of Artificial Sequence: Synthetic oligonucleotide
cccuacuuccacacccaac

SEQ ID NO: 280401 - RNA, 19 nt, Artificial Sequence
  Description of Artificial Sequence: Synthetic oligonucleotide
cccuuaccucuauuccuag

SEQ ID NO: 280402 - RNA, 19 nt, Artificial Sequence
  Description of Artificial Sequence: Synthetic oligonucleotide
gcuguaccccucccucugc

SEQ ID NO: 280403 - RNA, 19 nt, Artificial Sequence
  Description of Artificial Sequence: Synthetic oligonucleotide
caaaacgugaggggcuugu

SEQ ID NO: 280404 - RNA, 19 nt, Artificial Sequence
  Description of Artificial Sequence: Synthetic oligonucleotide
ccccuaaugcugauguuaa

SEQ ID NO: 280405 - RNA, 19 nt, Artificial Sequence
  Description of Artificial Sequence: Synthetic oligonucleotide
gaucggccccaagcagagc

SEQ ID NO: 280406 - RNA, 19 nt, Artificial Sequence
  Description of Artificial Sequence: Synthetic oligonucleotide
cuuguuucucaugccgccu

SEQ ID NO: 280407 - RNA, 19 nt, Artificial Sequence
  Description of Artificial Sequence: Synthetic oligonucleotide
cccuaaugcugauguuaac

SEQ ID NO: 280408 - RNA, 19 nt, Artificial Sequence
  Description of Artificial Sequence: Synthetic oligonucleotide
ccuucccuacuuccacacc

SEQ ID NO: 280409 - RNA, 19 nt, Artificial Sequence
  Description of Artificial Sequence: Synthetic oligonucleotide
caauucgaagugaggcgau

SEQ ID NO: 280410 - RNA, 19 nt, Artificial Sequence
  Description of Artificial Sequence: Synthetic oligonucleotide
cccaugugcuuugccauug

SEQ ID NO: 280411 - RNA, 19 nt, Artificial Sequence
  Description of Artificial Sequence: Synthetic oligonucleotide
cccagauugugugugcgca

SEQ ID NO: 280412 - RNA, 19 nt, Artificial Sequence
  Description of Artificial Sequence: Synthetic oligonucleotide
gggauaggagcucggacuu

SEQ ID NO: 280413 - RNA, 19 nt, Artificial Sequence
  Description of Artificial Sequence: Synthetic oligonucleotide
uggagccgugauguucaua

SEQ ID NO: 280414 - RNA, 19 nt, Artificial Sequence
  Description of Artificial Sequence: Synthetic oligonucleotide
cggccgauaaccaaauucu

SEQ ID NO: 280415 - RNA, 19 nt, Artificial Sequence
  Description of Artificial Sequence: Synthetic oligonucleotide
cguauuuacauggggcgga

SEQ ID NO: 280416 - RNA, 19 nt, Artificial Sequence
  Description of Artificial Sequence: Synthetic oligonucleotide
caugccgccuuggaggggu

SEQ ID NO: 280417 - RNA, 19 nt, Artificial Sequence
  Description of Artificial Sequence: Synthetic oligonucleotide
gugaaccaucuggauccca

SEQ ID NO: 280418 - RNA, 19 nt, Artificial Sequence
  Description of Artificial Sequence: Synthetic oligonucleotide
caugcgcauacaugugcau

SEQ ID NO: 280419 - RNA, 19 nt, Artificial Sequence
  Description of Artificial Sequence: Synthetic oligonucleotide
aguguccaacugaguuaca

SEQ ID NO: 280420 - RNA, 19 nt, Artificial Sequence
  Description of Artificial Sequence: Synthetic oligonucleotide
cgguacuauccauuuaaaa

SEQ ID NO: 280421 - RNA, 19 nt, Artificial Sequence
  Description of Artificial Sequence: Synthetic oligonucleotide
gcauccccuaaugcugaug

SEQ ID NO: 280422 - RNA, 19 nt, Artificial Sequence
  Description of Artificial Sequence: Synthetic oligonucleotide
ccuuaccucuauuccuaga

SEQ ID NO: 280423 - RNA, 19 nt, Artificial Sequence
  Description of Artificial Sequence: Synthetic oligonucleotide
cgcuaaagugucuaaugcu

SEQ ID NO: 280424 - RNA, 19 nt, Artificial Sequence
  Description of Artificial Sequence: Synthetic oligonucleotide
cgugcagccuuaguuccag

SEQ ID NO: 280425 - RNA, 19 nt, Artificial Sequence
  Description of Artificial Sequence: Synthetic oligonucleotide
gcaaaacgugaggggcuug

SEQ ID NO: 280426 - RNA, 19 nt, Artificial Sequence
  Description of Artificial Sequence: Synthetic oligonucleotide
caccgggccggccgauaac

SEQ ID NO: 280427 - RNA, 19 nt, Artificial Sequence
  Description of Artificial Sequence: Synthetic oligonucleotide
cccuagcguaggucuguag

SEQ ID NO: 280428 - RNA, 19 nt, Artificial Sequence
  Description of Artificial Sequence: Synthetic oligonucleotide
ggcaaggcggcauccccua

SEQ ID NO: 280429 - RNA, 19 nt, Artificial Sequence
  Description of Artificial Sequence: Synthetic oligonucleotide
ccaagugcaaucccuccgu

SEQ ID NO: 280430 - RNA, 19 nt, Artificial Sequence
  Description of Artificial Sequence: Synthetic oligonucleotide
gcuuuacgguacuauccau

SEQ ID NO: 280431 - RNA, 19 nt, Artificial Sequence
  Description of Artificial Sequence: Synthetic oligonucleotide
ggccgauaaccaaauucua

SEQ ID NO: 280432 - RNA, 19 nt, Artificial Sequence
  Description of Artificial Sequence: Synthetic oligonucleotide
gccuaccaagccaccgggc

SEQ ID NO: 280433 - RNA, 19 nt, Artificial Sequence
  Description of Artificial Sequence: Synthetic oligonucleotide
cuguaccccucccucugcu

SEQ ID NO: 280434 - RNA, 19 nt, Artificial Sequence
  Description of Artificial Sequence: Synthetic oligonucleotide
gcgcaugcgcauacaugug

SEQ ID NO: 280435 - RNA, 19 nt, Artificial Sequence
  Description of Artificial Sequence: Synthetic oligonucleotide
gcaaccucacauauauauu

SEQ ID NO: 280436 - RNA, 19 nt, Artificial Sequence
  Description of Artificial Sequence: Synthetic oligonucleotide
ccauaaggacaggcugaug

SEQ ID NO: 280437 - RNA, 19 nt, Artificial Sequence
  Description of Artificial Sequence: Synthetic oligonucleotide
gagggguguagggauccuu

SEQ ID NO: 280438 - RNA, 19 nt, Artificial Sequence
  Description of Artificial Sequence: Synthetic oligonucleotide
gggccggccgauaaccaaa

SEQ ID NO: 280439 - RNA, 19 nt, Artificial Sequence
  Description of Artificial Sequence: Synthetic oligonucleotide
cacccuagcguaggucugu

SEQ ID NO: 280440 - RNA, 19 nt, Artificial Sequence
  Description of Artificial Sequence: Synthetic oligonucleotide
gcaugcuaucaacucccuu

SEQ ID NO: 280441 - RNA, 19 nt, Artificial Sequence
  Description of Artificial Sequence: Synthetic oligonucleotide
ccgugcagccuuaguucca

SEQ ID NO: 280442 - RNA, 19 nt, Artificial Sequence
  Description of Artificial Sequence: Synthetic oligonucleotide
caaucccuccgugcagccu

SEQ ID NO: 280443 - RNA, 19 nt, Artificial Sequence
  Description of Artificial Sequence: Synthetic oligonucleotide
cuguggcauuuaggcuguc

SEQ ID NO: 280444 - RNA, 19 nt, Artificial Sequence
  Description of Artificial Sequence: Synthetic oligonucleotide
augccgccuuggaggggug

SEQ ID NO: 280445 - RNA, 19 nt, Artificial Sequence
  Description of Artificial Sequence: Synthetic oligonucleotide
gcaaggcggcauccccuaa

SEQ ID NO: 280446 - RNA, 19 nt, Artificial Sequence
  Description of Artificial Sequence: Synthetic oligonucleotide
aucccuccgugcagccuua

SEQ ID NO: 280447 - RNA, 19 nt, Artificial Sequence
  Description of Artificial Sequence: Synthetic oligonucleotide
ggcaugcuaucaacucccu

SEQ ID NO: 280448 - RNA, 19 nt, Artificial Sequence
  Description of Artificial Sequence: Synthetic oligonucleotide
ggcauccccuaaugcugau

SEQ ID NO: 280449 - RNA, 19 nt, Artificial Sequence
  Description of Artificial Sequence: Synthetic oligonucleotide
cuggagccgugauguucau

SEQ ID NO: 280450 - RNA, 19 nt, Artificial Sequence
  Description of Artificial Sequence: Synthetic oligonucleotide
ccgggccggccgauaacca

SEQ ID NO: 280451 - RNA, 19 nt, Artificial Sequence
  Description of Artificial Sequence: Synthetic oligonucleotide
ccaccgggccggccgauaa

SEQ ID NO: 280452 - RNA, 19 nt, Artificial Sequence
  Description of Artificial Sequence: Synthetic oligonucleotide
cgcauacaugugcaugcgu

SEQ ID NO: 280453 - RNA, 19 nt, Artificial Sequence
  Description of Artificial Sequence: Synthetic oligonucleotide
ggccggccgauaaccaaau

SEQ ID NO: 280454 - RNA, 19 nt, Artificial Sequence
  Description of Artificial Sequence: Synthetic oligonucleotide
cgggccggccgauaaccaa

SEQ ID NO: 280455 - RNA, 19 nt, Artificial Sequence
  Description of Artificial Sequence: Synthetic oligonucleotide
gccggccgauaaccaaauu

SEQ ID NO: 280456 - RNA, 19 nt, Artificial Sequence
  Description of Artificial Sequence: Synthetic oligonucleotide
gccaccgggccggccgaua

SEQ ID NO: 280457 - RNA, 19 nt, Artificial Sequence
  Description of Artificial Sequence: Synthetic oligonucleotide
aauacaauuaucuucaacu

SEQ ID NO: 280458 - RNA, 19 nt, Artificial Sequence
  Description of Artificial Sequence: Synthetic oligonucleotide
caugauuagauuaagcagg

SEQ ID NO: 280459 - RNA, 19 nt, Artificial Sequence
  Description of Artificial Sequence: Synthetic oligonucleotide
aacaauagcauuuacuccu

SEQ ID NO: 280460 - RNA, 19 nt, Artificial Sequence
  Description of Artificial Sequence: Synthetic oligonucleotide
augaguaacauuuuacaac

SEQ ID NO: 280461 - RNA, 19 nt, Artificial Sequence
  Description of Artificial Sequence: Synthetic oligonucleotide
gauuagauuaagcaggcag

SEQ ID NO: 280462 - RNA, 19 nt, Artificial Sequence
  Description of Artificial Sequence: Synthetic oligonucleotide
aagucagacauucuuaaug

SEQ ID NO: 280463 - RNA, 19 nt, Artificial Sequence
  Description of Artificial Sequence: Synthetic oligonucleotide
acaauugucaaugcaaccc

SEQ ID NO: 280464 - RNA, 19 nt, Artificial Sequence
  Description of Artificial Sequence: Synthetic oligonucleotide
cagucuauaaaugaaaagg

SEQ ID NO: 280465 - RNA, 19 nt, Artificial Sequence
  Description of Artificial Sequence: Synthetic oligonucleotide
accaguauuaauauguccc

SEQ ID NO: 280466 - RNA, 19 nt, Artificial Sequence
  Description of Artificial Sequence: Synthetic oligonucleotide
ucuauaaaugaaaagggua

SEQ ID NO: 280467 - RNA, 19 nt, Artificial Sequence
  Description of Artificial Sequence: Synthetic oligonucleotide
aguauaagcuacuggacuc

SEQ ID NO: 280468 - RNA, 19 nt, Artificial Sequence
  Description of Artificial Sequence: Synthetic oligonucleotide
aagaucuacgccuuucauc

SEQ ID NO: 280469 - RNA, 19 nt, Artificial Sequence
  Description of Artificial Sequence: Synthetic oligonucleotide
aagauuauggagcucauuu

SEQ ID NO: 280470 - RNA, 19 nt, Artificial Sequence
  Description of Artificial Sequence: Synthetic oligonucleotide
agaccaauuauuccuacgg

SEQ ID NO: 280471 - RNA, 19 nt, Artificial Sequence
  Description of Artificial Sequence: Synthetic oligonucleotide
caacuaaugaucuggacag

SEQ ID NO: 280472 - RNA, 19 nt, Artificial Sequence
  Description of Artificial Sequence: Synthetic oligonucleotide
uuuauguacguggagauca

SEQ ID NO: 280473 - RNA, 19 nt, Artificial Sequence
  Description of Artificial Sequence: Synthetic oligonucleotide
ugaauauguacugucgacg

SEQ ID NO: 280474 - RNA, 19 nt, Artificial Sequence
  Description of Artificial Sequence: Synthetic oligonucleotide
uguaacugugguuuuaucu

SEQ ID NO: 280475 - RNA, 19 nt, Artificial Sequence
  Description of Artificial Sequence: Synthetic oligonucleotide
aacaacuaaugaucuggac

SEQ ID NO: 280476 - RNA, 19 nt, Artificial Sequence
  Description of Artificial Sequence: Synthetic oligonucleotide
aagaauuuacugcugacua

SEQ ID NO: 280477 - RNA, 19 nt, Artificial Sequence
  Description of Artificial Sequence: Synthetic oligonucleotide
agucuauaaaugaaaaggg

SEQ ID NO: 280478 - RNA, 19 nt, Artificial Sequence
  Description of Artificial Sequence: Synthetic oligonucleotide
agauuaagcaggcaggucu

SEQ ID NO: 280479 - RNA, 19 nt, Artificial Sequence
  Description of Artificial Sequence: Synthetic oligonucleotide
uucauaucccacaugaguc

SEQ ID NO: 280480 - RNA, 19 nt, Artificial Sequence
  Description of Artificial Sequence: Synthetic oligonucleotide
uauauguucauaucccaca

SEQ ID NO: 280481 - RNA, 19 nt, Artificial Sequence
  Description of Artificial Sequence: Synthetic oligonucleotide
ugcuuuguagcugagauga

SEQ ID NO: 280482 - RNA, 19 nt, Artificial Sequence
  Description of Artificial Sequence: Synthetic oligonucleotide
uuuacugcugacuacacuu

SEQ ID NO: 280483 - RNA, 19 nt, Artificial Sequence
  Description of Artificial Sequence: Synthetic oligonucleotide
gaaauagguagacauuuac

SEQ ID NO: 280484 - RNA, 19 nt, Artificial Sequence
  Description of Artificial Sequence: Synthetic oligonucleotide
uacgguacaauugucaaug

SEQ ID NO: 280485 - RNA, 19 nt, Artificial Sequence
  Description of Artificial Sequence: Synthetic oligonucleotide
ucugaauauguacugucga

SEQ ID NO: 280486 - RNA, 19 nt, Artificial Sequence
  Description of Artificial Sequence: Synthetic oligonucleotide
auuagauuaagcaggcagg

SEQ ID NO: 280487 - RNA, 19 nt, Artificial Sequence
  Description of Artificial Sequence: Synthetic oligonucleotide
uaacccaaugcuuuguagc

SEQ ID NO: 280488 - RNA, 19 nt, Artificial Sequence
  Description of Artificial Sequence: Synthetic oligonucleotide
auaaguauccuuugugcug

SEQ ID NO: 280489 - RNA, 19 nt, Artificial Sequence
  Description of Artificial Sequence: Synthetic oligonucleotide
ugagacgggauaaacauua

SEQ ID NO: 280490 - RNA, 19 nt, Artificial Sequence
  Description of Artificial Sequence: Synthetic oligonucleotide
guacugucgacguaaaagc

SEQ ID NO: 280491 - RNA, 19 nt, Artificial Sequence
  Description of Artificial Sequence: Synthetic oligonucleotide
auuccuacgguguaagucu

SEQ ID NO: 280492 - RNA, 19 nt, Artificial Sequence
  Description of Artificial Sequence: Synthetic oligonucleotide
uggguuuuauuacacuagc

SEQ ID NO: 280493 - RNA, 19 nt, Artificial Sequence
  Description of Artificial Sequence: Synthetic oligonucleotide
accaauuauuccuacggug

SEQ ID NO: 280494 - RNA, 19 nt, Artificial Sequence
  Description of Artificial Sequence: Synthetic oligonucleotide
ugacguuaccuuuaguuac

SEQ ID NO: 280495 - RNA, 19 nt, Artificial Sequence
  Description of Artificial Sequence: Synthetic oligonucleotide
ggguuuuaucacuacaucg

SEQ ID NO: 280496 - RNA, 19 nt, Artificial Sequence
  Description of Artificial Sequence: Synthetic oligonucleotide
aacccaaugcuuuguagcu

SEQ ID NO: 280497 - RNA, 19 nt, Artificial Sequence
  Description of Artificial Sequence: Synthetic oligonucleotide
uuuacgguacaauugucaa

SEQ ID NO: 280498 - RNA, 19 nt, Artificial Sequence
  Description of Artificial Sequence: Synthetic oligonucleotide
uagacguugcgcaugauua

SEQ ID NO: 280499 - RNA, 19 nt, Artificial Sequence
  Description of Artificial Sequence: Synthetic oligonucleotide
uacguggagaucacuaagc

SEQ ID NO: 280500 - RNA, 19 nt, Artificial Sequence
  Description of Artificial Sequence: Synthetic oligonucleotide
guaaucaucuuuccacucc

SEQ ID NO: 280501 - RNA, 19 nt, Artificial Sequence
  Description of Artificial Sequence: Synthetic oligonucleotide
aaccuguagacguugcgca

SEQ ID NO: 280502 - RNA, 19 nt, Artificial Sequence
  Description of Artificial Sequence: Synthetic oligonucleotide
auugaauagcagcaaauuu

SEQ ID NO: 280503 - RNA, 19 nt, Artificial Sequence
  Description of Artificial Sequence: Synthetic oligonucleotide
ucugcuaacucuuggcaga

SEQ ID NO: 280504 - RNA, 19 nt, Artificial Sequence
  Description of Artificial Sequence: Synthetic oligonucleotide
uuagauauccaaugugaau

SEQ ID NO: 280505 - RNA, 19 nt, Artificial Sequence
  Description of Artificial Sequence: Synthetic oligonucleotide
aggguuuuaucacuacauc

SEQ ID NO: 280506 - RNA, 19 nt, Artificial Sequence
  Description of Artificial Sequence: Synthetic oligonucleotide
ucugguucaucccacuaac

SEQ ID NO: 280507 - RNA, 19 nt, Artificial Sequence
  Description of Artificial Sequence: Synthetic oligonucleotide
uggccgaucaucaaacaac

SEQ ID NO: 280508 - RNA, 19 nt, Artificial Sequence
  Description of Artificial Sequence: Synthetic oligonucleotide
uggcagaccaauuauuccu

SEQ ID NO: 280509 - RNA, 19 nt, Artificial Sequence
  Description of Artificial Sequence: Synthetic oligonucleotide
caccaugcccauuuuacgg

SEQ ID NO: 280510 - RNA, 19 nt, Artificial Sequence
  Description of Artificial Sequence: Synthetic oligonucleotide
cuuggcagaccaauuauuc

SEQ ID NO: 280511 - RNA, 19 nt, Artificial Sequence
  Description of Artificial Sequence: Synthetic oligonucleotide
acgggauaaacauuauaug

SEQ ID NO: 280512 - RNA, 19 nt, Artificial Sequence
  Description of Artificial Sequence: Synthetic oligonucleotide
aucuucaacugaauugacc

SEQ ID NO: 280513 - RNA, 19 nt, Artificial Sequence
  Description of Artificial Sequence: Synthetic oligonucleotide
aagacgucagaagaugucu

SEQ ID NO: 280514 - RNA, 19 nt, Artificial Sequence
  Description of Artificial Sequence: Synthetic oligonucleotide
acuaacggcuccucggcgg

SEQ ID NO: 280515 - RNA, 19 nt, Artificial Sequence
  Description of Artificial Sequence: Synthetic oligonucleotide
aguauuaauaugucccuuu

SEQ ID NO: 280516 - RNA, 19 nt, Artificial Sequence
  Description of Artificial Sequence: Synthetic oligonucleotide
uauccuuugugcugaaagu

SEQ ID NO: 280517 - RNA, 19 nt, Artificial Sequence
  Description of Artificial Sequence: Synthetic oligonucleotide
uuagauuaagcaggcaggu

SEQ ID NO: 280518 - RNA, 19 nt, Artificial Sequence
  Description of Artificial Sequence: Synthetic oligonucleotide
ugaccugacgcgaugacau

SEQ ID NO: 280519 - RNA, 19 nt, Artificial Sequence
  Description of Artificial Sequence: Synthetic oligonucleotide
gugaaaagagugccaaacc

SEQ ID NO: 280520 - RNA, 19 nt, Artificial Sequence
  Description of Artificial Sequence: Synthetic oligonucleotide
cuagaaugcucuaaauuca

SEQ ID NO: 280521 - RNA, 19 nt, Artificial Sequence
  Description of Artificial Sequence: Synthetic oligonucleotide
uuuggaggaucucucuugu

SEQ ID NO: 280522 - RNA, 19 nt, Artificial Sequence
  Description of Artificial Sequence: Synthetic oligonucleotide
acgagggucaguuccaucu

SEQ ID NO: 280523 - RNA, 19 nt, Artificial Sequence
  Description of Artificial Sequence: Synthetic oligonucleotide
ucuaguggcaccagugaaa

SEQ ID NO: 280524 - RNA, 19 nt, Artificial Sequence
  Description of Artificial Sequence: Synthetic oligonucleotide
aauucccauacccuuuaaa

SEQ ID NO: 280525 - RNA, 19 nt, Artificial Sequence
  Description of Artificial Sequence: Synthetic oligonucleotide
gcugacuacacuuggagug

SEQ ID NO: 280526 - RNA, 19 nt, Artificial Sequence
  Description of Artificial Sequence: Synthetic oligonucleotide
uauuccuacgguguaaguc

SEQ ID NO: 280527 - RNA, 19 nt, Artificial Sequence
  Description of Artificial Sequence: Synthetic oligonucleotide
aaagaucuacgccuuucau

SEQ ID NO: 280528 - RNA, 19 nt, Artificial Sequence
  Description of Artificial Sequence: Synthetic oligonucleotide
uacaucggcaugaguaaca

SEQ ID NO: 280529 - RNA, 19 nt, Artificial Sequence
  Description of Artificial Sequence: Synthetic oligonucleotide
ucuaucuuuucacgaucug

SEQ ID NO: 280530 - RNA, 19 nt, Artificial Sequence
  Description of Artificial Sequence: Synthetic oligonucleotide
uuuaccagguaggaagucu

SEQ ID NO: 280531 - RNA, 19 nt, Artificial Sequence
  Description of Artificial Sequence: Synthetic oligonucleotide
gcuacuggacucuauaaug

SEQ ID NO: 280532 - RNA, 19 nt, Artificial Sequence
  Description of Artificial Sequence: Synthetic oligonucleotide
ucgacguaaaagcugcuua

SEQ ID NO: 280533 - RNA, 19 nt, Artificial Sequence
  Description of Artificial Sequence: Synthetic oligonucleotide
cuaacccaaugcuuuguag

SEQ ID NO: 280534 - RNA, 19 nt, Artificial Sequence
  Description of Artificial Sequence: Synthetic oligonucleotide
uacgccuuucaucaccaug

SEQ ID NO: 280535 - RNA, 19 nt, Artificial Sequence
  Description of Artificial Sequence: Synthetic oligonucleotide
acaaccuguagacguugcg

SEQ ID NO: 280536 - RNA, 19 nt, Artificial Sequence
  Description of Artificial Sequence: Synthetic oligonucleotide
uccaaguacuaguacugga

SEQ ID NO: 280537 - RNA, 19 nt, Artificial Sequence
  Description of Artificial Sequence: Synthetic oligonucleotide
caauaccgcucccacaugc

SEQ ID NO: 280538 - RNA, 19 nt, Artificial Sequence
  Description of Artificial Sequence: Synthetic oligonucleotide
gguaguagcuuuuagauau

SEQ ID NO: 280539 - RNA, 19 nt, Artificial Sequence
  Description of Artificial Sequence: Synthetic oligonucleotide
uauugugacguuaccuuua

SEQ ID NO: 280540 - RNA, 19 nt, Artificial Sequence
  Description of Artificial Sequence: Synthetic oligonucleotide
auaugaucauuguaaguuu

SEQ ID NO: 280541 - RNA, 19 nt, Artificial Sequence
  Description of Artificial Sequence: Synthetic oligonucleotide
uguacguggagaucacuaa

SEQ ID NO: 280542 - RNA, 19 nt, Artificial Sequence
  Description of Artificial Sequence: Synthetic oligonucleotide
uacugucgacguaaaagcu

SEQ ID NO: 280543 - RNA, 19 nt, Artificial Sequence
  Description of Artificial Sequence: Synthetic oligonucleotide
gaauauguacugucgacgu

SEQ ID NO: 280544 - RNA, 19 nt, Artificial Sequence
  Description of Artificial Sequence: Synthetic oligonucleotide
aagucuaguggcaccagug

SEQ ID NO: 280545 - RNA, 19 nt, Artificial Sequence
  Description of Artificial Sequence: Synthetic oligonucleotide
cacuacaucggcaugagua

SEQ ID NO: 280546 - RNA, 19 nt, Artificial Sequence
  Description of Artificial Sequence: Synthetic oligonucleotide
uggaagacgucagaagaug

SEQ ID NO: 280547 - RNA, 19 nt, Artificial Sequence
  Description of Artificial Sequence: Synthetic oligonucleotide
acuacaucggcaugaguaa

SEQ ID NO: 280548 - RNA, 19 nt, Artificial Sequence
  Description of Artificial Sequence: Synthetic oligonucleotide
guacguggagaucacuaag

SEQ ID NO: 280549 - RNA, 19 nt, Artificial Sequence
  Description of Artificial Sequence: Synthetic oligonucleotide
auauguacugucgacguaa

SEQ ID NO: 280550 - RNA, 19 nt, Artificial Sequence
  Description of Artificial Sequence: Synthetic oligonucleotide
ggaaaauguugguaguagc

SEQ ID NO: 280551 - RNA, 19 nt, Artificial Sequence
  Description of Artificial Sequence: Synthetic oligonucleotide
aauacuguguguggcacua

SEQ ID NO: 280552 - RNA, 19 nt, Artificial Sequence
  Description of Artificial Sequence: Synthetic oligonucleotide
ugucaaugcaacccucaaa

SEQ ID NO: 280553 - RNA, 19 nt, Artificial Sequence
  Description of Artificial Sequence: Synthetic oligonucleotide
uuauugugacguuaccuuu

SEQ ID NO: 280554 - RNA, 19 nt, Artificial Sequence
  Description of Artificial Sequence: Synthetic oligonucleotide
auggguuuuauuacacuag

SEQ ID NO: 280555 - RNA, 19 nt, Artificial Sequence
  Description of Artificial Sequence: Synthetic oligonucleotide
auuuacguauuuacaaagu

SEQ ID NO: 280556 - RNA, 19 nt, Artificial Sequence
  Description of Artificial Sequence: Synthetic oligonucleotide
aauauguacugucgacgua

SEQ ID NO: 280557 - RNA, 19 nt, Artificial Sequence
  Description of Artificial Sequence: Synthetic oligonucleotide
ucaacugaauugaccugac

SEQ ID NO: 280558 - RNA, 19 nt, Artificial Sequence
  Description of Artificial Sequence: Synthetic oligonucleotide
cuacuggacucuauaauga

SEQ ID NO: 280559 - RNA, 19 nt, Artificial Sequence
  Description of Artificial Sequence: Synthetic oligonucleotide
uucaauucccauacccuuu

SEQ ID NO: 280560 - RNA, 19 nt, Artificial Sequence
  Description of Artificial Sequence: Synthetic oligonucleotide
uugcgcaugauuagauuaa

SEQ ID NO: 280561 - RNA, 19 nt, Artificial Sequence
  Description of Artificial Sequence: Synthetic oligonucleotide
gacgggauaaacauuauau

SEQ ID NO: 280562 - RNA, 19 nt, Artificial Sequence
  Description of Artificial Sequence: Synthetic oligonucleotide
uggguaauacaauuaucuu

SEQ ID NO: 280563 - RNA, 19 nt, Artificial Sequence
  Description of Artificial Sequence: Synthetic oligonucleotide
aaaugcuaucuggugacaa

SEQ ID NO: 280564 - RNA, 19 nt, Artificial Sequence
  Description of Artificial Sequence: Synthetic oligonucleotide
agacguugcgcaugauuag

SEQ ID NO: 280565 - RNA, 19 nt, Artificial Sequence
  Description of Artificial Sequence: Synthetic oligonucleotide
guggguaauacaauuaucu

SEQ ID NO: 280566 - RNA, 19 nt, Artificial Sequence
  Description of Artificial Sequence: Synthetic oligonucleotide
cacuagacauucagcagug

SEQ ID NO: 280567 - RNA, 19 nt, Artificial Sequence
  Description of Artificial Sequence: Synthetic oligonucleotide
gaauugaccugacgcgaug

SEQ ID NO: 280568 - RNA, 19 nt, Artificial Sequence
  Description of Artificial Sequence: Synthetic oligonucleotide
cauuuuacgguacaauugu

SEQ ID NO: 280569 - RNA, 19 nt, Artificial Sequence
  Description of Artificial Sequence: Synthetic oligonucleotide
ccauuuuacgguacaauug

SEQ ID NO: 280570 - RNA, 19 nt, Artificial Sequence
  Description of Artificial Sequence: Synthetic oligonucleotide
uuauguacguggagaucac

SEQ ID NO: 280571 - RNA, 19 nt, Artificial Sequence
  Description of Artificial Sequence: Synthetic oligonucleotide
acaagcgggcggcagcgac

SEQ ID NO: 280572 - RNA, 19 nt, Artificial Sequence
  Description of Artificial Sequence: Synthetic oligonucleotide
ucaacaugcagagguuaug

SEQ ID NO: 280573 - RNA, 19 nt, Artificial Sequence
  Description of Artificial Sequence: Synthetic oligonucleotide
acguggagaucacuaagcu

SEQ ID NO: 280574 - RNA, 19 nt, Artificial Sequence
  Description of Artificial Sequence: Synthetic oligonucleotide
aacuucaugacuagauaua

SEQ ID NO: 280575 - RNA, 19 nt, Artificial Sequence
  Description of Artificial Sequence: Synthetic oligonucleotide
ugcugacuacacuuggagu

SEQ ID NO: 280576 - RNA, 19 nt, Artificial Sequence
  Description of Artificial Sequence: Synthetic oligonucleotide
gggagaaaacaacuaauga

SEQ ID NO: 280577 - RNA, 19 nt, Artificial Sequence
  Description of Artificial Sequence: Synthetic oligonucleotide
caccagugaaaagagugcc

SEQ ID NO: 280578 - RNA, 19 nt, Artificial Sequence
  Description of Artificial Sequence: Synthetic oligonucleotide
agcuacuggacucuauaau

SEQ ID NO: 280579 - RNA, 19 nt, Artificial Sequence
  Description of Artificial Sequence: Synthetic oligonucleotide
acuaaugaucuggacagau

SEQ ID NO: 280580 - RNA, 19 nt, Artificial Sequence
  Description of Artificial Sequence: Synthetic oligonucleotide
gacgucagaagaugucuca

SEQ ID NO: 280581 - RNA, 19 nt, Artificial Sequence
  Description of Artificial Sequence: Synthetic oligonucleotide
acugucgacguaaaagcug

SEQ ID NO: 280582 - RNA, 19 nt, Artificial Sequence
  Description of Artificial Sequence: Synthetic oligonucleotide
gguacaauugucaaugcaa

SEQ ID NO: 280583 - RNA, 19 nt, Artificial Sequence
  Description of Artificial Sequence: Synthetic oligonucleotide
accaugcccauuuuacggu

SEQ ID NO: 280584 - RNA, 19 nt, Artificial Sequence
  Description of Artificial Sequence: Synthetic oligonucleotide
uuacgguacaauugucaau

SEQ ID NO: 280585 - RNA, 19 nt, Artificial Sequence
  Description of Artificial Sequence: Synthetic oligonucleotide
ugcgcaugauuagauuaag

SEQ ID NO: 280586 - RNA, 19 nt, Artificial Sequence
  Description of Artificial Sequence: Synthetic oligonucleotide
gacguaaaagcugcuuaac

SEQ ID NO: 280587 - RNA, 19 nt, Artificial Sequence
  Description of Artificial Sequence: Synthetic oligonucleotide
augcuuuguagcugagaug

SEQ ID NO: 280588 - RNA, 19 nt, Artificial Sequence
  Description of Artificial Sequence: Synthetic oligonucleotide
cugacuacacuuggagugc

SEQ ID NO: 280589 - RNA, 19 nt, Artificial Sequence
  Description of Artificial Sequence: Synthetic oligonucleotide
gauaucuauauuauccuuu

SEQ ID NO: 280590 - RNA, 19 nt, Artificial Sequence
  Description of Artificial Sequence: Synthetic oligonucleotide
auuuaccagguaggaaguc

SEQ ID NO: 280591 - RNA, 19 nt, Artificial Sequence
  Description of Artificial Sequence: Synthetic oligonucleotide
cacagugugaggcaacaca

SEQ ID NO: 280592 - RNA, 19 nt, Artificial Sequence
  Description of Artificial Sequence: Synthetic oligonucleotide
gacaaaggagucucagaaa

SEQ ID NO: 280593 - RNA, 19 nt, Artificial Sequence
  Description of Artificial Sequence: Synthetic oligonucleotide
gugacguuaccuuuaguua

SEQ ID NO: 280594 - RNA, 19 nt, Artificial Sequence
  Description of Artificial Sequence: Synthetic oligonucleotide
cugguucaucccacuaacc

SEQ ID NO: 280595 - RNA, 19 nt, Artificial Sequence
  Description of Artificial Sequence: Synthetic oligonucleotide
acggcggucacugcuuccc

SEQ ID NO: 280596 - RNA, 19 nt, Artificial Sequence
  Description of Artificial Sequence: Synthetic oligonucleotide
auggccgaucaucaaacaa

SEQ ID NO: 280597 - RNA, 19 nt, Artificial Sequence
  Description of Artificial Sequence: Synthetic oligonucleotide
aauguugguaguagcuuuu

SEQ ID NO: 280598 - RNA, 19 nt, Artificial Sequence
  Description of Artificial Sequence: Synthetic oligonucleotide
gguuaugcacaggaaaaug

SEQ ID NO: 280599 - RNA, 19 nt, Artificial Sequence
  Description of Artificial Sequence: Synthetic oligonucleotide
uccggaaccgggguugucc

SEQ ID NO: 280600 - RNA, 19 nt, Artificial Sequence
  Description of Artificial Sequence: Synthetic oligonucleotide
agacgucagaagaugucuc

SEQ ID NO: 280601 - RNA, 19 nt, Artificial Sequence
  Description of Artificial Sequence: Synthetic oligonucleotide
uugucacaaucaagaaguc

SEQ ID NO: 280602 - RNA, 19 nt, Artificial Sequence
  Description of Artificial Sequence: Synthetic oligonucleotide
caaagaucuacgccuuuca

SEQ ID NO: 280603 - RNA, 19 nt, Artificial Sequence
  Description of Artificial Sequence: Synthetic oligonucleotide
acgggugcggacgacggcg

SEQ ID NO: 280604 - RNA, 19 nt, Artificial Sequence
  Description of Artificial Sequence: Synthetic oligonucleotide
ucccacgagcggcaaucgg

SEQ ID NO: 280605 - RNA, 19 nt, Artificial Sequence
  Description of Artificial Sequence: Synthetic oligonucleotide
acuaacccaaugcuuugua

SEQ ID NO: 280606 - RNA, 19 nt, Artificial Sequence
  Description of Artificial Sequence: Synthetic oligonucleotide
ugauuagauuaagcaggca

SEQ ID NO: 280607 - RNA, 19 nt, Artificial Sequence
  Description of Artificial Sequence: Synthetic oligonucleotide
uguaagcacaggguuuuau

SEQ ID NO: 280608 - RNA, 19 nt, Artificial Sequence
  Description of Artificial Sequence: Synthetic oligonucleotide
agaaugcucuaaauucaug

SEQ ID NO: 280609 - RNA, 19 nt, Artificial Sequence
  Description of Artificial Sequence: Synthetic oligonucleotide
acgucagaagaugucucag

SEQ ID NO: 280610 - RNA, 19 nt, Artificial Sequence
  Description of Artificial Sequence: Synthetic oligonucleotide
agacgggauaaacauuaua

SEQ ID NO: 280611 - RNA, 19 nt, Artificial Sequence
  Description of Artificial Sequence: Synthetic oligonucleotide
auuaagcaggcaggucuag

SEQ ID NO: 280612 - RNA, 19 nt, Artificial Sequence
  Description of Artificial Sequence: Synthetic oligonucleotide
caguauaagcuacuggacu

SEQ ID NO: 280613 - RNA, 19 nt, Artificial Sequence
  Description of Artificial Sequence: Synthetic oligonucleotide
uauguacguggagaucacu

SEQ ID NO: 280614 - RNA, 19 nt, Artificial Sequence
  Description of Artificial Sequence: Synthetic oligonucleotide
gacguugcgcaugauuaga

SEQ ID NO: 280615 - RNA, 19 nt, Artificial Sequence
  Description of Artificial Sequence: Synthetic oligonucleotide
ugcuccggaaccgggguug

SEQ ID NO: 280616 - RNA, 19 nt, Artificial Sequence
  Description of Artificial Sequence: Synthetic oligonucleotide
ggccgaucaucaaacaacc

SEQ ID NO: 280617 - RNA, 19 nt, Artificial Sequence
  Description of Artificial Sequence: Synthetic oligonucleotide
cuucccacgagcggcaauc

SEQ ID NO: 280618 - RNA, 19 nt, Artificial Sequence
  Description of Artificial Sequence: Synthetic oligonucleotide
cuaaugaucuggacagaua

SEQ ID NO: 280619 - RNA, 19 nt, Artificial Sequence
  Description of Artificial Sequence: Synthetic oligonucleotide
uuggagugcucaacacauc

SEQ ID NO: 280620 - RNA, 19 nt, Artificial Sequence
  Description of Artificial Sequence: Synthetic oligonucleotide
agaggaacggacaguaguu

SEQ ID NO: 280621 - RNA, 19 nt, Artificial Sequence
  Description of Artificial Sequence: Synthetic oligonucleotide
ccaaccguggguaauacaa

SEQ ID NO: 280622 - RNA, 19 nt, Artificial Sequence
  Description of Artificial Sequence: Synthetic oligonucleotide
ucggcaugaguaacauuuu

SEQ ID NO: 280623 - RNA, 19 nt, Artificial Sequence
  Description of Artificial Sequence: Synthetic oligonucleotide
caauugucaaugcaacccu

SEQ ID NO: 280624 - RNA, 19 nt, Artificial Sequence
  Description of Artificial Sequence: Synthetic oligonucleotide
cuacaucggcaugaguaac

SEQ ID NO: 280625 - RNA, 19 nt, Artificial Sequence
  Description of Artificial Sequence: Synthetic oligonucleotide
gaaugguaauauguaauuu

SEQ ID NO: 280626 - RNA, 19 nt, Artificial Sequence
  Description of Artificial Sequence: Synthetic oligonucleotide
aaacccaaccguggguaau

SEQ ID NO: 280627 - RNA, 19 nt, Artificial Sequence
  Description of Artificial Sequence: Synthetic oligonucleotide
uucccacgagcggcaaucg

SEQ ID NO: 280628 - RNA, 19 nt, Artificial Sequence
  Description of Artificial Sequence: Synthetic oligonucleotide
acgagcggcaaucggcccu

SEQ ID NO: 280629 - RNA, 19 nt, Artificial Sequence
  Description of Artificial Sequence: Synthetic oligonucleotide
uuccuacgguguaagucua

SEQ ID NO: 280630 - RNA, 19 nt, Artificial Sequence
  Description of Artificial Sequence: Synthetic oligonucleotide
gucuaguggcaccagugaa

SEQ ID NO: 280631 - RNA, 19 nt, Artificial Sequence
  Description of Artificial Sequence: Synthetic oligonucleotide
agaagucuaguggcaccag

SEQ ID NO: 280632 - RNA, 19 nt, Artificial Sequence
  Description of Artificial Sequence: Synthetic oligonucleotide
ccauggccgaucaucaaac

SEQ ID NO: 280633 - RNA, 19 nt, Artificial Sequence
  Description of Artificial Sequence: Synthetic oligonucleotide
ggaguuauagucagggugu

SEQ ID NO: 280634 - RNA, 19 nt, Artificial Sequence
  Description of Artificial Sequence: Synthetic oligonucleotide
caauuauuccuacggugua

SEQ ID NO: 280635 - RNA, 19 nt, Artificial Sequence
  Description of Artificial Sequence: Synthetic oligonucleotide
acccaaccguggguaauac

SEQ ID NO: 280636 - RNA, 19 nt, Artificial Sequence
  Description of Artificial Sequence: Synthetic oligonucleotide
gaguuauagucaggguguc

SEQ ID NO: 280637 - RNA, 19 nt, Artificial Sequence
  Description of Artificial Sequence: Synthetic oligonucleotide
aacccaaccguggguaaua

SEQ ID NO: 280638 - RNA, 19 nt, Artificial Sequence
  Description of Artificial Sequence: Synthetic oligonucleotide
cggcaaucggcccugaacc

SEQ ID NO: 280639 - RNA, 19 nt, Artificial Sequence
  Description of Artificial Sequence: Synthetic oligonucleotide
ccaauuauuccuacggugu

SEQ ID NO: 280640 - RNA, 19 nt, Artificial Sequence
  Description of Artificial Sequence: Synthetic oligonucleotide
gacagauacaaaagagcau

SEQ ID NO: 280641 - RNA, 19 nt, Artificial Sequence
  Description of Artificial Sequence: Synthetic oligonucleotide
aaguauccuuugugcugaa

SEQ ID NO: 280642 - RNA, 19 nt, Artificial Sequence
  Description of Artificial Sequence: Synthetic oligonucleotide
ugcccauuuuacgguacaa

SEQ ID NO: 280643 - RNA, 19 nt, Artificial Sequence
  Description of Artificial Sequence: Synthetic oligonucleotide
cuaacucuuggcagaccaa

SEQ ID NO: 280644 - RNA, 19 nt, Artificial Sequence
  Description of Artificial Sequence: Synthetic oligonucleotide
guauaagcuacuggacucu

SEQ ID NO: 280645 - RNA, 19 nt, Artificial Sequence
  Description of Artificial Sequence: Synthetic oligonucleotide
cauggccgaucaucaaaca

SEQ ID NO: 280646 - RNA, 19 nt, Artificial Sequence
  Description of Artificial Sequence: Synthetic oligonucleotide
gacgggugcggacgacggc

SEQ ID NO: 280647 - RNA, 19 nt, Artificial Sequence
  Description of Artificial Sequence: Synthetic oligonucleotide
gagugccaaaccuuacaau

SEQ ID NO: 280648 - RNA, 19 nt, Artificial Sequence
  Description of Artificial Sequence: Synthetic oligonucleotide
accguggguaauacaauua

SEQ ID NO: 280649 - RNA, 19 nt, Artificial Sequence
  Description of Artificial Sequence: Synthetic oligonucleotide
gcggcaaucggcccugaac

SEQ ID NO: 280650 - RNA, 19 nt, Artificial Sequence
  Description of Artificial Sequence: Synthetic oligonucleotide
ggcggacacaagcgggcgg

SEQ ID NO: 280651 - RNA, 19 nt, Artificial Sequence
  Description of Artificial Sequence: Synthetic oligonucleotide
ccacuaacccaaugcuuug

SEQ ID NO: 280652 - RNA, 19 nt, Artificial Sequence
  Description of Artificial Sequence: Synthetic oligonucleotide
acaguaguucuaggauuau

SEQ ID NO: 280653 - RNA, 19 nt, Artificial Sequence
  Description of Artificial Sequence: Synthetic oligonucleotide
acguugcgcaugauuagau

SEQ ID NO: 280654 - RNA, 19 nt, Artificial Sequence
  Description of Artificial Sequence: Synthetic oligonucleotide
cauugguuccucgguucuc

SEQ ID NO: 280655 - RNA, 19 nt, Artificial Sequence
  Description of Artificial Sequence: Synthetic oligonucleotide
ggcaacacaugagcagaug

SEQ ID NO: 280656 - RNA, 19 nt, Artificial Sequence
  Description of Artificial Sequence: Synthetic oligonucleotide
cacgagggucaguuccauc

SEQ ID NO: 280657 - RNA, 19 nt, Artificial Sequence
  Description of Artificial Sequence: Synthetic oligonucleotide
ggacgggugcggacgacgg

SEQ ID NO: 280658 - RNA, 19 nt, Artificial Sequence
  Description of Artificial Sequence: Synthetic oligonucleotide
gaagauuauggagcucauu

SEQ ID NO: 280659 - RNA, 19 nt, Artificial Sequence
  Description of Artificial Sequence: Synthetic oligonucleotide
cauuuggaggaucucucuu

SEQ ID NO: 280660 - RNA, 19 nt, Artificial Sequence
  Description of Artificial Sequence: Synthetic oligonucleotide
gugcggacgacggcgguca

SEQ ID NO: 280661 - RNA, 19 nt, Artificial Sequence
  Description of Artificial Sequence: Synthetic oligonucleotide
aaucggcccugaacccacu

SEQ ID NO: 280662 - RNA, 19 nt, Artificial Sequence
  Description of Artificial Sequence: Synthetic oligonucleotide
ggaagacgucagaagaugu

SEQ ID NO: 280663 - RNA, 19 nt, Artificial Sequence
  Description of Artificial Sequence: Synthetic oligonucleotide
acguuaccuuuaguuacuu

SEQ ID NO: 280664 - RNA, 19 nt, Artificial Sequence
  Description of Artificial Sequence: Synthetic oligonucleotide
gcggacacaagcgggcggc

SEQ ID NO: 280665 - RNA, 19 nt, Artificial Sequence
  Description of Artificial Sequence: Synthetic oligonucleotide
ggggcggacacaagcgggc

SEQ ID NO: 280666 - RNA, 19 nt, Artificial Sequence
  Description of Artificial Sequence: Synthetic oligonucleotide
ggguuuuauuacacuagcu

SEQ ID NO: 280667 - RNA, 19 nt, Artificial Sequence
  Description of Artificial Sequence: Synthetic oligonucleotide
gacucggggcggacacaag

SEQ ID NO: 280668 - RNA, 19 nt, Artificial Sequence
  Description of Artificial Sequence: Synthetic oligonucleotide
gcaaucggcccugaaccca

SEQ ID NO: 280669 - RNA, 19 nt, Artificial Sequence
  Description of Artificial Sequence: Synthetic oligonucleotide
caaccguggguaauacaau

SEQ ID NO: 280670 - RNA, 19 nt, Artificial Sequence
  Description of Artificial Sequence: Synthetic oligonucleotide
ggaacggacaguaguucua

SEQ ID NO: 280671 - RNA, 19 nt, Artificial Sequence
  Description of Artificial Sequence: Synthetic oligonucleotide
gggcggacacaagcgggcg

SEQ ID NO: 280672 - RNA, 19 nt, Artificial Sequence
  Description of Artificial Sequence: Synthetic oligonucleotide
cccacuaacccaaugcuuu

SEQ ID NO: 280673 - RNA, 19 nt, Artificial Sequence
  Description of Artificial Sequence: Synthetic oligonucleotide
ggcagaccaauuauuccua

SEQ ID NO: 280674 - RNA, 19 nt, Artificial Sequence
  Description of Artificial Sequence: Synthetic oligonucleotide
agcggcaaucggcccugaa

SEQ ID NO: 280675 - RNA, 19 nt, Artificial Sequence
  Description of Artificial Sequence: Synthetic oligonucleotide
cacuagcuagaaugcucua

SEQ ID NO: 280676 - RNA, 19 nt, Artificial Sequence
  Description of Artificial Sequence: Synthetic oligonucleotide
cuccauggccgaucaucaa

SEQ ID NO: 280677 - RNA, 19 nt, Artificial Sequence
  Description of Artificial Sequence: Synthetic oligonucleotide
gcgagcggaaccaguccag

SEQ ID NO: 280678 - RNA, 19 nt, Artificial Sequence
  Description of Artificial Sequence: Synthetic oligonucleotide
ugcggacgacggcggucac

SEQ ID NO: 280679 - RNA, 19 nt, Artificial Sequence
  Description of Artificial Sequence: Synthetic oligonucleotide
caguauuaauaugucccuu

SEQ ID NO: 280680 - RNA, 19 nt, Artificial Sequence
  Description of Artificial Sequence: Synthetic oligonucleotide
ccgggagcgagcggggacg

SEQ ID NO: 280681 - RNA, 19 nt, Artificial Sequence
  Description of Artificial Sequence: Synthetic oligonucleotide
ccgggguuguccuccuaug

SEQ ID NO: 280682 - RNA, 19 nt, Artificial Sequence
  Description of Artificial Sequence: Synthetic oligonucleotide
gucgacguaaaagcugcuu

SEQ ID NO: 280683 - RNA, 19 nt, Artificial Sequence
  Description of Artificial Sequence: Synthetic oligonucleotide
acgacggcggucacugcuu

SEQ ID NO: 280684 - RNA, 19 nt, Artificial Sequence
  Description of Artificial Sequence: Synthetic oligonucleotide
gcgagcggggacgggugcg

SEQ ID NO: 280685 - RNA, 19 nt, Artificial Sequence
  Description of Artificial Sequence: Synthetic oligonucleotide
gcucauuuucgagaggcuu

SEQ ID NO: 280686 - RNA, 19 nt, Artificial Sequence
  Description of Artificial Sequence: Synthetic oligonucleotide
gugagacgggauaaacauu

SEQ ID NO: 280687 - RNA, 19 nt, Artificial Sequence
  Description of Artificial Sequence: Synthetic oligonucleotide
gccaaaccuuacaauggua

SEQ ID NO: 280688 - RNA, 19 nt, Artificial Sequence
  Description of Artificial Sequence: Synthetic oligonucleotide
ggugcggacgacggcgguc

SEQ ID NO: 280689 - RNA, 19 nt, Artificial Sequence
  Description of Artificial Sequence: Synthetic oligonucleotide
gagcggggacgggugcgga

SEQ ID NO: 280690 - RNA, 19 nt, Artificial Sequence
  Description of Artificial Sequence: Synthetic oligonucleotide
cccaaccguggguaauaca

SEQ ID NO: 280691 - RNA, 19 nt, Artificial Sequence
  Description of Artificial Sequence: Synthetic oligonucleotide
cgggugcggacgacggcgg

SEQ ID NO: 280692 - RNA, 19 nt, Artificial Sequence
  Description of Artificial Sequence: Synthetic oligonucleotide
gcccauuuuacgguacaau

SEQ ID NO: 280693 - RNA, 19 nt, Artificial Sequence
  Description of Artificial Sequence: Synthetic oligonucleotide
cuccggaaccgggguuguc

SEQ ID NO: 280694 - RNA, 19 nt, Artificial Sequence
  Description of Artificial Sequence: Synthetic oligonucleotide
cacaagcgggcggcagcga

SEQ ID NO: 280695 - RNA, 19 nt, Artificial Sequence
  Description of Artificial Sequence: Synthetic oligonucleotide
gccgaucaucaaacaaccu

SEQ ID NO: 280696 - RNA, 19 nt, Artificial Sequence
  Description of Artificial Sequence: Synthetic oligonucleotide
gagcggcaaucggcccuga

SEQ ID NO: 280697 - RNA, 19 nt, Artificial Sequence
  Description of Artificial Sequence: Synthetic oligonucleotide
cgacggcggucacugcuuc

SEQ ID NO: 280698 - RNA, 19 nt, Artificial Sequence
  Description of Artificial Sequence: Synthetic oligonucleotide
ccggaaccgggguuguccu

SEQ ID NO: 280699 - RNA, 19 nt, Artificial Sequence
  Description of Artificial Sequence: Synthetic oligonucleotide
ggggacgggugcggacgac

SEQ ID NO: 280700 - RNA, 19 nt, Artificial Sequence
  Description of Artificial Sequence: Synthetic oligonucleotide
cggaaccgggguuguccuc

SEQ ID NO: 280701 - RNA, 19 nt, Artificial Sequence
  Description of Artificial Sequence: Synthetic oligonucleotide
cgacucggggcggacacaa

SEQ ID NO: 280702 - RNA, 19 nt, Artificial Sequence
  Description of Artificial Sequence: Synthetic oligonucleotide
gcgacucggggcggacaca

SEQ ID NO: 280703 - RNA, 19 nt, Artificial Sequence
  Description of Artificial Sequence: Synthetic oligonucleotide
cguuaccuuuaguuacuuu

SEQ ID NO: 280704 - RNA, 19 nt, Artificial Sequence
  Description of Artificial Sequence: Synthetic oligonucleotide
ccggcgcgacucggggcgg

SEQ ID NO: 280705 - RNA, 19 nt, Artificial Sequence
  Description of Artificial Sequence: Synthetic oligonucleotide
gcuccggaaccgggguugu

SEQ ID NO: 280706 - RNA, 19 nt, Artificial Sequence
  Description of Artificial Sequence: Synthetic oligonucleotide
gcggacgacggcggucacu

SEQ ID NO: 280707 - RNA, 19 nt, Artificial Sequence
  Description of Artificial Sequence: Synthetic oligonucleotide
cggcggucacugcuuccca

SEQ ID NO: 280708 - RNA, 19 nt, Artificial Sequence
  Description of Artificial Sequence: Synthetic oligonucleotide
aaguauauagcucucaucc

SEQ ID NO: 280709 - RNA, 19 nt, Artificial Sequence
  Description of Artificial Sequence: Synthetic oligonucleotide
ucuuaagucaccaacagcc

SEQ ID NO: 280710 - RNA, 19 nt, Artificial Sequence
  Description of Artificial Sequence: Synthetic oligonucleotide
uuuaaagucccacauagag

SEQ ID NO: 280711 - RNA, 19 nt, Artificial Sequence
  Description of Artificial Sequence: Synthetic oligonucleotide
augaaugacauuuaaaaug

SEQ ID NO: 280712 - RNA, 19 nt, Artificial Sequence
  Description of Artificial Sequence: Synthetic oligonucleotide
uguguuauuuaauauaaug

SEQ ID NO: 280713 - RNA, 19 nt, Artificial Sequence
  Description of Artificial Sequence: Synthetic oligonucleotide
ucuauacaaguuuacaucc

SEQ ID NO: 280714 - RNA, 19 nt, Artificial Sequence
  Description of Artificial Sequence: Synthetic oligonucleotide
uaagcuauacauuggaaag

SEQ ID NO: 280715 - RNA, 19 nt, Artificial Sequence
  Description of Artificial Sequence: Synthetic oligonucleotide
aaacaauauuccuaugguc

SEQ ID NO: 280716 - RNA, 19 nt, Artificial Sequence
  Description of Artificial Sequence: Synthetic oligonucleotide
cuuacguucuucaaaaggc

SEQ ID NO: 280717 - RNA, 19 nt, Artificial Sequence
  Description of Artificial Sequence: Synthetic oligonucleotide
ucagagaauccuauggugg

SEQ ID NO: 280718 - RNA, 19 nt, Artificial Sequence
  Description of Artificial Sequence: Synthetic oligonucleotide
aaaaucaccauguuuguaa

SEQ ID NO: 280719 - RNA, 19 nt, Artificial Sequence
  Description of Artificial Sequence: Synthetic oligonucleotide
uaaacguuagauuaucuca

SEQ ID NO: 280720 - RNA, 19 nt, Artificial Sequence
  Description of Artificial Sequence: Synthetic oligonucleotide
uauaaaagaagcucacugc

SEQ ID NO: 280721 - RNA, 19 nt, Artificial Sequence
  Description of Artificial Sequence: Synthetic oligonucleotide
aagugauuaagguccuugc

SEQ ID NO: 280722 - RNA, 19 nt, Artificial Sequence
  Description of Artificial Sequence: Synthetic oligonucleotide
gacgacugcauauucagcg

SEQ ID NO: 280723 - RNA, 19 nt, Artificial Sequence
  Description of Artificial Sequence: Synthetic oligonucleotide
aaagagaagagagagagau

SEQ ID NO: 280724 - RNA, 19 nt, Artificial Sequence
  Description of Artificial Sequence: Synthetic oligonucleotide
auauguacuuuacaguccg

SEQ ID NO: 280725 - RNA, 19 nt, Artificial Sequence
  Description of Artificial Sequence: Synthetic oligonucleotide
aguguauugaaccagcgcu

SEQ ID NO: 280726 - RNA, 19 nt, Artificial Sequence
  Description of Artificial Sequence: Synthetic oligonucleotide
ugugcaaaaggacagugug

SEQ ID NO: 280727 - RNA, 19 nt, Artificial Sequence
  Description of Artificial Sequence: Synthetic oligonucleotide
gauacuccagucuuuaagc

SEQ ID NO: 280728 - RNA, 19 nt, Artificial Sequence
  Description of Artificial Sequence: Synthetic oligonucleotide
ucuguagcgaacauucucc

SEQ ID NO: 280729 - RNA, 19 nt, Artificial Sequence
  Description of Artificial Sequence: Synthetic oligonucleotide
acuacccgcagacagaaac

SEQ ID NO: 280730 - RNA, 19 nt, Artificial Sequence
  Description of Artificial Sequence: Synthetic oligonucleotide
uuuaguguauugaaccagc

SEQ ID NO: 280731 - RNA, 19 nt, Artificial Sequence
  Description of Artificial Sequence: Synthetic oligonucleotide
uuaagcuauacauuggaaa

SEQ ID NO: 280732 - RNA, 19 nt, Artificial Sequence
  Description of Artificial Sequence: Synthetic oligonucleotide
acacauccggcacacaucc

SEQ ID NO: 280733 - RNA, 19 nt, Artificial Sequence
  Description of Artificial Sequence: Synthetic oligonucleotide
aguacuaaauccuguacug

SEQ ID NO: 280734 - RNA, 19 nt, Artificial Sequence
  Description of Artificial Sequence: Synthetic oligonucleotide
aucuggacaauccccaggc

SEQ ID NO: 280735 - RNA, 19 nt, Artificial Sequence
  Description of Artificial Sequence: Synthetic oligonucleotide
aacccuaaggucugggagg

SEQ ID NO: 280736 - RNA, 19 nt, Artificial Sequence
  Description of Artificial Sequence: Synthetic oligonucleotide
aaagaagagaccuggguuu

SEQ ID NO: 280737 - RNA, 19 nt, Artificial Sequence
  Description of Artificial Sequence: Synthetic oligonucleotide
auuggcucaagucccuucc

SEQ ID NO: 280738 - RNA, 19 nt, Artificial Sequence
  Description of Artificial Sequence: Synthetic oligonucleotide
uucuuaaaugaacaucaca

SEQ ID NO: 280739 - RNA, 19 nt, Artificial Sequence
  Description of Artificial Sequence: Synthetic oligonucleotide
cacaagguauauaugaaug

SEQ ID NO: 280740 - RNA, 19 nt, Artificial Sequence
  Description of Artificial Sequence: Synthetic oligonucleotide
ucuugagacacaucaagga

SEQ ID NO: 280741 - RNA, 19 nt, Artificial Sequence
  Description of Artificial Sequence: Synthetic oligonucleotide
aaacacuugguugugauau

SEQ ID NO: 280742 - RNA, 19 nt, Artificial Sequence
  Description of Artificial Sequence: Synthetic oligonucleotide
uuaaacguuagauuaucuc

SEQ ID NO: 280743 - RNA, 19 nt, Artificial Sequence
  Description of Artificial Sequence: Synthetic oligonucleotide
agugcuucggccaacacgg

SEQ ID NO: 280744 - RNA, 19 nt, Artificial Sequence
  Description of Artificial Sequence: Synthetic oligonucleotide
uagaggauugcauccagag

SEQ ID NO: 280745 - RNA, 19 nt, Artificial Sequence
  Description of Artificial Sequence: Synthetic oligonucleotide
agagagauauucaaaguuc

SEQ ID NO: 280746 - RNA, 19 nt, Artificial Sequence
  Description of Artificial Sequence: Synthetic oligonucleotide
uugagacacaucaaggagu

SEQ ID NO: 280747 - RNA, 19 nt, Artificial Sequence
  Description of Artificial Sequence: Synthetic oligonucleotide
uguaagaauucucuagaaa

SEQ ID NO: 280748 - RNA, 19 nt, Artificial Sequence
  Description of Artificial Sequence: Synthetic oligonucleotide
ugauuuaaugguugaguug

SEQ ID NO: 280749 - RNA, 19 nt, Artificial Sequence
  Description of Artificial Sequence: Synthetic oligonucleotide
ugaaagaagagaccugggu

SEQ ID NO: 280750 - RNA, 19 nt, Artificial Sequence
  Description of Artificial Sequence: Synthetic oligonucleotide
uuacguucuucaaaaggcc

SEQ ID NO: 280751 - RNA, 19 nt, Artificial Sequence
  Description of Artificial Sequence: Synthetic oligonucleotide
aauuuucagguccucuuga

SEQ ID NO: 280752 - RNA, 19 nt, Artificial Sequence
  Description of Artificial Sequence: Synthetic oligonucleotide
acuccagucuuuaagcucc

SEQ ID NO: 280753 - RNA, 19 nt, Artificial Sequence
  Description of Artificial Sequence: Synthetic oligonucleotide
agacacaucaaggagucac

SEQ ID NO: 280754 - RNA, 19 nt, Artificial Sequence
  Description of Artificial Sequence: Synthetic oligonucleotide
guagcgaacauucuccaag

SEQ ID NO: 280755 - RNA, 19 nt, Artificial Sequence
  Description of Artificial Sequence: Synthetic oligonucleotide
uuaauaaccaggacaugaa

SEQ ID NO: 280756 - RNA, 19 nt, Artificial Sequence
  Description of Artificial Sequence: Synthetic oligonucleotide
gacacuuuacucuuccgug

SEQ ID NO: 280757 - RNA, 19 nt, Artificial Sequence
  Description of Artificial Sequence: Synthetic oligonucleotide
aguuguacuauuucuuuga

SEQ ID NO: 280758 - RNA, 19 nt, Artificial Sequence
  Description of Artificial Sequence: Synthetic oligonucleotide
aacguuagauuaucucaag

SEQ ID NO: 280759 - RNA, 19 nt, Artificial Sequence
  Description of Artificial Sequence: Synthetic oligonucleotide
auuuguagaguggagcagg

SEQ ID NO: 280760 - RNA, 19 nt, Artificial Sequence
  Description of Artificial Sequence: Synthetic oligonucleotide
agagaagagagagagauau

SEQ ID NO: 280761 - RNA, 19 nt, Artificial Sequence
  Description of Artificial Sequence: Synthetic oligonucleotide
gaaggcgucacagugcagg

SEQ ID NO: 280762 - RNA, 19 nt, Artificial Sequence
  Description of Artificial Sequence: Synthetic oligonucleotide
uauauagcucucauccaca

SEQ ID NO: 280763 - RNA, 19 nt, Artificial Sequence
  Description of Artificial Sequence: Synthetic oligonucleotide
ugucaucuggacaaucccc

SEQ ID NO: 280764 - RNA, 19 nt, Artificial Sequence
  Description of Artificial Sequence: Synthetic oligonucleotide
guuaauaaccaggacauga

SEQ ID NO: 280765 - RNA, 19 nt, Artificial Sequence
  Description of Artificial Sequence: Synthetic oligonucleotide
ucaucuuacguucuucaaa

SEQ ID NO: 280766 - RNA, 19 nt, Artificial Sequence
  Description of Artificial Sequence: Synthetic oligonucleotide
agauauucaaaguucugau

SEQ ID NO: 280767 - RNA, 19 nt, Artificial Sequence
  Description of Artificial Sequence: Synthetic oligonucleotide
gagguauguagucagagaa

SEQ ID NO: 280768 - RNA, 19 nt, Artificial Sequence
  Description of Artificial Sequence: Synthetic oligonucleotide
acugcgguauuuuaaguca

SEQ ID NO: 280769 - RNA, 19 nt, Artificial Sequence
  Description of Artificial Sequence: Synthetic oligonucleotide
aaaaguguguaaaaguaua

SEQ ID NO: 280770 - RNA, 19 nt, Artificial Sequence
  Description of Artificial Sequence: Synthetic oligonucleotide
aacauaagggcuagaaaca

SEQ ID NO: 280771 - RNA, 19 nt, Artificial Sequence
  Description of Artificial Sequence: Synthetic oligonucleotide
guauagagaagugauuaag

SEQ ID NO: 280772 - RNA, 19 nt, Artificial Sequence
  Description of Artificial Sequence: Synthetic oligonucleotide
aucauaucaauuauuacau

SEQ ID NO: 280773 - RNA, 19 nt, Artificial Sequence
  Description of Artificial Sequence: Synthetic oligonucleotide
agcgacuguaccugguacc

SEQ ID NO: 280774 - RNA, 19 nt, Artificial Sequence
  Description of Artificial Sequence: Synthetic oligonucleotide
caugugacuguauagagaa

SEQ ID NO: 280775 - RNA, 19 nt, Artificial Sequence
  Description of Artificial Sequence: Synthetic oligonucleotide
aggacucucccacggaagc

SEQ ID NO: 280776 - RNA, 19 nt, Artificial Sequence
  Description of Artificial Sequence: Synthetic oligonucleotide
ugauuaagguccuugccuc

SEQ ID NO: 280777 - RNA, 19 nt, Artificial Sequence
  Description of Artificial Sequence: Synthetic oligonucleotide
uggacaauccccaggcacc

SEQ ID NO: 280778 - RNA, 19 nt, Artificial Sequence
  Description of Artificial Sequence: Synthetic oligonucleotide
cuuuaagcuccccauggcc

SEQ ID NO: 280779 - RNA, 19 nt, Artificial Sequence
  Description of Artificial Sequence: Synthetic oligonucleotide
uagcgaacauucuccaagg

SEQ ID NO: 280780 - RNA, 19 nt, Artificial Sequence
  Description of Artificial Sequence: Synthetic oligonucleotide
uguucagcugagacgacug

SEQ ID NO: 280781 - RNA, 19 nt, Artificial Sequence
  Description of Artificial Sequence: Synthetic oligonucleotide
guuagauuaucucaagaaa

SEQ ID NO: 280782 - RNA, 19 nt, Artificial Sequence
  Description of Artificial Sequence: Synthetic oligonucleotide
acgacugcauauucagcgc

SEQ ID NO: 280783 - RNA, 19 nt, Artificial Sequence
  Description of Artificial Sequence: Synthetic oligonucleotide
guauauaugaaugacauuu

SEQ ID NO: 280784 - RNA, 19 nt, Artificial Sequence
  Description of Artificial Sequence: Synthetic oligonucleotide
cauuguacaacugcgugag

SEQ ID NO: 280785 - RNA, 19 nt, Artificial Sequence
  Description of Artificial Sequence: Synthetic oligonucleotide
uaguguauugaaccagcgc

SEQ ID NO: 280786 - RNA, 19 nt, Artificial Sequence
  Description of Artificial Sequence: Synthetic oligonucleotide
uuuuaaagucccacauaga

SEQ ID NO: 280787 - RNA, 19 nt, Artificial Sequence
  Description of Artificial Sequence: Synthetic oligonucleotide
ugaaccagcgcugagcugu

SEQ ID NO: 280788 - RNA, 19 nt, Artificial Sequence
  Description of Artificial Sequence: Synthetic oligonucleotide
uaucaaagucuuuagugua

SEQ ID NO: 280789 - RNA, 19 nt, Artificial Sequence
  Description of Artificial Sequence: Synthetic oligonucleotide
cucuugugcaaaaggacag

SEQ ID NO: 280790 - RNA, 19 nt, Artificial Sequence
  Description of Artificial Sequence: Synthetic oligonucleotide
gagauauucaaaguucuga

SEQ ID NO: 280791 - RNA, 19 nt, Artificial Sequence
  Description of Artificial Sequence: Synthetic oligonucleotide
uauauaaaagaagcucacu

SEQ ID NO: 280792 - RNA, 19 nt, Artificial Sequence
  Description of Artificial Sequence: Synthetic oligonucleotide
cagagaauccuaugguggg

SEQ ID NO: 280793 - RNA, 19 nt, Artificial Sequence
  Description of Artificial Sequence: Synthetic oligonucleotide
acaagcgcuucccaguuag

SEQ ID NO: 280794 - RNA, 19 nt, Artificial Sequence
  Description of Artificial Sequence: Synthetic oligonucleotide
uuuuaaacguuagauuauc

SEQ ID NO: 280795 - RNA, 19 nt, Artificial Sequence
  Description of Artificial Sequence: Synthetic oligonucleotide
cauugugacggcaucuggc

SEQ ID NO: 280796 - RNA, 19 nt, Artificial Sequence
  Description of Artificial Sequence: Synthetic oligonucleotide
gaagugauuaagguccuug

SEQ ID NO: 280797 - RNA, 19 nt, Artificial Sequence
  Description of Artificial Sequence: Synthetic oligonucleotide
ugcauauucagcgcagugc

SEQ ID NO: 280798 - RNA, 19 nt, Artificial Sequence
  Description of Artificial Sequence: Synthetic oligonucleotide
cauaagggcuagaaacagg

SEQ ID NO: 280799 - RNA, 19 nt, Artificial Sequence
  Description of Artificial Sequence: Synthetic oligonucleotide
ugcgugagcaccacaaagu

SEQ ID NO: 280800 - RNA, 19 nt, Artificial Sequence
  Description of Artificial Sequence: Synthetic oligonucleotide
uauugaaccagcgcugagc

SEQ ID NO: 280801 - RNA, 19 nt, Artificial Sequence
  Description of Artificial Sequence: Synthetic oligonucleotide
ucuuaguugugacgcgucc

SEQ ID NO: 280802 - RNA, 19 nt, Artificial Sequence
  Description of Artificial Sequence: Synthetic oligonucleotide
uguauagagaagugauuaa

SEQ ID NO: 280803 - RNA, 19 nt, Artificial Sequence
  Description of Artificial Sequence: Synthetic oligonucleotide
cacauagaggcucagcuuc

SEQ ID NO: 280804 - RNA, 19 nt, Artificial Sequence
  Description of Artificial Sequence: Synthetic oligonucleotide
ugagacgacugcauauuca

SEQ ID NO: 280805 - RNA, 19 nt, Artificial Sequence
  Description of Artificial Sequence: Synthetic oligonucleotide
uguacacgaaucccuuuug

SEQ ID NO: 280806 - RNA, 19 nt, Artificial Sequence
  Description of Artificial Sequence: Synthetic oligonucleotide
uggcuucuaggacagaggu

SEQ ID NO: 280807 - RNA, 19 nt, Artificial Sequence
  Description of Artificial Sequence: Synthetic oligonucleotide
auccacuacccgcagacag

SEQ ID NO: 280808 - RNA, 19 nt, Artificial Sequence
  Description of Artificial Sequence: Synthetic oligonucleotide
caagguauauaugaaugac

SEQ ID NO: 280809 - RNA, 19 nt, Artificial Sequence
  Description of Artificial Sequence: Synthetic oligonucleotide
uuggcuagaggauugcauc

SEQ ID NO: 280810 - RNA, 19 nt, Artificial Sequence
  Description of Artificial Sequence: Synthetic oligonucleotide
aaacguuagauuaucucaa

SEQ ID NO: 280811 - RNA, 19 nt, Artificial Sequence
  Description of Artificial Sequence: Synthetic oligonucleotide
auugugacggcaucuggca

SEQ ID NO: 280812 - RNA, 19 nt, Artificial Sequence
  Description of Artificial Sequence: Synthetic oligonucleotide
uuugcaggacucucccacg

SEQ ID NO: 280813 - RNA, 19 nt, Artificial Sequence
  Description of Artificial Sequence: Synthetic oligonucleotide
cgaacauucuccaaggagg

SEQ ID NO: 280814 - RNA, 19 nt, Artificial Sequence
  Description of Artificial Sequence: Synthetic oligonucleotide
uacguucuucaaaaggccu

SEQ ID NO: 280815 - RNA, 19 nt, Artificial Sequence
  Description of Artificial Sequence: Synthetic oligonucleotide
uaagucaauuuuacacugu

SEQ ID NO: 280816 - RNA, 19 nt, Artificial Sequence
  Description of Artificial Sequence: Synthetic oligonucleotide
cuuuaguguauugaaccag

SEQ ID NO: 280817 - RNA, 19 nt, Artificial Sequence
  Description of Artificial Sequence: Synthetic oligonucleotide
ugacccacaggcauccacc

SEQ ID NO: 280818 - RNA, 19 nt, Artificial Sequence
  Description of Artificial Sequence: Synthetic oligonucleotide
uccuguacuggauggagcu

SEQ ID NO: 280819 - RNA, 19 nt, Artificial Sequence
  Description of Artificial Sequence: Synthetic oligonucleotide
ugugacgcgucccagguua

SEQ ID NO: 280820 - RNA, 19 nt, Artificial Sequence
  Description of Artificial Sequence: Synthetic oligonucleotide
uggcucuuaguugugacgc

SEQ ID NO: 280821 - RNA, 19 nt, Artificial Sequence
  Description of Artificial Sequence: Synthetic oligonucleotide
aguauauagcucucaucca

SEQ ID NO: 280822 - RNA, 19 nt, Artificial Sequence
  Description of Artificial Sequence: Synthetic oligonucleotide
uaccugguaccucaaagaa

SEQ ID NO: 280823 - RNA, 19 nt, Artificial Sequence
  Description of Artificial Sequence: Synthetic oligonucleotide
accauuuccuggugacugc

SEQ ID NO: 280824 - RNA, 19 nt, Artificial Sequence
  Description of Artificial Sequence: Synthetic oligonucleotide
ugaccugcuugguaaagca

SEQ ID NO: 280825 - RNA, 19 nt, Artificial Sequence
  Description of Artificial Sequence: Synthetic oligonucleotide
uauucagcgcagugcuucg

SEQ ID NO: 280826 - RNA, 19 nt, Artificial Sequence
  Description of Artificial Sequence: Synthetic oligonucleotide
caaucuuacgcgcggacac

SEQ ID NO: 280827 - RNA, 19 nt, Artificial Sequence
  Description of Artificial Sequence: Synthetic oligonucleotide
gacacuaacagaggcugag

SEQ ID NO: 280828 - RNA, 19 nt, Artificial Sequence
  Description of Artificial Sequence: Synthetic oligonucleotide
aagcuauacauuggaaagu

SEQ ID NO: 280829 - RNA, 19 nt, Artificial Sequence
  Description of Artificial Sequence: Synthetic oligonucleotide
ggauacuccagucuuuaag

SEQ ID NO: 280830 - RNA, 19 nt, Artificial Sequence
  Description of Artificial Sequence: Synthetic oligonucleotide
agguguuuccaugugacug

SEQ ID NO: 280831 - RNA, 19 nt, Artificial Sequence
  Description of Artificial Sequence: Synthetic oligonucleotide
guuuacaacacaggucucc

SEQ ID NO: 280832 - RNA, 19 nt, Artificial Sequence
  Description of Artificial Sequence: Synthetic oligonucleotide
uugcaggacucucccacgg

SEQ ID NO: 280833 - RNA, 19 nt, Artificial Sequence
  Description of Artificial Sequence: Synthetic oligonucleotide
acauaagggcuagaaacag

SEQ ID NO: 280834 - RNA, 19 nt, Artificial Sequence
  Description of Artificial Sequence: Synthetic oligonucleotide
aguugugacgcgucccagg

SEQ ID NO: 280835 - RNA, 19 nt, Artificial Sequence
  Description of Artificial Sequence: Synthetic oligonucleotide
uggcuagaggauugcaucc

SEQ ID NO: 280836 - RNA, 19 nt, Artificial Sequence
  Description of Artificial Sequence: Synthetic oligonucleotide
guacuaaauccuguacugg

SEQ ID NO: 280837 - RNA, 19 nt, Artificial Sequence
  Description of Artificial Sequence: Synthetic oligonucleotide
cuaaugaaagaagagaccu

SEQ ID NO: 280838 - RNA, 19 nt, Artificial Sequence
  Description of Artificial Sequence: Synthetic oligonucleotide
caacccuaaggucugggag

SEQ ID NO: 280839 - RNA, 19 nt, Artificial Sequence
  Description of Artificial Sequence: Synthetic oligonucleotide
ugacuguauagagaaguga

SEQ ID NO: 280840 - RNA, 19 nt, Artificial Sequence
  Description of Artificial Sequence: Synthetic oligonucleotide
caucuuacguucuucaaaa

SEQ ID NO: 280841 - RNA, 19 nt, Artificial Sequence
  Description of Artificial Sequence: Synthetic oligonucleotide
aagcgcuucccaguuagag

SEQ ID NO: 280842 - RNA, 19 nt, Artificial Sequence
  Description of Artificial Sequence: Synthetic oligonucleotide
gguugugauauguacacga

SEQ ID NO: 280843 - RNA, 19 nt, Artificial Sequence
  Description of Artificial Sequence: Synthetic oligonucleotide
agguuauggaguccgggug

SEQ ID NO: 280844 - RNA, 19 nt, Artificial Sequence
  Description of Artificial Sequence: Synthetic oligonucleotide
uguauugaaccagcgcuga

SEQ ID NO: 280845 - RNA, 19 nt, Artificial Sequence
  Description of Artificial Sequence: Synthetic oligonucleotide
guguuauuuaauauaaugu

SEQ ID NO: 280846 - RNA, 19 nt, Artificial Sequence
  Description of Artificial Sequence: Synthetic oligonucleotide
ugacucuauacaaguuuac

SEQ ID NO: 280847 - RNA, 19 nt, Artificial Sequence
  Description of Artificial Sequence: Synthetic oligonucleotide
uacaacugcgugagcacca

SEQ ID NO: 280848 - RNA, 19 nt, Artificial Sequence
  Description of Artificial Sequence: Synthetic oligonucleotide
ggacagagaacaaucaccc

SEQ ID NO: 280849 - RNA, 19 nt, Artificial Sequence
  Description of Artificial Sequence: Synthetic oligonucleotide
acguuagauuaucucaaga

SEQ ID NO: 280850 - RNA, 19 nt, Artificial Sequence
  Description of Artificial Sequence: Synthetic oligonucleotide
aaguguguaaaaguauaua

SEQ ID NO: 280851 - RNA, 19 nt, Artificial Sequence
  Description of Artificial Sequence: Synthetic oligonucleotide
gacuggucuccccaguuug

SEQ ID NO: 280852 - RNA, 19 nt, Artificial Sequence
  Description of Artificial Sequence: Synthetic oligonucleotide
gguuugauagaucagauuu

SEQ ID NO: 280853 - RNA, 19 nt, Artificial Sequence
  Description of Artificial Sequence: Synthetic oligonucleotide
cuggacaauccccaggcac

SEQ ID NO: 280854 - RNA, 19 nt, Artificial Sequence
  Description of Artificial Sequence: Synthetic oligonucleotide
cacugcgguauuuuaaguc

SEQ ID NO: 280855 - RNA, 19 nt, Artificial Sequence
  Description of Artificial Sequence: Synthetic oligonucleotide
guguguucagcugagacga

SEQ ID NO: 280856 - RNA, 19 nt, Artificial Sequence
  Description of Artificial Sequence: Synthetic oligonucleotide
uacacgaaucccuuuugau

SEQ ID NO: 280857 - RNA, 19 nt, Artificial Sequence
  Description of Artificial Sequence: Synthetic oligonucleotide
uccccaucaucuuacguuc

SEQ ID NO: 280858 - RNA, 19 nt, Artificial Sequence
  Description of Artificial Sequence: Synthetic oligonucleotide
uuaagguccuugccuccag

SEQ ID NO: 280859 - RNA, 19 nt, Artificial Sequence
  Description of Artificial Sequence: Synthetic oligonucleotide
acucuugugcaaaaggaca

SEQ ID NO: 280860 - RNA, 19 nt, Artificial Sequence
  Description of Artificial Sequence: Synthetic oligonucleotide
guagucagagaauccuaug

SEQ ID NO: 280861 - RNA, 19 nt, Artificial Sequence
  Description of Artificial Sequence: Synthetic oligonucleotide
uggguuucagcgacuguac

SEQ ID NO: 280862 - RNA, 19 nt, Artificial Sequence
  Description of Artificial Sequence: Synthetic oligonucleotide
aaaagagaagagagagaga

SEQ ID NO: 280863 - RNA, 19 nt, Artificial Sequence
  Description of Artificial Sequence: Synthetic oligonucleotide
cacgaaucccuuuugaucu

SEQ ID NO: 280864 - RNA, 19 nt, Artificial Sequence
  Description of Artificial Sequence: Synthetic oligonucleotide
uacaguccguuuucaccgg

SEQ ID NO: 280865 - RNA, 19 nt, Artificial Sequence
  Description of Artificial Sequence: Synthetic oligonucleotide
ugugacggcaucuggcauc

SEQ ID NO: 280866 - RNA, 19 nt, Artificial Sequence
  Description of Artificial Sequence: Synthetic oligonucleotide
gacgcgucccagguuaugg

SEQ ID NO: 280867 - RNA, 19 nt, Artificial Sequence
  Description of Artificial Sequence: Synthetic oligonucleotide
aacacggagcccauuguga

SEQ ID NO: 280868 - RNA, 19 nt, Artificial Sequence
  Description of Artificial Sequence: Synthetic oligonucleotide
gguauguagucagagaauc

SEQ ID NO: 280869 - RNA, 19 nt, Artificial Sequence
  Description of Artificial Sequence: Synthetic oligonucleotide
aggaggauacuccagucuu

SEQ ID NO: 280870 - RNA, 19 nt, Artificial Sequence
  Description of Artificial Sequence: Synthetic oligonucleotide
aaguggacgggaaggcagg

SEQ ID NO: 280871 - RNA, 19 nt, Artificial Sequence
  Description of Artificial Sequence: Synthetic oligonucleotide
uguuguagaguuggguuuc

SEQ ID NO: 280872 - RNA, 19 nt, Artificial Sequence
  Description of Artificial Sequence: Synthetic oligonucleotide
accggggugacucuauaca

SEQ ID NO: 280873 - RNA, 19 nt, Artificial Sequence
  Description of Artificial Sequence: Synthetic oligonucleotide
guaccugguaccucaaaga

SEQ ID NO: 280874 - RNA, 19 nt, Artificial Sequence
  Description of Artificial Sequence: Synthetic oligonucleotide
gaguggagcaggcuccuug

SEQ ID NO: 280875 - RNA, 19 nt, Artificial Sequence
  Description of Artificial Sequence: Synthetic oligonucleotide
aagagaccuggguuucugu

SEQ ID NO: 280876 - RNA, 19 nt, Artificial Sequence
  Description of Artificial Sequence: Synthetic oligonucleotide
aggauugcauccagagggc

SEQ ID NO: 280877 - RNA, 19 nt, Artificial Sequence
  Description of Artificial Sequence: Synthetic oligonucleotide
ugguugugauauguacacg

SEQ ID NO: 280878 - RNA, 19 nt, Artificial Sequence
  Description of Artificial Sequence: Synthetic oligonucleotide
cccgcagacagaaacauac

SEQ ID NO: 280879 - RNA, 19 nt, Artificial Sequence
  Description of Artificial Sequence: Synthetic oligonucleotide
uccacuacccgcagacaga

SEQ ID NO: 280880 - RNA, 19 nt, Artificial Sequence
  Description of Artificial Sequence: Synthetic oligonucleotide
agcccaaucuuacgcgcgg

SEQ ID NO: 280881 - RNA, 19 nt, Artificial Sequence
  Description of Artificial Sequence: Synthetic oligonucleotide
auauagcucucauccacaa

SEQ ID NO: 280882 - RNA, 19 nt, Artificial Sequence
  Description of Artificial Sequence: Synthetic oligonucleotide
gagguggagaccccaguac

SEQ ID NO: 280883 - RNA, 19 nt, Artificial Sequence
  Description of Artificial Sequence: Synthetic oligonucleotide
guagaguggagcaggcucc

SEQ ID NO: 280884 - RNA, 19 nt, Artificial Sequence
  Description of Artificial Sequence: Synthetic oligonucleotide
aaauccuguacuggaugga

SEQ ID NO: 280885 - RNA, 19 nt, Artificial Sequence
  Description of Artificial Sequence: Synthetic oligonucleotide
cuguauagagaagugauua

SEQ ID NO: 280886 - RNA, 19 nt, Artificial Sequence
  Description of Artificial Sequence: Synthetic oligonucleotide
gaacauucuccaaggagga

SEQ ID NO: 280887 - RNA, 19 nt, Artificial Sequence
  Description of Artificial Sequence: Synthetic oligonucleotide
gggacagagaacaaucacc

SEQ ID NO: 280888 - RNA, 19 nt, Artificial Sequence
  Description of Artificial Sequence: Synthetic oligonucleotide
gcgaacauucuccaaggag

SEQ ID NO: 280889 - RNA, 19 nt, Artificial Sequence
  Description of Artificial Sequence: Synthetic oligonucleotide
cuucggccaacacggagcc

SEQ ID NO: 280890 - RNA, 19 nt, Artificial Sequence
  Description of Artificial Sequence: Synthetic oligonucleotide
guauguagucagagaaucc

SEQ ID NO: 280891 - RNA, 19 nt, Artificial Sequence
  Description of Artificial Sequence: Synthetic oligonucleotide
augaaagaagagaccuggg

SEQ ID NO: 280892 - RNA, 19 nt, Artificial Sequence
  Description of Artificial Sequence: Synthetic oligonucleotide
caaguacugauuuaauggu

SEQ ID NO: 280893 - RNA, 19 nt, Artificial Sequence
  Description of Artificial Sequence: Synthetic oligonucleotide
gaacuuaguuugcaggacu

SEQ ID NO: 280894 - RNA, 19 nt, Artificial Sequence
  Description of Artificial Sequence: Synthetic oligonucleotide
ugcagcggagaucccacac

SEQ ID NO: 280895 - RNA, 19 nt, Artificial Sequence
  Description of Artificial Sequence: Synthetic oligonucleotide
uaacagaggcugagagcag

SEQ ID NO: 280896 - RNA, 19 nt, Artificial Sequence
  Description of Artificial Sequence: Synthetic oligonucleotide
uaagguccuugccuccagc

SEQ ID NO: 280897 - RNA, 19 nt, Artificial Sequence
  Description of Artificial Sequence: Synthetic oligonucleotide
aaaggaccccuggggcucc

SEQ ID NO: 280898 - RNA, 19 nt, Artificial Sequence
  Description of Artificial Sequence: Synthetic oligonucleotide
cacuuuacucuuccgugac

SEQ ID NO: 280899 - RNA, 19 nt, Artificial Sequence
  Description of Artificial Sequence: Synthetic oligonucleotide
aacugcgugagcaccacaa

SEQ ID NO: 280900 - RNA, 19 nt, Artificial Sequence
  Description of Artificial Sequence: Synthetic oligonucleotide
agaucccacacauccggca

SEQ ID NO: 280901 - RNA, 19 nt, Artificial Sequence
  Description of Artificial Sequence: Synthetic oligonucleotide
agcugagacgacugcauau

SEQ ID NO: 280902 - RNA, 19 nt, Artificial Sequence
  Description of Artificial Sequence: Synthetic oligonucleotide
agcuauacauuggaaaguu

SEQ ID NO: 280903 - RNA, 19 nt, Artificial Sequence
  Description of Artificial Sequence: Synthetic oligonucleotide
uccaauugccugcuauaua

SEQ ID NO: 280904 - RNA, 19 nt, Artificial Sequence
  Description of Artificial Sequence: Synthetic oligonucleotide
acaguccguuuucaccggg

SEQ ID NO: 280905 - RNA, 19 nt, Artificial Sequence
  Description of Artificial Sequence: Synthetic oligonucleotide
uuccaauugccugcuauau

SEQ ID NO: 280906 - RNA, 19 nt, Artificial Sequence
  Description of Artificial Sequence: Synthetic oligonucleotide
uguagcgaacauucuccaa

SEQ ID NO: 280907 - RNA, 19 nt, Artificial Sequence
  Description of Artificial Sequence: Synthetic oligonucleotide
gacugcauauucagcgcag

SEQ ID NO: 280908 - RNA, 19 nt, Artificial Sequence
  Description of Artificial Sequence: Synthetic oligonucleotide
ccucuugagacacaucaag

SEQ ID NO: 280909 - RNA, 19 nt, Artificial Sequence
  Description of Artificial Sequence: Synthetic oligonucleotide
acacuugguugugauaugu

SEQ ID NO: 280910 - RNA, 19 nt, Artificial Sequence
  Description of Artificial Sequence: Synthetic oligonucleotide
gacuguauagagaagugau

SEQ ID NO: 280911 - RNA, 19 nt, Artificial Sequence
  Description of Artificial Sequence: Synthetic oligonucleotide
uuacgcgcggacacuuuac

SEQ ID NO: 280912 - RNA, 19 nt, Artificial Sequence
  Description of Artificial Sequence: Synthetic oligonucleotide
ugguuugauagaucagauu

SEQ ID NO: 280913 - RNA, 19 nt, Artificial Sequence
  Description of Artificial Sequence: Synthetic oligonucleotide
aaucuuacgcgcggacacu

SEQ ID NO: 280914 - RNA, 19 nt, Artificial Sequence
  Description of Artificial Sequence: Synthetic oligonucleotide
guauugaaccagcgcugag

SEQ ID NO: 280915 - RNA, 19 nt, Artificial Sequence
  Description of Artificial Sequence: Synthetic oligonucleotide
acgcgcggacacuuuacuc

SEQ ID NO: 280916 - RNA, 19 nt, Artificial Sequence
  Description of Artificial Sequence: Synthetic oligonucleotide
aaagcaaccccaaguggua

SEQ ID NO: 280917 - RNA, 19 nt, Artificial Sequence
  Description of Artificial Sequence: Synthetic oligonucleotide
uacgcgcggacacuuuacu

SEQ ID NO: 280918 - RNA, 19 nt, Artificial Sequence
  Description of Artificial Sequence: Synthetic oligonucleotide
cagcccaaucuuacgcgcg

SEQ ID NO: 280919 - RNA, 19 nt, Artificial Sequence
  Description of Artificial Sequence: Synthetic oligonucleotide
cugcgggaggagcugaggc

SEQ ID NO: 280920 - RNA, 19 nt, Artificial Sequence
  Description of Artificial Sequence: Synthetic oligonucleotide
guacaacugcgugagcacc

SEQ ID NO: 280921 - RNA, 19 nt, Artificial Sequence
  Description of Artificial Sequence: Synthetic oligonucleotide
caagacgccccaagcggcc

SEQ ID NO: 280922 - RNA, 19 nt, Artificial Sequence
  Description of Artificial Sequence: Synthetic oligonucleotide
uucagcgacuguaccuggu

SEQ ID NO: 280923 - RNA, 19 nt, Artificial Sequence
  Description of Artificial Sequence: Synthetic oligonucleotide
cugcauauucagcgcagug

SEQ ID NO: 280924 - RNA, 19 nt, Artificial Sequence
  Description of Artificial Sequence: Synthetic oligonucleotide
acaacugcgugagcaccac

SEQ ID NO: 280925 - RNA, 19 nt, Artificial Sequence
  Description of Artificial Sequence: Synthetic oligonucleotide
guacacgaaucccuuuuga

SEQ ID NO: 280926 - RNA, 19 nt, Artificial Sequence
  Description of Artificial Sequence: Synthetic oligonucleotide
ucacuacaaaggaccccug

SEQ ID NO: 280927 - RNA, 19 nt, Artificial Sequence
  Description of Artificial Sequence: Synthetic oligonucleotide
ggcucaagucccuuccuag

SEQ ID NO: 280928 - RNA, 19 nt, Artificial Sequence
  Description of Artificial Sequence: Synthetic oligonucleotide
cccaguuagagcauguuca

SEQ ID NO: 280929 - RNA, 19 nt, Artificial Sequence
  Description of Artificial Sequence: Synthetic oligonucleotide
cucuuaguugugacgcguc

SEQ ID NO: 280930 - RNA, 19 nt, Artificial Sequence
  Description of Artificial Sequence: Synthetic oligonucleotide
caguccguuuucaccgggg

SEQ ID NO: 280931 - RNA, 19 nt, Artificial Sequence
  Description of Artificial Sequence: Synthetic oligonucleotide
auauuccuaugguccagaa

SEQ ID NO: 280932 - RNA, 19 nt, Artificial Sequence
  Description of Artificial Sequence: Synthetic oligonucleotide
auuggcuagaggauugcau

SEQ ID NO: 280933 - RNA, 19 nt, Artificial Sequence
  Description of Artificial Sequence: Synthetic oligonucleotide
caguacuaaauccuguacu

SEQ ID NO: 280934 - RNA, 19 nt, Artificial Sequence
  Description of Artificial Sequence: Synthetic oligonucleotide
aagacgccccaagcggccg

SEQ ID NO: 280935 - RNA, 19 nt, Artificial Sequence
  Description of Artificial Sequence: Synthetic oligonucleotide
cugagacgacugcauauuc

SEQ ID NO: 280936 - RNA, 19 nt, Artificial Sequence
  Description of Artificial Sequence: Synthetic oligonucleotide
uuuucaccggggugacucu

SEQ ID NO: 280937 - RNA, 19 nt, Artificial Sequence
  Description of Artificial Sequence: Synthetic oligonucleotide
agcgaacauucuccaagga

SEQ ID NO: 280938 - RNA, 19 nt, Artificial Sequence
  Description of Artificial Sequence: Synthetic oligonucleotide
gcaccauucccauaacuuc

SEQ ID NO: 280939 - RNA, 19 nt, Artificial Sequence
  Description of Artificial Sequence: Synthetic oligonucleotide
aagcggccgaugacgacuc

SEQ ID NO: 280940 - RNA, 19 nt, Artificial Sequence
  Description of Artificial Sequence: Synthetic oligonucleotide
ccuuccuagggaaauuuuc

SEQ ID NO: 280941 - RNA, 19 nt, Artificial Sequence
  Description of Artificial Sequence: Synthetic oligonucleotide
gcauuguacaacugcguga

SEQ ID NO: 280942 - RNA, 19 nt, Artificial Sequence
  Description of Artificial Sequence: Synthetic oligonucleotide
auauguacacgaaucccuu

SEQ ID NO: 280943 - RNA, 19 nt, Artificial Sequence
  Description of Artificial Sequence: Synthetic oligonucleotide
uugugacggcaucuggcau

SEQ ID NO: 280944 - RNA, 19 nt, Artificial Sequence
  Description of Artificial Sequence: Synthetic oligonucleotide
cuagaggauugcauccaga

SEQ ID NO: 280945 - RNA, 19 nt, Artificial Sequence
  Description of Artificial Sequence: Synthetic oligonucleotide
ucucccacggaagccgggc

SEQ ID NO: 280946 - RNA, 19 nt, Artificial Sequence
  Description of Artificial Sequence: Synthetic oligonucleotide
gcuagaggauugcauccag

SEQ ID NO: 280947 - RNA, 19 nt, Artificial Sequence
  Description of Artificial Sequence: Synthetic oligonucleotide
cuacccgcagacagaaaca

SEQ ID NO: 280948 - RNA, 19 nt, Artificial Sequence
  Description of Artificial Sequence: Synthetic oligonucleotide
gccaacacggagcccauug

SEQ ID NO: 280949 - RNA, 19 nt, Artificial Sequence
  Description of Artificial Sequence: Synthetic oligonucleotide
guacuuuacaguccguuuu

SEQ ID NO: 280950 - RNA, 19 nt, Artificial Sequence
  Description of Artificial Sequence: Synthetic oligonucleotide
accagcgcugagcuguagu

SEQ ID NO: 280951 - RNA, 19 nt, Artificial Sequence
  Description of Artificial Sequence: Synthetic oligonucleotide
acuguauagagaagugauu

SEQ ID NO: 280952 - RNA, 19 nt, Artificial Sequence
  Description of Artificial Sequence: Synthetic oligonucleotide
gcgugagcaccacaaagug

SEQ ID NO: 280953 - RNA, 19 nt, Artificial Sequence
  Description of Artificial Sequence: Synthetic oligonucleotide
aucacccauuuacaaguua

SEQ ID NO: 280954 - RNA, 19 nt, Artificial Sequence
  Description of Artificial Sequence: Synthetic oligonucleotide
gacagugugucuucuguuu

SEQ ID NO: 280955 - RNA, 19 nt, Artificial Sequence
  Description of Artificial Sequence: Synthetic oligonucleotide
aagagaagagagagagaua

SEQ ID NO: 280956 - RNA, 19 nt, Artificial Sequence
  Description of Artificial Sequence: Synthetic oligonucleotide
cagcgacuguaccugguac

SEQ ID NO: 280957 - RNA, 19 nt, Artificial Sequence
  Description of Artificial Sequence: Synthetic oligonucleotide
guccguuuucaccggggug

SEQ ID NO: 280958 - RNA, 19 nt, Artificial Sequence
  Description of Artificial Sequence: Synthetic oligonucleotide
aagcaaccccaagugguaa

SEQ ID NO: 280959 - RNA, 19 nt, Artificial Sequence
  Description of Artificial Sequence: Synthetic oligonucleotide
uguguucagcugagacgac

SEQ ID NO: 280960 - RNA, 19 nt, Artificial Sequence
  Description of Artificial Sequence: Synthetic oligonucleotide
gugacccacaggcauccac

SEQ ID NO: 280961 - RNA, 19 nt, Artificial Sequence
  Description of Artificial Sequence: Synthetic oligonucleotide
gcauauucagcgcagugcu

SEQ ID NO: 280962 - RNA, 19 nt, Artificial Sequence
  Description of Artificial Sequence: Synthetic oligonucleotide
acugcauauucagcgcagu

SEQ ID NO: 280963 - RNA, 19 nt, Artificial Sequence
  Description of Artificial Sequence: Synthetic oligonucleotide
cguuagauuaucucaagaa

SEQ ID NO: 280964 - RNA, 19 nt, Artificial Sequence
  Description of Artificial Sequence: Synthetic oligonucleotide
aaagucccacauagaggcu

SEQ ID NO: 280965 - RNA, 19 nt, Artificial Sequence
  Description of Artificial Sequence: Synthetic oligonucleotide
auccuauggugggucuugg

SEQ ID NO: 280966 - RNA, 19 nt, Artificial Sequence
  Description of Artificial Sequence: Synthetic oligonucleotide
guggguuucagcgacugua

SEQ ID NO: 280967 - RNA, 19 nt, Artificial Sequence
  Description of Artificial Sequence: Synthetic oligonucleotide
aaucacccauuuacaaguu

SEQ ID NO: 280968 - RNA, 19 nt, Artificial Sequence
  Description of Artificial Sequence: Synthetic oligonucleotide
ggcucuuaguugugacgcg

SEQ ID NO: 280969 - RNA, 19 nt, Artificial Sequence
  Description of Artificial Sequence: Synthetic oligonucleotide
ugagccugacuggucuccc

SEQ ID NO: 280970 - RNA, 19 nt, Artificial Sequence
  Description of Artificial Sequence: Synthetic oligonucleotide
auucagcgcagugcuucgg

SEQ ID NO: 280971 - RNA, 19 nt, Artificial Sequence
  Description of Artificial Sequence: Synthetic oligonucleotide
uucaccggggugacucuau

SEQ ID NO: 280972 - RNA, 19 nt, Artificial Sequence
  Description of Artificial Sequence: Synthetic oligonucleotide
gguuuccucucugauaaga

SEQ ID NO: 280973 - RNA, 19 nt, Artificial Sequence
  Description of Artificial Sequence: Synthetic oligonucleotide
ggcaaugaacacugcagaa

SEQ ID NO: 280974 - RNA, 19 nt, Artificial Sequence
  Description of Artificial Sequence: Synthetic oligonucleotide
acugcgugagcaccacaaa

SEQ ID NO: 280975 - RNA, 19 nt, Artificial Sequence
  Description of Artificial Sequence: Synthetic oligonucleotide
guugugacgcgucccaggu

SEQ ID NO: 280976 - RNA, 19 nt, Artificial Sequence
  Description of Artificial Sequence: Synthetic oligonucleotide
caaccccaagugguaaaag

SEQ ID NO: 280977 - RNA, 19 nt, Artificial Sequence
  Description of Artificial Sequence: Synthetic oligonucleotide
accccaguacuaaauccug

SEQ ID NO: 280978 - RNA, 19 nt, Artificial Sequence
  Description of Artificial Sequence: Synthetic oligonucleotide
agguauguagucagagaau

SEQ ID NO: 280979 - RNA, 19 nt, Artificial Sequence
  Description of Artificial Sequence: Synthetic oligonucleotide
ggauagaaggagagucugc

SEQ ID NO: 280980 - RNA, 19 nt, Artificial Sequence
  Description of Artificial Sequence: Synthetic oligonucleotide
gaggccuuuaucauuguuu

SEQ ID NO: 280981 - RNA, 19 nt, Artificial Sequence
  Description of Artificial Sequence: Synthetic oligonucleotide
agucccuuccuagggaaau

SEQ ID NO: 280982 - RNA, 19 nt, Artificial Sequence
  Description of Artificial Sequence: Synthetic oligonucleotide
caccggggugacucuauac

SEQ ID NO: 280983 - RNA, 19 nt, Artificial Sequence
  Description of Artificial Sequence: Synthetic oligonucleotide
acacuaacagaggcugaga

SEQ ID NO: 280984 - RNA, 19 nt, Artificial Sequence
  Description of Artificial Sequence: Synthetic oligonucleotide
gccgaugacgacucuccag

SEQ ID NO: 280985 - RNA, 19 nt, Artificial Sequence
  Description of Artificial Sequence: Synthetic oligonucleotide
aggauacuccagucuuuaa

SEQ ID NO: 280986 - RNA, 19 nt, Artificial Sequence
  Description of Artificial Sequence: Synthetic oligonucleotide
gcaucacuacaaaggaccc

SEQ ID NO: 280987 - RNA, 19 nt, Artificial Sequence
  Description of Artificial Sequence: Synthetic oligonucleotide
ggacacuuuacucuuccgu

SEQ ID NO: 280988 - RNA, 19 nt, Artificial Sequence
  Description of Artificial Sequence: Synthetic oligonucleotide
agaccuccugugucuacaa

SEQ ID NO: 280989 - RNA, 19 nt, Artificial Sequence
  Description of Artificial Sequence: Synthetic oligonucleotide
ccaauugccugcuauauau

SEQ ID NO: 280990 - RNA, 19 nt, Artificial Sequence
  Description of Artificial Sequence: Synthetic oligonucleotide
ucuuacgcgcggacacuuu

SEQ ID NO: 280991 - RNA, 19 nt, Artificial Sequence
  Description of Artificial Sequence: Synthetic oligonucleotide
cugcgguauuuuaagucaa

SEQ ID NO: 280992 - RNA, 19 nt, Artificial Sequence
  Description of Artificial Sequence: Synthetic oligonucleotide
caaacacuugguugugaua

SEQ ID NO: 280993 - RNA, 19 nt, Artificial Sequence
  Description of Artificial Sequence: Synthetic oligonucleotide
gaccuggguuucuguaaga

SEQ ID NO: 280994 - RNA, 19 nt, Artificial Sequence
  Description of Artificial Sequence: Synthetic oligonucleotide
gguguuuccaugugacugu

SEQ ID NO: 280995 - RNA, 19 nt, Artificial Sequence
  Description of Artificial Sequence: Synthetic oligonucleotide
acguucuucaaaaggccuu

SEQ ID NO: 280996 - RNA, 19 nt, Artificial Sequence
  Description of Artificial Sequence: Synthetic oligonucleotide
cccucuuaagucaccaaca

SEQ ID NO: 280997 - RNA, 19 nt, Artificial Sequence
  Description of Artificial Sequence: Synthetic oligonucleotide
aggugugcugccaaccaaa

SEQ ID NO: 280998 - RNA, 19 nt, Artificial Sequence
  Description of Artificial Sequence: Synthetic oligonucleotide
aggagucacuguggcaaug

SEQ ID NO: 280999 - RNA, 19 nt, Artificial Sequence
  Description of Artificial Sequence: Synthetic oligonucleotide
ucuuuccaauugccugcua

SEQ ID NO: 281000 - RNA, 19 nt, Artificial Sequence
  Description of Artificial Sequence: Synthetic oligonucleotide
ucaccggggugacucuaua

SEQ ID NO: 281001 - RNA, 19 nt, Artificial Sequence
  Description of Artificial Sequence: Synthetic oligonucleotide
cuuacgcgcggacacuuua

SEQ ID NO: 281002 - RNA, 19 nt, Artificial Sequence
  Description of Artificial Sequence: Synthetic oligonucleotide
caauugccugcuauauaua

SEQ ID NO: 281003 - RNA, 19 nt, Artificial Sequence
  Description of Artificial Sequence: Synthetic oligonucleotide
accauguuuguaacugguu

SEQ ID NO: 281004 - RNA, 19 nt, Artificial Sequence
  Description of Artificial Sequence: Synthetic oligonucleotide
ccccaguuuguucucacuc

SEQ ID NO: 281005 - RNA, 19 nt, Artificial Sequence
  Description of Artificial Sequence: Synthetic oligonucleotide
acgaaucccuuuugaucua

SEQ ID NO: 281006 - RNA, 19 nt, Artificial Sequence
  Description of Artificial Sequence: Synthetic oligonucleotide
ccgggcauuuguagagugg

SEQ ID NO: 281007 - RNA, 19 nt, Artificial Sequence
  Description of Artificial Sequence: Synthetic oligonucleotide
acauucccaccauguguua

SEQ ID NO: 281008 - RNA, 19 nt, Artificial Sequence
  Description of Artificial Sequence: Synthetic oligonucleotide
agcggagaucccacacauc

SEQ ID NO: 281009 - RNA, 19 nt, Artificial Sequence
  Description of Artificial Sequence: Synthetic oligonucleotide
cauuggcuagaggauugca

SEQ ID NO: 281010 - RNA, 19 nt, Artificial Sequence
  Description of Artificial Sequence: Synthetic oligonucleotide
ggaaauuuucagguccucu

SEQ ID NO: 281011 - RNA, 19 nt, Artificial Sequence
  Description of Artificial Sequence: Synthetic oligonucleotide
aaccagcgcugagcuguag

SEQ ID NO: 281012 - RNA, 19 nt, Artificial Sequence
  Description of Artificial Sequence: Synthetic oligonucleotide
gagaagugauuaagguccu

SEQ ID NO: 281013 - RNA, 19 nt, Artificial Sequence
  Description of Artificial Sequence: Synthetic oligonucleotide
cacuugguugugauaugua

SEQ ID NO: 281014 - RNA, 19 nt, Artificial Sequence
  Description of Artificial Sequence: Synthetic oligonucleotide
ugacgcgucccagguuaug

SEQ ID NO: 281015 - RNA, 19 nt, Artificial Sequence
  Description of Artificial Sequence: Synthetic oligonucleotide
uugugacgcgucccagguu

SEQ ID NO: 281016 - RNA, 19 nt, Artificial Sequence
  Description of Artificial Sequence: Synthetic oligonucleotide
ucccaccauguguuauuua

SEQ ID NO: 281017 - RNA, 19 nt, Artificial Sequence
  Description of Artificial Sequence: Synthetic oligonucleotide
cagcgcugagcuguaguuc

SEQ ID NO: 281018 - RNA, 19 nt, Artificial Sequence
  Description of Artificial Sequence: Synthetic oligonucleotide
aggcgacucuggaagccag

SEQ ID NO: 281019 - RNA, 19 nt, Artificial Sequence
  Description of Artificial Sequence: Synthetic oligonucleotide
gagagucugcagcggagau

SEQ ID NO: 281020 - RNA, 19 nt, Artificial Sequence
  Description of Artificial Sequence: Synthetic oligonucleotide
auacaacauaagggcuaga

SEQ ID NO: 281021 - RNA, 19 nt, Artificial Sequence
  Description of Artificial Sequence: Synthetic oligonucleotide
cagaccuccugugucuaca

SEQ ID NO: 281022 - RNA, 19 nt, Artificial Sequence
  Description of Artificial Sequence: Synthetic oligonucleotide
gggugacccacaggcaucc

SEQ ID NO: 281023 - RNA, 19 nt, Artificial Sequence
  Description of Artificial Sequence: Synthetic oligonucleotide
auacuucaaucagcuguua

SEQ ID NO: 281024 - RNA, 19 nt, Artificial Sequence
  Description of Artificial Sequence: Synthetic oligonucleotide
cggggugacucuauacaag

SEQ ID NO: 281025 - RNA, 19 nt, Artificial Sequence
  Description of Artificial Sequence: Synthetic oligonucleotide
agaagugauuaagguccuu

SEQ ID NO: 281026 - RNA, 19 nt, Artificial Sequence
  Description of Artificial Sequence: Synthetic oligonucleotide
gagacacaucaaggaguca

SEQ ID NO: 281027 - RNA, 19 nt, Artificial Sequence
  Description of Artificial Sequence: Synthetic oligonucleotide
ggacucucccacggaagcc

SEQ ID NO: 281028 - RNA, 19 nt, Artificial Sequence
  Description of Artificial Sequence: Synthetic oligonucleotide
caggcaccauucccauaac

SEQ ID NO: 281029 - RNA, 19 nt, Artificial Sequence
  Description of Artificial Sequence: Synthetic oligonucleotide
caagcggccgaugacgacu

SEQ ID NO: 281030 - RNA, 19 nt, Artificial Sequence
  Description of Artificial Sequence: Synthetic oligonucleotide
agacgccccaagcggccga

SEQ ID NO: 281031 - RNA, 19 nt, Artificial Sequence
  Description of Artificial Sequence: Synthetic oligonucleotide
ggcuagaggauugcaucca

SEQ ID NO: 281032 - RNA, 19 nt, Artificial Sequence
  Description of Artificial Sequence: Synthetic oligonucleotide
cgaugacgacucuccaggg

SEQ ID NO: 281033 - RNA, 19 nt, Artificial Sequence
  Description of Artificial Sequence: Synthetic oligonucleotide
ccuaaggucugggagggga

SEQ ID NO: 281034 - RNA, 19 nt, Artificial Sequence
  Description of Artificial Sequence: Synthetic oligonucleotide
guguucagcugagacgacu

SEQ ID NO: 281035 - RNA, 19 nt, Artificial Sequence
  Description of Artificial Sequence: Synthetic oligonucleotide
cccaaucuuacgcgcggac

SEQ ID NO: 281036 - RNA, 19 nt, Artificial Sequence
  Description of Artificial Sequence: Synthetic oligonucleotide
caaaaggccuugaggguuu

SEQ ID NO: 281037 - RNA, 19 nt, Artificial Sequence
  Description of Artificial Sequence: Synthetic oligonucleotide
cccauugugacggcaucug

SEQ ID NO: 281038 - RNA, 19 nt, Artificial Sequence
  Description of Artificial Sequence: Synthetic oligonucleotide
ggacaauccccaggcacca

SEQ ID NO: 281039 - RNA, 19 nt, Artificial Sequence
  Description of Artificial Sequence: Synthetic oligonucleotide
cccagguuauggaguccgg

SEQ ID NO: 281040 - RNA, 19 nt, Artificial Sequence
  Description of Artificial Sequence: Synthetic oligonucleotide
caagcgcuucccaguuaga

SEQ ID NO: 281041 - RNA, 19 nt, Artificial Sequence
  Description of Artificial Sequence: Synthetic oligonucleotide
uucggccaacacggagccc

SEQ ID NO: 281042 - RNA, 19 nt, Artificial Sequence
  Description of Artificial Sequence: Synthetic oligonucleotide
cacauuggcucaagucccu

SEQ ID NO: 281043 - RNA, 19 nt, Artificial Sequence
  Description of Artificial Sequence: Synthetic oligonucleotide
cugcuugguaaagcaaugu

SEQ ID NO: 281044 - RNA, 19 nt, Artificial Sequence
  Description of Artificial Sequence: Synthetic oligonucleotide
ccauuggcuagaggauugc

SEQ ID NO: 281045 - RNA, 19 nt, Artificial Sequence
  Description of Artificial Sequence: Synthetic oligonucleotide
cauagaggcucagcuucaa

SEQ ID NO: 281046 - RNA, 19 nt, Artificial Sequence
  Description of Artificial Sequence: Synthetic oligonucleotide
cgcgucccagguuauggag

SEQ ID NO: 281047 - RNA, 19 nt, Artificial Sequence
  Description of Artificial Sequence: Synthetic oligonucleotide
gcugcgggaggagcugagg

SEQ ID NO: 281048 - RNA, 19 nt, Artificial Sequence
  Description of Artificial Sequence: Synthetic oligonucleotide
ccacaagguauauaugaau

SEQ ID NO: 281049 - RNA, 19 nt, Artificial Sequence
  Description of Artificial Sequence: Synthetic oligonucleotide
  modified_base (19)..(19): a, c, u, g, unknown or other
gcuauacauuggaaaguun

SEQ ID NO: 281050 - RNA, 19 nt, Artificial Sequence
  Description of Artificial Sequence: Synthetic oligonucleotide
cuguaccugguaccucaaa

SEQ ID NO: 281051 - RNA, 19 nt, Artificial Sequence
  Description of Artificial Sequence: Synthetic oligonucleotide
ccaaucuuacgcgcggaca

SEQ ID NO: 281052 - RNA, 19 nt, Artificial Sequence
  Description of Artificial Sequence: Synthetic oligonucleotide
gcgacucuggaagccaguc

SEQ ID NO: 281053 - RNA, 19 nt, Artificial Sequence
  Description of Artificial Sequence: Synthetic oligonucleotide
gagaagagagagagauauu

SEQ ID NO: 281054 - RNA, 19 nt, Artificial Sequence
  Description of Artificial Sequence: Synthetic oligonucleotide
guuguagaguuggguuucu

SEQ ID NO: 281055 - RNA, 19 nt, Artificial Sequence
  Description of Artificial Sequence: Synthetic oligonucleotide
ccggggugacucuauacaa

SEQ ID NO: 281056 - RNA, 19 nt, Artificial Sequence
  Description of Artificial Sequence: Synthetic oligonucleotide
gcaaccccaagugguaaaa

SEQ ID NO: 281057 - RNA, 19 nt, Artificial Sequence
  Description of Artificial Sequence: Synthetic oligonucleotide
ccccauggccaagacgccc

SEQ ID NO: 281058 - RNA, 19 nt, Artificial Sequence
  Description of Artificial Sequence: Synthetic oligonucleotide
ggccuuuaucauuguuucu

SEQ ID NO: 281059 - RNA, 19 nt, Artificial Sequence
  Description of Artificial Sequence: Synthetic oligonucleotide
cgacugcauauucagcgca

SEQ ID NO: 281060 - RNA, 19 nt, Artificial Sequence
  Description of Artificial Sequence: Synthetic oligonucleotide
ggagaccccaguacuaaau

SEQ ID NO: 281061 - RNA, 19 nt, Artificial Sequence
  Description of Artificial Sequence: Synthetic oligonucleotide
ggccgaugacgacucucca

SEQ ID NO: 281062 - RNA, 19 nt, Artificial Sequence
  Description of Artificial Sequence: Synthetic oligonucleotide
cauucccaccauguguuau

SEQ ID NO: 281063 - RNA, 19 nt, Artificial Sequence
  Description of Artificial Sequence: Synthetic oligonucleotide
agcggccgaugacgacucu

SEQ ID NO: 281064 - RNA, 19 nt, Artificial Sequence
  Description of Artificial Sequence: Synthetic oligonucleotide
gcucuuaguugugacgcgu

SEQ ID NO: 281065 - RNA, 19 nt, Artificial Sequence
  Description of Artificial Sequence: Synthetic oligonucleotide
ccaagcggccgaugacgac

SEQ ID NO: 281066 - RNA, 19 nt, Artificial Sequence
  Description of Artificial Sequence: Synthetic oligonucleotide
gcgacuguaccugguaccu

SEQ ID NO: 281067 - RNA, 19 nt, Artificial Sequence
  Description of Artificial Sequence: Synthetic oligonucleotide
caccauuggcuagaggauu

SEQ ID NO: 281068 - RNA, 19 nt, Artificial Sequence
  Description of Artificial Sequence: Synthetic oligonucleotide
gaaccagcgcugagcugua

SEQ ID NO: 281069 - RNA, 19 nt, Artificial Sequence
  Description of Artificial Sequence: Synthetic oligonucleotide
ggacaagcgcuucccaguu

SEQ ID NO: 281070 - RNA, 19 nt, Artificial Sequence
  Description of Artificial Sequence: Synthetic oligonucleotide
gcugagacgacugcauauu

SEQ ID NO: 281071 - RNA, 19 nt, Artificial Sequence
  Description of Artificial Sequence: Synthetic oligonucleotide
ggcuucuaggacagaggua

SEQ ID NO: 281072 - RNA, 19 nt, Artificial Sequence
  Description of Artificial Sequence: Synthetic oligonucleotide
gcgguauuuuaagucaauu

SEQ ID NO: 281073 - RNA, 19 nt, Artificial Sequence
  Description of Artificial Sequence: Synthetic oligonucleotide
ggcugcgggaggagcugag

SEQ ID NO: 281074 - RNA, 19 nt, Artificial Sequence
  Description of Artificial Sequence: Synthetic oligonucleotide
cgcgcggacacuuuacucu

SEQ ID NO: 281075 - RNA, 19 nt, Artificial Sequence
  Description of Artificial Sequence: Synthetic oligonucleotide
cacuacccgcagacagaaa

SEQ ID NO: 281076 - RNA, 19 nt, Artificial Sequence
  Description of Artificial Sequence: Synthetic oligonucleotide
ggaggccuuuaucauuguu

SEQ ID NO: 281077 - RNA, 19 nt, Artificial Sequence
  Description of Artificial Sequence: Synthetic oligonucleotide
ccguuuucaccggggugac

SEQ ID NO: 281078 - RNA, 19 nt, Artificial Sequence
  Description of Artificial Sequence: Synthetic oligonucleotide
cucccacggaagccgggcu

SEQ ID NO: 281079 - RNA, 19 nt, Artificial Sequence
  Description of Artificial Sequence: Synthetic oligonucleotide
cacauccggcacacauccu

SEQ ID NO: 281080 - RNA, 19 nt, Artificial Sequence
  Description of Artificial Sequence: Synthetic oligonucleotide
ccccaguacuaaauccugu

SEQ ID NO: 281081 - RNA, 19 nt, Artificial Sequence
  Description of Artificial Sequence: Synthetic oligonucleotide
gcccaaucuuacgcgcgga

SEQ ID NO: 281082 - RNA, 19 nt, Artificial Sequence
  Description of Artificial Sequence: Synthetic oligonucleotide
acgccccaagcggccgaug

SEQ ID NO: 281083 - RNA, 19 nt, Artificial Sequence
  Description of Artificial Sequence: Synthetic oligonucleotide
gcccauugugacggcaucu

SEQ ID NO: 281084 - RNA, 19 nt, Artificial Sequence
  Description of Artificial Sequence: Synthetic oligonucleotide
gcgcggacacuuuacucuu

SEQ ID NO: 281085 - RNA, 19 nt, Artificial Sequence
  Description of Artificial Sequence: Synthetic oligonucleotide
ccgggugacccacaggcau

SEQ ID NO: 281086 - RNA, 19 nt, Artificial Sequence
  Description of Artificial Sequence: Synthetic oligonucleotide
cuggauggagcuggcucuu

SEQ ID NO: 281087 - RNA, 19 nt, Artificial Sequence
  Description of Artificial Sequence: Synthetic oligonucleotide
gacgccccaagcggccgau

SEQ ID NO: 281088 - RNA, 19 nt, Artificial Sequence
  Description of Artificial Sequence: Synthetic oligonucleotide
cgacuguaccugguaccuc

SEQ ID NO: 281089 - RNA, 19 nt, Artificial Sequence
  Description of Artificial Sequence: Synthetic oligonucleotide
gugacgcgucccagguuau

SEQ ID NO: 281090 - RNA, 19 nt, Artificial Sequence
  Description of Artificial Sequence: Synthetic oligonucleotide
ggcgacucuggaagccagu

SEQ ID NO: 281091 - RNA, 19 nt, Artificial Sequence
  Description of Artificial Sequence: Synthetic oligonucleotide
cccuuccuagggaaauuuu

SEQ ID NO: 281092 - RNA, 19 nt, Artificial Sequence
  Description of Artificial Sequence: Synthetic oligonucleotide
cgacucuccagggcagaga

SEQ ID NO: 281093 - RNA, 19 nt, Artificial Sequence
  Description of Artificial Sequence: Synthetic oligonucleotide
cccacacauccggcacaca

SEQ ID NO: 281094 - RNA, 19 nt, Artificial Sequence
  Description of Artificial Sequence: Synthetic oligonucleotide
cggcccgccaggcgacucu

SEQ ID NO: 281095 - RNA, 19 nt, Artificial Sequence
  Description of Artificial Sequence: Synthetic oligonucleotide
cccggcccgccaggcgacu

SEQ ID NO: 281096 - RNA, 19 nt, Artificial Sequence
  Description of Artificial Sequence: Synthetic oligonucleotide
aaacgguugaaguaaaugc

SEQ ID NO: 281097 - RNA, 19 nt, Artificial Sequence
  Description of Artificial Sequence: Synthetic oligonucleotide
aauaaugugcucugggagc

SEQ ID NO: 281098 - RNA, 19 nt, Artificial Sequence
  Description of Artificial Sequence: Synthetic oligonucleotide
aagggaugcaccuuugucc

SEQ ID NO: 281099 - RNA, 19 nt, Artificial Sequence
  Description of Artificial Sequence: Synthetic oligonucleotide
ugugguuauacuauggucc

SEQ ID NO: 281100 - RNA, 19 nt, Artificial Sequence
  Description of Artificial Sequence: Synthetic oligonucleotide
uaucuuuaggacaugaccc

SEQ ID NO: 281101 - RNA, 19 nt, Artificial Sequence
  Description of Artificial Sequence: Synthetic oligonucleotide
aauaacagacgcccaaugg

SEQ ID NO: 281102 - RNA, 19 nt, Artificial Sequence
  Description of Artificial Sequence: Synthetic oligonucleotide
uauacuaugguccaggcau

SEQ ID NO: 281103 - RNA, 19 nt, Artificial Sequence
  Description of Artificial Sequence: Synthetic oligonucleotide
acugauacaccccagcccc

SEQ ID NO: 281104 - RNA, 19 nt, Artificial Sequence
  Description of Artificial Sequence: Synthetic oligonucleotide
aaugggcugacguucacac

SEQ ID NO: 281105 - RNA, 19 nt, Artificial Sequence
  Description of Artificial Sequence: Synthetic oligonucleotide
auagagaauacaaugcccc

SEQ ID NO: 281106 - RNA, 19 nt, Artificial Sequence
  Description of Artificial Sequence: Synthetic oligonucleotide
uuggcuuuaaauauggaaa

SEQ ID NO: 281107 - RNA, 19 nt, Artificial Sequence
  Description of Artificial Sequence: Synthetic oligonucleotide
auaacagacgcccaauggg

SEQ ID NO: 281108 - RNA, 19 nt, Artificial Sequence
  Description of Artificial Sequence: Synthetic oligonucleotide
auugagagcgcucugguag

SEQ ID NO: 281109 - RNA, 19 nt, Artificial Sequence
  Description of Artificial Sequence: Synthetic oligonucleotide
ugcaaaacuguaaacguca

SEQ ID NO: 281110 - RNA, 19 nt, Artificial Sequence
  Description of Artificial Sequence: Synthetic oligonucleotide
uuagucgccgcccacaugc

SEQ ID NO: 281111 - RNA, 19 nt, Artificial Sequence
  Description of Artificial Sequence: Synthetic oligonucleotide
acggccaugaaucugggac

SEQ ID NO: 281112 - RNA, 19 nt, Artificial Sequence
  Description of Artificial Sequence: Synthetic oligonucleotide
aguacagcgagucagcuca

SEQ ID NO: 281113 - RNA, 19 nt, Artificial Sequence
  Description of Artificial Sequence: Synthetic oligonucleotide
aacucacgaaauaacagac

SEQ ID NO: 281114 - RNA, 19 nt, Artificial Sequence
  Description of Artificial Sequence: Synthetic oligonucleotide
gacauuuaguuccuggaag

SEQ ID NO: 281115 - RNA, 19 nt, Artificial Sequence
  Description of Artificial Sequence: Synthetic oligonucleotide
aaugcugagaaaaggugac

SEQ ID NO: 281116 - RNA, 19 nt, Artificial Sequence
  Description of Artificial Sequence: Synthetic oligonucleotide
aaauacacaaagccccgag

SEQ ID NO: 281117 - RNA, 19 nt, Artificial Sequence
  Description of Artificial Sequence: Synthetic oligonucleotide
cucacgaaauaacagacgc

SEQ ID NO: 281118 - RNA, 19 nt, Artificial Sequence
  Description of Artificial Sequence: Synthetic oligonucleotide
guaucuuuaggacaugacc

SEQ ID NO: 281119 - RNA, 19 nt, Artificial Sequence
  Description of Artificial Sequence: Synthetic oligonucleotide
caugcauacaucuugccug

SEQ ID NO: 281120 - RNA, 19 nt, Artificial Sequence
  Description of Artificial Sequence: Synthetic oligonucleotide
aaaacgguugaaguaaaug

SEQ ID NO: 281121 - RNA, 19 nt, Artificial Sequence
  Description of Artificial Sequence: Synthetic oligonucleotide
aaauucugcauuagucgcc

SEQ ID NO: 281122 - RNA, 19 nt, Artificial Sequence
  Description of Artificial Sequence: Synthetic oligonucleotide
gaaguaaaugcugucgagg

SEQ ID NO: 281123 - RNA, 19 nt, Artificial Sequence
  Description of Artificial Sequence: Synthetic oligonucleotide
uuaaaaggcgguuccagca

SEQ ID NO: 281124 - RNA, 19 nt, Artificial Sequence
  Description of Artificial Sequence: Synthetic oligonucleotide
cauagagaauacaaugccc

SEQ ID NO: 281125 - RNA, 19 nt, Artificial Sequence
  Description of Artificial Sequence: Synthetic oligonucleotide
agggaugcaccuuuguccc

SEQ ID NO: 281126 - RNA, 19 nt, Artificial Sequence
  Description of Artificial Sequence: Synthetic oligonucleotide
aauagccuggggaucaggc

SEQ ID NO: 281127 - RNA, 19 nt, Artificial Sequence
  Description of Artificial Sequence: Synthetic oligonucleotide
guugaaguaaaugcugucg

SEQ ID NO: 281128 - RNA, 19 nt, Artificial Sequence
  Description of Artificial Sequence: Synthetic oligonucleotide
aggcauagagaauacaaug

SEQ ID NO: 281129 - RNA, 19 nt, Artificial Sequence
  Description of Artificial Sequence: Synthetic oligonucleotide
uguccgaauacuagcauca

SEQ ID NO: 281130 - RNA, 19 nt, Artificial Sequence
  Description of Artificial Sequence: Synthetic oligonucleotide
aggggauggacacacuacc

SEQ ID NO: 281131 - RNA, 19 nt, Artificial Sequence
  Description of Artificial Sequence: Synthetic oligonucleotide
guacucaugggucagccgg

SEQ ID NO: 281132 - RNA, 19 nt, Artificial Sequence
  Description of Artificial Sequence: Synthetic oligonucleotide
cacgaaauaacagacgccc

SEQ ID NO: 281133 - RNA, 19 nt, Artificial Sequence
  Description of Artificial Sequence: Synthetic oligonucleotide
ucagagauacggauguggc

SEQ ID NO: 281134 - RNA, 19 nt, Artificial Sequence
  Description of Artificial Sequence: Synthetic oligonucleotide
cauccuucgucucauaggc

SEQ ID NO: 281135 - RNA, 19 nt, Artificial Sequence
  Description of Artificial Sequence: Synthetic oligonucleotide
aagaggucuuugcaggguc

SEQ ID NO: 281136 - RNA, 19 nt, Artificial Sequence
  Description of Artificial Sequence: Synthetic oligonucleotide
aaaccuacuguucacuuuu

SEQ ID NO: 281137 - RNA, 19 nt, Artificial Sequence
  Description of Artificial Sequence: Synthetic oligonucleotide
ugcagaaaacgguugaagu

SEQ ID NO: 281138 - RNA, 19 nt, Artificial Sequence
  Description of Artificial Sequence: Synthetic oligonucleotide
ucacauuggcuuuaaauau

SEQ ID NO: 281139 - RNA, 19 nt, Artificial Sequence
  Description of Artificial Sequence: Synthetic oligonucleotide
uguuguccgaauacuagca

SEQ ID NO: 281140 - RNA, 19 nt, Artificial Sequence
  Description of Artificial Sequence: Synthetic oligonucleotide
cuaugguccaggcauagag

SEQ ID NO: 281141 - RNA, 19 nt, Artificial Sequence
  Description of Artificial Sequence: Synthetic oligonucleotide
aaaugcugagaaaagguga

SEQ ID NO: 281142 - RNA, 19 nt, Artificial Sequence
  Description of Artificial Sequence: Synthetic oligonucleotide
gaacucacgaaauaacaga

SEQ ID NO: 281143 - RNA, 19 nt, Artificial Sequence
  Description of Artificial Sequence: Synthetic oligonucleotide
ugaaguaaaugcugucgag

SEQ ID NO: 281144 - RNA, 19 nt, Artificial Sequence
  Description of Artificial Sequence: Synthetic oligonucleotide
cccaaagacauuuaguucc

SEQ ID NO: 281145 - RNA, 19 nt, Artificial Sequence
  Description of Artificial Sequence: Synthetic oligonucleotide
auaggcguaggccaagcuc

SEQ ID NO: 281146 - RNA, 19 nt, Artificial Sequence
  Description of Artificial Sequence: Synthetic oligonucleotide
uguggcucagaaaauucug

SEQ ID NO: 281147 - RNA, 19 nt, Artificial Sequence
  Description of Artificial Sequence: Synthetic oligonucleotide
uaggcguaggccaagcuca

SEQ ID NO: 281148 - RNA, 19 nt, Artificial Sequence
  Description of Artificial Sequence: Synthetic oligonucleotide
guaaacgucacugagagua

SEQ ID NO: 281149 - RNA, 19 nt, Artificial Sequence
  Description of Artificial Sequence: Synthetic oligonucleotide
acuuuuaugagggauucug

SEQ ID NO: 281150 - RNA, 19 nt, Artificial Sequence
  Description of Artificial Sequence: Synthetic oligonucleotide
aacuguucgauguccagaa

SEQ ID NO: 281151 - RNA, 19 nt, Artificial Sequence
  Description of Artificial Sequence: Synthetic oligonucleotide
aucaggggucacuucauac

SEQ ID NO: 281152 - RNA, 19 nt, Artificial Sequence
  Description of Artificial Sequence: Synthetic oligonucleotide
uuuaacuguagagaacugu

SEQ ID NO: 281153 - RNA, 19 nt, Artificial Sequence
  Description of Artificial Sequence: Synthetic oligonucleotide
cacaagucucacuuggagg

SEQ ID NO: 281154 - RNA, 19 nt, Artificial Sequence
  Description of Artificial Sequence: Synthetic oligonucleotide
ucuacuuuuaugagggauu

SEQ ID NO: 281155 - RNA, 19 nt, Artificial Sequence
  Description of Artificial Sequence: Synthetic oligonucleotide
guagacaaugcguucccgg

SEQ ID NO: 281156 - RNA, 19 nt, Artificial Sequence
  Description of Artificial Sequence: Synthetic oligonucleotide
aaacgucacugagaguagc

SEQ ID NO: 281157 - RNA, 19 nt, Artificial Sequence
  Description of Artificial Sequence: Synthetic oligonucleotide
aaaggcgccgugcuuaggu

SEQ ID NO: 281158 - RNA, 19 nt, Artificial Sequence
  Description of Artificial Sequence: Synthetic oligonucleotide
uacggucccauguuguccg

SEQ ID NO: 281159 - RNA, 19 nt, Artificial Sequence
  Description of Artificial Sequence: Synthetic oligonucleotide
uguaucuuuaggacaugac

SEQ ID NO: 281160 - RNA, 19 nt, Artificial Sequence
  Description of Artificial Sequence: Synthetic oligonucleotide
uggcuuuaaauauggaaaa

SEQ ID NO: 281161 - RNA, 19 nt, Artificial Sequence
  Description of Artificial Sequence: Synthetic oligonucleotide
auaaauacacaaagccccg

SEQ ID NO: 281162 - RNA, 19 nt, Artificial Sequence
  Description of Artificial Sequence: Synthetic oligonucleotide
ugucccaagaugacccagg

SEQ ID NO: 281163 - RNA, 19 nt, Artificial Sequence
  Description of Artificial Sequence: Synthetic oligonucleotide
ucacgaaauaacagacgcc

SEQ ID NO: 281164 - RNA, 19 nt, Artificial Sequence
  Description of Artificial Sequence: Synthetic oligonucleotide
gcuauauacauccauacaa

SEQ ID NO: 281165 - RNA, 19 nt, Artificial Sequence
  Description of Artificial Sequence: Synthetic oligonucleotide
uccguuucucaucaggggu

SEQ ID NO: 281166 - RNA, 19 nt, Artificial Sequence
  Description of Artificial Sequence: Synthetic oligonucleotide
uuuuaccaccuccggagcc

SEQ ID NO: 281167 - RNA, 19 nt, Artificial Sequence
  Description of Artificial Sequence: Synthetic oligonucleotide
ggaggggucauucuaaccc

SEQ ID NO: 281168 - RNA, 19 nt, Artificial Sequence
  Description of Artificial Sequence: Synthetic oligonucleotide
uaaacgucacugagaguag

SEQ ID NO: 281169 - RNA, 19 nt, Artificial Sequence
  Description of Artificial Sequence: Synthetic oligonucleotide
aguaaauagccuggggauc

SEQ ID NO: 281170 - RNA, 19 nt, Artificial Sequence
  Description of Artificial Sequence: Synthetic oligonucleotide
uuuaggacaugacccagua

SEQ ID NO: 281171 - RNA, 19 nt, Artificial Sequence
  Description of Artificial Sequence: Synthetic oligonucleotide
gauccauccagcccaaaga

SEQ ID NO: 281172 - RNA, 19 nt, Artificial Sequence
  Description of Artificial Sequence: Synthetic oligonucleotide
caggcacacacaaggaagg

SEQ ID NO: 281173 - RNA, 19 nt, Artificial Sequence
  Description of Artificial Sequence: Synthetic oligonucleotide
uucugcauuagucgccgcc

SEQ ID NO: 281174 - RNA, 19 nt, Artificial Sequence
  Description of Artificial Sequence: Synthetic oligonucleotide
agcuugaguggacaauggg

SEQ ID NO: 281175 - RNA, 19 nt, Artificial Sequence
  Description of Artificial Sequence: Synthetic oligonucleotide
gcaacaaucccuucuuggg

SEQ ID NO: 281176 - RNA, 19 nt, Artificial Sequence
  Description of Artificial Sequence: Synthetic oligonucleotide
acccguggcaaacuugugg

SEQ ID NO: 281177 - RNA, 19 nt, Artificial Sequence
  Description of Artificial Sequence: Synthetic oligonucleotide
acaccuuuaacuguagaga

SEQ ID NO: 281178 - RNA, 19 nt, Artificial Sequence
  Description of Artificial Sequence: Synthetic oligonucleotide
aaaagugcucugaguacuc

SEQ ID NO: 281179 - RNA, 19 nt, Artificial Sequence
  Description of Artificial Sequence: Synthetic oligonucleotide
cauucuaaccccuccuaug

SEQ ID NO: 281180 - RNA, 19 nt, Artificial Sequence
  Description of Artificial Sequence: Synthetic oligonucleotide
gauacggauguggccaugg

SEQ ID NO: 281181 - RNA, 19 nt, Artificial Sequence
  Description of Artificial Sequence: Synthetic oligonucleotide
guuauacuaugguccaggc

SEQ ID NO: 281182 - RNA, 19 nt, Artificial Sequence
  Description of Artificial Sequence: Synthetic oligonucleotide
acccguguggcucagaaaa

SEQ ID NO: 281183 - RNA, 19 nt, Artificial Sequence
  Description of Artificial Sequence: Synthetic oligonucleotide
ugguagucacgcucgaggc

SEQ ID NO: 281184 - RNA, 19 nt, Artificial Sequence
  Description of Artificial Sequence: Synthetic oligonucleotide
acgacaggcaggcacaagu

SEQ ID NO: 281185 - RNA, 19 nt, Artificial Sequence
  Description of Artificial Sequence: Synthetic oligonucleotide
cuuuggcgacugaagagcc

SEQ ID NO: 281186 - RNA, 19 nt, Artificial Sequence
  Description of Artificial Sequence: Synthetic oligonucleotide
cacccuacccucuucacac

SEQ ID NO: 281187 - RNA, 19 nt, Artificial Sequence
  Description of Artificial Sequence: Synthetic oligonucleotide
uagacaaugcguucccggu

SEQ ID NO: 281188 - RNA, 19 nt, Artificial Sequence
  Description of Artificial Sequence: Synthetic oligonucleotide
gguuauacuaugguccagg

SEQ ID NO: 281189 - RNA, 19 nt, Artificial Sequence
  Description of Artificial Sequence: Synthetic oligonucleotide
ucccauguuguccgaauac

SEQ ID NO: 281190 - RNA, 19 nt, Artificial Sequence
  Description of Artificial Sequence: Synthetic oligonucleotide
ucauucuaaccccuccuau

SEQ ID NO: 281191 - RNA, 19 nt, Artificial Sequence
  Description of Artificial Sequence: Synthetic oligonucleotide
gucucauaggcguaggcca

SEQ ID NO: 281192 - RNA, 19 nt, Artificial Sequence
  Description of Artificial Sequence: Synthetic oligonucleotide
uuguccgaauacuagcauc

SEQ ID NO: 281193 - RNA, 19 nt, Artificial Sequence
  Description of Artificial Sequence: Synthetic oligonucleotide
ucugcauuagucgccgccc

SEQ ID NO: 281194 - RNA, 19 nt, Artificial Sequence
  Description of Artificial Sequence: Synthetic oligonucleotide
acugaauguguaccgcuca

SEQ ID NO: 281195 - RNA, 19 nt, Artificial Sequence
  Description of Artificial Sequence: Synthetic oligonucleotide
caugaaucugggacaggcc

SEQ ID NO: 281196 - RNA, 19 nt, Artificial Sequence
  Description of Artificial Sequence: Synthetic oligonucleotide
agguacucaugggucagcc

SEQ ID NO: 281197 - RNA, 19 nt, Artificial Sequence
  Description of Artificial Sequence: Synthetic oligonucleotide
uggcgcagaacucacgaaa

SEQ ID NO: 281198 - RNA, 19 nt, Artificial Sequence
  Description of Artificial Sequence: Synthetic oligonucleotide
aggacggccaugaaucugg

SEQ ID NO: 281199 - RNA, 19 nt, Artificial Sequence
  Description of Artificial Sequence: Synthetic oligonucleotide
acucacgaaauaacagacg

SEQ ID NO: 281200 - RNA, 19 nt, Artificial Sequence
  Description of Artificial Sequence: Synthetic oligonucleotide
caccagucaggacugaaug

SEQ ID NO: 281201 - RNA, 19 nt, Artificial Sequence
  Description of Artificial Sequence: Synthetic oligonucleotide
uagucagcaaaaggcgccg

SEQ ID NO: 281202 - RNA, 19 nt, Artificial Sequence
  Description of Artificial Sequence: Synthetic oligonucleotide
uucuaaccccuccuauggc

SEQ ID NO: 281203 - RNA, 19 nt, Artificial Sequence
  Description of Artificial Sequence: Synthetic oligonucleotide
cgugcuuagguacucaugg

SEQ ID NO: 281204 - RNA, 19 nt, Artificial Sequence
  Description of Artificial Sequence: Synthetic oligonucleotide
ucacccuacccucuucaca

SEQ ID NO: 281205 - RNA, 19 nt, Artificial Sequence
  Description of Artificial Sequence: Synthetic oligonucleotide
ugaucggugggcuccagau

SEQ ID NO: 281206 - RNA, 19 nt, Artificial Sequence
  Description of Artificial Sequence: Synthetic oligonucleotide
ccuccuauggccuaugcug

SEQ ID NO: 281207 - RNA, 19 nt, Artificial Sequence
  Description of Artificial Sequence: Synthetic oligonucleotide
guaaauagccuggggauca

SEQ ID NO: 281208 - RNA, 19 nt, Artificial Sequence
  Description of Artificial Sequence: Synthetic oligonucleotide
acacaaggaaggguggauc

SEQ ID NO: 281209 - RNA, 19 nt, Artificial Sequence
  Description of Artificial Sequence: Synthetic oligonucleotide
guagucacgcucgaggcug

SEQ ID NO: 281210 - RNA, 19 nt, Artificial Sequence
  Description of Artificial Sequence: Synthetic oligonucleotide
uacucaccagcugucgggg

SEQ ID NO: 281211 - RNA, 19 nt, Artificial Sequence
  Description of Artificial Sequence: Synthetic oligonucleotide
agacaaugcguucccggug

SEQ ID NO: 281212 - RNA, 19 nt, Artificial Sequence
  Description of Artificial Sequence: Synthetic oligonucleotide
cagcauuccagcucccagc

SEQ ID NO: 281213 - RNA, 19 nt, Artificial Sequence
  Description of Artificial Sequence: Synthetic oligonucleotide
aaaaggcgguuccagcauu

SEQ ID NO: 281214 - RNA, 19 nt, Artificial Sequence
  Description of Artificial Sequence: Synthetic oligonucleotide
uccuauggccuaugcuggg

SEQ ID NO: 281215 - RNA, 19 nt, Artificial Sequence
  Description of Artificial Sequence: Synthetic oligonucleotide
uggaucauugcuggguaca

SEQ ID NO: 281216 - RNA, 19 nt, Artificial Sequence
  Description of Artificial Sequence: Synthetic oligonucleotide
aauguaucuuuaggacaug

SEQ ID NO: 281217 - RNA, 19 nt, Artificial Sequence
  Description of Artificial Sequence: Synthetic oligonucleotide
gaaaagccagggcccuacg

SEQ ID NO: 281218 - RNA, 19 nt, Artificial Sequence
  Description of Artificial Sequence: Synthetic oligonucleotide
gugguuauacuauggucca

SEQ ID NO: 281219 - RNA, 19 nt, Artificial Sequence
  Description of Artificial Sequence: Synthetic oligonucleotide
augcauacaucuugccugu

SEQ ID NO: 281220 - RNA, 19 nt, Artificial Sequence
  Description of Artificial Sequence: Synthetic oligonucleotide
uccuuuaccucgcgggcac

SEQ ID NO: 281221 - RNA, 19 nt, Artificial Sequence
  Description of Artificial Sequence: Synthetic oligonucleotide
ggaauaaugugcucuggga

SEQ ID NO: 281222 - RNA, 19 nt, Artificial Sequence
  Description of Artificial Sequence: Synthetic oligonucleotide
gugcuuagguacucauggg

SEQ ID NO: 281223 - RNA, 19 nt, Artificial Sequence
  Description of Artificial Sequence: Synthetic oligonucleotide
ucacugucgcugcaguuuc

SEQ ID NO: 281224 - RNA, 19 nt, Artificial Sequence
  Description of Artificial Sequence: Synthetic oligonucleotide
accuccggagccauguagc

SEQ ID NO: 281225 - RNA, 19 nt, Artificial Sequence
  Description of Artificial Sequence: Synthetic oligonucleotide
cuguagacaaugcguuccc

SEQ ID NO: 281226 - RNA, 19 nt, Artificial Sequence
  Description of Artificial Sequence: Synthetic oligonucleotide
agaggucuuugcagggucc

SEQ ID NO: 281227 - RNA, 19 nt, Artificial Sequence
  Description of Artificial Sequence: Synthetic oligonucleotide
uuugucccaagaugaccca

SEQ ID NO: 281228 - RNA, 19 nt, Artificial Sequence
  Description of Artificial Sequence: Synthetic oligonucleotide
ccgaauacuagcaucagga

SEQ ID NO: 281229 - RNA, 19 nt, Artificial Sequence
  Description of Artificial Sequence: Synthetic oligonucleotide
gaagacagcgcgugcuuca

SEQ ID NO: 281230 - RNA, 19 nt, Artificial Sequence
  Description of Artificial Sequence: Synthetic oligonucleotide
aggcgccgugcuuagguac

SEQ ID NO: 281231 - RNA, 19 nt, Artificial Sequence
  Description of Artificial Sequence: Synthetic oligonucleotide
uggaggggucauucuaacc

SEQ ID NO: 281232 - RNA, 19 nt, Artificial Sequence
  Description of Artificial Sequence: Synthetic oligonucleotide
aagucucacuuggaggcug

SEQ ID NO: 281233 - RNA, 19 nt, Artificial Sequence
  Description of Artificial Sequence: Synthetic oligonucleotide
cagcuugaguggacaaugg

SEQ ID NO: 281234 - RNA, 19 nt, Artificial Sequence
  Description of Artificial Sequence: Synthetic oligonucleotide
gggaucaggcuuaaaaggc

SEQ ID NO: 281235 - RNA, 19 nt, Artificial Sequence
  Description of Artificial Sequence: Synthetic oligonucleotide
agguaggcggcccuucuug

SEQ ID NO: 281236 - RNA, 19 nt, Artificial Sequence
  Description of Artificial Sequence: Synthetic oligonucleotide
uacuaugguccaggcauag

SEQ ID NO: 281237 - RNA, 19 nt, Artificial Sequence
  Description of Artificial Sequence: Synthetic oligonucleotide
ugauggcccaaguccacga

SEQ ID NO: 281238 - RNA, 19 nt, Artificial Sequence
  Description of Artificial Sequence: Synthetic oligonucleotide
gacaauggggaacaccacu

SEQ ID NO: 281239 - RNA, 19 nt, Artificial Sequence
  Description of Artificial Sequence: Synthetic oligonucleotide
aacgucacugagaguagcu

SEQ ID NO: 281240 - RNA, 19 nt, Artificial Sequence
  Description of Artificial Sequence: Synthetic oligonucleotide
auucugcauuagucgccgc

SEQ ID NO: 281241 - RNA, 19 nt, Artificial Sequence
  Description of Artificial Sequence: Synthetic oligonucleotide
ucgucucauaggcguaggc

SEQ ID NO: 281242 - RNA, 19 nt, Artificial Sequence
  Description of Artificial Sequence: Synthetic oligonucleotide
gugagcagugcaacgcugg

SEQ ID NO: 281243 - RNA, 19 nt, Artificial Sequence
  Description of Artificial Sequence: Synthetic oligonucleotide
cugaguacuccucgggcac

SEQ ID NO: 281244 - RNA, 19 nt, Artificial Sequence
  Description of Artificial Sequence: Synthetic oligonucleotide
uuaccucgcgggcaccacc

SEQ ID NO: 281245 - RNA, 19 nt, Artificial Sequence
  Description of Artificial Sequence: Synthetic oligonucleotide
uggacacacuacccguggc

SEQ ID NO: 281246 - RNA, 19 nt, Artificial Sequence
  Description of Artificial Sequence: Synthetic oligonucleotide
uauggccuaugcuggggca

SEQ ID NO: 281247 - RNA, 19 nt, Artificial Sequence
  Description of Artificial Sequence: Synthetic oligonucleotide
ggggaacugauccauccag

SEQ ID NO: 281248 - RNA, 19 nt, Artificial Sequence
  Description of Artificial Sequence: Synthetic oligonucleotide
cuagcgcccaccagucagg

SEQ ID NO: 281249 - RNA, 19 nt, Artificial Sequence
  Description of Artificial Sequence: Synthetic oligonucleotide
accgccaaccaccgguggg

SEQ ID NO: 281250 - RNA, 19 nt, Artificial Sequence
  Description of Artificial Sequence: Synthetic oligonucleotide
gcucacuacaaaccuacug

SEQ ID NO: 281251 - RNA, 19 nt, Artificial Sequence
  Description of Artificial Sequence: Synthetic oligonucleotide
gagcgagcgcgccuguggg

SEQ ID NO: 281252 - RNA, 19 nt, Artificial Sequence
  Description of Artificial Sequence: Synthetic oligonucleotide
uuggaggggucauucuaac

SEQ ID NO: 281253 - RNA, 19 nt, Artificial Sequence
  Description of Artificial Sequence: Synthetic oligonucleotide
acagacgcccaaugggcug

SEQ ID NO: 281254 - RNA, 19 nt, Artificial Sequence
  Description of Artificial Sequence: Synthetic oligonucleotide
uuuggcgacugaagagccu

SEQ ID NO: 281255 - RNA, 19 nt, Artificial Sequence
  Description of Artificial Sequence: Synthetic oligonucleotide
aacagacgcccaaugggcu

SEQ ID NO: 281256 - RNA, 19 nt, Artificial Sequence
  Description of Artificial Sequence: Synthetic oligonucleotide
auacuagcaucaggacggc

SEQ ID NO: 281257 - RNA, 19 nt, Artificial Sequence
  Description of Artificial Sequence: Synthetic oligonucleotide
caaaaggcgccgugcuuag

SEQ ID NO: 281258 - RNA, 19 nt, Artificial Sequence
  Description of Artificial Sequence: Synthetic oligonucleotide
aacuugagguccccuccau

SEQ ID NO: 281259 - RNA, 19 nt, Artificial Sequence
  Description of Artificial Sequence: Synthetic oligonucleotide
aagacagcgcgugcuucag

SEQ ID NO: 281260 - RNA, 19 nt, Artificial Sequence
  Description of Artificial Sequence: Synthetic oligonucleotide
uguaaacgucacugagagu

SEQ ID NO: 281261 - RNA, 19 nt, Artificial Sequence
  Description of Artificial Sequence: Synthetic oligonucleotide
ugugguagucacgcucgag

SEQ ID NO: 281262 - RNA, 19 nt, Artificial Sequence
  Description of Artificial Sequence: Synthetic oligonucleotide
uucgucucauaggcguagg

SEQ ID NO: 281263 - RNA, 19 nt, Artificial Sequence
  Description of Artificial Sequence: Synthetic oligonucleotide
acgcccaaugggcugacgu

SEQ ID NO: 281264 - RNA, 19 nt, Artificial Sequence
  Description of Artificial Sequence: Synthetic oligonucleotide
cuacggucccauguugucc

SEQ ID NO: 281265 - RNA, 19 nt, Artificial Sequence
  Description of Artificial Sequence: Synthetic oligonucleotide
cacacuacccguggcaaac

SEQ ID NO: 281266 - RNA, 19 nt, Artificial Sequence
  Description of Artificial Sequence: Synthetic oligonucleotide
uugaucggugggcuccaga

SEQ ID NO: 281267 - RNA, 19 nt, Artificial Sequence
  Description of Artificial Sequence: Synthetic oligonucleotide
ugguagcuauauacaucca

SEQ ID NO: 281268 - RNA, 19 nt, Artificial Sequence
  Description of Artificial Sequence: Synthetic oligonucleotide
agagcgcucugguagcuau

SEQ ID NO: 281269 - RNA, 19 nt, Artificial Sequence
  Description of Artificial Sequence: Synthetic oligonucleotide
auggccuaugcuggggcac

SEQ ID NO: 281270 - RNA, 19 nt, Artificial Sequence
  Description of Artificial Sequence: Synthetic oligonucleotide
gccuuugauggucuggccc

SEQ ID NO: 281271 - RNA, 19 nt, Artificial Sequence
  Description of Artificial Sequence: Synthetic oligonucleotide
gacugaauguguaccgcuc

SEQ ID NO: 281272 - RNA, 19 nt, Artificial Sequence
  Description of Artificial Sequence: Synthetic oligonucleotide
gugcaaaacuguaaacguc

SEQ ID NO: 281273 - RNA, 19 nt, Artificial Sequence
  Description of Artificial Sequence: Synthetic oligonucleotide
ugcauuagucgccgcccac

SEQ ID NO: 281274 - RNA, 19 nt, Artificial Sequence
  Description of Artificial Sequence: Synthetic oligonucleotide
ugguuauacuaugguccag

SEQ ID NO: 281275 - RNA, 19 nt, Artificial Sequence
  Description of Artificial Sequence: Synthetic oligonucleotide
uaccgccaaccaccggugg

SEQ ID NO: 281276 - RNA, 19 nt, Artificial Sequence
  Description of Artificial Sequence: Synthetic oligonucleotide
ccuguagacaaugcguucc

SEQ ID NO: 281277 - RNA, 19 nt, Artificial Sequence
  Description of Artificial Sequence: Synthetic oligonucleotide
cgcucugguagcuauauac

SEQ ID NO: 281278 - RNA, 19 nt, Artificial Sequence
  Description of Artificial Sequence: Synthetic oligonucleotide
cuucgucucauaggcguag

SEQ ID NO: 281279 - RNA, 19 nt, Artificial Sequence
  Description of Artificial Sequence: Synthetic oligonucleotide
uacagcgagucagcucagg

SEQ ID NO: 281280 - RNA, 19 nt, Artificial Sequence
  Description of Artificial Sequence: Synthetic oligonucleotide
guaggccaagcucacuaca

SEQ ID NO: 281281 - RNA, 19 nt, Artificial Sequence
  Description of Artificial Sequence: Synthetic oligonucleotide
gaggucuuugcaggguccc

SEQ ID NO: 281282 - RNA, 19 nt, Artificial Sequence
  Description of Artificial Sequence: Synthetic oligonucleotide
cuaugcuggggcacuucug

SEQ ID NO: 281283 - RNA, 19 nt, Artificial Sequence
  Description of Artificial Sequence: Synthetic oligonucleotide
ccuuuggcgacugaagagc

SEQ ID NO: 281284 - RNA, 19 nt, Artificial Sequence
  Description of Artificial Sequence: Synthetic oligonucleotide
agacagcgcgugcuucagg

SEQ ID NO: 281285 - RNA, 19 nt, Artificial Sequence
  Description of Artificial Sequence: Synthetic oligonucleotide
auuagucgccgcccacaug

SEQ ID NO: 281286 - RNA, 19 nt, Artificial Sequence
  Description of Artificial Sequence: Synthetic oligonucleotide
caguaaauagccuggggau

SEQ ID NO: 281287 - RNA, 19 nt, Artificial Sequence
  Description of Artificial Sequence: Synthetic oligonucleotide
uugcuggguacaugucuac

SEQ ID NO: 281288 - RNA, 19 nt, Artificial Sequence
  Description of Artificial Sequence: Synthetic oligonucleotide
ugaguacuccucgggcacc

SEQ ID NO: 281289 - RNA, 19 nt, Artificial Sequence
  Description of Artificial Sequence: Synthetic oligonucleotide
cucggcagcauagaagaca

SEQ ID NO: 281290 - RNA, 19 nt, Artificial Sequence
  Description of Artificial Sequence: Synthetic oligonucleotide
gagcgagcuccacagggga

SEQ ID NO: 281291 - RNA, 19 nt, Artificial Sequence
  Description of Artificial Sequence: Synthetic oligonucleotide
caccuccggagccauguag

SEQ ID NO: 281292 - RNA, 19 nt, Artificial Sequence
  Description of Artificial Sequence: Synthetic oligonucleotide
agugcaacgcuggggucag

SEQ ID NO: 281293 - RNA, 19 nt, Artificial Sequence
  Description of Artificial Sequence: Synthetic oligonucleotide
cugagagcagagcgagcgc

SEQ ID NO: 281294 - RNA, 19 nt, Artificial Sequence
  Description of Artificial Sequence: Synthetic oligonucleotide
cuaccgccaaccaccggug

SEQ ID NO: 281295 - RNA, 19 nt, Artificial Sequence
  Description of Artificial Sequence: Synthetic oligonucleotide
ugaauguguaccgcucauu

SEQ ID NO: 281296 - RNA, 19 nt, Artificial Sequence
  Description of Artificial Sequence: Synthetic oligonucleotide
cacagugcauccuucgucu

SEQ ID NO: 281297 - RNA, 19 nt, Artificial Sequence
  Description of Artificial Sequence: Synthetic oligonucleotide
agaaaacgguugaaguaaa

SEQ ID NO: 281298 - RNA, 19 nt, Artificial Sequence
  Description of Artificial Sequence: Synthetic oligonucleotide
caguacagcgagucagcuc

SEQ ID NO: 281299 - RNA, 19 nt, Artificial Sequence
  Description of Artificial Sequence: Synthetic oligonucleotide
cugcaacaaucccuucuug

SEQ ID NO: 281300 - RNA, 19 nt, Artificial Sequence
  Description of Artificial Sequence: Synthetic oligonucleotide
acuacccguggcaaacuug

SEQ ID NO: 281301 - RNA, 19 nt, Artificial Sequence
  Description of Artificial Sequence: Synthetic oligonucleotide
cucguggcgcagaacucac

SEQ ID NO: 281302 - RNA, 19 nt, Artificial Sequence
  Description of Artificial Sequence: Synthetic oligonucleotide
gacacacuacccguggcaa

SEQ ID NO: 281303 - RNA, 19 nt, Artificial Sequence
  Description of Artificial Sequence: Synthetic oligonucleotide
gucauucuaaccccuccua

SEQ ID NO: 281304 - RNA, 19 nt, Artificial Sequence
  Description of Artificial Sequence: Synthetic oligonucleotide
accacugugcaaaacugua

SEQ ID NO: 281305 - RNA, 19 nt, Artificial Sequence
  Description of Artificial Sequence: Synthetic oligonucleotide
caggcacaagucucacuug

SEQ ID NO: 281306 - RNA, 19 nt, Artificial Sequence
  Description of Artificial Sequence: Synthetic oligonucleotide
gacguucacacaggcugug

SEQ ID NO: 281307 - RNA, 19 nt, Artificial Sequence
  Description of Artificial Sequence: Synthetic oligonucleotide
agcgagcgcgccugugggg

SEQ ID NO: 281308 - RNA, 19 nt, Artificial Sequence
  Description of Artificial Sequence: Synthetic oligonucleotide
acguucacacaggcugugg

SEQ ID NO: 281309 - RNA, 19 nt, Artificial Sequence
  Description of Artificial Sequence: Synthetic oligonucleotide
guaggcggcccuucuugug

SEQ ID NO: 281310 - RNA, 19 nt, Artificial Sequence
  Description of Artificial Sequence: Synthetic oligonucleotide
uggcccauacucugcuggu

SEQ ID NO: 281311 - RNA, 19 nt, Artificial Sequence
  Description of Artificial Sequence: Synthetic oligonucleotide
ggaaggguggaucauugcu

SEQ ID NO: 281312 - RNA, 19 nt, Artificial Sequence
  Description of Artificial Sequence: Synthetic oligonucleotide
gguugagggauggaggaca

SEQ ID NO: 281313 - RNA, 19 nt, Artificial Sequence
  Description of Artificial Sequence: Synthetic oligonucleotide
ccagcccaaagacauuuag

SEQ ID NO: 281314 - RNA, 19 nt, Artificial Sequence
  Description of Artificial Sequence: Synthetic oligonucleotide
ccaguauaaggaauaaugu

SEQ ID NO: 281315 - RNA, 19 nt, Artificial Sequence
  Description of Artificial Sequence: Synthetic oligonucleotide
aggacaugacccaguauaa

SEQ ID NO: 281316 - RNA, 19 nt, Artificial Sequence
  Description of Artificial Sequence: Synthetic oligonucleotide
ccgagcgagcuccacaggg

SEQ ID NO: 281317 - RNA, 19 nt, Artificial Sequence
  Description of Artificial Sequence: Synthetic oligonucleotide
ccuagcgcccaccagucag

SEQ ID NO: 281318 - RNA, 19 nt, Artificial Sequence
  Description of Artificial Sequence: Synthetic oligonucleotide
gcuuagguacucauggguc

SEQ ID NO: 281319 - RNA, 19 nt, Artificial Sequence
  Description of Artificial Sequence: Synthetic oligonucleotide
acgaaauaacagacgccca

SEQ ID NO: 281320 - RNA, 19 nt, Artificial Sequence
  Description of Artificial Sequence: Synthetic oligonucleotide
aaggcgccgugcuuaggua

SEQ ID NO: 281321 - RNA, 19 nt, Artificial Sequence
  Description of Artificial Sequence: Synthetic oligonucleotide
gcccaaagacauuuaguuc

SEQ ID NO: 281322 - RNA, 19 nt, Artificial Sequence
  Description of Artificial Sequence: Synthetic oligonucleotide
ugcuaccgccaaccaccgg

SEQ ID NO: 281323 - RNA, 19 nt, Artificial Sequence
  Description of Artificial Sequence: Synthetic oligonucleotide
ggacaugacccaguauaag

SEQ ID NO: 281324 - RNA, 19 nt, Artificial Sequence
  Description of Artificial Sequence: Synthetic oligonucleotide
agcaauccuuuggcgacug

SEQ ID NO: 281325 - RNA, 19 nt, Artificial Sequence
  Description of Artificial Sequence: Synthetic oligonucleotide
auccuucgucucauaggcg

SEQ ID NO: 281326 - RNA, 19 nt, Artificial Sequence
  Description of Artificial Sequence: Synthetic oligonucleotide
agcaaaaggcgccgugcuu

SEQ ID NO: 281327 - RNA, 19 nt, Artificial Sequence
  Description of Artificial Sequence: Synthetic oligonucleotide
cucauucugccaggggaug

SEQ ID NO: 281328 - RNA, 19 nt, Artificial Sequence
  Description of Artificial Sequence: Synthetic oligonucleotide
gcuccuuuaccucgcgggc

SEQ ID NO: 281329 - RNA, 19 nt, Artificial Sequence
  Description of Artificial Sequence: Synthetic oligonucleotide
uagucacgcucgaggcuga

SEQ ID NO: 281330 - RNA, 19 nt, Artificial Sequence
  Description of Artificial Sequence: Synthetic oligonucleotide
guccgaauacuagcaucag

SEQ ID NO: 281331 - RNA, 19 nt, Artificial Sequence
  Description of Artificial Sequence: Synthetic oligonucleotide
ccacagcaauccuuuggcg

SEQ ID NO: 281332 - RNA, 19 nt, Artificial Sequence
  Description of Artificial Sequence: Synthetic oligonucleotide
uggcgacugaagagccucu

SEQ ID NO: 281333 - RNA, 19 nt, Artificial Sequence
  Description of Artificial Sequence: Synthetic oligonucleotide
ggacacacuacccguggca

SEQ ID NO: 281334 - RNA, 19 nt, Artificial Sequence
  Description of Artificial Sequence: Synthetic oligonucleotide
cuggaauguuggagggguc

SEQ ID NO: 281335 - RNA, 19 nt, Artificial Sequence
  Description of Artificial Sequence: Synthetic oligonucleotide
acacacuacccguggcaaa

SEQ ID NO: 281336 - RNA, 19 nt, Artificial Sequence
  Description of Artificial Sequence: Synthetic oligonucleotide
acaaugcguucccggugca

SEQ ID NO: 281337 - RNA, 19 nt, Artificial Sequence
  Description of Artificial Sequence: Synthetic oligonucleotide
agcgcccaccagucaggac

SEQ ID NO: 281338 - RNA, 19 nt, Artificial Sequence
  Description of Artificial Sequence: Synthetic oligonucleotide
augcaccuuugucccaaga

SEQ ID NO: 281339 - RNA, 19 nt, Artificial Sequence
  Description of Artificial Sequence: Synthetic oligonucleotide
caggcacagugcauccuuc

SEQ ID NO: 281340 - RNA, 19 nt, Artificial Sequence
  Description of Artificial Sequence: Synthetic oligonucleotide
ggucugaccuggcccauac

SEQ ID NO: 281341 - RNA, 19 nt, Artificial Sequence
  Description of Artificial Sequence: Synthetic oligonucleotide
agcgcucugguagcuauau

SEQ ID NO: 281342 - RNA, 19 nt, Artificial Sequence
  Description of Artificial Sequence: Synthetic oligonucleotide
ggucugacgggccccaguc

SEQ ID NO: 281343 - RNA, 19 nt, Artificial Sequence
  Description of Artificial Sequence: Synthetic oligonucleotide
gucuacuuuuaugagggau

SEQ ID NO: 281344 - RNA, 19 nt, Artificial Sequence
  Description of Artificial Sequence: Synthetic oligonucleotide
cgaauacuagcaucaggac

SEQ ID NO: 281345 - RNA, 19 nt, Artificial Sequence
  Description of Artificial Sequence: Synthetic oligonucleotide
acuaugguccaggcauaga

SEQ ID NO: 281346 - RNA, 19 nt, Artificial Sequence
  Description of Artificial Sequence: Synthetic oligonucleotide
cacugucgcugcaguuucc

SEQ ID NO: 281347 - RNA, 19 nt, Artificial Sequence
  Description of Artificial Sequence: Synthetic oligonucleotide
acagcgcgugcuucaggga

SEQ ID NO: 281348 - RNA, 19 nt, Artificial Sequence
  Description of Artificial Sequence: Synthetic oligonucleotide
gguggggagcucuuccuca

SEQ ID NO: 281349 - RNA, 19 nt, Artificial Sequence
  Description of Artificial Sequence: Synthetic oligonucleotide
cuaaccccuccuauggccu

SEQ ID NO: 281350 - RNA, 19 nt, Artificial Sequence
  Description of Artificial Sequence: Synthetic oligonucleotide
cugucgcugcaguuuccac

SEQ ID NO: 281351 - RNA, 19 nt, Artificial Sequence
  Description of Artificial Sequence: Synthetic oligonucleotide
agucgccgcccacaugccu

SEQ ID NO: 281352 - RNA, 19 nt, Artificial Sequence
  Description of Artificial Sequence: Synthetic oligonucleotide
gcugucggggaaccucagg

SEQ ID NO: 281353 - RNA, 19 nt, Artificial Sequence
  Description of Artificial Sequence: Synthetic oligonucleotide
gcuaccgccaaccaccggu

SEQ ID NO: 281354 - RNA, 19 nt, Artificial Sequence
  Description of Artificial Sequence: Synthetic oligonucleotide
ucacugagaguagcugcua

SEQ ID NO: 281355 - RNA, 19 nt, Artificial Sequence
  Description of Artificial Sequence: Synthetic oligonucleotide
gcgccuguggggaaaagug

SEQ ID NO: 281356 - RNA, 19 nt, Artificial Sequence
  Description of Artificial Sequence: Synthetic oligonucleotide
caccuuugcccaggacucg

SEQ ID NO: 281357 - RNA, 19 nt, Artificial Sequence
  Description of Artificial Sequence: Synthetic oligonucleotide
agcgcgugcuucagggaag

SEQ ID NO: 281358 - RNA, 19 nt, Artificial Sequence
  Description of Artificial Sequence: Synthetic oligonucleotide
guuguccgaauacuagcau

SEQ ID NO: 281359 - RNA, 19 nt, Artificial Sequence
  Description of Artificial Sequence: Synthetic oligonucleotide
ggauggacacacuacccgu

SEQ ID NO: 281360 - RNA, 19 nt, Artificial Sequence
  Description of Artificial Sequence: Synthetic oligonucleotide
ccguuucucaucagggguc

SEQ ID NO: 281361 - RNA, 19 nt, Artificial Sequence
  Description of Artificial Sequence: Synthetic oligonucleotide
gcucugguagcuauauaca

SEQ ID NO: 281362 - RNA, 19 nt, Artificial Sequence
  Description of Artificial Sequence: Synthetic oligonucleotide
aggggagagcugaagggau

SEQ ID NO: 281363 - RNA, 19 nt, Artificial Sequence
  Description of Artificial Sequence: Synthetic oligonucleotide
caggacucgguacugccua

SEQ ID NO: 281364 - RNA, 19 nt, Artificial Sequence
  Description of Artificial Sequence: Synthetic oligonucleotide
cauugagagcgcucuggua

SEQ ID NO: 281365 - RNA, 19 nt, Artificial Sequence
  Description of Artificial Sequence: Synthetic oligonucleotide
ugacgggccccagucaguu

SEQ ID NO: 281366 - RNA, 19 nt, Artificial Sequence
  Description of Artificial Sequence: Synthetic oligonucleotide
gacggccaugaaucuggga

SEQ ID NO: 281367 - RNA, 19 nt, Artificial Sequence
  Description of Artificial Sequence: Synthetic oligonucleotide
aggcguaggccaagcucac

SEQ ID NO: 281368 - RNA, 19 nt, Artificial Sequence
  Description of Artificial Sequence: Synthetic oligonucleotide
cucgcgggcaccaccucca

SEQ ID NO: 281369 - RNA, 19 nt, Artificial Sequence
  Description of Artificial Sequence: Synthetic oligonucleotide
gaaaacgguugaaguaaau

SEQ ID NO: 281370 - RNA, 19 nt, Artificial Sequence
  Description of Artificial Sequence: Synthetic oligonucleotide
cgucucauaggcguaggcc

SEQ ID NO: 281371 - RNA, 19 nt, Artificial Sequence
  Description of Artificial Sequence: Synthetic oligonucleotide
agauacggauguggccaug

SEQ ID NO: 281372 - RNA, 19 nt, Artificial Sequence
  Description of Artificial Sequence: Synthetic oligonucleotide
aggacucgguacugccuaa

SEQ ID NO: 281373 - RNA, 19 nt, Artificial Sequence
  Description of Artificial Sequence: Synthetic oligonucleotide
cugcauuagucgccgccca

SEQ ID NO: 281374 - RNA, 19 nt, Artificial Sequence
  Description of Artificial Sequence: Synthetic oligonucleotide
ggcacgugcacagccaguc

SEQ ID NO: 281375 - RNA, 19 nt, Artificial Sequence
  Description of Artificial Sequence: Synthetic oligonucleotide
cuuuaccucgcgggcacca

SEQ ID NO: 281376 - RNA, 19 nt, Artificial Sequence
  Description of Artificial Sequence: Synthetic oligonucleotide
ggacugaauguguaccgcu

SEQ ID NO: 281377 - RNA, 19 nt, Artificial Sequence
  Description of Artificial Sequence: Synthetic oligonucleotide
cagcgcgugcuucagggaa

SEQ ID NO: 281378 - RNA, 19 nt, Artificial Sequence
  Description of Artificial Sequence: Synthetic oligonucleotide
caaugggcugacguucaca

SEQ ID NO: 281379 - RNA, 19 nt, Artificial Sequence
  Description of Artificial Sequence: Synthetic oligonucleotide
auacuaugguccaggcaua

SEQ ID NO: 281380 - RNA, 19 nt, Artificial Sequence
  Description of Artificial Sequence: Synthetic oligonucleotide
acacuacccguggcaaacu

SEQ ID NO: 281381 - RNA, 19 nt, Artificial Sequence
  Description of Artificial Sequence: Synthetic oligonucleotide
cgagcgagcuccacagggg

SEQ ID NO: 281382 - RNA, 19 nt, Artificial Sequence
  Description of Artificial Sequence: Synthetic oligonucleotide
caaaccuacuguucacuuu

SEQ ID NO: 281383 - RNA, 19 nt, Artificial Sequence
  Description of Artificial Sequence: Synthetic oligonucleotide
aaccccuccuauggccuau

SEQ ID NO: 281384 - RNA, 19 nt, Artificial Sequence
  Description of Artificial Sequence: Synthetic oligonucleotide
ccuacggucccauguuguc

SEQ ID NO: 281385 - RNA, 19 nt, Artificial Sequence
  Description of Artificial Sequence: Synthetic oligonucleotide
gcgcccaccagucaggacu

SEQ ID NO: 281386 - RNA, 19 nt, Artificial Sequence
  Description of Artificial Sequence: Synthetic oligonucleotide
ccuugaccagccucucuac

SEQ ID NO: 281387 - RNA, 19 nt, Artificial Sequence
  Description of Artificial Sequence: Synthetic oligonucleotide
gagauacggauguggccau

SEQ ID NO: 281388 - RNA, 19 nt, Artificial Sequence
  Description of Artificial Sequence: Synthetic oligonucleotide
gcacucaguuuccaccauc

SEQ ID NO: 281389 - RNA, 19 nt, Artificial Sequence
  Description of Artificial Sequence: Synthetic oligonucleotide
gacccguguggcucagaaa

SEQ ID NO: 281390 - RNA, 19 nt, Artificial Sequence
  Description of Artificial Sequence: Synthetic oligonucleotide
cagccuagcgcccaccagu

SEQ ID NO: 281391 - RNA, 19 nt, Artificial Sequence
  Description of Artificial Sequence: Synthetic oligonucleotide
gucugacgggccccaguca

SEQ ID NO: 281392 - RNA, 19 nt, Artificial Sequence
  Description of Artificial Sequence: Synthetic oligonucleotide
gacgcccaaugggcugacg

SEQ ID NO: 281393 - RNA, 19 nt, Artificial Sequence
  Description of Artificial Sequence: Synthetic oligonucleotide
agacgcccaaugggcugac

SEQ ID NO: 281394 - RNA, 19 nt, Artificial Sequence
  Description of Artificial Sequence: Synthetic oligonucleotide
cuugaccagccucucuacu

SEQ ID NO: 281395 - RNA, 19 nt, Artificial Sequence
  Description of Artificial Sequence: Synthetic oligonucleotide
guggcgcagaacucacgaa

SEQ ID NO: 281396 - RNA, 19 nt, Artificial Sequence
  Description of Artificial Sequence: Synthetic oligonucleotide
guacagcgagucagcucag

SEQ ID NO: 281397 - RNA, 19 nt, Artificial Sequence
  Description of Artificial Sequence: Synthetic oligonucleotide
ccgugcuuagguacucaug

SEQ ID NO: 281398 - RNA, 19 nt, Artificial Sequence
  Description of Artificial Sequence: Synthetic oligonucleotide
cccacaugccuuccguuuc

SEQ ID NO: 281399 - RNA, 19 nt, Artificial Sequence
  Description of Artificial Sequence: Synthetic oligonucleotide
ccauguuguccgaauacua

SEQ ID NO: 281400 - RNA, 19 nt, Artificial Sequence
  Description of Artificial Sequence: Synthetic oligonucleotide
ggacccguguggcucagaa

SEQ ID NO: 281401 - RNA, 19 nt, Artificial Sequence
  Description of Artificial Sequence: Synthetic oligonucleotide
cccuguagacaaugcguuc

SEQ ID NO: 281402 - RNA, 19 nt, Artificial Sequence
  Description of Artificial Sequence: Synthetic oligonucleotide
gcagccuagcgcccaccag

SEQ ID NO: 281403 - RNA, 19 nt, Artificial Sequence
  Description of Artificial Sequence: Synthetic oligonucleotide
cuccggcuguguuccccag

SEQ ID NO: 281404 - RNA, 19 nt, Artificial Sequence
  Description of Artificial Sequence: Synthetic oligonucleotide
cacgacaggcaggcacaag

SEQ ID NO: 281405 - RNA, 19 nt, Artificial Sequence
  Description of Artificial Sequence: Synthetic oligonucleotide
ggugauggcccaaguccac

SEQ ID NO: 281406 - RNA, 19 nt, Artificial Sequence
  Description of Artificial Sequence: Synthetic oligonucleotide
caucaggggucacuucaua

SEQ ID NO: 281407 - RNA, 19 nt, Artificial Sequence
  Description of Artificial Sequence: Synthetic oligonucleotide
cagcaaaaggcgccgugcu

SEQ ID NO: 281408 - RNA, 19 nt, Artificial Sequence
  Description of Artificial Sequence: Synthetic oligonucleotide
gcauuagucgccgcccaca

SEQ ID NO: 281409 - RNA, 19 nt, Artificial Sequence
  Description of Artificial Sequence: Synthetic oligonucleotide
gguagucacgcucgaggcu

SEQ ID NO: 281410 - RNA, 19 nt, Artificial Sequence
  Description of Artificial Sequence: Synthetic oligonucleotide
gcgugcuucagggaagcca

SEQ ID NO: 281411 - RNA, 19 nt, Artificial Sequence
  Description of Artificial Sequence: Synthetic oligonucleotide
agucacgcucgaggcugag

SEQ ID NO: 281412 - RNA, 19 nt, Artificial Sequence
  Description of Artificial Sequence: Synthetic oligonucleotide
cugaauguguaccgcucau

SEQ ID NO: 281413 - RNA, 19 nt, Artificial Sequence
  Description of Artificial Sequence: Synthetic oligonucleotide
cagacgcccaaugggcuga

SEQ ID NO: 281414 - RNA, 19 nt, Artificial Sequence
  Description of Artificial Sequence: Synthetic oligonucleotide
gcccuacggucccauguug

SEQ ID NO: 281415 - RNA, 19 nt, Artificial Sequence
  Description of Artificial Sequence: Synthetic oligonucleotide
cgacugaagagccucugca

SEQ ID NO: 281416 - RNA, 19 nt, Artificial Sequence
  Description of Artificial Sequence: Synthetic oligonucleotide
ccgccaaccaccggugggg

SEQ ID NO: 281417 - RNA, 19 nt, Artificial Sequence
  Description of Artificial Sequence: Synthetic oligonucleotide
gguggcauugagagcgcuc

SEQ ID NO: 281418 - RNA, 19 nt, Artificial Sequence
  Description of Artificial Sequence: Synthetic oligonucleotide
cauuagucgccgcccacau

SEQ ID NO: 281419 - RNA, 19 nt, Artificial Sequence
  Description of Artificial Sequence: Synthetic oligonucleotide
ggcgacugaagagccucug

SEQ ID NO: 281420 - RNA, 19 nt, Artificial Sequence
  Description of Artificial Sequence: Synthetic oligonucleotide
acggucccauguuguccga

SEQ ID NO: 281421 - RNA, 19 nt, Artificial Sequence
  Description of Artificial Sequence: Synthetic oligonucleotide
cauaggcguaggccaagcu

SEQ ID NO: 281422 - RNA, 19 nt, Artificial Sequence
  Description of Artificial Sequence: Synthetic oligonucleotide
ccggugcaaguccuccagg

SEQ ID NO: 281423 - RNA, 19 nt, Artificial Sequence
  Description of Artificial Sequence: Synthetic oligonucleotide
ggacggccaugaaucuggg

SEQ ID NO: 281424 - RNA, 19 nt, Artificial Sequence
  Description of Artificial Sequence: Synthetic oligonucleotide
ccucgcgggcaccaccucc

SEQ ID NO: 281425 - RNA, 19 nt, Artificial Sequence
  Description of Artificial Sequence: Synthetic oligonucleotide
ggcagccuagcgcccacca

SEQ ID NO: 281426 - RNA, 19 nt, Artificial Sequence
  Description of Artificial Sequence: Synthetic oligonucleotide
cucccagccgcuugaaauu

SEQ ID NO: 281427 - RNA, 19 nt, Artificial Sequence
  Description of Artificial Sequence: Synthetic oligonucleotide
ggcccauacucugcuggug

SEQ ID NO: 281428 - RNA, 19 nt, Artificial Sequence
  Description of Artificial Sequence: Synthetic oligonucleotide
ggguugagggauggaggac

SEQ ID NO: 281429 - RNA, 19 nt, Artificial Sequence
  Description of Artificial Sequence: Synthetic oligonucleotide
agccccgagcgagcuccac

SEQ ID NO: 281430 - RNA, 19 nt, Artificial Sequence
  Description of Artificial Sequence: Synthetic oligonucleotide
gaauguuggaggggucauu

SEQ ID NO: 281431 - RNA, 19 nt, Artificial Sequence
  Description of Artificial Sequence: Synthetic oligonucleotide
gcacaguuacucaccagcu

SEQ ID NO: 281432 - RNA, 19 nt, Artificial Sequence
  Description of Artificial Sequence: Synthetic oligonucleotide
cagagcgagcgcgccugug

SEQ ID NO: 281433 - RNA, 19 nt, Artificial Sequence
  Description of Artificial Sequence: Synthetic oligonucleotide
gagagcgcucugguagcua

SEQ ID NO: 281434 - RNA, 19 nt, Artificial Sequence
  Description of Artificial Sequence: Synthetic oligonucleotide
gcgcagaacucacgaaaua

SEQ ID NO: 281435 - RNA, 19 nt, Artificial Sequence
  Description of Artificial Sequence: Synthetic oligonucleotide
gggcccuacggucccaugu

SEQ ID NO: 281436 - RNA, 19 nt, Artificial Sequence
  Description of Artificial Sequence: Synthetic oligonucleotide
cagucccaagucagagaua

SEQ ID NO: 281437 - RNA, 19 nt, Artificial Sequence
  Description of Artificial Sequence: Synthetic oligonucleotide
cacagcuugaguggacaau

SEQ ID NO: 281438 - RNA, 19 nt, Artificial Sequence
  Description of Artificial Sequence: Synthetic oligonucleotide
ccucguggcgcagaacuca

SEQ ID NO: 281439 - RNA, 19 nt, Artificial Sequence
  Description of Artificial Sequence: Synthetic oligonucleotide
ggucccauguuguccgaau

SEQ ID NO: 281440 - RNA, 19 nt, Artificial Sequence
  Description of Artificial Sequence: Synthetic oligonucleotide
gcgcgugcuucagggaagc

SEQ ID NO: 281441 - RNA, 19 nt, Artificial Sequence
  Description of Artificial Sequence: Synthetic oligonucleotide
aguccacgacaggcaggca

SEQ ID NO: 281442 - RNA, 19 nt, Artificial Sequence
  Description of Artificial Sequence: Synthetic oligonucleotide
ggcgcagaacucacgaaau

SEQ ID NO: 281443 - RNA, 19 nt, Artificial Sequence
  Description of Artificial Sequence: Synthetic oligonucleotide
ccccuccuauggccuaugc

SEQ ID NO: 281444 - RNA, 19 nt, Artificial Sequence
  Description of Artificial Sequence: Synthetic oligonucleotide
ggaucauugcuggguacau

SEQ ID NO: 281445 - RNA, 19 nt, Artificial Sequence
  Description of Artificial Sequence: Synthetic oligonucleotide
agcgcgccuguggggaaaa

SEQ ID NO: 281446 - RNA, 19 nt, Artificial Sequence
  Description of Artificial Sequence: Synthetic oligonucleotide
aggucugaccuggcccaua

SEQ ID NO: 281447 - RNA, 19 nt, Artificial Sequence
  Description of Artificial Sequence: Synthetic oligonucleotide
cgguacugccuaaaggugu

SEQ ID NO: 281448 - RNA, 19 nt, Artificial Sequence
  Description of Artificial Sequence: Synthetic oligonucleotide
gucugaccuggcccauacu

SEQ ID NO: 281449 - RNA, 19 nt, Artificial Sequence
  Description of Artificial Sequence: Synthetic oligonucleotide
cacuacccguggcaaacuu

SEQ ID NO: 281450 - RNA, 19 nt, Artificial Sequence
  Description of Artificial Sequence: Synthetic oligonucleotide
ggacucgguacugccuaaa

SEQ ID NO: 281451 - RNA, 19 nt, Artificial Sequence
  Description of Artificial Sequence: Synthetic oligonucleotide
ccuucgucucauaggcgua

SEQ ID NO: 281452 - RNA, 19 nt, Artificial Sequence
  Description of Artificial Sequence: Synthetic oligonucleotide
cagccucacccuacccucu

SEQ ID NO: 281453 - RNA, 19 nt, Artificial Sequence
  Description of Artificial Sequence: Synthetic oligonucleotide
cagcaauccuuuggcgacu

SEQ ID NO: 281454 - RNA, 19 nt, Artificial Sequence
  Description of Artificial Sequence: Synthetic oligonucleotide
gccgugcuuagguacucau

SEQ ID NO: 281455 - RNA, 19 nt, Artificial Sequence
  Description of Artificial Sequence: Synthetic oligonucleotide
cccuacggucccauguugu

SEQ ID NO: 281456 - RNA, 19 nt, Artificial Sequence
  Description of Artificial Sequence: Synthetic oligonucleotide
aggacccguguggcucaga

SEQ ID NO: 281457 - RNA, 19 nt, Artificial Sequence
  Description of Artificial Sequence: Synthetic oligonucleotide
gccuagcgcccaccaguca

SEQ ID NO: 281458 - RNA, 19 nt, Artificial Sequence
  Description of Artificial Sequence: Synthetic oligonucleotide
ggcccuacggucccauguu

SEQ ID NO: 281459 - RNA, 19 nt, Artificial Sequence
  Description of Artificial Sequence: Synthetic oligonucleotide
ggcggcccuucuugugguc

SEQ ID NO: 281460 - RNA, 19 nt, Artificial Sequence
  Description of Artificial Sequence: Synthetic oligonucleotide
gaggucugaccuggcccau

SEQ ID NO: 281461 - RNA, 19 nt, Artificial Sequence
  Description of Artificial Sequence: Synthetic oligonucleotide
ggcgccgugcuuagguacu

SEQ ID NO: 281462 - RNA, 19 nt, Artificial Sequence
  Description of Artificial Sequence: Synthetic oligonucleotide
gucucacuuggaggcuggu

SEQ ID NO: 281463 - RNA, 19 nt, Artificial Sequence
  Description of Artificial Sequence: Synthetic oligonucleotide
cccuccuauggccuaugcu

SEQ ID NO: 281464 - RNA, 19 nt, Artificial Sequence
  Description of Artificial Sequence: Synthetic oligonucleotide
ccgcaccuggcaggcacac

SEQ ID NO: 281465 - RNA, 19 nt, Artificial Sequence
  Description of Artificial Sequence: Synthetic oligonucleotide
gcgcucugguagcuauaua

SEQ ID NO: 281466 - RNA, 19 nt, Artificial Sequence
  Description of Artificial Sequence: Synthetic oligonucleotide
cccgcaccuggcaggcaca

SEQ ID NO: 281467 - RNA, 19 nt, Artificial Sequence
  Description of Artificial Sequence: Synthetic oligonucleotide
gcgccgugcuuagguacuc

SEQ ID NO: 281468 - RNA, 19 nt, Artificial Sequence
  Description of Artificial Sequence: Synthetic oligonucleotide
ccguguggcucagaaaauu

SEQ ID NO: 281469 - RNA, 19 nt, Artificial Sequence
  Description of Artificial Sequence: Synthetic oligonucleotide
ggcguaggccaagcucacu

SEQ ID NO: 281470 - RNA, 19 nt, Artificial Sequence
  Description of Artificial Sequence: Synthetic oligonucleotide
gugcaacgcuggggucaga

SEQ ID NO: 281471 - RNA, 19 nt, Artificial Sequence
  Description of Artificial Sequence: Synthetic oligonucleotide
cgcgugcuucagggaagcc

SEQ ID NO: 281472 - RNA, 19 nt, Artificial Sequence
  Description of Artificial Sequence: Synthetic oligonucleotide
gcagagcgagcgcgccugu

SEQ ID NO: 281473 - RNA, 19 nt, Artificial Sequence
  Description of Artificial Sequence: Synthetic oligonucleotide
ccacgacaggcaggcacaa

SEQ ID NO: 281474 - RNA, 19 nt, Artificial Sequence
  Description of Artificial Sequence: Synthetic oligonucleotide
cgccgugcuuagguacuca

SEQ ID NO: 281475 - RNA, 19 nt, Artificial Sequence
  Description of Artificial Sequence: Synthetic oligonucleotide
cggucccauguuguccgaa

SEQ ID NO: 281476 - RNA, 19 nt, Artificial Sequence
  Description of Artificial Sequence: Synthetic oligonucleotide
cgcccacaugccuuccguu

SEQ ID NO: 281477 - RNA, 19 nt, Artificial Sequence
  Description of Artificial Sequence: Synthetic oligonucleotide
aaaacgaaguuucuuccgc

SEQ ID NO: 281478 - RNA, 19 nt, Artificial Sequence
  Description of Artificial Sequence: Synthetic oligonucleotide
guauuuauaauccucgggg

SEQ ID NO: 281479 - RNA, 19 nt, Artificial Sequence
  Description of Artificial Sequence: Synthetic oligonucleotide
uguauuuauaauccucggg

SEQ ID NO: 281480 - RNA, 19 nt, Artificial Sequence
  Description of Artificial Sequence: Synthetic oligonucleotide
uuacacucaaagaucaggg

SEQ ID NO: 281481 - RNA, 19 nt, Artificial Sequence
  Description of Artificial Sequence: Synthetic oligonucleotide
aaacgaaguuucuuccgcc

SEQ ID NO: 281482 - RNA, 19 nt, Artificial Sequence
  Description of Artificial Sequence: Synthetic oligonucleotide
ugugcguuugcucugcugg

SEQ ID NO: 281483 - RNA, 19 nt, Artificial Sequence
  Description of Artificial Sequence: Synthetic oligonucleotide
gauguugccauaguaacgg

SEQ ID NO: 281484 - RNA, 19 nt, Artificial Sequence
  Description of Artificial Sequence: Synthetic oligonucleotide
cauuuuggcugcaugaugg

SEQ ID NO: 281485 - RNA, 19 nt, Artificial Sequence
  Description of Artificial Sequence: Synthetic oligonucleotide
gaagcggugggcuacacgg

SEQ ID NO: 281486 - RNA, 19 nt, Artificial Sequence
  Description of Artificial Sequence: Synthetic oligonucleotide
aaucaguucuccaacguac

SEQ ID NO: 281487 - RNA, 19 nt, Artificial Sequence
  Description of Artificial Sequence: Synthetic oligonucleotide
auugacguccacuuguccg

SEQ ID NO: 281488 - RNA, 19 nt, Artificial Sequence
  Description of Artificial Sequence: Synthetic oligonucleotide
ucuuaaugucccagaaucg

SEQ ID NO: 281489 - RNA, 19 nt, Artificial Sequence
  Description of Artificial Sequence: Synthetic oligonucleotide
uuuauugagaacacagaaa

SEQ ID NO: 281490 - RNA, 19 nt, Artificial Sequence
  Description of Artificial Sequence: Synthetic oligonucleotide
uauuuauaauccucggggc

SEQ ID NO: 281491 - RNA, 19 nt, Artificial Sequence
  Description of Artificial Sequence: Synthetic oligonucleotide
uuucgauugaguugcagug

SEQ ID NO: 281492 - RNA, 19 nt, Artificial Sequence
  Description of Artificial Sequence: Synthetic oligonucleotide
guaguugacagcauggagg

SEQ ID NO: 281493 - RNA, 19 nt, Artificial Sequence
  Description of Artificial Sequence: Synthetic oligonucleotide
uuucggugcgcacagcucg

SEQ ID NO: 281494 - RNA, 19 nt, Artificial Sequence
  Description of Artificial Sequence: Synthetic oligonucleotide
uuauccacggcguugauau

SEQ ID NO: 281495 - RNA, 19 nt, Artificial Sequence
  Description of Artificial Sequence: Synthetic oligonucleotide
guagccucuagccacaucc

SEQ ID NO: 281496 - RNA, 19 nt, Artificial Sequence
  Description of Artificial Sequence: Synthetic oligonucleotide
uucgaucuuguuaaauucc

SEQ ID NO: 281497 - RNA, 19 nt, Artificial Sequence
  Description of Artificial Sequence: Synthetic oligonucleotide
uuuauaauccucggggcag

SEQ ID NO: 281498 - RNA, 19 nt, Artificial Sequence
  Description of Artificial Sequence: Synthetic oligonucleotide
ugagaaaccagcucuggga

SEQ ID NO: 281499 - RNA, 19 nt, Artificial Sequence
  Description of Artificial Sequence: Synthetic oligonucleotide
ugagcuuucgauugaguug

SEQ ID NO: 281500 - RNA, 19 nt, Artificial Sequence
  Description of Artificial Sequence: Synthetic oligonucleotide
uuccggucgauguucaugg

SEQ ID NO: 281501 - RNA, 19 nt, Artificial Sequence
  Description of Artificial Sequence: Synthetic oligonucleotide
gacaguuagagcuggagca

SEQ ID NO: 281502 - RNA, 19 nt, Artificial Sequence
  Description of Artificial Sequence: Synthetic oligonucleotide
ugguuacacucaaagauca

SEQ ID NO: 281503 - RNA, 19 nt, Artificial Sequence
  Description of Artificial Sequence: Synthetic oligonucleotide
guuaaauuccugaagcagc

SEQ ID NO: 281504 - RNA, 19 nt, Artificial Sequence
  Description of Artificial Sequence: Synthetic oligonucleotide
ugggugaaaacgaaguuuc

SEQ ID NO: 281505 - RNA, 19 nt, Artificial Sequence
  Description of Artificial Sequence: Synthetic oligonucleotide
uucuccaacguacucgcag

SEQ ID NO: 281506 - RNA, 19 nt, Artificial Sequence
  Description of Artificial Sequence: Synthetic oligonucleotide
uggcauuccaggaagguac

SEQ ID NO: 281507 - RNA, 19 nt, Artificial Sequence
  Description of Artificial Sequence: Synthetic oligonucleotide
gucgucuucucucacgucg

SEQ ID NO: 281508 - RNA, 19 nt, Artificial Sequence
  Description of Artificial Sequence: Synthetic oligonucleotide
ugauauuggcuccugccug

SEQ ID NO: 281509 - RNA, 19 nt, Artificial Sequence
  Description of Artificial Sequence: Synthetic oligonucleotide
auuuauaauccucggggca

SEQ ID NO: 281510 - RNA, 19 nt, Artificial Sequence
  Description of Artificial Sequence: Synthetic oligonucleotide
aguccucagguguuuaugg

SEQ ID NO: 281511 - RNA, 19 nt, Artificial Sequence
  Description of Artificial Sequence: Synthetic oligonucleotide
gagcuuucgauugaguugc

SEQ ID NO: 281512 - RNA, 19 nt, Artificial Sequence
  Description of Artificial Sequence: Synthetic oligonucleotide
aaugcgaggaaaccgcaaa

SEQ ID NO: 281513 - RNA, 19 nt, Artificial Sequence
  Description of Artificial Sequence: Synthetic oligonucleotide
ucccuggaacugaagaagg

SEQ ID NO: 281514 - RNA, 19 nt, Artificial Sequence
  Description of Artificial Sequence: Synthetic oligonucleotide
gacguugggguccagguug

SEQ ID NO: 281515 - RNA, 19 nt, Artificial Sequence
  Description of Artificial Sequence: Synthetic oligonucleotide
guuggcgugggugaaaacg

SEQ ID NO: 281516 - RNA, 19 nt, Artificial Sequence
  Description of Artificial Sequence: Synthetic oligonucleotide
gacacucccagugagaaac

SEQ ID NO: 281517 - RNA, 19 nt, Artificial Sequence
  Description of Artificial Sequence: Synthetic oligonucleotide
cauguaacgcgccaccucc

SEQ ID NO: 281518 - RNA, 19 nt, Artificial Sequence
  Description of Artificial Sequence: Synthetic oligonucleotide
aagacccacagcugagagg

SEQ ID NO: 281519 - RNA, 19 nt, Artificial Sequence
  Description of Artificial Sequence: Synthetic oligonucleotide
ugggcuacacggaagucag

SEQ ID NO: 281520 - RNA, 19 nt, Artificial Sequence
  Description of Artificial Sequence: Synthetic oligonucleotide
ucgaucuuguuaaauuccu

SEQ ID NO: 281521 - RNA, 19 nt, Artificial Sequence
  Description of Artificial Sequence: Synthetic oligonucleotide
ucggaucacgucuaugugc

SEQ ID NO: 281522 - RNA, 19 nt, Artificial Sequence
  Description of Artificial Sequence: Synthetic oligonucleotide
uaauccucggggcagggcu

SEQ ID NO: 281523 - RNA, 19 nt, Artificial Sequence
  Description of Artificial Sequence: Synthetic oligonucleotide
acgucuaugugcuugugcu

SEQ ID NO: 281524 - RNA, 19 nt, Artificial Sequence
  Description of Artificial Sequence: Synthetic oligonucleotide
ucgauugaguugcagugca

SEQ ID NO: 281525 - RNA, 19 nt, Artificial Sequence
  Description of Artificial Sequence: Synthetic oligonucleotide
acgccauugacacagggga

SEQ ID NO: 281526 - RNA, 19 nt, Artificial Sequence
  Description of Artificial Sequence: Synthetic oligonucleotide
aaaucaguucuccaacgua

SEQ ID NO: 281527 - RNA, 19 nt, Artificial Sequence
  Description of Artificial Sequence: Synthetic oligonucleotide
ugugcauugacguccacuu

SEQ ID NO: 281528 - RNA, 19 nt, Artificial Sequence
  Description of Artificial Sequence: Synthetic oligonucleotide
gacacguagaguuggcgug

SEQ ID NO: 281529 - RNA, 19 nt, Artificial Sequence
  Description of Artificial Sequence: Synthetic oligonucleotide
agugaaggcagauguucuc

SEQ ID NO: 281530 - RNA, 19 nt, Artificial Sequence
  Description of Artificial Sequence: Synthetic oligonucleotide
uuuuaccaaacccaacauu

SEQ ID NO: 281531 - RNA, 19 nt, Artificial Sequence
  Description of Artificial Sequence: Synthetic oligonucleotide
guucgaucuuguuaaauuc

SEQ ID NO: 281532 - RNA, 19 nt, Artificial Sequence
  Description of Artificial Sequence: Synthetic oligonucleotide
ugagugauauuccggucga

SEQ ID NO: 281533 - RNA, 19 nt, Artificial Sequence
  Description of Artificial Sequence: Synthetic oligonucleotide
uaacgcgccaccuccaggc

SEQ ID NO: 281534 - RNA, 19 nt, Artificial Sequence
  Description of Artificial Sequence: Synthetic oligonucleotide
guaagagucgucuucucuc

SEQ ID NO: 281535 - RNA, 19 nt, Artificial Sequence
  Description of Artificial Sequence: Synthetic oligonucleotide
aggauggcggcguugcaac

SEQ ID NO: 281536 - RNA, 19 nt, Artificial Sequence
  Description of Artificial Sequence: Synthetic oligonucleotide
aagagucgucuucucucac

SEQ ID NO: 281537 - RNA, 19 nt, Artificial Sequence
  Description of Artificial Sequence: Synthetic oligonucleotide
uaagagucgucuucucuca

SEQ ID NO: 281538 - RNA, 19 nt, Artificial Sequence
  Description of Artificial Sequence: Synthetic oligonucleotide
agagucgucuucucucacg

SEQ ID NO: 281539 - RNA, 19 nt, Artificial Sequence
  Description of Artificial Sequence: Synthetic oligonucleotide
gaaucggucaccguaguca

SEQ ID NO: 281540 - RNA, 19 nt, Artificial Sequence
  Description of Artificial Sequence: Synthetic oligonucleotide
uuggcgugggugaaaacga

SEQ ID NO: 281541 - RNA, 19 nt, Artificial Sequence
  Description of Artificial Sequence: Synthetic oligonucleotide
uuagagcuggagcagucgu

SEQ ID NO: 281542 - RNA, 19 nt, Artificial Sequence
  Description of Artificial Sequence: Synthetic oligonucleotide
auaguaacgggcaucgaug

SEQ ID NO: 281543 - RNA, 19 nt, Artificial Sequence
  Description of Artificial Sequence: Synthetic oligonucleotide
cucggagccacacuggcag

SEQ ID NO: 281544 - RNA, 19 nt, Artificial Sequence
  Description of Artificial Sequence: Synthetic oligonucleotide
cacgaugggccucacagag

SEQ ID NO: 281545 - RNA, 19 nt, Artificial Sequence
  Description of Artificial Sequence: Synthetic oligonucleotide
uccacggcguugauauugg

SEQ ID NO: 281546 - RNA, 19 nt, Artificial Sequence
  Description of Artificial Sequence: Synthetic oligonucleotide
agcucgguuuccuaccccg

SEQ ID NO: 281547 - RNA, 19 nt, Artificial Sequence
  Description of Artificial Sequence: Synthetic oligonucleotide
uauugagaacacagaaaau

SEQ ID NO: 281548 - RNA, 19 nt, Artificial Sequence
  Description of Artificial Sequence: Synthetic oligonucleotide
acguccacuuguccggugc

SEQ ID NO: 281549 - RNA, 19 nt, Artificial Sequence
  Description of Artificial Sequence: Synthetic oligonucleotide
gaagcucaggguuggcucc

SEQ ID NO: 281550 - RNA, 19 nt, Artificial Sequence
  Description of Artificial Sequence: Synthetic oligonucleotide
auccacgccauugacacag

SEQ ID NO: 281551 - RNA, 19 nt, Artificial Sequence
  Description of Artificial Sequence: Synthetic oligonucleotide
uugucagucaggguuacgu

SEQ ID NO: 281552 - RNA, 19 nt, Artificial Sequence
  Description of Artificial Sequence: Synthetic oligonucleotide
uuauaauccucggggcagg

SEQ ID NO: 281553 - RNA, 19 nt, Artificial Sequence
  Description of Artificial Sequence: Synthetic oligonucleotide
uucggaucacgucuaugug

SEQ ID NO: 281554 - RNA, 19 nt, Artificial Sequence
  Description of Artificial Sequence: Synthetic oligonucleotide
agacacguagaguuggcgu

SEQ ID NO: 281555 - RNA, 19 nt, Artificial Sequence
  Description of Artificial Sequence: Synthetic oligonucleotide
uugucauaccagcaucgga

SEQ ID NO: 281556 - RNA, 19 nt, Artificial Sequence
  Description of Artificial Sequence: Synthetic oligonucleotide
ucguucuggacguuggggu

SEQ ID NO: 281557 - RNA, 19 nt, Artificial Sequence
  Description of Artificial Sequence: Synthetic oligonucleotide
acacgugcagugcugcagg

SEQ ID NO: 281558 - RNA, 19 nt, Artificial Sequence
  Description of Artificial Sequence: Synthetic oligonucleotide
ggcacgaugggccucacag

SEQ ID NO: 281559 - RNA, 19 nt, Artificial Sequence
  Description of Artificial Sequence: Synthetic oligonucleotide
aaccagcucugggagaggg

SEQ ID NO: 281560 - RNA, 19 nt, Artificial Sequence
  Description of Artificial Sequence: Synthetic oligonucleotide
ucucuucguugucagucag

SEQ ID NO: 281561 - RNA, 19 nt, Artificial Sequence
  Description of Artificial Sequence: Synthetic oligonucleotide
aaccgcaaaucuuggugca

SEQ ID NO: 281562 - RNA, 19 nt, Artificial Sequence
  Description of Artificial Sequence: Synthetic oligonucleotide
ugcucuuaaugucccagaa

SEQ ID NO: 281563 - RNA, 19 nt, Artificial Sequence
  Description of Artificial Sequence: Synthetic oligonucleotide
guuacgucggcaccccggg

SEQ ID NO: 281564 - RNA, 19 nt, Artificial Sequence
  Description of Artificial Sequence: Synthetic oligonucleotide
cacgccauugacacagggg

SEQ ID NO: 281565 - RNA, 19 nt, Artificial Sequence
  Description of Artificial Sequence: Synthetic oligonucleotide
uacgguagagcugcagccg

SEQ ID NO: 281566 - RNA, 19 nt, Artificial Sequence
  Description of Artificial Sequence: Synthetic oligonucleotide
caugcccucgcauucgggc

SEQ ID NO: 281567 - RNA, 19 nt, Artificial Sequence
  Description of Artificial Sequence: Synthetic oligonucleotide
gugcaaaccacacaucgga

SEQ ID NO: 281568 - RNA, 19 nt, Artificial Sequence
  Description of Artificial Sequence: Synthetic oligonucleotide
uguaacgcgccaccuccag

SEQ ID NO: 281569 - RNA, 19 nt, Artificial Sequence
  Description of Artificial Sequence: Synthetic oligonucleotide
ucacagacacguagaguug

SEQ ID NO: 281570 - RNA, 19 nt, Artificial Sequence
  Description of Artificial Sequence: Synthetic oligonucleotide
agaaucggucaccguaguc

SEQ ID NO: 281571 - RNA, 19 nt, Artificial Sequence
  Description of Artificial Sequence: Synthetic oligonucleotide
uucgauugaguugcagugc

SEQ ID NO: 281572 - RNA, 19 nt, Artificial Sequence
  Description of Artificial Sequence: Synthetic oligonucleotide
ugaccaugcgggcacgaug

SEQ ID NO: 281573 - RNA, 19 nt, Artificial Sequence
  Description of Artificial Sequence: Synthetic oligonucleotide
cagucguccgcacacgugc

SEQ ID NO: 281574 - RNA, 19 nt, Artificial Sequence
  Description of Artificial Sequence: Synthetic oligonucleotide
acguacucgcagaugaacg

SEQ ID NO: 281575 - RNA, 19 nt, Artificial Sequence
  Description of Artificial Sequence: Synthetic oligonucleotide
accacgcgguucuugcagc

SEQ ID NO: 281576 - RNA, 19 nt, Artificial Sequence
  Description of Artificial Sequence: Synthetic oligonucleotide
agaacgcagucgugguagc

SEQ ID NO: 281577 - RNA, 19 nt, Artificial Sequence
  Description of Artificial Sequence: Synthetic oligonucleotide
ucgcagaugaacgugcccu

SEQ ID NO: 281578 - RNA, 19 nt, Artificial Sequence
  Description of Artificial Sequence: Synthetic oligonucleotide
ugcaaaccacacaucggac

SEQ ID NO: 281579 - RNA, 19 nt, Artificial Sequence
  Description of Artificial Sequence: Synthetic oligonucleotide
ugcuugaccaugcgggcac

SEQ ID NO: 281580 - RNA, 19 nt, Artificial Sequence
  Description of Artificial Sequence: Synthetic oligonucleotide
gguaguugacagcauggag

SEQ ID NO: 281581 - RNA, 19 nt, Artificial Sequence
  Description of Artificial Sequence: Synthetic oligonucleotide
cagaacgcagucgugguag

SEQ ID NO: 281582 - RNA, 19 nt, Artificial Sequence
  Description of Artificial Sequence: Synthetic oligonucleotide
aauggcggcgcuccccgug

SEQ ID NO: 281583 - RNA, 19 nt, Artificial Sequence
  Description of Artificial Sequence: Synthetic oligonucleotide
cuugucauaccagcaucgg

SEQ ID NO: 281584 - RNA, 19 nt, Artificial Sequence
  Description of Artificial Sequence: Synthetic oligonucleotide
ucgggcacugggcugggag

SEQ ID NO: 281585 - RNA, 19 nt, Artificial Sequence
  Description of Artificial Sequence: Synthetic oligonucleotide
guuagagcuggagcagucg

SEQ ID NO: 281586 - RNA, 19 nt, Artificial Sequence
  Description of Artificial Sequence: Synthetic oligonucleotide
ugauauuccggucgauguu

SEQ ID NO: 281587 - RNA, 19 nt, Artificial Sequence
  Description of Artificial Sequence: Synthetic oligonucleotide
uccgcagagugcuugcacu

SEQ ID NO: 281588 - RNA, 19 nt, Artificial Sequence
  Description of Artificial Sequence: Synthetic oligonucleotide
uccaugcccucgcauucgg

SEQ ID NO: 281589 - RNA, 19 nt, Artificial Sequence
  Description of Artificial Sequence: Synthetic oligonucleotide
uguccggugcucagcagca

SEQ ID NO: 281590 - RNA, 19 nt, Artificial Sequence
  Description of Artificial Sequence: Synthetic oligonucleotide
guugcaacccgacagcucu

SEQ ID NO: 281591 - RNA, 19 nt, Artificial Sequence
  Description of Artificial Sequence: Synthetic oligonucleotide
ucgcauucgggcacugggc

SEQ ID NO: 281592 - RNA, 19 nt, Artificial Sequence
  Description of Artificial Sequence: Synthetic oligonucleotide
ggcuacacggaagucaggg

SEQ ID NO: 281593 - RNA, 19 nt, Artificial Sequence
  Description of Artificial Sequence: Synthetic oligonucleotide
acgcgguucuugcagcuuc

SEQ ID NO: 281594 - RNA, 19 nt, Artificial Sequence
  Description of Artificial Sequence: Synthetic oligonucleotide
gaucuuuucggugcgcaca

SEQ ID NO: 281595 - RNA, 19 nt, Artificial Sequence
  Description of Artificial Sequence: Synthetic oligonucleotide
cacagcucgguuuccuacc

SEQ ID NO: 281596 - RNA, 19 nt, Artificial Sequence
  Description of Artificial Sequence: Synthetic oligonucleotide
auggaggucgcaccgggca

SEQ ID NO: 281597 - RNA, 19 nt, Artificial Sequence
  Description of Artificial Sequence: Synthetic oligonucleotide
auccacggcguugauauug

SEQ ID NO: 281598 - RNA, 19 nt, Artificial Sequence
  Description of Artificial Sequence: Synthetic oligonucleotide
aagacccggacagggauga

SEQ ID NO: 281599 - RNA, 19 nt, Artificial Sequence
  Description of Artificial Sequence: Synthetic oligonucleotide
uucggugcgcacagcucgg

SEQ ID NO: 281600 - RNA, 19 nt, Artificial Sequence
  Description of Artificial Sequence: Synthetic oligonucleotide
acacucucgguggccaugc

SEQ ID NO: 281601 - RNA, 19 nt, Artificial Sequence
  Description of Artificial Sequence: Synthetic oligonucleotide
guggaugucucacaguucu

SEQ ID NO: 281602 - RNA, 19 nt, Artificial Sequence
  Description of Artificial Sequence: Synthetic oligonucleotide
cauucgggcacugggcugg

SEQ ID NO: 281603 - RNA, 19 nt, Artificial Sequence
  Description of Artificial Sequence: Synthetic oligonucleotide
aacgcgccaccuccaggcg

SEQ ID NO: 281604 - RNA, 19 nt, Artificial Sequence
  Description of Artificial Sequence: Synthetic oligonucleotide
cucggagauguauuuauaa

SEQ ID NO: 281605 - RNA, 19 nt, Artificial Sequence
  Description of Artificial Sequence: Synthetic oligonucleotide
uccccauuuuggcugcaug

SEQ ID NO: 281606 - RNA, 19 nt, Artificial Sequence
  Description of Artificial Sequence: Synthetic oligonucleotide
gucgugguagcucucccug

SEQ ID NO: 281607 - RNA, 19 nt, Artificial Sequence
  Description of Artificial Sequence: Synthetic oligonucleotide
auaauccucggggcagggc

SEQ ID NO: 281608 - RNA, 19 nt, Artificial Sequence
  Description of Artificial Sequence: Synthetic oligonucleotide
ugguguacgcugcugcuua

SEQ ID NO: 281609 - RNA, 19 nt, Artificial Sequence
  Description of Artificial Sequence: Synthetic oligonucleotide
gucaggguuacgucggcac

SEQ ID NO: 281610 - RNA, 19 nt, Artificial Sequence
  Description of Artificial Sequence: Synthetic oligonucleotide
guugcagugcaaaccacac

SEQ ID NO: 281611 - RNA, 19 nt, Artificial Sequence
  Description of Artificial Sequence: Synthetic oligonucleotide
gucguucuggacguugggg

SEQ ID NO: 281612 - RNA, 19 nt, Artificial Sequence
  Description of Artificial Sequence: Synthetic oligonucleotide
acacguagaguuggcgugg

SEQ ID NO: 281613 - RNA, 19 nt, Artificial Sequence
  Description of Artificial Sequence: Synthetic oligonucleotide
ucuugaguccucagguguu

SEQ ID NO: 281614 - RNA, 19 nt, Artificial Sequence
  Description of Artificial Sequence: Synthetic oligonucleotide
agcaacauucggaucacgu

SEQ ID NO: 281615 - RNA, 19 nt, Artificial Sequence
  Description of Artificial Sequence: Synthetic oligonucleotide
guuaggcaggguuagcgaa

SEQ ID NO: 281616 - RNA, 19 nt, Artificial Sequence
  Description of Artificial Sequence: Synthetic oligonucleotide
augaacgugcccuggggaa

SEQ ID NO: 281617 - RNA, 19 nt, Artificial Sequence
  Description of Artificial Sequence: Synthetic oligonucleotide
gagacagguggagccaucc

SEQ ID NO: 281618 - RNA, 19 nt, Artificial Sequence
  Description of Artificial Sequence: Synthetic oligonucleotide
cuuucgauugaguugcagu

SEQ ID NO: 281619 - RNA, 19 nt, Artificial Sequence
  Description of Artificial Sequence: Synthetic oligonucleotide
cauugacguccacuugucc

SEQ ID NO: 281620 - RNA, 19 nt, Artificial Sequence
  Description of Artificial Sequence: Synthetic oligonucleotide
gugauauuccggucgaugu

SEQ ID NO: 281621 - RNA, 19 nt, Artificial Sequence
  Description of Artificial Sequence: Synthetic oligonucleotide
aguugcagugcaaaccaca

SEQ ID NO: 281622 - RNA, 19 nt, Artificial Sequence
  Description of Artificial Sequence: Synthetic oligonucleotide
ggucaccguagucaaaccc

SEQ ID NO: 281623 - RNA, 19 nt, Artificial Sequence
  Description of Artificial Sequence: Synthetic oligonucleotide
caacauucggaucacgucu

SEQ ID NO: 281624 - RNA, 19 nt, Artificial Sequence
  Description of Artificial Sequence: Synthetic oligonucleotide
aagcggcugauguugccau

SEQ ID NO: 281625 - RNA, 19 nt, Artificial Sequence
  Description of Artificial Sequence: Synthetic oligonucleotide
ugcgaggaaaccgcaaauc

SEQ ID NO: 281626 - RNA, 19 nt, Artificial Sequence
  Description of Artificial Sequence: Synthetic oligonucleotide
ucggcuggaaggccgcaug

SEQ ID NO: 281627 - RNA, 19 nt, Artificial Sequence
  Description of Artificial Sequence: Synthetic oligonucleotide
ucucggagauguauuuaua

SEQ ID NO: 281628 - RNA, 19 nt, Artificial Sequence
  Description of Artificial Sequence: Synthetic oligonucleotide
ggcuguacgguagagcugc

SEQ ID NO: 281629 - RNA, 19 nt, Artificial Sequence
  Description of Artificial Sequence: Synthetic oligonucleotide
guuggcuccacgagacagg

SEQ ID NO: 281630 - RNA, 19 nt, Artificial Sequence
  Description of Artificial Sequence: Synthetic oligonucleotide
guaacgcgccaccuccagg

SEQ ID NO: 281631 - RNA, 19 nt, Artificial Sequence
  Description of Artificial Sequence: Synthetic oligonucleotide
caccauguaacgcgccacc

SEQ ID NO: 281632 - RNA, 19 nt, Artificial Sequence
  Description of Artificial Sequence: Synthetic oligonucleotide
accaagcugcaccauguaa

SEQ ID NO: 281633 - RNA, 19 nt, Artificial Sequence
  Description of Artificial Sequence: Synthetic oligonucleotide
caggcgguugugcaccacg

SEQ ID NO: 281634 - RNA, 19 nt, Artificial Sequence
  Description of Artificial Sequence: Synthetic oligonucleotide
gaguccucagguguuuaug

SEQ ID NO: 281635 - RNA, 19 nt, Artificial Sequence
  Description of Artificial Sequence: Synthetic oligonucleotide
uccaucagugguguacgcu

SEQ ID NO: 281636 - RNA, 19 nt, Artificial Sequence
  Description of Artificial Sequence: Synthetic oligonucleotide
uggccuggaucuugagucc

SEQ ID NO: 281637 - RNA, 19 nt, Artificial Sequence
  Description of Artificial Sequence: Synthetic oligonucleotide
aguuggcgugggugaaaac

SEQ ID NO: 281638 - RNA, 19 nt, Artificial Sequence
  Description of Artificial Sequence: Synthetic oligonucleotide
aauccucggggcagggcuc

SEQ ID NO: 281639 - RNA, 19 nt, Artificial Sequence
  Description of Artificial Sequence: Synthetic oligonucleotide
ggcaaugcgaggaaaccgc

SEQ ID NO: 281640 - RNA, 19 nt, Artificial Sequence
  Description of Artificial Sequence: Synthetic oligonucleotide
cagacacguagaguuggcg

SEQ ID NO: 281641 - RNA, 19 nt, Artificial Sequence
  Description of Artificial Sequence: Synthetic oligonucleotide
aggguuacgucggcacccc

SEQ ID NO: 281642 - RNA, 19 nt, Artificial Sequence
  Description of Artificial Sequence: Synthetic oligonucleotide
cucgguuuccuaccccgag

SEQ ID NO: 281643 - RNA, 19 nt, Artificial Sequence
  Description of Artificial Sequence: Synthetic oligonucleotide
uuauggaagcggugggcua

SEQ ID NO: 281644 - RNA, 19 nt, Artificial Sequence
  Description of Artificial Sequence: Synthetic oligonucleotide
aacauucggaucacgucua

SEQ ID NO: 281645 - RNA, 19 nt, Artificial Sequence
  Description of Artificial Sequence: Synthetic oligonucleotide
ccagaaucggucaccguag

SEQ ID NO: 281646 - RNA, 19 nt, Artificial Sequence
  Description of Artificial Sequence: Synthetic oligonucleotide
ucccguuaggcaggguuag

SEQ ID NO: 281647 - RNA, 19 nt, Artificial Sequence
  Description of Artificial Sequence: Synthetic oligonucleotide
uccaacguacucgcagaug

SEQ ID NO: 281648 - RNA, 19 nt, Artificial Sequence
  Description of Artificial Sequence: Synthetic oligonucleotide
uagcgaagguccugagcug

SEQ ID NO: 281649 - RNA, 19 nt, Artificial Sequence
  Description of Artificial Sequence: Synthetic oligonucleotide
ggagcagucguccgcacac

SEQ ID NO: 281650 - RNA, 19 nt, Artificial Sequence
  Description of Artificial Sequence: Synthetic oligonucleotide
ucgcaccgggcauucagga

SEQ ID NO: 281651 - RNA, 19 nt, Artificial Sequence
  Description of Artificial Sequence: Synthetic oligonucleotide
cucgcagaugaacgugccc

SEQ ID NO: 281652 - RNA, 19 nt, Artificial Sequence
  Description of Artificial Sequence: Synthetic oligonucleotide
ccaacguacucgcagauga

SEQ ID NO: 281653 - RNA, 19 nt, Artificial Sequence
  Description of Artificial Sequence: Synthetic oligonucleotide
ugcaacccgacagcucucc

SEQ ID NO: 281654 - RNA, 19 nt, Artificial Sequence
  Description of Artificial Sequence: Synthetic oligonucleotide
uccagucgagccaggcgac

SEQ ID NO: 281655 - RNA, 19 nt, Artificial Sequence
  Description of Artificial Sequence: Synthetic oligonucleotide
aggggaugggcacguucuc

SEQ ID NO: 281656 - RNA, 19 nt, Artificial Sequence
  Description of Artificial Sequence: Synthetic oligonucleotide
aucggaccgcucugggguc

SEQ ID NO: 281657 - RNA, 19 nt, Artificial Sequence
  Description of Artificial Sequence: Synthetic oligonucleotide
cauaguaacgggcaucgau

SEQ ID NO: 281658 - RNA, 19 nt, Artificial Sequence
  Description of Artificial Sequence: Synthetic oligonucleotide
ggcacguucucguagccuc

SEQ ID NO: 281659 - RNA, 19 nt, Artificial Sequence
  Description of Artificial Sequence: Synthetic oligonucleotide
augcgaggaaaccgcaaau

SEQ ID NO: 281660 - RNA, 19 nt, Artificial Sequence
  Description of Artificial Sequence: Synthetic oligonucleotide
ucggagccacacuggcagg

SEQ ID NO: 281661 - RNA, 19 nt, Artificial Sequence
  Description of Artificial Sequence: Synthetic oligonucleotide
cccgaagugacacucccag

SEQ ID NO: 281662 - RNA, 19 nt, Artificial Sequence
  Description of Artificial Sequence: Synthetic oligonucleotide
aucaguucuccaacguacu

SEQ ID NO: 281663 - RNA, 19 nt, Artificial Sequence
  Description of Artificial Sequence: Synthetic oligonucleotide
uguguccccgugguaguug

SEQ ID NO: 281664 - RNA, 19 nt, Artificial Sequence
  Description of Artificial Sequence: Synthetic oligonucleotide
ggucucacgcuugaggaug

SEQ ID NO: 281665 - RNA, 19 nt, Artificial Sequence
  Description of Artificial Sequence: Synthetic oligonucleotide
agcagucguccgcacacgu

SEQ ID NO: 281666 - RNA, 19 nt, Artificial Sequence
  Description of Artificial Sequence: Synthetic oligonucleotide
augcccucgcauucgggca

SEQ ID NO: 281667 - RNA, 19 nt, Artificial Sequence
  Description of Artificial Sequence: Synthetic oligonucleotide
gcgguugugcaccacggcc

SEQ ID NO: 281668 - RNA, 19 nt, Artificial Sequence
  Description of Artificial Sequence: Synthetic oligonucleotide
gcaauggcggcgcuccccg

SEQ ID NO: 281669 - RNA, 19 nt, Artificial Sequence
  Description of Artificial Sequence: Synthetic oligonucleotide
gugggcuacacggaaguca

SEQ ID NO: 281670 - RNA, 19 nt, Artificial Sequence
  Description of Artificial Sequence: Synthetic oligonucleotide
aaccccuucugugcagcug

SEQ ID NO: 281671 - RNA, 19 nt, Artificial Sequence
  Description of Artificial Sequence: Synthetic oligonucleotide
ccgcucuggggucagaucc

SEQ ID NO: 281672 - RNA, 19 nt, Artificial Sequence
  Description of Artificial Sequence: Synthetic oligonucleotide
acacucccagugagaaacc

SEQ ID NO: 281673 - RNA, 19 nt, Artificial Sequence
  Description of Artificial Sequence: Synthetic oligonucleotide
agguccugagcugucgaug

SEQ ID NO: 281674 - RNA, 19 nt, Artificial Sequence
  Description of Artificial Sequence: Synthetic oligonucleotide
gguuacgucggcaccccgg

SEQ ID NO: 281675 - RNA, 19 nt, Artificial Sequence
  Description of Artificial Sequence: Synthetic oligonucleotide
ggucgcaccgggcauucag

SEQ ID NO: 281676 - RNA, 19 nt, Artificial Sequence
  Description of Artificial Sequence: Synthetic oligonucleotide
uggcgugggugaaaacgaa

SEQ ID NO: 281677 - RNA, 19 nt, Artificial Sequence
  Description of Artificial Sequence: Synthetic oligonucleotide
acgaaccccuucugugcag

SEQ ID NO: 281678 - RNA, 19 nt, Artificial Sequence
  Description of Artificial Sequence: Synthetic oligonucleotide
ucgccccggggaaugguca

SEQ ID NO: 281679 - RNA, 19 nt, Artificial Sequence
  Description of Artificial Sequence: Synthetic oligonucleotide
ccguccuugucauaccagc

SEQ ID NO: 281680 - RNA, 19 nt, Artificial Sequence
  Description of Artificial Sequence: Synthetic oligonucleotide
uggucucacgcuugaggau

SEQ ID NO: 281681 - RNA, 19 nt, Artificial Sequence
  Description of Artificial Sequence: Synthetic oligonucleotide
gucgcaccgggcauucagg

SEQ ID NO: 281682 - RNA, 19 nt, Artificial Sequence
  Description of Artificial Sequence: Synthetic oligonucleotide
cccaacauuuauugagaac

SEQ ID NO: 281683 - RNA, 19 nt, Artificial Sequence
  Description of Artificial Sequence: Synthetic oligonucleotide
ccccgggucagcaacauuc

SEQ ID NO: 281684 - RNA, 19 nt, Artificial Sequence
  Description of Artificial Sequence: Synthetic oligonucleotide
ggcguugcaacccgacagc

SEQ ID NO: 281685 - RNA, 19 nt, Artificial Sequence
  Description of Artificial Sequence: Synthetic oligonucleotide
ccacgaaccccuucugugc

SEQ ID NO: 281686 - RNA, 19 nt, Artificial Sequence
  Description of Artificial Sequence: Synthetic oligonucleotide
cauucggaucacgucuaug

SEQ ID NO: 281687 - RNA, 19 nt, Artificial Sequence
  Description of Artificial Sequence: Synthetic oligonucleotide
accaugcgggcacgauggg

SEQ ID NO: 281688 - RNA, 19 nt, Artificial Sequence
  Description of Artificial Sequence: Synthetic oligonucleotide
accauguaacgcgccaccu

SEQ ID NO: 281689 - RNA, 19 nt, Artificial Sequence
  Description of Artificial Sequence: Synthetic oligonucleotide
gcccaauuucaacucagca

SEQ ID NO: 281690 - RNA, 19 nt, Artificial Sequence
  Description of Artificial Sequence: Synthetic oligonucleotide
acaucccggcagaugaucu

SEQ ID NO: 281691 - RNA, 19 nt, Artificial Sequence
  Description of Artificial Sequence: Synthetic oligonucleotide
gguucgaucuuguuaaauu

SEQ ID NO: 281692 - RNA, 19 nt, Artificial Sequence
  Description of Artificial Sequence: Synthetic oligonucleotide
cagucgugguagcucuccc

SEQ ID NO: 281693 - RNA, 19 nt, Artificial Sequence
  Description of Artificial Sequence: Synthetic oligonucleotide
gagcagucguccgcacacg

SEQ ID NO: 281694 - RNA, 19 nt, Artificial Sequence
  Description of Artificial Sequence: Synthetic oligonucleotide
aggcgguugugcaccacgg

SEQ ID NO: 281695 - RNA, 19 nt, Artificial Sequence
  Description of Artificial Sequence: Synthetic oligonucleotide
cugcaccauguaacgcgcc

SEQ ID NO: 281696 - RNA, 19 nt, Artificial Sequence
  Description of Artificial Sequence: Synthetic oligonucleotide
cacucggcuggaaggccgc

SEQ ID NO: 281697 - RNA, 19 nt, Artificial Sequence
  Description of Artificial Sequence: Synthetic oligonucleotide
ccauuuuggcugcaugaug

SEQ ID NO: 281698 - RNA, 19 nt, Artificial Sequence
  Description of Artificial Sequence: Synthetic oligonucleotide
gugugcguuugcucugcug

SEQ ID NO: 281699 - RNA, 19 nt, Artificial Sequence
  Description of Artificial Sequence: Synthetic oligonucleotide
cuuauggaagcggugggcu

SEQ ID NO: 281700 - RNA, 19 nt, Artificial Sequence
  Description of Artificial Sequence: Synthetic oligonucleotide
gcuguccugugcauugacg

SEQ ID NO: 281701 - RNA, 19 nt, Artificial Sequence
  Description of Artificial Sequence: Synthetic oligonucleotide
cacguagaguuggcguggg

SEQ ID NO: 281702 - RNA, 19 nt, Artificial Sequence
  Description of Artificial Sequence: Synthetic oligonucleotide
aggguuagcgaagguccug

SEQ ID NO: 281703 - RNA, 19 nt, Artificial Sequence
  Description of Artificial Sequence: Synthetic oligonucleotide
ccguuaggcaggguuagcg

SEQ ID NO: 281704 - RNA, 19 nt, Artificial Sequence
  Description of Artificial Sequence: Synthetic oligonucleotide
gugcgcacagcucgguuuc

SEQ ID NO: 281705 - RNA, 19 nt, Artificial Sequence
  Description of Artificial Sequence: Synthetic oligonucleotide
gguaagagucgucuucucu

SEQ ID NO: 281706 - RNA, 19 nt, Artificial Sequence
  Description of Artificial Sequence: Synthetic oligonucleotide
cuucucucacgucggccuc

SEQ ID NO: 281707 - RNA, 19 nt, Artificial Sequence
  Description of Artificial Sequence: Synthetic oligonucleotide
cacgaaccccuucugugca

SEQ ID NO: 281708 - RNA, 19 nt, Artificial Sequence
  Description of Artificial Sequence: Synthetic oligonucleotide
acgucggcaccccggguca

SEQ ID NO: 281709 - RNA, 19 nt, Artificial Sequence
  Description of Artificial Sequence: Synthetic oligonucleotide
ggagguaucugcucgcccu

SEQ ID NO: 281710 - RNA, 19 nt, Artificial Sequence
  Description of Artificial Sequence: Synthetic oligonucleotide
acggccuccaucaguggug

SEQ ID NO: 281711 - RNA, 19 nt, Artificial Sequence
  Description of Artificial Sequence: Synthetic oligonucleotide
ucguccgcacacgugcagu

SEQ ID NO: 281712 - RNA, 19 nt, Artificial Sequence
  Description of Artificial Sequence: Synthetic oligonucleotide
uuacgucggcaccccgggu

SEQ ID NO: 281713 - RNA, 19 nt, Artificial Sequence
  Description of Artificial Sequence: Synthetic oligonucleotide
cuguacgguagagcugcag

SEQ ID NO: 281714 - RNA, 19 nt, Artificial Sequence
  Description of Artificial Sequence: Synthetic oligonucleotide
gacguccacuuguccggug

SEQ ID NO: 281715 - RNA, 19 nt, Artificial Sequence
  Description of Artificial Sequence: Synthetic oligonucleotide
cacaucccggcagaugauc

SEQ ID NO: 281716 - RNA, 19 nt, Artificial Sequence
  Description of Artificial Sequence: Synthetic oligonucleotide
uauuccggucgauguucau

SEQ ID NO: 281717 - RNA, 19 nt, Artificial Sequence
  Description of Artificial Sequence: Synthetic oligonucleotide
augaagacccggacaggga

SEQ ID NO: 281718 - RNA, 19 nt, Artificial Sequence
  Description of Artificial Sequence: Synthetic oligonucleotide
guuggcagaggcccaauuu

SEQ ID NO: 281719 - RNA, 19 nt, Artificial Sequence
  Description of Artificial Sequence: Synthetic oligonucleotide
uucuggacguuggggucca

SEQ ID NO: 281720 - RNA, 19 nt, Artificial Sequence
  Description of Artificial Sequence: Synthetic oligonucleotide
gguugucuagcagcaugag

SEQ ID NO: 281721 - RNA, 19 nt, Artificial Sequence
  Description of Artificial Sequence: Synthetic oligonucleotide
ggcgacucugcuccagggc

SEQ ID NO: 281722 - RNA, 19 nt, Artificial Sequence
  Description of Artificial Sequence: Synthetic oligonucleotide
caaugcgaggaaaccgcaa

SEQ ID NO: 281723 - RNA, 19 nt, Artificial Sequence
  Description of Artificial Sequence: Synthetic oligonucleotide
aucgccccggggaaugguc

SEQ ID NO: 281724 - RNA, 19 nt, Artificial Sequence
  Description of Artificial Sequence: Synthetic oligonucleotide
cucguagccucuagccaca

SEQ ID NO: 281725 - RNA, 19 nt, Artificial Sequence
  Description of Artificial Sequence: Synthetic oligonucleotide
aacgggcaucgaugcagua

SEQ ID NO: 281726 - RNA, 19 nt, Artificial Sequence
  Description of Artificial Sequence: Synthetic oligonucleotide
ccacucggcuggaaggccg

SEQ ID NO: 281727 - RNA, 19 nt, Artificial Sequence
  Description of Artificial Sequence: Synthetic oligonucleotide
uaccccgagccugagcuuu

SEQ ID NO: 281728 - RNA, 19 nt, Artificial Sequence
  Description of Artificial Sequence: Synthetic oligonucleotide
cagucaggguuacgucggc

SEQ ID NO: 281729 - RNA, 19 nt, Artificial Sequence
  Description of Artificial Sequence: Synthetic oligonucleotide
auauuggcuccugccugca

SEQ ID NO: 281730 - RNA, 19 nt, Artificial Sequence
  Description of Artificial Sequence: Synthetic oligonucleotide
cuuccgccucucugacucc

SEQ ID NO: 281731 - RNA, 19 nt, Artificial Sequence
  Description of Artificial Sequence: Synthetic oligonucleotide
ggcgugggugaaaacgaag

SEQ ID NO: 281732 - RNA, 19 nt, Artificial Sequence
  Description of Artificial Sequence: Synthetic oligonucleotide
gaaggccgcauggucucac

SEQ ID NO: 281733 - RNA, 19 nt, Artificial Sequence
  Description of Artificial Sequence: Synthetic oligonucleotide
ccuuauggaagcggugggc

SEQ ID NO: 281734 - RNA, 19 nt, Artificial Sequence
  Description of Artificial Sequence: Synthetic oligonucleotide
gagcaugccugguuacacu

SEQ ID NO: 281735 - RNA, 19 nt, Artificial Sequence
  Description of Artificial Sequence: Synthetic oligonucleotide
cccgggucagcaacauucg

SEQ ID NO: 281736 - RNA, 19 nt, Artificial Sequence
  Description of Artificial Sequence: Synthetic oligonucleotide
ugacguccacuuguccggu

SEQ ID NO: 281737 - RNA, 19 nt, Artificial Sequence
  Description of Artificial Sequence: Synthetic oligonucleotide
aagcggugggcuacacgga

SEQ ID NO: 281738 - RNA, 19 nt, Artificial Sequence
  Description of Artificial Sequence: Synthetic oligonucleotide
uugaccaugcgggcacgau

SEQ ID NO: 281739 - RNA, 19 nt, Artificial Sequence
  Description of Artificial Sequence: Synthetic oligonucleotide
cgguuuccuaccccgagcc

SEQ ID NO: 281740 - RNA, 19 nt, Artificial Sequence
  Description of Artificial Sequence: Synthetic oligonucleotide
caggccuuauggaagcggu

SEQ ID NO: 281741 - RNA, 19 nt, Artificial Sequence
  Description of Artificial Sequence: Synthetic oligonucleotide
gcuuucgauugaguugcag

SEQ ID NO: 281742 - RNA, 19 nt, Artificial Sequence
  Description of Artificial Sequence: Synthetic oligonucleotide
cucccguuaggcaggguua

SEQ ID NO: 281743 - RNA, 19 nt, Artificial Sequence
  Description of Artificial Sequence: Synthetic oligonucleotide
ggcagaugaucuuuucggu

SEQ ID NO: 281744 - RNA, 19 nt, Artificial Sequence
  Description of Artificial Sequence: Synthetic oligonucleotide
gugguagcucucccuggca

SEQ ID NO: 281745 - RNA, 19 nt, Artificial Sequence
  Description of Artificial Sequence: Synthetic oligonucleotide
acgugcagugcugcaggug

SEQ ID NO: 281746 - RNA, 19 nt, Artificial Sequence
  Description of Artificial Sequence: Synthetic oligonucleotide
cagccccgaagugacacuc

SEQ ID NO: 281747 - RNA, 19 nt, Artificial Sequence
  Description of Artificial Sequence: Synthetic oligonucleotide
gcaugaagacccggacagg

SEQ ID NO: 281748 - RNA, 19 nt, Artificial Sequence
  Description of Artificial Sequence: Synthetic oligonucleotide
acguagaguuggcgugggu

SEQ ID NO: 281749 - RNA, 19 nt, Artificial Sequence
  Description of Artificial Sequence: Synthetic oligonucleotide
cuuauccacggcguugaua

SEQ ID NO: 281750 - RNA, 19 nt, Artificial Sequence
  Description of Artificial Sequence: Synthetic oligonucleotide
gcauucgggcacugggcug

SEQ ID NO: 281751 - RNA, 19 nt, Artificial Sequence
  Description of Artificial Sequence: Synthetic oligonucleotide
cucagcaauggcggcgcuc

SEQ ID NO: 281752 - RNA, 19 nt, Artificial Sequence
  Description of Artificial Sequence: Synthetic oligonucleotide
ggaccucagcaauggcggc

SEQ ID NO: 281753 - RNA, 19 nt, Artificial Sequence
  Description of Artificial Sequence: Synthetic oligonucleotide
cggcguugcaacccgacag

SEQ ID NO: 281754 - RNA, 19 nt, Artificial Sequence
  Description of Artificial Sequence: Synthetic oligonucleotide
caacguacucgcagaugaa

SEQ ID NO: 281755 - RNA, 19 nt, Artificial Sequence
  Description of Artificial Sequence: Synthetic oligonucleotide
gccucggcaucagaaauca

SEQ ID NO: 281756 - RNA, 19 nt, Artificial Sequence
  Description of Artificial Sequence: Synthetic oligonucleotide
cccagaaucggucaccgua

SEQ ID NO: 281757 - RNA, 19 nt, Artificial Sequence
  Description of Artificial Sequence: Synthetic oligonucleotide
ccacgccauugacacaggg

SEQ ID NO: 281758 - RNA, 19 nt, Artificial Sequence
  Description of Artificial Sequence: Synthetic oligonucleotide
ggcgguugugcaccacggc

SEQ ID NO: 281759 - RNA, 19 nt, Artificial Sequence
  Description of Artificial Sequence: Synthetic oligonucleotide
cguucucguagccucuagc

SEQ ID NO: 281760 - RNA, 19 nt, Artificial Sequence
  Description of Artificial Sequence: Synthetic oligonucleotide
cuccugggccucugaagca

SEQ ID NO: 281761 - RNA, 19 nt, Artificial Sequence
  Description of Artificial Sequence: Synthetic oligonucleotide
ggauggcggcguugcaacc

SEQ ID NO: 281762 - RNA, 19 nt, Artificial Sequence
  Description of Artificial Sequence: Synthetic oligonucleotide
ccauguaacgcgccaccuc

SEQ ID NO: 281763 - RNA, 19 nt, Artificial Sequence
  Description of Artificial Sequence: Synthetic oligonucleotide
auguaacgcgccaccucca

SEQ ID NO: 281764 - RNA, 19 nt, Artificial Sequence
  Description of Artificial Sequence: Synthetic oligonucleotide
ggugaaaacgaaguuucuu

SEQ ID NO: 281765 - RNA, 19 nt, Artificial Sequence
  Description of Artificial Sequence: Synthetic oligonucleotide
cccgugguaguugacagca

SEQ ID NO: 281766 - RNA, 19 nt, Artificial Sequence
  Description of Artificial Sequence: Synthetic oligonucleotide
cacucccagugagaaacca

SEQ ID NO: 281767 - RNA, 19 nt, Artificial Sequence
  Description of Artificial Sequence: Synthetic oligonucleotide
ggcgccggggcucuccaug

SEQ ID NO: 281768 - RNA, 19 nt, Artificial Sequence
  Description of Artificial Sequence: Synthetic oligonucleotide
gaggucgcaccgggcauuc

SEQ ID NO: 281769 - RNA, 19 nt, Artificial Sequence
  Description of Artificial Sequence: Synthetic oligonucleotide
cuccacgagacaggaacaa

SEQ ID NO: 281770 - RNA, 19 nt, Artificial Sequence
  Description of Artificial Sequence: Synthetic oligonucleotide
ccuaccccgagccugagcu

SEQ ID NO: 281771 - RNA, 19 nt, Artificial Sequence
  Description of Artificial Sequence: Synthetic oligonucleotide
ggccacucggcuggaaggc

SEQ ID NO: 281772 - RNA, 19 nt, Artificial Sequence
  Description of Artificial Sequence: Synthetic oligonucleotide
ccgggucagcaacauucgg

SEQ ID NO: 281773 - RNA, 19 nt, Artificial Sequence
  Description of Artificial Sequence: Synthetic oligonucleotide
gguggaugucucacaguuc

SEQ ID NO: 281774 - RNA, 19 nt, Artificial Sequence
  Description of Artificial Sequence: Synthetic oligonucleotide
ggcgcuccccgugaaggag

SEQ ID NO: 281775 - RNA, 19 nt, Artificial Sequence
  Description of Artificial Sequence: Synthetic oligonucleotide
uggcggcguugcaacccga

SEQ ID NO: 281776 - RNA, 19 nt, Artificial Sequence
  Description of Artificial Sequence: Synthetic oligonucleotide
guguacgcugcugcuuauc

SEQ ID NO: 281777 - RNA, 19 nt, Artificial Sequence
  Description of Artificial Sequence: Synthetic oligonucleotide
ggguuacgucggcaccccg

SEQ ID NO: 281778 - RNA, 19 nt, Artificial Sequence
  Description of Artificial Sequence: Synthetic oligonucleotide
ggugaaguacuugcucuua

SEQ ID NO: 281779 - RNA, 19 nt, Artificial Sequence
  Description of Artificial Sequence: Synthetic oligonucleotide
cuguagacacagccaccaa

SEQ ID NO: 281780 - RNA, 19 nt, Artificial Sequence
  Description of Artificial Sequence: Synthetic oligonucleotide
gcaaugcgaggaaaccgca

SEQ ID NO: 281781 - RNA, 19 nt, Artificial Sequence
  Description of Artificial Sequence: Synthetic oligonucleotide
gaacgcagucgugguagcu

SEQ ID NO: 281782 - RNA, 19 nt, Artificial Sequence
  Description of Artificial Sequence: Synthetic oligonucleotide
guccacuuguccggugcuc

SEQ ID NO: 281783 - RNA, 19 nt, Artificial Sequence
  Description of Artificial Sequence: Synthetic oligonucleotide
caggguuagcgaagguccu

SEQ ID NO: 281784 - RNA, 19 nt, Artificial Sequence
  Description of Artificial Sequence: Synthetic oligonucleotide
gggugugcguuugcucugc

SEQ ID NO: 281785 - RNA, 19 nt, Artificial Sequence
  Description of Artificial Sequence: Synthetic oligonucleotide
gcucuuaaugucccagaau

SEQ ID NO: 281786 - RNA, 19 nt, Artificial Sequence
  Description of Artificial Sequence: Synthetic oligonucleotide
ccaucuuggcuguacggua

SEQ ID NO: 281787 - RNA, 19 nt, Artificial Sequence
  Description of Artificial Sequence: Synthetic oligonucleotide
gcgcuccccgugaaggagg

SEQ ID NO: 281788 - RNA, 19 nt, Artificial Sequence
  Description of Artificial Sequence: Synthetic oligonucleotide
gcaaggcgcugaguucagg

SEQ ID NO: 281789 - RNA, 19 nt, Artificial Sequence
  Description of Artificial Sequence: Synthetic oligonucleotide
gucgcagggcgggcgccgg

SEQ ID NO: 281790 - RNA, 19 nt, Artificial Sequence
  Description of Artificial Sequence: Synthetic oligonucleotide
ggccucggcaucagaaauc

SEQ ID NO: 281791 - RNA, 19 nt, Artificial Sequence
  Description of Artificial Sequence: Synthetic oligonucleotide
ccccgugguaguugacagc

SEQ ID NO: 281792 - RNA, 19 nt, Artificial Sequence
  Description of Artificial Sequence: Synthetic oligonucleotide
gcagucguccgcacacgug

SEQ ID NO: 281793 - RNA, 19 nt, Artificial Sequence
  Description of Artificial Sequence: Synthetic oligonucleotide
gcccguccuugucauacca

SEQ ID NO: 281794 - RNA, 19 nt, Artificial Sequence
  Description of Artificial Sequence: Synthetic oligonucleotide
gcuccacgagacaggaaca

SEQ ID NO: 281795 - RNA, 19 nt, Artificial Sequence
  Description of Artificial Sequence: Synthetic oligonucleotide
ucguagccucuagccacau

SEQ ID NO: 281796 - RNA, 19 nt, Artificial Sequence
  Description of Artificial Sequence: Synthetic oligonucleotide
guucuccaacguacucgca

SEQ ID NO: 281797 - RNA, 19 nt, Artificial Sequence
  Description of Artificial Sequence: Synthetic oligonucleotide
cguuaggcaggguuagcga

SEQ ID NO: 281798 - RNA, 19 nt, Artificial Sequence
  Description of Artificial Sequence: Synthetic oligonucleotide
ccgcccguccuugucauac

SEQ ID NO: 281799 - RNA, 19 nt, Artificial Sequence
  Description of Artificial Sequence: Synthetic oligonucleotide
cagaaucggucaccguagu

SEQ ID NO: 281800 - RNA, 19 nt, Artificial Sequence
  Description of Artificial Sequence: Synthetic oligonucleotide
ggugcgcacagcucgguuu

SEQ ID NO: 281801 - RNA, 19 nt, Artificial Sequence
  Description of Artificial Sequence: Synthetic oligonucleotide
gcgccggggcucuccaugc

SEQ ID NO: 281802 - RNA, 19 nt, Artificial Sequence
  Description of Artificial Sequence: Synthetic oligonucleotide
acgucggccucggcaucag

SEQ ID NO: 281803 - RNA, 19 nt, Artificial Sequence
  Description of Artificial Sequence: Synthetic oligonucleotide
ggucgcagggcgggcgccg

SEQ ID NO: 281804 - RNA, 19 nt, Artificial Sequence
  Description of Artificial Sequence: Synthetic oligonucleotide
ccgcauggucucacgcuug

SEQ ID NO: 281805 - RNA, 19 nt, Artificial Sequence
  Description of Artificial Sequence: Synthetic oligonucleotide
agcuuucgauugaguugca

SEQ ID NO: 281806 - RNA, 19 nt, Artificial Sequence
  Description of Artificial Sequence: Synthetic oligonucleotide
ccacggcguugauauuggc

SEQ ID NO: 281807 - RNA, 19 nt, Artificial Sequence
  Description of Artificial Sequence: Synthetic oligonucleotide
gcguugauauuggcuccug

SEQ ID NO: 281808 - RNA, 19 nt, Artificial Sequence
  Description of Artificial Sequence: Synthetic oligonucleotide
cguugcaacccgacagcuc

SEQ ID NO: 281809 - RNA, 19 nt, Artificial Sequence
  Description of Artificial Sequence: Synthetic oligonucleotide
ggcguccugugccaggggu

SEQ ID NO: 281810 - RNA, 19 nt, Artificial Sequence
  Description of Artificial Sequence: Synthetic oligonucleotide
gcggcguugcaacccgaca

SEQ ID NO: 281811 - RNA, 19 nt, Artificial Sequence
  Description of Artificial Sequence: Synthetic oligonucleotide
cggucaccguagucaaacc

SEQ ID NO: 281812 - RNA, 19 nt, Artificial Sequence
  Description of Artificial Sequence: Synthetic oligonucleotide
cuccaacguacucgcagau

SEQ ID NO: 281813 - RNA, 19 nt, Artificial Sequence
  Description of Artificial Sequence: Synthetic oligonucleotide
ggugggcuacacggaaguc

SEQ ID NO: 281814 - RNA, 19 nt, Artificial Sequence
  Description of Artificial Sequence: Synthetic oligonucleotide
acucggcuggaaggccgca

SEQ ID NO: 281815 - RNA, 19 nt, Artificial Sequence
  Description of Artificial Sequence: Synthetic oligonucleotide
cgucuucucucacgucggc

SEQ ID NO: 281816 - RNA, 19 nt, Artificial Sequence
  Description of Artificial Sequence: Synthetic oligonucleotide
cgcacacgugcagugcugc

SEQ ID NO: 281817 - RNA, 19 nt, Artificial Sequence
  Description of Artificial Sequence: Synthetic oligonucleotide
ggcggcguugcaacccgac

SEQ ID NO: 281818 - RNA, 19 nt, Artificial Sequence
  Description of Artificial Sequence: Synthetic oligonucleotide
ccgcacacgugcagugcug

SEQ ID NO: 281819 - RNA, 19 nt, Artificial Sequence
  Description of Artificial Sequence: Synthetic oligonucleotide
gggcaucgaugcaguaaac

SEQ ID NO: 281820 - RNA, 19 nt, Artificial Sequence
  Description of Artificial Sequence: Synthetic oligonucleotide
gagugauauuccggucgau

SEQ ID NO: 281821 - RNA, 19 nt, Artificial Sequence
  Description of Artificial Sequence: Synthetic oligonucleotide
ccucgcauucgggcacugg

SEQ ID NO: 281822 - RNA, 19 nt, Artificial Sequence
  Description of Artificial Sequence: Synthetic oligonucleotide
gggguucgaucuuguuaaa

SEQ ID NO: 281823 - RNA, 19 nt, Artificial Sequence
  Description of Artificial Sequence: Synthetic oligonucleotide
gggugaaaacgaaguuucu

SEQ ID NO: 281824 - RNA, 19 nt, Artificial Sequence
  Description of Artificial Sequence: Synthetic oligonucleotide
ccccuuccuuguuccgaag

SEQ ID NO: 281825 - RNA, 19 nt, Artificial Sequence
  Description of Artificial Sequence: Synthetic oligonucleotide
cccaagcuguguccccuuc

SEQ ID NO: 281826 - RNA, 19 nt, Artificial Sequence
  Description of Artificial Sequence: Synthetic oligonucleotide
cccaucgccccggggaaug

SEQ ID NO: 281827 - RNA, 19 nt, Artificial Sequence
  Description of Artificial Sequence: Synthetic oligonucleotide
cacguucucguagccucua

SEQ ID NO: 281828 - RNA, 19 nt, Artificial Sequence
  Description of Artificial Sequence: Synthetic oligonucleotide
ggguucgaucuuguuaaau

SEQ ID NO: 281829 - RNA, 19 nt, Artificial Sequence
  Description of Artificial Sequence: Synthetic oligonucleotide
cccguuaggcaggguuagc

SEQ ID NO: 281830 - RNA, 19 nt, Artificial Sequence
  Description of Artificial Sequence: Synthetic oligonucleotide
cgaggaaaccgcaaaucuu

SEQ ID NO: 281831 - RNA, 19 nt, Artificial Sequence
  Description of Artificial Sequence: Synthetic oligonucleotide
ggaaggccgcauggucuca

SEQ ID NO: 281832 - RNA, 19 nt, Artificial Sequence
  Description of Artificial Sequence: Synthetic oligonucleotide
ccugagcuuucgauugagu

SEQ ID NO: 281833 - RNA, 19 nt, Artificial Sequence
  Description of Artificial Sequence: Synthetic oligonucleotide
gcguugcaacccgacagcu

SEQ ID NO: 281834 - RNA, 19 nt, Artificial Sequence
  Description of Artificial Sequence: Synthetic oligonucleotide
gccugacugacuggagucu

SEQ ID NO: 281835 - RNA, 19 nt, Artificial Sequence
  Description of Artificial Sequence: Synthetic oligonucleotide
gguguacgcugcugcuuau

SEQ ID NO: 281836 - RNA, 19 nt, Artificial Sequence
  Description of Artificial Sequence: Synthetic oligonucleotide
cccauuuuggcugcaugau

SEQ ID NO: 281837 - RNA, 19 nt, Artificial Sequence
  Description of Artificial Sequence: Synthetic oligonucleotide
gcgguucuugcagcuucuc

SEQ ID NO: 281838 - RNA, 19 nt, Artificial Sequence
  Description of Artificial Sequence: Synthetic oligonucleotide
ccgagccugagcuuucgau

SEQ ID NO: 281839 - RNA, 19 nt, Artificial Sequence
  Description of Artificial Sequence: Synthetic oligonucleotide
gcagcacgugacagaucuc

SEQ ID NO: 281840 - RNA, 19 nt, Artificial Sequence
  Description of Artificial Sequence: Synthetic oligonucleotide
gcgcugaguucaggcagca

SEQ ID NO: 281841 - RNA, 19 nt, Artificial Sequence
  Description of Artificial Sequence: Synthetic oligonucleotide
gggucgcagggcgggcgcc

SEQ ID NO: 281842 - RNA, 19 nt, Artificial Sequence
  Description of Artificial Sequence: Synthetic oligonucleotide
cgauugaguugcagugcaa

SEQ ID NO: 281843 - RNA, 19 nt, Artificial Sequence
  Description of Artificial Sequence: Synthetic oligonucleotide
cgagccugagcuuucgauu

SEQ ID NO: 281844 - RNA, 19 nt, Artificial Sequence
  Description of Artificial Sequence: Synthetic oligonucleotide
gcucucccuggcagcgaug

SEQ ID NO: 281845 - RNA, 19 nt, Artificial Sequence
  Description of Artificial Sequence: Synthetic oligonucleotide
cgcauucgggcacugggcu

SEQ ID NO: 281846 - RNA, 19 nt, Artificial Sequence
  Description of Artificial Sequence: Synthetic oligonucleotide
cuaccccgagccugagcuu

SEQ ID NO: 281847 - RNA, 19 nt, Artificial Sequence
  Description of Artificial Sequence: Synthetic oligonucleotide
ccgaagugacacucccagu

SEQ ID NO: 281848 - RNA, 19 nt, Artificial Sequence
  Description of Artificial Sequence: Synthetic oligonucleotide
gcuguacgguagagcugca

SEQ ID NO: 281849 - RNA, 19 nt, Artificial Sequence
  Description of Artificial Sequence: Synthetic oligonucleotide
caauggcggcgcuccccgu

SEQ ID NO: 281850 - RNA, 19 nt, Artificial Sequence
  Description of Artificial Sequence: Synthetic oligonucleotide
cccggggaauggucaccuc

SEQ ID NO: 281851 - RNA, 19 nt, Artificial Sequence
  Description of Artificial Sequence: Synthetic oligonucleotide
caucgccccggggaauggu

SEQ ID NO: 281852 - RNA, 19 nt, Artificial Sequence
  Description of Artificial Sequence: Synthetic oligonucleotide
cucggcuggaaggccgcau

SEQ ID NO: 281853 - RNA, 19 nt, Artificial Sequence
  Description of Artificial Sequence: Synthetic oligonucleotide
cggugggcuacacggaagu

SEQ ID NO: 281854 - RNA, 19 nt, Artificial Sequence
  Description of Artificial Sequence: Synthetic oligonucleotide
ggaggucgcaccgggcauu

SEQ ID NO: 281855 - RNA, 19 nt, Artificial Sequence
  Description of Artificial Sequence: Synthetic oligonucleotide
ccagccccgaagugacacu

SEQ ID NO: 281856 - RNA, 19 nt, Artificial Sequence
  Description of Artificial Sequence: Synthetic oligonucleotide
ccgcaccuugaugccgcuc

SEQ ID NO: 281857 - RNA, 19 nt, Artificial Sequence
  Description of Artificial Sequence: Synthetic oligonucleotide
ggaccgcucuggggucaga

SEQ ID NO: 281858 - RNA, 19 nt, Artificial Sequence
  Description of Artificial Sequence: Synthetic oligonucleotide
gccgcaccuugaugccgcu

SEQ ID NO: 281859 - RNA, 19 nt, Artificial Sequence
  Description of Artificial Sequence: Synthetic oligonucleotide
gccgcccguccuugucaua

SEQ ID NO: 281860 - RNA, 19 nt, Artificial Sequence
  Description of Artificial Sequence: Synthetic oligonucleotide
gcccucgcauucgggcacu

SEQ ID NO: 281861 - RNA, 19 nt, Artificial Sequence
  Description of Artificial Sequence: Synthetic oligonucleotide
cacaggggaugggcacguu

SEQ ID NO: 281862 - RNA, 19 nt, Artificial Sequence
  Description of Artificial Sequence: Synthetic oligonucleotide
cgucggccucggcaucaga

SEQ ID NO: 281863 - RNA, 19 nt, Artificial Sequence
  Description of Artificial Sequence: Synthetic oligonucleotide
cgggcgccggggcucucca

SEQ ID NO: 281864 - RNA, 19 nt, Artificial Sequence
  Description of Artificial Sequence: Synthetic oligonucleotide
gggcgccggggcucuccau

SEQ ID NO: 281865 - RNA, 19 nt, Artificial Sequence
  Description of Artificial Sequence: Synthetic oligonucleotide
cggugcgcacagcucgguu

SEQ ID NO: 281866 - RNA, 19 nt, Artificial Sequence
  Description of Artificial Sequence: Synthetic oligonucleotide
agaauuucuauuaugaggc

SEQ ID NO: 281867 - RNA, 19 nt, Artificial Sequence
  Description of Artificial Sequence: Synthetic oligonucleotide
aaaucgauguauuucaaug

SEQ ID NO: 281868 - RNA, 19 nt, Artificial Sequence
  Description of Artificial Sequence: Synthetic oligonucleotide
uguuguaacaugauaaccc

SEQ ID NO: 281869 - RNA, 19 nt, Artificial Sequence
  Description of Artificial Sequence: Synthetic oligonucleotide
aaaucuaaugcacagcucu

SEQ ID NO: 281870 - RNA, 19 nt, Artificial Sequence
  Description of Artificial Sequence: Synthetic oligonucleotide
aauaaacuccaauaaacca

SEQ ID NO: 281871 - RNA, 19 nt, Artificial Sequence
  Description of Artificial Sequence: Synthetic oligonucleotide
acuaaacuaggcuugaggg

SEQ ID NO: 281872 - RNA, 19 nt, Artificial Sequence
  Description of Artificial Sequence: Synthetic oligonucleotide
aagaaccgcauguaaaggc

SEQ ID NO: 281873 - RNA, 19 nt, Artificial Sequence
  Description of Artificial Sequence: Synthetic oligonucleotide
auuauguuauguaagagac

SEQ ID NO: 281874 - RNA, 19 nt, Artificial Sequence
  Description of Artificial Sequence: Synthetic oligonucleotide
uguucuaggacaaucacca

SEQ ID NO: 281875 - RNA, 19 nt, Artificial Sequence
  Description of Artificial Sequence: Synthetic oligonucleotide
ugaaagucuaacaauggag

SEQ ID NO: 281876 - RNA, 19 nt, Artificial Sequence
  Description of Artificial Sequence: Synthetic oligonucleotide
agaauugaggcaugaagcc

SEQ ID NO: 281877 - RNA, 19 nt, Artificial Sequence
  Description of Artificial Sequence: Synthetic oligonucleotide
aaagauauguaucuucgca

SEQ ID NO: 281878 - RNA, 19 nt, Artificial Sequence
  Description of Artificial Sequence: Synthetic oligonucleotide
acuucuaaagcugaugucc

SEQ ID NO: 281879 - RNA, 19 nt, Artificial Sequence
  Description of Artificial Sequence: Synthetic oligonucleotide
uauaggaaauguagaaugg

SEQ ID NO: 281880 - RNA, 19 nt, Artificial Sequence
  Description of Artificial Sequence: Synthetic oligonucleotide
aaugauugguucuuacauc

SEQ ID NO: 281881 - RNA, 19 nt, Artificial Sequence
  Description of Artificial Sequence: Synthetic oligonucleotide
uagacucuaguuuucaacg

SEQ ID NO: 281882 - RNA, 19 nt, Artificial Sequence
  Description of Artificial Sequence: Synthetic oligonucleotide
aaugcuauaucaagguagc

SEQ ID NO: 281883 - RNA, 19 nt, Artificial Sequence
  Description of Artificial Sequence: Synthetic oligonucleotide
aaaugauugguucuuacau

SEQ ID NO: 281884 - RNA, 19 nt, Artificial Sequence
  Description of Artificial Sequence: Synthetic oligonucleotide
ucuguuacugcuguuaccg

SEQ ID NO: 281885 - RNA, 19 nt, Artificial Sequence
  Description of Artificial Sequence: Synthetic oligonucleotide
aagauuauguuauguaaga

SEQ ID NO: 281886 - RNA, 19 nt, Artificial Sequence
  Description of Artificial Sequence: Synthetic oligonucleotide
aacuaaagacgcugugucc

SEQ ID NO: 281887 - RNA, 19 nt, Artificial Sequence
  Description of Artificial Sequence: Synthetic oligonucleotide
agcagaguaacuugcaacg

SEQ ID NO: 281888 - RNA, 19 nt, Artificial Sequence
  Description of Artificial Sequence: Synthetic oligonucleotide
uauguaucuucgcauagag

SEQ ID NO: 281889 - RNA, 19 nt, Artificial Sequence
  Description of Artificial Sequence: Synthetic oligonucleotide
uacuaaacuaggcuugagg

SEQ ID NO: 281890 - RNA, 19 nt, Artificial Sequence
  Description of Artificial Sequence: Synthetic oligonucleotide
agaacaaccuccuggagag

SEQ ID NO: 281891 - RNA, 19 nt, Artificial Sequence
  Description of Artificial Sequence: Synthetic oligonucleotide
uuauaucucaaugacuuag

SEQ ID NO: 281892 - RNA, 19 nt, Artificial Sequence
  Description of Artificial Sequence: Synthetic oligonucleotide
ucaacgucuaguacaaaag

SEQ ID NO: 281893 - RNA, 19 nt, Artificial Sequence
  Description of Artificial Sequence: Synthetic oligonucleotide
auaaagauucacugacagc

SEQ ID NO: 281894 - RNA, 19 nt, Artificial Sequence
  Description of Artificial Sequence: Synthetic oligonucleotide
aaugaaagucuaacaaugg

SEQ ID NO: 281895 - RNA, 19 nt, Artificial Sequence
  Description of Artificial Sequence: Synthetic oligonucleotide
cauaaagauucacugacag

SEQ ID NO: 281896 - RNA, 19 nt, Artificial Sequence
  Description of Artificial Sequence: Synthetic oligonucleotide
gaaagucuaacaauggagc

SEQ ID NO: 281897 - RNA, 19 nt, Artificial Sequence
  Description of Artificial Sequence: Synthetic oligonucleotide
uguaaaggcaggauggcca

SEQ ID NO: 281898 - RNA, 19 nt, Artificial Sequence
  Description of Artificial Sequence: Synthetic oligonucleotide
uuaauuugcacuguagaga

SEQ ID NO: 281899 - RNA, 19 nt, Artificial Sequence
  Description of Artificial Sequence: Synthetic oligonucleotide
auuaccagaguuuugacuu

SEQ ID NO: 281900 - RNA, 19 nt, Artificial Sequence
  Description of Artificial Sequence: Synthetic oligonucleotide
uguuacacuucuaaagcug

SEQ ID NO: 281901 - RNA, 19 nt, Artificial Sequence
  Description of Artificial Sequence: Synthetic oligonucleotide
ugaacuaauaaacuccaau

SEQ ID NO: 281902 - RNA, 19 nt, Artificial Sequence
  Description of Artificial Sequence: Synthetic oligonucleotide
uaccguucaaccuaccagg

SEQ ID NO: 281903 - RNA, 19 nt, Artificial Sequence
  Description of Artificial Sequence: Synthetic oligonucleotide
auuucaauguuguaacaug

SEQ ID NO: 281904 - RNA, 19 nt, Artificial Sequence
  Description of Artificial Sequence: Synthetic oligonucleotide
gcuacuuagaaucggaagg

SEQ ID NO: 281905 - RNA, 19 nt, Artificial Sequence
  Description of Artificial Sequence: Synthetic oligonucleotide
agucuaacaauggagcuac

SEQ ID NO: 281906 - RNA, 19 nt, Artificial Sequence
  Description of Artificial Sequence: Synthetic oligonucleotide
cacacacacacacacaacg

SEQ ID NO: 281907 - RNA, 19 nt, Artificial Sequence
  Description of Artificial Sequence: Synthetic oligonucleotide
ugagucagagcaauaguug

SEQ ID NO: 281908 - RNA, 19 nt, Artificial Sequence
  Description of Artificial Sequence: Synthetic oligonucleotide
ugguguuuuagaaacgcug

SEQ ID NO: 281909 - RNA, 19 nt, Artificial Sequence
  Description of Artificial Sequence: Synthetic oligonucleotide
guaucgaaaacuucauucc

SEQ ID NO: 281910 - RNA, 19 nt, Artificial Sequence
  Description of Artificial Sequence: Synthetic oligonucleotide
uuaaagacguaauuuacuu

SEQ ID NO: 281911 - RNA, 19 nt, Artificial Sequence
  Description of Artificial Sequence: Synthetic oligonucleotide
uguuuauaacccaagguuu

SEQ ID NO: 281912 - RNA, 19 nt, Artificial Sequence
  Description of Artificial Sequence: Synthetic oligonucleotide
aagauauguaucuucgcau

SEQ ID NO: 281913 - RNA, 19 nt, Artificial Sequence
  Description of Artificial Sequence: Synthetic oligonucleotide
uuacguuaaguaucaauca

SEQ ID NO: 281914 - RNA, 19 nt, Artificial Sequence
  Description of Artificial Sequence: Synthetic oligonucleotide
acuaaagacgcuguguccg

SEQ ID NO: 281915 - RNA, 19 nt, Artificial Sequence
  Description of Artificial Sequence: Synthetic oligonucleotide
ucagaccugaaccaaguca

SEQ ID NO: 281916 - RNA, 19 nt, Artificial Sequence
  Description of Artificial Sequence: Synthetic oligonucleotide
agucuccacacacacacac

SEQ ID NO: 281917 - RNA, 19 nt, Artificial Sequence
  Description of Artificial Sequence: Synthetic oligonucleotide
gacguaauuuacuuaaaga

SEQ ID NO: 281918 - RNA, 19 nt, Artificial Sequence
  Description of Artificial Sequence: Synthetic oligonucleotide
cacacaacgcuaucaaugg

SEQ ID NO: 281919 - RNA, 19 nt, Artificial Sequence
  Description of Artificial Sequence: Synthetic oligonucleotide
uaaacuaggcuugagggcu

SEQ ID NO: 281920 - RNA, 19 nt, Artificial Sequence
  Description of Artificial Sequence: Synthetic oligonucleotide
ucugguucagaacaaaauu

SEQ ID NO: 281921 - RNA, 19 nt, Artificial Sequence
  Description of Artificial Sequence: Synthetic oligonucleotide
gaaacuacucucaucauga

SEQ ID NO: 281922 - RNA, 19 nt, Artificial Sequence
  Description of Artificial Sequence: Synthetic oligonucleotide
uuacugucccuaaggaggg

SEQ ID NO: 281923 - RNA, 19 nt, Artificial Sequence
  Description of Artificial Sequence: Synthetic oligonucleotide
uccacacacacacacacac

SEQ ID NO: 281924 - RNA, 19 nt, Artificial Sequence
  Description of Artificial Sequence: Synthetic oligonucleotide
uuuucaacgucuaguacaa

SEQ ID NO: 281925 - RNA, 19 nt, Artificial Sequence
  Description of Artificial Sequence: Synthetic oligonucleotide
gaacuaauaaacuccaaua

SEQ ID NO: 281926 - RNA, 19 nt, Artificial Sequence
  Description of Artificial Sequence: Synthetic oligonucleotide
ucuuuguaaagaccgaaua

SEQ ID NO: 281927 - RNA, 19 nt, Artificial Sequence
  Description of Artificial Sequence: Synthetic oligonucleotide
aacgcugugaaugacagua

SEQ ID NO: 281928 - RNA, 19 nt, Artificial Sequence
  Description of Artificial Sequence: Synthetic oligonucleotide
ugcuacuuagaaucggaag

SEQ ID NO: 281929 - RNA, 19 nt, Artificial Sequence
  Description of Artificial Sequence: Synthetic oligonucleotide
uggagcuacacucucaaau

SEQ ID NO: 281930 - RNA, 19 nt, Artificial Sequence
  Description of Artificial Sequence: Synthetic oligonucleotide
uccuacuaaacuaggcuug

SEQ ID NO: 281931 - RNA, 19 nt, Artificial Sequence
  Description of Artificial Sequence: Synthetic oligonucleotide
uauaucucaaugacuuaga

SEQ ID NO: 281932 - RNA, 19 nt, Artificial Sequence
  Description of Artificial Sequence: Synthetic oligonucleotide
uaucgaaaacuucauuccu

SEQ ID NO: 281933 - RNA, 19 nt, Artificial Sequence
  Description of Artificial Sequence: Synthetic oligonucleotide
gaauuucuauuaugaggcg

SEQ ID NO: 281934 - RNA, 19 nt, Artificial Sequence
  Description of Artificial Sequence: Synthetic oligonucleotide
aagauucacugacagcugu

SEQ ID NO: 281935 - RNA, 19 nt, Artificial Sequence
  Description of Artificial Sequence: Synthetic oligonucleotide
ucuccacacacacacacac

SEQ ID NO: 281936 - RNA, 19 nt, Artificial Sequence
  Description of Artificial Sequence: Synthetic oligonucleotide
uucaacgucuaguacaaaa

SEQ ID NO: 281937 - RNA, 19 nt, Artificial Sequence
  Description of Artificial Sequence: Synthetic oligonucleotide
uccuaagucucauuuucag

SEQ ID NO: 281938 - RNA, 19 nt, Artificial Sequence
  Description of Artificial Sequence: Synthetic oligonucleotide
guauguaagcugcagucag

SEQ ID NO: 281939 - RNA, 19 nt, Artificial Sequence
  Description of Artificial Sequence: Synthetic oligonucleotide
aaugugcuacuuagaaucg

SEQ ID NO: 281940 - RNA, 19 nt, Artificial Sequence
  Description of Artificial Sequence: Synthetic oligonucleotide
aauaguuggcuggaguuca

SEQ ID NO: 281941 - RNA, 19 nt, Artificial Sequence
  Description of Artificial Sequence: Synthetic oligonucleotide
uuagaaucggaagggagug

SEQ ID NO: 281942 - RNA, 19 nt, Artificial Sequence
  Description of Artificial Sequence: Synthetic oligonucleotide
aagacgcuguguccgacuc

SEQ ID NO: 281943 - RNA, 19 nt, Artificial Sequence
  Description of Artificial Sequence: Synthetic oligonucleotide
uguauaagacugagcagac

SEQ ID NO: 281944 - RNA, 19 nt, Artificial Sequence
  Description of Artificial Sequence: Synthetic oligonucleotide
cuaagauuauguuauguaa

SEQ ID NO: 281945 - RNA, 19 nt, Artificial Sequence
  Description of Artificial Sequence: Synthetic oligonucleotide
uuauguuauguaagagaca

SEQ ID NO: 281946 - RNA, 19 nt, Artificial Sequence
  Description of Artificial Sequence: Synthetic oligonucleotide
uaucuucgcauagagaacu

SEQ ID NO: 281947 - RNA, 19 nt, Artificial Sequence
  Description of Artificial Sequence: Synthetic oligonucleotide
ugguaaccaaacaaauaca

SEQ ID NO: 281948 - RNA, 19 nt, Artificial Sequence
  Description of Artificial Sequence: Synthetic oligonucleotide
acccaaaugcuauaucaag

SEQ ID NO: 281949 - RNA, 19 nt, Artificial Sequence
  Description of Artificial Sequence: Synthetic oligonucleotide
cuacuuagaaucggaaggg

SEQ ID NO: 281950 - RNA, 19 nt, Artificial Sequence
  Description of Artificial Sequence: Synthetic oligonucleotide
accuaggaaaaugugcuac

SEQ ID NO: 281951 - RNA, 19 nt, Artificial Sequence
  Description of Artificial Sequence: Synthetic oligonucleotide
cuuuacacaggacacucac

SEQ ID NO: 281952 - RNA, 19 nt, Artificial Sequence
  Description of Artificial Sequence: Synthetic oligonucleotide
cauacugacaagaaccgca

SEQ ID NO: 281953 - RNA, 19 nt, Artificial Sequence
  Description of Artificial Sequence: Synthetic oligonucleotide
agcuauaggaaauguagaa

SEQ ID NO: 281954 - RNA, 19 nt, Artificial Sequence
  Description of Artificial Sequence: Synthetic oligonucleotide
gguccauaaagauucacug

SEQ ID NO: 281955 - RNA, 19 nt, Artificial Sequence
  Description of Artificial Sequence: Synthetic oligonucleotide
uagaaauacuuccauccau

SEQ ID NO: 281956 - RNA, 19 nt, Artificial Sequence
  Description of Artificial Sequence: Synthetic oligonucleotide
aagaccgaauauucugucu

SEQ ID NO: 281957 - RNA, 19 nt, Artificial Sequence
  Description of Artificial Sequence: Synthetic oligonucleotide
aacgucuaguacaaaaggu

SEQ ID NO: 281958 - RNA, 19 nt, Artificial Sequence
  Description of Artificial Sequence: Synthetic oligonucleotide
cacacacacacacacacac

SEQ ID NO: 281959 - RNA, 19 nt, Artificial Sequence
  Description of Artificial Sequence: Synthetic oligonucleotide
ucaaguacacuagacugca

SEQ ID NO: 281960 - RNA, 19 nt, Artificial Sequence
  Description of Artificial Sequence: Synthetic oligonucleotide
aacuuagcauauaccaaag

SEQ ID NO: 281961 - RNA, 19 nt, Artificial Sequence
  Description of Artificial Sequence: Synthetic oligonucleotide
uuucagaccugaaccaagu

SEQ ID NO: 281962 - RNA, 19 nt, Artificial Sequence
  Description of Artificial Sequence: Synthetic oligonucleotide
ucgcauagagaacugugac

SEQ ID NO: 281963 - RNA, 19 nt, Artificial Sequence
  Description of Artificial Sequence: Synthetic oligonucleotide
agauuauguuauguaagag

SEQ ID NO: 281964 - RNA, 19 nt, Artificial Sequence
  Description of Artificial Sequence: Synthetic oligonucleotide
uggacuaacccuggaaucc

SEQ ID NO: 281965 - RNA, 19 nt, Artificial Sequence
  Description of Artificial Sequence: Synthetic oligonucleotide
auguaaaggcaggauggcc

SEQ ID NO: 281966 - RNA, 19 nt, Artificial Sequence
  Description of Artificial Sequence: Synthetic oligonucleotide
uacacuagacugcaaggaa

SEQ ID NO: 281967 - RNA, 19 nt, Artificial Sequence
  Description of Artificial Sequence: Synthetic oligonucleotide
ugaugggaaucauaacucu

SEQ ID NO: 281968 - RNA, 19 nt, Artificial Sequence
  Description of Artificial Sequence: Synthetic oligonucleotide
auauuugggaugaaaccag

SEQ ID NO: 281969 - RNA, 19 nt, Artificial Sequence
  Description of Artificial Sequence: Synthetic oligonucleotide
acacacaacgcuaucaaug

SEQ ID NO: 281970 - RNA, 19 nt, Artificial Sequence
  Description of Artificial Sequence: Synthetic oligonucleotide
cuuagcauauaccaaagcu

SEQ ID NO: 281971 - RNA, 19 nt, Artificial Sequence
  Description of Artificial Sequence: Synthetic oligonucleotide
aacgcuaucaauggacuaa

SEQ ID NO: 281972 - RNA, 19 nt, Artificial Sequence
  Description of Artificial Sequence: Synthetic oligonucleotide
guuaggacacuccuacccc

SEQ ID NO: 281973 - RNA, 19 nt, Artificial Sequence
  Description of Artificial Sequence: Synthetic oligonucleotide
uuccuacuaaacuaggcuu

SEQ ID NO: 281974 - RNA, 19 nt, Artificial Sequence
  Description of Artificial Sequence: Synthetic oligonucleotide
accgaauauucugucuugc

SEQ ID NO: 281975 - RNA, 19 nt, Artificial Sequence
  Description of Artificial Sequence: Synthetic oligonucleotide
auagacgacacauggguua

SEQ ID NO: 281976 - RNA, 19 nt, Artificial Sequence
  Description of Artificial Sequence: Synthetic oligonucleotide
ucuuacuaaagaagacuua

SEQ ID NO: 281977 - RNA, 19 nt, Artificial Sequence
  Description of Artificial Sequence: Synthetic oligonucleotide
gauucacugacagcugucc

SEQ ID NO: 281978 - RNA, 19 nt, Artificial Sequence
  Description of Artificial Sequence: Synthetic oligonucleotide
ugaguaccagaaaccagcu

SEQ ID NO: 281979 - RNA, 19 nt, Artificial Sequence
  Description of Artificial Sequence: Synthetic oligonucleotide
uuuauaacccaagguuuac

SEQ ID NO: 281980 - RNA, 19 nt, Artificial Sequence
  Description of Artificial Sequence: Synthetic oligonucleotide
acacacacacacacaacgc

SEQ ID NO: 281981 - RNA, 19 nt, Artificial Sequence
  Description of Artificial Sequence: Synthetic oligonucleotide
agauauguaucuucgcaua

SEQ ID NO: 281982 - RNA, 19 nt, Artificial Sequence
  Description of Artificial Sequence: Synthetic oligonucleotide
gauggguagguugcuauug

SEQ ID NO: 281983 - RNA, 19 nt, Artificial Sequence
  Description of Artificial Sequence: Synthetic oligonucleotide
ucaaccuaccaggagaaau

SEQ ID NO: 281984 - RNA, 19 nt, Artificial Sequence
  Description of Artificial Sequence: Synthetic oligonucleotide
ucuacccgucuugugauag

SEQ ID NO: 281985 - RNA, 19 nt, Artificial Sequence
  Description of Artificial Sequence: Synthetic oligonucleotide
auaugauuuuccaacggga

SEQ ID NO: 281986 - RNA, 19 nt, Artificial Sequence
  Description of Artificial Sequence: Synthetic oligonucleotide
auaucucaaugacuuagaa

SEQ ID NO: 281987 - RNA, 19 nt, Artificial Sequence
  Description of Artificial Sequence: Synthetic oligonucleotide
aaagacgcuguguccgacu

SEQ ID NO: 281988 - RNA, 19 nt, Artificial Sequence
  Description of Artificial Sequence: Synthetic oligonucleotide
gacucuaguuuucaacguc

SEQ ID NO: 281989 - RNA, 19 nt, Artificial Sequence
  Description of Artificial Sequence: Synthetic oligonucleotide
caccugguuacaacuaaag

SEQ ID NO: 281990 - RNA, 19 nt, Artificial Sequence
  Description of Artificial Sequence: Synthetic oligonucleotide
ugcuguuaccguucaaccu

SEQ ID NO: 281991 - RNA, 19 nt, Artificial Sequence
  Description of Artificial Sequence: Synthetic oligonucleotide
agguuaggacacuccuacc

SEQ ID NO: 281992 - RNA, 19 nt, Artificial Sequence
  Description of Artificial Sequence: Synthetic oligonucleotide
cacuagacugcaaggaauc

SEQ ID NO: 281993 - RNA, 19 nt, Artificial Sequence
  Description of Artificial Sequence: Synthetic oligonucleotide
uuuccaacgggagaucagu

SEQ ID NO: 281994 - RNA, 19 nt, Artificial Sequence
  Description of Artificial Sequence: Synthetic oligonucleotide
agaccgaauauucugucuu

SEQ ID NO: 281995 - RNA, 19 nt, Artificial Sequence
  Description of Artificial Sequence: Synthetic oligonucleotide
uccaacgggagaucaguga

SEQ ID NO: 281996 - RNA, 19 nt, Artificial Sequence
  Description of Artificial Sequence: Synthetic oligonucleotide
cucacuaaaugagauuuuc

SEQ ID NO: 281997 - RNA, 19 nt, Artificial Sequence
  Description of Artificial Sequence: Synthetic oligonucleotide
caagaaccgcauguaaagg

SEQ ID NO: 281998 - RNA, 19 nt, Artificial Sequence
  Description of Artificial Sequence: Synthetic oligonucleotide
uuguaacaugauaacccaa

SEQ ID NO: 281999 - RNA, 19 nt, Artificial Sequence
  Description of Artificial Sequence: Synthetic oligonucleotide
ggugaugggaaucauaacu

SEQ ID NO: 282000 - RNA, 19 nt, Artificial Sequence
  Description of Artificial Sequence: Synthetic oligonucleotide
uuucuacccgucuugugau

SEQ ID NO: 282001 - RNA, 19 nt, Artificial Sequence
  Description of Artificial Sequence: Synthetic oligonucleotide
gaccgaauauucugucuug

SEQ ID NO: 282002 - RNA, 19 nt, Artificial Sequence
  Description of Artificial Sequence: Synthetic oligonucleotide
agacucuaguuuucaacgu

SEQ ID NO: 282003 - RNA, 19 nt, Artificial Sequence
  Description of Artificial Sequence: Synthetic oligonucleotide
caggugaugggaaucauaa

SEQ ID NO: 282004 - RNA, 19 nt, Artificial Sequence
  Description of Artificial Sequence: Synthetic oligonucleotide
auguagaauggagccauag

SEQ ID NO: 282005 - RNA, 19 nt, Artificial Sequence
  Description of Artificial Sequence: Synthetic oligonucleotide
gcuauaucaagguagcaaa

SEQ ID NO: 282006 - RNA, 19 nt, Artificial Sequence
  Description of Artificial Sequence: Synthetic oligonucleotide
agaguaacuugcaacggcu

SEQ ID NO: 282007 - RNA, 19 nt, Artificial Sequence
  Description of Artificial Sequence: Synthetic oligonucleotide
uagacgacacauggguuag

SEQ ID NO: 282008 - RNA, 19 nt, Artificial Sequence
  Description of Artificial Sequence: Synthetic oligonucleotide
uuucaccugguuacaacua

SEQ ID NO: 282009 - RNA, 19 nt, Artificial Sequence
  Description of Artificial Sequence: Synthetic oligonucleotide
aagcuagguuaggacacuc

SEQ ID NO: 282010 - RNA, 19 nt, Artificial Sequence
  Description of Artificial Sequence: Synthetic oligonucleotide
uuccaacgggagaucagug

SEQ ID NO: 282011 - RNA, 19 nt, Artificial Sequence
  Description of Artificial Sequence: Synthetic oligonucleotide
aaccgcauguaaaggcagg

SEQ ID NO: 282012 - RNA, 19 nt, Artificial Sequence
  Description of Artificial Sequence: Synthetic oligonucleotide
gugaugggaaucauaacuc

SEQ ID NO: 282013 - RNA, 19 nt, Artificial Sequence
  Description of Artificial Sequence: Synthetic oligonucleotide
uauugcugugagucagagc

SEQ ID NO: 282014 - RNA, 19 nt, Artificial Sequence
  Description of Artificial Sequence: Synthetic oligonucleotide
gaauugaggcaugaagcca

SEQ ID NO: 282015 - RNA, 19 nt, Artificial Sequence
  Description of Artificial Sequence: Synthetic oligonucleotide
cagaccugaaccaagucaa

SEQ ID NO: 282016 - RNA, 19 nt, Artificial Sequence
  Description of Artificial Sequence: Synthetic oligonucleotide
guguucuaggacaaucacc

SEQ ID NO: 282017 - RNA, 19 nt, Artificial Sequence
  Description of Artificial Sequence: Synthetic oligonucleotide
acgcuaucaauggacuaac

SEQ ID NO: 282018 - RNA, 19 nt, Artificial Sequence
  Description of Artificial Sequence: Synthetic oligonucleotide
agaaucggaagggagugga

SEQ ID NO: 282019 - RNA, 19 nt, Artificial Sequence
  Description of Artificial Sequence: Synthetic oligonucleotide
agcuagguuaggacacucc

SEQ ID NO: 282020 - RNA, 19 nt, Artificial Sequence
  Description of Artificial Sequence: Synthetic oligonucleotide
gaaccgcauguaaaggcag

SEQ ID NO: 282021 - RNA, 19 nt, Artificial Sequence
  Description of Artificial Sequence: Synthetic oligonucleotide
uguccgacuccauguauuc

SEQ ID NO: 282022 - RNA, 19 nt, Artificial Sequence
  Description of Artificial Sequence: Synthetic oligonucleotide
uagaaucggaagggagugg

SEQ ID NO: 282023 - RNA, 19 nt, Artificial Sequence
  Description of Artificial Sequence: Synthetic oligonucleotide
cacacacacacacacacaa

SEQ ID NO: 282024 - RNA, 19 nt, Artificial Sequence
  Description of Artificial Sequence: Synthetic oligonucleotide
uguaagcugcagucaguac

SEQ ID NO: 282025 - RNA, 19 nt, Artificial Sequence
  Description of Artificial Sequence: Synthetic oligonucleotide
uacuuagaaucggaaggga

SEQ ID NO: 282026 - RNA, 19 nt, Artificial Sequence
  Description of Artificial Sequence: Synthetic oligonucleotide
augugcuacuuagaaucgg

SEQ ID NO: 282027 - RNA, 19 nt, Artificial Sequence
  Description of Artificial Sequence: Synthetic oligonucleotide
agaaccgcauguaaaggca

SEQ ID NO: 282028 - RNA, 19 nt, Artificial Sequence
  Description of Artificial Sequence: Synthetic oligonucleotide
agacgcuguguccgacucc

SEQ ID NO: 282029 - RNA, 19 nt, Artificial Sequence
  Description of Artificial Sequence: Synthetic oligonucleotide
guuucaccugguuacaacu

SEQ ID NO: 282030 - RNA, 19 nt, Artificial Sequence
  Description of Artificial Sequence: Synthetic oligonucleotide
uucagaccugaaccaaguc

SEQ ID NO: 282031 - RNA, 19 nt, Artificial Sequence
  Description of Artificial Sequence: Synthetic oligonucleotide
gagcucuggcaauuuucag

SEQ ID NO: 282032 - RNA, 19 nt, Artificial Sequence
  Description of Artificial Sequence: Synthetic oligonucleotide
ugacuguguuucuacccgu

SEQ ID NO: 282033 - RNA, 19 nt, Artificial Sequence
  Description of Artificial Sequence: Synthetic oligonucleotide
uggguagguugcuauugcu

SEQ ID NO: 282034 - RNA, 19 nt, Artificial Sequence
  Description of Artificial Sequence: Synthetic oligonucleotide
aaacgcugugaaugacagu

SEQ ID NO: 282035 - RNA, 19 nt, Artificial Sequence
  Description of Artificial Sequence: Synthetic oligonucleotide
guacacuagacugcaagga

SEQ ID NO: 282036 - RNA, 19 nt, Artificial Sequence
  Description of Artificial Sequence: Synthetic oligonucleotide
cuguuaccguucaaccuac

SEQ ID NO: 282037 - RNA, 19 nt, Artificial Sequence
  Description of Artificial Sequence: Synthetic oligonucleotide
acaacgcuaucaauggacu

SEQ ID NO: 282038 - RNA, 19 nt, Artificial Sequence
  Description of Artificial Sequence: Synthetic oligonucleotide
cgucuaguacaaaagguag

SEQ ID NO: 282039 - RNA, 19 nt, Artificial Sequence
  Description of Artificial Sequence: Synthetic oligonucleotide
ucuucgcauagagaacugu

SEQ ID NO: 282040 - RNA, 19 nt, Artificial Sequence
  Description of Artificial Sequence: Synthetic oligonucleotide
ggaugaaaccaguggcucc

SEQ ID NO: 282041 - RNA, 19 nt, Artificial Sequence
  Description of Artificial Sequence: Synthetic oligonucleotide
gguuagagcccugaagcag

SEQ ID NO: 282042 - RNA, 19 nt, Artificial Sequence
  Description of Artificial Sequence: Synthetic oligonucleotide
gguuuacugucccuaagga

SEQ ID NO: 282043 - RNA, 19 nt, Artificial Sequence
  Description of Artificial Sequence: Synthetic oligonucleotide
guuuauaacccaagguuua

SEQ ID NO: 282044 - RNA, 19 nt, Artificial Sequence
  Description of Artificial Sequence: Synthetic oligonucleotide
cuauaucaagguagcaaaa

SEQ ID NO: 282045 - RNA, 19 nt, Artificial Sequence
  Description of Artificial Sequence: Synthetic oligonucleotide
ugcaacggcuuuccucucu

SEQ ID NO: 282046 - RNA, 19 nt, Artificial Sequence
  Description of Artificial Sequence: Synthetic oligonucleotide
acgucuaguacaaaaggua

SEQ ID NO: 282047 - RNA, 19 nt, Artificial Sequence
  Description of Artificial Sequence: Synthetic oligonucleotide
gauguguguauaagacuga

SEQ ID NO: 282048 - RNA, 19 nt, Artificial Sequence
  Description of Artificial Sequence: Synthetic oligonucleotide
cuauuaugaggcgaaacua

SEQ ID NO: 282049 - RNA, 19 nt, Artificial Sequence
  Description of Artificial Sequence: Synthetic oligonucleotide
gacugagcagacaaugaaa

SEQ ID NO: 282050 - RNA, 19 nt, Artificial Sequence
  Description of Artificial Sequence: Synthetic oligonucleotide
cagaguuuugacuuggaau

SEQ ID NO: 282051 - RNA, 19 nt, Artificial Sequence
  Description of Artificial Sequence: Synthetic oligonucleotide
cauacuaaugaaguaugua

SEQ ID NO: 282052 - RNA, 19 nt, Artificial Sequence
  Description of Artificial Sequence: Synthetic oligonucleotide
ggaagcuagguuaggacac

SEQ ID NO: 282053 - RNA, 19 nt, Artificial Sequence
  Description of Artificial Sequence: Synthetic oligonucleotide
acacacacacacacacaac

SEQ ID NO: 282054 - RNA, 19 nt, Artificial Sequence
  Description of Artificial Sequence: Synthetic oligonucleotide
uguuaccguucaaccuacc

SEQ ID NO: 282055 - RNA, 19 nt, Artificial Sequence
  Description of Artificial Sequence: Synthetic oligonucleotide
gucuugugauagaagcagc

SEQ ID NO: 282056 - RNA, 19 nt, Artificial Sequence
  Description of Artificial Sequence: Synthetic oligonucleotide
aacuaggcuugagggcuag

SEQ ID NO: 282057 - RNA, 19 nt, Artificial Sequence
  Description of Artificial Sequence: Synthetic oligonucleotide
cacuauagaauugaggcau

SEQ ID NO: 282058 - RNA, 19 nt, Artificial Sequence
  Description of Artificial Sequence: Synthetic oligonucleotide
uuucuauuaugaggcgaaa

SEQ ID NO: 282059 - RNA, 19 nt, Artificial Sequence
  Description of Artificial Sequence: Synthetic oligonucleotide
uagaaacgcugugaaugac

SEQ ID NO: 282060 - RNA, 19 nt, Artificial Sequence
  Description of Artificial Sequence: Synthetic oligonucleotide
ugcugugagucagagcaau

SEQ ID NO: 282061 - RNA, 19 nt, Artificial Sequence
  Description of Artificial Sequence: Synthetic oligonucleotide
acacuagacugcaaggaau

SEQ ID NO: 282062 - RNA, 19 nt, Artificial Sequence
  Description of Artificial Sequence: Synthetic oligonucleotide
uugugcgcuccuucaugcc

SEQ ID NO: 282063 - RNA, 19 nt, Artificial Sequence
  Description of Artificial Sequence: Synthetic oligonucleotide
uacaaaggcucugccccgc

SEQ ID NO: 282064 - RNA, 19 nt, Artificial Sequence
  Description of Artificial Sequence: Synthetic oligonucleotide
ccaguguuuauaacccaag

SEQ ID NO: 282065 - RNA, 19 nt, Artificial Sequence
  Description of Artificial Sequence: Synthetic oligonucleotide
uagucuccacacacacaca

SEQ ID NO: 282066 - RNA, 19 nt, Artificial Sequence
  Description of Artificial Sequence: Synthetic oligonucleotide
gcuguuaccguucaaccua

SEQ ID NO: 282067 - RNA, 19 nt, Artificial Sequence
  Description of Artificial Sequence: Synthetic oligonucleotide
agaccugaaccaagucaac

SEQ ID NO: 282068 - RNA, 19 nt, Artificial Sequence
  Description of Artificial Sequence: Synthetic oligonucleotide
gccaagccgguuuggaucc

SEQ ID NO: 282069 - RNA, 19 nt, Artificial Sequence
  Description of Artificial Sequence: Synthetic oligonucleotide
cuacuaaacuaggcuugag

SEQ ID NO: 282070 - RNA, 19 nt, Artificial Sequence
  Description of Artificial Sequence: Synthetic oligonucleotide
cagucaguaccuuggaugu

SEQ ID NO: 282071 - RNA, 19 nt, Artificial Sequence
  Description of Artificial Sequence: Synthetic oligonucleotide
gugcuuacguuaaguauca

SEQ ID NO: 282072 - RNA, 19 nt, Artificial Sequence
  Description of Artificial Sequence: Synthetic oligonucleotide
uaaagacgcuguguccgac

SEQ ID NO: 282073 - RNA, 19 nt, Artificial Sequence
  Description of Artificial Sequence: Synthetic oligonucleotide
ccuaagauuauguuaugua

SEQ ID NO: 282074 - RNA, 19 nt, Artificial Sequence
  Description of Artificial Sequence: Synthetic oligonucleotide
gauuuuccaacgggagauc

SEQ ID NO: 282075 - RNA, 19 nt, Artificial Sequence
  Description of Artificial Sequence: Synthetic oligonucleotide
cuaaagacgcuguguccga

SEQ ID NO: 282076 - RNA, 19 nt, Artificial Sequence
  Description of Artificial Sequence: Synthetic oligonucleotide
guucuaggacaaucaccac

SEQ ID NO: 282077 - RNA, 19 nt, Artificial Sequence
  Description of Artificial Sequence: Synthetic oligonucleotide
cgaaacuacucucaucaug

SEQ ID NO: 282078 - RNA, 19 nt, Artificial Sequence
  Description of Artificial Sequence: Synthetic oligonucleotide
cagggaggaguuuaguaua

SEQ ID NO: 282079 - RNA, 19 nt, Artificial Sequence
  Description of Artificial Sequence: Synthetic oligonucleotide
aggagggugugcuuacguu

SEQ ID NO: 282080 - RNA, 19 nt, Artificial Sequence
  Description of Artificial Sequence: Synthetic oligonucleotide
accgcauguaaaggcagga

SEQ ID NO: 282081 - RNA, 19 nt, Artificial Sequence
  Description of Artificial Sequence: Synthetic oligonucleotide
auguaucuucgcauagaga

SEQ ID NO: 282082 - RNA, 19 nt, Artificial Sequence
  Description of Artificial Sequence: Synthetic oligonucleotide
cgucuugugauagaagcag

SEQ ID NO: 282083 - RNA, 19 nt, Artificial Sequence
  Description of Artificial Sequence: Synthetic oligonucleotide
gccuagucuccacacacac

SEQ ID NO: 282084 - RNA, 19 nt, Artificial Sequence
  Description of Artificial Sequence: Synthetic oligonucleotide
cuacagcccuguguuacac

SEQ ID NO: 282085 - RNA, 19 nt, Artificial Sequence
  Description of Artificial Sequence: Synthetic oligonucleotide
acacacacacacaacgcua

SEQ ID NO: 282086 - RNA, 19 nt, Artificial Sequence
  Description of Artificial Sequence: Synthetic oligonucleotide
guauucauuaccagaguuu

SEQ ID NO: 282087 - RNA, 19 nt, Artificial Sequence
  Description of Artificial Sequence: Synthetic oligonucleotide
gguguuuuagaaacgcugu

SEQ ID NO: 282088 - RNA, 19 nt, Artificial Sequence
  Description of Artificial Sequence: Synthetic oligonucleotide
cacacacacacacaacgcu

SEQ ID NO: 282089 - RNA, 19 nt, Artificial Sequence
  Description of Artificial Sequence: Synthetic oligonucleotide
gaccugaaccaagucaacu

SEQ ID NO: 282090 - RNA, 19 nt, Artificial Sequence
  Description of Artificial Sequence: Synthetic oligonucleotide
ggacuaacccuggaauccc

SEQ ID NO: 282091 - RNA, 19 nt, Artificial Sequence
  Description of Artificial Sequence: Synthetic oligonucleotide
cguucaaccuaccaggaga

SEQ ID NO: 282092 - RNA, 19 nt, Artificial Sequence
  Description of Artificial Sequence: Synthetic oligonucleotide
gggaugaaaccaguggcuc

SEQ ID NO: 282093 - RNA, 19 nt, Artificial Sequence
  Description of Artificial Sequence: Synthetic oligonucleotide
ggagccauagacgacacau

SEQ ID NO: 282094 - RNA, 19 nt, Artificial Sequence
  Description of Artificial Sequence: Synthetic oligonucleotide
aucuucgcauagagaacug

SEQ ID NO: 282095 - RNA, 19 nt, Artificial Sequence
  Description of Artificial Sequence: Synthetic oligonucleotide
gguagcaaaagugaagguu

SEQ ID NO: 282096 - RNA, 19 nt, Artificial Sequence
  Description of Artificial Sequence: Synthetic oligonucleotide
acacacacacacacacaca

SEQ ID NO: 282097 - RNA, 19 nt, Artificial Sequence
  Description of Artificial Sequence: Synthetic oligonucleotide
agggaggaguuuaguauau

SEQ ID NO: 282098 - RNA, 19 nt, Artificial Sequence
  Description of Artificial Sequence: Synthetic oligonucleotide
cuccacacacacacacaca

SEQ ID NO: 282099 - RNA, 19 nt, Artificial Sequence
  Description of Artificial Sequence: Synthetic oligonucleotide
aaacuaggcuugagggcua

SEQ ID NO: 282100 - RNA, 19 nt, Artificial Sequence
  Description of Artificial Sequence: Synthetic oligonucleotide
uuucaacgucuaguacaaa

SEQ ID NO: 282101 - RNA, 19 nt, Artificial Sequence
  Description of Artificial Sequence: Synthetic oligonucleotide
cacacacacacaacgcuau

SEQ ID NO: 282102 - RNA, 19 nt, Artificial Sequence
  Description of Artificial Sequence: Synthetic oligonucleotide
caugccaagccgguuugga

SEQ ID NO: 282103 - RNA, 19 nt, Artificial Sequence
  Description of Artificial Sequence: Synthetic oligonucleotide
cuucaugccaagccgguuu

SEQ ID NO: 282104 - RNA, 19 nt, Artificial Sequence
  Description of Artificial Sequence: Synthetic oligonucleotide
ggugccuagucuccacaca

SEQ ID NO: 282105 - RNA, 19 nt, Artificial Sequence
  Description of Artificial Sequence: Synthetic oligonucleotide
gggguagacucuagcagac

SEQ ID NO: 282106 - RNA, 19 nt, Artificial Sequence
  Description of Artificial Sequence: Synthetic oligonucleotide
gugcuacuuagaaucggaa

SEQ ID NO: 282107 - RNA, 19 nt, Artificial Sequence
  Description of Artificial Sequence: Synthetic oligonucleotide
gucuccacacacacacaca

SEQ ID NO: 282108 - RNA, 19 nt, Artificial Sequence
  Description of Artificial Sequence: Synthetic oligonucleotide
cuaguacaaaagguagccu

SEQ ID NO: 282109 - RNA, 19 nt, Artificial Sequence
  Description of Artificial Sequence: Synthetic oligonucleotide
cauagacgacacauggguu

SEQ ID NO: 282110 - RNA, 19 nt, Artificial Sequence
  Description of Artificial Sequence: Synthetic oligonucleotide
agcccucgggcuguuugug

SEQ ID NO: 282111 - RNA, 19 nt, Artificial Sequence
  Description of Artificial Sequence: Synthetic oligonucleotide
ccguucaaccuaccaggag

SEQ ID NO: 282112 - RNA, 19 nt, Artificial Sequence
  Description of Artificial Sequence: Synthetic oligonucleotide
ccgucuugugauagaagca

SEQ ID NO: 282113 - RNA, 19 nt, Artificial Sequence
  Description of Artificial Sequence: Synthetic oligonucleotide
gccaguguuuauaacccaa

SEQ ID NO: 282114 - RNA, 19 nt, Artificial Sequence
  Description of Artificial Sequence: Synthetic oligonucleotide
cagcucuuaagcaggugau

SEQ ID NO: 282115 - RNA, 19 nt, Artificial Sequence
  Description of Artificial Sequence: Synthetic oligonucleotide
ggagagcauuaguguuuug

SEQ ID NO: 282116 - RNA, 19 nt, Artificial Sequence
  Description of Artificial Sequence: Synthetic oligonucleotide
gacuaacccuggaaucccu

SEQ ID NO: 282117 - RNA, 19 nt, Artificial Sequence
  Description of Artificial Sequence: Synthetic oligonucleotide
cgcuaucaauggacuaacc

SEQ ID NO: 282118 - RNA, 19 nt, Artificial Sequence
  Description of Artificial Sequence: Synthetic oligonucleotide
cuguaucuggggccagaaa

SEQ ID NO: 282119 - RNA, 19 nt, Artificial Sequence
  Description of Artificial Sequence: Synthetic oligonucleotide
ccuacuaaacuaggcuuga

SEQ ID NO: 282120 - RNA, 19 nt, Artificial Sequence
  Description of Artificial Sequence: Synthetic oligonucleotide
gaguaacuugcaacggcuu

SEQ ID NO: 282121 - RNA, 19 nt, Artificial Sequence
  Description of Artificial Sequence: Synthetic oligonucleotide
gggcauauuugggaugaaa

SEQ ID NO: 282122 - RNA, 19 nt, Artificial Sequence
  Description of Artificial Sequence: Synthetic oligonucleotide
ccacacacacacacacaca

SEQ ID NO: 282123 - RNA, 19 nt, Artificial Sequence
  Description of Artificial Sequence: Synthetic oligonucleotide
gguagccuggcuaguuaaa

SEQ ID NO: 282124 - RNA, 19 nt, Artificial Sequence
  Description of Artificial Sequence: Synthetic oligonucleotide
guguccgacuccauguauu

SEQ ID NO: 282125 - RNA, 19 nt, Artificial Sequence
  Description of Artificial Sequence: Synthetic oligonucleotide
ccacgggcaccuaggaaaa

SEQ ID NO: 282126 - RNA, 19 nt, Artificial Sequence
  Description of Artificial Sequence: Synthetic oligonucleotide
gcgaaacuacucucaucau

SEQ ID NO: 282127 - RNA, 19 nt, Artificial Sequence
  Description of Artificial Sequence: Synthetic oligonucleotide
gcugucuguggugccuagu

SEQ ID NO: 282128 - RNA, 19 nt, Artificial Sequence
  Description of Artificial Sequence: Synthetic oligonucleotide
ggggcauauuugggaugaa

SEQ ID NO: 282129 - RNA, 19 nt, Artificial Sequence
  Description of Artificial Sequence: Synthetic oligonucleotide
ccgacuccauguauucauu

SEQ ID NO: 282130 - RNA, 19 nt, Artificial Sequence
  Description of Artificial Sequence: Synthetic oligonucleotide
ccgcauguaaaggcaggau

SEQ ID NO: 282131 - RNA, 19 nt, Artificial Sequence
  Description of Artificial Sequence: Synthetic oligonucleotide
cacgggcaccuaggaaaau

SEQ ID NO: 282132 - RNA, 19 nt, Artificial Sequence
  Description of Artificial Sequence: Synthetic oligonucleotide
uuuaucaacagucacugag

SEQ ID NO: 282133 - RNA, 19 nt, Artificial Sequence
  Description of Artificial Sequence: Synthetic oligonucleotide
aagagauuggaccccaucc

SEQ ID NO: 282134 - RNA, 19 nt, Artificial Sequence
  Description of Artificial Sequence: Synthetic oligonucleotide
ugcagauacaccaaccucg

SEQ ID NO: 282135 - RNA, 19 nt, Artificial Sequence
  Description of Artificial Sequence: Synthetic oligonucleotide
acuuucaucagucuaguuc

SEQ ID NO: 282136 - RNA, 19 nt, Artificial Sequence
  Description of Artificial Sequence: Synthetic oligonucleotide
aacuuuauugugcaggaca

SEQ ID NO: 282137 - RNA, 19 nt, Artificial Sequence
  Description of Artificial Sequence: Synthetic oligonucleotide
ugugcuauaggcucuuugg

SEQ ID NO: 282138 - RNA, 19 nt, Artificial Sequence
  Description of Artificial Sequence: Synthetic oligonucleotide
uucaugaucuccauuggag

SEQ ID NO: 282139 - RNA, 19 nt, Artificial Sequence
  Description of Artificial Sequence: Synthetic oligonucleotide
agagagaauaaccacaaga

SEQ ID NO: 282140 - RNA, 19 nt, Artificial Sequence
  Description of Artificial Sequence: Synthetic oligonucleotide
ucuuuagaggcccuuagca

SEQ ID NO: 282141 - RNA, 19 nt, Artificial Sequence
  Description of Artificial Sequence: Synthetic oligonucleotide
uuuguagacuccuuaagcu

SEQ ID NO: 282142 - RNA, 19 nt, Artificial Sequence
  Description of Artificial Sequence: Synthetic oligonucleotide
ugugcuaaugccuuugucu

SEQ ID NO: 282143 - RNA, 19 nt, Artificial Sequence
  Description of Artificial Sequence: Synthetic oligonucleotide
uuacuuuuacauaggagga

SEQ ID NO: 282144 - RNA, 19 nt, Artificial Sequence
  Description of Artificial Sequence: Synthetic oligonucleotide
auauucuuuucccacugac

SEQ ID NO: 282145 - RNA, 19 nt, Artificial Sequence
  Description of Artificial Sequence: Synthetic oligonucleotide
ucugaaucuccagagaucc

SEQ ID NO: 282146 - RNA, 19 nt, Artificial Sequence
  Description of Artificial Sequence: Synthetic oligonucleotide
aaugaaggcacuucaucca

SEQ ID NO: 282147 - RNA, 19 nt, Artificial Sequence
  Description of Artificial Sequence: Synthetic oligonucleotide
gaaucuuuaaacucuuuga

SEQ ID NO: 282148 - RNA, 19 nt, Artificial Sequence
  Description of Artificial Sequence: Synthetic oligonucleotide
uuugcgauucugcagaguc

SEQ ID NO: 282149 - RNA, 19 nt, Artificial Sequence
  Description of Artificial Sequence: Synthetic oligonucleotide
uaggcaguauuauuuacag

SEQ ID NO: 282150 - RNA, 19 nt, Artificial Sequence
  Description of Artificial Sequence: Synthetic oligonucleotide
cuuuguagacuccuuaagc

SEQ ID NO: 282151 - RNA, 19 nt, Artificial Sequence
  Description of Artificial Sequence: Synthetic oligonucleotide
uaagcuaacuuaauauuuc

SEQ ID NO: 282152 - RNA, 19 nt, Artificial Sequence
  Description of Artificial Sequence: Synthetic oligonucleotide
uuaccaagauuucugcacc

SEQ ID NO: 282153 - RNA, 19 nt, Artificial Sequence
  Description of Artificial Sequence: Synthetic oligonucleotide
aguaucuuguggcuguuuc

SEQ ID NO: 282154 - RNA, 19 nt, Artificial Sequence
  Description of Artificial Sequence: Synthetic oligonucleotide
uguagacuccuuaagcucu

SEQ ID NO: 282155 - RNA, 19 nt, Artificial Sequence
  Description of Artificial Sequence: Synthetic oligonucleotide
cuucagaacuuuauugugc

SEQ ID NO: 282156 - RNA, 19 nt, Artificial Sequence
  Description of Artificial Sequence: Synthetic oligonucleotide
cacaagagcucaaagcucc

SEQ ID NO: 282157 - RNA, 19 nt, Artificial Sequence
  Description of Artificial Sequence: Synthetic oligonucleotide
cuuguccuuaguuucgugg

SEQ ID NO: 282158 - RNA, 19 nt, Artificial Sequence
  Description of Artificial Sequence: Synthetic oligonucleotide
uuucgugguguauacaaug

SEQ ID NO: 282159 - RNA, 19 nt, Artificial Sequence
  Description of Artificial Sequence: Synthetic oligonucleotide
ugaaguuguguccauggac

SEQ ID NO: 282160 - RNA, 19 nt, Artificial Sequence
  Description of Artificial Sequence: Synthetic oligonucleotide
uucagaacuuuauugugca

SEQ ID NO: 282161 - RNA, 19 nt, Artificial Sequence
  Description of Artificial Sequence: Synthetic oligonucleotide
agauacaccaaccucgggu

SEQ ID NO: 282162 - RNA, 19 nt, Artificial Sequence
  Description of Artificial Sequence: Synthetic oligonucleotide
uuaucaacagucacugagu

SEQ ID NO: 282163 - RNA, 19 nt, Artificial Sequence
  Description of Artificial Sequence: Synthetic oligonucleotide
aagaguaucuuguggcugu

SEQ ID NO: 282164 - RNA, 19 nt, Artificial Sequence
  Description of Artificial Sequence: Synthetic oligonucleotide
ucuccauuggaguuugaag

SEQ ID NO: 282165 - RNA, 19 nt, Artificial Sequence
  Description of Artificial Sequence: Synthetic oligonucleotide
uugaagagagaauaaccac

SEQ ID NO: 282166 - RNA, 19 nt, Artificial Sequence
  Description of Artificial Sequence: Synthetic oligonucleotide
ugugcucugacauuugagu

SEQ ID NO: 282167 - RNA, 19 nt, Artificial Sequence
  Description of Artificial Sequence: Synthetic oligonucleotide
uuaaaugucuuugcuacac

SEQ ID NO: 282168 - RNA, 19 nt, Artificial Sequence
  Description of Artificial Sequence: Synthetic oligonucleotide
augucuuaguuucucagug

SEQ ID NO: 282169 - RNA, 19 nt, Artificial Sequence
  Description of Artificial Sequence: Synthetic oligonucleotide
agaucgggaggcuaucuac

SEQ ID NO: 282170 - RNA, 19 nt, Artificial Sequence
  Description of Artificial Sequence: Synthetic oligonucleotide
agaauaaccacaagagcuc

SEQ ID NO: 282171 - RNA, 19 nt, Artificial Sequence
  Description of Artificial Sequence: Synthetic oligonucleotide
uuuauugugcaggacagaa

SEQ ID NO: 282172 - RNA, 19 nt, Artificial Sequence
  Description of Artificial Sequence: Synthetic oligonucleotide
aguuuuggggaguagcucu

SEQ ID NO: 282173 - RNA, 19 nt, Artificial Sequence
  Description of Artificial Sequence: Synthetic oligonucleotide
ugacacaugccucuugcug

SEQ ID NO: 282174 - RNA, 19 nt, Artificial Sequence
  Description of Artificial Sequence: Synthetic oligonucleotide
uaucuuucuuggcaccccg

SEQ ID NO: 282175 - RNA, 19 nt, Artificial Sequence
  Description of Artificial Sequence: Synthetic oligonucleotide
accccuaaacuguuauugc

SEQ ID NO: 282176 - RNA, 19 nt, Artificial Sequence
  Description of Artificial Sequence: Synthetic oligonucleotide
agaacuuuauugugcagga

SEQ ID NO: 282177 - RNA, 19 nt, Artificial Sequence
  Description of Artificial Sequence: Synthetic oligonucleotide
uuauugugcaggacagaag

SEQ ID NO: 282178 - RNA, 19 nt, Artificial Sequence
  Description of Artificial Sequence: Synthetic oligonucleotide
ucuuggugagaucgggagg

SEQ ID NO: 282179 - RNA, 19 nt, Artificial Sequence
  Description of Artificial Sequence: Synthetic oligonucleotide
aguuucgugguguauacaa

SEQ ID NO: 282180 - RNA, 19 nt, Artificial Sequence
  Description of Artificial Sequence: Synthetic oligonucleotide
uucacaagaguaucuugug

SEQ ID NO: 282181 - RNA, 19 nt, Artificial Sequence
  Description of Artificial Sequence: Synthetic oligonucleotide
caauucuagggguugugcc

SEQ ID NO: 282182 - RNA, 19 nt, Artificial Sequence
  Description of Artificial Sequence: Synthetic oligonucleotide
cuccauuggaguuugaaga

SEQ ID NO: 282183 - RNA, 19 nt, Artificial Sequence
  Description of Artificial Sequence: Synthetic oligonucleotide
uugaugaugguacugccuu

SEQ ID NO: 282184 - RNA, 19 nt, Artificial Sequence
  Description of Artificial Sequence: Synthetic oligonucleotide
ucuagauauguccauuauu

SEQ ID NO: 282185 - RNA, 19 nt, Artificial Sequence
  Description of Artificial Sequence: Synthetic oligonucleotide
ccuuaaguguccuugauug

SEQ ID NO: 282186 - RNA, 19 nt, Artificial Sequence
  Description of Artificial Sequence: Synthetic oligonucleotide
aucagucuaguucugggcu

SEQ ID NO: 282187 - RNA, 19 nt, Artificial Sequence
  Description of Artificial Sequence: Synthetic oligonucleotide
uuaguuucgugguguauac

SEQ ID NO: 282188 - RNA, 19 nt, Artificial Sequence
  Description of Artificial Sequence: Synthetic oligonucleotide
uuggcuuagguucacuguc

SEQ ID NO: 282189 - RNA, 19 nt, Artificial Sequence
  Description of Artificial Sequence: Synthetic oligonucleotide
aaacauaggcaguauuauu

SEQ ID NO: 282190 - RNA, 19 nt, Artificial Sequence
  Description of Artificial Sequence: Synthetic oligonucleotide
aaggguugggucuucuccu

SEQ ID NO: 282191 - RNA, 19 nt, Artificial Sequence
  Description of Artificial Sequence: Synthetic oligonucleotide
ucugcagagucccugguau

SEQ ID NO: 282192 - RNA, 19 nt, Artificial Sequence
  Description of Artificial Sequence: Synthetic oligonucleotide
cuggguagcuccucuaagg

SEQ ID NO: 282193 - RNA, 19 nt, Artificial Sequence
  Description of Artificial Sequence: Synthetic oligonucleotide
ggugucaugucuuaguuuc

SEQ ID NO: 282194 - RNA, 19 nt, Artificial Sequence
  Description of Artificial Sequence: Synthetic oligonucleotide
ugccaguuaaacuuacagu

SEQ ID NO: 282195 - RNA, 19 nt, Artificial Sequence
  Description of Artificial Sequence: Synthetic oligonucleotide
uucgugguguauacaaugu

SEQ ID NO: 282196 - RNA, 19 nt, Artificial Sequence
  Description of Artificial Sequence: Synthetic oligonucleotide
gucuuaguuucucagugug

SEQ ID NO: 282197 - RNA, 19 nt, Artificial Sequence
  Description of Artificial Sequence: Synthetic oligonucleotide
uuacaguugggucuuguuu

SEQ ID NO: 282198 - RNA, 19 nt, Artificial Sequence
  Description of Artificial Sequence: Synthetic oligonucleotide
cauccuuagguccucuuag

SEQ ID NO: 282199 - RNA, 19 nt, Artificial Sequence
  Description of Artificial Sequence: Synthetic oligonucleotide
acuuuauugugcaggacag

SEQ ID NO: 282200 - RNA, 19 nt, Artificial Sequence
  Description of Artificial Sequence: Synthetic oligonucleotide
gaaguuugccuugaugaug

SEQ ID NO: 282201 - RNA, 19 nt, Artificial Sequence
  Description of Artificial Sequence: Synthetic oligonucleotide
uacuuuuacauaggaggag

SEQ ID NO: 282202 - RNA, 19 nt, Artificial Sequence
  Description of Artificial Sequence: Synthetic oligonucleotide
gaugcuuuugcuuugcgau

SEQ ID NO: 282203 - RNA, 19 nt, Artificial Sequence
  Description of Artificial Sequence: Synthetic oligonucleotide
uuuugcacagucguauucu

SEQ ID NO: 282204 - RNA, 19 nt, Artificial Sequence
  Description of Artificial Sequence: Synthetic oligonucleotide
ucuaguucugggcugucuc

SEQ ID NO: 282205 - RNA, 19 nt, Artificial Sequence
  Description of Artificial Sequence: Synthetic oligonucleotide
uuucugugaagaaucuuua

SEQ ID NO: 282206 - RNA, 19 nt, Artificial Sequence
  Description of Artificial Sequence: Synthetic oligonucleotide
uuguagacuccuuaagcuc

SEQ ID NO: 282207 - RNA, 19 nt, Artificial Sequence
  Description of Artificial Sequence: Synthetic oligonucleotide
ugcgauucugcagaguccc

SEQ ID NO: 282208 - RNA, 19 nt, Artificial Sequence
  Description of Artificial Sequence: Synthetic oligonucleotide
uaaguguccuugauuggcu

SEQ ID NO: 282209 - RNA, 19 nt, Artificial Sequence
  Description of Artificial Sequence: Synthetic oligonucleotide
cuagcaggcacacuugcug

SEQ ID NO: 282210 - RNA, 19 nt, Artificial Sequence
  Description of Artificial Sequence: Synthetic oligonucleotide
acuuuuacauaggaggaga

SEQ ID NO: 282211 - RNA, 19 nt, Artificial Sequence
  Description of Artificial Sequence: Synthetic oligonucleotide
uguaucuuucuuggcaccc

SEQ ID NO: 282212 - RNA, 19 nt, Artificial Sequence
  Description of Artificial Sequence: Synthetic oligonucleotide
gugucugugaaguuguguc

SEQ ID NO: 282213 - RNA, 19 nt, Artificial Sequence
  Description of Artificial Sequence: Synthetic oligonucleotide
ugcuauaggcucuuugguc

SEQ ID NO: 282214 - RNA, 19 nt, Artificial Sequence
  Description of Artificial Sequence: Synthetic oligonucleotide
aauuucacucuguccucca

SEQ ID NO: 282215 - RNA, 19 nt, Artificial Sequence
  Description of Artificial Sequence: Synthetic oligonucleotide
aacuguuauugcucugaga

SEQ ID NO: 282216 - RNA, 19 nt, Artificial Sequence
  Description of Artificial Sequence: Synthetic oligonucleotide
uuaggugcagguuucucau

SEQ ID NO: 282217 - RNA, 19 nt, Artificial Sequence
  Description of Artificial Sequence: Synthetic oligonucleotide
uagggguugugccuuuucc

SEQ ID NO: 282218 - RNA, 19 nt, Artificial Sequence
  Description of Artificial Sequence: Synthetic oligonucleotide
aagugaugcuuuugcuuug

SEQ ID NO: 282219 - RNA, 19 nt, Artificial Sequence
  Description of Artificial Sequence: Synthetic oligonucleotide
uugugcuauaggcucuuug

SEQ ID NO: 282220 - RNA, 19 nt, Artificial Sequence
  Description of Artificial Sequence: Synthetic oligonucleotide
uccuuagguccucuuagcu

SEQ ID NO: 282221 - RNA, 19 nt, Artificial Sequence
  Description of Artificial Sequence: Synthetic oligonucleotide
uggaguuuuggggaguagc

SEQ ID NO: 282222 - RNA, 19 nt, Artificial Sequence
  Description of Artificial Sequence: Synthetic oligonucleotide
cuucauccuucuuuggaac

SEQ ID NO: 282223 - RNA, 19 nt, Artificial Sequence
  Description of Artificial Sequence: Synthetic oligonucleotide
ucugacauuugaguuauuu

SEQ ID NO: 282224 - RNA, 19 nt, Artificial Sequence
  Description of Artificial Sequence: Synthetic oligonucleotide
gaagagagaauaaccacaa

SEQ ID NO: 282225 - RNA, 19 nt, Artificial Sequence
  Description of Artificial Sequence: Synthetic oligonucleotide
ucagucuaguucugggcug

SEQ ID NO: 282226 - RNA, 19 nt, Artificial Sequence
  Description of Artificial Sequence: Synthetic oligonucleotide
uuccgcuuuaccagauugc

SEQ ID NO: 282227 - RNA, 19 nt, Artificial Sequence
  Description of Artificial Sequence: Synthetic oligonucleotide
ugccccuagauguagacuu

SEQ ID NO: 282228 - RNA, 19 nt, Artificial Sequence
  Description of Artificial Sequence: Synthetic oligonucleotide
uuggauucacccaggacuu

SEQ ID NO: 282229 - RNA, 19 nt, Artificial Sequence
  Description of Artificial Sequence: Synthetic oligonucleotide
ugggucuuguuucugugaa

SEQ ID NO: 282230 - RNA, 19 nt, Artificial Sequence
  Description of Artificial Sequence: Synthetic oligonucleotide
uguccuuaguuucguggug

SEQ ID NO: 282231 - RNA, 19 nt, Artificial Sequence
  Description of Artificial Sequence: Synthetic oligonucleotide
uuacaguggugacuguuuc

SEQ ID NO: 282232 - RNA, 19 nt, Artificial Sequence
  Description of Artificial Sequence: Synthetic oligonucleotide
aguuaaacuuacaguuggg

SEQ ID NO: 282233 - RNA, 19 nt, Artificial Sequence
  Description of Artificial Sequence: Synthetic oligonucleotide
cucgccuuguccugggacg

SEQ ID NO: 282234 - RNA, 19 nt, Artificial Sequence
  Description of Artificial Sequence: Synthetic oligonucleotide
uuagcugccuccugcuggc

SEQ ID NO: 282235 - RNA, 19 nt, Artificial Sequence
  Description of Artificial Sequence: Synthetic oligonucleotide
uggcuuagguucacugucc

SEQ ID NO: 282236 - RNA, 19 nt, Artificial Sequence
  Description of Artificial Sequence: Synthetic oligonucleotide
ugggcuugcuuaaguaaca

SEQ ID NO: 282237 - RNA, 19 nt, Artificial Sequence
  Description of Artificial Sequence: Synthetic oligonucleotide
uuagaggcccuuagcacuc

SEQ ID NO: 282238 - RNA, 19 nt, Artificial Sequence
  Description of Artificial Sequence: Synthetic oligonucleotide
ucagagguuuuauggggac

SEQ ID NO: 282239 - RNA, 19 nt, Artificial Sequence
  Description of Artificial Sequence: Synthetic oligonucleotide
uuuuauggggacuggcauu

SEQ ID NO: 282240 - RNA, 19 nt, Artificial Sequence
  Description of Artificial Sequence: Synthetic oligonucleotide
uugcgauucugcagagucc

SEQ ID NO: 282241 - RNA, 19 nt, Artificial Sequence
  Description of Artificial Sequence: Synthetic oligonucleotide
uuuauggggacuggcauuu

SEQ ID NO: 282242 - RNA, 19 nt, Artificial Sequence
  Description of Artificial Sequence: Synthetic oligonucleotide
ucguauucugagcugccuc

SEQ ID NO: 282243 - RNA, 19 nt, Artificial Sequence
  Description of Artificial Sequence: Synthetic oligonucleotide
ucuugccaguuaaacuuac

SEQ ID NO: 282244 - RNA, 19 nt, Artificial Sequence
  Description of Artificial Sequence: Synthetic oligonucleotide
uuuaccagauugcuuccuu

SEQ ID NO: 282245 - RNA, 19 nt, Artificial Sequence
  Description of Artificial Sequence: Synthetic oligonucleotide
uuuuccucgccuuguccug

SEQ ID NO: 282246 - RNA, 19 nt, Artificial Sequence
  Description of Artificial Sequence: Synthetic oligonucleotide
cuugcgagauccuugaagu

SEQ ID NO: 282247 - RNA, 19 nt, Artificial Sequence
  Description of Artificial Sequence: Synthetic oligonucleotide
aguugggucuuguuucugu

SEQ ID NO: 282248 - RNA, 19 nt, Artificial Sequence
  Description of Artificial Sequence: Synthetic oligonucleotide
ugcuggagaguacuuuuaa

SEQ ID NO: 282249 - RNA, 19 nt, Artificial Sequence
  Description of Artificial Sequence: Synthetic oligonucleotide
aagcucccuuccuuaaaca

SEQ ID NO: 282250 - RNA, 19 nt, Artificial Sequence
  Description of Artificial Sequence: Synthetic oligonucleotide
cucuuuagaggcccuuagc

SEQ ID NO: 282251 - RNA, 19 nt, Artificial Sequence
  Description of Artificial Sequence: Synthetic oligonucleotide
uauuggugucaugucuuag

SEQ ID NO: 282252 - RNA, 19 nt, Artificial Sequence
  Description of Artificial Sequence: Synthetic oligonucleotide
uccuuaaacauaggcagua

SEQ ID NO: 282253 - RNA, 19 nt, Artificial Sequence
  Description of Artificial Sequence: Synthetic oligonucleotide
ucgugguguauacaauguc

SEQ ID NO: 282254 - RNA, 19 nt, Artificial Sequence
  Description of Artificial Sequence: Synthetic oligonucleotide
agugugcucugacauuuga

SEQ ID NO: 282255 - RNA, 19 nt, Artificial Sequence
  Description of Artificial Sequence: Synthetic oligonucleotide
acucuagauauguccauua

SEQ ID NO: 282256 - RNA, 19 nt, Artificial Sequence
  Description of Artificial Sequence: Synthetic oligonucleotide
ugcuuuugcuuugcgauuc

SEQ ID NO: 282257 - RNA, 19 nt, Artificial Sequence
  Description of Artificial Sequence: Synthetic oligonucleotide
gaucgggaggcuaucuacc

SEQ ID NO: 282258 - RNA, 19 nt, Artificial Sequence
  Description of Artificial Sequence: Synthetic oligonucleotide
cuaaacuguuauugcucug

SEQ ID NO: 282259 - RNA, 19 nt, Artificial Sequence
  Description of Artificial Sequence: Synthetic oligonucleotide
uucaagagauuggacccca

SEQ ID NO: 282260 - RNA, 19 nt, Artificial Sequence
  Description of Artificial Sequence: Synthetic oligonucleotide
aguuuucuacuugggcuuc

SEQ ID NO: 282261 - RNA, 19 nt, Artificial Sequence
  Description of Artificial Sequence: Synthetic oligonucleotide
ugugucugugaaguugugu

SEQ ID NO: 282262 - RNA, 19 nt, Artificial Sequence
  Description of Artificial Sequence: Synthetic oligonucleotide
ucaaagcucccuuccuuaa

SEQ ID NO: 282263 - RNA, 19 nt, Artificial Sequence
  Description of Artificial Sequence: Synthetic oligonucleotide
ucacuaaugaaggcacuuc

SEQ ID NO: 282264 - RNA, 19 nt, Artificial Sequence
  Description of Artificial Sequence: Synthetic oligonucleotide
gauugcuuccuugugcuaa

SEQ ID NO: 282265 - RNA, 19 nt, Artificial Sequence
  Description of Artificial Sequence: Synthetic oligonucleotide
gguugcggagaacugcagg

SEQ ID NO: 282266 - RNA, 19 nt, Artificial Sequence
  Description of Artificial Sequence: Synthetic oligonucleotide
cacuaucacucacaggcuc

SEQ ID NO: 282267 - RNA, 19 nt, Artificial Sequence
  Description of Artificial Sequence: Synthetic oligonucleotide
ugcgagauccuugaaguuu

SEQ ID NO: 282268 - RNA, 19 nt, Artificial Sequence
  Description of Artificial Sequence: Synthetic oligonucleotide
uuuuacuauucuggugacu

SEQ ID NO: 282269 - RNA, 19 nt, Artificial Sequence
  Description of Artificial Sequence: Synthetic oligonucleotide
caagaguaucuuguggcug

SEQ ID NO: 282270 - RNA, 19 nt, Artificial Sequence
  Description of Artificial Sequence: Synthetic oligonucleotide
cugaguacucuccguggcc

SEQ ID NO: 282271 - RNA, 19 nt, Artificial Sequence
  Description of Artificial Sequence: Synthetic oligonucleotide
uaucuuguggcuguuucuu

SEQ ID NO: 282272 - RNA, 19 nt, Artificial Sequence
  Description of Artificial Sequence: Synthetic oligonucleotide
cagucguauucugagcugc

SEQ ID NO: 282273 - RNA, 19 nt, Artificial Sequence
  Description of Artificial Sequence: Synthetic oligonucleotide
ugucaugucuuaguuucuc

SEQ ID NO: 282274 - RNA, 19 nt, Artificial Sequence
  Description of Artificial Sequence: Synthetic oligonucleotide
uuuccucgccuuguccugg

SEQ ID NO: 282275 - RNA, 19 nt, Artificial Sequence
  Description of Artificial Sequence: Synthetic oligonucleotide
ggaauuuaucacuaagcua

SEQ ID NO: 282276 - RNA, 19 nt, Artificial Sequence
  Description of Artificial Sequence: Synthetic oligonucleotide
caaccucgggucuuggcug

SEQ ID NO: 282277 - RNA, 19 nt, Artificial Sequence
  Description of Artificial Sequence: Synthetic oligonucleotide
cuuuggaacuuuuguaucu

SEQ ID NO: 282278 - RNA, 19 nt, Artificial Sequence
  Description of Artificial Sequence: Synthetic oligonucleotide
uguccaauuuccgcuuuac

SEQ ID NO: 282279 - RNA, 19 nt, Artificial Sequence
  Description of Artificial Sequence: Synthetic oligonucleotide
auaaccacaagagcucaaa

SEQ ID NO: 282280 - RNA, 19 nt, Artificial Sequence
  Description of Artificial Sequence: Synthetic oligonucleotide
aucgggaggcuaucuaccu

SEQ ID NO: 282281 - RNA, 19 nt, Artificial Sequence
  Description of Artificial Sequence: Synthetic oligonucleotide
ccccguaacacucuuguag

SEQ ID NO: 282282 - RNA, 19 nt, Artificial Sequence
  Description of Artificial Sequence: Synthetic oligonucleotide
guccaauuuccgcuuuacc

SEQ ID NO: 282283 - RNA, 19 nt, Artificial Sequence
  Description of Artificial Sequence: Synthetic oligonucleotide
agcucccuuccuuaaacau

SEQ ID NO: 282284 - RNA, 19 nt, Artificial Sequence
  Description of Artificial Sequence: Synthetic oligonucleotide
gaccuugcgagauccuuga

SEQ ID NO: 282285 - RNA, 19 nt, Artificial Sequence
  Description of Artificial Sequence: Synthetic oligonucleotide
uuuggaacuuuuguaucuu

SEQ ID NO: 282286 - RNA, 19 nt, Artificial Sequence
  Description of Artificial Sequence: Synthetic oligonucleotide
gguuguggagauucacaag

SEQ ID NO: 282287 - RNA, 19 nt, Artificial Sequence
  Description of Artificial Sequence: Synthetic oligonucleotide
ucgggaggcuaucuaccug

SEQ ID NO: 282288 - RNA, 19 nt, Artificial Sequence
  Description of Artificial Sequence: Synthetic oligonucleotide
caagagauuggaccccauc

SEQ ID NO: 282289 - RNA, 19 nt, Artificial Sequence
  Description of Artificial Sequence: Synthetic oligonucleotide
ugucuuugcuacacauuuu

SEQ ID NO: 282290 - RNA, 19 nt, Artificial Sequence
  Description of Artificial Sequence: Synthetic oligonucleotide
gcuggagaguacuuuuaag

SEQ ID NO: 282291 - RNA, 19 nt, Artificial Sequence
  Description of Artificial Sequence: Synthetic oligonucleotide
gacgucuuggugagaucgg

SEQ ID NO: 282292 - RNA, 19 nt, Artificial Sequence
  Description of Artificial Sequence: Synthetic oligonucleotide
uuauugcucugagaucccu

SEQ ID NO: 282293 - RNA, 19 nt, Artificial Sequence
  Description of Artificial Sequence: Synthetic oligonucleotide
gccaguuaaacuuacaguu

SEQ ID NO: 282294 - RNA, 19 nt, Artificial Sequence
  Description of Artificial Sequence: Synthetic oligonucleotide
ggggaauuucacucugucc

SEQ ID NO: 282295 - RNA, 19 nt, Artificial Sequence
  Description of Artificial Sequence: Synthetic oligonucleotide
guuaaacuuacaguugggu

SEQ ID NO: 282296 - RNA, 19 nt, Artificial Sequence
  Description of Artificial Sequence: Synthetic oligonucleotide
ugcuggguagcuccucuaa

SEQ ID NO: 282297 - RNA, 19 nt, Artificial Sequence
  Description of Artificial Sequence: Synthetic oligonucleotide
cuugcuagcaggcacacuu

SEQ ID NO: 282298 - RNA, 19 nt, Artificial Sequence
  Description of Artificial Sequence: Synthetic oligonucleotide
uggaggcguuuucuggucu

SEQ ID NO: 282299 - RNA, 19 nt, Artificial Sequence
  Description of Artificial Sequence: Synthetic oligonucleotide
uucgguaucuggaggcguu

SEQ ID NO: 282300 - RNA, 19 nt, Artificial Sequence
  Description of Artificial Sequence: Synthetic oligonucleotide
acauuuguggaagcauccu

SEQ ID NO: 282301 - RNA, 19 nt, Artificial Sequence
  Description of Artificial Sequence: Synthetic oligonucleotide
ggugacuguuucuaauuuc

SEQ ID NO: 282302 - RNA, 19 nt, Artificial Sequence
  Description of Artificial Sequence: Synthetic oligonucleotide
aauaaccacaagagcucaa

SEQ ID NO: 282303 - RNA, 19 nt, Artificial Sequence
  Description of Artificial Sequence: Synthetic oligonucleotide
ugguugcggagaacugcag

SEQ ID NO: 282304 - RNA, 19 nt, Artificial Sequence
  Description of Artificial Sequence: Synthetic oligonucleotide
gcguuuucuggucuggaug

SEQ ID NO: 282305 - RNA, 19 nt, Artificial Sequence
  Description of Artificial Sequence: Synthetic oligonucleotide
ugggacgucuuggugagau

SEQ ID NO: 282306 - RNA, 19 nt, Artificial Sequence
  Description of Artificial Sequence: Synthetic oligonucleotide
gaggcguuuucuggucugg

SEQ ID NO: 282307 - RNA, 19 nt, Artificial Sequence
  Description of Artificial Sequence: Synthetic oligonucleotide
guuuuauggggacuggcau

SEQ ID NO: 282308 - RNA, 19 nt, Artificial Sequence
  Description of Artificial Sequence: Synthetic oligonucleotide
ggagauucacaagaguauc

SEQ ID NO: 282309 - RNA, 19 nt, Artificial Sequence
  Description of Artificial Sequence: Synthetic oligonucleotide
aauuuccgcuuuaccagau

SEQ ID NO: 282310 - RNA, 19 nt, Artificial Sequence
  Description of Artificial Sequence: Synthetic oligonucleotide
uucuuggaugcuggguagc

SEQ ID NO: 282311 - RNA, 19 nt, Artificial Sequence
  Description of Artificial Sequence: Synthetic oligonucleotide
gaguuuuggggaguagcuc

SEQ ID NO: 282312 - RNA, 19 nt, Artificial Sequence
  Description of Artificial Sequence: Synthetic oligonucleotide
ccuugcgagauccuugaag

SEQ ID NO: 282313 - RNA, 19 nt, Artificial Sequence
  Description of Artificial Sequence: Synthetic oligonucleotide
ugagaucgggaggcuaucu

SEQ ID NO: 282314 - RNA, 19 nt, Artificial Sequence
  Description of Artificial Sequence: Synthetic oligonucleotide
cuuuuccucgccuuguccu

SEQ ID NO: 282315 - RNA, 19 nt, Artificial Sequence
  Description of Artificial Sequence: Synthetic oligonucleotide
aguuacaguggugacuguu

SEQ ID NO: 282316 - RNA, 19 nt, Artificial Sequence
  Description of Artificial Sequence: Synthetic oligonucleotide
ggagaguacuuuuaaggcu

SEQ ID NO: 282317 - RNA, 19 nt, Artificial Sequence
  Description of Artificial Sequence: Synthetic oligonucleotide
cacagucguauucugagcu

SEQ ID NO: 282318 - RNA, 19 nt, Artificial Sequence
  Description of Artificial Sequence: Synthetic oligonucleotide
accaagauuucugcaccug

SEQ ID NO: 282319 - RNA, 19 nt, Artificial Sequence
  Description of Artificial Sequence: Synthetic oligonucleotide
gaggcuaccgagcuuuccu

SEQ ID NO: 282320 - RNA, 19 nt, Artificial Sequence
  Description of Artificial Sequence: Synthetic oligonucleotide
cccuaaacuguuauugcuc

SEQ ID NO: 282321 - RNA, 19 nt, Artificial Sequence
  Description of Artificial Sequence: Synthetic oligonucleotide
guuauugcucugagauccc

SEQ ID NO: 282322 - RNA, 19 nt, Artificial Sequence
  Description of Artificial Sequence: Synthetic oligonucleotide
uucccugaguacucuccgu

SEQ ID NO: 282323 - RNA, 19 nt, Artificial Sequence
  Description of Artificial Sequence: Synthetic oligonucleotide
ccaccucuacuuuuccucg

SEQ ID NO: 282324 - RNA, 19 nt, Artificial Sequence
  Description of Artificial Sequence: Synthetic oligonucleotide
cagauacaccaaccucggg

SEQ ID NO: 282325 - RNA, 19 nt, Artificial Sequence
  Description of Artificial Sequence: Synthetic oligonucleotide
ucuaaggguugggucuucu

SEQ ID NO: 282326 - RNA, 19 nt, Artificial Sequence
  Description of Artificial Sequence: Synthetic oligonucleotide
cacugguucaauuuuguuu

SEQ ID NO: 282327 - RNA, 19 nt, Artificial Sequence
  Description of Artificial Sequence: Synthetic oligonucleotide
gcuaacuuaauauuuccuu

SEQ ID NO: 282328 - RNA, 19 nt, Artificial Sequence
  Description of Artificial Sequence: Synthetic oligonucleotide
ugaggcuaccgagcuuucc

SEQ ID NO: 282329 - RNA, 19 nt, Artificial Sequence
  Description of Artificial Sequence: Synthetic oligonucleotide
uuaaggcuauuggugucau

SEQ ID NO: 282330 - RNA, 19 nt, Artificial Sequence
  Description of Artificial Sequence: Synthetic oligonucleotide
caggcaauucuagggguug

SEQ ID NO: 282331 - RNA, 19 nt, Artificial Sequence
  Description of Artificial Sequence: Synthetic oligonucleotide
aaaccacacuggaauuuau

SEQ ID NO: 282332 - RNA, 19 nt, Artificial Sequence
  Description of Artificial Sequence: Synthetic oligonucleotide
uuccgugauguugcuaauc

SEQ ID NO: 282333 - RNA, 19 nt, Artificial Sequence
  Description of Artificial Sequence: Synthetic oligonucleotide
uguccucuuuagaggcccu

SEQ ID NO: 282334 - RNA, 19 nt, Artificial Sequence
  Description of Artificial Sequence: Synthetic oligonucleotide
uaguuucgugguguauaca

SEQ ID NO: 282335 - RNA, 19 nt, Artificial Sequence
  Description of Artificial Sequence: Synthetic oligonucleotide
ccugaguacucuccguggc

SEQ ID NO: 282336 - RNA, 19 nt, Artificial Sequence
  Description of Artificial Sequence: Synthetic oligonucleotide
acugacagcuguguccaau

SEQ ID NO: 282337 - RNA, 19 nt, Artificial Sequence
  Description of Artificial Sequence: Synthetic oligonucleotide
caugaggcuggggaauuuc

SEQ ID NO: 282338 - RNA, 19 nt, Artificial Sequence
  Description of Artificial Sequence: Synthetic oligonucleotide
uucuuaggugcagguuucu

SEQ ID NO: 282339 - RNA, 19 nt, Artificial Sequence
  Description of Artificial Sequence: Synthetic oligonucleotide
uugcgagauccuugaaguu

SEQ ID NO: 282340 - RNA, 19 nt, Artificial Sequence
  Description of Artificial Sequence: Synthetic oligonucleotide
uugccccuagauguagacu

SEQ ID NO: 282341 - RNA, 19 nt, Artificial Sequence
  Description of Artificial Sequence: Synthetic oligonucleotide
gagaucgggaggcuaucua

SEQ ID NO: 282342 - RNA, 19 nt, Artificial Sequence
  Description of Artificial Sequence: Synthetic oligonucleotide
auuuccgcuuuaccagauu

SEQ ID NO: 282343 - RNA, 19 nt, Artificial Sequence
  Description of Artificial Sequence: Synthetic oligonucleotide
guagcuccucuaaggguug

SEQ ID NO: 282344 - RNA, 19 nt, Artificial Sequence
  Description of Artificial Sequence: Synthetic oligonucleotide
ccugggacgucuuggugag

SEQ ID NO: 282345 - RNA, 19 nt, Artificial Sequence
  Description of Artificial Sequence: Synthetic oligonucleotide
cuauuggugucaugucuua

SEQ ID NO: 282346 - RNA, 19 nt, Artificial Sequence
  Description of Artificial Sequence: Synthetic oligonucleotide
gugcuauaggcucuuuggu

SEQ ID NO: 282347 - RNA, 19 nt, Artificial Sequence
  Description of Artificial Sequence: Synthetic oligonucleotide
ggcuauuggugucaugucu

SEQ ID NO: 282348 - RNA, 19 nt, Artificial Sequence
  Description of Artificial Sequence: Synthetic oligonucleotide
cucuugccaguuaaacuua

SEQ ID NO: 282349 - RNA, 19 nt, Artificial Sequence
  Description of Artificial Sequence: Synthetic oligonucleotide
ggaggcguuuucuggucug

SEQ ID NO: 282350 - RNA, 19 nt, Artificial Sequence
  Description of Artificial Sequence: Synthetic oligonucleotide
uuauggggacuggcauuug

SEQ ID NO: 282351 - RNA, 19 nt, Artificial Sequence
  Description of Artificial Sequence: Synthetic oligonucleotide
ggaccuugcgagauccuug

SEQ ID NO: 282352 - RNA, 19 nt, Artificial Sequence
  Description of Artificial Sequence: Synthetic oligonucleotide
cucuugcuagcaggcacac

SEQ ID NO: 282353 - RNA, 19 nt, Artificial Sequence
  Description of Artificial Sequence: Synthetic oligonucleotide
guauucugagcugccucuc

SEQ ID NO: 282354 - RNA, 19 nt, Artificial Sequence
  Description of Artificial Sequence: Synthetic oligonucleotide
gcuuugcgauucugcagag

SEQ ID NO: 282355 - RNA, 19 nt, Artificial Sequence
  Description of Artificial Sequence: Synthetic oligonucleotide
aggcuaccgagcuuuccuu

SEQ ID NO: 282356 - RNA, 19 nt, Artificial Sequence
  Description of Artificial Sequence: Synthetic oligonucleotide
ccuaaacuguuauugcucu

SEQ ID NO: 282357 - RNA, 19 nt, Artificial Sequence
  Description of Artificial Sequence: Synthetic oligonucleotide
agcauccugucuccugaua

SEQ ID NO: 282358 - RNA, 19 nt, Artificial Sequence
  Description of Artificial Sequence: Synthetic oligonucleotide
accgagcuuuccuuuucuu

SEQ ID NO: 282359 - RNA, 19 nt, Artificial Sequence
  Description of Artificial Sequence: Synthetic oligonucleotide
ccucuagggucuuugccuc

SEQ ID NO: 282360 - RNA, 19 nt, Artificial Sequence
  Description of Artificial Sequence: Synthetic oligonucleotide
guacucuagauauguccau

SEQ ID NO: 282361 - RNA, 19 nt, Artificial Sequence
  Description of Artificial Sequence: Synthetic oligonucleotide
ugcccaccccuaaacuguu

SEQ ID NO: 282362 - RNA, 19 nt, Artificial Sequence
  Description of Artificial Sequence: Synthetic oligonucleotide
ccucuugccaguuaaacuu

SEQ ID NO: 282363 - RNA, 19 nt, Artificial Sequence
  Description of Artificial Sequence: Synthetic oligonucleotide
guccuuaguuucguggugu

SEQ ID NO: 282364 - RNA, 19 nt, Artificial Sequence
  Description of Artificial Sequence: Synthetic oligonucleotide
cucuagauauguccauuau

SEQ ID NO: 282365 - RNA, 19 nt, Artificial Sequence
  Description of Artificial Sequence: Synthetic oligonucleotide
ggaguuuuggggaguagcu

SEQ ID NO: 282366 - RNA, 19 nt, Artificial Sequence
  Description of Artificial Sequence: Synthetic oligonucleotide
cuugugcuaaugccuuugu

SEQ ID NO: 282367 - RNA, 19 nt, Artificial Sequence
  Description of Artificial Sequence: Synthetic oligonucleotide
ccgugauguugcuaaucug

SEQ ID NO: 282368 - RNA, 19 nt, Artificial Sequence
  Description of Artificial Sequence: Synthetic oligonucleotide
uggugacuucuuguccuua

SEQ ID NO: 282369 - RNA, 19 nt, Artificial Sequence
  Description of Artificial Sequence: Synthetic oligonucleotide
uuugugcuauaggcucuuu

SEQ ID NO: 282370 - RNA, 19 nt, Artificial Sequence
  Description of Artificial Sequence: Synthetic oligonucleotide
gggcuugcuuaaguaacac

SEQ ID NO: 282371 - RNA, 19 nt, Artificial Sequence
  Description of Artificial Sequence: Synthetic oligonucleotide
cgugguguauacaaugucu

SEQ ID NO: 282372 - RNA, 19 nt, Artificial Sequence
  Description of Artificial Sequence: Synthetic oligonucleotide
cugaggcuaccgagcuuuc

SEQ ID NO: 282373 - RNA, 19 nt, Artificial Sequence
  Description of Artificial Sequence: Synthetic oligonucleotide
aggcguuuucuggucugga

SEQ ID NO: 282374 - RNA, 19 nt, Artificial Sequence
  Description of Artificial Sequence: Synthetic oligonucleotide
guguccaauuuccgcuuua

SEQ ID NO: 282375 - RNA, 19 nt, Artificial Sequence
  Description of Artificial Sequence: Synthetic oligonucleotide
agaguaucuuguggcuguu

SEQ ID NO: 282376 - RNA, 19 nt, Artificial Sequence
  Description of Artificial Sequence: Synthetic oligonucleotide
cucacuaaugaaggcacuu

SEQ ID NO: 282377 - RNA, 19 nt, Artificial Sequence
  Description of Artificial Sequence: Synthetic oligonucleotide
guuucgugguguauacaau

SEQ ID NO: 282378 - RNA, 19 nt, Artificial Sequence
  Description of Artificial Sequence: Synthetic oligonucleotide
cuuuaccagauugcuuccu

SEQ ID NO: 282379 - RNA, 19 nt, Artificial Sequence
  Description of Artificial Sequence: Synthetic oligonucleotide
ccucgccuuguccugggac

SEQ ID NO: 282380 - RNA, 19 nt, Artificial Sequence
  Description of Artificial Sequence: Synthetic oligonucleotide
gucguauucugagcugccu

SEQ ID NO: 282381 - RNA, 19 nt, Artificial Sequence
  Description of Artificial Sequence: Synthetic oligonucleotide
gcucugacauuugaguuau

SEQ ID NO: 282382 - RNA, 19 nt, Artificial Sequence
  Description of Artificial Sequence: Synthetic oligonucleotide
gcuauuggugucaugucuu

SEQ ID NO: 282383 - RNA, 19 nt, Artificial Sequence
  Description of Artificial Sequence: Synthetic oligonucleotide
cugccucucugaggcuacc

SEQ ID NO: 282384 - RNA, 19 nt, Artificial Sequence
  Description of Artificial Sequence: Synthetic oligonucleotide
ccccuaaacuguuauugcu

SEQ ID NO: 282385 - RNA, 19 nt, Artificial Sequence
  Description of Artificial Sequence: Synthetic oligonucleotide
cagagguuuuauggggacu

SEQ ID NO: 282386 - RNA, 19 nt, Artificial Sequence
  Description of Artificial Sequence: Synthetic oligonucleotide
caugucuauuuugcacagu

SEQ ID NO: 282387 - RNA, 19 nt, Artificial Sequence
  Description of Artificial Sequence: Synthetic oligonucleotide
ccauccuuagguccucuua

SEQ ID NO: 282388 - RNA, 19 nt, Artificial Sequence
  Description of Artificial Sequence: Synthetic oligonucleotide
guccucuuagcugccuccu

SEQ ID NO: 282389 - RNA, 19 nt, Artificial Sequence
  Description of Artificial Sequence: Synthetic oligonucleotide
ccccgagucacucuuggcu

SEQ ID NO: 282390 - RNA, 19 nt, Artificial Sequence
  Description of Artificial Sequence: Synthetic oligonucleotide
cacccacucuccugagucu

SEQ ID NO: 282391 - RNA, 19 nt, Artificial Sequence
  Description of Artificial Sequence: Synthetic oligonucleotide
cuuugcgauucugcagagu

SEQ ID NO: 282392 - RNA, 19 nt, Artificial Sequence
  Description of Artificial Sequence: Synthetic oligonucleotide
agggaccuugcgagauccu

SEQ ID NO: 282393 - RNA, 19 nt, Artificial Sequence
  Description of Artificial Sequence: Synthetic oligonucleotide
cugccugcccaccccuaaa

SEQ ID NO: 282394 - RNA, 19 nt, Artificial Sequence
  Description of Artificial Sequence: Synthetic oligonucleotide
cguggccucuugcuagcag

SEQ ID NO: 282395 - RNA, 19 nt, Artificial Sequence
  Description of Artificial Sequence: Synthetic oligonucleotide
uccagaccucaagcauauu

SEQ ID NO: 282396 - RNA, 19 nt, Artificial Sequence
  Description of Artificial Sequence: Synthetic oligonucleotide
gaguaucuuguggcuguuu

SEQ ID NO: 282397 - RNA, 19 nt, Artificial Sequence
  Description of Artificial Sequence: Synthetic oligonucleotide
cuaucacucacaggcucuu

SEQ ID NO: 282398 - RNA, 19 nt, Artificial Sequence
  Description of Artificial Sequence: Synthetic oligonucleotide
gccccuagauguagacuuc

SEQ ID NO: 282399 - RNA, 19 nt, Artificial Sequence
  Description of Artificial Sequence: Synthetic oligonucleotide
gcuccucuaaggguugggu

SEQ ID NO: 282400 - RNA, 19 nt, Artificial Sequence
  Description of Artificial Sequence: Synthetic oligonucleotide
gcuagcaggcacacuugcu

SEQ ID NO: 282401 - RNA, 19 nt, Artificial Sequence
  Description of Artificial Sequence: Synthetic oligonucleotide
ccccugguucuuggaauac

SEQ ID NO: 282402 - RNA, 19 nt, Artificial Sequence
  Description of Artificial Sequence: Synthetic oligonucleotide
cgggaggcuaucuaccugu

SEQ ID NO: 282403 - RNA, 19 nt, Artificial Sequence
  Description of Artificial Sequence: Synthetic oligonucleotide
caguuacaguggugacugu

SEQ ID NO: 282404 - RNA, 19 nt, Artificial Sequence
  Description of Artificial Sequence: Synthetic oligonucleotide
ccucacuaaugaaggcacu

SEQ ID NO: 282405 - RNA, 19 nt, Artificial Sequence
  Description of Artificial Sequence: Synthetic oligonucleotide
gguuccccguaacacucuu

SEQ ID NO: 282406 - RNA, 19 nt, Artificial Sequence
  Description of Artificial Sequence: Synthetic oligonucleotide
ccgagucacucuuggcuua

SEQ ID NO: 282407 - RNA, 19 nt, Artificial Sequence
  Description of Artificial Sequence: Synthetic oligonucleotide
gcaccccgagucacucuug

SEQ ID NO: 282408 - RNA, 19 nt, Artificial Sequence
  Description of Artificial Sequence: Synthetic oligonucleotide
ccuuaaacauaggcaguau

SEQ ID NO: 282409 - RNA, 19 nt, Artificial Sequence
  Description of Artificial Sequence: Synthetic oligonucleotide
ccaggcaauucuagggguu

SEQ ID NO: 282410 - RNA, 19 nt, Artificial Sequence
  Description of Artificial Sequence: Synthetic oligonucleotide
cugugugggucuggucccu

SEQ ID NO: 282411 - RNA, 19 nt, Artificial Sequence
  Description of Artificial Sequence: Synthetic oligonucleotide
cugggacgucuuggugaga

SEQ ID NO: 282412 - RNA, 19 nt, Artificial Sequence
  Description of Artificial Sequence: Synthetic oligonucleotide
guacucuccguggccucuu

SEQ ID NO: 282413 - RNA, 19 nt, Artificial Sequence
  Description of Artificial Sequence: Synthetic oligonucleotide
ccccuagauguagacuucu

SEQ ID NO: 282414 - RNA, 19 nt, Artificial Sequence
  Description of Artificial Sequence: Synthetic oligonucleotide
ccguaacacucuuguaguu

SEQ ID NO: 282415 - RNA, 19 nt, Artificial Sequence
  Description of Artificial Sequence: Synthetic oligonucleotide
cucugacauuugaguuauu

SEQ ID NO: 282416 - RNA, 19 nt, Artificial Sequence
  Description of Artificial Sequence: Synthetic oligonucleotide
gcaugaggcuggggaauuu

SEQ ID NO: 282417 - RNA, 19 nt, Artificial Sequence
  Description of Artificial Sequence: Synthetic oligonucleotide
cccugguauccaccaccau

SEQ ID NO: 282418 - RNA, 19 nt, Artificial Sequence
  Description of Artificial Sequence: Synthetic oligonucleotide
cgguaucuggaggcguuuu

SEQ ID NO: 282419 - RNA, 19 nt, Artificial Sequence
  Description of Artificial Sequence: Synthetic oligonucleotide
ugaauguuggaaaugaucc

SEQ ID NO: 282420 - RNA, 19 nt, Artificial Sequence
  Description of Artificial Sequence: Synthetic oligonucleotide
uuggaaaugauccacagcu

SEQ ID NO: 282421 - RNA, 19 nt, Artificial Sequence
  Description of Artificial Sequence: Synthetic oligonucleotide
uguauaagaaccaucuggc

SEQ ID NO: 282422 - RNA, 19 nt, Artificial Sequence
  Description of Artificial Sequence: Synthetic oligonucleotide
acuacaacccuccugaggg

SEQ ID NO: 282423 - RNA, 19 nt, Artificial Sequence
  Description of Artificial Sequence: Synthetic oligonucleotide
uauguuuagacugcgaagg

SEQ ID NO: 282424 - RNA, 19 nt, Artificial Sequence
  Description of Artificial Sequence: Synthetic oligonucleotide
aaugcaaagaaguacugga

SEQ ID NO: 282425 - RNA, 19 nt, Artificial Sequence
  Description of Artificial Sequence: Synthetic oligonucleotide
aauauucccuaccaugcac

SEQ ID NO: 282426 - RNA, 19 nt, Artificial Sequence
  Description of Artificial Sequence: Synthetic oligonucleotide
cagaugauguauaagaacc

SEQ ID NO: 282427 - RNA, 19 nt, Artificial Sequence
  Description of Artificial Sequence: Synthetic oligonucleotide
aaucauagcauucaagcaa

SEQ ID NO: 282428 - RNA, 19 nt, Artificial Sequence
  Description of Artificial Sequence: Synthetic oligonucleotide
auuagagugagagaaugcc

SEQ ID NO: 282429 - RNA, 19 nt, Artificial Sequence
  Description of Artificial Sequence: Synthetic oligonucleotide
uuucagaaggccaaacucc

SEQ ID NO: 282430 - RNA, 19 nt, Artificial Sequence
  Description of Artificial Sequence: Synthetic oligonucleotide
ugauaaaguagcugggagg

SEQ ID NO: 282431 - RNA, 19 nt, Artificial Sequence
  Description of Artificial Sequence: Synthetic oligonucleotide
uggggcaugauucaaaaca

SEQ ID NO: 282432 - RNA, 19 nt, Artificial Sequence
  Description of Artificial Sequence: Synthetic oligonucleotide
ucuaggucggaaaggaacg

SEQ ID NO: 282433 - RNA, 19 nt, Artificial Sequence
  Description of Artificial Sequence: Synthetic oligonucleotide
aucugagagucucacaccc

SEQ ID NO: 282434 - RNA, 19 nt, Artificial Sequence
  Description of Artificial Sequence: Synthetic oligonucleotide
caagccuagacauaggccc

SEQ ID NO: 282435 - RNA, 19 nt, Artificial Sequence
  Description of Artificial Sequence: Synthetic oligonucleotide
gcagauaggagucugaggg

SEQ ID NO: 282436 - RNA, 19 nt, Artificial Sequence
  Description of Artificial Sequence: Synthetic oligonucleotide
ggaaacaaagaccucaggg

SEQ ID NO: 282437 - RNA, 19 nt, Artificial Sequence
  Description of Artificial Sequence: Synthetic oligonucleotide
aacuuaagacgggugauac

SEQ ID NO: 282438 - RNA, 19 nt, Artificial Sequence
  Description of Artificial Sequence: Synthetic oligonucleotide
gaaggugcgcuccugauag

SEQ ID NO: 282439 - RNA, 19 nt, Artificial Sequence
  Description of Artificial Sequence: Synthetic oligonucleotide
uguagacgagagaagagcc

SEQ ID NO: 282440 - RNA, 19 nt, Artificial Sequence
  Description of Artificial Sequence: Synthetic oligonucleotide
aaguacuggagcgagggac

SEQ ID NO: 282441 - RNA, 19 nt, Artificial Sequence
  Description of Artificial Sequence: Synthetic oligonucleotide
ugugaagucacuuaauauu

SEQ ID NO: 282442 - RNA, 19 nt, Artificial Sequence
  Description of Artificial Sequence: Synthetic oligonucleotide
cuuaagacgggugauacgc

SEQ ID NO: 282443 - RNA, 19 nt, Artificial Sequence
  Description of Artificial Sequence: Synthetic oligonucleotide
uguagaagugccaaguuua

SEQ ID NO: 282444 - RNA, 19 nt, Artificial Sequence
  Description of Artificial Sequence: Synthetic oligonucleotide
ugccaaguuuauuagagug

SEQ ID NO: 282445 - RNA, 19 nt, Artificial Sequence
  Description of Artificial Sequence: Synthetic oligonucleotide
aauaguuagacuugcuguu

SEQ ID NO: 282446 - RNA, 19 nt, Artificial Sequence
  Description of Artificial Sequence: Synthetic oligonucleotide
ucgagauugggaaaugagc

SEQ ID NO: 282447 - RNA, 19 nt, Artificial Sequence
  Description of Artificial Sequence: Synthetic oligonucleotide
cuagacauaggccccaagg

SEQ ID NO: 282448 - RNA, 19 nt, Artificial Sequence
  Description of Artificial Sequence: Synthetic oligonucleotide
ugcuaauccccauuaaagc

SEQ ID NO: 282449 - RNA, 19 nt, Artificial Sequence
  Description of Artificial Sequence: Synthetic oligonucleotide
agucuugacacgaugggcc

SEQ ID NO: 282450 - RNA, 19 nt, Artificial Sequence
  Description of Artificial Sequence: Synthetic oligonucleotide
ucauguugcugaaagccag

SEQ ID NO: 282451 - RNA, 19 nt, Artificial Sequence
  Description of Artificial Sequence: Synthetic oligonucleotide
aaggcagguagacucggcg

SEQ ID NO: 282452 - RNA, 19 nt, Artificial Sequence
  Description of Artificial Sequence: Synthetic oligonucleotide
uuguuugugagcucagaag

SEQ ID NO: 282453 - RNA, 19 nt, Artificial Sequence
  Description of Artificial Sequence: Synthetic oligonucleotide
cuucacugagaauaguuag

SEQ ID NO: 282454 - RNA, 19 nt, Artificial Sequence
  Description of Artificial Sequence: Synthetic oligonucleotide
uguuguuacagucucggau

SEQ ID NO: 282455 - RNA, 19 nt, Artificial Sequence
  Description of Artificial Sequence: Synthetic oligonucleotide
uguucauuaggcuuuggaa

SEQ ID NO: 282456 - RNA, 19 nt, Artificial Sequence
  Description of Artificial Sequence: Synthetic oligonucleotide
uugugagcucagaagaucc

SEQ ID NO: 282457 - RNA, 19 nt, Artificial Sequence
  Description of Artificial Sequence: Synthetic oligonucleotide
gaagacguuguucucgaag

SEQ ID NO: 282458 - RNA, 19 nt, Artificial Sequence
  Description of Artificial Sequence: Synthetic oligonucleotide
gcuguugcgaaccacaggg

SEQ ID NO: 282459 - RNA, 19 nt, Artificial Sequence
  Description of Artificial Sequence: Synthetic oligonucleotide
gguaagaugccucugacac

SEQ ID NO: 282460 - RNA, 19 nt, Artificial Sequence
  Description of Artificial Sequence: Synthetic oligonucleotide
gagauugggaaaugagcgg

SEQ ID NO: 282461 - RNA, 19 nt, Artificial Sequence
  Description of Artificial Sequence: Synthetic oligonucleotide
uuaggcuuuggaaggugcg

SEQ ID NO: 282462 - RNA, 19 nt, Artificial Sequence
  Description of Artificial Sequence: Synthetic oligonucleotide
uuagagugagagaaugcca

SEQ ID NO: 282463 - RNA, 19 nt, Artificial Sequence
  Description of Artificial Sequence: Synthetic oligonucleotide
uuccuaugaagaaaggauc

SEQ ID NO: 282464 - RNA, 19 nt, Artificial Sequence
  Description of Artificial Sequence: Synthetic oligonucleotide
gaacguggugcugacaucg

SEQ ID NO: 282465 - RNA, 19 nt, Artificial Sequence
  Description of Artificial Sequence: Synthetic oligonucleotide
agcgggaaaauuuugcacu

SEQ ID NO: 282466 - RNA, 19 nt, Artificial Sequence
  Description of Artificial Sequence: Synthetic oligonucleotide
uucacugagaauaguuaga

SEQ ID NO: 282467 - RNA, 19 nt, Artificial Sequence
  Description of Artificial Sequence: Synthetic oligonucleotide
uccugauaaaguagcuggg

SEQ ID NO: 282468 - RNA, 19 nt, Artificial Sequence
  Description of Artificial Sequence: Synthetic oligonucleotide
cuauguuuagacugcgaag

SEQ ID NO: 282469 - RNA, 19 nt, Artificial Sequence
  Description of Artificial Sequence: Synthetic oligonucleotide
agauugggaaaugagcggg

SEQ ID NO: 282470 - RNA, 19 nt, Artificial Sequence
  Description of Artificial Sequence: Synthetic oligonucleotide
acaaucagcucaaauuugg

SEQ ID NO: 282471 - RNA, 19 nt, Artificial Sequence
  Description of Artificial Sequence: Synthetic oligonucleotide
gaaguuccgggauccaggg

SEQ ID NO: 282472 - RNA, 19 nt, Artificial Sequence
  Description of Artificial Sequence: Synthetic oligonucleotide
gaauaguuagacuugcugu

SEQ ID NO: 282473 - RNA, 19 nt, Artificial Sequence
  Description of Artificial Sequence: Synthetic oligonucleotide
uccaagaccucucggaaac

SEQ ID NO: 282474 - RNA, 19 nt, Artificial Sequence
  Description of Artificial Sequence: Synthetic oligonucleotide
uaagguuccgugcacggac

SEQ ID NO: 282475 - RNA, 19 nt, Artificial Sequence
  Description of Artificial Sequence: Synthetic oligonucleotide
agugccaaguuuauuagag

SEQ ID NO: 282476 - RNA, 19 nt, Artificial Sequence
  Description of Artificial Sequence: Synthetic oligonucleotide
ugauaggucugguugguga

SEQ ID NO: 282477 - RNA, 19 nt, Artificial Sequence
  Description of Artificial Sequence: Synthetic oligonucleotide
ugagaauaguuagacuugc

SEQ ID NO: 282478 - RNA, 19 nt, Artificial Sequence
  Description of Artificial Sequence: Synthetic oligonucleotide
cucgaauggaggagaaugg

SEQ ID NO: 282479 - RNA, 19 nt, Artificial Sequence
  Description of Artificial Sequence: Synthetic oligonucleotide
uucagaaggccaaacuccu

SEQ ID NO: 282480 - RNA, 19 nt, Artificial Sequence
  Description of Artificial Sequence: Synthetic oligonucleotide
uaauauucccuaccaugca

SEQ ID NO: 282481 - RNA, 19 nt, Artificial Sequence
  Description of Artificial Sequence: Synthetic oligonucleotide
cuuaagguuccgugcacgg

SEQ ID NO: 282482 - RNA, 19 nt, Artificial Sequence
  Description of Artificial Sequence: Synthetic oligonucleotide
acaccuacuggugggagcc

SEQ ID NO: 282483 - RNA, 19 nt, Artificial Sequence
  Description of Artificial Sequence: Synthetic oligonucleotide
gaacucaagggccaccagc

SEQ ID NO: 282484 - RNA, 19 nt, Artificial Sequence
  Description of Artificial Sequence: Synthetic oligonucleotide
cuuguggggaaucauagca

SEQ ID NO: 282485 - RNA, 19 nt, Artificial Sequence
  Description of Artificial Sequence: Synthetic oligonucleotide
ucggaaacugcuguuacug

SEQ ID NO: 282486 - RNA, 19 nt, Artificial Sequence
  Description of Artificial Sequence: Synthetic oligonucleotide
cugagaauaguuagacuug

SEQ ID NO: 282487 - RNA, 19 nt, Artificial Sequence
  Description of Artificial Sequence: Synthetic oligonucleotide
ucuacuuguuggauaggga

SEQ ID NO: 282488 - RNA, 19 nt, Artificial Sequence
  Description of Artificial Sequence: Synthetic oligonucleotide
gcuaauccccauuaaagcc

SEQ ID NO: 282489 - RNA, 19 nt, Artificial Sequence
  Description of Artificial Sequence: Synthetic oligonucleotide
uacuuguuggauagggaac

SEQ ID NO: 282490 - RNA, 19 nt, Artificial Sequence
  Description of Artificial Sequence: Synthetic oligonucleotide
auuaggcuuuggaaggugc

SEQ ID NO: 282491 - RNA, 19 nt, Artificial Sequence
  Description of Artificial Sequence: Synthetic oligonucleotide
uguuacuguucauuaggcu

SEQ ID NO: 282492 - RNA, 19 nt, Artificial Sequence
  Description of Artificial Sequence: Synthetic oligonucleotide
gugcuaauccccauuaaag

SEQ ID NO: 282493 - RNA, 19 nt, Artificial Sequence
  Description of Artificial Sequence: Synthetic oligonucleotide
uguucucgaaguuuucuuc

SEQ ID NO: 282494 - RNA, 19 nt, Artificial Sequence
  Description of Artificial Sequence: Synthetic oligonucleotide
ucucuguucucacuggguc

SEQ ID NO: 282495 - RNA, 19 nt, Artificial Sequence
  Description of Artificial Sequence: Synthetic oligonucleotide
ugggaaaugagcgggaaaa

SEQ ID NO: 282496 - RNA, 19 nt, Artificial Sequence
  Description of Artificial Sequence: Synthetic oligonucleotide
gacucggcggaauucuggg

SEQ ID NO: 282497 - RNA, 19 nt, Artificial Sequence
  Description of Artificial Sequence: Synthetic oligonucleotide
acuuaagacgggugauacg

SEQ ID NO: 282498 - RNA, 19 nt, Artificial Sequence
  Description of Artificial Sequence: Synthetic oligonucleotide
gaauggagcauggucaaac

SEQ ID NO: 282499 - RNA, 19 nt, Artificial Sequence
  Description of Artificial Sequence: Synthetic oligonucleotide
cucuacuuguuggauaggg

SEQ ID NO: 282500 - RNA, 19 nt, Artificial Sequence
  Description of Artificial Sequence: Synthetic oligonucleotide
uaagacgggugauacgcug

SEQ ID NO: 282501 - RNA, 19 nt, Artificial Sequence
  Description of Artificial Sequence: Synthetic oligonucleotide
acgaugggccuccuuaagg

SEQ ID NO: 282502 - RNA, 19 nt, Artificial Sequence
  Description of Artificial Sequence: Synthetic oligonucleotide
uugccaccgggaaacaaag

SEQ ID NO: 282503 - RNA, 19 nt, Artificial Sequence
  Description of Artificial Sequence: Synthetic oligonucleotide
uuaaagcccgcucuccagu

SEQ ID NO: 282504 - RNA, 19 nt, Artificial Sequence
  Description of Artificial Sequence: Synthetic oligonucleotide
ucugauaccaugccagcuu

SEQ ID NO: 282505 - RNA, 19 nt, Artificial Sequence
  Description of Artificial Sequence: Synthetic oligonucleotide
aagccuagacauaggcccc

SEQ ID NO: 282506 - RNA, 19 nt, Artificial Sequence
  Description of Artificial Sequence: Synthetic oligonucleotide
auaguuagacuugcuguuc

SEQ ID NO: 282507 - RNA, 19 nt, Artificial Sequence
  Description of Artificial Sequence: Synthetic oligonucleotide
cuguagacgagagaagagc

SEQ ID NO: 282508 - RNA, 19 nt, Artificial Sequence
  Description of Artificial Sequence: Synthetic oligonucleotide
uuguagaagugccaaguuu

SEQ ID NO: 282509 - RNA, 19 nt, Artificial Sequence
  Description of Artificial Sequence: Synthetic oligonucleotide
acgggugauacgcuggaag

SEQ ID NO: 282510 - RNA, 19 nt, Artificial Sequence
  Description of Artificial Sequence: Synthetic oligonucleotide
uguugcgaaccacagggau

SEQ ID NO: 282511 - RNA, 19 nt, Artificial Sequence
  Description of Artificial Sequence: Synthetic oligonucleotide
auccgccuucucuagggcc

SEQ ID NO: 282512 - RNA, 19 nt, Artificial Sequence
  Description of Artificial Sequence: Synthetic oligonucleotide
uccaccgaagcuuuucacu

SEQ ID NO: 282513 - RNA, 19 nt, Artificial Sequence
  Description of Artificial Sequence: Synthetic oligonucleotide
uuuguagaagugccaaguu

SEQ ID NO: 282514 - RNA, 19 nt, Artificial Sequence
  Description of Artificial Sequence: Synthetic oligonucleotide
caaucagcucaaauuuggc

SEQ ID NO: 282515 - RNA, 19 nt, Artificial Sequence
  Description of Artificial Sequence: Synthetic oligonucleotide
aaugagcgggaaaauuuug

SEQ ID NO: 282516 - RNA, 19 nt, Artificial Sequence
  Description of Artificial Sequence: Synthetic oligonucleotide
uuuaccggcaggucucuga

SEQ ID NO: 282517 - RNA, 19 nt, Artificial Sequence
  Description of Artificial Sequence: Synthetic oligonucleotide
gaaaugauccacagcuaug

SEQ ID NO: 282518 - RNA, 19 nt, Artificial Sequence
  Description of Artificial Sequence: Synthetic oligonucleotide
cauuguuguuacagucucg

SEQ ID NO: 282519 - RNA, 19 nt, Artificial Sequence
  Description of Artificial Sequence: Synthetic oligonucleotide
ugcuguugcgaaccacagg

SEQ ID NO: 282520 - RNA, 19 nt, Artificial Sequence
  Description of Artificial Sequence: Synthetic oligonucleotide
acacuucuccccucgaaug

SEQ ID NO: 282521 - RNA, 19 nt, Artificial Sequence
  Description of Artificial Sequence: Synthetic oligonucleotide
cacaaucagcucaaauuug

SEQ ID NO: 282522 - RNA, 19 nt, Artificial Sequence
  Description of Artificial Sequence: Synthetic oligonucleotide
gcugacaucgcgcacgucc

SEQ ID NO: 282523 - RNA, 19 nt, Artificial Sequence
  Description of Artificial Sequence: Synthetic oligonucleotide
agaggaauucagcuugggu

SEQ ID NO: 282524 - RNA, 19 nt, Artificial Sequence
  Description of Artificial Sequence: Synthetic oligonucleotide
uagacugcgaagguaagau

SEQ ID NO: 282525 - RNA, 19 nt, Artificial Sequence
  Description of Artificial Sequence: Synthetic oligonucleotide
cacauugccaccgggaaac

SEQ ID NO: 282526 - RNA, 19 nt, Artificial Sequence
  Description of Artificial Sequence: Synthetic oligonucleotide
aagacgggugauacgcugg

SEQ ID NO: 282527 - RNA, 19 nt, Artificial Sequence
  Description of Artificial Sequence: Synthetic oligonucleotide
agguccguccagcacagag

SEQ ID NO: 282528 - RNA, 19 nt, Artificial Sequence
  Description of Artificial Sequence: Synthetic oligonucleotide
uagacgagagaagagccac

SEQ ID NO: 282529 - RNA, 19 nt, Artificial Sequence
  Description of Artificial Sequence: Synthetic oligonucleotide
gaauccagugugaagucac

SEQ ID NO: 282530 - RNA, 19 nt, Artificial Sequence
  Description of Artificial Sequence: Synthetic oligonucleotide
aggcagguagacucggcgg

SEQ ID NO: 282531 - RNA, 19 nt, Artificial Sequence
  Description of Artificial Sequence: Synthetic oligonucleotide
aagaggaauucagcuuggg

SEQ ID NO: 282532 - RNA, 19 nt, Artificial Sequence
  Description of Artificial Sequence: Synthetic oligonucleotide
gaaaggaacguggugcuga

SEQ ID NO: 282533 - RNA, 19 nt, Artificial Sequence
  Description of Artificial Sequence: Synthetic oligonucleotide
guuacagucucggaucagc

SEQ ID NO: 282534 - RNA, 19 nt, Artificial Sequence
  Description of Artificial Sequence: Synthetic oligonucleotide
uggggaaucauagcauuca

SEQ ID NO: 282535 - RNA, 19 nt, Artificial Sequence
  Description of Artificial Sequence: Synthetic oligonucleotide
aagguuccgugcacggacc

SEQ ID NO: 282536 - RNA, 19 nt, Artificial Sequence
  Description of Artificial Sequence: Synthetic oligonucleotide
cucuguucucacugggucc

SEQ ID NO: 282537 - RNA, 19 nt, Artificial Sequence
  Description of Artificial Sequence: Synthetic oligonucleotide
ucaagcaaguccagcuccu

SEQ ID NO: 282538 - RNA, 19 nt, Artificial Sequence
  Description of Artificial Sequence: Synthetic oligonucleotide
gagcgagggacugagcuag

SEQ ID NO: 282539 - RNA, 19 nt, Artificial Sequence
  Description of Artificial Sequence: Synthetic oligonucleotide
aaaugagcgggaaaauuuu

SEQ ID NO: 282540 - RNA, 19 nt, Artificial Sequence
  Description of Artificial Sequence: Synthetic oligonucleotide
cacuacaacccuccugagg

SEQ ID NO: 282541 - RNA, 19 nt, Artificial Sequence
  Description of Artificial Sequence: Synthetic oligonucleotide
ugcgaagguaagaugccuc

SEQ ID NO: 282542 - RNA, 19 nt, Artificial Sequence
  Description of Artificial Sequence: Synthetic oligonucleotide
uuaagacgggugauacgcu

SEQ ID NO: 282543 - RNA, 19 nt, Artificial Sequence
  Description of Artificial Sequence: Synthetic oligonucleotide
caucugagagucucacacc

SEQ ID NO: 282544 - RNA, 19 nt, Artificial Sequence
  Description of Artificial Sequence: Synthetic oligonucleotide
uggcaguacaagccuagac

SEQ ID NO: 282545 - RNA, 19 nt, Artificial Sequence
  Description of Artificial Sequence: Synthetic oligonucleotide
uuagacugcgaagguaaga

SEQ ID NO: 282546 - RNA, 19 nt, Artificial Sequence
  Description of Artificial Sequence: Synthetic oligonucleotide
agcccugacucaucuuuac

SEQ ID NO: 282547 - RNA, 19 nt, Artificial Sequence
  Description of Artificial Sequence: Synthetic oligonucleotide
guuacuguucauuaggcuu

SEQ ID NO: 282548 - RNA, 19 nt, Artificial Sequence
  Description of Artificial Sequence: Synthetic oligonucleotide
aucuuuaccggcaggucuc

SEQ ID NO: 282549 - RNA, 19 nt, Artificial Sequence
  Description of Artificial Sequence: Synthetic oligonucleotide
aggucggaaaggaacgugg

SEQ ID NO: 282550 - RNA, 19 nt, Artificial Sequence
  Description of Artificial Sequence: Synthetic oligonucleotide
gacgagagaagagccacug

SEQ ID NO: 282551 - RNA, 19 nt, Artificial Sequence
  Description of Artificial Sequence: Synthetic oligonucleotide
uccaggaaugcuuguuugu

SEQ ID NO: 282552 - RNA, 19 nt, Artificial Sequence
  Description of Artificial Sequence: Synthetic oligonucleotide
ggacuuagaagguuuguca

SEQ ID NO: 282553 - RNA, 19 nt, Artificial Sequence
  Description of Artificial Sequence: Synthetic oligonucleotide
ccaucugagagucucacac

SEQ ID NO: 282554 - RNA, 19 nt, Artificial Sequence
  Description of Artificial Sequence: Synthetic oligonucleotide
ucgaauggaggagaaugga

SEQ ID NO: 282555 - RNA, 19 nt, Artificial Sequence
  Description of Artificial Sequence: Synthetic oligonucleotide
uacaccuacuggugggagc

SEQ ID NO: 282556 - RNA, 19 nt, Artificial Sequence
  Description of Artificial Sequence: Synthetic oligonucleotide
auaggagucugaggggcac

SEQ ID NO: 282557 - RNA, 19 nt, Artificial Sequence
  Description of Artificial Sequence: Synthetic oligonucleotide
acgagagaagagccacugg

SEQ ID NO: 282558 - RNA, 19 nt, Artificial Sequence
  Description of Artificial Sequence: Synthetic oligonucleotide
gacacgaugggccuccuua

SEQ ID NO: 282559 - RNA, 19 nt, Artificial Sequence
  Description of Artificial Sequence: Synthetic oligonucleotide
cuugugaggcccgugcagc

SEQ ID NO: 282560 - RNA, 19 nt, Artificial Sequence
  Description of Artificial Sequence: Synthetic oligonucleotide
uuguucucgaaguuuucuu

SEQ ID NO: 282561 - RNA, 19 nt, Artificial Sequence
  Description of Artificial Sequence: Synthetic oligonucleotide
cauucaagcaaguccagcu

SEQ ID NO: 282562 - RNA, 19 nt, Artificial Sequence
  Description of Artificial Sequence: Synthetic oligonucleotide
agguaagaugccucugaca

SEQ ID NO: 282563 - RNA, 19 nt, Artificial Sequence
  Description of Artificial Sequence: Synthetic oligonucleotide
gcauggugugccuuugugg

SEQ ID NO: 282564 - RNA, 19 nt, Artificial Sequence
  Description of Artificial Sequence: Synthetic oligonucleotide
ccaaguuuauuagagugag

SEQ ID NO: 282565 - RNA, 19 nt, Artificial Sequence
  Description of Artificial Sequence: Synthetic oligonucleotide
ucggggucgggacagcaac

SEQ ID NO: 282566 - RNA, 19 nt, Artificial Sequence
  Description of Artificial Sequence: Synthetic oligonucleotide
agcacagugcuguugcgaa

SEQ ID NO: 282567 - RNA, 19 nt, Artificial Sequence
  Description of Artificial Sequence: Synthetic oligonucleotide
agacacaagggaggucacc

SEQ ID NO: 282568 - RNA, 19 nt, Artificial Sequence
  Description of Artificial Sequence: Synthetic oligonucleotide
cuugacacgaugggccucc

SEQ ID NO: 282569 - RNA, 19 nt, Artificial Sequence
  Description of Artificial Sequence: Synthetic oligonucleotide
ucucgcggggcuuguaggc

SEQ ID NO: 282570 - RNA, 19 nt, Artificial Sequence
  Description of Artificial Sequence: Synthetic oligonucleotide
cugagagucucacacccuc

SEQ ID NO: 282571 - RNA, 19 nt, Artificial Sequence
  Description of Artificial Sequence: Synthetic oligonucleotide
aacguggugcugacaucgc

SEQ ID NO: 282572 - RNA, 19 nt, Artificial Sequence
  Description of Artificial Sequence: Synthetic oligonucleotide
ucugagagucucacacccu

SEQ ID NO: 282573 - RNA, 19 nt, Artificial Sequence
  Description of Artificial Sequence: Synthetic oligonucleotide
gcagucuugacacgauggg

SEQ ID NO: 282574 - RNA, 19 nt, Artificial Sequence
  Description of Artificial Sequence: Synthetic oligonucleotide
uuaccggcaggucucugaa

SEQ ID NO: 282575 - RNA, 19 nt, Artificial Sequence
  Description of Artificial Sequence: Synthetic oligonucleotide
cauagcauucaagcaaguc

SEQ ID NO: 282576 - RNA, 19 nt, Artificial Sequence
  Description of Artificial Sequence: Synthetic oligonucleotide
acguggugcugacaucgcg

SEQ ID NO: 282577 - RNA, 19 nt, Artificial Sequence
  Description of Artificial Sequence: Synthetic oligonucleotide
gaaaugagcgggaaaauuu

SEQ ID NO: 282578 - RNA, 19 nt, Artificial Sequence
  Description of Artificial Sequence: Synthetic oligonucleotide
acugaacuuguggggaauc

SEQ ID NO: 282579 - RNA, 19 nt, Artificial Sequence
  Description of Artificial Sequence: Synthetic oligonucleotide
uggaaaugauccacagcua

SEQ ID NO: 282580 - RNA, 19 nt, Artificial Sequence
  Description of Artificial Sequence: Synthetic oligonucleotide
cuaugaagaaaggauccca

SEQ ID NO: 282581 - RNA, 19 nt, Artificial Sequence
  Description of Artificial Sequence: Synthetic oligonucleotide
acauaggccccaagguccc

SEQ ID NO: 282582 - RNA, 19 nt, Artificial Sequence
  Description of Artificial Sequence: Synthetic oligonucleotide
uugcgaaccacagggauuu

SEQ ID NO: 282583 - RNA, 19 nt, Artificial Sequence
  Description of Artificial Sequence: Synthetic oligonucleotide
uacaacccuccugaggggc

SEQ ID NO: 282584 - RNA, 19 nt, Artificial Sequence
  Description of Artificial Sequence: Synthetic oligonucleotide
ccugacucaucuuuaccgg

SEQ ID NO: 282585 - RNA, 19 nt, Artificial Sequence
  Description of Artificial Sequence: Synthetic oligonucleotide
ucauagcauucaagcaagu

SEQ ID NO: 282586 - RNA, 19 nt, Artificial Sequence
  Description of Artificial Sequence: Synthetic oligonucleotide
auauucccuaccaugcaca

SEQ ID NO: 282587 - RNA, 19 nt, Artificial Sequence
  Description of Artificial Sequence: Synthetic oligonucleotide
acuggagcgagggacugag

SEQ ID NO: 282588 - RNA, 19 nt, Artificial Sequence
  Description of Artificial Sequence: Synthetic oligonucleotide
ggcaugauucaaaacaaca

SEQ ID NO: 282589 - RNA, 19 nt, Artificial Sequence
  Description of Artificial Sequence: Synthetic oligonucleotide
agacagucauugaagagau

SEQ ID NO: 282590 - RNA, 19 nt, Artificial Sequence
  Description of Artificial Sequence: Synthetic oligonucleotide
gagggacugagcuaguccu

SEQ ID NO: 282591 - RNA, 19 nt, Artificial Sequence
  Description of Artificial Sequence: Synthetic oligonucleotide
gcuauguuuagacugcgaa

SEQ ID NO: 282592 - RNA, 19 nt, Artificial Sequence
  Description of Artificial Sequence: Synthetic oligonucleotide
ugucuagucgcugcuggcu

SEQ ID NO: 282593 - RNA, 19 nt, Artificial Sequence
  Description of Artificial Sequence: Synthetic oligonucleotide
gacuuagaagguuugucau

SEQ ID NO: 282594 - RNA, 19 nt, Artificial Sequence
  Description of Artificial Sequence: Synthetic oligonucleotide
uuguuguuacagucucgga

SEQ ID NO: 282595 - RNA, 19 nt, Artificial Sequence
  Description of Artificial Sequence: Synthetic oligonucleotide
uagggccaacucaucauuc

SEQ ID NO: 282596 - RNA, 19 nt, Artificial Sequence
  Description of Artificial Sequence: Synthetic oligonucleotide
acgcuggaagggcaguauc

SEQ ID NO: 282597 - RNA, 19 nt, Artificial Sequence
  Description of Artificial Sequence: Synthetic oligonucleotide
ugcacggaccucuggauuu

SEQ ID NO: 282598 - RNA, 19 nt, Artificial Sequence
  Description of Artificial Sequence: Synthetic oligonucleotide
uuaagguuccgugcacgga

SEQ ID NO: 282599 - RNA, 19 nt, Artificial Sequence
  Description of Artificial Sequence: Synthetic oligonucleotide
gaacucuacuuguuggaua

SEQ ID NO: 282600 - RNA, 19 nt, Artificial Sequence
  Description of Artificial Sequence: Synthetic oligonucleotide
aaggugcgcuccugauagg

SEQ ID NO: 282601 - RNA, 19 nt, Artificial Sequence
  Description of Artificial Sequence: Synthetic oligonucleotide
cagcuuugcauccgcacug

SEQ ID NO: 282602 - RNA, 19 nt, Artificial Sequence
  Description of Artificial Sequence: Synthetic oligonucleotide
acucggcggaauucugggg

SEQ ID NO: 282603 - RNA, 19 nt, Artificial Sequence
  Description of Artificial Sequence: Synthetic oligonucleotide
acucaucauucucgcgggg

SEQ ID NO: 282604 - RNA, 19 nt, Artificial Sequence
  Description of Artificial Sequence: Synthetic oligonucleotide
ucuagucgcugcuggcucu

SEQ ID NO: 282605 - RNA, 19 nt, Artificial Sequence
  Description of Artificial Sequence: Synthetic oligonucleotide
cagucuugacacgaugggc

SEQ ID NO: 282606 - RNA, 19 nt, Artificial Sequence
  Description of Artificial Sequence: Synthetic oligonucleotide
cuacaacccuccugagggg

SEQ ID NO: 282607 - RNA, 19 nt, Artificial Sequence
  Description of Artificial Sequence: Synthetic oligonucleotide
uccccauuaaagcccgcuc

SEQ ID NO: 282608 - RNA, 19 nt, Artificial Sequence
  Description of Artificial Sequence: Synthetic oligonucleotide
cuguacuccugauaaagua

SEQ ID NO: 282609 - RNA, 19 nt, Artificial Sequence
  Description of Artificial Sequence: Synthetic oligonucleotide
acgaguggucaguuuccuc

SEQ ID NO: 282610 - RNA, 19 nt, Artificial Sequence
  Description of Artificial Sequence: Synthetic oligonucleotide
ugccguauggggccagcug

SEQ ID NO: 282611 - RNA, 19 nt, Artificial Sequence
  Description of Artificial Sequence: Synthetic oligonucleotide
accucacgugcuaaucccc

SEQ ID NO: 282612 - RNA, 19 nt, Artificial Sequence
  Description of Artificial Sequence: Synthetic oligonucleotide
guuucuguggccaggcauc

SEQ ID NO: 282613 - RNA, 19 nt, Artificial Sequence
  Description of Artificial Sequence: Synthetic oligonucleotide
cuccugaaaagauccucuc

SEQ ID NO: 282614 - RNA, 19 nt, Artificial Sequence
  Description of Artificial Sequence: Synthetic oligonucleotide
ggccaacucaucauucucg

SEQ ID NO: 282615 - RNA, 19 nt, Artificial Sequence
  Description of Artificial Sequence: Synthetic oligonucleotide
uaggucggaaaggaacgug

SEQ ID NO: 282616 - RNA, 19 nt, Artificial Sequence
  Description of Artificial Sequence: Synthetic oligonucleotide
ggugauacgcuggaagggc

SEQ ID NO: 282617 - RNA, 19 nt, Artificial Sequence
  Description of Artificial Sequence: Synthetic oligonucleotide
agugcggaagaggaauuca

SEQ ID NO: 282618 - RNA, 19 nt, Artificial Sequence
  Description of Artificial Sequence: Synthetic oligonucleotide
cagccaucgagauugggaa

SEQ ID NO: 282619 - RNA, 19 nt, Artificial Sequence
  Description of Artificial Sequence: Synthetic oligonucleotide
caccgggaaacaaagaccu

SEQ ID NO: 282620 - RNA, 19 nt, Artificial Sequence
  Description of Artificial Sequence: Synthetic oligonucleotide
agggauuuccugccagaga

SEQ ID NO: 282621 - RNA, 19 nt, Artificial Sequence
  Description of Artificial Sequence: Synthetic oligonucleotide
agacucggcggaauucugg

SEQ ID NO: 282622 - RNA, 19 nt, Artificial Sequence
  Description of Artificial Sequence: Synthetic oligonucleotide
ggcaguaucaggaaggacu

SEQ ID NO: 282623 - RNA, 19 nt, Artificial Sequence
  Description of Artificial Sequence: Synthetic oligonucleotide
ugacacucucuguucucac

SEQ ID NO: 282624 - RNA, 19 nt, Artificial Sequence
  Description of Artificial Sequence: Synthetic oligonucleotide
acuggguccgugccguaug

SEQ ID NO: 282625 - RNA, 19 nt, Artificial Sequence
  Description of Artificial Sequence: Synthetic oligonucleotide
uuuggaaggugcgcuccug

SEQ ID NO: 282626 - RNA, 19 nt, Artificial Sequence
  Description of Artificial Sequence: Synthetic oligonucleotide
ccucgaauggaggagaaug

SEQ ID NO: 282627 - RNA, 19 nt, Artificial Sequence
  Description of Artificial Sequence: Synthetic oligonucleotide
gguccaucugauaccaugc

SEQ ID NO: 282628 - RNA, 19 nt, Artificial Sequence
  Description of Artificial Sequence: Synthetic oligonucleotide
uccgugcacggaccucugg

SEQ ID NO: 282629 - RNA, 19 nt, Artificial Sequence
  Description of Artificial Sequence: Synthetic oligonucleotide
uguuacagucucggaucag

SEQ ID NO: 282630 - RNA, 19 nt, Artificial Sequence
  Description of Artificial Sequence: Synthetic oligonucleotide
uuugagucucagugcggaa

SEQ ID NO: 282631 - RNA, 19 nt, Artificial Sequence
  Description of Artificial Sequence: Synthetic oligonucleotide
agcuuugcauccgcacugg

SEQ ID NO: 282632 - RNA, 19 nt, Artificial Sequence
  Description of Artificial Sequence: Synthetic oligonucleotide
guaagaugccucugacaca

SEQ ID NO: 282633 - RNA, 19 nt, Artificial Sequence
  Description of Artificial Sequence: Synthetic oligonucleotide
aguacuggagcgagggacu

SEQ ID NO: 282634 - RNA, 19 nt, Artificial Sequence
  Description of Artificial Sequence: Synthetic oligonucleotide
ucagugcggaagaggaauu

SEQ ID NO: 282635 - RNA, 19 nt, Artificial Sequence
  Description of Artificial Sequence: Synthetic oligonucleotide
ggucgggacagcaacagac

SEQ ID NO: 282636 - RNA, 19 nt, Artificial Sequence
  Description of Artificial Sequence: Synthetic oligonucleotide
cucuagggccaacucauca

SEQ ID NO: 282637 - RNA, 19 nt, Artificial Sequence
  Description of Artificial Sequence: Synthetic oligonucleotide
uaggcucggaggcacugaa

SEQ ID NO: 282638 - RNA, 19 nt, Artificial Sequence
  Description of Artificial Sequence: Synthetic oligonucleotide
ucucagugcggaagaggaa

SEQ ID NO: 282639 - RNA, 19 nt, Artificial Sequence
  Description of Artificial Sequence: Synthetic oligonucleotide
uucagcuugggugcccugu

SEQ ID NO: 282640 - RNA, 19 nt, Artificial Sequence
  Description of Artificial Sequence: Synthetic oligonucleotide
ugcuaaagcugaccuccau

SEQ ID NO: 282641 - RNA, 19 nt, Artificial Sequence
  Description of Artificial Sequence: Synthetic oligonucleotide
guccgugccguauggggcc

SEQ ID NO: 282642 - RNA, 19 nt, Artificial Sequence
  Description of Artificial Sequence: Synthetic oligonucleotide
aucgcgcacguccuguaga

SEQ ID NO: 282643 - RNA, 19 nt, Artificial Sequence
  Description of Artificial Sequence: Synthetic oligonucleotide
aaguuccgggauccaggga

SEQ ID NO: 282644 - RNA, 19 nt, Artificial Sequence
  Description of Artificial Sequence: Synthetic oligonucleotide
ucacgugcuaauccccauu

SEQ ID NO: 282645 - RNA, 19 nt, Artificial Sequence
  Description of Artificial Sequence: Synthetic oligonucleotide
cagacgcugcagauaggag

SEQ ID NO: 282646 - RNA, 19 nt, Artificial Sequence
  Description of Artificial Sequence: Synthetic oligonucleotide
ugcauccgcacuggggcag

SEQ ID NO: 282647 - RNA, 19 nt, Artificial Sequence
  Description of Artificial Sequence: Synthetic oligonucleotide
ucgcgcacguccuguagac

SEQ ID NO: 282648 - RNA, 19 nt, Artificial Sequence
  Description of Artificial Sequence: Synthetic oligonucleotide
uacagucucggaucagcuu

SEQ ID NO: 282649 - RNA, 19 nt, Artificial Sequence
  Description of Artificial Sequence: Synthetic oligonucleotide
guacaagccuagacauagg

SEQ ID NO: 282650 - RNA, 19 nt, Artificial Sequence
  Description of Artificial Sequence: Synthetic oligonucleotide
gaacuuguggggaaucaua

SEQ ID NO: 282651 - RNA, 19 nt, Artificial Sequence
  Description of Artificial Sequence: Synthetic oligonucleotide
caggcugcguucucuucag

SEQ ID NO: 282652 - RNA, 19 nt, Artificial Sequence
  Description of Artificial Sequence: Synthetic oligonucleotide
agacgggugauacgcugga

SEQ ID NO: 282653 - RNA, 19 nt, Artificial Sequence
  Description of Artificial Sequence: Synthetic oligonucleotide
ccuguagacgagagaagag

SEQ ID NO: 282654 - RNA, 19 nt, Artificial Sequence
  Description of Artificial Sequence: Synthetic oligonucleotide
gggcccaugcaccaaggag

SEQ ID NO: 282655 - RNA, 19 nt, Artificial Sequence
  Description of Artificial Sequence: Synthetic oligonucleotide
cauuaggcuuuggaaggug

SEQ ID NO: 282656 - RNA, 19 nt, Artificial Sequence
  Description of Artificial Sequence: Synthetic oligonucleotide
uccgggauccagggagugg

SEQ ID NO: 282657 - RNA, 19 nt, Artificial Sequence
  Description of Artificial Sequence: Synthetic oligonucleotide
agaccucucggaaacugcu

SEQ ID NO: 282658 - RNA, 19 nt, Artificial Sequence
  Description of Artificial Sequence: Synthetic oligonucleotide
gccacccucacauugccac

SEQ ID NO: 282659 - RNA, 19 nt, Artificial Sequence
  Description of Artificial Sequence: Synthetic oligonucleotide
ggaaaugauccacagcuau

SEQ ID NO: 282660 - RNA, 19 nt, Artificial Sequence
  Description of Artificial Sequence: Synthetic oligonucleotide
cuggggcaugauucaaaac

SEQ ID NO: 282661 - RNA, 19 nt, Artificial Sequence
  Description of Artificial Sequence: Synthetic oligonucleotide
cuggguccgugccguaugg

SEQ ID NO: 282662 - RNA, 19 nt, Artificial Sequence
  Description of Artificial Sequence: Synthetic oligonucleotide
cugagcuaguccuugggcu

SEQ ID NO: 282663 - RNA, 19 nt, Artificial Sequence
  Description of Artificial Sequence: Synthetic oligonucleotide
guagacgagagaagagcca

SEQ ID NO: 282664 - RNA, 19 nt, Artificial Sequence
  Description of Artificial Sequence: Synthetic oligonucleotide
cacgaugggccuccuuaag

SEQ ID NO: 282665 - RNA, 19 nt, Artificial Sequence
  Description of Artificial Sequence: Synthetic oligonucleotide
caugggucauggagagcag

SEQ ID NO: 282666 - RNA, 19 nt, Artificial Sequence
  Description of Artificial Sequence: Synthetic oligonucleotide
uccccucgaauggaggaga

SEQ ID NO: 282667 - RNA, 19 nt, Artificial Sequence
  Description of Artificial Sequence: Synthetic oligonucleotide
gucuagucgcugcuggcuc

SEQ ID NO: 282668 - RNA, 19 nt, Artificial Sequence
  Description of Artificial Sequence: Synthetic oligonucleotide
ggaggagaauggagcaugg

SEQ ID NO: 282669 - RNA, 19 nt, Artificial Sequence
  Description of Artificial Sequence: Synthetic oligonucleotide
cacugccuuucgccgaugc

SEQ ID NO: 282670 - RNA, 19 nt, Artificial Sequence
  Description of Artificial Sequence: Synthetic oligonucleotide
ggcauggugugccuuugug

SEQ ID NO: 282671 - RNA, 19 nt, Artificial Sequence
  Description of Artificial Sequence: Synthetic oligonucleotide
acucuacuuguuggauagg

SEQ ID NO: 282672 - RNA, 19 nt, Artificial Sequence
  Description of Artificial Sequence: Synthetic oligonucleotide
ggacugagcuaguccuugg

SEQ ID NO: 282673 - RNA, 19 nt, Artificial Sequence
  Description of Artificial Sequence: Synthetic oligonucleotide
cauccgccuucucuagggc

SEQ ID NO: 282674 - RNA, 19 nt, Artificial Sequence
  Description of Artificial Sequence: Synthetic oligonucleotide
acccucacauugccaccgg

SEQ ID NO: 282675 - RNA, 19 nt, Artificial Sequence
  Description of Artificial Sequence: Synthetic oligonucleotide
cauuucacacuucuccccu

SEQ ID NO: 282676 - RNA, 19 nt, Artificial Sequence
  Description of Artificial Sequence: Synthetic oligonucleotide
auccccauuaaagcccgcu

SEQ ID NO: 282677 - RNA, 19 nt, Artificial Sequence
  Description of Artificial Sequence: Synthetic oligonucleotide
uugcuccccaucugagagu

SEQ ID NO: 282678 - RNA, 19 nt, Artificial Sequence
  Description of Artificial Sequence: Synthetic oligonucleotide
gaccucucggaaacugcug

SEQ ID NO: 282679 - RNA, 19 nt, Artificial Sequence
  Description of Artificial Sequence: Synthetic oligonucleotide
ggcccaugcaccaaggaga

SEQ ID NO: 282680 - RNA, 19 nt, Artificial Sequence
  Description of Artificial Sequence: Synthetic oligonucleotide
ucuuuaccggcaggucucu

SEQ ID NO: 282681 - RNA, 19 nt, Artificial Sequence
  Description of Artificial Sequence: Synthetic oligonucleotide
ccaccucacgugcuaaucc

SEQ ID NO: 282682 - RNA, 19 nt, Artificial Sequence
  Description of Artificial Sequence: Synthetic oligonucleotide
guccuguagacgagagaag

SEQ ID NO: 282683 - RNA, 19 nt, Artificial Sequence
  Description of Artificial Sequence: Synthetic oligonucleotide
gaaaugaacucuacuuguu

SEQ ID NO: 282684 - RNA, 19 nt, Artificial Sequence
  Description of Artificial Sequence: Synthetic oligonucleotide
caucgcgcacguccuguag

SEQ ID NO: 282685 - RNA, 19 nt, Artificial Sequence
  Description of Artificial Sequence: Synthetic oligonucleotide
ccuuaagguuccgugcacg

SEQ ID NO: 282686 - RNA, 19 nt, Artificial Sequence
  Description of Artificial Sequence: Synthetic oligonucleotide
gggacuuagaagguuuguc

SEQ ID NO: 282687 - RNA, 19 nt, Artificial Sequence
  Description of Artificial Sequence: Synthetic oligonucleotide
caucgagauugggaaauga

SEQ ID NO: 282688 - RNA, 19 nt, Artificial Sequence
  Description of Artificial Sequence: Synthetic oligonucleotide
agccaucgagauugggaaa

SEQ ID NO: 282689 - RNA, 19 nt, Artificial Sequence
  Description of Artificial Sequence: Synthetic oligonucleotide
agguagacucggcggaauu

SEQ ID NO: 282690 - RNA, 19 nt, Artificial Sequence
  Description of Artificial Sequence: Synthetic oligonucleotide
agguuccgugcacggaccu

SEQ ID NO: 282691 - RNA, 19 nt, Artificial Sequence
  Description of Artificial Sequence: Synthetic oligonucleotide
caugugucacuacaacccu

SEQ ID NO: 282692 - RNA, 19 nt, Artificial Sequence
  Description of Artificial Sequence: Synthetic oligonucleotide
uuccgugcacggaccucug

SEQ ID NO: 282693 - RNA, 19 nt, Artificial Sequence
  Description of Artificial Sequence: Synthetic oligonucleotide
ccagccaucgagauuggga

SEQ ID NO: 282694 - RNA, 19 nt, Artificial Sequence
  Description of Artificial Sequence: Synthetic oligonucleotide
acgugcuaauccccauuaa

SEQ ID NO: 282695 - RNA, 19 nt, Artificial Sequence
  Description of Artificial Sequence: Synthetic oligonucleotide
agaagacguuguucucgaa

SEQ ID NO: 282696 - RNA, 19 nt, Artificial Sequence
  Description of Artificial Sequence: Synthetic oligonucleotide
cugauaggucugguuggug

SEQ ID NO: 282697 - RNA, 19 nt, Artificial Sequence
  Description of Artificial Sequence: Synthetic oligonucleotide
guacuggagcgagggacug

SEQ ID NO: 282698 - RNA, 19 nt, Artificial Sequence
  Description of Artificial Sequence: Synthetic oligonucleotide
guggcccggaguugggcug

SEQ ID NO: 282699 - RNA, 19 nt, Artificial Sequence
  Description of Artificial Sequence: Synthetic oligonucleotide
cacgugcuaauccccauua

SEQ ID NO: 282700 - RNA, 19 nt, Artificial Sequence
  Description of Artificial Sequence: Synthetic oligonucleotide
uuccgggauccagggagug

SEQ ID NO: 282701 - RNA, 19 nt, Artificial Sequence
  Description of Artificial Sequence: Synthetic oligonucleotide
agcuauguuuagacugcga

SEQ ID NO: 282702 - RNA, 19 nt, Artificial Sequence
  Description of Artificial Sequence: Synthetic oligonucleotide
gugauacgcuggaagggca

SEQ ID NO: 282703 - RNA, 19 nt, Artificial Sequence
  Description of Artificial Sequence: Synthetic oligonucleotide
accagccaucgagauuggg

SEQ ID NO: 282704 - RNA, 19 nt, Artificial Sequence
  Description of Artificial Sequence: Synthetic oligonucleotide
cccggaguugggcugaaug

SEQ ID NO: 282705 - RNA, 19 nt, Artificial Sequence
  Description of Artificial Sequence: Synthetic oligonucleotide
gcgcacguccuguagacga

SEQ ID NO: 282706 - RNA, 19 nt, Artificial Sequence
  Description of Artificial Sequence: Synthetic oligonucleotide
gagaauaguuagacuugcu

SEQ ID NO: 282707 - RNA, 19 nt, Artificial Sequence
  Description of Artificial Sequence: Synthetic oligonucleotide
ggacgaguggucaguuucc

SEQ ID NO: 282708 - RNA, 19 nt, Artificial Sequence
  Description of Artificial Sequence: Synthetic oligonucleotide
gguccgugccguauggggc

SEQ ID NO: 282709 - RNA, 19 nt, Artificial Sequence
  Description of Artificial Sequence: Synthetic oligonucleotide
ucgcggggcuuguaggcuc

SEQ ID NO: 282710 - RNA, 19 nt, Artificial Sequence
  Description of Artificial Sequence: Synthetic oligonucleotide
accgggaaacaaagaccuc

SEQ ID NO: 282711 - RNA, 19 nt, Artificial Sequence
  Description of Artificial Sequence: Synthetic oligonucleotide
cagugcggaagaggaauuc

SEQ ID NO: 282712 - RNA, 19 nt, Artificial Sequence
  Description of Artificial Sequence: Synthetic oligonucleotide
gggacugagcuaguccuug

SEQ ID NO: 282713 - RNA, 19 nt, Artificial Sequence
  Description of Artificial Sequence: Synthetic oligonucleotide
gguagacucggcggaauuc

SEQ ID NO: 282714 - RNA, 19 nt, Artificial Sequence
  Description of Artificial Sequence: Synthetic oligonucleotide
ggcugcguucucuucagaa

SEQ ID NO: 282715 - RNA, 19 nt, Artificial Sequence
  Description of Artificial Sequence: Synthetic oligonucleotide
cuguugcgaaccacaggga

SEQ ID NO: 282716 - RNA, 19 nt, Artificial Sequence
  Description of Artificial Sequence: Synthetic oligonucleotide
cccuaccaugcacacaaug

SEQ ID NO: 282717 - RNA, 19 nt, Artificial Sequence
  Description of Artificial Sequence: Synthetic oligonucleotide
agacgagagaagagccacu

SEQ ID NO: 282718 - RNA, 19 nt, Artificial Sequence
  Description of Artificial Sequence: Synthetic oligonucleotide
cgagggacugagcuagucc

SEQ ID NO: 282719 - RNA, 19 nt, Artificial Sequence
  Description of Artificial Sequence: Synthetic oligonucleotide
cugagauccaccgaagcuu

SEQ ID NO: 282720 - RNA, 19 nt, Artificial Sequence
  Description of Artificial Sequence: Synthetic oligonucleotide
cuagucgcugcuggcucug

SEQ ID NO: 282721 - RNA, 19 nt, Artificial Sequence
  Description of Artificial Sequence: Synthetic oligonucleotide
cucagugcggaagaggaau

SEQ ID NO: 282722 - RNA, 19 nt, Artificial Sequence
  Description of Artificial Sequence: Synthetic oligonucleotide
caacuuaagacgggugaua

SEQ ID NO: 282723 - RNA, 19 nt, Artificial Sequence
  Description of Artificial Sequence: Synthetic oligonucleotide
gggcaugauucaaaacaac

SEQ ID NO: 282724 - RNA, 19 nt, Artificial Sequence
  Description of Artificial Sequence: Synthetic oligonucleotide
cuuggaaggagaagacguu

SEQ ID NO: 282725 - RNA, 19 nt, Artificial Sequence
  Description of Artificial Sequence: Synthetic oligonucleotide
agccuagacauaggcccca

SEQ ID NO: 282726 - RNA, 19 nt, Artificial Sequence
  Description of Artificial Sequence: Synthetic oligonucleotide
guuugugagcucagaagau

SEQ ID NO: 282727 - RNA, 19 nt, Artificial Sequence
  Description of Artificial Sequence: Synthetic oligonucleotide
ccgggaaacaaagaccuca

SEQ ID NO: 282728 - RNA, 19 nt, Artificial Sequence
  Description of Artificial Sequence: Synthetic oligonucleotide
guuccgugcacggaccucu

SEQ ID NO: 282729 - RNA, 19 nt, Artificial Sequence
  Description of Artificial Sequence: Synthetic oligonucleotide
acaacccuccugaggggcu

SEQ ID NO: 282730 - RNA, 19 nt, Artificial Sequence
  Description of Artificial Sequence: Synthetic oligonucleotide
ggagguccguccagcacag

SEQ ID NO: 282731 - RNA, 19 nt, Artificial Sequence
  Description of Artificial Sequence: Synthetic oligonucleotide
cacugacacucucuguucu

SEQ ID NO: 282732 - RNA, 19 nt, Artificial Sequence
  Description of Artificial Sequence: Synthetic oligonucleotide
cucggaaacugcuguuacu

SEQ ID NO: 282733 - RNA, 19 nt, Artificial Sequence
  Description of Artificial Sequence: Synthetic oligonucleotide
ggccucuacaacagguuuc

SEQ ID NO: 282734 - RNA, 19 nt, Artificial Sequence
  Description of Artificial Sequence: Synthetic oligonucleotide
ccucacauugccaccggga

SEQ ID NO: 282735 - RNA, 19 nt, Artificial Sequence
  Description of Artificial Sequence: Synthetic oligonucleotide
ugacacgaugggccuccuu

SEQ ID NO: 282736 - RNA, 19 nt, Artificial Sequence
  Description of Artificial Sequence: Synthetic oligonucleotide
caccacugccuuucgccga

SEQ ID NO: 282737 - RNA, 19 nt, Artificial Sequence
  Description of Artificial Sequence: Synthetic oligonucleotide
cguccuguagacgagagaa

SEQ ID NO: 282738 - RNA, 19 nt, Artificial Sequence
  Description of Artificial Sequence: Synthetic oligonucleotide
gacaucgcgcacguccugu

SEQ ID NO: 282739 - RNA, 19 nt, Artificial Sequence
  Description of Artificial Sequence: Synthetic oligonucleotide
caacccuccugaggggcug

SEQ ID NO: 282740 - RNA, 19 nt, Artificial Sequence
  Description of Artificial Sequence: Synthetic oligonucleotide
aacccuccugaggggcuga

SEQ ID NO: 282741 - RNA, 19 nt, Artificial Sequence
  Description of Artificial Sequence: Synthetic oligonucleotide
accuacuggugggagccaa

SEQ ID NO: 282742 - RNA, 19 nt, Artificial Sequence
  Description of Artificial Sequence: Synthetic oligonucleotide
ccuuucgccgaugccgggg

SEQ ID NO: 282743 - RNA, 19 nt, Artificial Sequence
  Description of Artificial Sequence: Synthetic oligonucleotide
gcgaagguaagaugccucu

SEQ ID NO: 282744 - RNA, 19 nt, Artificial Sequence
  Description of Artificial Sequence: Synthetic oligonucleotide
cuuuaccggcaggucucug

SEQ ID NO: 282745 - RNA, 19 nt, Artificial Sequence
  Description of Artificial Sequence: Synthetic oligonucleotide
gacgaguggucaguuuccu

SEQ ID NO: 282746 - RNA, 19 nt, Artificial Sequence
  Description of Artificial Sequence: Synthetic oligonucleotide
ggaaaugagcgggaaaauu

SEQ ID NO: 282747 - RNA, 19 nt, Artificial Sequence
  Description of Artificial Sequence: Synthetic oligonucleotide
ucccuaccaugcacacaau

SEQ ID NO: 282748 - RNA, 19 nt, Artificial Sequence
  Description of Artificial Sequence: Synthetic oligonucleotide
gaagagaguccaggugccu

SEQ ID NO: 282749 - RNA, 19 nt, Artificial Sequence
  Description of Artificial Sequence: Synthetic oligonucleotide
ccuagacauaggccccaag

SEQ ID NO: 282750 - RNA, 19 nt, Artificial Sequence
  Description of Artificial Sequence: Synthetic oligonucleotide
cgugcuaauccccauuaaa

SEQ ID NO: 282751 - RNA, 19 nt, Artificial Sequence
  Description of Artificial Sequence: Synthetic oligonucleotide
cagguucaccucccaccuc

SEQ ID NO: 282752 - RNA, 19 nt, Artificial Sequence
  Description of Artificial Sequence: Synthetic oligonucleotide
auccgcacuggggcagcag

SEQ ID NO: 282753 - RNA, 19 nt, Artificial Sequence
  Description of Artificial Sequence: Synthetic oligonucleotide
ggagcgagggacugagcua

SEQ ID NO: 282754 - RNA, 19 nt, Artificial Sequence
  Description of Artificial Sequence: Synthetic oligonucleotide
guugcgaaccacagggauu

SEQ ID NO: 282755 - RNA, 19 nt, Artificial Sequence
  Description of Artificial Sequence: Synthetic oligonucleotide
auaggccccaaggucccuu

SEQ ID NO: 282756 - RNA, 19 nt, Artificial Sequence
  Description of Artificial Sequence: Synthetic oligonucleotide
cccucacauugccaccggg

SEQ ID NO: 282757 - RNA, 19 nt, Artificial Sequence
  Description of Artificial Sequence: Synthetic oligonucleotide
gguggacuggacgaguggu

SEQ ID NO: 282758 - RNA, 19 nt, Artificial Sequence
  Description of Artificial Sequence: Synthetic oligonucleotide
cuggcaguacaagccuaga

SEQ ID NO: 282759 - RNA, 19 nt, Artificial Sequence
  Description of Artificial Sequence: Synthetic oligonucleotide
cauugccaccgggaaacaa

SEQ ID NO: 282760 - RNA, 19 nt, Artificial Sequence
  Description of Artificial Sequence: Synthetic oligonucleotide
ccucacgugcuaaucccca

SEQ ID NO: 282761 - RNA, 19 nt, Artificial Sequence
  Description of Artificial Sequence: Synthetic oligonucleotide
cucacuggguccgugccgu

SEQ ID NO: 282762 - RNA, 19 nt, Artificial Sequence
  Description of Artificial Sequence: Synthetic oligonucleotide
aggcccgugcagcuucauu

SEQ ID NO: 282763 - RNA, 19 nt, Artificial Sequence
  Description of Artificial Sequence: Synthetic oligonucleotide
gaguccccuccaggucccg

SEQ ID NO: 282764 - RNA, 19 nt, Artificial Sequence
  Description of Artificial Sequence: Synthetic oligonucleotide
cuaggucggaaaggaacgu

SEQ ID NO: 282765 - RNA, 19 nt, Artificial Sequence
  Description of Artificial Sequence: Synthetic oligonucleotide
cagucucggaucagcuucu

SEQ ID NO: 282766 - RNA, 19 nt, Artificial Sequence
  Description of Artificial Sequence: Synthetic oligonucleotide
cucggggucgggacagcaa

SEQ ID NO: 282767 - RNA, 19 nt, Artificial Sequence
  Description of Artificial Sequence: Synthetic oligonucleotide
uugacacgaugggccuccu

SEQ ID NO: 282768 - RNA, 19 nt, Artificial Sequence
  Description of Artificial Sequence: Synthetic oligonucleotide
aagaugccucugacacaau

SEQ ID NO: 282769 - RNA, 19 nt, Artificial Sequence
  Description of Artificial Sequence: Synthetic oligonucleotide
gacgggugauacgcuggaa

SEQ ID NO: 282770 - RNA, 19 nt, Artificial Sequence
  Description of Artificial Sequence: Synthetic oligonucleotide
agggacugagcuaguccuu

SEQ ID NO: 282771 - RNA, 19 nt, Artificial Sequence
  Description of Artificial Sequence: Synthetic oligonucleotide
ccaucgagauugggaaaug

SEQ ID NO: 282772 - RNA, 19 nt, Artificial Sequence
  Description of Artificial Sequence: Synthetic oligonucleotide
gccuuucgccgaugccggg

SEQ ID NO: 282773 - RNA, 19 nt, Artificial Sequence
  Description of Artificial Sequence: Synthetic oligonucleotide
ugcgaaccacagggauuuc

SEQ ID NO: 282774 - RNA, 19 nt, Artificial Sequence
  Description of Artificial Sequence: Synthetic oligonucleotide
gugcacggaccucuggauu

SEQ ID NO: 282775 - RNA, 19 nt, Artificial Sequence
  Description of Artificial Sequence: Synthetic oligonucleotide
gcacggaccucuggauuug

SEQ ID NO: 282776 - RNA, 19 nt, Artificial Sequence
  Description of Artificial Sequence: Synthetic oligonucleotide
gggcaguaucaggaaggac

SEQ ID NO: 282777 - RNA, 19 nt, Artificial Sequence
  Description of Artificial Sequence: Synthetic oligonucleotide
cucacgugcuaauccccau

SEQ ID NO: 282778 - RNA, 19 nt, Artificial Sequence
  Description of Artificial Sequence: Synthetic oligonucleotide
cgaagguaagaugccucug

SEQ ID NO: 282779 - RNA, 19 nt, Artificial Sequence
  Description of Artificial Sequence: Synthetic oligonucleotide
ccggaguugggcugaaugu

SEQ ID NO: 282780 - RNA, 19 nt, Artificial Sequence
  Description of Artificial Sequence: Synthetic oligonucleotide
ggucggaaaggaacguggu

SEQ ID NO: 282781 - RNA, 19 nt, Artificial Sequence
  Description of Artificial Sequence: Synthetic oligonucleotide
ggggcccaugcaccaagga

SEQ ID NO: 282782 - RNA, 19 nt, Artificial Sequence
  Description of Artificial Sequence: Synthetic oligonucleotide
ccccauuaaagcccgcucu

SEQ ID NO: 282783 - RNA, 19 nt, Artificial Sequence
  Description of Artificial Sequence: Synthetic oligonucleotide
cgcacguccuguagacgag

SEQ ID NO: 282784 - RNA, 19 nt, Artificial Sequence
  Description of Artificial Sequence: Synthetic oligonucleotide
cccaccucacgugcuaauc

SEQ ID NO: 282785 - RNA, 19 nt, Artificial Sequence
  Description of Artificial Sequence: Synthetic oligonucleotide
guuccgggauccagggagu

SEQ ID NO: 282786 - RNA, 19 nt, Artificial Sequence
  Description of Artificial Sequence: Synthetic oligonucleotide
ccaccgaagcuuuucacuu

SEQ ID NO: 282787 - RNA, 19 nt, Artificial Sequence
  Description of Artificial Sequence: Synthetic oligonucleotide
cccgcucuccagugggcug

SEQ ID NO: 282788 - RNA, 19 nt, Artificial Sequence
  Description of Artificial Sequence: Synthetic oligonucleotide
gguuccgugcacggaccuc

SEQ ID NO: 282789 - RNA, 19 nt, Artificial Sequence
  Description of Artificial Sequence: Synthetic oligonucleotide
ccucuggauuugaaaugaa

SEQ ID NO: 282790 - RNA, 19 nt, Artificial Sequence
  Description of Artificial Sequence: Synthetic oligonucleotide
ugcugacaucgcgcacguc

SEQ ID NO: 282791 - RNA, 19 nt, Artificial Sequence
  Description of Artificial Sequence: Synthetic oligonucleotide
gcacguccuguagacgaga

SEQ ID NO: 282792 - RNA, 19 nt, Artificial Sequence
  Description of Artificial Sequence: Synthetic oligonucleotide
agcgagggacugagcuagu

SEQ ID NO: 282793 - RNA, 19 nt, Artificial Sequence
  Description of Artificial Sequence: Synthetic oligonucleotide
cugcccucucggggucggg

SEQ ID NO: 282794 - RNA, 19 nt, Artificial Sequence
  Description of Artificial Sequence: Synthetic oligonucleotide
gcuccugauaggucugguu

SEQ ID NO: 282795 - RNA, 19 nt, Artificial Sequence
  Description of Artificial Sequence: Synthetic oligonucleotide
ggacaggguggcccggagu

SEQ ID NO: 282796 - RNA, 19 nt, Artificial Sequence
  Description of Artificial Sequence: Synthetic oligonucleotide
cuggacgaguggucaguuu

SEQ ID NO: 282797 - RNA, 19 nt, Artificial Sequence
  Description of Artificial Sequence: Synthetic oligonucleotide
cagcucaaauuuggccucu

SEQ ID NO: 282798 - RNA, 19 nt, Artificial Sequence
  Description of Artificial Sequence: Synthetic oligonucleotide
caccuacuggugggagcca

SEQ ID NO: 282799 - RNA, 19 nt, Artificial Sequence
  Description of Artificial Sequence: Synthetic oligonucleotide
gagguccguccagcacaga

SEQ ID NO: 282800 - RNA, 19 nt, Artificial Sequence
  Description of Artificial Sequence: Synthetic oligonucleotide
cauucucgcggggcuugua

SEQ ID NO: 282801 - RNA, 19 nt, Artificial Sequence
  Description of Artificial Sequence: Synthetic oligonucleotide
cagguagacucggcggaau

SEQ ID NO: 282802 - RNA, 19 nt, Artificial Sequence
  Description of Artificial Sequence: Synthetic oligonucleotide
cgcgcacguccuguagacg

SEQ ID NO: 282803 - RNA, 19 nt, Artificial Sequence
  Description of Artificial Sequence: Synthetic oligonucleotide
gagguccaucugauaccau

SEQ ID NO: 282804 - RNA, 19 nt, Artificial Sequence
  Description of Artificial Sequence: Synthetic oligonucleotide
ccgggauccagggaguggu

SEQ ID NO: 282805 - RNA, 19 nt, Artificial Sequence
  Description of Artificial Sequence: Synthetic oligonucleotide
ccccucgaauggaggagaa

SEQ ID NO: 282806 - RNA, 19 nt, Artificial Sequence
  Description of Artificial Sequence: Synthetic oligonucleotide
gccuagacauaggccccaa

SEQ ID NO: 282807 - RNA, 19 nt, Artificial Sequence
  Description of Artificial Sequence: Synthetic oligonucleotide
cauaggccccaaggucccu

SEQ ID NO: 282808 - RNA, 19 nt, Artificial Sequence
  Description of Artificial Sequence: Synthetic oligonucleotide
ccccaaggucccuuuuccu

SEQ ID NO: 282809 - RNA, 19 nt, Artificial Sequence
  Description of Artificial Sequence: Synthetic oligonucleotide
cgugccguauggggccagc

SEQ ID NO: 282810 - RNA, 19 nt, Artificial Sequence
  Description of Artificial Sequence: Synthetic oligonucleotide
cgugcacggaccucuggau

SEQ ID NO: 282811 - RNA, 19 nt, Artificial Sequence
  Description of Artificial Sequence: Synthetic oligonucleotide
ccggcaggucucugaaguu

SEQ ID NO: 282812 - RNA, 19 nt, Artificial Sequence
  Description of Artificial Sequence: Synthetic oligonucleotide
gccggcccgagaguccccu

SEQ ID NO: 282813 - RNA, 19 nt, Artificial Sequence
  Description of Artificial Sequence: Synthetic oligonucleotide
cccucgaauggaggagaau

SEQ ID NO: 282814 - RNA, 19 nt, Artificial Sequence
  Description of Artificial Sequence: Synthetic oligonucleotide
gcccggaguugggcugaau

SEQ ID NO: 282815 - RNA, 19 nt, Artificial Sequence
  Description of Artificial Sequence: Synthetic oligonucleotide
aaaauuaacacccuagcuc

SEQ ID NO: 282816 - RNA, 19 nt, Artificial Sequence
  Description of Artificial Sequence: Synthetic oligonucleotide
acuaaaaucacauucuagg

SEQ ID NO: 282817 - RNA, 19 nt, Artificial Sequence
  Description of Artificial Sequence: Synthetic oligonucleotide
ucuauuuuguucaaaaggc

SEQ ID NO: 282818 - RNA, 19 nt, Artificial Sequence
  Description of Artificial Sequence: Synthetic oligonucleotide
aaauuaacacccuagcuca

SEQ ID NO: 282819 - RNA, 19 nt, Artificial Sequence
  Description of Artificial Sequence: Synthetic oligonucleotide
agaauuuaaacacuauccg

SEQ ID NO: 282820 - RNA, 19 nt, Artificial Sequence
  Description of Artificial Sequence: Synthetic oligonucleotide
ucaagauaaacucaauacc

SEQ ID NO: 282821 - RNA, 19 nt, Artificial Sequence
  Description of Artificial Sequence: Synthetic oligonucleotide
ucaaguaccaaccaaccag

SEQ ID NO: 282822 - RNA, 19 nt, Artificial Sequence
  Description of Artificial Sequence: Synthetic oligonucleotide
uuaaaggaaacuuucacac

SEQ ID NO: 282823 - RNA, 19 nt, Artificial Sequence
  Description of Artificial Sequence: Synthetic oligonucleotide
uaugucauauucaaccagg

SEQ ID NO: 282824 - RNA, 19 nt, Artificial Sequence
  Description of Artificial Sequence: Synthetic oligonucleotide
uuaaagucuacugaaaccc

SEQ ID NO: 282825 - RNA, 19 nt, Artificial Sequence
  Description of Artificial Sequence: Synthetic oligonucleotide
uuagcuaguacacugggug

SEQ ID NO: 282826 - RNA, 19 nt, Artificial Sequence
  Description of Artificial Sequence: Synthetic oligonucleotide
ugaguguagaauuuuaaug

SEQ ID NO: 282827 - RNA, 19 nt, Artificial Sequence
  Description of Artificial Sequence: Synthetic oligonucleotide
aauaugaguggaucugugg

SEQ ID NO: 282828 - RNA, 19 nt, Artificial Sequence
  Description of Artificial Sequence: Synthetic oligonucleotide
auuaaucacauaaucaaac

SEQ ID NO: 282829 - RNA, 19 nt, Artificial Sequence
  Description of Artificial Sequence: Synthetic oligonucleotide
uccagaacaaacaaugaug

SEQ ID NO: 282830 - RNA, 19 nt, Artificial Sequence
  Description of Artificial Sequence: Synthetic oligonucleotide
ucaucuuuaaggcuuagcu

SEQ ID NO: 282831 - RNA, 19 nt, Artificial Sequence
  Description of Artificial Sequence: Synthetic oligonucleotide
uccguauuaaaauaacaag

SEQ ID NO: 282832 - RNA, 19 nt, Artificial Sequence
  Description of Artificial Sequence: Synthetic oligonucleotide
ugaaagauggacugaaggc

SEQ ID NO: 282833 - RNA, 19 nt, Artificial Sequence
  Description of Artificial Sequence: Synthetic oligonucleotide
aguuggaucaguuuuauaa

SEQ ID NO: 282834 - RNA, 19 nt, Artificial Sequence
  Description of Artificial Sequence: Synthetic oligonucleotide
agaacuuucauugacaggu

SEQ ID NO: 282835 - RNA, 19 nt, Artificial Sequence
  Description of Artificial Sequence: Synthetic oligonucleotide
aguaucugucaauagcccc

SEQ ID NO: 282836 - RNA, 19 nt, Artificial Sequence
  Description of Artificial Sequence: Synthetic oligonucleotide
uuaauguucugauaaggug

SEQ ID NO: 282837 - RNA, 19 nt, Artificial Sequence
  Description of Artificial Sequence: Synthetic oligonucleotide
uuuaccacugcccaugaug

SEQ ID NO: 282838 - RNA, 19 nt, Artificial Sequence
  Description of Artificial Sequence: Synthetic oligonucleotide
uuaauugaagcacugcuaa

SEQ ID NO: 282839 - RNA, 19 nt, Artificial Sequence
  Description of Artificial Sequence: Synthetic oligonucleotide
uuaacaucaccgcugagga

SEQ ID NO: 282840 - RNA, 19 nt, Artificial Sequence
  Description of Artificial Sequence: Synthetic oligonucleotide
uacauaacaaacuccaggu

SEQ ID NO: 282841 - RNA, 19 nt, Artificial Sequence
  Description of Artificial Sequence: Synthetic oligonucleotide
cuacauaacaaacuccagg

SEQ ID NO: 282842 - RNA, 19 nt, Artificial Sequence
  Description of Artificial Sequence: Synthetic oligonucleotide
ugaauuuacuuuuaucacu

SEQ ID NO: 282843 - RNA, 19 nt, Artificial Sequence
  Description of Artificial Sequence: Synthetic oligonucleotide
ugguaaacguuucacacgc

SEQ ID NO: 282844 - RNA, 19 nt, Artificial Sequence
  Description of Artificial Sequence: Synthetic oligonucleotide
uuuuagcuaguacacuggg

SEQ ID NO: 282845 - RNA, 19 nt, Artificial Sequence
  Description of Artificial Sequence: Synthetic oligonucleotide
ucgcauuaauaauacaucc

SEQ ID NO: 282846 - RNA, 19 nt, Artificial Sequence
  Description of Artificial Sequence: Synthetic oligonucleotide
aagauaaacucaauaccac

SEQ ID NO: 282847 - RNA, 19 nt, Artificial Sequence
  Description of Artificial Sequence: Synthetic oligonucleotide
uuguucuaggccaucagag

SEQ ID NO: 282848 - RNA, 19 nt, Artificial Sequence
  Description of Artificial Sequence: Synthetic oligonucleotide
ucagaacuuucauugacag

SEQ ID NO: 282849 - RNA, 19 nt, Artificial Sequence
  Description of Artificial Sequence: Synthetic oligonucleotide
uguguagguugcuaaauag

SEQ ID NO: 282850 - RNA, 19 nt, Artificial Sequence
  Description of Artificial Sequence: Synthetic oligonucleotide
aaauuaacaucaccgcuga

SEQ ID NO: 282851 - RNA, 19 nt, Artificial Sequence
  Description of Artificial Sequence: Synthetic oligonucleotide
gagauguagaaauugggac

SEQ ID NO: 282852 - RNA, 19 nt, Artificial Sequence
  Description of Artificial Sequence: Synthetic oligonucleotide
uuccguauuaaaauaacaa

SEQ ID NO: 282853 - RNA, 19 nt, Artificial Sequence
  Description of Artificial Sequence: Synthetic oligonucleotide
aacacuauccguauuuguc

SEQ ID NO: 282854 - RNA, 19 nt, Artificial Sequence
  Description of Artificial Sequence: Synthetic oligonucleotide
uuuggugccaagcugugcc

SEQ ID NO: 282855 - RNA, 19 nt, Artificial Sequence
  Description of Artificial Sequence: Synthetic oligonucleotide
ucgucauuuuaauugaagc

SEQ ID NO: 282856 - RNA, 19 nt, Artificial Sequence
  Description of Artificial Sequence: Synthetic oligonucleotide
caaauuaacaucaccgcug

SEQ ID NO: 282857 - RNA, 19 nt, Artificial Sequence
  Description of Artificial Sequence: Synthetic oligonucleotide
ucuuacauccaucaauaac

SEQ ID NO: 282858 - RNA, 19 nt, Artificial Sequence
  Description of Artificial Sequence: Synthetic oligonucleotide
uuaaucacauaaucaaacu

SEQ ID NO: 282859 - RNA, 19 nt, Artificial Sequence
  Description of Artificial Sequence: Synthetic oligonucleotide
aaguuacucuucaaguacc

SEQ ID NO: 282860 - RNA, 19 nt, Artificial Sequence
  Description of Artificial Sequence: Synthetic oligonucleotide
ugucauauucaaccaggcg

SEQ ID NO: 282861 - RNA, 19 nt, Artificial Sequence
  Description of Artificial Sequence: Synthetic oligonucleotide
uaucuaagucaauuugggg

SEQ ID NO: 282862 - RNA, 19 nt, Artificial Sequence
  Description of Artificial Sequence: Synthetic oligonucleotide
aauauaccuuuguucuagg

SEQ ID NO: 282863 - RNA, 19 nt, Artificial Sequence
  Description of Artificial Sequence: Synthetic oligonucleotide
uuaaacacuauccguauuu

SEQ ID NO: 282864 - RNA, 19 nt, Artificial Sequence
  Description of Artificial Sequence: Synthetic oligonucleotide
agcaccaaauuuuaauauc

SEQ ID NO: 282865 - RNA, 19 nt, Artificial Sequence
  Description of Artificial Sequence: Synthetic oligonucleotide
ugucaauagccccuccucg

SEQ ID NO: 282866 - RNA, 19 nt, Artificial Sequence
  Description of Artificial Sequence: Synthetic oligonucleotide
auaccuuuguucuaggcca

SEQ ID NO: 282867 - RNA, 19 nt, Artificial Sequence
  Description of Artificial Sequence: Synthetic oligonucleotide
aaacguuucacacgcccag

SEQ ID NO: 282868 - RNA, 19 nt, Artificial Sequence
  Description of Artificial Sequence: Synthetic oligonucleotide
auuucacauaauaugcccc

SEQ ID NO: 282869 - RNA, 19 nt, Artificial Sequence
  Description of Artificial Sequence: Synthetic oligonucleotide
ugucuaauuguccuucggc

SEQ ID NO: 282870 - RNA, 19 nt, Artificial Sequence
  Description of Artificial Sequence: Synthetic oligonucleotide
aacacuagucacuaagaaa

SEQ ID NO: 282871 - RNA, 19 nt, Artificial Sequence
  Description of Artificial Sequence: Synthetic oligonucleotide
ucuaugagaaccugauagc

SEQ ID NO: 282872 - RNA, 19 nt, Artificial Sequence
  Description of Artificial Sequence: Synthetic oligonucleotide
acuguuaaaggaaacuuuc

SEQ ID NO: 282873 - RNA, 19 nt, Artificial Sequence
  Description of Artificial Sequence: Synthetic oligonucleotide
auauaccuuuguucuaggc

SEQ ID NO: 282874 - RNA, 19 nt, Artificial Sequence
  Description of Artificial Sequence: Synthetic oligonucleotide
uuuaauugaagcacugcua

SEQ ID NO: 282875 - RNA, 19 nt, Artificial Sequence
  Description of Artificial Sequence: Synthetic oligonucleotide
guaccaaccaaccagguca

SEQ ID NO: 282876 - RNA, 19 nt, Artificial Sequence
  Description of Artificial Sequence: Synthetic oligonucleotide
agcuaggacaccauaauac

SEQ ID NO: 282877 - RNA, 19 nt, Artificial Sequence
  Description of Artificial Sequence: Synthetic oligonucleotide
aaaucaauucuuagcaucu

SEQ ID NO: 282878 - RNA, 19 nt, Artificial Sequence
  Description of Artificial Sequence: Synthetic oligonucleotide
uucauugacaggucgagaa

SEQ ID NO: 282879 - RNA, 19 nt, Artificial Sequence
  Description of Artificial Sequence: Synthetic oligonucleotide
uucgucauacaccacuuca

SEQ ID NO: 282880 - RNA, 19 nt, Artificial Sequence
  Description of Artificial Sequence: Synthetic oligonucleotide
uguucuaggccaucagagg

SEQ ID NO: 282881 - RNA, 19 nt, Artificial Sequence
  Description of Artificial Sequence: Synthetic oligonucleotide
auaucuaagucaauuuggg

SEQ ID NO: 282882 - RNA, 19 nt, Artificial Sequence
  Description of Artificial Sequence: Synthetic oligonucleotide
uccuuuaagauugucuaag

SEQ ID NO: 282883 - RNA, 19 nt, Artificial Sequence
  Description of Artificial Sequence: Synthetic oligonucleotide
uuacucuucaaguaccaac

SEQ ID NO: 282884 - RNA, 19 nt, Artificial Sequence
  Description of Artificial Sequence: Synthetic oligonucleotide
gcuucagucaaauugacac

SEQ ID NO: 282885 - RNA, 19 nt, Artificial Sequence
  Description of Artificial Sequence: Synthetic oligonucleotide
caaguaccaaccaaccagg

SEQ ID NO: 282886 - RNA, 19 nt, Artificial Sequence
  Description of Artificial Sequence: Synthetic oligonucleotide
uuuguucuaggccaucaga

SEQ ID NO: 282887 - RNA, 19 nt, Artificial Sequence
  Description of Artificial Sequence: Synthetic oligonucleotide
ugggacagcugucaaauca

SEQ ID NO: 282888 - RNA, 19 nt, Artificial Sequence
  Description of Artificial Sequence: Synthetic oligonucleotide
aauugacacaauuccccug

SEQ ID NO: 282889 - RNA, 19 nt, Artificial Sequence
  Description of Artificial Sequence: Synthetic oligonucleotide
auaugaguggaucuguggu

SEQ ID NO: 282890 - RNA, 19 nt, Artificial Sequence
  Description of Artificial Sequence: Synthetic oligonucleotide
ugauuccguauuaaaauaa

SEQ ID NO: 282891 - RNA, 19 nt, Artificial Sequence
  Description of Artificial Sequence: Synthetic oligonucleotide
ucuacauaacaaacuccag

SEQ ID NO: 282892 - RNA, 19 nt, Artificial Sequence
  Description of Artificial Sequence: Synthetic oligonucleotide
aggugaaucuucgucauac

SEQ ID NO: 282893 - RNA, 19 nt, Artificial Sequence
  Description of Artificial Sequence: Synthetic oligonucleotide
agauaaacucaauaccacu

SEQ ID NO: 282894 - RNA, 19 nt, Artificial Sequence
  Description of Artificial Sequence: Synthetic oligonucleotide
gaauucaugaccaguugcc

SEQ ID NO: 282895 - RNA, 19 nt, Artificial Sequence
  Description of Artificial Sequence: Synthetic oligonucleotide
cuuuaagauugucuaagac

SEQ ID NO: 282896 - RNA, 19 nt, Artificial Sequence
  Description of Artificial Sequence: Synthetic oligonucleotide
aaauuggcaaagcugccau

SEQ ID NO: 282897 - RNA, 19 nt, Artificial Sequence
  Description of Artificial Sequence: Synthetic oligonucleotide
cacaacacuagucacuaag

SEQ ID NO: 282898 - RNA, 19 nt, Artificial Sequence
  Description of Artificial Sequence: Synthetic oligonucleotide
ucacucaagauaaacucaa

SEQ ID NO: 282899 - RNA, 19 nt, Artificial Sequence
  Description of Artificial Sequence: Synthetic oligonucleotide
aauagccccuccucgaacu

SEQ ID NO: 282900 - RNA, 19 nt, Artificial Sequence
  Description of Artificial Sequence: Synthetic oligonucleotide
acacuagucacuaagaaaa

SEQ ID NO: 282901 - RNA, 19 nt, Artificial Sequence
  Description of Artificial Sequence: Synthetic oligonucleotide
auugaagcacugcuaauca

SEQ ID NO: 282902 - RNA, 19 nt, Artificial Sequence
  Description of Artificial Sequence: Synthetic oligonucleotide
ugccugacucaguugaugg

SEQ ID NO: 282903 - RNA, 19 nt, Artificial Sequence
  Description of Artificial Sequence: Synthetic oligonucleotide
uguuacuaaaaugaagcaa

SEQ ID NO: 282904 - RNA, 19 nt, Artificial Sequence
  Description of Artificial Sequence: Synthetic oligonucleotide
uggggauaaauccucaaau

SEQ ID NO: 282905 - RNA, 19 nt, Artificial Sequence
  Description of Artificial Sequence: Synthetic oligonucleotide
gaucauuagcauuucuuca

SEQ ID NO: 282906 - RNA, 19 nt, Artificial Sequence
  Description of Artificial Sequence: Synthetic oligonucleotide
ucuacuguuaaaggaaacu

SEQ ID NO: 282907 - RNA, 19 nt, Artificial Sequence
  Description of Artificial Sequence: Synthetic oligonucleotide
guaaacguuucacacgccc

SEQ ID NO: 282908 - RNA, 19 nt, Artificial Sequence
  Description of Artificial Sequence: Synthetic oligonucleotide
uaauacauccaggagcuga

SEQ ID NO: 282909 - RNA, 19 nt, Artificial Sequence
  Description of Artificial Sequence: Synthetic oligonucleotide
cugaggaugagaauauuuc

SEQ ID NO: 282910 - RNA, 19 nt, Artificial Sequence
  Description of Artificial Sequence: Synthetic oligonucleotide
agaaauaugaguggaucug

SEQ ID NO: 282911 - RNA, 19 nt, Artificial Sequence
  Description of Artificial Sequence: Synthetic oligonucleotide
caaguagccuugcauaacc

SEQ ID NO: 282912 - RNA, 19 nt, Artificial Sequence
  Description of Artificial Sequence: Synthetic oligonucleotide
cauauggggcauauggaag

SEQ ID NO: 282913 - RNA, 19 nt, Artificial Sequence
  Description of Artificial Sequence: Synthetic oligonucleotide
ugaagggacacagacaauc

SEQ ID NO: 282914 - RNA, 19 nt, Artificial Sequence
  Description of Artificial Sequence: Synthetic oligonucleotide
gggauaaauccucaaauug

SEQ ID NO: 282915 - RNA, 19 nt, Artificial Sequence
  Description of Artificial Sequence: Synthetic oligonucleotide
gugguaaacguuucacacg

SEQ ID NO: 282916 - RNA, 19 nt, Artificial Sequence
  Description of Artificial Sequence: Synthetic oligonucleotide
cucgcauuaauaauacauc

SEQ ID NO: 282917 - RNA, 19 nt, Artificial Sequence
  Description of Artificial Sequence: Synthetic oligonucleotide
aggaacuucucuccagaac

SEQ ID NO: 282918 - RNA, 19 nt, Artificial Sequence
  Description of Artificial Sequence: Synthetic oligonucleotide
uccucaaauuggcaaagcu

SEQ ID NO: 282919 - RNA, 19 nt, Artificial Sequence
  Description of Artificial Sequence: Synthetic oligonucleotide
uaaacguuucacacgccca

SEQ ID NO: 282920 - RNA, 19 nt, Artificial Sequence
  Description of Artificial Sequence: Synthetic oligonucleotide
aaauuagucugaauuuacu

SEQ ID NO: 282921 - RNA, 19 nt, Artificial Sequence
  Description of Artificial Sequence: Synthetic oligonucleotide
gaaauuagucugaauuuac

SEQ ID NO: 282922 - RNA, 19 nt, Artificial Sequence
  Description of Artificial Sequence: Synthetic oligonucleotide
gaacuaugggugguaaacg

SEQ ID NO: 282923 - RNA, 19 nt, Artificial Sequence
  Description of Artificial Sequence: Synthetic oligonucleotide
gaauuuaaacacuauccgu

SEQ ID NO: 282924 - RNA, 19 nt, Artificial Sequence
  Description of Artificial Sequence: Synthetic oligonucleotide
uaaccauuuggucaaucuc

SEQ ID NO: 282925 - RNA, 19 nt, Artificial Sequence
  Description of Artificial Sequence: Synthetic oligonucleotide
ucaaauuggcaaagcugcc

SEQ ID NO: 282926 - RNA, 19 nt, Artificial Sequence
  Description of Artificial Sequence: Synthetic oligonucleotide
acacuauccguauuugucu

SEQ ID NO: 282927 - RNA, 19 nt, Artificial Sequence
  Description of Artificial Sequence: Synthetic oligonucleotide
ucacauuuccaagggaaag

SEQ ID NO: 282928 - RNA, 19 nt, Artificial Sequence
  Description of Artificial Sequence: Synthetic oligonucleotide
uccaaauuguuuugagugu

SEQ ID NO: 282929 - RNA, 19 nt, Artificial Sequence
  Description of Artificial Sequence: Synthetic oligonucleotide
caaguaugaagggacacag

SEQ ID NO: 282930 - RNA, 19 nt, Artificial Sequence
  Description of Artificial Sequence: Synthetic oligonucleotide
acaaugauguucauuccuc

SEQ ID NO: 282931 - RNA, 19 nt, Artificial Sequence
  Description of Artificial Sequence: Synthetic oligonucleotide
uagcuaguacacugggugg

SEQ ID NO: 282932 - RNA, 19 nt, Artificial Sequence
  Description of Artificial Sequence: Synthetic oligonucleotide
uaaucaaacucucucccuu

SEQ ID NO: 282933 - RNA, 19 nt, Artificial Sequence
  Description of Artificial Sequence: Synthetic oligonucleotide
uacuguuaaaggaaacuuu

SEQ ID NO: 282934 - RNA, 19 nt, Artificial Sequence
  Description of Artificial Sequence: Synthetic oligonucleotide
aaauuguuuugaguguaga

SEQ ID NO: 282935 - RNA, 19 nt, Artificial Sequence
  Description of Artificial Sequence: Synthetic oligonucleotide
uuuagcuaguacacugggu

SEQ ID NO: 282936 - RNA, 19 nt, Artificial Sequence
  Description of Artificial Sequence: Synthetic oligonucleotide
auaaucaaacucucucccu

SEQ ID NO: 282937 - RNA, 19 nt, Artificial Sequence
  Description of Artificial Sequence: Synthetic oligonucleotide
ucauacaccacuucaucua

SEQ ID NO: 282938 - RNA, 19 nt, Artificial Sequence
  Description of Artificial Sequence: Synthetic oligonucleotide
augaaaggucucuuucguc

SEQ ID NO: 282939 - RNA, 19 nt, Artificial Sequence
  Description of Artificial Sequence: Synthetic oligonucleotide
caagcucucaggaaaguuc

SEQ ID NO: 282940 - RNA, 19 nt, Artificial Sequence
  Description of Artificial Sequence: Synthetic oligonucleotide
aaaauacccacaauuccaa

SEQ ID NO: 282941 - RNA, 19 nt, Artificial Sequence
  Description of Artificial Sequence: Synthetic oligonucleotide
gacugagcuacauacaaua

SEQ ID NO: 282942 - RNA, 19 nt, Artificial Sequence
  Description of Artificial Sequence: Synthetic oligonucleotide
ggugguaaacguuucacac

SEQ ID NO: 282943 - RNA, 19 nt, Artificial Sequence
  Description of Artificial Sequence: Synthetic oligonucleotide
aacacccuagcucaucaaa

SEQ ID NO: 282944 - RNA, 19 nt, Artificial Sequence
  Description of Artificial Sequence: Synthetic oligonucleotide
aauucaugaccaguugccu

SEQ ID NO: 282945 - RNA, 19 nt, Artificial Sequence
  Description of Artificial Sequence: Synthetic oligonucleotide
ugaaggccuuucagaaugg

SEQ ID NO: 282946 - RNA, 19 nt, Artificial Sequence
  Description of Artificial Sequence: Synthetic oligonucleotide
uuucuaauacuuggcuuag

SEQ ID NO: 282947 - RNA, 19 nt, Artificial Sequence
  Description of Artificial Sequence: Synthetic oligonucleotide
uuuggcguaccucuucagu

SEQ ID NO: 282948 - RNA, 19 nt, Artificial Sequence
  Description of Artificial Sequence: Synthetic oligonucleotide
aagauacuaaaaucacauu

SEQ ID NO: 282949 - RNA, 19 nt, Artificial Sequence
  Description of Artificial Sequence: Synthetic oligonucleotide
cugcuaaucacuuaagucu

SEQ ID NO: 282950 - RNA, 19 nt, Artificial Sequence
  Description of Artificial Sequence: Synthetic oligonucleotide
aaauaugaguggaucugug

SEQ ID NO: 282951 - RNA, 19 nt, Artificial Sequence
  Description of Artificial Sequence: Synthetic oligonucleotide
ucuuuggcguaccucuuca

SEQ ID NO: 282952 - RNA, 19 nt, Artificial Sequence
  Description of Artificial Sequence: Synthetic oligonucleotide
gauuccguauuaaaauaac

SEQ ID NO: 282953 - RNA, 19 nt, Artificial Sequence
  Description of Artificial Sequence: Synthetic oligonucleotide
aacaccaauccauggggau

SEQ ID NO: 282954 - RNA, 19 nt, Artificial Sequence
  Description of Artificial Sequence: Synthetic oligonucleotide
aacacuugaaggaauucau

SEQ ID NO: 282955 - RNA, 19 nt, Artificial Sequence
  Description of Artificial Sequence: Synthetic oligonucleotide
ggaauucaugaccaguugc

SEQ ID NO: 282956 - RNA, 19 nt, Artificial Sequence
  Description of Artificial Sequence: Synthetic oligonucleotide
uguacgccaagucacucuc

SEQ ID NO: 282957 - RNA, 19 nt, Artificial Sequence
  Description of Artificial Sequence: Synthetic oligonucleotide
gcaacaccaauccaugggg

SEQ ID NO: 282958 - RNA, 19 nt, Artificial Sequence
  Description of Artificial Sequence: Synthetic oligonucleotide
uaucaggaacuucucucca

SEQ ID NO: 282959 - RNA, 19 nt, Artificial Sequence
  Description of Artificial Sequence: Synthetic oligonucleotide
cuuagcaggaccugaguca

SEQ ID NO: 282960 - RNA, 19 nt, Artificial Sequence
  Description of Artificial Sequence: Synthetic oligonucleotide
ugacaggucgagaaucagu

SEQ ID NO: 282961 - RNA, 19 nt, Artificial Sequence
  Description of Artificial Sequence: Synthetic oligonucleotide
cuuucauugacaggucgag

SEQ ID NO: 282962 - RNA, 19 nt, Artificial Sequence
  Description of Artificial Sequence: Synthetic oligonucleotide
ggaucauuagcauuucuuc

SEQ ID NO: 282963 - RNA, 19 nt, Artificial Sequence
  Description of Artificial Sequence: Synthetic oligonucleotide
aggaauucaugaccaguug

SEQ ID NO: 282964 - RNA, 19 nt, Artificial Sequence
  Description of Artificial Sequence: Synthetic oligonucleotide
cacaugaaaggucucuuuc

SEQ ID NO: 282965 - RNA, 19 nt, Artificial Sequence
  Description of Artificial Sequence: Synthetic oligonucleotide
cauccaggagcugauauac

SEQ ID NO: 282966 - RNA, 19 nt, Artificial Sequence
  Description of Artificial Sequence: Synthetic oligonucleotide
uguggccucaaguuacucu

SEQ ID NO: 282967 - RNA, 19 nt, Artificial Sequence
  Description of Artificial Sequence: Synthetic oligonucleotide
ucugccaaauuaacaucac

SEQ ID NO: 282968 - RNA, 19 nt, Artificial Sequence
  Description of Artificial Sequence: Synthetic oligonucleotide
uuguguagguugcuaaaua

SEQ ID NO: 282969 - RNA, 19 nt, Artificial Sequence
  Description of Artificial Sequence: Synthetic oligonucleotide
ugccucgcauuaauaauac

SEQ ID NO: 282970 - RNA, 19 nt, Artificial Sequence
  Description of Artificial Sequence: Synthetic oligonucleotide
aagcuaggacaccauaaua

SEQ ID NO: 282971 - RNA, 19 nt, Artificial Sequence
  Description of Artificial Sequence: Synthetic oligonucleotide
aaccuacccucuucauuuc

SEQ ID NO: 282972 - RNA, 19 nt, Artificial Sequence
  Description of Artificial Sequence: Synthetic oligonucleotide
gucguaacucugaaggucc

SEQ ID NO: 282973 - RNA, 19 nt, Artificial Sequence
  Description of Artificial Sequence: Synthetic oligonucleotide
ugucguaacucugaagguc

SEQ ID NO: 282974 - RNA, 19 nt, Artificial Sequence
  Description of Artificial Sequence: Synthetic oligonucleotide
ugcauaaccuacccucuuc

SEQ ID NO: 282975 - RNA, 19 nt, Artificial Sequence
  Description of Artificial Sequence: Synthetic oligonucleotide
gggcauauggaagucaggg

SEQ ID NO: 282976 - RNA, 19 nt, Artificial Sequence
  Description of Artificial Sequence: Synthetic oligonucleotide
auuaacacccuagcucauc

SEQ ID NO: 282977 - RNA, 19 nt, Artificial Sequence
  Description of Artificial Sequence: Synthetic oligonucleotide
ccaaacaguguaaaauacc

SEQ ID NO: 282978 - RNA, 19 nt, Artificial Sequence
  Description of Artificial Sequence: Synthetic oligonucleotide
acaauuccccuguguaaag

SEQ ID NO: 282979 - RNA, 19 nt, Artificial Sequence
  Description of Artificial Sequence: Synthetic oligonucleotide
auguaucuuccaaguagcc

SEQ ID NO: 282980 - RNA, 19 nt, Artificial Sequence
  Description of Artificial Sequence: Synthetic oligonucleotide
uuagcaggaccugagucac

SEQ ID NO: 282981 - RNA, 19 nt, Artificial Sequence
  Description of Artificial Sequence: Synthetic oligonucleotide
cuguguaaaguauuuccca

SEQ ID NO: 282982 - RNA, 19 nt, Artificial Sequence
  Description of Artificial Sequence: Synthetic oligonucleotide
agcuaguacacuggguggg

SEQ ID NO: 282983 - RNA, 19 nt, Artificial Sequence
  Description of Artificial Sequence: Synthetic oligonucleotide
cugccaaauuaacaucacc

SEQ ID NO: 282984 - RNA, 19 nt, Artificial Sequence
  Description of Artificial Sequence: Synthetic oligonucleotide
aaauugaguugggugcugu

SEQ ID NO: 282985 - RNA, 19 nt, Artificial Sequence
  Description of Artificial Sequence: Synthetic oligonucleotide
agcaugauuccguauuaaa

SEQ ID NO: 282986 - RNA, 19 nt, Artificial Sequence
  Description of Artificial Sequence: Synthetic oligonucleotide
aauacauccaggagcugau

SEQ ID NO: 282987 - RNA, 19 nt, Artificial Sequence
  Description of Artificial Sequence: Synthetic oligonucleotide
ucgucauacaccacuucau

SEQ ID NO: 282988 - RNA, 19 nt, Artificial Sequence
  Description of Artificial Sequence: Synthetic oligonucleotide
auaaccuacccucuucauu

SEQ ID NO: 282989 - RNA, 19 nt, Artificial Sequence
  Description of Artificial Sequence: Synthetic oligonucleotide
aagucaauuuggggugggg

SEQ ID NO: 282990 - RNA, 19 nt, Artificial Sequence
  Description of Artificial Sequence: Synthetic oligonucleotide
uaugaguggaucugugguu

SEQ ID NO: 282991 - RNA, 19 nt, Artificial Sequence
  Description of Artificial Sequence: Synthetic oligonucleotide
augaguggaucugugguug

SEQ ID NO: 282992 - RNA, 19 nt, Artificial Sequence
  Description of Artificial Sequence: Synthetic oligonucleotide
cauugacaggucgagaauc

SEQ ID NO: 282993 - RNA, 19 nt, Artificial Sequence
  Description of Artificial Sequence: Synthetic oligonucleotide
aaagucuacugaaacccaa

SEQ ID NO: 282994 - RNA, 19 nt, Artificial Sequence
  Description of Artificial Sequence: Synthetic oligonucleotide
ccuugcauaaccuacccuc

SEQ ID NO: 282995 - RNA, 19 nt, Artificial Sequence
  Description of Artificial Sequence: Synthetic oligonucleotide
uguccuucggcugacuuuc

SEQ ID NO: 282996 - RNA, 19 nt, Artificial Sequence
  Description of Artificial Sequence: Synthetic oligonucleotide
uaagucaauuugggguggg

SEQ ID NO: 282997 - RNA, 19 nt, Artificial Sequence
  Description of Artificial Sequence: Synthetic oligonucleotide
gagacugagggaucgcgca

SEQ ID NO: 282998 - RNA, 19 nt, Artificial Sequence
  Description of Artificial Sequence: Synthetic oligonucleotide
cugucuaauuguccuucgg

SEQ ID NO: 282999 - RNA, 19 nt, Artificial Sequence
  Description of Artificial Sequence: Synthetic oligonucleotide
uugaagcacugcuaaucac

SEQ ID NO: 283000 - RNA, 19 nt, Artificial Sequence
  Description of Artificial Sequence: Synthetic oligonucleotide
agcgacagggcuucaguca

SEQ ID NO: 283001 - RNA, 19 nt, Artificial Sequence
  Description of Artificial Sequence: Synthetic oligonucleotide
cuaugagaaccugauagca

SEQ ID NO: 283002 - RNA, 19 nt, Artificial Sequence
  Description of Artificial Sequence: Synthetic oligonucleotide
gaaccugauagcagucucc

SEQ ID NO: 283003 - RNA, 19 nt, Artificial Sequence
  Description of Artificial Sequence: Synthetic oligonucleotide
guucugauaaggugaaucu

SEQ ID NO: 283004 - RNA, 19 nt, Artificial Sequence
  Description of Artificial Sequence: Synthetic oligonucleotide
ugcacaacacuagucacua

SEQ ID NO: 283005 - RNA, 19 nt, Artificial Sequence
  Description of Artificial Sequence: Synthetic oligonucleotide
ugcagcacacgacauucuc

SEQ ID NO: 283006 - RNA, 19 nt, Artificial Sequence
  Description of Artificial Sequence: Synthetic oligonucleotide
ugcauuccgaagucucagc

SEQ ID NO: 283007 - RNA, 19 nt, Artificial Sequence
  Description of Artificial Sequence: Synthetic oligonucleotide
uaguacacuggguggggug

SEQ ID NO: 283008 - RNA, 19 nt, Artificial Sequence
  Description of Artificial Sequence: Synthetic oligonucleotide
acuauccguauuugucuug

SEQ ID NO: 283009 - RNA, 19 nt, Artificial Sequence
  Description of Artificial Sequence: Synthetic oligonucleotide
uccaaguaugaagggacac

SEQ ID NO: 283010 - RNA, 19 nt, Artificial Sequence
  Description of Artificial Sequence: Synthetic oligonucleotide
cuguuaaaggaaacuuuca

SEQ ID NO: 283011 - RNA, 19 nt, Artificial Sequence
  Description of Artificial Sequence: Synthetic oligonucleotide
caaccaggcgcccaucagc

SEQ ID NO: 283012 - RNA, 19 nt, Artificial Sequence
  Description of Artificial Sequence: Synthetic oligonucleotide
guagaaauugggacagcug

SEQ ID NO: 283013 - RNA, 19 nt, Artificial Sequence
  Description of Artificial Sequence: Synthetic oligonucleotide
uccugaaagauggacugaa

SEQ ID NO: 283014 - RNA, 19 nt, Artificial Sequence
  Description of Artificial Sequence: Synthetic oligonucleotide
acgacauucucaucuuuaa

SEQ ID NO: 283015 - RNA, 19 nt, Artificial Sequence
  Description of Artificial Sequence: Synthetic oligonucleotide
auauucaaucacauuucca

SEQ ID NO: 283016 - RNA, 19 nt, Artificial Sequence
  Description of Artificial Sequence: Synthetic oligonucleotide
uaauugaagcacugcuaau

SEQ ID NO: 283017 - RNA, 19 nt, Artificial Sequence
  Description of Artificial Sequence: Synthetic oligonucleotide
aacacaugaaaggucucuu

SEQ ID NO: 283018 - RNA, 19 nt, Artificial Sequence
  Description of Artificial Sequence: Synthetic oligonucleotide
gauggcucggguguacgcc

SEQ ID NO: 283019 - RNA, 19 nt, Artificial Sequence
  Description of Artificial Sequence: Synthetic oligonucleotide
uuuaaggcuuagcuuucuu

SEQ ID NO: 283020 - RNA, 19 nt, Artificial Sequence
  Description of Artificial Sequence: Synthetic oligonucleotide
uggcguaccucuucaguac

SEQ ID NO: 283021 - RNA, 19 nt, Artificial Sequence
  Description of Artificial Sequence: Synthetic oligonucleotide
cacacgcccaguacugucc

SEQ ID NO: 283022 - RNA, 19 nt, Artificial Sequence
  Description of Artificial Sequence: Synthetic oligonucleotide
uucuaggccaucagaggua

SEQ ID NO: 283023 - RNA, 19 nt, Artificial Sequence
  Description of Artificial Sequence: Synthetic oligonucleotide
ugggugguaaacguuucac

SEQ ID NO: 283024 - RNA, 19 nt, Artificial Sequence
  Description of Artificial Sequence: Synthetic oligonucleotide
agagcgacagggcuucagu

SEQ ID NO: 283025 - RNA, 19 nt, Artificial Sequence
  Description of Artificial Sequence: Synthetic oligonucleotide
acauaacaaacuccagguu

SEQ ID NO: 283026 - RNA, 19 nt, Artificial Sequence
  Description of Artificial Sequence: Synthetic oligonucleotide
ugguuguggccucaaguua

SEQ ID NO: 283027 - RNA, 19 nt, Artificial Sequence
  Description of Artificial Sequence: Synthetic oligonucleotide
guacaagcucucaggaaag

SEQ ID NO: 283028 - RNA, 19 nt, Artificial Sequence
  Description of Artificial Sequence: Synthetic oligonucleotide
gucuaauuguccuucggcu

SEQ ID NO: 283029 - RNA, 19 nt, Artificial Sequence
  Description of Artificial Sequence: Synthetic oligonucleotide
gaccaguugccugacucag

SEQ ID NO: 283030 - RNA, 19 nt, Artificial Sequence
  Description of Artificial Sequence: Synthetic oligonucleotide
ccagguuagacugagcuac

SEQ ID NO: 283031 - RNA, 19 nt, Artificial Sequence
  Description of Artificial Sequence: Synthetic oligonucleotide
cuaaauagccaugguccug

SEQ ID NO: 283032 - RNA, 19 nt, Artificial Sequence
  Description of Artificial Sequence: Synthetic oligonucleotide
cugucaauagccccuccuc

SEQ ID NO: 283033 - RNA, 19 nt, Artificial Sequence
  Description of Artificial Sequence: Synthetic oligonucleotide
guuagcaugauuccguauu

SEQ ID NO: 283034 - RNA, 19 nt, Artificial Sequence
  Description of Artificial Sequence: Synthetic oligonucleotide
agacugagggaucgcgcag

SEQ ID NO: 283035 - RNA, 19 nt, Artificial Sequence
  Description of Artificial Sequence: Synthetic oligonucleotide
caagccaggucuacauaac

SEQ ID NO: 283036 - RNA, 19 nt, Artificial Sequence
  Description of Artificial Sequence: Synthetic oligonucleotide
ugccauaguguggcgaggc

SEQ ID NO: 283037 - RNA, 19 nt, Artificial Sequence
  Description of Artificial Sequence: Synthetic oligonucleotide
cauagagcgacagggcuuc

SEQ ID NO: 283038 - RNA, 19 nt, Artificial Sequence
  Description of Artificial Sequence: Synthetic oligonucleotide
acaaacaaugauguucauu

SEQ ID NO: 283039 - RNA, 19 nt, Artificial Sequence
  Description of Artificial Sequence: Synthetic oligonucleotide
uugacacaauuccccugug

SEQ ID NO: 283040 - RNA, 19 nt, Artificial Sequence
  Description of Artificial Sequence: Synthetic oligonucleotide
ucuaggccaucagagguaa

SEQ ID NO: 283041 - RNA, 19 nt, Artificial Sequence
  Description of Artificial Sequence: Synthetic oligonucleotide
auugacaggucgagaauca

SEQ ID NO: 283042 - RNA, 19 nt, Artificial Sequence
  Description of Artificial Sequence: Synthetic oligonucleotide
gaaauaugaguggaucugu

SEQ ID NO: 283043 - RNA, 19 nt, Artificial Sequence
  Description of Artificial Sequence: Synthetic oligonucleotide
uuggcuuagcaggaccuga

SEQ ID NO: 283044 - RNA, 19 nt, Artificial Sequence
  Description of Artificial Sequence: Synthetic oligonucleotide
gucaauagccccuccucga

SEQ ID NO: 283045 - RNA, 19 nt, Artificial Sequence
  Description of Artificial Sequence: Synthetic oligonucleotide
gaucgcgcagcgugucagg

SEQ ID NO: 283046 - RNA, 19 nt, Artificial Sequence
  Description of Artificial Sequence: Synthetic oligonucleotide
aaucuucgucauacaccac

SEQ ID NO: 283047 - RNA, 19 nt, Artificial Sequence
  Description of Artificial Sequence: Synthetic oligonucleotide
uugugcgucgcugucguaa

SEQ ID NO: 283048 - RNA, 19 nt, Artificial Sequence
  Description of Artificial Sequence: Synthetic oligonucleotide
aucgcgcagcgugucaggc

SEQ ID NO: 283049 - RNA, 19 nt, Artificial Sequence
  Description of Artificial Sequence: Synthetic oligonucleotide
ggucuacauaacaaacucc

SEQ ID NO: 283050 - RNA, 19 nt, Artificial Sequence
  Description of Artificial Sequence: Synthetic oligonucleotide
uccccuguguaaaguauuu

SEQ ID NO: 283051 - RNA, 19 nt, Artificial Sequence
  Description of Artificial Sequence: Synthetic oligonucleotide
ucuccgcauguucuucgca

SEQ ID NO: 283052 - RNA, 19 nt, Artificial Sequence
  Description of Artificial Sequence: Synthetic oligonucleotide
guagguugcuaaauagcca

SEQ ID NO: 283053 - RNA, 19 nt, Artificial Sequence
  Description of Artificial Sequence: Synthetic oligonucleotide
ccguauuaaaauaacaagu

SEQ ID NO: 283054 - RNA, 19 nt, Artificial Sequence
  Description of Artificial Sequence: Synthetic oligonucleotide
aaguagccuugcauaaccu

SEQ ID NO: 283055 - RNA, 19 nt, Artificial Sequence
  Description of Artificial Sequence: Synthetic oligonucleotide
aguuacucuucaaguacca

SEQ ID NO: 283056 - RNA, 19 nt, Artificial Sequence
  Description of Artificial Sequence: Synthetic oligonucleotide
cuuuggcguaccucuucag

SEQ ID NO: 283057 - RNA, 19 nt, Artificial Sequence
  Description of Artificial Sequence: Synthetic oligonucleotide
agcacacgacauucucauc

SEQ ID NO: 283058 - RNA, 19 nt, Artificial Sequence
  Description of Artificial Sequence: Synthetic oligonucleotide
ugauagcagucuccuuuaa

SEQ ID NO: 283059 - RNA, 19 nt, Artificial Sequence
  Description of Artificial Sequence: Synthetic oligonucleotide
cacugacucugccaucccc

SEQ ID NO: 283060 - RNA, 19 nt, Artificial Sequence
  Description of Artificial Sequence: Synthetic oligonucleotide
gaaggccuuucagaauggc

SEQ ID NO: 283061 - RNA, 19 nt, Artificial Sequence
  Description of Artificial Sequence: Synthetic oligonucleotide
aacguuucacacgcccagu

SEQ ID NO: 283062 - RNA, 19 nt, Artificial Sequence
  Description of Artificial Sequence: Synthetic oligonucleotide
aguguggcgaggcccugug

SEQ ID NO: 283063 - RNA, 19 nt, Artificial Sequence
  Description of Artificial Sequence: Synthetic oligonucleotide
gagcgacagggcuucaguc

SEQ ID NO: 283064 - RNA, 19 nt, Artificial Sequence
  Description of Artificial Sequence: Synthetic oligonucleotide
ucgaacuaugggugguaaa

SEQ ID NO: 283065 - RNA, 19 nt, Artificial Sequence
  Description of Artificial Sequence: Synthetic oligonucleotide
gcugaaauaaagugacaaa

SEQ ID NO: 283066 - RNA, 19 nt, Artificial Sequence
  Description of Artificial Sequence: Synthetic oligonucleotide
gguuguggccucaaguuac

SEQ ID NO: 283067 - RNA, 19 nt, Artificial Sequence
  Description of Artificial Sequence: Synthetic oligonucleotide
gcauauggggcauauggaa

SEQ ID NO: 283068 - RNA, 19 nt, Artificial Sequence
  Description of Artificial Sequence: Synthetic oligonucleotide
augauggcucggguguacg

SEQ ID NO: 283069 - RNA, 19 nt, Artificial Sequence
  Description of Artificial Sequence: Synthetic oligonucleotide
aaggugaaucuucgucaua

SEQ ID NO: 283070 - RNA, 19 nt, Artificial Sequence
  Description of Artificial Sequence: Synthetic oligonucleotide
gcuuagcaggaccugaguc

SEQ ID NO: 283071 - RNA, 19 nt, Artificial Sequence
  Description of Artificial Sequence: Synthetic oligonucleotide
auggcucggguguacgcca

SEQ ID NO: 283072 - RNA, 19 nt, Artificial Sequence
  Description of Artificial Sequence: Synthetic oligonucleotide
guguugaauagaauuuaaa

SEQ ID NO: 283073 - RNA, 19 nt, Artificial Sequence
  Description of Artificial Sequence: Synthetic oligonucleotide
ugguuucaguuugacaauu

SEQ ID NO: 283074 - RNA, 19 nt, Artificial Sequence
  Description of Artificial Sequence: Synthetic oligonucleotide
uaucugucaauagccccuc

SEQ ID NO: 283075 - RNA, 19 nt, Artificial Sequence
  Description of Artificial Sequence: Synthetic oligonucleotide
gcgcccaucagcuguaggc

SEQ ID NO: 283076 - RNA, 19 nt, Artificial Sequence
  Description of Artificial Sequence: Synthetic oligonucleotide
cagcugggcugucuaauug

SEQ ID NO: 283077 - RNA, 19 nt, Artificial Sequence
  Description of Artificial Sequence: Synthetic oligonucleotide
agaaucagucugagaaacu

SEQ ID NO: 283078 - RNA, 19 nt, Artificial Sequence
  Description of Artificial Sequence: Synthetic oligonucleotide
agugcauuccgaagucuca

SEQ ID NO: 283079 - RNA, 19 nt, Artificial Sequence
  Description of Artificial Sequence: Synthetic oligonucleotide
aauuaacacccuagcucau

SEQ ID NO: 283080 - RNA, 19 nt, Artificial Sequence
  Description of Artificial Sequence: Synthetic oligonucleotide
gguggcuugcagcacacga

SEQ ID NO: 283081 - RNA, 19 nt, Artificial Sequence
  Description of Artificial Sequence: Synthetic oligonucleotide
cacaauuccccuguguaaa

SEQ ID NO: 283082 - RNA, 19 nt, Artificial Sequence
  Description of Artificial Sequence: Synthetic oligonucleotide
aucacauuuccaagggaaa

SEQ ID NO: 283083 - RNA, 19 nt, Artificial Sequence
  Description of Artificial Sequence: Synthetic oligonucleotide
uaccuuuguucuaggccau

SEQ ID NO: 283084 - RNA, 19 nt, Artificial Sequence
  Description of Artificial Sequence: Synthetic oligonucleotide
cauccaucaauaaccauuu

SEQ ID NO: 283085 - RNA, 19 nt, Artificial Sequence
  Description of Artificial Sequence: Synthetic oligonucleotide
aguacuguccugacucagu

SEQ ID NO: 283086 - RNA, 19 nt, Artificial Sequence
  Description of Artificial Sequence: Synthetic oligonucleotide
uagagcgacagggcuucag

SEQ ID NO: 283087 - RNA, 19 nt, Artificial Sequence
  Description of Artificial Sequence: Synthetic oligonucleotide
cauuucuaauacuuggcuu

SEQ ID NO: 283088 - RNA, 19 nt, Artificial Sequence
  Description of Artificial Sequence: Synthetic oligonucleotide
gcaagccaggucuacauaa

SEQ ID NO: 283089 - RNA, 19 nt, Artificial Sequence
  Description of Artificial Sequence: Synthetic oligonucleotide
accgcuggagacugaggga

SEQ ID NO: 283090 - RNA, 19 nt, Artificial Sequence
  Description of Artificial Sequence: Synthetic oligonucleotide
augccucgcauuaauaaua

SEQ ID NO: 283091 - RNA, 19 nt, Artificial Sequence
  Description of Artificial Sequence: Synthetic oligonucleotide
cugacucugccauccccug

SEQ ID NO: 283092 - RNA, 19 nt, Artificial Sequence
  Description of Artificial Sequence: Synthetic oligonucleotide
cuuuggugccaagcugugc

SEQ ID NO: 283093 - RNA, 19 nt, Artificial Sequence
  Description of Artificial Sequence: Synthetic oligonucleotide
gcacacgacauucucaucu

SEQ ID NO: 283094 - RNA, 19 nt, Artificial Sequence
  Description of Artificial Sequence: Synthetic oligonucleotide
uaacacccuagcucaucaa

SEQ ID NO: 283095 - RNA, 19 nt, Artificial Sequence
  Description of Artificial Sequence: Synthetic oligonucleotide
cuugcauaaccuacccucu

SEQ ID NO: 283096 - RNA, 19 nt, Artificial Sequence
  Description of Artificial Sequence: Synthetic oligonucleotide
ucuuagcaucugcuguguu

SEQ ID NO: 283097 - RNA, 19 nt, Artificial Sequence
  Description of Artificial Sequence: Synthetic oligonucleotide
uccucgaacuauggguggu

SEQ ID NO: 283098 - RNA, 19 nt, Artificial Sequence
  Description of Artificial Sequence: Synthetic oligonucleotide
gaagggacacagacaaucu

SEQ ID NO: 283099 - RNA, 19 nt, Artificial Sequence
  Description of Artificial Sequence: Synthetic oligonucleotide
gaguggaucugugguugug

SEQ ID NO: 283100 - RNA, 19 nt, Artificial Sequence
  Description of Artificial Sequence: Synthetic oligonucleotide
cucggguguacgccaaguc

SEQ ID NO: 283101 - RNA, 19 nt, Artificial Sequence
  Description of Artificial Sequence: Synthetic oligonucleotide
cugauagcagucuccuuua

SEQ ID NO: 283102 - RNA, 19 nt, Artificial Sequence
  Description of Artificial Sequence: Synthetic oligonucleotide
guugcuaaauagccauggu

SEQ ID NO: 283103 - RNA, 19 nt, Artificial Sequence
  Description of Artificial Sequence: Synthetic oligonucleotide
gucuaagacaucuccgcau

SEQ ID NO: 283104 - RNA, 19 nt, Artificial Sequence
  Description of Artificial Sequence: Synthetic oligonucleotide
aggucgagaaucagucuga

SEQ ID NO: 283105 - RNA, 19 nt, Artificial Sequence
  Description of Artificial Sequence: Synthetic oligonucleotide
guggcuugcagcacacgac

SEQ ID NO: 283106 - RNA, 19 nt, Artificial Sequence
  Description of Artificial Sequence: Synthetic oligonucleotide
auaauacauccaggagcug

SEQ ID NO: 283107 - RNA, 19 nt, Artificial Sequence
  Description of Artificial Sequence: Synthetic oligonucleotide
gcaccaaauuuuaauaucu

SEQ ID NO: 283108 - RNA, 19 nt, Artificial Sequence
  Description of Artificial Sequence: Synthetic oligonucleotide
ccaaauguaucuuccaagu

SEQ ID NO: 283109 - RNA, 19 nt, Artificial Sequence
  Description of Artificial Sequence: Synthetic oligonucleotide
cauaguguggcgaggcccu

SEQ ID NO: 283110 - RNA, 19 nt, Artificial Sequence
  Description of Artificial Sequence: Synthetic oligonucleotide
auuccccuguguaaaguau

SEQ ID NO: 283111 - RNA, 19 nt, Artificial Sequence
  Description of Artificial Sequence: Synthetic oligonucleotide
ugacucaguugauggcaua

SEQ ID NO: 283112 - RNA, 19 nt, Artificial Sequence
  Description of Artificial Sequence: Synthetic oligonucleotide
auacaccacuucaucuaug

SEQ ID NO: 283113 - RNA, 19 nt, Artificial Sequence
  Description of Artificial Sequence: Synthetic oligonucleotide
gucgagaaucagucugaga

SEQ ID NO: 283114 - RNA, 19 nt, Artificial Sequence
  Description of Artificial Sequence: Synthetic oligonucleotide
aggaccugagucaccagaa

SEQ ID NO: 283115 - RNA, 19 nt, Artificial Sequence
  Description of Artificial Sequence: Synthetic oligonucleotide
aggccaucagagguaagaa

SEQ ID NO: 283116 - RNA, 19 nt, Artificial Sequence
  Description of Artificial Sequence: Synthetic oligonucleotide
ccucgcauuaauaauacau

SEQ ID NO: 283117 - RNA, 19 nt, Artificial Sequence
  Description of Artificial Sequence: Synthetic oligonucleotide
ccauaguguggcgaggccc

SEQ ID NO: 283118 - RNA, 19 nt, Artificial Sequence
  Description of Artificial Sequence: Synthetic oligonucleotide
accuuuguucuaggccauc

SEQ ID NO: 283119 - RNA, 19 nt, Artificial Sequence
  Description of Artificial Sequence: Synthetic oligonucleotide
gaagucucagcugggcugu

SEQ ID NO: 283120 - RNA, 19 nt, Artificial Sequence
  Description of Artificial Sequence: Synthetic oligonucleotide
acgcccaguacuguccuga

SEQ ID NO: 283121 - RNA, 19 nt, Artificial Sequence
  Description of Artificial Sequence: Synthetic oligonucleotide
uggggaggcgaccgcugga

SEQ ID NO: 283122 - RNA, 19 nt, Artificial Sequence
  Description of Artificial Sequence: Synthetic oligonucleotide
caugccucgcauuaauaau

SEQ ID NO: 283123 - RNA, 19 nt, Artificial Sequence
  Description of Artificial Sequence: Synthetic oligonucleotide
cacugcuaaucacuuaagu

SEQ ID NO: 283124 - RNA, 19 nt, Artificial Sequence
  Description of Artificial Sequence: Synthetic oligonucleotide
agacugagcuacauacaau

SEQ ID NO: 283125 - RNA, 19 nt, Artificial Sequence
  Description of Artificial Sequence: Synthetic oligonucleotide
caggucaugccucgcauua

SEQ ID NO: 283126 - RNA, 19 nt, Artificial Sequence
  Description of Artificial Sequence: Synthetic oligonucleotide
agguugcuaaauagccaug

SEQ ID NO: 283127 - RNA, 19 nt, Artificial Sequence
  Description of Artificial Sequence: Synthetic oligonucleotide
guuacucuucaaguaccaa

SEQ ID NO: 283128 - RNA, 19 nt, Artificial Sequence
  Description of Artificial Sequence: Synthetic oligonucleotide
agggaucgcgcagcguguc

SEQ ID NO: 283129 - RNA, 19 nt, Artificial Sequence
  Description of Artificial Sequence: Synthetic oligonucleotide
gcuaaauagccaugguccu

SEQ ID NO: 283130 - RNA, 19 nt, Artificial Sequence
  Description of Artificial Sequence: Synthetic oligonucleotide
ccaaauuaacaucaccgcu

SEQ ID NO: 283131 - RNA, 19 nt, Artificial Sequence
  Description of Artificial Sequence: Synthetic oligonucleotide
cugugguuguggccucaag

SEQ ID NO: 283132 - RNA, 19 nt, Artificial Sequence
  Description of Artificial Sequence: Synthetic oligonucleotide
ggucgagaaucagucugag

SEQ ID NO: 283133 - RNA, 19 nt, Artificial Sequence
  Description of Artificial Sequence: Synthetic oligonucleotide
cuaggccaucagagguaag

SEQ ID NO: 283134 - RNA, 19 nt, Artificial Sequence
  Description of Artificial Sequence: Synthetic oligonucleotide
cauacaccacuucaucuau

SEQ ID NO: 283135 - RNA, 19 nt, Artificial Sequence
  Description of Artificial Sequence: Synthetic oligonucleotide
ggcauauggggcauaugga

SEQ ID NO: 283136 - RNA, 19 nt, Artificial Sequence
  Description of Artificial Sequence: Synthetic oligonucleotide
gguuagacugagcuacaua

SEQ ID NO: 283137 - RNA, 19 nt, Artificial Sequence
  Description of Artificial Sequence: Synthetic oligonucleotide
agguuagacugagcuacau

SEQ ID NO: 283138 - RNA, 19 nt, Artificial Sequence
  Description of Artificial Sequence: Synthetic oligonucleotide
ggaucgcgcagcgugucag

SEQ ID NO: 283139 - RNA, 19 nt, Artificial Sequence
  Description of Artificial Sequence: Synthetic oligonucleotide
guguacgccaagucacucu

SEQ ID NO: 283140 - RNA, 19 nt, Artificial Sequence
  Description of Artificial Sequence: Synthetic oligonucleotide
gcccaugauggcucgggug

SEQ ID NO: 283141 - RNA, 19 nt, Artificial Sequence
  Description of Artificial Sequence: Synthetic oligonucleotide
cuauccguauuugucuugu

SEQ ID NO: 283142 - RNA, 19 nt, Artificial Sequence
  Description of Artificial Sequence: Synthetic oligonucleotide
cagguuagacugagcuaca

SEQ ID NO: 283143 - RNA, 19 nt, Artificial Sequence
  Description of Artificial Sequence: Synthetic oligonucleotide
auagccccuccucgaacua

SEQ ID NO: 283144 - RNA, 19 nt, Artificial Sequence
  Description of Artificial Sequence: Synthetic oligonucleotide
gacaucuccgcauguucuu

SEQ ID NO: 283145 - RNA, 19 nt, Artificial Sequence
  Description of Artificial Sequence: Synthetic oligonucleotide
cugucguaacucugaaggu

SEQ ID NO: 283146 - RNA, 19 nt, Artificial Sequence
  Description of Artificial Sequence: Synthetic oligonucleotide
gguaaacguuucacacgcc

SEQ ID NO: 283147 - RNA, 19 nt, Artificial Sequence
  Description of Artificial Sequence: Synthetic oligonucleotide
cucuaccauggugaccauc

SEQ ID NO: 283148 - RNA, 19 nt, Artificial Sequence
  Description of Artificial Sequence: Synthetic oligonucleotide
cgucauacaccacuucauc

SEQ ID NO: 283149 - RNA, 19 nt, Artificial Sequence
  Description of Artificial Sequence: Synthetic oligonucleotide
uggcucggguguacgccaa

SEQ ID NO: 283150 - RNA, 19 nt, Artificial Sequence
  Description of Artificial Sequence: Synthetic oligonucleotide
ccuagcucaucaaaauaua

SEQ ID NO: 283151 - RNA, 19 nt, Artificial Sequence
  Description of Artificial Sequence: Synthetic oligonucleotide
aggcgaccgcuggagacug

SEQ ID NO: 283152 - RNA, 19 nt, Artificial Sequence
  Description of Artificial Sequence: Synthetic oligonucleotide
cacccuagcucaucaaaau

SEQ ID NO: 283153 - RNA, 19 nt, Artificial Sequence
  Description of Artificial Sequence: Synthetic oligonucleotide
cccuagcucaucaaaauau

SEQ ID NO: 283154 - RNA, 19 nt, Artificial Sequence
  Description of Artificial Sequence: Synthetic oligonucleotide
cucgaacuaugggugguaa

SEQ ID NO: 283155 - RNA, 19 nt, Artificial Sequence
  Description of Artificial Sequence: Synthetic oligonucleotide
cagugcucuagcccauuaa

SEQ ID NO: 283156 - RNA, 19 nt, Artificial Sequence
  Description of Artificial Sequence: Synthetic oligonucleotide
gcgacagggcuucagucaa

SEQ ID NO: 283157 - RNA, 19 nt, Artificial Sequence
  Description of Artificial Sequence: Synthetic oligonucleotide
ccaaauuguuuugagugua

SEQ ID NO: 283158 - RNA, 19 nt, Artificial Sequence
  Description of Artificial Sequence: Synthetic oligonucleotide
cauaaccuacccucuucau

SEQ ID NO: 283159 - RNA, 19 nt, Artificial Sequence
  Description of Artificial Sequence: Synthetic oligonucleotide
caccaacccagcuuucccu

SEQ ID NO: 283160 - RNA, 19 nt, Artificial Sequence
  Description of Artificial Sequence: Synthetic oligonucleotide
gguguacgccaagucacuc

SEQ ID NO: 283161 - RNA, 19 nt, Artificial Sequence
  Description of Artificial Sequence: Synthetic oligonucleotide
cacuauccguauuugucuu

SEQ ID NO: 283162 - RNA, 19 nt, Artificial Sequence
  Description of Artificial Sequence: Synthetic oligonucleotide
aggucaugccucgcauuaa

SEQ ID NO: 283163 - RNA, 19 nt, Artificial Sequence
  Description of Artificial Sequence: Synthetic oligonucleotide
gaggcgaccgcuggagacu

SEQ ID NO: 283164 - RNA, 19 nt, Artificial Sequence
  Description of Artificial Sequence: Synthetic oligonucleotide
augaagggacacagacaau

SEQ ID NO: 283165 - RNA, 19 nt, Artificial Sequence
  Description of Artificial Sequence: Synthetic oligonucleotide
gcgaccgcuggagacugag

SEQ ID NO: 283166 - RNA, 19 nt, Artificial Sequence
  Description of Artificial Sequence: Synthetic oligonucleotide
caguuggaucaguuuuaua

SEQ ID NO: 283167 - RNA, 19 nt, Artificial Sequence
  Description of Artificial Sequence: Synthetic oligonucleotide
cugacucaguucuuucauu

SEQ ID NO: 283168 - RNA, 19 nt, Artificial Sequence
  Description of Artificial Sequence: Synthetic oligonucleotide
gcugaggaugagaauauuu

SEQ ID NO: 283169 - RNA, 19 nt, Artificial Sequence
  Description of Artificial Sequence: Synthetic oligonucleotide
gccucgcauuaauaauaca

SEQ ID NO: 283170 - RNA, 19 nt, Artificial Sequence
  Description of Artificial Sequence: Synthetic oligonucleotide
uacaggcgccccagcuguu

SEQ ID NO: 283171 - RNA, 19 nt, Artificial Sequence
  Description of Artificial Sequence: Synthetic oligonucleotide
guuguggccucaaguuacu

SEQ ID NO: 283172 - RNA, 19 nt, Artificial Sequence
  Description of Artificial Sequence: Synthetic oligonucleotide
cgagaaucagucugagaaa

SEQ ID NO: 283173 - RNA, 19 nt, Artificial Sequence
  Description of Artificial Sequence: Synthetic oligonucleotide
cccaguuggaucaguuuua

SEQ ID NO: 283174 - RNA, 19 nt, Artificial Sequence
  Description of Artificial Sequence: Synthetic oligonucleotide
auagagcgacagggcuuca

SEQ ID NO: 283175 - RNA, 19 nt, Artificial Sequence
  Description of Artificial Sequence: Synthetic oligonucleotide
cuaguacacuggguggggu

SEQ ID NO: 283176 - RNA, 19 nt, Artificial Sequence
  Description of Artificial Sequence: Synthetic oligonucleotide
ggcguaccucuucaguacu

SEQ ID NO: 283177 - RNA, 19 nt, Artificial Sequence
  Description of Artificial Sequence: Synthetic oligonucleotide
ggcucggguguacgccaag

SEQ ID NO: 283178 - RNA, 19 nt, Artificial Sequence
  Description of Artificial Sequence: Synthetic oligonucleotide
gagggaucgcgcagcgugu

SEQ ID NO: 283179 - RNA, 19 nt, Artificial Sequence
  Description of Artificial Sequence: Synthetic oligonucleotide
gccccuccucgaacuaugg

SEQ ID NO: 283180 - RNA, 19 nt, Artificial Sequence
  Description of Artificial Sequence: Synthetic oligonucleotide
ccugagucaccagaaauau

SEQ ID NO: 283181 - RNA, 19 nt, Artificial Sequence
  Description of Artificial Sequence: Synthetic oligonucleotide
cucucccuucuuuggcgua

SEQ ID NO: 283182 - RNA, 19 nt, Artificial Sequence
  Description of Artificial Sequence: Synthetic oligonucleotide
caucaccgcugaggaugag

SEQ ID NO: 283183 - RNA, 19 nt, Artificial Sequence
  Description of Artificial Sequence: Synthetic oligonucleotide
gggaucgcgcagcguguca

SEQ ID NO: 283184 - RNA, 19 nt, Artificial Sequence
  Description of Artificial Sequence: Synthetic oligonucleotide
ccccuguguaaaguauuuc

SEQ ID NO: 283185 - RNA, 19 nt, Artificial Sequence
  Description of Artificial Sequence: Synthetic oligonucleotide
gcagugcucuagcccauua

SEQ ID NO: 283186 - RNA, 19 nt, Artificial Sequence
  Description of Artificial Sequence: Synthetic oligonucleotide
caugaccaguugccugacu

SEQ ID NO: 283187 - RNA, 19 nt, Artificial Sequence
  Description of Artificial Sequence: Synthetic oligonucleotide
gccuugcauaaccuacccu

SEQ ID NO: 283188 - RNA, 19 nt, Artificial Sequence
  Description of Artificial Sequence: Synthetic oligonucleotide
ccaagggaaaggagcauuu

SEQ ID NO: 283189 - RNA, 19 nt, Artificial Sequence
  Description of Artificial Sequence: Synthetic oligonucleotide
guacgccaagucacucucu

SEQ ID NO: 283190 - RNA, 19 nt, Artificial Sequence
  Description of Artificial Sequence: Synthetic oligonucleotide
ccuugugcgucgcugucgu

SEQ ID NO: 283191 - RNA, 19 nt, Artificial Sequence
  Description of Artificial Sequence: Synthetic oligonucleotide
cuugugcgucgcugucgua

SEQ ID NO: 283192 - RNA, 19 nt, Artificial Sequence
  Description of Artificial Sequence: Synthetic oligonucleotide
gccaugccuggggaggcga

SEQ ID NO: 283193 - RNA, 19 nt, Artificial Sequence
  Description of Artificial Sequence: Synthetic oligonucleotide
ccgcugaggaugagaauau

SEQ ID NO: 283194 - RNA, 19 nt, Artificial Sequence
  Description of Artificial Sequence: Synthetic oligonucleotide
gcucggguguacgccaagu

SEQ ID NO: 283195 - RNA, 19 nt, Artificial Sequence
  Description of Artificial Sequence: Synthetic oligonucleotide
ccucgaacuauggguggua

SEQ ID NO: 283196 - RNA, 19 nt, Artificial Sequence
  Description of Artificial Sequence: Synthetic oligonucleotide
ggcgaccgcuggagacuga

SEQ ID NO: 283197 - RNA, 19 nt, Artificial Sequence
  Description of Artificial Sequence: Synthetic oligonucleotide
aaugcaauugguuuguuac

SEQ ID NO: 283198 - RNA, 19 nt, Artificial Sequence
  Description of Artificial Sequence: Synthetic oligonucleotide
aaagaaucaaccuugagcu

SEQ ID NO: 283199 - RNA, 19 nt, Artificial Sequence
  Description of Artificial Sequence: Synthetic oligonucleotide
agaaauauuucccaaaggg

SEQ ID NO: 283200 - RNA, 19 nt, Artificial Sequence
  Description of Artificial Sequence: Synthetic oligonucleotide
uguucuauaauggagaagg

SEQ ID NO: 283201 - RNA, 19 nt, Artificial Sequence
  Description of Artificial Sequence: Synthetic oligonucleotide
uuaaccaacuaauugaaag

SEQ ID NO: 283202 - RNA, 19 nt, Artificial Sequence
  Description of Artificial Sequence: Synthetic oligonucleotide
uguaauauaauaucuagaa

SEQ ID NO: 283203 - RNA, 19 nt, Artificial Sequence
  Description of Artificial Sequence: Synthetic oligonucleotide
acaaacuuaaaacaagggg

SEQ ID NO: 283204 - RNA, 19 nt, Artificial Sequence
  Description of Artificial Sequence: Synthetic oligonucleotide
ucuucuauggguuugaccu

SEQ ID NO: 283205 - RNA, 19 nt, Artificial Sequence
  Description of Artificial Sequence: Synthetic oligonucleotide
uuagguaucccucaucacg

SEQ ID NO: 283206 - RNA, 19 nt, Artificial Sequence
  Description of Artificial Sequence: Synthetic oligonucleotide
auaagaugcagcuucacuc

SEQ ID NO: 283207 - RNA, 19 nt, Artificial Sequence
  Description of Artificial Sequence: Synthetic oligonucleotide
acauguauaugagaaaacc

SEQ ID NO: 283208 - RNA, 19 nt, Artificial Sequence
  Description of Artificial Sequence: Synthetic oligonucleotide
uaaccaacuaauugaaagg

SEQ ID NO: 283209 - RNA, 19 nt, Artificial Sequence
  Description of Artificial Sequence: Synthetic oligonucleotide
uauucugggaaucaagagc

SEQ ID NO: 283210 - RNA, 19 nt, Artificial Sequence
  Description of Artificial Sequence: Synthetic oligonucleotide
acuaucaaguucuaauaac

SEQ ID NO: 283211 - RNA, 19 nt, Artificial Sequence
  Description of Artificial Sequence: Synthetic oligonucleotide
gaccguauuacauuucucg

SEQ ID NO: 283212 - RNA, 19 nt, Artificial Sequence
  Description of Artificial Sequence: Synthetic oligonucleotide
aaucucagguuuuacuuuc

SEQ ID NO: 283213 - RNA, 19 nt, Artificial Sequence
  Description of Artificial Sequence: Synthetic oligonucleotide
uuucauuagacucuaacua

SEQ ID NO: 283214 - RNA, 19 nt, Artificial Sequence
  Description of Artificial Sequence: Synthetic oligonucleotide
acauucauccaaucuacgc

SEQ ID NO: 283215 - RNA, 19 nt, Artificial Sequence
  Description of Artificial Sequence: Synthetic oligonucleotide
agacacuuuuccuauauuc

SEQ ID NO: 283216 - RNA, 19 nt, Artificial Sequence
  Description of Artificial Sequence: Synthetic oligonucleotide
auacacaugaauuacugcu

SEQ ID NO: 283217 - RNA, 19 nt, Artificial Sequence
  Description of Artificial Sequence: Synthetic oligonucleotide
aauuaagacaggcugggaa

SEQ ID NO: 283218 - RNA, 19 nt, Artificial Sequence
  Description of Artificial Sequence: Synthetic oligonucleotide
caagauucgaaagaggagg

SEQ ID NO: 283219 - RNA, 19 nt, Artificial Sequence
  Description of Artificial Sequence: Synthetic oligonucleotide
cuauaauggagaaggaagc

SEQ ID NO: 283220 - RNA, 19 nt, Artificial Sequence
  Description of Artificial Sequence: Synthetic oligonucleotide
auagucauguaacaaacca

SEQ ID NO: 283221 - RNA, 19 nt, Artificial Sequence
  Description of Artificial Sequence: Synthetic oligonucleotide
gauagaagaguuccugagg

SEQ ID NO: 283222 - RNA, 19 nt, Artificial Sequence
  Description of Artificial Sequence: Synthetic oligonucleotide
cuuuuaaccaacuaauuga

SEQ ID NO: 283223 - RNA, 19 nt, Artificial Sequence
  Description of Artificial Sequence: Synthetic oligonucleotide
agcacaauacuauaaauau

SEQ ID NO: 283224 - RNA, 19 nt, Artificial Sequence
  Description of Artificial Sequence: Synthetic oligonucleotide
uaagacaacugucaccugc

SEQ ID NO: 283225 - RNA, 19 nt, Artificial Sequence
  Description of Artificial Sequence: Synthetic oligonucleotide
aagccaaauagacacugag

SEQ ID NO: 283226 - RNA, 19 nt, Artificial Sequence
  Description of Artificial Sequence: Synthetic oligonucleotide
aaucaagagcuguacccac

SEQ ID NO: 283227 - RNA, 19 nt, Artificial Sequence
  Description of Artificial Sequence: Synthetic oligonucleotide
ugagaguuucauuagacuc

SEQ ID NO: 283228 - RNA, 19 nt, Artificial Sequence
  Description of Artificial Sequence: Synthetic oligonucleotide
uuguaauauaauaucuaga

SEQ ID NO: 283229 - RNA, 19 nt, Artificial Sequence
  Description of Artificial Sequence: Synthetic oligonucleotide
uuaucagaagagagggugg

SEQ ID NO: 283230 - RNA, 19 nt, Artificial Sequence
  Description of Artificial Sequence: Synthetic oligonucleotide
uuuuaaccaacuaauugaa

SEQ ID NO: 283231 - RNA, 19 nt, Artificial Sequence
  Description of Artificial Sequence: Synthetic oligonucleotide
cucaaggugggauagacac

SEQ ID NO: 283232 - RNA, 19 nt, Artificial Sequence
  Description of Artificial Sequence: Synthetic oligonucleotide
acaugaauuacugcuuucc

SEQ ID NO: 283233 - RNA, 19 nt, Artificial Sequence
  Description of Artificial Sequence: Synthetic oligonucleotide
cuucgcagcauauuuauac

SEQ ID NO: 283234 - RNA, 19 nt, Artificial Sequence
  Description of Artificial Sequence: Synthetic oligonucleotide
aacacguggaaggaggagg

SEQ ID NO: 283235 - RNA, 19 nt, Artificial Sequence
  Description of Artificial Sequence: Synthetic oligonucleotide
cuauccaacacacaagcug

SEQ ID NO: 283236 - RNA, 19 nt, Artificial Sequence
  Description of Artificial Sequence: Synthetic oligonucleotide
aagauucgaaagaggaggc

SEQ ID NO: 283237 - RNA, 19 nt, Artificial Sequence
  Description of Artificial Sequence: Synthetic oligonucleotide
ucggucuugagccagacuc

SEQ ID NO: 283238 - RNA, 19 nt, Artificial Sequence
  Description of Artificial Sequence: Synthetic oligonucleotide
aucacgauagucauguaac

SEQ ID NO: 283239 - RNA, 19 nt, Artificial Sequence
  Description of Artificial Sequence: Synthetic oligonucleotide
aggaucaugucauguaggg

SEQ ID NO: 283240 - RNA, 19 nt, Artificial Sequence
  Description of Artificial Sequence: Synthetic oligonucleotide
agaaucaaccuugagcuuc

SEQ ID NO: 283241 - RNA, 19 nt, Artificial Sequence
  Description of Artificial Sequence: Synthetic oligonucleotide
uuaaaacaaggggaggagg

SEQ ID NO: 283242 - RNA, 19 nt, Artificial Sequence
  Description of Artificial Sequence: Synthetic oligonucleotide
aauagacacugagagucac

SEQ ID NO: 283243 - RNA, 19 nt, Artificial Sequence
  Description of Artificial Sequence: Synthetic oligonucleotide
agaaauuaagacaggcugg

SEQ ID NO: 283244 - RNA, 19 nt, Artificial Sequence
  Description of Artificial Sequence: Synthetic oligonucleotide
aggugugaucacuauuucc

SEQ ID NO: 283245 - RNA, 19 nt, Artificial Sequence
  Description of Artificial Sequence: Synthetic oligonucleotide
gaugaugagacggaggcug

SEQ ID NO: 283246 - RNA, 19 nt, Artificial Sequence
  Description of Artificial Sequence: Synthetic oligonucleotide
uaaagucccacauaagcaa

SEQ ID NO: 283247 - RNA, 19 nt, Artificial Sequence
  Description of Artificial Sequence: Synthetic oligonucleotide
uucauuagacucuaacuaa

SEQ ID NO: 283248 - RNA, 19 nt, Artificial Sequence
  Description of Artificial Sequence: Synthetic oligonucleotide
guagggaggaccuaaaguc

SEQ ID NO: 283249 - RNA, 19 nt, Artificial Sequence
  Description of Artificial Sequence: Synthetic oligonucleotide
aaauuugccaccaagucuu

SEQ ID NO: 283250 - RNA, 19 nt, Artificial Sequence
  Description of Artificial Sequence: Synthetic oligonucleotide
uguagggugacauacugau

SEQ ID NO: 283251 - RNA, 19 nt, Artificial Sequence
  Description of Artificial Sequence: Synthetic oligonucleotide
augugugacgggcugaggg

SEQ ID NO: 283252 - RNA, 19 nt, Artificial Sequence
  Description of Artificial Sequence: Synthetic oligonucleotide
uguuacugagcacuauuca

SEQ ID NO: 283253 - RNA, 19 nt, Artificial Sequence
  Description of Artificial Sequence: Synthetic oligonucleotide
aaaugauaucucugcaaga

SEQ ID NO: 283254 - RNA, 19 nt, Artificial Sequence
  Description of Artificial Sequence: Synthetic oligonucleotide
uauucuugugccauauccu

SEQ ID NO: 283255 - RNA, 19 nt, Artificial Sequence
  Description of Artificial Sequence: Synthetic oligonucleotide
augauugggaguuggaaga

SEQ ID NO: 283256 - RNA, 19 nt, Artificial Sequence
  Description of Artificial Sequence: Synthetic oligonucleotide
aaccaacuaauugaaagga

SEQ ID NO: 283257 - RNA, 19 nt, Artificial Sequence
  Description of Artificial Sequence: Synthetic oligonucleotide
uccaucguggcuauuggug

SEQ ID NO: 283258 - RNA, 19 nt, Artificial Sequence
  Description of Artificial Sequence: Synthetic oligonucleotide
agugaaaaugaugcauccc

SEQ ID NO: 283259 - RNA, 19 nt, Artificial Sequence
  Description of Artificial Sequence: Synthetic oligonucleotide
agagcccuaaggcaucacc

SEQ ID NO: 283260 - RNA, 19 nt, Artificial Sequence
  Description of Artificial Sequence: Synthetic oligonucleotide
ugaguuaggucauggauau

SEQ ID NO: 283261 - RNA, 19 nt, Artificial Sequence
  Description of Artificial Sequence: Synthetic oligonucleotide
uguaugugcacagacacau

SEQ ID NO: 283262 - RNA, 19 nt, Artificial Sequence
  Description of Artificial Sequence: Synthetic oligonucleotide
cuauguucuauaauggaga

SEQ ID NO: 283263 - RNA, 19 nt, Artificial Sequence
  Description of Artificial Sequence: Synthetic oligonucleotide
cuuguaagugggaccaucc

SEQ ID NO: 283264 - RNA, 19 nt, Artificial Sequence
  Description of Artificial Sequence: Synthetic oligonucleotide
gaugggguuaacacaaaag

SEQ ID NO: 283265 - RNA, 19 nt, Artificial Sequence
  Description of Artificial Sequence: Synthetic oligonucleotide
ucauuagacucuaacuaaa

SEQ ID NO: 283266 - RNA, 19 nt, Artificial Sequence
  Description of Artificial Sequence: Synthetic oligonucleotide
agggaaggccuucaugagc

SEQ ID NO: 283267 - RNA, 19 nt, Artificial Sequence
  Description of Artificial Sequence: Synthetic oligonucleotide
uugaccguauuacauuucu

SEQ ID NO: 283268 - RNA, 19 nt, Artificial Sequence
  Description of Artificial Sequence: Synthetic oligonucleotide
uauggguuugaccuucgca

SEQ ID NO: 283269 - RNA, 19 nt, Artificial Sequence
  Description of Artificial Sequence: Synthetic oligonucleotide
ugacauacugauuccucag

SEQ ID NO: 283270 - RNA, 19 nt, Artificial Sequence
  Description of Artificial Sequence: Synthetic oligonucleotide
gcaaugucggucuugagcc

SEQ ID NO: 283271 - RNA, 19 nt, Artificial Sequence
  Description of Artificial Sequence: Synthetic oligonucleotide
aacuaauugaaaggaagaa

SEQ ID NO: 283272 - RNA, 19 nt, Artificial Sequence
  Description of Artificial Sequence: Synthetic oligonucleotide
aguggaucugaguuagguc

SEQ ID NO: 283273 - RNA, 19 nt, Artificial Sequence
  Description of Artificial Sequence: Synthetic oligonucleotide
ggagauucaugucugagug

SEQ ID NO: 283274 - RNA, 19 nt, Artificial Sequence
  Description of Artificial Sequence: Synthetic oligonucleotide
uauacaugucccuaugcau

SEQ ID NO: 283275 - RNA, 19 nt, Artificial Sequence
  Description of Artificial Sequence: Synthetic oligonucleotide
cuacgcuucuuguaagugg

SEQ ID NO: 283276 - RNA, 19 nt, Artificial Sequence
  Description of Artificial Sequence: Synthetic oligonucleotide
auuaagacaggcugggaau

SEQ ID NO: 283277 - RNA, 19 nt, Artificial Sequence
  Description of Artificial Sequence: Synthetic oligonucleotide
augaauuacugcuuucccu

SEQ ID NO: 283278 - RNA, 19 nt, Artificial Sequence
  Description of Artificial Sequence: Synthetic oligonucleotide
gucacuggcagguuaacug

SEQ ID NO: 283279 - RNA, 19 nt, Artificial Sequence
  Description of Artificial Sequence: Synthetic oligonucleotide
uuacccugggcaccaacgg

SEQ ID NO: 283280 - RNA, 19 nt, Artificial Sequence
  Description of Artificial Sequence: Synthetic oligonucleotide
gagaaggaagcauguauac

SEQ ID NO: 283281 - RNA, 19 nt, Artificial Sequence
  Description of Artificial Sequence: Synthetic oligonucleotide
ugugugacgggcugagggg

SEQ ID NO: 283282 - RNA, 19 nt, Artificial Sequence
  Description of Artificial Sequence: Synthetic oligonucleotide
aguucuuaguucugcaacu

SEQ ID NO: 283283 - RNA, 19 nt, Artificial Sequence
  Description of Artificial Sequence: Synthetic oligonucleotide
aauagacaccccgaaguug

SEQ ID NO: 283284 - RNA, 19 nt, Artificial Sequence
  Description of Artificial Sequence: Synthetic oligonucleotide
ugugaucacuauuuccagc

SEQ ID NO: 283285 - RNA, 19 nt, Artificial Sequence
  Description of Artificial Sequence: Synthetic oligonucleotide
aaccaaggcaaugucgguc

SEQ ID NO: 283286 - RNA, 19 nt, Artificial Sequence
  Description of Artificial Sequence: Synthetic oligonucleotide
cacacgaauacacacgcac

SEQ ID NO: 283287 - RNA, 19 nt, Artificial Sequence
  Description of Artificial Sequence: Synthetic oligonucleotide
uuuguuacugagcacuauu

SEQ ID NO: 283288 - RNA, 19 nt, Artificial Sequence
  Description of Artificial Sequence: Synthetic oligonucleotide
uagggaggaccuaaagucc

SEQ ID NO: 283289 - RNA, 19 nt, Artificial Sequence
  Description of Artificial Sequence: Synthetic oligonucleotide
ugcaauugguuuguuacug

SEQ ID NO: 283290 - RNA, 19 nt, Artificial Sequence
  Description of Artificial Sequence: Synthetic oligonucleotide
uaacaaaccaaggcaaugu

SEQ ID NO: 283291 - RNA, 19 nt, Artificial Sequence
  Description of Artificial Sequence: Synthetic oligonucleotide
uuguuacugagcacuauuc

SEQ ID NO: 283292 - RNA, 19 nt, Artificial Sequence
  Description of Artificial Sequence: Synthetic oligonucleotide
ccuaaagucccacauaagc

SEQ ID NO: 283293 - RNA, 19 nt, Artificial Sequence
  Description of Artificial Sequence: Synthetic oligonucleotide
aggaguacugcccaacuga

SEQ ID NO: 283294 - RNA, 19 nt, Artificial Sequence
  Description of Artificial Sequence: Synthetic oligonucleotide
uuuugaccguauuacauuu

SEQ ID NO: 283295 - RNA, 19 nt, Artificial Sequence
  Description of Artificial Sequence: Synthetic oligonucleotide
gaaagcacagcgaagagua

SEQ ID NO: 283296 - RNA, 19 nt, Artificial Sequence
  Description of Artificial Sequence: Synthetic oligonucleotide
ggaggcaacucuucuaugg

SEQ ID NO: 283297 - RNA, 19 nt, Artificial Sequence
  Description of Artificial Sequence: Synthetic oligonucleotide
auauuucccaaagggaaag

SEQ ID NO: 283298 - RNA, 19 nt, Artificial Sequence
  Description of Artificial Sequence: Synthetic oligonucleotide
ucacuggcagguuaacugc

SEQ ID NO: 283299 - RNA, 19 nt, Artificial Sequence
  Description of Artificial Sequence: Synthetic oligonucleotide
uguugcaugugugacgggc

SEQ ID NO: 283300 - RNA, 19 nt, Artificial Sequence
  Description of Artificial Sequence: Synthetic oligonucleotide
ccaacuaauugaaaggaag

SEQ ID NO: 283301 - RNA, 19 nt, Artificial Sequence
  Description of Artificial Sequence: Synthetic oligonucleotide
uucaacuuacccugggcac

SEQ ID NO: 283302 - RNA, 19 nt, Artificial Sequence
  Description of Artificial Sequence: Synthetic oligonucleotide
uggaagcacaauacuauaa

SEQ ID NO: 283303 - RNA, 19 nt, Artificial Sequence
  Description of Artificial Sequence: Synthetic oligonucleotide
gaccuaaagucccacauaa

SEQ ID NO: 283304 - RNA, 19 nt, Artificial Sequence
  Description of Artificial Sequence: Synthetic oligonucleotide
uggaguaugauugggaguu

SEQ ID NO: 283305 - RNA, 19 nt, Artificial Sequence
  Description of Artificial Sequence: Synthetic oligonucleotide
agauucaugucugagugga

SEQ ID NO: 283306 - RNA, 19 nt, Artificial Sequence
  Description of Artificial Sequence: Synthetic oligonucleotide
cuuaaaacaaggggaggag

SEQ ID NO: 283307 - RNA, 19 nt, Artificial Sequence
  Description of Artificial Sequence: Synthetic oligonucleotide
aguuggaagacagaggaau

SEQ ID NO: 283308 - RNA, 19 nt, Artificial Sequence
  Description of Artificial Sequence: Synthetic oligonucleotide
aaggccuuagguaucccuc

SEQ ID NO: 283309 - RNA, 19 nt, Artificial Sequence
  Description of Artificial Sequence: Synthetic oligonucleotide
acuaauugaaaggaagaaa

SEQ ID NO: 283310 - RNA, 19 nt, Artificial Sequence
  Description of Artificial Sequence: Synthetic oligonucleotide
auuuugaccguauuacauu

SEQ ID NO: 283311 - RNA, 19 nt, Artificial Sequence
  Description of Artificial Sequence: Synthetic oligonucleotide
uucuauaauggagaaggaa

SEQ ID NO: 283312 - RNA, 19 nt, Artificial Sequence
  Description of Artificial Sequence: Synthetic oligonucleotide
cucaguacagugucucugc

SEQ ID NO: 283313 - RNA, 19 nt, Artificial Sequence
  Description of Artificial Sequence: Synthetic oligonucleotide
cauauccugcacaagccug

SEQ ID NO: 283314 - RNA, 19 nt, Artificial Sequence
  Description of Artificial Sequence: Synthetic oligonucleotide
guauaugagaaaaccccag

SEQ ID NO: 283315 - RNA, 19 nt, Artificial Sequence
  Description of Artificial Sequence: Synthetic oligonucleotide
guuucauuagacucuaacu

SEQ ID NO: 283316 - RNA, 19 nt, Artificial Sequence
  Description of Artificial Sequence: Synthetic oligonucleotide
gaguaugauugggaguugg

SEQ ID NO: 283317 - RNA, 19 nt, Artificial Sequence
  Description of Artificial Sequence: Synthetic oligonucleotide
ucccucaucacggucaggc

SEQ ID NO: 283318 - RNA, 19 nt, Artificial Sequence
  Description of Artificial Sequence: Synthetic oligonucleotide
gguggaguaugauugggag

SEQ ID NO: 283319 - RNA, 19 nt, Artificial Sequence
  Description of Artificial Sequence: Synthetic oligonucleotide
auacaugucccuaugcaug

SEQ ID NO: 283320 - RNA, 19 nt, Artificial Sequence
  Description of Artificial Sequence: Synthetic oligonucleotide
guacacauguauaugagaa

SEQ ID NO: 283321 - RNA, 19 nt, Artificial Sequence
  Description of Artificial Sequence: Synthetic oligonucleotide
ucuauggguuugaccuucg

SEQ ID NO: 283322 - RNA, 19 nt, Artificial Sequence
  Description of Artificial Sequence: Synthetic oligonucleotide
gucauguagggugacauac

SEQ ID NO: 283323 - RNA, 19 nt, Artificial Sequence
  Description of Artificial Sequence: Synthetic oligonucleotide
agguguugcaugugugacg

SEQ ID NO: 283324 - RNA, 19 nt, Artificial Sequence
  Description of Artificial Sequence: Synthetic oligonucleotide
gguguugcaugugugacgg

SEQ ID NO: 283325 - RNA, 19 nt, Artificial Sequence
  Description of Artificial Sequence: Synthetic oligonucleotide
ucacgauagucauguaaca

SEQ ID NO: 283326 - RNA, 19 nt, Artificial Sequence
  Description of Artificial Sequence: Synthetic oligonucleotide
cauacugauuccucaguuc

SEQ ID NO: 283327 - RNA, 19 nt, Artificial Sequence
  Description of Artificial Sequence: Synthetic oligonucleotide
accguauuacauuucucga

SEQ ID NO: 283328 - RNA, 19 nt, Artificial Sequence
  Description of Artificial Sequence: Synthetic oligonucleotide
aguccaucguggcuauugg

SEQ ID NO: 283329 - RNA, 19 nt, Artificial Sequence
  Description of Artificial Sequence: Synthetic oligonucleotide
ugaccuucgcagcauauuu

SEQ ID NO: 283330 - RNA, 19 nt, Artificial Sequence
  Description of Artificial Sequence: Synthetic oligonucleotide
uauagaauacugggaguga

SEQ ID NO: 283331 - RNA, 19 nt, Artificial Sequence
  Description of Artificial Sequence: Synthetic oligonucleotide
ucguuugauuuucucaaua

SEQ ID NO: 283332 - RNA, 19 nt, Artificial Sequence
  Description of Artificial Sequence: Synthetic oligonucleotide
gcuauguucuauaauggag

SEQ ID NO: 283333 - RNA, 19 nt, Artificial Sequence
  Description of Artificial Sequence: Synthetic oligonucleotide
gggguuaacacaaaagcug

SEQ ID NO: 283334 - RNA, 19 nt, Artificial Sequence
  Description of Artificial Sequence: Synthetic oligonucleotide
aacgaggccauggccgggc

SEQ ID NO: 283335 - RNA, 19 nt, Artificial Sequence
  Description of Artificial Sequence: Synthetic oligonucleotide
acggcuacauuaucagaag

SEQ ID NO: 283336 - RNA, 19 nt, Artificial Sequence
  Description of Artificial Sequence: Synthetic oligonucleotide
auucgaaagaggaggcaac

SEQ ID NO: 283337 - RNA, 19 nt, Artificial Sequence
  Description of Artificial Sequence: Synthetic oligonucleotide
uuguaagugggaccaucca

SEQ ID NO: 283338 - RNA, 19 nt, Artificial Sequence
  Description of Artificial Sequence: Synthetic oligonucleotide
agggaggaccuaaaguccc

SEQ ID NO: 283339 - RNA, 19 nt, Artificial Sequence
  Description of Artificial Sequence: Synthetic oligonucleotide
aggauugguuccuucaaaa

SEQ ID NO: 283340 - RNA, 19 nt, Artificial Sequence
  Description of Artificial Sequence: Synthetic oligonucleotide
cacauucauccaaucuacg

SEQ ID NO: 283341 - RNA, 19 nt, Artificial Sequence
  Description of Artificial Sequence: Synthetic oligonucleotide
gagacaccggccuugugac

SEQ ID NO: 283342 - RNA, 19 nt, Artificial Sequence
  Description of Artificial Sequence: Synthetic oligonucleotide
uccgcucccugaaagaauc

SEQ ID NO: 283343 - RNA, 19 nt, Artificial Sequence
  Description of Artificial Sequence: Synthetic oligonucleotide
uggcucuuguaauauaaua

SEQ ID NO: 283344 - RNA, 19 nt, Artificial Sequence
  Description of Artificial Sequence: Synthetic oligonucleotide
gaaucaagagcuguaccca

SEQ ID NO: 283345 - RNA, 19 nt, Artificial Sequence
  Description of Artificial Sequence: Synthetic oligonucleotide
auagacaccccgaaguugu

SEQ ID NO: 283346 - RNA, 19 nt, Artificial Sequence
  Description of Artificial Sequence: Synthetic oligonucleotide
ucuacgcuucuuguaagug

SEQ ID NO: 283347 - RNA, 19 nt, Artificial Sequence
  Description of Artificial Sequence: Synthetic oligonucleotide
gacaccggccuugugacag

SEQ ID NO: 283348 - RNA, 19 nt, Artificial Sequence
  Description of Artificial Sequence: Synthetic oligonucleotide
aggcuauguucuauaaugg

SEQ ID NO: 283349 - RNA, 19 nt, Artificial Sequence
  Description of Artificial Sequence: Synthetic oligonucleotide
uggguuugaccuucgcagc

SEQ ID NO: 283350 - RNA, 19 nt, Artificial Sequence
  Description of Artificial Sequence: Synthetic oligonucleotide
aaggaagcauguauacaug

SEQ ID NO: 283351 - RNA, 19 nt, Artificial Sequence
  Description of Artificial Sequence: Synthetic oligonucleotide
auauccugcacaagccugg

SEQ ID NO: 283352 - RNA, 19 nt, Artificial Sequence
  Description of Artificial Sequence: Synthetic oligonucleotide
ugacuccuuuucuauagaa

SEQ ID NO: 283353 - RNA, 19 nt, Artificial Sequence
  Description of Artificial Sequence: Synthetic oligonucleotide
ugaucacuauuuccagcca

SEQ ID NO: 283354 - RNA, 19 nt, Artificial Sequence
  Description of Artificial Sequence: Synthetic oligonucleotide
ucaaggugggauagacaca

SEQ ID NO: 283355 - RNA, 19 nt, Artificial Sequence
  Description of Artificial Sequence: Synthetic oligonucleotide
aaauagacacugagaguca

SEQ ID NO: 283356 - RNA, 19 nt, Artificial Sequence
  Description of Artificial Sequence: Synthetic oligonucleotide
uuucucgaucagcagccga

SEQ ID NO: 283357 - RNA, 19 nt, Artificial Sequence
  Description of Artificial Sequence: Synthetic oligonucleotide
uggcuauuggugaggagaa

SEQ ID NO: 283358 - RNA, 19 nt, Artificial Sequence
  Description of Artificial Sequence: Synthetic oligonucleotide
ggugugaucacuauuucca

SEQ ID NO: 283359 - RNA, 19 nt, Artificial Sequence
  Description of Artificial Sequence: Synthetic oligonucleotide
gugacauacugauuccuca

SEQ ID NO: 283360 - RNA, 19 nt, Artificial Sequence
  Description of Artificial Sequence: Synthetic oligonucleotide
agcccuaaggcaucaccag

SEQ ID NO: 283361 - RNA, 19 nt, Artificial Sequence
  Description of Artificial Sequence: Synthetic oligonucleotide
uuugaccguauuacauuuc

SEQ ID NO: 283362 - RNA, 19 nt, Artificial Sequence
  Description of Artificial Sequence: Synthetic oligonucleotide
cagcguuugcauaacacca

SEQ ID NO: 283363 - RNA, 19 nt, Artificial Sequence
  Description of Artificial Sequence: Synthetic oligonucleotide
ugggagauucaugucugag

SEQ ID NO: 283364 - RNA, 19 nt, Artificial Sequence
  Description of Artificial Sequence: Synthetic oligonucleotide
agaggugugaucacuauuu

SEQ ID NO: 283365 - RNA, 19 nt, Artificial Sequence
  Description of Artificial Sequence: Synthetic oligonucleotide
gagaaacacguggaaggag

SEQ ID NO: 283366 - RNA, 19 nt, Artificial Sequence
  Description of Artificial Sequence: Synthetic oligonucleotide
caaucuacgcuucuuguaa

SEQ ID NO: 283367 - RNA, 19 nt, Artificial Sequence
  Description of Artificial Sequence: Synthetic oligonucleotide
ugggagugaaaaugaugca

SEQ ID NO: 283368 - RNA, 19 nt, Artificial Sequence
  Description of Artificial Sequence: Synthetic oligonucleotide
ugguccagauaagaugcag

SEQ ID NO: 283369 - RNA, 19 nt, Artificial Sequence
  Description of Artificial Sequence: Synthetic oligonucleotide
gaauacacacgcacaugug

SEQ ID NO: 283370 - RNA, 19 nt, Artificial Sequence
  Description of Artificial Sequence: Synthetic oligonucleotide
cugaguuaggucauggaua

SEQ ID NO: 283371 - RNA, 19 nt, Artificial Sequence
  Description of Artificial Sequence: Synthetic oligonucleotide
uucgaaagaggaggcaacu

SEQ ID NO: 283372 - RNA, 19 nt, Artificial Sequence
  Description of Artificial Sequence: Synthetic oligonucleotide
accuucgcagcauauuuau

SEQ ID NO: 283373 - RNA, 19 nt, Artificial Sequence
  Description of Artificial Sequence: Synthetic oligonucleotide
acuuacccugggcaccaac

SEQ ID NO: 283374 - RNA, 19 nt, Artificial Sequence
  Description of Artificial Sequence: Synthetic oligonucleotide
ucauccaaucuacgcuucu

SEQ ID NO: 283375 - RNA, 19 nt, Artificial Sequence
  Description of Artificial Sequence: Synthetic oligonucleotide
aagaaucaaccuugagcuu

SEQ ID NO: 283376 - RNA, 19 nt, Artificial Sequence
  Description of Artificial Sequence: Synthetic oligonucleotide
gaucugagggguggguagg

SEQ ID NO: 283377 - RNA, 19 nt, Artificial Sequence
  Description of Artificial Sequence: Synthetic oligonucleotide
ugucccuaugcauguguac

SEQ ID NO: 283378 - RNA, 19 nt, Artificial Sequence
  Description of Artificial Sequence: Synthetic oligonucleotide
cccuauccaacacacaagc

SEQ ID NO: 283379 - RNA, 19 nt, Artificial Sequence
  Description of Artificial Sequence: Synthetic oligonucleotide
uucauccaaucuacgcuuc

SEQ ID NO: 283380 - RNA, 19 nt, Artificial Sequence
  Description of Artificial Sequence: Synthetic oligonucleotide
aucuacgcuucuuguaagu

SEQ ID NO: 283381 - RNA, 19 nt, Artificial Sequence
  Description of Artificial Sequence: Synthetic oligonucleotide
uuugaccuucgcagcauau

SEQ ID NO: 283382 - RNA, 19 nt, Artificial Sequence
  Description of Artificial Sequence: Synthetic oligonucleotide
cauucauccaaucuacgcu

SEQ ID NO: 283383 - RNA, 19 nt, Artificial Sequence
  Description of Artificial Sequence: Synthetic oligonucleotide
gcuauuggugaggagaaug

SEQ ID NO: 283384 - RNA, 19 nt, Artificial Sequence
  Description of Artificial Sequence: Synthetic oligonucleotide
ggucguuugauuuucucaa

SEQ ID NO: 283385 - RNA, 19 nt, Artificial Sequence
  Description of Artificial Sequence: Synthetic oligonucleotide
ggcaccaacggcuacauua

SEQ ID NO: 283386 - RNA, 19 nt, Artificial Sequence
  Description of Artificial Sequence: Synthetic oligonucleotide
uucuauggguuugaccuuc

SEQ ID NO: 283387 - RNA, 19 nt, Artificial Sequence
  Description of Artificial Sequence: Synthetic oligonucleotide
ucuuguaagugggaccauc

SEQ ID NO: 283388 - RNA, 19 nt, Artificial Sequence
  Description of Artificial Sequence: Synthetic oligonucleotide
caucacgauagucauguaa

SEQ ID NO: 283389 - RNA, 19 nt, Artificial Sequence
  Description of Artificial Sequence: Synthetic oligonucleotide
gaugagacggaggcugaug

SEQ ID NO: 283390 - RNA, 19 nt, Artificial Sequence
  Description of Artificial Sequence: Synthetic oligonucleotide
agcgccagcguuugcauaa

SEQ ID NO: 283391 - RNA, 19 nt, Artificial Sequence
  Description of Artificial Sequence: Synthetic oligonucleotide
caucguggcuauuggugag

SEQ ID NO: 283392 - RNA, 19 nt, Artificial Sequence
  Description of Artificial Sequence: Synthetic oligonucleotide
guacagugucucugcauug

SEQ ID NO: 283393 - RNA, 19 nt, Artificial Sequence
  Description of Artificial Sequence: Synthetic oligonucleotide
guuacugagcacuauucau

SEQ ID NO: 283394 - RNA, 19 nt, Artificial Sequence
  Description of Artificial Sequence: Synthetic oligonucleotide
cccuaaggcaucaccaggg

SEQ ID NO: 283395 - RNA, 19 nt, Artificial Sequence
  Description of Artificial Sequence: Synthetic oligonucleotide
cuugugauccgcucccuga

SEQ ID NO: 283396 - RNA, 19 nt, Artificial Sequence
  Description of Artificial Sequence: Synthetic oligonucleotide
ccaacggcuacauuaucag

SEQ ID NO: 283397 - RNA, 19 nt, Artificial Sequence
  Description of Artificial Sequence: Synthetic oligonucleotide
cauggggauauuuagcuau

SEQ ID NO: 283398 - RNA, 19 nt, Artificial Sequence
  Description of Artificial Sequence: Synthetic oligonucleotide
cauuuugaccguauuacau

SEQ ID NO: 283399 - RNA, 19 nt, Artificial Sequence
  Description of Artificial Sequence: Synthetic oligonucleotide
guaucccucaucacgguca

SEQ ID NO: 283400 - RNA, 19 nt, Artificial Sequence
  Description of Artificial Sequence: Synthetic oligonucleotide
auaucucugcaagauucga

SEQ ID NO: 283401 - RNA, 19 nt, Artificial Sequence
  Description of Artificial Sequence: Synthetic oligonucleotide
ucccuaugcauguguacau

SEQ ID NO: 283402 - RNA, 19 nt, Artificial Sequence
  Description of Artificial Sequence: Synthetic oligonucleotide
ugaccgugcggcgauaguc

SEQ ID NO: 283403 - RNA, 19 nt, Artificial Sequence
  Description of Artificial Sequence: Synthetic oligonucleotide
uugccuggguggaugacua

SEQ ID NO: 283404 - RNA, 19 nt, Artificial Sequence
  Description of Artificial Sequence: Synthetic oligonucleotide
agagaggugugaucacuau

SEQ ID NO: 283405 - RNA, 19 nt, Artificial Sequence
  Description of Artificial Sequence: Synthetic oligonucleotide
gaccgugcggcgauagucc

SEQ ID NO: 283406 - RNA, 19 nt, Artificial Sequence
  Description of Artificial Sequence: Synthetic oligonucleotide
aggccuuagguaucccuca

SEQ ID NO: 283407 - RNA, 19 nt, Artificial Sequence
  Description of Artificial Sequence: Synthetic oligonucleotide
cucgacaguucuuaguucu

SEQ ID NO: 283408 - RNA, 19 nt, Artificial Sequence
  Description of Artificial Sequence: Synthetic oligonucleotide
gaaucaaccuugagcuuca

SEQ ID NO: 283409 - RNA, 19 nt, Artificial Sequence
  Description of Artificial Sequence: Synthetic oligonucleotide
agccaaauagacacugaga

SEQ ID NO: 283410 - RNA, 19 nt, Artificial Sequence
  Description of Artificial Sequence: Synthetic oligonucleotide
gcaagauucgaaagaggag

SEQ ID NO: 283411 - RNA, 19 nt, Artificial Sequence
  Description of Artificial Sequence: Synthetic oligonucleotide
gacggaggcugauguauuc

SEQ ID NO: 283412 - RNA, 19 nt, Artificial Sequence
  Description of Artificial Sequence: Synthetic oligonucleotide
guggggaucagagcgccag

SEQ ID NO: 283413 - RNA, 19 nt, Artificial Sequence
  Description of Artificial Sequence: Synthetic oligonucleotide
caguccaucguggcuauug

SEQ ID NO: 283414 - RNA, 19 nt, Artificial Sequence
  Description of Artificial Sequence: Synthetic oligonucleotide
uugcucaccgcuugcucgu

SEQ ID NO: 283415 - RNA, 19 nt, Artificial Sequence
  Description of Artificial Sequence: Synthetic oligonucleotide
ucuaggggugcagcugaag

SEQ ID NO: 283416 - RNA, 19 nt, Artificial Sequence
  Description of Artificial Sequence: Synthetic oligonucleotide
acgaauacacacgcacaug

SEQ ID NO: 283417 - RNA, 19 nt, Artificial Sequence
  Description of Artificial Sequence: Synthetic oligonucleotide
ggcuauguucuauaaugga

SEQ ID NO: 283418 - RNA, 19 nt, Artificial Sequence
  Description of Artificial Sequence: Synthetic oligonucleotide
gucccuaugcauguguaca

SEQ ID NO: 283419 - RNA, 19 nt, Artificial Sequence
  Description of Artificial Sequence: Synthetic oligonucleotide
cguauuacauuucucgauc

SEQ ID NO: 283420 - RNA, 19 nt, Artificial Sequence
  Description of Artificial Sequence: Synthetic oligonucleotide
ucaugagcccucugcuccu

SEQ ID NO: 283421 - RNA, 19 nt, Artificial Sequence
  Description of Artificial Sequence: Synthetic oligonucleotide
gacauacugauuccucagu

SEQ ID NO: 283422 - RNA, 19 nt, Artificial Sequence
  Description of Artificial Sequence: Synthetic oligonucleotide
ucgaaagaggaggcaacuc

SEQ ID NO: 283423 - RNA, 19 nt, Artificial Sequence
  Description of Artificial Sequence: Synthetic oligonucleotide
agacaccccgaaguuguuc

SEQ ID NO: 283424 - RNA, 19 nt, Artificial Sequence
  Description of Artificial Sequence: Synthetic oligonucleotide
cuauggguuugaccuucgc

SEQ ID NO: 283425 - RNA, 19 nt, Artificial Sequence
  Description of Artificial Sequence: Synthetic oligonucleotide
aguaugauugggaguugga

SEQ ID NO: 283426 - RNA, 19 nt, Artificial Sequence
  Description of Artificial Sequence: Synthetic oligonucleotide
cuaaggcaucaccagggca

SEQ ID NO: 283427 - RNA, 19 nt, Artificial Sequence
  Description of Artificial Sequence: Synthetic oligonucleotide
agauucgaaagaggaggca

SEQ ID NO: 283428 - RNA, 19 nt, Artificial Sequence
  Description of Artificial Sequence: Synthetic oligonucleotide
uguccgcuccgcugggugc

SEQ ID NO: 283429 - RNA, 19 nt, Artificial Sequence
  Description of Artificial Sequence: Synthetic oligonucleotide
gcaacgaggccauggccgg

SEQ ID NO: 283430 - RNA, 19 nt, Artificial Sequence
  Description of Artificial Sequence: Synthetic oligonucleotide
gaauagacaccccgaaguu

SEQ ID NO: 283431 - RNA, 19 nt, Artificial Sequence
  Description of Artificial Sequence: Synthetic oligonucleotide
gcacuauucaugggaagag

SEQ ID NO: 283432 - RNA, 19 nt, Artificial Sequence
  Description of Artificial Sequence: Synthetic oligonucleotide
ugcaggaaggaaggcuaug

SEQ ID NO: 283433 - RNA, 19 nt, Artificial Sequence
  Description of Artificial Sequence: Synthetic oligonucleotide
gaggaccuaaagucccaca

SEQ ID NO: 283434 - RNA, 19 nt, Artificial Sequence
  Description of Artificial Sequence: Synthetic oligonucleotide
accaacuaauugaaaggaa

SEQ ID NO: 283435 - RNA, 19 nt, Artificial Sequence
  Description of Artificial Sequence: Synthetic oligonucleotide
gaauacugggagugaaaau

SEQ ID NO: 283436 - RNA, 19 nt, Artificial Sequence
  Description of Artificial Sequence: Synthetic oligonucleotide
gaaggccuuagguaucccu

SEQ ID NO: 283437 - RNA, 19 nt, Artificial Sequence
  Description of Artificial Sequence: Synthetic oligonucleotide
gcccuaaggcaucaccagg

SEQ ID NO: 283438 - RNA, 19 nt, Artificial Sequence
  Description of Artificial Sequence: Synthetic oligonucleotide
gauccgcucccugaaagaa

SEQ ID NO: 283439 - RNA, 19 nt, Artificial Sequence
  Description of Artificial Sequence: Synthetic oligonucleotide
guggaacaaucaaacaaaa

SEQ ID NO: 283440 - RNA, 19 nt, Artificial Sequence
  Description of Artificial Sequence: Synthetic oligonucleotide
auccaguccaucguggcua

SEQ ID NO: 283441 - RNA, 19 nt, Artificial Sequence
  Description of Artificial Sequence: Synthetic oligonucleotide
aucagagcgccagcguuug

SEQ ID NO: 283442 - RNA, 19 nt, Artificial Sequence
  Description of Artificial Sequence: Synthetic oligonucleotide
accuaaagucccacauaag

SEQ ID NO: 283443 - RNA, 19 nt, Artificial Sequence
  Description of Artificial Sequence: Synthetic oligonucleotide
ucguggcuauuggugagga

SEQ ID NO: 283444 - RNA, 19 nt, Artificial Sequence
  Description of Artificial Sequence: Synthetic oligonucleotide
agaugaugagacggaggcu

SEQ ID NO: 283445 - RNA, 19 nt, Artificial Sequence
  Description of Artificial Sequence: Synthetic oligonucleotide
cacgauagucauguaacaa

SEQ ID NO: 283446 - RNA, 19 nt, Artificial Sequence
  Description of Artificial Sequence: Synthetic oligonucleotide
guucuauaauggagaagga

SEQ ID NO: 283447 - RNA, 19 nt, Artificial Sequence
  Description of Artificial Sequence: Synthetic oligonucleotide
aucaagagcuguacccaca

SEQ ID NO: 283448 - RNA, 19 nt, Artificial Sequence
  Description of Artificial Sequence: Synthetic oligonucleotide
cauccugacuccuuuucua

SEQ ID NO: 283449 - RNA, 19 nt, Artificial Sequence
  Description of Artificial Sequence: Synthetic oligonucleotide
uauccugcacaagccugga

SEQ ID NO: 283450 - RNA, 19 nt, Artificial Sequence
  Description of Artificial Sequence: Synthetic oligonucleotide
uugaccuucgcagcauauu

SEQ ID NO: 283451 - RNA, 19 nt, Artificial Sequence
  Description of Artificial Sequence: Synthetic oligonucleotide
auguagggugacauacuga

SEQ ID NO: 283452 - RNA, 19 nt, Artificial Sequence
  Description of Artificial Sequence: Synthetic oligonucleotide
uauuuaggauugguuccuu

SEQ ID NO: 283453 - RNA, 19 nt, Artificial Sequence
  Description of Artificial Sequence: Synthetic oligonucleotide
acaccggccuugugacagg

SEQ ID NO: 283454 - RNA, 19 nt, Artificial Sequence
  Description of Artificial Sequence: Synthetic oligonucleotide
gaacuagaugagaguuuca

SEQ ID NO: 283455 - RNA, 19 nt, Artificial Sequence
  Description of Artificial Sequence: Synthetic oligonucleotide
gcaauugguuuguuacuga

SEQ ID NO: 283456 - RNA, 19 nt, Artificial Sequence
  Description of Artificial Sequence: Synthetic oligonucleotide
cacaagccuggaguucucc

SEQ ID NO: 283457 - RNA, 19 nt, Artificial Sequence
  Description of Artificial Sequence: Synthetic oligonucleotide
caacggcuacauuaucaga

SEQ ID NO: 283458 - RNA, 19 nt, Artificial Sequence
  Description of Artificial Sequence: Synthetic oligonucleotide
ggaaggcuauguucuauaa

SEQ ID NO: 283459 - RNA, 19 nt, Artificial Sequence
  Description of Artificial Sequence: Synthetic oligonucleotide
cacuauucaugggaagaga

SEQ ID NO: 283460 - RNA, 19 nt, Artificial Sequence
  Description of Artificial Sequence: Synthetic oligonucleotide
guguccgcuccgcugggug

SEQ ID NO: 283461 - RNA, 19 nt, Artificial Sequence
  Description of Artificial Sequence: Synthetic oligonucleotide
agcguuugcauaacaccaa

SEQ ID NO: 283462 - RNA, 19 nt, Artificial Sequence
  Description of Artificial Sequence: Synthetic oligonucleotide
cacgaauacacacgcacau

SEQ ID NO: 283463 - RNA, 19 nt, Artificial Sequence
  Description of Artificial Sequence: Synthetic oligonucleotide
gaaagaggaggcaacucuu

SEQ ID NO: 283464 - RNA, 19 nt, Artificial Sequence
  Description of Artificial Sequence: Synthetic oligonucleotide
aggggcaguggaacaauca

SEQ ID NO: 283465 - RNA, 19 nt, Artificial Sequence
  Description of Artificial Sequence: Synthetic oligonucleotide
agggccguguccgcuccgc

SEQ ID NO: 283466 - RNA, 19 nt, Artificial Sequence
  Description of Artificial Sequence: Synthetic oligonucleotide
caucccagguggaguauga

SEQ ID NO: 283467 - RNA, 19 nt, Artificial Sequence
  Description of Artificial Sequence: Synthetic oligonucleotide
ccuaaggcaucaccagggc

SEQ ID NO: 283468 - RNA, 19 nt, Artificial Sequence
  Description of Artificial Sequence: Synthetic oligonucleotide
uggggauauuuagcuauuu

SEQ ID NO: 283469 - RNA, 19 nt, Artificial Sequence
  Description of Artificial Sequence: Synthetic oligonucleotide
ugaaggccuuagguauccc

SEQ ID NO: 283470 - RNA, 19 nt, Artificial Sequence
  Description of Artificial Sequence: Synthetic oligonucleotide
accgugcggcgauaguccu

SEQ ID NO: 283471 - RNA, 19 nt, Artificial Sequence
  Description of Artificial Sequence: Synthetic oligonucleotide
guggaguaugauugggagu

SEQ ID NO: 283472 - RNA, 19 nt, Artificial Sequence
  Description of Artificial Sequence: Synthetic oligonucleotide
ucguucccucccuccgugc

SEQ ID NO: 283473 - RNA, 19 nt, Artificial Sequence
  Description of Artificial Sequence: Synthetic oligonucleotide
ucagagcgccagcguuugc

SEQ ID NO: 283474 - RNA, 19 nt, Artificial Sequence
  Description of Artificial Sequence: Synthetic oligonucleotide
gguaggaguacugcccaac

SEQ ID NO: 283475 - RNA, 19 nt, Artificial Sequence
  Description of Artificial Sequence: Synthetic oligonucleotide
gguaucccucaucacgguc

SEQ ID NO: 283476 - RNA, 19 nt, Artificial Sequence
  Description of Artificial Sequence: Synthetic oligonucleotide
cauuaucagaagagagggu

SEQ ID NO: 283477 - RNA, 19 nt, Artificial Sequence
  Description of Artificial Sequence: Synthetic oligonucleotide
ugucggucuugagccagac

SEQ ID NO: 283478 - RNA, 19 nt, Artificial Sequence
  Description of Artificial Sequence: Synthetic oligonucleotide
guguugcaugugugacggg

SEQ ID NO: 283479 - RNA, 19 nt, Artificial Sequence
  Description of Artificial Sequence: Synthetic oligonucleotide
ggguuugaccuucgcagca

SEQ ID NO: 283480 - RNA, 19 nt, Artificial Sequence
  Description of Artificial Sequence: Synthetic oligonucleotide
gggagauucaugucugagu

SEQ ID NO: 283481 - RNA, 19 nt, Artificial Sequence
  Description of Artificial Sequence: Synthetic oligonucleotide
acacgcacaugugcgcgug

SEQ ID NO: 283482 - RNA, 19 nt, Artificial Sequence
  Description of Artificial Sequence: Synthetic oligonucleotide
cgauaguccuccacauggg

SEQ ID NO: 283483 - RNA, 19 nt, Artificial Sequence
  Description of Artificial Sequence: Synthetic oligonucleotide
ggaaugggguuuggggaag

SEQ ID NO: 283484 - RNA, 19 nt, Artificial Sequence
  Description of Artificial Sequence: Synthetic oligonucleotide
gagaggugugaucacuauu

SEQ ID NO: 283485 - RNA, 19 nt, Artificial Sequence
  Description of Artificial Sequence: Synthetic oligonucleotide
caugucccuaugcaugugu

SEQ ID NO: 283486 - RNA, 19 nt, Artificial Sequence
  Description of Artificial Sequence: Synthetic oligonucleotide
gaccuucgcagcauauuua

SEQ ID NO: 283487 - RNA, 19 nt, Artificial Sequence
  Description of Artificial Sequence: Synthetic oligonucleotide
cagagcgccagcguuugca

SEQ ID NO: 283488 - RNA, 19 nt, Artificial Sequence
  Description of Artificial Sequence: Synthetic oligonucleotide
agacaccggccuugugaca

SEQ ID NO: 283489 - RNA, 19 nt, Artificial Sequence
  Description of Artificial Sequence: Synthetic oligonucleotide
acacacgaauacacacgca

SEQ ID NO: 283490 - RNA, 19 nt, Artificial Sequence
  Description of Artificial Sequence: Synthetic oligonucleotide
cugggagauucaugucuga

SEQ ID NO: 283491 - RNA, 19 nt, Artificial Sequence
  Description of Artificial Sequence: Synthetic oligonucleotide
uagacaccccgaaguuguu

SEQ ID NO: 283492 - RNA, 19 nt, Artificial Sequence
  Description of Artificial Sequence: Synthetic oligonucleotide
caccaacggcuacauuauc

SEQ ID NO: 283493 - RNA, 19 nt, Artificial Sequence
  Description of Artificial Sequence: Synthetic oligonucleotide
ggacuugccuggguggaug

SEQ ID NO: 283494 - RNA, 19 nt, Artificial Sequence
  Description of Artificial Sequence: Synthetic oligonucleotide
ggaccuaaagucccacaua

SEQ ID NO: 283495 - RNA, 19 nt, Artificial Sequence
  Description of Artificial Sequence: Synthetic oligonucleotide
ugcuccggggucguuugau

SEQ ID NO: 283496 - RNA, 19 nt, Artificial Sequence
  Description of Artificial Sequence: Synthetic oligonucleotide
ucgcuggcuugcucaccgc

SEQ ID NO: 283497 - RNA, 19 nt, Artificial Sequence
  Description of Artificial Sequence: Synthetic oligonucleotide
ccuggaagcacaauacuau

SEQ ID NO: 283498 - RNA, 19 nt, Artificial Sequence
  Description of Artificial Sequence: Synthetic oligonucleotide
uccggggagggcgccggag

SEQ ID NO: 283499 - RNA, 19 nt, Artificial Sequence
  Description of Artificial Sequence: Synthetic oligonucleotide
cuccgugccggccggccac

SEQ ID NO: 283500 - RNA, 19 nt, Artificial Sequence
  Description of Artificial Sequence: Synthetic oligonucleotide
caguuuccccaucacgaua

SEQ ID NO: 283501 - RNA, 19 nt, Artificial Sequence
  Description of Artificial Sequence: Synthetic oligonucleotide
gucguuugauuuucucaau

SEQ ID NO: 283502 - RNA, 19 nt, Artificial Sequence
  Description of Artificial Sequence: Synthetic oligonucleotide
acaccaacucucacuuaaa

SEQ ID NO: 283503 - RNA, 19 nt, Artificial Sequence
  Description of Artificial Sequence: Synthetic oligonucleotide
gggguugaugggguuaaca

SEQ ID NO: 283504 - RNA, 19 nt, Artificial Sequence
  Description of Artificial Sequence: Synthetic oligonucleotide
gcguuugcauaacaccaaa

SEQ ID NO: 283505 - RNA, 19 nt, Artificial Sequence
  Description of Artificial Sequence: Synthetic oligonucleotide
ggaguaugauugggaguug

SEQ ID NO: 283506 - RNA, 19 nt, Artificial Sequence
  Description of Artificial Sequence: Synthetic oligonucleotide
caacgaggccauggccggg

SEQ ID NO: 283507 - RNA, 19 nt, Artificial Sequence
  Description of Artificial Sequence: Synthetic oligonucleotide
augucccuaugcaugugua

SEQ ID NO: 283508 - RNA, 19 nt, Artificial Sequence
  Description of Artificial Sequence: Synthetic oligonucleotide
ugcaucccagguggaguau

SEQ ID NO: 283509 - RNA, 19 nt, Artificial Sequence
  Description of Artificial Sequence: Synthetic oligonucleotide
gaucagagcgccagcguuu

SEQ ID NO: 283510 - RNA, 19 nt, Artificial Sequence
  Description of Artificial Sequence: Synthetic oligonucleotide
ccaaucuacgcuucuugua

SEQ ID NO: 283511 - RNA, 19 nt, Artificial Sequence
  Description of Artificial Sequence: Synthetic oligonucleotide
cccuggaagcacaauacua

SEQ ID NO: 283512 - RNA, 19 nt, Artificial Sequence
  Description of Artificial Sequence: Synthetic oligonucleotide
guccaucguggcuauuggu

SEQ ID NO: 283513 - RNA, 19 nt, Artificial Sequence
  Description of Artificial Sequence: Synthetic oligonucleotide
agccgaaucucagguuuua

SEQ ID NO: 283514 - RNA, 19 nt, Artificial Sequence
  Description of Artificial Sequence: Synthetic oligonucleotide
auccgcucccugaaagaau

SEQ ID NO: 283515 - RNA, 19 nt, Artificial Sequence
  Description of Artificial Sequence: Synthetic oligonucleotide
ggggauauuuagcuauuuu

SEQ ID NO: 283516 - RNA, 19 nt, Artificial Sequence
  Description of Artificial Sequence: Synthetic oligonucleotide
gagagcccuaaggcaucac

SEQ ID NO: 283517 - RNA, 19 nt, Artificial Sequence
  Description of Artificial Sequence: Synthetic oligonucleotide
gccuuagguaucccucauc

SEQ ID NO: 283518 - RNA, 19 nt, Artificial Sequence
  Description of Artificial Sequence: Synthetic oligonucleotide
ggaucagagcgccagcguu

SEQ ID NO: 283519 - RNA, 19 nt, Artificial Sequence
  Description of Artificial Sequence: Synthetic oligonucleotide
gagcgccagcguuugcaua

SEQ ID NO: 283520 - RNA, 19 nt, Artificial Sequence
  Description of Artificial Sequence: Synthetic oligonucleotide
cccuaugcauguguacaug

SEQ ID NO: 283521 - RNA, 19 nt, Artificial Sequence
  Description of Artificial Sequence: Synthetic oligonucleotide
caccccgaaguuguuccca

SEQ ID NO: 283522 - RNA, 19 nt, Artificial Sequence
  Description of Artificial Sequence: Synthetic oligonucleotide
aacuuacccugggcaccaa

SEQ ID NO: 283523 - RNA, 19 nt, Artificial Sequence
  Description of Artificial Sequence: Synthetic oligonucleotide
cacccgcccgccugccgcc

SEQ ID NO: 283524 - RNA, 19 nt, Artificial Sequence
  Description of Artificial Sequence: Synthetic oligonucleotide
ccgaaucucagguuuuacu

SEQ ID NO: 283525 - RNA, 19 nt, Artificial Sequence
  Description of Artificial Sequence: Synthetic oligonucleotide
gauucaugucugaguggau

SEQ ID NO: 283526 - RNA, 19 nt, Artificial Sequence
  Description of Artificial Sequence: Synthetic oligonucleotide
aggcucaaggugggauaga

SEQ ID NO: 283527 - RNA, 19 nt, Artificial Sequence
  Description of Artificial Sequence: Synthetic oligonucleotide
ccguauuacauuucucgau

SEQ ID NO: 283528 - RNA, 19 nt, Artificial Sequence
  Description of Artificial Sequence: Synthetic oligonucleotide
cuucugccucacuugugau

SEQ ID NO: 283529 - RNA, 19 nt, Artificial Sequence
  Description of Artificial Sequence: Synthetic oligonucleotide
uccgugccggccggccacc

SEQ ID NO: 283530 - RNA, 19 nt, Artificial Sequence
  Description of Artificial Sequence: Synthetic oligonucleotide
gcagggccguguccgcucc

SEQ ID NO: 283531 - RNA, 19 nt, Artificial Sequence
  Description of Artificial Sequence: Synthetic oligonucleotide
cagggccguguccgcuccg

SEQ ID NO: 283532 - RNA, 19 nt, Artificial Sequence
  Description of Artificial Sequence: Synthetic oligonucleotide
caucaaucucugugaccgu

SEQ ID NO: 283533 - RNA, 19 nt, Artificial Sequence
  Description of Artificial Sequence: Synthetic oligonucleotide
cucuaggggugcagcugaa

SEQ ID NO: 283534 - RNA, 19 nt, Artificial Sequence
  Description of Artificial Sequence: Synthetic oligonucleotide
ggagagcccuaaggcauca

SEQ ID NO: 283535 - RNA, 19 nt, Artificial Sequence
  Description of Artificial Sequence: Synthetic oligonucleotide
cguuugcauaacaccaaaa

SEQ ID NO: 283536 - RNA, 19 nt, Artificial Sequence
  Description of Artificial Sequence: Synthetic oligonucleotide
ccccaucacgauagucaug

SEQ ID NO: 283537 - RNA, 19 nt, Artificial Sequence
  Description of Artificial Sequence: Synthetic oligonucleotide
ccuauccaacacacaagcu

SEQ ID NO: 283538 - RNA, 19 nt, Artificial Sequence
  Description of Artificial Sequence: Synthetic oligonucleotide
ggccuugugacaggaagau

SEQ ID NO: 283539 - RNA, 19 nt, Artificial Sequence
  Description of Artificial Sequence: Synthetic oligonucleotide
cggcuacauuaucagaaga

SEQ ID NO: 283540 - RNA, 19 nt, Artificial Sequence
  Description of Artificial Sequence: Synthetic oligonucleotide
gguuaacugcagacaccaa

SEQ ID NO: 283541 - RNA, 19 nt, Artificial Sequence
  Description of Artificial Sequence: Synthetic oligonucleotide
ugcucaccgcuugcucguu

SEQ ID NO: 283542 - RNA, 19 nt, Artificial Sequence
  Description of Artificial Sequence: Synthetic oligonucleotide
guagggugacauacugauu

SEQ ID NO: 283543 - RNA, 19 nt, Artificial Sequence
  Description of Artificial Sequence: Synthetic oligonucleotide
caccggccuugugacagga

SEQ ID NO: 283544 - RNA, 19 nt, Artificial Sequence
  Description of Artificial Sequence: Synthetic oligonucleotide
gcucaccgcuugcucguuc

SEQ ID NO: 283545 - RNA, 19 nt, Artificial Sequence
  Description of Artificial Sequence: Synthetic oligonucleotide
gcgaagaguagcagccucu

SEQ ID NO: 283546 - RNA, 19 nt, Artificial Sequence
  Description of Artificial Sequence: Synthetic oligonucleotide
gccucaguacagugucucu

SEQ ID NO: 283547 - RNA, 19 nt, Artificial Sequence
  Description of Artificial Sequence: Synthetic oligonucleotide
gcguguguaugugcacaga

SEQ ID NO: 283548 - RNA, 19 nt, Artificial Sequence
  Description of Artificial Sequence: Synthetic oligonucleotide
ccuucgcagcauauuuaua

SEQ ID NO: 283549 - RNA, 19 nt, Artificial Sequence
  Description of Artificial Sequence: Synthetic oligonucleotide
cuuucccuggaagcacaau

SEQ ID NO: 283550 - RNA, 19 nt, Artificial Sequence
  Description of Artificial Sequence: Synthetic oligonucleotide
cugcuccggggucguuuga

SEQ ID NO: 283551 - RNA, 19 nt, Artificial Sequence
  Description of Artificial Sequence: Synthetic oligonucleotide
guccgcuccgcugggugcu

SEQ ID NO: 283552 - RNA, 19 nt, Artificial Sequence
  Description of Artificial Sequence: Synthetic oligonucleotide
ggccuuagguaucccucau

SEQ ID NO: 283553 - RNA, 19 nt, Artificial Sequence
  Description of Artificial Sequence: Synthetic oligonucleotide
auggccgggcagggccgug

SEQ ID NO: 283554 - RNA, 19 nt, Artificial Sequence
  Description of Artificial Sequence: Synthetic oligonucleotide
ccgugcggcgauaguccuc

SEQ ID NO: 283555 - RNA, 19 nt, Artificial Sequence
  Description of Artificial Sequence: Synthetic oligonucleotide
gaguuaggucauggauauu

SEQ ID NO: 283556 - RNA, 19 nt, Artificial Sequence
  Description of Artificial Sequence: Synthetic oligonucleotide
ggccgcccucgcuggcuug

SEQ ID NO: 283557 - RNA, 19 nt, Artificial Sequence
  Description of Artificial Sequence: Synthetic oligonucleotide
ggcgccggaggggccugag

SEQ ID NO: 283558 - RNA, 19 nt, Artificial Sequence
  Description of Artificial Sequence: Synthetic oligonucleotide
ggcuauuggugaggagaau

SEQ ID NO: 283559 - RNA, 19 nt, Artificial Sequence
  Description of Artificial Sequence: Synthetic oligonucleotide
cuccggggagggcgccgga

SEQ ID NO: 283560 - RNA, 19 nt, Artificial Sequence
  Description of Artificial Sequence: Synthetic oligonucleotide
cugugaccgugcggcgaua

SEQ ID NO: 283561 - RNA, 19 nt, Artificial Sequence
  Description of Artificial Sequence: Synthetic oligonucleotide
ccggaggggccugaggaau

SEQ ID NO: 283562 - RNA, 19 nt, Artificial Sequence
  Description of Artificial Sequence: Synthetic oligonucleotide
cgcacaugugcgcgugugu

SEQ ID NO: 283563 - RNA, 19 nt, Artificial Sequence
  Description of Artificial Sequence: Synthetic oligonucleotide
cgcuggcuugcucaccgcu

SEQ ID NO: 283564 - RNA, 19 nt, Artificial Sequence
  Description of Artificial Sequence: Synthetic oligonucleotide
ccgugccggccggccaccc

SEQ ID NO: 283565 - RNA, 19 nt, Artificial Sequence
  Description of Artificial Sequence: Synthetic oligonucleotide
cggggucguuugauuuucu

SEQ ID NO: 283566 - RNA, 19 nt, Artificial Sequence
  Description of Artificial Sequence: Synthetic oligonucleotide
gggcgccggaggggccuga

SEQ ID NO: 283567 - RNA, 19 nt, Artificial Sequence
  Description of Artificial Sequence: Synthetic oligonucleotide
cguguccgcuccgcugggu

SEQ ID NO: 283568 - RNA, 19 nt, Artificial Sequence
  Description of Artificial Sequence: Synthetic oligonucleotide
cgcccgccugccgccugcu

SEQ ID NO: 283569 - RNA, 19 nt, Artificial Sequence
  Description of Artificial Sequence: Synthetic oligonucleotide
aacauagccaguuagauug

SEQ ID NO: 283570 - RNA, 19 nt, Artificial Sequence
  Description of Artificial Sequence: Synthetic oligonucleotide
aacuacgucauucugcucc

SEQ ID NO: 283571 - RNA, 19 nt, Artificial Sequence
  Description of Artificial Sequence: Synthetic oligonucleotide
aaaauaagcagugccaacc

SEQ ID NO: 283572 - RNA, 19 nt, Artificial Sequence
  Description of Artificial Sequence: Synthetic oligonucleotide
ugauuuaaauccaugcugg

SEQ ID NO: 283573 - RNA, 19 nt, Artificial Sequence
  Description of Artificial Sequence: Synthetic oligonucleotide
acaguaauaacauagccag

SEQ ID NO: 283574 - RNA, 19 nt, Artificial Sequence
  Description of Artificial Sequence: Synthetic oligonucleotide
auacuuaaaacacacaaug

SEQ ID NO: 283575 - RNA, 19 nt, Artificial Sequence
  Description of Artificial Sequence: Synthetic oligonucleotide
uaaacucuaaaauagauua

SEQ ID NO: 283576 - RNA, 19 nt, Artificial Sequence
  Description of Artificial Sequence: Synthetic oligonucleotide
agccauuuggcauacagcc

SEQ ID NO: 283577 - RNA, 19 nt, Artificial Sequence
  Description of Artificial Sequence: Synthetic oligonucleotide
aaaacgauguggaauggcc

SEQ ID NO: 283578 - RNA, 19 nt, Artificial Sequence
  Description of Artificial Sequence: Synthetic oligonucleotide
aaucccuaugauuacagca

SEQ ID NO: 283579 - RNA, 19 nt, Artificial Sequence
  Description of Artificial Sequence: Synthetic oligonucleotide
uuaacaguaauaacauagc

SEQ ID NO: 283580 - RNA, 19 nt, Artificial Sequence
  Description of Artificial Sequence: Synthetic oligonucleotide
agaaguauuccugaguuac

SEQ ID NO: 283581 - RNA, 19 nt, Artificial Sequence
  Description of Artificial Sequence: Synthetic oligonucleotide
auuaucauggccgaucugg

SEQ ID NO: 283582 - RNA, 19 nt, Artificial Sequence
  Description of Artificial Sequence: Synthetic oligonucleotide
aaaucccuaugauuacagc

SEQ ID NO: 283583 - RNA, 19 nt, Artificial Sequence
  Description of Artificial Sequence: Synthetic oligonucleotide
aguaaguauacaucucuuc

SEQ ID NO: 283584 - RNA, 19 nt, Artificial Sequence
  Description of Artificial Sequence: Synthetic oligonucleotide
ucacucuuucacaugaaag

SEQ ID NO: 283585 - RNA, 19 nt, Artificial Sequence
  Description of Artificial Sequence: Synthetic oligonucleotide
augcuggaaagcuuguucc

SEQ ID NO: 283586 - RNA, 19 nt, Artificial Sequence
  Description of Artificial Sequence: Synthetic oligonucleotide
cucauauccugaauuaggg

SEQ ID NO: 283587 - RNA, 19 nt, Artificial Sequence
  Description of Artificial Sequence: Synthetic oligonucleotide
aaugcucauguuuacuucu

SEQ ID NO: 283588 - RNA, 19 nt, Artificial Sequence
  Description of Artificial Sequence: Synthetic oligonucleotide
aacgauguggaauggccuc

SEQ ID NO: 283589 - RNA, 19 nt, Artificial Sequence
  Description of Artificial Sequence: Synthetic oligonucleotide
uuaaauccaugcuggaaag

SEQ ID NO: 283590 - RNA, 19 nt, Artificial Sequence
  Description of Artificial Sequence: Synthetic oligonucleotide
uuggcggugaacauggagc

SEQ ID NO: 283591 - RNA, 19 nt, Artificial Sequence
  Description of Artificial Sequence: Synthetic oligonucleotide
aacgagaccacacucucca

SEQ ID NO: 283592 - RNA, 19 nt, Artificial Sequence
  Description of Artificial Sequence: Synthetic oligonucleotide
aauaagcagugccaaccuc

SEQ ID NO: 283593 - RNA, 19 nt, Artificial Sequence
  Description of Artificial Sequence: Synthetic oligonucleotide
aauagccccacacuugugu

SEQ ID NO: 283594 - RNA, 19 nt, Artificial Sequence
  Description of Artificial Sequence: Synthetic oligonucleotide
uacaacuuccaguugguug

SEQ ID NO: 283595 - RNA, 19 nt, Artificial Sequence
  Description of Artificial Sequence: Synthetic oligonucleotide
ucuagcacauuccugggga

SEQ ID NO: 283596 - RNA, 19 nt, Artificial Sequence
  Description of Artificial Sequence: Synthetic oligonucleotide
auaagauagaugaagaaaa

SEQ ID NO: 283597 - RNA, 19 nt, Artificial Sequence
  Description of Artificial Sequence: Synthetic oligonucleotide
ugauugcagugacaaagcg

SEQ ID NO: 283598 - RNA, 19 nt, Artificial Sequence
  Description of Artificial Sequence: Synthetic oligonucleotide
auaacgcuuguacagcuuc

SEQ ID NO: 283599 - RNA, 19 nt, Artificial Sequence
  Description of Artificial Sequence: Synthetic oligonucleotide
uuccugauaguguaacagg

SEQ ID NO: 283600 - RNA, 19 nt, Artificial Sequence
  Description of Artificial Sequence: Synthetic oligonucleotide
ugggccauacuguagcugg

SEQ ID NO: 283601 - RNA, 19 nt, Artificial Sequence
  Description of Artificial Sequence: Synthetic oligonucleotide
augacagcggcacaaugac

SEQ ID NO: 283602 - RNA, 19 nt, Artificial Sequence
  Description of Artificial Sequence: Synthetic oligonucleotide
acauaaauuuaacaguaau

SEQ ID NO: 283603 - RNA, 19 nt, Artificial Sequence
  Description of Artificial Sequence: Synthetic oligonucleotide
agaauuaucauggccgauc

SEQ ID NO: 283604 - RNA, 19 nt, Artificial Sequence
  Description of Artificial Sequence: Synthetic oligonucleotide
uggacagucgaacccaugc

SEQ ID NO: 283605 - RNA, 19 nt, Artificial Sequence
  Description of Artificial Sequence: Synthetic oligonucleotide
acgaucaaaaugugguacg

SEQ ID NO: 283606 - RNA, 19 nt, Artificial Sequence
  Description of Artificial Sequence: Synthetic oligonucleotide
aagcagaaguaguccaccg

SEQ ID NO: 283607 - RNA, 19 nt, Artificial Sequence
  Description of Artificial Sequence: Synthetic oligonucleotide
ucggcuauuccucaggccu

SEQ ID NO: 283608 - RNA, 19 nt, Artificial Sequence
  Description of Artificial Sequence: Synthetic oligonucleotide
ucaagaaguauuccugagu

SEQ ID NO: 283609 - RNA, 19 nt, Artificial Sequence
  Description of Artificial Sequence: Synthetic oligonucleotide
uggaauggccucaucgggg

SEQ ID NO: 283610 - RNA, 19 nt, Artificial Sequence
  Description of Artificial Sequence: Synthetic oligonucleotide
uccguuccgaaucaagaag

SEQ ID NO: 283611 - RNA, 19 nt, Artificial Sequence
  Description of Artificial Sequence: Synthetic oligonucleotide
ugguacgaucaaaaugugg

SEQ ID NO: 283612 - RNA, 19 nt, Artificial Sequence
  Description of Artificial Sequence: Synthetic oligonucleotide
uuauggaagugcuucacaa

SEQ ID NO: 283613 - RNA, 19 nt, Artificial Sequence
  Description of Artificial Sequence: Synthetic oligonucleotide
uggcagguuaaauaaauaa

SEQ ID NO: 283614 - RNA, 19 nt, Artificial Sequence
  Description of Artificial Sequence: Synthetic oligonucleotide
ucaguuuugauuuccccaa

SEQ ID NO: 283615 - RNA, 19 nt, Artificial Sequence
  Description of Artificial Sequence: Synthetic oligonucleotide
uuucucggguuuauggaag

SEQ ID NO: 283616 - RNA, 19 nt, Artificial Sequence
  Description of Artificial Sequence: Synthetic oligonucleotide
auaagcagugccaaccucg

SEQ ID NO: 283617 - RNA, 19 nt, Artificial Sequence
  Description of Artificial Sequence: Synthetic oligonucleotide
uccugauaguguaacaggu

SEQ ID NO: 283618 - RNA, 19 nt, Artificial Sequence
  Description of Artificial Sequence: Synthetic oligonucleotide
cccagaauuaucauggccg

SEQ ID NO: 283619 - RNA, 19 nt, Artificial Sequence
  Description of Artificial Sequence: Synthetic oligonucleotide
aacucuaaaauagauuauu

SEQ ID NO: 283620 - RNA, 19 nt, Artificial Sequence
  Description of Artificial Sequence: Synthetic oligonucleotide
aagccauuuggcauacagc

SEQ ID NO: 283621 - RNA, 19 nt, Artificial Sequence
  Description of Artificial Sequence: Synthetic oligonucleotide
uccgguguuuuauuaagug

SEQ ID NO: 283622 - RNA, 19 nt, Artificial Sequence
  Description of Artificial Sequence: Synthetic oligonucleotide
uccgaaucaagaaguauuc

SEQ ID NO: 283623 - RNA, 19 nt, Artificial Sequence
  Description of Artificial Sequence: Synthetic oligonucleotide
gugauagaggaacugcucc

SEQ ID NO: 283624 - RNA, 19 nt, Artificial Sequence
  Description of Artificial Sequence: Synthetic oligonucleotide
uuagggagauccucagggg

SEQ ID NO: 283625 - RNA, 19 nt, Artificial Sequence
  Description of Artificial Sequence: Synthetic oligonucleotide
ugucaaacugccacgcucu

SEQ ID NO: 283626 - RNA, 19 nt, Artificial Sequence
  Description of Artificial Sequence: Synthetic oligonucleotide
ugauguucaccucuccgug

SEQ ID NO: 283627 - RNA, 19 nt, Artificial Sequence
  Description of Artificial Sequence: Synthetic oligonucleotide
aucagacuuucuccguucc

SEQ ID NO: 283628 - RNA, 19 nt, Artificial Sequence
  Description of Artificial Sequence: Synthetic oligonucleotide
aaugugguacggaaucagg

SEQ ID NO: 283629 - RNA, 19 nt, Artificial Sequence
  Description of Artificial Sequence: Synthetic oligonucleotide
cacaaugccauugacugcc

SEQ ID NO: 283630 - RNA, 19 nt, Artificial Sequence
  Description of Artificial Sequence: Synthetic oligonucleotide
ucucgucccuuacaaaugc

SEQ ID NO: 283631 - RNA, 19 nt, Artificial Sequence
  Description of Artificial Sequence: Synthetic oligonucleotide
ucuccgguguuuuauuaag

SEQ ID NO: 283632 - RNA, 19 nt, Artificial Sequence
  Description of Artificial Sequence: Synthetic oligonucleotide
cuuguuucggcuauuccuc

SEQ ID NO: 283633 - RNA, 19 nt, Artificial Sequence
  Description of Artificial Sequence: Synthetic oligonucleotide
ggaauugacaagugugugg

SEQ ID NO: 283634 - RNA, 19 nt, Artificial Sequence
  Description of Artificial Sequence: Synthetic oligonucleotide
ucaaugcccuuaaccaggg

SEQ ID NO: 283635 - RNA, 19 nt, Artificial Sequence
  Description of Artificial Sequence: Synthetic oligonucleotide
ucagaauaauguuaauaua

SEQ ID NO: 283636 - RNA, 19 nt, Artificial Sequence
  Description of Artificial Sequence: Synthetic oligonucleotide
aaggaauugacaagugugu

SEQ ID NO: 283637 - RNA, 19 nt, Artificial Sequence
  Description of Artificial Sequence: Synthetic oligonucleotide
uuuuccucgggaacuacgu

SEQ ID NO: 283638 - RNA, 19 nt, Artificial Sequence
  Description of Artificial Sequence: Synthetic oligonucleotide
aauccucuaguuuucuuuu

SEQ ID NO: 283639 - RNA, 19 nt, Artificial Sequence
  Description of Artificial Sequence: Synthetic oligonucleotide
uccccaauauucuggaugu

SEQ ID NO: 283640 - RNA, 19 nt, Artificial Sequence
  Description of Artificial Sequence: Synthetic oligonucleotide
uaguguaacaggugagacc

SEQ ID NO: 283641 - RNA, 19 nt, Artificial Sequence
  Description of Artificial Sequence: Synthetic oligonucleotide
agaucagcaaauaaacucu

SEQ ID NO: 283642 - RNA, 19 nt, Artificial Sequence
  Description of Artificial Sequence: Synthetic oligonucleotide
uacgaucaaaaugugguac

SEQ ID NO: 283643 - RNA, 19 nt, Artificial Sequence
  Description of Artificial Sequence: Synthetic oligonucleotide
caaaagucaucucuagcac

SEQ ID NO: 283644 - RNA, 19 nt, Artificial Sequence
  Description of Artificial Sequence: Synthetic oligonucleotide
uggagaguaacuucuuuuc

SEQ ID NO: 283645 - RNA, 19 nt, Artificial Sequence
  Description of Artificial Sequence: Synthetic oligonucleotide
uggaauagccccacacuug

SEQ ID NO: 283646 - RNA, 19 nt, Artificial Sequence
  Description of Artificial Sequence: Synthetic oligonucleotide
auauucagaauaauguuaa

SEQ ID NO: 283647 - RNA, 19 nt, Artificial Sequence
  Description of Artificial Sequence: Synthetic oligonucleotide
auugacaaguguguggucu

SEQ ID NO: 283648 - RNA, 19 nt, Artificial Sequence
  Description of Artificial Sequence: Synthetic oligonucleotide
gaagacguuggugaagcag

SEQ ID NO: 283649 - RNA, 19 nt, Artificial Sequence
  Description of Artificial Sequence: Synthetic oligonucleotide
uucuugcuugguacgauca

SEQ ID NO: 283650 - RNA, 19 nt, Artificial Sequence
  Description of Artificial Sequence: Synthetic oligonucleotide
guagcugguuucuaaguug

SEQ ID NO: 283651 - RNA, 19 nt, Artificial Sequence
  Description of Artificial Sequence: Synthetic oligonucleotide
aaggcaauccaguggugca

SEQ ID NO: 283652 - RNA, 19 nt, Artificial Sequence
  Description of Artificial Sequence: Synthetic oligonucleotide
gauauacagauccaugggu

SEQ ID NO: 283653 - RNA, 19 nt, Artificial Sequence
  Description of Artificial Sequence: Synthetic oligonucleotide
uuucggcuauuccucaggc

SEQ ID NO: 283654 - RNA, 19 nt, Artificial Sequence
  Description of Artificial Sequence: Synthetic oligonucleotide
aagacguuggugaagcaga

SEQ ID NO: 283655 - RNA, 19 nt, Artificial Sequence
  Description of Artificial Sequence: Synthetic oligonucleotide
augcuuaggucccuuuggg

SEQ ID NO: 283656 - RNA, 19 nt, Artificial Sequence
  Description of Artificial Sequence: Synthetic oligonucleotide
agguguuuucuuccacacc

SEQ ID NO: 283657 - RNA, 19 nt, Artificial Sequence
  Description of Artificial Sequence: Synthetic oligonucleotide
uugccgauguuccgggacg

SEQ ID NO: 283658 - RNA, 19 nt, Artificial Sequence
  Description of Artificial Sequence: Synthetic oligonucleotide
ugauuuccccaauauucug

SEQ ID NO: 283659 - RNA, 19 nt, Artificial Sequence
  Description of Artificial Sequence: Synthetic oligonucleotide
ugauagaggaacugcuccu

SEQ ID NO: 283660 - RNA, 19 nt, Artificial Sequence
  Description of Artificial Sequence: Synthetic oligonucleotide
gccggggugauuuaaaucc

SEQ ID NO: 283661 - RNA, 19 nt, Artificial Sequence
  Description of Artificial Sequence: Synthetic oligonucleotide
uucucgucccuuacaaaug

SEQ ID NO: 283662 - RNA, 19 nt, Artificial Sequence
  Description of Artificial Sequence: Synthetic oligonucleotide
gaaacgagaccacacucuc

SEQ ID NO: 283663 - RNA, 19 nt, Artificial Sequence
  Description of Artificial Sequence: Synthetic oligonucleotide
uucaccugaagcccauggc

SEQ ID NO: 283664 - RNA, 19 nt, Artificial Sequence
  Description of Artificial Sequence: Synthetic oligonucleotide
auagaggaacugcuccuuc

SEQ ID NO: 283665 - RNA, 19 nt, Artificial Sequence
  Description of Artificial Sequence: Synthetic oligonucleotide
uuaucauggccgaucugga

SEQ ID NO: 283666 - RNA, 19 nt, Artificial Sequence
  Description of Artificial Sequence: Synthetic oligonucleotide
auaacauagccaguuagau

SEQ ID NO: 283667 - RNA, 19 nt, Artificial Sequence
  Description of Artificial Sequence: Synthetic oligonucleotide
ugagcucguggucugaaaa

SEQ ID NO: 283668 - RNA, 19 nt, Artificial Sequence
  Description of Artificial Sequence: Synthetic oligonucleotide
uaagcagugccaaccucgc

SEQ ID NO: 283669 - RNA, 19 nt, Artificial Sequence
  Description of Artificial Sequence: Synthetic oligonucleotide
ucuggcacucaaaagucau

SEQ ID NO: 283670 - RNA, 19 nt, Artificial Sequence
  Description of Artificial Sequence: Synthetic oligonucleotide
uugcuugguacgaucaaaa

SEQ ID NO: 283671 - RNA, 19 nt, Artificial Sequence
  Description of Artificial Sequence: Synthetic oligonucleotide
ucccuuugggaugaagagg

SEQ ID NO: 283672 - RNA, 19 nt, Artificial Sequence
  Description of Artificial Sequence: Synthetic oligonucleotide
ucccuaugauuacagcaug

SEQ ID NO: 283673 - RNA, 19 nt, Artificial Sequence
  Description of Artificial Sequence: Synthetic oligonucleotide
cucggaucaaggaauugac

SEQ ID NO: 283674 - RNA, 19 nt, Artificial Sequence
  Description of Artificial Sequence: Synthetic oligonucleotide
ugugguacggaaucaggau

SEQ ID NO: 283675 - RNA, 19 nt, Artificial Sequence
  Description of Artificial Sequence: Synthetic oligonucleotide
ugguuucuaaguugcaaaa

SEQ ID NO: 283676 - RNA, 19 nt, Artificial Sequence
  Description of Artificial Sequence: Synthetic oligonucleotide
ggcagguuaaauaaauaag

SEQ ID NO: 283677 - RNA, 19 nt, Artificial Sequence
  Description of Artificial Sequence: Synthetic oligonucleotide
gaagcagaaguaguccacc

SEQ ID NO: 283678 - RNA, 19 nt, Artificial Sequence
  Description of Artificial Sequence: Synthetic oligonucleotide
guauacaucucuucucguc

SEQ ID NO: 283679 - RNA, 19 nt, Artificial Sequence
  Description of Artificial Sequence: Synthetic oligonucleotide
gauuuaaauccaugcugga

SEQ ID NO: 283680 - RNA, 19 nt, Artificial Sequence
  Description of Artificial Sequence: Synthetic oligonucleotide
caaagcggcagaaguugcg

SEQ ID NO: 283681 - RNA, 19 nt, Artificial Sequence
  Description of Artificial Sequence: Synthetic oligonucleotide
cuuaggucccuuugggaug

SEQ ID NO: 283682 - RNA, 19 nt, Artificial Sequence
  Description of Artificial Sequence: Synthetic oligonucleotide
gugguacggaaucaggaug

SEQ ID NO: 283683 - RNA, 19 nt, Artificial Sequence
  Description of Artificial Sequence: Synthetic oligonucleotide
uguugggcgagaugguuac

SEQ ID NO: 283684 - RNA, 19 nt, Artificial Sequence
  Description of Artificial Sequence: Synthetic oligonucleotide
gacagucgaacccaugcuc

SEQ ID NO: 283685 - RNA, 19 nt, Artificial Sequence
  Description of Artificial Sequence: Synthetic oligonucleotide
cauacagcccagaauuauc

SEQ ID NO: 283686 - RNA, 19 nt, Artificial Sequence
  Description of Artificial Sequence: Synthetic oligonucleotide
gcagguuaaauaaauaaga

SEQ ID NO: 283687 - RNA, 19 nt, Artificial Sequence
  Description of Artificial Sequence: Synthetic oligonucleotide
aaacgauguggaauggccu

SEQ ID NO: 283688 - RNA, 19 nt, Artificial Sequence
  Description of Artificial Sequence: Synthetic oligonucleotide
uccacaccggugauguuca

SEQ ID NO: 283689 - RNA, 19 nt, Artificial Sequence
  Description of Artificial Sequence: Synthetic oligonucleotide
ucggccaacaaggcaaucc

SEQ ID NO: 283690 - RNA, 19 nt, Artificial Sequence
  Description of Artificial Sequence: Synthetic oligonucleotide
ucaagguguuuucuuccac

SEQ ID NO: 283691 - RNA, 19 nt, Artificial Sequence
  Description of Artificial Sequence: Synthetic oligonucleotide
ccucauauccugaauuagg

SEQ ID NO: 283692 - RNA, 19 nt, Artificial Sequence
  Description of Artificial Sequence: Synthetic oligonucleotide
cugccgguuuuccugauag

SEQ ID NO: 283693 - RNA, 19 nt, Artificial Sequence
  Description of Artificial Sequence: Synthetic oligonucleotide
agaugguuacaagucuccg

SEQ ID NO: 283694 - RNA, 19 nt, Artificial Sequence
  Description of Artificial Sequence: Synthetic oligonucleotide
uugguacgaucaaaaugug

SEQ ID NO: 283695 - RNA, 19 nt, Artificial Sequence
  Description of Artificial Sequence: Synthetic oligonucleotide
cugaaacgagaccacacuc

SEQ ID NO: 283696 - RNA, 19 nt, Artificial Sequence
  Description of Artificial Sequence: Synthetic oligonucleotide
acaaagcggcagaaguugc

SEQ ID NO: 283697 - RNA, 19 nt, Artificial Sequence
  Description of Artificial Sequence: Synthetic oligonucleotide
cuuaaccagggaugucucc

SEQ ID NO: 283698 - RNA, 19 nt, Artificial Sequence
  Description of Artificial Sequence: Synthetic oligonucleotide
gaauugacaaguguguggu

SEQ ID NO: 283699 - RNA, 19 nt, Artificial Sequence
  Description of Artificial Sequence: Synthetic oligonucleotide
gaaguugcgggcccuugug

SEQ ID NO: 283700 - RNA, 19 nt, Artificial Sequence
  Description of Artificial Sequence: Synthetic oligonucleotide
guuggcggugaacauggag

SEQ ID NO: 283701 - RNA, 19 nt, Artificial Sequence
  Description of Artificial Sequence: Synthetic oligonucleotide
agguuugugcuuucuccag

SEQ ID NO: 283702 - RNA, 19 nt, Artificial Sequence
  Description of Artificial Sequence: Synthetic oligonucleotide
uguuucggcuauuccucag

SEQ ID NO: 283703 - RNA, 19 nt, Artificial Sequence
  Description of Artificial Sequence: Synthetic oligonucleotide
caaggcaauccaguggugc

SEQ ID NO: 283704 - RNA, 19 nt, Artificial Sequence
  Description of Artificial Sequence: Synthetic oligonucleotide
cacaucaguuuugauuucc

SEQ ID NO: 283705 - RNA, 19 nt, Artificial Sequence
  Description of Artificial Sequence: Synthetic oligonucleotide
aucaagguguuuucuucca

SEQ ID NO: 283706 - RNA, 19 nt, Artificial Sequence
  Description of Artificial Sequence: Synthetic oligonucleotide
agccggggugauuuaaauc

SEQ ID NO: 283707 - RNA, 19 nt, Artificial Sequence
  Description of Artificial Sequence: Synthetic oligonucleotide
gaauuaucauggccgaucu

SEQ ID NO: 283708 - RNA, 19 nt, Artificial Sequence
  Description of Artificial Sequence: Synthetic oligonucleotide
uguggucuuugaucagugc

SEQ ID NO: 283709 - RNA, 19 nt, Artificial Sequence
  Description of Artificial Sequence: Synthetic oligonucleotide
aggaugguugugaagacgu

SEQ ID NO: 283710 - RNA, 19 nt, Artificial Sequence
  Description of Artificial Sequence: Synthetic oligonucleotide
aguugcgggcccuugugug

SEQ ID NO: 283711 - RNA, 19 nt, Artificial Sequence
  Description of Artificial Sequence: Synthetic oligonucleotide
ucgggaacuacgucauucu

SEQ ID NO: 283712 - RNA, 19 nt, Artificial Sequence
  Description of Artificial Sequence: Synthetic oligonucleotide
auagccccacacuugugug

SEQ ID NO: 283713 - RNA, 19 nt, Artificial Sequence
  Description of Artificial Sequence: Synthetic oligonucleotide
accggugauguucaccucu

SEQ ID NO: 283714 - RNA, 19 nt, Artificial Sequence
  Description of Artificial Sequence: Synthetic oligonucleotide
aggaauugacaagugugug

SEQ ID NO: 283715 - RNA, 19 nt, Artificial Sequence
  Description of Artificial Sequence: Synthetic oligonucleotide
uggccgaucuggacagugg

SEQ ID NO: 283716 - RNA, 19 nt, Artificial Sequence
  Description of Artificial Sequence: Synthetic oligonucleotide
uacgucauucugcuccaac

SEQ ID NO: 283717 - RNA, 19 nt, Artificial Sequence
  Description of Artificial Sequence: Synthetic oligonucleotide
gacguguuguugauugcag

SEQ ID NO: 283718 - RNA, 19 nt, Artificial Sequence
  Description of Artificial Sequence: Synthetic oligonucleotide
aaguugcgggcccuugugu

SEQ ID NO: 283719 - RNA, 19 nt, Artificial Sequence
  Description of Artificial Sequence: Synthetic oligonucleotide
auauccugaauuagggaga

SEQ ID NO: 283720 - RNA, 19 nt, Artificial Sequence
  Description of Artificial Sequence: Synthetic oligonucleotide
uccccaaccagcacucgcu

SEQ ID NO: 283721 - RNA, 19 nt, Artificial Sequence
  Description of Artificial Sequence: Synthetic oligonucleotide
agaugucaaugcccuuaac

SEQ ID NO: 283722 - RNA, 19 nt, Artificial Sequence
  Description of Artificial Sequence: Synthetic oligonucleotide
auaguagguuugugcuuuc

SEQ ID NO: 283723 - RNA, 19 nt, Artificial Sequence
  Description of Artificial Sequence: Synthetic oligonucleotide
gguaagcuucccuagguuc

SEQ ID NO: 283724 - RNA, 19 nt, Artificial Sequence
  Description of Artificial Sequence: Synthetic oligonucleotide
ugcuuaggucccuuuggga

SEQ ID NO: 283725 - RNA, 19 nt, Artificial Sequence
  Description of Artificial Sequence: Synthetic oligonucleotide
ucaggaugguugugaagac

SEQ ID NO: 283726 - RNA, 19 nt, Artificial Sequence
  Description of Artificial Sequence: Synthetic oligonucleotide
gauguuccgggacguguug

SEQ ID NO: 283727 - RNA, 19 nt, Artificial Sequence
  Description of Artificial Sequence: Synthetic oligonucleotide
cuaaguugcaaaacaacau

SEQ ID NO: 283728 - RNA, 19 nt, Artificial Sequence
  Description of Artificial Sequence: Synthetic oligonucleotide
uuguugggcgagaugguua

SEQ ID NO: 283729 - RNA, 19 nt, Artificial Sequence
  Description of Artificial Sequence: Synthetic oligonucleotide
uaacgcuuguacagcuucu

SEQ ID NO: 283730 - RNA, 19 nt, Artificial Sequence
  Description of Artificial Sequence: Synthetic oligonucleotide
cugucacucuuucacauga

SEQ ID NO: 283731 - RNA, 19 nt, Artificial Sequence
  Description of Artificial Sequence: Synthetic oligonucleotide
gaacuuguagguauguccu

SEQ ID NO: 283732 - RNA, 19 nt, Artificial Sequence
  Description of Artificial Sequence: Synthetic oligonucleotide
uucggcuauuccucaggcc

SEQ ID NO: 283733 - RNA, 19 nt, Artificial Sequence
  Description of Artificial Sequence: Synthetic oligonucleotide
uuggucuuguuucggcuau

SEQ ID NO: 283734 - RNA, 19 nt, Artificial Sequence
  Description of Artificial Sequence: Synthetic oligonucleotide
aguguuuagcuugggcuug

SEQ ID NO: 283735 - RNA, 19 nt, Artificial Sequence
  Description of Artificial Sequence: Synthetic oligonucleotide
uuguuucggcuauuccuca

SEQ ID NO: 283736 - RNA, 19 nt, Artificial Sequence
  Description of Artificial Sequence: Synthetic oligonucleotide
ccgguguuuuauuaagugg

SEQ ID NO: 283737 - RNA, 19 nt, Artificial Sequence
  Description of Artificial Sequence: Synthetic oligonucleotide
cagauccauggguuggcgg

SEQ ID NO: 283738 - RNA, 19 nt, Artificial Sequence
  Description of Artificial Sequence: Synthetic oligonucleotide
uuccgggacguguuguuga

SEQ ID NO: 283739 - RNA, 19 nt, Artificial Sequence
  Description of Artificial Sequence: Synthetic oligonucleotide
cuugccgauguuccgggac

SEQ ID NO: 283740 - RNA, 19 nt, Artificial Sequence
  Description of Artificial Sequence: Synthetic oligonucleotide
acuacgucauucugcucca

SEQ ID NO: 283741 - RNA, 19 nt, Artificial Sequence
  Description of Artificial Sequence: Synthetic oligonucleotide
ccgacaaggccucucaucc

SEQ ID NO: 283742 - RNA, 19 nt, Artificial Sequence
  Description of Artificial Sequence: Synthetic oligonucleotide
ugggcgagaugguuacaag

SEQ ID NO: 283743 - RNA, 19 nt, Artificial Sequence
  Description of Artificial Sequence: Synthetic oligonucleotide
cuuucucggguuuauggaa

SEQ ID NO: 283744 - RNA, 19 nt, Artificial Sequence
  Description of Artificial Sequence: Synthetic oligonucleotide
uucccuagguucuggcacu

SEQ ID NO: 283745 - RNA, 19 nt, Artificial Sequence
  Description of Artificial Sequence: Synthetic oligonucleotide
ucgucccuuacaaaugcuu

SEQ ID NO: 283746 - RNA, 19 nt, Artificial Sequence
  Description of Artificial Sequence: Synthetic oligonucleotide
uccgacaaggccucucauc

SEQ ID NO: 283747 - RNA, 19 nt, Artificial Sequence
  Description of Artificial Sequence: Synthetic oligonucleotide
agcacauuccuggggaucu

SEQ ID NO: 283748 - RNA, 19 nt, Artificial Sequence
  Description of Artificial Sequence: Synthetic oligonucleotide
caggaugguugugaagacg

SEQ ID NO: 283749 - RNA, 19 nt, Artificial Sequence
  Description of Artificial Sequence: Synthetic oligonucleotide
cauggguuggcggugaaca

SEQ ID NO: 283750 - RNA, 19 nt, Artificial Sequence
  Description of Artificial Sequence: Synthetic oligonucleotide
agaaguugcgggcccuugu

SEQ ID NO: 283751 - RNA, 19 nt, Artificial Sequence
  Description of Artificial Sequence: Synthetic oligonucleotide
ugugcaacuuugugccaac

SEQ ID NO: 283752 - RNA, 19 nt, Artificial Sequence
  Description of Artificial Sequence: Synthetic oligonucleotide
aguccgacaaggccucuca

SEQ ID NO: 283753 - RNA, 19 nt, Artificial Sequence
  Description of Artificial Sequence: Synthetic oligonucleotide
ugacagcggcacaaugaca

SEQ ID NO: 283754 - RNA, 19 nt, Artificial Sequence
  Description of Artificial Sequence: Synthetic oligonucleotide
agucgaacccaugcucugg

SEQ ID NO: 283755 - RNA, 19 nt, Artificial Sequence
  Description of Artificial Sequence: Synthetic oligonucleotide
ggugauuuaaauccaugcu

SEQ ID NO: 283756 - RNA, 19 nt, Artificial Sequence
  Description of Artificial Sequence: Synthetic oligonucleotide
ugcuugguacgaucaaaau

SEQ ID NO: 283757 - RNA, 19 nt, Artificial Sequence
  Description of Artificial Sequence: Synthetic oligonucleotide
acguguuguugauugcagu

SEQ ID NO: 283758 - RNA, 19 nt, Artificial Sequence
  Description of Artificial Sequence: Synthetic oligonucleotide
gucuccggaugacacuggg

SEQ ID NO: 283759 - RNA, 19 nt, Artificial Sequence
  Description of Artificial Sequence: Synthetic oligonucleotide
uccucgggaacuacgucau

SEQ ID NO: 283760 - RNA, 19 nt, Artificial Sequence
  Description of Artificial Sequence: Synthetic oligonucleotide
aucccuaugauuacagcau

SEQ ID NO: 283761 - RNA, 19 nt, Artificial Sequence
  Description of Artificial Sequence: Synthetic oligonucleotide
augugguacggaaucagga

SEQ ID NO: 283762 - RNA, 19 nt, Artificial Sequence
  Description of Artificial Sequence: Synthetic oligonucleotide
aacuuugugccaacaggaa

SEQ ID NO: 283763 - RNA, 19 nt, Artificial Sequence
  Description of Artificial Sequence: Synthetic oligonucleotide
uugccguccuugccgaugu

SEQ ID NO: 283764 - RNA, 19 nt, Artificial Sequence
  Description of Artificial Sequence: Synthetic oligonucleotide
cagcgcguggccaugcaag

SEQ ID NO: 283765 - RNA, 19 nt, Artificial Sequence
  Description of Artificial Sequence: Synthetic oligonucleotide
uuuccucgggaacuacguc

SEQ ID NO: 283766 - RNA, 19 nt, Artificial Sequence
  Description of Artificial Sequence: Synthetic oligonucleotide
cucgggaacuacgucauuc

SEQ ID NO: 283767 - RNA, 19 nt, Artificial Sequence
  Description of Artificial Sequence: Synthetic oligonucleotide
caagaaguauuccugaguu

SEQ ID NO: 283768 - RNA, 19 nt, Artificial Sequence
  Description of Artificial Sequence: Synthetic oligonucleotide
gggcagucggccaacaagg

SEQ ID NO: 283769 - RNA, 19 nt, Artificial Sequence
  Description of Artificial Sequence: Synthetic oligonucleotide
acagucgaacccaugcucu

SEQ ID NO: 283770 - RNA, 19 nt, Artificial Sequence
  Description of Artificial Sequence: Synthetic oligonucleotide
gcagaaguaguccaccgca

SEQ ID NO: 283771 - RNA, 19 nt, Artificial Sequence
  Description of Artificial Sequence: Synthetic oligonucleotide
ugguugugaagacguuggu

SEQ ID NO: 283772 - RNA, 19 nt, Artificial Sequence
  Description of Artificial Sequence: Synthetic oligonucleotide
gacaaguguguggucuuug

SEQ ID NO: 283773 - RNA, 19 nt, Artificial Sequence
  Description of Artificial Sequence: Synthetic oligonucleotide
acgcuuguacagcuucuug

SEQ ID NO: 283774 - RNA, 19 nt, Artificial Sequence
  Description of Artificial Sequence: Synthetic oligonucleotide
uugggcgagaugguuacaa

SEQ ID NO: 283775 - RNA, 19 nt, Artificial Sequence
  Description of Artificial Sequence: Synthetic oligonucleotide
gcucauguuuacuucugug

SEQ ID NO: 283776 - RNA, 19 nt, Artificial Sequence
  Description of Artificial Sequence: Synthetic oligonucleotide
ugguaagcuucccuagguu

SEQ ID NO: 283777 - RNA, 19 nt, Artificial Sequence
  Description of Artificial Sequence: Synthetic oligonucleotide
cacaugaaaguguguaaaa

SEQ ID NO: 283778 - RNA, 19 nt, Artificial Sequence
  Description of Artificial Sequence: Synthetic oligonucleotide
ggguuuauggaagugcuuc

SEQ ID NO: 283779 - RNA, 19 nt, Artificial Sequence
  Description of Artificial Sequence: Synthetic oligonucleotide
ugucuccgguguuuuauua

SEQ ID NO: 283780 - RNA, 19 nt, Artificial Sequence
  Description of Artificial Sequence: Synthetic oligonucleotide
ggaacuacgucauucugcu

SEQ ID NO: 283781 - RNA, 19 nt, Artificial Sequence
  Description of Artificial Sequence: Synthetic oligonucleotide
guccuugccgauguuccgg

SEQ ID NO: 283782 - RNA, 19 nt, Artificial Sequence
  Description of Artificial Sequence: Synthetic oligonucleotide
gccaguuagauugugacaa

SEQ ID NO: 283783 - RNA, 19 nt, Artificial Sequence
  Description of Artificial Sequence: Synthetic oligonucleotide
gacagcggcacaaugacau

SEQ ID NO: 283784 - RNA, 19 nt, Artificial Sequence
  Description of Artificial Sequence: Synthetic oligonucleotide
ggggcagucggccaacaag

SEQ ID NO: 283785 - RNA, 19 nt, Artificial Sequence
  Description of Artificial Sequence: Synthetic oligonucleotide
cuucucgucccuuacaaau

SEQ ID NO: 283786 - RNA, 19 nt, Artificial Sequence
  Description of Artificial Sequence: Synthetic oligonucleotide
ugaagacguuggugaagca

SEQ ID NO: 283787 - RNA, 19 nt, Artificial Sequence
  Description of Artificial Sequence: Synthetic oligonucleotide
auagccaguuagauuguga

SEQ ID NO: 283788 - RNA, 19 nt, Artificial Sequence
  Description of Artificial Sequence: Synthetic oligonucleotide
caaccucgcucccucuucc

SEQ ID NO: 283789 - RNA, 19 nt, Artificial Sequence
  Description of Artificial Sequence: Synthetic oligonucleotide
caugggaacuuguagguau

SEQ ID NO: 283790 - RNA, 19 nt, Artificial Sequence
  Description of Artificial Sequence: Synthetic oligonucleotide
cuuuuccauggacagucga

SEQ ID NO: 283791 - RNA, 19 nt, Artificial Sequence
  Description of Artificial Sequence: Synthetic oligonucleotide
aggugagaccacaaagcug

SEQ ID NO: 283792 - RNA, 19 nt, Artificial Sequence
  Description of Artificial Sequence: Synthetic oligonucleotide
aguccaccgcauugaagga

SEQ ID NO: 283793 - RNA, 19 nt, Artificial Sequence
  Description of Artificial Sequence: Synthetic oligonucleotide
aguucuccugauauacaga

SEQ ID NO: 283794 - RNA, 19 nt, Artificial Sequence
  Description of Artificial Sequence: Synthetic oligonucleotide
cuccaacgucucauaguag

SEQ ID NO: 283795 - RNA, 19 nt, Artificial Sequence
  Description of Artificial Sequence: Synthetic oligonucleotide
agguggggaacagcugugg

SEQ ID NO: 283796 - RNA, 19 nt, Artificial Sequence
  Description of Artificial Sequence: Synthetic oligonucleotide
caucgcagcgcaggaaggc

SEQ ID NO: 283797 - RNA, 19 nt, Artificial Sequence
  Description of Artificial Sequence: Synthetic oligonucleotide
ggcauaacgcuuguacagc

SEQ ID NO: 283798 - RNA, 19 nt, Artificial Sequence
  Description of Artificial Sequence: Synthetic oligonucleotide
aacgcuuguacagcuucuu

SEQ ID NO: 283799 - RNA, 19 nt, Artificial Sequence
  Description of Artificial Sequence: Synthetic oligonucleotide
gcuccaacgucucauagua

SEQ ID NO: 283800 - RNA, 19 nt, Artificial Sequence
  Description of Artificial Sequence: Synthetic oligonucleotide
ugggaacuuguagguaugu

SEQ ID NO: 283801 - RNA, 19 nt, Artificial Sequence
  Description of Artificial Sequence: Synthetic oligonucleotide
uccugcucgcacaccugug

SEQ ID NO: 283802 - RNA, 19 nt, Artificial Sequence
  Description of Artificial Sequence: Synthetic oligonucleotide
gccgguuuuccugauagug

SEQ ID NO: 283803 - RNA, 19 nt, Artificial Sequence
  Description of Artificial Sequence: Synthetic oligonucleotide
ggcgagaugguuacaaguc

SEQ ID NO: 283804 - RNA, 19 nt, Artificial Sequence
  Description of Artificial Sequence: Synthetic oligonucleotide
cauagccaguuagauugug

SEQ ID NO: 283805 - RNA, 19 nt, Artificial Sequence
  Description of Artificial Sequence: Synthetic oligonucleotide
ugguuacaagucuccggau

SEQ ID NO: 283806 - RNA, 19 nt, Artificial Sequence
  Description of Artificial Sequence: Synthetic oligonucleotide
agccagauauucagaauaa

SEQ ID NO: 283807 - RNA, 19 nt, Artificial Sequence
  Description of Artificial Sequence: Synthetic oligonucleotide
cagucgaacccaugcucug

SEQ ID NO: 283808 - RNA, 19 nt, Artificial Sequence
  Description of Artificial Sequence: Synthetic oligonucleotide
guccaccgcauugaaggag

SEQ ID NO: 283809 - RNA, 19 nt, Artificial Sequence
  Description of Artificial Sequence: Synthetic oligonucleotide
agggaugucuccaguguga

SEQ ID NO: 283810 - RNA, 19 nt, Artificial Sequence
  Description of Artificial Sequence: Synthetic oligonucleotide
gucucauaguagguuugug

SEQ ID NO: 283811 - RNA, 19 nt, Artificial Sequence
  Description of Artificial Sequence: Synthetic oligonucleotide
gugugauguugaauucuug

SEQ ID NO: 283812 - RNA, 19 nt, Artificial Sequence
  Description of Artificial Sequence: Synthetic oligonucleotide
gauuuccugcucgcacacc

SEQ ID NO: 283813 - RNA, 19 nt, Artificial Sequence
  Description of Artificial Sequence: Synthetic oligonucleotide
guggaauagccccacacuu

SEQ ID NO: 283814 - RNA, 19 nt, Artificial Sequence
  Description of Artificial Sequence: Synthetic oligonucleotide
uugucuccgguguuuuauu

SEQ ID NO: 283815 - RNA, 19 nt, Artificial Sequence
  Description of Artificial Sequence: Synthetic oligonucleotide
gauguggaauggccucauc

SEQ ID NO: 283816 - RNA, 19 nt, Artificial Sequence
  Description of Artificial Sequence: Synthetic oligonucleotide
uguuccgggacguguuguu

SEQ ID NO: 283817 - RNA, 19 nt, Artificial Sequence
  Description of Artificial Sequence: Synthetic oligonucleotide
cuaugauuacagcauggau

SEQ ID NO: 283818 - RNA, 19 nt, Artificial Sequence
  Description of Artificial Sequence: Synthetic oligonucleotide
auggccgaucuggacagug

SEQ ID NO: 283819 - RNA, 19 nt, Artificial Sequence
  Description of Artificial Sequence: Synthetic oligonucleotide
ggggcggaguccgacaagg

SEQ ID NO: 283820 - RNA, 19 nt, Artificial Sequence
  Description of Artificial Sequence: Synthetic oligonucleotide
gcggugaacauggagcccc

SEQ ID NO: 283821 - RNA, 19 nt, Artificial Sequence
  Description of Artificial Sequence: Synthetic oligonucleotide
ggugauagaggaacugcuc

SEQ ID NO: 283822 - RNA, 19 nt, Artificial Sequence
  Description of Artificial Sequence: Synthetic oligonucleotide
gaauagccccacacuugug

SEQ ID NO: 283823 - RNA, 19 nt, Artificial Sequence
  Description of Artificial Sequence: Synthetic oligonucleotide
gucuccgguguuuuauuaa

SEQ ID NO: 283824 - RNA, 19 nt, Artificial Sequence
  Description of Artificial Sequence: Synthetic oligonucleotide
caggugagaccacaaagcu

SEQ ID NO: 283825 - RNA, 19 nt, Artificial Sequence
  Description of Artificial Sequence: Synthetic oligonucleotide
ggaauagccccacacuugu

SEQ ID NO: 283826 - RNA, 19 nt, Artificial Sequence
  Description of Artificial Sequence: Synthetic oligonucleotide
uugcgggcccuugugugcc

SEQ ID NO: 283827 - RNA, 19 nt, Artificial Sequence
  Description of Artificial Sequence: Synthetic oligonucleotide
acgucucauaguagguuug

SEQ ID NO: 283828 - RNA, 19 nt, Artificial Sequence
  Description of Artificial Sequence: Synthetic oligonucleotide
acgauguggaauggccuca

SEQ ID NO: 283829 - RNA, 19 nt, Artificial Sequence
  Description of Artificial Sequence: Synthetic oligonucleotide
ggucccuuugggaugaaga

SEQ ID NO: 283830 - RNA, 19 nt, Artificial Sequence
  Description of Artificial Sequence: Synthetic oligonucleotide
uagcacauuccuggggauc

SEQ ID NO: 283831 - RNA, 19 nt, Artificial Sequence
  Description of Artificial Sequence: Synthetic oligonucleotide
gccucauauccugaauuag

SEQ ID NO: 283832 - RNA, 19 nt, Artificial Sequence
  Description of Artificial Sequence: Synthetic oligonucleotide
caggggagacaugacagca

SEQ ID NO: 283833 - RNA, 19 nt, Artificial Sequence
  Description of Artificial Sequence: Synthetic oligonucleotide
cuccuucccaaauaauacu

SEQ ID NO: 283834 - RNA, 19 nt, Artificial Sequence
  Description of Artificial Sequence: Synthetic oligonucleotide
cauacuguagcugguuucu

SEQ ID NO: 283835 - RNA, 19 nt, Artificial Sequence
  Description of Artificial Sequence: Synthetic oligonucleotide
cuccugauauacagaucca

SEQ ID NO: 283836 - RNA, 19 nt, Artificial Sequence
  Description of Artificial Sequence: Synthetic oligonucleotide
guaacaggugagaccacaa

SEQ ID NO: 283837 - RNA, 19 nt, Artificial Sequence
  Description of Artificial Sequence: Synthetic oligonucleotide
agcacucgcuccaggcuuc

SEQ ID NO: 283838 - RNA, 19 nt, Artificial Sequence
  Description of Artificial Sequence: Synthetic oligonucleotide
gaacuacgucauucugcuc

SEQ ID NO: 283839 - RNA, 19 nt, Artificial Sequence
  Description of Artificial Sequence: Synthetic oligonucleotide
cagcacucggaucaaggaa

SEQ ID NO: 283840 - RNA, 19 nt, Artificial Sequence
  Description of Artificial Sequence: Synthetic oligonucleotide
ggggugauuuaaauccaug

SEQ ID NO: 283841 - RNA, 19 nt, Artificial Sequence
  Description of Artificial Sequence: Synthetic oligonucleotide
ucaaacugccacgcucuuu

SEQ ID NO: 283842 - RNA, 19 nt, Artificial Sequence
  Description of Artificial Sequence: Synthetic oligonucleotide
agugccaaccucgcucccu

SEQ ID NO: 283843 - RNA, 19 nt, Artificial Sequence
  Description of Artificial Sequence: Synthetic oligonucleotide
cacaagccauuuggcauac

SEQ ID NO: 283844 - RNA, 19 nt, Artificial Sequence
  Description of Artificial Sequence: Synthetic oligonucleotide
guuccgggacguguuguug

SEQ ID NO: 283845 - RNA, 19 nt, Artificial Sequence
  Description of Artificial Sequence: Synthetic oligonucleotide
cgaucaaaaugugguacgg

SEQ ID NO: 283846 - RNA, 19 nt, Artificial Sequence
  Description of Artificial Sequence: Synthetic oligonucleotide
ucaguccgggaggccacag

SEQ ID NO: 283847 - RNA, 19 nt, Artificial Sequence
  Description of Artificial Sequence: Synthetic oligonucleotide
ugccgguuuuccugauagu

SEQ ID NO: 283848 - RNA, 19 nt, Artificial Sequence
  Description of Artificial Sequence: Synthetic oligonucleotide
gaaguauuccugaguuacu

SEQ ID NO: 283849 - RNA, 19 nt, Artificial Sequence
  Description of Artificial Sequence: Synthetic oligonucleotide
gcaugacagcggcacaaug

SEQ ID NO: 283850 - RNA, 19 nt, Artificial Sequence
  Description of Artificial Sequence: Synthetic oligonucleotide
ugauuacagcauggauuuc

SEQ ID NO: 283851 - RNA, 19 nt, Artificial Sequence
  Description of Artificial Sequence: Synthetic oligonucleotide
ggacguguuguugauugca

SEQ ID NO: 283852 - RNA, 19 nt, Artificial Sequence
  Description of Artificial Sequence: Synthetic oligonucleotide
gcuuaggucccuuugggau

SEQ ID NO: 283853 - RNA, 19 nt, Artificial Sequence
  Description of Artificial Sequence: Synthetic oligonucleotide
ccgaaucaagaaguauucc

SEQ ID NO: 283854 - RNA, 19 nt, Artificial Sequence
  Description of Artificial Sequence: Synthetic oligonucleotide
ccugcucgcacaccugugc

SEQ ID NO: 283855 - RNA, 19 nt, Artificial Sequence
  Description of Artificial Sequence: Synthetic oligonucleotide
gcugaaacgagaccacacu

SEQ ID NO: 283856 - RNA, 19 nt, Artificial Sequence
  Description of Artificial Sequence: Synthetic oligonucleotide
gugccaaccucgcucccuc

SEQ ID NO: 283857 - RNA, 19 nt, Artificial Sequence
  Description of Artificial Sequence: Synthetic oligonucleotide
acauagccaguuagauugu

SEQ ID NO: 283858 - RNA, 19 nt, Artificial Sequence
  Description of Artificial Sequence: Synthetic oligonucleotide
aggggcggaguccgacaag

SEQ ID NO: 283859 - RNA, 19 nt, Artificial Sequence
  Description of Artificial Sequence: Synthetic oligonucleotide
uggggcagucggccaacaa

SEQ ID NO: 283860 - RNA, 19 nt, Artificial Sequence
  Description of Artificial Sequence: Synthetic oligonucleotide
cagcauggauuuccugcuc

SEQ ID NO: 283861 - RNA, 19 nt, Artificial Sequence
  Description of Artificial Sequence: Synthetic oligonucleotide
ccuuaaccagggaugucuc

SEQ ID NO: 283862 - RNA, 19 nt, Artificial Sequence
  Description of Artificial Sequence: Synthetic oligonucleotide
cgaaucaagaaguauuccu

SEQ ID NO: 283863 - RNA, 19 nt, Artificial Sequence
  Description of Artificial Sequence: Synthetic oligonucleotide
cugccuccccgauggacuc

SEQ ID NO: 283864 - RNA, 19 nt, Artificial Sequence
  Description of Artificial Sequence: Synthetic oligonucleotide
ggccaugcaagggagggca

SEQ ID NO: 283865 - RNA, 19 nt, Artificial Sequence
  Description of Artificial Sequence: Synthetic oligonucleotide
cugugcaacuuugugccaa

SEQ ID NO: 283866 - RNA, 19 nt, Artificial Sequence
  Description of Artificial Sequence: Synthetic oligonucleotide
gggacguguuguugauugc

SEQ ID NO: 283867 - RNA, 19 nt, Artificial Sequence
  Description of Artificial Sequence: Synthetic oligonucleotide
gcggcacaaugacaucucc

SEQ ID NO: 283868 - RNA, 19 nt, Artificial Sequence
  Description of Artificial Sequence: Synthetic oligonucleotide
gcagucggccaacaaggca

SEQ ID NO: 283869 - RNA, 19 nt, Artificial Sequence
  Description of Artificial Sequence: Synthetic oligonucleotide
aggucccuuugggaugaag

SEQ ID NO: 283870 - RNA, 19 nt, Artificial Sequence
  Description of Artificial Sequence: Synthetic oligonucleotide
gcauaacgcuuguacagcu

SEQ ID NO: 283871 - RNA, 19 nt, Artificial Sequence
  Description of Artificial Sequence: Synthetic oligonucleotide
ccucaucggggugaugagg

SEQ ID NO: 283872 - RNA, 19 nt, Artificial Sequence
  Description of Artificial Sequence: Synthetic oligonucleotide
gggcgagaugguuacaagu

SEQ ID NO: 283873 - RNA, 19 nt, Artificial Sequence
  Description of Artificial Sequence: Synthetic oligonucleotide
auggacagucgaacccaug

SEQ ID NO: 283874 - RNA, 19 nt, Artificial Sequence
  Description of Artificial Sequence: Synthetic oligonucleotide
caguaauaacauagccagu

SEQ ID NO: 283875 - RNA, 19 nt, Artificial Sequence
  Description of Artificial Sequence: Synthetic oligonucleotide
cuccgguguuuuauuaagu

SEQ ID NO: 283876 - RNA, 19 nt, Artificial Sequence
  Description of Artificial Sequence: Synthetic oligonucleotide
gagccggggugauuuaaau

SEQ ID NO: 283877 - RNA, 19 nt, Artificial Sequence
  Description of Artificial Sequence: Synthetic oligonucleotide
cccgauggacuccuggauc

SEQ ID NO: 283878 - RNA, 19 nt, Artificial Sequence
  Description of Artificial Sequence: Synthetic oligonucleotide
cauacccuuccccagccau

SEQ ID NO: 283879 - RNA, 19 nt, Artificial Sequence
  Description of Artificial Sequence: Synthetic oligonucleotide
gccucaucggggugaugag

SEQ ID NO: 283880 - RNA, 19 nt, Artificial Sequence
  Description of Artificial Sequence: Synthetic oligonucleotide
gcgagaugguuacaagucu

SEQ ID NO: 283881 - RNA, 19 nt, Artificial Sequence
  Description of Artificial Sequence: Synthetic oligonucleotide
ccaguugguuggcaaugac

SEQ ID NO: 283882 - RNA, 19 nt, Artificial Sequence
  Description of Artificial Sequence: Synthetic oligonucleotide
gugagcucguggucugaaa

SEQ ID NO: 283883 - RNA, 19 nt, Artificial Sequence
  Description of Artificial Sequence: Synthetic oligonucleotide
ucccuagguucuggcacuc

SEQ ID NO: 283884 - RNA, 19 nt, Artificial Sequence
  Description of Artificial Sequence: Synthetic oligonucleotide
ggcagucggccaacaaggc

SEQ ID NO: 283885 - RNA, 19 nt, Artificial Sequence
  Description of Artificial Sequence: Synthetic oligonucleotide
ggacagucgaacccaugcu

SEQ ID NO: 283886 - RNA, 19 nt, Artificial Sequence
  Description of Artificial Sequence: Synthetic oligonucleotide
cagugccaaccucgcuccc

SEQ ID NO: 283887 - RNA, 19 nt, Artificial Sequence
  Description of Artificial Sequence: Synthetic oligonucleotide
cagaaguaguccaccgcau

SEQ ID NO: 283888 - RNA, 19 nt, Artificial Sequence
  Description of Artificial Sequence: Synthetic oligonucleotide
ccguuccgaaucaagaagu

SEQ ID NO: 283889 - RNA, 19 nt, Artificial Sequence
  Description of Artificial Sequence: Synthetic oligonucleotide
cauaacgcuuguacagcuu

SEQ ID NO: 283890 - RNA, 19 nt, Artificial Sequence
  Description of Artificial Sequence: Synthetic oligonucleotide
ugccuccccgauggacucc

SEQ ID NO: 283891 - RNA, 19 nt, Artificial Sequence
  Description of Artificial Sequence: Synthetic oligonucleotide
ucggggugaugaggaggca

SEQ ID NO: 283892 - RNA, 19 nt, Artificial Sequence
  Description of Artificial Sequence: Synthetic oligonucleotide
ccauggacagucgaaccca

SEQ ID NO: 283893 - RNA, 19 nt, Artificial Sequence
  Description of Artificial Sequence: Synthetic oligonucleotide
caggggcggaguccgacaa

SEQ ID NO: 283894 - RNA, 19 nt, Artificial Sequence
  Description of Artificial Sequence: Synthetic oligonucleotide
ccggugauguucaccucuc

SEQ ID NO: 283895 - RNA, 19 nt, Artificial Sequence
  Description of Artificial Sequence: Synthetic oligonucleotide
cuagcacauuccuggggau

SEQ ID NO: 283896 - RNA, 19 nt, Artificial Sequence
  Description of Artificial Sequence: Synthetic oligonucleotide
gcggaguccgacaaggccu

SEQ ID NO: 283897 - RNA, 19 nt, Artificial Sequence
  Description of Artificial Sequence: Synthetic oligonucleotide
ggucagaggcacugcuaaa

SEQ ID NO: 283898 - RNA, 19 nt, Artificial Sequence
  Description of Artificial Sequence: Synthetic oligonucleotide
caucaucgcagcgcaggaa

SEQ ID NO: 283899 - RNA, 19 nt, Artificial Sequence
  Description of Artificial Sequence: Synthetic oligonucleotide
ggcggugaacauggagccc

SEQ ID NO: 283900 - RNA, 19 nt, Artificial Sequence
  Description of Artificial Sequence: Synthetic oligonucleotide
ggcccauaaaagccagaua

SEQ ID NO: 283901 - RNA, 19 nt, Artificial Sequence
  Description of Artificial Sequence: Synthetic oligonucleotide
gggagauccucaggggaga

SEQ ID NO: 283902 - RNA, 19 nt, Artificial Sequence
  Description of Artificial Sequence: Synthetic oligonucleotide
cgcacaccugugcauggcc

SEQ ID NO: 283903 - RNA, 19 nt, Artificial Sequence
  Description of Artificial Sequence: Synthetic oligonucleotide
cauggacagucgaacccau

SEQ ID NO: 283904 - RNA, 19 nt, Artificial Sequence
  Description of Artificial Sequence: Synthetic oligonucleotide
gcgcguggccaugcaaggg

SEQ ID NO: 283905 - RNA, 19 nt, Artificial Sequence
  Description of Artificial Sequence: Synthetic oligonucleotide
ccggggugauuuaaaucca

SEQ ID NO: 283906 - RNA, 19 nt, Artificial Sequence
  Description of Artificial Sequence: Synthetic oligonucleotide
acaagccauuuggcauaca

SEQ ID NO: 283907 - RNA, 19 nt, Artificial Sequence
  Description of Artificial Sequence: Synthetic oligonucleotide
cgggaacuacgucauucug

SEQ ID NO: 283908 - RNA, 19 nt, Artificial Sequence
  Description of Artificial Sequence: Synthetic oligonucleotide
ccgguuuuccugauagugu

SEQ ID NO: 283909 - RNA, 19 nt, Artificial Sequence
  Description of Artificial Sequence: Synthetic oligonucleotide
guugggcgagaugguuaca

SEQ ID NO: 283910 - RNA, 19 nt, Artificial Sequence
  Description of Artificial Sequence: Synthetic oligonucleotide
gcaggggcggaguccgaca

SEQ ID NO: 283911 - RNA, 19 nt, Artificial Sequence
  Description of Artificial Sequence: Synthetic oligonucleotide
cagaauuaucauggccgau

SEQ ID NO: 283912 - RNA, 19 nt, Artificial Sequence
  Description of Artificial Sequence: Synthetic oligonucleotide
cguuccgaaucaagaagua

SEQ ID NO: 283913 - RNA, 19 nt, Artificial Sequence
  Description of Artificial Sequence: Synthetic oligonucleotide
guccgacaaggccucucau

SEQ ID NO: 283914 - RNA, 19 nt, Artificial Sequence
  Description of Artificial Sequence: Synthetic oligonucleotide
gggaugucuccagugugau

SEQ ID NO: 283915 - RNA, 19 nt, Artificial Sequence
  Description of Artificial Sequence: Synthetic oligonucleotide
cuacgucauucugcuccaa

SEQ ID NO: 283916 - RNA, 19 nt, Artificial Sequence
  Description of Artificial Sequence: Synthetic oligonucleotide
gccgauguuccgggacgug

SEQ ID NO: 283917 - RNA, 19 nt, Artificial Sequence
  Description of Artificial Sequence: Synthetic oligonucleotide
gccaugcaagggagggcac

SEQ ID NO: 283918 - RNA, 19 nt, Artificial Sequence
  Description of Artificial Sequence: Synthetic oligonucleotide
ccucccggcccaucuucuc

SEQ ID NO: 283919 - RNA, 19 nt, Artificial Sequence
  Description of Artificial Sequence: Synthetic oligonucleotide
uaggucccuuugggaugaa

SEQ ID NO: 283920 - RNA, 19 nt, Artificial Sequence
  Description of Artificial Sequence: Synthetic oligonucleotide
gcccacaugggaacuugua

SEQ ID NO: 283921 - RNA, 19 nt, Artificial Sequence
  Description of Artificial Sequence: Synthetic oligonucleotide
ggcuuccugaugugaguuu

SEQ ID NO: 283922 - RNA, 19 nt, Artificial Sequence
  Description of Artificial Sequence: Synthetic oligonucleotide
gccgaucuggacaguggua

SEQ ID NO: 283923 - RNA, 19 nt, Artificial Sequence
  Description of Artificial Sequence: Synthetic oligonucleotide
ccauacccuuccccagcca

SEQ ID NO: 283924 - RNA, 19 nt, Artificial Sequence
  Description of Artificial Sequence: Synthetic oligonucleotide
cugcaggggcggaguccga

SEQ ID NO: 283925 - RNA, 19 nt, Artificial Sequence
  Description of Artificial Sequence: Synthetic oligonucleotide
ccuugccgauguuccggga

SEQ ID NO: 283926 - RNA, 19 nt, Artificial Sequence
  Description of Artificial Sequence: Synthetic oligonucleotide
ccgauguuccgggacgugu

SEQ ID NO: 283927 - RNA, 19 nt, Artificial Sequence
  Description of Artificial Sequence: Synthetic oligonucleotide
ggaugguugugaagacguu

SEQ ID NO: 283928 - RNA, 19 nt, Artificial Sequence
  Description of Artificial Sequence: Synthetic oligonucleotide
gcacucggaucaaggaauu

SEQ ID NO: 283929 - RNA, 19 nt, Artificial Sequence
  Description of Artificial Sequence: Synthetic oligonucleotide
gccaaccucgcucccucuu

SEQ ID NO: 283930 - RNA, 19 nt, Artificial Sequence
  Description of Artificial Sequence: Synthetic oligonucleotide
ggcccuugugugccaguuu

SEQ ID NO: 283931 - RNA, 19 nt, Artificial Sequence
  Description of Artificial Sequence: Synthetic oligonucleotide
cgucucauaguagguuugu

SEQ ID NO: 283932 - RNA, 19 nt, Artificial Sequence
  Description of Artificial Sequence: Synthetic oligonucleotide
cggggugauuuaaauccau

SEQ ID NO: 283933 - RNA, 19 nt, Artificial Sequence
  Description of Artificial Sequence: Synthetic oligonucleotide
cgauguuccgggacguguu

SEQ ID NO: 283934 - RNA, 19 nt, Artificial Sequence
  Description of Artificial Sequence: Synthetic oligonucleotide
cauggccgaucuggacagu

SEQ ID NO: 283935 - RNA, 19 nt, Artificial Sequence
  Description of Artificial Sequence: Synthetic oligonucleotide
cgauguggaauggccucau

SEQ ID NO: 283936 - RNA, 19 nt, Artificial Sequence
  Description of Artificial Sequence: Synthetic oligonucleotide
ccucgggaacuacgucauu

SEQ ID NO: 283937 - RNA, 19 nt, Artificial Sequence
  Description of Artificial Sequence: Synthetic oligonucleotide
ccgggacguguuguugauu

SEQ ID NO: 283938 - RNA, 19 nt, Artificial Sequence
  Description of Artificial Sequence: Synthetic oligonucleotide
uuaaaauugcauaugaugu

SEQ ID NO: 283939 - RNA, 19 nt, Artificial Sequence
  Description of Artificial Sequence: Synthetic oligonucleotide
aaguauauugcuuugguug

SEQ ID NO: 283940 - RNA, 19 nt, Artificial Sequence
  Description of Artificial Sequence: Synthetic oligonucleotide
aacuaauuguucuucauag

SEQ ID NO: 283941 - RNA, 19 nt, Artificial Sequence
  Description of Artificial Sequence: Synthetic oligonucleotide
augacuaaguuuugaagcc

SEQ ID NO: 283942 - RNA, 19 nt, Artificial Sequence
  Description of Artificial Sequence: Synthetic oligonucleotide
gauugcaugagucacgacc

SEQ ID NO: 283943 - RNA, 19 nt, Artificial Sequence
  Description of Artificial Sequence: Synthetic oligonucleotide
gaaguugacacccuuacug

SEQ ID NO: 283944 - RNA, 19 nt, Artificial Sequence
  Description of Artificial Sequence: Synthetic oligonucleotide
acuuguuuaugcauuaucc

SEQ ID NO: 283945 - RNA, 19 nt, Artificial Sequence
  Description of Artificial Sequence: Synthetic oligonucleotide
uauuaaaucacuacuguuu

SEQ ID NO: 283946 - RNA, 19 nt, Artificial Sequence
  Description of Artificial Sequence: Synthetic oligonucleotide
acuguuuacugauacauug

SEQ ID NO: 283947 - RNA, 19 nt, Artificial Sequence
  Description of Artificial Sequence: Synthetic oligonucleotide
uuauguauggcuuugcuua

SEQ ID NO: 283948 - RNA, 19 nt, Artificial Sequence
  Description of Artificial Sequence: Synthetic oligonucleotide
uacaaguaggacuauaaac

SEQ ID NO: 283949 - RNA, 19 nt, Artificial Sequence
  Description of Artificial Sequence: Synthetic oligonucleotide
cauuauccaauuaacauuc

SEQ ID NO: 283950 - RNA, 19 nt, Artificial Sequence
  Description of Artificial Sequence: Synthetic oligonucleotide
uaacuggugagaauuaaug

SEQ ID NO: 283951 - RNA, 19 nt, Artificial Sequence
  Description of Artificial Sequence: Synthetic oligonucleotide
uugaucaauuacauguucc

SEQ ID NO: 283952 - RNA, 19 nt, Artificial Sequence
  Description of Artificial Sequence: Synthetic oligonucleotide
uagacuuauuuccaccacg

SEQ ID NO: 283953 - RNA, 19 nt, Artificial Sequence
  Description of Artificial Sequence: Synthetic oligonucleotide
uuaaauagcaggaugucuu

SEQ ID NO: 283954 - RNA, 19 nt, Artificial Sequence
  Description of Artificial Sequence: Synthetic oligonucleotide
uuaccaauaggccaaggcu

SEQ ID NO: 283955 - RNA, 19 nt, Artificial Sequence
  Description of Artificial Sequence: Synthetic oligonucleotide
accgguuuauaacuggagc

SEQ ID NO: 283956 - RNA, 19 nt, Artificial Sequence
  Description of Artificial Sequence: Synthetic oligonucleotide
ugcauaugauguuucaugc

SEQ ID NO: 283957 - RNA, 19 nt, Artificial Sequence
  Description of Artificial Sequence: Synthetic oligonucleotide
cuauugacuauuaaaucac

SEQ ID NO: 283958 - RNA, 19 nt, Artificial Sequence
  Description of Artificial Sequence: Synthetic oligonucleotide
acaaccauagaugaauuuc

SEQ ID NO: 283959 - RNA, 19 nt, Artificial Sequence
  Description of Artificial Sequence: Synthetic oligonucleotide
acaaguaggacuauaaaca

SEQ ID NO: 283960 - RNA, 19 nt, Artificial Sequence
  Description of Artificial Sequence: Synthetic oligonucleotide
aacuggugagaauuaaugu

SEQ ID NO: 283961 - RNA, 19 nt, Artificial Sequence
  Description of Artificial Sequence: Synthetic oligonucleotide
auuaucguaguuaccaacg

SEQ ID NO: 283962 - RNA, 19 nt, Artificial Sequence
  Description of Artificial Sequence: Synthetic oligonucleotide
uaggacuauaaacauuccc

SEQ ID NO: 283963 - RNA, 19 nt, Artificial Sequence
  Description of Artificial Sequence: Synthetic oligonucleotide
gcuaacacaaaacuuauac

SEQ ID NO: 283964 - RNA, 19 nt, Artificial Sequence
  Description of Artificial Sequence: Synthetic oligonucleotide
uguaccccugucaaugacg

SEQ ID NO: 283965 - RNA, 19 nt, Artificial Sequence
  Description of Artificial Sequence: Synthetic oligonucleotide
ugucaugcuagauugcaug

SEQ ID NO: 283966 - RNA, 19 nt, Artificial Sequence
  Description of Artificial Sequence: Synthetic oligonucleotide
cuuauaagaucacaacaac

SEQ ID NO: 283967 - RNA, 19 nt, Artificial Sequence
  Description of Artificial Sequence: Synthetic oligonucleotide
uccauuaaucauuauguau

SEQ ID NO: 283968 - RNA, 19 nt, Artificial Sequence
  Description of Artificial Sequence: Synthetic oligonucleotide
gaacguguuucccaaaaug

SEQ ID NO: 283969 - RNA, 19 nt, Artificial Sequence
  Description of Artificial Sequence: Synthetic oligonucleotide
aagccuauugacuauuaaa

SEQ ID NO: 283970 - RNA, 19 nt, Artificial Sequence
  Description of Artificial Sequence: Synthetic oligonucleotide
aauugcauaugauguuuca

SEQ ID NO: 283971 - RNA, 19 nt, Artificial Sequence
  Description of Artificial Sequence: Synthetic oligonucleotide
uugguuguauauaacaauu

SEQ ID NO: 283972 - RNA, 19 nt, Artificial Sequence
  Description of Artificial Sequence: Synthetic oligonucleotide
aguauauugcuuugguugu

SEQ ID NO: 283973 - RNA, 19 nt, Artificial Sequence
  Description of Artificial Sequence: Synthetic oligonucleotide
aauggcagugacucaauaa

SEQ ID NO: 283974 - RNA, 19 nt, Artificial Sequence
  Description of Artificial Sequence: Synthetic oligonucleotide
uucccaaaaugaaauuacc

SEQ ID NO: 283975 - RNA, 19 nt, Artificial Sequence
  Description of Artificial Sequence: Synthetic oligonucleotide
aaacauguaugcuuucaau

SEQ ID NO: 283976 - RNA, 19 nt, Artificial Sequence
  Description of Artificial Sequence: Synthetic oligonucleotide
acauuuuacuguaugauga

SEQ ID NO: 283977 - RNA, 19 nt, Artificial Sequence
  Description of Artificial Sequence: Synthetic oligonucleotide
gauuaucguaguuaccaac

SEQ ID NO: 283978 - RNA, 19 nt, Artificial Sequence
  Description of Artificial Sequence: Synthetic oligonucleotide
uuuuaacucugaauugacu

SEQ ID NO: 283979 - RNA, 19 nt, Artificial Sequence
  Description of Artificial Sequence: Synthetic oligonucleotide
uuaucguaguuaccaacgc

SEQ ID NO: 283980 - RNA, 19 nt, Artificial Sequence
  Description of Artificial Sequence: Synthetic oligonucleotide
aucacuacuguuuacugau

SEQ ID NO: 283981 - RNA, 19 nt, Artificial Sequence
  Description of Artificial Sequence: Synthetic oligonucleotide
acgauuaucguaguuacca

SEQ ID NO: 283982 - RNA, 19 nt, Artificial Sequence
  Description of Artificial Sequence: Synthetic oligonucleotide
aacguguuucccaaaauga

SEQ ID NO: 283983 - RNA, 19 nt, Artificial Sequence
  Description of Artificial Sequence: Synthetic oligonucleotide
aaguacuguccccgaaaac

SEQ ID NO: 283984 - RNA, 19 nt, Artificial Sequence
  Description of Artificial Sequence: Synthetic oligonucleotide
aggacuauaaacauucccu

SEQ ID NO: 283985 - RNA, 19 nt, Artificial Sequence
  Description of Artificial Sequence: Synthetic oligonucleotide
acguguuaccuucauguag

SEQ ID NO: 283986 - RNA, 19 nt, Artificial Sequence
  Description of Artificial Sequence: Synthetic oligonucleotide
uaucguaguuaccaacgca

SEQ ID NO: 283987 - RNA, 19 nt, Artificial Sequence
  Description of Artificial Sequence: Synthetic oligonucleotide
uaaaauugcauaugauguu

SEQ ID NO: 283988 - RNA, 19 nt, Artificial Sequence
  Description of Artificial Sequence: Synthetic oligonucleotide
gcaucuaaccacuugagac

SEQ ID NO: 283989 - RNA, 19 nt, Artificial Sequence
  Description of Artificial Sequence: Synthetic oligonucleotide
acuuuuaacucugaauuga

SEQ ID NO: 283990 - RNA, 19 nt, Artificial Sequence
  Description of Artificial Sequence: Synthetic oligonucleotide
acaacaaccauagaugaau

SEQ ID NO: 283991 - RNA, 19 nt, Artificial Sequence
  Description of Artificial Sequence: Synthetic oligonucleotide
ccaauuaucauaaugacua

SEQ ID NO: 283992 - RNA, 19 nt, Artificial Sequence
  Description of Artificial Sequence: Synthetic oligonucleotide
aaggccuaauuaucauuag

SEQ ID NO: 283993 - RNA, 19 nt, Artificial Sequence
  Description of Artificial Sequence: Synthetic oligonucleotide
gccuauuuuaccaauaggc

SEQ ID NO: 283994 - RNA, 19 nt, Artificial Sequence
  Description of Artificial Sequence: Synthetic oligonucleotide
acguaggcuacccacugac

SEQ ID NO: 283995 - RNA, 19 nt, Artificial Sequence
  Description of Artificial Sequence: Synthetic oligonucleotide
ucaauuacguaggcuaccc

SEQ ID NO: 283996 - RNA, 19 nt, Artificial Sequence
  Description of Artificial Sequence: Synthetic oligonucleotide
ccuauuuuaccaauaggcc

SEQ ID NO: 283997 - RNA, 19 nt, Artificial Sequence
  Description of Artificial Sequence: Synthetic oligonucleotide
aaagugauguuaaagccua

SEQ ID NO: 283998 - RNA, 19 nt, Artificial Sequence
  Description of Artificial Sequence: Synthetic oligonucleotide
uguccuaugauuacaucuu

SEQ ID NO: 283999 - RNA, 19 nt, Artificial Sequence
  Description of Artificial Sequence: Synthetic oligonucleotide
uuauaacuggagcauugaa

SEQ ID NO: 284000 - RNA, 19 nt, Artificial Sequence
  Description of Artificial Sequence: Synthetic oligonucleotide
uacauuaaggccaguucuc

SEQ ID NO: 284001 - RNA, 19 nt, Artificial Sequence
  Description of Artificial Sequence: Synthetic oligonucleotide
aauguaccccugucaauga

SEQ ID NO: 284002 - RNA, 19 nt, Artificial Sequence
  Description of Artificial Sequence: Synthetic oligonucleotide
aauuacccauuuaaaggug

SEQ ID NO: 284003 - RNA, 19 nt, Artificial Sequence
  Description of Artificial Sequence: Synthetic oligonucleotide
cugucaaugacguaaaagu

SEQ ID NO: 284004 - RNA, 19 nt, Artificial Sequence
  Description of Artificial Sequence: Synthetic oligonucleotide
ugcuagauugcaugaguca

SEQ ID NO: 284005 - RNA, 19 nt, Artificial Sequence
  Description of Artificial Sequence: Synthetic oligonucleotide
ugcaacuaauuguucuuca

SEQ ID NO: 284006 - RNA, 19 nt, Artificial Sequence
  Description of Artificial Sequence: Synthetic oligonucleotide
acucccacgauuaucguag

SEQ ID NO: 284007 - RNA, 19 nt, Artificial Sequence
  Description of Artificial Sequence: Synthetic oligonucleotide
auugaacgccccugcuucc

SEQ ID NO: 284008 - RNA, 19 nt, Artificial Sequence
  Description of Artificial Sequence: Synthetic oligonucleotide
ccuauugacuauuaaauca

SEQ ID NO: 284009 - RNA, 19 nt, Artificial Sequence
  Description of Artificial Sequence: Synthetic oligonucleotide
acgguagcagaguuuauga

SEQ ID NO: 284010 - RNA, 19 nt, Artificial Sequence
  Description of Artificial Sequence: Synthetic oligonucleotide
acauccauggcuaaacacu

SEQ ID NO: 284011 - RNA, 19 nt, Artificial Sequence
  Description of Artificial Sequence: Synthetic oligonucleotide
cauuguaucuggcauaaaa

SEQ ID NO: 284012 - RNA, 19 nt, Artificial Sequence
  Description of Artificial Sequence: Synthetic oligonucleotide
agguuacccuguccaaacc

SEQ ID NO: 284013 - RNA, 19 nt, Artificial Sequence
  Description of Artificial Sequence: Synthetic oligonucleotide
cacucaauuacguaggcua

SEQ ID NO: 284014 - RNA, 19 nt, Artificial Sequence
  Description of Artificial Sequence: Synthetic oligonucleotide
guuaccaacgcaucuucca

SEQ ID NO: 284015 - RNA, 19 nt, Artificial Sequence
  Description of Artificial Sequence: Synthetic oligonucleotide
caucuaaccacuugagaca

SEQ ID NO: 284016 - RNA, 19 nt, Artificial Sequence
  Description of Artificial Sequence: Synthetic oligonucleotide
gggaucucgaugcucaucc

SEQ ID NO: 284017 - RNA, 19 nt, Artificial Sequence
  Description of Artificial Sequence: Synthetic oligonucleotide
agccuauugacuauuaaau

SEQ ID NO: 284018 - RNA, 19 nt, Artificial Sequence
  Description of Artificial Sequence: Synthetic oligonucleotide
acucaauuacguaggcuac

SEQ ID NO: 284019 - RNA, 19 nt, Artificial Sequence
  Description of Artificial Sequence: Synthetic oligonucleotide
agcaccauucucuuccacu

SEQ ID NO: 284020 - RNA, 19 nt, Artificial Sequence
  Description of Artificial Sequence: Synthetic oligonucleotide
uuuccuacagacagauuuu

SEQ ID NO: 284021 - RNA, 19 nt, Artificial Sequence
  Description of Artificial Sequence: Synthetic oligonucleotide
gcuuugcuuauauauagac

SEQ ID NO: 284022 - RNA, 19 nt, Artificial Sequence
  Description of Artificial Sequence: Synthetic oligonucleotide
ggguguauuguacauuaag

SEQ ID NO: 284023 - RNA, 19 nt, Artificial Sequence
  Description of Artificial Sequence: Synthetic oligonucleotide
uguccccgaaaacaccgag

SEQ ID NO: 284024 - RNA, 19 nt, Artificial Sequence
  Description of Artificial Sequence: Synthetic oligonucleotide
uaugauguuucaugccuau

SEQ ID NO: 284025 - RNA, 19 nt, Artificial Sequence
  Description of Artificial Sequence: Synthetic oligonucleotide
auuagaaagugauguuaaa

SEQ ID NO: 284026 - RNA, 19 nt, Artificial Sequence
  Description of Artificial Sequence: Synthetic oligonucleotide
gaaaacaccgagcgauuuc

SEQ ID NO: 284027 - RNA, 19 nt, Artificial Sequence
  Description of Artificial Sequence: Synthetic oligonucleotide
uaguuaccaacgcaucuuc

SEQ ID NO: 284028 - RNA, 19 nt, Artificial Sequence
  Description of Artificial Sequence: Synthetic oligonucleotide
ugucacuaugcuucuucug

SEQ ID NO: 284029 - RNA, 19 nt, Artificial Sequence
  Description of Artificial Sequence: Synthetic oligonucleotide
guagcggugauuguagcug

SEQ ID NO: 284030 - RNA, 19 nt, Artificial Sequence
  Description of Artificial Sequence: Synthetic oligonucleotide
aguuaccaacgcaucuucc

SEQ ID NO: 284031 - RNA, 19 nt, Artificial Sequence
  Description of Artificial Sequence: Synthetic oligonucleotide
auguaccccugucaaugac

SEQ ID NO: 284032 - RNA, 19 nt, Artificial Sequence
  Description of Artificial Sequence: Synthetic oligonucleotide
cuucaggcguucagaaacc

SEQ ID NO: 284033 - RNA, 19 nt, Artificial Sequence
  Description of Artificial Sequence: Synthetic oligonucleotide
uuacccauuuaaaggugaa

SEQ ID NO: 284034 - RNA, 19 nt, Artificial Sequence
  Description of Artificial Sequence: Synthetic oligonucleotide
agucggagcgcaugggcuc

SEQ ID NO: 284035 - RNA, 19 nt, Artificial Sequence
  Description of Artificial Sequence: Synthetic oligonucleotide
cauaugauguuucaugccu

SEQ ID NO: 284036 - RNA, 19 nt, Artificial Sequence
  Description of Artificial Sequence: Synthetic oligonucleotide
agguagcggugauuguagc

SEQ ID NO: 284037 - RNA, 19 nt, Artificial Sequence
  Description of Artificial Sequence: Synthetic oligonucleotide
augcuagauugcaugaguc

SEQ ID NO: 284038 - RNA, 19 nt, Artificial Sequence
  Description of Artificial Sequence: Synthetic oligonucleotide
caccgagcgauuuccacag

SEQ ID NO: 284039 - RNA, 19 nt, Artificial Sequence
  Description of Artificial Sequence: Synthetic oligonucleotide
uggugagaauuaaugucuc

SEQ ID NO: 284040 - RNA, 19 nt, Artificial Sequence
  Description of Artificial Sequence: Synthetic oligonucleotide
aggccuaauuaucauuagu

SEQ ID NO: 284041 - RNA, 19 nt, Artificial Sequence
  Description of Artificial Sequence: Synthetic oligonucleotide
agcaauaguuuaaauacuu

SEQ ID NO: 284042 - RNA, 19 nt, Artificial Sequence
  Description of Artificial Sequence: Synthetic oligonucleotide
aacguguuaccuucaugua

SEQ ID NO: 284043 - RNA, 19 nt, Artificial Sequence
  Description of Artificial Sequence: Synthetic oligonucleotide
aacucccacgauuaucgua

SEQ ID NO: 284044 - RNA, 19 nt, Artificial Sequence
  Description of Artificial Sequence: Synthetic oligonucleotide
aucguaguuaccaacgcau

SEQ ID NO: 284045 - RNA, 19 nt, Artificial Sequence
  Description of Artificial Sequence: Synthetic oligonucleotide
uuuucggagucggagcgca

SEQ ID NO: 284046 - RNA, 19 nt, Artificial Sequence
  Description of Artificial Sequence: Synthetic oligonucleotide
uaugaucuuucaucuuaaa

SEQ ID NO: 284047 - RNA, 19 nt, Artificial Sequence
  Description of Artificial Sequence: Synthetic oligonucleotide
auuacccauuuaaagguga

SEQ ID NO: 284048 - RNA, 19 nt, Artificial Sequence
  Description of Artificial Sequence: Synthetic oligonucleotide
cuacccacugacauuuguc

SEQ ID NO: 284049 - RNA, 19 nt, Artificial Sequence
  Description of Artificial Sequence: Synthetic oligonucleotide
gagcauugaacgccccugc

SEQ ID NO: 284050 - RNA, 19 nt, Artificial Sequence
  Description of Artificial Sequence: Synthetic oligonucleotide
uccuaugauuacaucuuuu

SEQ ID NO: 284051 - RNA, 19 nt, Artificial Sequence
  Description of Artificial Sequence: Synthetic oligonucleotide
auaagcauguaagcuauuu

SEQ ID NO: 284052 - RNA, 19 nt, Artificial Sequence
  Description of Artificial Sequence: Synthetic oligonucleotide
uauguauggcuuugcuuau

SEQ ID NO: 284053 - RNA, 19 nt, Artificial Sequence
  Description of Artificial Sequence: Synthetic oligonucleotide
cucaauuacguaggcuacc

SEQ ID NO: 284054 - RNA, 19 nt, Artificial Sequence
  Description of Artificial Sequence: Synthetic oligonucleotide
ucguaguuaccaacgcauc

SEQ ID NO: 284055 - RNA, 19 nt, Artificial Sequence
  Description of Artificial Sequence: Synthetic oligonucleotide
ugcauaacugugucacuau

SEQ ID NO: 284056 - RNA, 19 nt, Artificial Sequence
  Description of Artificial Sequence: Synthetic oligonucleotide
cacgauuaucguaguuacc

SEQ ID NO: 284057 - RNA, 19 nt, Artificial Sequence
  Description of Artificial Sequence: Synthetic oligonucleotide
caccgugaagcccugcagc

SEQ ID NO: 284058 - RNA, 19 nt, Artificial Sequence
  Description of Artificial Sequence: Synthetic oligonucleotide
uaccaacgcaucuuccaac

SEQ ID NO: 284059 - RNA, 19 nt, Artificial Sequence
  Description of Artificial Sequence: Synthetic oligonucleotide
gaacuauccauuagaaagu

SEQ ID NO: 284060 - RNA, 19 nt, Artificial Sequence
  Description of Artificial Sequence: Synthetic oligonucleotide
ugaggcacgccuugugaac

SEQ ID NO: 284061 - RNA, 19 nt, Artificial Sequence
  Description of Artificial Sequence: Synthetic oligonucleotide
uccaaaguacuguccccga

SEQ ID NO: 284062 - RNA, 19 nt, Artificial Sequence
  Description of Artificial Sequence: Synthetic oligonucleotide
auugacuauuaaaucacua

SEQ ID NO: 284063 - RNA, 19 nt, Artificial Sequence
  Description of Artificial Sequence: Synthetic oligonucleotide
auuacguaggcuacccacu

SEQ ID NO: 284064 - RNA, 19 nt, Artificial Sequence
  Description of Artificial Sequence: Synthetic oligonucleotide
ccgggaaucacagaaaaug

SEQ ID NO: 284065 - RNA, 19 nt, Artificial Sequence
  Description of Artificial Sequence: Synthetic oligonucleotide
cuuggaacguguuucccaa

SEQ ID NO: 284066 - RNA, 19 nt, Artificial Sequence
  Description of Artificial Sequence: Synthetic oligonucleotide
aucuaaccacuugagacau

SEQ ID NO: 284067 - RNA, 19 nt, Artificial Sequence
  Description of Artificial Sequence: Synthetic oligonucleotide
gaggcacgccuugugaacc

SEQ ID NO: 284068 - RNA, 19 nt, Artificial Sequence
  Description of Artificial Sequence: Synthetic oligonucleotide
cauucccuuauaagaucac

SEQ ID NO: 284069 - RNA, 19 nt, Artificial Sequence
  Description of Artificial Sequence: Synthetic oligonucleotide
gcuagauugcaugagucac

SEQ ID NO: 284070 - RNA, 19 nt, Artificial Sequence
  Description of Artificial Sequence: Synthetic oligonucleotide
gaacgccccugcuuccgcg

SEQ ID NO: 284071 - RNA, 19 nt, Artificial Sequence
  Description of Artificial Sequence: Synthetic oligonucleotide
agcgauuuccacagcacca

SEQ ID NO: 284072 - RNA, 19 nt, Artificial Sequence
  Description of Artificial Sequence: Synthetic oligonucleotide
gugagaauuaaugucucua

SEQ ID NO: 284073 - RNA, 19 nt, Artificial Sequence
  Description of Artificial Sequence: Synthetic oligonucleotide
ccacgauuaucguaguuac

SEQ ID NO: 284074 - RNA, 19 nt, Artificial Sequence
  Description of Artificial Sequence: Synthetic oligonucleotide
gguccugcccucauggccg

SEQ ID NO: 284075 - RNA, 19 nt, Artificial Sequence
  Description of Artificial Sequence: Synthetic oligonucleotide
ugaacgccccugcuuccgc

SEQ ID NO: 284076 - RNA, 19 nt, Artificial Sequence
  Description of Artificial Sequence: Synthetic oligonucleotide
agcauugaacgccccugcu

SEQ ID NO: 284077 - RNA, 19 nt, Artificial Sequence
  Description of Artificial Sequence: Synthetic oligonucleotide
aggcacgccuugugaaccg

SEQ ID NO: 284078 - RNA, 19 nt, Artificial Sequence
  Description of Artificial Sequence: Synthetic oligonucleotide
guauuauccuggacucugc

SEQ ID NO: 284079 - RNA, 19 nt, Artificial Sequence
  Description of Artificial Sequence: Synthetic oligonucleotide
cauuaaggccaguucucca

SEQ ID NO: 284080 - RNA, 19 nt, Artificial Sequence
  Description of Artificial Sequence: Synthetic oligonucleotide
cuaaccacuugagacaucu

SEQ ID NO: 284081 - RNA, 19 nt, Artificial Sequence
  Description of Artificial Sequence: Synthetic oligonucleotide
gugaaccgguuuauaacug

SEQ ID NO: 284082 - RNA, 19 nt, Artificial Sequence
  Description of Artificial Sequence: Synthetic oligonucleotide
aaaccgggaaucacagaaa

SEQ ID NO: 284083 - RNA, 19 nt, Artificial Sequence
  Description of Artificial Sequence: Synthetic oligonucleotide
guaggacuauaaacauucc

SEQ ID NO: 284084 - RNA, 19 nt, Artificial Sequence
  Description of Artificial Sequence: Synthetic oligonucleotide
uggguguauuguacauuaa

SEQ ID NO: 284085 - RNA, 19 nt, Artificial Sequence
  Description of Artificial Sequence: Synthetic oligonucleotide
uaagugggauagucacuaa

SEQ ID NO: 284086 - RNA, 19 nt, Artificial Sequence
  Description of Artificial Sequence: Synthetic oligonucleotide
ggccuaauuaucauuagua

SEQ ID NO: 284087 - RNA, 19 nt, Artificial Sequence
  Description of Artificial Sequence: Synthetic oligonucleotide
caauaggccaaggcuaaca

SEQ ID NO: 284088 - RNA, 19 nt, Artificial Sequence
  Description of Artificial Sequence: Synthetic oligonucleotide
auguauuauccuggacucu

SEQ ID NO: 284089 - RNA, 19 nt, Artificial Sequence
  Description of Artificial Sequence: Synthetic oligonucleotide
gcauuauccaauuaacauu

SEQ ID NO: 284090 - RNA, 19 nt, Artificial Sequence
  Description of Artificial Sequence: Synthetic oligonucleotide
ucuaaccacuugagacauc

SEQ ID NO: 284091 - RNA, 19 nt, Artificial Sequence
  Description of Artificial Sequence: Synthetic oligonucleotide
gcgcaugggcuccucagcg

SEQ ID NO: 284092 - RNA, 19 nt, Artificial Sequence
  Description of Artificial Sequence: Synthetic oligonucleotide
gacaaggccuaauuaucau

SEQ ID NO: 284093 - RNA, 19 nt, Artificial Sequence
  Description of Artificial Sequence: Synthetic oligonucleotide
accaauaggccaaggcuaa

SEQ ID NO: 284094 - RNA, 19 nt, Artificial Sequence
  Description of Artificial Sequence: Synthetic oligonucleotide
gcaagcggcgcccuugcgc

SEQ ID NO: 284095 - RNA, 19 nt, Artificial Sequence
  Description of Artificial Sequence: Synthetic oligonucleotide
uccucgccguuuucggagu

SEQ ID NO: 284096 - RNA, 19 nt, Artificial Sequence
  Description of Artificial Sequence: Synthetic oligonucleotide
guuuucggagucggagcgc

SEQ ID NO: 284097 - RNA, 19 nt, Artificial Sequence
  Description of Artificial Sequence: Synthetic oligonucleotide
cucgccguuuucggagucg

SEQ ID NO: 284098 - RNA, 19 nt, Artificial Sequence
  Description of Artificial Sequence: Synthetic oligonucleotide
cugaggcacgccuugugaa

SEQ ID NO: 284099 - RNA, 19 nt, Artificial Sequence
  Description of Artificial Sequence: Synthetic oligonucleotide
cuggagcauugaacgcccc

SEQ ID NO: 284100 - RNA, 19 nt, Artificial Sequence
  Description of Artificial Sequence: Synthetic oligonucleotide
ucccacgauuaucguaguu

SEQ ID NO: 284101 - RNA, 19 nt, Artificial Sequence
  Description of Artificial Sequence: Synthetic oligonucleotide
caauuacguaggcuaccca

SEQ ID NO: 284102 - RNA, 19 nt, Artificial Sequence
  Description of Artificial Sequence: Synthetic oligonucleotide
aagcggcgcccuugcgcuc

SEQ ID NO: 284103 - RNA, 19 nt, Artificial Sequence
  Description of Artificial Sequence: Synthetic oligonucleotide
agccgcgugaagugcugca

SEQ ID NO: 284104 - RNA, 19 nt, Artificial Sequence
  Description of Artificial Sequence: Synthetic oligonucleotide
ggacuauaaacauucccuu

SEQ ID NO: 284105 - RNA, 19 nt, Artificial Sequence
  Description of Artificial Sequence: Synthetic oligonucleotide
cagugacucaauaaagcuu

SEQ ID NO: 284106 - RNA, 19 nt, Artificial Sequence
  Description of Artificial Sequence: Synthetic oligonucleotide
augucaugcuagauugcau

SEQ ID NO: 284107 - RNA, 19 nt, Artificial Sequence
  Description of Artificial Sequence: Synthetic oligonucleotide
guaguuaccaacgcaucuu

SEQ ID NO: 284108 - RNA, 19 nt, Artificial Sequence
  Description of Artificial Sequence: Synthetic oligonucleotide
caagcggcgcccuugcgcu

SEQ ID NO: 284109 - RNA, 19 nt, Artificial Sequence
  Description of Artificial Sequence: Synthetic oligonucleotide
ggugagaauuaaugucucu

SEQ ID NO: 284110 - RNA, 19 nt, Artificial Sequence
  Description of Artificial Sequence: Synthetic oligonucleotide
uuucggagucggagcgcau

SEQ ID NO: 284111 - RNA, 19 nt, Artificial Sequence
  Description of Artificial Sequence: Synthetic oligonucleotide
gguagcggugauuguagcu

SEQ ID NO: 284112 - RNA, 19 nt, Artificial Sequence
  Description of Artificial Sequence: Synthetic oligonucleotide
ugcgcucuucgguccugcu

SEQ ID NO: 284113 - RNA, 19 nt, Artificial Sequence
  Description of Artificial Sequence: Synthetic oligonucleotide
ccaacgcaucuuccaacgc

SEQ ID NO: 284114 - RNA, 19 nt, Artificial Sequence
  Description of Artificial Sequence: Synthetic oligonucleotide
accgggaaucacagaaaau

SEQ ID NO: 284115 - RNA, 19 nt, Artificial Sequence
  Description of Artificial Sequence: Synthetic oligonucleotide
guccuaugauuacaucuuu

SEQ ID NO: 284116 - RNA, 19 nt, Artificial Sequence
  Description of Artificial Sequence: Synthetic oligonucleotide
ccgagcgauuuccacagca

SEQ ID NO: 284117 - RNA, 19 nt, Artificial Sequence
  Description of Artificial Sequence: Synthetic oligonucleotide
cccacgauuaucguaguua

SEQ ID NO: 284118 - RNA, 19 nt, Artificial Sequence
  Description of Artificial Sequence: Synthetic oligonucleotide
gcgcucuucgguccugcug

SEQ ID NO: 284119 - RNA, 19 nt, Artificial Sequence
  Description of Artificial Sequence: Synthetic oligonucleotide
uaccccugucaaugacgua

SEQ ID NO: 284120 - RNA, 19 nt, Artificial Sequence
  Description of Artificial Sequence: Synthetic oligonucleotide
cagccgcgugaagugcugc

SEQ ID NO: 284121 - RNA, 19 nt, Artificial Sequence
  Description of Artificial Sequence: Synthetic oligonucleotide
agcggcgcccuugcgcucu

SEQ ID NO: 284122 - RNA, 19 nt, Artificial Sequence
  Description of Artificial Sequence: Synthetic oligonucleotide
ggaacguguuucccaaaau

SEQ ID NO: 284123 - RNA, 19 nt, Artificial Sequence
  Description of Artificial Sequence: Synthetic oligonucleotide
gagucacgaccaacuucuc

SEQ ID NO: 284124 - RNA, 19 nt, Artificial Sequence
  Description of Artificial Sequence: Synthetic oligonucleotide
gcuacccacugacauuugu

SEQ ID NO: 284125 - RNA, 19 nt, Artificial Sequence
  Description of Artificial Sequence: Synthetic oligonucleotide
cccgaaaacaccgagcgau

SEQ ID NO: 284126 - RNA, 19 nt, Artificial Sequence
  Description of Artificial Sequence: Synthetic oligonucleotide
gcgugaagugcugcagcgc

SEQ ID NO: 284127 - RNA, 19 nt, Artificial Sequence
  Description of Artificial Sequence: Synthetic oligonucleotide
ggauagucacuaauuugau

SEQ ID NO: 284128 - RNA, 19 nt, Artificial Sequence
  Description of Artificial Sequence: Synthetic oligonucleotide
cguaguuaccaacgcaucu

SEQ ID NO: 284129 - RNA, 19 nt, Artificial Sequence
  Description of Artificial Sequence: Synthetic oligonucleotide
caggucggccggccuggug

SEQ ID NO: 284130 - RNA, 19 nt, Artificial Sequence
  Description of Artificial Sequence: Synthetic oligonucleotide
cgauuaucguaguuaccaa

SEQ ID NO: 284131 - RNA, 19 nt, Artificial Sequence
  Description of Artificial Sequence: Synthetic oligonucleotide
ucggagcgcaugggcuccu

SEQ ID NO: 284132 - RNA, 19 nt, Artificial Sequence
  Description of Artificial Sequence: Synthetic oligonucleotide
cuccgucauuguaaacuuu

SEQ ID NO: 284133 - RNA, 19 nt, Artificial Sequence
  Description of Artificial Sequence: Synthetic oligonucleotide
gcagccgcgugaagugcug

SEQ ID NO: 284134 - RNA, 19 nt, Artificial Sequence
  Description of Artificial Sequence: Synthetic oligonucleotide
cucccacgauuaucguagu

SEQ ID NO: 284135 - RNA, 19 nt, Artificial Sequence
  Description of Artificial Sequence: Synthetic oligonucleotide
ccccugucaaugacguaaa

SEQ ID NO: 284136 - RNA, 19 nt, Artificial Sequence
  Description of Artificial Sequence: Synthetic oligonucleotide
caccacgguagcagaguuu

SEQ ID NO: 284137 - RNA, 19 nt, Artificial Sequence
  Description of Artificial Sequence: Synthetic oligonucleotide
ccucgccguuuucggaguc

SEQ ID NO: 284138 - RNA, 19 nt, Artificial Sequence
  Description of Artificial Sequence: Synthetic oligonucleotide
ccccgaaaacaccgagcga

SEQ ID NO: 284139 - RNA, 19 nt, Artificial Sequence
  Description of Artificial Sequence: Synthetic oligonucleotide
ccuugugaaccgguuuaua

SEQ ID NO: 284140 - RNA, 19 nt, Artificial Sequence
  Description of Artificial Sequence: Synthetic oligonucleotide
cccugucaaugacguaaaa

SEQ ID NO: 284141 - RNA, 19 nt, Artificial Sequence
  Description of Artificial Sequence: Synthetic oligonucleotide
ccgaaaacaccgagcgauu

SEQ ID NO: 284142 - RNA, 19 nt, Artificial Sequence
  Description of Artificial Sequence: Synthetic oligonucleotide
cgcggggaucucgaugcuc

SEQ ID NO: 284143 - RNA, 19 nt, Artificial Sequence
  Description of Artificial Sequence: Synthetic oligonucleotide
gcacgccuugugaaccggu

SEQ ID NO: 284144 - RNA, 19 nt, Artificial Sequence
  Description of Artificial Sequence: Synthetic oligonucleotide
cgaaaacaccgagcgauuu

SEQ ID NO: 284145 - RNA, 19 nt, Artificial Sequence
  Description of Artificial Sequence: Synthetic oligonucleotide
uauacaaugaguuugaggc

SEQ ID NO: 284146 - RNA, 19 nt, Artificial Sequence
  Description of Artificial Sequence: Synthetic oligonucleotide
aagagcuaaagcuacucgc

SEQ ID NO: 284147 - RNA, 19 nt, Artificial Sequence
  Description of Artificial Sequence: Synthetic oligonucleotide
uguuauuauagaauguaag

SEQ ID NO: 284148 - RNA, 19 nt, Artificial Sequence
  Description of Artificial Sequence: Synthetic oligonucleotide
uacacuaaaaggcauagug

SEQ ID NO: 284149 - RNA, 19 nt, Artificial Sequence
  Description of Artificial Sequence: Synthetic oligonucleotide
aagccuauaguuuuauagg

SEQ ID NO: 284150 - RNA, 19 nt, Artificial Sequence
  Description of Artificial Sequence: Synthetic oligonucleotide
agagauaguacuaauacac

SEQ ID NO: 284151 - RNA, 19 nt, Artificial Sequence
  Description of Artificial Sequence: Synthetic oligonucleotide
  modified_base (18)..(18): a, c, u, g, unknown or other
aguauaagcaucucuganc

SEQ ID NO: 284152 - RNA, 19 nt, Artificial Sequence
  Description of Artificial Sequence: Synthetic oligonucleotide
  modified_base (9)..(9): a, c, u, g, unknown or other
aucucugancuuuucaugc

SEQ ID NO: 284153 - RNA, 19 nt, Artificial Sequence
  Description of Artificial Sequence: Synthetic oligonucleotide
aacuaugguccuuaugagc

SEQ ID NO: 284154 - RNA, 19 nt, Artificial Sequence
  Description of Artificial Sequence: Synthetic oligonucleotide
uuagaguuaaauuagggua

SEQ ID NO: 284155 - RNA, 19 nt, Artificial Sequence
  Description of Artificial Sequence: Synthetic oligonucleotide
ugauuuacggauuugaaau

SEQ ID NO: 284156 - RNA, 19 nt, Artificial Sequence
  Description of Artificial Sequence: Synthetic oligonucleotide
uuaucaagauuuuaaaggu

SEQ ID NO: 284157 - RNA, 19 nt, Artificial Sequence
  Description of Artificial Sequence: Synthetic oligonucleotide
uuaugagcguaacaguugg

SEQ ID NO: 284158 - RNA, 19 nt, Artificial Sequence
  Description of Artificial Sequence: Synthetic oligonucleotide
agcgaugcaucccugaacc

SEQ ID NO: 284159 - RNA, 19 nt, Artificial Sequence
  Description of Artificial Sequence: Synthetic oligonucleotide
uaugaaacguuugacaacc

SEQ ID NO: 284160 - RNA, 19 nt, Artificial Sequence
  Description of Artificial Sequence: Synthetic oligonucleotide
uauaucauuguuuccaagu

SEQ ID NO: 284161 - RNA, 19 nt, Artificial Sequence
  Description of Artificial Sequence: Synthetic oligonucleotide
uaaucuuugcucagaaucc

SEQ ID NO: 284162 - RNA, 19 nt, Artificial Sequence
  Description of Artificial Sequence: Synthetic oligonucleotide
aaaacaagcgaugcauccc

SEQ ID NO: 284163 - RNA, 19 nt, Artificial Sequence
  Description of Artificial Sequence: Synthetic oligonucleotide
uuagagaucgaaauaguaa

SEQ ID NO: 284164 - RNA, 19 nt, Artificial Sequence
  Description of Artificial Sequence: Synthetic oligonucleotide
auuagaguuaaauuagggu

SEQ ID NO: 284165 - RNA, 19 nt, Artificial Sequence
  Description of Artificial Sequence: Synthetic oligonucleotide
acggauuugaaaugucucc

SEQ ID NO: 284166 - RNA, 19 nt, Artificial Sequence
  Description of Artificial Sequence: Synthetic oligonucleotide
uguauuuauggauuauuca

SEQ ID NO: 284167 - RNA, 19 nt, Artificial Sequence
  Description of Artificial Sequence: Synthetic oligonucleotide
  modified_base (3)..(3): a, c, u, g, unknown or other
gancuuuucaugcaguaac

SEQ ID NO: 284168 - RNA, 19 nt, Artificial Sequence
  Description of Artificial Sequence: Synthetic oligonucleotide
aaugauauaucuaucugga

SEQ ID NO: 284169 - RNA, 19 nt, Artificial Sequence
  Description of Artificial Sequence: Synthetic oligonucleotide
agaucgaaauaguaauggc

SEQ ID NO: 284170 - RNA, 19 nt, Artificial Sequence
  Description of Artificial Sequence: Synthetic oligonucleotide
uagugaaguaugcacagag

SEQ ID NO: 284171 - RNA, 19 nt, Artificial Sequence
  Description of Artificial Sequence: Synthetic oligonucleotide
auaguacuaauacacuuag

SEQ ID NO: 284172 - RNA, 19 nt, Artificial Sequence
  Description of Artificial Sequence: Synthetic oligonucleotide
ugggcuauaggacaggucu

SEQ ID NO: 284173 - RNA, 19 nt, Artificial Sequence
  Description of Artificial Sequence: Synthetic oligonucleotide
gagaucgaaauaguaaugg

SEQ ID NO: 284174 - RNA, 19 nt, Artificial Sequence
  Description of Artificial Sequence: Synthetic oligonucleotide
ugauauaucuaucuggauu

SEQ ID NO: 284175 - RNA, 19 nt, Artificial Sequence
  Description of Artificial Sequence: Synthetic oligonucleotide
uuauuauagaauguaagaa

SEQ ID NO: 284176 - RNA, 19 nt, Artificial Sequence
  Description of Artificial Sequence: Synthetic oligonucleotide
uuaaauagggcaauucaau

SEQ ID NO: 284177 - RNA, 19 nt, Artificial Sequence
  Description of Artificial Sequence: Synthetic oligonucleotide
aucaagauuuuaaaggugg

SEQ ID NO: 284178 - RNA, 19 nt, Artificial Sequence
  Description of Artificial Sequence: Synthetic oligonucleotide
ugaaacguuugacaacccg

SEQ ID NO: 284179 - RNA, 19 nt, Artificial Sequence
  Description of Artificial Sequence: Synthetic oligonucleotide
aaauuagaguuaaauuagg

SEQ ID NO: 284180 - RNA, 19 nt, Artificial Sequence
  Description of Artificial Sequence: Synthetic oligonucleotide
uugaugagugauuauauaa

SEQ ID NO: 284181 - RNA, 19 nt, Artificial Sequence
  Description of Artificial Sequence: Synthetic oligonucleotide
acuaugguccuuaugagcg

SEQ ID NO: 284182 - RNA, 19 nt, Artificial Sequence
  Description of Artificial Sequence: Synthetic oligonucleotide
guuaaauuaggguauugac

SEQ ID NO: 284183 - RNA, 19 nt, Artificial Sequence
  Description of Artificial Sequence: Synthetic oligonucleotide
uauacugguccacuuagca

SEQ ID NO: 284184 - RNA, 19 nt, Artificial Sequence
  Description of Artificial Sequence: Synthetic oligonucleotide
uuaggguauugacagaugu

SEQ ID NO: 284185 - RNA, 19 nt, Artificial Sequence
  Description of Artificial Sequence: Synthetic oligonucleotide
gaucgaaauaguaauggcc

SEQ ID NO: 284186 - RNA, 19 nt, Artificial Sequence
  Description of Artificial Sequence: Synthetic oligonucleotide
aguucagcguauuaguaag

SEQ ID NO: 284187 - RNA, 19 nt, Artificial Sequence
  Description of Artificial Sequence: Synthetic oligonucleotide
cacuaaaaggcauagugac

SEQ ID NO: 284188 - RNA, 19 nt, Artificial Sequence
  Description of Artificial Sequence: Synthetic oligonucleotide
gaaacguuugacaacccgg

SEQ ID NO: 284189 - RNA, 19 nt, Artificial Sequence
  Description of Artificial Sequence: Synthetic oligonucleotide
cuauaguuuuauaggaagc

SEQ ID NO: 284190 - RNA, 19 nt, Artificial Sequence
  Description of Artificial Sequence: Synthetic oligonucleotide
cuaucuggauuuauuagag

SEQ ID NO: 284191 - RNA, 19 nt, Artificial Sequence
  Description of Artificial Sequence: Synthetic oligonucleotide
acuuuauaucauuguuucc

SEQ ID NO: 284192 - RNA, 19 nt, Artificial Sequence
  Description of Artificial Sequence: Synthetic oligonucleotide
gaauugagcuuauuuauuc

SEQ ID NO: 284193 - RNA, 19 nt, Artificial Sequence
  Description of Artificial Sequence: Synthetic oligonucleotide
gugaguuaaaucaagcugc

SEQ ID NO: 284194 - RNA, 19 nt, Artificial Sequence
  Description of Artificial Sequence: Synthetic oligonucleotide
caacuguguucuuagaggg

SEQ ID NO: 284195 - RNA, 19 nt, Artificial Sequence
  Description of Artificial Sequence: Synthetic oligonucleotide
agcuaaagcuacucgcugc

SEQ ID NO: 284196 - RNA, 19 nt, Artificial Sequence
  Description of Artificial Sequence: Synthetic oligonucleotide
acguuugacaacccggggc

SEQ ID NO: 284197 - RNA, 19 nt, Artificial Sequence
  Description of Artificial Sequence: Synthetic oligonucleotide
uuuucgguccaaaauagau

SEQ ID NO: 284198 - RNA, 19 nt, Artificial Sequence
  Description of Artificial Sequence: Synthetic oligonucleotide
uagagaucgaaauaguaau

SEQ ID NO: 284199 - RNA, 19 nt, Artificial Sequence
  Description of Artificial Sequence: Synthetic oligonucleotide
aauacagaucuuaucaaga

SEQ ID NO: 284200 - RNA, 19 nt, Artificial Sequence
  Description of Artificial Sequence: Synthetic oligonucleotide
uagaguuaaauuaggguau

SEQ ID NO: 284201 - RNA, 19 nt, Artificial Sequence
  Description of Artificial Sequence: Synthetic oligonucleotide
uccuuagcuauacaaugag

SEQ ID NO: 284202 - RNA, 19 nt, Artificial Sequence
  Description of Artificial Sequence: Synthetic oligonucleotide
ucuaguucagcguauuagu

SEQ ID NO: 284203 - RNA, 19 nt, Artificial Sequence
  Description of Artificial Sequence: Synthetic oligonucleotide
aaacaagcgaugcaucccu

SEQ ID NO: 284204 - RNA, 19 nt, Artificial Sequence
  Description of Artificial Sequence: Synthetic oligonucleotide
cucgguacaccauauaaac

SEQ ID NO: 284205 - RNA, 19 nt, Artificial Sequence
  Description of Artificial Sequence: Synthetic oligonucleotide
aaacguuugacaacccggg

SEQ ID NO: 284206 - RNA, 19 nt, Artificial Sequence
  Description of Artificial Sequence: Synthetic oligonucleotide
acaauccuaaucuggguag

SEQ ID NO: 284207 - RNA, 19 nt, Artificial Sequence
  Description of Artificial Sequence: Synthetic oligonucleotide
aucuaucuggauuuauuag

SEQ ID NO: 284208 - RNA, 19 nt, Artificial Sequence
  Description of Artificial Sequence: Synthetic oligonucleotide
aauuaggguauugacagau

SEQ ID NO: 284209 - RNA, 19 nt, Artificial Sequence
  Description of Artificial Sequence: Synthetic oligonucleotide
uauagaauguaagaacuaa

SEQ ID NO: 284210 - RNA, 19 nt, Artificial Sequence
  Description of Artificial Sequence: Synthetic oligonucleotide
uucuaguucagcguauuag

SEQ ID NO: 284211 - RNA, 19 nt, Artificial Sequence
  Description of Artificial Sequence: Synthetic oligonucleotide
uacuucaagcuccagagua

SEQ ID NO: 284212 - RNA, 19 nt, Artificial Sequence
  Description of Artificial Sequence: Synthetic oligonucleotide
uuaccuguaccauuuuccc

SEQ ID NO: 284213 - RNA, 19 nt, Artificial Sequence
  Description of Artificial Sequence: Synthetic oligonucleotide
aaaaguaguuuccacucuu

SEQ ID NO: 284214 - RNA, 19 nt, Artificial Sequence
  Description of Artificial Sequence: Synthetic oligonucleotide
ggugaguuaaaucaagcug

SEQ ID NO: 284215 - RNA, 19 nt, Artificial Sequence
  Description of Artificial Sequence: Synthetic oligonucleotide
gauuuacggauuugaaaug

SEQ ID NO: 284216 - RNA, 19 nt, Artificial Sequence
  Description of Artificial Sequence: Synthetic oligonucleotide
cuuuauaucauuguuucca

SEQ ID NO: 284217 - RNA, 19 nt, Artificial Sequence
  Description of Artificial Sequence: Synthetic oligonucleotide
guaagguuuagauaauguc

SEQ ID NO: 284218 - RNA, 19 nt, Artificial Sequence
  Description of Artificial Sequence: Synthetic oligonucleotide
uguggggccauaaaaccug

SEQ ID NO: 284219 - RNA, 19 nt, Artificial Sequence
  Description of Artificial Sequence: Synthetic oligonucleotide
auaauucuaguucagcgua

SEQ ID NO: 284220 - RNA, 19 nt, Artificial Sequence
  Description of Artificial Sequence: Synthetic oligonucleotide
uauuaguaagguuuagaua

SEQ ID NO: 284221 - RNA, 19 nt, Artificial Sequence
  Description of Artificial Sequence: Synthetic oligonucleotide
aagcgaugcaucccugaac

SEQ ID NO: 284222 - RNA, 19 nt, Artificial Sequence
  Description of Artificial Sequence: Synthetic oligonucleotide
augggguccagucaaaaca

SEQ ID NO: 284223 - RNA, 19 nt, Artificial Sequence
  Description of Artificial Sequence: Synthetic oligonucleotide
aacguuugacaacccgggg

SEQ ID NO: 284224 - RNA, 19 nt, Artificial Sequence
  Description of Artificial Sequence: Synthetic oligonucleotide
uuauaucauuguuuccaag

SEQ ID NO: 284225 - RNA, 19 nt, Artificial Sequence
  Description of Artificial Sequence: Synthetic oligonucleotide
auaagcacucgguacacca

SEQ ID NO: 284226 - RNA, 19 nt, Artificial Sequence
  Description of Artificial Sequence: Synthetic oligonucleotide
cuguggaugaguauaagca

SEQ ID NO: 284227 - RNA, 19 nt, Artificial Sequence
  Description of Artificial Sequence: Synthetic oligonucleotide
uuuauucguggucuguagu

SEQ ID NO: 284228 - RNA, 19 nt, Artificial Sequence
  Description of Artificial Sequence: Synthetic oligonucleotide
ugaguauaagcaucucuga

SEQ ID NO: 284229 - RNA, 19 nt, Artificial Sequence
  Description of Artificial Sequence: Synthetic oligonucleotide
cuuaugagcguaacaguug

SEQ ID NO: 284230 - RNA, 19 nt, Artificial Sequence
  Description of Artificial Sequence: Synthetic oligonucleotide
uuugacuggcuuuuaaaua

SEQ ID NO: 284231 - RNA, 19 nt, Artificial Sequence
  Description of Artificial Sequence: Synthetic oligonucleotide
agauaguacuaauacacuu

SEQ ID NO: 284232 - RNA, 19 nt, Artificial Sequence
  Description of Artificial Sequence: Synthetic oligonucleotide
uuucgguccaaaauagauc

SEQ ID NO: 284233 - RNA, 19 nt, Artificial Sequence
  Description of Artificial Sequence: Synthetic oligonucleotide
agccuauaguuuuauagga

SEQ ID NO: 284234 - RNA, 19 nt, Artificial Sequence
  Description of Artificial Sequence: Synthetic oligonucleotide
aacgcugcuugacaucgag

SEQ ID NO: 284235 - RNA, 19 nt, Artificial Sequence
  Description of Artificial Sequence: Synthetic oligonucleotide
cagaucaugaaaaucuuga

SEQ ID NO: 284236 - RNA, 19 nt, Artificial Sequence
  Description of Artificial Sequence: Synthetic oligonucleotide
aucuuuucgguccaaaaua

SEQ ID NO: 284237 - RNA, 19 nt, Artificial Sequence
  Description of Artificial Sequence: Synthetic oligonucleotide
ucuuagagggaacaccauc

SEQ ID NO: 284238 - RNA, 19 nt, Artificial Sequence
  Description of Artificial Sequence: Synthetic oligonucleotide
cauuucguucuuuaaggug

SEQ ID NO: 284239 - RNA, 19 nt, Artificial Sequence
  Description of Artificial Sequence: Synthetic oligonucleotide
cauagugacaacaccauaa

SEQ ID NO: 284240 - RNA, 19 nt, Artificial Sequence
  Description of Artificial Sequence: Synthetic oligonucleotide
aguuaaauuaggguauuga

SEQ ID NO: 284241 - RNA, 19 nt, Artificial Sequence
  Description of Artificial Sequence: Synthetic oligonucleotide
cuuagagggaacaccauca

SEQ ID NO: 284242 - RNA, 19 nt, Artificial Sequence
  Description of Artificial Sequence: Synthetic oligonucleotide
cuugacaucgagguaacug

SEQ ID NO: 284243 - RNA, 19 nt, Artificial Sequence
  Description of Artificial Sequence: Synthetic oligonucleotide
auucugauaaaugugguuu

SEQ ID NO: 284244 - RNA, 19 nt, Artificial Sequence
  Description of Artificial Sequence: Synthetic oligonucleotide
ucgaaauaguaauggccag

SEQ ID NO: 284245 - RNA, 19 nt, Artificial Sequence
  Description of Artificial Sequence: Synthetic oligonucleotide
uacggauuugaaaugucuc

SEQ ID NO: 284246 - RNA, 19 nt, Artificial Sequence
  Description of Artificial Sequence: Synthetic oligonucleotide
  modified_base (6)..(6): a, c, u, g, unknown or other
ucugancuuuucaugcagu

SEQ ID NO: 284247 - RNA, 19 nt, Artificial Sequence
  Description of Artificial Sequence: Synthetic oligonucleotide
uaaagcuacucgcugcagu

SEQ ID NO: 284248 - RNA, 19 nt, Artificial Sequence
  Description of Artificial Sequence: Synthetic oligonucleotide
uugggacugauuuucugug

SEQ ID NO: 284249 - RNA, 19 nt, Artificial Sequence
  Description of Artificial Sequence: Synthetic oligonucleotide
aggugaguuaaaucaagcu

SEQ ID NO: 284250 - RNA, 19 nt, Artificial Sequence
  Description of Artificial Sequence: Synthetic oligonucleotide
uuagcuauacaaugaguuu

SEQ ID NO: 284251 - RNA, 19 nt, Artificial Sequence
  Description of Artificial Sequence: Synthetic oligonucleotide
auagggcaauucaauauac

SEQ ID NO: 284252 - RNA, 19 nt, Artificial Sequence
  Description of Artificial Sequence: Synthetic oligonucleotide
ucuuacacuaaaaggcaua

SEQ ID NO: 284253 - RNA, 19 nt, Artificial Sequence
  Description of Artificial Sequence: Synthetic oligonucleotide
uuuaagccuuccagcaagc

SEQ ID NO: 284254 - RNA, 19 nt, Artificial Sequence
  Description of Artificial Sequence: Synthetic oligonucleotide
uuucguucuuuaaggugag

SEQ ID NO: 284255 - RNA, 19 nt, Artificial Sequence
  Description of Artificial Sequence: Synthetic oligonucleotide
guaggcucagaauuucaag

SEQ ID NO: 284256 - RNA, 19 nt, Artificial Sequence
  Description of Artificial Sequence: Synthetic oligonucleotide
ugcacagagguuuaucuua

SEQ ID NO: 284257 - RNA, 19 nt, Artificial Sequence
  Description of Artificial Sequence: Synthetic oligonucleotide
  modified_base (7)..(7): a, c, u, g, unknown or other
cucugancuuuucaugcag

SEQ ID NO: 284258 - RNA, 19 nt, Artificial Sequence
  Description of Artificial Sequence: Synthetic oligonucleotide
uccagcuacaauagcuagc

SEQ ID NO: 284259 - RNA, 19 nt, Artificial Sequence
  Description of Artificial Sequence: Synthetic oligonucleotide
uaguucagcguauuaguaa

SEQ ID NO: 284260 - RNA, 19 nt, Artificial Sequence
  Description of Artificial Sequence: Synthetic oligonucleotide
ugacauacaauugccugug

SEQ ID NO: 284261 - RNA, 19 nt, Artificial Sequence
  Description of Artificial Sequence: Synthetic oligonucleotide
agcagguuugcccaaacaa

SEQ ID NO: 284262 - RNA, 19 nt, Artificial Sequence
  Description of Artificial Sequence: Synthetic oligonucleotide
gguuugcccaaacaaagag

SEQ ID NO: 284263 - RNA, 19 nt, Artificial Sequence
  Description of Artificial Sequence: Synthetic oligonucleotide
uguaggggcuucauuacau

SEQ ID NO: 284264 - RNA, 19 nt, Artificial Sequence
  Description of Artificial Sequence: Synthetic oligonucleotide
ucgguacaccauauaaaca

SEQ ID NO: 284265 - RNA, 19 nt, Artificial Sequence
  Description of Artificial Sequence: Synthetic oligonucleotide
uuauucguggucuguaguu

SEQ ID NO: 284266 - RNA, 19 nt, Artificial Sequence
  Description of Artificial Sequence: Synthetic oligonucleotide
aguaagguuuagauaaugu

SEQ ID NO: 284267 - RNA, 19 nt, Artificial Sequence
  Description of Artificial Sequence: Synthetic oligonucleotide
ugagcguaacaguuggcac

SEQ ID NO: 284268 - RNA, 19 nt, Artificial Sequence
  Description of Artificial Sequence: Synthetic oligonucleotide
gauaguacuaauacacuua

SEQ ID NO: 284269 - RNA, 19 nt, Artificial Sequence
  Description of Artificial Sequence: Synthetic oligonucleotide
cgaucugcuagauaggugg

SEQ ID NO: 284270 - RNA, 19 nt, Artificial Sequence
  Description of Artificial Sequence: Synthetic oligonucleotide
aaccugauuaaaguuuuau

SEQ ID NO: 284271 - RNA, 19 nt, Artificial Sequence
  Description of Artificial Sequence: Synthetic oligonucleotide
  modified_base (8)..(8): a, c, u, g, unknown or other
ucucugancuuuucaugca

SEQ ID NO: 284272 - RNA, 19 nt, Artificial Sequence
  Description of Artificial Sequence: Synthetic oligonucleotide
caacuaugguccuuaugag

SEQ ID NO: 284273 - RNA, 19 nt, Artificial Sequence
  Description of Artificial Sequence: Synthetic oligonucleotide
agacuuuuagcaguguagu

SEQ ID NO: 284274 - RNA, 19 nt, Artificial Sequence
  Description of Artificial Sequence: Synthetic oligonucleotide
  modified_base (19)..(19): a, c, u, g, unknown or other
gaguauaagcaucucugan

SEQ ID NO: 284275 - RNA, 19 nt, Artificial Sequence
  Description of Artificial Sequence: Synthetic oligonucleotide
ccaacuaugguccuuauga

SEQ ID NO: 284276 - RNA, 19 nt, Artificial Sequence
  Description of Artificial Sequence: Synthetic oligonucleotide
agaauccaaauaugcagau

SEQ ID NO: 284277 - RNA, 19 nt, Artificial Sequence
  Description of Artificial Sequence: Synthetic oligonucleotide
uauucguggucuguaguug

SEQ ID NO: 284278 - RNA, 19 nt, Artificial Sequence
  Description of Artificial Sequence: Synthetic oligonucleotide
guauguggggccauaaaac

SEQ ID NO: 284279 - RNA, 19 nt, Artificial Sequence
  Description of Artificial Sequence: Synthetic oligonucleotide
guggucaacaccaguaagc

SEQ ID NO: 284280 - RNA, 19 nt, Artificial Sequence
  Description of Artificial Sequence: Synthetic oligonucleotide
uccuuaugagcguaacagu

SEQ ID NO: 284281 - RNA, 19 nt, Artificial Sequence
  Description of Artificial Sequence: Synthetic oligonucleotide
agugaaguaugcacagagg

SEQ ID NO: 284282 - RNA, 19 nt, Artificial Sequence
  Description of Artificial Sequence: Synthetic oligonucleotide
ugacaucgagguaacugga

SEQ ID NO: 284283 - RNA, 19 nt, Artificial Sequence
  Description of Artificial Sequence: Synthetic oligonucleotide
acaaaccccuaacauccag

SEQ ID NO: 284284 - RNA, 19 nt, Artificial Sequence
  Description of Artificial Sequence: Synthetic oligonucleotide
uuuuaggccuaaugggguc

SEQ ID NO: 284285 - RNA, 19 nt, Artificial Sequence
  Description of Artificial Sequence: Synthetic oligonucleotide
auauacugguccacuuagc

SEQ ID NO: 284286 - RNA, 19 nt, Artificial Sequence
  Description of Artificial Sequence: Synthetic oligonucleotide
  modified_base (4)..(4): a, c, u, g, unknown or other
ugancuuuucaugcaguaa

SEQ ID NO: 284287 - RNA, 19 nt, Artificial Sequence
  Description of Artificial Sequence: Synthetic oligonucleotide
ugcugacauacaauugccu

SEQ ID NO: 284288 - RNA, 19 nt, Artificial Sequence
  Description of Artificial Sequence: Synthetic oligonucleotide
uagggcaauucaauauacu

SEQ ID NO: 284289 - RNA, 19 nt, Artificial Sequence
  Description of Artificial Sequence: Synthetic oligonucleotide
acacuaaaaggcauaguga

SEQ ID NO: 284290 - RNA, 19 nt, Artificial Sequence
  Description of Artificial Sequence: Synthetic oligonucleotide
ugcuauuuccgguacucau

SEQ ID NO: 284291 - RNA, 19 nt, Artificial Sequence
  Description of Artificial Sequence: Synthetic oligonucleotide
caaacgacagcacaagcaa

SEQ ID NO: 284292 - RNA, 19 nt, Artificial Sequence
  Description of Artificial Sequence: Synthetic oligonucleotide
augagcguaacaguuggca

SEQ ID NO: 284293 - RNA, 19 nt, Artificial Sequence
  Description of Artificial Sequence: Synthetic oligonucleotide
cuugaggugauuuacggau

SEQ ID NO: 284294 - RNA, 19 nt, Artificial Sequence
  Description of Artificial Sequence: Synthetic oligonucleotide
uaugagcguaacaguuggc

SEQ ID NO: 284295 - RNA, 19 nt, Artificial Sequence
  Description of Artificial Sequence: Synthetic oligonucleotide
gacuuuuagcaguguaguc

SEQ ID NO: 284296 - RNA, 19 nt, Artificial Sequence
  Description of Artificial Sequence: Synthetic oligonucleotide
agagaucgaaauaguaaug

SEQ ID NO: 284297 - RNA, 19 nt, Artificial Sequence
  Description of Artificial Sequence: Synthetic oligonucleotide
cuccagcuacaauagcuag

SEQ ID NO: 284298 - RNA, 19 nt, Artificial Sequence
  Description of Artificial Sequence: Synthetic oligonucleotide
caagauuuuaaaggugguc

SEQ ID NO: 284299 - RNA, 19 nt, Artificial Sequence
  Description of Artificial Sequence: Synthetic oligonucleotide
uacauuacuuuggauguua

SEQ ID NO: 284300 - RNA, 19 nt, Artificial Sequence
  Description of Artificial Sequence: Synthetic oligonucleotide
ucguucuuuaaggugaguu

SEQ ID NO: 284301 - RNA, 19 nt, Artificial Sequence
  Description of Artificial Sequence: Synthetic oligonucleotide
agagcuaaagcuacucgcu

SEQ ID NO: 284302 - RNA, 19 nt, Artificial Sequence
  Description of Artificial Sequence: Synthetic oligonucleotide
auuagagaucgaaauagua

SEQ ID NO: 284303 - RNA, 19 nt, Artificial Sequence
  Description of Artificial Sequence: Synthetic oligonucleotide
cuuuacugacugaaccauc

SEQ ID NO: 284304 - RNA, 19 nt, Artificial Sequence
  Description of Artificial Sequence: Synthetic oligonucleotide
uucaagcuccagaguaugu

SEQ ID NO: 284305 - RNA, 19 nt, Artificial Sequence
  Description of Artificial Sequence: Synthetic oligonucleotide
gacaucgagguaacuggag

SEQ ID NO: 284306 - RNA, 19 nt, Artificial Sequence
  Description of Artificial Sequence: Synthetic oligonucleotide
ugguuaaagguugcccuug

SEQ ID NO: 284307 - RNA, 19 nt, Artificial Sequence
  Description of Artificial Sequence: Synthetic oligonucleotide
uauaucuaucuggauuuau

SEQ ID NO: 284308 - RNA, 19 nt, Artificial Sequence
  Description of Artificial Sequence: Synthetic oligonucleotide
acuuuacugacugaaccau

SEQ ID NO: 284309 - RNA, 19 nt, Artificial Sequence
  Description of Artificial Sequence: Synthetic oligonucleotide
uuagugaaguaugcacaga

SEQ ID NO: 284310 - RNA, 19 nt, Artificial Sequence
  Description of Artificial Sequence: Synthetic oligonucleotide
gaguuaaauuaggguauug

SEQ ID NO: 284311 - RNA, 19 nt, Artificial Sequence
  Description of Artificial Sequence: Synthetic oligonucleotide
augcaguaacugucgaaca

SEQ ID NO: 284312 - RNA, 19 nt, Artificial Sequence
  Description of Artificial Sequence: Synthetic oligonucleotide
auguuauuauagaauguaa

SEQ ID NO: 284313 - RNA, 19 nt, Artificial Sequence
  Description of Artificial Sequence: Synthetic oligonucleotide
augauauaucuaucuggau

SEQ ID NO: 284314 - RNA, 19 nt, Artificial Sequence
  Description of Artificial Sequence: Synthetic oligonucleotide
aagcccuuaacaauuuaua

SEQ ID NO: 284315 - RNA, 19 nt, Artificial Sequence
  Description of Artificial Sequence: Synthetic oligonucleotide
ugccuaaccugcagagccc

SEQ ID NO: 284316 - RNA, 19 nt, Artificial Sequence
  Description of Artificial Sequence: Synthetic oligonucleotide
accaacuaugguccuuaug

SEQ ID NO: 284317 - RNA, 19 nt, Artificial Sequence
  Description of Artificial Sequence: Synthetic oligonucleotide
caauagcuagcucgaacuc

SEQ ID NO: 284318 - RNA, 19 nt, Artificial Sequence
  Description of Artificial Sequence: Synthetic oligonucleotide
ggcuucauuacaucaguca

SEQ ID NO: 284319 - RNA, 19 nt, Artificial Sequence
  Description of Artificial Sequence: Synthetic oligonucleotide
ucgguccaaaauagauccc

SEQ ID NO: 284320 - RNA, 19 nt, Artificial Sequence
  Description of Artificial Sequence: Synthetic oligonucleotide
ggauuuauuagagaucgaa

SEQ ID NO: 284321 - RNA, 19 nt, Artificial Sequence
  Description of Artificial Sequence: Synthetic oligonucleotide
gggacugauuuucuguggc

SEQ ID NO: 284322 - RNA, 19 nt, Artificial Sequence
  Description of Artificial Sequence: Synthetic oligonucleotide
ucagcguauuaguaagguu

SEQ ID NO: 284323 - RNA, 19 nt, Artificial Sequence
  Description of Artificial Sequence: Synthetic oligonucleotide
agcuauacaaugaguuuga

SEQ ID NO: 284324 - RNA, 19 nt, Artificial Sequence
  Description of Artificial Sequence: Synthetic oligonucleotide
auaucuaucuggauuuauu

SEQ ID NO: 284325 - RNA, 19 nt, Artificial Sequence
  Description of Artificial Sequence: Synthetic oligonucleotide
agauagugaggcaccaacu

SEQ ID NO: 284326 - RNA, 19 nt, Artificial Sequence
  Description of Artificial Sequence: Synthetic oligonucleotide
uugaggugauuuacggauu

SEQ ID NO: 284327 - RNA, 19 nt, Artificial Sequence
  Description of Artificial Sequence: Synthetic oligonucleotide
uuaagccuuccagcaagca

SEQ ID NO: 284328 - RNA, 19 nt, Artificial Sequence
  Description of Artificial Sequence: Synthetic oligonucleotide
gaucugcuagauagguggc

SEQ ID NO: 284329 - RNA, 19 nt, Artificial Sequence
  Description of Artificial Sequence: Synthetic oligonucleotide
auaguaauggccagccuuu

SEQ ID NO: 284330 - RNA, 19 nt, Artificial Sequence
  Description of Artificial Sequence: Synthetic oligonucleotide
cacucgguacaccauauaa

SEQ ID NO: 284331 - RNA, 19 nt, Artificial Sequence
  Description of Artificial Sequence: Synthetic oligonucleotide
cuaccuuccucauaauucu

SEQ ID NO: 284332 - RNA, 19 nt, Artificial Sequence
  Description of Artificial Sequence: Synthetic oligonucleotide
ggaguaugaaacguuugac

SEQ ID NO: 284333 - RNA, 19 nt, Artificial Sequence
  Description of Artificial Sequence: Synthetic oligonucleotide
cuaguucagcguauuagua

SEQ ID NO: 284334 - RNA, 19 nt, Artificial Sequence
  Description of Artificial Sequence: Synthetic oligonucleotide
ccagcuugggcuauaggac

SEQ ID NO: 284335 - RNA, 19 nt, Artificial Sequence
  Description of Artificial Sequence: Synthetic oligonucleotide
auuaggguauugacagaug

SEQ ID NO: 284336 - RNA, 19 nt, Artificial Sequence
  Description of Artificial Sequence: Synthetic oligonucleotide
cuggaggguucaucaaaac

SEQ ID NO: 284337 - RNA, 19 nt, Artificial Sequence
  Description of Artificial Sequence: Synthetic oligonucleotide
aucgagguaacuggagggu

SEQ ID NO: 284338 - RNA, 19 nt, Artificial Sequence
  Description of Artificial Sequence: Synthetic oligonucleotide
auucuaguucagcguauua

SEQ ID NO: 284339 - RNA, 19 nt, Artificial Sequence
  Description of Artificial Sequence: Synthetic oligonucleotide
uugggcuauaggacagguc

SEQ ID NO: 284340 - RNA, 19 nt, Artificial Sequence
  Description of Artificial Sequence: Synthetic oligonucleotide
guccuuagcuauacaauga

SEQ ID NO: 284341 - RNA, 19 nt, Artificial Sequence
  Description of Artificial Sequence: Synthetic oligonucleotide
cugacauacaauugccugu

SEQ ID NO: 284342 - RNA, 19 nt, Artificial Sequence
  Description of Artificial Sequence: Synthetic oligonucleotide
cacaaacuguggaugagua

SEQ ID NO: 284343 - RNA, 19 nt, Artificial Sequence
  Description of Artificial Sequence: Synthetic oligonucleotide
gagauaguacuaauacacu

SEQ ID NO: 284344 - RNA, 19 nt, Artificial Sequence
  Description of Artificial Sequence: Synthetic oligonucleotide
aguaggcucagaauuucaa

SEQ ID NO: 284345 - RNA, 19 nt, Artificial Sequence
  Description of Artificial Sequence: Synthetic oligonucleotide
auguggggccauaaaaccu

SEQ ID NO: 284346 - RNA, 19 nt, Artificial Sequence
  Description of Artificial Sequence: Synthetic oligonucleotide
cacaccuacaaaugaauau

SEQ ID NO: 284347 - RNA, 19 nt, Artificial Sequence
  Description of Artificial Sequence: Synthetic oligonucleotide
cauaagcacucgguacacc

SEQ ID NO: 284348 - RNA, 19 nt, Artificial Sequence
  Description of Artificial Sequence: Synthetic oligonucleotide
aacaagcgaugcaucccug

SEQ ID NO: 284349 - RNA, 19 nt, Artificial Sequence
  Description of Artificial Sequence: Synthetic oligonucleotide
aaccccuaacauccagaua

SEQ ID NO: 284350 - RNA, 19 nt, Artificial Sequence
  Description of Artificial Sequence: Synthetic oligonucleotide
gcuaaagcuacucgcugca

SEQ ID NO: 284351 - RNA, 19 nt, Artificial Sequence
  Description of Artificial Sequence: Synthetic oligonucleotide
cuauaggacaggucucaaa

SEQ ID NO: 284352 - RNA, 19 nt, Artificial Sequence
  Description of Artificial Sequence: Synthetic oligonucleotide
ccagccaaaagaguuugag

SEQ ID NO: 284353 - RNA, 19 nt, Artificial Sequence
  Description of Artificial Sequence: Synthetic oligonucleotide
agguuugcccaaacaaaga

SEQ ID NO: 284354 - RNA, 19 nt, Artificial Sequence
  Description of Artificial Sequence: Synthetic oligonucleotide
gaguauguggggccauaaa

SEQ ID NO: 284355 - RNA, 19 nt, Artificial Sequence
  Description of Artificial Sequence: Synthetic oligonucleotide
uuacauuacuuuggauguu

SEQ ID NO: 284356 - RNA, 19 nt, Artificial Sequence
  Description of Artificial Sequence: Synthetic oligonucleotide
aggguucaucaaaacauaa

SEQ ID NO: 284357 - RNA, 19 nt, Artificial Sequence
  Description of Artificial Sequence: Synthetic oligonucleotide
agcguauuaguaagguuua

SEQ ID NO: 284358 - RNA, 19 nt, Artificial Sequence
  Description of Artificial Sequence: Synthetic oligonucleotide
gcuagcucgaacucuccca

SEQ ID NO: 284359 - RNA, 19 nt, Artificial Sequence
  Description of Artificial Sequence: Synthetic oligonucleotide
aaguaugcacagagguuua

SEQ ID NO: 284360 - RNA, 19 nt, Artificial Sequence
  Description of Artificial Sequence: Synthetic oligonucleotide
acgaucugcuagauaggug

SEQ ID NO: 284361 - RNA, 19 nt, Artificial Sequence
  Description of Artificial Sequence: Synthetic oligonucleotide
ggguaguaggcucagaauu

SEQ ID NO: 284362 - RNA, 19 nt, Artificial Sequence
  Description of Artificial Sequence: Synthetic oligonucleotide
agaguauguggggccauaa

SEQ ID NO: 284363 - RNA, 19 nt, Artificial Sequence
  Description of Artificial Sequence: Synthetic oligonucleotide
ccuaaugggguccagucaa

SEQ ID NO: 284364 - RNA, 19 nt, Artificial Sequence
  Description of Artificial Sequence: Synthetic oligonucleotide
aguaugcacagagguuuau

SEQ ID NO: 284365 - RNA, 19 nt, Artificial Sequence
  Description of Artificial Sequence: Synthetic oligonucleotide
gauagaagucagagagaua

SEQ ID NO: 284366 - RNA, 19 nt, Artificial Sequence
  Description of Artificial Sequence: Synthetic oligonucleotide
guucuacauccuugauuga

SEQ ID NO: 284367 - RNA, 19 nt, Artificial Sequence
  Description of Artificial Sequence: Synthetic oligonucleotide
ugauugaauugagcuuauu

SEQ ID NO: 284368 - RNA, 19 nt, Artificial Sequence
  Description of Artificial Sequence: Synthetic oligonucleotide
uucguucuuuaaggugagu

SEQ ID NO: 284369 - RNA, 19 nt, Artificial Sequence
  Description of Artificial Sequence: Synthetic oligonucleotide
guuaaagguugcccuuggu

SEQ ID NO: 284370 - RNA, 19 nt, Artificial Sequence
  Description of Artificial Sequence: Synthetic oligonucleotide
uaguaauggccagccuuua

SEQ ID NO: 284371 - RNA, 19 nt, Artificial Sequence
  Description of Artificial Sequence: Synthetic oligonucleotide
cuaaugggguccagucaaa

SEQ ID NO: 284372 - RNA, 19 nt, Artificial Sequence
  Description of Artificial Sequence: Synthetic oligonucleotide
augacacgaucugcuagau

SEQ ID NO: 284373 - RNA, 19 nt, Artificial Sequence
  Description of Artificial Sequence: Synthetic oligonucleotide
cugucgaacacuuccuguu

SEQ ID NO: 284374 - RNA, 19 nt, Artificial Sequence
  Description of Artificial Sequence: Synthetic oligonucleotide
aggccuaaugggguccagu

SEQ ID NO: 284375 - RNA, 19 nt, Artificial Sequence
  Description of Artificial Sequence: Synthetic oligonucleotide
gccuaaugggguccaguca

SEQ ID NO: 284376 - RNA, 19 nt, Artificial Sequence
  Description of Artificial Sequence: Synthetic oligonucleotide
cagcagguuugcccaaaca

SEQ ID NO: 284377 - RNA, 19 nt, Artificial Sequence
  Description of Artificial Sequence: Synthetic oligonucleotide
gcguauuaguaagguuuag

SEQ ID NO: 284378 - RNA, 19 nt, Artificial Sequence
  Description of Artificial Sequence: Synthetic oligonucleotide
gugguuaaagguugcccuu

SEQ ID NO: 284379 - RNA, 19 nt, Artificial Sequence
  Description of Artificial Sequence: Synthetic oligonucleotide
ccuuaugagcguaacaguu

SEQ ID NO: 284380 - RNA, 19 nt, Artificial Sequence
  Description of Artificial Sequence: Synthetic oligonucleotide
caguaacugucgaacacuu

SEQ ID NO: 284381 - RNA, 19 nt, Artificial Sequence
  Description of Artificial Sequence: Synthetic oligonucleotide
gcaguaacugucgaacacu

SEQ ID NO: 284382 - RNA, 19 nt, Artificial Sequence
  Description of Artificial Sequence: Synthetic oligonucleotide
gcauagugacaacaccaua

SEQ ID NO: 284383 - RNA, 19 nt, Artificial Sequence
  Description of Artificial Sequence: Synthetic oligonucleotide
cugcaacucuccuccugaa

SEQ ID NO: 284384 - RNA, 19 nt, Artificial Sequence
  Description of Artificial Sequence: Synthetic oligonucleotide
ggggccauaaaaccugauu

SEQ ID NO: 284385 - RNA, 19 nt, Artificial Sequence
  Description of Artificial Sequence: Synthetic oligonucleotide
gccagccuuuaaacgcugc

SEQ ID NO: 284386 - RNA, 19 nt, Artificial Sequence
  Description of Artificial Sequence: Synthetic oligonucleotide
gcuauuuccgguacucauu

SEQ ID NO: 284387 - RNA, 19 nt, Artificial Sequence
  Description of Artificial Sequence: Synthetic oligonucleotide
cugcuagauagguggccau

SEQ ID NO: 284388 - RNA, 19 nt, Artificial Sequence
  Description of Artificial Sequence: Synthetic oligonucleotide
cagaguauguggggccaua

SEQ ID NO: 284389 - RNA, 19 nt, Artificial Sequence
  Description of Artificial Sequence: Synthetic oligonucleotide
gcacucgguacaccauaua

SEQ ID NO: 284390 - RNA, 19 nt, Artificial Sequence
  Description of Artificial Sequence: Synthetic oligonucleotide
gccagccaaaagaguuuga

SEQ ID NO: 284391 - RNA, 19 nt, Artificial Sequence
  Description of Artificial Sequence: Synthetic oligonucleotide
caacccggggccugccauu

SEQ ID NO: 284392 - RNA, 19 nt, Artificial Sequence
  Description of Artificial Sequence: Synthetic oligonucleotide
cccagcccaagccuauagu

SEQ ID NO: 284393 - RNA, 19 nt, Artificial Sequence
  Description of Artificial Sequence: Synthetic oligonucleotide
gcguaacaguuggcacuuu

SEQ ID NO: 284394 - RNA, 19 nt, Artificial Sequence
  Description of Artificial Sequence: Synthetic oligonucleotide
ccccgccugccccauuauu

SEQ ID NO: 284395 - RNA, 19 nt, Artificial Sequence
  Description of Artificial Sequence: Synthetic oligonucleotide
augacuuuagacuagaggg

SEQ ID NO: 284396 - RNA, 19 nt, Artificial Sequence
  Description of Artificial Sequence: Synthetic oligonucleotide
aaucgaauuguguuguucc

SEQ ID NO: 284397 - RNA, 19 nt, Artificial Sequence
  Description of Artificial Sequence: Synthetic oligonucleotide
aauuagacacuucaguuag

SEQ ID NO: 284398 - RNA, 19 nt, Artificial Sequence
  Description of Artificial Sequence: Synthetic oligonucleotide
acaauuuggaugcacaaac

SEQ ID NO: 284399 - RNA, 19 nt, Artificial Sequence
  Description of Artificial Sequence: Synthetic oligonucleotide
aaaacgugcagucuggucu

SEQ ID NO: 284400 - RNA, 19 nt, Artificial Sequence
  Description of Artificial Sequence: Synthetic oligonucleotide
aauaguugaaaccacuuaa

SEQ ID NO: 284401 - RNA, 19 nt, Artificial Sequence
  Description of Artificial Sequence: Synthetic oligonucleotide
acauuagccggguugaacc

SEQ ID NO: 284402 - RNA, 19 nt, Artificial Sequence
  Description of Artificial Sequence: Synthetic oligonucleotide
uaucuaauacaccauggag

SEQ ID NO: 284403 - RNA, 19 nt, Artificial Sequence
  Description of Artificial Sequence: Synthetic oligonucleotide
aacagagcgaaguuuaucu

SEQ ID NO: 284404 - RNA, 19 nt, Artificial Sequence
  Description of Artificial Sequence: Synthetic oligonucleotide
uguacacugaguauuaaac

SEQ ID NO: 284405 - RNA, 19 nt, Artificial Sequence
  Description of Artificial Sequence: Synthetic oligonucleotide
ugaaccuccaucaucauaa

SEQ ID NO: 284406 - RNA, 19 nt, Artificial Sequence
  Description of Artificial Sequence: Synthetic oligonucleotide
gauggaagcguucaaacug

SEQ ID NO: 284407 - RNA, 19 nt, Artificial Sequence
  Description of Artificial Sequence: Synthetic oligonucleotide
uguacuaucuccuuuugcu

SEQ ID NO: 284408 - RNA, 19 nt, Artificial Sequence
  Description of Artificial Sequence: Synthetic oligonucleotide
uuuagaagguggaagagaa

SEQ ID NO: 284409 - RNA, 19 nt, Artificial Sequence
  Description of Artificial Sequence: Synthetic oligonucleotide
uucaagaaccaucuuuuag

SEQ ID NO: 284410 - RNA, 19 nt, Artificial Sequence
  Description of Artificial Sequence: Synthetic oligonucleotide
ugccuuaacaguuucaaga

SEQ ID NO: 284411 - RNA, 19 nt, Artificial Sequence
  Description of Artificial Sequence: Synthetic oligonucleotide
ucuggcuuaauaucaauca

SEQ ID NO: 284412 - RNA, 19 nt, Artificial Sequence
  Description of Artificial Sequence: Synthetic oligonucleotide
uguuacagacucuugagcu

SEQ ID NO: 284413 - RNA, 19 nt, Artificial Sequence
  Description of Artificial Sequence: Synthetic oligonucleotide
agcgaaguuuaucuaauac

SEQ ID NO: 284414 - RNA, 19 nt, Artificial Sequence
  Description of Artificial Sequence: Synthetic oligonucleotide
uacacugaguauuaaaccu

SEQ ID NO: 284415 - RNA, 19 nt, Artificial Sequence
  Description of Artificial Sequence: Synthetic oligonucleotide
aaucuuuaacuucuuacau

SEQ ID NO: 284416 - RNA, 19 nt, Artificial Sequence
  Description of Artificial Sequence: Synthetic oligonucleotide
uggaguuuauuucugacaa

SEQ ID NO: 284417 - RNA, 19 nt, Artificial Sequence
  Description of Artificial Sequence: Synthetic oligonucleotide
uagaagggcgagaagaacc

SEQ ID NO: 284418 - RNA, 19 nt, Artificial Sequence
  Description of Artificial Sequence: Synthetic oligonucleotide
aacggccugcuucauauac

SEQ ID NO: 284419 - RNA, 19 nt, Artificial Sequence
  Description of Artificial Sequence: Synthetic oligonucleotide
ucuuuuaggagugacuaag

SEQ ID NO: 284420 - RNA, 19 nt, Artificial Sequence
  Description of Artificial Sequence: Synthetic oligonucleotide
ucgauaaauuucaauagaa

SEQ ID NO: 284421 - RNA, 19 nt, Artificial Sequence
  Description of Artificial Sequence: Synthetic oligonucleotide
ugacuacugguuuugaagc

SEQ ID NO: 284422 - RNA, 19 nt, Artificial Sequence
  Description of Artificial Sequence: Synthetic oligonucleotide
uucaguuaggcaauaaaau

SEQ ID NO: 284423 - RNA, 19 nt, Artificial Sequence
  Description of Artificial Sequence: Synthetic oligonucleotide
uuugcaaggugaaauggga

SEQ ID NO: 284424 - RNA, 19 nt, Artificial Sequence
  Description of Artificial Sequence: Synthetic oligonucleotide
uaauaacugucucuguuga

SEQ ID NO: 284425 - RNA, 19 nt, Artificial Sequence
  Description of Artificial Sequence: Synthetic oligonucleotide
uguaacagagcgaaguuua

SEQ ID NO: 284426 - RNA, 19 nt, Artificial Sequence
  Description of Artificial Sequence: Synthetic oligonucleotide
ugagauaagggauucuccu

SEQ ID NO: 284427 - RNA, 19 nt, Artificial Sequence
  Description of Artificial Sequence: Synthetic oligonucleotide
ucaucuacgcugcuaagca

SEQ ID NO: 284428 - RNA, 19 nt, Artificial Sequence
  Description of Artificial Sequence: Synthetic oligonucleotide
aaguucgaguucugggagc

SEQ ID NO: 284429 - RNA, 19 nt, Artificial Sequence
  Description of Artificial Sequence: Synthetic oligonucleotide
ggaacugcagaauaguuag

SEQ ID NO: 284430 - RNA, 19 nt, Artificial Sequence
  Description of Artificial Sequence: Synthetic oligonucleotide
cacguuacuaucaaagaug

SEQ ID NO: 284431 - RNA, 19 nt, Artificial Sequence
  Description of Artificial Sequence: Synthetic oligonucleotide
guuuaucuaauacaccaug

SEQ ID NO: 284432 - RNA, 19 nt, Artificial Sequence
  Description of Artificial Sequence: Synthetic oligonucleotide
uauccgggagccauaaucc

SEQ ID NO: 284433 - RNA, 19 nt, Artificial Sequence
  Description of Artificial Sequence: Synthetic oligonucleotide
caguuaggcaauaaaauuc

SEQ ID NO: 284434 - RNA, 19 nt, Artificial Sequence
  Description of Artificial Sequence: Synthetic oligonucleotide
acguuacuaucaaagaugc

SEQ ID NO: 284435 - RNA, 19 nt, Artificial Sequence
  Description of Artificial Sequence: Synthetic oligonucleotide
uuuaggagugacuaaguau

SEQ ID NO: 284436 - RNA, 19 nt, Artificial Sequence
  Description of Artificial Sequence: Synthetic oligonucleotide
gacaaucugguuuagugca

SEQ ID NO: 284437 - RNA, 19 nt, Artificial Sequence
  Description of Artificial Sequence: Synthetic oligonucleotide
uuagagguuucacuguuga

SEQ ID NO: 284438 - RNA, 19 nt, Artificial Sequence
  Description of Artificial Sequence: Synthetic oligonucleotide
ugucucuaccauuacuggg

SEQ ID NO: 284439 - RNA, 19 nt, Artificial Sequence
  Description of Artificial Sequence: Synthetic oligonucleotide
ccuauugugauguuuaccc

SEQ ID NO: 284440 - RNA, 19 nt, Artificial Sequence
  Description of Artificial Sequence: Synthetic oligonucleotide
ucaaagacgugacaaguuc

SEQ ID NO: 284441 - RNA, 19 nt, Artificial Sequence
  Description of Artificial Sequence: Synthetic oligonucleotide
ggucgaauccauuucaagg

SEQ ID NO: 284442 - RNA, 19 nt, Artificial Sequence
  Description of Artificial Sequence: Synthetic oligonucleotide
aucgaauuguguuguuccc

SEQ ID NO: 284443 - RNA, 19 nt, Artificial Sequence
  Description of Artificial Sequence: Synthetic oligonucleotide
uuuaaaugaguaccaguau

SEQ ID NO: 284444 - RNA, 19 nt, Artificial Sequence
  Description of Artificial Sequence: Synthetic oligonucleotide
aggacuagggcaucauucg

SEQ ID NO: 284445 - RNA, 19 nt, Artificial Sequence
  Description of Artificial Sequence: Synthetic oligonucleotide
aacuaguucugucauuuaa

SEQ ID NO: 284446 - RNA, 19 nt, Artificial Sequence
  Description of Artificial Sequence: Synthetic oligonucleotide
gaaguucgaguucugggag

SEQ ID NO: 284447 - RNA, 19 nt, Artificial Sequence
  Description of Artificial Sequence: Synthetic oligonucleotide
guacacugaguauuaaacc

SEQ ID NO: 284448 - RNA, 19 nt, Artificial Sequence
  Description of Artificial Sequence: Synthetic oligonucleotide
ucccuuagagguuucacug

SEQ ID NO: 284449 - RNA, 19 nt, Artificial Sequence
  Description of Artificial Sequence: Synthetic oligonucleotide
gaccauuagaagauggugc

SEQ ID NO: 284450 - RNA, 19 nt, Artificial Sequence
  Description of Artificial Sequence: Synthetic oligonucleotide
agagauagccuucaaaauu

SEQ ID NO: 284451 - RNA, 19 nt, Artificial Sequence
  Description of Artificial Sequence: Synthetic oligonucleotide
ucgguaccgauuuccaugg

SEQ ID NO: 284452 - RNA, 19 nt, Artificial Sequence
  Description of Artificial Sequence: Synthetic oligonucleotide
uacaccauggagccauacg

SEQ ID NO: 284453 - RNA, 19 nt, Artificial Sequence
  Description of Artificial Sequence: Synthetic oligonucleotide
aauuguguuguucccuaga

SEQ ID NO: 284454 - RNA, 19 nt, Artificial Sequence
  Description of Artificial Sequence: Synthetic oligonucleotide
agaaguucgaguucuggga

SEQ ID NO: 284455 - RNA, 19 nt, Artificial Sequence
  Description of Artificial Sequence: Synthetic oligonucleotide
aaugggaugaugguaugca

SEQ ID NO: 284456 - RNA, 19 nt, Artificial Sequence
  Description of Artificial Sequence: Synthetic oligonucleotide
cauaauguaaucaggaagu

SEQ ID NO: 284457 - RNA, 19 nt, Artificial Sequence
  Description of Artificial Sequence: Synthetic oligonucleotide
uuugaaggcacguuacuau

SEQ ID NO: 284458 - RNA, 19 nt, Artificial Sequence
  Description of Artificial Sequence: Synthetic oligonucleotide
ugaggucgaauccauuuca

SEQ ID NO: 284459 - RNA, 19 nt, Artificial Sequence
  Description of Artificial Sequence: Synthetic oligonucleotide
aauuucaauagaagggcga

SEQ ID NO: 284460 - RNA, 19 nt, Artificial Sequence
  Description of Artificial Sequence: Synthetic oligonucleotide
guucccuagaaacagggac

SEQ ID NO: 284461 - RNA, 19 nt, Artificial Sequence
  Description of Artificial Sequence: Synthetic oligonucleotide
uugcagccuauuuaaauga

SEQ ID NO: 284462 - RNA, 19 nt, Artificial Sequence
  Description of Artificial Sequence: Synthetic oligonucleotide
ugggucaaucuguagucgg

SEQ ID NO: 284463 - RNA, 19 nt, Artificial Sequence
  Description of Artificial Sequence: Synthetic oligonucleotide
auucgcuaguuugaggucg

SEQ ID NO: 284464 - RNA, 19 nt, Artificial Sequence
  Description of Artificial Sequence: Synthetic oligonucleotide
agcaaauuuacaauuggga

SEQ ID NO: 284465 - RNA, 19 nt, Artificial Sequence
  Description of Artificial Sequence: Synthetic oligonucleotide
uggaugcacaaacaaacau

SEQ ID NO: 284466 - RNA, 19 nt, Artificial Sequence
  Description of Artificial Sequence: Synthetic oligonucleotide
gagauaagggauucuccug

SEQ ID NO: 284467 - RNA, 19 nt, Artificial Sequence
  Description of Artificial Sequence: Synthetic oligonucleotide
gaaucucucucaucagaag

SEQ ID NO: 284468 - RNA, 19 nt, Artificial Sequence
  Description of Artificial Sequence: Synthetic oligonucleotide
ucaucuccccgacuaaagc

SEQ ID NO: 284469 - RNA, 19 nt, Artificial Sequence
  Description of Artificial Sequence: Synthetic oligonucleotide
uaauacaccauggagccau

SEQ ID NO: 284470 - RNA, 19 nt, Artificial Sequence
  Description of Artificial Sequence: Synthetic oligonucleotide
uacgcugcuaagcacuucu

SEQ ID NO: 284471 - RNA, 19 nt, Artificial Sequence
  Description of Artificial Sequence: Synthetic oligonucleotide
auggaagcguucaaacugc

SEQ ID NO: 284472 - RNA, 19 nt, Artificial Sequence
  Description of Artificial Sequence: Synthetic oligonucleotide
uggaacugcagaauaguua

SEQ ID NO: 284473 - RNA, 19 nt, Artificial Sequence
  Description of Artificial Sequence: Synthetic oligonucleotide
uccuaauucuugcaauuuc

SEQ ID NO: 284474 - RNA, 19 nt, Artificial Sequence
  Description of Artificial Sequence: Synthetic oligonucleotide
cuauccgggagccauaauc

SEQ ID NO: 284475 - RNA, 19 nt, Artificial Sequence
  Description of Artificial Sequence: Synthetic oligonucleotide
aguuaggcaauaaaauuca

SEQ ID NO: 284476 - RNA, 19 nt, Artificial Sequence
  Description of Artificial Sequence: Synthetic oligonucleotide
ugcagccuauuuaaaugag

SEQ ID NO: 284477 - RNA, 19 nt, Artificial Sequence
  Description of Artificial Sequence: Synthetic oligonucleotide
uucagagauagccuucaaa

SEQ ID NO: 284478 - RNA, 19 nt, Artificial Sequence
  Description of Artificial Sequence: Synthetic oligonucleotide
aguauuaaaccuacagugu

SEQ ID NO: 284479 - RNA, 19 nt, Artificial Sequence
  Description of Artificial Sequence: Synthetic oligonucleotide
acuaaagcugcucuuguuu

SEQ ID NO: 284480 - RNA, 19 nt, Artificial Sequence
  Description of Artificial Sequence: Synthetic oligonucleotide
uaugagcucuguaacuagu

SEQ ID NO: 284481 - RNA, 19 nt, Artificial Sequence
  Description of Artificial Sequence: Synthetic oligonucleotide
cauaagaaugucugacgug

SEQ ID NO: 284482 - RNA, 19 nt, Artificial Sequence
  Description of Artificial Sequence: Synthetic oligonucleotide
ggugaaucgaauuguguug

SEQ ID NO: 284483 - RNA, 19 nt, Artificial Sequence
  Description of Artificial Sequence: Synthetic oligonucleotide
augggaugaugguaugcac

SEQ ID NO: 284484 - RNA, 19 nt, Artificial Sequence
  Description of Artificial Sequence: Synthetic oligonucleotide
guagucgggauaauaacug

SEQ ID NO: 284485 - RNA, 19 nt, Artificial Sequence
  Description of Artificial Sequence: Synthetic oligonucleotide
gacgugaguggauuucugc

SEQ ID NO: 284486 - RNA, 19 nt, Artificial Sequence
  Description of Artificial Sequence: Synthetic oligonucleotide
uacggugaaucgaauugug

SEQ ID NO: 284487 - RNA, 19 nt, Artificial Sequence
  Description of Artificial Sequence: Synthetic oligonucleotide
cauuucaaggcaugucuug

SEQ ID NO: 284488 - RNA, 19 nt, Artificial Sequence
  Description of Artificial Sequence: Synthetic oligonucleotide
aucauucgcuaguuugagg

SEQ ID NO: 284489 - RNA, 19 nt, Artificial Sequence
  Description of Artificial Sequence: Synthetic oligonucleotide
gugaguggauuucugcucc

SEQ ID NO: 284490 - RNA, 19 nt, Artificial Sequence
  Description of Artificial Sequence: Synthetic oligonucleotide
uuagccggguugaaccucc

SEQ ID NO: 284491 - RNA, 19 nt, Artificial Sequence
  Description of Artificial Sequence: Synthetic oligonucleotide
acccauaugagcucuguaa

SEQ ID NO: 284492 - RNA, 19 nt, Artificial Sequence
  Description of Artificial Sequence: Synthetic oligonucleotide
ggcaucauucgcuaguuug

SEQ ID NO: 284493 - RNA, 19 nt, Artificial Sequence
  Description of Artificial Sequence: Synthetic oligonucleotide
uucaaagacgugacaaguu

SEQ ID NO: 284494 - RNA, 19 nt, Artificial Sequence
  Description of Artificial Sequence: Synthetic oligonucleotide
caccauaauguaaucagga

SEQ ID NO: 284495 - RNA, 19 nt, Artificial Sequence
  Description of Artificial Sequence: Synthetic oligonucleotide
aggcacguuacuaucaaag

SEQ ID NO: 284496 - RNA, 19 nt, Artificial Sequence
  Description of Artificial Sequence: Synthetic oligonucleotide
cuggcuuaauaucaaucac

SEQ ID NO: 284497 - RNA, 19 nt, Artificial Sequence
  Description of Artificial Sequence: Synthetic oligonucleotide
aauccauuucaaggcaugu

SEQ ID NO: 284498 - RNA, 19 nt, Artificial Sequence
  Description of Artificial Sequence: Synthetic oligonucleotide
gaucucgguaccgauuucc

SEQ ID NO: 284499 - RNA, 19 nt, Artificial Sequence
  Description of Artificial Sequence: Synthetic oligonucleotide
uuuauccaaguuguuucug

SEQ ID NO: 284500 - RNA, 19 nt, Artificial Sequence
  Description of Artificial Sequence: Synthetic oligonucleotide
ugaugguaugcacauucau

SEQ ID NO: 284501 - RNA, 19 nt, Artificial Sequence
  Description of Artificial Sequence: Synthetic oligonucleotide
gguaugcacauucaucccc

SEQ ID NO: 284502 - RNA, 19 nt, Artificial Sequence
  Description of Artificial Sequence: Synthetic oligonucleotide
ugcuaucaauucuucuuga

SEQ ID NO: 284503 - RNA, 19 nt, Artificial Sequence
  Description of Artificial Sequence: Synthetic oligonucleotide
aguaaugguggggugauaa

SEQ ID NO: 284504 - RNA, 19 nt, Artificial Sequence
  Description of Artificial Sequence: Synthetic oligonucleotide
uugaaggcacguuacuauc

SEQ ID NO: 284505 - RNA, 19 nt, Artificial Sequence
  Description of Artificial Sequence: Synthetic oligonucleotide
gcuucgguuaccuggaggc

SEQ ID NO: 284506 - RNA, 19 nt, Artificial Sequence
  Description of Artificial Sequence: Synthetic oligonucleotide
acgugaguggauuucugcu

SEQ ID NO: 284507 - RNA, 19 nt, Artificial Sequence
  Description of Artificial Sequence: Synthetic oligonucleotide
gacuaaguauauuuucugu

SEQ ID NO: 284508 - RNA, 19 nt, Artificial Sequence
  Description of Artificial Sequence: Synthetic oligonucleotide
gagauagccuucaaaauua

SEQ ID NO: 284509 - RNA, 19 nt, Artificial Sequence
  Description of Artificial Sequence: Synthetic oligonucleotide
gaagccaguacuggaauuc

SEQ ID NO: 284510 - RNA, 19 nt, Artificial Sequence
  Description of Artificial Sequence: Synthetic oligonucleotide
ucuugccuuaacaguuuca

SEQ ID NO: 284511 - RNA, 19 nt, Artificial Sequence
  Description of Artificial Sequence: Synthetic oligonucleotide
ugguaugcacauucauccc

SEQ ID NO: 284512 - RNA, 19 nt, Artificial Sequence
  Description of Artificial Sequence: Synthetic oligonucleotide
uccacguaagcuccuaauu

SEQ ID NO: 284513 - RNA, 19 nt, Artificial Sequence
  Description of Artificial Sequence: Synthetic oligonucleotide
agucgggauaauaacuguc

SEQ ID NO: 284514 - RNA, 19 nt, Artificial Sequence
  Description of Artificial Sequence: Synthetic oligonucleotide
ucgggauaauaacugucuc

SEQ ID NO: 284515 - RNA, 19 nt, Artificial Sequence
  Description of Artificial Sequence: Synthetic oligonucleotide
cuguacuaucuccuuuugc

SEQ ID NO: 284516 - RNA, 19 nt, Artificial Sequence
  Description of Artificial Sequence: Synthetic oligonucleotide
gacaagcuuccuauccggg

SEQ ID NO: 284517 - RNA, 19 nt, Artificial Sequence
  Description of Artificial Sequence: Synthetic oligonucleotide
uguuuacccauaugagcuc

SEQ ID NO: 284518 - RNA, 19 nt, Artificial Sequence
  Description of Artificial Sequence: Synthetic oligonucleotide
gucaucuacgcugcuaagc

SEQ ID NO: 284519 - RNA, 19 nt, Artificial Sequence
  Description of Artificial Sequence: Synthetic oligonucleotide
gaaucgaauuguguuguuc

SEQ ID NO: 284520 - RNA, 19 nt, Artificial Sequence
  Description of Artificial Sequence: Synthetic oligonucleotide
uagucgggauaauaacugu

SEQ ID NO: 284521 - RNA, 19 nt, Artificial Sequence
  Description of Artificial Sequence: Synthetic oligonucleotide
cugaacuuaccacaggcaa

SEQ ID NO: 284522 - RNA, 19 nt, Artificial Sequence
  Description of Artificial Sequence: Synthetic oligonucleotide
gcgaaguuuaucuaauaca

SEQ ID NO: 284523 - RNA, 19 nt, Artificial Sequence
  Description of Artificial Sequence: Synthetic oligonucleotide
ucuccccgacuaaagcugc

SEQ ID NO: 284524 - RNA, 19 nt, Artificial Sequence
  Description of Artificial Sequence: Synthetic oligonucleotide
ggacaagcuuccuauccgg

SEQ ID NO: 284525 - RNA, 19 nt, Artificial Sequence
  Description of Artificial Sequence: Synthetic oligonucleotide
uucuacucaugugagugaa

SEQ ID NO: 284526 - RNA, 19 nt, Artificial Sequence
  Description of Artificial Sequence: Synthetic oligonucleotide
gaugacuacugguuuugaa

SEQ ID NO: 284527 - RNA, 19 nt, Artificial Sequence
  Description of Artificial Sequence: Synthetic oligonucleotide
ucgaauuguguuguucccu

SEQ ID NO: 284528 - RNA, 19 nt, Artificial Sequence
  Description of Artificial Sequence: Synthetic oligonucleotide
gaaaucaguugucuguuau

SEQ ID NO: 284529 - RNA, 19 nt, Artificial Sequence
  Description of Artificial Sequence: Synthetic oligonucleotide
ggcgagaagaaccauaugu

SEQ ID NO: 284530 - RNA, 19 nt, Artificial Sequence
  Description of Artificial Sequence: Synthetic oligonucleotide
agcuccuaauucuugcaau

SEQ ID NO: 284531 - RNA, 19 nt, Artificial Sequence
  Description of Artificial Sequence: Synthetic oligonucleotide
caauuuggaugcacaaaca

SEQ ID NO: 284532 - RNA, 19 nt, Artificial Sequence
  Description of Artificial Sequence: Synthetic oligonucleotide
auacggugaaucgaauugu

SEQ ID NO: 284533 - RNA, 19 nt, Artificial Sequence
  Description of Artificial Sequence: Synthetic oligonucleotide
aagacgugacaaguucugu

SEQ ID NO: 284534 - RNA, 19 nt, Artificial Sequence
  Description of Artificial Sequence: Synthetic oligonucleotide
ucgguuaccuggaggccgc

SEQ ID NO: 284535 - RNA, 19 nt, Artificial Sequence
  Description of Artificial Sequence: Synthetic oligonucleotide
caucauucgcuaguuugag

SEQ ID NO: 284536 - RNA, 19 nt, Artificial Sequence
  Description of Artificial Sequence: Synthetic oligonucleotide
augaaguugcagccuauuu

SEQ ID NO: 284537 - RNA, 19 nt, Artificial Sequence
  Description of Artificial Sequence: Synthetic oligonucleotide
uucgcuaguuugaggucga

SEQ ID NO: 284538 - RNA, 19 nt, Artificial Sequence
  Description of Artificial Sequence: Synthetic oligonucleotide
agguggucgauaaauuuca

SEQ ID NO: 284539 - RNA, 19 nt, Artificial Sequence
  Description of Artificial Sequence: Synthetic oligonucleotide
aucuacgcugcuaagcacu

SEQ ID NO: 284540 - RNA, 19 nt, Artificial Sequence
  Description of Artificial Sequence: Synthetic oligonucleotide
agacgugacaaguucugua

SEQ ID NO: 284541 - RNA, 19 nt, Artificial Sequence
  Description of Artificial Sequence: Synthetic oligonucleotide
accauauguaagugucacu

SEQ ID NO: 284542 - RNA, 19 nt, Artificial Sequence
  Description of Artificial Sequence: Synthetic oligonucleotide
auuagccggguugaaccuc

SEQ ID NO: 284543 - RNA, 19 nt, Artificial Sequence
  Description of Artificial Sequence: Synthetic oligonucleotide
ugaaaucaguugucuguua

SEQ ID NO: 284544 - RNA, 19 nt, Artificial Sequence
  Description of Artificial Sequence: Synthetic oligonucleotide
uaacagagcgaaguuuauc

SEQ ID NO: 284545 - RNA, 19 nt, Artificial Sequence
  Description of Artificial Sequence: Synthetic oligonucleotide
uuuuacaagcaggccagua

SEQ ID NO: 284546 - RNA, 19 nt, Artificial Sequence
  Description of Artificial Sequence: Synthetic oligonucleotide
acuagggcaucauucgcua

SEQ ID NO: 284547 - RNA, 19 nt, Artificial Sequence
  Description of Artificial Sequence: Synthetic oligonucleotide
guaccgauuuccauggcuc

SEQ ID NO: 284548 - RNA, 19 nt, Artificial Sequence
  Description of Artificial Sequence: Synthetic oligonucleotide
aaggcacguuacuaucaaa

SEQ ID NO: 284549 - RNA, 19 nt, Artificial Sequence
  Description of Artificial Sequence: Synthetic oligonucleotide
agaagggcgagaagaacca

SEQ ID NO: 284550 - RNA, 19 nt, Artificial Sequence
  Description of Artificial Sequence: Synthetic oligonucleotide
cauggcucagcggcgaggc

SEQ ID NO: 284551 - RNA, 19 nt, Artificial Sequence
  Description of Artificial Sequence: Synthetic oligonucleotide
acgugacaaguucuguaga

SEQ ID NO: 284552 - RNA, 19 nt, Artificial Sequence
  Description of Artificial Sequence: Synthetic oligonucleotide
aggcuuugcaaggugaaau

SEQ ID NO: 284553 - RNA, 19 nt, Artificial Sequence
  Description of Artificial Sequence: Synthetic oligonucleotide
cuugccuuaacaguuucaa

SEQ ID NO: 284554 - RNA, 19 nt, Artificial Sequence
  Description of Artificial Sequence: Synthetic oligonucleotide
cagagcgaaguuuaucuaa

SEQ ID NO: 284555 - RNA, 19 nt, Artificial Sequence
  Description of Artificial Sequence: Synthetic oligonucleotide
caucuacgcugcuaagcac

SEQ ID NO: 284556 - RNA, 19 nt, Artificial Sequence
  Description of Artificial Sequence: Synthetic oligonucleotide
auacaccauggagccauac

SEQ ID NO: 284557 - RNA, 19 nt, Artificial Sequence
  Description of Artificial Sequence: Synthetic oligonucleotide
uacaagcaggccaguacuu

SEQ ID NO: 284558 - RNA, 19 nt, Artificial Sequence
  Description of Artificial Sequence: Synthetic oligonucleotide
ugcggcugaucucgguacc

SEQ ID NO: 284559 - RNA, 19 nt, Artificial Sequence
  Description of Artificial Sequence: Synthetic oligonucleotide
auccacguaagcuccuaau

SEQ ID NO: 284560 - RNA, 19 nt, Artificial Sequence
  Description of Artificial Sequence: Synthetic oligonucleotide
ggagugacuaaguauauuu

SEQ ID NO: 284561 - RNA, 19 nt, Artificial Sequence
  Description of Artificial Sequence: Synthetic oligonucleotide
uuacccauaugagcucugu

SEQ ID NO: 284562 - RNA, 19 nt, Artificial Sequence
  Description of Artificial Sequence: Synthetic oligonucleotide
ucuacgcugcuaagcacuu

SEQ ID NO: 284563 - RNA, 19 nt, Artificial Sequence
  Description of Artificial Sequence: Synthetic oligonucleotide
cuuugcuggcaccgacacg

SEQ ID NO: 284564 - RNA, 19 nt, Artificial Sequence
  Description of Artificial Sequence: Synthetic oligonucleotide
cacguaagcuccuaauucu

SEQ ID NO: 284565 - RNA, 19 nt, Artificial Sequence
  Description of Artificial Sequence: Synthetic oligonucleotide
guaugcacauucaucccca

SEQ ID NO: 284566 - RNA, 19 nt, Artificial Sequence
  Description of Artificial Sequence: Synthetic oligonucleotide
agagcgaaguuuaucuaau

SEQ ID NO: 284567 - RNA, 19 nt, Artificial Sequence
  Description of Artificial Sequence: Synthetic oligonucleotide
auuacugggucaaucugua

SEQ ID NO: 284568 - RNA, 19 nt, Artificial Sequence
  Description of Artificial Sequence: Synthetic oligonucleotide
cauaauacaguggccaagu

SEQ ID NO: 284569 - RNA, 19 nt, Artificial Sequence
  Description of Artificial Sequence: Synthetic oligonucleotide
ccuagagcuagcaacggca

SEQ ID NO: 284570 - RNA, 19 nt, Artificial Sequence
  Description of Artificial Sequence: Synthetic oligonucleotide
uaacuaguucugucauuua

SEQ ID NO: 284571 - RNA, 19 nt, Artificial Sequence
  Description of Artificial Sequence: Synthetic oligonucleotide
auccgggagccauaauccu

SEQ ID NO: 284572 - RNA, 19 nt, Artificial Sequence
  Description of Artificial Sequence: Synthetic oligonucleotide
uacccauaugagcucugua

SEQ ID NO: 284573 - RNA, 19 nt, Artificial Sequence
  Description of Artificial Sequence: Synthetic oligonucleotide
ccacguaagcuccuaauuc

SEQ ID NO: 284574 - RNA, 19 nt, Artificial Sequence
  Description of Artificial Sequence: Synthetic oligonucleotide
caaagacgugacaaguucu

SEQ ID NO: 284575 - RNA, 19 nt, Artificial Sequence
  Description of Artificial Sequence: Synthetic oligonucleotide
agcgcuccaaaagcuuuuc

SEQ ID NO: 284576 - RNA, 19 nt, Artificial Sequence
  Description of Artificial Sequence: Synthetic oligonucleotide
accgauuuccauggcucag

SEQ ID NO: 284577 - RNA, 19 nt, Artificial Sequence
  Description of Artificial Sequence: Synthetic oligonucleotide
acacugaguauuaaaccua

SEQ ID NO: 284578 - RNA, 19 nt, Artificial Sequence
  Description of Artificial Sequence: Synthetic oligonucleotide
gguucacacaaacggccug

SEQ ID NO: 284579 - RNA, 19 nt, Artificial Sequence
  Description of Artificial Sequence: Synthetic oligonucleotide
gagccauacggugaaucga

SEQ ID NO: 284580 - RNA, 19 nt, Artificial Sequence
  Description of Artificial Sequence: Synthetic oligonucleotide
cuagagcuagcaacggcaa

SEQ ID NO: 284581 - RNA, 19 nt, Artificial Sequence
  Description of Artificial Sequence: Synthetic oligonucleotide
ggacuagggcaucauucgc

SEQ ID NO: 284582 - RNA, 19 nt, Artificial Sequence
  Description of Artificial Sequence: Synthetic oligonucleotide
ugaaucgaauuguguuguu

SEQ ID NO: 284583 - RNA, 19 nt, Artificial Sequence
  Description of Artificial Sequence: Synthetic oligonucleotide
cuucgguuaccuggaggcc

SEQ ID NO: 284584 - RNA, 19 nt, Artificial Sequence
  Description of Artificial Sequence: Synthetic oligonucleotide
aguuugaggucgaauccau

SEQ ID NO: 284585 - RNA, 19 nt, Artificial Sequence
  Description of Artificial Sequence: Synthetic oligonucleotide
gugaaucgaauuguguugu

SEQ ID NO: 284586 - RNA, 19 nt, Artificial Sequence
  Description of Artificial Sequence: Synthetic oligonucleotide
ugaucucgguaccgauuuc

SEQ ID NO: 284587 - RNA, 19 nt, Artificial Sequence
  Description of Artificial Sequence: Synthetic oligonucleotide
gucgggauaauaacugucu

SEQ ID NO: 284588 - RNA, 19 nt, Artificial Sequence
  Description of Artificial Sequence: Synthetic oligonucleotide
ugcgcggcgcuucgguuac

SEQ ID NO: 284589 - RNA, 19 nt, Artificial Sequence
  Description of Artificial Sequence: Synthetic oligonucleotide
guuguaacagagcgaaguu

SEQ ID NO: 284590 - RNA, 19 nt, Artificial Sequence
  Description of Artificial Sequence: Synthetic oligonucleotide
guacuugcagcgcuccaaa

SEQ ID NO: 284591 - RNA, 19 nt, Artificial Sequence
  Description of Artificial Sequence: Synthetic oligonucleotide
acggugaaucgaauugugu

SEQ ID NO: 284592 - RNA, 19 nt, Artificial Sequence
  Description of Artificial Sequence: Synthetic oligonucleotide
cauugucucuaccauuacu

SEQ ID NO: 284593 - RNA, 19 nt, Artificial Sequence
  Description of Artificial Sequence: Synthetic oligonucleotide
aaacggccugcuucauaua

SEQ ID NO: 284594 - RNA, 19 nt, Artificial Sequence
  Description of Artificial Sequence: Synthetic oligonucleotide
caucagaagauggaagcgu

SEQ ID NO: 284595 - RNA, 19 nt, Artificial Sequence
  Description of Artificial Sequence: Synthetic oligonucleotide
cuuuucaggccuagagcua

SEQ ID NO: 284596 - RNA, 19 nt, Artificial Sequence
  Description of Artificial Sequence: Synthetic oligonucleotide
aucucgguaccgauuucca

SEQ ID NO: 284597 - RNA, 19 nt, Artificial Sequence
  Description of Artificial Sequence: Synthetic oligonucleotide
guuacagacucuugagcuu

SEQ ID NO: 284598 - RNA, 19 nt, Artificial Sequence
  Description of Artificial Sequence: Synthetic oligonucleotide
gguaccgauuuccauggcu

SEQ ID NO: 284599 - RNA, 19 nt, Artificial Sequence
  Description of Artificial Sequence: Synthetic oligonucleotide
aggagugacuaaguauauu

SEQ ID NO: 284600 - RNA, 19 nt, Artificial Sequence
  Description of Artificial Sequence: Synthetic oligonucleotide
uaacggcacagcugaccau

SEQ ID NO: 284601 - RNA, 19 nt, Artificial Sequence
  Description of Artificial Sequence: Synthetic oligonucleotide
gcacguuacuaucaaagau

SEQ ID NO: 284602 - RNA, 19 nt, Artificial Sequence
  Description of Artificial Sequence: Synthetic oligonucleotide
cugaucucgguaccgauuu

SEQ ID NO: 284603 - RNA, 19 nt, Artificial Sequence
  Description of Artificial Sequence: Synthetic oligonucleotide
gagugacuaaguauauuuu

SEQ ID NO: 284604 - RNA, 19 nt, Artificial Sequence
  Description of Artificial Sequence: Synthetic oligonucleotide
gccggguugaaccuccauc

SEQ ID NO: 284605 - RNA, 19 nt, Artificial Sequence
  Description of Artificial Sequence: Synthetic oligonucleotide
ccccuuaauggcacuccgg

SEQ ID NO: 284606 - RNA, 19 nt, Artificial Sequence
  Description of Artificial Sequence: Synthetic oligonucleotide
cccuuaauggcacuccgga

SEQ ID NO: 284607 - RNA, 19 nt, Artificial Sequence
  Description of Artificial Sequence: Synthetic oligonucleotide
acguaagcuccuaauucuu

SEQ ID NO: 284608 - RNA, 19 nt, Artificial Sequence
  Description of Artificial Sequence: Synthetic oligonucleotide
agcguucaaacugcacgau

SEQ ID NO: 284609 - RNA, 19 nt, Artificial Sequence
  Description of Artificial Sequence: Synthetic oligonucleotide
cgugaguggauuucugcuc

SEQ ID NO: 284610 - RNA, 19 nt, Artificial Sequence
  Description of Artificial Sequence: Synthetic oligonucleotide
cauuagccggguugaaccu

SEQ ID NO: 284611 - RNA, 19 nt, Artificial Sequence
  Description of Artificial Sequence: Synthetic oligonucleotide
agcggcgaggcguccgggu

SEQ ID NO: 284612 - RNA, 19 nt, Artificial Sequence
  Description of Artificial Sequence: Synthetic oligonucleotide
cugcacgaucuucuugcca

SEQ ID NO: 284613 - RNA, 19 nt, Artificial Sequence
  Description of Artificial Sequence: Synthetic oligonucleotide
ggccuagagcuagcaacgg

SEQ ID NO: 284614 - RNA, 19 nt, Artificial Sequence
  Description of Artificial Sequence: Synthetic oligonucleotide
cauccacguaagcuccuaa

SEQ ID NO: 284615 - RNA, 19 nt, Artificial Sequence
  Description of Artificial Sequence: Synthetic oligonucleotide
gcggcugaucucgguaccg

SEQ ID NO: 284616 - RNA, 19 nt, Artificial Sequence
  Description of Artificial Sequence: Synthetic oligonucleotide
guaggacuagggcaucauu

SEQ ID NO: 284617 - RNA, 19 nt, Artificial Sequence
  Description of Artificial Sequence: Synthetic oligonucleotide
cuacgcugcuaagcacuuc

SEQ ID NO: 284618 - RNA, 19 nt, Artificial Sequence
  Description of Artificial Sequence: Synthetic oligonucleotide
agccggguugaaccuccau

SEQ ID NO: 284619 - RNA, 19 nt, Artificial Sequence
  Description of Artificial Sequence: Synthetic oligonucleotide
ggcgcuucgguuaccugga

SEQ ID NO: 284620 - RNA, 19 nt, Artificial Sequence
  Description of Artificial Sequence: Synthetic oligonucleotide
cuccuaauucuugcaauuu

SEQ ID NO: 284621 - RNA, 19 nt, Artificial Sequence
  Description of Artificial Sequence: Synthetic oligonucleotide
ucgcuaguuugaggucgaa

SEQ ID NO: 284622 - RNA, 19 nt, Artificial Sequence
  Description of Artificial Sequence: Synthetic oligonucleotide
cgaauuguguuguucccua

SEQ ID NO: 284623 - RNA, 19 nt, Artificial Sequence
  Description of Artificial Sequence: Synthetic oligonucleotide
caccgacacgcugcuggac

SEQ ID NO: 284624 - RNA, 19 nt, Artificial Sequence
  Description of Artificial Sequence: Synthetic oligonucleotide
ggcgaggcguccgggucag

SEQ ID NO: 284625 - RNA, 19 nt, Artificial Sequence
  Description of Artificial Sequence: Synthetic oligonucleotide
cggugaaucgaauuguguu

SEQ ID NO: 284626 - RNA, 19 nt, Artificial Sequence
  Description of Artificial Sequence: Synthetic oligonucleotide
uggcaccgacacgcugcug

SEQ ID NO: 284627 - RNA, 19 nt, Artificial Sequence
  Description of Artificial Sequence: Synthetic oligonucleotide
gcggcgaggcguccggguc

SEQ ID NO: 284628 - RNA, 19 nt, Artificial Sequence
  Description of Artificial Sequence: Synthetic oligonucleotide
gcgcuucgguuaccuggag

SEQ ID NO: 284629 - RNA, 19 nt, Artificial Sequence
  Description of Artificial Sequence: Synthetic oligonucleotide
ggcugaucucgguaccgau

SEQ ID NO: 284630 - RNA, 19 nt, Artificial Sequence
  Description of Artificial Sequence: Synthetic oligonucleotide
cuacuugcagguggucgau

SEQ ID NO: 284631 - RNA, 19 nt, Artificial Sequence
  Description of Artificial Sequence: Synthetic oligonucleotide
gcggcgcuucgguuaccug

SEQ ID NO: 284632 - RNA, 19 nt, Artificial Sequence
  Description of Artificial Sequence: Synthetic oligonucleotide
gguaggacuagggcaucau

SEQ ID NO: 284633 - RNA, 19 nt, Artificial Sequence
  Description of Artificial Sequence: Synthetic oligonucleotide
cgaauccauuucaaggcau

SEQ ID NO: 284634 - RNA, 19 nt, Artificial Sequence
  Description of Artificial Sequence: Synthetic oligonucleotide
gcacugacugcgcggcgcu

SEQ ID NO: 284635 - RNA, 19 nt, Artificial Sequence
  Description of Artificial Sequence: Synthetic oligonucleotide
ggccaaguuucucccuauu

SEQ ID NO: 284636 - RNA, 19 nt, Artificial Sequence
  Description of Artificial Sequence: Synthetic oligonucleotide
cgguaccgauuuccauggc

SEQ ID NO: 284637 - RNA, 19 nt, Artificial Sequence
  Description of Artificial Sequence: Synthetic oligonucleotide
cccgacuaaagcugcucuu

SEQ ID NO: 284638 - RNA, 19 nt, Artificial Sequence
  Description of Artificial Sequence: Synthetic oligonucleotide
gggcaucauucgcuaguuu

SEQ ID NO: 284639 - RNA, 19 nt, Artificial Sequence
  Description of Artificial Sequence: Synthetic oligonucleotide
cggcugaucucgguaccga

SEQ ID NO: 284640 - RNA, 19 nt, Artificial Sequence
  Description of Artificial Sequence: Synthetic oligonucleotide
ccuauccgggagccauaau

SEQ ID NO: 284641 - RNA, 19 nt, Artificial Sequence
  Description of Artificial Sequence: Synthetic oligonucleotide
gcgaggcguccgggucagc

SEQ ID NO: 284642 - RNA, 19 nt, Artificial Sequence
  Description of Artificial Sequence: Synthetic oligonucleotide
aaccauaugaaauauagcc

SEQ ID NO: 284643 - RNA, 19 nt, Artificial Sequence
  Description of Artificial Sequence: Synthetic oligonucleotide
ugaaauauagccaugauuc

SEQ ID NO: 284644 - RNA, 19 nt, Artificial Sequence
  Description of Artificial Sequence: Synthetic oligonucleotide
auuguagcaaguuuagacc

SEQ ID NO: 284645 - RNA, 19 nt, Artificial Sequence
  Description of Artificial Sequence: Synthetic oligonucleotide
uuuuccgagggaaagaccg

SEQ ID NO: 284646 - RNA, 19 nt, Artificial Sequence
  Description of Artificial Sequence: Synthetic oligonucleotide
aauguuucgugucuuguac

SEQ ID NO: 284647 - RNA, 19 nt, Artificial Sequence
  Description of Artificial Sequence: Synthetic oligonucleotide
uguacaacuauccugcugc

SEQ ID NO: 284648 - RNA, 19 nt, Artificial Sequence
  Description of Artificial Sequence: Synthetic oligonucleotide
aauaauaggacuucaggau

SEQ ID NO: 284649 - RNA, 19 nt, Artificial Sequence
  Description of Artificial Sequence: Synthetic oligonucleotide
ucucaauauaaccauauga

SEQ ID NO: 284650 - RNA, 19 nt, Artificial Sequence
  Description of Artificial Sequence: Synthetic oligonucleotide
uaaaacaucacccaugaua

SEQ ID NO: 284651 - RNA, 19 nt, Artificial Sequence
  Description of Artificial Sequence: Synthetic oligonucleotide
acauguaacaaacaugcuc

SEQ ID NO: 284652 - RNA, 19 nt, Artificial Sequence
  Description of Artificial Sequence: Synthetic oligonucleotide
uuuaaagucugaaugcccc

SEQ ID NO: 284653 - RNA, 19 nt, Artificial Sequence
  Description of Artificial Sequence: Synthetic oligonucleotide
auaucaguaaagcuuuuac

SEQ ID NO: 284654 - RNA, 19 nt, Artificial Sequence
  Description of Artificial Sequence: Synthetic oligonucleotide
acugauuacaauuuugugu

SEQ ID NO: 284655 - RNA, 19 nt, Artificial Sequence
  Description of Artificial Sequence: Synthetic oligonucleotide
caaguuuagaccacaaggg

SEQ ID NO: 284656 - RNA, 19 nt, Artificial Sequence
  Description of Artificial Sequence: Synthetic oligonucleotide
uacgcauucaccuuuaagu

SEQ ID NO: 284657 - RNA, 19 nt, Artificial Sequence
  Description of Artificial Sequence: Synthetic oligonucleotide
auauuaauaagggaggaag

SEQ ID NO: 284658 - RNA, 19 nt, Artificial Sequence
  Description of Artificial Sequence: Synthetic oligonucleotide
ugcauguacaauacgaaug

SEQ ID NO: 284659 - RNA, 19 nt, Artificial Sequence
  Description of Artificial Sequence: Synthetic oligonucleotide
auaaccauaugaaauauag

SEQ ID NO: 284660 - RNA, 19 nt, Artificial Sequence
  Description of Artificial Sequence: Synthetic oligonucleotide
gucuaaaagcuguagauag

SEQ ID NO: 284661 - RNA, 19 nt, Artificial Sequence
  Description of Artificial Sequence: Synthetic oligonucleotide
  modified_base (9)..(9): a, c, u, g, unknown or other
agaaaaucngguuucccuc

SEQ ID NO: 284662 - RNA, 19 nt, Artificial Sequence
  Description of Artificial Sequence: Synthetic oligonucleotide
uaguauaucuguauaucag

SEQ ID NO: 284663 - RNA, 19 nt, Artificial Sequence
  Description of Artificial Sequence: Synthetic oligonucleotide
uguacauuuguaaucuuga

SEQ ID NO: 284664 - RNA, 19 nt, Artificial Sequence
  Description of Artificial Sequence: Synthetic oligonucleotide
acaacuauccugcugcagg

SEQ ID NO: 284665 - RNA, 19 nt, Artificial Sequence
  Description of Artificial Sequence: Synthetic oligonucleotide
aaaaccuuguauuaaucau

SEQ ID NO: 284666 - RNA, 19 nt, Artificial Sequence
  Description of Artificial Sequence: Synthetic oligonucleotide
ugcuccgucauacugaggc

SEQ ID NO: 284667 - RNA, 19 nt, Artificial Sequence
  Description of Artificial Sequence: Synthetic oligonucleotide
aaauaugugaggauuauau

SEQ ID NO: 284668 - RNA, 19 nt, Artificial Sequence
  Description of Artificial Sequence: Synthetic oligonucleotide
aaucuugacaggcaaacaa

SEQ ID NO: 284669 - RNA, 19 nt, Artificial Sequence
  Description of Artificial Sequence: Synthetic oligonucleotide
cuaacaaauccacuggugc

SEQ ID NO: 284670 - RNA, 19 nt, Artificial Sequence
  Description of Artificial Sequence: Synthetic oligonucleotide
gcaaguuuagaccacaagg

SEQ ID NO: 284671 - RNA, 19 nt, Artificial Sequence
  Description of Artificial Sequence: Synthetic oligonucleotide
aauacauuguagcaaguuu

SEQ ID NO: 284672 - RNA, 19 nt, Artificial Sequence
  Description of Artificial Sequence: Synthetic oligonucleotide
  modified_base (5)..(5): a, c, u, g, unknown or other
aaucngguuucccucagug

SEQ ID NO: 284673 - RNA, 19 nt, Artificial Sequence
  Description of Artificial Sequence: Synthetic oligonucleotide
caccaauaaaacaucaccc

SEQ ID NO: 284674 - RNA, 19 nt, Artificial Sequence
  Description of Artificial Sequence: Synthetic oligonucleotide
auuaguauaucuguauauc

SEQ ID NO: 284675 - RNA, 19 nt, Artificial Sequence
  Description of Artificial Sequence: Synthetic oligonucleotide
ucaugaacgagacacuugu

SEQ ID NO: 284676 - RNA, 19 nt, Artificial Sequence
  Description of Artificial Sequence: Synthetic oligonucleotide
uuucgugucuuguacacag

SEQ ID NO: 284677 - RNA, 19 nt, Artificial Sequence
  Description of Artificial Sequence: Synthetic oligonucleotide
ucuaaaagcuguagauagg

SEQ ID NO: 284678 - RNA, 19 nt, Artificial Sequence
  Description of Artificial Sequence: Synthetic oligonucleotide
ugccgcuuaaauaauagga

SEQ ID NO: 284679 - RNA, 19 nt, Artificial Sequence
  Description of Artificial Sequence: Synthetic oligonucleotide
uuacguuagguauaaauau

SEQ ID NO: 284680 - RNA, 19 nt, Artificial Sequence
  Description of Artificial Sequence: Synthetic oligonucleotide
ucagugucgccucagaaga

SEQ ID NO: 284681 - RNA, 19 nt, Artificial Sequence
  Description of Artificial Sequence: Synthetic oligonucleotide
cuggguagcagauaaagac

SEQ ID NO: 284682 - RNA, 19 nt, Artificial Sequence
  Description of Artificial Sequence: Synthetic oligonucleotide
auuaauaagggaggaaguc

SEQ ID NO: 284683 - RNA, 19 nt, Artificial Sequence
  Description of Artificial Sequence: Synthetic oligonucleotide
auaugcauugcuuggcaac

SEQ ID NO: 284684 - RNA, 19 nt, Artificial Sequence
  Description of Artificial Sequence: Synthetic oligonucleotide
uauuaauaagggaggaagu

SEQ ID NO: 284685 - RNA, 19 nt, Artificial Sequence
  Description of Artificial Sequence: Synthetic oligonucleotide
uguucacuaacuuuauaca

SEQ ID NO: 284686 - RNA, 19 nt, Artificial Sequence
  Description of Artificial Sequence: Synthetic oligonucleotide
uacgaaugccugcacaggg

SEQ ID NO: 284687 - RNA, 19 nt, Artificial Sequence
  Description of Artificial Sequence: Synthetic oligonucleotide
  modified_base (7)..(7): a, c, u, g, unknown or other
aaaaucngguuucccucag

SEQ ID NO: 284688 - RNA, 19 nt, Artificial Sequence
  Description of Artificial Sequence: Synthetic oligonucleotide
uagugggagagcuauaggc

SEQ ID NO: 284689 - RNA, 19 nt, Artificial Sequence
  Description of Artificial Sequence: Synthetic oligonucleotide
aguauaucuguauaucagu

SEQ ID NO: 284690 - RNA, 19 nt, Artificial Sequence
  Description of Artificial Sequence: Synthetic oligonucleotide
agacaugccgcuuaaauaa

SEQ ID NO: 284691 - RNA, 19 nt, Artificial Sequence
  Description of Artificial Sequence: Synthetic oligonucleotide
uacguuagguauaaauaug

SEQ ID NO: 284692 - RNA, 19 nt, Artificial Sequence
  Description of Artificial Sequence: Synthetic oligonucleotide
  modified_base (3)..(3): a, c, u, g, unknown or other
ucngguuucccucaguguc

SEQ ID NO: 284693 - RNA, 19 nt, Artificial Sequence
  Description of Artificial Sequence: Synthetic oligonucleotide
aucauuucccuucacucuc

SEQ ID NO: 284694 - RNA, 19 nt, Artificial Sequence
  Description of Artificial Sequence: Synthetic oligonucleotide
aacgaaagaaagccuuuug

SEQ ID NO: 284695 - RNA, 19 nt, Artificial Sequence
  Description of Artificial Sequence: Synthetic oligonucleotide
uaacaaauccacuggugcc

SEQ ID NO: 284696 - RNA, 19 nt, Artificial Sequence
  Description of Artificial Sequence: Synthetic oligonucleotide
auuacuaacauuccugcuu

SEQ ID NO: 284697 - RNA, 19 nt, Artificial Sequence
  Description of Artificial Sequence: Synthetic oligonucleotide
auaucuguauaucaguaaa

SEQ ID NO: 284698 - RNA, 19 nt, Artificial Sequence
  Description of Artificial Sequence: Synthetic oligonucleotide
cuuuaaagucugaaugccc

SEQ ID NO: 284699 - RNA, 19 nt, Artificial Sequence
  Description of Artificial Sequence: Synthetic oligonucleotide
gagcuaacaaauccacugg

SEQ ID NO: 284700 - RNA, 19 nt, Artificial Sequence
  Description of Artificial Sequence: Synthetic oligonucleotide
uggguagcagauaaagacc

SEQ ID NO: 284701 - RNA, 19 nt, Artificial Sequence
  Description of Artificial Sequence: Synthetic oligonucleotide
uuaauaagggaggaagucu

SEQ ID NO: 284702 - RNA, 19 nt, Artificial Sequence
  Description of Artificial Sequence: Synthetic oligonucleotide
acgcauucaccuuuaaguc

SEQ ID NO: 284703 - RNA, 19 nt, Artificial Sequence
  Description of Artificial Sequence: Synthetic oligonucleotide
caucuauauugcuugcugg

SEQ ID NO: 284704 - RNA, 19 nt, Artificial Sequence
  Description of Artificial Sequence: Synthetic oligonucleotide
caugauauuguagaccagc

SEQ ID NO: 284705 - RNA, 19 nt, Artificial Sequence
  Description of Artificial Sequence: Synthetic oligonucleotide
aauaugugaggauuauaua

SEQ ID NO: 284706 - RNA, 19 nt, Artificial Sequence
  Description of Artificial Sequence: Synthetic oligonucleotide
augaacgagacacuugucu

SEQ ID NO: 284707 - RNA, 19 nt, Artificial Sequence
  Description of Artificial Sequence: Synthetic oligonucleotide
caggauaugagagagcuug

SEQ ID NO: 284708 - RNA, 19 nt, Artificial Sequence
  Description of Artificial Sequence: Synthetic oligonucleotide
ugauaugucuagaaggguu

SEQ ID NO: 284709 - RNA, 19 nt, Artificial Sequence
  Description of Artificial Sequence: Synthetic oligonucleotide
uaugagagagcuuggugca

SEQ ID NO: 284710 - RNA, 19 nt, Artificial Sequence
  Description of Artificial Sequence: Synthetic oligonucleotide
ucgauauccugauaugucu

SEQ ID NO: 284711 - RNA, 19 nt, Artificial Sequence
  Description of Artificial Sequence: Synthetic oligonucleotide
ugaaggucagcuuacguua

SEQ ID NO: 284712 - RNA, 19 nt, Artificial Sequence
  Description of Artificial Sequence: Synthetic oligonucleotide
uuguauuaaucauuucccu

SEQ ID NO: 284713 - RNA, 19 nt, Artificial Sequence
  Description of Artificial Sequence: Synthetic oligonucleotide
aacaucucugaugaguugu

SEQ ID NO: 284714 - RNA, 19 nt, Artificial Sequence
  Description of Artificial Sequence: Synthetic oligonucleotide
ugucuagaaggguuuuccg

SEQ ID NO: 284715 - RNA, 19 nt, Artificial Sequence
  Description of Artificial Sequence: Synthetic oligonucleotide
agguauaaauaugugagga

SEQ ID NO: 284716 - RNA, 19 nt, Artificial Sequence
  Description of Artificial Sequence: Synthetic oligonucleotide
uuuuaaaggggacgaggga

SEQ ID NO: 284717 - RNA, 19 nt, Artificial Sequence
  Description of Artificial Sequence: Synthetic oligonucleotide
ucuuguacacaguucgugu

SEQ ID NO: 284718 - RNA, 19 nt, Artificial Sequence
  Description of Artificial Sequence: Synthetic oligonucleotide
ucuguaaaaggcagccagc

SEQ ID NO: 284719 - RNA, 19 nt, Artificial Sequence
  Description of Artificial Sequence: Synthetic oligonucleotide
ugucgccucagaagaaugg

SEQ ID NO: 284720 - RNA, 19 nt, Artificial Sequence
  Description of Artificial Sequence: Synthetic oligonucleotide
agaacgggucuucuggacg

SEQ ID NO: 284721 - RNA, 19 nt, Artificial Sequence
  Description of Artificial Sequence: Synthetic oligonucleotide
acauuugagugguuaucac

SEQ ID NO: 284722 - RNA, 19 nt, Artificial Sequence
  Description of Artificial Sequence: Synthetic oligonucleotide
ugugaacugcccagggagg

SEQ ID NO: 284723 - RNA, 19 nt, Artificial Sequence
  Description of Artificial Sequence: Synthetic oligonucleotide
ugcucuuuccauauaugac

SEQ ID NO: 284724 - RNA, 19 nt, Artificial Sequence
  Description of Artificial Sequence: Synthetic oligonucleotide
acgaaagaaagccuuuuga

SEQ ID NO: 284725 - RNA, 19 nt, Artificial Sequence
  Description of Artificial Sequence: Synthetic oligonucleotide
gaacgggucuucuggacgg

SEQ ID NO: 284726 - RNA, 19 nt, Artificial Sequence
  Description of Artificial Sequence: Synthetic oligonucleotide
uaauaagggaggaagucuu

SEQ ID NO: 284727 - RNA, 19 nt, Artificial Sequence
  Description of Artificial Sequence: Synthetic oligonucleotide
uacaauacgaaugccugca

SEQ ID NO: 284728 - RNA, 19 nt, Artificial Sequence
  Description of Artificial Sequence: Synthetic oligonucleotide
ugucuugcaccuuugguaa

SEQ ID NO: 284729 - RNA, 19 nt, Artificial Sequence
  Description of Artificial Sequence: Synthetic oligonucleotide
caugccgcuuaaauaauag

SEQ ID NO: 284730 - RNA, 19 nt, Artificial Sequence
  Description of Artificial Sequence: Synthetic oligonucleotide
ugauauuguagaccagcac

SEQ ID NO: 284731 - RNA, 19 nt, Artificial Sequence
  Description of Artificial Sequence: Synthetic oligonucleotide
aaagaacgggucuucugga

SEQ ID NO: 284732 - RNA, 19 nt, Artificial Sequence
  Description of Artificial Sequence: Synthetic oligonucleotide
ugcaacgaaagaaagccuu

SEQ ID NO: 284733 - RNA, 19 nt, Artificial Sequence
  Description of Artificial Sequence: Synthetic oligonucleotide
gucgauuucacggccagcg

SEQ ID NO: 284734 - RNA, 19 nt, Artificial Sequence
  Description of Artificial Sequence: Synthetic oligonucleotide
auuaaucauuucccuucac

SEQ ID NO: 284735 - RNA, 19 nt, Artificial Sequence
  Description of Artificial Sequence: Synthetic oligonucleotide
ccauguacaacuauccugc

SEQ ID NO: 284736 - RNA, 19 nt, Artificial Sequence
  Description of Artificial Sequence: Synthetic oligonucleotide
auucuuaauucuguaggag

SEQ ID NO: 284737 - RNA, 19 nt, Artificial Sequence
  Description of Artificial Sequence: Synthetic oligonucleotide
aguagugggagagcuauag

SEQ ID NO: 284738 - RNA, 19 nt, Artificial Sequence
  Description of Artificial Sequence: Synthetic oligonucleotide
aaacaucucugaugaguug

SEQ ID NO: 284739 - RNA, 19 nt, Artificial Sequence
  Description of Artificial Sequence: Synthetic oligonucleotide
agagggauacgcauucacc

SEQ ID NO: 284740 - RNA, 19 nt, Artificial Sequence
  Description of Artificial Sequence: Synthetic oligonucleotide
agugaaacucaaaagcaug

SEQ ID NO: 284741 - RNA, 19 nt, Artificial Sequence
  Description of Artificial Sequence: Synthetic oligonucleotide
  modified_base (8)..(8): a, c, u, g, unknown or other
gaaaaucngguuucccuca

SEQ ID NO: 284742 - RNA, 19 nt, Artificial Sequence
  Description of Artificial Sequence: Synthetic oligonucleotide
aagacuucaagagguuuug

SEQ ID NO: 284743 - RNA, 19 nt, Artificial Sequence
  Description of Artificial Sequence: Synthetic oligonucleotide
ugugucuugcaccuuuggu

SEQ ID NO: 284744 - RNA, 19 nt, Artificial Sequence
  Description of Artificial Sequence: Synthetic oligonucleotide
uagcagauaaagaccuuca

SEQ ID NO: 284745 - RNA, 19 nt, Artificial Sequence
  Description of Artificial Sequence: Synthetic oligonucleotide
gacaaccucaaagaaaauc

SEQ ID NO: 284746 - RNA, 19 nt, Artificial Sequence
  Description of Artificial Sequence: Synthetic oligonucleotide
agagacaugccgcuuaaau

SEQ ID NO: 284747 - RNA, 19 nt, Artificial Sequence
  Description of Artificial Sequence: Synthetic oligonucleotide
guuuguaauaggcacaccu

SEQ ID NO: 284748 - RNA, 19 nt, Artificial Sequence
  Description of Artificial Sequence: Synthetic oligonucleotide
gcauguacaauacgaaugc

SEQ ID NO: 284749 - RNA, 19 nt, Artificial Sequence
  Description of Artificial Sequence: Synthetic oligonucleotide
agcaaguuuagaccacaag

SEQ ID NO: 284750 - RNA, 19 nt, Artificial Sequence
  Description of Artificial Sequence: Synthetic oligonucleotide
cucagugucgccucagaag

SEQ ID NO: 284751 - RNA, 19 nt, Artificial Sequence
  Description of Artificial Sequence: Synthetic oligonucleotide
uauauuaauaagggaggaa

SEQ ID NO: 284752 - RNA, 19 nt, Artificial Sequence
  Description of Artificial Sequence: Synthetic oligonucleotide
agaccuucaguucaaccca

SEQ ID NO: 284753 - RNA, 19 nt, Artificial Sequence
  Description of Artificial Sequence: Synthetic oligonucleotide
aguucaacccaggauauga

SEQ ID NO: 284754 - RNA, 19 nt, Artificial Sequence
  Description of Artificial Sequence: Synthetic oligonucleotide
gauuucacggccagcgcgg

SEQ ID NO: 284755 - RNA, 19 nt, Artificial Sequence
  Description of Artificial Sequence: Synthetic oligonucleotide
guaaucuugacaggcaaac

SEQ ID NO: 284756 - RNA, 19 nt, Artificial Sequence
  Description of Artificial Sequence: Synthetic oligonucleotide
cuuguacacaguucgugug

SEQ ID NO: 284757 - RNA, 19 nt, Artificial Sequence
  Description of Artificial Sequence: Synthetic oligonucleotide
ugucuuugcagucggcgcu

SEQ ID NO: 284758 - RNA, 19 nt, Artificial Sequence
  Description of Artificial Sequence: Synthetic oligonucleotide
gaagggacauuccgagagg

SEQ ID NO: 284759 - RNA, 19 nt, Artificial Sequence
  Description of Artificial Sequence: Synthetic oligonucleotide
aguguuacaaaaccuugua

SEQ ID NO: 284760 - RNA, 19 nt, Artificial Sequence
  Description of Artificial Sequence: Synthetic oligonucleotide
ugaacgagacacuugucua

SEQ ID NO: 284761 - RNA, 19 nt, Artificial Sequence
  Description of Artificial Sequence: Synthetic oligonucleotide
augccgcuuaaauaauagg

SEQ ID NO: 284762 - RNA, 19 nt, Artificial Sequence
  Description of Artificial Sequence: Synthetic oligonucleotide
auacgcauucaccuuuaag

SEQ ID NO: 284763 - RNA, 19 nt, Artificial Sequence
  Description of Artificial Sequence: Synthetic oligonucleotide
aaggggacgagggaccagg

SEQ ID NO: 284764 - RNA, 19 nt, Artificial Sequence
  Description of Artificial Sequence: Synthetic oligonucleotide
ucagcgaaggcucguggug

SEQ ID NO: 284765 - RNA, 19 nt, Artificial Sequence
  Description of Artificial Sequence: Synthetic oligonucleotide
acaauacgaaugccugcac

SEQ ID NO: 284766 - RNA, 19 nt, Artificial Sequence
  Description of Artificial Sequence: Synthetic oligonucleotide
uuaaagucugaaugccccu

SEQ ID NO: 284767 - RNA, 19 nt, Artificial Sequence
  Description of Artificial Sequence: Synthetic oligonucleotide
ucagcuuacguuagguaua

SEQ ID NO: 284768 - RNA, 19 nt, Artificial Sequence
  Description of Artificial Sequence: Synthetic oligonucleotide
aaagcauguggcagggaag

SEQ ID NO: 284769 - RNA, 19 nt, Artificial Sequence
  Description of Artificial Sequence: Synthetic oligonucleotide
uguagcaaguuuagaccac

SEQ ID NO: 284770 - RNA, 19 nt, Artificial Sequence
  Description of Artificial Sequence: Synthetic oligonucleotide
accauaugaaauauagcca

SEQ ID NO: 284771 - RNA, 19 nt, Artificial Sequence
  Description of Artificial Sequence: Synthetic oligonucleotide
gaagauucuaugcaacccu

SEQ ID NO: 284772 - RNA, 19 nt, Artificial Sequence
  Description of Artificial Sequence: Synthetic oligonucleotide
agguguacauuuguaaucu

SEQ ID NO: 284773 - RNA, 19 nt, Artificial Sequence
  Description of Artificial Sequence: Synthetic oligonucleotide
agcuaacaaauccacuggu

SEQ ID NO: 284774 - RNA, 19 nt, Artificial Sequence
  Description of Artificial Sequence: Synthetic oligonucleotide
acucgugugaacugcccag

SEQ ID NO: 284775 - RNA, 19 nt, Artificial Sequence
  Description of Artificial Sequence: Synthetic oligonucleotide
gacgcuguuggccaccgug

SEQ ID NO: 284776 - RNA, 19 nt, Artificial Sequence
  Description of Artificial Sequence: Synthetic oligonucleotide
gcuuuuacauguaacaaac

SEQ ID NO: 284777 - RNA, 19 nt, Artificial Sequence
  Description of Artificial Sequence: Synthetic oligonucleotide
guacaauacgaaugccugc

SEQ ID NO: 284778 - RNA, 19 nt, Artificial Sequence
  Description of Artificial Sequence: Synthetic oligonucleotide
uacacuuugcaaacaucuc

SEQ ID NO: 284779 - RNA, 19 nt, Artificial Sequence
  Description of Artificial Sequence: Synthetic oligonucleotide
caguucguguguuucuucc

SEQ ID NO: 284780 - RNA, 19 nt, Artificial Sequence
  Description of Artificial Sequence: Synthetic oligonucleotide
  modified_base (18)..(18): a, c, u, g, unknown or other
aggcaaacaaaggugugng

SEQ ID NO: 284781 - RNA, 19 nt, Artificial Sequence
  Description of Artificial Sequence: Synthetic oligonucleotide
agaaugggagguggggacc

SEQ ID NO: 284782 - RNA, 19 nt, Artificial Sequence
  Description of Artificial Sequence: Synthetic oligonucleotide
uggagagggaugcgaaggc

SEQ ID NO: 284783 - RNA, 19 nt, Artificial Sequence
  Description of Artificial Sequence: Synthetic oligonucleotide
caugcuccgucauacugag

SEQ ID NO: 284784 - RNA, 19 nt, Artificial Sequence
  Description of Artificial Sequence: Synthetic oligonucleotide
  modified_base (2)..(2): a, c, u, g, unknown or other
cngguuucccucagugucg

SEQ ID NO: 284785 - RNA, 19 nt, Artificial Sequence
  Description of Artificial Sequence: Synthetic oligonucleotide
ucugaaugccccucacuac

SEQ ID NO: 284786 - RNA, 19 nt, Artificial Sequence
  Description of Artificial Sequence: Synthetic oligonucleotide
augcauguacaauacgaau

SEQ ID NO: 284787 - RNA, 19 nt, Artificial Sequence
  Description of Artificial Sequence: Synthetic oligonucleotide
ugcauugcuuggcaacaug

SEQ ID NO: 284788 - RNA, 19 nt, Artificial Sequence
  Description of Artificial Sequence: Synthetic oligonucleotide
uacauguaacaaacaugcu

SEQ ID NO: 284789 - RNA, 19 nt, Artificial Sequence
  Description of Artificial Sequence: Synthetic oligonucleotide
aggacugcaaagugucuug

SEQ ID NO: 284790 - RNA, 19 nt, Artificial Sequence
  Description of Artificial Sequence: Synthetic oligonucleotide
  modified_base (6)..(6): a, c, u, g, unknown or other
aaaucngguuucccucagu

SEQ ID NO: 284791 - RNA, 19 nt, Artificial Sequence
  Description of Artificial Sequence: Synthetic oligonucleotide
aaccuuagcaucagcacaa

SEQ ID NO: 284792 - RNA, 19 nt, Artificial Sequence
  Description of Artificial Sequence: Synthetic oligonucleotide
cuaugcaacccugaagaug

SEQ ID NO: 284793 - RNA, 19 nt, Artificial Sequence
  Description of Artificial Sequence: Synthetic oligonucleotide
guagugggagagcuauagg

SEQ ID NO: 284794 - RNA, 19 nt, Artificial Sequence
  Description of Artificial Sequence: Synthetic oligonucleotide
cuguuuguaauaggcacac

SEQ ID NO: 284795 - RNA, 19 nt, Artificial Sequence
  Description of Artificial Sequence: Synthetic oligonucleotide
uggagcuaacaaauccacu

SEQ ID NO: 284796 - RNA, 19 nt, Artificial Sequence
  Description of Artificial Sequence: Synthetic oligonucleotide
caugacucgugugaacugc

SEQ ID NO: 284797 - RNA, 19 nt, Artificial Sequence
  Description of Artificial Sequence: Synthetic oligonucleotide
caugcucuuuccauauaug

SEQ ID NO: 284798 - RNA, 19 nt, Artificial Sequence
  Description of Artificial Sequence: Synthetic oligonucleotide
cauuccgagaggcaaucug

SEQ ID NO: 284799 - RNA, 19 nt, Artificial Sequence
  Description of Artificial Sequence: Synthetic oligonucleotide
ugauuacaauuuugugucu

SEQ ID NO: 284800 - RNA, 19 nt, Artificial Sequence
  Description of Artificial Sequence: Synthetic oligonucleotide
uguuugccauuacuaacau

SEQ ID NO: 284801 - RNA, 19 nt, Artificial Sequence
  Description of Artificial Sequence: Synthetic oligonucleotide
cucaugaacgagacacuug

SEQ ID NO: 284802 - RNA, 19 nt, Artificial Sequence
  Description of Artificial Sequence: Synthetic oligonucleotide
accaaggcgagcagaaggg

SEQ ID NO: 284803 - RNA, 19 nt, Artificial Sequence
  Description of Artificial Sequence: Synthetic oligonucleotide
gagacaugccgcuuaaaua

SEQ ID NO: 284804 - RNA, 19 nt, Artificial Sequence
  Description of Artificial Sequence: Synthetic oligonucleotide
acacuaagagcugugugca

SEQ ID NO: 284805 - RNA, 19 nt, Artificial Sequence
  Description of Artificial Sequence: Synthetic oligonucleotide
  modified_base (4)..(4): a, c, u, g, unknown or other
aucngguuucccucagugu

SEQ ID NO: 284806 - RNA, 19 nt, Artificial Sequence
  Description of Artificial Sequence: Synthetic oligonucleotide
guagauaggaacuuauauu

SEQ ID NO: 284807 - RNA, 19 nt, Artificial Sequence
  Description of Artificial Sequence: Synthetic oligonucleotide
gucuagaaggguuuuccga

SEQ ID NO: 284808 - RNA, 19 nt, Artificial Sequence
  Description of Artificial Sequence: Synthetic oligonucleotide
guuggagcuaacaaaucca

SEQ ID NO: 284809 - RNA, 19 nt, Artificial Sequence
  Description of Artificial Sequence: Synthetic oligonucleotide
uaaucuugacaggcaaaca

SEQ ID NO: 284810 - RNA, 19 nt, Artificial Sequence
  Description of Artificial Sequence: Synthetic oligonucleotide
agggcaugcaacgaaagaa

SEQ ID NO: 284811 - RNA, 19 nt, Artificial Sequence
  Description of Artificial Sequence: Synthetic oligonucleotide
auacgaaugccugcacagg

SEQ ID NO: 284812 - RNA, 19 nt, Artificial Sequence
  Description of Artificial Sequence: Synthetic oligonucleotide
ucgugucuuguacacaguu

SEQ ID NO: 284813 - RNA, 19 nt, Artificial Sequence
  Description of Artificial Sequence: Synthetic oligonucleotide
ucgccucagaagaauggga

SEQ ID NO: 284814 - RNA, 19 nt, Artificial Sequence
  Description of Artificial Sequence: Synthetic oligonucleotide
caugcauguacaauacgaa

SEQ ID NO: 284815 - RNA, 19 nt, Artificial Sequence
  Description of Artificial Sequence: Synthetic oligonucleotide
aaggacugcaaagugucuu

SEQ ID NO: 284816 - RNA, 19 nt, Artificial Sequence
  Description of Artificial Sequence: Synthetic oligonucleotide
ugacucgugugaacugccc

SEQ ID NO: 284817 - RNA, 19 nt, Artificial Sequence
  Description of Artificial Sequence: Synthetic oligonucleotide
gaacgagacacuugucuaa

SEQ ID NO: 284818 - RNA, 19 nt, Artificial Sequence
  Description of Artificial Sequence: Synthetic oligonucleotide
agagggaugcgaaggcuac

SEQ ID NO: 284819 - RNA, 19 nt, Artificial Sequence
  Description of Artificial Sequence: Synthetic oligonucleotide
acgaaugccugcacagggc

SEQ ID NO: 284820 - RNA, 19 nt, Artificial Sequence
  Description of Artificial Sequence: Synthetic oligonucleotide
ugcaaacagcagcccuugg

SEQ ID NO: 284821 - RNA, 19 nt, Artificial Sequence
  Description of Artificial Sequence: Synthetic oligonucleotide
ggaugcgaaggcuaccucc

SEQ ID NO: 284822 - RNA, 19 nt, Artificial Sequence
  Description of Artificial Sequence: Synthetic oligonucleotide
agaaaacacuaugaguaaa

SEQ ID NO: 284823 - RNA, 19 nt, Artificial Sequence
  Description of Artificial Sequence: Synthetic oligonucleotide
augacucgugugaacugcc

SEQ ID NO: 284824 - RNA, 19 nt, Artificial Sequence
  Description of Artificial Sequence: Synthetic oligonucleotide
ucgauuucacggccagcgc

SEQ ID NO: 284825 - RNA, 19 nt, Artificial Sequence
  Description of Artificial Sequence: Synthetic oligonucleotide
gucgccucagaagaauggg

SEQ ID NO: 284826 - RNA, 19 nt, Artificial Sequence
  Description of Artificial Sequence: Synthetic oligonucleotide
gucuuguacacaguucgug

SEQ ID NO: 284827 - RNA, 19 nt, Artificial Sequence
  Description of Artificial Sequence: Synthetic oligonucleotide
augggcgucaggaucaucu

SEQ ID NO: 284828 - RNA, 19 nt, Artificial Sequence
  Description of Artificial Sequence: Synthetic oligonucleotide
ucuaugcaacccugaagau

SEQ ID NO: 284829 - RNA, 19 nt, Artificial Sequence
  Description of Artificial Sequence: Synthetic oligonucleotide
uacaacuauccugcugcag

SEQ ID NO: 284830 - RNA, 19 nt, Artificial Sequence
  Description of Artificial Sequence: Synthetic oligonucleotide
aagaccccauucuguaaaa

SEQ ID NO: 284831 - RNA, 19 nt, Artificial Sequence
  Description of Artificial Sequence: Synthetic oligonucleotide
aacgagacacuugucuaaa

SEQ ID NO: 284832 - RNA, 19 nt, Artificial Sequence
  Description of Artificial Sequence: Synthetic oligonucleotide
aucagcgaaggcucguggu

SEQ ID NO: 284833 - RNA, 19 nt, Artificial Sequence
  Description of Artificial Sequence: Synthetic oligonucleotide
guuuagaccacaagggugu

SEQ ID NO: 284834 - RNA, 19 nt, Artificial Sequence
  Description of Artificial Sequence: Synthetic oligonucleotide
guauaucuguauaucagua

SEQ ID NO: 284835 - RNA, 19 nt, Artificial Sequence
  Description of Artificial Sequence: Synthetic oligonucleotide
accguggcacugucuuugc

SEQ ID NO: 284836 - RNA, 19 nt, Artificial Sequence
  Description of Artificial Sequence: Synthetic oligonucleotide
gucagcuuacguuagguau

SEQ ID NO: 284837 - RNA, 19 nt, Artificial Sequence
  Description of Artificial Sequence: Synthetic oligonucleotide
ugcaaacaucucugaugag

SEQ ID NO: 284838 - RNA, 19 nt, Artificial Sequence
  Description of Artificial Sequence: Synthetic oligonucleotide
uggcaacaugaacuaggca

SEQ ID NO: 284839 - RNA, 19 nt, Artificial Sequence
  Description of Artificial Sequence: Synthetic oligonucleotide
uuuccccaugacucgugug

SEQ ID NO: 284840 - RNA, 19 nt, Artificial Sequence
  Description of Artificial Sequence: Synthetic oligonucleotide
caucagcacaagcuacaag

SEQ ID NO: 284841 - RNA, 19 nt, Artificial Sequence
  Description of Artificial Sequence: Synthetic oligonucleotide
gacucgugugaacugccca

SEQ ID NO: 284842 - RNA, 19 nt, Artificial Sequence
  Description of Artificial Sequence: Synthetic oligonucleotide
uagcaaguuuagaccacaa

SEQ ID NO: 284843 - RNA, 19 nt, Artificial Sequence
  Description of Artificial Sequence: Synthetic oligonucleotide
gucgauauccugauauguc

SEQ ID NO: 284844 - RNA, 19 nt, Artificial Sequence
  Description of Artificial Sequence: Synthetic oligonucleotide
uccucccagagggauacgc

SEQ ID NO: 284845 - RNA, 19 nt, Artificial Sequence
  Description of Artificial Sequence: Synthetic oligonucleotide
aaaggacugcaaagugucu

SEQ ID NO: 284846 - RNA, 19 nt, Artificial Sequence
  Description of Artificial Sequence: Synthetic oligonucleotide
agugucuuggaagauucua

SEQ ID NO: 284847 - RNA, 19 nt, Artificial Sequence
  Description of Artificial Sequence: Synthetic oligonucleotide
auuguggagguccggucaa

SEQ ID NO: 284848 - RNA, 19 nt, Artificial Sequence
  Description of Artificial Sequence: Synthetic oligonucleotide
uggacggagcugugggugc

SEQ ID NO: 284849 - RNA, 19 nt, Artificial Sequence
  Description of Artificial Sequence: Synthetic oligonucleotide
cuggacacuaagagcugug

SEQ ID NO: 284850 - RNA, 19 nt, Artificial Sequence
  Description of Artificial Sequence: Synthetic oligonucleotide
aggcaaucugguacugucg

SEQ ID NO: 284851 - RNA, 19 nt, Artificial Sequence
  Description of Artificial Sequence: Synthetic oligonucleotide
aggauaugagagagcuugg

SEQ ID NO: 284852 - RNA, 19 nt, Artificial Sequence
  Description of Artificial Sequence: Synthetic oligonucleotide
ggcaugcauguacaauacg

SEQ ID NO: 284853 - RNA, 19 nt, Artificial Sequence
  Description of Artificial Sequence: Synthetic oligonucleotide
acaagcuacaagaggcaca

SEQ ID NO: 284854 - RNA, 19 nt, Artificial Sequence
  Description of Artificial Sequence: Synthetic oligonucleotide
ugagagagcuuggugcaaa

SEQ ID NO: 284855 - RNA, 19 nt, Artificial Sequence
  Description of Artificial Sequence: Synthetic oligonucleotide
cuagguguacauuuguaau

SEQ ID NO: 284856 - RNA, 19 nt, Artificial Sequence
  Description of Artificial Sequence: Synthetic oligonucleotide
ugucguggguuccgucugc

SEQ ID NO: 284857 - RNA, 19 nt, Artificial Sequence
  Description of Artificial Sequence: Synthetic oligonucleotide
agucgauuucacggccagc

SEQ ID NO: 284858 - RNA, 19 nt, Artificial Sequence
  Description of Artificial Sequence: Synthetic oligonucleotide
cuagauuguggagguccgg

SEQ ID NO: 284859 - RNA, 19 nt, Artificial Sequence
  Description of Artificial Sequence: Synthetic oligonucleotide
auauccugauaugucuaga

SEQ ID NO: 284860 - RNA, 19 nt, Artificial Sequence
  Description of Artificial Sequence: Synthetic oligonucleotide
aacaugcucuuuccauaua

SEQ ID NO: 284861 - RNA, 19 nt, Artificial Sequence
  Description of Artificial Sequence: Synthetic oligonucleotide
gcuagguguacauuuguaa

SEQ ID NO: 284862 - RNA, 19 nt, Artificial Sequence
  Description of Artificial Sequence: Synthetic oligonucleotide
ggcaugcaacgaaagaaag

SEQ ID NO: 284863 - RNA, 19 nt, Artificial Sequence
  Description of Artificial Sequence: Synthetic oligonucleotide
gcuuaaauaauaggacuuc

SEQ ID NO: 284864 - RNA, 19 nt, Artificial Sequence
  Description of Artificial Sequence: Synthetic oligonucleotide
ccgagaggcaaucugguac

SEQ ID NO: 284865 - RNA, 19 nt, Artificial Sequence
  Description of Artificial Sequence: Synthetic oligonucleotide
gcgacaaccucaaagaaaa

SEQ ID NO: 284866 - RNA, 19 nt, Artificial Sequence
  Description of Artificial Sequence: Synthetic oligonucleotide
cagucgauuucacggccag

SEQ ID NO: 284867 - RNA, 19 nt, Artificial Sequence
  Description of Artificial Sequence: Synthetic oligonucleotide
cucgugugaacugcccagg

SEQ ID NO: 284868 - RNA, 19 nt, Artificial Sequence
  Description of Artificial Sequence: Synthetic oligonucleotide
gguuuuccgagggaaagac

SEQ ID NO: 284869 - RNA, 19 nt, Artificial Sequence
  Description of Artificial Sequence: Synthetic oligonucleotide
uugcagucggcgcuuggau

SEQ ID NO: 284870 - RNA, 19 nt, Artificial Sequence
  Description of Artificial Sequence: Synthetic oligonucleotide
ugggcgucaggaucaucug

SEQ ID NO: 284871 - RNA, 19 nt, Artificial Sequence
  Description of Artificial Sequence: Synthetic oligonucleotide
gcuaacaaauccacuggug

SEQ ID NO: 284872 - RNA, 19 nt, Artificial Sequence
  Description of Artificial Sequence: Synthetic oligonucleotide
gccgcuuaaauaauaggac

SEQ ID NO: 284873 - RNA, 19 nt, Artificial Sequence
  Description of Artificial Sequence: Synthetic oligonucleotide
ugcacacuuuccccaugac

SEQ ID NO: 284874 - RNA, 19 nt, Artificial Sequence
  Description of Artificial Sequence: Synthetic oligonucleotide
auucaccuuuaagucaaga

SEQ ID NO: 284875 - RNA, 19 nt, Artificial Sequence
  Description of Artificial Sequence: Synthetic oligonucleotide
guagcaaguuuagaccaca

SEQ ID NO: 284876 - RNA, 19 nt, Artificial Sequence
  Description of Artificial Sequence: Synthetic oligonucleotide
agcgacaaccucaaagaaa

SEQ ID NO: 284877 - RNA, 19 nt, Artificial Sequence
  Description of Artificial Sequence: Synthetic oligonucleotide
caugaacgagacacuuguc

SEQ ID NO: 284878 - RNA, 19 nt, Artificial Sequence
  Description of Artificial Sequence: Synthetic oligonucleotide
aagcuguagauaggaacuu

SEQ ID NO: 284879 - RNA, 19 nt, Artificial Sequence
  Description of Artificial Sequence: Synthetic oligonucleotide
agggaugcgaaggcuaccu

SEQ ID NO: 284880 - RNA, 19 nt, Artificial Sequence
  Description of Artificial Sequence: Synthetic oligonucleotide
cugggucuacaaaccuuag

SEQ ID NO: 284881 - RNA, 19 nt, Artificial Sequence
  Description of Artificial Sequence: Synthetic oligonucleotide
guuuuccgagggaaagacc

SEQ ID NO: 284882 - RNA, 19 nt, Artificial Sequence
  Description of Artificial Sequence: Synthetic oligonucleotide
uccgagggaaagaccgaaa

SEQ ID NO: 284883 - RNA, 19 nt, Artificial Sequence
  Description of Artificial Sequence: Synthetic oligonucleotide
uuggcagcgguguggcgcu

SEQ ID NO: 284884 - RNA, 19 nt, Artificial Sequence
  Description of Artificial Sequence: Synthetic oligonucleotide
agggauacgcauucaccuu

SEQ ID NO: 284885 - RNA, 19 nt, Artificial Sequence
  Description of Artificial Sequence: Synthetic oligonucleotide
aaggcucgugguggcgcgc

SEQ ID NO: 284886 - RNA, 19 nt, Artificial Sequence
  Description of Artificial Sequence: Synthetic oligonucleotide
gcuauaggccuugaugggc

SEQ ID NO: 284887 - RNA, 19 nt, Artificial Sequence
  Description of Artificial Sequence: Synthetic oligonucleotide
ucccuucacucucaauaua

SEQ ID NO: 284888 - RNA, 19 nt, Artificial Sequence
  Description of Artificial Sequence: Synthetic oligonucleotide
cgagacacuugucuaaaag

SEQ ID NO: 284889 - RNA, 19 nt, Artificial Sequence
  Description of Artificial Sequence: Synthetic oligonucleotide
acugacugugacgcuguug

SEQ ID NO: 284890 - RNA, 19 nt, Artificial Sequence
  Description of Artificial Sequence: Synthetic oligonucleotide
acaggcaaacaaaggugug

SEQ ID NO: 284891 - RNA, 19 nt, Artificial Sequence
  Description of Artificial Sequence: Synthetic oligonucleotide
cauucaccuuuaagucaag

SEQ ID NO: 284892 - RNA, 19 nt, Artificial Sequence
  Description of Artificial Sequence: Synthetic oligonucleotide
ucggcgcuuggauucucug

SEQ ID NO: 284893 - RNA, 19 nt, Artificial Sequence
  Description of Artificial Sequence: Synthetic oligonucleotide
ugugacgcuguuggccacc

SEQ ID NO: 284894 - RNA, 19 nt, Artificial Sequence
  Description of Artificial Sequence: Synthetic oligonucleotide
ggaccagggaaaaggacug

SEQ ID NO: 284895 - RNA, 19 nt, Artificial Sequence
  Description of Artificial Sequence: Synthetic oligonucleotide
agugucgccucagaagaau

SEQ ID NO: 284896 - RNA, 19 nt, Artificial Sequence
  Description of Artificial Sequence: Synthetic oligonucleotide
ucccagagggauacgcauu

SEQ ID NO: 284897 - RNA, 19 nt, Artificial Sequence
  Description of Artificial Sequence: Synthetic oligonucleotide
  modified_base (19)..(19): a, c, u, g, unknown or other
caggcaaacaaaggugugn

SEQ ID NO: 284898 - RNA, 19 nt, Artificial Sequence
  Description of Artificial Sequence: Synthetic oligonucleotide
ccgagggaaagaccgaaag

SEQ ID NO: 284899 - RNA, 19 nt, Artificial Sequence
  Description of Artificial Sequence: Synthetic oligonucleotide
agccuguuguugaugucag

SEQ ID NO: 284900 - RNA, 19 nt, Artificial Sequence
  Description of Artificial Sequence: Synthetic oligonucleotide
caccguggcacugucuuug

SEQ ID NO: 284901 - RNA, 19 nt, Artificial Sequence
  Description of Artificial Sequence: Synthetic oligonucleotide
cgucaggaucaucugaugc

SEQ ID NO: 284902 - RNA, 19 nt, Artificial Sequence
  Description of Artificial Sequence: Synthetic oligonucleotide
ugggagagcuauaggccuu

SEQ ID NO: 284903 - RNA, 19 nt, Artificial Sequence
  Description of Artificial Sequence: Synthetic oligonucleotide
cacuaagagcugugugcac

SEQ ID NO: 284904 - RNA, 19 nt, Artificial Sequence
  Description of Artificial Sequence: Synthetic oligonucleotide
auauugcuugcuggauuug

SEQ ID NO: 284905 - RNA, 19 nt, Artificial Sequence
  Description of Artificial Sequence: Synthetic oligonucleotide
gugcacacuuuccccauga

SEQ ID NO: 284906 - RNA, 19 nt, Artificial Sequence
  Description of Artificial Sequence: Synthetic oligonucleotide
uccgagaggcaaucuggua

SEQ ID NO: 284907 - RNA, 19 nt, Artificial Sequence
  Description of Artificial Sequence: Synthetic oligonucleotide
ugcagucggcgcuuggauu

SEQ ID NO: 284908 - RNA, 19 nt, Artificial Sequence
  Description of Artificial Sequence: Synthetic oligonucleotide
auaggacuucaggaucucu

SEQ ID NO: 284909 - RNA, 19 nt, Artificial Sequence
  Description of Artificial Sequence: Synthetic oligonucleotide
guacaacuauccugcugca

SEQ ID NO: 284910 - RNA, 19 nt, Artificial Sequence
  Description of Artificial Sequence: Synthetic oligonucleotide
gauacgcauucaccuuuaa

SEQ ID NO: 284911 - RNA, 19 nt, Artificial Sequence
  Description of Artificial Sequence: Synthetic oligonucleotide
augcaacgaaagaaagccu

SEQ ID NO: 284912 - RNA, 19 nt, Artificial Sequence
  Description of Artificial Sequence: Synthetic oligonucleotide
cguuagguauaaauaugug

SEQ ID NO: 284913 - RNA, 19 nt, Artificial Sequence
  Description of Artificial Sequence: Synthetic oligonucleotide
gguuccgucugcccaugcc

SEQ ID NO: 284914 - RNA, 19 nt, Artificial Sequence
  Description of Artificial Sequence: Synthetic oligonucleotide
uuucuagauuguggagguc

SEQ ID NO: 284915 - RNA, 19 nt, Artificial Sequence
  Description of Artificial Sequence: Synthetic oligonucleotide
agacccgcagaagacccca

SEQ ID NO: 284916 - RNA, 19 nt, Artificial Sequence
  Description of Artificial Sequence: Synthetic oligonucleotide
gcgccucaggaguaguggg

SEQ ID NO: 284917 - RNA, 19 nt, Artificial Sequence
  Description of Artificial Sequence: Synthetic oligonucleotide
agugguuaucacagcucca

SEQ ID NO: 284918 - RNA, 19 nt, Artificial Sequence
  Description of Artificial Sequence: Synthetic oligonucleotide
gcauugcuuggcaacauga

SEQ ID NO: 284919 - RNA, 19 nt, Artificial Sequence
  Description of Artificial Sequence: Synthetic oligonucleotide
ggauucucugggcccauca

SEQ ID NO: 284920 - RNA, 19 nt, Artificial Sequence
  Description of Artificial Sequence: Synthetic oligonucleotide
ucuuugcagucggcgcuug

SEQ ID NO: 284921 - RNA, 19 nt, Artificial Sequence
  Description of Artificial Sequence: Synthetic oligonucleotide
ccuuagcaucagcacaagc

SEQ ID NO: 284922 - RNA, 19 nt, Artificial Sequence
  Description of Artificial Sequence: Synthetic oligonucleotide
uacuaacauuccugcuuuu

SEQ ID NO: 284923 - RNA, 19 nt, Artificial Sequence
  Description of Artificial Sequence: Synthetic oligonucleotide
agcuguagauaggaacuua

SEQ ID NO: 284924 - RNA, 19 nt, Artificial Sequence
  Description of Artificial Sequence: Synthetic oligonucleotide
gcaaucugguacugucgug

SEQ ID NO: 284925 - RNA, 19 nt, Artificial Sequence
  Description of Artificial Sequence: Synthetic oligonucleotide
cuuuguucacuaacuuuau

SEQ ID NO: 284926 - RNA, 19 nt, Artificial Sequence
  Description of Artificial Sequence: Synthetic oligonucleotide
gucuugcaccuuugguaac

SEQ ID NO: 284927 - RNA, 19 nt, Artificial Sequence
  Description of Artificial Sequence: Synthetic oligonucleotide
cacucucaauauaaccaua

SEQ ID NO: 284928 - RNA, 19 nt, Artificial Sequence
  Description of Artificial Sequence: Synthetic oligonucleotide
cccuucacucucaauauaa

SEQ ID NO: 284929 - RNA, 19 nt, Artificial Sequence
  Description of Artificial Sequence: Synthetic oligonucleotide
uuuagaccacaaggguguu

SEQ ID NO: 284930 - RNA, 19 nt, Artificial Sequence
  Description of Artificial Sequence: Synthetic oligonucleotide
caacuauccugcugcaggu

SEQ ID NO: 284931 - RNA, 19 nt, Artificial Sequence
  Description of Artificial Sequence: Synthetic oligonucleotide
ggcaaucugguacugucgu

SEQ ID NO: 284932 - RNA, 19 nt, Artificial Sequence
  Description of Artificial Sequence: Synthetic oligonucleotide
uuucacggccagcgcgguc

SEQ ID NO: 284933 - RNA, 19 nt, Artificial Sequence
  Description of Artificial Sequence: Synthetic oligonucleotide
cuggcgccggcugaggcac

SEQ ID NO: 284934 - RNA, 19 nt, Artificial Sequence
  Description of Artificial Sequence: Synthetic oligonucleotide
cugggcuagguguacauuu

SEQ ID NO: 284935 - RNA, 19 nt, Artificial Sequence
  Description of Artificial Sequence: Synthetic oligonucleotide
aacgggucuucuggacgga

SEQ ID NO: 284936 - RNA, 19 nt, Artificial Sequence
  Description of Artificial Sequence: Synthetic oligonucleotide
gugguuaucacagcuccau

SEQ ID NO: 284937 - RNA, 19 nt, Artificial Sequence
  Description of Artificial Sequence: Synthetic oligonucleotide
acaugccgcuuaaauaaua

SEQ ID NO: 284938 - RNA, 19 nt, Artificial Sequence
  Description of Artificial Sequence: Synthetic oligonucleotide
ccaugauauuguagaccag

SEQ ID NO: 284939 - RNA, 19 nt, Artificial Sequence
  Description of Artificial Sequence: Synthetic oligonucleotide
acgagggaccagggaaaag

SEQ ID NO: 284940 - RNA, 19 nt, Artificial Sequence
  Description of Artificial Sequence: Synthetic oligonucleotide
cagcgacaaccucaaagaa

SEQ ID NO: 284941 - RNA, 19 nt, Artificial Sequence
  Description of Artificial Sequence: Synthetic oligonucleotide
ggucuacaaaccuuagcau

SEQ ID NO: 284942 - RNA, 19 nt, Artificial Sequence
  Description of Artificial Sequence: Synthetic oligonucleotide
cguguguuucuuccuacug

SEQ ID NO: 284943 - RNA, 19 nt, Artificial Sequence
  Description of Artificial Sequence: Synthetic oligonucleotide
gggcaugcaacgaaagaaa

SEQ ID NO: 284944 - RNA, 19 nt, Artificial Sequence
  Description of Artificial Sequence: Synthetic oligonucleotide
ccgcuuaaauaauaggacu

SEQ ID NO: 284945 - RNA, 19 nt, Artificial Sequence
  Description of Artificial Sequence: Synthetic oligonucleotide
auuucacggccagcgcggu

SEQ ID NO: 284946 - RNA, 19 nt, Artificial Sequence
  Description of Artificial Sequence: Synthetic oligonucleotide
gucguggguuccgucugcc

SEQ ID NO: 284947 - RNA, 19 nt, Artificial Sequence
  Description of Artificial Sequence: Synthetic oligonucleotide
caucacccaugauauugua

SEQ ID NO: 284948 - RNA, 19 nt, Artificial Sequence
  Description of Artificial Sequence: Synthetic oligonucleotide
ggucagcuuacguuaggua

SEQ ID NO: 284949 - RNA, 19 nt, Artificial Sequence
  Description of Artificial Sequence: Synthetic oligonucleotide
ggguguugucacugguaac

SEQ ID NO: 284950 - RNA, 19 nt, Artificial Sequence
  Description of Artificial Sequence: Synthetic oligonucleotide
cagcuuacguuagguauaa

SEQ ID NO: 284951 - RNA, 19 nt, Artificial Sequence
  Description of Artificial Sequence: Synthetic oligonucleotide
gcgucaggaucaucugaug

SEQ ID NO: 284952 - RNA, 19 nt, Artificial Sequence
  Description of Artificial Sequence: Synthetic oligonucleotide
gguggcgcgccucaggagu

SEQ ID NO: 284953 - RNA, 19 nt, Artificial Sequence
  Description of Artificial Sequence: Synthetic oligonucleotide
cagccagcgacaaccucaa

SEQ ID NO: 284954 - RNA, 19 nt, Artificial Sequence
  Description of Artificial Sequence: Synthetic oligonucleotide
acccgcagaagaccccauu

SEQ ID NO: 284955 - RNA, 19 nt, Artificial Sequence
  Description of Artificial Sequence: Synthetic oligonucleotide
cugagcacccugggucuac

SEQ ID NO: 284956 - RNA, 19 nt, Artificial Sequence
  Description of Artificial Sequence: Synthetic oligonucleotide
gggagagcuauaggccuug

SEQ ID NO: 284957 - RNA, 19 nt, Artificial Sequence
  Description of Artificial Sequence: Synthetic oligonucleotide
cauguacaacuauccugcu

SEQ ID NO: 284958 - RNA, 19 nt, Artificial Sequence
  Description of Artificial Sequence: Synthetic oligonucleotide
ggacggagcugugggugcg

SEQ ID NO: 284959 - RNA, 19 nt, Artificial Sequence
  Description of Artificial Sequence: Synthetic oligonucleotide
agucggcgcuuggauucuc

SEQ ID NO: 284960 - RNA, 19 nt, Artificial Sequence
  Description of Artificial Sequence: Synthetic oligonucleotide
ugacgcuguuggccaccgu

SEQ ID NO: 284961 - RNA, 19 nt, Artificial Sequence
  Description of Artificial Sequence: Synthetic oligonucleotide
uggcgcgccucaggaguag

SEQ ID NO: 284962 - RNA, 19 nt, Artificial Sequence
  Description of Artificial Sequence: Synthetic oligonucleotide
augcgaaggcuaccuccuu

SEQ ID NO: 284963 - RNA, 19 nt, Artificial Sequence
  Description of Artificial Sequence: Synthetic oligonucleotide
gacaugccgcuuaaauaau

SEQ ID NO: 284964 - RNA, 19 nt, Artificial Sequence
  Description of Artificial Sequence: Synthetic oligonucleotide
ggauaugagagagcuuggu

SEQ ID NO: 284965 - RNA, 19 nt, Artificial Sequence
  Description of Artificial Sequence: Synthetic oligonucleotide
gggauacgcauucaccuuu

SEQ ID NO: 284966 - RNA, 19 nt, Artificial Sequence
  Description of Artificial Sequence: Synthetic oligonucleotide
gggcccaucagcgaaggcu

SEQ ID NO: 284967 - RNA, 19 nt, Artificial Sequence
  Description of Artificial Sequence: Synthetic oligonucleotide
gcuccgucauacugaggca

SEQ ID NO: 284968 - RNA, 19 nt, Artificial Sequence
  Description of Artificial Sequence: Synthetic oligonucleotide
guagaccagcacugugccu

SEQ ID NO: 284969 - RNA, 19 nt, Artificial Sequence
  Description of Artificial Sequence: Synthetic oligonucleotide
augcuccgucauacugagg

SEQ ID NO: 284970 - RNA, 19 nt, Artificial Sequence
  Description of Artificial Sequence: Synthetic oligonucleotide
cagugucgccucagaagaa

SEQ ID NO: 284971 - RNA, 19 nt, Artificial Sequence
  Description of Artificial Sequence: Synthetic oligonucleotide
caacgaaagaaagccuuuu

SEQ ID NO: 284972 - RNA, 19 nt, Artificial Sequence
  Description of Artificial Sequence: Synthetic oligonucleotide
gggaugcgaaggcuaccuc

SEQ ID NO: 284973 - RNA, 19 nt, Artificial Sequence
  Description of Artificial Sequence: Synthetic oligonucleotide
  modified_base (15)..(15): a, c, u, g, unknown or other
ccucaaagaaaaucngguu

SEQ ID NO: 284974 - RNA, 19 nt, Artificial Sequence
  Description of Artificial Sequence: Synthetic oligonucleotide
ggcuagguguacauuugua

SEQ ID NO: 284975 - RNA, 19 nt, Artificial Sequence
  Description of Artificial Sequence: Synthetic oligonucleotide
gcagucgauuucacggcca

SEQ ID NO: 284976 - RNA, 19 nt, Artificial Sequence
  Description of Artificial Sequence: Synthetic oligonucleotide
cgcgccucaggaguagugg

SEQ ID NO: 284977 - RNA, 19 nt, Artificial Sequence
  Description of Artificial Sequence: Synthetic oligonucleotide
gucugucgauauccugaua

SEQ ID NO: 284978 - RNA, 19 nt, Artificial Sequence
  Description of Artificial Sequence: Synthetic oligonucleotide
ccaucagcgaaggcucgug

SEQ ID NO: 284979 - RNA, 19 nt, Artificial Sequence
  Description of Artificial Sequence: Synthetic oligonucleotide
ccacggagcuggcugucug

SEQ ID NO: 284980 - RNA, 19 nt, Artificial Sequence
  Description of Artificial Sequence: Synthetic oligonucleotide
gcccaucagcgaaggcucg

SEQ ID NO: 284981 - RNA, 19 nt, Artificial Sequence
  Description of Artificial Sequence: Synthetic oligonucleotide
auccuggguagcagauaaa

SEQ ID NO: 284982 - RNA, 19 nt, Artificial Sequence
  Description of Artificial Sequence: Synthetic oligonucleotide
gcgaaggcucgugguggcg

SEQ ID NO: 284983 - RNA, 19 nt, Artificial Sequence
  Description of Artificial Sequence: Synthetic oligonucleotide
ggauacgcauucaccuuua

SEQ ID NO: 284984 - RNA, 19 nt, Artificial Sequence
  Description of Artificial Sequence: Synthetic oligonucleotide
cuccucccagagggauacg

SEQ ID NO: 284985 - RNA, 19 nt, Artificial Sequence
  Description of Artificial Sequence: Synthetic oligonucleotide
guauaucaguaaagcuuuu

SEQ ID NO: 284986 - RNA, 19 nt, Artificial Sequence
  Description of Artificial Sequence: Synthetic oligonucleotide
ccccaucgcagcugcucag

SEQ ID NO: 284987 - RNA, 19 nt, Artificial Sequence
  Description of Artificial Sequence: Synthetic oligonucleotide
cagcgcggucacucucauc

SEQ ID NO: 284988 - RNA, 19 nt, Artificial Sequence
  Description of Artificial Sequence: Synthetic oligonucleotide
ccucagugucgccucagaa

SEQ ID NO: 284989 - RNA, 19 nt, Artificial Sequence
  Description of Artificial Sequence: Synthetic oligonucleotide
gguguacauuuguaaucuu

SEQ ID NO: 284990 - RNA, 19 nt, Artificial Sequence
  Description of Artificial Sequence: Synthetic oligonucleotide
cacaguucguguguuucuu

SEQ ID NO: 284991 - RNA, 19 nt, Artificial Sequence
  Description of Artificial Sequence: Synthetic oligonucleotide
cacuuuccccaugacucgu

SEQ ID NO: 284992 - RNA, 19 nt, Artificial Sequence
  Description of Artificial Sequence: Synthetic oligonucleotide
agccagcgacaaccucaaa

SEQ ID NO: 284993 - RNA, 19 nt, Artificial Sequence
  Description of Artificial Sequence: Synthetic oligonucleotide
ggagagcuauaggccuuga

SEQ ID NO: 284994 - RNA, 19 nt, Artificial Sequence
  Description of Artificial Sequence: Synthetic oligonucleotide
ccaaagacuucaagagguu

SEQ ID NO: 284995 - RNA, 19 nt, Artificial Sequence
  Description of Artificial Sequence: Synthetic oligonucleotide
gucuuugcagucggcgcuu

SEQ ID NO: 284996 - RNA, 19 nt, Artificial Sequence
  Description of Artificial Sequence: Synthetic oligonucleotide
gcaaagugucuuggaagau

SEQ ID NO: 284997 - RNA, 19 nt, Artificial Sequence
  Description of Artificial Sequence: Synthetic oligonucleotide
gucggcgcuuggauucucu

SEQ ID NO: 284998 - RNA, 19 nt, Artificial Sequence
  Description of Artificial Sequence: Synthetic oligonucleotide
ggcgccggcugaggcacug

SEQ ID NO: 284999 - RNA, 19 nt, Artificial Sequence
  Description of Artificial Sequence: Synthetic oligonucleotide
guggcgcgccucaggagua

SEQ ID NO: 285000 - RNA, 19 nt, Artificial Sequence
  Description of Artificial Sequence: Synthetic oligonucleotide
gcacugacugugacgcugu

SEQ ID NO: 285001 - RNA, 19 nt, Artificial Sequence
  Description of Artificial Sequence: Synthetic oligonucleotide
gguagcagauaaagaccuu

SEQ ID NO: 285002 - RNA, 19 nt, Artificial Sequence
  Description of Artificial Sequence: Synthetic oligonucleotide
ccucaugaacgagacacuu

SEQ ID NO: 285003 - RNA, 19 nt, Artificial Sequence
  Description of Artificial Sequence: Synthetic oligonucleotide
ccagagggauacgcauuca

SEQ ID NO: 285004 - RNA, 19 nt, Artificial Sequence
  Description of Artificial Sequence: Synthetic oligonucleotide
ggcgcugguuggagcuaac

SEQ ID NO: 285005 - RNA, 19 nt, Artificial Sequence
  Description of Artificial Sequence: Synthetic oligonucleotide
ccaugacaacuaaucuuuu

SEQ ID NO: 285006 - RNA, 19 nt, Artificial Sequence
  Description of Artificial Sequence: Synthetic oligonucleotide
cgaaggcuaccuccuucga

SEQ ID NO: 285007 - RNA, 19 nt, Artificial Sequence
  Description of Artificial Sequence: Synthetic oligonucleotide
ccguggcacugucuuugca

SEQ ID NO: 285008 - RNA, 19 nt, Artificial Sequence
  Description of Artificial Sequence: Synthetic oligonucleotide
cagucggcgcuuggauucu

SEQ ID NO: 285009 - RNA, 19 nt, Artificial Sequence
  Description of Artificial Sequence: Synthetic oligonucleotide
cagccgcagcucucauccu

SEQ ID NO: 285010 - RNA, 19 nt, Artificial Sequence
  Description of Artificial Sequence: Synthetic oligonucleotide
cacugacugugacgcuguu

SEQ ID NO: 285011 - RNA, 19 nt, Artificial Sequence
  Description of Artificial Sequence: Synthetic oligonucleotide
gcugggcuagguguacauu

SEQ ID NO: 285012 - RNA, 19 nt, Artificial Sequence
  Description of Artificial Sequence: Synthetic oligonucleotide
gccggcugaggcacugacu

SEQ ID NO: 285013 - RNA, 19 nt, Artificial Sequence
  Description of Artificial Sequence: Synthetic oligonucleotide
ggcccgcagcagucgauuu

SEQ ID NO: 285014 - RNA, 19 nt, Artificial Sequence
  Description of Artificial Sequence: Synthetic oligonucleotide
ggcucgugguggcgcgccu

SEQ ID NO: 285015 - RNA, 19 nt, Artificial Sequence
  Description of Artificial Sequence: Synthetic oligonucleotide
ggcugacacugggcccgca

SEQ ID NO: 285016 - RNA, 19 nt, Artificial Sequence
  Description of Artificial Sequence: Synthetic oligonucleotide
cccaucagcgaaggcucgu

SEQ ID NO: 285017 - RNA, 19 nt, Artificial Sequence
  Description of Artificial Sequence: Synthetic oligonucleotide
ccugagcacccugggucua

SEQ ID NO: 285018 - RNA, 19 nt, Artificial Sequence
  Description of Artificial Sequence: Synthetic oligonucleotide
ggccaccguggcacugucu

SEQ ID NO: 285019 - RNA, 19 nt, Artificial Sequence
  Description of Artificial Sequence: Synthetic oligonucleotide
gcgcggucacucucaucuu

SEQ ID NO: 285020 - RNA, 19 nt, Artificial Sequence
  Description of Artificial Sequence: Synthetic oligonucleotide
gcgccggcugaggcacuga

SEQ ID NO: 285021 - RNA, 19 nt, Artificial Sequence
  Description of Artificial Sequence: Synthetic oligonucleotide
ccaccguggcacugucuuu

SEQ ID NO: 285022 - RNA, 19 nt, Artificial Sequence
  Description of Artificial Sequence: Synthetic oligonucleotide
ccagcgcggucacucucau

SEQ ID NO: 285023 - RNA, 19 nt, Artificial Sequence
  Description of Artificial Sequence: Synthetic oligonucleotide
cacggccagcgcggucacu

SEQ ID NO: 285024 - RNA, 19 nt, Artificial Sequence
  Description of Artificial Sequence: Synthetic oligonucleotide
cggccagcgcggucacucu

SEQ ID NO: 285025 - RNA, 19 nt, Artificial Sequence
  Description of Artificial Sequence: Synthetic oligonucleotide
  modified_base (1)..(1): a, c, u, g, unknown or other
ngguuucccucagugucgc

SEQ ID NO: 285026 - RNA, 19 nt, Artificial Sequence
  Description of Artificial Sequence: Synthetic oligonucleotide
aauaauuguucauugauga

SEQ ID NO: 285027 - RNA, 19 nt, Artificial Sequence
  Description of Artificial Sequence: Synthetic oligonucleotide
aaccuuugccaacagaucc

SEQ ID NO: 285028 - RNA, 19 nt, Artificial Sequence
  Description of Artificial Sequence: Synthetic oligonucleotide
uguauuaucacuuucaauu

SEQ ID NO: 285029 - RNA, 19 nt, Artificial Sequence
  Description of Artificial Sequence: Synthetic oligonucleotide
agguuuauacauuuguccc

SEQ ID NO: 285030 - RNA, 19 nt, Artificial Sequence
  Description of Artificial Sequence: Synthetic oligonucleotide
uucgauugaaauauaaaug

SEQ ID NO: 285031 - RNA, 19 nt, Artificial Sequence
  Description of Artificial Sequence: Synthetic oligonucleotide
ucaucuaugcccaauagga

SEQ ID NO: 285032 - RNA, 19 nt, Artificial Sequence
  Description of Artificial Sequence: Synthetic oligonucleotide
ucuaagauuuccaucagug

SEQ ID NO: 285033 - RNA, 19 nt, Artificial Sequence
  Description of Artificial Sequence: Synthetic oligonucleotide
uaagauuuccaucagugug

SEQ ID NO: 285034 - RNA, 19 nt, Artificial Sequence
  Description of Artificial Sequence: Synthetic oligonucleotide
cuucuuuugcucaagaggc

SEQ ID NO: 285035 - RNA, 19 nt, Artificial Sequence
  Description of Artificial Sequence: Synthetic oligonucleotide
gaguaaauugaauaaauca

SEQ ID NO: 285036 - RNA, 19 nt, Artificial Sequence
  Description of Artificial Sequence: Synthetic oligonucleotide
auaacugcuauccaugguc

SEQ ID NO: 285037 - RNA, 19 nt, Artificial Sequence
  Description of Artificial Sequence: Synthetic oligonucleotide
agaauuacaucauuuaagu

SEQ ID NO: 285038 - RNA, 19 nt, Artificial Sequence
  Description of Artificial Sequence: Synthetic oligonucleotide
ucugugugagauuacaucc

SEQ ID NO: 285039 - RNA, 19 nt, Artificial Sequence
  Description of Artificial Sequence: Synthetic oligonucleotide
uauuguauuaucacuuuca

SEQ ID NO: 285040 - RNA, 19 nt, Artificial Sequence
  Description of Artificial Sequence: Synthetic oligonucleotide
acuuugguccaauagguac

SEQ ID NO: 285041 - RNA, 19 nt, Artificial Sequence
  Description of Artificial Sequence: Synthetic oligonucleotide
ucauugaugacaaaugcuc

SEQ ID NO: 285042 - RNA, 19 nt, Artificial Sequence
  Description of Artificial Sequence: Synthetic oligonucleotide
auuagaucucuacuucucc

SEQ ID NO: 285043 - RNA, 19 nt, Artificial Sequence
  Description of Artificial Sequence: Synthetic oligonucleotide
uagguuuauacauuugucc

SEQ ID NO: 285044 - RNA, 19 nt, Artificial Sequence
  Description of Artificial Sequence: Synthetic oligonucleotide
ucuauaacugcuauccaug

SEQ ID NO: 285045 - RNA, 19 nt, Artificial Sequence
  Description of Artificial Sequence: Synthetic oligonucleotide
gauuacauccuccagugug

SEQ ID NO: 285046 - RNA, 19 nt, Artificial Sequence
  Description of Artificial Sequence: Synthetic oligonucleotide
ugaauauugagcugcaccu

SEQ ID NO: 285047 - RNA, 19 nt, Artificial Sequence
  Description of Artificial Sequence: Synthetic oligonucleotide
uucggauuacuguuaaugg

SEQ ID NO: 285048 - RNA, 19 nt, Artificial Sequence
  Description of Artificial Sequence: Synthetic oligonucleotide
agggcuuagaacuauaugu

SEQ ID NO: 285049 - RNA, 19 nt, Artificial Sequence
  Description of Artificial Sequence: Synthetic oligonucleotide
uuuuggaugacacgugucc

SEQ ID NO: 285050 - RNA, 19 nt, Artificial Sequence
  Description of Artificial Sequence: Synthetic oligonucleotide
uuaauuagaucucuacuuc

SEQ ID NO: 285051 - RNA, 19 nt, Artificial Sequence
  Description of Artificial Sequence: Synthetic oligonucleotide
uuuuagguugucuacacaa

SEQ ID NO: 285052 - RNA, 19 nt, Artificial Sequence
  Description of Artificial Sequence: Synthetic oligonucleotide
gauaauucccagaaggcag

SEQ ID NO: 285053 - RNA, 19 nt, Artificial Sequence
  Description of Artificial Sequence: Synthetic oligonucleotide
uguuauuguauuaucacuu

SEQ ID NO: 285054 - RNA, 19 nt, Artificial Sequence
  Description of Artificial Sequence: Synthetic oligonucleotide
aggaauuuggaucugacau

SEQ ID NO: 285055 - RNA, 19 nt, Artificial Sequence
  Description of Artificial Sequence: Synthetic oligonucleotide
guagccaugauaucaaaug

SEQ ID NO: 285056 - RNA, 19 nt, Artificial Sequence
  Description of Artificial Sequence: Synthetic oligonucleotide
uuaaaaccgauaauuccca

SEQ ID NO: 285057 - RNA, 19 nt, Artificial Sequence
  Description of Artificial Sequence: Synthetic oligonucleotide
gacaucacaugcuucuugg

SEQ ID NO: 285058 - RNA, 19 nt, Artificial Sequence
  Description of Artificial Sequence: Synthetic oligonucleotide
uuucggauuacuguuaaug

SEQ ID NO: 285059 - RNA, 19 nt, Artificial Sequence
  Description of Artificial Sequence: Synthetic oligonucleotide
auuucgaauauccuuggca

SEQ ID NO: 285060 - RNA, 19 nt, Artificial Sequence
  Description of Artificial Sequence: Synthetic oligonucleotide
uguaguauccaauuaucaa

SEQ ID NO: 285061 - RNA, 19 nt, Artificial Sequence
  Description of Artificial Sequence: Synthetic oligonucleotide
uagacuuucgccuccaacu

SEQ ID NO: 285062 - RNA, 19 nt, Artificial Sequence
  Description of Artificial Sequence: Synthetic oligonucleotide
cugaauauugagcugcacc

SEQ ID NO: 285063 - RNA, 19 nt, Artificial Sequence
  Description of Artificial Sequence: Synthetic oligonucleotide
uuucgaauauccuuggcaa

SEQ ID NO: 285064 - RNA, 19 nt, Artificial Sequence
  Description of Artificial Sequence: Synthetic oligonucleotide
aauuagaucucuacuucuc

SEQ ID NO: 285065 - RNA, 19 nt, Artificial Sequence
  Description of Artificial Sequence: Synthetic oligonucleotide
ucucugauaaauaauuguu

SEQ ID NO: 285066 - RNA, 19 nt, Artificial Sequence
  Description of Artificial Sequence: Synthetic oligonucleotide
aaguuuugacaguucagcu

SEQ ID NO: 285067 - RNA, 19 nt, Artificial Sequence
  Description of Artificial Sequence: Synthetic oligonucleotide
aaggcacguggcuacauuc

SEQ ID NO: 285068 - RNA, 19 nt, Artificial Sequence
  Description of Artificial Sequence: Synthetic oligonucleotide
uuuagguugucuacacaag

SEQ ID NO: 285069 - RNA, 19 nt, Artificial Sequence
  Description of Artificial Sequence: Synthetic oligonucleotide
aaaccaucuagauacugau

SEQ ID NO: 285070 - RNA, 19 nt, Artificial Sequence
  Description of Artificial Sequence: Synthetic oligonucleotide
auaaauaauuguucauuga

SEQ ID NO: 285071 - RNA, 19 nt, Artificial Sequence
  Description of Artificial Sequence: Synthetic oligonucleotide
aauauuuccugaauuccug

SEQ ID NO: 285072 - RNA, 19 nt, Artificial Sequence
  Description of Artificial Sequence: Synthetic oligonucleotide
aaguaaguccugaauauug

SEQ ID NO: 285073 - RNA, 19 nt, Artificial Sequence
  Description of Artificial Sequence: Synthetic oligonucleotide
aauaaauugugagggguga

SEQ ID NO: 285074 - RNA, 19 nt, Artificial Sequence
  Description of Artificial Sequence: Synthetic oligonucleotide
aaauauuuccugaauuccu

SEQ ID NO: 285075 - RNA, 19 nt, Artificial Sequence
  Description of Artificial Sequence: Synthetic oligonucleotide
uuuaagugggacauuuaaa

SEQ ID NO: 285076 - RNA, 19 nt, Artificial Sequence
  Description of Artificial Sequence: Synthetic oligonucleotide
ucuacgauggcacggcucu

SEQ ID NO: 285077 - RNA, 19 nt, Artificial Sequence
  Description of Artificial Sequence: Synthetic oligonucleotide
aacuauaugucuaaauaau

SEQ ID NO: 285078 - RNA, 19 nt, Artificial Sequence
  Description of Artificial Sequence: Synthetic oligonucleotide
ucuaugcccaauaggacac

SEQ ID NO: 285079 - RNA, 19 nt, Artificial Sequence
  Description of Artificial Sequence: Synthetic oligonucleotide
accaucuagauacugauuu

SEQ ID NO: 285080 - RNA, 19 nt, Artificial Sequence
  Description of Artificial Sequence: Synthetic oligonucleotide
uaauuagaucucuacuucu

SEQ ID NO: 285081 - RNA, 19 nt, Artificial Sequence
  Description of Artificial Sequence: Synthetic oligonucleotide
agucagcuagacuuucgcc

SEQ ID NO: 285082 - RNA, 19 nt, Artificial Sequence
  Description of Artificial Sequence: Synthetic oligonucleotide
aguacagugagugugucug

SEQ ID NO: 285083 - RNA, 19 nt, Artificial Sequence
  Description of Artificial Sequence: Synthetic oligonucleotide
uuuucgaagcuugcggugg

SEQ ID NO: 285084 - RNA, 19 nt, Artificial Sequence
  Description of Artificial Sequence: Synthetic oligonucleotide
aauauugagcugcaccuuu

SEQ ID NO: 285085 - RNA, 19 nt, Artificial Sequence
  Description of Artificial Sequence: Synthetic oligonucleotide
aaugcguauugaugauuuc

SEQ ID NO: 285086 - RNA, 19 nt, Artificial Sequence
  Description of Artificial Sequence: Synthetic oligonucleotide
ucuucgauugaaauauaaa

SEQ ID NO: 285087 - RNA, 19 nt, Artificial Sequence
  Description of Artificial Sequence: Synthetic oligonucleotide
auacuagacaaacucauuu

SEQ ID NO: 285088 - RNA, 19 nt, Artificial Sequence
  Description of Artificial Sequence: Synthetic oligonucleotide
uucaccuuaucgaacauuu

SEQ ID NO: 285089 - RNA, 19 nt, Artificial Sequence
  Description of Artificial Sequence: Synthetic oligonucleotide
uuuaaucgaccuccgagaa

SEQ ID NO: 285090 - RNA, 19 nt, Artificial Sequence
  Description of Artificial Sequence: Synthetic oligonucleotide
guucuugagucuacgaugg

SEQ ID NO: 285091 - RNA, 19 nt, Artificial Sequence
  Description of Artificial Sequence: Synthetic oligonucleotide
aaaacaaaucacagggugu

SEQ ID NO: 285092 - RNA, 19 nt, Artificial Sequence
  Description of Artificial Sequence: Synthetic oligonucleotide
uuaagugcguucagggucu

SEQ ID NO: 285093 - RNA, 19 nt, Artificial Sequence
  Description of Artificial Sequence: Synthetic oligonucleotide
ugauguucuagcaggagua

SEQ ID NO: 285094 - RNA, 19 nt, Artificial Sequence
  Description of Artificial Sequence: Synthetic oligonucleotide
agauagaaaacaaucuaug

SEQ ID NO: 285095 - RNA, 19 nt, Artificial Sequence
  Description of Artificial Sequence: Synthetic oligonucleotide
uuagaucucuacuucucca

SEQ ID NO: 285096 - RNA, 19 nt, Artificial Sequence
  Description of Artificial Sequence: Synthetic oligonucleotide
gauuacuguuaaugguggg

SEQ ID NO: 285097 - RNA, 19 nt, Artificial Sequence
  Description of Artificial Sequence: Synthetic oligonucleotide
uuugucaugcagcuuugcu

SEQ ID NO: 285098 - RNA, 19 nt, Artificial Sequence
  Description of Artificial Sequence: Synthetic oligonucleotide
uguucuagcaggaguaaau

SEQ ID NO: 285099 - RNA, 19 nt, Artificial Sequence
  Description of Artificial Sequence: Synthetic oligonucleotide
auaggucucugauaaauaa

SEQ ID NO: 285100 - RNA, 19 nt, Artificial Sequence
  Description of Artificial Sequence: Synthetic oligonucleotide
gaauuuggaucugacauca

SEQ ID NO: 285101 - RNA, 19 nt, Artificial Sequence
  Description of Artificial Sequence: Synthetic oligonucleotide
auagaaaauccacgugcuc

SEQ ID NO: 285102 - RNA, 19 nt, Artificial Sequence
  Description of Artificial Sequence: Synthetic oligonucleotide
uuuauacagaaaguguuau

SEQ ID NO: 285103 - RNA, 19 nt, Artificial Sequence
  Description of Artificial Sequence: Synthetic oligonucleotide
ugcuguguaccucacuggc

SEQ ID NO: 285104 - RNA, 19 nt, Artificial Sequence
  Description of Artificial Sequence: Synthetic oligonucleotide
gaguaaaugcguauugaug

SEQ ID NO: 285105 - RNA, 19 nt, Artificial Sequence
  Description of Artificial Sequence: Synthetic oligonucleotide
uaaauugugaggggugaag

SEQ ID NO: 285106 - RNA, 19 nt, Artificial Sequence
  Description of Artificial Sequence: Synthetic oligonucleotide
uucuucgauugaaauauaa

SEQ ID NO: 285107 - RNA, 19 nt, Artificial Sequence
  Description of Artificial Sequence: Synthetic oligonucleotide
uacuucuccacagauagaa

SEQ ID NO: 285108 - RNA, 19 nt, Artificial Sequence
  Description of Artificial Sequence: Synthetic oligonucleotide
guauugaugauuucuucga

SEQ ID NO: 285109 - RNA, 19 nt, Artificial Sequence
  Description of Artificial Sequence: Synthetic oligonucleotide
agucgugaaagguaacucu

SEQ ID NO: 285110 - RNA, 19 nt, Artificial Sequence
  Description of Artificial Sequence: Synthetic oligonucleotide
ucggauuacuguuaauggu

SEQ ID NO: 285111 - RNA, 19 nt, Artificial Sequence
  Description of Artificial Sequence: Synthetic oligonucleotide
guuuaaucgaccuccgaga

SEQ ID NO: 285112 - RNA, 19 nt, Artificial Sequence
  Description of Artificial Sequence: Synthetic oligonucleotide
aaugacugguuugcugacg

SEQ ID NO: 285113 - RNA, 19 nt, Artificial Sequence
  Description of Artificial Sequence: Synthetic oligonucleotide
agugugauccuguucuuca

SEQ ID NO: 285114 - RNA, 19 nt, Artificial Sequence
  Description of Artificial Sequence: Synthetic oligonucleotide
caguucagcuuuucgaagc

SEQ ID NO: 285115 - RNA, 19 nt, Artificial Sequence
  Description of Artificial Sequence: Synthetic oligonucleotide
aaacaaaucacaggguguu

SEQ ID NO: 285116 - RNA, 19 nt, Artificial Sequence
  Description of Artificial Sequence: Synthetic oligonucleotide
ucaguagccaugauaucaa

SEQ ID NO: 285117 - RNA, 19 nt, Artificial Sequence
  Description of Artificial Sequence: Synthetic oligonucleotide
uacaucauuuaagugggac

SEQ ID NO: 285118 - RNA, 19 nt, Artificial Sequence
  Description of Artificial Sequence: Synthetic oligonucleotide
uuaugaucuuggaaauacu

SEQ ID NO: 285119 - RNA, 19 nt, Artificial Sequence
  Description of Artificial Sequence: Synthetic oligonucleotide
uaaucgaccuccgagaauu

SEQ ID NO: 285120 - RNA, 19 nt, Artificial Sequence
  Description of Artificial Sequence: Synthetic oligonucleotide
uccugaauuccugauaggu

SEQ ID NO: 285121 - RNA, 19 nt, Artificial Sequence
  Description of Artificial Sequence: Synthetic oligonucleotide
ugauaggucucugauaaau

SEQ ID NO: 285122 - RNA, 19 nt, Artificial Sequence
  Description of Artificial Sequence: Synthetic oligonucleotide
ugagucuacgauggcacgg

SEQ ID NO: 285123 - RNA, 19 nt, Artificial Sequence
  Description of Artificial Sequence: Synthetic oligonucleotide
uaagugggacauuuaaaau

SEQ ID NO: 285124 - RNA, 19 nt, Artificial Sequence
  Description of Artificial Sequence: Synthetic oligonucleotide
auaauuaauuugaucuuca

SEQ ID NO: 285125 - RNA, 19 nt, Artificial Sequence
  Description of Artificial Sequence: Synthetic oligonucleotide
uauaacugcuauccauggu

SEQ ID NO: 285126 - RNA, 19 nt, Artificial Sequence
  Description of Artificial Sequence: Synthetic oligonucleotide
guuaggaucauugggguca

SEQ ID NO: 285127 - RNA, 19 nt, Artificial Sequence
  Description of Artificial Sequence: Synthetic oligonucleotide
ucgccuccaacuuuaaaac

SEQ ID NO: 285128 - RNA, 19 nt, Artificial Sequence
  Description of Artificial Sequence: Synthetic oligonucleotide
ucuagauacugauuuuaua

SEQ ID NO: 285129 - RNA, 19 nt, Artificial Sequence
  Description of Artificial Sequence: Synthetic oligonucleotide
aaaugcguauugaugauuu

SEQ ID NO: 285130 - RNA, 19 nt, Artificial Sequence
  Description of Artificial Sequence: Synthetic oligonucleotide
ucuugagucuacgauggca

SEQ ID NO: 285131 - RNA, 19 nt, Artificial Sequence
  Description of Artificial Sequence: Synthetic oligonucleotide
gggucuauaacugcuaucc

SEQ ID NO: 285132 - RNA, 19 nt, Artificial Sequence
  Description of Artificial Sequence: Synthetic oligonucleotide
uggucgucgguccauguga

SEQ ID NO: 285133 - RNA, 19 nt, Artificial Sequence
  Description of Artificial Sequence: Synthetic oligonucleotide
ugauaucaaauguaacauu

SEQ ID NO: 285134 - RNA, 19 nt, Artificial Sequence
  Description of Artificial Sequence: Synthetic oligonucleotide
cuucgauugaaauauaaau

SEQ ID NO: 285135 - RNA, 19 nt, Artificial Sequence
  Description of Artificial Sequence: Synthetic oligonucleotide
uagaucucuacuucuccac

SEQ ID NO: 285136 - RNA, 19 nt, Artificial Sequence
  Description of Artificial Sequence: Synthetic oligonucleotide
uugagucuacgauggcacg

SEQ ID NO: 285137 - RNA, 19 nt, Artificial Sequence
  Description of Artificial Sequence: Synthetic oligonucleotide
gauuucgaauauccuuggc

SEQ ID NO: 285138 - RNA, 19 nt, Artificial Sequence
  Description of Artificial Sequence: Synthetic oligonucleotide
uauccauggucgucggucc

SEQ ID NO: 285139 - RNA, 19 nt, Artificial Sequence
  Description of Artificial Sequence: Synthetic oligonucleotide
aaaugcucguucucucccu

SEQ ID NO: 285140 - RNA, 19 nt, Artificial Sequence
  Description of Artificial Sequence: Synthetic oligonucleotide
gauuuuagucaccacuucu

SEQ ID NO: 285141 - RNA, 19 nt, Artificial Sequence
  Description of Artificial Sequence: Synthetic oligonucleotide
cuuucaaugaggcaguagu

SEQ ID NO: 285142 - RNA, 19 nt, Artificial Sequence
  Description of Artificial Sequence: Synthetic oligonucleotide
aucgacagccucgccaucc

SEQ ID NO: 285143 - RNA, 19 nt, Artificial Sequence
  Description of Artificial Sequence: Synthetic oligonucleotide
ugacaaaugcucguucucu

SEQ ID NO: 285144 - RNA, 19 nt, Artificial Sequence
  Description of Artificial Sequence: Synthetic oligonucleotide
ugcguauugaugauuucuu

SEQ ID NO: 285145 - RNA, 19 nt, Artificial Sequence
  Description of Artificial Sequence: Synthetic oligonucleotide
cuagucagcuagacuuucg

SEQ ID NO: 285146 - RNA, 19 nt, Artificial Sequence
  Description of Artificial Sequence: Synthetic oligonucleotide
uaucgaacauuuucaucac

SEQ ID NO: 285147 - RNA, 19 nt, Artificial Sequence
  Description of Artificial Sequence: Synthetic oligonucleotide
caguagugcacuuugagua

SEQ ID NO: 285148 - RNA, 19 nt, Artificial Sequence
  Description of Artificial Sequence: Synthetic oligonucleotide
uucuuuugcucaagaggca

SEQ ID NO: 285149 - RNA, 19 nt, Artificial Sequence
  Description of Artificial Sequence: Synthetic oligonucleotide
caaggaauuuggaucugac

SEQ ID NO: 285150 - RNA, 19 nt, Artificial Sequence
  Description of Artificial Sequence: Synthetic oligonucleotide
cuccaauguccgaagauuc

SEQ ID NO: 285151 - RNA, 19 nt, Artificial Sequence
  Description of Artificial Sequence: Synthetic oligonucleotide
cuuagaacuauaugucuaa

SEQ ID NO: 285152 - RNA, 19 nt, Artificial Sequence
  Description of Artificial Sequence: Synthetic oligonucleotide
auacuugcuugucagggaa

SEQ ID NO: 285153 - RNA, 19 nt, Artificial Sequence
  Description of Artificial Sequence: Synthetic oligonucleotide
aacuagugcuuuguaguca

SEQ ID NO: 285154 - RNA, 19 nt, Artificial Sequence
  Description of Artificial Sequence: Synthetic oligonucleotide
ucagcuagacuuucgccuc

SEQ ID NO: 285155 - RNA, 19 nt, Artificial Sequence
  Description of Artificial Sequence: Synthetic oligonucleotide
acuagugcuuuguagucau

SEQ ID NO: 285156 - RNA, 19 nt, Artificial Sequence
  Description of Artificial Sequence: Synthetic oligonucleotide
ugcguucagggucugcuga

SEQ ID NO: 285157 - RNA, 19 nt, Artificial Sequence
  Description of Artificial Sequence: Synthetic oligonucleotide
uuuggaugacacgugucca

SEQ ID NO: 285158 - RNA, 19 nt, Artificial Sequence
  Description of Artificial Sequence: Synthetic oligonucleotide
ggcaaucucguugagaaug

SEQ ID NO: 285159 - RNA, 19 nt, Artificial Sequence
  Description of Artificial Sequence: Synthetic oligonucleotide
ccuuguuaggaucauuggg

SEQ ID NO: 285160 - RNA, 19 nt, Artificial Sequence
  Description of Artificial Sequence: Synthetic oligonucleotide
uaggugucguaauaauuaa

SEQ ID NO: 285161 - RNA, 19 nt, Artificial Sequence
  Description of Artificial Sequence: Synthetic oligonucleotide
cuuuucgaagcuugcggug

SEQ ID NO: 285162 - RNA, 19 nt, Artificial Sequence
  Description of Artificial Sequence: Synthetic oligonucleotide
cucaguagccaugauauca

SEQ ID NO: 285163 - RNA, 19 nt, Artificial Sequence
  Description of Artificial Sequence: Synthetic oligonucleotide
caucuaugcccaauaggac

SEQ ID NO: 285164 - RNA, 19 nt, Artificial Sequence
  Description of Artificial Sequence: Synthetic oligonucleotide
uaccuguaccacaguacag

SEQ ID NO: 285165 - RNA, 19 nt, Artificial Sequence
  Description of Artificial Sequence: Synthetic oligonucleotide
augucauacuugcuuguca

SEQ ID NO: 285166 - RNA, 19 nt, Artificial Sequence
  Description of Artificial Sequence: Synthetic oligonucleotide
cugacggucaccaggucug

SEQ ID NO: 285167 - RNA, 19 nt, Artificial Sequence
  Description of Artificial Sequence: Synthetic oligonucleotide
cuaguuuuguucuguguga

SEQ ID NO: 285168 - RNA, 19 nt, Artificial Sequence
  Description of Artificial Sequence: Synthetic oligonucleotide
ugcccaauaggacaccuuu

SEQ ID NO: 285169 - RNA, 19 nt, Artificial Sequence
  Description of Artificial Sequence: Synthetic oligonucleotide
guauuaucacuuucaauua

SEQ ID NO: 285170 - RNA, 19 nt, Artificial Sequence
  Description of Artificial Sequence: Synthetic oligonucleotide
ggauuacuguuaauggugg

SEQ ID NO: 285171 - RNA, 19 nt, Artificial Sequence
  Description of Artificial Sequence: Synthetic oligonucleotide
agggaaaucucagucuuug

SEQ ID NO: 285172 - RNA, 19 nt, Artificial Sequence
  Description of Artificial Sequence: Synthetic oligonucleotide
uugcugacggucaccaggu

SEQ ID NO: 285173 - RNA, 19 nt, Artificial Sequence
  Description of Artificial Sequence: Synthetic oligonucleotide
agaaaguguuauuguauua

SEQ ID NO: 285174 - RNA, 19 nt, Artificial Sequence
  Description of Artificial Sequence: Synthetic oligonucleotide
guccaauagguacacgaac

SEQ ID NO: 285175 - RNA, 19 nt, Artificial Sequence
  Description of Artificial Sequence: Synthetic oligonucleotide
guaggugucguaauaauua

SEQ ID NO: 285176 - RNA, 19 nt, Artificial Sequence
  Description of Artificial Sequence: Synthetic oligonucleotide
guugguuugaaggucaucu

SEQ ID NO: 285177 - RNA, 19 nt, Artificial Sequence
  Description of Artificial Sequence: Synthetic oligonucleotide
aggcaugcaucuuccauca

SEQ ID NO: 285178 - RNA, 19 nt, Artificial Sequence
  Description of Artificial Sequence: Synthetic oligonucleotide
acuugcuugucagggaaag

SEQ ID NO: 285179 - RNA, 19 nt, Artificial Sequence
  Description of Artificial Sequence: Synthetic oligonucleotide
uuacuguuaaugguggguu

SEQ ID NO: 285180 - RNA, 19 nt, Artificial Sequence
  Description of Artificial Sequence: Synthetic oligonucleotide
agaucucuacuucuccaca

SEQ ID NO: 285181 - RNA, 19 nt, Artificial Sequence
  Description of Artificial Sequence: Synthetic oligonucleotide
augcguauugaugauuucu

SEQ ID NO: 285182 - RNA, 19 nt, Artificial Sequence
  Description of Artificial Sequence: Synthetic oligonucleotide
agguugucuacacaaguuu

SEQ ID NO: 285183 - RNA, 19 nt, Artificial Sequence
  Description of Artificial Sequence: Synthetic oligonucleotide
caggaguaaaugcguauug

SEQ ID NO: 285184 - RNA, 19 nt, Artificial Sequence
  Description of Artificial Sequence: Synthetic oligonucleotide
aauacuagacaaacucauu

SEQ ID NO: 285185 - RNA, 19 nt, Artificial Sequence
  Description of Artificial Sequence: Synthetic oligonucleotide
guucuagcaggaguaaaug

SEQ ID NO: 285186 - RNA, 19 nt, Artificial Sequence
  Description of Artificial Sequence: Synthetic oligonucleotide
ucgugaaagguaacucuuc

SEQ ID NO: 285187 - RNA, 19 nt, Artificial Sequence
  Description of Artificial Sequence: Synthetic oligonucleotide
cuauccauggucgucgguc

SEQ ID NO: 285188 - RNA, 19 nt, Artificial Sequence
  Description of Artificial Sequence: Synthetic oligonucleotide
uccauccaguuuaaucgac

SEQ ID NO: 285189 - RNA, 19 nt, Artificial Sequence
  Description of Artificial Sequence: Synthetic oligonucleotide
cuagacuuucgccuccaac

SEQ ID NO: 285190 - RNA, 19 nt, Artificial Sequence
  Description of Artificial Sequence: Synthetic oligonucleotide
ugguuggcccugauuuuag

SEQ ID NO: 285191 - RNA, 19 nt, Artificial Sequence
  Description of Artificial Sequence: Synthetic oligonucleotide
aaaucacuuugguccaaua

SEQ ID NO: 285192 - RNA, 19 nt, Artificial Sequence
  Description of Artificial Sequence: Synthetic oligonucleotide
aauuccugauaggucucug

SEQ ID NO: 285193 - RNA, 19 nt, Artificial Sequence
  Description of Artificial Sequence: Synthetic oligonucleotide
auuacauccuccaguguga

SEQ ID NO: 285194 - RNA, 19 nt, Artificial Sequence
  Description of Artificial Sequence: Synthetic oligonucleotide
uguagucgugaaagguaac

SEQ ID NO: 285195 - RNA, 19 nt, Artificial Sequence
  Description of Artificial Sequence: Synthetic oligonucleotide
acuuucggauuacuguuaa

SEQ ID NO: 285196 - RNA, 19 nt, Artificial Sequence
  Description of Artificial Sequence: Synthetic oligonucleotide
ucguagccuugcuagcucc

SEQ ID NO: 285197 - RNA, 19 nt, Artificial Sequence
  Description of Artificial Sequence: Synthetic oligonucleotide
uuaaucgaccuccgagaau

SEQ ID NO: 285198 - RNA, 19 nt, Artificial Sequence
  Description of Artificial Sequence: Synthetic oligonucleotide
uuagaacuauaugucuaaa

SEQ ID NO: 285199 - RNA, 19 nt, Artificial Sequence
  Description of Artificial Sequence: Synthetic oligonucleotide
uuuuaugaucuuggaaaua

SEQ ID NO: 285200 - RNA, 19 nt, Artificial Sequence
  Description of Artificial Sequence: Synthetic oligonucleotide
ugcuccaauguccgaagau

SEQ ID NO: 285201 - RNA, 19 nt, Artificial Sequence
  Description of Artificial Sequence: Synthetic oligonucleotide
uucgaauauccuuggcaau

SEQ ID NO: 285202 - RNA, 19 nt, Artificial Sequence
  Description of Artificial Sequence: Synthetic oligonucleotide
guguuauuguauuaucacu

SEQ ID NO: 285203 - RNA, 19 nt, Artificial Sequence
  Description of Artificial Sequence: Synthetic oligonucleotide
cuuugcuugcccgcaacag

SEQ ID NO: 285204 - RNA, 19 nt, Artificial Sequence
  Description of Artificial Sequence: Synthetic oligonucleotide
agagccaacuagugcuuug

SEQ ID NO: 285205 - RNA, 19 nt, Artificial Sequence
  Description of Artificial Sequence: Synthetic oligonucleotide
ggaaauacuguagucguga

SEQ ID NO: 285206 - RNA, 19 nt, Artificial Sequence
  Description of Artificial Sequence: Synthetic oligonucleotide
ucguugagaaugucuuggu

SEQ ID NO: 285207 - RNA, 19 nt, Artificial Sequence
  Description of Artificial Sequence: Synthetic oligonucleotide
gucagcuagacuuucgccu

SEQ ID NO: 285208 - RNA, 19 nt, Artificial Sequence
  Description of Artificial Sequence: Synthetic oligonucleotide
gccaacuagugcuuuguag

SEQ ID NO: 285209 - RNA, 19 nt, Artificial Sequence
  Description of Artificial Sequence: Synthetic oligonucleotide
aucgaacauuuucaucaca

SEQ ID NO: 285210 - RNA, 19 nt, Artificial Sequence
  Description of Artificial Sequence: Synthetic oligonucleotide
uagucgugaaagguaacuc

SEQ ID NO: 285211 - RNA, 19 nt, Artificial Sequence
  Description of Artificial Sequence: Synthetic oligonucleotide
ugcuauccauggucgucgg

SEQ ID NO: 285212 - RNA, 19 nt, Artificial Sequence
  Description of Artificial Sequence: Synthetic oligonucleotide
ggaauuuggaucugacauc

SEQ ID NO: 285213 - RNA, 19 nt, Artificial Sequence
  Description of Artificial Sequence: Synthetic oligonucleotide
gaacuuucggauuacuguu

SEQ ID NO: 285214 - RNA, 19 nt, Artificial Sequence
  Description of Artificial Sequence: Synthetic oligonucleotide
cagggcuuagaacuauaug

SEQ ID NO: 285215 - RNA, 19 nt, Artificial Sequence
  Description of Artificial Sequence: Synthetic oligonucleotide
gagucuacgauggcacggc

SEQ ID NO: 285216 - RNA, 19 nt, Artificial Sequence
  Description of Artificial Sequence: Synthetic oligonucleotide
caauguccgaagauuccuc

SEQ ID NO: 285217 - RNA, 19 nt, Artificial Sequence
  Description of Artificial Sequence: Synthetic oligonucleotide
cuguagucgugaaagguaa

SEQ ID NO: 285218 - RNA, 19 nt, Artificial Sequence
  Description of Artificial Sequence: Synthetic oligonucleotide
acggucaccaggucugugu

SEQ ID NO: 285219 - RNA, 19 nt, Artificial Sequence
  Description of Artificial Sequence: Synthetic oligonucleotide
cauggacaucacaugcuuc

SEQ ID NO: 285220 - RNA, 19 nt, Artificial Sequence
  Description of Artificial Sequence: Synthetic oligonucleotide
ccgauaauucccagaaggc

SEQ ID NO: 285221 - RNA, 19 nt, Artificial Sequence
  Description of Artificial Sequence: Synthetic oligonucleotide
agugcguucagggucugcu

SEQ ID NO: 285222 - RNA, 19 nt, Artificial Sequence
  Description of Artificial Sequence: Synthetic oligonucleotide
uaaaugcguauugaugauu

SEQ ID NO: 285223 - RNA, 19 nt, Artificial Sequence
  Description of Artificial Sequence: Synthetic oligonucleotide
ucgucgguccaugugacuc

SEQ ID NO: 285224 - RNA, 19 nt, Artificial Sequence
  Description of Artificial Sequence: Synthetic oligonucleotide
caaauaaauugugaggggu

SEQ ID NO: 285225 - RNA, 19 nt, Artificial Sequence
  Description of Artificial Sequence: Synthetic oligonucleotide
ggucaucuaugcccaauag

SEQ ID NO: 285226 - RNA, 19 nt, Artificial Sequence
  Description of Artificial Sequence: Synthetic oligonucleotide
uguccauauuaaacuucuc

SEQ ID NO: 285227 - RNA, 19 nt, Artificial Sequence
  Description of Artificial Sequence: Synthetic oligonucleotide
uuaaacugguugguuugaa

SEQ ID NO: 285228 - RNA, 19 nt, Artificial Sequence
  Description of Artificial Sequence: Synthetic oligonucleotide
ccugauaggucucugauaa

SEQ ID NO: 285229 - RNA, 19 nt, Artificial Sequence
  Description of Artificial Sequence: Synthetic oligonucleotide
acgaacuuucggauuacug

SEQ ID NO: 285230 - RNA, 19 nt, Artificial Sequence
  Description of Artificial Sequence: Synthetic oligonucleotide
gacugguuugcugacgguc

SEQ ID NO: 285231 - RNA, 19 nt, Artificial Sequence
  Description of Artificial Sequence: Synthetic oligonucleotide
ucucuucguuccuuugggu

SEQ ID NO: 285232 - RNA, 19 nt, Artificial Sequence
  Description of Artificial Sequence: Synthetic oligonucleotide
gaugacacguguccagucu

SEQ ID NO: 285233 - RNA, 19 nt, Artificial Sequence
  Description of Artificial Sequence: Synthetic oligonucleotide
agacuuucgccuccaacuu

SEQ ID NO: 285234 - RNA, 19 nt, Artificial Sequence
  Description of Artificial Sequence: Synthetic oligonucleotide
accacaguacagugagugu

SEQ ID NO: 285235 - RNA, 19 nt, Artificial Sequence
  Description of Artificial Sequence: Synthetic oligonucleotide
cggauuacuguuaauggug

SEQ ID NO: 285236 - RNA, 19 nt, Artificial Sequence
  Description of Artificial Sequence: Synthetic oligonucleotide
auggucgucgguccaugug

SEQ ID NO: 285237 - RNA, 19 nt, Artificial Sequence
  Description of Artificial Sequence: Synthetic oligonucleotide
ccuccuggaaaucuaaauc

SEQ ID NO: 285238 - RNA, 19 nt, Artificial Sequence
  Description of Artificial Sequence: Synthetic oligonucleotide
aagugcguucagggucugc

SEQ ID NO: 285239 - RNA, 19 nt, Artificial Sequence
  Description of Artificial Sequence: Synthetic oligonucleotide
gauaggucucugauaaaua

SEQ ID NO: 285240 - RNA, 19 nt, Artificial Sequence
  Description of Artificial Sequence: Synthetic oligonucleotide
uacuguuaaugguggguuu

SEQ ID NO: 285241 - RNA, 19 nt, Artificial Sequence
  Description of Artificial Sequence: Synthetic oligonucleotide
aucuagauacugauuuuau

SEQ ID NO: 285242 - RNA, 19 nt, Artificial Sequence
  Description of Artificial Sequence: Synthetic oligonucleotide
gccauagaaaauccacgug

SEQ ID NO: 285243 - RNA, 19 nt, Artificial Sequence
  Description of Artificial Sequence: Synthetic oligonucleotide
uacuugcuugucagggaaa

SEQ ID NO: 285244 - RNA, 19 nt, Artificial Sequence
  Description of Artificial Sequence: Synthetic oligonucleotide
gugugagauuacauccucc

SEQ ID NO: 285245 - RNA, 19 nt, Artificial Sequence
  Description of Artificial Sequence: Synthetic oligonucleotide
aacuuucggauuacuguua

SEQ ID NO: 285246 - RNA, 19 nt, Artificial Sequence
  Description of Artificial Sequence: Synthetic oligonucleotide
ggcauccugauguucuagc

SEQ ID NO: 285247 - RNA, 19 nt, Artificial Sequence
  Description of Artificial Sequence: Synthetic oligonucleotide
acuguuaaugguggguuuu

SEQ ID NO: 285248 - RNA, 19 nt, Artificial Sequence
  Description of Artificial Sequence: Synthetic oligonucleotide
auaugaggagguucacguu

SEQ ID NO: 285249 - RNA, 19 nt, Artificial Sequence
  Description of Artificial Sequence: Synthetic oligonucleotide
uagugcacuuugaguaaau

SEQ ID NO: 285250 - RNA, 19 nt, Artificial Sequence
  Description of Artificial Sequence: Synthetic oligonucleotide
uccgaagauuccucuggau

SEQ ID NO: 285251 - RNA, 19 nt, Artificial Sequence
  Description of Artificial Sequence: Synthetic oligonucleotide
ugcgguggauucuuugauu

SEQ ID NO: 285252 - RNA, 19 nt, Artificial Sequence
  Description of Artificial Sequence: Synthetic oligonucleotide
ccugaauuccugauagguc

SEQ ID NO: 285253 - RNA, 19 nt, Artificial Sequence
  Description of Artificial Sequence: Synthetic oligonucleotide
ccauccaguuuaaucgacc

SEQ ID NO: 285254 - RNA, 19 nt, Artificial Sequence
  Description of Artificial Sequence: Synthetic oligonucleotide
uguguaccucacuggcuuc

SEQ ID NO: 285255 - RNA, 19 nt, Artificial Sequence
  Description of Artificial Sequence: Synthetic oligonucleotide
aaaaggcacguggcuacau

SEQ ID NO: 285256 - RNA, 19 nt, Artificial Sequence
  Description of Artificial Sequence: Synthetic oligonucleotide
gagaaugucuugguauuua

SEQ ID NO: 285257 - RNA, 19 nt, Artificial Sequence
  Description of Artificial Sequence: Synthetic oligonucleotide
ucaccuuaucgaacauuuu

SEQ ID NO: 285258 - RNA, 19 nt, Artificial Sequence
  Description of Artificial Sequence: Synthetic oligonucleotide
caucauuuaagugggacau

SEQ ID NO: 285259 - RNA, 19 nt, Artificial Sequence
  Description of Artificial Sequence: Synthetic oligonucleotide
caucuagauacugauuuua

SEQ ID NO: 285260 - RNA, 19 nt, Artificial Sequence
  Description of Artificial Sequence: Synthetic oligonucleotide
cauccaguuuaaucgaccu

SEQ ID NO: 285261 - RNA, 19 nt, Artificial Sequence
  Description of Artificial Sequence: Synthetic oligonucleotide
gaauugcacaaaaguucuc

SEQ ID NO: 285262 - RNA, 19 nt, Artificial Sequence
  Description of Artificial Sequence: Synthetic oligonucleotide
gauguucuagcaggaguaa

SEQ ID NO: 285263 - RNA, 19 nt, Artificial Sequence
  Description of Artificial Sequence: Synthetic oligonucleotide
agccaugauaucaaaugua

SEQ ID NO: 285264 - RNA, 19 nt, Artificial Sequence
  Description of Artificial Sequence: Synthetic oligonucleotide
cagcgauucuagcagcuca

SEQ ID NO: 285265 - RNA, 19 nt, Artificial Sequence
  Description of Artificial Sequence: Synthetic oligonucleotide
gggucaacggcuccuuccc

SEQ ID NO: 285266 - RNA, 19 nt, Artificial Sequence
  Description of Artificial Sequence: Synthetic oligonucleotide
ugcuugcccgcaacaggga

SEQ ID NO: 285267 - RNA, 19 nt, Artificial Sequence
  Description of Artificial Sequence: Synthetic oligonucleotide
gggcuuagaacuauauguc

SEQ ID NO: 285268 - RNA, 19 nt, Artificial Sequence
  Description of Artificial Sequence: Synthetic oligonucleotide
agagcugauuuaguguguu

SEQ ID NO: 285269 - RNA, 19 nt, Artificial Sequence
  Description of Artificial Sequence: Synthetic oligonucleotide
guagucgugaaagguaacu

SEQ ID NO: 285270 - RNA, 19 nt, Artificial Sequence
  Description of Artificial Sequence: Synthetic oligonucleotide
cugguuugcugacggucac

SEQ ID NO: 285271 - RNA, 19 nt, Artificial Sequence
  Description of Artificial Sequence: Synthetic oligonucleotide
cucguagccuugcuagcuc

SEQ ID NO: 285272 - RNA, 19 nt, Artificial Sequence
  Description of Artificial Sequence: Synthetic oligonucleotide
agucuacgauggcacggcu

SEQ ID NO: 285273 - RNA, 19 nt, Artificial Sequence
  Description of Artificial Sequence: Synthetic oligonucleotide
ugacugguuugcugacggu

SEQ ID NO: 285274 - RNA, 19 nt, Artificial Sequence
  Description of Artificial Sequence: Synthetic oligonucleotide
cagcuagacuuucgccucc

SEQ ID NO: 285275 - RNA, 19 nt, Artificial Sequence
  Description of Artificial Sequence: Synthetic oligonucleotide
ugguuugcugacggucacc

SEQ ID NO: 285276 - RNA, 19 nt, Artificial Sequence
  Description of Artificial Sequence: Synthetic oligonucleotide
uuaggaucauuggggucaa

SEQ ID NO: 285277 - RNA, 19 nt, Artificial Sequence
  Description of Artificial Sequence: Synthetic oligonucleotide
ugguugguuugaaggucau

SEQ ID NO: 285278 - RNA, 19 nt, Artificial Sequence
  Description of Artificial Sequence: Synthetic oligonucleotide
ggaguaaaugcguauugau

SEQ ID NO: 285279 - RNA, 19 nt, Artificial Sequence
  Description of Artificial Sequence: Synthetic oligonucleotide
ccaacuagugcuuuguagu

SEQ ID NO: 285280 - RNA, 19 nt, Artificial Sequence
  Description of Artificial Sequence: Synthetic oligonucleotide
guccgaagauuccucugga

SEQ ID NO: 285281 - RNA, 19 nt, Artificial Sequence
  Description of Artificial Sequence: Synthetic oligonucleotide
ggcuuagaacuauaugucu

SEQ ID NO: 285282 - RNA, 19 nt, Artificial Sequence
  Description of Artificial Sequence: Synthetic oligonucleotide
cauuuaagugggacauuua

SEQ ID NO: 285283 - RNA, 19 nt, Artificial Sequence
  Description of Artificial Sequence: Synthetic oligonucleotide
ugccaacagaucccagguu

SEQ ID NO: 285284 - RNA, 19 nt, Artificial Sequence
  Description of Artificial Sequence: Synthetic oligonucleotide
auguucuagcaggaguaaa

SEQ ID NO: 285285 - RNA, 19 nt, Artificial Sequence
  Description of Artificial Sequence: Synthetic oligonucleotide
aagcuugcgguggauucuu

SEQ ID NO: 285286 - RNA, 19 nt, Artificial Sequence
  Description of Artificial Sequence: Synthetic oligonucleotide
ggugucguaauaauuaauu

SEQ ID NO: 285287 - RNA, 19 nt, Artificial Sequence
  Description of Artificial Sequence: Synthetic oligonucleotide
gcguauugaugauuucuuc

SEQ ID NO: 285288 - RNA, 19 nt, Artificial Sequence
  Description of Artificial Sequence: Synthetic oligonucleotide
gugcguucagggucugcug

SEQ ID NO: 285289 - RNA, 19 nt, Artificial Sequence
  Description of Artificial Sequence: Synthetic oligonucleotide
gcuuagaacuauaugucua

SEQ ID NO: 285290 - RNA, 19 nt, Artificial Sequence
  Description of Artificial Sequence: Synthetic oligonucleotide
acgauggcacggcucucca

SEQ ID NO: 285291 - RNA, 19 nt, Artificial Sequence
  Description of Artificial Sequence: Synthetic oligonucleotide
auccauggucgucggucca

SEQ ID NO: 285292 - RNA, 19 nt, Artificial Sequence
  Description of Artificial Sequence: Synthetic oligonucleotide
cauuugucccuagucagcu

SEQ ID NO: 285293 - RNA, 19 nt, Artificial Sequence
  Description of Artificial Sequence: Synthetic oligonucleotide
ggauuguauuuucacaauu

SEQ ID NO: 285294 - RNA, 19 nt, Artificial Sequence
  Description of Artificial Sequence: Synthetic oligonucleotide
caucacagccaccccuuca

SEQ ID NO: 285295 - RNA, 19 nt, Artificial Sequence
  Description of Artificial Sequence: Synthetic oligonucleotide
gcuuuucgaagcuugcggu

SEQ ID NO: 285296 - RNA, 19 nt, Artificial Sequence
  Description of Artificial Sequence: Synthetic oligonucleotide
agcgauucuagcagcucau

SEQ ID NO: 285297 - RNA, 19 nt, Artificial Sequence
  Description of Artificial Sequence: Synthetic oligonucleotide
cuacuucuccacagauaga

SEQ ID NO: 285298 - RNA, 19 nt, Artificial Sequence
  Description of Artificial Sequence: Synthetic oligonucleotide
gaagcuugcgguggauucu

SEQ ID NO: 285299 - RNA, 19 nt, Artificial Sequence
  Description of Artificial Sequence: Synthetic oligonucleotide
aggcacguggcuacauucu

SEQ ID NO: 285300 - RNA, 19 nt, Artificial Sequence
  Description of Artificial Sequence: Synthetic oligonucleotide
uccauggucgucgguccau

SEQ ID NO: 285301 - RNA, 19 nt, Artificial Sequence
  Description of Artificial Sequence: Synthetic oligonucleotide
gucuacgauggcacggcuc

SEQ ID NO: 285302 - RNA, 19 nt, Artificial Sequence
  Description of Artificial Sequence: Synthetic oligonucleotide
gaauauugagcugcaccuu

SEQ ID NO: 285303 - RNA, 19 nt, Artificial Sequence
  Description of Artificial Sequence: Synthetic oligonucleotide
ggggucuauaacugcuauc

SEQ ID NO: 285304 - RNA, 19 nt, Artificial Sequence
  Description of Artificial Sequence: Synthetic oligonucleotide
guguaccucacuggcuuca

SEQ ID NO: 285305 - RNA, 19 nt, Artificial Sequence
  Description of Artificial Sequence: Synthetic oligonucleotide
gguccaauagguacacgaa

SEQ ID NO: 285306 - RNA, 19 nt, Artificial Sequence
  Description of Artificial Sequence: Synthetic oligonucleotide
cgaacuuucggauuacugu

SEQ ID NO: 285307 - RNA, 19 nt, Artificial Sequence
  Description of Artificial Sequence: Synthetic oligonucleotide
ucguuccuuuggguucugc

SEQ ID NO: 285308 - RNA, 19 nt, Artificial Sequence
  Description of Artificial Sequence: Synthetic oligonucleotide
agcuagacuuucgccucca

SEQ ID NO: 285309 - RNA, 19 nt, Artificial Sequence
  Description of Artificial Sequence: Synthetic oligonucleotide
uaagugcguucagggucug

SEQ ID NO: 285310 - RNA, 19 nt, Artificial Sequence
  Description of Artificial Sequence: Synthetic oligonucleotide
gagccaacuagugcuuugu

SEQ ID NO: 285311 - RNA, 19 nt, Artificial Sequence
  Description of Artificial Sequence: Synthetic oligonucleotide
uggcacggcucuccauguc

SEQ ID NO: 285312 - RNA, 19 nt, Artificial Sequence
  Description of Artificial Sequence: Synthetic oligonucleotide
cgaagauuccucuggaucu

SEQ ID NO: 285313 - RNA, 19 nt, Artificial Sequence
  Description of Artificial Sequence: Synthetic oligonucleotide
aaucgaccuccgagaauuu

SEQ ID NO: 285314 - RNA, 19 nt, Artificial Sequence
  Description of Artificial Sequence: Synthetic oligonucleotide
gucgugaaagguaacucuu

SEQ ID NO: 285315 - RNA, 19 nt, Artificial Sequence
  Description of Artificial Sequence: Synthetic oligonucleotide
gcuuugcuugcccgcaaca

SEQ ID NO: 285316 - RNA, 19 nt, Artificial Sequence
  Description of Artificial Sequence: Synthetic oligonucleotide
cgauaauucccagaaggca

SEQ ID NO: 285317 - RNA, 19 nt, Artificial Sequence
  Description of Artificial Sequence: Synthetic oligonucleotide
uuccaucagugugcuuccu

SEQ ID NO: 285318 - RNA, 19 nt, Artificial Sequence
  Description of Artificial Sequence: Synthetic oligonucleotide
ugacggucaccaggucugu

SEQ ID NO: 285319 - RNA, 19 nt, Artificial Sequence
  Description of Artificial Sequence: Synthetic oligonucleotide
aucgaccuccgagaauuuu

SEQ ID NO: 285320 - RNA, 19 nt, Artificial Sequence
  Description of Artificial Sequence: Synthetic oligonucleotide
cugauaggucucugauaaa

SEQ ID NO: 285321 - RNA, 19 nt, Artificial Sequence
  Description of Artificial Sequence: Synthetic oligonucleotide
guacacgaacuuucggauu

SEQ ID NO: 285322 - RNA, 19 nt, Artificial Sequence
  Description of Artificial Sequence: Synthetic oligonucleotide
cugguuggcccugauuuua

SEQ ID NO: 285323 - RNA, 19 nt, Artificial Sequence
  Description of Artificial Sequence: Synthetic oligonucleotide
guucugugugagauuacau

SEQ ID NO: 285324 - RNA, 19 nt, Artificial Sequence
  Description of Artificial Sequence: Synthetic oligonucleotide
acguggcuacauucuucau

SEQ ID NO: 285325 - RNA, 19 nt, Artificial Sequence
  Description of Artificial Sequence: Synthetic oligonucleotide
gggauuguauuuucacaau

SEQ ID NO: 285326 - RNA, 19 nt, Artificial Sequence
  Description of Artificial Sequence: Synthetic oligonucleotide
gucccuagucagcuagacu

SEQ ID NO: 285327 - RNA, 19 nt, Artificial Sequence
  Description of Artificial Sequence: Synthetic oligonucleotide
gggucugcugaaguuuuga

SEQ ID NO: 285328 - RNA, 19 nt, Artificial Sequence
  Description of Artificial Sequence: Synthetic oligonucleotide
caguacagugagugugucu

SEQ ID NO: 285329 - RNA, 19 nt, Artificial Sequence
  Description of Artificial Sequence: Synthetic oligonucleotide
gacacguguccagucugcu

SEQ ID NO: 285330 - RNA, 19 nt, Artificial Sequence
  Description of Artificial Sequence: Synthetic oligonucleotide
ccuagucagcuagacuuuc

SEQ ID NO: 285331 - RNA, 19 nt, Artificial Sequence
  Description of Artificial Sequence: Synthetic oligonucleotide
gcgguggauucuuugauuu

SEQ ID NO: 285332 - RNA, 19 nt, Artificial Sequence
  Description of Artificial Sequence: Synthetic oligonucleotide
uucguuccuuuggguucug

SEQ ID NO: 285333 - RNA, 19 nt, Artificial Sequence
  Description of Artificial Sequence: Synthetic oligonucleotide
ggucgucgguccaugugac

SEQ ID NO: 285334 - RNA, 19 nt, Artificial Sequence
  Description of Artificial Sequence: Synthetic oligonucleotide
cgucgguccaugugacucc

SEQ ID NO: 285335 - RNA, 19 nt, Artificial Sequence
  Description of Artificial Sequence: Synthetic oligonucleotide
agugugcuuccuggcuggu

SEQ ID NO: 285336 - RNA, 19 nt, Artificial Sequence
  Description of Artificial Sequence: Synthetic oligonucleotide
caucgacagccucgccauc

SEQ ID NO: 285337 - RNA, 19 nt, Artificial Sequence
  Description of Artificial Sequence: Synthetic oligonucleotide
cucaagaggcaggcaugca

SEQ ID NO: 285338 - RNA, 19 nt, Artificial Sequence
  Description of Artificial Sequence: Synthetic oligonucleotide
gccuugcuagcuccaguuc

SEQ ID NO: 285339 - RNA, 19 nt, Artificial Sequence
  Description of Artificial Sequence: Synthetic oligonucleotide
ccucaguagccaugauauc

SEQ ID NO: 285340 - RNA, 19 nt, Artificial Sequence
  Description of Artificial Sequence: Synthetic oligonucleotide
cuuucggauuacuguuaau

SEQ ID NO: 285341 - RNA, 19 nt, Artificial Sequence
  Description of Artificial Sequence: Synthetic oligonucleotide
ccaaggaauuuggaucuga

SEQ ID NO: 285342 - RNA, 19 nt, Artificial Sequence
  Description of Artificial Sequence: Synthetic oligonucleotide
gaggcacaauugaaguauu

SEQ ID NO: 285343 - RNA, 19 nt, Artificial Sequence
  Description of Artificial Sequence: Synthetic oligonucleotide
cuugcccgcaacagggauu

SEQ ID NO: 285344 - RNA, 19 nt, Artificial Sequence
  Description of Artificial Sequence: Synthetic oligonucleotide
cuacgauggcacggcucuc

SEQ ID NO: 285345 - RNA, 19 nt, Artificial Sequence
  Description of Artificial Sequence: Synthetic oligonucleotide
gcguucagggucugcugaa

SEQ ID NO: 285346 - RNA, 19 nt, Artificial Sequence
  Description of Artificial Sequence: Synthetic oligonucleotide
gucgucgguccaugugacu

SEQ ID NO: 285347 - RNA, 19 nt, Artificial Sequence
  Description of Artificial Sequence: Synthetic oligonucleotide
cgccuccaacuuuaaaaca

SEQ ID NO: 285348 - RNA, 19 nt, Artificial Sequence
  Description of Artificial Sequence: Synthetic oligonucleotide
cacgaacuuucggauuacu

SEQ ID NO: 285349 - RNA, 19 nt, Artificial Sequence
  Description of Artificial Sequence: Synthetic oligonucleotide
ccaucgacagccucgccau

SEQ ID NO: 285350 - RNA, 19 nt, Artificial Sequence
  Description of Artificial Sequence: Synthetic oligonucleotide
cacaggguguucagagcuu

SEQ ID NO: 285351 - RNA, 19 nt, Artificial Sequence
  Description of Artificial Sequence: Synthetic oligonucleotide
cccgcaacagggauuguau

SEQ ID NO: 285352 - RNA, 19 nt, Artificial Sequence
  Description of Artificial Sequence: Synthetic oligonucleotide
ccauggucgucgguccaug

SEQ ID NO: 285353 - RNA, 19 nt, Artificial Sequence
  Description of Artificial Sequence: Synthetic oligonucleotide
gcuagacuuucgccuccaa

SEQ ID NO: 285354 - RNA, 19 nt, Artificial Sequence
  Description of Artificial Sequence: Synthetic oligonucleotide
gcuugcccgcaacagggau

SEQ ID NO: 285355 - RNA, 19 nt, Artificial Sequence
  Description of Artificial Sequence: Synthetic oligonucleotide
agcuugcgguggauucuuu

SEQ ID NO: 285356 - RNA, 19 nt, Artificial Sequence
  Description of Artificial Sequence: Synthetic oligonucleotide
gcccgcaacagggauugua

SEQ ID NO: 285357 - RNA, 19 nt, Artificial Sequence
  Description of Artificial Sequence: Synthetic oligonucleotide
cgaauauccuuggcaaucu

SEQ ID NO: 285358 - RNA, 19 nt, Artificial Sequence
  Description of Artificial Sequence: Synthetic oligonucleotide
gcuauccauggucgucggu

SEQ ID NO: 285359 - RNA, 19 nt, Artificial Sequence
  Description of Artificial Sequence: Synthetic oligonucleotide
gcagguauaugaggagguu

SEQ ID NO: 285360 - RNA, 19 nt, Artificial Sequence
  Description of Artificial Sequence: Synthetic oligonucleotide
ccgcaacagggauuguauu

SEQ ID NO: 285361 - RNA, 19 nt, Artificial Sequence
  Description of Artificial Sequence: Synthetic oligonucleotide
cgacagccucgccauccuu

SEQ ID NO: 285362 - RNA, 19 nt, Artificial Sequence
  Description of Artificial Sequence: Synthetic oligonucleotide
uuaguuaggaauaauaaaa

SEQ ID NO: 285363 - RNA, 19 nt, Artificial Sequence
  Description of Artificial Sequence: Synthetic oligonucleotide
agugauucaaguuucacuc

SEQ ID NO: 285364 - RNA, 19 nt, Artificial Sequence
  Description of Artificial Sequence: Synthetic oligonucleotide
gaaacaauuuuccagguag

SEQ ID NO: 285365 - RNA, 19 nt, Artificial Sequence
  Description of Artificial Sequence: Synthetic oligonucleotide
aacuauuccaauucguagg

SEQ ID NO: 285366 - RNA, 19 nt, Artificial Sequence
  Description of Artificial Sequence: Synthetic oligonucleotide
auaaaaguaaguuagucca

SEQ ID NO: 285367 - RNA, 19 nt, Artificial Sequence
  Description of Artificial Sequence: Synthetic oligonucleotide
aaucuaaccuccccaaacc

SEQ ID NO: 285368 - RNA, 19 nt, Artificial Sequence
  Description of Artificial Sequence: Synthetic oligonucleotide
aaaaguucaccccaaaugu

SEQ ID NO: 285369 - RNA, 19 nt, Artificial Sequence
  Description of Artificial Sequence: Synthetic oligonucleotide
uugaguaucaacucgaaca

SEQ ID NO: 285370 - RNA, 19 nt, Artificial Sequence
  Description of Artificial Sequence: Synthetic oligonucleotide
aaauauuauggguauuuag

SEQ ID NO: 285371 - RNA, 19 nt, Artificial Sequence
  Description of Artificial Sequence: Synthetic oligonucleotide
accaguaauucucagacac

SEQ ID NO: 285372 - RNA, 19 nt, Artificial Sequence
  Description of Artificial Sequence: Synthetic oligonucleotide
agcaguucguaccagaucg

SEQ ID NO: 285373 - RNA, 19 nt, Artificial Sequence
  Description of Artificial Sequence: Synthetic oligonucleotide
aaacuauuccaauucguag

SEQ ID NO: 285374 - RNA, 19 nt, Artificial Sequence
  Description of Artificial Sequence: Synthetic oligonucleotide
guaaguuucauuuucguac

SEQ ID NO: 285375 - RNA, 19 nt, Artificial Sequence
  Description of Artificial Sequence: Synthetic oligonucleotide
auaucuauacuucuuuggg

SEQ ID NO: 285376 - RNA, 19 nt, Artificial Sequence
  Description of Artificial Sequence: Synthetic oligonucleotide
agucaaauugcauaauuuc

SEQ ID NO: 285377 - RNA, 19 nt, Artificial Sequence
  Description of Artificial Sequence: Synthetic oligonucleotide
uuuccaguaaaucuaaccu

SEQ ID NO: 285378 - RNA, 19 nt, Artificial Sequence
  Description of Artificial Sequence: Synthetic oligonucleotide
augagaaucaauauuguac

SEQ ID NO: 285379 - RNA, 19 nt, Artificial Sequence
  Description of Artificial Sequence: Synthetic oligonucleotide
ugagaaucaauauuguaca

SEQ ID NO: 285380 - RNA, 19 nt, Artificial Sequence
  Description of Artificial Sequence: Synthetic oligonucleotide
uuauccuucaaaauacagc

SEQ ID NO: 285381 - RNA, 19 nt, Artificial Sequence
  Description of Artificial Sequence: Synthetic oligonucleotide
uauuaagcccucaacauga

SEQ ID NO: 285382 - RNA, 19 nt, Artificial Sequence
  Description of Artificial Sequence: Synthetic oligonucleotide
aacuucuaaauacugggug

SEQ ID NO: 285383 - RNA, 19 nt, Artificial Sequence
  Description of Artificial Sequence: Synthetic oligonucleotide
auuauggguauuuagcaag

SEQ ID NO: 285384 - RNA, 19 nt, Artificial Sequence
  Description of Artificial Sequence: Synthetic oligonucleotide
aaacagaaaccaguggugc

SEQ ID NO: 285385 - RNA, 19 nt, Artificial Sequence
  Description of Artificial Sequence: Synthetic oligonucleotide
uaauaagcaguccaguagc

SEQ ID NO: 285386 - RNA, 19 nt, Artificial Sequence
  Description of Artificial Sequence: Synthetic oligonucleotide
cauuuaaucaacagggcag

SEQ ID NO: 285387 - RNA, 19 nt, Artificial Sequence
  Description of Artificial Sequence: Synthetic oligonucleotide
ugagcuuuaaaccuguuau

SEQ ID NO: 285388 - RNA, 19 nt, Artificial Sequence
  Description of Artificial Sequence: Synthetic oligonucleotide
gugaauacaucacauauug

SEQ ID NO: 285389 - RNA, 19 nt, Artificial Sequence
  Description of Artificial Sequence: Synthetic oligonucleotide
aacagaaaccaguggugcc

SEQ ID NO: 285390 - RNA, 19 nt, Artificial Sequence
  Description of Artificial Sequence: Synthetic oligonucleotide
uuauggcucaucuuuaaag

SEQ ID NO: 285391 - RNA, 19 nt, Artificial Sequence
  Description of Artificial Sequence: Synthetic oligonucleotide
cuagaguaaacuuuucacc

SEQ ID NO: 285392 - RNA, 19 nt, Artificial Sequence
  Description of Artificial Sequence: Synthetic oligonucleotide
uguuaauauggaaugcuug

SEQ ID NO: 285393 - RNA, 19 nt, Artificial Sequence
  Description of Artificial Sequence: Synthetic oligonucleotide
aaucaagucaaauugcaua

SEQ ID NO: 285394 - RNA, 19 nt, Artificial Sequence
  Description of Artificial Sequence: Synthetic oligonucleotide
gaugcgugagcuuuaaacc

SEQ ID NO: 285395 - RNA, 19 nt, Artificial Sequence
  Description of Artificial Sequence: Synthetic oligonucleotide
ucuagaguaaacuuuucac

SEQ ID NO: 285396 - RNA, 19 nt, Artificial Sequence
  Description of Artificial Sequence: Synthetic oligonucleotide
uuuaguuaggaauaauaaa

SEQ ID NO: 285397 - RNA, 19 nt, Artificial Sequence
  Description of Artificial Sequence: Synthetic oligonucleotide
ugaccuauaaccugauuag

SEQ ID NO: 285398 - RNA, 19 nt, Artificial Sequence
  Description of Artificial Sequence: Synthetic oligonucleotide
uucuaaauaaguccugcca

SEQ ID NO: 285399 - RNA, 19 nt, Artificial Sequence
  Description of Artificial Sequence: Synthetic oligonucleotide
acauauugcauaaagagca

SEQ ID NO: 285400 - RNA, 19 nt, Artificial Sequence
  Description of Artificial Sequence: Synthetic oligonucleotide
aaaucuaugggacucuaau

SEQ ID NO: 285401 - RNA, 19 nt, Artificial Sequence
  Description of Artificial Sequence: Synthetic oligonucleotide
uugacaaaauauuaugggu

SEQ ID NO: 285402 - RNA, 19 nt, Artificial Sequence
  Description of Artificial Sequence: Synthetic oligonucleotide
aucacuuaucuucagaacu

SEQ ID NO: 285403 - RNA, 19 nt, Artificial Sequence
  Description of Artificial Sequence: Synthetic oligonucleotide
auauuauggguauuuagca

SEQ ID NO: 285404 - RNA, 19 nt, Artificial Sequence
  Description of Artificial Sequence: Synthetic oligonucleotide
ucuacugcgucucucuggg

SEQ ID NO: 285405 - RNA, 19 nt, Artificial Sequence
  Description of Artificial Sequence: Synthetic oligonucleotide
ugucuuguugcacacacca

SEQ ID NO: 285406 - RNA, 19 nt, Artificial Sequence
  Description of Artificial Sequence: Synthetic oligonucleotide
aauugagagaaacaauuuu

SEQ ID NO: 285407 - RNA, 19 nt, Artificial Sequence
  Description of Artificial Sequence: Synthetic oligonucleotide
uugaccuauaaccugauua

SEQ ID NO: 285408 - RNA, 19 nt, Artificial Sequence
  Description of Artificial Sequence: Synthetic oligonucleotide
uuucuaagcaguucguacc

SEQ ID NO: 285409 - RNA, 19 nt, Artificial Sequence
  Description of Artificial Sequence: Synthetic oligonucleotide
uauggcucaucuuuaaagc

SEQ ID NO: 285410 - RNA, 19 nt, Artificial Sequence
  Description of Artificial Sequence: Synthetic oligonucleotide
ugaaaggucaucuacuuua

SEQ ID NO: 285411 - RNA, 19 nt, Artificial Sequence
  Description of Artificial Sequence: Synthetic oligonucleotide
gaaucaauauuguacagaa

SEQ ID NO: 285412 - RNA, 19 nt, Artificial Sequence
  Description of Artificial Sequence: Synthetic oligonucleotide
aaucauguauaucuacaga

SEQ ID NO: 285413 - RNA, 19 nt, Artificial Sequence
  Description of Artificial Sequence: Synthetic oligonucleotide
uuucguaccugccaaaagu

SEQ ID NO: 285414 - RNA, 19 nt, Artificial Sequence
  Description of Artificial Sequence: Synthetic oligonucleotide
uuacaucuguaccauauac

SEQ ID NO: 285415 - RNA, 19 nt, Artificial Sequence
  Description of Artificial Sequence: Synthetic oligonucleotide
aucauguauaucuacagau

SEQ ID NO: 285416 - RNA, 19 nt, Artificial Sequence
  Description of Artificial Sequence: Synthetic oligonucleotide
ugaugcgugagcuuuaaac

SEQ ID NO: 285417 - RNA, 19 nt, Artificial Sequence
  Description of Artificial Sequence: Synthetic oligonucleotide
gaggguaguagaaugaugc

SEQ ID NO: 285418 - RNA, 19 nt, Artificial Sequence
  Description of Artificial Sequence: Synthetic oligonucleotide
uuaucacuuaucuucagaa

SEQ ID NO: 285419 - RNA, 19 nt, Artificial Sequence
  Description of Artificial Sequence: Synthetic oligonucleotide
uuuagcaaguagauaagaa

SEQ ID NO: 285420 - RNA, 19 nt, Artificial Sequence
  Description of Artificial Sequence: Synthetic oligonucleotide
uauuuagcaaguagauaag

SEQ ID NO: 285421 - RNA, 19 nt, Artificial Sequence
  Description of Artificial Sequence: Synthetic oligonucleotide
aaaacuuuauuugaccuau

SEQ ID NO: 285422 - RNA, 19 nt, Artificial Sequence
  Description of Artificial Sequence: Synthetic oligonucleotide
aauugcauaauuucacaua

SEQ ID NO: 285423 - RNA, 19 nt, Artificial Sequence
  Description of Artificial Sequence: Synthetic oligonucleotide
aaccuguuaucacuuaucu

SEQ ID NO: 285424 - RNA, 19 nt, Artificial Sequence
  Description of Artificial Sequence: Synthetic oligonucleotide
uauuguauccaauugcuuu

SEQ ID NO: 285425 - RNA, 19 nt, Artificial Sequence
  Description of Artificial Sequence: Synthetic oligonucleotide
uguaccauauacauuuuau

SEQ ID NO: 285426 - RNA, 19 nt, Artificial Sequence
  Description of Artificial Sequence: Synthetic oligonucleotide
uauccaauugcuuuucacu

SEQ ID NO: 285427 - RNA, 19 nt, Artificial Sequence
  Description of Artificial Sequence: Synthetic oligonucleotide
gguucuuacaucuaauuug

SEQ ID NO: 285428 - RNA, 19 nt, Artificial Sequence
  Description of Artificial Sequence: Synthetic oligonucleotide
ugaagaucuugguugaaca

SEQ ID NO: 285429 - RNA, 19 nt, Artificial Sequence
  Description of Artificial Sequence: Synthetic oligonucleotide
uuugaacagacuuucugcu

SEQ ID NO: 285430 - RNA, 19 nt, Artificial Sequence
  Description of Artificial Sequence: Synthetic oligonucleotide
uucacggugacuuucggac

SEQ ID NO: 285431 - RNA, 19 nt, Artificial Sequence
  Description of Artificial Sequence: Synthetic oligonucleotide
uucacauaagagaggguag

SEQ ID NO: 285432 - RNA, 19 nt, Artificial Sequence
  Description of Artificial Sequence: Synthetic oligonucleotide
cuugacaagcacuagucac

SEQ ID NO: 285433 - RNA, 19 nt, Artificial Sequence
  Description of Artificial Sequence: Synthetic oligonucleotide
ugaugauacaugauaacua

SEQ ID NO: 285434 - RNA, 19 nt, Artificial Sequence
  Description of Artificial Sequence: Synthetic oligonucleotide
ugauucaaguuucacucug

SEQ ID NO: 285435 - RNA, 19 nt, Artificial Sequence
  Description of Artificial Sequence: Synthetic oligonucleotide
auauuaagcccucaacaug

SEQ ID NO: 285436 - RNA, 19 nt, Artificial Sequence
  Description of Artificial Sequence: Synthetic oligonucleotide
aucuaugggacucuaauaa

SEQ ID NO: 285437 - RNA, 19 nt, Artificial Sequence
  Description of Artificial Sequence: Synthetic oligonucleotide
accagaucgcgcuaacugc

SEQ ID NO: 285438 - RNA, 19 nt, Artificial Sequence
  Description of Artificial Sequence: Synthetic oligonucleotide
gaaugcgcagcccacaggc

SEQ ID NO: 285439 - RNA, 19 nt, Artificial Sequence
  Description of Artificial Sequence: Synthetic oligonucleotide
ugugauauuguauccaauu

SEQ ID NO: 285440 - RNA, 19 nt, Artificial Sequence
  Description of Artificial Sequence: Synthetic oligonucleotide
guuaauauggaaugcuuga

SEQ ID NO: 285441 - RNA, 19 nt, Artificial Sequence
  Description of Artificial Sequence: Synthetic oligonucleotide
aaguaaguuaguccaggcu

SEQ ID NO: 285442 - RNA, 19 nt, Artificial Sequence
  Description of Artificial Sequence: Synthetic oligonucleotide
uucagaauaaccacauuuu

SEQ ID NO: 285443 - RNA, 19 nt, Artificial Sequence
  Description of Artificial Sequence: Synthetic oligonucleotide
ugaguaucaacucgaacau

SEQ ID NO: 285444 - RNA, 19 nt, Artificial Sequence
  Description of Artificial Sequence: Synthetic oligonucleotide
ucacuaagaacuucuaaau

SEQ ID NO: 285445 - RNA, 19 nt, Artificial Sequence
  Description of Artificial Sequence: Synthetic oligonucleotide
uugacaagcacuagucaca

SEQ ID NO: 285446 - RNA, 19 nt, Artificial Sequence
  Description of Artificial Sequence: Synthetic oligonucleotide
cacaguaugaauacauuuc

SEQ ID NO: 285447 - RNA, 19 nt, Artificial Sequence
  Description of Artificial Sequence: Synthetic oligonucleotide
ucuaugggacucuaauaag

SEQ ID NO: 285448 - RNA, 19 nt, Artificial Sequence
  Description of Artificial Sequence: Synthetic oligonucleotide
ucuuacaucuaauuugcau

SEQ ID NO: 285449 - RNA, 19 nt, Artificial Sequence
  Description of Artificial Sequence: Synthetic oligonucleotide
aguuacacguuuuauccca

SEQ ID NO: 285450 - RNA, 19 nt, Artificial Sequence
  Description of Artificial Sequence: Synthetic oligonucleotide
ccuguuaucacuuaucuuc

SEQ ID NO: 285451 - RNA, 19 nt, Artificial Sequence
  Description of Artificial Sequence: Synthetic oligonucleotide
aagaauaccauaguugcua

SEQ ID NO: 285452 - RNA, 19 nt, Artificial Sequence
  Description of Artificial Sequence: Synthetic oligonucleotide
agagugaggaaguaacuca

SEQ ID NO: 285453 - RNA, 19 nt, Artificial Sequence
  Description of Artificial Sequence: Synthetic oligonucleotide
gaugaugauucccaguauc

SEQ ID NO: 285454 - RNA, 19 nt, Artificial Sequence
  Description of Artificial Sequence: Synthetic oligonucleotide
uauuccaauucguaggaaa

SEQ ID NO: 285455 - RNA, 19 nt, Artificial Sequence
  Description of Artificial Sequence: Synthetic oligonucleotide
aaacaauuuuccagguagg

SEQ ID NO: 285456 - RNA, 19 nt, Artificial Sequence
  Description of Artificial Sequence: Synthetic oligonucleotide
aguaucaacucgaacauca

SEQ ID NO: 285457 - RNA, 19 nt, Artificial Sequence
  Description of Artificial Sequence: Synthetic oligonucleotide
uagauaugccagaugagaa

SEQ ID NO: 285458 - RNA, 19 nt, Artificial Sequence
  Description of Artificial Sequence: Synthetic oligonucleotide
gcaguuacacguuuuaucc

SEQ ID NO: 285459 - RNA, 19 nt, Artificial Sequence
  Description of Artificial Sequence: Synthetic oligonucleotide
uucguaccugccaaaagug

SEQ ID NO: 285460 - RNA, 19 nt, Artificial Sequence
  Description of Artificial Sequence: Synthetic oligonucleotide
ucaacucgaacaucaaagu

SEQ ID NO: 285461 - RNA, 19 nt, Artificial Sequence
  Description of Artificial Sequence: Synthetic oligonucleotide
uuuauauuacagcccucca

SEQ ID NO: 285462 - RNA, 19 nt, Artificial Sequence
  Description of Artificial Sequence: Synthetic oligonucleotide
uuaucugaagaucuugguu

SEQ ID NO: 285463 - RNA, 19 nt, Artificial Sequence
  Description of Artificial Sequence: Synthetic oligonucleotide
aaaccuguuaucacuuauc

SEQ ID NO: 285464 - RNA, 19 nt, Artificial Sequence
  Description of Artificial Sequence: Synthetic oligonucleotide
guaacucagggcuucacug

SEQ ID NO: 285465 - RNA, 19 nt, Artificial Sequence
  Description of Artificial Sequence: Synthetic oligonucleotide
uauuauggguauuuagcaa

SEQ ID NO: 285466 - RNA, 19 nt, Artificial Sequence
  Description of Artificial Sequence: Synthetic oligonucleotide
uuuucguaccugccaaaag

SEQ ID NO: 285467 - RNA, 19 nt, Artificial Sequence
  Description of Artificial Sequence: Synthetic oligonucleotide
ugaauacaucacauauugc

SEQ ID NO: 285468 - RNA, 19 nt, Artificial Sequence
  Description of Artificial Sequence: Synthetic oligonucleotide
guuagagugaggaaguaac

SEQ ID NO: 285469 - RNA, 19 nt, Artificial Sequence
  Description of Artificial Sequence: Synthetic oligonucleotide
caucuauugaugauacaug

SEQ ID NO: 285470 - RNA, 19 nt, Artificial Sequence
  Description of Artificial Sequence: Synthetic oligonucleotide
uuugcaaaucuaugggacu

SEQ ID NO: 285471 - RNA, 19 nt, Artificial Sequence
  Description of Artificial Sequence: Synthetic oligonucleotide
acuauuccaauucguagga

SEQ ID NO: 285472 - RNA, 19 nt, Artificial Sequence
  Description of Artificial Sequence: Synthetic oligonucleotide
auuguuggaauuaaaugcu

SEQ ID NO: 285473 - RNA, 19 nt, Artificial Sequence
  Description of Artificial Sequence: Synthetic oligonucleotide
gaaacagaaaccaguggug

SEQ ID NO: 285474 - RNA, 19 nt, Artificial Sequence
  Description of Artificial Sequence: Synthetic oligonucleotide
caguaucucagauagccug

SEQ ID NO: 285475 - RNA, 19 nt, Artificial Sequence
  Description of Artificial Sequence: Synthetic oligonucleotide
ucauuuucguaccugccaa

SEQ ID NO: 285476 - RNA, 19 nt, Artificial Sequence
  Description of Artificial Sequence: Synthetic oligonucleotide
aagcaguucguaccagauc

SEQ ID NO: 285477 - RNA, 19 nt, Artificial Sequence
  Description of Artificial Sequence: Synthetic oligonucleotide
cuuacuuguggcugggaag

SEQ ID NO: 285478 - RNA, 19 nt, Artificial Sequence
  Description of Artificial Sequence: Synthetic oligonucleotide
aaaacuauuccaauucgua

SEQ ID NO: 285479 - RNA, 19 nt, Artificial Sequence
  Description of Artificial Sequence: Synthetic oligonucleotide
aaucuaugggacucuaaua

SEQ ID NO: 285480 - RNA, 19 nt, Artificial Sequence
  Description of Artificial Sequence: Synthetic oligonucleotide
ucgaacaucaaagucuacu

SEQ ID NO: 285481 - RNA, 19 nt, Artificial Sequence
  Description of Artificial Sequence: Synthetic oligonucleotide
uuagagugaggaaguaacu

SEQ ID NO: 285482 - RNA, 19 nt, Artificial Sequence
  Description of Artificial Sequence: Synthetic oligonucleotide
ucuugacaagcacuaguca

SEQ ID NO: 285483 - RNA, 19 nt, Artificial Sequence
  Description of Artificial Sequence: Synthetic oligonucleotide
agcgguacauuccuugguc

SEQ ID NO: 285484 - RNA, 19 nt, Artificial Sequence
  Description of Artificial Sequence: Synthetic oligonucleotide
uuauggguauuuagcaagu

SEQ ID NO: 285485 - RNA, 19 nt, Artificial Sequence
  Description of Artificial Sequence: Synthetic oligonucleotide
uuugcaucuauugaugaua

SEQ ID NO: 285486 - RNA, 19 nt, Artificial Sequence
  Description of Artificial Sequence: Synthetic oligonucleotide
uucagaacuuuaguuagga

SEQ ID NO: 285487 - RNA, 19 nt, Artificial Sequence
  Description of Artificial Sequence: Synthetic oligonucleotide
uuaauauggaaugcuugac

SEQ ID NO: 285488 - RNA, 19 nt, Artificial Sequence
  Description of Artificial Sequence: Synthetic oligonucleotide
ugauuagauaugccagaug

SEQ ID NO: 285489 - RNA, 19 nt, Artificial Sequence
  Description of Artificial Sequence: Synthetic oligonucleotide
aaauacugggugaauacau

SEQ ID NO: 285490 - RNA, 19 nt, Artificial Sequence
  Description of Artificial Sequence: Synthetic oligonucleotide
aucuugacaagcacuaguc

SEQ ID NO: 285491 - RNA, 19 nt, Artificial Sequence
  Description of Artificial Sequence: Synthetic oligonucleotide
uuaccaucagagcacaauu

SEQ ID NO: 285492 - RNA, 19 nt, Artificial Sequence
  Description of Artificial Sequence: Synthetic oligonucleotide
uuccaguaaaucuaaccuc

SEQ ID NO: 285493 - RNA, 19 nt, Artificial Sequence
  Description of Artificial Sequence: Synthetic oligonucleotide
uaagcaguccaguagcuua

SEQ ID NO: 285494 - RNA, 19 nt, Artificial Sequence
  Description of Artificial Sequence: Synthetic oligonucleotide
cacuagucacaacagauuc

SEQ ID NO: 285495 - RNA, 19 nt, Artificial Sequence
  Description of Artificial Sequence: Synthetic oligonucleotide
ucuaaauacugggugaaua

SEQ ID NO: 285496 - RNA, 19 nt, Artificial Sequence
  Description of Artificial Sequence: Synthetic oligonucleotide
ucuuacuuguggcugggaa

SEQ ID NO: 285497 - RNA, 19 nt, Artificial Sequence
  Description of Artificial Sequence: Synthetic oligonucleotide
aagcccgcuuuccacagag

SEQ ID NO: 285498 - RNA, 19 nt, Artificial Sequence
  Description of Artificial Sequence: Synthetic oligonucleotide
uaucacuuaucuucagaac

SEQ ID NO: 285499 - RNA, 19 nt, Artificial Sequence
  Description of Artificial Sequence: Synthetic oligonucleotide
uuguugucauccauucggc

SEQ ID NO: 285500 - RNA, 19 nt, Artificial Sequence
  Description of Artificial Sequence: Synthetic oligonucleotide
acuaccaguaauucucaga

SEQ ID NO: 285501 - RNA, 19 nt, Artificial Sequence
  Description of Artificial Sequence: Synthetic oligonucleotide
ucuauugaugauacaugau

SEQ ID NO: 285502 - RNA, 19 nt, Artificial Sequence
  Description of Artificial Sequence: Synthetic oligonucleotide
acuguuaauauggaaugcu

SEQ ID NO: 285503 - RNA, 19 nt, Artificial Sequence
  Description of Artificial Sequence: Synthetic oligonucleotide
cuaaccuccccaaaccaug

SEQ ID NO: 285504 - RNA, 19 nt, Artificial Sequence
  Description of Artificial Sequence: Synthetic oligonucleotide
gguaagcugacacuguuug

SEQ ID NO: 285505 - RNA, 19 nt, Artificial Sequence
  Description of Artificial Sequence: Synthetic oligonucleotide
ucguccauguacauccuga

SEQ ID NO: 285506 - RNA, 19 nt, Artificial Sequence
  Description of Artificial Sequence: Synthetic oligonucleotide
ugcuugacaagcuuugcau

SEQ ID NO: 285507 - RNA, 19 nt, Artificial Sequence
  Description of Artificial Sequence: Synthetic oligonucleotide
caacaugagcccaacauga

SEQ ID NO: 285508 - RNA, 19 nt, Artificial Sequence
  Description of Artificial Sequence: Synthetic oligonucleotide
gauauuguauccaauugcu

SEQ ID NO: 285509 - RNA, 19 nt, Artificial Sequence
  Description of Artificial Sequence: Synthetic oligonucleotide
aauauucaguucucaucau

SEQ ID NO: 285510 - RNA, 19 nt, Artificial Sequence
  Description of Artificial Sequence: Synthetic oligonucleotide
agaacuuuaguuaggaaua

SEQ ID NO: 285511 - RNA, 19 nt, Artificial Sequence
  Description of Artificial Sequence: Synthetic oligonucleotide
acaucaagccccgccaccc

SEQ ID NO: 285512 - RNA, 19 nt, Artificial Sequence
  Description of Artificial Sequence: Synthetic oligonucleotide
acaauucacaguaugaaua

SEQ ID NO: 285513 - RNA, 19 nt, Artificial Sequence
  Description of Artificial Sequence: Synthetic oligonucleotide
ucggacguuagagugagga

SEQ ID NO: 285514 - RNA, 19 nt, Artificial Sequence
  Description of Artificial Sequence: Synthetic oligonucleotide
uuucggacguuagagugag

SEQ ID NO: 285515 - RNA, 19 nt, Artificial Sequence
  Description of Artificial Sequence: Synthetic oligonucleotide
aaaauauuauggguauuua

SEQ ID NO: 285516 - RNA, 19 nt, Artificial Sequence
  Description of Artificial Sequence: Synthetic oligonucleotide
ugcgugagcuuuaaaccug

SEQ ID NO: 285517 - RNA, 19 nt, Artificial Sequence
  Description of Artificial Sequence: Synthetic oligonucleotide
agggcagcaaacuaguuuu

SEQ ID NO: 285518 - RNA, 19 nt, Artificial Sequence
  Description of Artificial Sequence: Synthetic oligonucleotide
ucacuuaucuucagaacuu

SEQ ID NO: 285519 - RNA, 19 nt, Artificial Sequence
  Description of Artificial Sequence: Synthetic oligonucleotide
aacucagggcuucacugca

SEQ ID NO: 285520 - RNA, 19 nt, Artificial Sequence
  Description of Artificial Sequence: Synthetic oligonucleotide
guaccauauacauuuuauc

SEQ ID NO: 285521 - RNA, 19 nt, Artificial Sequence
  Description of Artificial Sequence: Synthetic oligonucleotide
augcgugagcuuuaaaccu

SEQ ID NO: 285522 - RNA, 19 nt, Artificial Sequence
  Description of Artificial Sequence: Synthetic oligonucleotide
aaccuagauucauucugca

SEQ ID NO: 285523 - RNA, 19 nt, Artificial Sequence
  Description of Artificial Sequence: Synthetic oligonucleotide
aagccacuaccaguaauuc

SEQ ID NO: 285524 - RNA, 19 nt, Artificial Sequence
  Description of Artificial Sequence: Synthetic oligonucleotide
uguuaucacuuaucuucag

SEQ ID NO: 285525 - RNA, 19 nt, Artificial Sequence
  Description of Artificial Sequence: Synthetic oligonucleotide
aagucaaauugcauaauuu

SEQ ID NO: 285526 - RNA, 19 nt, Artificial Sequence
  Description of Artificial Sequence: Synthetic oligonucleotide
aguaacucagggcuucacu

SEQ ID NO: 285527 - RNA, 19 nt, Artificial Sequence
  Description of Artificial Sequence: Synthetic oligonucleotide
gguaguagaaugaugcgug

SEQ ID NO: 285528 - RNA, 19 nt, Artificial Sequence
  Description of Artificial Sequence: Synthetic oligonucleotide
uaagcaguucguaccagau

SEQ ID NO: 285529 - RNA, 19 nt, Artificial Sequence
  Description of Artificial Sequence: Synthetic oligonucleotide
agauucauucugcagugau

SEQ ID NO: 285530 - RNA, 19 nt, Artificial Sequence
  Description of Artificial Sequence: Synthetic oligonucleotide
uccagggugcaguuacacg

SEQ ID NO: 285531 - RNA, 19 nt, Artificial Sequence
  Description of Artificial Sequence: Synthetic oligonucleotide
accuagauucauucugcag

SEQ ID NO: 285532 - RNA, 19 nt, Artificial Sequence
  Description of Artificial Sequence: Synthetic oligonucleotide
ucuauacuucuuuggguaa

SEQ ID NO: 285533 - RNA, 19 nt, Artificial Sequence
  Description of Artificial Sequence: Synthetic oligonucleotide
agauaugccagaugagaau

SEQ ID NO: 285534 - RNA, 19 nt, Artificial Sequence
  Description of Artificial Sequence: Synthetic oligonucleotide
uacacguuuuaucccagau

SEQ ID NO: 285535 - RNA, 19 nt, Artificial Sequence
  Description of Artificial Sequence: Synthetic oligonucleotide
ucuaaccuccccaaaccau

SEQ ID NO: 285536 - RNA, 19 nt, Artificial Sequence
  Description of Artificial Sequence: Synthetic oligonucleotide
guuaucacuuaucuucaga

SEQ ID NO: 285537 - RNA, 19 nt, Artificial Sequence
  Description of Artificial Sequence: Synthetic oligonucleotide
ucacggugacuuucggacg

SEQ ID NO: 285538 - RNA, 19 nt, Artificial Sequence
  Description of Artificial Sequence: Synthetic oligonucleotide
gagaaugcgcagcccacag

SEQ ID NO: 285539 - RNA, 19 nt, Artificial Sequence
  Description of Artificial Sequence: Synthetic oligonucleotide
uaaccuccccaaaccaugc

SEQ ID NO: 285540 - RNA, 19 nt, Artificial Sequence
  Description of Artificial Sequence: Synthetic oligonucleotide
ucauauugucaaagauucu

SEQ ID NO: 285541 - RNA, 19 nt, Artificial Sequence
  Description of Artificial Sequence: Synthetic oligonucleotide
cuuguggcugggaagaaca

SEQ ID NO: 285542 - RNA, 19 nt, Artificial Sequence
  Description of Artificial Sequence: Synthetic oligonucleotide
uagaagguugggcuuggac

SEQ ID NO: 285543 - RNA, 19 nt, Artificial Sequence
  Description of Artificial Sequence: Synthetic oligonucleotide
ucuaggguccuguuacaga

SEQ ID NO: 285544 - RNA, 19 nt, Artificial Sequence
  Description of Artificial Sequence: Synthetic oligonucleotide
acuuuaguuaggaauaaua

SEQ ID NO: 285545 - RNA, 19 nt, Artificial Sequence
  Description of Artificial Sequence: Synthetic oligonucleotide
uagagugaggaaguaacuc

SEQ ID NO: 285546 - RNA, 19 nt, Artificial Sequence
  Description of Artificial Sequence: Synthetic oligonucleotide
ugacuguuaagccccuggu

SEQ ID NO: 285547 - RNA, 19 nt, Artificial Sequence
  Description of Artificial Sequence: Synthetic oligonucleotide
caucagagcacaauucaca

SEQ ID NO: 285548 - RNA, 19 nt, Artificial Sequence
  Description of Artificial Sequence: Synthetic oligonucleotide
caugauugcaaguuguugu

SEQ ID NO: 285549 - RNA, 19 nt, Artificial Sequence
  Description of Artificial Sequence: Synthetic oligonucleotide
aauaagcaguccaguagcu

SEQ ID NO: 285550 - RNA, 19 nt, Artificial Sequence
  Description of Artificial Sequence: Synthetic oligonucleotide
aguucguaccagaucgcgc

SEQ ID NO: 285551 - RNA, 19 nt, Artificial Sequence
  Description of Artificial Sequence: Synthetic oligonucleotide
ucacauaagagaggguagu

SEQ ID NO: 285552 - RNA, 19 nt, Artificial Sequence
  Description of Artificial Sequence: Synthetic oligonucleotide
acucuaauaagcaguccag

SEQ ID NO: 285553 - RNA, 19 nt, Artificial Sequence
  Description of Artificial Sequence: Synthetic oligonucleotide
cuugaguaucaacucgaac

SEQ ID NO: 285554 - RNA, 19 nt, Artificial Sequence
  Description of Artificial Sequence: Synthetic oligonucleotide
ugucaggagcgcaugugga

SEQ ID NO: 285555 - RNA, 19 nt, Artificial Sequence
  Description of Artificial Sequence: Synthetic oligonucleotide
uugaagcccgcuuuccaca

SEQ ID NO: 285556 - RNA, 19 nt, Artificial Sequence
  Description of Artificial Sequence: Synthetic oligonucleotide
caguuacacguuuuauccc

SEQ ID NO: 285557 - RNA, 19 nt, Artificial Sequence
  Description of Artificial Sequence: Synthetic oligonucleotide
agccccgccacccaaaaga

SEQ ID NO: 285558 - RNA, 19 nt, Artificial Sequence
  Description of Artificial Sequence: Synthetic oligonucleotide
agaaugaugcgugagcuuu

SEQ ID NO: 285559 - RNA, 19 nt, Artificial Sequence
  Description of Artificial Sequence: Synthetic oligonucleotide
caacucgaacaucaaaguc

SEQ ID NO: 285560 - RNA, 19 nt, Artificial Sequence
  Description of Artificial Sequence: Synthetic oligonucleotide
ugagcccaacaugacagag

SEQ ID NO: 285561 - RNA, 19 nt, Artificial Sequence
  Description of Artificial Sequence: Synthetic oligonucleotide
aaguaacucagggcuucac

SEQ ID NO: 285562 - RNA, 19 nt, Artificial Sequence
  Description of Artificial Sequence: Synthetic oligonucleotide
uuaaucaacagggcagcaa

SEQ ID NO: 285563 - RNA, 19 nt, Artificial Sequence
  Description of Artificial Sequence: Synthetic oligonucleotide
ucuugaguaucaacucgaa

SEQ ID NO: 285564 - RNA, 19 nt, Artificial Sequence
  Description of Artificial Sequence: Synthetic oligonucleotide
aggguccuguuacagagca

SEQ ID NO: 285565 - RNA, 19 nt, Artificial Sequence
  Description of Artificial Sequence: Synthetic oligonucleotide
agcaauaauuuucucccuu

SEQ ID NO: 285566 - RNA, 19 nt, Artificial Sequence
  Description of Artificial Sequence: Synthetic oligonucleotide
aguugcuaaauaucuuuua

SEQ ID NO: 285567 - RNA, 19 nt, Artificial Sequence
  Description of Artificial Sequence: Synthetic oligonucleotide
guacauccugaagagaaug

SEQ ID NO: 285568 - RNA, 19 nt, Artificial Sequence
  Description of Artificial Sequence: Synthetic oligonucleotide
cugcagacauucagaagcc

SEQ ID NO: 285569 - RNA, 19 nt, Artificial Sequence
  Description of Artificial Sequence: Synthetic oligonucleotide
ugaagcccgcuuuccacag

SEQ ID NO: 285570 - RNA, 19 nt, Artificial Sequence
  Description of Artificial Sequence: Synthetic oligonucleotide
agaauaccauaguugcuaa

SEQ ID NO: 285571 - RNA, 19 nt, Artificial Sequence
  Description of Artificial Sequence: Synthetic oligonucleotide
ucguaaguguggccauagg

SEQ ID NO: 285572 - RNA, 19 nt, Artificial Sequence
  Description of Artificial Sequence: Synthetic oligonucleotide
uuuggguaaguuucauuuu

SEQ ID NO: 285573 - RNA, 19 nt, Artificial Sequence
  Description of Artificial Sequence: Synthetic oligonucleotide
augcuugacaagcuuugca

SEQ ID NO: 285574 - RNA, 19 nt, Artificial Sequence
  Description of Artificial Sequence: Synthetic oligonucleotide
ucguaccugccaaaagugu

SEQ ID NO: 285575 - RNA, 19 nt, Artificial Sequence
  Description of Artificial Sequence: Synthetic oligonucleotide
uguugucauccauucggcu

SEQ ID NO: 285576 - RNA, 19 nt, Artificial Sequence
  Description of Artificial Sequence: Synthetic oligonucleotide
aggugguugugauaucuga

SEQ ID NO: 285577 - RNA, 19 nt, Artificial Sequence
  Description of Artificial Sequence: Synthetic oligonucleotide
agaaugcgcagcccacagg

SEQ ID NO: 285578 - RNA, 19 nt, Artificial Sequence
  Description of Artificial Sequence: Synthetic oligonucleotide
uaaguccugccaccagugc

SEQ ID NO: 285579 - RNA, 19 nt, Artificial Sequence
  Description of Artificial Sequence: Synthetic oligonucleotide
ggaauuuugcuguagauuu

SEQ ID NO: 285580 - RNA, 19 nt, Artificial Sequence
  Description of Artificial Sequence: Synthetic oligonucleotide
gacccaugaggguaagcug

SEQ ID NO: 285581 - RNA, 19 nt, Artificial Sequence
  Description of Artificial Sequence: Synthetic oligonucleotide
agcacaauucacaguauga

SEQ ID NO: 285582 - RNA, 19 nt, Artificial Sequence
  Description of Artificial Sequence: Synthetic oligonucleotide
acugcaauugagagaaaca

SEQ ID NO: 285583 - RNA, 19 nt, Artificial Sequence
  Description of Artificial Sequence: Synthetic oligonucleotide
uuuuaccaugagcaauaau

SEQ ID NO: 285584 - RNA, 19 nt, Artificial Sequence
  Description of Artificial Sequence: Synthetic oligonucleotide
agcaaccuagauucauucu

SEQ ID NO: 285585 - RNA, 19 nt, Artificial Sequence
  Description of Artificial Sequence: Synthetic oligonucleotide
cacuguuaauauggaaugc

SEQ ID NO: 285586 - RNA, 19 nt, Artificial Sequence
  Description of Artificial Sequence: Synthetic oligonucleotide
uugucuuguugcacacacc

SEQ ID NO: 285587 - RNA, 19 nt, Artificial Sequence
  Description of Artificial Sequence: Synthetic oligonucleotide
acuuuuacaucuguaccau

SEQ ID NO: 285588 - RNA, 19 nt, Artificial Sequence
  Description of Artificial Sequence: Synthetic oligonucleotide
ccacuguuaauauggaaug

SEQ ID NO: 285589 - RNA, 19 nt, Artificial Sequence
  Description of Artificial Sequence: Synthetic oligonucleotide
aucaacagggcagcaaacu

SEQ ID NO: 285590 - RNA, 19 nt, Artificial Sequence
  Description of Artificial Sequence: Synthetic oligonucleotide
cauauuaagcccucaacau

SEQ ID NO: 285591 - RNA, 19 nt, Artificial Sequence
  Description of Artificial Sequence: Synthetic oligonucleotide
gcauaaagagcaugauugc

SEQ ID NO: 285592 - RNA, 19 nt, Artificial Sequence
  Description of Artificial Sequence: Synthetic oligonucleotide
agcgcauguggaauugugg

SEQ ID NO: 285593 - RNA, 19 nt, Artificial Sequence
  Description of Artificial Sequence: Synthetic oligonucleotide
ucgcgcuaacugcucauug

SEQ ID NO: 285594 - RNA, 19 nt, Artificial Sequence
  Description of Artificial Sequence: Synthetic oligonucleotide
acaauuuuccagguaggaa

SEQ ID NO: 285595 - RNA, 19 nt, Artificial Sequence
  Description of Artificial Sequence: Synthetic oligonucleotide
ucuaagcaguucguaccag

SEQ ID NO: 285596 - RNA, 19 nt, Artificial Sequence
  Description of Artificial Sequence: Synthetic oligonucleotide
uuacacguuuuaucccaga

SEQ ID NO: 285597 - RNA, 19 nt, Artificial Sequence
  Description of Artificial Sequence: Synthetic oligonucleotide
gugguugugauaucugaaa

SEQ ID NO: 285598 - RNA, 19 nt, Artificial Sequence
  Description of Artificial Sequence: Synthetic oligonucleotide
auuccaauucguaggaaaa

SEQ ID NO: 285599 - RNA, 19 nt, Artificial Sequence
  Description of Artificial Sequence: Synthetic oligonucleotide
gguugugaucuugacaagc

SEQ ID NO: 285600 - RNA, 19 nt, Artificial Sequence
  Description of Artificial Sequence: Synthetic oligonucleotide
accuauaaccugauuagau

SEQ ID NO: 285601 - RNA, 19 nt, Artificial Sequence
  Description of Artificial Sequence: Synthetic oligonucleotide
aaaguucaccccaaauguu

SEQ ID NO: 285602 - RNA, 19 nt, Artificial Sequence
  Description of Artificial Sequence: Synthetic oligonucleotide
cuucucguaaguguggcca

SEQ ID NO: 285603 - RNA, 19 nt, Artificial Sequence
  Description of Artificial Sequence: Synthetic oligonucleotide
cacguuuuaucccagauuu

SEQ ID NO: 285604 - RNA, 19 nt, Artificial Sequence
  Description of Artificial Sequence: Synthetic oligonucleotide
aaucaauauuguacagaaa

SEQ ID NO: 285605 - RNA, 19 nt, Artificial Sequence
  Description of Artificial Sequence: Synthetic oligonucleotide
uaugccagaugagaaucaa

SEQ ID NO: 285606 - RNA, 19 nt, Artificial Sequence
  Description of Artificial Sequence: Synthetic oligonucleotide
ugacaagcacuagucacaa

SEQ ID NO: 285607 - RNA, 19 nt, Artificial Sequence
  Description of Artificial Sequence: Synthetic oligonucleotide
ugcuaacuucuucauucau

SEQ ID NO: 285608 - RNA, 19 nt, Artificial Sequence
  Description of Artificial Sequence: Synthetic oligonucleotide
aagcccucaacaugaccau

SEQ ID NO: 285609 - RNA, 19 nt, Artificial Sequence
  Description of Artificial Sequence: Synthetic oligonucleotide
auuaagcccucaacaugac

SEQ ID NO: 285610 - RNA, 19 nt, Artificial Sequence
  Description of Artificial Sequence: Synthetic oligonucleotide
agccacuaccaguaauucu

SEQ ID NO: 285611 - RNA, 19 nt, Artificial Sequence
  Description of Artificial Sequence: Synthetic oligonucleotide
caguucguaccagaucgcg

SEQ ID NO: 285612 - RNA, 19 nt, Artificial Sequence
  Description of Artificial Sequence: Synthetic oligonucleotide
acacguuuuaucccagauu

SEQ ID NO: 285613 - RNA, 19 nt, Artificial Sequence
  Description of Artificial Sequence: Synthetic oligonucleotide
auagccugagugugcaaaa

SEQ ID NO: 285614 - RNA, 19 nt, Artificial Sequence
  Description of Artificial Sequence: Synthetic oligonucleotide
guucguaccagaucgcgcu

SEQ ID NO: 285615 - RNA, 19 nt, Artificial Sequence
  Description of Artificial Sequence: Synthetic oligonucleotide
aguaucucagauagccuga

SEQ ID NO: 285616 - RNA, 19 nt, Artificial Sequence
  Description of Artificial Sequence: Synthetic oligonucleotide
ugcaucuauugaugauaca

SEQ ID NO: 285617 - RNA, 19 nt, Artificial Sequence
  Description of Artificial Sequence: Synthetic oligonucleotide
accugccaaaagugugugg

SEQ ID NO: 285618 - RNA, 19 nt, Artificial Sequence
  Description of Artificial Sequence: Synthetic oligonucleotide
guaguagaaugaugcguga

SEQ ID NO: 285619 - RNA, 19 nt, Artificial Sequence
  Description of Artificial Sequence: Synthetic oligonucleotide
augauacaugauaacuaca

SEQ ID NO: 285620 - RNA, 19 nt, Artificial Sequence
  Description of Artificial Sequence: Synthetic oligonucleotide
acuagucacaacagauuca

SEQ ID NO: 285621 - RNA, 19 nt, Artificial Sequence
  Description of Artificial Sequence: Synthetic oligonucleotide
cuuucggacguuagaguga

SEQ ID NO: 285622 - RNA, 19 nt, Artificial Sequence
  Description of Artificial Sequence: Synthetic oligonucleotide
gccacuaccaguaauucuc

SEQ ID NO: 285623 - RNA, 19 nt, Artificial Sequence
  Description of Artificial Sequence: Synthetic oligonucleotide
guuacacguuuuaucccag

SEQ ID NO: 285624 - RNA, 19 nt, Artificial Sequence
  Description of Artificial Sequence: Synthetic oligonucleotide
agguugugaucuugacaag

SEQ ID NO: 285625 - RNA, 19 nt, Artificial Sequence
  Description of Artificial Sequence: Synthetic oligonucleotide
uugccuuugaagcccgcuu

SEQ ID NO: 285626 - RNA, 19 nt, Artificial Sequence
  Description of Artificial Sequence: Synthetic oligonucleotide
cucguaaguguggccauag

SEQ ID NO: 285627 - RNA, 19 nt, Artificial Sequence
  Description of Artificial Sequence: Synthetic oligonucleotide
uuugaccuauaaccugauu

SEQ ID NO: 285628 - RNA, 19 nt, Artificial Sequence
  Description of Artificial Sequence: Synthetic oligonucleotide
agauuucacuuugcuaacu

SEQ ID NO: 285629 - RNA, 19 nt, Artificial Sequence
  Description of Artificial Sequence: Synthetic oligonucleotide
cuucuuacuuguggcuggg

SEQ ID NO: 285630 - RNA, 19 nt, Artificial Sequence
  Description of Artificial Sequence: Synthetic oligonucleotide
cucaacaugagcccaacau

SEQ ID NO: 285631 - RNA, 19 nt, Artificial Sequence
  Description of Artificial Sequence: Synthetic oligonucleotide
agcuguugugauguuaaaa

SEQ ID NO: 285632 - RNA, 19 nt, Artificial Sequence
  Description of Artificial Sequence: Synthetic oligonucleotide
uuuuaccaucagagcacaa

SEQ ID NO: 285633 - RNA, 19 nt, Artificial Sequence
  Description of Artificial Sequence: Synthetic oligonucleotide
cacuaccaguaauucucag

SEQ ID NO: 285634 - RNA, 19 nt, Artificial Sequence
  Description of Artificial Sequence: Synthetic oligonucleotide
uccugaaguaggucgccau

SEQ ID NO: 285635 - RNA, 19 nt, Artificial Sequence
  Description of Artificial Sequence: Synthetic oligonucleotide
gaccuauaaccugauuaga

SEQ ID NO: 285636 - RNA, 19 nt, Artificial Sequence
  Description of Artificial Sequence: Synthetic oligonucleotide
gguaaguuucauuuucgua

SEQ ID NO: 285637 - RNA, 19 nt, Artificial Sequence
  Description of Artificial Sequence: Synthetic oligonucleotide
cagauuucuagaguaaacu

SEQ ID NO: 285638 - RNA, 19 nt, Artificial Sequence
  Description of Artificial Sequence: Synthetic oligonucleotide
uaccugccaaaagugugug

SEQ ID NO: 285639 - RNA, 19 nt, Artificial Sequence
  Description of Artificial Sequence: Synthetic oligonucleotide
acucgaacaucaaagucua

SEQ ID NO: 285640 - RNA, 19 nt, Artificial Sequence
  Description of Artificial Sequence: Synthetic oligonucleotide
aagcccuaggagguuguga

SEQ ID NO: 285641 - RNA, 19 nt, Artificial Sequence
  Description of Artificial Sequence: Synthetic oligonucleotide
cuuugaagcccgcuuucca

SEQ ID NO: 285642 - RNA, 19 nt, Artificial Sequence
  Description of Artificial Sequence: Synthetic oligonucleotide
gguccuguuacagagcaga

SEQ ID NO: 285643 - RNA, 19 nt, Artificial Sequence
  Description of Artificial Sequence: Synthetic oligonucleotide
gugagcuuuaaaccuguua

SEQ ID NO: 285644 - RNA, 19 nt, Artificial Sequence
  Description of Artificial Sequence: Synthetic oligonucleotide
ccaauugcuuuucacucac

SEQ ID NO: 285645 - RNA, 19 nt, Artificial Sequence
  Description of Artificial Sequence: Synthetic oligonucleotide
gagcgcauguggaauugug

SEQ ID NO: 285646 - RNA, 19 nt, Artificial Sequence
  Description of Artificial Sequence: Synthetic oligonucleotide
uagauucauucugcaguga

SEQ ID NO: 285647 - RNA, 19 nt, Artificial Sequence
  Description of Artificial Sequence: Synthetic oligonucleotide
auguauaucuacagauuuu

SEQ ID NO: 285648 - RNA, 19 nt, Artificial Sequence
  Description of Artificial Sequence: Synthetic oligonucleotide
aagccccgccacccaaaag

SEQ ID NO: 285649 - RNA, 19 nt, Artificial Sequence
  Description of Artificial Sequence: Synthetic oligonucleotide
auaugccagaugagaauca

SEQ ID NO: 285650 - RNA, 19 nt, Artificial Sequence
  Description of Artificial Sequence: Synthetic oligonucleotide
acguuuuaucccagauuuc

SEQ ID NO: 285651 - RNA, 19 nt, Artificial Sequence
  Description of Artificial Sequence: Synthetic oligonucleotide
aaagcccuaggagguugug

SEQ ID NO: 285652 - RNA, 19 nt, Artificial Sequence
  Description of Artificial Sequence: Synthetic oligonucleotide
gacguuagagugaggaagu

SEQ ID NO: 285653 - RNA, 19 nt, Artificial Sequence
  Description of Artificial Sequence: Synthetic oligonucleotide
gaacuucuaaauacugggu

SEQ ID NO: 285654 - RNA, 19 nt, Artificial Sequence
  Description of Artificial Sequence: Synthetic oligonucleotide
cugugaaaggucaucuacu

SEQ ID NO: 285655 - RNA, 19 nt, Artificial Sequence
  Description of Artificial Sequence: Synthetic oligonucleotide
augagcccaacaugacaga

SEQ ID NO: 285656 - RNA, 19 nt, Artificial Sequence
  Description of Artificial Sequence: Synthetic oligonucleotide
ccuagauucauucugcagu

SEQ ID NO: 285657 - RNA, 19 nt, Artificial Sequence
  Description of Artificial Sequence: Synthetic oligonucleotide
cuucacggugacuuucgga

SEQ ID NO: 285658 - RNA, 19 nt, Artificial Sequence
  Description of Artificial Sequence: Synthetic oligonucleotide
gcaugauugcaaguuguug

SEQ ID NO: 285659 - RNA, 19 nt, Artificial Sequence
  Description of Artificial Sequence: Synthetic oligonucleotide
auauuguauccaauugcuu

SEQ ID NO: 285660 - RNA, 19 nt, Artificial Sequence
  Description of Artificial Sequence: Synthetic oligonucleotide
cacaauucacaguaugaau

SEQ ID NO: 285661 - RNA, 19 nt, Artificial Sequence
  Description of Artificial Sequence: Synthetic oligonucleotide
ccauaguugcuaaauaucu

SEQ ID NO: 285662 - RNA, 19 nt, Artificial Sequence
  Description of Artificial Sequence: Synthetic oligonucleotide
gaguaucaacucgaacauc

SEQ ID NO: 285663 - RNA, 19 nt, Artificial Sequence
  Description of Artificial Sequence: Synthetic oligonucleotide
cauccacuguuaauaugga

SEQ ID NO: 285664 - RNA, 19 nt, Artificial Sequence
  Description of Artificial Sequence: Synthetic oligonucleotide
acuuuauggcucaucuuua

SEQ ID NO: 285665 - RNA, 19 nt, Artificial Sequence
  Description of Artificial Sequence: Synthetic oligonucleotide
uucggacguuagagugagg

SEQ ID NO: 285666 - RNA, 19 nt, Artificial Sequence
  Description of Artificial Sequence: Synthetic oligonucleotide
cugcucucguccauguaca

SEQ ID NO: 285667 - RNA, 19 nt, Artificial Sequence
  Description of Artificial Sequence: Synthetic oligonucleotide
gcaucuauugaugauacau

SEQ ID NO: 285668 - RNA, 19 nt, Artificial Sequence
  Description of Artificial Sequence: Synthetic oligonucleotide
aaaccaugccagauuuguu

SEQ ID NO: 285669 - RNA, 19 nt, Artificial Sequence
  Description of Artificial Sequence: Synthetic oligonucleotide
gacaagcacuagucacaac

SEQ ID NO: 285670 - RNA, 19 nt, Artificial Sequence
  Description of Artificial Sequence: Synthetic oligonucleotide
cuagucacaacagauucau

SEQ ID NO: 285671 - RNA, 19 nt, Artificial Sequence
  Description of Artificial Sequence: Synthetic oligonucleotide
cugacucugcucucgucca

SEQ ID NO: 285672 - RNA, 19 nt, Artificial Sequence
  Description of Artificial Sequence: Synthetic oligonucleotide
cguaccugccaaaagugug

SEQ ID NO: 285673 - RNA, 19 nt, Artificial Sequence
  Description of Artificial Sequence: Synthetic oligonucleotide
auaagcaguccaguagcuu

SEQ ID NO: 285674 - RNA, 19 nt, Artificial Sequence
  Description of Artificial Sequence: Synthetic oligonucleotide
caaaucuaugggacucuaa

SEQ ID NO: 285675 - RNA, 19 nt, Artificial Sequence
  Description of Artificial Sequence: Synthetic oligonucleotide
gagcaugauugcaaguugu

SEQ ID NO: 285676 - RNA, 19 nt, Artificial Sequence
  Description of Artificial Sequence: Synthetic oligonucleotide
gaaggacccaugaggguaa

SEQ ID NO: 285677 - RNA, 19 nt, Artificial Sequence
  Description of Artificial Sequence: Synthetic oligonucleotide
gugauucaaguuucacucu

SEQ ID NO: 285678 - RNA, 19 nt, Artificial Sequence
  Description of Artificial Sequence: Synthetic oligonucleotide
ccuauaaccugauuagaua

SEQ ID NO: 285679 - RNA, 19 nt, Artificial Sequence
  Description of Artificial Sequence: Synthetic oligonucleotide
uucguaccagaucgcgcua

SEQ ID NO: 285680 - RNA, 19 nt, Artificial Sequence
  Description of Artificial Sequence: Synthetic oligonucleotide
ugcucaacaugagcccaac

SEQ ID NO: 285681 - RNA, 19 nt, Artificial Sequence
  Description of Artificial Sequence: Synthetic oligonucleotide
ggugacuuucggacguuag

SEQ ID NO: 285682 - RNA, 19 nt, Artificial Sequence
  Description of Artificial Sequence: Synthetic oligonucleotide
guaggaaaccucugcucua

SEQ ID NO: 285683 - RNA, 19 nt, Artificial Sequence
  Description of Artificial Sequence: Synthetic oligonucleotide
ggucaucuacuuuauggcu

SEQ ID NO: 285684 - RNA, 19 nt, Artificial Sequence
  Description of Artificial Sequence: Synthetic oligonucleotide
gggacucuaauaagcaguc

SEQ ID NO: 285685 - RNA, 19 nt, Artificial Sequence
  Description of Artificial Sequence: Synthetic oligonucleotide
gcccucaacaugaccaucc

SEQ ID NO: 285686 - RNA, 19 nt, Artificial Sequence
  Description of Artificial Sequence: Synthetic oligonucleotide
acagcaaccuagauucauu

SEQ ID NO: 285687 - RNA, 19 nt, Artificial Sequence
  Description of Artificial Sequence: Synthetic oligonucleotide
cauaguugcuaaauaucuu

SEQ ID NO: 285688 - RNA, 19 nt, Artificial Sequence
  Description of Artificial Sequence: Synthetic oligonucleotide
cagaucgcgcuaacugcuc

SEQ ID NO: 285689 - RNA, 19 nt, Artificial Sequence
  Description of Artificial Sequence: Synthetic oligonucleotide
gguauuuagcaaguagaua

SEQ ID NO: 285690 - RNA, 19 nt, Artificial Sequence
  Description of Artificial Sequence: Synthetic oligonucleotide
guaggucgccaugucagga

SEQ ID NO: 285691 - RNA, 19 nt, Artificial Sequence
  Description of Artificial Sequence: Synthetic oligonucleotide
gcagacauucagaagccuc

SEQ ID NO: 285692 - RNA, 19 nt, Artificial Sequence
  Description of Artificial Sequence: Synthetic oligonucleotide
cauuuucguaccugccaaa

SEQ ID NO: 285693 - RNA, 19 nt, Artificial Sequence
  Description of Artificial Sequence: Synthetic oligonucleotide
uucuuacuuguggcuggga

SEQ ID NO: 285694 - RNA, 19 nt, Artificial Sequence
  Description of Artificial Sequence: Synthetic oligonucleotide
ggaaggacccaugagggua

SEQ ID NO: 285695 - RNA, 19 nt, Artificial Sequence
  Description of Artificial Sequence: Synthetic oligonucleotide
gcuucacggugacuuucgg

SEQ ID NO: 285696 - RNA, 19 nt, Artificial Sequence
  Description of Artificial Sequence: Synthetic oligonucleotide
agcaugauugcaaguuguu

SEQ ID NO: 285697 - RNA, 19 nt, Artificial Sequence
  Description of Artificial Sequence: Synthetic oligonucleotide
auuugaccuauaaccugau

SEQ ID NO: 285698 - RNA, 19 nt, Artificial Sequence
  Description of Artificial Sequence: Synthetic oligonucleotide
gcccgcuuuccacagagca

SEQ ID NO: 285699 - RNA, 19 nt, Artificial Sequence
  Description of Artificial Sequence: Synthetic oligonucleotide
uguuaagccccugguucuu

SEQ ID NO: 285700 - RNA, 19 nt, Artificial Sequence
  Description of Artificial Sequence: Synthetic oligonucleotide
ugcucucguccauguacau

SEQ ID NO: 285701 - RNA, 19 nt, Artificial Sequence
  Description of Artificial Sequence: Synthetic oligonucleotide
agggugcaguuacacguuu

SEQ ID NO: 285702 - RNA, 19 nt, Artificial Sequence
  Description of Artificial Sequence: Synthetic oligonucleotide
guaccugccaaaagugugu

SEQ ID NO: 285703 - RNA, 19 nt, Artificial Sequence
  Description of Artificial Sequence: Synthetic oligonucleotide
ccugaaguaggucgccaug

SEQ ID NO: 285704 - RNA, 19 nt, Artificial Sequence
  Description of Artificial Sequence: Synthetic oligonucleotide
cagcucuccugaguuguac

SEQ ID NO: 285705 - RNA, 19 nt, Artificial Sequence
  Description of Artificial Sequence: Synthetic oligonucleotide
ggugguugugauaucugaa

SEQ ID NO: 285706 - RNA, 19 nt, Artificial Sequence
  Description of Artificial Sequence: Synthetic oligonucleotide
gaaugaugcgugagcuuua

SEQ ID NO: 285707 - RNA, 19 nt, Artificial Sequence
  Description of Artificial Sequence: Synthetic oligonucleotide
cuuuuaccaugagcaauaa

SEQ ID NO: 285708 - RNA, 19 nt, Artificial Sequence
  Description of Artificial Sequence: Synthetic oligonucleotide
caugccagauuuguuauuu

SEQ ID NO: 285709 - RNA, 19 nt, Artificial Sequence
  Description of Artificial Sequence: Synthetic oligonucleotide
ccagggugcaguuacacgu

SEQ ID NO: 285710 - RNA, 19 nt, Artificial Sequence
  Description of Artificial Sequence: Synthetic oligonucleotide
ggacccaugaggguaagcu

SEQ ID NO: 285711 - RNA, 19 nt, Artificial Sequence
  Description of Artificial Sequence: Synthetic oligonucleotide
gaagcccgcuuuccacaga

SEQ ID NO: 285712 - RNA, 19 nt, Artificial Sequence
  Description of Artificial Sequence: Synthetic oligonucleotide
ggguaguagaaugaugcgu

SEQ ID NO: 285713 - RNA, 19 nt, Artificial Sequence
  Description of Artificial Sequence: Synthetic oligonucleotide
agcccgcuuuccacagagc

SEQ ID NO: 285714 - RNA, 19 nt, Artificial Sequence
  Description of Artificial Sequence: Synthetic oligonucleotide
cacggugacuuucggacgu

SEQ ID NO: 285715 - RNA, 19 nt, Artificial Sequence
  Description of Artificial Sequence: Synthetic oligonucleotide
ggguauuuagcaaguagau

SEQ ID NO: 285716 - RNA, 19 nt, Artificial Sequence
  Description of Artificial Sequence: Synthetic oligonucleotide
cugcucaacaugagcccaa

SEQ ID NO: 285717 - RNA, 19 nt, Artificial Sequence
  Description of Artificial Sequence: Synthetic oligonucleotide
cagggcagcaaacuaguuu

SEQ ID NO: 285718 - RNA, 19 nt, Artificial Sequence
  Description of Artificial Sequence: Synthetic oligonucleotide
cuauuccaauucguaggaa

SEQ ID NO: 285719 - RNA, 19 nt, Artificial Sequence
  Description of Artificial Sequence: Synthetic oligonucleotide
gaucgcgcuaacugcucau

SEQ ID NO: 285720 - RNA, 19 nt, Artificial Sequence
  Description of Artificial Sequence: Synthetic oligonucleotide
gggaauuuugcuguagauu

SEQ ID NO: 285721 - RNA, 19 nt, Artificial Sequence
  Description of Artificial Sequence: Synthetic oligonucleotide
acguuagagugaggaagua

SEQ ID NO: 285722 - RNA, 19 nt, Artificial Sequence
  Description of Artificial Sequence: Synthetic oligonucleotide
aucgcgcuaacugcucauu

SEQ ID NO: 285723 - RNA, 19 nt, Artificial Sequence
  Description of Artificial Sequence: Synthetic oligonucleotide
caucaagccccgccaccca

SEQ ID NO: 285724 - RNA, 19 nt, Artificial Sequence
  Description of Artificial Sequence: Synthetic oligonucleotide
gcaguucguaccagaucgc

SEQ ID NO: 285725 - RNA, 19 nt, Artificial Sequence
  Description of Artificial Sequence: Synthetic oligonucleotide
cuccugaaguaggucgcca

SEQ ID NO: 285726 - RNA, 19 nt, Artificial Sequence
  Description of Artificial Sequence: Synthetic oligonucleotide
agcaguccaguagcuuaaa

SEQ ID NO: 285727 - RNA, 19 nt, Artificial Sequence
  Description of Artificial Sequence: Synthetic oligonucleotide
ccacuaccaguaauucuca

SEQ ID NO: 285728 - RNA, 19 nt, Artificial Sequence
  Description of Artificial Sequence: Synthetic oligonucleotide
cguaaguguggccauaggu

SEQ ID NO: 285729 - RNA, 19 nt, Artificial Sequence
  Description of Artificial Sequence: Synthetic oligonucleotide
gcucaacaugagcccaaca

SEQ ID NO: 285730 - RNA, 19 nt, Artificial Sequence
  Description of Artificial Sequence: Synthetic oligonucleotide
cugcucuaggguccuguua

SEQ ID NO: 285731 - RNA, 19 nt, Artificial Sequence
  Description of Artificial Sequence: Synthetic oligonucleotide
guuaagccccugguucuua

SEQ ID NO: 285732 - RNA, 19 nt, Artificial Sequence
  Description of Artificial Sequence: Synthetic oligonucleotide
acagggcagcaaacuaguu

SEQ ID NO: 285733 - RNA, 19 nt, Artificial Sequence
  Description of Artificial Sequence: Synthetic oligonucleotide
ccagaucgcgcuaacugcu

SEQ ID NO: 285734 - RNA, 19 nt, Artificial Sequence
  Description of Artificial Sequence: Synthetic oligonucleotide
cacuuaucuucagaacuuu

SEQ ID NO: 285735 - RNA, 19 nt, Artificial Sequence
  Description of Artificial Sequence: Synthetic oligonucleotide
gcaaaucuaugggacucua

SEQ ID NO: 285736 - RNA, 19 nt, Artificial Sequence
  Description of Artificial Sequence: Synthetic oligonucleotide
cccaaaccaugccagauuu

SEQ ID NO: 285737 - RNA, 19 nt, Artificial Sequence
  Description of Artificial Sequence: Synthetic oligonucleotide
cguaccagaucgcgcuaac

SEQ ID NO: 285738 - RNA, 19 nt, Artificial Sequence
  Description of Artificial Sequence: Synthetic oligonucleotide
gcucuggcaauuucauauu

SEQ ID NO: 285739 - RNA, 19 nt, Artificial Sequence
  Description of Artificial Sequence: Synthetic oligonucleotide
cguuagagugaggaaguaa

SEQ ID NO: 285740 - RNA, 19 nt, Artificial Sequence
  Description of Artificial Sequence: Synthetic oligonucleotide
acggugacuuucggacguu

SEQ ID NO: 285741 - RNA, 19 nt, Artificial Sequence
  Description of Artificial Sequence: Synthetic oligonucleotide
gcaguccucuguucauugu

SEQ ID NO: 285742 - RNA, 19 nt, Artificial Sequence
  Description of Artificial Sequence: Synthetic oligonucleotide
gcgugagcuuuaaaccugu

SEQ ID NO: 285743 - RNA, 19 nt, Artificial Sequence
  Description of Artificial Sequence: Synthetic oligonucleotide
cggacguuagagugaggaa

SEQ ID NO: 285744 - RNA, 19 nt, Artificial Sequence
  Description of Artificial Sequence: Synthetic oligonucleotide
gccccgccacccaaaagaa

SEQ ID NO: 285745 - RNA, 19 nt, Artificial Sequence
  Description of Artificial Sequence: Synthetic oligonucleotide
ggagcgcauguggaauugu

SEQ ID NO: 285746 - RNA, 19 nt, Artificial Sequence
  Description of Artificial Sequence: Synthetic oligonucleotide
cgcgcuaacugcucauugu

SEQ ID NO: 285747 - RNA, 19 nt, Artificial Sequence
  Description of Artificial Sequence: Synthetic oligonucleotide
ccccaaaccaugccagauu

SEQ ID NO: 285748 - RNA, 19 nt, Artificial Sequence
  Description of Artificial Sequence: Synthetic oligonucleotide
ccuaggagguugugaucuu

SEQ ID NO: 285749 - RNA, 19 nt, Artificial Sequence
  Description of Artificial Sequence: Synthetic oligonucleotide
cgccaugucaggagcgcau

SEQ ID NO: 285750 - RNA, 19 nt, Artificial Sequence
  Description of Artificial Sequence: Synthetic oligonucleotide
cggugacuuucggacguua

SEQ ID NO: 285751 - RNA, 19 nt, Artificial Sequence
  Description of Artificial Sequence: Synthetic oligonucleotide
agugcuacaauguuggucc

SEQ ID NO: 285752 - RNA, 19 nt, Artificial Sequence
  Description of Artificial Sequence: Synthetic oligonucleotide
auuuauguaaacuugggag

SEQ ID NO: 285753 - RNA, 19 nt, Artificial Sequence
  Description of Artificial Sequence: Synthetic oligonucleotide
aaauaucgcaagcaguucc

SEQ ID NO: 285754 - RNA, 19 nt, Artificial Sequence
  Description of Artificial Sequence: Synthetic oligonucleotide
aaucugaccagucagagcu

SEQ ID NO: 285755 - RNA, 19 nt, Artificial Sequence
  Description of Artificial Sequence: Synthetic oligonucleotide
gaguucaacauucagagug

SEQ ID NO: 285756 - RNA, 19 nt, Artificial Sequence
  Description of Artificial Sequence: Synthetic oligonucleotide
aauagaguaggugguaugc

SEQ ID NO: 285757 - RNA, 19 nt, Artificial Sequence
  Description of Artificial Sequence: Synthetic oligonucleotide
gaggucaauagucucaugg

SEQ ID NO: 285758 - RNA, 19 nt, Artificial Sequence
  Description of Artificial Sequence: Synthetic oligonucleotide
aggaguucaacauucagag

SEQ ID NO: 285759 - RNA, 19 nt, Artificial Sequence
  Description of Artificial Sequence: Synthetic oligonucleotide
aaugaaauccccuccccag

SEQ ID NO: 285760 - RNA, 19 nt, Artificial Sequence
  Description of Artificial Sequence: Synthetic oligonucleotide
aauguugguccucaauuuc

SEQ ID NO: 285761 - RNA, 19 nt, Artificial Sequence
  Description of Artificial Sequence: Synthetic oligonucleotide
ucuuucuugguacugggcc

SEQ ID NO: 285762 - RNA, 19 nt, Artificial Sequence
  Description of Artificial Sequence: Synthetic oligonucleotide
auuaaguccaccaacucac

SEQ ID NO: 285763 - RNA, 19 nt, Artificial Sequence
  Description of Artificial Sequence: Synthetic oligonucleotide
ucaauagucucaugguugg

SEQ ID NO: 285764 - RNA, 19 nt, Artificial Sequence
  Description of Artificial Sequence: Synthetic oligonucleotide
aaucuuaggaguucaacau

SEQ ID NO: 285765 - RNA, 19 nt, Artificial Sequence
  Description of Artificial Sequence: Synthetic oligonucleotide
aacgaagcucacuggaugg

SEQ ID NO: 285766 - RNA, 19 nt, Artificial Sequence
  Description of Artificial Sequence: Synthetic oligonucleotide
agaauggucucacagcagg

SEQ ID NO: 285767 - RNA, 19 nt, Artificial Sequence
  Description of Artificial Sequence: Synthetic oligonucleotide
cugguagucacuucuaagg

SEQ ID NO: 285768 - RNA, 19 nt, Artificial Sequence
  Description of Artificial Sequence: Synthetic oligonucleotide
ucaaaccaagauuaagucc

SEQ ID NO: 285769 - RNA, 19 nt, Artificial Sequence
  Description of Artificial Sequence: Synthetic oligonucleotide
aggaaaagauauuaguucu

SEQ ID NO: 285770 - RNA, 19 nt, Artificial Sequence
  Description of Artificial Sequence: Synthetic oligonucleotide
ucaugguugguacuugggg

SEQ ID NO: 285771 - RNA, 19 nt, Artificial Sequence
  Description of Artificial Sequence: Synthetic oligonucleotide
acuagcaccacugaggaag

SEQ ID NO: 285772 - RNA, 19 nt, Artificial Sequence
  Description of Artificial Sequence: Synthetic oligonucleotide
aacucacuaaugaaauccc

SEQ ID NO: 285773 - RNA, 19 nt, Artificial Sequence
  Description of Artificial Sequence: Synthetic oligonucleotide
aauguuuaacagguggcuc

SEQ ID NO: 285774 - RNA, 19 nt, Artificial Sequence
  Description of Artificial Sequence: Synthetic oligonucleotide
aaacgaagcucacuggaug

SEQ ID NO: 285775 - RNA, 19 nt, Artificial Sequence
  Description of Artificial Sequence: Synthetic oligonucleotide
uugcccgugagucagcacg

SEQ ID NO: 285776 - RNA, 19 nt, Artificial Sequence
  Description of Artificial Sequence: Synthetic oligonucleotide
ugaaacgaagcucacugga

SEQ ID NO: 285777 - RNA, 19 nt, Artificial Sequence
  Description of Artificial Sequence: Synthetic oligonucleotide
ugccauagaauguuuaaca

SEQ ID NO: 285778 - RNA, 19 nt, Artificial Sequence
  Description of Artificial Sequence: Synthetic oligonucleotide
aaggagaucaacuguuaca

SEQ ID NO: 285779 - RNA, 19 nt, Artificial Sequence
  Description of Artificial Sequence: Synthetic oligonucleotide
caaaacuuaaugauuccac

SEQ ID NO: 285780 - RNA, 19 nt, Artificial Sequence
  Description of Artificial Sequence: Synthetic oligonucleotide
ucuuaggaguucaacauuc

SEQ ID NO: 285781 - RNA, 19 nt, Artificial Sequence
  Description of Artificial Sequence: Synthetic oligonucleotide
ucaggaucgggguucauag

SEQ ID NO: 285782 - RNA, 19 nt, Artificial Sequence
  Description of Artificial Sequence: Synthetic oligonucleotide
gauggggaaacucggaggc

SEQ ID NO: 285783 - RNA, 19 nt, Artificial Sequence
  Description of Artificial Sequence: Synthetic oligonucleotide
ucauagagcaaacccaagu

SEQ ID NO: 285784 - RNA, 19 nt, Artificial Sequence
  Description of Artificial Sequence: Synthetic oligonucleotide
cacacguaccucuacaugc

SEQ ID NO: 285785 - RNA, 19 nt, Artificial Sequence
  Description of Artificial Sequence: Synthetic oligonucleotide
accagaauucucccaaugg

SEQ ID NO: 285786 - RNA, 19 nt, Artificial Sequence
  Description of Artificial Sequence: Synthetic oligonucleotide
uuaggaguucaacauucag

SEQ ID NO: 285787 - RNA, 19 nt, Artificial Sequence
  Description of Artificial Sequence: Synthetic oligonucleotide
gauaaccgaagccuuucgg

SEQ ID NO: 285788 - RNA, 19 nt, Artificial Sequence
  Description of Artificial Sequence: Synthetic oligonucleotide
gauuaaguccaccaacuca

SEQ ID NO: 285789 - RNA, 19 nt, Artificial Sequence
  Description of Artificial Sequence: Synthetic oligonucleotide
uucggggugccucagcugg

SEQ ID NO: 285790 - RNA, 19 nt, Artificial Sequence
  Description of Artificial Sequence: Synthetic oligonucleotide
cugaguaguugucugaagc

SEQ ID NO: 285791 - RNA, 19 nt, Artificial Sequence
  Description of Artificial Sequence: Synthetic oligonucleotide
uauuaguucuucugaauuc

SEQ ID NO: 285792 - RNA, 19 nt, Artificial Sequence
  Description of Artificial Sequence: Synthetic oligonucleotide
uccgcuuccgaccugaggu

SEQ ID NO: 285793 - RNA, 19 nt, Artificial Sequence
  Description of Artificial Sequence: Synthetic oligonucleotide
aauaucgcaagcaguuccg

SEQ ID NO: 285794 - RNA, 19 nt, Artificial Sequence
  Description of Artificial Sequence: Synthetic oligonucleotide
cauacuauccugaggugcc

SEQ ID NO: 285795 - RNA, 19 nt, Artificial Sequence
  Description of Artificial Sequence: Synthetic oligonucleotide
uuaaugauuccacgcugag

SEQ ID NO: 285796 - RNA, 19 nt, Artificial Sequence
  Description of Artificial Sequence: Synthetic oligonucleotide
aaaugucccacaugaguca

SEQ ID NO: 285797 - RNA, 19 nt, Artificial Sequence
  Description of Artificial Sequence: Synthetic oligonucleotide
uguagucuuggaugggagg

SEQ ID NO: 285798 - RNA, 19 nt, Artificial Sequence
  Description of Artificial Sequence: Synthetic oligonucleotide
uaaccgaagccuuucggag

SEQ ID NO: 285799 - RNA, 19 nt, Artificial Sequence
  Description of Artificial Sequence: Synthetic oligonucleotide
agauuaaguccaccaacuc

SEQ ID NO: 285800 - RNA, 19 nt, Artificial Sequence
  Description of Artificial Sequence: Synthetic oligonucleotide
ucugguagucacuucuaag

SEQ ID NO: 285801 - RNA, 19 nt, Artificial Sequence
  Description of Artificial Sequence: Synthetic oligonucleotide
agaaucuuaggaguucaac

SEQ ID NO: 285802 - RNA, 19 nt, Artificial Sequence
  Description of Artificial Sequence: Synthetic oligonucleotide
ugauaaccgaagccuuucg

SEQ ID NO: 285803 - RNA, 19 nt, Artificial Sequence
  Description of Artificial Sequence: Synthetic oligonucleotide
agugcuauccaguccagca

SEQ ID NO: 285804 - RNA, 19 nt, Artificial Sequence
  Description of Artificial Sequence: Synthetic oligonucleotide
gaaccuuccugccuuacug

SEQ ID NO: 285805 - RNA, 19 nt, Artificial Sequence
  Description of Artificial Sequence: Synthetic oligonucleotide
aggagugcuacaauguugg

SEQ ID NO: 285806 - RNA, 19 nt, Artificial Sequence
  Description of Artificial Sequence: Synthetic oligonucleotide
gaguuaucugccuccaagc

SEQ ID NO: 285807 - RNA, 19 nt, Artificial Sequence
  Description of Artificial Sequence: Synthetic oligonucleotide
uuuacaccugcacacccug

SEQ ID NO: 285808 - RNA, 19 nt, Artificial Sequence
  Description of Artificial Sequence: Synthetic oligonucleotide
gugguugguauuuccauag

SEQ ID NO: 285809 - RNA, 19 nt, Artificial Sequence
  Description of Artificial Sequence: Synthetic oligonucleotide
cuaggagcauucuugauca

SEQ ID NO: 285810 - RNA, 19 nt, Artificial Sequence
  Description of Artificial Sequence: Synthetic oligonucleotide
aucgcaagcaguuccgaag

SEQ ID NO: 285811 - RNA, 19 nt, Artificial Sequence
  Description of Artificial Sequence: Synthetic oligonucleotide
auaaccgaagccuuucgga

SEQ ID NO: 285812 - RNA, 19 nt, Artificial Sequence
  Description of Artificial Sequence: Synthetic oligonucleotide
agucaaaccaagauuaagu

SEQ ID NO: 285813 - RNA, 19 nt, Artificial Sequence
  Description of Artificial Sequence: Synthetic oligonucleotide
uacaugcaauccuuuaucu

SEQ ID NO: 285814 - RNA, 19 nt, Artificial Sequence
  Description of Artificial Sequence: Synthetic oligonucleotide
aaguccaccaacucacuaa

SEQ ID NO: 285815 - RNA, 19 nt, Artificial Sequence
  Description of Artificial Sequence: Synthetic oligonucleotide
uuaauguccccaagggaac

SEQ ID NO: 285816 - RNA, 19 nt, Artificial Sequence
  Description of Artificial Sequence: Synthetic oligonucleotide
ucuaggaacuagcaccacu

SEQ ID NO: 285817 - RNA, 19 nt, Artificial Sequence
  Description of Artificial Sequence: Synthetic oligonucleotide
caucucaacacugucuggg

SEQ ID NO: 285818 - RNA, 19 nt, Artificial Sequence
  Description of Artificial Sequence: Synthetic oligonucleotide
ucucaugguugguacuugg

SEQ ID NO: 285819 - RNA, 19 nt, Artificial Sequence
  Description of Artificial Sequence: Synthetic oligonucleotide
aaucaucucaacacugucu

SEQ ID NO: 285820 - RNA, 19 nt, Artificial Sequence
  Description of Artificial Sequence: Synthetic oligonucleotide
gaauuggcaggacuggaac

SEQ ID NO: 285821 - RNA, 19 nt, Artificial Sequence
  Description of Artificial Sequence: Synthetic oligonucleotide
agauauuaguucuucugaa

SEQ ID NO: 285822 - RNA, 19 nt, Artificial Sequence
  Description of Artificial Sequence: Synthetic oligonucleotide
gaacuagcaccacugagga

SEQ ID NO: 285823 - RNA, 19 nt, Artificial Sequence
  Description of Artificial Sequence: Synthetic oligonucleotide
gagucacacaaaagaaugg

SEQ ID NO: 285824 - RNA, 19 nt, Artificial Sequence
  Description of Artificial Sequence: Synthetic oligonucleotide
aaccaagauuaaguccacc

SEQ ID NO: 285825 - RNA, 19 nt, Artificial Sequence
  Description of Artificial Sequence: Synthetic oligonucleotide
aacuugccccguuugcauc

SEQ ID NO: 285826 - RNA, 19 nt, Artificial Sequence
  Description of Artificial Sequence: Synthetic oligonucleotide
gggaguuugaauagaaggg

SEQ ID NO: 285827 - RNA, 19 nt, Artificial Sequence
  Description of Artificial Sequence: Synthetic oligonucleotide
cuaaugaaauccccucccc

SEQ ID NO: 285828 - RNA, 19 nt, Artificial Sequence
  Description of Artificial Sequence: Synthetic oligonucleotide
uuccagagagaucuuuuac

SEQ ID NO: 285829 - RNA, 19 nt, Artificial Sequence
  Description of Artificial Sequence: Synthetic oligonucleotide
agcugucuacacuugagcu

SEQ ID NO: 285830 - RNA, 19 nt, Artificial Sequence
  Description of Artificial Sequence: Synthetic oligonucleotide
ggaacuagcaccacugagg

SEQ ID NO: 285831 - RNA, 19 nt, Artificial Sequence
  Description of Artificial Sequence: Synthetic oligonucleotide
ucacacuggauagugguug

SEQ ID NO: 285832 - RNA, 19 nt, Artificial Sequence
  Description of Artificial Sequence: Synthetic oligonucleotide
cuucuugaccacuggagac

SEQ ID NO: 285833 - RNA, 19 nt, Artificial Sequence
  Description of Artificial Sequence: Synthetic oligonucleotide
aggguuugcaggcuuucgg

SEQ ID NO: 285834 - RNA, 19 nt, Artificial Sequence
  Description of Artificial Sequence: Synthetic oligonucleotide
cacuaaugaaauccccucc

SEQ ID NO: 285835 - RNA, 19 nt, Artificial Sequence
  Description of Artificial Sequence: Synthetic oligonucleotide
cuuucagaggaaaagauau

SEQ ID NO: 285836 - RNA, 19 nt, Artificial Sequence
  Description of Artificial Sequence: Synthetic oligonucleotide
acucacuaaugaaaucccc

SEQ ID NO: 285837 - RNA, 19 nt, Artificial Sequence
  Description of Artificial Sequence: Synthetic oligonucleotide
aaacucggaggcaagaaau

SEQ ID NO: 285838 - RNA, 19 nt, Artificial Sequence
  Description of Artificial Sequence: Synthetic oligonucleotide
accaucagaaguagagggc

SEQ ID NO: 285839 - RNA, 19 nt, Artificial Sequence
  Description of Artificial Sequence: Synthetic oligonucleotide
aagagucacacaaaagaau

SEQ ID NO: 285840 - RNA, 19 nt, Artificial Sequence
  Description of Artificial Sequence: Synthetic oligonucleotide
ucacacguaccucuacaug

SEQ ID NO: 285841 - RNA, 19 nt, Artificial Sequence
  Description of Artificial Sequence: Synthetic oligonucleotide
caaagcacaaaugucccac

SEQ ID NO: 285842 - RNA, 19 nt, Artificial Sequence
  Description of Artificial Sequence: Synthetic oligonucleotide
uugaucacugcagguaaag

SEQ ID NO: 285843 - RNA, 19 nt, Artificial Sequence
  Description of Artificial Sequence: Synthetic oligonucleotide
gaguaggugguaugcuggg

SEQ ID NO: 285844 - RNA, 19 nt, Artificial Sequence
  Description of Artificial Sequence: Synthetic oligonucleotide
ggaguuaucugccuccaag

SEQ ID NO: 285845 - RNA, 19 nt, Artificial Sequence
  Description of Artificial Sequence: Synthetic oligonucleotide
gaggacgcaguagaaaagc

SEQ ID NO: 285846 - RNA, 19 nt, Artificial Sequence
  Description of Artificial Sequence: Synthetic oligonucleotide
gaaucaucucaacacuguc

SEQ ID NO: 285847 - RNA, 19 nt, Artificial Sequence
  Description of Artificial Sequence: Synthetic oligonucleotide
cuuaaugauuccacgcuga

SEQ ID NO: 285848 - RNA, 19 nt, Artificial Sequence
  Description of Artificial Sequence: Synthetic oligonucleotide
aaacuugccccguuugcau

SEQ ID NO: 285849 - RNA, 19 nt, Artificial Sequence
  Description of Artificial Sequence: Synthetic oligonucleotide
aggagaucaacuguuacaa

SEQ ID NO: 285850 - RNA, 19 nt, Artificial Sequence
  Description of Artificial Sequence: Synthetic oligonucleotide
aacccaaguaucaggauaa

SEQ ID NO: 285851 - RNA, 19 nt, Artificial Sequence
  Description of Artificial Sequence: Synthetic oligonucleotide
aaccgaagccuuucggagu

SEQ ID NO: 285852 - RNA, 19 nt, Artificial Sequence
  Description of Artificial Sequence: Synthetic oligonucleotide
gguugguauuuccauagcc

SEQ ID NO: 285853 - RNA, 19 nt, Artificial Sequence
  Description of Artificial Sequence: Synthetic oligonucleotide
aggucugguagucacuucu

SEQ ID NO: 285854 - RNA, 19 nt, Artificial Sequence
  Description of Artificial Sequence: Synthetic oligonucleotide
ccuacagaccuucacagcc

SEQ ID NO: 285855 - RNA, 19 nt, Artificial Sequence
  Description of Artificial Sequence: Synthetic oligonucleotide
augguugguacuuggggca

SEQ ID NO: 285856 - RNA, 19 nt, Artificial Sequence
  Description of Artificial Sequence: Synthetic oligonucleotide
cugucuacacuugagcuug

SEQ ID NO: 285857 - RNA, 19 nt, Artificial Sequence
  Description of Artificial Sequence: Synthetic oligonucleotide
agcgguccugcucaggauc

SEQ ID NO: 285858 - RNA, 19 nt, Artificial Sequence
  Description of Artificial Sequence: Synthetic oligonucleotide
uucauacuauccugaggug

SEQ ID NO: 285859 - RNA, 19 nt, Artificial Sequence
  Description of Artificial Sequence: Synthetic oligonucleotide
uguugcaccacucccgguu

SEQ ID NO: 285860 - RNA, 19 nt, Artificial Sequence
  Description of Artificial Sequence: Synthetic oligonucleotide
ugaaauccccuccccagaa

SEQ ID NO: 285861 - RNA, 19 nt, Artificial Sequence
  Description of Artificial Sequence: Synthetic oligonucleotide
cuacagaccuucacagccc

SEQ ID NO: 285862 - RNA, 19 nt, Artificial Sequence
  Description of Artificial Sequence: Synthetic oligonucleotide
ugcuugcuucauacuaucc

SEQ ID NO: 285863 - RNA, 19 nt, Artificial Sequence
  Description of Artificial Sequence: Synthetic oligonucleotide
acucccgguucacacguac

SEQ ID NO: 285864 - RNA, 19 nt, Artificial Sequence
  Description of Artificial Sequence: Synthetic oligonucleotide
uguugcuggcgaauuuucu

SEQ ID NO: 285865 - RNA, 19 nt, Artificial Sequence
  Description of Artificial Sequence: Synthetic oligonucleotide
caauagaguaggugguaug

SEQ ID NO: 285866 - RNA, 19 nt, Artificial Sequence
  Description of Artificial Sequence: Synthetic oligonucleotide
ucacugcaaacuugccccg

SEQ ID NO: 285867 - RNA, 19 nt, Artificial Sequence
  Description of Artificial Sequence: Synthetic oligonucleotide
ucaauagaguaggugguau

SEQ ID NO: 285868 - RNA, 19 nt, Artificial Sequence
  Description of Artificial Sequence: Synthetic oligonucleotide
ggcgaauuuucucugucag

SEQ ID NO: 285869 - RNA, 19 nt, Artificial Sequence
  Description of Artificial Sequence: Synthetic oligonucleotide
uugccauagaauguuuaac

SEQ ID NO: 285870 - RNA, 19 nt, Artificial Sequence
  Description of Artificial Sequence: Synthetic oligonucleotide
ucccuguugcaccacuccc

SEQ ID NO: 285871 - RNA, 19 nt, Artificial Sequence
  Description of Artificial Sequence: Synthetic oligonucleotide
ucccgguucacacguaccu

SEQ ID NO: 285872 - RNA, 19 nt, Artificial Sequence
  Description of Artificial Sequence: Synthetic oligonucleotide
cacaaaagaauggucucac

SEQ ID NO: 285873 - RNA, 19 nt, Artificial Sequence
  Description of Artificial Sequence: Synthetic oligonucleotide
uuucggaguuggcuaguug

SEQ ID NO: 285874 - RNA, 19 nt, Artificial Sequence
  Description of Artificial Sequence: Synthetic oligonucleotide
cacacuggauagugguugg

SEQ ID NO: 285875 - RNA, 19 nt, Artificial Sequence
  Description of Artificial Sequence: Synthetic oligonucleotide
gauauuaguucuucugaau

SEQ ID NO: 285876 - RNA, 19 nt, Artificial Sequence
  Description of Artificial Sequence: Synthetic oligonucleotide
uuacaaggagagucuuucu

SEQ ID NO: 285877 - RNA, 19 nt, Artificial Sequence
  Description of Artificial Sequence: Synthetic oligonucleotide
uugaauucagcugggucaa

SEQ ID NO: 285878 - RNA, 19 nt, Artificial Sequence
  Description of Artificial Sequence: Synthetic oligonucleotide
agcaguuccgaagaaucug

SEQ ID NO: 285879 - RNA, 19 nt, Artificial Sequence
  Description of Artificial Sequence: Synthetic oligonucleotide
ugucccacaugagucaaac

SEQ ID NO: 285880 - RNA, 19 nt, Artificial Sequence
  Description of Artificial Sequence: Synthetic oligonucleotide
guugccauagaauguuuaa

SEQ ID NO: 285881 - RNA, 19 nt, Artificial Sequence
  Description of Artificial Sequence: Synthetic oligonucleotide
ugucuauguccuccuguac

SEQ ID NO: 285882 - RNA, 19 nt, Artificial Sequence
  Description of Artificial Sequence: Synthetic oligonucleotide
uucauagcacucagcuccu

SEQ ID NO: 285883 - RNA, 19 nt, Artificial Sequence
  Description of Artificial Sequence: Synthetic oligonucleotide
acagcgguccugcucagga

SEQ ID NO: 285884 - RNA, 19 nt, Artificial Sequence
  Description of Artificial Sequence: Synthetic oligonucleotide
ccaaguaucaggauaaucu

SEQ ID NO: 285885 - RNA, 19 nt, Artificial Sequence
  Description of Artificial Sequence: Synthetic oligonucleotide
ucggaguuggcuaguuggu

SEQ ID NO: 285886 - RNA, 19 nt, Artificial Sequence
  Description of Artificial Sequence: Synthetic oligonucleotide
uauuuccauagcccuccga

SEQ ID NO: 285887 - RNA, 19 nt, Artificial Sequence
  Description of Artificial Sequence: Synthetic oligonucleotide
gaaauaucgcaagcaguuc

SEQ ID NO: 285888 - RNA, 19 nt, Artificial Sequence
  Description of Artificial Sequence: Synthetic oligonucleotide
gauuccacgcugagcaaug

SEQ ID NO: 285889 - RNA, 19 nt, Artificial Sequence
  Description of Artificial Sequence: Synthetic oligonucleotide
cuagcaccacugaggaagc

SEQ ID NO: 285890 - RNA, 19 nt, Artificial Sequence
  Description of Artificial Sequence: Synthetic oligonucleotide
aguaguugucugaagcaca

SEQ ID NO: 285891 - RNA, 19 nt, Artificial Sequence
  Description of Artificial Sequence: Synthetic oligonucleotide
aguacucauuucuccucug

SEQ ID NO: 285892 - RNA, 19 nt, Artificial Sequence
  Description of Artificial Sequence: Synthetic oligonucleotide
agcaggcauuaacaucuuc

SEQ ID NO: 285893 - RNA, 19 nt, Artificial Sequence
  Description of Artificial Sequence: Synthetic oligonucleotide
aucuuaggaguucaacauu

SEQ ID NO: 285894 - RNA, 19 nt, Artificial Sequence
  Description of Artificial Sequence: Synthetic oligonucleotide
ugcugauaaccgaagccuu

SEQ ID NO: 285895 - RNA, 19 nt, Artificial Sequence
  Description of Artificial Sequence: Synthetic oligonucleotide
caugucccauuguugauga

SEQ ID NO: 285896 - RNA, 19 nt, Artificial Sequence
  Description of Artificial Sequence: Synthetic oligonucleotide
ugucuacacuugagcuugg

SEQ ID NO: 285897 - RNA, 19 nt, Artificial Sequence
  Description of Artificial Sequence: Synthetic oligonucleotide
gguucauagagcaaaccca

SEQ ID NO: 285898 - RNA, 19 nt, Artificial Sequence
  Description of Artificial Sequence: Synthetic oligonucleotide
aggagagucuuucuuggua

SEQ ID NO: 285899 - RNA, 19 nt, Artificial Sequence
  Description of Artificial Sequence: Synthetic oligonucleotide
auagugguugguauuucca

SEQ ID NO: 285900 - RNA, 19 nt, Artificial Sequence
  Description of Artificial Sequence: Synthetic oligonucleotide
aucucaacacugucugggu

SEQ ID NO: 285901 - RNA, 19 nt, Artificial Sequence
  Description of Artificial Sequence: Synthetic oligonucleotide
uucaacauucagagugcua

SEQ ID NO: 285902 - RNA, 19 nt, Artificial Sequence
  Description of Artificial Sequence: Synthetic oligonucleotide
acuugccccguuugcaucu

SEQ ID NO: 285903 - RNA, 19 nt, Artificial Sequence
  Description of Artificial Sequence: Synthetic oligonucleotide
caugcaauccuuuaucuuu

SEQ ID NO: 285904 - RNA, 19 nt, Artificial Sequence
  Description of Artificial Sequence: Synthetic oligonucleotide
uggauagugguugguauuu

SEQ ID NO: 285905 - RNA, 19 nt, Artificial Sequence
  Description of Artificial Sequence: Synthetic oligonucleotide
uaucgcaagcaguuccgaa

SEQ ID NO: 285906 - RNA, 19 nt, Artificial Sequence
  Description of Artificial Sequence: Synthetic oligonucleotide
ccgacguuugaaacgaagc

SEQ ID NO: 285907 - RNA, 19 nt, Artificial Sequence
  Description of Artificial Sequence: Synthetic oligonucleotide
auagaguaggugguaugcu

SEQ ID NO: 285908 - RNA, 19 nt, Artificial Sequence
  Description of Artificial Sequence: Synthetic oligonucleotide
cuuaggaguucaacauuca

SEQ ID NO: 285909 - RNA, 19 nt, Artificial Sequence
  Description of Artificial Sequence: Synthetic oligonucleotide
gaggguuugcaggcuuucg

SEQ ID NO: 285910 - RNA, 19 nt, Artificial Sequence
  Description of Artificial Sequence: Synthetic oligonucleotide
guaccucuacaugcaaucc

SEQ ID NO: 285911 - RNA, 19 nt, Artificial Sequence
  Description of Artificial Sequence: Synthetic oligonucleotide
guauuuccauagcccuccg

SEQ ID NO: 285912 - RNA, 19 nt, Artificial Sequence
  Description of Artificial Sequence: Synthetic oligonucleotide
agaggacgcaguagaaaag

SEQ ID NO: 285913 - RNA, 19 nt, Artificial Sequence
  Description of Artificial Sequence: Synthetic oligonucleotide
uuuugcccgugagucagca

SEQ ID NO: 285914 - RNA, 19 nt, Artificial Sequence
  Description of Artificial Sequence: Synthetic oligonucleotide
uggggaaacucggaggcaa

SEQ ID NO: 285915 - RNA, 19 nt, Artificial Sequence
  Description of Artificial Sequence: Synthetic oligonucleotide
gcaagaaauaucgcaagca

SEQ ID NO: 285916 - RNA, 19 nt, Artificial Sequence
  Description of Artificial Sequence: Synthetic oligonucleotide
uuggcuaguuggucuggga

SEQ ID NO: 285917 - RNA, 19 nt, Artificial Sequence
  Description of Artificial Sequence: Synthetic oligonucleotide
cuccuucacugcaaacuug

SEQ ID NO: 285918 - RNA, 19 nt, Artificial Sequence
  Description of Artificial Sequence: Synthetic oligonucleotide
ccccuuaugggucuuguag

SEQ ID NO: 285919 - RNA, 19 nt, Artificial Sequence
  Description of Artificial Sequence: Synthetic oligonucleotide
acgaagcucacuggauggg

SEQ ID NO: 285920 - RNA, 19 nt, Artificial Sequence
  Description of Artificial Sequence: Synthetic oligonucleotide
cugauaaccgaagccuuuc

SEQ ID NO: 285921 - RNA, 19 nt, Artificial Sequence
  Description of Artificial Sequence: Synthetic oligonucleotide
gggucauguauuuucaugu

SEQ ID NO: 285922 - RNA, 19 nt, Artificial Sequence
  Description of Artificial Sequence: Synthetic oligonucleotide
uccgaccugagguugccau

SEQ ID NO: 285923 - RNA, 19 nt, Artificial Sequence
  Description of Artificial Sequence: Synthetic oligonucleotide
agcagucuagaaguacuca

SEQ ID NO: 285924 - RNA, 19 nt, Artificial Sequence
  Description of Artificial Sequence: Synthetic oligonucleotide
agcauaggaggugcugguc

SEQ ID NO: 285925 - RNA, 19 nt, Artificial Sequence
  Description of Artificial Sequence: Synthetic oligonucleotide
uuucggggugccucagcug

SEQ ID NO: 285926 - RNA, 19 nt, Artificial Sequence
  Description of Artificial Sequence: Synthetic oligonucleotide
cucccaauggccaucaaau

SEQ ID NO: 285927 - RNA, 19 nt, Artificial Sequence
  Description of Artificial Sequence: Synthetic oligonucleotide
gcaauggcgauguccuucc

SEQ ID NO: 285928 - RNA, 19 nt, Artificial Sequence
  Description of Artificial Sequence: Synthetic oligonucleotide
ggacgcaguagaaaagcag

SEQ ID NO: 285929 - RNA, 19 nt, Artificial Sequence
  Description of Artificial Sequence: Synthetic oligonucleotide
guguagucuuggaugggag

SEQ ID NO: 285930 - RNA, 19 nt, Artificial Sequence
  Description of Artificial Sequence: Synthetic oligonucleotide
ccuggggucauguauuuuc

SEQ ID NO: 285931 - RNA, 19 nt, Artificial Sequence
  Description of Artificial Sequence: Synthetic oligonucleotide
cuucacagcgguccugcuc

SEQ ID NO: 285932 - RNA, 19 nt, Artificial Sequence
  Description of Artificial Sequence: Synthetic oligonucleotide
uggacacaaggagaucaac

SEQ ID NO: 285933 - RNA, 19 nt, Artificial Sequence
  Description of Artificial Sequence: Synthetic oligonucleotide
auuccacgcugagcaaugg

SEQ ID NO: 285934 - RNA, 19 nt, Artificial Sequence
  Description of Artificial Sequence: Synthetic oligonucleotide
aacuagcaccacugaggaa

SEQ ID NO: 285935 - RNA, 19 nt, Artificial Sequence
  Description of Artificial Sequence: Synthetic oligonucleotide
caaacuugccccguuugca

SEQ ID NO: 285936 - RNA, 19 nt, Artificial Sequence
  Description of Artificial Sequence: Synthetic oligonucleotide
gcuuugguaggaauggcac

SEQ ID NO: 285937 - RNA, 19 nt, Artificial Sequence
  Description of Artificial Sequence: Synthetic oligonucleotide
gugcuugcuucauacuauc

SEQ ID NO: 285938 - RNA, 19 nt, Artificial Sequence
  Description of Artificial Sequence: Synthetic oligonucleotide
uaggucgggguguagucuu

SEQ ID NO: 285939 - RNA, 19 nt, Artificial Sequence
  Description of Artificial Sequence: Synthetic oligonucleotide
aggugccaggagcucaaug

SEQ ID NO: 285940 - RNA, 19 nt, Artificial Sequence
  Description of Artificial Sequence: Synthetic oligonucleotide
cagcaaaggcucucuagga

SEQ ID NO: 285941 - RNA, 19 nt, Artificial Sequence
  Description of Artificial Sequence: Synthetic oligonucleotide
cagcuugugagcggauggg

SEQ ID NO: 285942 - RNA, 19 nt, Artificial Sequence
  Description of Artificial Sequence: Synthetic oligonucleotide
ugggaaaucugagcaucaa

SEQ ID NO: 285943 - RNA, 19 nt, Artificial Sequence
  Description of Artificial Sequence: Synthetic oligonucleotide
gcgaauuuucucugucagc

SEQ ID NO: 285944 - RNA, 19 nt, Artificial Sequence
  Description of Artificial Sequence: Synthetic oligonucleotide
acgcaguagaaaagcagca

SEQ ID NO: 285945 - RNA, 19 nt, Artificial Sequence
  Description of Artificial Sequence: Synthetic oligonucleotide
cccuccgacguuugaaacg

SEQ ID NO: 285946 - RNA, 19 nt, Artificial Sequence
  Description of Artificial Sequence: Synthetic oligonucleotide
cuugugagcggaugggugu

SEQ ID NO: 285947 - RNA, 19 nt, Artificial Sequence
  Description of Artificial Sequence: Synthetic oligonucleotide
agaagugcgcaagcucucu

SEQ ID NO: 285948 - RNA, 19 nt, Artificial Sequence
  Description of Artificial Sequence: Synthetic oligonucleotide
cagaagugcgcaagcucuc

SEQ ID NO: 285949 - RNA, 19 nt, Artificial Sequence
  Description of Artificial Sequence: Synthetic oligonucleotide
guugcaccacucccgguuc

SEQ ID NO: 285950 - RNA, 19 nt, Artificial Sequence
  Description of Artificial Sequence: Synthetic oligonucleotide
acacguaccucuacaugca

SEQ ID NO: 285951 - RNA, 19 nt, Artificial Sequence
  Description of Artificial Sequence: Synthetic oligonucleotide
caccacugaggaagccucc

SEQ ID NO: 285952 - RNA, 19 nt, Artificial Sequence
  Description of Artificial Sequence: Synthetic oligonucleotide
uugcaccacucccgguuca

SEQ ID NO: 285953 - RNA, 19 nt, Artificial Sequence
  Description of Artificial Sequence: Synthetic oligonucleotide
acugcaaacuugccccguu

SEQ ID NO: 285954 - RNA, 19 nt, Artificial Sequence
  Description of Artificial Sequence: Synthetic oligonucleotide
agcccuccgacguuugaaa

SEQ ID NO: 285955 - RNA, 19 nt, Artificial Sequence
  Description of Artificial Sequence: Synthetic oligonucleotide
cguaccucuacaugcaauc

SEQ ID NO: 285956 - RNA, 19 nt, Artificial Sequence
  Description of Artificial Sequence: Synthetic oligonucleotide
auaucgcaagcaguuccga

SEQ ID NO: 285957 - RNA, 19 nt, Artificial Sequence
  Description of Artificial Sequence: Synthetic oligonucleotide
cuccgcuuccgaccugagg

SEQ ID NO: 285958 - RNA, 19 nt, Artificial Sequence
  Description of Artificial Sequence: Synthetic oligonucleotide
aggacgcaguagaaaagca

SEQ ID NO: 285959 - RNA, 19 nt, Artificial Sequence
  Description of Artificial Sequence: Synthetic oligonucleotide
agcuugugagcggaugggu

SEQ ID NO: 285960 - RNA, 19 nt, Artificial Sequence
  Description of Artificial Sequence: Synthetic oligonucleotide
ugggccugcuuuugaugac

SEQ ID NO: 285961 - RNA, 19 nt, Artificial Sequence
  Description of Artificial Sequence: Synthetic oligonucleotide
gucugguagucacuucuaa

SEQ ID NO: 285962 - RNA, 19 nt, Artificial Sequence
  Description of Artificial Sequence: Synthetic oligonucleotide
cugcugauaaccgaagccu

SEQ ID NO: 285963 - RNA, 19 nt, Artificial Sequence
  Description of Artificial Sequence: Synthetic oligonucleotide
uuugcccgugagucagcac

SEQ ID NO: 285964 - RNA, 19 nt, Artificial Sequence
  Description of Artificial Sequence: Synthetic oligonucleotide
ugccccguuugcaucucuc

SEQ ID NO: 285965 - RNA, 19 nt, Artificial Sequence
  Description of Artificial Sequence: Synthetic oligonucleotide
auagcccuccgacguuuga

SEQ ID NO: 285966 - RNA, 19 nt, Artificial Sequence
  Description of Artificial Sequence: Synthetic oligonucleotide
augauuccacgcugagcaa

SEQ ID NO: 285967 - RNA, 19 nt, Artificial Sequence
  Description of Artificial Sequence: Synthetic oligonucleotide
gucucaugguugguacuug

SEQ ID NO: 285968 - RNA, 19 nt, Artificial Sequence
  Description of Artificial Sequence: Synthetic oligonucleotide
uccauagcccuccgacguu

SEQ ID NO: 285969 - RNA, 19 nt, Artificial Sequence
  Description of Artificial Sequence: Synthetic oligonucleotide
ccaacucacuaaugaaauc

SEQ ID NO: 285970 - RNA, 19 nt, Artificial Sequence
  Description of Artificial Sequence: Synthetic oligonucleotide
cacaugguuccuccuccuc

SEQ ID NO: 285971 - RNA, 19 nt, Artificial Sequence
  Description of Artificial Sequence: Synthetic oligonucleotide
cuucuaagggcaauuucuu

SEQ ID NO: 285972 - RNA, 19 nt, Artificial Sequence
  Description of Artificial Sequence: Synthetic oligonucleotide
auacuauccugaggugcca

SEQ ID NO: 285973 - RNA, 19 nt, Artificial Sequence
  Description of Artificial Sequence: Synthetic oligonucleotide
cuuccgaccugagguugcc

SEQ ID NO: 285974 - RNA, 19 nt, Artificial Sequence
  Description of Artificial Sequence: Synthetic oligonucleotide
uagcccuccgacguuugaa

SEQ ID NO: 285975 - RNA, 19 nt, Artificial Sequence
  Description of Artificial Sequence: Synthetic oligonucleotide
guacuuggggcaguggugu

SEQ ID NO: 285976 - RNA, 19 nt, Artificial Sequence
  Description of Artificial Sequence: Synthetic oligonucleotide
gagcauaggaggugcuggu

SEQ ID NO: 285977 - RNA, 19 nt, Artificial Sequence
  Description of Artificial Sequence: Synthetic oligonucleotide
gguucacacguaccucuac

SEQ ID NO: 285978 - RNA, 19 nt, Artificial Sequence
  Description of Artificial Sequence: Synthetic oligonucleotide
ucggggugccucagcuggc

SEQ ID NO: 285979 - RNA, 19 nt, Artificial Sequence
  Description of Artificial Sequence: Synthetic oligonucleotide
agucacuucuaagggcaau

SEQ ID NO: 285980 - RNA, 19 nt, Artificial Sequence
  Description of Artificial Sequence: Synthetic oligonucleotide
ggaucgggguucauagagc

SEQ ID NO: 285981 - RNA, 19 nt, Artificial Sequence
  Description of Artificial Sequence: Synthetic oligonucleotide
gcuugugagcggaugggug

SEQ ID NO: 285982 - RNA, 19 nt, Artificial Sequence
  Description of Artificial Sequence: Synthetic oligonucleotide
gccuacagaccuucacagc

SEQ ID NO: 285983 - RNA, 19 nt, Artificial Sequence
  Description of Artificial Sequence: Synthetic oligonucleotide
cuuucggggugccucagcu

SEQ ID NO: 285984 - RNA, 19 nt, Artificial Sequence
  Description of Artificial Sequence: Synthetic oligonucleotide
agagugcuauccaguccag

SEQ ID NO: 285985 - RNA, 19 nt, Artificial Sequence
  Description of Artificial Sequence: Synthetic oligonucleotide
guacucuuucagaggaaaa

SEQ ID NO: 285986 - RNA, 19 nt, Artificial Sequence
  Description of Artificial Sequence: Synthetic oligonucleotide
ggugguaugcugggaaauc

SEQ ID NO: 285987 - RNA, 19 nt, Artificial Sequence
  Description of Artificial Sequence: Synthetic oligonucleotide
ugcucaggaucgggguuca

SEQ ID NO: 285988 - RNA, 19 nt, Artificial Sequence
  Description of Artificial Sequence: Synthetic oligonucleotide
cccuuaugggucuuguaga

SEQ ID NO: 285989 - RNA, 19 nt, Artificial Sequence
  Description of Artificial Sequence: Synthetic oligonucleotide
guaguugucugaagcacau

SEQ ID NO: 285990 - RNA, 19 nt, Artificial Sequence
  Description of Artificial Sequence: Synthetic oligonucleotide
gugguaugcugggaaaucu

SEQ ID NO: 285991 - RNA, 19 nt, Artificial Sequence
  Description of Artificial Sequence: Synthetic oligonucleotide
cagaagcuucacagcgguc

SEQ ID NO: 285992 - RNA, 19 nt, Artificial Sequence
  Description of Artificial Sequence: Synthetic oligonucleotide
ugcaccacucccgguucac

SEQ ID NO: 285993 - RNA, 19 nt, Artificial Sequence
  Description of Artificial Sequence: Synthetic oligonucleotide
gucugggaguuugaauaga

SEQ ID NO: 285994 - RNA, 19 nt, Artificial Sequence
  Description of Artificial Sequence: Synthetic oligonucleotide
cugaccagucagagcuguc

SEQ ID NO: 285995 - RNA, 19 nt, Artificial Sequence
  Description of Artificial Sequence: Synthetic oligonucleotide
acguaccucuacaugcaau

SEQ ID NO: 285996 - RNA, 19 nt, Artificial Sequence
  Description of Artificial Sequence: Synthetic oligonucleotide
gcagucuagaaguacucau

SEQ ID NO: 285997 - RNA, 19 nt, Artificial Sequence
  Description of Artificial Sequence: Synthetic oligonucleotide
cagucuagaaguacucauu

SEQ ID NO: 285998 - RNA, 19 nt, Artificial Sequence
  Description of Artificial Sequence: Synthetic oligonucleotide
gcgguccugcucaggaucg

SEQ ID NO: 285999 - RNA, 19 nt, Artificial Sequence
  Description of Artificial Sequence: Synthetic oligonucleotide
ggucgggguguagucuugg

SEQ ID NO: 286000 - RNA, 19 nt, Artificial Sequence
  Description of Artificial Sequence: Synthetic oligonucleotide
gggccugcuuuugaugacc

SEQ ID NO: 286001 - RNA, 19 nt, Artificial Sequence
  Description of Artificial Sequence: Synthetic oligonucleotide
ggcucucuaggaacuagca

SEQ ID NO: 286002 - RNA, 19 nt, Artificial Sequence
  Description of Artificial Sequence: Synthetic oligonucleotide
caggaucgggguucauaga

SEQ ID NO: 286003 - RNA, 19 nt, Artificial Sequence
  Description of Artificial Sequence: Synthetic oligonucleotide
ggcuuuugcccgugaguca

SEQ ID NO: 286004 - RNA, 19 nt, Artificial Sequence
  Description of Artificial Sequence: Synthetic oligonucleotide
uuccgaccugagguugcca

SEQ ID NO: 286005 - RNA, 19 nt, Artificial Sequence
  Description of Artificial Sequence: Synthetic oligonucleotide
ggagauggggaaacucgga

SEQ ID NO: 286006 - RNA, 19 nt, Artificial Sequence
  Description of Artificial Sequence: Synthetic oligonucleotide
ggccugcuuuugaugaccc

SEQ ID NO: 286007 - RNA, 19 nt, Artificial Sequence
  Description of Artificial Sequence: Synthetic oligonucleotide
ccccaagggaaccuuccug

SEQ ID NO: 286008 - RNA, 19 nt, Artificial Sequence
  Description of Artificial Sequence: Synthetic oligonucleotide
cgaagcucacuggaugggg

SEQ ID NO: 286009 - RNA, 19 nt, Artificial Sequence
  Description of Artificial Sequence: Synthetic oligonucleotide
ggauagugguugguauuuc

SEQ ID NO: 286010 - RNA, 19 nt, Artificial Sequence
  Description of Artificial Sequence: Synthetic oligonucleotide
uggagacuugauggcuuuu

SEQ ID NO: 286011 - RNA, 19 nt, Artificial Sequence
  Description of Artificial Sequence: Synthetic oligonucleotide
ccuccgacguuugaaacga

SEQ ID NO: 286012 - RNA, 19 nt, Artificial Sequence
  Description of Artificial Sequence: Synthetic oligonucleotide
gaagugcgcaagcucucuu

SEQ ID NO: 286013 - RNA, 19 nt, Artificial Sequence
  Description of Artificial Sequence: Synthetic oligonucleotide
cacguaccucuacaugcaa

SEQ ID NO: 286014 - RNA, 19 nt, Artificial Sequence
  Description of Artificial Sequence: Synthetic oligonucleotide
gcccuccgacguuugaaac

SEQ ID NO: 286015 - RNA, 19 nt, Artificial Sequence
  Description of Artificial Sequence: Synthetic oligonucleotide
gugagucagcacggcuuug

SEQ ID NO: 286016 - RNA, 19 nt, Artificial Sequence
  Description of Artificial Sequence: Synthetic oligonucleotide
cguuugaaacgaagcucac

SEQ ID NO: 286017 - RNA, 19 nt, Artificial Sequence
  Description of Artificial Sequence: Synthetic oligonucleotide
ggaguucaacauucagagu

SEQ ID NO: 286018 - RNA, 19 nt, Artificial Sequence
  Description of Artificial Sequence: Synthetic oligonucleotide
agacuccgcuuccgaccug

SEQ ID NO: 286019 - RNA, 19 nt, Artificial Sequence
  Description of Artificial Sequence: Synthetic oligonucleotide
ggucucacagcaggcauua

SEQ ID NO: 286020 - RNA, 19 nt, Artificial Sequence
  Description of Artificial Sequence: Synthetic oligonucleotide
agggaaccuuccugccuua

SEQ ID NO: 286021 - RNA, 19 nt, Artificial Sequence
  Description of Artificial Sequence: Synthetic oligonucleotide
gcuuccgaccugagguugc

SEQ ID NO: 286022 - RNA, 19 nt, Artificial Sequence
  Description of Artificial Sequence: Synthetic oligonucleotide
ggaaccuuccugccuuacu

SEQ ID NO: 286023 - RNA, 19 nt, Artificial Sequence
  Description of Artificial Sequence: Synthetic oligonucleotide
aggucgggguguagucuug

SEQ ID NO: 286024 - RNA, 19 nt, Artificial Sequence
  Description of Artificial Sequence: Synthetic oligonucleotide
cuugccccguuugcaucuc

SEQ ID NO: 286025 - RNA, 19 nt, Artificial Sequence
  Description of Artificial Sequence: Synthetic oligonucleotide
caggcucaauggggagacc

SEQ ID NO: 286026 - RNA, 19 nt, Artificial Sequence
  Description of Artificial Sequence: Synthetic oligonucleotide
aggagccuacagaccuuca

SEQ ID NO: 286027 - RNA, 19 nt, Artificial Sequence
  Description of Artificial Sequence: Synthetic oligonucleotide
ccuuaugggucuuguagau

SEQ ID NO: 286028 - RNA, 19 nt, Artificial Sequence
  Description of Artificial Sequence: Synthetic oligonucleotide
cgggguucauagagcaaac

SEQ ID NO: 286029 - RNA, 19 nt, Artificial Sequence
  Description of Artificial Sequence: Synthetic oligonucleotide
cgacguuugaaacgaagcu

SEQ ID NO: 286030 - RNA, 19 nt, Artificial Sequence
  Description of Artificial Sequence: Synthetic oligonucleotide
gaggacgcugaggucuccu

SEQ ID NO: 286031 - RNA, 19 nt, Artificial Sequence
  Description of Artificial Sequence: Synthetic oligonucleotide
gugcuacaauguugguccu

SEQ ID NO: 286032 - RNA, 19 nt, Artificial Sequence
  Description of Artificial Sequence: Synthetic oligonucleotide
ggaacccacagaggacgca

SEQ ID NO: 286033 - RNA, 19 nt, Artificial Sequence
  Description of Artificial Sequence: Synthetic oligonucleotide
augucccacaugagucaaa

SEQ ID NO: 286034 - RNA, 19 nt, Artificial Sequence
  Description of Artificial Sequence: Synthetic oligonucleotide
acuccgcuuccgaccugag

SEQ ID NO: 286035 - RNA, 19 nt, Artificial Sequence
  Description of Artificial Sequence: Synthetic oligonucleotide
ggacuggaaccagaauucu

SEQ ID NO: 286036 - RNA, 19 nt, Artificial Sequence
  Description of Artificial Sequence: Synthetic oligonucleotide
ccgguucacacguaccucu

SEQ ID NO: 286037 - RNA, 19 nt, Artificial Sequence
  Description of Artificial Sequence: Synthetic oligonucleotide
gcuaguuggucugggaguu

SEQ ID NO: 286038 - RNA, 19 nt, Artificial Sequence
  Description of Artificial Sequence: Synthetic oligonucleotide
caggugugcagaggaguua

SEQ ID NO: 286039 - RNA, 19 nt, Artificial Sequence
  Description of Artificial Sequence: Synthetic oligonucleotide
cagcacggcuuugguagga

SEQ ID NO: 286040 - RNA, 19 nt, Artificial Sequence
  Description of Artificial Sequence: Synthetic oligonucleotide
cuguuacaaggagagucuu

SEQ ID NO: 286041 - RNA, 19 nt, Artificial Sequence
  Description of Artificial Sequence: Synthetic oligonucleotide
caauagucucaugguuggu

SEQ ID NO: 286042 - RNA, 19 nt, Artificial Sequence
  Description of Artificial Sequence: Synthetic oligonucleotide
cuccgacguuugaaacgaa

SEQ ID NO: 286043 - RNA, 19 nt, Artificial Sequence
  Description of Artificial Sequence: Synthetic oligonucleotide
ggagugcuacaauguuggu

SEQ ID NO: 286044 - RNA, 19 nt, Artificial Sequence
  Description of Artificial Sequence: Synthetic oligonucleotide
cugcaaacuugccccguuu

SEQ ID NO: 286045 - RNA, 19 nt, Artificial Sequence
  Description of Artificial Sequence: Synthetic oligonucleotide
gcugauaaccgaagccuuu

SEQ ID NO: 286046 - RNA, 19 nt, Artificial Sequence
  Description of Artificial Sequence: Synthetic oligonucleotide
cuuucggaguuggcuaguu

SEQ ID NO: 286047 - RNA, 19 nt, Artificial Sequence
  Description of Artificial Sequence: Synthetic oligonucleotide
gccccguuugcaucucucu

SEQ ID NO: 286048 - RNA, 19 nt, Artificial Sequence
  Description of Artificial Sequence: Synthetic oligonucleotide
cuguugcaccacucccggu

SEQ ID NO: 286049 - RNA, 19 nt, Artificial Sequence
  Description of Artificial Sequence: Synthetic oligonucleotide
cgcuuccgaccugagguug

SEQ ID NO: 286050 - RNA, 19 nt, Artificial Sequence
  Description of Artificial Sequence: Synthetic oligonucleotide
gggaccucccgaagguucu

SEQ ID NO: 286051 - RNA, 19 nt, Artificial Sequence
  Description of Artificial Sequence: Synthetic oligonucleotide
ccgugagucagcacggcuu

SEQ ID NO: 286052 - RNA, 19 nt, Artificial Sequence
  Description of Artificial Sequence: Synthetic oligonucleotide
gcccgugagucagcacggc

SEQ ID NO: 286053 - RNA, 19 nt, Artificial Sequence
  Description of Artificial Sequence: Synthetic oligonucleotide
cacucccgguucacacgua

SEQ ID NO: 286054 - RNA, 19 nt, Artificial Sequence
  Description of Artificial Sequence: Synthetic oligonucleotide
gguugguacuuggggcagu

SEQ ID NO: 286055 - RNA, 19 nt, Artificial Sequence
  Description of Artificial Sequence: Synthetic oligonucleotide
cagcgguccugcucaggau

SEQ ID NO: 286056 - RNA, 19 nt, Artificial Sequence
  Description of Artificial Sequence: Synthetic oligonucleotide
ggucugcuaggagcauucu

SEQ ID NO: 286057 - RNA, 19 nt, Artificial Sequence
  Description of Artificial Sequence: Synthetic oligonucleotide
ccgaccugagguugccaua

SEQ ID NO: 286058 - RNA, 19 nt, Artificial Sequence
  Description of Artificial Sequence: Synthetic oligonucleotide
cccgugagucagcacggcu

SEQ ID NO: 286059 - RNA, 19 nt, Artificial Sequence
  Description of Artificial Sequence: Synthetic oligonucleotide
cgugagucagcacggcuuu

SEQ ID NO: 286060 - RNA, 19 nt, Artificial Sequence
  Description of Artificial Sequence: Synthetic oligonucleotide
ggggucugcuaggagcauu

SEQ ID NO: 286061 - RNA, 19 nt, Artificial Sequence
  Description of Artificial Sequence: Synthetic oligonucleotide
cgguucacacguaccucua

SEQ ID NO: 286062 - RNA, 19 nt, Artificial Sequence
  Description of Artificial Sequence: Synthetic oligonucleotide
ccgcuuccgaccugagguu

SEQ ID NO: 286063 - RNA, 19 nt, Artificial Sequence
  Description of Artificial Sequence: Synthetic oligonucleotide
aagaugauuacaucaaugg

SEQ ID NO: 286064 - RNA, 19 nt, Artificial Sequence
  Description of Artificial Sequence: Synthetic oligonucleotide
acuaccaagagacuaaucc

SEQ ID NO: 286065 - RNA, 19 nt, Artificial Sequence
  Description of Artificial Sequence: Synthetic oligonucleotide
uguaugauuagccacacag

SEQ ID NO: 286066 - RNA, 19 nt, Artificial Sequence
  Description of Artificial Sequence: Synthetic oligonucleotide
uuuacaugcugccagagcg

SEQ ID NO: 286067 - RNA, 19 nt, Artificial Sequence
  Description of Artificial Sequence: Synthetic oligonucleotide
uugaaucacacccauaagg

SEQ ID NO: 286068 - RNA, 19 nt, Artificial Sequence
  Description of Artificial Sequence: Synthetic oligonucleotide
ugauuagccacacagauac

SEQ ID NO: 286069 - RNA, 19 nt, Artificial Sequence
  Description of Artificial Sequence: Synthetic oligonucleotide
aauugcuggcacuucacac

SEQ ID NO: 286070 - RNA, 19 nt, Artificial Sequence
  Description of Artificial Sequence: Synthetic oligonucleotide
ucucuuagccaccaggugg

SEQ ID NO: 286071 - RNA, 19 nt, Artificial Sequence
  Description of Artificial Sequence: Synthetic oligonucleotide
uuaccaacaaucaucuugc

SEQ ID NO: 286072 - RNA, 19 nt, Artificial Sequence
  Description of Artificial Sequence: Synthetic oligonucleotide
guuacuaccacuucgacga

SEQ ID NO: 286073 - RNA, 19 nt, Artificial Sequence
  Description of Artificial Sequence: Synthetic oligonucleotide
uucucaguaaguaagucac

SEQ ID NO: 286074 - RNA, 19 nt, Artificial Sequence
  Description of Artificial Sequence: Synthetic oligonucleotide
uuaaacgcauucaacaggu

SEQ ID NO: 286075 - RNA, 19 nt, Artificial Sequence
  Description of Artificial Sequence: Synthetic oligonucleotide
aauaccgaaucaguacucc

SEQ ID NO: 286076 - RNA, 19 nt, Artificial Sequence
  Description of Artificial Sequence: Synthetic oligonucleotide
agcaauaccgaaucaguac

SEQ ID NO: 286077 - RNA, 19 nt, Artificial Sequence
  Description of Artificial Sequence: Synthetic oligonucleotide
cuuacuauaaaggaacaag

SEQ ID NO: 286078 - RNA, 19 nt, Artificial Sequence
  Description of Artificial Sequence: Synthetic oligonucleotide
aggugaauuguccuaaagg

SEQ ID NO: 286079 - RNA, 19 nt, Artificial Sequence
  Description of Artificial Sequence: Synthetic oligonucleotide
uccgguagcacauuaaaug

SEQ ID NO: 286080 - RNA, 19 nt, Artificial Sequence
  Description of Artificial Sequence: Synthetic oligonucleotide
uaugauuagccacacagau

SEQ ID NO: 286081 - RNA, 19 nt, Artificial Sequence
  Description of Artificial Sequence: Synthetic oligonucleotide
agaugauuacaucaauggg

SEQ ID NO: 286082 - RNA, 19 nt, Artificial Sequence
  Description of Artificial Sequence: Synthetic oligonucleotide
gaaucaguacuccuaaccc

SEQ ID NO: 286083 - RNA, 19 nt, Artificial Sequence
  Description of Artificial Sequence: Synthetic oligonucleotide
auuguaauugguucugcuc

SEQ ID NO: 286084 - RNA, 19 nt, Artificial Sequence
  Description of Artificial Sequence: Synthetic oligonucleotide
caagcuaucaaaaggcagc

SEQ ID NO: 286085 - RNA, 19 nt, Artificial Sequence
  Description of Artificial Sequence: Synthetic oligonucleotide
uggcauuccucuuagaggc

SEQ ID NO: 286086 - RNA, 19 nt, Artificial Sequence
  Description of Artificial Sequence: Synthetic oligonucleotide
  modified_base (10)..(10): a, c, u, g, unknown or other
cacgcaaagnucuuggcag

SEQ ID NO: 286087 - RNA, 19 nt, Artificial Sequence
  Description of Artificial Sequence: Synthetic oligonucleotide
ucaagcuaucaaaaggcag

SEQ ID NO: 286088 - RNA, 19 nt, Artificial Sequence
  Description of Artificial Sequence: Synthetic oligonucleotide
aaauggacauguuuacuca

SEQ ID NO: 286089 - RNA, 19 nt, Artificial Sequence
  Description of Artificial Sequence: Synthetic oligonucleotide
aaacgcauucaacagguga

SEQ ID NO: 286090 - RNA, 19 nt, Artificial Sequence
  Description of Artificial Sequence: Synthetic oligonucleotide
cuuaaacgcauucaacagg

SEQ ID NO: 286091 - RNA, 19 nt, Artificial Sequence
  Description of Artificial Sequence: Synthetic oligonucleotide
agcgaaacauaguaaacag

SEQ ID NO: 286092 - RNA, 19 nt, Artificial Sequence
  Description of Artificial Sequence: Synthetic oligonucleotide
guuguuuacaugcugccag

SEQ ID NO: 286093 - RNA, 19 nt, Artificial Sequence
  Description of Artificial Sequence: Synthetic oligonucleotide
uccuuugcggcaaaaguag

SEQ ID NO: 286094 - RNA, 19 nt, Artificial Sequence
  Description of Artificial Sequence: Synthetic oligonucleotide
gccaguaacaaacagaggc

SEQ ID NO: 286095 - RNA, 19 nt, Artificial Sequence
  Description of Artificial Sequence: Synthetic oligonucleotide
aaagcgaaacauaguaaac

SEQ ID NO: 286096 - RNA, 19 nt, Artificial Sequence
  Description of Artificial Sequence: Synthetic oligonucleotide
uugacaaucaagcuaucaa

SEQ ID NO: 286097 - RNA, 19 nt, Artificial Sequence
  Description of Artificial Sequence: Synthetic oligonucleotide
aauuguaauugguucugcu

SEQ ID NO: 286098 - RNA, 19 nt, Artificial Sequence
  Description of Artificial Sequence: Synthetic oligonucleotide
caugguaguacccacuacc

SEQ ID NO: 286099 - RNA, 19 nt, Artificial Sequence
  Description of Artificial Sequence: Synthetic oligonucleotide
gaaagcgaaacauaguaaa

SEQ ID NO: 286100 - RNA, 19 nt, Artificial Sequence
  Description of Artificial Sequence: Synthetic oligonucleotide
aagccguaggcuuauauau

SEQ ID NO: 286101 - RNA, 19 nt, Artificial Sequence
  Description of Artificial Sequence: Synthetic oligonucleotide
caaacacgucuucagaugg

SEQ ID NO: 286102 - RNA, 19 nt, Artificial Sequence
  Description of Artificial Sequence: Synthetic oligonucleotide
gcucaaaccaaacaugugg

SEQ ID NO: 286103 - RNA, 19 nt, Artificial Sequence
  Description of Artificial Sequence: Synthetic oligonucleotide
gaaugucucauacugccug

SEQ ID NO: 286104 - RNA, 19 nt, Artificial Sequence
  Description of Artificial Sequence: Synthetic oligonucleotide
cuugauagcaacaggauaa

SEQ ID NO: 286105 - RNA, 19 nt, Artificial Sequence
  Description of Artificial Sequence: Synthetic oligonucleotide
uauaaaggaacaaggggua

SEQ ID NO: 286106 - RNA, 19 nt, Artificial Sequence
  Description of Artificial Sequence: Synthetic oligonucleotide
uuacuuuuaucuuguacgu

SEQ ID NO: 286107 - RNA, 19 nt, Artificial Sequence
  Description of Artificial Sequence: Synthetic oligonucleotide
uggcgucuuauccagagcc

SEQ ID NO: 286108 - RNA, 19 nt, Artificial Sequence
  Description of Artificial Sequence: Synthetic oligonucleotide
agaggcuuacuauaaagga

SEQ ID NO: 286109 - RNA, 19 nt, Artificial Sequence
  Description of Artificial Sequence: Synthetic oligonucleotide
uguuauugaugcagguucc

SEQ ID NO: 286110 - RNA, 19 nt, Artificial Sequence
  Description of Artificial Sequence: Synthetic oligonucleotide
aaggucuaccaauccuccc

SEQ ID NO: 286111 - RNA, 19 nt, Artificial Sequence
  Description of Artificial Sequence: Synthetic oligonucleotide
aagcgaaacauaguaaaca

SEQ ID NO: 286112 - RNA, 19 nt, Artificial Sequence
  Description of Artificial Sequence: Synthetic oligonucleotide
uuuugcaaugauuccguug

SEQ ID NO: 286113 - RNA, 19 nt, Artificial Sequence
  Description of Artificial Sequence: Synthetic oligonucleotide
augauuacaucaaugggag

SEQ ID NO: 286114 - RNA, 19 nt, Artificial Sequence
  Description of Artificial Sequence: Synthetic oligonucleotide
aauccugauaacuccagua

SEQ ID NO: 286115 - RNA, 19 nt, Artificial Sequence
  Description of Artificial Sequence: Synthetic oligonucleotide
gauguguuauugaugcagg

SEQ ID NO: 286116 - RNA, 19 nt, Artificial Sequence
  Description of Artificial Sequence: Synthetic oligonucleotide
acgaauuucuuuugauuuc

SEQ ID NO: 286117 - RNA, 19 nt, Artificial Sequence
  Description of Artificial Sequence: Synthetic oligonucleotide
uucagauggucccuuaaac

SEQ ID NO: 286118 - RNA, 19 nt, Artificial Sequence
  Description of Artificial Sequence: Synthetic oligonucleotide
agacuaaucccugugaaug

SEQ ID NO: 286119 - RNA, 19 nt, Artificial Sequence
  Description of Artificial Sequence: Synthetic oligonucleotide
uaccaauccucccugccgg

SEQ ID NO: 286120 - RNA, 19 nt, Artificial Sequence
  Description of Artificial Sequence: Synthetic oligonucleotide
ugcuauacaguuucugcug

SEQ ID NO: 286121 - RNA, 19 nt, Artificial Sequence
  Description of Artificial Sequence: Synthetic oligonucleotide
uaacaguuagggaaagcga

SEQ ID NO: 286122 - RNA, 19 nt, Artificial Sequence
  Description of Artificial Sequence: Synthetic oligonucleotide
guacccacuaccaagagac

SEQ ID NO: 286123 - RNA, 19 nt, Artificial Sequence
  Description of Artificial Sequence: Synthetic oligonucleotide
uauccuagcacuggaaccc

SEQ ID NO: 286124 - RNA, 19 nt, Artificial Sequence
  Description of Artificial Sequence: Synthetic oligonucleotide
aacagacaagucauguggg

SEQ ID NO: 286125 - RNA, 19 nt, Artificial Sequence
  Description of Artificial Sequence: Synthetic oligonucleotide
aagagacuaaucccuguga

SEQ ID NO: 286126 - RNA, 19 nt, Artificial Sequence
  Description of Artificial Sequence: Synthetic oligonucleotide
cuuugaaucacacccauaa

SEQ ID NO: 286127 - RNA, 19 nt, Artificial Sequence
  Description of Artificial Sequence: Synthetic oligonucleotide
uucacauauccuagcacug

SEQ ID NO: 286128 - RNA, 19 nt, Artificial Sequence
  Description of Artificial Sequence: Synthetic oligonucleotide
ugugagguagguuaucauc

SEQ ID NO: 286129 - RNA, 19 nt, Artificial Sequence
  Description of Artificial Sequence: Synthetic oligonucleotide
uguaauugguucugcucag

SEQ ID NO: 286130 - RNA, 19 nt, Artificial Sequence
  Description of Artificial Sequence: Synthetic oligonucleotide
agagccuuguuacuaccac

SEQ ID NO: 286131 - RNA, 19 nt, Artificial Sequence
  Description of Artificial Sequence: Synthetic oligonucleotide
uaauugguucugcucagca

SEQ ID NO: 286132 - RNA, 19 nt, Artificial Sequence
  Description of Artificial Sequence: Synthetic oligonucleotide
aacucuggcgucuuaucca

SEQ ID NO: 286133 - RNA, 19 nt, Artificial Sequence
  Description of Artificial Sequence: Synthetic oligonucleotide
uuacaugcugccagagcgg

SEQ ID NO: 286134 - RNA, 19 nt, Artificial Sequence
  Description of Artificial Sequence: Synthetic oligonucleotide
acuaaucccugugaaugcc

SEQ ID NO: 286135 - RNA, 19 nt, Artificial Sequence
  Description of Artificial Sequence: Synthetic oligonucleotide
agggacuaugaugaaaacg

SEQ ID NO: 286136 - RNA, 19 nt, Artificial Sequence
  Description of Artificial Sequence: Synthetic oligonucleotide
uggcauaguacccaucacu

SEQ ID NO: 286137 - RNA, 19 nt, Artificial Sequence
  Description of Artificial Sequence: Synthetic oligonucleotide
cauuggguaaguauccaac

SEQ ID NO: 286138 - RNA, 19 nt, Artificial Sequence
  Description of Artificial Sequence: Synthetic oligonucleotide
uaaccggagagucccagcc

SEQ ID NO: 286139 - RNA, 19 nt, Artificial Sequence
  Description of Artificial Sequence: Synthetic oligonucleotide
acuaugaugaaaacgagua

SEQ ID NO: 286140 - RNA, 19 nt, Artificial Sequence
  Description of Artificial Sequence: Synthetic oligonucleotide
caagggguauguuuugucc

SEQ ID NO: 286141 - RNA, 19 nt, Artificial Sequence
  Description of Artificial Sequence: Synthetic oligonucleotide
uguaccgagcacuauucca

SEQ ID NO: 286142 - RNA, 19 nt, Artificial Sequence
  Description of Artificial Sequence: Synthetic oligonucleotide
acagacaagucaugugggg

SEQ ID NO: 286143 - RNA, 19 nt, Artificial Sequence
  Description of Artificial Sequence: Synthetic oligonucleotide
aaugggagauguaugauua

SEQ ID NO: 286144 - RNA, 19 nt, Artificial Sequence
  Description of Artificial Sequence: Synthetic oligonucleotide
uagguuaucaucacccuuu

SEQ ID NO: 286145 - RNA, 19 nt, Artificial Sequence
  Description of Artificial Sequence: Synthetic oligonucleotide
ucuuguacgugcucaguca

SEQ ID NO: 286146 - RNA, 19 nt, Artificial Sequence
  Description of Artificial Sequence: Synthetic oligonucleotide
uagcacauuaaauggacau

SEQ ID NO: 286147 - RNA, 19 nt, Artificial Sequence
  Description of Artificial Sequence: Synthetic oligonucleotide
ugugagaccagcauccauu

SEQ ID NO: 286148 - RNA, 19 nt, Artificial Sequence
  Description of Artificial Sequence: Synthetic oligonucleotide
guuuagaggugguggaucc

SEQ ID NO: 286149 - RNA, 19 nt, Artificial Sequence
  Description of Artificial Sequence: Synthetic oligonucleotide
aacaguuagggaaagcgaa

SEQ ID NO: 286150 - RNA, 19 nt, Artificial Sequence
  Description of Artificial Sequence: Synthetic oligonucleotide
cgaaacauaguaaacagac

SEQ ID NO: 286151 - RNA, 19 nt, Artificial Sequence
  Description of Artificial Sequence: Synthetic oligonucleotide
ccuucauaagcuaaaacug

SEQ ID NO: 286152 - RNA, 19 nt, Artificial Sequence
  Description of Artificial Sequence: Synthetic oligonucleotide
agaacgcucaaaccaaaca

SEQ ID NO: 286153 - RNA, 19 nt, Artificial Sequence
  Description of Artificial Sequence: Synthetic oligonucleotide
uggguucuuggcaaaaggu

SEQ ID NO: 286154 - RNA, 19 nt, Artificial Sequence
  Description of Artificial Sequence: Synthetic oligonucleotide
cauauccuagcacuggaac

SEQ ID NO: 286155 - RNA, 19 nt, Artificial Sequence
  Description of Artificial Sequence: Synthetic oligonucleotide
cuaugaugaaaacgaguag

SEQ ID NO: 286156 - RNA, 19 nt, Artificial Sequence
  Description of Artificial Sequence: Synthetic oligonucleotide
guaaguaagucaccauccc

SEQ ID NO: 286157 - RNA, 19 nt, Artificial Sequence
  Description of Artificial Sequence: Synthetic oligonucleotide
uccucuuagaggcuuacua

SEQ ID NO: 286158 - RNA, 19 nt, Artificial Sequence
  Description of Artificial Sequence: Synthetic oligonucleotide
ucacauauccuagcacugg

SEQ ID NO: 286159 - RNA, 19 nt, Artificial Sequence
  Description of Artificial Sequence: Synthetic oligonucleotide
ugaguucacuguaaagagu

SEQ ID NO: 286160 - RNA, 19 nt, Artificial Sequence
  Description of Artificial Sequence: Synthetic oligonucleotide
aacgcucaaaccaaacaug

SEQ ID NO: 286161 - RNA, 19 nt, Artificial Sequence
  Description of Artificial Sequence: Synthetic oligonucleotide
ucgcacacagauccgguag

SEQ ID NO: 286162 - RNA, 19 nt, Artificial Sequence
  Description of Artificial Sequence: Synthetic oligonucleotide
gacuaaucccugugaaugc

SEQ ID NO: 286163 - RNA, 19 nt, Artificial Sequence
  Description of Artificial Sequence: Synthetic oligonucleotide
cuugucaggguuuagaggu

SEQ ID NO: 286164 - RNA, 19 nt, Artificial Sequence
  Description of Artificial Sequence: Synthetic oligonucleotide
aaguaagucaccaucccau

SEQ ID NO: 286165 - RNA, 19 nt, Artificial Sequence
  Description of Artificial Sequence: Synthetic oligonucleotide
uuagggaaagcgaaacaua

SEQ ID NO: 286166 - RNA, 19 nt, Artificial Sequence
  Description of Artificial Sequence: Synthetic oligonucleotide
caguaaguaagucaccauc

SEQ ID NO: 286167 - RNA, 19 nt, Artificial Sequence
  Description of Artificial Sequence: Synthetic oligonucleotide
ggaaggaugcagcaguggg

SEQ ID NO: 286168 - RNA, 19 nt, Artificial Sequence
  Description of Artificial Sequence: Synthetic oligonucleotide
uucgacgaauuucuuuuga

SEQ ID NO: 286169 - RNA, 19 nt, Artificial Sequence
  Description of Artificial Sequence: Synthetic oligonucleotide
cuaucaaaaggcagcaaca

SEQ ID NO: 286170 - RNA, 19 nt, Artificial Sequence
  Description of Artificial Sequence: Synthetic oligonucleotide
aggcuuauauauuggaaau

SEQ ID NO: 286171 - RNA, 19 nt, Artificial Sequence
  Description of Artificial Sequence: Synthetic oligonucleotide
gauccaaccagugccagac

SEQ ID NO: 286172 - RNA, 19 nt, Artificial Sequence
  Description of Artificial Sequence: Synthetic oligonucleotide
aaggguaauugcuggcacu

SEQ ID NO: 286173 - RNA, 19 nt, Artificial Sequence
  Description of Artificial Sequence: Synthetic oligonucleotide
  modified_base (6)..(6): a, c, u, g, unknown or other
caaagnucuuggcagggac

SEQ ID NO: 286174 - RNA, 19 nt, Artificial Sequence
  Description of Artificial Sequence: Synthetic oligonucleotide
uauggagccgucccuguga

SEQ ID NO: 286175 - RNA, 19 nt, Artificial Sequence
  Description of Artificial Sequence: Synthetic oligonucleotide
aggaacaugguggaggaug

SEQ ID NO: 286176 - RNA, 19 nt, Artificial Sequence
  Description of Artificial Sequence: Synthetic oligonucleotide
cuaccaauccucccugccg

SEQ ID NO: 286177 - RNA, 19 nt, Artificial Sequence
  Description of Artificial Sequence: Synthetic oligonucleotide
gcuaucaaaaggcagcaac

SEQ ID NO: 286178 - RNA, 19 nt, Artificial Sequence
  Description of Artificial Sequence: Synthetic oligonucleotide
ugcggcaaaaguagaaaau

SEQ ID NO: 286179 - RNA, 19 nt, Artificial Sequence
  Description of Artificial Sequence: Synthetic oligonucleotide
ugggagauguaugauuagc

SEQ ID NO: 286180 - RNA, 19 nt, Artificial Sequence
  Description of Artificial Sequence: Synthetic oligonucleotide
gggacuaugaugaaaacga

SEQ ID NO: 286181 - RNA, 19 nt, Artificial Sequence
  Description of Artificial Sequence: Synthetic oligonucleotide
gacgaauuucuuuugauuu

SEQ ID NO: 286182 - RNA, 19 nt, Artificial Sequence
  Description of Artificial Sequence: Synthetic oligonucleotide
cuuguacgugcucagucag

SEQ ID NO: 286183 - RNA, 19 nt, Artificial Sequence
  Description of Artificial Sequence: Synthetic oligonucleotide
agagacuaaucccugugaa

SEQ ID NO: 286184 - RNA, 19 nt, Artificial Sequence
  Description of Artificial Sequence: Synthetic oligonucleotide
caagaagaguccaccucgg

SEQ ID NO: 286185 - RNA, 19 nt, Artificial Sequence
  Description of Artificial Sequence: Synthetic oligonucleotide
acuugauagcaacaggaua

SEQ ID NO: 286186 - RNA, 19 nt, Artificial Sequence
  Description of Artificial Sequence: Synthetic oligonucleotide
  modified_base (9)..(9): a, c, u, g, unknown or other
acgcaaagnucuuggcagg

SEQ ID NO: 286187 - RNA, 19 nt, Artificial Sequence
  Description of Artificial Sequence: Synthetic oligonucleotide
uuacaucaaugggagaugu

SEQ ID NO: 286188 - RNA, 19 nt, Artificial Sequence
  Description of Artificial Sequence: Synthetic oligonucleotide
aacgcauucaacaggugaa

SEQ ID NO: 286189 - RNA, 19 nt, Artificial Sequence
  Description of Artificial Sequence: Synthetic oligonucleotide
agauguaugauuagccaca

SEQ ID NO: 286190 - RNA, 19 nt, Artificial Sequence
  Description of Artificial Sequence: Synthetic oligonucleotide
aggucuaccaauccucccu

SEQ ID NO: 286191 - RNA, 19 nt, Artificial Sequence
  Description of Artificial Sequence: Synthetic oligonucleotide
ccaagaagaguccaccucg

SEQ ID NO: 286192 - RNA, 19 nt, Artificial Sequence
  Description of Artificial Sequence: Synthetic oligonucleotide
caguagacaaggguaauug

SEQ ID NO: 286193 - RNA, 19 nt, Artificial Sequence
  Description of Artificial Sequence: Synthetic oligonucleotide
caagagacuaaucccugug

SEQ ID NO: 286194 - RNA, 19 nt, Artificial Sequence
  Description of Artificial Sequence: Synthetic oligonucleotide
ucccuuaaacgcauucaac

SEQ ID NO: 286195 - RNA, 19 nt, Artificial Sequence
  Description of Artificial Sequence: Synthetic oligonucleotide
ucuuucaccucagaacgcu

SEQ ID NO: 286196 - RNA, 19 nt, Artificial Sequence
  Description of Artificial Sequence: Synthetic oligonucleotide
cauggcauaguacccauca

SEQ ID NO: 286197 - RNA, 19 nt, Artificial Sequence
  Description of Artificial Sequence: Synthetic oligonucleotide
gaaguaggaucuuuugcaa

SEQ ID NO: 286198 - RNA, 19 nt, Artificial Sequence
  Description of Artificial Sequence: Synthetic oligonucleotide
uaagccguaggcuuauaua

SEQ ID NO: 286199 - RNA, 19 nt, Artificial Sequence
  Description of Artificial Sequence: Synthetic oligonucleotide
guaccgagcacuauuccag

SEQ ID NO: 286200 - RNA, 19 nt, Artificial Sequence
  Description of Artificial Sequence: Synthetic oligonucleotide
  modified_base (5)..(5): a, c, u, g, unknown or other
aaagnucuuggcagggacu

SEQ ID NO: 286201 - RNA, 19 nt, Artificial Sequence
  Description of Artificial Sequence: Synthetic oligonucleotide
  modified_base (4)..(4): a, c, u, g, unknown or other
aagnucuuggcagggacua

SEQ ID NO: 286202 - RNA, 19 nt, Artificial Sequence
  Description of Artificial Sequence: Synthetic oligonucleotide
uuugcggcaaaaguagaaa

SEQ ID NO: 286203 - RNA, 19 nt, Artificial Sequence
  Description of Artificial Sequence: Synthetic oligonucleotide
gguaaguauccaaccaugg

SEQ ID NO: 286204 - RNA, 19 nt, Artificial Sequence
  Description of Artificial Sequence: Synthetic oligonucleotide
gaaggucuaccaauccucc

SEQ ID NO: 286205 - RNA, 19 nt, Artificial Sequence
  Description of Artificial Sequence: Synthetic oligonucleotide
ggaagcaauaccgaaucag

SEQ ID NO: 286206 - RNA, 19 nt, Artificial Sequence
  Description of Artificial Sequence: Synthetic oligonucleotide
ugccaguaacaaacagagg

SEQ ID NO: 286207 - RNA, 19 nt, Artificial Sequence
  Description of Artificial Sequence: Synthetic oligonucleotide
guuuacaugcugccagagc

SEQ ID NO: 286208 - RNA, 19 nt, Artificial Sequence
  Description of Artificial Sequence: Synthetic oligonucleotide
uugcggcaaaaguagaaaa

SEQ ID NO: 286209 - RNA, 19 nt, Artificial Sequence
  Description of Artificial Sequence: Synthetic oligonucleotide
cuuguaaagcuggugguuc

SEQ ID NO: 286210 - RNA, 19 nt, Artificial Sequence
  Description of Artificial Sequence: Synthetic oligonucleotide
ccgguagcacauuaaaugg

SEQ ID NO: 286211 - RNA, 19 nt, Artificial Sequence
  Description of Artificial Sequence: Synthetic oligonucleotide
ccuuaaacgcauucaacag

SEQ ID NO: 286212 - RNA, 19 nt, Artificial Sequence
  Description of Artificial Sequence: Synthetic oligonucleotide
cuucacauauccuagcacu

SEQ ID NO: 286213 - RNA, 19 nt, Artificial Sequence
  Description of Artificial Sequence: Synthetic oligonucleotide
gaacaagggguauguuuug

SEQ ID NO: 286214 - RNA, 19 nt, Artificial Sequence
  Description of Artificial Sequence: Synthetic oligonucleotide
cauguaacaguuagggaaa

SEQ ID NO: 286215 - RNA, 19 nt, Artificial Sequence
  Description of Artificial Sequence: Synthetic oligonucleotide
uguacgugcucagucaguc

SEQ ID NO: 286216 - RNA, 19 nt, Artificial Sequence
  Description of Artificial Sequence: Synthetic oligonucleotide
gaaggaugcagcagugggc

SEQ ID NO: 286217 - RNA, 19 nt, Artificial Sequence
  Description of Artificial Sequence: Synthetic oligonucleotide
ugugaaugccagagcaauc

SEQ ID NO: 286218 - RNA, 19 nt, Artificial Sequence
  Description of Artificial Sequence: Synthetic oligonucleotide
aagaagaguccaccucggu

SEQ ID NO: 286219 - RNA, 19 nt, Artificial Sequence
  Description of Artificial Sequence: Synthetic oligonucleotide
aguccucgccgacugucgc

SEQ ID NO: 286220 - RNA, 19 nt, Artificial Sequence
  Description of Artificial Sequence: Synthetic oligonucleotide
ccauguaacaguuagggaa

SEQ ID NO: 286221 - RNA, 19 nt, Artificial Sequence
  Description of Artificial Sequence: Synthetic oligonucleotide
  modified_base (2)..(2): a, c, u, g, unknown or other
gnucuuggcagggacuaug

SEQ ID NO: 286222 - RNA, 19 nt, Artificial Sequence
  Description of Artificial Sequence: Synthetic oligonucleotide
gcauauggcugcuuuaaug

SEQ ID NO: 286223 - RNA, 19 nt, Artificial Sequence
  Description of Artificial Sequence: Synthetic oligonucleotide
uacuuuuaucuuguacgug

SEQ ID NO: 286224 - RNA, 19 nt, Artificial Sequence
  Description of Artificial Sequence: Synthetic oligonucleotide
uaccgaaucaguacuccua

SEQ ID NO: 286225 - RNA, 19 nt, Artificial Sequence
  Description of Artificial Sequence: Synthetic oligonucleotide
ugcugcuauuccagaaggc

SEQ ID NO: 286226 - RNA, 19 nt, Artificial Sequence
  Description of Artificial Sequence: Synthetic oligonucleotide
ucaguaaguaagucaccau

SEQ ID NO: 286227 - RNA, 19 nt, Artificial Sequence
  Description of Artificial Sequence: Synthetic oligonucleotide
aaguaccaagaagagucca

SEQ ID NO: 286228 - RNA, 19 nt, Artificial Sequence
  Description of Artificial Sequence: Synthetic oligonucleotide
cuccuaaccggagaguccc

SEQ ID NO: 286229 - RNA, 19 nt, Artificial Sequence
  Description of Artificial Sequence: Synthetic oligonucleotide
aacaagggguauguuuugu

SEQ ID NO: 286230 - RNA, 19 nt, Artificial Sequence
  Description of Artificial Sequence: Synthetic oligonucleotide
guugccagaaguaccaaga

SEQ ID NO: 286231 - RNA, 19 nt, Artificial Sequence
  Description of Artificial Sequence: Synthetic oligonucleotide
gauccgguagcacauuaaa

SEQ ID NO: 286232 - RNA, 19 nt, Artificial Sequence
  Description of Artificial Sequence: Synthetic oligonucleotide
ucgacgaauuucuuuugau

SEQ ID NO: 286233 - RNA, 19 nt, Artificial Sequence
  Description of Artificial Sequence: Synthetic oligonucleotide
uaaacgcauucaacaggug

SEQ ID NO: 286234 - RNA, 19 nt, Artificial Sequence
  Description of Artificial Sequence: Synthetic oligonucleotide
auaccgaaucaguacuccu

SEQ ID NO: 286235 - RNA, 19 nt, Artificial Sequence
  Description of Artificial Sequence: Synthetic oligonucleotide
guggcgaucuuucaccuca

SEQ ID NO: 286236 - RNA, 19 nt, Artificial Sequence
  Description of Artificial Sequence: Synthetic oligonucleotide
agggguauguuuuguccug

SEQ ID NO: 286237 - RNA, 19 nt, Artificial Sequence
  Description of Artificial Sequence: Synthetic oligonucleotide
ucacccuuugcaauuccau

SEQ ID NO: 286238 - RNA, 19 nt, Artificial Sequence
  Description of Artificial Sequence: Synthetic oligonucleotide
cuauuccagacacgccugg

SEQ ID NO: 286239 - RNA, 19 nt, Artificial Sequence
  Description of Artificial Sequence: Synthetic oligonucleotide
ucucaagguagcccacgca

SEQ ID NO: 286240 - RNA, 19 nt, Artificial Sequence
  Description of Artificial Sequence: Synthetic oligonucleotide
ucagaacgcucaaaccaaa

SEQ ID NO: 286241 - RNA, 19 nt, Artificial Sequence
  Description of Artificial Sequence: Synthetic oligonucleotide
uaguacccacuaccaagag

SEQ ID NO: 286242 - RNA, 19 nt, Artificial Sequence
  Description of Artificial Sequence: Synthetic oligonucleotide
cucaguaaguaagucacca

SEQ ID NO: 286243 - RNA, 19 nt, Artificial Sequence
  Description of Artificial Sequence: Synthetic oligonucleotide
auguguuauugaugcaggu

SEQ ID NO: 286244 - RNA, 19 nt, Artificial Sequence
  Description of Artificial Sequence: Synthetic oligonucleotide
ggagauguaugauuagcca

SEQ ID NO: 286245 - RNA, 19 nt, Artificial Sequence
  Description of Artificial Sequence: Synthetic oligonucleotide
aucuuucaccucagaacgc

SEQ ID NO: 286246 - RNA, 19 nt, Artificial Sequence
  Description of Artificial Sequence: Synthetic oligonucleotide
ggccaagaugauuacauca

SEQ ID NO: 286247 - RNA, 19 nt, Artificial Sequence
  Description of Artificial Sequence: Synthetic oligonucleotide
gggaaagcgaaacauagua

SEQ ID NO: 286248 - RNA, 19 nt, Artificial Sequence
  Description of Artificial Sequence: Synthetic oligonucleotide
augggagauguaugauuag

SEQ ID NO: 286249 - RNA, 19 nt, Artificial Sequence
  Description of Artificial Sequence: Synthetic oligonucleotide
cauaagcuaaaacugaguu

SEQ ID NO: 286250 - RNA, 19 nt, Artificial Sequence
  Description of Artificial Sequence: Synthetic oligonucleotide
caggugaauuguccuaaag

SEQ ID NO: 286251 - RNA, 19 nt, Artificial Sequence
  Description of Artificial Sequence: Synthetic oligonucleotide
caauaccgaaucaguacuc

SEQ ID NO: 286252 - RNA, 19 nt, Artificial Sequence
  Description of Artificial Sequence: Synthetic oligonucleotide
gcuuacuuuuaucuuguac

SEQ ID NO: 286253 - RNA, 19 nt, Artificial Sequence
  Description of Artificial Sequence: Synthetic oligonucleotide
  modified_base (18)..(18): a, c, u, g, unknown or other
agguagcccacgcaaagnu

SEQ ID NO: 286254 - RNA, 19 nt, Artificial Sequence
  Description of Artificial Sequence: Synthetic oligonucleotide
uaccacuucgacgaauuuc

SEQ ID NO: 286255 - RNA, 19 nt, Artificial Sequence
  Description of Artificial Sequence: Synthetic oligonucleotide
cacccuuugcaauuccaug

SEQ ID NO: 286256 - RNA, 19 nt, Artificial Sequence
  Description of Artificial Sequence: Synthetic oligonucleotide
gagcaauccugaguggcag

SEQ ID NO: 286257 - RNA, 19 nt, Artificial Sequence
  Description of Artificial Sequence: Synthetic oligonucleotide
ugauuacaucaaugggaga

SEQ ID NO: 286258 - RNA, 19 nt, Artificial Sequence
  Description of Artificial Sequence: Synthetic oligonucleotide
ugcggagaaucucuuuguc

SEQ ID NO: 286259 - RNA, 19 nt, Artificial Sequence
  Description of Artificial Sequence: Synthetic oligonucleotide
cauuccuuugcggcaaaag

SEQ ID NO: 286260 - RNA, 19 nt, Artificial Sequence
  Description of Artificial Sequence: Synthetic oligonucleotide
caguuagggaaagcgaaac

SEQ ID NO: 286261 - RNA, 19 nt, Artificial Sequence
  Description of Artificial Sequence: Synthetic oligonucleotide
ggaaauuguaauugguucu

SEQ ID NO: 286262 - RNA, 19 nt, Artificial Sequence
  Description of Artificial Sequence: Synthetic oligonucleotide
agguuaucaucacccuuug

SEQ ID NO: 286263 - RNA, 19 nt, Artificial Sequence
  Description of Artificial Sequence: Synthetic oligonucleotide
agaaaauaucagagagcuc

SEQ ID NO: 286264 - RNA, 19 nt, Artificial Sequence
  Description of Artificial Sequence: Synthetic oligonucleotide
gguagcacauuaaauggac

SEQ ID NO: 286265 - RNA, 19 nt, Artificial Sequence
  Description of Artificial Sequence: Synthetic oligonucleotide
  modified_base (19)..(19): a, c, u, g, unknown or other
aagguagcccacgcaaagn

SEQ ID NO: 286266 - RNA, 19 nt, Artificial Sequence
  Description of Artificial Sequence: Synthetic oligonucleotide
gggagauguaugauuagcc

SEQ ID NO: 286267 - RNA, 19 nt, Artificial Sequence
  Description of Artificial Sequence: Synthetic oligonucleotide
ugauagcaacaggauaaac

SEQ ID NO: 286268 - RNA, 19 nt, Artificial Sequence
  Description of Artificial Sequence: Synthetic oligonucleotide
ugguaguacccacuaccaa

SEQ ID NO: 286269 - RNA, 19 nt, Artificial Sequence
  Description of Artificial Sequence: Synthetic oligonucleotide
agucucuuagccaccaggu

SEQ ID NO: 286270 - RNA, 19 nt, Artificial Sequence
  Description of Artificial Sequence: Synthetic oligonucleotide
cuaaccggagagucccagc

SEQ ID NO: 286271 - RNA, 19 nt, Artificial Sequence
  Description of Artificial Sequence: Synthetic oligonucleotide
aucaagcuaucaaaaggca

SEQ ID NO: 286272 - RNA, 19 nt, Artificial Sequence
  Description of Artificial Sequence: Synthetic oligonucleotide
uggcucuuugaaucacacc

SEQ ID NO: 286273 - RNA, 19 nt, Artificial Sequence
  Description of Artificial Sequence: Synthetic oligonucleotide
guugacaaucaagcuauca

SEQ ID NO: 286274 - RNA, 19 nt, Artificial Sequence
  Description of Artificial Sequence: Synthetic oligonucleotide
uaccaccauuucuuggucu

SEQ ID NO: 286275 - RNA, 19 nt, Artificial Sequence
  Description of Artificial Sequence: Synthetic oligonucleotide
guaguacccacuaccaaga

SEQ ID NO: 286276 - RNA, 19 nt, Artificial Sequence
  Description of Artificial Sequence: Synthetic oligonucleotide
cucaagguagcccacgcaa

SEQ ID NO: 286277 - RNA, 19 nt, Artificial Sequence
  Description of Artificial Sequence: Synthetic oligonucleotide
aaccggagagucccagccu

SEQ ID NO: 286278 - RNA, 19 nt, Artificial Sequence
  Description of Artificial Sequence: Synthetic oligonucleotide
uggucccuuaaacgcauuc

SEQ ID NO: 286279 - RNA, 19 nt, Artificial Sequence
  Description of Artificial Sequence: Synthetic oligonucleotide
cagaacgcucaaaccaaac

SEQ ID NO: 286280 - RNA, 19 nt, Artificial Sequence
  Description of Artificial Sequence: Synthetic oligonucleotide
cugccacauucuauggagc

SEQ ID NO: 286281 - RNA, 19 nt, Artificial Sequence
  Description of Artificial Sequence: Synthetic oligonucleotide
gaaguaacuuuuacuuuaa

SEQ ID NO: 286282 - RNA, 19 nt, Artificial Sequence
  Description of Artificial Sequence: Synthetic oligonucleotide
caucauucucaguaaguaa

SEQ ID NO: 286283 - RNA, 19 nt, Artificial Sequence
  Description of Artificial Sequence: Synthetic oligonucleotide
ccaacaaucaucuugcuau

SEQ ID NO: 286284 - RNA, 19 nt, Artificial Sequence
  Description of Artificial Sequence: Synthetic oligonucleotide
aguauccaaccaugguagu

SEQ ID NO: 286285 - RNA, 19 nt, Artificial Sequence
  Description of Artificial Sequence: Synthetic oligonucleotide
uugauagcaacaggauaaa

SEQ ID NO: 286286 - RNA, 19 nt, Artificial Sequence
  Description of Artificial Sequence: Synthetic oligonucleotide
augauuccguugguguagg

SEQ ID NO: 286287 - RNA, 19 nt, Artificial Sequence
  Description of Artificial Sequence: Synthetic oligonucleotide
auggagccgucccugugag

SEQ ID NO: 286288 - RNA, 19 nt, Artificial Sequence
  Description of Artificial Sequence: Synthetic oligonucleotide
guagacaaggguaauugcu

SEQ ID NO: 286289 - RNA, 19 nt, Artificial Sequence
  Description of Artificial Sequence: Synthetic oligonucleotide
aaacgaguagcagggugaa

SEQ ID NO: 286290 - RNA, 19 nt, Artificial Sequence
  Description of Artificial Sequence: Synthetic oligonucleotide
ugauuccguugguguaggg

SEQ ID NO: 286291 - RNA, 19 nt, Artificial Sequence
  Description of Artificial Sequence: Synthetic oligonucleotide
guaaguauccaaccauggu

SEQ ID NO: 286292 - RNA, 19 nt, Artificial Sequence
  Description of Artificial Sequence: Synthetic oligonucleotide
guaugauuagccacacaga

SEQ ID NO: 286293 - RNA, 19 nt, Artificial Sequence
  Description of Artificial Sequence: Synthetic oligonucleotide
cuguaccgagcacuauucc

SEQ ID NO: 286294 - RNA, 19 nt, Artificial Sequence
  Description of Artificial Sequence: Synthetic oligonucleotide
uuaaggcacccuucucagu

SEQ ID NO: 286295 - RNA, 19 nt, Artificial Sequence
  Description of Artificial Sequence: Synthetic oligonucleotide
cacuauuccagacacgccu

SEQ ID NO: 286296 - RNA, 19 nt, Artificial Sequence
  Description of Artificial Sequence: Synthetic oligonucleotide
gucucuuagccaccaggug

SEQ ID NO: 286297 - RNA, 19 nt, Artificial Sequence
  Description of Artificial Sequence: Synthetic oligonucleotide
uggaggcuguuuaggcacc

SEQ ID NO: 286298 - RNA, 19 nt, Artificial Sequence
  Description of Artificial Sequence: Synthetic oligonucleotide
cuuugcggcaaaaguagaa

SEQ ID NO: 286299 - RNA, 19 nt, Artificial Sequence
  Description of Artificial Sequence: Synthetic oligonucleotide
acuauuccagacacgccug

SEQ ID NO: 286300 - RNA, 19 nt, Artificial Sequence
  Description of Artificial Sequence: Synthetic oligonucleotide
  modified_base (16)..(16): a, c, u, g, unknown or other
guagcccacgcaaagnucu

SEQ ID NO: 286301 - RNA, 19 nt, Artificial Sequence
  Description of Artificial Sequence: Synthetic oligonucleotide
aagaagcucaagaguccug

SEQ ID NO: 286302 - RNA, 19 nt, Artificial Sequence
  Description of Artificial Sequence: Synthetic oligonucleotide
uuguacgugcucagucagu

SEQ ID NO: 286303 - RNA, 19 nt, Artificial Sequence
  Description of Artificial Sequence: Synthetic oligonucleotide
gacuucacccuguuagcaa

SEQ ID NO: 286304 - RNA, 19 nt, Artificial Sequence
  Description of Artificial Sequence: Synthetic oligonucleotide
uaccgagcacuauuccaga

SEQ ID NO: 286305 - RNA, 19 nt, Artificial Sequence
  Description of Artificial Sequence: Synthetic oligonucleotide
aaacacgucuucagauggu

SEQ ID NO: 286306 - RNA, 19 nt, Artificial Sequence
  Description of Artificial Sequence: Synthetic oligonucleotide
ugggcagcuuacuuuuauc

SEQ ID NO: 286307 - RNA, 19 nt, Artificial Sequence
  Description of Artificial Sequence: Synthetic oligonucleotide
ccauaauagucuccauucc

SEQ ID NO: 286308 - RNA, 19 nt, Artificial Sequence
  Description of Artificial Sequence: Synthetic oligonucleotide
cggagaaucucuuugucac

SEQ ID NO: 286309 - RNA, 19 nt, Artificial Sequence
  Description of Artificial Sequence: Synthetic oligonucleotide
gguguagggcuuguaaagc

SEQ ID NO: 286310 - RNA, 19 nt, Artificial Sequence
  Description of Artificial Sequence: Synthetic oligonucleotide
uacaucaaugggagaugua

SEQ ID NO: 286311 - RNA, 19 nt, Artificial Sequence
  Description of Artificial Sequence: Synthetic oligonucleotide
accaauccucccugccggg

SEQ ID NO: 286312 - RNA, 19 nt, Artificial Sequence
  Description of Artificial Sequence: Synthetic oligonucleotide
cuuucaccucagaacgcuc

SEQ ID NO: 286313 - RNA, 19 nt, Artificial Sequence
  Description of Artificial Sequence: Synthetic oligonucleotide
caguccucgccgacugucg

SEQ ID NO: 286314 - RNA, 19 nt, Artificial Sequence
  Description of Artificial Sequence: Synthetic oligonucleotide
guaggaucuuuugcaauga

SEQ ID NO: 286315 - RNA, 19 nt, Artificial Sequence
  Description of Artificial Sequence: Synthetic oligonucleotide
aacgaguagcagggugaag

SEQ ID NO: 286316 - RNA, 19 nt, Artificial Sequence
  Description of Artificial Sequence: Synthetic oligonucleotide
cugauauucuucucccuua

SEQ ID NO: 286317 - RNA, 19 nt, Artificial Sequence
  Description of Artificial Sequence: Synthetic oligonucleotide
uggcgaucuuucaccucag

SEQ ID NO: 286318 - RNA, 19 nt, Artificial Sequence
  Description of Artificial Sequence: Synthetic oligonucleotide
gaagaagcucaagaguccu

SEQ ID NO: 286319 - RNA, 19 nt, Artificial Sequence
  Description of Artificial Sequence: Synthetic oligonucleotide
guagcacauuaaauggaca

SEQ ID NO: 286320 - RNA, 19 nt, Artificial Sequence
  Description of Artificial Sequence: Synthetic oligonucleotide
gaguucauagcugguccca

SEQ ID NO: 286321 - RNA, 19 nt, Artificial Sequence
  Description of Artificial Sequence: Synthetic oligonucleotide
aaccagugccagacagagg

SEQ ID NO: 286322 - RNA, 19 nt, Artificial Sequence
  Description of Artificial Sequence: Synthetic oligonucleotide
ggguauguuuuguccuggg

SEQ ID NO: 286323 - RNA, 19 nt, Artificial Sequence
  Description of Artificial Sequence: Synthetic oligonucleotide
gagcacuauuccagacacg

SEQ ID NO: 286324 - RNA, 19 nt, Artificial Sequence
  Description of Artificial Sequence: Synthetic oligonucleotide
ggacuaugaugaaaacgag

SEQ ID NO: 286325 - RNA, 19 nt, Artificial Sequence
  Description of Artificial Sequence: Synthetic oligonucleotide
gcaaugauuccguuggugu

SEQ ID NO: 286326 - RNA, 19 nt, Artificial Sequence
  Description of Artificial Sequence: Synthetic oligonucleotide
agcaauccugaguggcaga

SEQ ID NO: 286327 - RNA, 19 nt, Artificial Sequence
  Description of Artificial Sequence: Synthetic oligonucleotide
agggcuuguaaagcuggug

SEQ ID NO: 286328 - RNA, 19 nt, Artificial Sequence
  Description of Artificial Sequence: Synthetic oligonucleotide
ggucuaccaauccucccug

SEQ ID NO: 286329 - RNA, 19 nt, Artificial Sequence
  Description of Artificial Sequence: Synthetic oligonucleotide
agccuuguuacuaccacuu

SEQ ID NO: 286330 - RNA, 19 nt, Artificial Sequence
  Description of Artificial Sequence: Synthetic oligonucleotide
cuauggagccgucccugug

SEQ ID NO: 286331 - RNA, 19 nt, Artificial Sequence
  Description of Artificial Sequence: Synthetic oligonucleotide
cuggcgucuuauccagagc

SEQ ID NO: 286332 - RNA, 19 nt, Artificial Sequence
  Description of Artificial Sequence: Synthetic oligonucleotide
acaguuagggaaagcgaaa

SEQ ID NO: 286333 - RNA, 19 nt, Artificial Sequence
  Description of Artificial Sequence: Synthetic oligonucleotide
gccagagcggccgugaggc

SEQ ID NO: 286334 - RNA, 19 nt, Artificial Sequence
  Description of Artificial Sequence: Synthetic oligonucleotide
gucuaccaauccucccugc

SEQ ID NO: 286335 - RNA, 19 nt, Artificial Sequence
  Description of Artificial Sequence: Synthetic oligonucleotide
agggaaagcgaaacauagu

SEQ ID NO: 286336 - RNA, 19 nt, Artificial Sequence
  Description of Artificial Sequence: Synthetic oligonucleotide
ugacuuuguccugccacau

SEQ ID NO: 286337 - RNA, 19 nt, Artificial Sequence
  Description of Artificial Sequence: Synthetic oligonucleotide
ccuguaccgagcacuauuc

SEQ ID NO: 286338 - RNA, 19 nt, Artificial Sequence
  Description of Artificial Sequence: Synthetic oligonucleotide
guguagggcuuguaaagcu

SEQ ID NO: 286339 - RNA, 19 nt, Artificial Sequence
  Description of Artificial Sequence: Synthetic oligonucleotide
uccguugguguagggcuug

SEQ ID NO: 286340 - RNA, 19 nt, Artificial Sequence
  Description of Artificial Sequence: Synthetic oligonucleotide
cagagccuuguuacuacca

SEQ ID NO: 286341 - RNA, 19 nt, Artificial Sequence
  Description of Artificial Sequence: Synthetic oligonucleotide
gguuaucaucacccuuugc

SEQ ID NO: 286342 - RNA, 19 nt, Artificial Sequence
  Description of Artificial Sequence: Synthetic oligonucleotide
cauugguguccucugauau

SEQ ID NO: 286343 - RNA, 19 nt, Artificial Sequence
  Description of Artificial Sequence: Synthetic oligonucleotide
ccguaggcuuauauauugg

SEQ ID NO: 286344 - RNA, 19 nt, Artificial Sequence
  Description of Artificial Sequence: Synthetic oligonucleotide
cuccgguccucaugguuac

SEQ ID NO: 286345 - RNA, 19 nt, Artificial Sequence
  Description of Artificial Sequence: Synthetic oligonucleotide
uuacuaccacuucgacgaa

SEQ ID NO: 286346 - RNA, 19 nt, Artificial Sequence
  Description of Artificial Sequence: Synthetic oligonucleotide
ggaaagcgaaacauaguaa

SEQ ID NO: 286347 - RNA, 19 nt, Artificial Sequence
  Description of Artificial Sequence: Synthetic oligonucleotide
gcggagaaucucuuuguca

SEQ ID NO: 286348 - RNA, 19 nt, Artificial Sequence
  Description of Artificial Sequence: Synthetic oligonucleotide
uccuaaccggagaguccca

SEQ ID NO: 286349 - RNA, 19 nt, Artificial Sequence
  Description of Artificial Sequence: Synthetic oligonucleotide
uuccguugguguagggcuu

SEQ ID NO: 286350 - RNA, 19 nt, Artificial Sequence
  Description of Artificial Sequence: Synthetic oligonucleotide
uacccaucacuggccaaga

SEQ ID NO: 286351 - RNA, 19 nt, Artificial Sequence
  Description of Artificial Sequence: Synthetic oligonucleotide
aguucauagcuggucccau

SEQ ID NO: 286352 - RNA, 19 nt, Artificial Sequence
  Description of Artificial Sequence: Synthetic oligonucleotide
caugguuaccaacaaucau

SEQ ID NO: 286353 - RNA, 19 nt, Artificial Sequence
  Description of Artificial Sequence: Synthetic oligonucleotide
guauccaaccaugguagua

SEQ ID NO: 286354 - RNA, 19 nt, Artificial Sequence
  Description of Artificial Sequence: Synthetic oligonucleotide
ccgacugucgcucccgccc

SEQ ID NO: 286355 - RNA, 19 nt, Artificial Sequence
  Description of Artificial Sequence: Synthetic oligonucleotide
cugauguguuauugaugca

SEQ ID NO: 286356 - RNA, 19 nt, Artificial Sequence
  Description of Artificial Sequence: Synthetic oligonucleotide
  modified_base (13)..(13): a, c, u, g, unknown or other
gcccacgcaaagnucuugg

SEQ ID NO: 286357 - RNA, 19 nt, Artificial Sequence
  Description of Artificial Sequence: Synthetic oligonucleotide
gcgaucuuucaccucagaa

SEQ ID NO: 286358 - RNA, 19 nt, Artificial Sequence
  Description of Artificial Sequence: Synthetic oligonucleotide
cacacagauccgguagcac

SEQ ID NO: 286359 - RNA, 19 nt, Artificial Sequence
  Description of Artificial Sequence: Synthetic oligonucleotide
caaugggagauguaugauu

SEQ ID NO: 286360 - RNA, 19 nt, Artificial Sequence
  Description of Artificial Sequence: Synthetic oligonucleotide
gagccgucccugugagacc

SEQ ID NO: 286361 - RNA, 19 nt, Artificial Sequence
  Description of Artificial Sequence: Synthetic oligonucleotide
uucacaccaaaggcuucuc

SEQ ID NO: 286362 - RNA, 19 nt, Artificial Sequence
  Description of Artificial Sequence: Synthetic oligonucleotide
gguuguuuacaugcugcca

SEQ ID NO: 286363 - RNA, 19 nt, Artificial Sequence
  Description of Artificial Sequence: Synthetic oligonucleotide
acgcauucaacaggugaau

SEQ ID NO: 286364 - RNA, 19 nt, Artificial Sequence
  Description of Artificial Sequence: Synthetic oligonucleotide
guaagccguaggcuuauau

SEQ ID NO: 286365 - RNA, 19 nt, Artificial Sequence
  Description of Artificial Sequence: Synthetic oligonucleotide
ccuccuaaccggagagucc

SEQ ID NO: 286366 - RNA, 19 nt, Artificial Sequence
  Description of Artificial Sequence: Synthetic oligonucleotide
cagcauauggcugcuuuaa

SEQ ID NO: 286367 - RNA, 19 nt, Artificial Sequence
  Description of Artificial Sequence: Synthetic oligonucleotide
ccagagccuuguuacuacc

SEQ ID NO: 286368 - RNA, 19 nt, Artificial Sequence
  Description of Artificial Sequence: Synthetic oligonucleotide
cugcuauuccagaaggcau

SEQ ID NO: 286369 - RNA, 19 nt, Artificial Sequence
  Description of Artificial Sequence: Synthetic oligonucleotide
ugguaagccguaggcuuau

SEQ ID NO: 286370 - RNA, 19 nt, Artificial Sequence
  Description of Artificial Sequence: Synthetic oligonucleotide
auccaaccagugccagaca

SEQ ID NO: 286371 - RNA, 19 nt, Artificial Sequence
  Description of Artificial Sequence: Synthetic oligonucleotide
gcggcaaaaguagaaaaua

SEQ ID NO: 286372 - RNA, 19 nt, Artificial Sequence
  Description of Artificial Sequence: Synthetic oligonucleotide
accucggugccagaagaau

SEQ ID NO: 286373 - RNA, 19 nt, Artificial Sequence
  Description of Artificial Sequence: Synthetic oligonucleotide
ccagagcaauccugagugg

SEQ ID NO: 286374 - RNA, 19 nt, Artificial Sequence
  Description of Artificial Sequence: Synthetic oligonucleotide
agauccgguagcacauuaa

SEQ ID NO: 286375 - RNA, 19 nt, Artificial Sequence
  Description of Artificial Sequence: Synthetic oligonucleotide
cucgccgacugucgcuccc

SEQ ID NO: 286376 - RNA, 19 nt, Artificial Sequence
  Description of Artificial Sequence: Synthetic oligonucleotide
gcgaaacauaguaaacaga

SEQ ID NO: 286377 - RNA, 19 nt, Artificial Sequence
  Description of Artificial Sequence: Synthetic oligonucleotide
gguagguuaucaucacccu

SEQ ID NO: 286378 - RNA, 19 nt, Artificial Sequence
  Description of Artificial Sequence: Synthetic oligonucleotide
gauggucccuuaaacgcau

SEQ ID NO: 286379 - RNA, 19 nt, Artificial Sequence
  Description of Artificial Sequence: Synthetic oligonucleotide
gcuuacuauaaaggaacaa

SEQ ID NO: 286380 - RNA, 19 nt, Artificial Sequence
  Description of Artificial Sequence: Synthetic oligonucleotide
cagggcucgcacacagauc

SEQ ID NO: 286381 - RNA, 19 nt, Artificial Sequence
  Description of Artificial Sequence: Synthetic oligonucleotide
  modified_base (11)..(11): a, c, u, g, unknown or other
ccacgcaaagnucuuggca

SEQ ID NO: 286382 - RNA, 19 nt, Artificial Sequence
  Description of Artificial Sequence: Synthetic oligonucleotide
cguaggcuuauauauugga

SEQ ID NO: 286383 - RNA, 19 nt, Artificial Sequence
  Description of Artificial Sequence: Synthetic oligonucleotide
  modified_base (12)..(12): a, c, u, g, unknown or other
cccacgcaaagnucuuggc

SEQ ID NO: 286384 - RNA, 19 nt, Artificial Sequence
  Description of Artificial Sequence: Synthetic oligonucleotide
cugugaaugccagagcaau

SEQ ID NO: 286385 - RNA, 19 nt, Artificial Sequence
  Description of Artificial Sequence: Synthetic oligonucleotide
acauguggacaggcuuuca

SEQ ID NO: 286386 - RNA, 19 nt, Artificial Sequence
  Description of Artificial Sequence: Synthetic oligonucleotide
gacugucgcucccgcccug

SEQ ID NO: 286387 - RNA, 19 nt, Artificial Sequence
  Description of Artificial Sequence: Synthetic oligonucleotide
gguggaggaugcaggucag

SEQ ID NO: 286388 - RNA, 19 nt, Artificial Sequence
  Description of Artificial Sequence: Synthetic oligonucleotide
ggcuuguaaagcugguggu

SEQ ID NO: 286389 - RNA, 19 nt, Artificial Sequence
  Description of Artificial Sequence: Synthetic oligonucleotide
cugccagagcggccgugag

SEQ ID NO: 286390 - RNA, 19 nt, Artificial Sequence
  Description of Artificial Sequence: Synthetic oligonucleotide
ccguguaucugucccacca

SEQ ID NO: 286391 - RNA, 19 nt, Artificial Sequence
  Description of Artificial Sequence: Synthetic oligonucleotide
cugcggagaaucucuuugu

SEQ ID NO: 286392 - RNA, 19 nt, Artificial Sequence
  Description of Artificial Sequence: Synthetic oligonucleotide
ugcuggcacuucacaccaa

SEQ ID NO: 286393 - RNA, 19 nt, Artificial Sequence
  Description of Artificial Sequence: Synthetic oligonucleotide
cucgcacacagauccggua

SEQ ID NO: 286394 - RNA, 19 nt, Artificial Sequence
  Description of Artificial Sequence: Synthetic oligonucleotide
cuuagccaccagguggcga

SEQ ID NO: 286395 - RNA, 19 nt, Artificial Sequence
  Description of Artificial Sequence: Synthetic oligonucleotide
  modified_base (17)..(17): a, c, u, g, unknown or other
gguagcccacgcaaagnuc

SEQ ID NO: 286396 - RNA, 19 nt, Artificial Sequence
  Description of Artificial Sequence: Synthetic oligonucleotide
caggacccuccuaaccgga

SEQ ID NO: 286397 - RNA, 19 nt, Artificial Sequence
  Description of Artificial Sequence: Synthetic oligonucleotide
  modified_base (3)..(3): a, c, u, g, unknown or other
agnucuuggcagggacuau

SEQ ID NO: 286398 - RNA, 19 nt, Artificial Sequence
  Description of Artificial Sequence: Synthetic oligonucleotide
agccguaggcuuauauauu

SEQ ID NO: 286399 - RNA, 19 nt, Artificial Sequence
  Description of Artificial Sequence: Synthetic oligonucleotide
cacuucgacgaauuucuuu

SEQ ID NO: 286400 - RNA, 19 nt, Artificial Sequence
  Description of Artificial Sequence: Synthetic oligonucleotide
ggauccaaccagugccaga

SEQ ID NO: 286401 - RNA, 19 nt, Artificial Sequence
  Description of Artificial Sequence: Synthetic oligonucleotide
cagauccgguagcacauua

SEQ ID NO: 286402 - RNA, 19 nt, Artificial Sequence
  Description of Artificial Sequence: Synthetic oligonucleotide
uggagccgucccugugaga

SEQ ID NO: 286403 - RNA, 19 nt, Artificial Sequence
  Description of Artificial Sequence: Synthetic oligonucleotide
ggacagucagagagaugcc

SEQ ID NO: 286404 - RNA, 19 nt, Artificial Sequence
  Description of Artificial Sequence: Synthetic oligonucleotide
  modified_base (8)..(8): a, c, u, g, unknown or other
cgcaaagnucuuggcaggg

SEQ ID NO: 286405 - RNA, 19 nt, Artificial Sequence
  Description of Artificial Sequence: Synthetic oligonucleotide
ccuaaccggagagucccag

SEQ ID NO: 286406 - RNA, 19 nt, Artificial Sequence
  Description of Artificial Sequence: Synthetic oligonucleotide
aggaccggcuccgguccuc

SEQ ID NO: 286407 - RNA, 19 nt, Artificial Sequence
  Description of Artificial Sequence: Synthetic oligonucleotide
cccuccuaaccggagaguc

SEQ ID NO: 286408 - RNA, 19 nt, Artificial Sequence
  Description of Artificial Sequence: Synthetic oligonucleotide
cgcucaaaccaaacaugug

SEQ ID NO: 286409 - RNA, 19 nt, Artificial Sequence
  Description of Artificial Sequence: Synthetic oligonucleotide
gcaauccugaguggcagaa

SEQ ID NO: 286410 - RNA, 19 nt, Artificial Sequence
  Description of Artificial Sequence: Synthetic oligonucleotide
ggguuagagucuggaagga

SEQ ID NO: 286411 - RNA, 19 nt, Artificial Sequence
  Description of Artificial Sequence: Synthetic oligonucleotide
uccgguccucaugguuacc

SEQ ID NO: 286412 - RNA, 19 nt, Artificial Sequence
  Description of Artificial Sequence: Synthetic oligonucleotide
cgcacacagauccgguagc

SEQ ID NO: 286413 - RNA, 19 nt, Artificial Sequence
  Description of Artificial Sequence: Synthetic oligonucleotide
acccuccuaaccggagagu

SEQ ID NO: 286414 - RNA, 19 nt, Artificial Sequence
  Description of Artificial Sequence: Synthetic oligonucleotide
caccucggugccagaagaa

SEQ ID NO: 286415 - RNA, 19 nt, Artificial Sequence
  Description of Artificial Sequence: Synthetic oligonucleotide
gcaccugccuuggcagugg

SEQ ID NO: 286416 - RNA, 19 nt, Artificial Sequence
  Description of Artificial Sequence: Synthetic oligonucleotide
gcacagaaugucucauacu

SEQ ID NO: 286417 - RNA, 19 nt, Artificial Sequence
  Description of Artificial Sequence: Synthetic oligonucleotide
ccaaccagugccagacaga

SEQ ID NO: 286418 - RNA, 19 nt, Artificial Sequence
  Description of Artificial Sequence: Synthetic oligonucleotide
ccuuugcggcaaaaguaga

SEQ ID NO: 286419 - RNA, 19 nt, Artificial Sequence
  Description of Artificial Sequence: Synthetic oligonucleotide
ccugugaaugccagagcaa

SEQ ID NO: 286420 - RNA, 19 nt, Artificial Sequence
  Description of Artificial Sequence: Synthetic oligonucleotide
ccucuuagaggcuuacuau

SEQ ID NO: 286421 - RNA, 19 nt, Artificial Sequence
  Description of Artificial Sequence: Synthetic oligonucleotide
ccaccucggugccagaaga

SEQ ID NO: 286422 - RNA, 19 nt, Artificial Sequence
  Description of Artificial Sequence: Synthetic oligonucleotide
gcacacagauccgguagca

SEQ ID NO: 286423 - RNA, 19 nt, Artificial Sequence
  Description of Artificial Sequence: Synthetic oligonucleotide
cucuggcgucuuauccaga

SEQ ID NO: 286424 - RNA, 19 nt, Artificial Sequence
  Description of Artificial Sequence: Synthetic oligonucleotide
ccacagaaggucuaccaau

SEQ ID NO: 286425 - RNA, 19 nt, Artificial Sequence
  Description of Artificial Sequence: Synthetic oligonucleotide
ccaauccucccugccgggc

SEQ ID NO: 286426 - RNA, 19 nt, Artificial Sequence
  Description of Artificial Sequence: Synthetic oligonucleotide
gguguccucugauauucuu

SEQ ID NO: 286427 - RNA, 19 nt, Artificial Sequence
  Description of Artificial Sequence: Synthetic oligonucleotide
aguggugaccuggguucuu

SEQ ID NO: 286428 - RNA, 19 nt, Artificial Sequence
  Description of Artificial Sequence: Synthetic oligonucleotide
cccuuaaggcacccuucuc

SEQ ID NO: 286429 - RNA, 19 nt, Artificial Sequence
  Description of Artificial Sequence: Synthetic oligonucleotide
gccgacugucgcucccgcc

SEQ ID NO: 286430 - RNA, 19 nt, Artificial Sequence
  Description of Artificial Sequence: Synthetic oligonucleotide
cccguguaucugucccacc

SEQ ID NO: 286431 - RNA, 19 nt, Artificial Sequence
  Description of Artificial Sequence: Synthetic oligonucleotide
gggcucgcacacagauccg

SEQ ID NO: 286432 - RNA, 19 nt, Artificial Sequence
  Description of Artificial Sequence: Synthetic oligonucleotide
guccucgccgacugucgcu

SEQ ID NO: 286433 - RNA, 19 nt, Artificial Sequence
  Description of Artificial Sequence: Synthetic oligonucleotide
ccacauucuauggagccgu

SEQ ID NO: 286434 - RNA, 19 nt, Artificial Sequence
  Description of Artificial Sequence: Synthetic oligonucleotide
gcuuguaaagcuggugguu

SEQ ID NO: 286435 - RNA, 19 nt, Artificial Sequence
  Description of Artificial Sequence: Synthetic oligonucleotide
gcucacuugucaggguuua

SEQ ID NO: 286436 - RNA, 19 nt, Artificial Sequence
  Description of Artificial Sequence: Synthetic oligonucleotide
auggucccuuaaacgcauu

SEQ ID NO: 286437 - RNA, 19 nt, Artificial Sequence
  Description of Artificial Sequence: Synthetic oligonucleotide
ggcgucuuauccagagccu

SEQ ID NO: 286438 - RNA, 19 nt, Artificial Sequence
  Description of Artificial Sequence: Synthetic oligonucleotide
cgacgaauuucuuuugauu

SEQ ID NO: 286439 - RNA, 19 nt, Artificial Sequence
  Description of Artificial Sequence: Synthetic oligonucleotide
ccucgccgacugucgcucc

SEQ ID NO: 286440 - RNA, 19 nt, Artificial Sequence
  Description of Artificial Sequence: Synthetic oligonucleotide
cccaacuggucaucauucu

SEQ ID NO: 286441 - RNA, 19 nt, Artificial Sequence
  Description of Artificial Sequence: Synthetic oligonucleotide
gcgucuuauccagagccuu

SEQ ID NO: 286442 - RNA, 19 nt, Artificial Sequence
  Description of Artificial Sequence: Synthetic oligonucleotide
gcucagccuggcaucuaaa

SEQ ID NO: 286443 - RNA, 19 nt, Artificial Sequence
  Description of Artificial Sequence: Synthetic oligonucleotide
ggcauuccucuuagaggcu

SEQ ID NO: 286444 - RNA, 19 nt, Artificial Sequence
  Description of Artificial Sequence: Synthetic oligonucleotide
ccacacagauaccaccauu

SEQ ID NO: 286445 - RNA, 19 nt, Artificial Sequence
  Description of Artificial Sequence: Synthetic oligonucleotide
gcucgcacacagauccggu

SEQ ID NO: 286446 - RNA, 19 nt, Artificial Sequence
  Description of Artificial Sequence: Synthetic oligonucleotide
ggcucacuugucaggguuu

SEQ ID NO: 286447 - RNA, 19 nt, Artificial Sequence
  Description of Artificial Sequence: Synthetic oligonucleotide
gguaagccguaggcuuaua

SEQ ID NO: 286448 - RNA, 19 nt, Artificial Sequence
  Description of Artificial Sequence: Synthetic oligonucleotide
cgccgacugucgcucccgc

SEQ ID NO: 286449 - RNA, 19 nt, Artificial Sequence
  Description of Artificial Sequence: Synthetic oligonucleotide
gccgugaggcucggcucca

SEQ ID NO: 286450 - RNA, 19 nt, Artificial Sequence
  Description of Artificial Sequence: Synthetic oligonucleotide
ccauuccuuugcggcaaaa

SEQ ID NO: 286451 - RNA, 19 nt, Artificial Sequence
  Description of Artificial Sequence: Synthetic oligonucleotide
cgcauucaacaggugaauu

SEQ ID NO: 286452 - RNA, 19 nt, Artificial Sequence
  Description of Artificial Sequence: Synthetic oligonucleotide
cgacugucgcucccgcccu

SEQ ID NO: 286453 - RNA, 19 nt, Artificial Sequence
  Description of Artificial Sequence: Synthetic oligonucleotide
ccggagagucccagccuuu

SEQ ID NO: 286454 - RNA, 19 nt, Artificial Sequence
  Description of Artificial Sequence: Synthetic oligonucleotide
aaugcauuuguauccaccc

SEQ ID NO: 286455 - RNA, 19 nt, Artificial Sequence
  Description of Artificial Sequence: Synthetic oligonucleotide
aaggcuauuacuaagugac

SEQ ID NO: 286456 - RNA, 19 nt, Artificial Sequence
  Description of Artificial Sequence: Synthetic oligonucleotide
aucaagaucauuaagucgc

SEQ ID NO: 286457 - RNA, 19 nt, Artificial Sequence
  Description of Artificial Sequence: Synthetic oligonucleotide
uccaauaguaaacaaacug

SEQ ID NO: 286458 - RNA, 19 nt, Artificial Sequence
  Description of Artificial Sequence: Synthetic oligonucleotide
ugcuauaacagaaacuuag

SEQ ID NO: 286459 - RNA, 19 nt, Artificial Sequence
  Description of Artificial Sequence: Synthetic oligonucleotide
auuaccaaggaccaugaac

SEQ ID NO: 286460 - RNA, 19 nt, Artificial Sequence
  Description of Artificial Sequence: Synthetic oligonucleotide
gauaccaacauacaccaag

SEQ ID NO: 286461 - RNA, 19 nt, Artificial Sequence
  Description of Artificial Sequence: Synthetic oligonucleotide
gaagaauuaguucuggaug

SEQ ID NO: 286462 - RNA, 19 nt, Artificial Sequence
  Description of Artificial Sequence: Synthetic oligonucleotide
aagaucauuaagucgccgg

SEQ ID NO: 286463 - RNA, 19 nt, Artificial Sequence
  Description of Artificial Sequence: Synthetic oligonucleotide
acaauucucaaacugcaac

SEQ ID NO: 286464 - RNA, 19 nt, Artificial Sequence
  Description of Artificial Sequence: Synthetic oligonucleotide
guaucuacaauucucaaac

SEQ ID NO: 286465 - RNA, 19 nt, Artificial Sequence
  Description of Artificial Sequence: Synthetic oligonucleotide
gaacagaccgcuuagauuc

SEQ ID NO: 286466 - RNA, 19 nt, Artificial Sequence
  Description of Artificial Sequence: Synthetic oligonucleotide
uguuguuauuauaauaaga

SEQ ID NO: 286467 - RNA, 19 nt, Artificial Sequence
  Description of Artificial Sequence: Synthetic oligonucleotide
uaucaagaucauuaagucg

SEQ ID NO: 286468 - RNA, 19 nt, Artificial Sequence
  Description of Artificial Sequence: Synthetic oligonucleotide
caugaaugaaauuaccaag

SEQ ID NO: 286469 - RNA, 19 nt, Artificial Sequence
  Description of Artificial Sequence: Synthetic oligonucleotide
aaugauguucucaauacug

SEQ ID NO: 286470 - RNA, 19 nt, Artificial Sequence
  Description of Artificial Sequence: Synthetic oligonucleotide
ucuauuagcuuauacauuu

SEQ ID NO: 286471 - RNA, 19 nt, Artificial Sequence
  Description of Artificial Sequence: Synthetic oligonucleotide
agugugguaacuccaauag

SEQ ID NO: 286472 - RNA, 19 nt, Artificial Sequence
  Description of Artificial Sequence: Synthetic oligonucleotide
uuugcaugguucaucauca

SEQ ID NO: 286473 - RNA, 19 nt, Artificial Sequence
  Description of Artificial Sequence: Synthetic oligonucleotide
guugcuaucacuaucaaga

SEQ ID NO: 286474 - RNA, 19 nt, Artificial Sequence
  Description of Artificial Sequence: Synthetic oligonucleotide
agcacaagugcuuucuccc

SEQ ID NO: 286475 - RNA, 19 nt, Artificial Sequence
  Description of Artificial Sequence: Synthetic oligonucleotide
uuuaccuugcucacuuugg

SEQ ID NO: 286476 - RNA, 19 nt, Artificial Sequence
  Description of Artificial Sequence: Synthetic oligonucleotide
agaucauuaagucgccggc

SEQ ID NO: 286477 - RNA, 19 nt, Artificial Sequence
  Description of Artificial Sequence: Synthetic oligonucleotide
aaccaucacuuucugaauc

SEQ ID NO: 286478 - RNA, 19 nt, Artificial Sequence
  Description of Artificial Sequence: Synthetic oligonucleotide
aaauccacuaagcuguagu

SEQ ID NO: 286479 - RNA, 19 nt, Artificial Sequence
  Description of Artificial Sequence: Synthetic oligonucleotide
ugugguaacuccaauagua

SEQ ID NO: 286480 - RNA, 19 nt, Artificial Sequence
  Description of Artificial Sequence: Synthetic oligonucleotide
uacuaagugacguauguac

SEQ ID NO: 286481 - RNA, 19 nt, Artificial Sequence
  Description of Artificial Sequence: Synthetic oligonucleotide
cucaauacgguguagccgc

SEQ ID NO: 286482 - RNA, 19 nt, Artificial Sequence
  Description of Artificial Sequence: Synthetic oligonucleotide
acuaaagucaucacuaaag

SEQ ID NO: 286483 - RNA, 19 nt, Artificial Sequence
  Description of Artificial Sequence: Synthetic oligonucleotide
gaaauuaccaaggaccaug

SEQ ID NO: 286484 - RNA, 19 nt, Artificial Sequence
  Description of Artificial Sequence: Synthetic oligonucleotide
aaaagcuaaagcacaagug

SEQ ID NO: 286485 - RNA, 19 nt, Artificial Sequence
  Description of Artificial Sequence: Synthetic oligonucleotide
aaggcaaauccacuaagcu

SEQ ID NO: 286486 - RNA, 19 nt, Artificial Sequence
  Description of Artificial Sequence: Synthetic oligonucleotide
agauaucuuuuccucggcc

SEQ ID NO: 286487 - RNA, 19 nt, Artificial Sequence
  Description of Artificial Sequence: Synthetic oligonucleotide
acuaucaagaucauuaagu

SEQ ID NO: 286488 - RNA, 19 nt, Artificial Sequence
  Description of Artificial Sequence: Synthetic oligonucleotide
agacauaaucaacaagguc

SEQ ID NO: 286489 - RNA, 19 nt, Artificial Sequence
  Description of Artificial Sequence: Synthetic oligonucleotide
ugggauuuguuuaaauucu

SEQ ID NO: 286490 - RNA, 19 nt, Artificial Sequence
  Description of Artificial Sequence: Synthetic oligonucleotide
aucuacaauucucaaacug

SEQ ID NO: 286491 - RNA, 19 nt, Artificial Sequence
  Description of Artificial Sequence: Synthetic oligonucleotide
uguacgauguuguaucuac

SEQ ID NO: 286492 - RNA, 19 nt, Artificial Sequence
  Description of Artificial Sequence: Synthetic oligonucleotide
uuacuaacuggcccgcugg

SEQ ID NO: 286493 - RNA, 19 nt, Artificial Sequence
  Description of Artificial Sequence: Synthetic oligonucleotide
uauaacuguucacuguuac

SEQ ID NO: 286494 - RNA, 19 nt, Artificial Sequence
  Description of Artificial Sequence: Synthetic oligonucleotide
cuaucaagaucauuaaguc

SEQ ID NO: 286495 - RNA, 19 nt, Artificial Sequence
  Description of Artificial Sequence: Synthetic oligonucleotide
uuguuguuauuauaauaag

SEQ ID NO: 286496 - RNA, 19 nt, Artificial Sequence
  Description of Artificial Sequence: Synthetic oligonucleotide
ucguucuucauccaaaaua

SEQ ID NO: 286497 - RNA, 19 nt, Artificial Sequence
  Description of Artificial Sequence: Synthetic oligonucleotide
acucugcuauaacagaaac

SEQ ID NO: 286498 - RNA, 19 nt, Artificial Sequence
  Description of Artificial Sequence: Synthetic oligonucleotide
acuguuacagacauaauca

SEQ ID NO: 286499 - RNA, 19 nt, Artificial Sequence
  Description of Artificial Sequence: Synthetic oligonucleotide
uaaagucgcuuucagaguc

SEQ ID NO: 286500 - RNA, 19 nt, Artificial Sequence
  Description of Artificial Sequence: Synthetic oligonucleotide
ugagauccgucacugaucu

SEQ ID NO: 286501 - RNA, 19 nt, Artificial Sequence
  Description of Artificial Sequence: Synthetic oligonucleotide
cuaagcuguaguccaaugg

SEQ ID NO: 286502 - RNA, 19 nt, Artificial Sequence
  Description of Artificial Sequence: Synthetic oligonucleotide
acaaacugauuucacgaag

SEQ ID NO: 286503 - RNA, 19 nt, Artificial Sequence
  Description of Artificial Sequence: Synthetic oligonucleotide
uuauuuaaagugugguaac

SEQ ID NO: 286504 - RNA, 19 nt, Artificial Sequence
  Description of Artificial Sequence: Synthetic oligonucleotide
uugaucuccuuucaagucu

SEQ ID NO: 286505 - RNA, 19 nt, Artificial Sequence
  Description of Artificial Sequence: Synthetic oligonucleotide
agaagaauuaguucuggau

SEQ ID NO: 286506 - RNA, 19 nt, Artificial Sequence
  Description of Artificial Sequence: Synthetic oligonucleotide
ucuugcggaggaaugaugu

SEQ ID NO: 286507 - RNA, 19 nt, Artificial Sequence
  Description of Artificial Sequence: Synthetic oligonucleotide
aaucgcacagaagaauuag

SEQ ID NO: 286508 - RNA, 19 nt, Artificial Sequence
  Description of Artificial Sequence: Synthetic oligonucleotide
aaacuggucacuucacaga

SEQ ID NO: 286509 - RNA, 19 nt, Artificial Sequence
  Description of Artificial Sequence: Synthetic oligonucleotide
guauguacgauguuguauc

SEQ ID NO: 286510 - RNA, 19 nt, Artificial Sequence
  Description of Artificial Sequence: Synthetic oligonucleotide
ucuuauaacuguucacugu

SEQ ID NO: 286511 - RNA, 19 nt, Artificial Sequence
  Description of Artificial Sequence: Synthetic oligonucleotide
cuaccguggaauaaauuag

SEQ ID NO: 286512 - RNA, 19 nt, Artificial Sequence
  Description of Artificial Sequence: Synthetic oligonucleotide
aauacgguguagccgcuug

SEQ ID NO: 286513 - RNA, 19 nt, Artificial Sequence
  Description of Artificial Sequence: Synthetic oligonucleotide
acugucacaagaaucgcac

SEQ ID NO: 286514 - RNA, 19 nt, Artificial Sequence
  Description of Artificial Sequence: Synthetic oligonucleotide
agauucuuuuguuagccca

SEQ ID NO: 286515 - RNA, 19 nt, Artificial Sequence
  Description of Artificial Sequence: Synthetic oligonucleotide
uuuacuaacuggcccgcug

SEQ ID NO: 286516 - RNA, 19 nt, Artificial Sequence
  Description of Artificial Sequence: Synthetic oligonucleotide
ucucaauacgguguagccg

SEQ ID NO: 286517 - RNA, 19 nt, Artificial Sequence
  Description of Artificial Sequence: Synthetic oligonucleotide
uuuucgaacagaccgcuua

SEQ ID NO: 286518 - RNA, 19 nt, Artificial Sequence
  Description of Artificial Sequence: Synthetic oligonucleotide
aauggaaagaagucuuaua

SEQ ID NO: 286519 - RNA, 19 nt, Artificial Sequence
  Description of Artificial Sequence: Synthetic oligonucleotide
acgucguauacucuucugg

SEQ ID NO: 286520 - RNA, 19 nt, Artificial Sequence
  Description of Artificial Sequence: Synthetic oligonucleotide
auaccaacauacaccaagc

SEQ ID NO: 286521 - RNA, 19 nt, Artificial Sequence
  Description of Artificial Sequence: Synthetic oligonucleotide
aguccaucgaacuuugccu

SEQ ID NO: 286522 - RNA, 19 nt, Artificial Sequence
  Description of Artificial Sequence: Synthetic oligonucleotide
aacaaacugauuucacgaa

SEQ ID NO: 286523 - RNA, 19 nt, Artificial Sequence
  Description of Artificial Sequence: Synthetic oligonucleotide
ucaucugucucaauacggu

SEQ ID NO: 286524 - RNA, 19 nt, Artificial Sequence
  Description of Artificial Sequence: Synthetic oligonucleotide
ucuugaucgccuucgccgg

SEQ ID NO: 286525 - RNA, 19 nt, Artificial Sequence
  Description of Artificial Sequence: Synthetic oligonucleotide
aguccaaugggcucccaac

SEQ ID NO: 286526 - RNA, 19 nt, Artificial Sequence
  Description of Artificial Sequence: Synthetic oligonucleotide
uccgagaaccaguccaucg

SEQ ID NO: 286527 - RNA, 19 nt, Artificial Sequence
  Description of Artificial Sequence: Synthetic oligonucleotide
aaaagucguucuguagugg

SEQ ID NO: 286528 - RNA, 19 nt, Artificial Sequence
  Description of Artificial Sequence: Synthetic oligonucleotide
uaugccaugaauguuuaaa

SEQ ID NO: 286529 - RNA, 19 nt, Artificial Sequence
  Description of Artificial Sequence: Synthetic oligonucleotide
gauguuguaucuacaauuc

SEQ ID NO: 286530 - RNA, 19 nt, Artificial Sequence
  Description of Artificial Sequence: Synthetic oligonucleotide
agggaugaucaucagagga

SEQ ID NO: 286531 - RNA, 19 nt, Artificial Sequence
  Description of Artificial Sequence: Synthetic oligonucleotide
gauaucuuuuccucggcca

SEQ ID NO: 286532 - RNA, 19 nt, Artificial Sequence
  Description of Artificial Sequence: Synthetic oligonucleotide
uaccguggaauaaauuagc

SEQ ID NO: 286533 - RNA, 19 nt, Artificial Sequence
  Description of Artificial Sequence: Synthetic oligonucleotide
acauauagcucucuucacu

SEQ ID NO: 286534 - RNA, 19 nt, Artificial Sequence
  Description of Artificial Sequence: Synthetic oligonucleotide
uuucgaacagaccgcuuag

SEQ ID NO: 286535 - RNA, 19 nt, Artificial Sequence
  Description of Artificial Sequence: Synthetic oligonucleotide
gaguauuuccaccugccac

SEQ ID NO: 286536 - RNA, 19 nt, Artificial Sequence
  Description of Artificial Sequence: Synthetic oligonucleotide
uaugguauccacugucaca

SEQ ID NO: 286537 - RNA, 19 nt, Artificial Sequence
  Description of Artificial Sequence: Synthetic oligonucleotide
acccuuuucacaaagucag

SEQ ID NO: 286538 - RNA, 19 nt, Artificial Sequence
  Description of Artificial Sequence: Synthetic oligonucleotide
ugacguauguacgauguug

SEQ ID NO: 286539 - RNA, 19 nt, Artificial Sequence
  Description of Artificial Sequence: Synthetic oligonucleotide
uuaugaugguacuuccaug

SEQ ID NO: 286540 - RNA, 19 nt, Artificial Sequence
  Description of Artificial Sequence: Synthetic oligonucleotide
accaacauacaccaagcgu

SEQ ID NO: 286541 - RNA, 19 nt, Artificial Sequence
  Description of Artificial Sequence: Synthetic oligonucleotide
ggagauaucuuuuccucgg

SEQ ID NO: 286542 - RNA, 19 nt, Artificial Sequence
  Description of Artificial Sequence: Synthetic oligonucleotide
accgcuuagauucuuuugu

SEQ ID NO: 286543 - RNA, 19 nt, Artificial Sequence
  Description of Artificial Sequence: Synthetic oligonucleotide
ucguauacucuucugggaa

SEQ ID NO: 286544 - RNA, 19 nt, Artificial Sequence
  Description of Artificial Sequence: Synthetic oligonucleotide
cccguuuucgaacagaccg

SEQ ID NO: 286545 - RNA, 19 nt, Artificial Sequence
  Description of Artificial Sequence: Synthetic oligonucleotide
agaaccaguccaucgaacu

SEQ ID NO: 286546 - RNA, 19 nt, Artificial Sequence
  Description of Artificial Sequence: Synthetic oligonucleotide
acuaagugacguauguacg

SEQ ID NO: 286547 - RNA, 19 nt, Artificial Sequence
  Description of Artificial Sequence: Synthetic oligonucleotide
ucucaauacugauaccaac

SEQ ID NO: 286548 - RNA, 19 nt, Artificial Sequence
  Description of Artificial Sequence: Synthetic oligonucleotide
aauggcuuugccagggcuc

SEQ ID NO: 286549 - RNA, 19 nt, Artificial Sequence
  Description of Artificial Sequence: Synthetic oligonucleotide
gaaaagcuaaagcacaagu

SEQ ID NO: 286550 - RNA, 19 nt, Artificial Sequence
  Description of Artificial Sequence: Synthetic oligonucleotide
ucugggaaccaucacuuuc

SEQ ID NO: 286551 - RNA, 19 nt, Artificial Sequence
  Description of Artificial Sequence: Synthetic oligonucleotide
ccuaaauucuguuuugggc

SEQ ID NO: 286552 - RNA, 19 nt, Artificial Sequence
  Description of Artificial Sequence: Synthetic oligonucleotide
gaucauuaagucgccggcg

SEQ ID NO: 286553 - RNA, 19 nt, Artificial Sequence
  Description of Artificial Sequence: Synthetic oligonucleotide
agcuuauacauuuccuugu

SEQ ID NO: 286554 - RNA, 19 nt, Artificial Sequence
  Description of Artificial Sequence: Synthetic oligonucleotide
ucacaagaaucgcacagaa

SEQ ID NO: 286555 - RNA, 19 nt, Artificial Sequence
  Description of Artificial Sequence: Synthetic oligonucleotide
cucgcaaaagcucaucuuc

SEQ ID NO: 286556 - RNA, 19 nt, Artificial Sequence
  Description of Artificial Sequence: Synthetic oligonucleotide
guaguuuaugcuggcaagg

SEQ ID NO: 286557 - RNA, 19 nt, Artificial Sequence
  Description of Artificial Sequence: Synthetic oligonucleotide
uacgauguuguaucuacaa

SEQ ID NO: 286558 - RNA, 19 nt, Artificial Sequence
  Description of Artificial Sequence: Synthetic oligonucleotide
aaggagggcagaaccauuc

SEQ ID NO: 286559 - RNA, 19 nt, Artificial Sequence
  Description of Artificial Sequence: Synthetic oligonucleotide
uucuuuaccacgucguaua

SEQ ID NO: 286560 - RNA, 19 nt, Artificial Sequence
  Description of Artificial Sequence: Synthetic oligonucleotide
uuuccuucgcucugcacgc

SEQ ID NO: 286561 - RNA, 19 nt, Artificial Sequence
  Description of Artificial Sequence: Synthetic oligonucleotide
gucuuauaacuguucacug

SEQ ID NO: 286562 - RNA, 19 nt, Artificial Sequence
  Description of Artificial Sequence: Synthetic oligonucleotide
gaaugcauuuguauccacc

SEQ ID NO: 286563 - RNA, 19 nt, Artificial Sequence
  Description of Artificial Sequence: Synthetic oligonucleotide
ugucagacccuucacuuuc

SEQ ID NO: 286564 - RNA, 19 nt, Artificial Sequence
  Description of Artificial Sequence: Synthetic oligonucleotide
aagugacguauguacgaug

SEQ ID NO: 286565 - RNA, 19 nt, Artificial Sequence
  Description of Artificial Sequence: Synthetic oligonucleotide
ucgcaaaagcucaucuuca

SEQ ID NO: 286566 - RNA, 19 nt, Artificial Sequence
  Description of Artificial Sequence: Synthetic oligonucleotide
gaugccuccucagucuucg

SEQ ID NO: 286567 - RNA, 19 nt, Artificial Sequence
  Description of Artificial Sequence: Synthetic oligonucleotide
aacuccaauaguaaacaaa

SEQ ID NO: 286568 - RNA, 19 nt, Artificial Sequence
  Description of Artificial Sequence: Synthetic oligonucleotide
caguccaucgaacuuugcc

SEQ ID NO: 286569 - RNA, 19 nt, Artificial Sequence
  Description of Artificial Sequence: Synthetic oligonucleotide
ugguggagauaucuuuucc

SEQ ID NO: 286570 - RNA, 19 nt, Artificial Sequence
  Description of Artificial Sequence: Synthetic oligonucleotide
uucucaauacugauaccaa

SEQ ID NO: 286571 - RNA, 19 nt, Artificial Sequence
  Description of Artificial Sequence: Synthetic oligonucleotide
ugucucaauacgguguagc

SEQ ID NO: 286572 - RNA, 19 nt, Artificial Sequence
  Description of Artificial Sequence: Synthetic oligonucleotide
ugcggaggaaugauguucu

SEQ ID NO: 286573 - RNA, 19 nt, Artificial Sequence
  Description of Artificial Sequence: Synthetic oligonucleotide
ugaugguacuuccaugguc

SEQ ID NO: 286574 - RNA, 19 nt, Artificial Sequence
  Description of Artificial Sequence: Synthetic oligonucleotide
caacaguacagacuugaac

SEQ ID NO: 286575 - RNA, 19 nt, Artificial Sequence
  Description of Artificial Sequence: Synthetic oligonucleotide
uaacagaaacuuagguuaa

SEQ ID NO: 286576 - RNA, 19 nt, Artificial Sequence
  Description of Artificial Sequence: Synthetic oligonucleotide
caauucucaaacugcaaca

SEQ ID NO: 286577 - RNA, 19 nt, Artificial Sequence
  Description of Artificial Sequence: Synthetic oligonucleotide
aucacuaaagucaucacua

SEQ ID NO: 286578 - RNA, 19 nt, Artificial Sequence
  Description of Artificial Sequence: Synthetic oligonucleotide
aaacuuagguuaaaguguu

SEQ ID NO: 286579 - RNA, 19 nt, Artificial Sequence
  Description of Artificial Sequence: Synthetic oligonucleotide
aaauuaccaaggaccauga

SEQ ID NO: 286580 - RNA, 19 nt, Artificial Sequence
  Description of Artificial Sequence: Synthetic oligonucleotide
aagaaucgcacagaagaau

SEQ ID NO: 286581 - RNA, 19 nt, Artificial Sequence
  Description of Artificial Sequence: Synthetic oligonucleotide
acucgccugauuucuuuac

SEQ ID NO: 286582 - RNA, 19 nt, Artificial Sequence
  Description of Artificial Sequence: Synthetic oligonucleotide
ucgcacagaagaauuaguu

SEQ ID NO: 286583 - RNA, 19 nt, Artificial Sequence
  Description of Artificial Sequence: Synthetic oligonucleotide
aucauuaagucgccggcgu

SEQ ID NO: 286584 - RNA, 19 nt, Artificial Sequence
  Description of Artificial Sequence: Synthetic oligonucleotide
ugguuugccuuccucuuca

SEQ ID NO: 286585 - RNA, 19 nt, Artificial Sequence
  Description of Artificial Sequence: Synthetic oligonucleotide
ggacauauagcucucuuca

SEQ ID NO: 286586 - RNA, 19 nt, Artificial Sequence
  Description of Artificial Sequence: Synthetic oligonucleotide
acauccagaucuugcaacu

SEQ ID NO: 286587 - RNA, 19 nt, Artificial Sequence
  Description of Artificial Sequence: Synthetic oligonucleotide
gucucaauacgguguagcc

SEQ ID NO: 286588 - RNA, 19 nt, Artificial Sequence
  Description of Artificial Sequence: Synthetic oligonucleotide
guauccacccuuuucacaa

SEQ ID NO: 286589 - RNA, 19 nt, Artificial Sequence
  Description of Artificial Sequence: Synthetic oligonucleotide
cacgaaggcuauuacuaag

SEQ ID NO: 286590 - RNA, 19 nt, Artificial Sequence
  Description of Artificial Sequence: Synthetic oligonucleotide
aacugcaacaguacagacu

SEQ ID NO: 286591 - RNA, 19 nt, Artificial Sequence
  Description of Artificial Sequence: Synthetic oligonucleotide
cacucucuauccgauaggg

SEQ ID NO: 286592 - RNA, 19 nt, Artificial Sequence
  Description of Artificial Sequence: Synthetic oligonucleotide
uccgcaaacgccugcuuug

SEQ ID NO: 286593 - RNA, 19 nt, Artificial Sequence
  Description of Artificial Sequence: Synthetic oligonucleotide
uggacauauagcucucuuc

SEQ ID NO: 286594 - RNA, 19 nt, Artificial Sequence
  Description of Artificial Sequence: Synthetic oligonucleotide
uauacaaaucuuuguuguu

SEQ ID NO: 286595 - RNA, 19 nt, Artificial Sequence
  Description of Artificial Sequence: Synthetic oligonucleotide
ucgaacagaccgcuuagau

SEQ ID NO: 286596 - RNA, 19 nt, Artificial Sequence
  Description of Artificial Sequence: Synthetic oligonucleotide
uauguacgauguuguaucu

SEQ ID NO: 286597 - RNA, 19 nt, Artificial Sequence
  Description of Artificial Sequence: Synthetic oligonucleotide
auuagcuuauacauuuccu

SEQ ID NO: 286598 - RNA, 19 nt, Artificial Sequence
  Description of Artificial Sequence: Synthetic oligonucleotide
aagucgccggcguuucuuc

SEQ ID NO: 286599 - RNA, 19 nt, Artificial Sequence
  Description of Artificial Sequence: Synthetic oligonucleotide
augguauccacugucacaa

SEQ ID NO: 286600 - RNA, 19 nt, Artificial Sequence
  Description of Artificial Sequence: Synthetic oligonucleotide
auacgguguagccgcuugc

SEQ ID NO: 286601 - RNA, 19 nt, Artificial Sequence
  Description of Artificial Sequence: Synthetic oligonucleotide
ccaauaguaaacaaacuga

SEQ ID NO: 286602 - RNA, 19 nt, Artificial Sequence
  Description of Artificial Sequence: Synthetic oligonucleotide
uacaauucucaaacugcaa

SEQ ID NO: 286603 - RNA, 19 nt, Artificial Sequence
  Description of Artificial Sequence: Synthetic oligonucleotide
ucgccugauuucuuuacca

SEQ ID NO: 286604 - RNA, 19 nt, Artificial Sequence
  Description of Artificial Sequence: Synthetic oligonucleotide
ugccaugaauguuuaaaua

SEQ ID NO: 286605 - RNA, 19 nt, Artificial Sequence
  Description of Artificial Sequence: Synthetic oligonucleotide
ugguaacuccaauaguaaa

SEQ ID NO: 286606 - RNA, 19 nt, Artificial Sequence
  Description of Artificial Sequence: Synthetic oligonucleotide
uguccauugguggaaggca

SEQ ID NO: 286607 - RNA, 19 nt, Artificial Sequence
  Description of Artificial Sequence: Synthetic oligonucleotide
uacagcaauuauuaaucuu

SEQ ID NO: 286608 - RNA, 19 nt, Artificial Sequence
  Description of Artificial Sequence: Synthetic oligonucleotide
cauuagaugguggaucuuc

SEQ ID NO: 286609 - RNA, 19 nt, Artificial Sequence
  Description of Artificial Sequence: Synthetic oligonucleotide
agugacguauguacgaugu

SEQ ID NO: 286610 - RNA, 19 nt, Artificial Sequence
  Description of Artificial Sequence: Synthetic oligonucleotide
ugugcuucggccccguuuu

SEQ ID NO: 286611 - RNA, 19 nt, Artificial Sequence
  Description of Artificial Sequence: Synthetic oligonucleotide
cacagaaagacuuugggau

SEQ ID NO: 286612 - RNA, 19 nt, Artificial Sequence
  Description of Artificial Sequence: Synthetic oligonucleotide
uuauaacuguucacuguua

SEQ ID NO: 286613 - RNA, 19 nt, Artificial Sequence
  Description of Artificial Sequence: Synthetic oligonucleotide
acaagaaacucugcuauaa

SEQ ID NO: 286614 - RNA, 19 nt, Artificial Sequence
  Description of Artificial Sequence: Synthetic oligonucleotide
uguaguuaauuugucuuuu

SEQ ID NO: 286615 - RNA, 19 nt, Artificial Sequence
  Description of Artificial Sequence: Synthetic oligonucleotide
gaugguacuuccauggucu

SEQ ID NO: 286616 - RNA, 19 nt, Artificial Sequence
  Description of Artificial Sequence: Synthetic oligonucleotide
gcuauaacagaaacuuagg

SEQ ID NO: 286617 - RNA, 19 nt, Artificial Sequence
  Description of Artificial Sequence: Synthetic oligonucleotide
uguucucaauacugauacc

SEQ ID NO: 286618 - RNA, 19 nt, Artificial Sequence
  Description of Artificial Sequence: Synthetic oligonucleotide
uggccuagaaggaugccuc

SEQ ID NO: 286619 - RNA, 19 nt, Artificial Sequence
  Description of Artificial Sequence: Synthetic oligonucleotide
caagaaacucugcuauaac

SEQ ID NO: 286620 - RNA, 19 nt, Artificial Sequence
  Description of Artificial Sequence: Synthetic oligonucleotide
gaccgcuuagauucuuuug

SEQ ID NO: 286621 - RNA, 19 nt, Artificial Sequence
  Description of Artificial Sequence: Synthetic oligonucleotide
ugcgcuugugaacucgccu

SEQ ID NO: 286622 - RNA, 19 nt, Artificial Sequence
  Description of Artificial Sequence: Synthetic oligonucleotide
aagucgcuuucagagucuc

SEQ ID NO: 286623 - RNA, 19 nt, Artificial Sequence
  Description of Artificial Sequence: Synthetic oligonucleotide
uuucuuuaccacgucguau

SEQ ID NO: 286624 - RNA, 19 nt, Artificial Sequence
  Description of Artificial Sequence: Synthetic oligonucleotide
uggaaugcauuuguaucca

SEQ ID NO: 286625 - RNA, 19 nt, Artificial Sequence
  Description of Artificial Sequence: Synthetic oligonucleotide
auuaagucgccggcguuuc

SEQ ID NO: 286626 - RNA, 19 nt, Artificial Sequence
  Description of Artificial Sequence: Synthetic oligonucleotide
cucucuauccgauagggcu

SEQ ID NO: 286627 - RNA, 19 nt, Artificial Sequence
  Description of Artificial Sequence: Synthetic oligonucleotide
caucugucucaauacggug

SEQ ID NO: 286628 - RNA, 19 nt, Artificial Sequence
  Description of Artificial Sequence: Synthetic oligonucleotide
ugugaacucgccugauuuc

SEQ ID NO: 286629 - RNA, 19 nt, Artificial Sequence
  Description of Artificial Sequence: Synthetic oligonucleotide
uagacuugcacuggcugug

SEQ ID NO: 286630 - RNA, 19 nt, Artificial Sequence
  Description of Artificial Sequence: Synthetic oligonucleotide
caacauacaccaagcguuc

SEQ ID NO: 286631 - RNA, 19 nt, Artificial Sequence
  Description of Artificial Sequence: Synthetic oligonucleotide
guguccgagaaccagucca

SEQ ID NO: 286632 - RNA, 19 nt, Artificial Sequence
  Description of Artificial Sequence: Synthetic oligonucleotide
uccaccugccacguguccg

SEQ ID NO: 286633 - RNA, 19 nt, Artificial Sequence
  Description of Artificial Sequence: Synthetic oligonucleotide
uuguauccacccuuuucac

SEQ ID NO: 286634 - RNA, 19 nt, Artificial Sequence
  Description of Artificial Sequence: Synthetic oligonucleotide
gcuaccguggaauaaauua

SEQ ID NO: 286635 - RNA, 19 nt, Artificial Sequence
  Description of Artificial Sequence: Synthetic oligonucleotide
acagaaagacuuugggauu

SEQ ID NO: 286636 - RNA, 19 nt, Artificial Sequence
  Description of Artificial Sequence: Synthetic oligonucleotide
uguuuugggcccucacaga

SEQ ID NO: 286637 - RNA, 19 nt, Artificial Sequence
  Description of Artificial Sequence: Synthetic oligonucleotide
gauuucacgaaggcuauua

SEQ ID NO: 286638 - RNA, 19 nt, Artificial Sequence
  Description of Artificial Sequence: Synthetic oligonucleotide
aauuaccaaggaccaugaa

SEQ ID NO: 286639 - RNA, 19 nt, Artificial Sequence
  Description of Artificial Sequence: Synthetic oligonucleotide
aagucguucuguaguggag

SEQ ID NO: 286640 - RNA, 19 nt, Artificial Sequence
  Description of Artificial Sequence: Synthetic oligonucleotide
gguugcuaucacuaucaag

SEQ ID NO: 286641 - RNA, 19 nt, Artificial Sequence
  Description of Artificial Sequence: Synthetic oligonucleotide
cuuuuacuaacuggcccgc

SEQ ID NO: 286642 - RNA, 19 nt, Artificial Sequence
  Description of Artificial Sequence: Synthetic oligonucleotide
cacuugucccauugggagc

SEQ ID NO: 286643 - RNA, 19 nt, Artificial Sequence
  Description of Artificial Sequence: Synthetic oligonucleotide
acgauguuguaucuacaau

SEQ ID NO: 286644 - RNA, 19 nt, Artificial Sequence
  Description of Artificial Sequence: Synthetic oligonucleotide
uugcggaggaaugauguuc

SEQ ID NO: 286645 - RNA, 19 nt, Artificial Sequence
  Description of Artificial Sequence: Synthetic oligonucleotide
agcaauuauuaaucuucaa

SEQ ID NO: 286646 - RNA, 19 nt, Artificial Sequence
  Description of Artificial Sequence: Synthetic oligonucleotide
accaagcguucuuuccuuc

SEQ ID NO: 286647 - RNA, 19 nt, Artificial Sequence
  Description of Artificial Sequence: Synthetic oligonucleotide
gggagcuagacuugcacug

SEQ ID NO: 286648 - RNA, 19 nt, Artificial Sequence
  Description of Artificial Sequence: Synthetic oligonucleotide
acucucuauccgauagggc

SEQ ID NO: 286649 - RNA, 19 nt, Artificial Sequence
  Description of Artificial Sequence: Synthetic oligonucleotide
cugagauccgucacugauc

SEQ ID NO: 286650 - RNA, 19 nt, Artificial Sequence
  Description of Artificial Sequence: Synthetic oligonucleotide
cuaaagcacaagugcuuuc

SEQ ID NO: 286651 - RNA, 19 nt, Artificial Sequence
  Description of Artificial Sequence: Synthetic oligonucleotide
uaagugacguauguacgau

SEQ ID NO: 286652 - RNA, 19 nt, Artificial Sequence
  Description of Artificial Sequence: Synthetic oligonucleotide
cagcaauuauuaaucuuca

SEQ ID NO: 286653 - RNA, 19 nt, Artificial Sequence
  Description of Artificial Sequence: Synthetic oligonucleotide
agucacucgcaaaagcuca

SEQ ID NO: 286654 - RNA, 19 nt, Artificial Sequence
  Description of Artificial Sequence: Synthetic oligonucleotide
cucgccugauuucuuuacc

SEQ ID NO: 286655 - RNA, 19 nt, Artificial Sequence
  Description of Artificial Sequence: Synthetic oligonucleotide
caucacuaaagucgcuuuc

SEQ ID NO: 286656 - RNA, 19 nt, Artificial Sequence
  Description of Artificial Sequence: Synthetic oligonucleotide
agaaucgcacagaagaauu

SEQ ID NO: 286657 - RNA, 19 nt, Artificial Sequence
  Description of Artificial Sequence: Synthetic oligonucleotide
gggaugaucaucagaggag

SEQ ID NO: 286658 - RNA, 19 nt, Artificial Sequence
  Description of Artificial Sequence: Synthetic oligonucleotide
ggugugagagcuaccgugg

SEQ ID NO: 286659 - RNA, 19 nt, Artificial Sequence
  Description of Artificial Sequence: Synthetic oligonucleotide
uguccgagaaccaguccau

SEQ ID NO: 286660 - RNA, 19 nt, Artificial Sequence
  Description of Artificial Sequence: Synthetic oligonucleotide
aacauacaccaagcguucu

SEQ ID NO: 286661 - RNA, 19 nt, Artificial Sequence
  Description of Artificial Sequence: Synthetic oligonucleotide
cacccuaaauucuguuuug

SEQ ID NO: 286662 - RNA, 19 nt, Artificial Sequence
  Description of Artificial Sequence: Synthetic oligonucleotide
augguacuuccauggucuc

SEQ ID NO: 286663 - RNA, 19 nt, Artificial Sequence
  Description of Artificial Sequence: Synthetic oligonucleotide
agagcuaccguggaauaaa

SEQ ID NO: 286664 - RNA, 19 nt, Artificial Sequence
  Description of Artificial Sequence: Synthetic oligonucleotide
guuaugggcaggcuguucu

SEQ ID NO: 286665 - RNA, 19 nt, Artificial Sequence
  Description of Artificial Sequence: Synthetic oligonucleotide
augaugguacuuccauggu

SEQ ID NO: 286666 - RNA, 19 nt, Artificial Sequence
  Description of Artificial Sequence: Synthetic oligonucleotide
auuggccuagaaggaugcc

SEQ ID NO: 286667 - RNA, 19 nt, Artificial Sequence
  Description of Artificial Sequence: Synthetic oligonucleotide
agucguucuguaguggagu

SEQ ID NO: 286668 - RNA, 19 nt, Artificial Sequence
  Description of Artificial Sequence: Synthetic oligonucleotide
aucgccuucgccggguuuc

SEQ ID NO: 286669 - RNA, 19 nt, Artificial Sequence
  Description of Artificial Sequence: Synthetic oligonucleotide
caucgaacuuugccuuugg

SEQ ID NO: 286670 - RNA, 19 nt, Artificial Sequence
  Description of Artificial Sequence: Synthetic oligonucleotide
ggaauuuguauccuucucu

SEQ ID NO: 286671 - RNA, 19 nt, Artificial Sequence
  Description of Artificial Sequence: Synthetic oligonucleotide
acgaaggcuauuacuaagu

SEQ ID NO: 286672 - RNA, 19 nt, Artificial Sequence
  Description of Artificial Sequence: Synthetic oligonucleotide
ugcucacuuuggaauuugu

SEQ ID NO: 286673 - RNA, 19 nt, Artificial Sequence
  Description of Artificial Sequence: Synthetic oligonucleotide
cauugggagcuagacuugc

SEQ ID NO: 286674 - RNA, 19 nt, Artificial Sequence
  Description of Artificial Sequence: Synthetic oligonucleotide
ugcuucggccccguuuucg

SEQ ID NO: 286675 - RNA, 19 nt, Artificial Sequence
  Description of Artificial Sequence: Synthetic oligonucleotide
ugcgggaugguuugccuuc

SEQ ID NO: 286676 - RNA, 19 nt, Artificial Sequence
  Description of Artificial Sequence: Synthetic oligonucleotide
gucguauacucuucuggga

SEQ ID NO: 286677 - RNA, 19 nt, Artificial Sequence
  Description of Artificial Sequence: Synthetic oligonucleotide
uuaaggcaacauccagauc

SEQ ID NO: 286678 - RNA, 19 nt, Artificial Sequence
  Description of Artificial Sequence: Synthetic oligonucleotide
aggcaggcaguaugguauc

SEQ ID NO: 286679 - RNA, 19 nt, Artificial Sequence
  Description of Artificial Sequence: Synthetic oligonucleotide
aucuagguugcuaucacua

SEQ ID NO: 286680 - RNA, 19 nt, Artificial Sequence
  Description of Artificial Sequence: Synthetic oligonucleotide
uuagaugguggaucuucuu

SEQ ID NO: 286681 - RNA, 19 nt, Artificial Sequence
  Description of Artificial Sequence: Synthetic oligonucleotide
cucauuagaugguggaucu

SEQ ID NO: 286682 - RNA, 19 nt, Artificial Sequence
  Description of Artificial Sequence: Synthetic oligonucleotide
ugggacuuuucaguuggcu

SEQ ID NO: 286683 - RNA, 19 nt, Artificial Sequence
  Description of Artificial Sequence: Synthetic oligonucleotide
guagccgcuugcgggaugg

SEQ ID NO: 286684 - RNA, 19 nt, Artificial Sequence
  Description of Artificial Sequence: Synthetic oligonucleotide
ugaaauuaccaaggaccau

SEQ ID NO: 286685 - RNA, 19 nt, Artificial Sequence
  Description of Artificial Sequence: Synthetic oligonucleotide
guuagcccaucaucuucag

SEQ ID NO: 286686 - RNA, 19 nt, Artificial Sequence
  Description of Artificial Sequence: Synthetic oligonucleotide
gguauccacugucacaaga

SEQ ID NO: 286687 - RNA, 19 nt, Artificial Sequence
  Description of Artificial Sequence: Synthetic oligonucleotide
cuuucuccgcaaacgccug

SEQ ID NO: 286688 - RNA, 19 nt, Artificial Sequence
  Description of Artificial Sequence: Synthetic oligonucleotide
cgucguauacucuucuggg

SEQ ID NO: 286689 - RNA, 19 nt, Artificial Sequence
  Description of Artificial Sequence: Synthetic oligonucleotide
ugagagcuaccguggaaua

SEQ ID NO: 286690 - RNA, 19 nt, Artificial Sequence
  Description of Artificial Sequence: Synthetic oligonucleotide
accguggaauaaauuagca

SEQ ID NO: 286691 - RNA, 19 nt, Artificial Sequence
  Description of Artificial Sequence: Synthetic oligonucleotide
ccucaucugucucaauacg

SEQ ID NO: 286692 - RNA, 19 nt, Artificial Sequence
  Description of Artificial Sequence: Synthetic oligonucleotide
gucugggacuuuucaguug

SEQ ID NO: 286693 - RNA, 19 nt, Artificial Sequence
  Description of Artificial Sequence: Synthetic oligonucleotide
ucauuaagucgccggcguu

SEQ ID NO: 286694 - RNA, 19 nt, Artificial Sequence
  Description of Artificial Sequence: Synthetic oligonucleotide
aggcuauuacuaagugacg

SEQ ID NO: 286695 - RNA, 19 nt, Artificial Sequence
  Description of Artificial Sequence: Synthetic oligonucleotide
gacguauguacgauguugu

SEQ ID NO: 286696 - RNA, 19 nt, Artificial Sequence
  Description of Artificial Sequence: Synthetic oligonucleotide
ucaauacgguguagccgcu

SEQ ID NO: 286697 - RNA, 19 nt, Artificial Sequence
  Description of Artificial Sequence: Synthetic oligonucleotide
cacugucacaagaaucgca

SEQ ID NO: 286698 - RNA, 19 nt, Artificial Sequence
  Description of Artificial Sequence: Synthetic oligonucleotide
cacugaucuugaauucauc

SEQ ID NO: 286699 - RNA, 19 nt, Artificial Sequence
  Description of Artificial Sequence: Synthetic oligonucleotide
uucgaacagaccgcuuaga

SEQ ID NO: 286700 - RNA, 19 nt, Artificial Sequence
  Description of Artificial Sequence: Synthetic oligonucleotide
acggugaccugugauggug

SEQ ID NO: 286701 - RNA, 19 nt, Artificial Sequence
  Description of Artificial Sequence: Synthetic oligonucleotide
uucgccggguuucuacaaa

SEQ ID NO: 286702 - RNA, 19 nt, Artificial Sequence
  Description of Artificial Sequence: Synthetic oligonucleotide
cuugaucgccuucgccggg

SEQ ID NO: 286703 - RNA, 19 nt, Artificial Sequence
  Description of Artificial Sequence: Synthetic oligonucleotide
ugauaccaacauacaccaa

SEQ ID NO: 286704 - RNA, 19 nt, Artificial Sequence
  Description of Artificial Sequence: Synthetic oligonucleotide
cacgucguauacucuucug

SEQ ID NO: 286705 - RNA, 19 nt, Artificial Sequence
  Description of Artificial Sequence: Synthetic oligonucleotide
gagucugcgcuugugaacu

SEQ ID NO: 286706 - RNA, 19 nt, Artificial Sequence
  Description of Artificial Sequence: Synthetic oligonucleotide
gucacaagaaucgcacaga

SEQ ID NO: 286707 - RNA, 19 nt, Artificial Sequence
  Description of Artificial Sequence: Synthetic oligonucleotide
ucgccggguuucuacaaaa

SEQ ID NO: 286708 - RNA, 19 nt, Artificial Sequence
  Description of Artificial Sequence: Synthetic oligonucleotide
uuuuacuaacuggcccgcu

SEQ ID NO: 286709 - RNA, 19 nt, Artificial Sequence
  Description of Artificial Sequence: Synthetic oligonucleotide
uuggagucuuucuccgcaa

SEQ ID NO: 286710 - RNA, 19 nt, Artificial Sequence
  Description of Artificial Sequence: Synthetic oligonucleotide
agaccgcuuagauucuuuu

SEQ ID NO: 286711 - RNA, 19 nt, Artificial Sequence
  Description of Artificial Sequence: Synthetic oligonucleotide
ccguggaauaaauuagcac

SEQ ID NO: 286712 - RNA, 19 nt, Artificial Sequence
  Description of Artificial Sequence: Synthetic oligonucleotide
acguguccgagaaccaguc

SEQ ID NO: 286713 - RNA, 19 nt, Artificial Sequence
  Description of Artificial Sequence: Synthetic oligonucleotide
gucugcgcuugugaacucg

SEQ ID NO: 286714 - RNA, 19 nt, Artificial Sequence
  Description of Artificial Sequence: Synthetic oligonucleotide
accacgucguauacucuuc

SEQ ID NO: 286715 - RNA, 19 nt, Artificial Sequence
  Description of Artificial Sequence: Synthetic oligonucleotide
ugguauccacugucacaag

SEQ ID NO: 286716 - RNA, 19 nt, Artificial Sequence
  Description of Artificial Sequence: Synthetic oligonucleotide
gauuuggaaugcauuugua

SEQ ID NO: 286717 - RNA, 19 nt, Artificial Sequence
  Description of Artificial Sequence: Synthetic oligonucleotide
ugaacucgccugauuucuu

SEQ ID NO: 286718 - RNA, 19 nt, Artificial Sequence
  Description of Artificial Sequence: Synthetic oligonucleotide
aucgcacagaagaauuagu

SEQ ID NO: 286719 - RNA, 19 nt, Artificial Sequence
  Description of Artificial Sequence: Synthetic oligonucleotide
uucuccgcaaacgccugcu

SEQ ID NO: 286720 - RNA, 19 nt, Artificial Sequence
  Description of Artificial Sequence: Synthetic oligonucleotide
gaaucgcacagaagaauua

SEQ ID NO: 286721 - RNA, 19 nt, Artificial Sequence
  Description of Artificial Sequence: Synthetic oligonucleotide
cugguuaugggcaggcugu

SEQ ID NO: 286722 - RNA, 19 nt, Artificial Sequence
  Description of Artificial Sequence: Synthetic oligonucleotide
gugguaacuccaauaguaa

SEQ ID NO: 286723 - RNA, 19 nt, Artificial Sequence
  Description of Artificial Sequence: Synthetic oligonucleotide
augguuuggaaggccacau

SEQ ID NO: 286724 - RNA, 19 nt, Artificial Sequence
  Description of Artificial Sequence: Synthetic oligonucleotide
uguagccgcuugcgggaug

SEQ ID NO: 286725 - RNA, 19 nt, Artificial Sequence
  Description of Artificial Sequence: Synthetic oligonucleotide
cuaaagucgcuuucagagu

SEQ ID NO: 286726 - RNA, 19 nt, Artificial Sequence
  Description of Artificial Sequence: Synthetic oligonucleotide
ucccacggugaccugugau

SEQ ID NO: 286727 - RNA, 19 nt, Artificial Sequence
  Description of Artificial Sequence: Synthetic oligonucleotide
agucugcgcuugugaacuc

SEQ ID NO: 286728 - RNA, 19 nt, Artificial Sequence
  Description of Artificial Sequence: Synthetic oligonucleotide
uauccacccuuuucacaaa

SEQ ID NO: 286729 - RNA, 19 nt, Artificial Sequence
  Description of Artificial Sequence: Synthetic oligonucleotide
uggagagucugcgcuugug

SEQ ID NO: 286730 - RNA, 19 nt, Artificial Sequence
  Description of Artificial Sequence: Synthetic oligonucleotide
ugguacuuccauggucucu

SEQ ID NO: 286731 - RNA, 19 nt, Artificial Sequence
  Description of Artificial Sequence: Synthetic oligonucleotide
ucgccggcguuucuuccug

SEQ ID NO: 286732 - RNA, 19 nt, Artificial Sequence
  Description of Artificial Sequence: Synthetic oligonucleotide
agcuaaagcacaagugcuu

SEQ ID NO: 286733 - RNA, 19 nt, Artificial Sequence
  Description of Artificial Sequence: Synthetic oligonucleotide
cuaacuggcccgcuggugu

SEQ ID NO: 286734 - RNA, 19 nt, Artificial Sequence
  Description of Artificial Sequence: Synthetic oligonucleotide
gauccgucacugaucuuga

SEQ ID NO: 286735 - RNA, 19 nt, Artificial Sequence
  Description of Artificial Sequence: Synthetic oligonucleotide
aacagaccgcuuagauucu

SEQ ID NO: 286736 - RNA, 19 nt, Artificial Sequence
  Description of Artificial Sequence: Synthetic oligonucleotide
cugguuccuucuugaucgc

SEQ ID NO: 286737 - RNA, 19 nt, Artificial Sequence
  Description of Artificial Sequence: Synthetic oligonucleotide
cugcgcuugugaacucgcc

SEQ ID NO: 286738 - RNA, 19 nt, Artificial Sequence
  Description of Artificial Sequence: Synthetic oligonucleotide
ccguuuucgaacagaccgc

SEQ ID NO: 286739 - RNA, 19 nt, Artificial Sequence
  Description of Artificial Sequence: Synthetic oligonucleotide
gcuauuacuaagugacgua

SEQ ID NO: 286740 - RNA, 19 nt, Artificial Sequence
  Description of Artificial Sequence: Synthetic oligonucleotide
acguauguacgauguugua

SEQ ID NO: 286741 - RNA, 19 nt, Artificial Sequence
  Description of Artificial Sequence: Synthetic oligonucleotide
ggaguauuuccaccugcca

SEQ ID NO: 286742 - RNA, 19 nt, Artificial Sequence
  Description of Artificial Sequence: Synthetic oligonucleotide
ccucauuagaugguggauc

SEQ ID NO: 286743 - RNA, 19 nt, Artificial Sequence
  Description of Artificial Sequence: Synthetic oligonucleotide
uaagucgccggcguuucuu

SEQ ID NO: 286744 - RNA, 19 nt, Artificial Sequence
  Description of Artificial Sequence: Synthetic oligonucleotide
ccaacauacaccaagcguu

SEQ ID NO: 286745 - RNA, 19 nt, Artificial Sequence
  Description of Artificial Sequence: Synthetic oligonucleotide
gguguagccgcuugcggga

SEQ ID NO: 286746 - RNA, 19 nt, Artificial Sequence
  Description of Artificial Sequence: Synthetic oligonucleotide
cucuauccgauagggcuuc

SEQ ID NO: 286747 - RNA, 19 nt, Artificial Sequence
  Description of Artificial Sequence: Synthetic oligonucleotide
ccacggugaccugugaugg

SEQ ID NO: 286748 - RNA, 19 nt, Artificial Sequence
  Description of Artificial Sequence: Synthetic oligonucleotide
ucacucgcaaaagcucauc

SEQ ID NO: 286749 - RNA, 19 nt, Artificial Sequence
  Description of Artificial Sequence: Synthetic oligonucleotide
cugggacuuuucaguuggc

SEQ ID NO: 286750 - RNA, 19 nt, Artificial Sequence
  Description of Artificial Sequence: Synthetic oligonucleotide
gguuuggaaggccacauuu

SEQ ID NO: 286751 - RNA, 19 nt, Artificial Sequence
  Description of Artificial Sequence: Synthetic oligonucleotide
uccucagucuucggcugca

SEQ ID NO: 286752 - RNA, 19 nt, Artificial Sequence
  Description of Artificial Sequence: Synthetic oligonucleotide
ggcuauuacuaagugacgu

SEQ ID NO: 286753 - RNA, 19 nt, Artificial Sequence
  Description of Artificial Sequence: Synthetic oligonucleotide
gagagcuaccguggaauaa

SEQ ID NO: 286754 - RNA, 19 nt, Artificial Sequence
  Description of Artificial Sequence: Synthetic oligonucleotide
gugaccugugaugguggag

SEQ ID NO: 286755 - RNA, 19 nt, Artificial Sequence
  Description of Artificial Sequence: Synthetic oligonucleotide
aacuuagguuaaaguguuu

SEQ ID NO: 286756 - RNA, 19 nt, Artificial Sequence
  Description of Artificial Sequence: Synthetic oligonucleotide
cccacggugaccugugaug

SEQ ID NO: 286757 - RNA, 19 nt, Artificial Sequence
  Description of Artificial Sequence: Synthetic oligonucleotide
ucccacccuaaauucuguu

SEQ ID NO: 286758 - RNA, 19 nt, Artificial Sequence
  Description of Artificial Sequence: Synthetic oligonucleotide
ggcguuucuuccugcgcgc

SEQ ID NO: 286759 - RNA, 19 nt, Artificial Sequence
  Description of Artificial Sequence: Synthetic oligonucleotide
auagggcuucuugcugcuc

SEQ ID NO: 286760 - RNA, 19 nt, Artificial Sequence
  Description of Artificial Sequence: Synthetic oligonucleotide
gaaccaguccaucgaacuu

SEQ ID NO: 286761 - RNA, 19 nt, Artificial Sequence
  Description of Artificial Sequence: Synthetic oligonucleotide
gugugagagcuaccgugga

SEQ ID NO: 286762 - RNA, 19 nt, Artificial Sequence
  Description of Artificial Sequence: Synthetic oligonucleotide
ucauuagaugguggaucuu

SEQ ID NO: 286763 - RNA, 19 nt, Artificial Sequence
  Description of Artificial Sequence: Synthetic oligonucleotide
cugucucaauacgguguag

SEQ ID NO: 286764 - RNA, 19 nt, Artificial Sequence
  Description of Artificial Sequence: Synthetic oligonucleotide
uucagaguucuuggacaua

SEQ ID NO: 286765 - RNA, 19 nt, Artificial Sequence
  Description of Artificial Sequence: Synthetic oligonucleotide
gugagagcuaccguggaau

SEQ ID NO: 286766 - RNA, 19 nt, Artificial Sequence
  Description of Artificial Sequence: Synthetic oligonucleotide
cacucgcaaaagcucaucu

SEQ ID NO: 286767 - RNA, 19 nt, Artificial Sequence
  Description of Artificial Sequence: Synthetic oligonucleotide
auguacgauguuguaucua

SEQ ID NO: 286768 - RNA, 19 nt, Artificial Sequence
  Description of Artificial Sequence: Synthetic oligonucleotide
gugugguaacuccaauagu

SEQ ID NO: 286769 - RNA, 19 nt, Artificial Sequence
  Description of Artificial Sequence: Synthetic oligonucleotide
cgaaggcuauuacuaagug

SEQ ID NO: 286770 - RNA, 19 nt, Artificial Sequence
  Description of Artificial Sequence: Synthetic oligonucleotide
ucuccgcaaacgccugcuu

SEQ ID NO: 286771 - RNA, 19 nt, Artificial Sequence
  Description of Artificial Sequence: Synthetic oligonucleotide
caucuagguugcuaucacu

SEQ ID NO: 286772 - RNA, 19 nt, Artificial Sequence
  Description of Artificial Sequence: Synthetic oligonucleotide
cuacuauucuccucagauu

SEQ ID NO: 286773 - RNA, 19 nt, Artificial Sequence
  Description of Artificial Sequence: Synthetic oligonucleotide
aggcaacauccagaucuug

SEQ ID NO: 286774 - RNA, 19 nt, Artificial Sequence
  Description of Artificial Sequence: Synthetic oligonucleotide
guccaucgaacuuugccuu

SEQ ID NO: 286775 - RNA, 19 nt, Artificial Sequence
  Description of Artificial Sequence: Synthetic oligonucleotide
ugauuucacgaaggcuauu

SEQ ID NO: 286776 - RNA, 19 nt, Artificial Sequence
  Description of Artificial Sequence: Synthetic oligonucleotide
ccauugggagcuagacuug

SEQ ID NO: 286777 - RNA, 19 nt, Artificial Sequence
  Description of Artificial Sequence: Synthetic oligonucleotide
caauggcuuugccagggcu

SEQ ID NO: 286778 - RNA, 19 nt, Artificial Sequence
  Description of Artificial Sequence: Synthetic oligonucleotide
ccgauagggcuucuugcug

SEQ ID NO: 286779 - RNA, 19 nt, Artificial Sequence
  Description of Artificial Sequence: Synthetic oligonucleotide
cacguguccgagaaccagu

SEQ ID NO: 286780 - RNA, 19 nt, Artificial Sequence
  Description of Artificial Sequence: Synthetic oligonucleotide
ucuauccgauagggcuucu

SEQ ID NO: 286781 - RNA, 19 nt, Artificial Sequence
  Description of Artificial Sequence: Synthetic oligonucleotide
cuaugccaugaauguuuaa

SEQ ID NO: 286782 - RNA, 19 nt, Artificial Sequence
  Description of Artificial Sequence: Synthetic oligonucleotide
cuucgccggguuucuacaa

SEQ ID NO: 286783 - RNA, 19 nt, Artificial Sequence
  Description of Artificial Sequence: Synthetic oligonucleotide
gccuucgccggguuucuac

SEQ ID NO: 286784 - RNA, 19 nt, Artificial Sequence
  Description of Artificial Sequence: Synthetic oligonucleotide
auccgucacugaucuugaa

SEQ ID NO: 286785 - RNA, 19 nt, Artificial Sequence
  Description of Artificial Sequence: Synthetic oligonucleotide
cagaaagacuuugggauuu

SEQ ID NO: 286786 - RNA, 19 nt, Artificial Sequence
  Description of Artificial Sequence: Synthetic oligonucleotide
agcuaccguggaauaaauu

SEQ ID NO: 286787 - RNA, 19 nt, Artificial Sequence
  Description of Artificial Sequence: Synthetic oligonucleotide
ugguuaugggcaggcuguu

SEQ ID NO: 286788 - RNA, 19 nt, Artificial Sequence
  Description of Artificial Sequence: Synthetic oligonucleotide
cgccugauuucuuuaccac

SEQ ID NO: 286789 - RNA, 19 nt, Artificial Sequence
  Description of Artificial Sequence: Synthetic oligonucleotide
ccgagaaccaguccaucga

SEQ ID NO: 286790 - RNA, 19 nt, Artificial Sequence
  Description of Artificial Sequence: Synthetic oligonucleotide
ggcucuugcggaggaauga

SEQ ID NO: 286791 - RNA, 19 nt, Artificial Sequence
  Description of Artificial Sequence: Synthetic oligonucleotide
ccccguuuucgaacagacc

SEQ ID NO: 286792 - RNA, 19 nt, Artificial Sequence
  Description of Artificial Sequence: Synthetic oligonucleotide
cgauguuguaucuacaauu

SEQ ID NO: 286793 - RNA, 19 nt, Artificial Sequence
  Description of Artificial Sequence: Synthetic oligonucleotide
cauacaccaagcguucuuu

SEQ ID NO: 286794 - RNA, 19 nt, Artificial Sequence
  Description of Artificial Sequence: Synthetic oligonucleotide
agucgcuuucagagucucu

SEQ ID NO: 286795 - RNA, 19 nt, Artificial Sequence
  Description of Artificial Sequence: Synthetic oligonucleotide
ccaucgaacuuugccuuug

SEQ ID NO: 286796 - RNA, 19 nt, Artificial Sequence
  Description of Artificial Sequence: Synthetic oligonucleotide
gcuucggccccguuuucga

SEQ ID NO: 286797 - RNA, 19 nt, Artificial Sequence
  Description of Artificial Sequence: Synthetic oligonucleotide
uuccuucgcucugcacgcu

SEQ ID NO: 286798 - RNA, 19 nt, Artificial Sequence
  Description of Artificial Sequence: Synthetic oligonucleotide
cauuaagucgccggcguuu

SEQ ID NO: 286799 - RNA, 19 nt, Artificial Sequence
  Description of Artificial Sequence: Synthetic oligonucleotide
acagaccgcuuagauucuu

SEQ ID NO: 286800 - RNA, 19 nt, Artificial Sequence
  Description of Artificial Sequence: Synthetic oligonucleotide
cuaucacuaucaagaucau

SEQ ID NO: 286801 - RNA, 19 nt, Artificial Sequence
  Description of Artificial Sequence: Synthetic oligonucleotide
ccgucacugaucuugaauu

SEQ ID NO: 286802 - RNA, 19 nt, Artificial Sequence
  Description of Artificial Sequence: Synthetic oligonucleotide
cuucggccccguuuucgaa

SEQ ID NO: 286803 - RNA, 19 nt, Artificial Sequence
  Description of Artificial Sequence: Synthetic oligonucleotide
ucgccuucgccggguuucu

SEQ ID NO: 286804 - RNA, 19 nt, Artificial Sequence
  Description of Artificial Sequence: Synthetic oligonucleotide
ccgcuugcgggaugguuug

SEQ ID NO: 286805 - RNA, 19 nt, Artificial Sequence
  Description of Artificial Sequence: Synthetic oligonucleotide
gguuaugggcaggcuguuc

SEQ ID NO: 286806 - RNA, 19 nt, Artificial Sequence
  Description of Artificial Sequence: Synthetic oligonucleotide
gcucacuuuggaauuugua

SEQ ID NO: 286807 - RNA, 19 nt, Artificial Sequence
  Description of Artificial Sequence: Synthetic oligonucleotide
cuugcggaggaaugauguu

SEQ ID NO: 286808 - RNA, 19 nt, Artificial Sequence
  Description of Artificial Sequence: Synthetic oligonucleotide
ccggcguuucuuccugcgc

SEQ ID NO: 286809 - RNA, 19 nt, Artificial Sequence
  Description of Artificial Sequence: Synthetic oligonucleotide
gagcuaccguggaauaaau

SEQ ID NO: 286810 - RNA, 19 nt, Artificial Sequence
  Description of Artificial Sequence: Synthetic oligonucleotide
cugucagacccuucacuuu

SEQ ID NO: 286811 - RNA, 19 nt, Artificial Sequence
  Description of Artificial Sequence: Synthetic oligonucleotide
cucccacccuaaauucugu

SEQ ID NO: 286812 - RNA, 19 nt, Artificial Sequence
  Description of Artificial Sequence: Synthetic oligonucleotide
ccuucgccggguuucuaca

SEQ ID NO: 286813 - RNA, 19 nt, Artificial Sequence
  Description of Artificial Sequence: Synthetic oligonucleotide
ccacccuaaauucuguuuu

SEQ ID NO: 286814 - RNA, 19 nt, Artificial Sequence
  Description of Artificial Sequence: Synthetic oligonucleotide
acgccugcuuugucucauu

SEQ ID NO: 286815 - RNA, 19 nt, Artificial Sequence
  Description of Artificial Sequence: Synthetic oligonucleotide
cguguccgagaaccagucc

SEQ ID NO: 286816 - RNA, 19 nt, Artificial Sequence
  Description of Artificial Sequence: Synthetic oligonucleotide
caccugccacguguccgag

SEQ ID NO: 286817 - RNA, 19 nt, Artificial Sequence
  Description of Artificial Sequence: Synthetic oligonucleotide
gugacguauguacgauguu

SEQ ID NO: 286818 - RNA, 19 nt, Artificial Sequence
  Description of Artificial Sequence: Synthetic oligonucleotide
cccaccuccuguccaccac

SEQ ID NO: 286819 - RNA, 19 nt, Artificial Sequence
  Description of Artificial Sequence: Synthetic oligonucleotide
gugcuucggccccguuuuc

SEQ ID NO: 286820 - RNA, 19 nt, Artificial Sequence
  Description of Artificial Sequence: Synthetic oligonucleotide
gcgggaugguuugccuucc

SEQ ID NO: 286821 - RNA, 19 nt, Artificial Sequence
  Description of Artificial Sequence: Synthetic oligonucleotide
gucacucgcaaaagcucau

SEQ ID NO: 286822 - RNA, 19 nt, Artificial Sequence
  Description of Artificial Sequence: Synthetic oligonucleotide
cagaccgcuuagauucuuu

SEQ ID NO: 286823 - RNA, 19 nt, Artificial Sequence
  Description of Artificial Sequence: Synthetic oligonucleotide
ggccccguuuucgaacaga

SEQ ID NO: 286824 - RNA, 19 nt, Artificial Sequence
  Description of Artificial Sequence: Synthetic oligonucleotide
cacggugaccugugauggu

SEQ ID NO: 286825 - RNA, 19 nt, Artificial Sequence
  Description of Artificial Sequence: Synthetic oligonucleotide
gaucgccuucgccggguuu

SEQ ID NO: 286826 - RNA, 19 nt, Artificial Sequence
  Description of Artificial Sequence: Synthetic oligonucleotide
cguauguacgauguuguau

SEQ ID NO: 286827 - RNA, 19 nt, Artificial Sequence
  Description of Artificial Sequence: Synthetic oligonucleotide
ccacuaagcuguaguccaa

SEQ ID NO: 286828 - RNA, 19 nt, Artificial Sequence
  Description of Artificial Sequence: Synthetic oligonucleotide
guuuucgaacagaccgcuu

SEQ ID NO: 286829 - RNA, 19 nt, Artificial Sequence
  Description of Artificial Sequence: Synthetic oligonucleotide
cuggagagucugcgcuugu

SEQ ID NO: 286830 - RNA, 19 nt, Artificial Sequence
  Description of Artificial Sequence: Synthetic oligonucleotide
cccacccuaaauucuguuu

SEQ ID NO: 286831 - RNA, 19 nt, Artificial Sequence
  Description of Artificial Sequence: Synthetic oligonucleotide
gagauccgucacugaucuu

SEQ ID NO: 286832 - RNA, 19 nt, Artificial Sequence
  Description of Artificial Sequence: Synthetic oligonucleotide
gcucuugcggaggaaugau

SEQ ID NO: 286833 - RNA, 19 nt, Artificial Sequence
  Description of Artificial Sequence: Synthetic oligonucleotide
cguuuucgaacagaccgcu

SEQ ID NO: 286834 - RNA, 19 nt, Artificial Sequence
  Description of Artificial Sequence: Synthetic oligonucleotide
ccacgucguauacucuucu

SEQ ID NO: 286835 - RNA, 19 nt, Artificial Sequence
  Description of Artificial Sequence: Synthetic oligonucleotide
cgcaaacgccugcuuuguc

SEQ ID NO: 286836 - RNA, 19 nt, Artificial Sequence
  Description of Artificial Sequence: Synthetic oligonucleotide
ccgcuuagauucuuuuguu

SEQ ID NO: 286837 - RNA, 19 nt, Artificial Sequence
  Description of Artificial Sequence: Synthetic oligonucleotide
cuucgcucugcacgcucuu

SEQ ID NO: 286838 - RNA, 19 nt, Artificial Sequence
  Description of Artificial Sequence: Synthetic oligonucleotide
caauacgguguagccgcuu

SEQ ID NO: 286839 - RNA, 19 nt, Artificial Sequence
  Description of Artificial Sequence: Synthetic oligonucleotide
guguagccgcuugcgggau

SEQ ID NO: 286840 - RNA, 19 nt, Artificial Sequence
  Description of Artificial Sequence: Synthetic oligonucleotide
gcuugugaacucgccugau

SEQ ID NO: 286841 - RNA, 19 nt, Artificial Sequence
  Description of Artificial Sequence: Synthetic oligonucleotide
cgccggcguuucuuccugc

SEQ ID NO: 286842 - RNA, 19 nt, Artificial Sequence
  Description of Artificial Sequence: Synthetic oligonucleotide
cgcuugcgggaugguuugc

SEQ ID NO: 286843 - RNA, 19 nt, Artificial Sequence
  Description of Artificial Sequence: Synthetic oligonucleotide
cgccggguuucuacaaaau

SEQ ID NO: 286844 - RNA, 19 nt, Artificial Sequence
  Description of Artificial Sequence: Synthetic oligonucleotide
cgccuucgccggguuucua

SEQ ID NO: 286845 - RNA, 19 nt, Artificial Sequence
  Description of Artificial Sequence: Synthetic oligonucleotide
aaaugaucgagccagcugg

SEQ ID NO: 286846 - RNA, 19 nt, Artificial Sequence
  Description of Artificial Sequence: Synthetic oligonucleotide
aacgugaaaugaucgagcc

SEQ ID NO: 286847 - RNA, 19 nt, Artificial Sequence
  Description of Artificial Sequence: Synthetic oligonucleotide
uuucacauaugacagguag

SEQ ID NO: 286848 - RNA, 19 nt, Artificial Sequence
  Description of Artificial Sequence: Synthetic oligonucleotide
uuucgaagcacugagaugc

SEQ ID NO: 286849 - RNA, 19 nt, Artificial Sequence
  Description of Artificial Sequence: Synthetic oligonucleotide
aucuuuguaagaccaaggc

SEQ ID NO: 286850 - RNA, 19 nt, Artificial Sequence
  Description of Artificial Sequence: Synthetic oligonucleotide
accaaaacugcuccuaugc

SEQ ID NO: 286851 - RNA, 19 nt, Artificial Sequence
  Description of Artificial Sequence: Synthetic oligonucleotide
auagaugugugcuaaguuc

SEQ ID NO: 286852 - RNA, 19 nt, Artificial Sequence
  Description of Artificial Sequence: Synthetic oligonucleotide
gagccgagaauuuucaucg

SEQ ID NO: 286853 - RNA, 19 nt, Artificial Sequence
  Description of Artificial Sequence: Synthetic oligonucleotide
uuuggauacagggaggucg

SEQ ID NO: 286854 - RNA, 19 nt, Artificial Sequence
  Description of Artificial Sequence: Synthetic oligonucleotide
uguguuguggaacgcaugg

SEQ ID NO: 286855 - RNA, 19 nt, Artificial Sequence
  Description of Artificial Sequence: Synthetic oligonucleotide
uuaaacaucagaacuguau

SEQ ID NO: 286856 - RNA, 19 nt, Artificial Sequence
  Description of Artificial Sequence: Synthetic oligonucleotide
aacuuuacuauaauccuuc

SEQ ID NO: 286857 - RNA, 19 nt, Artificial Sequence
  Description of Artificial Sequence: Synthetic oligonucleotide
aaaccuagucacuaucauc

SEQ ID NO: 286858 - RNA, 19 nt, Artificial Sequence
  Description of Artificial Sequence: Synthetic oligonucleotide
uguacauuuggcccaaacc

SEQ ID NO: 286859 - RNA, 19 nt, Artificial Sequence
  Description of Artificial Sequence: Synthetic oligonucleotide
aguaagucggagcacugcc

SEQ ID NO: 286860 - RNA, 19 nt, Artificial Sequence
  Description of Artificial Sequence: Synthetic oligonucleotide
cuuugugggaccaaaacug

SEQ ID NO: 286861 - RNA, 19 nt, Artificial Sequence
  Description of Artificial Sequence: Synthetic oligonucleotide
ucuagcacaggaaaugucu

SEQ ID NO: 286862 - RNA, 19 nt, Artificial Sequence
  Description of Artificial Sequence: Synthetic oligonucleotide
uuugucaccucgauaaaug

SEQ ID NO: 286863 - RNA, 19 nt, Artificial Sequence
  Description of Artificial Sequence: Synthetic oligonucleotide
auccgauucacucucagag

SEQ ID NO: 286864 - RNA, 19 nt, Artificial Sequence
  Description of Artificial Sequence: Synthetic oligonucleotide
gaugcauucucuuugucac

SEQ ID NO: 286865 - RNA, 19 nt, Artificial Sequence
  Description of Artificial Sequence: Synthetic oligonucleotide
aucguuucguaauuguugg

SEQ ID NO: 286866 - RNA, 19 nt, Artificial Sequence
  Description of Artificial Sequence: Synthetic oligonucleotide
uguuguggaacgcauggag

SEQ ID NO: 286867 - RNA, 19 nt, Artificial Sequence
  Description of Artificial Sequence: Synthetic oligonucleotide
uccuguaggauucgggugg

SEQ ID NO: 286868 - RNA, 19 nt, Artificial Sequence
  Description of Artificial Sequence: Synthetic oligonucleotide
ugugcuaaguucaaccaca

SEQ ID NO: 286869 - RNA, 19 nt, Artificial Sequence
  Description of Artificial Sequence: Synthetic oligonucleotide
aacucgucaaacucgccuc

SEQ ID NO: 286870 - RNA, 19 nt, Artificial Sequence
  Description of Artificial Sequence: Synthetic oligonucleotide
ucggaaguauccuuugugg

SEQ ID NO: 286871 - RNA, 19 nt, Artificial Sequence
  Description of Artificial Sequence: Synthetic oligonucleotide
aaccuagucacuaucaucu

SEQ ID NO: 286872 - RNA, 19 nt, Artificial Sequence
  Description of Artificial Sequence: Synthetic oligonucleotide
cacucgaugauauaauggc

SEQ ID NO: 286873 - RNA, 19 nt, Artificial Sequence
  Description of Artificial Sequence: Synthetic oligonucleotide
aaaggcuuggucauaaucu

SEQ ID NO: 286874 - RNA, 19 nt, Artificial Sequence
  Description of Artificial Sequence: Synthetic oligonucleotide
aaacucgucaaacucgccu

SEQ ID NO: 286875 - RNA, 19 nt, Artificial Sequence
  Description of Artificial Sequence: Synthetic oligonucleotide
agcuaaucuuuguaagacc

SEQ ID NO: 286876 - RNA, 19 nt, Artificial Sequence
  Description of Artificial Sequence: Synthetic oligonucleotide
auugucggaccccugcucc

SEQ ID NO: 286877 - RNA, 19 nt, Artificial Sequence
  Description of Artificial Sequence: Synthetic oligonucleotide
uguaauuaguguucauuca

SEQ ID NO: 286878 - RNA, 19 nt, Artificial Sequence
  Description of Artificial Sequence: Synthetic oligonucleotide
aaucuuuguaagaccaagg

SEQ ID NO: 286879 - RNA, 19 nt, Artificial Sequence
  Description of Artificial Sequence: Synthetic oligonucleotide
acuaucaucugauccaugu

SEQ ID NO: 286880 - RNA, 19 nt, Artificial Sequence
  Description of Artificial Sequence: Synthetic oligonucleotide
cuauaauccuucuugaaga

SEQ ID NO: 286881 - RNA, 19 nt, Artificial Sequence
  Description of Artificial Sequence: Synthetic oligonucleotide
uuaucuccuacuuuacuca

SEQ ID NO: 286882 - RNA, 19 nt, Artificial Sequence
  Description of Artificial Sequence: Synthetic oligonucleotide
agagccgagaauuuucauc

SEQ ID NO: 286883 - RNA, 19 nt, Artificial Sequence
  Description of Artificial Sequence: Synthetic oligonucleotide
aaaauggagggccccaaca

SEQ ID NO: 286884 - RNA, 19 nt, Artificial Sequence
  Description of Artificial Sequence: Synthetic oligonucleotide
guacauuuggcccaaacca

SEQ ID NO: 286885 - RNA, 19 nt, Artificial Sequence
  Description of Artificial Sequence: Synthetic oligonucleotide
ugauauaauggcuuuggau

SEQ ID NO: 286886 - RNA, 19 nt, Artificial Sequence
  Description of Artificial Sequence: Synthetic oligonucleotide
cacaucacgagcuucucgg

SEQ ID NO: 286887 - RNA, 19 nt, Artificial Sequence
  Description of Artificial Sequence: Synthetic oligonucleotide
aucugaacagcgcugaugu

SEQ ID NO: 286888 - RNA, 19 nt, Artificial Sequence
  Description of Artificial Sequence: Synthetic oligonucleotide
gugaaauaaaaccuaguca

SEQ ID NO: 286889 - RNA, 19 nt, Artificial Sequence
  Description of Artificial Sequence: Synthetic oligonucleotide
ugaacgugaaaugaucgag

SEQ ID NO: 286890 - RNA, 19 nt, Artificial Sequence
  Description of Artificial Sequence: Synthetic oligonucleotide
cauuguuugagcccucugg

SEQ ID NO: 286891 - RNA, 19 nt, Artificial Sequence
  Description of Artificial Sequence: Synthetic oligonucleotide
uaaucuuuguaagaccaag

SEQ ID NO: 286892 - RNA, 19 nt, Artificial Sequence
  Description of Artificial Sequence: Synthetic oligonucleotide
uagagcacgacuucggugu

SEQ ID NO: 286893 - RNA, 19 nt, Artificial Sequence
  Description of Artificial Sequence: Synthetic oligonucleotide
aaauaaaaccuagucacua

SEQ ID NO: 286894 - RNA, 19 nt, Artificial Sequence
  Description of Artificial Sequence: Synthetic oligonucleotide
ugaaguaccugugugccag

SEQ ID NO: 286895 - RNA, 19 nt, Artificial Sequence
  Description of Artificial Sequence: Synthetic oligonucleotide
gaagaaucgucacucgaug

SEQ ID NO: 286896 - RNA, 19 nt, Artificial Sequence
  Description of Artificial Sequence: Synthetic oligonucleotide
caucguuucguaauuguug

SEQ ID NO: 286897 - RNA, 19 nt, Artificial Sequence
  Description of Artificial Sequence: Synthetic oligonucleotide
ucgaucugaggccucauug

SEQ ID NO: 286898 - RNA, 19 nt, Artificial Sequence
  Description of Artificial Sequence: Synthetic oligonucleotide
uuugugggaccaaaacugc

SEQ ID NO: 286899 - RNA, 19 nt, Artificial Sequence
  Description of Artificial Sequence: Synthetic oligonucleotide
ucuguuucgucaucgucag

SEQ ID NO: 286900 - RNA, 19 nt, Artificial Sequence
  Description of Artificial Sequence: Synthetic oligonucleotide
aguuugcuugcacuccugc

SEQ ID NO: 286901 - RNA, 19 nt, Artificial Sequence
  Description of Artificial Sequence: Synthetic oligonucleotide
aaaaccuagucacuaucau

SEQ ID NO: 286902 - RNA, 19 nt, Artificial Sequence
  Description of Artificial Sequence: Synthetic oligonucleotide
aacagcgcugauguacugc

SEQ ID NO: 286903 - RNA, 19 nt, Artificial Sequence
  Description of Artificial Sequence: Synthetic oligonucleotide
ggugaaauaaaaccuaguc

SEQ ID NO: 286904 - RNA, 19 nt, Artificial Sequence
  Description of Artificial Sequence: Synthetic oligonucleotide
uugccacacuugaagaggg

SEQ ID NO: 286905 - RNA, 19 nt, Artificial Sequence
  Description of Artificial Sequence: Synthetic oligonucleotide
aaguauccuuugugggacc

SEQ ID NO: 286906 - RNA, 19 nt, Artificial Sequence
  Description of Artificial Sequence: Synthetic oligonucleotide
aagaaucgucacucgauga

SEQ ID NO: 286907 - RNA, 19 nt, Artificial Sequence
  Description of Artificial Sequence: Synthetic oligonucleotide
ugggauaagcuuucaaaac

SEQ ID NO: 286908 - RNA, 19 nt, Artificial Sequence
  Description of Artificial Sequence: Synthetic oligonucleotide
uuggaguuuaguaaauaua

SEQ ID NO: 286909 - RNA, 19 nt, Artificial Sequence
  Description of Artificial Sequence: Synthetic oligonucleotide
aguuuauccucaucugaag

SEQ ID NO: 286910 - RNA, 19 nt, Artificial Sequence
  Description of Artificial Sequence: Synthetic oligonucleotide
ucuauugggccgaucguca

SEQ ID NO: 286911 - RNA, 19 nt, Artificial Sequence
  Description of Artificial Sequence: Synthetic oligonucleotide
agaaucgcuauugcuauuc

SEQ ID NO: 286912 - RNA, 19 nt, Artificial Sequence
  Description of Artificial Sequence: Synthetic oligonucleotide
uaugucucguuucuccuga

SEQ ID NO: 286913 - RNA, 19 nt, Artificial Sequence
  Description of Artificial Sequence: Synthetic oligonucleotide
cuaaguucaaccacacguc

SEQ ID NO: 286914 - RNA, 19 nt, Artificial Sequence
  Description of Artificial Sequence: Synthetic oligonucleotide
aaaugggaguacaaaggag

SEQ ID NO: 286915 - RNA, 19 nt, Artificial Sequence
  Description of Artificial Sequence: Synthetic oligonucleotide
agacucauuguccgacugc

SEQ ID NO: 286916 - RNA, 19 nt, Artificial Sequence
  Description of Artificial Sequence: Synthetic oligonucleotide
acuuuacucagguaacuga

SEQ ID NO: 286917 - RNA, 19 nt, Artificial Sequence
  Description of Artificial Sequence: Synthetic oligonucleotide
uuuucucucagacguuucu

SEQ ID NO: 286918 - RNA, 19 nt, Artificial Sequence
  Description of Artificial Sequence: Synthetic oligonucleotide
ucaggagggacgaucggcc

SEQ ID NO: 286919 - RNA, 19 nt, Artificial Sequence
  Description of Artificial Sequence: Synthetic oligonucleotide
aguuucaccagugaacaug

SEQ ID NO: 286920 - RNA, 19 nt, Artificial Sequence
  Description of Artificial Sequence: Synthetic oligonucleotide
uucacauaugacagguaga

SEQ ID NO: 286921 - RNA, 19 nt, Artificial Sequence
  Description of Artificial Sequence: Synthetic oligonucleotide
aauucuauccaagcuucca

SEQ ID NO: 286922 - RNA, 19 nt, Artificial Sequence
  Description of Artificial Sequence: Synthetic oligonucleotide
gguagcuaaucuuuguaag

SEQ ID NO: 286923 - RNA, 19 nt, Artificial Sequence
  Description of Artificial Sequence: Synthetic oligonucleotide
uuugcuucgccuagguuuc

SEQ ID NO: 286924 - RNA, 19 nt, Artificial Sequence
  Description of Artificial Sequence: Synthetic oligonucleotide
gaagcacugagaugcauuc

SEQ ID NO: 286925 - RNA, 19 nt, Artificial Sequence
  Description of Artificial Sequence: Synthetic oligonucleotide
uuuucgaagcacugagaug

SEQ ID NO: 286926 - RNA, 19 nt, Artificial Sequence
  Description of Artificial Sequence: Synthetic oligonucleotide
ugaacagcgcugauguacu

SEQ ID NO: 286927 - RNA, 19 nt, Artificial Sequence
  Description of Artificial Sequence: Synthetic oligonucleotide
uagcuaaucuuuguaagac

SEQ ID NO: 286928 - RNA, 19 nt, Artificial Sequence
  Description of Artificial Sequence: Synthetic oligonucleotide
cugagccucgaucugaggc

SEQ ID NO: 286929 - RNA, 19 nt, Artificial Sequence
  Description of Artificial Sequence: Synthetic oligonucleotide
cugauccauguucugagcc

SEQ ID NO: 286930 - RNA, 19 nt, Artificial Sequence
  Description of Artificial Sequence: Synthetic oligonucleotide
ugagccucgaucugaggcc

SEQ ID NO: 286931 - RNA, 19 nt, Artificial Sequence
  Description of Artificial Sequence: Synthetic oligonucleotide
uuggcuaugucucguuucu

SEQ ID NO: 286932 - RNA, 19 nt, Artificial Sequence
  Description of Artificial Sequence: Synthetic oligonucleotide
uagaacgccgcccuccacc

SEQ ID NO: 286933 - RNA, 19 nt, Artificial Sequence
  Description of Artificial Sequence: Synthetic oligonucleotide
uaugucagucuguucuaag

SEQ ID NO: 286934 - RNA, 19 nt, Artificial Sequence
  Description of Artificial Sequence: Synthetic oligonucleotide
acucgucaaacucgccucc

SEQ ID NO: 286935 - RNA, 19 nt, Artificial Sequence
  Description of Artificial Sequence: Synthetic oligonucleotide
uaucuccuacuuuacucag

SEQ ID NO: 286936 - RNA, 19 nt, Artificial Sequence
  Description of Artificial Sequence: Synthetic oligonucleotide
auagagagagccgagaauu

SEQ ID NO: 286937 - RNA, 19 nt, Artificial Sequence
  Description of Artificial Sequence: Synthetic oligonucleotide
uucaucguuucguaauugu

SEQ ID NO: 286938 - RNA, 19 nt, Artificial Sequence
  Description of Artificial Sequence: Synthetic oligonucleotide
ugucucuuggaguuuagua

SEQ ID NO: 286939 - RNA, 19 nt, Artificial Sequence
  Description of Artificial Sequence: Synthetic oligonucleotide
cugggcuuggcucaguaag

SEQ ID NO: 286940 - RNA, 19 nt, Artificial Sequence
  Description of Artificial Sequence: Synthetic oligonucleotide
uaaucuuccugaacgugaa

SEQ ID NO: 286941 - RNA, 19 nt, Artificial Sequence
  Description of Artificial Sequence: Synthetic oligonucleotide
gacucuagcacaggaaaug

SEQ ID NO: 286942 - RNA, 19 nt, Artificial Sequence
  Description of Artificial Sequence: Synthetic oligonucleotide
ugggccaauucuauccaag

SEQ ID NO: 286943 - RNA, 19 nt, Artificial Sequence
  Description of Artificial Sequence: Synthetic oligonucleotide
gaacgugaaaugaucgagc

SEQ ID NO: 286944 - RNA, 19 nt, Artificial Sequence
  Description of Artificial Sequence: Synthetic oligonucleotide
gugcuuauagaacuuucug

SEQ ID NO: 286945 - RNA, 19 nt, Artificial Sequence
  Description of Artificial Sequence: Synthetic oligonucleotide
aaguagagcacgacuucgg

SEQ ID NO: 286946 - RNA, 19 nt, Artificial Sequence
  Description of Artificial Sequence: Synthetic oligonucleotide
agucuguucuaagaucugg

SEQ ID NO: 286947 - RNA, 19 nt, Artificial Sequence
  Description of Artificial Sequence: Synthetic oligonucleotide
cucgauaaauguacauuug

SEQ ID NO: 286948 - RNA, 19 nt, Artificial Sequence
  Description of Artificial Sequence: Synthetic oligonucleotide
gucaccucgauaaauguac

SEQ ID NO: 286949 - RNA, 19 nt, Artificial Sequence
  Description of Artificial Sequence: Synthetic oligonucleotide
uuccacauagaugugugcu

SEQ ID NO: 286950 - RNA, 19 nt, Artificial Sequence
  Description of Artificial Sequence: Synthetic oligonucleotide
guagcuaaucuuuguaaga

SEQ ID NO: 286951 - RNA, 19 nt, Artificial Sequence
  Description of Artificial Sequence: Synthetic oligonucleotide
uggugaaauaaaaccuagu

SEQ ID NO: 286952 - RNA, 19 nt, Artificial Sequence
  Description of Artificial Sequence: Synthetic oligonucleotide
agaagcuucugucguaaga

SEQ ID NO: 286953 - RNA, 19 nt, Artificial Sequence
  Description of Artificial Sequence: Synthetic oligonucleotide
gucacucgaugauauaaug

SEQ ID NO: 286954 - RNA, 19 nt, Artificial Sequence
  Description of Artificial Sequence: Synthetic oligonucleotide
uucgccuagguuuccaagu

SEQ ID NO: 286955 - RNA, 19 nt, Artificial Sequence
  Description of Artificial Sequence: Synthetic oligonucleotide
uccugaacgugaaaugauc

SEQ ID NO: 286956 - RNA, 19 nt, Artificial Sequence
  Description of Artificial Sequence: Synthetic oligonucleotide
caaguagagcacgacuucg

SEQ ID NO: 286957 - RNA, 19 nt, Artificial Sequence
  Description of Artificial Sequence: Synthetic oligonucleotide
cugaacagcgcugauguac

SEQ ID NO: 286958 - RNA, 19 nt, Artificial Sequence
  Description of Artificial Sequence: Synthetic oligonucleotide
uacuuuacucagguaacug

SEQ ID NO: 286959 - RNA, 19 nt, Artificial Sequence
  Description of Artificial Sequence: Synthetic oligonucleotide
gguguucuggugcuuauag

SEQ ID NO: 286960 - RNA, 19 nt, Artificial Sequence
  Description of Artificial Sequence: Synthetic oligonucleotide
ugaucgagccagcugguaa

SEQ ID NO: 286961 - RNA, 19 nt, Artificial Sequence
  Description of Artificial Sequence: Synthetic oligonucleotide
ucauuguccgacugcucag

SEQ ID NO: 286962 - RNA, 19 nt, Artificial Sequence
  Description of Artificial Sequence: Synthetic oligonucleotide
acguuaaacaucagaacug

SEQ ID NO: 286963 - RNA, 19 nt, Artificial Sequence
  Description of Artificial Sequence: Synthetic oligonucleotide
aguaguacugaaaggcuug

SEQ ID NO: 286964 - RNA, 19 nt, Artificial Sequence
  Description of Artificial Sequence: Synthetic oligonucleotide
gguuuccaagucuaaaaug

SEQ ID NO: 286965 - RNA, 19 nt, Artificial Sequence
  Description of Artificial Sequence: Synthetic oligonucleotide
ucuuagaacgccgcccucc

SEQ ID NO: 286966 - RNA, 19 nt, Artificial Sequence
  Description of Artificial Sequence: Synthetic oligonucleotide
cauguucugagccucgauc

SEQ ID NO: 286967 - RNA, 19 nt, Artificial Sequence
  Description of Artificial Sequence: Synthetic oligonucleotide
agaaucgucacucgaugau

SEQ ID NO: 286968 - RNA, 19 nt, Artificial Sequence
  Description of Artificial Sequence: Synthetic oligonucleotide
cuccuuucuuagaacgccg

SEQ ID NO: 286969 - RNA, 19 nt, Artificial Sequence
  Description of Artificial Sequence: Synthetic oligonucleotide
ccugaacgugaaaugaucg

SEQ ID NO: 286970 - RNA, 19 nt, Artificial Sequence
  Description of Artificial Sequence: Synthetic oligonucleotide
cuuccgaggcagcauagag

SEQ ID NO: 286971 - RNA, 19 nt, Artificial Sequence
  Description of Artificial Sequence: Synthetic oligonucleotide
cacguuaaacaucagaacu

SEQ ID NO: 286972 - RNA, 19 nt, Artificial Sequence
  Description of Artificial Sequence: Synthetic oligonucleotide
agucuaaaauggagggccc

SEQ ID NO: 286973 - RNA, 19 nt, Artificial Sequence
  Description of Artificial Sequence: Synthetic oligonucleotide
cuugauaguaguacugaaa

SEQ ID NO: 286974 - RNA, 19 nt, Artificial Sequence
  Description of Artificial Sequence: Synthetic oligonucleotide
uugucaccucgauaaaugu

SEQ ID NO: 286975 - RNA, 19 nt, Artificial Sequence
  Description of Artificial Sequence: Synthetic oligonucleotide
uuggauacagggaggucgu

SEQ ID NO: 286976 - RNA, 19 nt, Artificial Sequence
  Description of Artificial Sequence: Synthetic oligonucleotide
ucuaaaauggagggcccca

SEQ ID NO: 286977 - RNA, 19 nt, Artificial Sequence
  Description of Artificial Sequence: Synthetic oligonucleotide
aggcguucuggcuugggag

SEQ ID NO: 286978 - RNA, 19 nt, Artificial Sequence
  Description of Artificial Sequence: Synthetic oligonucleotide
agagguagcuaaucuuugu

SEQ ID NO: 286979 - RNA, 19 nt, Artificial Sequence
  Description of Artificial Sequence: Synthetic oligonucleotide
gaucgagccagcugguaac

SEQ ID NO: 286980 - RNA, 19 nt, Artificial Sequence
  Description of Artificial Sequence: Synthetic oligonucleotide
uguaggauucggguggcug

SEQ ID NO: 286981 - RNA, 19 nt, Artificial Sequence
  Description of Artificial Sequence: Synthetic oligonucleotide
gaaucgcuauugcuauucc

SEQ ID NO: 286982 - RNA, 19 nt, Artificial Sequence
  Description of Artificial Sequence: Synthetic oligonucleotide
ucaucguuucguaauuguu

SEQ ID NO: 286983 - RNA, 19 nt, Artificial Sequence
  Description of Artificial Sequence: Synthetic oligonucleotide
ucaguaagucggagcacug

SEQ ID NO: 286984 - RNA, 19 nt, Artificial Sequence
  Description of Artificial Sequence: Synthetic oligonucleotide
ucguuucguaauuguuggg

SEQ ID NO: 286985 - RNA, 19 nt, Artificial Sequence
  Description of Artificial Sequence: Synthetic oligonucleotide
aagaccaaggccacguuaa

SEQ ID NO: 286986 - RNA, 19 nt, Artificial Sequence
  Description of Artificial Sequence: Synthetic oligonucleotide
ucggguggcuguuccauag

SEQ ID NO: 286987 - RNA, 19 nt, Artificial Sequence
  Description of Artificial Sequence: Synthetic oligonucleotide
agaguuugcuugcacuccu

SEQ ID NO: 286988 - RNA, 19 nt, Artificial Sequence
  Description of Artificial Sequence: Synthetic oligonucleotide
uuucguaauuguugggaua

SEQ ID NO: 286989 - RNA, 19 nt, Artificial Sequence
  Description of Artificial Sequence: Synthetic oligonucleotide
ucgucacucgaugauauaa

SEQ ID NO: 286990 - RNA, 19 nt, Artificial Sequence
  Description of Artificial Sequence: Synthetic oligonucleotide
cuugcgggaaugcucuagc

SEQ ID NO: 286991 - RNA, 19 nt, Artificial Sequence
  Description of Artificial Sequence: Synthetic oligonucleotide
aagccuugcgggaaugcuc

SEQ ID NO: 286992 - RNA, 19 nt, Artificial Sequence
  Description of Artificial Sequence: Synthetic oligonucleotide
cuagcacaggaaaugucuc

SEQ ID NO: 286993 - RNA, 19 nt, Artificial Sequence
  Description of Artificial Sequence: Synthetic oligonucleotide
aaucgucacucgaugauau

SEQ ID NO: 286994 - RNA, 19 nt, Artificial Sequence
  Description of Artificial Sequence: Synthetic oligonucleotide
cacgacuucgguguucugg

SEQ ID NO: 286995 - RNA, 19 nt, Artificial Sequence
  Description of Artificial Sequence: Synthetic oligonucleotide
uucucggaaguauccuuug

SEQ ID NO: 286996 - RNA, 19 nt, Artificial Sequence
  Description of Artificial Sequence: Synthetic oligonucleotide
ugucaccucgauaaaugua

SEQ ID NO: 286997 - RNA, 19 nt, Artificial Sequence
  Description of Artificial Sequence: Synthetic oligonucleotide
cuuggcuaugucucguuuc

SEQ ID NO: 286998 - RNA, 19 nt, Artificial Sequence
  Description of Artificial Sequence: Synthetic oligonucleotide
agacguuucucuuccugcu

SEQ ID NO: 286999 - RNA, 19 nt, Artificial Sequence
  Description of Artificial Sequence: Synthetic oligonucleotide
aguagagcacgacuucggu

SEQ ID NO: 287000 - RNA, 19 nt, Artificial Sequence
  Description of Artificial Sequence: Synthetic oligonucleotide
cauaaucuuccugaacgug

SEQ ID NO: 287001 - RNA, 19 nt, Artificial Sequence
  Description of Artificial Sequence: Synthetic oligonucleotide
ucaccucgauaaauguaca

SEQ ID NO: 287002 - RNA, 19 nt, Artificial Sequence
  Description of Artificial Sequence: Synthetic oligonucleotide
gaccaaaacugcuccuaug

SEQ ID NO: 287003 - RNA, 19 nt, Artificial Sequence
  Description of Artificial Sequence: Synthetic oligonucleotide
caauucuauccaagcuucc

SEQ ID NO: 287004 - RNA, 19 nt, Artificial Sequence
  Description of Artificial Sequence: Synthetic oligonucleotide
uguaucacugggugccaca

SEQ ID NO: 287005 - RNA, 19 nt, Artificial Sequence
  Description of Artificial Sequence: Synthetic oligonucleotide
acgacuucgguguucuggu

SEQ ID NO: 287006 - RNA, 19 nt, Artificial Sequence
  Description of Artificial Sequence: Synthetic oligonucleotide
uugugggaccaaaacugcu

SEQ ID NO: 287007 - RNA, 19 nt, Artificial Sequence
  Description of Artificial Sequence: Synthetic oligonucleotide
uaugccauuggauggcauu

SEQ ID NO: 287008 - RNA, 19 nt, Artificial Sequence
  Description of Artificial Sequence: Synthetic oligonucleotide
acauagaugugugcuaagu

SEQ ID NO: 287009 - RNA, 19 nt, Artificial Sequence
  Description of Artificial Sequence: Synthetic oligonucleotide
acuuuacuauaauccuucu

SEQ ID NO: 287010 - RNA, 19 nt, Artificial Sequence
  Description of Artificial Sequence: Synthetic oligonucleotide
cugggcgagaaucauuuuc

SEQ ID NO: 287011 - RNA, 19 nt, Artificial Sequence
  Description of Artificial Sequence: Synthetic oligonucleotide
uaagucggagcacugccuu

SEQ ID NO: 287012 - RNA, 19 nt, Artificial Sequence
  Description of Artificial Sequence: Synthetic oligonucleotide
uccgacuccugucuuccug

SEQ ID NO: 287013 - RNA, 19 nt, Artificial Sequence
  Description of Artificial Sequence: Synthetic oligonucleotide
cuaugucucguuucuccug

SEQ ID NO: 287014 - RNA, 19 nt, Artificial Sequence
  Description of Artificial Sequence: Synthetic oligonucleotide
gggacgaucggccugcacc

SEQ ID NO: 287015 - RNA, 19 nt, Artificial Sequence
  Description of Artificial Sequence: Synthetic oligonucleotide
gucagucuguucuaagauc

SEQ ID NO: 287016 - RNA, 19 nt, Artificial Sequence
  Description of Artificial Sequence: Synthetic oligonucleotide
auugggccgaucgucauca

SEQ ID NO: 287017 - RNA, 19 nt, Artificial Sequence
  Description of Artificial Sequence: Synthetic oligonucleotide
agaaucucaggagggacga

SEQ ID NO: 287018 - RNA, 19 nt, Artificial Sequence
  Description of Artificial Sequence: Synthetic oligonucleotide
ugcuugcauagccuccacc

SEQ ID NO: 287019 - RNA, 19 nt, Artificial Sequence
  Description of Artificial Sequence: Synthetic oligonucleotide
ugcgggaaugcucuagcau

SEQ ID NO: 287020 - RNA, 19 nt, Artificial Sequence
  Description of Artificial Sequence: Synthetic oligonucleotide
uggcucaguaagucggagc

SEQ ID NO: 287021 - RNA, 19 nt, Artificial Sequence
  Description of Artificial Sequence: Synthetic oligonucleotide
uccuaugccauuggauggc

SEQ ID NO: 287022 - RNA, 19 nt, Artificial Sequence
  Description of Artificial Sequence: Synthetic oligonucleotide
gaggccggucuauugggcc

SEQ ID NO: 287023 - RNA, 19 nt, Artificial Sequence
  Description of Artificial Sequence: Synthetic oligonucleotide
cuuugcuucgccuagguuu

SEQ ID NO: 287024 - RNA, 19 nt, Artificial Sequence
  Description of Artificial Sequence: Synthetic oligonucleotide
cauuaaggacuuccuucag

SEQ ID NO: 287025 - RNA, 19 nt, Artificial Sequence
  Description of Artificial Sequence: Synthetic oligonucleotide
aagucggagcacugccuug

SEQ ID NO: 287026 - RNA, 19 nt, Artificial Sequence
  Description of Artificial Sequence: Synthetic oligonucleotide
uauuccugggauguccuuc

SEQ ID NO: 287027 - RNA, 19 nt, Artificial Sequence
  Description of Artificial Sequence: Synthetic oligonucleotide
gcauuaaggacuuccuuca

SEQ ID NO: 287028 - RNA, 19 nt, Artificial Sequence
  Description of Artificial Sequence: Synthetic oligonucleotide
uccgacugcucagagccag

SEQ ID NO: 287029 - RNA, 19 nt, Artificial Sequence
  Description of Artificial Sequence: Synthetic oligonucleotide
uguguuuaucacagcuuuu

SEQ ID NO: 287030 - RNA, 19 nt, Artificial Sequence
  Description of Artificial Sequence: Synthetic oligonucleotide
caguuuauccucaucugaa

SEQ ID NO: 287031 - RNA, 19 nt, Artificial Sequence
  Description of Artificial Sequence: Synthetic oligonucleotide
cuucgccuagguuuccaag

SEQ ID NO: 287032 - RNA, 19 nt, Artificial Sequence
  Description of Artificial Sequence: Synthetic oligonucleotide
gcaagggccaaaucgaauc

SEQ ID NO: 287033 - RNA, 19 nt, Artificial Sequence
  Description of Artificial Sequence: Synthetic oligonucleotide
aggccggucuauugggccg

SEQ ID NO: 287034 - RNA, 19 nt, Artificial Sequence
  Description of Artificial Sequence: Synthetic oligonucleotide
agaggaggccggucuauug

SEQ ID NO: 287035 - RNA, 19 nt, Artificial Sequence
  Description of Artificial Sequence: Synthetic oligonucleotide
guuccacauagaugugugc

SEQ ID NO: 287036 - RNA, 19 nt, Artificial Sequence
  Description of Artificial Sequence: Synthetic oligonucleotide
ucuaagaucugggccaauu

SEQ ID NO: 287037 - RNA, 19 nt, Artificial Sequence
  Description of Artificial Sequence: Synthetic oligonucleotide
uugucggaccccugcuccg

SEQ ID NO: 287038 - RNA, 19 nt, Artificial Sequence
  Description of Artificial Sequence: Synthetic oligonucleotide
ucuuugucaccucgauaaa

SEQ ID NO: 287039 - RNA, 19 nt, Artificial Sequence
  Description of Artificial Sequence: Synthetic oligonucleotide
ucgccuagguuuccaaguc

SEQ ID NO: 287040 - RNA, 19 nt, Artificial Sequence
  Description of Artificial Sequence: Synthetic oligonucleotide
uugcacgguccagugaugc

SEQ ID NO: 287041 - RNA, 19 nt, Artificial Sequence
  Description of Artificial Sequence: Synthetic oligonucleotide
uuugcacgguccagugaug

SEQ ID NO: 287042 - RNA, 19 nt, Artificial Sequence
  Description of Artificial Sequence: Synthetic oligonucleotide
cugaacgugaaaugaucga

SEQ ID NO: 287043 - RNA, 19 nt, Artificial Sequence
  Description of Artificial Sequence: Synthetic oligonucleotide
cauuggauggcauuguaau

SEQ ID NO: 287044 - RNA, 19 nt, Artificial Sequence
  Description of Artificial Sequence: Synthetic oligonucleotide
uggacggcgcuucuuuggu

SEQ ID NO: 287045 - RNA, 19 nt, Artificial Sequence
  Description of Artificial Sequence: Synthetic oligonucleotide
gggcaaacacaucacgagc

SEQ ID NO: 287046 - RNA, 19 nt, Artificial Sequence
  Description of Artificial Sequence: Synthetic oligonucleotide
cagaguuugcuugcacucc

SEQ ID NO: 287047 - RNA, 19 nt, Artificial Sequence
  Description of Artificial Sequence: Synthetic oligonucleotide
cauaggcugaaagggcacc

SEQ ID NO: 287048 - RNA, 19 nt, Artificial Sequence
  Description of Artificial Sequence: Synthetic oligonucleotide
acucgaugauauaauggcu

SEQ ID NO: 287049 - RNA, 19 nt, Artificial Sequence
  Description of Artificial Sequence: Synthetic oligonucleotide
cauugaaggaggcaggcgu

SEQ ID NO: 287050 - RNA, 19 nt, Artificial Sequence
  Description of Artificial Sequence: Synthetic oligonucleotide
acgugaaaugaucgagcca

SEQ ID NO: 287051 - RNA, 19 nt, Artificial Sequence
  Description of Artificial Sequence: Synthetic oligonucleotide
ucacuaucaucugauccau

SEQ ID NO: 287052 - RNA, 19 nt, Artificial Sequence
  Description of Artificial Sequence: Synthetic oligonucleotide
cacauagaugugugcuaag

SEQ ID NO: 287053 - RNA, 19 nt, Artificial Sequence
  Description of Artificial Sequence: Synthetic oligonucleotide
cucuagcacaggaaauguc

SEQ ID NO: 287054 - RNA, 19 nt, Artificial Sequence
  Description of Artificial Sequence: Synthetic oligonucleotide
uauugggccgaucgucauc

SEQ ID NO: 287055 - RNA, 19 nt, Artificial Sequence
  Description of Artificial Sequence: Synthetic oligonucleotide
acagcauuaaggacuuccu

SEQ ID NO: 287056 - RNA, 19 nt, Artificial Sequence
  Description of Artificial Sequence: Synthetic oligonucleotide
accucgauaaauguacauu

SEQ ID NO: 287057 - RNA, 19 nt, Artificial Sequence
  Description of Artificial Sequence: Synthetic oligonucleotide
aaugaucgagccagcuggu

SEQ ID NO: 287058 - RNA, 19 nt, Artificial Sequence
  Description of Artificial Sequence: Synthetic oligonucleotide
caucauugacaaacucguc

SEQ ID NO: 287059 - RNA, 19 nt, Artificial Sequence
  Description of Artificial Sequence: Synthetic oligonucleotide
cacacgucacugauaucug

SEQ ID NO: 287060 - RNA, 19 nt, Artificial Sequence
  Description of Artificial Sequence: Synthetic oligonucleotide
uugcgggaaugcucuagca

SEQ ID NO: 287061 - RNA, 19 nt, Artificial Sequence
  Description of Artificial Sequence: Synthetic oligonucleotide
cagacucauuguccgacug

SEQ ID NO: 287062 - RNA, 19 nt, Artificial Sequence
  Description of Artificial Sequence: Synthetic oligonucleotide
cacgguccagugaugcaag

SEQ ID NO: 287063 - RNA, 19 nt, Artificial Sequence
  Description of Artificial Sequence: Synthetic oligonucleotide
ggaaugcucuagcaucugc

SEQ ID NO: 287064 - RNA, 19 nt, Artificial Sequence
  Description of Artificial Sequence: Synthetic oligonucleotide
cuaaucuuuguaagaccaa

SEQ ID NO: 287065 - RNA, 19 nt, Artificial Sequence
  Description of Artificial Sequence: Synthetic oligonucleotide
gucuaaaauggagggcccc

SEQ ID NO: 287066 - RNA, 19 nt, Artificial Sequence
  Description of Artificial Sequence: Synthetic oligonucleotide
accuagucacuaucaucug

SEQ ID NO: 287067 - RNA, 19 nt, Artificial Sequence
  Description of Artificial Sequence: Synthetic oligonucleotide
uccgauucacgguccgacu

SEQ ID NO: 287068 - RNA, 19 nt, Artificial Sequence
  Description of Artificial Sequence: Synthetic oligonucleotide
gauucacgguccgacucug

SEQ ID NO: 287069 - RNA, 19 nt, Artificial Sequence
  Description of Artificial Sequence: Synthetic oligonucleotide
augggaguacaaaggagga

SEQ ID NO: 287070 - RNA, 19 nt, Artificial Sequence
  Description of Artificial Sequence: Synthetic oligonucleotide
gggccaauucuauccaagc

SEQ ID NO: 287071 - RNA, 19 nt, Artificial Sequence
  Description of Artificial Sequence: Synthetic oligonucleotide
acauacugggcccgcugcu

SEQ ID NO: 287072 - RNA, 19 nt, Artificial Sequence
  Description of Artificial Sequence: Synthetic oligonucleotide
gccacguuaaacaucagaa

SEQ ID NO: 287073 - RNA, 19 nt, Artificial Sequence
  Description of Artificial Sequence: Synthetic oligonucleotide
gucuauugggccgaucguc

SEQ ID NO: 287074 - RNA, 19 nt, Artificial Sequence
  Description of Artificial Sequence: Synthetic oligonucleotide
caguaagucggagcacugc

SEQ ID NO: 287075 - RNA, 19 nt, Artificial Sequence
  Description of Artificial Sequence: Synthetic oligonucleotide
aguauccuuugugggacca

SEQ ID NO: 287076 - RNA, 19 nt, Artificial Sequence
  Description of Artificial Sequence: Synthetic oligonucleotide
ccacguuaaacaucagaac

SEQ ID NO: 287077 - RNA, 19 nt, Artificial Sequence
  Description of Artificial Sequence: Synthetic oligonucleotide
aggcuuggucauaaucuuc

SEQ ID NO: 287078 - RNA, 19 nt, Artificial Sequence
  Description of Artificial Sequence: Synthetic oligonucleotide
guuucgucaucgucagauc

SEQ ID NO: 287079 - RNA, 19 nt, Artificial Sequence
  Description of Artificial Sequence: Synthetic oligonucleotide
gaacagcgcugauguacug

SEQ ID NO: 287080 - RNA, 19 nt, Artificial Sequence
  Description of Artificial Sequence: Synthetic oligonucleotide
uucugguugucauccgauu

SEQ ID NO: 287081 - RNA, 19 nt, Artificial Sequence
  Description of Artificial Sequence: Synthetic oligonucleotide
agcacgacuucgguguucu

SEQ ID NO: 287082 - RNA, 19 nt, Artificial Sequence
  Description of Artificial Sequence: Synthetic oligonucleotide
guuucguaauuguugggau

SEQ ID NO: 287083 - RNA, 19 nt, Artificial Sequence
  Description of Artificial Sequence: Synthetic oligonucleotide
acccucauugucggacccc

SEQ ID NO: 287084 - RNA, 19 nt, Artificial Sequence
  Description of Artificial Sequence: Synthetic oligonucleotide
cuuugcacgguccagugau

SEQ ID NO: 287085 - RNA, 19 nt, Artificial Sequence
  Description of Artificial Sequence: Synthetic oligonucleotide
agagcgccuucucuuucug

SEQ ID NO: 287086 - RNA, 19 nt, Artificial Sequence
  Description of Artificial Sequence: Synthetic oligonucleotide
cuccgauucacgguccgac

SEQ ID NO: 287087 - RNA, 19 nt, Artificial Sequence
  Description of Artificial Sequence: Synthetic oligonucleotide
ucuuccgaggcagcauaga

SEQ ID NO: 287088 - RNA, 19 nt, Artificial Sequence
  Description of Artificial Sequence: Synthetic oligonucleotide
gaaucgucacucgaugaua

SEQ ID NO: 287089 - RNA, 19 nt, Artificial Sequence
  Description of Artificial Sequence: Synthetic oligonucleotide
uuagaacgccgcccuccac

SEQ ID NO: 287090 - RNA, 19 nt, Artificial Sequence
  Description of Artificial Sequence: Synthetic oligonucleotide
ugccuuugcacgguccagu

SEQ ID NO: 287091 - RNA, 19 nt, Artificial Sequence
  Description of Artificial Sequence: Synthetic oligonucleotide
gacucauuguccgacugcu

SEQ ID NO: 287092 - RNA, 19 nt, Artificial Sequence
  Description of Artificial Sequence: Synthetic oligonucleotide
ggcguucuggcuugggagc

SEQ ID NO: 287093 - RNA, 19 nt, Artificial Sequence
  Description of Artificial Sequence: Synthetic oligonucleotide
ugaaaggcuuggucauaau

SEQ ID NO: 287094 - RNA, 19 nt, Artificial Sequence
  Description of Artificial Sequence: Synthetic oligonucleotide
gacugugcagacucauugu

SEQ ID NO: 287095 - RNA, 19 nt, Artificial Sequence
  Description of Artificial Sequence: Synthetic oligonucleotide
ccgaucgucaucaucagaa

SEQ ID NO: 287096 - RNA, 19 nt, Artificial Sequence
  Description of Artificial Sequence: Synthetic oligonucleotide
ugggccgaucgucaucauc

SEQ ID NO: 287097 - RNA, 19 nt, Artificial Sequence
  Description of Artificial Sequence: Synthetic oligonucleotide
gccugggcaagccuugcgg

SEQ ID NO: 287098 - RNA, 19 nt, Artificial Sequence
  Description of Artificial Sequence: Synthetic oligonucleotide
uucuuagaacgccgcccuc

SEQ ID NO: 287099 - RNA, 19 nt, Artificial Sequence
  Description of Artificial Sequence: Synthetic oligonucleotide
uaguacugaaaggcuuggu

SEQ ID NO: 287100 - RNA, 19 nt, Artificial Sequence
  Description of Artificial Sequence: Synthetic oligonucleotide
agcugggcgagaaucauuu

SEQ ID NO: 287101 - RNA, 19 nt, Artificial Sequence
  Description of Artificial Sequence: Synthetic oligonucleotide
cuuagaacgccgcccucca

SEQ ID NO: 287102 - RNA, 19 nt, Artificial Sequence
  Description of Artificial Sequence: Synthetic oligonucleotide
agagagagccgagaauuuu

SEQ ID NO: 287103 - RNA, 19 nt, Artificial Sequence
  Description of Artificial Sequence: Synthetic oligonucleotide
gacuuguucugguugucau

SEQ ID NO: 287104 - RNA, 19 nt, Artificial Sequence
  Description of Artificial Sequence: Synthetic oligonucleotide
agcuucucggaaguauccu

SEQ ID NO: 287105 - RNA, 19 nt, Artificial Sequence
  Description of Artificial Sequence: Synthetic oligonucleotide
cacuaucaucugauccaug

SEQ ID NO: 287106 - RNA, 19 nt, Artificial Sequence
  Description of Artificial Sequence: Synthetic oligonucleotide
ggccucauuguuugagccc

SEQ ID NO: 287107 - RNA, 19 nt, Artificial Sequence
  Description of Artificial Sequence: Synthetic oligonucleotide
guaggauucggguggcugu

SEQ ID NO: 287108 - RNA, 19 nt, Artificial Sequence
  Description of Artificial Sequence: Synthetic oligonucleotide
uccauguucugagccucga

SEQ ID NO: 287109 - RNA, 19 nt, Artificial Sequence
  Description of Artificial Sequence: Synthetic oligonucleotide
ugggaguacaaaggaggau

SEQ ID NO: 287110 - RNA, 19 nt, Artificial Sequence
  Description of Artificial Sequence: Synthetic oligonucleotide
ucgccuccuuucuuagaac

SEQ ID NO: 287111 - RNA, 19 nt, Artificial Sequence
  Description of Artificial Sequence: Synthetic oligonucleotide
ccuccuuucuuagaacgcc

SEQ ID NO: 287112 - RNA, 19 nt, Artificial Sequence
  Description of Artificial Sequence: Synthetic oligonucleotide
uucugucguaagagcuccu

SEQ ID NO: 287113 - RNA, 19 nt, Artificial Sequence
  Description of Artificial Sequence: Synthetic oligonucleotide
uggagggccccaacauuau

SEQ ID NO: 287114 - RNA, 19 nt, Artificial Sequence
  Description of Artificial Sequence: Synthetic oligonucleotide
gaguuugcuugcacuccug

SEQ ID NO: 287115 - RNA, 19 nt, Artificial Sequence
  Description of Artificial Sequence: Synthetic oligonucleotide
agccgagaauuuucaucgu

SEQ ID NO: 287116 - RNA, 19 nt, Artificial Sequence
  Description of Artificial Sequence: Synthetic oligonucleotide
ggccacguuaaacaucaga

SEQ ID NO: 287117 - RNA, 19 nt, Artificial Sequence
  Description of Artificial Sequence: Synthetic oligonucleotide
ccgauucacucucagagga

SEQ ID NO: 287118 - RNA, 19 nt, Artificial Sequence
  Description of Artificial Sequence: Synthetic oligonucleotide
agggacgaucggccugcac

SEQ ID NO: 287119 - RNA, 19 nt, Artificial Sequence
  Description of Artificial Sequence: Synthetic oligonucleotide
cuggacucuagcacaggaa

SEQ ID NO: 287120 - RNA, 19 nt, Artificial Sequence
  Description of Artificial Sequence: Synthetic oligonucleotide
caugguacugggcuuggcu

SEQ ID NO: 287121 - RNA, 19 nt, Artificial Sequence
  Description of Artificial Sequence: Synthetic oligonucleotide
ucugaacagcgcugaugua

SEQ ID NO: 287122 - RNA, 19 nt, Artificial Sequence
  Description of Artificial Sequence: Synthetic oligonucleotide
agaccaaggccacguuaaa

SEQ ID NO: 287123 - RNA, 19 nt, Artificial Sequence
  Description of Artificial Sequence: Synthetic oligonucleotide
cauagaugugugcuaaguu

SEQ ID NO: 287124 - RNA, 19 nt, Artificial Sequence
  Description of Artificial Sequence: Synthetic oligonucleotide
agugguuugccaagugguu

SEQ ID NO: 287125 - RNA, 19 nt, Artificial Sequence
  Description of Artificial Sequence: Synthetic oligonucleotide
ccaaguagagcacgacuuc

SEQ ID NO: 287126 - RNA, 19 nt, Artificial Sequence
  Description of Artificial Sequence: Synthetic oligonucleotide
cagcagaguuugcuugcac

SEQ ID NO: 287127 - RNA, 19 nt, Artificial Sequence
  Description of Artificial Sequence: Synthetic oligonucleotide
aggauucggguggcuguuc

SEQ ID NO: 287128 - RNA, 19 nt, Artificial Sequence
  Description of Artificial Sequence: Synthetic oligonucleotide
ugcuucgccuagguuucca

SEQ ID NO: 287129 - RNA, 19 nt, Artificial Sequence
  Description of Artificial Sequence: Synthetic oligonucleotide
caaauggcccuuggcuaug

SEQ ID NO: 287130 - RNA, 19 nt, Artificial Sequence
  Description of Artificial Sequence: Synthetic oligonucleotide
aucgagccagcugguaaca

SEQ ID NO: 287131 - RNA, 19 nt, Artificial Sequence
  Description of Artificial Sequence: Synthetic oligonucleotide
ucgaagcacugagaugcau

SEQ ID NO: 287132 - RNA, 19 nt, Artificial Sequence
  Description of Artificial Sequence: Synthetic oligonucleotide
ggccccaacauuauucaga

SEQ ID NO: 287133 - RNA, 19 nt, Artificial Sequence
  Description of Artificial Sequence: Synthetic oligonucleotide
ugucggaccccugcuccga

SEQ ID NO: 287134 - RNA, 19 nt, Artificial Sequence
  Description of Artificial Sequence: Synthetic oligonucleotide
auccugcuugcgugcccgg

SEQ ID NO: 287135 - RNA, 19 nt, Artificial Sequence
  Description of Artificial Sequence: Synthetic oligonucleotide
gacggcgcuucuuugguuu

SEQ ID NO: 287136 - RNA, 19 nt, Artificial Sequence
  Description of Artificial Sequence: Synthetic oligonucleotide
acuguaucacugggugcca

SEQ ID NO: 287137 - RNA, 19 nt, Artificial Sequence
  Description of Artificial Sequence: Synthetic oligonucleotide
cauagagagagccgagaau

SEQ ID NO: 287138 - RNA, 19 nt, Artificial Sequence
  Description of Artificial Sequence: Synthetic oligonucleotide
ggccauuuucuguuucguc

SEQ ID NO: 287139 - RNA, 19 nt, Artificial Sequence
  Description of Artificial Sequence: Synthetic oligonucleotide
ggagggacgaucggccugc

SEQ ID NO: 287140 - RNA, 19 nt, Artificial Sequence
  Description of Artificial Sequence: Synthetic oligonucleotide
cuguaucacugggugccac

SEQ ID NO: 287141 - RNA, 19 nt, Artificial Sequence
  Description of Artificial Sequence: Synthetic oligonucleotide
aucgucacucgaugauaua

SEQ ID NO: 287142 - RNA, 19 nt, Artificial Sequence
  Description of Artificial Sequence: Synthetic oligonucleotide
uaggauucggguggcuguu

SEQ ID NO: 287143 - RNA, 19 nt, Artificial Sequence
  Description of Artificial Sequence: Synthetic oligonucleotide
cgcuauugcuauuccuggg

SEQ ID NO: 287144 - RNA, 19 nt, Artificial Sequence
  Description of Artificial Sequence: Synthetic oligonucleotide
ccauaggcugaaagggcac

SEQ ID NO: 287145 - RNA, 19 nt, Artificial Sequence
  Description of Artificial Sequence: Synthetic oligonucleotide
ggugcuuauagaacuuucu

SEQ ID NO: 287146 - RNA, 19 nt, Artificial Sequence
  Description of Artificial Sequence: Synthetic oligonucleotide
cauuguccgacugcucaga

SEQ ID NO: 287147 - RNA, 19 nt, Artificial Sequence
  Description of Artificial Sequence: Synthetic oligonucleotide
caggcguucuggcuuggga

SEQ ID NO: 287148 - RNA, 19 nt, Artificial Sequence
  Description of Artificial Sequence: Synthetic oligonucleotide
cacgguccgacucugcacu

SEQ ID NO: 287149 - RNA, 19 nt, Artificial Sequence
  Description of Artificial Sequence: Synthetic oligonucleotide
ccucgauaaauguacauuu

SEQ ID NO: 287150 - RNA, 19 nt, Artificial Sequence
  Description of Artificial Sequence: Synthetic oligonucleotide
cugcauaucacugcaguuu

SEQ ID NO: 287151 - RNA, 19 nt, Artificial Sequence
  Description of Artificial Sequence: Synthetic oligonucleotide
ccgauucacgguccgacuc

SEQ ID NO: 287152 - RNA, 19 nt, Artificial Sequence
  Description of Artificial Sequence: Synthetic oligonucleotide
ggccgaucgucaucaucag

SEQ ID NO: 287153 - RNA, 19 nt, Artificial Sequence
  Description of Artificial Sequence: Synthetic oligonucleotide
guguuguggaacgcaugga

SEQ ID NO: 287154 - RNA, 19 nt, Artificial Sequence
  Description of Artificial Sequence: Synthetic oligonucleotide
uggcuaugucucguuucuc

SEQ ID NO: 287155 - RNA, 19 nt, Artificial Sequence
  Description of Artificial Sequence: Synthetic oligonucleotide
ccgacucugcacuuggaga

SEQ ID NO: 287156 - RNA, 19 nt, Artificial Sequence
  Description of Artificial Sequence: Synthetic oligonucleotide
guaagucggagcacugccu

SEQ ID NO: 287157 - RNA, 19 nt, Artificial Sequence
  Description of Artificial Sequence: Synthetic oligonucleotide
cguuucguaauuguuggga

SEQ ID NO: 287158 - RNA, 19 nt, Artificial Sequence
  Description of Artificial Sequence: Synthetic oligonucleotide
gagagccgagaauuuucau

SEQ ID NO: 287159 - RNA, 19 nt, Artificial Sequence
  Description of Artificial Sequence: Synthetic oligonucleotide
gggugccacaugucuggcc

SEQ ID NO: 287160 - RNA, 19 nt, Artificial Sequence
  Description of Artificial Sequence: Synthetic oligonucleotide
ccauuggauggcauuguaa

SEQ ID NO: 287161 - RNA, 19 nt, Artificial Sequence
  Description of Artificial Sequence: Synthetic oligonucleotide
gcugaaagggcacccugua

SEQ ID NO: 287162 - RNA, 19 nt, Artificial Sequence
  Description of Artificial Sequence: Synthetic oligonucleotide
uugcuucgccuagguuucc

SEQ ID NO: 287163 - RNA, 19 nt, Artificial Sequence
  Description of Artificial Sequence: Synthetic oligonucleotide
ggacgaucggccugcaccu

SEQ ID NO: 287164 - RNA, 19 nt, Artificial Sequence
  Description of Artificial Sequence: Synthetic oligonucleotide
ggcuaaccaucugaaaugu

SEQ ID NO: 287165 - RNA, 19 nt, Artificial Sequence
  Description of Artificial Sequence: Synthetic oligonucleotide
gagcacgacuucgguguuc

SEQ ID NO: 287166 - RNA, 19 nt, Artificial Sequence
  Description of Artificial Sequence: Synthetic oligonucleotide
caaccacacgucacugaua

SEQ ID NO: 287167 - RNA, 19 nt, Artificial Sequence
  Description of Artificial Sequence: Synthetic oligonucleotide
gagucucauugcuccaguu

SEQ ID NO: 287168 - RNA, 19 nt, Artificial Sequence
  Description of Artificial Sequence: Synthetic oligonucleotide
uucuaagaucugggccaau

SEQ ID NO: 287169 - RNA, 19 nt, Artificial Sequence
  Description of Artificial Sequence: Synthetic oligonucleotide
augaucgagccagcuggua

SEQ ID NO: 287170 - RNA, 19 nt, Artificial Sequence
  Description of Artificial Sequence: Synthetic oligonucleotide
caccucgauaaauguacau

SEQ ID NO: 287171 - RNA, 19 nt, Artificial Sequence
  Description of Artificial Sequence: Synthetic oligonucleotide
ccuugcgggaaugcucuag

SEQ ID NO: 287172 - RNA, 19 nt, Artificial Sequence
  Description of Artificial Sequence: Synthetic oligonucleotide
gggaccaaaacugcuccua

SEQ ID NO: 287173 - RNA, 19 nt, Artificial Sequence
  Description of Artificial Sequence: Synthetic oligonucleotide
gggaaugcucuagcaucug

SEQ ID NO: 287174 - RNA, 19 nt, Artificial Sequence
  Description of Artificial Sequence: Synthetic oligonucleotide
gcacgguccagugaugcaa

SEQ ID NO: 287175 - RNA, 19 nt, Artificial Sequence
  Description of Artificial Sequence: Synthetic oligonucleotide
guauccuuugugggaccaa

SEQ ID NO: 287176 - RNA, 19 nt, Artificial Sequence
  Description of Artificial Sequence: Synthetic oligonucleotide
ccacauagaugugugcuaa

SEQ ID NO: 287177 - RNA, 19 nt, Artificial Sequence
  Description of Artificial Sequence: Synthetic oligonucleotide
caccagugaacaugaggau

SEQ ID NO: 287178 - RNA, 19 nt, Artificial Sequence
  Description of Artificial Sequence: Synthetic oligonucleotide
cugaaagggcacccuguau

SEQ ID NO: 287179 - RNA, 19 nt, Artificial Sequence
  Description of Artificial Sequence: Synthetic oligonucleotide
cuauugggccgaucgucau

SEQ ID NO: 287180 - RNA, 19 nt, Artificial Sequence
  Description of Artificial Sequence: Synthetic oligonucleotide
ccgacuccugucuuccuga

SEQ ID NO: 287181 - RNA, 19 nt, Artificial Sequence
  Description of Artificial Sequence: Synthetic oligonucleotide
guaagaccaaggccacguu

SEQ ID NO: 287182 - RNA, 19 nt, Artificial Sequence
  Description of Artificial Sequence: Synthetic oligonucleotide
gaacgccgcccuccaccuc

SEQ ID NO: 287183 - RNA, 19 nt, Artificial Sequence
  Description of Artificial Sequence: Synthetic oligonucleotide
gccgaucgucaucaucaga

SEQ ID NO: 287184 - RNA, 19 nt, Artificial Sequence
  Description of Artificial Sequence: Synthetic oligonucleotide
agccucgaucugaggccuc

SEQ ID NO: 287185 - RNA, 19 nt, Artificial Sequence
  Description of Artificial Sequence: Synthetic oligonucleotide
ccggagggacuucucccag

SEQ ID NO: 287186 - RNA, 19 nt, Artificial Sequence
  Description of Artificial Sequence: Synthetic oligonucleotide
ccgagaauuuucaucguuu

SEQ ID NO: 287187 - RNA, 19 nt, Artificial Sequence
  Description of Artificial Sequence: Synthetic oligonucleotide
gcuucgccuagguuuccaa

SEQ ID NO: 287188 - RNA, 19 nt, Artificial Sequence
  Description of Artificial Sequence: Synthetic oligonucleotide
uugggccgaucgucaucau

SEQ ID NO: 287189 - RNA, 19 nt, Artificial Sequence
  Description of Artificial Sequence: Synthetic oligonucleotide
ccagagcgccuucucuuuc

SEQ ID NO: 287190 - RNA, 19 nt, Artificial Sequence
  Description of Artificial Sequence: Synthetic oligonucleotide
gcuauuccugggauguccu

SEQ ID NO: 287191 - RNA, 19 nt, Artificial Sequence
  Description of Artificial Sequence: Synthetic oligonucleotide
cuguuucgucaucgucaga

SEQ ID NO: 287192 - RNA, 19 nt, Artificial Sequence
  Description of Artificial Sequence: Synthetic oligonucleotide
gccgagaauuuucaucguu

SEQ ID NO: 287193 - RNA, 19 nt, Artificial Sequence
  Description of Artificial Sequence: Synthetic oligonucleotide
ggacucuagcacaggaaau

SEQ ID NO: 287194 - RNA, 19 nt, Artificial Sequence
  Description of Artificial Sequence: Synthetic oligonucleotide
aggccacguuaaacaucag

SEQ ID NO: 287195 - RNA, 19 nt, Artificial Sequence
  Description of Artificial Sequence: Synthetic oligonucleotide
cggaccccugcuccgauuc

SEQ ID NO: 287196 - RNA, 19 nt, Artificial Sequence
  Description of Artificial Sequence: Synthetic oligonucleotide
gaaucucaggagggacgau

SEQ ID NO: 287197 - RNA, 19 nt, Artificial Sequence
  Description of Artificial Sequence: Synthetic oligonucleotide
cucgucaaacucgccuccu

SEQ ID NO: 287198 - RNA, 19 nt, Artificial Sequence
  Description of Artificial Sequence: Synthetic oligonucleotide
cgaucugaggccucauugu

SEQ ID NO: 287199 - RNA, 19 nt, Artificial Sequence
  Description of Artificial Sequence: Synthetic oligonucleotide
ggaccccugcuccgauuca

SEQ ID NO: 287200 - RNA, 19 nt, Artificial Sequence
  Description of Artificial Sequence: Synthetic oligonucleotide
ccuaugccauuggauggca

SEQ ID NO: 287201 - RNA, 19 nt, Artificial Sequence
  Description of Artificial Sequence: Synthetic oligonucleotide
cagaaucgcuauugcuauu

SEQ ID NO: 287202 - RNA, 19 nt, Artificial Sequence
  Description of Artificial Sequence: Synthetic oligonucleotide
cgacuucgguguucuggug

SEQ ID NO: 287203 - RNA, 19 nt, Artificial Sequence
  Description of Artificial Sequence: Synthetic oligonucleotide
gcacgacuucgguguucug

SEQ ID NO: 287204 - RNA, 19 nt, Artificial Sequence
  Description of Artificial Sequence: Synthetic oligonucleotide
ggccggucuauugggccga

SEQ ID NO: 287205 - RNA, 19 nt, Artificial Sequence
  Description of Artificial Sequence: Synthetic oligonucleotide
cacgagcuucucggaagua

SEQ ID NO: 287206 - RNA, 19 nt, Artificial Sequence
  Description of Artificial Sequence: Synthetic oligonucleotide
gcuccgauucacgguccga

SEQ ID NO: 287207 - RNA, 19 nt, Artificial Sequence
  Description of Artificial Sequence: Synthetic oligonucleotide
cgucacucgaugauauaau

SEQ ID NO: 287208 - RNA, 19 nt, Artificial Sequence
  Description of Artificial Sequence: Synthetic oligonucleotide
cgggccaaguagagcacga

SEQ ID NO: 287209 - RNA, 19 nt, Artificial Sequence
  Description of Artificial Sequence: Synthetic oligonucleotide
cgauucacgguccgacucu

SEQ ID NO: 287210 - RNA, 19 nt, Artificial Sequence
  Description of Artificial Sequence: Synthetic oligonucleotide
ggagggccccaacauuauu

SEQ ID NO: 287211 - RNA, 19 nt, Artificial Sequence
  Description of Artificial Sequence: Synthetic oligonucleotide
ccccacggagucuggugaa

SEQ ID NO: 287212 - RNA, 19 nt, Artificial Sequence
  Description of Artificial Sequence: Synthetic oligonucleotide
gacgaucggccugcaccuu

SEQ ID NO: 287213 - RNA, 19 nt, Artificial Sequence
  Description of Artificial Sequence: Synthetic oligonucleotide
cagaggaggccggucuauu

SEQ ID NO: 287214 - RNA, 19 nt, Artificial Sequence
  Description of Artificial Sequence: Synthetic oligonucleotide
cgguccgacucugcacuug

SEQ ID NO: 287215 - RNA, 19 nt, Artificial Sequence
  Description of Artificial Sequence: Synthetic oligonucleotide
ggacggcgcuucuuugguu

SEQ ID NO: 287216 - RNA, 19 nt, Artificial Sequence
  Description of Artificial Sequence: Synthetic oligonucleotide
gcugggcgagaaucauuuu

SEQ ID NO: 287217 - RNA, 19 nt, Artificial Sequence
  Description of Artificial Sequence: Synthetic oligonucleotide
cgccuagguuuccaagucu

SEQ ID NO: 287218 - RNA, 19 nt, Artificial Sequence
  Description of Artificial Sequence: Synthetic oligonucleotide
cccacggagucuggugaaa

SEQ ID NO: 287219 - RNA, 19 nt, Artificial Sequence
  Description of Artificial Sequence: Synthetic oligonucleotide
ccacggagucuggugaaau

SEQ ID NO: 287220 - RNA, 19 nt, Artificial Sequence
  Description of Artificial Sequence: Synthetic oligonucleotide
ccggucuauugggccgauc

SEQ ID NO: 287221 - RNA, 19 nt, Artificial Sequence
  Description of Artificial Sequence: Synthetic oligonucleotide
ccccaacauuauucagaau

SEQ ID NO: 287222 - RNA, 19 nt, Artificial Sequence
  Description of Artificial Sequence: Synthetic oligonucleotide
cgguguucuggugcuuaua

SEQ ID NO: 287223 - RNA, 19 nt, Artificial Sequence
  Description of Artificial Sequence: Synthetic oligonucleotide
gccggucuauugggccgau

SEQ ID NO: 287224 - RNA, 19 nt, Artificial Sequence
  Description of Artificial Sequence: Synthetic oligonucleotide
aauuuagccaagcaggaac

SEQ ID NO: 287225 - RNA, 19 nt, Artificial Sequence
  Description of Artificial Sequence: Synthetic oligonucleotide
aaauuggacugguaaaagc

SEQ ID NO: 287226 - RNA, 19 nt, Artificial Sequence
  Description of Artificial Sequence: Synthetic oligonucleotide
augauuauuucccuugugc

SEQ ID NO: 287227 - RNA, 19 nt, Artificial Sequence
  Description of Artificial Sequence: Synthetic oligonucleotide
aacaacaaaagcuaggcaa

SEQ ID NO: 287228 - RNA, 19 nt, Artificial Sequence
  Description of Artificial Sequence: Synthetic oligonucleotide
agaguuuagaacuacacca

SEQ ID NO: 287229 - RNA, 19 nt, Artificial Sequence
  Description of Artificial Sequence: Synthetic oligonucleotide
agaaauuuagccaagcagg

SEQ ID NO: 287230 - RNA, 19 nt, Artificial Sequence
  Description of Artificial Sequence: Synthetic oligonucleotide
ugggauaugauuauuuccc

SEQ ID NO: 287231 - RNA, 19 nt, Artificial Sequence
  Description of Artificial Sequence: Synthetic oligonucleotide
gagaaauuuagccaagcag

SEQ ID NO: 287232 - RNA, 19 nt, Artificial Sequence
  Description of Artificial Sequence: Synthetic oligonucleotide
ucaacaacguaagaaaagg

SEQ ID NO: 287233 - RNA, 19 nt, Artificial Sequence
  Description of Artificial Sequence: Synthetic oligonucleotide
agaacugcggcucagcugg

SEQ ID NO: 287234 - RNA, 19 nt, Artificial Sequence
  Description of Artificial Sequence: Synthetic oligonucleotide
gaggcauccaaccucaugg

SEQ ID NO: 287235 - RNA, 19 nt, Artificial Sequence
  Description of Artificial Sequence: Synthetic oligonucleotide
aaucuuugaaaucucacaa

SEQ ID NO: 287236 - RNA, 19 nt, Artificial Sequence
  Description of Artificial Sequence: Synthetic oligonucleotide
agaaagaccguucugaaga

SEQ ID NO: 287237 - RNA, 19 nt, Artificial Sequence
  Description of Artificial Sequence: Synthetic oligonucleotide
cauggcggaauaaagaggg

SEQ ID NO: 287238 - RNA, 19 nt, Artificial Sequence
  Description of Artificial Sequence: Synthetic oligonucleotide
ucaauagucacuuugucau

SEQ ID NO: 287239 - RNA, 19 nt, Artificial Sequence
  Description of Artificial Sequence: Synthetic oligonucleotide
aauuauuagcauuaauuua

SEQ ID NO: 287240 - RNA, 19 nt, Artificial Sequence
  Description of Artificial Sequence: Synthetic oligonucleotide
uuacaauccacccugaaua

SEQ ID NO: 287241 - RNA, 19 nt, Artificial Sequence
  Description of Artificial Sequence: Synthetic oligonucleotide
guuaccuccacuucguugg

SEQ ID NO: 287242 - RNA, 19 nt, Artificial Sequence
  Description of Artificial Sequence: Synthetic oligonucleotide
uccacccugaauaucaagg

SEQ ID NO: 287243 - RNA, 19 nt, Artificial Sequence
  Description of Artificial Sequence: Synthetic oligonucleotide
ucuuacacaagacaaucca

SEQ ID NO: 287244 - RNA, 19 nt, Artificial Sequence
  Description of Artificial Sequence: Synthetic oligonucleotide
acuugugauaaccacaucu

SEQ ID NO: 287245 - RNA, 19 nt, Artificial Sequence
  Description of Artificial Sequence: Synthetic oligonucleotide
ucuuauagacacuugggac

SEQ ID NO: 287246 - RNA, 19 nt, Artificial Sequence
  Description of Artificial Sequence: Synthetic oligonucleotide
aauuaugucgacgacggcu

SEQ ID NO: 287247 - RNA, 19 nt, Artificial Sequence
  Description of Artificial Sequence: Synthetic oligonucleotide
aguuuagaacuacaccagc

SEQ ID NO: 287248 - RNA, 19 nt, Artificial Sequence
  Description of Artificial Sequence: Synthetic oligonucleotide
ucuccgguaguccuuaggg

SEQ ID NO: 287249 - RNA, 19 nt, Artificial Sequence
  Description of Artificial Sequence: Synthetic oligonucleotide
uaaucuuugaaaucucaca

SEQ ID NO: 287250 - RNA, 19 nt, Artificial Sequence
  Description of Artificial Sequence: Synthetic oligonucleotide
aagaauaacauuuccuaua

SEQ ID NO: 287251 - RNA, 19 nt, Artificial Sequence
  Description of Artificial Sequence: Synthetic oligonucleotide
uucuuauagacacuuggga

SEQ ID NO: 287252 - RNA, 19 nt, Artificial Sequence
  Description of Artificial Sequence: Synthetic oligonucleotide
agcuaggcaagacaauugc

SEQ ID NO: 287253 - RNA, 19 nt, Artificial Sequence
  Description of Artificial Sequence: Synthetic oligonucleotide
gugaaugcagcagagaagg

SEQ ID NO: 287254 - RNA, 19 nt, Artificial Sequence
  Description of Artificial Sequence: Synthetic oligonucleotide
cauaugcucccuuagagac

SEQ ID NO: 287255 - RNA, 19 nt, Artificial Sequence
  Description of Artificial Sequence: Synthetic oligonucleotide
ugguuaagggcuaaguuac

SEQ ID NO: 287256 - RNA, 19 nt, Artificial Sequence
  Description of Artificial Sequence: Synthetic oligonucleotide
uucaauagucacuuuguca

SEQ ID NO: 287257 - RNA, 19 nt, Artificial Sequence
  Description of Artificial Sequence: Synthetic oligonucleotide
aauuggacugguaaaagca

SEQ ID NO: 287258 - RNA, 19 nt, Artificial Sequence
  Description of Artificial Sequence: Synthetic oligonucleotide
gaaccaaguucuuauagac

SEQ ID NO: 287259 - RNA, 19 nt, Artificial Sequence
  Description of Artificial Sequence: Synthetic oligonucleotide
uuaagggcuaaguuacccg

SEQ ID NO: 287260 - RNA, 19 nt, Artificial Sequence
  Description of Artificial Sequence: Synthetic oligonucleotide
cacguuaguuauuuuaugc

SEQ ID NO: 287261 - RNA, 19 nt, Artificial Sequence
  Description of Artificial Sequence: Synthetic oligonucleotide
cuuagagacaccagagucc

SEQ ID NO: 287262 - RNA, 19 nt, Artificial Sequence
  Description of Artificial Sequence: Synthetic oligonucleotide
ucuacauugauagugcuuc

SEQ ID NO: 287263 - RNA, 19 nt, Artificial Sequence
  Description of Artificial Sequence: Synthetic oligonucleotide
agaggaauuaugucgacga

SEQ ID NO: 287264 - RNA, 19 nt, Artificial Sequence
  Description of Artificial Sequence: Synthetic oligonucleotide
aggcuuaggaaccaaguuc

SEQ ID NO: 287265 - RNA, 19 nt, Artificial Sequence
  Description of Artificial Sequence: Synthetic oligonucleotide
acagacuugugauaaccac

SEQ ID NO: 287266 - RNA, 19 nt, Artificial Sequence
  Description of Artificial Sequence: Synthetic oligonucleotide
gagaguuuagaacuacacc

SEQ ID NO: 287267 - RNA, 19 nt, Artificial Sequence
  Description of Artificial Sequence: Synthetic oligonucleotide
uucauauuuuacaauccac

SEQ ID NO: 287268 - RNA, 19 nt, Artificial Sequence
  Description of Artificial Sequence: Synthetic oligonucleotide
auuuauuccacguuaguua

SEQ ID NO: 287269 - RNA, 19 nt, Artificial Sequence
  Description of Artificial Sequence: Synthetic oligonucleotide
ugauugcuugagcacaggg

SEQ ID NO: 287270 - RNA, 19 nt, Artificial Sequence
  Description of Artificial Sequence: Synthetic oligonucleotide
ugugcaugaaguauucaac

SEQ ID NO: 287271 - RNA, 19 nt, Artificial Sequence
  Description of Artificial Sequence: Synthetic oligonucleotide
aacguaagaaaaggaaaag

SEQ ID NO: 287272 - RNA, 19 nt, Artificial Sequence
  Description of Artificial Sequence: Synthetic oligonucleotide
ugagaaauuuagccaagca

SEQ ID NO: 287273 - RNA, 19 nt, Artificial Sequence
  Description of Artificial Sequence: Synthetic oligonucleotide
acauuugcuugguuaaggg

SEQ ID NO: 287274 - RNA, 19 nt, Artificial Sequence
  Description of Artificial Sequence: Synthetic oligonucleotide
uugacaaugauugcuugag

SEQ ID NO: 287275 - RNA, 19 nt, Artificial Sequence
  Description of Artificial Sequence: Synthetic oligonucleotide
uuuccuauauccaaauauu

SEQ ID NO: 287276 - RNA, 19 nt, Artificial Sequence
  Description of Artificial Sequence: Synthetic oligonucleotide
uuaggaaccaaguucuuau

SEQ ID NO: 287277 - RNA, 19 nt, Artificial Sequence
  Description of Artificial Sequence: Synthetic oligonucleotide
cucucuauuaagcagauaa

SEQ ID NO: 287278 - RNA, 19 nt, Artificial Sequence
  Description of Artificial Sequence: Synthetic oligonucleotide
agaauaacauuuccuauau

SEQ ID NO: 287279 - RNA, 19 nt, Artificial Sequence
  Description of Artificial Sequence: Synthetic oligonucleotide
gcugaauucaguuuucucc

SEQ ID NO: 287280 - RNA, 19 nt, Artificial Sequence
  Description of Artificial Sequence: Synthetic oligonucleotide
aauaucaaggcugcaagaa

SEQ ID NO: 287281 - RNA, 19 nt, Artificial Sequence
  Description of Artificial Sequence: Synthetic oligonucleotide
aaagcagacucccggcuag

SEQ ID NO: 287282 - RNA, 19 nt, Artificial Sequence
  Description of Artificial Sequence: Synthetic oligonucleotide
uuuauuccacguuaguuau

SEQ ID NO: 287283 - RNA, 19 nt, Artificial Sequence
  Description of Artificial Sequence: Synthetic oligonucleotide
uuuacaauccacccugaau

SEQ ID NO: 287284 - RNA, 19 nt, Artificial Sequence
  Description of Artificial Sequence: Synthetic oligonucleotide
uuauaacuucaauagucac

SEQ ID NO: 287285 - RNA, 19 nt, Artificial Sequence
  Description of Artificial Sequence: Synthetic oligonucleotide
uucuuacacaagacaaucc

SEQ ID NO: 287286 - RNA, 19 nt, Artificial Sequence
  Description of Artificial Sequence: Synthetic oligonucleotide
aguucgacgggucaauuug

SEQ ID NO: 287287 - RNA, 19 nt, Artificial Sequence
  Description of Artificial Sequence: Synthetic oligonucleotide
uuaguuauuuuaugcagua

SEQ ID NO: 287288 - RNA, 19 nt, Artificial Sequence
  Description of Artificial Sequence: Synthetic oligonucleotide
gaugacuuagcugacugug

SEQ ID NO: 287289 - RNA, 19 nt, Artificial Sequence
  Description of Artificial Sequence: Synthetic oligonucleotide
gauugcuugagcacagggg

SEQ ID NO: 287290 - RNA, 19 nt, Artificial Sequence
  Description of Artificial Sequence: Synthetic oligonucleotide
uuugggauaugauuauuuc

SEQ ID NO: 287291 - RNA, 19 nt, Artificial Sequence
  Description of Artificial Sequence: Synthetic oligonucleotide
ugacuuagcugacuguggc

SEQ ID NO: 287292 - RNA, 19 nt, Artificial Sequence
  Description of Artificial Sequence: Synthetic oligonucleotide
gucacuuugucauugacaa

SEQ ID NO: 287293 - RNA, 19 nt, Artificial Sequence
  Description of Artificial Sequence: Synthetic oligonucleotide
aggaaccaaguucuuauag

SEQ ID NO: 287294 - RNA, 19 nt, Artificial Sequence
  Description of Artificial Sequence: Synthetic oligonucleotide
uccguguuugucaaaggug

SEQ ID NO: 287295 - RNA, 19 nt, Artificial Sequence
  Description of Artificial Sequence: Synthetic oligonucleotide
ggcguugagaaauuuagcc

SEQ ID NO: 287296 - RNA, 19 nt, Artificial Sequence
  Description of Artificial Sequence: Synthetic oligonucleotide
uuucuuacacaagacaauc

SEQ ID NO: 287297 - RNA, 19 nt, Artificial Sequence
  Description of Artificial Sequence: Synthetic oligonucleotide
aaucauggcggaauaaaga

SEQ ID NO: 287298 - RNA, 19 nt, Artificial Sequence
  Description of Artificial Sequence: Synthetic oligonucleotide
cuaaacacaaagcugagcu

SEQ ID NO: 287299 - RNA, 19 nt, Artificial Sequence
  Description of Artificial Sequence: Synthetic oligonucleotide
cuaaguuacccgagcagcc

SEQ ID NO: 287300 - RNA, 19 nt, Artificial Sequence
  Description of Artificial Sequence: Synthetic oligonucleotide
acguuaguuauuuuaugca

SEQ ID NO: 287301 - RNA, 19 nt, Artificial Sequence
  Description of Artificial Sequence: Synthetic oligonucleotide
uugugcaugaaguauucaa

SEQ ID NO: 287302 - RNA, 19 nt, Artificial Sequence
  Description of Artificial Sequence: Synthetic oligonucleotide
ucgacgacggcuuacucca

SEQ ID NO: 287303 - RNA, 19 nt, Artificial Sequence
  Description of Artificial Sequence: Synthetic oligonucleotide
gaaucauggcggaauaaag

SEQ ID NO: 287304 - RNA, 19 nt, Artificial Sequence
  Description of Artificial Sequence: Synthetic oligonucleotide
ucucuauuaagcagauaac

SEQ ID NO: 287305 - RNA, 19 nt, Artificial Sequence
  Description of Artificial Sequence: Synthetic oligonucleotide
uuagagacaccagagucca

SEQ ID NO: 287306 - RNA, 19 nt, Artificial Sequence
  Description of Artificial Sequence: Synthetic oligonucleotide
uccacguuaguuauuuuau

SEQ ID NO: 287307 - RNA, 19 nt, Artificial Sequence
  Description of Artificial Sequence: Synthetic oligonucleotide
uccuauauccaaauauuuu

SEQ ID NO: 287308 - RNA, 19 nt, Artificial Sequence
  Description of Artificial Sequence: Synthetic oligonucleotide
aggagcugaucucaauugg

SEQ ID NO: 287309 - RNA, 19 nt, Artificial Sequence
  Description of Artificial Sequence: Synthetic oligonucleotide
gaauucaguuuucucccag

SEQ ID NO: 287310 - RNA, 19 nt, Artificial Sequence
  Description of Artificial Sequence: Synthetic oligonucleotide
uaggcaagacaauugcucu

SEQ ID NO: 287311 - RNA, 19 nt, Artificial Sequence
  Description of Artificial Sequence: Synthetic oligonucleotide
acuaggcggauuuucccac

SEQ ID NO: 287312 - RNA, 19 nt, Artificial Sequence
  Description of Artificial Sequence: Synthetic oligonucleotide
cacucuacauugauagugc

SEQ ID NO: 287313 - RNA, 19 nt, Artificial Sequence
  Description of Artificial Sequence: Synthetic oligonucleotide
uuaauaaccugugcucugc

SEQ ID NO: 287314 - RNA, 19 nt, Artificial Sequence
  Description of Artificial Sequence: Synthetic oligonucleotide
ugcuuuuaauaaccugugc

SEQ ID NO: 287315 - RNA, 19 nt, Artificial Sequence
  Description of Artificial Sequence: Synthetic oligonucleotide
aaagcuaggcaagacaauu

SEQ ID NO: 287316 - RNA, 19 nt, Artificial Sequence
  Description of Artificial Sequence: Synthetic oligonucleotide
uaagggcuaaguuacccga

SEQ ID NO: 287317 - RNA, 19 nt, Artificial Sequence
  Description of Artificial Sequence: Synthetic oligonucleotide
gaagacaaccuuguucucc

SEQ ID NO: 287318 - RNA, 19 nt, Artificial Sequence
  Description of Artificial Sequence: Synthetic oligonucleotide
ugaaggggucccaauaggu

SEQ ID NO: 287319 - RNA, 19 nt, Artificial Sequence
  Description of Artificial Sequence: Synthetic oligonucleotide
gaguuuagaacuacaccag

SEQ ID NO: 287320 - RNA, 19 nt, Artificial Sequence
  Description of Artificial Sequence: Synthetic oligonucleotide
aaugauugcuugagcacag

SEQ ID NO: 287321 - RNA, 19 nt, Artificial Sequence
  Description of Artificial Sequence: Synthetic oligonucleotide
agggcuaaguuacccgagc

SEQ ID NO: 287322 - RNA, 19 nt, Artificial Sequence
  Description of Artificial Sequence: Synthetic oligonucleotide
uauuuauuccacguuaguu

SEQ ID NO: 287323 - RNA, 19 nt, Artificial Sequence
  Description of Artificial Sequence: Synthetic oligonucleotide
uguuaccuccacuucguug

SEQ ID NO: 287324 - RNA, 19 nt, Artificial Sequence
  Description of Artificial Sequence: Synthetic oligonucleotide
uuauuagcauuaauuuaau

SEQ ID NO: 287325 - RNA, 19 nt, Artificial Sequence
  Description of Artificial Sequence: Synthetic oligonucleotide
ucuaccuucuccacgggau

SEQ ID NO: 287326 - RNA, 19 nt, Artificial Sequence
  Description of Artificial Sequence: Synthetic oligonucleotide
aggauauuccugccauccc

SEQ ID NO: 287327 - RNA, 19 nt, Artificial Sequence
  Description of Artificial Sequence: Synthetic oligonucleotide
gagaaagaccguucugaag

SEQ ID NO: 287328 - RNA, 19 nt, Artificial Sequence
  Description of Artificial Sequence: Synthetic oligonucleotide
uuugaugacuagcaucuuu

SEQ ID NO: 287329 - RNA, 19 nt, Artificial Sequence
  Description of Artificial Sequence: Synthetic oligonucleotide
uuggacugguaaaagcaga

SEQ ID NO: 287330 - RNA, 19 nt, Artificial Sequence
  Description of Artificial Sequence: Synthetic oligonucleotide
aggugaaugcagcagagaa

SEQ ID NO: 287331 - RNA, 19 nt, Artificial Sequence
  Description of Artificial Sequence: Synthetic oligonucleotide
uuccuauauccaaauauuu

SEQ ID NO: 287332 - RNA, 19 nt, Artificial Sequence
  Description of Artificial Sequence: Synthetic oligonucleotide
uggacugguaaaagcagac

SEQ ID NO: 287333 - RNA, 19 nt, Artificial Sequence
  Description of Artificial Sequence: Synthetic oligonucleotide
ugcaugaaguauucaacaa

SEQ ID NO: 287334 - RNA, 19 nt, Artificial Sequence
  Description of Artificial Sequence: Synthetic oligonucleotide
uccgguaguccuuaggggu

SEQ ID NO: 287335 - RNA, 19 nt, Artificial Sequence
  Description of Artificial Sequence: Synthetic oligonucleotide
uguaucuuccacgagguuu

SEQ ID NO: 287336 - RNA, 19 nt, Artificial Sequence
  Description of Artificial Sequence: Synthetic oligonucleotide
ugguaaaagcagacucccg

SEQ ID NO: 287337 - RNA, 19 nt, Artificial Sequence
  Description of Artificial Sequence: Synthetic oligonucleotide
gacgggucaauuuggucag

SEQ ID NO: 287338 - RNA, 19 nt, Artificial Sequence
  Description of Artificial Sequence: Synthetic oligonucleotide
uccacaauggguagagaaa

SEQ ID NO: 287339 - RNA, 19 nt, Artificial Sequence
  Description of Artificial Sequence: Synthetic oligonucleotide
ucuucgaacugcaacuuuu

SEQ ID NO: 287340 - RNA, 19 nt, Artificial Sequence
  Description of Artificial Sequence: Synthetic oligonucleotide
cuccaagcggagaacaggc

SEQ ID NO: 287341 - RNA, 19 nt, Artificial Sequence
  Description of Artificial Sequence: Synthetic oligonucleotide
aauuggagggguaguacug

SEQ ID NO: 287342 - RNA, 19 nt, Artificial Sequence
  Description of Artificial Sequence: Synthetic oligonucleotide
uaugcucccuuagagacac

SEQ ID NO: 287343 - RNA, 19 nt, Artificial Sequence
  Description of Artificial Sequence: Synthetic oligonucleotide
caauccacccugaauauca

SEQ ID NO: 287344 - RNA, 19 nt, Artificial Sequence
  Description of Artificial Sequence: Synthetic oligonucleotide
aaggcaauucucaucauuu

SEQ ID NO: 287345 - RNA, 19 nt, Artificial Sequence
  Description of Artificial Sequence: Synthetic oligonucleotide
aacccauuucuucguagcu

SEQ ID NO: 287346 - RNA, 19 nt, Artificial Sequence
  Description of Artificial Sequence: Synthetic oligonucleotide
guggcguugagaaauuuag

SEQ ID NO: 287347 - RNA, 19 nt, Artificial Sequence
  Description of Artificial Sequence: Synthetic oligonucleotide
gaaauuuagccaagcagga

SEQ ID NO: 287348 - RNA, 19 nt, Artificial Sequence
  Description of Artificial Sequence: Synthetic oligonucleotide
cacucuuaauuuuaaagaa

SEQ ID NO: 287349 - RNA, 19 nt, Artificial Sequence
  Description of Artificial Sequence: Synthetic oligonucleotide
ucuaaacacaaagcugagc

SEQ ID NO: 287350 - RNA, 19 nt, Artificial Sequence
  Description of Artificial Sequence: Synthetic oligonucleotide
agcuuuccaagcauugggc

SEQ ID NO: 287351 - RNA, 19 nt, Artificial Sequence
  Description of Artificial Sequence: Synthetic oligonucleotide
ugguuuaguaacagaaauu

SEQ ID NO: 287352 - RNA, 19 nt, Artificial Sequence
  Description of Artificial Sequence: Synthetic oligonucleotide
agaaauuggacugguaaaa

SEQ ID NO: 287353 - RNA, 19 nt, Artificial Sequence
  Description of Artificial Sequence: Synthetic oligonucleotide
gucaauuuggucaggcgag

SEQ ID NO: 287354 - RNA, 19 nt, Artificial Sequence
  Description of Artificial Sequence: Synthetic oligonucleotide
caucuuugaggguugcuug

SEQ ID NO: 287355 - RNA, 19 nt, Artificial Sequence
  Description of Artificial Sequence: Synthetic oligonucleotide
uuccacguuaguuauuuua

SEQ ID NO: 287356 - RNA, 19 nt, Artificial Sequence
  Description of Artificial Sequence: Synthetic oligonucleotide
aaagggauccugauuugug

SEQ ID NO: 287357 - RNA, 19 nt, Artificial Sequence
  Description of Artificial Sequence: Synthetic oligonucleotide
ugcacggccccacagguac

SEQ ID NO: 287358 - RNA, 19 nt, Artificial Sequence
  Description of Artificial Sequence: Synthetic oligonucleotide
gguacagccuuuccgagag

SEQ ID NO: 287359 - RNA, 19 nt, Artificial Sequence
  Description of Artificial Sequence: Synthetic oligonucleotide
caacagacuugugauaacc

SEQ ID NO: 287360 - RNA, 19 nt, Artificial Sequence
  Description of Artificial Sequence: Synthetic oligonucleotide
ugaguggaaggcaauucuc

SEQ ID NO: 287361 - RNA, 19 nt, Artificial Sequence
  Description of Artificial Sequence: Synthetic oligonucleotide
guuaagggcuaaguuaccc

SEQ ID NO: 287362 - RNA, 19 nt, Artificial Sequence
  Description of Artificial Sequence: Synthetic oligonucleotide
agagugucaccucuguggu

SEQ ID NO: 287363 - RNA, 19 nt, Artificial Sequence
  Description of Artificial Sequence: Synthetic oligonucleotide
ucgaacugcaacuuuucua

SEQ ID NO: 287364 - RNA, 19 nt, Artificial Sequence
  Description of Artificial Sequence: Synthetic oligonucleotide
uugcugaaaugaaaaggaa

SEQ ID NO: 287365 - RNA, 19 nt, Artificial Sequence
  Description of Artificial Sequence: Synthetic oligonucleotide
aaagggugcuuaagcaguc

SEQ ID NO: 287366 - RNA, 19 nt, Artificial Sequence
  Description of Artificial Sequence: Synthetic oligonucleotide
ccguguuugucaaaggugg

SEQ ID NO: 287367 - RNA, 19 nt, Artificial Sequence
  Description of Artificial Sequence: Synthetic oligonucleotide
uauuccacguuaguuauuu

SEQ ID NO: 287368 - RNA, 19 nt, Artificial Sequence
  Description of Artificial Sequence: Synthetic oligonucleotide
uauuagcauuaauuuaaua

SEQ ID NO: 287369 - RNA, 19 nt, Artificial Sequence
  Description of Artificial Sequence: Synthetic oligonucleotide
ucuacuuccaggcgucguc

SEQ ID NO: 287370 - RNA, 19 nt, Artificial Sequence
  Description of Artificial Sequence: Synthetic oligonucleotide
uaguuauuuuaugcaguag

SEQ ID NO: 287371 - RNA, 19 nt, Artificial Sequence
  Description of Artificial Sequence: Synthetic oligonucleotide
agugucgaugguuuccugu

SEQ ID NO: 287372 - RNA, 19 nt, Artificial Sequence
  Description of Artificial Sequence: Synthetic oligonucleotide
accacauuugcuugguuaa

SEQ ID NO: 287373 - RNA, 19 nt, Artificial Sequence
  Description of Artificial Sequence: Synthetic oligonucleotide
cauugacaaugauugcuug

SEQ ID NO: 287374 - RNA, 19 nt, Artificial Sequence
  Description of Artificial Sequence: Synthetic oligonucleotide
aagaccguucugaagacaa

SEQ ID NO: 287375 - RNA, 19 nt, Artificial Sequence
  Description of Artificial Sequence: Synthetic oligonucleotide
auaucaaggcugcaagaau

SEQ ID NO: 287376 - RNA, 19 nt, Artificial Sequence
  Description of Artificial Sequence: Synthetic oligonucleotide
ugaggcauccaaccucaug

SEQ ID NO: 287377 - RNA, 19 nt, Artificial Sequence
  Description of Artificial Sequence: Synthetic oligonucleotide
aggcaagacaauugcucuc

SEQ ID NO: 287378 - RNA, 19 nt, Artificial Sequence
  Description of Artificial Sequence: Synthetic oligonucleotide
gagaacaggccagaacugc

SEQ ID NO: 287379 - RNA, 19 nt, Artificial Sequence
  Description of Artificial Sequence: Synthetic oligonucleotide
ugugcacggccccacaggu

SEQ ID NO: 287380 - RNA, 19 nt, Artificial Sequence
  Description of Artificial Sequence: Synthetic oligonucleotide
ucccuaaucucuguuggug

SEQ ID NO: 287381 - RNA, 19 nt, Artificial Sequence
  Description of Artificial Sequence: Synthetic oligonucleotide
aggauccucagagugucac

SEQ ID NO: 287382 - RNA, 19 nt, Artificial Sequence
  Description of Artificial Sequence: Synthetic oligonucleotide
caagcggagaacaggccag

SEQ ID NO: 287383 - RNA, 19 nt, Artificial Sequence
  Description of Artificial Sequence: Synthetic oligonucleotide
aucucaauuggagggguag

SEQ ID NO: 287384 - RNA, 19 nt, Artificial Sequence
  Description of Artificial Sequence: Synthetic oligonucleotide
ggaauaaagaggguuggug

SEQ ID NO: 287385 - RNA, 19 nt, Artificial Sequence
  Description of Artificial Sequence: Synthetic oligonucleotide
cagacucccggcuagagga

SEQ ID NO: 287386 - RNA, 19 nt, Artificial Sequence
  Description of Artificial Sequence: Synthetic oligonucleotide
cucuaaacacaaagcugag

SEQ ID NO: 287387 - RNA, 19 nt, Artificial Sequence
  Description of Artificial Sequence: Synthetic oligonucleotide
ucuccguguuugucaaagg

SEQ ID NO: 287388 - RNA, 19 nt, Artificial Sequence
  Description of Artificial Sequence: Synthetic oligonucleotide
guagagaaagaccguucug

SEQ ID NO: 287389 - RNA, 19 nt, Artificial Sequence
  Description of Artificial Sequence: Synthetic oligonucleotide
ucaauuggagggguaguac

SEQ ID NO: 287390 - RNA, 19 nt, Artificial Sequence
  Description of Artificial Sequence: Synthetic oligonucleotide
aagcuaggcaagacaauug

SEQ ID NO: 287391 - RNA, 19 nt, Artificial Sequence
  Description of Artificial Sequence: Synthetic oligonucleotide
gucgacgacggcuuacucc

SEQ ID NO: 287392 - RNA, 19 nt, Artificial Sequence
  Description of Artificial Sequence: Synthetic oligonucleotide
ucuucacacucuacauuga

SEQ ID NO: 287393 - RNA, 19 nt, Artificial Sequence
  Description of Artificial Sequence: Synthetic oligonucleotide
agagaaagaccguucugaa

SEQ ID NO: 287394 - RNA, 19 nt, Artificial Sequence
  Description of Artificial Sequence: Synthetic oligonucleotide
acuuagcugacuguggcgu

SEQ ID NO: 287395 - RNA, 19 nt, Artificial Sequence
  Description of Artificial Sequence: Synthetic oligonucleotide
acccugaauaucaaggcug

SEQ ID NO: 287396 - RNA, 19 nt, Artificial Sequence
  Description of Artificial Sequence: Synthetic oligonucleotide
aaauuuagccaagcaggaa

SEQ ID NO: 287397 - RNA, 19 nt, Artificial Sequence
  Description of Artificial Sequence: Synthetic oligonucleotide
agaaucauggcggaauaaa

SEQ ID NO: 287398 - RNA, 19 nt, Artificial Sequence
  Description of Artificial Sequence: Synthetic oligonucleotide
cugaucucaauuggagggg

SEQ ID NO: 287399 - RNA, 19 nt, Artificial Sequence
  Description of Artificial Sequence: Synthetic oligonucleotide
uacaauccacccugaauau

SEQ ID NO: 287400 - RNA, 19 nt, Artificial Sequence
  Description of Artificial Sequence: Synthetic oligonucleotide
acgggauaggugcucuccg

SEQ ID NO: 287401 - RNA, 19 nt, Artificial Sequence
  Description of Artificial Sequence: Synthetic oligonucleotide
ggucaauuuggucaggcga

SEQ ID NO: 287402 - RNA, 19 nt, Artificial Sequence
  Description of Artificial Sequence: Synthetic oligonucleotide
aggcgagaggagcugaucu

SEQ ID NO: 287403 - RNA, 19 nt, Artificial Sequence
  Description of Artificial Sequence: Synthetic oligonucleotide
gcaugaaguauucaacaac

SEQ ID NO: 287404 - RNA, 19 nt, Artificial Sequence
  Description of Artificial Sequence: Synthetic oligonucleotide
aagcuguugagcagagcag

SEQ ID NO: 287405 - RNA, 19 nt, Artificial Sequence
  Description of Artificial Sequence: Synthetic oligonucleotide
accucgggaagagccaugc

SEQ ID NO: 287406 - RNA, 19 nt, Artificial Sequence
  Description of Artificial Sequence: Synthetic oligonucleotide
ucuccauuccguucauccu

SEQ ID NO: 287407 - RNA, 19 nt, Artificial Sequence
  Description of Artificial Sequence: Synthetic oligonucleotide
auuuagccaagcaggaaca

SEQ ID NO: 287408 - RNA, 19 nt, Artificial Sequence
  Description of Artificial Sequence: Synthetic oligonucleotide
uccagugucgaugguuucc

SEQ ID NO: 287409 - RNA, 19 nt, Artificial Sequence
  Description of Artificial Sequence: Synthetic oligonucleotide
cuccgguaguccuuagggg

SEQ ID NO: 287410 - RNA, 19 nt, Artificial Sequence
  Description of Artificial Sequence: Synthetic oligonucleotide
ugugaguggaaggcaauuc

SEQ ID NO: 287411 - RNA, 19 nt, Artificial Sequence
  Description of Artificial Sequence: Synthetic oligonucleotide
uccuguccguaguucgacg

SEQ ID NO: 287412 - RNA, 19 nt, Artificial Sequence
  Description of Artificial Sequence: Synthetic oligonucleotide
cguuaguuauuuuaugcag

SEQ ID NO: 287413 - RNA, 19 nt, Artificial Sequence
  Description of Artificial Sequence: Synthetic oligonucleotide
ugguucaugccaucaugac

SEQ ID NO: 287414 - RNA, 19 nt, Artificial Sequence
  Description of Artificial Sequence: Synthetic oligonucleotide
augacuuagcugacugugg

SEQ ID NO: 287415 - RNA, 19 nt, Artificial Sequence
  Description of Artificial Sequence: Synthetic oligonucleotide
acucuacauugauagugcu

SEQ ID NO: 287416 - RNA, 19 nt, Artificial Sequence
  Description of Artificial Sequence: Synthetic oligonucleotide
cucuccguguuugucaaag

SEQ ID NO: 287417 - RNA, 19 nt, Artificial Sequence
  Description of Artificial Sequence: Synthetic oligonucleotide
ucaacagacuugugauaac

SEQ ID NO: 287418 - RNA, 19 nt, Artificial Sequence
  Description of Artificial Sequence: Synthetic oligonucleotide
gcuaguaccacugguuuag

SEQ ID NO: 287419 - RNA, 19 nt, Artificial Sequence
  Description of Artificial Sequence: Synthetic oligonucleotide
agacuugugauaaccacau

SEQ ID NO: 287420 - RNA, 19 nt, Artificial Sequence
  Description of Artificial Sequence: Synthetic oligonucleotide
uucgacgggucaauuuggu

SEQ ID NO: 287421 - RNA, 19 nt, Artificial Sequence
  Description of Artificial Sequence: Synthetic oligonucleotide
uccaagcggagaacaggcc

SEQ ID NO: 287422 - RNA, 19 nt, Artificial Sequence
  Description of Artificial Sequence: Synthetic oligonucleotide
gaccaugguugacacuuug

SEQ ID NO: 287423 - RNA, 19 nt, Artificial Sequence
  Description of Artificial Sequence: Synthetic oligonucleotide
gcuaaguuacccgagcagc

SEQ ID NO: 287424 - RNA, 19 nt, Artificial Sequence
  Description of Artificial Sequence: Synthetic oligonucleotide
uccguaguucgacggguca

SEQ ID NO: 287425 - RNA, 19 nt, Artificial Sequence
  Description of Artificial Sequence: Synthetic oligonucleotide
caacaacguaagaaaagga

SEQ ID NO: 287426 - RNA, 19 nt, Artificial Sequence
  Description of Artificial Sequence: Synthetic oligonucleotide
uccauuccguucauccuuc

SEQ ID NO: 287427 - RNA, 19 nt, Artificial Sequence
  Description of Artificial Sequence: Synthetic oligonucleotide
ucucucuuugggauaugau

SEQ ID NO: 287428 - RNA, 19 nt, Artificial Sequence
  Description of Artificial Sequence: Synthetic oligonucleotide
acaauccacccugaauauc

SEQ ID NO: 287429 - RNA, 19 nt, Artificial Sequence
  Description of Artificial Sequence: Synthetic oligonucleotide
ggaaccaaguucuuauaga

SEQ ID NO: 287430 - RNA, 19 nt, Artificial Sequence
  Description of Artificial Sequence: Synthetic oligonucleotide
aaagaccguucugaagaca

SEQ ID NO: 287431 - RNA, 19 nt, Artificial Sequence
  Description of Artificial Sequence: Synthetic oligonucleotide
cacuucguugguucaugcc

SEQ ID NO: 287432 - RNA, 19 nt, Artificial Sequence
  Description of Artificial Sequence: Synthetic oligonucleotide
cuucguagcugcucuguuc

SEQ ID NO: 287433 - RNA, 19 nt, Artificial Sequence
  Description of Artificial Sequence: Synthetic oligonucleotide
cuagaggaaagggauccug

SEQ ID NO: 287434 - RNA, 19 nt, Artificial Sequence
  Description of Artificial Sequence: Synthetic oligonucleotide
gaauuaugucgacgacggc

SEQ ID NO: 287435 - RNA, 19 nt, Artificial Sequence
  Description of Artificial Sequence: Synthetic oligonucleotide
cauggcugauucuguuugc

SEQ ID NO: 287436 - RNA, 19 nt, Artificial Sequence
  Description of Artificial Sequence: Synthetic oligonucleotide
cccauuucuucguagcugc

SEQ ID NO: 287437 - RNA, 19 nt, Artificial Sequence
  Description of Artificial Sequence: Synthetic oligonucleotide
cugugagcacuuauauuuc

SEQ ID NO: 287438 - RNA, 19 nt, Artificial Sequence
  Description of Artificial Sequence: Synthetic oligonucleotide
auuaagcagauaacaggga

SEQ ID NO: 287439 - RNA, 19 nt, Artificial Sequence
  Description of Artificial Sequence: Synthetic oligonucleotide
ugaucucaauuggaggggu

SEQ ID NO: 287440 - RNA, 19 nt, Artificial Sequence
  Description of Artificial Sequence: Synthetic oligonucleotide
gaaugcagcagagaaggua

SEQ ID NO: 287441 - RNA, 19 nt, Artificial Sequence
  Description of Artificial Sequence: Synthetic oligonucleotide
uggcugauucuguuugcca

SEQ ID NO: 287442 - RNA, 19 nt, Artificial Sequence
  Description of Artificial Sequence: Synthetic oligonucleotide
guucgacgggucaauuugg

SEQ ID NO: 287443 - RNA, 19 nt, Artificial Sequence
  Description of Artificial Sequence: Synthetic oligonucleotide
ggagaguuuagaacuacac

SEQ ID NO: 287444 - RNA, 19 nt, Artificial Sequence
  Description of Artificial Sequence: Synthetic oligonucleotide
auccacccugaauaucaag

SEQ ID NO: 287445 - RNA, 19 nt, Artificial Sequence
  Description of Artificial Sequence: Synthetic oligonucleotide
uugggagaguuuagaacua

SEQ ID NO: 287446 - RNA, 19 nt, Artificial Sequence
  Description of Artificial Sequence: Synthetic oligonucleotide
cauuugcauggugggaucc

SEQ ID NO: 287447 - RNA, 19 nt, Artificial Sequence
  Description of Artificial Sequence: Synthetic oligonucleotide
uuagggguccauuguuaaa

SEQ ID NO: 287448 - RNA, 19 nt, Artificial Sequence
  Description of Artificial Sequence: Synthetic oligonucleotide
ccguucauccuucagaguc

SEQ ID NO: 287449 - RNA, 19 nt, Artificial Sequence
  Description of Artificial Sequence: Synthetic oligonucleotide
gcauggcugauucuguuug

SEQ ID NO: 287450 - RNA, 19 nt, Artificial Sequence
  Description of Artificial Sequence: Synthetic oligonucleotide
cuuagagggagguggugca

SEQ ID NO: 287451 - RNA, 19 nt, Artificial Sequence
  Description of Artificial Sequence: Synthetic oligonucleotide
agcauuaauuuaauacaau

SEQ ID NO: 287452 - RNA, 19 nt, Artificial Sequence
  Description of Artificial Sequence: Synthetic oligonucleotide
aaucuccgguaguccuuag

SEQ ID NO: 287453 - RNA, 19 nt, Artificial Sequence
  Description of Artificial Sequence: Synthetic oligonucleotide
acaagacaauccaaacuga

SEQ ID NO: 287454 - RNA, 19 nt, Artificial Sequence
  Description of Artificial Sequence: Synthetic oligonucleotide
auuaugucgacgacggcuu

SEQ ID NO: 287455 - RNA, 19 nt, Artificial Sequence
  Description of Artificial Sequence: Synthetic oligonucleotide
cuguccguaguucgacggg

SEQ ID NO: 287456 - RNA, 19 nt, Artificial Sequence
  Description of Artificial Sequence: Synthetic oligonucleotide
cuugugcacggccccacag

SEQ ID NO: 287457 - RNA, 19 nt, Artificial Sequence
  Description of Artificial Sequence: Synthetic oligonucleotide
uuagagggagguggugcag

SEQ ID NO: 287458 - RNA, 19 nt, Artificial Sequence
  Description of Artificial Sequence: Synthetic oligonucleotide
caugcugcgccauuuaggu

SEQ ID NO: 287459 - RNA, 19 nt, Artificial Sequence
  Description of Artificial Sequence: Synthetic oligonucleotide
ggugaaugcagcagagaag

SEQ ID NO: 287460 - RNA, 19 nt, Artificial Sequence
  Description of Artificial Sequence: Synthetic oligonucleotide
uucccuaaucucuguuggu

SEQ ID NO: 287461 - RNA, 19 nt, Artificial Sequence
  Description of Artificial Sequence: Synthetic oligonucleotide
ccacaauggguagagaaag

SEQ ID NO: 287462 - RNA, 19 nt, Artificial Sequence
  Description of Artificial Sequence: Synthetic oligonucleotide
cccuaaucucuguuggugg

SEQ ID NO: 287463 - RNA, 19 nt, Artificial Sequence
  Description of Artificial Sequence: Synthetic oligonucleotide
auccucagagugucaccuc

SEQ ID NO: 287464 - RNA, 19 nt, Artificial Sequence
  Description of Artificial Sequence: Synthetic oligonucleotide
ucucaauuggagggguagu

SEQ ID NO: 287465 - RNA, 19 nt, Artificial Sequence
  Description of Artificial Sequence: Synthetic oligonucleotide
agucgccagcuguaucuuc

SEQ ID NO: 287466 - RNA, 19 nt, Artificial Sequence
  Description of Artificial Sequence: Synthetic oligonucleotide
gggucaauuuggucaggcg

SEQ ID NO: 287467 - RNA, 19 nt, Artificial Sequence
  Description of Artificial Sequence: Synthetic oligonucleotide
gcguugagaaauuuagcca

SEQ ID NO: 287468 - RNA, 19 nt, Artificial Sequence
  Description of Artificial Sequence: Synthetic oligonucleotide
ggcggaauaaagaggguug

SEQ ID NO: 287469 - RNA, 19 nt, Artificial Sequence
  Description of Artificial Sequence: Synthetic oligonucleotide
cuuagggguccauuguuaa

SEQ ID NO: 287470 - RNA, 19 nt, Artificial Sequence
  Description of Artificial Sequence: Synthetic oligonucleotide
ggcggauuuucccacacuc

SEQ ID NO: 287471 - RNA, 19 nt, Artificial Sequence
  Description of Artificial Sequence: Synthetic oligonucleotide
uggguagagaaagaccguu

SEQ ID NO: 287472 - RNA, 19 nt, Artificial Sequence
  Description of Artificial Sequence: Synthetic oligonucleotide
uaguucgacgggucaauuu

SEQ ID NO: 287473 - RNA, 19 nt, Artificial Sequence
  Description of Artificial Sequence: Synthetic oligonucleotide
agggauccugauuuguguu

SEQ ID NO: 287474 - RNA, 19 nt, Artificial Sequence
  Description of Artificial Sequence: Synthetic oligonucleotide
ucguugguucaugccauca

SEQ ID NO: 287475 - RNA, 19 nt, Artificial Sequence
  Description of Artificial Sequence: Synthetic oligonucleotide
uuuagccaagcaggaacaa

SEQ ID NO: 287476 - RNA, 19 nt, Artificial Sequence
  Description of Artificial Sequence: Synthetic oligonucleotide
ugaagacaaccuuguucuc

SEQ ID NO: 287477 - RNA, 19 nt, Artificial Sequence
  Description of Artificial Sequence: Synthetic oligonucleotide
uaugucgacgacggcuuac

SEQ ID NO: 287478 - RNA, 19 nt, Artificial Sequence
  Description of Artificial Sequence: Synthetic oligonucleotide
uggcggaauaaagaggguu

SEQ ID NO: 287479 - RNA, 19 nt, Artificial Sequence
  Description of Artificial Sequence: Synthetic oligonucleotide
ucuucguagcugcucuguu

SEQ ID NO: 287480 - RNA, 19 nt, Artificial Sequence
  Description of Artificial Sequence: Synthetic oligonucleotide
agugucuuuucagcaagau

SEQ ID NO: 287481 - RNA, 19 nt, Artificial Sequence
  Description of Artificial Sequence: Synthetic oligonucleotide
augauugcuugagcacagg

SEQ ID NO: 287482 - RNA, 19 nt, Artificial Sequence
  Description of Artificial Sequence: Synthetic oligonucleotide
cacuaggcggauuuuccca

SEQ ID NO: 287483 - RNA, 19 nt, Artificial Sequence
  Description of Artificial Sequence: Synthetic oligonucleotide
auuuagguccagugucuuu

SEQ ID NO: 287484 - RNA, 19 nt, Artificial Sequence
  Description of Artificial Sequence: Synthetic oligonucleotide
gacuguggcguugagaaau

SEQ ID NO: 287485 - RNA, 19 nt, Artificial Sequence
  Description of Artificial Sequence: Synthetic oligonucleotide
agggacucucuuugggaga

SEQ ID NO: 287486 - RNA, 19 nt, Artificial Sequence
  Description of Artificial Sequence: Synthetic oligonucleotide
cacgggauaggugcucucc

SEQ ID NO: 287487 - RNA, 19 nt, Artificial Sequence
  Description of Artificial Sequence: Synthetic oligonucleotide
ccuguccguaguucgacgg

SEQ ID NO: 287488 - RNA, 19 nt, Artificial Sequence
  Description of Artificial Sequence: Synthetic oligonucleotide
aagggugcuuaagcagucu

SEQ ID NO: 287489 - RNA, 19 nt, Artificial Sequence
  Description of Artificial Sequence: Synthetic oligonucleotide
uccaaccccucuaguuugu

SEQ ID NO: 287490 - RNA, 19 nt, Artificial Sequence
  Description of Artificial Sequence: Synthetic oligonucleotide
gguagagaaagaccguucu

SEQ ID NO: 287491 - RNA, 19 nt, Artificial Sequence
  Description of Artificial Sequence: Synthetic oligonucleotide
agcuaguaccacugguuua

SEQ ID NO: 287492 - RNA, 19 nt, Artificial Sequence
  Description of Artificial Sequence: Synthetic oligonucleotide
cacgagguuuucuuguaaa

SEQ ID NO: 287493 - RNA, 19 nt, Artificial Sequence
  Description of Artificial Sequence: Synthetic oligonucleotide
accguucugaagacaaccu

SEQ ID NO: 287494 - RNA, 19 nt, Artificial Sequence
  Description of Artificial Sequence: Synthetic oligonucleotide
caaagucgccagcuguauc

SEQ ID NO: 287495 - RNA, 19 nt, Artificial Sequence
  Description of Artificial Sequence: Synthetic oligonucleotide
caauuggagggguaguacu

SEQ ID NO: 287496 - RNA, 19 nt, Artificial Sequence
  Description of Artificial Sequence: Synthetic oligonucleotide
ugguucgggugugugggug

SEQ ID NO: 287497 - RNA, 19 nt, Artificial Sequence
  Description of Artificial Sequence: Synthetic oligonucleotide
uuaccuccacuucguuggu

SEQ ID NO: 287498 - RNA, 19 nt, Artificial Sequence
  Description of Artificial Sequence: Synthetic oligonucleotide
agaccguucugaagacaac

SEQ ID NO: 287499 - RNA, 19 nt, Artificial Sequence
  Description of Artificial Sequence: Synthetic oligonucleotide
auuugcauggugggauccu

SEQ ID NO: 287500 - RNA, 19 nt, Artificial Sequence
  Description of Artificial Sequence: Synthetic oligonucleotide
uuccuguccguaguucgac

SEQ ID NO: 287501 - RNA, 19 nt, Artificial Sequence
  Description of Artificial Sequence: Synthetic oligonucleotide
acgacggcuuacuccaaau

SEQ ID NO: 287502 - RNA, 19 nt, Artificial Sequence
  Description of Artificial Sequence: Synthetic oligonucleotide
gcagacucccggcuagagg

SEQ ID NO: 287503 - RNA, 19 nt, Artificial Sequence
  Description of Artificial Sequence: Synthetic oligonucleotide
uucuacuuccaggcgucgu

SEQ ID NO: 287504 - RNA, 19 nt, Artificial Sequence
  Description of Artificial Sequence: Synthetic oligonucleotide
uccaggcgucgucaucuga

SEQ ID NO: 287505 - RNA, 19 nt, Artificial Sequence
  Description of Artificial Sequence: Synthetic oligonucleotide
ugcuuguuucugugucgga

SEQ ID NO: 287506 - RNA, 19 nt, Artificial Sequence
  Description of Artificial Sequence: Synthetic oligonucleotide
cacagguacuguguaugug

SEQ ID NO: 287507 - RNA, 19 nt, Artificial Sequence
  Description of Artificial Sequence: Synthetic oligonucleotide
uuaugucgacgacggcuua

SEQ ID NO: 287508 - RNA, 19 nt, Artificial Sequence
  Description of Artificial Sequence: Synthetic oligonucleotide
gcacuaggcggauuuuccc

SEQ ID NO: 287509 - RNA, 19 nt, Artificial Sequence
  Description of Artificial Sequence: Synthetic oligonucleotide
gacuugugauaaccacauc

SEQ ID NO: 287510 - RNA, 19 nt, Artificial Sequence
  Description of Artificial Sequence: Synthetic oligonucleotide
uuccuuugguucgggugug

SEQ ID NO: 287511 - RNA, 19 nt, Artificial Sequence
  Description of Artificial Sequence: Synthetic oligonucleotide
cuugguuaagggcuaaguu

SEQ ID NO: 287512 - RNA, 19 nt, Artificial Sequence
  Description of Artificial Sequence: Synthetic oligonucleotide
uucguugguucaugccauc

SEQ ID NO: 287513 - RNA, 19 nt, Artificial Sequence
  Description of Artificial Sequence: Synthetic oligonucleotide
ugucgacgacggcuuacuc

SEQ ID NO: 287514 - RNA, 19 nt, Artificial Sequence
  Description of Artificial Sequence: Synthetic oligonucleotide
ggcacuaggcggauuuucc

SEQ ID NO: 287515 - RNA, 19 nt, Artificial Sequence
  Description of Artificial Sequence: Synthetic oligonucleotide
auaugcucccuuagagaca

SEQ ID NO: 287516 - RNA, 19 nt, Artificial Sequence
  Description of Artificial Sequence: Synthetic oligonucleotide
cuuacuccaaaucuaccuu

SEQ ID NO: 287517 - RNA, 19 nt, Artificial Sequence
  Description of Artificial Sequence: Synthetic oligonucleotide
ccacguuaguuauuuuaug

SEQ ID NO: 287518 - RNA, 19 nt, Artificial Sequence
  Description of Artificial Sequence: Synthetic oligonucleotide
uggcacuaggcggauuuuc

SEQ ID NO: 287519 - RNA, 19 nt, Artificial Sequence
  Description of Artificial Sequence: Synthetic oligonucleotide
gcgccauuuagguccagug

SEQ ID NO: 287520 - RNA, 19 nt, Artificial Sequence
  Description of Artificial Sequence: Synthetic oligonucleotide
augucgacgacggcuuacu

SEQ ID NO: 287521 - RNA, 19 nt, Artificial Sequence
  Description of Artificial Sequence: Synthetic oligonucleotide
ugcgccauuuagguccagu

SEQ ID NO: 287522 - RNA, 19 nt, Artificial Sequence
  Description of Artificial Sequence: Synthetic oligonucleotide
cucccggcuagaggaaagg

SEQ ID NO: 287523 - RNA, 19 nt, Artificial Sequence
  Description of Artificial Sequence: Synthetic oligonucleotide
accccucuaguuugucaca

SEQ ID NO: 287524 - RNA, 19 nt, Artificial Sequence
  Description of Artificial Sequence: Synthetic oligonucleotide
agucaugcugcgccauuua

SEQ ID NO: 287525 - RNA, 19 nt, Artificial Sequence
  Description of Artificial Sequence: Synthetic oligonucleotide
ccuugugcaugaaguauuc

SEQ ID NO: 287526 - RNA, 19 nt, Artificial Sequence
  Description of Artificial Sequence: Synthetic oligonucleotide
gcaagaugaggcauccaac

SEQ ID NO: 287527 - RNA, 19 nt, Artificial Sequence
  Description of Artificial Sequence: Synthetic oligonucleotide
ggauuuucccacacuccug

SEQ ID NO: 287528 - RNA, 19 nt, Artificial Sequence
  Description of Artificial Sequence: Synthetic oligonucleotide
cuccguguuugucaaaggu

SEQ ID NO: 287529 - RNA, 19 nt, Artificial Sequence
  Description of Artificial Sequence: Synthetic oligonucleotide
ggaacucacucuuccuguc

SEQ ID NO: 287530 - RNA, 19 nt, Artificial Sequence
  Description of Artificial Sequence: Synthetic oligonucleotide
gacgacggcuuacuccaaa

SEQ ID NO: 287531 - RNA, 19 nt, Artificial Sequence
  Description of Artificial Sequence: Synthetic oligonucleotide
gguucgggugugugggugc

SEQ ID NO: 287532 - RNA, 19 nt, Artificial Sequence
  Description of Artificial Sequence: Synthetic oligonucleotide
gaaucuccgguaguccuua

SEQ ID NO: 287533 - RNA, 19 nt, Artificial Sequence
  Description of Artificial Sequence: Synthetic oligonucleotide
uuuugaugacuagcaucuu

SEQ ID NO: 287534 - RNA, 19 nt, Artificial Sequence
  Description of Artificial Sequence: Synthetic oligonucleotide
cucucucuuugggauauga

SEQ ID NO: 287535 - RNA, 19 nt, Artificial Sequence
  Description of Artificial Sequence: Synthetic oligonucleotide
gccuuuccgagaguggaag

SEQ ID NO: 287536 - RNA, 19 nt, Artificial Sequence
  Description of Artificial Sequence: Synthetic oligonucleotide
ccaucaugaccucgggaag

SEQ ID NO: 287537 - RNA, 19 nt, Artificial Sequence
  Description of Artificial Sequence: Synthetic oligonucleotide
acucccggcuagaggaaag

SEQ ID NO: 287538 - RNA, 19 nt, Artificial Sequence
  Description of Artificial Sequence: Synthetic oligonucleotide
aggcggauuuucccacacu

SEQ ID NO: 287539 - RNA, 19 nt, Artificial Sequence
  Description of Artificial Sequence: Synthetic oligonucleotide
augaccucgggaagagcca

SEQ ID NO: 287540 - RNA, 19 nt, Artificial Sequence
  Description of Artificial Sequence: Synthetic oligonucleotide
cucaauuggagggguagua

SEQ ID NO: 287541 - RNA, 19 nt, Artificial Sequence
  Description of Artificial Sequence: Synthetic oligonucleotide
agcauugggcuuagaggga

SEQ ID NO: 287542 - RNA, 19 nt, Artificial Sequence
  Description of Artificial Sequence: Synthetic oligonucleotide
cuaggcggauuuucccaca

SEQ ID NO: 287543 - RNA, 19 nt, Artificial Sequence
  Description of Artificial Sequence: Synthetic oligonucleotide
cuugugcaugaaguauuca

SEQ ID NO: 287544 - RNA, 19 nt, Artificial Sequence
  Description of Artificial Sequence: Synthetic oligonucleotide
auuccacguuaguuauuuu

SEQ ID NO: 287545 - RNA, 19 nt, Artificial Sequence
  Description of Artificial Sequence: Synthetic oligonucleotide
cuuccaggcgucgucaucu

SEQ ID NO: 287546 - RNA, 19 nt, Artificial Sequence
  Description of Artificial Sequence: Synthetic oligonucleotide
ggcuuacuccaaaucuacc

SEQ ID NO: 287547 - RNA, 19 nt, Artificial Sequence
  Description of Artificial Sequence: Synthetic oligonucleotide
aagucgccagcuguaucuu

SEQ ID NO: 287548 - RNA, 19 nt, Artificial Sequence
  Description of Artificial Sequence: Synthetic oligonucleotide
agcagauaacagggaacaa

SEQ ID NO: 287549 - RNA, 19 nt, Artificial Sequence
  Description of Artificial Sequence: Synthetic oligonucleotide
cuacuuccaggcgucguca

SEQ ID NO: 287550 - RNA, 19 nt, Artificial Sequence
  Description of Artificial Sequence: Synthetic oligonucleotide
gguuaagggcuaaguuacc

SEQ ID NO: 287551 - RNA, 19 nt, Artificial Sequence
  Description of Artificial Sequence: Synthetic oligonucleotide
ggcgucgucaucugacguc

SEQ ID NO: 287552 - RNA, 19 nt, Artificial Sequence
  Description of Artificial Sequence: Synthetic oligonucleotide
cuucguugguucaugccau

SEQ ID NO: 287553 - RNA, 19 nt, Artificial Sequence
  Description of Artificial Sequence: Synthetic oligonucleotide
ccaagcggagaacaggcca

SEQ ID NO: 287554 - RNA, 19 nt, Artificial Sequence
  Description of Artificial Sequence: Synthetic oligonucleotide
cacccugaauaucaaggcu

SEQ ID NO: 287555 - RNA, 19 nt, Artificial Sequence
  Description of Artificial Sequence: Synthetic oligonucleotide
gggauaugauuauuucccu

SEQ ID NO: 287556 - RNA, 19 nt, Artificial Sequence
  Description of Artificial Sequence: Synthetic oligonucleotide
gcggauuuucccacacucc

SEQ ID NO: 287557 - RNA, 19 nt, Artificial Sequence
  Description of Artificial Sequence: Synthetic oligonucleotide
ccacuucguugguucaugc

SEQ ID NO: 287558 - RNA, 19 nt, Artificial Sequence
  Description of Artificial Sequence: Synthetic oligonucleotide
cacagaaucauggcggaau

SEQ ID NO: 287559 - RNA, 19 nt, Artificial Sequence
  Description of Artificial Sequence: Synthetic oligonucleotide
cuucacacucuacauugau

SEQ ID NO: 287560 - RNA, 19 nt, Artificial Sequence
  Description of Artificial Sequence: Synthetic oligonucleotide
ggcgagaggagcugaucuc

SEQ ID NO: 287561 - RNA, 19 nt, Artificial Sequence
  Description of Artificial Sequence: Synthetic oligonucleotide
ucucucuauuaagcagaua

SEQ ID NO: 287562 - RNA, 19 nt, Artificial Sequence
  Description of Artificial Sequence: Synthetic oligonucleotide
ugccaaccugugguuccag

SEQ ID NO: 287563 - RNA, 19 nt, Artificial Sequence
  Description of Artificial Sequence: Synthetic oligonucleotide
ucguagcugcucuguucuc

SEQ ID NO: 287564 - RNA, 19 nt, Artificial Sequence
  Description of Artificial Sequence: Synthetic oligonucleotide
ggguagagaaagaccguuc

SEQ ID NO: 287565 - RNA, 19 nt, Artificial Sequence
  Description of Artificial Sequence: Synthetic oligonucleotide
guccuuagggguccauugu

SEQ ID NO: 287566 - RNA, 19 nt, Artificial Sequence
  Description of Artificial Sequence: Synthetic oligonucleotide
cggcuuacuccaaaucuac

SEQ ID NO: 287567 - RNA, 19 nt, Artificial Sequence
  Description of Artificial Sequence: Synthetic oligonucleotide
gaucucaauuggaggggua

SEQ ID NO: 287568 - RNA, 19 nt, Artificial Sequence
  Description of Artificial Sequence: Synthetic oligonucleotide
cucuacauugauagugcuu

SEQ ID NO: 287569 - RNA, 19 nt, Artificial Sequence
  Description of Artificial Sequence: Synthetic oligonucleotide
guuacccgagcagccaaaa

SEQ ID NO: 287570 - RNA, 19 nt, Artificial Sequence
  Description of Artificial Sequence: Synthetic oligonucleotide
ugucaccucugugguccug

SEQ ID NO: 287571 - RNA, 19 nt, Artificial Sequence
  Description of Artificial Sequence: Synthetic oligonucleotide
gggaccaugguugacacuu

SEQ ID NO: 287572 - RNA, 19 nt, Artificial Sequence
  Description of Artificial Sequence: Synthetic oligonucleotide
ccauuugcauggugggauc

SEQ ID NO: 287573 - RNA, 19 nt, Artificial Sequence
  Description of Artificial Sequence: Synthetic oligonucleotide
caggucaacugugagcacu

SEQ ID NO: 287574 - RNA, 19 nt, Artificial Sequence
  Description of Artificial Sequence: Synthetic oligonucleotide
cuccauuccguucauccuu

SEQ ID NO: 287575 - RNA, 19 nt, Artificial Sequence
  Description of Artificial Sequence: Synthetic oligonucleotide
ggauaggugcucuccgugu

SEQ ID NO: 287576 - RNA, 19 nt, Artificial Sequence
  Description of Artificial Sequence: Synthetic oligonucleotide
gaccucgggaagagccaug

SEQ ID NO: 287577 - RNA, 19 nt, Artificial Sequence
  Description of Artificial Sequence: Synthetic oligonucleotide
uauagacacuugggaccau

SEQ ID NO: 287578 - RNA, 19 nt, Artificial Sequence
  Description of Artificial Sequence: Synthetic oligonucleotide
cacuugugcacggccccac

SEQ ID NO: 287579 - RNA, 19 nt, Artificial Sequence
  Description of Artificial Sequence: Synthetic oligonucleotide
auggcggaauaaagagggu

SEQ ID NO: 287580 - RNA, 19 nt, Artificial Sequence
  Description of Artificial Sequence: Synthetic oligonucleotide
cagaaucauggcggaauaa

SEQ ID NO: 287581 - RNA, 19 nt, Artificial Sequence
  Description of Artificial Sequence: Synthetic oligonucleotide
aguuacccgagcagccaaa

SEQ ID NO: 287582 - RNA, 19 nt, Artificial Sequence
  Description of Artificial Sequence: Synthetic oligonucleotide
cacucuuccuguccguagu

SEQ ID NO: 287583 - RNA, 19 nt, Artificial Sequence
  Description of Artificial Sequence: Synthetic oligonucleotide
gguuggugccaagaaucuc

SEQ ID NO: 287584 - RNA, 19 nt, Artificial Sequence
  Description of Artificial Sequence: Synthetic oligonucleotide
ggugcucuccguguuuguc

SEQ ID NO: 287585 - RNA, 19 nt, Artificial Sequence
  Description of Artificial Sequence: Synthetic oligonucleotide
cagcuaguaccacugguuu

SEQ ID NO: 287586 - RNA, 19 nt, Artificial Sequence
  Description of Artificial Sequence: Synthetic oligonucleotide
gcaagacaauugcucucuc

SEQ ID NO: 287587 - RNA, 19 nt, Artificial Sequence
  Description of Artificial Sequence: Synthetic oligonucleotide
acuguggcguugagaaauu

SEQ ID NO: 287588 - RNA, 19 nt, Artificial Sequence
  Description of Artificial Sequence: Synthetic oligonucleotide
cccggcuagaggaaaggga

SEQ ID NO: 287589 - RNA, 19 nt, Artificial Sequence
  Description of Artificial Sequence: Synthetic oligonucleotide
agcggagaacaggccagaa

SEQ ID NO: 287590 - RNA, 19 nt, Artificial Sequence
  Description of Artificial Sequence: Synthetic oligonucleotide
gugucggagucuucacacu

SEQ ID NO: 287591 - RNA, 19 nt, Artificial Sequence
  Description of Artificial Sequence: Synthetic oligonucleotide
gaauucagguggggcugaa

SEQ ID NO: 287592 - RNA, 19 nt, Artificial Sequence
  Description of Artificial Sequence: Synthetic oligonucleotide
ggcuuagagggagguggug

SEQ ID NO: 287593 - RNA, 19 nt, Artificial Sequence
  Description of Artificial Sequence: Synthetic oligonucleotide
gcuugguuaagggcuaagu

SEQ ID NO: 287594 - RNA, 19 nt, Artificial Sequence
  Description of Artificial Sequence: Synthetic oligonucleotide
ccggcuagaggaaagggau

SEQ ID NO: 287595 - RNA, 19 nt, Artificial Sequence
  Description of Artificial Sequence: Synthetic oligonucleotide
guacuggagggacucucuu

SEQ ID NO: 287596 - RNA, 19 nt, Artificial Sequence
  Description of Artificial Sequence: Synthetic oligonucleotide
gcuaggcaagacaauugcu

SEQ ID NO: 287597 - RNA, 19 nt, Artificial Sequence
  Description of Artificial Sequence: Synthetic oligonucleotide
cuaaucucuguuggugguu

SEQ ID NO: 287598 - RNA, 19 nt, Artificial Sequence
  Description of Artificial Sequence: Synthetic oligonucleotide
ccucgggaagagccaugcc

SEQ ID NO: 287599 - RNA, 19 nt, Artificial Sequence
  Description of Artificial Sequence: Synthetic oligonucleotide
cgacggcuuacuccaaauc

SEQ ID NO: 287600 - RNA, 19 nt, Artificial Sequence
  Description of Artificial Sequence: Synthetic oligonucleotide
gcccaagggcugguaguag

SEQ ID NO: 287601 - RNA, 19 nt, Artificial Sequence
  Description of Artificial Sequence: Synthetic oligonucleotide
cggauuuucccacacuccu

SEQ ID NO: 287602 - RNA, 19 nt, Artificial Sequence
  Description of Artificial Sequence: Synthetic oligonucleotide
cacuccugaagggguccca

SEQ ID NO: 287603 - RNA, 19 nt, Artificial Sequence
  Description of Artificial Sequence: Synthetic oligonucleotide
gaacugcggcucagcugga

SEQ ID NO: 287604 - RNA, 19 nt, Artificial Sequence
  Description of Artificial Sequence: Synthetic oligonucleotide
cuaguaccacugguuuagu

SEQ ID NO: 287605 - RNA, 19 nt, Artificial Sequence
  Description of Artificial Sequence: Synthetic oligonucleotide
guaguucgacgggucaauu

SEQ ID NO: 287606 - RNA, 19 nt, Artificial Sequence
  Description of Artificial Sequence: Synthetic oligonucleotide
acggccccacagguacugu

SEQ ID NO: 287607 - RNA, 19 nt, Artificial Sequence
  Description of Artificial Sequence: Synthetic oligonucleotide
ccacgagguuuucuuguaa

SEQ ID NO: 287608 - RNA, 19 nt, Artificial Sequence
  Description of Artificial Sequence: Synthetic oligonucleotide
guguuaccuccacuucguu

SEQ ID NO: 287609 - RNA, 19 nt, Artificial Sequence
  Description of Artificial Sequence: Synthetic oligonucleotide
gguaguccuuaggggucca

SEQ ID NO: 287610 - RNA, 19 nt, Artificial Sequence
  Description of Artificial Sequence: Synthetic oligonucleotide
cugccauuccagugucgau

SEQ ID NO: 287611 - RNA, 19 nt, Artificial Sequence
  Description of Artificial Sequence: Synthetic oligonucleotide
gccccacagguacugugua

SEQ ID NO: 287612 - RNA, 19 nt, Artificial Sequence
  Description of Artificial Sequence: Synthetic oligonucleotide
gcugcgccauuuaggucca

SEQ ID NO: 287613 - RNA, 19 nt, Artificial Sequence
  Description of Artificial Sequence: Synthetic oligonucleotide
ccaaccccucuaguuuguc

SEQ ID NO: 287614 - RNA, 19 nt, Artificial Sequence
  Description of Artificial Sequence: Synthetic oligonucleotide
ccccucuaguuugucacaa

SEQ ID NO: 287615 - RNA, 19 nt, Artificial Sequence
  Description of Artificial Sequence: Synthetic oligonucleotide
gugcacggccccacaggua

SEQ ID NO: 287616 - RNA, 19 nt, Artificial Sequence
  Description of Artificial Sequence: Synthetic oligonucleotide
cugcgccauuuagguccag

SEQ ID NO: 287617 - RNA, 19 nt, Artificial Sequence
  Description of Artificial Sequence: Synthetic oligonucleotide
ccguaguucgacgggucaa

SEQ ID NO: 287618 - RNA, 19 nt, Artificial Sequence
  Description of Artificial Sequence: Synthetic oligonucleotide
guaguccuuagggguccau

SEQ ID NO: 287619 - RNA, 19 nt, Artificial Sequence
  Description of Artificial Sequence: Synthetic oligonucleotide
ccguucugaagacaaccuu

SEQ ID NO: 287620 - RNA, 19 nt, Artificial Sequence
  Description of Artificial Sequence: Synthetic oligonucleotide
ccacagaaucauggcggaa

SEQ ID NO: 287621 - RNA, 19 nt, Artificial Sequence
  Description of Artificial Sequence: Synthetic oligonucleotide
ggaccaugguugacacuuu

SEQ ID NO: 287622 - RNA, 19 nt, Artificial Sequence
  Description of Artificial Sequence: Synthetic oligonucleotide
cguaguucgacgggucaau

SEQ ID NO: 287623 - RNA, 19 nt, Artificial Sequence
  Description of Artificial Sequence: Synthetic oligonucleotide
ggacucucuuugggagagu

SEQ ID NO: 287624 - RNA, 19 nt, Artificial Sequence
  Description of Artificial Sequence: Synthetic oligonucleotide
agcguuaaaacauaaaacc

SEQ ID NO: 287625 - RNA, 19 nt, Artificial Sequence
  Description of Artificial Sequence: Synthetic oligonucleotide
ucauuaacgaaauugaugc

SEQ ID NO: 287626 - RNA, 19 nt, Artificial Sequence
  Description of Artificial Sequence: Synthetic oligonucleotide
aauacuaccugcuguauuc

SEQ ID NO: 287627 - RNA, 19 nt, Artificial Sequence
  Description of Artificial Sequence: Synthetic oligonucleotide
uuuaggaucauuuauggac

SEQ ID NO: 287628 - RNA, 19 nt, Artificial Sequence
  Description of Artificial Sequence: Synthetic oligonucleotide
uguaucagguguaagagag

SEQ ID NO: 287629 - RNA, 19 nt, Artificial Sequence
  Description of Artificial Sequence: Synthetic oligonucleotide
uguaauuucucauuaacga

SEQ ID NO: 287630 - RNA, 19 nt, Artificial Sequence
  Description of Artificial Sequence: Synthetic oligonucleotide
uguaagagaggaaugaaug

SEQ ID NO: 287631 - RNA, 19 nt, Artificial Sequence
  Description of Artificial Sequence: Synthetic oligonucleotide
aauaaaaccuaccuucaug

SEQ ID NO: 287632 - RNA, 19 nt, Artificial Sequence
  Description of Artificial Sequence: Synthetic oligonucleotide
aucauuuauggacugacac

SEQ ID NO: 287633 - RNA, 19 nt, Artificial Sequence
  Description of Artificial Sequence: Synthetic oligonucleotide
aauaaaucuuagugggugg

SEQ ID NO: 287634 - RNA, 19 nt, Artificial Sequence
  Description of Artificial Sequence: Synthetic oligonucleotide
uuauuuaggagguaggaga

SEQ ID NO: 287635 - RNA, 19 nt, Artificial Sequence
  Description of Artificial Sequence: Synthetic oligonucleotide
uaucgcuuugcuaagaggc

SEQ ID NO: 287636 - RNA, 19 nt, Artificial Sequence
  Description of Artificial Sequence: Synthetic oligonucleotide
aucuguaaguaccuggugc

SEQ ID NO: 287637 - RNA, 19 nt, Artificial Sequence
  Description of Artificial Sequence: Synthetic oligonucleotide
aaguacaugcacuucgggg

SEQ ID NO: 287638 - RNA, 19 nt, Artificial Sequence
  Description of Artificial Sequence: Synthetic oligonucleotide
uuaacuucaguucaagggu

SEQ ID NO: 287639 - RNA, 19 nt, Artificial Sequence
  Description of Artificial Sequence: Synthetic oligonucleotide
acgaaauugaugcagaacu

SEQ ID NO: 287640 - RNA, 19 nt, Artificial Sequence
  Description of Artificial Sequence: Synthetic oligonucleotide
aauguaucagguguaagag

SEQ ID NO: 287641 - RNA, 19 nt, Artificial Sequence
  Description of Artificial Sequence: Synthetic oligonucleotide
uguauucauaucuagauuu

SEQ ID NO: 287642 - RNA, 19 nt, Artificial Sequence
  Description of Artificial Sequence: Synthetic oligonucleotide
uuuaacgucagcucaauaa

SEQ ID NO: 287643 - RNA, 19 nt, Artificial Sequence
  Description of Artificial Sequence: Synthetic oligonucleotide
auaaaaccuaccuucauga

SEQ ID NO: 287644 - RNA, 19 nt, Artificial Sequence
  Description of Artificial Sequence: Synthetic oligonucleotide
ucuguaaguaccuggugcg

SEQ ID NO: 287645 - RNA, 19 nt, Artificial Sequence
  Description of Artificial Sequence: Synthetic oligonucleotide
aaagccauagaugucuagg

SEQ ID NO: 287646 - RNA, 19 nt, Artificial Sequence
  Description of Artificial Sequence: Synthetic oligonucleotide
auaaauguacagcucgggg

SEQ ID NO: 287647 - RNA, 19 nt, Artificial Sequence
  Description of Artificial Sequence: Synthetic oligonucleotide
auuaccuacagggaaaagg

SEQ ID NO: 287648 - RNA, 19 nt, Artificial Sequence
  Description of Artificial Sequence: Synthetic oligonucleotide
aaaccuaccuucaugaaug

SEQ ID NO: 287649 - RNA, 19 nt, Artificial Sequence
  Description of Artificial Sequence: Synthetic oligonucleotide
agaccaacagccuagcauc

SEQ ID NO: 287650 - RNA, 19 nt, Artificial Sequence
  Description of Artificial Sequence: Synthetic oligonucleotide
uuaccuacagggaaaaggu

SEQ ID NO: 287651 - RNA, 19 nt, Artificial Sequence
  Description of Artificial Sequence: Synthetic oligonucleotide
auuaacgaaauugaugcag

SEQ ID NO: 287652 - RNA, 19 nt, Artificial Sequence
  Description of Artificial Sequence: Synthetic oligonucleotide
uccaauuaaguacaugcac

SEQ ID NO: 287653 - RNA, 19 nt, Artificial Sequence
  Description of Artificial Sequence: Synthetic oligonucleotide
uucaugaauggguacagug

SEQ ID NO: 287654 - RNA, 19 nt, Artificial Sequence
  Description of Artificial Sequence: Synthetic oligonucleotide
uguucugccuuuaacguca

SEQ ID NO: 287655 - RNA, 19 nt, Artificial Sequence
  Description of Artificial Sequence: Synthetic oligonucleotide
ucucaucucuucuagaaga

SEQ ID NO: 287656 - RNA, 19 nt, Artificial Sequence
  Description of Artificial Sequence: Synthetic oligonucleotide
uuaggaucauuuauggacu

SEQ ID NO: 287657 - RNA, 19 nt, Artificial Sequence
  Description of Artificial Sequence: Synthetic oligonucleotide
aacuguacuugccgggagc

SEQ ID NO: 287658 - RNA, 19 nt, Artificial Sequence
  Description of Artificial Sequence: Synthetic oligonucleotide
cucauuaacgaaauugaug

SEQ ID NO: 287659 - RNA, 19 nt, Artificial Sequence
  Description of Artificial Sequence: Synthetic oligonucleotide
uuaacgaaauugaugcaga

SEQ ID NO: 287660 - RNA, 19 nt, Artificial Sequence
  Description of Artificial Sequence: Synthetic oligonucleotide
acagcguuaaaacauaaaa

SEQ ID NO: 287661 - RNA, 19 nt, Artificial Sequence
  Description of Artificial Sequence: Synthetic oligonucleotide
uuauuauaagcacagcguu

SEQ ID NO: 287662 - RNA, 19 nt, Artificial Sequence
  Description of Artificial Sequence: Synthetic oligonucleotide
uuuauuuaggagguaggag

SEQ ID NO: 287663 - RNA, 19 nt, Artificial Sequence
  Description of Artificial Sequence: Synthetic oligonucleotide
uggucugggaccuugagga

SEQ ID NO: 287664 - RNA, 19 nt, Artificial Sequence
  Description of Artificial Sequence: Synthetic oligonucleotide
gaugcagaacuguucaaag

SEQ ID NO: 287665 - RNA, 19 nt, Artificial Sequence
  Description of Artificial Sequence: Synthetic oligonucleotide
cuagaagaaauagagacuc

SEQ ID NO: 287666 - RNA, 19 nt, Artificial Sequence
  Description of Artificial Sequence: Synthetic oligonucleotide
uccauuccgauauaguccc

SEQ ID NO: 287667 - RNA, 19 nt, Artificial Sequence
  Description of Artificial Sequence: Synthetic oligonucleotide
gaauguaucagguguaaga

SEQ ID NO: 287668 - RNA, 19 nt, Artificial Sequence
  Description of Artificial Sequence: Synthetic oligonucleotide
gaagaaauagagacucugg

SEQ ID NO: 287669 - RNA, 19 nt, Artificial Sequence
  Description of Artificial Sequence: Synthetic oligonucleotide
ucuaggacaccaauguugu

SEQ ID NO: 287670 - RNA, 19 nt, Artificial Sequence
  Description of Artificial Sequence: Synthetic oligonucleotide
uuaacgucagcucaauaaa

SEQ ID NO: 287671 - RNA, 19 nt, Artificial Sequence
  Description of Artificial Sequence: Synthetic oligonucleotide
aguucaaggguauugcuga

SEQ ID NO: 287672 - RNA, 19 nt, Artificial Sequence
  Description of Artificial Sequence: Synthetic oligonucleotide
aaugaaugagaugugcacu

SEQ ID NO: 287673 - RNA, 19 nt, Artificial Sequence
  Description of Artificial Sequence: Synthetic oligonucleotide
aagaccaacagccuagcau

SEQ ID NO: 287674 - RNA, 19 nt, Artificial Sequence
  Description of Artificial Sequence: Synthetic oligonucleotide
gucaccgaagccuuggugg

SEQ ID NO: 287675 - RNA, 19 nt, Artificial Sequence
  Description of Artificial Sequence: Synthetic oligonucleotide
cauuuugauggcauccugg

SEQ ID NO: 287676 - RNA, 19 nt, Artificial Sequence
  Description of Artificial Sequence: Synthetic oligonucleotide
uggagaaugaagaugucau

SEQ ID NO: 287677 - RNA, 19 nt, Artificial Sequence
  Description of Artificial Sequence: Synthetic oligonucleotide
ugcucguggagaaugaaga

SEQ ID NO: 287678 - RNA, 19 nt, Artificial Sequence
  Description of Artificial Sequence: Synthetic oligonucleotide
auaucaauuucugggugcc

SEQ ID NO: 287679 - RNA, 19 nt, Artificial Sequence
  Description of Artificial Sequence: Synthetic oligonucleotide
cucucauuggguaauuggc

SEQ ID NO: 287680 - RNA, 19 nt, Artificial Sequence
  Description of Artificial Sequence: Synthetic oligonucleotide
aaucggucugagccuaugg

SEQ ID NO: 287681 - RNA, 19 nt, Artificial Sequence
  Description of Artificial Sequence: Synthetic oligonucleotide
ucgcuuaacacccuugaac

SEQ ID NO: 287682 - RNA, 19 nt, Artificial Sequence
  Description of Artificial Sequence: Synthetic oligonucleotide
agaaggaucuucuuuaaua

SEQ ID NO: 287683 - RNA, 19 nt, Artificial Sequence
  Description of Artificial Sequence: Synthetic oligonucleotide
cuccauuccgauauagucc

SEQ ID NO: 287684 - RNA, 19 nt, Artificial Sequence
  Description of Artificial Sequence: Synthetic oligonucleotide
ucucauuggguaauuggca

SEQ ID NO: 287685 - RNA, 19 nt, Artificial Sequence
  Description of Artificial Sequence: Synthetic oligonucleotide
uggacauauuucuuccggg

SEQ ID NO: 287686 - RNA, 19 nt, Artificial Sequence
  Description of Artificial Sequence: Synthetic oligonucleotide
agaccuuucuuauuauaag

SEQ ID NO: 287687 - RNA, 19 nt, Artificial Sequence
  Description of Artificial Sequence: Synthetic oligonucleotide
uaaguacaugcacuucggg

SEQ ID NO: 287688 - RNA, 19 nt, Artificial Sequence
  Description of Artificial Sequence: Synthetic oligonucleotide
uuuaucuggucccugcuuc

SEQ ID NO: 287689 - RNA, 19 nt, Artificial Sequence
  Description of Artificial Sequence: Synthetic oligonucleotide
ucauuuauggacugacacu

SEQ ID NO: 287690 - RNA, 19 nt, Artificial Sequence
  Description of Artificial Sequence: Synthetic oligonucleotide
cuugccuacgaacuguugc

SEQ ID NO: 287691 - RNA, 19 nt, Artificial Sequence
  Description of Artificial Sequence: Synthetic oligonucleotide
aaaccaacaugggccagcc

SEQ ID NO: 287692 - RNA, 19 nt, Artificial Sequence
  Description of Artificial Sequence: Synthetic oligonucleotide
aaaucuuagugggugguug

SEQ ID NO: 287693 - RNA, 19 nt, Artificial Sequence
  Description of Artificial Sequence: Synthetic oligonucleotide
cagcguuaaaacauaaaac

SEQ ID NO: 287694 - RNA, 19 nt, Artificial Sequence
  Description of Artificial Sequence: Synthetic oligonucleotide
auaaaaccaacaugggcca

SEQ ID NO: 287695 - RNA, 19 nt, Artificial Sequence
  Description of Artificial Sequence: Synthetic oligonucleotide
gugggauagacaccaagcg

SEQ ID NO: 287696 - RNA, 19 nt, Artificial Sequence
  Description of Artificial Sequence: Synthetic oligonucleotide
uugaagcugaguucauccg

SEQ ID NO: 287697 - RNA, 19 nt, Artificial Sequence
  Description of Artificial Sequence: Synthetic oligonucleotide
uuuauggacugacacuccu

SEQ ID NO: 287698 - RNA, 19 nt, Artificial Sequence
  Description of Artificial Sequence: Synthetic oligonucleotide
ucaacuaaaggcacuuguc

SEQ ID NO: 287699 - RNA, 19 nt, Artificial Sequence
  Description of Artificial Sequence: Synthetic oligonucleotide
agggcgagaguucuugggc

SEQ ID NO: 287700 - RNA, 19 nt, Artificial Sequence
  Description of Artificial Sequence: Synthetic oligonucleotide
agaagaaauagagacucug

SEQ ID NO: 287701 - RNA, 19 nt, Artificial Sequence
  Description of Artificial Sequence: Synthetic oligonucleotide
auggaaucuaccaagaaau

SEQ ID NO: 287702 - RNA, 19 nt, Artificial Sequence
  Description of Artificial Sequence: Synthetic oligonucleotide
uuucuuccgggccacaaac

SEQ ID NO: 287703 - RNA, 19 nt, Artificial Sequence
  Description of Artificial Sequence: Synthetic oligonucleotide
ugcuguauucauaucuaga

SEQ ID NO: 287704 - RNA, 19 nt, Artificial Sequence
  Description of Artificial Sequence: Synthetic oligonucleotide
uauuauaagcacagcguua

SEQ ID NO: 287705 - RNA, 19 nt, Artificial Sequence
  Description of Artificial Sequence: Synthetic oligonucleotide
cagagaggaauguaucagg

SEQ ID NO: 287706 - RNA, 19 nt, Artificial Sequence
  Description of Artificial Sequence: Synthetic oligonucleotide
uuuuaggaucauuuaugga

SEQ ID NO: 287707 - RNA, 19 nt, Artificial Sequence
  Description of Artificial Sequence: Synthetic oligonucleotide
ugccuuuaacgucagcuca

SEQ ID NO: 287708 - RNA, 19 nt, Artificial Sequence
  Description of Artificial Sequence: Synthetic oligonucleotide
ugggauagacaccaagcga

SEQ ID NO: 287709 - RNA, 19 nt, Artificial Sequence
  Description of Artificial Sequence: Synthetic oligonucleotide
auacccucugcuuuggaug

SEQ ID NO: 287710 - RNA, 19 nt, Artificial Sequence
  Description of Artificial Sequence: Synthetic oligonucleotide
aauacccucugcuuuggau

SEQ ID NO: 287711 - RNA, 19 nt, Artificial Sequence
  Description of Artificial Sequence: Synthetic oligonucleotide
uuagcaacaggucucgcuu

SEQ ID NO: 287712 - RNA, 19 nt, Artificial Sequence
  Description of Artificial Sequence: Synthetic oligonucleotide
aaucuuagugggugguugu

SEQ ID NO: 287713 - RNA, 19 nt, Artificial Sequence
  Description of Artificial Sequence: Synthetic oligonucleotide
aaguaccuggugcgagucc

SEQ ID NO: 287714 - RNA, 19 nt, Artificial Sequence
  Description of Artificial Sequence: Synthetic oligonucleotide
ugcgaguccuguaauaaaa

SEQ ID NO: 287715 - RNA, 19 nt, Artificial Sequence
  Description of Artificial Sequence: Synthetic oligonucleotide
auuauaagcacagcguuaa

SEQ ID NO: 287716 - RNA, 19 nt, Artificial Sequence
  Description of Artificial Sequence: Synthetic oligonucleotide
uucaguucaaggguauugc

SEQ ID NO: 287717 - RNA, 19 nt, Artificial Sequence
  Description of Artificial Sequence: Synthetic oligonucleotide
aagauccgugcaugcaggg

SEQ ID NO: 287718 - RNA, 19 nt, Artificial Sequence
  Description of Artificial Sequence: Synthetic oligonucleotide
agucuacccguccaccagc

SEQ ID NO: 287719 - RNA, 19 nt, Artificial Sequence
  Description of Artificial Sequence: Synthetic oligonucleotide
cuuauuauaagcacagcgu

SEQ ID NO: 287720 - RNA, 19 nt, Artificial Sequence
  Description of Artificial Sequence: Synthetic oligonucleotide
aaccuaccuucaugaaugg

SEQ ID NO: 287721 - RNA, 19 nt, Artificial Sequence
  Description of Artificial Sequence: Synthetic oligonucleotide
uugcucguggagaaugaag

SEQ ID NO: 287722 - RNA, 19 nt, Artificial Sequence
  Description of Artificial Sequence: Synthetic oligonucleotide
uaucacucgggcauaccca

SEQ ID NO: 287723 - RNA, 19 nt, Artificial Sequence
  Description of Artificial Sequence: Synthetic oligonucleotide
aaauagagacucugggcuu

SEQ ID NO: 287724 - RNA, 19 nt, Artificial Sequence
  Description of Artificial Sequence: Synthetic oligonucleotide
ucucgcuuaacacccuuga

SEQ ID NO: 287725 - RNA, 19 nt, Artificial Sequence
  Description of Artificial Sequence: Synthetic oligonucleotide
uguaaguaccuggugcgag

SEQ ID NO: 287726 - RNA, 19 nt, Artificial Sequence
  Description of Artificial Sequence: Synthetic oligonucleotide
guaauuucucauuaacgaa

SEQ ID NO: 287727 - RNA, 19 nt, Artificial Sequence
  Description of Artificial Sequence: Synthetic oligonucleotide
aggagugccuguucacacc

SEQ ID NO: 287728 - RNA, 19 nt, Artificial Sequence
  Description of Artificial Sequence: Synthetic oligonucleotide
aguggaauacuaccugcug

SEQ ID NO: 287729 - RNA, 19 nt, Artificial Sequence
  Description of Artificial Sequence: Synthetic oligonucleotide
ucgauucuucgcuucagga

SEQ ID NO: 287730 - RNA, 19 nt, Artificial Sequence
  Description of Artificial Sequence: Synthetic oligonucleotide
gguggaacuguacuugccg

SEQ ID NO: 287731 - RNA, 19 nt, Artificial Sequence
  Description of Artificial Sequence: Synthetic oligonucleotide
guaucgcuuugcuaagagg

SEQ ID NO: 287732 - RNA, 19 nt, Artificial Sequence
  Description of Artificial Sequence: Synthetic oligonucleotide
gagccuauggacuguugcc

SEQ ID NO: 287733 - RNA, 19 nt, Artificial Sequence
  Description of Artificial Sequence: Synthetic oligonucleotide
uaacgucagcucaauaaaa

SEQ ID NO: 287734 - RNA, 19 nt, Artificial Sequence
  Description of Artificial Sequence: Synthetic oligonucleotide
ugagcuagggguuguggga

SEQ ID NO: 287735 - RNA, 19 nt, Artificial Sequence
  Description of Artificial Sequence: Synthetic oligonucleotide
uacgaacuguugcaguucu

SEQ ID NO: 287736 - RNA, 19 nt, Artificial Sequence
  Description of Artificial Sequence: Synthetic oligonucleotide
uugccuacgaacuguugca

SEQ ID NO: 287737 - RNA, 19 nt, Artificial Sequence
  Description of Artificial Sequence: Synthetic oligonucleotide
acaugggccagccacauua

SEQ ID NO: 287738 - RNA, 19 nt, Artificial Sequence
  Description of Artificial Sequence: Synthetic oligonucleotide
uggugucugugacaaucgg

SEQ ID NO: 287739 - RNA, 19 nt, Artificial Sequence
  Description of Artificial Sequence: Synthetic oligonucleotide
gggauagacaccaagcgag

SEQ ID NO: 287740 - RNA, 19 nt, Artificial Sequence
  Description of Artificial Sequence: Synthetic oligonucleotide
uuaggcuaccuuuuaggau

SEQ ID NO: 287741 - RNA, 19 nt, Artificial Sequence
  Description of Artificial Sequence: Synthetic oligonucleotide
uagggcgagaguucuuggg

SEQ ID NO: 287742 - RNA, 19 nt, Artificial Sequence
  Description of Artificial Sequence: Synthetic oligonucleotide
gaucagaaggggaaucccc

SEQ ID NO: 287743 - RNA, 19 nt, Artificial Sequence
  Description of Artificial Sequence: Synthetic oligonucleotide
ugucccuaauccaagcuuu

SEQ ID NO: 287744 - RNA, 19 nt, Artificial Sequence
  Description of Artificial Sequence: Synthetic oligonucleotide
uuccgguugaugcuguuuc

SEQ ID NO: 287745 - RNA, 19 nt, Artificial Sequence
  Description of Artificial Sequence: Synthetic oligonucleotide
auuuauggacugacacucc

SEQ ID NO: 287746 - RNA, 19 nt, Artificial Sequence
  Description of Artificial Sequence: Synthetic oligonucleotide
uaacuucaguucaagggua

SEQ ID NO: 287747 - RNA, 19 nt, Artificial Sequence
  Description of Artificial Sequence: Synthetic oligonucleotide
cuugccucguagucuaccc

SEQ ID NO: 287748 - RNA, 19 nt, Artificial Sequence
  Description of Artificial Sequence: Synthetic oligonucleotide
cuugguggaacuguacuug

SEQ ID NO: 287749 - RNA, 19 nt, Artificial Sequence
  Description of Artificial Sequence: Synthetic oligonucleotide
uagucuacccguccaccag

SEQ ID NO: 287750 - RNA, 19 nt, Artificial Sequence
  Description of Artificial Sequence: Synthetic oligonucleotide
caacuaaaggcacuuguca

SEQ ID NO: 287751 - RNA, 19 nt, Artificial Sequence
  Description of Artificial Sequence: Synthetic oligonucleotide
gauagacaccaagcgagcc

SEQ ID NO: 287752 - RNA, 19 nt, Artificial Sequence
  Description of Artificial Sequence: Synthetic oligonucleotide
guugccguggcaagggugg

SEQ ID NO: 287753 - RNA, 19 nt, Artificial Sequence
  Description of Artificial Sequence: Synthetic oligonucleotide
agaugugcacuucaacuaa

SEQ ID NO: 287754 - RNA, 19 nt, Artificial Sequence
  Description of Artificial Sequence: Synthetic oligonucleotide
uacccaucauacuuucucu

SEQ ID NO: 287755 - RNA, 19 nt, Artificial Sequence
  Description of Artificial Sequence: Synthetic oligonucleotide
cuuaacacccuugaaccuc

SEQ ID NO: 287756 - RNA, 19 nt, Artificial Sequence
  Description of Artificial Sequence: Synthetic oligonucleotide
aaauugaugcagaacuguu

SEQ ID NO: 287757 - RNA, 19 nt, Artificial Sequence
  Description of Artificial Sequence: Synthetic oligonucleotide
cauuccgauauaguccccg

SEQ ID NO: 287758 - RNA, 19 nt, Artificial Sequence
  Description of Artificial Sequence: Synthetic oligonucleotide
ugaauggguacaguggaau

SEQ ID NO: 287759 - RNA, 19 nt, Artificial Sequence
  Description of Artificial Sequence: Synthetic oligonucleotide
gucuuaguggcccuggcuc

SEQ ID NO: 287760 - RNA, 19 nt, Artificial Sequence
  Description of Artificial Sequence: Synthetic oligonucleotide
gcucucauuggguaauugg

SEQ ID NO: 287761 - RNA, 19 nt, Artificial Sequence
  Description of Artificial Sequence: Synthetic oligonucleotide
uagcagagaggaauguauc

SEQ ID NO: 287762 - RNA, 19 nt, Artificial Sequence
  Description of Artificial Sequence: Synthetic oligonucleotide
auguaucagguguaagaga

SEQ ID NO: 287763 - RNA, 19 nt, Artificial Sequence
  Description of Artificial Sequence: Synthetic oligonucleotide
uaggcauacaaagccuugc

SEQ ID NO: 287764 - RNA, 19 nt, Artificial Sequence
  Description of Artificial Sequence: Synthetic oligonucleotide
aauuaccuacagggaaaag

SEQ ID NO: 287765 - RNA, 19 nt, Artificial Sequence
  Description of Artificial Sequence: Synthetic oligonucleotide
uucggacuccagcagcacc

SEQ ID NO: 287766 - RNA, 19 nt, Artificial Sequence
  Description of Artificial Sequence: Synthetic oligonucleotide
uggggauuaggcuaccuuu

SEQ ID NO: 287767 - RNA, 19 nt, Artificial Sequence
  Description of Artificial Sequence: Synthetic oligonucleotide
aggguuagcagagaggaau

SEQ ID NO: 287768 - RNA, 19 nt, Artificial Sequence
  Description of Artificial Sequence: Synthetic oligonucleotide
ugacaaucggucugagccu

SEQ ID NO: 287769 - RNA, 19 nt, Artificial Sequence
  Description of Artificial Sequence: Synthetic oligonucleotide
uccccgaugaaguuccggu

SEQ ID NO: 287770 - RNA, 19 nt, Artificial Sequence
  Description of Artificial Sequence: Synthetic oligonucleotide
agugcgucccugguguagc

SEQ ID NO: 287771 - RNA, 19 nt, Artificial Sequence
  Description of Artificial Sequence: Synthetic oligonucleotide
ucugggaccuugaggaaau

SEQ ID NO: 287772 - RNA, 19 nt, Artificial Sequence
  Description of Artificial Sequence: Synthetic oligonucleotide
uugucccuaauccaagcuu

SEQ ID NO: 287773 - RNA, 19 nt, Artificial Sequence
  Description of Artificial Sequence: Synthetic oligonucleotide
ucuugcucguggagaauga

SEQ ID NO: 287774 - RNA, 19 nt, Artificial Sequence
  Description of Artificial Sequence: Synthetic oligonucleotide
acggacaggauccucucca

SEQ ID NO: 287775 - RNA, 19 nt, Artificial Sequence
  Description of Artificial Sequence: Synthetic oligonucleotide
cacuugucaaggguggccg

SEQ ID NO: 287776 - RNA, 19 nt, Artificial Sequence
  Description of Artificial Sequence: Synthetic oligonucleotide
ucugguagggcgagaguuc

SEQ ID NO: 287777 - RNA, 19 nt, Artificial Sequence
  Description of Artificial Sequence: Synthetic oligonucleotide
uuaucuggucccugcuuca

SEQ ID NO: 287778 - RNA, 19 nt, Artificial Sequence
  Description of Artificial Sequence: Synthetic oligonucleotide
ugucugugacaaucggucu

SEQ ID NO: 287779 - RNA, 19 nt, Artificial Sequence
  Description of Artificial Sequence: Synthetic oligonucleotide
ucguacuuggugacagugu

SEQ ID NO: 287780 - RNA, 19 nt, Artificial Sequence
  Description of Artificial Sequence: Synthetic oligonucleotide
gaaauugaugcagaacugu

SEQ ID NO: 287781 - RNA, 19 nt, Artificial Sequence
  Description of Artificial Sequence: Synthetic oligonucleotide
aauagagacucugggcuuu

SEQ ID NO: 287782 - RNA, 19 nt, Artificial Sequence
  Description of Artificial Sequence: Synthetic oligonucleotide
ugccugcauaucaauuucu

SEQ ID NO: 287783 - RNA, 19 nt, Artificial Sequence
  Description of Artificial Sequence: Synthetic oligonucleotide
cucguggagaaugaagaug

SEQ ID NO: 287784 - RNA, 19 nt, Artificial Sequence
  Description of Artificial Sequence: Synthetic oligonucleotide
cuauggacuguugccgugg

SEQ ID NO: 287785 - RNA, 19 nt, Artificial Sequence
  Description of Artificial Sequence: Synthetic oligonucleotide
uauggacuguugccguggc

SEQ ID NO: 287786 - RNA, 19 nt, Artificial Sequence
  Description of Artificial Sequence: Synthetic oligonucleotide
ugcaugguacugagggaca

SEQ ID NO: 287787 - RNA, 19 nt, Artificial Sequence
  Description of Artificial Sequence: Synthetic oligonucleotide
uuggcauucuuuguuccac

SEQ ID NO: 287788 - RNA, 19 nt, Artificial Sequence
  Description of Artificial Sequence: Synthetic oligonucleotide
uucgcuucaggacuuccuu

SEQ ID NO: 287789 - RNA, 19 nt, Artificial Sequence
  Description of Artificial Sequence: Synthetic oligonucleotide
ugaaccuccugucguacuu

SEQ ID NO: 287790 - RNA, 19 nt, Artificial Sequence
  Description of Artificial Sequence: Synthetic oligonucleotide
ggcggguccucccugaagg

SEQ ID NO: 287791 - RNA, 19 nt, Artificial Sequence
  Description of Artificial Sequence: Synthetic oligonucleotide
ugguguagcaggccuguuc

SEQ ID NO: 287792 - RNA, 19 nt, Artificial Sequence
  Description of Artificial Sequence: Synthetic oligonucleotide
ggauuaggcuaccuuuuag

SEQ ID NO: 287793 - RNA, 19 nt, Artificial Sequence
  Description of Artificial Sequence: Synthetic oligonucleotide
aguccuguaauaaaaccua

SEQ ID NO: 287794 - RNA, 19 nt, Artificial Sequence
  Description of Artificial Sequence: Synthetic oligonucleotide
gugccucagaucuugguga

SEQ ID NO: 287795 - RNA, 19 nt, Artificial Sequence
  Description of Artificial Sequence: Synthetic oligonucleotide
agucuuaguggcccuggcu

SEQ ID NO: 287796 - RNA, 19 nt, Artificial Sequence
  Description of Artificial Sequence: Synthetic oligonucleotide
guuccacuagaauacccuc

SEQ ID NO: 287797 - RNA, 19 nt, Artificial Sequence
  Description of Artificial Sequence: Synthetic oligonucleotide
agaauacccucugcuuugg

SEQ ID NO: 287798 - RNA, 19 nt, Artificial Sequence
  Description of Artificial Sequence: Synthetic oligonucleotide
ucuugccuacgaacuguug

SEQ ID NO: 287799 - RNA, 19 nt, Artificial Sequence
  Description of Artificial Sequence: Synthetic oligonucleotide
acguggauggacuccgacu

SEQ ID NO: 287800 - RNA, 19 nt, Artificial Sequence
  Description of Artificial Sequence: Synthetic oligonucleotide
uacaguguaugaucacuuu

SEQ ID NO: 287801 - RNA, 19 nt, Artificial Sequence
  Description of Artificial Sequence: Synthetic oligonucleotide
uguacuugccgggagccuc

SEQ ID NO: 287802 - RNA, 19 nt, Artificial Sequence
  Description of Artificial Sequence: Synthetic oligonucleotide
uuacucucaccagauuuaa

SEQ ID NO: 287803 - RNA, 19 nt, Artificial Sequence
  Description of Artificial Sequence: Synthetic oligonucleotide
cugucguacuuggugacag

SEQ ID NO: 287804 - RNA, 19 nt, Artificial Sequence
  Description of Artificial Sequence: Synthetic oligonucleotide
cuguucugccuuuaacguc

SEQ ID NO: 287805 - RNA, 19 nt, Artificial Sequence
  Description of Artificial Sequence: Synthetic oligonucleotide
uuauaagcacagcguuaaa

SEQ ID NO: 287806 - RNA, 19 nt, Artificial Sequence
  Description of Artificial Sequence: Synthetic oligonucleotide
guaggcgaagaggaggagc

SEQ ID NO: 287807 - RNA, 19 nt, Artificial Sequence
  Description of Artificial Sequence: Synthetic oligonucleotide
guagggcgagaguucuugg

SEQ ID NO: 287808 - RNA, 19 nt, Artificial Sequence
  Description of Artificial Sequence: Synthetic oligonucleotide
aguaccuggugcgaguccu

SEQ ID NO: 287809 - RNA, 19 nt, Artificial Sequence
  Description of Artificial Sequence: Synthetic oligonucleotide
gucguacuuggugacagug

SEQ ID NO: 287810 - RNA, 19 nt, Artificial Sequence
  Description of Artificial Sequence: Synthetic oligonucleotide
guaucagguguaagagagg

SEQ ID NO: 287811 - RNA, 19 nt, Artificial Sequence
  Description of Artificial Sequence: Synthetic oligonucleotide
auuccgauauaguccccga

SEQ ID NO: 287812 - RNA, 19 nt, Artificial Sequence
  Description of Artificial Sequence: Synthetic oligonucleotide
cucguaucgcuuugcuaag

SEQ ID NO: 287813 - RNA, 19 nt, Artificial Sequence
  Description of Artificial Sequence: Synthetic oligonucleotide
ugucauacucuugcucgug

SEQ ID NO: 287814 - RNA, 19 nt, Artificial Sequence
  Description of Artificial Sequence: Synthetic oligonucleotide
cauuaacgaaauugaugca

SEQ ID NO: 287815 - RNA, 19 nt, Artificial Sequence
  Description of Artificial Sequence: Synthetic oligonucleotide
uuggguaauuggcauucuu

SEQ ID NO: 287816 - RNA, 19 nt, Artificial Sequence
  Description of Artificial Sequence: Synthetic oligonucleotide
gguugugggauagacacca

SEQ ID NO: 287817 - RNA, 19 nt, Artificial Sequence
  Description of Artificial Sequence: Synthetic oligonucleotide
agauucaagcaaacuguca

SEQ ID NO: 287818 - RNA, 19 nt, Artificial Sequence
  Description of Artificial Sequence: Synthetic oligonucleotide
gaauggguacaguggaaua

SEQ ID NO: 287819 - RNA, 19 nt, Artificial Sequence
  Description of Artificial Sequence: Synthetic oligonucleotide
ucgggguuagcaacagguc

SEQ ID NO: 287820 - RNA, 19 nt, Artificial Sequence
  Description of Artificial Sequence: Synthetic oligonucleotide
gaauuaccuacagggaaaa

SEQ ID NO: 287821 - RNA, 19 nt, Artificial Sequence
  Description of Artificial Sequence: Synthetic oligonucleotide
uguuugucuucggacucca

SEQ ID NO: 287822 - RNA, 19 nt, Artificial Sequence
  Description of Artificial Sequence: Synthetic oligonucleotide
guagucuacccguccacca

SEQ ID NO: 287823 - RNA, 19 nt, Artificial Sequence
  Description of Artificial Sequence: Synthetic oligonucleotide
cuaccuuuuaggaucauuu

SEQ ID NO: 287824 - RNA, 19 nt, Artificial Sequence
  Description of Artificial Sequence: Synthetic oligonucleotide
gcagagaggaauguaucag

SEQ ID NO: 287825 - RNA, 19 nt, Artificial Sequence
  Description of Artificial Sequence: Synthetic oligonucleotide
caacaggucucgcuuaaca

SEQ ID NO: 287826 - RNA, 19 nt, Artificial Sequence
  Description of Artificial Sequence: Synthetic oligonucleotide
ugccuacgaacuguugcag

SEQ ID NO: 287827 - RNA, 19 nt, Artificial Sequence
  Description of Artificial Sequence: Synthetic oligonucleotide
uacccguccaccagccaga

SEQ ID NO: 287828 - RNA, 19 nt, Artificial Sequence
  Description of Artificial Sequence: Synthetic oligonucleotide
uaaguaccuggugcgaguc

SEQ ID NO: 287829 - RNA, 19 nt, Artificial Sequence
  Description of Artificial Sequence: Synthetic oligonucleotide
gaggccggcugguuguuug

SEQ ID NO: 287830 - RNA, 19 nt, Artificial Sequence
  Description of Artificial Sequence: Synthetic oligonucleotide
aggaggguuagcagagagg

SEQ ID NO: 287831 - RNA, 19 nt, Artificial Sequence
  Description of Artificial Sequence: Synthetic oligonucleotide
uugaaccuccugucguacu

SEQ ID NO: 287832 - RNA, 19 nt, Artificial Sequence
  Description of Artificial Sequence: Synthetic oligonucleotide
gggaagaccuuucuuauua

SEQ ID NO: 287833 - RNA, 19 nt, Artificial Sequence
  Description of Artificial Sequence: Synthetic oligonucleotide
cuuguucaacaacaggucu

SEQ ID NO: 287834 - RNA, 19 nt, Artificial Sequence
  Description of Artificial Sequence: Synthetic oligonucleotide
uaccuacagggaaaaggua

SEQ ID NO: 287835 - RNA, 19 nt, Artificial Sequence
  Description of Artificial Sequence: Synthetic oligonucleotide
uguucacaccaaguccagc

SEQ ID NO: 287836 - RNA, 19 nt, Artificial Sequence
  Description of Artificial Sequence: Synthetic oligonucleotide
auaacaucauuggcauuga

SEQ ID NO: 287837 - RNA, 19 nt, Artificial Sequence
  Description of Artificial Sequence: Synthetic oligonucleotide
caucucgauucuucgcuuc

SEQ ID NO: 287838 - RNA, 19 nt, Artificial Sequence
  Description of Artificial Sequence: Synthetic oligonucleotide
uccugucguacuuggugac

SEQ ID NO: 287839 - RNA, 19 nt, Artificial Sequence
  Description of Artificial Sequence: Synthetic oligonucleotide
uggguacaguggaauacua

SEQ ID NO: 287840 - RNA, 19 nt, Artificial Sequence
  Description of Artificial Sequence: Synthetic oligonucleotide
aacuucaguucaaggguau

SEQ ID NO: 287841 - RNA, 19 nt, Artificial Sequence
  Description of Artificial Sequence: Synthetic oligonucleotide
ucauccguguccugagcau

SEQ ID NO: 287842 - RNA, 19 nt, Artificial Sequence
  Description of Artificial Sequence: Synthetic oligonucleotide
cuccugucguacuugguga

SEQ ID NO: 287843 - RNA, 19 nt, Artificial Sequence
  Description of Artificial Sequence: Synthetic oligonucleotide
cucgugguccuucuccaug

SEQ ID NO: 287844 - RNA, 19 nt, Artificial Sequence
  Description of Artificial Sequence: Synthetic oligonucleotide
gacguggauggacuccgac

SEQ ID NO: 287845 - RNA, 19 nt, Artificial Sequence
  Description of Artificial Sequence: Synthetic oligonucleotide
uggauggacuccgacuuuc

SEQ ID NO: 287846 - RNA, 19 nt, Artificial Sequence
  Description of Artificial Sequence: Synthetic oligonucleotide
gagguguacaggcuuuucu

SEQ ID NO: 287847 - RNA, 19 nt, Artificial Sequence
  Description of Artificial Sequence: Synthetic oligonucleotide
uacucucaccagauuuaaa

SEQ ID NO: 287848 - RNA, 19 nt, Artificial Sequence
  Description of Artificial Sequence: Synthetic oligonucleotide
ccucguaucgcuuugcuaa

SEQ ID NO: 287849 - RNA, 19 nt, Artificial Sequence
  Description of Artificial Sequence: Synthetic oligonucleotide
uaaaucuuagugggugguu

SEQ ID NO: 287850 - RNA, 19 nt, Artificial Sequence
  Description of Artificial Sequence: Synthetic oligonucleotide
uccgguugaugcuguuucu

SEQ ID NO: 287851 - RNA, 19 nt, Artificial Sequence
  Description of Artificial Sequence: Synthetic oligonucleotide
cgaguccuguaauaaaacc

SEQ ID NO: 287852 - RNA, 19 nt, Artificial Sequence
  Description of Artificial Sequence: Synthetic oligonucleotide
ucuucgcuucaggacuucc

SEQ ID NO: 287853 - RNA, 19 nt, Artificial Sequence
  Description of Artificial Sequence: Synthetic oligonucleotide
accuaccuucaugaauggg

SEQ ID NO: 287854 - RNA, 19 nt, Artificial Sequence
  Description of Artificial Sequence: Synthetic oligonucleotide
guuacucucaccagauuua

SEQ ID NO: 287855 - RNA, 19 nt, Artificial Sequence
  Description of Artificial Sequence: Synthetic oligonucleotide
gcuaagaggcucaagaacu

SEQ ID NO: 287856 - RNA, 19 nt, Artificial Sequence
  Description of Artificial Sequence: Synthetic oligonucleotide
caauuaaguacaugcacuu

SEQ ID NO: 287857 - RNA, 19 nt, Artificial Sequence
  Description of Artificial Sequence: Synthetic oligonucleotide
ggcauugacacaggagugc

SEQ ID NO: 287858 - RNA, 19 nt, Artificial Sequence
  Description of Artificial Sequence: Synthetic oligonucleotide
uucaaggguauugcugaau

SEQ ID NO: 287859 - RNA, 19 nt, Artificial Sequence
  Description of Artificial Sequence: Synthetic oligonucleotide
gggugggcgggccauagag

SEQ ID NO: 287860 - RNA, 19 nt, Artificial Sequence
  Description of Artificial Sequence: Synthetic oligonucleotide
gguuguuugucuucggacu

SEQ ID NO: 287861 - RNA, 19 nt, Artificial Sequence
  Description of Artificial Sequence: Synthetic oligonucleotide
ucuuagugggugguuguuu

SEQ ID NO: 287862 - RNA, 19 nt, Artificial Sequence
  Description of Artificial Sequence: Synthetic oligonucleotide
gucugcggggcugugcagg

SEQ ID NO: 287863 - RNA, 19 nt, Artificial Sequence
  Description of Artificial Sequence: Synthetic oligonucleotide
gguagggcgagaguucuug

SEQ ID NO: 287864 - RNA, 19 nt, Artificial Sequence
  Description of Artificial Sequence: Synthetic oligonucleotide
guucauccguguccugagc

SEQ ID NO: 287865 - RNA, 19 nt, Artificial Sequence
  Description of Artificial Sequence: Synthetic oligonucleotide
cuacgaacuguugcaguuc

SEQ ID NO: 287866 - RNA, 19 nt, Artificial Sequence
  Description of Artificial Sequence: Synthetic oligonucleotide
ugucguacuuggugacagu

SEQ ID NO: 287867 - RNA, 19 nt, Artificial Sequence
  Description of Artificial Sequence: Synthetic oligonucleotide
uaucaauuucugggugccu

SEQ ID NO: 287868 - RNA, 19 nt, Artificial Sequence
  Description of Artificial Sequence: Synthetic oligonucleotide
cugggugccucagaucuug

SEQ ID NO: 287869 - RNA, 19 nt, Artificial Sequence
  Description of Artificial Sequence: Synthetic oligonucleotide
ccaauuaaguacaugcacu

SEQ ID NO: 287870 - RNA, 19 nt, Artificial Sequence
  Description of Artificial Sequence: Synthetic oligonucleotide
cuuugcuaagaggcucaag

SEQ ID NO: 287871 - RNA, 19 nt, Artificial Sequence
  Description of Artificial Sequence: Synthetic oligonucleotide
acaacaggucugaggcuuc

SEQ ID NO: 287872 - RNA, 19 nt, Artificial Sequence
  Description of Artificial Sequence: Synthetic oligonucleotide
cuccuccauuccgauauag

SEQ ID NO: 287873 - RNA, 19 nt, Artificial Sequence
  Description of Artificial Sequence: Synthetic oligonucleotide
gaauacuaccugcuguauu

SEQ ID NO: 287874 - RNA, 19 nt, Artificial Sequence
  Description of Artificial Sequence: Synthetic oligonucleotide
guccaaugcugaccugcag

SEQ ID NO: 287875 - RNA, 19 nt, Artificial Sequence
  Description of Artificial Sequence: Synthetic oligonucleotide
ggugccagaauagcuucag

SEQ ID NO: 287876 - RNA, 19 nt, Artificial Sequence
  Description of Artificial Sequence: Synthetic oligonucleotide
guacaguggaauacuaccu

SEQ ID NO: 287877 - RNA, 19 nt, Artificial Sequence
  Description of Artificial Sequence: Synthetic oligonucleotide
uagcaacaggucucgcuua

SEQ ID NO: 287878 - RNA, 19 nt, Artificial Sequence
  Description of Artificial Sequence: Synthetic oligonucleotide
ucguaucgcuuugcuaaga

SEQ ID NO: 287879 - RNA, 19 nt, Artificial Sequence
  Description of Artificial Sequence: Synthetic oligonucleotide
accaagcgagccagugggc

SEQ ID NO: 287880 - RNA, 19 nt, Artificial Sequence
  Description of Artificial Sequence: Synthetic oligonucleotide
ggaucagaaggggaauccc

SEQ ID NO: 287881 - RNA, 19 nt, Artificial Sequence
  Description of Artificial Sequence: Synthetic oligonucleotide
gaaggggaauccccagaaa

SEQ ID NO: 287882 - RNA, 19 nt, Artificial Sequence
  Description of Artificial Sequence: Synthetic oligonucleotide
ucccuaauccaagcuuuuc

SEQ ID NO: 287883 - RNA, 19 nt, Artificial Sequence
  Description of Artificial Sequence: Synthetic oligonucleotide
cacagcguuaaaacauaaa

SEQ ID NO: 287884 - RNA, 19 nt, Artificial Sequence
  Description of Artificial Sequence: Synthetic oligonucleotide
ggguauugcugaauuucag

SEQ ID NO: 287885 - RNA, 19 nt, Artificial Sequence
  Description of Artificial Sequence: Synthetic oligonucleotide
aaccaacaugggccagcca

SEQ ID NO: 287886 - RNA, 19 nt, Artificial Sequence
  Description of Artificial Sequence: Synthetic oligonucleotide
uggugcgaguccuguaaua

SEQ ID NO: 287887 - RNA, 19 nt, Artificial Sequence
  Description of Artificial Sequence: Synthetic oligonucleotide
cucauuggguaauuggcau

SEQ ID NO: 287888 - RNA, 19 nt, Artificial Sequence
  Description of Artificial Sequence: Synthetic oligonucleotide
cagucuuaguggcccuggc

SEQ ID NO: 287889 - RNA, 19 nt, Artificial Sequence
  Description of Artificial Sequence: Synthetic oligonucleotide
agugggccccuguuacucu

SEQ ID NO: 287890 - RNA, 19 nt, Artificial Sequence
  Description of Artificial Sequence: Synthetic oligonucleotide
guuagcagagaggaaugua

SEQ ID NO: 287891 - RNA, 19 nt, Artificial Sequence
  Description of Artificial Sequence: Synthetic oligonucleotide
guaaguaccuggugcgagu

SEQ ID NO: 287892 - RNA, 19 nt, Artificial Sequence
  Description of Artificial Sequence: Synthetic oligonucleotide
gcgucccugguguagcagg

SEQ ID NO: 287893 - RNA, 19 nt, Artificial Sequence
  Description of Artificial Sequence: Synthetic oligonucleotide
ccuaccuucaugaaugggu

SEQ ID NO: 287894 - RNA, 19 nt, Artificial Sequence
  Description of Artificial Sequence: Synthetic oligonucleotide
ggauagacaccaagcgagc

SEQ ID NO: 287895 - RNA, 19 nt, Artificial Sequence
  Description of Artificial Sequence: Synthetic oligonucleotide
cuuagguuggggcuuuggu

SEQ ID NO: 287896 - RNA, 19 nt, Artificial Sequence
  Description of Artificial Sequence: Synthetic oligonucleotide
ugggcgggccauagaggug

SEQ ID NO: 287897 - RNA, 19 nt, Artificial Sequence
  Description of Artificial Sequence: Synthetic oligonucleotide
aaguuccgguugaugcugu

SEQ ID NO: 287898 - RNA, 19 nt, Artificial Sequence
  Description of Artificial Sequence: Synthetic oligonucleotide
gacaaucggucugagccua

SEQ ID NO: 287899 - RNA, 19 nt, Artificial Sequence
  Description of Artificial Sequence: Synthetic oligonucleotide
auuggguaauuggcauucu

SEQ ID NO: 287900 - RNA, 19 nt, Artificial Sequence
  Description of Artificial Sequence: Synthetic oligonucleotide
ggucaccgaagccuuggug

SEQ ID NO: 287901 - RNA, 19 nt, Artificial Sequence
  Description of Artificial Sequence: Synthetic oligonucleotide
ugacguggauggacuccga

SEQ ID NO: 287902 - RNA, 19 nt, Artificial Sequence
  Description of Artificial Sequence: Synthetic oligonucleotide
acuaccugcuguauucaua

SEQ ID NO: 287903 - RNA, 19 nt, Artificial Sequence
  Description of Artificial Sequence: Synthetic oligonucleotide
ugggccccuguuacucuca

SEQ ID NO: 287904 - RNA, 19 nt, Artificial Sequence
  Description of Artificial Sequence: Synthetic oligonucleotide
gugggcgggccauagaggu

SEQ ID NO: 287905 - RNA, 19 nt, Artificial Sequence
  Description of Artificial Sequence: Synthetic oligonucleotide
agcacagcguuaaaacaua

SEQ ID NO: 287906 - RNA, 19 nt, Artificial Sequence
  Description of Artificial Sequence: Synthetic oligonucleotide
cugauuggaucucugguuu

SEQ ID NO: 287907 - RNA, 19 nt, Artificial Sequence
  Description of Artificial Sequence: Synthetic oligonucleotide
cauagagguguacaggcuu

SEQ ID NO: 287908 - RNA, 19 nt, Artificial Sequence
  Description of Artificial Sequence: Synthetic oligonucleotide
cauccguguccugagcauc

SEQ ID NO: 287909 - RNA, 19 nt, Artificial Sequence
  Description of Artificial Sequence: Synthetic oligonucleotide
ggguuagcagagaggaaug

SEQ ID NO: 287910 - RNA, 19 nt, Artificial Sequence
  Description of Artificial Sequence: Synthetic oligonucleotide
gucucgcuuaacacccuug

SEQ ID NO: 287911 - RNA, 19 nt, Artificial Sequence
  Description of Artificial Sequence: Synthetic oligonucleotide
guacuugccgggagccucc

SEQ ID NO: 287912 - RNA, 19 nt, Artificial Sequence
  Description of Artificial Sequence: Synthetic oligonucleotide
gucuacccguccaccagcc

SEQ ID NO: 287913 - RNA, 19 nt, Artificial Sequence
  Description of Artificial Sequence: Synthetic oligonucleotide
cguaucgcuuugcuaagag

SEQ ID NO: 287914 - RNA, 19 nt, Artificial Sequence
  Description of Artificial Sequence: Synthetic oligonucleotide
ucugagccuauggacuguu

SEQ ID NO: 287915 - RNA, 19 nt, Artificial Sequence
  Description of Artificial Sequence: Synthetic oligonucleotide
gggguuagcaacaggucuc

SEQ ID NO: 287916 - RNA, 19 nt, Artificial Sequence
  Description of Artificial Sequence: Synthetic oligonucleotide
aggucaccgaagccuuggu

SEQ ID NO: 287917 - RNA, 19 nt, Artificial Sequence
  Description of Artificial Sequence: Synthetic oligonucleotide
cuguaucacucgggcauac

SEQ ID NO: 287918 - RNA, 19 nt, Artificial Sequence
  Description of Artificial Sequence: Synthetic oligonucleotide
gugcgaguccuguaauaaa

SEQ ID NO: 287919 - RNA, 19 nt, Artificial Sequence
  Description of Artificial Sequence: Synthetic oligonucleotide
uacuugccgggagccuccg

SEQ ID NO: 287920 - RNA, 19 nt, Artificial Sequence
  Description of Artificial Sequence: Synthetic oligonucleotide
gcagucuuaguggcccugg

SEQ ID NO: 287921 - RNA, 19 nt, Artificial Sequence
  Description of Artificial Sequence: Synthetic oligonucleotide
ucugggugccucagaucuu

SEQ ID NO: 287922 - RNA, 19 nt, Artificial Sequence
  Description of Artificial Sequence: Synthetic oligonucleotide
caaucggucugagccuaug

SEQ ID NO: 287923 - RNA, 19 nt, Artificial Sequence
  Description of Artificial Sequence: Synthetic oligonucleotide
ggguacaguggaauacuac

SEQ ID NO: 287924 - RNA, 19 nt, Artificial Sequence
  Description of Artificial Sequence: Synthetic oligonucleotide
ggugggcgggccauagagg

SEQ ID NO: 287925 - RNA, 19 nt, Artificial Sequence
  Description of Artificial Sequence: Synthetic oligonucleotide
gcuagggguugugggauag

SEQ ID NO: 287926 - RNA, 19 nt, Artificial Sequence
  Description of Artificial Sequence: Synthetic oligonucleotide
gggcgagaguucuugggca

SEQ ID NO: 287927 - RNA, 19 nt, Artificial Sequence
  Description of Artificial Sequence: Synthetic oligonucleotide
cacuucaacuaaaggcacu

SEQ ID NO: 287928 - RNA, 19 nt, Artificial Sequence
  Description of Artificial Sequence: Synthetic oligonucleotide
cucgcuuaacacccuugaa

SEQ ID NO: 287929 - RNA, 19 nt, Artificial Sequence
  Description of Artificial Sequence: Synthetic oligonucleotide
gcgaguccuguaauaaaac

SEQ ID NO: 287930 - RNA, 19 nt, Artificial Sequence
  Description of Artificial Sequence: Synthetic oligonucleotide
cuaugucuuccguggggaa

SEQ ID NO: 287931 - RNA, 19 nt, Artificial Sequence
  Description of Artificial Sequence: Synthetic oligonucleotide
uugcacuccuggggauuag

SEQ ID NO: 287932 - RNA, 19 nt, Artificial Sequence
  Description of Artificial Sequence: Synthetic oligonucleotide
aggcuaccuuuuaggauca

SEQ ID NO: 287933 - RNA, 19 nt, Artificial Sequence
  Description of Artificial Sequence: Synthetic oligonucleotide
auucuucgcuucaggacuu

SEQ ID NO: 287934 - RNA, 19 nt, Artificial Sequence
  Description of Artificial Sequence: Synthetic oligonucleotide
aucuuagugggugguuguu

SEQ ID NO: 287935 - RNA, 19 nt, Artificial Sequence
  Description of Artificial Sequence: Synthetic oligonucleotide
ugcuugccucguagucuac

SEQ ID NO: 287936 - RNA, 19 nt, Artificial Sequence
  Description of Artificial Sequence: Synthetic oligonucleotide
ccuauggacuguugccgug

SEQ ID NO: 287937 - RNA, 19 nt, Artificial Sequence
  Description of Artificial Sequence: Synthetic oligonucleotide
caguccaugccuggagcuc

SEQ ID NO: 287938 - RNA, 19 nt, Artificial Sequence
  Description of Artificial Sequence: Synthetic oligonucleotide
ggcgagugcgucccuggug

SEQ ID NO: 287939 - RNA, 19 nt, Artificial Sequence
  Description of Artificial Sequence: Synthetic oligonucleotide
gagggcggguccucccuga

SEQ ID NO: 287940 - RNA, 19 nt, Artificial Sequence
  Description of Artificial Sequence: Synthetic oligonucleotide
aggccggcugguuguuugu

SEQ ID NO: 287941 - RNA, 19 nt, Artificial Sequence
  Description of Artificial Sequence: Synthetic oligonucleotide
ccuguucugccuuuaacgu

SEQ ID NO: 287942 - RNA, 19 nt, Artificial Sequence
  Description of Artificial Sequence: Synthetic oligonucleotide
gcacuccuggggauuaggc

SEQ ID NO: 287943 - RNA, 19 nt, Artificial Sequence
  Description of Artificial Sequence: Synthetic oligonucleotide
uucuucgcuucaggacuuc

SEQ ID NO: 287944 - RNA, 19 nt, Artificial Sequence
  Description of Artificial Sequence: Synthetic oligonucleotide
agcuagggguugugggaua

SEQ ID NO: 287945 - RNA, 19 nt, Artificial Sequence
  Description of Artificial Sequence: Synthetic oligonucleotide
guggcaagggugggcgggc

SEQ ID NO: 287946 - RNA, 19 nt, Artificial Sequence
  Description of Artificial Sequence: Synthetic oligonucleotide
gggauuaggcuaccuuuua

SEQ ID NO: 287947 - RNA, 19 nt, Artificial Sequence
  Description of Artificial Sequence: Synthetic oligonucleotide
auccgugcaugcagggccu

SEQ ID NO: 287948 - RNA, 19 nt, Artificial Sequence
  Description of Artificial Sequence: Synthetic oligonucleotide
uggcaagggugggcgggcc

SEQ ID NO: 287949 - RNA, 19 nt, Artificial Sequence
  Description of Artificial Sequence: Synthetic oligonucleotide
cauacccaucauacuuucu

SEQ ID NO: 287950 - RNA, 19 nt, Artificial Sequence
  Description of Artificial Sequence: Synthetic oligonucleotide
cuugcucguggagaaugaa

SEQ ID NO: 287951 - RNA, 19 nt, Artificial Sequence
  Description of Artificial Sequence: Synthetic oligonucleotide
gaggguuagcagagaggaa

SEQ ID NO: 287952 - RNA, 19 nt, Artificial Sequence
  Description of Artificial Sequence: Synthetic oligonucleotide
guaccuggugcgaguccug

SEQ ID NO: 287953 - RNA, 19 nt, Artificial Sequence
  Description of Artificial Sequence: Synthetic oligonucleotide
aguggucacuggagaauua

SEQ ID NO: 287954 - RNA, 19 nt, Artificial Sequence
  Description of Artificial Sequence: Synthetic oligonucleotide
gcgagugcgucccuggugu

SEQ ID NO: 287955 - RNA, 19 nt, Artificial Sequence
  Description of Artificial Sequence: Synthetic oligonucleotide
ggagcaucuguaaguaccu

SEQ ID NO: 287956 - RNA, 19 nt, Artificial Sequence
  Description of Artificial Sequence: Synthetic oligonucleotide
gagcuagggguugugggau

SEQ ID NO: 287957 - RNA, 19 nt, Artificial Sequence
  Description of Artificial Sequence: Synthetic oligonucleotide
caaggguauugcugaauuu

SEQ ID NO: 287958 - RNA, 19 nt, Artificial Sequence
  Description of Artificial Sequence: Synthetic oligonucleotide
uccuucugguagggcgaga

SEQ ID NO: 287959 - RNA, 19 nt, Artificial Sequence
  Description of Artificial Sequence: Synthetic oligonucleotide
ccuggugcgaguccuguaa

SEQ ID NO: 287960 - RNA, 19 nt, Artificial Sequence
  Description of Artificial Sequence: Synthetic oligonucleotide
ggaagaccuuucuuauuau

SEQ ID NO: 287961 - RNA, 19 nt, Artificial Sequence
  Description of Artificial Sequence: Synthetic oligonucleotide
cccugcuugccucguaguc

SEQ ID NO: 287962 - RNA, 19 nt, Artificial Sequence
  Description of Artificial Sequence: Synthetic oligonucleotide
gggugacguggauggacuc

SEQ ID NO: 287963 - RNA, 19 nt, Artificial Sequence
  Description of Artificial Sequence: Synthetic oligonucleotide
ccuguuacucucaccagau

SEQ ID NO: 287964 - RNA, 19 nt, Artificial Sequence
  Description of Artificial Sequence: Synthetic oligonucleotide
ccauuccgauauagucccc

SEQ ID NO: 287965 - RNA, 19 nt, Artificial Sequence
  Description of Artificial Sequence: Synthetic oligonucleotide
gugcgucccugguguagca

SEQ ID NO: 287966 - RNA, 19 nt, Artificial Sequence
  Description of Artificial Sequence: Synthetic oligonucleotide
gguuagcagagaggaaugu

SEQ ID NO: 287967 - RNA, 19 nt, Artificial Sequence
  Description of Artificial Sequence: Synthetic oligonucleotide
gccuuuaacgucagcucaa

SEQ ID NO: 287968 - RNA, 19 nt, Artificial Sequence
  Description of Artificial Sequence: Synthetic oligonucleotide
gggcggguccucccugaag

SEQ ID NO: 287969 - RNA, 19 nt, Artificial Sequence
  Description of Artificial Sequence: Synthetic oligonucleotide
ccgguugaugcuguuucuc

SEQ ID NO: 287970 - RNA, 19 nt, Artificial Sequence
  Description of Artificial Sequence: Synthetic oligonucleotide
acaaucggucugagccuau

SEQ ID NO: 287971 - RNA, 19 nt, Artificial Sequence
  Description of Artificial Sequence: Synthetic oligonucleotide
gccuauggacuguugccgu

SEQ ID NO: 287972 - RNA, 19 nt, Artificial Sequence
  Description of Artificial Sequence: Synthetic oligonucleotide
cucuugccuacgaacuguu

SEQ ID NO: 287973 - RNA, 19 nt, Artificial Sequence
  Description of Artificial Sequence: Synthetic oligonucleotide
ccuugaaccuccugucgua

SEQ ID NO: 287974 - RNA, 19 nt, Artificial Sequence
  Description of Artificial Sequence: Synthetic oligonucleotide
ggucugaggcuuccucucu

SEQ ID NO: 287975 - RNA, 19 nt, Artificial Sequence
  Description of Artificial Sequence: Synthetic oligonucleotide
gccuacgaacuguugcagu

SEQ ID NO: 287976 - RNA, 19 nt, Artificial Sequence
  Description of Artificial Sequence: Synthetic oligonucleotide
ccacguuuucuguaucacu

SEQ ID NO: 287977 - RNA, 19 nt, Artificial Sequence
  Description of Artificial Sequence: Synthetic oligonucleotide
ggaauacuaccugcuguau

SEQ ID NO: 287978 - RNA, 19 nt, Artificial Sequence
  Description of Artificial Sequence: Synthetic oligonucleotide
cuggugcgaguccuguaau

SEQ ID NO: 287979 - RNA, 19 nt, Artificial Sequence
  Description of Artificial Sequence: Synthetic oligonucleotide
ggggauuaggcuaccuuuu

SEQ ID NO: 287980 - RNA, 19 nt, Artificial Sequence
  Description of Artificial Sequence: Synthetic oligonucleotide
guggauggacuccgacuuu

SEQ ID NO: 287981 - RNA, 19 nt, Artificial Sequence
  Description of Artificial Sequence: Synthetic oligonucleotide
cccuugaaccuccugucgu

SEQ ID NO: 287982 - RNA, 19 nt, Artificial Sequence
  Description of Artificial Sequence: Synthetic oligonucleotide
ggacacggacaggauccuc

SEQ ID NO: 287983 - RNA, 19 nt, Artificial Sequence
  Description of Artificial Sequence: Synthetic oligonucleotide
uccgugcaugcagggccuu

SEQ ID NO: 287984 - RNA, 19 nt, Artificial Sequence
  Description of Artificial Sequence: Synthetic oligonucleotide
gcggguccucccugaagga

SEQ ID NO: 287985 - RNA, 19 nt, Artificial Sequence
  Description of Artificial Sequence: Synthetic oligonucleotide
cugaggcuuccucucucau

SEQ ID NO: 287986 - RNA, 19 nt, Artificial Sequence
  Description of Artificial Sequence: Synthetic oligonucleotide
gcagcucucauuggguaau

SEQ ID NO: 287987 - RNA, 19 nt, Artificial Sequence
  Description of Artificial Sequence: Synthetic oligonucleotide
gccggcugguuguuugucu

SEQ ID NO: 287988 - RNA, 19 nt, Artificial Sequence
  Description of Artificial Sequence: Synthetic oligonucleotide
gcuaccuuuuaggaucauu

SEQ ID NO: 287989 - RNA, 19 nt, Artificial Sequence
  Description of Artificial Sequence: Synthetic oligonucleotide
ccugucguacuuggugaca

SEQ ID NO: 287990 - RNA, 19 nt, Artificial Sequence
  Description of Artificial Sequence: Synthetic oligonucleotide
caccgaagccuugguggaa

SEQ ID NO: 287991 - RNA, 19 nt, Artificial Sequence
  Description of Artificial Sequence: Synthetic oligonucleotide
gcuuugcuaagaggcucaa

SEQ ID NO: 287992 - RNA, 19 nt, Artificial Sequence
  Description of Artificial Sequence: Synthetic oligonucleotide
ggccggcugguuguuuguc

SEQ ID NO: 287993 - RNA, 19 nt, Artificial Sequence
  Description of Artificial Sequence: Synthetic oligonucleotide
cccguccaccagccagaag

SEQ ID NO: 287994 - RNA, 19 nt, Artificial Sequence
  Description of Artificial Sequence: Synthetic oligonucleotide
gcgggccauagagguguac

SEQ ID NO: 287995 - RNA, 19 nt, Artificial Sequence
  Description of Artificial Sequence: Synthetic oligonucleotide
ccggcugguuguuugucuu

SEQ ID NO: 287996 - RNA, 19 nt, Artificial Sequence
  Description of Artificial Sequence: Synthetic oligonucleotide
cgggcauacccaucauacu

SEQ ID NO: 287997 - RNA, 19 nt, Artificial Sequence
  Description of Artificial Sequence: Synthetic oligonucleotide
gcggccaguccuuggcauu

SEQ ID NO: 287998 - RNA, 19 nt, Artificial Sequence
  Description of Artificial Sequence: Synthetic oligonucleotide
ggaccccaguucuccuuuu

SEQ ID NO: 287999 - RNA, 19 nt, Artificial Sequence
  Description of Artificial Sequence: Synthetic oligonucleotide
cagcucucauuggguaauu

SEQ ID NO: 288000 - RNA, 19 nt, Artificial Sequence
  Description of Artificial Sequence: Synthetic oligonucleotide
ggaggccggcugguuguuu

SEQ ID NO: 288001 - RNA, 19 nt, Artificial Sequence
  Description of Artificial Sequence: Synthetic oligonucleotide
caccagccagaaggaucuu

SEQ ID NO: 288002 - RNA, 19 nt, Artificial Sequence
  Description of Artificial Sequence: Synthetic oligonucleotide
ccuuggcgagugcgucccu

SEQ ID NO: 288003 - RNA, 19 nt, Artificial Sequence
  Description of Artificial Sequence: Synthetic oligonucleotide
uuuaauacaggaaugaucc

SEQ ID NO: 288004 - RNA, 19 nt, Artificial Sequence
  Description of Artificial Sequence: Synthetic oligonucleotide
auuguuagcaaguaaaggg

SEQ ID NO: 288005 - RNA, 19 nt, Artificial Sequence
  Description of Artificial Sequence: Synthetic oligonucleotide
uuaaccucaauauaguacc

SEQ ID NO: 288006 - RNA, 19 nt, Artificial Sequence
  Description of Artificial Sequence: Synthetic oligonucleotide
uacauuaucacgaagccca

SEQ ID NO: 288007 - RNA, 19 nt, Artificial Sequence
  Description of Artificial Sequence: Synthetic oligonucleotide
ucuuuuacaucuaaaucgg

SEQ ID NO: 288008 - RNA, 19 nt, Artificial Sequence
  Description of Artificial Sequence: Synthetic oligonucleotide
aucggaucaacacugaugg

SEQ ID NO: 288009 - RNA, 19 nt, Artificial Sequence
  Description of Artificial Sequence: Synthetic oligonucleotide
uucuuuacuuuccacaccg

SEQ ID NO: 288010 - RNA, 19 nt, Artificial Sequence
  Description of Artificial Sequence: Synthetic oligonucleotide
aguaaugucgcauaggcca

SEQ ID NO: 288011 - RNA, 19 nt, Artificial Sequence
  Description of Artificial Sequence: Synthetic oligonucleotide
aacguagccaauuuuaacu

SEQ ID NO: 288012 - RNA, 19 nt, Artificial Sequence
  Description of Artificial Sequence: Synthetic oligonucleotide
gauacaacggcacaaaauc

SEQ ID NO: 288013 - RNA, 19 nt, Artificial Sequence
  Description of Artificial Sequence: Synthetic oligonucleotide
ugaugaugaacacuguucc

SEQ ID NO: 288014 - RNA, 19 nt, Artificial Sequence
  Description of Artificial Sequence: Synthetic oligonucleotide
ucuaaaucgggcuuuaggu

SEQ ID NO: 288015 - RNA, 19 nt, Artificial Sequence
  Description of Artificial Sequence: Synthetic oligonucleotide
aauaggccuuuaaagaacc

SEQ ID NO: 288016 - RNA, 19 nt, Artificial Sequence
  Description of Artificial Sequence: Synthetic oligonucleotide
aaacguagccaauuuuaac

SEQ ID NO: 288017 - RNA, 19 nt, Artificial Sequence
  Description of Artificial Sequence: Synthetic oligonucleotide
aacauaucacugcauacug

SEQ ID NO: 288018 - RNA, 19 nt, Artificial Sequence
  Description of Artificial Sequence: Synthetic oligonucleotide
uaguagacguccaacagag

SEQ ID NO: 288019 - RNA, 19 nt, Artificial Sequence
  Description of Artificial Sequence: Synthetic oligonucleotide
ugaaagucauaauauggcc

SEQ ID NO: 288020 - RNA, 19 nt, Artificial Sequence
  Description of Artificial Sequence: Synthetic oligonucleotide
uccgaauaggccuuuaaag

SEQ ID NO: 288021 - RNA, 19 nt, Artificial Sequence
  Description of Artificial Sequence: Synthetic oligonucleotide
uuguuagcaaguaaagggc

SEQ ID NO: 288022 - RNA, 19 nt, Artificial Sequence
  Description of Artificial Sequence: Synthetic oligonucleotide
guuggagccguauaguucg

SEQ ID NO: 288023 - RNA, 19 nt, Artificial Sequence
  Description of Artificial Sequence: Synthetic oligonucleotide
aacugaaagucauaauaug

SEQ ID NO: 288024 - RNA, 19 nt, Artificial Sequence
  Description of Artificial Sequence: Synthetic oligonucleotide
aauaugaucccgcuaaguu

SEQ ID NO: 288025 - RNA, 19 nt, Artificial Sequence
  Description of Artificial Sequence: Synthetic oligonucleotide
ugucugauaaccuggagac

SEQ ID NO: 288026 - RNA, 19 nt, Artificial Sequence
  Description of Artificial Sequence: Synthetic oligonucleotide
aggaugauucuccaaauag

SEQ ID NO: 288027 - RNA, 19 nt, Artificial Sequence
  Description of Artificial Sequence: Synthetic oligonucleotide
auugccucuccccacaucg

SEQ ID NO: 288028 - RNA, 19 nt, Artificial Sequence
  Description of Artificial Sequence: Synthetic oligonucleotide
aagacaaaagacauugaag

SEQ ID NO: 288029 - RNA, 19 nt, Artificial Sequence
  Description of Artificial Sequence: Synthetic oligonucleotide
uaugaucccgcuaaguucu

SEQ ID NO: 288030 - RNA, 19 nt, Artificial Sequence
  Description of Artificial Sequence: Synthetic oligonucleotide
ucauaauucagucccgaca

SEQ ID NO: 288031 - RNA, 19 nt, Artificial Sequence
  Description of Artificial Sequence: Synthetic oligonucleotide
ugaauaacuagcucugucu

SEQ ID NO: 288032 - RNA, 19 nt, Artificial Sequence
  Description of Artificial Sequence: Synthetic oligonucleotide
agugcuacaauaucuccuc

SEQ ID NO: 288033 - RNA, 19 nt, Artificial Sequence
  Description of Artificial Sequence: Synthetic oligonucleotide
auaugaucccgcuaaguuc

SEQ ID NO: 288034 - RNA, 19 nt, Artificial Sequence
  Description of Artificial Sequence: Synthetic oligonucleotide
auaugaaaguuuaauacag

SEQ ID NO: 288035 - RNA, 19 nt, Artificial Sequence
  Description of Artificial Sequence: Synthetic oligonucleotide
uaaugcaaggccauauuug

SEQ ID NO: 288036 - RNA, 19 nt, Artificial Sequence
  Description of Artificial Sequence: Synthetic oligonucleotide
ucauaauauggccauuggc

SEQ ID NO: 288037 - RNA, 19 nt, Artificial Sequence
  Description of Artificial Sequence: Synthetic oligonucleotide
accaguaacucuuuagguc

SEQ ID NO: 288038 - RNA, 19 nt, Artificial Sequence
  Description of Artificial Sequence: Synthetic oligonucleotide
auuaucacgaagcccauca

SEQ ID NO: 288039 - RNA, 19 nt, Artificial Sequence
  Description of Artificial Sequence: Synthetic oligonucleotide
uaaaucgggcuuuagguca

SEQ ID NO: 288040 - RNA, 19 nt, Artificial Sequence
  Description of Artificial Sequence: Synthetic oligonucleotide
agagauagccucucgggac

SEQ ID NO: 288041 - RNA, 19 nt, Artificial Sequence
  Description of Artificial Sequence: Synthetic oligonucleotide
auaugcuccaguucgcacg

SEQ ID NO: 288042 - RNA, 19 nt, Artificial Sequence
  Description of Artificial Sequence: Synthetic oligonucleotide
aucuaaaucgggcuuuagg

SEQ ID NO: 288043 - RNA, 19 nt, Artificial Sequence
  Description of Artificial Sequence: Synthetic oligonucleotide
aacguugugcucuuuccag

SEQ ID NO: 288044 - RNA, 19 nt, Artificial Sequence
  Description of Artificial Sequence: Synthetic oligonucleotide
gagcaauugagucaugcgc

SEQ ID NO: 288045 - RNA, 19 nt, Artificial Sequence
  Description of Artificial Sequence: Synthetic oligonucleotide
cuggcuauccgcauguugg

SEQ ID NO: 288046 - RNA, 19 nt, Artificial Sequence
  Description of Artificial Sequence: Synthetic oligonucleotide
agcaauugagucaugcgcc

SEQ ID NO: 288047 - RNA, 19 nt, Artificial Sequence
  Description of Artificial Sequence: Synthetic oligonucleotide
gaauaacuagcucugucug

SEQ ID NO: 288048 - RNA, 19 nt, Artificial Sequence
  Description of Artificial Sequence: Synthetic oligonucleotide
aaguaguagacguccaaca

SEQ ID NO: 288049 - RNA, 19 nt, Artificial Sequence
  Description of Artificial Sequence: Synthetic oligonucleotide
ugugcaaggcuccucgagg

SEQ ID NO: 288050 - RNA, 19 nt, Artificial Sequence
  Description of Artificial Sequence: Synthetic oligonucleotide
gaccauuucagacuuagga

SEQ ID NO: 288051 - RNA, 19 nt, Artificial Sequence
  Description of Artificial Sequence: Synthetic oligonucleotide
cuuuagcugaauuaaugug

SEQ ID NO: 288052 - RNA, 19 nt, Artificial Sequence
  Description of Artificial Sequence: Synthetic oligonucleotide
guugucgugacuuccgagg

SEQ ID NO: 288053 - RNA, 19 nt, Artificial Sequence
  Description of Artificial Sequence: Synthetic oligonucleotide
uguuagcaaguaaagggca

SEQ ID NO: 288054 - RNA, 19 nt, Artificial Sequence
  Description of Artificial Sequence: Synthetic oligonucleotide
ucugucaauaugaucccgc

SEQ ID NO: 288055 - RNA, 19 nt, Artificial Sequence
  Description of Artificial Sequence: Synthetic oligonucleotide
agugagaugaccuuagcuu

SEQ ID NO: 288056 - RNA, 19 nt, Artificial Sequence
  Description of Artificial Sequence: Synthetic oligonucleotide
acaccaacugaauaacuag

SEQ ID NO: 288057 - RNA, 19 nt, Artificial Sequence
  Description of Artificial Sequence: Synthetic oligonucleotide
aauaacuagcucugucuga

SEQ ID NO: 288058 - RNA, 19 nt, Artificial Sequence
  Description of Artificial Sequence: Synthetic oligonucleotide
uagucaaccauugcaaugc

SEQ ID NO: 288059 - RNA, 19 nt, Artificial Sequence
  Description of Artificial Sequence: Synthetic oligonucleotide
auauaguaccacuuggaga

SEQ ID NO: 288060 - RNA, 19 nt, Artificial Sequence
  Description of Artificial Sequence: Synthetic oligonucleotide
uguucauaauucagucccg

SEQ ID NO: 288061 - RNA, 19 nt, Artificial Sequence
  Description of Artificial Sequence: Synthetic oligonucleotide
ucuaccuuuagcugaauua

SEQ ID NO: 288062 - RNA, 19 nt, Artificial Sequence
  Description of Artificial Sequence: Synthetic oligonucleotide
gaucguuggagccguauag

SEQ ID NO: 288063 - RNA, 19 nt, Artificial Sequence
  Description of Artificial Sequence: Synthetic oligonucleotide
aguuggucuuacuggauuc

SEQ ID NO: 288064 - RNA, 19 nt, Artificial Sequence
  Description of Artificial Sequence: Synthetic oligonucleotide
uauaguucgauggugccga

SEQ ID NO: 288065 - RNA, 19 nt, Artificial Sequence
  Description of Artificial Sequence: Synthetic oligonucleotide
aaccucaauauaguaccac

SEQ ID NO: 288066 - RNA, 19 nt, Artificial Sequence
  Description of Artificial Sequence: Synthetic oligonucleotide
ccaguaacucuuuaggucg

SEQ ID NO: 288067 - RNA, 19 nt, Artificial Sequence
  Description of Artificial Sequence: Synthetic oligonucleotide
aagguacauuaucacgaag

SEQ ID NO: 288068 - RNA, 19 nt, Artificial Sequence
  Description of Artificial Sequence: Synthetic oligonucleotide
acaagguacauuaucacga

SEQ ID NO: 288069 - RNA, 19 nt, Artificial Sequence
  Description of Artificial Sequence: Synthetic oligonucleotide
gauugcaccuuuuaaccuc

SEQ ID NO: 288070 - RNA, 19 nt, Artificial Sequence
  Description of Artificial Sequence: Synthetic oligonucleotide
ugagucaugcgccacacuu

SEQ ID NO: 288071 - RNA, 19 nt, Artificial Sequence
  Description of Artificial Sequence: Synthetic oligonucleotide
gaaagucauaauauggcca

SEQ ID NO: 288072 - RNA, 19 nt, Artificial Sequence
  Description of Artificial Sequence: Synthetic oligonucleotide
ucaguuggcaagcuuaauu

SEQ ID NO: 288073 - RNA, 19 nt, Artificial Sequence
  Description of Artificial Sequence: Synthetic oligonucleotide
ucgaaucuaccuuuagcug

SEQ ID NO: 288074 - RNA, 19 nt, Artificial Sequence
  Description of Artificial Sequence: Synthetic oligonucleotide
uuugcagcgauccucugua

SEQ ID NO: 288075 - RNA, 19 nt, Artificial Sequence
  Description of Artificial Sequence: Synthetic oligonucleotide
acggcacaaaaucuuuugg

SEQ ID NO: 288076 - RNA, 19 nt, Artificial Sequence
  Description of Artificial Sequence: Synthetic oligonucleotide
ucuagaaauugaaccagua

SEQ ID NO: 288077 - RNA, 19 nt, Artificial Sequence
  Description of Artificial Sequence: Synthetic oligonucleotide
cuuuuacaucuaaaucggg

SEQ ID NO: 288078 - RNA, 19 nt, Artificial Sequence
  Description of Artificial Sequence: Synthetic oligonucleotide
guuuaauacaggaaugauc

SEQ ID NO: 288079 - RNA, 19 nt, Artificial Sequence
  Description of Artificial Sequence: Synthetic oligonucleotide
gucauaauauggccauugg

SEQ ID NO: 288080 - RNA, 19 nt, Artificial Sequence
  Description of Artificial Sequence: Synthetic oligonucleotide
aguggugagcuuuugacuu

SEQ ID NO: 288081 - RNA, 19 nt, Artificial Sequence
  Description of Artificial Sequence: Synthetic oligonucleotide
ucuucgggaacguugugcu

SEQ ID NO: 288082 - RNA, 19 nt, Artificial Sequence
  Description of Artificial Sequence: Synthetic oligonucleotide
cacaaucacuggcugaagg

SEQ ID NO: 288083 - RNA, 19 nt, Artificial Sequence
  Description of Artificial Sequence: Synthetic oligonucleotide
caccaacugaauaacuagc

SEQ ID NO: 288084 - RNA, 19 nt, Artificial Sequence
  Description of Artificial Sequence: Synthetic oligonucleotide
cuaaaucgggcuuuagguc

SEQ ID NO: 288085 - RNA, 19 nt, Artificial Sequence
  Description of Artificial Sequence: Synthetic oligonucleotide
caucggaucaacacugaug

SEQ ID NO: 288086 - RNA, 19 nt, Artificial Sequence
  Description of Artificial Sequence: Synthetic oligonucleotide
accucaauauaguaccacu

SEQ ID NO: 288087 - RNA, 19 nt, Artificial Sequence
  Description of Artificial Sequence: Synthetic oligonucleotide
aggggcaaguaguagacgu

SEQ ID NO: 288088 - RNA, 19 nt, Artificial Sequence
  Description of Artificial Sequence: Synthetic oligonucleotide
guaaggaucguuggagccg

SEQ ID NO: 288089 - RNA, 19 nt, Artificial Sequence
  Description of Artificial Sequence: Synthetic oligonucleotide
gucgaaucuaccuuuagcu

SEQ ID NO: 288090 - RNA, 19 nt, Artificial Sequence
  Description of Artificial Sequence: Synthetic oligonucleotide
guaaggggcaaguaguaga

SEQ ID NO: 288091 - RNA, 19 nt, Artificial Sequence
  Description of Artificial Sequence: Synthetic oligonucleotide
cugauuuauugccucuccc

SEQ ID NO: 288092 - RNA, 19 nt, Artificial Sequence
  Description of Artificial Sequence: Synthetic oligonucleotide
uuaauacaggaaugaucca

SEQ ID NO: 288093 - RNA, 19 nt, Artificial Sequence
  Description of Artificial Sequence: Synthetic oligonucleotide
uuacaucuaaaucgggcuu

SEQ ID NO: 288094 - RNA, 19 nt, Artificial Sequence
  Description of Artificial Sequence: Synthetic oligonucleotide
uccgcauguugguaagggg

SEQ ID NO: 288095 - RNA, 19 nt, Artificial Sequence
  Description of Artificial Sequence: Synthetic oligonucleotide
caucugucaauaugauccc

SEQ ID NO: 288096 - RNA, 19 nt, Artificial Sequence
  Description of Artificial Sequence: Synthetic oligonucleotide
guauaguucgauggugccg

SEQ ID NO: 288097 - RNA, 19 nt, Artificial Sequence
  Description of Artificial Sequence: Synthetic oligonucleotide
auugagucaugcgccacac

SEQ ID NO: 288098 - RNA, 19 nt, Artificial Sequence
  Description of Artificial Sequence: Synthetic oligonucleotide
uucauaauucagucccgac

SEQ ID NO: 288099 - RNA, 19 nt, Artificial Sequence
  Description of Artificial Sequence: Synthetic oligonucleotide
ugcgaaguuggagauuugc

SEQ ID NO: 288100 - RNA, 19 nt, Artificial Sequence
  Description of Artificial Sequence: Synthetic oligonucleotide
acgcagguggcauuaagca

SEQ ID NO: 288101 - RNA, 19 nt, Artificial Sequence
  Description of Artificial Sequence: Synthetic oligonucleotide
uucuucgggaacguugugc

SEQ ID NO: 288102 - RNA, 19 nt, Artificial Sequence
  Description of Artificial Sequence: Synthetic oligonucleotide
guaguagacguccaacaga

SEQ ID NO: 288103 - RNA, 19 nt, Artificial Sequence
  Description of Artificial Sequence: Synthetic oligonucleotide
ucgcacgugugugaguucg

SEQ ID NO: 288104 - RNA, 19 nt, Artificial Sequence
  Description of Artificial Sequence: Synthetic oligonucleotide
agaugagcaauugagucau

SEQ ID NO: 288105 - RNA, 19 nt, Artificial Sequence
  Description of Artificial Sequence: Synthetic oligonucleotide
gguacuggaauuguuagca

SEQ ID NO: 288106 - RNA, 19 nt, Artificial Sequence
  Description of Artificial Sequence: Synthetic oligonucleotide
ucuuugcgaaguuggagau

SEQ ID NO: 288107 - RNA, 19 nt, Artificial Sequence
  Description of Artificial Sequence: Synthetic oligonucleotide
auuugcagcgauccucugu

SEQ ID NO: 288108 - RNA, 19 nt, Artificial Sequence
  Description of Artificial Sequence: Synthetic oligonucleotide
gaucccgcuaaguucucug

SEQ ID NO: 288109 - RNA, 19 nt, Artificial Sequence
  Description of Artificial Sequence: Synthetic oligonucleotide
caguaaugucgcauaggcc

SEQ ID NO: 288110 - RNA, 19 nt, Artificial Sequence
  Description of Artificial Sequence: Synthetic oligonucleotide
  modified_base (19)..(19): a, c, u, g, unknown or other
cuuuacuuuccacaccgcn

SEQ ID NO: 288111 - RNA, 19 nt, Artificial Sequence
  Description of Artificial Sequence: Synthetic oligonucleotide
uccgguaaggaucguugga

SEQ ID NO: 288112 - RNA, 19 nt, Artificial Sequence
  Description of Artificial Sequence: Synthetic oligonucleotide
uacuggguuucacuaauuu

SEQ ID NO: 288113 - RNA, 19 nt, Artificial Sequence
  Description of Artificial Sequence: Synthetic oligonucleotide
gacgcagguggcauuaagc

SEQ ID NO: 288114 - RNA, 19 nt, Artificial Sequence
  Description of Artificial Sequence: Synthetic oligonucleotide
acggggacuucucaacauc

SEQ ID NO: 288115 - RNA, 19 nt, Artificial Sequence
  Description of Artificial Sequence: Synthetic oligonucleotide
aguuuaauacaggaaugau

SEQ ID NO: 288116 - RNA, 19 nt, Artificial Sequence
  Description of Artificial Sequence: Synthetic oligonucleotide
  modified_base (15)..(15): a, c, u, g, unknown or other
acuuuccacaccgcnuggc

SEQ ID NO: 288117 - RNA, 19 nt, Artificial Sequence
  Description of Artificial Sequence: Synthetic oligonucleotide
uuaagcagcccacggcauc

SEQ ID NO: 288118 - RNA, 19 nt, Artificial Sequence
  Description of Artificial Sequence: Synthetic oligonucleotide
caaguaguagacguccaac

SEQ ID NO: 288119 - RNA, 19 nt, Artificial Sequence
  Description of Artificial Sequence: Synthetic oligonucleotide
uccaguucgcacgugugug

SEQ ID NO: 288120 - RNA, 19 nt, Artificial Sequence
  Description of Artificial Sequence: Synthetic oligonucleotide
caucuuugcgaaguuggag

SEQ ID NO: 288121 - RNA, 19 nt, Artificial Sequence
  Description of Artificial Sequence: Synthetic oligonucleotide
gaacauaucacugcauacu

SEQ ID NO: 288122 - RNA, 19 nt, Artificial Sequence
  Description of Artificial Sequence: Synthetic oligonucleotide
gaacguugugcucuuucca

SEQ ID NO: 288123 - RNA, 19 nt, Artificial Sequence
  Description of Artificial Sequence: Synthetic oligonucleotide
uugucagcgcacagccagg

SEQ ID NO: 288124 - RNA, 19 nt, Artificial Sequence
  Description of Artificial Sequence: Synthetic oligonucleotide
ggucgaaucuaccuuuagc

SEQ ID NO: 288125 - RNA, 19 nt, Artificial Sequence
  Description of Artificial Sequence: Synthetic oligonucleotide
uuuaaguggugagcuuuug

SEQ ID NO: 288126 - RNA, 19 nt, Artificial Sequence
  Description of Artificial Sequence: Synthetic oligonucleotide
agcgauccucuguaacaac

SEQ ID NO: 288127 - RNA, 19 nt, Artificial Sequence
  Description of Artificial Sequence: Synthetic oligonucleotide
cuauccgcauguugguaag

SEQ ID NO: 288128 - RNA, 19 nt, Artificial Sequence
  Description of Artificial Sequence: Synthetic oligonucleotide
cauaugcuccaguucgcac

SEQ ID NO: 288129 - RNA, 19 nt, Artificial Sequence
  Description of Artificial Sequence: Synthetic oligonucleotide
ugccauuacaguugccaaa

SEQ ID NO: 288130 - RNA, 19 nt, Artificial Sequence
  Description of Artificial Sequence: Synthetic oligonucleotide
auaggccuuuaaagaaccc

SEQ ID NO: 288131 - RNA, 19 nt, Artificial Sequence
  Description of Artificial Sequence: Synthetic oligonucleotide
aucaucggaggguacugga

SEQ ID NO: 288132 - RNA, 19 nt, Artificial Sequence
  Description of Artificial Sequence: Synthetic oligonucleotide
uaaggaucguuggagccgu

SEQ ID NO: 288133 - RNA, 19 nt, Artificial Sequence
  Description of Artificial Sequence: Synthetic oligonucleotide
gagucugccuuucuaguaa

SEQ ID NO: 288134 - RNA, 19 nt, Artificial Sequence
  Description of Artificial Sequence: Synthetic oligonucleotide
aaugucgcauaggccagcu

SEQ ID NO: 288135 - RNA, 19 nt, Artificial Sequence
  Description of Artificial Sequence: Synthetic oligonucleotide
guaaugucgcauaggccag

SEQ ID NO: 288136 - RNA, 19 nt, Artificial Sequence
  Description of Artificial Sequence: Synthetic oligonucleotide
augaccuuagcuugcuuuu

SEQ ID NO: 288137 - RNA, 19 nt, Artificial Sequence
  Description of Artificial Sequence: Synthetic oligonucleotide
agauuugcagcgauccucu

SEQ ID NO: 288138 - RNA, 19 nt, Artificial Sequence
  Description of Artificial Sequence: Synthetic oligonucleotide
gaugugcugugcaaggcuc

SEQ ID NO: 288139 - RNA, 19 nt, Artificial Sequence
  Description of Artificial Sequence: Synthetic oligonucleotide
auacaacggcacaaaaucu

SEQ ID NO: 288140 - RNA, 19 nt, Artificial Sequence
  Description of Artificial Sequence: Synthetic oligonucleotide
gugcuacaauaucuccucg

SEQ ID NO: 288141 - RNA, 19 nt, Artificial Sequence
  Description of Artificial Sequence: Synthetic oligonucleotide
ggcauaugaaaguuuaaua

SEQ ID NO: 288142 - RNA, 19 nt, Artificial Sequence
  Description of Artificial Sequence: Synthetic oligonucleotide
cuaccuuuagcugaauuaa

SEQ ID NO: 288143 - RNA, 19 nt, Artificial Sequence
  Description of Artificial Sequence: Synthetic oligonucleotide
gugaguucgcagguaaagc

SEQ ID NO: 288144 - RNA, 19 nt, Artificial Sequence
  Description of Artificial Sequence: Synthetic oligonucleotide
ugcgccacacuuuuccauc

SEQ ID NO: 288145 - RNA, 19 nt, Artificial Sequence
  Description of Artificial Sequence: Synthetic oligonucleotide
agucaugcgccacacuuuu

SEQ ID NO: 288146 - RNA, 19 nt, Artificial Sequence
  Description of Artificial Sequence: Synthetic oligonucleotide
agccguauaguucgauggu

SEQ ID NO: 288147 - RNA, 19 nt, Artificial Sequence
  Description of Artificial Sequence: Synthetic oligonucleotide
ucgcagguaaagccaugug

SEQ ID NO: 288148 - RNA, 19 nt, Artificial Sequence
  Description of Artificial Sequence: Synthetic oligonucleotide
aggucgaaucuaccuuuag

SEQ ID NO: 288149 - RNA, 19 nt, Artificial Sequence
  Description of Artificial Sequence: Synthetic oligonucleotide
  modified_base (5)..(5): a, c, u, g, unknown or other
ccgcnuggccacuacaugg

SEQ ID NO: 288150 - RNA, 19 nt, Artificial Sequence
  Description of Artificial Sequence: Synthetic oligonucleotide
gaguucgcagguaaagcca

SEQ ID NO: 288151 - RNA, 19 nt, Artificial Sequence
  Description of Artificial Sequence: Synthetic oligonucleotide
uauccgcauguugguaagg

SEQ ID NO: 288152 - RNA, 19 nt, Artificial Sequence
  Description of Artificial Sequence: Synthetic oligonucleotide
ucguuggagccguauaguu

SEQ ID NO: 288153 - RNA, 19 nt, Artificial Sequence
  Description of Artificial Sequence: Synthetic oligonucleotide
cugugcaaggcuccucgag

SEQ ID NO: 288154 - RNA, 19 nt, Artificial Sequence
  Description of Artificial Sequence: Synthetic oligonucleotide
  modified_base (6)..(6): a, c, u, g, unknown or other
accgcnuggccacuacaug

SEQ ID NO: 288155 - RNA, 19 nt, Artificial Sequence
  Description of Artificial Sequence: Synthetic oligonucleotide
gaaucuaccuuuagcugaa

SEQ ID NO: 288156 - RNA, 19 nt, Artificial Sequence
  Description of Artificial Sequence: Synthetic oligonucleotide
ccguauaguucgauggugc

SEQ ID NO: 288157 - RNA, 19 nt, Artificial Sequence
  Description of Artificial Sequence: Synthetic oligonucleotide
ccacaucggaucaacacug

SEQ ID NO: 288158 - RNA, 19 nt, Artificial Sequence
  Description of Artificial Sequence: Synthetic oligonucleotide
cacgugugugaguucgcag

SEQ ID NO: 288159 - RNA, 19 nt, Artificial Sequence
  Description of Artificial Sequence: Synthetic oligonucleotide
ccgaauaggccuuuaaaga

SEQ ID NO: 288160 - RNA, 19 nt, Artificial Sequence
  Description of Artificial Sequence: Synthetic oligonucleotide
uaguucgauggugccgagg

SEQ ID NO: 288161 - RNA, 19 nt, Artificial Sequence
  Description of Artificial Sequence: Synthetic oligonucleotide
auugcaccuuuuaaccuca

SEQ ID NO: 288162 - RNA, 19 nt, Artificial Sequence
  Description of Artificial Sequence: Synthetic oligonucleotide
gucaagagacugugcacca

SEQ ID NO: 288163 - RNA, 19 nt, Artificial Sequence
  Description of Artificial Sequence: Synthetic oligonucleotide
guucauaauucagucccga

SEQ ID NO: 288164 - RNA, 19 nt, Artificial Sequence
  Description of Artificial Sequence: Synthetic oligonucleotide
ugcaccuuuuaaccucaau

SEQ ID NO: 288165 - RNA, 19 nt, Artificial Sequence
  Description of Artificial Sequence: Synthetic oligonucleotide
acaucggaucaacacugau

SEQ ID NO: 288166 - RNA, 19 nt, Artificial Sequence
  Description of Artificial Sequence: Synthetic oligonucleotide
cagagauagccucucggga

SEQ ID NO: 288167 - RNA, 19 nt, Artificial Sequence
  Description of Artificial Sequence: Synthetic oligonucleotide
gucgugacuuccgagguga

SEQ ID NO: 288168 - RNA, 19 nt, Artificial Sequence
  Description of Artificial Sequence: Synthetic oligonucleotide
guggauggaugagacugag

SEQ ID NO: 288169 - RNA, 19 nt, Artificial Sequence
  Description of Artificial Sequence: Synthetic oligonucleotide
acucuuuaggucgaaucua

SEQ ID NO: 288170 - RNA, 19 nt, Artificial Sequence
  Description of Artificial Sequence: Synthetic oligonucleotide
uaaugucgcauaggccagc

SEQ ID NO: 288171 - RNA, 19 nt, Artificial Sequence
  Description of Artificial Sequence: Synthetic oligonucleotide
  modified_base (2)..(2): a, c, u, g, unknown or other
cnuggccacuacauggaga

SEQ ID NO: 288172 - RNA, 19 nt, Artificial Sequence
  Description of Artificial Sequence: Synthetic oligonucleotide
aucguuggagccguauagu

SEQ ID NO: 288173 - RNA, 19 nt, Artificial Sequence
  Description of Artificial Sequence: Synthetic oligonucleotide
gcaaguaaagggcauuuua

SEQ ID NO: 288174 - RNA, 19 nt, Artificial Sequence
  Description of Artificial Sequence: Synthetic oligonucleotide
gguaaggggcaaguaguag

SEQ ID NO: 288175 - RNA, 19 nt, Artificial Sequence
  Description of Artificial Sequence: Synthetic oligonucleotide
agucugccuuucuaguaaa

SEQ ID NO: 288176 - RNA, 19 nt, Artificial Sequence
  Description of Artificial Sequence: Synthetic oligonucleotide
gggcaaguaguagacgucc

SEQ ID NO: 288177 - RNA, 19 nt, Artificial Sequence
  Description of Artificial Sequence: Synthetic oligonucleotide
ucagacgcagguggcauua

SEQ ID NO: 288178 - RNA, 19 nt, Artificial Sequence
  Description of Artificial Sequence: Synthetic oligonucleotide
gguugucgugacuuccgag

SEQ ID NO: 288179 - RNA, 19 nt, Artificial Sequence
  Description of Artificial Sequence: Synthetic oligonucleotide
gagauagccucucgggacu

SEQ ID NO: 288180 - RNA, 19 nt, Artificial Sequence
  Description of Artificial Sequence: Synthetic oligonucleotide
gcagcgauccucuguaaca

SEQ ID NO: 288181 - RNA, 19 nt, Artificial Sequence
  Description of Artificial Sequence: Synthetic oligonucleotide
auaguucgauggugccgag

SEQ ID NO: 288182 - RNA, 19 nt, Artificial Sequence
  Description of Artificial Sequence: Synthetic oligonucleotide
ugucagcgcacagccagga

SEQ ID NO: 288183 - RNA, 19 nt, Artificial Sequence
  Description of Artificial Sequence: Synthetic oligonucleotide
uugagucaugcgccacacu

SEQ ID NO: 288184 - RNA, 19 nt, Artificial Sequence
  Description of Artificial Sequence: Synthetic oligonucleotide
cucaacaucccuucauggu

SEQ ID NO: 288185 - RNA, 19 nt, Artificial Sequence
  Description of Artificial Sequence: Synthetic oligonucleotide
cauucucaagauugcaccu

SEQ ID NO: 288186 - RNA, 19 nt, Artificial Sequence
  Description of Artificial Sequence: Synthetic oligonucleotide
cuccgaauaggccuuuaaa

SEQ ID NO: 288187 - RNA, 19 nt, Artificial Sequence
  Description of Artificial Sequence: Synthetic oligonucleotide
agauagccucucgggacuc

SEQ ID NO: 288188 - RNA, 19 nt, Artificial Sequence
  Description of Artificial Sequence: Synthetic oligonucleotide
aggaaugauccaaggaaua

SEQ ID NO: 288189 - RNA, 19 nt, Artificial Sequence
  Description of Artificial Sequence: Synthetic oligonucleotide
uugcgaaguuggagauuug

SEQ ID NO: 288190 - RNA, 19 nt, Artificial Sequence
  Description of Artificial Sequence: Synthetic oligonucleotide
uaugaccauuucagacuua

SEQ ID NO: 288191 - RNA, 19 nt, Artificial Sequence
  Description of Artificial Sequence: Synthetic oligonucleotide
ccauuucagacuuaggacu

SEQ ID NO: 288192 - RNA, 19 nt, Artificial Sequence
  Description of Artificial Sequence: Synthetic oligonucleotide
caggaaugauccaaggaau

SEQ ID NO: 288193 - RNA, 19 nt, Artificial Sequence
  Description of Artificial Sequence: Synthetic oligonucleotide
guaggugagucucuggauu

SEQ ID NO: 288194 - RNA, 19 nt, Artificial Sequence
  Description of Artificial Sequence: Synthetic oligonucleotide
acuggauaacauagcugca

SEQ ID NO: 288195 - RNA, 19 nt, Artificial Sequence
  Description of Artificial Sequence: Synthetic oligonucleotide
caguucgcacgugugugag

SEQ ID NO: 288196 - RNA, 19 nt, Artificial Sequence
  Description of Artificial Sequence: Synthetic oligonucleotide
  modified_base (8)..(8): a, c, u, g, unknown or other
acaccgcnuggccacuaca

SEQ ID NO: 288197 - RNA, 19 nt, Artificial Sequence
  Description of Artificial Sequence: Synthetic oligonucleotide
gcuauccgcauguugguaa

SEQ ID NO: 288198 - RNA, 19 nt, Artificial Sequence
  Description of Artificial Sequence: Synthetic oligonucleotide
cguauaguucgauggugcc

SEQ ID NO: 288199 - RNA, 19 nt, Artificial Sequence
  Description of Artificial Sequence: Synthetic oligonucleotide
caucuaaaucgggcuuuag

SEQ ID NO: 288200 - RNA, 19 nt, Artificial Sequence
  Description of Artificial Sequence: Synthetic oligonucleotide
aaaugggaucugagcauuu

SEQ ID NO: 288201 - RNA, 19 nt, Artificial Sequence
  Description of Artificial Sequence: Synthetic oligonucleotide
gcaauugagucaugcgcca

SEQ ID NO: 288202 - RNA, 19 nt, Artificial Sequence
  Description of Artificial Sequence: Synthetic oligonucleotide
uuggagccguauaguucga

SEQ ID NO: 288203 - RNA, 19 nt, Artificial Sequence
  Description of Artificial Sequence: Synthetic oligonucleotide
cagugagaugaccuuagcu

SEQ ID NO: 288204 - RNA, 19 nt, Artificial Sequence
  Description of Artificial Sequence: Synthetic oligonucleotide
caguaacucuuuaggucga

SEQ ID NO: 288205 - RNA, 19 nt, Artificial Sequence
  Description of Artificial Sequence: Synthetic oligonucleotide
cauuaucacgaagcccauc

SEQ ID NO: 288206 - RNA, 19 nt, Artificial Sequence
  Description of Artificial Sequence: Synthetic oligonucleotide
cgaauaggccuuuaaagaa

SEQ ID NO: 288207 - RNA, 19 nt, Artificial Sequence
  Description of Artificial Sequence: Synthetic oligonucleotide
cagauacaacggcacaaaa

SEQ ID NO: 288208 - RNA, 19 nt, Artificial Sequence
  Description of Artificial Sequence: Synthetic oligonucleotide
ugaucccgcuaaguucucu

SEQ ID NO: 288209 - RNA, 19 nt, Artificial Sequence
  Description of Artificial Sequence: Synthetic oligonucleotide
uucagacgcagguggcauu

SEQ ID NO: 288210 - RNA, 19 nt, Artificial Sequence
  Description of Artificial Sequence: Synthetic oligonucleotide
caugcgccacacuuuucca

SEQ ID NO: 288211 - RNA, 19 nt, Artificial Sequence
  Description of Artificial Sequence: Synthetic oligonucleotide
auggagacucucagaagau

SEQ ID NO: 288212 - RNA, 19 nt, Artificial Sequence
  Description of Artificial Sequence: Synthetic oligonucleotide
  modified_base (3)..(3): a, c, u, g, unknown or other
gcnuggccacuacauggag

SEQ ID NO: 288213 - RNA, 19 nt, Artificial Sequence
  Description of Artificial Sequence: Synthetic oligonucleotide
cacaucggaucaacacuga

SEQ ID NO: 288214 - RNA, 19 nt, Artificial Sequence
  Description of Artificial Sequence: Synthetic oligonucleotide
gccguauaguucgauggug

SEQ ID NO: 288215 - RNA, 19 nt, Artificial Sequence
  Description of Artificial Sequence: Synthetic oligonucleotide
aaucuaccuuuagcugaau

SEQ ID NO: 288216 - RNA, 19 nt, Artificial Sequence
  Description of Artificial Sequence: Synthetic oligonucleotide
ucgugacuuccgaggugac

SEQ ID NO: 288217 - RNA, 19 nt, Artificial Sequence
  Description of Artificial Sequence: Synthetic oligonucleotide
agacugagacagggcgccg

SEQ ID NO: 288218 - RNA, 19 nt, Artificial Sequence
  Description of Artificial Sequence: Synthetic oligonucleotide
ggcuuuaggucaguuggca

SEQ ID NO: 288219 - RNA, 19 nt, Artificial Sequence
  Description of Artificial Sequence: Synthetic oligonucleotide
guuagcaaguaaagggcau

SEQ ID NO: 288220 - RNA, 19 nt, Artificial Sequence
  Description of Artificial Sequence: Synthetic oligonucleotide
  modified_base (9)..(9): a, c, u, g, unknown or other
cacaccgcnuggccacuac

SEQ ID NO: 288221 - RNA, 19 nt, Artificial Sequence
  Description of Artificial Sequence: Synthetic oligonucleotide
gucaucaucggaggguacu

SEQ ID NO: 288222 - RNA, 19 nt, Artificial Sequence
  Description of Artificial Sequence: Synthetic oligonucleotide
uugcaccuuuuaaccucaa

SEQ ID NO: 288223 - RNA, 19 nt, Artificial Sequence
  Description of Artificial Sequence: Synthetic oligonucleotide
cgucucaguaauguucugc

SEQ ID NO: 288224 - RNA, 19 nt, Artificial Sequence
  Description of Artificial Sequence: Synthetic oligonucleotide
aaucgggcuuuaggucagu

SEQ ID NO: 288225 - RNA, 19 nt, Artificial Sequence
  Description of Artificial Sequence: Synthetic oligonucleotide
gcgaaguuggagauuugca

SEQ ID NO: 288226 - RNA, 19 nt, Artificial Sequence
  Description of Artificial Sequence: Synthetic oligonucleotide
aggaucguuggagccguau

SEQ ID NO: 288227 - RNA, 19 nt, Artificial Sequence
  Description of Artificial Sequence: Synthetic oligonucleotide
cgcagguaaagccauguga

SEQ ID NO: 288228 - RNA, 19 nt, Artificial Sequence
  Description of Artificial Sequence: Synthetic oligonucleotide
ccuucaguaaugucgcaua

SEQ ID NO: 288229 - RNA, 19 nt, Artificial Sequence
  Description of Artificial Sequence: Synthetic oligonucleotide
gcuaaguucucugguuguc

SEQ ID NO: 288230 - RNA, 19 nt, Artificial Sequence
  Description of Artificial Sequence: Synthetic oligonucleotide
guucgcacgugugugaguu

SEQ ID NO: 288231 - RNA, 19 nt, Artificial Sequence
  Description of Artificial Sequence: Synthetic oligonucleotide
  modified_base (7)..(7): a, c, u, g, unknown or other
caccgcnuggccacuacau

SEQ ID NO: 288232 - RNA, 19 nt, Artificial Sequence
  Description of Artificial Sequence: Synthetic oligonucleotide
augaucccgcuaaguucuc

SEQ ID NO: 288233 - RNA, 19 nt, Artificial Sequence
  Description of Artificial Sequence: Synthetic oligonucleotide
gguggauggaugagacuga

SEQ ID NO: 288234 - RNA, 19 nt, Artificial Sequence
  Description of Artificial Sequence: Synthetic oligonucleotide
gacccgggaugugcugugc

SEQ ID NO: 288235 - RNA, 19 nt, Artificial Sequence
  Description of Artificial Sequence: Synthetic oligonucleotide
ggaucguuggagccguaua

SEQ ID NO: 288236 - RNA, 19 nt, Artificial Sequence
  Description of Artificial Sequence: Synthetic oligonucleotide
cagaacugguaccacuuuu

SEQ ID NO: 288237 - RNA, 19 nt, Artificial Sequence
  Description of Artificial Sequence: Synthetic oligonucleotide
  modified_base (11)..(11): a, c, u, g, unknown or other
uccacaccgcnuggccacu

SEQ ID NO: 288238 - RNA, 19 nt, Artificial Sequence
  Description of Artificial Sequence: Synthetic oligonucleotide
ucgaagcacgaaggacguc

SEQ ID NO: 288239 - RNA, 19 nt, Artificial Sequence
  Description of Artificial Sequence: Synthetic oligonucleotide
ggucaguuggcaagcuuaa

SEQ ID NO: 288240 - RNA, 19 nt, Artificial Sequence
  Description of Artificial Sequence: Synthetic oligonucleotide
ggcaaguaguagacgucca

SEQ ID NO: 288241 - RNA, 19 nt, Artificial Sequence
  Description of Artificial Sequence: Synthetic oligonucleotide
ggggcaaguaguagacguc

SEQ ID NO: 288242 - RNA, 19 nt, Artificial Sequence
  Description of Artificial Sequence: Synthetic oligonucleotide
ccgggaugugcugugcaag

SEQ ID NO: 288243 - RNA, 19 nt, Artificial Sequence
  Description of Artificial Sequence: Synthetic oligonucleotide
gaacccucuguugggcgcu

SEQ ID NO: 288244 - RNA, 19 nt, Artificial Sequence
  Description of Artificial Sequence: Synthetic oligonucleotide
gagucaugcgccacacuuu

SEQ ID NO: 288245 - RNA, 19 nt, Artificial Sequence
  Description of Artificial Sequence: Synthetic oligonucleotide
cuuccgaggugaccggggu

SEQ ID NO: 288246 - RNA, 19 nt, Artificial Sequence
  Description of Artificial Sequence: Synthetic oligonucleotide
ccucaauauaguaccacuu

SEQ ID NO: 288247 - RNA, 19 nt, Artificial Sequence
  Description of Artificial Sequence: Synthetic oligonucleotide
gucaugcgccacacuuuuc

SEQ ID NO: 288248 - RNA, 19 nt, Artificial Sequence
  Description of Artificial Sequence: Synthetic oligonucleotide
ccaguucgcacguguguga

SEQ ID NO: 288249 - RNA, 19 nt, Artificial Sequence
  Description of Artificial Sequence: Synthetic oligonucleotide
ccgagaucugcugaaggaa

SEQ ID NO: 288250 - RNA, 19 nt, Artificial Sequence
  Description of Artificial Sequence: Synthetic oligonucleotide
aacccucuguugggcgcuu

SEQ ID NO: 288251 - RNA, 19 nt, Artificial Sequence
  Description of Artificial Sequence: Synthetic oligonucleotide
aaggaucguuggagccgua

SEQ ID NO: 288252 - RNA, 19 nt, Artificial Sequence
  Description of Artificial Sequence: Synthetic oligonucleotide
ccuccgaauaggccuuuaa

SEQ ID NO: 288253 - RNA, 19 nt, Artificial Sequence
  Description of Artificial Sequence: Synthetic oligonucleotide
ccgggguucucuccgguaa

SEQ ID NO: 288254 - RNA, 19 nt, Artificial Sequence
  Description of Artificial Sequence: Synthetic oligonucleotide
guucgauggugccgagguu

SEQ ID NO: 288255 - RNA, 19 nt, Artificial Sequence
  Description of Artificial Sequence: Synthetic oligonucleotide
cuuugcgaaguuggagauu

SEQ ID NO: 288256 - RNA, 19 nt, Artificial Sequence
  Description of Artificial Sequence: Synthetic oligonucleotide
ggcuauccgcauguuggua

SEQ ID NO: 288257 - RNA, 19 nt, Artificial Sequence
  Description of Artificial Sequence: Synthetic oligonucleotide
cugcuacugguggauggau

SEQ ID NO: 288258 - RNA, 19 nt, Artificial Sequence
  Description of Artificial Sequence: Synthetic oligonucleotide
cguccaacagaggucuuaa

SEQ ID NO: 288259 - RNA, 19 nt, Artificial Sequence
  Description of Artificial Sequence: Synthetic oligonucleotide
cagacgcagguggcauuaa

SEQ ID NO: 288260 - RNA, 19 nt, Artificial Sequence
  Description of Artificial Sequence: Synthetic oligonucleotide
ccgacacaaauaugaccau

SEQ ID NO: 288261 - RNA, 19 nt, Artificial Sequence
  Description of Artificial Sequence: Synthetic oligonucleotide
gacguccaacagaggucuu

SEQ ID NO: 288262 - RNA, 19 nt, Artificial Sequence
  Description of Artificial Sequence: Synthetic oligonucleotide
agcucuuauucuuugaucc

SEQ ID NO: 288263 - RNA, 19 nt, Artificial Sequence
  Description of Artificial Sequence: Synthetic oligonucleotide
aacacuuugugcuuaacag

SEQ ID NO: 288264 - RNA, 19 nt, Artificial Sequence
  Description of Artificial Sequence: Synthetic oligonucleotide
auaaagucccaucagggcc

SEQ ID NO: 288265 - RNA, 19 nt, Artificial Sequence
  Description of Artificial Sequence: Synthetic oligonucleotide
uuauaaagucccaucaggg

SEQ ID NO: 288266 - RNA, 19 nt, Artificial Sequence
  Description of Artificial Sequence: Synthetic oligonucleotide
auuauaaagucccaucagg

SEQ ID NO: 288267 - RNA, 19 nt, Artificial Sequence
  Description of Artificial Sequence: Synthetic oligonucleotide
gacugaagcaaucugauug

SEQ ID NO: 288268 - RNA, 19 nt, Artificial Sequence
  Description of Artificial Sequence: Synthetic oligonucleotide
aauugcaacuucuuccagg

SEQ ID NO: 288269 - RNA, 19 nt, Artificial Sequence
  Description of Artificial Sequence: Synthetic oligonucleotide
uuucgaaugauguuagugc

SEQ ID NO: 288270 - RNA, 19 nt, Artificial Sequence
  Description of Artificial Sequence: Synthetic oligonucleotide
gauucagcgagauaaccgg

SEQ ID NO: 288271 - RNA, 19 nt, Artificial Sequence
  Description of Artificial Sequence: Synthetic oligonucleotide
ugauucagcgagauaaccg

SEQ ID NO: 288272 - RNA, 19 nt, Artificial Sequence
  Description of Artificial Sequence: Synthetic oligonucleotide
uuuugaugagauaaggacu

SEQ ID NO: 288273 - RNA, 19 nt, Artificial Sequence
  Description of Artificial Sequence: Synthetic oligonucleotide
aucaauuauuuucagaggu

SEQ ID NO: 288274 - RNA, 19 nt, Artificial Sequence
  Description of Artificial Sequence: Synthetic oligonucleotide
agauguaaaagcccuuccc

SEQ ID NO: 288275 - RNA, 19 nt, Artificial Sequence
  Description of Artificial Sequence: Synthetic oligonucleotide
uuuauuguuacccuguguu

SEQ ID NO: 288276 - RNA, 19 nt, Artificial Sequence
  Description of Artificial Sequence: Synthetic oligonucleotide
agggcuuuauuacugaagg

SEQ ID NO: 288277 - RNA, 19 nt, Artificial Sequence
  Description of Artificial Sequence: Synthetic oligonucleotide
gaucccauccauuucagag

SEQ ID NO: 288278 - RNA, 19 nt, Artificial Sequence
  Description of Artificial Sequence: Synthetic oligonucleotide
aaucaaguugcugaaaaug

SEQ ID NO: 288279 - RNA, 19 nt, Artificial Sequence
  Description of Artificial Sequence: Synthetic oligonucleotide
uucacgaaccucauuauca

SEQ ID NO: 288280 - RNA, 19 nt, Artificial Sequence
  Description of Artificial Sequence: Synthetic oligonucleotide
aauguuucuaccagucagc

SEQ ID NO: 288281 - RNA, 19 nt, Artificial Sequence
  Description of Artificial Sequence: Synthetic oligonucleotide
uccugauagauguaaaagc

SEQ ID NO: 288282 - RNA, 19 nt, Artificial Sequence
  Description of Artificial Sequence: Synthetic oligonucleotide
ucauucacgaaccucauua

SEQ ID NO: 288283 - RNA, 19 nt, Artificial Sequence
  Description of Artificial Sequence: Synthetic oligonucleotide
cauacagauccacaaaccg

SEQ ID NO: 288284 - RNA, 19 nt, Artificial Sequence
  Description of Artificial Sequence: Synthetic oligonucleotide
ugaaaaucuugacagcaug

SEQ ID NO: 288285 - RNA, 19 nt, Artificial Sequence
  Description of Artificial Sequence: Synthetic oligonucleotide
uguucuggguuacucauag

SEQ ID NO: 288286 - RNA, 19 nt, Artificial Sequence
  Description of Artificial Sequence: Synthetic oligonucleotide
ugguagaacuucuugcugg

SEQ ID NO: 288287 - RNA, 19 nt, Artificial Sequence
  Description of Artificial Sequence: Synthetic oligonucleotide
uucuggguuacucauagcu

SEQ ID NO: 288288 - RNA, 19 nt, Artificial Sequence
  Description of Artificial Sequence: Synthetic oligonucleotide
uccauuucagaguucaagc

SEQ ID NO: 288289 - RNA, 19 nt, Artificial Sequence
  Description of Artificial Sequence: Synthetic oligonucleotide
cuggccauuauaaaguccc

SEQ ID NO: 288290 - RNA, 19 nt, Artificial Sequence
  Description of Artificial Sequence: Synthetic oligonucleotide
guuucuaccagucagcauc

SEQ ID NO: 288291 - RNA, 19 nt, Artificial Sequence
  Description of Artificial Sequence: Synthetic oligonucleotide
cucaaaacccuuguaaucg

SEQ ID NO: 288292 - RNA, 19 nt, Artificial Sequence
  Description of Artificial Sequence: Synthetic oligonucleotide
cuuugaucccuccugauag

SEQ ID NO: 288293 - RNA, 19 nt, Artificial Sequence
  Description of Artificial Sequence: Synthetic oligonucleotide
uguauuggcaugcuauggc

SEQ ID NO: 288294 - RNA, 19 nt, Artificial Sequence
  Description of Artificial Sequence: Synthetic oligonucleotide
gagguuuuacuccuggucc

SEQ ID NO: 288295 - RNA, 19 nt, Artificial Sequence
  Description of Artificial Sequence: Synthetic oligonucleotide
ugcuuaaacagaagggcag

SEQ ID NO: 288296 - RNA, 19 nt, Artificial Sequence
  Description of Artificial Sequence: Synthetic oligonucleotide
uauaaagucccaucagggc

SEQ ID NO: 288297 - RNA, 19 nt, Artificial Sequence
  Description of Artificial Sequence: Synthetic oligonucleotide
gauucguaugacuucagac

SEQ ID NO: 288298 - RNA, 19 nt, Artificial Sequence
  Description of Artificial Sequence: Synthetic oligonucleotide
auucguaugacuucagaca

SEQ ID NO: 288299 - RNA, 19 nt, Artificial Sequence
  Description of Artificial Sequence: Synthetic oligonucleotide
aauggaauagucauggcau

SEQ ID NO: 288300 - RNA, 19 nt, Artificial Sequence
  Description of Artificial Sequence: Synthetic oligonucleotide
aaaacccuuguaaucgagc

SEQ ID NO: 288301 - RNA, 19 nt, Artificial Sequence
  Description of Artificial Sequence: Synthetic oligonucleotide
uauaaacucugauuguacu

SEQ ID NO: 288302 - RNA, 19 nt, Artificial Sequence
  Description of Artificial Sequence: Synthetic oligonucleotide
agacuugcgacccaagaag

SEQ ID NO: 288303 - RNA, 19 nt, Artificial Sequence
  Description of Artificial Sequence: Synthetic oligonucleotide
ucugacaaauggaauaguc

SEQ ID NO: 288304 - RNA, 19 nt, Artificial Sequence
  Description of Artificial Sequence: Synthetic oligonucleotide
ugauugggagagcagaugu

SEQ ID NO: 288305 - RNA, 19 nt, Artificial Sequence
  Description of Artificial Sequence: Synthetic oligonucleotide
aaaguagugcaugccaauc

SEQ ID NO: 288306 - RNA, 19 nt, Artificial Sequence
  Description of Artificial Sequence: Synthetic oligonucleotide
uucucaaauauucucuguc

SEQ ID NO: 288307 - RNA, 19 nt, Artificial Sequence
  Description of Artificial Sequence: Synthetic oligonucleotide
uaugacgucagcuugucua

SEQ ID NO: 288308 - RNA, 19 nt, Artificial Sequence
  Description of Artificial Sequence: Synthetic oligonucleotide
ugaaaauggaaucccuuuc

SEQ ID NO: 288309 - RNA, 19 nt, Artificial Sequence
  Description of Artificial Sequence: Synthetic oligonucleotide
guuagcauggucgaggagc

SEQ ID NO: 288310 - RNA, 19 nt, Artificial Sequence
  Description of Artificial Sequence: Synthetic oligonucleotide
acacccaccauuuugggca

SEQ ID NO: 288311 - RNA, 19 nt, Artificial Sequence
  Description of Artificial Sequence: Synthetic oligonucleotide
uucguaugacuucagacau

SEQ ID NO: 288312 - RNA, 19 nt, Artificial Sequence
  Description of Artificial Sequence: Synthetic oligonucleotide
ucaaccaaucccauuuucu

SEQ ID NO: 288313 - RNA, 19 nt, Artificial Sequence
  Description of Artificial Sequence: Synthetic oligonucleotide
agguuuuacuccugguccc

SEQ ID NO: 288314 - RNA, 19 nt, Artificial Sequence
  Description of Artificial Sequence: Synthetic oligonucleotide
cuggguuacucauagcugc

SEQ ID NO: 288315 - RNA, 19 nt, Artificial Sequence
  Description of Artificial Sequence: Synthetic oligonucleotide
acuucuauaaacucugauu

SEQ ID NO: 288316 - RNA, 19 nt, Artificial Sequence
  Description of Artificial Sequence: Synthetic oligonucleotide
uagucauggcauaugacgu

SEQ ID NO: 288317 - RNA, 19 nt, Artificial Sequence
  Description of Artificial Sequence: Synthetic oligonucleotide
uauucguguugcuucuugg

SEQ ID NO: 288318 - RNA, 19 nt, Artificial Sequence
  Description of Artificial Sequence: Synthetic oligonucleotide
uucgaaugauguuagugcu

SEQ ID NO: 288319 - RNA, 19 nt, Artificial Sequence
  Description of Artificial Sequence: Synthetic oligonucleotide
aaguagugcaugccaauca

SEQ ID NO: 288320 - RNA, 19 nt, Artificial Sequence
  Description of Artificial Sequence: Synthetic oligonucleotide
uuuagucccuuauccacag

SEQ ID NO: 288321 - RNA, 19 nt, Artificial Sequence
  Description of Artificial Sequence: Synthetic oligonucleotide
uagugcauggaugaggcag

SEQ ID NO: 288322 - RNA, 19 nt, Artificial Sequence
  Description of Artificial Sequence: Synthetic oligonucleotide
uagugcaugccaaucaccu

SEQ ID NO: 288323 - RNA, 19 nt, Artificial Sequence
  Description of Artificial Sequence: Synthetic oligonucleotide
ccugauagauguaaaagcc

SEQ ID NO: 288324 - RNA, 19 nt, Artificial Sequence
  Description of Artificial Sequence: Synthetic oligonucleotide
ucuacuacuuucugggcac

SEQ ID NO: 288325 - RNA, 19 nt, Artificial Sequence
  Description of Artificial Sequence: Synthetic oligonucleotide
ucagaguucaagcucuuau

SEQ ID NO: 288326 - RNA, 19 nt, Artificial Sequence
  Description of Artificial Sequence: Synthetic oligonucleotide
acgggguaaacugaauucc

SEQ ID NO: 288327 - RNA, 19 nt, Artificial Sequence
  Description of Artificial Sequence: Synthetic oligonucleotide
aaucccuuucgaaugaugu

SEQ ID NO: 288328 - RNA, 19 nt, Artificial Sequence
  Description of Artificial Sequence: Synthetic oligonucleotide
ugcacgaauguuucuacca

SEQ ID NO: 288329 - RNA, 19 nt, Artificial Sequence
  Description of Artificial Sequence: Synthetic oligonucleotide
uccauaggcagacucguac

SEQ ID NO: 288330 - RNA, 19 nt, Artificial Sequence
  Description of Artificial Sequence: Synthetic oligonucleotide
uaaucgagcugcccaauca

SEQ ID NO: 288331 - RNA, 19 nt, Artificial Sequence
  Description of Artificial Sequence: Synthetic oligonucleotide
aaaaguagugcaugccaau

SEQ ID NO: 288332 - RNA, 19 nt, Artificial Sequence
  Description of Artificial Sequence: Synthetic oligonucleotide
ucagccuucucaaaacccu

SEQ ID NO: 288333 - RNA, 19 nt, Artificial Sequence
  Description of Artificial Sequence: Synthetic oligonucleotide
uucucaaaacccuuguaau

SEQ ID NO: 288334 - RNA, 19 nt, Artificial Sequence
  Description of Artificial Sequence: Synthetic oligonucleotide
uuagcauggucgaggagca

SEQ ID NO: 288335 - RNA, 19 nt, Artificial Sequence
  Description of Artificial Sequence: Synthetic oligonucleotide
ucuauaaacucugauugua

SEQ ID NO: 288336 - RNA, 19 nt, Artificial Sequence
  Description of Artificial Sequence: Synthetic oligonucleotide
gauaaccggcaucauuucc

SEQ ID NO: 288337 - RNA, 19 nt, Artificial Sequence
  Description of Artificial Sequence: Synthetic oligonucleotide
cuuucgaaugauguuagug

SEQ ID NO: 288338 - RNA, 19 nt, Artificial Sequence
  Description of Artificial Sequence: Synthetic oligonucleotide
gaugcagugcucuggaguc

SEQ ID NO: 288339 - RNA, 19 nt, Artificial Sequence
  Description of Artificial Sequence: Synthetic oligonucleotide
auacagauccacaaaccgg

SEQ ID NO: 288340 - RNA, 19 nt, Artificial Sequence
  Description of Artificial Sequence: Synthetic oligonucleotide
agacucguacuuccggagc

SEQ ID NO: 288341 - RNA, 19 nt, Artificial Sequence
  Description of Artificial Sequence: Synthetic oligonucleotide
augagauaaggacugcacu

SEQ ID NO: 288342 - RNA, 19 nt, Artificial Sequence
  Description of Artificial Sequence: Synthetic oligonucleotide
agugcucuggagucauacc

SEQ ID NO: 288343 - RNA, 19 nt, Artificial Sequence
  Description of Artificial Sequence: Synthetic oligonucleotide
ugugcuacauccacaccga

SEQ ID NO: 288344 - RNA, 19 nt, Artificial Sequence
  Description of Artificial Sequence: Synthetic oligonucleotide
gaggcuagcauguugauau

SEQ ID NO: 288345 - RNA, 19 nt, Artificial Sequence
  Description of Artificial Sequence: Synthetic oligonucleotide
ugauugauugggagagcag

SEQ ID NO: 288346 - RNA, 19 nt, Artificial Sequence
  Description of Artificial Sequence: Synthetic oligonucleotide
cuuauccacagagaccugg

SEQ ID NO: 288347 - RNA, 19 nt, Artificial Sequence
  Description of Artificial Sequence: Synthetic oligonucleotide
agucauggcauaugacguc

SEQ ID NO: 288348 - RNA, 19 nt, Artificial Sequence
  Description of Artificial Sequence: Synthetic oligonucleotide
uuacccuguguuuggcugg

SEQ ID NO: 288349 - RNA, 19 nt, Artificial Sequence
  Description of Artificial Sequence: Synthetic oligonucleotide
gauugauugggagagcaga

SEQ ID NO: 288350 - RNA, 19 nt, Artificial Sequence
  Description of Artificial Sequence: Synthetic oligonucleotide
cuucuacuuccuuuaacac

SEQ ID NO: 288351 - RNA, 19 nt, Artificial Sequence
  Description of Artificial Sequence: Synthetic oligonucleotide
cugauggcggcuaccacgg

SEQ ID NO: 288352 - RNA, 19 nt, Artificial Sequence
  Description of Artificial Sequence: Synthetic oligonucleotide
uucagcgagauaaccggca

SEQ ID NO: 288353 - RNA, 19 nt, Artificial Sequence
  Description of Artificial Sequence: Synthetic oligonucleotide
cuuauucuuugaucccucc

SEQ ID NO: 288354 - RNA, 19 nt, Artificial Sequence
  Description of Artificial Sequence: Synthetic oligonucleotide
uugguagagaccuuccgau

SEQ ID NO: 288355 - RNA, 19 nt, Artificial Sequence
  Description of Artificial Sequence: Synthetic oligonucleotide
guuacccuguguuuggcug

SEQ ID NO: 288356 - RNA, 19 nt, Artificial Sequence
  Description of Artificial Sequence: Synthetic oligonucleotide
uuagggucaaccccuuccu

SEQ ID NO: 288357 - RNA, 19 nt, Artificial Sequence
  Description of Artificial Sequence: Synthetic oligonucleotide
ugauauucguguugcuucu

SEQ ID NO: 288358 - RNA, 19 nt, Artificial Sequence
  Description of Artificial Sequence: Synthetic oligonucleotide
uaauugcaacuucuuccag

SEQ ID NO: 288359 - RNA, 19 nt, Artificial Sequence
  Description of Artificial Sequence: Synthetic oligonucleotide
agauaaccggcaucauuuc

SEQ ID NO: 288360 - RNA, 19 nt, Artificial Sequence
  Description of Artificial Sequence: Synthetic oligonucleotide
uguccuuccugugauauuc

SEQ ID NO: 288361 - RNA, 19 nt, Artificial Sequence
  Description of Artificial Sequence: Synthetic oligonucleotide
gcuaccacgggcuuugggg

SEQ ID NO: 288362 - RNA, 19 nt, Artificial Sequence
  Description of Artificial Sequence: Synthetic oligonucleotide
ucaaaacccuuguaaucga

SEQ ID NO: 288363 - RNA, 19 nt, Artificial Sequence
  Description of Artificial Sequence: Synthetic oligonucleotide
gaucccuccugauagaugu

SEQ ID NO: 288364 - RNA, 19 nt, Artificial Sequence
  Description of Artificial Sequence: Synthetic oligonucleotide
auauucguguugcuucuug

SEQ ID NO: 288365 - RNA, 19 nt, Artificial Sequence
  Description of Artificial Sequence: Synthetic oligonucleotide
ucacgaaccucauuaucac

SEQ ID NO: 288366 - RNA, 19 nt, Artificial Sequence
  Description of Artificial Sequence: Synthetic oligonucleotide
ucccuuauccacagagacc

SEQ ID NO: 288367 - RNA, 19 nt, Artificial Sequence
  Description of Artificial Sequence: Synthetic oligonucleotide
gucccuuauccacagagac

SEQ ID NO: 288368 - RNA, 19 nt, Artificial Sequence
  Description of Artificial Sequence: Synthetic oligonucleotide
acgaauguuucuaccaguc

SEQ ID NO: 288369 - RNA, 19 nt, Artificial Sequence
  Description of Artificial Sequence: Synthetic oligonucleotide
ucuuauucuuugaucccuc

SEQ ID NO: 288370 - RNA, 19 nt, Artificial Sequence
  Description of Artificial Sequence: Synthetic oligonucleotide
uaauucacugucagacuuc

SEQ ID NO: 288371 - RNA, 19 nt, Artificial Sequence
  Description of Artificial Sequence: Synthetic oligonucleotide
gacugccucauucacgaac

SEQ ID NO: 288372 - RNA, 19 nt, Artificial Sequence
  Description of Artificial Sequence: Synthetic oligonucleotide
aacaccgcuccaaugucuc

SEQ ID NO: 288373 - RNA, 19 nt, Artificial Sequence
  Description of Artificial Sequence: Synthetic oligonucleotide
ggaccuggccauuauaaag

SEQ ID NO: 288374 - RNA, 19 nt, Artificial Sequence
  Description of Artificial Sequence: Synthetic oligonucleotide
agcgagauaaccggcauca

SEQ ID NO: 288375 - RNA, 19 nt, Artificial Sequence
  Description of Artificial Sequence: Synthetic oligonucleotide
uugcugaaaauggaauccc

SEQ ID NO: 288376 - RNA, 19 nt, Artificial Sequence
  Description of Artificial Sequence: Synthetic oligonucleotide
gauuuggucauuggcccag

SEQ ID NO: 288377 - RNA, 19 nt, Artificial Sequence
  Description of Artificial Sequence: Synthetic oligonucleotide
ucgagcugcccaaucaagu

SEQ ID NO: 288378 - RNA, 19 nt, Artificial Sequence
  Description of Artificial Sequence: Synthetic oligonucleotide
uuccacguugccaccuccg

SEQ ID NO: 288379 - RNA, 19 nt, Artificial Sequence
  Description of Artificial Sequence: Synthetic oligonucleotide
ugcuuggcuugguagagac

SEQ ID NO: 288380 - RNA, 19 nt, Artificial Sequence
  Description of Artificial Sequence: Synthetic oligonucleotide
agauaaggacugcacuucu

SEQ ID NO: 288381 - RNA, 19 nt, Artificial Sequence
  Description of Artificial Sequence: Synthetic oligonucleotide
caaaacccuuguaaucgag

SEQ ID NO: 288382 - RNA, 19 nt, Artificial Sequence
  Description of Artificial Sequence: Synthetic oligonucleotide
cuuugccuaggucuucugc

SEQ ID NO: 288383 - RNA, 19 nt, Artificial Sequence
  Description of Artificial Sequence: Synthetic oligonucleotide
cagggcuuuauuacugaag

SEQ ID NO: 288384 - RNA, 19 nt, Artificial Sequence
  Description of Artificial Sequence: Synthetic oligonucleotide
cuguauuggcaugcuaugg

SEQ ID NO: 288385 - RNA, 19 nt, Artificial Sequence
  Description of Artificial Sequence: Synthetic oligonucleotide
aaacagaagggcagacaag

SEQ ID NO: 288386 - RNA, 19 nt, Artificial Sequence
  Description of Artificial Sequence: Synthetic oligonucleotide
acacuuguugcuguccccg

SEQ ID NO: 288387 - RNA, 19 nt, Artificial Sequence
  Description of Artificial Sequence: Synthetic oligonucleotide
uauccacagagaccugggc

SEQ ID NO: 288388 - RNA, 19 nt, Artificial Sequence
  Description of Artificial Sequence: Synthetic oligonucleotide
uccggucuuuugcugacug

SEQ ID NO: 288389 - RNA, 19 nt, Artificial Sequence
  Description of Artificial Sequence: Synthetic oligonucleotide
gagucauaccuucuacuuc

SEQ ID NO: 288390 - RNA, 19 nt, Artificial Sequence
  Description of Artificial Sequence: Synthetic oligonucleotide
agucgugaugauuuccaga

SEQ ID NO: 288391 - RNA, 19 nt, Artificial Sequence
  Description of Artificial Sequence: Synthetic oligonucleotide
aaaccggaagggcccuccg

SEQ ID NO: 288392 - RNA, 19 nt, Artificial Sequence
  Description of Artificial Sequence: Synthetic oligonucleotide
auaaccggcaucauuuccu

SEQ ID NO: 288393 - RNA, 19 nt, Artificial Sequence
  Description of Artificial Sequence: Synthetic oligonucleotide
guauuggcaugcuauggca

SEQ ID NO: 288394 - RNA, 19 nt, Artificial Sequence
  Description of Artificial Sequence: Synthetic oligonucleotide
acuucagggacaccuaaua

SEQ ID NO: 288395 - RNA, 19 nt, Artificial Sequence
  Description of Artificial Sequence: Synthetic oligonucleotide
gagauaaggacugcacuuc

SEQ ID NO: 288396 - RNA, 19 nt, Artificial Sequence
  Description of Artificial Sequence: Synthetic oligonucleotide
gguuagugcauggaugagg

SEQ ID NO: 288397 - RNA, 19 nt, Artificial Sequence
  Description of Artificial Sequence: Synthetic oligonucleotide
ucccuuucgaaugauguua

SEQ ID NO: 288398 - RNA, 19 nt, Artificial Sequence
  Description of Artificial Sequence: Synthetic oligonucleotide
gacuugcgacccaagaagc

SEQ ID NO: 288399 - RNA, 19 nt, Artificial Sequence
  Description of Artificial Sequence: Synthetic oligonucleotide
cacaccgacuucauccgcc

SEQ ID NO: 288400 - RNA, 19 nt, Artificial Sequence
  Description of Artificial Sequence: Synthetic oligonucleotide
uugauugggagagcagaug

SEQ ID NO: 288401 - RNA, 19 nt, Artificial Sequence
  Description of Artificial Sequence: Synthetic oligonucleotide
uuugaucccuccugauaga

SEQ ID NO: 288402 - RNA, 19 nt, Artificial Sequence
  Description of Artificial Sequence: Synthetic oligonucleotide
uuggggacuuuucaaguuu

SEQ ID NO: 288403 - RNA, 19 nt, Artificial Sequence
  Description of Artificial Sequence: Synthetic oligonucleotide
agacaagaaaacagagcag

SEQ ID NO: 288404 - RNA, 19 nt, Artificial Sequence
  Description of Artificial Sequence: Synthetic oligonucleotide
cuuccgaucagccaggccu

SEQ ID NO: 288405 - RNA, 19 nt, Artificial Sequence
  Description of Artificial Sequence: Synthetic oligonucleotide
cuuaaacagaagggcagac

SEQ ID NO: 288406 - RNA, 19 nt, Artificial Sequence
  Description of Artificial Sequence: Synthetic oligonucleotide
cuaccagucagcaucauau

SEQ ID NO: 288407 - RNA, 19 nt, Artificial Sequence
  Description of Artificial Sequence: Synthetic oligonucleotide
uguuagcauggucgaggag

SEQ ID NO: 288408 - RNA, 19 nt, Artificial Sequence
  Description of Artificial Sequence: Synthetic oligonucleotide
uggcauaugacgucagcuu

SEQ ID NO: 288409 - RNA, 19 nt, Artificial Sequence
  Description of Artificial Sequence: Synthetic oligonucleotide
gguuacucauagcugcugc

SEQ ID NO: 288410 - RNA, 19 nt, Artificial Sequence
  Description of Artificial Sequence: Synthetic oligonucleotide
gauaaggacugcacuucug

SEQ ID NO: 288411 - RNA, 19 nt, Artificial Sequence
  Description of Artificial Sequence: Synthetic oligonucleotide
gacgucagcuugucuauca

SEQ ID NO: 288412 - RNA, 19 nt, Artificial Sequence
  Description of Artificial Sequence: Synthetic oligonucleotide
ucugcuacaugcugugcua

SEQ ID NO: 288413 - RNA, 19 nt, Artificial Sequence
  Description of Artificial Sequence: Synthetic oligonucleotide
gugauucagcgagauaacc

SEQ ID NO: 288414 - RNA, 19 nt, Artificial Sequence
  Description of Artificial Sequence: Synthetic oligonucleotide
auuccauaggcagacucgu

SEQ ID NO: 288415 - RNA, 19 nt, Artificial Sequence
  Description of Artificial Sequence: Synthetic oligonucleotide
gggugcuuaaacagaaggg

SEQ ID NO: 288416 - RNA, 19 nt, Artificial Sequence
  Description of Artificial Sequence: Synthetic oligonucleotide
uuucugugauucagcgaga

SEQ ID NO: 288417 - RNA, 19 nt, Artificial Sequence
  Description of Artificial Sequence: Synthetic oligonucleotide
uguuacccuguguuuggcu

SEQ ID NO: 288418 - RNA, 19 nt, Artificial Sequence
  Description of Artificial Sequence: Synthetic oligonucleotide
ggauaaaggccuuuggucu

SEQ ID NO: 288419 - RNA, 19 nt, Artificial Sequence
  Description of Artificial Sequence: Synthetic oligonucleotide
ugugcuuaacagugagguc

SEQ ID NO: 288420 - RNA, 19 nt, Artificial Sequence
  Description of Artificial Sequence: Synthetic oligonucleotide
cagacucguacuuccggag

SEQ ID NO: 288421 - RNA, 19 nt, Artificial Sequence
  Description of Artificial Sequence: Synthetic oligonucleotide
ucaacccuuugaacacuug

SEQ ID NO: 288422 - RNA, 19 nt, Artificial Sequence
  Description of Artificial Sequence: Synthetic oligonucleotide
aguuccacguugccaccuc

SEQ ID NO: 288423 - RNA, 19 nt, Artificial Sequence
  Description of Artificial Sequence: Synthetic oligonucleotide
ucagcgagauaaccggcau

SEQ ID NO: 288424 - RNA, 19 nt, Artificial Sequence
  Description of Artificial Sequence: Synthetic oligonucleotide
uggguuacucauagcugcu

SEQ ID NO: 288425 - RNA, 19 nt, Artificial Sequence
  Description of Artificial Sequence: Synthetic oligonucleotide
ggcacugugagggaggagc

SEQ ID NO: 288426 - RNA, 19 nt, Artificial Sequence
  Description of Artificial Sequence: Synthetic oligonucleotide
gcuggcacgggguaaacug

SEQ ID NO: 288427 - RNA, 19 nt, Artificial Sequence
  Description of Artificial Sequence: Synthetic oligonucleotide
agguauucaauuguccuuu

SEQ ID NO: 288428 - RNA, 19 nt, Artificial Sequence
  Description of Artificial Sequence: Synthetic oligonucleotide
uccgaaccgcuccccaaag

SEQ ID NO: 288429 - RNA, 19 nt, Artificial Sequence
  Description of Artificial Sequence: Synthetic oligonucleotide
aaacaccgcuccaaugucu

SEQ ID NO: 288430 - RNA, 19 nt, Artificial Sequence
  Description of Artificial Sequence: Synthetic oligonucleotide
cggucuacuacuuucuggg

SEQ ID NO: 288431 - RNA, 19 nt, Artificial Sequence
  Description of Artificial Sequence: Synthetic oligonucleotide
ucgaaugauguuagugcuu

SEQ ID NO: 288432 - RNA, 19 nt, Artificial Sequence
  Description of Artificial Sequence: Synthetic oligonucleotide
ugcaacaaagcagccgggu

SEQ ID NO: 288433 - RNA, 19 nt, Artificial Sequence
  Description of Artificial Sequence: Synthetic oligonucleotide
guuacucauagcugcugca

SEQ ID NO: 288434 - RNA, 19 nt, Artificial Sequence
  Description of Artificial Sequence: Synthetic oligonucleotide
gcuauggcaagcucaaguc

SEQ ID NO: 288435 - RNA, 19 nt, Artificial Sequence
  Description of Artificial Sequence: Synthetic oligonucleotide
acaccgcuccaaugucucc

SEQ ID NO: 288436 - RNA, 19 nt, Artificial Sequence
  Description of Artificial Sequence: Synthetic oligonucleotide
agggacaccuaauacuguu

SEQ ID NO: 288437 - RNA, 19 nt, Artificial Sequence
  Description of Artificial Sequence: Synthetic oligonucleotide
uggaauagucauggcauau

SEQ ID NO: 288438 - RNA, 19 nt, Artificial Sequence
  Description of Artificial Sequence: Synthetic oligonucleotide
caugcuauggcaagcucaa

SEQ ID NO: 288439 - RNA, 19 nt, Artificial Sequence
  Description of Artificial Sequence: Synthetic oligonucleotide
ugccuaggucuucugcuac

SEQ ID NO: 288440 - RNA, 19 nt, Artificial Sequence
  Description of Artificial Sequence: Synthetic oligonucleotide
gaaucccuuucgaaugaug

SEQ ID NO: 288441 - RNA, 19 nt, Artificial Sequence
  Description of Artificial Sequence: Synthetic oligonucleotide
uucaacccuuugaacacuu

SEQ ID NO: 288442 - RNA, 19 nt, Artificial Sequence
  Description of Artificial Sequence: Synthetic oligonucleotide
uauucuguauuggcaugcu

SEQ ID NO: 288443 - RNA, 19 nt, Artificial Sequence
  Description of Artificial Sequence: Synthetic oligonucleotide
ugcuacaugcugugcuaca

SEQ ID NO: 288444 - RNA, 19 nt, Artificial Sequence
  Description of Artificial Sequence: Synthetic oligonucleotide
agcagauguucuggguuac

SEQ ID NO: 288445 - RNA, 19 nt, Artificial Sequence
  Description of Artificial Sequence: Synthetic oligonucleotide
uuggcaugcuauggcaagc

SEQ ID NO: 288446 - RNA, 19 nt, Artificial Sequence
  Description of Artificial Sequence: Synthetic oligonucleotide
gcacgaauguuucuaccag

SEQ ID NO: 288447 - RNA, 19 nt, Artificial Sequence
  Description of Artificial Sequence: Synthetic oligonucleotide
gugcuuaaacagaagggca

SEQ ID NO: 288448 - RNA, 19 nt, Artificial Sequence
  Description of Artificial Sequence: Synthetic oligonucleotide
ccauuauaaagucccauca

SEQ ID NO: 288449 - RNA, 19 nt, Artificial Sequence
  Description of Artificial Sequence: Synthetic oligonucleotide
uggccauuauaaaguccca

SEQ ID NO: 288450 - RNA, 19 nt, Artificial Sequence
  Description of Artificial Sequence: Synthetic oligonucleotide
caucagcccugcaccaagg

SEQ ID NO: 288451 - RNA, 19 nt, Artificial Sequence
  Description of Artificial Sequence: Synthetic oligonucleotide
caaacaccgcuccaauguc

SEQ ID NO: 288452 - RNA, 19 nt, Artificial Sequence
  Description of Artificial Sequence: Synthetic oligonucleotide
aaccggcaucauuuccuug

SEQ ID NO: 288453 - RNA, 19 nt, Artificial Sequence
  Description of Artificial Sequence: Synthetic oligonucleotide
ccugugauauucguguugc

SEQ ID NO: 288454 - RNA, 19 nt, Artificial Sequence
  Description of Artificial Sequence: Synthetic oligonucleotide
uggagguuuuacuccuggu

SEQ ID NO: 288455 - RNA, 19 nt, Artificial Sequence
  Description of Artificial Sequence: Synthetic oligonucleotide
cagucgugaugauuuccag

SEQ ID NO: 288456 - RNA, 19 nt, Artificial Sequence
  Description of Artificial Sequence: Synthetic oligonucleotide
uguuucuaccagucagcau

SEQ ID NO: 288457 - RNA, 19 nt, Artificial Sequence
  Description of Artificial Sequence: Synthetic oligonucleotide
auugauugggagagcagau

SEQ ID NO: 288458 - RNA, 19 nt, Artificial Sequence
  Description of Artificial Sequence: Synthetic oligonucleotide
ucguaugacuucagacauc

SEQ ID NO: 288459 - RNA, 19 nt, Artificial Sequence
  Description of Artificial Sequence: Synthetic oligonucleotide
cucaaauauucucuguccu

SEQ ID NO: 288460 - RNA, 19 nt, Artificial Sequence
  Description of Artificial Sequence: Synthetic oligonucleotide
auggaauagucauggcaua

SEQ ID NO: 288461 - RNA, 19 nt, Artificial Sequence
  Description of Artificial Sequence: Synthetic oligonucleotide
ggcagacucguacuuccgg

SEQ ID NO: 288462 - RNA, 19 nt, Artificial Sequence
  Description of Artificial Sequence: Synthetic oligonucleotide
cagcaucauaucaaaugca

SEQ ID NO: 288463 - RNA, 19 nt, Artificial Sequence
  Description of Artificial Sequence: Synthetic oligonucleotide
uucugugauucagcgagau

SEQ ID NO: 288464 - RNA, 19 nt, Artificial Sequence
  Description of Artificial Sequence: Synthetic oligonucleotide
gcuauucuguauuggcaug

SEQ ID NO: 288465 - RNA, 19 nt, Artificial Sequence
  Description of Artificial Sequence: Synthetic oligonucleotide
gguauuggaugucuucauc

SEQ ID NO: 288466 - RNA, 19 nt, Artificial Sequence
  Description of Artificial Sequence: Synthetic oligonucleotide
guaaucgagcugcccaauc

SEQ ID NO: 288467 - RNA, 19 nt, Artificial Sequence
  Description of Artificial Sequence: Synthetic oligonucleotide
cugcaacaaagcagccggg

SEQ ID NO: 288468 - RNA, 19 nt, Artificial Sequence
  Description of Artificial Sequence: Synthetic oligonucleotide
cacuuguugcuguccccgg

SEQ ID NO: 288469 - RNA, 19 nt, Artificial Sequence
  Description of Artificial Sequence: Synthetic oligonucleotide
cuacaugcugugcuacauc

SEQ ID NO: 288470 - RNA, 19 nt, Artificial Sequence
  Description of Artificial Sequence: Synthetic oligonucleotide
gcucuuauucuuugauccc

SEQ ID NO: 288471 - RNA, 19 nt, Artificial Sequence
  Description of Artificial Sequence: Synthetic oligonucleotide
aaccggaagggcccuccga

SEQ ID NO: 288472 - RNA, 19 nt, Artificial Sequence
  Description of Artificial Sequence: Synthetic oligonucleotide
ucuccggucuuuugcugac

SEQ ID NO: 288473 - RNA, 19 nt, Artificial Sequence
  Description of Artificial Sequence: Synthetic oligonucleotide
gucagucgugaugauuucc

SEQ ID NO: 288474 - RNA, 19 nt, Artificial Sequence
  Description of Artificial Sequence: Synthetic oligonucleotide
ggcuagaugcugaacauuc

SEQ ID NO: 288475 - RNA, 19 nt, Artificial Sequence
  Description of Artificial Sequence: Synthetic oligonucleotide
uuaacacuuugugcuuaac

SEQ ID NO: 288476 - RNA, 19 nt, Artificial Sequence
  Description of Artificial Sequence: Synthetic oligonucleotide
cucuuaauucacugucaga

SEQ ID NO: 288477 - RNA, 19 nt, Artificial Sequence
  Description of Artificial Sequence: Synthetic oligonucleotide
auaucagcaccugcaacaa

SEQ ID NO: 288478 - RNA, 19 nt, Artificial Sequence
  Description of Artificial Sequence: Synthetic oligonucleotide
cagauguucuggguuacuc

SEQ ID NO: 288479 - RNA, 19 nt, Artificial Sequence
  Description of Artificial Sequence: Synthetic oligonucleotide
acucguacuuccggagccg

SEQ ID NO: 288480 - RNA, 19 nt, Artificial Sequence
  Description of Artificial Sequence: Synthetic oligonucleotide
ggaauagucauggcauaug

SEQ ID NO: 288481 - RNA, 19 nt, Artificial Sequence
  Description of Artificial Sequence: Synthetic oligonucleotide
aggcuagcauguugauauc

SEQ ID NO: 288482 - RNA, 19 nt, Artificial Sequence
  Description of Artificial Sequence: Synthetic oligonucleotide
acagggcuuuauuacugaa

SEQ ID NO: 288483 - RNA, 19 nt, Artificial Sequence
  Description of Artificial Sequence: Synthetic oligonucleotide
aggaccuggccauuauaaa

SEQ ID NO: 288484 - RNA, 19 nt, Artificial Sequence
  Description of Artificial Sequence: Synthetic oligonucleotide
uggcacgggguaaacugaa

SEQ ID NO: 288485 - RNA, 19 nt, Artificial Sequence
  Description of Artificial Sequence: Synthetic oligonucleotide
uugaucccuccugauagau

SEQ ID NO: 288486 - RNA, 19 nt, Artificial Sequence
  Description of Artificial Sequence: Synthetic oligonucleotide
cuaccacgggcuuugggga

SEQ ID NO: 288487 - RNA, 19 nt, Artificial Sequence
  Description of Artificial Sequence: Synthetic oligonucleotide
auaugacgucagcuugucu

SEQ ID NO: 288488 - RNA, 19 nt, Artificial Sequence
  Description of Artificial Sequence: Synthetic oligonucleotide
ugucagucgugaugauuuc

SEQ ID NO: 288489 - RNA, 19 nt, Artificial Sequence
  Description of Artificial Sequence: Synthetic oligonucleotide
cuguuagcauggucgagga

SEQ ID NO: 288490 - RNA, 19 nt, Artificial Sequence
  Description of Artificial Sequence: Synthetic oligonucleotide
gguuguacaagaggcuagc

SEQ ID NO: 288491 - RNA, 19 nt, Artificial Sequence
  Description of Artificial Sequence: Synthetic oligonucleotide
agggcccuccgagacaagg

SEQ ID NO: 288492 - RNA, 19 nt, Artificial Sequence
  Description of Artificial Sequence: Synthetic oligonucleotide
auucaacccuuugaacacu

SEQ ID NO: 288493 - RNA, 19 nt, Artificial Sequence
  Description of Artificial Sequence: Synthetic oligonucleotide
cauaugacgucagcuuguc

SEQ ID NO: 288494 - RNA, 19 nt, Artificial Sequence
  Description of Artificial Sequence: Synthetic oligonucleotide
cagacuugcgacccaagaa

SEQ ID NO: 288495 - RNA, 19 nt, Artificial Sequence
  Description of Artificial Sequence: Synthetic oligonucleotide
ccacaaaccggaagggccc

SEQ ID NO: 288496 - RNA, 19 nt, Artificial Sequence
  Description of Artificial Sequence: Synthetic oligonucleotide
uaaccggcaucauuuccuu

SEQ ID NO: 288497 - RNA, 19 nt, Artificial Sequence
  Description of Artificial Sequence: Synthetic oligonucleotide
ugucugcacgaauguuucu

SEQ ID NO: 288498 - RNA, 19 nt, Artificial Sequence
  Description of Artificial Sequence: Synthetic oligonucleotide
uggcaugcuauggcaagcu

SEQ ID NO: 288499 - RNA, 19 nt, Artificial Sequence
  Description of Artificial Sequence: Synthetic oligonucleotide
gaggagcgcuuccugaaaa

SEQ ID NO: 288500 - RNA, 19 nt, Artificial Sequence
  Description of Artificial Sequence: Synthetic oligonucleotide
auucuguauuggcaugcua

SEQ ID NO: 288501 - RNA, 19 nt, Artificial Sequence
  Description of Artificial Sequence: Synthetic oligonucleotide
agcaagacaccugguggug

SEQ ID NO: 288502 - RNA, 19 nt, Artificial Sequence
  Description of Artificial Sequence: Synthetic oligonucleotide
cuuuggggacuuuucaagu

SEQ ID NO: 288503 - RNA, 19 nt, Artificial Sequence
  Description of Artificial Sequence: Synthetic oligonucleotide
uuguugcuguccccggcuc

SEQ ID NO: 288504 - RNA, 19 nt, Artificial Sequence
  Description of Artificial Sequence: Synthetic oligonucleotide
auaggaccuggccauuaua

SEQ ID NO: 288505 - RNA, 19 nt, Artificial Sequence
  Description of Artificial Sequence: Synthetic oligonucleotide
caaaccggaagggcccucc

SEQ ID NO: 288506 - RNA, 19 nt, Artificial Sequence
  Description of Artificial Sequence: Synthetic oligonucleotide
aaccccuuccuggaggauu

SEQ ID NO: 288507 - RNA, 19 nt, Artificial Sequence
  Description of Artificial Sequence: Synthetic oligonucleotide
ccugaaaaucuugacagca

SEQ ID NO: 288508 - RNA, 19 nt, Artificial Sequence
  Description of Artificial Sequence: Synthetic oligonucleotide
uguaaucgagcugcccaau

SEQ ID NO: 288509 - RNA, 19 nt, Artificial Sequence
  Description of Artificial Sequence: Synthetic oligonucleotide
gucgaggagcagcuggcac

SEQ ID NO: 288510 - RNA, 19 nt, Artificial Sequence
  Description of Artificial Sequence: Synthetic oligonucleotide
uccacugauggcggcuacc

SEQ ID NO: 288511 - RNA, 19 nt, Artificial Sequence
  Description of Artificial Sequence: Synthetic oligonucleotide
cccuuucgaaugauguuag

SEQ ID NO: 288512 - RNA, 19 nt, Artificial Sequence
  Description of Artificial Sequence: Synthetic oligonucleotide
cucguacuuccggagccgg

SEQ ID NO: 288513 - RNA, 19 nt, Artificial Sequence
  Description of Artificial Sequence: Synthetic oligonucleotide
acuuugucauucaacccuu

SEQ ID NO: 288514 - RNA, 19 nt, Artificial Sequence
  Description of Artificial Sequence: Synthetic oligonucleotide
uuccauaggcagacucgua

SEQ ID NO: 288515 - RNA, 19 nt, Artificial Sequence
  Description of Artificial Sequence: Synthetic oligonucleotide
cacagggcuuuauuacuga

SEQ ID NO: 288516 - RNA, 19 nt, Artificial Sequence
  Description of Artificial Sequence: Synthetic oligonucleotide
cacgaaccucauuaucaca

SEQ ID NO: 288517 - RNA, 19 nt, Artificial Sequence
  Description of Artificial Sequence: Synthetic oligonucleotide
ggauucguaugacuucaga

SEQ ID NO: 288518 - RNA, 19 nt, Artificial Sequence
  Description of Artificial Sequence: Synthetic oligonucleotide
cauuuugggcagucucuga

SEQ ID NO: 288519 - RNA, 19 nt, Artificial Sequence
  Description of Artificial Sequence: Synthetic oligonucleotide
ugggagcaagacaccuggu

SEQ ID NO: 288520 - RNA, 19 nt, Artificial Sequence
  Description of Artificial Sequence: Synthetic oligonucleotide
gccuucgauucuuugguca

SEQ ID NO: 288521 - RNA, 19 nt, Artificial Sequence
  Description of Artificial Sequence: Synthetic oligonucleotide
ccuuccugugauauucgug

SEQ ID NO: 288522 - RNA, 19 nt, Artificial Sequence
  Description of Artificial Sequence: Synthetic oligonucleotide
auggcggcuaccacgggcu

SEQ ID NO: 288523 - RNA, 19 nt, Artificial Sequence
  Description of Artificial Sequence: Synthetic oligonucleotide
gagcgcuuccugaaaaucu

SEQ ID NO: 288524 - RNA, 19 nt, Artificial Sequence
  Description of Artificial Sequence: Synthetic oligonucleotide
cuuuaacacuuugugcuua

SEQ ID NO: 288525 - RNA, 19 nt, Artificial Sequence
  Description of Artificial Sequence: Synthetic oligonucleotide
ccaaucaccuucuccgguc

SEQ ID NO: 288526 - RNA, 19 nt, Artificial Sequence
  Description of Artificial Sequence: Synthetic oligonucleotide
cagacuucaccaggaggug

SEQ ID NO: 288527 - RNA, 19 nt, Artificial Sequence
  Description of Artificial Sequence: Synthetic oligonucleotide
cacccaccauuuugggcag

SEQ ID NO: 288528 - RNA, 19 nt, Artificial Sequence
  Description of Artificial Sequence: Synthetic oligonucleotide
cugcuacaugcugugcuac

SEQ ID NO: 288529 - RNA, 19 nt, Artificial Sequence
  Description of Artificial Sequence: Synthetic oligonucleotide
gcaugcuauggcaagcuca

SEQ ID NO: 288530 - RNA, 19 nt, Artificial Sequence
  Description of Artificial Sequence: Synthetic oligonucleotide
gcagacucguacuuccgga

SEQ ID NO: 288531 - RNA, 19 nt, Artificial Sequence
  Description of Artificial Sequence: Synthetic oligonucleotide
gucugcacgaauguuucua

SEQ ID NO: 288532 - RNA, 19 nt, Artificial Sequence
  Description of Artificial Sequence: Synthetic oligonucleotide
ugcuacggcagaggcugug

SEQ ID NO: 288533 - RNA, 19 nt, Artificial Sequence
  Description of Artificial Sequence: Synthetic oligonucleotide
caccaaggauggcuagaug

SEQ ID NO: 288534 - RNA, 19 nt, Artificial Sequence
  Description of Artificial Sequence: Synthetic oligonucleotide
uugcucgaguccagccuuc

SEQ ID NO: 288535 - RNA, 19 nt, Artificial Sequence
  Description of Artificial Sequence: Synthetic oligonucleotide
aggauucguaugacuucag

SEQ ID NO: 288536 - RNA, 19 nt, Artificial Sequence
  Description of Artificial Sequence: Synthetic oligonucleotide
cagcgagauaaccggcauc

SEQ ID NO: 288537 - RNA, 19 nt, Artificial Sequence
  Description of Artificial Sequence: Synthetic oligonucleotide
ggagucauaccuucuacuu

SEQ ID NO: 288538 - RNA, 19 nt, Artificial Sequence
  Description of Artificial Sequence: Synthetic oligonucleotide
ccgacuucauccgccaggg

SEQ ID NO: 288539 - RNA, 19 nt, Artificial Sequence
  Description of Artificial Sequence: Synthetic oligonucleotide
cacgaauguuucuaccagu

SEQ ID NO: 288540 - RNA, 19 nt, Artificial Sequence
  Description of Artificial Sequence: Synthetic oligonucleotide
agcccaaacaccgcuccaa

SEQ ID NO: 288541 - RNA, 19 nt, Artificial Sequence
  Description of Artificial Sequence: Synthetic oligonucleotide
cccagauuucauucauaac

SEQ ID NO: 288542 - RNA, 19 nt, Artificial Sequence
  Description of Artificial Sequence: Synthetic oligonucleotide
uacuuccggagccggucua

SEQ ID NO: 288543 - RNA, 19 nt, Artificial Sequence
  Description of Artificial Sequence: Synthetic oligonucleotide
cguaugacuucagacauca

SEQ ID NO: 288544 - RNA, 19 nt, Artificial Sequence
  Description of Artificial Sequence: Synthetic oligonucleotide
acaaaccggaagggcccuc

SEQ ID NO: 288545 - RNA, 19 nt, Artificial Sequence
  Description of Artificial Sequence: Synthetic oligonucleotide
ggcagcgcccacaggaaag

SEQ ID NO: 288546 - RNA, 19 nt, Artificial Sequence
  Description of Artificial Sequence: Synthetic oligonucleotide
ugcucgaguccagccuuca

SEQ ID NO: 288547 - RNA, 19 nt, Artificial Sequence
  Description of Artificial Sequence: Synthetic oligonucleotide
agccggucuacuacuuucu

SEQ ID NO: 288548 - RNA, 19 nt, Artificial Sequence
  Description of Artificial Sequence: Synthetic oligonucleotide
gugcuacauccacaccgac

SEQ ID NO: 288549 - RNA, 19 nt, Artificial Sequence
  Description of Artificial Sequence: Synthetic oligonucleotide
gggacuuuucaaguuucuc

SEQ ID NO: 288550 - RNA, 19 nt, Artificial Sequence
  Description of Artificial Sequence: Synthetic oligonucleotide
cagguuuaccaggauccca

SEQ ID NO: 288551 - RNA, 19 nt, Artificial Sequence
  Description of Artificial Sequence: Synthetic oligonucleotide
cagaguucaagcucuuauu

SEQ ID NO: 288552 - RNA, 19 nt, Artificial Sequence
  Description of Artificial Sequence: Synthetic oligonucleotide
ggagcgcuuccugaaaauc

SEQ ID NO: 288553 - RNA, 19 nt, Artificial Sequence
  Description of Artificial Sequence: Synthetic oligonucleotide
acuggucaaccaaucccau

SEQ ID NO: 288554 - RNA, 19 nt, Artificial Sequence
  Description of Artificial Sequence: Synthetic oligonucleotide
gaaccgcuccccaaaggcu

SEQ ID NO: 288555 - RNA, 19 nt, Artificial Sequence
  Description of Artificial Sequence: Synthetic oligonucleotide
cuggaggauucguaugacu

SEQ ID NO: 288556 - RNA, 19 nt, Artificial Sequence
  Description of Artificial Sequence: Synthetic oligonucleotide
agccggcacacccaccauu

SEQ ID NO: 288557 - RNA, 19 nt, Artificial Sequence
  Description of Artificial Sequence: Synthetic oligonucleotide
ugcgacccaagaagcccuu

SEQ ID NO: 288558 - RNA, 19 nt, Artificial Sequence
  Description of Artificial Sequence: Synthetic oligonucleotide
ggguuacucauagcugcug

SEQ ID NO: 288559 - RNA, 19 nt, Artificial Sequence
  Description of Artificial Sequence: Synthetic oligonucleotide
gggccuucgauucuuuggu

SEQ ID NO: 288560 - RNA, 19 nt, Artificial Sequence
  Description of Artificial Sequence: Synthetic oligonucleotide
agcuggcacgggguaaacu

SEQ ID NO: 288561 - RNA, 19 nt, Artificial Sequence
  Description of Artificial Sequence: Synthetic oligonucleotide
gcugugcuacauccacacc

SEQ ID NO: 288562 - RNA, 19 nt, Artificial Sequence
  Description of Artificial Sequence: Synthetic oligonucleotide
cauccauuucagaguucaa

SEQ ID NO: 288563 - RNA, 19 nt, Artificial Sequence
  Description of Artificial Sequence: Synthetic oligonucleotide
gcucaaguccuccucccaa

SEQ ID NO: 288564 - RNA, 19 nt, Artificial Sequence
  Description of Artificial Sequence: Synthetic oligonucleotide
ggacaccuaauacuguuuu

SEQ ID NO: 288565 - RNA, 19 nt, Artificial Sequence
  Description of Artificial Sequence: Synthetic oligonucleotide
cuugcucgaguccagccuu

SEQ ID NO: 288566 - RNA, 19 nt, Artificial Sequence
  Description of Artificial Sequence: Synthetic oligonucleotide
ggcaugcuauggcaagcuc

SEQ ID NO: 288567 - RNA, 19 nt, Artificial Sequence
  Description of Artificial Sequence: Synthetic oligonucleotide
cuccgaaccgcuccccaaa

SEQ ID NO: 288568 - RNA, 19 nt, Artificial Sequence
  Description of Artificial Sequence: Synthetic oligonucleotide
aggccaaugucuggauuuu

SEQ ID NO: 288569 - RNA, 19 nt, Artificial Sequence
  Description of Artificial Sequence: Synthetic oligonucleotide
gccggucuacuacuuucug

SEQ ID NO: 288570 - RNA, 19 nt, Artificial Sequence
  Description of Artificial Sequence: Synthetic oligonucleotide
guacuuccggagccggucu

SEQ ID NO: 288571 - RNA, 19 nt, Artificial Sequence
  Description of Artificial Sequence: Synthetic oligonucleotide
auguucuggguuacucaua

SEQ ID NO: 288572 - RNA, 19 nt, Artificial Sequence
  Description of Artificial Sequence: Synthetic oligonucleotide
ccgaaccgcuccccaaagg

SEQ ID NO: 288573 - RNA, 19 nt, Artificial Sequence
  Description of Artificial Sequence: Synthetic oligonucleotide
uccccggcucagcccaguc

SEQ ID NO: 288574 - RNA, 19 nt, Artificial Sequence
  Description of Artificial Sequence: Synthetic oligonucleotide
gcccaaucaaguugcugaa

SEQ ID NO: 288575 - RNA, 19 nt, Artificial Sequence
  Description of Artificial Sequence: Synthetic oligonucleotide
gcggcuaccacgggcuuug

SEQ ID NO: 288576 - RNA, 19 nt, Artificial Sequence
  Description of Artificial Sequence: Synthetic oligonucleotide
ggccuucgauucuuugguc

SEQ ID NO: 288577 - RNA, 19 nt, Artificial Sequence
  Description of Artificial Sequence: Synthetic oligonucleotide
gucugacaaauggaauagu

SEQ ID NO: 288578 - RNA, 19 nt, Artificial Sequence
  Description of Artificial Sequence: Synthetic oligonucleotide
cucacugguagaacuucuu

SEQ ID NO: 288579 - RNA, 19 nt, Artificial Sequence
  Description of Artificial Sequence: Synthetic oligonucleotide
ggaggagcgcuuccugaaa

SEQ ID NO: 288580 - RNA, 19 nt, Artificial Sequence
  Description of Artificial Sequence: Synthetic oligonucleotide
gccuaggucuucugcuaca

SEQ ID NO: 288581 - RNA, 19 nt, Artificial Sequence
  Description of Artificial Sequence: Synthetic oligonucleotide
caggaaagccgaagccugu

SEQ ID NO: 288582 - RNA, 19 nt, Artificial Sequence
  Description of Artificial Sequence: Synthetic oligonucleotide
cauaggaccuggccauuau

SEQ ID NO: 288583 - RNA, 19 nt, Artificial Sequence
  Description of Artificial Sequence: Synthetic oligonucleotide
uucauccgccaggguggca

SEQ ID NO: 288584 - RNA, 19 nt, Artificial Sequence
  Description of Artificial Sequence: Synthetic oligonucleotide
ccacaccgacuucauccgc

SEQ ID NO: 288585 - RNA, 19 nt, Artificial Sequence
  Description of Artificial Sequence: Synthetic oligonucleotide
gauauucguguugcuucuu

SEQ ID NO: 288586 - RNA, 19 nt, Artificial Sequence
  Description of Artificial Sequence: Synthetic oligonucleotide
ccuuccgaucagccaggcc

SEQ ID NO: 288587 - RNA, 19 nt, Artificial Sequence
  Description of Artificial Sequence: Synthetic oligonucleotide
cagggacaccuaauacugu

SEQ ID NO: 288588 - RNA, 19 nt, Artificial Sequence
  Description of Artificial Sequence: Synthetic oligonucleotide
gcugaaaauggaaucccuu

SEQ ID NO: 288589 - RNA, 19 nt, Artificial Sequence
  Description of Artificial Sequence: Synthetic oligonucleotide
cuacggcagaggcuguggu

SEQ ID NO: 288590 - RNA, 19 nt, Artificial Sequence
  Description of Artificial Sequence: Synthetic oligonucleotide
cacagcacagggcuuuauu

SEQ ID NO: 288591 - RNA, 19 nt, Artificial Sequence
  Description of Artificial Sequence: Synthetic oligonucleotide
ccuggugguguagaagcca

SEQ ID NO: 288592 - RNA, 19 nt, Artificial Sequence
  Description of Artificial Sequence: Synthetic oligonucleotide
gcucgaguccagccuucac

SEQ ID NO: 288593 - RNA, 19 nt, Artificial Sequence
  Description of Artificial Sequence: Synthetic oligonucleotide
uggcggcuaccacgggcuu

SEQ ID NO: 288594 - RNA, 19 nt, Artificial Sequence
  Description of Artificial Sequence: Synthetic oligonucleotide
gccaaucaccuucuccggu

SEQ ID NO: 288595 - RNA, 19 nt, Artificial Sequence
  Description of Artificial Sequence: Synthetic oligonucleotide
uccgaucagccaggccuuu

SEQ ID NO: 288596 - RNA, 19 nt, Artificial Sequence
  Description of Artificial Sequence: Synthetic oligonucleotide
ggccauuauaaagucccau

SEQ ID NO: 288597 - RNA, 19 nt, Artificial Sequence
  Description of Artificial Sequence: Synthetic oligonucleotide
gcuacaugcugugcuacau

SEQ ID NO: 288598 - RNA, 19 nt, Artificial Sequence
  Description of Artificial Sequence: Synthetic oligonucleotide
caucagggccuucgauucu

SEQ ID NO: 288599 - RNA, 19 nt, Artificial Sequence
  Description of Artificial Sequence: Synthetic oligonucleotide
gcauggucgaggagcagcu

SEQ ID NO: 288600 - RNA, 19 nt, Artificial Sequence
  Description of Artificial Sequence: Synthetic oligonucleotide
ggauccacugauggcggcu

SEQ ID NO: 288601 - RNA, 19 nt, Artificial Sequence
  Description of Artificial Sequence: Synthetic oligonucleotide
gcucacugguagaacuucu

SEQ ID NO: 288602 - RNA, 19 nt, Artificial Sequence
  Description of Artificial Sequence: Synthetic oligonucleotide
gcaagacaccugguggugu

SEQ ID NO: 288603 - RNA, 19 nt, Artificial Sequence
  Description of Artificial Sequence: Synthetic oligonucleotide
cacaaaccggaagggcccu

SEQ ID NO: 288604 - RNA, 19 nt, Artificial Sequence
  Description of Artificial Sequence: Synthetic oligonucleotide
acccaccauuuugggcagu

SEQ ID NO: 288605 - RNA, 19 nt, Artificial Sequence
  Description of Artificial Sequence: Synthetic oligonucleotide
ccggucuuuugcugacuga

SEQ ID NO: 288606 - RNA, 19 nt, Artificial Sequence
  Description of Artificial Sequence: Synthetic oligonucleotide
caguuccacguugccaccu

SEQ ID NO: 288607 - RNA, 19 nt, Artificial Sequence
  Description of Artificial Sequence: Synthetic oligonucleotide
cgaaugauguuagugcuuu

SEQ ID NO: 288608 - RNA, 19 nt, Artificial Sequence
  Description of Artificial Sequence: Synthetic oligonucleotide
ggcccagauuucauucaua

SEQ ID NO: 288609 - RNA, 19 nt, Artificial Sequence
  Description of Artificial Sequence: Synthetic oligonucleotide
gggacaccuaauacuguuu

SEQ ID NO: 288610 - RNA, 19 nt, Artificial Sequence
  Description of Artificial Sequence: Synthetic oligonucleotide
ggaaucccuuucgaaugau

SEQ ID NO: 288611 - RNA, 19 nt, Artificial Sequence
  Description of Artificial Sequence: Synthetic oligonucleotide
ccgaucagccaggccuuug

SEQ ID NO: 288612 - RNA, 19 nt, Artificial Sequence
  Description of Artificial Sequence: Synthetic oligonucleotide
cccaaucaaguugcugaaa

SEQ ID NO: 288613 - RNA, 19 nt, Artificial Sequence
  Description of Artificial Sequence: Synthetic oligonucleotide
ccuuucgaaugauguuagu

SEQ ID NO: 288614 - RNA, 19 nt, Artificial Sequence
  Description of Artificial Sequence: Synthetic oligonucleotide
ccuccgaaccgcuccccaa

SEQ ID NO: 288615 - RNA, 19 nt, Artificial Sequence
  Description of Artificial Sequence: Synthetic oligonucleotide
ccggagccggucuacuacu

SEQ ID NO: 288616 - RNA, 19 nt, Artificial Sequence
  Description of Artificial Sequence: Synthetic oligonucleotide
cuccggucuuuugcugacu

SEQ ID NO: 288617 - RNA, 19 nt, Artificial Sequence
  Description of Artificial Sequence: Synthetic oligonucleotide
ccggcaucauuuccuugcu

SEQ ID NO: 288618 - RNA, 19 nt, Artificial Sequence
  Description of Artificial Sequence: Synthetic oligonucleotide
cgguauuggaugucuucau

SEQ ID NO: 288619 - RNA, 19 nt, Artificial Sequence
  Description of Artificial Sequence: Synthetic oligonucleotide
caaccccuuccuggaggau

SEQ ID NO: 288620 - RNA, 19 nt, Artificial Sequence
  Description of Artificial Sequence: Synthetic oligonucleotide
guccccggcucagcccagu

SEQ ID NO: 288621 - RNA, 19 nt, Artificial Sequence
  Description of Artificial Sequence: Synthetic oligonucleotide
gcgagauaaccggcaucau

SEQ ID NO: 288622 - RNA, 19 nt, Artificial Sequence
  Description of Artificial Sequence: Synthetic oligonucleotide
ggcggcuaccacgggcuuu

SEQ ID NO: 288623 - RNA, 19 nt, Artificial Sequence
  Description of Artificial Sequence: Synthetic oligonucleotide
cggagccggucuacuacuu

SEQ ID NO: 288624 - RNA, 19 nt, Artificial Sequence
  Description of Artificial Sequence: Synthetic oligonucleotide
cacgggcuuuggggacuuu

SEQ ID NO: 288625 - RNA, 19 nt, Artificial Sequence
  Description of Artificial Sequence: Synthetic oligonucleotide
ucugucacgauguaaaugg

SEQ ID NO: 288626 - RNA, 19 nt, Artificial Sequence
  Description of Artificial Sequence: Synthetic oligonucleotide
aauugaggccaccauauac

SEQ ID NO: 288627 - RNA, 19 nt, Artificial Sequence
  Description of Artificial Sequence: Synthetic oligonucleotide
ucaacuacccaccuuauag

SEQ ID NO: 288628 - RNA, 19 nt, Artificial Sequence
  Description of Artificial Sequence: Synthetic oligonucleotide
uacauguuaaauauggaca

SEQ ID NO: 288629 - RNA, 19 nt, Artificial Sequence
  Description of Artificial Sequence: Synthetic oligonucleotide
acauguuaaauauggacac

SEQ ID NO: 288630 - RNA, 19 nt, Artificial Sequence
  Description of Artificial Sequence: Synthetic oligonucleotide
gaauuuggcaccuugccgg

SEQ ID NO: 288631 - RNA, 19 nt, Artificial Sequence
  Description of Artificial Sequence: Synthetic oligonucleotide
gaaagagagagagagagag

SEQ ID NO: 288632 - RNA, 19 nt, Artificial Sequence
  Description of Artificial Sequence: Synthetic oligonucleotide
aguauguacaaccaguucu

SEQ ID NO: 288633 - RNA, 19 nt, Artificial Sequence
  Description of Artificial Sequence: Synthetic oligonucleotide
acuugaaacaaacccaggg

SEQ ID NO: 288634 - RNA, 19 nt, Artificial Sequence
  Description of Artificial Sequence: Synthetic oligonucleotide
aaaucaucaacuacccacc

SEQ ID NO: 288635 - RNA, 19 nt, Artificial Sequence
  Description of Artificial Sequence: Synthetic oligonucleotide
uugaaacaaacccagggug

SEQ ID NO: 288636 - RNA, 19 nt, Artificial Sequence
  Description of Artificial Sequence: Synthetic oligonucleotide
uuagugauugccaaggguc

SEQ ID NO: 288637 - RNA, 19 nt, Artificial Sequence
  Description of Artificial Sequence: Synthetic oligonucleotide
uuaaggacaguuuucauua

SEQ ID NO: 288638 - RNA, 19 nt, Artificial Sequence
  Description of Artificial Sequence: Synthetic oligonucleotide
ucccucacaaggaagaucc

SEQ ID NO: 288639 - RNA, 19 nt, Artificial Sequence
  Description of Artificial Sequence: Synthetic oligonucleotide
ucuucuaugagccgggcca

SEQ ID NO: 288640 - RNA, 19 nt, Artificial Sequence
  Description of Artificial Sequence: Synthetic oligonucleotide
uugauagugaaccugccgu

SEQ ID NO: 288641 - RNA, 19 nt, Artificial Sequence
  Description of Artificial Sequence: Synthetic oligonucleotide
uaaucagacaguaugcaaa

SEQ ID NO: 288642 - RNA, 19 nt, Artificial Sequence
  Description of Artificial Sequence: Synthetic oligonucleotide
ugagguuggaaaaccaccc

SEQ ID NO: 288643 - RNA, 19 nt, Artificial Sequence
  Description of Artificial Sequence: Synthetic oligonucleotide
uauucguugucuucuauga

SEQ ID NO: 288644 - RNA, 19 nt, Artificial Sequence
  Description of Artificial Sequence: Synthetic oligonucleotide
gugaaagagagagagagag

SEQ ID NO: 288645 - RNA, 19 nt, Artificial Sequence
  Description of Artificial Sequence: Synthetic oligonucleotide
guaguaagccacuagcugc

SEQ ID NO: 288646 - RNA, 19 nt, Artificial Sequence
  Description of Artificial Sequence: Synthetic oligonucleotide
ugggcgagagccaugagag

SEQ ID NO: 288647 - RNA, 19 nt, Artificial Sequence
  Description of Artificial Sequence: Synthetic oligonucleotide
uccugugagaaguagguug

SEQ ID NO: 288648 - RNA, 19 nt, Artificial Sequence
  Description of Artificial Sequence: Synthetic oligonucleotide
uugagguuggaaaaccacc

SEQ ID NO: 288649 - RNA, 19 nt, Artificial Sequence
  Description of Artificial Sequence: Synthetic oligonucleotide
ugaaacaaacccaggguga

SEQ ID NO: 288650 - RNA, 19 nt, Artificial Sequence
  Description of Artificial Sequence: Synthetic oligonucleotide
cugugaaagagagagagag

SEQ ID NO: 288651 - RNA, 19 nt, Artificial Sequence
  Description of Artificial Sequence: Synthetic oligonucleotide
ucauccguuccacauaggc

SEQ ID NO: 288652 - RNA, 19 nt, Artificial Sequence
  Description of Artificial Sequence: Synthetic oligonucleotide
ucaucaacuacccaccuua

SEQ ID NO: 288653 - RNA, 19 nt, Artificial Sequence
  Description of Artificial Sequence: Synthetic oligonucleotide
aagagagagagagagagaa

SEQ ID NO: 288654 - RNA, 19 nt, Artificial Sequence
  Description of Artificial Sequence: Synthetic oligonucleotide
uuggacguggggcacacgg

SEQ ID NO: 288655 - RNA, 19 nt, Artificial Sequence
  Description of Artificial Sequence: Synthetic oligonucleotide
auagucaucugaaaucuac

SEQ ID NO: 288656 - RNA, 19 nt, Artificial Sequence
  Description of Artificial Sequence: Synthetic oligonucleotide
guagguugacgccagagag

SEQ ID NO: 288657 - RNA, 19 nt, Artificial Sequence
  Description of Artificial Sequence: Synthetic oligonucleotide
acucuuaucccaccgaaug

SEQ ID NO: 288658 - RNA, 19 nt, Artificial Sequence
  Description of Artificial Sequence: Synthetic oligonucleotide
guuuucggaucuuauagug

SEQ ID NO: 288659 - RNA, 19 nt, Artificial Sequence
  Description of Artificial Sequence: Synthetic oligonucleotide
ucauuaguuccugaggaag

SEQ ID NO: 288660 - RNA, 19 nt, Artificial Sequence
  Description of Artificial Sequence: Synthetic oligonucleotide
uaugagccgggccagacca

SEQ ID NO: 288661 - RNA, 19 nt, Artificial Sequence
  Description of Artificial Sequence: Synthetic oligonucleotide
caacuugaccuccagacgc

SEQ ID NO: 288662 - RNA, 19 nt, Artificial Sequence
  Description of Artificial Sequence: Synthetic oligonucleotide
ucacgguucaccaucccag

SEQ ID NO: 288663 - RNA, 19 nt, Artificial Sequence
  Description of Artificial Sequence: Synthetic oligonucleotide
auccguuccacauaggcca

SEQ ID NO: 288664 - RNA, 19 nt, Artificial Sequence
  Description of Artificial Sequence: Synthetic oligonucleotide
uacacacacauacacacau

SEQ ID NO: 288665 - RNA, 19 nt, Artificial Sequence
  Description of Artificial Sequence: Synthetic oligonucleotide
aauuuggcaccuugccggg

SEQ ID NO: 288666 - RNA, 19 nt, Artificial Sequence
  Description of Artificial Sequence: Synthetic oligonucleotide
uguuagugauugccaaggg

SEQ ID NO: 288667 - RNA, 19 nt, Artificial Sequence
  Description of Artificial Sequence: Synthetic oligonucleotide
auacaaagguccuugagua

SEQ ID NO: 288668 - RNA, 19 nt, Artificial Sequence
  Description of Artificial Sequence: Synthetic oligonucleotide
ucuaccagccucaaccugu

SEQ ID NO: 288669 - RNA, 19 nt, Artificial Sequence
  Description of Artificial Sequence: Synthetic oligonucleotide
guugacgccagagagaaug

SEQ ID NO: 288670 - RNA, 19 nt, Artificial Sequence
  Description of Artificial Sequence: Synthetic oligonucleotide
uguuuguguuuaaucagac

SEQ ID NO: 288671 - RNA, 19 nt, Artificial Sequence
  Description of Artificial Sequence: Synthetic oligonucleotide
cuugauagugaaccugccg

SEQ ID NO: 288672 - RNA, 19 nt, Artificial Sequence
  Description of Artificial Sequence: Synthetic oligonucleotide
uucguugucucacucuccc

SEQ ID NO: 288673 - RNA, 19 nt, Artificial Sequence
  Description of Artificial Sequence: Synthetic oligonucleotide
gacgcaaggacucccgggg

SEQ ID NO: 288674 - RNA, 19 nt, Artificial Sequence
  Description of Artificial Sequence: Synthetic oligonucleotide
uuauagauggggacacuga

SEQ ID NO: 288675 - RNA, 19 nt, Artificial Sequence
  Description of Artificial Sequence: Synthetic oligonucleotide
auacagaaaggcaguaggc

SEQ ID NO: 288676 - RNA, 19 nt, Artificial Sequence
  Description of Artificial Sequence: Synthetic oligonucleotide
gagagagagagagagaaca

SEQ ID NO: 288677 - RNA, 19 nt, Artificial Sequence
  Description of Artificial Sequence: Synthetic oligonucleotide
auggcaacccucguggugc

SEQ ID NO: 288678 - RNA, 19 nt, Artificial Sequence
  Description of Artificial Sequence: Synthetic oligonucleotide
gagagagagagagaacagg

SEQ ID NO: 288679 - RNA, 19 nt, Artificial Sequence
  Description of Artificial Sequence: Synthetic oligonucleotide
ugagaaguagguugacgcc

SEQ ID NO: 288680 - RNA, 19 nt, Artificial Sequence
  Description of Artificial Sequence: Synthetic oligonucleotide
uucguggugagcucgguca

SEQ ID NO: 288681 - RNA, 19 nt, Artificial Sequence
  Description of Artificial Sequence: Synthetic oligonucleotide
aauguguuagugauugcca

SEQ ID NO: 288682 - RNA, 19 nt, Artificial Sequence
  Description of Artificial Sequence: Synthetic oligonucleotide
caccuuacacaccagauuc

SEQ ID NO: 288683 - RNA, 19 nt, Artificial Sequence
  Description of Artificial Sequence: Synthetic oligonucleotide
uuuucggaucuuauagugu

SEQ ID NO: 288684 - RNA, 19 nt, Artificial Sequence
  Description of Artificial Sequence: Synthetic oligonucleotide
cauaggccauaccagaggc

SEQ ID NO: 288685 - RNA, 19 nt, Artificial Sequence
  Description of Artificial Sequence: Synthetic oligonucleotide
gucggauacagaaaggcag

SEQ ID NO: 288686 - RNA, 19 nt, Artificial Sequence
  Description of Artificial Sequence: Synthetic oligonucleotide
guuccuauagguucucccc

SEQ ID NO: 288687 - RNA, 19 nt, Artificial Sequence
  Description of Artificial Sequence: Synthetic oligonucleotide
uuaucccaccgaauguuag

SEQ ID NO: 288688 - RNA, 19 nt, Artificial Sequence
  Description of Artificial Sequence: Synthetic oligonucleotide
ugugcacauaguucauccg

SEQ ID NO: 288689 - RNA, 19 nt, Artificial Sequence
  Description of Artificial Sequence: Synthetic oligonucleotide
uguguuuaaucagacagua

SEQ ID NO: 288690 - RNA, 19 nt, Artificial Sequence
  Description of Artificial Sequence: Synthetic oligonucleotide
uaucccaccgaauguuagg

SEQ ID NO: 288691 - RNA, 19 nt, Artificial Sequence
  Description of Artificial Sequence: Synthetic oligonucleotide
ugcuaacccaccucaaccc

SEQ ID NO: 288692 - RNA, 19 nt, Artificial Sequence
  Description of Artificial Sequence: Synthetic oligonucleotide
agguacucgaaggugggcc

SEQ ID NO: 288693 - RNA, 19 nt, Artificial Sequence
  Description of Artificial Sequence: Synthetic oligonucleotide
guguuagugauugccaagg

SEQ ID NO: 288694 - RNA, 19 nt, Artificial Sequence
  Description of Artificial Sequence: Synthetic oligonucleotide
uggaguaguaagccacuag

SEQ ID NO: 288695 - RNA, 19 nt, Artificial Sequence
  Description of Artificial Sequence: Synthetic oligonucleotide
caaggcauccgguagcccc

SEQ ID NO: 288696 - RNA, 19 nt, Artificial Sequence
  Description of Artificial Sequence: Synthetic oligonucleotide
ggaguaguaagccacuagc

SEQ ID NO: 288697 - RNA, 19 nt, Artificial Sequence
  Description of Artificial Sequence: Synthetic oligonucleotide
agggcaauguguuagugau

SEQ ID NO: 288698 - RNA, 19 nt, Artificial Sequence
  Description of Artificial Sequence: Synthetic oligonucleotide
aggaaaguggaaaugucag

SEQ ID NO: 288699 - RNA, 19 nt, Artificial Sequence
  Description of Artificial Sequence: Synthetic oligonucleotide
ucaaccuguccuuccaggc

SEQ ID NO: 288700 - RNA, 19 nt, Artificial Sequence
  Description of Artificial Sequence: Synthetic oligonucleotide
ugugaaagagagagagaga

SEQ ID NO: 288701 - RNA, 19 nt, Artificial Sequence
  Description of Artificial Sequence: Synthetic oligonucleotide
auaguguuucacauugagg

SEQ ID NO: 288702 - RNA, 19 nt, Artificial Sequence
  Description of Artificial Sequence: Synthetic oligonucleotide
aucaguggcaucagaauuc

SEQ ID NO: 288703 - RNA, 19 nt, Artificial Sequence
  Description of Artificial Sequence: Synthetic oligonucleotide
ucaccaucccaggauaggg

SEQ ID NO: 288704 - RNA, 19 nt, Artificial Sequence
  Description of Artificial Sequence: Synthetic oligonucleotide
aguuuucggaucuuauagu

SEQ ID NO: 288705 - RNA, 19 nt, Artificial Sequence
  Description of Artificial Sequence: Synthetic oligonucleotide
caugagggcaauguguuag

SEQ ID NO: 288706 - RNA, 19 nt, Artificial Sequence
  Description of Artificial Sequence: Synthetic oligonucleotide
ugaaagagagagagagaga

SEQ ID NO: 288707 - RNA, 19 nt, Artificial Sequence
  Description of Artificial Sequence: Synthetic oligonucleotide
guauucguugucuucuaug

SEQ ID NO: 288708 - RNA, 19 nt, Artificial Sequence
  Description of Artificial Sequence: Synthetic oligonucleotide
ggaauuuggcaccuugccg

SEQ ID NO: 288709 - RNA, 19 nt, Artificial Sequence
  Description of Artificial Sequence: Synthetic oligonucleotide
acauuauugcugugauggg

SEQ ID NO: 288710 - RNA, 19 nt, Artificial Sequence
  Description of Artificial Sequence: Synthetic oligonucleotide
uugggcgagagccaugaga

SEQ ID NO: 288711 - RNA, 19 nt, Artificial Sequence
  Description of Artificial Sequence: Synthetic oligonucleotide
ggucauaucugggagagag

SEQ ID NO: 288712 - RNA, 19 nt, Artificial Sequence
  Description of Artificial Sequence: Synthetic oligonucleotide
uuccuauagguucucccca

SEQ ID NO: 288713 - RNA, 19 nt, Artificial Sequence
  Description of Artificial Sequence: Synthetic oligonucleotide
aaaguauguacaaccaguu

SEQ ID NO: 288714 - RNA, 19 nt, Artificial Sequence
  Description of Artificial Sequence: Synthetic oligonucleotide
gucgaagucggauacagaa

SEQ ID NO: 288715 - RNA, 19 nt, Artificial Sequence
  Description of Artificial Sequence: Synthetic oligonucleotide
ucugccaccuuuaacccau

SEQ ID NO: 288716 - RNA, 19 nt, Artificial Sequence
  Description of Artificial Sequence: Synthetic oligonucleotide
acgguagugaggcgguggc

SEQ ID NO: 288717 - RNA, 19 nt, Artificial Sequence
  Description of Artificial Sequence: Synthetic oligonucleotide
ugaagcccuuccaugcucc

SEQ ID NO: 288718 - RNA, 19 nt, Artificial Sequence
  Description of Artificial Sequence: Synthetic oligonucleotide
aaguagguugacgccagag

SEQ ID NO: 288719 - RNA, 19 nt, Artificial Sequence
  Description of Artificial Sequence: Synthetic oligonucleotide
aaguguacgcaggccaagg

SEQ ID NO: 288720 - RNA, 19 nt, Artificial Sequence
  Description of Artificial Sequence: Synthetic oligonucleotide
auaggguugaaggagugcu

SEQ ID NO: 288721 - RNA, 19 nt, Artificial Sequence
  Description of Artificial Sequence: Synthetic oligonucleotide
aguguacgcaggccaaggg

SEQ ID NO: 288722 - RNA, 19 nt, Artificial Sequence
  Description of Artificial Sequence: Synthetic oligonucleotide
gugcuaacccaccucaacc

SEQ ID NO: 288723 - RNA, 19 nt, Artificial Sequence
  Description of Artificial Sequence: Synthetic oligonucleotide
cacauaguucauccguucc

SEQ ID NO: 288724 - RNA, 19 nt, Artificial Sequence
  Description of Artificial Sequence: Synthetic oligonucleotide
aaaguccagcagacuaccc

SEQ ID NO: 288725 - RNA, 19 nt, Artificial Sequence
  Description of Artificial Sequence: Synthetic oligonucleotide
gaaaguccagcagacuacc

SEQ ID NO: 288726 - RNA, 19 nt, Artificial Sequence
  Description of Artificial Sequence: Synthetic oligonucleotide
ggaaaguggaaaugucagg

SEQ ID NO: 288727 - RNA, 19 nt, Artificial Sequence
  Description of Artificial Sequence: Synthetic oligonucleotide
ugacucuuaucccaccgaa

SEQ ID NO: 288728 - RNA, 19 nt, Artificial Sequence
  Description of Artificial Sequence: Synthetic oligonucleotide
aggauagggcacccguccc

SEQ ID NO: 288729 - RNA, 19 nt, Artificial Sequence
  Description of Artificial Sequence: Synthetic oligonucleotide
auucguugucuucuaugag

SEQ ID NO: 288730 - RNA, 19 nt, Artificial Sequence
  Description of Artificial Sequence: Synthetic oligonucleotide
agagagagagagaacagga

SEQ ID NO: 288731 - RNA, 19 nt, Artificial Sequence
  Description of Artificial Sequence: Synthetic oligonucleotide
uccuauagguucuccccag

SEQ ID NO: 288732 - RNA, 19 nt, Artificial Sequence
  Description of Artificial Sequence: Synthetic oligonucleotide
gaagucggauacagaaagg

SEQ ID NO: 288733 - RNA, 19 nt, Artificial Sequence
  Description of Artificial Sequence: Synthetic oligonucleotide
ggugaaauggucauaucug

SEQ ID NO: 288734 - RNA, 19 nt, Artificial Sequence
  Description of Artificial Sequence: Synthetic oligonucleotide
cucaaccuguccuuccagg

SEQ ID NO: 288735 - RNA, 19 nt, Artificial Sequence
  Description of Artificial Sequence: Synthetic oligonucleotide
accgcuguccaguuuucgg

SEQ ID NO: 288736 - RNA, 19 nt, Artificial Sequence
  Description of Artificial Sequence: Synthetic oligonucleotide
aaggcaguaggcaccuuuc

SEQ ID NO: 288737 - RNA, 19 nt, Artificial Sequence
  Description of Artificial Sequence: Synthetic oligonucleotide
ugccguacagagcagcuuc

SEQ ID NO: 288738 - RNA, 19 nt, Artificial Sequence
  Description of Artificial Sequence: Synthetic oligonucleotide
uaaggacaguuuucauuag

SEQ ID NO: 288739 - RNA, 19 nt, Artificial Sequence
  Description of Artificial Sequence: Synthetic oligonucleotide
uaguucauccguuccacau

SEQ ID NO: 288740 - RNA, 19 nt, Artificial Sequence
  Description of Artificial Sequence: Synthetic oligonucleotide
accucaacccugaacugcc

SEQ ID NO: 288741 - RNA, 19 nt, Artificial Sequence
  Description of Artificial Sequence: Synthetic oligonucleotide
uucauuaguuccugaggaa

SEQ ID NO: 288742 - RNA, 19 nt, Artificial Sequence
  Description of Artificial Sequence: Synthetic oligonucleotide
uuucguugucucacucucc

SEQ ID NO: 288743 - RNA, 19 nt, Artificial Sequence
  Description of Artificial Sequence: Synthetic oligonucleotide
gagguuggaaaaccacccc

SEQ ID NO: 288744 - RNA, 19 nt, Artificial Sequence
  Description of Artificial Sequence: Synthetic oligonucleotide
ucuagccugagagccacag

SEQ ID NO: 288745 - RNA, 19 nt, Artificial Sequence
  Description of Artificial Sequence: Synthetic oligonucleotide
agacgcaaggacucccggg

SEQ ID NO: 288746 - RNA, 19 nt, Artificial Sequence
  Description of Artificial Sequence: Synthetic oligonucleotide
uagguugacgccagagaga

SEQ ID NO: 288747 - RNA, 19 nt, Artificial Sequence
  Description of Artificial Sequence: Synthetic oligonucleotide
ucacgauguaaauggguuc

SEQ ID NO: 288748 - RNA, 19 nt, Artificial Sequence
  Description of Artificial Sequence: Synthetic oligonucleotide
gauggcaacccucguggug

SEQ ID NO: 288749 - RNA, 19 nt, Artificial Sequence
  Description of Artificial Sequence: Synthetic oligonucleotide
agccgcagguauuugccgg

SEQ ID NO: 288750 - RNA, 19 nt, Artificial Sequence
  Description of Artificial Sequence: Synthetic oligonucleotide
guggaugugaaguaguccu

SEQ ID NO: 288751 - RNA, 19 nt, Artificial Sequence
  Description of Artificial Sequence: Synthetic oligonucleotide
caggauagggcacccgucc

SEQ ID NO: 288752 - RNA, 19 nt, Artificial Sequence
  Description of Artificial Sequence: Synthetic oligonucleotide
gcaaaguauguacaaccag

SEQ ID NO: 288753 - RNA, 19 nt, Artificial Sequence
  Description of Artificial Sequence: Synthetic oligonucleotide
gcaugcuuggaguaguaag

SEQ ID NO: 288754 - RNA, 19 nt, Artificial Sequence
  Description of Artificial Sequence: Synthetic oligonucleotide
acaauugaggccaccauau

SEQ ID NO: 288755 - RNA, 19 nt, Artificial Sequence
  Description of Artificial Sequence: Synthetic oligonucleotide
ggagugcucacucugacuc

SEQ ID NO: 288756 - RNA, 19 nt, Artificial Sequence
  Description of Artificial Sequence: Synthetic oligonucleotide
agaacgggguggcaagcuc

SEQ ID NO: 288757 - RNA, 19 nt, Artificial Sequence
  Description of Artificial Sequence: Synthetic oligonucleotide
ucgaagucggauacagaaa

SEQ ID NO: 288758 - RNA, 19 nt, Artificial Sequence
  Description of Artificial Sequence: Synthetic oligonucleotide
gacaauugaggccaccaua

SEQ ID NO: 288759 - RNA, 19 nt, Artificial Sequence
  Description of Artificial Sequence: Synthetic oligonucleotide
gauagugaaccugccguac

SEQ ID NO: 288760 - RNA, 19 nt, Artificial Sequence
  Description of Artificial Sequence: Synthetic oligonucleotide
cuacccagaagccuccaac

SEQ ID NO: 288761 - RNA, 19 nt, Artificial Sequence
  Description of Artificial Sequence: Synthetic oligonucleotide
aggcaacucagccccagag

SEQ ID NO: 288762 - RNA, 19 nt, Artificial Sequence
  Description of Artificial Sequence: Synthetic oligonucleotide
cauaguucauccguuccac

SEQ ID NO: 288763 - RNA, 19 nt, Artificial Sequence
  Description of Artificial Sequence: Synthetic oligonucleotide
ugcacauaguucauccguu

SEQ ID NO: 288764 - RNA, 19 nt, Artificial Sequence
  Description of Artificial Sequence: Synthetic oligonucleotide
cucaacccugaacugcccg

SEQ ID NO: 288765 - RNA, 19 nt, Artificial Sequence
  Description of Artificial Sequence: Synthetic oligonucleotide
gauaggguugaaggagugc

SEQ ID NO: 288766 - RNA, 19 nt, Artificial Sequence
  Description of Artificial Sequence: Synthetic oligonucleotide
guguacgcaggccaagggc

SEQ ID NO: 288767 - RNA, 19 nt, Artificial Sequence
  Description of Artificial Sequence: Synthetic oligonucleotide
ugucagggcaggccaagcu

SEQ ID NO: 288768 - RNA, 19 nt, Artificial Sequence
  Description of Artificial Sequence: Synthetic oligonucleotide
aggccaucagcaugcuugg

SEQ ID NO: 288769 - RNA, 19 nt, Artificial Sequence
  Description of Artificial Sequence: Synthetic oligonucleotide
accuuucguugucucacuc

SEQ ID NO: 288770 - RNA, 19 nt, Artificial Sequence
  Description of Artificial Sequence: Synthetic oligonucleotide
guuuguguuuaaucagaca

SEQ ID NO: 288771 - RNA, 19 nt, Artificial Sequence
  Description of Artificial Sequence: Synthetic oligonucleotide
cugucacgauguaaauggg

SEQ ID NO: 288772 - RNA, 19 nt, Artificial Sequence
  Description of Artificial Sequence: Synthetic oligonucleotide
ucgguggaugugaaguagu

SEQ ID NO: 288773 - RNA, 19 nt, Artificial Sequence
  Description of Artificial Sequence: Synthetic oligonucleotide
ugauagugaaccugccgua

SEQ ID NO: 288774 - RNA, 19 nt, Artificial Sequence
  Description of Artificial Sequence: Synthetic oligonucleotide
caggcuacggggcagucac

SEQ ID NO: 288775 - RNA, 19 nt, Artificial Sequence
  Description of Artificial Sequence: Synthetic oligonucleotide
uagccgcagguauuugccg

SEQ ID NO: 288776 - RNA, 19 nt, Artificial Sequence
  Description of Artificial Sequence: Synthetic oligonucleotide
aaagagagagagagagaga

SEQ ID NO: 288777 - RNA, 19 nt, Artificial Sequence
  Description of Artificial Sequence: Synthetic oligonucleotide
gcugucuagccugagagcc

SEQ ID NO: 288778 - RNA, 19 nt, Artificial Sequence
  Description of Artificial Sequence: Synthetic oligonucleotide
agagagagagagagaacag

SEQ ID NO: 288779 - RNA, 19 nt, Artificial Sequence
  Description of Artificial Sequence: Synthetic oligonucleotide
gagagagagagaacaggac

SEQ ID NO: 288780 - RNA, 19 nt, Artificial Sequence
  Description of Artificial Sequence: Synthetic oligonucleotide
cuaacccaccucaacccug

SEQ ID NO: 288781 - RNA, 19 nt, Artificial Sequence
  Description of Artificial Sequence: Synthetic oligonucleotide
cuugaaacaaacccagggu

SEQ ID NO: 288782 - RNA, 19 nt, Artificial Sequence
  Description of Artificial Sequence: Synthetic oligonucleotide
uugaguaguugggugggga

SEQ ID NO: 288783 - RNA, 19 nt, Artificial Sequence
  Description of Artificial Sequence: Synthetic oligonucleotide
cgaagucggauacagaaag

SEQ ID NO: 288784 - RNA, 19 nt, Artificial Sequence
  Description of Artificial Sequence: Synthetic oligonucleotide
agagagagagagagagaac

SEQ ID NO: 288785 - RNA, 19 nt, Artificial Sequence
  Description of Artificial Sequence: Synthetic oligonucleotide
gcaguggggacauuauugc

SEQ ID NO: 288786 - RNA, 19 nt, Artificial Sequence
  Description of Artificial Sequence: Synthetic oligonucleotide
guagccgcagguauuugcc

SEQ ID NO: 288787 - RNA, 19 nt, Artificial Sequence
  Description of Artificial Sequence: Synthetic oligonucleotide
agaaguagguugacgccag

SEQ ID NO: 288788 - RNA, 19 nt, Artificial Sequence
  Description of Artificial Sequence: Synthetic oligonucleotide
cacgguucaccaucccagg

SEQ ID NO: 288789 - RNA, 19 nt, Artificial Sequence
  Description of Artificial Sequence: Synthetic oligonucleotide
ucggucagcaggaucccaa

SEQ ID NO: 288790 - RNA, 19 nt, Artificial Sequence
  Description of Artificial Sequence: Synthetic oligonucleotide
ugucgaagucggauacaga

SEQ ID NO: 288791 - RNA, 19 nt, Artificial Sequence
  Description of Artificial Sequence: Synthetic oligonucleotide
ggauauuggcagcucggag

SEQ ID NO: 288792 - RNA, 19 nt, Artificial Sequence
  Description of Artificial Sequence: Synthetic oligonucleotide
uucugccaccuuuaaccca

SEQ ID NO: 288793 - RNA, 19 nt, Artificial Sequence
  Description of Artificial Sequence: Synthetic oligonucleotide
aggacaauugaggccacca

SEQ ID NO: 288794 - RNA, 19 nt, Artificial Sequence
  Description of Artificial Sequence: Synthetic oligonucleotide
ggcaguggggacauuauug

SEQ ID NO: 288795 - RNA, 19 nt, Artificial Sequence
  Description of Artificial Sequence: Synthetic oligonucleotide
ugucuagccugagagccac

SEQ ID NO: 288796 - RNA, 19 nt, Artificial Sequence
  Description of Artificial Sequence: Synthetic oligonucleotide
agacuacccuugcucaugu

SEQ ID NO: 288797 - RNA, 19 nt, Artificial Sequence
  Description of Artificial Sequence: Synthetic oligonucleotide
aaacuugggcgagagccau

SEQ ID NO: 288798 - RNA, 19 nt, Artificial Sequence
  Description of Artificial Sequence: Synthetic oligonucleotide
ucccuucguggugagcucg

SEQ ID NO: 288799 - RNA, 19 nt, Artificial Sequence
  Description of Artificial Sequence: Synthetic oligonucleotide
aguucauccguuccacaua

SEQ ID NO: 288800 - RNA, 19 nt, Artificial Sequence
  Description of Artificial Sequence: Synthetic oligonucleotide
guuagugauugccaagggu

SEQ ID NO: 288801 - RNA, 19 nt, Artificial Sequence
  Description of Artificial Sequence: Synthetic oligonucleotide
caacuacccaccuuauaga

SEQ ID NO: 288802 - RNA, 19 nt, Artificial Sequence
  Description of Artificial Sequence: Synthetic oligonucleotide
cuguugaacugggugcggg

SEQ ID NO: 288803 - RNA, 19 nt, Artificial Sequence
  Description of Artificial Sequence: Synthetic oligonucleotide
ggaucuuauaguguuucac

SEQ ID NO: 288804 - RNA, 19 nt, Artificial Sequence
  Description of Artificial Sequence: Synthetic oligonucleotide
cugagggcgaccugugcac

SEQ ID NO: 288805 - RNA, 19 nt, Artificial Sequence
  Description of Artificial Sequence: Synthetic oligonucleotide
ucccaccgaauguuaggcc

SEQ ID NO: 288806 - RNA, 19 nt, Artificial Sequence
  Description of Artificial Sequence: Synthetic oligonucleotide
cuaugagccgggccagacc

SEQ ID NO: 288807 - RNA, 19 nt, Artificial Sequence
  Description of Artificial Sequence: Synthetic oligonucleotide
gguagccgcagguauuugc

SEQ ID NO: 288808 - RNA, 19 nt, Artificial Sequence
  Description of Artificial Sequence: Synthetic oligonucleotide
agucggauacagaaaggca

SEQ ID NO: 288809 - RNA, 19 nt, Artificial Sequence
  Description of Artificial Sequence: Synthetic oligonucleotide
cuugaccuccagacgcaag

SEQ ID NO: 288810 - RNA, 19 nt, Artificial Sequence
  Description of Artificial Sequence: Synthetic oligonucleotide
cucgguggaugugaaguag

SEQ ID NO: 288811 - RNA, 19 nt, Artificial Sequence
  Description of Artificial Sequence: Synthetic oligonucleotide
ccaagcuuggccuccuucc

SEQ ID NO: 288812 - RNA, 19 nt, Artificial Sequence
  Description of Artificial Sequence: Synthetic oligonucleotide
agacccuguguucuaccca

SEQ ID NO: 288813 - RNA, 19 nt, Artificial Sequence
  Description of Artificial Sequence: Synthetic oligonucleotide
uacggggcagucacucuac

SEQ ID NO: 288814 - RNA, 19 nt, Artificial Sequence
  Description of Artificial Sequence: Synthetic oligonucleotide
aacccucguggugccauuc

SEQ ID NO: 288815 - RNA, 19 nt, Artificial Sequence
  Description of Artificial Sequence: Synthetic oligonucleotide
auaggccauaccagaggcg

SEQ ID NO: 288816 - RNA, 19 nt, Artificial Sequence
  Description of Artificial Sequence: Synthetic oligonucleotide
ggaggauaggguugaagga

SEQ ID NO: 288817 - RNA, 19 nt, Artificial Sequence
  Description of Artificial Sequence: Synthetic oligonucleotide
ggauacagaaaggcaguag

SEQ ID NO: 288818 - RNA, 19 nt, Artificial Sequence
  Description of Artificial Sequence: Synthetic oligonucleotide
accucacgguucaccaucc

SEQ ID NO: 288819 - RNA, 19 nt, Artificial Sequence
  Description of Artificial Sequence: Synthetic oligonucleotide
cgaauguuaggccuugggc

SEQ ID NO: 288820 - RNA, 19 nt, Artificial Sequence
  Description of Artificial Sequence: Synthetic oligonucleotide
acuugggcgagagccauga

SEQ ID NO: 288821 - RNA, 19 nt, Artificial Sequence
  Description of Artificial Sequence: Synthetic oligonucleotide
caccucacgguucaccauc

SEQ ID NO: 288822 - RNA, 19 nt, Artificial Sequence
  Description of Artificial Sequence: Synthetic oligonucleotide
ugcucacucugacucuuau

SEQ ID NO: 288823 - RNA, 19 nt, Artificial Sequence
  Description of Artificial Sequence: Synthetic oligonucleotide
cagguauuugccgguuucc

SEQ ID NO: 288824 - RNA, 19 nt, Artificial Sequence
  Description of Artificial Sequence: Synthetic oligonucleotide
agaggcgaucugagcagcc

SEQ ID NO: 288825 - RNA, 19 nt, Artificial Sequence
  Description of Artificial Sequence: Synthetic oligonucleotide
acuacccaccuuauagaug

SEQ ID NO: 288826 - RNA, 19 nt, Artificial Sequence
  Description of Artificial Sequence: Synthetic oligonucleotide
aggauaggguugaaggagu

SEQ ID NO: 288827 - RNA, 19 nt, Artificial Sequence
  Description of Artificial Sequence: Synthetic oligonucleotide
auuuggcaccuugccgggc

SEQ ID NO: 288828 - RNA, 19 nt, Artificial Sequence
  Description of Artificial Sequence: Synthetic oligonucleotide
caggugcuaacccaccuca

SEQ ID NO: 288829 - RNA, 19 nt, Artificial Sequence
  Description of Artificial Sequence: Synthetic oligonucleotide
cacgguagugaggcggugg

SEQ ID NO: 288830 - RNA, 19 nt, Artificial Sequence
  Description of Artificial Sequence: Synthetic oligonucleotide
cagacgcaaggacucccgg

SEQ ID NO: 288831 - RNA, 19 nt, Artificial Sequence
  Description of Artificial Sequence: Synthetic oligonucleotide
uugccgggcuguguauucg

SEQ ID NO: 288832 - RNA, 19 nt, Artificial Sequence
  Description of Artificial Sequence: Synthetic oligonucleotide
cuucuaugagccgggccag

SEQ ID NO: 288833 - RNA, 19 nt, Artificial Sequence
  Description of Artificial Sequence: Synthetic oligonucleotide
gugcacauaguucauccgu

SEQ ID NO: 288834 - RNA, 19 nt, Artificial Sequence
  Description of Artificial Sequence: Synthetic oligonucleotide
cagacuugccagguggaug

SEQ ID NO: 288835 - RNA, 19 nt, Artificial Sequence
  Description of Artificial Sequence: Synthetic oligonucleotide
uuaggccuugggcugucua

SEQ ID NO: 288836 - RNA, 19 nt, Artificial Sequence
  Description of Artificial Sequence: Synthetic oligonucleotide
cauguuaaauauggacaca

SEQ ID NO: 288837 - RNA, 19 nt, Artificial Sequence
  Description of Artificial Sequence: Synthetic oligonucleotide
gacguggggcacacgguag

SEQ ID NO: 288838 - RNA, 19 nt, Artificial Sequence
  Description of Artificial Sequence: Synthetic oligonucleotide
ugauggcaacccucguggu

SEQ ID NO: 288839 - RNA, 19 nt, Artificial Sequence
  Description of Artificial Sequence: Synthetic oligonucleotide
aucaacuacccaccuuaua

SEQ ID NO: 288840 - RNA, 19 nt, Artificial Sequence
  Description of Artificial Sequence: Synthetic oligonucleotide
cuugccgggcuguguauuc

SEQ ID NO: 288841 - RNA, 19 nt, Artificial Sequence
  Description of Artificial Sequence: Synthetic oligonucleotide
auacacacacauacacaca

SEQ ID NO: 288842 - RNA, 19 nt, Artificial Sequence
  Description of Artificial Sequence: Synthetic oligonucleotide
gaacgggguggcaagcuca

SEQ ID NO: 288843 - RNA, 19 nt, Artificial Sequence
  Description of Artificial Sequence: Synthetic oligonucleotide
ugacgccagagagaaugca

SEQ ID NO: 288844 - RNA, 19 nt, Artificial Sequence
  Description of Artificial Sequence: Synthetic oligonucleotide
cuuggcccaacuugaccuc

SEQ ID NO: 288845 - RNA, 19 nt, Artificial Sequence
  Description of Artificial Sequence: Synthetic oligonucleotide
gauugccaagggucccaug

SEQ ID NO: 288846 - RNA, 19 nt, Artificial Sequence
  Description of Artificial Sequence: Synthetic oligonucleotide
cucgaaggugggccgcucc

SEQ ID NO: 288847 - RNA, 19 nt, Artificial Sequence
  Description of Artificial Sequence: Synthetic oligonucleotide
cucacgguucaccauccca

SEQ ID NO: 288848 - RNA, 19 nt, Artificial Sequence
  Description of Artificial Sequence: Synthetic oligonucleotide
ggacauuauugcugugaug

SEQ ID NO: 288849 - RNA, 19 nt, Artificial Sequence
  Description of Artificial Sequence: Synthetic oligonucleotide
agcucagacuugccaggug

SEQ ID NO: 288850 - RNA, 19 nt, Artificial Sequence
  Description of Artificial Sequence: Synthetic oligonucleotide
guggggacauuauugcugu

SEQ ID NO: 288851 - RNA, 19 nt, Artificial Sequence
  Description of Artificial Sequence: Synthetic oligonucleotide
gggagaacgggguggcaag

SEQ ID NO: 288852 - RNA, 19 nt, Artificial Sequence
  Description of Artificial Sequence: Synthetic oligonucleotide
ugggcggaagagucaggga

SEQ ID NO: 288853 - RNA, 19 nt, Artificial Sequence
  Description of Artificial Sequence: Synthetic oligonucleotide
acgccagagagaaugcaga

SEQ ID NO: 288854 - RNA, 19 nt, Artificial Sequence
  Description of Artificial Sequence: Synthetic oligonucleotide
ggcaagcucagacuugcca

SEQ ID NO: 288855 - RNA, 19 nt, Artificial Sequence
  Description of Artificial Sequence: Synthetic oligonucleotide
cuaccagccucaaccuguc

SEQ ID NO: 288856 - RNA, 19 nt, Artificial Sequence
  Description of Artificial Sequence: Synthetic oligonucleotide
ggucuugggcaagucacag

SEQ ID NO: 288857 - RNA, 19 nt, Artificial Sequence
  Description of Artificial Sequence: Synthetic oligonucleotide
ccgaauguuaggccuuggg

SEQ ID NO: 288858 - RNA, 19 nt, Artificial Sequence
  Description of Artificial Sequence: Synthetic oligonucleotide
ggcgagagccaugagagga

SEQ ID NO: 288859 - RNA, 19 nt, Artificial Sequence
  Description of Artificial Sequence: Synthetic oligonucleotide
cuucguggugagcucgguc

SEQ ID NO: 288860 - RNA, 19 nt, Artificial Sequence
  Description of Artificial Sequence: Synthetic oligonucleotide
cagccuuggcccaacuuga

SEQ ID NO: 288861 - RNA, 19 nt, Artificial Sequence
  Description of Artificial Sequence: Synthetic oligonucleotide
ucagacuugccagguggau

SEQ ID NO: 288862 - RNA, 19 nt, Artificial Sequence
  Description of Artificial Sequence: Synthetic oligonucleotide
ugcgguagccgcagguauu

SEQ ID NO: 288863 - RNA, 19 nt, Artificial Sequence
  Description of Artificial Sequence: Synthetic oligonucleotide
cugcauagucaucugaaau

SEQ ID NO: 288864 - RNA, 19 nt, Artificial Sequence
  Description of Artificial Sequence: Synthetic oligonucleotide
cccagaagccuccaacaag

SEQ ID NO: 288865 - RNA, 19 nt, Artificial Sequence
  Description of Artificial Sequence: Synthetic oligonucleotide
gggaccaagcagucagacc

SEQ ID NO: 288866 - RNA, 19 nt, Artificial Sequence
  Description of Artificial Sequence: Synthetic oligonucleotide
gagggcgaccugugcacac

SEQ ID NO: 288867 - RNA, 19 nt, Artificial Sequence
  Description of Artificial Sequence: Synthetic oligonucleotide
uaccagccucaaccugucc

SEQ ID NO: 288868 - RNA, 19 nt, Artificial Sequence
  Description of Artificial Sequence: Synthetic oligonucleotide
gguuccagacccuguguuc

SEQ ID NO: 288869 - RNA, 19 nt, Artificial Sequence
  Description of Artificial Sequence: Synthetic oligonucleotide
ggaaaacuugggcgagagc

SEQ ID NO: 288870 - RNA, 19 nt, Artificial Sequence
  Description of Artificial Sequence: Synthetic oligonucleotide
gaaguagguugacgccaga

SEQ ID NO: 288871 - RNA, 19 nt, Artificial Sequence
  Description of Artificial Sequence: Synthetic oligonucleotide
cucaguugagaugccacaa

SEQ ID NO: 288872 - RNA, 19 nt, Artificial Sequence
  Description of Artificial Sequence: Synthetic oligonucleotide
gucacgauguaaauggguu

SEQ ID NO: 288873 - RNA, 19 nt, Artificial Sequence
  Description of Artificial Sequence: Synthetic oligonucleotide
accuuacacaccagauucu

SEQ ID NO: 288874 - RNA, 19 nt, Artificial Sequence
  Description of Artificial Sequence: Synthetic oligonucleotide
ccagacgcaaggacucccg

SEQ ID NO: 288875 - RNA, 19 nt, Artificial Sequence
  Description of Artificial Sequence: Synthetic oligonucleotide
ccuauagguucuccccagg

SEQ ID NO: 288876 - RNA, 19 nt, Artificial Sequence
  Description of Artificial Sequence: Synthetic oligonucleotide
cagugucuccugugagaag

SEQ ID NO: 288877 - RNA, 19 nt, Artificial Sequence
  Description of Artificial Sequence: Synthetic oligonucleotide
ugagggcgaccugugcaca

SEQ ID NO: 288878 - RNA, 19 nt, Artificial Sequence
  Description of Artificial Sequence: Synthetic oligonucleotide
ggcugucuagccugagagc

SEQ ID NO: 288879 - RNA, 19 nt, Artificial Sequence
  Description of Artificial Sequence: Synthetic oligonucleotide
gcacauaguucauccguuc

SEQ ID NO: 288880 - RNA, 19 nt, Artificial Sequence
  Description of Artificial Sequence: Synthetic oligonucleotide
ggcacccgucccuucgugg

SEQ ID NO: 288881 - RNA, 19 nt, Artificial Sequence
  Description of Artificial Sequence: Synthetic oligonucleotide
auggaaugugggaucccca

SEQ ID NO: 288882 - RNA, 19 nt, Artificial Sequence
  Description of Artificial Sequence: Synthetic oligonucleotide
cucccucacaaggaagauc

SEQ ID NO: 288883 - RNA, 19 nt, Artificial Sequence
  Description of Artificial Sequence: Synthetic oligonucleotide
uggggacauuauugcugug

SEQ ID NO: 288884 - RNA, 19 nt, Artificial Sequence
  Description of Artificial Sequence: Synthetic oligonucleotide
ggcggaagagucagggacc

SEQ ID NO: 288885 - RNA, 19 nt, Artificial Sequence
  Description of Artificial Sequence: Synthetic oligonucleotide
ucccaggauagggcacccg

SEQ ID NO: 288886 - RNA, 19 nt, Artificial Sequence
  Description of Artificial Sequence: Synthetic oligonucleotide
agugcucacucugacucuu

SEQ ID NO: 288887 - RNA, 19 nt, Artificial Sequence
  Description of Artificial Sequence: Synthetic oligonucleotide
aacuugggcgagagccaug

SEQ ID NO: 288888 - RNA, 19 nt, Artificial Sequence
  Description of Artificial Sequence: Synthetic oligonucleotide
uggcaacccucguggugcc

SEQ ID NO: 288889 - RNA, 19 nt, Artificial Sequence
  Description of Artificial Sequence: Synthetic oligonucleotide
gaggcgaucugagcagcca

SEQ ID NO: 288890 - RNA, 19 nt, Artificial Sequence
  Description of Artificial Sequence: Synthetic oligonucleotide
agccuuggcccaacuugac

SEQ ID NO: 288891 - RNA, 19 nt, Artificial Sequence
  Description of Artificial Sequence: Synthetic oligonucleotide
ggugggccgcuccucaggc

SEQ ID NO: 288892 - RNA, 19 nt, Artificial Sequence
  Description of Artificial Sequence: Synthetic oligonucleotide
gugggugaaauggucauau

SEQ ID NO: 288893 - RNA, 19 nt, Artificial Sequence
  Description of Artificial Sequence: Synthetic oligonucleotide
ggauaggguugaaggagug

SEQ ID NO: 288894 - RNA, 19 nt, Artificial Sequence
  Description of Artificial Sequence: Synthetic oligonucleotide
gcaauguguuagugauugc

SEQ ID NO: 288895 - RNA, 19 nt, Artificial Sequence
  Description of Artificial Sequence: Synthetic oligonucleotide
agaugguuccagacccugu

SEQ ID NO: 288896 - RNA, 19 nt, Artificial Sequence
  Description of Artificial Sequence: Synthetic oligonucleotide
ugauugccaagggucccau

SEQ ID NO: 288897 - RNA, 19 nt, Artificial Sequence
  Description of Artificial Sequence: Synthetic oligonucleotide
cugucuagccugagagcca

SEQ ID NO: 288898 - RNA, 19 nt, Artificial Sequence
  Description of Artificial Sequence: Synthetic oligonucleotide
guacgcaggccaagggcug

SEQ ID NO: 288899 - RNA, 19 nt, Artificial Sequence
  Description of Artificial Sequence: Synthetic oligonucleotide
aggggcccucaguugagau

SEQ ID NO: 288900 - RNA, 19 nt, Artificial Sequence
  Description of Artificial Sequence: Synthetic oligonucleotide
ggagcaccaggugcuaacc

SEQ ID NO: 288901 - RNA, 19 nt, Artificial Sequence
  Description of Artificial Sequence: Synthetic oligonucleotide
gggagcaccaggugcuaac

SEQ ID NO: 288902 - RNA, 19 nt, Artificial Sequence
  Description of Artificial Sequence: Synthetic oligonucleotide
cagaagccuccaacaagga

SEQ ID NO: 288903 - RNA, 19 nt, Artificial Sequence
  Description of Artificial Sequence: Synthetic oligonucleotide
ggccaacuugaaacaaacc

SEQ ID NO: 288904 - RNA, 19 nt, Artificial Sequence
  Description of Artificial Sequence: Synthetic oligonucleotide
gcauugucgaagucggaua

SEQ ID NO: 288905 - RNA, 19 nt, Artificial Sequence
  Description of Artificial Sequence: Synthetic oligonucleotide
cucggaggucccugugcac

SEQ ID NO: 288906 - RNA, 19 nt, Artificial Sequence
  Description of Artificial Sequence: Synthetic oligonucleotide
ccuuacacaccagauucuc

SEQ ID NO: 288907 - RNA, 19 nt, Artificial Sequence
  Description of Artificial Sequence: Synthetic oligonucleotide
agcagccuuggcccaacuu

SEQ ID NO: 288908 - RNA, 19 nt, Artificial Sequence
  Description of Artificial Sequence: Synthetic oligonucleotide
aggcauccgguagccccgc

SEQ ID NO: 288909 - RNA, 19 nt, Artificial Sequence
  Description of Artificial Sequence: Synthetic oligonucleotide
ggccauggaaugugggauc

SEQ ID NO: 288910 - RNA, 19 nt, Artificial Sequence
  Description of Artificial Sequence: Synthetic oligonucleotide
cuacggggcagucacucua

SEQ ID NO: 288911 - RNA, 19 nt, Artificial Sequence
  Description of Artificial Sequence: Synthetic oligonucleotide
guguauucguugucuucua

SEQ ID NO: 288912 - RNA, 19 nt, Artificial Sequence
  Description of Artificial Sequence: Synthetic oligonucleotide
cuugggcgagagccaugag

SEQ ID NO: 288913 - RNA, 19 nt, Artificial Sequence
  Description of Artificial Sequence: Synthetic oligonucleotide
gccuuuaaggacaguuuuc

SEQ ID NO: 288914 - RNA, 19 nt, Artificial Sequence
  Description of Artificial Sequence: Synthetic oligonucleotide
aaccugccguacagagcag

SEQ ID NO: 288915 - RNA, 19 nt, Artificial Sequence
  Description of Artificial Sequence: Synthetic oligonucleotide
cuagccugagagccacaga

SEQ ID NO: 288916 - RNA, 19 nt, Artificial Sequence
  Description of Artificial Sequence: Synthetic oligonucleotide
gggcgagagccaugagagg

SEQ ID NO: 288917 - RNA, 19 nt, Artificial Sequence
  Description of Artificial Sequence: Synthetic oligonucleotide
acuugaccuccagacgcaa

SEQ ID NO: 288918 - RNA, 19 nt, Artificial Sequence
  Description of Artificial Sequence: Synthetic oligonucleotide
gggacauuauugcugugau

SEQ ID NO: 288919 - RNA, 19 nt, Artificial Sequence
  Description of Artificial Sequence: Synthetic oligonucleotide
gccguacagagcagcuucg

SEQ ID NO: 288920 - RNA, 19 nt, Artificial Sequence
  Description of Artificial Sequence: Synthetic oligonucleotide
caauugaggccaccauaua

SEQ ID NO: 288921 - RNA, 19 nt, Artificial Sequence
  Description of Artificial Sequence: Synthetic oligonucleotide
acacacacauacacacaua

SEQ ID NO: 288922 - RNA, 19 nt, Artificial Sequence
  Description of Artificial Sequence: Synthetic oligonucleotide
ggagaacgggguggcaagc

SEQ ID NO: 288923 - RNA, 19 nt, Artificial Sequence
  Description of Artificial Sequence: Synthetic oligonucleotide
accuugccgggcuguguau

SEQ ID NO: 288924 - RNA, 19 nt, Artificial Sequence
  Description of Artificial Sequence: Synthetic oligonucleotide
caaccaguucugggucccc

SEQ ID NO: 288925 - RNA, 19 nt, Artificial Sequence
  Description of Artificial Sequence: Synthetic oligonucleotide
gcaguaggcaccuuucguu

SEQ ID NO: 288926 - RNA, 19 nt, Artificial Sequence
  Description of Artificial Sequence: Synthetic oligonucleotide
gagaacgggguggcaagcu

SEQ ID NO: 288927 - RNA, 19 nt, Artificial Sequence
  Description of Artificial Sequence: Synthetic oligonucleotide
agggcgaccugugcacaca

SEQ ID NO: 288928 - RNA, 19 nt, Artificial Sequence
  Description of Artificial Sequence: Synthetic oligonucleotide
ccaggauagggcacccguc

SEQ ID NO: 288929 - RNA, 19 nt, Artificial Sequence
  Description of Artificial Sequence: Synthetic oligonucleotide
ggacguggggcacacggua

SEQ ID NO: 288930 - RNA, 19 nt, Artificial Sequence
  Description of Artificial Sequence: Synthetic oligonucleotide
ggcuacggggcagucacuc

SEQ ID NO: 288931 - RNA, 19 nt, Artificial Sequence
  Description of Artificial Sequence: Synthetic oligonucleotide
gacucuuaucccaccgaau

SEQ ID NO: 288932 - RNA, 19 nt, Artificial Sequence
  Description of Artificial Sequence: Synthetic oligonucleotide
ggccauaccagaggcgauc

SEQ ID NO: 288933 - RNA, 19 nt, Artificial Sequence
  Description of Artificial Sequence: Synthetic oligonucleotide
cacacgguagugaggcggu

SEQ ID NO: 288934 - RNA, 19 nt, Artificial Sequence
  Description of Artificial Sequence: Synthetic oligonucleotide
ggggcacacgguagugagg

SEQ ID NO: 288935 - RNA, 19 nt, Artificial Sequence
  Description of Artificial Sequence: Synthetic oligonucleotide
gugcgggaggugauguaga

SEQ ID NO: 288936 - RNA, 19 nt, Artificial Sequence
  Description of Artificial Sequence: Synthetic oligonucleotide
gguugaaggagugcucacu

SEQ ID NO: 288937 - RNA, 19 nt, Artificial Sequence
  Description of Artificial Sequence: Synthetic oligonucleotide
caccuugccgggcugugua

SEQ ID NO: 288938 - RNA, 19 nt, Artificial Sequence
  Description of Artificial Sequence: Synthetic oligonucleotide
acacgguagugaggcggug

SEQ ID NO: 288939 - RNA, 19 nt, Artificial Sequence
  Description of Artificial Sequence: Synthetic oligonucleotide
gcuaacccaccucaacccu

SEQ ID NO: 288940 - RNA, 19 nt, Artificial Sequence
  Description of Artificial Sequence: Synthetic oligonucleotide
gaaugcagagugggccugu

SEQ ID NO: 288941 - RNA, 19 nt, Artificial Sequence
  Description of Artificial Sequence: Synthetic oligonucleotide
ccguacagagcagcuucgg

SEQ ID NO: 288942 - RNA, 19 nt, Artificial Sequence
  Description of Artificial Sequence: Synthetic oligonucleotide
cccaccgaauguuaggccu

SEQ ID NO: 288943 - RNA, 19 nt, Artificial Sequence
  Description of Artificial Sequence: Synthetic oligonucleotide
gacuacccuugcucaugua

SEQ ID NO: 288944 - RNA, 19 nt, Artificial Sequence
  Description of Artificial Sequence: Synthetic oligonucleotide
ggacaauugaggccaccau

SEQ ID NO: 288945 - RNA, 19 nt, Artificial Sequence
  Description of Artificial Sequence: Synthetic oligonucleotide
ggggagaacgggguggcaa

SEQ ID NO: 288946 - RNA, 19 nt, Artificial Sequence
  Description of Artificial Sequence: Synthetic oligonucleotide
ggauagggcacccgucccu

SEQ ID NO: 288947 - RNA, 19 nt, Artificial Sequence
  Description of Artificial Sequence: Synthetic oligonucleotide
gcggaagagucagggacca

SEQ ID NO: 288948 - RNA, 19 nt, Artificial Sequence
  Description of Artificial Sequence: Synthetic oligonucleotide
cauugaggcccuuggcauu

SEQ ID NO: 288949 - RNA, 19 nt, Artificial Sequence
  Description of Artificial Sequence: Synthetic oligonucleotide
aggugcuaacccaccucaa

SEQ ID NO: 288950 - RNA, 19 nt, Artificial Sequence
  Description of Artificial Sequence: Synthetic oligonucleotide
gucacucuaccagccucaa

SEQ ID NO: 288951 - RNA, 19 nt, Artificial Sequence
  Description of Artificial Sequence: Synthetic oligonucleotide
ggguggcaagcucagacuu

SEQ ID NO: 288952 - RNA, 19 nt, Artificial Sequence
  Description of Artificial Sequence: Synthetic oligonucleotide
gcucgguggaugugaagua

SEQ ID NO: 288953 - RNA, 19 nt, Artificial Sequence
  Description of Artificial Sequence: Synthetic oligonucleotide
cagcaugcuuggaguagua

SEQ ID NO: 288954 - RNA, 19 nt, Artificial Sequence
  Description of Artificial Sequence: Synthetic oligonucleotide
cccugaacugcccgugguc

SEQ ID NO: 288955 - RNA, 19 nt, Artificial Sequence
  Description of Artificial Sequence: Synthetic oligonucleotide
gcgaccugugcacacaguu

SEQ ID NO: 288956 - RNA, 19 nt, Artificial Sequence
  Description of Artificial Sequence: Synthetic oligonucleotide
gcccaacuugaccuccaga

SEQ ID NO: 288957 - RNA, 19 nt, Artificial Sequence
  Description of Artificial Sequence: Synthetic oligonucleotide
caccuuucguugucucacu

SEQ ID NO: 288958 - RNA, 19 nt, Artificial Sequence
  Description of Artificial Sequence: Synthetic oligonucleotide
aggccauaccagaggcgau

SEQ ID NO: 288959 - RNA, 19 nt, Artificial Sequence
  Description of Artificial Sequence: Synthetic oligonucleotide
gcacccgucccuucguggu

SEQ ID NO: 288960 - RNA, 19 nt, Artificial Sequence
  Description of Artificial Sequence: Synthetic oligonucleotide
cugaacugcccguggucuu

SEQ ID NO: 288961 - RNA, 19 nt, Artificial Sequence
  Description of Artificial Sequence: Synthetic oligonucleotide
gcgagagccaugagaggaa

SEQ ID NO: 288962 - RNA, 19 nt, Artificial Sequence
  Description of Artificial Sequence: Synthetic oligonucleotide
ggcgguggcacaggccauc

SEQ ID NO: 288963 - RNA, 19 nt, Artificial Sequence
  Description of Artificial Sequence: Synthetic oligonucleotide
caggggcccucaguugaga

SEQ ID NO: 288964 - RNA, 19 nt, Artificial Sequence
  Description of Artificial Sequence: Synthetic oligonucleotide
gccgcagguauuugccggu

SEQ ID NO: 288965 - RNA, 19 nt, Artificial Sequence
  Description of Artificial Sequence: Synthetic oligonucleotide
gucuagccugagagccaca

SEQ ID NO: 288966 - RNA, 19 nt, Artificial Sequence
  Description of Artificial Sequence: Synthetic oligonucleotide
ccugccguacagagcagcu

SEQ ID NO: 288967 - RNA, 19 nt, Artificial Sequence
  Description of Artificial Sequence: Synthetic oligonucleotide
aggcuacggggcagucacu

SEQ ID NO: 288968 - RNA, 19 nt, Artificial Sequence
  Description of Artificial Sequence: Synthetic oligonucleotide
caggugagugggguggguu

SEQ ID NO: 288969 - RNA, 19 nt, Artificial Sequence
  Description of Artificial Sequence: Synthetic oligonucleotide
gcccguggucuugggcaag

SEQ ID NO: 288970 - RNA, 19 nt, Artificial Sequence
  Description of Artificial Sequence: Synthetic oligonucleotide
ggcaggcuacggggcaguc

SEQ ID NO: 288971 - RNA, 19 nt, Artificial Sequence
  Description of Artificial Sequence: Synthetic oligonucleotide
cugccguacagagcagcuu

SEQ ID NO: 288972 - RNA, 19 nt, Artificial Sequence
  Description of Artificial Sequence: Synthetic oligonucleotide
gcgguagccgcagguauuu

SEQ ID NO: 288973 - RNA, 19 nt, Artificial Sequence
  Description of Artificial Sequence: Synthetic oligonucleotide
ggcaacccucguggugcca

SEQ ID NO: 288974 - RNA, 19 nt, Artificial Sequence
  Description of Artificial Sequence: Synthetic oligonucleotide
ccguggucuugggcaaguc

SEQ ID NO: 288975 - RNA, 19 nt, Artificial Sequence
  Description of Artificial Sequence: Synthetic oligonucleotide
gcggcucgguggaugugaa

SEQ ID NO: 288976 - RNA, 19 nt, Artificial Sequence
  Description of Artificial Sequence: Synthetic oligonucleotide
gggcaauguguuagugauu

SEQ ID NO: 288977 - RNA, 19 nt, Artificial Sequence
  Description of Artificial Sequence: Synthetic oligonucleotide
ccgucccuucguggugagc

SEQ ID NO: 288978 - RNA, 19 nt, Artificial Sequence
  Description of Artificial Sequence: Synthetic oligonucleotide
ggcgaccugugcacacagu

SEQ ID NO: 288979 - RNA, 19 nt, Artificial Sequence
  Description of Artificial Sequence: Synthetic oligonucleotide
cgguagccgcagguauuug

SEQ ID NO: 288980 - RNA, 19 nt, Artificial Sequence
  Description of Artificial Sequence: Synthetic oligonucleotide
ggcauccgguagccccgcu

SEQ ID NO: 288981 - RNA, 19 nt, Artificial Sequence
  Description of Artificial Sequence: Synthetic oligonucleotide
gguugacgccagagagaau

SEQ ID NO: 288982 - RNA, 19 nt, Artificial Sequence
  Description of Artificial Sequence: Synthetic oligonucleotide
cccguggucuugggcaagu

SEQ ID NO: 288983 - RNA, 19 nt, Artificial Sequence
  Description of Artificial Sequence: Synthetic oligonucleotide
ccuucguggugagcucggu

SEQ ID NO: 288984 - RNA, 19 nt, Artificial Sequence
  Description of Artificial Sequence: Synthetic oligonucleotide
gcccggcuucaggguuuug

SEQ ID NO: 288985 - RNA, 19 nt, Artificial Sequence
  Description of Artificial Sequence: Synthetic oligonucleotide
cccgagccugggccaugga

SEQ ID NO: 288986 - RNA, 19 nt, Artificial Sequence
  Description of Artificial Sequence: Synthetic oligonucleotide
cgguagccccgcuccaccu

SEQ ID NO: 288987 - RNA, 19 nt, Artificial Sequence
  Description of Artificial Sequence: Synthetic oligonucleotide
cggcaguggggacauuauu

SEQ ID NO: 288988 - RNA, 19 nt, Artificial Sequence
  Description of Artificial Sequence: Synthetic oligonucleotide
ccgcagguauuugccgguu

SEQ ID NO: 288989 - RNA, 19 nt, Artificial Sequence
  Description of Artificial Sequence: Synthetic oligonucleotide
ccccggcaguggggacauu

SEQ ID NO: 288990 - RNA, 19 nt, Artificial Sequence
  Description of Artificial Sequence: Synthetic oligonucleotide
auauuugcuaauuauaggc

SEQ ID NO: 288991 - RNA, 19 nt, Artificial Sequence
  Description of Artificial Sequence: Synthetic oligonucleotide
uauugauugaucauuauug

SEQ ID NO: 288992 - RNA, 19 nt, Artificial Sequence
  Description of Artificial Sequence: Synthetic oligonucleotide
guuaacauacccuuggugg

SEQ ID NO: 288993 - RNA, 19 nt, Artificial Sequence
  Description of Artificial Sequence: Synthetic oligonucleotide
cuuaauuaagaguagggcc

SEQ ID NO: 288994 - RNA, 19 nt, Artificial Sequence
  Description of Artificial Sequence: Synthetic oligonucleotide
agggagauaauauaaugcc

SEQ ID NO: 288995 - RNA, 19 nt, Artificial Sequence
  Description of Artificial Sequence: Synthetic oligonucleotide
acuagauuaguccagagug

SEQ ID NO: 288996 - RNA, 19 nt, Artificial Sequence
  Description of Artificial Sequence: Synthetic oligonucleotide
uuaauuaagaguagggcca

SEQ ID NO: 288997 - RNA, 19 nt, Artificial Sequence
  Description of Artificial Sequence: Synthetic oligonucleotide
aauauaaugccuuacccaa

SEQ ID NO: 288998 - RNA, 19 nt, Artificial Sequence
  Description of Artificial Sequence: Synthetic oligonucleotide
gauaauauaaugccuuacc

SEQ ID NO: 288999 - RNA, 19 nt, Artificial Sequence
  Description of Artificial Sequence: Synthetic oligonucleotide
uguacuaucccucauggcu

SEQ ID NO: 289000 - RNA, 19 nt, Artificial Sequence
  Description of Artificial Sequence: Synthetic oligonucleotide
acgaggacaaccuaucugc

SEQ ID NO: 289001 - RNA, 19 nt, Artificial Sequence
  Description of Artificial Sequence: Synthetic oligonucleotide
uggauaugcaaacagacac

SEQ ID NO: 289002 - RNA, 19 nt, Artificial Sequence
  Description of Artificial Sequence: Synthetic oligonucleotide
uguaccgcugaucaaauag

SEQ ID NO: 289003 - RNA, 19 nt, Artificial Sequence
  Description of Artificial Sequence: Synthetic oligonucleotide
ucuaugauauggcauaaug

SEQ ID NO: 289004 - RNA, 19 nt, Artificial Sequence
  Description of Artificial Sequence: Synthetic oligonucleotide
ucauguaaagaaaagccac

SEQ ID NO: 289005 - RNA, 19 nt, Artificial Sequence
  Description of Artificial Sequence: Synthetic oligonucleotide
ugguauauugcauucagga

SEQ ID NO: 289006 - RNA, 19 nt, Artificial Sequence
  Description of Artificial Sequence: Synthetic oligonucleotide
aaaacccuauguuaaauau

SEQ ID NO: 289007 - RNA, 19 nt, Artificial Sequence
  Description of Artificial Sequence: Synthetic oligonucleotide
ucaaauaggacuucugcac

SEQ ID NO: 289008 - RNA, 19 nt, Artificial Sequence
  Description of Artificial Sequence: Synthetic oligonucleotide
aacacaucggcugagccac

SEQ ID NO: 289009 - RNA, 19 nt, Artificial Sequence
  Description of Artificial Sequence: Synthetic oligonucleotide
gaucaaauaggacuucugc

SEQ ID NO: 289010 - RNA, 19 nt, Artificial Sequence
  Description of Artificial Sequence: Synthetic oligonucleotide
ucuuaauuaagaguagggc

SEQ ID NO: 289011 - RNA, 19 nt, Artificial Sequence
  Description of Artificial Sequence: Synthetic oligonucleotide
uaagaguagggccaaacac

SEQ ID NO: 289012 - RNA, 19 nt, Artificial Sequence
  Description of Artificial Sequence: Synthetic oligonucleotide
aaagguuggucauguaaag

SEQ ID NO: 289013 - RNA, 19 nt, Artificial Sequence
  Description of Artificial Sequence: Synthetic oligonucleotide
ugaaacaccucuaaaggaa

SEQ ID NO: 289014 - RNA, 19 nt, Artificial Sequence
  Description of Artificial Sequence: Synthetic oligonucleotide
aacgugaacaguuccauau

SEQ ID NO: 289015 - RNA, 19 nt, Artificial Sequence
  Description of Artificial Sequence: Synthetic oligonucleotide
ucuaauugcaagucaugag

SEQ ID NO: 289016 - RNA, 19 nt, Artificial Sequence
  Description of Artificial Sequence: Synthetic oligonucleotide
uuaacgaugaagacacuac

SEQ ID NO: 289017 - RNA, 19 nt, Artificial Sequence
  Description of Artificial Sequence: Synthetic oligonucleotide
acuguacuaucccucaugg

SEQ ID NO: 289018 - RNA, 19 nt, Artificial Sequence
  Description of Artificial Sequence: Synthetic oligonucleotide
gacacuacaauucuaagua

SEQ ID NO: 289019 - RNA, 19 nt, Artificial Sequence
  Description of Artificial Sequence: Synthetic oligonucleotide
ugucucacacauaaaagac

SEQ ID NO: 289020 - RNA, 19 nt, Artificial Sequence
  Description of Artificial Sequence: Synthetic oligonucleotide
ugaacacaagaacuuagca

SEQ ID NO: 289021 - RNA, 19 nt, Artificial Sequence
  Description of Artificial Sequence: Synthetic oligonucleotide
aaggcgacgcgaauaaacc

SEQ ID NO: 289022 - RNA, 19 nt, Artificial Sequence
  Description of Artificial Sequence: Synthetic oligonucleotide
aacagugucuaguuuauua

SEQ ID NO: 289023 - RNA, 19 nt, Artificial Sequence
  Description of Artificial Sequence: Synthetic oligonucleotide
auuuguucuaugauauggc

SEQ ID NO: 289024 - RNA, 19 nt, Artificial Sequence
  Description of Artificial Sequence: Synthetic oligonucleotide
uguuaacauacccuuggug

SEQ ID NO: 289025 - RNA, 19 nt, Artificial Sequence
  Description of Artificial Sequence: Synthetic oligonucleotide
ugaucauuaauggaauccc

SEQ ID NO: 289026 - RNA, 19 nt, Artificial Sequence
  Description of Artificial Sequence: Synthetic oligonucleotide
uuaagaguagggccaaaca

SEQ ID NO: 289027 - RNA, 19 nt, Artificial Sequence
  Description of Artificial Sequence: Synthetic oligonucleotide
gauggauaugcaaacagac

SEQ ID NO: 289028 - RNA, 19 nt, Artificial Sequence
  Description of Artificial Sequence: Synthetic oligonucleotide
acgacaaaagccuagggaa

SEQ ID NO: 289029 - RNA, 19 nt, Artificial Sequence
  Description of Artificial Sequence: Synthetic oligonucleotide
agcaacauagaccaugcgu

SEQ ID NO: 289030 - RNA, 19 nt, Artificial Sequence
  Description of Artificial Sequence: Synthetic oligonucleotide
aucaaauaggacuucugca

SEQ ID NO: 289031 - RNA, 19 nt, Artificial Sequence
  Description of Artificial Sequence: Synthetic oligonucleotide
acggcuucagaguagauga

SEQ ID NO: 289032 - RNA, 19 nt, Artificial Sequence
  Description of Artificial Sequence: Synthetic oligonucleotide
uuaacauacccuuggugga

SEQ ID NO: 289033 - RNA, 19 nt, Artificial Sequence
  Description of Artificial Sequence: Synthetic oligonucleotide
aguaaaauuguuucuuaau

SEQ ID NO: 289034 - RNA, 19 nt, Artificial Sequence
  Description of Artificial Sequence: Synthetic oligonucleotide
ugauuuaaagaaacccuuc

SEQ ID NO: 289035 - RNA, 19 nt, Artificial Sequence
  Description of Artificial Sequence: Synthetic oligonucleotide
agcuuugacgaggacaacc

SEQ ID NO: 289036 - RNA, 19 nt, Artificial Sequence
  Description of Artificial Sequence: Synthetic oligonucleotide
  modified_base (19)..(19): a, c, u, g, unknown or other
acuuuuggcacucugguun

SEQ ID NO: 289037 - RNA, 19 nt, Artificial Sequence
  Description of Artificial Sequence: Synthetic oligonucleotide
agucacaacuguacuaucc

SEQ ID NO: 289038 - RNA, 19 nt, Artificial Sequence
  Description of Artificial Sequence: Synthetic oligonucleotide
uuaaucagucuaagaaaga

SEQ ID NO: 289039 - RNA, 19 nt, Artificial Sequence
  Description of Artificial Sequence: Synthetic oligonucleotide
ugaucauuauugacccagg

SEQ ID NO: 289040 - RNA, 19 nt, Artificial Sequence
  Description of Artificial Sequence: Synthetic oligonucleotide
auugauaagcuggggaagg

SEQ ID NO: 289041 - RNA, 19 nt, Artificial Sequence
  Description of Artificial Sequence: Synthetic oligonucleotide
uuacccaagucauacauuu

SEQ ID NO: 289042 - RNA, 19 nt, Artificial Sequence
  Description of Artificial Sequence: Synthetic oligonucleotide
caugguauauugcauucag

SEQ ID NO: 289043 - RNA, 19 nt, Artificial Sequence
  Description of Artificial Sequence: Synthetic oligonucleotide
uuagccagaggccacuaga

SEQ ID NO: 289044 - RNA, 19 nt, Artificial Sequence
  Description of Artificial Sequence: Synthetic oligonucleotide
auucguuuggcccacccug

SEQ ID NO: 289045 - RNA, 19 nt, Artificial Sequence
  Description of Artificial Sequence: Synthetic oligonucleotide
ugcgcuguaaggaaaaguu

SEQ ID NO: 289046 - RNA, 19 nt, Artificial Sequence
  Description of Artificial Sequence: Synthetic oligonucleotide
aacauacccuugguggacc

SEQ ID NO: 289047 - RNA, 19 nt, Artificial Sequence
  Description of Artificial Sequence: Synthetic oligonucleotide
ucuggaaacuauauucuua

SEQ ID NO: 289048 - RNA, 19 nt, Artificial Sequence
  Description of Artificial Sequence: Synthetic oligonucleotide
agggacaaauacccaacac

SEQ ID NO: 289049 - RNA, 19 nt, Artificial Sequence
  Description of Artificial Sequence: Synthetic oligonucleotide
ugaucaaauaggacuucug

SEQ ID NO: 289050 - RNA, 19 nt, Artificial Sequence
  Description of Artificial Sequence: Synthetic oligonucleotide
augaagacacuacaauucu

SEQ ID NO: 289051 - RNA, 19 nt, Artificial Sequence
  Description of Artificial Sequence: Synthetic oligonucleotide
acaagaacuuagcagcuga

SEQ ID NO: 289052 - RNA, 19 nt, Artificial Sequence
  Description of Artificial Sequence: Synthetic oligonucleotide
uagaugaaacauacgcugu

SEQ ID NO: 289053 - RNA, 19 nt, Artificial Sequence
  Description of Artificial Sequence: Synthetic oligonucleotide
aacauacgcuguaaaggcg

SEQ ID NO: 289054 - RNA, 19 nt, Artificial Sequence
  Description of Artificial Sequence: Synthetic oligonucleotide
gacgacaaaagccuaggga

SEQ ID NO: 289055 - RNA, 19 nt, Artificial Sequence
  Description of Artificial Sequence: Synthetic oligonucleotide
uacguuauccacauauaua

SEQ ID NO: 289056 - RNA, 19 nt, Artificial Sequence
  Description of Artificial Sequence: Synthetic oligonucleotide
aacauagaccaugcgucgg

SEQ ID NO: 289057 - RNA, 19 nt, Artificial Sequence
  Description of Artificial Sequence: Synthetic oligonucleotide
ucuugaguagaccaccuuu

SEQ ID NO: 289058 - RNA, 19 nt, Artificial Sequence
  Description of Artificial Sequence: Synthetic oligonucleotide
  modified_base (2)..(2): a, c, u, g, unknown or other
gngaagagugagcagccug

SEQ ID NO: 289059 - RNA, 19 nt, Artificial Sequence
  Description of Artificial Sequence: Synthetic oligonucleotide
gaugauuuaaagaaacccu

SEQ ID NO: 289060 - RNA, 19 nt, Artificial Sequence
  Description of Artificial Sequence: Synthetic oligonucleotide
  modified_base (9)..(10): a, c, u, g, unknown or other
  modified_base (12)..(12): a, c, u, g, unknown or other
uugcuccunncncuccucc

SEQ ID NO: 289061 - RNA, 19 nt, Artificial Sequence
  Description of Artificial Sequence: Synthetic oligonucleotide
caacauagaccaugcgucg

SEQ ID NO: 289062 - RNA, 19 nt, Artificial Sequence
  Description of Artificial Sequence: Synthetic oligonucleotide
acaucacaaaugccaaguc

SEQ ID NO: 289063 - RNA, 19 nt, Artificial Sequence
  Description of Artificial Sequence: Synthetic oligonucleotide
  modified_base (8)..(8): a, c, u, g, unknown or other
ucugguunugguugggacu

SEQ ID NO: 289064 - RNA, 19 nt, Artificial Sequence
  Description of Artificial Sequence: Synthetic oligonucleotide
ugaguagaccaccuuuugu

SEQ ID NO: 289065 - RNA, 19 nt, Artificial Sequence
  Description of Artificial Sequence: Synthetic oligonucleotide
acaaccuaucugcaugguc

SEQ ID NO: 289066 - RNA, 19 nt, Artificial Sequence
  Description of Artificial Sequence: Synthetic oligonucleotide
uacgcuguaaaggcgacgc

SEQ ID NO: 289067 - RNA, 19 nt, Artificial Sequence
  Description of Artificial Sequence: Synthetic oligonucleotide
cacgaaucacuuuuggcac

SEQ ID NO: 289068 - RNA, 19 nt, Artificial Sequence
  Description of Artificial Sequence: Synthetic oligonucleotide
acuacagauggauaugcaa

SEQ ID NO: 289069 - RNA, 19 nt, Artificial Sequence
  Description of Artificial Sequence: Synthetic oligonucleotide
aggcgacgcgaauaaaccc

SEQ ID NO: 289070 - RNA, 19 nt, Artificial Sequence
  Description of Artificial Sequence: Synthetic oligonucleotide
ucagcauagcugacugggg

SEQ ID NO: 289071 - RNA, 19 nt, Artificial Sequence
  Description of Artificial Sequence: Synthetic oligonucleotide
uucuaaguaccagacagaa

SEQ ID NO: 289072 - RNA, 19 nt, Artificial Sequence
  Description of Artificial Sequence: Synthetic oligonucleotide
uuaauacucucuccaccca

SEQ ID NO: 289073 - RNA, 19 nt, Artificial Sequence
  Description of Artificial Sequence: Synthetic oligonucleotide
gagguauaaggaaaguaac

SEQ ID NO: 289074 - RNA, 19 nt, Artificial Sequence
  Description of Artificial Sequence: Synthetic oligonucleotide
uugaguagaccaccuuuug

SEQ ID NO: 289075 - RNA, 19 nt, Artificial Sequence
  Description of Artificial Sequence: Synthetic oligonucleotide
  modified_base (2)..(3): a, c, u, g, unknown or other
  modified_base (5)..(5): a, c, u, g, unknown or other
unncncuccuccuccuucc

SEQ ID NO: 289076 - RNA, 19 nt, Artificial Sequence
  Description of Artificial Sequence: Synthetic oligonucleotide
gacgcgaauaaacccauuc

SEQ ID NO: 289077 - RNA, 19 nt, Artificial Sequence
  Description of Artificial Sequence: Synthetic oligonucleotide
acaacuguacuaucccuca

SEQ ID NO: 289078 - RNA, 19 nt, Artificial Sequence
  Description of Artificial Sequence: Synthetic oligonucleotide
aggugguugaucauuaaug

SEQ ID NO: 289079 - RNA, 19 nt, Artificial Sequence
  Description of Artificial Sequence: Synthetic oligonucleotide
  modified_base (4)..(4): a, c, u, g, unknown or other
cagngaagagugagcagcc

SEQ ID NO: 289080 - RNA, 19 nt, Artificial Sequence
  Description of Artificial Sequence: Synthetic oligonucleotide
  modified_base (7)..(7): a, c, u, g, unknown or other
cugguunugguugggacug

SEQ ID NO: 289081 - RNA, 19 nt, Artificial Sequence
  Description of Artificial Sequence: Synthetic oligonucleotide
acgaugaagacacuacaau

SEQ ID NO: 289082 - RNA, 19 nt, Artificial Sequence
  Description of Artificial Sequence: Synthetic oligonucleotide
  modified_base (6)..(7): a, c, u, g, unknown or other
  modified_base (9)..(9): a, c, u, g, unknown or other
cuccunncncuccuccucc

SEQ ID NO: 289083 - RNA, 19 nt, Artificial Sequence
  Description of Artificial Sequence: Synthetic oligonucleotide
aaucagucuaagaaagaau

SEQ ID NO: 289084 - RNA, 19 nt, Artificial Sequence
  Description of Artificial Sequence: Synthetic oligonucleotide
gguguuucauggaacacgg

SEQ ID NO: 289085 - RNA, 19 nt, Artificial Sequence
  Description of Artificial Sequence: Synthetic oligonucleotide
agacagacgacaaaagccu

SEQ ID NO: 289086 - RNA, 19 nt, Artificial Sequence
  Description of Artificial Sequence: Synthetic oligonucleotide
auaaugccuuacccaaguc

SEQ ID NO: 289087 - RNA, 19 nt, Artificial Sequence
  Description of Artificial Sequence: Synthetic oligonucleotide
ugcgucggucuuuugaaca

SEQ ID NO: 289088 - RNA, 19 nt, Artificial Sequence
  Description of Artificial Sequence: Synthetic oligonucleotide
uucucggcgccaaugcuug

SEQ ID NO: 289089 - RNA, 19 nt, Artificial Sequence
  Description of Artificial Sequence: Synthetic oligonucleotide
uaauacucucuccacccaa

SEQ ID NO: 289090 - RNA, 19 nt, Artificial Sequence
  Description of Artificial Sequence: Synthetic oligonucleotide
acggcuaccuggcacugac

SEQ ID NO: 289091 - RNA, 19 nt, Artificial Sequence
  Description of Artificial Sequence: Synthetic oligonucleotide
agacgacaaaagccuaggg

SEQ ID NO: 289092 - RNA, 19 nt, Artificial Sequence
  Description of Artificial Sequence: Synthetic oligonucleotide
agcaagucacaacuguacu

SEQ ID NO: 289093 - RNA, 19 nt, Artificial Sequence
  Description of Artificial Sequence: Synthetic oligonucleotide
uuggccugcaaaugguagc

SEQ ID NO: 289094 - RNA, 19 nt, Artificial Sequence
  Description of Artificial Sequence: Synthetic oligonucleotide
ugacuagauuaguccagag

SEQ ID NO: 289095 - RNA, 19 nt, Artificial Sequence
  Description of Artificial Sequence: Synthetic oligonucleotide
acauaauacguuauccaca

SEQ ID NO: 289096 - RNA, 19 nt, Artificial Sequence
  Description of Artificial Sequence: Synthetic oligonucleotide
aaaacagugucuaguuuau

SEQ ID NO: 289097 - RNA, 19 nt, Artificial Sequence
  Description of Artificial Sequence: Synthetic oligonucleotide
auggcauucguuuggccca

SEQ ID NO: 289098 - RNA, 19 nt, Artificial Sequence
  Description of Artificial Sequence: Synthetic oligonucleotide
uuuuccuggguagugaauu

SEQ ID NO: 289099 - RNA, 19 nt, Artificial Sequence
  Description of Artificial Sequence: Synthetic oligonucleotide
gagguuuaaauagcaggug

SEQ ID NO: 289100 - RNA, 19 nt, Artificial Sequence
  Description of Artificial Sequence: Synthetic oligonucleotide
uauauacaaugcaguucca

SEQ ID NO: 289101 - RNA, 19 nt, Artificial Sequence
  Description of Artificial Sequence: Synthetic oligonucleotide
uggccugguacccauuaca

SEQ ID NO: 289102 - RNA, 19 nt, Artificial Sequence
  Description of Artificial Sequence: Synthetic oligonucleotide
guaccgcugaucaaauagg

SEQ ID NO: 289103 - RNA, 19 nt, Artificial Sequence
  Description of Artificial Sequence: Synthetic oligonucleotide
  modified_base (3)..(4): a, c, u, g, unknown or other
  modified_base (6)..(6): a, c, u, g, unknown or other
cunncncuccuccuccuuc

SEQ ID NO: 289104 - RNA, 19 nt, Artificial Sequence
  Description of Artificial Sequence: Synthetic oligonucleotide
acgcgaauaaacccauucu

SEQ ID NO: 289105 - RNA, 19 nt, Artificial Sequence
  Description of Artificial Sequence: Synthetic oligonucleotide
caagaaguagccccacaug

SEQ ID NO: 289106 - RNA, 19 nt, Artificial Sequence
  Description of Artificial Sequence: Synthetic oligonucleotide
ucaaaacccuauguuaaau

SEQ ID NO: 289107 - RNA, 19 nt, Artificial Sequence
  Description of Artificial Sequence: Synthetic oligonucleotide
ggucauguagucaccacgg

SEQ ID NO: 289108 - RNA, 19 nt, Artificial Sequence
  Description of Artificial Sequence: Synthetic oligonucleotide
ugaagacacuacaauucua

SEQ ID NO: 289109 - RNA, 19 nt, Artificial Sequence
  Description of Artificial Sequence: Synthetic oligonucleotide
acuggugagguauccacau

SEQ ID NO: 289110 - RNA, 19 nt, Artificial Sequence
  Description of Artificial Sequence: Synthetic oligonucleotide
aauacccaacacaucggcu

SEQ ID NO: 289111 - RNA, 19 nt, Artificial Sequence
  Description of Artificial Sequence: Synthetic oligonucleotide
cuggagcuaagauuguguc

SEQ ID NO: 289112 - RNA, 19 nt, Artificial Sequence
  Description of Artificial Sequence: Synthetic oligonucleotide
gauauggcauaaugguuaa

SEQ ID NO: 289113 - RNA, 19 nt, Artificial Sequence
  Description of Artificial Sequence: Synthetic oligonucleotide
caucacaaaugccaaguca

SEQ ID NO: 289114 - RNA, 19 nt, Artificial Sequence
  Description of Artificial Sequence: Synthetic oligonucleotide
acauggagcaucgguauug

SEQ ID NO: 289115 - RNA, 19 nt, Artificial Sequence
  Description of Artificial Sequence: Synthetic oligonucleotide
  modified_base (4)..(4): a, c, u, g, unknown or other
guunugguugggacugagg

SEQ ID NO: 289116 - RNA, 19 nt, Artificial Sequence
  Description of Artificial Sequence: Synthetic oligonucleotide
ucgguauugauugaucauu

SEQ ID NO: 289117 - RNA, 19 nt, Artificial Sequence
  Description of Artificial Sequence: Synthetic oligonucleotide
ugguacccauuacauauau

SEQ ID NO: 289118 - RNA, 19 nt, Artificial Sequence
  Description of Artificial Sequence: Synthetic oligonucleotide
agaugaaacauacgcugua

SEQ ID NO: 289119 - RNA, 19 nt, Artificial Sequence
  Description of Artificial Sequence: Synthetic oligonucleotide
aauacguuauccacauaua

SEQ ID NO: 289120 - RNA, 19 nt, Artificial Sequence
  Description of Artificial Sequence: Synthetic oligonucleotide
agaguagaugaaacauacg

SEQ ID NO: 289121 - RNA, 19 nt, Artificial Sequence
  Description of Artificial Sequence: Synthetic oligonucleotide
aacuccuguaaaauaggaa

SEQ ID NO: 289122 - RNA, 19 nt, Artificial Sequence
  Description of Artificial Sequence: Synthetic oligonucleotide
  modified_base (6)..(6): a, c, u, g, unknown or other
agcagngaagagugagcag

SEQ ID NO: 289123 - RNA, 19 nt, Artificial Sequence
  Description of Artificial Sequence: Synthetic oligonucleotide
uguccgcaugucagcauag

SEQ ID NO: 289124 - RNA, 19 nt, Artificial Sequence
  Description of Artificial Sequence: Synthetic oligonucleotide
aaccuaucugcauggucau

SEQ ID NO: 289125 - RNA, 19 nt, Artificial Sequence
  Description of Artificial Sequence: Synthetic oligonucleotide
guaaaggcgacgcgaauaa

SEQ ID NO: 289126 - RNA, 19 nt, Artificial Sequence
  Description of Artificial Sequence: Synthetic oligonucleotide
gcucuuaauuaagaguagg

SEQ ID NO: 289127 - RNA, 19 nt, Artificial Sequence
  Description of Artificial Sequence: Synthetic oligonucleotide
augguauauugcauucagg

SEQ ID NO: 289128 - RNA, 19 nt, Artificial Sequence
  Description of Artificial Sequence: Synthetic oligonucleotide
aauaggacuucugcacuau

SEQ ID NO: 289129 - RNA, 19 nt, Artificial Sequence
  Description of Artificial Sequence: Synthetic oligonucleotide
aucgguauugauugaucau

SEQ ID NO: 289130 - RNA, 19 nt, Artificial Sequence
  Description of Artificial Sequence: Synthetic oligonucleotide
uacucucuccacccaacgu

SEQ ID NO: 289131 - RNA, 19 nt, Artificial Sequence
  Description of Artificial Sequence: Synthetic oligonucleotide
cagacgacaaaagccuagg

SEQ ID NO: 289132 - RNA, 19 nt, Artificial Sequence
  Description of Artificial Sequence: Synthetic oligonucleotide
cauaauacguuauccacau

SEQ ID NO: 289133 - RNA, 19 nt, Artificial Sequence
  Description of Artificial Sequence: Synthetic oligonucleotide
gguauaaggaaaguaacua

SEQ ID NO: 289134 - RNA, 19 nt, Artificial Sequence
  Description of Artificial Sequence: Synthetic oligonucleotide
  modified_base (2)..(2): a, c, u, g, unknown or other
unugguugggacugagguu

SEQ ID NO: 289135 - RNA, 19 nt, Artificial Sequence
  Description of Artificial Sequence: Synthetic oligonucleotide
auauaaugccuuacccaag

SEQ ID NO: 289136 - RNA, 19 nt, Artificial Sequence
  Description of Artificial Sequence: Synthetic oligonucleotide
aaacccuauguuaaauauu

SEQ ID NO: 289137 - RNA, 19 nt, Artificial Sequence
  Description of Artificial Sequence: Synthetic oligonucleotide
uucguuuggcccacccugu

SEQ ID NO: 289138 - RNA, 19 nt, Artificial Sequence
  Description of Artificial Sequence: Synthetic oligonucleotide
uugauggcauucguuuggc

SEQ ID NO: 289139 - RNA, 19 nt, Artificial Sequence
  Description of Artificial Sequence: Synthetic oligonucleotide
uuguccgcaugucagcaua

SEQ ID NO: 289140 - RNA, 19 nt, Artificial Sequence
  Description of Artificial Sequence: Synthetic oligonucleotide
gagggacaaauacccaaca

SEQ ID NO: 289141 - RNA, 19 nt, Artificial Sequence
  Description of Artificial Sequence: Synthetic oligonucleotide
acagacgacaaaagccuag

SEQ ID NO: 289142 - RNA, 19 nt, Artificial Sequence
  Description of Artificial Sequence: Synthetic oligonucleotide
uaacauacccuugguggac

SEQ ID NO: 289143 - RNA, 19 nt, Artificial Sequence
  Description of Artificial Sequence: Synthetic oligonucleotide
auagaccaugcgucggucu

SEQ ID NO: 289144 - RNA, 19 nt, Artificial Sequence
  Description of Artificial Sequence: Synthetic oligonucleotide
ugcuuguccgcaugucagc

SEQ ID NO: 289145 - RNA, 19 nt, Artificial Sequence
  Description of Artificial Sequence: Synthetic oligonucleotide
cagggaauauacuuguucu

SEQ ID NO: 289146 - RNA, 19 nt, Artificial Sequence
  Description of Artificial Sequence: Synthetic oligonucleotide
cuguacuaucccucauggc

SEQ ID NO: 289147 - RNA, 19 nt, Artificial Sequence
  Description of Artificial Sequence: Synthetic oligonucleotide
gacuucugcacuauaaaau

SEQ ID NO: 289148 - RNA, 19 nt, Artificial Sequence
  Description of Artificial Sequence: Synthetic oligonucleotide
agggaauauacuuguucuu

SEQ ID NO: 289149 - RNA, 19 nt, Artificial Sequence
  Description of Artificial Sequence: Synthetic oligonucleotide
acgaaucacuuuuggcacu

SEQ ID NO: 289150 - RNA, 19 nt, Artificial Sequence
  Description of Artificial Sequence: Synthetic oligonucleotide
  modified_base (7)..(7): a, c, u, g, unknown or other
cagcagngaagagugagca

SEQ ID NO: 289151 - RNA, 19 nt, Artificial Sequence
  Description of Artificial Sequence: Synthetic oligonucleotide
guauugauugaucauuauu

SEQ ID NO: 289152 - RNA, 19 nt, Artificial Sequence
  Description of Artificial Sequence: Synthetic oligonucleotide
  modified_base (8)..(9): a, c, u, g, unknown or other
  modified_base (11)..(11): a, c, u, g, unknown or other
ugcuccunncncuccuccu

SEQ ID NO: 289153 - RNA, 19 nt, Artificial Sequence
  Description of Artificial Sequence: Synthetic oligonucleotide
guacuaucccucauggcuc

SEQ ID NO: 289154 - RNA, 19 nt, Artificial Sequence
  Description of Artificial Sequence: Synthetic oligonucleotide
cacuagaagcccuguuaac

SEQ ID NO: 289155 - RNA, 19 nt, Artificial Sequence
  Description of Artificial Sequence: Synthetic oligonucleotide
cacggcuucagaguagaug

SEQ ID NO: 289156 - RNA, 19 nt, Artificial Sequence
  Description of Artificial Sequence: Synthetic oligonucleotide
gaugcgcuguaaggaaaag

SEQ ID NO: 289157 - RNA, 19 nt, Artificial Sequence
  Description of Artificial Sequence: Synthetic oligonucleotide
gaucgcucgugucuccuuc

SEQ ID NO: 289158 - RNA, 19 nt, Artificial Sequence
  Description of Artificial Sequence: Synthetic oligonucleotide
uaucccucauggcucuuau

SEQ ID NO: 289159 - RNA, 19 nt, Artificial Sequence
  Description of Artificial Sequence: Synthetic oligonucleotide
uccaacuacaugguauauu

SEQ ID NO: 289160 - RNA, 19 nt, Artificial Sequence
  Description of Artificial Sequence: Synthetic oligonucleotide
uuuccuggguagugaauuu

SEQ ID NO: 289161 - RNA, 19 nt, Artificial Sequence
  Description of Artificial Sequence: Synthetic oligonucleotide
caugcgucggucuuuugaa

SEQ ID NO: 289162 - RNA, 19 nt, Artificial Sequence
  Description of Artificial Sequence: Synthetic oligonucleotide
  modified_base (7)..(8): a, c, u, g, unknown or other
  modified_base (10)..(10): a, c, u, g, unknown or other
gcuccunncncuccuccuc

SEQ ID NO: 289163 - RNA, 19 nt, Artificial Sequence
  Description of Artificial Sequence: Synthetic oligonucleotide
cuacucuacccaacucaac

SEQ ID NO: 289164 - RNA, 19 nt, Artificial Sequence
  Description of Artificial Sequence: Synthetic oligonucleotide
  modified_base (5)..(6): a, c, u, g, unknown or other
  modified_base (8)..(8): a, c, u, g, unknown or other
uccunncncuccuccuccu

SEQ ID NO: 289165 - RNA, 19 nt, Artificial Sequence
  Description of Artificial Sequence: Synthetic oligonucleotide
auacgcuguaaaggcgacg

SEQ ID NO: 289166 - RNA, 19 nt, Artificial Sequence
  Description of Artificial Sequence: Synthetic oligonucleotide
gugagguauccacauagcu

SEQ ID NO: 289167 - RNA, 19 nt, Artificial Sequence
  Description of Artificial Sequence: Synthetic oligonucleotide
acgcuguaaaggcgacgcg

SEQ ID NO: 289168 - RNA, 19 nt, Artificial Sequence
  Description of Artificial Sequence: Synthetic oligonucleotide
caaaugguagcagccccug

SEQ ID NO: 289169 - RNA, 19 nt, Artificial Sequence
  Description of Artificial Sequence: Synthetic oligonucleotide
cuccacccaacgugaacag

SEQ ID NO: 289170 - RNA, 19 nt, Artificial Sequence
  Description of Artificial Sequence: Synthetic oligonucleotide
ucccuaucuugaagucacc

SEQ ID NO: 289171 - RNA, 19 nt, Artificial Sequence
  Description of Artificial Sequence: Synthetic oligonucleotide
aauuaacgaugaagacacu

SEQ ID NO: 289172 - RNA, 19 nt, Artificial Sequence
  Description of Artificial Sequence: Synthetic oligonucleotide
aauuaagaguagggccaaa

SEQ ID NO: 289173 - RNA, 19 nt, Artificial Sequence
  Description of Artificial Sequence: Synthetic oligonucleotide
aagucaugagggacaaaua

SEQ ID NO: 289174 - RNA, 19 nt, Artificial Sequence
  Description of Artificial Sequence: Synthetic oligonucleotide
uacccaagucauacauuua

SEQ ID NO: 289175 - RNA, 19 nt, Artificial Sequence
  Description of Artificial Sequence: Synthetic oligonucleotide
gugacuagauuaguccaga

SEQ ID NO: 289176 - RNA, 19 nt, Artificial Sequence
  Description of Artificial Sequence: Synthetic oligonucleotide
ccgcaugucagcauagcug

SEQ ID NO: 289177 - RNA, 19 nt, Artificial Sequence
  Description of Artificial Sequence: Synthetic oligonucleotide
ugcgccuuucaggugcagc

SEQ ID NO: 289178 - RNA, 19 nt, Artificial Sequence
  Description of Artificial Sequence: Synthetic oligonucleotide
ucgcucgugucuccuucug

SEQ ID NO: 289179 - RNA, 19 nt, Artificial Sequence
  Description of Artificial Sequence: Synthetic oligonucleotide
auuauugacccaggugguu

SEQ ID NO: 289180 - RNA, 19 nt, Artificial Sequence
  Description of Artificial Sequence: Synthetic oligonucleotide
ccacccuguagccaagagg

SEQ ID NO: 289181 - RNA, 19 nt, Artificial Sequence
  Description of Artificial Sequence: Synthetic oligonucleotide
ggaacacggcuucagagua

SEQ ID NO: 289182 - RNA, 19 nt, Artificial Sequence
  Description of Artificial Sequence: Synthetic oligonucleotide
  modified_base (8)..(8): a, c, u, g, unknown or other
ccagcagngaagagugagc

SEQ ID NO: 289183 - RNA, 19 nt, Artificial Sequence
  Description of Artificial Sequence: Synthetic oligonucleotide
ggauguaccgcugaucaaa

SEQ ID NO: 289184 - RNA, 19 nt, Artificial Sequence
  Description of Artificial Sequence: Synthetic oligonucleotide
  modified_base (3)..(3): a, c, u, g, unknown or other
agngaagagugagcagccu

SEQ ID NO: 289185 - RNA, 19 nt, Artificial Sequence
  Description of Artificial Sequence: Synthetic oligonucleotide
cacuacagauggauaugca

SEQ ID NO: 289186 - RNA, 19 nt, Artificial Sequence
  Description of Artificial Sequence: Synthetic oligonucleotide
uucuuaggccaguggcaaa

SEQ ID NO: 289187 - RNA, 19 nt, Artificial Sequence
  Description of Artificial Sequence: Synthetic oligonucleotide
guagcaccgucaauagcac

SEQ ID NO: 289188 - RNA, 19 nt, Artificial Sequence
  Description of Artificial Sequence: Synthetic oligonucleotide
cuagcacuacagauggaua

SEQ ID NO: 289189 - RNA, 19 nt, Artificial Sequence
  Description of Artificial Sequence: Synthetic oligonucleotide
cauuauugacccagguggu

SEQ ID NO: 289190 - RNA, 19 nt, Artificial Sequence
  Description of Artificial Sequence: Synthetic oligonucleotide
cuugaguagaccaccuuuu

SEQ ID NO: 289191 - RNA, 19 nt, Artificial Sequence
  Description of Artificial Sequence: Synthetic oligonucleotide
caccacggcuaccuggcac

SEQ ID NO: 289192 - RNA, 19 nt, Artificial Sequence
  Description of Artificial Sequence: Synthetic oligonucleotide
cacaagcauaacacuguaa

SEQ ID NO: 289193 - RNA, 19 nt, Artificial Sequence
  Description of Artificial Sequence: Synthetic oligonucleotide
accuguuuuaaagguguuu

SEQ ID NO: 289194 - RNA, 19 nt, Artificial Sequence
  Description of Artificial Sequence: Synthetic oligonucleotide
uuccaacuacaugguauau

SEQ ID NO: 289195 - RNA, 19 nt, Artificial Sequence
  Description of Artificial Sequence: Synthetic oligonucleotide
ggugagguauccacauagc

SEQ ID NO: 289196 - RNA, 19 nt, Artificial Sequence
  Description of Artificial Sequence: Synthetic oligonucleotide
  modified_base (5)..(5): a, c, u, g, unknown or other
gguunugguugggacugag

SEQ ID NO: 289197 - RNA, 19 nt, Artificial Sequence
  Description of Artificial Sequence: Synthetic oligonucleotide
aggauguaccgcugaucaa

SEQ ID NO: 289198 - RNA, 19 nt, Artificial Sequence
  Description of Artificial Sequence: Synthetic oligonucleotide
  modified_base (14)..(15): a, c, u, g, unknown or other
  modified_base (17)..(17): a, c, u, g, unknown or other
cucccuugcuccunncncu

SEQ ID NO: 289199 - RNA, 19 nt, Artificial Sequence
  Description of Artificial Sequence: Synthetic oligonucleotide
cauagaccaugcgucgguc

SEQ ID NO: 289200 - RNA, 19 nt, Artificial Sequence
  Description of Artificial Sequence: Synthetic oligonucleotide
  modified_base (9)..(9): a, c, u, g, unknown or other
cccagcagngaagagugag

SEQ ID NO: 289201 - RNA, 19 nt, Artificial Sequence
  Description of Artificial Sequence: Synthetic oligonucleotide
gcaagucacaacuguacua

SEQ ID NO: 289202 - RNA, 19 nt, Artificial Sequence
  Description of Artificial Sequence: Synthetic oligonucleotide
caccgucaauagcaccacc

SEQ ID NO: 289203 - RNA, 19 nt, Artificial Sequence
  Description of Artificial Sequence: Synthetic oligonucleotide
gcuguaaggaaaaguuaca

SEQ ID NO: 289204 - RNA, 19 nt, Artificial Sequence
  Description of Artificial Sequence: Synthetic oligonucleotide
ggcgacgcgaauaaaccca

SEQ ID NO: 289205 - RNA, 19 nt, Artificial Sequence
  Description of Artificial Sequence: Synthetic oligonucleotide
gcucuaauugcaagucaug

SEQ ID NO: 289206 - RNA, 19 nt, Artificial Sequence
  Description of Artificial Sequence: Synthetic oligonucleotide
ggcgccaaugcuuguccgc

SEQ ID NO: 289207 - RNA, 19 nt, Artificial Sequence
  Description of Artificial Sequence: Synthetic oligonucleotide
ccgcugaucaaauaggacu

SEQ ID NO: 289208 - RNA, 19 nt, Artificial Sequence
  Description of Artificial Sequence: Synthetic oligonucleotide
ucguuuggcccacccugua

SEQ ID NO: 289209 - RNA, 19 nt, Artificial Sequence
  Description of Artificial Sequence: Synthetic oligonucleotide
cggguuggccugcaaaugg

SEQ ID NO: 289210 - RNA, 19 nt, Artificial Sequence
  Description of Artificial Sequence: Synthetic oligonucleotide
gagcaucgguauugauuga

SEQ ID NO: 289211 - RNA, 19 nt, Artificial Sequence
  Description of Artificial Sequence: Synthetic oligonucleotide
uauugucauugggguggug

SEQ ID NO: 289212 - RNA, 19 nt, Artificial Sequence
  Description of Artificial Sequence: Synthetic oligonucleotide
cauggagcaucgguauuga

SEQ ID NO: 289213 - RNA, 19 nt, Artificial Sequence
  Description of Artificial Sequence: Synthetic oligonucleotide
auguaccgcugaucaaaua

SEQ ID NO: 289214 - RNA, 19 nt, Artificial Sequence
  Description of Artificial Sequence: Synthetic oligonucleotide
gcgucggucuuuugaacac

SEQ ID NO: 289215 - RNA, 19 nt, Artificial Sequence
  Description of Artificial Sequence: Synthetic oligonucleotide
gauguaccgcugaucaaau

SEQ ID NO: 289216 - RNA, 19 nt, Artificial Sequence
  Description of Artificial Sequence: Synthetic oligonucleotide
  modified_base (6)..(6): a, c, u, g, unknown or other
ugguunugguugggacuga

SEQ ID NO: 289217 - RNA, 19 nt, Artificial Sequence
  Description of Artificial Sequence: Synthetic oligonucleotide
cugguacccauuacauaua

SEQ ID NO: 289218 - RNA, 19 nt, Artificial Sequence
  Description of Artificial Sequence: Synthetic oligonucleotide
caacgugaacaguuccaua

SEQ ID NO: 289219 - RNA, 19 nt, Artificial Sequence
  Description of Artificial Sequence: Synthetic oligonucleotide
auagcugacuggggccacu

SEQ ID NO: 289220 - RNA, 19 nt, Artificial Sequence
  Description of Artificial Sequence: Synthetic oligonucleotide
gguauccacauagcuuuga

SEQ ID NO: 289221 - RNA, 19 nt, Artificial Sequence
  Description of Artificial Sequence: Synthetic oligonucleotide
accuaucugcauggucaug

SEQ ID NO: 289222 - RNA, 19 nt, Artificial Sequence
  Description of Artificial Sequence: Synthetic oligonucleotide
gcuagcacuacagauggau

SEQ ID NO: 289223 - RNA, 19 nt, Artificial Sequence
  Description of Artificial Sequence: Synthetic oligonucleotide
cucggcgccaaugcuuguc

SEQ ID NO: 289224 - RNA, 19 nt, Artificial Sequence
  Description of Artificial Sequence: Synthetic oligonucleotide
cccaacgugaacaguucca

SEQ ID NO: 289225 - RNA, 19 nt, Artificial Sequence
  Description of Artificial Sequence: Synthetic oligonucleotide
cauucguuuggcccacccu

SEQ ID NO: 289226 - RNA, 19 nt, Artificial Sequence
  Description of Artificial Sequence: Synthetic oligonucleotide
gcaucgguauugauugauc

SEQ ID NO: 289227 - RNA, 19 nt, Artificial Sequence
  Description of Artificial Sequence: Synthetic oligonucleotide
gcugaucaaauaggacuuc

SEQ ID NO: 289228 - RNA, 19 nt, Artificial Sequence
  Description of Artificial Sequence: Synthetic oligonucleotide
  modified_base (12)..(13): a, c, u, g, unknown or other
  modified_base (15)..(15): a, c, u, g, unknown or other
cccuugcuccunncncucc

SEQ ID NO: 289229 - RNA, 19 nt, Artificial Sequence
  Description of Artificial Sequence: Synthetic oligonucleotide
accaugcgucggucuuuug

SEQ ID NO: 289230 - RNA, 19 nt, Artificial Sequence
  Description of Artificial Sequence: Synthetic oligonucleotide
ucucggcgccaaugcuugu

SEQ ID NO: 289231 - RNA, 19 nt, Artificial Sequence
  Description of Artificial Sequence: Synthetic oligonucleotide
acccuauguuaaauauuua

SEQ ID NO: 289232 - RNA, 19 nt, Artificial Sequence
  Description of Artificial Sequence: Synthetic oligonucleotide
agaccaugcgucggucuuu

SEQ ID NO: 289233 - RNA, 19 nt, Artificial Sequence
  Description of Artificial Sequence: Synthetic oligonucleotide
ugaccggguuggccugcaa

SEQ ID NO: 289234 - RNA, 19 nt, Artificial Sequence
  Description of Artificial Sequence: Synthetic oligonucleotide
ggccuacucuacccaacuc

SEQ ID NO: 289235 - RNA, 19 nt, Artificial Sequence
  Description of Artificial Sequence: Synthetic oligonucleotide
aucggcugagccacacuuu

SEQ ID NO: 289236 - RNA, 19 nt, Artificial Sequence
  Description of Artificial Sequence: Synthetic oligonucleotide
caguuccauaugaaauaau

SEQ ID NO: 289237 - RNA, 19 nt, Artificial Sequence
  Description of Artificial Sequence: Synthetic oligonucleotide
gccuuacccaagucauaca

SEQ ID NO: 289238 - RNA, 19 nt, Artificial Sequence
  Description of Artificial Sequence: Synthetic oligonucleotide
cgaaucacuuuuggcacuc

SEQ ID NO: 289239 - RNA, 19 nt, Artificial Sequence
  Description of Artificial Sequence: Synthetic oligonucleotide
augccuuacccaagucaua

SEQ ID NO: 289240 - RNA, 19 nt, Artificial Sequence
  Description of Artificial Sequence: Synthetic oligonucleotide
cgguauugauugaucauua

SEQ ID NO: 289241 - RNA, 19 nt, Artificial Sequence
  Description of Artificial Sequence: Synthetic oligonucleotide
cuuguccgcaugucagcau

SEQ ID NO: 289242 - RNA, 19 nt, Artificial Sequence
  Description of Artificial Sequence: Synthetic oligonucleotide
gccugguacccauuacaua

SEQ ID NO: 289243 - RNA, 19 nt, Artificial Sequence
  Description of Artificial Sequence: Synthetic oligonucleotide
cggucuuuugaacacagau

SEQ ID NO: 289244 - RNA, 19 nt, Artificial Sequence
  Description of Artificial Sequence: Synthetic oligonucleotide
auauugcauucaggaugua

SEQ ID NO: 289245 - RNA, 19 nt, Artificial Sequence
  Description of Artificial Sequence: Synthetic oligonucleotide
ccggguuggccugcaaaug

SEQ ID NO: 289246 - RNA, 19 nt, Artificial Sequence
  Description of Artificial Sequence: Synthetic oligonucleotide
cgcuguaaaggcgacgcga

SEQ ID NO: 289247 - RNA, 19 nt, Artificial Sequence
  Description of Artificial Sequence: Synthetic oligonucleotide
cgaggacaaccuaucugca

SEQ ID NO: 289248 - RNA, 19 nt, Artificial Sequence
  Description of Artificial Sequence: Synthetic oligonucleotide
ggccugguacccauuacau

SEQ ID NO: 289249 - RNA, 19 nt, Artificial Sequence
  Description of Artificial Sequence: Synthetic oligonucleotide
cacauggagcaucgguauu

SEQ ID NO: 289250 - RNA, 19 nt, Artificial Sequence
  Description of Artificial Sequence: Synthetic oligonucleotide
gagguucacucuggugaau

SEQ ID NO: 289251 - RNA, 19 nt, Artificial Sequence
  Description of Artificial Sequence: Synthetic oligonucleotide
acacggcuucagaguagau

SEQ ID NO: 289252 - RNA, 19 nt, Artificial Sequence
  Description of Artificial Sequence: Synthetic oligonucleotide
  modified_base (13)..(13): a, c, u, g, unknown or other
gccucccagcagngaagag

SEQ ID NO: 289253 - RNA, 19 nt, Artificial Sequence
  Description of Artificial Sequence: Synthetic oligonucleotide
cacggcuaccuggcacuga

SEQ ID NO: 289254 - RNA, 19 nt, Artificial Sequence
  Description of Artificial Sequence: Synthetic oligonucleotide
  modified_base (4)..(5): a, c, u, g, unknown or other
  modified_base (7)..(7): a, c, u, g, unknown or other
ccunncncuccuccuccuu

SEQ ID NO: 289255 - RNA, 19 nt, Artificial Sequence
  Description of Artificial Sequence: Synthetic oligonucleotide
ccaaggcagccagacguaa

SEQ ID NO: 289256 - RNA, 19 nt, Artificial Sequence
  Description of Artificial Sequence: Synthetic oligonucleotide
ccacggcuaccuggcacug

SEQ ID NO: 289257 - RNA, 19 nt, Artificial Sequence
  Description of Artificial Sequence: Synthetic oligonucleotide
gcgacgcgaauaaacccau

SEQ ID NO: 289258 - RNA, 19 nt, Artificial Sequence
  Description of Artificial Sequence: Synthetic oligonucleotide
cgucggucuuuugaacaca

SEQ ID NO: 289259 - RNA, 19 nt, Artificial Sequence
  Description of Artificial Sequence: Synthetic oligonucleotide
cgccaaugcuuguccgcau

SEQ ID NO: 289260 - RNA, 19 nt, Artificial Sequence
  Description of Artificial Sequence: Synthetic oligonucleotide
cgacgcgaauaaacccauu

SEQ ID NO: 289261 - RNA, 19 nt, Artificial Sequence
  Description of Artificial Sequence: Synthetic oligonucleotide
  modified_base (1)..(2): a, c, u, g, unknown or other
  modified_base (4)..(4): a, c, u, g, unknown or other
nncncuccuccuccuuccu

SEQ ID NO: 289262 - RNA, 19 nt, Artificial Sequence
  Description of Artificial Sequence: Synthetic oligonucleotide
uaaaauaacacguaggcag

SEQ ID NO: 289263 - RNA, 19 nt, Artificial Sequence
  Description of Artificial Sequence: Synthetic oligonucleotide
agaucauaaacauaaggcc

SEQ ID NO: 289264 - RNA, 19 nt, Artificial Sequence
  Description of Artificial Sequence: Synthetic oligonucleotide
gauacgaucacaaacagcc

SEQ ID NO: 289265 - RNA, 19 nt, Artificial Sequence
  Description of Artificial Sequence: Synthetic oligonucleotide
auuauauacaucugugacc

SEQ ID NO: 289266 - RNA, 19 nt, Artificial Sequence
  Description of Artificial Sequence: Synthetic oligonucleotide
aauuuuauggaaccgguga

SEQ ID NO: 289267 - RNA, 19 nt, Artificial Sequence
  Description of Artificial Sequence: Synthetic oligonucleotide
aaaagaagguaauuuccuc

SEQ ID NO: 289268 - RNA, 19 nt, Artificial Sequence
  Description of Artificial Sequence: Synthetic oligonucleotide
aguguugcagaccucauac

SEQ ID NO: 289269 - RNA, 19 nt, Artificial Sequence
  Description of Artificial Sequence: Synthetic oligonucleotide
ugagcugagaaacucauca

SEQ ID NO: 289270 - RNA, 19 nt, Artificial Sequence
  Description of Artificial Sequence: Synthetic oligonucleotide
gaaacuuuagcacauucug

SEQ ID NO: 289271 - RNA, 19 nt, Artificial Sequence
  Description of Artificial Sequence: Synthetic oligonucleotide
uagaauaaaggcuaacagc

SEQ ID NO: 289272 - RNA, 19 nt, Artificial Sequence
  Description of Artificial Sequence: Synthetic oligonucleotide
agaguuagauagcaaaacg

SEQ ID NO: 289273 - RNA, 19 nt, Artificial Sequence
  Description of Artificial Sequence: Synthetic oligonucleotide
aagagugauacauuccgag

SEQ ID NO: 289274 - RNA, 19 nt, Artificial Sequence
  Description of Artificial Sequence: Synthetic oligonucleotide
aauacaccuccacuuuugc

SEQ ID NO: 289275 - RNA, 19 nt, Artificial Sequence
  Description of Artificial Sequence: Synthetic oligonucleotide
gaauccacgagacacacug

SEQ ID NO: 289276 - RNA, 19 nt, Artificial Sequence
  Description of Artificial Sequence: Synthetic oligonucleotide
aaaauaacacguaggcagc

SEQ ID NO: 289277 - RNA, 19 nt, Artificial Sequence
  Description of Artificial Sequence: Synthetic oligonucleotide
agugaauugauaucagcag

SEQ ID NO: 289278 - RNA, 19 nt, Artificial Sequence
  Description of Artificial Sequence: Synthetic oligonucleotide
aagaccauaggucaaacuu

SEQ ID NO: 289279 - RNA, 19 nt, Artificial Sequence
  Description of Artificial Sequence: Synthetic oligonucleotide
auccgucuagaauaaaggc

SEQ ID NO: 289280 - RNA, 19 nt, Artificial Sequence
  Description of Artificial Sequence: Synthetic oligonucleotide
aaggcuaacagcuccugag

SEQ ID NO: 289281 - RNA, 19 nt, Artificial Sequence
  Description of Artificial Sequence: Synthetic oligonucleotide
uaucucaccacccaucuga

SEQ ID NO: 289282 - RNA, 19 nt, Artificial Sequence
  Description of Artificial Sequence: Synthetic oligonucleotide
gauaggucggcacuguggg

SEQ ID NO: 289283 - RNA, 19 nt, Artificial Sequence
  Description of Artificial Sequence: Synthetic oligonucleotide
uguaacaaaucccacccca

SEQ ID NO: 289284 - RNA, 19 nt, Artificial Sequence
  Description of Artificial Sequence: Synthetic oligonucleotide
aauccgucuagaauaaagg

SEQ ID NO: 289285 - RNA, 19 nt, Artificial Sequence
  Description of Artificial Sequence: Synthetic oligonucleotide
auagugauuggacacagca

SEQ ID NO: 289286 - RNA, 19 nt, Artificial Sequence
  Description of Artificial Sequence: Synthetic oligonucleotide
agcaaaacgggucaaaagu

SEQ ID NO: 289287 - RNA, 19 nt, Artificial Sequence
  Description of Artificial Sequence: Synthetic oligonucleotide
gagugauacauuccgagcc

SEQ ID NO: 289288 - RNA, 19 nt, Artificial Sequence
  Description of Artificial Sequence: Synthetic oligonucleotide
acgcugauaaaauaacacg

SEQ ID NO: 289289 - RNA, 19 nt, Artificial Sequence
  Description of Artificial Sequence: Synthetic oligonucleotide
agagugauacauuccgagc

SEQ ID NO: 289290 - RNA, 19 nt, Artificial Sequence
  Description of Artificial Sequence: Synthetic oligonucleotide
uauauagcggcugauacga

SEQ ID NO: 289291 - RNA, 19 nt, Artificial Sequence
  Description of Artificial Sequence: Synthetic oligonucleotide
uuucgucacuaucugaucc

SEQ ID NO: 289292 - RNA, 19 nt, Artificial Sequence
  Description of Artificial Sequence: Synthetic oligonucleotide
aguuagauagcaaaacggg

SEQ ID NO: 289293 - RNA, 19 nt, Artificial Sequence
  Description of Artificial Sequence: Synthetic oligonucleotide
agaaucauuccucagccug

SEQ ID NO: 289294 - RNA, 19 nt, Artificial Sequence
  Description of Artificial Sequence: Synthetic oligonucleotide
ucuagaauaaaggcuaaca

SEQ ID NO: 289295 - RNA, 19 nt, Artificial Sequence
  Description of Artificial Sequence: Synthetic oligonucleotide
cugauaaaauaacacguag

SEQ ID NO: 289296 - RNA, 19 nt, Artificial Sequence
  Description of Artificial Sequence: Synthetic oligonucleotide
aguuuaucucuccaguauc

SEQ ID NO: 289297 - RNA, 19 nt, Artificial Sequence
  Description of Artificial Sequence: Synthetic oligonucleotide
ugauuauauacaucuguga

SEQ ID NO: 289298 - RNA, 19 nt, Artificial Sequence
  Description of Artificial Sequence: Synthetic oligonucleotide
guaguuucccaucaguugc

SEQ ID NO: 289299 - RNA, 19 nt, Artificial Sequence
  Description of Artificial Sequence: Synthetic oligonucleotide
ucgaaaguagacuggaaga

SEQ ID NO: 289300 - RNA, 19 nt, Artificial Sequence
  Description of Artificial Sequence: Synthetic oligonucleotide
ugagaaacucaucaggcaa

SEQ ID NO: 289301 - RNA, 19 nt, Artificial Sequence
  Description of Artificial Sequence: Synthetic oligonucleotide
cauaggucaaacuucuuug

SEQ ID NO: 289302 - RNA, 19 nt, Artificial Sequence
  Description of Artificial Sequence: Synthetic oligonucleotide
acauguucagaccucugac

SEQ ID NO: 289303 - RNA, 19 nt, Artificial Sequence
  Description of Artificial Sequence: Synthetic oligonucleotide
uuuaucucaccacccaucu

SEQ ID NO: 289304 - RNA, 19 nt, Artificial Sequence
  Description of Artificial Sequence: Synthetic oligonucleotide
uacgaucacaaacagccug

SEQ ID NO: 289305 - RNA, 19 nt, Artificial Sequence
  Description of Artificial Sequence: Synthetic oligonucleotide
cauaaggccuugcugaccg

SEQ ID NO: 289306 - RNA, 19 nt, Artificial Sequence
  Description of Artificial Sequence: Synthetic oligonucleotide
uauagcaccgccccagaag

SEQ ID NO: 289307 - RNA, 19 nt, Artificial Sequence
  Description of Artificial Sequence: Synthetic oligonucleotide
uagauagcaaaacggguca

SEQ ID NO: 289308 - RNA, 19 nt, Artificial Sequence
  Description of Artificial Sequence: Synthetic oligonucleotide
gauaugagcugucuucgag

SEQ ID NO: 289309 - RNA, 19 nt, Artificial Sequence
  Description of Artificial Sequence: Synthetic oligonucleotide
uccgucuagaauaaaggcu

SEQ ID NO: 289310 - RNA, 19 nt, Artificial Sequence
  Description of Artificial Sequence: Synthetic oligonucleotide
gaagcguuugagaugaacc

SEQ ID NO: 289311 - RNA, 19 nt, Artificial Sequence
  Description of Artificial Sequence: Synthetic oligonucleotide
uaucugauccucagaagcc

SEQ ID NO: 289312 - RNA, 19 nt, Artificial Sequence
  Description of Artificial Sequence: Synthetic oligonucleotide
uuaacauaaccuucugaga

SEQ ID NO: 289313 - RNA, 19 nt, Artificial Sequence
  Description of Artificial Sequence: Synthetic oligonucleotide
aagcguuugagaugaacca

SEQ ID NO: 289314 - RNA, 19 nt, Artificial Sequence
  Description of Artificial Sequence: Synthetic oligonucleotide
agugauacauuccgagccg

SEQ ID NO: 289315 - RNA, 19 nt, Artificial Sequence
  Description of Artificial Sequence: Synthetic oligonucleotide
auaggaguugacaagacug

SEQ ID NO: 289316 - RNA, 19 nt, Artificial Sequence
  Description of Artificial Sequence: Synthetic oligonucleotide
aguugggaccaacacauag

SEQ ID NO: 289317 - RNA, 19 nt, Artificial Sequence
  Description of Artificial Sequence: Synthetic oligonucleotide
aaaacgggucaaaagucac

SEQ ID NO: 289318 - RNA, 19 nt, Artificial Sequence
  Description of Artificial Sequence: Synthetic oligonucleotide
uauaggagaagcguuugag

SEQ ID NO: 289319 - RNA, 19 nt, Artificial Sequence
  Description of Artificial Sequence: Synthetic oligonucleotide
aguaauaccauuucccauu

SEQ ID NO: 289320 - RNA, 19 nt, Artificial Sequence
  Description of Artificial Sequence: Synthetic oligonucleotide
ucuguuauaggagaagcgu

SEQ ID NO: 289321 - RNA, 19 nt, Artificial Sequence
  Description of Artificial Sequence: Synthetic oligonucleotide
ucagcagugccauaggagu

SEQ ID NO: 289322 - RNA, 19 nt, Artificial Sequence
  Description of Artificial Sequence: Synthetic oligonucleotide
uucgagagggccaaagaca

SEQ ID NO: 289323 - RNA, 19 nt, Artificial Sequence
  Description of Artificial Sequence: Synthetic oligonucleotide
ucucgaggcauaauguggc

SEQ ID NO: 289324 - RNA, 19 nt, Artificial Sequence
  Description of Artificial Sequence: Synthetic oligonucleotide
caauccgucuagaauaaag

SEQ ID NO: 289325 - RNA, 19 nt, Artificial Sequence
  Description of Artificial Sequence: Synthetic oligonucleotide
uuuacuguggccagacgac

SEQ ID NO: 289326 - RNA, 19 nt, Artificial Sequence
  Description of Artificial Sequence: Synthetic oligonucleotide
uaauacaccuccacuuuug

SEQ ID NO: 289327 - RNA, 19 nt, Artificial Sequence
  Description of Artificial Sequence: Synthetic oligonucleotide
acaauuuagcaagugcuuc

SEQ ID NO: 289328 - RNA, 19 nt, Artificial Sequence
  Description of Artificial Sequence: Synthetic oligonucleotide
acucgauccuucuucaaag

SEQ ID NO: 289329 - RNA, 19 nt, Artificial Sequence
  Description of Artificial Sequence: Synthetic oligonucleotide
cauaacucgauccuucuuc

SEQ ID NO: 289330 - RNA, 19 nt, Artificial Sequence
  Description of Artificial Sequence: Synthetic oligonucleotide
cacggcacuggauaggucg

SEQ ID NO: 289331 - RNA, 19 nt, Artificial Sequence
  Description of Artificial Sequence: Synthetic oligonucleotide
aguccagacuaacaaauca

SEQ ID NO: 289332 - RNA, 19 nt, Artificial Sequence
  Description of Artificial Sequence: Synthetic oligonucleotide
ucaguugcaagugaauuga

SEQ ID NO: 289333 - RNA, 19 nt, Artificial Sequence
  Description of Artificial Sequence: Synthetic oligonucleotide
agaugaaccaccaggaucu

SEQ ID NO: 289334 - RNA, 19 nt, Artificial Sequence
  Description of Artificial Sequence: Synthetic oligonucleotide
auggaaguguugcagaccu

SEQ ID NO: 289335 - RNA, 19 nt, Artificial Sequence
  Description of Artificial Sequence: Synthetic oligonucleotide
cagacaauuuagcaagugc

SEQ ID NO: 289336 - RNA, 19 nt, Artificial Sequence
  Description of Artificial Sequence: Synthetic oligonucleotide
acagccauaccaauuuagc

SEQ ID NO: 289337 - RNA, 19 nt, Artificial Sequence
  Description of Artificial Sequence: Synthetic oligonucleotide
ugauacgaucacaaacagc

SEQ ID NO: 289338 - RNA, 19 nt, Artificial Sequence
  Description of Artificial Sequence: Synthetic oligonucleotide
gagaugaaccaccaggauc

SEQ ID NO: 289339 - RNA, 19 nt, Artificial Sequence
  Description of Artificial Sequence: Synthetic oligonucleotide
ucgagagggccaaagacac

SEQ ID NO: 289340 - RNA, 19 nt, Artificial Sequence
  Description of Artificial Sequence: Synthetic oligonucleotide
gacgcugauaaaauaacac

SEQ ID NO: 289341 - RNA, 19 nt, Artificial Sequence
  Description of Artificial Sequence: Synthetic oligonucleotide
ucgaggugccacuugauga

SEQ ID NO: 289342 - RNA, 19 nt, Artificial Sequence
  Description of Artificial Sequence: Synthetic oligonucleotide
agccauaccaauuuagcaa

SEQ ID NO: 289343 - RNA, 19 nt, Artificial Sequence
  Description of Artificial Sequence: Synthetic oligonucleotide
gucaaguuuaucucuccag

SEQ ID NO: 289344 - RNA, 19 nt, Artificial Sequence
  Description of Artificial Sequence: Synthetic oligonucleotide
uuagcaagugcuucacaca

SEQ ID NO: 289345 - RNA, 19 nt, Artificial Sequence
  Description of Artificial Sequence: Synthetic oligonucleotide
guugucucgguugaucucg

SEQ ID NO: 289346 - RNA, 19 nt, Artificial Sequence
  Description of Artificial Sequence: Synthetic oligonucleotide
uguucagaccucugacugg

SEQ ID NO: 289347 - RNA, 19 nt, Artificial Sequence
  Description of Artificial Sequence: Synthetic oligonucleotide
caucaguugguguccaugc

SEQ ID NO: 289348 - RNA, 19 nt, Artificial Sequence
  Description of Artificial Sequence: Synthetic oligonucleotide
gguucuuagauugauauga

SEQ ID NO: 289349 - RNA, 19 nt, Artificial Sequence
  Description of Artificial Sequence: Synthetic oligonucleotide
cauuacaggccccagguuc

SEQ ID NO: 289350 - RNA, 19 nt, Artificial Sequence
  Description of Artificial Sequence: Synthetic oligonucleotide
aacucgauccuucuucaaa

SEQ ID NO: 289351 - RNA, 19 nt, Artificial Sequence
  Description of Artificial Sequence: Synthetic oligonucleotide
aaacgagaaguggcugucc

SEQ ID NO: 289352 - RNA, 19 nt, Artificial Sequence
  Description of Artificial Sequence: Synthetic oligonucleotide
cuugcugaucauaguaaag

SEQ ID NO: 289353 - RNA, 19 nt, Artificial Sequence
  Description of Artificial Sequence: Synthetic oligonucleotide
ugaccggucacagacaaac

SEQ ID NO: 289354 - RNA, 19 nt, Artificial Sequence
  Description of Artificial Sequence: Synthetic oligonucleotide
ucgaggguuagcuugugcu

SEQ ID NO: 289355 - RNA, 19 nt, Artificial Sequence
  Description of Artificial Sequence: Synthetic oligonucleotide
aacgagaaguggcugucca

SEQ ID NO: 289356 - RNA, 19 nt, Artificial Sequence
  Description of Artificial Sequence: Synthetic oligonucleotide
auuacaggccccagguucc

SEQ ID NO: 289357 - RNA, 19 nt, Artificial Sequence
  Description of Artificial Sequence: Synthetic oligonucleotide
aggguguuccucuccauuc

SEQ ID NO: 289358 - RNA, 19 nt, Artificial Sequence
  Description of Artificial Sequence: Synthetic oligonucleotide
gaauugauaucagcagugc

SEQ ID NO: 289359 - RNA, 19 nt, Artificial Sequence
  Description of Artificial Sequence: Synthetic oligonucleotide
cugagucagcaucaguugg

SEQ ID NO: 289360 - RNA, 19 nt, Artificial Sequence
  Description of Artificial Sequence: Synthetic oligonucleotide
aguggcuguccauauagca

SEQ ID NO: 289361 - RNA, 19 nt, Artificial Sequence
  Description of Artificial Sequence: Synthetic oligonucleotide
uuauaggagaagcguuuga

SEQ ID NO: 289362 - RNA, 19 nt, Artificial Sequence
  Description of Artificial Sequence: Synthetic oligonucleotide
cagcaaugagaucauaaac

SEQ ID NO: 289363 - RNA, 19 nt, Artificial Sequence
  Description of Artificial Sequence: Synthetic oligonucleotide
uggccagacgacuagggug

SEQ ID NO: 289364 - RNA, 19 nt, Artificial Sequence
  Description of Artificial Sequence: Synthetic oligonucleotide
uugcuaaaauggcaacuca

SEQ ID NO: 289365 - RNA, 19 nt, Artificial Sequence
  Description of Artificial Sequence: Synthetic oligonucleotide
cuucgagagggccaaagac

SEQ ID NO: 289366 - RNA, 19 nt, Artificial Sequence
  Description of Artificial Sequence: Synthetic oligonucleotide
gaucauaaacauaaggccu

SEQ ID NO: 289367 - RNA, 19 nt, Artificial Sequence
  Description of Artificial Sequence: Synthetic oligonucleotide
auaacucgauccuucuuca

SEQ ID NO: 289368 - RNA, 19 nt, Artificial Sequence
  Description of Artificial Sequence: Synthetic oligonucleotide
uuuguugccuguuggugcu

SEQ ID NO: 289369 - RNA, 19 nt, Artificial Sequence
  Description of Artificial Sequence: Synthetic oligonucleotide
auuuuauggaaccggugau

SEQ ID NO: 289370 - RNA, 19 nt, Artificial Sequence
  Description of Artificial Sequence: Synthetic oligonucleotide
uaguaaaggcuucgggucu

SEQ ID NO: 289371 - RNA, 19 nt, Artificial Sequence
  Description of Artificial Sequence: Synthetic oligonucleotide
agagauacauugcugucau

SEQ ID NO: 289372 - RNA, 19 nt, Artificial Sequence
  Description of Artificial Sequence: Synthetic oligonucleotide
guugcaagugaauugauau

SEQ ID NO: 289373 - RNA, 19 nt, Artificial Sequence
  Description of Artificial Sequence: Synthetic oligonucleotide
uuuauggaaccggugauua

SEQ ID NO: 289374 - RNA, 19 nt, Artificial Sequence
  Description of Artificial Sequence: Synthetic oligonucleotide
agaccauaggucaaacuuc

SEQ ID NO: 289375 - RNA, 19 nt, Artificial Sequence
  Description of Artificial Sequence: Synthetic oligonucleotide
ucaauggccaguguggauc

SEQ ID NO: 289376 - RNA, 19 nt, Artificial Sequence
  Description of Artificial Sequence: Synthetic oligonucleotide
ugagucagcaucaguuggu

SEQ ID NO: 289377 - RNA, 19 nt, Artificial Sequence
  Description of Artificial Sequence: Synthetic oligonucleotide
aguaauacaccuccacuuu

SEQ ID NO: 289378 - RNA, 19 nt, Artificial Sequence
  Description of Artificial Sequence: Synthetic oligonucleotide
uuaaaccuucauccauuug

SEQ ID NO: 289379 - RNA, 19 nt, Artificial Sequence
  Description of Artificial Sequence: Synthetic oligonucleotide
aaccggugauuauauacau

SEQ ID NO: 289380 - RNA, 19 nt, Artificial Sequence
  Description of Artificial Sequence: Synthetic oligonucleotide
gggaccaacacauagucca

SEQ ID NO: 289381 - RNA, 19 nt, Artificial Sequence
  Description of Artificial Sequence: Synthetic oligonucleotide
aucucgaggcauaaugugg

SEQ ID NO: 289382 - RNA, 19 nt, Artificial Sequence
  Description of Artificial Sequence: Synthetic oligonucleotide
agcguuugagaugaaccac

SEQ ID NO: 289383 - RNA, 19 nt, Artificial Sequence
  Description of Artificial Sequence: Synthetic oligonucleotide
agaagcguuugagaugaac

SEQ ID NO: 289384 - RNA, 19 nt, Artificial Sequence
  Description of Artificial Sequence: Synthetic oligonucleotide
guuagcuugugcuuaggga

SEQ ID NO: 289385 - RNA, 19 nt, Artificial Sequence
  Description of Artificial Sequence: Synthetic oligonucleotide
cugauacgaucacaaacag

SEQ ID NO: 289386 - RNA, 19 nt, Artificial Sequence
  Description of Artificial Sequence: Synthetic oligonucleotide
aaacgucccacuuggguuu

SEQ ID NO: 289387 - RNA, 19 nt, Artificial Sequence
  Description of Artificial Sequence: Synthetic oligonucleotide
gacuagggugaccaguaug

SEQ ID NO: 289388 - RNA, 19 nt, Artificial Sequence
  Description of Artificial Sequence: Synthetic oligonucleotide
cauuccgagccguccaugg

SEQ ID NO: 289389 - RNA, 19 nt, Artificial Sequence
  Description of Artificial Sequence: Synthetic oligonucleotide
aggcuugguuuacuguggc

SEQ ID NO: 289390 - RNA, 19 nt, Artificial Sequence
  Description of Artificial Sequence: Synthetic oligonucleotide
ggcgaaacgucccacuugg

SEQ ID NO: 289391 - RNA, 19 nt, Artificial Sequence
  Description of Artificial Sequence: Synthetic oligonucleotide
uguggaucgagaguugagu

SEQ ID NO: 289392 - RNA, 19 nt, Artificial Sequence
  Description of Artificial Sequence: Synthetic oligonucleotide
gaaggugaaaagccuccug

SEQ ID NO: 289393 - RNA, 19 nt, Artificial Sequence
  Description of Artificial Sequence: Synthetic oligonucleotide
aucuguuauaggagaagcg

SEQ ID NO: 289394 - RNA, 19 nt, Artificial Sequence
  Description of Artificial Sequence: Synthetic oligonucleotide
uagggugaccaguaugggc

SEQ ID NO: 289395 - RNA, 19 nt, Artificial Sequence
  Description of Artificial Sequence: Synthetic oligonucleotide
uauagcggcugauacgauc

SEQ ID NO: 289396 - RNA, 19 nt, Artificial Sequence
  Description of Artificial Sequence: Synthetic oligonucleotide
acugaggggcgaaacgucc

SEQ ID NO: 289397 - RNA, 19 nt, Artificial Sequence
  Description of Artificial Sequence: Synthetic oligonucleotide
agaaacuuuagcacauucu

SEQ ID NO: 289398 - RNA, 19 nt, Artificial Sequence
  Description of Artificial Sequence: Synthetic oligonucleotide
aaauaacacguaggcagcu

SEQ ID NO: 289399 - RNA, 19 nt, Artificial Sequence
  Description of Artificial Sequence: Synthetic oligonucleotide
cagguuuaucucaccaccc

SEQ ID NO: 289400 - RNA, 19 nt, Artificial Sequence
  Description of Artificial Sequence: Synthetic oligonucleotide
caucucgaggcauaaugug

SEQ ID NO: 289401 - RNA, 19 nt, Artificial Sequence
  Description of Artificial Sequence: Synthetic oligonucleotide
caaaacgggucaaaaguca

SEQ ID NO: 289402 - RNA, 19 nt, Artificial Sequence
  Description of Artificial Sequence: Synthetic oligonucleotide
cucgauccuucuucaaagg

SEQ ID NO: 289403 - RNA, 19 nt, Artificial Sequence
  Description of Artificial Sequence: Synthetic oligonucleotide
caguguagugaccaacccc

SEQ ID NO: 289404 - RNA, 19 nt, Artificial Sequence
  Description of Artificial Sequence: Synthetic oligonucleotide
ugguucuuagauugauaug

SEQ ID NO: 289405 - RNA, 19 nt, Artificial Sequence
  Description of Artificial Sequence: Synthetic oligonucleotide
gcuccaguaauacaccucc

SEQ ID NO: 289406 - RNA, 19 nt, Artificial Sequence
  Description of Artificial Sequence: Synthetic oligonucleotide
gugcaauccgucuagaaua

SEQ ID NO: 289407 - RNA, 19 nt, Artificial Sequence
  Description of Artificial Sequence: Synthetic oligonucleotide
ucgagaguugaguuugagu

SEQ ID NO: 289408 - RNA, 19 nt, Artificial Sequence
  Description of Artificial Sequence: Synthetic oligonucleotide
gacauucaucaucccgacg

SEQ ID NO: 289409 - RNA, 19 nt, Artificial Sequence
  Description of Artificial Sequence: Synthetic oligonucleotide
uauggaaccggugauuaua

SEQ ID NO: 289410 - RNA, 19 nt, Artificial Sequence
  Description of Artificial Sequence: Synthetic oligonucleotide
acguaggcagcuuucguca

SEQ ID NO: 289411 - RNA, 19 nt, Artificial Sequence
  Description of Artificial Sequence: Synthetic oligonucleotide
cauaguaaaggcuucgggu

SEQ ID NO: 289412 - RNA, 19 nt, Artificial Sequence
  Description of Artificial Sequence: Synthetic oligonucleotide
ucuucgugcaauccgucua

SEQ ID NO: 289413 - RNA, 19 nt, Artificial Sequence
  Description of Artificial Sequence: Synthetic oligonucleotide
cuaccaccgcaucuggucg

SEQ ID NO: 289414 - RNA, 19 nt, Artificial Sequence
  Description of Artificial Sequence: Synthetic oligonucleotide
ucauggcugcaccauacuc

SEQ ID NO: 289415 - RNA, 19 nt, Artificial Sequence
  Description of Artificial Sequence: Synthetic oligonucleotide
ugcaauccgucuagaauaa

SEQ ID NO: 289416 - RNA, 19 nt, Artificial Sequence
  Description of Artificial Sequence: Synthetic oligonucleotide
aggugaaaagccuccugug

SEQ ID NO: 289417 - RNA, 19 nt, Artificial Sequence
  Description of Artificial Sequence: Synthetic oligonucleotide
gaaccggugauuauauaca

SEQ ID NO: 289418 - RNA, 19 nt, Artificial Sequence
  Description of Artificial Sequence: Synthetic oligonucleotide
gguuugacauucgaggugc

SEQ ID NO: 289419 - RNA, 19 nt, Artificial Sequence
  Description of Artificial Sequence: Synthetic oligonucleotide
aacugaggggcgaaacguc

SEQ ID NO: 289420 - RNA, 19 nt, Artificial Sequence
  Description of Artificial Sequence: Synthetic oligonucleotide
gguuagcuugugcuuaggg

SEQ ID NO: 289421 - RNA, 19 nt, Artificial Sequence
  Description of Artificial Sequence: Synthetic oligonucleotide
ugacauucaucaucccgac

SEQ ID NO: 289422 - RNA, 19 nt, Artificial Sequence
  Description of Artificial Sequence: Synthetic oligonucleotide
gugcuuagggacagaaacg

SEQ ID NO: 289423 - RNA, 19 nt, Artificial Sequence
  Description of Artificial Sequence: Synthetic oligonucleotide
auacauuccgagccgucca

SEQ ID NO: 289424 - RNA, 19 nt, Artificial Sequence
  Description of Artificial Sequence: Synthetic oligonucleotide
uagauugauaugagcuguc

SEQ ID NO: 289425 - RNA, 19 nt, Artificial Sequence
  Description of Artificial Sequence: Synthetic oligonucleotide
cuucgugcaauccgucuag

SEQ ID NO: 289426 - RNA, 19 nt, Artificial Sequence
  Description of Artificial Sequence: Synthetic oligonucleotide
uccgagccguccauggaag

SEQ ID NO: 289427 - RNA, 19 nt, Artificial Sequence
  Description of Artificial Sequence: Synthetic oligonucleotide
uugugggugggcucacuag

SEQ ID NO: 289428 - RNA, 19 nt, Artificial Sequence
  Description of Artificial Sequence: Synthetic oligonucleotide
uggcuuaaaccuucaucca

SEQ ID NO: 289429 - RNA, 19 nt, Artificial Sequence
  Description of Artificial Sequence: Synthetic oligonucleotide
ucugguucuuagauugaua

SEQ ID NO: 289430 - RNA, 19 nt, Artificial Sequence
  Description of Artificial Sequence: Synthetic oligonucleotide
ugauaugagcugucuucga

SEQ ID NO: 289431 - RNA, 19 nt, Artificial Sequence
  Description of Artificial Sequence: Synthetic oligonucleotide
auagcggcugauacgauca

SEQ ID NO: 289432 - RNA, 19 nt, Artificial Sequence
  Description of Artificial Sequence: Synthetic oligonucleotide
uuaucucaccacccaucug

SEQ ID NO: 289433 - RNA, 19 nt, Artificial Sequence
  Description of Artificial Sequence: Synthetic oligonucleotide
gcugauacgaucacaaaca

SEQ ID NO: 289434 - RNA, 19 nt, Artificial Sequence
  Description of Artificial Sequence: Synthetic oligonucleotide
auugguggggucacuguuc

SEQ ID NO: 289435 - RNA, 19 nt, Artificial Sequence
  Description of Artificial Sequence: Synthetic oligonucleotide
ggugauuauauacaucugu

SEQ ID NO: 289436 - RNA, 19 nt, Artificial Sequence
  Description of Artificial Sequence: Synthetic oligonucleotide
gauacaaagccucgagggu

SEQ ID NO: 289437 - RNA, 19 nt, Artificial Sequence
  Description of Artificial Sequence: Synthetic oligonucleotide
aaguguugcagaccucaua

SEQ ID NO: 289438 - RNA, 19 nt, Artificial Sequence
  Description of Artificial Sequence: Synthetic oligonucleotide
gugaauugauaucagcagu

SEQ ID NO: 289439 - RNA, 19 nt, Artificial Sequence
  Description of Artificial Sequence: Synthetic oligonucleotide
cacguaggcagcuuucguc

SEQ ID NO: 289440 - RNA, 19 nt, Artificial Sequence
  Description of Artificial Sequence: Synthetic oligonucleotide
uaacacguaggcagcuuuc

SEQ ID NO: 289441 - RNA, 19 nt, Artificial Sequence
  Description of Artificial Sequence: Synthetic oligonucleotide
ggaucgagaguugaguuug

SEQ ID NO: 289442 - RNA, 19 nt, Artificial Sequence
  Description of Artificial Sequence: Synthetic oligonucleotide
cauagugauuggacacagc

SEQ ID NO: 289443 - RNA, 19 nt, Artificial Sequence
  Description of Artificial Sequence: Synthetic oligonucleotide
cacgagacacacugcacug

SEQ ID NO: 289444 - RNA, 19 nt, Artificial Sequence
  Description of Artificial Sequence: Synthetic oligonucleotide
ccaguaucuguuauaggag

SEQ ID NO: 289445 - RNA, 19 nt, Artificial Sequence
  Description of Artificial Sequence: Synthetic oligonucleotide
aucauaaacauaaggccuu

SEQ ID NO: 289446 - RNA, 19 nt, Artificial Sequence
  Description of Artificial Sequence: Synthetic oligonucleotide
uaaaggcuaacagcuccug

SEQ ID NO: 289447 - RNA, 19 nt, Artificial Sequence
  Description of Artificial Sequence: Synthetic oligonucleotide
cuuucgucacuaucugauc

SEQ ID NO: 289448 - RNA, 19 nt, Artificial Sequence
  Description of Artificial Sequence: Synthetic oligonucleotide
agauugauaugagcugucu

SEQ ID NO: 289449 - RNA, 19 nt, Artificial Sequence
  Description of Artificial Sequence: Synthetic oligonucleotide
ggacagaaacgagaagugg

SEQ ID NO: 289450 - RNA, 19 nt, Artificial Sequence
  Description of Artificial Sequence: Synthetic oligonucleotide
cagccauaccaauuuagca

SEQ ID NO: 289451 - RNA, 19 nt, Artificial Sequence
  Description of Artificial Sequence: Synthetic oligonucleotide
ugccacuugaugagcucug

SEQ ID NO: 289452 - RNA, 19 nt, Artificial Sequence
  Description of Artificial Sequence: Synthetic oligonucleotide
gaaacgagaaguggcuguc

SEQ ID NO: 289453 - RNA, 19 nt, Artificial Sequence
  Description of Artificial Sequence: Synthetic oligonucleotide
aaguagacuggaagaguga

SEQ ID NO: 289454 - RNA, 19 nt, Artificial Sequence
  Description of Artificial Sequence: Synthetic oligonucleotide
ucucgaaaguagacuggaa

SEQ ID NO: 289455 - RNA, 19 nt, Artificial Sequence
  Description of Artificial Sequence: Synthetic oligonucleotide
ugaggggcgaaacguccca

SEQ ID NO: 289456 - RNA, 19 nt, Artificial Sequence
  Description of Artificial Sequence: Synthetic oligonucleotide
uggaucgagaguugaguuu

SEQ ID NO: 289457 - RNA, 19 nt, Artificial Sequence
  Description of Artificial Sequence: Synthetic oligonucleotide
accgcaucuggucgcccgc

SEQ ID NO: 289458 - RNA, 19 nt, Artificial Sequence
  Description of Artificial Sequence: Synthetic oligonucleotide
guuuaucucaccacccauc

SEQ ID NO: 289459 - RNA, 19 nt, Artificial Sequence
  Description of Artificial Sequence: Synthetic oligonucleotide
accaguaugggcaccagaa

SEQ ID NO: 289460 - RNA, 19 nt, Artificial Sequence
  Description of Artificial Sequence: Synthetic oligonucleotide
ugauacauuccgagccguc

SEQ ID NO: 289461 - RNA, 19 nt, Artificial Sequence
  Description of Artificial Sequence: Synthetic oligonucleotide
ugggugggcucacuagggc

SEQ ID NO: 289462 - RNA, 19 nt, Artificial Sequence
  Description of Artificial Sequence: Synthetic oligonucleotide
gaaacgucccacuuggguu

SEQ ID NO: 289463 - RNA, 19 nt, Artificial Sequence
  Description of Artificial Sequence: Synthetic oligonucleotide
auacaaagccucgaggguu

SEQ ID NO: 289464 - RNA, 19 nt, Artificial Sequence
  Description of Artificial Sequence: Synthetic oligonucleotide
uugaucucguggugucugc

SEQ ID NO: 289465 - RNA, 19 nt, Artificial Sequence
  Description of Artificial Sequence: Synthetic oligonucleotide
aauaacacguaggcagcuu

SEQ ID NO: 289466 - RNA, 19 nt, Artificial Sequence
  Description of Artificial Sequence: Synthetic oligonucleotide
ggacuucuucucucgaaag

SEQ ID NO: 289467 - RNA, 19 nt, Artificial Sequence
  Description of Artificial Sequence: Synthetic oligonucleotide
uguuguugguagccagaaa

SEQ ID NO: 289468 - RNA, 19 nt, Artificial Sequence
  Description of Artificial Sequence: Synthetic oligonucleotide
acuggauaggucggcacug

SEQ ID NO: 289469 - RNA, 19 nt, Artificial Sequence
  Description of Artificial Sequence: Synthetic oligonucleotide
guaacaaaucccaccccac

SEQ ID NO: 289470 - RNA, 19 nt, Artificial Sequence
  Description of Artificial Sequence: Synthetic oligonucleotide
ggauaggucggcacugugg

SEQ ID NO: 289471 - RNA, 19 nt, Artificial Sequence
  Description of Artificial Sequence: Synthetic oligonucleotide
aucaguugguguccaugcu

SEQ ID NO: 289472 - RNA, 19 nt, Artificial Sequence
  Description of Artificial Sequence: Synthetic oligonucleotide
ugguuuacuguggccagac

SEQ ID NO: 289473 - RNA, 19 nt, Artificial Sequence
  Description of Artificial Sequence: Synthetic oligonucleotide
aucugauccucagaagcca

SEQ ID NO: 289474 - RNA, 19 nt, Artificial Sequence
  Description of Artificial Sequence: Synthetic oligonucleotide
cagacgacuagggugacca

SEQ ID NO: 289475 - RNA, 19 nt, Artificial Sequence
  Description of Artificial Sequence: Synthetic oligonucleotide
guuagauagcaaaacgggu

SEQ ID NO: 289476 - RNA, 19 nt, Artificial Sequence
  Description of Artificial Sequence: Synthetic oligonucleotide
gcugagucagcaucaguug

SEQ ID NO: 289477 - RNA, 19 nt, Artificial Sequence
  Description of Artificial Sequence: Synthetic oligonucleotide
uuacuguggccagacgacu

SEQ ID NO: 289478 - RNA, 19 nt, Artificial Sequence
  Description of Artificial Sequence: Synthetic oligonucleotide
ucggacauguucagaccuc

SEQ ID NO: 289479 - RNA, 19 nt, Artificial Sequence
  Description of Artificial Sequence: Synthetic oligonucleotide
uuauggaaccggugauuau

SEQ ID NO: 289480 - RNA, 19 nt, Artificial Sequence
  Description of Artificial Sequence: Synthetic oligonucleotide
acucgguucaggucuucgu

SEQ ID NO: 289481 - RNA, 19 nt, Artificial Sequence
  Description of Artificial Sequence: Synthetic oligonucleotide
agcuuucgucacuaucuga

SEQ ID NO: 289482 - RNA, 19 nt, Artificial Sequence
  Description of Artificial Sequence: Synthetic oligonucleotide
aguguggaucgagaguuga

SEQ ID NO: 289483 - RNA, 19 nt, Artificial Sequence
  Description of Artificial Sequence: Synthetic oligonucleotide
acgaucacaaacagccuga

SEQ ID NO: 289484 - RNA, 19 nt, Artificial Sequence
  Description of Artificial Sequence: Synthetic oligonucleotide
uggccaguguggaucgaga

SEQ ID NO: 289485 - RNA, 19 nt, Artificial Sequence
  Description of Artificial Sequence: Synthetic oligonucleotide
gauagcaaaacgggucaaa

SEQ ID NO: 289486 - RNA, 19 nt, Artificial Sequence
  Description of Artificial Sequence: Synthetic oligonucleotide
ggguuugacauucgaggug

SEQ ID NO: 289487 - RNA, 19 nt, Artificial Sequence
  Description of Artificial Sequence: Synthetic oligonucleotide
uacauuccgagccguccau

SEQ ID NO: 289488 - RNA, 19 nt, Artificial Sequence
  Description of Artificial Sequence: Synthetic oligonucleotide
agcaccgccccagaagaag

SEQ ID NO: 289489 - RNA, 19 nt, Artificial Sequence
  Description of Artificial Sequence: Synthetic oligonucleotide
accggugauuauauacauc

SEQ ID NO: 289490 - RNA, 19 nt, Artificial Sequence
  Description of Artificial Sequence: Synthetic oligonucleotide
ggaaguguugcagaccuca

SEQ ID NO: 289491 - RNA, 19 nt, Artificial Sequence
  Description of Artificial Sequence: Synthetic oligonucleotide
auaauguggcuuaaaccuu

SEQ ID NO: 289492 - RNA, 19 nt, Artificial Sequence
  Description of Artificial Sequence: Synthetic oligonucleotide
ucgugcaauccgucuagaa

SEQ ID NO: 289493 - RNA, 19 nt, Artificial Sequence
  Description of Artificial Sequence: Synthetic oligonucleotide
accgccccagaagaaguac

SEQ ID NO: 289494 - RNA, 19 nt, Artificial Sequence
  Description of Artificial Sequence: Synthetic oligonucleotide
aucgagaguugaguuugag

SEQ ID NO: 289495 - RNA, 19 nt, Artificial Sequence
  Description of Artificial Sequence: Synthetic oligonucleotide
uaaggccuugcugaccggu

SEQ ID NO: 289496 - RNA, 19 nt, Artificial Sequence
  Description of Artificial Sequence: Synthetic oligonucleotide
cgagaguugaguuugagua

SEQ ID NO: 289497 - RNA, 19 nt, Artificial Sequence
  Description of Artificial Sequence: Synthetic oligonucleotide
uucagcuccacagguuuau

SEQ ID NO: 289498 - RNA, 19 nt, Artificial Sequence
  Description of Artificial Sequence: Synthetic oligonucleotide
caccgcaucuggucgcccg

SEQ ID NO: 289499 - RNA, 19 nt, Artificial Sequence
  Description of Artificial Sequence: Synthetic oligonucleotide
uaccaccgcaucuggucgc

SEQ ID NO: 289500 - RNA, 19 nt, Artificial Sequence
  Description of Artificial Sequence: Synthetic oligonucleotide
gaccauaggucaaacuucu

SEQ ID NO: 289501 - RNA, 19 nt, Artificial Sequence
  Description of Artificial Sequence: Synthetic oligonucleotide
aucucguggugucugcuuu

SEQ ID NO: 289502 - RNA, 19 nt, Artificial Sequence
  Description of Artificial Sequence: Synthetic oligonucleotide
gagggccaaagacacucuc

SEQ ID NO: 289503 - RNA, 19 nt, Artificial Sequence
  Description of Artificial Sequence: Synthetic oligonucleotide
cucgaggguuagcuugugc

SEQ ID NO: 289504 - RNA, 19 nt, Artificial Sequence
  Description of Artificial Sequence: Synthetic oligonucleotide
ugcugaccggucacagaca

SEQ ID NO: 289505 - RNA, 19 nt, Artificial Sequence
  Description of Artificial Sequence: Synthetic oligonucleotide
agccugauacaaagccucg

SEQ ID NO: 289506 - RNA, 19 nt, Artificial Sequence
  Description of Artificial Sequence: Synthetic oligonucleotide
uggcacagucacacggcac

SEQ ID NO: 289507 - RNA, 19 nt, Artificial Sequence
  Description of Artificial Sequence: Synthetic oligonucleotide
aguucagagcagcccugca

SEQ ID NO: 289508 - RNA, 19 nt, Artificial Sequence
  Description of Artificial Sequence: Synthetic oligonucleotide
gcaaaacgggucaaaaguc

SEQ ID NO: 289509 - RNA, 19 nt, Artificial Sequence
  Description of Artificial Sequence: Synthetic oligonucleotide
ccggugauuauauacaucu

SEQ ID NO: 289510 - RNA, 19 nt, Artificial Sequence
  Description of Artificial Sequence: Synthetic oligonucleotide
cacacugcacuguguaaca

SEQ ID NO: 289511 - RNA, 19 nt, Artificial Sequence
  Description of Artificial Sequence: Synthetic oligonucleotide
gcuaccaccgcaucugguc

SEQ ID NO: 289512 - RNA, 19 nt, Artificial Sequence
  Description of Artificial Sequence: Synthetic oligonucleotide
uaacucgauccuucuucaa

SEQ ID NO: 289513 - RNA, 19 nt, Artificial Sequence
  Description of Artificial Sequence: Synthetic oligonucleotide
auucagccucuuaacauaa

SEQ ID NO: 289514 - RNA, 19 nt, Artificial Sequence
  Description of Artificial Sequence: Synthetic oligonucleotide
caguaauacaccuccacuu

SEQ ID NO: 289515 - RNA, 19 nt, Artificial Sequence
  Description of Artificial Sequence: Synthetic oligonucleotide
gucuagaauaaaggcuaac

SEQ ID NO: 289516 - RNA, 19 nt, Artificial Sequence
  Description of Artificial Sequence: Synthetic oligonucleotide
cucucgaaaguagacugga

SEQ ID NO: 289517 - RNA, 19 nt, Artificial Sequence
  Description of Artificial Sequence: Synthetic oligonucleotide
gcguuugagaugaaccacc

SEQ ID NO: 289518 - RNA, 19 nt, Artificial Sequence
  Description of Artificial Sequence: Synthetic oligonucleotide
gcaguguagugaccaaccc

SEQ ID NO: 289519 - RNA, 19 nt, Artificial Sequence
  Description of Artificial Sequence: Synthetic oligonucleotide
ucuggucgcccgcuggcau

SEQ ID NO: 289520 - RNA, 19 nt, Artificial Sequence
  Description of Artificial Sequence: Synthetic oligonucleotide
uugguuuacuguggccaga

SEQ ID NO: 289521 - RNA, 19 nt, Artificial Sequence
  Description of Artificial Sequence: Synthetic oligonucleotide
caucccgacgcugauaaaa

SEQ ID NO: 289522 - RNA, 19 nt, Artificial Sequence
  Description of Artificial Sequence: Synthetic oligonucleotide
cagacaaacucggacaugu

SEQ ID NO: 289523 - RNA, 19 nt, Artificial Sequence
  Description of Artificial Sequence: Synthetic oligonucleotide
ucgugcuccccgagggucu

SEQ ID NO: 289524 - RNA, 19 nt, Artificial Sequence
  Description of Artificial Sequence: Synthetic oligonucleotide
gguuuacuguggccagacg

SEQ ID NO: 289525 - RNA, 19 nt, Artificial Sequence
  Description of Artificial Sequence: Synthetic oligonucleotide
ggccaguguggaucgagag

SEQ ID NO: 289526 - RNA, 19 nt, Artificial Sequence
  Description of Artificial Sequence: Synthetic oligonucleotide
gaccaguaugggcaccaga

SEQ ID NO: 289527 - RNA, 19 nt, Artificial Sequence
  Description of Artificial Sequence: Synthetic oligonucleotide
ugaucucguggugucugcu

SEQ ID NO: 289528 - RNA, 19 nt, Artificial Sequence
  Description of Artificial Sequence: Synthetic oligonucleotide
guguggaucgagaguugag

SEQ ID NO: 289529 - RNA, 19 nt, Artificial Sequence
  Description of Artificial Sequence: Synthetic oligonucleotide
auggaaccggugauuauau

SEQ ID NO: 289530 - RNA, 19 nt, Artificial Sequence
  Description of Artificial Sequence: Synthetic oligonucleotide
gcuacugcggucuucuucu

SEQ ID NO: 289531 - RNA, 19 nt, Artificial Sequence
  Description of Artificial Sequence: Synthetic oligonucleotide
ccgacgcugauaaaauaac

SEQ ID NO: 289532 - RNA, 19 nt, Artificial Sequence
  Description of Artificial Sequence: Synthetic oligonucleotide
ccgucuagaauaaaggcua

SEQ ID NO: 289533 - RNA, 19 nt, Artificial Sequence
  Description of Artificial Sequence: Synthetic oligonucleotide
cauaggaguugacaagacu

SEQ ID NO: 289534 - RNA, 19 nt, Artificial Sequence
  Description of Artificial Sequence: Synthetic oligonucleotide
ucgucacuaucugauccuc

SEQ ID NO: 289535 - RNA, 19 nt, Artificial Sequence
  Description of Artificial Sequence: Synthetic oligonucleotide
aggggcgaaacgucccacu

SEQ ID NO: 289536 - RNA, 19 nt, Artificial Sequence
  Description of Artificial Sequence: Synthetic oligonucleotide
ggcuccauagugauuggac

SEQ ID NO: 289537 - RNA, 19 nt, Artificial Sequence
  Description of Artificial Sequence: Synthetic oligonucleotide
auaggucggcacugugggu

SEQ ID NO: 289538 - RNA, 19 nt, Artificial Sequence
  Description of Artificial Sequence: Synthetic oligonucleotide
agacgacuagggugaccag

SEQ ID NO: 289539 - RNA, 19 nt, Artificial Sequence
  Description of Artificial Sequence: Synthetic oligonucleotide
ucccgacgcugauaaaaua

SEQ ID NO: 289540 - RNA, 19 nt, Artificial Sequence
  Description of Artificial Sequence: Synthetic oligonucleotide
gccagaaaacugaggggcg

SEQ ID NO: 289541 - RNA, 19 nt, Artificial Sequence
  Description of Artificial Sequence: Synthetic oligonucleotide
gccauaggaguugacaaga

SEQ ID NO: 289542 - RNA, 19 nt, Artificial Sequence
  Description of Artificial Sequence: Synthetic oligonucleotide
auacgaucacaaacagccu

SEQ ID NO: 289543 - RNA, 19 nt, Artificial Sequence
  Description of Artificial Sequence: Synthetic oligonucleotide
cucugacugggaacuccac

SEQ ID NO: 289544 - RNA, 19 nt, Artificial Sequence
  Description of Artificial Sequence: Synthetic oligonucleotide
acgagaaguggcuguccau

SEQ ID NO: 289545 - RNA, 19 nt, Artificial Sequence
  Description of Artificial Sequence: Synthetic oligonucleotide
aacgucccacuuggguuug

SEQ ID NO: 289546 - RNA, 19 nt, Artificial Sequence
  Description of Artificial Sequence: Synthetic oligonucleotide
ucggcacugugggucagca

SEQ ID NO: 289547 - RNA, 19 nt, Artificial Sequence
  Description of Artificial Sequence: Synthetic oligonucleotide
ucgaggcauaauguggcuu

SEQ ID NO: 289548 - RNA, 19 nt, Artificial Sequence
  Description of Artificial Sequence: Synthetic oligonucleotide
ugaccaguaugggcaccag

SEQ ID NO: 289549 - RNA, 19 nt, Artificial Sequence
  Description of Artificial Sequence: Synthetic oligonucleotide
uggaaguguugcagaccuc

SEQ ID NO: 289550 - RNA, 19 nt, Artificial Sequence
  Description of Artificial Sequence: Synthetic oligonucleotide
guugggaccaacacauagu

SEQ ID NO: 289551 - RNA, 19 nt, Artificial Sequence
  Description of Artificial Sequence: Synthetic oligonucleotide
uggcuccauagugauugga

SEQ ID NO: 289552 - RNA, 19 nt, Artificial Sequence
  Description of Artificial Sequence: Synthetic oligonucleotide
cuugcugaccggucacaga

SEQ ID NO: 289553 - RNA, 19 nt, Artificial Sequence
  Description of Artificial Sequence: Synthetic oligonucleotide
guaauacaccuccacuuuu

SEQ ID NO: 289554 - RNA, 19 nt, Artificial Sequence
  Description of Artificial Sequence: Synthetic oligonucleotide
cuguuauaggagaagcguu

SEQ ID NO: 289555 - RNA, 19 nt, Artificial Sequence
  Description of Artificial Sequence: Synthetic oligonucleotide
ccauagugauuggacacag

SEQ ID NO: 289556 - RNA, 19 nt, Artificial Sequence
  Description of Artificial Sequence: Synthetic oligonucleotide
acgagacacacugcacugu

SEQ ID NO: 289557 - RNA, 19 nt, Artificial Sequence
  Description of Artificial Sequence: Synthetic oligonucleotide
gcaacucagcacauuggug

SEQ ID NO: 289558 - RNA, 19 nt, Artificial Sequence
  Description of Artificial Sequence: Synthetic oligonucleotide
acgacuagggugaccagua

SEQ ID NO: 289559 - RNA, 19 nt, Artificial Sequence
  Description of Artificial Sequence: Synthetic oligonucleotide
uagcggcugauacgaucac

SEQ ID NO: 289560 - RNA, 19 nt, Artificial Sequence
  Description of Artificial Sequence: Synthetic oligonucleotide
cuuaaaccuucauccauuu

SEQ ID NO: 289561 - RNA, 19 nt, Artificial Sequence
  Description of Artificial Sequence: Synthetic oligonucleotide
ucucguggugucugcuuuu

SEQ ID NO: 289562 - RNA, 19 nt, Artificial Sequence
  Description of Artificial Sequence: Synthetic oligonucleotide
cacuggugcuguggggugg

SEQ ID NO: 289563 - RNA, 19 nt, Artificial Sequence
  Description of Artificial Sequence: Synthetic oligonucleotide
cucagaagccagagauaca

SEQ ID NO: 289564 - RNA, 19 nt, Artificial Sequence
  Description of Artificial Sequence: Synthetic oligonucleotide
ccagaaagaccuccauaac

SEQ ID NO: 289565 - RNA, 19 nt, Artificial Sequence
  Description of Artificial Sequence: Synthetic oligonucleotide
cucguggugucugcuuuug

SEQ ID NO: 289566 - RNA, 19 nt, Artificial Sequence
  Description of Artificial Sequence: Synthetic oligonucleotide
ccauaggaguugacaagac

SEQ ID NO: 289567 - RNA, 19 nt, Artificial Sequence
  Description of Artificial Sequence: Synthetic oligonucleotide
gacgacuagggugaccagu

SEQ ID NO: 289568 - RNA, 19 nt, Artificial Sequence
  Description of Artificial Sequence: Synthetic oligonucleotide
guuugacauucgaggugcc

SEQ ID NO: 289569 - RNA, 19 nt, Artificial Sequence
  Description of Artificial Sequence: Synthetic oligonucleotide
aucccgacgcugauaaaau

SEQ ID NO: 289570 - RNA, 19 nt, Artificial Sequence
  Description of Artificial Sequence: Synthetic oligonucleotide
ggaccaacacauaguccag

SEQ ID NO: 289571 - RNA, 19 nt, Artificial Sequence
  Description of Artificial Sequence: Synthetic oligonucleotide
uuacaggccccagguucca

SEQ ID NO: 289572 - RNA, 19 nt, Artificial Sequence
  Description of Artificial Sequence: Synthetic oligonucleotide
gggcgaaacgucccacuug

SEQ ID NO: 289573 - RNA, 19 nt, Artificial Sequence
  Description of Artificial Sequence: Synthetic oligonucleotide
guggaucgagaguugaguu

SEQ ID NO: 289574 - RNA, 19 nt, Artificial Sequence
  Description of Artificial Sequence: Synthetic oligonucleotide
gccauuacaggccccaggu

SEQ ID NO: 289575 - RNA, 19 nt, Artificial Sequence
  Description of Artificial Sequence: Synthetic oligonucleotide
gguugucucgguugaucuc

SEQ ID NO: 289576 - RNA, 19 nt, Artificial Sequence
  Description of Artificial Sequence: Synthetic oligonucleotide
cccgacgcugauaaaauaa

SEQ ID NO: 289577 - RNA, 19 nt, Artificial Sequence
  Description of Artificial Sequence: Synthetic oligonucleotide
ggggaaacuggugagcaaa

SEQ ID NO: 289578 - RNA, 19 nt, Artificial Sequence
  Description of Artificial Sequence: Synthetic oligonucleotide
ucagcuccacagguuuauc

SEQ ID NO: 289579 - RNA, 19 nt, Artificial Sequence
  Description of Artificial Sequence: Synthetic oligonucleotide
gaucgagaguugaguuuga

SEQ ID NO: 289580 - RNA, 19 nt, Artificial Sequence
  Description of Artificial Sequence: Synthetic oligonucleotide
gucuucgugcaauccgucu

SEQ ID NO: 289581 - RNA, 19 nt, Artificial Sequence
  Description of Artificial Sequence: Synthetic oligonucleotide
gcugaccggucacagacaa

SEQ ID NO: 289582 - RNA, 19 nt, Artificial Sequence
  Description of Artificial Sequence: Synthetic oligonucleotide
aauggccaguguggaucga

SEQ ID NO: 289583 - RNA, 19 nt, Artificial Sequence
  Description of Artificial Sequence: Synthetic oligonucleotide
ccagacaauuuagcaagug

SEQ ID NO: 289584 - RNA, 19 nt, Artificial Sequence
  Description of Artificial Sequence: Synthetic oligonucleotide
caucaguugcaagugaauu

SEQ ID NO: 289585 - RNA, 19 nt, Artificial Sequence
  Description of Artificial Sequence: Synthetic oligonucleotide
ggcuuaaaccuucauccau

SEQ ID NO: 289586 - RNA, 19 nt, Artificial Sequence
  Description of Artificial Sequence: Synthetic oligonucleotide
gugagcugagaaacucauc

SEQ ID NO: 289587 - RNA, 19 nt, Artificial Sequence
  Description of Artificial Sequence: Synthetic oligonucleotide
cuggucgcccgcuggcauc

SEQ ID NO: 289588 - RNA, 19 nt, Artificial Sequence
  Description of Artificial Sequence: Synthetic oligonucleotide
gaggggcgaaacgucccac

SEQ ID NO: 289589 - RNA, 19 nt, Artificial Sequence
  Description of Artificial Sequence: Synthetic oligonucleotide
gcuuucgucacuaucugau

SEQ ID NO: 289590 - RNA, 19 nt, Artificial Sequence
  Description of Artificial Sequence: Synthetic oligonucleotide
ccccuuucauccccagagg

SEQ ID NO: 289591 - RNA, 19 nt, Artificial Sequence
  Description of Artificial Sequence: Synthetic oligonucleotide
ugcuccccgagggucucca

SEQ ID NO: 289592 - RNA, 19 nt, Artificial Sequence
  Description of Artificial Sequence: Synthetic oligonucleotide
ucaucccgacgcugauaaa

SEQ ID NO: 289593 - RNA, 19 nt, Artificial Sequence
  Description of Artificial Sequence: Synthetic oligonucleotide
gguuuaucucaccacccau

SEQ ID NO: 289594 - RNA, 19 nt, Artificial Sequence
  Description of Artificial Sequence: Synthetic oligonucleotide
cagguuccaagggugagcu

SEQ ID NO: 289595 - RNA, 19 nt, Artificial Sequence
  Description of Artificial Sequence: Synthetic oligonucleotide
cugucuucgagagggccaa

SEQ ID NO: 289596 - RNA, 19 nt, Artificial Sequence
  Description of Artificial Sequence: Synthetic oligonucleotide
gaucucguggugucugcuu

SEQ ID NO: 289597 - RNA, 19 nt, Artificial Sequence
  Description of Artificial Sequence: Synthetic oligonucleotide
aucucaccacccaucugaa

SEQ ID NO: 289598 - RNA, 19 nt, Artificial Sequence
  Description of Artificial Sequence: Synthetic oligonucleotide
gcggcugauacgaucacaa

SEQ ID NO: 289599 - RNA, 19 nt, Artificial Sequence
  Description of Artificial Sequence: Synthetic oligonucleotide
gggaacuccacaacugugu

SEQ ID NO: 289600 - RNA, 19 nt, Artificial Sequence
  Description of Artificial Sequence: Synthetic oligonucleotide
acacggcacuggauagguc

SEQ ID NO: 289601 - RNA, 19 nt, Artificial Sequence
  Description of Artificial Sequence: Synthetic oligonucleotide
ccaguaauacaccuccacu

SEQ ID NO: 289602 - RNA, 19 nt, Artificial Sequence
  Description of Artificial Sequence: Synthetic oligonucleotide
gugagcaaaggugcauugu

SEQ ID NO: 289603 - RNA, 19 nt, Artificial Sequence
  Description of Artificial Sequence: Synthetic oligonucleotide
ggguuagcuugugcuuagg

SEQ ID NO: 289604 - RNA, 19 nt, Artificial Sequence
  Description of Artificial Sequence: Synthetic oligonucleotide
cgacgcugauaaaauaaca

SEQ ID NO: 289605 - RNA, 19 nt, Artificial Sequence
  Description of Artificial Sequence: Synthetic oligonucleotide
ccuugcugaccggucacag

SEQ ID NO: 289606 - RNA, 19 nt, Artificial Sequence
  Description of Artificial Sequence: Synthetic oligonucleotide
gugauacauuccgagccgu

SEQ ID NO: 289607 - RNA, 19 nt, Artificial Sequence
  Description of Artificial Sequence: Synthetic oligonucleotide
gugccacuugaugagcucu

SEQ ID NO: 289608 - RNA, 19 nt, Artificial Sequence
  Description of Artificial Sequence: Synthetic oligonucleotide
cggugauuauauacaucug

SEQ ID NO: 289609 - RNA, 19 nt, Artificial Sequence
  Description of Artificial Sequence: Synthetic oligonucleotide
auauagcggcugauacgau

SEQ ID NO: 289610 - RNA, 19 nt, Artificial Sequence
  Description of Artificial Sequence: Synthetic oligonucleotide
gaaguguugcagaccucau

SEQ ID NO: 289611 - RNA, 19 nt, Artificial Sequence
  Description of Artificial Sequence: Synthetic oligonucleotide
cucgaggcauaauguggcu

SEQ ID NO: 289612 - RNA, 19 nt, Artificial Sequence
  Description of Artificial Sequence: Synthetic oligonucleotide
gucaauggccaguguggau

SEQ ID NO: 289613 - RNA, 19 nt, Artificial Sequence
  Description of Artificial Sequence: Synthetic oligonucleotide
agacaaacucggacauguu

SEQ ID NO: 289614 - RNA, 19 nt, Artificial Sequence
  Description of Artificial Sequence: Synthetic oligonucleotide
gcuucgggucucacugucc

SEQ ID NO: 289615 - RNA, 19 nt, Artificial Sequence
  Description of Artificial Sequence: Synthetic oligonucleotide
cacacggcacuggauaggu

SEQ ID NO: 289616 - RNA, 19 nt, Artificial Sequence
  Description of Artificial Sequence: Synthetic oligonucleotide
gucggcacugugggucagc

SEQ ID NO: 289617 - RNA, 19 nt, Artificial Sequence
  Description of Artificial Sequence: Synthetic oligonucleotide
gcuuaaaccuucauccauu

SEQ ID NO: 289618 - RNA, 19 nt, Artificial Sequence
  Description of Artificial Sequence: Synthetic oligonucleotide
ggucacagacaaacucgga

SEQ ID NO: 289619 - RNA, 19 nt, Artificial Sequence
  Description of Artificial Sequence: Synthetic oligonucleotide
gccaguguggaucgagagu

SEQ ID NO: 289620 - RNA, 19 nt, Artificial Sequence
  Description of Artificial Sequence: Synthetic oligonucleotide
cgaggcauaauguggcuua

SEQ ID NO: 289621 - RNA, 19 nt, Artificial Sequence
  Description of Artificial Sequence: Synthetic oligonucleotide
gccggggaaacuggugagc

SEQ ID NO: 289622 - RNA, 19 nt, Artificial Sequence
  Description of Artificial Sequence: Synthetic oligonucleotide
ggucuucgugcaauccguc

SEQ ID NO: 289623 - RNA, 19 nt, Artificial Sequence
  Description of Artificial Sequence: Synthetic oligonucleotide
gaccggucacagacaaacu

SEQ ID NO: 289624 - RNA, 19 nt, Artificial Sequence
  Description of Artificial Sequence: Synthetic oligonucleotide
gcgaaacgucccacuuggg

SEQ ID NO: 289625 - RNA, 19 nt, Artificial Sequence
  Description of Artificial Sequence: Synthetic oligonucleotide
accauaggucaaacuucuu

SEQ ID NO: 289626 - RNA, 19 nt, Artificial Sequence
  Description of Artificial Sequence: Synthetic oligonucleotide
ccaugcuggaagccucauc

SEQ ID NO: 289627 - RNA, 19 nt, Artificial Sequence
  Description of Artificial Sequence: Synthetic oligonucleotide
cguaggcagcuuucgucac

SEQ ID NO: 289628 - RNA, 19 nt, Artificial Sequence
  Description of Artificial Sequence: Synthetic oligonucleotide
cugaccggucacagacaaa

SEQ ID NO: 289629 - RNA, 19 nt, Artificial Sequence
  Description of Artificial Sequence: Synthetic oligonucleotide
gaguugaguuugaguaguu

SEQ ID NO: 289630 - RNA, 19 nt, Artificial Sequence
  Description of Artificial Sequence: Synthetic oligonucleotide
ccggggaaacuggugagca

SEQ ID NO: 289631 - RNA, 19 nt, Artificial Sequence
  Description of Artificial Sequence: Synthetic oligonucleotide
agccguccauggaaguguu

SEQ ID NO: 289632 - RNA, 19 nt, Artificial Sequence
  Description of Artificial Sequence: Synthetic oligonucleotide
ccagacgacuagggugacc

SEQ ID NO: 289633 - RNA, 19 nt, Artificial Sequence
  Description of Artificial Sequence: Synthetic oligonucleotide
cgucgucuccuucauagcu

SEQ ID NO: 289634 - RNA, 19 nt, Artificial Sequence
  Description of Artificial Sequence: Synthetic oligonucleotide
ccaucaguugcaagugaau

SEQ ID NO: 289635 - RNA, 19 nt, Artificial Sequence
  Description of Artificial Sequence: Synthetic oligonucleotide
ccaaacccaggaguucaga

SEQ ID NO: 289636 - RNA, 19 nt, Artificial Sequence
  Description of Artificial Sequence: Synthetic oligonucleotide
ggggcgaaacgucccacuu

SEQ ID NO: 289637 - RNA, 19 nt, Artificial Sequence
  Description of Artificial Sequence: Synthetic oligonucleotide
gcaauccgucuagaauaaa

SEQ ID NO: 289638 - RNA, 19 nt, Artificial Sequence
  Description of Artificial Sequence: Synthetic oligonucleotide
gggguugcugagucagcau

SEQ ID NO: 289639 - RNA, 19 nt, Artificial Sequence
  Description of Artificial Sequence: Synthetic oligonucleotide
acgucccacuuggguuuga

SEQ ID NO: 289640 - RNA, 19 nt, Artificial Sequence
  Description of Artificial Sequence: Synthetic oligonucleotide
caucugugaccaccauauu

SEQ ID NO: 289641 - RNA, 19 nt, Artificial Sequence
  Description of Artificial Sequence: Synthetic oligonucleotide
gccguccauggaaguguug

SEQ ID NO: 289642 - RNA, 19 nt, Artificial Sequence
  Description of Artificial Sequence: Synthetic oligonucleotide
ggccaugcuccgcaacuuu

SEQ ID NO: 289643 - RNA, 19 nt, Artificial Sequence
  Description of Artificial Sequence: Synthetic oligonucleotide
gcuugugcuuagggacaga

SEQ ID NO: 289644 - RNA, 19 nt, Artificial Sequence
  Description of Artificial Sequence: Synthetic oligonucleotide
gccucgaggguuagcuugu

SEQ ID NO: 289645 - RNA, 19 nt, Artificial Sequence
  Description of Artificial Sequence: Synthetic oligonucleotide
gccagacgacuagggugac

SEQ ID NO: 289646 - RNA, 19 nt, Artificial Sequence
  Description of Artificial Sequence: Synthetic oligonucleotide
ccgccccagaagaaguacu

SEQ ID NO: 289647 - RNA, 19 nt, Artificial Sequence
  Description of Artificial Sequence: Synthetic oligonucleotide
ccaccgcaucuggucgccc

SEQ ID NO: 289648 - RNA, 19 nt, Artificial Sequence
  Description of Artificial Sequence: Synthetic oligonucleotide
cggcugauacgaucacaaa

SEQ ID NO: 289649 - RNA, 19 nt, Artificial Sequence
  Description of Artificial Sequence: Synthetic oligonucleotide
cccugagggcuacugcggu

SEQ ID NO: 289650 - RNA, 19 nt, Artificial Sequence
  Description of Artificial Sequence: Synthetic oligonucleotide
ccucaccacugccuucugu

SEQ ID NO: 289651 - RNA, 19 nt, Artificial Sequence
  Description of Artificial Sequence: Synthetic oligonucleotide
cggggaaacuggugagcaa

SEQ ID NO: 289652 - RNA, 19 nt, Artificial Sequence
  Description of Artificial Sequence: Synthetic oligonucleotide
gucgcccgcuggcauccuu

SEQ ID NO: 289653 - RNA, 19 nt, Artificial Sequence
  Description of Artificial Sequence: Synthetic oligonucleotide
ccauuacaggccccagguu

SEQ ID NO: 289654 - RNA, 19 nt, Artificial Sequence
  Description of Artificial Sequence: Synthetic oligonucleotide
ccgagccguccauggaagu

SEQ ID NO: 289655 - RNA, 19 nt, Artificial Sequence
  Description of Artificial Sequence: Synthetic oligonucleotide
cgugcuccccgagggucuc

SEQ ID NO: 289656 - RNA, 19 nt, Artificial Sequence
  Description of Artificial Sequence: Synthetic oligonucleotide
gggcuacugcggucuucuu

SEQ ID NO: 289657 - RNA, 19 nt, Artificial Sequence
  Description of Artificial Sequence: Synthetic oligonucleotide
cgacuagggugaccaguau

SEQ ID NO: 289658 - RNA, 19 nt, Artificial Sequence
  Description of Artificial Sequence: Synthetic oligonucleotide
ggucgcccgcuggcauccu

SEQ ID NO: 289659 - RNA, 19 nt, Artificial Sequence
  Description of Artificial Sequence: Synthetic oligonucleotide
aaagauucgaauaagcugg

SEQ ID NO: 289660 - RNA, 19 nt, Artificial Sequence
  Description of Artificial Sequence: Synthetic oligonucleotide
gacaaugucaaucauggag

SEQ ID NO: 289661 - RNA, 19 nt, Artificial Sequence
  Description of Artificial Sequence: Synthetic oligonucleotide
aguuaagaaagcuuacagc

SEQ ID NO: 289662 - RNA, 19 nt, Artificial Sequence
  Description of Artificial Sequence: Synthetic oligonucleotide
aaagaguucccguuccugc

SEQ ID NO: 289663 - RNA, 19 nt, Artificial Sequence
  Description of Artificial Sequence: Synthetic oligonucleotide
gaaaccaguccauugaggg

SEQ ID NO: 289664 - RNA, 19 nt, Artificial Sequence
  Description of Artificial Sequence: Synthetic oligonucleotide
uggggaauagcuuugagcc

SEQ ID NO: 289665 - RNA, 19 nt, Artificial Sequence
  Description of Artificial Sequence: Synthetic oligonucleotide
uuauugagaacaucugugg

SEQ ID NO: 289666 - RNA, 19 nt, Artificial Sequence
  Description of Artificial Sequence: Synthetic oligonucleotide
cagacaaugucaaucaugg

SEQ ID NO: 289667 - RNA, 19 nt, Artificial Sequence
  Description of Artificial Sequence: Synthetic oligonucleotide
caaagaaccggauaaacac

SEQ ID NO: 289668 - RNA, 19 nt, Artificial Sequence
  Description of Artificial Sequence: Synthetic oligonucleotide
aauaagcuggcgcacacug

SEQ ID NO: 289669 - RNA, 19 nt, Artificial Sequence
  Description of Artificial Sequence: Synthetic oligonucleotide
cauaagacuucucauaaag

SEQ ID NO: 289670 - RNA, 19 nt, Artificial Sequence
  Description of Artificial Sequence: Synthetic oligonucleotide
uuuggauccaaaacuuggg

SEQ ID NO: 289671 - RNA, 19 nt, Artificial Sequence
  Description of Artificial Sequence: Synthetic oligonucleotide
uuuaguuugggaagggagc

SEQ ID NO: 289672 - RNA, 19 nt, Artificial Sequence
  Description of Artificial Sequence: Synthetic oligonucleotide
ucuagcguccgauagcugg

SEQ ID NO: 289673 - RNA, 19 nt, Artificial Sequence
  Description of Artificial Sequence: Synthetic oligonucleotide
ucaucuaggaccuuggaaa

SEQ ID NO: 289674 - RNA, 19 nt, Artificial Sequence
  Description of Artificial Sequence: Synthetic oligonucleotide
cuacauugcaaguaggggc

SEQ ID NO: 289675 - RNA, 19 nt, Artificial Sequence
  Description of Artificial Sequence: Synthetic oligonucleotide
agauuauuuacaaacagca

SEQ ID NO: 289676 - RNA, 19 nt, Artificial Sequence
  Description of Artificial Sequence: Synthetic oligonucleotide
aagaguucccguuccugcc

SEQ ID NO: 289677 - RNA, 19 nt, Artificial Sequence
  Description of Artificial Sequence: Synthetic oligonucleotide
gauucgaauaagcuggcgc

SEQ ID NO: 289678 - RNA, 19 nt, Artificial Sequence
  Description of Artificial Sequence: Synthetic oligonucleotide
ugggaauauacaaauauuu

SEQ ID NO: 289679 - RNA, 19 nt, Artificial Sequence
  Description of Artificial Sequence: Synthetic oligonucleotide
auuaagacagcaccugcuc

SEQ ID NO: 289680 - RNA, 19 nt, Artificial Sequence
  Description of Artificial Sequence: Synthetic oligonucleotide
ugcaaguaggggcagagug

SEQ ID NO: 289681 - RNA, 19 nt, Artificial Sequence
  Description of Artificial Sequence: Synthetic oligonucleotide
aagacuucucauaaagggg

SEQ ID NO: 289682 - RNA, 19 nt, Artificial Sequence
  Description of Artificial Sequence: Synthetic oligonucleotide
aaacuucuagaaaacggcg

SEQ ID NO: 289683 - RNA, 19 nt, Artificial Sequence
  Description of Artificial Sequence: Synthetic oligonucleotide
uauucugacacagggagcc

SEQ ID NO: 289684 - RNA, 19 nt, Artificial Sequence
  Description of Artificial Sequence: Synthetic oligonucleotide
aguaccuggcucuacauug

SEQ ID NO: 289685 - RNA, 19 nt, Artificial Sequence
  Description of Artificial Sequence: Synthetic oligonucleotide
aacgaugacucuuccuuuc

SEQ ID NO: 289686 - RNA, 19 nt, Artificial Sequence
  Description of Artificial Sequence: Synthetic oligonucleotide
aauucgacgggcccugcgg

SEQ ID NO: 289687 - RNA, 19 nt, Artificial Sequence
  Description of Artificial Sequence: Synthetic oligonucleotide
ucuacauugcaaguagggg

SEQ ID NO: 289688 - RNA, 19 nt, Artificial Sequence
  Description of Artificial Sequence: Synthetic oligonucleotide
aguagugcccaacagucuc

SEQ ID NO: 289689 - RNA, 19 nt, Artificial Sequence
  Description of Artificial Sequence: Synthetic oligonucleotide
aacucuagaguccucuugu

SEQ ID NO: 289690 - RNA, 19 nt, Artificial Sequence
  Description of Artificial Sequence: Synthetic oligonucleotide
uuugcuacugggauaggca

SEQ ID NO: 289691 - RNA, 19 nt, Artificial Sequence
  Description of Artificial Sequence: Synthetic oligonucleotide
uaagcuggcgcacacugag

SEQ ID NO: 289692 - RNA, 19 nt, Artificial Sequence
  Description of Artificial Sequence: Synthetic oligonucleotide
caagcuugggaauucgacg

SEQ ID NO: 289693 - RNA, 19 nt, Artificial Sequence
  Description of Artificial Sequence: Synthetic oligonucleotide
ucaaagaggcccuuugccc

SEQ ID NO: 289694 - RNA, 19 nt, Artificial Sequence
  Description of Artificial Sequence: Synthetic oligonucleotide
aaucguggcaaacgaugac

SEQ ID NO: 289695 - RNA, 19 nt, Artificial Sequence
  Description of Artificial Sequence: Synthetic oligonucleotide
cucuacauugcaaguaggg

SEQ ID NO: 289696 - RNA, 19 nt, Artificial Sequence
  Description of Artificial Sequence: Synthetic oligonucleotide
gaaucggucagaucccagg

SEQ ID NO: 289697 - RNA, 19 nt, Artificial Sequence
  Description of Artificial Sequence: Synthetic oligonucleotide
gaccuuggaaaacaacccg

SEQ ID NO: 289698 - RNA, 19 nt, Artificial Sequence
  Description of Artificial Sequence: Synthetic oligonucleotide
ugucggaugaaucggucag

SEQ ID NO: 289699 - RNA, 19 nt, Artificial Sequence
  Description of Artificial Sequence: Synthetic oligonucleotide
auaaacacuucugaaacca

SEQ ID NO: 289700 - RNA, 19 nt, Artificial Sequence
  Description of Artificial Sequence: Synthetic oligonucleotide
caguuaagaaagcuuacag

SEQ ID NO: 289701 - RNA, 19 nt, Artificial Sequence
  Description of Artificial Sequence: Synthetic oligonucleotide
gacucugcguuccaaaagc

SEQ ID NO: 289702 - RNA, 19 nt, Artificial Sequence
  Description of Artificial Sequence: Synthetic oligonucleotide
ugggauaggcauuuaauuc

SEQ ID NO: 289703 - RNA, 19 nt, Artificial Sequence
  Description of Artificial Sequence: Synthetic oligonucleotide
cugguaggagacuucaggg

SEQ ID NO: 289704 - RNA, 19 nt, Artificial Sequence
  Description of Artificial Sequence: Synthetic oligonucleotide
auucgaauaagcuggcgca

SEQ ID NO: 289705 - RNA, 19 nt, Artificial Sequence
  Description of Artificial Sequence: Synthetic oligonucleotide
uuuacuuguuacaguuaag

SEQ ID NO: 289706 - RNA, 19 nt, Artificial Sequence
  Description of Artificial Sequence: Synthetic oligonucleotide
gagaucaacucguucuucc

SEQ ID NO: 289707 - RNA, 19 nt, Artificial Sequence
  Description of Artificial Sequence: Synthetic oligonucleotide
accagauucucuuuacuug

SEQ ID NO: 289708 - RNA, 19 nt, Artificial Sequence
  Description of Artificial Sequence: Synthetic oligonucleotide
gaaagcuuacagcagauua

SEQ ID NO: 289709 - RNA, 19 nt, Artificial Sequence
  Description of Artificial Sequence: Synthetic oligonucleotide
ucccgcaucugcuuggugg

SEQ ID NO: 289710 - RNA, 19 nt, Artificial Sequence
  Description of Artificial Sequence: Synthetic oligonucleotide
agcuggcgcacacugaggc

SEQ ID NO: 289711 - RNA, 19 nt, Artificial Sequence
  Description of Artificial Sequence: Synthetic oligonucleotide
uaaucguggcaaacgauga

SEQ ID NO: 289712 - RNA, 19 nt, Artificial Sequence
  Description of Artificial Sequence: Synthetic oligonucleotide
gccuacaauagccaaagcg

SEQ ID NO: 289713 - RNA, 19 nt, Artificial Sequence
  Description of Artificial Sequence: Synthetic oligonucleotide
gacuccauaagacuucuca

SEQ ID NO: 289714 - RNA, 19 nt, Artificial Sequence
  Description of Artificial Sequence: Synthetic oligonucleotide
ucugcguuccaaaagcaaa

SEQ ID NO: 289715 - RNA, 19 nt, Artificial Sequence
  Description of Artificial Sequence: Synthetic oligonucleotide
caugucagaggguggaagg

SEQ ID NO: 289716 - RNA, 19 nt, Artificial Sequence
  Description of Artificial Sequence: Synthetic oligonucleotide
aguaagcgccuacaauagc

SEQ ID NO: 289717 - RNA, 19 nt, Artificial Sequence
  Description of Artificial Sequence: Synthetic oligonucleotide
uccucuuguacauaauuaa

SEQ ID NO: 289718 - RNA, 19 nt, Artificial Sequence
  Description of Artificial Sequence: Synthetic oligonucleotide
cuuguaacuuccuagguaa

SEQ ID NO: 289719 - RNA, 19 nt, Artificial Sequence
  Description of Artificial Sequence: Synthetic oligonucleotide
aaagcacuagacuuugcua

SEQ ID NO: 289720 - RNA, 19 nt, Artificial Sequence
  Description of Artificial Sequence: Synthetic oligonucleotide
auaagacuucucauaaagg

SEQ ID NO: 289721 - RNA, 19 nt, Artificial Sequence
  Description of Artificial Sequence: Synthetic oligonucleotide
aauuaagacagcaccugcu

SEQ ID NO: 289722 - RNA, 19 nt, Artificial Sequence
  Description of Artificial Sequence: Synthetic oligonucleotide
gaaagggcgacuccauaag

SEQ ID NO: 289723 - RNA, 19 nt, Artificial Sequence
  Description of Artificial Sequence: Synthetic oligonucleotide
aagggcgacuccauaagac

SEQ ID NO: 289724 - RNA, 19 nt, Artificial Sequence
  Description of Artificial Sequence: Synthetic oligonucleotide
guaacaaugugucuucauc

SEQ ID NO: 289725 - RNA, 19 nt, Artificial Sequence
  Description of Artificial Sequence: Synthetic oligonucleotide
aaucggucagaucccaggu

SEQ ID NO: 289726 - RNA, 19 nt, Artificial Sequence
  Description of Artificial Sequence: Synthetic oligonucleotide
ugagaacaucuguggaugg

SEQ ID NO: 289727 - RNA, 19 nt, Artificial Sequence
  Description of Artificial Sequence: Synthetic oligonucleotide
uguugcccaagccacggag

SEQ ID NO: 289728 - RNA, 19 nt, Artificial Sequence
  Description of Artificial Sequence: Synthetic oligonucleotide
agguggacuggcuuggagg

SEQ ID NO: 289729 - RNA, 19 nt, Artificial Sequence
  Description of Artificial Sequence: Synthetic oligonucleotide
aaagcacccggcccuuugg

SEQ ID NO: 289730 - RNA, 19 nt, Artificial Sequence
  Description of Artificial Sequence: Synthetic oligonucleotide
aagauucgaauaagcuggc

SEQ ID NO: 289731 - RNA, 19 nt, Artificial Sequence
  Description of Artificial Sequence: Synthetic oligonucleotide
guaaucguggcaaacgaug

SEQ ID NO: 289732 - RNA, 19 nt, Artificial Sequence
  Description of Artificial Sequence: Synthetic oligonucleotide
cuggggaauagcuuugagc

SEQ ID NO: 289733 - RNA, 19 nt, Artificial Sequence
  Description of Artificial Sequence: Synthetic oligonucleotide
ugacucugcguuccaaaag

SEQ ID NO: 289734 - RNA, 19 nt, Artificial Sequence
  Description of Artificial Sequence: Synthetic oligonucleotide
acuaacugggaguugcacu

SEQ ID NO: 289735 - RNA, 19 nt, Artificial Sequence
  Description of Artificial Sequence: Synthetic oligonucleotide
ugucaaucauggaggcugg

SEQ ID NO: 289736 - RNA, 19 nt, Artificial Sequence
  Description of Artificial Sequence: Synthetic oligonucleotide
guaagcgccuacaauagcc

SEQ ID NO: 289737 - RNA, 19 nt, Artificial Sequence
  Description of Artificial Sequence: Synthetic oligonucleotide
aaggccucucgcugaaagg

SEQ ID NO: 289738 - RNA, 19 nt, Artificial Sequence
  Description of Artificial Sequence: Synthetic oligonucleotide
agguccaaguaccuggcuc

SEQ ID NO: 289739 - RNA, 19 nt, Artificial Sequence
  Description of Artificial Sequence: Synthetic oligonucleotide
uuugcggaaggccucucgc

SEQ ID NO: 289740 - RNA, 19 nt, Artificial Sequence
  Description of Artificial Sequence: Synthetic oligonucleotide
uaaagggguagaccagugc

SEQ ID NO: 289741 - RNA, 19 nt, Artificial Sequence
  Description of Artificial Sequence: Synthetic oligonucleotide
ugacacagggagccaaucc

SEQ ID NO: 289742 - RNA, 19 nt, Artificial Sequence
  Description of Artificial Sequence: Synthetic oligonucleotide
agcucuagcguccgauagc

SEQ ID NO: 289743 - RNA, 19 nt, Artificial Sequence
  Description of Artificial Sequence: Synthetic oligonucleotide
ucucauaaagggguagacc

SEQ ID NO: 289744 - RNA, 19 nt, Artificial Sequence
  Description of Artificial Sequence: Synthetic oligonucleotide
gauccaaaacuuggguugg

SEQ ID NO: 289745 - RNA, 19 nt, Artificial Sequence
  Description of Artificial Sequence: Synthetic oligonucleotide
ggaacuacuaagaagaaaa

SEQ ID NO: 289746 - RNA, 19 nt, Artificial Sequence
  Description of Artificial Sequence: Synthetic oligonucleotide
aguuugggaagggagcugg

SEQ ID NO: 289747 - RNA, 19 nt, Artificial Sequence
  Description of Artificial Sequence: Synthetic oligonucleotide
acaagcuugggaauucgac

SEQ ID NO: 289748 - RNA, 19 nt, Artificial Sequence
  Description of Artificial Sequence: Synthetic oligonucleotide
aaacggcggaugcuuuugg

SEQ ID NO: 289749 - RNA, 19 nt, Artificial Sequence
  Description of Artificial Sequence: Synthetic oligonucleotide
uguaacuuccuagguaaca

SEQ ID NO: 289750 - RNA, 19 nt, Artificial Sequence
  Description of Artificial Sequence: Synthetic oligonucleotide
ucuagauauugcuccacuc

SEQ ID NO: 289751 - RNA, 19 nt, Artificial Sequence
  Description of Artificial Sequence: Synthetic oligonucleotide
accggauaaacacuucuga

SEQ ID NO: 289752 - RNA, 19 nt, Artificial Sequence
  Description of Artificial Sequence: Synthetic oligonucleotide
aaugcccuguaccgcauca

SEQ ID NO: 289753 - RNA, 19 nt, Artificial Sequence
  Description of Artificial Sequence: Synthetic oligonucleotide
aguugcacuucccaugacu

SEQ ID NO: 289754 - RNA, 19 nt, Artificial Sequence
  Description of Artificial Sequence: Synthetic oligonucleotide
aggccucucgcugaaaggc

SEQ ID NO: 289755 - RNA, 19 nt, Artificial Sequence
  Description of Artificial Sequence: Synthetic oligonucleotide
ugccucuuggguaaucgug

SEQ ID NO: 289756 - RNA, 19 nt, Artificial Sequence
  Description of Artificial Sequence: Synthetic oligonucleotide
gauagggaacuacuaagaa

SEQ ID NO: 289757 - RNA, 19 nt, Artificial Sequence
  Description of Artificial Sequence: Synthetic oligonucleotide
aaagcuuacagcagauuau

SEQ ID NO: 289758 - RNA, 19 nt, Artificial Sequence
  Description of Artificial Sequence: Synthetic oligonucleotide
ugcuguauucugacacagg

SEQ ID NO: 289759 - RNA, 19 nt, Artificial Sequence
  Description of Artificial Sequence: Synthetic oligonucleotide
ucggucagaucccagguuc

SEQ ID NO: 289760 - RNA, 19 nt, Artificial Sequence
  Description of Artificial Sequence: Synthetic oligonucleotide
auucgacgggcccugcggc

SEQ ID NO: 289761 - RNA, 19 nt, Artificial Sequence
  Description of Artificial Sequence: Synthetic oligonucleotide
agcuugggaaacugguagg

SEQ ID NO: 289762 - RNA, 19 nt, Artificial Sequence
  Description of Artificial Sequence: Synthetic oligonucleotide
uuguacuuccugucuuggg

SEQ ID NO: 289763 - RNA, 19 nt, Artificial Sequence
  Description of Artificial Sequence: Synthetic oligonucleotide
ugggguuaauccuuuggac

SEQ ID NO: 289764 - RNA, 19 nt, Artificial Sequence
  Description of Artificial Sequence: Synthetic oligonucleotide
caguaagcgccuacaauag

SEQ ID NO: 289765 - RNA, 19 nt, Artificial Sequence
  Description of Artificial Sequence: Synthetic oligonucleotide
cugcguuccaaaagcaaag

SEQ ID NO: 289766 - RNA, 19 nt, Artificial Sequence
  Description of Artificial Sequence: Synthetic oligonucleotide
agggagcucuucuagauau

SEQ ID NO: 289767 - RNA, 19 nt, Artificial Sequence
  Description of Artificial Sequence: Synthetic oligonucleotide
aaaacggcggaugcuuuug

SEQ ID NO: 289768 - RNA, 19 nt, Artificial Sequence
  Description of Artificial Sequence: Synthetic oligonucleotide
auuugcggaaggccucucg

SEQ ID NO: 289769 - RNA, 19 nt, Artificial Sequence
  Description of Artificial Sequence: Synthetic oligonucleotide
cauaauuaagacagcaccu

SEQ ID NO: 289770 - RNA, 19 nt, Artificial Sequence
  Description of Artificial Sequence: Synthetic oligonucleotide
aacaacccgaagcagccua

SEQ ID NO: 289771 - RNA, 19 nt, Artificial Sequence
  Description of Artificial Sequence: Synthetic oligonucleotide
agaaacucuagaguccucu

SEQ ID NO: 289772 - RNA, 19 nt, Artificial Sequence
  Description of Artificial Sequence: Synthetic oligonucleotide
uagguaacaaugugucuuc

SEQ ID NO: 289773 - RNA, 19 nt, Artificial Sequence
  Description of Artificial Sequence: Synthetic oligonucleotide
aaacgaugacucuuccuuu

SEQ ID NO: 289774 - RNA, 19 nt, Artificial Sequence
  Description of Artificial Sequence: Synthetic oligonucleotide
uuuggcugagacagucagc

SEQ ID NO: 289775 - RNA, 19 nt, Artificial Sequence
  Description of Artificial Sequence: Synthetic oligonucleotide
cuugggaauucgacgggcc

SEQ ID NO: 289776 - RNA, 19 nt, Artificial Sequence
  Description of Artificial Sequence: Synthetic oligonucleotide
aagcaaaacuggggaauag

SEQ ID NO: 289777 - RNA, 19 nt, Artificial Sequence
  Description of Artificial Sequence: Synthetic oligonucleotide
acaguuaagaaagcuuaca

SEQ ID NO: 289778 - RNA, 19 nt, Artificial Sequence
  Description of Artificial Sequence: Synthetic oligonucleotide
uuaauccuuuggacaagcu

SEQ ID NO: 289779 - RNA, 19 nt, Artificial Sequence
  Description of Artificial Sequence: Synthetic oligonucleotide
aaagaggcaaagauucgaa

SEQ ID NO: 289780 - RNA, 19 nt, Artificial Sequence
  Description of Artificial Sequence: Synthetic oligonucleotide
cuagcguccgauagcuggg

SEQ ID NO: 289781 - RNA, 19 nt, Artificial Sequence
  Description of Artificial Sequence: Synthetic oligonucleotide
cuuugcuacugggauaggc

SEQ ID NO: 289782 - RNA, 19 nt, Artificial Sequence
  Description of Artificial Sequence: Synthetic oligonucleotide
uuugggaagcucucccaca

SEQ ID NO: 289783 - RNA, 19 nt, Artificial Sequence
  Description of Artificial Sequence: Synthetic oligonucleotide
acagauuugcggaaggccu

SEQ ID NO: 289784 - RNA, 19 nt, Artificial Sequence
  Description of Artificial Sequence: Synthetic oligonucleotide
uugaggguauuacauucau

SEQ ID NO: 289785 - RNA, 19 nt, Artificial Sequence
  Description of Artificial Sequence: Synthetic oligonucleotide
gacucacuggccaugucag

SEQ ID NO: 289786 - RNA, 19 nt, Artificial Sequence
  Description of Artificial Sequence: Synthetic oligonucleotide
uggauccaaaacuuggguu

SEQ ID NO: 289787 - RNA, 19 nt, Artificial Sequence
  Description of Artificial Sequence: Synthetic oligonucleotide
agaguccucuuguacauaa

SEQ ID NO: 289788 - RNA, 19 nt, Artificial Sequence
  Description of Artificial Sequence: Synthetic oligonucleotide
guuaauccuuuggacaagc

SEQ ID NO: 289789 - RNA, 19 nt, Artificial Sequence
  Description of Artificial Sequence: Synthetic oligonucleotide
aaccggauaaacacuucug

SEQ ID NO: 289790 - RNA, 19 nt, Artificial Sequence
  Description of Artificial Sequence: Synthetic oligonucleotide
cauagggauucuccuuugg

SEQ ID NO: 289791 - RNA, 19 nt, Artificial Sequence
  Description of Artificial Sequence: Synthetic oligonucleotide
acuccauaagacuucucau

SEQ ID NO: 289792 - RNA, 19 nt, Artificial Sequence
  Description of Artificial Sequence: Synthetic oligonucleotide
gaauucgacgggcccugcg

SEQ ID NO: 289793 - RNA, 19 nt, Artificial Sequence
  Description of Artificial Sequence: Synthetic oligonucleotide
uugggaagcucucccacaa

SEQ ID NO: 289794 - RNA, 19 nt, Artificial Sequence
  Description of Artificial Sequence: Synthetic oligonucleotide
ucguggcaaacgaugacuc

SEQ ID NO: 289795 - RNA, 19 nt, Artificial Sequence
  Description of Artificial Sequence: Synthetic oligonucleotide
cauucaagaagcuccagcu

SEQ ID NO: 289796 - RNA, 19 nt, Artificial Sequence
  Description of Artificial Sequence: Synthetic oligonucleotide
augguggaaggaggaaugc

SEQ ID NO: 289797 - RNA, 19 nt, Artificial Sequence
  Description of Artificial Sequence: Synthetic oligonucleotide
ucaucaucggagucacugu

SEQ ID NO: 289798 - RNA, 19 nt, Artificial Sequence
  Description of Artificial Sequence: Synthetic oligonucleotide
ugcgcagagacugacugcu

SEQ ID NO: 289799 - RNA, 19 nt, Artificial Sequence
  Description of Artificial Sequence: Synthetic oligonucleotide
aggaaugcccuguaccgca

SEQ ID NO: 289800 - RNA, 19 nt, Artificial Sequence
  Description of Artificial Sequence: Synthetic oligonucleotide
ucaaagaguucccguuccu

SEQ ID NO: 289801 - RNA, 19 nt, Artificial Sequence
  Description of Artificial Sequence: Synthetic oligonucleotide
accgguagcuccuuuaguu

SEQ ID NO: 289802 - RNA, 19 nt, Artificial Sequence
  Description of Artificial Sequence: Synthetic oligonucleotide
aagcuuacagcagauuauu

SEQ ID NO: 289803 - RNA, 19 nt, Artificial Sequence
  Description of Artificial Sequence: Synthetic oligonucleotide
guauuacauucaucaucgg

SEQ ID NO: 289804 - RNA, 19 nt, Artificial Sequence
  Description of Artificial Sequence: Synthetic oligonucleotide
uacugggauaggcauuuaa

SEQ ID NO: 289805 - RNA, 19 nt, Artificial Sequence
  Description of Artificial Sequence: Synthetic oligonucleotide
cuagacuuugcuacuggga

SEQ ID NO: 289806 - RNA, 19 nt, Artificial Sequence
  Description of Artificial Sequence: Synthetic oligonucleotide
caagagaggaccaggucca

SEQ ID NO: 289807 - RNA, 19 nt, Artificial Sequence
  Description of Artificial Sequence: Synthetic oligonucleotide
agggcgacuccauaagacu

SEQ ID NO: 289808 - RNA, 19 nt, Artificial Sequence
  Description of Artificial Sequence: Synthetic oligonucleotide
uuagcucccugucuuggau

SEQ ID NO: 289809 - RNA, 19 nt, Artificial Sequence
  Description of Artificial Sequence: Synthetic oligonucleotide
guaggagacuucagggagg

SEQ ID NO: 289810 - RNA, 19 nt, Artificial Sequence
  Description of Artificial Sequence: Synthetic oligonucleotide
guagagcaaggccaccacc

SEQ ID NO: 289811 - RNA, 19 nt, Artificial Sequence
  Description of Artificial Sequence: Synthetic oligonucleotide
accaccgcgugagagcagc

SEQ ID NO: 289812 - RNA, 19 nt, Artificial Sequence
  Description of Artificial Sequence: Synthetic oligonucleotide
ucgcugaaaggcccuuucc

SEQ ID NO: 289813 - RNA, 19 nt, Artificial Sequence
  Description of Artificial Sequence: Synthetic oligonucleotide
aaguaccuggcucuacauu

SEQ ID NO: 289814 - RNA, 19 nt, Artificial Sequence
  Description of Artificial Sequence: Synthetic oligonucleotide
aucguggcaaacgaugacu

SEQ ID NO: 289815 - RNA, 19 nt, Artificial Sequence
  Description of Artificial Sequence: Synthetic oligonucleotide
aacggcggaugcuuuugga

SEQ ID NO: 289816 - RNA, 19 nt, Artificial Sequence
  Description of Artificial Sequence: Synthetic oligonucleotide
uuguaacuuccuagguaac

SEQ ID NO: 289817 - RNA, 19 nt, Artificial Sequence
  Description of Artificial Sequence: Synthetic oligonucleotide
gugaaaaggcacucgaagu

SEQ ID NO: 289818 - RNA, 19 nt, Artificial Sequence
  Description of Artificial Sequence: Synthetic oligonucleotide
gggguuaauccuuuggaca

SEQ ID NO: 289819 - RNA, 19 nt, Artificial Sequence
  Description of Artificial Sequence: Synthetic oligonucleotide
cagguucaccaucaaugcc

SEQ ID NO: 289820 - RNA, 19 nt, Artificial Sequence
  Description of Artificial Sequence: Synthetic oligonucleotide
guugcacuucccaugacuc

SEQ ID NO: 289821 - RNA, 19 nt, Artificial Sequence
  Description of Artificial Sequence: Synthetic oligonucleotide
gcaguaagcgccuacaaua

SEQ ID NO: 289822 - RNA, 19 nt, Artificial Sequence
  Description of Artificial Sequence: Synthetic oligonucleotide
aauuggccagucaccagca

SEQ ID NO: 289823 - RNA, 19 nt, Artificial Sequence
  Description of Artificial Sequence: Synthetic oligonucleotide
ggcaaagauucgaauaagc

SEQ ID NO: 289824 - RNA, 19 nt, Artificial Sequence
  Description of Artificial Sequence: Synthetic oligonucleotide
agauucgaauaagcuggcg

SEQ ID NO: 289825 - RNA, 19 nt, Artificial Sequence
  Description of Artificial Sequence: Synthetic oligonucleotide
uccuguguaaagaguccaa

SEQ ID NO: 289826 - RNA, 19 nt, Artificial Sequence
  Description of Artificial Sequence: Synthetic oligonucleotide
auggguggauuguuguacu

SEQ ID NO: 289827 - RNA, 19 nt, Artificial Sequence
  Description of Artificial Sequence: Synthetic oligonucleotide
gacacagggagccaauccu

SEQ ID NO: 289828 - RNA, 19 nt, Artificial Sequence
  Description of Artificial Sequence: Synthetic oligonucleotide
acugagcuuaucugcuaca

SEQ ID NO: 289829 - RNA, 19 nt, Artificial Sequence
  Description of Artificial Sequence: Synthetic oligonucleotide
uugcacuucccaugacuca

SEQ ID NO: 289830 - RNA, 19 nt, Artificial Sequence
  Description of Artificial Sequence: Synthetic oligonucleotide
ugcguuccaaaagcaaaga

SEQ ID NO: 289831 - RNA, 19 nt, Artificial Sequence
  Description of Artificial Sequence: Synthetic oligonucleotide
guaacuuccuagguaacaa

SEQ ID NO: 289832 - RNA, 19 nt, Artificial Sequence
  Description of Artificial Sequence: Synthetic oligonucleotide
ugguggaaggaggaaugcc

SEQ ID NO: 289833 - RNA, 19 nt, Artificial Sequence
  Description of Artificial Sequence: Synthetic oligonucleotide
uagguguuccgagauggcu

SEQ ID NO: 289834 - RNA, 19 nt, Artificial Sequence
  Description of Artificial Sequence: Synthetic oligonucleotide
ucgaauaagcuggcgcaca

SEQ ID NO: 289835 - RNA, 19 nt, Artificial Sequence
  Description of Artificial Sequence: Synthetic oligonucleotide
uucgaauaagcuggcgcac

SEQ ID NO: 289836 - RNA, 19 nt, Artificial Sequence
  Description of Artificial Sequence: Synthetic oligonucleotide
auugaggguauuacauuca

SEQ ID NO: 289837 - RNA, 19 nt, Artificial Sequence
  Description of Artificial Sequence: Synthetic oligonucleotide
caaagaggcaaagauucga

SEQ ID NO: 289838 - RNA, 19 nt, Artificial Sequence
  Description of Artificial Sequence: Synthetic oligonucleotide
ggaguagugcccaacaguc

SEQ ID NO: 289839 - RNA, 19 nt, Artificial Sequence
  Description of Artificial Sequence: Synthetic oligonucleotide
cugggguuaauccuuugga

SEQ ID NO: 289840 - RNA, 19 nt, Artificial Sequence
  Description of Artificial Sequence: Synthetic oligonucleotide
cugcuguauucugacacag

SEQ ID NO: 289841 - RNA, 19 nt, Artificial Sequence
  Description of Artificial Sequence: Synthetic oligonucleotide
agaguucccguuccugcca

SEQ ID NO: 289842 - RNA, 19 nt, Artificial Sequence
  Description of Artificial Sequence: Synthetic oligonucleotide
uggccaugucagagggugg

SEQ ID NO: 289843 - RNA, 19 nt, Artificial Sequence
  Description of Artificial Sequence: Synthetic oligonucleotide
cagauuugcggaaggccuc

SEQ ID NO: 289844 - RNA, 19 nt, Artificial Sequence
  Description of Artificial Sequence: Synthetic oligonucleotide
acugggauaggcauuuaau

SEQ ID NO: 289845 - RNA, 19 nt, Artificial Sequence
  Description of Artificial Sequence: Synthetic oligonucleotide
caaagaguucccguuccug

SEQ ID NO: 289846 - RNA, 19 nt, Artificial Sequence
  Description of Artificial Sequence: Synthetic oligonucleotide
uaccuggcucuacauugca

SEQ ID NO: 289847 - RNA, 19 nt, Artificial Sequence
  Description of Artificial Sequence: Synthetic oligonucleotide
ggguuaauccuuuggacaa

SEQ ID NO: 289848 - RNA, 19 nt, Artificial Sequence
  Description of Artificial Sequence: Synthetic oligonucleotide
agccgcgaguccaugggcc

SEQ ID NO: 289849 - RNA, 19 nt, Artificial Sequence
  Description of Artificial Sequence: Synthetic oligonucleotide
auaaagggguagaccagug

SEQ ID NO: 289850 - RNA, 19 nt, Artificial Sequence
  Description of Artificial Sequence: Synthetic oligonucleotide
gggauaggcauuuaauucu

SEQ ID NO: 289851 - RNA, 19 nt, Artificial Sequence
  Description of Artificial Sequence: Synthetic oligonucleotide
gaaacuuguucaucccgcu

SEQ ID NO: 289852 - RNA, 19 nt, Artificial Sequence
  Description of Artificial Sequence: Synthetic oligonucleotide
ccuacaauagccaaagcgu

SEQ ID NO: 289853 - RNA, 19 nt, Artificial Sequence
  Description of Artificial Sequence: Synthetic oligonucleotide
uggcuaugccucuugggua

SEQ ID NO: 289854 - RNA, 19 nt, Artificial Sequence
  Description of Artificial Sequence: Synthetic oligonucleotide
ugggaauucgacgggcccu

SEQ ID NO: 289855 - RNA, 19 nt, Artificial Sequence
  Description of Artificial Sequence: Synthetic oligonucleotide
agagugguccuugccuuuc

SEQ ID NO: 289856 - RNA, 19 nt, Artificial Sequence
  Description of Artificial Sequence: Synthetic oligonucleotide
gcaaguaggggcagagugg

SEQ ID NO: 289857 - RNA, 19 nt, Artificial Sequence
  Description of Artificial Sequence: Synthetic oligonucleotide
ucccguuccugccauucaa

SEQ ID NO: 289858 - RNA, 19 nt, Artificial Sequence
  Description of Artificial Sequence: Synthetic oligonucleotide
gacuccacauccuguguaa

SEQ ID NO: 289859 - RNA, 19 nt, Artificial Sequence
  Description of Artificial Sequence: Synthetic oligonucleotide
gcguuccaaaagcaaagag

SEQ ID NO: 289860 - RNA, 19 nt, Artificial Sequence
  Description of Artificial Sequence: Synthetic oligonucleotide
ucggaugaaucggucagau

SEQ ID NO: 289861 - RNA, 19 nt, Artificial Sequence
  Description of Artificial Sequence: Synthetic oligonucleotide
agacaaugucaaucaugga

SEQ ID NO: 289862 - RNA, 19 nt, Artificial Sequence
  Description of Artificial Sequence: Synthetic oligonucleotide
gcuuacagcagauuauuua

SEQ ID NO: 289863 - RNA, 19 nt, Artificial Sequence
  Description of Artificial Sequence: Synthetic oligonucleotide
agccuaggcggcugaugac

SEQ ID NO: 289864 - RNA, 19 nt, Artificial Sequence
  Description of Artificial Sequence: Synthetic oligonucleotide
ggcggaugcuuuuggaggc

SEQ ID NO: 289865 - RNA, 19 nt, Artificial Sequence
  Description of Artificial Sequence: Synthetic oligonucleotide
uugagccuuucuucugccu

SEQ ID NO: 289866 - RNA, 19 nt, Artificial Sequence
  Description of Artificial Sequence: Synthetic oligonucleotide
ggaguugcacuucccauga

SEQ ID NO: 289867 - RNA, 19 nt, Artificial Sequence
  Description of Artificial Sequence: Synthetic oligonucleotide
aggcacucgaaguccacau

SEQ ID NO: 289868 - RNA, 19 nt, Artificial Sequence
  Description of Artificial Sequence: Synthetic oligonucleotide
gaccagugcagcugagauc

SEQ ID NO: 289869 - RNA, 19 nt, Artificial Sequence
  Description of Artificial Sequence: Synthetic oligonucleotide
agguagguguuccgagaug

SEQ ID NO: 289870 - RNA, 19 nt, Artificial Sequence
  Description of Artificial Sequence: Synthetic oligonucleotide
uggaaagggcgacuccaua

SEQ ID NO: 289871 - RNA, 19 nt, Artificial Sequence
  Description of Artificial Sequence: Synthetic oligonucleotide
caucuaggaccuuggaaaa

SEQ ID NO: 289872 - RNA, 19 nt, Artificial Sequence
  Description of Artificial Sequence: Synthetic oligonucleotide
ggauagggaacuacuaaga

SEQ ID NO: 289873 - RNA, 19 nt, Artificial Sequence
  Description of Artificial Sequence: Synthetic oligonucleotide
cuagguaacaaugugucuu

SEQ ID NO: 289874 - RNA, 19 nt, Artificial Sequence
  Description of Artificial Sequence: Synthetic oligonucleotide
guagugcccaacagucucc

SEQ ID NO: 289875 - RNA, 19 nt, Artificial Sequence
  Description of Artificial Sequence: Synthetic oligonucleotide
gccacagauuugcggaagg

SEQ ID NO: 289876 - RNA, 19 nt, Artificial Sequence
  Description of Artificial Sequence: Synthetic oligonucleotide
uagcguccgauagcugggg

SEQ ID NO: 289877 - RNA, 19 nt, Artificial Sequence
  Description of Artificial Sequence: Synthetic oligonucleotide
agauuugcggaaggccucu

SEQ ID NO: 289878 - RNA, 19 nt, Artificial Sequence
  Description of Artificial Sequence: Synthetic oligonucleotide
guaccuggcucuacauugc

SEQ ID NO: 289879 - RNA, 19 nt, Artificial Sequence
  Description of Artificial Sequence: Synthetic oligonucleotide
cagccuaggcggcugauga

SEQ ID NO: 289880 - RNA, 19 nt, Artificial Sequence
  Description of Artificial Sequence: Synthetic oligonucleotide
gucagaucccagguucacc

SEQ ID NO: 289881 - RNA, 19 nt, Artificial Sequence
  Description of Artificial Sequence: Synthetic oligonucleotide
aaugccucuuccaccggua

SEQ ID NO: 289882 - RNA, 19 nt, Artificial Sequence
  Description of Artificial Sequence: Synthetic oligonucleotide
gacaagcuugggaauucga

SEQ ID NO: 289883 - RNA, 19 nt, Artificial Sequence
  Description of Artificial Sequence: Synthetic oligonucleotide
gcaaagauucgaauaagcu

SEQ ID NO: 289884 - RNA, 19 nt, Artificial Sequence
  Description of Artificial Sequence: Synthetic oligonucleotide
cuuggugggucgguccagc

SEQ ID NO: 289885 - RNA, 19 nt, Artificial Sequence
  Description of Artificial Sequence: Synthetic oligonucleotide
gcgccuacaauagccaaag

SEQ ID NO: 289886 - RNA, 19 nt, Artificial Sequence
  Description of Artificial Sequence: Synthetic oligonucleotide
gcuuguaacuuccuaggua

SEQ ID NO: 289887 - RNA, 19 nt, Artificial Sequence
  Description of Artificial Sequence: Synthetic oligonucleotide
uccugccauucaagaagcu

SEQ ID NO: 289888 - RNA, 19 nt, Artificial Sequence
  Description of Artificial Sequence: Synthetic oligonucleotide
acauugcaaguaggggcag

SEQ ID NO: 289889 - RNA, 19 nt, Artificial Sequence
  Description of Artificial Sequence: Synthetic oligonucleotide
ccggcacuuccuuagcucc

SEQ ID NO: 289890 - RNA, 19 nt, Artificial Sequence
  Description of Artificial Sequence: Synthetic oligonucleotide
cuuagcucccugucuugga

SEQ ID NO: 289891 - RNA, 19 nt, Artificial Sequence
  Description of Artificial Sequence: Synthetic oligonucleotide
gagguagguguuccgagau

SEQ ID NO: 289892 - RNA, 19 nt, Artificial Sequence
  Description of Artificial Sequence: Synthetic oligonucleotide
agggagguagguguuccga

SEQ ID NO: 289893 - RNA, 19 nt, Artificial Sequence
  Description of Artificial Sequence: Synthetic oligonucleotide
cccuguaccgcaucauggc

SEQ ID NO: 289894 - RNA, 19 nt, Artificial Sequence
  Description of Artificial Sequence: Synthetic oligonucleotide
agcugagaucccacgccgg

SEQ ID NO: 289895 - RNA, 19 nt, Artificial Sequence
  Description of Artificial Sequence: Synthetic oligonucleotide
gaaggaggaaugcccugua

SEQ ID NO: 289896 - RNA, 19 nt, Artificial Sequence
  Description of Artificial Sequence: Synthetic oligonucleotide
gcacagguggacuggcuug

SEQ ID NO: 289897 - RNA, 19 nt, Artificial Sequence
  Description of Artificial Sequence: Synthetic oligonucleotide
uucgacgggcccugcggcu

SEQ ID NO: 289898 - RNA, 19 nt, Artificial Sequence
  Description of Artificial Sequence: Synthetic oligonucleotide
aucggucagaucccagguu

SEQ ID NO: 289899 - RNA, 19 nt, Artificial Sequence
  Description of Artificial Sequence: Synthetic oligonucleotide
agcacccggcccuuuggga

SEQ ID NO: 289900 - RNA, 19 nt, Artificial Sequence
  Description of Artificial Sequence: Synthetic oligonucleotide
aagugcuuuuggauccaaa

SEQ ID NO: 289901 - RNA, 19 nt, Artificial Sequence
  Description of Artificial Sequence: Synthetic oligonucleotide
gcucuacauugcaaguagg

SEQ ID NO: 289902 - RNA, 19 nt, Artificial Sequence
  Description of Artificial Sequence: Synthetic oligonucleotide
gcugagaucccacgccggc

SEQ ID NO: 289903 - RNA, 19 nt, Artificial Sequence
  Description of Artificial Sequence: Synthetic oligonucleotide
agguaacaaugugucuuca

SEQ ID NO: 289904 - RNA, 19 nt, Artificial Sequence
  Description of Artificial Sequence: Synthetic oligonucleotide
cuucgguucuuaaguucca

SEQ ID NO: 289905 - RNA, 19 nt, Artificial Sequence
  Description of Artificial Sequence: Synthetic oligonucleotide
ggagguagguguuccgaga

SEQ ID NO: 289906 - RNA, 19 nt, Artificial Sequence
  Description of Artificial Sequence: Synthetic oligonucleotide
guagguguuccgagauggc

SEQ ID NO: 289907 - RNA, 19 nt, Artificial Sequence
  Description of Artificial Sequence: Synthetic oligonucleotide
acucugcguuccaaaagca

SEQ ID NO: 289908 - RNA, 19 nt, Artificial Sequence
  Description of Artificial Sequence: Synthetic oligonucleotide
cccgcaucugcuugguggg

SEQ ID NO: 289909 - RNA, 19 nt, Artificial Sequence
  Description of Artificial Sequence: Synthetic oligonucleotide
aggcccuuugcccggcacu

SEQ ID NO: 289910 - RNA, 19 nt, Artificial Sequence
  Description of Artificial Sequence: Synthetic oligonucleotide
uggguggauuguuguacuu

SEQ ID NO: 289911 - RNA, 19 nt, Artificial Sequence
  Description of Artificial Sequence: Synthetic oligonucleotide
cauaaagggguagaccagu

SEQ ID NO: 289912 - RNA, 19 nt, Artificial Sequence
  Description of Artificial Sequence: Synthetic oligonucleotide
auaagcuggcgcacacuga

SEQ ID NO: 289913 - RNA, 19 nt, Artificial Sequence
  Description of Artificial Sequence: Synthetic oligonucleotide
gagccaauccuuggcaucu

SEQ ID NO: 289914 - RNA, 19 nt, Artificial Sequence
  Description of Artificial Sequence: Synthetic oligonucleotide
ggcuaugccucuuggguaa

SEQ ID NO: 289915 - RNA, 19 nt, Artificial Sequence
  Description of Artificial Sequence: Synthetic oligonucleotide
gaaaacggcggaugcuuuu

SEQ ID NO: 289916 - RNA, 19 nt, Artificial Sequence
  Description of Artificial Sequence: Synthetic oligonucleotide
gaguugcacuucccaugac

SEQ ID NO: 289917 - RNA, 19 nt, Artificial Sequence
  Description of Artificial Sequence: Synthetic oligonucleotide
gguggacuggcuuggaggu

SEQ ID NO: 289918 - RNA, 19 nt, Artificial Sequence
  Description of Artificial Sequence: Synthetic oligonucleotide
cacauccuguguaaagagu

SEQ ID NO: 289919 - RNA, 19 nt, Artificial Sequence
  Description of Artificial Sequence: Synthetic oligonucleotide
cagccgcgaguccaugggc

SEQ ID NO: 289920 - RNA, 19 nt, Artificial Sequence
  Description of Artificial Sequence: Synthetic oligonucleotide
caggaaagcacccggcccu

SEQ ID NO: 289921 - RNA, 19 nt, Artificial Sequence
  Description of Artificial Sequence: Synthetic oligonucleotide
ccuuugggaauauacaaau

SEQ ID NO: 289922 - RNA, 19 nt, Artificial Sequence
  Description of Artificial Sequence: Synthetic oligonucleotide
ucgacgggcccugcggcug

SEQ ID NO: 289923 - RNA, 19 nt, Artificial Sequence
  Description of Artificial Sequence: Synthetic oligonucleotide
guacugagcuuaucugcua

SEQ ID NO: 289924 - RNA, 19 nt, Artificial Sequence
  Description of Artificial Sequence: Synthetic oligonucleotide
gcuugggaauucgacgggc

SEQ ID NO: 289925 - RNA, 19 nt, Artificial Sequence
  Description of Artificial Sequence: Synthetic oligonucleotide
agcguccgauagcuggggu

SEQ ID NO: 289926 - RNA, 19 nt, Artificial Sequence
  Description of Artificial Sequence: Synthetic oligonucleotide
gaauagcuuugagccuuuc

SEQ ID NO: 289927 - RNA, 19 nt, Artificial Sequence
  Description of Artificial Sequence: Synthetic oligonucleotide
agaucccacgccggcgcuc

SEQ ID NO: 289928 - RNA, 19 nt, Artificial Sequence
  Description of Artificial Sequence: Synthetic oligonucleotide
ccugcggcuggacaacagc

SEQ ID NO: 289929 - RNA, 19 nt, Artificial Sequence
  Description of Artificial Sequence: Synthetic oligonucleotide
cucuagcguccgauagcug

SEQ ID NO: 289930 - RNA, 19 nt, Artificial Sequence
  Description of Artificial Sequence: Synthetic oligonucleotide
agcuuacagcagauuauuu

SEQ ID NO: 289931 - RNA, 19 nt, Artificial Sequence
  Description of Artificial Sequence: Synthetic oligonucleotide
ccuuuggacaagcuuggga

SEQ ID NO: 289932 - RNA, 19 nt, Artificial Sequence
  Description of Artificial Sequence: Synthetic oligonucleotide
gccgcgaguccaugggccg

SEQ ID NO: 289933 - RNA, 19 nt, Artificial Sequence
  Description of Artificial Sequence: Synthetic oligonucleotide
ggguggauuguuguacuuc

SEQ ID NO: 289934 - RNA, 19 nt, Artificial Sequence
  Description of Artificial Sequence: Synthetic oligonucleotide
gaauaagcuggcgcacacu

SEQ ID NO: 289935 - RNA, 19 nt, Artificial Sequence
  Description of Artificial Sequence: Synthetic oligonucleotide
ccuaggcggcugaugacac

SEQ ID NO: 289936 - RNA, 19 nt, Artificial Sequence
  Description of Artificial Sequence: Synthetic oligonucleotide
gggaaacaucagugguuug

SEQ ID NO: 289937 - RNA, 19 nt, Artificial Sequence
  Description of Artificial Sequence: Synthetic oligonucleotide
cuagaaaacggcggaugcu

SEQ ID NO: 289938 - RNA, 19 nt, Artificial Sequence
  Description of Artificial Sequence: Synthetic oligonucleotide
ccaccgguagcuccuuuag

SEQ ID NO: 289939 - RNA, 19 nt, Artificial Sequence
  Description of Artificial Sequence: Synthetic oligonucleotide
cgguagcuccuuuaguuug

SEQ ID NO: 289940 - RNA, 19 nt, Artificial Sequence
  Description of Artificial Sequence: Synthetic oligonucleotide
cggcugaugacacaguaca

SEQ ID NO: 289941 - RNA, 19 nt, Artificial Sequence
  Description of Artificial Sequence: Synthetic oligonucleotide
ccggauaaacacuucugaa

SEQ ID NO: 289942 - RNA, 19 nt, Artificial Sequence
  Description of Artificial Sequence: Synthetic oligonucleotide
gggaauucgacgggcccug

SEQ ID NO: 289943 - RNA, 19 nt, Artificial Sequence
  Description of Artificial Sequence: Synthetic oligonucleotide
gcagccgaggcccuuucca

SEQ ID NO: 289944 - RNA, 19 nt, Artificial Sequence
  Description of Artificial Sequence: Synthetic oligonucleotide
cugcggcuggacaacagcu

SEQ ID NO: 289945 - RNA, 19 nt, Artificial Sequence
  Description of Artificial Sequence: Synthetic oligonucleotide
gucggaugaaucggucaga

SEQ ID NO: 289946 - RNA, 19 nt, Artificial Sequence
  Description of Artificial Sequence: Synthetic oligonucleotide
gcaagauuccauccaugcu

SEQ ID NO: 289947 - RNA, 19 nt, Artificial Sequence
  Description of Artificial Sequence: Synthetic oligonucleotide
cggcccuuugggaauauac

SEQ ID NO: 289948 - RNA, 19 nt, Artificial Sequence
  Description of Artificial Sequence: Synthetic oligonucleotide
ggagaucaacucguucuuc

SEQ ID NO: 289949 - RNA, 19 nt, Artificial Sequence
  Description of Artificial Sequence: Synthetic oligonucleotide
gguaacaaugugucuucau

SEQ ID NO: 289950 - RNA, 19 nt, Artificial Sequence
  Description of Artificial Sequence: Synthetic oligonucleotide
gauuugcggaaggccucuc

SEQ ID NO: 289951 - RNA, 19 nt, Artificial Sequence
  Description of Artificial Sequence: Synthetic oligonucleotide
cgaauaagcuggcgcacac

SEQ ID NO: 289952 - RNA, 19 nt, Artificial Sequence
  Description of Artificial Sequence: Synthetic oligonucleotide
gaguagugcccaacagucu

SEQ ID NO: 289953 - RNA, 19 nt, Artificial Sequence
  Description of Artificial Sequence: Synthetic oligonucleotide
ggcgacuccauaagacuuc

SEQ ID NO: 289954 - RNA, 19 nt, Artificial Sequence
  Description of Artificial Sequence: Synthetic oligonucleotide
uccgauagcugggguuaau

SEQ ID NO: 289955 - RNA, 19 nt, Artificial Sequence
  Description of Artificial Sequence: Synthetic oligonucleotide
cauugcaaguaggggcaga

SEQ ID NO: 289956 - RNA, 19 nt, Artificial Sequence
  Description of Artificial Sequence: Synthetic oligonucleotide
cccagcaagauuccaucca

SEQ ID NO: 289957 - RNA, 19 nt, Artificial Sequence
  Description of Artificial Sequence: Synthetic oligonucleotide
caccgcgugagagcagcug

SEQ ID NO: 289958 - RNA, 19 nt, Artificial Sequence
  Description of Artificial Sequence: Synthetic oligonucleotide
guaggggcagagugguccu

SEQ ID NO: 289959 - RNA, 19 nt, Artificial Sequence
  Description of Artificial Sequence: Synthetic oligonucleotide
caaguaccuggcucuacau

SEQ ID NO: 289960 - RNA, 19 nt, Artificial Sequence
  Description of Artificial Sequence: Synthetic oligonucleotide
agccaauccuuggcaucug

SEQ ID NO: 289961 - RNA, 19 nt, Artificial Sequence
  Description of Artificial Sequence: Synthetic oligonucleotide
gcaaacgaugacucuuccu

SEQ ID NO: 289962 - RNA, 19 nt, Artificial Sequence
  Description of Artificial Sequence: Synthetic oligonucleotide
uggcagccgaggcccuuuc

SEQ ID NO: 289963 - RNA, 19 nt, Artificial Sequence
  Description of Artificial Sequence: Synthetic oligonucleotide
cccggcacuuccuuagcuc

SEQ ID NO: 289964 - RNA, 19 nt, Artificial Sequence
  Description of Artificial Sequence: Synthetic oligonucleotide
caaugccucuuccaccggu

SEQ ID NO: 289965 - RNA, 19 nt, Artificial Sequence
  Description of Artificial Sequence: Synthetic oligonucleotide
gccuaggcggcugaugaca

SEQ ID NO: 289966 - RNA, 19 nt, Artificial Sequence
  Description of Artificial Sequence: Synthetic oligonucleotide
gcaggaaugucuucacuuu

SEQ ID NO: 289967 - RNA, 19 nt, Artificial Sequence
  Description of Artificial Sequence: Synthetic oligonucleotide
cacgccggcgcuccaccuc

SEQ ID NO: 289968 - RNA, 19 nt, Artificial Sequence
  Description of Artificial Sequence: Synthetic oligonucleotide
ggaaggaggaaugcccugu

SEQ ID NO: 289969 - RNA, 19 nt, Artificial Sequence
  Description of Artificial Sequence: Synthetic oligonucleotide
caugacucacuggccaugu

SEQ ID NO: 289970 - RNA, 19 nt, Artificial Sequence
  Description of Artificial Sequence: Synthetic oligonucleotide
gcucuagcguccgauagcu

SEQ ID NO: 289971 - RNA, 19 nt, Artificial Sequence
  Description of Artificial Sequence: Synthetic oligonucleotide
gcacccggcccuuugggaa

SEQ ID NO: 289972 - RNA, 19 nt, Artificial Sequence
  Description of Artificial Sequence: Synthetic oligonucleotide
ccgauagcugggguuaauc

SEQ ID NO: 289973 - RNA, 19 nt, Artificial Sequence
  Description of Artificial Sequence: Synthetic oligonucleotide
gcaaggccaccaccgcgug

SEQ ID NO: 289974 - RNA, 19 nt, Artificial Sequence
  Description of Artificial Sequence: Synthetic oligonucleotide
caccaccgcgugagagcag

SEQ ID NO: 289975 - RNA, 19 nt, Artificial Sequence
  Description of Artificial Sequence: Synthetic oligonucleotide
gguaaucguggcaaacgau

SEQ ID NO: 289976 - RNA, 19 nt, Artificial Sequence
  Description of Artificial Sequence: Synthetic oligonucleotide
ggcagccgaggcccuuucc

SEQ ID NO: 289977 - RNA, 19 nt, Artificial Sequence
  Description of Artificial Sequence: Synthetic oligonucleotide
gcuacugggauaggcauuu

SEQ ID NO: 289978 - RNA, 19 nt, Artificial Sequence
  Description of Artificial Sequence: Synthetic oligonucleotide
gcuggcgcacacugaggca

SEQ ID NO: 289979 - RNA, 19 nt, Artificial Sequence
  Description of Artificial Sequence: Synthetic oligonucleotide
aggaaagcacccggcccuu

SEQ ID NO: 289980 - RNA, 19 nt, Artificial Sequence
  Description of Artificial Sequence: Synthetic oligonucleotide
gggagaucaacucguucuu

SEQ ID NO: 289981 - RNA, 19 nt, Artificial Sequence
  Description of Artificial Sequence: Synthetic oligonucleotide
gcagccuaggcggcugaug

SEQ ID NO: 289982 - RNA, 19 nt, Artificial Sequence
  Description of Artificial Sequence: Synthetic oligonucleotide
gagaucccacgccggcgcu

SEQ ID NO: 289983 - RNA, 19 nt, Artificial Sequence
  Description of Artificial Sequence: Synthetic oligonucleotide
gcggaugcuuuuggaggcc

SEQ ID NO: 289984 - RNA, 19 nt, Artificial Sequence
  Description of Artificial Sequence: Synthetic oligonucleotide
caugggccgccgcagcucu

SEQ ID NO: 289985 - RNA, 19 nt, Artificial Sequence
  Description of Artificial Sequence: Synthetic oligonucleotide
gcccugcaaagcacuagac

SEQ ID NO: 289986 - RNA, 19 nt, Artificial Sequence
  Description of Artificial Sequence: Synthetic oligonucleotide
guaccgcaucauggccacc

SEQ ID NO: 289987 - RNA, 19 nt, Artificial Sequence
  Description of Artificial Sequence: Synthetic oligonucleotide
cccugcggcuggacaacag

SEQ ID NO: 289988 - RNA, 19 nt, Artificial Sequence
  Description of Artificial Sequence: Synthetic oligonucleotide
agcagccuaggcggcugau

SEQ ID NO: 289989 - RNA, 19 nt, Artificial Sequence
  Description of Artificial Sequence: Synthetic oligonucleotide
cgguucuuaaguuccacau

SEQ ID NO: 289990 - RNA, 19 nt, Artificial Sequence
  Description of Artificial Sequence: Synthetic oligonucleotide
ggccaaccaggaaaggggu

SEQ ID NO: 289991 - RNA, 19 nt, Artificial Sequence
  Description of Artificial Sequence: Synthetic oligonucleotide
caccgguagcuccuuuagu

SEQ ID NO: 289992 - RNA, 19 nt, Artificial Sequence
  Description of Artificial Sequence: Synthetic oligonucleotide
ccgcucugcucagugucag

SEQ ID NO: 289993 - RNA, 19 nt, Artificial Sequence
  Description of Artificial Sequence: Synthetic oligonucleotide
cggaugaaucggucagauc

SEQ ID NO: 289994 - RNA, 19 nt, Artificial Sequence
  Description of Artificial Sequence: Synthetic oligonucleotide
guccgauagcugggguuaa

SEQ ID NO: 289995 - RNA, 19 nt, Artificial Sequence
  Description of Artificial Sequence: Synthetic oligonucleotide
gggcgacuccauaagacuu

SEQ ID NO: 289996 - RNA, 19 nt, Artificial Sequence
  Description of Artificial Sequence: Synthetic oligonucleotide
gcgacuccauaagacuucu

SEQ ID NO: 289997 - RNA, 19 nt, Artificial Sequence
  Description of Artificial Sequence: Synthetic oligonucleotide
cgccuacaauagccaaagc

SEQ ID NO: 289998 - RNA, 19 nt, Artificial Sequence
  Description of Artificial Sequence: Synthetic oligonucleotide
cccacugcgcagagacuga

SEQ ID NO: 289999 - RNA, 19 nt, Artificial Sequence
  Description of Artificial Sequence: Synthetic oligonucleotide
gcgaguccaugggccgccg

SEQ ID NO: 290000 - RNA, 19 nt, Artificial Sequence
  Description of Artificial Sequence: Synthetic oligonucleotide
gcgcacacugaggcaggug

SEQ ID NO: 290001 - RNA, 19 nt, Artificial Sequence
  Description of Artificial Sequence: Synthetic oligonucleotide
ccgcgugagagcagcugga

SEQ ID NO: 290002 - RNA, 19 nt, Artificial Sequence
  Description of Artificial Sequence: Synthetic oligonucleotide
gcgcagagacugacugcug

SEQ ID NO: 290003 - RNA, 19 nt, Artificial Sequence
  Description of Artificial Sequence: Synthetic oligonucleotide
cacccggcccuuugggaau

SEQ ID NO: 290004 - RNA, 19 nt, Artificial Sequence
  Description of Artificial Sequence: Synthetic oligonucleotide
acccggcccuuugggaaua

SEQ ID NO: 290005 - RNA, 19 nt, Artificial Sequence
  Description of Artificial Sequence: Synthetic oligonucleotide
ccgaggcccuuuccacuug

SEQ ID NO: 290006 - RNA, 19 nt, Artificial Sequence
  Description of Artificial Sequence: Synthetic oligonucleotide
cgcgugagagcagcuggac

SEQ ID NO: 290007 - RNA, 19 nt, Artificial Sequence
  Description of Artificial Sequence: Synthetic oligonucleotide
cuacugggauaggcauuua

SEQ ID NO: 290008 - RNA, 19 nt, Artificial Sequence
  Description of Artificial Sequence: Synthetic oligonucleotide
gcguccgauagcugggguu

SEQ ID NO: 290009 - RNA, 19 nt, Artificial Sequence
  Description of Artificial Sequence: Synthetic oligonucleotide
cguccgauagcugggguua

SEQ ID NO: 290010 - RNA, 19 nt, Artificial Sequence
  Description of Artificial Sequence: Synthetic oligonucleotide
gccgaggcccuuuccacuu

SEQ ID NO: 290011 - RNA, 19 nt, Artificial Sequence
  Description of Artificial Sequence: Synthetic oligonucleotide
cgcgaguccaugggccgcc

SEQ ID NO: 290012 - RNA, 19 nt, Artificial Sequence
  Description of Artificial Sequence: Synthetic oligonucleotide
ccgguagcuccuuuaguuu

SEQ ID NO: 290013 - RNA, 19 nt, Artificial Sequence
  Description of Artificial Sequence: Synthetic oligonucleotide
cgacgggcccugcggcugg

SEQ ID NO: 290014 - RNA, 19 nt, Artificial Sequence
  Description of Artificial Sequence: Synthetic oligonucleotide
cguggcaaacgaugacucu

SEQ ID NO: 290015 - RNA, 19 nt, Artificial Sequence
  Description of Artificial Sequence: Synthetic oligonucleotide
gcccugcggcuggacaaca

SEQ ID NO: 290016 - RNA, 19 nt, Artificial Sequence
  Description of Artificial Sequence: Synthetic oligonucleotide
cucucgcugaaaggcccuu

SEQ ID NO: 290017 - RNA, 19 nt, Artificial Sequence
  Description of Artificial Sequence: Synthetic oligonucleotide
ccgcaucauggccaccacu

SEQ ID NO: 290018 - RNA, 19 nt, Artificial Sequence
  Description of Artificial Sequence: Synthetic oligonucleotide
ggcgcacacugaggcaggu

SEQ ID NO: 290019 - RNA, 19 nt, Artificial Sequence
  Description of Artificial Sequence: Synthetic oligonucleotide
cuggcagccgaggcccuuu

SEQ ID NO: 290020 - RNA, 19 nt, Artificial Sequence
  Description of Artificial Sequence: Synthetic oligonucleotide
gcuaugccucuuggguaau

SEQ ID NO: 290021 - RNA, 19 nt, Artificial Sequence
  Description of Artificial Sequence: Synthetic oligonucleotide
augggccgccgcagcucua

SEQ ID NO: 290022 - RNA, 19 nt, Artificial Sequence
  Description of Artificial Sequence: Synthetic oligonucleotide
ccaaagcgucugcugccau

SEQ ID NO: 290023 - RNA, 19 nt, Artificial Sequence
  Description of Artificial Sequence: Synthetic oligonucleotide
ggaaagcacccggcccuuu

SEQ ID NO: 290024 - RNA, 19 nt, Artificial Sequence
  Description of Artificial Sequence: Synthetic oligonucleotide
ccaccgcgugagagcagcu

SEQ ID NO: 290025 - RNA, 19 nt, Artificial Sequence
  Description of Artificial Sequence: Synthetic oligonucleotide
ccggcccuuugggaauaua

SEQ ID NO: 290026 - RNA, 19 nt, Artificial Sequence
  Description of Artificial Sequence: Synthetic oligonucleotide
cccggcccuuugggaauau

SEQ ID NO: 290027 - RNA, 19 nt, Artificial Sequence
  Description of Artificial Sequence: Synthetic oligonucleotide
aaaauaaggauuuccauuc

SEQ ID NO: 290028 - RNA, 19 nt, Artificial Sequence
  Description of Artificial Sequence: Synthetic oligonucleotide
aauuucauguacuuaacag

SEQ ID NO: 290029 - RNA, 19 nt, Artificial Sequence
  Description of Artificial Sequence: Synthetic oligonucleotide
uuacuaaucacuauuaaga

SEQ ID NO: 290030 - RNA, 19 nt, Artificial Sequence
  Description of Artificial Sequence: Synthetic oligonucleotide
agcuaaagcagucacagcc

SEQ ID NO: 290031 - RNA, 19 nt, Artificial Sequence
  Description of Artificial Sequence: Synthetic oligonucleotide
aguguuaacauaucuugcc

SEQ ID NO: 290032 - RNA, 19 nt, Artificial Sequence
  Description of Artificial Sequence: Synthetic oligonucleotide
aaaauuacaugguuucuag

SEQ ID NO: 290033 - RNA, 19 nt, Artificial Sequence
  Description of Artificial Sequence: Synthetic oligonucleotide
aauggaauagugccugagc

SEQ ID NO: 290034 - RNA, 19 nt, Artificial Sequence
  Description of Artificial Sequence: Synthetic oligonucleotide
aauccuuguaaauacuguc

SEQ ID NO: 290035 - RNA, 19 nt, Artificial Sequence
  Description of Artificial Sequence: Synthetic oligonucleotide
uuuacuaaucacuauuaag

SEQ ID NO: 290036 - RNA, 19 nt, Artificial Sequence
  Description of Artificial Sequence: Synthetic oligonucleotide
aauacucacuucuauuuuc

SEQ ID NO: 290037 - RNA, 19 nt, Artificial Sequence
  Description of Artificial Sequence: Synthetic oligonucleotide
uugguauucauuuaguaac

SEQ ID NO: 290038 - RNA, 19 nt, Artificial Sequence
  Description of Artificial Sequence: Synthetic oligonucleotide
ucgaauauaugcaauguca

SEQ ID NO: 290039 - RNA, 19 nt, Artificial Sequence
  Description of Artificial Sequence: Synthetic oligonucleotide
aaauaagucaaauccuugu

SEQ ID NO: 290040 - RNA, 19 nt, Artificial Sequence
  Description of Artificial Sequence: Synthetic oligonucleotide
aggaugauagucuacuugg

SEQ ID NO: 290041 - RNA, 19 nt, Artificial Sequence
  Description of Artificial Sequence: Synthetic oligonucleotide
auguaaugaaguuggagac

SEQ ID NO: 290042 - RNA, 19 nt, Artificial Sequence
  Description of Artificial Sequence: Synthetic oligonucleotide
uguacuuaacagaagcugc

SEQ ID NO: 290043 - RNA, 19 nt, Artificial Sequence
  Description of Artificial Sequence: Synthetic oligonucleotide
aaucucucaaacucucugg

SEQ ID NO: 290044 - RNA, 19 nt, Artificial Sequence
  Description of Artificial Sequence: Synthetic oligonucleotide
aaauuuggggugcaaaaca

SEQ ID NO: 290045 - RNA, 19 nt, Artificial Sequence
  Description of Artificial Sequence: Synthetic oligonucleotide
uccauaauccggaugaucu

SEQ ID NO: 290046 - RNA, 19 nt, Artificial Sequence
  Description of Artificial Sequence: Synthetic oligonucleotide
uuuagugcuaucaaacccu

SEQ ID NO: 290047 - RNA, 19 nt, Artificial Sequence
  Description of Artificial Sequence: Synthetic oligonucleotide
aucagcuuaaagugaauac

SEQ ID NO: 290048 - RNA, 19 nt, Artificial Sequence
  Description of Artificial Sequence: Synthetic oligonucleotide
ugagauauggauacauagc

SEQ ID NO: 290049 - RNA, 19 nt, Artificial Sequence
  Description of Artificial Sequence: Synthetic oligonucleotide
uggcaagacaaacagaaca

SEQ ID NO: 290050 - RNA, 19 nt, Artificial Sequence
  Description of Artificial Sequence: Synthetic oligonucleotide
acuucgaugagccccacac

SEQ ID NO: 290051 - RNA, 19 nt, Artificial Sequence
  Description of Artificial Sequence: Synthetic oligonucleotide
ugugaauaggucaauggcu

SEQ ID NO: 290052 - RNA, 19 nt, Artificial Sequence
  Description of Artificial Sequence: Synthetic oligonucleotide
uuaguaacugguuucauau

SEQ ID NO: 290053 - RNA, 19 nt, Artificial Sequence
  Description of Artificial Sequence: Synthetic oligonucleotide
aaaggagaaacaaucagcu

SEQ ID NO: 290054 - RNA, 19 nt, Artificial Sequence
  Description of Artificial Sequence: Synthetic oligonucleotide
agaaaagcuaaccaugcug

SEQ ID NO: 290055 - RNA, 19 nt, Artificial Sequence
  Description of Artificial Sequence: Synthetic oligonucleotide
gauaguuucuauaauauaa

SEQ ID NO: 290056 - RNA, 19 nt, Artificial Sequence
  Description of Artificial Sequence: Synthetic oligonucleotide
cuugugaauaggucaaugg

SEQ ID NO: 290057 - RNA, 19 nt, Artificial Sequence
  Description of Artificial Sequence: Synthetic oligonucleotide
aauaacauuaauacucacu

SEQ ID NO: 290058 - RNA, 19 nt, Artificial Sequence
  Description of Artificial Sequence: Synthetic oligonucleotide
caucauugaaaacagguug

SEQ ID NO: 290059 - RNA, 19 nt, Artificial Sequence
  Description of Artificial Sequence: Synthetic oligonucleotide
uacacacacacaaacacac

SEQ ID NO: 290060 - RNA, 19 nt, Artificial Sequence
  Description of Artificial Sequence: Synthetic oligonucleotide
uucccuaggaaauaaguca

SEQ ID NO: 290061 - RNA, 19 nt, Artificial Sequence
  Description of Artificial Sequence: Synthetic oligonucleotide
uuuggggugcaaaacaaug

SEQ ID NO: 290062 - RNA, 19 nt, Artificial Sequence
  Description of Artificial Sequence: Synthetic oligonucleotide
cauaagguagcauucgaag

SEQ ID NO: 290063 - RNA, 19 nt, Artificial Sequence
  Description of Artificial Sequence: Synthetic oligonucleotide
uaugauugugccauucuca

SEQ ID NO: 290064 - RNA, 19 nt, Artificial Sequence
  Description of Artificial Sequence: Synthetic oligonucleotide
uuauagagcauguuguuuc

SEQ ID NO: 290065 - RNA, 19 nt, Artificial Sequence
  Description of Artificial Sequence: Synthetic oligonucleotide
aguaacugguuucauauga

SEQ ID NO: 290066 - RNA, 19 nt, Artificial Sequence
  Description of Artificial Sequence: Synthetic oligonucleotide
cuuagggagucauacagag

SEQ ID NO: 290067 - RNA, 19 nt, Artificial Sequence
  Description of Artificial Sequence: Synthetic oligonucleotide
ucaauaacgcauucugugc

SEQ ID NO: 290068 - RNA, 19 nt, Artificial Sequence
  Description of Artificial Sequence: Synthetic oligonucleotide
cucaauaacgcauucugug

SEQ ID NO: 290069 - RNA, 19 nt, Artificial Sequence
  Description of Artificial Sequence: Synthetic oligonucleotide
agaguuucucaccacuucg

SEQ ID NO: 290070 - RNA, 19 nt, Artificial Sequence
  Description of Artificial Sequence: Synthetic oligonucleotide
uguugcuccucauaaagca

SEQ ID NO: 290071 - RNA, 19 nt, Artificial Sequence
  Description of Artificial Sequence: Synthetic oligonucleotide
ugucaaaacaaauggcaca

SEQ ID NO: 290072 - RNA, 19 nt, Artificial Sequence
  Description of Artificial Sequence: Synthetic oligonucleotide
gagggcaucguguagaaac

SEQ ID NO: 290073 - RNA, 19 nt, Artificial Sequence
  Description of Artificial Sequence: Synthetic oligonucleotide
gaaacgacagcaguggaag

SEQ ID NO: 290074 - RNA, 19 nt, Artificial Sequence
  Description of Artificial Sequence: Synthetic oligonucleotide
acuauagaugcauggauga

SEQ ID NO: 290075 - RNA, 19 nt, Artificial Sequence
  Description of Artificial Sequence: Synthetic oligonucleotide
aauaagucaaauccuugua

SEQ ID NO: 290076 - RNA, 19 nt, Artificial Sequence
  Description of Artificial Sequence: Synthetic oligonucleotide
gauauggauacauagcuua

SEQ ID NO: 290077 - RNA, 19 nt, Artificial Sequence
  Description of Artificial Sequence: Synthetic oligonucleotide
accaacgucugccugcugc

SEQ ID NO: 290078 - RNA, 19 nt, Artificial Sequence
  Description of Artificial Sequence: Synthetic oligonucleotide
agagcuaaagcagucacag

SEQ ID NO: 290079 - RNA, 19 nt, Artificial Sequence
  Description of Artificial Sequence: Synthetic oligonucleotide
aggguuguuuguucaaagc

SEQ ID NO: 290080 - RNA, 19 nt, Artificial Sequence
  Description of Artificial Sequence: Synthetic oligonucleotide
ucuaugaucacugcuguac

SEQ ID NO: 290081 - RNA, 19 nt, Artificial Sequence
  Description of Artificial Sequence: Synthetic oligonucleotide
gugaauacuguacagguca

SEQ ID NO: 290082 - RNA, 19 nt, Artificial Sequence
  Description of Artificial Sequence: Synthetic oligonucleotide
aggcauaacaugaacuugc

SEQ ID NO: 290083 - RNA, 19 nt, Artificial Sequence
  Description of Artificial Sequence: Synthetic oligonucleotide
cuuucgaauauaugcaaug

SEQ ID NO: 290084 - RNA, 19 nt, Artificial Sequence
  Description of Artificial Sequence: Synthetic oligonucleotide
cuggauaaauggaauagug

SEQ ID NO: 290085 - RNA, 19 nt, Artificial Sequence
  Description of Artificial Sequence: Synthetic oligonucleotide
aauggguuaauguccuacu

SEQ ID NO: 290086 - RNA, 19 nt, Artificial Sequence
  Description of Artificial Sequence: Synthetic oligonucleotide
ggacaugauaguaaaaugg

SEQ ID NO: 290087 - RNA, 19 nt, Artificial Sequence
  Description of Artificial Sequence: Synthetic oligonucleotide
aaguuggagaccugaccac

SEQ ID NO: 290088 - RNA, 19 nt, Artificial Sequence
  Description of Artificial Sequence: Synthetic oligonucleotide
guguuaacauaucuugccg

SEQ ID NO: 290089 - RNA, 19 nt, Artificial Sequence
  Description of Artificial Sequence: Synthetic oligonucleotide
auaaauggaauagugccug

SEQ ID NO: 290090 - RNA, 19 nt, Artificial Sequence
  Description of Artificial Sequence: Synthetic oligonucleotide
aacuauagaugcauggaug

SEQ ID NO: 290091 - RNA, 19 nt, Artificial Sequence
  Description of Artificial Sequence: Synthetic oligonucleotide
augaacuugcucauuauuc

SEQ ID NO: 290092 - RNA, 19 nt, Artificial Sequence
  Description of Artificial Sequence: Synthetic oligonucleotide
ucauuuaguaacugguuuc

SEQ ID NO: 290093 - RNA, 19 nt, Artificial Sequence
  Description of Artificial Sequence: Synthetic oligonucleotide
ugacuguugaacugcagug

SEQ ID NO: 290094 - RNA, 19 nt, Artificial Sequence
  Description of Artificial Sequence: Synthetic oligonucleotide
aauuauagagcauguuguu

SEQ ID NO: 290095 - RNA, 19 nt, Artificial Sequence
  Description of Artificial Sequence: Synthetic oligonucleotide
uuucccuaggaaauaaguc

SEQ ID NO: 290096 - RNA, 19 nt, Artificial Sequence
  Description of Artificial Sequence: Synthetic oligonucleotide
uguuaacauaucuugccgu

SEQ ID NO: 290097 - RNA, 19 nt, Artificial Sequence
  Description of Artificial Sequence: Synthetic oligonucleotide
uacuaaucacuauuaagaa

SEQ ID NO: 290098 - RNA, 19 nt, Artificial Sequence
  Description of Artificial Sequence: Synthetic oligonucleotide
caucguguagaaacgacag

SEQ ID NO: 290099 - RNA, 19 nt, Artificial Sequence
  Description of Artificial Sequence: Synthetic oligonucleotide
agcauucgaaggucaaggc

SEQ ID NO: 290100 - RNA, 19 nt, Artificial Sequence
  Description of Artificial Sequence: Synthetic oligonucleotide
ugaagguugccacacagua

SEQ ID NO: 290101 - RNA, 19 nt, Artificial Sequence
  Description of Artificial Sequence: Synthetic oligonucleotide
aguuccggcauuccagagc

SEQ ID NO: 290102 - RNA, 19 nt, Artificial Sequence
  Description of Artificial Sequence: Synthetic oligonucleotide
gugaccacuaacauuagcc

SEQ ID NO: 290103 - RNA, 19 nt, Artificial Sequence
  Description of Artificial Sequence: Synthetic oligonucleotide
aauacuguacaggucagaa

SEQ ID NO: 290104 - RNA, 19 nt, Artificial Sequence
  Description of Artificial Sequence: Synthetic oligonucleotide
aaauaaggauuuccauucu

SEQ ID NO: 290105 - RNA, 19 nt, Artificial Sequence
  Description of Artificial Sequence: Synthetic oligonucleotide
gacccuaaauccaucaaag

SEQ ID NO: 290106 - RNA, 19 nt, Artificial Sequence
  Description of Artificial Sequence: Synthetic oligonucleotide
auaaggauuuccauucuuc

SEQ ID NO: 290107 - RNA, 19 nt, Artificial Sequence
  Description of Artificial Sequence: Synthetic oligonucleotide
uucgaauauaugcaauguc

SEQ ID NO: 290108 - RNA, 19 nt, Artificial Sequence
  Description of Artificial Sequence: Synthetic oligonucleotide
aucaaaggguuguuuguuc

SEQ ID NO: 290109 - RNA, 19 nt, Artificial Sequence
  Description of Artificial Sequence: Synthetic oligonucleotide
ucuauaugaaacagcuguc

SEQ ID NO: 290110 - RNA, 19 nt, Artificial Sequence
  Description of Artificial Sequence: Synthetic oligonucleotide
ugggaaaauaaggauuucc

SEQ ID NO: 290111 - RNA, 19 nt, Artificial Sequence
  Description of Artificial Sequence: Synthetic oligonucleotide
ucaaaggguuguuuguuca

SEQ ID NO: 290112 - RNA, 19 nt, Artificial Sequence
  Description of Artificial Sequence: Synthetic oligonucleotide
agauuaucacuugugacug

SEQ ID NO: 290113 - RNA, 19 nt, Artificial Sequence
  Description of Artificial Sequence: Synthetic oligonucleotide
aauaaggauuuccauucuu

SEQ ID NO: 290114 - RNA, 19 nt, Artificial Sequence
  Description of Artificial Sequence: Synthetic oligonucleotide
uguauauuccuugggcucc

SEQ ID NO: 290115 - RNA, 19 nt, Artificial Sequence
  Description of Artificial Sequence: Synthetic oligonucleotide
agagugaccacuaacauua

SEQ ID NO: 290116 - RNA, 19 nt, Artificial Sequence
  Description of Artificial Sequence: Synthetic oligonucleotide
uggggugcaaaacaaugca

SEQ ID NO: 290117 - RNA, 19 nt, Artificial Sequence
  Description of Artificial Sequence: Synthetic oligonucleotide
cuaucaaacccuguuugcg

SEQ ID NO: 290118 - RNA, 19 nt, Artificial Sequence
  Description of Artificial Sequence: Synthetic oligonucleotide
aagucaaauccuuguaaau

SEQ ID NO: 290119 - RNA, 19 nt, Artificial Sequence
  Description of Artificial Sequence: Synthetic oligonucleotide
uguacuugaugugagccca

SEQ ID NO: 290120 - RNA, 19 nt, Artificial Sequence
  Description of Artificial Sequence: Synthetic oligonucleotide
uuagggagucauacagagg

SEQ ID NO: 290121 - RNA, 19 nt, Artificial Sequence
  Description of Artificial Sequence: Synthetic oligonucleotide
acuaaucacuauuaagaaa

SEQ ID NO: 290122 - RNA, 19 nt, Artificial Sequence
  Description of Artificial Sequence: Synthetic oligonucleotide
cacacacacaaacacacac

SEQ ID NO: 290123 - RNA, 19 nt, Artificial Sequence
  Description of Artificial Sequence: Synthetic oligonucleotide
cucaguucaaugcaugcug

SEQ ID NO: 290124 - RNA, 19 nt, Artificial Sequence
  Description of Artificial Sequence: Synthetic oligonucleotide
ugugugacuguugaacugc

SEQ ID NO: 290125 - RNA, 19 nt, Artificial Sequence
  Description of Artificial Sequence: Synthetic oligonucleotide
uuucgaauauaugcaaugu

SEQ ID NO: 290126 - RNA, 19 nt, Artificial Sequence
  Description of Artificial Sequence: Synthetic oligonucleotide
ugagccucaccuauagaca

SEQ ID NO: 290127 - RNA, 19 nt, Artificial Sequence
  Description of Artificial Sequence: Synthetic oligonucleotide
cccuaaauccaucaaaggg

SEQ ID NO: 290128 - RNA, 19 nt, Artificial Sequence
  Description of Artificial Sequence: Synthetic oligonucleotide
aagguagcauucgaagguc

SEQ ID NO: 290129 - RNA, 19 nt, Artificial Sequence
  Description of Artificial Sequence: Synthetic oligonucleotide
ugugagcccagaauuuccc

SEQ ID NO: 290130 - RNA, 19 nt, Artificial Sequence
  Description of Artificial Sequence: Synthetic oligonucleotide
guuccggcauuccagagcc

SEQ ID NO: 290131 - RNA, 19 nt, Artificial Sequence
  Description of Artificial Sequence: Synthetic oligonucleotide
uugccguaaaucaucgcca

SEQ ID NO: 290132 - RNA, 19 nt, Artificial Sequence
  Description of Artificial Sequence: Synthetic oligonucleotide
ucauaaagcagggagucaa

SEQ ID NO: 290133 - RNA, 19 nt, Artificial Sequence
  Description of Artificial Sequence: Synthetic oligonucleotide
uaucaaacccuguuugcgu

SEQ ID NO: 290134 - RNA, 19 nt, Artificial Sequence
  Description of Artificial Sequence: Synthetic oligonucleotide
aaggcauaacaugaacuug

SEQ ID NO: 290135 - RNA, 19 nt, Artificial Sequence
  Description of Artificial Sequence: Synthetic oligonucleotide
acccuaaauccaucaaagg

SEQ ID NO: 290136 - RNA, 19 nt, Artificial Sequence
  Description of Artificial Sequence: Synthetic oligonucleotide
aaggaaaguaugugcaguu

SEQ ID NO: 290137 - RNA, 19 nt, Artificial Sequence
  Description of Artificial Sequence: Synthetic oligonucleotide
ucuuucgaauauaugcaau

SEQ ID NO: 290138 - RNA, 19 nt, Artificial Sequence
  Description of Artificial Sequence: Synthetic oligonucleotide
ucccuaggaaauaagucaa

SEQ ID NO: 290139 - RNA, 19 nt, Artificial Sequence
  Description of Artificial Sequence: Synthetic oligonucleotide
uucaugaccagaccucagu

SEQ ID NO: 290140 - RNA, 19 nt, Artificial Sequence
  Description of Artificial Sequence: Synthetic oligonucleotide
uaacauaucuugccguaaa

SEQ ID NO: 290141 - RNA, 19 nt, Artificial Sequence
  Description of Artificial Sequence: Synthetic oligonucleotide
ugccgaauugcuagguaag

SEQ ID NO: 290142 - RNA, 19 nt, Artificial Sequence
  Description of Artificial Sequence: Synthetic oligonucleotide
uaauaacauuaauacucac

SEQ ID NO: 290143 - RNA, 19 nt, Artificial Sequence
  Description of Artificial Sequence: Synthetic oligonucleotide
gugaauaggucaauggcug

SEQ ID NO: 290144 - RNA, 19 nt, Artificial Sequence
  Description of Artificial Sequence: Synthetic oligonucleotide
aauguccuacuuuuaucau

SEQ ID NO: 290145 - RNA, 19 nt, Artificial Sequence
  Description of Artificial Sequence: Synthetic oligonucleotide
uuacaugguuucuagucuc

SEQ ID NO: 290146 - RNA, 19 nt, Artificial Sequence
  Description of Artificial Sequence: Synthetic oligonucleotide
ucaaccuguuccuuaggga

SEQ ID NO: 290147 - RNA, 19 nt, Artificial Sequence
  Description of Artificial Sequence: Synthetic oligonucleotide
ugagagacccuaaauccau

SEQ ID NO: 290148 - RNA, 19 nt, Artificial Sequence
  Description of Artificial Sequence: Synthetic oligonucleotide
auggauacauagcuuacaa

SEQ ID NO: 290149 - RNA, 19 nt, Artificial Sequence
  Description of Artificial Sequence: Synthetic oligonucleotide
cagaggaucuggauaaaug

SEQ ID NO: 290150 - RNA, 19 nt, Artificial Sequence
  Description of Artificial Sequence: Synthetic oligonucleotide
ugugccauucucaacuaua

SEQ ID NO: 290151 - RNA, 19 nt, Artificial Sequence
  Description of Artificial Sequence: Synthetic oligonucleotide
auaagucugaacagcaaug

SEQ ID NO: 290152 - RNA, 19 nt, Artificial Sequence
  Description of Artificial Sequence: Synthetic oligonucleotide
ggacuuaaggcauaacaug

SEQ ID NO: 290153 - RNA, 19 nt, Artificial Sequence
  Description of Artificial Sequence: Synthetic oligonucleotide
cuuuaggccuccuuugcac

SEQ ID NO: 290154 - RNA, 19 nt, Artificial Sequence
  Description of Artificial Sequence: Synthetic oligonucleotide
aaucagcuuaaagugaaua

SEQ ID NO: 290155 - RNA, 19 nt, Artificial Sequence
  Description of Artificial Sequence: Synthetic oligonucleotide
ugaauaggucaauggcugc

SEQ ID NO: 290156 - RNA, 19 nt, Artificial Sequence
  Description of Artificial Sequence: Synthetic oligonucleotide
auaugaaacagcuguccau

SEQ ID NO: 290157 - RNA, 19 nt, Artificial Sequence
  Description of Artificial Sequence: Synthetic oligonucleotide
ccguuuauaaccaaauuuc

SEQ ID NO: 290158 - RNA, 19 nt, Artificial Sequence
  Description of Artificial Sequence: Synthetic oligonucleotide
uacauagcuuacaaaggua

SEQ ID NO: 290159 - RNA, 19 nt, Artificial Sequence
  Description of Artificial Sequence: Synthetic oligonucleotide
aauuucccuaggaaauaag

SEQ ID NO: 290160 - RNA, 19 nt, Artificial Sequence
  Description of Artificial Sequence: Synthetic oligonucleotide
cuauuaagaaaucuugugu

SEQ ID NO: 290161 - RNA, 19 nt, Artificial Sequence
  Description of Artificial Sequence: Synthetic oligonucleotide
ggacagauuauguaaauaa

SEQ ID NO: 290162 - RNA, 19 nt, Artificial Sequence
  Description of Artificial Sequence: Synthetic oligonucleotide
uucucaacuauagaugcau

SEQ ID NO: 290163 - RNA, 19 nt, Artificial Sequence
  Description of Artificial Sequence: Synthetic oligonucleotide
agucuuucgaauauaugca

SEQ ID NO: 290164 - RNA, 19 nt, Artificial Sequence
  Description of Artificial Sequence: Synthetic oligonucleotide
auauggauacauagcuuac

SEQ ID NO: 290165 - RNA, 19 nt, Artificial Sequence
  Description of Artificial Sequence: Synthetic oligonucleotide
uauggauacauagcuuaca

SEQ ID NO: 290166 - RNA, 19 nt, Artificial Sequence
  Description of Artificial Sequence: Synthetic oligonucleotide
aauaacgcauucugugcuu

SEQ ID NO: 290167 - RNA, 19 nt, Artificial Sequence
  Description of Artificial Sequence: Synthetic oligonucleotide
uugcacuggaucugcauga

SEQ ID NO: 290168 - RNA, 19 nt, Artificial Sequence
  Description of Artificial Sequence: Synthetic oligonucleotide
uuugcguguacaguguuuc

SEQ ID NO: 290169 - RNA, 19 nt, Artificial Sequence
  Description of Artificial Sequence: Synthetic oligonucleotide
aagugcccaaaaucuauau

SEQ ID NO: 290170 - RNA, 19 nt, Artificial Sequence
  Description of Artificial Sequence: Synthetic oligonucleotide
auauaugcaaugucaucaa

SEQ ID NO: 290171 - RNA, 19 nt, Artificial Sequence
  Description of Artificial Sequence: Synthetic oligonucleotide
ugauaguaaaauggguuaa

SEQ ID NO: 290172 - RNA, 19 nt, Artificial Sequence
  Description of Artificial Sequence: Synthetic oligonucleotide
agagacccuaaauccauca

SEQ ID NO: 290173 - RNA, 19 nt, Artificial Sequence
  Description of Artificial Sequence: Synthetic oligonucleotide
acccacuucaaaucauaag

SEQ ID NO: 290174 - RNA, 19 nt, Artificial Sequence
  Description of Artificial Sequence: Synthetic oligonucleotide
agucugaacagcaauggga

SEQ ID NO: 290175 - RNA, 19 nt, Artificial Sequence
  Description of Artificial Sequence: Synthetic oligonucleotide
auagacaagagaaaagcua

SEQ ID NO: 290176 - RNA, 19 nt, Artificial Sequence
  Description of Artificial Sequence: Synthetic oligonucleotide
ugaacuaguuuagugcuau

SEQ ID NO: 290177 - RNA, 19 nt, Artificial Sequence
  Description of Artificial Sequence: Synthetic oligonucleotide
gagauuggcaugcugccga

SEQ ID NO: 290178 - RNA, 19 nt, Artificial Sequence
  Description of Artificial Sequence: Synthetic oligonucleotide
augauugugccauucucaa

SEQ ID NO: 290179 - RNA, 19 nt, Artificial Sequence
  Description of Artificial Sequence: Synthetic oligonucleotide
ucaaacaacugaguagaaa

SEQ ID NO: 290180 - RNA, 19 nt, Artificial Sequence
  Description of Artificial Sequence: Synthetic oligonucleotide
uucaaugcaugcugcuuga

SEQ ID NO: 290181 - RNA, 19 nt, Artificial Sequence
  Description of Artificial Sequence: Synthetic oligonucleotide
uucccguuuauaaccaaau

SEQ ID NO: 290182 - RNA, 19 nt, Artificial Sequence
  Description of Artificial Sequence: Synthetic oligonucleotide
uagguaagccuuguaacac

SEQ ID NO: 290183 - RNA, 19 nt, Artificial Sequence
  Description of Artificial Sequence: Synthetic oligonucleotide
ugauagucuacuugguauu

SEQ ID NO: 290184 - RNA, 19 nt, Artificial Sequence
  Description of Artificial Sequence: Synthetic oligonucleotide
agacccuaaauccaucaaa

SEQ ID NO: 290185 - RNA, 19 nt, Artificial Sequence
  Description of Artificial Sequence: Synthetic oligonucleotide
uaaggccagagucuuucga

SEQ ID NO: 290186 - RNA, 19 nt, Artificial Sequence
  Description of Artificial Sequence: Synthetic oligonucleotide
ugaucacugcuguacuuga

SEQ ID NO: 290187 - RNA, 19 nt, Artificial Sequence
  Description of Artificial Sequence: Synthetic oligonucleotide
aucacuauuaagaaaucuu

SEQ ID NO: 290188 - RNA, 19 nt, Artificial Sequence
  Description of Artificial Sequence: Synthetic oligonucleotide
aucugaaguguuaacauau

SEQ ID NO: 290189 - RNA, 19 nt, Artificial Sequence
  Description of Artificial Sequence: Synthetic oligonucleotide
cuuaacagaagcugcagcu

SEQ ID NO: 290190 - RNA, 19 nt, Artificial Sequence
  Description of Artificial Sequence: Synthetic oligonucleotide
uuuaggccuccuuugcacu

SEQ ID NO: 290191 - RNA, 19 nt, Artificial Sequence
  Description of Artificial Sequence: Synthetic oligonucleotide
auuucccuaggaaauaagu

SEQ ID NO: 290192 - RNA, 19 nt, Artificial Sequence
  Description of Artificial Sequence: Synthetic oligonucleotide
agugaauacuguacagguc

SEQ ID NO: 290193 - RNA, 19 nt, Artificial Sequence
  Description of Artificial Sequence: Synthetic oligonucleotide
aucauaagucugaacagca

SEQ ID NO: 290194 - RNA, 19 nt, Artificial Sequence
  Description of Artificial Sequence: Synthetic oligonucleotide
agucaaauccuuguaaaua

SEQ ID NO: 290195 - RNA, 19 nt, Artificial Sequence
  Description of Artificial Sequence: Synthetic oligonucleotide
aaaucuagagugaccacua

SEQ ID NO: 290196 - RNA, 19 nt, Artificial Sequence
  Description of Artificial Sequence: Synthetic oligonucleotide
aaagcuaaccaugcuguua

SEQ ID NO: 290197 - RNA, 19 nt, Artificial Sequence
  Description of Artificial Sequence: Synthetic oligonucleotide
auaugcaaugucaucaaaa

SEQ ID NO: 290198 - RNA, 19 nt, Artificial Sequence
  Description of Artificial Sequence: Synthetic oligonucleotide
ugugacuguugaacugcag

SEQ ID NO: 290199 - RNA, 19 nt, Artificial Sequence
  Description of Artificial Sequence: Synthetic oligonucleotide
gcuugaaugggauguaaug

SEQ ID NO: 290200 - RNA, 19 nt, Artificial Sequence
  Description of Artificial Sequence: Synthetic oligonucleotide
cuauaauauaaauagccuu

SEQ ID NO: 290201 - RNA, 19 nt, Artificial Sequence
  Description of Artificial Sequence: Synthetic oligonucleotide
augugagcccagaauuucc

SEQ ID NO: 290202 - RNA, 19 nt, Artificial Sequence
  Description of Artificial Sequence: Synthetic oligonucleotide
gaucuggauaaauggaaua

SEQ ID NO: 290203 - RNA, 19 nt, Artificial Sequence
  Description of Artificial Sequence: Synthetic oligonucleotide
aauugcuagguaagccuug

SEQ ID NO: 290204 - RNA, 19 nt, Artificial Sequence
  Description of Artificial Sequence: Synthetic oligonucleotide
uguuucaauuauagagcau

SEQ ID NO: 290205 - RNA, 19 nt, Artificial Sequence
  Description of Artificial Sequence: Synthetic oligonucleotide
augaucacugcuguacuug

SEQ ID NO: 290206 - RNA, 19 nt, Artificial Sequence
  Description of Artificial Sequence: Synthetic oligonucleotide
gaaaucuagagugaccacu

SEQ ID NO: 290207 - RNA, 19 nt, Artificial Sequence
  Description of Artificial Sequence: Synthetic oligonucleotide
agacaagagaaaagcuaac

SEQ ID NO: 290208 - RNA, 19 nt, Artificial Sequence
  Description of Artificial Sequence: Synthetic oligonucleotide
aauggcugcaucauauauu

SEQ ID NO: 290209 - RNA, 19 nt, Artificial Sequence
  Description of Artificial Sequence: Synthetic oligonucleotide
uggauacauagcuuacaaa

SEQ ID NO: 290210 - RNA, 19 nt, Artificial Sequence
  Description of Artificial Sequence: Synthetic oligonucleotide
ugagaguuucucaccacuu

SEQ ID NO: 290211 - RNA, 19 nt, Artificial Sequence
  Description of Artificial Sequence: Synthetic oligonucleotide
gcuuacucagagcuaaagc

SEQ ID NO: 290212 - RNA, 19 nt, Artificial Sequence
  Description of Artificial Sequence: Synthetic oligonucleotide
gaucugaaguguuaacaua

SEQ ID NO: 290213 - RNA, 19 nt, Artificial Sequence
  Description of Artificial Sequence: Synthetic oligonucleotide
aggaaaguaugugcaguuc

SEQ ID NO: 290214 - RNA, 19 nt, Artificial Sequence
  Description of Artificial Sequence: Synthetic oligonucleotide
caauuucauguacuuaaca

SEQ ID NO: 290215 - RNA, 19 nt, Artificial Sequence
  Description of Artificial Sequence: Synthetic oligonucleotide
gaugcucaauaacgcauuc

SEQ ID NO: 290216 - RNA, 19 nt, Artificial Sequence
  Description of Artificial Sequence: Synthetic oligonucleotide
aguccuaaugcuguuccug

SEQ ID NO: 290217 - RNA, 19 nt, Artificial Sequence
  Description of Artificial Sequence: Synthetic oligonucleotide
uccaauccccaagaugaag

SEQ ID NO: 290218 - RNA, 19 nt, Artificial Sequence
  Description of Artificial Sequence: Synthetic oligonucleotide
ugcuugaaugggauguaau

SEQ ID NO: 290219 - RNA, 19 nt, Artificial Sequence
  Description of Artificial Sequence: Synthetic oligonucleotide
acaaucagcuuaaagugaa

SEQ ID NO: 290220 - RNA, 19 nt, Artificial Sequence
  Description of Artificial Sequence: Synthetic oligonucleotide
ccuguuugcguguacagug

SEQ ID NO: 290221 - RNA, 19 nt, Artificial Sequence
  Description of Artificial Sequence: Synthetic oligonucleotide
aucuugccguaaaucaucg

SEQ ID NO: 290222 - RNA, 19 nt, Artificial Sequence
  Description of Artificial Sequence: Synthetic oligonucleotide
gaugugagcccagaauuuc

SEQ ID NO: 290223 - RNA, 19 nt, Artificial Sequence
  Description of Artificial Sequence: Synthetic oligonucleotide
auuauagagcauguuguuu

SEQ ID NO: 290224 - RNA, 19 nt, Artificial Sequence
  Description of Artificial Sequence: Synthetic oligonucleotide
aaagccucuugcucaguuu

SEQ ID NO: 290225 - RNA, 19 nt, Artificial Sequence
  Description of Artificial Sequence: Synthetic oligonucleotide
aaguguugcuccucauaaa

SEQ ID NO: 290226 - RNA, 19 nt, Artificial Sequence
  Description of Artificial Sequence: Synthetic oligonucleotide
gauagucuacuugguauuc

SEQ ID NO: 290227 - RNA, 19 nt, Artificial Sequence
  Description of Artificial Sequence: Synthetic oligonucleotide
aaguccuaaugcuguuccu

SEQ ID NO: 290228 - RNA, 19 nt, Artificial Sequence
  Description of Artificial Sequence: Synthetic oligonucleotide
caaguguugcuccucauaa

SEQ ID NO: 290229 - RNA, 19 nt, Artificial Sequence
  Description of Artificial Sequence: Synthetic oligonucleotide
agcucugacaugaugucug

SEQ ID NO: 290230 - RNA, 19 nt, Artificial Sequence
  Description of Artificial Sequence: Synthetic oligonucleotide
ucaccccaaguguugcucc

SEQ ID NO: 290231 - RNA, 19 nt, Artificial Sequence
  Description of Artificial Sequence: Synthetic oligonucleotide
agguaagccuuguaacaca

SEQ ID NO: 290232 - RNA, 19 nt, Artificial Sequence
  Description of Artificial Sequence: Synthetic oligonucleotide
cuaaggccagagucuuucg

SEQ ID NO: 290233 - RNA, 19 nt, Artificial Sequence
  Description of Artificial Sequence: Synthetic oligonucleotide
ggguuguuuguucaaagca

SEQ ID NO: 290234 - RNA, 19 nt, Artificial Sequence
  Description of Artificial Sequence: Synthetic oligonucleotide
auuagcccuacaucuugga

SEQ ID NO: 290235 - RNA, 19 nt, Artificial Sequence
  Description of Artificial Sequence: Synthetic oligonucleotide
gacugugccauccccgcac

SEQ ID NO: 290236 - RNA, 19 nt, Artificial Sequence
  Description of Artificial Sequence: Synthetic oligonucleotide
agaccugaccacuuugaaa

SEQ ID NO: 290237 - RNA, 19 nt, Artificial Sequence
  Description of Artificial Sequence: Synthetic oligonucleotide
auacacacacacaaacaca

SEQ ID NO: 290238 - RNA, 19 nt, Artificial Sequence
  Description of Artificial Sequence: Synthetic oligonucleotide
agcuuacucagagcuaaag

SEQ ID NO: 290239 - RNA, 19 nt, Artificial Sequence
  Description of Artificial Sequence: Synthetic oligonucleotide
cacacguucccguuuauaa

SEQ ID NO: 290240 - RNA, 19 nt, Artificial Sequence
  Description of Artificial Sequence: Synthetic oligonucleotide
uuccuuagggagucauaca

SEQ ID NO: 290241 - RNA, 19 nt, Artificial Sequence
  Description of Artificial Sequence: Synthetic oligonucleotide
uugucguccagccgccaug

SEQ ID NO: 290242 - RNA, 19 nt, Artificial Sequence
  Description of Artificial Sequence: Synthetic oligonucleotide
gaugguguggaagauccaa

SEQ ID NO: 290243 - RNA, 19 nt, Artificial Sequence
  Description of Artificial Sequence: Synthetic oligonucleotide
ugauagugugagaguuucu

SEQ ID NO: 290244 - RNA, 19 nt, Artificial Sequence
  Description of Artificial Sequence: Synthetic oligonucleotide
aacccuguuugcguguaca

SEQ ID NO: 290245 - RNA, 19 nt, Artificial Sequence
  Description of Artificial Sequence: Synthetic oligonucleotide
gguuucuagucucucauaa

SEQ ID NO: 290246 - RNA, 19 nt, Artificial Sequence
  Description of Artificial Sequence: Synthetic oligonucleotide
uugguuguguccacauuuu

SEQ ID NO: 290247 - RNA, 19 nt, Artificial Sequence
  Description of Artificial Sequence: Synthetic oligonucleotide
guagcucugacaugauguc

SEQ ID NO: 290248 - RNA, 19 nt, Artificial Sequence
  Description of Artificial Sequence: Synthetic oligonucleotide
acuaugggacagauuaugu

SEQ ID NO: 290249 - RNA, 19 nt, Artificial Sequence
  Description of Artificial Sequence: Synthetic oligonucleotide
gucuuucgaauauaugcaa

SEQ ID NO: 290250 - RNA, 19 nt, Artificial Sequence
  Description of Artificial Sequence: Synthetic oligonucleotide
auacucacuucuauuuucu

SEQ ID NO: 290251 - RNA, 19 nt, Artificial Sequence
  Description of Artificial Sequence: Synthetic oligonucleotide
augcaugacuaugggacag

SEQ ID NO: 290252 - RNA, 19 nt, Artificial Sequence
  Description of Artificial Sequence: Synthetic oligonucleotide
aucuuucaccaugauguug

SEQ ID NO: 290253 - RNA, 19 nt, Artificial Sequence
  Description of Artificial Sequence: Synthetic oligonucleotide
aggaucuggauaaauggaa

SEQ ID NO: 290254 - RNA, 19 nt, Artificial Sequence
  Description of Artificial Sequence: Synthetic oligonucleotide
auaacgcauucugugcuug

SEQ ID NO: 290255 - RNA, 19 nt, Artificial Sequence
  Description of Artificial Sequence: Synthetic oligonucleotide
cauaauccggaugaucuga

SEQ ID NO: 290256 - RNA, 19 nt, Artificial Sequence
  Description of Artificial Sequence: Synthetic oligonucleotide
ccaagaugaagguugccac

SEQ ID NO: 290257 - RNA, 19 nt, Artificial Sequence
  Description of Artificial Sequence: Synthetic oligonucleotide
acccuguuugcguguacag

SEQ ID NO: 290258 - RNA, 19 nt, Artificial Sequence
  Description of Artificial Sequence: Synthetic oligonucleotide
guacuuaacagaagcugca

SEQ ID NO: 290259 - RNA, 19 nt, Artificial Sequence
  Description of Artificial Sequence: Synthetic oligonucleotide
ucccguuuauaaccaaauu

SEQ ID NO: 290260 - RNA, 19 nt, Artificial Sequence
  Description of Artificial Sequence: Synthetic oligonucleotide
gagcuaaagcagucacagc

SEQ ID NO: 290261 - RNA, 19 nt, Artificial Sequence
  Description of Artificial Sequence: Synthetic oligonucleotide
gaccacuaacauuagcccu

SEQ ID NO: 290262 - RNA, 19 nt, Artificial Sequence
  Description of Artificial Sequence: Synthetic oligonucleotide
gaguagaaaucuagaguga

SEQ ID NO: 290263 - RNA, 19 nt, Artificial Sequence
  Description of Artificial Sequence: Synthetic oligonucleotide
ugcguguacaguguuucaa

SEQ ID NO: 290264 - RNA, 19 nt, Artificial Sequence
  Description of Artificial Sequence: Synthetic oligonucleotide
uguuugcguguacaguguu

SEQ ID NO: 290265 - RNA, 19 nt, Artificial Sequence
  Description of Artificial Sequence: Synthetic oligonucleotide
uuugucguccagccgccau

SEQ ID NO: 290266 - RNA, 19 nt, Artificial Sequence
  Description of Artificial Sequence: Synthetic oligonucleotide
ccuaaauccaucaaagggu

SEQ ID NO: 290267 - RNA, 19 nt, Artificial Sequence
  Description of Artificial Sequence: Synthetic oligonucleotide
auggguuaauguccuacuu

SEQ ID NO: 290268 - RNA, 19 nt, Artificial Sequence
  Description of Artificial Sequence: Synthetic oligonucleotide
aggguuuaagagucaggau

SEQ ID NO: 290269 - RNA, 19 nt, Artificial Sequence
  Description of Artificial Sequence: Synthetic oligonucleotide
acacacacaaacacacacu

SEQ ID NO: 290270 - RNA, 19 nt, Artificial Sequence
  Description of Artificial Sequence: Synthetic oligonucleotide
uaacgcauucugugcuuga

SEQ ID NO: 290271 - RNA, 19 nt, Artificial Sequence
  Description of Artificial Sequence: Synthetic oligonucleotide
ugccguaaaucaucgccau

SEQ ID NO: 290272 - RNA, 19 nt, Artificial Sequence
  Description of Artificial Sequence: Synthetic oligonucleotide
gugacuguugaacugcagu

SEQ ID NO: 290273 - RNA, 19 nt, Artificial Sequence
  Description of Artificial Sequence: Synthetic oligonucleotide
cuaugggacagauuaugua

SEQ ID NO: 290274 - RNA, 19 nt, Artificial Sequence
  Description of Artificial Sequence: Synthetic oligonucleotide
guguugcuccucauaaagc

SEQ ID NO: 290275 - RNA, 19 nt, Artificial Sequence
  Description of Artificial Sequence: Synthetic oligonucleotide
gagucaggaugauagucua

SEQ ID NO: 290276 - RNA, 19 nt, Artificial Sequence
  Description of Artificial Sequence: Synthetic oligonucleotide
uguuccuuagggagucaua

SEQ ID NO: 290277 - RNA, 19 nt, Artificial Sequence
  Description of Artificial Sequence: Synthetic oligonucleotide
gcucauuauucuaaagcug

SEQ ID NO: 290278 - RNA, 19 nt, Artificial Sequence
  Description of Artificial Sequence: Synthetic oligonucleotide
augcugccgaauugcuagg

SEQ ID NO: 290279 - RNA, 19 nt, Artificial Sequence
  Description of Artificial Sequence: Synthetic oligonucleotide
ugguuguguccacauuuua

SEQ ID NO: 290280 - RNA, 19 nt, Artificial Sequence
  Description of Artificial Sequence: Synthetic oligonucleotide
ugcuauugugccggucucc

SEQ ID NO: 290281 - RNA, 19 nt, Artificial Sequence
  Description of Artificial Sequence: Synthetic oligonucleotide
caggaugcucaauaacgca

SEQ ID NO: 290282 - RNA, 19 nt, Artificial Sequence
  Description of Artificial Sequence: Synthetic oligonucleotide
gaccuugugaauaggucaa

SEQ ID NO: 290283 - RNA, 19 nt, Artificial Sequence
  Description of Artificial Sequence: Synthetic oligonucleotide
agaaacgacagcaguggaa

SEQ ID NO: 290284 - RNA, 19 nt, Artificial Sequence
  Description of Artificial Sequence: Synthetic oligonucleotide
ugcuguuaccaaugauaaa

SEQ ID NO: 290285 - RNA, 19 nt, Artificial Sequence
  Description of Artificial Sequence: Synthetic oligonucleotide
aauccccaagaugaagguu

SEQ ID NO: 290286 - RNA, 19 nt, Artificial Sequence
  Description of Artificial Sequence: Synthetic oligonucleotide
aacgcauucugugcuugaa

SEQ ID NO: 290287 - RNA, 19 nt, Artificial Sequence
  Description of Artificial Sequence: Synthetic oligonucleotide
gccauucucaacuauagau

SEQ ID NO: 290288 - RNA, 19 nt, Artificial Sequence
  Description of Artificial Sequence: Synthetic oligonucleotide
uagcucugacaugaugucu

SEQ ID NO: 290289 - RNA, 19 nt, Artificial Sequence
  Description of Artificial Sequence: Synthetic oligonucleotide
gucaaaauacccacuucaa

SEQ ID NO: 290290 - RNA, 19 nt, Artificial Sequence
  Description of Artificial Sequence: Synthetic oligonucleotide
caauaacgcauucugugcu

SEQ ID NO: 290291 - RNA, 19 nt, Artificial Sequence
  Description of Artificial Sequence: Synthetic oligonucleotide
gguuuugccagauguucuc

SEQ ID NO: 290292 - RNA, 19 nt, Artificial Sequence
  Description of Artificial Sequence: Synthetic oligonucleotide
ugcagcuuacucagagcua

SEQ ID NO: 290293 - RNA, 19 nt, Artificial Sequence
  Description of Artificial Sequence: Synthetic oligonucleotide
gcuuaaagugaauacugua

SEQ ID NO: 290294 - RNA, 19 nt, Artificial Sequence
  Description of Artificial Sequence: Synthetic oligonucleotide
uugcguguacaguguuuca

SEQ ID NO: 290295 - RNA, 19 nt, Artificial Sequence
  Description of Artificial Sequence: Synthetic oligonucleotide
uguauguauuuuggggauu

SEQ ID NO: 290296 - RNA, 19 nt, Artificial Sequence
  Description of Artificial Sequence: Synthetic oligonucleotide
augaugugcaucauucauu

SEQ ID NO: 290297 - RNA, 19 nt, Artificial Sequence
  Description of Artificial Sequence: Synthetic oligonucleotide
ccaauuucauguacuuaac

SEQ ID NO: 290298 - RNA, 19 nt, Artificial Sequence
  Description of Artificial Sequence: Synthetic oligonucleotide
uccggcauuccagagccaa

SEQ ID NO: 290299 - RNA, 19 nt, Artificial Sequence
  Description of Artificial Sequence: Synthetic oligonucleotide
auagagcauguuguuucug

SEQ ID NO: 290300 - RNA, 19 nt, Artificial Sequence
  Description of Artificial Sequence: Synthetic oligonucleotide
cuugguuguguccacauuu

SEQ ID NO: 290301 - RNA, 19 nt, Artificial Sequence
  Description of Artificial Sequence: Synthetic oligonucleotide
cugccgaauugcuagguaa

SEQ ID NO: 290302 - RNA, 19 nt, Artificial Sequence
  Description of Artificial Sequence: Synthetic oligonucleotide
agauauggauacauagcuu

SEQ ID NO: 290303 - RNA, 19 nt, Artificial Sequence
  Description of Artificial Sequence: Synthetic oligonucleotide
aggccagagucuuucgaau

SEQ ID NO: 290304 - RNA, 19 nt, Artificial Sequence
  Description of Artificial Sequence: Synthetic oligonucleotide
cugaaacaguagcucugac

SEQ ID NO: 290305 - RNA, 19 nt, Artificial Sequence
  Description of Artificial Sequence: Synthetic oligonucleotide
ugacugugccauccccgca

SEQ ID NO: 290306 - RNA, 19 nt, Artificial Sequence
  Description of Artificial Sequence: Synthetic oligonucleotide
accacuaacauuagcccua

SEQ ID NO: 290307 - RNA, 19 nt, Artificial Sequence
  Description of Artificial Sequence: Synthetic oligonucleotide
caugaccuugugaauaggu

SEQ ID NO: 290308 - RNA, 19 nt, Artificial Sequence
  Description of Artificial Sequence: Synthetic oligonucleotide
cccacuucaaaucauaagu

SEQ ID NO: 290309 - RNA, 19 nt, Artificial Sequence
  Description of Artificial Sequence: Synthetic oligonucleotide
uacuugaugugagcccaga

SEQ ID NO: 290310 - RNA, 19 nt, Artificial Sequence
  Description of Artificial Sequence: Synthetic oligonucleotide
ugcaugacuaugggacaga

SEQ ID NO: 290311 - RNA, 19 nt, Artificial Sequence
  Description of Artificial Sequence: Synthetic oligonucleotide
caugaugugcaucauucau

SEQ ID NO: 290312 - RNA, 19 nt, Artificial Sequence
  Description of Artificial Sequence: Synthetic oligonucleotide
ccccaauggacagacagcc

SEQ ID NO: 290313 - RNA, 19 nt, Artificial Sequence
  Description of Artificial Sequence: Synthetic oligonucleotide
acauuaauacucacuucua

SEQ ID NO: 290314 - RNA, 19 nt, Artificial Sequence
  Description of Artificial Sequence: Synthetic oligonucleotide
augcucaauaacgcauucu

SEQ ID NO: 290315 - RNA, 19 nt, Artificial Sequence
  Description of Artificial Sequence: Synthetic oligonucleotide
uggcacacguucccguuua

SEQ ID NO: 290316 - RNA, 19 nt, Artificial Sequence
  Description of Artificial Sequence: Synthetic oligonucleotide
gcaaaaggcaagucccuuc

SEQ ID NO: 290317 - RNA, 19 nt, Artificial Sequence
  Description of Artificial Sequence: Synthetic oligonucleotide
gcucugacaugaugucugg

SEQ ID NO: 290318 - RNA, 19 nt, Artificial Sequence
  Description of Artificial Sequence: Synthetic oligonucleotide
gccgccaugaugugcauca

SEQ ID NO: 290319 - RNA, 19 nt, Artificial Sequence
  Description of Artificial Sequence: Synthetic oligonucleotide
ugugcuugaaugggaugua

SEQ ID NO: 290320 - RNA, 19 nt, Artificial Sequence
  Description of Artificial Sequence: Synthetic oligonucleotide
cucauuguucugaaacagu

SEQ ID NO: 290321 - RNA, 19 nt, Artificial Sequence
  Description of Artificial Sequence: Synthetic oligonucleotide
caguuccggcauuccagag

SEQ ID NO: 290322 - RNA, 19 nt, Artificial Sequence
  Description of Artificial Sequence: Synthetic oligonucleotide
caccuauagacaagagaaa

SEQ ID NO: 290323 - RNA, 19 nt, Artificial Sequence
  Description of Artificial Sequence: Synthetic oligonucleotide
cacacacaaacacacacuu

SEQ ID NO: 290324 - RNA, 19 nt, Artificial Sequence
  Description of Artificial Sequence: Synthetic oligonucleotide
auaauccggaugaucugaa

SEQ ID NO: 290325 - RNA, 19 nt, Artificial Sequence
  Description of Artificial Sequence: Synthetic oligonucleotide
cacuuugaaaugggacaug

SEQ ID NO: 290326 - RNA, 19 nt, Artificial Sequence
  Description of Artificial Sequence: Synthetic oligonucleotide
cuagagugaccacuaacau

SEQ ID NO: 290327 - RNA, 19 nt, Artificial Sequence
  Description of Artificial Sequence: Synthetic oligonucleotide
cauugagauauggauacau

SEQ ID NO: 290328 - RNA, 19 nt, Artificial Sequence
  Description of Artificial Sequence: Synthetic oligonucleotide
ugcugccgaauugcuaggu

SEQ ID NO: 290329 - RNA, 19 nt, Artificial Sequence
  Description of Artificial Sequence: Synthetic oligonucleotide
gagagacccuaaauccauc

SEQ ID NO: 290330 - RNA, 19 nt, Artificial Sequence
  Description of Artificial Sequence: Synthetic oligonucleotide
guacuugaugugagcccag

SEQ ID NO: 290331 - RNA, 19 nt, Artificial Sequence
  Description of Artificial Sequence: Synthetic oligonucleotide
cuucgaugagccccacaca

SEQ ID NO: 290332 - RNA, 19 nt, Artificial Sequence
  Description of Artificial Sequence: Synthetic oligonucleotide
cagagucuuucgaauauau

SEQ ID NO: 290333 - RNA, 19 nt, Artificial Sequence
  Description of Artificial Sequence: Synthetic oligonucleotide
ugccacucacugccaugca

SEQ ID NO: 290334 - RNA, 19 nt, Artificial Sequence
  Description of Artificial Sequence: Synthetic oligonucleotide
acacacacacaaacacaca

SEQ ID NO: 290335 - RNA, 19 nt, Artificial Sequence
  Description of Artificial Sequence: Synthetic oligonucleotide
gcauaacaugaacuugcuc

SEQ ID NO: 290336 - RNA, 19 nt, Artificial Sequence
  Description of Artificial Sequence: Synthetic oligonucleotide
gcaaaacaaugcaugacua

SEQ ID NO: 290337 - RNA, 19 nt, Artificial Sequence
  Description of Artificial Sequence: Synthetic oligonucleotide
auggcacacguucccguuu

SEQ ID NO: 290338 - RNA, 19 nt, Artificial Sequence
  Description of Artificial Sequence: Synthetic oligonucleotide
caguucaaccuguuccuua

SEQ ID NO: 290339 - RNA, 19 nt, Artificial Sequence
  Description of Artificial Sequence: Synthetic oligonucleotide
cauccccgcaccaacgucu

SEQ ID NO: 290340 - RNA, 19 nt, Artificial Sequence
  Description of Artificial Sequence: Synthetic oligonucleotide
uuuugucguccagccgcca

SEQ ID NO: 290341 - RNA, 19 nt, Artificial Sequence
  Description of Artificial Sequence: Synthetic oligonucleotide
accccaaguguugcuccuc

SEQ ID NO: 290342 - RNA, 19 nt, Artificial Sequence
  Description of Artificial Sequence: Synthetic oligonucleotide
ggaagauccaauccauuuu

SEQ ID NO: 290343 - RNA, 19 nt, Artificial Sequence
  Description of Artificial Sequence: Synthetic oligonucleotide
guauguauuuuggggauuu

SEQ ID NO: 290344 - RNA, 19 nt, Artificial Sequence
  Description of Artificial Sequence: Synthetic oligonucleotide
gcuccuuuacuaaucacua

SEQ ID NO: 290345 - RNA, 19 nt, Artificial Sequence
  Description of Artificial Sequence: Synthetic oligonucleotide
gccgaauugcuagguaagc

SEQ ID NO: 290346 - RNA, 19 nt, Artificial Sequence
  Description of Artificial Sequence: Synthetic oligonucleotide
accucaguagaaggguuua

SEQ ID NO: 290347 - RNA, 19 nt, Artificial Sequence
  Description of Artificial Sequence: Synthetic oligonucleotide
augaacuaguuuagugcua

SEQ ID NO: 290348 - RNA, 19 nt, Artificial Sequence
  Description of Artificial Sequence: Synthetic oligonucleotide
guaacugguuucauaugau

SEQ ID NO: 290349 - RNA, 19 nt, Artificial Sequence
  Description of Artificial Sequence: Synthetic oligonucleotide
ccagccgccaugaugugca

SEQ ID NO: 290350 - RNA, 19 nt, Artificial Sequence
  Description of Artificial Sequence: Synthetic oligonucleotide
agccgccaugaugugcauc

SEQ ID NO: 290351 - RNA, 19 nt, Artificial Sequence
  Description of Artificial Sequence: Synthetic oligonucleotide
gcuauugugccggucucca

SEQ ID NO: 290352 - RNA, 19 nt, Artificial Sequence
  Description of Artificial Sequence: Synthetic oligonucleotide
cccguuuauaaccaaauuu

SEQ ID NO: 290353 - RNA, 19 nt, Artificial Sequence
  Description of Artificial Sequence: Synthetic oligonucleotide
ccucaccuauagacaagag

SEQ ID NO: 290354 - RNA, 19 nt, Artificial Sequence
  Description of Artificial Sequence: Synthetic oligonucleotide
ccuuagggagucauacaga

SEQ ID NO: 290355 - RNA, 19 nt, Artificial Sequence
  Description of Artificial Sequence: Synthetic oligonucleotide
gccaagcaucauugaaaac

SEQ ID NO: 290356 - RNA, 19 nt, Artificial Sequence
  Description of Artificial Sequence: Synthetic oligonucleotide
gccucaccuauagacaaga

SEQ ID NO: 290357 - RNA, 19 nt, Artificial Sequence
  Description of Artificial Sequence: Synthetic oligonucleotide
cuccaauccccaagaugaa

SEQ ID NO: 290358 - RNA, 19 nt, Artificial Sequence
  Description of Artificial Sequence: Synthetic oligonucleotide
gccagcacaugaccuugug

SEQ ID NO: 290359 - RNA, 19 nt, Artificial Sequence
  Description of Artificial Sequence: Synthetic oligonucleotide
gugcuugaaugggauguaa

SEQ ID NO: 290360 - RNA, 19 nt, Artificial Sequence
  Description of Artificial Sequence: Synthetic oligonucleotide
cccuucaccccaaguguug

SEQ ID NO: 290361 - RNA, 19 nt, Artificial Sequence
  Description of Artificial Sequence: Synthetic oligonucleotide
uccccgcaccaacgucugc

SEQ ID NO: 290362 - RNA, 19 nt, Artificial Sequence
  Description of Artificial Sequence: Synthetic oligonucleotide
ggccagagucuuucgaaua

SEQ ID NO: 290363 - RNA, 19 nt, Artificial Sequence
  Description of Artificial Sequence: Synthetic oligonucleotide
ggaucuggauaaauggaau

SEQ ID NO: 290364 - RNA, 19 nt, Artificial Sequence
  Description of Artificial Sequence: Synthetic oligonucleotide
ccaauggacagacagccau

SEQ ID NO: 290365 - RNA, 19 nt, Artificial Sequence
  Description of Artificial Sequence: Synthetic oligonucleotide
auccccgcaccaacgucug

SEQ ID NO: 290366 - RNA, 19 nt, Artificial Sequence
  Description of Artificial Sequence: Synthetic oligonucleotide
caucuuggauggaugcuuu

SEQ ID NO: 290367 - RNA, 19 nt, Artificial Sequence
  Description of Artificial Sequence: Synthetic oligonucleotide
ccccgcaccaacgucugcc

SEQ ID NO: 290368 - RNA, 19 nt, Artificial Sequence
  Description of Artificial Sequence: Synthetic oligonucleotide
cacuugugacugcuuucaa

SEQ ID NO: 290369 - RNA, 19 nt, Artificial Sequence
  Description of Artificial Sequence: Synthetic oligonucleotide
gaccucaguagaaggguuu

SEQ ID NO: 290370 - RNA, 19 nt, Artificial Sequence
  Description of Artificial Sequence: Synthetic oligonucleotide
cuauagaugcauggaugau

SEQ ID NO: 290371 - RNA, 19 nt, Artificial Sequence
  Description of Artificial Sequence: Synthetic oligonucleotide
guccagccgccaugaugug

SEQ ID NO: 290372 - RNA, 19 nt, Artificial Sequence
  Description of Artificial Sequence: Synthetic oligonucleotide
gcucaauaacgcauucugu

SEQ ID NO: 290373 - RNA, 19 nt, Artificial Sequence
  Description of Artificial Sequence: Synthetic oligonucleotide
ggcauaacaugaacuugcu

SEQ ID NO: 290374 - RNA, 19 nt, Artificial Sequence
  Description of Artificial Sequence: Synthetic oligonucleotide
cacuucgaugagccccaca

SEQ ID NO: 290375 - RNA, 19 nt, Artificial Sequence
  Description of Artificial Sequence: Synthetic oligonucleotide
caaacccuguuugcgugua

SEQ ID NO: 290376 - RNA, 19 nt, Artificial Sequence
  Description of Artificial Sequence: Synthetic oligonucleotide
gggcaucguguagaaacga

SEQ ID NO: 290377 - RNA, 19 nt, Artificial Sequence
  Description of Artificial Sequence: Synthetic oligonucleotide
gggauguaaugaaguugga

SEQ ID NO: 290378 - RNA, 19 nt, Artificial Sequence
  Description of Artificial Sequence: Synthetic oligonucleotide
ccuaggaaauaagucaaau

SEQ ID NO: 290379 - RNA, 19 nt, Artificial Sequence
  Description of Artificial Sequence: Synthetic oligonucleotide
guuugcguguacaguguuu

SEQ ID NO: 290380 - RNA, 19 nt, Artificial Sequence
  Description of Artificial Sequence: Synthetic oligonucleotide
gcugccgaauugcuaggua

SEQ ID NO: 290381 - RNA, 19 nt, Artificial Sequence
  Description of Artificial Sequence: Synthetic oligonucleotide
ccguaaaucaucgccauuu

SEQ ID NO: 290382 - RNA, 19 nt, Artificial Sequence
  Description of Artificial Sequence: Synthetic oligonucleotide
ggaugcucaauaacgcauu

SEQ ID NO: 290383 - RNA, 19 nt, Artificial Sequence
  Description of Artificial Sequence: Synthetic oligonucleotide
cugugccauccccgcacca

SEQ ID NO: 290384 - RNA, 19 nt, Artificial Sequence
  Description of Artificial Sequence: Synthetic oligonucleotide
ccauccccgcaccaacguc

SEQ ID NO: 290385 - RNA, 19 nt, Artificial Sequence
  Description of Artificial Sequence: Synthetic oligonucleotide
caccaacgucugccugcug

SEQ ID NO: 290386 - RNA, 19 nt, Artificial Sequence
  Description of Artificial Sequence: Synthetic oligonucleotide
gccuugguuguguccacau

SEQ ID NO: 290387 - RNA, 19 nt, Artificial Sequence
  Description of Artificial Sequence: Synthetic oligonucleotide
ccgcaccaacgucugccug

SEQ ID NO: 290388 - RNA, 19 nt, Artificial Sequence
  Description of Artificial Sequence: Synthetic oligonucleotide
gcacacguucccguuuaua

SEQ ID NO: 290389 - RNA, 19 nt, Artificial Sequence
  Description of Artificial Sequence: Synthetic oligonucleotide
gccguaaaucaucgccauu

SEQ ID NO: 290390 - RNA, 19 nt, Artificial Sequence
  Description of Artificial Sequence: Synthetic oligonucleotide
cccuguuugcguguacagu

SEQ ID NO: 290391 - RNA, 19 nt, Artificial Sequence
  Description of Artificial Sequence: Synthetic oligonucleotide
cguaaaucaucgccauuuu

SEQ ID NO: 290392 - RNA, 19 nt, Artificial Sequence
  Description of Artificial Sequence: Synthetic oligonucleotide
cccgcaccaacgucugccu

SEQ ID NO: 290393 - RNA, 19 nt, Artificial Sequence
  Description of Artificial Sequence: Synthetic oligonucleotide
ggcacacguucccguuuau

SEQ ID NO: 290394 - RNA, 19 nt, Artificial Sequence
  Description of Artificial Sequence: Synthetic oligonucleotide
ccuugguuguguccacauu

SEQ ID NO: 290395 - RNA, 19 nt, Artificial Sequence
  Description of Artificial Sequence: Synthetic oligonucleotide
cagccgccaugaugugcau

SEQ ID NO: 290396 - RNA, 19 nt, Artificial Sequence
  Description of Artificial Sequence: Synthetic oligonucleotide
ccgccaugaugugcaucau

SEQ ID NO: 290397 - RNA, 19 nt, Artificial Sequence
  Description of Artificial Sequence: Synthetic oligonucleotide
aaauaaaacacacacacac

SEQ ID NO: 290398 - RNA, 19 nt, Artificial Sequence
  Description of Artificial Sequence: Synthetic oligonucleotide
aaaacacacacacacacac

SEQ ID NO: 290399 - RNA, 19 nt, Artificial Sequence
  Description of Artificial Sequence: Synthetic oligonucleotide
aaaucauggaccuugaaca

SEQ ID NO: 290400 - RNA, 19 nt, Artificial Sequence
  Description of Artificial Sequence: Synthetic oligonucleotide
aaccauuagaacuauuacg

SEQ ID NO: 290401 - RNA, 19 nt, Artificial Sequence
  Description of Artificial Sequence: Synthetic oligonucleotide
auaaaacacacacacacac

SEQ ID NO: 290402 - RNA, 19 nt, Artificial Sequence
  Description of Artificial Sequence: Synthetic oligonucleotide
ugauacuagauacagaucu

SEQ ID NO: 290403 - RNA, 19 nt, Artificial Sequence
  Description of Artificial Sequence: Synthetic oligonucleotide
aacacacacacacacacac

SEQ ID NO: 290404 - RNA, 19 nt, Artificial Sequence
  Description of Artificial Sequence: Synthetic oligonucleotide
uguaaacuaagauaaagca

SEQ ID NO: 290405 - RNA, 19 nt, Artificial Sequence
  Description of Artificial Sequence: Synthetic oligonucleotide
auguucaacagucugauuc

SEQ ID NO: 290406 - RNA, 19 nt, Artificial Sequence
  Description of Artificial Sequence: Synthetic oligonucleotide
augauuaucaagcagucag

SEQ ID NO: 290407 - RNA, 19 nt, Artificial Sequence
  Description of Artificial Sequence: Synthetic oligonucleotide
gacgccacagauuauaugg

SEQ ID NO: 290408 - RNA, 19 nt, Artificial Sequence
  Description of Artificial Sequence: Synthetic oligonucleotide
uuauucuugucaaacauca

SEQ ID NO: 290409 - RNA, 19 nt, Artificial Sequence
  Description of Artificial Sequence: Synthetic oligonucleotide
uuuacaaucuccucgauau

SEQ ID NO: 290410 - RNA, 19 nt, Artificial Sequence
  Description of Artificial Sequence: Synthetic oligonucleotide
aacauuuguaaccuacguc

SEQ ID NO: 290411 - RNA, 19 nt, Artificial Sequence
  Description of Artificial Sequence: Synthetic oligonucleotide
acaauacuucuucaaaacc

SEQ ID NO: 290412 - RNA, 19 nt, Artificial Sequence
  Description of Artificial Sequence: Synthetic oligonucleotide
acauuuguaaccuacgucu

SEQ ID NO: 290413 - RNA, 19 nt, Artificial Sequence
  Description of Artificial Sequence: Synthetic oligonucleotide
aaauauccaagucugacau

SEQ ID NO: 290414 - RNA, 19 nt, Artificial Sequence
  Description of Artificial Sequence: Synthetic oligonucleotide
uccacgguaauacugaaug

SEQ ID NO: 290415 - RNA, 19 nt, Artificial Sequence
  Description of Artificial Sequence: Synthetic oligonucleotide
uccaaaugauacuagauac

SEQ ID NO: 290416 - RNA, 19 nt, Artificial Sequence
  Description of Artificial Sequence: Synthetic oligonucleotide
cauuagaacuauuacgucc

SEQ ID NO: 290417 - RNA, 19 nt, Artificial Sequence
  Description of Artificial Sequence: Synthetic oligonucleotide
agaguaggcaacugcaugc

SEQ ID NO: 290418 - RNA, 19 nt, Artificial Sequence
  Description of Artificial Sequence: Synthetic oligonucleotide
uuacucaaccauuagaacu

SEQ ID NO: 290419 - RNA, 19 nt, Artificial Sequence
  Description of Artificial Sequence: Synthetic oligonucleotide
aaaauauccaagucugaca

SEQ ID NO: 290420 - RNA, 19 nt, Artificial Sequence
  Description of Artificial Sequence: Synthetic oligonucleotide
aggucuauacagcaaaugg

SEQ ID NO: 290421 - RNA, 19 nt, Artificial Sequence
  Description of Artificial Sequence: Synthetic oligonucleotide
uguaagucaaucuucacau

SEQ ID NO: 290422 - RNA, 19 nt, Artificial Sequence
  Description of Artificial Sequence: Synthetic oligonucleotide
uuaucaagcagucagcuua

SEQ ID NO: 290423 - RNA, 19 nt, Artificial Sequence
  Description of Artificial Sequence: Synthetic oligonucleotide
ugcuaguuaaaaccaaaag

SEQ ID NO: 290424 - RNA, 19 nt, Artificial Sequence
  Description of Artificial Sequence: Synthetic oligonucleotide
uuguaagucaaucuucaca

SEQ ID NO: 290425 - RNA, 19 nt, Artificial Sequence
  Description of Artificial Sequence: Synthetic oligonucleotide
uguaugauugcaaggaguc

SEQ ID NO: 290426 - RNA, 19 nt, Artificial Sequence
  Description of Artificial Sequence: Synthetic oligonucleotide
agcugcacaauauauaugu

SEQ ID NO: 290427 - RNA, 19 nt, Artificial Sequence
  Description of Artificial Sequence: Synthetic oligonucleotide
ucuagaguaggcaacugca

SEQ ID NO: 290428 - RNA, 19 nt, Artificial Sequence
  Description of Artificial Sequence: Synthetic oligonucleotide
agggacucuagcaagaacc

SEQ ID NO: 290429 - RNA, 19 nt, Artificial Sequence
  Description of Artificial Sequence: Synthetic oligonucleotide
uaaaaccaaaagugggugg

SEQ ID NO: 290430 - RNA, 19 nt, Artificial Sequence
  Description of Artificial Sequence: Synthetic oligonucleotide
aacuaagauaaagcaacac

SEQ ID NO: 290431 - RNA, 19 nt, Artificial Sequence
  Description of Artificial Sequence: Synthetic oligonucleotide
ugaucauugaauuuauaau

SEQ ID NO: 290432 - RNA, 19 nt, Artificial Sequence
  Description of Artificial Sequence: Synthetic oligonucleotide
aucuagaguaggcaacugc

SEQ ID NO: 290433 - RNA, 19 nt, Artificial Sequence
  Description of Artificial Sequence: Synthetic oligonucleotide
aauuggacacgaugguggg

SEQ ID NO: 290434 - RNA, 19 nt, Artificial Sequence
  Description of Artificial Sequence: Synthetic oligonucleotide
guacuucgcauuuagcugg

SEQ ID NO: 290435 - RNA, 19 nt, Artificial Sequence
  Description of Artificial Sequence: Synthetic oligonucleotide
uuuacacaacagucuaugg

SEQ ID NO: 290436 - RNA, 19 nt, Artificial Sequence
  Description of Artificial Sequence: Synthetic oligonucleotide
caaaugauacuagauacag

SEQ ID NO: 290437 - RNA, 19 nt, Artificial Sequence
  Description of Artificial Sequence: Synthetic oligonucleotide
agaaugauuaucaagcagu

SEQ ID NO: 290438 - RNA, 19 nt, Artificial Sequence
  Description of Artificial Sequence: Synthetic oligonucleotide
ugguuuauauuacaaugac

SEQ ID NO: 290439 - RNA, 19 nt, Artificial Sequence
  Description of Artificial Sequence: Synthetic oligonucleotide
ucaaguauguaugauugca

SEQ ID NO: 290440 - RNA, 19 nt, Artificial Sequence
  Description of Artificial Sequence: Synthetic oligonucleotide
aaagucagacccugauggg

SEQ ID NO: 290441 - RNA, 19 nt, Artificial Sequence
  Description of Artificial Sequence: Synthetic oligonucleotide
uuguagucuucuaaguuca

SEQ ID NO: 290442 - RNA, 19 nt, Artificial Sequence
  Description of Artificial Sequence: Synthetic oligonucleotide
gcagauauguucuuggucc

SEQ ID NO: 290443 - RNA, 19 nt, Artificial Sequence
  Description of Artificial Sequence: Synthetic oligonucleotide
agauucaacaaucaacaau

SEQ ID NO: 290444 - RNA, 19 nt, Artificial Sequence
  Description of Artificial Sequence: Synthetic oligonucleotide
ugacuuucagccacaagug

SEQ ID NO: 290445 - RNA, 19 nt, Artificial Sequence
  Description of Artificial Sequence: Synthetic oligonucleotide
uauaauugagagcaucuuu

SEQ ID NO: 290446 - RNA, 19 nt, Artificial Sequence
  Description of Artificial Sequence: Synthetic oligonucleotide
aaacaucgcuucuuuccac

SEQ ID NO: 290447 - RNA, 19 nt, Artificial Sequence
  Description of Artificial Sequence: Synthetic oligonucleotide
uccaugauuucccaucagc

SEQ ID NO: 290448 - RNA, 19 nt, Artificial Sequence
  Description of Artificial Sequence: Synthetic oligonucleotide
uacugaaugugcagagugg

SEQ ID NO: 290449 - RNA, 19 nt, Artificial Sequence
  Description of Artificial Sequence: Synthetic oligonucleotide
uguugugacuuucagccac

SEQ ID NO: 290450 - RNA, 19 nt, Artificial Sequence
  Description of Artificial Sequence: Synthetic oligonucleotide
ugauuaucaagcagucagc

SEQ ID NO: 290451 - RNA, 19 nt, Artificial Sequence
  Description of Artificial Sequence: Synthetic oligonucleotide
auacuagauacagaucuac

SEQ ID NO: 290452 - RNA, 19 nt, Artificial Sequence
  Description of Artificial Sequence: Synthetic oligonucleotide
aauacuccagaaccguacu

SEQ ID NO: 290453 - RNA, 19 nt, Artificial Sequence
  Description of Artificial Sequence: Synthetic oligonucleotide
aaguacagagcagagcuug

SEQ ID NO: 290454 - RNA, 19 nt, Artificial Sequence
  Description of Artificial Sequence: Synthetic oligonucleotide
agucuauggagcuuccguc

SEQ ID NO: 290455 - RNA, 19 nt, Artificial Sequence
  Description of Artificial Sequence: Synthetic oligonucleotide
agcuuuacaccugagaaug

SEQ ID NO: 290456 - RNA, 19 nt, Artificial Sequence
  Description of Artificial Sequence: Synthetic oligonucleotide
uacuauuuaauuccaugau

SEQ ID NO: 290457 - RNA, 19 nt, Artificial Sequence
  Description of Artificial Sequence: Synthetic oligonucleotide
uuuuguagucuucuaaguu

SEQ ID NO: 290458 - RNA, 19 nt, Artificial Sequence
  Description of Artificial Sequence: Synthetic oligonucleotide
auggccaaagcuuuggacu

SEQ ID NO: 290459 - RNA, 19 nt, Artificial Sequence
  Description of Artificial Sequence: Synthetic oligonucleotide
uggaccuugaacaagucuu

SEQ ID NO: 290460 - RNA, 19 nt, Artificial Sequence
  Description of Artificial Sequence: Synthetic oligonucleotide
uaaaacacacacacacaca

SEQ ID NO: 290461 - RNA, 19 nt, Artificial Sequence
  Description of Artificial Sequence: Synthetic oligonucleotide
uagaguaggcaacugcaug

SEQ ID NO: 290462 - RNA, 19 nt, Artificial Sequence
  Description of Artificial Sequence: Synthetic oligonucleotide
cacacacagacacacacgc

SEQ ID NO: 290463 - RNA, 19 nt, Artificial Sequence
  Description of Artificial Sequence: Synthetic oligonucleotide
ucucucuuucaaauuagac

SEQ ID NO: 290464 - RNA, 19 nt, Artificial Sequence
  Description of Artificial Sequence: Synthetic oligonucleotide
aauaaaacacacacacaca

SEQ ID NO: 290465 - RNA, 19 nt, Artificial Sequence
  Description of Artificial Sequence: Synthetic oligonucleotide
uacucaaccauuagaacua

SEQ ID NO: 290466 - RNA, 19 nt, Artificial Sequence
  Description of Artificial Sequence: Synthetic oligonucleotide
aaccguacuucgcauuuag

SEQ ID NO: 290467 - RNA, 19 nt, Artificial Sequence
  Description of Artificial Sequence: Synthetic oligonucleotide
agauuauauggauucuaug

SEQ ID NO: 290468 - RNA, 19 nt, Artificial Sequence
  Description of Artificial Sequence: Synthetic oligonucleotide
uguucaauggccagcccca

SEQ ID NO: 290469 - RNA, 19 nt, Artificial Sequence
  Description of Artificial Sequence: Synthetic oligonucleotide
uuaauagauaauuccuuuu

SEQ ID NO: 290470 - RNA, 19 nt, Artificial Sequence
  Description of Artificial Sequence: Synthetic oligonucleotide
ugucauugacacuugucca

SEQ ID NO: 290471 - RNA, 19 nt, Artificial Sequence
  Description of Artificial Sequence: Synthetic oligonucleotide
gcugguaacauuuguaacc

SEQ ID NO: 290472 - RNA, 19 nt, Artificial Sequence
  Description of Artificial Sequence: Synthetic oligonucleotide
uuuuguuugcucuccacau

SEQ ID NO: 290473 - RNA, 19 nt, Artificial Sequence
  Description of Artificial Sequence: Synthetic oligonucleotide
augugggucagggugacgc

SEQ ID NO: 290474 - RNA, 19 nt, Artificial Sequence
  Description of Artificial Sequence: Synthetic oligonucleotide
uccagaaccguacuucgca

SEQ ID NO: 290475 - RNA, 19 nt, Artificial Sequence
  Description of Artificial Sequence: Synthetic oligonucleotide
ugcacugccgccuaguaaa

SEQ ID NO: 290476 - RNA, 19 nt, Artificial Sequence
  Description of Artificial Sequence: Synthetic oligonucleotide
uucgcauuuagcugggcca

SEQ ID NO: 290477 - RNA, 19 nt, Artificial Sequence
  Description of Artificial Sequence: Synthetic oligonucleotide
uugcucauuuccuuuggag

SEQ ID NO: 290478 - RNA, 19 nt, Artificial Sequence
  Description of Artificial Sequence: Synthetic oligonucleotide
acagcuacagcagucgagg

SEQ ID NO: 290479 - RNA, 19 nt, Artificial Sequence
  Description of Artificial Sequence: Synthetic oligonucleotide
ugaaugugcagaguggcca

SEQ ID NO: 290480 - RNA, 19 nt, Artificial Sequence
  Description of Artificial Sequence: Synthetic oligonucleotide
auuagaacuauuacgucca

SEQ ID NO: 290481 - RNA, 19 nt, Artificial Sequence
  Description of Artificial Sequence: Synthetic oligonucleotide
uuauauggauucuaugauu

SEQ ID NO: 290482 - RNA, 19 nt, Artificial Sequence
  Description of Artificial Sequence: Synthetic oligonucleotide
guaacauuuguaaccuacg

SEQ ID NO: 290483 - RNA, 19 nt, Artificial Sequence
  Description of Artificial Sequence: Synthetic oligonucleotide
cacacacacacacacacac

SEQ ID NO: 290484 - RNA, 19 nt, Artificial Sequence
  Description of Artificial Sequence: Synthetic oligonucleotide
guauguaugauugcaagga

SEQ ID NO: 290485 - RNA, 19 nt, Artificial Sequence
  Description of Artificial Sequence: Synthetic oligonucleotide
aacaucgcuucuuuccacu

SEQ ID NO: 290486 - RNA, 19 nt, Artificial Sequence
  Description of Artificial Sequence: Synthetic oligonucleotide
auauccugaucauugaauu

SEQ ID NO: 290487 - RNA, 19 nt, Artificial Sequence
  Description of Artificial Sequence: Synthetic oligonucleotide
agauggugcaaacaaggga

SEQ ID NO: 290488 - RNA, 19 nt, Artificial Sequence
  Description of Artificial Sequence: Synthetic oligonucleotide
aacuaagaaaagacaggag

SEQ ID NO: 290489 - RNA, 19 nt, Artificial Sequence
  Description of Artificial Sequence: Synthetic oligonucleotide
uccuuuagcagcugagucu

SEQ ID NO: 290490 - RNA, 19 nt, Artificial Sequence
  Description of Artificial Sequence: Synthetic oligonucleotide
uauucuugucaaacaucag

SEQ ID NO: 290491 - RNA, 19 nt, Artificial Sequence
  Description of Artificial Sequence: Synthetic oligonucleotide
uucaaguauguaugauugc

SEQ ID NO: 290492 - RNA, 19 nt, Artificial Sequence
  Description of Artificial Sequence: Synthetic oligonucleotide
caaccauuagaacuauuac

SEQ ID NO: 290493 - RNA, 19 nt, Artificial Sequence
  Description of Artificial Sequence: Synthetic oligonucleotide
aauccaaaugauacuagau

SEQ ID NO: 290494 - RNA, 19 nt, Artificial Sequence
  Description of Artificial Sequence: Synthetic oligonucleotide
cacacacacagacacacac

SEQ ID NO: 290495 - RNA, 19 nt, Artificial Sequence
  Description of Artificial Sequence: Synthetic oligonucleotide
aaaccaaaagugggugggg

SEQ ID NO: 290496 - RNA, 19 nt, Artificial Sequence
  Description of Artificial Sequence: Synthetic oligonucleotide
gagauggugcaaacaaggg

SEQ ID NO: 290497 - RNA, 19 nt, Artificial Sequence
  Description of Artificial Sequence: Synthetic oligonucleotide
gcaguuuagagucucuucc

SEQ ID NO: 290498 - RNA, 19 nt, Artificial Sequence
  Description of Artificial Sequence: Synthetic oligonucleotide
ugaagaucgcagcucucgc

SEQ ID NO: 290499 - RNA, 19 nt, Artificial Sequence
  Description of Artificial Sequence: Synthetic oligonucleotide
cacacacacacacacacuc

SEQ ID NO: 290500 - RNA, 19 nt, Artificial Sequence
  Description of Artificial Sequence: Synthetic oligonucleotide
cacaauguuccacucccgg

SEQ ID NO: 290501 - RNA, 19 nt, Artificial Sequence
  Description of Artificial Sequence: Synthetic oligonucleotide
aguuuagagucucuuccca

SEQ ID NO: 290502 - RNA, 19 nt, Artificial Sequence
  Description of Artificial Sequence: Synthetic oligonucleotide
auuucaucuagaguaggca

SEQ ID NO: 290503 - RNA, 19 nt, Artificial Sequence
  Description of Artificial Sequence: Synthetic oligonucleotide
agucagacccugauggggc

SEQ ID NO: 290504 - RNA, 19 nt, Artificial Sequence
  Description of Artificial Sequence: Synthetic oligonucleotide
uggagcuuuacaccugaga

SEQ ID NO: 290505 - RNA, 19 nt, Artificial Sequence
  Description of Artificial Sequence: Synthetic oligonucleotide
ucagcaugaggguuucagc

SEQ ID NO: 290506 - RNA, 19 nt, Artificial Sequence
  Description of Artificial Sequence: Synthetic oligonucleotide
acgaugguggguuugcacu

SEQ ID NO: 290507 - RNA, 19 nt, Artificial Sequence
  Description of Artificial Sequence: Synthetic oligonucleotide
uccccauaaauguacacuu

SEQ ID NO: 290508 - RNA, 19 nt, Artificial Sequence
  Description of Artificial Sequence: Synthetic oligonucleotide
caacuaagaaaagacagga

SEQ ID NO: 290509 - RNA, 19 nt, Artificial Sequence
  Description of Artificial Sequence: Synthetic oligonucleotide
acacaacagucuauggagc

SEQ ID NO: 290510 - RNA, 19 nt, Artificial Sequence
  Description of Artificial Sequence: Synthetic oligonucleotide
auaauugagagcaucuuua

SEQ ID NO: 290511 - RNA, 19 nt, Artificial Sequence
  Description of Artificial Sequence: Synthetic oligonucleotide
cuucgcauuuagcugggcc

SEQ ID NO: 290512 - RNA, 19 nt, Artificial Sequence
  Description of Artificial Sequence: Synthetic oligonucleotide
cagauauguucuugguccg

SEQ ID NO: 290513 - RNA, 19 nt, Artificial Sequence
  Description of Artificial Sequence: Synthetic oligonucleotide
gugaagaucgcagcucucg

SEQ ID NO: 290514 - RNA, 19 nt, Artificial Sequence
  Description of Artificial Sequence: Synthetic oligonucleotide
gagaggucccagcagcucc

SEQ ID NO: 290515 - RNA, 19 nt, Artificial Sequence
  Description of Artificial Sequence: Synthetic oligonucleotide
ggagugcucaaauaagccc

SEQ ID NO: 290516 - RNA, 19 nt, Artificial Sequence
  Description of Artificial Sequence: Synthetic oligonucleotide
gucuauggagcuuccgucc

SEQ ID NO: 290517 - RNA, 19 nt, Artificial Sequence
  Description of Artificial Sequence: Synthetic oligonucleotide
ugcugguaacauuuguaac

SEQ ID NO: 290518 - RNA, 19 nt, Artificial Sequence
  Description of Artificial Sequence: Synthetic oligonucleotide
ugauguucaacagucugau

SEQ ID NO: 290519 - RNA, 19 nt, Artificial Sequence
  Description of Artificial Sequence: Synthetic oligonucleotide
agggugacgccacagauua

SEQ ID NO: 290520 - RNA, 19 nt, Artificial Sequence
  Description of Artificial Sequence: Synthetic oligonucleotide
ugauguagcugauggcaga

SEQ ID NO: 290521 - RNA, 19 nt, Artificial Sequence
  Description of Artificial Sequence: Synthetic oligonucleotide
uaggugccauguucaaugg

SEQ ID NO: 290522 - RNA, 19 nt, Artificial Sequence
  Description of Artificial Sequence: Synthetic oligonucleotide
cucugcuagagucagguga

SEQ ID NO: 290523 - RNA, 19 nt, Artificial Sequence
  Description of Artificial Sequence: Synthetic oligonucleotide
ugaggguuucagcagcuuc

SEQ ID NO: 290524 - RNA, 19 nt, Artificial Sequence
  Description of Artificial Sequence: Synthetic oligonucleotide
uggaacuuguaagucaauc

SEQ ID NO: 290525 - RNA, 19 nt, Artificial Sequence
  Description of Artificial Sequence: Synthetic oligonucleotide
uuuacaguuggagcuuuac

SEQ ID NO: 290526 - RNA, 19 nt, Artificial Sequence
  Description of Artificial Sequence: Synthetic oligonucleotide
uuuacaccugagaaugauu

SEQ ID NO: 290527 - RNA, 19 nt, Artificial Sequence
  Description of Artificial Sequence: Synthetic oligonucleotide
uugcaaggaguccaucacu

SEQ ID NO: 290528 - RNA, 19 nt, Artificial Sequence
  Description of Artificial Sequence: Synthetic oligonucleotide
agauauguucuugguccgc

SEQ ID NO: 290529 - RNA, 19 nt, Artificial Sequence
  Description of Artificial Sequence: Synthetic oligonucleotide
acugugcuaguuaaaacca

SEQ ID NO: 290530 - RNA, 19 nt, Artificial Sequence
  Description of Artificial Sequence: Synthetic oligonucleotide
uacuucgcauuuagcuggg

SEQ ID NO: 290531 - RNA, 19 nt, Artificial Sequence
  Description of Artificial Sequence: Synthetic oligonucleotide
ccucacugugugaagaucg

SEQ ID NO: 290532 - RNA, 19 nt, Artificial Sequence
  Description of Artificial Sequence: Synthetic oligonucleotide
ggagcuuuacaccugagaa

SEQ ID NO: 290533 - RNA, 19 nt, Artificial Sequence
  Description of Artificial Sequence: Synthetic oligonucleotide
uagcugcacaauauauaug

SEQ ID NO: 290534 - RNA, 19 nt, Artificial Sequence
  Description of Artificial Sequence: Synthetic oligonucleotide
cuaguaaacggauccaucu

SEQ ID NO: 290535 - RNA, 19 nt, Artificial Sequence
  Description of Artificial Sequence: Synthetic oligonucleotide
uucaacagucugauuccac

SEQ ID NO: 290536 - RNA, 19 nt, Artificial Sequence
  Description of Artificial Sequence: Synthetic oligonucleotide
cuuggaacuuguaagucaa

SEQ ID NO: 290537 - RNA, 19 nt, Artificial Sequence
  Description of Artificial Sequence: Synthetic oligonucleotide
ucgauauccugaucauuga

SEQ ID NO: 290538 - RNA, 19 nt, Artificial Sequence
  Description of Artificial Sequence: Synthetic oligonucleotide
cugcaugccagcagaaaac

SEQ ID NO: 290539 - RNA, 19 nt, Artificial Sequence
  Description of Artificial Sequence: Synthetic oligonucleotide
uaucaagcagucagcuuaa

SEQ ID NO: 290540 - RNA, 19 nt, Artificial Sequence
  Description of Artificial Sequence: Synthetic oligonucleotide
cuuguaagucaaucuucac

SEQ ID NO: 290541 - RNA, 19 nt, Artificial Sequence
  Description of Artificial Sequence: Synthetic oligonucleotide
uccuucuacaggagucaag

SEQ ID NO: 290542 - RNA, 19 nt, Artificial Sequence
  Description of Artificial Sequence: Synthetic oligonucleotide
ucccuccccauaaauguac

SEQ ID NO: 290543 - RNA, 19 nt, Artificial Sequence
  Description of Artificial Sequence: Synthetic oligonucleotide
ugcaugccagcagaaaaca

SEQ ID NO: 290544 - RNA, 19 nt, Artificial Sequence
  Description of Artificial Sequence: Synthetic oligonucleotide
ccacagauuauauggauuc

SEQ ID NO: 290545 - RNA, 19 nt, Artificial Sequence
  Description of Artificial Sequence: Synthetic oligonucleotide
agcagaaaacaucgcuucu

SEQ ID NO: 290546 - RNA, 19 nt, Artificial Sequence
  Description of Artificial Sequence: Synthetic oligonucleotide
augauacuagauacagauc

SEQ ID NO: 290547 - RNA, 19 nt, Artificial Sequence
  Description of Artificial Sequence: Synthetic oligonucleotide
uauccugaucauugaauuu

SEQ ID NO: 290548 - RNA, 19 nt, Artificial Sequence
  Description of Artificial Sequence: Synthetic oligonucleotide
aaggcuuuacucaaccauu

SEQ ID NO: 290549 - RNA, 19 nt, Artificial Sequence
  Description of Artificial Sequence: Synthetic oligonucleotide
ucuggcaucucagcaugag

SEQ ID NO: 290550 - RNA, 19 nt, Artificial Sequence
  Description of Artificial Sequence: Synthetic oligonucleotide
auguaugauugcaaggagu

SEQ ID NO: 290551 - RNA, 19 nt, Artificial Sequence
  Description of Artificial Sequence: Synthetic oligonucleotide
agaaccguacuucgcauuu

SEQ ID NO: 290552 - RNA, 19 nt, Artificial Sequence
  Description of Artificial Sequence: Synthetic oligonucleotide
ugacgccacagauuauaug

SEQ ID NO: 290553 - RNA, 19 nt, Artificial Sequence
  Description of Artificial Sequence: Synthetic oligonucleotide
uuauuuacaguuggagcuu

SEQ ID NO: 290554 - RNA, 19 nt, Artificial Sequence
  Description of Artificial Sequence: Synthetic oligonucleotide
uccauggacucuucaagua

SEQ ID NO: 290555 - RNA, 19 nt, Artificial Sequence
  Description of Artificial Sequence: Synthetic oligonucleotide
cacacacacacacacucuc

SEQ ID NO: 290556 - RNA, 19 nt, Artificial Sequence
  Description of Artificial Sequence: Synthetic oligonucleotide
cagaucuacauguggguca

SEQ ID NO: 290557 - RNA, 19 nt, Artificial Sequence
  Description of Artificial Sequence: Synthetic oligonucleotide
auuaucaagcagucagcuu

SEQ ID NO: 290558 - RNA, 19 nt, Artificial Sequence
  Description of Artificial Sequence: Synthetic oligonucleotide
auuuguaaccuacgucuuu

SEQ ID NO: 290559 - RNA, 19 nt, Artificial Sequence
  Description of Artificial Sequence: Synthetic oligonucleotide
ucacccuagcugcacaaua

SEQ ID NO: 290560 - RNA, 19 nt, Artificial Sequence
  Description of Artificial Sequence: Synthetic oligonucleotide
auagcauaguuugguggag

SEQ ID NO: 290561 - RNA, 19 nt, Artificial Sequence
  Description of Artificial Sequence: Synthetic oligonucleotide
gucauugacacuuguccaa

SEQ ID NO: 290562 - RNA, 19 nt, Artificial Sequence
  Description of Artificial Sequence: Synthetic oligonucleotide
acucucucucucuuucucu

SEQ ID NO: 290563 - RNA, 19 nt, Artificial Sequence
  Description of Artificial Sequence: Synthetic oligonucleotide
uucagauggggaguggcaa

SEQ ID NO: 290564 - RNA, 19 nt, Artificial Sequence
  Description of Artificial Sequence: Synthetic oligonucleotide
acacacacagacacacacg

SEQ ID NO: 290565 - RNA, 19 nt, Artificial Sequence
  Description of Artificial Sequence: Synthetic oligonucleotide
acacacacacacucucucu

SEQ ID NO: 290566 - RNA, 19 nt, Artificial Sequence
  Description of Artificial Sequence: Synthetic oligonucleotide
aaacacacacacacacaca

SEQ ID NO: 290567 - RNA, 19 nt, Artificial Sequence
  Description of Artificial Sequence: Synthetic oligonucleotide
uagcauaguuugguggagc

SEQ ID NO: 290568 - RNA, 19 nt, Artificial Sequence
  Description of Artificial Sequence: Synthetic oligonucleotide
gguggguuugcacugccgc

SEQ ID NO: 290569 - RNA, 19 nt, Artificial Sequence
  Description of Artificial Sequence: Synthetic oligonucleotide
gaguaggcaacugcaugcc

SEQ ID NO: 290570 - RNA, 19 nt, Artificial Sequence
  Description of Artificial Sequence: Synthetic oligonucleotide
uuacaaucuccucgauauc

SEQ ID NO: 290571 - RNA, 19 nt, Artificial Sequence
  Description of Artificial Sequence: Synthetic oligonucleotide
cacacucucucucucuuuc

SEQ ID NO: 290572 - RNA, 19 nt, Artificial Sequence
  Description of Artificial Sequence: Synthetic oligonucleotide
cucucucucucuuucucuc

SEQ ID NO: 290573 - RNA, 19 nt, Artificial Sequence
  Description of Artificial Sequence: Synthetic oligonucleotide
cacacacacacacucucuc

SEQ ID NO: 290574 - RNA, 19 nt, Artificial Sequence
  Description of Artificial Sequence: Synthetic oligonucleotide
uuccgcugguugauguagc

SEQ ID NO: 290575 - RNA, 19 nt, Artificial Sequence
  Description of Artificial Sequence: Synthetic oligonucleotide
cacgcaccacugcacaugc

SEQ ID NO: 290576 - RNA, 19 nt, Artificial Sequence
  Description of Artificial Sequence: Synthetic oligonucleotide
uacaccugagaaugauuau

SEQ ID NO: 290577 - RNA, 19 nt, Artificial Sequence
  Description of Artificial Sequence: Synthetic oligonucleotide
uuagaacuauuacguccau

SEQ ID NO: 290578 - RNA, 19 nt, Artificial Sequence
  Description of Artificial Sequence: Synthetic oligonucleotide
cagcuccacgguaauacug

SEQ ID NO: 290579 - RNA, 19 nt, Artificial Sequence
  Description of Artificial Sequence: Synthetic oligonucleotide
uuggagcuuuacaccugag

SEQ ID NO: 290580 - RNA, 19 nt, Artificial Sequence
  Description of Artificial Sequence: Synthetic oligonucleotide
ucucucucucuuucucucu

SEQ ID NO: 290581 - RNA, 19 nt, Artificial Sequence
  Description of Artificial Sequence: Synthetic oligonucleotide
aggagauggugcaaacaag

SEQ ID NO: 290582 - RNA, 19 nt, Artificial Sequence
  Description of Artificial Sequence: Synthetic oligonucleotide
ucucucucuuucucucucu

SEQ ID NO: 290583 - RNA, 19 nt, Artificial Sequence
  Description of Artificial Sequence: Synthetic oligonucleotide
gugauguucaacagucuga

SEQ ID NO: 290584 - RNA, 19 nt, Artificial Sequence
  Description of Artificial Sequence: Synthetic oligonucleotide
auggugcaaacaagggagg

SEQ ID NO: 290585 - RNA, 19 nt, Artificial Sequence
  Description of Artificial Sequence: Synthetic oligonucleotide
acacacacucucucucucu

SEQ ID NO: 290586 - RNA, 19 nt, Artificial Sequence
  Description of Artificial Sequence: Synthetic oligonucleotide
uggguuugcacugccgccu

SEQ ID NO: 290587 - RNA, 19 nt, Artificial Sequence
  Description of Artificial Sequence: Synthetic oligonucleotide
cacgaugguggguuugcac

SEQ ID NO: 290588 - RNA, 19 nt, Artificial Sequence
  Description of Artificial Sequence: Synthetic oligonucleotide
auguugugacuuucagcca

SEQ ID NO: 290589 - RNA, 19 nt, Artificial Sequence
  Description of Artificial Sequence: Synthetic oligonucleotide
gaugguggguuugcacugc

SEQ ID NO: 290590 - RNA, 19 nt, Artificial Sequence
  Description of Artificial Sequence: Synthetic oligonucleotide
uccucgauauccugaucau

SEQ ID NO: 290591 - RNA, 19 nt, Artificial Sequence
  Description of Artificial Sequence: Synthetic oligonucleotide
ugugaagaucgcagcucuc

SEQ ID NO: 290592 - RNA, 19 nt, Artificial Sequence
  Description of Artificial Sequence: Synthetic oligonucleotide
accguacuucgcauuuagc

SEQ ID NO: 290593 - RNA, 19 nt, Artificial Sequence
  Description of Artificial Sequence: Synthetic oligonucleotide
gcaaaggggcuacagugug

SEQ ID NO: 290594 - RNA, 19 nt, Artificial Sequence
  Description of Artificial Sequence: Synthetic oligonucleotide
ugccagcagaaaacaucgc

SEQ ID NO: 290595 - RNA, 19 nt, Artificial Sequence
  Description of Artificial Sequence: Synthetic oligonucleotide
cagaacucugcuagaguca

SEQ ID NO: 290596 - RNA, 19 nt, Artificial Sequence
  Description of Artificial Sequence: Synthetic oligonucleotide
cuagugcuuggagggaagc

SEQ ID NO: 290597 - RNA, 19 nt, Artificial Sequence
  Description of Artificial Sequence: Synthetic oligonucleotide
uggugcaaacaagggaggu

SEQ ID NO: 290598 - RNA, 19 nt, Artificial Sequence
  Description of Artificial Sequence: Synthetic oligonucleotide
uauuuacaguuggagcuuu

SEQ ID NO: 290599 - RNA, 19 nt, Artificial Sequence
  Description of Artificial Sequence: Synthetic oligonucleotide
ggcacacacacagacacac

SEQ ID NO: 290600 - RNA, 19 nt, Artificial Sequence
  Description of Artificial Sequence: Synthetic oligonucleotide
ggcagauauguucuugguc

SEQ ID NO: 290601 - RNA, 19 nt, Artificial Sequence
  Description of Artificial Sequence: Synthetic oligonucleotide
cguacuucgcauuuagcug

SEQ ID NO: 290602 - RNA, 19 nt, Artificial Sequence
  Description of Artificial Sequence: Synthetic oligonucleotide
aaaccauccguugcugcuu

SEQ ID NO: 290603 - RNA, 19 nt, Artificial Sequence
  Description of Artificial Sequence: Synthetic oligonucleotide
cuucugcccgcucuuccag

SEQ ID NO: 290604 - RNA, 19 nt, Artificial Sequence
  Description of Artificial Sequence: Synthetic oligonucleotide
uccguccauggacucuuca

SEQ ID NO: 290605 - RNA, 19 nt, Artificial Sequence
  Description of Artificial Sequence: Synthetic oligonucleotide
aaccauccguugcugcuuu

SEQ ID NO: 290606 - RNA, 19 nt, Artificial Sequence
  Description of Artificial Sequence: Synthetic oligonucleotide
ggcuuuacucaaccauuag

SEQ ID NO: 290607 - RNA, 19 nt, Artificial Sequence
  Description of Artificial Sequence: Synthetic oligonucleotide
ccgccuaguaaacggaucc

SEQ ID NO: 290608 - RNA, 19 nt, Artificial Sequence
  Description of Artificial Sequence: Synthetic oligonucleotide
cuucagauggggaguggca

SEQ ID NO: 290609 - RNA, 19 nt, Artificial Sequence
  Description of Artificial Sequence: Synthetic oligonucleotide
aacugcaugccagcagaaa

SEQ ID NO: 290610 - RNA, 19 nt, Artificial Sequence
  Description of Artificial Sequence: Synthetic oligonucleotide
cucucucucuuucucucuc

SEQ ID NO: 290611 - RNA, 19 nt, Artificial Sequence
  Description of Artificial Sequence: Synthetic oligonucleotide
aggguuucagcagcuucag

SEQ ID NO: 290612 - RNA, 19 nt, Artificial Sequence
  Description of Artificial Sequence: Synthetic oligonucleotide
cacucucucucucuuucuc

SEQ ID NO: 290613 - RNA, 19 nt, Artificial Sequence
  Description of Artificial Sequence: Synthetic oligonucleotide
acacucucucucucuuucu

SEQ ID NO: 290614 - RNA, 19 nt, Artificial Sequence
  Description of Artificial Sequence: Synthetic oligonucleotide
gucuauacagcaaaugguu

SEQ ID NO: 290615 - RNA, 19 nt, Artificial Sequence
  Description of Artificial Sequence: Synthetic oligonucleotide
gauauguucuugguccgcu

SEQ ID NO: 290616 - RNA, 19 nt, Artificial Sequence
  Description of Artificial Sequence: Synthetic oligonucleotide
ucgcauuuagcugggccaa

SEQ ID NO: 290617 - RNA, 19 nt, Artificial Sequence
  Description of Artificial Sequence: Synthetic oligonucleotide
cagauuauauggauucuau

SEQ ID NO: 290618 - RNA, 19 nt, Artificial Sequence
  Description of Artificial Sequence: Synthetic oligonucleotide
auaugcacacacgcaggca

SEQ ID NO: 290619 - RNA, 19 nt, Artificial Sequence
  Description of Artificial Sequence: Synthetic oligonucleotide
ucucucuuucucucucuuu

SEQ ID NO: 290620 - RNA, 19 nt, Artificial Sequence
  Description of Artificial Sequence: Synthetic oligonucleotide
ccaaaugauacuagauaca

SEQ ID NO: 290621 - RNA, 19 nt, Artificial Sequence
  Description of Artificial Sequence: Synthetic oligonucleotide
auacuccagaaccguacuu

SEQ ID NO: 290622 - RNA, 19 nt, Artificial Sequence
  Description of Artificial Sequence: Synthetic oligonucleotide
guagcugauggcagauaug

SEQ ID NO: 290623 - RNA, 19 nt, Artificial Sequence
  Description of Artificial Sequence: Synthetic oligonucleotide
ccuaguaaacggauccauc

SEQ ID NO: 290624 - RNA, 19 nt, Artificial Sequence
  Description of Artificial Sequence: Synthetic oligonucleotide
gugugaagaucgcagcucu

SEQ ID NO: 290625 - RNA, 19 nt, Artificial Sequence
  Description of Artificial Sequence: Synthetic oligonucleotide
guggggagggcaaacacaa

SEQ ID NO: 290626 - RNA, 19 nt, Artificial Sequence
  Description of Artificial Sequence: Synthetic oligonucleotide
caguuggagcuuuacaccu

SEQ ID NO: 290627 - RNA, 19 nt, Artificial Sequence
  Description of Artificial Sequence: Synthetic oligonucleotide
acuucgcauuuagcugggc

SEQ ID NO: 290628 - RNA, 19 nt, Artificial Sequence
  Description of Artificial Sequence: Synthetic oligonucleotide
ucccgguuccgcugguuga

SEQ ID NO: 290629 - RNA, 19 nt, Artificial Sequence
  Description of Artificial Sequence: Synthetic oligonucleotide
gugcuaguuaaaaccaaaa

SEQ ID NO: 290630 - RNA, 19 nt, Artificial Sequence
  Description of Artificial Sequence: Synthetic oligonucleotide
aguuggagcuuuacaccug

SEQ ID NO: 290631 - RNA, 19 nt, Artificial Sequence
  Description of Artificial Sequence: Synthetic oligonucleotide
gggacucuagcaagaaccc

SEQ ID NO: 290632 - RNA, 19 nt, Artificial Sequence
  Description of Artificial Sequence: Synthetic oligonucleotide
agagcaucuuuaauagaua

SEQ ID NO: 290633 - RNA, 19 nt, Artificial Sequence
  Description of Artificial Sequence: Synthetic oligonucleotide
cagauucaacaaucaacaa

SEQ ID NO: 290634 - RNA, 19 nt, Artificial Sequence
  Description of Artificial Sequence: Synthetic oligonucleotide
cugguaacauuuguaaccu

SEQ ID NO: 290635 - RNA, 19 nt, Artificial Sequence
  Description of Artificial Sequence: Synthetic oligonucleotide
cauaguuugguggagcuuu

SEQ ID NO: 290636 - RNA, 19 nt, Artificial Sequence
  Description of Artificial Sequence: Synthetic oligonucleotide
cucccgguuccgcugguug

SEQ ID NO: 290637 - RNA, 19 nt, Artificial Sequence
  Description of Artificial Sequence: Synthetic oligonucleotide
cagcagacgcacagucccc

SEQ ID NO: 290638 - RNA, 19 nt, Artificial Sequence
  Description of Artificial Sequence: Synthetic oligonucleotide
cugugcuaguuaaaaccaa

SEQ ID NO: 290639 - RNA, 19 nt, Artificial Sequence
  Description of Artificial Sequence: Synthetic oligonucleotide
acacacacacacacucucu

SEQ ID NO: 290640 - RNA, 19 nt, Artificial Sequence
  Description of Artificial Sequence: Synthetic oligonucleotide
acacacacacacacacucu

SEQ ID NO: 290641 - RNA, 19 nt, Artificial Sequence
  Description of Artificial Sequence: Synthetic oligonucleotide
ggucuauacagcaaauggu

SEQ ID NO: 290642 - RNA, 19 nt, Artificial Sequence
  Description of Artificial Sequence: Synthetic oligonucleotide
ucuugguccgcuggcgguc

SEQ ID NO: 290643 - RNA, 19 nt, Artificial Sequence
  Description of Artificial Sequence: Synthetic oligonucleotide
ugauugcaaggaguccauc

SEQ ID NO: 290644 - RNA, 19 nt, Artificial Sequence
  Description of Artificial Sequence: Synthetic oligonucleotide
cacugccgccuaguaaacg

SEQ ID NO: 290645 - RNA, 19 nt, Artificial Sequence
  Description of Artificial Sequence: Synthetic oligonucleotide
guaaacggauccaucugcu

SEQ ID NO: 290646 - RNA, 19 nt, Artificial Sequence
  Description of Artificial Sequence: Synthetic oligonucleotide
guaauacuccagaaccgua

SEQ ID NO: 290647 - RNA, 19 nt, Artificial Sequence
  Description of Artificial Sequence: Synthetic oligonucleotide
cagucuauggagcuuccgu

SEQ ID NO: 290648 - RNA, 19 nt, Artificial Sequence
  Description of Artificial Sequence: Synthetic oligonucleotide
acacacacacacacacaca

SEQ ID NO: 290649 - RNA, 19 nt, Artificial Sequence
  Description of Artificial Sequence: Synthetic oligonucleotide
acacacacacacacacacu

SEQ ID NO: 290650 - RNA, 19 nt, Artificial Sequence
  Description of Artificial Sequence: Synthetic oligonucleotide
augauugcaaggaguccau

SEQ ID NO: 290651 - RNA, 19 nt, Artificial Sequence
  Description of Artificial Sequence: Synthetic oligonucleotide
ggugcaaacaagggagguc

SEQ ID NO: 290652 - RNA, 19 nt, Artificial Sequence
  Description of Artificial Sequence: Synthetic oligonucleotide
acucaaccauuagaacuau

SEQ ID NO: 290653 - RNA, 19 nt, Artificial Sequence
  Description of Artificial Sequence: Synthetic oligonucleotide
cuugguccgcuggcggucc

SEQ ID NO: 290654 - RNA, 19 nt, Artificial Sequence
  Description of Artificial Sequence: Synthetic oligonucleotide
gccauguucaauggccagc

SEQ ID NO: 290655 - RNA, 19 nt, Artificial Sequence
  Description of Artificial Sequence: Synthetic oligonucleotide
acacacucucucucucuuu

SEQ ID NO: 290656 - RNA, 19 nt, Artificial Sequence
  Description of Artificial Sequence: Synthetic oligonucleotide
acgccacagauuauaugga

SEQ ID NO: 290657 - RNA, 19 nt, Artificial Sequence
  Description of Artificial Sequence: Synthetic oligonucleotide
cuucacccuagcugcacaa

SEQ ID NO: 290658 - RNA, 19 nt, Artificial Sequence
  Description of Artificial Sequence: Synthetic oligonucleotide
uucacccuagcugcacaau

SEQ ID NO: 290659 - RNA, 19 nt, Artificial Sequence
  Description of Artificial Sequence: Synthetic oligonucleotide
cuagaguaggcaacugcau

SEQ ID NO: 290660 - RNA, 19 nt, Artificial Sequence
  Description of Artificial Sequence: Synthetic oligonucleotide
caauguuccacucccgguu

SEQ ID NO: 290661 - RNA, 19 nt, Artificial Sequence
  Description of Artificial Sequence: Synthetic oligonucleotide
ggacucuagcaagaacccc

SEQ ID NO: 290662 - RNA, 19 nt, Artificial Sequence
  Description of Artificial Sequence: Synthetic oligonucleotide
ggacucugagcuuggaacu

SEQ ID NO: 290663 - RNA, 19 nt, Artificial Sequence
  Description of Artificial Sequence: Synthetic oligonucleotide
ccacaauguuccacucccg

SEQ ID NO: 290664 - RNA, 19 nt, Artificial Sequence
  Description of Artificial Sequence: Synthetic oligonucleotide
ccguacuucgcauuuagcu

SEQ ID NO: 290665 - RNA, 19 nt, Artificial Sequence
  Description of Artificial Sequence: Synthetic oligonucleotide
ggaccuugaacaagucuuc

SEQ ID NO: 290666 - RNA, 19 nt, Artificial Sequence
  Description of Artificial Sequence: Synthetic oligonucleotide
ggugacgccacagauuaua

SEQ ID NO: 290667 - RNA, 19 nt, Artificial Sequence
  Description of Artificial Sequence: Synthetic oligonucleotide
cuuuacaccugagaaugau

SEQ ID NO: 290668 - RNA, 19 nt, Artificial Sequence
  Description of Artificial Sequence: Synthetic oligonucleotide
ccuagcugcacaauauaua

SEQ ID NO: 290669 - RNA, 19 nt, Artificial Sequence
  Description of Artificial Sequence: Synthetic oligonucleotide
gauccaccguugggugggg

SEQ ID NO: 290670 - RNA, 19 nt, Artificial Sequence
  Description of Artificial Sequence: Synthetic oligonucleotide
caaggguuaggugccaugu

SEQ ID NO: 290671 - RNA, 19 nt, Artificial Sequence
  Description of Artificial Sequence: Synthetic oligonucleotide
ugcaaggguuaggugccau

SEQ ID NO: 290672 - RNA, 19 nt, Artificial Sequence
  Description of Artificial Sequence: Synthetic oligonucleotide
cacaaacagauccaccguu

SEQ ID NO: 290673 - RNA, 19 nt, Artificial Sequence
  Description of Artificial Sequence: Synthetic oligonucleotide
gcguugguaggagauggug

SEQ ID NO: 290674 - RNA, 19 nt, Artificial Sequence
  Description of Artificial Sequence: Synthetic oligonucleotide
cauuuguaaccuacgucuu

SEQ ID NO: 290675 - RNA, 19 nt, Artificial Sequence
  Description of Artificial Sequence: Synthetic oligonucleotide
uugcaaggguuaggugcca

SEQ ID NO: 290676 - RNA, 19 nt, Artificial Sequence
  Description of Artificial Sequence: Synthetic oligonucleotide
caugaggguuucagcagcu

SEQ ID NO: 290677 - RNA, 19 nt, Artificial Sequence
  Description of Artificial Sequence: Synthetic oligonucleotide
gguuaggugccauguucaa

SEQ ID NO: 290678 - RNA, 19 nt, Artificial Sequence
  Description of Artificial Sequence: Synthetic oligonucleotide
uggacacgaugguggguuu

SEQ ID NO: 290679 - RNA, 19 nt, Artificial Sequence
  Description of Artificial Sequence: Synthetic oligonucleotide
gauguucaacagucugauu

SEQ ID NO: 290680 - RNA, 19 nt, Artificial Sequence
  Description of Artificial Sequence: Synthetic oligonucleotide
gguuugcacugccgccuag

SEQ ID NO: 290681 - RNA, 19 nt, Artificial Sequence
  Description of Artificial Sequence: Synthetic oligonucleotide
auuuacaguuggagcuuua

SEQ ID NO: 290682 - RNA, 19 nt, Artificial Sequence
  Description of Artificial Sequence: Synthetic oligonucleotide
uuccguccauggacucuuc

SEQ ID NO: 290683 - RNA, 19 nt, Artificial Sequence
  Description of Artificial Sequence: Synthetic oligonucleotide
caacugcaugccagcagaa

SEQ ID NO: 290684 - RNA, 19 nt, Artificial Sequence
  Description of Artificial Sequence: Synthetic oligonucleotide
cgaugguggguuugcacug

SEQ ID NO: 290685 - RNA, 19 nt, Artificial Sequence
  Description of Artificial Sequence: Synthetic oligonucleotide
gaguccaucacugguccuu

SEQ ID NO: 290686 - RNA, 19 nt, Artificial Sequence
  Description of Artificial Sequence: Synthetic oligonucleotide
agccuagugcuuggaggga

SEQ ID NO: 290687 - RNA, 19 nt, Artificial Sequence
  Description of Artificial Sequence: Synthetic oligonucleotide
gaaccguacuucgcauuua

SEQ ID NO: 290688 - RNA, 19 nt, Artificial Sequence
  Description of Artificial Sequence: Synthetic oligonucleotide
cugcuagagucaggugaug

SEQ ID NO: 290689 - RNA, 19 nt, Artificial Sequence
  Description of Artificial Sequence: Synthetic oligonucleotide
uugguccgcuggcggucca

SEQ ID NO: 290690 - RNA, 19 nt, Artificial Sequence
  Description of Artificial Sequence: Synthetic oligonucleotide
cugggcguugguaggagau

SEQ ID NO: 290691 - RNA, 19 nt, Artificial Sequence
  Description of Artificial Sequence: Synthetic oligonucleotide
gccaaagcuuuggacucug

SEQ ID NO: 290692 - RNA, 19 nt, Artificial Sequence
  Description of Artificial Sequence: Synthetic oligonucleotide
guuaggugccauguucaau

SEQ ID NO: 290693 - RNA, 19 nt, Artificial Sequence
  Description of Artificial Sequence: Synthetic oligonucleotide
ggacacgaugguggguuug

SEQ ID NO: 290694 - RNA, 19 nt, Artificial Sequence
  Description of Artificial Sequence: Synthetic oligonucleotide
ccaacucugcgccacagcu

SEQ ID NO: 290695 - RNA, 19 nt, Artificial Sequence
  Description of Artificial Sequence: Synthetic oligonucleotide
ggcaucucagcaugagggu

SEQ ID NO: 290696 - RNA, 19 nt, Artificial Sequence
  Description of Artificial Sequence: Synthetic oligonucleotide
cccaacucugcgccacagc

SEQ ID NO: 290697 - RNA, 19 nt, Artificial Sequence
  Description of Artificial Sequence: Synthetic oligonucleotide
guucaauggccagccccaa

SEQ ID NO: 290698 - RNA, 19 nt, Artificial Sequence
  Description of Artificial Sequence: Synthetic oligonucleotide
ggccaaaauggcagccuga

SEQ ID NO: 290699 - RNA, 19 nt, Artificial Sequence
  Description of Artificial Sequence: Synthetic oligonucleotide
cuccacgguaauacugaau

SEQ ID NO: 290700 - RNA, 19 nt, Artificial Sequence
  Description of Artificial Sequence: Synthetic oligonucleotide
cacacacucucucucucuu

SEQ ID NO: 290701 - RNA, 19 nt, Artificial Sequence
  Description of Artificial Sequence: Synthetic oligonucleotide
gguuccgcugguugaugua

SEQ ID NO: 290702 - RNA, 19 nt, Artificial Sequence
  Description of Artificial Sequence: Synthetic oligonucleotide
gugacgccacagauuauau

SEQ ID NO: 290703 - RNA, 19 nt, Artificial Sequence
  Description of Artificial Sequence: Synthetic oligonucleotide
cagaaccguacuucgcauu

SEQ ID NO: 290704 - RNA, 19 nt, Artificial Sequence
  Description of Artificial Sequence: Synthetic oligonucleotide
ccguccauggacucuucaa

SEQ ID NO: 290705 - RNA, 19 nt, Artificial Sequence
  Description of Artificial Sequence: Synthetic oligonucleotide
acggauccaucugcugguu

SEQ ID NO: 290706 - RNA, 19 nt, Artificial Sequence
  Description of Artificial Sequence: Synthetic oligonucleotide
cacaccucuuugcuggcuu

SEQ ID NO: 290707 - RNA, 19 nt, Artificial Sequence
  Description of Artificial Sequence: Synthetic oligonucleotide
cuuccguccauggacucuu

SEQ ID NO: 290708 - RNA, 19 nt, Artificial Sequence
  Description of Artificial Sequence: Synthetic oligonucleotide
gaguggcaaaggggcuaca

SEQ ID NO: 290709 - RNA, 19 nt, Artificial Sequence
  Description of Artificial Sequence: Synthetic oligonucleotide
cucucucuuucucucucuu

SEQ ID NO: 290710 - RNA, 19 nt, Artificial Sequence
  Description of Artificial Sequence: Synthetic oligonucleotide
gacuggcaguuuagagucu

SEQ ID NO: 290711 - RNA, 19 nt, Artificial Sequence
  Description of Artificial Sequence: Synthetic oligonucleotide
ccauggacucuucaaguau

SEQ ID NO: 290712 - RNA, 19 nt, Artificial Sequence
  Description of Artificial Sequence: Synthetic oligonucleotide
gccuagugcuuggagggaa

SEQ ID NO: 290713 - RNA, 19 nt, Artificial Sequence
  Description of Artificial Sequence: Synthetic oligonucleotide
gcacacacacagacacaca

SEQ ID NO: 290714 - RNA, 19 nt, Artificial Sequence
  Description of Artificial Sequence: Synthetic oligonucleotide
gccuaguaaacggauccau

SEQ ID NO: 290715 - RNA, 19 nt, Artificial Sequence
  Description of Artificial Sequence: Synthetic oligonucleotide
gcuacaguguguggcaguu

SEQ ID NO: 290716 - RNA, 19 nt, Artificial Sequence
  Description of Artificial Sequence: Synthetic oligonucleotide
gcacugccgccuaguaaac

SEQ ID NO: 290717 - RNA, 19 nt, Artificial Sequence
  Description of Artificial Sequence: Synthetic oligonucleotide
ggguuugcacugccgccua

SEQ ID NO: 290718 - RNA, 19 nt, Artificial Sequence
  Description of Artificial Sequence: Synthetic oligonucleotide
gcaucucagcaugaggguu

SEQ ID NO: 290719 - RNA, 19 nt, Artificial Sequence
  Description of Artificial Sequence: Synthetic oligonucleotide
ccugggcguugguaggaga

SEQ ID NO: 290720 - RNA, 19 nt, Artificial Sequence
  Description of Artificial Sequence: Synthetic oligonucleotide
ccagaaccguacuucgcau

SEQ ID NO: 290721 - RNA, 19 nt, Artificial Sequence
  Description of Artificial Sequence: Synthetic oligonucleotide
gcuuccguccauggacucu

SEQ ID NO: 290722 - RNA, 19 nt, Artificial Sequence
  Description of Artificial Sequence: Synthetic oligonucleotide
gcauaguuugguggagcuu

SEQ ID NO: 290723 - RNA, 19 nt, Artificial Sequence
  Description of Artificial Sequence: Synthetic oligonucleotide
cgccuaguaaacggaucca

SEQ ID NO: 290724 - RNA, 19 nt, Artificial Sequence
  Description of Artificial Sequence: Synthetic oligonucleotide
cgcauuuagcugggccaaa

SEQ ID NO: 290725 - RNA, 19 nt, Artificial Sequence
  Description of Artificial Sequence: Synthetic oligonucleotide
aaagguauuaaauccaccc

SEQ ID NO: 290726 - RNA, 19 nt, Artificial Sequence
  Description of Artificial Sequence: Synthetic oligonucleotide
uacaucaugacacacaucc

SEQ ID NO: 290727 - RNA, 19 nt, Artificial Sequence
  Description of Artificial Sequence: Synthetic oligonucleotide
acgaauaagcuuuucaucc

SEQ ID NO: 290728 - RNA, 19 nt, Artificial Sequence
  Description of Artificial Sequence: Synthetic oligonucleotide
aaauccaccccuuuugccc

SEQ ID NO: 290729 - RNA, 19 nt, Artificial Sequence
  Description of Artificial Sequence: Synthetic oligonucleotide
uuaaauaacuaucuugucu

SEQ ID NO: 290730 - RNA, 19 nt, Artificial Sequence
  Description of Artificial Sequence: Synthetic oligonucleotide
aagguauuaaauccacccc

SEQ ID NO: 290731 - RNA, 19 nt, Artificial Sequence
  Description of Artificial Sequence: Synthetic oligonucleotide
aucaggucuuauuugaucc

SEQ ID NO: 290732 - RNA, 19 nt, Artificial Sequence
  Description of Artificial Sequence: Synthetic oligonucleotide
uguacaguuacuuuuguga

SEQ ID NO: 290733 - RNA, 19 nt, Artificial Sequence
  Description of Artificial Sequence: Synthetic oligonucleotide
ucauuuagaacccagucac

SEQ ID NO: 290734 - RNA, 19 nt, Artificial Sequence
  Description of Artificial Sequence: Synthetic oligonucleotide
uauguuauuagguguaaag

SEQ ID NO: 290735 - RNA, 19 nt, Artificial Sequence
  Description of Artificial Sequence: Synthetic oligonucleotide
uuccauuagacgaauaagc

SEQ ID NO: 290736 - RNA, 19 nt, Artificial Sequence
  Description of Artificial Sequence: Synthetic oligonucleotide
uuuauuaguuaagacaacc

SEQ ID NO: 290737 - RNA, 19 nt, Artificial Sequence
  Description of Artificial Sequence: Synthetic oligonucleotide
gaauauaauccucugagga

SEQ ID NO: 290738 - RNA, 19 nt, Artificial Sequence
  Description of Artificial Sequence: Synthetic oligonucleotide
cuugcuuuauguuauuagg

SEQ ID NO: 290739 - RNA, 19 nt, Artificial Sequence
  Description of Artificial Sequence: Synthetic oligonucleotide
uuuacaugacaucauauau

SEQ ID NO: 290740 - RNA, 19 nt, Artificial Sequence
  Description of Artificial Sequence: Synthetic oligonucleotide
uauuaguuaagacaaccac

SEQ ID NO: 290741 - RNA, 19 nt, Artificial Sequence
  Description of Artificial Sequence: Synthetic oligonucleotide
accuaaaucaaagaauggc

SEQ ID NO: 290742 - RNA, 19 nt, Artificial Sequence
  Description of Artificial Sequence: Synthetic oligonucleotide
aaucacgaaucuguggucc

SEQ ID NO: 290743 - RNA, 19 nt, Artificial Sequence
  Description of Artificial Sequence: Synthetic oligonucleotide
uguuauuagguguaaagaa

SEQ ID NO: 290744 - RNA, 19 nt, Artificial Sequence
  Description of Artificial Sequence: Synthetic oligonucleotide
ugaauauaauccucugagg

SEQ ID NO: 290745 - RNA, 19 nt, Artificial Sequence
  Description of Artificial Sequence: Synthetic oligonucleotide
uuauuaguuaagacaacca

SEQ ID NO: 290746 - RNA, 19 nt, Artificial Sequence
  Description of Artificial Sequence: Synthetic oligonucleotide
auauccaacuuaaauagcg

SEQ ID NO: 290747 - RNA, 19 nt, Artificial Sequence
  Description of Artificial Sequence: Synthetic oligonucleotide
uauuguauuugaaaucacu

SEQ ID NO: 290748 - RNA, 19 nt, Artificial Sequence
  Description of Artificial Sequence: Synthetic oligonucleotide
guaaagaaaguguaugcug

SEQ ID NO: 290749 - RNA, 19 nt, Artificial Sequence
  Description of Artificial Sequence: Synthetic oligonucleotide
auauccaauccacuuagag

SEQ ID NO: 290750 - RNA, 19 nt, Artificial Sequence
  Description of Artificial Sequence: Synthetic oligonucleotide
aaaguguaugcugugcccg

SEQ ID NO: 290751 - RNA, 19 nt, Artificial Sequence
  Description of Artificial Sequence: Synthetic oligonucleotide
ucuucgaccaacugaagca

SEQ ID NO: 290752 - RNA, 19 nt, Artificial Sequence
  Description of Artificial Sequence: Synthetic oligonucleotide
ugcuuuauguuauuaggug

SEQ ID NO: 290753 - RNA, 19 nt, Artificial Sequence
  Description of Artificial Sequence: Synthetic oligonucleotide
aucgguagcaaucagaaua

SEQ ID NO: 290754 - RNA, 19 nt, Artificial Sequence
  Description of Artificial Sequence: Synthetic oligonucleotide
uggauuaccaguccuaaaa

SEQ ID NO: 290755 - RNA, 19 nt, Artificial Sequence
  Description of Artificial Sequence: Synthetic oligonucleotide
cagaguaucugucacgacg

SEQ ID NO: 290756 - RNA, 19 nt, Artificial Sequence
  Description of Artificial Sequence: Synthetic oligonucleotide
agugcuaucauaaccguuc

SEQ ID NO: 290757 - RNA, 19 nt, Artificial Sequence
  Description of Artificial Sequence: Synthetic oligonucleotide
uucaucgaggacaagguaa

SEQ ID NO: 290758 - RNA, 19 nt, Artificial Sequence
  Description of Artificial Sequence: Synthetic oligonucleotide
aaccguucugguaaguccc

SEQ ID NO: 290759 - RNA, 19 nt, Artificial Sequence
  Description of Artificial Sequence: Synthetic oligonucleotide
aauaggagcuuuuccgugu

SEQ ID NO: 290760 - RNA, 19 nt, Artificial Sequence
  Description of Artificial Sequence: Synthetic oligonucleotide
ucuuccauuagacgaauaa

SEQ ID NO: 290761 - RNA, 19 nt, Artificial Sequence
  Description of Artificial Sequence: Synthetic oligonucleotide
aacgaccugaaccucuguc

SEQ ID NO: 290762 - RNA, 19 nt, Artificial Sequence
  Description of Artificial Sequence: Synthetic oligonucleotide
ugaguuuuagccccaaaau

SEQ ID NO: 290763 - RNA, 19 nt, Artificial Sequence
  Description of Artificial Sequence: Synthetic oligonucleotide
aagugcaccauaaucacug

SEQ ID NO: 290764 - RNA, 19 nt, Artificial Sequence
  Description of Artificial Sequence: Synthetic oligonucleotide
uugcuuuauguuauuaggu

SEQ ID NO: 290765 - RNA, 19 nt, Artificial Sequence
  Description of Artificial Sequence: Synthetic oligonucleotide
cauugguguaauuugcagc

SEQ ID NO: 290766 - RNA, 19 nt, Artificial Sequence
  Description of Artificial Sequence: Synthetic oligonucleotide
uguaaagaaaguguaugcu

SEQ ID NO: 290767 - RNA, 19 nt, Artificial Sequence
  Description of Artificial Sequence: Synthetic oligonucleotide
cucgacauggcgucaaugg

SEQ ID NO: 290768 - RNA, 19 nt, Artificial Sequence
  Description of Artificial Sequence: Synthetic oligonucleotide
aguuuuagccccaaaaucu

SEQ ID NO: 290769 - RNA, 19 nt, Artificial Sequence
  Description of Artificial Sequence: Synthetic oligonucleotide
acaauuuuccguauuuggg

SEQ ID NO: 290770 - RNA, 19 nt, Artificial Sequence
  Description of Artificial Sequence: Synthetic oligonucleotide
aacuaucuugucugauaac

SEQ ID NO: 290771 - RNA, 19 nt, Artificial Sequence
  Description of Artificial Sequence: Synthetic oligonucleotide
ugcgucuugccaaaucagg

SEQ ID NO: 290772 - RNA, 19 nt, Artificial Sequence
  Description of Artificial Sequence: Synthetic oligonucleotide
uuaacuaguuucuccccag

SEQ ID NO: 290773 - RNA, 19 nt, Artificial Sequence
  Description of Artificial Sequence: Synthetic oligonucleotide
guaucuaccucuugugcgg

SEQ ID NO: 290774 - RNA, 19 nt, Artificial Sequence
  Description of Artificial Sequence: Synthetic oligonucleotide
acuaucuugucugauaaca

SEQ ID NO: 290775 - RNA, 19 nt, Artificial Sequence
  Description of Artificial Sequence: Synthetic oligonucleotide
acgacgaucauccuucaug

SEQ ID NO: 290776 - RNA, 19 nt, Artificial Sequence
  Description of Artificial Sequence: Synthetic oligonucleotide
ucucucuuaagcagacuag

SEQ ID NO: 290777 - RNA, 19 nt, Artificial Sequence
  Description of Artificial Sequence: Synthetic oligonucleotide
caggauaugcauaugccug

SEQ ID NO: 290778 - RNA, 19 nt, Artificial Sequence
  Description of Artificial Sequence: Synthetic oligonucleotide
aguugcacuccacauuagg

SEQ ID NO: 290779 - RNA, 19 nt, Artificial Sequence
  Description of Artificial Sequence: Synthetic oligonucleotide
gaaaguguaugcugugccc

SEQ ID NO: 290780 - RNA, 19 nt, Artificial Sequence
  Description of Artificial Sequence: Synthetic oligonucleotide
auuaguuaagacaaccaca

SEQ ID NO: 290781 - RNA, 19 nt, Artificial Sequence
  Description of Artificial Sequence: Synthetic oligonucleotide
uaaccguucugguaagucc

SEQ ID NO: 290782 - RNA, 19 nt, Artificial Sequence
  Description of Artificial Sequence: Synthetic oligonucleotide
uacuaucuaagccaaguuu

SEQ ID NO: 290783 - RNA, 19 nt, Artificial Sequence
  Description of Artificial Sequence: Synthetic oligonucleotide
uccaacuuaaauagcgaaa

SEQ ID NO: 290784 - RNA, 19 nt, Artificial Sequence
  Description of Artificial Sequence: Synthetic oligonucleotide
uccaaaucacgaaucugug

SEQ ID NO: 290785 - RNA, 19 nt, Artificial Sequence
  Description of Artificial Sequence: Synthetic oligonucleotide
ugcuugauuagccucccga

SEQ ID NO: 290786 - RNA, 19 nt, Artificial Sequence
  Description of Artificial Sequence: Synthetic oligonucleotide
ucuuuuauuggaaggccau

SEQ ID NO: 290787 - RNA, 19 nt, Artificial Sequence
  Description of Artificial Sequence: Synthetic oligonucleotide
ucaccguggaugcccaugg

SEQ ID NO: 290788 - RNA, 19 nt, Artificial Sequence
  Description of Artificial Sequence: Synthetic oligonucleotide
uagugcaccaauauugaua

SEQ ID NO: 290789 - RNA, 19 nt, Artificial Sequence
  Description of Artificial Sequence: Synthetic oligonucleotide
uccacauuaggguuugccu

SEQ ID NO: 290790 - RNA, 19 nt, Artificial Sequence
  Description of Artificial Sequence: Synthetic oligonucleotide
uaacuaguuucuccccagg

SEQ ID NO: 290791 - RNA, 19 nt, Artificial Sequence
  Description of Artificial Sequence: Synthetic oligonucleotide
gaauaggagcuuuuccgug

SEQ ID NO: 290792 - RNA, 19 nt, Artificial Sequence
  Description of Artificial Sequence: Synthetic oligonucleotide
guugguucauaccauugug

SEQ ID NO: 290793 - RNA, 19 nt, Artificial Sequence
  Description of Artificial Sequence: Synthetic oligonucleotide
aguuaggguagucauaauu

SEQ ID NO: 290794 - RNA, 19 nt, Artificial Sequence
  Description of Artificial Sequence: Synthetic oligonucleotide
aucacgaaucugugguccc

SEQ ID NO: 290795 - RNA, 19 nt, Artificial Sequence
  Description of Artificial Sequence: Synthetic oligonucleotide
aguucuagugcaccaauau

SEQ ID NO: 290796 - RNA, 19 nt, Artificial Sequence
  Description of Artificial Sequence: Synthetic oligonucleotide
guagacuucaagcgacagg

SEQ ID NO: 290797 - RNA, 19 nt, Artificial Sequence
  Description of Artificial Sequence: Synthetic oligonucleotide
augccuguugguucauacc

SEQ ID NO: 290798 - RNA, 19 nt, Artificial Sequence
  Description of Artificial Sequence: Synthetic oligonucleotide
agagaaauauccaacuuaa

SEQ ID NO: 290799 - RNA, 19 nt, Artificial Sequence
  Description of Artificial Sequence: Synthetic oligonucleotide
cuaucuugucugauaacac

SEQ ID NO: 290800 - RNA, 19 nt, Artificial Sequence
  Description of Artificial Sequence: Synthetic oligonucleotide
ugcacucaguucuagugca

SEQ ID NO: 290801 - RNA, 19 nt, Artificial Sequence
  Description of Artificial Sequence: Synthetic oligonucleotide
uuucugguaaguucaucac

SEQ ID NO: 290802 - RNA, 19 nt, Artificial Sequence
  Description of Artificial Sequence: Synthetic oligonucleotide
ucaagcgacaggcucuaca

SEQ ID NO: 290803 - RNA, 19 nt, Artificial Sequence
  Description of Artificial Sequence: Synthetic oligonucleotide
aauccucgaucccggccgc

SEQ ID NO: 290804 - RNA, 19 nt, Artificial Sequence
  Description of Artificial Sequence: Synthetic oligonucleotide
cuggaguaacucgacaugg

SEQ ID NO: 290805 - RNA, 19 nt, Artificial Sequence
  Description of Artificial Sequence: Synthetic oligonucleotide
ugagaauacccuguuggca

SEQ ID NO: 290806 - RNA, 19 nt, Artificial Sequence
  Description of Artificial Sequence: Synthetic oligonucleotide
agugcaccauaaucacugc

SEQ ID NO: 290807 - RNA, 19 nt, Artificial Sequence
  Description of Artificial Sequence: Synthetic oligonucleotide
cuugauuagccucccgaag

SEQ ID NO: 290808 - RNA, 19 nt, Artificial Sequence
  Description of Artificial Sequence: Synthetic oligonucleotide
auaacuaucuugucugaua

SEQ ID NO: 290809 - RNA, 19 nt, Artificial Sequence
  Description of Artificial Sequence: Synthetic oligonucleotide
aggacaacccagucgcgac

SEQ ID NO: 290810 - RNA, 19 nt, Artificial Sequence
  Description of Artificial Sequence: Synthetic oligonucleotide
aauucagaacaggcuuugg

SEQ ID NO: 290811 - RNA, 19 nt, Artificial Sequence
  Description of Artificial Sequence: Synthetic oligonucleotide
aacccagucgcgacgaguc

SEQ ID NO: 290812 - RNA, 19 nt, Artificial Sequence
  Description of Artificial Sequence: Synthetic oligonucleotide
gucuucgaccaacugaagc

SEQ ID NO: 290813 - RNA, 19 nt, Artificial Sequence
  Description of Artificial Sequence: Synthetic oligonucleotide
cauuuagaacccagucacg

SEQ ID NO: 290814 - RNA, 19 nt, Artificial Sequence
  Description of Artificial Sequence: Synthetic oligonucleotide
auaaccguucugguaaguc

SEQ ID NO: 290815 - RNA, 19 nt, Artificial Sequence
  Description of Artificial Sequence: Synthetic oligonucleotide
aacauacuaucuaagccaa

SEQ ID NO: 290816 - RNA, 19 nt, Artificial Sequence
  Description of Artificial Sequence: Synthetic oligonucleotide
uugugaaaacacugccugc

SEQ ID NO: 290817 - RNA, 19 nt, Artificial Sequence
  Description of Artificial Sequence: Synthetic oligonucleotide
uggaguaacucgacauggc

SEQ ID NO: 290818 - RNA, 19 nt, Artificial Sequence
  Description of Artificial Sequence: Synthetic oligonucleotide
auccaacuuaaauagcgaa

SEQ ID NO: 290819 - RNA, 19 nt, Artificial Sequence
  Description of Artificial Sequence: Synthetic oligonucleotide
ugugcggugcgucuugcca

SEQ ID NO: 290820 - RNA, 19 nt, Artificial Sequence
  Description of Artificial Sequence: Synthetic oligonucleotide
uuugguacugcgagcaguu

SEQ ID NO: 290821 - RNA, 19 nt, Artificial Sequence
  Description of Artificial Sequence: Synthetic oligonucleotide
gaaccucugucuucgacca

SEQ ID NO: 290822 - RNA, 19 nt, Artificial Sequence
  Description of Artificial Sequence: Synthetic oligonucleotide
cagguagacuucaagcgac

SEQ ID NO: 290823 - RNA, 19 nt, Artificial Sequence
  Description of Artificial Sequence: Synthetic oligonucleotide
uggcaaguagucaacuuua

SEQ ID NO: 290824 - RNA, 19 nt, Artificial Sequence
  Description of Artificial Sequence: Synthetic oligonucleotide
guugcggugagcgggaaag

SEQ ID NO: 290825 - RNA, 19 nt, Artificial Sequence
  Description of Artificial Sequence: Synthetic oligonucleotide
caaaucacgaaucuguggu

SEQ ID NO: 290826 - RNA, 19 nt, Artificial Sequence
  Description of Artificial Sequence: Synthetic oligonucleotide
cuuuauguuauuaggugua

SEQ ID NO: 290827 - RNA, 19 nt, Artificial Sequence
  Description of Artificial Sequence: Synthetic oligonucleotide
auauugauaugaauauagu

SEQ ID NO: 290828 - RNA, 19 nt, Artificial Sequence
  Description of Artificial Sequence: Synthetic oligonucleotide
ucauaaccguucugguaag

SEQ ID NO: 290829 - RNA, 19 nt, Artificial Sequence
  Description of Artificial Sequence: Synthetic oligonucleotide
uuuugguacugcgagcagu

SEQ ID NO: 290830 - RNA, 19 nt, Artificial Sequence
  Description of Artificial Sequence: Synthetic oligonucleotide
caagcaaauaggcccauca

SEQ ID NO: 290831 - RNA, 19 nt, Artificial Sequence
  Description of Artificial Sequence: Synthetic oligonucleotide
aaccacuauuuauuaguua

SEQ ID NO: 290832 - RNA, 19 nt, Artificial Sequence
  Description of Artificial Sequence: Synthetic oligonucleotide
caaauaggcccaucacccc

SEQ ID NO: 290833 - RNA, 19 nt, Artificial Sequence
  Description of Artificial Sequence: Synthetic oligonucleotide
uuuauguuauuagguguaa

SEQ ID NO: 290834 - RNA, 19 nt, Artificial Sequence
  Description of Artificial Sequence: Synthetic oligonucleotide
uuggacaguugugaccccg

SEQ ID NO: 290835 - RNA, 19 nt, Artificial Sequence
  Description of Artificial Sequence: Synthetic oligonucleotide
cugucuucgaccaacugaa

SEQ ID NO: 290836 - RNA, 19 nt, Artificial Sequence
  Description of Artificial Sequence: Synthetic oligonucleotide
guauguaucuaccucuugu

SEQ ID NO: 290837 - RNA, 19 nt, Artificial Sequence
  Description of Artificial Sequence: Synthetic oligonucleotide
agaguaucugucacgacga

SEQ ID NO: 290838 - RNA, 19 nt, Artificial Sequence
  Description of Artificial Sequence: Synthetic oligonucleotide
guucauaccauugugcaua

SEQ ID NO: 290839 - RNA, 19 nt, Artificial Sequence
  Description of Artificial Sequence: Synthetic oligonucleotide
caguccuaaaacuggucug

SEQ ID NO: 290840 - RNA, 19 nt, Artificial Sequence
  Description of Artificial Sequence: Synthetic oligonucleotide
guaauuugcagcacuguaa

SEQ ID NO: 290841 - RNA, 19 nt, Artificial Sequence
  Description of Artificial Sequence: Synthetic oligonucleotide
ugugaccccgaacuguaau

SEQ ID NO: 290842 - RNA, 19 nt, Artificial Sequence
  Description of Artificial Sequence: Synthetic oligonucleotide
ugugcauauuugcaacauu

SEQ ID NO: 290843 - RNA, 19 nt, Artificial Sequence
  Description of Artificial Sequence: Synthetic oligonucleotide
uuuagaacccagucacguu

SEQ ID NO: 290844 - RNA, 19 nt, Artificial Sequence
  Description of Artificial Sequence: Synthetic oligonucleotide
acaucgguagcaaucagaa

SEQ ID NO: 290845 - RNA, 19 nt, Artificial Sequence
  Description of Artificial Sequence: Synthetic oligonucleotide
ucuugugcggugcgucuug

SEQ ID NO: 290846 - RNA, 19 nt, Artificial Sequence
  Description of Artificial Sequence: Synthetic oligonucleotide
cugaguuuuagccccaaaa

SEQ ID NO: 290847 - RNA, 19 nt, Artificial Sequence
  Description of Artificial Sequence: Synthetic oligonucleotide
cuugucugauaacacacaa

SEQ ID NO: 290848 - RNA, 19 nt, Artificial Sequence
  Description of Artificial Sequence: Synthetic oligonucleotide
ccaaaucacgaaucugugg

SEQ ID NO: 290849 - RNA, 19 nt, Artificial Sequence
  Description of Artificial Sequence: Synthetic oligonucleotide
uucaugccuccucuacccc

SEQ ID NO: 290850 - RNA, 19 nt, Artificial Sequence
  Description of Artificial Sequence: Synthetic oligonucleotide
aguugugaccccgaacugu

SEQ ID NO: 290851 - RNA, 19 nt, Artificial Sequence
  Description of Artificial Sequence: Synthetic oligonucleotide
ugucuucgaccaacugaag

SEQ ID NO: 290852 - RNA, 19 nt, Artificial Sequence
  Description of Artificial Sequence: Synthetic oligonucleotide
cagcccugagcuugaauag

SEQ ID NO: 290853 - RNA, 19 nt, Artificial Sequence
  Description of Artificial Sequence: Synthetic oligonucleotide
cuuaagcagacuagaguaa

SEQ ID NO: 290854 - RNA, 19 nt, Artificial Sequence
  Description of Artificial Sequence: Synthetic oligonucleotide
gacgaucauccuucaugcc

SEQ ID NO: 290855 - RNA, 19 nt, Artificial Sequence
  Description of Artificial Sequence: Synthetic oligonucleotide
gagcgggaaagacccagug

SEQ ID NO: 290856 - RNA, 19 nt, Artificial Sequence
  Description of Artificial Sequence: Synthetic oligonucleotide
cuguuggcauuggauagcc

SEQ ID NO: 290857 - RNA, 19 nt, Artificial Sequence
  Description of Artificial Sequence: Synthetic oligonucleotide
uccgaaucuuggugcacca

SEQ ID NO: 290858 - RNA, 19 nt, Artificial Sequence
  Description of Artificial Sequence: Synthetic oligonucleotide
agcgggaaagacccaguga

SEQ ID NO: 290859 - RNA, 19 nt, Artificial Sequence
  Description of Artificial Sequence: Synthetic oligonucleotide
guagucaacuuuaguugug

SEQ ID NO: 290860 - RNA, 19 nt, Artificial Sequence
  Description of Artificial Sequence: Synthetic oligonucleotide
guuuugguacugcgagcag

SEQ ID NO: 290861 - RNA, 19 nt, Artificial Sequence
  Description of Artificial Sequence: Synthetic oligonucleotide
guaagucccuguuggauua

SEQ ID NO: 290862 - RNA, 19 nt, Artificial Sequence
  Description of Artificial Sequence: Synthetic oligonucleotide
cuccgaaucuuggugcacc

SEQ ID NO: 290863 - RNA, 19 nt, Artificial Sequence
  Description of Artificial Sequence: Synthetic oligonucleotide
ucugaguuuuagccccaaa

SEQ ID NO: 290864 - RNA, 19 nt, Artificial Sequence
  Description of Artificial Sequence: Synthetic oligonucleotide
uuuccguguuugaauucau

SEQ ID NO: 290865 - RNA, 19 nt, Artificial Sequence
  Description of Artificial Sequence: Synthetic oligonucleotide
cauacuaucuaagccaagu

SEQ ID NO: 290866 - RNA, 19 nt, Artificial Sequence
  Description of Artificial Sequence: Synthetic oligonucleotide
cccguuuugguacugcgag

SEQ ID NO: 290867 - RNA, 19 nt, Artificial Sequence
  Description of Artificial Sequence: Synthetic oligonucleotide
uugucaccguggaugccca

SEQ ID NO: 290868 - RNA, 19 nt, Artificial Sequence
  Description of Artificial Sequence: Synthetic oligonucleotide
ggaguuaggguagucauaa

SEQ ID NO: 290869 - RNA, 19 nt, Artificial Sequence
  Description of Artificial Sequence: Synthetic oligonucleotide
gaaggacaacccagucgcg

SEQ ID NO: 290870 - RNA, 19 nt, Artificial Sequence
  Description of Artificial Sequence: Synthetic oligonucleotide
ccgaaacauacuaucuaag

SEQ ID NO: 290871 - RNA, 19 nt, Artificial Sequence
  Description of Artificial Sequence: Synthetic oligonucleotide
ggaaagacccagugaagga

SEQ ID NO: 290872 - RNA, 19 nt, Artificial Sequence
  Description of Artificial Sequence: Synthetic oligonucleotide
agccccaaaaucucucuua

SEQ ID NO: 290873 - RNA, 19 nt, Artificial Sequence
  Description of Artificial Sequence: Synthetic oligonucleotide
gcuuuauguuauuaggugu

SEQ ID NO: 290874 - RNA, 19 nt, Artificial Sequence
  Description of Artificial Sequence: Synthetic oligonucleotide
agccaaucauaggcgcagc

SEQ ID NO: 290875 - RNA, 19 nt, Artificial Sequence
  Description of Artificial Sequence: Synthetic oligonucleotide
uaaggucgcucacuugcuu

SEQ ID NO: 290876 - RNA, 19 nt, Artificial Sequence
  Description of Artificial Sequence: Synthetic oligonucleotide
acgaaucuguggucccuug

SEQ ID NO: 290877 - RNA, 19 nt, Artificial Sequence
  Description of Artificial Sequence: Synthetic oligonucleotide
ugaccccgaacuguaauuu

SEQ ID NO: 290878 - RNA, 19 nt, Artificial Sequence
  Description of Artificial Sequence: Synthetic oligonucleotide
gucaccggcggagggacgg

SEQ ID NO: 290879 - RNA, 19 nt, Artificial Sequence
  Description of Artificial Sequence: Synthetic oligonucleotide
uguugacucuugucaccgu

SEQ ID NO: 290880 - RNA, 19 nt, Artificial Sequence
  Description of Artificial Sequence: Synthetic oligonucleotide
agucgcgacgagucgcuga

SEQ ID NO: 290881 - RNA, 19 nt, Artificial Sequence
  Description of Artificial Sequence: Synthetic oligonucleotide
gaguaacucgacauggcgu

SEQ ID NO: 290882 - RNA, 19 nt, Artificial Sequence
  Description of Artificial Sequence: Synthetic oligonucleotide
ggacaacccagucgcgacg

SEQ ID NO: 290883 - RNA, 19 nt, Artificial Sequence
  Description of Artificial Sequence: Synthetic oligonucleotide
aacucgacauggcgucaau

SEQ ID NO: 290884 - RNA, 19 nt, Artificial Sequence
  Description of Artificial Sequence: Synthetic oligonucleotide
acccagucgcgacgagucg

SEQ ID NO: 290885 - RNA, 19 nt, Artificial Sequence
  Description of Artificial Sequence: Synthetic oligonucleotide
uugguguaauuugcagcac

SEQ ID NO: 290886 - RNA, 19 nt, Artificial Sequence
  Description of Artificial Sequence: Synthetic oligonucleotide
gguagacuucaagcgacag

SEQ ID NO: 290887 - RNA, 19 nt, Artificial Sequence
  Description of Artificial Sequence: Synthetic oligonucleotide
uaucuaccucuugugcggu

SEQ ID NO: 290888 - RNA, 19 nt, Artificial Sequence
  Description of Artificial Sequence: Synthetic oligonucleotide
gacaacccagucgcgacga

SEQ ID NO: 290889 - RNA, 19 nt, Artificial Sequence
  Description of Artificial Sequence: Synthetic oligonucleotide
ucacgaaucuguggucccu

SEQ ID NO: 290890 - RNA, 19 nt, Artificial Sequence
  Description of Artificial Sequence: Synthetic oligonucleotide
uccguauuugggguucaaa

SEQ ID NO: 290891 - RNA, 19 nt, Artificial Sequence
  Description of Artificial Sequence: Synthetic oligonucleotide
guuuuacaugacaucauau

SEQ ID NO: 290892 - RNA, 19 nt, Artificial Sequence
  Description of Artificial Sequence: Synthetic oligonucleotide
auaaggucgcucacuugcu

SEQ ID NO: 290893 - RNA, 19 nt, Artificial Sequence
  Description of Artificial Sequence: Synthetic oligonucleotide
acucgacauggcgucaaug

SEQ ID NO: 290894 - RNA, 19 nt, Artificial Sequence
  Description of Artificial Sequence: Synthetic oligonucleotide
ucucggucgcuggaguaac

SEQ ID NO: 290895 - RNA, 19 nt, Artificial Sequence
  Description of Artificial Sequence: Synthetic oligonucleotide
agacccagugaaggacaac

SEQ ID NO: 290896 - RNA, 19 nt, Artificial Sequence
  Description of Artificial Sequence: Synthetic oligonucleotide
ggguucagugaaauucugc

SEQ ID NO: 290897 - RNA, 19 nt, Artificial Sequence
  Description of Artificial Sequence: Synthetic oligonucleotide
gcugaugauuuauguggac

SEQ ID NO: 290898 - RNA, 19 nt, Artificial Sequence
  Description of Artificial Sequence: Synthetic oligonucleotide
acgggcggugacgaagccg

SEQ ID NO: 290899 - RNA, 19 nt, Artificial Sequence
  Description of Artificial Sequence: Synthetic oligonucleotide
caggguguuccugauaaaa

SEQ ID NO: 290900 - RNA, 19 nt, Artificial Sequence
  Description of Artificial Sequence: Synthetic oligonucleotide
ggacaagguaaguuguucu

SEQ ID NO: 290901 - RNA, 19 nt, Artificial Sequence
  Description of Artificial Sequence: Synthetic oligonucleotide
aggucgcucacuugcuuua

SEQ ID NO: 290902 - RNA, 19 nt, Artificial Sequence
  Description of Artificial Sequence: Synthetic oligonucleotide
aggucuuauuugauccaca

SEQ ID NO: 290903 - RNA, 19 nt, Artificial Sequence
  Description of Artificial Sequence: Synthetic oligonucleotide
ugcgagcaguucuuccaau

SEQ ID NO: 290904 - RNA, 19 nt, Artificial Sequence
  Description of Artificial Sequence: Synthetic oligonucleotide
ugcggugcgucuugccaaa

SEQ ID NO: 290905 - RNA, 19 nt, Artificial Sequence
  Description of Artificial Sequence: Synthetic oligonucleotide
gucaccguggaugcccaug

SEQ ID NO: 290906 - RNA, 19 nt, Artificial Sequence
  Description of Artificial Sequence: Synthetic oligonucleotide
auuagacgaauaagcuuuu

SEQ ID NO: 290907 - RNA, 19 nt, Artificial Sequence
  Description of Artificial Sequence: Synthetic oligonucleotide
gagucgcugagaggaggcc

SEQ ID NO: 290908 - RNA, 19 nt, Artificial Sequence
  Description of Artificial Sequence: Synthetic oligonucleotide
guugugaccccgaacugua

SEQ ID NO: 290909 - RNA, 19 nt, Artificial Sequence
  Description of Artificial Sequence: Synthetic oligonucleotide
gcuugauuagccucccgaa

SEQ ID NO: 290910 - RNA, 19 nt, Artificial Sequence
  Description of Artificial Sequence: Synthetic oligonucleotide
ggcgucaaugguugcggug

SEQ ID NO: 290911 - RNA, 19 nt, Artificial Sequence
  Description of Artificial Sequence: Synthetic oligonucleotide
agucccuguuggauuacca

SEQ ID NO: 290912 - RNA, 19 nt, Artificial Sequence
  Description of Artificial Sequence: Synthetic oligonucleotide
gcagacuagaguaaccucu

SEQ ID NO: 290913 - RNA, 19 nt, Artificial Sequence
  Description of Artificial Sequence: Synthetic oligonucleotide
cccgaaacauacuaucuaa

SEQ ID NO: 290914 - RNA, 19 nt, Artificial Sequence
  Description of Artificial Sequence: Synthetic oligonucleotide
cuugugcggugcgucuugc

SEQ ID NO: 290915 - RNA, 19 nt, Artificial Sequence
  Description of Artificial Sequence: Synthetic oligonucleotide
cacauuaggguuugccuau

SEQ ID NO: 290916 - RNA, 19 nt, Artificial Sequence
  Description of Artificial Sequence: Synthetic oligonucleotide
guggguucagugaaauucu

SEQ ID NO: 290917 - RNA, 19 nt, Artificial Sequence
  Description of Artificial Sequence: Synthetic oligonucleotide
aaccucugucuucgaccaa

SEQ ID NO: 290918 - RNA, 19 nt, Artificial Sequence
  Description of Artificial Sequence: Synthetic oligonucleotide
uucugaguuuuagccccaa

SEQ ID NO: 290919 - RNA, 19 nt, Artificial Sequence
  Description of Artificial Sequence: Synthetic oligonucleotide
gcgucaaugguugcgguga

SEQ ID NO: 290920 - RNA, 19 nt, Artificial Sequence
  Description of Artificial Sequence: Synthetic oligonucleotide
gacgggcggugacgaagcc

SEQ ID NO: 290921 - RNA, 19 nt, Artificial Sequence
  Description of Artificial Sequence: Synthetic oligonucleotide
gggacgggcggugacgaag

SEQ ID NO: 290922 - RNA, 19 nt, Artificial Sequence
  Description of Artificial Sequence: Synthetic oligonucleotide
gagcuacuccaaccauauc

SEQ ID NO: 290923 - RNA, 19 nt, Artificial Sequence
  Description of Artificial Sequence: Synthetic oligonucleotide
gcgacgagucgcugagagg

SEQ ID NO: 290924 - RNA, 19 nt, Artificial Sequence
  Description of Artificial Sequence: Synthetic oligonucleotide
ccacauuaggguuugccua

SEQ ID NO: 290925 - RNA, 19 nt, Artificial Sequence
  Description of Artificial Sequence: Synthetic oligonucleotide
cucaguucuagugcaccaa

SEQ ID NO: 290926 - RNA, 19 nt, Artificial Sequence
  Description of Artificial Sequence: Synthetic oligonucleotide
ccaugcauugccuucauuu

SEQ ID NO: 290927 - RNA, 19 nt, Artificial Sequence
  Description of Artificial Sequence: Synthetic oligonucleotide
ccguuuugguacugcgagc

SEQ ID NO: 290928 - RNA, 19 nt, Artificial Sequence
  Description of Artificial Sequence: Synthetic oligonucleotide
cuaccccuggaacgaccug

SEQ ID NO: 290929 - RNA, 19 nt, Artificial Sequence
  Description of Artificial Sequence: Synthetic oligonucleotide
gcgacggcgaagccuuugc

SEQ ID NO: 290930 - RNA, 19 nt, Artificial Sequence
  Description of Artificial Sequence: Synthetic oligonucleotide
ccguguuugaauucauuua

SEQ ID NO: 290931 - RNA, 19 nt, Artificial Sequence
  Description of Artificial Sequence: Synthetic oligonucleotide
cuagugcaccaauauugau

SEQ ID NO: 290932 - RNA, 19 nt, Artificial Sequence
  Description of Artificial Sequence: Synthetic oligonucleotide
aguguaugcugugcccguu

SEQ ID NO: 290933 - RNA, 19 nt, Artificial Sequence
  Description of Artificial Sequence: Synthetic oligonucleotide
ccaguccuaaaacuggucu

SEQ ID NO: 290934 - RNA, 19 nt, Artificial Sequence
  Description of Artificial Sequence: Synthetic oligonucleotide
ggacgggcggugacgaagc

SEQ ID NO: 290935 - RNA, 19 nt, Artificial Sequence
  Description of Artificial Sequence: Synthetic oligonucleotide
cgacgagucgcugagagga

SEQ ID NO: 290936 - RNA, 19 nt, Artificial Sequence
  Description of Artificial Sequence: Synthetic oligonucleotide
cggucgcuggaguaacucg

SEQ ID NO: 290937 - RNA, 19 nt, Artificial Sequence
  Description of Artificial Sequence: Synthetic oligonucleotide
gguucauaccauugugcau

SEQ ID NO: 290938 - RNA, 19 nt, Artificial Sequence
  Description of Artificial Sequence: Synthetic oligonucleotide
gcagaguaucugucacgac

SEQ ID NO: 290939 - RNA, 19 nt, Artificial Sequence
  Description of Artificial Sequence: Synthetic oligonucleotide
gugaccccgaacuguaauu

SEQ ID NO: 290940 - RNA, 19 nt, Artificial Sequence
  Description of Artificial Sequence: Synthetic oligonucleotide
gucucggucgcuggaguaa

SEQ ID NO: 290941 - RNA, 19 nt, Artificial Sequence
  Description of Artificial Sequence: Synthetic oligonucleotide
guacugcgagcaguucuuc

SEQ ID NO: 290942 - RNA, 19 nt, Artificial Sequence
  Description of Artificial Sequence: Synthetic oligonucleotide
uucaagcgacaggcucuac

SEQ ID NO: 290943 - RNA, 19 nt, Artificial Sequence
  Description of Artificial Sequence: Synthetic oligonucleotide
uagccucccgaagcacaga

SEQ ID NO: 290944 - RNA, 19 nt, Artificial Sequence
  Description of Artificial Sequence: Synthetic oligonucleotide
ccguauuugggguucaaau

SEQ ID NO: 290945 - RNA, 19 nt, Artificial Sequence
  Description of Artificial Sequence: Synthetic oligonucleotide
ggaauggcugaugauuuau

SEQ ID NO: 290946 - RNA, 19 nt, Artificial Sequence
  Description of Artificial Sequence: Synthetic oligonucleotide
accaagcaaauaggcccau

SEQ ID NO: 290947 - RNA, 19 nt, Artificial Sequence
  Description of Artificial Sequence: Synthetic oligonucleotide
cucuuccauuagacgaaua

SEQ ID NO: 290948 - RNA, 19 nt, Artificial Sequence
  Description of Artificial Sequence: Synthetic oligonucleotide
cuucaagcgacaggcucua

SEQ ID NO: 290949 - RNA, 19 nt, Artificial Sequence
  Description of Artificial Sequence: Synthetic oligonucleotide
cccagucgcgacgagucgc

SEQ ID NO: 290950 - RNA, 19 nt, Artificial Sequence
  Description of Artificial Sequence: Synthetic oligonucleotide
gcugcgguagcaggauaug

SEQ ID NO: 290951 - RNA, 19 nt, Artificial Sequence
  Description of Artificial Sequence: Synthetic oligonucleotide
gagugcuaucauaaccguu

SEQ ID NO: 290952 - RNA, 19 nt, Artificial Sequence
  Description of Artificial Sequence: Synthetic oligonucleotide
auaugccuguugguucaua

SEQ ID NO: 290953 - RNA, 19 nt, Artificial Sequence
  Description of Artificial Sequence: Synthetic oligonucleotide
caguauucagcagcaacuu

SEQ ID NO: 290954 - RNA, 19 nt, Artificial Sequence
  Description of Artificial Sequence: Synthetic oligonucleotide
cagggaaguuugcuucaua

SEQ ID NO: 290955 - RNA, 19 nt, Artificial Sequence
  Description of Artificial Sequence: Synthetic oligonucleotide
accccuggaacgaccugaa

SEQ ID NO: 290956 - RNA, 19 nt, Artificial Sequence
  Description of Artificial Sequence: Synthetic oligonucleotide
caucgguagcaaucagaau

SEQ ID NO: 290957 - RNA, 19 nt, Artificial Sequence
  Description of Artificial Sequence: Synthetic oligonucleotide
guguaugcugugcccguuu

SEQ ID NO: 290958 - RNA, 19 nt, Artificial Sequence
  Description of Artificial Sequence: Synthetic oligonucleotide
ucgcgacgagucgcugaga

SEQ ID NO: 290959 - RNA, 19 nt, Artificial Sequence
  Description of Artificial Sequence: Synthetic oligonucleotide
cgacggcgaagccuuugcg

SEQ ID NO: 290960 - RNA, 19 nt, Artificial Sequence
  Description of Artificial Sequence: Synthetic oligonucleotide
ggucucggucgcuggagua

SEQ ID NO: 290961 - RNA, 19 nt, Artificial Sequence
  Description of Artificial Sequence: Synthetic oligonucleotide
gguacugcgagcaguucuu

SEQ ID NO: 290962 - RNA, 19 nt, Artificial Sequence
  Description of Artificial Sequence: Synthetic oligonucleotide
ggcgacggcgaagccuuug

SEQ ID NO: 290963 - RNA, 19 nt, Artificial Sequence
  Description of Artificial Sequence: Synthetic oligonucleotide
ugguugcggugagcgggaa

SEQ ID NO: 290964 - RNA, 19 nt, Artificial Sequence
  Description of Artificial Sequence: Synthetic oligonucleotide
cagucgcgacgagucgcug

SEQ ID NO: 290965 - RNA, 19 nt, Artificial Sequence
  Description of Artificial Sequence: Synthetic oligonucleotide
gcgucaccggcggagggac

SEQ ID NO: 290966 - RNA, 19 nt, Artificial Sequence
  Description of Artificial Sequence: Synthetic oligonucleotide
gguugcggugagcgggaaa

SEQ ID NO: 290967 - RNA, 19 nt, Artificial Sequence
  Description of Artificial Sequence: Synthetic oligonucleotide
gcccguuuugguacugcga

SEQ ID NO: 290968 - RNA, 19 nt, Artificial Sequence
  Description of Artificial Sequence: Synthetic oligonucleotide
caacccagucgcgacgagu

SEQ ID NO: 290969 - RNA, 19 nt, Artificial Sequence
  Description of Artificial Sequence: Synthetic oligonucleotide
caucgaggacaagguaagu

SEQ ID NO: 290970 - RNA, 19 nt, Artificial Sequence
  Description of Artificial Sequence: Synthetic oligonucleotide
ggcgucaccggcggaggga

SEQ ID NO: 290971 - RNA, 19 nt, Artificial Sequence
  Description of Artificial Sequence: Synthetic oligonucleotide
ccuccgaaucuuggugcac

SEQ ID NO: 290972 - RNA, 19 nt, Artificial Sequence
  Description of Artificial Sequence: Synthetic oligonucleotide
ccauauugcugagugcuau

SEQ ID NO: 290973 - RNA, 19 nt, Artificial Sequence
  Description of Artificial Sequence: Synthetic oligonucleotide
ggugagcgggaaagaccca

SEQ ID NO: 290974 - RNA, 19 nt, Artificial Sequence
  Description of Artificial Sequence: Synthetic oligonucleotide
ccguucugguaagucccug

SEQ ID NO: 290975 - RNA, 19 nt, Artificial Sequence
  Description of Artificial Sequence: Synthetic oligonucleotide
cugucacgacgaucauccu

SEQ ID NO: 290976 - RNA, 19 nt, Artificial Sequence
  Description of Artificial Sequence: Synthetic oligonucleotide
cacgacgaucauccuucau

SEQ ID NO: 290977 - RNA, 19 nt, Artificial Sequence
  Description of Artificial Sequence: Synthetic oligonucleotide
cggugcgucuugccaaauc

SEQ ID NO: 290978 - RNA, 19 nt, Artificial Sequence
  Description of Artificial Sequence: Synthetic oligonucleotide
cacgaaucuguggucccuu

SEQ ID NO: 290979 - RNA, 19 nt, Artificial Sequence
  Description of Artificial Sequence: Synthetic oligonucleotide
ccccuggaacgaccugaac

SEQ ID NO: 290980 - RNA, 19 nt, Artificial Sequence
  Description of Artificial Sequence: Synthetic oligonucleotide
cucuugugcggugcgucuu

SEQ ID NO: 290981 - RNA, 19 nt, Artificial Sequence
  Description of Artificial Sequence: Synthetic oligonucleotide
ccagucgcgacgagucgcu

SEQ ID NO: 290982 - RNA, 19 nt, Artificial Sequence
  Description of Artificial Sequence: Synthetic oligonucleotide
cgucaccggcggagggacg

SEQ ID NO: 290983 - RNA, 19 nt, Artificial Sequence
  Description of Artificial Sequence: Synthetic oligonucleotide
gguuugccuaucaggucuu

SEQ ID NO: 290984 - RNA, 19 nt, Artificial Sequence
  Description of Artificial Sequence: Synthetic oligonucleotide
cgcggucucggucgcugga

SEQ ID NO: 290985 - RNA, 19 nt, Artificial Sequence
  Description of Artificial Sequence: Synthetic oligonucleotide
gcggugcgucuugccaaau

SEQ ID NO: 290986 - RNA, 19 nt, Artificial Sequence
  Description of Artificial Sequence: Synthetic oligonucleotide
cggcgacggcgaagccuuu

SEQ ID NO: 290987 - RNA, 19 nt, Artificial Sequence
  Description of Artificial Sequence: Synthetic oligonucleotide
agauauuaaaauuauagcc

SEQ ID NO: 290988 - RNA, 19 nt, Artificial Sequence
  Description of Artificial Sequence: Synthetic oligonucleotide
ugagauauuguucuaaucc

SEQ ID NO: 290989 - RNA, 19 nt, Artificial Sequence
  Description of Artificial Sequence: Synthetic oligonucleotide
aaauguugccagucgaucc

SEQ ID NO: 290990 - RNA, 19 nt, Artificial Sequence
  Description of Artificial Sequence: Synthetic oligonucleotide
gagacuaccacacacgagg

SEQ ID NO: 290991 - RNA, 19 nt, Artificial Sequence
  Description of Artificial Sequence: Synthetic oligonucleotide
uuauacuaucagaauaugg

SEQ ID NO: 290992 - RNA, 19 nt, Artificial Sequence
  Description of Artificial Sequence: Synthetic oligonucleotide
aaacaugcgcaacaaauag

SEQ ID NO: 290993 - RNA, 19 nt, Artificial Sequence
  Description of Artificial Sequence: Synthetic oligonucleotide
uguguuacaaaacuccaag

SEQ ID NO: 290994 - RNA, 19 nt, Artificial Sequence
  Description of Artificial Sequence: Synthetic oligonucleotide
uguuccgcaagacagauca

SEQ ID NO: 290995 - RNA, 19 nt, Artificial Sequence
  Description of Artificial Sequence: Synthetic oligonucleotide
uugaacggaaucaaaauac

SEQ ID NO: 290996 - RNA, 19 nt, Artificial Sequence
  Description of Artificial Sequence: Synthetic oligonucleotide
ucagggugcaugaauaacg

SEQ ID NO: 290997 - RNA, 19 nt, Artificial Sequence
  Description of Artificial Sequence: Synthetic oligonucleotide
uguuaaagaccugagacag

SEQ ID NO: 290998 - RNA, 19 nt, Artificial Sequence
  Description of Artificial Sequence: Synthetic oligonucleotide
uuugugcaaagacagaaca

SEQ ID NO: 290999 - RNA, 19 nt, Artificial Sequence
  Description of Artificial Sequence: Synthetic oligonucleotide
ugacacaauauacagguga

SEQ ID NO: 291000 - RNA, 19 nt, Artificial Sequence
  Description of Artificial Sequence: Synthetic oligonucleotide
auaacgugcccacagcugc

SEQ ID NO: 291001 - RNA, 19 nt, Artificial Sequence
  Description of Artificial Sequence: Synthetic oligonucleotide
aacaaauagaagucagaug

SEQ ID NO: 291002 - RNA, 19 nt, Artificial Sequence
  Description of Artificial Sequence: Synthetic oligonucleotide
uacacuaaagccuuuauuu

SEQ ID NO: 291003 - RNA, 19 nt, Artificial Sequence
  Description of Artificial Sequence: Synthetic oligonucleotide
ugcucuuuagcuugaacgg

SEQ ID NO: 291004 - RNA, 19 nt, Artificial Sequence
  Description of Artificial Sequence: Synthetic oligonucleotide
ucgaugucuaauauacacg

SEQ ID NO: 291005 - RNA, 19 nt, Artificial Sequence
  Description of Artificial Sequence: Synthetic oligonucleotide
aauagauucagccgaacuu

SEQ ID NO: 291006 - RNA, 19 nt, Artificial Sequence
  Description of Artificial Sequence: Synthetic oligonucleotide
aaugugcugcugcaaaccg

SEQ ID NO: 291007 - RNA, 19 nt, Artificial Sequence
  Description of Artificial Sequence: Synthetic oligonucleotide
ucuuaggaugaaaaucagg

SEQ ID NO: 291008 - RNA, 19 nt, Artificial Sequence
  Description of Artificial Sequence: Synthetic oligonucleotide
aaauagauucagccgaacu

SEQ ID NO: 291009 - RNA, 19 nt, Artificial Sequence
  Description of Artificial Sequence: Synthetic oligonucleotide
ucuuuugacaguacaguug

SEQ ID NO: 291010 - RNA, 19 nt, Artificial Sequence
  Description of Artificial Sequence: Synthetic oligonucleotide
ugucuaauauacacgggag

SEQ ID NO: 291011 - RNA, 19 nt, Artificial Sequence
  Description of Artificial Sequence: Synthetic oligonucleotide
augaaaaucaggucugaag

SEQ ID NO: 291012 - RNA, 19 nt, Artificial Sequence
  Description of Artificial Sequence: Synthetic oligonucleotide
acuugcaaugcuuuuaucu

SEQ ID NO: 291013 - RNA, 19 nt, Artificial Sequence
  Description of Artificial Sequence: Synthetic oligonucleotide
augucgaugucuaauauac

SEQ ID NO: 291014 - RNA, 19 nt, Artificial Sequence
  Description of Artificial Sequence: Synthetic oligonucleotide
uugacaguacaguugaucu

SEQ ID NO: 291015 - RNA, 19 nt, Artificial Sequence
  Description of Artificial Sequence: Synthetic oligonucleotide
agacgaaugagguugguug

SEQ ID NO: 291016 - RNA, 19 nt, Artificial Sequence
  Description of Artificial Sequence: Synthetic oligonucleotide
agguaaguaagaucuguac

SEQ ID NO: 291017 - RNA, 19 nt, Artificial Sequence
  Description of Artificial Sequence: Synthetic oligonucleotide
ugugaugccggcacggacg

SEQ ID NO: 291018 - RNA, 19 nt, Artificial Sequence
  Description of Artificial Sequence: Synthetic oligonucleotide
augcgcaacaaauagaagu

SEQ ID NO: 291019 - RNA, 19 nt, Artificial Sequence
  Description of Artificial Sequence: Synthetic oligonucleotide
auagcugucauuaggcacc

SEQ ID NO: 291020 - RNA, 19 nt, Artificial Sequence
  Description of Artificial Sequence: Synthetic oligonucleotide
uaaacauaugauuuucccu

SEQ ID NO: 291021 - RNA, 19 nt, Artificial Sequence
  Description of Artificial Sequence: Synthetic oligonucleotide
auacauuccaaauuuuaca

SEQ ID NO: 291022 - RNA, 19 nt, Artificial Sequence
  Description of Artificial Sequence: Synthetic oligonucleotide
ugguuaauaaggcugcugu

SEQ ID NO: 291023 - RNA, 19 nt, Artificial Sequence
  Description of Artificial Sequence: Synthetic oligonucleotide
gaaaaucaggucugaagcc

SEQ ID NO: 291024 - RNA, 19 nt, Artificial Sequence
  Description of Artificial Sequence: Synthetic oligonucleotide
uaaguagcuguuccgaaug

SEQ ID NO: 291025 - RNA, 19 nt, Artificial Sequence
  Description of Artificial Sequence: Synthetic oligonucleotide
ucuaauauacacgggaggu

SEQ ID NO: 291026 - RNA, 19 nt, Artificial Sequence
  Description of Artificial Sequence: Synthetic oligonucleotide
aguuuguuagauccucucg

SEQ ID NO: 291027 - RNA, 19 nt, Artificial Sequence
  Description of Artificial Sequence: Synthetic oligonucleotide
uguucuggcaccaacuuuc

SEQ ID NO: 291028 - RNA, 19 nt, Artificial Sequence
  Description of Artificial Sequence: Synthetic oligonucleotide
ugaacggaaucaaaauacc

SEQ ID NO: 291029 - RNA, 19 nt, Artificial Sequence
  Description of Artificial Sequence: Synthetic oligonucleotide
augucuaauauacacggga

SEQ ID NO: 291030 - RNA, 19 nt, Artificial Sequence
  Description of Artificial Sequence: Synthetic oligonucleotide
augaauaacggaucuauau

SEQ ID NO: 291031 - RNA, 19 nt, Artificial Sequence
  Description of Artificial Sequence: Synthetic oligonucleotide
aagugcuguauccgaaacg

SEQ ID NO: 291032 - RNA, 19 nt, Artificial Sequence
  Description of Artificial Sequence: Synthetic oligonucleotide
uguauccgaaacgagaggc

SEQ ID NO: 291033 - RNA, 19 nt, Artificial Sequence
  Description of Artificial Sequence: Synthetic oligonucleotide
uucaugaucucgcuguucu

SEQ ID NO: 291034 - RNA, 19 nt, Artificial Sequence
  Description of Artificial Sequence: Synthetic oligonucleotide
uccucuugacacaauauac

SEQ ID NO: 291035 - RNA, 19 nt, Artificial Sequence
  Description of Artificial Sequence: Synthetic oligonucleotide
aaugugugccaugguaacc

SEQ ID NO: 291036 - RNA, 19 nt, Artificial Sequence
  Description of Artificial Sequence: Synthetic oligonucleotide
auugggaugaaccuucagu

SEQ ID NO: 291037 - RNA, 19 nt, Artificial Sequence
  Description of Artificial Sequence: Synthetic oligonucleotide
uguucuaauccacuggguc

SEQ ID NO: 291038 - RNA, 19 nt, Artificial Sequence
  Description of Artificial Sequence: Synthetic oligonucleotide
gucgaugucuaauauacac

SEQ ID NO: 291039 - RNA, 19 nt, Artificial Sequence
  Description of Artificial Sequence: Synthetic oligonucleotide
agagaguucaugaucucgc

SEQ ID NO: 291040 - RNA, 19 nt, Artificial Sequence
  Description of Artificial Sequence: Synthetic oligonucleotide
agaccugagacagucgucc

SEQ ID NO: 291041 - RNA, 19 nt, Artificial Sequence
  Description of Artificial Sequence: Synthetic oligonucleotide
ugauauggaaagcauguua

SEQ ID NO: 291042 - RNA, 19 nt, Artificial Sequence
  Description of Artificial Sequence: Synthetic oligonucleotide
ugaauaacggaucuauauu

SEQ ID NO: 291043 - RNA, 19 nt, Artificial Sequence
  Description of Artificial Sequence: Synthetic oligonucleotide
guaaguaagaucuguacaa

SEQ ID NO: 291044 - RNA, 19 nt, Artificial Sequence
  Description of Artificial Sequence: Synthetic oligonucleotide
cugucauuaggcaccaagg

SEQ ID NO: 291045 - RNA, 19 nt, Artificial Sequence
  Description of Artificial Sequence: Synthetic oligonucleotide
uuaaagaccugagacaguc

SEQ ID NO: 291046 - RNA, 19 nt, Artificial Sequence
  Description of Artificial Sequence: Synthetic oligonucleotide
ugucuuucuggaaaagcca

SEQ ID NO: 291047 - RNA, 19 nt, Artificial Sequence
  Description of Artificial Sequence: Synthetic oligonucleotide
gucuaauauacacgggagg

SEQ ID NO: 291048 - RNA, 19 nt, Artificial Sequence
  Description of Artificial Sequence: Synthetic oligonucleotide
cuuaggaugaaaaucaggu

SEQ ID NO: 291049 - RNA, 19 nt, Artificial Sequence
  Description of Artificial Sequence: Synthetic oligonucleotide
ugcgcaacaaauagaaguc

SEQ ID NO: 291050 - RNA, 19 nt, Artificial Sequence
  Description of Artificial Sequence: Synthetic oligonucleotide
uuucaaugcucauacacua

SEQ ID NO: 291051 - RNA, 19 nt, Artificial Sequence
  Description of Artificial Sequence: Synthetic oligonucleotide
uaaaugaaacaugucgaug

SEQ ID NO: 291052 - RNA, 19 nt, Artificial Sequence
  Description of Artificial Sequence: Synthetic oligonucleotide
gaagaugccagccccggag

SEQ ID NO: 291053 - RNA, 19 nt, Artificial Sequence
  Description of Artificial Sequence: Synthetic oligonucleotide
guguuuugugcaaagacag

SEQ ID NO: 291054 - RNA, 19 nt, Artificial Sequence
  Description of Artificial Sequence: Synthetic oligonucleotide
gacgcaaagaguuuacaga

SEQ ID NO: 291055 - RNA, 19 nt, Artificial Sequence
  Description of Artificial Sequence: Synthetic oligonucleotide
uuauagccaauuuauuaaa

SEQ ID NO: 291056 - RNA, 19 nt, Artificial Sequence
  Description of Artificial Sequence: Synthetic oligonucleotide
accugaaugucacucaugu

SEQ ID NO: 291057 - RNA, 19 nt, Artificial Sequence
  Description of Artificial Sequence: Synthetic oligonucleotide
aacauaugauuuucccuga

SEQ ID NO: 291058 - RNA, 19 nt, Artificial Sequence
  Description of Artificial Sequence: Synthetic oligonucleotide
ugcuguaagugcuguaucc

SEQ ID NO: 291059 - RNA, 19 nt, Artificial Sequence
  Description of Artificial Sequence: Synthetic oligonucleotide
aaguuguccacagauauua

SEQ ID NO: 291060 - RNA, 19 nt, Artificial Sequence
  Description of Artificial Sequence: Synthetic oligonucleotide
guuagauccucucggguag

SEQ ID NO: 291061 - RNA, 19 nt, Artificial Sequence
  Description of Artificial Sequence: Synthetic oligonucleotide
agugugcaagcgcagucgc

SEQ ID NO: 291062 - RNA, 19 nt, Artificial Sequence
  Description of Artificial Sequence: Synthetic oligonucleotide
cuuuugacaguacaguuga

SEQ ID NO: 291063 - RNA, 19 nt, Artificial Sequence
  Description of Artificial Sequence: Synthetic oligonucleotide
aauucaaccuccugcugaa

SEQ ID NO: 291064 - RNA, 19 nt, Artificial Sequence
  Description of Artificial Sequence: Synthetic oligonucleotide
aaauuggaugcuugguuaa

SEQ ID NO: 291065 - RNA, 19 nt, Artificial Sequence
  Description of Artificial Sequence: Synthetic oligonucleotide
ugcaaaccguguuaaagac

SEQ ID NO: 291066 - RNA, 19 nt, Artificial Sequence
  Description of Artificial Sequence: Synthetic oligonucleotide
uacagaaguguccuugcac

SEQ ID NO: 291067 - RNA, 19 nt, Artificial Sequence
  Description of Artificial Sequence: Synthetic oligonucleotide
agcaguagcucugagagca

SEQ ID NO: 291068 - RNA, 19 nt, Artificial Sequence
  Description of Artificial Sequence: Synthetic oligonucleotide
aaaagacgaaugagguugg

SEQ ID NO: 291069 - RNA, 19 nt, Artificial Sequence
  Description of Artificial Sequence: Synthetic oligonucleotide
gaaauuggaugcuugguua

SEQ ID NO: 291070 - RNA, 19 nt, Artificial Sequence
  Description of Artificial Sequence: Synthetic oligonucleotide
acacgggaggucuucauag

SEQ ID NO: 291071 - RNA, 19 nt, Artificial Sequence
  Description of Artificial Sequence: Synthetic oligonucleotide
ugauuuucccugauaugga

SEQ ID NO: 291072 - RNA, 19 nt, Artificial Sequence
  Description of Artificial Sequence: Synthetic oligonucleotide
uaaagaccugagacagucg

SEQ ID NO: 291073 - RNA, 19 nt, Artificial Sequence
  Description of Artificial Sequence: Synthetic oligonucleotide
cuccccguagucaucaagg

SEQ ID NO: 291074 - RNA, 19 nt, Artificial Sequence
  Description of Artificial Sequence: Synthetic oligonucleotide
cuuucgaaaccgcucuugg

SEQ ID NO: 291075 - RNA, 19 nt, Artificial Sequence
  Description of Artificial Sequence: Synthetic oligonucleotide
uugccagucgaucccaacc

SEQ ID NO: 291076 - RNA, 19 nt, Artificial Sequence
  Description of Artificial Sequence: Synthetic oligonucleotide
ucggguagcuuauugcacc

SEQ ID NO: 291077 - RNA, 19 nt, Artificial Sequence
  Description of Artificial Sequence: Synthetic oligonucleotide
ucaauaaagugccgcugca

SEQ ID NO: 291078 - RNA, 19 nt, Artificial Sequence
  Description of Artificial Sequence: Synthetic oligonucleotide
acgcaaagaguuuacagaa

SEQ ID NO: 291079 - RNA, 19 nt, Artificial Sequence
  Description of Artificial Sequence: Synthetic oligonucleotide
ucucguacucucaggaaga

SEQ ID NO: 291080 - RNA, 19 nt, Artificial Sequence
  Description of Artificial Sequence: Synthetic oligonucleotide
gaggaaaggugugaugccg

SEQ ID NO: 291081 - RNA, 19 nt, Artificial Sequence
  Description of Artificial Sequence: Synthetic oligonucleotide
guaguuacauaaauguuca

SEQ ID NO: 291082 - RNA, 19 nt, Artificial Sequence
  Description of Artificial Sequence: Synthetic oligonucleotide
agugcuguauccgaaacga

SEQ ID NO: 291083 - RNA, 19 nt, Artificial Sequence
  Description of Artificial Sequence: Synthetic oligonucleotide
aacgagaggccugucauca

SEQ ID NO: 291084 - RNA, 19 nt, Artificial Sequence
  Description of Artificial Sequence: Synthetic oligonucleotide
aucauagcuagugugcaag

SEQ ID NO: 291085 - RNA, 19 nt, Artificial Sequence
  Description of Artificial Sequence: Synthetic oligonucleotide
uguccaauuuccuccguga

SEQ ID NO: 291086 - RNA, 19 nt, Artificial Sequence
  Description of Artificial Sequence: Synthetic oligonucleotide
uuugacaguacaguugauc

SEQ ID NO: 291087 - RNA, 19 nt, Artificial Sequence
  Description of Artificial Sequence: Synthetic oligonucleotide
cugaaugucacucaugucu

SEQ ID NO: 291088 - RNA, 19 nt, Artificial Sequence
  Description of Artificial Sequence: Synthetic oligonucleotide
cagucgaucccaaccaggg

SEQ ID NO: 291089 - RNA, 19 nt, Artificial Sequence
  Description of Artificial Sequence: Synthetic oligonucleotide
cagggugcaugaauaacgg

SEQ ID NO: 291090 - RNA, 19 nt, Artificial Sequence
  Description of Artificial Sequence: Synthetic oligonucleotide
agcuaauucuucuucccca

SEQ ID NO: 291091 - RNA, 19 nt, Artificial Sequence
  Description of Artificial Sequence: Synthetic oligonucleotide
uguaagugcuguauccgaa

SEQ ID NO: 291092 - RNA, 19 nt, Artificial Sequence
  Description of Artificial Sequence: Synthetic oligonucleotide
cacaugaugggcacacggg

SEQ ID NO: 291093 - RNA, 19 nt, Artificial Sequence
  Description of Artificial Sequence: Synthetic oligonucleotide
acggaaucaaaauaccuuu

SEQ ID NO: 291094 - RNA, 19 nt, Artificial Sequence
  Description of Artificial Sequence: Synthetic oligonucleotide
augcauaacgugcccacag

SEQ ID NO: 291095 - RNA, 19 nt, Artificial Sequence
  Description of Artificial Sequence: Synthetic oligonucleotide
ugggaugaaccuucagucc

SEQ ID NO: 291096 - RNA, 19 nt, Artificial Sequence
  Description of Artificial Sequence: Synthetic oligonucleotide
caugguaaccagaugaaaa

SEQ ID NO: 291097 - RNA, 19 nt, Artificial Sequence
  Description of Artificial Sequence: Synthetic oligonucleotide
ucagccgaacuuauuuucu

SEQ ID NO: 291098 - RNA, 19 nt, Artificial Sequence
  Description of Artificial Sequence: Synthetic oligonucleotide
cugcgcauguccaauuucc

SEQ ID NO: 291099 - RNA, 19 nt, Artificial Sequence
  Description of Artificial Sequence: Synthetic oligonucleotide
aacaaugggcaugcauaac

SEQ ID NO: 291100 - RNA, 19 nt, Artificial Sequence
  Description of Artificial Sequence: Synthetic oligonucleotide
ugaaugucacucaugucuu

SEQ ID NO: 291101 - RNA, 19 nt, Artificial Sequence
  Description of Artificial Sequence: Synthetic oligonucleotide
uguuuugugcaaagacaga

SEQ ID NO: 291102 - RNA, 19 nt, Artificial Sequence
  Description of Artificial Sequence: Synthetic oligonucleotide
aaccguguuaaagaccuga

SEQ ID NO: 291103 - RNA, 19 nt, Artificial Sequence
  Description of Artificial Sequence: Synthetic oligonucleotide
gaauaacggaucuauauuu

SEQ ID NO: 291104 - RNA, 19 nt, Artificial Sequence
  Description of Artificial Sequence: Synthetic oligonucleotide
cgaugucuaauauacacgg

SEQ ID NO: 291105 - RNA, 19 nt, Artificial Sequence
  Description of Artificial Sequence: Synthetic oligonucleotide
uucagccgaacuuauuuuc

SEQ ID NO: 291106 - RNA, 19 nt, Artificial Sequence
  Description of Artificial Sequence: Synthetic oligonucleotide
gguaaguaagaucuguaca

SEQ ID NO: 291107 - RNA, 19 nt, Artificial Sequence
  Description of Artificial Sequence: Synthetic oligonucleotide
uuucgaaaccgcucuuggc

SEQ ID NO: 291108 - RNA, 19 nt, Artificial Sequence
  Description of Artificial Sequence: Synthetic oligonucleotide
cacgguguugcucaggcac

SEQ ID NO: 291109 - RNA, 19 nt, Artificial Sequence
  Description of Artificial Sequence: Synthetic oligonucleotide
ugcuuuugucaccaccuga

SEQ ID NO: 291110 - RNA, 19 nt, Artificial Sequence
  Description of Artificial Sequence: Synthetic oligonucleotide
ugugcaagcgcagucgcug

SEQ ID NO: 291111 - RNA, 19 nt, Artificial Sequence
  Description of Artificial Sequence: Synthetic oligonucleotide
ugcauaacgugcccacagc

SEQ ID NO: 291112 - RNA, 19 nt, Artificial Sequence
  Description of Artificial Sequence: Synthetic oligonucleotide
ugccagucgaucccaacca

SEQ ID NO: 291113 - RNA, 19 nt, Artificial Sequence
  Description of Artificial Sequence: Synthetic oligonucleotide
uguaaguagcuguuccgaa

SEQ ID NO: 291114 - RNA, 19 nt, Artificial Sequence
  Description of Artificial Sequence: Synthetic oligonucleotide
acacacgaggcacagaguu

SEQ ID NO: 291115 - RNA, 19 nt, Artificial Sequence
  Description of Artificial Sequence: Synthetic oligonucleotide
aauaacggaucuauauuuu

SEQ ID NO: 291116 - RNA, 19 nt, Artificial Sequence
  Description of Artificial Sequence: Synthetic oligonucleotide
ucauagcuagugugcaagc

SEQ ID NO: 291117 - RNA, 19 nt, Artificial Sequence
  Description of Artificial Sequence: Synthetic oligonucleotide
gagacagucguccagucua

SEQ ID NO: 291118 - RNA, 19 nt, Artificial Sequence
  Description of Artificial Sequence: Synthetic oligonucleotide
aaggacgcaaagaguuuac

SEQ ID NO: 291119 - RNA, 19 nt, Artificial Sequence
  Description of Artificial Sequence: Synthetic oligonucleotide
gaacuuauuuucuguuguc

SEQ ID NO: 291120 - RNA, 19 nt, Artificial Sequence
  Description of Artificial Sequence: Synthetic oligonucleotide
agaguucaugaucucgcug

SEQ ID NO: 291121 - RNA, 19 nt, Artificial Sequence
  Description of Artificial Sequence: Synthetic oligonucleotide
auggaaagcauguuauaua

SEQ ID NO: 291122 - RNA, 19 nt, Artificial Sequence
  Description of Artificial Sequence: Synthetic oligonucleotide
augcuguaagugcuguauc

SEQ ID NO: 291123 - RNA, 19 nt, Artificial Sequence
  Description of Artificial Sequence: Synthetic oligonucleotide
cauaacgugcccacagcug

SEQ ID NO: 291124 - RNA, 19 nt, Artificial Sequence
  Description of Artificial Sequence: Synthetic oligonucleotide
cucucggguagcuuauugc

SEQ ID NO: 291125 - RNA, 19 nt, Artificial Sequence
  Description of Artificial Sequence: Synthetic oligonucleotide
aacgcaagcaccaggccca

SEQ ID NO: 291126 - RNA, 19 nt, Artificial Sequence
  Description of Artificial Sequence: Synthetic oligonucleotide
auacacuaaagccuuuauu

SEQ ID NO: 291127 - RNA, 19 nt, Artificial Sequence
  Description of Artificial Sequence: Synthetic oligonucleotide
uccuccgugauacuguguu

SEQ ID NO: 291128 - RNA, 19 nt, Artificial Sequence
  Description of Artificial Sequence: Synthetic oligonucleotide
ggacgcaaagaguuuacag

SEQ ID NO: 291129 - RNA, 19 nt, Artificial Sequence
  Description of Artificial Sequence: Synthetic oligonucleotide
gggaaagguaguuacauaa

SEQ ID NO: 291130 - RNA, 19 nt, Artificial Sequence
  Description of Artificial Sequence: Synthetic oligonucleotide
ucuuucgaaaccgcucuug

SEQ ID NO: 291131 - RNA, 19 nt, Artificial Sequence
  Description of Artificial Sequence: Synthetic oligonucleotide
uauccgaaacgagaggccu

SEQ ID NO: 291132 - RNA, 19 nt, Artificial Sequence
  Description of Artificial Sequence: Synthetic oligonucleotide
ugacauucucguacucuca

SEQ ID NO: 291133 - RNA, 19 nt, Artificial Sequence
  Description of Artificial Sequence: Synthetic oligonucleotide
caccaguaaaugaaacaug

SEQ ID NO: 291134 - RNA, 19 nt, Artificial Sequence
  Description of Artificial Sequence: Synthetic oligonucleotide
aacaugcgcaacaaauaga

SEQ ID NO: 291135 - RNA, 19 nt, Artificial Sequence
  Description of Artificial Sequence: Synthetic oligonucleotide
gguucuuaggaugaaaauc

SEQ ID NO: 291136 - RNA, 19 nt, Artificial Sequence
  Description of Artificial Sequence: Synthetic oligonucleotide
gaucuuucgaaaccgcucu

SEQ ID NO: 291137 - RNA, 19 nt, Artificial Sequence
  Description of Artificial Sequence: Synthetic oligonucleotide
caaugugugccaugguaac

SEQ ID NO: 291138 - RNA, 19 nt, Artificial Sequence
  Description of Artificial Sequence: Synthetic oligonucleotide
guagcuguuccgaauguug

SEQ ID NO: 291139 - RNA, 19 nt, Artificial Sequence
  Description of Artificial Sequence: Synthetic oligonucleotide
uugguuaauaaggcugcug

SEQ ID NO: 291140 - RNA, 19 nt, Artificial Sequence
  Description of Artificial Sequence: Synthetic oligonucleotide
ucgaucccaaccagggucu

SEQ ID NO: 291141 - RNA, 19 nt, Artificial Sequence
  Description of Artificial Sequence: Synthetic oligonucleotide
cugcaaaccguguuaaaga

SEQ ID NO: 291142 - RNA, 19 nt, Artificial Sequence
  Description of Artificial Sequence: Synthetic oligonucleotide
uaaguaagaucuguacaau

SEQ ID NO: 291143 - RNA, 19 nt, Artificial Sequence
  Description of Artificial Sequence: Synthetic oligonucleotide
ugucgaugucuaauauaca

SEQ ID NO: 291144 - RNA, 19 nt, Artificial Sequence
  Description of Artificial Sequence: Synthetic oligonucleotide
ucugugccgggcccaaugc

SEQ ID NO: 291145 - RNA, 19 nt, Artificial Sequence
  Description of Artificial Sequence: Synthetic oligonucleotide
cauucucguacucucagga

SEQ ID NO: 291146 - RNA, 19 nt, Artificial Sequence
  Description of Artificial Sequence: Synthetic oligonucleotide
auagcaccugacauucucg

SEQ ID NO: 291147 - RNA, 19 nt, Artificial Sequence
  Description of Artificial Sequence: Synthetic oligonucleotide
cuccgugauacuguguugc

SEQ ID NO: 291148 - RNA, 19 nt, Artificial Sequence
  Description of Artificial Sequence: Synthetic oligonucleotide
cacaauauacaggugacaa

SEQ ID NO: 291149 - RNA, 19 nt, Artificial Sequence
  Description of Artificial Sequence: Synthetic oligonucleotide
ggcaccaacuuucaaucag

SEQ ID NO: 291150 - RNA, 19 nt, Artificial Sequence
  Description of Artificial Sequence: Synthetic oligonucleotide
aaucaggucugaagccuuc

SEQ ID NO: 291151 - RNA, 19 nt, Artificial Sequence
  Description of Artificial Sequence: Synthetic oligonucleotide
agcuuuuaacuucacuguu

SEQ ID NO: 291152 - RNA, 19 nt, Artificial Sequence
  Description of Artificial Sequence: Synthetic oligonucleotide
cuguauccgaaacgagagg

SEQ ID NO: 291153 - RNA, 19 nt, Artificial Sequence
  Description of Artificial Sequence: Synthetic oligonucleotide
augugugccaugguaacca

SEQ ID NO: 291154 - RNA, 19 nt, Artificial Sequence
  Description of Artificial Sequence: Synthetic oligonucleotide
cauaaauguaaaggauuuc

SEQ ID NO: 291155 - RNA, 19 nt, Artificial Sequence
  Description of Artificial Sequence: Synthetic oligonucleotide
gcacaugaugggcacacgg

SEQ ID NO: 291156 - RNA, 19 nt, Artificial Sequence
  Description of Artificial Sequence: Synthetic oligonucleotide
guagcucugagagcagagg

SEQ ID NO: 291157 - RNA, 19 nt, Artificial Sequence
  Description of Artificial Sequence: Synthetic oligonucleotide
caugcgcaacaaauagaag

SEQ ID NO: 291158 - RNA, 19 nt, Artificial Sequence
  Description of Artificial Sequence: Synthetic oligonucleotide
ugugugccaugguaaccag

SEQ ID NO: 291159 - RNA, 19 nt, Artificial Sequence
  Description of Artificial Sequence: Synthetic oligonucleotide
cgugauacuguguugcugc

SEQ ID NO: 291160 - RNA, 19 nt, Artificial Sequence
  Description of Artificial Sequence: Synthetic oligonucleotide
uagcaccugacauucucgu

SEQ ID NO: 291161 - RNA, 19 nt, Artificial Sequence
  Description of Artificial Sequence: Synthetic oligonucleotide
caguuuguuagauccucuc

SEQ ID NO: 291162 - RNA, 19 nt, Artificial Sequence
  Description of Artificial Sequence: Synthetic oligonucleotide
auucagccgaacuuauuuu

SEQ ID NO: 291163 - RNA, 19 nt, Artificial Sequence
  Description of Artificial Sequence: Synthetic oligonucleotide
auauggguucuuaggauga

SEQ ID NO: 291164 - RNA, 19 nt, Artificial Sequence
  Description of Artificial Sequence: Synthetic oligonucleotide
gaaacgagaggccugucau

SEQ ID NO: 291165 - RNA, 19 nt, Artificial Sequence
  Description of Artificial Sequence: Synthetic oligonucleotide
acgggaggucuucauagcu

SEQ ID NO: 291166 - RNA, 19 nt, Artificial Sequence
  Description of Artificial Sequence: Synthetic oligonucleotide
cuagugugcaagcgcaguc

SEQ ID NO: 291167 - RNA, 19 nt, Artificial Sequence
  Description of Artificial Sequence: Synthetic oligonucleotide
ugcgcauguccaauuuccu

SEQ ID NO: 291168 - RNA, 19 nt, Artificial Sequence
  Description of Artificial Sequence: Synthetic oligonucleotide
caucaagaguggccgagac

SEQ ID NO: 291169 - RNA, 19 nt, Artificial Sequence
  Description of Artificial Sequence: Synthetic oligonucleotide
gaauauggguucuuaggau

SEQ ID NO: 291170 - RNA, 19 nt, Artificial Sequence
  Description of Artificial Sequence: Synthetic oligonucleotide
cauucucuacaucauagcu

SEQ ID NO: 291171 - RNA, 19 nt, Artificial Sequence
  Description of Artificial Sequence: Synthetic oligonucleotide
agcuugaacggaaucaaaa

SEQ ID NO: 291172 - RNA, 19 nt, Artificial Sequence
  Description of Artificial Sequence: Synthetic oligonucleotide
ugggaccugaaugucacuc

SEQ ID NO: 291173 - RNA, 19 nt, Artificial Sequence
  Description of Artificial Sequence: Synthetic oligonucleotide
aauuggaugcuugguuaau

SEQ ID NO: 291174 - RNA, 19 nt, Artificial Sequence
  Description of Artificial Sequence: Synthetic oligonucleotide
cucggguagcuuauugcac

SEQ ID NO: 291175 - RNA, 19 nt, Artificial Sequence
  Description of Artificial Sequence: Synthetic oligonucleotide
ugguagaggagugauuaua

SEQ ID NO: 291176 - RNA, 19 nt, Artificial Sequence
  Description of Artificial Sequence: Synthetic oligonucleotide
cugacuuggggcacgagaa

SEQ ID NO: 291177 - RNA, 19 nt, Artificial Sequence
  Description of Artificial Sequence: Synthetic oligonucleotide
ggcccaaugcuguaagugc

SEQ ID NO: 291178 - RNA, 19 nt, Artificial Sequence
  Description of Artificial Sequence: Synthetic oligonucleotide
aucaagaguggccgagaca

SEQ ID NO: 291179 - RNA, 19 nt, Artificial Sequence
  Description of Artificial Sequence: Synthetic oligonucleotide
gcuguaagugcuguauccg

SEQ ID NO: 291180 - RNA, 19 nt, Artificial Sequence
  Description of Artificial Sequence: Synthetic oligonucleotide
gaugccggcacggacguuc

SEQ ID NO: 291181 - RNA, 19 nt, Artificial Sequence
  Description of Artificial Sequence: Synthetic oligonucleotide
caggaagaugccagccccg

SEQ ID NO: 291182 - RNA, 19 nt, Artificial Sequence
  Description of Artificial Sequence: Synthetic oligonucleotide
gaucagggugcaugaauaa

SEQ ID NO: 291183 - RNA, 19 nt, Artificial Sequence
  Description of Artificial Sequence: Synthetic oligonucleotide
gucaucaagguagggagga

SEQ ID NO: 291184 - RNA, 19 nt, Artificial Sequence
  Description of Artificial Sequence: Synthetic oligonucleotide
aagacgaaugagguugguu

SEQ ID NO: 291185 - RNA, 19 nt, Artificial Sequence
  Description of Artificial Sequence: Synthetic oligonucleotide
acgagaaauuggaugcuug

SEQ ID NO: 291186 - RNA, 19 nt, Artificial Sequence
  Description of Artificial Sequence: Synthetic oligonucleotide
ucagucccaccuuguaagu

SEQ ID NO: 291187 - RNA, 19 nt, Artificial Sequence
  Description of Artificial Sequence: Synthetic oligonucleotide
guauccgaaacgagaggcc

SEQ ID NO: 291188 - RNA, 19 nt, Artificial Sequence
  Description of Artificial Sequence: Synthetic oligonucleotide
gguugguugguagggaaag

SEQ ID NO: 291189 - RNA, 19 nt, Artificial Sequence
  Description of Artificial Sequence: Synthetic oligonucleotide
uucuguugucuuucuggaa

SEQ ID NO: 291190 - RNA, 19 nt, Artificial Sequence
  Description of Artificial Sequence: Synthetic oligonucleotide
acauaugauuuucccugau

SEQ ID NO: 291191 - RNA, 19 nt, Artificial Sequence
  Description of Artificial Sequence: Synthetic oligonucleotide
caacaaugggcaugcauaa

SEQ ID NO: 291192 - RNA, 19 nt, Artificial Sequence
  Description of Artificial Sequence: Synthetic oligonucleotide
cagccgaacuuauuuucug

SEQ ID NO: 291193 - RNA, 19 nt, Artificial Sequence
  Description of Artificial Sequence: Synthetic oligonucleotide
auucucguacucucaggaa

SEQ ID NO: 291194 - RNA, 19 nt, Artificial Sequence
  Description of Artificial Sequence: Synthetic oligonucleotide
uggaugguguaugcgcagc

SEQ ID NO: 291195 - RNA, 19 nt, Artificial Sequence
  Description of Artificial Sequence: Synthetic oligonucleotide
accuuguaaguagcuguuc

SEQ ID NO: 291196 - RNA, 19 nt, Artificial Sequence
  Description of Artificial Sequence: Synthetic oligonucleotide
gaacggaaucaaaauaccu

SEQ ID NO: 291197 - RNA, 19 nt, Artificial Sequence
  Description of Artificial Sequence: Synthetic oligonucleotide
uccgaaacgagaggccugu

SEQ ID NO: 291198 - RNA, 19 nt, Artificial Sequence
  Description of Artificial Sequence: Synthetic oligonucleotide
cuguaagugcuguauccga

SEQ ID NO: 291199 - RNA, 19 nt, Artificial Sequence
  Description of Artificial Sequence: Synthetic oligonucleotide
gggaucacgguguugcuca

SEQ ID NO: 291200 - RNA, 19 nt, Artificial Sequence
  Description of Artificial Sequence: Synthetic oligonucleotide
ugguccgucuccccguagu

SEQ ID NO: 291201 - RNA, 19 nt, Artificial Sequence
  Description of Artificial Sequence: Synthetic oligonucleotide
agcauguuauauaaacauu

SEQ ID NO: 291202 - RNA, 19 nt, Artificial Sequence
  Description of Artificial Sequence: Synthetic oligonucleotide
agaucagggugcaugaaua

SEQ ID NO: 291203 - RNA, 19 nt, Artificial Sequence
  Description of Artificial Sequence: Synthetic oligonucleotide
agccgggaacgcaagcacc

SEQ ID NO: 291204 - RNA, 19 nt, Artificial Sequence
  Description of Artificial Sequence: Synthetic oligonucleotide
uaguccuccggaaggucaa

SEQ ID NO: 291205 - RNA, 19 nt, Artificial Sequence
  Description of Artificial Sequence: Synthetic oligonucleotide
gagccgggaacgcaagcac

SEQ ID NO: 291206 - RNA, 19 nt, Artificial Sequence
  Description of Artificial Sequence: Synthetic oligonucleotide
agccggagggugcuucuuc

SEQ ID NO: 291207 - RNA, 19 nt, Artificial Sequence
  Description of Artificial Sequence: Synthetic oligonucleotide
guagaggagugauuauaaa

SEQ ID NO: 291208 - RNA, 19 nt, Artificial Sequence
  Description of Artificial Sequence: Synthetic oligonucleotide
uucucuguagagggagugu

SEQ ID NO: 291209 - RNA, 19 nt, Artificial Sequence
  Description of Artificial Sequence: Synthetic oligonucleotide
cgcaagacagaucagggug

SEQ ID NO: 291210 - RNA, 19 nt, Artificial Sequence
  Description of Artificial Sequence: Synthetic oligonucleotide
uucuuccaaggcacuucca

SEQ ID NO: 291211 - RNA, 19 nt, Artificial Sequence
  Description of Artificial Sequence: Synthetic oligonucleotide
caugucgaugucuaauaua

SEQ ID NO: 291212 - RNA, 19 nt, Artificial Sequence
  Description of Artificial Sequence: Synthetic oligonucleotide
cacgggaggucuucauagc

SEQ ID NO: 291213 - RNA, 19 nt, Artificial Sequence
  Description of Artificial Sequence: Synthetic oligonucleotide
gaguaggugugugcugugc

SEQ ID NO: 291214 - RNA, 19 nt, Artificial Sequence
  Description of Artificial Sequence: Synthetic oligonucleotide
accguguuaaagaccugag

SEQ ID NO: 291215 - RNA, 19 nt, Artificial Sequence
  Description of Artificial Sequence: Synthetic oligonucleotide
gcuuuugucaccaccugac

SEQ ID NO: 291216 - RNA, 19 nt, Artificial Sequence
  Description of Artificial Sequence: Synthetic oligonucleotide
aaagcacuccuuggcggga

SEQ ID NO: 291217 - RNA, 19 nt, Artificial Sequence
  Description of Artificial Sequence: Synthetic oligonucleotide
agaggcguccagcuccacu

SEQ ID NO: 291218 - RNA, 19 nt, Artificial Sequence
  Description of Artificial Sequence: Synthetic oligonucleotide
agucgaucccaaccagggu

SEQ ID NO: 291219 - RNA, 19 nt, Artificial Sequence
  Description of Artificial Sequence: Synthetic oligonucleotide
agggugcaugaauaacgga

SEQ ID NO: 291220 - RNA, 19 nt, Artificial Sequence
  Description of Artificial Sequence: Synthetic oligonucleotide
aucagaauauggguucuua

SEQ ID NO: 291221 - RNA, 19 nt, Artificial Sequence
  Description of Artificial Sequence: Synthetic oligonucleotide
guguuacaaaacuccaagu

SEQ ID NO: 291222 - RNA, 19 nt, Artificial Sequence
  Description of Artificial Sequence: Synthetic oligonucleotide
gggaacgcaagcaccaggc

SEQ ID NO: 291223 - RNA, 19 nt, Artificial Sequence
  Description of Artificial Sequence: Synthetic oligonucleotide
gaugguguaugcgcagcuc

SEQ ID NO: 291224 - RNA, 19 nt, Artificial Sequence
  Description of Artificial Sequence: Synthetic oligonucleotide
guguugcucaggcacucac

SEQ ID NO: 291225 - RNA, 19 nt, Artificial Sequence
  Description of Artificial Sequence: Synthetic oligonucleotide
ucguacucucaggaagaug

SEQ ID NO: 291226 - RNA, 19 nt, Artificial Sequence
  Description of Artificial Sequence: Synthetic oligonucleotide
ccgaacuuauuuucuguug

SEQ ID NO: 291227 - RNA, 19 nt, Artificial Sequence
  Description of Artificial Sequence: Synthetic oligonucleotide
gucuccagugccgacgcug

SEQ ID NO: 291228 - RNA, 19 nt, Artificial Sequence
  Description of Artificial Sequence: Synthetic oligonucleotide
gguagaggagugauuauaa

SEQ ID NO: 291229 - RNA, 19 nt, Artificial Sequence
  Description of Artificial Sequence: Synthetic oligonucleotide
gaugaaccuucagucccac

SEQ ID NO: 291230 - RNA, 19 nt, Artificial Sequence
  Description of Artificial Sequence: Synthetic oligonucleotide
guaaguagcuguuccgaau

SEQ ID NO: 291231 - RNA, 19 nt, Artificial Sequence
  Description of Artificial Sequence: Synthetic oligonucleotide
cagaaguguccuugcacca

SEQ ID NO: 291232 - RNA, 19 nt, Artificial Sequence
  Description of Artificial Sequence: Synthetic oligonucleotide
caucaagguagggaggaga

SEQ ID NO: 291233 - RNA, 19 nt, Artificial Sequence
  Description of Artificial Sequence: Synthetic oligonucleotide
gcaagacagaucagggugc

SEQ ID NO: 291234 - RNA, 19 nt, Artificial Sequence
  Description of Artificial Sequence: Synthetic oligonucleotide
uccugcgcauguccaauuu

SEQ ID NO: 291235 - RNA, 19 nt, Artificial Sequence
  Description of Artificial Sequence: Synthetic oligonucleotide
ccugauauggaaagcaugu

SEQ ID NO: 291236 - RNA, 19 nt, Artificial Sequence
  Description of Artificial Sequence: Synthetic oligonucleotide
uauggguucuuaggaugaa

SEQ ID NO: 291237 - RNA, 19 nt, Artificial Sequence
  Description of Artificial Sequence: Synthetic oligonucleotide
ggaucuuucgaaaccgcuc

SEQ ID NO: 291238 - RNA, 19 nt, Artificial Sequence
  Description of Artificial Sequence: Synthetic oligonucleotide
gcaugcauaacgugcccac

SEQ ID NO: 291239 - RNA, 19 nt, Artificial Sequence
  Description of Artificial Sequence: Synthetic oligonucleotide
guugccagucgaucccaac

SEQ ID NO: 291240 - RNA, 19 nt, Artificial Sequence
  Description of Artificial Sequence: Synthetic oligonucleotide
gucuuuugacaguacaguu

SEQ ID NO: 291241 - RNA, 19 nt, Artificial Sequence
  Description of Artificial Sequence: Synthetic oligonucleotide
gaaaccgcucuuggcauaa

SEQ ID NO: 291242 - RNA, 19 nt, Artificial Sequence
  Description of Artificial Sequence: Synthetic oligonucleotide
guacucucaggaagaugcc

SEQ ID NO: 291243 - RNA, 19 nt, Artificial Sequence
  Description of Artificial Sequence: Synthetic oligonucleotide
auacacgggaggucuucau

SEQ ID NO: 291244 - RNA, 19 nt, Artificial Sequence
  Description of Artificial Sequence: Synthetic oligonucleotide
ucacgguguugcucaggca

SEQ ID NO: 291245 - RNA, 19 nt, Artificial Sequence
  Description of Artificial Sequence: Synthetic oligonucleotide
gugcaagcgcagucgcugc

SEQ ID NO: 291246 - RNA, 19 nt, Artificial Sequence
  Description of Artificial Sequence: Synthetic oligonucleotide
ggaacuccccauucucuac

SEQ ID NO: 291247 - RNA, 19 nt, Artificial Sequence
  Description of Artificial Sequence: Synthetic oligonucleotide
aggacgcaaagaguuuaca

SEQ ID NO: 291248 - RNA, 19 nt, Artificial Sequence
  Description of Artificial Sequence: Synthetic oligonucleotide
agucuacaaggcagagguc

SEQ ID NO: 291249 - RNA, 19 nt, Artificial Sequence
  Description of Artificial Sequence: Synthetic oligonucleotide
cauugcccugcuuuccaca

SEQ ID NO: 291250 - RNA, 19 nt, Artificial Sequence
  Description of Artificial Sequence: Synthetic oligonucleotide
gggugcuucuuccaaggca

SEQ ID NO: 291251 - RNA, 19 nt, Artificial Sequence
  Description of Artificial Sequence: Synthetic oligonucleotide
aaaccguguuaaagaccug

SEQ ID NO: 291252 - RNA, 19 nt, Artificial Sequence
  Description of Artificial Sequence: Synthetic oligonucleotide
gguagcuuauugcaccucu

SEQ ID NO: 291253 - RNA, 19 nt, Artificial Sequence
  Description of Artificial Sequence: Synthetic oligonucleotide
aguagcuguuccgaauguu

SEQ ID NO: 291254 - RNA, 19 nt, Artificial Sequence
  Description of Artificial Sequence: Synthetic oligonucleotide
cuaagcacuugcaaugcuu

SEQ ID NO: 291255 - RNA, 19 nt, Artificial Sequence
  Description of Artificial Sequence: Synthetic oligonucleotide
cucgucugagucccugguc

SEQ ID NO: 291256 - RNA, 19 nt, Artificial Sequence
  Description of Artificial Sequence: Synthetic oligonucleotide
uagauccucucggguagcu

SEQ ID NO: 291257 - RNA, 19 nt, Artificial Sequence
  Description of Artificial Sequence: Synthetic oligonucleotide
gguuaauaaggcugcugua

SEQ ID NO: 291258 - RNA, 19 nt, Artificial Sequence
  Description of Artificial Sequence: Synthetic oligonucleotide
cuugcuccucuugacacaa

SEQ ID NO: 291259 - RNA, 19 nt, Artificial Sequence
  Description of Artificial Sequence: Synthetic oligonucleotide
ggagacuaccacacacgag

SEQ ID NO: 291260 - RNA, 19 nt, Artificial Sequence
  Description of Artificial Sequence: Synthetic oligonucleotide
auccgaaacgagaggccug

SEQ ID NO: 291261 - RNA, 19 nt, Artificial Sequence
  Description of Artificial Sequence: Synthetic oligonucleotide
cagagccgggaacgcaagc

SEQ ID NO: 291262 - RNA, 19 nt, Artificial Sequence
  Description of Artificial Sequence: Synthetic oligonucleotide
cagauguguaaagucuuaa

SEQ ID NO: 291263 - RNA, 19 nt, Artificial Sequence
  Description of Artificial Sequence: Synthetic oligonucleotide
gcuugaacggaaucaaaau

SEQ ID NO: 291264 - RNA, 19 nt, Artificial Sequence
  Description of Artificial Sequence: Synthetic oligonucleotide
caaggacgcaaagaguuua

SEQ ID NO: 291265 - RNA, 19 nt, Artificial Sequence
  Description of Artificial Sequence: Synthetic oligonucleotide
ccguagucaucaagguagg

SEQ ID NO: 291266 - RNA, 19 nt, Artificial Sequence
  Description of Artificial Sequence: Synthetic oligonucleotide
agcuagugugcaagcgcag

SEQ ID NO: 291267 - RNA, 19 nt, Artificial Sequence
  Description of Artificial Sequence: Synthetic oligonucleotide
augccggcacggacguucc

SEQ ID NO: 291268 - RNA, 19 nt, Artificial Sequence
  Description of Artificial Sequence: Synthetic oligonucleotide
caagacagaucagggugca

SEQ ID NO: 291269 - RNA, 19 nt, Artificial Sequence
  Description of Artificial Sequence: Synthetic oligonucleotide
gugaaguguuuugugcaaa

SEQ ID NO: 291270 - RNA, 19 nt, Artificial Sequence
  Description of Artificial Sequence: Synthetic oligonucleotide
aggcuccgacauccucccc

SEQ ID NO: 291271 - RNA, 19 nt, Artificial Sequence
  Description of Artificial Sequence: Synthetic oligonucleotide
aucucgcuguucucuugaa

SEQ ID NO: 291272 - RNA, 19 nt, Artificial Sequence
  Description of Artificial Sequence: Synthetic oligonucleotide
ugccgacgcugcuuccuga

SEQ ID NO: 291273 - RNA, 19 nt, Artificial Sequence
  Description of Artificial Sequence: Synthetic oligonucleotide
cauacacuaaagccuuuau

SEQ ID NO: 291274 - RNA, 19 nt, Artificial Sequence
  Description of Artificial Sequence: Synthetic oligonucleotide
gucaaucaguuuguuagau

SEQ ID NO: 291275 - RNA, 19 nt, Artificial Sequence
  Description of Artificial Sequence: Synthetic oligonucleotide
cuaugcucuggauggugua

SEQ ID NO: 291276 - RNA, 19 nt, Artificial Sequence
  Description of Artificial Sequence: Synthetic oligonucleotide
gggugcaugaauaacggau

SEQ ID NO: 291277 - RNA, 19 nt, Artificial Sequence
  Description of Artificial Sequence: Synthetic oligonucleotide
ggcgcagucuagcaaucuc

SEQ ID NO: 291278 - RNA, 19 nt, Artificial Sequence
  Description of Artificial Sequence: Synthetic oligonucleotide
gugccgacgcugcuuccug

SEQ ID NO: 291279 - RNA, 19 nt, Artificial Sequence
  Description of Artificial Sequence: Synthetic oligonucleotide
cuuuugucaccaccugacu

SEQ ID NO: 291280 - RNA, 19 nt, Artificial Sequence
  Description of Artificial Sequence: Synthetic oligonucleotide
gcugcugcaaaccguguua

SEQ ID NO: 291281 - RNA, 19 nt, Artificial Sequence
  Description of Artificial Sequence: Synthetic oligonucleotide
guguguuccgcaagacaga

SEQ ID NO: 291282 - RNA, 19 nt, Artificial Sequence
  Description of Artificial Sequence: Synthetic oligonucleotide
gcauaacgugcccacagcu

SEQ ID NO: 291283 - RNA, 19 nt, Artificial Sequence
  Description of Artificial Sequence: Synthetic oligonucleotide
gccggagggugcuucuucc

SEQ ID NO: 291284 - RNA, 19 nt, Artificial Sequence
  Description of Artificial Sequence: Synthetic oligonucleotide
ggaguaggugugugcugug

SEQ ID NO: 291285 - RNA, 19 nt, Artificial Sequence
  Description of Artificial Sequence: Synthetic oligonucleotide
gcucuuuagcuugaacgga

SEQ ID NO: 291286 - RNA, 19 nt, Artificial Sequence
  Description of Artificial Sequence: Synthetic oligonucleotide
agguugguugguagggaaa

SEQ ID NO: 291287 - RNA, 19 nt, Artificial Sequence
  Description of Artificial Sequence: Synthetic oligonucleotide
acgguguugcucaggcacu

SEQ ID NO: 291288 - RNA, 19 nt, Artificial Sequence
  Description of Artificial Sequence: Synthetic oligonucleotide
gcgcauguccaauuuccuc

SEQ ID NO: 291289 - RNA, 19 nt, Artificial Sequence
  Description of Artificial Sequence: Synthetic oligonucleotide
gccgcugcauuucagacau

SEQ ID NO: 291290 - RNA, 19 nt, Artificial Sequence
  Description of Artificial Sequence: Synthetic oligonucleotide
acagaucagggugcaugaa

SEQ ID NO: 291291 - RNA, 19 nt, Artificial Sequence
  Description of Artificial Sequence: Synthetic oligonucleotide
cagaucagggugcaugaau

SEQ ID NO: 291292 - RNA, 19 nt, Artificial Sequence
  Description of Artificial Sequence: Synthetic oligonucleotide
gacagucguccagucuaca

SEQ ID NO: 291293 - RNA, 19 nt, Artificial Sequence
  Description of Artificial Sequence: Synthetic oligonucleotide
cagaggagacuaccacaca

SEQ ID NO: 291294 - RNA, 19 nt, Artificial Sequence
  Description of Artificial Sequence: Synthetic oligonucleotide
ccucucggguagcuuauug

SEQ ID NO: 291295 - RNA, 19 nt, Artificial Sequence
  Description of Artificial Sequence: Synthetic oligonucleotide
cgcagucuagcaaucucug

SEQ ID NO: 291296 - RNA, 19 nt, Artificial Sequence
  Description of Artificial Sequence: Synthetic oligonucleotide
ccgcucuuggcauaaaugu

SEQ ID NO: 291297 - RNA, 19 nt, Artificial Sequence
  Description of Artificial Sequence: Synthetic oligonucleotide
auuaggcaccaaggacgca

SEQ ID NO: 291298 - RNA, 19 nt, Artificial Sequence
  Description of Artificial Sequence: Synthetic oligonucleotide
caagaguggccgagacaga

SEQ ID NO: 291299 - RNA, 19 nt, Artificial Sequence
  Description of Artificial Sequence: Synthetic oligonucleotide
acgcaagcaccaggcccac

SEQ ID NO: 291300 - RNA, 19 nt, Artificial Sequence
  Description of Artificial Sequence: Synthetic oligonucleotide
ccggcacggacguuccucc

SEQ ID NO: 291301 - RNA, 19 nt, Artificial Sequence
  Description of Artificial Sequence: Synthetic oligonucleotide
gcgcaacaaauagaaguca

SEQ ID NO: 291302 - RNA, 19 nt, Artificial Sequence
  Description of Artificial Sequence: Synthetic oligonucleotide
ggcaugcauaacgugccca

SEQ ID NO: 291303 - RNA, 19 nt, Artificial Sequence
  Description of Artificial Sequence: Synthetic oligonucleotide
cugcugcaaaccguguuaa

SEQ ID NO: 291304 - RNA, 19 nt, Artificial Sequence
  Description of Artificial Sequence: Synthetic oligonucleotide
ccugcgcauguccaauuuc

SEQ ID NO: 291305 - RNA, 19 nt, Artificial Sequence
  Description of Artificial Sequence: Synthetic oligonucleotide
aaaccgcucuuggcauaaa

SEQ ID NO: 291306 - RNA, 19 nt, Artificial Sequence
  Description of Artificial Sequence: Synthetic oligonucleotide
guacaaugugugccauggu

SEQ ID NO: 291307 - RNA, 19 nt, Artificial Sequence
  Description of Artificial Sequence: Synthetic oligonucleotide
gguccgucuccccguaguc

SEQ ID NO: 291308 - RNA, 19 nt, Artificial Sequence
  Description of Artificial Sequence: Synthetic oligonucleotide
cagugccgacgcugcuucc

SEQ ID NO: 291309 - RNA, 19 nt, Artificial Sequence
  Description of Artificial Sequence: Synthetic oligonucleotide
ccaaggcacuuccaguaca

SEQ ID NO: 291310 - RNA, 19 nt, Artificial Sequence
  Description of Artificial Sequence: Synthetic oligonucleotide
ccguguuaaagaccugaga

SEQ ID NO: 291311 - RNA, 19 nt, Artificial Sequence
  Description of Artificial Sequence: Synthetic oligonucleotide
cugguccgucuccccguag

SEQ ID NO: 291312 - RNA, 19 nt, Artificial Sequence
  Description of Artificial Sequence: Synthetic oligonucleotide
guccuccggaaggucaauc

SEQ ID NO: 291313 - RNA, 19 nt, Artificial Sequence
  Description of Artificial Sequence: Synthetic oligonucleotide
gucucuguucagggaccug

SEQ ID NO: 291314 - RNA, 19 nt, Artificial Sequence
  Description of Artificial Sequence: Synthetic oligonucleotide
caccuuguaaguagcuguu

SEQ ID NO: 291315 - RNA, 19 nt, Artificial Sequence
  Description of Artificial Sequence: Synthetic oligonucleotide
auccucucggguagcuuau

SEQ ID NO: 291316 - RNA, 19 nt, Artificial Sequence
  Description of Artificial Sequence: Synthetic oligonucleotide
cgggaacgcaagcaccagg

SEQ ID NO: 291317 - RNA, 19 nt, Artificial Sequence
  Description of Artificial Sequence: Synthetic oligonucleotide
gcaagcgcagucgcugcug

SEQ ID NO: 291318 - RNA, 19 nt, Artificial Sequence
  Description of Artificial Sequence: Synthetic oligonucleotide
cagucgcugcugccuucgc

SEQ ID NO: 291319 - RNA, 19 nt, Artificial Sequence
  Description of Artificial Sequence: Synthetic oligonucleotide
gccgggaacgcaagcacca

SEQ ID NO: 291320 - RNA, 19 nt, Artificial Sequence
  Description of Artificial Sequence: Synthetic oligonucleotide
ccgugauacuguguugcug

SEQ ID NO: 291321 - RNA, 19 nt, Artificial Sequence
  Description of Artificial Sequence: Synthetic oligonucleotide
cgaaacgagaggccuguca

SEQ ID NO: 291322 - RNA, 19 nt, Artificial Sequence
  Description of Artificial Sequence: Synthetic oligonucleotide
guccaaugugcugcugcaa

SEQ ID NO: 291323 - RNA, 19 nt, Artificial Sequence
  Description of Artificial Sequence: Synthetic oligonucleotide
guguuccgcaagacagauc

SEQ ID NO: 291324 - RNA, 19 nt, Artificial Sequence
  Description of Artificial Sequence: Synthetic oligonucleotide
ugccggcacggacguuccu

SEQ ID NO: 291325 - RNA, 19 nt, Artificial Sequence
  Description of Artificial Sequence: Synthetic oligonucleotide
gccgaacuuauuuucuguu

SEQ ID NO: 291326 - RNA, 19 nt, Artificial Sequence
  Description of Artificial Sequence: Synthetic oligonucleotide
cgaauguuguuagcauuuc

SEQ ID NO: 291327 - RNA, 19 nt, Artificial Sequence
  Description of Artificial Sequence: Synthetic oligonucleotide
aguccuccggaaggucaau

SEQ ID NO: 291328 - RNA, 19 nt, Artificial Sequence
  Description of Artificial Sequence: Synthetic oligonucleotide
guagcuuauugcaccucuu

SEQ ID NO: 291329 - RNA, 19 nt, Artificial Sequence
  Description of Artificial Sequence: Synthetic oligonucleotide
gguguugcucaggcacuca

SEQ ID NO: 291330 - RNA, 19 nt, Artificial Sequence
  Description of Artificial Sequence: Synthetic oligonucleotide
gcuagugugcaagcgcagu

SEQ ID NO: 291331 - RNA, 19 nt, Artificial Sequence
  Description of Artificial Sequence: Synthetic oligonucleotide
gcccaaugcuguaagugcu

SEQ ID NO: 291332 - RNA, 19 nt, Artificial Sequence
  Description of Artificial Sequence: Synthetic oligonucleotide
caauuuccuccgugauacu

SEQ ID NO: 291333 - RNA, 19 nt, Artificial Sequence
  Description of Artificial Sequence: Synthetic oligonucleotide
cacgagaaauuggaugcuu

SEQ ID NO: 291334 - RNA, 19 nt, Artificial Sequence
  Description of Artificial Sequence: Synthetic oligonucleotide
ccugacauucucguacucu

SEQ ID NO: 291335 - RNA, 19 nt, Artificial Sequence
  Description of Artificial Sequence: Synthetic oligonucleotide
ggguagcuuauugcaccuc

SEQ ID NO: 291336 - RNA, 19 nt, Artificial Sequence
  Description of Artificial Sequence: Synthetic oligonucleotide
gggucagaucugguugguc

SEQ ID NO: 291337 - RNA, 19 nt, Artificial Sequence
  Description of Artificial Sequence: Synthetic oligonucleotide
cugugccgggcccaaugcu

SEQ ID NO: 291338 - RNA, 19 nt, Artificial Sequence
  Description of Artificial Sequence: Synthetic oligonucleotide
gccggcacggacguuccuc

SEQ ID NO: 291339 - RNA, 19 nt, Artificial Sequence
  Description of Artificial Sequence: Synthetic oligonucleotide
ccggagccacaggaguagg

SEQ ID NO: 291340 - RNA, 19 nt, Artificial Sequence
  Description of Artificial Sequence: Synthetic oligonucleotide
ccgagacagaggcguccag

SEQ ID NO: 291341 - RNA, 19 nt, Artificial Sequence
  Description of Artificial Sequence: Synthetic oligonucleotide
gugugcaagcgcagucgcu

SEQ ID NO: 291342 - RNA, 19 nt, Artificial Sequence
  Description of Artificial Sequence: Synthetic oligonucleotide
cucguacucucaggaagau

SEQ ID NO: 291343 - RNA, 19 nt, Artificial Sequence
  Description of Artificial Sequence: Synthetic oligonucleotide
ccggcgcagucuagcaauc

SEQ ID NO: 291344 - RNA, 19 nt, Artificial Sequence
  Description of Artificial Sequence: Synthetic oligonucleotide
ccuaagcacuugcaaugcu

SEQ ID NO: 291345 - RNA, 19 nt, Artificial Sequence
  Description of Artificial Sequence: Synthetic oligonucleotide
cugggaccugaaugucacu

SEQ ID NO: 291346 - RNA, 19 nt, Artificial Sequence
  Description of Artificial Sequence: Synthetic oligonucleotide
gugucugugccgggcccaa

SEQ ID NO: 291347 - RNA, 19 nt, Artificial Sequence
  Description of Artificial Sequence: Synthetic oligonucleotide
ccgggaacgcaagcaccag

SEQ ID NO: 291348 - RNA, 19 nt, Artificial Sequence
  Description of Artificial Sequence: Synthetic oligonucleotide
gcacgagaaauuggaugcu

SEQ ID NO: 291349 - RNA, 19 nt, Artificial Sequence
  Description of Artificial Sequence: Synthetic oligonucleotide
ccgcaagacagaucagggu

SEQ ID NO: 291350 - RNA, 19 nt, Artificial Sequence
  Description of Artificial Sequence: Synthetic oligonucleotide
ccggagggugcuucuucca

SEQ ID NO: 291351 - RNA, 19 nt, Artificial Sequence
  Description of Artificial Sequence: Synthetic oligonucleotide
cuccugcgcauguccaauu

SEQ ID NO: 291352 - RNA, 19 nt, Artificial Sequence
  Description of Artificial Sequence: Synthetic oligonucleotide
ugaugccggcacggacguu

SEQ ID NO: 291353 - RNA, 19 nt, Artificial Sequence
  Description of Artificial Sequence: Synthetic oligonucleotide
agggagugucaggggcauu

SEQ ID NO: 291354 - RNA, 19 nt, Artificial Sequence
  Description of Artificial Sequence: Synthetic oligonucleotide
ccaaggacgcaaagaguuu

SEQ ID NO: 291355 - RNA, 19 nt, Artificial Sequence
  Description of Artificial Sequence: Synthetic oligonucleotide
cgucuccccguagucauca

SEQ ID NO: 291356 - RNA, 19 nt, Artificial Sequence
  Description of Artificial Sequence: Synthetic oligonucleotide
ccgucuccccguagucauc

SEQ ID NO: 291357 - RNA, 19 nt, Artificial Sequence
  Description of Artificial Sequence: Synthetic oligonucleotide
ccccggagccacaggagua

SEQ ID NO: 291358 - RNA, 19 nt, Artificial Sequence
  Description of Artificial Sequence: Synthetic oligonucleotide
cgaaugagguugguuggua

SEQ ID NO: 291359 - RNA, 19 nt, Artificial Sequence
  Description of Artificial Sequence: Synthetic oligonucleotide
ccucgucugagucccuggu

SEQ ID NO: 291360 - RNA, 19 nt, Artificial Sequence
  Description of Artificial Sequence: Synthetic oligonucleotide
ccgaaacgagaggccuguc

SEQ ID NO: 291361 - RNA, 19 nt, Artificial Sequence
  Description of Artificial Sequence: Synthetic oligonucleotide
ccagccggagggugcuucu

SEQ ID NO: 291362 - RNA, 19 nt, Artificial Sequence
  Description of Artificial Sequence: Synthetic oligonucleotide
ccggaaggucaaucaguuu

SEQ ID NO: 291363 - RNA, 19 nt, Artificial Sequence
  Description of Artificial Sequence: Synthetic oligonucleotide
cgcaagcaccaggcccacc

SEQ ID NO: 291364 - RNA, 19 nt, Artificial Sequence
  Description of Artificial Sequence: Synthetic oligonucleotide
cagccggagggugcuucuu

SEQ ID NO: 291365 - RNA, 19 nt, Artificial Sequence
  Description of Artificial Sequence: Synthetic oligonucleotide
cggcgcagucuagcaaucu

SEQ ID NO: 291366 - RNA, 19 nt, Artificial Sequence
  Description of Artificial Sequence: Synthetic oligonucleotide
augacuaugauuuuaaggc

SEQ ID NO: 291367 - RNA, 19 nt, Artificial Sequence
  Description of Artificial Sequence: Synthetic oligonucleotide
uguaucaccagguauaugg

SEQ ID NO: 291368 - RNA, 19 nt, Artificial Sequence
  Description of Artificial Sequence: Synthetic oligonucleotide
uaacuuagcacuuuuacgg

SEQ ID NO: 291369 - RNA, 19 nt, Artificial Sequence
  Description of Artificial Sequence: Synthetic oligonucleotide
aagagugaaguccuaaccc

SEQ ID NO: 291370 - RNA, 19 nt, Artificial Sequence
  Description of Artificial Sequence: Synthetic oligonucleotide
aaugacgauucuuuagugc

SEQ ID NO: 291371 - RNA, 19 nt, Artificial Sequence
  Description of Artificial Sequence: Synthetic oligonucleotide
aauaauuccgugugcauag

SEQ ID NO: 291372 - RNA, 19 nt, Artificial Sequence
  Description of Artificial Sequence: Synthetic oligonucleotide
gaugacuaugauuuuaagg

SEQ ID NO: 291373 - RNA, 19 nt, Artificial Sequence
  Description of Artificial Sequence: Synthetic oligonucleotide
aauuaucgacuucuugugc

SEQ ID NO: 291374 - RNA, 19 nt, Artificial Sequence
  Description of Artificial Sequence: Synthetic oligonucleotide
uugacuaggucaaaugugg

SEQ ID NO: 291375 - RNA, 19 nt, Artificial Sequence
  Description of Artificial Sequence: Synthetic oligonucleotide
gaaauuguguaucaccagg

SEQ ID NO: 291376 - RNA, 19 nt, Artificial Sequence
  Description of Artificial Sequence: Synthetic oligonucleotide
augauuuuaaggcaagggg

SEQ ID NO: 291377 - RNA, 19 nt, Artificial Sequence
  Description of Artificial Sequence: Synthetic oligonucleotide
aaauaguguuauuacaaug

SEQ ID NO: 291378 - RNA, 19 nt, Artificial Sequence
  Description of Artificial Sequence: Synthetic oligonucleotide
aauaucccuacagugagac

SEQ ID NO: 291379 - RNA, 19 nt, Artificial Sequence
  Description of Artificial Sequence: Synthetic oligonucleotide
uuacauaucagauggguug

SEQ ID NO: 291380 - RNA, 19 nt, Artificial Sequence
  Description of Artificial Sequence: Synthetic oligonucleotide
uacuuuguaggacugggcg

SEQ ID NO: 291381 - RNA, 19 nt, Artificial Sequence
  Description of Artificial Sequence: Synthetic oligonucleotide
ugauuuuaaggcaaggggu

SEQ ID NO: 291382 - RNA, 19 nt, Artificial Sequence
  Description of Artificial Sequence: Synthetic oligonucleotide
aaguuaggcuaccaaauag

SEQ ID NO: 291383 - RNA, 19 nt, Artificial Sequence
  Description of Artificial Sequence: Synthetic oligonucleotide
aguguuauuacaaugacga

SEQ ID NO: 291384 - RNA, 19 nt, Artificial Sequence
  Description of Artificial Sequence: Synthetic oligonucleotide
aacgucaacacuguggcgg

SEQ ID NO: 291385 - RNA, 19 nt, Artificial Sequence
  Description of Artificial Sequence: Synthetic oligonucleotide
acaaguaugaaguuaggcu

SEQ ID NO: 291386 - RNA, 19 nt, Artificial Sequence
  Description of Artificial Sequence: Synthetic oligonucleotide
uuugcuuaguccaaaauua

SEQ ID NO: 291387 - RNA, 19 nt, Artificial Sequence
  Description of Artificial Sequence: Synthetic oligonucleotide
uucaaguagccuuugaaca

SEQ ID NO: 291388 - RNA, 19 nt, Artificial Sequence
  Description of Artificial Sequence: Synthetic oligonucleotide
uaugauuuuaaggcaaggg

SEQ ID NO: 291389 - RNA, 19 nt, Artificial Sequence
  Description of Artificial Sequence: Synthetic oligonucleotide
agacagaguuuucacaccc

SEQ ID NO: 291390 - RNA, 19 nt, Artificial Sequence
  Description of Artificial Sequence: Synthetic oligonucleotide
uguaucuugugaaaagaug

SEQ ID NO: 291391 - RNA, 19 nt, Artificial Sequence
  Description of Artificial Sequence: Synthetic oligonucleotide
cuaauaauguuuuggugag

SEQ ID NO: 291392 - RNA, 19 nt, Artificial Sequence
  Description of Artificial Sequence: Synthetic oligonucleotide
aguccuaacccucaguuag

SEQ ID NO: 291393 - RNA, 19 nt, Artificial Sequence
  Description of Artificial Sequence: Synthetic oligonucleotide
uauugcaaggucuucaggu

SEQ ID NO: 291394 - RNA, 19 nt, Artificial Sequence
  Description of Artificial Sequence: Synthetic oligonucleotide
aaacaaauuauugcaaggu

SEQ ID NO: 291395 - RNA, 19 nt, Artificial Sequence
  Description of Artificial Sequence: Synthetic oligonucleotide
agaacugacagccgagagc

SEQ ID NO: 291396 - RNA, 19 nt, Artificial Sequence
  Description of Artificial Sequence: Synthetic oligonucleotide
uccaucagaagccugauau

SEQ ID NO: 291397 - RNA, 19 nt, Artificial Sequence
  Description of Artificial Sequence: Synthetic oligonucleotide
gaguuuaucccacaggcug

SEQ ID NO: 291398 - RNA, 19 nt, Artificial Sequence
  Description of Artificial Sequence: Synthetic oligonucleotide
uuuacuuuguaggacuggg

SEQ ID NO: 291399 - RNA, 19 nt, Artificial Sequence
  Description of Artificial Sequence: Synthetic oligonucleotide
acaucaacaagcuuuacau

SEQ ID NO: 291400 - RNA, 19 nt, Artificial Sequence
  Description of Artificial Sequence: Synthetic oligonucleotide
uaucccuacagugagaccc

SEQ ID NO: 291401 - RNA, 19 nt, Artificial Sequence
  Description of Artificial Sequence: Synthetic oligonucleotide
agugcacucagucuguccg

SEQ ID NO: 291402 - RNA, 19 nt, Artificial Sequence
  Description of Artificial Sequence: Synthetic oligonucleotide
uguggccugaaauaguucc

SEQ ID NO: 291403 - RNA, 19 nt, Artificial Sequence
  Description of Artificial Sequence: Synthetic oligonucleotide
aucaacaagcuuuacauaa

SEQ ID NO: 291404 - RNA, 19 nt, Artificial Sequence
  Description of Artificial Sequence: Synthetic oligonucleotide
ucucaguagagugaaaugc

SEQ ID NO: 291405 - RNA, 19 nt, Artificial Sequence
  Description of Artificial Sequence: Synthetic oligonucleotide
ugucguuuucacaaaagcu

SEQ ID NO: 291406 - RNA, 19 nt, Artificial Sequence
  Description of Artificial Sequence: Synthetic oligonucleotide
ugguacaaggagauugugg

SEQ ID NO: 291407 - RNA, 19 nt, Artificial Sequence
  Description of Artificial Sequence: Synthetic oligonucleotide
aauguggcaaaagacucuc

SEQ ID NO: 291408 - RNA, 19 nt, Artificial Sequence
  Description of Artificial Sequence: Synthetic oligonucleotide
cuaauaucccuacagugag

SEQ ID NO: 291409 - RNA, 19 nt, Artificial Sequence
  Description of Artificial Sequence: Synthetic oligonucleotide
uuagcuuauuuucuacacc

SEQ ID NO: 291410 - RNA, 19 nt, Artificial Sequence
  Description of Artificial Sequence: Synthetic oligonucleotide
agcuaugagaaaugccugc

SEQ ID NO: 291411 - RNA, 19 nt, Artificial Sequence
  Description of Artificial Sequence: Synthetic oligonucleotide
uagcuuauuuucuacaccu

SEQ ID NO: 291412 - RNA, 19 nt, Artificial Sequence
  Description of Artificial Sequence: Synthetic oligonucleotide
uguguaaccagccaucuuu

SEQ ID NO: 291413 - RNA, 19 nt, Artificial Sequence
  Description of Artificial Sequence: Synthetic oligonucleotide
aacauucaaaaccccguug

SEQ ID NO: 291414 - RNA, 19 nt, Artificial Sequence
  Description of Artificial Sequence: Synthetic oligonucleotide
acaaugacgauucuuuagu

SEQ ID NO: 291415 - RNA, 19 nt, Artificial Sequence
  Description of Artificial Sequence: Synthetic oligonucleotide
auaaugcacgcacugucac

SEQ ID NO: 291416 - RNA, 19 nt, Artificial Sequence
  Description of Artificial Sequence: Synthetic oligonucleotide
gauggguuguaugagugcg

SEQ ID NO: 291417 - RNA, 19 nt, Artificial Sequence
  Description of Artificial Sequence: Synthetic oligonucleotide
ugaaguuaggcuaccaaau

SEQ ID NO: 291418 - RNA, 19 nt, Artificial Sequence
  Description of Artificial Sequence: Synthetic oligonucleotide
uaccacaacagcuaugaga

SEQ ID NO: 291419 - RNA, 19 nt, Artificial Sequence
  Description of Artificial Sequence: Synthetic oligonucleotide
gaugauuuccaccccacac

SEQ ID NO: 291420 - RNA, 19 nt, Artificial Sequence
  Description of Artificial Sequence: Synthetic oligonucleotide
augacgauucuuuagugca

SEQ ID NO: 291421 - RNA, 19 nt, Artificial Sequence
  Description of Artificial Sequence: Synthetic oligonucleotide
ucagaagccugauaucucc

SEQ ID NO: 291422 - RNA, 19 nt, Artificial Sequence
  Description of Artificial Sequence: Synthetic oligonucleotide
ugggcuaguuuaaauaugu

SEQ ID NO: 291423 - RNA, 19 nt, Artificial Sequence
  Description of Artificial Sequence: Synthetic oligonucleotide
auuaucgacuucuugugca

SEQ ID NO: 291424 - RNA, 19 nt, Artificial Sequence
  Description of Artificial Sequence: Synthetic oligonucleotide
agaaacgucaacacugugg

SEQ ID NO: 291425 - RNA, 19 nt, Artificial Sequence
  Description of Artificial Sequence: Synthetic oligonucleotide
ugacaauauuuaaggcucg

SEQ ID NO: 291426 - RNA, 19 nt, Artificial Sequence
  Description of Artificial Sequence: Synthetic oligonucleotide
aauaguuccguagcucuag

SEQ ID NO: 291427 - RNA, 19 nt, Artificial Sequence
  Description of Artificial Sequence: Synthetic oligonucleotide
cucacguuaaaucuugaug

SEQ ID NO: 291428 - RNA, 19 nt, Artificial Sequence
  Description of Artificial Sequence: Synthetic oligonucleotide
uauaugggcugcaacacaa

SEQ ID NO: 291429 - RNA, 19 nt, Artificial Sequence
  Description of Artificial Sequence: Synthetic oligonucleotide
uuguauaugggguggagaa

SEQ ID NO: 291430 - RNA, 19 nt, Artificial Sequence
  Description of Artificial Sequence: Synthetic oligonucleotide
gcuaauaauguuuugguga

SEQ ID NO: 291431 - RNA, 19 nt, Artificial Sequence
  Description of Artificial Sequence: Synthetic oligonucleotide
ugugcagcaaguagcagac

SEQ ID NO: 291432 - RNA, 19 nt, Artificial Sequence
  Description of Artificial Sequence: Synthetic oligonucleotide
acagcuaugagaaaugccu

SEQ ID NO: 291433 - RNA, 19 nt, Artificial Sequence
  Description of Artificial Sequence: Synthetic oligonucleotide
ugccguuucuuccaaguag

SEQ ID NO: 291434 - RNA, 19 nt, Artificial Sequence
  Description of Artificial Sequence: Synthetic oligonucleotide
cuugacuaggucaaaugug

SEQ ID NO: 291435 - RNA, 19 nt, Artificial Sequence
  Description of Artificial Sequence: Synthetic oligonucleotide
uuauugcaaggucuucagg

SEQ ID NO: 291436 - RNA, 19 nt, Artificial Sequence
  Description of Artificial Sequence: Synthetic oligonucleotide
cccguugugaaaauuaucg

SEQ ID NO: 291437 - RNA, 19 nt, Artificial Sequence
  Description of Artificial Sequence: Synthetic oligonucleotide
ugcaguguuugcuuagucc

SEQ ID NO: 291438 - RNA, 19 nt, Artificial Sequence
  Description of Artificial Sequence: Synthetic oligonucleotide
ugacuaugauuuuaaggca

SEQ ID NO: 291439 - RNA, 19 nt, Artificial Sequence
  Description of Artificial Sequence: Synthetic oligonucleotide
uacaaguaugaaguuaggc

SEQ ID NO: 291440 - RNA, 19 nt, Artificial Sequence
  Description of Artificial Sequence: Synthetic oligonucleotide
ucuucgaggcccaggaacc

SEQ ID NO: 291441 - RNA, 19 nt, Artificial Sequence
  Description of Artificial Sequence: Synthetic oligonucleotide
uuguguaucaccagguaua

SEQ ID NO: 291442 - RNA, 19 nt, Artificial Sequence
  Description of Artificial Sequence: Synthetic oligonucleotide
agguauaugggcugcaaca

SEQ ID NO: 291443 - RNA, 19 nt, Artificial Sequence
  Description of Artificial Sequence: Synthetic oligonucleotide
aacccucucuucgaggccc

SEQ ID NO: 291444 - RNA, 19 nt, Artificial Sequence
  Description of Artificial Sequence: Synthetic oligonucleotide
gacccuguggacaaguccg

SEQ ID NO: 291445 - RNA, 19 nt, Artificial Sequence
  Description of Artificial Sequence: Synthetic oligonucleotide
gaaagagugaaguccuaac

SEQ ID NO: 291446 - RNA, 19 nt, Artificial Sequence
  Description of Artificial Sequence: Synthetic oligonucleotide
agaaauagccaacacugaa

SEQ ID NO: 291447 - RNA, 19 nt, Artificial Sequence
  Description of Artificial Sequence: Synthetic oligonucleotide
ggcuaguuuaaauaugugc

SEQ ID NO: 291448 - RNA, 19 nt, Artificial Sequence
  Description of Artificial Sequence: Synthetic oligonucleotide
uagucuuaaagggacagcu

SEQ ID NO: 291449 - RNA, 19 nt, Artificial Sequence
  Description of Artificial Sequence: Synthetic oligonucleotide
accuuauugguugaggaag

SEQ ID NO: 291450 - RNA, 19 nt, Artificial Sequence
  Description of Artificial Sequence: Synthetic oligonucleotide
uuaggcuaccaaauagugu

SEQ ID NO: 291451 - RNA, 19 nt, Artificial Sequence
  Description of Artificial Sequence: Synthetic oligonucleotide
aaggccauugucaauagaa

SEQ ID NO: 291452 - RNA, 19 nt, Artificial Sequence
  Description of Artificial Sequence: Synthetic oligonucleotide
uacggguucuccuugacaa

SEQ ID NO: 291453 - RNA, 19 nt, Artificial Sequence
  Description of Artificial Sequence: Synthetic oligonucleotide
cugucguuuucacaaaagc

SEQ ID NO: 291454 - RNA, 19 nt, Artificial Sequence
  Description of Artificial Sequence: Synthetic oligonucleotide
agagugaaguccuaacccu

SEQ ID NO: 291455 - RNA, 19 nt, Artificial Sequence
  Description of Artificial Sequence: Synthetic oligonucleotide
uuuuggaaauucuguuuug

SEQ ID NO: 291456 - RNA, 19 nt, Artificial Sequence
  Description of Artificial Sequence: Synthetic oligonucleotide
aaauuguguaucaccaggu

SEQ ID NO: 291457 - RNA, 19 nt, Artificial Sequence
  Description of Artificial Sequence: Synthetic oligonucleotide
aaagucgcuucacugcagu

SEQ ID NO: 291458 - RNA, 19 nt, Artificial Sequence
  Description of Artificial Sequence: Synthetic oligonucleotide
ugcuuaguccaaaauuacu

SEQ ID NO: 291459 - RNA, 19 nt, Artificial Sequence
  Description of Artificial Sequence: Synthetic oligonucleotide
aaaggugccaugaaacccu

SEQ ID NO: 291460 - RNA, 19 nt, Artificial Sequence
  Description of Artificial Sequence: Synthetic oligonucleotide
aauaaugcacgcacuguca

SEQ ID NO: 291461 - RNA, 19 nt, Artificial Sequence
  Description of Artificial Sequence: Synthetic oligonucleotide
agaugaguuuaucccacag

SEQ ID NO: 291462 - RNA, 19 nt, Artificial Sequence
  Description of Artificial Sequence: Synthetic oligonucleotide
caaguagcagacauaccag

SEQ ID NO: 291463 - RNA, 19 nt, Artificial Sequence
  Description of Artificial Sequence: Synthetic oligonucleotide
acacccaccuuauugguug

SEQ ID NO: 291464 - RNA, 19 nt, Artificial Sequence
  Description of Artificial Sequence: Synthetic oligonucleotide
uccgugcccucuaauaucc

SEQ ID NO: 291465 - RNA, 19 nt, Artificial Sequence
  Description of Artificial Sequence: Synthetic oligonucleotide
aaauaauuccgugugcaua

SEQ ID NO: 291466 - RNA, 19 nt, Artificial Sequence
  Description of Artificial Sequence: Synthetic oligonucleotide
ccuuugaacacauuugccc

SEQ ID NO: 291467 - RNA, 19 nt, Artificial Sequence
  Description of Artificial Sequence: Synthetic oligonucleotide
uuacugggaaccuuguauc

SEQ ID NO: 291468 - RNA, 19 nt, Artificial Sequence
  Description of Artificial Sequence: Synthetic oligonucleotide
aguuccguagcucuagccu

SEQ ID NO: 291469 - RNA, 19 nt, Artificial Sequence
  Description of Artificial Sequence: Synthetic oligonucleotide
ucguagaacugacagccga

SEQ ID NO: 291470 - RNA, 19 nt, Artificial Sequence
  Description of Artificial Sequence: Synthetic oligonucleotide
gguacaaggagauugugga

SEQ ID NO: 291471 - RNA, 19 nt, Artificial Sequence
  Description of Artificial Sequence: Synthetic oligonucleotide
uuuaaggcucguuuuggaa

SEQ ID NO: 291472 - RNA, 19 nt, Artificial Sequence
  Description of Artificial Sequence: Synthetic oligonucleotide
uguuggagucagaaggcca

SEQ ID NO: 291473 - RNA, 19 nt, Artificial Sequence
  Description of Artificial Sequence: Synthetic oligonucleotide
aaacgucaacacuguggcg

SEQ ID NO: 291474 - RNA, 19 nt, Artificial Sequence
  Description of Artificial Sequence: Synthetic oligonucleotide
aggccauugguacaaggag

SEQ ID NO: 291475 - RNA, 19 nt, Artificial Sequence
  Description of Artificial Sequence: Synthetic oligonucleotide
auaguuccguagcucuagc

SEQ ID NO: 291476 - RNA, 19 nt, Artificial Sequence
  Description of Artificial Sequence: Synthetic oligonucleotide
cauggacaaacacuugggc

SEQ ID NO: 291477 - RNA, 19 nt, Artificial Sequence
  Description of Artificial Sequence: Synthetic oligonucleotide
uuacuuuguaggacugggc

SEQ ID NO: 291478 - RNA, 19 nt, Artificial Sequence
  Description of Artificial Sequence: Synthetic oligonucleotide
uuuggugagugaucauugc

SEQ ID NO: 291479 - RNA, 19 nt, Artificial Sequence
  Description of Artificial Sequence: Synthetic oligonucleotide
uugcuuaguccaaaauuac

SEQ ID NO: 291480 - RNA, 19 nt, Artificial Sequence
  Description of Artificial Sequence: Synthetic oligonucleotide
caauaaugcacgcacuguc

SEQ ID NO: 291481 - RNA, 19 nt, Artificial Sequence
  Description of Artificial Sequence: Synthetic oligonucleotide
uggacacuuguucuuaguc

SEQ ID NO: 291482 - RNA, 19 nt, Artificial Sequence
  Description of Artificial Sequence: Synthetic oligonucleotide
cuuguaucccagcaggcac

SEQ ID NO: 291483 - RNA, 19 nt, Artificial Sequence
  Description of Artificial Sequence: Synthetic oligonucleotide
gagauuguggaggugugcc

SEQ ID NO: 291484 - RNA, 19 nt, Artificial Sequence
  Description of Artificial Sequence: Synthetic oligonucleotide
uccaaugucuccugugugu

SEQ ID NO: 291485 - RNA, 19 nt, Artificial Sequence
  Description of Artificial Sequence: Synthetic oligonucleotide
ugugaaaauuaucgacuuc

SEQ ID NO: 291486 - RNA, 19 nt, Artificial Sequence
  Description of Artificial Sequence: Synthetic oligonucleotide
uugugaaaauuaucgacuu

SEQ ID NO: 291487 - RNA, 19 nt, Artificial Sequence
  Description of Artificial Sequence: Synthetic oligonucleotide
caaaggugccaugaaaccc

SEQ ID NO: 291488 - RNA, 19 nt, Artificial Sequence
  Description of Artificial Sequence: Synthetic oligonucleotide
aagaguagugggcgugaag

SEQ ID NO: 291489 - RNA, 19 nt, Artificial Sequence
  Description of Artificial Sequence: Synthetic oligonucleotide
gaagcguugaaugaguucu

SEQ ID NO: 291490 - RNA, 19 nt, Artificial Sequence
  Description of Artificial Sequence: Synthetic oligonucleotide
aucagccggacuuucccac

SEQ ID NO: 291491 - RNA, 19 nt, Artificial Sequence
  Description of Artificial Sequence: Synthetic oligonucleotide
uaauuccgugugcauagca

SEQ ID NO: 291492 - RNA, 19 nt, Artificial Sequence
  Description of Artificial Sequence: Synthetic oligonucleotide
uuuggaacccuuacauauc

SEQ ID NO: 291493 - RNA, 19 nt, Artificial Sequence
  Description of Artificial Sequence: Synthetic oligonucleotide
accuaucuuagcuccauga

SEQ ID NO: 291494 - RNA, 19 nt, Artificial Sequence
  Description of Artificial Sequence: Synthetic oligonucleotide
uuuaguuuacugggaaccu

SEQ ID NO: 291495 - RNA, 19 nt, Artificial Sequence
  Description of Artificial Sequence: Synthetic oligonucleotide
uucguagaacugacagccg

SEQ ID NO: 291496 - RNA, 19 nt, Artificial Sequence
  Description of Artificial Sequence: Synthetic oligonucleotide
agcuugacuaggucaaaug

SEQ ID NO: 291497 - RNA, 19 nt, Artificial Sequence
  Description of Artificial Sequence: Synthetic oligonucleotide
ugacuaggucaaauguggc

SEQ ID NO: 291498 - RNA, 19 nt, Artificial Sequence
  Description of Artificial Sequence: Synthetic oligonucleotide
aguuaccaaugagaaggcc

SEQ ID NO: 291499 - RNA, 19 nt, Artificial Sequence
  Description of Artificial Sequence: Synthetic oligonucleotide
ugggcgcucacauuguucu

SEQ ID NO: 291500 - RNA, 19 nt, Artificial Sequence
  Description of Artificial Sequence: Synthetic oligonucleotide
ugugccguuucuuccaagu

SEQ ID NO: 291501 - RNA, 19 nt, Artificial Sequence
  Description of Artificial Sequence: Synthetic oligonucleotide
ugcguguguuguauauggg

SEQ ID NO: 291502 - RNA, 19 nt, Artificial Sequence
  Description of Artificial Sequence: Synthetic oligonucleotide
uguuugcuuaguccaaaau

SEQ ID NO: 291503 - RNA, 19 nt, Artificial Sequence
  Description of Artificial Sequence: Synthetic oligonucleotide
ucaauaaugcacgcacugu

SEQ ID NO: 291504 - RNA, 19 nt, Artificial Sequence
  Description of Artificial Sequence: Synthetic oligonucleotide
uauaugggguggagaagug

SEQ ID NO: 291505 - RNA, 19 nt, Artificial Sequence
  Description of Artificial Sequence: Synthetic oligonucleotide
cuaugauuuuaaggcaagg

SEQ ID NO: 291506 - RNA, 19 nt, Artificial Sequence
  Description of Artificial Sequence: Synthetic oligonucleotide
augaaacccucucuucgag

SEQ ID NO: 291507 - RNA, 19 nt, Artificial Sequence
  Description of Artificial Sequence: Synthetic oligonucleotide
uaaggcucguuuuggaaau

SEQ ID NO: 291508 - RNA, 19 nt, Artificial Sequence
  Description of Artificial Sequence: Synthetic oligonucleotide
ugaaaauuaucgacuucuu

SEQ ID NO: 291509 - RNA, 19 nt, Artificial Sequence
  Description of Artificial Sequence: Synthetic oligonucleotide
aaggccauugguacaagga

SEQ ID NO: 291510 - RNA, 19 nt, Artificial Sequence
  Description of Artificial Sequence: Synthetic oligonucleotide
uguauaugggguggagaag

SEQ ID NO: 291511 - RNA, 19 nt, Artificial Sequence
  Description of Artificial Sequence: Synthetic oligonucleotide
auaucccuacagugagacc

SEQ ID NO: 291512 - RNA, 19 nt, Artificial Sequence
  Description of Artificial Sequence: Synthetic oligonucleotide
gcuuaguccaaaauuacug

SEQ ID NO: 291513 - RNA, 19 nt, Artificial Sequence
  Description of Artificial Sequence: Synthetic oligonucleotide
uuccgugugcauagcaaug

SEQ ID NO: 291514 - RNA, 19 nt, Artificial Sequence
  Description of Artificial Sequence: Synthetic oligonucleotide
acgauucuuuagugcaaac

SEQ ID NO: 291515 - RNA, 19 nt, Artificial Sequence
  Description of Artificial Sequence: Synthetic oligonucleotide
caaugacgauucuuuagug

SEQ ID NO: 291516 - RNA, 19 nt, Artificial Sequence
  Description of Artificial Sequence: Synthetic oligonucleotide
uggggaagcguugaaugag

SEQ ID NO: 291517 - RNA, 19 nt, Artificial Sequence
  Description of Artificial Sequence: Synthetic oligonucleotide
cagaaugucaucuggggaa

SEQ ID NO: 291518 - RNA, 19 nt, Artificial Sequence
  Description of Artificial Sequence: Synthetic oligonucleotide
uuagucuuaaagggacagc

SEQ ID NO: 291519 - RNA, 19 nt, Artificial Sequence
  Description of Artificial Sequence: Synthetic oligonucleotide
ccuucuaacaagaguuugg

SEQ ID NO: 291520 - RNA, 19 nt, Artificial Sequence
  Description of Artificial Sequence: Synthetic oligonucleotide
ugaugauuuccaccccaca

SEQ ID NO: 291521 - RNA, 19 nt, Artificial Sequence
  Description of Artificial Sequence: Synthetic oligonucleotide
acugucacacagcuaacaa

SEQ ID NO: 291522 - RNA, 19 nt, Artificial Sequence
  Description of Artificial Sequence: Synthetic oligonucleotide
aguuaggcuaccaaauagu

SEQ ID NO: 291523 - RNA, 19 nt, Artificial Sequence
  Description of Artificial Sequence: Synthetic oligonucleotide
gaccauuuggaacccuuac

SEQ ID NO: 291524 - RNA, 19 nt, Artificial Sequence
  Description of Artificial Sequence: Synthetic oligonucleotide
cuuggaaccacagggaaga

SEQ ID NO: 291525 - RNA, 19 nt, Artificial Sequence
  Description of Artificial Sequence: Synthetic oligonucleotide
uuuuacggguucuccuuga

SEQ ID NO: 291526 - RNA, 19 nt, Artificial Sequence
  Description of Artificial Sequence: Synthetic oligonucleotide
uuacggguucuccuugaca

SEQ ID NO: 291527 - RNA, 19 nt, Artificial Sequence
  Description of Artificial Sequence: Synthetic oligonucleotide
gcucacauuguucugagga

SEQ ID NO: 291528 - RNA, 19 nt, Artificial Sequence
  Description of Artificial Sequence: Synthetic oligonucleotide
ucgcuucgcagguagauau

SEQ ID NO: 291529 - RNA, 19 nt, Artificial Sequence
  Description of Artificial Sequence: Synthetic oligonucleotide
aguagucuuccucacguua

SEQ ID NO: 291530 - RNA, 19 nt, Artificial Sequence
  Description of Artificial Sequence: Synthetic oligonucleotide
auuccgugugcauagcaau

SEQ ID NO: 291531 - RNA, 19 nt, Artificial Sequence
  Description of Artificial Sequence: Synthetic oligonucleotide
uccacuugugaaacaaauu

SEQ ID NO: 291532 - RNA, 19 nt, Artificial Sequence
  Description of Artificial Sequence: Synthetic oligonucleotide
gccuucguagaacugacag

SEQ ID NO: 291533 - RNA, 19 nt, Artificial Sequence
  Description of Artificial Sequence: Synthetic oligonucleotide
auaauuccgugugcauagc

SEQ ID NO: 291534 - RNA, 19 nt, Artificial Sequence
  Description of Artificial Sequence: Synthetic oligonucleotide
gcguguguuguauaugggg

SEQ ID NO: 291535 - RNA, 19 nt, Artificial Sequence
  Description of Artificial Sequence: Synthetic oligonucleotide
uccgugugcauagcaaugc

SEQ ID NO: 291536 - RNA, 19 nt, Artificial Sequence
  Description of Artificial Sequence: Synthetic oligonucleotide
ucgacuguaucuugugaaa

SEQ ID NO: 291537 - RNA, 19 nt, Artificial Sequence
  Description of Artificial Sequence: Synthetic oligonucleotide
gaagggguuuaaaagggga

SEQ ID NO: 291538 - RNA, 19 nt, Artificial Sequence
  Description of Artificial Sequence: Synthetic oligonucleotide
uuaucgacuucuugugcaa

SEQ ID NO: 291539 - RNA, 19 nt, Artificial Sequence
  Description of Artificial Sequence: Synthetic oligonucleotide
aacauaugggcaagaggca

SEQ ID NO: 291540 - RNA, 19 nt, Artificial Sequence
  Description of Artificial Sequence: Synthetic oligonucleotide
ucaucuaucuguggccuga

SEQ ID NO: 291541 - RNA, 19 nt, Artificial Sequence
  Description of Artificial Sequence: Synthetic oligonucleotide
agaauacaaguaugaaguu

SEQ ID NO: 291542 - RNA, 19 nt, Artificial Sequence
  Description of Artificial Sequence: Synthetic oligonucleotide
uguuccgugcccucuaaua

SEQ ID NO: 291543 - RNA, 19 nt, Artificial Sequence
  Description of Artificial Sequence: Synthetic oligonucleotide
gaaguuaggcuaccaaaua

SEQ ID NO: 291544 - RNA, 19 nt, Artificial Sequence
  Description of Artificial Sequence: Synthetic oligonucleotide
aauuccgugugcauagcaa

SEQ ID NO: 291545 - RNA, 19 nt, Artificial Sequence
  Description of Artificial Sequence: Synthetic oligonucleotide
acagccgagagcuguccuc

SEQ ID NO: 291546 - RNA, 19 nt, Artificial Sequence
  Description of Artificial Sequence: Synthetic oligonucleotide
gguuguaugagugcgugug

SEQ ID NO: 291547 - RNA, 19 nt, Artificial Sequence
  Description of Artificial Sequence: Synthetic oligonucleotide
acuuuuacggguucuccuu

SEQ ID NO: 291548 - RNA, 19 nt, Artificial Sequence
  Description of Artificial Sequence: Synthetic oligonucleotide
uaaugcacgcacugucaca

SEQ ID NO: 291549 - RNA, 19 nt, Artificial Sequence
  Description of Artificial Sequence: Synthetic oligonucleotide
cauucaaaaccccguugug

SEQ ID NO: 291550 - RNA, 19 nt, Artificial Sequence
  Description of Artificial Sequence: Synthetic oligonucleotide
aguggcuucaaaauguaua

SEQ ID NO: 291551 - RNA, 19 nt, Artificial Sequence
  Description of Artificial Sequence: Synthetic oligonucleotide
uaguuccguagcucuagcc

SEQ ID NO: 291552 - RNA, 19 nt, Artificial Sequence
  Description of Artificial Sequence: Synthetic oligonucleotide
uuuacggguucuccuugac

SEQ ID NO: 291553 - RNA, 19 nt, Artificial Sequence
  Description of Artificial Sequence: Synthetic oligonucleotide
aagucgcuucacugcagug

SEQ ID NO: 291554 - RNA, 19 nt, Artificial Sequence
  Description of Artificial Sequence: Synthetic oligonucleotide
cugggcuaguuuaaauaug

SEQ ID NO: 291555 - RNA, 19 nt, Artificial Sequence
  Description of Artificial Sequence: Synthetic oligonucleotide
cuuuuacggguucuccuug

SEQ ID NO: 291556 - RNA, 19 nt, Artificial Sequence
  Description of Artificial Sequence: Synthetic oligonucleotide
uggaacccuuacauaucag

SEQ ID NO: 291557 - RNA, 19 nt, Artificial Sequence
  Description of Artificial Sequence: Synthetic oligonucleotide
uggguuguaugagugcgug

SEQ ID NO: 291558 - RNA, 19 nt, Artificial Sequence
  Description of Artificial Sequence: Synthetic oligonucleotide
acguuaaaucuugauggug

SEQ ID NO: 291559 - RNA, 19 nt, Artificial Sequence
  Description of Artificial Sequence: Synthetic oligonucleotide
cagcuaugagaaaugccug

SEQ ID NO: 291560 - RNA, 19 nt, Artificial Sequence
  Description of Artificial Sequence: Synthetic oligonucleotide
gguaagcucaggcagcaac

SEQ ID NO: 291561 - RNA, 19 nt, Artificial Sequence
  Description of Artificial Sequence: Synthetic oligonucleotide
gcaguguuugcuuagucca

SEQ ID NO: 291562 - RNA, 19 nt, Artificial Sequence
  Description of Artificial Sequence: Synthetic oligonucleotide
aauaccuaucuuagcucca

SEQ ID NO: 291563 - RNA, 19 nt, Artificial Sequence
  Description of Artificial Sequence: Synthetic oligonucleotide
cuaccaaauaguguuauua

SEQ ID NO: 291564 - RNA, 19 nt, Artificial Sequence
  Description of Artificial Sequence: Synthetic oligonucleotide
guuugcuuaguccaaaauu

SEQ ID NO: 291565 - RNA, 19 nt, Artificial Sequence
  Description of Artificial Sequence: Synthetic oligonucleotide
agcaaugccuuugaccugu

SEQ ID NO: 291566 - RNA, 19 nt, Artificial Sequence
  Description of Artificial Sequence: Synthetic oligonucleotide
gcaauuaagaauacaagua

SEQ ID NO: 291567 - RNA, 19 nt, Artificial Sequence
  Description of Artificial Sequence: Synthetic oligonucleotide
cagaucacugccguaggag

SEQ ID NO: 291568 - RNA, 19 nt, Artificial Sequence
  Description of Artificial Sequence: Synthetic oligonucleotide
auacaaguaugaaguuagg

SEQ ID NO: 291569 - RNA, 19 nt, Artificial Sequence
  Description of Artificial Sequence: Synthetic oligonucleotide
uccgguucagcagccuugg

SEQ ID NO: 291570 - RNA, 19 nt, Artificial Sequence
  Description of Artificial Sequence: Synthetic oligonucleotide
uguguaucaccagguauau

SEQ ID NO: 291571 - RNA, 19 nt, Artificial Sequence
  Description of Artificial Sequence: Synthetic oligonucleotide
gcuuauuuucuacaccuuc

SEQ ID NO: 291572 - RNA, 19 nt, Artificial Sequence
  Description of Artificial Sequence: Synthetic oligonucleotide
gccuuguuccaccagauca

SEQ ID NO: 291573 - RNA, 19 nt, Artificial Sequence
  Description of Artificial Sequence: Synthetic oligonucleotide
cagcauuacacacucuaca

SEQ ID NO: 291574 - RNA, 19 nt, Artificial Sequence
  Description of Artificial Sequence: Synthetic oligonucleotide
uuauugguugaggaaguuu

SEQ ID NO: 291575 - RNA, 19 nt, Artificial Sequence
  Description of Artificial Sequence: Synthetic oligonucleotide
ugacuguaaggcaguguuc

SEQ ID NO: 291576 - RNA, 19 nt, Artificial Sequence
  Description of Artificial Sequence: Synthetic oligonucleotide
guagccuucguagaacuga

SEQ ID NO: 291577 - RNA, 19 nt, Artificial Sequence
  Description of Artificial Sequence: Synthetic oligonucleotide
ugggcgugaagcaccuuga

SEQ ID NO: 291578 - RNA, 19 nt, Artificial Sequence
  Description of Artificial Sequence: Synthetic oligonucleotide
guagugggcgugaagcacc

SEQ ID NO: 291579 - RNA, 19 nt, Artificial Sequence
  Description of Artificial Sequence: Synthetic oligonucleotide
uaccuaucuuagcuccaug

SEQ ID NO: 291580 - RNA, 19 nt, Artificial Sequence
  Description of Artificial Sequence: Synthetic oligonucleotide
ugcccucuaauaucccuac

SEQ ID NO: 291581 - RNA, 19 nt, Artificial Sequence
  Description of Artificial Sequence: Synthetic oligonucleotide
cucgacuguaucuugugaa

SEQ ID NO: 291582 - RNA, 19 nt, Artificial Sequence
  Description of Artificial Sequence: Synthetic oligonucleotide
ggcgugaagcaccuugagg

SEQ ID NO: 291583 - RNA, 19 nt, Artificial Sequence
  Description of Artificial Sequence: Synthetic oligonucleotide
cccucuaauaucccuacag

SEQ ID NO: 291584 - RNA, 19 nt, Artificial Sequence
  Description of Artificial Sequence: Synthetic oligonucleotide
guagcagacauaccagaaa

SEQ ID NO: 291585 - RNA, 19 nt, Artificial Sequence
  Description of Artificial Sequence: Synthetic oligonucleotide
agcaaguagcagacauacc

SEQ ID NO: 291586 - RNA, 19 nt, Artificial Sequence
  Description of Artificial Sequence: Synthetic oligonucleotide
agucgcuaauaauguuuug

SEQ ID NO: 291587 - RNA, 19 nt, Artificial Sequence
  Description of Artificial Sequence: Synthetic oligonucleotide
uuccgugcccucuaauauc

SEQ ID NO: 291588 - RNA, 19 nt, Artificial Sequence
  Description of Artificial Sequence: Synthetic oligonucleotide
aggauagccuuguggacau

SEQ ID NO: 291589 - RNA, 19 nt, Artificial Sequence
  Description of Artificial Sequence: Synthetic oligonucleotide
guauaugggcugcaacaca

SEQ ID NO: 291590 - RNA, 19 nt, Artificial Sequence
  Description of Artificial Sequence: Synthetic oligonucleotide
ugauaucuccuugguaaaa

SEQ ID NO: 291591 - RNA, 19 nt, Artificial Sequence
  Description of Artificial Sequence: Synthetic oligonucleotide
uugguacaaggagauugug

SEQ ID NO: 291592 - RNA, 19 nt, Artificial Sequence
  Description of Artificial Sequence: Synthetic oligonucleotide
caaagucgcuucacugcag

SEQ ID NO: 291593 - RNA, 19 nt, Artificial Sequence
  Description of Artificial Sequence: Synthetic oligonucleotide
aaccccguugugaaaauua

SEQ ID NO: 291594 - RNA, 19 nt, Artificial Sequence
  Description of Artificial Sequence: Synthetic oligonucleotide
agucgcuucacugcagugu

SEQ ID NO: 291595 - RNA, 19 nt, Artificial Sequence
  Description of Artificial Sequence: Synthetic oligonucleotide
caaguccguggccauuucc

SEQ ID NO: 291596 - RNA, 19 nt, Artificial Sequence
  Description of Artificial Sequence: Synthetic oligonucleotide
agcuaacaacaguggcuuc

SEQ ID NO: 291597 - RNA, 19 nt, Artificial Sequence
  Description of Artificial Sequence: Synthetic oligonucleotide
gaguagugggcgugaagca

SEQ ID NO: 291598 - RNA, 19 nt, Artificial Sequence
  Description of Artificial Sequence: Synthetic oligonucleotide
ucaaaaccccguugugaaa

SEQ ID NO: 291599 - RNA, 19 nt, Artificial Sequence
  Description of Artificial Sequence: Synthetic oligonucleotide
acauaugggcaagaggcaa

SEQ ID NO: 291600 - RNA, 19 nt, Artificial Sequence
  Description of Artificial Sequence: Synthetic oligonucleotide
guauaugggguggagaagu

SEQ ID NO: 291601 - RNA, 19 nt, Artificial Sequence
  Description of Artificial Sequence: Synthetic oligonucleotide
guggccugaaauaguuccg

SEQ ID NO: 291602 - RNA, 19 nt, Artificial Sequence
  Description of Artificial Sequence: Synthetic oligonucleotide
guuguauaugggguggaga

SEQ ID NO: 291603 - RNA, 19 nt, Artificial Sequence
  Description of Artificial Sequence: Synthetic oligonucleotide
ucagccggacuuucccacc

SEQ ID NO: 291604 - RNA, 19 nt, Artificial Sequence
  Description of Artificial Sequence: Synthetic oligonucleotide
uccgcgucugguaccacaa

SEQ ID NO: 291605 - RNA, 19 nt, Artificial Sequence
  Description of Artificial Sequence: Synthetic oligonucleotide
uguaggacugggcgcucac

SEQ ID NO: 291606 - RNA, 19 nt, Artificial Sequence
  Description of Artificial Sequence: Synthetic oligonucleotide
gguauaugggcugcaacac

SEQ ID NO: 291607 - RNA, 19 nt, Artificial Sequence
  Description of Artificial Sequence: Synthetic oligonucleotide
cuccugugaucaucagccg

SEQ ID NO: 291608 - RNA, 19 nt, Artificial Sequence
  Description of Artificial Sequence: Synthetic oligonucleotide
ugccguaggaguccaugau

SEQ ID NO: 291609 - RNA, 19 nt, Artificial Sequence
  Description of Artificial Sequence: Synthetic oligonucleotide
uggccugaaauaguuccgu

SEQ ID NO: 291610 - RNA, 19 nt, Artificial Sequence
  Description of Artificial Sequence: Synthetic oligonucleotide
ccauuuggcagccauuuuc

SEQ ID NO: 291611 - RNA, 19 nt, Artificial Sequence
  Description of Artificial Sequence: Synthetic oligonucleotide
uccucacguuaaaucuuga

SEQ ID NO: 291612 - RNA, 19 nt, Artificial Sequence
  Description of Artificial Sequence: Synthetic oligonucleotide
aucgacuucuugugcaauu

SEQ ID NO: 291613 - RNA, 19 nt, Artificial Sequence
  Description of Artificial Sequence: Synthetic oligonucleotide
acaaguccguggccauuuc

SEQ ID NO: 291614 - RNA, 19 nt, Artificial Sequence
  Description of Artificial Sequence: Synthetic oligonucleotide
ggugccaugaaacccucuc

SEQ ID NO: 291615 - RNA, 19 nt, Artificial Sequence
  Description of Artificial Sequence: Synthetic oligonucleotide
ccacuugugaaacaaauua

SEQ ID NO: 291616 - RNA, 19 nt, Artificial Sequence
  Description of Artificial Sequence: Synthetic oligonucleotide
acaauauuuaaggcucguu

SEQ ID NO: 291617 - RNA, 19 nt, Artificial Sequence
  Description of Artificial Sequence: Synthetic oligonucleotide
caggauagccuuguggaca

SEQ ID NO: 291618 - RNA, 19 nt, Artificial Sequence
  Description of Artificial Sequence: Synthetic oligonucleotide
uccguagccuucguagaac

SEQ ID NO: 291619 - RNA, 19 nt, Artificial Sequence
  Description of Artificial Sequence: Synthetic oligonucleotide
uagugggcgugaagcaccu

SEQ ID NO: 291620 - RNA, 19 nt, Artificial Sequence
  Description of Artificial Sequence: Synthetic oligonucleotide
agagugaaaugcugcuauu

SEQ ID NO: 291621 - RNA, 19 nt, Artificial Sequence
  Description of Artificial Sequence: Synthetic oligonucleotide
aguguuugcuuaguccaaa

SEQ ID NO: 291622 - RNA, 19 nt, Artificial Sequence
  Description of Artificial Sequence: Synthetic oligonucleotide
cagaaggccauugucaaua

SEQ ID NO: 291623 - RNA, 19 nt, Artificial Sequence
  Description of Artificial Sequence: Synthetic oligonucleotide
aggcucguuuuggaaauug

SEQ ID NO: 291624 - RNA, 19 nt, Artificial Sequence
  Description of Artificial Sequence: Synthetic oligonucleotide
augagugcguguguuguau

SEQ ID NO: 291625 - RNA, 19 nt, Artificial Sequence
  Description of Artificial Sequence: Synthetic oligonucleotide
ccuacagugagacccugug

SEQ ID NO: 291626 - RNA, 19 nt, Artificial Sequence
  Description of Artificial Sequence: Synthetic oligonucleotide
ggcuucgcuucgcagguag

SEQ ID NO: 291627 - RNA, 19 nt, Artificial Sequence
  Description of Artificial Sequence: Synthetic oligonucleotide
ugccuuguuccaccagauc

SEQ ID NO: 291628 - RNA, 19 nt, Artificial Sequence
  Description of Artificial Sequence: Synthetic oligonucleotide
cuuacauaucagauggguu

SEQ ID NO: 291629 - RNA, 19 nt, Artificial Sequence
  Description of Artificial Sequence: Synthetic oligonucleotide
agcagucgcuaauaauguu

SEQ ID NO: 291630 - RNA, 19 nt, Artificial Sequence
  Description of Artificial Sequence: Synthetic oligonucleotide
auaccuaucuuagcuccau

SEQ ID NO: 291631 - RNA, 19 nt, Artificial Sequence
  Description of Artificial Sequence: Synthetic oligonucleotide
uucuccgcgucugguacca

SEQ ID NO: 291632 - RNA, 19 nt, Artificial Sequence
  Description of Artificial Sequence: Synthetic oligonucleotide
ggaagcguugaaugaguuc

SEQ ID NO: 291633 - RNA, 19 nt, Artificial Sequence
  Description of Artificial Sequence: Synthetic oligonucleotide
ggaggugugccguuucuuc

SEQ ID NO: 291634 - RNA, 19 nt, Artificial Sequence
  Description of Artificial Sequence: Synthetic oligonucleotide
gauuguggaggugugccgu

SEQ ID NO: 291635 - RNA, 19 nt, Artificial Sequence
  Description of Artificial Sequence: Synthetic oligonucleotide
gcuugacuaggucaaaugu

SEQ ID NO: 291636 - RNA, 19 nt, Artificial Sequence
  Description of Artificial Sequence: Synthetic oligonucleotide
caucaacaagcuuuacaua

SEQ ID NO: 291637 - RNA, 19 nt, Artificial Sequence
  Description of Artificial Sequence: Synthetic oligonucleotide
augucaucuggggaagcgu

SEQ ID NO: 291638 - RNA, 19 nt, Artificial Sequence
  Description of Artificial Sequence: Synthetic oligonucleotide
ucccugggcuaguuuaaau

SEQ ID NO: 291639 - RNA, 19 nt, Artificial Sequence
  Description of Artificial Sequence: Synthetic oligonucleotide
acacuugggccaaggcuuc

SEQ ID NO: 291640 - RNA, 19 nt, Artificial Sequence
  Description of Artificial Sequence: Synthetic oligonucleotide
ccuuggaaccacagggaag

SEQ ID NO: 291641 - RNA, 19 nt, Artificial Sequence
  Description of Artificial Sequence: Synthetic oligonucleotide
cagccggacuuucccaccc

SEQ ID NO: 291642 - RNA, 19 nt, Artificial Sequence
  Description of Artificial Sequence: Synthetic oligonucleotide
cugggcgcucacauuguuc

SEQ ID NO: 291643 - RNA, 19 nt, Artificial Sequence
  Description of Artificial Sequence: Synthetic oligonucleotide
cagacauaccagaaagagu

SEQ ID NO: 291644 - RNA, 19 nt, Artificial Sequence
  Description of Artificial Sequence: Synthetic oligonucleotide
guucuccgcgucugguacc

SEQ ID NO: 291645 - RNA, 19 nt, Artificial Sequence
  Description of Artificial Sequence: Synthetic oligonucleotide
caggcucgacuguaucuug

SEQ ID NO: 291646 - RNA, 19 nt, Artificial Sequence
  Description of Artificial Sequence: Synthetic oligonucleotide
ugagugcguguguuguaua

SEQ ID NO: 291647 - RNA, 19 nt, Artificial Sequence
  Description of Artificial Sequence: Synthetic oligonucleotide
cuguggccugaaauaguuc

SEQ ID NO: 291648 - RNA, 19 nt, Artificial Sequence
  Description of Artificial Sequence: Synthetic oligonucleotide
uaucgacuucuugugcaau

SEQ ID NO: 291649 - RNA, 19 nt, Artificial Sequence
  Description of Artificial Sequence: Synthetic oligonucleotide
guaugaaguuaggcuacca

SEQ ID NO: 291650 - RNA, 19 nt, Artificial Sequence
  Description of Artificial Sequence: Synthetic oligonucleotide
gugcaaacccuguugugcu

SEQ ID NO: 291651 - RNA, 19 nt, Artificial Sequence
  Description of Artificial Sequence: Synthetic oligonucleotide
guuccgugcccucuaauau

SEQ ID NO: 291652 - RNA, 19 nt, Artificial Sequence
  Description of Artificial Sequence: Synthetic oligonucleotide
gagcagucgcuaauaaugu

SEQ ID NO: 291653 - RNA, 19 nt, Artificial Sequence
  Description of Artificial Sequence: Synthetic oligonucleotide
cacugcgaagcucggcuuc

SEQ ID NO: 291654 - RNA, 19 nt, Artificial Sequence
  Description of Artificial Sequence: Synthetic oligonucleotide
aaaccccguugugaaaauu

SEQ ID NO: 291655 - RNA, 19 nt, Artificial Sequence
  Description of Artificial Sequence: Synthetic oligonucleotide
guguuugcuuaguccaaaa

SEQ ID NO: 291656 - RNA, 19 nt, Artificial Sequence
  Description of Artificial Sequence: Synthetic oligonucleotide
uucgcuucgcagguagaua

SEQ ID NO: 291657 - RNA, 19 nt, Artificial Sequence
  Description of Artificial Sequence: Synthetic oligonucleotide
gucugguaccacaacagcu

SEQ ID NO: 291658 - RNA, 19 nt, Artificial Sequence
  Description of Artificial Sequence: Synthetic oligonucleotide
guugccuguaguuccacuu

SEQ ID NO: 291659 - RNA, 19 nt, Artificial Sequence
  Description of Artificial Sequence: Synthetic oligonucleotide
gagaaaugccugcaagcuu

SEQ ID NO: 291660 - RNA, 19 nt, Artificial Sequence
  Description of Artificial Sequence: Synthetic oligonucleotide
gcguugaaugaguucucug

SEQ ID NO: 291661 - RNA, 19 nt, Artificial Sequence
  Description of Artificial Sequence: Synthetic oligonucleotide
uuguaggacugggcgcuca

SEQ ID NO: 291662 - RNA, 19 nt, Artificial Sequence
  Description of Artificial Sequence: Synthetic oligonucleotide
cacguuaaaucuugauggu

SEQ ID NO: 291663 - RNA, 19 nt, Artificial Sequence
  Description of Artificial Sequence: Synthetic oligonucleotide
cugccguaggaguccauga

SEQ ID NO: 291664 - RNA, 19 nt, Artificial Sequence
  Description of Artificial Sequence: Synthetic oligonucleotide
caucagccggacuuuccca

SEQ ID NO: 291665 - RNA, 19 nt, Artificial Sequence
  Description of Artificial Sequence: Synthetic oligonucleotide
gauuuccaccccacacuuc

SEQ ID NO: 291666 - RNA, 19 nt, Artificial Sequence
  Description of Artificial Sequence: Synthetic oligonucleotide
ccugugaucaucagccgga

SEQ ID NO: 291667 - RNA, 19 nt, Artificial Sequence
  Description of Artificial Sequence: Synthetic oligonucleotide
guuguaugagugcgugugu

SEQ ID NO: 291668 - RNA, 19 nt, Artificial Sequence
  Description of Artificial Sequence: Synthetic oligonucleotide
cguagaacugacagccgag

SEQ ID NO: 291669 - RNA, 19 nt, Artificial Sequence
  Description of Artificial Sequence: Synthetic oligonucleotide
ccaccuuauugguugagga

SEQ ID NO: 291670 - RNA, 19 nt, Artificial Sequence
  Description of Artificial Sequence: Synthetic oligonucleotide
ggagauuguggaggugugc

SEQ ID NO: 291671 - RNA, 19 nt, Artificial Sequence
  Description of Artificial Sequence: Synthetic oligonucleotide
caagugacuguaaggcagu

SEQ ID NO: 291672 - RNA, 19 nt, Artificial Sequence
  Description of Artificial Sequence: Synthetic oligonucleotide
ugcacucagucuguccgua

SEQ ID NO: 291673 - RNA, 19 nt, Artificial Sequence
  Description of Artificial Sequence: Synthetic oligonucleotide
agguucuccgcgucuggua

SEQ ID NO: 291674 - RNA, 19 nt, Artificial Sequence
  Description of Artificial Sequence: Synthetic oligonucleotide
gcacuuuuacggguucucc

SEQ ID NO: 291675 - RNA, 19 nt, Artificial Sequence
  Description of Artificial Sequence: Synthetic oligonucleotide
acauuguucugaggaggau

SEQ ID NO: 291676 - RNA, 19 nt, Artificial Sequence
  Description of Artificial Sequence: Synthetic oligonucleotide
gugugccguuucuuccaag

SEQ ID NO: 291677 - RNA, 19 nt, Artificial Sequence
  Description of Artificial Sequence: Synthetic oligonucleotide
acaguggcuucaaaaugua

SEQ ID NO: 291678 - RNA, 19 nt, Artificial Sequence
  Description of Artificial Sequence: Synthetic oligonucleotide
gaacccagguucuccgcgu

SEQ ID NO: 291679 - RNA, 19 nt, Artificial Sequence
  Description of Artificial Sequence: Synthetic oligonucleotide
auggguuguaugagugcgu

SEQ ID NO: 291680 - RNA, 19 nt, Artificial Sequence
  Description of Artificial Sequence: Synthetic oligonucleotide
caguguuugcuuaguccaa

SEQ ID NO: 291681 - RNA, 19 nt, Artificial Sequence
  Description of Artificial Sequence: Synthetic oligonucleotide
cccuuacauaucagauggg

SEQ ID NO: 291682 - RNA, 19 nt, Artificial Sequence
  Description of Artificial Sequence: Synthetic oligonucleotide
gaagaguagugggcgugaa

SEQ ID NO: 291683 - RNA, 19 nt, Artificial Sequence
  Description of Artificial Sequence: Synthetic oligonucleotide
accccguugugaaaauuau

SEQ ID NO: 291684 - RNA, 19 nt, Artificial Sequence
  Description of Artificial Sequence: Synthetic oligonucleotide
ggcugaugauuuccacccc

SEQ ID NO: 291685 - RNA, 19 nt, Artificial Sequence
  Description of Artificial Sequence: Synthetic oligonucleotide
gcgcucacauuguucugag

SEQ ID NO: 291686 - RNA, 19 nt, Artificial Sequence
  Description of Artificial Sequence: Synthetic oligonucleotide
uuuguaggacugggcgcuc

SEQ ID NO: 291687 - RNA, 19 nt, Artificial Sequence
  Description of Artificial Sequence: Synthetic oligonucleotide
cccaccuuauugguugagg

SEQ ID NO: 291688 - RNA, 19 nt, Artificial Sequence
  Description of Artificial Sequence: Synthetic oligonucleotide
cagucgcuaauaauguuuu

SEQ ID NO: 291689 - RNA, 19 nt, Artificial Sequence
  Description of Artificial Sequence: Synthetic oligonucleotide
acugggcgcucacauuguu

SEQ ID NO: 291690 - RNA, 19 nt, Artificial Sequence
  Description of Artificial Sequence: Synthetic oligonucleotide
gugccaugaaacccucucu

SEQ ID NO: 291691 - RNA, 19 nt, Artificial Sequence
  Description of Artificial Sequence: Synthetic oligonucleotide
aaacccuguugugcuucaa

SEQ ID NO: 291692 - RNA, 19 nt, Artificial Sequence
  Description of Artificial Sequence: Synthetic oligonucleotide
gggcgugaagcaccuugag

SEQ ID NO: 291693 - RNA, 19 nt, Artificial Sequence
  Description of Artificial Sequence: Synthetic oligonucleotide
ccguugugaaaauuaucga

SEQ ID NO: 291694 - RNA, 19 nt, Artificial Sequence
  Description of Artificial Sequence: Synthetic oligonucleotide
ccgugugcauagcaaugcc

SEQ ID NO: 291695 - RNA, 19 nt, Artificial Sequence
  Description of Artificial Sequence: Synthetic oligonucleotide
gcucgacuguaucuuguga

SEQ ID NO: 291696 - RNA, 19 nt, Artificial Sequence
  Description of Artificial Sequence: Synthetic oligonucleotide
aggcucgacuguaucuugu

SEQ ID NO: 291697 - RNA, 19 nt, Artificial Sequence
  Description of Artificial Sequence: Synthetic oligonucleotide
acccaccuuauugguugag

SEQ ID NO: 291698 - RNA, 19 nt, Artificial Sequence
  Description of Artificial Sequence: Synthetic oligonucleotide
cuccgcgucugguaccaca

SEQ ID NO: 291699 - RNA, 19 nt, Artificial Sequence
  Description of Artificial Sequence: Synthetic oligonucleotide
aaggcucguuuuggaaauu

SEQ ID NO: 291700 - RNA, 19 nt, Artificial Sequence
  Description of Artificial Sequence: Synthetic oligonucleotide
gucgcuucacugcaguguu

SEQ ID NO: 291701 - RNA, 19 nt, Artificial Sequence
  Description of Artificial Sequence: Synthetic oligonucleotide
ggcgcucacauuguucuga

SEQ ID NO: 291702 - RNA, 19 nt, Artificial Sequence
  Description of Artificial Sequence: Synthetic oligonucleotide
agccggacuuucccaccca

SEQ ID NO: 291703 - RNA, 19 nt, Artificial Sequence
  Description of Artificial Sequence: Synthetic oligonucleotide
ggaagaguagugggcguga

SEQ ID NO: 291704 - RNA, 19 nt, Artificial Sequence
  Description of Artificial Sequence: Synthetic oligonucleotide
cugagcagucgcuaauaau

SEQ ID NO: 291705 - RNA, 19 nt, Artificial Sequence
  Description of Artificial Sequence: Synthetic oligonucleotide
gacagccgagagcuguccu

SEQ ID NO: 291706 - RNA, 19 nt, Artificial Sequence
  Description of Artificial Sequence: Synthetic oligonucleotide
cagccgagagcuguccuca

SEQ ID NO: 291707 - RNA, 19 nt, Artificial Sequence
  Description of Artificial Sequence: Synthetic oligonucleotide
cacaccucacccucgcccu

SEQ ID NO: 291708 - RNA, 19 nt, Artificial Sequence
  Description of Artificial Sequence: Synthetic oligonucleotide
cucgcccuuggcagccaug

SEQ ID NO: 291709 - RNA, 19 nt, Artificial Sequence
  Description of Artificial Sequence: Synthetic oligonucleotide
ccccguugugaaaauuauc

SEQ ID NO: 291710 - RNA, 19 nt, Artificial Sequence
  Description of Artificial Sequence: Synthetic oligonucleotide
ccugggcuaguuuaaauau

SEQ ID NO: 291711 - RNA, 19 nt, Artificial Sequence
  Description of Artificial Sequence: Synthetic oligonucleotide
ggagucagaaggccauugu

SEQ ID NO: 291712 - RNA, 19 nt, Artificial Sequence
  Description of Artificial Sequence: Synthetic oligonucleotide
gugcccucuaauaucccua

SEQ ID NO: 291713 - RNA, 19 nt, Artificial Sequence
  Description of Artificial Sequence: Synthetic oligonucleotide
ccuuacauaucagaugggu

SEQ ID NO: 291714 - RNA, 19 nt, Artificial Sequence
  Description of Artificial Sequence: Synthetic oligonucleotide
cguguguuguauauggggu

SEQ ID NO: 291715 - RNA, 19 nt, Artificial Sequence
  Description of Artificial Sequence: Synthetic oligonucleotide
ccucuaauaucccuacagu

SEQ ID NO: 291716 - RNA, 19 nt, Artificial Sequence
  Description of Artificial Sequence: Synthetic oligonucleotide
ccuuauugguugaggaagu

SEQ ID NO: 291717 - RNA, 19 nt, Artificial Sequence
  Description of Artificial Sequence: Synthetic oligonucleotide
cugguaccacaacagcuau

SEQ ID NO: 291718 - RNA, 19 nt, Artificial Sequence
  Description of Artificial Sequence: Synthetic oligonucleotide
cccugggcuaguuuaaaua

SEQ ID NO: 291719 - RNA, 19 nt, Artificial Sequence
  Description of Artificial Sequence: Synthetic oligonucleotide
cacccaccuuauugguuga

SEQ ID NO: 291720 - RNA, 19 nt, Artificial Sequence
  Description of Artificial Sequence: Synthetic oligonucleotide
ccguuucuuccaaguaguc

SEQ ID NO: 291721 - RNA, 19 nt, Artificial Sequence
  Description of Artificial Sequence: Synthetic oligonucleotide
uacucucccugggcuaguu

SEQ ID NO: 291722 - RNA, 19 nt, Artificial Sequence
  Description of Artificial Sequence: Synthetic oligonucleotide
ccgagagcuguccucagaa

SEQ ID NO: 291723 - RNA, 19 nt, Artificial Sequence
  Description of Artificial Sequence: Synthetic oligonucleotide
cuucgcagguagauauuuu

SEQ ID NO: 291724 - RNA, 19 nt, Artificial Sequence
  Description of Artificial Sequence: Synthetic oligonucleotide
cuucgcuucgcagguagau

SEQ ID NO: 291725 - RNA, 19 nt, Artificial Sequence
  Description of Artificial Sequence: Synthetic oligonucleotide
gccuuguggacauccuugu

SEQ ID NO: 291726 - RNA, 19 nt, Artificial Sequence
  Description of Artificial Sequence: Synthetic oligonucleotide
gccgcuccugugaucauca

SEQ ID NO: 291727 - RNA, 19 nt, Artificial Sequence
  Description of Artificial Sequence: Synthetic oligonucleotide
gccugauaucuccuuggua

SEQ ID NO: 291728 - RNA, 19 nt, Artificial Sequence
  Description of Artificial Sequence: Synthetic oligonucleotide
cuuauugguugaggaaguu

SEQ ID NO: 291729 - RNA, 19 nt, Artificial Sequence
  Description of Artificial Sequence: Synthetic oligonucleotide
guuuaucccacaggcuguu

SEQ ID NO: 291730 - RNA, 19 nt, Artificial Sequence
  Description of Artificial Sequence: Synthetic oligonucleotide
aggugccaugaaacccucu

SEQ ID NO: 291731 - RNA, 19 nt, Artificial Sequence
  Description of Artificial Sequence: Synthetic oligonucleotide
agguaagcucaggcagcaa

SEQ ID NO: 291732 - RNA, 19 nt, Artificial Sequence
  Description of Artificial Sequence: Synthetic oligonucleotide
cgcucacauuguucugagg

SEQ ID NO: 291733 - RNA, 19 nt, Artificial Sequence
  Description of Artificial Sequence: Synthetic oligonucleotide
caccggggccgcuccugug

SEQ ID NO: 291734 - RNA, 19 nt, Artificial Sequence
  Description of Artificial Sequence: Synthetic oligonucleotide
gccgagagcuguccucaga

SEQ ID NO: 291735 - RNA, 19 nt, Artificial Sequence
  Description of Artificial Sequence: Synthetic oligonucleotide
ggggaagcguugaaugagu

SEQ ID NO: 291736 - RNA, 19 nt, Artificial Sequence
  Description of Artificial Sequence: Synthetic oligonucleotide
ggcaccaacauggccugcu

SEQ ID NO: 291737 - RNA, 19 nt, Artificial Sequence
  Description of Artificial Sequence: Synthetic oligonucleotide
ccgugcccucuaauauccc

SEQ ID NO: 291738 - RNA, 19 nt, Artificial Sequence
  Description of Artificial Sequence: Synthetic oligonucleotide
gggguugccuguaguucca

SEQ ID NO: 291739 - RNA, 19 nt, Artificial Sequence
  Description of Artificial Sequence: Synthetic oligonucleotide
ucuccgcgucugguaccac

SEQ ID NO: 291740 - RNA, 19 nt, Artificial Sequence
  Description of Artificial Sequence: Synthetic oligonucleotide
ggguuguaugagugcgugu

SEQ ID NO: 291741 - RNA, 19 nt, Artificial Sequence
  Description of Artificial Sequence: Synthetic oligonucleotide
cagcuugacuaggucaaau

SEQ ID NO: 291742 - RNA, 19 nt, Artificial Sequence
  Description of Artificial Sequence: Synthetic oligonucleotide
gcuucgcagguagauauuu

SEQ ID NO: 291743 - RNA, 19 nt, Artificial Sequence
  Description of Artificial Sequence: Synthetic oligonucleotide
cuuucccacccaggcucga

SEQ ID NO: 291744 - RNA, 19 nt, Artificial Sequence
  Description of Artificial Sequence: Synthetic oligonucleotide
guguuccgugcccucuaau

SEQ ID NO: 291745 - RNA, 19 nt, Artificial Sequence
  Description of Artificial Sequence: Synthetic oligonucleotide
ggguugccuguaguuccac

SEQ ID NO: 291746 - RNA, 19 nt, Artificial Sequence
  Description of Artificial Sequence: Synthetic oligonucleotide
acgcacugucacacagcua

SEQ ID NO: 291747 - RNA, 19 nt, Artificial Sequence
  Description of Artificial Sequence: Synthetic oligonucleotide
ccgcuccugugaucaucag

SEQ ID NO: 291748 - RNA, 19 nt, Artificial Sequence
  Description of Artificial Sequence: Synthetic oligonucleotide
gcaguguuccgugcccucu

SEQ ID NO: 291749 - RNA, 19 nt, Artificial Sequence
  Description of Artificial Sequence: Synthetic oligonucleotide
gcuucgcuucgcagguaga

SEQ ID NO: 291750 - RNA, 19 nt, Artificial Sequence
  Description of Artificial Sequence: Synthetic oligonucleotide
ccgcgucugguaccacaac

SEQ ID NO: 291751 - RNA, 19 nt, Artificial Sequence
  Description of Artificial Sequence: Synthetic oligonucleotide
cgugcccucuaauaucccu

SEQ ID NO: 291752 - RNA, 19 nt, Artificial Sequence
  Description of Artificial Sequence: Synthetic oligonucleotide
guacucucccugggcuagu

SEQ ID NO: 291753 - RNA, 19 nt, Artificial Sequence
  Description of Artificial Sequence: Synthetic oligonucleotide
cacugccguaggaguccau

SEQ ID NO: 291754 - RNA, 19 nt, Artificial Sequence
  Description of Artificial Sequence: Synthetic oligonucleotide
ccguggccauuuccuuucu

SEQ ID NO: 291755 - RNA, 19 nt, Artificial Sequence
  Description of Artificial Sequence: Synthetic oligonucleotide
gcaaugccuuugaccuguu

SEQ ID NO: 291756 - RNA, 19 nt, Artificial Sequence
  Description of Artificial Sequence: Synthetic oligonucleotide
cgcuucgcagguagauauu

SEQ ID NO: 291757 - RNA, 19 nt, Artificial Sequence
  Description of Artificial Sequence: Synthetic oligonucleotide
uauguguaaaaucaaacgg

SEQ ID NO: 291758 - RNA, 19 nt, Artificial Sequence
  Description of Artificial Sequence: Synthetic oligonucleotide
uguaaaaucaaacggcaca

SEQ ID NO: 291759 - RNA, 19 nt, Artificial Sequence
  Description of Artificial Sequence: Synthetic oligonucleotide
uauagcauaguucuggacu

SEQ ID NO: 291760 - RNA, 19 nt, Artificial Sequence
  Description of Artificial Sequence: Synthetic oligonucleotide
gaucguucuuguuagaagg

SEQ ID NO: 291761 - RNA, 19 nt, Artificial Sequence
  Description of Artificial Sequence: Synthetic oligonucleotide
uuggaguucauuaagauuu

SEQ ID NO: 291762 - RNA, 19 nt, Artificial Sequence
  Description of Artificial Sequence: Synthetic oligonucleotide
gaaggaucgacucagaguc

SEQ ID NO: 291763 - RNA, 19 nt, Artificial Sequence
  Description of Artificial Sequence: Synthetic oligonucleotide
ugcauugugguuuaguuug

SEQ ID NO: 291764 - RNA, 19 nt, Artificial Sequence
  Description of Artificial Sequence: Synthetic oligonucleotide
aaaacggaacguuguagcg

SEQ ID NO: 291765 - RNA, 19 nt, Artificial Sequence
  Description of Artificial Sequence: Synthetic oligonucleotide
uguaguauagcacacgcuc

SEQ ID NO: 291766 - RNA, 19 nt, Artificial Sequence
  Description of Artificial Sequence: Synthetic oligonucleotide
ugugauuacuccauggcgc

SEQ ID NO: 291767 - RNA, 19 nt, Artificial Sequence
  Description of Artificial Sequence: Synthetic oligonucleotide
ucuagaucguucuuguuag

SEQ ID NO: 291768 - RNA, 19 nt, Artificial Sequence
  Description of Artificial Sequence: Synthetic oligonucleotide
uugauauugauaucuuucc

SEQ ID NO: 291769 - RNA, 19 nt, Artificial Sequence
  Description of Artificial Sequence: Synthetic oligonucleotide
ugacgauugacagucaugg

SEQ ID NO: 291770 - RNA, 19 nt, Artificial Sequence
  Description of Artificial Sequence: Synthetic oligonucleotide
aaaucagaaaccgagggga

SEQ ID NO: 291771 - RNA, 19 nt, Artificial Sequence
  Description of Artificial Sequence: Synthetic oligonucleotide
ucucauuuguugaagggcc

SEQ ID NO: 291772 - RNA, 19 nt, Artificial Sequence
  Description of Artificial Sequence: Synthetic oligonucleotide
uagucaaacagucacuaug

SEQ ID NO: 291773 - RNA, 19 nt, Artificial Sequence
  Description of Artificial Sequence: Synthetic oligonucleotide
uaguccauaguuuaaauau

SEQ ID NO: 291774 - RNA, 19 nt, Artificial Sequence
  Description of Artificial Sequence: Synthetic oligonucleotide
augcaugcgaacuaaccgc

SEQ ID NO: 291775 - RNA, 19 nt, Artificial Sequence
  Description of Artificial Sequence: Synthetic oligonucleotide
acgauugacagucaugguc

SEQ ID NO: 291776 - RNA, 19 nt, Artificial Sequence
  Description of Artificial Sequence: Synthetic oligonucleotide
ugcagaacaaaccguagcc

SEQ ID NO: 291777 - RNA, 19 nt, Artificial Sequence
  Description of Artificial Sequence: Synthetic oligonucleotide
aauuuaguguaguccuccg

SEQ ID NO: 291778 - RNA, 19 nt, Artificial Sequence
  Description of Artificial Sequence: Synthetic oligonucleotide
ugggaauuauuccugacga

SEQ ID NO: 291779 - RNA, 19 nt, Artificial Sequence
  Description of Artificial Sequence: Synthetic oligonucleotide
acuauguucaaagugagga

SEQ ID NO: 291780 - RNA, 19 nt, Artificial Sequence
  Description of Artificial Sequence: Synthetic oligonucleotide
uauagcucguuccucaaug

SEQ ID NO: 291781 - RNA, 19 nt, Artificial Sequence
  Description of Artificial Sequence: Synthetic oligonucleotide
ugcuuuggaacauuggccc

SEQ ID NO: 291782 - RNA, 19 nt, Artificial Sequence
  Description of Artificial Sequence: Synthetic oligonucleotide
uuucguauuuucucauugg

SEQ ID NO: 291783 - RNA, 19 nt, Artificial Sequence
  Description of Artificial Sequence: Synthetic oligonucleotide
aaacggaacguuguagcgc

SEQ ID NO: 291784 - RNA, 19 nt, Artificial Sequence
  Description of Artificial Sequence: Synthetic oligonucleotide
aaguauauagcucguuccu

SEQ ID NO: 291785 - RNA, 19 nt, Artificial Sequence
  Description of Artificial Sequence: Synthetic oligonucleotide
caugcaugcgaacuaaccg

SEQ ID NO: 291786 - RNA, 19 nt, Artificial Sequence
  Description of Artificial Sequence: Synthetic oligonucleotide
cauauuauuuagagggacc

SEQ ID NO: 291787 - RNA, 19 nt, Artificial Sequence
  Description of Artificial Sequence: Synthetic oligonucleotide
ucuaguuccauugaaucca

SEQ ID NO: 291788 - RNA, 19 nt, Artificial Sequence
  Description of Artificial Sequence: Synthetic oligonucleotide
ucuauugugaaguccacau

SEQ ID NO: 291789 - RNA, 19 nt, Artificial Sequence
  Description of Artificial Sequence: Synthetic oligonucleotide
uggauuagccacuuccagg

SEQ ID NO: 291790 - RNA, 19 nt, Artificial Sequence
  Description of Artificial Sequence: Synthetic oligonucleotide
aaucaaccaugugaugugc

SEQ ID NO: 291791 - RNA, 19 nt, Artificial Sequence
  Description of Artificial Sequence: Synthetic oligonucleotide
gacauaauaggcucaauaa

SEQ ID NO: 291792 - RNA, 19 nt, Artificial Sequence
  Description of Artificial Sequence: Synthetic oligonucleotide
ucaacagucgcauggcaag

SEQ ID NO: 291793 - RNA, 19 nt, Artificial Sequence
  Description of Artificial Sequence: Synthetic oligonucleotide
aguucacccugauaauugc

SEQ ID NO: 291794 - RNA, 19 nt, Artificial Sequence
  Description of Artificial Sequence: Synthetic oligonucleotide
agagauuucauuagaauca

SEQ ID NO: 291795 - RNA, 19 nt, Artificial Sequence
  Description of Artificial Sequence: Synthetic oligonucleotide
ugaaauaguccucgauucc

SEQ ID NO: 291796 - RNA, 19 nt, Artificial Sequence
  Description of Artificial Sequence: Synthetic oligonucleotide
ucacuauguucaaagugag

SEQ ID NO: 291797 - RNA, 19 nt, Artificial Sequence
  Description of Artificial Sequence: Synthetic oligonucleotide
caaaccaauggguaucugc

SEQ ID NO: 291798 - RNA, 19 nt, Artificial Sequence
  Description of Artificial Sequence: Synthetic oligonucleotide
aacggaacguuguagcgcu

SEQ ID NO: 291799 - RNA, 19 nt, Artificial Sequence
  Description of Artificial Sequence: Synthetic oligonucleotide
ggauuagccacuuccaggg

SEQ ID NO: 291800 - RNA, 19 nt, Artificial Sequence
  Description of Artificial Sequence: Synthetic oligonucleotide
uaaggucuuucauuaaaca

SEQ ID NO: 291801 - RNA, 19 nt, Artificial Sequence
  Description of Artificial Sequence: Synthetic oligonucleotide
uccgucuuuaccuuucacc

SEQ ID NO: 291802 - RNA, 19 nt, Artificial Sequence
  Description of Artificial Sequence: Synthetic oligonucleotide
auuauuuagagggaccucu

SEQ ID NO: 291803 - RNA, 19 nt, Artificial Sequence
  Description of Artificial Sequence: Synthetic oligonucleotide
gaaucaaccaugugaugug

SEQ ID NO: 291804 - RNA, 19 nt, Artificial Sequence
  Description of Artificial Sequence: Synthetic oligonucleotide
acgaacaccaucgguaggc

SEQ ID NO: 291805 - RNA, 19 nt, Artificial Sequence
  Description of Artificial Sequence: Synthetic oligonucleotide
uggauagugauuccucucu

SEQ ID NO: 291806 - RNA, 19 nt, Artificial Sequence
  Description of Artificial Sequence: Synthetic oligonucleotide
aaucgaugugagcugagau

SEQ ID NO: 291807 - RNA, 19 nt, Artificial Sequence
  Description of Artificial Sequence: Synthetic oligonucleotide
aaaccaauggguaucugca

SEQ ID NO: 291808 - RNA, 19 nt, Artificial Sequence
  Description of Artificial Sequence: Synthetic oligonucleotide
ugaaggaucgacucagagu

SEQ ID NO: 291809 - RNA, 19 nt, Artificial Sequence
  Description of Artificial Sequence: Synthetic oligonucleotide
ucguauuuucucauuggga

SEQ ID NO: 291810 - RNA, 19 nt, Artificial Sequence
  Description of Artificial Sequence: Synthetic oligonucleotide
auuuaguguaguccuccgg

SEQ ID NO: 291811 - RNA, 19 nt, Artificial Sequence
  Description of Artificial Sequence: Synthetic oligonucleotide
ucuugcagaacaaaccgua

SEQ ID NO: 291812 - RNA, 19 nt, Artificial Sequence
  Description of Artificial Sequence: Synthetic oligonucleotide
ugcacucgaaccuucuucc

SEQ ID NO: 291813 - RNA, 19 nt, Artificial Sequence
  Description of Artificial Sequence: Synthetic oligonucleotide
auauuauuuagagggaccu

SEQ ID NO: 291814 - RNA, 19 nt, Artificial Sequence
  Description of Artificial Sequence: Synthetic oligonucleotide
aacagucgcauggcaagcc

SEQ ID NO: 291815 - RNA, 19 nt, Artificial Sequence
  Description of Artificial Sequence: Synthetic oligonucleotide
agaucguucuuguuagaag

SEQ ID NO: 291816 - RNA, 19 nt, Artificial Sequence
  Description of Artificial Sequence: Synthetic oligonucleotide
uaguauagcacacgcucug

SEQ ID NO: 291817 - RNA, 19 nt, Artificial Sequence
  Description of Artificial Sequence: Synthetic oligonucleotide
uggagcuacaacuuccaca

SEQ ID NO: 291818 - RNA, 19 nt, Artificial Sequence
  Description of Artificial Sequence: Synthetic oligonucleotide
aaaccguagcccagaaagc

SEQ ID NO: 291819 - RNA, 19 nt, Artificial Sequence
  Description of Artificial Sequence: Synthetic oligonucleotide
uuauuuagagggaccucug

SEQ ID NO: 291820 - RNA, 19 nt, Artificial Sequence
  Description of Artificial Sequence: Synthetic oligonucleotide
cauggcgccgguuaauucc

SEQ ID NO: 291821 - RNA, 19 nt, Artificial Sequence
  Description of Artificial Sequence: Synthetic oligonucleotide
cugugauacaaggacagcc

SEQ ID NO: 291822 - RNA, 19 nt, Artificial Sequence
  Description of Artificial Sequence: Synthetic oligonucleotide
uggaaucucgccauaucga

SEQ ID NO: 291823 - RNA, 19 nt, Artificial Sequence
  Description of Artificial Sequence: Synthetic oligonucleotide
ugcaucgcagcaauccugc

SEQ ID NO: 291824 - RNA, 19 nt, Artificial Sequence
  Description of Artificial Sequence: Synthetic oligonucleotide
aagcggacuguaaaugugg

SEQ ID NO: 291825 - RNA, 19 nt, Artificial Sequence
  Description of Artificial Sequence: Synthetic oligonucleotide
ucgaugugagcugagauuc

SEQ ID NO: 291826 - RNA, 19 nt, Artificial Sequence
  Description of Artificial Sequence: Synthetic oligonucleotide
acccuuaaaaucacccucc

SEQ ID NO: 291827 - RNA, 19 nt, Artificial Sequence
  Description of Artificial Sequence: Synthetic oligonucleotide
ugucgucuucccagaaucg

SEQ ID NO: 291828 - RNA, 19 nt, Artificial Sequence
  Description of Artificial Sequence: Synthetic oligonucleotide
uguaaaccugccgauaccu

SEQ ID NO: 291829 - RNA, 19 nt, Artificial Sequence
  Description of Artificial Sequence: Synthetic oligonucleotide
auaguccucgauuccaucu

SEQ ID NO: 291830 - RNA, 19 nt, Artificial Sequence
  Description of Artificial Sequence: Synthetic oligonucleotide
gaacuaaccgcugcacucg

SEQ ID NO: 291831 - RNA, 19 nt, Artificial Sequence
  Description of Artificial Sequence: Synthetic oligonucleotide
caucugacgauugacaguc

SEQ ID NO: 291832 - RNA, 19 nt, Artificial Sequence
  Description of Artificial Sequence: Synthetic oligonucleotide
cucgccauaucgaacaauc

SEQ ID NO: 291833 - RNA, 19 nt, Artificial Sequence
  Description of Artificial Sequence: Synthetic oligonucleotide
aguauauagcucguuccuc

SEQ ID NO: 291834 - RNA, 19 nt, Artificial Sequence
  Description of Artificial Sequence: Synthetic oligonucleotide
gauuacuccauggcgccgg

SEQ ID NO: 291835 - RNA, 19 nt, Artificial Sequence
  Description of Artificial Sequence: Synthetic oligonucleotide
caauuuaguguaguccucc

SEQ ID NO: 291836 - RNA, 19 nt, Artificial Sequence
  Description of Artificial Sequence: Synthetic oligonucleotide
aguauagcauaguucugga

SEQ ID NO: 291837 - RNA, 19 nt, Artificial Sequence
  Description of Artificial Sequence: Synthetic oligonucleotide
aggaucgacucagagucgc

SEQ ID NO: 291838 - RNA, 19 nt, Artificial Sequence
  Description of Artificial Sequence: Synthetic oligonucleotide
aaagcggacuguaaaugug

SEQ ID NO: 291839 - RNA, 19 nt, Artificial Sequence
  Description of Artificial Sequence: Synthetic oligonucleotide
ugaguauagcauaguucug

SEQ ID NO: 291840 - RNA, 19 nt, Artificial Sequence
  Description of Artificial Sequence: Synthetic oligonucleotide
aaccguagcccagaaagcu

SEQ ID NO: 291841 - RNA, 19 nt, Artificial Sequence
  Description of Artificial Sequence: Synthetic oligonucleotide
acccugauaauugcggacg

SEQ ID NO: 291842 - RNA, 19 nt, Artificial Sequence
  Description of Artificial Sequence: Synthetic oligonucleotide
ugcaugcgaacuaaccgcu

SEQ ID NO: 291843 - RNA, 19 nt, Artificial Sequence
  Description of Artificial Sequence: Synthetic oligonucleotide
auaauugcggacguaaguu

SEQ ID NO: 291844 - RNA, 19 nt, Artificial Sequence
  Description of Artificial Sequence: Synthetic oligonucleotide
agucaaacagucacuaugu

SEQ ID NO: 291845 - RNA, 19 nt, Artificial Sequence
  Description of Artificial Sequence: Synthetic oligonucleotide
caugcgaacuaaccgcugc

SEQ ID NO: 291846 - RNA, 19 nt, Artificial Sequence
  Description of Artificial Sequence: Synthetic oligonucleotide
aaucugaccgaagucucca

SEQ ID NO: 291847 - RNA, 19 nt, Artificial Sequence
  Description of Artificial Sequence: Synthetic oligonucleotide
ucaauuaguuccugccggu

SEQ ID NO: 291848 - RNA, 19 nt, Artificial Sequence
  Description of Artificial Sequence: Synthetic oligonucleotide
uugcuacugaaaugacagg

SEQ ID NO: 291849 - RNA, 19 nt, Artificial Sequence
  Description of Artificial Sequence: Synthetic oligonucleotide
gugauuacuccauggcgcc

SEQ ID NO: 291850 - RNA, 19 nt, Artificial Sequence
  Description of Artificial Sequence: Synthetic oligonucleotide
auuaguuccugccgguggu

SEQ ID NO: 291851 - RNA, 19 nt, Artificial Sequence
  Description of Artificial Sequence: Synthetic oligonucleotide
gauaauugcggacguaagu

SEQ ID NO: 291852 - RNA, 19 nt, Artificial Sequence
  Description of Artificial Sequence: Synthetic oligonucleotide
uacuccauuguguacucuc

SEQ ID NO: 291853 - RNA, 19 nt, Artificial Sequence
  Description of Artificial Sequence: Synthetic oligonucleotide
uugggaagguauucuaaaa

SEQ ID NO: 291854 - RNA, 19 nt, Artificial Sequence
  Description of Artificial Sequence: Synthetic oligonucleotide
uaccuuucaccucaugcau

SEQ ID NO: 291855 - RNA, 19 nt, Artificial Sequence
  Description of Artificial Sequence: Synthetic oligonucleotide
cacuauguucaaagugagg

SEQ ID NO: 291856 - RNA, 19 nt, Artificial Sequence
  Description of Artificial Sequence: Synthetic oligonucleotide
cucauuuguugaagggccc

SEQ ID NO: 291857 - RNA, 19 nt, Artificial Sequence
  Description of Artificial Sequence: Synthetic oligonucleotide
aacuccaauuuaguguagu

SEQ ID NO: 291858 - RNA, 19 nt, Artificial Sequence
  Description of Artificial Sequence: Synthetic oligonucleotide
ucgaacaaucugaccgaag

SEQ ID NO: 291859 - RNA, 19 nt, Artificial Sequence
  Description of Artificial Sequence: Synthetic oligonucleotide
uaauugcggacguaaguua

SEQ ID NO: 291860 - RNA, 19 nt, Artificial Sequence
  Description of Artificial Sequence: Synthetic oligonucleotide
uaaaccugccgauaccuuu

SEQ ID NO: 291861 - RNA, 19 nt, Artificial Sequence
  Description of Artificial Sequence: Synthetic oligonucleotide
aaacuggccagcaccaccu

SEQ ID NO: 291862 - RNA, 19 nt, Artificial Sequence
  Description of Artificial Sequence: Synthetic oligonucleotide
aaaccugccgauaccuuug

SEQ ID NO: 291863 - RNA, 19 nt, Artificial Sequence
  Description of Artificial Sequence: Synthetic oligonucleotide
gacggucucucuaaaggcc

SEQ ID NO: 291864 - RNA, 19 nt, Artificial Sequence
  Description of Artificial Sequence: Synthetic oligonucleotide
aauugcggacguaaguuaa

SEQ ID NO: 291865 - RNA, 19 nt, Artificial Sequence
  Description of Artificial Sequence: Synthetic oligonucleotide
cacuugcacagucaaugcc

SEQ ID NO: 291866 - RNA, 19 nt, Artificial Sequence
  Description of Artificial Sequence: Synthetic oligonucleotide
cuauugugaaguccacaug

SEQ ID NO: 291867 - RNA, 19 nt, Artificial Sequence
  Description of Artificial Sequence: Synthetic oligonucleotide
ucauugcuacugaaaugac

SEQ ID NO: 291868 - RNA, 19 nt, Artificial Sequence
  Description of Artificial Sequence: Synthetic oligonucleotide
uuaguucacccugauaauu

SEQ ID NO: 291869 - RNA, 19 nt, Artificial Sequence
  Description of Artificial Sequence: Synthetic oligonucleotide
ugcggacguaaguuaacug

SEQ ID NO: 291870 - RNA, 19 nt, Artificial Sequence
  Description of Artificial Sequence: Synthetic oligonucleotide
ucggauugccaucuuuaaa

SEQ ID NO: 291871 - RNA, 19 nt, Artificial Sequence
  Description of Artificial Sequence: Synthetic oligonucleotide
uagaucguucuuguuagaa

SEQ ID NO: 291872 - RNA, 19 nt, Artificial Sequence
  Description of Artificial Sequence: Synthetic oligonucleotide
cucgauuccaucuugcccu

SEQ ID NO: 291873 - RNA, 19 nt, Artificial Sequence
  Description of Artificial Sequence: Synthetic oligonucleotide
cugacgaacaccaucggua

SEQ ID NO: 291874 - RNA, 19 nt, Artificial Sequence
  Description of Artificial Sequence: Synthetic oligonucleotide
aucgaugugagcugagauu

SEQ ID NO: 291875 - RNA, 19 nt, Artificial Sequence
  Description of Artificial Sequence: Synthetic oligonucleotide
gguuaauuccugcuauuac

SEQ ID NO: 291876 - RNA, 19 nt, Artificial Sequence
  Description of Artificial Sequence: Synthetic oligonucleotide
cugacgauugacagucaug

SEQ ID NO: 291877 - RNA, 19 nt, Artificial Sequence
  Description of Artificial Sequence: Synthetic oligonucleotide
agauggauugggaagguau

SEQ ID NO: 291878 - RNA, 19 nt, Artificial Sequence
  Description of Artificial Sequence: Synthetic oligonucleotide
ucugaccgaagucuccauc

SEQ ID NO: 291879 - RNA, 19 nt, Artificial Sequence
  Description of Artificial Sequence: Synthetic oligonucleotide
aucgacucagagucgcucu

SEQ ID NO: 291880 - RNA, 19 nt, Artificial Sequence
  Description of Artificial Sequence: Synthetic oligonucleotide
cacuucuauugugaagucc

SEQ ID NO: 291881 - RNA, 19 nt, Artificial Sequence
  Description of Artificial Sequence: Synthetic oligonucleotide
cugaccgaagucuccauca

SEQ ID NO: 291882 - RNA, 19 nt, Artificial Sequence
  Description of Artificial Sequence: Synthetic oligonucleotide
guauagcauaguucuggac

SEQ ID NO: 291883 - RNA, 19 nt, Artificial Sequence
  Description of Artificial Sequence: Synthetic oligonucleotide
agaacaaaccguagcccag

SEQ ID NO: 291884 - RNA, 19 nt, Artificial Sequence
  Description of Artificial Sequence: Synthetic oligonucleotide
ugauuacuccauggcgccg

SEQ ID NO: 291885 - RNA, 19 nt, Artificial Sequence
  Description of Artificial Sequence: Synthetic oligonucleotide
ucgccauaucgaacaaucu

SEQ ID NO: 291886 - RNA, 19 nt, Artificial Sequence
  Description of Artificial Sequence: Synthetic oligonucleotide
aguccucgauuccaucuug

SEQ ID NO: 291887 - RNA, 19 nt, Artificial Sequence
  Description of Artificial Sequence: Synthetic oligonucleotide
auugcggacguaaguuaac

SEQ ID NO: 291888 - RNA, 19 nt, Artificial Sequence
  Description of Artificial Sequence: Synthetic oligonucleotide
ugguuuaguuuggaucuca

SEQ ID NO: 291889 - RNA, 19 nt, Artificial Sequence
  Description of Artificial Sequence: Synthetic oligonucleotide
aaggaucgacucagagucg

SEQ ID NO: 291890 - RNA, 19 nt, Artificial Sequence
  Description of Artificial Sequence: Synthetic oligonucleotide
aacggccugccucaaguuu

SEQ ID NO: 291891 - RNA, 19 nt, Artificial Sequence
  Description of Artificial Sequence: Synthetic oligonucleotide
guguaaaccugccgauacc

SEQ ID NO: 291892 - RNA, 19 nt, Artificial Sequence
  Description of Artificial Sequence: Synthetic oligonucleotide
agucgcauggcaagccugg

SEQ ID NO: 291893 - RNA, 19 nt, Artificial Sequence
  Description of Artificial Sequence: Synthetic oligonucleotide
ucguguuguagaugguguc

SEQ ID NO: 291894 - RNA, 19 nt, Artificial Sequence
  Description of Artificial Sequence: Synthetic oligonucleotide
agucgcucuucggauugcc

SEQ ID NO: 291895 - RNA, 19 nt, Artificial Sequence
  Description of Artificial Sequence: Synthetic oligonucleotide
augaggucuauaauacccu

SEQ ID NO: 291896 - RNA, 19 nt, Artificial Sequence
  Description of Artificial Sequence: Synthetic oligonucleotide
uugcggacguaaguuaacu

SEQ ID NO: 291897 - RNA, 19 nt, Artificial Sequence
  Description of Artificial Sequence: Synthetic oligonucleotide
cugauaauugcggacguaa

SEQ ID NO: 291898 - RNA, 19 nt, Artificial Sequence
  Description of Artificial Sequence: Synthetic oligonucleotide
cacacgcucuguuaauguc

SEQ ID NO: 291899 - RNA, 19 nt, Artificial Sequence
  Description of Artificial Sequence: Synthetic oligonucleotide
gacuggauagugauuccuc

SEQ ID NO: 291900 - RNA, 19 nt, Artificial Sequence
  Description of Artificial Sequence: Synthetic oligonucleotide
agcacaccuauuacuuuuc

SEQ ID NO: 291901 - RNA, 19 nt, Artificial Sequence
  Description of Artificial Sequence: Synthetic oligonucleotide
acagucgcauggcaagccu

SEQ ID NO: 291902 - RNA, 19 nt, Artificial Sequence
  Description of Artificial Sequence: Synthetic oligonucleotide
ugaccgaagucuccaucaa

SEQ ID NO: 291903 - RNA, 19 nt, Artificial Sequence
  Description of Artificial Sequence: Synthetic oligonucleotide
cugccgauaccuuuggaaa

SEQ ID NO: 291904 - RNA, 19 nt, Artificial Sequence
  Description of Artificial Sequence: Synthetic oligonucleotide
uaguccucgauuccaucuu

SEQ ID NO: 291905 - RNA, 19 nt, Artificial Sequence
  Description of Artificial Sequence: Synthetic oligonucleotide
guggcgacccucaacaguc

SEQ ID NO: 291906 - RNA, 19 nt, Artificial Sequence
  Description of Artificial Sequence: Synthetic oligonucleotide
auauagcucguuccucaau

SEQ ID NO: 291907 - RNA, 19 nt, Artificial Sequence
  Description of Artificial Sequence: Synthetic oligonucleotide
ucgauuccaucuugcccug

SEQ ID NO: 291908 - RNA, 19 nt, Artificial Sequence
  Description of Artificial Sequence: Synthetic oligonucleotide
gaaucgaugugagcugaga

SEQ ID NO: 291909 - RNA, 19 nt, Artificial Sequence
  Description of Artificial Sequence: Synthetic oligonucleotide
cucggaugaaagagauuuc

SEQ ID NO: 291910 - RNA, 19 nt, Artificial Sequence
  Description of Artificial Sequence: Synthetic oligonucleotide
gguauagguagcugcugac

SEQ ID NO: 291911 - RNA, 19 nt, Artificial Sequence
  Description of Artificial Sequence: Synthetic oligonucleotide
ggauugccaucuuuaaauc

SEQ ID NO: 291912 - RNA, 19 nt, Artificial Sequence
  Description of Artificial Sequence: Synthetic oligonucleotide
ugcgaacuaaccgcugcac

SEQ ID NO: 291913 - RNA, 19 nt, Artificial Sequence
  Description of Artificial Sequence: Synthetic oligonucleotide
uccugcuauuacuguuccc

SEQ ID NO: 291914 - RNA, 19 nt, Artificial Sequence
  Description of Artificial Sequence: Synthetic oligonucleotide
cuuuucgcaggcauccaaa

SEQ ID NO: 291915 - RNA, 19 nt, Artificial Sequence
  Description of Artificial Sequence: Synthetic oligonucleotide
gaacaaaccguagcccaga

SEQ ID NO: 291916 - RNA, 19 nt, Artificial Sequence
  Description of Artificial Sequence: Synthetic oligonucleotide
gcccaaucgguccagcuug

SEQ ID NO: 291917 - RNA, 19 nt, Artificial Sequence
  Description of Artificial Sequence: Synthetic oligonucleotide
ggaaucucgccauaucgaa

SEQ ID NO: 291918 - RNA, 19 nt, Artificial Sequence
  Description of Artificial Sequence: Synthetic oligonucleotide
caaagcggacuguaaaugu

SEQ ID NO: 291919 - RNA, 19 nt, Artificial Sequence
  Description of Artificial Sequence: Synthetic oligonucleotide
caauuaguuccugccggug

SEQ ID NO: 291920 - RNA, 19 nt, Artificial Sequence
  Description of Artificial Sequence: Synthetic oligonucleotide
guggaauagccaaacauau

SEQ ID NO: 291921 - RNA, 19 nt, Artificial Sequence
  Description of Artificial Sequence: Synthetic oligonucleotide
cacuuugggcuuuccugug

SEQ ID NO: 291922 - RNA, 19 nt, Artificial Sequence
  Description of Artificial Sequence: Synthetic oligonucleotide
caacagucgcauggcaagc

SEQ ID NO: 291923 - RNA, 19 nt, Artificial Sequence
  Description of Artificial Sequence: Synthetic oligonucleotide
cuuuaccuuucaccucaug

SEQ ID NO: 291924 - RNA, 19 nt, Artificial Sequence
  Description of Artificial Sequence: Synthetic oligonucleotide
cagucgcauggcaagccug

SEQ ID NO: 291925 - RNA, 19 nt, Artificial Sequence
  Description of Artificial Sequence: Synthetic oligonucleotide
ugguugaguauagcauagu

SEQ ID NO: 291926 - RNA, 19 nt, Artificial Sequence
  Description of Artificial Sequence: Synthetic oligonucleotide
gcaugcaugcgaacuaacc

SEQ ID NO: 291927 - RNA, 19 nt, Artificial Sequence
  Description of Artificial Sequence: Synthetic oligonucleotide
ucgcauggcaagccuggau

SEQ ID NO: 291928 - RNA, 19 nt, Artificial Sequence
  Description of Artificial Sequence: Synthetic oligonucleotide
agaaucgaugugagcugag

SEQ ID NO: 291929 - RNA, 19 nt, Artificial Sequence
  Description of Artificial Sequence: Synthetic oligonucleotide
cguguaaaccugccgauac

SEQ ID NO: 291930 - RNA, 19 nt, Artificial Sequence
  Description of Artificial Sequence: Synthetic oligonucleotide
gaccgaagucuccaucaaa

SEQ ID NO: 291931 - RNA, 19 nt, Artificial Sequence
  Description of Artificial Sequence: Synthetic oligonucleotide
cauccugguugaguauagc

SEQ ID NO: 291932 - RNA, 19 nt, Artificial Sequence
  Description of Artificial Sequence: Synthetic oligonucleotide
gccguggcgacccucaaca

SEQ ID NO: 291933 - RNA, 19 nt, Artificial Sequence
  Description of Artificial Sequence: Synthetic oligonucleotide
ugcuggaaucucgccauau

SEQ ID NO: 291934 - RNA, 19 nt, Artificial Sequence
  Description of Artificial Sequence: Synthetic oligonucleotide
guaguauagcacacgcucu

SEQ ID NO: 291935 - RNA, 19 nt, Artificial Sequence
  Description of Artificial Sequence: Synthetic oligonucleotide
cgaacuaaccgcugcacuc

SEQ ID NO: 291936 - RNA, 19 nt, Artificial Sequence
  Description of Artificial Sequence: Synthetic oligonucleotide
agagggaccucugcauaca

SEQ ID NO: 291937 - RNA, 19 nt, Artificial Sequence
  Description of Artificial Sequence: Synthetic oligonucleotide
ccguagcccagaaagcuug

SEQ ID NO: 291938 - RNA, 19 nt, Artificial Sequence
  Description of Artificial Sequence: Synthetic oligonucleotide
cagaaucgaugugagcuga

SEQ ID NO: 291939 - RNA, 19 nt, Artificial Sequence
  Description of Artificial Sequence: Synthetic oligonucleotide
gcggacguaaguuaacugu

SEQ ID NO: 291940 - RNA, 19 nt, Artificial Sequence
  Description of Artificial Sequence: Synthetic oligonucleotide
ucgaaccuucuucccuguc

SEQ ID NO: 291941 - RNA, 19 nt, Artificial Sequence
  Description of Artificial Sequence: Synthetic oligonucleotide
ccaauuuaguguaguccuc

SEQ ID NO: 291942 - RNA, 19 nt, Artificial Sequence
  Description of Artificial Sequence: Synthetic oligonucleotide
uccucguguuguagauggu

SEQ ID NO: 291943 - RNA, 19 nt, Artificial Sequence
  Description of Artificial Sequence: Synthetic oligonucleotide
gcucggaugaaagagauuu

SEQ ID NO: 291944 - RNA, 19 nt, Artificial Sequence
  Description of Artificial Sequence: Synthetic oligonucleotide
aucagaaaccgaggggauu

SEQ ID NO: 291945 - RNA, 19 nt, Artificial Sequence
  Description of Artificial Sequence: Synthetic oligonucleotide
cucucuaguuccauugaau

SEQ ID NO: 291946 - RNA, 19 nt, Artificial Sequence
  Description of Artificial Sequence: Synthetic oligonucleotide
uccauggcgccgguuaauu

SEQ ID NO: 291947 - RNA, 19 nt, Artificial Sequence
  Description of Artificial Sequence: Synthetic oligonucleotide
uagcauaguucuggacuuc

SEQ ID NO: 291948 - RNA, 19 nt, Artificial Sequence
  Description of Artificial Sequence: Synthetic oligonucleotide
cuagaucguucuuguuaga

SEQ ID NO: 291949 - RNA, 19 nt, Artificial Sequence
  Description of Artificial Sequence: Synthetic oligonucleotide
gguugaguauagcauaguu

SEQ ID NO: 291950 - RNA, 19 nt, Artificial Sequence
  Description of Artificial Sequence: Synthetic oligonucleotide
guauagguagcugcugacu

SEQ ID NO: 291951 - RNA, 19 nt, Artificial Sequence
  Description of Artificial Sequence: Synthetic oligonucleotide
gauggauugggaagguauu

SEQ ID NO: 291952 - RNA, 19 nt, Artificial Sequence
  Description of Artificial Sequence: Synthetic oligonucleotide
gacgauugacagucauggu

SEQ ID NO: 291953 - RNA, 19 nt, Artificial Sequence
  Description of Artificial Sequence: Synthetic oligonucleotide
aggcucaauaauacauaau

SEQ ID NO: 291954 - RNA, 19 nt, Artificial Sequence
  Description of Artificial Sequence: Synthetic oligonucleotide
ugucggcaugcaugcgaac

SEQ ID NO: 291955 - RNA, 19 nt, Artificial Sequence
  Description of Artificial Sequence: Synthetic oligonucleotide
gaacaccaucgguaggccu

SEQ ID NO: 291956 - RNA, 19 nt, Artificial Sequence
  Description of Artificial Sequence: Synthetic oligonucleotide
gguagcugcugacuggaua

SEQ ID NO: 291957 - RNA, 19 nt, Artificial Sequence
  Description of Artificial Sequence: Synthetic oligonucleotide
guugaccuguagcuuccaa

SEQ ID NO: 291958 - RNA, 19 nt, Artificial Sequence
  Description of Artificial Sequence: Synthetic oligonucleotide
cggacguaaguuaacuguc

SEQ ID NO: 291959 - RNA, 19 nt, Artificial Sequence
  Description of Artificial Sequence: Synthetic oligonucleotide
ggaacguuguagcgcuuca

SEQ ID NO: 291960 - RNA, 19 nt, Artificial Sequence
  Description of Artificial Sequence: Synthetic oligonucleotide
caggagugaaggaucgacu

SEQ ID NO: 291961 - RNA, 19 nt, Artificial Sequence
  Description of Artificial Sequence: Synthetic oligonucleotide
ggugucacccuucuuuagu

SEQ ID NO: 291962 - RNA, 19 nt, Artificial Sequence
  Description of Artificial Sequence: Synthetic oligonucleotide
cauugugguuuaguuugga

SEQ ID NO: 291963 - RNA, 19 nt, Artificial Sequence
  Description of Artificial Sequence: Synthetic oligonucleotide
gucggcaugcaugcgaacu

SEQ ID NO: 291964 - RNA, 19 nt, Artificial Sequence
  Description of Artificial Sequence: Synthetic oligonucleotide
ccugccgauaccuuuggaa

SEQ ID NO: 291965 - RNA, 19 nt, Artificial Sequence
  Description of Artificial Sequence: Synthetic oligonucleotide
ggcgccgguuaauuccugc

SEQ ID NO: 291966 - RNA, 19 nt, Artificial Sequence
  Description of Artificial Sequence: Synthetic oligonucleotide
acggccugccucaaguuua

SEQ ID NO: 291967 - RNA, 19 nt, Artificial Sequence
  Description of Artificial Sequence: Synthetic oligonucleotide
accugccgauaccuuugga

SEQ ID NO: 291968 - RNA, 19 nt, Artificial Sequence
  Description of Artificial Sequence: Synthetic oligonucleotide
uggcgccgguuaauuccug

SEQ ID NO: 291969 - RNA, 19 nt, Artificial Sequence
  Description of Artificial Sequence: Synthetic oligonucleotide
caucgguaggccuuccaau

SEQ ID NO: 291970 - RNA, 19 nt, Artificial Sequence
  Description of Artificial Sequence: Synthetic oligonucleotide
cgaacaaucugaccgaagu

SEQ ID NO: 291971 - RNA, 19 nt, Artificial Sequence
  Description of Artificial Sequence: Synthetic oligonucleotide
cggauugccaucuuuaaau

SEQ ID NO: 291972 - RNA, 19 nt, Artificial Sequence
  Description of Artificial Sequence: Synthetic oligonucleotide
acgccccagggccguggcg

SEQ ID NO: 291973 - RNA, 19 nt, Artificial Sequence
  Description of Artificial Sequence: Synthetic oligonucleotide
accggaaagagggcccuuu

SEQ ID NO: 291974 - RNA, 19 nt, Artificial Sequence
  Description of Artificial Sequence: Synthetic oligonucleotide
ccagggguaucuauaauau

SEQ ID NO: 291975 - RNA, 19 nt, Artificial Sequence
  Description of Artificial Sequence: Synthetic oligonucleotide
gcaucgcagcaauccugcc

SEQ ID NO: 291976 - RNA, 19 nt, Artificial Sequence
  Description of Artificial Sequence: Synthetic oligonucleotide
caauggguaucugcacaaa

SEQ ID NO: 291977 - RNA, 19 nt, Artificial Sequence
  Description of Artificial Sequence: Synthetic oligonucleotide
gccgguuaauuccugcuau

SEQ ID NO: 291978 - RNA, 19 nt, Artificial Sequence
  Description of Artificial Sequence: Synthetic oligonucleotide
cgguaggccuuccaauuug

SEQ ID NO: 291979 - RNA, 19 nt, Artificial Sequence
  Description of Artificial Sequence: Synthetic oligonucleotide
gcgaacuaaccgcugcacu

SEQ ID NO: 291980 - RNA, 19 nt, Artificial Sequence
  Description of Artificial Sequence: Synthetic oligonucleotide
gcaugcgaacuaaccgcug

SEQ ID NO: 291981 - RNA, 19 nt, Artificial Sequence
  Description of Artificial Sequence: Synthetic oligonucleotide
ccauggcgccgguuaauuc

SEQ ID NO: 291982 - RNA, 19 nt, Artificial Sequence
  Description of Artificial Sequence: Synthetic oligonucleotide
ccaucgguaggccuuccaa

SEQ ID NO: 291983 - RNA, 19 nt, Artificial Sequence
  Description of Artificial Sequence: Synthetic oligonucleotide
gucgcauggcaagccugga

SEQ ID NO: 291984 - RNA, 19 nt, Artificial Sequence
  Description of Artificial Sequence: Synthetic oligonucleotide
cagggguaucuauaauauu

SEQ ID NO: 291985 - RNA, 19 nt, Artificial Sequence
  Description of Artificial Sequence: Synthetic oligonucleotide
uuacuccauggcgccgguu

SEQ ID NO: 291986 - RNA, 19 nt, Artificial Sequence
  Description of Artificial Sequence: Synthetic oligonucleotide
cagauggauugggaaggua

SEQ ID NO: 291987 - RNA, 19 nt, Artificial Sequence
  Description of Artificial Sequence: Synthetic oligonucleotide
ggccguggcgacccucaac

SEQ ID NO: 291988 - RNA, 19 nt, Artificial Sequence
  Description of Artificial Sequence: Synthetic oligonucleotide
gguuuaguuuggaucucau

SEQ ID NO: 291989 - RNA, 19 nt, Artificial Sequence
  Description of Artificial Sequence: Synthetic oligonucleotide
ccugacgaacaccaucggu

SEQ ID NO: 291990 - RNA, 19 nt, Artificial Sequence
  Description of Artificial Sequence: Synthetic oligonucleotide
ccaaaccaauggguaucug

SEQ ID NO: 291991 - RNA, 19 nt, Artificial Sequence
  Description of Artificial Sequence: Synthetic oligonucleotide
ccguggcgacccucaacag

SEQ ID NO: 291992 - RNA, 19 nt, Artificial Sequence
  Description of Artificial Sequence: Synthetic oligonucleotide
gcgccgguuaauuccugcu

SEQ ID NO: 291993 - RNA, 19 nt, Artificial Sequence
  Description of Artificial Sequence: Synthetic oligonucleotide
agggcccuuuccacuucua

SEQ ID NO: 291994 - RNA, 19 nt, Artificial Sequence
  Description of Artificial Sequence: Synthetic oligonucleotide
cccguguaaaccugccgau

SEQ ID NO: 291995 - RNA, 19 nt, Artificial Sequence
  Description of Artificial Sequence: Synthetic oligonucleotide
acggaacguuguagcgcuu

SEQ ID NO: 291996 - RNA, 19 nt, Artificial Sequence
  Description of Artificial Sequence: Synthetic oligonucleotide
ccguguaaaccugccgaua

SEQ ID NO: 291997 - RNA, 19 nt, Artificial Sequence
  Description of Artificial Sequence: Synthetic oligonucleotide
cguggcgacccucaacagu

SEQ ID NO: 291998 - RNA, 19 nt, Artificial Sequence
  Description of Artificial Sequence: Synthetic oligonucleotide
cgccgguuaauuccugcua

SEQ ID NO: 291999 - RNA, 19 nt, Artificial Sequence
  Description of Artificial Sequence: Synthetic oligonucleotide
gaccggaaagagggcccuu

SEQ ID NO: 292000 - RNA, 19 nt, Artificial Sequence
  Description of Artificial Sequence: Synthetic oligonucleotide
cccaaucgguccagcuugu

SEQ ID NO: 292001 - RNA, 19 nt, Artificial Sequence
  Description of Artificial Sequence: Synthetic oligonucleotide
ccgauaccuuuggaaaauu

SEQ ID NO: 292002 - RNA, 19 nt, Artificial Sequence
  Description of Artificial Sequence: Synthetic oligonucleotide
uaauuaguagcuuugaugc

SEQ ID NO: 292003 - RNA, 19 nt, Artificial Sequence
  Description of Artificial Sequence: Synthetic oligonucleotide
aaaccagcaacccuuaugg

SEQ ID NO: 292004 - RNA, 19 nt, Artificial Sequence
  Description of Artificial Sequence: Synthetic oligonucleotide
  modified_base (9)..(9): a, c, u, g, unknown or other
uuuguauunuuuaaaaucu

SEQ ID NO: 292005 - RNA, 19 nt, Artificial Sequence
  Description of Artificial Sequence: Synthetic oligonucleotide
aagugacuagccuagaaac

SEQ ID NO: 292006 - RNA, 19 nt, Artificial Sequence
  Description of Artificial Sequence: Synthetic oligonucleotide
aaauauguacuuuagccca

SEQ ID NO: 292007 - RNA, 19 nt, Artificial Sequence
  Description of Artificial Sequence: Synthetic oligonucleotide
uuuagucuaacccacaaac

SEQ ID NO: 292008 - RNA, 19 nt, Artificial Sequence
  Description of Artificial Sequence: Synthetic oligonucleotide
aagaauaugcagcuguuag

SEQ ID NO: 292009 - RNA, 19 nt, Artificial Sequence
  Description of Artificial Sequence: Synthetic oligonucleotide
acuaguaaaaccagcaacc

SEQ ID NO: 292010 - RNA, 19 nt, Artificial Sequence
  Description of Artificial Sequence: Synthetic oligonucleotide
uaaggauugagaaucggag

SEQ ID NO: 292011 - RNA, 19 nt, Artificial Sequence
  Description of Artificial Sequence: Synthetic oligonucleotide
ugugaaucuagucaaggcc

SEQ ID NO: 292012 - RNA, 19 nt, Artificial Sequence
  Description of Artificial Sequence: Synthetic oligonucleotide
ugcuauuaaacuauauuug

SEQ ID NO: 292013 - RNA, 19 nt, Artificial Sequence
  Description of Artificial Sequence: Synthetic oligonucleotide
ucuacuaguaaaaccagca

SEQ ID NO: 292014 - RNA, 19 nt, Artificial Sequence
  Description of Artificial Sequence: Synthetic oligonucleotide
auugguuguauauuggaag

SEQ ID NO: 292015 - RNA, 19 nt, Artificial Sequence
  Description of Artificial Sequence: Synthetic oligonucleotide
acgugaguauuuuagauuc

SEQ ID NO: 292016 - RNA, 19 nt, Artificial Sequence
  Description of Artificial Sequence: Synthetic oligonucleotide
uaguguauaagguauguca

SEQ ID NO: 292017 - RNA, 19 nt, Artificial Sequence
  Description of Artificial Sequence: Synthetic oligonucleotide
uucagcuaaaggcagaaca

SEQ ID NO: 292018 - RNA, 19 nt, Artificial Sequence
  Description of Artificial Sequence: Synthetic oligonucleotide
uguaauggagauuaacuga

SEQ ID NO: 292019 - RNA, 19 nt, Artificial Sequence
  Description of Artificial Sequence: Synthetic oligonucleotide
ucaugaugaaaccacaccu

SEQ ID NO: 292020 - RNA, 19 nt, Artificial Sequence
  Description of Artificial Sequence: Synthetic oligonucleotide
auuaguagcuuugaugccc

SEQ ID NO: 292021 - RNA, 19 nt, Artificial Sequence
  Description of Artificial Sequence: Synthetic oligonucleotide
agaaguggcacucaaacca

SEQ ID NO: 292022 - RNA, 19 nt, Artificial Sequence
  Description of Artificial Sequence: Synthetic oligonucleotide
cuaauuaguagcuuugaug

SEQ ID NO: 292023 - RNA, 19 nt, Artificial Sequence
  Description of Artificial Sequence: Synthetic oligonucleotide
aacagaacaaagaggggcc

SEQ ID NO: 292024 - RNA, 19 nt, Artificial Sequence
  Description of Artificial Sequence: Synthetic oligonucleotide
ugaauaaccgcuacgauuu

SEQ ID NO: 292025 - RNA, 19 nt, Artificial Sequence
  Description of Artificial Sequence: Synthetic oligonucleotide
uaagguaugucaacaaucu

SEQ ID NO: 292026 - RNA, 19 nt, Artificial Sequence
  Description of Artificial Sequence: Synthetic oligonucleotide
uuagucuaacccacaaacg

SEQ ID NO: 292027 - RNA, 19 nt, Artificial Sequence
  Description of Artificial Sequence: Synthetic oligonucleotide
ucuuaagugacuagccuag

SEQ ID NO: 292028 - RNA, 19 nt, Artificial Sequence
  Description of Artificial Sequence: Synthetic oligonucleotide
uugacgguaauaaacacaa

SEQ ID NO: 292029 - RNA, 19 nt, Artificial Sequence
  Description of Artificial Sequence: Synthetic oligonucleotide
ugacaagcuaauuaguagc

SEQ ID NO: 292030 - RNA, 19 nt, Artificial Sequence
  Description of Artificial Sequence: Synthetic oligonucleotide
ugaauguuugcacucaccu

SEQ ID NO: 292031 - RNA, 19 nt, Artificial Sequence
  Description of Artificial Sequence: Synthetic oligonucleotide
ucggagauuugaauaaccg

SEQ ID NO: 292032 - RNA, 19 nt, Artificial Sequence
  Description of Artificial Sequence: Synthetic oligonucleotide
ugcaagacuaccaagucac

SEQ ID NO: 292033 - RNA, 19 nt, Artificial Sequence
  Description of Artificial Sequence: Synthetic oligonucleotide
  modified_base (7)..(7): a, c, u, g, unknown or other
uguauunuuuaaaaucuuu

SEQ ID NO: 292034 - RNA, 19 nt, Artificial Sequence
  Description of Artificial Sequence: Synthetic oligonucleotide
uacgauuuggucaugccug

SEQ ID NO: 292035 - RNA, 19 nt, Artificial Sequence
  Description of Artificial Sequence: Synthetic oligonucleotide
uacuaguaaaaccagcaac

SEQ ID NO: 292036 - RNA, 19 nt, Artificial Sequence
  Description of Artificial Sequence: Synthetic oligonucleotide
ucauccacuaaucuucuug

SEQ ID NO: 292037 - RNA, 19 nt, Artificial Sequence
  Description of Artificial Sequence: Synthetic oligonucleotide
acaucaggccaauugcucc

SEQ ID NO: 292038 - RNA, 19 nt, Artificial Sequence
  Description of Artificial Sequence: Synthetic oligonucleotide
uuugacgguaauaaacaca

SEQ ID NO: 292039 - RNA, 19 nt, Artificial Sequence
  Description of Artificial Sequence: Synthetic oligonucleotide
aaaucucugacccuggauu

SEQ ID NO: 292040 - RNA, 19 nt, Artificial Sequence
  Description of Artificial Sequence: Synthetic oligonucleotide
caauucagcaucacggucc

SEQ ID NO: 292041 - RNA, 19 nt, Artificial Sequence
  Description of Artificial Sequence: Synthetic oligonucleotide
uuuagcccauaauacagcc

SEQ ID NO: 292042 - RNA, 19 nt, Artificial Sequence
  Description of Artificial Sequence: Synthetic oligonucleotide
auauuggaagcgcgcaucc

SEQ ID NO: 292043 - RNA, 19 nt, Artificial Sequence
  Description of Artificial Sequence: Synthetic oligonucleotide
aguauaguugcgaagauga

SEQ ID NO: 292044 - RNA, 19 nt, Artificial Sequence
  Description of Artificial Sequence: Synthetic oligonucleotide
uuaguagcuuugaugcccg

SEQ ID NO: 292045 - RNA, 19 nt, Artificial Sequence
  Description of Artificial Sequence: Synthetic oligonucleotide
uuuaauccucagcaagucc

SEQ ID NO: 292046 - RNA, 19 nt, Artificial Sequence
  Description of Artificial Sequence: Synthetic oligonucleotide
aagcggagacaacaaugcc

SEQ ID NO: 292047 - RNA, 19 nt, Artificial Sequence
  Description of Artificial Sequence: Synthetic oligonucleotide
aauuaaggauugagaaucg

SEQ ID NO: 292048 - RNA, 19 nt, Artificial Sequence
  Description of Artificial Sequence: Synthetic oligonucleotide
aaccgcuacgauuugguca

SEQ ID NO: 292049 - RNA, 19 nt, Artificial Sequence
  Description of Artificial Sequence: Synthetic oligonucleotide
aauaguguauaagguaugu

SEQ ID NO: 292050 - RNA, 19 nt, Artificial Sequence
  Description of Artificial Sequence: Synthetic oligonucleotide
auaguugcgaagaugacug

SEQ ID NO: 292051 - RNA, 19 nt, Artificial Sequence
  Description of Artificial Sequence: Synthetic oligonucleotide
aacaucacucaguaagcca

SEQ ID NO: 292052 - RNA, 19 nt, Artificial Sequence
  Description of Artificial Sequence: Synthetic oligonucleotide
aaagcacucuuuuguagca

SEQ ID NO: 292053 - RNA, 19 nt, Artificial Sequence
  Description of Artificial Sequence: Synthetic oligonucleotide
cauguuuagucuaacccac

SEQ ID NO: 292054 - RNA, 19 nt, Artificial Sequence
  Description of Artificial Sequence: Synthetic oligonucleotide
guaauccaaacauugguca

SEQ ID NO: 292055 - RNA, 19 nt, Artificial Sequence
  Description of Artificial Sequence: Synthetic oligonucleotide
uuuuggucggguuugaguu

SEQ ID NO: 292056 - RNA, 19 nt, Artificial Sequence
  Description of Artificial Sequence: Synthetic oligonucleotide
acuaaucuucuugcuaugc

SEQ ID NO: 292057 - RNA, 19 nt, Artificial Sequence
  Description of Artificial Sequence: Synthetic oligonucleotide
ucuauagccaagugcgcag

SEQ ID NO: 292058 - RNA, 19 nt, Artificial Sequence
  Description of Artificial Sequence: Synthetic oligonucleotide
aaucggagauuugaauaac

SEQ ID NO: 292059 - RNA, 19 nt, Artificial Sequence
  Description of Artificial Sequence: Synthetic oligonucleotide
uauaguugcgaagaugacu

SEQ ID NO: 292060 - RNA, 19 nt, Artificial Sequence
  Description of Artificial Sequence: Synthetic oligonucleotide
uugaauaaccgcuacgauu

SEQ ID NO: 292061 - RNA, 19 nt, Artificial Sequence
  Description of Artificial Sequence: Synthetic oligonucleotide
agucuaacccacaaacggc

SEQ ID NO: 292062 - RNA, 19 nt, Artificial Sequence
  Description of Artificial Sequence: Synthetic oligonucleotide
agacaguugucaugguuac

SEQ ID NO: 292063 - RNA, 19 nt, Artificial Sequence
  Description of Artificial Sequence: Synthetic oligonucleotide
caguauugguuguauauug

SEQ ID NO: 292064 - RNA, 19 nt, Artificial Sequence
  Description of Artificial Sequence: Synthetic oligonucleotide
agccauguuuagucuaacc

SEQ ID NO: 292065 - RNA, 19 nt, Artificial Sequence
  Description of Artificial Sequence: Synthetic oligonucleotide
ugaucgaaggcagaguucu

SEQ ID NO: 292066 - RNA, 19 nt, Artificial Sequence
  Description of Artificial Sequence: Synthetic oligonucleotide
uuugcacucaccugggagu

SEQ ID NO: 292067 - RNA, 19 nt, Artificial Sequence
  Description of Artificial Sequence: Synthetic oligonucleotide
caaacauuggucaggucac

SEQ ID NO: 292068 - RNA, 19 nt, Artificial Sequence
  Description of Artificial Sequence: Synthetic oligonucleotide
agugacuagccuagaaacc

SEQ ID NO: 292069 - RNA, 19 nt, Artificial Sequence
  Description of Artificial Sequence: Synthetic oligonucleotide
agcacugcacacgugaagg

SEQ ID NO: 292070 - RNA, 19 nt, Artificial Sequence
  Description of Artificial Sequence: Synthetic oligonucleotide
uguuuagucuaacccacaa

SEQ ID NO: 292071 - RNA, 19 nt, Artificial Sequence
  Description of Artificial Sequence: Synthetic oligonucleotide
agacacaaaaugcugccca

SEQ ID NO: 292072 - RNA, 19 nt, Artificial Sequence
  Description of Artificial Sequence: Synthetic oligonucleotide
cuuuagcccauaauacagc

SEQ ID NO: 292073 - RNA, 19 nt, Artificial Sequence
  Description of Artificial Sequence: Synthetic oligonucleotide
uuaacauugcauacugauu

SEQ ID NO: 292074 - RNA, 19 nt, Artificial Sequence
  Description of Artificial Sequence: Synthetic oligonucleotide
gaaucggagauuugaauaa

SEQ ID NO: 292075 - RNA, 19 nt, Artificial Sequence
  Description of Artificial Sequence: Synthetic oligonucleotide
uuggucaggucacacaaaa

SEQ ID NO: 292076 - RNA, 19 nt, Artificial Sequence
  Description of Artificial Sequence: Synthetic oligonucleotide
uguauggcauagcaauugu

SEQ ID NO: 292077 - RNA, 19 nt, Artificial Sequence
  Description of Artificial Sequence: Synthetic oligonucleotide
aggacgagugcacaugcuc

SEQ ID NO: 292078 - RNA, 19 nt, Artificial Sequence
  Description of Artificial Sequence: Synthetic oligonucleotide
ugaggacgagugcacaugc

SEQ ID NO: 292079 - RNA, 19 nt, Artificial Sequence
  Description of Artificial Sequence: Synthetic oligonucleotide
ucaagagguuuugaaauac

SEQ ID NO: 292080 - RNA, 19 nt, Artificial Sequence
  Description of Artificial Sequence: Synthetic oligonucleotide
auaaucagcucuugaauua

SEQ ID NO: 292081 - RNA, 19 nt, Artificial Sequence
  Description of Artificial Sequence: Synthetic oligonucleotide
aaucaguacccagaaagaa

SEQ ID NO: 292082 - RNA, 19 nt, Artificial Sequence
  Description of Artificial Sequence: Synthetic oligonucleotide
aaauaguguauaagguaug

SEQ ID NO: 292083 - RNA, 19 nt, Artificial Sequence
  Description of Artificial Sequence: Synthetic oligonucleotide
ucaucguugcucccaaaga

SEQ ID NO: 292084 - RNA, 19 nt, Artificial Sequence
  Description of Artificial Sequence: Synthetic oligonucleotide
aucggagauuugaauaacc

SEQ ID NO: 292085 - RNA, 19 nt, Artificial Sequence
  Description of Artificial Sequence: Synthetic oligonucleotide
cuuuacaauagcagaucug

SEQ ID NO: 292086 - RNA, 19 nt, Artificial Sequence
  Description of Artificial Sequence: Synthetic oligonucleotide
cucguuacacaauucagca

SEQ ID NO: 292087 - RNA, 19 nt, Artificial Sequence
  Description of Artificial Sequence: Synthetic oligonucleotide
ugagaaucggagauuugaa

SEQ ID NO: 292088 - RNA, 19 nt, Artificial Sequence
  Description of Artificial Sequence: Synthetic oligonucleotide
uuaccugcaagacuaccaa

SEQ ID NO: 292089 - RNA, 19 nt, Artificial Sequence
  Description of Artificial Sequence: Synthetic oligonucleotide
caugaugaaaccacaccuc

SEQ ID NO: 292090 - RNA, 19 nt, Artificial Sequence
  Description of Artificial Sequence: Synthetic oligonucleotide
uuugaauaaccgcuacgau

SEQ ID NO: 292091 - RNA, 19 nt, Artificial Sequence
  Description of Artificial Sequence: Synthetic oligonucleotide
caucguugcucccaaagac

SEQ ID NO: 292092 - RNA, 19 nt, Artificial Sequence
  Description of Artificial Sequence: Synthetic oligonucleotide
uacagcugcauuuggcuac

SEQ ID NO: 292093 - RNA, 19 nt, Artificial Sequence
  Description of Artificial Sequence: Synthetic oligonucleotide
aagugcgcagcacugcaca

SEQ ID NO: 292094 - RNA, 19 nt, Artificial Sequence
  Description of Artificial Sequence: Synthetic oligonucleotide
  modified_base (8)..(8): a, c, u, g, unknown or other
uuguauunuuuaaaaucuu

SEQ ID NO: 292095 - RNA, 19 nt, Artificial Sequence
  Description of Artificial Sequence: Synthetic oligonucleotide
aaaacacgugaguauuuua

SEQ ID NO: 292096 - RNA, 19 nt, Artificial Sequence
  Description of Artificial Sequence: Synthetic oligonucleotide
uguuagaaaaggugucuau

SEQ ID NO: 292097 - RNA, 19 nt, Artificial Sequence
  Description of Artificial Sequence: Synthetic oligonucleotide
cuugcuuugacgguaauaa

SEQ ID NO: 292098 - RNA, 19 nt, Artificial Sequence
  Description of Artificial Sequence: Synthetic oligonucleotide
auaguguauaagguauguc

SEQ ID NO: 292099 - RNA, 19 nt, Artificial Sequence
  Description of Artificial Sequence: Synthetic oligonucleotide
uccccguggaaacagggga

SEQ ID NO: 292100 - RNA, 19 nt, Artificial Sequence
  Description of Artificial Sequence: Synthetic oligonucleotide
ugggugaaaggauaauaaa

SEQ ID NO: 292101 - RNA, 19 nt, Artificial Sequence
  Description of Artificial Sequence: Synthetic oligonucleotide
cacucaaucagaugugcuc

SEQ ID NO: 292102 - RNA, 19 nt, Artificial Sequence
  Description of Artificial Sequence: Synthetic oligonucleotide
uugucaugguuacucauuu

SEQ ID NO: 292103 - RNA, 19 nt, Artificial Sequence
  Description of Artificial Sequence: Synthetic oligonucleotide
auguauggcauagcaauug

SEQ ID NO: 292104 - RNA, 19 nt, Artificial Sequence
  Description of Artificial Sequence: Synthetic oligonucleotide
cacgucaccccuccgaacc

SEQ ID NO: 292105 - RNA, 19 nt, Artificial Sequence
  Description of Artificial Sequence: Synthetic oligonucleotide
gagaccgcuccuaucaaag

SEQ ID NO: 292106 - RNA, 19 nt, Artificial Sequence
  Description of Artificial Sequence: Synthetic oligonucleotide
gagcucguuacacaauuca

SEQ ID NO: 292107 - RNA, 19 nt, Artificial Sequence
  Description of Artificial Sequence: Synthetic oligonucleotide
ugucuauagccaagugcgc

SEQ ID NO: 292108 - RNA, 19 nt, Artificial Sequence
  Description of Artificial Sequence: Synthetic oligonucleotide
acuaacaacaaaagacagu

SEQ ID NO: 292109 - RNA, 19 nt, Artificial Sequence
  Description of Artificial Sequence: Synthetic oligonucleotide
aagucacuugugaaucuag

SEQ ID NO: 292110 - RNA, 19 nt, Artificial Sequence
  Description of Artificial Sequence: Synthetic oligonucleotide
aguucgguagcuccucuca

SEQ ID NO: 292111 - RNA, 19 nt, Artificial Sequence
  Description of Artificial Sequence: Synthetic oligonucleotide
accgcuacgauuuggucau

SEQ ID NO: 292112 - RNA, 19 nt, Artificial Sequence
  Description of Artificial Sequence: Synthetic oligonucleotide
aguguauaagguaugucaa

SEQ ID NO: 292113 - RNA, 19 nt, Artificial Sequence
  Description of Artificial Sequence: Synthetic oligonucleotide
agcuguuagaaaagguguc

SEQ ID NO: 292114 - RNA, 19 nt, Artificial Sequence
  Description of Artificial Sequence: Synthetic oligonucleotide
guguauaagguaugucaac

SEQ ID NO: 292115 - RNA, 19 nt, Artificial Sequence
  Description of Artificial Sequence: Synthetic oligonucleotide
aaugccuguugugaggaau

SEQ ID NO: 292116 - RNA, 19 nt, Artificial Sequence
  Description of Artificial Sequence: Synthetic oligonucleotide
acuuguaccuuaaaguuua

SEQ ID NO: 292117 - RNA, 19 nt, Artificial Sequence
  Description of Artificial Sequence: Synthetic oligonucleotide
uauguacuuuagcccauaa

SEQ ID NO: 292118 - RNA, 19 nt, Artificial Sequence
  Description of Artificial Sequence: Synthetic oligonucleotide
aucuagucaaggccuugag

SEQ ID NO: 292119 - RNA, 19 nt, Artificial Sequence
  Description of Artificial Sequence: Synthetic oligonucleotide
aagaggggccaguauuggu

SEQ ID NO: 292120 - RNA, 19 nt, Artificial Sequence
  Description of Artificial Sequence: Synthetic oligonucleotide
ugcagcuaucuuugcacug

SEQ ID NO: 292121 - RNA, 19 nt, Artificial Sequence
  Description of Artificial Sequence: Synthetic oligonucleotide
ucuaacccacaaacggcac

SEQ ID NO: 292122 - RNA, 19 nt, Artificial Sequence
  Description of Artificial Sequence: Synthetic oligonucleotide
gauuaccugcaagacuacc

SEQ ID NO: 292123 - RNA, 19 nt, Artificial Sequence
  Description of Artificial Sequence: Synthetic oligonucleotide
gugacuagccuagaaacca

SEQ ID NO: 292124 - RNA, 19 nt, Artificial Sequence
  Description of Artificial Sequence: Synthetic oligonucleotide
caacaucacucaguaagcc

SEQ ID NO: 292125 - RNA, 19 nt, Artificial Sequence
  Description of Artificial Sequence: Synthetic oligonucleotide
gaccgcuccuaucaaaguc

SEQ ID NO: 292126 - RNA, 19 nt, Artificial Sequence
  Description of Artificial Sequence: Synthetic oligonucleotide
agugcgcagcacugcacac

SEQ ID NO: 292127 - RNA, 19 nt, Artificial Sequence
  Description of Artificial Sequence: Synthetic oligonucleotide
guauaagguaugucaacaa

SEQ ID NO: 292128 - RNA, 19 nt, Artificial Sequence
  Description of Artificial Sequence: Synthetic oligonucleotide
cucuaaccccaggagaccg

SEQ ID NO: 292129 - RNA, 19 nt, Artificial Sequence
  Description of Artificial Sequence: Synthetic oligonucleotide
aagcgcgcauccaagcauc

SEQ ID NO: 292130 - RNA, 19 nt, Artificial Sequence
  Description of Artificial Sequence: Synthetic oligonucleotide
gguuguauauuggaagcgc

SEQ ID NO: 292131 - RNA, 19 nt, Artificial Sequence
  Description of Artificial Sequence: Synthetic oligonucleotide
ugaaucuagucaaggccuu

SEQ ID NO: 292132 - RNA, 19 nt, Artificial Sequence
  Description of Artificial Sequence: Synthetic oligonucleotide
aguugcgaagaugacugug

SEQ ID NO: 292133 - RNA, 19 nt, Artificial Sequence
  Description of Artificial Sequence: Synthetic oligonucleotide
agcggagacaacaaugccu

SEQ ID NO: 292134 - RNA, 19 nt, Artificial Sequence
  Description of Artificial Sequence: Synthetic oligonucleotide
auagccaagugcgcagcac

SEQ ID NO: 292135 - RNA, 19 nt, Artificial Sequence
  Description of Artificial Sequence: Synthetic oligonucleotide
gaugggugaaaggauaaua

SEQ ID NO: 292136 - RNA, 19 nt, Artificial Sequence
  Description of Artificial Sequence: Synthetic oligonucleotide
uuggucggguuugaguuug

SEQ ID NO: 292137 - RNA, 19 nt, Artificial Sequence
  Description of Artificial Sequence: Synthetic oligonucleotide
ggcuacucugaauuaauuc

SEQ ID NO: 292138 - RNA, 19 nt, Artificial Sequence
  Description of Artificial Sequence: Synthetic oligonucleotide
agaaaucucugacccugga

SEQ ID NO: 292139 - RNA, 19 nt, Artificial Sequence
  Description of Artificial Sequence: Synthetic oligonucleotide
ugugaggacgagugcacau

SEQ ID NO: 292140 - RNA, 19 nt, Artificial Sequence
  Description of Artificial Sequence: Synthetic oligonucleotide
gaagaagcccaguauaguu

SEQ ID NO: 292141 - RNA, 19 nt, Artificial Sequence
  Description of Artificial Sequence: Synthetic oligonucleotide
aggagcucguuacacaauu

SEQ ID NO: 292142 - RNA, 19 nt, Artificial Sequence
  Description of Artificial Sequence: Synthetic oligonucleotide
acacgcucuaaccccagga

SEQ ID NO: 292143 - RNA, 19 nt, Artificial Sequence
  Description of Artificial Sequence: Synthetic oligonucleotide
gguaauccaaacauugguc

SEQ ID NO: 292144 - RNA, 19 nt, Artificial Sequence
  Description of Artificial Sequence: Synthetic oligonucleotide
guuucacacggcuucccac

SEQ ID NO: 292145 - RNA, 19 nt, Artificial Sequence
  Description of Artificial Sequence: Synthetic oligonucleotide
auaaccgcuacgauuuggu

SEQ ID NO: 292146 - RNA, 19 nt, Artificial Sequence
  Description of Artificial Sequence: Synthetic oligonucleotide
aacccacaaacggcacagc

SEQ ID NO: 292147 - RNA, 19 nt, Artificial Sequence
  Description of Artificial Sequence: Synthetic oligonucleotide
cacgcucuaaccccaggag

SEQ ID NO: 292148 - RNA, 19 nt, Artificial Sequence
  Description of Artificial Sequence: Synthetic oligonucleotide
cuaucuuugcacugaguaa

SEQ ID NO: 292149 - RNA, 19 nt, Artificial Sequence
  Description of Artificial Sequence: Synthetic oligonucleotide
ggacugucaagucaguguc

SEQ ID NO: 292150 - RNA, 19 nt, Artificial Sequence
  Description of Artificial Sequence: Synthetic oligonucleotide
gcuuuaggcaucuuuagua

SEQ ID NO: 292151 - RNA, 19 nt, Artificial Sequence
  Description of Artificial Sequence: Synthetic oligonucleotide
cucaauuaggaggcacuag

SEQ ID NO: 292152 - RNA, 19 nt, Artificial Sequence
  Description of Artificial Sequence: Synthetic oligonucleotide
cagcaacccuuauggaggg

SEQ ID NO: 292153 - RNA, 19 nt, Artificial Sequence
  Description of Artificial Sequence: Synthetic oligonucleotide
agggaauuucagcuucgcu

SEQ ID NO: 292154 - RNA, 19 nt, Artificial Sequence
  Description of Artificial Sequence: Synthetic oligonucleotide
acgcucuaaccccaggaga

SEQ ID NO: 292155 - RNA, 19 nt, Artificial Sequence
  Description of Artificial Sequence: Synthetic oligonucleotide
gaauaaccgcuacgauuug

SEQ ID NO: 292156 - RNA, 19 nt, Artificial Sequence
  Description of Artificial Sequence: Synthetic oligonucleotide
gucuaacccacaaacggca

SEQ ID NO: 292157 - RNA, 19 nt, Artificial Sequence
  Description of Artificial Sequence: Synthetic oligonucleotide
agcuaauuaguagcuuuga

SEQ ID NO: 292158 - RNA, 19 nt, Artificial Sequence
  Description of Artificial Sequence: Synthetic oligonucleotide
gcccauaaaaucaguaccc

SEQ ID NO: 292159 - RNA, 19 nt, Artificial Sequence
  Description of Artificial Sequence: Synthetic oligonucleotide
gcuuugacgguaauaaaca

SEQ ID NO: 292160 - RNA, 19 nt, Artificial Sequence
  Description of Artificial Sequence: Synthetic oligonucleotide
cagcaacucacuugcuuug

SEQ ID NO: 292161 - RNA, 19 nt, Artificial Sequence
  Description of Artificial Sequence: Synthetic oligonucleotide
cacuaaucuucuugcuaug

SEQ ID NO: 292162 - RNA, 19 nt, Artificial Sequence
  Description of Artificial Sequence: Synthetic oligonucleotide
guuuagucuaacccacaaa

SEQ ID NO: 292163 - RNA, 19 nt, Artificial Sequence
  Description of Artificial Sequence: Synthetic oligonucleotide
ccaugugacaacaguucgg

SEQ ID NO: 292164 - RNA, 19 nt, Artificial Sequence
  Description of Artificial Sequence: Synthetic oligonucleotide
acucacuugcuuugacggu

SEQ ID NO: 292165 - RNA, 19 nt, Artificial Sequence
  Description of Artificial Sequence: Synthetic oligonucleotide
gugaaucuagucaaggccu

SEQ ID NO: 292166 - RNA, 19 nt, Artificial Sequence
  Description of Artificial Sequence: Synthetic oligonucleotide
cuauagccaagugcgcagc

SEQ ID NO: 292167 - RNA, 19 nt, Artificial Sequence
  Description of Artificial Sequence: Synthetic oligonucleotide
guaauggagauuaacugau

SEQ ID NO: 292168 - RNA, 19 nt, Artificial Sequence
  Description of Artificial Sequence: Synthetic oligonucleotide
ccauguuuagucuaaccca

SEQ ID NO: 292169 - RNA, 19 nt, Artificial Sequence
  Description of Artificial Sequence: Synthetic oligonucleotide
uugcgaagaugacuguguu

SEQ ID NO: 292170 - RNA, 19 nt, Artificial Sequence
  Description of Artificial Sequence: Synthetic oligonucleotide
cuacuaguaaaaccagcaa

SEQ ID NO: 292171 - RNA, 19 nt, Artificial Sequence
  Description of Artificial Sequence: Synthetic oligonucleotide
caucacucaguaagccaug

SEQ ID NO: 292172 - RNA, 19 nt, Artificial Sequence
  Description of Artificial Sequence: Synthetic oligonucleotide
gucuauagccaagugcgca

SEQ ID NO: 292173 - RNA, 19 nt, Artificial Sequence
  Description of Artificial Sequence: Synthetic oligonucleotide
uaaccgcuacgauuugguc

SEQ ID NO: 292174 - RNA, 19 nt, Artificial Sequence
  Description of Artificial Sequence: Synthetic oligonucleotide
uauuggaagcgcgcaucca

SEQ ID NO: 292175 - RNA, 19 nt, Artificial Sequence
  Description of Artificial Sequence: Synthetic oligonucleotide
uuacacaauucagcaucac

SEQ ID NO: 292176 - RNA, 19 nt, Artificial Sequence
  Description of Artificial Sequence: Synthetic oligonucleotide
caagcuaauuaguagcuuu

SEQ ID NO: 292177 - RNA, 19 nt, Artificial Sequence
  Description of Artificial Sequence: Synthetic oligonucleotide
uuucagcuaaaggcagaac

SEQ ID NO: 292178 - RNA, 19 nt, Artificial Sequence
  Description of Artificial Sequence: Synthetic oligonucleotide
cggagauuugaauaaccgc

SEQ ID NO: 292179 - RNA, 19 nt, Artificial Sequence
  Description of Artificial Sequence: Synthetic oligonucleotide
agaccgcuccuaucaaagu

SEQ ID NO: 292180 - RNA, 19 nt, Artificial Sequence
  Description of Artificial Sequence: Synthetic oligonucleotide
cuaacccacaaacggcaca

SEQ ID NO: 292181 - RNA, 19 nt, Artificial Sequence
  Description of Artificial Sequence: Synthetic oligonucleotide
cagcuaucuuugcacugag

SEQ ID NO: 292182 - RNA, 19 nt, Artificial Sequence
  Description of Artificial Sequence: Synthetic oligonucleotide
ggacgagugcacaugcucc

SEQ ID NO: 292183 - RNA, 19 nt, Artificial Sequence
  Description of Artificial Sequence: Synthetic oligonucleotide
gcuacgauuuggucaugcc

SEQ ID NO: 292184 - RNA, 19 nt, Artificial Sequence
  Description of Artificial Sequence: Synthetic oligonucleotide
aucacucaguaagccaugu

SEQ ID NO: 292185 - RNA, 19 nt, Artificial Sequence
  Description of Artificial Sequence: Synthetic oligonucleotide
cugagguauaaaugcagcu

SEQ ID NO: 292186 - RNA, 19 nt, Artificial Sequence
  Description of Artificial Sequence: Synthetic oligonucleotide
guauaguugcgaagaugac

SEQ ID NO: 292187 - RNA, 19 nt, Artificial Sequence
  Description of Artificial Sequence: Synthetic oligonucleotide
uaguugcgaagaugacugu

SEQ ID NO: 292188 - RNA, 19 nt, Artificial Sequence
  Description of Artificial Sequence: Synthetic oligonucleotide
ugcacacgugaaggaacag

SEQ ID NO: 292189 - RNA, 19 nt, Artificial Sequence
  Description of Artificial Sequence: Synthetic oligonucleotide
ucacucaguaagccauguu

SEQ ID NO: 292190 - RNA, 19 nt, Artificial Sequence
  Description of Artificial Sequence: Synthetic oligonucleotide
ccaaagguaauccaaacau

SEQ ID NO: 292191 - RNA, 19 nt, Artificial Sequence
  Description of Artificial Sequence: Synthetic oligonucleotide
cacaauucagcaucacggu

SEQ ID NO: 292192 - RNA, 19 nt, Artificial Sequence
  Description of Artificial Sequence: Synthetic oligonucleotide
ccuccaaaugacaagcuaa

SEQ ID NO: 292193 - RNA, 19 nt, Artificial Sequence
  Description of Artificial Sequence: Synthetic oligonucleotide
acaagcuaauuaguagcuu

SEQ ID NO: 292194 - RNA, 19 nt, Artificial Sequence
  Description of Artificial Sequence: Synthetic oligonucleotide
guggcacucaaaccaggga

SEQ ID NO: 292195 - RNA, 19 nt, Artificial Sequence
  Description of Artificial Sequence: Synthetic oligonucleotide
aucaggccaauugcuccuc

SEQ ID NO: 292196 - RNA, 19 nt, Artificial Sequence
  Description of Artificial Sequence: Synthetic oligonucleotide
auauggcgagcuccuugca

SEQ ID NO: 292197 - RNA, 19 nt, Artificial Sequence
  Description of Artificial Sequence: Synthetic oligonucleotide
cagcggaauggcaaugcca

SEQ ID NO: 292198 - RNA, 19 nt, Artificial Sequence
  Description of Artificial Sequence: Synthetic oligonucleotide
gaaaacacgugaguauuuu

SEQ ID NO: 292199 - RNA, 19 nt, Artificial Sequence
  Description of Artificial Sequence: Synthetic oligonucleotide
guccccguggaaacagggg

SEQ ID NO: 292200 - RNA, 19 nt, Artificial Sequence
  Description of Artificial Sequence: Synthetic oligonucleotide
ggguuugaguuugaagcug

SEQ ID NO: 292201 - RNA, 19 nt, Artificial Sequence
  Description of Artificial Sequence: Synthetic oligonucleotide
ugacgucgcuccugccucc

SEQ ID NO: 292202 - RNA, 19 nt, Artificial Sequence
  Description of Artificial Sequence: Synthetic oligonucleotide
agcaacucacuugcuuuga

SEQ ID NO: 292203 - RNA, 19 nt, Artificial Sequence
  Description of Artificial Sequence: Synthetic oligonucleotide
ucccaugcauguccacguc

SEQ ID NO: 292204 - RNA, 19 nt, Artificial Sequence
  Description of Artificial Sequence: Synthetic oligonucleotide
gaagcgcgcauccaagcau

SEQ ID NO: 292205 - RNA, 19 nt, Artificial Sequence
  Description of Artificial Sequence: Synthetic oligonucleotide
gcuaaaggcagaacacuuc

SEQ ID NO: 292206 - RNA, 19 nt, Artificial Sequence
  Description of Artificial Sequence: Synthetic oligonucleotide
auguuuagucuaacccaca

SEQ ID NO: 292207 - RNA, 19 nt, Artificial Sequence
  Description of Artificial Sequence: Synthetic oligonucleotide
cuccaaaugacaagcuaau

SEQ ID NO: 292208 - RNA, 19 nt, Artificial Sequence
  Description of Artificial Sequence: Synthetic oligonucleotide
guauauuggaagcgcgcau

SEQ ID NO: 292209 - RNA, 19 nt, Artificial Sequence
  Description of Artificial Sequence: Synthetic oligonucleotide
ccugcaagacuaccaaguc

SEQ ID NO: 292210 - RNA, 19 nt, Artificial Sequence
  Description of Artificial Sequence: Synthetic oligonucleotide
caguucgguagcuccucuc

SEQ ID NO: 292211 - RNA, 19 nt, Artificial Sequence
  Description of Artificial Sequence: Synthetic oligonucleotide
gccaguauugguuguauau

SEQ ID NO: 292212 - RNA, 19 nt, Artificial Sequence
  Description of Artificial Sequence: Synthetic oligonucleotide
cacgugaguauuuuagauu

SEQ ID NO: 292213 - RNA, 19 nt, Artificial Sequence
  Description of Artificial Sequence: Synthetic oligonucleotide
gcccaguauaguugcgaag

SEQ ID NO: 292214 - RNA, 19 nt, Artificial Sequence
  Description of Artificial Sequence: Synthetic oligonucleotide
cugugcauggacggccaac

SEQ ID NO: 292215 - RNA, 19 nt, Artificial Sequence
  Description of Artificial Sequence: Synthetic oligonucleotide
augugacaacaguucggua

SEQ ID NO: 292216 - RNA, 19 nt, Artificial Sequence
  Description of Artificial Sequence: Synthetic oligonucleotide
ggaaggaccugagaaggaa

SEQ ID NO: 292217 - RNA, 19 nt, Artificial Sequence
  Description of Artificial Sequence: Synthetic oligonucleotide
caaaagcggagacaacaau

SEQ ID NO: 292218 - RNA, 19 nt, Artificial Sequence
  Description of Artificial Sequence: Synthetic oligonucleotide
gcugaucgaaggcagaguu

SEQ ID NO: 292219 - RNA, 19 nt, Artificial Sequence
  Description of Artificial Sequence: Synthetic oligonucleotide
cauugcucauggcaucugu

SEQ ID NO: 292220 - RNA, 19 nt, Artificial Sequence
  Description of Artificial Sequence: Synthetic oligonucleotide
agcuaucuuugcacugagu

SEQ ID NO: 292221 - RNA, 19 nt, Artificial Sequence
  Description of Artificial Sequence: Synthetic oligonucleotide
cccuccgaaccaugggagg

SEQ ID NO: 292222 - RNA, 19 nt, Artificial Sequence
  Description of Artificial Sequence: Synthetic oligonucleotide
ugcacucaccugggaguga

SEQ ID NO: 292223 - RNA, 19 nt, Artificial Sequence
  Description of Artificial Sequence: Synthetic oligonucleotide
ccccuccgaaccaugggag

SEQ ID NO: 292224 - RNA, 19 nt, Artificial Sequence
  Description of Artificial Sequence: Synthetic oligonucleotide
cacgcugaucgaaggcaga

SEQ ID NO: 292225 - RNA, 19 nt, Artificial Sequence
  Description of Artificial Sequence: Synthetic oligonucleotide
gcggugacgucgcuccugc

SEQ ID NO: 292226 - RNA, 19 nt, Artificial Sequence
  Description of Artificial Sequence: Synthetic oligonucleotide
ggugacgucgcuccugccu

SEQ ID NO: 292227 - RNA, 19 nt, Artificial Sequence
  Description of Artificial Sequence: Synthetic oligonucleotide
aggaagcaggggaaaguuu

SEQ ID NO: 292228 - RNA, 19 nt, Artificial Sequence
  Description of Artificial Sequence: Synthetic oligonucleotide
ccgcuccuaucaaagucag

SEQ ID NO: 292229 - RNA, 19 nt, Artificial Sequence
  Description of Artificial Sequence: Synthetic oligonucleotide
ggaagcaggggaaaguuuu

SEQ ID NO: 292230 - RNA, 19 nt, Artificial Sequence
  Description of Artificial Sequence: Synthetic oligonucleotide
gcacacgugaaggaacaga

SEQ ID NO: 292231 - RNA, 19 nt, Artificial Sequence
  Description of Artificial Sequence: Synthetic oligonucleotide
cugucucaagagguuuuga

SEQ ID NO: 292232 - RNA, 19 nt, Artificial Sequence
  Description of Artificial Sequence: Synthetic oligonucleotide
gucaccccuccgaaccaug

SEQ ID NO: 292233 - RNA, 19 nt, Artificial Sequence
  Description of Artificial Sequence: Synthetic oligonucleotide
agcccauaauacagccaga

SEQ ID NO: 292234 - RNA, 19 nt, Artificial Sequence
  Description of Artificial Sequence: Synthetic oligonucleotide
cugugaggacgagugcaca

SEQ ID NO: 292235 - RNA, 19 nt, Artificial Sequence
  Description of Artificial Sequence: Synthetic oligonucleotide
ggauuaccugcaagacuac

SEQ ID NO: 292236 - RNA, 19 nt, Artificial Sequence
  Description of Artificial Sequence: Synthetic oligonucleotide
ccaagugcgcagcacugca

SEQ ID NO: 292237 - RNA, 19 nt, Artificial Sequence
  Description of Artificial Sequence: Synthetic oligonucleotide
uggcggugacgucgcuccu

SEQ ID NO: 292238 - RNA, 19 nt, Artificial Sequence
  Description of Artificial Sequence: Synthetic oligonucleotide
ggcaugggcaguauuacuu

SEQ ID NO: 292239 - RNA, 19 nt, Artificial Sequence
  Description of Artificial Sequence: Synthetic oligonucleotide
gacaguugucaugguuacu

SEQ ID NO: 292240 - RNA, 19 nt, Artificial Sequence
  Description of Artificial Sequence: Synthetic oligonucleotide
gcgcauccaagcaucaaaa

SEQ ID NO: 292241 - RNA, 19 nt, Artificial Sequence
  Description of Artificial Sequence: Synthetic oligonucleotide
agcgcgcauccaagcauca

SEQ ID NO: 292242 - RNA, 19 nt, Artificial Sequence
  Description of Artificial Sequence: Synthetic oligonucleotide
caguacccagaaagaauau

SEQ ID NO: 292243 - RNA, 19 nt, Artificial Sequence
  Description of Artificial Sequence: Synthetic oligonucleotide
cccuuauggagggcauggg

SEQ ID NO: 292244 - RNA, 19 nt, Artificial Sequence
  Description of Artificial Sequence: Synthetic oligonucleotide
gaggacgagugcacaugcu

SEQ ID NO: 292245 - RNA, 19 nt, Artificial Sequence
  Description of Artificial Sequence: Synthetic oligonucleotide
cgcuacgauuuggucaugc

SEQ ID NO: 292246 - RNA, 19 nt, Artificial Sequence
  Description of Artificial Sequence: Synthetic oligonucleotide
ggccaguauugguuguaua

SEQ ID NO: 292247 - RNA, 19 nt, Artificial Sequence
  Description of Artificial Sequence: Synthetic oligonucleotide
cgcgcauccaagcaucaaa

SEQ ID NO: 292248 - RNA, 19 nt, Artificial Sequence
  Description of Artificial Sequence: Synthetic oligonucleotide
cggguuugaguuugaagcu

SEQ ID NO: 292249 - RNA, 19 nt, Artificial Sequence
  Description of Artificial Sequence: Synthetic oligonucleotide
ggaugggugaaaggauaau

SEQ ID NO: 292250 - RNA, 19 nt, Artificial Sequence
  Description of Artificial Sequence: Synthetic oligonucleotide
ggggccaguauugguugua

SEQ ID NO: 292251 - RNA, 19 nt, Artificial Sequence
  Description of Artificial Sequence: Synthetic oligonucleotide
gcacucaaaccagggaauu

SEQ ID NO: 292252 - RNA, 19 nt, Artificial Sequence
  Description of Artificial Sequence: Synthetic oligonucleotide
gcaagacuaccaagucacu

SEQ ID NO: 292253 - RNA, 19 nt, Artificial Sequence
  Description of Artificial Sequence: Synthetic oligonucleotide
gcacucaccugggagugau

SEQ ID NO: 292254 - RNA, 19 nt, Artificial Sequence
  Description of Artificial Sequence: Synthetic oligonucleotide
cggugacgucgcuccugcc

SEQ ID NO: 292255 - RNA, 19 nt, Artificial Sequence
  Description of Artificial Sequence: Synthetic oligonucleotide
gcgcgcauccaagcaucaa

SEQ ID NO: 292256 - RNA, 19 nt, Artificial Sequence
  Description of Artificial Sequence: Synthetic oligonucleotide
ccgcuacgauuuggucaug

SEQ ID NO: 292257 - RNA, 19 nt, Artificial Sequence
  Description of Artificial Sequence: Synthetic oligonucleotide
cgcugaucgaaggcagagu

SEQ ID NO: 292258 - RNA, 19 nt, Artificial Sequence
  Description of Artificial Sequence: Synthetic oligonucleotide
aaugugauagguuuguccc

SEQ ID NO: 292259 - RNA, 19 nt, Artificial Sequence
  Description of Artificial Sequence: Synthetic oligonucleotide
ucauaugcaaaauagauga

SEQ ID NO: 292260 - RNA, 19 nt, Artificial Sequence
  Description of Artificial Sequence: Synthetic oligonucleotide
aaauagacaauucaggcca

SEQ ID NO: 292261 - RNA, 19 nt, Artificial Sequence
  Description of Artificial Sequence: Synthetic oligonucleotide
caagaugaaauauuuaugg

SEQ ID NO: 292262 - RNA, 19 nt, Artificial Sequence
  Description of Artificial Sequence: Synthetic oligonucleotide
agaagaauguacugaaugc

SEQ ID NO: 292263 - RNA, 19 nt, Artificial Sequence
  Description of Artificial Sequence: Synthetic oligonucleotide
uguaaguucaaagagaucu

SEQ ID NO: 292264 - RNA, 19 nt, Artificial Sequence
  Description of Artificial Sequence: Synthetic oligonucleotide
guucauauuaaccacaccc

SEQ ID NO: 292265 - RNA, 19 nt, Artificial Sequence
  Description of Artificial Sequence: Synthetic oligonucleotide
uauauauauauauuuaaaa

SEQ ID NO: 292266 - RNA, 19 nt, Artificial Sequence
  Description of Artificial Sequence: Synthetic oligonucleotide
aauaggcuuaaauugagga

SEQ ID NO: 292267 - RNA, 19 nt, Artificial Sequence
  Description of Artificial Sequence: Synthetic oligonucleotide
uugauuaacauucuucuca

SEQ ID NO: 292268 - RNA, 19 nt, Artificial Sequence
  Description of Artificial Sequence: Synthetic oligonucleotide
aguacuaaaucucucuugg

SEQ ID NO: 292269 - RNA, 19 nt, Artificial Sequence
  Description of Artificial Sequence: Synthetic oligonucleotide
uuuauauauauauauuuaa

SEQ ID NO: 292270 - RNA, 19 nt, Artificial Sequence
  Description of Artificial Sequence: Synthetic oligonucleotide
guaauucgcaauuugaaag

SEQ ID NO: 292271 - RNA, 19 nt, Artificial Sequence
  Description of Artificial Sequence: Synthetic oligonucleotide
aacuaugaugugaagauac

SEQ ID NO: 292272 - RNA, 19 nt, Artificial Sequence
  Description of Artificial Sequence: Synthetic oligonucleotide
ugugaaagaacagaaauga

SEQ ID NO: 292273 - RNA, 19 nt, Artificial Sequence
  Description of Artificial Sequence: Synthetic oligonucleotide
aaaucaucucuguuacacc

SEQ ID NO: 292274 - RNA, 19 nt, Artificial Sequence
  Description of Artificial Sequence: Synthetic oligonucleotide
aaacauccaugaaagaacc

SEQ ID NO: 292275 - RNA, 19 nt, Artificial Sequence
  Description of Artificial Sequence: Synthetic oligonucleotide
uaugaugugaagauacagc

SEQ ID NO: 292276 - RNA, 19 nt, Artificial Sequence
  Description of Artificial Sequence: Synthetic oligonucleotide
uuauauauauauauuuaaa

SEQ ID NO: 292277 - RNA, 19 nt, Artificial Sequence
  Description of Artificial Sequence: Synthetic oligonucleotide
uguacugaaugcaugaagu

SEQ ID NO: 292278 - RNA, 19 nt, Artificial Sequence
  Description of Artificial Sequence: Synthetic oligonucleotide
augcuaaugagccaagaac

SEQ ID NO: 292279 - RNA, 19 nt, Artificial Sequence
  Description of Artificial Sequence: Synthetic oligonucleotide
auucauauggaaauaacuc

SEQ ID NO: 292280 - RNA, 19 nt, Artificial Sequence
  Description of Artificial Sequence: Synthetic oligonucleotide
aucauugagccacugauag

SEQ ID NO: 292281 - RNA, 19 nt, Artificial Sequence
  Description of Artificial Sequence: Synthetic oligonucleotide
aacgggcaaccucagagcc

SEQ ID NO: 292282 - RNA, 19 nt, Artificial Sequence
  Description of Artificial Sequence: Synthetic oligonucleotide
uauaaaagagcagugagaa

SEQ ID NO: 292283 - RNA, 19 nt, Artificial Sequence
  Description of Artificial Sequence: Synthetic oligonucleotide
uuacccauagugcaugagg

SEQ ID NO: 292284 - RNA, 19 nt, Artificial Sequence
  Description of Artificial Sequence: Synthetic oligonucleotide
uucauauggaaauaacucu

SEQ ID NO: 292285 - RNA, 19 nt, Artificial Sequence
  Description of Artificial Sequence: Synthetic oligonucleotide
uuauaaaagagcagugaga

SEQ ID NO: 292286 - RNA, 19 nt, Artificial Sequence
  Description of Artificial Sequence: Synthetic oligonucleotide
aauucauagaacaaauccu

SEQ ID NO: 292287 - RNA, 19 nt, Artificial Sequence
  Description of Artificial Sequence: Synthetic oligonucleotide
aaugcauaaccacaucugu

SEQ ID NO: 292288 - RNA, 19 nt, Artificial Sequence
  Description of Artificial Sequence: Synthetic oligonucleotide
aaacgggcaaccucagagc

SEQ ID NO: 292289 - RNA, 19 nt, Artificial Sequence
  Description of Artificial Sequence: Synthetic oligonucleotide
auauuaaccacacccaaga

SEQ ID NO: 292290 - RNA, 19 nt, Artificial Sequence
  Description of Artificial Sequence: Synthetic oligonucleotide
auuacaucauaaaagcaac

SEQ ID NO: 292291 - RNA, 19 nt, Artificial Sequence
  Description of Artificial Sequence: Synthetic oligonucleotide
uauuuauggucacaguuac

SEQ ID NO: 292292 - RNA, 19 nt, Artificial Sequence
  Description of Artificial Sequence: Synthetic oligonucleotide
uaugucgacggccacuugg

SEQ ID NO: 292293 - RNA, 19 nt, Artificial Sequence
  Description of Artificial Sequence: Synthetic oligonucleotide
uugaagucgagaaaagaga

SEQ ID NO: 292294 - RNA, 19 nt, Artificial Sequence
  Description of Artificial Sequence: Synthetic oligonucleotide
uucauauuaaccacaccca

SEQ ID NO: 292295 - RNA, 19 nt, Artificial Sequence
  Description of Artificial Sequence: Synthetic oligonucleotide
agagccaaguacuaaaucu

SEQ ID NO: 292296 - RNA, 19 nt, Artificial Sequence
  Description of Artificial Sequence: Synthetic oligonucleotide
auagaugacuguaaaacgg

SEQ ID NO: 292297 - RNA, 19 nt, Artificial Sequence
  Description of Artificial Sequence: Synthetic oligonucleotide
cuaaaucucucuuggaggc

SEQ ID NO: 292298 - RNA, 19 nt, Artificial Sequence
  Description of Artificial Sequence: Synthetic oligonucleotide
uagggcaugcuaaugagcc

SEQ ID NO: 292299 - RNA, 19 nt, Artificial Sequence
  Description of Artificial Sequence: Synthetic oligonucleotide
cugaguaaaccauugcucc

SEQ ID NO: 292300 - RNA, 19 nt, Artificial Sequence
  Description of Artificial Sequence: Synthetic oligonucleotide
augaugugaagauacagca

SEQ ID NO: 292301 - RNA, 19 nt, Artificial Sequence
  Description of Artificial Sequence: Synthetic oligonucleotide
uaauucgcaauuugaaagc

SEQ ID NO: 292302 - RNA, 19 nt, Artificial Sequence
  Description of Artificial Sequence: Synthetic oligonucleotide
uuagagagaaccuucacuu

SEQ ID NO: 292303 - RNA, 19 nt, Artificial Sequence
  Description of Artificial Sequence: Synthetic oligonucleotide
uacaaguaaacauuccaca

SEQ ID NO: 292304 - RNA, 19 nt, Artificial Sequence
  Description of Artificial Sequence: Synthetic oligonucleotide
uuuggaaaguugaagucga

SEQ ID NO: 292305 - RNA, 19 nt, Artificial Sequence
  Description of Artificial Sequence: Synthetic oligonucleotide
aauucgcaauuugaaagcg

SEQ ID NO: 292306 - RNA, 19 nt, Artificial Sequence
  Description of Artificial Sequence: Synthetic oligonucleotide
gaagauacagcagggagag

SEQ ID NO: 292307 - RNA, 19 nt, Artificial Sequence
  Description of Artificial Sequence: Synthetic oligonucleotide
uuuaagucguuccaauaac

SEQ ID NO: 292308 - RNA, 19 nt, Artificial Sequence
  Description of Artificial Sequence: Synthetic oligonucleotide
aguuugauuaacauucuuc

SEQ ID NO: 292309 - RNA, 19 nt, Artificial Sequence
  Description of Artificial Sequence: Synthetic oligonucleotide
aagucucuaagaugagcac

SEQ ID NO: 292310 - RNA, 19 nt, Artificial Sequence
  Description of Artificial Sequence: Synthetic oligonucleotide
aagccgggcagacacuucc

SEQ ID NO: 292311 - RNA, 19 nt, Artificial Sequence
  Description of Artificial Sequence: Synthetic oligonucleotide
aauuugaaagcgcugcuua

SEQ ID NO: 292312 - RNA, 19 nt, Artificial Sequence
  Description of Artificial Sequence: Synthetic oligonucleotide
auaggcuuaaauugaggag

SEQ ID NO: 292313 - RNA, 19 nt, Artificial Sequence
  Description of Artificial Sequence: Synthetic oligonucleotide
agacaauucaggccagccc

SEQ ID NO: 292314 - RNA, 19 nt, Artificial Sequence
  Description of Artificial Sequence: Synthetic oligonucleotide
uuguaugggaugaacaguc

SEQ ID NO: 292315 - RNA, 19 nt, Artificial Sequence
  Description of Artificial Sequence: Synthetic oligonucleotide
uucgcaauuugaaagcgcu

SEQ ID NO: 292316 - RNA, 19 nt, Artificial Sequence
  Description of Artificial Sequence: Synthetic oligonucleotide
aaugaacaauucauagaac

SEQ ID NO: 292317 - RNA, 19 nt, Artificial Sequence
  Description of Artificial Sequence: Synthetic oligonucleotide
ucauagaacaaauccugca

SEQ ID NO: 292318 - RNA, 19 nt, Artificial Sequence
  Description of Artificial Sequence: Synthetic oligonucleotide
cacugauaguucuuuaagg

SEQ ID NO: 292319 - RNA, 19 nt, Artificial Sequence
  Description of Artificial Sequence: Synthetic oligonucleotide
uuaagucguuccaauaacu

SEQ ID NO: 292320 - RNA, 19 nt, Artificial Sequence
  Description of Artificial Sequence: Synthetic oligonucleotide
gagguauauggaaacaucc

SEQ ID NO: 292321 - RNA, 19 nt, Artificial Sequence
  Description of Artificial Sequence: Synthetic oligonucleotide
caaugaacaauucauagaa

SEQ ID NO: 292322 - RNA, 19 nt, Artificial Sequence
  Description of Artificial Sequence: Synthetic oligonucleotide
gauaucuuccuccugagua

SEQ ID NO: 292323 - RNA, 19 nt, Artificial Sequence
  Description of Artificial Sequence: Synthetic oligonucleotide
agaacuuaauuucagcuuu

SEQ ID NO: 292324 - RNA, 19 nt, Artificial Sequence
  Description of Artificial Sequence: Synthetic oligonucleotide
uccugaguaaaccauugcu

SEQ ID NO: 292325 - RNA, 19 nt, Artificial Sequence
  Description of Artificial Sequence: Synthetic oligonucleotide
uucuuguaugggaugaaca

SEQ ID NO: 292326 - RNA, 19 nt, Artificial Sequence
  Description of Artificial Sequence: Synthetic oligonucleotide
ucauauggaaauaacucuu

SEQ ID NO: 292327 - RNA, 19 nt, Artificial Sequence
  Description of Artificial Sequence: Synthetic oligonucleotide
uuuauggucacaguuacuu

SEQ ID NO: 292328 - RNA, 19 nt, Artificial Sequence
  Description of Artificial Sequence: Synthetic oligonucleotide
uagucauagugccagacuc

SEQ ID NO: 292329 - RNA, 19 nt, Artificial Sequence
  Description of Artificial Sequence: Synthetic oligonucleotide
ugcaccuuccgaugaaugg

SEQ ID NO: 292330 - RNA, 19 nt, Artificial Sequence
  Description of Artificial Sequence: Synthetic oligonucleotide
agauacagcagggagagug

SEQ ID NO: 292331 - RNA, 19 nt, Artificial Sequence
  Description of Artificial Sequence: Synthetic oligonucleotide
ucacaguuacuuugaaucc

SEQ ID NO: 292332 - RNA, 19 nt, Artificial Sequence
  Description of Artificial Sequence: Synthetic oligonucleotide
uuaauuagcauuuguucuu

SEQ ID NO: 292333 - RNA, 19 nt, Artificial Sequence
  Description of Artificial Sequence: Synthetic oligonucleotide
uuugaaagcgcugcuuagg

SEQ ID NO: 292334 - RNA, 19 nt, Artificial Sequence
  Description of Artificial Sequence: Synthetic oligonucleotide
agucguuccaauaacuuuc

SEQ ID NO: 292335 - RNA, 19 nt, Artificial Sequence
  Description of Artificial Sequence: Synthetic oligonucleotide
gaauguacugaaugcauga

SEQ ID NO: 292336 - RNA, 19 nt, Artificial Sequence
  Description of Artificial Sequence: Synthetic oligonucleotide
aaauaggcuuaaauugagg

SEQ ID NO: 292337 - RNA, 19 nt, Artificial Sequence
  Description of Artificial Sequence: Synthetic oligonucleotide
uuaucagcauauucuaggu

SEQ ID NO: 292338 - RNA, 19 nt, Artificial Sequence
  Description of Artificial Sequence: Synthetic oligonucleotide
agagagaaccuucacuuca

SEQ ID NO: 292339 - RNA, 19 nt, Artificial Sequence
  Description of Artificial Sequence: Synthetic oligonucleotide
uuuugugccagaacaaguu

SEQ ID NO: 292340 - RNA, 19 nt, Artificial Sequence
  Description of Artificial Sequence: Synthetic oligonucleotide
cuuuauauauauauauuua

SEQ ID NO: 292341 - RNA, 19 nt, Artificial Sequence
  Description of Artificial Sequence: Synthetic oligonucleotide
ucagcuuuauauauauaua

SEQ ID NO: 292342 - RNA, 19 nt, Artificial Sequence
  Description of Artificial Sequence: Synthetic oligonucleotide
ugugcccuagucauagugc

SEQ ID NO: 292343 - RNA, 19 nt, Artificial Sequence
  Description of Artificial Sequence: Synthetic oligonucleotide
uggucuuacuuucauccug

SEQ ID NO: 292344 - RNA, 19 nt, Artificial Sequence
  Description of Artificial Sequence: Synthetic oligonucleotide
agucucuaagaugagcacg

SEQ ID NO: 292345 - RNA, 19 nt, Artificial Sequence
  Description of Artificial Sequence: Synthetic oligonucleotide
aguagggcaugcuaaugag

SEQ ID NO: 292346 - RNA, 19 nt, Artificial Sequence
  Description of Artificial Sequence: Synthetic oligonucleotide
uuugaguaccucuucucac

SEQ ID NO: 292347 - RNA, 19 nt, Artificial Sequence
  Description of Artificial Sequence: Synthetic oligonucleotide
acucuaagagauugagauc

SEQ ID NO: 292348 - RNA, 19 nt, Artificial Sequence
  Description of Artificial Sequence: Synthetic oligonucleotide
aguaccucuucucacuucu

SEQ ID NO: 292349 - RNA, 19 nt, Artificial Sequence
  Description of Artificial Sequence: Synthetic oligonucleotide
guuucaacgacucuguacu

SEQ ID NO: 292350 - RNA, 19 nt, Artificial Sequence
  Description of Artificial Sequence: Synthetic oligonucleotide
uggaccauggccgagggca

SEQ ID NO: 292351 - RNA, 19 nt, Artificial Sequence
  Description of Artificial Sequence: Synthetic oligonucleotide
uaucuccccgaguaauucg

SEQ ID NO: 292352 - RNA, 19 nt, Artificial Sequence
  Description of Artificial Sequence: Synthetic oligonucleotide
uuggucuuuaaugugucca

SEQ ID NO: 292353 - RNA, 19 nt, Artificial Sequence
  Description of Artificial Sequence: Synthetic oligonucleotide
acauucauauggaaauaac

SEQ ID NO: 292354 - RNA, 19 nt, Artificial Sequence
  Description of Artificial Sequence: Synthetic oligonucleotide
agacuuuaauuuaggauag

SEQ ID NO: 292355 - RNA, 19 nt, Artificial Sequence
  Description of Artificial Sequence: Synthetic oligonucleotide
cugauaguucuuuaagguc

SEQ ID NO: 292356 - RNA, 19 nt, Artificial Sequence
  Description of Artificial Sequence: Synthetic oligonucleotide
guauauggaaacauccaug

SEQ ID NO: 292357 - RNA, 19 nt, Artificial Sequence
  Description of Artificial Sequence: Synthetic oligonucleotide
aagucguuccaauaacuuu

SEQ ID NO: 292358 - RNA, 19 nt, Artificial Sequence
  Description of Artificial Sequence: Synthetic oligonucleotide
uccacucuaagagauugag

SEQ ID NO: 292359 - RNA, 19 nt, Artificial Sequence
  Description of Artificial Sequence: Synthetic oligonucleotide
gcuuuugcuaugucgacgg

SEQ ID NO: 292360 - RNA, 19 nt, Artificial Sequence
  Description of Artificial Sequence: Synthetic oligonucleotide
acucucuucagaaaucauc

SEQ ID NO: 292361 - RNA, 19 nt, Artificial Sequence
  Description of Artificial Sequence: Synthetic oligonucleotide
cuaugaugugaagauacag

SEQ ID NO: 292362 - RNA, 19 nt, Artificial Sequence
  Description of Artificial Sequence: Synthetic oligonucleotide
uaccugugaaagaacagaa

SEQ ID NO: 292363 - RNA, 19 nt, Artificial Sequence
  Description of Artificial Sequence: Synthetic oligonucleotide
auagguuugucccuagaaa

SEQ ID NO: 292364 - RNA, 19 nt, Artificial Sequence
  Description of Artificial Sequence: Synthetic oligonucleotide
aauggguaccagaacaagu

SEQ ID NO: 292365 - RNA, 19 nt, Artificial Sequence
  Description of Artificial Sequence: Synthetic oligonucleotide
ugaauggguaccagaacaa

SEQ ID NO: 292366 - RNA, 19 nt, Artificial Sequence
  Description of Artificial Sequence: Synthetic oligonucleotide
ugucccauagaauccagau

SEQ ID NO: 292367 - RNA, 19 nt, Artificial Sequence
  Description of Artificial Sequence: Synthetic oligonucleotide
ugaaugcaugaagugcugg

SEQ ID NO: 292368 - RNA, 19 nt, Artificial Sequence
  Description of Artificial Sequence: Synthetic oligonucleotide
ccagcauuagagaagcugg

SEQ ID NO: 292369 - RNA, 19 nt, Artificial Sequence
  Description of Artificial Sequence: Synthetic oligonucleotide
aagaagaaucucacagauc

SEQ ID NO: 292370 - RNA, 19 nt, Artificial Sequence
  Description of Artificial Sequence: Synthetic oligonucleotide
ugaguaaaugugauagguu

SEQ ID NO: 292371 - RNA, 19 nt, Artificial Sequence
  Description of Artificial Sequence: Synthetic oligonucleotide
uucaaaucggagucccgcc

SEQ ID NO: 292372 - RNA, 19 nt, Artificial Sequence
  Description of Artificial Sequence: Synthetic oligonucleotide
cuuuaagucguuccaauaa

SEQ ID NO: 292373 - RNA, 19 nt, Artificial Sequence
  Description of Artificial Sequence: Synthetic oligonucleotide
cucuaagaugagcacgugc

SEQ ID NO: 292374 - RNA, 19 nt, Artificial Sequence
  Description of Artificial Sequence: Synthetic oligonucleotide
gacaauucaggccagcccu

SEQ ID NO: 292375 - RNA, 19 nt, Artificial Sequence
  Description of Artificial Sequence: Synthetic oligonucleotide
auucgcaauuugaaagcgc

SEQ ID NO: 292376 - RNA, 19 nt, Artificial Sequence
  Description of Artificial Sequence: Synthetic oligonucleotide
guacugaaugcaugaagug

SEQ ID NO: 292377 - RNA, 19 nt, Artificial Sequence
  Description of Artificial Sequence: Synthetic oligonucleotide
gaguagggcaugcuaauga

SEQ ID NO: 292378 - RNA, 19 nt, Artificial Sequence
  Description of Artificial Sequence: Synthetic oligonucleotide
ggaaaguugaagucgagaa

SEQ ID NO: 292379 - RNA, 19 nt, Artificial Sequence
  Description of Artificial Sequence: Synthetic oligonucleotide
acaaucacucccguucaac

SEQ ID NO: 292380 - RNA, 19 nt, Artificial Sequence
  Description of Artificial Sequence: Synthetic oligonucleotide
caggguugcaagcagcccc

SEQ ID NO: 292381 - RNA, 19 nt, Artificial Sequence
  Description of Artificial Sequence: Synthetic oligonucleotide
cuuccgaugaauggguacc

SEQ ID NO: 292382 - RNA, 19 nt, Artificial Sequence
  Description of Artificial Sequence: Synthetic oligonucleotide
uccaauaacuuucgguauu

SEQ ID NO: 292383 - RNA, 19 nt, Artificial Sequence
  Description of Artificial Sequence: Synthetic oligonucleotide
ugccagaacaaguuuggaa

SEQ ID NO: 292384 - RNA, 19 nt, Artificial Sequence
  Description of Artificial Sequence: Synthetic oligonucleotide
ucgucauuucuucuggcau

SEQ ID NO: 292385 - RNA, 19 nt, Artificial Sequence
  Description of Artificial Sequence: Synthetic oligonucleotide
auaucuccccgaguaauuc

SEQ ID NO: 292386 - RNA, 19 nt, Artificial Sequence
  Description of Artificial Sequence: Synthetic oligonucleotide
aaguugaagucgagaaaag

SEQ ID NO: 292387 - RNA, 19 nt, Artificial Sequence
  Description of Artificial Sequence: Synthetic oligonucleotide
uuugccucgaguccugaua

SEQ ID NO: 292388 - RNA, 19 nt, Artificial Sequence
  Description of Artificial Sequence: Synthetic oligonucleotide
uagacaauucaggccagcc

SEQ ID NO: 292389 - RNA, 19 nt, Artificial Sequence
  Description of Artificial Sequence: Synthetic oligonucleotide
auaucuuccuccugaguaa

SEQ ID NO: 292390 - RNA, 19 nt, Artificial Sequence
  Description of Artificial Sequence: Synthetic oligonucleotide
agucccgccaccuucucug

SEQ ID NO: 292391 - RNA, 19 nt, Artificial Sequence
  Description of Artificial Sequence: Synthetic oligonucleotide
aggucuggauaucuccccg

SEQ ID NO: 292392 - RNA, 19 nt, Artificial Sequence
  Description of Artificial Sequence: Synthetic oligonucleotide
cauaugcaaaauagaugac

SEQ ID NO: 292393 - RNA, 19 nt, Artificial Sequence
  Description of Artificial Sequence: Synthetic oligonucleotide
aauagacaauucaggccag

SEQ ID NO: 292394 - RNA, 19 nt, Artificial Sequence
  Description of Artificial Sequence: Synthetic oligonucleotide
agaauguacugaaugcaug

SEQ ID NO: 292395 - RNA, 19 nt, Artificial Sequence
  Description of Artificial Sequence: Synthetic oligonucleotide
guucaaagagaucuguucu

SEQ ID NO: 292396 - RNA, 19 nt, Artificial Sequence
  Description of Artificial Sequence: Synthetic oligonucleotide
ucgagaggaagccaagcua

SEQ ID NO: 292397 - RNA, 19 nt, Artificial Sequence
  Description of Artificial Sequence: Synthetic oligonucleotide
ggcacagccuuacaaacag

SEQ ID NO: 292398 - RNA, 19 nt, Artificial Sequence
  Description of Artificial Sequence: Synthetic oligonucleotide
uuccaauaacuuucgguau

SEQ ID NO: 292399 - RNA, 19 nt, Artificial Sequence
  Description of Artificial Sequence: Synthetic oligonucleotide
uauuaaccacacccaagau

SEQ ID NO: 292400 - RNA, 19 nt, Artificial Sequence
  Description of Artificial Sequence: Synthetic oligonucleotide
uuagguccaucaccacuag

SEQ ID NO: 292401 - RNA, 19 nt, Artificial Sequence
  Description of Artificial Sequence: Synthetic oligonucleotide
ucaccacuaggcuccaaug

SEQ ID NO: 292402 - RNA, 19 nt, Artificial Sequence
  Description of Artificial Sequence: Synthetic oligonucleotide
ucauguuggcaguuccuac

SEQ ID NO: 292403 - RNA, 19 nt, Artificial Sequence
  Description of Artificial Sequence: Synthetic oligonucleotide
cuuuccacuaaaagauuca

SEQ ID NO: 292404 - RNA, 19 nt, Artificial Sequence
  Description of Artificial Sequence: Synthetic oligonucleotide
aucuccccgaguaauucgc

SEQ ID NO: 292405 - RNA, 19 nt, Artificial Sequence
  Description of Artificial Sequence: Synthetic oligonucleotide
acaguuacuuugaauccag

SEQ ID NO: 292406 - RNA, 19 nt, Artificial Sequence
  Description of Artificial Sequence: Synthetic oligonucleotide
guucuuuaaggucuggaua

SEQ ID NO: 292407 - RNA, 19 nt, Artificial Sequence
  Description of Artificial Sequence: Synthetic oligonucleotide
caccacuaggcuccaaugc

SEQ ID NO: 292408 - RNA, 19 nt, Artificial Sequence
  Description of Artificial Sequence: Synthetic oligonucleotide
uuuuacccauagugcauga

SEQ ID NO: 292409 - RNA, 19 nt, Artificial Sequence
  Description of Artificial Sequence: Synthetic oligonucleotide
uugccucgaguccugauau

SEQ ID NO: 292410 - RNA, 19 nt, Artificial Sequence
  Description of Artificial Sequence: Synthetic oligonucleotide
agccuuacaaacaggguug

SEQ ID NO: 292411 - RNA, 19 nt, Artificial Sequence
  Description of Artificial Sequence: Synthetic oligonucleotide
uguaguggguccacucuaa

SEQ ID NO: 292412 - RNA, 19 nt, Artificial Sequence
  Description of Artificial Sequence: Synthetic oligonucleotide
agugcaauggggacgccuc

SEQ ID NO: 292413 - RNA, 19 nt, Artificial Sequence
  Description of Artificial Sequence: Synthetic oligonucleotide
uuucgagaggaagccaagc

SEQ ID NO: 292414 - RNA, 19 nt, Artificial Sequence
  Description of Artificial Sequence: Synthetic oligonucleotide
guaaguucaaagagaucug

SEQ ID NO: 292415 - RNA, 19 nt, Artificial Sequence
  Description of Artificial Sequence: Synthetic oligonucleotide
agugccagacucucuaaaa

SEQ ID NO: 292416 - RNA, 19 nt, Artificial Sequence
  Description of Artificial Sequence: Synthetic oligonucleotide
auaugcucugaccaacuuu

SEQ ID NO: 292417 - RNA, 19 nt, Artificial Sequence
  Description of Artificial Sequence: Synthetic oligonucleotide
uggguaccagaacaaguuc

SEQ ID NO: 292418 - RNA, 19 nt, Artificial Sequence
  Description of Artificial Sequence: Synthetic oligonucleotide
uuuacccauagugcaugag

SEQ ID NO: 292419 - RNA, 19 nt, Artificial Sequence
  Description of Artificial Sequence: Synthetic oligonucleotide
ucgcaauuugaaagcgcug

SEQ ID NO: 292420 - RNA, 19 nt, Artificial Sequence
  Description of Artificial Sequence: Synthetic oligonucleotide
aaaugauauggggacuuuu

SEQ ID NO: 292421 - RNA, 19 nt, Artificial Sequence
  Description of Artificial Sequence: Synthetic oligonucleotide
cacagugcaauggggacgc

SEQ ID NO: 292422 - RNA, 19 nt, Artificial Sequence
  Description of Artificial Sequence: Synthetic oligonucleotide
agacucucuaaaaggcaac

SEQ ID NO: 292423 - RNA, 19 nt, Artificial Sequence
  Description of Artificial Sequence: Synthetic oligonucleotide
aaagcaacacuaggcacua

SEQ ID NO: 292424 - RNA, 19 nt, Artificial Sequence
  Description of Artificial Sequence: Synthetic oligonucleotide
gucguuccaauaacuuucg

SEQ ID NO: 292425 - RNA, 19 nt, Artificial Sequence
  Description of Artificial Sequence: Synthetic oligonucleotide
auaaaagagcagugagaaa

SEQ ID NO: 292426 - RNA, 19 nt, Artificial Sequence
  Description of Artificial Sequence: Synthetic oligonucleotide
uggucuuuaauguguccau

SEQ ID NO: 292427 - RNA, 19 nt, Artificial Sequence
  Description of Artificial Sequence: Synthetic oligonucleotide
cagacacuuccuccgacag

SEQ ID NO: 292428 - RNA, 19 nt, Artificial Sequence
  Description of Artificial Sequence: Synthetic oligonucleotide
cagcuuuauauauauauau

SEQ ID NO: 292429 - RNA, 19 nt, Artificial Sequence
  Description of Artificial Sequence: Synthetic oligonucleotide
gcuuuauauauauauauuu

SEQ ID NO: 292430 - RNA, 19 nt, Artificial Sequence
  Description of Artificial Sequence: Synthetic oligonucleotide
uugucccauagaauccaga

SEQ ID NO: 292431 - RNA, 19 nt, Artificial Sequence
  Description of Artificial Sequence: Synthetic oligonucleotide
cugugcccuagucauagug

SEQ ID NO: 292432 - RNA, 19 nt, Artificial Sequence
  Description of Artificial Sequence: Synthetic oligonucleotide
agaacaaguuuggaaaguu

SEQ ID NO: 292433 - RNA, 19 nt, Artificial Sequence
  Description of Artificial Sequence: Synthetic oligonucleotide
uccuccgacagaucaggcu

SEQ ID NO: 292434 - RNA, 19 nt, Artificial Sequence
  Description of Artificial Sequence: Synthetic oligonucleotide
acuaggcacuagaucuugc

SEQ ID NO: 292435 - RNA, 19 nt, Artificial Sequence
  Description of Artificial Sequence: Synthetic oligonucleotide
ucauugagccacugauagu

SEQ ID NO: 292436 - RNA, 19 nt, Artificial Sequence
  Description of Artificial Sequence: Synthetic oligonucleotide
uccaacugguguccccuug

SEQ ID NO: 292437 - RNA, 19 nt, Artificial Sequence
  Description of Artificial Sequence: Synthetic oligonucleotide
uuauggucacaguuacuuu

SEQ ID NO: 292438 - RNA, 19 nt, Artificial Sequence
  Description of Artificial Sequence: Synthetic oligonucleotide
cuucaugcuguaguggguc

SEQ ID NO: 292439 - RNA, 19 nt, Artificial Sequence
  Description of Artificial Sequence: Synthetic oligonucleotide
agcuuuauauauauauauu

SEQ ID NO: 292440 - RNA, 19 nt, Artificial Sequence
  Description of Artificial Sequence: Synthetic oligonucleotide
uugcuuuugcuaugucgac

SEQ ID NO: 292441 - RNA, 19 nt, Artificial Sequence
  Description of Artificial Sequence: Synthetic oligonucleotide
uagugccagacucucuaaa

SEQ ID NO: 292442 - RNA, 19 nt, Artificial Sequence
  Description of Artificial Sequence: Synthetic oligonucleotide
cuccugaguaaaccauugc

SEQ ID NO: 292443 - RNA, 19 nt, Artificial Sequence
  Description of Artificial Sequence: Synthetic oligonucleotide
uggauaucuccccgaguaa

SEQ ID NO: 292444 - RNA, 19 nt, Artificial Sequence
  Description of Artificial Sequence: Synthetic oligonucleotide
ucauagugccagacucucu

SEQ ID NO: 292445 - RNA, 19 nt, Artificial Sequence
  Description of Artificial Sequence: Synthetic oligonucleotide
uccccuuguaccuuccuuu

SEQ ID NO: 292446 - RNA, 19 nt, Artificial Sequence
  Description of Artificial Sequence: Synthetic oligonucleotide
cacaccucaagucagggcu

SEQ ID NO: 292447 - RNA, 19 nt, Artificial Sequence
  Description of Artificial Sequence: Synthetic oligonucleotide
cuaggcacuagaucuugca

SEQ ID NO: 292448 - RNA, 19 nt, Artificial Sequence
  Description of Artificial Sequence: Synthetic oligonucleotide
cuuccaaggcgaagccggg

SEQ ID NO: 292449 - RNA, 19 nt, Artificial Sequence
  Description of Artificial Sequence: Synthetic oligonucleotide
caugcuaaugagccaagaa

SEQ ID NO: 292450 - RNA, 19 nt, Artificial Sequence
  Description of Artificial Sequence: Synthetic oligonucleotide
uuaaauugaggagcaucuu

SEQ ID NO: 292451 - RNA, 19 nt, Artificial Sequence
  Description of Artificial Sequence: Synthetic oligonucleotide
cugagguuuccauguuaag

SEQ ID NO: 292452 - RNA, 19 nt, Artificial Sequence
  Description of Artificial Sequence: Synthetic oligonucleotide
ccuuguuucaacgacucug

SEQ ID NO: 292453 - RNA, 19 nt, Artificial Sequence
  Description of Artificial Sequence: Synthetic oligonucleotide
uccugauaucuuccuccug

SEQ ID NO: 292454 - RNA, 19 nt, Artificial Sequence
  Description of Artificial Sequence: Synthetic oligonucleotide
gggaaguucuuuuccuuug

SEQ ID NO: 292455 - RNA, 19 nt, Artificial Sequence
  Description of Artificial Sequence: Synthetic oligonucleotide
gguccacucuaagagauug

SEQ ID NO: 292456 - RNA, 19 nt, Artificial Sequence
  Description of Artificial Sequence: Synthetic oligonucleotide
cauagugccagacucucua

SEQ ID NO: 292457 - RNA, 19 nt, Artificial Sequence
  Description of Artificial Sequence: Synthetic oligonucleotide
acuaugaugugaagauaca

SEQ ID NO: 292458 - RNA, 19 nt, Artificial Sequence
  Description of Artificial Sequence: Synthetic oligonucleotide
auggguaccagaacaaguu

SEQ ID NO: 292459 - RNA, 19 nt, Artificial Sequence
  Description of Artificial Sequence: Synthetic oligonucleotide
ucggagucccgccaccuuc

SEQ ID NO: 292460 - RNA, 19 nt, Artificial Sequence
  Description of Artificial Sequence: Synthetic oligonucleotide
gauucaccccuuuggucca

SEQ ID NO: 292461 - RNA, 19 nt, Artificial Sequence
  Description of Artificial Sequence: Synthetic oligonucleotide
uccuuuccacuaaaagauu

SEQ ID NO: 292462 - RNA, 19 nt, Artificial Sequence
  Description of Artificial Sequence: Synthetic oligonucleotide
auugagccacugauaguuc

SEQ ID NO: 292463 - RNA, 19 nt, Artificial Sequence
  Description of Artificial Sequence: Synthetic oligonucleotide
cagagccaaguacuaaauc

SEQ ID NO: 292464 - RNA, 19 nt, Artificial Sequence
  Description of Artificial Sequence: Synthetic oligonucleotide
ccacugauaguucuuuaag

SEQ ID NO: 292465 - RNA, 19 nt, Artificial Sequence
  Description of Artificial Sequence: Synthetic oligonucleotide
guacuaaaucucucuugga

SEQ ID NO: 292466 - RNA, 19 nt, Artificial Sequence
  Description of Artificial Sequence: Synthetic oligonucleotide
uucucacuucucacugaac

SEQ ID NO: 292467 - RNA, 19 nt, Artificial Sequence
  Description of Artificial Sequence: Synthetic oligonucleotide
ggcgaagccgggcagacac

SEQ ID NO: 292468 - RNA, 19 nt, Artificial Sequence
  Description of Artificial Sequence: Synthetic oligonucleotide
ucuccccgaguaauucgca

SEQ ID NO: 292469 - RNA, 19 nt, Artificial Sequence
  Description of Artificial Sequence: Synthetic oligonucleotide
uucccacauucauauggaa

SEQ ID NO: 292470 - RNA, 19 nt, Artificial Sequence
  Description of Artificial Sequence: Synthetic oligonucleotide
agaucaggcuccaacuggu

SEQ ID NO: 292471 - RNA, 19 nt, Artificial Sequence
  Description of Artificial Sequence: Synthetic oligonucleotide
aaucggagucccgccaccu

SEQ ID NO: 292472 - RNA, 19 nt, Artificial Sequence
  Description of Artificial Sequence: Synthetic oligonucleotide
uccgaugaauggguaccag

SEQ ID NO: 292473 - RNA, 19 nt, Artificial Sequence
  Description of Artificial Sequence: Synthetic oligonucleotide
uccccgaguaauucgcaau

SEQ ID NO: 292474 - RNA, 19 nt, Artificial Sequence
  Description of Artificial Sequence: Synthetic oligonucleotide
ccaaugaacaauucauaga

SEQ ID NO: 292475 - RNA, 19 nt, Artificial Sequence
  Description of Artificial Sequence: Synthetic oligonucleotide
caucucuguuacacccugc

SEQ ID NO: 292476 - RNA, 19 nt, Artificial Sequence
  Description of Artificial Sequence: Synthetic oligonucleotide
ucuuuaaggucuggauauc

SEQ ID NO: 292477 - RNA, 19 nt, Artificial Sequence
  Description of Artificial Sequence: Synthetic oligonucleotide
guaaaacgggcaaccucag

SEQ ID NO: 292478 - RNA, 19 nt, Artificial Sequence
  Description of Artificial Sequence: Synthetic oligonucleotide
cucuaaaaggcaaccagau

SEQ ID NO: 292479 - RNA, 19 nt, Artificial Sequence
  Description of Artificial Sequence: Synthetic oligonucleotide
gacgccucacacccuugcc

SEQ ID NO: 292480 - RNA, 19 nt, Artificial Sequence
  Description of Artificial Sequence: Synthetic oligonucleotide
gguauauggaaacauccau

SEQ ID NO: 292481 - RNA, 19 nt, Artificial Sequence
  Description of Artificial Sequence: Synthetic oligonucleotide
cacaguuacuuugaaucca

SEQ ID NO: 292482 - RNA, 19 nt, Artificial Sequence
  Description of Artificial Sequence: Synthetic oligonucleotide
agucauagugccagacucu

SEQ ID NO: 292483 - RNA, 19 nt, Artificial Sequence
  Description of Artificial Sequence: Synthetic oligonucleotide
aggcuuaaauugaggagca

SEQ ID NO: 292484 - RNA, 19 nt, Artificial Sequence
  Description of Artificial Sequence: Synthetic oligonucleotide
gucauagugccagacucuc

SEQ ID NO: 292485 - RNA, 19 nt, Artificial Sequence
  Description of Artificial Sequence: Synthetic oligonucleotide
uucuuagguccaucaccac

SEQ ID NO: 292486 - RNA, 19 nt, Artificial Sequence
  Description of Artificial Sequence: Synthetic oligonucleotide
ucucuaagaugagcacgug

SEQ ID NO: 292487 - RNA, 19 nt, Artificial Sequence
  Description of Artificial Sequence: Synthetic oligonucleotide
auagaagaauguacugaau

SEQ ID NO: 292488 - RNA, 19 nt, Artificial Sequence
  Description of Artificial Sequence: Synthetic oligonucleotide
gcugaugugucccucugca

SEQ ID NO: 292489 - RNA, 19 nt, Artificial Sequence
  Description of Artificial Sequence: Synthetic oligonucleotide
gaucccuacaccucagcau

SEQ ID NO: 292490 - RNA, 19 nt, Artificial Sequence
  Description of Artificial Sequence: Synthetic oligonucleotide
ggcacuagaucuugcaaaa

SEQ ID NO: 292491 - RNA, 19 nt, Artificial Sequence
  Description of Artificial Sequence: Synthetic oligonucleotide
caugagguauauggaaaca

SEQ ID NO: 292492 - RNA, 19 nt, Artificial Sequence
  Description of Artificial Sequence: Synthetic oligonucleotide
caaguaaacauuccacaau

SEQ ID NO: 292493 - RNA, 19 nt, Artificial Sequence
  Description of Artificial Sequence: Synthetic oligonucleotide
ggcuccaaugcaccuuccg

SEQ ID NO: 292494 - RNA, 19 nt, Artificial Sequence
  Description of Artificial Sequence: Synthetic oligonucleotide
cauugagccacugauaguu

SEQ ID NO: 292495 - RNA, 19 nt, Artificial Sequence
  Description of Artificial Sequence: Synthetic oligonucleotide
ggucuuuuauuacaucaua

SEQ ID NO: 292496 - RNA, 19 nt, Artificial Sequence
  Description of Artificial Sequence: Synthetic oligonucleotide
cgcaauuugaaagcgcugc

SEQ ID NO: 292497 - RNA, 19 nt, Artificial Sequence
  Description of Artificial Sequence: Synthetic oligonucleotide
guacuguuuuggaacaaaa

SEQ ID NO: 292498 - RNA, 19 nt, Artificial Sequence
  Description of Artificial Sequence: Synthetic oligonucleotide
gaacuaugaugugaagaua

SEQ ID NO: 292499 - RNA, 19 nt, Artificial Sequence
  Description of Artificial Sequence: Synthetic oligonucleotide
aaucucucuuggaggcuca

SEQ ID NO: 292500 - RNA, 19 nt, Artificial Sequence
  Description of Artificial Sequence: Synthetic oligonucleotide
cauguuggcaguuccuacu

SEQ ID NO: 292501 - RNA, 19 nt, Artificial Sequence
  Description of Artificial Sequence: Synthetic oligonucleotide
aggaaguggcaguuugauu

SEQ ID NO: 292502 - RNA, 19 nt, Artificial Sequence
  Description of Artificial Sequence: Synthetic oligonucleotide
caucauugagccacugaua

SEQ ID NO: 292503 - RNA, 19 nt, Artificial Sequence
  Description of Artificial Sequence: Synthetic oligonucleotide
auuuauggucacaguuacu

SEQ ID NO: 292504 - RNA, 19 nt, Artificial Sequence
  Description of Artificial Sequence: Synthetic oligonucleotide
uuaccaaugugagguucau

SEQ ID NO: 292505 - RNA, 19 nt, Artificial Sequence
  Description of Artificial Sequence: Synthetic oligonucleotide
ugcaauggggacgccucac

SEQ ID NO: 292506 - RNA, 19 nt, Artificial Sequence
  Description of Artificial Sequence: Synthetic oligonucleotide
caaucacucccguucaacu

SEQ ID NO: 292507 - RNA, 19 nt, Artificial Sequence
  Description of Artificial Sequence: Synthetic oligonucleotide
gucucuaagaugagcacgu

SEQ ID NO: 292508 - RNA, 19 nt, Artificial Sequence
  Description of Artificial Sequence: Synthetic oligonucleotide
gcccuagucauagugccag

SEQ ID NO: 292509 - RNA, 19 nt, Artificial Sequence
  Description of Artificial Sequence: Synthetic oligonucleotide
augcauaaccacaucugua

SEQ ID NO: 292510 - RNA, 19 nt, Artificial Sequence
  Description of Artificial Sequence: Synthetic oligonucleotide
ccgaguaauucgcaauuug

SEQ ID NO: 292511 - RNA, 19 nt, Artificial Sequence
  Description of Artificial Sequence: Synthetic oligonucleotide
ugucgacggccacuugguc

SEQ ID NO: 292512 - RNA, 19 nt, Artificial Sequence
  Description of Artificial Sequence: Synthetic oligonucleotide
gucccauagaauccagaua

SEQ ID NO: 292513 - RNA, 19 nt, Artificial Sequence
  Description of Artificial Sequence: Synthetic oligonucleotide
cuuguaugggaugaacagu

SEQ ID NO: 292514 - RNA, 19 nt, Artificial Sequence
  Description of Artificial Sequence: Synthetic oligonucleotide
uugcuaugucgacggccac

SEQ ID NO: 292515 - RNA, 19 nt, Artificial Sequence
  Description of Artificial Sequence: Synthetic oligonucleotide
cuuuaaggucuggauaucu

SEQ ID NO: 292516 - RNA, 19 nt, Artificial Sequence
  Description of Artificial Sequence: Synthetic oligonucleotide
gucgacggccacuuggucu

SEQ ID NO: 292517 - RNA, 19 nt, Artificial Sequence
  Description of Artificial Sequence: Synthetic oligonucleotide
agagaggcaucuggugcug

SEQ ID NO: 292518 - RNA, 19 nt, Artificial Sequence
  Description of Artificial Sequence: Synthetic oligonucleotide
cgaguaauucgcaauuuga

SEQ ID NO: 292519 - RNA, 19 nt, Artificial Sequence
  Description of Artificial Sequence: Synthetic oligonucleotide
ccuacuccagcauuagaga

SEQ ID NO: 292520 - RNA, 19 nt, Artificial Sequence
  Description of Artificial Sequence: Synthetic oligonucleotide
augucgacggccacuuggu

SEQ ID NO: 292521 - RNA, 19 nt, Artificial Sequence
  Description of Artificial Sequence: Synthetic oligonucleotide
gagcacgugcuggucugag

SEQ ID NO: 292522 - RNA, 19 nt, Artificial Sequence
  Description of Artificial Sequence: Synthetic oligonucleotide
ggaguagggcaugcuaaug

SEQ ID NO: 292523 - RNA, 19 nt, Artificial Sequence
  Description of Artificial Sequence: Synthetic oligonucleotide
cuguaguggguccacucua

SEQ ID NO: 292524 - RNA, 19 nt, Artificial Sequence
  Description of Artificial Sequence: Synthetic oligonucleotide
ggucuuuaauguguccauc

SEQ ID NO: 292525 - RNA, 19 nt, Artificial Sequence
  Description of Artificial Sequence: Synthetic oligonucleotide
acugugcccuagucauagu

SEQ ID NO: 292526 - RNA, 19 nt, Artificial Sequence
  Description of Artificial Sequence: Synthetic oligonucleotide
ggacgccucacacccuugc

SEQ ID NO: 292527 - RNA, 19 nt, Artificial Sequence
  Description of Artificial Sequence: Synthetic oligonucleotide
gauaucuccccgaguaauu

SEQ ID NO: 292528 - RNA, 19 nt, Artificial Sequence
  Description of Artificial Sequence: Synthetic oligonucleotide
cagcucaguaccugugaaa

SEQ ID NO: 292529 - RNA, 19 nt, Artificial Sequence
  Description of Artificial Sequence: Synthetic oligonucleotide
ggucuggauaucuccccga

SEQ ID NO: 292530 - RNA, 19 nt, Artificial Sequence
  Description of Artificial Sequence: Synthetic oligonucleotide
acagugcaauggggacgcc

SEQ ID NO: 292531 - RNA, 19 nt, Artificial Sequence
  Description of Artificial Sequence: Synthetic oligonucleotide
ugccucgaguccugauauc

SEQ ID NO: 292532 - RNA, 19 nt, Artificial Sequence
  Description of Artificial Sequence: Synthetic oligonucleotide
caaugcaccuuccgaugaa

SEQ ID NO: 292533 - RNA, 19 nt, Artificial Sequence
  Description of Artificial Sequence: Synthetic oligonucleotide
cuaugucgacggccacuug

SEQ ID NO: 292534 - RNA, 19 nt, Artificial Sequence
  Description of Artificial Sequence: Synthetic oligonucleotide
acacccugcuccugagguu

SEQ ID NO: 292535 - RNA, 19 nt, Artificial Sequence
  Description of Artificial Sequence: Synthetic oligonucleotide
gcaauuugaaagcgcugcu

SEQ ID NO: 292536 - RNA, 19 nt, Artificial Sequence
  Description of Artificial Sequence: Synthetic oligonucleotide
guuugucccuagaaauaua

SEQ ID NO: 292537 - RNA, 19 nt, Artificial Sequence
  Description of Artificial Sequence: Synthetic oligonucleotide
gccuuacaaacaggguugc

SEQ ID NO: 292538 - RNA, 19 nt, Artificial Sequence
  Description of Artificial Sequence: Synthetic oligonucleotide
cuccccgaguaauucgcaa

SEQ ID NO: 292539 - RNA, 19 nt, Artificial Sequence
  Description of Artificial Sequence: Synthetic oligonucleotide
cuaagagauugagaucuau

SEQ ID NO: 292540 - RNA, 19 nt, Artificial Sequence
  Description of Artificial Sequence: Synthetic oligonucleotide
ggguaccagaacaaguucu

SEQ ID NO: 292541 - RNA, 19 nt, Artificial Sequence
  Description of Artificial Sequence: Synthetic oligonucleotide
gaaaugauauggggacuuu

SEQ ID NO: 292542 - RNA, 19 nt, Artificial Sequence
  Description of Artificial Sequence: Synthetic oligonucleotide
guggaccauggccgagggc

SEQ ID NO: 292543 - RNA, 19 nt, Artificial Sequence
  Description of Artificial Sequence: Synthetic oligonucleotide
ggcaugcuaaugagccaag

SEQ ID NO: 292544 - RNA, 19 nt, Artificial Sequence
  Description of Artificial Sequence: Synthetic oligonucleotide
acaauucaggccagcccuu

SEQ ID NO: 292545 - RNA, 19 nt, Artificial Sequence
  Description of Artificial Sequence: Synthetic oligonucleotide
uggggacgccucacacccu

SEQ ID NO: 292546 - RNA, 19 nt, Artificial Sequence
  Description of Artificial Sequence: Synthetic oligonucleotide
aucggagucccgccaccuu

SEQ ID NO: 292547 - RNA, 19 nt, Artificial Sequence
  Description of Artificial Sequence: Synthetic oligonucleotide
cccguucaacuguugagga

SEQ ID NO: 292548 - RNA, 19 nt, Artificial Sequence
  Description of Artificial Sequence: Synthetic oligonucleotide
gugccagaacaaguuugga

SEQ ID NO: 292549 - RNA, 19 nt, Artificial Sequence
  Description of Artificial Sequence: Synthetic oligonucleotide
cguuccaauaacuuucggu

SEQ ID NO: 292550 - RNA, 19 nt, Artificial Sequence
  Description of Artificial Sequence: Synthetic oligonucleotide
caguuucgagaggaagcca

SEQ ID NO: 292551 - RNA, 19 nt, Artificial Sequence
  Description of Artificial Sequence: Synthetic oligonucleotide
cacugcccaaugaacaauu

SEQ ID NO: 292552 - RNA, 19 nt, Artificial Sequence
  Description of Artificial Sequence: Synthetic oligonucleotide
acgggcaaccucagagcca

SEQ ID NO: 292553 - RNA, 19 nt, Artificial Sequence
  Description of Artificial Sequence: Synthetic oligonucleotide
ccaaggcgaagccgggcag

SEQ ID NO: 292554 - RNA, 19 nt, Artificial Sequence
  Description of Artificial Sequence: Synthetic oligonucleotide
caaggcgaagccgggcaga

SEQ ID NO: 292555 - RNA, 19 nt, Artificial Sequence
  Description of Artificial Sequence: Synthetic oligonucleotide
cuguuacacccugcuccug

SEQ ID NO: 292556 - RNA, 19 nt, Artificial Sequence
  Description of Artificial Sequence: Synthetic oligonucleotide
ggauaucuccccgaguaau

SEQ ID NO: 292557 - RNA, 19 nt, Artificial Sequence
  Description of Artificial Sequence: Synthetic oligonucleotide
gcauuacugaucuccuuuu

SEQ ID NO: 292558 - RNA, 19 nt, Artificial Sequence
  Description of Artificial Sequence: Synthetic oligonucleotide
cacacccuugccacucucu

SEQ ID NO: 292559 - RNA, 19 nt, Artificial Sequence
  Description of Artificial Sequence: Synthetic oligonucleotide
caaagagauucaccccuuu

SEQ ID NO: 292560 - RNA, 19 nt, Artificial Sequence
  Description of Artificial Sequence: Synthetic oligonucleotide
gccucgaguccugauaucu

SEQ ID NO: 292561 - RNA, 19 nt, Artificial Sequence
  Description of Artificial Sequence: Synthetic oligonucleotide
ccgagggcauuacugaucu

SEQ ID NO: 292562 - RNA, 19 nt, Artificial Sequence
  Description of Artificial Sequence: Synthetic oligonucleotide
ccauagugcaugagguaua

SEQ ID NO: 292563 - RNA, 19 nt, Artificial Sequence
  Description of Artificial Sequence: Synthetic oligonucleotide
ggcaaccucagagccaagu

SEQ ID NO: 292564 - RNA, 19 nt, Artificial Sequence
  Description of Artificial Sequence: Synthetic oligonucleotide
cagagagguccccuuguuu

SEQ ID NO: 292565 - RNA, 19 nt, Artificial Sequence
  Description of Artificial Sequence: Synthetic oligonucleotide
cagugcaauggggacgccu

SEQ ID NO: 292566 - RNA, 19 nt, Artificial Sequence
  Description of Artificial Sequence: Synthetic oligonucleotide
gcuaugucgacggccacuu

SEQ ID NO: 292567 - RNA, 19 nt, Artificial Sequence
  Description of Artificial Sequence: Synthetic oligonucleotide
ccguucaacuguugaggaa

SEQ ID NO: 292568 - RNA, 19 nt, Artificial Sequence
  Description of Artificial Sequence: Synthetic oligonucleotide
caauaacuuucgguauuuu

SEQ ID NO: 292569 - RNA, 19 nt, Artificial Sequence
  Description of Artificial Sequence: Synthetic oligonucleotide
ccaagcuacuucaguucua

SEQ ID NO: 292570 - RNA, 19 nt, Artificial Sequence
  Description of Artificial Sequence: Synthetic oligonucleotide
ggagucccgccaccuucuc

SEQ ID NO: 292571 - RNA, 19 nt, Artificial Sequence
  Description of Artificial Sequence: Synthetic oligonucleotide
ccaauaacuuucgguauuu

SEQ ID NO: 292572 - RNA, 19 nt, Artificial Sequence
  Description of Artificial Sequence: Synthetic oligonucleotide
caauucaggccagcccuuu

SEQ ID NO: 292573 - RNA, 19 nt, Artificial Sequence
  Description of Artificial Sequence: Synthetic oligonucleotide
cccuagucauagugccaga

SEQ ID NO: 292574 - RNA, 19 nt, Artificial Sequence
  Description of Artificial Sequence: Synthetic oligonucleotide
cgggcaaccucagagccaa

SEQ ID NO: 292575 - RNA, 19 nt, Artificial Sequence
  Description of Artificial Sequence: Synthetic oligonucleotide
ggggacgccucacacccuu

SEQ ID NO: 292576 - RNA, 19 nt, Artificial Sequence
  Description of Artificial Sequence: Synthetic oligonucleotide
gcacuagaucuugcaaaau

SEQ ID NO: 292577 - RNA, 19 nt, Artificial Sequence
  Description of Artificial Sequence: Synthetic oligonucleotide
ccccgaguaauucgcaauu

SEQ ID NO: 292578 - RNA, 19 nt, Artificial Sequence
  Description of Artificial Sequence: Synthetic oligonucleotide
ggcuuaaauugaggagcau

SEQ ID NO: 292579 - RNA, 19 nt, Artificial Sequence
  Description of Artificial Sequence: Synthetic oligonucleotide
cuccaacugguguccccuu

SEQ ID NO: 292580 - RNA, 19 nt, Artificial Sequence
  Description of Artificial Sequence: Synthetic oligonucleotide
caucaccacuaggcuccaa

SEQ ID NO: 292581 - RNA, 19 nt, Artificial Sequence
  Description of Artificial Sequence: Synthetic oligonucleotide
ggguugcaagcagccccuc

SEQ ID NO: 292582 - RNA, 19 nt, Artificial Sequence
  Description of Artificial Sequence: Synthetic oligonucleotide
cccuuguuucaacgacucu

SEQ ID NO: 292583 - RNA, 19 nt, Artificial Sequence
  Description of Artificial Sequence: Synthetic oligonucleotide
ccccuuguaccuuccuuuu

SEQ ID NO: 292584 - RNA, 19 nt, Artificial Sequence
  Description of Artificial Sequence: Synthetic oligonucleotide
ggaccauggccgagggcau

SEQ ID NO: 292585 - RNA, 19 nt, Artificial Sequence
  Description of Artificial Sequence: Synthetic oligonucleotide
cccgaguaauucgcaauuu

SEQ ID NO: 292586 - RNA, 19 nt, Artificial Sequence
  Description of Artificial Sequence: Synthetic oligonucleotide
ggguccacucuaagagauu

SEQ ID NO: 292587 - RNA, 19 nt, Artificial Sequence
  Description of Artificial Sequence: Synthetic oligonucleotide
cggagucccgccaccuucu

SEQ ID NO: 292588 - RNA, 19 nt, Artificial Sequence
  Description of Artificial Sequence: Synthetic oligonucleotide
ccgacagaucaggcuccaa

SEQ ID NO: 292589 - RNA, 19 nt, Artificial Sequence
  Description of Artificial Sequence: Synthetic oligonucleotide
cgacggccacuuggucuuc

SEQ ID NO: 292590 - RNA, 19 nt, Artificial Sequence
  Description of Artificial Sequence: Synthetic oligonucleotide
aagaauaccauuaacaucu

SEQ ID NO: 292591 - RNA, 19 nt, Artificial Sequence
  Description of Artificial Sequence: Synthetic oligonucleotide
ugaucguuggcuaugaucu

SEQ ID NO: 292592 - RNA, 19 nt, Artificial Sequence
  Description of Artificial Sequence: Synthetic oligonucleotide
gaugcgguugcccugaucg

SEQ ID NO: 292593 - RNA, 19 nt, Artificial Sequence
  Description of Artificial Sequence: Synthetic oligonucleotide
uuauuggugucauuuacgg

SEQ ID NO: 292594 - RNA, 19 nt, Artificial Sequence
  Description of Artificial Sequence: Synthetic oligonucleotide
gaugaaguguuccauaacc

SEQ ID NO: 292595 - RNA, 19 nt, Artificial Sequence
  Description of Artificial Sequence: Synthetic oligonucleotide
aauaccaaguguaagagga

SEQ ID NO: 292596 - RNA, 19 nt, Artificial Sequence
  Description of Artificial Sequence: Synthetic oligonucleotide
aauccgaguagacccaccg

SEQ ID NO: 292597 - RNA, 19 nt, Artificial Sequence
  Description of Artificial Sequence: Synthetic oligonucleotide
uucuugaacacaccaacgc

SEQ ID NO: 292598 - RNA, 19 nt, Artificial Sequence
  Description of Artificial Sequence: Synthetic oligonucleotide
ucaaauuuggcccgaguca

SEQ ID NO: 292599 - RNA, 19 nt, Artificial Sequence
  Description of Artificial Sequence: Synthetic oligonucleotide
agaguuugcuaauaauagg

SEQ ID NO: 292600 - RNA, 19 nt, Artificial Sequence
  Description of Artificial Sequence: Synthetic oligonucleotide
ucuuauccaggccauacgc

SEQ ID NO: 292601 - RNA, 19 nt, Artificial Sequence
  Description of Artificial Sequence: Synthetic oligonucleotide
aauuagaccaguguaaaua

SEQ ID NO: 292602 - RNA, 19 nt, Artificial Sequence
  Description of Artificial Sequence: Synthetic oligonucleotide
acauacgacggcgugaugc

SEQ ID NO: 292603 - RNA, 19 nt, Artificial Sequence
  Description of Artificial Sequence: Synthetic oligonucleotide
aagcauagcuuuccaacuc

SEQ ID NO: 292604 - RNA, 19 nt, Artificial Sequence
  Description of Artificial Sequence: Synthetic oligonucleotide
aguaagccggcacaguaac

SEQ ID NO: 292605 - RNA, 19 nt, Artificial Sequence
  Description of Artificial Sequence: Synthetic oligonucleotide
uaccagaucaccuguaucu

SEQ ID NO: 292606 - RNA, 19 nt, Artificial Sequence
  Description of Artificial Sequence: Synthetic oligonucleotide
ucccaaauaugcuucagca

SEQ ID NO: 292607 - RNA, 19 nt, Artificial Sequence
  Description of Artificial Sequence: Synthetic oligonucleotide
acgaggauguucuucucgc

SEQ ID NO: 292608 - RNA, 19 nt, Artificial Sequence
  Description of Artificial Sequence: Synthetic oligonucleotide
uggacuggcuucaugguag

SEQ ID NO: 292609 - RNA, 19 nt, Artificial Sequence
  Description of Artificial Sequence: Synthetic oligonucleotide
agaucaguacaccuacaac

SEQ ID NO: 292610 - RNA, 19 nt, Artificial Sequence
  Description of Artificial Sequence: Synthetic oligonucleotide
ucuugaacacaccaacgca

SEQ ID NO: 292611 - RNA, 19 nt, Artificial Sequence
  Description of Artificial Sequence: Synthetic oligonucleotide
agaguaagcauagcuuucc

SEQ ID NO: 292612 - RNA, 19 nt, Artificial Sequence
  Description of Artificial Sequence: Synthetic oligonucleotide
gcaucauugaaguaagccg

SEQ ID NO: 292613 - RNA, 19 nt, Artificial Sequence
  Description of Artificial Sequence: Synthetic oligonucleotide
ucuaucucaauucuugcuu

SEQ ID NO: 292614 - RNA, 19 nt, Artificial Sequence
  Description of Artificial Sequence: Synthetic oligonucleotide
agugcguccgaugaggcgc

SEQ ID NO: 292615 - RNA, 19 nt, Artificial Sequence
  Description of Artificial Sequence: Synthetic oligonucleotide
ugauuguuacaguuggcug

SEQ ID NO: 292616 - RNA, 19 nt, Artificial Sequence
  Description of Artificial Sequence: Synthetic oligonucleotide
gguagaucggaacaggucc

SEQ ID NO: 292617 - RNA, 19 nt, Artificial Sequence
  Description of Artificial Sequence: Synthetic oligonucleotide
gcuaauaauaggcugaaca

SEQ ID NO: 292618 - RNA, 19 nt, Artificial Sequence
  Description of Artificial Sequence: Synthetic oligonucleotide
guuaaauagaacauuucca

SEQ ID NO: 292619 - RNA, 19 nt, Artificial Sequence
  Description of Artificial Sequence: Synthetic oligonucleotide
caccagaugugcaugaccc

SEQ ID NO: 292620 - RNA, 19 nt, Artificial Sequence
  Description of Artificial Sequence: Synthetic oligonucleotide
ugaacaauuuccucuaguu

SEQ ID NO: 292621 - RNA, 19 nt, Artificial Sequence
  Description of Artificial Sequence: Synthetic oligonucleotide
ucgaagaccguguucucgg

SEQ ID NO: 292622 - RNA, 19 nt, Artificial Sequence
  Description of Artificial Sequence: Synthetic oligonucleotide
agcauagcuuuccaacucg

SEQ ID NO: 292623 - RNA, 19 nt, Artificial Sequence
  Description of Artificial Sequence: Synthetic oligonucleotide
uuccccaccgagaugagug

SEQ ID NO: 292624 - RNA, 19 nt, Artificial Sequence
  Description of Artificial Sequence: Synthetic oligonucleotide
uugauuguuacaguuggcu

SEQ ID NO: 292625 - RNA, 19 nt, Artificial Sequence
  Description of Artificial Sequence: Synthetic oligonucleotide
ugcaucauuaaccauccuu

SEQ ID NO: 292626 - RNA, 19 nt, Artificial Sequence
  Description of Artificial Sequence: Synthetic oligonucleotide
gacucuaucucaauucuug

SEQ ID NO: 292627 - RNA, 19 nt, Artificial Sequence
  Description of Artificial Sequence: Synthetic oligonucleotide
aaggccacauacgacggcg

SEQ ID NO: 292628 - RNA, 19 nt, Artificial Sequence
  Description of Artificial Sequence: Synthetic oligonucleotide
acaguaacaacugcauggg

SEQ ID NO: 292629 - RNA, 19 nt, Artificial Sequence
  Description of Artificial Sequence: Synthetic oligonucleotide
aaauuagaccaguguaaau

SEQ ID NO: 292630 - RNA, 19 nt, Artificial Sequence
  Description of Artificial Sequence: Synthetic oligonucleotide
uccgaguagacccaccgac

SEQ ID NO: 292631 - RNA, 19 nt, Artificial Sequence
  Description of Artificial Sequence: Synthetic oligonucleotide
uuuguuaggggucguucac

SEQ ID NO: 292632 - RNA, 19 nt, Artificial Sequence
  Description of Artificial Sequence: Synthetic oligonucleotide
auugguaauugugauuuug

SEQ ID NO: 292633 - RNA, 19 nt, Artificial Sequence
  Description of Artificial Sequence: Synthetic oligonucleotide
uaacccgcugaucaaaguc

SEQ ID NO: 292634 - RNA, 19 nt, Artificial Sequence
  Description of Artificial Sequence: Synthetic oligonucleotide
uuauccaggccauacgcaa

SEQ ID NO: 292635 - RNA, 19 nt, Artificial Sequence
  Description of Artificial Sequence: Synthetic oligonucleotide
aucaacuugaauguauggu

SEQ ID NO: 292636 - RNA, 19 nt, Artificial Sequence
  Description of Artificial Sequence: Synthetic oligonucleotide
ucuaacgucuuucccaguu

SEQ ID NO: 292637 - RNA, 19 nt, Artificial Sequence
  Description of Artificial Sequence: Synthetic oligonucleotide
caaauuuggcccgagucag

SEQ ID NO: 292638 - RNA, 19 nt, Artificial Sequence
  Description of Artificial Sequence: Synthetic oligonucleotide
agacccaccgacaagaaca

SEQ ID NO: 292639 - RNA, 19 nt, Artificial Sequence
  Description of Artificial Sequence: Synthetic oligonucleotide
cuuccauagaguuugcuaa

SEQ ID NO: 292640 - RNA, 19 nt, Artificial Sequence
  Description of Artificial Sequence: Synthetic oligonucleotide
cauacgacggcgugaugcg

SEQ ID NO: 292641 - RNA, 19 nt, Artificial Sequence
  Description of Artificial Sequence: Synthetic oligonucleotide
aguagacccaccgacaaga

SEQ ID NO: 292642 - RNA, 19 nt, Artificial Sequence
  Description of Artificial Sequence: Synthetic oligonucleotide
aagggucauuccaagugcg

SEQ ID NO: 292643 - RNA, 19 nt, Artificial Sequence
  Description of Artificial Sequence: Synthetic oligonucleotide
uuuaccgcccagcuuuucu

SEQ ID NO: 292644 - RNA, 19 nt, Artificial Sequence
  Description of Artificial Sequence: Synthetic oligonucleotide
cuucaugguagaucggaac

SEQ ID NO: 292645 - RNA, 19 nt, Artificial Sequence
  Description of Artificial Sequence: Synthetic oligonucleotide
aagugcguccgaugaggcg

SEQ ID NO: 292646 - RNA, 19 nt, Artificial Sequence
  Description of Artificial Sequence: Synthetic oligonucleotide
aagccggcacaguaacaac

SEQ ID NO: 292647 - RNA, 19 nt, Artificial Sequence
  Description of Artificial Sequence: Synthetic oligonucleotide
ucuccuaacgaaaguuccu

SEQ ID NO: 292648 - RNA, 19 nt, Artificial Sequence
  Description of Artificial Sequence: Synthetic oligonucleotide
caaguguaagaggacauac

SEQ ID NO: 292649 - RNA, 19 nt, Artificial Sequence
  Description of Artificial Sequence: Synthetic oligonucleotide
ucagacgcucgccuucagg

SEQ ID NO: 292650 - RNA, 19 nt, Artificial Sequence
  Description of Artificial Sequence: Synthetic oligonucleotide
guuccuacaccagaugugc

SEQ ID NO: 292651 - RNA, 19 nt, Artificial Sequence
  Description of Artificial Sequence: Synthetic oligonucleotide
ucuuugguugcuuggcgcu

SEQ ID NO: 292652 - RNA, 19 nt, Artificial Sequence
  Description of Artificial Sequence: Synthetic oligonucleotide
ccaaggugaacacacaccc

SEQ ID NO: 292653 - RNA, 19 nt, Artificial Sequence
  Description of Artificial Sequence: Synthetic oligonucleotide
acuuaaguucucucaauuu

SEQ ID NO: 292654 - RNA, 19 nt, Artificial Sequence
  Description of Artificial Sequence: Synthetic oligonucleotide
acgacgaaguuucugcaca

SEQ ID NO: 292655 - RNA, 19 nt, Artificial Sequence
  Description of Artificial Sequence: Synthetic oligonucleotide
ugaugaaguguuccauaac

SEQ ID NO: 292656 - RNA, 19 nt, Artificial Sequence
  Description of Artificial Sequence: Synthetic oligonucleotide
cauaacccgcugaucaaag

SEQ ID NO: 292657 - RNA, 19 nt, Artificial Sequence
  Description of Artificial Sequence: Synthetic oligonucleotide
cauggguaaccuucuuucc

SEQ ID NO: 292658 - RNA, 19 nt, Artificial Sequence
  Description of Artificial Sequence: Synthetic oligonucleotide
caccucacgacgaaguuuc

SEQ ID NO: 292659 - RNA, 19 nt, Artificial Sequence
  Description of Artificial Sequence: Synthetic oligonucleotide
uuacaguuggcugauuauc

SEQ ID NO: 292660 - RNA, 19 nt, Artificial Sequence
  Description of Artificial Sequence: Synthetic oligonucleotide
cuugauuguuacaguuggc

SEQ ID NO: 292661 - RNA, 19 nt, Artificial Sequence
  Description of Artificial Sequence: Synthetic oligonucleotide
uaccaaguguaagaggaca

SEQ ID NO: 292662 - RNA, 19 nt, Artificial Sequence
  Description of Artificial Sequence: Synthetic oligonucleotide
uaagccggcacaguaacaa

SEQ ID NO: 292663 - RNA, 19 nt, Artificial Sequence
  Description of Artificial Sequence: Synthetic oligonucleotide
ucagcggucgguccgucug

SEQ ID NO: 292664 - RNA, 19 nt, Artificial Sequence
  Description of Artificial Sequence: Synthetic oligonucleotide
cucgcuuagccuuuuccac

SEQ ID NO: 292665 - RNA, 19 nt, Artificial Sequence
  Description of Artificial Sequence: Synthetic oligonucleotide
caugguagaucggaacagg

SEQ ID NO: 292666 - RNA, 19 nt, Artificial Sequence
  Description of Artificial Sequence: Synthetic oligonucleotide
uuuccaaggugaacacaca

SEQ ID NO: 292667 - RNA, 19 nt, Artificial Sequence
  Description of Artificial Sequence: Synthetic oligonucleotide
gaaguaagccggcacagua

SEQ ID NO: 292668 - RNA, 19 nt, Artificial Sequence
  Description of Artificial Sequence: Synthetic oligonucleotide
uacgcaauagcagcugcug

SEQ ID NO: 292669 - RNA, 19 nt, Artificial Sequence
  Description of Artificial Sequence: Synthetic oligonucleotide
uccgcaugacauucagucc

SEQ ID NO: 292670 - RNA, 19 nt, Artificial Sequence
  Description of Artificial Sequence: Synthetic oligonucleotide
cucguuccugguaucaaug

SEQ ID NO: 292671 - RNA, 19 nt, Artificial Sequence
  Description of Artificial Sequence: Synthetic oligonucleotide
gaaaguuuaccgcccagcu

SEQ ID NO: 292672 - RNA, 19 nt, Artificial Sequence
  Description of Artificial Sequence: Synthetic oligonucleotide
gguaucaaugcgcucuuug

SEQ ID NO: 292673 - RNA, 19 nt, Artificial Sequence
  Description of Artificial Sequence: Synthetic oligonucleotide
ugcugaaucuugggaaucc

SEQ ID NO: 292674 - RNA, 19 nt, Artificial Sequence
  Description of Artificial Sequence: Synthetic oligonucleotide
uccuaacgaaaguuccuga

SEQ ID NO: 292675 - RNA, 19 nt, Artificial Sequence
  Description of Artificial Sequence: Synthetic oligonucleotide
ccaacgcaggaauaggugg

SEQ ID NO: 292676 - RNA, 19 nt, Artificial Sequence
  Description of Artificial Sequence: Synthetic oligonucleotide
auucguggccaccacuuca

SEQ ID NO: 292677 - RNA, 19 nt, Artificial Sequence
  Description of Artificial Sequence: Synthetic oligonucleotide
ugguaauugugauuuuguu

SEQ ID NO: 292678 - RNA, 19 nt, Artificial Sequence
  Description of Artificial Sequence: Synthetic oligonucleotide
aaauuuggcccgagucagg

SEQ ID NO: 292679 - RNA, 19 nt, Artificial Sequence
  Description of Artificial Sequence: Synthetic oligonucleotide
uacaccuacaacucaucuu

SEQ ID NO: 292680 - RNA, 19 nt, Artificial Sequence
  Description of Artificial Sequence: Synthetic oligonucleotide
ggccauacgcaauagcagc

SEQ ID NO: 292681 - RNA, 19 nt, Artificial Sequence
  Description of Artificial Sequence: Synthetic oligonucleotide
ggucauuccaagugcgucc

SEQ ID NO: 292682 - RNA, 19 nt, Artificial Sequence
  Description of Artificial Sequence: Synthetic oligonucleotide
uccuacaccagaugugcau

SEQ ID NO: 292683 - RNA, 19 nt, Artificial Sequence
  Description of Artificial Sequence: Synthetic oligonucleotide
uguaugguuuaguuuucuu

SEQ ID NO: 292684 - RNA, 19 nt, Artificial Sequence
  Description of Artificial Sequence: Synthetic oligonucleotide
auaccaaguguaagaggac

SEQ ID NO: 292685 - RNA, 19 nt, Artificial Sequence
  Description of Artificial Sequence: Synthetic oligonucleotide
gguuuaugccacgggaugg

SEQ ID NO: 292686 - RNA, 19 nt, Artificial Sequence
  Description of Artificial Sequence: Synthetic oligonucleotide
cgcaucgccaaucagacgc

SEQ ID NO: 292687 - RNA, 19 nt, Artificial Sequence
  Description of Artificial Sequence: Synthetic oligonucleotide
gacggcgugaugcgguugc

SEQ ID NO: 292688 - RNA, 19 nt, Artificial Sequence
  Description of Artificial Sequence: Synthetic oligonucleotide
gucgaagaccguguucucg

SEQ ID NO: 292689 - RNA, 19 nt, Artificial Sequence
  Description of Artificial Sequence: Synthetic oligonucleotide
uuugcccaccuccaauauc

SEQ ID NO: 292690 - RNA, 19 nt, Artificial Sequence
  Description of Artificial Sequence: Synthetic oligonucleotide
caccguaugcuacagccuc

SEQ ID NO: 292691 - RNA, 19 nt, Artificial Sequence
  Description of Artificial Sequence: Synthetic oligonucleotide
uacgacggcgugaugcggu

SEQ ID NO: 292692 - RNA, 19 nt, Artificial Sequence
  Description of Artificial Sequence: Synthetic oligonucleotide
uuguuaggggucguucacc

SEQ ID NO: 292693 - RNA, 19 nt, Artificial Sequence
  Description of Artificial Sequence: Synthetic oligonucleotide
caagugcguccgaugaggc

SEQ ID NO: 292694 - RNA, 19 nt, Artificial Sequence
  Description of Artificial Sequence: Synthetic oligonucleotide
uucguggccaccacuucaa

SEQ ID NO: 292695 - RNA, 19 nt, Artificial Sequence
  Description of Artificial Sequence: Synthetic oligonucleotide
gaguagacccaccgacaag

SEQ ID NO: 292696 - RNA, 19 nt, Artificial Sequence
  Description of Artificial Sequence: Synthetic oligonucleotide
uuaugccacgggauggcuc

SEQ ID NO: 292697 - RNA, 19 nt, Artificial Sequence
  Description of Artificial Sequence: Synthetic oligonucleotide
uucgagacuuaaguucucu

SEQ ID NO: 292698 - RNA, 19 nt, Artificial Sequence
  Description of Artificial Sequence: Synthetic oligonucleotide
ucgagacuuaaguucucuc

SEQ ID NO: 292699 - RNA, 19 nt, Artificial Sequence
  Description of Artificial Sequence: Synthetic oligonucleotide
cuccuaacgaaaguuccug

SEQ ID NO: 292700 - RNA, 19 nt, Artificial Sequence
  Description of Artificial Sequence: Synthetic oligonucleotide
gugucaggcgauuuugguc

SEQ ID NO: 292701 - RNA, 19 nt, Artificial Sequence
  Description of Artificial Sequence: Synthetic oligonucleotide
uagacccaccgacaagaac

SEQ ID NO: 292702 - RNA, 19 nt, Artificial Sequence
  Description of Artificial Sequence: Synthetic oligonucleotide
auaacccgcugaucaaagu

SEQ ID NO: 292703 - RNA, 19 nt, Artificial Sequence
  Description of Artificial Sequence: Synthetic oligonucleotide
uagugagaaccauggcaga

SEQ ID NO: 292704 - RNA, 19 nt, Artificial Sequence
  Description of Artificial Sequence: Synthetic oligonucleotide
gcauggguaaccuucuuuc

SEQ ID NO: 292705 - RNA, 19 nt, Artificial Sequence
  Description of Artificial Sequence: Synthetic oligonucleotide
ugagggcgacagaagcacc

SEQ ID NO: 292706 - RNA, 19 nt, Artificial Sequence
  Description of Artificial Sequence: Synthetic oligonucleotide
guuuaugccacgggauggc

SEQ ID NO: 292707 - RNA, 19 nt, Artificial Sequence
  Description of Artificial Sequence: Synthetic oligonucleotide
cuaugaucuccacgcggcc

SEQ ID NO: 292708 - RNA, 19 nt, Artificial Sequence
  Description of Artificial Sequence: Synthetic oligonucleotide
uccauaacccgcugaucaa

SEQ ID NO: 292709 - RNA, 19 nt, Artificial Sequence
  Description of Artificial Sequence: Synthetic oligonucleotide
cugucacucgaagaauacc

SEQ ID NO: 292710 - RNA, 19 nt, Artificial Sequence
  Description of Artificial Sequence: Synthetic oligonucleotide
cacgacgaaguuucugcac

SEQ ID NO: 292711 - RNA, 19 nt, Artificial Sequence
  Description of Artificial Sequence: Synthetic oligonucleotide
uuccuacaccagaugugca

SEQ ID NO: 292712 - RNA, 19 nt, Artificial Sequence
  Description of Artificial Sequence: Synthetic oligonucleotide
gaucugagggcgacagaag

SEQ ID NO: 292713 - RNA, 19 nt, Artificial Sequence
  Description of Artificial Sequence: Synthetic oligonucleotide
cagacgcucgccuucagga

SEQ ID NO: 292714 - RNA, 19 nt, Artificial Sequence
  Description of Artificial Sequence: Synthetic oligonucleotide
gaaggccacauacgacggc

SEQ ID NO: 292715 - RNA, 19 nt, Artificial Sequence
  Description of Artificial Sequence: Synthetic oligonucleotide
uacagcccuagcagaucag

SEQ ID NO: 292716 - RNA, 19 nt, Artificial Sequence
  Description of Artificial Sequence: Synthetic oligonucleotide
aggccauacgcaauagcag

SEQ ID NO: 292717 - RNA, 19 nt, Artificial Sequence
  Description of Artificial Sequence: Synthetic oligonucleotide
gcuaugaucuccacgcggc

SEQ ID NO: 292718 - RNA, 19 nt, Artificial Sequence
  Description of Artificial Sequence: Synthetic oligonucleotide
aggcgauuuuggucauugg

SEQ ID NO: 292719 - RNA, 19 nt, Artificial Sequence
  Description of Artificial Sequence: Synthetic oligonucleotide
caucuugccggcgcugugg

SEQ ID NO: 292720 - RNA, 19 nt, Artificial Sequence
  Description of Artificial Sequence: Synthetic oligonucleotide
uuccugaguccaauauuua

SEQ ID NO: 292721 - RNA, 19 nt, Artificial Sequence
  Description of Artificial Sequence: Synthetic oligonucleotide
agaugugcaugacccaauu

SEQ ID NO: 292722 - RNA, 19 nt, Artificial Sequence
  Description of Artificial Sequence: Synthetic oligonucleotide
ggaauaggugguccccagg

SEQ ID NO: 292723 - RNA, 19 nt, Artificial Sequence
  Description of Artificial Sequence: Synthetic oligonucleotide
ugaaguaagccggcacagu

SEQ ID NO: 292724 - RNA, 19 nt, Artificial Sequence
  Description of Artificial Sequence: Synthetic oligonucleotide
accaacgcaggaauaggug

SEQ ID NO: 292725 - RNA, 19 nt, Artificial Sequence
  Description of Artificial Sequence: Synthetic oligonucleotide
cagaucaguacaccuacaa

SEQ ID NO: 292726 - RNA, 19 nt, Artificial Sequence
  Description of Artificial Sequence: Synthetic oligonucleotide
cuuuuccaccucacgacga

SEQ ID NO: 292727 - RNA, 19 nt, Artificial Sequence
  Description of Artificial Sequence: Synthetic oligonucleotide
uuuaugccacgggauggcu

SEQ ID NO: 292728 - RNA, 19 nt, Artificial Sequence
  Description of Artificial Sequence: Synthetic oligonucleotide
gaccguguucucgggauug

SEQ ID NO: 292729 - RNA, 19 nt, Artificial Sequence
  Description of Artificial Sequence: Synthetic oligonucleotide
cguucuugaacacaccaac

SEQ ID NO: 292730 - RNA, 19 nt, Artificial Sequence
  Description of Artificial Sequence: Synthetic oligonucleotide
cacgcggccguucuugaac

SEQ ID NO: 292731 - RNA, 19 nt, Artificial Sequence
  Description of Artificial Sequence: Synthetic oligonucleotide
cuugggcuauagcauuuuc

SEQ ID NO: 292732 - RNA, 19 nt, Artificial Sequence
  Description of Artificial Sequence: Synthetic oligonucleotide
augguagaucggaacaggu

SEQ ID NO: 292733 - RNA, 19 nt, Artificial Sequence
  Description of Artificial Sequence: Synthetic oligonucleotide
ugcuaauaauaggcugaac

SEQ ID NO: 292734 - RNA, 19 nt, Artificial Sequence
  Description of Artificial Sequence: Synthetic oligonucleotide
cucuaucucaauucuugcu

SEQ ID NO: 292735 - RNA, 19 nt, Artificial Sequence
  Description of Artificial Sequence: Synthetic oligonucleotide
gaauccgaguagacccacc

SEQ ID NO: 292736 - RNA, 19 nt, Artificial Sequence
  Description of Artificial Sequence: Synthetic oligonucleotide
guacccagaagaugguugu

SEQ ID NO: 292737 - RNA, 19 nt, Artificial Sequence
  Description of Artificial Sequence: Synthetic oligonucleotide
auccgaguagacccaccga

SEQ ID NO: 292738 - RNA, 19 nt, Artificial Sequence
  Description of Artificial Sequence: Synthetic oligonucleotide
guagaucggaacaggucca

SEQ ID NO: 292739 - RNA, 19 nt, Artificial Sequence
  Description of Artificial Sequence: Synthetic oligonucleotide
accaaguguaagaggacau

SEQ ID NO: 292740 - RNA, 19 nt, Artificial Sequence
  Description of Artificial Sequence: Synthetic oligonucleotide
cuggcaagagcaggccgcg

SEQ ID NO: 292741 - RNA, 19 nt, Artificial Sequence
  Description of Artificial Sequence: Synthetic oligonucleotide
cggcguuccgaucugaggg

SEQ ID NO: 292742 - RNA, 19 nt, Artificial Sequence
  Description of Artificial Sequence: Synthetic oligonucleotide
auacgacggcgugaugcgg

SEQ ID NO: 292743 - RNA, 19 nt, Artificial Sequence
  Description of Artificial Sequence: Synthetic oligonucleotide
acgcggccguucuugaaca

SEQ ID NO: 292744 - RNA, 19 nt, Artificial Sequence
  Description of Artificial Sequence: Synthetic oligonucleotide
ucuuuuguuaggggucguu

SEQ ID NO: 292745 - RNA, 19 nt, Artificial Sequence
  Description of Artificial Sequence: Synthetic oligonucleotide
uggugucauuuacgguaga

SEQ ID NO: 292746 - RNA, 19 nt, Artificial Sequence
  Description of Artificial Sequence: Synthetic oligonucleotide
cuuugguugcuuggcgcug

SEQ ID NO: 292747 - RNA, 19 nt, Artificial Sequence
  Description of Artificial Sequence: Synthetic oligonucleotide
uucuaacgucuuucccagu

SEQ ID NO: 292748 - RNA, 19 nt, Artificial Sequence
  Description of Artificial Sequence: Synthetic oligonucleotide
gcgacagaagcaccccggg

SEQ ID NO: 292749 - RNA, 19 nt, Artificial Sequence
  Description of Artificial Sequence: Synthetic oligonucleotide
cauucguggccaccacuuc

SEQ ID NO: 292750 - RNA, 19 nt, Artificial Sequence
  Description of Artificial Sequence: Synthetic oligonucleotide
ggcgauuuuggucauuggu

SEQ ID NO: 292751 - RNA, 19 nt, Artificial Sequence
  Description of Artificial Sequence: Synthetic oligonucleotide
accguguucucgggauugg

SEQ ID NO: 292752 - RNA, 19 nt, Artificial Sequence
  Description of Artificial Sequence: Synthetic oligonucleotide
gaggcgcuuggcgucgaag

SEQ ID NO: 292753 - RNA, 19 nt, Artificial Sequence
  Description of Artificial Sequence: Synthetic oligonucleotide
ggcguuccgaucugagggc

SEQ ID NO: 292754 - RNA, 19 nt, Artificial Sequence
  Description of Artificial Sequence: Synthetic oligonucleotide
agacaggcucaaaggaggu

SEQ ID NO: 292755 - RNA, 19 nt, Artificial Sequence
  Description of Artificial Sequence: Synthetic oligonucleotide
uggccgcaucgccaaucag

SEQ ID NO: 292756 - RNA, 19 nt, Artificial Sequence
  Description of Artificial Sequence: Synthetic oligonucleotide
ugcccugaucguuggcuau

SEQ ID NO: 292757 - RNA, 19 nt, Artificial Sequence
  Description of Artificial Sequence: Synthetic oligonucleotide
guuccgaucugagggcgac

SEQ ID NO: 292758 - RNA, 19 nt, Artificial Sequence
  Description of Artificial Sequence: Synthetic oligonucleotide
cuuggccgcaucgccaauc

SEQ ID NO: 292759 - RNA, 19 nt, Artificial Sequence
  Description of Artificial Sequence: Synthetic oligonucleotide
gcggcguuccgaucugagg

SEQ ID NO: 292760 - RNA, 19 nt, Artificial Sequence
  Description of Artificial Sequence: Synthetic oligonucleotide
guugcccugaucguuggcu

SEQ ID NO: 292761 - RNA, 19 nt, Artificial Sequence
  Description of Artificial Sequence: Synthetic oligonucleotide
ggucgguccgucugcaguc

SEQ ID NO: 292762 - RNA, 19 nt, Artificial Sequence
  Description of Artificial Sequence: Synthetic oligonucleotide
gccgcaucgccaaucagac

SEQ ID NO: 292763 - RNA, 19 nt, Artificial Sequence
  Description of Artificial Sequence: Synthetic oligonucleotide
agcgcggcggcguuccgau

SEQ ID NO: 292764 - RNA, 19 nt, Artificial Sequence
  Description of Artificial Sequence: Synthetic oligonucleotide
acggcgugaugcgguugcc

SEQ ID NO: 292765 - RNA, 19 nt, Artificial Sequence
  Description of Artificial Sequence: Synthetic oligonucleotide
ucguggccaccacuucaaa

SEQ ID NO: 292766 - RNA, 19 nt, Artificial Sequence
  Description of Artificial Sequence: Synthetic oligonucleotide
uacccagaagaugguuguc

SEQ ID NO: 292767 - RNA, 19 nt, Artificial Sequence
  Description of Artificial Sequence: Synthetic oligonucleotide
agggucauuccaagugcgu

SEQ ID NO: 292768 - RNA, 19 nt, Artificial Sequence
  Description of Artificial Sequence: Synthetic oligonucleotide
gggucauuccaagugcguc

SEQ ID NO: 292769 - RNA, 19 nt, Artificial Sequence
  Description of Artificial Sequence: Synthetic oligonucleotide
gacccaccgacaagaacaa

SEQ ID NO: 292770 - RNA, 19 nt, Artificial Sequence
  Description of Artificial Sequence: Synthetic oligonucleotide
ggccgcaucgccaaucaga

SEQ ID NO: 292771 - RNA, 19 nt, Artificial Sequence
  Description of Artificial Sequence: Synthetic oligonucleotide
accguaugcuacagccuca

SEQ ID NO: 292772 - RNA, 19 nt, Artificial Sequence
  Description of Artificial Sequence: Synthetic oligonucleotide
ggugucaggcgauuuuggu

SEQ ID NO: 292773 - RNA, 19 nt, Artificial Sequence
  Description of Artificial Sequence: Synthetic oligonucleotide
caaggugaacacacacccu

SEQ ID NO: 292774 - RNA, 19 nt, Artificial Sequence
  Description of Artificial Sequence: Synthetic oligonucleotide
guaagccggcacaguaaca

SEQ ID NO: 292775 - RNA, 19 nt, Artificial Sequence
  Description of Artificial Sequence: Synthetic oligonucleotide
gcguuccgaucugagggcg

SEQ ID NO: 292776 - RNA, 19 nt, Artificial Sequence
  Description of Artificial Sequence: Synthetic oligonucleotide
ggaauccgaguagacccac

SEQ ID NO: 292777 - RNA, 19 nt, Artificial Sequence
  Description of Artificial Sequence: Synthetic oligonucleotide
gguaaccuucuuucccaaa

SEQ ID NO: 292778 - RNA, 19 nt, Artificial Sequence
  Description of Artificial Sequence: Synthetic oligonucleotide
aggccgcggcgcuuaccuc

SEQ ID NO: 292779 - RNA, 19 nt, Artificial Sequence
  Description of Artificial Sequence: Synthetic oligonucleotide
ccggcacaguaacaacugc

SEQ ID NO: 292780 - RNA, 19 nt, Artificial Sequence
  Description of Artificial Sequence: Synthetic oligonucleotide
cagaagcaccccgggucag

SEQ ID NO: 292781 - RNA, 19 nt, Artificial Sequence
  Description of Artificial Sequence: Synthetic oligonucleotide
gcgcuuggcgucgaagacc

SEQ ID NO: 292782 - RNA, 19 nt, Artificial Sequence
  Description of Artificial Sequence: Synthetic oligonucleotide
gcagcaccguaugcuacag

SEQ ID NO: 292783 - RNA, 19 nt, Artificial Sequence
  Description of Artificial Sequence: Synthetic oligonucleotide
ggcgucgaagaccguguuc

SEQ ID NO: 292784 - RNA, 19 nt, Artificial Sequence
  Description of Artificial Sequence: Synthetic oligonucleotide
acgacggcgugaugcgguu

SEQ ID NO: 292785 - RNA, 19 nt, Artificial Sequence
  Description of Artificial Sequence: Synthetic oligonucleotide
cggccguucuugaacacac

SEQ ID NO: 292786 - RNA, 19 nt, Artificial Sequence
  Description of Artificial Sequence: Synthetic oligonucleotide
cacauacgacggcgugaug

SEQ ID NO: 292787 - RNA, 19 nt, Artificial Sequence
  Description of Artificial Sequence: Synthetic oligonucleotide
guagacccaccgacaagaa

SEQ ID NO: 292788 - RNA, 19 nt, Artificial Sequence
  Description of Artificial Sequence: Synthetic oligonucleotide
gggaauccgaguagaccca

SEQ ID NO: 292789 - RNA, 19 nt, Artificial Sequence
  Description of Artificial Sequence: Synthetic oligonucleotide
ccgaguagacccaccgaca

SEQ ID NO: 292790 - RNA, 19 nt, Artificial Sequence
  Description of Artificial Sequence: Synthetic oligonucleotide
guuuaccgcccagcuuuuc

SEQ ID NO: 292791 - RNA, 19 nt, Artificial Sequence
  Description of Artificial Sequence: Synthetic oligonucleotide
aggccacauacgacggcgu

SEQ ID NO: 292792 - RNA, 19 nt, Artificial Sequence
  Description of Artificial Sequence: Synthetic oligonucleotide
gccacauacgacggcguga

SEQ ID NO: 292793 - RNA, 19 nt, Artificial Sequence
  Description of Artificial Sequence: Synthetic oligonucleotide
aguuuaccgcccagcuuuu

SEQ ID NO: 292794 - RNA, 19 nt, Artificial Sequence
  Description of Artificial Sequence: Synthetic oligonucleotide
agcggucgguccgucugca

SEQ ID NO: 292795 - RNA, 19 nt, Artificial Sequence
  Description of Artificial Sequence: Synthetic oligonucleotide
ccacgggauggcuccuugc

SEQ ID NO: 292796 - RNA, 19 nt, Artificial Sequence
  Description of Artificial Sequence: Synthetic oligonucleotide
cagaugugcaugacccaau

SEQ ID NO: 292797 - RNA, 19 nt, Artificial Sequence
  Description of Artificial Sequence: Synthetic oligonucleotide
ccagaugugcaugacccaa

SEQ ID NO: 292798 - RNA, 19 nt, Artificial Sequence
  Description of Artificial Sequence: Synthetic oligonucleotide
ggcggcguuccgaucugag

SEQ ID NO: 292799 - RNA, 19 nt, Artificial Sequence
  Description of Artificial Sequence: Synthetic oligonucleotide
cgaucugagggcgacagaa

SEQ ID NO: 292800 - RNA, 19 nt, Artificial Sequence
  Description of Artificial Sequence: Synthetic oligonucleotide
ccgcaucgccaaucagacg

SEQ ID NO: 292801 - RNA, 19 nt, Artificial Sequence
  Description of Artificial Sequence: Synthetic oligonucleotide
gcccugaucguuggcuaug

SEQ ID NO: 292802 - RNA, 19 nt, Artificial Sequence
  Description of Artificial Sequence: Synthetic oligonucleotide
gcagaucaguacaccuaca

SEQ ID NO: 292803 - RNA, 19 nt, Artificial Sequence
  Description of Artificial Sequence: Synthetic oligonucleotide
ggccguucuugaacacacc

SEQ ID NO: 292804 - RNA, 19 nt, Artificial Sequence
  Description of Artificial Sequence: Synthetic oligonucleotide
cccgcugaucaaagucuuc

SEQ ID NO: 292805 - RNA, 19 nt, Artificial Sequence
  Description of Artificial Sequence: Synthetic oligonucleotide
accucacgacgaaguuucu

SEQ ID NO: 292806 - RNA, 19 nt, Artificial Sequence
  Description of Artificial Sequence: Synthetic oligonucleotide
ccauaacccgcugaucaaa

SEQ ID NO: 292807 - RNA, 19 nt, Artificial Sequence
  Description of Artificial Sequence: Synthetic oligonucleotide
ccaaguguaagaggacaua

SEQ ID NO: 292808 - RNA, 19 nt, Artificial Sequence
  Description of Artificial Sequence: Synthetic oligonucleotide
gcggccguucuugaacaca

SEQ ID NO: 292809 - RNA, 19 nt, Artificial Sequence
  Description of Artificial Sequence: Synthetic oligonucleotide
ccauucguggccaccacuu

SEQ ID NO: 292810 - RNA, 19 nt, Artificial Sequence
  Description of Artificial Sequence: Synthetic oligonucleotide
acccaccgacaagaacaau

SEQ ID NO: 292811 - RNA, 19 nt, Artificial Sequence
  Description of Artificial Sequence: Synthetic oligonucleotide
caccuacaacucaucuuuu

SEQ ID NO: 292812 - RNA, 19 nt, Artificial Sequence
  Description of Artificial Sequence: Synthetic oligonucleotide
gcggucgguccgucugcag

SEQ ID NO: 292813 - RNA, 19 nt, Artificial Sequence
  Description of Artificial Sequence: Synthetic oligonucleotide
gucuuuuguuaggggucgu

SEQ ID NO: 292814 - RNA, 19 nt, Artificial Sequence
  Description of Artificial Sequence: Synthetic oligonucleotide
ggagcgcggcggcguuccg

SEQ ID NO: 292815 - RNA, 19 nt, Artificial Sequence
  Description of Artificial Sequence: Synthetic oligonucleotide
cucagcggucgguccgucu

SEQ ID NO: 292816 - RNA, 19 nt, Artificial Sequence
  Description of Artificial Sequence: Synthetic oligonucleotide
gucgguccgucugcagucu

SEQ ID NO: 292817 - RNA, 19 nt, Artificial Sequence
  Description of Artificial Sequence: Synthetic oligonucleotide
ggacucuaucucaauucuu

SEQ ID NO: 292818 - RNA, 19 nt, Artificial Sequence
  Description of Artificial Sequence: Synthetic oligonucleotide
ccgcaccgcgcagagcagc

SEQ ID NO: 292819 - RNA, 19 nt, Artificial Sequence
  Description of Artificial Sequence: Synthetic oligonucleotide
cgucgaagaccguguucuc

SEQ ID NO: 292820 - RNA, 19 nt, Artificial Sequence
  Description of Artificial Sequence: Synthetic oligonucleotide
cccugaucguuggcuauga

SEQ ID NO: 292821 - RNA, 19 nt, Artificial Sequence
  Description of Artificial Sequence: Synthetic oligonucleotide
ccacauacgacggcgugau

SEQ ID NO: 292822 - RNA, 19 nt, Artificial Sequence
  Description of Artificial Sequence: Synthetic oligonucleotide
gugcguccgaugaggcgcu

SEQ ID NO: 292823 - RNA, 19 nt, Artificial Sequence
  Description of Artificial Sequence: Synthetic oligonucleotide
cggcgugaugcgguugccc

SEQ ID NO: 292824 - RNA, 19 nt, Artificial Sequence
  Description of Artificial Sequence: Synthetic oligonucleotide
cagggcucgcuuagccuuu

SEQ ID NO: 292825 - RNA, 19 nt, Artificial Sequence
  Description of Artificial Sequence: Synthetic oligonucleotide
cguuccgaucugagggcga

SEQ ID NO: 292826 - RNA, 19 nt, Artificial Sequence
  Description of Artificial Sequence: Synthetic oligonucleotide
cggagcgcggcggcguucc

SEQ ID NO: 292827 - RNA, 19 nt, Artificial Sequence
  Description of Artificial Sequence: Synthetic oligonucleotide
ugcguccgaugaggcgcuu

SEQ ID NO: 292828 - RNA, 19 nt, Artificial Sequence
  Description of Artificial Sequence: Synthetic oligonucleotide
gcaggccgcggcgcuuacc

SEQ ID NO: 292829 - RNA, 19 nt, Artificial Sequence
  Description of Artificial Sequence: Synthetic oligonucleotide
ccguguucucgggauugga

SEQ ID NO: 292830 - RNA, 19 nt, Artificial Sequence
  Description of Artificial Sequence: Synthetic oligonucleotide
ccccaaccccaagacaugu

SEQ ID NO: 292831 - RNA, 19 nt, Artificial Sequence
  Description of Artificial Sequence: Synthetic oligonucleotide
ccaccucacgacgaaguuu

SEQ ID NO: 292832 - RNA, 19 nt, Artificial Sequence
  Description of Artificial Sequence: Synthetic oligonucleotide
cggucgguccgucugcagu

SEQ ID NO: 292833 - RNA, 19 nt, Artificial Sequence
  Description of Artificial Sequence: Synthetic oligonucleotide
cgacggcgugaugcgguug

SEQ ID NO: 292834 - RNA, 19 nt, Artificial Sequence
  Description of Artificial Sequence: Synthetic oligonucleotide
ccguaugcuacagccucau

SEQ ID NO: 292835 - RNA, 19 nt, Artificial Sequence
  Description of Artificial Sequence: Synthetic oligonucleotide
ccgcccagcuuuucuuuau

SEQ ID NO: 292836 - RNA, 19 nt, Artificial Sequence
  Description of Artificial Sequence: Synthetic oligonucleotide
ccugaucguuggcuaugau

SEQ ID NO: 292837 - RNA, 19 nt, Artificial Sequence
  Description of Artificial Sequence: Synthetic oligonucleotide
ccggagcgcggcggcguuc

SEQ ID NO: 292838 - RNA, 19 nt, Artificial Sequence
  Description of Artificial Sequence: Synthetic oligonucleotide
uuggucauaagcuugaugg

SEQ ID NO: 292839 - RNA, 19 nt, Artificial Sequence
  Description of Artificial Sequence: Synthetic oligonucleotide
acauagaaugccuugaaac

SEQ ID NO: 292840 - RNA, 19 nt, Artificial Sequence
  Description of Artificial Sequence: Synthetic oligonucleotide
aucgucuguaaucagauac

SEQ ID NO: 292841 - RNA, 19 nt, Artificial Sequence
  Description of Artificial Sequence: Synthetic oligonucleotide
uacacugcgauucaccugg

SEQ ID NO: 292842 - RNA, 19 nt, Artificial Sequence
  Description of Artificial Sequence: Synthetic oligonucleotide
gaguauaccaacgagaagc

SEQ ID NO: 292843 - RNA, 19 nt, Artificial Sequence
  Description of Artificial Sequence: Synthetic oligonucleotide
uauaccaacgagaagcaca

SEQ ID NO: 292844 - RNA, 19 nt, Artificial Sequence
  Description of Artificial Sequence: Synthetic oligonucleotide
gauaaaagcuuccaucagc

SEQ ID NO: 292845 - RNA, 19 nt, Artificial Sequence
  Description of Artificial Sequence: Synthetic oligonucleotide
aagccgauuaucuuggugu

SEQ ID NO: 292846 - RNA, 19 nt, Artificial Sequence
  Description of Artificial Sequence: Synthetic oligonucleotide
ucugaacuugugaacauag

SEQ ID NO: 292847 - RNA, 19 nt, Artificial Sequence
  Description of Artificial Sequence: Synthetic oligonucleotide
gaaaccaugaucaagugga

SEQ ID NO: 292848 - RNA, 19 nt, Artificial Sequence
  Description of Artificial Sequence: Synthetic oligonucleotide
aaucagauacuccugaauu

SEQ ID NO: 292849 - RNA, 19 nt, Artificial Sequence
  Description of Artificial Sequence: Synthetic oligonucleotide
ucagugauaucucacacuc

SEQ ID NO: 292850 - RNA, 19 nt, Artificial Sequence
  Description of Artificial Sequence: Synthetic oligonucleotide
ugaacaaccuagacaaggc

SEQ ID NO: 292851 - RNA, 19 nt, Artificial Sequence
  Description of Artificial Sequence: Synthetic oligonucleotide
agaaaccaugaucaagugg

SEQ ID NO: 292852 - RNA, 19 nt, Artificial Sequence
  Description of Artificial Sequence: Synthetic oligonucleotide
uguaccgcucaccagaaac

SEQ ID NO: 292853 - RNA, 19 nt, Artificial Sequence
  Description of Artificial Sequence: Synthetic oligonucleotide
ugugcuuacaagcgccugg

SEQ ID NO: 292854 - RNA, 19 nt, Artificial Sequence
  Description of Artificial Sequence: Synthetic oligonucleotide
uggaguauaccaacgagaa

SEQ ID NO: 292855 - RNA, 19 nt, Artificial Sequence
  Description of Artificial Sequence: Synthetic oligonucleotide
uacgcuaagcucaucuucc

SEQ ID NO: 292856 - RNA, 19 nt, Artificial Sequence
  Description of Artificial Sequence: Synthetic oligonucleotide
ugcggagggagcaaguggg

SEQ ID NO: 292857 - RNA, 19 nt, Artificial Sequence
  Description of Artificial Sequence: Synthetic oligonucleotide
aaagcguagccguuugcag

SEQ ID NO: 292858 - RNA, 19 nt, Artificial Sequence
  Description of Artificial Sequence: Synthetic oligonucleotide
uaaguacugcaaaggaacc

SEQ ID NO: 292859 - RNA, 19 nt, Artificial Sequence
  Description of Artificial Sequence: Synthetic oligonucleotide
ucaccggccugacacaugg

SEQ ID NO: 292860 - RNA, 19 nt, Artificial Sequence
  Description of Artificial Sequence: Synthetic oligonucleotide
auggguucgggcuacaugu

SEQ ID NO: 292861 - RNA, 19 nt, Artificial Sequence
  Description of Artificial Sequence: Synthetic oligonucleotide
gaugcaggccugcacaucc

SEQ ID NO: 292862 - RNA, 19 nt, Artificial Sequence
  Description of Artificial Sequence: Synthetic oligonucleotide
cugaacaaccuagacaagg

SEQ ID NO: 292863 - RNA, 19 nt, Artificial Sequence
  Description of Artificial Sequence: Synthetic oligonucleotide
uggauaggaguguagcugc

SEQ ID NO: 292864 - RNA, 19 nt, Artificial Sequence
  Description of Artificial Sequence: Synthetic oligonucleotide
uccaucauguucgaggagc

SEQ ID NO: 292865 - RNA, 19 nt, Artificial Sequence
  Description of Artificial Sequence: Synthetic oligonucleotide
uggguaaguacugcaaagg

SEQ ID NO: 292866 - RNA, 19 nt, Artificial Sequence
  Description of Artificial Sequence: Synthetic oligonucleotide
auuguugggcuauacgugu

SEQ ID NO: 292867 - RNA, 19 nt, Artificial Sequence
  Description of Artificial Sequence: Synthetic oligonucleotide
auuggcaaguuuaugcggg

SEQ ID NO: 292868 - RNA, 19 nt, Artificial Sequence
  Description of Artificial Sequence: Synthetic oligonucleotide
cauagaaugccuugaaaca

SEQ ID NO: 292869 - RNA, 19 nt, Artificial Sequence
  Description of Artificial Sequence: Synthetic oligonucleotide
ucccgagagacccaggccc

SEQ ID NO: 292870 - RNA, 19 nt, Artificial Sequence
  Description of Artificial Sequence: Synthetic oligonucleotide
aaccccuagcacauguugc

SEQ ID NO: 292871 - RNA, 19 nt, Artificial Sequence
  Description of Artificial Sequence: Synthetic oligonucleotide
uauacguguccauugugcu

SEQ ID NO: 292872 - RNA, 19 nt, Artificial Sequence
  Description of Artificial Sequence: Synthetic oligonucleotide
aacauagaaugccuugaaa

SEQ ID NO: 292873 - RNA, 19 nt, Artificial Sequence
  Description of Artificial Sequence: Synthetic oligonucleotide
uauggguaaguacugcaaa

SEQ ID NO: 292874 - RNA, 19 nt, Artificial Sequence
  Description of Artificial Sequence: Synthetic oligonucleotide
auggguaaguacugcaaag

SEQ ID NO: 292875 - RNA, 19 nt, Artificial Sequence
  Description of Artificial Sequence: Synthetic oligonucleotide
aacaaccuagacaaggccu

SEQ ID NO: 292876 - RNA, 19 nt, Artificial Sequence
  Description of Artificial Sequence: Synthetic oligonucleotide
auaccaacgagaagcacac

SEQ ID NO: 292877 - RNA, 19 nt, Artificial Sequence
  Description of Artificial Sequence: Synthetic oligonucleotide
gaugcuagccuuuucugga

SEQ ID NO: 292878 - RNA, 19 nt, Artificial Sequence
  Description of Artificial Sequence: Synthetic oligonucleotide
gaacaaccuagacaaggcc

SEQ ID NO: 292879 - RNA, 19 nt, Artificial Sequence
  Description of Artificial Sequence: Synthetic oligonucleotide
cucaccaauaccacauccc

SEQ ID NO: 292880 - RNA, 19 nt, Artificial Sequence
  Description of Artificial Sequence: Synthetic oligonucleotide
ugguacaaagcguagccgu

SEQ ID NO: 292881 - RNA, 19 nt, Artificial Sequence
  Description of Artificial Sequence: Synthetic oligonucleotide
acuguaguaguuuucuaaa

SEQ ID NO: 292882 - RNA, 19 nt, Artificial Sequence
  Description of Artificial Sequence: Synthetic oligonucleotide
aguacuguaguaguuuucu

SEQ ID NO: 292883 - RNA, 19 nt, Artificial Sequence
  Description of Artificial Sequence: Synthetic oligonucleotide
ugcguccccaccuauuggg

SEQ ID NO: 292884 - RNA, 19 nt, Artificial Sequence
  Description of Artificial Sequence: Synthetic oligonucleotide
uguccuguacacaguacug

SEQ ID NO: 292885 - RNA, 19 nt, Artificial Sequence
  Description of Artificial Sequence: Synthetic oligonucleotide
caaaggaaccuccggauug

SEQ ID NO: 292886 - RNA, 19 nt, Artificial Sequence
  Description of Artificial Sequence: Synthetic oligonucleotide
cuaacacugcccauucccc

SEQ ID NO: 292887 - RNA, 19 nt, Artificial Sequence
  Description of Artificial Sequence: Synthetic oligonucleotide
uuauggagcugaacaaccu

SEQ ID NO: 292888 - RNA, 19 nt, Artificial Sequence
  Description of Artificial Sequence: Synthetic oligonucleotide
aagcguagccguuugcaga

SEQ ID NO: 292889 - RNA, 19 nt, Artificial Sequence
  Description of Artificial Sequence: Synthetic oligonucleotide
uucagugauaucucacacu

SEQ ID NO: 292890 - RNA, 19 nt, Artificial Sequence
  Description of Artificial Sequence: Synthetic oligonucleotide
cuguaguaguuuucuaaag

SEQ ID NO: 292891 - RNA, 19 nt, Artificial Sequence
  Description of Artificial Sequence: Synthetic oligonucleotide
uugaccaacuucucacuug

SEQ ID NO: 292892 - RNA, 19 nt, Artificial Sequence
  Description of Artificial Sequence: Synthetic oligonucleotide
aauuucccgagagacccag

SEQ ID NO: 292893 - RNA, 19 nt, Artificial Sequence
  Description of Artificial Sequence: Synthetic oligonucleotide
ucaggauaaaagcuuccau

SEQ ID NO: 292894 - RNA, 19 nt, Artificial Sequence
  Description of Artificial Sequence: Synthetic oligonucleotide
ucucaggauaaaagcuucc

SEQ ID NO: 292895 - RNA, 19 nt, Artificial Sequence
  Description of Artificial Sequence: Synthetic oligonucleotide
augccuagggguuccuggc

SEQ ID NO: 292896 - RNA, 19 nt, Artificial Sequence
  Description of Artificial Sequence: Synthetic oligonucleotide
ucgucuguaaucagauacu

SEQ ID NO: 292897 - RNA, 19 nt, Artificial Sequence
  Description of Artificial Sequence: Synthetic oligonucleotide
cuuacaagcgccuggggca

SEQ ID NO: 292898 - RNA, 19 nt, Artificial Sequence
  Description of Artificial Sequence: Synthetic oligonucleotide
agacccgugagcuggagcu

SEQ ID NO: 292899 - RNA, 19 nt, Artificial Sequence
  Description of Artificial Sequence: Synthetic oligonucleotide
aaggaguaggagcccagcu

SEQ ID NO: 292900 - RNA, 19 nt, Artificial Sequence
  Description of Artificial Sequence: Synthetic oligonucleotide
cugaauuucccgagagacc

SEQ ID NO: 292901 - RNA, 19 nt, Artificial Sequence
  Description of Artificial Sequence: Synthetic oligonucleotide
gaugaagaagccgauuauc

SEQ ID NO: 292902 - RNA, 19 nt, Artificial Sequence
  Description of Artificial Sequence: Synthetic oligonucleotide
aacgagaagcacaccuugg

SEQ ID NO: 292903 - RNA, 19 nt, Artificial Sequence
  Description of Artificial Sequence: Synthetic oligonucleotide
acacgugagaaggaguagg

SEQ ID NO: 292904 - RNA, 19 nt, Artificial Sequence
  Description of Artificial Sequence: Synthetic oligonucleotide
cagacccucaagaacuugc

SEQ ID NO: 292905 - RNA, 19 nt, Artificial Sequence
  Description of Artificial Sequence: Synthetic oligonucleotide
gcucguaucaccaccaccg

SEQ ID NO: 292906 - RNA, 19 nt, Artificial Sequence
  Description of Artificial Sequence: Synthetic oligonucleotide
auaggaguguagcugccug

SEQ ID NO: 292907 - RNA, 19 nt, Artificial Sequence
  Description of Artificial Sequence: Synthetic oligonucleotide
uacaaagcguagccguuug

SEQ ID NO: 292908 - RNA, 19 nt, Artificial Sequence
  Description of Artificial Sequence: Synthetic oligonucleotide
acaaagcguagccguuugc

SEQ ID NO: 292909 - RNA, 19 nt, Artificial Sequence
  Description of Artificial Sequence: Synthetic oligonucleotide
gaagccgauuaucuuggug

SEQ ID NO: 292910 - RNA, 19 nt, Artificial Sequence
  Description of Artificial Sequence: Synthetic oligonucleotide
aaaccaugaucaaguggac

SEQ ID NO: 292911 - RNA, 19 nt, Artificial Sequence
  Description of Artificial Sequence: Synthetic oligonucleotide
ugugaacauagaaugccuu

SEQ ID NO: 292912 - RNA, 19 nt, Artificial Sequence
  Description of Artificial Sequence: Synthetic oligonucleotide
uggaccguauccucaagcu

SEQ ID NO: 292913 - RNA, 19 nt, Artificial Sequence
  Description of Artificial Sequence: Synthetic oligonucleotide
ucgguucuucccaagcaug

SEQ ID NO: 292914 - RNA, 19 nt, Artificial Sequence
  Description of Artificial Sequence: Synthetic oligonucleotide
augaagaagccgauuaucu

SEQ ID NO: 292915 - RNA, 19 nt, Artificial Sequence
  Description of Artificial Sequence: Synthetic oligonucleotide
aaguacuguaguaguuuuc

SEQ ID NO: 292916 - RNA, 19 nt, Artificial Sequence
  Description of Artificial Sequence: Synthetic oligonucleotide
auagaaugccuugaaacaa

SEQ ID NO: 292917 - RNA, 19 nt, Artificial Sequence
  Description of Artificial Sequence: Synthetic oligonucleotide
agaagcccgugucccaggc

SEQ ID NO: 292918 - RNA, 19 nt, Artificial Sequence
  Description of Artificial Sequence: Synthetic oligonucleotide
aaccuccggauuguugggc

SEQ ID NO: 292919 - RNA, 19 nt, Artificial Sequence
  Description of Artificial Sequence: Synthetic oligonucleotide
uagaggggaacagagucug

SEQ ID NO: 292920 - RNA, 19 nt, Artificial Sequence
  Description of Artificial Sequence: Synthetic oligonucleotide
uccuuauggagcugaacaa

SEQ ID NO: 292921 - RNA, 19 nt, Artificial Sequence
  Description of Artificial Sequence: Synthetic oligonucleotide
aggagcuguacgcuaagcu

SEQ ID NO: 292922 - RNA, 19 nt, Artificial Sequence
  Description of Artificial Sequence: Synthetic oligonucleotide
ggaugcuagccuuuucugg

SEQ ID NO: 292923 - RNA, 19 nt, Artificial Sequence
  Description of Artificial Sequence: Synthetic oligonucleotide
uuaugcggggcuucuucag

SEQ ID NO: 292924 - RNA, 19 nt, Artificial Sequence
  Description of Artificial Sequence: Synthetic oligonucleotide
uauggagcugaacaaccua

SEQ ID NO: 292925 - RNA, 19 nt, Artificial Sequence
  Description of Artificial Sequence: Synthetic oligonucleotide
ugugcuggucauuggcaag

SEQ ID NO: 292926 - RNA, 19 nt, Artificial Sequence
  Description of Artificial Sequence: Synthetic oligonucleotide
agcacggaggcagcuagcc

SEQ ID NO: 292927 - RNA, 19 nt, Artificial Sequence
  Description of Artificial Sequence: Synthetic oligonucleotide
cacgagcugugacacaucc

SEQ ID NO: 292928 - RNA, 19 nt, Artificial Sequence
  Description of Artificial Sequence: Synthetic oligonucleotide
agcgggugcagcucucccc

SEQ ID NO: 292929 - RNA, 19 nt, Artificial Sequence
  Description of Artificial Sequence: Synthetic oligonucleotide
guugcguccccaccuauug

SEQ ID NO: 292930 - RNA, 19 nt, Artificial Sequence
  Description of Artificial Sequence: Synthetic oligonucleotide
gauuaucuuggugugcgca

SEQ ID NO: 292931 - RNA, 19 nt, Artificial Sequence
  Description of Artificial Sequence: Synthetic oligonucleotide
gguggaguauaccaacgag

SEQ ID NO: 292932 - RNA, 19 nt, Artificial Sequence
  Description of Artificial Sequence: Synthetic oligonucleotide
cuguaaucagauacuccug

SEQ ID NO: 292933 - RNA, 19 nt, Artificial Sequence
  Description of Artificial Sequence: Synthetic oligonucleotide
gacguaggguggcaauggg

SEQ ID NO: 292934 - RNA, 19 nt, Artificial Sequence
  Description of Artificial Sequence: Synthetic oligonucleotide
cuggcuauggguaaguacu

SEQ ID NO: 292935 - RNA, 19 nt, Artificial Sequence
  Description of Artificial Sequence: Synthetic oligonucleotide
gaaccuccggauuguuggg

SEQ ID NO: 292936 - RNA, 19 nt, Artificial Sequence
  Description of Artificial Sequence: Synthetic oligonucleotide
ucguaucaccaccaccggc

SEQ ID NO: 292937 - RNA, 19 nt, Artificial Sequence
  Description of Artificial Sequence: Synthetic oligonucleotide
aaaggaaccuccggauugu

SEQ ID NO: 292938 - RNA, 19 nt, Artificial Sequence
  Description of Artificial Sequence: Synthetic oligonucleotide
auacguguccauugugcug

SEQ ID NO: 292939 - RNA, 19 nt, Artificial Sequence
  Description of Artificial Sequence: Synthetic oligonucleotide
aaccaugaucaaguggaca

SEQ ID NO: 292940 - RNA, 19 nt, Artificial Sequence
  Description of Artificial Sequence: Synthetic oligonucleotide
ccauauguggaccguaucc

SEQ ID NO: 292941 - RNA, 19 nt, Artificial Sequence
  Description of Artificial Sequence: Synthetic oligonucleotide
caccuucucgccaggaaag

SEQ ID NO: 292942 - RNA, 19 nt, Artificial Sequence
  Description of Artificial Sequence: Synthetic oligonucleotide
cugcagaaggcaucucccg

SEQ ID NO: 292943 - RNA, 19 nt, Artificial Sequence
  Description of Artificial Sequence: Synthetic oligonucleotide
aucucccgcucguaucacc

SEQ ID NO: 292944 - RNA, 19 nt, Artificial Sequence
  Description of Artificial Sequence: Synthetic oligonucleotide
ucccggggagccuugacca

SEQ ID NO: 292945 - RNA, 19 nt, Artificial Sequence
  Description of Artificial Sequence: Synthetic oligonucleotide
uccgacuuccuugaguggu

SEQ ID NO: 292946 - RNA, 19 nt, Artificial Sequence
  Description of Artificial Sequence: Synthetic oligonucleotide
guacgcuaagcucaucuuc

SEQ ID NO: 292947 - RNA, 19 nt, Artificial Sequence
  Description of Artificial Sequence: Synthetic oligonucleotide
agucgguucuucccaagca

SEQ ID NO: 292948 - RNA, 19 nt, Artificial Sequence
  Description of Artificial Sequence: Synthetic oligonucleotide
guuuaugcggggcuucuuc

SEQ ID NO: 292949 - RNA, 19 nt, Artificial Sequence
  Description of Artificial Sequence: Synthetic oligonucleotide
gagucgguucuucccaagc

SEQ ID NO: 292950 - RNA, 19 nt, Artificial Sequence
  Description of Artificial Sequence: Synthetic oligonucleotide
uggucauuggcaaguuuau

SEQ ID NO: 292951 - RNA, 19 nt, Artificial Sequence
  Description of Artificial Sequence: Synthetic oligonucleotide
uugcguccccaccuauugg

SEQ ID NO: 292952 - RNA, 19 nt, Artificial Sequence
  Description of Artificial Sequence: Synthetic oligonucleotide
ggcaagguggaguauacca

SEQ ID NO: 292953 - RNA, 19 nt, Artificial Sequence
  Description of Artificial Sequence: Synthetic oligonucleotide
gacugagggaacaccaaac

SEQ ID NO: 292954 - RNA, 19 nt, Artificial Sequence
  Description of Artificial Sequence: Synthetic oligonucleotide
uaugcggggcuucuucagu

SEQ ID NO: 292955 - RNA, 19 nt, Artificial Sequence
  Description of Artificial Sequence: Synthetic oligonucleotide
uggacacgugagaaggagu

SEQ ID NO: 292956 - RNA, 19 nt, Artificial Sequence
  Description of Artificial Sequence: Synthetic oligonucleotide
acauuacacugcgauucac

SEQ ID NO: 292957 - RNA, 19 nt, Artificial Sequence
  Description of Artificial Sequence: Synthetic oligonucleotide
ugcuugagggcagacuuga

SEQ ID NO: 292958 - RNA, 19 nt, Artificial Sequence
  Description of Artificial Sequence: Synthetic oligonucleotide
augggccucaccaauacca

SEQ ID NO: 292959 - RNA, 19 nt, Artificial Sequence
  Description of Artificial Sequence: Synthetic oligonucleotide
uucaagguguagucccgca

SEQ ID NO: 292960 - RNA, 19 nt, Artificial Sequence
  Description of Artificial Sequence: Synthetic oligonucleotide
guaucaauggcugguguga

SEQ ID NO: 292961 - RNA, 19 nt, Artificial Sequence
  Description of Artificial Sequence: Synthetic oligonucleotide
gcuuacaagcgccuggggc

SEQ ID NO: 292962 - RNA, 19 nt, Artificial Sequence
  Description of Artificial Sequence: Synthetic oligonucleotide
uucccgagagacccaggcc

SEQ ID NO: 292963 - RNA, 19 nt, Artificial Sequence
  Description of Artificial Sequence: Synthetic oligonucleotide
agccgauuaucuuggugug

SEQ ID NO: 292964 - RNA, 19 nt, Artificial Sequence
  Description of Artificial Sequence: Synthetic oligonucleotide
ucuuggugcgggagacccg

SEQ ID NO: 292965 - RNA, 19 nt, Artificial Sequence
  Description of Artificial Sequence: Synthetic oligonucleotide
uggugugaagacugaggga

SEQ ID NO: 292966 - RNA, 19 nt, Artificial Sequence
  Description of Artificial Sequence: Synthetic oligonucleotide
cuggucauuggcaaguuua

SEQ ID NO: 292967 - RNA, 19 nt, Artificial Sequence
  Description of Artificial Sequence: Synthetic oligonucleotide
cugguacaaagcguagccg

SEQ ID NO: 292968 - RNA, 19 nt, Artificial Sequence
  Description of Artificial Sequence: Synthetic oligonucleotide
gagugguggguuauugagc

SEQ ID NO: 292969 - RNA, 19 nt, Artificial Sequence
  Description of Artificial Sequence: Synthetic oligonucleotide
guggaccguauccucaagc

SEQ ID NO: 292970 - RNA, 19 nt, Artificial Sequence
  Description of Artificial Sequence: Synthetic oligonucleotide
agcaccgaugguggcaagc

SEQ ID NO: 292971 - RNA, 19 nt, Artificial Sequence
  Description of Artificial Sequence: Synthetic oligonucleotide
augcuagccuuuucuggag

SEQ ID NO: 292972 - RNA, 19 nt, Artificial Sequence
  Description of Artificial Sequence: Synthetic oligonucleotide
guggaguauaccaacgaga

SEQ ID NO: 292973 - RNA, 19 nt, Artificial Sequence
  Description of Artificial Sequence: Synthetic oligonucleotide
uccugguacaaagcguagc

SEQ ID NO: 292974 - RNA, 19 nt, Artificial Sequence
  Description of Artificial Sequence: Synthetic oligonucleotide
ggugugcgcauccagcugc

SEQ ID NO: 292975 - RNA, 19 nt, Artificial Sequence
  Description of Artificial Sequence: Synthetic oligonucleotide
aucaucgucuguaaucaga

SEQ ID NO: 292976 - RNA, 19 nt, Artificial Sequence
  Description of Artificial Sequence: Synthetic oligonucleotide
accccuagcacauguugcu

SEQ ID NO: 292977 - RNA, 19 nt, Artificial Sequence
  Description of Artificial Sequence: Synthetic oligonucleotide
uaggaguguagcugccuga

SEQ ID NO: 292978 - RNA, 19 nt, Artificial Sequence
  Description of Artificial Sequence: Synthetic oligonucleotide
ugacaaggucagcccaccc

SEQ ID NO: 292979 - RNA, 19 nt, Artificial Sequence
  Description of Artificial Sequence: Synthetic oligonucleotide
ucccgcucguaucaccacc

SEQ ID NO: 292980 - RNA, 19 nt, Artificial Sequence
  Description of Artificial Sequence: Synthetic oligonucleotide
uguacgcuaagcucaucuu

SEQ ID NO: 292981 - RNA, 19 nt, Artificial Sequence
  Description of Artificial Sequence: Synthetic oligonucleotide
uguucgaggagcugccaua

SEQ ID NO: 292982 - RNA, 19 nt, Artificial Sequence
  Description of Artificial Sequence: Synthetic oligonucleotide
ugcgggagacccgugagcu

SEQ ID NO: 292983 - RNA, 19 nt, Artificial Sequence
  Description of Artificial Sequence: Synthetic oligonucleotide
cugcggagggagcaagugg

SEQ ID NO: 292984 - RNA, 19 nt, Artificial Sequence
  Description of Artificial Sequence: Synthetic oligonucleotide
uguggaccguauccucaag

SEQ ID NO: 292985 - RNA, 19 nt, Artificial Sequence
  Description of Artificial Sequence: Synthetic oligonucleotide
gucccuaccuguugcgucc

SEQ ID NO: 292986 - RNA, 19 nt, Artificial Sequence
  Description of Artificial Sequence: Synthetic oligonucleotide
agcguagccguuugcagaa

SEQ ID NO: 292987 - RNA, 19 nt, Artificial Sequence
  Description of Artificial Sequence: Synthetic oligonucleotide
cauggguucgggcuacaug

SEQ ID NO: 292988 - RNA, 19 nt, Artificial Sequence
  Description of Artificial Sequence: Synthetic oligonucleotide
ggagcuguacgcuaagcuc

SEQ ID NO: 292989 - RNA, 19 nt, Artificial Sequence
  Description of Artificial Sequence: Synthetic oligonucleotide
ugccuaacacugcccauuc

SEQ ID NO: 292990 - RNA, 19 nt, Artificial Sequence
  Description of Artificial Sequence: Synthetic oligonucleotide
cacggaggcagcuagccca

SEQ ID NO: 292991 - RNA, 19 nt, Artificial Sequence
  Description of Artificial Sequence: Synthetic oligonucleotide
aaguuuaugcggggcuucu

SEQ ID NO: 292992 - RNA, 19 nt, Artificial Sequence
  Description of Artificial Sequence: Synthetic oligonucleotide
ugucccuaccuguugcguc

SEQ ID NO: 292993 - RNA, 19 nt, Artificial Sequence
  Description of Artificial Sequence: Synthetic oligonucleotide
agcccucaaccccuagcac

SEQ ID NO: 292994 - RNA, 19 nt, Artificial Sequence
  Description of Artificial Sequence: Synthetic oligonucleotide
cucguaucaccaccaccgg

SEQ ID NO: 292995 - RNA, 19 nt, Artificial Sequence
  Description of Artificial Sequence: Synthetic oligonucleotide
gagggaacaccaaacaggu

SEQ ID NO: 292996 - RNA, 19 nt, Artificial Sequence
  Description of Artificial Sequence: Synthetic oligonucleotide
uacccauggucaucuucag

SEQ ID NO: 292997 - RNA, 19 nt, Artificial Sequence
  Description of Artificial Sequence: Synthetic oligonucleotide
aaccugcuacccaugguca

SEQ ID NO: 292998 - RNA, 19 nt, Artificial Sequence
  Description of Artificial Sequence: Synthetic oligonucleotide
aggaguguagcugccugag

SEQ ID NO: 292999 - RNA, 19 nt, Artificial Sequence
  Description of Artificial Sequence: Synthetic oligonucleotide
uaccgcucaccagaaacca

SEQ ID NO: 293000 - RNA, 19 nt, Artificial Sequence
  Description of Artificial Sequence: Synthetic oligonucleotide
cuauggguaaguacugcaa

SEQ ID NO: 293001 - RNA, 19 nt, Artificial Sequence
  Description of Artificial Sequence: Synthetic oligonucleotide
gaaggaguaggagcccagc

SEQ ID NO: 293002 - RNA, 19 nt, Artificial Sequence
  Description of Artificial Sequence: Synthetic oligonucleotide
guaggccuccuccuguccc

SEQ ID NO: 293003 - RNA, 19 nt, Artificial Sequence
  Description of Artificial Sequence: Synthetic oligonucleotide
guaccgcucaccagaaacc

SEQ ID NO: 293004 - RNA, 19 nt, Artificial Sequence
  Description of Artificial Sequence: Synthetic oligonucleotide
gacacgugagaaggaguag

SEQ ID NO: 293005 - RNA, 19 nt, Artificial Sequence
  Description of Artificial Sequence: Synthetic oligonucleotide
guaaucagauacuccugaa

SEQ ID NO: 293006 - RNA, 19 nt, Artificial Sequence
  Description of Artificial Sequence: Synthetic oligonucleotide
guacugacuguagagggga

SEQ ID NO: 293007 - RNA, 19 nt, Artificial Sequence
  Description of Artificial Sequence: Synthetic oligonucleotide
ccuucugcgcacuucacac

SEQ ID NO: 293008 - RNA, 19 nt, Artificial Sequence
  Description of Artificial Sequence: Synthetic oligonucleotide
caguguacacaugcagagg

SEQ ID NO: 293009 - RNA, 19 nt, Artificial Sequence
  Description of Artificial Sequence: Synthetic oligonucleotide
gaccguauccucaagcugu

SEQ ID NO: 293010 - RNA, 19 nt, Artificial Sequence
  Description of Artificial Sequence: Synthetic oligonucleotide
caaacaggugguuguagaa

SEQ ID NO: 293011 - RNA, 19 nt, Artificial Sequence
  Description of Artificial Sequence: Synthetic oligonucleotide
uuguugggcuauacguguc

SEQ ID NO: 293012 - RNA, 19 nt, Artificial Sequence
  Description of Artificial Sequence: Synthetic oligonucleotide
uaccuguugcguccccacc

SEQ ID NO: 293013 - RNA, 19 nt, Artificial Sequence
  Description of Artificial Sequence: Synthetic oligonucleotide
ccgauuaucuuggugugcg

SEQ ID NO: 293014 - RNA, 19 nt, Artificial Sequence
  Description of Artificial Sequence: Synthetic oligonucleotide
ggguaaguacugcaaagga

SEQ ID NO: 293015 - RNA, 19 nt, Artificial Sequence
  Description of Artificial Sequence: Synthetic oligonucleotide
ggaguauaccaacgagaag

SEQ ID NO: 293016 - RNA, 19 nt, Artificial Sequence
  Description of Artificial Sequence: Synthetic oligonucleotide
ccaacaguacagcacggag

SEQ ID NO: 293017 - RNA, 19 nt, Artificial Sequence
  Description of Artificial Sequence: Synthetic oligonucleotide
caauggcuggugugaagac

SEQ ID NO: 293018 - RNA, 19 nt, Artificial Sequence
  Description of Artificial Sequence: Synthetic oligonucleotide
uuccuguaccgcucaccag

SEQ ID NO: 293019 - RNA, 19 nt, Artificial Sequence
  Description of Artificial Sequence: Synthetic oligonucleotide
caugccgcucaucugagaa

SEQ ID NO: 293020 - RNA, 19 nt, Artificial Sequence
  Description of Artificial Sequence: Synthetic oligonucleotide
cccacaaguacuguaguag

SEQ ID NO: 293021 - RNA, 19 nt, Artificial Sequence
  Description of Artificial Sequence: Synthetic oligonucleotide
ugccccacacugccuaaca

SEQ ID NO: 293022 - RNA, 19 nt, Artificial Sequence
  Description of Artificial Sequence: Synthetic oligonucleotide
uaucaauggcuggugugaa

SEQ ID NO: 293023 - RNA, 19 nt, Artificial Sequence
  Description of Artificial Sequence: Synthetic oligonucleotide
cuaccuguugcguccccac

SEQ ID NO: 293024 - RNA, 19 nt, Artificial Sequence
  Description of Artificial Sequence: Synthetic oligonucleotide
accgaugguggcaagcuga

SEQ ID NO: 293025 - RNA, 19 nt, Artificial Sequence
  Description of Artificial Sequence: Synthetic oligonucleotide
acaaucagauggguccuca

SEQ ID NO: 293026 - RNA, 19 nt, Artificial Sequence
  Description of Artificial Sequence: Synthetic oligonucleotide
caaagcguagccguuugca

SEQ ID NO: 293027 - RNA, 19 nt, Artificial Sequence
  Description of Artificial Sequence: Synthetic oligonucleotide
ccgggaaugaaggagcugc

SEQ ID NO: 293028 - RNA, 19 nt, Artificial Sequence
  Description of Artificial Sequence: Synthetic oligonucleotide
cucaggauaaaagcuucca

SEQ ID NO: 293029 - RNA, 19 nt, Artificial Sequence
  Description of Artificial Sequence: Synthetic oligonucleotide
uggugcgggagacccguga

SEQ ID NO: 293030 - RNA, 19 nt, Artificial Sequence
  Description of Artificial Sequence: Synthetic oligonucleotide
cacgugagaaggaguagga

SEQ ID NO: 293031 - RNA, 19 nt, Artificial Sequence
  Description of Artificial Sequence: Synthetic oligonucleotide
ugucccaggcaaggaaggc

SEQ ID NO: 293032 - RNA, 19 nt, Artificial Sequence
  Description of Artificial Sequence: Synthetic oligonucleotide
aggcuuccgacuuccuuga

SEQ ID NO: 293033 - RNA, 19 nt, Artificial Sequence
  Description of Artificial Sequence: Synthetic oligonucleotide
uagccguuugcagaacccu

SEQ ID NO: 293034 - RNA, 19 nt, Artificial Sequence
  Description of Artificial Sequence: Synthetic oligonucleotide
caugggccucaccaauacc

SEQ ID NO: 293035 - RNA, 19 nt, Artificial Sequence
  Description of Artificial Sequence: Synthetic oligonucleotide
uucgaggagcugccauaug

SEQ ID NO: 293036 - RNA, 19 nt, Artificial Sequence
  Description of Artificial Sequence: Synthetic oligonucleotide
aggacguaggguggcaaug

SEQ ID NO: 293037 - RNA, 19 nt, Artificial Sequence
  Description of Artificial Sequence: Synthetic oligonucleotide
agcuagcccaacugcuuga

SEQ ID NO: 293038 - RNA, 19 nt, Artificial Sequence
  Description of Artificial Sequence: Synthetic oligonucleotide
ucucgccaggaaagaugag

SEQ ID NO: 293039 - RNA, 19 nt, Artificial Sequence
  Description of Artificial Sequence: Synthetic oligonucleotide
uguugcguccccaccuauu

SEQ ID NO: 293040 - RNA, 19 nt, Artificial Sequence
  Description of Artificial Sequence: Synthetic oligonucleotide
gcuauacguguccauugug

SEQ ID NO: 293041 - RNA, 19 nt, Artificial Sequence
  Description of Artificial Sequence: Synthetic oligonucleotide
gggcuauacguguccauug

SEQ ID NO: 293042 - RNA, 19 nt, Artificial Sequence
  Description of Artificial Sequence: Synthetic oligonucleotide
guaggcaucccagccucag

SEQ ID NO: 293043 - RNA, 19 nt, Artificial Sequence
  Description of Artificial Sequence: Synthetic oligonucleotide
ugggcuauacguguccauu

SEQ ID NO: 293044 - RNA, 19 nt, Artificial Sequence
  Description of Artificial Sequence: Synthetic oligonucleotide
ucagccgguggaugcuagc

SEQ ID NO: 293045 - RNA, 19 nt, Artificial Sequence
  Description of Artificial Sequence: Synthetic oligonucleotide
gcuggcuauggguaaguac

SEQ ID NO: 293046 - RNA, 19 nt, Artificial Sequence
  Description of Artificial Sequence: Synthetic oligonucleotide
ucaaccccuagcacauguu

SEQ ID NO: 293047 - RNA, 19 nt, Artificial Sequence
  Description of Artificial Sequence: Synthetic oligonucleotide
acgcuaagcucaucuuccu

SEQ ID NO: 293048 - RNA, 19 nt, Artificial Sequence
  Description of Artificial Sequence: Synthetic oligonucleotide
cgauucaccuggaauuucc

SEQ ID NO: 293049 - RNA, 19 nt, Artificial Sequence
  Description of Artificial Sequence: Synthetic oligonucleotide
cacugccuaacacugccca

SEQ ID NO: 293050 - RNA, 19 nt, Artificial Sequence
  Description of Artificial Sequence: Synthetic oligonucleotide
guacacaguacugacugua

SEQ ID NO: 293051 - RNA, 19 nt, Artificial Sequence
  Description of Artificial Sequence: Synthetic oligonucleotide
ucccuccaucaacauagau

SEQ ID NO: 293052 - RNA, 19 nt, Artificial Sequence
  Description of Artificial Sequence: Synthetic oligonucleotide
ggaccguauccucaagcug

SEQ ID NO: 293053 - RNA, 19 nt, Artificial Sequence
  Description of Artificial Sequence: Synthetic oligonucleotide
ggacugagccccaaaggcc

SEQ ID NO: 293054 - RNA, 19 nt, Artificial Sequence
  Description of Artificial Sequence: Synthetic oligonucleotide
cuguacgcuaagcucaucu

SEQ ID NO: 293055 - RNA, 19 nt, Artificial Sequence
  Description of Artificial Sequence: Synthetic oligonucleotide
guucacccggcagccauag

SEQ ID NO: 293056 - RNA, 19 nt, Artificial Sequence
  Description of Artificial Sequence: Synthetic oligonucleotide
agccgguggaugcuagccu

SEQ ID NO: 293057 - RNA, 19 nt, Artificial Sequence
  Description of Artificial Sequence: Synthetic oligonucleotide
augagucgguucuucccaa

SEQ ID NO: 293058 - RNA, 19 nt, Artificial Sequence
  Description of Artificial Sequence: Synthetic oligonucleotide
uugggcuauacguguccau

SEQ ID NO: 293059 - RNA, 19 nt, Artificial Sequence
  Description of Artificial Sequence: Synthetic oligonucleotide
gugacaaggucagcccacc

SEQ ID NO: 293060 - RNA, 19 nt, Artificial Sequence
  Description of Artificial Sequence: Synthetic oligonucleotide
ccuuauggagcugaacaac

SEQ ID NO: 293061 - RNA, 19 nt, Artificial Sequence
  Description of Artificial Sequence: Synthetic oligonucleotide
cagccgguggaugcuagcc

SEQ ID NO: 293062 - RNA, 19 nt, Artificial Sequence
  Description of Artificial Sequence: Synthetic oligonucleotide
acugccuaacacugcccau

SEQ ID NO: 293063 - RNA, 19 nt, Artificial Sequence
  Description of Artificial Sequence: Synthetic oligonucleotide
uggcaagguggaguauacc

SEQ ID NO: 293064 - RNA, 19 nt, Artificial Sequence
  Description of Artificial Sequence: Synthetic oligonucleotide
uuacaagcgccuggggcau

SEQ ID NO: 293065 - RNA, 19 nt, Artificial Sequence
  Description of Artificial Sequence: Synthetic oligonucleotide
cauauguggaccguauccu

SEQ ID NO: 293066 - RNA, 19 nt, Artificial Sequence
  Description of Artificial Sequence: Synthetic oligonucleotide
cagugacaaggucagccca

SEQ ID NO: 293067 - RNA, 19 nt, Artificial Sequence
  Description of Artificial Sequence: Synthetic oligonucleotide
ggugcgggagacccgugag

SEQ ID NO: 293068 - RNA, 19 nt, Artificial Sequence
  Description of Artificial Sequence: Synthetic oligonucleotide
uccucaccggccugacaca

SEQ ID NO: 293069 - RNA, 19 nt, Artificial Sequence
  Description of Artificial Sequence: Synthetic oligonucleotide
gaaggcaucucccgcucgu

SEQ ID NO: 293070 - RNA, 19 nt, Artificial Sequence
  Description of Artificial Sequence: Synthetic oligonucleotide
cagccauuuuguaggccuc

SEQ ID NO: 293071 - RNA, 19 nt, Artificial Sequence
  Description of Artificial Sequence: Synthetic oligonucleotide
ugcgcacuucacacacuuc

SEQ ID NO: 293072 - RNA, 19 nt, Artificial Sequence
  Description of Artificial Sequence: Synthetic oligonucleotide
uacaaucagauggguccuc

SEQ ID NO: 293073 - RNA, 19 nt, Artificial Sequence
  Description of Artificial Sequence: Synthetic oligonucleotide
ggcugauccucuccuugag

SEQ ID NO: 293074 - RNA, 19 nt, Artificial Sequence
  Description of Artificial Sequence: Synthetic oligonucleotide
agccguuugcagaacccug

SEQ ID NO: 293075 - RNA, 19 nt, Artificial Sequence
  Description of Artificial Sequence: Synthetic oligonucleotide
ccgcucaccagaaaccaug

SEQ ID NO: 293076 - RNA, 19 nt, Artificial Sequence
  Description of Artificial Sequence: Synthetic oligonucleotide
gaagcacaccuuggagcug

SEQ ID NO: 293077 - RNA, 19 nt, Artificial Sequence
  Description of Artificial Sequence: Synthetic oligonucleotide
cguaucaccaccaccggca

SEQ ID NO: 293078 - RNA, 19 nt, Artificial Sequence
  Description of Artificial Sequence: Synthetic oligonucleotide
gugcgggagacccgugagc

SEQ ID NO: 293079 - RNA, 19 nt, Artificial Sequence
  Description of Artificial Sequence: Synthetic oligonucleotide
ggucauuggcaaguuuaug

SEQ ID NO: 293080 - RNA, 19 nt, Artificial Sequence
  Description of Artificial Sequence: Synthetic oligonucleotide
ggauaucuucuuggugcgg

SEQ ID NO: 293081 - RNA, 19 nt, Artificial Sequence
  Description of Artificial Sequence: Synthetic oligonucleotide
accugcuacccauggucau

SEQ ID NO: 293082 - RNA, 19 nt, Artificial Sequence
  Description of Artificial Sequence: Synthetic oligonucleotide
ggugguuguagaaggccac

SEQ ID NO: 293083 - RNA, 19 nt, Artificial Sequence
  Description of Artificial Sequence: Synthetic oligonucleotide
uggguucgggcuacaugua

SEQ ID NO: 293084 - RNA, 19 nt, Artificial Sequence
  Description of Artificial Sequence: Synthetic oligonucleotide
caugaucaaguggacacgu

SEQ ID NO: 293085 - RNA, 19 nt, Artificial Sequence
  Description of Artificial Sequence: Synthetic oligonucleotide
acguaggguggcaaugggu

SEQ ID NO: 293086 - RNA, 19 nt, Artificial Sequence
  Description of Artificial Sequence: Synthetic oligonucleotide
aguggacacgugagaagga

SEQ ID NO: 293087 - RNA, 19 nt, Artificial Sequence
  Description of Artificial Sequence: Synthetic oligonucleotide
cggauuguugggcuauacg

SEQ ID NO: 293088 - RNA, 19 nt, Artificial Sequence
  Description of Artificial Sequence: Synthetic oligonucleotide
auuucccgagagacccagg

SEQ ID NO: 293089 - RNA, 19 nt, Artificial Sequence
  Description of Artificial Sequence: Synthetic oligonucleotide
gguucuucccaagcauggc

SEQ ID NO: 293090 - RNA, 19 nt, Artificial Sequence
  Description of Artificial Sequence: Synthetic oligonucleotide
caucauguucgaggagcug

SEQ ID NO: 293091 - RNA, 19 nt, Artificial Sequence
  Description of Artificial Sequence: Synthetic oligonucleotide
gcaugggccucaccaauac

SEQ ID NO: 293092 - RNA, 19 nt, Artificial Sequence
  Description of Artificial Sequence: Synthetic oligonucleotide
ccagaccaugccaacagca

SEQ ID NO: 293093 - RNA, 19 nt, Artificial Sequence
  Description of Artificial Sequence: Synthetic oligonucleotide
gcuacccauggucaucuuc

SEQ ID NO: 293094 - RNA, 19 nt, Artificial Sequence
  Description of Artificial Sequence: Synthetic oligonucleotide
gaauuucccgagagaccca

SEQ ID NO: 293095 - RNA, 19 nt, Artificial Sequence
  Description of Artificial Sequence: Synthetic oligonucleotide
ggcuauggguaaguacugc

SEQ ID NO: 293096 - RNA, 19 nt, Artificial Sequence
  Description of Artificial Sequence: Synthetic oligonucleotide
gugguggguuauugagcug

SEQ ID NO: 293097 - RNA, 19 nt, Artificial Sequence
  Description of Artificial Sequence: Synthetic oligonucleotide
caccgaugguggcaagcug

SEQ ID NO: 293098 - RNA, 19 nt, Artificial Sequence
  Description of Artificial Sequence: Synthetic oligonucleotide
gacuccugguacaaagcgu

SEQ ID NO: 293099 - RNA, 19 nt, Artificial Sequence
  Description of Artificial Sequence: Synthetic oligonucleotide
ggguucgggcuacauguac

SEQ ID NO: 293100 - RNA, 19 nt, Artificial Sequence
  Description of Artificial Sequence: Synthetic oligonucleotide
gagaugugaggaggacuga

SEQ ID NO: 293101 - RNA, 19 nt, Artificial Sequence
  Description of Artificial Sequence: Synthetic oligonucleotide
cuugaccagucagugcaga

SEQ ID NO: 293102 - RNA, 19 nt, Artificial Sequence
  Description of Artificial Sequence: Synthetic oligonucleotide
accguauccucaagcugug

SEQ ID NO: 293103 - RNA, 19 nt, Artificial Sequence
  Description of Artificial Sequence: Synthetic oligonucleotide
cucgccaggaaagaugagu

SEQ ID NO: 293104 - RNA, 19 nt, Artificial Sequence
  Description of Artificial Sequence: Synthetic oligonucleotide
gguucgggcuacauguaca

SEQ ID NO: 293105 - RNA, 19 nt, Artificial Sequence
  Description of Artificial Sequence: Synthetic oligonucleotide
uaccaacgagaagcacacc

SEQ ID NO: 293106 - RNA, 19 nt, Artificial Sequence
  Description of Artificial Sequence: Synthetic oligonucleotide
ggacacgugagaaggagua

SEQ ID NO: 293107 - RNA, 19 nt, Artificial Sequence
  Description of Artificial Sequence: Synthetic oligonucleotide
cucaccggccugacacaug

SEQ ID NO: 293108 - RNA, 19 nt, Artificial Sequence
  Description of Artificial Sequence: Synthetic oligonucleotide
uuggugcgggagacccgug

SEQ ID NO: 293109 - RNA, 19 nt, Artificial Sequence
  Description of Artificial Sequence: Synthetic oligonucleotide
acacuccaucauguucgag

SEQ ID NO: 293110 - RNA, 19 nt, Artificial Sequence
  Description of Artificial Sequence: Synthetic oligonucleotide
guacaaucagauggguccu

SEQ ID NO: 293111 - RNA, 19 nt, Artificial Sequence
  Description of Artificial Sequence: Synthetic oligonucleotide
ugagccggccccgcguagu

SEQ ID NO: 293112 - RNA, 19 nt, Artificial Sequence
  Description of Artificial Sequence: Synthetic oligonucleotide
ucccuaccuguugcguccc

SEQ ID NO: 293113 - RNA, 19 nt, Artificial Sequence
  Description of Artificial Sequence: Synthetic oligonucleotide
ggcaaggaaggcuccucuc

SEQ ID NO: 293114 - RNA, 19 nt, Artificial Sequence
  Description of Artificial Sequence: Synthetic oligonucleotide
cacacuccaucauguucga

SEQ ID NO: 293115 - RNA, 19 nt, Artificial Sequence
  Description of Artificial Sequence: Synthetic oligonucleotide
uggcuggcuauggguaagu

SEQ ID NO: 293116 - RNA, 19 nt, Artificial Sequence
  Description of Artificial Sequence: Synthetic oligonucleotide
ccaacuucucacuuguccu

SEQ ID NO: 293117 - RNA, 19 nt, Artificial Sequence
  Description of Artificial Sequence: Synthetic oligonucleotide
cugcaaucucaggauaaaa

SEQ ID NO: 293118 - RNA, 19 nt, Artificial Sequence
  Description of Artificial Sequence: Synthetic oligonucleotide
uucgggcuacauguacaau

SEQ ID NO: 293119 - RNA, 19 nt, Artificial Sequence
  Description of Artificial Sequence: Synthetic oligonucleotide
gacccgugagcuggagcug

SEQ ID NO: 293120 - RNA, 19 nt, Artificial Sequence
  Description of Artificial Sequence: Synthetic oligonucleotide
uuuggcugucaguguccuu

SEQ ID NO: 293121 - RNA, 19 nt, Artificial Sequence
  Description of Artificial Sequence: Synthetic oligonucleotide
agggaacaccaaacaggug

SEQ ID NO: 293122 - RNA, 19 nt, Artificial Sequence
  Description of Artificial Sequence: Synthetic oligonucleotide
cccucaagaacuugccaga

SEQ ID NO: 293123 - RNA, 19 nt, Artificial Sequence
  Description of Artificial Sequence: Synthetic oligonucleotide
gguggcaagguggaguaua

SEQ ID NO: 293124 - RNA, 19 nt, Artificial Sequence
  Description of Artificial Sequence: Synthetic oligonucleotide
ggcuauacguguccauugu

SEQ ID NO: 293125 - RNA, 19 nt, Artificial Sequence
  Description of Artificial Sequence: Synthetic oligonucleotide
ggccaaggguggcaaggug

SEQ ID NO: 293126 - RNA, 19 nt, Artificial Sequence
  Description of Artificial Sequence: Synthetic oligonucleotide
caucgucuguaaucagaua

SEQ ID NO: 293127 - RNA, 19 nt, Artificial Sequence
  Description of Artificial Sequence: Synthetic oligonucleotide
ccgcucaucugagaagccc

SEQ ID NO: 293128 - RNA, 19 nt, Artificial Sequence
  Description of Artificial Sequence: Synthetic oligonucleotide
agucccgcaugggccucac

SEQ ID NO: 293129 - RNA, 19 nt, Artificial Sequence
  Description of Artificial Sequence: Synthetic oligonucleotide
gcugcggagggagcaagug

SEQ ID NO: 293130 - RNA, 19 nt, Artificial Sequence
  Description of Artificial Sequence: Synthetic oligonucleotide
gccgauuaucuuggugugc

SEQ ID NO: 293131 - RNA, 19 nt, Artificial Sequence
  Description of Artificial Sequence: Synthetic oligonucleotide
acgagcugugacacauccu

SEQ ID NO: 293132 - RNA, 19 nt, Artificial Sequence
  Description of Artificial Sequence: Synthetic oligonucleotide
uccucuccccagggcuagg

SEQ ID NO: 293133 - RNA, 19 nt, Artificial Sequence
  Description of Artificial Sequence: Synthetic oligonucleotide
acgggcggaggcucccgcu

SEQ ID NO: 293134 - RNA, 19 nt, Artificial Sequence
  Description of Artificial Sequence: Synthetic oligonucleotide
agcuguacgcuaagcucau

SEQ ID NO: 293135 - RNA, 19 nt, Artificial Sequence
  Description of Artificial Sequence: Synthetic oligonucleotide
gcacggaggcagcuagccc

SEQ ID NO: 293136 - RNA, 19 nt, Artificial Sequence
  Description of Artificial Sequence: Synthetic oligonucleotide
cagcugcggagggagcaag

SEQ ID NO: 293137 - RNA, 19 nt, Artificial Sequence
  Description of Artificial Sequence: Synthetic oligonucleotide
cacgggcggaggcucccgc

SEQ ID NO: 293138 - RNA, 19 nt, Artificial Sequence
  Description of Artificial Sequence: Synthetic oligonucleotide
cuuggugcgggagacccgu

SEQ ID NO: 293139 - RNA, 19 nt, Artificial Sequence
  Description of Artificial Sequence: Synthetic oligonucleotide
ccgcguaguccucaccggc

SEQ ID NO: 293140 - RNA, 19 nt, Artificial Sequence
  Description of Artificial Sequence: Synthetic oligonucleotide
ccgacuuccuugaguggug

SEQ ID NO: 293141 - RNA, 19 nt, Artificial Sequence
  Description of Artificial Sequence: Synthetic oligonucleotide
cauguucgaggagcugcca

SEQ ID NO: 293142 - RNA, 19 nt, Artificial Sequence
  Description of Artificial Sequence: Synthetic oligonucleotide
ggaugcugugucccuaccu

SEQ ID NO: 293143 - RNA, 19 nt, Artificial Sequence
  Description of Artificial Sequence: Synthetic oligonucleotide
guucgaggagcugccauau

SEQ ID NO: 293144 - RNA, 19 nt, Artificial Sequence
  Description of Artificial Sequence: Synthetic oligonucleotide
cgauuaucuuggugugcgc

SEQ ID NO: 293145 - RNA, 19 nt, Artificial Sequence
  Description of Artificial Sequence: Synthetic oligonucleotide
ccguuugcagaacccugac

SEQ ID NO: 293146 - RNA, 19 nt, Artificial Sequence
  Description of Artificial Sequence: Synthetic oligonucleotide
ccacaaguacuguaguagu

SEQ ID NO: 293147 - RNA, 19 nt, Artificial Sequence
  Description of Artificial Sequence: Synthetic oligonucleotide
gcccgugucccaggcaagg

SEQ ID NO: 293148 - RNA, 19 nt, Artificial Sequence
  Description of Artificial Sequence: Synthetic oligonucleotide
cugagccccaaaggccgug

SEQ ID NO: 293149 - RNA, 19 nt, Artificial Sequence
  Description of Artificial Sequence: Synthetic oligonucleotide
gucccaggcaaggaaggcu

SEQ ID NO: 293150 - RNA, 19 nt, Artificial Sequence
  Description of Artificial Sequence: Synthetic oligonucleotide
cgcucguaucaccaccacc

SEQ ID NO: 293151 - RNA, 19 nt, Artificial Sequence
  Description of Artificial Sequence: Synthetic oligonucleotide
uccggauuguugggcuaua

SEQ ID NO: 293152 - RNA, 19 nt, Artificial Sequence
  Description of Artificial Sequence: Synthetic oligonucleotide
gcgcauccagcugcggagg

SEQ ID NO: 293153 - RNA, 19 nt, Artificial Sequence
  Description of Artificial Sequence: Synthetic oligonucleotide
guacaaagcguagccguuu

SEQ ID NO: 293154 - RNA, 19 nt, Artificial Sequence
  Description of Artificial Sequence: Synthetic oligonucleotide
cugcuacccauggucaucu

SEQ ID NO: 293155 - RNA, 19 nt, Artificial Sequence
  Description of Artificial Sequence: Synthetic oligonucleotide
agcugcggagggagcaagu

SEQ ID NO: 293156 - RNA, 19 nt, Artificial Sequence
  Description of Artificial Sequence: Synthetic oligonucleotide
accgcucaccagaaaccau

SEQ ID NO: 293157 - RNA, 19 nt, Artificial Sequence
  Description of Artificial Sequence: Synthetic oligonucleotide
agcccgugucccaggcaag

SEQ ID NO: 293158 - RNA, 19 nt, Artificial Sequence
  Description of Artificial Sequence: Synthetic oligonucleotide
cagcaccgaugguggcaag

SEQ ID NO: 293159 - RNA, 19 nt, Artificial Sequence
  Description of Artificial Sequence: Synthetic oligonucleotide
ugcuacccauggucaucuu

SEQ ID NO: 293160 - RNA, 19 nt, Artificial Sequence
  Description of Artificial Sequence: Synthetic oligonucleotide
acggaggcagcuagcccaa

SEQ ID NO: 293161 - RNA, 19 nt, Artificial Sequence
  Description of Artificial Sequence: Synthetic oligonucleotide
caagcgccuggggcaugcc

SEQ ID NO: 293162 - RNA, 19 nt, Artificial Sequence
  Description of Artificial Sequence: Synthetic oligonucleotide
ggguguggcugauccucuc

SEQ ID NO: 293163 - RNA, 19 nt, Artificial Sequence
  Description of Artificial Sequence: Synthetic oligonucleotide
gcgauucaccuggaauuuc

SEQ ID NO: 293164 - RNA, 19 nt, Artificial Sequence
  Description of Artificial Sequence: Synthetic oligonucleotide
cccgcucguaucaccacca

SEQ ID NO: 293165 - RNA, 19 nt, Artificial Sequence
  Description of Artificial Sequence: Synthetic oligonucleotide
gaacccugacucagacccu

SEQ ID NO: 293166 - RNA, 19 nt, Artificial Sequence
  Description of Artificial Sequence: Synthetic oligonucleotide
gcguccccaccuauugggc

SEQ ID NO: 293167 - RNA, 19 nt, Artificial Sequence
  Description of Artificial Sequence: Synthetic oligonucleotide
ccaucauguucgaggagcu

SEQ ID NO: 293168 - RNA, 19 nt, Artificial Sequence
  Description of Artificial Sequence: Synthetic oligonucleotide
caggacguaggguggcaau

SEQ ID NO: 293169 - RNA, 19 nt, Artificial Sequence
  Description of Artificial Sequence: Synthetic oligonucleotide
cugccuaacacugcccauu

SEQ ID NO: 293170 - RNA, 19 nt, Artificial Sequence
  Description of Artificial Sequence: Synthetic oligonucleotide
ccggauuguugggcuauac

SEQ ID NO: 293171 - RNA, 19 nt, Artificial Sequence
  Description of Artificial Sequence: Synthetic oligonucleotide
gcgggagacccgugagcug

SEQ ID NO: 293172 - RNA, 19 nt, Artificial Sequence
  Description of Artificial Sequence: Synthetic oligonucleotide
gugucccuaccuguugcgu

SEQ ID NO: 293173 - RNA, 19 nt, Artificial Sequence
  Description of Artificial Sequence: Synthetic oligonucleotide
cuguaccgcucaccagaaa

SEQ ID NO: 293174 - RNA, 19 nt, Artificial Sequence
  Description of Artificial Sequence: Synthetic oligonucleotide
gccaagcgggugcagcucu

SEQ ID NO: 293175 - RNA, 19 nt, Artificial Sequence
  Description of Artificial Sequence: Synthetic oligonucleotide
ccggggagccuugaccaac

SEQ ID NO: 293176 - RNA, 19 nt, Artificial Sequence
  Description of Artificial Sequence: Synthetic oligonucleotide
gcaccgaugguggcaagcu

SEQ ID NO: 293177 - RNA, 19 nt, Artificial Sequence
  Description of Artificial Sequence: Synthetic oligonucleotide
ccgaugguggcaagcugaa

SEQ ID NO: 293178 - RNA, 19 nt, Artificial Sequence
  Description of Artificial Sequence: Synthetic oligonucleotide
cccaccuauugggcugggg

SEQ ID NO: 293179 - RNA, 19 nt, Artificial Sequence
  Description of Artificial Sequence: Synthetic oligonucleotide
ccacgagcugugacacauc

SEQ ID NO: 293180 - RNA, 19 nt, Artificial Sequence
  Description of Artificial Sequence: Synthetic oligonucleotide
cccgaggggccaguggcac

SEQ ID NO: 293181 - RNA, 19 nt, Artificial Sequence
  Description of Artificial Sequence: Synthetic oligonucleotide
cccggccguggcacgggcg

SEQ ID NO: 293182 - RNA, 19 nt, Artificial Sequence
  Description of Artificial Sequence: Synthetic oligonucleotide
ccguauccucaagcugugc

SEQ ID NO: 293183 - RNA, 19 nt, Artificial Sequence
  Description of Artificial Sequence: Synthetic oligonucleotide
cuccggauuguugggcuau

SEQ ID NO: 293184 - RNA, 19 nt, Artificial Sequence
  Description of Artificial Sequence: Synthetic oligonucleotide
ggcacgggcggaggcuccc

SEQ ID NO: 293185 - RNA, 19 nt, Artificial Sequence
  Description of Artificial Sequence: Synthetic oligonucleotide
gccgguggaugcuagccuu

SEQ ID NO: 293186 - RNA, 19 nt, Artificial Sequence
  Description of Artificial Sequence: Synthetic oligonucleotide
ggccaagcgggugcagcuc

SEQ ID NO: 293187 - RNA, 19 nt, Artificial Sequence
  Description of Artificial Sequence: Synthetic oligonucleotide
ccgcucguaucaccaccac

SEQ ID NO: 293188 - RNA, 19 nt, Artificial Sequence
  Description of Artificial Sequence: Synthetic oligonucleotide
ccuaccuguugcgucccca

SEQ ID NO: 293189 - RNA, 19 nt, Artificial Sequence
  Description of Artificial Sequence: Synthetic oligonucleotide
ccaugccuagggguuccug

SEQ ID NO: 293190 - RNA, 19 nt, Artificial Sequence
  Description of Artificial Sequence: Synthetic oligonucleotide
gcugagccggccccgcgua

SEQ ID NO: 293191 - RNA, 19 nt, Artificial Sequence
  Description of Artificial Sequence: Synthetic oligonucleotide
ggccacgagcugugacaca

SEQ ID NO: 293192 - RNA, 19 nt, Artificial Sequence
  Description of Artificial Sequence: Synthetic oligonucleotide
ggcugacugcaaccugcua

SEQ ID NO: 293193 - RNA, 19 nt, Artificial Sequence
  Description of Artificial Sequence: Synthetic oligonucleotide
cuguugcguccccaccuau

SEQ ID NO: 293194 - RNA, 19 nt, Artificial Sequence
  Description of Artificial Sequence: Synthetic oligonucleotide
gccccgcguaguccucacc

SEQ ID NO: 293195 - RNA, 19 nt, Artificial Sequence
  Description of Artificial Sequence: Synthetic oligonucleotide
ccuguugcguccccaccua

SEQ ID NO: 293196 - RNA, 19 nt, Artificial Sequence
  Description of Artificial Sequence: Synthetic oligonucleotide
ggccccgcguaguccucac

SEQ ID NO: 293197 - RNA, 19 nt, Artificial Sequence
  Description of Artificial Sequence: Synthetic oligonucleotide
cccuaccuguugcgucccc

SEQ ID NO: 293198 - RNA, 19 nt, Artificial Sequence
  Description of Artificial Sequence: Synthetic oligonucleotide
ccuugccguagccaugggu

SEQ ID NO: 293199 - RNA, 19 nt, Artificial Sequence
  Description of Artificial Sequence: Synthetic oligonucleotide
gcuguacgcuaagcucauc

SEQ ID NO: 293200 - RNA, 19 nt, Artificial Sequence
  Description of Artificial Sequence: Synthetic oligonucleotide
ggcccggccguggcacggg

SEQ ID NO: 293201 - RNA, 19 nt, Artificial Sequence
  Description of Artificial Sequence: Synthetic oligonucleotide
guccauugugcuggucauu

SEQ ID NO: 293202 - RNA, 19 nt, Artificial Sequence
  Description of Artificial Sequence: Synthetic oligonucleotide
ccuccggauuguugggcua

SEQ ID NO: 293203 - RNA, 19 nt, Artificial Sequence
  Description of Artificial Sequence: Synthetic oligonucleotide
cccggcccggccguggcac

SEQ ID NO: 293204 - RNA, 19 nt, Artificial Sequence
  Description of Artificial Sequence: Synthetic oligonucleotide
gcccggccguggcacgggc

SEQ ID NO: 293205 - RNA, 19 nt, Artificial Sequence
  Description of Artificial Sequence: Synthetic oligonucleotide
cguuugcagaacccugacu

SEQ ID NO: 293206 - RNA, 19 nt, Artificial Sequence
  Description of Artificial Sequence: Synthetic oligonucleotide
cgcaugggccucaccaaua

SEQ ID NO: 293207 - RNA, 19 nt, Artificial Sequence
  Description of Artificial Sequence: Synthetic oligonucleotide
cccgagagacccaggcccu

SEQ ID NO: 293208 - RNA, 19 nt, Artificial Sequence
  Description of Artificial Sequence: Synthetic oligonucleotide
ccaggacguaggguggcaa

SEQ ID NO: 293209 - RNA, 19 nt, Artificial Sequence
  Description of Artificial Sequence: Synthetic oligonucleotide
ccggcccggccguggcacg

SEQ ID NO: 293210 - RNA, 19 nt, Artificial Sequence
  Description of Artificial Sequence: Synthetic oligonucleotide
gcccgaggggccaguggca

SEQ ID NO: 293211 - RNA, 19 nt, Artificial Sequence
  Description of Artificial Sequence: Synthetic oligonucleotide
ccgagagacccaggcccuc

SEQ ID NO: 293212 - RNA, 19 nt, Artificial Sequence
  Description of Artificial Sequence: Synthetic oligonucleotide
ccagcugcggagggagcaa

SEQ ID NO: 293213 - RNA, 19 nt, Artificial Sequence
  Description of Artificial Sequence: Synthetic oligonucleotide
cggggcuucuucagugaua

SEQ ID NO: 293214 - RNA, 19 nt, Artificial Sequence
  Description of Artificial Sequence: Synthetic oligonucleotide
cccggggagccuugaccaa

SEQ ID NO: 293215 - RNA, 19 nt, Artificial Sequence
  Description of Artificial Sequence: Synthetic oligonucleotide
gccauggguucgggcuaca

SEQ ID NO: 293216 - RNA, 19 nt, Artificial Sequence
  Description of Artificial Sequence: Synthetic oligonucleotide
ccucaccggccugacacau

SEQ ID NO: 293217 - RNA, 19 nt, Artificial Sequence
  Description of Artificial Sequence: Synthetic oligonucleotide
ccgguggaugcuagccuuu

SEQ ID NO: 293218 - RNA, 19 nt, Artificial Sequence
  Description of Artificial Sequence: Synthetic oligonucleotide
gcaggccuucugcgcacuu

SEQ ID NO: 293219 - RNA, 19 nt, Artificial Sequence
  Description of Artificial Sequence: Synthetic oligonucleotide
ggguggcaagguggaguau

SEQ ID NO: 293220 - RNA, 19 nt, Artificial Sequence
  Description of Artificial Sequence: Synthetic oligonucleotide
ccauggguucgggcuacau

SEQ ID NO: 293221 - RNA, 19 nt, Artificial Sequence
  Description of Artificial Sequence: Synthetic oligonucleotide
caccaccggcaggccuucu

SEQ ID NO: 293222 - RNA, 19 nt, Artificial Sequence
  Description of Artificial Sequence: Synthetic oligonucleotide
aaaugaaagguccagagca

SEQ ID NO: 293223 - RNA, 19 nt, Artificial Sequence
  Description of Artificial Sequence: Synthetic oligonucleotide
aacacuagaucauauacag

SEQ ID NO: 293224 - RNA, 19 nt, Artificial Sequence
  Description of Artificial Sequence: Synthetic oligonucleotide
aaauauauaucgccacugc

SEQ ID NO: 293225 - RNA, 19 nt, Artificial Sequence
  Description of Artificial Sequence: Synthetic oligonucleotide
uaagauauggaacuguccc

SEQ ID NO: 293226 - RNA, 19 nt, Artificial Sequence
  Description of Artificial Sequence: Synthetic oligonucleotide
uuugagcccagaaagaagg

SEQ ID NO: 293227 - RNA, 19 nt, Artificial Sequence
  Description of Artificial Sequence: Synthetic oligonucleotide
acaguuucgauacagauca

SEQ ID NO: 293228 - RNA, 19 nt, Artificial Sequence
  Description of Artificial Sequence: Synthetic oligonucleotide
ugugguugagccaaggacg

SEQ ID NO: 293229 - RNA, 19 nt, Artificial Sequence
  Description of Artificial Sequence: Synthetic oligonucleotide
aacuacauucauuacaaca

SEQ ID NO: 293230 - RNA, 19 nt, Artificial Sequence
  Description of Artificial Sequence: Synthetic oligonucleotide
uaauauaggaaguuguuga

SEQ ID NO: 293231 - RNA, 19 nt, Artificial Sequence
  Description of Artificial Sequence: Synthetic oligonucleotide
aauaccaaagcccaguaau

SEQ ID NO: 293232 - RNA, 19 nt, Artificial Sequence
  Description of Artificial Sequence: Synthetic oligonucleotide
ucaguaacuauaauuuugc

SEQ ID NO: 293233 - RNA, 19 nt, Artificial Sequence
  Description of Artificial Sequence: Synthetic oligonucleotide
ugauaaacuacauucauua

SEQ ID NO: 293234 - RNA, 19 nt, Artificial Sequence
  Description of Artificial Sequence: Synthetic oligonucleotide
cacuagaucauauacagug

SEQ ID NO: 293235 - RNA, 19 nt, Artificial Sequence
  Description of Artificial Sequence: Synthetic oligonucleotide
gacccuauaccauuuaccg

SEQ ID NO: 293236 - RNA, 19 nt, Artificial Sequence
  Description of Artificial Sequence: Synthetic oligonucleotide
cuugcuuuagcucaguagc

SEQ ID NO: 293237 - RNA, 19 nt, Artificial Sequence
  Description of Artificial Sequence: Synthetic oligonucleotide
uaaucccuaauauaggaag

SEQ ID NO: 293238 - RNA, 19 nt, Artificial Sequence
  Description of Artificial Sequence: Synthetic oligonucleotide
auaaacuacauucauuaca

SEQ ID NO: 293239 - RNA, 19 nt, Artificial Sequence
  Description of Artificial Sequence: Synthetic oligonucleotide
agaucagccaacugggugc

SEQ ID NO: 293240 - RNA, 19 nt, Artificial Sequence
  Description of Artificial Sequence: Synthetic oligonucleotide
uuauccaauaagcugguga

SEQ ID NO: 293241 - RNA, 19 nt, Artificial Sequence
  Description of Artificial Sequence: Synthetic oligonucleotide
cauaugacagagaaagucc

SEQ ID NO: 293242 - RNA, 19 nt, Artificial Sequence
  Description of Artificial Sequence: Synthetic oligonucleotide
auaagcuggugauaacugc

SEQ ID NO: 293243 - RNA, 19 nt, Artificial Sequence
  Description of Artificial Sequence: Synthetic oligonucleotide
aauacugucucugucucuc

SEQ ID NO: 293244 - RNA, 19 nt, Artificial Sequence
  Description of Artificial Sequence: Synthetic oligonucleotide
agaguaaggggacuagggc

SEQ ID NO: 293245 - RNA, 19 nt, Artificial Sequence
  Description of Artificial Sequence: Synthetic oligonucleotide
uagaguaaggggacuaggg

SEQ ID NO: 293246 - RNA, 19 nt, Artificial Sequence
  Description of Artificial Sequence: Synthetic oligonucleotide
uucgauacagaucagccaa

SEQ ID NO: 293247 - RNA, 19 nt, Artificial Sequence
  Description of Artificial Sequence: Synthetic oligonucleotide
uacaucuuauuuuauuucu

SEQ ID NO: 293248 - RNA, 19 nt, Artificial Sequence
  Description of Artificial Sequence: Synthetic oligonucleotide
uggauuauccagaacuggc

SEQ ID NO: 293249 - RNA, 19 nt, Artificial Sequence
  Description of Artificial Sequence: Synthetic oligonucleotide
gaagauaacugucaaccac

SEQ ID NO: 293250 - RNA, 19 nt, Artificial Sequence
  Description of Artificial Sequence: Synthetic oligonucleotide
ugacucauaagauauggaa

SEQ ID NO: 293251 - RNA, 19 nt, Artificial Sequence
  Description of Artificial Sequence: Synthetic oligonucleotide
ucuauagcaggccaggauc

SEQ ID NO: 293252 - RNA, 19 nt, Artificial Sequence
  Description of Artificial Sequence: Synthetic oligonucleotide
auauacagugaacugauaa

SEQ ID NO: 293253 - RNA, 19 nt, Artificial Sequence
  Description of Artificial Sequence: Synthetic oligonucleotide
uggacaguggauuauccag

SEQ ID NO: 293254 - RNA, 19 nt, Artificial Sequence
  Description of Artificial Sequence: Synthetic oligonucleotide
acucaguauugccagggcc

SEQ ID NO: 293255 - RNA, 19 nt, Artificial Sequence
  Description of Artificial Sequence: Synthetic oligonucleotide
gaaccauccaguauugggg

SEQ ID NO: 293256 - RNA, 19 nt, Artificial Sequence
  Description of Artificial Sequence: Synthetic oligonucleotide
ugcccuuaagcuaucaaug

SEQ ID NO: 293257 - RNA, 19 nt, Artificial Sequence
  Description of Artificial Sequence: Synthetic oligonucleotide
ucgaacauaggcacgguca

SEQ ID NO: 293258 - RNA, 19 nt, Artificial Sequence
  Description of Artificial Sequence: Synthetic oligonucleotide
gaaaugaaagguccagagc

SEQ ID NO: 293259 - RNA, 19 nt, Artificial Sequence
  Description of Artificial Sequence: Synthetic oligonucleotide
aaggacgcucuucacauug

SEQ ID NO: 293260 - RNA, 19 nt, Artificial Sequence
  Description of Artificial Sequence: Synthetic oligonucleotide
gaucauauacagugaacug

SEQ ID NO: 293261 - RNA, 19 nt, Artificial Sequence
  Description of Artificial Sequence: Synthetic oligonucleotide
agcugucgaacauaggcac

SEQ ID NO: 293262 - RNA, 19 nt, Artificial Sequence
  Description of Artificial Sequence: Synthetic oligonucleotide
ugaaagguccagagcaggg

SEQ ID NO: 293263 - RNA, 19 nt, Artificial Sequence
  Description of Artificial Sequence: Synthetic oligonucleotide
uuuacucuccaccaccuac

SEQ ID NO: 293264 - RNA, 19 nt, Artificial Sequence
  Description of Artificial Sequence: Synthetic oligonucleotide
uauauaucgccacugcuua

SEQ ID NO: 293265 - RNA, 19 nt, Artificial Sequence
  Description of Artificial Sequence: Synthetic oligonucleotide
cuuccugucaucucuauuc

SEQ ID NO: 293266 - RNA, 19 nt, Artificial Sequence
  Description of Artificial Sequence: Synthetic oligonucleotide
uagagagacaacuagucau

SEQ ID NO: 293267 - RNA, 19 nt, Artificial Sequence
  Description of Artificial Sequence: Synthetic oligonucleotide
aguuucgauacagaucagc

SEQ ID NO: 293268 - RNA, 19 nt, Artificial Sequence
  Description of Artificial Sequence: Synthetic oligonucleotide
ugggaucuuauccaauaag

SEQ ID NO: 293269 - RNA, 19 nt, Artificial Sequence
  Description of Artificial Sequence: Synthetic oligonucleotide
aguaacuauaauuuugcua

SEQ ID NO: 293270 - RNA, 19 nt, Artificial Sequence
  Description of Artificial Sequence: Synthetic oligonucleotide
uaaacugggaguagcuuca

SEQ ID NO: 293271 - RNA, 19 nt, Artificial Sequence
  Description of Artificial Sequence: Synthetic oligonucleotide
uacuuuacucuccaccacc

SEQ ID NO: 293272 - RNA, 19 nt, Artificial Sequence
  Description of Artificial Sequence: Synthetic oligonucleotide
ugcuuaaacguucuucaga

SEQ ID NO: 293273 - RNA, 19 nt, Artificial Sequence
  Description of Artificial Sequence: Synthetic oligonucleotide
agagggacucaguauugcc

SEQ ID NO: 293274 - RNA, 19 nt, Artificial Sequence
  Description of Artificial Sequence: Synthetic oligonucleotide
aagauauggaacuguccca

SEQ ID NO: 293275 - RNA, 19 nt, Artificial Sequence
  Description of Artificial Sequence: Synthetic oligonucleotide
cuacauucauuacaacagg

SEQ ID NO: 293276 - RNA, 19 nt, Artificial Sequence
  Description of Artificial Sequence: Synthetic oligonucleotide
aaccggggcaaauacuguc

SEQ ID NO: 293277 - RNA, 19 nt, Artificial Sequence
  Description of Artificial Sequence: Synthetic oligonucleotide
aagauaacugucaaccacu

SEQ ID NO: 293278 - RNA, 19 nt, Artificial Sequence
  Description of Artificial Sequence: Synthetic oligonucleotide
aacaccccgguaugcaaac

SEQ ID NO: 293279 - RNA, 19 nt, Artificial Sequence
  Description of Artificial Sequence: Synthetic oligonucleotide
ugguucagagguacugucg

SEQ ID NO: 293280 - RNA, 19 nt, Artificial Sequence
  Description of Artificial Sequence: Synthetic oligonucleotide
caggacaugacagugguag

SEQ ID NO: 293281 - RNA, 19 nt, Artificial Sequence
  Description of Artificial Sequence: Synthetic oligonucleotide
uauugcucauguagaaagc

SEQ ID NO: 293282 - RNA, 19 nt, Artificial Sequence
  Description of Artificial Sequence: Synthetic oligonucleotide
cacgauaagcuucauguac

SEQ ID NO: 293283 - RNA, 19 nt, Artificial Sequence
  Description of Artificial Sequence: Synthetic oligonucleotide
auauuuaaucccuaauaua

SEQ ID NO: 293284 - RNA, 19 nt, Artificial Sequence
  Description of Artificial Sequence: Synthetic oligonucleotide
ucaucaguagugaccucgg

SEQ ID NO: 293285 - RNA, 19 nt, Artificial Sequence
  Description of Artificial Sequence: Synthetic oligonucleotide
cuaauauaggaaguuguug

SEQ ID NO: 293286 - RNA, 19 nt, Artificial Sequence
  Description of Artificial Sequence: Synthetic oligonucleotide
ugaugagagugucacguac

SEQ ID NO: 293287 - RNA, 19 nt, Artificial Sequence
  Description of Artificial Sequence: Synthetic oligonucleotide
auucacaacaccccgguau

SEQ ID NO: 293288 - RNA, 19 nt, Artificial Sequence
  Description of Artificial Sequence: Synthetic oligonucleotide
uugaaaaggcucuggacaa

SEQ ID NO: 293289 - RNA, 19 nt, Artificial Sequence
  Description of Artificial Sequence: Synthetic oligonucleotide
uuuaccgacuugcuuuagc

SEQ ID NO: 293290 - RNA, 19 nt, Artificial Sequence
  Description of Artificial Sequence: Synthetic oligonucleotide
gacucauaagauauggaac

SEQ ID NO: 293291 - RNA, 19 nt, Artificial Sequence
  Description of Artificial Sequence: Synthetic oligonucleotide
uuaccgacuugcuuuagcu

SEQ ID NO: 293292 - RNA, 19 nt, Artificial Sequence
  Description of Artificial Sequence: Synthetic oligonucleotide
ugggaguagcuucauacac

SEQ ID NO: 293293 - RNA, 19 nt, Artificial Sequence
  Description of Artificial Sequence: Synthetic oligonucleotide
uaucgccacugcuuaaacg

SEQ ID NO: 293294 - RNA, 19 nt, Artificial Sequence
  Description of Artificial Sequence: Synthetic oligonucleotide
accgacuugcuuuagcuca

SEQ ID NO: 293295 - RNA, 19 nt, Artificial Sequence
  Description of Artificial Sequence: Synthetic oligonucleotide
gaguaaggggacuagggca

SEQ ID NO: 293296 - RNA, 19 nt, Artificial Sequence
  Description of Artificial Sequence: Synthetic oligonucleotide
uagguguuaauaugcuuug

SEQ ID NO: 293297 - RNA, 19 nt, Artificial Sequence
  Description of Artificial Sequence: Synthetic oligonucleotide
ugagguauugcaaguugac

SEQ ID NO: 293298 - RNA, 19 nt, Artificial Sequence
  Description of Artificial Sequence: Synthetic oligonucleotide
guaaacugggaguagcuuc

SEQ ID NO: 293299 - RNA, 19 nt, Artificial Sequence
  Description of Artificial Sequence: Synthetic oligonucleotide
aauuccacagucacugucu

SEQ ID NO: 293300 - RNA, 19 nt, Artificial Sequence
  Description of Artificial Sequence: Synthetic oligonucleotide
aacugauaaacuacauuca

SEQ ID NO: 293301 - RNA, 19 nt, Artificial Sequence
  Description of Artificial Sequence: Synthetic oligonucleotide
aaccacucagucaauacca

SEQ ID NO: 293302 - RNA, 19 nt, Artificial Sequence
  Description of Artificial Sequence: Synthetic oligonucleotide
uuuagcucaguagcugccg

SEQ ID NO: 293303 - RNA, 19 nt, Artificial Sequence
  Description of Artificial Sequence: Synthetic oligonucleotide
ucaaugaggccucgaaccu

SEQ ID NO: 293304 - RNA, 19 nt, Artificial Sequence
  Description of Artificial Sequence: Synthetic oligonucleotide
uaaacguucuucagaugcu

SEQ ID NO: 293305 - RNA, 19 nt, Artificial Sequence
  Description of Artificial Sequence: Synthetic oligonucleotide
ccaacaacguuucuggugg

SEQ ID NO: 293306 - RNA, 19 nt, Artificial Sequence
  Description of Artificial Sequence: Synthetic oligonucleotide
auaaccggggcaaauacug

SEQ ID NO: 293307 - RNA, 19 nt, Artificial Sequence
  Description of Artificial Sequence: Synthetic oligonucleotide
caaguugaccaucaggcuc

SEQ ID NO: 293308 - RNA, 19 nt, Artificial Sequence
  Description of Artificial Sequence: Synthetic oligonucleotide
ucaaccacucagucaauac

SEQ ID NO: 293309 - RNA, 19 nt, Artificial Sequence
  Description of Artificial Sequence: Synthetic oligonucleotide
caaccacucagucaauacc

SEQ ID NO: 293310 - RNA, 19 nt, Artificial Sequence
  Description of Artificial Sequence: Synthetic oligonucleotide
cuuucuauagcaggccagg

SEQ ID NO: 293311 - RNA, 19 nt, Artificial Sequence
  Description of Artificial Sequence: Synthetic oligonucleotide
uguaccgcauucucugugc

SEQ ID NO: 293312 - RNA, 19 nt, Artificial Sequence
  Description of Artificial Sequence: Synthetic oligonucleotide
gcugguauaaagcagggca

SEQ ID NO: 293313 - RNA, 19 nt, Artificial Sequence
  Description of Artificial Sequence: Synthetic oligonucleotide
uacugguuacaucuuauuu

SEQ ID NO: 293314 - RNA, 19 nt, Artificial Sequence
  Description of Artificial Sequence: Synthetic oligonucleotide
auccucaguaacuauaauu

SEQ ID NO: 293315 - RNA, 19 nt, Artificial Sequence
  Description of Artificial Sequence: Synthetic oligonucleotide
caacuagucauccauccuc

SEQ ID NO: 293316 - RNA, 19 nt, Artificial Sequence
  Description of Artificial Sequence: Synthetic oligonucleotide
gaugcaccuccacuuaggc

SEQ ID NO: 293317 - RNA, 19 nt, Artificial Sequence
  Description of Artificial Sequence: Synthetic oligonucleotide
agugcucaccaaucauagc

SEQ ID NO: 293318 - RNA, 19 nt, Artificial Sequence
  Description of Artificial Sequence: Synthetic oligonucleotide
auaucgccacugcuuaaac

SEQ ID NO: 293319 - RNA, 19 nt, Artificial Sequence
  Description of Artificial Sequence: Synthetic oligonucleotide
guagaggauauuugagccc

SEQ ID NO: 293320 - RNA, 19 nt, Artificial Sequence
  Description of Artificial Sequence: Synthetic oligonucleotide
aguauugccagggccucgc

SEQ ID NO: 293321 - RNA, 19 nt, Artificial Sequence
  Description of Artificial Sequence: Synthetic oligonucleotide
cugguauaaagcagggcac

SEQ ID NO: 293322 - RNA, 19 nt, Artificial Sequence
  Description of Artificial Sequence: Synthetic oligonucleotide
uggaacagaaacagcuuuc

SEQ ID NO: 293323 - RNA, 19 nt, Artificial Sequence
  Description of Artificial Sequence: Synthetic oligonucleotide
aaucccuaauauaggaagu

SEQ ID NO: 293324 - RNA, 19 nt, Artificial Sequence
  Description of Artificial Sequence: Synthetic oligonucleotide
gcaguuuagggccagguug

SEQ ID NO: 293325 - RNA, 19 nt, Artificial Sequence
  Description of Artificial Sequence: Synthetic oligonucleotide
aacguuucuggugggagcu

SEQ ID NO: 293326 - RNA, 19 nt, Artificial Sequence
  Description of Artificial Sequence: Synthetic oligonucleotide
ucuuauccaauaagcuggu

SEQ ID NO: 293327 - RNA, 19 nt, Artificial Sequence
  Description of Artificial Sequence: Synthetic oligonucleotide
agagagcacacacaaugga

SEQ ID NO: 293328 - RNA, 19 nt, Artificial Sequence
  Description of Artificial Sequence: Synthetic oligonucleotide
uucauugagccggucaucu

SEQ ID NO: 293329 - RNA, 19 nt, Artificial Sequence
  Description of Artificial Sequence: Synthetic oligonucleotide
caggauuagcaggagaaag

SEQ ID NO: 293330 - RNA, 19 nt, Artificial Sequence
  Description of Artificial Sequence: Synthetic oligonucleotide
ugucagucucacaguuucg

SEQ ID NO: 293331 - RNA, 19 nt, Artificial Sequence
  Description of Artificial Sequence: Synthetic oligonucleotide
cacaguuucgauacagauc

SEQ ID NO: 293332 - RNA, 19 nt, Artificial Sequence
  Description of Artificial Sequence: Synthetic oligonucleotide
uccccuagguguuaauaug

SEQ ID NO: 293333 - RNA, 19 nt, Artificial Sequence
  Description of Artificial Sequence: Synthetic oligonucleotide
ucucuuguaucugcaaaca

SEQ ID NO: 293334 - RNA, 19 nt, Artificial Sequence
  Description of Artificial Sequence: Synthetic oligonucleotide
uuggacaguggauuaucca

SEQ ID NO: 293335 - RNA, 19 nt, Artificial Sequence
  Description of Artificial Sequence: Synthetic oligonucleotide
acaugacagugguagagga

SEQ ID NO: 293336 - RNA, 19 nt, Artificial Sequence
  Description of Artificial Sequence: Synthetic oligonucleotide
cccuauaccauuuaccgac

SEQ ID NO: 293337 - RNA, 19 nt, Artificial Sequence
  Description of Artificial Sequence: Synthetic oligonucleotide
uucuauagcaggccaggau

SEQ ID NO: 293338 - RNA, 19 nt, Artificial Sequence
  Description of Artificial Sequence: Synthetic oligonucleotide
aucaauccuagcccuuguc

SEQ ID NO: 293339 - RNA, 19 nt, Artificial Sequence
  Description of Artificial Sequence: Synthetic oligonucleotide
cacagcugguauaaagcag

SEQ ID NO: 293340 - RNA, 19 nt, Artificial Sequence
  Description of Artificial Sequence: Synthetic oligonucleotide
cucgcugccuccaaacccc

SEQ ID NO: 293341 - RNA, 19 nt, Artificial Sequence
  Description of Artificial Sequence: Synthetic oligonucleotide
uaauuuugcuacugaccac

SEQ ID NO: 293342 - RNA, 19 nt, Artificial Sequence
  Description of Artificial Sequence: Synthetic oligonucleotide
cugcacagcugguauaaag

SEQ ID NO: 293343 - RNA, 19 nt, Artificial Sequence
  Description of Artificial Sequence: Synthetic oligonucleotide
uggccugggacccuauacc

SEQ ID NO: 293344 - RNA, 19 nt, Artificial Sequence
  Description of Artificial Sequence: Synthetic oligonucleotide
auugcucauguagaaagcu

SEQ ID NO: 293345 - RNA, 19 nt, Artificial Sequence
  Description of Artificial Sequence: Synthetic oligonucleotide
uugcuuuagcucaguagcu

SEQ ID NO: 293346 - RNA, 19 nt, Artificial Sequence
  Description of Artificial Sequence: Synthetic oligonucleotide
cuggaaguuggccugggac

SEQ ID NO: 293347 - RNA, 19 nt, Artificial Sequence
  Description of Artificial Sequence: Synthetic oligonucleotide
guggauuauccagaacugg

SEQ ID NO: 293348 - RNA, 19 nt, Artificial Sequence
  Description of Artificial Sequence: Synthetic oligonucleotide
gagguauugcaaguugacc

SEQ ID NO: 293349 - RNA, 19 nt, Artificial Sequence
  Description of Artificial Sequence: Synthetic oligonucleotide
acauaggaugcaccuccac

SEQ ID NO: 293350 - RNA, 19 nt, Artificial Sequence
  Description of Artificial Sequence: Synthetic oligonucleotide
agaaaucuacagcacggau

SEQ ID NO: 293351 - RNA, 19 nt, Artificial Sequence
  Description of Artificial Sequence: Synthetic oligonucleotide
ucccuaauauaggaaguug

SEQ ID NO: 293352 - RNA, 19 nt, Artificial Sequence
  Description of Artificial Sequence: Synthetic oligonucleotide
ucagcuuacaugacucaua

SEQ ID NO: 293353 - RNA, 19 nt, Artificial Sequence
  Description of Artificial Sequence: Synthetic oligonucleotide
ucuauucuucagcuucccu

SEQ ID NO: 293354 - RNA, 19 nt, Artificial Sequence
  Description of Artificial Sequence: Synthetic oligonucleotide
gacguugaaaaggcucugg

SEQ ID NO: 293355 - RNA, 19 nt, Artificial Sequence
  Description of Artificial Sequence: Synthetic oligonucleotide
ugugcaccuguauauuuaa

SEQ ID NO: 293356 - RNA, 19 nt, Artificial Sequence
  Description of Artificial Sequence: Synthetic oligonucleotide
uguccgaacccgcaucaca

SEQ ID NO: 293357 - RNA, 19 nt, Artificial Sequence
  Description of Artificial Sequence: Synthetic oligonucleotide
guagagagacaacuaguca

SEQ ID NO: 293358 - RNA, 19 nt, Artificial Sequence
  Description of Artificial Sequence: Synthetic oligonucleotide
cugucgaacauaggcacgg

SEQ ID NO: 293359 - RNA, 19 nt, Artificial Sequence
  Description of Artificial Sequence: Synthetic oligonucleotide
gagguugagcccauuuucc

SEQ ID NO: 293360 - RNA, 19 nt, Artificial Sequence
  Description of Artificial Sequence: Synthetic oligonucleotide
cugucuuguccucaucuag

SEQ ID NO: 293361 - RNA, 19 nt, Artificial Sequence
  Description of Artificial Sequence: Synthetic oligonucleotide
guagaguaaggggacuagg

SEQ ID NO: 293362 - RNA, 19 nt, Artificial Sequence
  Description of Artificial Sequence: Synthetic oligonucleotide
ggugauaacugcucgggac

SEQ ID NO: 293363 - RNA, 19 nt, Artificial Sequence
  Description of Artificial Sequence: Synthetic oligonucleotide
aagcuggugauaacugcuc

SEQ ID NO: 293364 - RNA, 19 nt, Artificial Sequence
  Description of Artificial Sequence: Synthetic oligonucleotide
caauucaguccccaggcuc

SEQ ID NO: 293365 - RNA, 19 nt, Artificial Sequence
  Description of Artificial Sequence: Synthetic oligonucleotide
gucacguacagucuucaca

SEQ ID NO: 293366 - RNA, 19 nt, Artificial Sequence
  Description of Artificial Sequence: Synthetic oligonucleotide
auauauaucgccacugcuu

SEQ ID NO: 293367 - RNA, 19 nt, Artificial Sequence
  Description of Artificial Sequence: Synthetic oligonucleotide
agguguuaauaugcuuugc

SEQ ID NO: 293368 - RNA, 19 nt, Artificial Sequence
  Description of Artificial Sequence: Synthetic oligonucleotide
cacagggcuauucacaaca

SEQ ID NO: 293369 - RNA, 19 nt, Artificial Sequence
  Description of Artificial Sequence: Synthetic oligonucleotide
uguauugcucauguagaaa

SEQ ID NO: 293370 - RNA, 19 nt, Artificial Sequence
  Description of Artificial Sequence: Synthetic oligonucleotide
uggacaacaccuugcugga

SEQ ID NO: 293371 - RNA, 19 nt, Artificial Sequence
  Description of Artificial Sequence: Synthetic oligonucleotide
guagcuucauacacucagg

SEQ ID NO: 293372 - RNA, 19 nt, Artificial Sequence
  Description of Artificial Sequence: Synthetic oligonucleotide
ugguauaaagcagggcaca

SEQ ID NO: 293373 - RNA, 19 nt, Artificial Sequence
  Description of Artificial Sequence: Synthetic oligonucleotide
aguggauuauccagaacug

SEQ ID NO: 293374 - RNA, 19 nt, Artificial Sequence
  Description of Artificial Sequence: Synthetic oligonucleotide
cuagaucauauacagugaa

SEQ ID NO: 293375 - RNA, 19 nt, Artificial Sequence
  Description of Artificial Sequence: Synthetic oligonucleotide
acaacuagucauccauccu

SEQ ID NO: 293376 - RNA, 19 nt, Artificial Sequence
  Description of Artificial Sequence: Synthetic oligonucleotide
gagagacaacuagucaucc

SEQ ID NO: 293377 - RNA, 19 nt, Artificial Sequence
  Description of Artificial Sequence: Synthetic oligonucleotide
aggaaaccagcugucgaac

SEQ ID NO: 293378 - RNA, 19 nt, Artificial Sequence
  Description of Artificial Sequence: Synthetic oligonucleotide
uauaucgccacugcuuaaa

SEQ ID NO: 293379 - RNA, 19 nt, Artificial Sequence
  Description of Artificial Sequence: Synthetic oligonucleotide
agauaacugucaaccacuc

SEQ ID NO: 293380 - RNA, 19 nt, Artificial Sequence
  Description of Artificial Sequence: Synthetic oligonucleotide
uugugcaccuguauauuua

SEQ ID NO: 293381 - RNA, 19 nt, Artificial Sequence
  Description of Artificial Sequence: Synthetic oligonucleotide
acaacguuucuggugggag

SEQ ID NO: 293382 - RNA, 19 nt, Artificial Sequence
  Description of Artificial Sequence: Synthetic oligonucleotide
uggacgcuugcucccaccc

SEQ ID NO: 293383 - RNA, 19 nt, Artificial Sequence
  Description of Artificial Sequence: Synthetic oligonucleotide
acgaagugcucaccaauca

SEQ ID NO: 293384 - RNA, 19 nt, Artificial Sequence
  Description of Artificial Sequence: Synthetic oligonucleotide
acguugaaaaggcucugga

SEQ ID NO: 293385 - RNA, 19 nt, Artificial Sequence
  Description of Artificial Sequence: Synthetic oligonucleotide
aaucuacagcacggauacc

SEQ ID NO: 293386 - RNA, 19 nt, Artificial Sequence
  Description of Artificial Sequence: Synthetic oligonucleotide
agccggucaucuugaauuc

SEQ ID NO: 293387 - RNA, 19 nt, Artificial Sequence
  Description of Artificial Sequence: Synthetic oligonucleotide
caguacuuguccgaacccg

SEQ ID NO: 293388 - RNA, 19 nt, Artificial Sequence
  Description of Artificial Sequence: Synthetic oligonucleotide
agugugucagucucacagu

SEQ ID NO: 293389 - RNA, 19 nt, Artificial Sequence
  Description of Artificial Sequence: Synthetic oligonucleotide
ugaccaucaggcucucuac

SEQ ID NO: 293390 - RNA, 19 nt, Artificial Sequence
  Description of Artificial Sequence: Synthetic oligonucleotide
caacguuucuggugggagc

SEQ ID NO: 293391 - RNA, 19 nt, Artificial Sequence
  Description of Artificial Sequence: Synthetic oligonucleotide
gcauaugacagagaaaguc

SEQ ID NO: 293392 - RNA, 19 nt, Artificial Sequence
  Description of Artificial Sequence: Synthetic oligonucleotide
gguacugucgaugggagac

SEQ ID NO: 293393 - RNA, 19 nt, Artificial Sequence
  Description of Artificial Sequence: Synthetic oligonucleotide
cagugguagaggauauuug

SEQ ID NO: 293394 - RNA, 19 nt, Artificial Sequence
  Description of Artificial Sequence: Synthetic oligonucleotide
agagacaacuagucaucca

SEQ ID NO: 293395 - RNA, 19 nt, Artificial Sequence
  Description of Artificial Sequence: Synthetic oligonucleotide
gauaacugucaaccacuca

SEQ ID NO: 293396 - RNA, 19 nt, Artificial Sequence
  Description of Artificial Sequence: Synthetic oligonucleotide
gacgcucuucacauuguag

SEQ ID NO: 293397 - RNA, 19 nt, Artificial Sequence
  Description of Artificial Sequence: Synthetic oligonucleotide
cugcuuaaacguucuucag

SEQ ID NO: 293398 - RNA, 19 nt, Artificial Sequence
  Description of Artificial Sequence: Synthetic oligonucleotide
uggaaaggaggccgcuacc

SEQ ID NO: 293399 - RNA, 19 nt, Artificial Sequence
  Description of Artificial Sequence: Synthetic oligonucleotide
augacagugguagaggaua

SEQ ID NO: 293400 - RNA, 19 nt, Artificial Sequence
  Description of Artificial Sequence: Synthetic oligonucleotide
cacgaagugcucaccaauc

SEQ ID NO: 293401 - RNA, 19 nt, Artificial Sequence
  Description of Artificial Sequence: Synthetic oligonucleotide
auauuugagcccagaaaga

SEQ ID NO: 293402 - RNA, 19 nt, Artificial Sequence
  Description of Artificial Sequence: Synthetic oligonucleotide
auguaccgcauucucugug

SEQ ID NO: 293403 - RNA, 19 nt, Artificial Sequence
  Description of Artificial Sequence: Synthetic oligonucleotide
gaugagagugucacguaca

SEQ ID NO: 293404 - RNA, 19 nt, Artificial Sequence
  Description of Artificial Sequence: Synthetic oligonucleotide
gaacccgcaucacagcauc

SEQ ID NO: 293405 - RNA, 19 nt, Artificial Sequence
  Description of Artificial Sequence: Synthetic oligonucleotide
cagguaaacugggaguagc

SEQ ID NO: 293406 - RNA, 19 nt, Artificial Sequence
  Description of Artificial Sequence: Synthetic oligonucleotide
acuagaucauauacaguga

SEQ ID NO: 293407 - RNA, 19 nt, Artificial Sequence
  Description of Artificial Sequence: Synthetic oligonucleotide
auccacgaagugcucacca

SEQ ID NO: 293408 - RNA, 19 nt, Artificial Sequence
  Description of Artificial Sequence: Synthetic oligonucleotide
agucuucacagggcuauuc

SEQ ID NO: 293409 - RNA, 19 nt, Artificial Sequence
  Description of Artificial Sequence: Synthetic oligonucleotide
cuagguguuaauaugcuuu

SEQ ID NO: 293410 - RNA, 19 nt, Artificial Sequence
  Description of Artificial Sequence: Synthetic oligonucleotide
ucgauacagaucagccaac

SEQ ID NO: 293411 - RNA, 19 nt, Artificial Sequence
  Description of Artificial Sequence: Synthetic oligonucleotide
ugugcccuuaagcuaucaa

SEQ ID NO: 293412 - RNA, 19 nt, Artificial Sequence
  Description of Artificial Sequence: Synthetic oligonucleotide
uggugguucagagguacug

SEQ ID NO: 293413 - RNA, 19 nt, Artificial Sequence
  Description of Artificial Sequence: Synthetic oligonucleotide
ccuccuguaauaacccugg

SEQ ID NO: 293414 - RNA, 19 nt, Artificial Sequence
  Description of Artificial Sequence: Synthetic oligonucleotide
auaggcacggucaucagua

SEQ ID NO: 293415 - RNA, 19 nt, Artificial Sequence
  Description of Artificial Sequence: Synthetic oligonucleotide
ggaucaacuguccugcaga

SEQ ID NO: 293416 - RNA, 19 nt, Artificial Sequence
  Description of Artificial Sequence: Synthetic oligonucleotide
ucuuggacaguggauuauc

SEQ ID NO: 293417 - RNA, 19 nt, Artificial Sequence
  Description of Artificial Sequence: Synthetic oligonucleotide
auagcaggggagagagagc

SEQ ID NO: 293418 - RNA, 19 nt, Artificial Sequence
  Description of Artificial Sequence: Synthetic oligonucleotide
uuucuauagcaggccagga

SEQ ID NO: 293419 - RNA, 19 nt, Artificial Sequence
  Description of Artificial Sequence: Synthetic oligonucleotide
acccuauaccauuuaccga

SEQ ID NO: 293420 - RNA, 19 nt, Artificial Sequence
  Description of Artificial Sequence: Synthetic oligonucleotide
ggauauuugagcccagaaa

SEQ ID NO: 293421 - RNA, 19 nt, Artificial Sequence
  Description of Artificial Sequence: Synthetic oligonucleotide
gagccggucaucuugaauu

SEQ ID NO: 293422 - RNA, 19 nt, Artificial Sequence
  Description of Artificial Sequence: Synthetic oligonucleotide
accauuuaccgacuugcuu

SEQ ID NO: 293423 - RNA, 19 nt, Artificial Sequence
  Description of Artificial Sequence: Synthetic oligonucleotide
cacugcuuaaacguucuuc

SEQ ID NO: 293424 - RNA, 19 nt, Artificial Sequence
  Description of Artificial Sequence: Synthetic oligonucleotide
uaaccggggcaaauacugu

SEQ ID NO: 293425 - RNA, 19 nt, Artificial Sequence
  Description of Artificial Sequence: Synthetic oligonucleotide
gaugggcuggcacaguucu

SEQ ID NO: 293426 - RNA, 19 nt, Artificial Sequence
  Description of Artificial Sequence: Synthetic oligonucleotide
agugucacguacagucuuc

SEQ ID NO: 293427 - RNA, 19 nt, Artificial Sequence
  Description of Artificial Sequence: Synthetic oligonucleotide
aacaacguuucugguggga

SEQ ID NO: 293428 - RNA, 19 nt, Artificial Sequence
  Description of Artificial Sequence: Synthetic oligonucleotide
ggauaaccggggcaaauac

SEQ ID NO: 293429 - RNA, 19 nt, Artificial Sequence
  Description of Artificial Sequence: Synthetic oligonucleotide
gguucucacuccuuccugc

SEQ ID NO: 293430 - RNA, 19 nt, Artificial Sequence
  Description of Artificial Sequence: Synthetic oligonucleotide
ugcucgggacucuuugaca

SEQ ID NO: 293431 - RNA, 19 nt, Artificial Sequence
  Description of Artificial Sequence: Synthetic oligonucleotide
gaucaacuguccugcagaa

SEQ ID NO: 293432 - RNA, 19 nt, Artificial Sequence
  Description of Artificial Sequence: Synthetic oligonucleotide
gaagugcucaccaaucaua

SEQ ID NO: 293433 - RNA, 19 nt, Artificial Sequence
  Description of Artificial Sequence: Synthetic oligonucleotide
ucauuacaacaggauuagc

SEQ ID NO: 293434 - RNA, 19 nt, Artificial Sequence
  Description of Artificial Sequence: Synthetic oligonucleotide
aacuuccugucaucucuau

SEQ ID NO: 293435 - RNA, 19 nt, Artificial Sequence
  Description of Artificial Sequence: Synthetic oligonucleotide
cugacugaaggaggagacg

SEQ ID NO: 293436 - RNA, 19 nt, Artificial Sequence
  Description of Artificial Sequence: Synthetic oligonucleotide
accaaucauagcaggggag

SEQ ID NO: 293437 - RNA, 19 nt, Artificial Sequence
  Description of Artificial Sequence: Synthetic oligonucleotide
cauccugggguacuuucug

SEQ ID NO: 293438 - RNA, 19 nt, Artificial Sequence
  Description of Artificial Sequence: Synthetic oligonucleotide
cuaucaaugaggccucgaa

SEQ ID NO: 293439 - RNA, 19 nt, Artificial Sequence
  Description of Artificial Sequence: Synthetic oligonucleotide
ugucgaugggagacuuugu

SEQ ID NO: 293440 - RNA, 19 nt, Artificial Sequence
  Description of Artificial Sequence: Synthetic oligonucleotide
gugguugagccaaggacgc

SEQ ID NO: 293441 - RNA, 19 nt, Artificial Sequence
  Description of Artificial Sequence: Synthetic oligonucleotide
gucauccauccucaguaac

SEQ ID NO: 293442 - RNA, 19 nt, Artificial Sequence
  Description of Artificial Sequence: Synthetic oligonucleotide
ggaagauaacugucaacca

SEQ ID NO: 293443 - RNA, 19 nt, Artificial Sequence
  Description of Artificial Sequence: Synthetic oligonucleotide
uaggaugcaccuccacuua

SEQ ID NO: 293444 - RNA, 19 nt, Artificial Sequence
  Description of Artificial Sequence: Synthetic oligonucleotide
cucaucuaguccagccaac

SEQ ID NO: 293445 - RNA, 19 nt, Artificial Sequence
  Description of Artificial Sequence: Synthetic oligonucleotide
gagacguugaaaaggcucu

SEQ ID NO: 293446 - RNA, 19 nt, Artificial Sequence
  Description of Artificial Sequence: Synthetic oligonucleotide
ccccuagguguuaauaugc

SEQ ID NO: 293447 - RNA, 19 nt, Artificial Sequence
  Description of Artificial Sequence: Synthetic oligonucleotide
uaacccugggguucucacu

SEQ ID NO: 293448 - RNA, 19 nt, Artificial Sequence
  Description of Artificial Sequence: Synthetic oligonucleotide
uaggcacggucaucaguag

SEQ ID NO: 293449 - RNA, 19 nt, Artificial Sequence
  Description of Artificial Sequence: Synthetic oligonucleotide
cacguacagucuucacagg

SEQ ID NO: 293450 - RNA, 19 nt, Artificial Sequence
  Description of Artificial Sequence: Synthetic oligonucleotide
ggaguuggaagauaacugu

SEQ ID NO: 293451 - RNA, 19 nt, Artificial Sequence
  Description of Artificial Sequence: Synthetic oligonucleotide
uaccgacuugcuuuagcuc

SEQ ID NO: 293452 - RNA, 19 nt, Artificial Sequence
  Description of Artificial Sequence: Synthetic oligonucleotide
cucaguauugccagggccu

SEQ ID NO: 293453 - RNA, 19 nt, Artificial Sequence
  Description of Artificial Sequence: Synthetic oligonucleotide
caguagugaccucggcucc

SEQ ID NO: 293454 - RNA, 19 nt, Artificial Sequence
  Description of Artificial Sequence: Synthetic oligonucleotide
gcuauucacaacaccccgg

SEQ ID NO: 293455 - RNA, 19 nt, Artificial Sequence
  Description of Artificial Sequence: Synthetic oligonucleotide
acuuuacucuccaccaccu

SEQ ID NO: 293456 - RNA, 19 nt, Artificial Sequence
  Description of Artificial Sequence: Synthetic oligonucleotide
ggagacguugaaaaggcuc

SEQ ID NO: 293457 - RNA, 19 nt, Artificial Sequence
  Description of Artificial Sequence: Synthetic oligonucleotide
uccgaacccgcaucacagc

SEQ ID NO: 293458 - RNA, 19 nt, Artificial Sequence
  Description of Artificial Sequence: Synthetic oligonucleotide
uccuuauaucuugcccucc

SEQ ID NO: 293459 - RNA, 19 nt, Artificial Sequence
  Description of Artificial Sequence: Synthetic oligonucleotide
uccacgaagugcucaccaa

SEQ ID NO: 293460 - RNA, 19 nt, Artificial Sequence
  Description of Artificial Sequence: Synthetic oligonucleotide
cucauucauccacgaagug

SEQ ID NO: 293461 - RNA, 19 nt, Artificial Sequence
  Description of Artificial Sequence: Synthetic oligonucleotide
caucuaguccagccaacuc

SEQ ID NO: 293462 - RNA, 19 nt, Artificial Sequence
  Description of Artificial Sequence: Synthetic oligonucleotide
ggacccuauaccauuuacc

SEQ ID NO: 293463 - RNA, 19 nt, Artificial Sequence
  Description of Artificial Sequence: Synthetic oligonucleotide
ugucacguacagucuucac

SEQ ID NO: 293464 - RNA, 19 nt, Artificial Sequence
  Description of Artificial Sequence: Synthetic oligonucleotide
uauucacaacaccccggua

SEQ ID NO: 293465 - RNA, 19 nt, Artificial Sequence
  Description of Artificial Sequence: Synthetic oligonucleotide
cugcucgggacucuuugac

SEQ ID NO: 293466 - RNA, 19 nt, Artificial Sequence
  Description of Artificial Sequence: Synthetic oligonucleotide
ccgguaugcaaacuuggcc

SEQ ID NO: 293467 - RNA, 19 nt, Artificial Sequence
  Description of Artificial Sequence: Synthetic oligonucleotide
caacaacguuucugguggg

SEQ ID NO: 293468 - RNA, 19 nt, Artificial Sequence
  Description of Artificial Sequence: Synthetic oligonucleotide
guaccgcauucucugugcc

SEQ ID NO: 293469 - RNA, 19 nt, Artificial Sequence
  Description of Artificial Sequence: Synthetic oligonucleotide
gcuuaaacguucuucagau

SEQ ID NO: 293470 - RNA, 19 nt, Artificial Sequence
  Description of Artificial Sequence: Synthetic oligonucleotide
ccuuauaucuugcccuccc

SEQ ID NO: 293471 - RNA, 19 nt, Artificial Sequence
  Description of Artificial Sequence: Synthetic oligonucleotide
agaagagaacugaggucag

SEQ ID NO: 293472 - RNA, 19 nt, Artificial Sequence
  Description of Artificial Sequence: Synthetic oligonucleotide
cuuguccgaacccgcauca

SEQ ID NO: 293473 - RNA, 19 nt, Artificial Sequence
  Description of Artificial Sequence: Synthetic oligonucleotide
aggacaugacagugguaga

SEQ ID NO: 293474 - RNA, 19 nt, Artificial Sequence
  Description of Artificial Sequence: Synthetic oligonucleotide
augacucauaagauaugga

SEQ ID NO: 293475 - RNA, 19 nt, Artificial Sequence
  Description of Artificial Sequence: Synthetic oligonucleotide
cuccacuuaggcucuuguc

SEQ ID NO: 293476 - RNA, 19 nt, Artificial Sequence
  Description of Artificial Sequence: Synthetic oligonucleotide
aucuugaauuccacaguca

SEQ ID NO: 293477 - RNA, 19 nt, Artificial Sequence
  Description of Artificial Sequence: Synthetic oligonucleotide
acaugacucauaagauaug

SEQ ID NO: 293478 - RNA, 19 nt, Artificial Sequence
  Description of Artificial Sequence: Synthetic oligonucleotide
caccaaucauagcagggga

SEQ ID NO: 293479 - RNA, 19 nt, Artificial Sequence
  Description of Artificial Sequence: Synthetic oligonucleotide
auauaucgccacugcuuaa

SEQ ID NO: 293480 - RNA, 19 nt, Artificial Sequence
  Description of Artificial Sequence: Synthetic oligonucleotide
gguagaguaaggggacuag

SEQ ID NO: 293481 - RNA, 19 nt, Artificial Sequence
  Description of Artificial Sequence: Synthetic oligonucleotide
aucccuaauauaggaaguu

SEQ ID NO: 293482 - RNA, 19 nt, Artificial Sequence
  Description of Artificial Sequence: Synthetic oligonucleotide
cccaacaacguuucuggug

SEQ ID NO: 293483 - RNA, 19 nt, Artificial Sequence
  Description of Artificial Sequence: Synthetic oligonucleotide
agucugguaggcaccuguc

SEQ ID NO: 293484 - RNA, 19 nt, Artificial Sequence
  Description of Artificial Sequence: Synthetic oligonucleotide
ccgcaucacagcaucaaag

SEQ ID NO: 293485 - RNA, 19 nt, Artificial Sequence
  Description of Artificial Sequence: Synthetic oligonucleotide
aacugggaguagcuucaua

SEQ ID NO: 293486 - RNA, 19 nt, Artificial Sequence
  Description of Artificial Sequence: Synthetic oligonucleotide
agguaaacugggaguagcu

SEQ ID NO: 293487 - RNA, 19 nt, Artificial Sequence
  Description of Artificial Sequence: Synthetic oligonucleotide
cuauagcaggccaggaucu

SEQ ID NO: 293488 - RNA, 19 nt, Artificial Sequence
  Description of Artificial Sequence: Synthetic oligonucleotide
cacucaggaaggaucaacu

SEQ ID NO: 293489 - RNA, 19 nt, Artificial Sequence
  Description of Artificial Sequence: Synthetic oligonucleotide
cagaaccauccaguauugg

SEQ ID NO: 293490 - RNA, 19 nt, Artificial Sequence
  Description of Artificial Sequence: Synthetic oligonucleotide
agacguugaaaaggcucug

SEQ ID NO: 293491 - RNA, 19 nt, Artificial Sequence
  Description of Artificial Sequence: Synthetic oligonucleotide
acaggauuagcaggagaaa

SEQ ID NO: 293492 - RNA, 19 nt, Artificial Sequence
  Description of Artificial Sequence: Synthetic oligonucleotide
gucaauaccaaagcccagu

SEQ ID NO: 293493 - RNA, 19 nt, Artificial Sequence
  Description of Artificial Sequence: Synthetic oligonucleotide
cauuuaccgacuugcuuua

SEQ ID NO: 293494 - RNA, 19 nt, Artificial Sequence
  Description of Artificial Sequence: Synthetic oligonucleotide
uagcucaguagcugccgaa

SEQ ID NO: 293495 - RNA, 19 nt, Artificial Sequence
  Description of Artificial Sequence: Synthetic oligonucleotide
cagucucacaguuucgaua

SEQ ID NO: 293496 - RNA, 19 nt, Artificial Sequence
  Description of Artificial Sequence: Synthetic oligonucleotide
gauaaccggggcaaauacu

SEQ ID NO: 293497 - RNA, 19 nt, Artificial Sequence
  Description of Artificial Sequence: Synthetic oligonucleotide
auuuaccgacuugcuuuag

SEQ ID NO: 293498 - RNA, 19 nt, Artificial Sequence
  Description of Artificial Sequence: Synthetic oligonucleotide
cuuauccaauaagcuggug

SEQ ID NO: 293499 - RNA, 19 nt, Artificial Sequence
  Description of Artificial Sequence: Synthetic oligonucleotide
ggcaaggauguguggaaca

SEQ ID NO: 293500 - RNA, 19 nt, Artificial Sequence
  Description of Artificial Sequence: Synthetic oligonucleotide
ggaucuuauccaauaagcu

SEQ ID NO: 293501 - RNA, 19 nt, Artificial Sequence
  Description of Artificial Sequence: Synthetic oligonucleotide
gugcccuuaagcuaucaau

SEQ ID NO: 293502 - RNA, 19 nt, Artificial Sequence
  Description of Artificial Sequence: Synthetic oligonucleotide
cucuugugcaccuguauau

SEQ ID NO: 293503 - RNA, 19 nt, Artificial Sequence
  Description of Artificial Sequence: Synthetic oligonucleotide
guaugcaaacuuggccaug

SEQ ID NO: 293504 - RNA, 19 nt, Artificial Sequence
  Description of Artificial Sequence: Synthetic oligonucleotide
gcccuuaagcuaucaauga

SEQ ID NO: 293505 - RNA, 19 nt, Artificial Sequence
  Description of Artificial Sequence: Synthetic oligonucleotide
ggaaaccagcugucgaaca

SEQ ID NO: 293506 - RNA, 19 nt, Artificial Sequence
  Description of Artificial Sequence: Synthetic oligonucleotide
cuggacgcuugcucccacc

SEQ ID NO: 293507 - RNA, 19 nt, Artificial Sequence
  Description of Artificial Sequence: Synthetic oligonucleotide
aguagugaccucggcucca

SEQ ID NO: 293508 - RNA, 19 nt, Artificial Sequence
  Description of Artificial Sequence: Synthetic oligonucleotide
ugggagcaggcaagccuga

SEQ ID NO: 293509 - RNA, 19 nt, Artificial Sequence
  Description of Artificial Sequence: Synthetic oligonucleotide
cuugugcauaugacagaga

SEQ ID NO: 293510 - RNA, 19 nt, Artificial Sequence
  Description of Artificial Sequence: Synthetic oligonucleotide
cuucauugagccggucauc

SEQ ID NO: 293511 - RNA, 19 nt, Artificial Sequence
  Description of Artificial Sequence: Synthetic oligonucleotide
gaacauaggcacggucauc

SEQ ID NO: 293512 - RNA, 19 nt, Artificial Sequence
  Description of Artificial Sequence: Synthetic oligonucleotide
accggggcaaauacugucu

SEQ ID NO: 293513 - RNA, 19 nt, Artificial Sequence
  Description of Artificial Sequence: Synthetic oligonucleotide
guagugaccucggcuccag

SEQ ID NO: 293514 - RNA, 19 nt, Artificial Sequence
  Description of Artificial Sequence: Synthetic oligonucleotide
ccucgcugccuccaaaccc

SEQ ID NO: 293515 - RNA, 19 nt, Artificial Sequence
  Description of Artificial Sequence: Synthetic oligonucleotide
caguuucgauacagaucag

SEQ ID NO: 293516 - RNA, 19 nt, Artificial Sequence
  Description of Artificial Sequence: Synthetic oligonucleotide
ccccgguaugcaaacuugg

SEQ ID NO: 293517 - RNA, 19 nt, Artificial Sequence
  Description of Artificial Sequence: Synthetic oligonucleotide
agcacggauaccaguacuu

SEQ ID NO: 293518 - RNA, 19 nt, Artificial Sequence
  Description of Artificial Sequence: Synthetic oligonucleotide
gccucgaaccuucuuggac

SEQ ID NO: 293519 - RNA, 19 nt, Artificial Sequence
  Description of Artificial Sequence: Synthetic oligonucleotide
cccgguaugcaaacuuggc

SEQ ID NO: 293520 - RNA, 19 nt, Artificial Sequence
  Description of Artificial Sequence: Synthetic oligonucleotide
ccaguacuuguccgaaccc

SEQ ID NO: 293521 - RNA, 19 nt, Artificial Sequence
  Description of Artificial Sequence: Synthetic oligonucleotide
cauugaccaggaagccauc

SEQ ID NO: 293522 - RNA, 19 nt, Artificial Sequence
  Description of Artificial Sequence: Synthetic oligonucleotide
caccuugcuggacgcuugc

SEQ ID NO: 293523 - RNA, 19 nt, Artificial Sequence
  Description of Artificial Sequence: Synthetic oligonucleotide
aaacugggaguagcuucau

SEQ ID NO: 293524 - RNA, 19 nt, Artificial Sequence
  Description of Artificial Sequence: Synthetic oligonucleotide
cauccacgaagugcucacc

SEQ ID NO: 293525 - RNA, 19 nt, Artificial Sequence
  Description of Artificial Sequence: Synthetic oligonucleotide
caguauugccagggccucg

SEQ ID NO: 293526 - RNA, 19 nt, Artificial Sequence
  Description of Artificial Sequence: Synthetic oligonucleotide
caguaacuauaauuuugcu

SEQ ID NO: 293527 - RNA, 19 nt, Artificial Sequence
  Description of Artificial Sequence: Synthetic oligonucleotide
cuagggcaccuuccaucag

SEQ ID NO: 293528 - RNA, 19 nt, Artificial Sequence
  Description of Artificial Sequence: Synthetic oligonucleotide
aggcucauucauccacgaa

SEQ ID NO: 293529 - RNA, 19 nt, Artificial Sequence
  Description of Artificial Sequence: Synthetic oligonucleotide
uccuagcccuuguccugcc

SEQ ID NO: 293530 - RNA, 19 nt, Artificial Sequence
  Description of Artificial Sequence: Synthetic oligonucleotide
guauaaagcagggcacacu

SEQ ID NO: 293531 - RNA, 19 nt, Artificial Sequence
  Description of Artificial Sequence: Synthetic oligonucleotide
gccccaacuacuuuacucu

SEQ ID NO: 293532 - RNA, 19 nt, Artificial Sequence
  Description of Artificial Sequence: Synthetic oligonucleotide
ggccugggacccuauacca

SEQ ID NO: 293533 - RNA, 19 nt, Artificial Sequence
  Description of Artificial Sequence: Synthetic oligonucleotide
ccagagggacucaguauug

SEQ ID NO: 293534 - RNA, 19 nt, Artificial Sequence
  Description of Artificial Sequence: Synthetic oligonucleotide
guacuuguccgaacccgca

SEQ ID NO: 293535 - RNA, 19 nt, Artificial Sequence
  Description of Artificial Sequence: Synthetic oligonucleotide
ccauuuaccgacuugcuuu

SEQ ID NO: 293536 - RNA, 19 nt, Artificial Sequence
  Description of Artificial Sequence: Synthetic oligonucleotide
cacggauaccaguacuugu

SEQ ID NO: 293537 - RNA, 19 nt, Artificial Sequence
  Description of Artificial Sequence: Synthetic oligonucleotide
gugaugagagugucacgua

SEQ ID NO: 293538 - RNA, 19 nt, Artificial Sequence
  Description of Artificial Sequence: Synthetic oligonucleotide
cuccccuagguguuaauau

SEQ ID NO: 293539 - RNA, 19 nt, Artificial Sequence
  Description of Artificial Sequence: Synthetic oligonucleotide
caccuacagucuguacccc

SEQ ID NO: 293540 - RNA, 19 nt, Artificial Sequence
  Description of Artificial Sequence: Synthetic oligonucleotide
gcacggauaccaguacuug

SEQ ID NO: 293541 - RNA, 19 nt, Artificial Sequence
  Description of Artificial Sequence: Synthetic oligonucleotide
cauaggcacggucaucagu

SEQ ID NO: 293542 - RNA, 19 nt, Artificial Sequence
  Description of Artificial Sequence: Synthetic oligonucleotide
aggagacguugaaaaggcu

SEQ ID NO: 293543 - RNA, 19 nt, Artificial Sequence
  Description of Artificial Sequence: Synthetic oligonucleotide
gcucuugugcaccuguaua

SEQ ID NO: 293544 - RNA, 19 nt, Artificial Sequence
  Description of Artificial Sequence: Synthetic oligonucleotide
uuguccgaacccgcaucac

SEQ ID NO: 293545 - RNA, 19 nt, Artificial Sequence
  Description of Artificial Sequence: Synthetic oligonucleotide
gugaccucggcuccaggcu

SEQ ID NO: 293546 - RNA, 19 nt, Artificial Sequence
  Description of Artificial Sequence: Synthetic oligonucleotide
aggccgcuaccuccccuag

SEQ ID NO: 293547 - RNA, 19 nt, Artificial Sequence
  Description of Artificial Sequence: Synthetic oligonucleotide
ccaaucauagcaggggaga

SEQ ID NO: 293548 - RNA, 19 nt, Artificial Sequence
  Description of Artificial Sequence: Synthetic oligonucleotide
acccgcaucacagcaucaa

SEQ ID NO: 293549 - RNA, 19 nt, Artificial Sequence
  Description of Artificial Sequence: Synthetic oligonucleotide
ccgacuugcuuuagcucag

SEQ ID NO: 293550 - RNA, 19 nt, Artificial Sequence
  Description of Artificial Sequence: Synthetic oligonucleotide
ugguugagccaaggacgcu

SEQ ID NO: 293551 - RNA, 19 nt, Artificial Sequence
  Description of Artificial Sequence: Synthetic oligonucleotide
gguaugcaaacuuggccau

SEQ ID NO: 293552 - RNA, 19 nt, Artificial Sequence
  Description of Artificial Sequence: Synthetic oligonucleotide
agccgacgcugcccugcac

SEQ ID NO: 293553 - RNA, 19 nt, Artificial Sequence
  Description of Artificial Sequence: Synthetic oligonucleotide
caugacagugguagaggau

SEQ ID NO: 293554 - RNA, 19 nt, Artificial Sequence
  Description of Artificial Sequence: Synthetic oligonucleotide
ggcaucccgggcugggagc

SEQ ID NO: 293555 - RNA, 19 nt, Artificial Sequence
  Description of Artificial Sequence: Synthetic oligonucleotide
cuuuacucuccaccaccua

SEQ ID NO: 293556 - RNA, 19 nt, Artificial Sequence
  Description of Artificial Sequence: Synthetic oligonucleotide
gcaaguugaccaucaggcu

SEQ ID NO: 293557 - RNA, 19 nt, Artificial Sequence
  Description of Artificial Sequence: Synthetic oligonucleotide
gucagcuuacaugacucau

SEQ ID NO: 293558 - RNA, 19 nt, Artificial Sequence
  Description of Artificial Sequence: Synthetic oligonucleotide
aggacgcucuucacauugu

SEQ ID NO: 293559 - RNA, 19 nt, Artificial Sequence
  Description of Artificial Sequence: Synthetic oligonucleotide
cauuggucucggccacauc

SEQ ID NO: 293560 - RNA, 19 nt, Artificial Sequence
  Description of Artificial Sequence: Synthetic oligonucleotide
agccaaccaccuucucuuu

SEQ ID NO: 293561 - RNA, 19 nt, Artificial Sequence
  Description of Artificial Sequence: Synthetic oligonucleotide
caauuggaguuggaagaua

SEQ ID NO: 293562 - RNA, 19 nt, Artificial Sequence
  Description of Artificial Sequence: Synthetic oligonucleotide
ccuaauauaggaaguuguu

SEQ ID NO: 293563 - RNA, 19 nt, Artificial Sequence
  Description of Artificial Sequence: Synthetic oligonucleotide
cauguaccgcauucucugu

SEQ ID NO: 293564 - RNA, 19 nt, Artificial Sequence
  Description of Artificial Sequence: Synthetic oligonucleotide
ucgaaccuucuuggacagu

SEQ ID NO: 293565 - RNA, 19 nt, Artificial Sequence
  Description of Artificial Sequence: Synthetic oligonucleotide
gccgacgcugcccugcaca

SEQ ID NO: 293566 - RNA, 19 nt, Artificial Sequence
  Description of Artificial Sequence: Synthetic oligonucleotide
uaccuccccuagguguuaa

SEQ ID NO: 293567 - RNA, 19 nt, Artificial Sequence
  Description of Artificial Sequence: Synthetic oligonucleotide
gggaguagcuucauacacu

SEQ ID NO: 293568 - RNA, 19 nt, Artificial Sequence
  Description of Artificial Sequence: Synthetic oligonucleotide
gggcaaggauguguggaac

SEQ ID NO: 293569 - RNA, 19 nt, Artificial Sequence
  Description of Artificial Sequence: Synthetic oligonucleotide
ccuguauauuuaaucccua

SEQ ID NO: 293570 - RNA, 19 nt, Artificial Sequence
  Description of Artificial Sequence: Synthetic oligonucleotide
ggccgcuaccuccccuagg

SEQ ID NO: 293571 - RNA, 19 nt, Artificial Sequence
  Description of Artificial Sequence: Synthetic oligonucleotide
gccgcuaccuccccuaggu

SEQ ID NO: 293572 - RNA, 19 nt, Artificial Sequence
  Description of Artificial Sequence: Synthetic oligonucleotide
acaccccgguaugcaaacu

SEQ ID NO: 293573 - RNA, 19 nt, Artificial Sequence
  Description of Artificial Sequence: Synthetic oligonucleotide
ccgacgcugcccugcacag

SEQ ID NO: 293574 - RNA, 19 nt, Artificial Sequence
  Description of Artificial Sequence: Synthetic oligonucleotide
ccgaacccgcaucacagca

SEQ ID NO: 293575 - RNA, 19 nt, Artificial Sequence
  Description of Artificial Sequence: Synthetic oligonucleotide
ggcucucuacagaaccauc

SEQ ID NO: 293576 - RNA, 19 nt, Artificial Sequence
  Description of Artificial Sequence: Synthetic oligonucleotide
caccuuccaucagcaggac

SEQ ID NO: 293577 - RNA, 19 nt, Artificial Sequence
  Description of Artificial Sequence: Synthetic oligonucleotide
ccggggcaaauacugucuc

SEQ ID NO: 293578 - RNA, 19 nt, Artificial Sequence
  Description of Artificial Sequence: Synthetic oligonucleotide
ggacgcuugcucccaccca

SEQ ID NO: 293579 - RNA, 19 nt, Artificial Sequence
  Description of Artificial Sequence: Synthetic oligonucleotide
cgccacugcuuaaacguuc

SEQ ID NO: 293580 - RNA, 19 nt, Artificial Sequence
  Description of Artificial Sequence: Synthetic oligonucleotide
guacugucgaugggagacu

SEQ ID NO: 293581 - RNA, 19 nt, Artificial Sequence
  Description of Artificial Sequence: Synthetic oligonucleotide
cauccucaguaacuauaau

SEQ ID NO: 293582 - RNA, 19 nt, Artificial Sequence
  Description of Artificial Sequence: Synthetic oligonucleotide
ccacucagucaauaccaaa

SEQ ID NO: 293583 - RNA, 19 nt, Artificial Sequence
  Description of Artificial Sequence: Synthetic oligonucleotide
acugucgaugggagacuuu

SEQ ID NO: 293584 - RNA, 19 nt, Artificial Sequence
  Description of Artificial Sequence: Synthetic oligonucleotide
ggccucgaaccuucuugga

SEQ ID NO: 293585 - RNA, 19 nt, Artificial Sequence
  Description of Artificial Sequence: Synthetic oligonucleotide
cugugcccuuaagcuauca

SEQ ID NO: 293586 - RNA, 19 nt, Artificial Sequence
  Description of Artificial Sequence: Synthetic oligonucleotide
caccccgguaugcaaacuu

SEQ ID NO: 293587 - RNA, 19 nt, Artificial Sequence
  Description of Artificial Sequence: Synthetic oligonucleotide
cugugagguauugcaaguu

SEQ ID NO: 293588 - RNA, 19 nt, Artificial Sequence
  Description of Artificial Sequence: Synthetic oligonucleotide
guauugccagggccucgcu

SEQ ID NO: 293589 - RNA, 19 nt, Artificial Sequence
  Description of Artificial Sequence: Synthetic oligonucleotide
gcuggacgcuugcucccac

SEQ ID NO: 293590 - RNA, 19 nt, Artificial Sequence
  Description of Artificial Sequence: Synthetic oligonucleotide
ccuauaccauuuaccgacu

SEQ ID NO: 293591 - RNA, 19 nt, Artificial Sequence
  Description of Artificial Sequence: Synthetic oligonucleotide
cccuagguguuaauaugcu

SEQ ID NO: 293592 - RNA, 19 nt, Artificial Sequence
  Description of Artificial Sequence: Synthetic oligonucleotide
gccacugcuuaaacguucu

SEQ ID NO: 293593 - RNA, 19 nt, Artificial Sequence
  Description of Artificial Sequence: Synthetic oligonucleotide
ccuagguguuaauaugcuu

SEQ ID NO: 293594 - RNA, 19 nt, Artificial Sequence
  Description of Artificial Sequence: Synthetic oligonucleotide
cccgcaucacagcaucaaa

SEQ ID NO: 293595 - RNA, 19 nt, Artificial Sequence
  Description of Artificial Sequence: Synthetic oligonucleotide
ccgcuaccuccccuaggug

SEQ ID NO: 293596 - RNA, 19 nt, Artificial Sequence
  Description of Artificial Sequence: Synthetic oligonucleotide
cuaccuccccuagguguua

SEQ ID NO: 293597 - RNA, 19 nt, Artificial Sequence
  Description of Artificial Sequence: Synthetic oligonucleotide
cgaacauaggcacggucau

SEQ ID NO: 293598 - RNA, 19 nt, Artificial Sequence
  Description of Artificial Sequence: Synthetic oligonucleotide
ccaacugggugcagcaguu

SEQ ID NO: 293599 - RNA, 19 nt, Artificial Sequence
  Description of Artificial Sequence: Synthetic oligonucleotide
ccuccccuagguguuaaua

SEQ ID NO: 293600 - RNA, 19 nt, Artificial Sequence
  Description of Artificial Sequence: Synthetic oligonucleotide
cgaagugcucaccaaucau

SEQ ID NO: 293601 - RNA, 19 nt, Artificial Sequence
  Description of Artificial Sequence: Synthetic oligonucleotide
cggggcaaauacugucucu

SEQ ID NO: 293602 - RNA, 19 nt, Artificial Sequence
  Description of Artificial Sequence: Synthetic oligonucleotide
cgaacccgcaucacagcau

SEQ ID NO: 293603 - RNA, 19 nt, Artificial Sequence
  Description of Artificial Sequence: Synthetic oligonucleotide
cgcauucucugugcccuua

SEQ ID NO: 293604 - RNA, 19 nt, Artificial Sequence
  Description of Artificial Sequence: Synthetic oligonucleotide
ccacugcuuaaacguucuu

SEQ ID NO: 293605 - RNA, 19 nt, Artificial Sequence
  Description of Artificial Sequence: Synthetic oligonucleotide
uauauuuccacucauggcu

SEQ ID NO: 293606 - RNA, 19 nt, Artificial Sequence
  Description of Artificial Sequence: Synthetic oligonucleotide
uaucauauaacugauaccu

SEQ ID NO: 293607 - RNA, 19 nt, Artificial Sequence
  Description of Artificial Sequence: Synthetic oligonucleotide
gagaauaucauauaacuga

SEQ ID NO: 293608 - RNA, 19 nt, Artificial Sequence
  Description of Artificial Sequence: Synthetic oligonucleotide
uucuauaauguccaggcgc

SEQ ID NO: 293609 - RNA, 19 nt, Artificial Sequence
  Description of Artificial Sequence: Synthetic oligonucleotide
acuaagauggucaaauacc

SEQ ID NO: 293610 - RNA, 19 nt, Artificial Sequence
  Description of Artificial Sequence: Synthetic oligonucleotide
auauauuuccacucauggc

SEQ ID NO: 293611 - RNA, 19 nt, Artificial Sequence
  Description of Artificial Sequence: Synthetic oligonucleotide
uuagauuugcacauuauua

SEQ ID NO: 293612 - RNA, 19 nt, Artificial Sequence
  Description of Artificial Sequence: Synthetic oligonucleotide
ucucguaucucucagucug

SEQ ID NO: 293613 - RNA, 19 nt, Artificial Sequence
  Description of Artificial Sequence: Synthetic oligonucleotide
ucgaggaucaaguaguuga

SEQ ID NO: 293614 - RNA, 19 nt, Artificial Sequence
  Description of Artificial Sequence: Synthetic oligonucleotide
auauuaaacgcucguaucu

SEQ ID NO: 293615 - RNA, 19 nt, Artificial Sequence
  Description of Artificial Sequence: Synthetic oligonucleotide
agugccguaacgcuccucc

SEQ ID NO: 293616 - RNA, 19 nt, Artificial Sequence
  Description of Artificial Sequence: Synthetic oligonucleotide
aaagugcugagcgagguuc

SEQ ID NO: 293617 - RNA, 19 nt, Artificial Sequence
  Description of Artificial Sequence: Synthetic oligonucleotide
agaacaguccgguugaucu

SEQ ID NO: 293618 - RNA, 19 nt, Artificial Sequence
  Description of Artificial Sequence: Synthetic oligonucleotide
ugugcgaugacccuggcau

SEQ ID NO: 293619 - RNA, 19 nt, Artificial Sequence
  Description of Artificial Sequence: Synthetic oligonucleotide
ugacauggaauuaaaacua

SEQ ID NO: 293620 - RNA, 19 nt, Artificial Sequence
  Description of Artificial Sequence: Synthetic oligonucleotide
aacgcucguaucuuguuag

SEQ ID NO: 293621 - RNA, 19 nt, Artificial Sequence
  Description of Artificial Sequence: Synthetic oligonucleotide
ucauauaacugauaccuuc

SEQ ID NO: 293622 - RNA, 19 nt, Artificial Sequence
  Description of Artificial Sequence: Synthetic oligonucleotide
uguggauauuaaacgcucg

SEQ ID NO: 293623 - RNA, 19 nt, Artificial Sequence
  Description of Artificial Sequence: Synthetic oligonucleotide
aacauuagcaacaguuauc

SEQ ID NO: 293624 - RNA, 19 nt, Artificial Sequence
  Description of Artificial Sequence: Synthetic oligonucleotide
uuucuauaauguccaggcg

SEQ ID NO: 293625 - RNA, 19 nt, Artificial Sequence
  Description of Artificial Sequence: Synthetic oligonucleotide
ugagcucacacccaugcgc

SEQ ID NO: 293626 - RNA, 19 nt, Artificial Sequence
  Description of Artificial Sequence: Synthetic oligonucleotide
ugauaggcggcacaaacgu

SEQ ID NO: 293627 - RNA, 19 nt, Artificial Sequence
  Description of Artificial Sequence: Synthetic oligonucleotide
gaucccaaggucucgcugg

SEQ ID NO: 293628 - RNA, 19 nt, Artificial Sequence
  Description of Artificial Sequence: Synthetic oligonucleotide
ucuuucuauaauguccagg

SEQ ID NO: 293629 - RNA, 19 nt, Artificial Sequence
  Description of Artificial Sequence: Synthetic oligonucleotide
ugaaugacgacacgguuuc

SEQ ID NO: 293630 - RNA, 19 nt, Artificial Sequence
  Description of Artificial Sequence: Synthetic oligonucleotide
gagacuucuaguauccuag

SEQ ID NO: 293631 - RNA, 19 nt, Artificial Sequence
  Description of Artificial Sequence: Synthetic oligonucleotide
accucuuagccauaucagg

SEQ ID NO: 293632 - RNA, 19 nt, Artificial Sequence
  Description of Artificial Sequence: Synthetic oligonucleotide
uagugucugaagagaaccg

SEQ ID NO: 293633 - RNA, 19 nt, Artificial Sequence
  Description of Artificial Sequence: Synthetic oligonucleotide
aguccgguugaucuuaaag

SEQ ID NO: 293634 - RNA, 19 nt, Artificial Sequence
  Description of Artificial Sequence: Synthetic oligonucleotide
agugucugaagagaaccgc

SEQ ID NO: 293635 - RNA, 19 nt, Artificial Sequence
  Description of Artificial Sequence: Synthetic oligonucleotide
aguaguugacgccagaguu

SEQ ID NO: 293636 - RNA, 19 nt, Artificial Sequence
  Description of Artificial Sequence: Synthetic oligonucleotide
ugagagggcgguuaaaauc

SEQ ID NO: 293637 - RNA, 19 nt, Artificial Sequence
  Description of Artificial Sequence: Synthetic oligonucleotide
aggcaagguaaugaguucc

SEQ ID NO: 293638 - RNA, 19 nt, Artificial Sequence
  Description of Artificial Sequence: Synthetic oligonucleotide
uuuuaguuccacugcuacc

SEQ ID NO: 293639 - RNA, 19 nt, Artificial Sequence
  Description of Artificial Sequence: Synthetic oligonucleotide
uuauuaugguucucagagc

SEQ ID NO: 293640 - RNA, 19 nt, Artificial Sequence
  Description of Artificial Sequence: Synthetic oligonucleotide
ucuaguauccuagcaaccu

SEQ ID NO: 293641 - RNA, 19 nt, Artificial Sequence
  Description of Artificial Sequence: Synthetic oligonucleotide
aaucaguaguaauuuuaaa

SEQ ID NO: 293642 - RNA, 19 nt, Artificial Sequence
  Description of Artificial Sequence: Synthetic oligonucleotide
caugauaggcggcacaaac

SEQ ID NO: 293643 - RNA, 19 nt, Artificial Sequence
  Description of Artificial Sequence: Synthetic oligonucleotide
uuaaacgcucguaucuugu

SEQ ID NO: 293644 - RNA, 19 nt, Artificial Sequence
  Description of Artificial Sequence: Synthetic oligonucleotide
ugaucuuaaagugcugagc

SEQ ID NO: 293645 - RNA, 19 nt, Artificial Sequence
  Description of Artificial Sequence: Synthetic oligonucleotide
ucaucuauccgcugugcug

SEQ ID NO: 293646 - RNA, 19 nt, Artificial Sequence
  Description of Artificial Sequence: Synthetic oligonucleotide
auuaaacgcucguaucuug

SEQ ID NO: 293647 - RNA, 19 nt, Artificial Sequence
  Description of Artificial Sequence: Synthetic oligonucleotide
uucuaguauccuagcaacc

SEQ ID NO: 293648 - RNA, 19 nt, Artificial Sequence
  Description of Artificial Sequence: Synthetic oligonucleotide
agacuucuaguauccuagc

SEQ ID NO: 293649 - RNA, 19 nt, Artificial Sequence
  Description of Artificial Sequence: Synthetic oligonucleotide
agagaauaucauauaacug

SEQ ID NO: 293650 - RNA, 19 nt, Artificial Sequence
  Description of Artificial Sequence: Synthetic oligonucleotide
guaacgcuccuccagacac

SEQ ID NO: 293651 - RNA, 19 nt, Artificial Sequence
  Description of Artificial Sequence: Synthetic oligonucleotide
ggcgguuaaaaucugguug

SEQ ID NO: 293652 - RNA, 19 nt, Artificial Sequence
  Description of Artificial Sequence: Synthetic oligonucleotide
agcuaugucuucuuaaauu

SEQ ID NO: 293653 - RNA, 19 nt, Artificial Sequence
  Description of Artificial Sequence: Synthetic oligonucleotide
auaaguaugcucugugcaa

SEQ ID NO: 293654 - RNA, 19 nt, Artificial Sequence
  Description of Artificial Sequence: Synthetic oligonucleotide
aaugacgacacgguuucca

SEQ ID NO: 293655 - RNA, 19 nt, Artificial Sequence
  Description of Artificial Sequence: Synthetic oligonucleotide
ugacucuccgacugguggg

SEQ ID NO: 293656 - RNA, 19 nt, Artificial Sequence
  Description of Artificial Sequence: Synthetic oligonucleotide
cuacguaggucuucgcugc

SEQ ID NO: 293657 - RNA, 19 nt, Artificial Sequence
  Description of Artificial Sequence: Synthetic oligonucleotide
guagcagcgcaccaacccg

SEQ ID NO: 293658 - RNA, 19 nt, Artificial Sequence
  Description of Artificial Sequence: Synthetic oligonucleotide
uaguugacgccagaguucc

SEQ ID NO: 293659 - RNA, 19 nt, Artificial Sequence
  Description of Artificial Sequence: Synthetic oligonucleotide
aaccucuuagccauaucag

SEQ ID NO: 293660 - RNA, 19 nt, Artificial Sequence
  Description of Artificial Sequence: Synthetic oligonucleotide
uuguuagauuugcacauua

SEQ ID NO: 293661 - RNA, 19 nt, Artificial Sequence
  Description of Artificial Sequence: Synthetic oligonucleotide
acgguuuccaugauaggcg

SEQ ID NO: 293662 - RNA, 19 nt, Artificial Sequence
  Description of Artificial Sequence: Synthetic oligonucleotide
auugggucugaaugacgac

SEQ ID NO: 293663 - RNA, 19 nt, Artificial Sequence
  Description of Artificial Sequence: Synthetic oligonucleotide
aaacuaagauggucaaaua

SEQ ID NO: 293664 - RNA, 19 nt, Artificial Sequence
  Description of Artificial Sequence: Synthetic oligonucleotide
cuucucguaucucucaguc

SEQ ID NO: 293665 - RNA, 19 nt, Artificial Sequence
  Description of Artificial Sequence: Synthetic oligonucleotide
cauugggucugaaugacga

SEQ ID NO: 293666 - RNA, 19 nt, Artificial Sequence
  Description of Artificial Sequence: Synthetic oligonucleotide
gaugcuacccguggugagg

SEQ ID NO: 293667 - RNA, 19 nt, Artificial Sequence
  Description of Artificial Sequence: Synthetic oligonucleotide
augauaggcggcacaaacg

SEQ ID NO: 293668 - RNA, 19 nt, Artificial Sequence
  Description of Artificial Sequence: Synthetic oligonucleotide
uaccugucggggaauccgg

SEQ ID NO: 293669 - RNA, 19 nt, Artificial Sequence
  Description of Artificial Sequence: Synthetic oligonucleotide
uggugaagugccguaacgc

SEQ ID NO: 293670 - RNA, 19 nt, Artificial Sequence
  Description of Artificial Sequence: Synthetic oligonucleotide
auaccugucggggaauccg

SEQ ID NO: 293671 - RNA, 19 nt, Artificial Sequence
  Description of Artificial Sequence: Synthetic oligonucleotide
guugacgccagaguuccgg

SEQ ID NO: 293672 - RNA, 19 nt, Artificial Sequence
  Description of Artificial Sequence: Synthetic oligonucleotide
agaauaucauauaacugau

SEQ ID NO: 293673 - RNA, 19 nt, Artificial Sequence
  Description of Artificial Sequence: Synthetic oligonucleotide
aaacgcucguaucuuguua

SEQ ID NO: 293674 - RNA, 19 nt, Artificial Sequence
  Description of Artificial Sequence: Synthetic oligonucleotide
agcaacaguuaucuuaaua

SEQ ID NO: 293675 - RNA, 19 nt, Artificial Sequence
  Description of Artificial Sequence: Synthetic oligonucleotide
ugccguaacgcuccuccag

SEQ ID NO: 293676 - RNA, 19 nt, Artificial Sequence
  Description of Artificial Sequence: Synthetic oligonucleotide
agcaacauagcuaugucuu

SEQ ID NO: 293677 - RNA, 19 nt, Artificial Sequence
  Description of Artificial Sequence: Synthetic oligonucleotide
auggcuacguaggucuucg

SEQ ID NO: 293678 - RNA, 19 nt, Artificial Sequence
  Description of Artificial Sequence: Synthetic oligonucleotide
ucguaucuuguuagauuug

SEQ ID NO: 293679 - RNA, 19 nt, Artificial Sequence
  Description of Artificial Sequence: Synthetic oligonucleotide
uuaguuccacugcuaccug

SEQ ID NO: 293680 - RNA, 19 nt, Artificial Sequence
  Description of Artificial Sequence: Synthetic oligonucleotide
agagacuucuaguauccua

SEQ ID NO: 293681 - RNA, 19 nt, Artificial Sequence
  Description of Artificial Sequence: Synthetic oligonucleotide
cagugggacugauacacug

SEQ ID NO: 293682 - RNA, 19 nt, Artificial Sequence
  Description of Artificial Sequence: Synthetic oligonucleotide
auacacugcuuggugggac

SEQ ID NO: 293683 - RNA, 19 nt, Artificial Sequence
  Description of Artificial Sequence: Synthetic oligonucleotide
aguggugccguagagcagu

SEQ ID NO: 293684 - RNA, 19 nt, Artificial Sequence
  Description of Artificial Sequence: Synthetic oligonucleotide
gcuacguaggucuucgcug

SEQ ID NO: 293685 - RNA, 19 nt, Artificial Sequence
  Description of Artificial Sequence: Synthetic oligonucleotide
acaaccagcaacauagcua

SEQ ID NO: 293686 - RNA, 19 nt, Artificial Sequence
  Description of Artificial Sequence: Synthetic oligonucleotide
uggauauuaaacgcucgua

SEQ ID NO: 293687 - RNA, 19 nt, Artificial Sequence
  Description of Artificial Sequence: Synthetic oligonucleotide
cucguaucucucagucugg

SEQ ID NO: 293688 - RNA, 19 nt, Artificial Sequence
  Description of Artificial Sequence: Synthetic oligonucleotide
agauaggccgccgguugcc

SEQ ID NO: 293689 - RNA, 19 nt, Artificial Sequence
  Description of Artificial Sequence: Synthetic oligonucleotide
ggcuguuuggguguagugg

SEQ ID NO: 293690 - RNA, 19 nt, Artificial Sequence
  Description of Artificial Sequence: Synthetic oligonucleotide
gagcucacacccaugcgcc

SEQ ID NO: 293691 - RNA, 19 nt, Artificial Sequence
  Description of Artificial Sequence: Synthetic oligonucleotide
ucgguucuccaaaguaccu

SEQ ID NO: 293692 - RNA, 19 nt, Artificial Sequence
  Description of Artificial Sequence: Synthetic oligonucleotide
ugcgaugacccuggcauca

SEQ ID NO: 293693 - RNA, 19 nt, Artificial Sequence
  Description of Artificial Sequence: Synthetic oligonucleotide
ggucacuagaggcaucagc

SEQ ID NO: 293694 - RNA, 19 nt, Artificial Sequence
  Description of Artificial Sequence: Synthetic oligonucleotide
gaauaugauggcaccgcuc

SEQ ID NO: 293695 - RNA, 19 nt, Artificial Sequence
  Description of Artificial Sequence: Synthetic oligonucleotide
aggucagaacaaaguuucc

SEQ ID NO: 293696 - RNA, 19 nt, Artificial Sequence
  Description of Artificial Sequence: Synthetic oligonucleotide
cagccuauuggcaggugac

SEQ ID NO: 293697 - RNA, 19 nt, Artificial Sequence
  Description of Artificial Sequence: Synthetic oligonucleotide
uauuccugaggagguuucc

SEQ ID NO: 293698 - RNA, 19 nt, Artificial Sequence
  Description of Artificial Sequence: Synthetic oligonucleotide
aacaguccgguugaucuua

SEQ ID NO: 293699 - RNA, 19 nt, Artificial Sequence
  Description of Artificial Sequence: Synthetic oligonucleotide
gauaccugucggggaaucc

SEQ ID NO: 293700 - RNA, 19 nt, Artificial Sequence
  Description of Artificial Sequence: Synthetic oligonucleotide
uaaacgcucguaucuuguu

SEQ ID NO: 293701 - RNA, 19 nt, Artificial Sequence
  Description of Artificial Sequence: Synthetic oligonucleotide
gucauugggucugaaugac

SEQ ID NO: 293702 - RNA, 19 nt, Artificial Sequence
  Description of Artificial Sequence: Synthetic oligonucleotide
cucguaucuuguuagauuu

SEQ ID NO: 293703 - RNA, 19 nt, Artificial Sequence
  Description of Artificial Sequence: Synthetic oligonucleotide
caugugcugugcgaugacc

SEQ ID NO: 293704 - RNA, 19 nt, Artificial Sequence
  Description of Artificial Sequence: Synthetic oligonucleotide
guaguugacgccagaguuc

SEQ ID NO: 293705 - RNA, 19 nt, Artificial Sequence
  Description of Artificial Sequence: Synthetic oligonucleotide
cacguagcagcgcaccaac

SEQ ID NO: 293706 - RNA, 19 nt, Artificial Sequence
  Description of Artificial Sequence: Synthetic oligonucleotide
acccaugcgccucuucaug

SEQ ID NO: 293707 - RNA, 19 nt, Artificial Sequence
  Description of Artificial Sequence: Synthetic oligonucleotide
agauaccugucggggaauc

SEQ ID NO: 293708 - RNA, 19 nt, Artificial Sequence
  Description of Artificial Sequence: Synthetic oligonucleotide
gauaggcggcacaaacgug

SEQ ID NO: 293709 - RNA, 19 nt, Artificial Sequence
  Description of Artificial Sequence: Synthetic oligonucleotide
augacgacacgguuuccau

SEQ ID NO: 293710 - RNA, 19 nt, Artificial Sequence
  Description of Artificial Sequence: Synthetic oligonucleotide
auuuaacacccuguggaua

SEQ ID NO: 293711 - RNA, 19 nt, Artificial Sequence
  Description of Artificial Sequence: Synthetic oligonucleotide
uucuaaccuugugaucuga

SEQ ID NO: 293712 - RNA, 19 nt, Artificial Sequence
  Description of Artificial Sequence: Synthetic oligonucleotide
cuuauugaggguaccugcu

SEQ ID NO: 293713 - RNA, 19 nt, Artificial Sequence
  Description of Artificial Sequence: Synthetic oligonucleotide
ugccguagagcaguccaug

SEQ ID NO: 293714 - RNA, 19 nt, Artificial Sequence
  Description of Artificial Sequence: Synthetic oligonucleotide
ugucggggaauccggccgu

SEQ ID NO: 293715 - RNA, 19 nt, Artificial Sequence
  Description of Artificial Sequence: Synthetic oligonucleotide
gcaaucgcaucugaaauuc

SEQ ID NO: 293716 - RNA, 19 nt, Artificial Sequence
  Description of Artificial Sequence: Synthetic oligonucleotide
acgccagaguuccgggcac

SEQ ID NO: 293717 - RNA, 19 nt, Artificial Sequence
  Description of Artificial Sequence: Synthetic oligonucleotide
cuaaggcccuccuguccgg

SEQ ID NO: 293718 - RNA, 19 nt, Artificial Sequence
  Description of Artificial Sequence: Synthetic oligonucleotide
guggauauuaaacgcucgu

SEQ ID NO: 293719 - RNA, 19 nt, Artificial Sequence
  Description of Artificial Sequence: Synthetic oligonucleotide
gaucuuauugaggguaccu

SEQ ID NO: 293720 - RNA, 19 nt, Artificial Sequence
  Description of Artificial Sequence: Synthetic oligonucleotide
aucgaggaucaaguaguug

SEQ ID NO: 293721 - RNA, 19 nt, Artificial Sequence
  Description of Artificial Sequence: Synthetic oligonucleotide
gacucuccgacuggugggc

SEQ ID NO: 293722 - RNA, 19 nt, Artificial Sequence
  Description of Artificial Sequence: Synthetic oligonucleotide
ucguaucucucagucuggu

SEQ ID NO: 293723 - RNA, 19 nt, Artificial Sequence
  Description of Artificial Sequence: Synthetic oligonucleotide
uccgugagagggcgguuaa

SEQ ID NO: 293724 - RNA, 19 nt, Artificial Sequence
  Description of Artificial Sequence: Synthetic oligonucleotide
cuagggcuuucaugauggc

SEQ ID NO: 293725 - RNA, 19 nt, Artificial Sequence
  Description of Artificial Sequence: Synthetic oligonucleotide
acguagcagcgcaccaacc

SEQ ID NO: 293726 - RNA, 19 nt, Artificial Sequence
  Description of Artificial Sequence: Synthetic oligonucleotide
uaacacccuguggauauua

SEQ ID NO: 293727 - RNA, 19 nt, Artificial Sequence
  Description of Artificial Sequence: Synthetic oligonucleotide
aacccggggauggagucaa

SEQ ID NO: 293728 - RNA, 19 nt, Artificial Sequence
  Description of Artificial Sequence: Synthetic oligonucleotide
uacguaggucuucgcugcu

SEQ ID NO: 293729 - RNA, 19 nt, Artificial Sequence
  Description of Artificial Sequence: Synthetic oligonucleotide
cuucaccgagggagguucc

SEQ ID NO: 293730 - RNA, 19 nt, Artificial Sequence
  Description of Artificial Sequence: Synthetic oligonucleotide
aguaugcucugugcaauuu

SEQ ID NO: 293731 - RNA, 19 nt, Artificial Sequence
  Description of Artificial Sequence: Synthetic oligonucleotide
accgagggagguuccaguu

SEQ ID NO: 293732 - RNA, 19 nt, Artificial Sequence
  Description of Artificial Sequence: Synthetic oligonucleotide
agcgcaccaacccggggau

SEQ ID NO: 293733 - RNA, 19 nt, Artificial Sequence
  Description of Artificial Sequence: Synthetic oligonucleotide
gauaggccgccgguugccc

SEQ ID NO: 293734 - RNA, 19 nt, Artificial Sequence
  Description of Artificial Sequence: Synthetic oligonucleotide
aucauauaacugauaccuu

SEQ ID NO: 293735 - RNA, 19 nt, Artificial Sequence
  Description of Artificial Sequence: Synthetic oligonucleotide
cuucccggccgaagccugg

SEQ ID NO: 293736 - RNA, 19 nt, Artificial Sequence
  Description of Artificial Sequence: Synthetic oligonucleotide
ggaugcuacccguggugag

SEQ ID NO: 293737 - RNA, 19 nt, Artificial Sequence
  Description of Artificial Sequence: Synthetic oligonucleotide
gguguaguggugccguaga

SEQ ID NO: 293738 - RNA, 19 nt, Artificial Sequence
  Description of Artificial Sequence: Synthetic oligonucleotide
aagugccguaacgcuccuc

SEQ ID NO: 293739 - RNA, 19 nt, Artificial Sequence
  Description of Artificial Sequence: Synthetic oligonucleotide
cauuuaacacccuguggau

SEQ ID NO: 293740 - RNA, 19 nt, Artificial Sequence
  Description of Artificial Sequence: Synthetic oligonucleotide
ggugaagugccguaacgcu

SEQ ID NO: 293741 - RNA, 19 nt, Artificial Sequence
  Description of Artificial Sequence: Synthetic oligonucleotide
uuccccggggcaagcugug

SEQ ID NO: 293742 - RNA, 19 nt, Artificial Sequence
  Description of Artificial Sequence: Synthetic oligonucleotide
acgcucguaucuuguuaga

SEQ ID NO: 293743 - RNA, 19 nt, Artificial Sequence
  Description of Artificial Sequence: Synthetic oligonucleotide
cuacccguggugaggcuca

SEQ ID NO: 293744 - RNA, 19 nt, Artificial Sequence
  Description of Artificial Sequence: Synthetic oligonucleotide
gggaauccggccgugguac

SEQ ID NO: 293745 - RNA, 19 nt, Artificial Sequence
  Description of Artificial Sequence: Synthetic oligonucleotide
agccuauuggcaggugacu

SEQ ID NO: 293746 - RNA, 19 nt, Artificial Sequence
  Description of Artificial Sequence: Synthetic oligonucleotide
auaggccgccgguugccca

SEQ ID NO: 293747 - RNA, 19 nt, Artificial Sequence
  Description of Artificial Sequence: Synthetic oligonucleotide
agccgcagaacaguccggu

SEQ ID NO: 293748 - RNA, 19 nt, Artificial Sequence
  Description of Artificial Sequence: Synthetic oligonucleotide
uuccgugagagggcgguua

SEQ ID NO: 293749 - RNA, 19 nt, Artificial Sequence
  Description of Artificial Sequence: Synthetic oligonucleotide
cagcaaucgcaucugaaau

SEQ ID NO: 293750 - RNA, 19 nt, Artificial Sequence
  Description of Artificial Sequence: Synthetic oligonucleotide
ggcuagacagggagucucg

SEQ ID NO: 293751 - RNA, 19 nt, Artificial Sequence
  Description of Artificial Sequence: Synthetic oligonucleotide
gaauccggccgugguacca

SEQ ID NO: 293752 - RNA, 19 nt, Artificial Sequence
  Description of Artificial Sequence: Synthetic oligonucleotide
cuguccggcacaugaucca

SEQ ID NO: 293753 - RNA, 19 nt, Artificial Sequence
  Description of Artificial Sequence: Synthetic oligonucleotide
aguuuccgugagagggcgg

SEQ ID NO: 293754 - RNA, 19 nt, Artificial Sequence
  Description of Artificial Sequence: Synthetic oligonucleotide
agcucacacccaugcgccu

SEQ ID NO: 293755 - RNA, 19 nt, Artificial Sequence
  Description of Artificial Sequence: Synthetic oligonucleotide
cucgcuguacaagguuuuc

SEQ ID NO: 293756 - RNA, 19 nt, Artificial Sequence
  Description of Artificial Sequence: Synthetic oligonucleotide
agagaaccgccggaccagu

SEQ ID NO: 293757 - RNA, 19 nt, Artificial Sequence
  Description of Artificial Sequence: Synthetic oligonucleotide
ggacuaaggcccuccuguc

SEQ ID NO: 293758 - RNA, 19 nt, Artificial Sequence
  Description of Artificial Sequence: Synthetic oligonucleotide
cguggugaggcucaaccuc

SEQ ID NO: 293759 - RNA, 19 nt, Artificial Sequence
  Description of Artificial Sequence: Synthetic oligonucleotide
uuaacacccuguggauauu

SEQ ID NO: 293760 - RNA, 19 nt, Artificial Sequence
  Description of Artificial Sequence: Synthetic oligonucleotide
ccuguggauauuaaacgcu

SEQ ID NO: 293761 - RNA, 19 nt, Artificial Sequence
  Description of Artificial Sequence: Synthetic oligonucleotide
ggccuuccaucaguaaagc

SEQ ID NO: 293762 - RNA, 19 nt, Artificial Sequence
  Description of Artificial Sequence: Synthetic oligonucleotide
guuuccgugagagggcggu

SEQ ID NO: 293763 - RNA, 19 nt, Artificial Sequence
  Description of Artificial Sequence: Synthetic oligonucleotide
gugcgaugacccuggcauc

SEQ ID NO: 293764 - RNA, 19 nt, Artificial Sequence
  Description of Artificial Sequence: Synthetic oligonucleotide
gccguaacgcuccuccaga

SEQ ID NO: 293765 - RNA, 19 nt, Artificial Sequence
  Description of Artificial Sequence: Synthetic oligonucleotide
aguugacgccagaguuccg

SEQ ID NO: 293766 - RNA, 19 nt, Artificial Sequence
  Description of Artificial Sequence: Synthetic oligonucleotide
gccuauuggcaggugacuc

SEQ ID NO: 293767 - RNA, 19 nt, Artificial Sequence
  Description of Artificial Sequence: Synthetic oligonucleotide
ugcagccuauuggcaggug

SEQ ID NO: 293768 - RNA, 19 nt, Artificial Sequence
  Description of Artificial Sequence: Synthetic oligonucleotide
ggcuacguaggucuucgcu

SEQ ID NO: 293769 - RNA, 19 nt, Artificial Sequence
  Description of Artificial Sequence: Synthetic oligonucleotide
ggaauccggccgugguacc

SEQ ID NO: 293770 - RNA, 19 nt, Artificial Sequence
  Description of Artificial Sequence: Synthetic oligonucleotide
ugcuacccguggugaggcu

SEQ ID NO: 293771 - RNA, 19 nt, Artificial Sequence
  Description of Artificial Sequence: Synthetic oligonucleotide
cccugucauagcucacagc

SEQ ID NO: 293772 - RNA, 19 nt, Artificial Sequence
  Description of Artificial Sequence: Synthetic oligonucleotide
gggcuagacagggagucuc

SEQ ID NO: 293773 - RNA, 19 nt, Artificial Sequence
  Description of Artificial Sequence: Synthetic oligonucleotide
uggguguaguggugccgua

SEQ ID NO: 293774 - RNA, 19 nt, Artificial Sequence
  Description of Artificial Sequence: Synthetic oligonucleotide
cccuagugucugaagagaa

SEQ ID NO: 293775 - RNA, 19 nt, Artificial Sequence
  Description of Artificial Sequence: Synthetic oligonucleotide
guaccaggcauggcuacgu

SEQ ID NO: 293776 - RNA, 19 nt, Artificial Sequence
  Description of Artificial Sequence: Synthetic oligonucleotide
ccgacuggugggcuuugag

SEQ ID NO: 293777 - RNA, 19 nt, Artificial Sequence
  Description of Artificial Sequence: Synthetic oligonucleotide
uucccggccgaagccuggu

SEQ ID NO: 293778 - RNA, 19 nt, Artificial Sequence
  Description of Artificial Sequence: Synthetic oligonucleotide
gcucguaucuuguuagauu

SEQ ID NO: 293779 - RNA, 19 nt, Artificial Sequence
  Description of Artificial Sequence: Synthetic oligonucleotide
acccguggugaggcucaac

SEQ ID NO: 293780 - RNA, 19 nt, Artificial Sequence
  Description of Artificial Sequence: Synthetic oligonucleotide
cuggugggcuuugaggacu

SEQ ID NO: 293781 - RNA, 19 nt, Artificial Sequence
  Description of Artificial Sequence: Synthetic oligonucleotide
ccuugugaucugaggcauc

SEQ ID NO: 293782 - RNA, 19 nt, Artificial Sequence
  Description of Artificial Sequence: Synthetic oligonucleotide
gcuacccguggugaggcuc

SEQ ID NO: 293783 - RNA, 19 nt, Artificial Sequence
  Description of Artificial Sequence: Synthetic oligonucleotide
cuuguuagauuugcacauu

SEQ ID NO: 293784 - RNA, 19 nt, Artificial Sequence
  Description of Artificial Sequence: Synthetic oligonucleotide
gggagguuccaguuuccgu

SEQ ID NO: 293785 - RNA, 19 nt, Artificial Sequence
  Description of Artificial Sequence: Synthetic oligonucleotide
gaagugccguaacgcuccu

SEQ ID NO: 293786 - RNA, 19 nt, Artificial Sequence
  Description of Artificial Sequence: Synthetic oligonucleotide
ccuauuggcaggugacucu

SEQ ID NO: 293787 - RNA, 19 nt, Artificial Sequence
  Description of Artificial Sequence: Synthetic oligonucleotide
acaguccgguugaucuuaa

SEQ ID NO: 293788 - RNA, 19 nt, Artificial Sequence
  Description of Artificial Sequence: Synthetic oligonucleotide
ccuucccggccgaagccug

SEQ ID NO: 293789 - RNA, 19 nt, Artificial Sequence
  Description of Artificial Sequence: Synthetic oligonucleotide
cccggggcaagcuguguuc

SEQ ID NO: 293790 - RNA, 19 nt, Artificial Sequence
  Description of Artificial Sequence: Synthetic oligonucleotide
ccggggcaagcuguguucc

SEQ ID NO: 293791 - RNA, 19 nt, Artificial Sequence
  Description of Artificial Sequence: Synthetic oligonucleotide
gucggggaauccggccgug

SEQ ID NO: 293792 - RNA, 19 nt, Artificial Sequence
  Description of Artificial Sequence: Synthetic oligonucleotide
gguucaguucacaguaguu

SEQ ID NO: 293793 - RNA, 19 nt, Artificial Sequence
  Description of Artificial Sequence: Synthetic oligonucleotide
caguccgguugaucuuaaa

SEQ ID NO: 293794 - RNA, 19 nt, Artificial Sequence
  Description of Artificial Sequence: Synthetic oligonucleotide
gggcgguuaaaaucugguu

SEQ ID NO: 293795 - RNA, 19 nt, Artificial Sequence
  Description of Artificial Sequence: Synthetic oligonucleotide
cgugagagggcgguuaaaa

SEQ ID NO: 293796 - RNA, 19 nt, Artificial Sequence
  Description of Artificial Sequence: Synthetic oligonucleotide
cacccaugcgccucuucau

SEQ ID NO: 293797 - RNA, 19 nt, Artificial Sequence
  Description of Artificial Sequence: Synthetic oligonucleotide
uacccguggugaggcucaa

SEQ ID NO: 293798 - RNA, 19 nt, Artificial Sequence
  Description of Artificial Sequence: Synthetic oligonucleotide
ccggccgaagccuggugaa

SEQ ID NO: 293799 - RNA, 19 nt, Artificial Sequence
  Description of Artificial Sequence: Synthetic oligonucleotide
gggcaccguccuguugaug

SEQ ID NO: 293800 - RNA, 19 nt, Artificial Sequence
  Description of Artificial Sequence: Synthetic oligonucleotide
ccguggugaggcucaaccu

SEQ ID NO: 293801 - RNA, 19 nt, Artificial Sequence
  Description of Artificial Sequence: Synthetic oligonucleotide
cagauaccugucggggaau

SEQ ID NO: 293802 - RNA, 19 nt, Artificial Sequence
  Description of Artificial Sequence: Synthetic oligonucleotide
gcagugggacugauacacu

SEQ ID NO: 293803 - RNA, 19 nt, Artificial Sequence
  Description of Artificial Sequence: Synthetic oligonucleotide
gguuuccccggggcaagcu

SEQ ID NO: 293804 - RNA, 19 nt, Artificial Sequence
  Description of Artificial Sequence: Synthetic oligonucleotide
ccaugauaggcggcacaaa

SEQ ID NO: 293805 - RNA, 19 nt, Artificial Sequence
  Description of Artificial Sequence: Synthetic oligonucleotide
ggguaccugcucgguucuc

SEQ ID NO: 293806 - RNA, 19 nt, Artificial Sequence
  Description of Artificial Sequence: Synthetic oligonucleotide
gcggcacaaacguggucuu

SEQ ID NO: 293807 - RNA, 19 nt, Artificial Sequence
  Description of Artificial Sequence: Synthetic oligonucleotide
cggcacaaacguggucuug

SEQ ID NO: 293808 - RNA, 19 nt, Artificial Sequence
  Description of Artificial Sequence: Synthetic oligonucleotide
gcgcaccaacccggggaug

SEQ ID NO: 293809 - RNA, 19 nt, Artificial Sequence
  Description of Artificial Sequence: Synthetic oligonucleotide
acccggggauggagucaaa

SEQ ID NO: 293810 - RNA, 19 nt, Artificial Sequence
  Description of Artificial Sequence: Synthetic oligonucleotide
cgcucguaucuuguuagau

SEQ ID NO: 293811 - RNA, 19 nt, Artificial Sequence
  Description of Artificial Sequence: Synthetic oligonucleotide
ccgugagagggcgguuaaa

SEQ ID NO: 293812 - RNA, 19 nt, Artificial Sequence
  Description of Artificial Sequence: Synthetic oligonucleotide
cggggaauccggccguggu

SEQ ID NO: 293813 - RNA, 19 nt, Artificial Sequence
  Description of Artificial Sequence: Synthetic oligonucleotide
ccgccggaccagugcugga

SEQ ID NO: 293814 - RNA, 19 nt, Artificial Sequence
  Description of Artificial Sequence: Synthetic oligonucleotide
ccccugcccuagugucuga

SEQ ID NO: 293815 - RNA, 19 nt, Artificial Sequence
  Description of Artificial Sequence: Synthetic oligonucleotide
  modified_base (4)..(4): a, c, u, g, unknown or other
aaancauuuguauaaaagg

SEQ ID NO: 293816 - RNA, 19 nt, Artificial Sequence
  Description of Artificial Sequence: Synthetic oligonucleotide
aagugagacagucaguugc

SEQ ID NO: 293817 - RNA, 19 nt, Artificial Sequence
  Description of Artificial Sequence: Synthetic oligonucleotide
  modified_base (3)..(3): a, c, u, g, unknown or other
aancauuuguauaaaaggg

SEQ ID NO: 293818 - RNA, 19 nt, Artificial Sequence
  Description of Artificial Sequence: Synthetic oligonucleotide
  modified_base (8)..(8): a, c, u, g, unknown or other
uauaaaancauuuguauaa

SEQ ID NO: 293819 - RNA, 19 nt, Artificial Sequence
  Description of Artificial Sequence: Synthetic oligonucleotide
ugauagaggaucgauaucg

SEQ ID NO: 293820 - RNA, 19 nt, Artificial Sequence
  Description of Artificial Sequence: Synthetic oligonucleotide
  modified_base (5)..(5): a, c, u, g, unknown or other
aaaancauuuguauaaaag

SEQ ID NO: 293821 - RNA, 19 nt, Artificial Sequence
  Description of Artificial Sequence: Synthetic oligonucleotide
aaugaacaggcuuagucag

SEQ ID NO: 293822 - RNA, 19 nt, Artificial Sequence
  Description of Artificial Sequence: Synthetic oligonucleotide
aaaaugagagcgcacagcu

SEQ ID NO: 293823 - RNA, 19 nt, Artificial Sequence
  Description of Artificial Sequence: Synthetic oligonucleotide
  modified_base (2)..(2): a, c, u, g, unknown or other
ancauuuguauaaaagggg

SEQ ID NO: 293824 - RNA, 19 nt, Artificial Sequence
  Description of Artificial Sequence: Synthetic oligonucleotide
aauaagugugcuugguggg

SEQ ID NO: 293825 - RNA, 19 nt, Artificial Sequence
  Description of Artificial Sequence: Synthetic oligonucleotide
cauccgaacagguagaucc

SEQ ID NO: 293826 - RNA, 19 nt, Artificial Sequence
  Description of Artificial Sequence: Synthetic oligonucleotide
agcacauagagccaugugg

SEQ ID NO: 293827 - RNA, 19 nt, Artificial Sequence
  Description of Artificial Sequence: Synthetic oligonucleotide
uggacauccgaacagguag

SEQ ID NO: 293828 - RNA, 19 nt, Artificial Sequence
  Description of Artificial Sequence: Synthetic oligonucleotide
agucaguugcuccagaggg

SEQ ID NO: 293829 - RNA, 19 nt, Artificial Sequence
  Description of Artificial Sequence: Synthetic oligonucleotide
uaaucucaaauacucuagg

SEQ ID NO: 293830 - RNA, 19 nt, Artificial Sequence
  Description of Artificial Sequence: Synthetic oligonucleotide
auagaagacggccuucacc

SEQ ID NO: 293831 - RNA, 19 nt, Artificial Sequence
  Description of Artificial Sequence: Synthetic oligonucleotide
aguaagauaccauuuauuu

SEQ ID NO: 293832 - RNA, 19 nt, Artificial Sequence
  Description of Artificial Sequence: Synthetic oligonucleotide
ucuacaggcauagaagacg

SEQ ID NO: 293833 - RNA, 19 nt, Artificial Sequence
  Description of Artificial Sequence: Synthetic oligonucleotide
agugccaccacccagcuug

SEQ ID NO: 293834 - RNA, 19 nt, Artificial Sequence
  Description of Artificial Sequence: Synthetic oligonucleotide
ugacaacucagaaagucag

SEQ ID NO: 293835 - RNA, 19 nt, Artificial Sequence
  Description of Artificial Sequence: Synthetic oligonucleotide
ugaacaaugaacaggcuua

SEQ ID NO: 293836 - RNA, 19 nt, Artificial Sequence
  Description of Artificial Sequence: Synthetic oligonucleotide
gaaguaaucucaaauacuc

SEQ ID NO: 293837 - RNA, 19 nt, Artificial Sequence
  Description of Artificial Sequence: Synthetic oligonucleotide
ugggcuuagaccauggaca

SEQ ID NO: 293838 - RNA, 19 nt, Artificial Sequence
  Description of Artificial Sequence: Synthetic oligonucleotide
aaaauacacucuaugggag

SEQ ID NO: 293839 - RNA, 19 nt, Artificial Sequence
  Description of Artificial Sequence: Synthetic oligonucleotide
cagaaagugagacagucag

SEQ ID NO: 293840 - RNA, 19 nt, Artificial Sequence
  Description of Artificial Sequence: Synthetic oligonucleotide
ugcaugguaggucucaccc

SEQ ID NO: 293841 - RNA, 19 nt, Artificial Sequence
  Description of Artificial Sequence: Synthetic oligonucleotide
aguaccauguucuccugac

SEQ ID NO: 293842 - RNA, 19 nt, Artificial Sequence
  Description of Artificial Sequence: Synthetic oligonucleotide
uguucugacugguacgccg

SEQ ID NO: 293843 - RNA, 19 nt, Artificial Sequence
  Description of Artificial Sequence: Synthetic oligonucleotide
ggacaauuaaguaagauac

SEQ ID NO: 293844 - RNA, 19 nt, Artificial Sequence
  Description of Artificial Sequence: Synthetic oligonucleotide
ucgauaucgcuuuucaaug

SEQ ID NO: 293845 - RNA, 19 nt, Artificial Sequence
  Description of Artificial Sequence: Synthetic oligonucleotide
cugggcacgauuaaggaag

SEQ ID NO: 293846 - RNA, 19 nt, Artificial Sequence
  Description of Artificial Sequence: Synthetic oligonucleotide
uucaguaaaaugagagcgc

SEQ ID NO: 293847 - RNA, 19 nt, Artificial Sequence
  Description of Artificial Sequence: Synthetic oligonucleotide
acaauuaaguaagauacca

SEQ ID NO: 293848 - RNA, 19 nt, Artificial Sequence
  Description of Artificial Sequence: Synthetic oligonucleotide
cauuauuucauccauccca

SEQ ID NO: 293849 - RNA, 19 nt, Artificial Sequence
  Description of Artificial Sequence: Synthetic oligonucleotide
augauauccggaccaaggg

SEQ ID NO: 293850 - RNA, 19 nt, Artificial Sequence
  Description of Artificial Sequence: Synthetic oligonucleotide
aguacagacucuccuuggc

SEQ ID NO: 293851 - RNA, 19 nt, Artificial Sequence
  Description of Artificial Sequence: Synthetic oligonucleotide
aguagcucgcucucguugc

SEQ ID NO: 293852 - RNA, 19 nt, Artificial Sequence
  Description of Artificial Sequence: Synthetic oligonucleotide
uucaguaccauguucuccu

SEQ ID NO: 293853 - RNA, 19 nt, Artificial Sequence
  Description of Artificial Sequence: Synthetic oligonucleotide
ugucagauggaucucaaua

SEQ ID NO: 293854 - RNA, 19 nt, Artificial Sequence
  Description of Artificial Sequence: Synthetic oligonucleotide
aucucaauaagugugcuug

SEQ ID NO: 293855 - RNA, 19 nt, Artificial Sequence
  Description of Artificial Sequence: Synthetic oligonucleotide
uagaccaagccccauacgu

SEQ ID NO: 293856 - RNA, 19 nt, Artificial Sequence
  Description of Artificial Sequence: Synthetic oligonucleotide
guaggucucacccaggccc

SEQ ID NO: 293857 - RNA, 19 nt, Artificial Sequence
  Description of Artificial Sequence: Synthetic oligonucleotide
auagugacugcggaugucc

SEQ ID NO: 293858 - RNA, 19 nt, Artificial Sequence
  Description of Artificial Sequence: Synthetic oligonucleotide
ugauauccggaccaagggc

SEQ ID NO: 293859 - RNA, 19 nt, Artificial Sequence
  Description of Artificial Sequence: Synthetic oligonucleotide
ugauugaccagcuucgcuc

SEQ ID NO: 293860 - RNA, 19 nt, Artificial Sequence
  Description of Artificial Sequence: Synthetic oligonucleotide
aguaaaaugagagcgcaca

SEQ ID NO: 293861 - RNA, 19 nt, Artificial Sequence
  Description of Artificial Sequence: Synthetic oligonucleotide
cagaacgccagauuugugc

SEQ ID NO: 293862 - RNA, 19 nt, Artificial Sequence
  Description of Artificial Sequence: Synthetic oligonucleotide
cuauccagccccuugggcc

SEQ ID NO: 293863 - RNA, 19 nt, Artificial Sequence
  Description of Artificial Sequence: Synthetic oligonucleotide
  modified_base (6)..(6): a, c, u, g, unknown or other
uaaaancauuuguauaaaa

SEQ ID NO: 293864 - RNA, 19 nt, Artificial Sequence
  Description of Artificial Sequence: Synthetic oligonucleotide
uccacauccggucuugagc

SEQ ID NO: 293865 - RNA, 19 nt, Artificial Sequence
  Description of Artificial Sequence: Synthetic oligonucleotide
aacuuugcccuguauugug

SEQ ID NO: 293866 - RNA, 19 nt, Artificial Sequence
  Description of Artificial Sequence: Synthetic oligonucleotide
cuuagacugagguuucacc

SEQ ID NO: 293867 - RNA, 19 nt, Artificial Sequence
  Description of Artificial Sequence: Synthetic oligonucleotide
aggacaauuaaguaagaua

SEQ ID NO: 293868 - RNA, 19 nt, Artificial Sequence
  Description of Artificial Sequence: Synthetic oligonucleotide
agguagauccugcaggaag

SEQ ID NO: 293869 - RNA, 19 nt, Artificial Sequence
  Description of Artificial Sequence: Synthetic oligonucleotide
ucaguaaaaugagagcgca

SEQ ID NO: 293870 - RNA, 19 nt, Artificial Sequence
  Description of Artificial Sequence: Synthetic oligonucleotide
aaagugagacagucaguug

SEQ ID NO: 293871 - RNA, 19 nt, Artificial Sequence
  Description of Artificial Sequence: Synthetic oligonucleotide
ggcacuggaaaauucacag

SEQ ID NO: 293872 - RNA, 19 nt, Artificial Sequence
  Description of Artificial Sequence: Synthetic oligonucleotide
ggaugugcgagauaagucc

SEQ ID NO: 293873 - RNA, 19 nt, Artificial Sequence
  Description of Artificial Sequence: Synthetic oligonucleotide
uaaagaugccacagcaacu

SEQ ID NO: 293874 - RNA, 19 nt, Artificial Sequence
  Description of Artificial Sequence: Synthetic oligonucleotide
guaaucucaaauacucuag

SEQ ID NO: 293875 - RNA, 19 nt, Artificial Sequence
  Description of Artificial Sequence: Synthetic oligonucleotide
ucucaauaagugugcuugg

SEQ ID NO: 293876 - RNA, 19 nt, Artificial Sequence
  Description of Artificial Sequence: Synthetic oligonucleotide
uacagaugauauccggacc

SEQ ID NO: 293877 - RNA, 19 nt, Artificial Sequence
  Description of Artificial Sequence: Synthetic oligonucleotide
uggauccuagguccaaagg

SEQ ID NO: 293878 - RNA, 19 nt, Artificial Sequence
  Description of Artificial Sequence: Synthetic oligonucleotide
agaccuaguucccagagaa

SEQ ID NO: 293879 - RNA, 19 nt, Artificial Sequence
  Description of Artificial Sequence: Synthetic oligonucleotide
guaaaaugagagcgcacag

SEQ ID NO: 293880 - RNA, 19 nt, Artificial Sequence
  Description of Artificial Sequence: Synthetic oligonucleotide
gauaaguccagaaugcaaa

SEQ ID NO: 293881 - RNA, 19 nt, Artificial Sequence
  Description of Artificial Sequence: Synthetic oligonucleotide
agugcuaugcucugggcca

SEQ ID NO: 293882 - RNA, 19 nt, Artificial Sequence
  Description of Artificial Sequence: Synthetic oligonucleotide
cuucauccuauccagcccc

SEQ ID NO: 293883 - RNA, 19 nt, Artificial Sequence
  Description of Artificial Sequence: Synthetic oligonucleotide
aaauacucuagggcacugg

SEQ ID NO: 293884 - RNA, 19 nt, Artificial Sequence
  Description of Artificial Sequence: Synthetic oligonucleotide
accuacagaugauauccgg

SEQ ID NO: 293885 - RNA, 19 nt, Artificial Sequence
  Description of Artificial Sequence: Synthetic oligonucleotide
accuaguucccagagaaag

SEQ ID NO: 293886 - RNA, 19 nt, Artificial Sequence
  Description of Artificial Sequence: Synthetic oligonucleotide
ugugggcuagccuacgcag

SEQ ID NO: 293887 - RNA, 19 nt, Artificial Sequence
  Description of Artificial Sequence: Synthetic oligonucleotide
caaugaacaggcuuaguca

SEQ ID NO: 293888 - RNA, 19 nt, Artificial Sequence
  Description of Artificial Sequence: Synthetic oligonucleotide
gauccuagguccaaaggug

SEQ ID NO: 293889 - RNA, 19 nt, Artificial Sequence
  Description of Artificial Sequence: Synthetic oligonucleotide
uagaggaucgauaucgcuu

SEQ ID NO: 293890 - RNA, 19 nt, Artificial Sequence
  Description of Artificial Sequence: Synthetic oligonucleotide
cacucagcgagguucacag

SEQ ID NO: 293891 - RNA, 19 nt, Artificial Sequence
  Description of Artificial Sequence: Synthetic oligonucleotide
  modified_base (8)..(8): a, c, u, g, unknown or other
agucaggnacaguggaagg

SEQ ID NO: 293892 - RNA, 19 nt, Artificial Sequence
  Description of Artificial Sequence: Synthetic oligonucleotide
aacgccagauuugugcauc

SEQ ID NO: 293893 - RNA, 19 nt, Artificial Sequence
  Description of Artificial Sequence: Synthetic oligonucleotide
aggagcgucggucacccac

SEQ ID NO: 293894 - RNA, 19 nt, Artificial Sequence
  Description of Artificial Sequence: Synthetic oligonucleotide
cauguggacauccgaacag

SEQ ID NO: 293895 - RNA, 19 nt, Artificial Sequence
  Description of Artificial Sequence: Synthetic oligonucleotide
gaagcugugggcuagccua

SEQ ID NO: 293896 - RNA, 19 nt, Artificial Sequence
  Description of Artificial Sequence: Synthetic oligonucleotide
uaugcugggcggaagcugu

SEQ ID NO: 293897 - RNA, 19 nt, Artificial Sequence
  Description of Artificial Sequence: Synthetic oligonucleotide
  modified_base (7)..(7): a, c, u, g, unknown or other
auaaaancauuuguauaaa

SEQ ID NO: 293898 - RNA, 19 nt, Artificial Sequence
  Description of Artificial Sequence: Synthetic oligonucleotide
gaacagguagauccugcag

SEQ ID NO: 293899 - RNA, 19 nt, Artificial Sequence
  Description of Artificial Sequence: Synthetic oligonucleotide
  modified_base (19)..(19): a, c, u, g, unknown or other
ugaacaggcuuagucaggn

SEQ ID NO: 293900 - RNA, 19 nt, Artificial Sequence
  Description of Artificial Sequence: Synthetic oligonucleotide
acaaucaucugcuggcagu

SEQ ID NO: 293901 - RNA, 19 nt, Artificial Sequence
  Description of Artificial Sequence: Synthetic oligonucleotide
ugcgagauaaguccagaau

SEQ ID NO: 293902 - RNA, 19 nt, Artificial Sequence
  Description of Artificial Sequence: Synthetic oligonucleotide
aggagaaauaaagaugcca

SEQ ID NO: 293903 - RNA, 19 nt, Artificial Sequence
  Description of Artificial Sequence: Synthetic oligonucleotide
gcgagauaaguccagaaug

SEQ ID NO: 293904 - RNA, 19 nt, Artificial Sequence
  Description of Artificial Sequence: Synthetic oligonucleotide
agaacgccagauuugugca

SEQ ID NO: 293905 - RNA, 19 nt, Artificial Sequence
  Description of Artificial Sequence: Synthetic oligonucleotide
agucuuaaggagacuugcc

SEQ ID NO: 293906 - RNA, 19 nt, Artificial Sequence
  Description of Artificial Sequence: Synthetic oligonucleotide
uuagaccauggacauuuac

SEQ ID NO: 293907 - RNA, 19 nt, Artificial Sequence
  Description of Artificial Sequence: Synthetic oligonucleotide
uacacucuaugggagguag

SEQ ID NO: 293908 - RNA, 19 nt, Artificial Sequence
  Description of Artificial Sequence: Synthetic oligonucleotide
aagacggccuucaccaagg

SEQ ID NO: 293909 - RNA, 19 nt, Artificial Sequence
  Description of Artificial Sequence: Synthetic oligonucleotide
cuugcgguaugcugggcgg

SEQ ID NO: 293910 - RNA, 19 nt, Artificial Sequence
  Description of Artificial Sequence: Synthetic oligonucleotide
acugguacgccgccguagg

SEQ ID NO: 293911 - RNA, 19 nt, Artificial Sequence
  Description of Artificial Sequence: Synthetic oligonucleotide
gagacagucaguugcucca

SEQ ID NO: 293912 - RNA, 19 nt, Artificial Sequence
  Description of Artificial Sequence: Synthetic oligonucleotide
aaaagccuuggcaggugac

SEQ ID NO: 293913 - RNA, 19 nt, Artificial Sequence
  Description of Artificial Sequence: Synthetic oligonucleotide
auagaggaucgauaucgcu

SEQ ID NO: 293914 - RNA, 19 nt, Artificial Sequence
  Description of Artificial Sequence: Synthetic oligonucleotide
aaguaaucucaaauacucu

SEQ ID NO: 293915 - RNA, 19 nt, Artificial Sequence
  Description of Artificial Sequence: Synthetic oligonucleotide
gucagauggaucucaauaa

SEQ ID NO: 293916 - RNA, 19 nt, Artificial Sequence
  Description of Artificial Sequence: Synthetic oligonucleotide
guaaucaauggccuuccuc

SEQ ID NO: 293917 - RNA, 19 nt, Artificial Sequence
  Description of Artificial Sequence: Synthetic oligonucleotide
gcaugcauggcucuacagg

SEQ ID NO: 293918 - RNA, 19 nt, Artificial Sequence
  Description of Artificial Sequence: Synthetic oligonucleotide
gaacaaugaacaggcuuag

SEQ ID NO: 293919 - RNA, 19 nt, Artificial Sequence
  Description of Artificial Sequence: Synthetic oligonucleotide
cuauguugcuuucaaguga

SEQ ID NO: 293920 - RNA, 19 nt, Artificial Sequence
  Description of Artificial Sequence: Synthetic oligonucleotide
cgauuaaggaaguagcuag

SEQ ID NO: 293921 - RNA, 19 nt, Artificial Sequence
  Description of Artificial Sequence: Synthetic oligonucleotide
cagugcuaugcucugggcc

SEQ ID NO: 293922 - RNA, 19 nt, Artificial Sequence
  Description of Artificial Sequence: Synthetic oligonucleotide
uguggacauccgaacaggu

SEQ ID NO: 293923 - RNA, 19 nt, Artificial Sequence
  Description of Artificial Sequence: Synthetic oligonucleotide
gacaggcccaagcacacac

SEQ ID NO: 293924 - RNA, 19 nt, Artificial Sequence
  Description of Artificial Sequence: Synthetic oligonucleotide
gauggaucucaauaagugu

SEQ ID NO: 293925 - RNA, 19 nt, Artificial Sequence
  Description of Artificial Sequence: Synthetic oligonucleotide
uguauugugacaggcccaa

SEQ ID NO: 293926 - RNA, 19 nt, Artificial Sequence
  Description of Artificial Sequence: Synthetic oligonucleotide
auuauuucauccaucccaa

SEQ ID NO: 293927 - RNA, 19 nt, Artificial Sequence
  Description of Artificial Sequence: Synthetic oligonucleotide
ugauugaccugcugcaaau

SEQ ID NO: 293928 - RNA, 19 nt, Artificial Sequence
  Description of Artificial Sequence: Synthetic oligonucleotide
agguggcuucauccuaucc

SEQ ID NO: 293929 - RNA, 19 nt, Artificial Sequence
  Description of Artificial Sequence: Synthetic oligonucleotide
augguuaagugaaggauca

SEQ ID NO: 293930 - RNA, 19 nt, Artificial Sequence
  Description of Artificial Sequence: Synthetic oligonucleotide
gauagaggaucgauaucgc

SEQ ID NO: 293931 - RNA, 19 nt, Artificial Sequence
  Description of Artificial Sequence: Synthetic oligonucleotide
ugggcuagccuacgcaggc

SEQ ID NO: 293932 - RNA, 19 nt, Artificial Sequence
  Description of Artificial Sequence: Synthetic oligonucleotide
cagucuuaaggagacuugc

SEQ ID NO: 293933 - RNA, 19 nt, Artificial Sequence
  Description of Artificial Sequence: Synthetic oligonucleotide
ucaaauacucuagggcacu

SEQ ID NO: 293934 - RNA, 19 nt, Artificial Sequence
  Description of Artificial Sequence: Synthetic oligonucleotide
caacauuauuucauccauc

SEQ ID NO: 293935 - RNA, 19 nt, Artificial Sequence
  Description of Artificial Sequence: Synthetic oligonucleotide
  modified_base (13)..(13): a, c, u, g, unknown or other
ggcuuagucaggnacagug

SEQ ID NO: 293936 - RNA, 19 nt, Artificial Sequence
  Description of Artificial Sequence: Synthetic oligonucleotide
agaaugcaaaauguucucu

SEQ ID NO: 293937 - RNA, 19 nt, Artificial Sequence
  Description of Artificial Sequence: Synthetic oligonucleotide
uugauagaggaucgauauc

SEQ ID NO: 293938 - RNA, 19 nt, Artificial Sequence
  Description of Artificial Sequence: Synthetic oligonucleotide
aaagccuuggcaggugaca

SEQ ID NO: 293939 - RNA, 19 nt, Artificial Sequence
  Description of Artificial Sequence: Synthetic oligonucleotide
acauccggucuugagcccc

SEQ ID NO: 293940 - RNA, 19 nt, Artificial Sequence
  Description of Artificial Sequence: Synthetic oligonucleotide
ggggucacaaaucccacag

SEQ ID NO: 293941 - RNA, 19 nt, Artificial Sequence
  Description of Artificial Sequence: Synthetic oligonucleotide
  modified_base (16)..(16): a, c, u, g, unknown or other
acaggcuuagucaggnaca

SEQ ID NO: 293942 - RNA, 19 nt, Artificial Sequence
  Description of Artificial Sequence: Synthetic oligonucleotide
agucauugcaggagcgucg

SEQ ID NO: 293943 - RNA, 19 nt, Artificial Sequence
  Description of Artificial Sequence: Synthetic oligonucleotide
acauagagccauguggaca

SEQ ID NO: 293944 - RNA, 19 nt, Artificial Sequence
  Description of Artificial Sequence: Synthetic oligonucleotide
ggcugaaaugauccaaaag

SEQ ID NO: 293945 - RNA, 19 nt, Artificial Sequence
  Description of Artificial Sequence: Synthetic oligonucleotide
gaagcuucccugugauaug

SEQ ID NO: 293946 - RNA, 19 nt, Artificial Sequence
  Description of Artificial Sequence: Synthetic oligonucleotide
cagaaguagcuccacugac

SEQ ID NO: 293947 - RNA, 19 nt, Artificial Sequence
  Description of Artificial Sequence: Synthetic oligonucleotide
  modified_base (2)..(2): a, c, u, g, unknown or other
gnacaguggaaggagugca

SEQ ID NO: 293948 - RNA, 19 nt, Artificial Sequence
  Description of Artificial Sequence: Synthetic oligonucleotide
cuagggguaggaaggaaca

SEQ ID NO: 293949 - RNA, 19 nt, Artificial Sequence
  Description of Artificial Sequence: Synthetic oligonucleotide
gauauccggaccaagggcu

SEQ ID NO: 293950 - RNA, 19 nt, Artificial Sequence
  Description of Artificial Sequence: Synthetic oligonucleotide
gcugacuugauugaccagc

SEQ ID NO: 293951 - RNA, 19 nt, Artificial Sequence
  Description of Artificial Sequence: Synthetic oligonucleotide
uuugcccuguauugugaca

SEQ ID NO: 293952 - RNA, 19 nt, Artificial Sequence
  Description of Artificial Sequence: Synthetic oligonucleotide
caccuacagaugauauccg

SEQ ID NO: 293953 - RNA, 19 nt, Artificial Sequence
  Description of Artificial Sequence: Synthetic oligonucleotide
uacccugagcucagguugc

SEQ ID NO: 293954 - RNA, 19 nt, Artificial Sequence
  Description of Artificial Sequence: Synthetic oligonucleotide
guaggcuaugcuccagcag

SEQ ID NO: 293955 - RNA, 19 nt, Artificial Sequence
  Description of Artificial Sequence: Synthetic oligonucleotide
guagaccaagccccauacg

SEQ ID NO: 293956 - RNA, 19 nt, Artificial Sequence
  Description of Artificial Sequence: Synthetic oligonucleotide
agcuggugcguccgggugg

SEQ ID NO: 293957 - RNA, 19 nt, Artificial Sequence
  Description of Artificial Sequence: Synthetic oligonucleotide
ccuauguugcuuucaagug

SEQ ID NO: 293958 - RNA, 19 nt, Artificial Sequence
  Description of Artificial Sequence: Synthetic oligonucleotide
ucagaacgccagauuugug

SEQ ID NO: 293959 - RNA, 19 nt, Artificial Sequence
  Description of Artificial Sequence: Synthetic oligonucleotide
  modified_base (4)..(4): a, c, u, g, unknown or other
aggnacaguggaaggagug

SEQ ID NO: 293960 - RNA, 19 nt, Artificial Sequence
  Description of Artificial Sequence: Synthetic oligonucleotide
gagauaaguccagaaugca

SEQ ID NO: 293961 - RNA, 19 nt, Artificial Sequence
  Description of Artificial Sequence: Synthetic oligonucleotide
gaugugcgagauaagucca

SEQ ID NO: 293962 - RNA, 19 nt, Artificial Sequence
  Description of Artificial Sequence: Synthetic oligonucleotide
ccacauccggucuugagcc

SEQ ID NO: 293963 - RNA, 19 nt, Artificial Sequence
  Description of Artificial Sequence: Synthetic oligonucleotide
gucauugcaggagcgucgg

SEQ ID NO: 293964 - RNA, 19 nt, Artificial Sequence
  Description of Artificial Sequence: Synthetic oligonucleotide
ugggccuacccugagcuca

SEQ ID NO: 293965 - RNA, 19 nt, Artificial Sequence
  Description of Artificial Sequence: Synthetic oligonucleotide
ucugacugguacgccgccg

SEQ ID NO: 293966 - RNA, 19 nt, Artificial Sequence
  Description of Artificial Sequence: Synthetic oligonucleotide
cauugauagaggaucgaua

SEQ ID NO: 293967 - RNA, 19 nt, Artificial Sequence
  Description of Artificial Sequence: Synthetic oligonucleotide
gguagaccaagccccauac

SEQ ID NO: 293968 - RNA, 19 nt, Artificial Sequence
  Description of Artificial Sequence: Synthetic oligonucleotide
ugugcgagauaaguccaga

SEQ ID NO: 293969 - RNA, 19 nt, Artificial Sequence
  Description of Artificial Sequence: Synthetic oligonucleotide
aggaucgauaucgcuuuuc

SEQ ID NO: 293970 - RNA, 19 nt, Artificial Sequence
  Description of Artificial Sequence: Synthetic oligonucleotide
caguaaaaugagagcgcac

SEQ ID NO: 293971 - RNA, 19 nt, Artificial Sequence
  Description of Artificial Sequence: Synthetic oligonucleotide
gcacgauuaaggaaguagc

SEQ ID NO: 293972 - RNA, 19 nt, Artificial Sequence
  Description of Artificial Sequence: Synthetic oligonucleotide
ugcccuguauugugacagg

SEQ ID NO: 293973 - RNA, 19 nt, Artificial Sequence
  Description of Artificial Sequence: Synthetic oligonucleotide
caguagcucgcucucguug

SEQ ID NO: 293974 - RNA, 19 nt, Artificial Sequence
  Description of Artificial Sequence: Synthetic oligonucleotide
agauaaguccagaaugcaa

SEQ ID NO: 293975 - RNA, 19 nt, Artificial Sequence
  Description of Artificial Sequence: Synthetic oligonucleotide
auggccauagugacugcgg

SEQ ID NO: 293976 - RNA, 19 nt, Artificial Sequence
  Description of Artificial Sequence: Synthetic oligonucleotide
aacaaugaacaggcuuagu

SEQ ID NO: 293977 - RNA, 19 nt, Artificial Sequence
  Description of Artificial Sequence: Synthetic oligonucleotide
  modified_base (7)..(7): a, c, u, g, unknown or other
gucaggnacaguggaagga

SEQ ID NO: 293978 - RNA, 19 nt, Artificial Sequence
  Description of Artificial Sequence: Synthetic oligonucleotide
cuugauugaccagcuucgc

SEQ ID NO: 293979 - RNA, 19 nt, Artificial Sequence
  Description of Artificial Sequence: Synthetic oligonucleotide
acgauuaaggaaguagcua

SEQ ID NO: 293980 - RNA, 19 nt, Artificial Sequence
  Description of Artificial Sequence: Synthetic oligonucleotide
ugguggggucacaaauccc

SEQ ID NO: 293981 - RNA, 19 nt, Artificial Sequence
  Description of Artificial Sequence: Synthetic oligonucleotide
acccuauguugcuuucaag

SEQ ID NO: 293982 - RNA, 19 nt, Artificial Sequence
  Description of Artificial Sequence: Synthetic oligonucleotide
agcacccuauguugcuuuc

SEQ ID NO: 293983 - RNA, 19 nt, Artificial Sequence
  Description of Artificial Sequence: Synthetic oligonucleotide
cauugcaggagcgucgguc

SEQ ID NO: 293984 - RNA, 19 nt, Artificial Sequence
  Description of Artificial Sequence: Synthetic oligonucleotide
augaacaggcuuagucagg

SEQ ID NO: 293985 - RNA, 19 nt, Artificial Sequence
  Description of Artificial Sequence: Synthetic oligonucleotide
uucugacugguacgccgcc

SEQ ID NO: 293986 - RNA, 19 nt, Artificial Sequence
  Description of Artificial Sequence: Synthetic oligonucleotide
gauaucgcuuuucaaugau

SEQ ID NO: 293987 - RNA, 19 nt, Artificial Sequence
  Description of Artificial Sequence: Synthetic oligonucleotide
aggugucuaccucuccaug

SEQ ID NO: 293988 - RNA, 19 nt, Artificial Sequence
  Description of Artificial Sequence: Synthetic oligonucleotide
gguuaagugaaggaucaga

SEQ ID NO: 293989 - RNA, 19 nt, Artificial Sequence
  Description of Artificial Sequence: Synthetic oligonucleotide
ggaucgauaucgcuuuuca

SEQ ID NO: 293990 - RNA, 19 nt, Artificial Sequence
  Description of Artificial Sequence: Synthetic oligonucleotide
agugagacagucaguugcu

SEQ ID NO: 293991 - RNA, 19 nt, Artificial Sequence
  Description of Artificial Sequence: Synthetic oligonucleotide
accaagggacucucaguca

SEQ ID NO: 293992 - RNA, 19 nt, Artificial Sequence
  Description of Artificial Sequence: Synthetic oligonucleotide
uucauccuauccagccccu

SEQ ID NO: 293993 - RNA, 19 nt, Artificial Sequence
  Description of Artificial Sequence: Synthetic oligonucleotide
gacugguacgccgccguag

SEQ ID NO: 293994 - RNA, 19 nt, Artificial Sequence
  Description of Artificial Sequence: Synthetic oligonucleotide
cauagagccauguggacau

SEQ ID NO: 293995 - RNA, 19 nt, Artificial Sequence
  Description of Artificial Sequence: Synthetic oligonucleotide
  modified_base (3)..(3): a, c, u, g, unknown or other
ggnacaguggaaggagugc

SEQ ID NO: 293996 - RNA, 19 nt, Artificial Sequence
  Description of Artificial Sequence: Synthetic oligonucleotide
guucugacugguacgccgc

SEQ ID NO: 293997 - RNA, 19 nt, Artificial Sequence
  Description of Artificial Sequence: Synthetic oligonucleotide
  modified_base (15)..(15): a, c, u, g, unknown or other
caggcuuagucaggnacag

SEQ ID NO: 293998 - RNA, 19 nt, Artificial Sequence
  Description of Artificial Sequence: Synthetic oligonucleotide
acuugggcuuagaccaugg

SEQ ID NO: 293999 - RNA, 19 nt, Artificial Sequence
  Description of Artificial Sequence: Synthetic oligonucleotide
agcucuuuccaggagguuu

SEQ ID NO: 294000 - RNA, 19 nt, Artificial Sequence
  Description of Artificial Sequence: Synthetic oligonucleotide
acauccgaacagguagauc

SEQ ID NO: 294001 - RNA, 19 nt, Artificial Sequence
  Description of Artificial Sequence: Synthetic oligonucleotide
uccgaacagguagauccug

SEQ ID NO: 294002 - RNA, 19 nt, Artificial Sequence
  Description of Artificial Sequence: Synthetic oligonucleotide
gguggacuugggcaauggg

SEQ ID NO: 294003 - RNA, 19 nt, Artificial Sequence
  Description of Artificial Sequence: Synthetic oligonucleotide
gacauugagacuguuccau

SEQ ID NO: 294004 - RNA, 19 nt, Artificial Sequence
  Description of Artificial Sequence: Synthetic oligonucleotide
ggauccuagguccaaaggu

SEQ ID NO: 294005 - RNA, 19 nt, Artificial Sequence
  Description of Artificial Sequence: Synthetic oligonucleotide
accauguucuccugacgaa

SEQ ID NO: 294006 - RNA, 19 nt, Artificial Sequence
  Description of Artificial Sequence: Synthetic oligonucleotide
acauugagacuguuccaua

SEQ ID NO: 294007 - RNA, 19 nt, Artificial Sequence
  Description of Artificial Sequence: Synthetic oligonucleotide
auacguggucaggaggcag

SEQ ID NO: 294008 - RNA, 19 nt, Artificial Sequence
  Description of Artificial Sequence: Synthetic oligonucleotide
agcuccacugacauugaga

SEQ ID NO: 294009 - RNA, 19 nt, Artificial Sequence
  Description of Artificial Sequence: Synthetic oligonucleotide
ugguacgccgccguaggcu

SEQ ID NO: 294010 - RNA, 19 nt, Artificial Sequence
  Description of Artificial Sequence: Synthetic oligonucleotide
gcgcacaguggcuucaugc

SEQ ID NO: 294011 - RNA, 19 nt, Artificial Sequence
  Description of Artificial Sequence: Synthetic oligonucleotide
cacgauuaaggaaguagcu

SEQ ID NO: 294012 - RNA, 19 nt, Artificial Sequence
  Description of Artificial Sequence: Synthetic oligonucleotide
cccagagaaagccugauaa

SEQ ID NO: 294013 - RNA, 19 nt, Artificial Sequence
  Description of Artificial Sequence: Synthetic oligonucleotide
cacucuaugggagguagga

SEQ ID NO: 294014 - RNA, 19 nt, Artificial Sequence
  Description of Artificial Sequence: Synthetic oligonucleotide
cuagccuacgcaggcugcc

SEQ ID NO: 294015 - RNA, 19 nt, Artificial Sequence
  Description of Artificial Sequence: Synthetic oligonucleotide
aagugugcuuggugggauu

SEQ ID NO: 294016 - RNA, 19 nt, Artificial Sequence
  Description of Artificial Sequence: Synthetic oligonucleotide
ccaagggacucucagucac

SEQ ID NO: 294017 - RNA, 19 nt, Artificial Sequence
  Description of Artificial Sequence: Synthetic oligonucleotide
guaguaggucacaggucag

SEQ ID NO: 294018 - RNA, 19 nt, Artificial Sequence
  Description of Artificial Sequence: Synthetic oligonucleotide
caaauacucuagggcacug

SEQ ID NO: 294019 - RNA, 19 nt, Artificial Sequence
  Description of Artificial Sequence: Synthetic oligonucleotide
gagaaugguggggucacaa

SEQ ID NO: 294020 - RNA, 19 nt, Artificial Sequence
  Description of Artificial Sequence: Synthetic oligonucleotide
ccuugcgguaugcugggcg

SEQ ID NO: 294021 - RNA, 19 nt, Artificial Sequence
  Description of Artificial Sequence: Synthetic oligonucleotide
gugggcuagccuacgcagg

SEQ ID NO: 294022 - RNA, 19 nt, Artificial Sequence
  Description of Artificial Sequence: Synthetic oligonucleotide
agcucgcucucguugccca

SEQ ID NO: 294023 - RNA, 19 nt, Artificial Sequence
  Description of Artificial Sequence: Synthetic oligonucleotide
gaagauccugggagaaaga

SEQ ID NO: 294024 - RNA, 19 nt, Artificial Sequence
  Description of Artificial Sequence: Synthetic oligonucleotide
guagcucgcucucguugcc

SEQ ID NO: 294025 - RNA, 19 nt, Artificial Sequence
  Description of Artificial Sequence: Synthetic oligonucleotide
gaggcaugcauggcucuac

SEQ ID NO: 294026 - RNA, 19 nt, Artificial Sequence
  Description of Artificial Sequence: Synthetic oligonucleotide
agguagaccaagccccaua

SEQ ID NO: 294027 - RNA, 19 nt, Artificial Sequence
  Description of Artificial Sequence: Synthetic oligonucleotide
augugcgagauaaguccag

SEQ ID NO: 294028 - RNA, 19 nt, Artificial Sequence
  Description of Artificial Sequence: Synthetic oligonucleotide
ggcaugcauggcucuacag

SEQ ID NO: 294029 - RNA, 19 nt, Artificial Sequence
  Description of Artificial Sequence: Synthetic oligonucleotide
ggaaggagguagaccaagc

SEQ ID NO: 294030 - RNA, 19 nt, Artificial Sequence
  Description of Artificial Sequence: Synthetic oligonucleotide
cacauccggucuugagccc

SEQ ID NO: 294031 - RNA, 19 nt, Artificial Sequence
  Description of Artificial Sequence: Synthetic oligonucleotide
ggaccacaugguuaaguga

SEQ ID NO: 294032 - RNA, 19 nt, Artificial Sequence
  Description of Artificial Sequence: Synthetic oligonucleotide
acacucuaugggagguagg

SEQ ID NO: 294033 - RNA, 19 nt, Artificial Sequence
  Description of Artificial Sequence: Synthetic oligonucleotide
gcggcugucagauggaucu

SEQ ID NO: 294034 - RNA, 19 nt, Artificial Sequence
  Description of Artificial Sequence: Synthetic oligonucleotide
gccauguggacauccgaac

SEQ ID NO: 294035 - RNA, 19 nt, Artificial Sequence
  Description of Artificial Sequence: Synthetic oligonucleotide
auccggaccaagggcugac

SEQ ID NO: 294036 - RNA, 19 nt, Artificial Sequence
  Description of Artificial Sequence: Synthetic oligonucleotide
gacucuccuuggcugcuga

SEQ ID NO: 294037 - RNA, 19 nt, Artificial Sequence
  Description of Artificial Sequence: Synthetic oligonucleotide
auauccggaccaagggcug

SEQ ID NO: 294038 - RNA, 19 nt, Artificial Sequence
  Description of Artificial Sequence: Synthetic oligonucleotide
acgccagauuugugcaucu

SEQ ID NO: 294039 - RNA, 19 nt, Artificial Sequence
  Description of Artificial Sequence: Synthetic oligonucleotide
uacgcaggcugcccagguc

SEQ ID NO: 294040 - RNA, 19 nt, Artificial Sequence
  Description of Artificial Sequence: Synthetic oligonucleotide
gcuagggguaggaaggaac

SEQ ID NO: 294041 - RNA, 19 nt, Artificial Sequence
  Description of Artificial Sequence: Synthetic oligonucleotide
guacagacucuccuuggcu

SEQ ID NO: 294042 - RNA, 19 nt, Artificial Sequence
  Description of Artificial Sequence: Synthetic oligonucleotide
ggcuagccuacgcaggcug

SEQ ID NO: 294043 - RNA, 19 nt, Artificial Sequence
  Description of Artificial Sequence: Synthetic oligonucleotide
uauccggaccaagggcuga

SEQ ID NO: 294044 - RNA, 19 nt, Artificial Sequence
  Description of Artificial Sequence: Synthetic oligonucleotide
gccaucaagcgcacagugg

SEQ ID NO: 294045 - RNA, 19 nt, Artificial Sequence
  Description of Artificial Sequence: Synthetic oligonucleotide
ccgaacagguagauccugc

SEQ ID NO: 294046 - RNA, 19 nt, Artificial Sequence
  Description of Artificial Sequence: Synthetic oligonucleotide
cuggucgccugacuucuuc

SEQ ID NO: 294047 - RNA, 19 nt, Artificial Sequence
  Description of Artificial Sequence: Synthetic oligonucleotide
gacuugcccaugguccuac

SEQ ID NO: 294048 - RNA, 19 nt, Artificial Sequence
  Description of Artificial Sequence: Synthetic oligonucleotide
agacucugggcacgauuaa

SEQ ID NO: 294049 - RNA, 19 nt, Artificial Sequence
  Description of Artificial Sequence: Synthetic oligonucleotide
gaucucaauaagugugcuu

SEQ ID NO: 294050 - RNA, 19 nt, Artificial Sequence
  Description of Artificial Sequence: Synthetic oligonucleotide
gugcgagauaaguccagaa

SEQ ID NO: 294051 - RNA, 19 nt, Artificial Sequence
  Description of Artificial Sequence: Synthetic oligonucleotide
cagcuucgcuccaugaaaa

SEQ ID NO: 294052 - RNA, 19 nt, Artificial Sequence
  Description of Artificial Sequence: Synthetic oligonucleotide
agccuacgcaggcugccca

SEQ ID NO: 294053 - RNA, 19 nt, Artificial Sequence
  Description of Artificial Sequence: Synthetic oligonucleotide
cauagugacugcggauguc

SEQ ID NO: 294054 - RNA, 19 nt, Artificial Sequence
  Description of Artificial Sequence: Synthetic oligonucleotide
ucauugcaggagcgucggu

SEQ ID NO: 294055 - RNA, 19 nt, Artificial Sequence
  Description of Artificial Sequence: Synthetic oligonucleotide
agggaagauccugggagaa

SEQ ID NO: 294056 - RNA, 19 nt, Artificial Sequence
  Description of Artificial Sequence: Synthetic oligonucleotide
uagccuacgcaggcugccc

SEQ ID NO: 294057 - RNA, 19 nt, Artificial Sequence
  Description of Artificial Sequence: Synthetic oligonucleotide
caggccaggugucuaccuc

SEQ ID NO: 294058 - RNA, 19 nt, Artificial Sequence
  Description of Artificial Sequence: Synthetic oligonucleotide
acaggacaauuaaguaaga

SEQ ID NO: 294059 - RNA, 19 nt, Artificial Sequence
  Description of Artificial Sequence: Synthetic oligonucleotide
agugugcuuggugggauuu

SEQ ID NO: 294060 - RNA, 19 nt, Artificial Sequence
  Description of Artificial Sequence: Synthetic oligonucleotide
  modified_base (18)..(18): a, c, u, g, unknown or other
gaacaggcuuagucaggna

SEQ ID NO: 294061 - RNA, 19 nt, Artificial Sequence
  Description of Artificial Sequence: Synthetic oligonucleotide
cuggagaauggugggguca

SEQ ID NO: 294062 - RNA, 19 nt, Artificial Sequence
  Description of Artificial Sequence: Synthetic oligonucleotide
gcagucuuaaggagacuug

SEQ ID NO: 294063 - RNA, 19 nt, Artificial Sequence
  Description of Artificial Sequence: Synthetic oligonucleotide
gauugaccugcugcaaaua

SEQ ID NO: 294064 - RNA, 19 nt, Artificial Sequence
  Description of Artificial Sequence: Synthetic oligonucleotide
cugugggcuagccuacgca

SEQ ID NO: 294065 - RNA, 19 nt, Artificial Sequence
  Description of Artificial Sequence: Synthetic oligonucleotide
gguccuacugggcugaaau

SEQ ID NO: 294066 - RNA, 19 nt, Artificial Sequence
  Description of Artificial Sequence: Synthetic oligonucleotide
auacucuagggcacuggaa

SEQ ID NO: 294067 - RNA, 19 nt, Artificial Sequence
  Description of Artificial Sequence: Synthetic oligonucleotide
auagagccauguggacauc

SEQ ID NO: 294068 - RNA, 19 nt, Artificial Sequence
  Description of Artificial Sequence: Synthetic oligonucleotide
cugguacgccgccguaggc

SEQ ID NO: 294069 - RNA, 19 nt, Artificial Sequence
  Description of Artificial Sequence: Synthetic oligonucleotide
cacccuauguugcuuucaa

SEQ ID NO: 294070 - RNA, 19 nt, Artificial Sequence
  Description of Artificial Sequence: Synthetic oligonucleotide
auccgaacagguagauccu

SEQ ID NO: 294071 - RNA, 19 nt, Artificial Sequence
  Description of Artificial Sequence: Synthetic oligonucleotide
gccgccguaggcuaugcuc

SEQ ID NO: 294072 - RNA, 19 nt, Artificial Sequence
  Description of Artificial Sequence: Synthetic oligonucleotide
gcuuagaccauggacauuu

SEQ ID NO: 294073 - RNA, 19 nt, Artificial Sequence
  Description of Artificial Sequence: Synthetic oligonucleotide
ggggauccgcucuacuuca

SEQ ID NO: 294074 - RNA, 19 nt, Artificial Sequence
  Description of Artificial Sequence: Synthetic oligonucleotide
cagagaccuaguucccaga

SEQ ID NO: 294075 - RNA, 19 nt, Artificial Sequence
  Description of Artificial Sequence: Synthetic oligonucleotide
guauugugacaggcccaag

SEQ ID NO: 294076 - RNA, 19 nt, Artificial Sequence
  Description of Artificial Sequence: Synthetic oligonucleotide
gcuugacaaucaucugcug

SEQ ID NO: 294077 - RNA, 19 nt, Artificial Sequence
  Description of Artificial Sequence: Synthetic oligonucleotide
  modified_base (14)..(14): a, c, u, g, unknown or other
aggcuuagucaggnacagu

SEQ ID NO: 294078 - RNA, 19 nt, Artificial Sequence
  Description of Artificial Sequence: Synthetic oligonucleotide
gacugcggauguccaccac

SEQ ID NO: 294079 - RNA, 19 nt, Artificial Sequence
  Description of Artificial Sequence: Synthetic oligonucleotide
caguaccauguucuccuga

SEQ ID NO: 294080 - RNA, 19 nt, Artificial Sequence
  Description of Artificial Sequence: Synthetic oligonucleotide
gcuugugauugaccugcug

SEQ ID NO: 294081 - RNA, 19 nt, Artificial Sequence
  Description of Artificial Sequence: Synthetic oligonucleotide
uugcgguaugcugggcgga

SEQ ID NO: 294082 - RNA, 19 nt, Artificial Sequence
  Description of Artificial Sequence: Synthetic oligonucleotide
caagccccauacgugguca

SEQ ID NO: 294083 - RNA, 19 nt, Artificial Sequence
  Description of Artificial Sequence: Synthetic oligonucleotide
gucgccugacuucuucuua

SEQ ID NO: 294084 - RNA, 19 nt, Artificial Sequence
  Description of Artificial Sequence: Synthetic oligonucleotide
caguugcuccagagggcug

SEQ ID NO: 294085 - RNA, 19 nt, Artificial Sequence
  Description of Artificial Sequence: Synthetic oligonucleotide
cagacccaggagaaauaaa

SEQ ID NO: 294086 - RNA, 19 nt, Artificial Sequence
  Description of Artificial Sequence: Synthetic oligonucleotide
cucaauaagugugcuuggu

SEQ ID NO: 294087 - RNA, 19 nt, Artificial Sequence
  Description of Artificial Sequence: Synthetic oligonucleotide
ggagcgucggucacccacc

SEQ ID NO: 294088 - RNA, 19 nt, Artificial Sequence
  Description of Artificial Sequence: Synthetic oligonucleotide
gcugugggcuagccuacgc

SEQ ID NO: 294089 - RNA, 19 nt, Artificial Sequence
  Description of Artificial Sequence: Synthetic oligonucleotide
ugcggauguccaccaccua

SEQ ID NO: 294090 - RNA, 19 nt, Artificial Sequence
  Description of Artificial Sequence: Synthetic oligonucleotide
  modified_base (5)..(5): a, c, u, g, unknown or other
caggnacaguggaaggagu

SEQ ID NO: 294091 - RNA, 19 nt, Artificial Sequence
  Description of Artificial Sequence: Synthetic oligonucleotide
gagacagagggaagauccu

SEQ ID NO: 294092 - RNA, 19 nt, Artificial Sequence
  Description of Artificial Sequence: Synthetic oligonucleotide
uggguuccucugggcacag

SEQ ID NO: 294093 - RNA, 19 nt, Artificial Sequence
  Description of Artificial Sequence: Synthetic oligonucleotide
agcgagguucacagcacau

SEQ ID NO: 294094 - RNA, 19 nt, Artificial Sequence
  Description of Artificial Sequence: Synthetic oligonucleotide
ccguaggcuaugcuccagc

SEQ ID NO: 294095 - RNA, 19 nt, Artificial Sequence
  Description of Artificial Sequence: Synthetic oligonucleotide
gaacgccagauuugugcau

SEQ ID NO: 294096 - RNA, 19 nt, Artificial Sequence
  Description of Artificial Sequence: Synthetic oligonucleotide
cugguggacuugggcaaug

SEQ ID NO: 294097 - RNA, 19 nt, Artificial Sequence
  Description of Artificial Sequence: Synthetic oligonucleotide
ccagcuucgcuccaugaaa

SEQ ID NO: 294098 - RNA, 19 nt, Artificial Sequence
  Description of Artificial Sequence: Synthetic oligonucleotide
guggacauccgaacaggua

SEQ ID NO: 294099 - RNA, 19 nt, Artificial Sequence
  Description of Artificial Sequence: Synthetic oligonucleotide
ugcuaugcucugggccaca

SEQ ID NO: 294100 - RNA, 19 nt, Artificial Sequence
  Description of Artificial Sequence: Synthetic oligonucleotide
guagauccugcaggaagcu

SEQ ID NO: 294101 - RNA, 19 nt, Artificial Sequence
  Description of Artificial Sequence: Synthetic oligonucleotide
ggacauccgaacagguaga

SEQ ID NO: 294102 - RNA, 19 nt, Artificial Sequence
  Description of Artificial Sequence: Synthetic oligonucleotide
caacuuugcccuguauugu

SEQ ID NO: 294103 - RNA, 19 nt, Artificial Sequence
  Description of Artificial Sequence: Synthetic oligonucleotide
ugcguccggguggggcugg

SEQ ID NO: 294104 - RNA, 19 nt, Artificial Sequence
  Description of Artificial Sequence: Synthetic oligonucleotide
gcagacccaggagaaauaa

SEQ ID NO: 294105 - RNA, 19 nt, Artificial Sequence
  Description of Artificial Sequence: Synthetic oligonucleotide
uccggaccaagggcugacu

SEQ ID NO: 294106 - RNA, 19 nt, Artificial Sequence
  Description of Artificial Sequence: Synthetic oligonucleotide
ccccauacguggucaggag

SEQ ID NO: 294107 - RNA, 19 nt, Artificial Sequence
  Description of Artificial Sequence: Synthetic oligonucleotide
caccaccuacagaugauau

SEQ ID NO: 294108 - RNA, 19 nt, Artificial Sequence
  Description of Artificial Sequence: Synthetic oligonucleotide
gguacgccgccguaggcua

SEQ ID NO: 294109 - RNA, 19 nt, Artificial Sequence
  Description of Artificial Sequence: Synthetic oligonucleotide
gggucacaaaucccacaga

SEQ ID NO: 294110 - RNA, 19 nt, Artificial Sequence
  Description of Artificial Sequence: Synthetic oligonucleotide
gacauccgaacagguagau

SEQ ID NO: 294111 - RNA, 19 nt, Artificial Sequence
  Description of Artificial Sequence: Synthetic oligonucleotide
guagcuccacugacauuga

SEQ ID NO: 294112 - RNA, 19 nt, Artificial Sequence
  Description of Artificial Sequence: Synthetic oligonucleotide
cugacugguacgccgccgu

SEQ ID NO: 294113 - RNA, 19 nt, Artificial Sequence
  Description of Artificial Sequence: Synthetic oligonucleotide
ccuugggccuacccugagc

SEQ ID NO: 294114 - RNA, 19 nt, Artificial Sequence
  Description of Artificial Sequence: Synthetic oligonucleotide
cauccggucuugagcccca

SEQ ID NO: 294115 - RNA, 19 nt, Artificial Sequence
  Description of Artificial Sequence: Synthetic oligonucleotide
ggcauagaagacggccuuc

SEQ ID NO: 294116 - RNA, 19 nt, Artificial Sequence
  Description of Artificial Sequence: Synthetic oligonucleotide
caagcgcacaguggcuuca

SEQ ID NO: 294117 - RNA, 19 nt, Artificial Sequence
  Description of Artificial Sequence: Synthetic oligonucleotide
cuccugccaucaagcgcac

SEQ ID NO: 294118 - RNA, 19 nt, Artificial Sequence
  Description of Artificial Sequence: Synthetic oligonucleotide
gcuagccuacgcaggcugc

SEQ ID NO: 294119 - RNA, 19 nt, Artificial Sequence
  Description of Artificial Sequence: Synthetic oligonucleotide
ggagguagaccaagcccca

SEQ ID NO: 294120 - RNA, 19 nt, Artificial Sequence
  Description of Artificial Sequence: Synthetic oligonucleotide
gucggucacccaccuucuc

SEQ ID NO: 294121 - RNA, 19 nt, Artificial Sequence
  Description of Artificial Sequence: Synthetic oligonucleotide
gggcuuagaccauggacau

SEQ ID NO: 294122 - RNA, 19 nt, Artificial Sequence
  Description of Artificial Sequence: Synthetic oligonucleotide
ccaagccccauacgugguc

SEQ ID NO: 294123 - RNA, 19 nt, Artificial Sequence
  Description of Artificial Sequence: Synthetic oligonucleotide
cagaacgccugguggacuu

SEQ ID NO: 294124 - RNA, 19 nt, Artificial Sequence
  Description of Artificial Sequence: Synthetic oligonucleotide
cguaggcuaugcuccagca

SEQ ID NO: 294125 - RNA, 19 nt, Artificial Sequence
  Description of Artificial Sequence: Synthetic oligonucleotide
gggauccgcucuacuucag

SEQ ID NO: 294126 - RNA, 19 nt, Artificial Sequence
  Description of Artificial Sequence: Synthetic oligonucleotide
cagguagauccugcaggaa

SEQ ID NO: 294127 - RNA, 19 nt, Artificial Sequence
  Description of Artificial Sequence: Synthetic oligonucleotide
gagccagcgcagggaguca

SEQ ID NO: 294128 - RNA, 19 nt, Artificial Sequence
  Description of Artificial Sequence: Synthetic oligonucleotide
gcccucucacaauggcaga

SEQ ID NO: 294129 - RNA, 19 nt, Artificial Sequence
  Description of Artificial Sequence: Synthetic oligonucleotide
aggcccaagcacacacaua

SEQ ID NO: 294130 - RNA, 19 nt, Artificial Sequence
  Description of Artificial Sequence: Synthetic oligonucleotide
gagguagaccaagccccau

SEQ ID NO: 294131 - RNA, 19 nt, Artificial Sequence
  Description of Artificial Sequence: Synthetic oligonucleotide
ggucagcaacuggaccaca

SEQ ID NO: 294132 - RNA, 19 nt, Artificial Sequence
  Description of Artificial Sequence: Synthetic oligonucleotide
caggucccgcuggaagcca

SEQ ID NO: 294133 - RNA, 19 nt, Artificial Sequence
  Description of Artificial Sequence: Synthetic oligonucleotide
ggccuacccugagcucagg

SEQ ID NO: 294134 - RNA, 19 nt, Artificial Sequence
  Description of Artificial Sequence: Synthetic oligonucleotide
cuggugcguccgggugggg

SEQ ID NO: 294135 - RNA, 19 nt, Artificial Sequence
  Description of Artificial Sequence: Synthetic oligonucleotide
cccucucacaauggcagaa

SEQ ID NO: 294136 - RNA, 19 nt, Artificial Sequence
  Description of Artificial Sequence: Synthetic oligonucleotide
gcgcagggagucagggaca

SEQ ID NO: 294137 - RNA, 19 nt, Artificial Sequence
  Description of Artificial Sequence: Synthetic oligonucleotide
cucagcccacuugggcuua

SEQ ID NO: 294138 - RNA, 19 nt, Artificial Sequence
  Description of Artificial Sequence: Synthetic oligonucleotide
ccauggcggcugucagaug

SEQ ID NO: 294139 - RNA, 19 nt, Artificial Sequence
  Description of Artificial Sequence: Synthetic oligonucleotide
ccagagagugaggcaugca

SEQ ID NO: 294140 - RNA, 19 nt, Artificial Sequence
  Description of Artificial Sequence: Synthetic oligonucleotide
gcagaacgccugguggacu

SEQ ID NO: 294141 - RNA, 19 nt, Artificial Sequence
  Description of Artificial Sequence: Synthetic oligonucleotide
caggagcgucggucaccca

SEQ ID NO: 294142 - RNA, 19 nt, Artificial Sequence
  Description of Artificial Sequence: Synthetic oligonucleotide
gcaguagcucgcucucguu

SEQ ID NO: 294143 - RNA, 19 nt, Artificial Sequence
  Description of Artificial Sequence: Synthetic oligonucleotide
gggcacgauuaaggaagua

SEQ ID NO: 294144 - RNA, 19 nt, Artificial Sequence
  Description of Artificial Sequence: Synthetic oligonucleotide
guacgccgccguaggcuau

SEQ ID NO: 294145 - RNA, 19 nt, Artificial Sequence
  Description of Artificial Sequence: Synthetic oligonucleotide
ggcuuagaccauggacauu

SEQ ID NO: 294146 - RNA, 19 nt, Artificial Sequence
  Description of Artificial Sequence: Synthetic oligonucleotide
ccggaccaagggcugacuu

SEQ ID NO: 294147 - RNA, 19 nt, Artificial Sequence
  Description of Artificial Sequence: Synthetic oligonucleotide
cgucggucacccaccuucu

SEQ ID NO: 294148 - RNA, 19 nt, Artificial Sequence
  Description of Artificial Sequence: Synthetic oligonucleotide
ccacuggcccucucacaau

SEQ ID NO: 294149 - RNA, 19 nt, Artificial Sequence
  Description of Artificial Sequence: Synthetic oligonucleotide
gcguccggguggggcuggc

SEQ ID NO: 294150 - RNA, 19 nt, Artificial Sequence
  Description of Artificial Sequence: Synthetic oligonucleotide
ccuggucgccugacuucuu

SEQ ID NO: 294151 - RNA, 19 nt, Artificial Sequence
  Description of Artificial Sequence: Synthetic oligonucleotide
cguccggguggggcuggcu

SEQ ID NO: 294152 - RNA, 19 nt, Artificial Sequence
  Description of Artificial Sequence: Synthetic oligonucleotide
aauaacugcaaguucaugg

SEQ ID NO: 294153 - RNA, 19 nt, Artificial Sequence
  Description of Artificial Sequence: Synthetic oligonucleotide
ugaaguaacaaguuaaggc

SEQ ID NO: 294154 - RNA, 19 nt, Artificial Sequence
  Description of Artificial Sequence: Synthetic oligonucleotide
ucaagauaagauaauagug

SEQ ID NO: 294155 - RNA, 19 nt, Artificial Sequence
  Description of Artificial Sequence: Synthetic oligonucleotide
uuuauuuggaacuuuuacc

SEQ ID NO: 294156 - RNA, 19 nt, Artificial Sequence
  Description of Artificial Sequence: Synthetic oligonucleotide
gacauuauaauccucugag

SEQ ID NO: 294157 - RNA, 19 nt, Artificial Sequence
  Description of Artificial Sequence: Synthetic oligonucleotide
auuuacauaugccaagaac

SEQ ID NO: 294158 - RNA, 19 nt, Artificial Sequence
  Description of Artificial Sequence: Synthetic oligonucleotide
uuaguguuaacaucaagcc

SEQ ID NO: 294159 - RNA, 19 nt, Artificial Sequence
  Description of Artificial Sequence: Synthetic oligonucleotide
aaugcuuaggcuaauacug

SEQ ID NO: 294160 - RNA, 19 nt, Artificial Sequence
  Description of Artificial Sequence: Synthetic oligonucleotide
ucaugauuaaggcugcagg

SEQ ID NO: 294161 - RNA, 19 nt, Artificial Sequence
  Description of Artificial Sequence: Synthetic oligonucleotide
aacaauuccugaucuaaag

SEQ ID NO: 294162 - RNA, 19 nt, Artificial Sequence
  Description of Artificial Sequence: Synthetic oligonucleotide
uauuaauuuuauuuggaac

SEQ ID NO: 294163 - RNA, 19 nt, Artificial Sequence
  Description of Artificial Sequence: Synthetic oligonucleotide
  modified_base (6)..(6): a, c, u, g, unknown or other
aaaggnguggaaucugggg

SEQ ID NO: 294164 - RNA, 19 nt, Artificial Sequence
  Description of Artificial Sequence: Synthetic oligonucleotide
gaucuaguaacgcuugugg

SEQ ID NO: 294165 - RNA, 19 nt, Artificial Sequence
  Description of Artificial Sequence: Synthetic oligonucleotide
ugaucuaugcuacagucug

SEQ ID NO: 294166 - RNA, 19 nt, Artificial Sequence
  Description of Artificial Sequence: Synthetic oligonucleotide
agagauucuguaaagauuc

SEQ ID NO: 294167 - RNA, 19 nt, Artificial Sequence
  Description of Artificial Sequence: Synthetic oligonucleotide
aauucagcacgaaagcgcc

SEQ ID NO: 294168 - RNA, 19 nt, Artificial Sequence
  Description of Artificial Sequence: Synthetic oligonucleotide
aacagcgcugacuaacggc

SEQ ID NO: 294169 - RNA, 19 nt, Artificial Sequence
  Description of Artificial Sequence: Synthetic oligonucleotide
uuaugcuaaguaauacagg

SEQ ID NO: 294170 - RNA, 19 nt, Artificial Sequence
  Description of Artificial Sequence: Synthetic oligonucleotide
  modified_base (7)..(7): a, c, u, g, unknown or other
uaaaggnguggaaucuggg

SEQ ID NO: 294171 - RNA, 19 nt, Artificial Sequence
  Description of Artificial Sequence: Synthetic oligonucleotide
uggagaaugcuaaaguucu

SEQ ID NO: 294172 - RNA, 19 nt, Artificial Sequence
  Description of Artificial Sequence: Synthetic oligonucleotide
aguugaacaauuccugauc

SEQ ID NO: 294173 - RNA, 19 nt, Artificial Sequence
  Description of Artificial Sequence: Synthetic oligonucleotide
agaaugcuaaaguucuucg

SEQ ID NO: 294174 - RNA, 19 nt, Artificial Sequence
  Description of Artificial Sequence: Synthetic oligonucleotide
uuaucagccauuaaacaaa

SEQ ID NO: 294175 - RNA, 19 nt, Artificial Sequence
  Description of Artificial Sequence: Synthetic oligonucleotide
uaaaacaccugacacaaua

SEQ ID NO: 294176 - RNA, 19 nt, Artificial Sequence
  Description of Artificial Sequence: Synthetic oligonucleotide
aagacgaacgcuugccgac

SEQ ID NO: 294177 - RNA, 19 nt, Artificial Sequence
  Description of Artificial Sequence: Synthetic oligonucleotide
uaacgcuuguggaacaacg

SEQ ID NO: 294178 - RNA, 19 nt, Artificial Sequence
  Description of Artificial Sequence: Synthetic oligonucleotide
acucauugcgucuucagag

SEQ ID NO: 294179 - RNA, 19 nt, Artificial Sequence
  Description of Artificial Sequence: Synthetic oligonucleotide
  modified_base (5)..(5): a, c, u, g, unknown or other
aaggnguggaaucugggga

SEQ ID NO: 294180 - RNA, 19 nt, Artificial Sequence
  Description of Artificial Sequence: Synthetic oligonucleotide
uguaggaaauccaacggac

SEQ ID NO: 294181 - RNA, 19 nt, Artificial Sequence
  Description of Artificial Sequence: Synthetic oligonucleotide
uggaacuuuuaccacaaca

SEQ ID NO: 294182 - RNA, 19 nt, Artificial Sequence
  Description of Artificial Sequence: Synthetic oligonucleotide
uucuauuuaguguuaacau

SEQ ID NO: 294183 - RNA, 19 nt, Artificial Sequence
  Description of Artificial Sequence: Synthetic oligonucleotide
ucuauuuaguguuaacauc

SEQ ID NO: 294184 - RNA, 19 nt, Artificial Sequence
  Description of Artificial Sequence: Synthetic oligonucleotide
agcaauaggacgcagguaa

SEQ ID NO: 294185 - RNA, 19 nt, Artificial Sequence
  Description of Artificial Sequence: Synthetic oligonucleotide
uaugcuacagucuggcagc

SEQ ID NO: 294186 - RNA, 19 nt, Artificial Sequence
  Description of Artificial Sequence: Synthetic oligonucleotide
caagaucuauuucagguag

SEQ ID NO: 294187 - RNA, 19 nt, Artificial Sequence
  Description of Artificial Sequence: Synthetic oligonucleotide
gauaagauaauaguguuua

SEQ ID NO: 294188 - RNA, 19 nt, Artificial Sequence
  Description of Artificial Sequence: Synthetic oligonucleotide
uaguguuaacaucaagccc

SEQ ID NO: 294189 - RNA, 19 nt, Artificial Sequence
  Description of Artificial Sequence: Synthetic oligonucleotide
cucuuaucagccauuaaac

SEQ ID NO: 294190 - RNA, 19 nt, Artificial Sequence
  Description of Artificial Sequence: Synthetic oligonucleotide
uggaacaacguccuguacu

SEQ ID NO: 294191 - RNA, 19 nt, Artificial Sequence
  Description of Artificial Sequence: Synthetic oligonucleotide
uuuaacgucugggucaucc

SEQ ID NO: 294192 - RNA, 19 nt, Artificial Sequence
  Description of Artificial Sequence: Synthetic oligonucleotide
auaagauaauaguguuuac

SEQ ID NO: 294193 - RNA, 19 nt, Artificial Sequence
  Description of Artificial Sequence: Synthetic oligonucleotide
aauaguguuuacuguacuu

SEQ ID NO: 294194 - RNA, 19 nt, Artificial Sequence
  Description of Artificial Sequence: Synthetic oligonucleotide
cuugaucuaugcuacaguc

SEQ ID NO: 294195 - RNA, 19 nt, Artificial Sequence
  Description of Artificial Sequence: Synthetic oligonucleotide
auucuauuuaguguuaaca

SEQ ID NO: 294196 - RNA, 19 nt, Artificial Sequence
  Description of Artificial Sequence: Synthetic oligonucleotide
aaagacgaacgcuugccga

SEQ ID NO: 294197 - RNA, 19 nt, Artificial Sequence
  Description of Artificial Sequence: Synthetic oligonucleotide
aacgcuugccgaccagacc

SEQ ID NO: 294198 - RNA, 19 nt, Artificial Sequence
  Description of Artificial Sequence: Synthetic oligonucleotide
caaugugcugcaauagggg

SEQ ID NO: 294199 - RNA, 19 nt, Artificial Sequence
  Description of Artificial Sequence: Synthetic oligonucleotide
ugcuaaaguucuucgaacu

SEQ ID NO: 294200 - RNA, 19 nt, Artificial Sequence
  Description of Artificial Sequence: Synthetic oligonucleotide
aaaauuggaaccagaucug

SEQ ID NO: 294201 - RNA, 19 nt, Artificial Sequence
  Description of Artificial Sequence: Synthetic oligonucleotide
agucaagauaagauaauag

SEQ ID NO: 294202 - RNA, 19 nt, Artificial Sequence
  Description of Artificial Sequence: Synthetic oligonucleotide
agcacgaaagcgccaauuc

SEQ ID NO: 294203 - RNA, 19 nt, Artificial Sequence
  Description of Artificial Sequence: Synthetic oligonucleotide
ggaacuuuuaccacaacag

SEQ ID NO: 294204 - RNA, 19 nt, Artificial Sequence
  Description of Artificial Sequence: Synthetic oligonucleotide
acagcgcugacuaacggcc

SEQ ID NO: 294205 - RNA, 19 nt, Artificial Sequence
  Description of Artificial Sequence: Synthetic oligonucleotide
  modified_base (4)..(4): a, c, u, g, unknown or other
aggnguggaaucuggggag

SEQ ID NO: 294206 - RNA, 19 nt, Artificial Sequence
  Description of Artificial Sequence: Synthetic oligonucleotide
gauaaagguacucucuucu

SEQ ID NO: 294207 - RNA, 19 nt, Artificial Sequence
  Description of Artificial Sequence: Synthetic oligonucleotide
ccugacacaauauuugugc

SEQ ID NO: 294208 - RNA, 19 nt, Artificial Sequence
  Description of Artificial Sequence: Synthetic oligonucleotide
uccaacggacugaagagac

SEQ ID NO: 294209 - RNA, 19 nt, Artificial Sequence
  Description of Artificial Sequence: Synthetic oligonucleotide
uaggcuaauacugaagguc

SEQ ID NO: 294210 - RNA, 19 nt, Artificial Sequence
  Description of Artificial Sequence: Synthetic oligonucleotide
  modified_base (12)..(12): a, c, u, g, unknown or other
ugaucuaaaggnguggaau

SEQ ID NO: 294211 - RNA, 19 nt, Artificial Sequence
  Description of Artificial Sequence: Synthetic oligonucleotide
gacgucacugucucggucc

SEQ ID NO: 294212 - RNA, 19 nt, Artificial Sequence
  Description of Artificial Sequence: Synthetic oligonucleotide
cucauugcgucuucagagg

SEQ ID NO: 294213 - RNA, 19 nt, Artificial Sequence
  Description of Artificial Sequence: Synthetic oligonucleotide
uuggaacccuaucauuugc

SEQ ID NO: 294214 - RNA, 19 nt, Artificial Sequence
  Description of Artificial Sequence: Synthetic oligonucleotide
gauucuauuuaguguuaac

SEQ ID NO: 294215 - RNA, 19 nt, Artificial Sequence
  Description of Artificial Sequence: Synthetic oligonucleotide
uacucauugcgucuucaga

SEQ ID NO: 294216 - RNA, 19 nt, Artificial Sequence
  Description of Artificial Sequence: Synthetic oligonucleotide
cugggaacgagauggcagg

SEQ ID NO: 294217 - RNA, 19 nt, Artificial Sequence
  Description of Artificial Sequence: Synthetic oligonucleotide
cagucgucuucaaugacag

SEQ ID NO: 294218 - RNA, 19 nt, Artificial Sequence
  Description of Artificial Sequence: Synthetic oligonucleotide
caaagacgaacgcuugccg

SEQ ID NO: 294219 - RNA, 19 nt, Artificial Sequence
  Description of Artificial Sequence: Synthetic oligonucleotide
  modified_base (10)..(10): a, c, u, g, unknown or other
aucuaaaggnguggaaucu

SEQ ID NO: 294220 - RNA, 19 nt, Artificial Sequence
  Description of Artificial Sequence: Synthetic oligonucleotide
acgcuuguggaacaacguc

SEQ ID NO: 294221 - RNA, 19 nt, Artificial Sequence
  Description of Artificial Sequence: Synthetic oligonucleotide
uuaaaaccacugguacugg

SEQ ID NO: 294222 - RNA, 19 nt, Artificial Sequence
  Description of Artificial Sequence: Synthetic oligonucleotide
gaaugcuaaaguucuucga

SEQ ID NO: 294223 - RNA, 19 nt, Artificial Sequence
  Description of Artificial Sequence: Synthetic oligonucleotide
uucuucgaacuuuccacug

SEQ ID NO: 294224 - RNA, 19 nt, Artificial Sequence
  Description of Artificial Sequence: Synthetic oligonucleotide
ucuuguagcucacuccgau

SEQ ID NO: 294225 - RNA, 19 nt, Artificial Sequence
  Description of Artificial Sequence: Synthetic oligonucleotide
aacaccuauccugacuuca

SEQ ID NO: 294226 - RNA, 19 nt, Artificial Sequence
  Description of Artificial Sequence: Synthetic oligonucleotide
cugacuaacggcccaggag

SEQ ID NO: 294227 - RNA, 19 nt, Artificial Sequence
  Description of Artificial Sequence: Synthetic oligonucleotide
ggaacgagauggcaggagg

SEQ ID NO: 294228 - RNA, 19 nt, Artificial Sequence
  Description of Artificial Sequence: Synthetic oligonucleotide
uccggguucaguacgucga

SEQ ID NO: 294229 - RNA, 19 nt, Artificial Sequence
  Description of Artificial Sequence: Synthetic oligonucleotide
ugaucuaguaacgcuugug

SEQ ID NO: 294230 - RNA, 19 nt, Artificial Sequence
  Description of Artificial Sequence: Synthetic oligonucleotide
ggcaucucuuuauaggucc

SEQ ID NO: 294231 - RNA, 19 nt, Artificial Sequence
  Description of Artificial Sequence: Synthetic oligonucleotide
gaaugcuuaggcuaauacu

SEQ ID NO: 294232 - RNA, 19 nt, Artificial Sequence
  Description of Artificial Sequence: Synthetic oligonucleotide
aucuugaucuaugcuacag

SEQ ID NO: 294233 - RNA, 19 nt, Artificial Sequence
  Description of Artificial Sequence: Synthetic oligonucleotide
uuccggguucaguacgucg

SEQ ID NO: 294234 - RNA, 19 nt, Artificial Sequence
  Description of Artificial Sequence: Synthetic oligonucleotide
agggcuuaagccaucacug

SEQ ID NO: 294235 - RNA, 19 nt, Artificial Sequence
  Description of Artificial Sequence: Synthetic oligonucleotide
  modified_base (15)..(15): a, c, u, g, unknown or other
uccugaucuaaaggngugg

SEQ ID NO: 294236 - RNA, 19 nt, Artificial Sequence
  Description of Artificial Sequence: Synthetic oligonucleotide
ucugacauuuggaacccua

SEQ ID NO: 294237 - RNA, 19 nt, Artificial Sequence
  Description of Artificial Sequence: Synthetic oligonucleotide
uccuguacuuucgaucucc

SEQ ID NO: 294238 - RNA, 19 nt, Artificial Sequence
  Description of Artificial Sequence: Synthetic oligonucleotide
ccaugaucaaguuaaaaca

SEQ ID NO: 294239 - RNA, 19 nt, Artificial Sequence
  Description of Artificial Sequence: Synthetic oligonucleotide
cuugcgaaguacuugacgu

SEQ ID NO: 294240 - RNA, 19 nt, Artificial Sequence
  Description of Artificial Sequence: Synthetic oligonucleotide
aagagaccuugucugcaca

SEQ ID NO: 294241 - RNA, 19 nt, Artificial Sequence
  Description of Artificial Sequence: Synthetic oligonucleotide
uguggaacaacguccugua

SEQ ID NO: 294242 - RNA, 19 nt, Artificial Sequence
  Description of Artificial Sequence: Synthetic oligonucleotide
cauggauggagaaugcuaa

SEQ ID NO: 294243 - RNA, 19 nt, Artificial Sequence
  Description of Artificial Sequence: Synthetic oligonucleotide
ucggucauugacagguacu

SEQ ID NO: 294244 - RNA, 19 nt, Artificial Sequence
  Description of Artificial Sequence: Synthetic oligonucleotide
ucucaagcaaugccaguuc

SEQ ID NO: 294245 - RNA, 19 nt, Artificial Sequence
  Description of Artificial Sequence: Synthetic oligonucleotide
gaagagaccuugucugcac

SEQ ID NO: 294246 - RNA, 19 nt, Artificial Sequence
  Description of Artificial Sequence: Synthetic oligonucleotide
aguacgucgaggaagccgu

SEQ ID NO: 294247 - RNA, 19 nt, Artificial Sequence
  Description of Artificial Sequence: Synthetic oligonucleotide
ugacacaauauuugugcua

SEQ ID NO: 294248 - RNA, 19 nt, Artificial Sequence
  Description of Artificial Sequence: Synthetic oligonucleotide
cauccaggguggaagcgcg

SEQ ID NO: 294249 - RNA, 19 nt, Artificial Sequence
  Description of Artificial Sequence: Synthetic oligonucleotide
uccuacuguuaucugucac

SEQ ID NO: 294250 - RNA, 19 nt, Artificial Sequence
  Description of Artificial Sequence: Synthetic oligonucleotide
aaggccacgcccggcagac

SEQ ID NO: 294251 - RNA, 19 nt, Artificial Sequence
  Description of Artificial Sequence: Synthetic oligonucleotide
uggaguugauaaagguacu

SEQ ID NO: 294252 - RNA, 19 nt, Artificial Sequence
  Description of Artificial Sequence: Synthetic oligonucleotide
cacaaagacgaacgcuugc

SEQ ID NO: 294253 - RNA, 19 nt, Artificial Sequence
  Description of Artificial Sequence: Synthetic oligonucleotide
cacaacaguucuaaccuca

SEQ ID NO: 294254 - RNA, 19 nt, Artificial Sequence
  Description of Artificial Sequence: Synthetic oligonucleotide
cucgaguaucucuuaucag

SEQ ID NO: 294255 - RNA, 19 nt, Artificial Sequence
  Description of Artificial Sequence: Synthetic oligonucleotide
aggucuacuccaaauguug

SEQ ID NO: 294256 - RNA, 19 nt, Artificial Sequence
  Description of Artificial Sequence: Synthetic oligonucleotide
ggaagccguacucauugcg

SEQ ID NO: 294257 - RNA, 19 nt, Artificial Sequence
  Description of Artificial Sequence: Synthetic oligonucleotide
ggaaugcuuaggcuaauac

SEQ ID NO: 294258 - RNA, 19 nt, Artificial Sequence
  Description of Artificial Sequence: Synthetic oligonucleotide
uaggacgcagguaaucaua

SEQ ID NO: 294259 - RNA, 19 nt, Artificial Sequence
  Description of Artificial Sequence: Synthetic oligonucleotide
caugucugacgccaggguc

SEQ ID NO: 294260 - RNA, 19 nt, Artificial Sequence
  Description of Artificial Sequence: Synthetic oligonucleotide
aggcuaauacugaaggucu

SEQ ID NO: 294261 - RNA, 19 nt, Artificial Sequence
  Description of Artificial Sequence: Synthetic oligonucleotide
caagggaaaccgcucugcc

SEQ ID NO: 294262 - RNA, 19 nt, Artificial Sequence
  Description of Artificial Sequence: Synthetic oligonucleotide
uagagucuggcgcaguguu

SEQ ID NO: 294263 - RNA, 19 nt, Artificial Sequence
  Description of Artificial Sequence: Synthetic oligonucleotide
gcuuaagccaucacuggcg

SEQ ID NO: 294264 - RNA, 19 nt, Artificial Sequence
  Description of Artificial Sequence: Synthetic oligonucleotide
uaacgucugggucauccau

SEQ ID NO: 294265 - RNA, 19 nt, Artificial Sequence
  Description of Artificial Sequence: Synthetic oligonucleotide
gaccggauugcagacuugc

SEQ ID NO: 294266 - RNA, 19 nt, Artificial Sequence
  Description of Artificial Sequence: Synthetic oligonucleotide
agacgaacgcuugccgacc

SEQ ID NO: 294267 - RNA, 19 nt, Artificial Sequence
  Description of Artificial Sequence: Synthetic oligonucleotide
aacgcuuguggaacaacgu

SEQ ID NO: 294268 - RNA, 19 nt, Artificial Sequence
  Description of Artificial Sequence: Synthetic oligonucleotide
cuuccggguagccauggug

SEQ ID NO: 294269 - RNA, 19 nt, Artificial Sequence
  Description of Artificial Sequence: Synthetic oligonucleotide
caacuuguaggaaauccaa

SEQ ID NO: 294270 - RNA, 19 nt, Artificial Sequence
  Description of Artificial Sequence: Synthetic oligonucleotide
cuugcccaagggaaaccgc

SEQ ID NO: 294271 - RNA, 19 nt, Artificial Sequence
  Description of Artificial Sequence: Synthetic oligonucleotide
uucagcacgaaagcgccaa

SEQ ID NO: 294272 - RNA, 19 nt, Artificial Sequence
  Description of Artificial Sequence: Synthetic oligonucleotide
cuaaguaauacaggucaca

SEQ ID NO: 294273 - RNA, 19 nt, Artificial Sequence
  Description of Artificial Sequence: Synthetic oligonucleotide
uaguaacgcuuguggaaca

SEQ ID NO: 294274 - RNA, 19 nt, Artificial Sequence
  Description of Artificial Sequence: Synthetic oligonucleotide
auaggacgcagguaaucau

SEQ ID NO: 294275 - RNA, 19 nt, Artificial Sequence
  Description of Artificial Sequence: Synthetic oligonucleotide
gugaaugcuugcgaaguac

SEQ ID NO: 294276 - RNA, 19 nt, Artificial Sequence
  Description of Artificial Sequence: Synthetic oligonucleotide
cucacuccgaugcucuaug

SEQ ID NO: 294277 - RNA, 19 nt, Artificial Sequence
  Description of Artificial Sequence: Synthetic oligonucleotide
caacagcgcugacuaacgg

SEQ ID NO: 294278 - RNA, 19 nt, Artificial Sequence
  Description of Artificial Sequence: Synthetic oligonucleotide
uccgggugcaucuccugug

SEQ ID NO: 294279 - RNA, 19 nt, Artificial Sequence
  Description of Artificial Sequence: Synthetic oligonucleotide
ggucuacuccaaauguugg

SEQ ID NO: 294280 - RNA, 19 nt, Artificial Sequence
  Description of Artificial Sequence: Synthetic oligonucleotide
acggacugaagagaccuug

SEQ ID NO: 294281 - RNA, 19 nt, Artificial Sequence
  Description of Artificial Sequence: Synthetic oligonucleotide
acgcuuccggguucaguac

SEQ ID NO: 294282 - RNA, 19 nt, Artificial Sequence
  Description of Artificial Sequence: Synthetic oligonucleotide
cuggacgggugaaugcuug

SEQ ID NO: 294283 - RNA, 19 nt, Artificial Sequence
  Description of Artificial Sequence: Synthetic oligonucleotide
ugagaacaccuauccugac

SEQ ID NO: 294284 - RNA, 19 nt, Artificial Sequence
  Description of Artificial Sequence: Synthetic oligonucleotide
ucacuccgaugcucuaugc

SEQ ID NO: 294285 - RNA, 19 nt, Artificial Sequence
  Description of Artificial Sequence: Synthetic oligonucleotide
agauucuauuuaguguuaa

SEQ ID NO: 294286 - RNA, 19 nt, Artificial Sequence
  Description of Artificial Sequence: Synthetic oligonucleotide
ugggacgaaaagguugcac

SEQ ID NO: 294287 - RNA, 19 nt, Artificial Sequence
  Description of Artificial Sequence: Synthetic oligonucleotide
ugucucgguccaucugaag

SEQ ID NO: 294288 - RNA, 19 nt, Artificial Sequence
  Description of Artificial Sequence: Synthetic oligonucleotide
guucuaaccucaugauuaa

SEQ ID NO: 294289 - RNA, 19 nt, Artificial Sequence
  Description of Artificial Sequence: Synthetic oligonucleotide
gcacgaaagcgccaauucc

SEQ ID NO: 294290 - RNA, 19 nt, Artificial Sequence
  Description of Artificial Sequence: Synthetic oligonucleotide
cagccaaggagccgggcag

SEQ ID NO: 294291 - RNA, 19 nt, Artificial Sequence
  Description of Artificial Sequence: Synthetic oligonucleotide
uugccgaccagaccaucuc

SEQ ID NO: 294292 - RNA, 19 nt, Artificial Sequence
  Description of Artificial Sequence: Synthetic oligonucleotide
gacgaaaagguugcaccuc

SEQ ID NO: 294293 - RNA, 19 nt, Artificial Sequence
  Description of Artificial Sequence: Synthetic oligonucleotide
gaacgagauggcaggagga

SEQ ID NO: 294294 - RNA, 19 nt, Artificial Sequence
  Description of Artificial Sequence: Synthetic oligonucleotide
ucugugcucgagagggguc

SEQ ID NO: 294295 - RNA, 19 nt, Artificial Sequence
  Description of Artificial Sequence: Synthetic oligonucleotide
cacgaaagcgccaauuccu

SEQ ID NO: 294296 - RNA, 19 nt, Artificial Sequence
  Description of Artificial Sequence: Synthetic oligonucleotide
gucacgggucugugcagcg

SEQ ID NO: 294297 - RNA, 19 nt, Artificial Sequence
  Description of Artificial Sequence: Synthetic oligonucleotide
caauaggacgcagguaauc

SEQ ID NO: 294298 - RNA, 19 nt, Artificial Sequence
  Description of Artificial Sequence: Synthetic oligonucleotide
acacaaagacgaacgcuug

SEQ ID NO: 294299 - RNA, 19 nt, Artificial Sequence
  Description of Artificial Sequence: Synthetic oligonucleotide
acgcccggcagacuguaug

SEQ ID NO: 294300 - RNA, 19 nt, Artificial Sequence
  Description of Artificial Sequence: Synthetic oligonucleotide
ugcuugcgaaguacuugac

SEQ ID NO: 294301 - RNA, 19 nt, Artificial Sequence
  Description of Artificial Sequence: Synthetic oligonucleotide
caaccucugaccggauugc

SEQ ID NO: 294302 - RNA, 19 nt, Artificial Sequence
  Description of Artificial Sequence: Synthetic oligonucleotide
ggguucaguacgucgagga

SEQ ID NO: 294303 - RNA, 19 nt, Artificial Sequence
  Description of Artificial Sequence: Synthetic oligonucleotide
ccaaccucugaccggauug

SEQ ID NO: 294304 - RNA, 19 nt, Artificial Sequence
  Description of Artificial Sequence: Synthetic oligonucleotide
auccaacggacugaagaga

SEQ ID NO: 294305 - RNA, 19 nt, Artificial Sequence
  Description of Artificial Sequence: Synthetic oligonucleotide
caccuucaucgacacagug

SEQ ID NO: 294306 - RNA, 19 nt, Artificial Sequence
  Description of Artificial Sequence: Synthetic oligonucleotide
gguggaagcgcgaagugca

SEQ ID NO: 294307 - RNA, 19 nt, Artificial Sequence
  Description of Artificial Sequence: Synthetic oligonucleotide
gaacgcuugccgaccagac

SEQ ID NO: 294308 - RNA, 19 nt, Artificial Sequence
  Description of Artificial Sequence: Synthetic oligonucleotide
gaacaccuauccugacuuc

SEQ ID NO: 294309 - RNA, 19 nt, Artificial Sequence
  Description of Artificial Sequence: Synthetic oligonucleotide
ucagggcuuaagccaucac

SEQ ID NO: 294310 - RNA, 19 nt, Artificial Sequence
  Description of Artificial Sequence: Synthetic oligonucleotide
agucaaggccacgcccggc

SEQ ID NO: 294311 - RNA, 19 nt, Artificial Sequence
  Description of Artificial Sequence: Synthetic oligonucleotide
acaccacgcuuccggguuc

SEQ ID NO: 294312 - RNA, 19 nt, Artificial Sequence
  Description of Artificial Sequence: Synthetic oligonucleotide
ccggauugcagacuugcag

SEQ ID NO: 294313 - RNA, 19 nt, Artificial Sequence
  Description of Artificial Sequence: Synthetic oligonucleotide
ugaccggauugcagacuug

SEQ ID NO: 294314 - RNA, 19 nt, Artificial Sequence
  Description of Artificial Sequence: Synthetic oligonucleotide
cuaacggcccaggagcauc

SEQ ID NO: 294315 - RNA, 19 nt, Artificial Sequence
  Description of Artificial Sequence: Synthetic oligonucleotide
cugccgaaauucuccacca

SEQ ID NO: 294316 - RNA, 19 nt, Artificial Sequence
  Description of Artificial Sequence: Synthetic oligonucleotide
ugugcucgagaggggucgg

SEQ ID NO: 294317 - RNA, 19 nt, Artificial Sequence
  Description of Artificial Sequence: Synthetic oligonucleotide
  modified_base (13)..(13): a, c, u, g, unknown or other
cugaucuaaaggnguggaa

SEQ ID NO: 294318 - RNA, 19 nt, Artificial Sequence
  Description of Artificial Sequence: Synthetic oligonucleotide
ugugcagcgugggacgaaa

SEQ ID NO: 294319 - RNA, 19 nt, Artificial Sequence
  Description of Artificial Sequence: Synthetic oligonucleotide
ucugaccggauugcagacu

SEQ ID NO: 294320 - RNA, 19 nt, Artificial Sequence
  Description of Artificial Sequence: Synthetic oligonucleotide
uggucacgggucugugcag

SEQ ID NO: 294321 - RNA, 19 nt, Artificial Sequence
  Description of Artificial Sequence: Synthetic oligonucleotide
agguccuauuaauuuuauu

SEQ ID NO: 294322 - RNA, 19 nt, Artificial Sequence
  Description of Artificial Sequence: Synthetic oligonucleotide
aaccucugaccggauugca

SEQ ID NO: 294323 - RNA, 19 nt, Artificial Sequence
  Description of Artificial Sequence: Synthetic oligonucleotide
agggucucguacgucucuc

SEQ ID NO: 294324 - RNA, 19 nt, Artificial Sequence
  Description of Artificial Sequence: Synthetic oligonucleotide
gguugcaccucagagcuga

SEQ ID NO: 294325 - RNA, 19 nt, Artificial Sequence
  Description of Artificial Sequence: Synthetic oligonucleotide
cugacacaauauuugugcu

SEQ ID NO: 294326 - RNA, 19 nt, Artificial Sequence
  Description of Artificial Sequence: Synthetic oligonucleotide
aggacgcagguaaucauaa

SEQ ID NO: 294327 - RNA, 19 nt, Artificial Sequence
  Description of Artificial Sequence: Synthetic oligonucleotide
gacgaacgcuugccgacca

SEQ ID NO: 294328 - RNA, 19 nt, Artificial Sequence
  Description of Artificial Sequence: Synthetic oligonucleotide
guagcucacuccgaugcuc

SEQ ID NO: 294329 - RNA, 19 nt, Artificial Sequence
  Description of Artificial Sequence: Synthetic oligonucleotide
uacgucgaggaagccguac

SEQ ID NO: 294330 - RNA, 19 nt, Artificial Sequence
  Description of Artificial Sequence: Synthetic oligonucleotide
aguaacgcuuguggaacaa

SEQ ID NO: 294331 - RNA, 19 nt, Artificial Sequence
  Description of Artificial Sequence: Synthetic oligonucleotide
gcugcaauaggggucaaaa

SEQ ID NO: 294332 - RNA, 19 nt, Artificial Sequence
  Description of Artificial Sequence: Synthetic oligonucleotide
gaagcgcgaagugcagcug

SEQ ID NO: 294333 - RNA, 19 nt, Artificial Sequence
  Description of Artificial Sequence: Synthetic oligonucleotide
gacuaacggcccaggagca

SEQ ID NO: 294334 - RNA, 19 nt, Artificial Sequence
  Description of Artificial Sequence: Synthetic oligonucleotide
gucgaggaagccguacuca

SEQ ID NO: 294335 - RNA, 19 nt, Artificial Sequence
  Description of Artificial Sequence: Synthetic oligonucleotide
agcgcgaagugcagcugac

SEQ ID NO: 294336 - RNA, 19 nt, Artificial Sequence
  Description of Artificial Sequence: Synthetic oligonucleotide
cagggcuuaagccaucacu

SEQ ID NO: 294337 - RNA, 19 nt, Artificial Sequence
  Description of Artificial Sequence: Synthetic oligonucleotide
caacggacugaagagaccu

SEQ ID NO: 294338 - RNA, 19 nt, Artificial Sequence
  Description of Artificial Sequence: Synthetic oligonucleotide
cagcgcugacuaacggccc

SEQ ID NO: 294339 - RNA, 19 nt, Artificial Sequence
  Description of Artificial Sequence: Synthetic oligonucleotide
acgaacgcuugccgaccag

SEQ ID NO: 294340 - RNA, 19 nt, Artificial Sequence
  Description of Artificial Sequence: Synthetic oligonucleotide
guggaacaacguccuguac

SEQ ID NO: 294341 - RNA, 19 nt, Artificial Sequence
  Description of Artificial Sequence: Synthetic oligonucleotide
ucagcacgaaagcgccaau

SEQ ID NO: 294342 - RNA, 19 nt, Artificial Sequence
  Description of Artificial Sequence: Synthetic oligonucleotide
gcagucgucuucaaugaca

SEQ ID NO: 294343 - RNA, 19 nt, Artificial Sequence
  Description of Artificial Sequence: Synthetic oligonucleotide
gauugcagacuugcaguua

SEQ ID NO: 294344 - RNA, 19 nt, Artificial Sequence
  Description of Artificial Sequence: Synthetic oligonucleotide
uuaaggcugcaggccccag

SEQ ID NO: 294345 - RNA, 19 nt, Artificial Sequence
  Description of Artificial Sequence: Synthetic oligonucleotide
ggacgaaaagguugcaccu

SEQ ID NO: 294346 - RNA, 19 nt, Artificial Sequence
  Description of Artificial Sequence: Synthetic oligonucleotide
  modified_base (14)..(14): a, c, u, g, unknown or other
ccugaucuaaaggngugga

SEQ ID NO: 294347 - RNA, 19 nt, Artificial Sequence
  Description of Artificial Sequence: Synthetic oligonucleotide
ggaacaacguccuguacuu

SEQ ID NO: 294348 - RNA, 19 nt, Artificial Sequence
  Description of Artificial Sequence: Synthetic oligonucleotide
acugaccaacuuguaggaa

SEQ ID NO: 294349 - RNA, 19 nt, Artificial Sequence
  Description of Artificial Sequence: Synthetic oligonucleotide
  modified_base (3)..(3): a, c, u, g, unknown or other
ggnguggaaucuggggagc

SEQ ID NO: 294350 - RNA, 19 nt, Artificial Sequence
  Description of Artificial Sequence: Synthetic oligonucleotide
acgccagggucucguacgu

SEQ ID NO: 294351 - RNA, 19 nt, Artificial Sequence
  Description of Artificial Sequence: Synthetic oligonucleotide
ggguggaagcgcgaagugc

SEQ ID NO: 294352 - RNA, 19 nt, Artificial Sequence
  Description of Artificial Sequence: Synthetic oligonucleotide
ccuggaguugauaaaggua

SEQ ID NO: 294353 - RNA, 19 nt, Artificial Sequence
  Description of Artificial Sequence: Synthetic oligonucleotide
cuugccgaccagaccaucu

SEQ ID NO: 294354 - RNA, 19 nt, Artificial Sequence
  Description of Artificial Sequence: Synthetic oligonucleotide
gggucggucauugacaggu

SEQ ID NO: 294355 - RNA, 19 nt, Artificial Sequence
  Description of Artificial Sequence: Synthetic oligonucleotide
gccgaccagaccaucucgg

SEQ ID NO: 294356 - RNA, 19 nt, Artificial Sequence
  Description of Artificial Sequence: Synthetic oligonucleotide
gggaacgagauggcaggag

SEQ ID NO: 294357 - RNA, 19 nt, Artificial Sequence
  Description of Artificial Sequence: Synthetic oligonucleotide
cugacauuuggaacccuau

SEQ ID NO: 294358 - RNA, 19 nt, Artificial Sequence
  Description of Artificial Sequence: Synthetic oligonucleotide
acgaaagcgccaauuccua

SEQ ID NO: 294359 - RNA, 19 nt, Artificial Sequence
  Description of Artificial Sequence: Synthetic oligonucleotide
ggaagcgcgaagugcagcu

SEQ ID NO: 294360 - RNA, 19 nt, Artificial Sequence
  Description of Artificial Sequence: Synthetic oligonucleotide
ggucucguacgucucucuc

SEQ ID NO: 294361 - RNA, 19 nt, Artificial Sequence
  Description of Artificial Sequence: Synthetic oligonucleotide
aggaaugcuuaggcuaaua

SEQ ID NO: 294362 - RNA, 19 nt, Artificial Sequence
  Description of Artificial Sequence: Synthetic oligonucleotide
ggucacgggucugugcagc

SEQ ID NO: 294363 - RNA, 19 nt, Artificial Sequence
  Description of Artificial Sequence: Synthetic oligonucleotide
ucacgggucugugcagcgu

SEQ ID NO: 294364 - RNA, 19 nt, Artificial Sequence
  Description of Artificial Sequence: Synthetic oligonucleotide
ugcugcaauaggggucaaa

SEQ ID NO: 294365 - RNA, 19 nt, Artificial Sequence
  Description of Artificial Sequence: Synthetic oligonucleotide
aacggacugaagagaccuu

SEQ ID NO: 294366 - RNA, 19 nt, Artificial Sequence
  Description of Artificial Sequence: Synthetic oligonucleotide
gaggucuacuccaaauguu

SEQ ID NO: 294367 - RNA, 19 nt, Artificial Sequence
  Description of Artificial Sequence: Synthetic oligonucleotide
gcugaccaugaucaaguua

SEQ ID NO: 294368 - RNA, 19 nt, Artificial Sequence
  Description of Artificial Sequence: Synthetic oligonucleotide
gcugacuaacggcccagga

SEQ ID NO: 294369 - RNA, 19 nt, Artificial Sequence
  Description of Artificial Sequence: Synthetic oligonucleotide
guccuguacuuucgaucuc

SEQ ID NO: 294370 - RNA, 19 nt, Artificial Sequence
  Description of Artificial Sequence: Synthetic oligonucleotide
accggauugcagacuugca

SEQ ID NO: 294371 - RNA, 19 nt, Artificial Sequence
  Description of Artificial Sequence: Synthetic oligonucleotide
acuaacggcccaggagcau

SEQ ID NO: 294372 - RNA, 19 nt, Artificial Sequence
  Description of Artificial Sequence: Synthetic oligonucleotide
  modified_base (2)..(2): a, c, u, g, unknown or other
gnguggaaucuggggagcu

SEQ ID NO: 294373 - RNA, 19 nt, Artificial Sequence
  Description of Artificial Sequence: Synthetic oligonucleotide
cccggcagacuguaugcac

SEQ ID NO: 294374 - RNA, 19 nt, Artificial Sequence
  Description of Artificial Sequence: Synthetic oligonucleotide
aucaagcccuuaggagaga

SEQ ID NO: 294375 - RNA, 19 nt, Artificial Sequence
  Description of Artificial Sequence: Synthetic oligonucleotide
cgcuuccggguucaguacg

SEQ ID NO: 294376 - RNA, 19 nt, Artificial Sequence
  Description of Artificial Sequence: Synthetic oligonucleotide
cguacgucucucucaagca

SEQ ID NO: 294377 - RNA, 19 nt, Artificial Sequence
  Description of Artificial Sequence: Synthetic oligonucleotide
guagagucuggcgcagugu

SEQ ID NO: 294378 - RNA, 19 nt, Artificial Sequence
  Description of Artificial Sequence: Synthetic oligonucleotide
cgaaagcgccaauuccuac

SEQ ID NO: 294379 - RNA, 19 nt, Artificial Sequence
  Description of Artificial Sequence: Synthetic oligonucleotide
ggauugcagacuugcaguu

SEQ ID NO: 294380 - RNA, 19 nt, Artificial Sequence
  Description of Artificial Sequence: Synthetic oligonucleotide
agcgugggacgaaaagguu

SEQ ID NO: 294381 - RNA, 19 nt, Artificial Sequence
  Description of Artificial Sequence: Synthetic oligonucleotide
agagucuggcgcaguguuu

SEQ ID NO: 294382 - RNA, 19 nt, Artificial Sequence
  Description of Artificial Sequence: Synthetic oligonucleotide
ggcgaucacgucugcaccu

SEQ ID NO: 294383 - RNA, 19 nt, Artificial Sequence
  Description of Artificial Sequence: Synthetic oligonucleotide
ccggguucaguacgucgag

SEQ ID NO: 294384 - RNA, 19 nt, Artificial Sequence
  Description of Artificial Sequence: Synthetic oligonucleotide
ugccaaccucugaccggau

SEQ ID NO: 294385 - RNA, 19 nt, Artificial Sequence
  Description of Artificial Sequence: Synthetic oligonucleotide
cgcccggcagacuguaugc

SEQ ID NO: 294386 - RNA, 19 nt, Artificial Sequence
  Description of Artificial Sequence: Synthetic oligonucleotide
agguugcaccucagagcug

SEQ ID NO: 294387 - RNA, 19 nt, Artificial Sequence
  Description of Artificial Sequence: Synthetic oligonucleotide
aacggcccaggagcaucuu

SEQ ID NO: 294388 - RNA, 19 nt, Artificial Sequence
  Description of Artificial Sequence: Synthetic oligonucleotide
gcccaagggaaaccgcucu

SEQ ID NO: 294389 - RNA, 19 nt, Artificial Sequence
  Description of Artificial Sequence: Synthetic oligonucleotide
gcgcugacuaacggcccag

SEQ ID NO: 294390 - RNA, 19 nt, Artificial Sequence
  Description of Artificial Sequence: Synthetic oligonucleotide
cuguacuuucgaucuccuu

SEQ ID NO: 294391 - RNA, 19 nt, Artificial Sequence
  Description of Artificial Sequence: Synthetic oligonucleotide
gaacaacguccuguacuuu

SEQ ID NO: 294392 - RNA, 19 nt, Artificial Sequence
  Description of Artificial Sequence: Synthetic oligonucleotide
ccgaccagaccaucucgga

SEQ ID NO: 294393 - RNA, 19 nt, Artificial Sequence
  Description of Artificial Sequence: Synthetic oligonucleotide
ggaggcagucgucuucaau

SEQ ID NO: 294394 - RNA, 19 nt, Artificial Sequence
  Description of Artificial Sequence: Synthetic oligonucleotide
gcuuuaacgucugggucau

SEQ ID NO: 294395 - RNA, 19 nt, Artificial Sequence
  Description of Artificial Sequence: Synthetic oligonucleotide
cggguucaguacgucgagg

SEQ ID NO: 294396 - RNA, 19 nt, Artificial Sequence
  Description of Artificial Sequence: Synthetic oligonucleotide
cacugacacccaggucauc

SEQ ID NO: 294397 - RNA, 19 nt, Artificial Sequence
  Description of Artificial Sequence: Synthetic oligonucleotide
gggucucguacgucucucu

SEQ ID NO: 294398 - RNA, 19 nt, Artificial Sequence
  Description of Artificial Sequence: Synthetic oligonucleotide
ccguacucauugcgucuuc

SEQ ID NO: 294399 - RNA, 19 nt, Artificial Sequence
  Description of Artificial Sequence: Synthetic oligonucleotide
cagcacgaaagcgccaauu

SEQ ID NO: 294400 - RNA, 19 nt, Artificial Sequence
  Description of Artificial Sequence: Synthetic oligonucleotide
gugcagcgugggacgaaaa

SEQ ID NO: 294401 - RNA, 19 nt, Artificial Sequence
  Description of Artificial Sequence: Synthetic oligonucleotide
guacugggaguaggccacu

SEQ ID NO: 294402 - RNA, 19 nt, Artificial Sequence
  Description of Artificial Sequence: Synthetic oligonucleotide
gcaauaggacgcagguaau

SEQ ID NO: 294403 - RNA, 19 nt, Artificial Sequence
  Description of Artificial Sequence: Synthetic oligonucleotide
gcuugccgaccagaccauc

SEQ ID NO: 294404 - RNA, 19 nt, Artificial Sequence
  Description of Artificial Sequence: Synthetic oligonucleotide
cugugcagcgugggacgaa

SEQ ID NO: 294405 - RNA, 19 nt, Artificial Sequence
  Description of Artificial Sequence: Synthetic oligonucleotide
ggagaaugcuaaaguucuu

SEQ ID NO: 294406 - RNA, 19 nt, Artificial Sequence
  Description of Artificial Sequence: Synthetic oligonucleotide
guacgucgaggaagccgua

SEQ ID NO: 294407 - RNA, 19 nt, Artificial Sequence
  Description of Artificial Sequence: Synthetic oligonucleotide
gcccggcagacuguaugca

SEQ ID NO: 294408 - RNA, 19 nt, Artificial Sequence
  Description of Artificial Sequence: Synthetic oligonucleotide
cgaacgcuugccgaccaga

SEQ ID NO: 294409 - RNA, 19 nt, Artificial Sequence
  Description of Artificial Sequence: Synthetic oligonucleotide
gcgcgaagugcagcugaca

SEQ ID NO: 294410 - RNA, 19 nt, Artificial Sequence
  Description of Artificial Sequence: Synthetic oligonucleotide
gcucacuccgaugcucuau

SEQ ID NO: 294411 - RNA, 19 nt, Artificial Sequence
  Description of Artificial Sequence: Synthetic oligonucleotide
aggccacgcccggcagacu

SEQ ID NO: 294412 - RNA, 19 nt, Artificial Sequence
  Description of Artificial Sequence: Synthetic oligonucleotide
gccguacucauugcgucuu

SEQ ID NO: 294413 - RNA, 19 nt, Artificial Sequence
  Description of Artificial Sequence: Synthetic oligonucleotide
ccgggugcaucuccugugu

SEQ ID NO: 294414 - RNA, 19 nt, Artificial Sequence
  Description of Artificial Sequence: Synthetic oligonucleotide
gugcucgagaggggucggu

SEQ ID NO: 294415 - RNA, 19 nt, Artificial Sequence
  Description of Artificial Sequence: Synthetic oligonucleotide
cccuaucauuugccaaggu

SEQ ID NO: 294416 - RNA, 19 nt, Artificial Sequence
  Description of Artificial Sequence: Synthetic oligonucleotide
cacgcccggcagacuguau

SEQ ID NO: 294417 - RNA, 19 nt, Artificial Sequence
  Description of Artificial Sequence: Synthetic oligonucleotide
ccggguagccauggugaua

SEQ ID NO: 294418 - RNA, 19 nt, Artificial Sequence
  Description of Artificial Sequence: Synthetic oligonucleotide
aaugauacgagcugaguuc

SEQ ID NO: 294419 - RNA, 19 nt, Artificial Sequence
  Description of Artificial Sequence: Synthetic oligonucleotide
aaaacagccauacgaauga

SEQ ID NO: 294420 - RNA, 19 nt, Artificial Sequence
  Description of Artificial Sequence: Synthetic oligonucleotide
aaagcacuccuuucgggcc

SEQ ID NO: 294421 - RNA, 19 nt, Artificial Sequence
  Description of Artificial Sequence: Synthetic oligonucleotide
aauggcuaacgccucugcc

SEQ ID NO: 294422 - RNA, 19 nt, Artificial Sequence
  Description of Artificial Sequence: Synthetic oligonucleotide
agagccuucuccuucaauc

SEQ ID NO: 294423 - RNA, 19 nt, Artificial Sequence
  Description of Artificial Sequence: Synthetic oligonucleotide
aguaaagaaaucaggcccc

SEQ ID NO: 294424 - RNA, 19 nt, Artificial Sequence
  Description of Artificial Sequence: Synthetic oligonucleotide
ucuuauggaaaucaucaaa

SEQ ID NO: 294425 - RNA, 19 nt, Artificial Sequence
  Description of Artificial Sequence: Synthetic oligonucleotide
aacgccucugccuugagcu

SEQ ID NO: 294426 - RNA, 19 nt, Artificial Sequence
  Description of Artificial Sequence: Synthetic oligonucleotide
aaccauuccuccccagugc

SEQ ID NO: 294427 - RNA, 19 nt, Artificial Sequence
  Description of Artificial Sequence: Synthetic oligonucleotide
caucaguaaagaaaucagg

SEQ ID NO: 294428 - RNA, 19 nt, Artificial Sequence
  Description of Artificial Sequence: Synthetic oligonucleotide
uuugccacuaugcaguagu

SEQ ID NO: 294429 - RNA, 19 nt, Artificial Sequence
  Description of Artificial Sequence: Synthetic oligonucleotide
caaagugccaguuguaggc

SEQ ID NO: 294430 - RNA, 19 nt, Artificial Sequence
  Description of Artificial Sequence: Synthetic oligonucleotide
acaaauacgaacccucuca

SEQ ID NO: 294431 - RNA, 19 nt, Artificial Sequence
  Description of Artificial Sequence: Synthetic oligonucleotide
gacaacacgcuuuuguccc

SEQ ID NO: 294432 - RNA, 19 nt, Artificial Sequence
  Description of Artificial Sequence: Synthetic oligonucleotide
gaugacuguggccugaaug

SEQ ID NO: 294433 - RNA, 19 nt, Artificial Sequence
  Description of Artificial Sequence: Synthetic oligonucleotide
auugggucaaggaugacac

SEQ ID NO: 294434 - RNA, 19 nt, Artificial Sequence
  Description of Artificial Sequence: Synthetic oligonucleotide
acuacccgggucuuguucc

SEQ ID NO: 294435 - RNA, 19 nt, Artificial Sequence
  Description of Artificial Sequence: Synthetic oligonucleotide
acgagcugaguucuuaugg

SEQ ID NO: 294436 - RNA, 19 nt, Artificial Sequence
  Description of Artificial Sequence: Synthetic oligonucleotide
agaagugugccaucaggac

SEQ ID NO: 294437 - RNA, 19 nt, Artificial Sequence
  Description of Artificial Sequence: Synthetic oligonucleotide
ucaggcacggagaaaagcu

SEQ ID NO: 294438 - RNA, 19 nt, Artificial Sequence
  Description of Artificial Sequence: Synthetic oligonucleotide
uguaagaaucacagcgucc

SEQ ID NO: 294439 - RNA, 19 nt, Artificial Sequence
  Description of Artificial Sequence: Synthetic oligonucleotide
acgcuuuugucccagcugg

SEQ ID NO: 294440 - RNA, 19 nt, Artificial Sequence
  Description of Artificial Sequence: Synthetic oligonucleotide
ugagaguggacuucaggcc

SEQ ID NO: 294441 - RNA, 19 nt, Artificial Sequence
  Description of Artificial Sequence: Synthetic oligonucleotide
guuguaggcaaguugcagc

SEQ ID NO: 294442 - RNA, 19 nt, Artificial Sequence
  Description of Artificial Sequence: Synthetic oligonucleotide
cuugcaugcaucacccacg

SEQ ID NO: 294443 - RNA, 19 nt, Artificial Sequence
  Description of Artificial Sequence: Synthetic oligonucleotide
ucaaagcacuccuuucggg

SEQ ID NO: 294444 - RNA, 19 nt, Artificial Sequence
  Description of Artificial Sequence: Synthetic oligonucleotide
acggcgagcauguggacgc

SEQ ID NO: 294445 - RNA, 19 nt, Artificial Sequence
  Description of Artificial Sequence: Synthetic oligonucleotide
ugacaacacgcuuuugucc

SEQ ID NO: 294446 - RNA, 19 nt, Artificial Sequence
  Description of Artificial Sequence: Synthetic oligonucleotide
augcaauggccuugcaugc

SEQ ID NO: 294447 - RNA, 19 nt, Artificial Sequence
  Description of Artificial Sequence: Synthetic oligonucleotide
ugacacaguaaugucgagg

SEQ ID NO: 294448 - RNA, 19 nt, Artificial Sequence
  Description of Artificial Sequence: Synthetic oligonucleotide
auccccucgccacugaucg

SEQ ID NO: 294449 - RNA, 19 nt, Artificial Sequence
  Description of Artificial Sequence: Synthetic oligonucleotide
caaagcacuccuuucgggc

SEQ ID NO: 294450 - RNA, 19 nt, Artificial Sequence
  Description of Artificial Sequence: Synthetic oligonucleotide
gugacacuagcucagggcc

SEQ ID NO: 294451 - RNA, 19 nt, Artificial Sequence
  Description of Artificial Sequence: Synthetic oligonucleotide
acggagaaaagcuucgcug

SEQ ID NO: 294452 - RNA, 19 nt, Artificial Sequence
  Description of Artificial Sequence: Synthetic oligonucleotide
auacgaaugauacgagcug

SEQ ID NO: 294453 - RNA, 19 nt, Artificial Sequence
  Description of Artificial Sequence: Synthetic oligonucleotide
ucucguacuuucuuuacuc

SEQ ID NO: 294454 - RNA, 19 nt, Artificial Sequence
  Description of Artificial Sequence: Synthetic oligonucleotide
agaagcuacagccccucgg

SEQ ID NO: 294455 - RNA, 19 nt, Artificial Sequence
  Description of Artificial Sequence: Synthetic oligonucleotide
acaggguuugccacuaugc

SEQ ID NO: 294456 - RNA, 19 nt, Artificial Sequence
  Description of Artificial Sequence: Synthetic oligonucleotide
uuacuuuugugccgguggc

SEQ ID NO: 294457 - RNA, 19 nt, Artificial Sequence
  Description of Artificial Sequence: Synthetic oligonucleotide
ugauggguaccacacccag

SEQ ID NO: 294458 - RNA, 19 nt, Artificial Sequence
  Description of Artificial Sequence: Synthetic oligonucleotide
acugaucgugucuccauuc

SEQ ID NO: 294459 - RNA, 19 nt, Artificial Sequence
  Description of Artificial Sequence: Synthetic oligonucleotide
cauguggacgcuugggccg

SEQ ID NO: 294460 - RNA, 19 nt, Artificial Sequence
  Description of Artificial Sequence: Synthetic oligonucleotide
uuguaggcaaguugcagcu

SEQ ID NO: 294461 - RNA, 19 nt, Artificial Sequence
  Description of Artificial Sequence: Synthetic oligonucleotide
aaugucgaggucccagagu

SEQ ID NO: 294462 - RNA, 19 nt, Artificial Sequence
  Description of Artificial Sequence: Synthetic oligonucleotide
cauacaccugaacugcugc

SEQ ID NO: 294463 - RNA, 19 nt, Artificial Sequence
  Description of Artificial Sequence: Synthetic oligonucleotide
acaguaaugucgagguccc

SEQ ID NO: 294464 - RNA, 19 nt, Artificial Sequence
  Description of Artificial Sequence: Synthetic oligonucleotide
aguaaugucgaggucccag

SEQ ID NO: 294465 - RNA, 19 nt, Artificial Sequence
  Description of Artificial Sequence: Synthetic oligonucleotide
uguagucauacaccugaac

SEQ ID NO: 294466 - RNA, 19 nt, Artificial Sequence
  Description of Artificial Sequence: Synthetic oligonucleotide
uaugcaguaguggcguggg

SEQ ID NO: 294467 - RNA, 19 nt, Artificial Sequence
  Description of Artificial Sequence: Synthetic oligonucleotide
cucguacuuucuuuacucg

SEQ ID NO: 294468 - RNA, 19 nt, Artificial Sequence
  Description of Artificial Sequence: Synthetic oligonucleotide
ucaugccccaaguucagca

SEQ ID NO: 294469 - RNA, 19 nt, Artificial Sequence
  Description of Artificial Sequence: Synthetic oligonucleotide
agaaaucaggccccagcag

SEQ ID NO: 294470 - RNA, 19 nt, Artificial Sequence
  Description of Artificial Sequence: Synthetic oligonucleotide
cuucgcugucucuucaggg

SEQ ID NO: 294471 - RNA, 19 nt, Artificial Sequence
  Description of Artificial Sequence: Synthetic oligonucleotide
acuuccccuggguacaggg

SEQ ID NO: 294472 - RNA, 19 nt, Artificial Sequence
  Description of Artificial Sequence: Synthetic oligonucleotide
auuccgguucuucagcuca

SEQ ID NO: 294473 - RNA, 19 nt, Artificial Sequence
  Description of Artificial Sequence: Synthetic oligonucleotide
augccccaaguucagcagc

SEQ ID NO: 294474 - RNA, 19 nt, Artificial Sequence
  Description of Artificial Sequence: Synthetic oligonucleotide
uggccuugcaugcaucacc

SEQ ID NO: 294475 - RNA, 19 nt, Artificial Sequence
  Description of Artificial Sequence: Synthetic oligonucleotide
uacgaaugauacgagcuga

SEQ ID NO: 294476 - RNA, 19 nt, Artificial Sequence
  Description of Artificial Sequence: Synthetic oligonucleotide
auggcuaacgccucugccu

SEQ ID NO: 294477 - RNA, 19 nt, Artificial Sequence
  Description of Artificial Sequence: Synthetic oligonucleotide
augucgaagccgaacuugc

SEQ ID NO: 294478 - RNA, 19 nt, Artificial Sequence
  Description of Artificial Sequence: Synthetic oligonucleotide
uuugcagauggaacauacu

SEQ ID NO: 294479 - RNA, 19 nt, Artificial Sequence
  Description of Artificial Sequence: Synthetic oligonucleotide
aggacauauacauccugga

SEQ ID NO: 294480 - RNA, 19 nt, Artificial Sequence
  Description of Artificial Sequence: Synthetic oligonucleotide
agcacccacggaucggacc

SEQ ID NO: 294481 - RNA, 19 nt, Artificial Sequence
  Description of Artificial Sequence: Synthetic oligonucleotide
uggcacaugggcuucugug

SEQ ID NO: 294482 - RNA, 19 nt, Artificial Sequence
  Description of Artificial Sequence: Synthetic oligonucleotide
aauccgugcggccucugca

SEQ ID NO: 294483 - RNA, 19 nt, Artificial Sequence
  Description of Artificial Sequence: Synthetic oligonucleotide
uccgucucaauggcuaacg

SEQ ID NO: 294484 - RNA, 19 nt, Artificial Sequence
  Description of Artificial Sequence: Synthetic oligonucleotide
ucguacuuucuuuacucgu

SEQ ID NO: 294485 - RNA, 19 nt, Artificial Sequence
  Description of Artificial Sequence: Synthetic oligonucleotide
ggaacugucaccaugcgca

SEQ ID NO: 294486 - RNA, 19 nt, Artificial Sequence
  Description of Artificial Sequence: Synthetic oligonucleotide
ucgaagccgaacuugcccu

SEQ ID NO: 294487 - RNA, 19 nt, Artificial Sequence
  Description of Artificial Sequence: Synthetic oligonucleotide
ugaagggcgucccgggucc

SEQ ID NO: 294488 - RNA, 19 nt, Artificial Sequence
  Description of Artificial Sequence: Synthetic oligonucleotide
ucuucgaacacagccggga

SEQ ID NO: 294489 - RNA, 19 nt, Artificial Sequence
  Description of Artificial Sequence: Synthetic oligonucleotide
cauacgaaugauacgagcu

SEQ ID NO: 294490 - RNA, 19 nt, Artificial Sequence
  Description of Artificial Sequence: Synthetic oligonucleotide
uucgcugucucuucagggu

SEQ ID NO: 294491 - RNA, 19 nt, Artificial Sequence
  Description of Artificial Sequence: Synthetic oligonucleotide
uggggacaaauacgaaccc

SEQ ID NO: 294492 - RNA, 19 nt, Artificial Sequence
  Description of Artificial Sequence: Synthetic oligonucleotide
gucgaagccgaacuugccc

SEQ ID NO: 294493 - RNA, 19 nt, Artificial Sequence
  Description of Artificial Sequence: Synthetic oligonucleotide
cauagccucaagcuccaag

SEQ ID NO: 294494 - RNA, 19 nt, Artificial Sequence
  Description of Artificial Sequence: Synthetic oligonucleotide
aaauacgaacccucucauu

SEQ ID NO: 294495 - RNA, 19 nt, Artificial Sequence
  Description of Artificial Sequence: Synthetic oligonucleotide
ugccacuaugcaguagugg

SEQ ID NO: 294496 - RNA, 19 nt, Artificial Sequence
  Description of Artificial Sequence: Synthetic oligonucleotide
gguaagcacccacggaucg

SEQ ID NO: 294497 - RNA, 19 nt, Artificial Sequence
  Description of Artificial Sequence: Synthetic oligonucleotide
cuuuugucccagcugguuc

SEQ ID NO: 294498 - RNA, 19 nt, Artificial Sequence
  Description of Artificial Sequence: Synthetic oligonucleotide
aggacccaaagccucuguc

SEQ ID NO: 294499 - RNA, 19 nt, Artificial Sequence
  Description of Artificial Sequence: Synthetic oligonucleotide
ucauuccgguucuucagcu

SEQ ID NO: 294500 - RNA, 19 nt, Artificial Sequence
  Description of Artificial Sequence: Synthetic oligonucleotide
cuuggcucuguagucauac

SEQ ID NO: 294501 - RNA, 19 nt, Artificial Sequence
  Description of Artificial Sequence: Synthetic oligonucleotide
cuagcaaggccuugagaug

SEQ ID NO: 294502 - RNA, 19 nt, Artificial Sequence
  Description of Artificial Sequence: Synthetic oligonucleotide
caaaggcuguguugaagag

SEQ ID NO: 294503 - RNA, 19 nt, Artificial Sequence
  Description of Artificial Sequence: Synthetic oligonucleotide
cacguggggacaaauacga

SEQ ID NO: 294504 - RNA, 19 nt, Artificial Sequence
  Description of Artificial Sequence: Synthetic oligonucleotide
gaaugauacgagcugaguu

SEQ ID NO: 294505 - RNA, 19 nt, Artificial Sequence
  Description of Artificial Sequence: Synthetic oligonucleotide
aguucugccgagcccggag

SEQ ID NO: 294506 - RNA, 19 nt, Artificial Sequence
  Description of Artificial Sequence: Synthetic oligonucleotide
agagggauggccugacgcu

SEQ ID NO: 294507 - RNA, 19 nt, Artificial Sequence
  Description of Artificial Sequence: Synthetic oligonucleotide
aaagugccaguuguaggca

SEQ ID NO: 294508 - RNA, 19 nt, Artificial Sequence
  Description of Artificial Sequence: Synthetic oligonucleotide
cucaagcuccaagaguucc

SEQ ID NO: 294509 - RNA, 19 nt, Artificial Sequence
  Description of Artificial Sequence: Synthetic oligonucleotide
gucauuccgguucuucagc

SEQ ID NO: 294510 - RNA, 19 nt, Artificial Sequence
  Description of Artificial Sequence: Synthetic oligonucleotide
uccucguggacaucuggca

SEQ ID NO: 294511 - RNA, 19 nt, Artificial Sequence
  Description of Artificial Sequence: Synthetic oligonucleotide
cauccuuaaagucuagcaa

SEQ ID NO: 294512 - RNA, 19 nt, Artificial Sequence
  Description of Artificial Sequence: Synthetic oligonucleotide
ucucucccuugacaacacg

SEQ ID NO: 294513 - RNA, 19 nt, Artificial Sequence
  Description of Artificial Sequence: Synthetic oligonucleotide
agucuagcaaggccuugag

SEQ ID NO: 294514 - RNA, 19 nt, Artificial Sequence
  Description of Artificial Sequence: Synthetic oligonucleotide
auccgugcggccucugcac

SEQ ID NO: 294515 - RNA, 19 nt, Artificial Sequence
  Description of Artificial Sequence: Synthetic oligonucleotide
cacggaucggaccagccac

SEQ ID NO: 294516 - RNA, 19 nt, Artificial Sequence
  Description of Artificial Sequence: Synthetic oligonucleotide
ggcaucccgggauacaggg

SEQ ID NO: 294517 - RNA, 19 nt, Artificial Sequence
  Description of Artificial Sequence: Synthetic oligonucleotide
ugucgaggucccagagugg

SEQ ID NO: 294518 - RNA, 19 nt, Artificial Sequence
  Description of Artificial Sequence: Synthetic oligonucleotide
gagguaagcacccacggau

SEQ ID NO: 294519 - RNA, 19 nt, Artificial Sequence
  Description of Artificial Sequence: Synthetic oligonucleotide
cuaugcaguaguggcgugg

SEQ ID NO: 294520 - RNA, 19 nt, Artificial Sequence
  Description of Artificial Sequence: Synthetic oligonucleotide
cuccucguggacaucuggc

SEQ ID NO: 294521 - RNA, 19 nt, Artificial Sequence
  Description of Artificial Sequence: Synthetic oligonucleotide
augauacgagcugaguucu

SEQ ID NO: 294522 - RNA, 19 nt, Artificial Sequence
  Description of Artificial Sequence: Synthetic oligonucleotide
caugccccaaguucagcag

SEQ ID NO: 294523 - RNA, 19 nt, Artificial Sequence
  Description of Artificial Sequence: Synthetic oligonucleotide
agcuacagccccucggacu

SEQ ID NO: 294524 - RNA, 19 nt, Artificial Sequence
  Description of Artificial Sequence: Synthetic oligonucleotide
uaagcacccacggaucgga

SEQ ID NO: 294525 - RNA, 19 nt, Artificial Sequence
  Description of Artificial Sequence: Synthetic oligonucleotide
uaacgccucugccuugagc

SEQ ID NO: 294526 - RNA, 19 nt, Artificial Sequence
  Description of Artificial Sequence: Synthetic oligonucleotide
cuucccggucuugacaucc

SEQ ID NO: 294527 - RNA, 19 nt, Artificial Sequence
  Description of Artificial Sequence: Synthetic oligonucleotide
gggacaauacugugaacug

SEQ ID NO: 294528 - RNA, 19 nt, Artificial Sequence
  Description of Artificial Sequence: Synthetic oligonucleotide
agaaccaccugcagcgggg

SEQ ID NO: 294529 - RNA, 19 nt, Artificial Sequence
  Description of Artificial Sequence: Synthetic oligonucleotide
gaucggaccagccacuccu

SEQ ID NO: 294530 - RNA, 19 nt, Artificial Sequence
  Description of Artificial Sequence: Synthetic oligonucleotide
uccgugcggccucugcacg

SEQ ID NO: 294531 - RNA, 19 nt, Artificial Sequence
  Description of Artificial Sequence: Synthetic oligonucleotide
gugcacggcgagcaugugg

SEQ ID NO: 294532 - RNA, 19 nt, Artificial Sequence
  Description of Artificial Sequence: Synthetic oligonucleotide
ccauacgaaugauacgagc

SEQ ID NO: 294533 - RNA, 19 nt, Artificial Sequence
  Description of Artificial Sequence: Synthetic oligonucleotide
cacgcuuuugucccagcug

SEQ ID NO: 294534 - RNA, 19 nt, Artificial Sequence
  Description of Artificial Sequence: Synthetic oligonucleotide
caauggcuaacgccucugc

SEQ ID NO: 294535 - RNA, 19 nt, Artificial Sequence
  Description of Artificial Sequence: Synthetic oligonucleotide
cauugugugggacacggua

SEQ ID NO: 294536 - RNA, 19 nt, Artificial Sequence
  Description of Artificial Sequence: Synthetic oligonucleotide
ugggaguuggugguaauuu

SEQ ID NO: 294537 - RNA, 19 nt, Artificial Sequence
  Description of Artificial Sequence: Synthetic oligonucleotide
cauugggucaaggaugaca

SEQ ID NO: 294538 - RNA, 19 nt, Artificial Sequence
  Description of Artificial Sequence: Synthetic oligonucleotide
agagccgucugugaugaga

SEQ ID NO: 294539 - RNA, 19 nt, Artificial Sequence
  Description of Artificial Sequence: Synthetic oligonucleotide
agaguggugauggguacca

SEQ ID NO: 294540 - RNA, 19 nt, Artificial Sequence
  Description of Artificial Sequence: Synthetic oligonucleotide
auacgagcugaguucuuau

SEQ ID NO: 294541 - RNA, 19 nt, Artificial Sequence
  Description of Artificial Sequence: Synthetic oligonucleotide
uuccuccccagugcggugg

SEQ ID NO: 294542 - RNA, 19 nt, Artificial Sequence
  Description of Artificial Sequence: Synthetic oligonucleotide
caugcaucacccacgaagu

SEQ ID NO: 294543 - RNA, 19 nt, Artificial Sequence
  Description of Artificial Sequence: Synthetic oligonucleotide
aagccgaacuugcccugug

SEQ ID NO: 294544 - RNA, 19 nt, Artificial Sequence
  Description of Artificial Sequence: Synthetic oligonucleotide
cuagcuggacacugcgcug

SEQ ID NO: 294545 - RNA, 19 nt, Artificial Sequence
  Description of Artificial Sequence: Synthetic oligonucleotide
guaagcacccacggaucgg

SEQ ID NO: 294546 - RNA, 19 nt, Artificial Sequence
  Description of Artificial Sequence: Synthetic oligonucleotide
gacuacccgggucuuguuc

SEQ ID NO: 294547 - RNA, 19 nt, Artificial Sequence
  Description of Artificial Sequence: Synthetic oligonucleotide
acgaaugauacgagcugag

SEQ ID NO: 294548 - RNA, 19 nt, Artificial Sequence
  Description of Artificial Sequence: Synthetic oligonucleotide
gucaggcacggagaaaagc

SEQ ID NO: 294549 - RNA, 19 nt, Artificial Sequence
  Description of Artificial Sequence: Synthetic oligonucleotide
ccucuucgaacacagccgg

SEQ ID NO: 294550 - RNA, 19 nt, Artificial Sequence
  Description of Artificial Sequence: Synthetic oligonucleotide
ggacaauacugugaacugc

SEQ ID NO: 294551 - RNA, 19 nt, Artificial Sequence
  Description of Artificial Sequence: Synthetic oligonucleotide
agggucauuccgguucuuc

SEQ ID NO: 294552 - RNA, 19 nt, Artificial Sequence
  Description of Artificial Sequence: Synthetic oligonucleotide
ccuguggugucaaauaaca

SEQ ID NO: 294553 - RNA, 19 nt, Artificial Sequence
  Description of Artificial Sequence: Synthetic oligonucleotide
gugguaauuucaauggcua

SEQ ID NO: 294554 - RNA, 19 nt, Artificial Sequence
  Description of Artificial Sequence: Synthetic oligonucleotide
cugccuugagcuuggccug

SEQ ID NO: 294555 - RNA, 19 nt, Artificial Sequence
  Description of Artificial Sequence: Synthetic oligonucleotide
ugacugguccaagaucuuc

SEQ ID NO: 294556 - RNA, 19 nt, Artificial Sequence
  Description of Artificial Sequence: Synthetic oligonucleotide
auuuugguccagagggaug

SEQ ID NO: 294557 - RNA, 19 nt, Artificial Sequence
  Description of Artificial Sequence: Synthetic oligonucleotide
ccacuaugcaguaguggcg

SEQ ID NO: 294558 - RNA, 19 nt, Artificial Sequence
  Description of Artificial Sequence: Synthetic oligonucleotide
uucugccgagcccggaggu

SEQ ID NO: 294559 - RNA, 19 nt, Artificial Sequence
  Description of Artificial Sequence: Synthetic oligonucleotide
aaauaacaccaggcucgug

SEQ ID NO: 294560 - RNA, 19 nt, Artificial Sequence
  Description of Artificial Sequence: Synthetic oligonucleotide
acuaugcaguaguggcgug

SEQ ID NO: 294561 - RNA, 19 nt, Artificial Sequence
  Description of Artificial Sequence: Synthetic oligonucleotide
cacggcgagcauguggacg

SEQ ID NO: 294562 - RNA, 19 nt, Artificial Sequence
  Description of Artificial Sequence: Synthetic oligonucleotide
cuccuuucgggcccuuagc

SEQ ID NO: 294563 - RNA, 19 nt, Artificial Sequence
  Description of Artificial Sequence: Synthetic oligonucleotide
gauacgagcugaguucuua

SEQ ID NO: 294564 - RNA, 19 nt, Artificial Sequence
  Description of Artificial Sequence: Synthetic oligonucleotide
gaacuugcccugugguguc

SEQ ID NO: 294565 - RNA, 19 nt, Artificial Sequence
  Description of Artificial Sequence: Synthetic oligonucleotide
acgagcccugggcagaagu

SEQ ID NO: 294566 - RNA, 19 nt, Artificial Sequence
  Description of Artificial Sequence: Synthetic oligonucleotide
uguaggcaaguugcagcug

SEQ ID NO: 294567 - RNA, 19 nt, Artificial Sequence
  Description of Artificial Sequence: Synthetic oligonucleotide
agagugcacggcgagcaug

SEQ ID NO: 294568 - RNA, 19 nt, Artificial Sequence
  Description of Artificial Sequence: Synthetic oligonucleotide
ucgggaugcaauggccuug

SEQ ID NO: 294569 - RNA, 19 nt, Artificial Sequence
  Description of Artificial Sequence: Synthetic oligonucleotide
uagaccaguuccagcucuc

SEQ ID NO: 294570 - RNA, 19 nt, Artificial Sequence
  Description of Artificial Sequence: Synthetic oligonucleotide
aaagaccacgcgggcucuc

SEQ ID NO: 294571 - RNA, 19 nt, Artificial Sequence
  Description of Artificial Sequence: Synthetic oligonucleotide
uuacucguuccagcucugc

SEQ ID NO: 294572 - RNA, 19 nt, Artificial Sequence
  Description of Artificial Sequence: Synthetic oligonucleotide
ggcacggagaaaagcuucg

SEQ ID NO: 294573 - RNA, 19 nt, Artificial Sequence
  Description of Artificial Sequence: Synthetic oligonucleotide
acgcgggcucucuuggcuc

SEQ ID NO: 294574 - RNA, 19 nt, Artificial Sequence
  Description of Artificial Sequence: Synthetic oligonucleotide
gaccacgcgggcucucuug

SEQ ID NO: 294575 - RNA, 19 nt, Artificial Sequence
  Description of Artificial Sequence: Synthetic oligonucleotide
caggguuugccacuaugca

SEQ ID NO: 294576 - RNA, 19 nt, Artificial Sequence
  Description of Artificial Sequence: Synthetic oligonucleotide
aaacagccauacgaaugau

SEQ ID NO: 294577 - RNA, 19 nt, Artificial Sequence
  Description of Artificial Sequence: Synthetic oligonucleotide
cugaguucuuauggaaauc

SEQ ID NO: 294578 - RNA, 19 nt, Artificial Sequence
  Description of Artificial Sequence: Synthetic oligonucleotide
cugccuccgucucaauggc

SEQ ID NO: 294579 - RNA, 19 nt, Artificial Sequence
  Description of Artificial Sequence: Synthetic oligonucleotide
gcuucgcugucucuucagg

SEQ ID NO: 294580 - RNA, 19 nt, Artificial Sequence
  Description of Artificial Sequence: Synthetic oligonucleotide
ucccggucuugacauccug

SEQ ID NO: 294581 - RNA, 19 nt, Artificial Sequence
  Description of Artificial Sequence: Synthetic oligonucleotide
acaacacgcuuuuguccca

SEQ ID NO: 294582 - RNA, 19 nt, Artificial Sequence
  Description of Artificial Sequence: Synthetic oligonucleotide
uggcauuuccagugcuuuc

SEQ ID NO: 294583 - RNA, 19 nt, Artificial Sequence
  Description of Artificial Sequence: Synthetic oligonucleotide
guaaagaaaucaggcccca

SEQ ID NO: 294584 - RNA, 19 nt, Artificial Sequence
  Description of Artificial Sequence: Synthetic oligonucleotide
ggguccacggaugagccag

SEQ ID NO: 294585 - RNA, 19 nt, Artificial Sequence
  Description of Artificial Sequence: Synthetic oligonucleotide
agugccaguuguaggcaag

SEQ ID NO: 294586 - RNA, 19 nt, Artificial Sequence
  Description of Artificial Sequence: Synthetic oligonucleotide
ucgaggucccagaguggug

SEQ ID NO: 294587 - RNA, 19 nt, Artificial Sequence
  Description of Artificial Sequence: Synthetic oligonucleotide
ccuugcaugcaucacccac

SEQ ID NO: 294588 - RNA, 19 nt, Artificial Sequence
  Description of Artificial Sequence: Synthetic oligonucleotide
agcugaguucuuauggaaa

SEQ ID NO: 294589 - RNA, 19 nt, Artificial Sequence
  Description of Artificial Sequence: Synthetic oligonucleotide
cauuccgguucuucagcuc

SEQ ID NO: 294590 - RNA, 19 nt, Artificial Sequence
  Description of Artificial Sequence: Synthetic oligonucleotide
acgaagucaggcacggaga

SEQ ID NO: 294591 - RNA, 19 nt, Artificial Sequence
  Description of Artificial Sequence: Synthetic oligonucleotide
gcacguggggacaaauacg

SEQ ID NO: 294592 - RNA, 19 nt, Artificial Sequence
  Description of Artificial Sequence: Synthetic oligonucleotide
uuagccgcagugccugguu

SEQ ID NO: 294593 - RNA, 19 nt, Artificial Sequence
  Description of Artificial Sequence: Synthetic oligonucleotide
ugucacccucuguuugcca

SEQ ID NO: 294594 - RNA, 19 nt, Artificial Sequence
  Description of Artificial Sequence: Synthetic oligonucleotide
cagaagcuacagccccucg

SEQ ID NO: 294595 - RNA, 19 nt, Artificial Sequence
  Description of Artificial Sequence: Synthetic oligonucleotide
cgucucaauggcuaacgcc

SEQ ID NO: 294596 - RNA, 19 nt, Artificial Sequence
  Description of Artificial Sequence: Synthetic oligonucleotide
cagaguggugauggguacc

SEQ ID NO: 294597 - RNA, 19 nt, Artificial Sequence
  Description of Artificial Sequence: Synthetic oligonucleotide
ggaacauacuccagggguc

SEQ ID NO: 294598 - RNA, 19 nt, Artificial Sequence
  Description of Artificial Sequence: Synthetic oligonucleotide
aagaccacgcgggcucucu

SEQ ID NO: 294599 - RNA, 19 nt, Artificial Sequence
  Description of Artificial Sequence: Synthetic oligonucleotide
cacuagcucagggccaaag

SEQ ID NO: 294600 - RNA, 19 nt, Artificial Sequence
  Description of Artificial Sequence: Synthetic oligonucleotide
acccgggucuuguuccuug

SEQ ID NO: 294601 - RNA, 19 nt, Artificial Sequence
  Description of Artificial Sequence: Synthetic oligonucleotide
aagcacccacggaucggac

SEQ ID NO: 294602 - RNA, 19 nt, Artificial Sequence
  Description of Artificial Sequence: Synthetic oligonucleotide
ucgccacugaucgugucuc

SEQ ID NO: 294603 - RNA, 19 nt, Artificial Sequence
  Description of Artificial Sequence: Synthetic oligonucleotide
agcccauuuuggggaaagg

SEQ ID NO: 294604 - RNA, 19 nt, Artificial Sequence
  Description of Artificial Sequence: Synthetic oligonucleotide
auaggaccucauccugggu

SEQ ID NO: 294605 - RNA, 19 nt, Artificial Sequence
  Description of Artificial Sequence: Synthetic oligonucleotide
cuccuucaauccgugcggc

SEQ ID NO: 294606 - RNA, 19 nt, Artificial Sequence
  Description of Artificial Sequence: Synthetic oligonucleotide
aggcucgugggcaucccgg

SEQ ID NO: 294607 - RNA, 19 nt, Artificial Sequence
  Description of Artificial Sequence: Synthetic oligonucleotide
gacgcuugggccgcccagc

SEQ ID NO: 294608 - RNA, 19 nt, Artificial Sequence
  Description of Artificial Sequence: Synthetic oligonucleotide
acccacgaagucaggcacg

SEQ ID NO: 294609 - RNA, 19 nt, Artificial Sequence
  Description of Artificial Sequence: Synthetic oligonucleotide
aagagccgucugugaugag

SEQ ID NO: 294610 - RNA, 19 nt, Artificial Sequence
  Description of Artificial Sequence: Synthetic oligonucleotide
ggugguaauuucaauggcu

SEQ ID NO: 294611 - RNA, 19 nt, Artificial Sequence
  Description of Artificial Sequence: Synthetic oligonucleotide
gguauguaggugccagguc

SEQ ID NO: 294612 - RNA, 19 nt, Artificial Sequence
  Description of Artificial Sequence: Synthetic oligonucleotide
uucccggucuugacauccu

SEQ ID NO: 294613 - RNA, 19 nt, Artificial Sequence
  Description of Artificial Sequence: Synthetic oligonucleotide
cauccccucgccacugauc

SEQ ID NO: 294614 - RNA, 19 nt, Artificial Sequence
  Description of Artificial Sequence: Synthetic oligonucleotide
gacacuagcucagggccaa

SEQ ID NO: 294615 - RNA, 19 nt, Artificial Sequence
  Description of Artificial Sequence: Synthetic oligonucleotide
uuugugccgguggcugacc

SEQ ID NO: 294616 - RNA, 19 nt, Artificial Sequence
  Description of Artificial Sequence: Synthetic oligonucleotide
gggguauguaggugccagg

SEQ ID NO: 294617 - RNA, 19 nt, Artificial Sequence
  Description of Artificial Sequence: Synthetic oligonucleotide
caacacgcuuuugucccag

SEQ ID NO: 294618 - RNA, 19 nt, Artificial Sequence
  Description of Artificial Sequence: Synthetic oligonucleotide
gggucauuccgguucuuca

SEQ ID NO: 294619 - RNA, 19 nt, Artificial Sequence
  Description of Artificial Sequence: Synthetic oligonucleotide
gcucuguagucauacaccu

SEQ ID NO: 294620 - RNA, 19 nt, Artificial Sequence
  Description of Artificial Sequence: Synthetic oligonucleotide
auuccuccccagugcggug

SEQ ID NO: 294621 - RNA, 19 nt, Artificial Sequence
  Description of Artificial Sequence: Synthetic oligonucleotide
ugauacgagcugaguucuu

SEQ ID NO: 294622 - RNA, 19 nt, Artificial Sequence
  Description of Artificial Sequence: Synthetic oligonucleotide
cuaaccauuccuccccagu

SEQ ID NO: 294623 - RNA, 19 nt, Artificial Sequence
  Description of Artificial Sequence: Synthetic oligonucleotide
gcacccacggaucggacca

SEQ ID NO: 294624 - RNA, 19 nt, Artificial Sequence
  Description of Artificial Sequence: Synthetic oligonucleotide
uguaggugccaggucccuc

SEQ ID NO: 294625 - RNA, 19 nt, Artificial Sequence
  Description of Artificial Sequence: Synthetic oligonucleotide
cgcacguggggacaaauac

SEQ ID NO: 294626 - RNA, 19 nt, Artificial Sequence
  Description of Artificial Sequence: Synthetic oligonucleotide
caaauacgaacccucucau

SEQ ID NO: 294627 - RNA, 19 nt, Artificial Sequence
  Description of Artificial Sequence: Synthetic oligonucleotide
agaguggacuucaggccca

SEQ ID NO: 294628 - RNA, 19 nt, Artificial Sequence
  Description of Artificial Sequence: Synthetic oligonucleotide
uucaauccgugcggccucu

SEQ ID NO: 294629 - RNA, 19 nt, Artificial Sequence
  Description of Artificial Sequence: Synthetic oligonucleotide
ggagguaagcacccacgga

SEQ ID NO: 294630 - RNA, 19 nt, Artificial Sequence
  Description of Artificial Sequence: Synthetic oligonucleotide
ggaugagccagcggucucc

SEQ ID NO: 294631 - RNA, 19 nt, Artificial Sequence
  Description of Artificial Sequence: Synthetic oligonucleotide
gcucucguacuuucuuuac

SEQ ID NO: 294632 - RNA, 19 nt, Artificial Sequence
  Description of Artificial Sequence: Synthetic oligonucleotide
gcacaugggcuucuguguc

SEQ ID NO: 294633 - RNA, 19 nt, Artificial Sequence
  Description of Artificial Sequence: Synthetic oligonucleotide
aagggcgucccggguccuc

SEQ ID NO: 294634 - RNA, 19 nt, Artificial Sequence
  Description of Artificial Sequence: Synthetic oligonucleotide
cccuguggugucaaauaac

SEQ ID NO: 294635 - RNA, 19 nt, Artificial Sequence
  Description of Artificial Sequence: Synthetic oligonucleotide
ucgugggcaucccgggaua

SEQ ID NO: 294636 - RNA, 19 nt, Artificial Sequence
  Description of Artificial Sequence: Synthetic oligonucleotide
gccauacgaaugauacgag

SEQ ID NO: 294637 - RNA, 19 nt, Artificial Sequence
  Description of Artificial Sequence: Synthetic oligonucleotide
agcggucuccagccuggug

SEQ ID NO: 294638 - RNA, 19 nt, Artificial Sequence
  Description of Artificial Sequence: Synthetic oligonucleotide
ggaaaucaucaaaggugac

SEQ ID NO: 294639 - RNA, 19 nt, Artificial Sequence
  Description of Artificial Sequence: Synthetic oligonucleotide
aaguucugccgagcccgga

SEQ ID NO: 294640 - RNA, 19 nt, Artificial Sequence
  Description of Artificial Sequence: Synthetic oligonucleotide
cacuaugcaguaguggcgu

SEQ ID NO: 294641 - RNA, 19 nt, Artificial Sequence
  Description of Artificial Sequence: Synthetic oligonucleotide
cuaacgccucugccuugag

SEQ ID NO: 294642 - RNA, 19 nt, Artificial Sequence
  Description of Artificial Sequence: Synthetic oligonucleotide
gcaguguugggaagaacca

SEQ ID NO: 294643 - RNA, 19 nt, Artificial Sequence
  Description of Artificial Sequence: Synthetic oligonucleotide
cuucgcccuccuccagggg

SEQ ID NO: 294644 - RNA, 19 nt, Artificial Sequence
  Description of Artificial Sequence: Synthetic oligonucleotide
ggacauauacauccuggau

SEQ ID NO: 294645 - RNA, 19 nt, Artificial Sequence
  Description of Artificial Sequence: Synthetic oligonucleotide
ggccugacgcuccuccacc

SEQ ID NO: 294646 - RNA, 19 nt, Artificial Sequence
  Description of Artificial Sequence: Synthetic oligonucleotide
augagccagcggucuccag

SEQ ID NO: 294647 - RNA, 19 nt, Artificial Sequence
  Description of Artificial Sequence: Synthetic oligonucleotide
acgcuugggccgcccagca

SEQ ID NO: 294648 - RNA, 19 nt, Artificial Sequence
  Description of Artificial Sequence: Synthetic oligonucleotide
cacggagaaaagcuucgcu

SEQ ID NO: 294649 - RNA, 19 nt, Artificial Sequence
  Description of Artificial Sequence: Synthetic oligonucleotide
cucgggcauagaccaguuc

SEQ ID NO: 294650 - RNA, 19 nt, Artificial Sequence
  Description of Artificial Sequence: Synthetic oligonucleotide
ugccgagcccggaggugca

SEQ ID NO: 294651 - RNA, 19 nt, Artificial Sequence
  Description of Artificial Sequence: Synthetic oligonucleotide
cuccgucucaauggcuaac

SEQ ID NO: 294652 - RNA, 19 nt, Artificial Sequence
  Description of Artificial Sequence: Synthetic oligonucleotide
ggucaugccccaaguucag

SEQ ID NO: 294653 - RNA, 19 nt, Artificial Sequence
  Description of Artificial Sequence: Synthetic oligonucleotide
ggaucggaccagccacucc

SEQ ID NO: 294654 - RNA, 19 nt, Artificial Sequence
  Description of Artificial Sequence: Synthetic oligonucleotide
gagugcacggcgagcaugu

SEQ ID NO: 294655 - RNA, 19 nt, Artificial Sequence
  Description of Artificial Sequence: Synthetic oligonucleotide
ccggucacgagcccugggc

SEQ ID NO: 294656 - RNA, 19 nt, Artificial Sequence
  Description of Artificial Sequence: Synthetic oligonucleotide
caucccgggauacaggguu

SEQ ID NO: 294657 - RNA, 19 nt, Artificial Sequence
  Description of Artificial Sequence: Synthetic oligonucleotide
cccacgaagucaggcacgg

SEQ ID NO: 294658 - RNA, 19 nt, Artificial Sequence
  Description of Artificial Sequence: Synthetic oligonucleotide
gucacccucuguuugccau

SEQ ID NO: 294659 - RNA, 19 nt, Artificial Sequence
  Description of Artificial Sequence: Synthetic oligonucleotide
accuuacuuuugugccggu

SEQ ID NO: 294660 - RNA, 19 nt, Artificial Sequence
  Description of Artificial Sequence: Synthetic oligonucleotide
ggccgcccagcagaaaggg

SEQ ID NO: 294661 - RNA, 19 nt, Artificial Sequence
  Description of Artificial Sequence: Synthetic oligonucleotide
ugcgcacguggggacaaau

SEQ ID NO: 294662 - RNA, 19 nt, Artificial Sequence
  Description of Artificial Sequence: Synthetic oligonucleotide
ucaagccggccacgggcuu

SEQ ID NO: 294663 - RNA, 19 nt, Artificial Sequence
  Description of Artificial Sequence: Synthetic oligonucleotide
ggauacaggguuugccacu

SEQ ID NO: 294664 - RNA, 19 nt, Artificial Sequence
  Description of Artificial Sequence: Synthetic oligonucleotide
ccucaggauccagugacac

SEQ ID NO: 294665 - RNA, 19 nt, Artificial Sequence
  Description of Artificial Sequence: Synthetic oligonucleotide
ccgguucuucagcucaaag

SEQ ID NO: 294666 - RNA, 19 nt, Artificial Sequence
  Description of Artificial Sequence: Synthetic oligonucleotide
ccgucucaauggcuaacgc

SEQ ID NO: 294667 - RNA, 19 nt, Artificial Sequence
  Description of Artificial Sequence: Synthetic oligonucleotide
ggacgcuugggccgcccag

SEQ ID NO: 294668 - RNA, 19 nt, Artificial Sequence
  Description of Artificial Sequence: Synthetic oligonucleotide
cuacagccccucggacucg

SEQ ID NO: 294669 - RNA, 19 nt, Artificial Sequence
  Description of Artificial Sequence: Synthetic oligonucleotide
ucaauccgugcggccucug

SEQ ID NO: 294670 - RNA, 19 nt, Artificial Sequence
  Description of Artificial Sequence: Synthetic oligonucleotide
ugacuacccgggucuuguu

SEQ ID NO: 294671 - RNA, 19 nt, Artificial Sequence
  Description of Artificial Sequence: Synthetic oligonucleotide
cugcgcugaagggcguccc

SEQ ID NO: 294672 - RNA, 19 nt, Artificial Sequence
  Description of Artificial Sequence: Synthetic oligonucleotide
cgggucuuguuccuuggag

SEQ ID NO: 294673 - RNA, 19 nt, Artificial Sequence
  Description of Artificial Sequence: Synthetic oligonucleotide
caaauaacaccaggcucgu

SEQ ID NO: 294674 - RNA, 19 nt, Artificial Sequence
  Description of Artificial Sequence: Synthetic oligonucleotide
ccgggauacaggguuugcc

SEQ ID NO: 294675 - RNA, 19 nt, Artificial Sequence
  Description of Artificial Sequence: Synthetic oligonucleotide
cacgucagcuagcugcugu

SEQ ID NO: 294676 - RNA, 19 nt, Artificial Sequence
  Description of Artificial Sequence: Synthetic oligonucleotide
cucaagccggccacgggcu

SEQ ID NO: 294677 - RNA, 19 nt, Artificial Sequence
  Description of Artificial Sequence: Synthetic oligonucleotide
acggaucggaccagccacu

SEQ ID NO: 294678 - RNA, 19 nt, Artificial Sequence
  Description of Artificial Sequence: Synthetic oligonucleotide
uggcccggucacgagcccu

SEQ ID NO: 294679 - RNA, 19 nt, Artificial Sequence
  Description of Artificial Sequence: Synthetic oligonucleotide
cagugcggugggccacucc

SEQ ID NO: 294680 - RNA, 19 nt, Artificial Sequence
  Description of Artificial Sequence: Synthetic oligonucleotide
gcuuccaaucacagcccgc

SEQ ID NO: 294681 - RNA, 19 nt, Artificial Sequence
  Description of Artificial Sequence: Synthetic oligonucleotide
cuugggccgcccagcagaa

SEQ ID NO: 294682 - RNA, 19 nt, Artificial Sequence
  Description of Artificial Sequence: Synthetic oligonucleotide
ggcgucccggguccucugg

SEQ ID NO: 294683 - RNA, 19 nt, Artificial Sequence
  Description of Artificial Sequence: Synthetic oligonucleotide
ggaggugcaaggcugucuu

SEQ ID NO: 294684 - RNA, 19 nt, Artificial Sequence
  Description of Artificial Sequence: Synthetic oligonucleotide
gaagccgaacuugcccugu

SEQ ID NO: 294685 - RNA, 19 nt, Artificial Sequence
  Description of Artificial Sequence: Synthetic oligonucleotide
ggguauguaggugccaggu

SEQ ID NO: 294686 - RNA, 19 nt, Artificial Sequence
  Description of Artificial Sequence: Synthetic oligonucleotide
ccuuacuuuugugccggug

SEQ ID NO: 294687 - RNA, 19 nt, Artificial Sequence
  Description of Artificial Sequence: Synthetic oligonucleotide
gggcccuuagccgcagugc

SEQ ID NO: 294688 - RNA, 19 nt, Artificial Sequence
  Description of Artificial Sequence: Synthetic oligonucleotide
cgagcauguggacgcuugg

SEQ ID NO: 294689 - RNA, 19 nt, Artificial Sequence
  Description of Artificial Sequence: Synthetic oligonucleotide
gcuaacgccucugccuuga

SEQ ID NO: 294690 - RNA, 19 nt, Artificial Sequence
  Description of Artificial Sequence: Synthetic oligonucleotide
uccccucgccacugaucgu

SEQ ID NO: 294691 - RNA, 19 nt, Artificial Sequence
  Description of Artificial Sequence: Synthetic oligonucleotide
agaccacgcgggcucucuu

SEQ ID NO: 294692 - RNA, 19 nt, Artificial Sequence
  Description of Artificial Sequence: Synthetic oligonucleotide
agugcacggcgagcaugug

SEQ ID NO: 294693 - RNA, 19 nt, Artificial Sequence
  Description of Artificial Sequence: Synthetic oligonucleotide
uguggacgcuugggccgcc

SEQ ID NO: 294694 - RNA, 19 nt, Artificial Sequence
  Description of Artificial Sequence: Synthetic oligonucleotide
agggcgucccggguccucu

SEQ ID NO: 294695 - RNA, 19 nt, Artificial Sequence
  Description of Artificial Sequence: Synthetic oligonucleotide
gguuugccacuaugcagua

SEQ ID NO: 294696 - RNA, 19 nt, Artificial Sequence
  Description of Artificial Sequence: Synthetic oligonucleotide
cucgugggcaucccgggau

SEQ ID NO: 294697 - RNA, 19 nt, Artificial Sequence
  Description of Artificial Sequence: Synthetic oligonucleotide
ccgggagguaagcacccac

SEQ ID NO: 294698 - RNA, 19 nt, Artificial Sequence
  Description of Artificial Sequence: Synthetic oligonucleotide
ggggacaaauacgaacccu

SEQ ID NO: 294699 - RNA, 19 nt, Artificial Sequence
  Description of Artificial Sequence: Synthetic oligonucleotide
ccccucgccacugaucgug

SEQ ID NO: 294700 - RNA, 19 nt, Artificial Sequence
  Description of Artificial Sequence: Synthetic oligonucleotide
cgagcccggaggugcaagg

SEQ ID NO: 294701 - RNA, 19 nt, Artificial Sequence
  Description of Artificial Sequence: Synthetic oligonucleotide
cagccccucggacucggga

SEQ ID NO: 294702 - RNA, 19 nt, Artificial Sequence
  Description of Artificial Sequence: Synthetic oligonucleotide
ucgggcccuuagccgcagu

SEQ ID NO: 294703 - RNA, 19 nt, Artificial Sequence
  Description of Artificial Sequence: Synthetic oligonucleotide
cggagaaaagcuucgcugu

SEQ ID NO: 294704 - RNA, 19 nt, Artificial Sequence
  Description of Artificial Sequence: Synthetic oligonucleotide
gccgaacuugcccuguggu

SEQ ID NO: 294705 - RNA, 19 nt, Artificial Sequence
  Description of Artificial Sequence: Synthetic oligonucleotide
guggcccggucacgagccc

SEQ ID NO: 294706 - RNA, 19 nt, Artificial Sequence
  Description of Artificial Sequence: Synthetic oligonucleotide
cacgcgggcucucuuggcu

SEQ ID NO: 294707 - RNA, 19 nt, Artificial Sequence
  Description of Artificial Sequence: Synthetic oligonucleotide
cacugcgcugaagggcguc

SEQ ID NO: 294708 - RNA, 19 nt, Artificial Sequence
  Description of Artificial Sequence: Synthetic oligonucleotide
cuucgccuccacgucagcu

SEQ ID NO: 294709 - RNA, 19 nt, Artificial Sequence
  Description of Artificial Sequence: Synthetic oligonucleotide
caugcgcacguggggacaa

SEQ ID NO: 294710 - RNA, 19 nt, Artificial Sequence
  Description of Artificial Sequence: Synthetic oligonucleotide
gccacugaucgugucucca

SEQ ID NO: 294711 - RNA, 19 nt, Artificial Sequence
  Description of Artificial Sequence: Synthetic oligonucleotide
gcugacuacccgggucuug

SEQ ID NO: 294712 - RNA, 19 nt, Artificial Sequence
  Description of Artificial Sequence: Synthetic oligonucleotide
ccagucggaucuccugguc

SEQ ID NO: 294713 - RNA, 19 nt, Artificial Sequence
  Description of Artificial Sequence: Synthetic oligonucleotide
cucccuugacaacacgcuu

SEQ ID NO: 294714 - RNA, 19 nt, Artificial Sequence
  Description of Artificial Sequence: Synthetic oligonucleotide
cucgggaugcaauggccuu

SEQ ID NO: 294715 - RNA, 19 nt, Artificial Sequence
  Description of Artificial Sequence: Synthetic oligonucleotide
cugggguauguaggugcca

SEQ ID NO: 294716 - RNA, 19 nt, Artificial Sequence
  Description of Artificial Sequence: Synthetic oligonucleotide
cgaagccgaacuugcccug

SEQ ID NO: 294717 - RNA, 19 nt, Artificial Sequence
  Description of Artificial Sequence: Synthetic oligonucleotide
cacugaucgugucuccauu

SEQ ID NO: 294718 - RNA, 19 nt, Artificial Sequence
  Description of Artificial Sequence: Synthetic oligonucleotide
aucccgggauacaggguuu

SEQ ID NO: 294719 - RNA, 19 nt, Artificial Sequence
  Description of Artificial Sequence: Synthetic oligonucleotide
cgggaugcaauggccuugc

SEQ ID NO: 294720 - RNA, 19 nt, Artificial Sequence
  Description of Artificial Sequence: Synthetic oligonucleotide
caagcuccaagaguuccuu

SEQ ID NO: 294721 - RNA, 19 nt, Artificial Sequence
  Description of Artificial Sequence: Synthetic oligonucleotide
guggacgcuugggccgccc

SEQ ID NO: 294722 - RNA, 19 nt, Artificial Sequence
  Description of Artificial Sequence: Synthetic oligonucleotide
uacccgggucuuguuccuu

SEQ ID NO: 294723 - RNA, 19 nt, Artificial Sequence
  Description of Artificial Sequence: Synthetic oligonucleotide
cuacccgggucuuguuccu

SEQ ID NO: 294724 - RNA, 19 nt, Artificial Sequence
  Description of Artificial Sequence: Synthetic oligonucleotide
agcugacuacccgggucuu

SEQ ID NO: 294725 - RNA, 19 nt, Artificial Sequence
  Description of Artificial Sequence: Synthetic oligonucleotide
gcucgugggcaucccggga

SEQ ID NO: 294726 - RNA, 19 nt, Artificial Sequence
  Description of Artificial Sequence: Synthetic oligonucleotide
caguaaugucgagguccca

SEQ ID NO: 294727 - RNA, 19 nt, Artificial Sequence
  Description of Artificial Sequence: Synthetic oligonucleotide
gggucaaggaugacacagu

SEQ ID NO: 294728 - RNA, 19 nt, Artificial Sequence
  Description of Artificial Sequence: Synthetic oligonucleotide
cgaggguugaagggucuug

SEQ ID NO: 294729 - RNA, 19 nt, Artificial Sequence
  Description of Artificial Sequence: Synthetic oligonucleotide
gugcggugggccacuccuc

SEQ ID NO: 294730 - RNA, 19 nt, Artificial Sequence
  Description of Artificial Sequence: Synthetic oligonucleotide
caggacccaaagccucugu

SEQ ID NO: 294731 - RNA, 19 nt, Artificial Sequence
  Description of Artificial Sequence: Synthetic oligonucleotide
cccgggauacaggguuugc

SEQ ID NO: 294732 - RNA, 19 nt, Artificial Sequence
  Description of Artificial Sequence: Synthetic oligonucleotide
gcggggugauguccuuuuc

SEQ ID NO: 294733 - RNA, 19 nt, Artificial Sequence
  Description of Artificial Sequence: Synthetic oligonucleotide
acacuagcucagggccaaa

SEQ ID NO: 294734 - RNA, 19 nt, Artificial Sequence
  Description of Artificial Sequence: Synthetic oligonucleotide
gugcggccucugcacggga

SEQ ID NO: 294735 - RNA, 19 nt, Artificial Sequence
  Description of Artificial Sequence: Synthetic oligonucleotide
ccuccgucucaauggcuaa

SEQ ID NO: 294736 - RNA, 19 nt, Artificial Sequence
  Description of Artificial Sequence: Synthetic oligonucleotide
cgccacugaucgugucucc

SEQ ID NO: 294737 - RNA, 19 nt, Artificial Sequence
  Description of Artificial Sequence: Synthetic oligonucleotide
ggccacgggcuuccugcuc

SEQ ID NO: 294738 - RNA, 19 nt, Artificial Sequence
  Description of Artificial Sequence: Synthetic oligonucleotide
cgggcccuuagccgcagug

SEQ ID NO: 294739 - RNA, 19 nt, Artificial Sequence
  Description of Artificial Sequence: Synthetic oligonucleotide
ccuccacgucagcuagcug

SEQ ID NO: 294740 - RNA, 19 nt, Artificial Sequence
  Description of Artificial Sequence: Synthetic oligonucleotide
ccgagcccggaggugcaag

SEQ ID NO: 294741 - RNA, 19 nt, Artificial Sequence
  Description of Artificial Sequence: Synthetic oligonucleotide
gggcgucccggguccucug

SEQ ID NO: 294742 - RNA, 19 nt, Artificial Sequence
  Description of Artificial Sequence: Synthetic oligonucleotide
augcgcacguggggacaaa

SEQ ID NO: 294743 - RNA, 19 nt, Artificial Sequence
  Description of Artificial Sequence: Synthetic oligonucleotide
ccgggucuuguuccuugga

SEQ ID NO: 294744 - RNA, 19 nt, Artificial Sequence
  Description of Artificial Sequence: Synthetic oligonucleotide
gaagggcgucccggguccu

SEQ ID NO: 294745 - RNA, 19 nt, Artificial Sequence
  Description of Artificial Sequence: Synthetic oligonucleotide
gccgcccagcagaaaggga

SEQ ID NO: 294746 - RNA, 19 nt, Artificial Sequence
  Description of Artificial Sequence: Synthetic oligonucleotide
gcgcacguggggacaaaua

SEQ ID NO: 294747 - RNA, 19 nt, Artificial Sequence
  Description of Artificial Sequence: Synthetic oligonucleotide
cgaaugauacgagcugagu

SEQ ID NO: 294748 - RNA, 19 nt, Artificial Sequence
  Description of Artificial Sequence: Synthetic oligonucleotide
ccaugcgcacguggggaca

SEQ ID NO: 294749 - RNA, 19 nt, Artificial Sequence
  Description of Artificial Sequence: Synthetic oligonucleotide
cggaucggaccagccacuc

SEQ ID NO: 294750 - RNA, 19 nt, Artificial Sequence
  Description of Artificial Sequence: Synthetic oligonucleotide
ccacgucagcuagcugcug

SEQ ID NO: 294751 - RNA, 19 nt, Artificial Sequence
  Description of Artificial Sequence: Synthetic oligonucleotide
gcgggcucucuuggcucug

SEQ ID NO: 294752 - RNA, 19 nt, Artificial Sequence
  Description of Artificial Sequence: Synthetic oligonucleotide
gcauugugugggacacggu

SEQ ID NO: 294753 - RNA, 19 nt, Artificial Sequence
  Description of Artificial Sequence: Synthetic oligonucleotide
gcaucccgggauacagggu

SEQ ID NO: 294754 - RNA, 19 nt, Artificial Sequence
  Description of Artificial Sequence: Synthetic oligonucleotide
cccggaggugcaaggcugu

SEQ ID NO: 294755 - RNA, 19 nt, Artificial Sequence
  Description of Artificial Sequence: Synthetic oligonucleotide
ccucggacucgggaugcaa

SEQ ID NO: 294756 - RNA, 19 nt, Artificial Sequence
  Description of Artificial Sequence: Synthetic oligonucleotide
cagcggggugauguccuuu

SEQ ID NO: 294757 - RNA, 19 nt, Artificial Sequence
  Description of Artificial Sequence: Synthetic oligonucleotide
cccucgccacugaucgugu

SEQ ID NO: 294758 - RNA, 19 nt, Artificial Sequence
  Description of Artificial Sequence: Synthetic oligonucleotide
cgcuuuugucccagcuggu

SEQ ID NO: 294759 - RNA, 19 nt, Artificial Sequence
  Description of Artificial Sequence: Synthetic oligonucleotide
ggcgagcauguggacgcuu

SEQ ID NO: 294760 - RNA, 19 nt, Artificial Sequence
  Description of Artificial Sequence: Synthetic oligonucleotide
gccgagcccggaggugcaa

SEQ ID NO: 294761 - RNA, 19 nt, Artificial Sequence
  Description of Artificial Sequence: Synthetic oligonucleotide
ccgcagugccugguucugu

SEQ ID NO: 294762 - RNA, 19 nt, Artificial Sequence
  Description of Artificial Sequence: Synthetic oligonucleotide
cccgcaccuucccggucuu

SEQ ID NO: 294763 - RNA, 19 nt, Artificial Sequence
  Description of Artificial Sequence: Synthetic oligonucleotide
cggcgagcauguggacgcu

SEQ ID NO: 294764 - RNA, 19 nt, Artificial Sequence
  Description of Artificial Sequence: Synthetic oligonucleotide
auacagauaaguaauagcc

SEQ ID NO: 294765 - RNA, 19 nt, Artificial Sequence
  Description of Artificial Sequence: Synthetic oligonucleotide
aaacaagucacagagucgc

SEQ ID NO: 294766 - RNA, 19 nt, Artificial Sequence
  Description of Artificial Sequence: Synthetic oligonucleotide
aaucugauuaucugacugc

SEQ ID NO: 294767 - RNA, 19 nt, Artificial Sequence
  Description of Artificial Sequence: Synthetic oligonucleotide
ucaauaucuaauaagcuac

SEQ ID NO: 294768 - RNA, 19 nt, Artificial Sequence
  Description of Artificial Sequence: Synthetic oligonucleotide
uaauuugcuaaauuaauug

SEQ ID NO: 294769 - RNA, 19 nt, Artificial Sequence
  Description of Artificial Sequence: Synthetic oligonucleotide
uuaaccuccagcaaagucc

SEQ ID NO: 294770 - RNA, 19 nt, Artificial Sequence
  Description of Artificial Sequence: Synthetic oligonucleotide
aaaucugauuaucugacug

SEQ ID NO: 294771 - RNA, 19 nt, Artificial Sequence
  Description of Artificial Sequence: Synthetic oligonucleotide
aucagaaggaacuuucccc

SEQ ID NO: 294772 - RNA, 19 nt, Artificial Sequence
  Description of Artificial Sequence: Synthetic oligonucleotide
aauccuguaaucuaccaga

SEQ ID NO: 294773 - RNA, 19 nt, Artificial Sequence
  Description of Artificial Sequence: Synthetic oligonucleotide
auaucuaauaagcuacugg

SEQ ID NO: 294774 - RNA, 19 nt, Artificial Sequence
  Description of Artificial Sequence: Synthetic oligonucleotide
aaauccgccaucugcauuc

SEQ ID NO: 294775 - RNA, 19 nt, Artificial Sequence
  Description of Artificial Sequence: Synthetic oligonucleotide
uacuauuucagguagagau

SEQ ID NO: 294776 - RNA, 19 nt, Artificial Sequence
  Description of Artificial Sequence: Synthetic oligonucleotide
auaacaagccagcugauag

SEQ ID NO: 294777 - RNA, 19 nt, Artificial Sequence
  Description of Artificial Sequence: Synthetic oligonucleotide
uaaucuaccagaguuuucg

SEQ ID NO: 294778 - RNA, 19 nt, Artificial Sequence
  Description of Artificial Sequence: Synthetic oligonucleotide
uuucguauguaacagccag

SEQ ID NO: 294779 - RNA, 19 nt, Artificial Sequence
  Description of Artificial Sequence: Synthetic oligonucleotide
uuagauaucagcucacucu

SEQ ID NO: 294780 - RNA, 19 nt, Artificial Sequence
  Description of Artificial Sequence: Synthetic oligonucleotide
aagauuguuuauuuguuga

SEQ ID NO: 294781 - RNA, 19 nt, Artificial Sequence
  Description of Artificial Sequence: Synthetic oligonucleotide
ugaaucauaagaugguacc

SEQ ID NO: 294782 - RNA, 19 nt, Artificial Sequence
  Description of Artificial Sequence: Synthetic oligonucleotide
aacgaugcuaaacaaguca

SEQ ID NO: 294783 - RNA, 19 nt, Artificial Sequence
  Description of Artificial Sequence: Synthetic oligonucleotide
gauaaugaacaaaugagac

SEQ ID NO: 294784 - RNA, 19 nt, Artificial Sequence
  Description of Artificial Sequence: Synthetic oligonucleotide
aaugacuuuccaaauccgc

SEQ ID NO: 294785 - RNA, 19 nt, Artificial Sequence
  Description of Artificial Sequence: Synthetic oligonucleotide
auaagcuacugguagcggc

SEQ ID NO: 294786 - RNA, 19 nt, Artificial Sequence
  Description of Artificial Sequence: Synthetic oligonucleotide
gggaauaugacacuguggg

SEQ ID NO: 294787 - RNA, 19 nt, Artificial Sequence
  Description of Artificial Sequence: Synthetic oligonucleotide
uguuaguucauuacaucag

SEQ ID NO: 294788 - RNA, 19 nt, Artificial Sequence
  Description of Artificial Sequence: Synthetic oligonucleotide
aaguagcugaaucauaaga

SEQ ID NO: 294789 - RNA, 19 nt, Artificial Sequence
  Description of Artificial Sequence: Synthetic oligonucleotide
uaaugaacaaaugagacua

SEQ ID NO: 294790 - RNA, 19 nt, Artificial Sequence
  Description of Artificial Sequence: Synthetic oligonucleotide
aauccaaagcuuugcauug

SEQ ID NO: 294791 - RNA, 19 nt, Artificial Sequence
  Description of Artificial Sequence: Synthetic oligonucleotide
auuguguuccuucuaacag

SEQ ID NO: 294792 - RNA, 19 nt, Artificial Sequence
  Description of Artificial Sequence: Synthetic oligonucleotide
aguauauggccaucuaaac

SEQ ID NO: 294793 - RNA, 19 nt, Artificial Sequence
  Description of Artificial Sequence: Synthetic oligonucleotide
cuuuucgggaauaugacac

SEQ ID NO: 294794 - RNA, 19 nt, Artificial Sequence
  Description of Artificial Sequence: Synthetic oligonucleotide
aauauuucagggcccaggu

SEQ ID NO: 294795 - RNA, 19 nt, Artificial Sequence
  Description of Artificial Sequence: Synthetic oligonucleotide
acuaaaucugauuaucuga

SEQ ID NO: 294796 - RNA, 19 nt, Artificial Sequence
  Description of Artificial Sequence: Synthetic oligonucleotide
uuguuaaugugcuaauuug

SEQ ID NO: 294797 - RNA, 19 nt, Artificial Sequence
  Description of Artificial Sequence: Synthetic oligonucleotide
uucccauguacuauuauug

SEQ ID NO: 294798 - RNA, 19 nt, Artificial Sequence
  Description of Artificial Sequence: Synthetic oligonucleotide
cuaaaucugauuaucugac

SEQ ID NO: 294799 - RNA, 19 nt, Artificial Sequence
  Description of Artificial Sequence: Synthetic oligonucleotide
guauguaacagccagcgac

SEQ ID NO: 294800 - RNA, 19 nt, Artificial Sequence
  Description of Artificial Sequence: Synthetic oligonucleotide
uguucacuauuacacaggc

SEQ ID NO: 294801 - RNA, 19 nt, Artificial Sequence
  Description of Artificial Sequence: Synthetic oligonucleotide
agagcaacgaugcuaaaca

SEQ ID NO: 294802 - RNA, 19 nt, Artificial Sequence
  Description of Artificial Sequence: Synthetic oligonucleotide
auuaauugagcacuacacu

SEQ ID NO: 294803 - RNA, 19 nt, Artificial Sequence
  Description of Artificial Sequence: Synthetic oligonucleotide
auaaugaacaaaugagacu

SEQ ID NO: 294804 - RNA, 19 nt, Artificial Sequence
  Description of Artificial Sequence: Synthetic oligonucleotide
gaugcuaaacaagucacag

SEQ ID NO: 294805 - RNA, 19 nt, Artificial Sequence
  Description of Artificial Sequence: Synthetic oligonucleotide
aguccugaaacuugaagag

SEQ ID NO: 294806 - RNA, 19 nt, Artificial Sequence
  Description of Artificial Sequence: Synthetic oligonucleotide
aaagcgaaguagauggacg

SEQ ID NO: 294807 - RNA, 19 nt, Artificial Sequence
  Description of Artificial Sequence: Synthetic oligonucleotide
ucguauguaacagccagcg

SEQ ID NO: 294808 - RNA, 19 nt, Artificial Sequence
  Description of Artificial Sequence: Synthetic oligonucleotide
aucaauaucuaauaagcua

SEQ ID NO: 294809 - RNA, 19 nt, Artificial Sequence
  Description of Artificial Sequence: Synthetic oligonucleotide
gaagaggcgggcuauaaac

SEQ ID NO: 294810 - RNA, 19 nt, Artificial Sequence
  Description of Artificial Sequence: Synthetic oligonucleotide
gacuaaaucugauuaucug

SEQ ID NO: 294811 - RNA, 19 nt, Artificial Sequence
  Description of Artificial Sequence: Synthetic oligonucleotide
acaaaugagacuaaaucug

SEQ ID NO: 294812 - RNA, 19 nt, Artificial Sequence
  Description of Artificial Sequence: Synthetic oligonucleotide
uauacucuacaucauuuuc

SEQ ID NO: 294813 - RNA, 19 nt, Artificial Sequence
  Description of Artificial Sequence: Synthetic oligonucleotide
aggaacggaucguugaacg

SEQ ID NO: 294814 - RNA, 19 nt, Artificial Sequence
  Description of Artificial Sequence: Synthetic oligonucleotide
uguugagccaaagacagga

SEQ ID NO: 294815 - RNA, 19 nt, Artificial Sequence
  Description of Artificial Sequence: Synthetic oligonucleotide
uaggugauucacuucaucu

SEQ ID NO: 294816 - RNA, 19 nt, Artificial Sequence
  Description of Artificial Sequence: Synthetic oligonucleotide
ggaucaauaucuaauaagc

SEQ ID NO: 294817 - RNA, 19 nt, Artificial Sequence
  Description of Artificial Sequence: Synthetic oligonucleotide
aaucuaccagaguuuucgg

SEQ ID NO: 294818 - RNA, 19 nt, Artificial Sequence
  Description of Artificial Sequence: Synthetic oligonucleotide
cuaauaagcuacugguagc

SEQ ID NO: 294819 - RNA, 19 nt, Artificial Sequence
  Description of Artificial Sequence: Synthetic oligonucleotide
augagacuaaaucugauua

SEQ ID NO: 294820 - RNA, 19 nt, Artificial Sequence
  Description of Artificial Sequence: Synthetic oligonucleotide
ucuugaguaagagaugucu

SEQ ID NO: 294821 - RNA, 19 nt, Artificial Sequence
  Description of Artificial Sequence: Synthetic oligonucleotide
ucaauagucagucucucuu

SEQ ID NO: 294822 - RNA, 19 nt, Artificial Sequence
  Description of Artificial Sequence: Synthetic oligonucleotide
cagauaaguaauagccucg

SEQ ID NO: 294823 - RNA, 19 nt, Artificial Sequence
  Description of Artificial Sequence: Synthetic oligonucleotide
aguggagauuuucagcguc

SEQ ID NO: 294824 - RNA, 19 nt, Artificial Sequence
  Description of Artificial Sequence: Synthetic oligonucleotide
ucuaccuccugaaguaaag

SEQ ID NO: 294825 - RNA, 19 nt, Artificial Sequence
  Description of Artificial Sequence: Synthetic oligonucleotide
ugaacggauaguuucucca

SEQ ID NO: 294826 - RNA, 19 nt, Artificial Sequence
  Description of Artificial Sequence: Synthetic oligonucleotide
uacacuguuaguucauuac

SEQ ID NO: 294827 - RNA, 19 nt, Artificial Sequence
  Description of Artificial Sequence: Synthetic oligonucleotide
agccauuugaguuuugagu

SEQ ID NO: 294828 - RNA, 19 nt, Artificial Sequence
  Description of Artificial Sequence: Synthetic oligonucleotide
agcucuuagauaucagcuc

SEQ ID NO: 294829 - RNA, 19 nt, Artificial Sequence
  Description of Artificial Sequence: Synthetic oligonucleotide
guagcugaaucauaagaug

SEQ ID NO: 294830 - RNA, 19 nt, Artificial Sequence
  Description of Artificial Sequence: Synthetic oligonucleotide
cacucuuacugcacgaccg

SEQ ID NO: 294831 - RNA, 19 nt, Artificial Sequence
  Description of Artificial Sequence: Synthetic oligonucleotide
uaccaauucacugguaaag

SEQ ID NO: 294832 - RNA, 19 nt, Artificial Sequence
  Description of Artificial Sequence: Synthetic oligonucleotide
ucauugugaaucuucuccu

SEQ ID NO: 294833 - RNA, 19 nt, Artificial Sequence
  Description of Artificial Sequence: Synthetic oligonucleotide
aguaauagccucgucaacu

SEQ ID NO: 294834 - RNA, 19 nt, Artificial Sequence
  Description of Artificial Sequence: Synthetic oligonucleotide
uuuucgggcccacagggug

SEQ ID NO: 294835 - RNA, 19 nt, Artificial Sequence
  Description of Artificial Sequence: Synthetic oligonucleotide
aagcgaaguagauggacga

SEQ ID NO: 294836 - RNA, 19 nt, Artificial Sequence
  Description of Artificial Sequence: Synthetic oligonucleotide
aacggaucguugaacgagc

SEQ ID NO: 294837 - RNA, 19 nt, Artificial Sequence
  Description of Artificial Sequence: Synthetic oligonucleotide
cugaaucauaagaugguac

SEQ ID NO: 294838 - RNA, 19 nt, Artificial Sequence
  Description of Artificial Sequence: Synthetic oligonucleotide
ucuucggagugacagacuc

SEQ ID NO: 294839 - RNA, 19 nt, Artificial Sequence
  Description of Artificial Sequence: Synthetic oligonucleotide
uuaguucauuacaucagaa

SEQ ID NO: 294840 - RNA, 19 nt, Artificial Sequence
  Description of Artificial Sequence: Synthetic oligonucleotide
aagccauggguuuucggug

SEQ ID NO: 294841 - RNA, 19 nt, Artificial Sequence
  Description of Artificial Sequence: Synthetic oligonucleotide
uaagcuacugguagcggca

SEQ ID NO: 294842 - RNA, 19 nt, Artificial Sequence
  Description of Artificial Sequence: Synthetic oligonucleotide
uaagucagagggcacucgc

SEQ ID NO: 294843 - RNA, 19 nt, Artificial Sequence
  Description of Artificial Sequence: Synthetic oligonucleotide
ucgggaauaugacacugug

SEQ ID NO: 294844 - RNA, 19 nt, Artificial Sequence
  Description of Artificial Sequence: Synthetic oligonucleotide
acaucagucuucauacagc

SEQ ID NO: 294845 - RNA, 19 nt, Artificial Sequence
  Description of Artificial Sequence: Synthetic oligonucleotide
uugaguaagagaugucuuc

SEQ ID NO: 294846 - RNA, 19 nt, Artificial Sequence
  Description of Artificial Sequence: Synthetic oligonucleotide
ucuucguucgugucucagg

SEQ ID NO: 294847 - RNA, 19 nt, Artificial Sequence
  Description of Artificial Sequence: Synthetic oligonucleotide
ucuucauacagcgaacuuc

SEQ ID NO: 294848 - RNA, 19 nt, Artificial Sequence
  Description of Artificial Sequence: Synthetic oligonucleotide
aaucauaagaugguaccaa

SEQ ID NO: 294849 - RNA, 19 nt, Artificial Sequence
  Description of Artificial Sequence: Synthetic oligonucleotide
cacaucagucuucauacag

SEQ ID NO: 294850 - RNA, 19 nt, Artificial Sequence
  Description of Artificial Sequence: Synthetic oligonucleotide
ccuauguugagccaaagac

SEQ ID NO: 294851 - RNA, 19 nt, Artificial Sequence
  Description of Artificial Sequence: Synthetic oligonucleotide
gaacggauaguuucuccag

SEQ ID NO: 294852 - RNA, 19 nt, Artificial Sequence
  Description of Artificial Sequence: Synthetic oligonucleotide
gcuaccggcacccacauag

SEQ ID NO: 294853 - RNA, 19 nt, Artificial Sequence
  Description of Artificial Sequence: Synthetic oligonucleotide
auuacacaggccccaauga

SEQ ID NO: 294854 - RNA, 19 nt, Artificial Sequence
  Description of Artificial Sequence: Synthetic oligonucleotide
agauccaauaaauguauua

SEQ ID NO: 294855 - RNA, 19 nt, Artificial Sequence
  Description of Artificial Sequence: Synthetic oligonucleotide
ugggguuucguauguaaca

SEQ ID NO: 294856 - RNA, 19 nt, Artificial Sequence
  Description of Artificial Sequence: Synthetic oligonucleotide
aacuggaaugugaaucuuc

SEQ ID NO: 294857 - RNA, 19 nt, Artificial Sequence
  Description of Artificial Sequence: Synthetic oligonucleotide
cuguuaguucauuacauca

SEQ ID NO: 294858 - RNA, 19 nt, Artificial Sequence
  Description of Artificial Sequence: Synthetic oligonucleotide
acucuuacugcacgaccgc

SEQ ID NO: 294859 - RNA, 19 nt, Artificial Sequence
  Description of Artificial Sequence: Synthetic oligonucleotide
cauagcuguggcaacuacc

SEQ ID NO: 294860 - RNA, 19 nt, Artificial Sequence
  Description of Artificial Sequence: Synthetic oligonucleotide
uagauaucagcucacucuu

SEQ ID NO: 294861 - RNA, 19 nt, Artificial Sequence
  Description of Artificial Sequence: Synthetic oligonucleotide
acgaugcuaaacaagucac

SEQ ID NO: 294862 - RNA, 19 nt, Artificial Sequence
  Description of Artificial Sequence: Synthetic oligonucleotide
uauuugugggguuucguau

SEQ ID NO: 294863 - RNA, 19 nt, Artificial Sequence
  Description of Artificial Sequence: Synthetic oligonucleotide
agaagcuccauucccaaau

SEQ ID NO: 294864 - RNA, 19 nt, Artificial Sequence
  Description of Artificial Sequence: Synthetic oligonucleotide
caugacccagccuucuucg

SEQ ID NO: 294865 - RNA, 19 nt, Artificial Sequence
  Description of Artificial Sequence: Synthetic oligonucleotide
acacuguuaguucauuaca

SEQ ID NO: 294866 - RNA, 19 nt, Artificial Sequence
  Description of Artificial Sequence: Synthetic oligonucleotide
gaacggaucguugaacgag

SEQ ID NO: 294867 - RNA, 19 nt, Artificial Sequence
  Description of Artificial Sequence: Synthetic oligonucleotide
ucacucuuacugcacgacc

SEQ ID NO: 294868 - RNA, 19 nt, Artificial Sequence
  Description of Artificial Sequence: Synthetic oligonucleotide
ucguucgugucucaggagu

SEQ ID NO: 294869 - RNA, 19 nt, Artificial Sequence
  Description of Artificial Sequence: Synthetic oligonucleotide
ucguugaacgagcccaugc

SEQ ID NO: 294870 - RNA, 19 nt, Artificial Sequence
  Description of Artificial Sequence: Synthetic oligonucleotide
caucuaaacccuauguuga

SEQ ID NO: 294871 - RNA, 19 nt, Artificial Sequence
  Description of Artificial Sequence: Synthetic oligonucleotide
aacgagcccaugcuggugu

SEQ ID NO: 294872 - RNA, 19 nt, Artificial Sequence
  Description of Artificial Sequence: Synthetic oligonucleotide
cugauuaucugacugcuga

SEQ ID NO: 294873 - RNA, 19 nt, Artificial Sequence
  Description of Artificial Sequence: Synthetic oligonucleotide
uggcaauuaccuuccacug

SEQ ID NO: 294874 - RNA, 19 nt, Artificial Sequence
  Description of Artificial Sequence: Synthetic oligonucleotide
uuaaugugcuaauuugcua

SEQ ID NO: 294875 - RNA, 19 nt, Artificial Sequence
  Description of Artificial Sequence: Synthetic oligonucleotide
uuauuugugggguuucgua

SEQ ID NO: 294876 - RNA, 19 nt, Artificial Sequence
  Description of Artificial Sequence: Synthetic oligonucleotide
ugucggucuucacucuugg

SEQ ID NO: 294877 - RNA, 19 nt, Artificial Sequence
  Description of Artificial Sequence: Synthetic oligonucleotide
uuucccauguacuauuauu

SEQ ID NO: 294878 - RNA, 19 nt, Artificial Sequence
  Description of Artificial Sequence: Synthetic oligonucleotide
guaggcaagccauugaaaa

SEQ ID NO: 294879 - RNA, 19 nt, Artificial Sequence
  Description of Artificial Sequence: Synthetic oligonucleotide
uuagaguauauggccaucu

SEQ ID NO: 294880 - RNA, 19 nt, Artificial Sequence
  Description of Artificial Sequence: Synthetic oligonucleotide
ucuuauuugugggguuucg

SEQ ID NO: 294881 - RNA, 19 nt, Artificial Sequence
  Description of Artificial Sequence: Synthetic oligonucleotide
aguagcugaaucauaagau

SEQ ID NO: 294882 - RNA, 19 nt, Artificial Sequence
  Description of Artificial Sequence: Synthetic oligonucleotide
aucuaaacccuauguugag

SEQ ID NO: 294883 - RNA, 19 nt, Artificial Sequence
  Description of Artificial Sequence: Synthetic oligonucleotide
ugcacgaccgcaacugaug

SEQ ID NO: 294884 - RNA, 19 nt, Artificial Sequence
  Description of Artificial Sequence: Synthetic oligonucleotide
gaaacuugaagaggcgggc

SEQ ID NO: 294885 - RNA, 19 nt, Artificial Sequence
  Description of Artificial Sequence: Synthetic oligonucleotide
aagucagagggcacucgcc

SEQ ID NO: 294886 - RNA, 19 nt, Artificial Sequence
  Description of Artificial Sequence: Synthetic oligonucleotide
uugaacggauaguuucucc

SEQ ID NO: 294887 - RNA, 19 nt, Artificial Sequence
  Description of Artificial Sequence: Synthetic oligonucleotide
uucguauguaacagccagc

SEQ ID NO: 294888 - RNA, 19 nt, Artificial Sequence
  Description of Artificial Sequence: Synthetic oligonucleotide
caaaugagacuaaaucuga

SEQ ID NO: 294889 - RNA, 19 nt, Artificial Sequence
  Description of Artificial Sequence: Synthetic oligonucleotide
agacugagagcuucccggg

SEQ ID NO: 294890 - RNA, 19 nt, Artificial Sequence
  Description of Artificial Sequence: Synthetic oligonucleotide
uuuugagucuuuucagcau

SEQ ID NO: 294891 - RNA, 19 nt, Artificial Sequence
  Description of Artificial Sequence: Synthetic oligonucleotide
uuucgggaauaugacacug

SEQ ID NO: 294892 - RNA, 19 nt, Artificial Sequence
  Description of Artificial Sequence: Synthetic oligonucleotide
uaaauuaauugagcacuac

SEQ ID NO: 294893 - RNA, 19 nt, Artificial Sequence
  Description of Artificial Sequence: Synthetic oligonucleotide
aaagucugguggaacaggu

SEQ ID NO: 294894 - RNA, 19 nt, Artificial Sequence
  Description of Artificial Sequence: Synthetic oligonucleotide
uuacacaggccccaaugaa

SEQ ID NO: 294895 - RNA, 19 nt, Artificial Sequence
  Description of Artificial Sequence: Synthetic oligonucleotide
ucuaaacccuauguugagc

SEQ ID NO: 294896 - RNA, 19 nt, Artificial Sequence
  Description of Artificial Sequence: Synthetic oligonucleotide
uuaagucagagggcacucg

SEQ ID NO: 294897 - RNA, 19 nt, Artificial Sequence
  Description of Artificial Sequence: Synthetic oligonucleotide
ccaucuaaacccuauguug

SEQ ID NO: 294898 - RNA, 19 nt, Artificial Sequence
  Description of Artificial Sequence: Synthetic oligonucleotide
ucacugucgcuacucauuc

SEQ ID NO: 294899 - RNA, 19 nt, Artificial Sequence
  Description of Artificial Sequence: Synthetic oligonucleotide
ggcuaaggugauuaucugg

SEQ ID NO: 294900 - RNA, 19 nt, Artificial Sequence
  Description of Artificial Sequence: Synthetic oligonucleotide
gguuucguauguaacagcc

SEQ ID NO: 294901 - RNA, 19 nt, Artificial Sequence
  Description of Artificial Sequence: Synthetic oligonucleotide
gaguauauggccaucuaaa

SEQ ID NO: 294902 - RNA, 19 nt, Artificial Sequence
  Description of Artificial Sequence: Synthetic oligonucleotide
aucugguggugacaaaucu

SEQ ID NO: 294903 - RNA, 19 nt, Artificial Sequence
  Description of Artificial Sequence: Synthetic oligonucleotide
ucccauguacuauuauugu

SEQ ID NO: 294904 - RNA, 19 nt, Artificial Sequence
  Description of Artificial Sequence: Synthetic oligonucleotide
gaaucauaagaugguacca

SEQ ID NO: 294905 - RNA, 19 nt, Artificial Sequence
  Description of Artificial Sequence: Synthetic oligonucleotide
acgaccgcaacugaugcuc

SEQ ID NO: 294906 - RNA, 19 nt, Artificial Sequence
  Description of Artificial Sequence: Synthetic oligonucleotide
ggaaugugaaucuucaucu

SEQ ID NO: 294907 - RNA, 19 nt, Artificial Sequence
  Description of Artificial Sequence: Synthetic oligonucleotide
uccugaaguaaagauucca

SEQ ID NO: 294908 - RNA, 19 nt, Artificial Sequence
  Description of Artificial Sequence: Synthetic oligonucleotide
guugaacgagcccaugcug

SEQ ID NO: 294909 - RNA, 19 nt, Artificial Sequence
  Description of Artificial Sequence: Synthetic oligonucleotide
augcucuaccuccugaagu

SEQ ID NO: 294910 - RNA, 19 nt, Artificial Sequence
  Description of Artificial Sequence: Synthetic oligonucleotide
uacugcacgaccgcaacug

SEQ ID NO: 294911 - RNA, 19 nt, Artificial Sequence
  Description of Artificial Sequence: Synthetic oligonucleotide
ucagcgucgauuuguucac

SEQ ID NO: 294912 - RNA, 19 nt, Artificial Sequence
  Description of Artificial Sequence: Synthetic oligonucleotide
aauuaccuuccacugccuu

SEQ ID NO: 294913 - RNA, 19 nt, Artificial Sequence
  Description of Artificial Sequence: Synthetic oligonucleotide
gaagccauggguuuucggu

SEQ ID NO: 294914 - RNA, 19 nt, Artificial Sequence
  Description of Artificial Sequence: Synthetic oligonucleotide
gguacuauuucagguagag

SEQ ID NO: 294915 - RNA, 19 nt, Artificial Sequence
  Description of Artificial Sequence: Synthetic oligonucleotide
ucgauuuguucaccaucag

SEQ ID NO: 294916 - RNA, 19 nt, Artificial Sequence
  Description of Artificial Sequence: Synthetic oligonucleotide
uaucugguggugacaaauc

SEQ ID NO: 294917 - RNA, 19 nt, Artificial Sequence
  Description of Artificial Sequence: Synthetic oligonucleotide
caagcugccuuuguuaaug

SEQ ID NO: 294918 - RNA, 19 nt, Artificial Sequence
  Description of Artificial Sequence: Synthetic oligonucleotide
gauuaucugguggugacaa

SEQ ID NO: 294919 - RNA, 19 nt, Artificial Sequence
  Description of Artificial Sequence: Synthetic oligonucleotide
gaauccaaagcuuugcauu

SEQ ID NO: 294920 - RNA, 19 nt, Artificial Sequence
  Description of Artificial Sequence: Synthetic oligonucleotide
gugauuaucugguggugac

SEQ ID NO: 294921 - RNA, 19 nt, Artificial Sequence
  Description of Artificial Sequence: Synthetic oligonucleotide
guaauagccucgucaacuc

SEQ ID NO: 294922 - RNA, 19 nt, Artificial Sequence
  Description of Artificial Sequence: Synthetic oligonucleotide
gagagcaacgaugcuaaac

SEQ ID NO: 294923 - RNA, 19 nt, Artificial Sequence
  Description of Artificial Sequence: Synthetic oligonucleotide
aaacccuauguugagccaa

SEQ ID NO: 294924 - RNA, 19 nt, Artificial Sequence
  Description of Artificial Sequence: Synthetic oligonucleotide
agcaacgaugcuaaacaag

SEQ ID NO: 294925 - RNA, 19 nt, Artificial Sequence
  Description of Artificial Sequence: Synthetic oligonucleotide
uucgggaauaugacacugu

SEQ ID NO: 294926 - RNA, 19 nt, Artificial Sequence
  Description of Artificial Sequence: Synthetic oligonucleotide
augcuaaacaagucacaga

SEQ ID NO: 294927 - RNA, 19 nt, Artificial Sequence
  Description of Artificial Sequence: Synthetic oligonucleotide
uugucggucuucacucuug

SEQ ID NO: 294928 - RNA, 19 nt, Artificial Sequence
  Description of Artificial Sequence: Synthetic oligonucleotide
uaaacccuauguugagcca

SEQ ID NO: 294929 - RNA, 19 nt, Artificial Sequence
  Description of Artificial Sequence: Synthetic oligonucleotide
cuuacugcacgaccgcaac

SEQ ID NO: 294930 - RNA, 19 nt, Artificial Sequence
  Description of Artificial Sequence: Synthetic oligonucleotide
ucuucugacccaugagcgu

SEQ ID NO: 294931 - RNA, 19 nt, Artificial Sequence
  Description of Artificial Sequence: Synthetic oligonucleotide
cugagaucgggacagcuca

SEQ ID NO: 294932 - RNA, 19 nt, Artificial Sequence
  Description of Artificial Sequence: Synthetic oligonucleotide
uuuucagcgucgauuuguu

SEQ ID NO: 294933 - RNA, 19 nt, Artificial Sequence
  Description of Artificial Sequence: Synthetic oligonucleotide
gcuaaauuaauugagcacu

SEQ ID NO: 294934 - RNA, 19 nt, Artificial Sequence
  Description of Artificial Sequence: Synthetic oligonucleotide
uuuaagucagagggcacuc

SEQ ID NO: 294935 - RNA, 19 nt, Artificial Sequence
  Description of Artificial Sequence: Synthetic oligonucleotide
acacucaaugucacugucg

SEQ ID NO: 294936 - RNA, 19 nt, Artificial Sequence
  Description of Artificial Sequence: Synthetic oligonucleotide
uguaacuccccagcuucag

SEQ ID NO: 294937 - RNA, 19 nt, Artificial Sequence
  Description of Artificial Sequence: Synthetic oligonucleotide
gucgauuuguucaccauca

SEQ ID NO: 294938 - RNA, 19 nt, Artificial Sequence
  Description of Artificial Sequence: Synthetic oligonucleotide
uccauacugcagacaagcu

SEQ ID NO: 294939 - RNA, 19 nt, Artificial Sequence
  Description of Artificial Sequence: Synthetic oligonucleotide
cugauaauuuugagcacca

SEQ ID NO: 294940 - RNA, 19 nt, Artificial Sequence
  Description of Artificial Sequence: Synthetic oligonucleotide
aggugauucacuucaucuu

SEQ ID NO: 294941 - RNA, 19 nt, Artificial Sequence
  Description of Artificial Sequence: Synthetic oligonucleotide
agacucccugcuauggccc

SEQ ID NO: 294942 - RNA, 19 nt, Artificial Sequence
  Description of Artificial Sequence: Synthetic oligonucleotide
accaauucacugguaaagu

SEQ ID NO: 294943 - RNA, 19 nt, Artificial Sequence
  Description of Artificial Sequence: Synthetic oligonucleotide
gauggacgaggcuguaaac

SEQ ID NO: 294944 - RNA, 19 nt, Artificial Sequence
  Description of Artificial Sequence: Synthetic oligonucleotide
ugucgcuacucauuccuuc

SEQ ID NO: 294945 - RNA, 19 nt, Artificial Sequence
  Description of Artificial Sequence: Synthetic oligonucleotide
ugauuaucugacugcugau

SEQ ID NO: 294946 - RNA, 19 nt, Artificial Sequence
  Description of Artificial Sequence: Synthetic oligonucleotide
cucuccauacugcagacaa

SEQ ID NO: 294947 - RNA, 19 nt, Artificial Sequence
  Description of Artificial Sequence: Synthetic oligonucleotide
guaaaccccacagauuuuc

SEQ ID NO: 294948 - RNA, 19 nt, Artificial Sequence
  Description of Artificial Sequence: Synthetic oligonucleotide
uuucggugaacuugcugaa

SEQ ID NO: 294949 - RNA, 19 nt, Artificial Sequence
  Description of Artificial Sequence: Synthetic oligonucleotide
cucuuagauaucagcucac

SEQ ID NO: 294950 - RNA, 19 nt, Artificial Sequence
  Description of Artificial Sequence: Synthetic oligonucleotide
gcaugucagagcaugaccc

SEQ ID NO: 294951 - RNA, 19 nt, Artificial Sequence
  Description of Artificial Sequence: Synthetic oligonucleotide
ugcugauaauuuugagcac

SEQ ID NO: 294952 - RNA, 19 nt, Artificial Sequence
  Description of Artificial Sequence: Synthetic oligonucleotide
uccuguaaucuaccagagu

SEQ ID NO: 294953 - RNA, 19 nt, Artificial Sequence
  Description of Artificial Sequence: Synthetic oligonucleotide
gaggcgggcuauaaacagg

SEQ ID NO: 294954 - RNA, 19 nt, Artificial Sequence
  Description of Artificial Sequence: Synthetic oligonucleotide
uuaucugacugcugauaau

SEQ ID NO: 294955 - RNA, 19 nt, Artificial Sequence
  Description of Artificial Sequence: Synthetic oligonucleotide
cuggguaaacuuuuaaccu

SEQ ID NO: 294956 - RNA, 19 nt, Artificial Sequence
  Description of Artificial Sequence: Synthetic oligonucleotide
auaucagcucacucuuacu

SEQ ID NO: 294957 - RNA, 19 nt, Artificial Sequence
  Description of Artificial Sequence: Synthetic oligonucleotide
uguaacagccagcgaccga

SEQ ID NO: 294958 - RNA, 19 nt, Artificial Sequence
  Description of Artificial Sequence: Synthetic oligonucleotide
uaccagaguuuucgggccc

SEQ ID NO: 294959 - RNA, 19 nt, Artificial Sequence
  Description of Artificial Sequence: Synthetic oligonucleotide
auaugacacugugggcugc

SEQ ID NO: 294960 - RNA, 19 nt, Artificial Sequence
  Description of Artificial Sequence: Synthetic oligonucleotide
uuugaacggauaguuucuc

SEQ ID NO: 294961 - RNA, 19 nt, Artificial Sequence
  Description of Artificial Sequence: Synthetic oligonucleotide
gaagcuccauucccaaauc

SEQ ID NO: 294962 - RNA, 19 nt, Artificial Sequence
  Description of Artificial Sequence: Synthetic oligonucleotide
ugaacgagcccaugcuggu

SEQ ID NO: 294963 - RNA, 19 nt, Artificial Sequence
  Description of Artificial Sequence: Synthetic oligonucleotide
agacaaagucuggcagucc

SEQ ID NO: 294964 - RNA, 19 nt, Artificial Sequence
  Description of Artificial Sequence: Synthetic oligonucleotide
gguaccaauucacugguaa

SEQ ID NO: 294965 - RNA, 19 nt, Artificial Sequence
  Description of Artificial Sequence: Synthetic oligonucleotide
cuggcaauuaccuuccacu

SEQ ID NO: 294966 - RNA, 19 nt, Artificial Sequence
  Description of Artificial Sequence: Synthetic oligonucleotide
auguaacagccagcgaccg

SEQ ID NO: 294967 - RNA, 19 nt, Artificial Sequence
  Description of Artificial Sequence: Synthetic oligonucleotide
gcucuuagauaucagcuca

SEQ ID NO: 294968 - RNA, 19 nt, Artificial Sequence
  Description of Artificial Sequence: Synthetic oligonucleotide
uugggcagaauaucaccaa

SEQ ID NO: 294969 - RNA, 19 nt, Artificial Sequence
  Description of Artificial Sequence: Synthetic oligonucleotide
uucguucgugucucaggag

SEQ ID NO: 294970 - RNA, 19 nt, Artificial Sequence
  Description of Artificial Sequence: Synthetic oligonucleotide
ccuuucauaucagacagug

SEQ ID NO: 294971 - RNA, 19 nt, Artificial Sequence
  Description of Artificial Sequence: Synthetic oligonucleotide
ggguaaacuuuuaaccucc

SEQ ID NO: 294972 - RNA, 19 nt, Artificial Sequence
  Description of Artificial Sequence: Synthetic oligonucleotide
uagaguauauggccaucua

SEQ ID NO: 294973 - RNA, 19 nt, Artificial Sequence
  Description of Artificial Sequence: Synthetic oligonucleotide
guuaaugugcuaauuugcu

SEQ ID NO: 294974 - RNA, 19 nt, Artificial Sequence
  Description of Artificial Sequence: Synthetic oligonucleotide
cuaggugauucacuucauc

SEQ ID NO: 294975 - RNA, 19 nt, Artificial Sequence
  Description of Artificial Sequence: Synthetic oligonucleotide
ggaauaugacacugugggc

SEQ ID NO: 294976 - RNA, 19 nt, Artificial Sequence
  Description of Artificial Sequence: Synthetic oligonucleotide
ucgugucucaggaguguca

SEQ ID NO: 294977 - RNA, 19 nt, Artificial Sequence
  Description of Artificial Sequence: Synthetic oligonucleotide
caacgaugcuaaacaaguc

SEQ ID NO: 294978 - RNA, 19 nt, Artificial Sequence
  Description of Artificial Sequence: Synthetic oligonucleotide
agcgucgauuuguucacca

SEQ ID NO: 294979 - RNA, 19 nt, Artificial Sequence
  Description of Artificial Sequence: Synthetic oligonucleotide
ugugggcuguaacucccca

SEQ ID NO: 294980 - RNA, 19 nt, Artificial Sequence
  Description of Artificial Sequence: Synthetic oligonucleotide
gagcauaaaugcccucuuc

SEQ ID NO: 294981 - RNA, 19 nt, Artificial Sequence
  Description of Artificial Sequence: Synthetic oligonucleotide
ucuaggugauucacuucau

SEQ ID NO: 294982 - RNA, 19 nt, Artificial Sequence
  Description of Artificial Sequence: Synthetic oligonucleotide
ggcaauuaccuuccacugc

SEQ ID NO: 294983 - RNA, 19 nt, Artificial Sequence
  Description of Artificial Sequence: Synthetic oligonucleotide
auagucagucucucuuuaa

SEQ ID NO: 294984 - RNA, 19 nt, Artificial Sequence
  Description of Artificial Sequence: Synthetic oligonucleotide
gcauugucggucuucacuc

SEQ ID NO: 294985 - RNA, 19 nt, Artificial Sequence
  Description of Artificial Sequence: Synthetic oligonucleotide
ggaucguugaacgagccca

SEQ ID NO: 294986 - RNA, 19 nt, Artificial Sequence
  Description of Artificial Sequence: Synthetic oligonucleotide
auuaaaggaucaauaucua

SEQ ID NO: 294987 - RNA, 19 nt, Artificial Sequence
  Description of Artificial Sequence: Synthetic oligonucleotide
gacucccugcuauggcccg

SEQ ID NO: 294988 - RNA, 19 nt, Artificial Sequence
  Description of Artificial Sequence: Synthetic oligonucleotide
agauccagauccaggucuc

SEQ ID NO: 294989 - RNA, 19 nt, Artificial Sequence
  Description of Artificial Sequence: Synthetic oligonucleotide
ucggggagagcugugucug

SEQ ID NO: 294990 - RNA, 19 nt, Artificial Sequence
  Description of Artificial Sequence: Synthetic oligonucleotide
ggcaacuaccuggagaccc

SEQ ID NO: 294991 - RNA, 19 nt, Artificial Sequence
  Description of Artificial Sequence: Synthetic oligonucleotide
cugcauuccuuccaggcga

SEQ ID NO: 294992 - RNA, 19 nt, Artificial Sequence
  Description of Artificial Sequence: Synthetic oligonucleotide
gagcucuuagauaucagcu

SEQ ID NO: 294993 - RNA, 19 nt, Artificial Sequence
  Description of Artificial Sequence: Synthetic oligonucleotide
aagcuacugguagcggcag

SEQ ID NO: 294994 - RNA, 19 nt, Artificial Sequence
  Description of Artificial Sequence: Synthetic oligonucleotide
auaguuccagaaauacaga

SEQ ID NO: 294995 - RNA, 19 nt, Artificial Sequence
  Description of Artificial Sequence: Synthetic oligonucleotide
uaccggcacccacauagcu

SEQ ID NO: 294996 - RNA, 19 nt, Artificial Sequence
  Description of Artificial Sequence: Synthetic oligonucleotide
ucgcuacucauuccuuccu

SEQ ID NO: 294997 - RNA, 19 nt, Artificial Sequence
  Description of Artificial Sequence: Synthetic oligonucleotide
acggaucguugaacgagcc

SEQ ID NO: 294998 - RNA, 19 nt, Artificial Sequence
  Description of Artificial Sequence: Synthetic oligonucleotide
gcgaaguagauggacgagg

SEQ ID NO: 294999 - RNA, 19 nt, Artificial Sequence
  Description of Artificial Sequence: Synthetic oligonucleotide
gguccuuaagauccaauaa

SEQ ID NO: 295000 - RNA, 19 nt, Artificial Sequence
  Description of Artificial Sequence: Synthetic oligonucleotide
ucgccacauggccugcugc

SEQ ID NO: 295001 - RNA, 19 nt, Artificial Sequence
  Description of Artificial Sequence: Synthetic oligonucleotide
caucuaggugauucacuuc

SEQ ID NO: 295002 - RNA, 19 nt, Artificial Sequence
  Description of Artificial Sequence: Synthetic oligonucleotide
cgaugacuuugcuagaagc

SEQ ID NO: 295003 - RNA, 19 nt, Artificial Sequence
  Description of Artificial Sequence: Synthetic oligonucleotide
ugcuccgguccuuaagauc

SEQ ID NO: 295004 - RNA, 19 nt, Artificial Sequence
  Description of Artificial Sequence: Synthetic oligonucleotide
gucgcacacugccucugcg

SEQ ID NO: 295005 - RNA, 19 nt, Artificial Sequence
  Description of Artificial Sequence: Synthetic oligonucleotide
aagucugguggaacaggug

SEQ ID NO: 295006 - RNA, 19 nt, Artificial Sequence
  Description of Artificial Sequence: Synthetic oligonucleotide
agcgaaguagauggacgag

SEQ ID NO: 295007 - RNA, 19 nt, Artificial Sequence
  Description of Artificial Sequence: Synthetic oligonucleotide
ugauaauuuugagcaccaa

SEQ ID NO: 295008 - RNA, 19 nt, Artificial Sequence
  Description of Artificial Sequence: Synthetic oligonucleotide
guucacuauuacacaggcc

SEQ ID NO: 295009 - RNA, 19 nt, Artificial Sequence
  Description of Artificial Sequence: Synthetic oligonucleotide
gagcaacgaugcuaaacaa

SEQ ID NO: 295010 - RNA, 19 nt, Artificial Sequence
  Description of Artificial Sequence: Synthetic oligonucleotide
cuuccguuggucuuucucu

SEQ ID NO: 295011 - RNA, 19 nt, Artificial Sequence
  Description of Artificial Sequence: Synthetic oligonucleotide
ugccaucuaggugauucac

SEQ ID NO: 295012 - RNA, 19 nt, Artificial Sequence
  Description of Artificial Sequence: Synthetic oligonucleotide
agagucgcacacugccucu

SEQ ID NO: 295013 - RNA, 19 nt, Artificial Sequence
  Description of Artificial Sequence: Synthetic oligonucleotide
ucucuggcgcaaagugcug

SEQ ID NO: 295014 - RNA, 19 nt, Artificial Sequence
  Description of Artificial Sequence: Synthetic oligonucleotide
aagauccaauaaauguauu

SEQ ID NO: 295015 - RNA, 19 nt, Artificial Sequence
  Description of Artificial Sequence: Synthetic oligonucleotide
uaacagccagcgaccgaug

SEQ ID NO: 295016 - RNA, 19 nt, Artificial Sequence
  Description of Artificial Sequence: Synthetic oligonucleotide
cuuagaguauauggccauc

SEQ ID NO: 295017 - RNA, 19 nt, Artificial Sequence
  Description of Artificial Sequence: Synthetic oligonucleotide
agagcaugacccagccuuc

SEQ ID NO: 295018 - RNA, 19 nt, Artificial Sequence
  Description of Artificial Sequence: Synthetic oligonucleotide
ggguuuucggugaacuugc

SEQ ID NO: 295019 - RNA, 19 nt, Artificial Sequence
  Description of Artificial Sequence: Synthetic oligonucleotide
cuagaagcuccauucccaa

SEQ ID NO: 295020 - RNA, 19 nt, Artificial Sequence
  Description of Artificial Sequence: Synthetic oligonucleotide
cucucuuacagaagcugaa

SEQ ID NO: 295021 - RNA, 19 nt, Artificial Sequence
  Description of Artificial Sequence: Synthetic oligonucleotide
uuucagcgucgauuuguuc

SEQ ID NO: 295022 - RNA, 19 nt, Artificial Sequence
  Description of Artificial Sequence: Synthetic oligonucleotide
ugagaucgggacagcucaa

SEQ ID NO: 295023 - RNA, 19 nt, Artificial Sequence
  Description of Artificial Sequence: Synthetic oligonucleotide
uccucguucucggugucac

SEQ ID NO: 295024 - RNA, 19 nt, Artificial Sequence
  Description of Artificial Sequence: Synthetic oligonucleotide
gaagcaugucagagcauga

SEQ ID NO: 295025 - RNA, 19 nt, Artificial Sequence
  Description of Artificial Sequence: Synthetic oligonucleotide
auauuucagggcccaggua

SEQ ID NO: 295026 - RNA, 19 nt, Artificial Sequence
  Description of Artificial Sequence: Synthetic oligonucleotide
uauggccaucuaaacccua

SEQ ID NO: 295027 - RNA, 19 nt, Artificial Sequence
  Description of Artificial Sequence: Synthetic oligonucleotide
cuaccggcacccacauagc

SEQ ID NO: 295028 - RNA, 19 nt, Artificial Sequence
  Description of Artificial Sequence: Synthetic oligonucleotide
agaucgggacagcucaaua

SEQ ID NO: 295029 - RNA, 19 nt, Artificial Sequence
  Description of Artificial Sequence: Synthetic oligonucleotide
agugacagacucccugcua

SEQ ID NO: 295030 - RNA, 19 nt, Artificial Sequence
  Description of Artificial Sequence: Synthetic oligonucleotide
acugcacgaccgcaacuga

SEQ ID NO: 295031 - RNA, 19 nt, Artificial Sequence
  Description of Artificial Sequence: Synthetic oligonucleotide
cuguucauaagucuauuuu

SEQ ID NO: 295032 - RNA, 19 nt, Artificial Sequence
  Description of Artificial Sequence: Synthetic oligonucleotide
aggcgggcuauaaacagga

SEQ ID NO: 295033 - RNA, 19 nt, Artificial Sequence
  Description of Artificial Sequence: Synthetic oligonucleotide
caguaggcaagccauugaa

SEQ ID NO: 295034 - RNA, 19 nt, Artificial Sequence
  Description of Artificial Sequence: Synthetic oligonucleotide
gcuacugguagcggcagag

SEQ ID NO: 295035 - RNA, 19 nt, Artificial Sequence
  Description of Artificial Sequence: Synthetic oligonucleotide
cacugucgcuacucauucc

SEQ ID NO: 295036 - RNA, 19 nt, Artificial Sequence
  Description of Artificial Sequence: Synthetic oligonucleotide
augugggcuguaacucccc

SEQ ID NO: 295037 - RNA, 19 nt, Artificial Sequence
  Description of Artificial Sequence: Synthetic oligonucleotide
auguugagccaaagacagg

SEQ ID NO: 295038 - RNA, 19 nt, Artificial Sequence
  Description of Artificial Sequence: Synthetic oligonucleotide
gcaacgaugcuaaacaagu

SEQ ID NO: 295039 - RNA, 19 nt, Artificial Sequence
  Description of Artificial Sequence: Synthetic oligonucleotide
aguaggcaagccauugaaa

SEQ ID NO: 295040 - RNA, 19 nt, Artificial Sequence
  Description of Artificial Sequence: Synthetic oligonucleotide
cacuguuaguucauuacau

SEQ ID NO: 295041 - RNA, 19 nt, Artificial Sequence
  Description of Artificial Sequence: Synthetic oligonucleotide
caaugacgccaugugucag

SEQ ID NO: 295042 - RNA, 19 nt, Artificial Sequence
  Description of Artificial Sequence: Synthetic oligonucleotide
uucugacccaugagcguua

SEQ ID NO: 295043 - RNA, 19 nt, Artificial Sequence
  Description of Artificial Sequence: Synthetic oligonucleotide
auauggccaucuaaacccu

SEQ ID NO: 295044 - RNA, 19 nt, Artificial Sequence
  Description of Artificial Sequence: Synthetic oligonucleotide
cugugggcugcaaaagcga

SEQ ID NO: 295045 - RNA, 19 nt, Artificial Sequence
  Description of Artificial Sequence: Synthetic oligonucleotide
accgaugacuuugcuagaa

SEQ ID NO: 295046 - RNA, 19 nt, Artificial Sequence
  Description of Artificial Sequence: Synthetic oligonucleotide
gcacgaccgcaacugaugc

SEQ ID NO: 295047 - RNA, 19 nt, Artificial Sequence
  Description of Artificial Sequence: Synthetic oligonucleotide
ugcuauggcccgagcugac

SEQ ID NO: 295048 - RNA, 19 nt, Artificial Sequence
  Description of Artificial Sequence: Synthetic oligonucleotide
acuauuacacaggccccaa

SEQ ID NO: 295049 - RNA, 19 nt, Artificial Sequence
  Description of Artificial Sequence: Synthetic oligonucleotide
cuugaguaagagaugucuu

SEQ ID NO: 295050 - RNA, 19 nt, Artificial Sequence
  Description of Artificial Sequence: Synthetic oligonucleotide
guaaucuaccagaguuuuc

SEQ ID NO: 295051 - RNA, 19 nt, Artificial Sequence
  Description of Artificial Sequence: Synthetic oligonucleotide
gccucugcgugcuuucugc

SEQ ID NO: 295052 - RNA, 19 nt, Artificial Sequence
  Description of Artificial Sequence: Synthetic oligonucleotide
gaacgagcccaugcuggug

SEQ ID NO: 295053 - RNA, 19 nt, Artificial Sequence
  Description of Artificial Sequence: Synthetic oligonucleotide
uccaggcgaccuccuuuug

SEQ ID NO: 295054 - RNA, 19 nt, Artificial Sequence
  Description of Artificial Sequence: Synthetic oligonucleotide
aacccuauguugagccaaa

SEQ ID NO: 295055 - RNA, 19 nt, Artificial Sequence
  Description of Artificial Sequence: Synthetic oligonucleotide
gggcuaaggugauuaucug

SEQ ID NO: 295056 - RNA, 19 nt, Artificial Sequence
  Description of Artificial Sequence: Synthetic oligonucleotide
uggcccgagcugacuuggg

SEQ ID NO: 295057 - RNA, 19 nt, Artificial Sequence
  Description of Artificial Sequence: Synthetic oligonucleotide
uuaggaucucugagcucuu

SEQ ID NO: 295058 - RNA, 19 nt, Artificial Sequence
  Description of Artificial Sequence: Synthetic oligonucleotide
ggaacggaucguugaacga

SEQ ID NO: 295059 - RNA, 19 nt, Artificial Sequence
  Description of Artificial Sequence: Synthetic oligonucleotide
guggaacaggugugguaac

SEQ ID NO: 295060 - RNA, 19 nt, Artificial Sequence
  Description of Artificial Sequence: Synthetic oligonucleotide
auauaacaagccagcugau

SEQ ID NO: 295061 - RNA, 19 nt, Artificial Sequence
  Description of Artificial Sequence: Synthetic oligonucleotide
gggcacucgccacauggcc

SEQ ID NO: 295062 - RNA, 19 nt, Artificial Sequence
  Description of Artificial Sequence: Synthetic oligonucleotide
cuaccuccugaaguaaaga

SEQ ID NO: 295063 - RNA, 19 nt, Artificial Sequence
  Description of Artificial Sequence: Synthetic oligonucleotide
aggccccaaugaaacuuac

SEQ ID NO: 295064 - RNA, 19 nt, Artificial Sequence
  Description of Artificial Sequence: Synthetic oligonucleotide
ggggcuaaggugauuaucu

SEQ ID NO: 295065 - RNA, 19 nt, Artificial Sequence
  Description of Artificial Sequence: Synthetic oligonucleotide
ugguaccaauucacuggua

SEQ ID NO: 295066 - RNA, 19 nt, Artificial Sequence
  Description of Artificial Sequence: Synthetic oligonucleotide
gaccgaugacuuugcuaga

SEQ ID NO: 295067 - RNA, 19 nt, Artificial Sequence
  Description of Artificial Sequence: Synthetic oligonucleotide
cucaauagucagucucucu

SEQ ID NO: 295068 - RNA, 19 nt, Artificial Sequence
  Description of Artificial Sequence: Synthetic oligonucleotide
gcacucgccacauggccug

SEQ ID NO: 295069 - RNA, 19 nt, Artificial Sequence
  Description of Artificial Sequence: Synthetic oligonucleotide
acccuauguugagccaaag

SEQ ID NO: 295070 - RNA, 19 nt, Artificial Sequence
  Description of Artificial Sequence: Synthetic oligonucleotide
aucguugaacgagcccaug

SEQ ID NO: 295071 - RNA, 19 nt, Artificial Sequence
  Description of Artificial Sequence: Synthetic oligonucleotide
agcuacugguagcggcaga

SEQ ID NO: 295072 - RNA, 19 nt, Artificial Sequence
  Description of Artificial Sequence: Synthetic oligonucleotide
gcccgagcugacuugggug

SEQ ID NO: 295073 - RNA, 19 nt, Artificial Sequence
  Description of Artificial Sequence: Synthetic oligonucleotide
ugagcguuaugagcuuauu

SEQ ID NO: 295074 - RNA, 19 nt, Artificial Sequence
  Description of Artificial Sequence: Synthetic oligonucleotide
uggcaacuaccuggagacc

SEQ ID NO: 295075 - RNA, 19 nt, Artificial Sequence
  Description of Artificial Sequence: Synthetic oligonucleotide
agguacuauuucagguaga

SEQ ID NO: 295076 - RNA, 19 nt, Artificial Sequence
  Description of Artificial Sequence: Synthetic oligonucleotide
cucgccacauggccugcug

SEQ ID NO: 295077 - RNA, 19 nt, Artificial Sequence
  Description of Artificial Sequence: Synthetic oligonucleotide
acgccaugugucagggcuc

SEQ ID NO: 295078 - RNA, 19 nt, Artificial Sequence
  Description of Artificial Sequence: Synthetic oligonucleotide
accagaguuuucgggccca

SEQ ID NO: 295079 - RNA, 19 nt, Artificial Sequence
  Description of Artificial Sequence: Synthetic oligonucleotide
ccgaugacuuugcuagaag

SEQ ID NO: 295080 - RNA, 19 nt, Artificial Sequence
  Description of Artificial Sequence: Synthetic oligonucleotide
ccaaugacgccauguguca

SEQ ID NO: 295081 - RNA, 19 nt, Artificial Sequence
  Description of Artificial Sequence: Synthetic oligonucleotide
augagcguuaugagcuuau

SEQ ID NO: 295082 - RNA, 19 nt, Artificial Sequence
  Description of Artificial Sequence: Synthetic oligonucleotide
ugccacuuagcuggcucuc

SEQ ID NO: 295083 - RNA, 19 nt, Artificial Sequence
  Description of Artificial Sequence: Synthetic oligonucleotide
ccaggcgaccuccuuuugc

SEQ ID NO: 295084 - RNA, 19 nt, Artificial Sequence
  Description of Artificial Sequence: Synthetic oligonucleotide
cugcuauggcccgagcuga

SEQ ID NO: 295085 - RNA, 19 nt, Artificial Sequence
  Description of Artificial Sequence: Synthetic oligonucleotide
ugguagcggcagagcauaa

SEQ ID NO: 295086 - RNA, 19 nt, Artificial Sequence
  Description of Artificial Sequence: Synthetic oligonucleotide
ccucacaucagucuucaua

SEQ ID NO: 295087 - RNA, 19 nt, Artificial Sequence
  Description of Artificial Sequence: Synthetic oligonucleotide
caacuaccuggagacccug

SEQ ID NO: 295088 - RNA, 19 nt, Artificial Sequence
  Description of Artificial Sequence: Synthetic oligonucleotide
ccaugugucagggcucggg

SEQ ID NO: 295089 - RNA, 19 nt, Artificial Sequence
  Description of Artificial Sequence: Synthetic oligonucleotide
cuuauuugugggguuucgu

SEQ ID NO: 295090 - RNA, 19 nt, Artificial Sequence
  Description of Artificial Sequence: Synthetic oligonucleotide
acgaggcuguaaaccccac

SEQ ID NO: 295091 - RNA, 19 nt, Artificial Sequence
  Description of Artificial Sequence: Synthetic oligonucleotide
cugguagcggcagagcaua

SEQ ID NO: 295092 - RNA, 19 nt, Artificial Sequence
  Description of Artificial Sequence: Synthetic oligonucleotide
cgucgauuuguucaccauc

SEQ ID NO: 295093 - RNA, 19 nt, Artificial Sequence
  Description of Artificial Sequence: Synthetic oligonucleotide
gguaaacuuuuaaccucca

SEQ ID NO: 295094 - RNA, 19 nt, Artificial Sequence
  Description of Artificial Sequence: Synthetic oligonucleotide
gcuacucauuccuuccucu

SEQ ID NO: 295095 - RNA, 19 nt, Artificial Sequence
  Description of Artificial Sequence: Synthetic oligonucleotide
auacugcuccgguccuuaa

SEQ ID NO: 295096 - RNA, 19 nt, Artificial Sequence
  Description of Artificial Sequence: Synthetic oligonucleotide
gcgcaaagugcugaaguuc

SEQ ID NO: 295097 - RNA, 19 nt, Artificial Sequence
  Description of Artificial Sequence: Synthetic oligonucleotide
agauaucagcucacucuua

SEQ ID NO: 295098 - RNA, 19 nt, Artificial Sequence
  Description of Artificial Sequence: Synthetic oligonucleotide
cauuccuuccaggcgaccu

SEQ ID NO: 295099 - RNA, 19 nt, Artificial Sequence
  Description of Artificial Sequence: Synthetic oligonucleotide
caggccccaaugaaacuua

SEQ ID NO: 295100 - RNA, 19 nt, Artificial Sequence
  Description of Artificial Sequence: Synthetic oligonucleotide
gcugauaguuccagaaaua

SEQ ID NO: 295101 - RNA, 19 nt, Artificial Sequence
  Description of Artificial Sequence: Synthetic oligonucleotide
cugccuggucagcacaaaa

SEQ ID NO: 295102 - RNA, 19 nt, Artificial Sequence
  Description of Artificial Sequence: Synthetic oligonucleotide
aggcgaccuccuuuugcau

SEQ ID NO: 295103 - RNA, 19 nt, Artificial Sequence
  Description of Artificial Sequence: Synthetic oligonucleotide
ccgcaacugaugcucuacc

SEQ ID NO: 295104 - RNA, 19 nt, Artificial Sequence
  Description of Artificial Sequence: Synthetic oligonucleotide
cugagagcucaugaugaua

SEQ ID NO: 295105 - RNA, 19 nt, Artificial Sequence
  Description of Artificial Sequence: Synthetic oligonucleotide
cauacugcuccgguccuua

SEQ ID NO: 295106 - RNA, 19 nt, Artificial Sequence
  Description of Artificial Sequence: Synthetic oligonucleotide
cagcgucgauuuguucacc

SEQ ID NO: 295107 - RNA, 19 nt, Artificial Sequence
  Description of Artificial Sequence: Synthetic oligonucleotide
guacuagaauuguguuccu

SEQ ID NO: 295108 - RNA, 19 nt, Artificial Sequence
  Description of Artificial Sequence: Synthetic oligonucleotide
gccaucuaaacccuauguu

SEQ ID NO: 295109 - RNA, 19 nt, Artificial Sequence
  Description of Artificial Sequence: Synthetic oligonucleotide
acagcgaacuucagccauu

SEQ ID NO: 295110 - RNA, 19 nt, Artificial Sequence
  Description of Artificial Sequence: Synthetic oligonucleotide
gcgaccuccuuuugcauua

SEQ ID NO: 295111 - RNA, 19 nt, Artificial Sequence
  Description of Artificial Sequence: Synthetic oligonucleotide
cauugucggucuucacucu

SEQ ID NO: 295112 - RNA, 19 nt, Artificial Sequence
  Description of Artificial Sequence: Synthetic oligonucleotide
uugugggguuucguaugua

SEQ ID NO: 295113 - RNA, 19 nt, Artificial Sequence
  Description of Artificial Sequence: Synthetic oligonucleotide
cccuauguugagccaaaga

SEQ ID NO: 295114 - RNA, 19 nt, Artificial Sequence
  Description of Artificial Sequence: Synthetic oligonucleotide
uagccucgucaacuccauu

SEQ ID NO: 295115 - RNA, 19 nt, Artificial Sequence
  Description of Artificial Sequence: Synthetic oligonucleotide
cugacccaugagcguuaug

SEQ ID NO: 295116 - RNA, 19 nt, Artificial Sequence
  Description of Artificial Sequence: Synthetic oligonucleotide
ugcuuccguuggucuuucu

SEQ ID NO: 295117 - RNA, 19 nt, Artificial Sequence
  Description of Artificial Sequence: Synthetic oligonucleotide
cccgagcugacuuggguga

SEQ ID NO: 295118 - RNA, 19 nt, Artificial Sequence
  Description of Artificial Sequence: Synthetic oligonucleotide
caugagcguuaugagcuua

SEQ ID NO: 295119 - RNA, 19 nt, Artificial Sequence
  Description of Artificial Sequence: Synthetic oligonucleotide
gaucguugaacgagcccau

SEQ ID NO: 295120 - RNA, 19 nt, Artificial Sequence
  Description of Artificial Sequence: Synthetic oligonucleotide
cuucugacccaugagcguu

SEQ ID NO: 295121 - RNA, 19 nt, Artificial Sequence
  Description of Artificial Sequence: Synthetic oligonucleotide
ugcgugcuuucugccacuu

SEQ ID NO: 295122 - RNA, 19 nt, Artificial Sequence
  Description of Artificial Sequence: Synthetic oligonucleotide
gcgaccgaugacuuugcua

SEQ ID NO: 295123 - RNA, 19 nt, Artificial Sequence
  Description of Artificial Sequence: Synthetic oligonucleotide
ccaucuaggugauucacuu

SEQ ID NO: 295124 - RNA, 19 nt, Artificial Sequence
  Description of Artificial Sequence: Synthetic oligonucleotide
gccacuuagcuggcucucc

SEQ ID NO: 295125 - RNA, 19 nt, Artificial Sequence
  Description of Artificial Sequence: Synthetic oligonucleotide
cgaugcuaaacaagucaca

SEQ ID NO: 295126 - RNA, 19 nt, Artificial Sequence
  Description of Artificial Sequence: Synthetic oligonucleotide
cuauggcccgagcugacuu

SEQ ID NO: 295127 - RNA, 19 nt, Artificial Sequence
  Description of Artificial Sequence: Synthetic oligonucleotide
ugcuaccggcacccacaua

SEQ ID NO: 295128 - RNA, 19 nt, Artificial Sequence
  Description of Artificial Sequence: Synthetic oligonucleotide
gagaucgggacagcucaau

SEQ ID NO: 295129 - RNA, 19 nt, Artificial Sequence
  Description of Artificial Sequence: Synthetic oligonucleotide
gagcugacuugggugaauu

SEQ ID NO: 295130 - RNA, 19 nt, Artificial Sequence
  Description of Artificial Sequence: Synthetic oligonucleotide
cggaucguugaacgagccc

SEQ ID NO: 295131 - RNA, 19 nt, Artificial Sequence
  Description of Artificial Sequence: Synthetic oligonucleotide
ggcgcaaagugcugaaguu

SEQ ID NO: 295132 - RNA, 19 nt, Artificial Sequence
  Description of Artificial Sequence: Synthetic oligonucleotide
gcuaaacaagucacagagu

SEQ ID NO: 295133 - RNA, 19 nt, Artificial Sequence
  Description of Artificial Sequence: Synthetic oligonucleotide
caaauccgccaucugcauu

SEQ ID NO: 295134 - RNA, 19 nt, Artificial Sequence
  Description of Artificial Sequence: Synthetic oligonucleotide
cgguccuuaagauccaaua

SEQ ID NO: 295135 - RNA, 19 nt, Artificial Sequence
  Description of Artificial Sequence: Synthetic oligonucleotide
gguagcggcagagcauaaa

SEQ ID NO: 295136 - RNA, 19 nt, Artificial Sequence
  Description of Artificial Sequence: Synthetic oligonucleotide
cacucgccacauggccugc

SEQ ID NO: 295137 - RNA, 19 nt, Artificial Sequence
  Description of Artificial Sequence: Synthetic oligonucleotide
cugcacgaccgcaacugau

SEQ ID NO: 295138 - RNA, 19 nt, Artificial Sequence
  Description of Artificial Sequence: Synthetic oligonucleotide
caacaguaggcaagccauu

SEQ ID NO: 295139 - RNA, 19 nt, Artificial Sequence
  Description of Artificial Sequence: Synthetic oligonucleotide
cacgaccgcaacugaugcu

SEQ ID NO: 295140 - RNA, 19 nt, Artificial Sequence
  Description of Artificial Sequence: Synthetic oligonucleotide
cgcuacucauuccuuccuc

SEQ ID NO: 295141 - RNA, 19 nt, Artificial Sequence
  Description of Artificial Sequence: Synthetic oligonucleotide
cacuuagcuggcucuccau

SEQ ID NO: 295142 - RNA, 19 nt, Artificial Sequence
  Description of Artificial Sequence: Synthetic oligonucleotide
agccagcgaccgaugacuu

SEQ ID NO: 295143 - RNA, 19 nt, Artificial Sequence
  Description of Artificial Sequence: Synthetic oligonucleotide
gccaucuaggugauucacu

SEQ ID NO: 295144 - RNA, 19 nt, Artificial Sequence
  Description of Artificial Sequence: Synthetic oligonucleotide
ggcacucgccacauggccu

SEQ ID NO: 295145 - RNA, 19 nt, Artificial Sequence
  Description of Artificial Sequence: Synthetic oligonucleotide
cagggugccagagcugccu

SEQ ID NO: 295146 - RNA, 19 nt, Artificial Sequence
  Description of Artificial Sequence: Synthetic oligonucleotide
cguugaacgagcccaugcu

SEQ ID NO: 295147 - RNA, 19 nt, Artificial Sequence
  Description of Artificial Sequence: Synthetic oligonucleotide
cguauguaacagccagcga

SEQ ID NO: 295148 - RNA, 19 nt, Artificial Sequence
  Description of Artificial Sequence: Synthetic oligonucleotide
ccaauuccauguuguuaua

SEQ ID NO: 295149 - RNA, 19 nt, Artificial Sequence
  Description of Artificial Sequence: Synthetic oligonucleotide
cugucgcuacucauuccuu

SEQ ID NO: 295150 - RNA, 19 nt, Artificial Sequence
  Description of Artificial Sequence: Synthetic oligonucleotide
ggcccgagcugacuugggu

SEQ ID NO: 295151 - RNA, 19 nt, Artificial Sequence
  Description of Artificial Sequence: Synthetic oligonucleotide
cugcgugcuuucugccacu

SEQ ID NO: 295152 - RNA, 19 nt, Artificial Sequence
  Description of Artificial Sequence: Synthetic oligonucleotide
gccaugugucagggcucgg

SEQ ID NO: 295153 - RNA, 19 nt, Artificial Sequence
  Description of Artificial Sequence: Synthetic oligonucleotide
caguacugaaguggagauu

SEQ ID NO: 295154 - RNA, 19 nt, Artificial Sequence
  Description of Artificial Sequence: Synthetic oligonucleotide
gcgucgauuuguucaccau

SEQ ID NO: 295155 - RNA, 19 nt, Artificial Sequence
  Description of Artificial Sequence: Synthetic oligonucleotide
cggggagagcugugucugc

SEQ ID NO: 295156 - RNA, 19 nt, Artificial Sequence
  Description of Artificial Sequence: Synthetic oligonucleotide
gguuuucggugaacuugcu

SEQ ID NO: 295157 - RNA, 19 nt, Artificial Sequence
  Description of Artificial Sequence: Synthetic oligonucleotide
gcuauggcccgagcugacu

SEQ ID NO: 295158 - RNA, 19 nt, Artificial Sequence
  Description of Artificial Sequence: Synthetic oligonucleotide
ggcucggggagagcugugu

SEQ ID NO: 295159 - RNA, 19 nt, Artificial Sequence
  Description of Artificial Sequence: Synthetic oligonucleotide
ccaugagcguuaugagcuu

SEQ ID NO: 295160 - RNA, 19 nt, Artificial Sequence
  Description of Artificial Sequence: Synthetic oligonucleotide
ccgguccuuaagauccaau

SEQ ID NO: 295161 - RNA, 19 nt, Artificial Sequence
  Description of Artificial Sequence: Synthetic oligonucleotide
ccgagcugacuugggugaa

SEQ ID NO: 295162 - RNA, 19 nt, Artificial Sequence
  Description of Artificial Sequence: Synthetic oligonucleotide
uuaugaaaagucaugaucc

SEQ ID NO: 295163 - RNA, 19 nt, Artificial Sequence
  Description of Artificial Sequence: Synthetic oligonucleotide
aacucguuuauucuuacac

SEQ ID NO: 295164 - RNA, 19 nt, Artificial Sequence
  Description of Artificial Sequence: Synthetic oligonucleotide
aguuacuuauagcugaucc

SEQ ID NO: 295165 - RNA, 19 nt, Artificial Sequence
  Description of Artificial Sequence: Synthetic oligonucleotide
gaaauuauaaacagggcgg

SEQ ID NO: 295166 - RNA, 19 nt, Artificial Sequence
  Description of Artificial Sequence: Synthetic oligonucleotide
uuuuaaggcacucauggag

SEQ ID NO: 295167 - RNA, 19 nt, Artificial Sequence
  Description of Artificial Sequence: Synthetic oligonucleotide
ugaacgauugcuuuagccg

SEQ ID NO: 295168 - RNA, 19 nt, Artificial Sequence
  Description of Artificial Sequence: Synthetic oligonucleotide
  modified_base (7)..(7): a, c, u, g, unknown or other
caaauunucaguaaaaucu

SEQ ID NO: 295169 - RNA, 19 nt, Artificial Sequence
  Description of Artificial Sequence: Synthetic oligonucleotide
aguauacuaaaauucauga

SEQ ID NO: 295170 - RNA, 19 nt, Artificial Sequence
  Description of Artificial Sequence: Synthetic oligonucleotide
ucugauauggagacaacag

SEQ ID NO: 295171 - RNA, 19 nt, Artificial Sequence
  Description of Artificial Sequence: Synthetic oligonucleotide
aggaacuuagguuggaggc

SEQ ID NO: 295172 - RNA, 19 nt, Artificial Sequence
  Description of Artificial Sequence: Synthetic oligonucleotide
aaacugacgccgcucagcc

SEQ ID NO: 295173 - RNA, 19 nt, Artificial Sequence
  Description of Artificial Sequence: Synthetic oligonucleotide
acugacaggacuaaggagc

SEQ ID NO: 295174 - RNA, 19 nt, Artificial Sequence
  Description of Artificial Sequence: Synthetic oligonucleotide
uuuaacaaagucagggaug

SEQ ID NO: 295175 - RNA, 19 nt, Artificial Sequence
  Description of Artificial Sequence: Synthetic oligonucleotide
auuauaaacagggcggacc

SEQ ID NO: 295176 - RNA, 19 nt, Artificial Sequence
  Description of Artificial Sequence: Synthetic oligonucleotide
aauagccugaaauaauccu

SEQ ID NO: 295177 - RNA, 19 nt, Artificial Sequence
  Description of Artificial Sequence: Synthetic oligonucleotide
uuuaagccaaaauagccug

SEQ ID NO: 295178 - RNA, 19 nt, Artificial Sequence
  Description of Artificial Sequence: Synthetic oligonucleotide
aaauagccugaaauaaucc

SEQ ID NO: 295179 - RNA, 19 nt, Artificial Sequence
  Description of Artificial Sequence: Synthetic oligonucleotide
aaggaacuuagguuggagg

SEQ ID NO: 295180 - RNA, 19 nt, Artificial Sequence
  Description of Artificial Sequence: Synthetic oligonucleotide
aaauaauccuuucuguuau

SEQ ID NO: 295181 - RNA, 19 nt, Artificial Sequence
  Description of Artificial Sequence: Synthetic oligonucleotide
ugcagaucgacccaggggc

SEQ ID NO: 295182 - RNA, 19 nt, Artificial Sequence
  Description of Artificial Sequence: Synthetic oligonucleotide
aacagucggcagcagauac

SEQ ID NO: 295183 - RNA, 19 nt, Artificial Sequence
  Description of Artificial Sequence: Synthetic oligonucleotide
guagguacgaaauuccucc

SEQ ID NO: 295184 - RNA, 19 nt, Artificial Sequence
  Description of Artificial Sequence: Synthetic oligonucleotide
guuauaaccuuuucagagg

SEQ ID NO: 295185 - RNA, 19 nt, Artificial Sequence
  Description of Artificial Sequence: Synthetic oligonucleotide
acucguuuauucuuacacc

SEQ ID NO: 295186 - RNA, 19 nt, Artificial Sequence
  Description of Artificial Sequence: Synthetic oligonucleotide
ucgugaauccucaauacug

SEQ ID NO: 295187 - RNA, 19 nt, Artificial Sequence
  Description of Artificial Sequence: Synthetic oligonucleotide
uuauaaccuuuucagagga

SEQ ID NO: 295188 - RNA, 19 nt, Artificial Sequence
  Description of Artificial Sequence: Synthetic oligonucleotide
agauccguaagucacacca

SEQ ID NO: 295189 - RNA, 19 nt, Artificial Sequence
  Description of Artificial Sequence: Synthetic oligonucleotide
cucacgguuaaacugacgc

SEQ ID NO: 295190 - RNA, 19 nt, Artificial Sequence
  Description of Artificial Sequence: Synthetic oligonucleotide
uguccuuacuccuacagcu

SEQ ID NO: 295191 - RNA, 19 nt, Artificial Sequence
  Description of Artificial Sequence: Synthetic oligonucleotide
  modified_base (5)..(5): a, c, u, g, unknown or other
aauunucaguaaaaucuuc

SEQ ID NO: 295192 - RNA, 19 nt, Artificial Sequence
  Description of Artificial Sequence: Synthetic oligonucleotide
cuuauaaugcagacagggg

SEQ ID NO: 295193 - RNA, 19 nt, Artificial Sequence
  Description of Artificial Sequence: Synthetic oligonucleotide
uuuuaaucuuggaaggccu

SEQ ID NO: 295194 - RNA, 19 nt, Artificial Sequence
  Description of Artificial Sequence: Synthetic oligonucleotide
auacaagcaagaucuacag

SEQ ID NO: 295195 - RNA, 19 nt, Artificial Sequence
  Description of Artificial Sequence: Synthetic oligonucleotide
gauaccugcaccuucugac

SEQ ID NO: 295196 - RNA, 19 nt, Artificial Sequence
  Description of Artificial Sequence: Synthetic oligonucleotide
  modified_base (2)..(2): a, c, u, g, unknown or other
unucaguaaaaucuucuaa

SEQ ID NO: 295197 - RNA, 19 nt, Artificial Sequence
  Description of Artificial Sequence: Synthetic oligonucleotide
auauggagacaacagcccg

SEQ ID NO: 295198 - RNA, 19 nt, Artificial Sequence
  Description of Artificial Sequence: Synthetic oligonucleotide
uuauagcugauccuuaaau

SEQ ID NO: 295199 - RNA, 19 nt, Artificial Sequence
  Description of Artificial Sequence: Synthetic oligonucleotide
uuaacaaagucagggauga

SEQ ID NO: 295200 - RNA, 19 nt, Artificial Sequence
  Description of Artificial Sequence: Synthetic oligonucleotide
uguuuaacaaagucaggga

SEQ ID NO: 295201 - RNA, 19 nt, Artificial Sequence
  Description of Artificial Sequence: Synthetic oligonucleotide
ucaauggucaccgaggcac

SEQ ID NO: 295202 - RNA, 19 nt, Artificial Sequence
  Description of Artificial Sequence: Synthetic oligonucleotide
uuuugaacgauugcuuuag

SEQ ID NO: 295203 - RNA, 19 nt, Artificial Sequence
  Description of Artificial Sequence: Synthetic oligonucleotide
ucaaccuuagccuucacuu

SEQ ID NO: 295204 - RNA, 19 nt, Artificial Sequence
  Description of Artificial Sequence: Synthetic oligonucleotide
aauuauaaacagggcggac

SEQ ID NO: 295205 - RNA, 19 nt, Artificial Sequence
  Description of Artificial Sequence: Synthetic oligonucleotide
uugaacgauugcuuuagcc

SEQ ID NO: 295206 - RNA, 19 nt, Artificial Sequence
  Description of Artificial Sequence: Synthetic oligonucleotide
auucuuacaccacccgcgc

SEQ ID NO: 295207 - RNA, 19 nt, Artificial Sequence
  Description of Artificial Sequence: Synthetic oligonucleotide
  modified_base (18)..(18): a, c, u, g, unknown or other
ucaucuagcuccaaauunu

SEQ ID NO: 295208 - RNA, 19 nt, Artificial Sequence
  Description of Artificial Sequence: Synthetic oligonucleotide
uaacaguucaguaccuuca

SEQ ID NO: 295209 - RNA, 19 nt, Artificial Sequence
  Description of Artificial Sequence: Synthetic oligonucleotide
uauugcuguagcucuauca

SEQ ID NO: 295210 - RNA, 19 nt, Artificial Sequence
  Description of Artificial Sequence: Synthetic oligonucleotide
agcaacuuaaggucugggg

SEQ ID NO: 295211 - RNA, 19 nt, Artificial Sequence
  Description of Artificial Sequence: Synthetic oligonucleotide
acggccucgacucuugagc

SEQ ID NO: 295212 - RNA, 19 nt, Artificial Sequence
  Description of Artificial Sequence: Synthetic oligonucleotide
uuaagcaacuuaaggucug

SEQ ID NO: 295213 - RNA, 19 nt, Artificial Sequence
  Description of Artificial Sequence: Synthetic oligonucleotide
aucuugcacagauaaagug

SEQ ID NO: 295214 - RNA, 19 nt, Artificial Sequence
  Description of Artificial Sequence: Synthetic oligonucleotide
uauucgugcaggaugcaga

SEQ ID NO: 295215 - RNA, 19 nt, Artificial Sequence
  Description of Artificial Sequence: Synthetic oligonucleotide
ucgugcaggaugcagaccu

SEQ ID NO: 295216 - RNA, 19 nt, Artificial Sequence
  Description of Artificial Sequence: Synthetic oligonucleotide
aaagcagguaauaacuaca

SEQ ID NO: 295217 - RNA, 19 nt, Artificial Sequence
  Description of Artificial Sequence: Synthetic oligonucleotide
aguaaggauccccaguucu

SEQ ID NO: 295218 - RNA, 19 nt, Artificial Sequence
  Description of Artificial Sequence: Synthetic oligonucleotide
ugccaugacauauucacuc

SEQ ID NO: 295219 - RNA, 19 nt, Artificial Sequence
  Description of Artificial Sequence: Synthetic oligonucleotide
  modified_base (4)..(4): a, c, u, g, unknown or other
auunucaguaaaaucuucu

SEQ ID NO: 295220 - RNA, 19 nt, Artificial Sequence
  Description of Artificial Sequence: Synthetic oligonucleotide
agaucuacagcugucuauc

SEQ ID NO: 295221 - RNA, 19 nt, Artificial Sequence
  Description of Artificial Sequence: Synthetic oligonucleotide
gcuacauucagcccgagug

SEQ ID NO: 295222 - RNA, 19 nt, Artificial Sequence
  Description of Artificial Sequence: Synthetic oligonucleotide
aagcaucacuucuugucag

SEQ ID NO: 295223 - RNA, 19 nt, Artificial Sequence
  Description of Artificial Sequence: Synthetic oligonucleotide
ugagaucacaguuuugcuc

SEQ ID NO: 295224 - RNA, 19 nt, Artificial Sequence
  Description of Artificial Sequence: Synthetic oligonucleotide
ugcauauaguauacuaaaa

SEQ ID NO: 295225 - RNA, 19 nt, Artificial Sequence
  Description of Artificial Sequence: Synthetic oligonucleotide
agcagauacauacaagcaa

SEQ ID NO: 295226 - RNA, 19 nt, Artificial Sequence
  Description of Artificial Sequence: Synthetic oligonucleotide
cauguuuccguaugcuucc

SEQ ID NO: 295227 - RNA, 19 nt, Artificial Sequence
  Description of Artificial Sequence: Synthetic oligonucleotide
ucuuacaccacccgcgcac

SEQ ID NO: 295228 - RNA, 19 nt, Artificial Sequence
  Description of Artificial Sequence: Synthetic oligonucleotide
ugucagugcauauaguaua

SEQ ID NO: 295229 - RNA, 19 nt, Artificial Sequence
  Description of Artificial Sequence: Synthetic oligonucleotide
aucauaggccagccaaagc

SEQ ID NO: 295230 - RNA, 19 nt, Artificial Sequence
  Description of Artificial Sequence: Synthetic oligonucleotide
agcacuguuggcccaugcc

SEQ ID NO: 295231 - RNA, 19 nt, Artificial Sequence
  Description of Artificial Sequence: Synthetic oligonucleotide
ucucaucuaucaaccaagc

SEQ ID NO: 295232 - RNA, 19 nt, Artificial Sequence
  Description of Artificial Sequence: Synthetic oligonucleotide
aagcagguaauaacuacag

SEQ ID NO: 295233 - RNA, 19 nt, Artificial Sequence
  Description of Artificial Sequence: Synthetic oligonucleotide
auacuccacucucuuuucc

SEQ ID NO: 295234 - RNA, 19 nt, Artificial Sequence
  Description of Artificial Sequence: Synthetic oligonucleotide
ugcuacaauugacaucuug

SEQ ID NO: 295235 - RNA, 19 nt, Artificial Sequence
  Description of Artificial Sequence: Synthetic oligonucleotide
ugagaggcuaauuguuucc

SEQ ID NO: 295236 - RNA, 19 nt, Artificial Sequence
  Description of Artificial Sequence: Synthetic oligonucleotide
cacgugucagagcagagcc

SEQ ID NO: 295237 - RNA, 19 nt, Artificial Sequence
  Description of Artificial Sequence: Synthetic oligonucleotide
  modified_base (9)..(9): a, c, u, g, unknown or other
uccaaauunucaguaaaau

SEQ ID NO: 295238 - RNA, 19 nt, Artificial Sequence
  Description of Artificial Sequence: Synthetic oligonucleotide
uaggccuaccccauuacca

SEQ ID NO: 295239 - RNA, 19 nt, Artificial Sequence
  Description of Artificial Sequence: Synthetic oligonucleotide
  modified_base (6)..(6): a, c, u, g, unknown or other
aaauunucaguaaaaucuu

SEQ ID NO: 295240 - RNA, 19 nt, Artificial Sequence
  Description of Artificial Sequence: Synthetic oligonucleotide
caacacucccgccaaaggg

SEQ ID NO: 295241 - RNA, 19 nt, Artificial Sequence
  Description of Artificial Sequence: Synthetic oligonucleotide
aguuccagauccguaaguc

SEQ ID NO: 295242 - RNA, 19 nt, Artificial Sequence
  Description of Artificial Sequence: Synthetic oligonucleotide
acaugcgcaguaaggaucc

SEQ ID NO: 295243 - RNA, 19 nt, Artificial Sequence
  Description of Artificial Sequence: Synthetic oligonucleotide
cucguuuauucuuacacca

SEQ ID NO: 295244 - RNA, 19 nt, Artificial Sequence
  Description of Artificial Sequence: Synthetic oligonucleotide
aagggaaauccaacucugc

SEQ ID NO: 295245 - RNA, 19 nt, Artificial Sequence
  Description of Artificial Sequence: Synthetic oligonucleotide
cucacggccauacaugcgc

SEQ ID NO: 295246 - RNA, 19 nt, Artificial Sequence
  Description of Artificial Sequence: Synthetic oligonucleotide
gaguuaugaaaagucauga

SEQ ID NO: 295247 - RNA, 19 nt, Artificial Sequence
  Description of Artificial Sequence: Synthetic oligonucleotide
gaaggaaccaugggcaaag

SEQ ID NO: 295248 - RNA, 19 nt, Artificial Sequence
  Description of Artificial Sequence: Synthetic oligonucleotide
uacaugcgcaguaaggauc

SEQ ID NO: 295249 - RNA, 19 nt, Artificial Sequence
  Description of Artificial Sequence: Synthetic oligonucleotide
uaacuacaggacaggauac

SEQ ID NO: 295250 - RNA, 19 nt, Artificial Sequence
  Description of Artificial Sequence: Synthetic oligonucleotide
guaaagcucacacuaaucu

SEQ ID NO: 295251 - RNA, 19 nt, Artificial Sequence
  Description of Artificial Sequence: Synthetic oligonucleotide
ucuggggagaacuuccgga

SEQ ID NO: 295252 - RNA, 19 nt, Artificial Sequence
  Description of Artificial Sequence: Synthetic oligonucleotide
aggaggaucauguuuccgu

SEQ ID NO: 295253 - RNA, 19 nt, Artificial Sequence
  Description of Artificial Sequence: Synthetic oligonucleotide
uccuacagcucucaguaaa

SEQ ID NO: 295254 - RNA, 19 nt, Artificial Sequence
  Description of Artificial Sequence: Synthetic oligonucleotide
uuaagccaaaauagccuga

SEQ ID NO: 295255 - RNA, 19 nt, Artificial Sequence
  Description of Artificial Sequence: Synthetic oligonucleotide
acaggauaccugcaccuuc

SEQ ID NO: 295256 - RNA, 19 nt, Artificial Sequence
  Description of Artificial Sequence: Synthetic oligonucleotide
uuuaaucuuggaaggccuc

SEQ ID NO: 295257 - RNA, 19 nt, Artificial Sequence
  Description of Artificial Sequence: Synthetic oligonucleotide
cagguagguacgaaauucc

SEQ ID NO: 295258 - RNA, 19 nt, Artificial Sequence
  Description of Artificial Sequence: Synthetic oligonucleotide
cuuagccuucacuuguccc

SEQ ID NO: 295259 - RNA, 19 nt, Artificial Sequence
  Description of Artificial Sequence: Synthetic oligonucleotide
uaauaacuacaggacagga

SEQ ID NO: 295260 - RNA, 19 nt, Artificial Sequence
  Description of Artificial Sequence: Synthetic oligonucleotide
aauaacuacaggacaggau

SEQ ID NO: 295261 - RNA, 19 nt, Artificial Sequence
  Description of Artificial Sequence: Synthetic oligonucleotide
uuaaggcacucauggagga

SEQ ID NO: 295262 - RNA, 19 nt, Artificial Sequence
  Description of Artificial Sequence: Synthetic oligonucleotide
ucacgguuaaacugacgcc

SEQ ID NO: 295263 - RNA, 19 nt, Artificial Sequence
  Description of Artificial Sequence: Synthetic oligonucleotide
aggaucauguuuccguaug

SEQ ID NO: 295264 - RNA, 19 nt, Artificial Sequence
  Description of Artificial Sequence: Synthetic oligonucleotide
aguuaugaaaagucaugau

SEQ ID NO: 295265 - RNA, 19 nt, Artificial Sequence
  Description of Artificial Sequence: Synthetic oligonucleotide
ugauggaugugucacccau

SEQ ID NO: 295266 - RNA, 19 nt, Artificial Sequence
  Description of Artificial Sequence: Synthetic oligonucleotide
agggaaauccaacucugca

SEQ ID NO: 295267 - RNA, 19 nt, Artificial Sequence
  Description of Artificial Sequence: Synthetic oligonucleotide
aagucaugauccauccauc

SEQ ID NO: 295268 - RNA, 19 nt, Artificial Sequence
  Description of Artificial Sequence: Synthetic oligonucleotide
ugcgcaguaaggaucccca

SEQ ID NO: 295269 - RNA, 19 nt, Artificial Sequence
  Description of Artificial Sequence: Synthetic oligonucleotide
uggugcuaaaauuuuguuu

SEQ ID NO: 295270 - RNA, 19 nt, Artificial Sequence
  Description of Artificial Sequence: Synthetic oligonucleotide
gguuaaaauacuccaguuc

SEQ ID NO: 295271 - RNA, 19 nt, Artificial Sequence
  Description of Artificial Sequence: Synthetic oligonucleotide
ugugcacaagggcucacca

SEQ ID NO: 295272 - RNA, 19 nt, Artificial Sequence
  Description of Artificial Sequence: Synthetic oligonucleotide
uccuuacuccuacagcucu

SEQ ID NO: 295273 - RNA, 19 nt, Artificial Sequence
  Description of Artificial Sequence: Synthetic oligonucleotide
uacgaaauuccuccagauc

SEQ ID NO: 295274 - RNA, 19 nt, Artificial Sequence
  Description of Artificial Sequence: Synthetic oligonucleotide
acaguuacuugcucaaaau

SEQ ID NO: 295275 - RNA, 19 nt, Artificial Sequence
  Description of Artificial Sequence: Synthetic oligonucleotide
ucagcucguagacucguga

SEQ ID NO: 295276 - RNA, 19 nt, Artificial Sequence
  Description of Artificial Sequence: Synthetic oligonucleotide
cuggucagcucguagacuc

SEQ ID NO: 295277 - RNA, 19 nt, Artificial Sequence
  Description of Artificial Sequence: Synthetic oligonucleotide
cuugucagugcauauagua

SEQ ID NO: 295278 - RNA, 19 nt, Artificial Sequence
  Description of Artificial Sequence: Synthetic oligonucleotide
uaagcaacuuaaggucugg

SEQ ID NO: 295279 - RNA, 19 nt, Artificial Sequence
  Description of Artificial Sequence: Synthetic oligonucleotide
agacucucuaugcagguau

SEQ ID NO: 295280 - RNA, 19 nt, Artificial Sequence
  Description of Artificial Sequence: Synthetic oligonucleotide
guuaaacugacgccgcuca

SEQ ID NO: 295281 - RNA, 19 nt, Artificial Sequence
  Description of Artificial Sequence: Synthetic oligonucleotide
gacuccagaguuaugaaaa

SEQ ID NO: 295282 - RNA, 19 nt, Artificial Sequence
  Description of Artificial Sequence: Synthetic oligonucleotide
caugccgccuaccucauac

SEQ ID NO: 295283 - RNA, 19 nt, Artificial Sequence
  Description of Artificial Sequence: Synthetic oligonucleotide
cacucgagacucucuaugc

SEQ ID NO: 295284 - RNA, 19 nt, Artificial Sequence
  Description of Artificial Sequence: Synthetic oligonucleotide
guauacuaaaauucaugaa

SEQ ID NO: 295285 - RNA, 19 nt, Artificial Sequence
  Description of Artificial Sequence: Synthetic oligonucleotide
aacugacgccgcucagccc

SEQ ID NO: 295286 - RNA, 19 nt, Artificial Sequence
  Description of Artificial Sequence: Synthetic oligonucleotide
ucacugcaaucucugaaaa

SEQ ID NO: 295287 - RNA, 19 nt, Artificial Sequence
  Description of Artificial Sequence: Synthetic oligonucleotide
aacucugcagaucgaccca

SEQ ID NO: 295288 - RNA, 19 nt, Artificial Sequence
  Description of Artificial Sequence: Synthetic oligonucleotide
gucaugauccauccaucag

SEQ ID NO: 295289 - RNA, 19 nt, Artificial Sequence
  Description of Artificial Sequence: Synthetic oligonucleotide
  modified_base (8)..(8): a, c, u, g, unknown or other
ccaaauunucaguaaaauc

SEQ ID NO: 295290 - RNA, 19 nt, Artificial Sequence
  Description of Artificial Sequence: Synthetic oligonucleotide
caucucacgguuaaacuga

SEQ ID NO: 295291 - RNA, 19 nt, Artificial Sequence
  Description of Artificial Sequence: Synthetic oligonucleotide
cuggucaucucaucuauca

SEQ ID NO: 295292 - RNA, 19 nt, Artificial Sequence
  Description of Artificial Sequence: Synthetic oligonucleotide
uagcugauccuuaaauaua

SEQ ID NO: 295293 - RNA, 19 nt, Artificial Sequence
  Description of Artificial Sequence: Synthetic oligonucleotide
uuagccgugaacccgccuu

SEQ ID NO: 295294 - RNA, 19 nt, Artificial Sequence
  Description of Artificial Sequence: Synthetic oligonucleotide
uaaggauccccaguucuug

SEQ ID NO: 295295 - RNA, 19 nt, Artificial Sequence
  Description of Artificial Sequence: Synthetic oligonucleotide
ucucacgguuaaacugacg

SEQ ID NO: 295296 - RNA, 19 nt, Artificial Sequence
  Description of Artificial Sequence: Synthetic oligonucleotide
acuuauagcugauccuuaa

SEQ ID NO: 295297 - RNA, 19 nt, Artificial Sequence
  Description of Artificial Sequence: Synthetic oligonucleotide
aaaguaguucuggugcuaa

SEQ ID NO: 295298 - RNA, 19 nt, Artificial Sequence
  Description of Artificial Sequence: Synthetic oligonucleotide
ucucacggccauacaugcg

SEQ ID NO: 295299 - RNA, 19 nt, Artificial Sequence
  Description of Artificial Sequence: Synthetic oligonucleotide
cauacaugcgcaguaagga

SEQ ID NO: 295300 - RNA, 19 nt, Artificial Sequence
  Description of Artificial Sequence: Synthetic oligonucleotide
gaacgauugcuuuagccgu

SEQ ID NO: 295301 - RNA, 19 nt, Artificial Sequence
  Description of Artificial Sequence: Synthetic oligonucleotide
gcuaccuggcaucauaggc

SEQ ID NO: 295302 - RNA, 19 nt, Artificial Sequence
  Description of Artificial Sequence: Synthetic oligonucleotide
cccauuaccaacacucccg

SEQ ID NO: 295303 - RNA, 19 nt, Artificial Sequence
  Description of Artificial Sequence: Synthetic oligonucleotide
auacagggacuccagaguu

SEQ ID NO: 295304 - RNA, 19 nt, Artificial Sequence
  Description of Artificial Sequence: Synthetic oligonucleotide
aaggauccccaguucuuga

SEQ ID NO: 295305 - RNA, 19 nt, Artificial Sequence
  Description of Artificial Sequence: Synthetic oligonucleotide
gcaacuuaaggucugggga

SEQ ID NO: 295306 - RNA, 19 nt, Artificial Sequence
  Description of Artificial Sequence: Synthetic oligonucleotide
ggugcuaaaauuuuguuuu

SEQ ID NO: 295307 - RNA, 19 nt, Artificial Sequence
  Description of Artificial Sequence: Synthetic oligonucleotide
uccagauccguaagucaca

SEQ ID NO: 295308 - RNA, 19 nt, Artificial Sequence
  Description of Artificial Sequence: Synthetic oligonucleotide
uccgcuucaucucacgguu

SEQ ID NO: 295309 - RNA, 19 nt, Artificial Sequence
  Description of Artificial Sequence: Synthetic oligonucleotide
acucucuaugcagguauac

SEQ ID NO: 295310 - RNA, 19 nt, Artificial Sequence
  Description of Artificial Sequence: Synthetic oligonucleotide
cagggaugagaauuuccag

SEQ ID NO: 295311 - RNA, 19 nt, Artificial Sequence
  Description of Artificial Sequence: Synthetic oligonucleotide
auacaugcgcaguaaggau

SEQ ID NO: 295312 - RNA, 19 nt, Artificial Sequence
  Description of Artificial Sequence: Synthetic oligonucleotide
cugcagaucgacccagggg

SEQ ID NO: 295313 - RNA, 19 nt, Artificial Sequence
  Description of Artificial Sequence: Synthetic oligonucleotide
gcacuguuggcccaugccg

SEQ ID NO: 295314 - RNA, 19 nt, Artificial Sequence
  Description of Artificial Sequence: Synthetic oligonucleotide
cuacaggacaggauaccug

SEQ ID NO: 295315 - RNA, 19 nt, Artificial Sequence
  Description of Artificial Sequence: Synthetic oligonucleotide
auaguauacuaaaauucau

SEQ ID NO: 295316 - RNA, 19 nt, Artificial Sequence
  Description of Artificial Sequence: Synthetic oligonucleotide
acgcugcauguauucgugc

SEQ ID NO: 295317 - RNA, 19 nt, Artificial Sequence
  Description of Artificial Sequence: Synthetic oligonucleotide
cuguccuuacuccuacagc

SEQ ID NO: 295318 - RNA, 19 nt, Artificial Sequence
  Description of Artificial Sequence: Synthetic oligonucleotide
ccgccuaccucauacaucc

SEQ ID NO: 295319 - RNA, 19 nt, Artificial Sequence
  Description of Artificial Sequence: Synthetic oligonucleotide
cuggggagaacuuccggac

SEQ ID NO: 295320 - RNA, 19 nt, Artificial Sequence
  Description of Artificial Sequence: Synthetic oligonucleotide
uacuuauagcugauccuua

SEQ ID NO: 295321 - RNA, 19 nt, Artificial Sequence
  Description of Artificial Sequence: Synthetic oligonucleotide
cuaggccuaccccauuacc

SEQ ID NO: 295322 - RNA, 19 nt, Artificial Sequence
  Description of Artificial Sequence: Synthetic oligonucleotide
agauacauacaagcaagau

SEQ ID NO: 295323 - RNA, 19 nt, Artificial Sequence
  Description of Artificial Sequence: Synthetic oligonucleotide
aucauguuuccguaugcuu

SEQ ID NO: 295324 - RNA, 19 nt, Artificial Sequence
  Description of Artificial Sequence: Synthetic oligonucleotide
gauaaagugaugagcuucu

SEQ ID NO: 295325 - RNA, 19 nt, Artificial Sequence
  Description of Artificial Sequence: Synthetic oligonucleotide
uuccgcuucaucucacggu

SEQ ID NO: 295326 - RNA, 19 nt, Artificial Sequence
  Description of Artificial Sequence: Synthetic oligonucleotide
cuguuauaaccuuuucaga

SEQ ID NO: 295327 - RNA, 19 nt, Artificial Sequence
  Description of Artificial Sequence: Synthetic oligonucleotide
uguuuccguaugcuuccug

SEQ ID NO: 295328 - RNA, 19 nt, Artificial Sequence
  Description of Artificial Sequence: Synthetic oligonucleotide
uacugcuuagaggaggauc

SEQ ID NO: 295329 - RNA, 19 nt, Artificial Sequence
  Description of Artificial Sequence: Synthetic oligonucleotide
guuacuuauagcugauccu

SEQ ID NO: 295330 - RNA, 19 nt, Artificial Sequence
  Description of Artificial Sequence: Synthetic oligonucleotide
gaggcuaauuguuucccaa

SEQ ID NO: 295331 - RNA, 19 nt, Artificial Sequence
  Description of Artificial Sequence: Synthetic oligonucleotide
acagcuguccccacguguc

SEQ ID NO: 295332 - RNA, 19 nt, Artificial Sequence
  Description of Artificial Sequence: Synthetic oligonucleotide
uuacuccuacagcucucag

SEQ ID NO: 295333 - RNA, 19 nt, Artificial Sequence
  Description of Artificial Sequence: Synthetic oligonucleotide
agcugauccuuaaauauau

SEQ ID NO: 295334 - RNA, 19 nt, Artificial Sequence
  Description of Artificial Sequence: Synthetic oligonucleotide
uccaacucugcagaucgac

SEQ ID NO: 295335 - RNA, 19 nt, Artificial Sequence
  Description of Artificial Sequence: Synthetic oligonucleotide
agaggcuaauuguuuccca

SEQ ID NO: 295336 - RNA, 19 nt, Artificial Sequence
  Description of Artificial Sequence: Synthetic oligonucleotide
uugcucccguuccucauug

SEQ ID NO: 295337 - RNA, 19 nt, Artificial Sequence
  Description of Artificial Sequence: Synthetic oligonucleotide
uagguacgaaauuccucca

SEQ ID NO: 295338 - RNA, 19 nt, Artificial Sequence
  Description of Artificial Sequence: Synthetic oligonucleotide
uguuucccaacucguuuau

SEQ ID NO: 295339 - RNA, 19 nt, Artificial Sequence
  Description of Artificial Sequence: Synthetic oligonucleotide
aaccucaaccuuagccuuc

SEQ ID NO: 295340 - RNA, 19 nt, Artificial Sequence
  Description of Artificial Sequence: Synthetic oligonucleotide
  modified_base (16)..(16): a, c, u, g, unknown or other
aucuagcuccaaauunuca

SEQ ID NO: 295341 - RNA, 19 nt, Artificial Sequence
  Description of Artificial Sequence: Synthetic oligonucleotide
cucacacuaaucuuuacau

SEQ ID NO: 295342 - RNA, 19 nt, Artificial Sequence
  Description of Artificial Sequence: Synthetic oligonucleotide
cuuuuaaggcacucaugga

SEQ ID NO: 295343 - RNA, 19 nt, Artificial Sequence
  Description of Artificial Sequence: Synthetic oligonucleotide
ccaagcaucacuucuuguc

SEQ ID NO: 295344 - RNA, 19 nt, Artificial Sequence
  Description of Artificial Sequence: Synthetic oligonucleotide
aacgauugcuuuagccgug

SEQ ID NO: 295345 - RNA, 19 nt, Artificial Sequence
  Description of Artificial Sequence: Synthetic oligonucleotide
gugcgugccgggcagugcg

SEQ ID NO: 295346 - RNA, 19 nt, Artificial Sequence
  Description of Artificial Sequence: Synthetic oligonucleotide
guauucgugcaggaugcag

SEQ ID NO: 295347 - RNA, 19 nt, Artificial Sequence
  Description of Artificial Sequence: Synthetic oligonucleotide
ugcaucuugcacagauaaa

SEQ ID NO: 295348 - RNA, 19 nt, Artificial Sequence
  Description of Artificial Sequence: Synthetic oligonucleotide
gaccaggugaccacucgag

SEQ ID NO: 295349 - RNA, 19 nt, Artificial Sequence
  Description of Artificial Sequence: Synthetic oligonucleotide
aagccaaaauagccugaaa

SEQ ID NO: 295350 - RNA, 19 nt, Artificial Sequence
  Description of Artificial Sequence: Synthetic oligonucleotide
ugcguucuacuccugugua

SEQ ID NO: 295351 - RNA, 19 nt, Artificial Sequence
  Description of Artificial Sequence: Synthetic oligonucleotide
guucuacuccuguguacag

SEQ ID NO: 295352 - RNA, 19 nt, Artificial Sequence
  Description of Artificial Sequence: Synthetic oligonucleotide
aacugcuucuuugcacgug

SEQ ID NO: 295353 - RNA, 19 nt, Artificial Sequence
  Description of Artificial Sequence: Synthetic oligonucleotide
agacucgugaauccucaau

SEQ ID NO: 295354 - RNA, 19 nt, Artificial Sequence
  Description of Artificial Sequence: Synthetic oligonucleotide
uugccgcaugccaugacau

SEQ ID NO: 295355 - RNA, 19 nt, Artificial Sequence
  Description of Artificial Sequence: Synthetic oligonucleotide
ggaucauguuuccguaugc

SEQ ID NO: 295356 - RNA, 19 nt, Artificial Sequence
  Description of Artificial Sequence: Synthetic oligonucleotide
augaaaagucaugauccau

SEQ ID NO: 295357 - RNA, 19 nt, Artificial Sequence
  Description of Artificial Sequence: Synthetic oligonucleotide
aacuuccggacugcgggug

SEQ ID NO: 295358 - RNA, 19 nt, Artificial Sequence
  Description of Artificial Sequence: Synthetic oligonucleotide
uccuuucuguuauaaccuu

SEQ ID NO: 295359 - RNA, 19 nt, Artificial Sequence
  Description of Artificial Sequence: Synthetic oligonucleotide
ugcacgugugcuguguggu

SEQ ID NO: 295360 - RNA, 19 nt, Artificial Sequence
  Description of Artificial Sequence: Synthetic oligonucleotide
cagcugucuaucagcuucc

SEQ ID NO: 295361 - RNA, 19 nt, Artificial Sequence
  Description of Artificial Sequence: Synthetic oligonucleotide
ugcugcguucuacuccugu

SEQ ID NO: 295362 - RNA, 19 nt, Artificial Sequence
  Description of Artificial Sequence: Synthetic oligonucleotide
acuuagguuggaggccugg

SEQ ID NO: 295363 - RNA, 19 nt, Artificial Sequence
  Description of Artificial Sequence: Synthetic oligonucleotide
cuauaaaaccuggucaucu

SEQ ID NO: 295364 - RNA, 19 nt, Artificial Sequence
  Description of Artificial Sequence: Synthetic oligonucleotide
aacagacaaagcagguaau

SEQ ID NO: 295365 - RNA, 19 nt, Artificial Sequence
  Description of Artificial Sequence: Synthetic oligonucleotide
aucaauggucaccgaggca

SEQ ID NO: 295366 - RNA, 19 nt, Artificial Sequence
  Description of Artificial Sequence: Synthetic oligonucleotide
agcucguagacucgugaau

SEQ ID NO: 295367 - RNA, 19 nt, Artificial Sequence
  Description of Artificial Sequence: Synthetic oligonucleotide
aucucacgguuaaacugac

SEQ ID NO: 295368 - RNA, 19 nt, Artificial Sequence
  Description of Artificial Sequence: Synthetic oligonucleotide
ggaugggccucucugacuc

SEQ ID NO: 295369 - RNA, 19 nt, Artificial Sequence
  Description of Artificial Sequence: Synthetic oligonucleotide
uuuagccgugaacccgccu

SEQ ID NO: 295370 - RNA, 19 nt, Artificial Sequence
  Description of Artificial Sequence: Synthetic oligonucleotide
acacucccgccaaagggac

SEQ ID NO: 295371 - RNA, 19 nt, Artificial Sequence
  Description of Artificial Sequence: Synthetic oligonucleotide
auucagcccgagugcugcg

SEQ ID NO: 295372 - RNA, 19 nt, Artificial Sequence
  Description of Artificial Sequence: Synthetic oligonucleotide
aggccuaccccauuaccaa

SEQ ID NO: 295373 - RNA, 19 nt, Artificial Sequence
  Description of Artificial Sequence: Synthetic oligonucleotide
ucguagacucgugaauccu

SEQ ID NO: 295374 - RNA, 19 nt, Artificial Sequence
  Description of Artificial Sequence: Synthetic oligonucleotide
uccacccauggagucaggc

SEQ ID NO: 295375 - RNA, 19 nt, Artificial Sequence
  Description of Artificial Sequence: Synthetic oligonucleotide
gcuaauuguuucccaacuc

SEQ ID NO: 295376 - RNA, 19 nt, Artificial Sequence
  Description of Artificial Sequence: Synthetic oligonucleotide
accaggugaccacucgaga

SEQ ID NO: 295377 - RNA, 19 nt, Artificial Sequence
  Description of Artificial Sequence: Synthetic oligonucleotide
cuuauagcugauccuuaaa

SEQ ID NO: 295378 - RNA, 19 nt, Artificial Sequence
  Description of Artificial Sequence: Synthetic oligonucleotide
ugccgccuaccucauacau

SEQ ID NO: 295379 - RNA, 19 nt, Artificial Sequence
  Description of Artificial Sequence: Synthetic oligonucleotide
uggcccaugccgccuaccu

SEQ ID NO: 295380 - RNA, 19 nt, Artificial Sequence
  Description of Artificial Sequence: Synthetic oligonucleotide
guagacucgugaauccuca

SEQ ID NO: 295381 - RNA, 19 nt, Artificial Sequence
  Description of Artificial Sequence: Synthetic oligonucleotide
acgugucagagcagagccc

SEQ ID NO: 295382 - RNA, 19 nt, Artificial Sequence
  Description of Artificial Sequence: Synthetic oligonucleotide
gcagcuuuauucuucgcaa

SEQ ID NO: 295383 - RNA, 19 nt, Artificial Sequence
  Description of Artificial Sequence: Synthetic oligonucleotide
acuaaucuuuacauccuua

SEQ ID NO: 295384 - RNA, 19 nt, Artificial Sequence
  Description of Artificial Sequence: Synthetic oligonucleotide
accacccgcgcacugugug

SEQ ID NO: 295385 - RNA, 19 nt, Artificial Sequence
  Description of Artificial Sequence: Synthetic oligonucleotide
uuccgagucuccucccgcu

SEQ ID NO: 295386 - RNA, 19 nt, Artificial Sequence
  Description of Artificial Sequence: Synthetic oligonucleotide
cuuuagccgugaacccgcc

SEQ ID NO: 295387 - RNA, 19 nt, Artificial Sequence
  Description of Artificial Sequence: Synthetic oligonucleotide
uggacggccucgacucuug

SEQ ID NO: 295388 - RNA, 19 nt, Artificial Sequence
  Description of Artificial Sequence: Synthetic oligonucleotide
ccaggugaccacucgagac

SEQ ID NO: 295389 - RNA, 19 nt, Artificial Sequence
  Description of Artificial Sequence: Synthetic oligonucleotide
ucaccauuuugcugcucuc

SEQ ID NO: 295390 - RNA, 19 nt, Artificial Sequence
  Description of Artificial Sequence: Synthetic oligonucleotide
uguagguggacggccucga

SEQ ID NO: 295391 - RNA, 19 nt, Artificial Sequence
  Description of Artificial Sequence: Synthetic oligonucleotide
ccuacagcucucaguaaag

SEQ ID NO: 295392 - RNA, 19 nt, Artificial Sequence
  Description of Artificial Sequence: Synthetic oligonucleotide
uguuugccgcaugccauga

SEQ ID NO: 295393 - RNA, 19 nt, Artificial Sequence
  Description of Artificial Sequence: Synthetic oligonucleotide
uguggcucgggcagcuuua

SEQ ID NO: 295394 - RNA, 19 nt, Artificial Sequence
  Description of Artificial Sequence: Synthetic oligonucleotide
  modified_base (11)..(11): a, c, u, g, unknown or other
gcuccaaauunucaguaaa

SEQ ID NO: 295395 - RNA, 19 nt, Artificial Sequence
  Description of Artificial Sequence: Synthetic oligonucleotide
ccaaaauagccugaaauaa

SEQ ID NO: 295396 - RNA, 19 nt, Artificial Sequence
  Description of Artificial Sequence: Synthetic oligonucleotide
ucgacccaggggcuugaga

SEQ ID NO: 295397 - RNA, 19 nt, Artificial Sequence
  Description of Artificial Sequence: Synthetic oligonucleotide
cgugaacccgccuugcucc

SEQ ID NO: 295398 - RNA, 19 nt, Artificial Sequence
  Description of Artificial Sequence: Synthetic oligonucleotide
agguagguacgaaauuccu

SEQ ID NO: 295399 - RNA, 19 nt, Artificial Sequence
  Description of Artificial Sequence: Synthetic oligonucleotide
aaacagucggcagcagaua

SEQ ID NO: 295400 - RNA, 19 nt, Artificial Sequence
  Description of Artificial Sequence: Synthetic oligonucleotide
acaccacccgcgcacugug

SEQ ID NO: 295401 - RNA, 19 nt, Artificial Sequence
  Description of Artificial Sequence: Synthetic oligonucleotide
ccaacucugcagaucgacc

SEQ ID NO: 295402 - RNA, 19 nt, Artificial Sequence
  Description of Artificial Sequence: Synthetic oligonucleotide
ccagguagguacgaaauuc

SEQ ID NO: 295403 - RNA, 19 nt, Artificial Sequence
  Description of Artificial Sequence: Synthetic oligonucleotide
ccauuaccaacacucccgc

SEQ ID NO: 295404 - RNA, 19 nt, Artificial Sequence
  Description of Artificial Sequence: Synthetic oligonucleotide
gccauacaugcgcaguaag

SEQ ID NO: 295405 - RNA, 19 nt, Artificial Sequence
  Description of Artificial Sequence: Synthetic oligonucleotide
caucuugcacagauaaagu

SEQ ID NO: 295406 - RNA, 19 nt, Artificial Sequence
  Description of Artificial Sequence: Synthetic oligonucleotide
gguagguacgaaauuccuc

SEQ ID NO: 295407 - RNA, 19 nt, Artificial Sequence
  Description of Artificial Sequence: Synthetic oligonucleotide
cagauccguaagucacacc

SEQ ID NO: 295408 - RNA, 19 nt, Artificial Sequence
  Description of Artificial Sequence: Synthetic oligonucleotide
caguaaggauccccaguuc

SEQ ID NO: 295409 - RNA, 19 nt, Artificial Sequence
  Description of Artificial Sequence: Synthetic oligonucleotide
cuuacuccuacagcucuca

SEQ ID NO: 295410 - RNA, 19 nt, Artificial Sequence
  Description of Artificial Sequence: Synthetic oligonucleotide
agggcggaccuugaggaca

SEQ ID NO: 295411 - RNA, 19 nt, Artificial Sequence
  Description of Artificial Sequence: Synthetic oligonucleotide
gaacccgccuugcuccuuc

SEQ ID NO: 295412 - RNA, 19 nt, Artificial Sequence
  Description of Artificial Sequence: Synthetic oligonucleotide
uacaccacccgcgcacugu

SEQ ID NO: 295413 - RNA, 19 nt, Artificial Sequence
  Description of Artificial Sequence: Synthetic oligonucleotide
guacgaaauuccuccagau

SEQ ID NO: 295414 - RNA, 19 nt, Artificial Sequence
  Description of Artificial Sequence: Synthetic oligonucleotide
accacucgagacucucuau

SEQ ID NO: 295415 - RNA, 19 nt, Artificial Sequence
  Description of Artificial Sequence: Synthetic oligonucleotide
cacaagggcucaccaccag

SEQ ID NO: 295416 - RNA, 19 nt, Artificial Sequence
  Description of Artificial Sequence: Synthetic oligonucleotide
gcuuuagccgugaacccgc

SEQ ID NO: 295417 - RNA, 19 nt, Artificial Sequence
  Description of Artificial Sequence: Synthetic oligonucleotide
gcugcguucuacuccugug

SEQ ID NO: 295418 - RNA, 19 nt, Artificial Sequence
  Description of Artificial Sequence: Synthetic oligonucleotide
caacucguuuauucuuaca

SEQ ID NO: 295419 - RNA, 19 nt, Artificial Sequence
  Description of Artificial Sequence: Synthetic oligonucleotide
uucgugcaggaugcagacc

SEQ ID NO: 295420 - RNA, 19 nt, Artificial Sequence
  Description of Artificial Sequence: Synthetic oligonucleotide
ggcagaugcuacaauugac

SEQ ID NO: 295421 - RNA, 19 nt, Artificial Sequence
  Description of Artificial Sequence: Synthetic oligonucleotide
ccaacacucccgccaaagg

SEQ ID NO: 295422 - RNA, 19 nt, Artificial Sequence
  Description of Artificial Sequence: Synthetic oligonucleotide
ggagaacuuccggacugcg

SEQ ID NO: 295423 - RNA, 19 nt, Artificial Sequence
  Description of Artificial Sequence: Synthetic oligonucleotide
agaucgacccaggggcuug

SEQ ID NO: 295424 - RNA, 19 nt, Artificial Sequence
  Description of Artificial Sequence: Synthetic oligonucleotide
gugagaucacaguuuugcu

SEQ ID NO: 295425 - RNA, 19 nt, Artificial Sequence
  Description of Artificial Sequence: Synthetic oligonucleotide
cuaucacacucuugucaga

SEQ ID NO: 295426 - RNA, 19 nt, Artificial Sequence
  Description of Artificial Sequence: Synthetic oligonucleotide
gcucguagacucgugaauc

SEQ ID NO: 295427 - RNA, 19 nt, Artificial Sequence
  Description of Artificial Sequence: Synthetic oligonucleotide
acuaaggagcaggcuacau

SEQ ID NO: 295428 - RNA, 19 nt, Artificial Sequence
  Description of Artificial Sequence: Synthetic oligonucleotide
ggagcaggcuacauucagc

SEQ ID NO: 295429 - RNA, 19 nt, Artificial Sequence
  Description of Artificial Sequence: Synthetic oligonucleotide
augccaugacauauucacu

SEQ ID NO: 295430 - RNA, 19 nt, Artificial Sequence
  Description of Artificial Sequence: Synthetic oligonucleotide
ggggcuugagaggugacac

SEQ ID NO: 295431 - RNA, 19 nt, Artificial Sequence
  Description of Artificial Sequence: Synthetic oligonucleotide
gagacaacagcccggccuu

SEQ ID NO: 295432 - RNA, 19 nt, Artificial Sequence
  Description of Artificial Sequence: Synthetic oligonucleotide
gcuuagaggaggaucaugu

SEQ ID NO: 295433 - RNA, 19 nt, Artificial Sequence
  Description of Artificial Sequence: Synthetic oligonucleotide
ccccauuaccaacacuccc

SEQ ID NO: 295434 - RNA, 19 nt, Artificial Sequence
  Description of Artificial Sequence: Synthetic oligonucleotide
cugcagugauguguggcug

SEQ ID NO: 295435 - RNA, 19 nt, Artificial Sequence
  Description of Artificial Sequence: Synthetic oligonucleotide
caagaucuacagcugucua

SEQ ID NO: 295436 - RNA, 19 nt, Artificial Sequence
  Description of Artificial Sequence: Synthetic oligonucleotide
gcucucacggccauacaug

SEQ ID NO: 295437 - RNA, 19 nt, Artificial Sequence
  Description of Artificial Sequence: Synthetic oligonucleotide
cuuccggacugcgggugcg

SEQ ID NO: 295438 - RNA, 19 nt, Artificial Sequence
  Description of Artificial Sequence: Synthetic oligonucleotide
ccgcaggaaaggaacuuag

SEQ ID NO: 295439 - RNA, 19 nt, Artificial Sequence
  Description of Artificial Sequence: Synthetic oligonucleotide
ucagcccgagugcugcguu

SEQ ID NO: 295440 - RNA, 19 nt, Artificial Sequence
  Description of Artificial Sequence: Synthetic oligonucleotide
acgauugcuuuagccguga

SEQ ID NO: 295441 - RNA, 19 nt, Artificial Sequence
  Description of Artificial Sequence: Synthetic oligonucleotide
gguuaaacugacgccgcuc

SEQ ID NO: 295442 - RNA, 19 nt, Artificial Sequence
  Description of Artificial Sequence: Synthetic oligonucleotide
caguuacuuauagcugauc

SEQ ID NO: 295443 - RNA, 19 nt, Artificial Sequence
  Description of Artificial Sequence: Synthetic oligonucleotide
acagucggcagcagauaca

SEQ ID NO: 295444 - RNA, 19 nt, Artificial Sequence
  Description of Artificial Sequence: Synthetic oligonucleotide
ggauccccaguucuugaca

SEQ ID NO: 295445 - RNA, 19 nt, Artificial Sequence
  Description of Artificial Sequence: Synthetic oligonucleotide
uccccacgugucagagcag

SEQ ID NO: 295446 - RNA, 19 nt, Artificial Sequence
  Description of Artificial Sequence: Synthetic oligonucleotide
gggauugaugacaaauucu

SEQ ID NO: 295447 - RNA, 19 nt, Artificial Sequence
  Description of Artificial Sequence: Synthetic oligonucleotide
ggugugagaucacaguuuu

SEQ ID NO: 295448 - RNA, 19 nt, Artificial Sequence
  Description of Artificial Sequence: Synthetic oligonucleotide
ggcaaaggggcuaccuggc

SEQ ID NO: 295449 - RNA, 19 nt, Artificial Sequence
  Description of Artificial Sequence: Synthetic oligonucleotide
guuugccgcaugccaugac

SEQ ID NO: 295450 - RNA, 19 nt, Artificial Sequence
  Description of Artificial Sequence: Synthetic oligonucleotide
ggaugugaagguugggccu

SEQ ID NO: 295451 - RNA, 19 nt, Artificial Sequence
  Description of Artificial Sequence: Synthetic oligonucleotide
acauucagcccgagugcug

SEQ ID NO: 295452 - RNA, 19 nt, Artificial Sequence
  Description of Artificial Sequence: Synthetic oligonucleotide
aggcacucauggaggaucu

SEQ ID NO: 295453 - RNA, 19 nt, Artificial Sequence
  Description of Artificial Sequence: Synthetic oligonucleotide
ugccgcaugccaugacaua

SEQ ID NO: 295454 - RNA, 19 nt, Artificial Sequence
  Description of Artificial Sequence: Synthetic oligonucleotide
cagcucguagacucgugaa

SEQ ID NO: 295455 - RNA, 19 nt, Artificial Sequence
  Description of Artificial Sequence: Synthetic oligonucleotide
gugugagaucacaguuuug

SEQ ID NO: 295456 - RNA, 19 nt, Artificial Sequence
  Description of Artificial Sequence: Synthetic oligonucleotide
gagucuccacccauggagu

SEQ ID NO: 295457 - RNA, 19 nt, Artificial Sequence
  Description of Artificial Sequence: Synthetic oligonucleotide
ugccgcaggaaaggaacuu

SEQ ID NO: 295458 - RNA, 19 nt, Artificial Sequence
  Description of Artificial Sequence: Synthetic oligonucleotide
gauuuucugagaggcuaau

SEQ ID NO: 295459 - RNA, 19 nt, Artificial Sequence
  Description of Artificial Sequence: Synthetic oligonucleotide
gcguucuacuccuguguac

SEQ ID NO: 295460 - RNA, 19 nt, Artificial Sequence
  Description of Artificial Sequence: Synthetic oligonucleotide
cagggcggaccuugaggac

SEQ ID NO: 295461 - RNA, 19 nt, Artificial Sequence
  Description of Artificial Sequence: Synthetic oligonucleotide
agcccgagugcugcguucu

SEQ ID NO: 295462 - RNA, 19 nt, Artificial Sequence
  Description of Artificial Sequence: Synthetic oligonucleotide
uccggacugcgggugcgug

SEQ ID NO: 295463 - RNA, 19 nt, Artificial Sequence
  Description of Artificial Sequence: Synthetic oligonucleotide
cguagacucgugaauccuc

SEQ ID NO: 295464 - RNA, 19 nt, Artificial Sequence
  Description of Artificial Sequence: Synthetic oligonucleotide
gagacucucuaugcaggua

SEQ ID NO: 295465 - RNA, 19 nt, Artificial Sequence
  Description of Artificial Sequence: Synthetic oligonucleotide
gucagcucguagacucgug

SEQ ID NO: 295466 - RNA, 19 nt, Artificial Sequence
  Description of Artificial Sequence: Synthetic oligonucleotide
ugcucccguuccucauugu

SEQ ID NO: 295467 - RNA, 19 nt, Artificial Sequence
  Description of Artificial Sequence: Synthetic oligonucleotide
ccagauccguaagucacac

SEQ ID NO: 295468 - RNA, 19 nt, Artificial Sequence
  Description of Artificial Sequence: Synthetic oligonucleotide
auguuuccguaugcuuccu

SEQ ID NO: 295469 - RNA, 19 nt, Artificial Sequence
  Description of Artificial Sequence: Synthetic oligonucleotide
ggccuaccccauuaccaac

SEQ ID NO: 295470 - RNA, 19 nt, Artificial Sequence
  Description of Artificial Sequence: Synthetic oligonucleotide
cuuagaggaggaucauguu

SEQ ID NO: 295471 - RNA, 19 nt, Artificial Sequence
  Description of Artificial Sequence: Synthetic oligonucleotide
gacucucuaugcagguaua

SEQ ID NO: 295472 - RNA, 19 nt, Artificial Sequence
  Description of Artificial Sequence: Synthetic oligonucleotide
agcugucuaucagcuucca

SEQ ID NO: 295473 - RNA, 19 nt, Artificial Sequence
  Description of Artificial Sequence: Synthetic oligonucleotide
cacugggugugagaucaca

SEQ ID NO: 295474 - RNA, 19 nt, Artificial Sequence
  Description of Artificial Sequence: Synthetic oligonucleotide
gggacuccagaguuaugaa

SEQ ID NO: 295475 - RNA, 19 nt, Artificial Sequence
  Description of Artificial Sequence: Synthetic oligonucleotide
cacuucaaacuugauggau

SEQ ID NO: 295476 - RNA, 19 nt, Artificial Sequence
  Description of Artificial Sequence: Synthetic oligonucleotide
gcgcaguaaggauccccag

SEQ ID NO: 295477 - RNA, 19 nt, Artificial Sequence
  Description of Artificial Sequence: Synthetic oligonucleotide
ccuuacuccuacagcucuc

SEQ ID NO: 295478 - RNA, 19 nt, Artificial Sequence
  Description of Artificial Sequence: Synthetic oligonucleotide
gauccguaagucacaccau

SEQ ID NO: 295479 - RNA, 19 nt, Artificial Sequence
  Description of Artificial Sequence: Synthetic oligonucleotide
ggacaagcaugcagucccc

SEQ ID NO: 295480 - RNA, 19 nt, Artificial Sequence
  Description of Artificial Sequence: Synthetic oligonucleotide
gcaaaggggcuaccuggca

SEQ ID NO: 295481 - RNA, 19 nt, Artificial Sequence
  Description of Artificial Sequence: Synthetic oligonucleotide
cagcccgagugcugcguuc

SEQ ID NO: 295482 - RNA, 19 nt, Artificial Sequence
  Description of Artificial Sequence: Synthetic oligonucleotide
gccuaccccauuaccaaca

SEQ ID NO: 295483 - RNA, 19 nt, Artificial Sequence
  Description of Artificial Sequence: Synthetic oligonucleotide
cguucuacuccuguguaca

SEQ ID NO: 295484 - RNA, 19 nt, Artificial Sequence
  Description of Artificial Sequence: Synthetic oligonucleotide
guaaggauccccaguucuu

SEQ ID NO: 295485 - RNA, 19 nt, Artificial Sequence
  Description of Artificial Sequence: Synthetic oligonucleotide
cuuugcacgugugcugugu

SEQ ID NO: 295486 - RNA, 19 nt, Artificial Sequence
  Description of Artificial Sequence: Synthetic oligonucleotide
gaucgacccaggggcuuga

SEQ ID NO: 295487 - RNA, 19 nt, Artificial Sequence
  Description of Artificial Sequence: Synthetic oligonucleotide
cccaacucguuuauucuua

SEQ ID NO: 295488 - RNA, 19 nt, Artificial Sequence
  Description of Artificial Sequence: Synthetic oligonucleotide
ccgugaacccgccuugcuc

SEQ ID NO: 295489 - RNA, 19 nt, Artificial Sequence
  Description of Artificial Sequence: Synthetic oligonucleotide
cccgccuugcuccuucuuc

SEQ ID NO: 295490 - RNA, 19 nt, Artificial Sequence
  Description of Artificial Sequence: Synthetic oligonucleotide
uuccggacugcgggugcgu

SEQ ID NO: 295491 - RNA, 19 nt, Artificial Sequence
  Description of Artificial Sequence: Synthetic oligonucleotide
aucgacccaggggcuugag

SEQ ID NO: 295492 - RNA, 19 nt, Artificial Sequence
  Description of Artificial Sequence: Synthetic oligonucleotide
cccacgugucagagcagag

SEQ ID NO: 295493 - RNA, 19 nt, Artificial Sequence
  Description of Artificial Sequence: Synthetic oligonucleotide
cuuagguuggaggccuggu

SEQ ID NO: 295494 - RNA, 19 nt, Artificial Sequence
  Description of Artificial Sequence: Synthetic oligonucleotide
ggccucgacucuugagcac

SEQ ID NO: 295495 - RNA, 19 nt, Artificial Sequence
  Description of Artificial Sequence: Synthetic oligonucleotide
ccguaagucacaccaucaa

SEQ ID NO: 295496 - RNA, 19 nt, Artificial Sequence
  Description of Artificial Sequence: Synthetic oligonucleotide
caauacugaugugguuaaa

SEQ ID NO: 295497 - RNA, 19 nt, Artificial Sequence
  Description of Artificial Sequence: Synthetic oligonucleotide
gcgggugcgugccgggcag

SEQ ID NO: 295498 - RNA, 19 nt, Artificial Sequence
  Description of Artificial Sequence: Synthetic oligonucleotide
gacgccgcucagcccaagu

SEQ ID NO: 295499 - RNA, 19 nt, Artificial Sequence
  Description of Artificial Sequence: Synthetic oligonucleotide
ugacgccgcucagcccaag

SEQ ID NO: 295500 - RNA, 19 nt, Artificial Sequence
  Description of Artificial Sequence: Synthetic oligonucleotide
cacucccgccaaagggaca

SEQ ID NO: 295501 - RNA, 19 nt, Artificial Sequence
  Description of Artificial Sequence: Synthetic oligonucleotide
cugccgcaggaaaggaacu

SEQ ID NO: 295502 - RNA, 19 nt, Artificial Sequence
  Description of Artificial Sequence: Synthetic oligonucleotide
gcacgugugcugugugguc

SEQ ID NO: 295503 - RNA, 19 nt, Artificial Sequence
  Description of Artificial Sequence: Synthetic oligonucleotide
cuuacaccacccgcgcacu

SEQ ID NO: 295504 - RNA, 19 nt, Artificial Sequence
  Description of Artificial Sequence: Synthetic oligonucleotide
gcucaaaaucaaaacgcuu

SEQ ID NO: 295505 - RNA, 19 nt, Artificial Sequence
  Description of Artificial Sequence: Synthetic oligonucleotide
aggcuacauucagcccgag

SEQ ID NO: 295506 - RNA, 19 nt, Artificial Sequence
  Description of Artificial Sequence: Synthetic oligonucleotide
ccggacugcgggugcgugc

SEQ ID NO: 295507 - RNA, 19 nt, Artificial Sequence
  Description of Artificial Sequence: Synthetic oligonucleotide
cgagugcugcguucuacuc

SEQ ID NO: 295508 - RNA, 19 nt, Artificial Sequence
  Description of Artificial Sequence: Synthetic oligonucleotide
ugaacccgccuugcuccuu

SEQ ID NO: 295509 - RNA, 19 nt, Artificial Sequence
  Description of Artificial Sequence: Synthetic oligonucleotide
gggcggaccuugaggacac

SEQ ID NO: 295510 - RNA, 19 nt, Artificial Sequence
  Description of Artificial Sequence: Synthetic oligonucleotide
gccgccuaccucauacauc

SEQ ID NO: 295511 - RNA, 19 nt, Artificial Sequence
  Description of Artificial Sequence: Synthetic oligonucleotide
gcuugagaggugacaccuc

SEQ ID NO: 295512 - RNA, 19 nt, Artificial Sequence
  Description of Artificial Sequence: Synthetic oligonucleotide
gugaacccgccuugcuccu

SEQ ID NO: 295513 - RNA, 19 nt, Artificial Sequence
  Description of Artificial Sequence: Synthetic oligonucleotide
gccgcaugccaugacauau

SEQ ID NO: 295514 - RNA, 19 nt, Artificial Sequence
  Description of Artificial Sequence: Synthetic oligonucleotide
cucagcccaaguccugaau

SEQ ID NO: 295515 - RNA, 19 nt, Artificial Sequence
  Description of Artificial Sequence: Synthetic oligonucleotide
cugcucucacggccauaca

SEQ ID NO: 295516 - RNA, 19 nt, Artificial Sequence
  Description of Artificial Sequence: Synthetic oligonucleotide
gccgcaggaaaggaacuua

SEQ ID NO: 295517 - RNA, 19 nt, Artificial Sequence
  Description of Artificial Sequence: Synthetic oligonucleotide
cgugccgggcagugcgugg

SEQ ID NO: 295518 - RNA, 19 nt, Artificial Sequence
  Description of Artificial Sequence: Synthetic oligonucleotide
ccuuucuguuauaaccuuu

SEQ ID NO: 295519 - RNA, 19 nt, Artificial Sequence
  Description of Artificial Sequence: Synthetic oligonucleotide
gggugugagaucacaguuu

SEQ ID NO: 295520 - RNA, 19 nt, Artificial Sequence
  Description of Artificial Sequence: Synthetic oligonucleotide
ggucagcucguagacucgu

SEQ ID NO: 295521 - RNA, 19 nt, Artificial Sequence
  Description of Artificial Sequence: Synthetic oligonucleotide
ggucaccgaggcaccaaaa

SEQ ID NO: 295522 - RNA, 19 nt, Artificial Sequence
  Description of Artificial Sequence: Synthetic oligonucleotide
cggccucgacucuugagca

SEQ ID NO: 295523 - RNA, 19 nt, Artificial Sequence
  Description of Artificial Sequence: Synthetic oligonucleotide
aggggcuaccuggcaucau

SEQ ID NO: 295524 - RNA, 19 nt, Artificial Sequence
  Description of Artificial Sequence: Synthetic oligonucleotide
cugacgccgcucagcccaa

SEQ ID NO: 295525 - RNA, 19 nt, Artificial Sequence
  Description of Artificial Sequence: Synthetic oligonucleotide
cugcaccuucugaccaggu

SEQ ID NO: 295526 - RNA, 19 nt, Artificial Sequence
  Description of Artificial Sequence: Synthetic oligonucleotide
ccccacgugucagagcaga

SEQ ID NO: 295527 - RNA, 19 nt, Artificial Sequence
  Description of Artificial Sequence: Synthetic oligonucleotide
ccgagugcugcguucuacu

SEQ ID NO: 295528 - RNA, 19 nt, Artificial Sequence
  Description of Artificial Sequence: Synthetic oligonucleotide
cccuaggccuaccccauua

SEQ ID NO: 295529 - RNA, 19 nt, Artificial Sequence
  Description of Artificial Sequence: Synthetic oligonucleotide
ccgcucagcccaaguccug

SEQ ID NO: 295530 - RNA, 19 nt, Artificial Sequence
  Description of Artificial Sequence: Synthetic oligonucleotide
ccacugggugugagaucac

SEQ ID NO: 295531 - RNA, 19 nt, Artificial Sequence
  Description of Artificial Sequence: Synthetic oligonucleotide
gguagcacuguuggcccau

SEQ ID NO: 295532 - RNA, 19 nt, Artificial Sequence
  Description of Artificial Sequence: Synthetic oligonucleotide
accuccccacuggguguga

SEQ ID NO: 295533 - RNA, 19 nt, Artificial Sequence
  Description of Artificial Sequence: Synthetic oligonucleotide
ggcggaccuugaggacacg

SEQ ID NO: 295534 - RNA, 19 nt, Artificial Sequence
  Description of Artificial Sequence: Synthetic oligonucleotide
gcuggucagcucguagacu

SEQ ID NO: 295535 - RNA, 19 nt, Artificial Sequence
  Description of Artificial Sequence: Synthetic oligonucleotide
gcagaucgacccaggggcu

SEQ ID NO: 295536 - RNA, 19 nt, Artificial Sequence
  Description of Artificial Sequence: Synthetic oligonucleotide
guggacggccucgacucuu

SEQ ID NO: 295537 - RNA, 19 nt, Artificial Sequence
  Description of Artificial Sequence: Synthetic oligonucleotide
gccgugaacccgccuugcu

SEQ ID NO: 295538 - RNA, 19 nt, Artificial Sequence
  Description of Artificial Sequence: Synthetic oligonucleotide
ccucaauacugaugugguu

SEQ ID NO: 295539 - RNA, 19 nt, Artificial Sequence
  Description of Artificial Sequence: Synthetic oligonucleotide
cggaccuugaggacacgcu

SEQ ID NO: 295540 - RNA, 19 nt, Artificial Sequence
  Description of Artificial Sequence: Synthetic oligonucleotide
cagaucgacccaggggcuu

SEQ ID NO: 295541 - RNA, 19 nt, Artificial Sequence
  Description of Artificial Sequence: Synthetic oligonucleotide
ggugaccacucgagacucu

SEQ ID NO: 295542 - RNA, 19 nt, Artificial Sequence
  Description of Artificial Sequence: Synthetic oligonucleotide
cacccgcgcacuguguguu

SEQ ID NO: 295543 - RNA, 19 nt, Artificial Sequence
  Description of Artificial Sequence: Synthetic oligonucleotide
ccacccgcgcacugugugu

SEQ ID NO: 295544 - RNA, 19 nt, Artificial Sequence
  Description of Artificial Sequence: Synthetic oligonucleotide
ccgcaugccaugacauauu

SEQ ID NO: 295545 - RNA, 19 nt, Artificial Sequence
  Description of Artificial Sequence: Synthetic oligonucleotide
cgauugcuuuagccgugaa

SEQ ID NO: 295546 - RNA, 19 nt, Artificial Sequence
  Description of Artificial Sequence: Synthetic oligonucleotide
cgguuaaacugacgccgcu

SEQ ID NO: 295547 - RNA, 19 nt, Artificial Sequence
  Description of Artificial Sequence: Synthetic oligonucleotide
ccccuaggccuaccccauu

SEQ ID NO: 295548 - RNA, 19 nt, Artificial Sequence
  Description of Artificial Sequence: Synthetic oligonucleotide
cgggugcgugccgggcagu

SEQ ID NO: 295549 - RNA, 19 nt, Artificial Sequence
  Description of Artificial Sequence: Synthetic oligonucleotide
aaauauaugugugaguucc

SEQ ID NO: 295550 - RNA, 19 nt, Artificial Sequence
  Description of Artificial Sequence: Synthetic oligonucleotide
acgauuaacacacacauac

SEQ ID NO: 295551 - RNA, 19 nt, Artificial Sequence
  Description of Artificial Sequence: Synthetic oligonucleotide
aaaauuaaauaguuggcag

SEQ ID NO: 295552 - RNA, 19 nt, Artificial Sequence
  Description of Artificial Sequence: Synthetic oligonucleotide
ucuaacacaaacauuuugg

SEQ ID NO: 295553 - RNA, 19 nt, Artificial Sequence
  Description of Artificial Sequence: Synthetic oligonucleotide
aaauucaguauuugcaggc

SEQ ID NO: 295554 - RNA, 19 nt, Artificial Sequence
  Description of Artificial Sequence: Synthetic oligonucleotide
acuaauacgauuaacacac

SEQ ID NO: 295555 - RNA, 19 nt, Artificial Sequence
  Description of Artificial Sequence: Synthetic oligonucleotide
uauguaagcguccaagucg

SEQ ID NO: 295556 - RNA, 19 nt, Artificial Sequence
  Description of Artificial Sequence: Synthetic oligonucleotide
ucuaguuuucgacugaagg

SEQ ID NO: 295557 - RNA, 19 nt, Artificial Sequence
  Description of Artificial Sequence: Synthetic oligonucleotide
aacacacacauacacacac

SEQ ID NO: 295558 - RNA, 19 nt, Artificial Sequence
  Description of Artificial Sequence: Synthetic oligonucleotide
aagagaaagagagagagag

SEQ ID NO: 295559 - RNA, 19 nt, Artificial Sequence
  Description of Artificial Sequence: Synthetic oligonucleotide
uuuaccuuagacaaacucc

SEQ ID NO: 295560 - RNA, 19 nt, Artificial Sequence
  Description of Artificial Sequence: Synthetic oligonucleotide
auugaaguauuucaaacuc

SEQ ID NO: 295561 - RNA, 19 nt, Artificial Sequence
  Description of Artificial Sequence: Synthetic oligonucleotide
aacacauuacagcugguac

SEQ ID NO: 295562 - RNA, 19 nt, Artificial Sequence
  Description of Artificial Sequence: Synthetic oligonucleotide
aagagagagagagaaaccc

SEQ ID NO: 295563 - RNA, 19 nt, Artificial Sequence
  Description of Artificial Sequence: Synthetic oligonucleotide
auauguucaaauuuccaac

SEQ ID NO: 295564 - RNA, 19 nt, Artificial Sequence
  Description of Artificial Sequence: Synthetic oligonucleotide
aaguauuucaaacucaaaa

SEQ ID NO: 295565 - RNA, 19 nt, Artificial Sequence
  Description of Artificial Sequence: Synthetic oligonucleotide
auauauuucacacgauggg

SEQ ID NO: 295566 - RNA, 19 nt, Artificial Sequence
  Description of Artificial Sequence: Synthetic oligonucleotide
uuaccuuagacaaacuccc

SEQ ID NO: 295567 - RNA, 19 nt, Artificial Sequence
  Description of Artificial Sequence: Synthetic oligonucleotide
cacugauagaauuucaggg

SEQ ID NO: 295568 - RNA, 19 nt, Artificial Sequence
  Description of Artificial Sequence: Synthetic oligonucleotide
uauaaaucugggcugacac

SEQ ID NO: 295569 - RNA, 19 nt, Artificial Sequence
  Description of Artificial Sequence: Synthetic oligonucleotide
uuuuggguuauuaugugug

SEQ ID NO: 295570 - RNA, 19 nt, Artificial Sequence
  Description of Artificial Sequence: Synthetic oligonucleotide
cuaguuuucgacugaaggg

SEQ ID NO: 295571 - RNA, 19 nt, Artificial Sequence
  Description of Artificial Sequence: Synthetic oligonucleotide
uauaucagaaagaacuccu

SEQ ID NO: 295572 - RNA, 19 nt, Artificial Sequence
  Description of Artificial Sequence: Synthetic oligonucleotide
uuaaauaguuggcagaaua

SEQ ID NO: 295573 - RNA, 19 nt, Artificial Sequence
  Description of Artificial Sequence: Synthetic oligonucleotide
agcaaauauaguucccacc

SEQ ID NO: 295574 - RNA, 19 nt, Artificial Sequence
  Description of Artificial Sequence: Synthetic oligonucleotide
aagcaaauauaguucccac

SEQ ID NO: 295575 - RNA, 19 nt, Artificial Sequence
  Description of Artificial Sequence: Synthetic oligonucleotide
agauauauuucacacgaug

SEQ ID NO: 295576 - RNA, 19 nt, Artificial Sequence
  Description of Artificial Sequence: Synthetic oligonucleotide
ugaauuaucaauacugcuu

SEQ ID NO: 295577 - RNA, 19 nt, Artificial Sequence
  Description of Artificial Sequence: Synthetic oligonucleotide
aagaucuaguuuucgacug

SEQ ID NO: 295578 - RNA, 19 nt, Artificial Sequence
  Description of Artificial Sequence: Synthetic oligonucleotide
gaauuaucaauacugcuuc

SEQ ID NO: 295579 - RNA, 19 nt, Artificial Sequence
  Description of Artificial Sequence: Synthetic oligonucleotide
acucgaugugccuucaugc

SEQ ID NO: 295580 - RNA, 19 nt, Artificial Sequence
  Description of Artificial Sequence: Synthetic oligonucleotide
gaaagagagagagagaaac

SEQ ID NO: 295581 - RNA, 19 nt, Artificial Sequence
  Description of Artificial Sequence: Synthetic oligonucleotide
uuauggaacacgucauugg

SEQ ID NO: 295582 - RNA, 19 nt, Artificial Sequence
  Description of Artificial Sequence: Synthetic oligonucleotide
gucgauguaauacugacac

SEQ ID NO: 295583 - RNA, 19 nt, Artificial Sequence
  Description of Artificial Sequence: Synthetic oligonucleotide
aaagagagagagagaaacc

SEQ ID NO: 295584 - RNA, 19 nt, Artificial Sequence
  Description of Artificial Sequence: Synthetic oligonucleotide
cacacauacacacacacac

SEQ ID NO: 295585 - RNA, 19 nt, Artificial Sequence
  Description of Artificial Sequence: Synthetic oligonucleotide
ugaaguauuucaaacucaa

SEQ ID NO: 295586 - RNA, 19 nt, Artificial Sequence
  Description of Artificial Sequence: Synthetic oligonucleotide
aguacgaauacaguugaac

SEQ ID NO: 295587 - RNA, 19 nt, Artificial Sequence
  Description of Artificial Sequence: Synthetic oligonucleotide
ucugacaugauggacaacu

SEQ ID NO: 295588 - RNA, 19 nt, Artificial Sequence
  Description of Artificial Sequence: Synthetic oligonucleotide
gacaacuuuaacaugggug

SEQ ID NO: 295589 - RNA, 19 nt, Artificial Sequence
  Description of Artificial Sequence: Synthetic oligonucleotide
guacgaauacaguugaacc

SEQ ID NO: 295590 - RNA, 19 nt, Artificial Sequence
  Description of Artificial Sequence: Synthetic oligonucleotide
uacacacacacacacacac

SEQ ID NO: 295591 - RNA, 19 nt, Artificial Sequence
  Description of Artificial Sequence: Synthetic oligonucleotide
aaccugguaggagugacgc

SEQ ID NO: 295592 - RNA, 19 nt, Artificial Sequence
  Description of Artificial Sequence: Synthetic oligonucleotide
uugccgguaaaccugguag

SEQ ID NO: 295593 - RNA, 19 nt, Artificial Sequence
  Description of Artificial Sequence: Synthetic oligonucleotide
uucuaacacaaacauuuug

SEQ ID NO: 295594 - RNA, 19 nt, Artificial Sequence
  Description of Artificial Sequence: Synthetic oligonucleotide
uaucagaaagaacuccuug

SEQ ID NO: 295595 - RNA, 19 nt, Artificial Sequence
  Description of Artificial Sequence: Synthetic oligonucleotide
cauacacacacacacacac

SEQ ID NO: 295596 - RNA, 19 nt, Artificial Sequence
  Description of Artificial Sequence: Synthetic oligonucleotide
ugaagaaucaccagcuuau

SEQ ID NO: 295597 - RNA, 19 nt, Artificial Sequence
  Description of Artificial Sequence: Synthetic oligonucleotide
ugucauuauuaaaauuuca

SEQ ID NO: 295598 - RNA, 19 nt, Artificial Sequence
  Description of Artificial Sequence: Synthetic oligonucleotide
uacgaauacaguugaacca

SEQ ID NO: 295599 - RNA, 19 nt, Artificial Sequence
  Description of Artificial Sequence: Synthetic oligonucleotide
uaauauguucaaauuucca

SEQ ID NO: 295600 - RNA, 19 nt, Artificial Sequence
  Description of Artificial Sequence: Synthetic oligonucleotide
uaaauaguuggcagaauaa

SEQ ID NO: 295601 - RNA, 19 nt, Artificial Sequence
  Description of Artificial Sequence: Synthetic oligonucleotide
accuugcucgcuucgaucc

SEQ ID NO: 295602 - RNA, 19 nt, Artificial Sequence
  Description of Artificial Sequence: Synthetic oligonucleotide
uuauaucagaaagaacucc

SEQ ID NO: 295603 - RNA, 19 nt, Artificial Sequence
  Description of Artificial Sequence: Synthetic oligonucleotide
uaauacgauuaacacacac

SEQ ID NO: 295604 - RNA, 19 nt, Artificial Sequence
  Description of Artificial Sequence: Synthetic oligonucleotide
agcugguuacuacaguagc

SEQ ID NO: 295605 - RNA, 19 nt, Artificial Sequence
  Description of Artificial Sequence: Synthetic oligonucleotide
uaaaggguauuugacgagg

SEQ ID NO: 295606 - RNA, 19 nt, Artificial Sequence
  Description of Artificial Sequence: Synthetic oligonucleotide
uaucaauacugcuuccucc

SEQ ID NO: 295607 - RNA, 19 nt, Artificial Sequence
  Description of Artificial Sequence: Synthetic oligonucleotide
aauacgauuaacacacaca

SEQ ID NO: 295608 - RNA, 19 nt, Artificial Sequence
  Description of Artificial Sequence: Synthetic oligonucleotide
caaagaucuaguuuucgac

SEQ ID NO: 295609 - RNA, 19 nt, Artificial Sequence
  Description of Artificial Sequence: Synthetic oligonucleotide
cauuacagcugguacagag

SEQ ID NO: 295610 - RNA, 19 nt, Artificial Sequence
  Description of Artificial Sequence: Synthetic oligonucleotide
acgaauacaguugaaccac

SEQ ID NO: 295611 - RNA, 19 nt, Artificial Sequence
  Description of Artificial Sequence: Synthetic oligonucleotide
uucauucaucauuugaggu

SEQ ID NO: 295612 - RNA, 19 nt, Artificial Sequence
  Description of Artificial Sequence: Synthetic oligonucleotide
auguaauacugacacucgg

SEQ ID NO: 295613 - RNA, 19 nt, Artificial Sequence
  Description of Artificial Sequence: Synthetic oligonucleotide
aguagucuagaauauacua

SEQ ID NO: 295614 - RNA, 19 nt, Artificial Sequence
  Description of Artificial Sequence: Synthetic oligonucleotide
uauauuucacacgaugggu

SEQ ID NO: 295615 - RNA, 19 nt, Artificial Sequence
  Description of Artificial Sequence: Synthetic oligonucleotide
uugagugugucuaaggauu

SEQ ID NO: 295616 - RNA, 19 nt, Artificial Sequence
  Description of Artificial Sequence: Synthetic oligonucleotide
ugucugaguugccaaaagc

SEQ ID NO: 295617 - RNA, 19 nt, Artificial Sequence
  Description of Artificial Sequence: Synthetic oligonucleotide
uccaagucgccaaauauau

SEQ ID NO: 295618 - RNA, 19 nt, Artificial Sequence
  Description of Artificial Sequence: Synthetic oligonucleotide
uuggaagcggacucuaaag

SEQ ID NO: 295619 - RNA, 19 nt, Artificial Sequence
  Description of Artificial Sequence: Synthetic oligonucleotide
gacgaggcgacuacgaggg

SEQ ID NO: 295620 - RNA, 19 nt, Artificial Sequence
  Description of Artificial Sequence: Synthetic oligonucleotide
agaauauacuaagucaucu

SEQ ID NO: 295621 - RNA, 19 nt, Artificial Sequence
  Description of Artificial Sequence: Synthetic oligonucleotide
cuaggaaacuccaaagauc

SEQ ID NO: 295622 - RNA, 19 nt, Artificial Sequence
  Description of Artificial Sequence: Synthetic oligonucleotide
uaguuuucgacugaaggga

SEQ ID NO: 295623 - RNA, 19 nt, Artificial Sequence
  Description of Artificial Sequence: Synthetic oligonucleotide
auaucuaggaaacuccaaa

SEQ ID NO: 295624 - RNA, 19 nt, Artificial Sequence
  Description of Artificial Sequence: Synthetic oligonucleotide
cuuuaaagagcaugacccc

SEQ ID NO: 295625 - RNA, 19 nt, Artificial Sequence
  Description of Artificial Sequence: Synthetic oligonucleotide
uaugguuguuuuccaauga

SEQ ID NO: 295626 - RNA, 19 nt, Artificial Sequence
  Description of Artificial Sequence: Synthetic oligonucleotide
gacuacgagggauaucuag

SEQ ID NO: 295627 - RNA, 19 nt, Artificial Sequence
  Description of Artificial Sequence: Synthetic oligonucleotide
ugcuuucuagacaacacaa

SEQ ID NO: 295628 - RNA, 19 nt, Artificial Sequence
  Description of Artificial Sequence: Synthetic oligonucleotide
agggauaucuaggaaacuc

SEQ ID NO: 295629 - RNA, 19 nt, Artificial Sequence
  Description of Artificial Sequence: Synthetic oligonucleotide
uguagauuguagaugucau

SEQ ID NO: 295630 - RNA, 19 nt, Artificial Sequence
  Description of Artificial Sequence: Synthetic oligonucleotide
gacaggccgagucaaaacc

SEQ ID NO: 295631 - RNA, 19 nt, Artificial Sequence
  Description of Artificial Sequence: Synthetic oligonucleotide
ugacgaggcgacuacgagg

SEQ ID NO: 295632 - RNA, 19 nt, Artificial Sequence
  Description of Artificial Sequence: Synthetic oligonucleotide
aaacuuucaccaaaguccu

SEQ ID NO: 295633 - RNA, 19 nt, Artificial Sequence
  Description of Artificial Sequence: Synthetic oligonucleotide
cuuuuaacaguaaagggua

SEQ ID NO: 295634 - RNA, 19 nt, Artificial Sequence
  Description of Artificial Sequence: Synthetic oligonucleotide
cacauacacacacacacac

SEQ ID NO: 295635 - RNA, 19 nt, Artificial Sequence
  Description of Artificial Sequence: Synthetic oligonucleotide
cuacaguagcccuuguagg

SEQ ID NO: 295636 - RNA, 19 nt, Artificial Sequence
  Description of Artificial Sequence: Synthetic oligonucleotide
uucacuuaguaaaacuaau

SEQ ID NO: 295637 - RNA, 19 nt, Artificial Sequence
  Description of Artificial Sequence: Synthetic oligonucleotide
acagcugguacagaguaac

SEQ ID NO: 295638 - RNA, 19 nt, Artificial Sequence
  Description of Artificial Sequence: Synthetic oligonucleotide
cugauggccaguauaaauc

SEQ ID NO: 295639 - RNA, 19 nt, Artificial Sequence
  Description of Artificial Sequence: Synthetic oligonucleotide
gagaaagagagagagagaa

SEQ ID NO: 295640 - RNA, 19 nt, Artificial Sequence
  Description of Artificial Sequence: Synthetic oligonucleotide
uccuguugccaccugacug

SEQ ID NO: 295641 - RNA, 19 nt, Artificial Sequence
  Description of Artificial Sequence: Synthetic oligonucleotide
ucuucguaagccaggcugc

SEQ ID NO: 295642 - RNA, 19 nt, Artificial Sequence
  Description of Artificial Sequence: Synthetic oligonucleotide
uuaucaauacugcuuccuc

SEQ ID NO: 295643 - RNA, 19 nt, Artificial Sequence
  Description of Artificial Sequence: Synthetic oligonucleotide
uugguugccgguaaaccug

SEQ ID NO: 295644 - RNA, 19 nt, Artificial Sequence
  Description of Artificial Sequence: Synthetic oligonucleotide
uugucgauguaauacugac

SEQ ID NO: 295645 - RNA, 19 nt, Artificial Sequence
  Description of Artificial Sequence: Synthetic oligonucleotide
auugguugccgguaaaccu

SEQ ID NO: 295646 - RNA, 19 nt, Artificial Sequence
  Description of Artificial Sequence: Synthetic oligonucleotide
auguaagcguccaagucgc

SEQ ID NO: 295647 - RNA, 19 nt, Artificial Sequence
  Description of Artificial Sequence: Synthetic oligonucleotide
acgagaaugugaccgaucu

SEQ ID NO: 295648 - RNA, 19 nt, Artificial Sequence
  Description of Artificial Sequence: Synthetic oligonucleotide
cucauuucgugugacaggc

SEQ ID NO: 295649 - RNA, 19 nt, Artificial Sequence
  Description of Artificial Sequence: Synthetic oligonucleotide
cucuucguaagccaggcug

SEQ ID NO: 295650 - RNA, 19 nt, Artificial Sequence
  Description of Artificial Sequence: Synthetic oligonucleotide
uggaagcggacucuaaaga

SEQ ID NO: 295651 - RNA, 19 nt, Artificial Sequence
  Description of Artificial Sequence: Synthetic oligonucleotide
ucaugggucuucacuaccc

SEQ ID NO: 295652 - RNA, 19 nt, Artificial Sequence
  Description of Artificial Sequence: Synthetic oligonucleotide
cacacacacacaaaaucag

SEQ ID NO: 295653 - RNA, 19 nt, Artificial Sequence
  Description of Artificial Sequence: Synthetic oligonucleotide
cacacacacacacacacac

SEQ ID NO: 295654 - RNA, 19 nt, Artificial Sequence
  Description of Artificial Sequence: Synthetic oligonucleotide
caguucacgagaaugugac

SEQ ID NO: 295655 - RNA, 19 nt, Artificial Sequence
  Description of Artificial Sequence: Synthetic oligonucleotide
uauaugugugaguuccucu

SEQ ID NO: 295656 - RNA, 19 nt, Artificial Sequence
  Description of Artificial Sequence: Synthetic oligonucleotide
uuugacgaggcgacuacga

SEQ ID NO: 295657 - RNA, 19 nt, Artificial Sequence
  Description of Artificial Sequence: Synthetic oligonucleotide
ucuaaggauuucuuuuaac

SEQ ID NO: 295658 - RNA, 19 nt, Artificial Sequence
  Description of Artificial Sequence: Synthetic oligonucleotide
cuuaauuggcucaacagua

SEQ ID NO: 295659 - RNA, 19 nt, Artificial Sequence
  Description of Artificial Sequence: Synthetic oligonucleotide
uagaauauacuaagucauc

SEQ ID NO: 295660 - RNA, 19 nt, Artificial Sequence
  Description of Artificial Sequence: Synthetic oligonucleotide
uuaacauggguggaccugc

SEQ ID NO: 295661 - RNA, 19 nt, Artificial Sequence
  Description of Artificial Sequence: Synthetic oligonucleotide
ugaguuuuaugguuguuuu

SEQ ID NO: 295662 - RNA, 19 nt, Artificial Sequence
  Description of Artificial Sequence: Synthetic oligonucleotide
cacacacacacacaaaauc

SEQ ID NO: 295663 - RNA, 19 nt, Artificial Sequence
  Description of Artificial Sequence: Synthetic oligonucleotide
acuacgagggauaucuagg

SEQ ID NO: 295664 - RNA, 19 nt, Artificial Sequence
  Description of Artificial Sequence: Synthetic oligonucleotide
uuaauuggcucaacaguau

SEQ ID NO: 295665 - RNA, 19 nt, Artificial Sequence
  Description of Artificial Sequence: Synthetic oligonucleotide
ugaccgaucuguuccacug

SEQ ID NO: 295666 - RNA, 19 nt, Artificial Sequence
  Description of Artificial Sequence: Synthetic oligonucleotide
acauuuuacgguuucuuuu

SEQ ID NO: 295667 - RNA, 19 nt, Artificial Sequence
  Description of Artificial Sequence: Synthetic oligonucleotide
aguucacgagaaugugacc

SEQ ID NO: 295668 - RNA, 19 nt, Artificial Sequence
  Description of Artificial Sequence: Synthetic oligonucleotide
cacacacauacacacacac

SEQ ID NO: 295669 - RNA, 19 nt, Artificial Sequence
  Description of Artificial Sequence: Synthetic oligonucleotide
gauggacaacuuuaacaug

SEQ ID NO: 295670 - RNA, 19 nt, Artificial Sequence
  Description of Artificial Sequence: Synthetic oligonucleotide
auuuucacuggagauauau

SEQ ID NO: 295671 - RNA, 19 nt, Artificial Sequence
  Description of Artificial Sequence: Synthetic oligonucleotide
uccaaagaucuaguuuucg

SEQ ID NO: 295672 - RNA, 19 nt, Artificial Sequence
  Description of Artificial Sequence: Synthetic oligonucleotide
cugguuacuacaguagccc

SEQ ID NO: 295673 - RNA, 19 nt, Artificial Sequence
  Description of Artificial Sequence: Synthetic oligonucleotide
cagaauuaaccuaauaugu

SEQ ID NO: 295674 - RNA, 19 nt, Artificial Sequence
  Description of Artificial Sequence: Synthetic oligonucleotide
auauaugugugaguuccuc

SEQ ID NO: 295675 - RNA, 19 nt, Artificial Sequence
  Description of Artificial Sequence: Synthetic oligonucleotide
aagaaucaccagcuuauuu

SEQ ID NO: 295676 - RNA, 19 nt, Artificial Sequence
  Description of Artificial Sequence: Synthetic oligonucleotide
uccaacacauuuuacgguu

SEQ ID NO: 295677 - RNA, 19 nt, Artificial Sequence
  Description of Artificial Sequence: Synthetic oligonucleotide
uauuucacacgauggguaa

SEQ ID NO: 295678 - RNA, 19 nt, Artificial Sequence
  Description of Artificial Sequence: Synthetic oligonucleotide
uauuugacgaggcgacuac

SEQ ID NO: 295679 - RNA, 19 nt, Artificial Sequence
  Description of Artificial Sequence: Synthetic oligonucleotide
uccuacauacccucaaguc

SEQ ID NO: 295680 - RNA, 19 nt, Artificial Sequence
  Description of Artificial Sequence: Synthetic oligonucleotide
caccacgaaggguaaaagg

SEQ ID NO: 295681 - RNA, 19 nt, Artificial Sequence
  Description of Artificial Sequence: Synthetic oligonucleotide
cuauucuugccaacaaauc

SEQ ID NO: 295682 - RNA, 19 nt, Artificial Sequence
  Description of Artificial Sequence: Synthetic oligonucleotide
uuccuacauacccucaagu

SEQ ID NO: 295683 - RNA, 19 nt, Artificial Sequence
  Description of Artificial Sequence: Synthetic oligonucleotide
cuuauggaacacgucauug

SEQ ID NO: 295684 - RNA, 19 nt, Artificial Sequence
  Description of Artificial Sequence: Synthetic oligonucleotide
uugucugaguugccaaaag

SEQ ID NO: 295685 - RNA, 19 nt, Artificial Sequence
  Description of Artificial Sequence: Synthetic oligonucleotide
uccuguaggucuuccagca

SEQ ID NO: 295686 - RNA, 19 nt, Artificial Sequence
  Description of Artificial Sequence: Synthetic oligonucleotide
gauugguugccgguaaacc

SEQ ID NO: 295687 - RNA, 19 nt, Artificial Sequence
  Description of Artificial Sequence: Synthetic oligonucleotide
uguaggucuuccagcacca

SEQ ID NO: 295688 - RNA, 19 nt, Artificial Sequence
  Description of Artificial Sequence: Synthetic oligonucleotide
aaacccgggagccauggau

SEQ ID NO: 295689 - RNA, 19 nt, Artificial Sequence
  Description of Artificial Sequence: Synthetic oligonucleotide
uuuucgacugaagggagac

SEQ ID NO: 295690 - RNA, 19 nt, Artificial Sequence
  Description of Artificial Sequence: Synthetic oligonucleotide
caaauauaguucccacccc

SEQ ID NO: 295691 - RNA, 19 nt, Artificial Sequence
  Description of Artificial Sequence: Synthetic oligonucleotide
uugacgaggcgacuacgag

SEQ ID NO: 295692 - RNA, 19 nt, Artificial Sequence
  Description of Artificial Sequence: Synthetic oligonucleotide
ugccgguaaaccugguagg

SEQ ID NO: 295693 - RNA, 19 nt, Artificial Sequence
  Description of Artificial Sequence: Synthetic oligonucleotide
ugacacgggaucucagucc

SEQ ID NO: 295694 - RNA, 19 nt, Artificial Sequence
  Description of Artificial Sequence: Synthetic oligonucleotide
caugaacacauuacagcug

SEQ ID NO: 295695 - RNA, 19 nt, Artificial Sequence
  Description of Artificial Sequence: Synthetic oligonucleotide
auguagauuguagauguca

SEQ ID NO: 295696 - RNA, 19 nt, Artificial Sequence
  Description of Artificial Sequence: Synthetic oligonucleotide
agcuugucgauguaauacu

SEQ ID NO: 295697 - RNA, 19 nt, Artificial Sequence
  Description of Artificial Sequence: Synthetic oligonucleotide
acacacacacacaaaauca

SEQ ID NO: 295698 - RNA, 19 nt, Artificial Sequence
  Description of Artificial Sequence: Synthetic oligonucleotide
caagucgccaaauauaugu

SEQ ID NO: 295699 - RNA, 19 nt, Artificial Sequence
  Description of Artificial Sequence: Synthetic oligonucleotide
accacgaaggguaaaagga

SEQ ID NO: 295700 - RNA, 19 nt, Artificial Sequence
  Description of Artificial Sequence: Synthetic oligonucleotide
ugguugccgguaaaccugg

SEQ ID NO: 295701 - RNA, 19 nt, Artificial Sequence
  Description of Artificial Sequence: Synthetic oligonucleotide
uaacacacacauacacaca

SEQ ID NO: 295702 - RNA, 19 nt, Artificial Sequence
  Description of Artificial Sequence: Synthetic oligonucleotide
uucgacugaagggagacuc

SEQ ID NO: 295703 - RNA, 19 nt, Artificial Sequence
  Description of Artificial Sequence: Synthetic oligonucleotide
uuccaacacauuuuacggu

SEQ ID NO: 295704 - RNA, 19 nt, Artificial Sequence
  Description of Artificial Sequence: Synthetic oligonucleotide
uggaacacgucauuggcuu

SEQ ID NO: 295705 - RNA, 19 nt, Artificial Sequence
  Description of Artificial Sequence: Synthetic oligonucleotide
uuucacacgauggguaaca

SEQ ID NO: 295706 - RNA, 19 nt, Artificial Sequence
  Description of Artificial Sequence: Synthetic oligonucleotide
aaggggcaauggcaguacg

SEQ ID NO: 295707 - RNA, 19 nt, Artificial Sequence
  Description of Artificial Sequence: Synthetic oligonucleotide
uuuuaacaguaaaggguau

SEQ ID NO: 295708 - RNA, 19 nt, Artificial Sequence
  Description of Artificial Sequence: Synthetic oligonucleotide
aaacuccaaagaucuaguu

SEQ ID NO: 295709 - RNA, 19 nt, Artificial Sequence
  Description of Artificial Sequence: Synthetic oligonucleotide
cacuacccugacaugauac

SEQ ID NO: 295710 - RNA, 19 nt, Artificial Sequence
  Description of Artificial Sequence: Synthetic oligonucleotide
gccacuuuuauucuucagc

SEQ ID NO: 295711 - RNA, 19 nt, Artificial Sequence
  Description of Artificial Sequence: Synthetic oligonucleotide
ucgccaaauauauguguga

SEQ ID NO: 295712 - RNA, 19 nt, Artificial Sequence
  Description of Artificial Sequence: Synthetic oligonucleotide
agguuuaacaaggaacacu

SEQ ID NO: 295713 - RNA, 19 nt, Artificial Sequence
  Description of Artificial Sequence: Synthetic oligonucleotide
guugcuucgccuauucuug

SEQ ID NO: 295714 - RNA, 19 nt, Artificial Sequence
  Description of Artificial Sequence: Synthetic oligonucleotide
auaugugugaguuccucuu

SEQ ID NO: 295715 - RNA, 19 nt, Artificial Sequence
  Description of Artificial Sequence: Synthetic oligonucleotide
aacccuaggaugcucccau

SEQ ID NO: 295716 - RNA, 19 nt, Artificial Sequence
  Description of Artificial Sequence: Synthetic oligonucleotide
accgaucuguuccacuguc

SEQ ID NO: 295717 - RNA, 19 nt, Artificial Sequence
  Description of Artificial Sequence: Synthetic oligonucleotide
gagauucccagcacugggg

SEQ ID NO: 295718 - RNA, 19 nt, Artificial Sequence
  Description of Artificial Sequence: Synthetic oligonucleotide
ugaucuauuuacagccuuu

SEQ ID NO: 295719 - RNA, 19 nt, Artificial Sequence
  Description of Artificial Sequence: Synthetic oligonucleotide
ucaacaguauggcuugguu

SEQ ID NO: 295720 - RNA, 19 nt, Artificial Sequence
  Description of Artificial Sequence: Synthetic oligonucleotide
uggcaguacgaauacaguu

SEQ ID NO: 295721 - RNA, 19 nt, Artificial Sequence
  Description of Artificial Sequence: Synthetic oligonucleotide
auuuuacgguuucuuuuca

SEQ ID NO: 295722 - RNA, 19 nt, Artificial Sequence
  Description of Artificial Sequence: Synthetic oligonucleotide
ucgugugacaggccgaguc

SEQ ID NO: 295723 - RNA, 19 nt, Artificial Sequence
  Description of Artificial Sequence: Synthetic oligonucleotide
cagcuugucgauguaauac

SEQ ID NO: 295724 - RNA, 19 nt, Artificial Sequence
  Description of Artificial Sequence: Synthetic oligonucleotide
gauggguaacaaugacuug

SEQ ID NO: 295725 - RNA, 19 nt, Artificial Sequence
  Description of Artificial Sequence: Synthetic oligonucleotide
uuuuacgguuucuuuucaa

SEQ ID NO: 295726 - RNA, 19 nt, Artificial Sequence
  Description of Artificial Sequence: Synthetic oligonucleotide
uucacgagaaugugaccga

SEQ ID NO: 295727 - RNA, 19 nt, Artificial Sequence
  Description of Artificial Sequence: Synthetic oligonucleotide
aagcggacucuaaagauau

SEQ ID NO: 295728 - RNA, 19 nt, Artificial Sequence
  Description of Artificial Sequence: Synthetic oligonucleotide
uuucgugugacaggccgag

SEQ ID NO: 295729 - RNA, 19 nt, Artificial Sequence
  Description of Artificial Sequence: Synthetic oligonucleotide
aaaccugguaggagugacg

SEQ ID NO: 295730 - RNA, 19 nt, Artificial Sequence
  Description of Artificial Sequence: Synthetic oligonucleotide
cucuggaucaaccagacau

SEQ ID NO: 295731 - RNA, 19 nt, Artificial Sequence
  Description of Artificial Sequence: Synthetic oligonucleotide
gaaugugaccgaucuguuc

SEQ ID NO: 295732 - RNA, 19 nt, Artificial Sequence
  Description of Artificial Sequence: Synthetic oligonucleotide
uuuaacaguaaaggguauu

SEQ ID NO: 295733 - RNA, 19 nt, Artificial Sequence
  Description of Artificial Sequence: Synthetic oligonucleotide
acuacccugacaugauaca

SEQ ID NO: 295734 - RNA, 19 nt, Artificial Sequence
  Description of Artificial Sequence: Synthetic oligonucleotide
guacagaguaacccuagga

SEQ ID NO: 295735 - RNA, 19 nt, Artificial Sequence
  Description of Artificial Sequence: Synthetic oligonucleotide
ugccaaaagccccucggaa

SEQ ID NO: 295736 - RNA, 19 nt, Artificial Sequence
  Description of Artificial Sequence: Synthetic oligonucleotide
uugccaaaagccccucgga

SEQ ID NO: 295737 - RNA, 19 nt, Artificial Sequence
  Description of Artificial Sequence: Synthetic oligonucleotide
ucgaugugccuucaugcuc

SEQ ID NO: 295738 - RNA, 19 nt, Artificial Sequence
  Description of Artificial Sequence: Synthetic oligonucleotide
uuuucacuggagauauauu

SEQ ID NO: 295739 - RNA, 19 nt, Artificial Sequence
  Description of Artificial Sequence: Synthetic oligonucleotide
guagucuagaauauacuaa

SEQ ID NO: 295740 - RNA, 19 nt, Artificial Sequence
  Description of Artificial Sequence: Synthetic oligonucleotide
aggguauuugacgaggcga

SEQ ID NO: 295741 - RNA, 19 nt, Artificial Sequence
  Description of Artificial Sequence: Synthetic oligonucleotide
aagucgccaaauauaugug

SEQ ID NO: 295742 - RNA, 19 nt, Artificial Sequence
  Description of Artificial Sequence: Synthetic oligonucleotide
uuccaguagucuagaauau

SEQ ID NO: 295743 - RNA, 19 nt, Artificial Sequence
  Description of Artificial Sequence: Synthetic oligonucleotide
aauauaugugugaguuccu

SEQ ID NO: 295744 - RNA, 19 nt, Artificial Sequence
  Description of Artificial Sequence: Synthetic oligonucleotide
aguugccaaaagccccucg

SEQ ID NO: 295745 - RNA, 19 nt, Artificial Sequence
  Description of Artificial Sequence: Synthetic oligonucleotide
acaacuuccuacauacccu

SEQ ID NO: 295746 - RNA, 19 nt, Artificial Sequence
  Description of Artificial Sequence: Synthetic oligonucleotide
gucgccaaauauaugugug

SEQ ID NO: 295747 - RNA, 19 nt, Artificial Sequence
  Description of Artificial Sequence: Synthetic oligonucleotide
uuugucugaguugccaaaa

SEQ ID NO: 295748 - RNA, 19 nt, Artificial Sequence
  Description of Artificial Sequence: Synthetic oligonucleotide
ugcagggguauguaagcgu

SEQ ID NO: 295749 - RNA, 19 nt, Artificial Sequence
  Description of Artificial Sequence: Synthetic oligonucleotide
cacacacacacacacaaaa

SEQ ID NO: 295750 - RNA, 19 nt, Artificial Sequence
  Description of Artificial Sequence: Synthetic oligonucleotide
agaucuaguuuucgacuga

SEQ ID NO: 295751 - RNA, 19 nt, Artificial Sequence
  Description of Artificial Sequence: Synthetic oligonucleotide
ugguuacuacaguagcccu

SEQ ID NO: 295752 - RNA, 19 nt, Artificial Sequence
  Description of Artificial Sequence: Synthetic oligonucleotide
auuugacgaggcgacuacg

SEQ ID NO: 295753 - RNA, 19 nt, Artificial Sequence
  Description of Artificial Sequence: Synthetic oligonucleotide
aaaucugggcugacacggg

SEQ ID NO: 295754 - RNA, 19 nt, Artificial Sequence
  Description of Artificial Sequence: Synthetic oligonucleotide
uucacuacccugacaugau

SEQ ID NO: 295755 - RNA, 19 nt, Artificial Sequence
  Description of Artificial Sequence: Synthetic oligonucleotide
ggcaguacgaauacaguug

SEQ ID NO: 295756 - RNA, 19 nt, Artificial Sequence
  Description of Artificial Sequence: Synthetic oligonucleotide
uggagaucuguggucacca

SEQ ID NO: 295757 - RNA, 19 nt, Artificial Sequence
  Description of Artificial Sequence: Synthetic oligonucleotide
cacacacacacacacacaa

SEQ ID NO: 295758 - RNA, 19 nt, Artificial Sequence
  Description of Artificial Sequence: Synthetic oligonucleotide
ugacaggccgagucaaaac

SEQ ID NO: 295759 - RNA, 19 nt, Artificial Sequence
  Description of Artificial Sequence: Synthetic oligonucleotide
ugagugugucuaaggauuu

SEQ ID NO: 295760 - RNA, 19 nt, Artificial Sequence
  Description of Artificial Sequence: Synthetic oligonucleotide
uacgagggauaucuaggaa

SEQ ID NO: 295761 - RNA, 19 nt, Artificial Sequence
  Description of Artificial Sequence: Synthetic oligonucleotide
uugcucgcuucgauccugg

SEQ ID NO: 295762 - RNA, 19 nt, Artificial Sequence
  Description of Artificial Sequence: Synthetic oligonucleotide
uacgauuaacacacacaua

SEQ ID NO: 295763 - RNA, 19 nt, Artificial Sequence
  Description of Artificial Sequence: Synthetic oligonucleotide
cuucacuacccugacauga

SEQ ID NO: 295764 - RNA, 19 nt, Artificial Sequence
  Description of Artificial Sequence: Synthetic oligonucleotide
guaaacccgggagccaugg

SEQ ID NO: 295765 - RNA, 19 nt, Artificial Sequence
  Description of Artificial Sequence: Synthetic oligonucleotide
acuuccuacauacccucaa

SEQ ID NO: 295766 - RNA, 19 nt, Artificial Sequence
  Description of Artificial Sequence: Synthetic oligonucleotide
ggaaggaaccacccaugcg

SEQ ID NO: 295767 - RNA, 19 nt, Artificial Sequence
  Description of Artificial Sequence: Synthetic oligonucleotide
cuacgagggauaucuagga

SEQ ID NO: 295768 - RNA, 19 nt, Artificial Sequence
  Description of Artificial Sequence: Synthetic oligonucleotide
gucauuauuaaaauuucau

SEQ ID NO: 295769 - RNA, 19 nt, Artificial Sequence
  Description of Artificial Sequence: Synthetic oligonucleotide
gagagagagagaaacccaa

SEQ ID NO: 295770 - RNA, 19 nt, Artificial Sequence
  Description of Artificial Sequence: Synthetic oligonucleotide
ucccuugcucuucguaagc

SEQ ID NO: 295771 - RNA, 19 nt, Artificial Sequence
  Description of Artificial Sequence: Synthetic oligonucleotide
uaccuuagacaaacucccu

SEQ ID NO: 295772 - RNA, 19 nt, Artificial Sequence
  Description of Artificial Sequence: Synthetic oligonucleotide
accuuagacaaacucccuu

SEQ ID NO: 295773 - RNA, 19 nt, Artificial Sequence
  Description of Artificial Sequence: Synthetic oligonucleotide
agagagagagagaaaccca

SEQ ID NO: 295774 - RNA, 19 nt, Artificial Sequence
  Description of Artificial Sequence: Synthetic oligonucleotide
cuacccugacaugauacac

SEQ ID NO: 295775 - RNA, 19 nt, Artificial Sequence
  Description of Artificial Sequence: Synthetic oligonucleotide
gaugaccuucgcugggcug

SEQ ID NO: 295776 - RNA, 19 nt, Artificial Sequence
  Description of Artificial Sequence: Synthetic oligonucleotide
gccaaaagccccucggaag

SEQ ID NO: 295777 - RNA, 19 nt, Artificial Sequence
  Description of Artificial Sequence: Synthetic oligonucleotide
gaagagaaagagagagaga

SEQ ID NO: 295778 - RNA, 19 nt, Artificial Sequence
  Description of Artificial Sequence: Synthetic oligonucleotide
acgaaggguaaaaggacug

SEQ ID NO: 295779 - RNA, 19 nt, Artificial Sequence
  Description of Artificial Sequence: Synthetic oligonucleotide
ccaaucagaauuaaccuaa

SEQ ID NO: 295780 - RNA, 19 nt, Artificial Sequence
  Description of Artificial Sequence: Synthetic oligonucleotide
agucuagaauauacuaagu

SEQ ID NO: 295781 - RNA, 19 nt, Artificial Sequence
  Description of Artificial Sequence: Synthetic oligonucleotide
ugacgcucauuucguguga

SEQ ID NO: 295782 - RNA, 19 nt, Artificial Sequence
  Description of Artificial Sequence: Synthetic oligonucleotide
ucgccuauucuugccaaca

SEQ ID NO: 295783 - RNA, 19 nt, Artificial Sequence
  Description of Artificial Sequence: Synthetic oligonucleotide
acgauggguaacaaugacu

SEQ ID NO: 295784 - RNA, 19 nt, Artificial Sequence
  Description of Artificial Sequence: Synthetic oligonucleotide
uacaguuuauggccacuuu

SEQ ID NO: 295785 - RNA, 19 nt, Artificial Sequence
  Description of Artificial Sequence: Synthetic oligonucleotide
cgagucaaaaccaagaugu

SEQ ID NO: 295786 - RNA, 19 nt, Artificial Sequence
  Description of Artificial Sequence: Synthetic oligonucleotide
uugcuucgccuauucuugc

SEQ ID NO: 295787 - RNA, 19 nt, Artificial Sequence
  Description of Artificial Sequence: Synthetic oligonucleotide
gagucucuuuccuguugcc

SEQ ID NO: 295788 - RNA, 19 nt, Artificial Sequence
  Description of Artificial Sequence: Synthetic oligonucleotide
ggaacacugauagaauuuc

SEQ ID NO: 295789 - RNA, 19 nt, Artificial Sequence
  Description of Artificial Sequence: Synthetic oligonucleotide
uacagcugguacagaguaa

SEQ ID NO: 295790 - RNA, 19 nt, Artificial Sequence
  Description of Artificial Sequence: Synthetic oligonucleotide
uguguaaacccgggagcca

SEQ ID NO: 295791 - RNA, 19 nt, Artificial Sequence
  Description of Artificial Sequence: Synthetic oligonucleotide
agcacugggguuguucuca

SEQ ID NO: 295792 - RNA, 19 nt, Artificial Sequence
  Description of Artificial Sequence: Synthetic oligonucleotide
auuaaauaguuggcagaau

SEQ ID NO: 295793 - RNA, 19 nt, Artificial Sequence
  Description of Artificial Sequence: Synthetic oligonucleotide
ccuacauacccucaaguca

SEQ ID NO: 295794 - RNA, 19 nt, Artificial Sequence
  Description of Artificial Sequence: Synthetic oligonucleotide
gaagcggacucuaaagaua

SEQ ID NO: 295795 - RNA, 19 nt, Artificial Sequence
  Description of Artificial Sequence: Synthetic oligonucleotide
ugcgcacauccccauccug

SEQ ID NO: 295796 - RNA, 19 nt, Artificial Sequence
  Description of Artificial Sequence: Synthetic oligonucleotide
ucacacgauggguaacaau

SEQ ID NO: 295797 - RNA, 19 nt, Artificial Sequence
  Description of Artificial Sequence: Synthetic oligonucleotide
cauguagauuguagauguc

SEQ ID NO: 295798 - RNA, 19 nt, Artificial Sequence
  Description of Artificial Sequence: Synthetic oligonucleotide
cucgcuucgauccuggggu

SEQ ID NO: 295799 - RNA, 19 nt, Artificial Sequence
  Description of Artificial Sequence: Synthetic oligonucleotide
gguaaaaggacuguauggu

SEQ ID NO: 295800 - RNA, 19 nt, Artificial Sequence
  Description of Artificial Sequence: Synthetic oligonucleotide
gcaguacgaauacaguuga

SEQ ID NO: 295801 - RNA, 19 nt, Artificial Sequence
  Description of Artificial Sequence: Synthetic oligonucleotide
cuuggaagcggacucuaaa

SEQ ID NO: 295802 - RNA, 19 nt, Artificial Sequence
  Description of Artificial Sequence: Synthetic oligonucleotide
uugaacugauggccaguau

SEQ ID NO: 295803 - RNA, 19 nt, Artificial Sequence
  Description of Artificial Sequence: Synthetic oligonucleotide
ucccuguguaaacccggga

SEQ ID NO: 295804 - RNA, 19 nt, Artificial Sequence
  Description of Artificial Sequence: Synthetic oligonucleotide
uggaucaaccagacauuuu

SEQ ID NO: 295805 - RNA, 19 nt, Artificial Sequence
  Description of Artificial Sequence: Synthetic oligonucleotide
ucacuacccugacaugaua

SEQ ID NO: 295806 - RNA, 19 nt, Artificial Sequence
  Description of Artificial Sequence: Synthetic oligonucleotide
uaacauggguggaccugcu

SEQ ID NO: 295807 - RNA, 19 nt, Artificial Sequence
  Description of Artificial Sequence: Synthetic oligonucleotide
uucgccuauucuugccaac

SEQ ID NO: 295808 - RNA, 19 nt, Artificial Sequence
  Description of Artificial Sequence: Synthetic oligonucleotide
aggaacacugauagaauuu

SEQ ID NO: 295809 - RNA, 19 nt, Artificial Sequence
  Description of Artificial Sequence: Synthetic oligonucleotide
agagaaagagagagagaga

SEQ ID NO: 295810 - RNA, 19 nt, Artificial Sequence
  Description of Artificial Sequence: Synthetic oligonucleotide
gaaguauuucaaacucaaa

SEQ ID NO: 295811 - RNA, 19 nt, Artificial Sequence
  Description of Artificial Sequence: Synthetic oligonucleotide
aggcauucaggcgugguaa

SEQ ID NO: 295812 - RNA, 19 nt, Artificial Sequence
  Description of Artificial Sequence: Synthetic oligonucleotide
uguaggcauucaggcgugg

SEQ ID NO: 295813 - RNA, 19 nt, Artificial Sequence
  Description of Artificial Sequence: Synthetic oligonucleotide
caugugguuucuuccagua

SEQ ID NO: 295814 - RNA, 19 nt, Artificial Sequence
  Description of Artificial Sequence: Synthetic oligonucleotide
caccaaaguccuucaugug

SEQ ID NO: 295815 - RNA, 19 nt, Artificial Sequence
  Description of Artificial Sequence: Synthetic oligonucleotide
aaaagccccucggaaggaa

SEQ ID NO: 295816 - RNA, 19 nt, Artificial Sequence
  Description of Artificial Sequence: Synthetic oligonucleotide
ccaagaugucuugaaacag

SEQ ID NO: 295817 - RNA, 19 nt, Artificial Sequence
  Description of Artificial Sequence: Synthetic oligonucleotide
ccacgaaggguaaaaggac

SEQ ID NO: 295818 - RNA, 19 nt, Artificial Sequence
  Description of Artificial Sequence: Synthetic oligonucleotide
ucguggagcucugguaagc

SEQ ID NO: 295819 - RNA, 19 nt, Artificial Sequence
  Description of Artificial Sequence: Synthetic oligonucleotide
cuccuuuaaagagcaugac

SEQ ID NO: 295820 - RNA, 19 nt, Artificial Sequence
  Description of Artificial Sequence: Synthetic oligonucleotide
cccuguguaaacccgggag

SEQ ID NO: 295821 - RNA, 19 nt, Artificial Sequence
  Description of Artificial Sequence: Synthetic oligonucleotide
uuacagccuuuuccaauuu

SEQ ID NO: 295822 - RNA, 19 nt, Artificial Sequence
  Description of Artificial Sequence: Synthetic oligonucleotide
augugaccgaucuguucca

SEQ ID NO: 295823 - RNA, 19 nt, Artificial Sequence
  Description of Artificial Sequence: Synthetic oligonucleotide
cuuugucugaguugccaaa

SEQ ID NO: 295824 - RNA, 19 nt, Artificial Sequence
  Description of Artificial Sequence: Synthetic oligonucleotide
acacauacacacacacaca

SEQ ID NO: 295825 - RNA, 19 nt, Artificial Sequence
  Description of Artificial Sequence: Synthetic oligonucleotide
cgagggauaucuaggaaac

SEQ ID NO: 295826 - RNA, 19 nt, Artificial Sequence
  Description of Artificial Sequence: Synthetic oligonucleotide
acauacacacacacacaca

SEQ ID NO: 295827 - RNA, 19 nt, Artificial Sequence
  Description of Artificial Sequence: Synthetic oligonucleotide
gcucgcuucgauccugggg

SEQ ID NO: 295828 - RNA, 19 nt, Artificial Sequence
  Description of Artificial Sequence: Synthetic oligonucleotide
cauucaggcgugguaacca

SEQ ID NO: 295829 - RNA, 19 nt, Artificial Sequence
  Description of Artificial Sequence: Synthetic oligonucleotide
agggguauguaagcgucca

SEQ ID NO: 295830 - RNA, 19 nt, Artificial Sequence
  Description of Artificial Sequence: Synthetic oligonucleotide
acaggccgagucaaaacca

SEQ ID NO: 295831 - RNA, 19 nt, Artificial Sequence
  Description of Artificial Sequence: Synthetic oligonucleotide
cacgagaaugugaccgauc

SEQ ID NO: 295832 - RNA, 19 nt, Artificial Sequence
  Description of Artificial Sequence: Synthetic oligonucleotide
cauuggcuugcagugugug

SEQ ID NO: 295833 - RNA, 19 nt, Artificial Sequence
  Description of Artificial Sequence: Synthetic oligonucleotide
guaagcguccaagucgcca

SEQ ID NO: 295834 - RNA, 19 nt, Artificial Sequence
  Description of Artificial Sequence: Synthetic oligonucleotide
acucggauucaccuuucuu

SEQ ID NO: 295835 - RNA, 19 nt, Artificial Sequence
  Description of Artificial Sequence: Synthetic oligonucleotide
ccuccuuuaaagagcauga

SEQ ID NO: 295836 - RNA, 19 nt, Artificial Sequence
  Description of Artificial Sequence: Synthetic oligonucleotide
aacuuccuacauacccuca

SEQ ID NO: 295837 - RNA, 19 nt, Artificial Sequence
  Description of Artificial Sequence: Synthetic oligonucleotide
gacacucggauucaccuuu

SEQ ID NO: 295838 - RNA, 19 nt, Artificial Sequence
  Description of Artificial Sequence: Synthetic oligonucleotide
cacgucauuggcuugcagu

SEQ ID NO: 295839 - RNA, 19 nt, Artificial Sequence
  Description of Artificial Sequence: Synthetic oligonucleotide
acacacauacacacacaca

SEQ ID NO: 295840 - RNA, 19 nt, Artificial Sequence
  Description of Artificial Sequence: Synthetic oligonucleotide
ccauguagauuguagaugu

SEQ ID NO: 295841 - RNA, 19 nt, Artificial Sequence
  Description of Artificial Sequence: Synthetic oligonucleotide
guauuugacgaggcgacua

SEQ ID NO: 295842 - RNA, 19 nt, Artificial Sequence
  Description of Artificial Sequence: Synthetic oligonucleotide
cacgaaggguaaaaggacu

SEQ ID NO: 295843 - RNA, 19 nt, Artificial Sequence
  Description of Artificial Sequence: Synthetic oligonucleotide
cuaauacgauuaacacaca

SEQ ID NO: 295844 - RNA, 19 nt, Artificial Sequence
  Description of Artificial Sequence: Synthetic oligonucleotide
agaaagagagagagagaaa

SEQ ID NO: 295845 - RNA, 19 nt, Artificial Sequence
  Description of Artificial Sequence: Synthetic oligonucleotide
acacacacacacacaaaau

SEQ ID NO: 295846 - RNA, 19 nt, Artificial Sequence
  Description of Artificial Sequence: Synthetic oligonucleotide
auacacacacacacacaca

SEQ ID NO: 295847 - RNA, 19 nt, Artificial Sequence
  Description of Artificial Sequence: Synthetic oligonucleotide
ggguauuugacgaggcgac

SEQ ID NO: 295848 - RNA, 19 nt, Artificial Sequence
  Description of Artificial Sequence: Synthetic oligonucleotide
uuucgacugaagggagacu

SEQ ID NO: 295849 - RNA, 19 nt, Artificial Sequence
  Description of Artificial Sequence: Synthetic oligonucleotide
ucacgagaaugugaccgau

SEQ ID NO: 295850 - RNA, 19 nt, Artificial Sequence
  Description of Artificial Sequence: Synthetic oligonucleotide
gacgcucauuucgugugac

SEQ ID NO: 295851 - RNA, 19 nt, Artificial Sequence
  Description of Artificial Sequence: Synthetic oligonucleotide
gccaacaaaucuucaugca

SEQ ID NO: 295852 - RNA, 19 nt, Artificial Sequence
  Description of Artificial Sequence: Synthetic oligonucleotide
caccuugcucgcuucgauc

SEQ ID NO: 295853 - RNA, 19 nt, Artificial Sequence
  Description of Artificial Sequence: Synthetic oligonucleotide
uucacacgauggguaacaa

SEQ ID NO: 295854 - RNA, 19 nt, Artificial Sequence
  Description of Artificial Sequence: Synthetic oligonucleotide
auuucgugugacaggccga

SEQ ID NO: 295855 - RNA, 19 nt, Artificial Sequence
  Description of Artificial Sequence: Synthetic oligonucleotide
ugaccuucgcugggcuggg

SEQ ID NO: 295856 - RNA, 19 nt, Artificial Sequence
  Description of Artificial Sequence: Synthetic oligonucleotide
ugugaccgaucuguuccac

SEQ ID NO: 295857 - RNA, 19 nt, Artificial Sequence
  Description of Artificial Sequence: Synthetic oligonucleotide
guccaagucgccaaauaua

SEQ ID NO: 295858 - RNA, 19 nt, Artificial Sequence
  Description of Artificial Sequence: Synthetic oligonucleotide
gggagauucccagcacugg

SEQ ID NO: 295859 - RNA, 19 nt, Artificial Sequence
  Description of Artificial Sequence: Synthetic oligonucleotide
guuuucgacugaagggaga

SEQ ID NO: 295860 - RNA, 19 nt, Artificial Sequence
  Description of Artificial Sequence: Synthetic oligonucleotide
gcgacuacgagggauaucu

SEQ ID NO: 295861 - RNA, 19 nt, Artificial Sequence
  Description of Artificial Sequence: Synthetic oligonucleotide
acacacacauacacacaca

SEQ ID NO: 295862 - RNA, 19 nt, Artificial Sequence
  Description of Artificial Sequence: Synthetic oligonucleotide
uucguaagccaggcugcac

SEQ ID NO: 295863 - RNA, 19 nt, Artificial Sequence
  Description of Artificial Sequence: Synthetic oligonucleotide
acgcucauuucgugugaca

SEQ ID NO: 295864 - RNA, 19 nt, Artificial Sequence
  Description of Artificial Sequence: Synthetic oligonucleotide
cccuccuuuaaagagcaug

SEQ ID NO: 295865 - RNA, 19 nt, Artificial Sequence
  Description of Artificial Sequence: Synthetic oligonucleotide
ggaacacgucauuggcuug

SEQ ID NO: 295866 - RNA, 19 nt, Artificial Sequence
  Description of Artificial Sequence: Synthetic oligonucleotide
cauacccucaagucaggcu

SEQ ID NO: 295867 - RNA, 19 nt, Artificial Sequence
  Description of Artificial Sequence: Synthetic oligonucleotide
agcgcugaaggaagucuug

SEQ ID NO: 295868 - RNA, 19 nt, Artificial Sequence
  Description of Artificial Sequence: Synthetic oligonucleotide
gaucuauuuacagccuuuu

SEQ ID NO: 295869 - RNA, 19 nt, Artificial Sequence
  Description of Artificial Sequence: Synthetic oligonucleotide
aucacuugauugaucuauu

SEQ ID NO: 295870 - RNA, 19 nt, Artificial Sequence
  Description of Artificial Sequence: Synthetic oligonucleotide
cucuugcuuucuagacaac

SEQ ID NO: 295871 - RNA, 19 nt, Artificial Sequence
  Description of Artificial Sequence: Synthetic oligonucleotide
cuucgccuauucuugccaa

SEQ ID NO: 295872 - RNA, 19 nt, Artificial Sequence
  Description of Artificial Sequence: Synthetic oligonucleotide
acacacacacacacacaca

SEQ ID NO: 295873 - RNA, 19 nt, Artificial Sequence
  Description of Artificial Sequence: Synthetic oligonucleotide
cuugaacugauggccagua

SEQ ID NO: 295874 - RNA, 19 nt, Artificial Sequence
  Description of Artificial Sequence: Synthetic oligonucleotide
guagauuguagaugucauu

SEQ ID NO: 295875 - RNA, 19 nt, Artificial Sequence
  Description of Artificial Sequence: Synthetic oligonucleotide
ggaagcggacucuaaagau

SEQ ID NO: 295876 - RNA, 19 nt, Artificial Sequence
  Description of Artificial Sequence: Synthetic oligonucleotide
ccuauucuugccaacaaau

SEQ ID NO: 295877 - RNA, 19 nt, Artificial Sequence
  Description of Artificial Sequence: Synthetic oligonucleotide
cucgaugugccuucaugcu

SEQ ID NO: 295878 - RNA, 19 nt, Artificial Sequence
  Description of Artificial Sequence: Synthetic oligonucleotide
cucggaaggaaccacccau

SEQ ID NO: 295879 - RNA, 19 nt, Artificial Sequence
  Description of Artificial Sequence: Synthetic oligonucleotide
aggccgagucaaaaccaag

SEQ ID NO: 295880 - RNA, 19 nt, Artificial Sequence
  Description of Artificial Sequence: Synthetic oligonucleotide
acacucggauucaccuuuc

SEQ ID NO: 295881 - RNA, 19 nt, Artificial Sequence
  Description of Artificial Sequence: Synthetic oligonucleotide
caacuuuaacaugggugga

SEQ ID NO: 295882 - RNA, 19 nt, Artificial Sequence
  Description of Artificial Sequence: Synthetic oligonucleotide
guauggcuugguuucacuu

SEQ ID NO: 295883 - RNA, 19 nt, Artificial Sequence
  Description of Artificial Sequence: Synthetic oligonucleotide
cgugguaaccaguucacga

SEQ ID NO: 295884 - RNA, 19 nt, Artificial Sequence
  Description of Artificial Sequence: Synthetic oligonucleotide
ugcacucgaugugccuuca

SEQ ID NO: 295885 - RNA, 19 nt, Artificial Sequence
  Description of Artificial Sequence: Synthetic oligonucleotide
gaggcgacuacgagggaua

SEQ ID NO: 295886 - RNA, 19 nt, Artificial Sequence
  Description of Artificial Sequence: Synthetic oligonucleotide
ggccgagucaaaaccaaga

SEQ ID NO: 295887 - RNA, 19 nt, Artificial Sequence
  Description of Artificial Sequence: Synthetic oligonucleotide
gcagggguauguaagcguc

SEQ ID NO: 295888 - RNA, 19 nt, Artificial Sequence
  Description of Artificial Sequence: Synthetic oligonucleotide
ggcauucaggcgugguaac

SEQ ID NO: 295889 - RNA, 19 nt, Artificial Sequence
  Description of Artificial Sequence: Synthetic oligonucleotide
gguaaccaguucacgagaa

SEQ ID NO: 295890 - RNA, 19 nt, Artificial Sequence
  Description of Artificial Sequence: Synthetic oligonucleotide
gcauucaggcgugguaacc

SEQ ID NO: 295891 - RNA, 19 nt, Artificial Sequence
  Description of Artificial Sequence: Synthetic oligonucleotide
ggaaccacccaugcgcaca

SEQ ID NO: 295892 - RNA, 19 nt, Artificial Sequence
  Description of Artificial Sequence: Synthetic oligonucleotide
ucgcuucgauccugggguc

SEQ ID NO: 295893 - RNA, 19 nt, Artificial Sequence
  Description of Artificial Sequence: Synthetic oligonucleotide
acacacacacacacacaaa

SEQ ID NO: 295894 - RNA, 19 nt, Artificial Sequence
  Description of Artificial Sequence: Synthetic oligonucleotide
gccuauucuugccaacaaa

SEQ ID NO: 295895 - RNA, 19 nt, Artificial Sequence
  Description of Artificial Sequence: Synthetic oligonucleotide
gaccgaucuguuccacugu

SEQ ID NO: 295896 - RNA, 19 nt, Artificial Sequence
  Description of Artificial Sequence: Synthetic oligonucleotide
ggagaucuguggucaccac

SEQ ID NO: 295897 - RNA, 19 nt, Artificial Sequence
  Description of Artificial Sequence: Synthetic oligonucleotide
ggcgugguaaccaguucac

SEQ ID NO: 295898 - RNA, 19 nt, Artificial Sequence
  Description of Artificial Sequence: Synthetic oligonucleotide
cuucguaagccaggcugca

SEQ ID NO: 295899 - RNA, 19 nt, Artificial Sequence
  Description of Artificial Sequence: Synthetic oligonucleotide
agccccucggaaggaacca

SEQ ID NO: 295900 - RNA, 19 nt, Artificial Sequence
  Description of Artificial Sequence: Synthetic oligonucleotide
caaucagaauuaaccuaau

SEQ ID NO: 295901 - RNA, 19 nt, Artificial Sequence
  Description of Artificial Sequence: Synthetic oligonucleotide
uucgugugacaggccgagu

SEQ ID NO: 295902 - RNA, 19 nt, Artificial Sequence
  Description of Artificial Sequence: Synthetic oligonucleotide
ccccucggaaggaaccacc

SEQ ID NO: 295903 - RNA, 19 nt, Artificial Sequence
  Description of Artificial Sequence: Synthetic oligonucleotide
gagggauaucuaggaaacu

SEQ ID NO: 295904 - RNA, 19 nt, Artificial Sequence
  Description of Artificial Sequence: Synthetic oligonucleotide
cccuugcucuucguaagcc

SEQ ID NO: 295905 - RNA, 19 nt, Artificial Sequence
  Description of Artificial Sequence: Synthetic oligonucleotide
gaagaaucaccagcuuauu

SEQ ID NO: 295906 - RNA, 19 nt, Artificial Sequence
  Description of Artificial Sequence: Synthetic oligonucleotide
gugaccgaucuguuccacu

SEQ ID NO: 295907 - RNA, 19 nt, Artificial Sequence
  Description of Artificial Sequence: Synthetic oligonucleotide
ccgguaaaccugguaggag

SEQ ID NO: 295908 - RNA, 19 nt, Artificial Sequence
  Description of Artificial Sequence: Synthetic oligonucleotide
agcguccaagucgccaaau

SEQ ID NO: 295909 - RNA, 19 nt, Artificial Sequence
  Description of Artificial Sequence: Synthetic oligonucleotide
guguaaacccgggagccau

SEQ ID NO: 295910 - RNA, 19 nt, Artificial Sequence
  Description of Artificial Sequence: Synthetic oligonucleotide
gccgagucaaaaccaagau

SEQ ID NO: 295911 - RNA, 19 nt, Artificial Sequence
  Description of Artificial Sequence: Synthetic oligonucleotide
gguuauuaugugugugcuu

SEQ ID NO: 295912 - RNA, 19 nt, Artificial Sequence
  Description of Artificial Sequence: Synthetic oligonucleotide
cuuuaaggacaugccaauu

SEQ ID NO: 295913 - RNA, 19 nt, Artificial Sequence
  Description of Artificial Sequence: Synthetic oligonucleotide
aggcgacuacgagggauau

SEQ ID NO: 295914 - RNA, 19 nt, Artificial Sequence
  Description of Artificial Sequence: Synthetic oligonucleotide
gcggacucuaaagauauuu

SEQ ID NO: 295915 - RNA, 19 nt, Artificial Sequence
  Description of Artificial Sequence: Synthetic oligonucleotide
cguggagcucugguaagcc

SEQ ID NO: 295916 - RNA, 19 nt, Artificial Sequence
  Description of Artificial Sequence: Synthetic oligonucleotide
guaggcauucaggcguggu

SEQ ID NO: 295917 - RNA, 19 nt, Artificial Sequence
  Description of Artificial Sequence: Synthetic oligonucleotide
ccaccagagaacacauuua

SEQ ID NO: 295918 - RNA, 19 nt, Artificial Sequence
  Description of Artificial Sequence: Synthetic oligonucleotide
ggcacaggagcaccuugcu

SEQ ID NO: 295919 - RNA, 19 nt, Artificial Sequence
  Description of Artificial Sequence: Synthetic oligonucleotide
gguauuugacgaggcgacu

SEQ ID NO: 295920 - RNA, 19 nt, Artificial Sequence
  Description of Artificial Sequence: Synthetic oligonucleotide
cgugugacaggccgaguca

SEQ ID NO: 295921 - RNA, 19 nt, Artificial Sequence
  Description of Artificial Sequence: Synthetic oligonucleotide
cgguaaaccugguaggagu

SEQ ID NO: 295922 - RNA, 19 nt, Artificial Sequence
  Description of Artificial Sequence: Synthetic oligonucleotide
uucgcugggcugggagauu

SEQ ID NO: 295923 - RNA, 19 nt, Artificial Sequence
  Description of Artificial Sequence: Synthetic oligonucleotide
gcguccaagucgccaaaua

SEQ ID NO: 295924 - RNA, 19 nt, Artificial Sequence
  Description of Artificial Sequence: Synthetic oligonucleotide
cacucggauucaccuuucu

SEQ ID NO: 295925 - RNA, 19 nt, Artificial Sequence
  Description of Artificial Sequence: Synthetic oligonucleotide
agcggacucuaaagauauu

SEQ ID NO: 295926 - RNA, 19 nt, Artificial Sequence
  Description of Artificial Sequence: Synthetic oligonucleotide
cccucaagucaggcuuucc

SEQ ID NO: 295927 - RNA, 19 nt, Artificial Sequence
  Description of Artificial Sequence: Synthetic oligonucleotide
ccaugcgcacauccccauc

SEQ ID NO: 295928 - RNA, 19 nt, Artificial Sequence
  Description of Artificial Sequence: Synthetic oligonucleotide
gccagcugguuacuacagu

SEQ ID NO: 295929 - RNA, 19 nt, Artificial Sequence
  Description of Artificial Sequence: Synthetic oligonucleotide
ggcgacuacgagggauauc

SEQ ID NO: 295930 - RNA, 19 nt, Artificial Sequence
  Description of Artificial Sequence: Synthetic oligonucleotide
cguccaagucgccaaauau

SEQ ID NO: 295931 - RNA, 19 nt, Artificial Sequence
  Description of Artificial Sequence: Synthetic oligonucleotide
cgcuucgauccuggggucc

SEQ ID NO: 295932 - RNA, 19 nt, Artificial Sequence
  Description of Artificial Sequence: Synthetic oligonucleotide
gaccuucgcugggcuggga

SEQ ID NO: 295933 - RNA, 19 nt, Artificial Sequence
  Description of Artificial Sequence: Synthetic oligonucleotide
ggcugcacucgaugugccu

SEQ ID NO: 295934 - RNA, 19 nt, Artificial Sequence
  Description of Artificial Sequence: Synthetic oligonucleotide
gccccucggaaggaaccac

SEQ ID NO: 295935 - RNA, 19 nt, Artificial Sequence
  Description of Artificial Sequence: Synthetic oligonucleotide
gcaccuugcucgcuucgau

SEQ ID NO: 295936 - RNA, 19 nt, Artificial Sequence
  Description of Artificial Sequence: Synthetic oligonucleotide
gcuucgauccugggguccu

SEQ ID NO: 295937 - RNA, 19 nt, Artificial Sequence
  Description of Artificial Sequence: Synthetic oligonucleotide
ccccucuggccuucuacaa

SEQ ID NO: 295938 - RNA, 19 nt, Artificial Sequence
  Description of Artificial Sequence: Synthetic oligonucleotide
gguaggagugacgcucauu

SEQ ID NO: 295939 - RNA, 19 nt, Artificial Sequence
  Description of Artificial Sequence: Synthetic oligonucleotide
cgccuauucuugccaacaa

SEQ ID NO: 295940 - RNA, 19 nt, Artificial Sequence
  Description of Artificial Sequence: Synthetic oligonucleotide
gguugccgguaaaccuggu

SEQ ID NO: 295941 - RNA, 19 nt, Artificial Sequence
  Description of Artificial Sequence: Synthetic oligonucleotide
cccaugcgcacauccccau

SEQ ID NO: 295942 - RNA, 19 nt, Artificial Sequence
  Description of Artificial Sequence: Synthetic oligonucleotide
cgacuacgagggauaucua

SEQ ID NO: 295943 - RNA, 19 nt, Artificial Sequence
  Description of Artificial Sequence: Synthetic oligonucleotide
aauagaaucccuuaugaug

SEQ ID NO: 295944 - RNA, 19 nt, Artificial Sequence
  Description of Artificial Sequence: Synthetic oligonucleotide
gaugcaaucauccagccac

SEQ ID NO: 295945 - RNA, 19 nt, Artificial Sequence
  Description of Artificial Sequence: Synthetic oligonucleotide
uaucguaagagccuguuag

SEQ ID NO: 295946 - RNA, 19 nt, Artificial Sequence
  Description of Artificial Sequence: Synthetic oligonucleotide
ucuucauaucguaagagcc

SEQ ID NO: 295947 - RNA, 19 nt, Artificial Sequence
  Description of Artificial Sequence: Synthetic oligonucleotide
ugucaaaaggucuuuauug

SEQ ID NO: 295948 - RNA, 19 nt, Artificial Sequence
  Description of Artificial Sequence: Synthetic oligonucleotide
uaaauauacccuaccaucc

SEQ ID NO: 295949 - RNA, 19 nt, Artificial Sequence
  Description of Artificial Sequence: Synthetic oligonucleotide
aaugcuacccaguaaauau

SEQ ID NO: 295950 - RNA, 19 nt, Artificial Sequence
  Description of Artificial Sequence: Synthetic oligonucleotide
uaaaucguaccacuggcgg

SEQ ID NO: 295951 - RNA, 19 nt, Artificial Sequence
  Description of Artificial Sequence: Synthetic oligonucleotide
uaaacuaugaacacauccu

SEQ ID NO: 295952 - RNA, 19 nt, Artificial Sequence
  Description of Artificial Sequence: Synthetic oligonucleotide
aaggggauaagauuuguug

SEQ ID NO: 295953 - RNA, 19 nt, Artificial Sequence
  Description of Artificial Sequence: Synthetic oligonucleotide
aauagcuccaccacuuucc

SEQ ID NO: 295954 - RNA, 19 nt, Artificial Sequence
  Description of Artificial Sequence: Synthetic oligonucleotide
aaauaugcccagugugucc

SEQ ID NO: 295955 - RNA, 19 nt, Artificial Sequence
  Description of Artificial Sequence: Synthetic oligonucleotide
aaaauagccuauuuuaaua

SEQ ID NO: 295956 - RNA, 19 nt, Artificial Sequence
  Description of Artificial Sequence: Synthetic oligonucleotide
uguauuaaccucugacugg

SEQ ID NO: 295957 - RNA, 19 nt, Artificial Sequence
  Description of Artificial Sequence: Synthetic oligonucleotide
aacuauuugauccauuguu

SEQ ID NO: 295958 - RNA, 19 nt, Artificial Sequence
  Description of Artificial Sequence: Synthetic oligonucleotide
aaaucguaccacuggcggc

SEQ ID NO: 295959 - RNA, 19 nt, Artificial Sequence
  Description of Artificial Sequence: Synthetic oligonucleotide
acaguuacacuucuauuac

SEQ ID NO: 295960 - RNA, 19 nt, Artificial Sequence
  Description of Artificial Sequence: Synthetic oligonucleotide
cuuggaucgauuuugucag

SEQ ID NO: 295961 - RNA, 19 nt, Artificial Sequence
  Description of Artificial Sequence: Synthetic oligonucleotide
aaauagccuauuuuaauaa

SEQ ID NO: 295962 - RNA, 19 nt, Artificial Sequence
  Description of Artificial Sequence: Synthetic oligonucleotide
uuaaaucguaccacuggcg

SEQ ID NO: 295963 - RNA, 19 nt, Artificial Sequence
  Description of Artificial Sequence: Synthetic oligonucleotide
acaccuauguuucaucugg

SEQ ID NO: 295964 - RNA, 19 nt, Artificial Sequence
  Description of Artificial Sequence: Synthetic oligonucleotide
cuauguuucaucuggggag

SEQ ID NO: 295965 - RNA, 19 nt, Artificial Sequence
  Description of Artificial Sequence: Synthetic oligonucleotide
aguaucguguauuaaccuc

SEQ ID NO: 295966 - RNA, 19 nt, Artificial Sequence
  Description of Artificial Sequence: Synthetic oligonucleotide
cuaaaauaugcccagugug

SEQ ID NO: 295967 - RNA, 19 nt, Artificial Sequence
  Description of Artificial Sequence: Synthetic oligonucleotide
uguugauccaggauuacga

SEQ ID NO: 295968 - RNA, 19 nt, Artificial Sequence
  Description of Artificial Sequence: Synthetic oligonucleotide
uguaccuugacuuggcgug

SEQ ID NO: 295969 - RNA, 19 nt, Artificial Sequence
  Description of Artificial Sequence: Synthetic oligonucleotide
uguucgauauuguuccacg

SEQ ID NO: 295970 - RNA, 19 nt, Artificial Sequence
  Description of Artificial Sequence: Synthetic oligonucleotide
uaccauccgauauuguucg

SEQ ID NO: 295971 - RNA, 19 nt, Artificial Sequence
  Description of Artificial Sequence: Synthetic oligonucleotide
ucgaacagagcgcacauca

SEQ ID NO: 295972 - RNA, 19 nt, Artificial Sequence
  Description of Artificial Sequence: Synthetic oligonucleotide
agguguaucacuucguuca

SEQ ID NO: 295973 - RNA, 19 nt, Artificial Sequence
  Description of Artificial Sequence: Synthetic oligonucleotide
guguauuaaccucugacug

SEQ ID NO: 295974 - RNA, 19 nt, Artificial Sequence
  Description of Artificial Sequence: Synthetic oligonucleotide
aaauagaaucccuuaugau

SEQ ID NO: 295975 - RNA, 19 nt, Artificial Sequence
  Description of Artificial Sequence: Synthetic oligonucleotide
auaaaugccaaaucucgga

SEQ ID NO: 295976 - RNA, 19 nt, Artificial Sequence
  Description of Artificial Sequence: Synthetic oligonucleotide
aagaggaaaaugcuaccca

SEQ ID NO: 295977 - RNA, 19 nt, Artificial Sequence
  Description of Artificial Sequence: Synthetic oligonucleotide
acuauuaacuccgugucag

SEQ ID NO: 295978 - RNA, 19 nt, Artificial Sequence
  Description of Artificial Sequence: Synthetic oligonucleotide
aguaaauauacccuaccau

SEQ ID NO: 295979 - RNA, 19 nt, Artificial Sequence
  Description of Artificial Sequence: Synthetic oligonucleotide
ucuggggagaacuuggcug

SEQ ID NO: 295980 - RNA, 19 nt, Artificial Sequence
  Description of Artificial Sequence: Synthetic oligonucleotide
gugaauauuugaaguaucg

SEQ ID NO: 295981 - RNA, 19 nt, Artificial Sequence
  Description of Artificial Sequence: Synthetic oligonucleotide
ucguguauuaaccucugac

SEQ ID NO: 295982 - RNA, 19 nt, Artificial Sequence
  Description of Artificial Sequence: Synthetic oligonucleotide
aauauacccuaccauccga

SEQ ID NO: 295983 - RNA, 19 nt, Artificial Sequence
  Description of Artificial Sequence: Synthetic oligonucleotide
aucguaagagccuguuagc

SEQ ID NO: 295984 - RNA, 19 nt, Artificial Sequence
  Description of Artificial Sequence: Synthetic oligonucleotide
cuguuaucuggguaaaacc

SEQ ID NO: 295985 - RNA, 19 nt, Artificial Sequence
  Description of Artificial Sequence: Synthetic oligonucleotide
ucgauauuguuccacguaa

SEQ ID NO: 295986 - RNA, 19 nt, Artificial Sequence
  Description of Artificial Sequence: Synthetic oligonucleotide
aauacaacugcaguugaaa

SEQ ID NO: 295987 - RNA, 19 nt, Artificial Sequence
  Description of Artificial Sequence: Synthetic oligonucleotide
aacuuggcuguauuguaug

SEQ ID NO: 295988 - RNA, 19 nt, Artificial Sequence
  Description of Artificial Sequence: Synthetic oligonucleotide
aaguaucguguauuaaccu

SEQ ID NO: 295989 - RNA, 19 nt, Artificial Sequence
  Description of Artificial Sequence: Synthetic oligonucleotide
auaacuguccacaaggacu

SEQ ID NO: 295990 - RNA, 19 nt, Artificial Sequence
  Description of Artificial Sequence: Synthetic oligonucleotide
cacuccaaguauaaagugc

SEQ ID NO: 295991 - RNA, 19 nt, Artificial Sequence
  Description of Artificial Sequence: Synthetic oligonucleotide
gagacuacacagcagcaug

SEQ ID NO: 295992 - RNA, 19 nt, Artificial Sequence
  Description of Artificial Sequence: Synthetic oligonucleotide
acucuagccacuguaaguc

SEQ ID NO: 295993 - RNA, 19 nt, Artificial Sequence
  Description of Artificial Sequence: Synthetic oligonucleotide
auuaacuauuaacuccgug

SEQ ID NO: 295994 - RNA, 19 nt, Artificial Sequence
  Description of Artificial Sequence: Synthetic oligonucleotide
aggacaugguaacaagggg

SEQ ID NO: 295995 - RNA, 19 nt, Artificial Sequence
  Description of Artificial Sequence: Synthetic oligonucleotide
uagcccaaaacaaaguaau

SEQ ID NO: 295996 - RNA, 19 nt, Artificial Sequence
  Description of Artificial Sequence: Synthetic oligonucleotide
aucgauuuugucaggauag

SEQ ID NO: 295997 - RNA, 19 nt, Artificial Sequence
  Description of Artificial Sequence: Synthetic oligonucleotide
uuaucuggguaaaacccga

SEQ ID NO: 295998 - RNA, 19 nt, Artificial Sequence
  Description of Artificial Sequence: Synthetic oligonucleotide
gauagcguaaucuuugccu

SEQ ID NO: 295999 - RNA, 19 nt, Artificial Sequence
  Description of Artificial Sequence: Synthetic oligonucleotide
ggaaagacuagcuugguga

SEQ ID NO: 296000 - RNA, 19 nt, Artificial Sequence
  Description of Artificial Sequence: Synthetic oligonucleotide
accuacaugggguggacuc

SEQ ID NO: 296001 - RNA, 19 nt, Artificial Sequence
  Description of Artificial Sequence: Synthetic oligonucleotide
cauagauacugugacauuc

SEQ ID NO: 296002 - RNA, 19 nt, Artificial Sequence
  Description of Artificial Sequence: Synthetic oligonucleotide
aauaugcccagugugucca

SEQ ID NO: 296003 - RNA, 19 nt, Artificial Sequence
  Description of Artificial Sequence: Synthetic oligonucleotide
uuugaaguaucguguauua

SEQ ID NO: 296004 - RNA, 19 nt, Artificial Sequence
  Description of Artificial Sequence: Synthetic oligonucleotide
accaacaaguuucaaagua

SEQ ID NO: 296005 - RNA, 19 nt, Artificial Sequence
  Description of Artificial Sequence: Synthetic oligonucleotide
ucuuguuuagccgguacug

SEQ ID NO: 296006 - RNA, 19 nt, Artificial Sequence
  Description of Artificial Sequence: Synthetic oligonucleotide
uauuaacuccgugucagug

SEQ ID NO: 296007 - RNA, 19 nt, Artificial Sequence
  Description of Artificial Sequence: Synthetic oligonucleotide
gauugucccaucaugcaug

SEQ ID NO: 296008 - RNA, 19 nt, Artificial Sequence
  Description of Artificial Sequence: Synthetic oligonucleotide
auuaacuccgugucagugu

SEQ ID NO: 296009 - RNA, 19 nt, Artificial Sequence
  Description of Artificial Sequence: Synthetic oligonucleotide
ucuagccacuguaagucca

SEQ ID NO: 296010 - RNA, 19 nt, Artificial Sequence
  Description of Artificial Sequence: Synthetic oligonucleotide
cuaaagucugucuggggug

SEQ ID NO: 296011 - RNA, 19 nt, Artificial Sequence
  Description of Artificial Sequence: Synthetic oligonucleotide
ugguaccucauuaccaaga

SEQ ID NO: 296012 - RNA, 19 nt, Artificial Sequence
  Description of Artificial Sequence: Synthetic oligonucleotide
uuaccaagacuauccauuc

SEQ ID NO: 296013 - RNA, 19 nt, Artificial Sequence
  Description of Artificial Sequence: Synthetic oligonucleotide
aaucguaccacuggcggcu

SEQ ID NO: 296014 - RNA, 19 nt, Artificial Sequence
  Description of Artificial Sequence: Synthetic oligonucleotide
uuaacuccgugucagugua

SEQ ID NO: 296015 - RNA, 19 nt, Artificial Sequence
  Description of Artificial Sequence: Synthetic oligonucleotide
acuaugaacacauccugua

SEQ ID NO: 296016 - RNA, 19 nt, Artificial Sequence
  Description of Artificial Sequence: Synthetic oligonucleotide
uugaccuguggcuaagaga

SEQ ID NO: 296017 - RNA, 19 nt, Artificial Sequence
  Description of Artificial Sequence: Synthetic oligonucleotide
uuucacugcauagaccuac

SEQ ID NO: 296018 - RNA, 19 nt, Artificial Sequence
  Description of Artificial Sequence: Synthetic oligonucleotide
uguugcguuacaagucucu

SEQ ID NO: 296019 - RNA, 19 nt, Artificial Sequence
  Description of Artificial Sequence: Synthetic oligonucleotide
acauaagagcucuucugca

SEQ ID NO: 296020 - RNA, 19 nt, Artificial Sequence
  Description of Artificial Sequence: Synthetic oligonucleotide
aaucgaacagagcgcacau

SEQ ID NO: 296021 - RNA, 19 nt, Artificial Sequence
  Description of Artificial Sequence: Synthetic oligonucleotide
ugauccaguugcuaauaac

SEQ ID NO: 296022 - RNA, 19 nt, Artificial Sequence
  Description of Artificial Sequence: Synthetic oligonucleotide
uucgauauuguuccacgua

SEQ ID NO: 296023 - RNA, 19 nt, Artificial Sequence
  Description of Artificial Sequence: Synthetic oligonucleotide
guguaaauguuacaaucuc

SEQ ID NO: 296024 - RNA, 19 nt, Artificial Sequence
  Description of Artificial Sequence: Synthetic oligonucleotide
uccaaguauaaagugcuaa

SEQ ID NO: 296025 - RNA, 19 nt, Artificial Sequence
  Description of Artificial Sequence: Synthetic oligonucleotide
uuguuuagccgguacugga

SEQ ID NO: 296026 - RNA, 19 nt, Artificial Sequence
  Description of Artificial Sequence: Synthetic oligonucleotide
ucacaauucaguagucuuu

SEQ ID NO: 296027 - RNA, 19 nt, Artificial Sequence
  Description of Artificial Sequence: Synthetic oligonucleotide
acuccaaguauaaagugcu

SEQ ID NO: 296028 - RNA, 19 nt, Artificial Sequence
  Description of Artificial Sequence: Synthetic oligonucleotide
aggaucuauaguacuguac

SEQ ID NO: 296029 - RNA, 19 nt, Artificial Sequence
  Description of Artificial Sequence: Synthetic oligonucleotide
auauuugaaguaucgugua

SEQ ID NO: 296030 - RNA, 19 nt, Artificial Sequence
  Description of Artificial Sequence: Synthetic oligonucleotide
guuacaaucuccugcccca

SEQ ID NO: 296031 - RNA, 19 nt, Artificial Sequence
  Description of Artificial Sequence: Synthetic oligonucleotide
ucaguggaaucucgaagcu

SEQ ID NO: 296032 - RNA, 19 nt, Artificial Sequence
  Description of Artificial Sequence: Synthetic oligonucleotide
uauguuucaucuggggaga

SEQ ID NO: 296033 - RNA, 19 nt, Artificial Sequence
  Description of Artificial Sequence: Synthetic oligonucleotide
uaucguguauuaaccucug

SEQ ID NO: 296034 - RNA, 19 nt, Artificial Sequence
  Description of Artificial Sequence: Synthetic oligonucleotide
guacugguaccucauuacc

SEQ ID NO: 296035 - RNA, 19 nt, Artificial Sequence
  Description of Artificial Sequence: Synthetic oligonucleotide
cuuguuuagccgguacugg

SEQ ID NO: 296036 - RNA, 19 nt, Artificial Sequence
  Description of Artificial Sequence: Synthetic oligonucleotide
caggucaauacaacugcag

SEQ ID NO: 296037 - RNA, 19 nt, Artificial Sequence
  Description of Artificial Sequence: Synthetic oligonucleotide
uguggguucacugcugaca

SEQ ID NO: 296038 - RNA, 19 nt, Artificial Sequence
  Description of Artificial Sequence: Synthetic oligonucleotide
uccuguugcguuacaaguc

SEQ ID NO: 296039 - RNA, 19 nt, Artificial Sequence
  Description of Artificial Sequence: Synthetic oligonucleotide
uaucuggguaaaacccgag

SEQ ID NO: 296040 - RNA, 19 nt, Artificial Sequence
  Description of Artificial Sequence: Synthetic oligonucleotide
ucgauuuugucaggauagg

SEQ ID NO: 296041 - RNA, 19 nt, Artificial Sequence
  Description of Artificial Sequence: Synthetic oligonucleotide
ucguaagagccuguuagca

SEQ ID NO: 296042 - RNA, 19 nt, Artificial Sequence
  Description of Artificial Sequence: Synthetic oligonucleotide
guaaugugacaaauuagca

SEQ ID NO: 296043 - RNA, 19 nt, Artificial Sequence
  Description of Artificial Sequence: Synthetic oligonucleotide
cugauagcguaaucuuugc

SEQ ID NO: 296044 - RNA, 19 nt, Artificial Sequence
  Description of Artificial Sequence: Synthetic oligonucleotide
aacuccgugucaguguaug

SEQ ID NO: 296045 - RNA, 19 nt, Artificial Sequence
  Description of Artificial Sequence: Synthetic oligonucleotide
uguuuagccgguacuggau

SEQ ID NO: 296046 - RNA, 19 nt, Artificial Sequence
  Description of Artificial Sequence: Synthetic oligonucleotide
gaucgauuuugucaggaua

SEQ ID NO: 296047 - RNA, 19 nt, Artificial Sequence
  Description of Artificial Sequence: Synthetic oligonucleotide
caguugcuaauaacugucc

SEQ ID NO: 296048 - RNA, 19 nt, Artificial Sequence
  Description of Artificial Sequence: Synthetic oligonucleotide
ugaacaccuauguuucauc

SEQ ID NO: 296049 - RNA, 19 nt, Artificial Sequence
  Description of Artificial Sequence: Synthetic oligonucleotide
agcaugagacuucugcuaa

SEQ ID NO: 296050 - RNA, 19 nt, Artificial Sequence
  Description of Artificial Sequence: Synthetic oligonucleotide
cacugcauagaccuacaug

SEQ ID NO: 296051 - RNA, 19 nt, Artificial Sequence
  Description of Artificial Sequence: Synthetic oligonucleotide
acaccaacauaagagcucu

SEQ ID NO: 296052 - RNA, 19 nt, Artificial Sequence
  Description of Artificial Sequence: Synthetic oligonucleotide
uuuagccgguacuggauuc

SEQ ID NO: 296053 - RNA, 19 nt, Artificial Sequence
  Description of Artificial Sequence: Synthetic oligonucleotide
guauuaaccucugacugga

SEQ ID NO: 296054 - RNA, 19 nt, Artificial Sequence
  Description of Artificial Sequence: Synthetic oligonucleotide
uuggcgugcacaccaacau

SEQ ID NO: 296055 - RNA, 19 nt, Artificial Sequence
  Description of Artificial Sequence: Synthetic oligonucleotide
ggacaugguaacaaggggc

SEQ ID NO: 296056 - RNA, 19 nt, Artificial Sequence
  Description of Artificial Sequence: Synthetic oligonucleotide
uuaggcaugucgugugcac

SEQ ID NO: 296057 - RNA, 19 nt, Artificial Sequence
  Description of Artificial Sequence: Synthetic oligonucleotide
uccgugucaguguauguau

SEQ ID NO: 296058 - RNA, 19 nt, Artificial Sequence
  Description of Artificial Sequence: Synthetic oligonucleotide
ucaacagguguaucacuuc

SEQ ID NO: 296059 - RNA, 19 nt, Artificial Sequence
  Description of Artificial Sequence: Synthetic oligonucleotide
uggaaugagggugguagcu

SEQ ID NO: 296060 - RNA, 19 nt, Artificial Sequence
  Description of Artificial Sequence: Synthetic oligonucleotide
ugcugauagcguaaucuuu

SEQ ID NO: 296061 - RNA, 19 nt, Artificial Sequence
  Description of Artificial Sequence: Synthetic oligonucleotide
aaaucucggauugucccau

SEQ ID NO: 296062 - RNA, 19 nt, Artificial Sequence
  Description of Artificial Sequence: Synthetic oligonucleotide
uccgauauuguucgauauu

SEQ ID NO: 296063 - RNA, 19 nt, Artificial Sequence
  Description of Artificial Sequence: Synthetic oligonucleotide
aaugcugcugauagcguaa

SEQ ID NO: 296064 - RNA, 19 nt, Artificial Sequence
  Description of Artificial Sequence: Synthetic oligonucleotide
auagaccuacauggggugg

SEQ ID NO: 296065 - RNA, 19 nt, Artificial Sequence
  Description of Artificial Sequence: Synthetic oligonucleotide
gucugguauuaucugucgc

SEQ ID NO: 296066 - RNA, 19 nt, Artificial Sequence
  Description of Artificial Sequence: Synthetic oligonucleotide
uaccacuggcggcuuaggc

SEQ ID NO: 296067 - RNA, 19 nt, Artificial Sequence
  Description of Artificial Sequence: Synthetic oligonucleotide
uucguucaggagauucuuc

SEQ ID NO: 296068 - RNA, 19 nt, Artificial Sequence
  Description of Artificial Sequence: Synthetic oligonucleotide
cucuagccacuguaagucc

SEQ ID NO: 296069 - RNA, 19 nt, Artificial Sequence
  Description of Artificial Sequence: Synthetic oligonucleotide
uuguucgauauuguuccac

SEQ ID NO: 296070 - RNA, 19 nt, Artificial Sequence
  Description of Artificial Sequence: Synthetic oligonucleotide
cugguauuaucugucgcug

SEQ ID NO: 296071 - RNA, 19 nt, Artificial Sequence
  Description of Artificial Sequence: Synthetic oligonucleotide
gcugauagcguaaucuuug

SEQ ID NO: 296072 - RNA, 19 nt, Artificial Sequence
  Description of Artificial Sequence: Synthetic oligonucleotide
ugaacccuggcaugugggu

SEQ ID NO: 296073 - RNA, 19 nt, Artificial Sequence
  Description of Artificial Sequence: Synthetic oligonucleotide
gaggagugcauuuaauaau

SEQ ID NO: 296074 - RNA, 19 nt, Artificial Sequence
  Description of Artificial Sequence: Synthetic oligonucleotide
agaugcaaucauccagcca

SEQ ID NO: 296075 - RNA, 19 nt, Artificial Sequence
  Description of Artificial Sequence: Synthetic oligonucleotide
aaccacccaacaccuucug

SEQ ID NO: 296076 - RNA, 19 nt, Artificial Sequence
  Description of Artificial Sequence: Synthetic oligonucleotide
aggauuacgaggugugcuu

SEQ ID NO: 296077 - RNA, 19 nt, Artificial Sequence
  Description of Artificial Sequence: Synthetic oligonucleotide
guccucacaauucaguagu

SEQ ID NO: 296078 - RNA, 19 nt, Artificial Sequence
  Description of Artificial Sequence: Synthetic oligonucleotide
uacccuaccauccgauauu

SEQ ID NO: 296079 - RNA, 19 nt, Artificial Sequence
  Description of Artificial Sequence: Synthetic oligonucleotide
aggagugcauuuaauaaua

SEQ ID NO: 296080 - RNA, 19 nt, Artificial Sequence
  Description of Artificial Sequence: Synthetic oligonucleotide
gguaccucauuaccaagac

SEQ ID NO: 296081 - RNA, 19 nt, Artificial Sequence
  Description of Artificial Sequence: Synthetic oligonucleotide
aucucggauugucccauca

SEQ ID NO: 296082 - RNA, 19 nt, Artificial Sequence
  Description of Artificial Sequence: Synthetic oligonucleotide
ugaucaggaccauccuccu

SEQ ID NO: 296083 - RNA, 19 nt, Artificial Sequence
  Description of Artificial Sequence: Synthetic oligonucleotide
caaaucucggauuguccca

SEQ ID NO: 296084 - RNA, 19 nt, Artificial Sequence
  Description of Artificial Sequence: Synthetic oligonucleotide
guugcguuacaagucucug

SEQ ID NO: 296085 - RNA, 19 nt, Artificial Sequence
  Description of Artificial Sequence: Synthetic oligonucleotide
gacgacaggaaggaaaggu

SEQ ID NO: 296086 - RNA, 19 nt, Artificial Sequence
  Description of Artificial Sequence: Synthetic oligonucleotide
uagcaaguagugagcucca

SEQ ID NO: 296087 - RNA, 19 nt, Artificial Sequence
  Description of Artificial Sequence: Synthetic oligonucleotide
aaaggggauaagauuuguu

SEQ ID NO: 296088 - RNA, 19 nt, Artificial Sequence
  Description of Artificial Sequence: Synthetic oligonucleotide
caccccgacacgaccaaag

SEQ ID NO: 296089 - RNA, 19 nt, Artificial Sequence
  Description of Artificial Sequence: Synthetic oligonucleotide
uagaccuacauggggugga

SEQ ID NO: 296090 - RNA, 19 nt, Artificial Sequence
  Description of Artificial Sequence: Synthetic oligonucleotide
guuagcaaguagugagcuc

SEQ ID NO: 296091 - RNA, 19 nt, Artificial Sequence
  Description of Artificial Sequence: Synthetic oligonucleotide
guaaaacccgaggagugca

SEQ ID NO: 296092 - RNA, 19 nt, Artificial Sequence
  Description of Artificial Sequence: Synthetic oligonucleotide
uuggggugguguacuaaaa

SEQ ID NO: 296093 - RNA, 19 nt, Artificial Sequence
  Description of Artificial Sequence: Synthetic oligonucleotide
ccacucaaagcaugaaggc

SEQ ID NO: 296094 - RNA, 19 nt, Artificial Sequence
  Description of Artificial Sequence: Synthetic oligonucleotide
auaucguaagagccuguua

SEQ ID NO: 296095 - RNA, 19 nt, Artificial Sequence
  Description of Artificial Sequence: Synthetic oligonucleotide
auagaccuguuaaggaacu

SEQ ID NO: 296096 - RNA, 19 nt, Artificial Sequence
  Description of Artificial Sequence: Synthetic oligonucleotide
ucucggauugucccaucau

SEQ ID NO: 296097 - RNA, 19 nt, Artificial Sequence
  Description of Artificial Sequence: Synthetic oligonucleotide
ggacucuagccacuguaag

SEQ ID NO: 296098 - RNA, 19 nt, Artificial Sequence
  Description of Artificial Sequence: Synthetic oligonucleotide
uccacguaaugcagcugcu

SEQ ID NO: 296099 - RNA, 19 nt, Artificial Sequence
  Description of Artificial Sequence: Synthetic oligonucleotide
auuacgaggugugcuugug

SEQ ID NO: 296100 - RNA, 19 nt, Artificial Sequence
  Description of Artificial Sequence: Synthetic oligonucleotide
auaugcccaguguguccac

SEQ ID NO: 296101 - RNA, 19 nt, Artificial Sequence
  Description of Artificial Sequence: Synthetic oligonucleotide
uccucacaauucaguaguc

SEQ ID NO: 296102 - RNA, 19 nt, Artificial Sequence
  Description of Artificial Sequence: Synthetic oligonucleotide
guaucguguauuaaccucu

SEQ ID NO: 296103 - RNA, 19 nt, Artificial Sequence
  Description of Artificial Sequence: Synthetic oligonucleotide
gagccuguuagcaaguagu

SEQ ID NO: 296104 - RNA, 19 nt, Artificial Sequence
  Description of Artificial Sequence: Synthetic oligonucleotide
agaaucgaacagagcgcac

SEQ ID NO: 296105 - RNA, 19 nt, Artificial Sequence
  Description of Artificial Sequence: Synthetic oligonucleotide
ucacugcauagaccuacau

SEQ ID NO: 296106 - RNA, 19 nt, Artificial Sequence
  Description of Artificial Sequence: Synthetic oligonucleotide
auuagcaaccacaccccga

SEQ ID NO: 296107 - RNA, 19 nt, Artificial Sequence
  Description of Artificial Sequence: Synthetic oligonucleotide
uauuaaccucugacuggaa

SEQ ID NO: 296108 - RNA, 19 nt, Artificial Sequence
  Description of Artificial Sequence: Synthetic oligonucleotide
gguguaucacuucguucag

SEQ ID NO: 296109 - RNA, 19 nt, Artificial Sequence
  Description of Artificial Sequence: Synthetic oligonucleotide
aaaacccgaggagugcauu

SEQ ID NO: 296110 - RNA, 19 nt, Artificial Sequence
  Description of Artificial Sequence: Synthetic oligonucleotide
acgaggugugcuuguguga

SEQ ID NO: 296111 - RNA, 19 nt, Artificial Sequence
  Description of Artificial Sequence: Synthetic oligonucleotide
agaccuacaugggguggac

SEQ ID NO: 296112 - RNA, 19 nt, Artificial Sequence
  Description of Artificial Sequence: Synthetic oligonucleotide
agacuacacagcagcauga

SEQ ID NO: 296113 - RNA, 19 nt, Artificial Sequence
  Description of Artificial Sequence: Synthetic oligonucleotide
guacucgaagaucccagaa

SEQ ID NO: 296114 - RNA, 19 nt, Artificial Sequence
  Description of Artificial Sequence: Synthetic oligonucleotide
cuauuacccuucccacuug

SEQ ID NO: 296115 - RNA, 19 nt, Artificial Sequence
  Description of Artificial Sequence: Synthetic oligonucleotide
acccuaccauccgauauug

SEQ ID NO: 296116 - RNA, 19 nt, Artificial Sequence
  Description of Artificial Sequence: Synthetic oligonucleotide
uagcguaaucuuugccuau

SEQ ID NO: 296117 - RNA, 19 nt, Artificial Sequence
  Description of Artificial Sequence: Synthetic oligonucleotide
gcuaaaauaugcccagugu

SEQ ID NO: 296118 - RNA, 19 nt, Artificial Sequence
  Description of Artificial Sequence: Synthetic oligonucleotide
auauacccuaccauccgau

SEQ ID NO: 296119 - RNA, 19 nt, Artificial Sequence
  Description of Artificial Sequence: Synthetic oligonucleotide
cagcuagagucuucuugac

SEQ ID NO: 296120 - RNA, 19 nt, Artificial Sequence
  Description of Artificial Sequence: Synthetic oligonucleotide
ggcuuaggcaugucgugug

SEQ ID NO: 296121 - RNA, 19 nt, Artificial Sequence
  Description of Artificial Sequence: Synthetic oligonucleotide
ggaaaaugcuacccaguaa

SEQ ID NO: 296122 - RNA, 19 nt, Artificial Sequence
  Description of Artificial Sequence: Synthetic oligonucleotide
aggcaugucgugugcacuu

SEQ ID NO: 296123 - RNA, 19 nt, Artificial Sequence
  Description of Artificial Sequence: Synthetic oligonucleotide
gauuacgaggugugcuugu

SEQ ID NO: 296124 - RNA, 19 nt, Artificial Sequence
  Description of Artificial Sequence: Synthetic oligonucleotide
uggcgugcacaccaacaua

SEQ ID NO: 296125 - RNA, 19 nt, Artificial Sequence
  Description of Artificial Sequence: Synthetic oligonucleotide
cccuuaugauguuuguuuc

SEQ ID NO: 296126 - RNA, 19 nt, Artificial Sequence
  Description of Artificial Sequence: Synthetic oligonucleotide
cagaugccacugcacugcc

SEQ ID NO: 296127 - RNA, 19 nt, Artificial Sequence
  Description of Artificial Sequence: Synthetic oligonucleotide
cccgacacgaccaaaguaa

SEQ ID NO: 296128 - RNA, 19 nt, Artificial Sequence
  Description of Artificial Sequence: Synthetic oligonucleotide
caugucgugugcacuugga

SEQ ID NO: 296129 - RNA, 19 nt, Artificial Sequence
  Description of Artificial Sequence: Synthetic oligonucleotide
accccgacacgaccaaagu

SEQ ID NO: 296130 - RNA, 19 nt, Artificial Sequence
  Description of Artificial Sequence: Synthetic oligonucleotide
ugcugcugauagcguaauc

SEQ ID NO: 296131 - RNA, 19 nt, Artificial Sequence
  Description of Artificial Sequence: Synthetic oligonucleotide
guucgauauuguuccacgu

SEQ ID NO: 296132 - RNA, 19 nt, Artificial Sequence
  Description of Artificial Sequence: Synthetic oligonucleotide
uucccggugcauuguuggu

SEQ ID NO: 296133 - RNA, 19 nt, Artificial Sequence
  Description of Artificial Sequence: Synthetic oligonucleotide
ccaaguauaaagugcuaaa

SEQ ID NO: 296134 - RNA, 19 nt, Artificial Sequence
  Description of Artificial Sequence: Synthetic oligonucleotide
gacuagcuuggugaggucu

SEQ ID NO: 296135 - RNA, 19 nt, Artificial Sequence
  Description of Artificial Sequence: Synthetic oligonucleotide
guaccuugacuuggcgugc

SEQ ID NO: 296136 - RNA, 19 nt, Artificial Sequence
  Description of Artificial Sequence: Synthetic oligonucleotide
aacccgaggagugcauuua

SEQ ID NO: 296137 - RNA, 19 nt, Artificial Sequence
  Description of Artificial Sequence: Synthetic oligonucleotide
gccaucugcacugaaucac

SEQ ID NO: 296138 - RNA, 19 nt, Artificial Sequence
  Description of Artificial Sequence: Synthetic oligonucleotide
ggauuacgaggugugcuug

SEQ ID NO: 296139 - RNA, 19 nt, Artificial Sequence
  Description of Artificial Sequence: Synthetic oligonucleotide
cuuaggcaugucgugugca

SEQ ID NO: 296140 - RNA, 19 nt, Artificial Sequence
  Description of Artificial Sequence: Synthetic oligonucleotide
gcugcugauagcguaaucu

SEQ ID NO: 296141 - RNA, 19 nt, Artificial Sequence
  Description of Artificial Sequence: Synthetic oligonucleotide
ggagagaaucgaacagagc

SEQ ID NO: 296142 - RNA, 19 nt, Artificial Sequence
  Description of Artificial Sequence: Synthetic oligonucleotide
gccaaaucucggauugucc

SEQ ID NO: 296143 - RNA, 19 nt, Artificial Sequence
  Description of Artificial Sequence: Synthetic oligonucleotide
gcuuaggcaugucgugugc

SEQ ID NO: 296144 - RNA, 19 nt, Artificial Sequence
  Description of Artificial Sequence: Synthetic oligonucleotide
gaacuuggcuguauuguau

SEQ ID NO: 296145 - RNA, 19 nt, Artificial Sequence
  Description of Artificial Sequence: Synthetic oligonucleotide
acccgaggagugcauuuaa

SEQ ID NO: 296146 - RNA, 19 nt, Artificial Sequence
  Description of Artificial Sequence: Synthetic oligonucleotide
cauuaccaagacuauccau

SEQ ID NO: 296147 - RNA, 19 nt, Artificial Sequence
  Description of Artificial Sequence: Synthetic oligonucleotide
ggcgugcacaccaacauaa

SEQ ID NO: 296148 - RNA, 19 nt, Artificial Sequence
  Description of Artificial Sequence: Synthetic oligonucleotide
uaacuccgugucaguguau

SEQ ID NO: 296149 - RNA, 19 nt, Artificial Sequence
  Description of Artificial Sequence: Synthetic oligonucleotide
agcguaaucuuugccuaua

SEQ ID NO: 296150 - RNA, 19 nt, Artificial Sequence
  Description of Artificial Sequence: Synthetic oligonucleotide
ggggauaagauuuguugau

SEQ ID NO: 296151 - RNA, 19 nt, Artificial Sequence
  Description of Artificial Sequence: Synthetic oligonucleotide
cccggugcauuguugguug

SEQ ID NO: 296152 - RNA, 19 nt, Artificial Sequence
  Description of Artificial Sequence: Synthetic oligonucleotide
ggaaugagggugguagcuc

SEQ ID NO: 296153 - RNA, 19 nt, Artificial Sequence
  Description of Artificial Sequence: Synthetic oligonucleotide
gcgcacaucacuggaauga

SEQ ID NO: 296154 - RNA, 19 nt, Artificial Sequence
  Description of Artificial Sequence: Synthetic oligonucleotide
guuccacguaaugcagcug

SEQ ID NO: 296155 - RNA, 19 nt, Artificial Sequence
  Description of Artificial Sequence: Synthetic oligonucleotide
gcuaagguuuuguacuccu

SEQ ID NO: 296156 - RNA, 19 nt, Artificial Sequence
  Description of Artificial Sequence: Synthetic oligonucleotide
gucaggauaggcacauacu

SEQ ID NO: 296157 - RNA, 19 nt, Artificial Sequence
  Description of Artificial Sequence: Synthetic oligonucleotide
cacuguaaguccagagagu

SEQ ID NO: 296158 - RNA, 19 nt, Artificial Sequence
  Description of Artificial Sequence: Synthetic oligonucleotide
cuauuaacuccgugucagu

SEQ ID NO: 296159 - RNA, 19 nt, Artificial Sequence
  Description of Artificial Sequence: Synthetic oligonucleotide
cguguauuaaccucugacu

SEQ ID NO: 296160 - RNA, 19 nt, Artificial Sequence
  Description of Artificial Sequence: Synthetic oligonucleotide
caggauuacgaggugugcu

SEQ ID NO: 296161 - RNA, 19 nt, Artificial Sequence
  Description of Artificial Sequence: Synthetic oligonucleotide
cuccgugucaguguaugua

SEQ ID NO: 296162 - RNA, 19 nt, Artificial Sequence
  Description of Artificial Sequence: Synthetic oligonucleotide
augccaaaucucggauugu

SEQ ID NO: 296163 - RNA, 19 nt, Artificial Sequence
  Description of Artificial Sequence: Synthetic oligonucleotide
ccaugcuagggccauggca

SEQ ID NO: 296164 - RNA, 19 nt, Artificial Sequence
  Description of Artificial Sequence: Synthetic oligonucleotide
cuuucacugcauagaccua

SEQ ID NO: 296165 - RNA, 19 nt, Artificial Sequence
  Description of Artificial Sequence: Synthetic oligonucleotide
cugcugauagcguaaucuu

SEQ ID NO: 296166 - RNA, 19 nt, Artificial Sequence
  Description of Artificial Sequence: Synthetic oligonucleotide
cgaccaaaguaauuucuga

SEQ ID NO: 296167 - RNA, 19 nt, Artificial Sequence
  Description of Artificial Sequence: Synthetic oligonucleotide
acggccacugggauccaca

SEQ ID NO: 296168 - RNA, 19 nt, Artificial Sequence
  Description of Artificial Sequence: Synthetic oligonucleotide
ccgaggagugcauuuaaua

SEQ ID NO: 296169 - RNA, 19 nt, Artificial Sequence
  Description of Artificial Sequence: Synthetic oligonucleotide
cugaacaccuauguuucau

SEQ ID NO: 296170 - RNA, 19 nt, Artificial Sequence
  Description of Artificial Sequence: Synthetic oligonucleotide
ccuguugcguuacaagucu

SEQ ID NO: 296171 - RNA, 19 nt, Artificial Sequence
  Description of Artificial Sequence: Synthetic oligonucleotide
ccaagacuauccauuccaa

SEQ ID NO: 296172 - RNA, 19 nt, Artificial Sequence
  Description of Artificial Sequence: Synthetic oligonucleotide
ccuaccauccgauauuguu

SEQ ID NO: 296173 - RNA, 19 nt, Artificial Sequence
  Description of Artificial Sequence: Synthetic oligonucleotide
cucuaaugucauacagcau

SEQ ID NO: 296174 - RNA, 19 nt, Artificial Sequence
  Description of Artificial Sequence: Synthetic oligonucleotide
cauaucguaagagccuguu

SEQ ID NO: 296175 - RNA, 19 nt, Artificial Sequence
  Description of Artificial Sequence: Synthetic oligonucleotide
cgugcacaccaacauaaga

SEQ ID NO: 296176 - RNA, 19 nt, Artificial Sequence
  Description of Artificial Sequence: Synthetic oligonucleotide
ggaucgauuuugucaggau

SEQ ID NO: 296177 - RNA, 19 nt, Artificial Sequence
  Description of Artificial Sequence: Synthetic oligonucleotide
ccacguaaugcagcugcug

SEQ ID NO: 296178 - RNA, 19 nt, Artificial Sequence
  Description of Artificial Sequence: Synthetic oligonucleotide
ggguggacucuagccacug

SEQ ID NO: 296179 - RNA, 19 nt, Artificial Sequence
  Description of Artificial Sequence: Synthetic oligonucleotide
uggggagaacuuggcugua

SEQ ID NO: 296180 - RNA, 19 nt, Artificial Sequence
  Description of Artificial Sequence: Synthetic oligonucleotide
gacggccacugggauccac

SEQ ID NO: 296181 - RNA, 19 nt, Artificial Sequence
  Description of Artificial Sequence: Synthetic oligonucleotide
cugccccagcacuuauuaa

SEQ ID NO: 296182 - RNA, 19 nt, Artificial Sequence
  Description of Artificial Sequence: Synthetic oligonucleotide
cacaccccgacacgaccaa

SEQ ID NO: 296183 - RNA, 19 nt, Artificial Sequence
  Description of Artificial Sequence: Synthetic oligonucleotide
acaccccgacacgaccaaa

SEQ ID NO: 296184 - RNA, 19 nt, Artificial Sequence
  Description of Artificial Sequence: Synthetic oligonucleotide
guccgugggugugccaucu

SEQ ID NO: 296185 - RNA, 19 nt, Artificial Sequence
  Description of Artificial Sequence: Synthetic oligonucleotide
ccccgacacgaccaaagua

SEQ ID NO: 296186 - RNA, 19 nt, Artificial Sequence
  Description of Artificial Sequence: Synthetic oligonucleotide
gugugcacuuggaucgauu

SEQ ID NO: 296187 - RNA, 19 nt, Artificial Sequence
  Description of Artificial Sequence: Synthetic oligonucleotide
cgauauuguuccacguaau

SEQ ID NO: 296188 - RNA, 19 nt, Artificial Sequence
  Description of Artificial Sequence: Synthetic oligonucleotide
gcacauacucucagaguuu

SEQ ID NO: 296189 - RNA, 19 nt, Artificial Sequence
  Description of Artificial Sequence: Synthetic oligonucleotide
ccgacacgaccaaaguaau

SEQ ID NO: 296190 - RNA, 19 nt, Artificial Sequence
  Description of Artificial Sequence: Synthetic oligonucleotide
ccuacaugggguggacucu

SEQ ID NO: 296191 - RNA, 19 nt, Artificial Sequence
  Description of Artificial Sequence: Synthetic oligonucleotide
cccgaggagugcauuuaau

SEQ ID NO: 296192 - RNA, 19 nt, Artificial Sequence
  Description of Artificial Sequence: Synthetic oligonucleotide
gggguggacucuagccacu

SEQ ID NO: 296193 - RNA, 19 nt, Artificial Sequence
  Description of Artificial Sequence: Synthetic oligonucleotide
cccuaccauccgauauugu

SEQ ID NO: 296194 - RNA, 19 nt, Artificial Sequence
  Description of Artificial Sequence: Synthetic oligonucleotide
cgacacgaccaaaguaauu

SEQ ID NO: 296195 - RNA, 19 nt, Artificial Sequence
  Description of Artificial Sequence: Synthetic oligonucleotide
aauaugguugcauagauca

SEQ ID NO: 296196 - RNA, 19 nt, Artificial Sequence
  Description of Artificial Sequence: Synthetic oligonucleotide
aauaucgacacucauccuc

SEQ ID NO: 296197 - RNA, 19 nt, Artificial Sequence
  Description of Artificial Sequence: Synthetic oligonucleotide
uuuauuauccuucauguaa

SEQ ID NO: 296198 - RNA, 19 nt, Artificial Sequence
  Description of Artificial Sequence: Synthetic oligonucleotide
aauuaagugaucuuuucgu

SEQ ID NO: 296199 - RNA, 19 nt, Artificial Sequence
  Description of Artificial Sequence: Synthetic oligonucleotide
aauucguuccacuaaaaca

SEQ ID NO: 296200 - RNA, 19 nt, Artificial Sequence
  Description of Artificial Sequence: Synthetic oligonucleotide
agauacuaguguuaaaugg

SEQ ID NO: 296201 - RNA, 19 nt, Artificial Sequence
  Description of Artificial Sequence: Synthetic oligonucleotide
gauaccaucauuguucugg

SEQ ID NO: 296202 - RNA, 19 nt, Artificial Sequence
  Description of Artificial Sequence: Synthetic oligonucleotide
cuacauacaagauaaguag

SEQ ID NO: 296203 - RNA, 19 nt, Artificial Sequence
  Description of Artificial Sequence: Synthetic oligonucleotide
aaaauaccccauuuaacag

SEQ ID NO: 296204 - RNA, 19 nt, Artificial Sequence
  Description of Artificial Sequence: Synthetic oligonucleotide
aauaagcgaauguacagug

SEQ ID NO: 296205 - RNA, 19 nt, Artificial Sequence
  Description of Artificial Sequence: Synthetic oligonucleotide
aauauuuuacuguggucuc

SEQ ID NO: 296206 - RNA, 19 nt, Artificial Sequence
  Description of Artificial Sequence: Synthetic oligonucleotide
uuauuauccuucauguaag

SEQ ID NO: 296207 - RNA, 19 nt, Artificial Sequence
  Description of Artificial Sequence: Synthetic oligonucleotide
ucgacauagaucaagcuga

SEQ ID NO: 296208 - RNA, 19 nt, Artificial Sequence
  Description of Artificial Sequence: Synthetic oligonucleotide
auauaccucucacaaauac

SEQ ID NO: 296209 - RNA, 19 nt, Artificial Sequence
  Description of Artificial Sequence: Synthetic oligonucleotide
ugaaucaaggagaucaucu

SEQ ID NO: 296210 - RNA, 19 nt, Artificial Sequence
  Description of Artificial Sequence: Synthetic oligonucleotide
ucauauaccucucacaaau

SEQ ID NO: 296211 - RNA, 19 nt, Artificial Sequence
  Description of Artificial Sequence: Synthetic oligonucleotide
uauaauaugguccuucaua

SEQ ID NO: 296212 - RNA, 19 nt, Artificial Sequence
  Description of Artificial Sequence: Synthetic oligonucleotide
aguuugaccacaguaagac

SEQ ID NO: 296213 - RNA, 19 nt, Artificial Sequence
  Description of Artificial Sequence: Synthetic oligonucleotide
ugugcaaauuuacagcugc

SEQ ID NO: 296214 - RNA, 19 nt, Artificial Sequence
  Description of Artificial Sequence: Synthetic oligonucleotide
uagguuuaugaucaaaaca

SEQ ID NO: 296215 - RNA, 19 nt, Artificial Sequence
  Description of Artificial Sequence: Synthetic oligonucleotide
ugcugaaucaaggagauca

SEQ ID NO: 296216 - RNA, 19 nt, Artificial Sequence
  Description of Artificial Sequence: Synthetic oligonucleotide
caauucaauaagacuaugg

SEQ ID NO: 296217 - RNA, 19 nt, Artificial Sequence
  Description of Artificial Sequence: Synthetic oligonucleotide
aauaagacuaugggcauag

SEQ ID NO: 296218 - RNA, 19 nt, Artificial Sequence
  Description of Artificial Sequence: Synthetic oligonucleotide
auagaucaaacuguaaagg

SEQ ID NO: 296219 - RNA, 19 nt, Artificial Sequence
  Description of Artificial Sequence: Synthetic oligonucleotide
uuagcaaccuacauacaag

SEQ ID NO: 296220 - RNA, 19 nt, Artificial Sequence
  Description of Artificial Sequence: Synthetic oligonucleotide
aaauaccccauuuaacaga

SEQ ID NO: 296221 - RNA, 19 nt, Artificial Sequence
  Description of Artificial Sequence: Synthetic oligonucleotide
ucuagguuuaugaucaaaa

SEQ ID NO: 296222 - RNA, 19 nt, Artificial Sequence
  Description of Artificial Sequence: Synthetic oligonucleotide
uacauacaagauaaguagc

SEQ ID NO: 296223 - RNA, 19 nt, Artificial Sequence
  Description of Artificial Sequence: Synthetic oligonucleotide
uuuacuuaucauucuaggu

SEQ ID NO: 296224 - RNA, 19 nt, Artificial Sequence
  Description of Artificial Sequence: Synthetic oligonucleotide
auugccaaguaccugagcu

SEQ ID NO: 296225 - RNA, 19 nt, Artificial Sequence
  Description of Artificial Sequence: Synthetic oligonucleotide
aaaagggaggaauuacugu

SEQ ID NO: 296226 - RNA, 19 nt, Artificial Sequence
  Description of Artificial Sequence: Synthetic oligonucleotide
auaauaugguccuucauaa

SEQ ID NO: 296227 - RNA, 19 nt, Artificial Sequence
  Description of Artificial Sequence: Synthetic oligonucleotide
uccgugugcaaauuuacag

SEQ ID NO: 296228 - RNA, 19 nt, Artificial Sequence
  Description of Artificial Sequence: Synthetic oligonucleotide
ucuuacguucaaaagacau

SEQ ID NO: 296229 - RNA, 19 nt, Artificial Sequence
  Description of Artificial Sequence: Synthetic oligonucleotide
uuaagcagccauaacggac

SEQ ID NO: 296230 - RNA, 19 nt, Artificial Sequence
  Description of Artificial Sequence: Synthetic oligonucleotide
uuuggggcaauuaagugau

SEQ ID NO: 296231 - RNA, 19 nt, Artificial Sequence
  Description of Artificial Sequence: Synthetic oligonucleotide
auuacaggcaauaucgguc

SEQ ID NO: 296232 - RNA, 19 nt, Artificial Sequence
  Description of Artificial Sequence: Synthetic oligonucleotide
uuacaggcaauaucggucc

SEQ ID NO: 296233 - RNA, 19 nt, Artificial Sequence
  Description of Artificial Sequence: Synthetic oligonucleotide
cauaacggaccucaugucg

SEQ ID NO: 296234 - RNA, 19 nt, Artificial Sequence
  Description of Artificial Sequence: Synthetic oligonucleotide
ucuuuacauauauaauaug

SEQ ID NO: 296235 - RNA, 19 nt, Artificial Sequence
  Description of Artificial Sequence: Synthetic oligonucleotide
uuccucgggacuaugagca

SEQ ID NO: 296236 - RNA, 19 nt, Artificial Sequence
  Description of Artificial Sequence: Synthetic oligonucleotide
ucuucuugacaauaagcga

SEQ ID NO: 296237 - RNA, 19 nt, Artificial Sequence
  Description of Artificial Sequence: Synthetic oligonucleotide
uaagugaucuuuucgugcu

SEQ ID NO: 296238 - RNA, 19 nt, Artificial Sequence
  Description of Artificial Sequence: Synthetic oligonucleotide
ucauucuagguuuaugauc

SEQ ID NO: 296239 - RNA, 19 nt, Artificial Sequence
  Description of Artificial Sequence: Synthetic oligonucleotide
uauuacaggcaauaucggu

SEQ ID NO: 296240 - RNA, 19 nt, Artificial Sequence
  Description of Artificial Sequence: Synthetic oligonucleotide
gucgacauagaucaagcug

SEQ ID NO: 296241 - RNA, 19 nt, Artificial Sequence
  Description of Artificial Sequence: Synthetic oligonucleotide
uugccauugcuucucacug

SEQ ID NO: 296242 - RNA, 19 nt, Artificial Sequence
  Description of Artificial Sequence: Synthetic oligonucleotide
aacgauagaugccaaucaa

SEQ ID NO: 296243 - RNA, 19 nt, Artificial Sequence
  Description of Artificial Sequence: Synthetic oligonucleotide
auucaugcuuuguaaccgg

SEQ ID NO: 296244 - RNA, 19 nt, Artificial Sequence
  Description of Artificial Sequence: Synthetic oligonucleotide
ucucauugcacgacguucu

SEQ ID NO: 296245 - RNA, 19 nt, Artificial Sequence
  Description of Artificial Sequence: Synthetic oligonucleotide
cauugcacgacguucuuug

SEQ ID NO: 296246 - RNA, 19 nt, Artificial Sequence
  Description of Artificial Sequence: Synthetic oligonucleotide
aucccaguguacauuaacc

SEQ ID NO: 296247 - RNA, 19 nt, Artificial Sequence
  Description of Artificial Sequence: Synthetic oligonucleotide
cauaccucgcaccaauggg

SEQ ID NO: 296248 - RNA, 19 nt, Artificial Sequence
  Description of Artificial Sequence: Synthetic oligonucleotide
uagcaaccuacauacaaga

SEQ ID NO: 296249 - RNA, 19 nt, Artificial Sequence
  Description of Artificial Sequence: Synthetic oligonucleotide
acaucgcucucauugcacg

SEQ ID NO: 296250 - RNA, 19 nt, Artificial Sequence
  Description of Artificial Sequence: Synthetic oligonucleotide
auaccucgcaccaaugggc

SEQ ID NO: 296251 - RNA, 19 nt, Artificial Sequence
  Description of Artificial Sequence: Synthetic oligonucleotide
aucaagcugacacugacua

SEQ ID NO: 296252 - RNA, 19 nt, Artificial Sequence
  Description of Artificial Sequence: Synthetic oligonucleotide
uccugaaaggcaagcuagg

SEQ ID NO: 296253 - RNA, 19 nt, Artificial Sequence
  Description of Artificial Sequence: Synthetic oligonucleotide
ucaaaagacaucgcucuca

SEQ ID NO: 296254 - RNA, 19 nt, Artificial Sequence
  Description of Artificial Sequence: Synthetic oligonucleotide
cuacacaauaccaacaaua

SEQ ID NO: 296255 - RNA, 19 nt, Artificial Sequence
  Description of Artificial Sequence: Synthetic oligonucleotide
ccuuaagcagccauaacgg

SEQ ID NO: 296256 - RNA, 19 nt, Artificial Sequence
  Description of Artificial Sequence: Synthetic oligonucleotide
auugcucuauaucauguau

SEQ ID NO: 296257 - RNA, 19 nt, Artificial Sequence
  Description of Artificial Sequence: Synthetic oligonucleotide
aagcgaauguacaguggcc

SEQ ID NO: 296258 - RNA, 19 nt, Artificial Sequence
  Description of Artificial Sequence: Synthetic oligonucleotide
aggacggauguucauccac

SEQ ID NO: 296259 - RNA, 19 nt, Artificial Sequence
  Description of Artificial Sequence: Synthetic oligonucleotide
uccaggcauuaucugauug

SEQ ID NO: 296260 - RNA, 19 nt, Artificial Sequence
  Description of Artificial Sequence: Synthetic oligonucleotide
cccuuaagcagccauaacg

SEQ ID NO: 296261 - RNA, 19 nt, Artificial Sequence
  Description of Artificial Sequence: Synthetic oligonucleotide
ugcucuauaucauguauuu

SEQ ID NO: 296262 - RNA, 19 nt, Artificial Sequence
  Description of Artificial Sequence: Synthetic oligonucleotide
gcaauaucgguccauacac

SEQ ID NO: 296263 - RNA, 19 nt, Artificial Sequence
  Description of Artificial Sequence: Synthetic oligonucleotide
ugccaaucaagcagaaagu

SEQ ID NO: 296264 - RNA, 19 nt, Artificial Sequence
  Description of Artificial Sequence: Synthetic oligonucleotide
aauaccccauuuaacagau

SEQ ID NO: 296265 - RNA, 19 nt, Artificial Sequence
  Description of Artificial Sequence: Synthetic oligonucleotide
uuuguaaccgggugagaac

SEQ ID NO: 296266 - RNA, 19 nt, Artificial Sequence
  Description of Artificial Sequence: Synthetic oligonucleotide
ucauguaaguccacacuuc

SEQ ID NO: 296267 - RNA, 19 nt, Artificial Sequence
  Description of Artificial Sequence: Synthetic oligonucleotide
uuguaaccgggugagaaca

SEQ ID NO: 296268 - RNA, 19 nt, Artificial Sequence
  Description of Artificial Sequence: Synthetic oligonucleotide
ugcuuuguaaccgggugag

SEQ ID NO: 296269 - RNA, 19 nt, Artificial Sequence
  Description of Artificial Sequence: Synthetic oligonucleotide
guugccaacauacugacau

SEQ ID NO: 296270 - RNA, 19 nt, Artificial Sequence
  Description of Artificial Sequence: Synthetic oligonucleotide
aucauuuggggcaauuaag

SEQ ID NO: 296271 - RNA, 19 nt, Artificial Sequence
  Description of Artificial Sequence: Synthetic oligonucleotide
guauuguugggauucuuga

SEQ ID NO: 296272 - RNA, 19 nt, Artificial Sequence
  Description of Artificial Sequence: Synthetic oligonucleotide
uauucugaucccaguguac

SEQ ID NO: 296273 - RNA, 19 nt, Artificial Sequence
  Description of Artificial Sequence: Synthetic oligonucleotide
ucuccuaucuacugugggu

SEQ ID NO: 296274 - RNA, 19 nt, Artificial Sequence
  Description of Artificial Sequence: Synthetic oligonucleotide
uuugugucaauugauuauu

SEQ ID NO: 296275 - RNA, 19 nt, Artificial Sequence
  Description of Artificial Sequence: Synthetic oligonucleotide
gauacuaguguuaaauggu

SEQ ID NO: 296276 - RNA, 19 nt, Artificial Sequence
  Description of Artificial Sequence: Synthetic oligonucleotide
uaaauucguuccacuaaaa

SEQ ID NO: 296277 - RNA, 19 nt, Artificial Sequence
  Description of Artificial Sequence: Synthetic oligonucleotide
accaaguuacuuugccauc

SEQ ID NO: 296278 - RNA, 19 nt, Artificial Sequence
  Description of Artificial Sequence: Synthetic oligonucleotide
uugcauagaucaaacugua

SEQ ID NO: 296279 - RNA, 19 nt, Artificial Sequence
  Description of Artificial Sequence: Synthetic oligonucleotide
ugaucaucaguucccuuau

SEQ ID NO: 296280 - RNA, 19 nt, Artificial Sequence
  Description of Artificial Sequence: Synthetic oligonucleotide
cugacuaugaaaagaacgu

SEQ ID NO: 296281 - RNA, 19 nt, Artificial Sequence
  Description of Artificial Sequence: Synthetic oligonucleotide
uauuguccucaaauucaug

SEQ ID NO: 296282 - RNA, 19 nt, Artificial Sequence
  Description of Artificial Sequence: Synthetic oligonucleotide
uucguuccacuaaaacaca

SEQ ID NO: 296283 - RNA, 19 nt, Artificial Sequence
  Description of Artificial Sequence: Synthetic oligonucleotide
uuccgugugcaaauuuaca

SEQ ID NO: 296284 - RNA, 19 nt, Artificial Sequence
  Description of Artificial Sequence: Synthetic oligonucleotide
ugcacgacguucuuugguc

SEQ ID NO: 296285 - RNA, 19 nt, Artificial Sequence
  Description of Artificial Sequence: Synthetic oligonucleotide
aauccaggcauuaucugau

SEQ ID NO: 296286 - RNA, 19 nt, Artificial Sequence
  Description of Artificial Sequence: Synthetic oligonucleotide
uguacaggacccauucaua

SEQ ID NO: 296287 - RNA, 19 nt, Artificial Sequence
  Description of Artificial Sequence: Synthetic oligonucleotide
uucucggaggagauauggc

SEQ ID NO: 296288 - RNA, 19 nt, Artificial Sequence
  Description of Artificial Sequence: Synthetic oligonucleotide
aagggaggaauuacuguug

SEQ ID NO: 296289 - RNA, 19 nt, Artificial Sequence
  Description of Artificial Sequence: Synthetic oligonucleotide
ucgcucucauugcacgacg

SEQ ID NO: 296290 - RNA, 19 nt, Artificial Sequence
  Description of Artificial Sequence: Synthetic oligonucleotide
cacaaauacugaaguuccc

SEQ ID NO: 296291 - RNA, 19 nt, Artificial Sequence
  Description of Artificial Sequence: Synthetic oligonucleotide
aaguaaaagggaggaauua

SEQ ID NO: 296292 - RNA, 19 nt, Artificial Sequence
  Description of Artificial Sequence: Synthetic oligonucleotide
aggcaauaucgguccauac

SEQ ID NO: 296293 - RNA, 19 nt, Artificial Sequence
  Description of Artificial Sequence: Synthetic oligonucleotide
uucuuacguucaaaagaca

SEQ ID NO: 296294 - RNA, 19 nt, Artificial Sequence
  Description of Artificial Sequence: Synthetic oligonucleotide
auaagcgaauguacagugg

SEQ ID NO: 296295 - RNA, 19 nt, Artificial Sequence
  Description of Artificial Sequence: Synthetic oligonucleotide
uucauauaccucucacaaa

SEQ ID NO: 296296 - RNA, 19 nt, Artificial Sequence
  Description of Artificial Sequence: Synthetic oligonucleotide
uuccacuaaaacacauaaa

SEQ ID NO: 296297 - RNA, 19 nt, Artificial Sequence
  Description of Artificial Sequence: Synthetic oligonucleotide
uuaagcguuguucccucuc

SEQ ID NO: 296298 - RNA, 19 nt, Artificial Sequence
  Description of Artificial Sequence: Synthetic oligonucleotide
auugcacgacguucuuugg

SEQ ID NO: 296299 - RNA, 19 nt, Artificial Sequence
  Description of Artificial Sequence: Synthetic oligonucleotide
ucugauugccaaguaccug

SEQ ID NO: 296300 - RNA, 19 nt, Artificial Sequence
  Description of Artificial Sequence: Synthetic oligonucleotide
agcaauaugguugcauaga

SEQ ID NO: 296301 - RNA, 19 nt, Artificial Sequence
  Description of Artificial Sequence: Synthetic oligonucleotide
auaucgguccauacacuac

SEQ ID NO: 296302 - RNA, 19 nt, Artificial Sequence
  Description of Artificial Sequence: Synthetic oligonucleotide
uagaucaagcugacacuga

SEQ ID NO: 296303 - RNA, 19 nt, Artificial Sequence
  Description of Artificial Sequence: Synthetic oligonucleotide
acgauagaugccaaucaag

SEQ ID NO: 296304 - RNA, 19 nt, Artificial Sequence
  Description of Artificial Sequence: Synthetic oligonucleotide
agcguuguucccucucuag

SEQ ID NO: 296305 - RNA, 19 nt, Artificial Sequence
  Description of Artificial Sequence: Synthetic oligonucleotide
cucgggacuaugagcaaag

SEQ ID NO: 296306 - RNA, 19 nt, Artificial Sequence
  Description of Artificial Sequence: Synthetic oligonucleotide
acacuucucguuccucggg

SEQ ID NO: 296307 - RNA, 19 nt, Artificial Sequence
  Description of Artificial Sequence: Synthetic oligonucleotide
aggacccauucauauaccu

SEQ ID NO: 296308 - RNA, 19 nt, Artificial Sequence
  Description of Artificial Sequence: Synthetic oligonucleotide
uguuaagcguuguucccuc

SEQ ID NO: 296309 - RNA, 19 nt, Artificial Sequence
  Description of Artificial Sequence: Synthetic oligonucleotide
gaggagcauaccucgcacc

SEQ ID NO: 296310 - RNA, 19 nt, Artificial Sequence
  Description of Artificial Sequence: Synthetic oligonucleotide
accgggugagaacaagcag

SEQ ID NO: 296311 - RNA, 19 nt, Artificial Sequence
  Description of Artificial Sequence: Synthetic oligonucleotide
uugcacgacguucuuuggu

SEQ ID NO: 296312 - RNA, 19 nt, Artificial Sequence
  Description of Artificial Sequence: Synthetic oligonucleotide
agcgaauguacaguggcca

SEQ ID NO: 296313 - RNA, 19 nt, Artificial Sequence
  Description of Artificial Sequence: Synthetic oligonucleotide
uuaucauuuggggcaauua

SEQ ID NO: 296314 - RNA, 19 nt, Artificial Sequence
  Description of Artificial Sequence: Synthetic oligonucleotide
caguugccaacauacugac

SEQ ID NO: 296315 - RNA, 19 nt, Artificial Sequence
  Description of Artificial Sequence: Synthetic oligonucleotide
ugcauagaucaaacuguaa

SEQ ID NO: 296316 - RNA, 19 nt, Artificial Sequence
  Description of Artificial Sequence: Synthetic oligonucleotide
guggacagaucucguuugg

SEQ ID NO: 296317 - RNA, 19 nt, Artificial Sequence
  Description of Artificial Sequence: Synthetic oligonucleotide
guuagcaugacuggcuaca

SEQ ID NO: 296318 - RNA, 19 nt, Artificial Sequence
  Description of Artificial Sequence: Synthetic oligonucleotide
uccuaucuacuguggguug

SEQ ID NO: 296319 - RNA, 19 nt, Artificial Sequence
  Description of Artificial Sequence: Synthetic oligonucleotide
gggacuaugagcaaaggaa

SEQ ID NO: 296320 - RNA, 19 nt, Artificial Sequence
  Description of Artificial Sequence: Synthetic oligonucleotide
uugugucaauugauuauuu

SEQ ID NO: 296321 - RNA, 19 nt, Artificial Sequence
  Description of Artificial Sequence: Synthetic oligonucleotide
auaacggaccucaugucga

SEQ ID NO: 296322 - RNA, 19 nt, Artificial Sequence
  Description of Artificial Sequence: Synthetic oligonucleotide
ucguuccacuaaaacacau

SEQ ID NO: 296323 - RNA, 19 nt, Artificial Sequence
  Description of Artificial Sequence: Synthetic oligonucleotide
agccauaacggaccucaug

SEQ ID NO: 296324 - RNA, 19 nt, Artificial Sequence
  Description of Artificial Sequence: Synthetic oligonucleotide
ugguugcauagaucaaacu

SEQ ID NO: 296325 - RNA, 19 nt, Artificial Sequence
  Description of Artificial Sequence: Synthetic oligonucleotide
cuuaagcagccauaacgga

SEQ ID NO: 296326 - RNA, 19 nt, Artificial Sequence
  Description of Artificial Sequence: Synthetic oligonucleotide
uacgugcuuuucaacacuu

SEQ ID NO: 296327 - RNA, 19 nt, Artificial Sequence
  Description of Artificial Sequence: Synthetic oligonucleotide
uucccuuaagcagccauaa

SEQ ID NO: 296328 - RNA, 19 nt, Artificial Sequence
  Description of Artificial Sequence: Synthetic oligonucleotide
cucucauugcacgacguuc

SEQ ID NO: 296329 - RNA, 19 nt, Artificial Sequence
  Description of Artificial Sequence: Synthetic oligonucleotide
cacuacacaauaccaacaa

SEQ ID NO: 296330 - RNA, 19 nt, Artificial Sequence
  Description of Artificial Sequence: Synthetic oligonucleotide
ugaucuuuucgugcuuugu

SEQ ID NO: 296331 - RNA, 19 nt, Artificial Sequence
  Description of Artificial Sequence: Synthetic oligonucleotide
ggcaauaucgguccauaca

SEQ ID NO: 296332 - RNA, 19 nt, Artificial Sequence
  Description of Artificial Sequence: Synthetic oligonucleotide
cuuuguaaccgggugagaa

SEQ ID NO: 296333 - RNA, 19 nt, Artificial Sequence
  Description of Artificial Sequence: Synthetic oligonucleotide
gagguggauacaacucugc

SEQ ID NO: 296334 - RNA, 19 nt, Artificial Sequence
  Description of Artificial Sequence: Synthetic oligonucleotide
acguucuuugguccacgag

SEQ ID NO: 296335 - RNA, 19 nt, Artificial Sequence
  Description of Artificial Sequence: Synthetic oligonucleotide
ggcaccaaguuacuuugcc

SEQ ID NO: 296336 - RNA, 19 nt, Artificial Sequence
  Description of Artificial Sequence: Synthetic oligonucleotide
ucguuccucgggacuauga

SEQ ID NO: 296337 - RNA, 19 nt, Artificial Sequence
  Description of Artificial Sequence: Synthetic oligonucleotide
uguaaccgggugagaacaa

SEQ ID NO: 296338 - RNA, 19 nt, Artificial Sequence
  Description of Artificial Sequence: Synthetic oligonucleotide
aaaggcaagcuaggagcca

SEQ ID NO: 296339 - RNA, 19 nt, Artificial Sequence
  Description of Artificial Sequence: Synthetic oligonucleotide
cuugacaauaagcgaaugu

SEQ ID NO: 296340 - RNA, 19 nt, Artificial Sequence
  Description of Artificial Sequence: Synthetic oligonucleotide
accggcaccaaguuacuuu

SEQ ID NO: 296341 - RNA, 19 nt, Artificial Sequence
  Description of Artificial Sequence: Synthetic oligonucleotide
caaguuacuuugccaucug

SEQ ID NO: 296342 - RNA, 19 nt, Artificial Sequence
  Description of Artificial Sequence: Synthetic oligonucleotide
acggaccucaugucgacau

SEQ ID NO: 296343 - RNA, 19 nt, Artificial Sequence
  Description of Artificial Sequence: Synthetic oligonucleotide
uaacggaccucaugucgac

SEQ ID NO: 296344 - RNA, 19 nt, Artificial Sequence
  Description of Artificial Sequence: Synthetic oligonucleotide
aauguggacaaggcacuua

SEQ ID NO: 296345 - RNA, 19 nt, Artificial Sequence
  Description of Artificial Sequence: Synthetic oligonucleotide
guaaccgggugagaacaag

SEQ ID NO: 296346 - RNA, 19 nt, Artificial Sequence
  Description of Artificial Sequence: Synthetic oligonucleotide
caggacccauucauauacc

SEQ ID NO: 296347 - RNA, 19 nt, Artificial Sequence
  Description of Artificial Sequence: Synthetic oligonucleotide
ucgggacuaugagcaaagg

SEQ ID NO: 296348 - RNA, 19 nt, Artificial Sequence
  Description of Artificial Sequence: Synthetic oligonucleotide
gcuacgugcuuuucaacac

SEQ ID NO: 296349 - RNA, 19 nt, Artificial Sequence
  Description of Artificial Sequence: Synthetic oligonucleotide
uacaggcaauaucggucca

SEQ ID NO: 296350 - RNA, 19 nt, Artificial Sequence
  Description of Artificial Sequence: Synthetic oligonucleotide
ucguuuggauucagucacu

SEQ ID NO: 296351 - RNA, 19 nt, Artificial Sequence
  Description of Artificial Sequence: Synthetic oligonucleotide
uggacagaucucguuugga

SEQ ID NO: 296352 - RNA, 19 nt, Artificial Sequence
  Description of Artificial Sequence: Synthetic oligonucleotide
ucccuuaagcagccauaac

SEQ ID NO: 296353 - RNA, 19 nt, Artificial Sequence
  Description of Artificial Sequence: Synthetic oligonucleotide
gccauaacggaccucaugu

SEQ ID NO: 296354 - RNA, 19 nt, Artificial Sequence
  Description of Artificial Sequence: Synthetic oligonucleotide
ggaccucaugucgacauag

SEQ ID NO: 296355 - RNA, 19 nt, Artificial Sequence
  Description of Artificial Sequence: Synthetic oligonucleotide
aggaacgauagaugccaau

SEQ ID NO: 296356 - RNA, 19 nt, Artificial Sequence
  Description of Artificial Sequence: Synthetic oligonucleotide
acgacguucuuugguccac

SEQ ID NO: 296357 - RNA, 19 nt, Artificial Sequence
  Description of Artificial Sequence: Synthetic oligonucleotide
cauguaaguccacacuucu

SEQ ID NO: 296358 - RNA, 19 nt, Artificial Sequence
  Description of Artificial Sequence: Synthetic oligonucleotide
gucgggagggauccucugc

SEQ ID NO: 296359 - RNA, 19 nt, Artificial Sequence
  Description of Artificial Sequence: Synthetic oligonucleotide
uguuggcauguggaucugc

SEQ ID NO: 296360 - RNA, 19 nt, Artificial Sequence
  Description of Artificial Sequence: Synthetic oligonucleotide
ugucgggagggauccucug

SEQ ID NO: 296361 - RNA, 19 nt, Artificial Sequence
  Description of Artificial Sequence: Synthetic oligonucleotide
uucucguuccucgggacua

SEQ ID NO: 296362 - RNA, 19 nt, Artificial Sequence
  Description of Artificial Sequence: Synthetic oligonucleotide
caauaagcgaauguacagu

SEQ ID NO: 296363 - RNA, 19 nt, Artificial Sequence
  Description of Artificial Sequence: Synthetic oligonucleotide
ggaggagcauaccucgcac

SEQ ID NO: 296364 - RNA, 19 nt, Artificial Sequence
  Description of Artificial Sequence: Synthetic oligonucleotide
aacggaccucaugucgaca

SEQ ID NO: 296365 - RNA, 19 nt, Artificial Sequence
  Description of Artificial Sequence: Synthetic oligonucleotide
gacauagaucaagcugaca

SEQ ID NO: 296366 - RNA, 19 nt, Artificial Sequence
  Description of Artificial Sequence: Synthetic oligonucleotide
gccaaucaagcagaaaguc

SEQ ID NO: 296367 - RNA, 19 nt, Artificial Sequence
  Description of Artificial Sequence: Synthetic oligonucleotide
acgugcuuuucaacacuuc

SEQ ID NO: 296368 - RNA, 19 nt, Artificial Sequence
  Description of Artificial Sequence: Synthetic oligonucleotide
agcaaccggcaccaaguua

SEQ ID NO: 296369 - RNA, 19 nt, Artificial Sequence
  Description of Artificial Sequence: Synthetic oligonucleotide
gaauaucgacacucauccu

SEQ ID NO: 296370 - RNA, 19 nt, Artificial Sequence
  Description of Artificial Sequence: Synthetic oligonucleotide
cuucccuuaagcagccaua

SEQ ID NO: 296371 - RNA, 19 nt, Artificial Sequence
  Description of Artificial Sequence: Synthetic oligonucleotide
cacuucucguuccucggga

SEQ ID NO: 296372 - RNA, 19 nt, Artificial Sequence
  Description of Artificial Sequence: Synthetic oligonucleotide
cacgagugcugugcuuugg

SEQ ID NO: 296373 - RNA, 19 nt, Artificial Sequence
  Description of Artificial Sequence: Synthetic oligonucleotide
gcacgacguucuuuggucc

SEQ ID NO: 296374 - RNA, 19 nt, Artificial Sequence
  Description of Artificial Sequence: Synthetic oligonucleotide
guugggauucuugagcaau

SEQ ID NO: 296375 - RNA, 19 nt, Artificial Sequence
  Description of Artificial Sequence: Synthetic oligonucleotide
cacgacguucuuuggucca

SEQ ID NO: 296376 - RNA, 19 nt, Artificial Sequence
  Description of Artificial Sequence: Synthetic oligonucleotide
gaucaagcugacacugacu

SEQ ID NO: 296377 - RNA, 19 nt, Artificial Sequence
  Description of Artificial Sequence: Synthetic oligonucleotide
ccuaucuacuguggguugc

SEQ ID NO: 296378 - RNA, 19 nt, Artificial Sequence
  Description of Artificial Sequence: Synthetic oligonucleotide
caauaucgguccauacacu

SEQ ID NO: 296379 - RNA, 19 nt, Artificial Sequence
  Description of Artificial Sequence: Synthetic oligonucleotide
agcauaccucgcaccaaug

SEQ ID NO: 296380 - RNA, 19 nt, Artificial Sequence
  Description of Artificial Sequence: Synthetic oligonucleotide
gaccucaugucgacauaga

SEQ ID NO: 296381 - RNA, 19 nt, Artificial Sequence
  Description of Artificial Sequence: Synthetic oligonucleotide
uccucgggacuaugagcaa

SEQ ID NO: 296382 - RNA, 19 nt, Artificial Sequence
  Description of Artificial Sequence: Synthetic oligonucleotide
cagcauaaucuguuggcau

SEQ ID NO: 296383 - RNA, 19 nt, Artificial Sequence
  Description of Artificial Sequence: Synthetic oligonucleotide
cguuccucgggacuaugag

SEQ ID NO: 296384 - RNA, 19 nt, Artificial Sequence
  Description of Artificial Sequence: Synthetic oligonucleotide
ggacagaucucguuuggau

SEQ ID NO: 296385 - RNA, 19 nt, Artificial Sequence
  Description of Artificial Sequence: Synthetic oligonucleotide
cagccagaguucauaaaau

SEQ ID NO: 296386 - RNA, 19 nt, Artificial Sequence
  Description of Artificial Sequence: Synthetic oligonucleotide
ucucguuccucgggacuau

SEQ ID NO: 296387 - RNA, 19 nt, Artificial Sequence
  Description of Artificial Sequence: Synthetic oligonucleotide
guuaagcguuguucccucu

SEQ ID NO: 296388 - RNA, 19 nt, Artificial Sequence
  Description of Artificial Sequence: Synthetic oligonucleotide
aucaugggagauaccucuu

SEQ ID NO: 296389 - RNA, 19 nt, Artificial Sequence
  Description of Artificial Sequence: Synthetic oligonucleotide
gaucucguuuggauucagu

SEQ ID NO: 296390 - RNA, 19 nt, Artificial Sequence
  Description of Artificial Sequence: Synthetic oligonucleotide
accucgcaccaaugggcaa

SEQ ID NO: 296391 - RNA, 19 nt, Artificial Sequence
  Description of Artificial Sequence: Synthetic oligonucleotide
cuucucguuccucgggacu

SEQ ID NO: 296392 - RNA, 19 nt, Artificial Sequence
  Description of Artificial Sequence: Synthetic oligonucleotide
cagcacuuccgugugcaaa

SEQ ID NO: 296393 - RNA, 19 nt, Artificial Sequence
  Description of Artificial Sequence: Synthetic oligonucleotide
gcaugauaccaucauuguu

SEQ ID NO: 296394 - RNA, 19 nt, Artificial Sequence
  Description of Artificial Sequence: Synthetic oligonucleotide
cucguuccucgggacuaug

SEQ ID NO: 296395 - RNA, 19 nt, Artificial Sequence
  Description of Artificial Sequence: Synthetic oligonucleotide
ccugaaaggcaagcuagga

SEQ ID NO: 296396 - RNA, 19 nt, Artificial Sequence
  Description of Artificial Sequence: Synthetic oligonucleotide
cccauucauauaccucuca

SEQ ID NO: 296397 - RNA, 19 nt, Artificial Sequence
  Description of Artificial Sequence: Synthetic oligonucleotide
aggcaagcuaggagccaca

SEQ ID NO: 296398 - RNA, 19 nt, Artificial Sequence
  Description of Artificial Sequence: Synthetic oligonucleotide
ggacggauguucauccacu

SEQ ID NO: 296399 - RNA, 19 nt, Artificial Sequence
  Description of Artificial Sequence: Synthetic oligonucleotide
cugucgggagggauccucu

SEQ ID NO: 296400 - RNA, 19 nt, Artificial Sequence
  Description of Artificial Sequence: Synthetic oligonucleotide
gcugucgggagggauccuc

SEQ ID NO: 296401 - RNA, 19 nt, Artificial Sequence
  Description of Artificial Sequence: Synthetic oligonucleotide
ucgcaccaaugggcaaggu

SEQ ID NO: 296402 - RNA, 19 nt, Artificial Sequence
  Description of Artificial Sequence: Synthetic oligonucleotide
ggggcaauuaagugaucuu

SEQ ID NO: 296403 - RNA, 19 nt, Artificial Sequence
  Description of Artificial Sequence: Synthetic oligonucleotide
cacuuccgugugcaaauuu

SEQ ID NO: 296404 - RNA, 19 nt, Artificial Sequence
  Description of Artificial Sequence: Synthetic oligonucleotide
gguccacgagugcugugcu

SEQ ID NO: 296405 - RNA, 19 nt, Artificial Sequence
  Description of Artificial Sequence: Synthetic oligonucleotide
agccagcauguuaguuuaa

SEQ ID NO: 296406 - RNA, 19 nt, Artificial Sequence
  Description of Artificial Sequence: Synthetic oligonucleotide
cucauugcacgacguucuu

SEQ ID NO: 296407 - RNA, 19 nt, Artificial Sequence
  Description of Artificial Sequence: Synthetic oligonucleotide
gcucucauugcacgacguu

SEQ ID NO: 296408 - RNA, 19 nt, Artificial Sequence
  Description of Artificial Sequence: Synthetic oligonucleotide
gcgggcuccucugcuacgu

SEQ ID NO: 296409 - RNA, 19 nt, Artificial Sequence
  Description of Artificial Sequence: Synthetic oligonucleotide
ggccugucaaacagccauu

SEQ ID NO: 296410 - RNA, 19 nt, Artificial Sequence
  Description of Artificial Sequence: Synthetic oligonucleotide
cgcucucauugcacgacgu

SEQ ID NO: 296411 - RNA, 19 nt, Artificial Sequence
  Description of Artificial Sequence: Synthetic oligonucleotide
gcacuuccgugugcaaauu

SEQ ID NO: 296412 - RNA, 19 nt, Artificial Sequence
  Description of Artificial Sequence: Synthetic oligonucleotide
cggaccucaugucgacaua

SEQ ID NO: 296413 - RNA, 19 nt, Artificial Sequence
  Description of Artificial Sequence: Synthetic oligonucleotide
uguucuauaaguuaaaaug

SEQ ID NO: 296414 - RNA, 19 nt, Artificial Sequence
  Description of Artificial Sequence: Synthetic oligonucleotide
auaagcauaaaauccaacc

SEQ ID NO: 296415 - RNA, 19 nt, Artificial Sequence
  Description of Artificial Sequence: Synthetic oligonucleotide
aagaaguugagcaagcucc

SEQ ID NO: 296416 - RNA, 19 nt, Artificial Sequence
  Description of Artificial Sequence: Synthetic oligonucleotide
aaaggaacacauuuacacc

SEQ ID NO: 296417 - RNA, 19 nt, Artificial Sequence
  Description of Artificial Sequence: Synthetic oligonucleotide
auacuguucauauaaaagg

SEQ ID NO: 296418 - RNA, 19 nt, Artificial Sequence
  Description of Artificial Sequence: Synthetic oligonucleotide
aaagcuuagccucagauga

SEQ ID NO: 296419 - RNA, 19 nt, Artificial Sequence
  Description of Artificial Sequence: Synthetic oligonucleotide
cuauaaguuaaaaugauug

SEQ ID NO: 296420 - RNA, 19 nt, Artificial Sequence
  Description of Artificial Sequence: Synthetic oligonucleotide
aaaucuaauacaugcucac

SEQ ID NO: 296421 - RNA, 19 nt, Artificial Sequence
  Description of Artificial Sequence: Synthetic oligonucleotide
gaaaggaacacauuuacac

SEQ ID NO: 296422 - RNA, 19 nt, Artificial Sequence
  Description of Artificial Sequence: Synthetic oligonucleotide
uggacaaugaucaacugcc

SEQ ID NO: 296423 - RNA, 19 nt, Artificial Sequence
  Description of Artificial Sequence: Synthetic oligonucleotide
uguaguaauaagcauaaaa

SEQ ID NO: 296424 - RNA, 19 nt, Artificial Sequence
  Description of Artificial Sequence: Synthetic oligonucleotide
uauaaaaggucucguaucc

SEQ ID NO: 296425 - RNA, 19 nt, Artificial Sequence
  Description of Artificial Sequence: Synthetic oligonucleotide
uguauguuacaaaacaaga

SEQ ID NO: 296426 - RNA, 19 nt, Artificial Sequence
  Description of Artificial Sequence: Synthetic oligonucleotide
acugcuacuugauuguugc

SEQ ID NO: 296427 - RNA, 19 nt, Artificial Sequence
  Description of Artificial Sequence: Synthetic oligonucleotide
aaauggauuauuucucuug

SEQ ID NO: 296428 - RNA, 19 nt, Artificial Sequence
  Description of Artificial Sequence: Synthetic oligonucleotide
uaaaauaacuccugugucc

SEQ ID NO: 296429 - RNA, 19 nt, Artificial Sequence
  Description of Artificial Sequence: Synthetic oligonucleotide
aacauuuccaucaccacgg

SEQ ID NO: 296430 - RNA, 19 nt, Artificial Sequence
  Description of Artificial Sequence: Synthetic oligonucleotide
ugucuuaugagcugaaggc

SEQ ID NO: 296431 - RNA, 19 nt, Artificial Sequence
  Description of Artificial Sequence: Synthetic oligonucleotide
aaucguaccugguagauau

SEQ ID NO: 296432 - RNA, 19 nt, Artificial Sequence
  Description of Artificial Sequence: Synthetic oligonucleotide
uuuguaguaauaagcauaa

SEQ ID NO: 296433 - RNA, 19 nt, Artificial Sequence
  Description of Artificial Sequence: Synthetic oligonucleotide
aagaaacgagcuaaagucc

SEQ ID NO: 296434 - RNA, 19 nt, Artificial Sequence
  Description of Artificial Sequence: Synthetic oligonucleotide
ucuaaacaaaauaucugca

SEQ ID NO: 296435 - RNA, 19 nt, Artificial Sequence
  Description of Artificial Sequence: Synthetic oligonucleotide
ucacucacuauguagguag

SEQ ID NO: 296436 - RNA, 19 nt, Artificial Sequence
  Description of Artificial Sequence: Synthetic oligonucleotide
gaugagaacccuuucuucc

SEQ ID NO: 296437 - RNA, 19 nt, Artificial Sequence
  Description of Artificial Sequence: Synthetic oligonucleotide
ucucguauccuauaaaagu

SEQ ID NO: 296438 - RNA, 19 nt, Artificial Sequence
  Description of Artificial Sequence: Synthetic oligonucleotide
aaucugaucaagaaguuga

SEQ ID NO: 296439 - RNA, 19 nt, Artificial Sequence
  Description of Artificial Sequence: Synthetic oligonucleotide
gauuguugcagacaaguac

SEQ ID NO: 296440 - RNA, 19 nt, Artificial Sequence
  Description of Artificial Sequence: Synthetic oligonucleotide
aaacucucaugucuaggac

SEQ ID NO: 296441 - RNA, 19 nt, Artificial Sequence
  Description of Artificial Sequence: Synthetic oligonucleotide
ugcuauuagaacauuucca

SEQ ID NO: 296442 - RNA, 19 nt, Artificial Sequence
  Description of Artificial Sequence: Synthetic oligonucleotide
uacuguucauauaaaaggu

SEQ ID NO: 296443 - RNA, 19 nt, Artificial Sequence
  Description of Artificial Sequence: Synthetic oligonucleotide
uuacucuuaagcaggauuc

SEQ ID NO: 296444 - RNA, 19 nt, Artificial Sequence
  Description of Artificial Sequence: Synthetic oligonucleotide
auuagaacauuuccaucac

SEQ ID NO: 296445 - RNA, 19 nt, Artificial Sequence
  Description of Artificial Sequence: Synthetic oligonucleotide
cuuuaaucguaccugguag

SEQ ID NO: 296446 - RNA, 19 nt, Artificial Sequence
  Description of Artificial Sequence: Synthetic oligonucleotide
ucaaaaucuaauacaugcu

SEQ ID NO: 296447 - RNA, 19 nt, Artificial Sequence
  Description of Artificial Sequence: Synthetic oligonucleotide
uuaauggagucuccguccg

SEQ ID NO: 296448 - RNA, 19 nt, Artificial Sequence
  Description of Artificial Sequence: Synthetic oligonucleotide
uauccuauaaaagucuuga

SEQ ID NO: 296449 - RNA, 19 nt, Artificial Sequence
  Description of Artificial Sequence: Synthetic oligonucleotide
uguccuuuacacaauggca

SEQ ID NO: 296450 - RNA, 19 nt, Artificial Sequence
  Description of Artificial Sequence: Synthetic oligonucleotide
uggaacucgagccaaguca

SEQ ID NO: 296451 - RNA, 19 nt, Artificial Sequence
  Description of Artificial Sequence: Synthetic oligonucleotide
uuaagcaggauucuuugaa

SEQ ID NO: 296452 - RNA, 19 nt, Artificial Sequence
  Description of Artificial Sequence: Synthetic oligonucleotide
aacccuuucuuccugagaa

SEQ ID NO: 296453 - RNA, 19 nt, Artificial Sequence
  Description of Artificial Sequence: Synthetic oligonucleotide
uuuuaauggagucuccguc

SEQ ID NO: 296454 - RNA, 19 nt, Artificial Sequence
  Description of Artificial Sequence: Synthetic oligonucleotide
cuaggcugcacauacguag

SEQ ID NO: 296455 - RNA, 19 nt, Artificial Sequence
  Description of Artificial Sequence: Synthetic oligonucleotide
agggccagugaauaaacac

SEQ ID NO: 296456 - RNA, 19 nt, Artificial Sequence
  Description of Artificial Sequence: Synthetic oligonucleotide
aucuaauacaugcucacgu

SEQ ID NO: 296457 - RNA, 19 nt, Artificial Sequence
  Description of Artificial Sequence: Synthetic oligonucleotide
aacugguaagacacuaggc

SEQ ID NO: 296458 - RNA, 19 nt, Artificial Sequence
  Description of Artificial Sequence: Synthetic oligonucleotide
agaaacgagcuaaaguccc

SEQ ID NO: 296459 - RNA, 19 nt, Artificial Sequence
  Description of Artificial Sequence: Synthetic oligonucleotide
aaucuaauacaugcucacg

SEQ ID NO: 296460 - RNA, 19 nt, Artificial Sequence
  Description of Artificial Sequence: Synthetic oligonucleotide
uuacaaaacaagacagcga

SEQ ID NO: 296461 - RNA, 19 nt, Artificial Sequence
  Description of Artificial Sequence: Synthetic oligonucleotide
aacucucaugucuaggaca

SEQ ID NO: 296462 - RNA, 19 nt, Artificial Sequence
  Description of Artificial Sequence: Synthetic oligonucleotide
ucgauauccgccucuuucg

SEQ ID NO: 296463 - RNA, 19 nt, Artificial Sequence
  Description of Artificial Sequence: Synthetic oligonucleotide
acaaugaucaacugccgug

SEQ ID NO: 296464 - RNA, 19 nt, Artificial Sequence
  Description of Artificial Sequence: Synthetic oligonucleotide
auauucaucccauuuaauu

SEQ ID NO: 296465 - RNA, 19 nt, Artificial Sequence
  Description of Artificial Sequence: Synthetic oligonucleotide
ugaaauggauuauuucucu

SEQ ID NO: 296466 - RNA, 19 nt, Artificial Sequence
  Description of Artificial Sequence: Synthetic oligonucleotide
uucuauaaguuaaaaugau

SEQ ID NO: 296467 - RNA, 19 nt, Artificial Sequence
  Description of Artificial Sequence: Synthetic oligonucleotide
aagacagcgaaagcuuagc

SEQ ID NO: 296468 - RNA, 19 nt, Artificial Sequence
  Description of Artificial Sequence: Synthetic oligonucleotide
gaaagcuuagccucagaug

SEQ ID NO: 296469 - RNA, 19 nt, Artificial Sequence
  Description of Artificial Sequence: Synthetic oligonucleotide
uuauacuguuaccuuauaa

SEQ ID NO: 296470 - RNA, 19 nt, Artificial Sequence
  Description of Artificial Sequence: Synthetic oligonucleotide
acucacaauccuccuacgc

SEQ ID NO: 296471 - RNA, 19 nt, Artificial Sequence
  Description of Artificial Sequence: Synthetic oligonucleotide
uuucguguagcuuuggcau

SEQ ID NO: 296472 - RNA, 19 nt, Artificial Sequence
  Description of Artificial Sequence: Synthetic oligonucleotide
uaaagaggucccuugagaa

SEQ ID NO: 296473 - RNA, 19 nt, Artificial Sequence
  Description of Artificial Sequence: Synthetic oligonucleotide
cauuugucaaacccgauuc

SEQ ID NO: 296474 - RNA, 19 nt, Artificial Sequence
  Description of Artificial Sequence: Synthetic oligonucleotide
ucauagucuauguaaguaa

SEQ ID NO: 296475 - RNA, 19 nt, Artificial Sequence
  Description of Artificial Sequence: Synthetic oligonucleotide
aacccugccggcugugucc

SEQ ID NO: 296476 - RNA, 19 nt, Artificial Sequence
  Description of Artificial Sequence: Synthetic oligonucleotide
cucuaacucacaauccucc

SEQ ID NO: 296477 - RNA, 19 nt, Artificial Sequence
  Description of Artificial Sequence: Synthetic oligonucleotide
ucagaugagaacccuuucu

SEQ ID NO: 296478 - RNA, 19 nt, Artificial Sequence
  Description of Artificial Sequence: Synthetic oligonucleotide
uggcaauuaccccaguuca

SEQ ID NO: 296479 - RNA, 19 nt, Artificial Sequence
  Description of Artificial Sequence: Synthetic oligonucleotide
cauagucuauguaaguaac

SEQ ID NO: 296480 - RNA, 19 nt, Artificial Sequence
  Description of Artificial Sequence: Synthetic oligonucleotide
cuaaaauaacuccuguguc

SEQ ID NO: 296481 - RNA, 19 nt, Artificial Sequence
  Description of Artificial Sequence: Synthetic oligonucleotide
uaugcguuucgcuuguggc

SEQ ID NO: 296482 - RNA, 19 nt, Artificial Sequence
  Description of Artificial Sequence: Synthetic oligonucleotide
ucuauaaguuaaaaugauu

SEQ ID NO: 296483 - RNA, 19 nt, Artificial Sequence
  Description of Artificial Sequence: Synthetic oligonucleotide
agacagcgaaagcuuagcc

SEQ ID NO: 296484 - RNA, 19 nt, Artificial Sequence
  Description of Artificial Sequence: Synthetic oligonucleotide
ugagcaagcuccagaaccc

SEQ ID NO: 296485 - RNA, 19 nt, Artificial Sequence
  Description of Artificial Sequence: Synthetic oligonucleotide
ucacuauguagguagcuca

SEQ ID NO: 296486 - RNA, 19 nt, Artificial Sequence
  Description of Artificial Sequence: Synthetic oligonucleotide
uagauaugcguuucgcuug

SEQ ID NO: 296487 - RNA, 19 nt, Artificial Sequence
  Description of Artificial Sequence: Synthetic oligonucleotide
auaucugcagaacugguaa

SEQ ID NO: 296488 - RNA, 19 nt, Artificial Sequence
  Description of Artificial Sequence: Synthetic oligonucleotide
uugagaauccacacuccag

SEQ ID NO: 296489 - RNA, 19 nt, Artificial Sequence
  Description of Artificial Sequence: Synthetic oligonucleotide
caaagagagcauuggacag

SEQ ID NO: 296490 - RNA, 19 nt, Artificial Sequence
  Description of Artificial Sequence: Synthetic oligonucleotide
uuuaaucguaccugguaga

SEQ ID NO: 296491 - RNA, 19 nt, Artificial Sequence
  Description of Artificial Sequence: Synthetic oligonucleotide
cucguauccuauaaaaguc

SEQ ID NO: 296492 - RNA, 19 nt, Artificial Sequence
  Description of Artificial Sequence: Synthetic oligonucleotide
gaaggauuaucaauuaaga

SEQ ID NO: 296493 - RNA, 19 nt, Artificial Sequence
  Description of Artificial Sequence: Synthetic oligonucleotide
cuuaugagcugaaggcugg

SEQ ID NO: 296494 - RNA, 19 nt, Artificial Sequence
  Description of Artificial Sequence: Synthetic oligonucleotide
auagucuauguaaguaacc

SEQ ID NO: 296495 - RNA, 19 nt, Artificial Sequence
  Description of Artificial Sequence: Synthetic oligonucleotide
acuggagucgauauccgcc

SEQ ID NO: 296496 - RNA, 19 nt, Artificial Sequence
  Description of Artificial Sequence: Synthetic oligonucleotide
uuugcgacugccuucgccu

SEQ ID NO: 296497 - RNA, 19 nt, Artificial Sequence
  Description of Artificial Sequence: Synthetic oligonucleotide
cugcuauuagaacauuucc

SEQ ID NO: 296498 - RNA, 19 nt, Artificial Sequence
  Description of Artificial Sequence: Synthetic oligonucleotide
ucguauccuauaaaagucu

SEQ ID NO: 296499 - RNA, 19 nt, Artificial Sequence
  Description of Artificial Sequence: Synthetic oligonucleotide
uucuaggcugcacauacgu

SEQ ID NO: 296500 - RNA, 19 nt, Artificial Sequence
  Description of Artificial Sequence: Synthetic oligonucleotide
acugcuauuagaacauuuc

SEQ ID NO: 296501 - RNA, 19 nt, Artificial Sequence
  Description of Artificial Sequence: Synthetic oligonucleotide
auguaaguaacccuggcuu

SEQ ID NO: 296502 - RNA, 19 nt, Artificial Sequence
  Description of Artificial Sequence: Synthetic oligonucleotide
ugaagggagcugacaagcg

SEQ ID NO: 296503 - RNA, 19 nt, Artificial Sequence
  Description of Artificial Sequence: Synthetic oligonucleotide
aacgagcuaaagucccagg

SEQ ID NO: 296504 - RNA, 19 nt, Artificial Sequence
  Description of Artificial Sequence: Synthetic oligonucleotide
auccuauaaaagucuugac

SEQ ID NO: 296505 - RNA, 19 nt, Artificial Sequence
  Description of Artificial Sequence: Synthetic oligonucleotide
caugcucacguuuucuugc

SEQ ID NO: 296506 - RNA, 19 nt, Artificial Sequence
  Description of Artificial Sequence: Synthetic oligonucleotide
gucuauguaaguaacccug

SEQ ID NO: 296507 - RNA, 19 nt, Artificial Sequence
  Description of Artificial Sequence: Synthetic oligonucleotide
guccgaacguccuucauag

SEQ ID NO: 296508 - RNA, 19 nt, Artificial Sequence
  Description of Artificial Sequence: Synthetic oligonucleotide
auaugcguuucgcuugugg

SEQ ID NO: 296509 - RNA, 19 nt, Artificial Sequence
  Description of Artificial Sequence: Synthetic oligonucleotide
auuguugcagacaaguacu

SEQ ID NO: 296510 - RNA, 19 nt, Artificial Sequence
  Description of Artificial Sequence: Synthetic oligonucleotide
gucucacucacuauguagg

SEQ ID NO: 296511 - RNA, 19 nt, Artificial Sequence
  Description of Artificial Sequence: Synthetic oligonucleotide
auccgaugcguccaguuuc

SEQ ID NO: 296512 - RNA, 19 nt, Artificial Sequence
  Description of Artificial Sequence: Synthetic oligonucleotide
aaacugacugguguccagg

SEQ ID NO: 296513 - RNA, 19 nt, Artificial Sequence
  Description of Artificial Sequence: Synthetic oligonucleotide
agaauccacacuccagguc

SEQ ID NO: 296514 - RNA, 19 nt, Artificial Sequence
  Description of Artificial Sequence: Synthetic oligonucleotide
cauucuaccugugacuuag

SEQ ID NO: 296515 - RNA, 19 nt, Artificial Sequence
  Description of Artificial Sequence: Synthetic oligonucleotide
ugggccauggacaaugauc

SEQ ID NO: 296516 - RNA, 19 nt, Artificial Sequence
  Description of Artificial Sequence: Synthetic oligonucleotide
acucucaugucuaggacac

SEQ ID NO: 296517 - RNA, 19 nt, Artificial Sequence
  Description of Artificial Sequence: Synthetic oligonucleotide
gcacuaagaaaucuucugg

SEQ ID NO: 296518 - RNA, 19 nt, Artificial Sequence
  Description of Artificial Sequence: Synthetic oligonucleotide
ugaucucacucucuucacc

SEQ ID NO: 296519 - RNA, 19 nt, Artificial Sequence
  Description of Artificial Sequence: Synthetic oligonucleotide
uaagcaggauucuuugaac

SEQ ID NO: 296520 - RNA, 19 nt, Artificial Sequence
  Description of Artificial Sequence: Synthetic oligonucleotide
uaauaucuuucccaccaaa

SEQ ID NO: 296521 - RNA, 19 nt, Artificial Sequence
  Description of Artificial Sequence: Synthetic oligonucleotide
aagcgaguccuuuaaucgu

SEQ ID NO: 296522 - RNA, 19 nt, Artificial Sequence
  Description of Artificial Sequence: Synthetic oligonucleotide
aaaucccgggccuugcaca

SEQ ID NO: 296523 - RNA, 19 nt, Artificial Sequence
  Description of Artificial Sequence: Synthetic oligonucleotide
aauuaaaucccgggccuug

SEQ ID NO: 296524 - RNA, 19 nt, Artificial Sequence
  Description of Artificial Sequence: Synthetic oligonucleotide
aggcguacgugccacacuc

SEQ ID NO: 296525 - RNA, 19 nt, Artificial Sequence
  Description of Artificial Sequence: Synthetic oligonucleotide
accacguuauagcugacgu

SEQ ID NO: 296526 - RNA, 19 nt, Artificial Sequence
  Description of Artificial Sequence: Synthetic oligonucleotide
aguaacccuggcuuuuauc

SEQ ID NO: 296527 - RNA, 19 nt, Artificial Sequence
  Description of Artificial Sequence: Synthetic oligonucleotide
guugugucuaaacaaaaua

SEQ ID NO: 296528 - RNA, 19 nt, Artificial Sequence
  Description of Artificial Sequence: Synthetic oligonucleotide
aucaacuguuucguguagc

SEQ ID NO: 296529 - RNA, 19 nt, Artificial Sequence
  Description of Artificial Sequence: Synthetic oligonucleotide
agucuauguaaguaacccu

SEQ ID NO: 296530 - RNA, 19 nt, Artificial Sequence
  Description of Artificial Sequence: Synthetic oligonucleotide
aaagaggucccuugagaau

SEQ ID NO: 296531 - RNA, 19 nt, Artificial Sequence
  Description of Artificial Sequence: Synthetic oligonucleotide
aagacacuaggcuuucuuu

SEQ ID NO: 296532 - RNA, 19 nt, Artificial Sequence
  Description of Artificial Sequence: Synthetic oligonucleotide
acgugccacacucagcuuc

SEQ ID NO: 296533 - RNA, 19 nt, Artificial Sequence
  Description of Artificial Sequence: Synthetic oligonucleotide
acaacuuuggggcuuggaa

SEQ ID NO: 296534 - RNA, 19 nt, Artificial Sequence
  Description of Artificial Sequence: Synthetic oligonucleotide
acuguuuauauaaccuuag

SEQ ID NO: 296535 - RNA, 19 nt, Artificial Sequence
  Description of Artificial Sequence: Synthetic oligonucleotide
ucuaauccgaugcguccag

SEQ ID NO: 296536 - RNA, 19 nt, Artificial Sequence
  Description of Artificial Sequence: Synthetic oligonucleotide
aaacgagcuaaagucccag

SEQ ID NO: 296537 - RNA, 19 nt, Artificial Sequence
  Description of Artificial Sequence: Synthetic oligonucleotide
aucaaggguggcaauuacc

SEQ ID NO: 296538 - RNA, 19 nt, Artificial Sequence
  Description of Artificial Sequence: Synthetic oligonucleotide
aggccugcaucuuuaguuc

SEQ ID NO: 296539 - RNA, 19 nt, Artificial Sequence
  Description of Artificial Sequence: Synthetic oligonucleotide
uuucgacugcucaaguuuc

SEQ ID NO: 296540 - RNA, 19 nt, Artificial Sequence
  Description of Artificial Sequence: Synthetic oligonucleotide
ucuaauacaugcucacguu

SEQ ID NO: 296541 - RNA, 19 nt, Artificial Sequence
  Description of Artificial Sequence: Synthetic oligonucleotide
ucugcggacugcuacuuga

SEQ ID NO: 296542 - RNA, 19 nt, Artificial Sequence
  Description of Artificial Sequence: Synthetic oligonucleotide
aaauuccgcuugaaucccc

SEQ ID NO: 296543 - RNA, 19 nt, Artificial Sequence
  Description of Artificial Sequence: Synthetic oligonucleotide
aaggucucguauccuauaa

SEQ ID NO: 296544 - RNA, 19 nt, Artificial Sequence
  Description of Artificial Sequence: Synthetic oligonucleotide
cugaagggagcugacaagc

SEQ ID NO: 296545 - RNA, 19 nt, Artificial Sequence
  Description of Artificial Sequence: Synthetic oligonucleotide
aacugccgugguuucaucu

SEQ ID NO: 296546 - RNA, 19 nt, Artificial Sequence
  Description of Artificial Sequence: Synthetic oligonucleotide
ucuggcacuaagaaaucuu

SEQ ID NO: 296547 - RNA, 19 nt, Artificial Sequence
  Description of Artificial Sequence: Synthetic oligonucleotide
agucuugguucauucauaa

SEQ ID NO: 296548 - RNA, 19 nt, Artificial Sequence
  Description of Artificial Sequence: Synthetic oligonucleotide
uguacacuuuaauaucuuu

SEQ ID NO: 296549 - RNA, 19 nt, Artificial Sequence
  Description of Artificial Sequence: Synthetic oligonucleotide
uccgcuugaauccccuccc

SEQ ID NO: 296550 - RNA, 19 nt, Artificial Sequence
  Description of Artificial Sequence: Synthetic oligonucleotide
ucuaacucacaauccuccu

SEQ ID NO: 296551 - RNA, 19 nt, Artificial Sequence
  Description of Artificial Sequence: Synthetic oligonucleotide
guuucguguagcuuuggca

SEQ ID NO: 296552 - RNA, 19 nt, Artificial Sequence
  Description of Artificial Sequence: Synthetic oligonucleotide
ucguaccugguagauaugc

SEQ ID NO: 296553 - RNA, 19 nt, Artificial Sequence
  Description of Artificial Sequence: Synthetic oligonucleotide
aaugaucaacugccguggu

SEQ ID NO: 296554 - RNA, 19 nt, Artificial Sequence
  Description of Artificial Sequence: Synthetic oligonucleotide
acgagcuaaagucccagga

SEQ ID NO: 296555 - RNA, 19 nt, Artificial Sequence
  Description of Artificial Sequence: Synthetic oligonucleotide
acaugcucacguuuucuug

SEQ ID NO: 296556 - RNA, 19 nt, Artificial Sequence
  Description of Artificial Sequence: Synthetic oligonucleotide
ugaucaacugccgugguuu

SEQ ID NO: 296557 - RNA, 19 nt, Artificial Sequence
  Description of Artificial Sequence: Synthetic oligonucleotide
ggcacuaagaaaucuucug

SEQ ID NO: 296558 - RNA, 19 nt, Artificial Sequence
  Description of Artificial Sequence: Synthetic oligonucleotide
guaacccuggcuuuuaucu

SEQ ID NO: 296559 - RNA, 19 nt, Artificial Sequence
  Description of Artificial Sequence: Synthetic oligonucleotide
cuaagaaaggaacacauuu

SEQ ID NO: 296560 - RNA, 19 nt, Artificial Sequence
  Description of Artificial Sequence: Synthetic oligonucleotide
uaaaucccgggccuugcac

SEQ ID NO: 296561 - RNA, 19 nt, Artificial Sequence
  Description of Artificial Sequence: Synthetic oligonucleotide
uguaaguaacccuggcuuu

SEQ ID NO: 296562 - RNA, 19 nt, Artificial Sequence
  Description of Artificial Sequence: Synthetic oligonucleotide
uaucaaggguggcaauuac

SEQ ID NO: 296563 - RNA, 19 nt, Artificial Sequence
  Description of Artificial Sequence: Synthetic oligonucleotide
gucgauauccgccucuuuc

SEQ ID NO: 296564 - RNA, 19 nt, Artificial Sequence
  Description of Artificial Sequence: Synthetic oligonucleotide
guggcaauuaccccaguuc

SEQ ID NO: 296565 - RNA, 19 nt, Artificial Sequence
  Description of Artificial Sequence: Synthetic oligonucleotide
aauuuaucacucauccauu

SEQ ID NO: 296566 - RNA, 19 nt, Artificial Sequence
  Description of Artificial Sequence: Synthetic oligonucleotide
cuuggcuaauaguuguguc

SEQ ID NO: 296567 - RNA, 19 nt, Artificial Sequence
  Description of Artificial Sequence: Synthetic oligonucleotide
aauccgaugcguccaguuu

SEQ ID NO: 296568 - RNA, 19 nt, Artificial Sequence
  Description of Artificial Sequence: Synthetic oligonucleotide
ggucucacucacuauguag

SEQ ID NO: 296569 - RNA, 19 nt, Artificial Sequence
  Description of Artificial Sequence: Synthetic oligonucleotide
cuuagccucagaugagaac

SEQ ID NO: 296570 - RNA, 19 nt, Artificial Sequence
  Description of Artificial Sequence: Synthetic oligonucleotide
augagaacccuuucuuccu

SEQ ID NO: 296571 - RNA, 19 nt, Artificial Sequence
  Description of Artificial Sequence: Synthetic oligonucleotide
gucucguauccuauaaaag

SEQ ID NO: 296572 - RNA, 19 nt, Artificial Sequence
  Description of Artificial Sequence: Synthetic oligonucleotide
aucaccacggagaguuucc

SEQ ID NO: 296573 - RNA, 19 nt, Artificial Sequence
  Description of Artificial Sequence: Synthetic oligonucleotide
ucucacucacuauguaggu

SEQ ID NO: 296574 - RNA, 19 nt, Artificial Sequence
  Description of Artificial Sequence: Synthetic oligonucleotide
uuaaucguaccugguagau

SEQ ID NO: 296575 - RNA, 19 nt, Artificial Sequence
  Description of Artificial Sequence: Synthetic oligonucleotide
uccuacgccagccucccga

SEQ ID NO: 296576 - RNA, 19 nt, Artificial Sequence
  Description of Artificial Sequence: Synthetic oligonucleotide
caaacccgauucuaauuug

SEQ ID NO: 296577 - RNA, 19 nt, Artificial Sequence
  Description of Artificial Sequence: Synthetic oligonucleotide
augaucucgccauauucau

SEQ ID NO: 296578 - RNA, 19 nt, Artificial Sequence
  Description of Artificial Sequence: Synthetic oligonucleotide
ugguagauaugcguuucgc

SEQ ID NO: 296579 - RNA, 19 nt, Artificial Sequence
  Description of Artificial Sequence: Synthetic oligonucleotide
agccuucuaauccgaugcg

SEQ ID NO: 296580 - RNA, 19 nt, Artificial Sequence
  Description of Artificial Sequence: Synthetic oligonucleotide
agcuucacgcguuuccuca

SEQ ID NO: 296581 - RNA, 19 nt, Artificial Sequence
  Description of Artificial Sequence: Synthetic oligonucleotide
ugcuuggcuaauaguugug

SEQ ID NO: 296582 - RNA, 19 nt, Artificial Sequence
  Description of Artificial Sequence: Synthetic oligonucleotide
uucguguagcuuuggcaug

SEQ ID NO: 296583 - RNA, 19 nt, Artificial Sequence
  Description of Artificial Sequence: Synthetic oligonucleotide
ucccuugagaauccacacu

SEQ ID NO: 296584 - RNA, 19 nt, Artificial Sequence
  Description of Artificial Sequence: Synthetic oligonucleotide
uggcgaaacugaaauggau

SEQ ID NO: 296585 - RNA, 19 nt, Artificial Sequence
  Description of Artificial Sequence: Synthetic oligonucleotide
caaauuccgcuugaauccc

SEQ ID NO: 296586 - RNA, 19 nt, Artificial Sequence
  Description of Artificial Sequence: Synthetic oligonucleotide
uguccacugcuauuagaac

SEQ ID NO: 296587 - RNA, 19 nt, Artificial Sequence
  Description of Artificial Sequence: Synthetic oligonucleotide
uacuugauuguugcagaca

SEQ ID NO: 296588 - RNA, 19 nt, Artificial Sequence
  Description of Artificial Sequence: Synthetic oligonucleotide
cuugagaauccacacucca

SEQ ID NO: 296589 - RNA, 19 nt, Artificial Sequence
  Description of Artificial Sequence: Synthetic oligonucleotide
cuuugcgacugccuucgcc

SEQ ID NO: 296590 - RNA, 19 nt, Artificial Sequence
  Description of Artificial Sequence: Synthetic oligonucleotide
augcguuucgcuuguggca

SEQ ID NO: 296591 - RNA, 19 nt, Artificial Sequence
  Description of Artificial Sequence: Synthetic oligonucleotide
uuguugcagacaaguacuc

SEQ ID NO: 296592 - RNA, 19 nt, Artificial Sequence
  Description of Artificial Sequence: Synthetic oligonucleotide
agauaugcguuucgcuugu

SEQ ID NO: 296593 - RNA, 19 nt, Artificial Sequence
  Description of Artificial Sequence: Synthetic oligonucleotide
uguaucaaggguggcaauu

SEQ ID NO: 296594 - RNA, 19 nt, Artificial Sequence
  Description of Artificial Sequence: Synthetic oligonucleotide
aaacugaagggagcugaca

SEQ ID NO: 296595 - RNA, 19 nt, Artificial Sequence
  Description of Artificial Sequence: Synthetic oligonucleotide
agaacugguaagacacuag

SEQ ID NO: 296596 - RNA, 19 nt, Artificial Sequence
  Description of Artificial Sequence: Synthetic oligonucleotide
cacggcaacacucggccag

SEQ ID NO: 296597 - RNA, 19 nt, Artificial Sequence
  Description of Artificial Sequence: Synthetic oligonucleotide
uccauucuaccugugacuu

SEQ ID NO: 296598 - RNA, 19 nt, Artificial Sequence
  Description of Artificial Sequence: Synthetic oligonucleotide
gacagcgaaagcuuagccu

SEQ ID NO: 296599 - RNA, 19 nt, Artificial Sequence
  Description of Artificial Sequence: Synthetic oligonucleotide
guacgugccacacucagcu

SEQ ID NO: 296600 - RNA, 19 nt, Artificial Sequence
  Description of Artificial Sequence: Synthetic oligonucleotide
gagcuaaagucccaggagu

SEQ ID NO: 296601 - RNA, 19 nt, Artificial Sequence
  Description of Artificial Sequence: Synthetic oligonucleotide
guauccuauaaaagucuug

SEQ ID NO: 296602 - RNA, 19 nt, Artificial Sequence
  Description of Artificial Sequence: Synthetic oligonucleotide
uuggaacucgagccaaguc

SEQ ID NO: 296603 - RNA, 19 nt, Artificial Sequence
  Description of Artificial Sequence: Synthetic oligonucleotide
uggcuaauaguugugucua

SEQ ID NO: 296604 - RNA, 19 nt, Artificial Sequence
  Description of Artificial Sequence: Synthetic oligonucleotide
ucuuucgacugcucaaguu

SEQ ID NO: 296605 - RNA, 19 nt, Artificial Sequence
  Description of Artificial Sequence: Synthetic oligonucleotide
aaggucaagcagacacuuc

SEQ ID NO: 296606 - RNA, 19 nt, Artificial Sequence
  Description of Artificial Sequence: Synthetic oligonucleotide
ucccgcaaaagaacuugcu

SEQ ID NO: 296607 - RNA, 19 nt, Artificial Sequence
  Description of Artificial Sequence: Synthetic oligonucleotide
uccuuuacacaauggcaua

SEQ ID NO: 296608 - RNA, 19 nt, Artificial Sequence
  Description of Artificial Sequence: Synthetic oligonucleotide
uacaugcucacguuuucuu

SEQ ID NO: 296609 - RNA, 19 nt, Artificial Sequence
  Description of Artificial Sequence: Synthetic oligonucleotide
ugaucucgccauauucauc

SEQ ID NO: 296610 - RNA, 19 nt, Artificial Sequence
  Description of Artificial Sequence: Synthetic oligonucleotide
acguccuucauagucuaug

SEQ ID NO: 296611 - RNA, 19 nt, Artificial Sequence
  Description of Artificial Sequence: Synthetic oligonucleotide
acaggcuaagaaaggaaca

SEQ ID NO: 296612 - RNA, 19 nt, Artificial Sequence
  Description of Artificial Sequence: Synthetic oligonucleotide
gcggacugcuacuugauug

SEQ ID NO: 296613 - RNA, 19 nt, Artificial Sequence
  Description of Artificial Sequence: Synthetic oligonucleotide
guagauaugcguuucgcuu

SEQ ID NO: 296614 - RNA, 19 nt, Artificial Sequence
  Description of Artificial Sequence: Synthetic oligonucleotide
uccgaugcguccaguuucu

SEQ ID NO: 296615 - RNA, 19 nt, Artificial Sequence
  Description of Artificial Sequence: Synthetic oligonucleotide
gucaugcuuugucuuauga

SEQ ID NO: 296616 - RNA, 19 nt, Artificial Sequence
  Description of Artificial Sequence: Synthetic oligonucleotide
cucccgcaaaagaacuugc

SEQ ID NO: 296617 - RNA, 19 nt, Artificial Sequence
  Description of Artificial Sequence: Synthetic oligonucleotide
aguugugucuaaacaaaau

SEQ ID NO: 296618 - RNA, 19 nt, Artificial Sequence
  Description of Artificial Sequence: Synthetic oligonucleotide
uacucuuaagcaggauucu

SEQ ID NO: 296619 - RNA, 19 nt, Artificial Sequence
  Description of Artificial Sequence: Synthetic oligonucleotide
cucaauagacucuguugca

SEQ ID NO: 296620 - RNA, 19 nt, Artificial Sequence
  Description of Artificial Sequence: Synthetic oligonucleotide
cacguuauagcugacguua

SEQ ID NO: 296621 - RNA, 19 nt, Artificial Sequence
  Description of Artificial Sequence: Synthetic oligonucleotide
aauuccgcuugaauccccu

SEQ ID NO: 296622 - RNA, 19 nt, Artificial Sequence
  Description of Artificial Sequence: Synthetic oligonucleotide
gacaaugaucaacugccgu

SEQ ID NO: 296623 - RNA, 19 nt, Artificial Sequence
  Description of Artificial Sequence: Synthetic oligonucleotide
ucgagccaagucagaaaga

SEQ ID NO: 296624 - RNA, 19 nt, Artificial Sequence
  Description of Artificial Sequence: Synthetic oligonucleotide
cuuaagcaggauucuuuga

SEQ ID NO: 296625 - RNA, 19 nt, Artificial Sequence
  Description of Artificial Sequence: Synthetic oligonucleotide
aggcaagagcucuaccacu

SEQ ID NO: 296626 - RNA, 19 nt, Artificial Sequence
  Description of Artificial Sequence: Synthetic oligonucleotide
gacugcuacuugauuguug

SEQ ID NO: 296627 - RNA, 19 nt, Artificial Sequence
  Description of Artificial Sequence: Synthetic oligonucleotide
gcaggaaacauaggguagg

SEQ ID NO: 296628 - RNA, 19 nt, Artificial Sequence
  Description of Artificial Sequence: Synthetic oligonucleotide
aucugaucaagaaguugag

SEQ ID NO: 296629 - RNA, 19 nt, Artificial Sequence
  Description of Artificial Sequence: Synthetic oligonucleotide
ggucucguauccuauaaaa

SEQ ID NO: 296630 - RNA, 19 nt, Artificial Sequence
  Description of Artificial Sequence: Synthetic oligonucleotide
aguacaacuuuggggcuug

SEQ ID NO: 296631 - RNA, 19 nt, Artificial Sequence
  Description of Artificial Sequence: Synthetic oligonucleotide
aaacauaggguaggauuuu

SEQ ID NO: 296632 - RNA, 19 nt, Artificial Sequence
  Description of Artificial Sequence: Synthetic oligonucleotide
uaauccgaugcguccaguu

SEQ ID NO: 296633 - RNA, 19 nt, Artificial Sequence
  Description of Artificial Sequence: Synthetic oligonucleotide
ucuaggcugcacauacgua

SEQ ID NO: 296634 - RNA, 19 nt, Artificial Sequence
  Description of Artificial Sequence: Synthetic oligonucleotide
uauucaguacugggaauua

SEQ ID NO: 296635 - RNA, 19 nt, Artificial Sequence
  Description of Artificial Sequence: Synthetic oligonucleotide
aagcuuagccucagaugag

SEQ ID NO: 296636 - RNA, 19 nt, Artificial Sequence
  Description of Artificial Sequence: Synthetic oligonucleotide
gcuauuagaacauuuccau

SEQ ID NO: 296637 - RNA, 19 nt, Artificial Sequence
  Description of Artificial Sequence: Synthetic oligonucleotide
uuuaggauccuggcaccac

SEQ ID NO: 296638 - RNA, 19 nt, Artificial Sequence
  Description of Artificial Sequence: Synthetic oligonucleotide
guuguucuauaaguuaaaa

SEQ ID NO: 296639 - RNA, 19 nt, Artificial Sequence
  Description of Artificial Sequence: Synthetic oligonucleotide
acccgauucuaauuuguuu

SEQ ID NO: 296640 - RNA, 19 nt, Artificial Sequence
  Description of Artificial Sequence: Synthetic oligonucleotide
caugguucauuguucaagu

SEQ ID NO: 296641 - RNA, 19 nt, Artificial Sequence
  Description of Artificial Sequence: Synthetic oligonucleotide
auuccgcuugaauccccuc

SEQ ID NO: 296642 - RNA, 19 nt, Artificial Sequence
  Description of Artificial Sequence: Synthetic oligonucleotide
ggaaacauaggguaggauu

SEQ ID NO: 296643 - RNA, 19 nt, Artificial Sequence
  Description of Artificial Sequence: Synthetic oligonucleotide
cacucacuauguagguagc

SEQ ID NO: 296644 - RNA, 19 nt, Artificial Sequence
  Description of Artificial Sequence: Synthetic oligonucleotide
ugcguuucgcuuguggcau

SEQ ID NO: 296645 - RNA, 19 nt, Artificial Sequence
  Description of Artificial Sequence: Synthetic oligonucleotide
gggccagugaauaaacacc

SEQ ID NO: 296646 - RNA, 19 nt, Artificial Sequence
  Description of Artificial Sequence: Synthetic oligonucleotide
uaauggagucuccguccga

SEQ ID NO: 296647 - RNA, 19 nt, Artificial Sequence
  Description of Artificial Sequence: Synthetic oligonucleotide
uucugcggacugcuacuug

SEQ ID NO: 296648 - RNA, 19 nt, Artificial Sequence
  Description of Artificial Sequence: Synthetic oligonucleotide
aaguacaacuuuggggcuu

SEQ ID NO: 296649 - RNA, 19 nt, Artificial Sequence
  Description of Artificial Sequence: Synthetic oligonucleotide
cucagaugagaacccuuuc

SEQ ID NO: 296650 - RNA, 19 nt, Artificial Sequence
  Description of Artificial Sequence: Synthetic oligonucleotide
ggauuccaggcguacgugc

SEQ ID NO: 296651 - RNA, 19 nt, Artificial Sequence
  Description of Artificial Sequence: Synthetic oligonucleotide
gcuacuugauuguugcaga

SEQ ID NO: 296652 - RNA, 19 nt, Artificial Sequence
  Description of Artificial Sequence: Synthetic oligonucleotide
auccaaccacuguuuauau

SEQ ID NO: 296653 - RNA, 19 nt, Artificial Sequence
  Description of Artificial Sequence: Synthetic oligonucleotide
guaccugguagauaugcgu

SEQ ID NO: 296654 - RNA, 19 nt, Artificial Sequence
  Description of Artificial Sequence: Synthetic oligonucleotide
gaucaacugccgugguuuc

SEQ ID NO: 296655 - RNA, 19 nt, Artificial Sequence
  Description of Artificial Sequence: Synthetic oligonucleotide
augcucacguuuucuugca

SEQ ID NO: 296656 - RNA, 19 nt, Artificial Sequence
  Description of Artificial Sequence: Synthetic oligonucleotide
acuguuucguguagcuuug

SEQ ID NO: 296657 - RNA, 19 nt, Artificial Sequence
  Description of Artificial Sequence: Synthetic oligonucleotide
gagaacccuuucuuccuga

SEQ ID NO: 296658 - RNA, 19 nt, Artificial Sequence
  Description of Artificial Sequence: Synthetic oligonucleotide
uucaaaugaugagguugga

SEQ ID NO: 296659 - RNA, 19 nt, Artificial Sequence
  Description of Artificial Sequence: Synthetic oligonucleotide
gaaacgagcuaaaguccca

SEQ ID NO: 296660 - RNA, 19 nt, Artificial Sequence
  Description of Artificial Sequence: Synthetic oligonucleotide
caccacguuauagcugacg

SEQ ID NO: 296661 - RNA, 19 nt, Artificial Sequence
  Description of Artificial Sequence: Synthetic oligonucleotide
auuccaggcguacgugcca

SEQ ID NO: 296662 - RNA, 19 nt, Artificial Sequence
  Description of Artificial Sequence: Synthetic oligonucleotide
accaucuauccaagccagc

SEQ ID NO: 296663 - RNA, 19 nt, Artificial Sequence
  Description of Artificial Sequence: Synthetic oligonucleotide
caucuccauuugucaaacc

SEQ ID NO: 296664 - RNA, 19 nt, Artificial Sequence
  Description of Artificial Sequence: Synthetic oligonucleotide
cuauccaagccagcucggc

SEQ ID NO: 296665 - RNA, 19 nt, Artificial Sequence
  Description of Artificial Sequence: Synthetic oligonucleotide
cuucacgcguuuccucagc

SEQ ID NO: 296666 - RNA, 19 nt, Artificial Sequence
  Description of Artificial Sequence: Synthetic oligonucleotide
uccaaccacuguuuauaua

SEQ ID NO: 296667 - RNA, 19 nt, Artificial Sequence
  Description of Artificial Sequence: Synthetic oligonucleotide
gacacuaggcuuucuuuau

SEQ ID NO: 296668 - RNA, 19 nt, Artificial Sequence
  Description of Artificial Sequence: Synthetic oligonucleotide
ucacguuuucuugcagacu

SEQ ID NO: 296669 - RNA, 19 nt, Artificial Sequence
  Description of Artificial Sequence: Synthetic oligonucleotide
accuuagaaaacaggcuaa

SEQ ID NO: 296670 - RNA, 19 nt, Artificial Sequence
  Description of Artificial Sequence: Synthetic oligonucleotide
uacaacuuuggggcuugga

SEQ ID NO: 296671 - RNA, 19 nt, Artificial Sequence
  Description of Artificial Sequence: Synthetic oligonucleotide
ccgaacguccuucauaguc

SEQ ID NO: 296672 - RNA, 19 nt, Artificial Sequence
  Description of Artificial Sequence: Synthetic oligonucleotide
accugguagauaugcguuu

SEQ ID NO: 296673 - RNA, 19 nt, Artificial Sequence
  Description of Artificial Sequence: Synthetic oligonucleotide
ggcaggaaacauaggguag

SEQ ID NO: 296674 - RNA, 19 nt, Artificial Sequence
  Description of Artificial Sequence: Synthetic oligonucleotide
cuuucgacugcucaaguuu

SEQ ID NO: 296675 - RNA, 19 nt, Artificial Sequence
  Description of Artificial Sequence: Synthetic oligonucleotide
augaucaacugccgugguu

SEQ ID NO: 296676 - RNA, 19 nt, Artificial Sequence
  Description of Artificial Sequence: Synthetic oligonucleotide
aguuucuguucugcggacu

SEQ ID NO: 296677 - RNA, 19 nt, Artificial Sequence
  Description of Artificial Sequence: Synthetic oligonucleotide
ccgugguuucaucugauug

SEQ ID NO: 296678 - RNA, 19 nt, Artificial Sequence
  Description of Artificial Sequence: Synthetic oligonucleotide
ggacaaugaucaacugccg

SEQ ID NO: 296679 - RNA, 19 nt, Artificial Sequence
  Description of Artificial Sequence: Synthetic oligonucleotide
uccaagccagcucggcauc

SEQ ID NO: 296680 - RNA, 19 nt, Artificial Sequence
  Description of Artificial Sequence: Synthetic oligonucleotide
uaaucguaccugguagaua

SEQ ID NO: 296681 - RNA, 19 nt, Artificial Sequence
  Description of Artificial Sequence: Synthetic oligonucleotide
agcucggcaucuuuagcuu

SEQ ID NO: 296682 - RNA, 19 nt, Artificial Sequence
  Description of Artificial Sequence: Synthetic oligonucleotide
agucuccguccgaacgucc

SEQ ID NO: 296683 - RNA, 19 nt, Artificial Sequence
  Description of Artificial Sequence: Synthetic oligonucleotide
aggucucguauccuauaaa

SEQ ID NO: 296684 - RNA, 19 nt, Artificial Sequence
  Description of Artificial Sequence: Synthetic oligonucleotide
gucagacagucuugguuca

SEQ ID NO: 296685 - RNA, 19 nt, Artificial Sequence
  Description of Artificial Sequence: Synthetic oligonucleotide
cuucacccaauuccuuguc

SEQ ID NO: 296686 - RNA, 19 nt, Artificial Sequence
  Description of Artificial Sequence: Synthetic oligonucleotide
ggcaagagcucuaccacug

SEQ ID NO: 296687 - RNA, 19 nt, Artificial Sequence
  Description of Artificial Sequence: Synthetic oligonucleotide
cacccaauuccuugucauc

SEQ ID NO: 296688 - RNA, 19 nt, Artificial Sequence
  Description of Artificial Sequence: Synthetic oligonucleotide
aacccgauucuaauuuguu

SEQ ID NO: 296689 - RNA, 19 nt, Artificial Sequence
  Description of Artificial Sequence: Synthetic oligonucleotide
cuaacucacaauccuccua

SEQ ID NO: 296690 - RNA, 19 nt, Artificial Sequence
  Description of Artificial Sequence: Synthetic oligonucleotide
cuugaauccccucccgcaa

SEQ ID NO: 296691 - RNA, 19 nt, Artificial Sequence
  Description of Artificial Sequence: Synthetic oligonucleotide
caccacggagaguuuccag

SEQ ID NO: 296692 - RNA, 19 nt, Artificial Sequence
  Description of Artificial Sequence: Synthetic oligonucleotide
agcgaaagcuuagccucag

SEQ ID NO: 296693 - RNA, 19 nt, Artificial Sequence
  Description of Artificial Sequence: Synthetic oligonucleotide
gccuuugcgacugccuucg

SEQ ID NO: 296694 - RNA, 19 nt, Artificial Sequence
  Description of Artificial Sequence: Synthetic oligonucleotide
ucaccacggagaguuucca

SEQ ID NO: 296695 - RNA, 19 nt, Artificial Sequence
  Description of Artificial Sequence: Synthetic oligonucleotide
agcugacguuauucaggag

SEQ ID NO: 296696 - RNA, 19 nt, Artificial Sequence
  Description of Artificial Sequence: Synthetic oligonucleotide
ggcaauuaccccaguucag

SEQ ID NO: 296697 - RNA, 19 nt, Artificial Sequence
  Description of Artificial Sequence: Synthetic oligonucleotide
agggucucacucacuaugu

SEQ ID NO: 296698 - RNA, 19 nt, Artificial Sequence
  Description of Artificial Sequence: Synthetic oligonucleotide
uggagucgauauccgccuc

SEQ ID NO: 296699 - RNA, 19 nt, Artificial Sequence
  Description of Artificial Sequence: Synthetic oligonucleotide
gguagauaugcguuucgcu

SEQ ID NO: 296700 - RNA, 19 nt, Artificial Sequence
  Description of Artificial Sequence: Synthetic oligonucleotide
caauuaccccaguucagua

SEQ ID NO: 296701 - RNA, 19 nt, Artificial Sequence
  Description of Artificial Sequence: Synthetic oligonucleotide
cuaauacaugcucacguuu

SEQ ID NO: 296702 - RNA, 19 nt, Artificial Sequence
  Description of Artificial Sequence: Synthetic oligonucleotide
guaucaaggguggcaauua

SEQ ID NO: 296703 - RNA, 19 nt, Artificial Sequence
  Description of Artificial Sequence: Synthetic oligonucleotide
ugcggacugcuacuugauu

SEQ ID NO: 296704 - RNA, 19 nt, Artificial Sequence
  Description of Artificial Sequence: Synthetic oligonucleotide
gcguacgugccacacucag

SEQ ID NO: 296705 - RNA, 19 nt, Artificial Sequence
  Description of Artificial Sequence: Synthetic oligonucleotide
cagcucggcaucuuuagcu

SEQ ID NO: 296706 - RNA, 19 nt, Artificial Sequence
  Description of Artificial Sequence: Synthetic oligonucleotide
cuaaagucccaggaguugu

SEQ ID NO: 296707 - RNA, 19 nt, Artificial Sequence
  Description of Artificial Sequence: Synthetic oligonucleotide
auccccucccgcaaaagaa

SEQ ID NO: 296708 - RNA, 19 nt, Artificial Sequence
  Description of Artificial Sequence: Synthetic oligonucleotide
guauucaguacugggaauu

SEQ ID NO: 296709 - RNA, 19 nt, Artificial Sequence
  Description of Artificial Sequence: Synthetic oligonucleotide
cguaccugguagauaugcg

SEQ ID NO: 296710 - RNA, 19 nt, Artificial Sequence
  Description of Artificial Sequence: Synthetic oligonucleotide
ugccgugguuucaucugau

SEQ ID NO: 296711 - RNA, 19 nt, Artificial Sequence
  Description of Artificial Sequence: Synthetic oligonucleotide
cuauggcacuggaaucuga

SEQ ID NO: 296712 - RNA, 19 nt, Artificial Sequence
  Description of Artificial Sequence: Synthetic oligonucleotide
gagggccagugaauaaaca

SEQ ID NO: 296713 - RNA, 19 nt, Artificial Sequence
  Description of Artificial Sequence: Synthetic oligonucleotide
aggaaacauaggguaggau

SEQ ID NO: 296714 - RNA, 19 nt, Artificial Sequence
  Description of Artificial Sequence: Synthetic oligonucleotide
agcgaguccuuuaaucgua

SEQ ID NO: 296715 - RNA, 19 nt, Artificial Sequence
  Description of Artificial Sequence: Synthetic oligonucleotide
ccuugcacaugcuaggcaa

SEQ ID NO: 296716 - RNA, 19 nt, Artificial Sequence
  Description of Artificial Sequence: Synthetic oligonucleotide
aucaacugccgugguuuca

SEQ ID NO: 296717 - RNA, 19 nt, Artificial Sequence
  Description of Artificial Sequence: Synthetic oligonucleotide
gauaugcguuucgcuugug

SEQ ID NO: 296718 - RNA, 19 nt, Artificial Sequence
  Description of Artificial Sequence: Synthetic oligonucleotide
ucuccguccgaacguccuu

SEQ ID NO: 296719 - RNA, 19 nt, Artificial Sequence
  Description of Artificial Sequence: Synthetic oligonucleotide
cauauucaucccauuuaau

SEQ ID NO: 296720 - RNA, 19 nt, Artificial Sequence
  Description of Artificial Sequence: Synthetic oligonucleotide
uccgaacguccuucauagu

SEQ ID NO: 296721 - RNA, 19 nt, Artificial Sequence
  Description of Artificial Sequence: Synthetic oligonucleotide
ggccucuaacucacaaucc

SEQ ID NO: 296722 - RNA, 19 nt, Artificial Sequence
  Description of Artificial Sequence: Synthetic oligonucleotide
cuggagucgauauccgccu

SEQ ID NO: 296723 - RNA, 19 nt, Artificial Sequence
  Description of Artificial Sequence: Synthetic oligonucleotide
accccaguucaguacuauu

SEQ ID NO: 296724 - RNA, 19 nt, Artificial Sequence
  Description of Artificial Sequence: Synthetic oligonucleotide
aacacucggccagguccug

SEQ ID NO: 296725 - RNA, 19 nt, Artificial Sequence
  Description of Artificial Sequence: Synthetic oligonucleotide
cgcaaaagaacuugcuuga

SEQ ID NO: 296726 - RNA, 19 nt, Artificial Sequence
  Description of Artificial Sequence: Synthetic oligonucleotide
gcuucacgcguuuccucag

SEQ ID NO: 296727 - RNA, 19 nt, Artificial Sequence
  Description of Artificial Sequence: Synthetic oligonucleotide
gcuaauaguugugucuaaa

SEQ ID NO: 296728 - RNA, 19 nt, Artificial Sequence
  Description of Artificial Sequence: Synthetic oligonucleotide
guccuucauagucuaugua

SEQ ID NO: 296729 - RNA, 19 nt, Artificial Sequence
  Description of Artificial Sequence: Synthetic oligonucleotide
uaccccaguucaguacuau

SEQ ID NO: 296730 - RNA, 19 nt, Artificial Sequence
  Description of Artificial Sequence: Synthetic oligonucleotide
caggucaugcuuugucuua

SEQ ID NO: 296731 - RNA, 19 nt, Artificial Sequence
  Description of Artificial Sequence: Synthetic oligonucleotide
gggcuauggcacuggaauc

SEQ ID NO: 296732 - RNA, 19 nt, Artificial Sequence
  Description of Artificial Sequence: Synthetic oligonucleotide
cucucaugucuaggacacc

SEQ ID NO: 296733 - RNA, 19 nt, Artificial Sequence
  Description of Artificial Sequence: Synthetic oligonucleotide
gacaagcgaguccuuuaau

SEQ ID NO: 296734 - RNA, 19 nt, Artificial Sequence
  Description of Artificial Sequence: Synthetic oligonucleotide
ccucccgcaaaagaacuug

SEQ ID NO: 296735 - RNA, 19 nt, Artificial Sequence
  Description of Artificial Sequence: Synthetic oligonucleotide
guacaacuuuggggcuugg

SEQ ID NO: 296736 - RNA, 19 nt, Artificial Sequence
  Description of Artificial Sequence: Synthetic oligonucleotide
acguuauagcugacguuau

SEQ ID NO: 296737 - RNA, 19 nt, Artificial Sequence
  Description of Artificial Sequence: Synthetic oligonucleotide
agucgauauccgccucuuu

SEQ ID NO: 296738 - RNA, 19 nt, Artificial Sequence
  Description of Artificial Sequence: Synthetic oligonucleotide
uugcgacugccuucgccuu

SEQ ID NO: 296739 - RNA, 19 nt, Artificial Sequence
  Description of Artificial Sequence: Synthetic oligonucleotide
gcuauggcacuggaaucug

SEQ ID NO: 296740 - RNA, 19 nt, Artificial Sequence
  Description of Artificial Sequence: Synthetic oligonucleotide
cugcuacuugauuguugca

SEQ ID NO: 296741 - RNA, 19 nt, Artificial Sequence
  Description of Artificial Sequence: Synthetic oligonucleotide
gcaauuaccccaguucagu

SEQ ID NO: 296742 - RNA, 19 nt, Artificial Sequence
  Description of Artificial Sequence: Synthetic oligonucleotide
cccgauucuaauuuguuuu

SEQ ID NO: 296743 - RNA, 19 nt, Artificial Sequence
  Description of Artificial Sequence: Synthetic oligonucleotide
aucguaccugguagauaug

SEQ ID NO: 296744 - RNA, 19 nt, Artificial Sequence
  Description of Artificial Sequence: Synthetic oligonucleotide
gggcuuggaacucgagcca

SEQ ID NO: 296745 - RNA, 19 nt, Artificial Sequence
  Description of Artificial Sequence: Synthetic oligonucleotide
ccuacgccagccucccgag

SEQ ID NO: 296746 - RNA, 19 nt, Artificial Sequence
  Description of Artificial Sequence: Synthetic oligonucleotide
uacgugccacacucagcuu

SEQ ID NO: 296747 - RNA, 19 nt, Artificial Sequence
  Description of Artificial Sequence: Synthetic oligonucleotide
cucacucacuauguaggua

SEQ ID NO: 296748 - RNA, 19 nt, Artificial Sequence
  Description of Artificial Sequence: Synthetic oligonucleotide
cguacgugccacacucagc

SEQ ID NO: 296749 - RNA, 19 nt, Artificial Sequence
  Description of Artificial Sequence: Synthetic oligonucleotide
cguuauucaggagggccag

SEQ ID NO: 296750 - RNA, 19 nt, Artificial Sequence
  Description of Artificial Sequence: Synthetic oligonucleotide
ggcuaauaguugugucuaa

SEQ ID NO: 296751 - RNA, 19 nt, Artificial Sequence
  Description of Artificial Sequence: Synthetic oligonucleotide
ccccuacaaauuccgcuug

SEQ ID NO: 296752 - RNA, 19 nt, Artificial Sequence
  Description of Artificial Sequence: Synthetic oligonucleotide
ggcgaaacugaaauggauu

SEQ ID NO: 296753 - RNA, 19 nt, Artificial Sequence
  Description of Artificial Sequence: Synthetic oligonucleotide
cgaguccuuuaaucguacc

SEQ ID NO: 296754 - RNA, 19 nt, Artificial Sequence
  Description of Artificial Sequence: Synthetic oligonucleotide
gccuugcacaugcuaggca

SEQ ID NO: 296755 - RNA, 19 nt, Artificial Sequence
  Description of Artificial Sequence: Synthetic oligonucleotide
uccugacaucauguccuuu

SEQ ID NO: 296756 - RNA, 19 nt, Artificial Sequence
  Description of Artificial Sequence: Synthetic oligonucleotide
cucuuucgacugcucaagu

SEQ ID NO: 296757 - RNA, 19 nt, Artificial Sequence
  Description of Artificial Sequence: Synthetic oligonucleotide
ggagucgauauccgccucu

SEQ ID NO: 296758 - RNA, 19 nt, Artificial Sequence
  Description of Artificial Sequence: Synthetic oligonucleotide
acccugccggcugugucca

SEQ ID NO: 296759 - RNA, 19 nt, Artificial Sequence
  Description of Artificial Sequence: Synthetic oligonucleotide
ccacggagaguuuccagaa

SEQ ID NO: 296760 - RNA, 19 nt, Artificial Sequence
  Description of Artificial Sequence: Synthetic oligonucleotide
cuccuacgccagccucccg

SEQ ID NO: 296761 - RNA, 19 nt, Artificial Sequence
  Description of Artificial Sequence: Synthetic oligonucleotide
ggaaccucaugagguggca

SEQ ID NO: 296762 - RNA, 19 nt, Artificial Sequence
  Description of Artificial Sequence: Synthetic oligonucleotide
gcgaguccuuuaaucguac

SEQ ID NO: 296763 - RNA, 19 nt, Artificial Sequence
  Description of Artificial Sequence: Synthetic oligonucleotide
gcuuagccucagaugagaa

SEQ ID NO: 296764 - RNA, 19 nt, Artificial Sequence
  Description of Artificial Sequence: Synthetic oligonucleotide
ccuccuacgccagccuccc

SEQ ID NO: 296765 - RNA, 19 nt, Artificial Sequence
  Description of Artificial Sequence: Synthetic oligonucleotide
cgaacguccuucauagucu

SEQ ID NO: 296766 - RNA, 19 nt, Artificial Sequence
  Description of Artificial Sequence: Synthetic oligonucleotide
ccaggcguacgugccacac

SEQ ID NO: 296767 - RNA, 19 nt, Artificial Sequence
  Description of Artificial Sequence: Synthetic oligonucleotide
gagucgauauccgccucuu

SEQ ID NO: 296768 - RNA, 19 nt, Artificial Sequence
  Description of Artificial Sequence: Synthetic oligonucleotide
gggucucacucacuaugua

SEQ ID NO: 296769 - RNA, 19 nt, Artificial Sequence
  Description of Artificial Sequence: Synthetic oligonucleotide
gcuaagaaaggaacacauu

SEQ ID NO: 296770 - RNA, 19 nt, Artificial Sequence
  Description of Artificial Sequence: Synthetic oligonucleotide
gucuccguccgaacguccu

SEQ ID NO: 296771 - RNA, 19 nt, Artificial Sequence
  Description of Artificial Sequence: Synthetic oligonucleotide
cuguaucaaggguggcaau

SEQ ID NO: 296772 - RNA, 19 nt, Artificial Sequence
  Description of Artificial Sequence: Synthetic oligonucleotide
ccccaguucaguacuauuu

SEQ ID NO: 296773 - RNA, 19 nt, Artificial Sequence
  Description of Artificial Sequence: Synthetic oligonucleotide
cgaaagcuuagccucagau

SEQ ID NO: 296774 - RNA, 19 nt, Artificial Sequence
  Description of Artificial Sequence: Synthetic oligonucleotide
ggcccuugauucuuauuuu

SEQ ID NO: 296775 - RNA, 19 nt, Artificial Sequence
  Description of Artificial Sequence: Synthetic oligonucleotide
guuucgcuuguggcaucaa

SEQ ID NO: 296776 - RNA, 19 nt, Artificial Sequence
  Description of Artificial Sequence: Synthetic oligonucleotide
acgcguuuccucagcucua

SEQ ID NO: 296777 - RNA, 19 nt, Artificial Sequence
  Description of Artificial Sequence: Synthetic oligonucleotide
cugcggacugcuacuugau

SEQ ID NO: 296778 - RNA, 19 nt, Artificial Sequence
  Description of Artificial Sequence: Synthetic oligonucleotide
cgauauccgccucuuucga

SEQ ID NO: 296779 - RNA, 19 nt, Artificial Sequence
  Description of Artificial Sequence: Synthetic oligonucleotide
cuaauccgaugcguccagu

SEQ ID NO: 296780 - RNA, 19 nt, Artificial Sequence
  Description of Artificial Sequence: Synthetic oligonucleotide
gcgacugccuucgccuuuc

SEQ ID NO: 296781 - RNA, 19 nt, Artificial Sequence
  Description of Artificial Sequence: Synthetic oligonucleotide
gcacggcaacacucggcca

SEQ ID NO: 296782 - RNA, 19 nt, Artificial Sequence
  Description of Artificial Sequence: Synthetic oligonucleotide
gcuacaccccaggcccuug

SEQ ID NO: 296783 - RNA, 19 nt, Artificial Sequence
  Description of Artificial Sequence: Synthetic oligonucleotide
cguccuucauagucuaugu

SEQ ID NO: 296784 - RNA, 19 nt, Artificial Sequence
  Description of Artificial Sequence: Synthetic oligonucleotide
caggcguacgugccacacu

SEQ ID NO: 296785 - RNA, 19 nt, Artificial Sequence
  Description of Artificial Sequence: Synthetic oligonucleotide
cccgcaaaagaacuugcuu

SEQ ID NO: 296786 - RNA, 19 nt, Artificial Sequence
  Description of Artificial Sequence: Synthetic oligonucleotide
cguauccuauaaaagucuu

SEQ ID NO: 296787 - RNA, 19 nt, Artificial Sequence
  Description of Artificial Sequence: Synthetic oligonucleotide
ccacacuccaggucaggcu

SEQ ID NO: 296788 - RNA, 19 nt, Artificial Sequence
  Description of Artificial Sequence: Synthetic oligonucleotide
cguccgaacguccuucaua

SEQ ID NO: 296789 - RNA, 19 nt, Artificial Sequence
  Description of Artificial Sequence: Synthetic oligonucleotide
ggcguacgugccacacuca

SEQ ID NO: 296790 - RNA, 19 nt, Artificial Sequence
  Description of Artificial Sequence: Synthetic oligonucleotide
gcguuucgcuuguggcauc

SEQ ID NO: 296791 - RNA, 19 nt, Artificial Sequence
  Description of Artificial Sequence: Synthetic oligonucleotide
ccuuugcgacugccuucgc

SEQ ID NO: 296792 - RNA, 19 nt, Artificial Sequence
  Description of Artificial Sequence: Synthetic oligonucleotide
ccggcuguguccacugcua

SEQ ID NO: 296793 - RNA, 19 nt, Artificial Sequence
  Description of Artificial Sequence: Synthetic oligonucleotide
gcucggcaucuuuagcuuu

SEQ ID NO: 296794 - RNA, 19 nt, Artificial Sequence
  Description of Artificial Sequence: Synthetic oligonucleotide
cguuucgcuuguggcauca

SEQ ID NO: 296795 - RNA, 19 nt, Artificial Sequence
  Description of Artificial Sequence: Synthetic oligonucleotide
cgaugcguccaguuucugu

SEQ ID NO: 296796 - RNA, 19 nt, Artificial Sequence
  Description of Artificial Sequence: Synthetic oligonucleotide
ccacguuauagcugacguu

SEQ ID NO: 296797 - RNA, 19 nt, Artificial Sequence
  Description of Artificial Sequence: Synthetic oligonucleotide
gccgugguuucaucugauu

SEQ ID NO: 296798 - RNA, 19 nt, Artificial Sequence
  Description of Artificial Sequence: Synthetic oligonucleotide
ggacugcuacuugauuguu

SEQ ID NO: 296799 - RNA, 19 nt, Artificial Sequence
  Description of Artificial Sequence: Synthetic oligonucleotide
cguuauagcugacguuauu

SEQ ID NO: 296800 - RNA, 19 nt, Artificial Sequence
  Description of Artificial Sequence: Synthetic oligonucleotide
cccucccgcaaaagaacuu

SEQ ID NO: 296801 - RNA, 19 nt, Artificial Sequence
  Description of Artificial Sequence: Synthetic oligonucleotide
ccugccggcuguguccacu

SEQ ID NO: 296802 - RNA, 19 nt, Artificial Sequence
  Description of Artificial Sequence: Synthetic oligonucleotide
gcguuuccucagcucuauu

SEQ ID NO: 296803 - RNA, 19 nt, Artificial Sequence
  Description of Artificial Sequence: Synthetic oligonucleotide
ccguccgaacguccuucau

SEQ ID NO: 296804 - RNA, 19 nt, Artificial Sequence
  Description of Artificial Sequence: Synthetic oligonucleotide
aauaugacauuacacaacu

SEQ ID NO: 296805 - RNA, 19 nt, Artificial Sequence
  Description of Artificial Sequence: Synthetic oligonucleotide
uguucuugcaccuugagga

SEQ ID NO: 296806 - RNA, 19 nt, Artificial Sequence
  Description of Artificial Sequence: Synthetic oligonucleotide
ugcucaauacaauaggagg

SEQ ID NO: 296807 - RNA, 19 nt, Artificial Sequence
  Description of Artificial Sequence: Synthetic oligonucleotide
uugauaugaaauaugacau

SEQ ID NO: 296808 - RNA, 19 nt, Artificial Sequence
  Description of Artificial Sequence: Synthetic oligonucleotide
uuugagaagggcaucagca

SEQ ID NO: 296809 - RNA, 19 nt, Artificial Sequence
  Description of Artificial Sequence: Synthetic oligonucleotide
ucguaaaugaucagugugg

SEQ ID NO: 296810 - RNA, 19 nt, Artificial Sequence
  Description of Artificial Sequence: Synthetic oligonucleotide
uucuagacaauucugggac

SEQ ID NO: 296811 - RNA, 19 nt, Artificial Sequence
  Description of Artificial Sequence: Synthetic oligonucleotide
uugacuacgacgacgaaac

SEQ ID NO: 296812 - RNA, 19 nt, Artificial Sequence
  Description of Artificial Sequence: Synthetic oligonucleotide
gaguacucaguuuucauug

SEQ ID NO: 296813 - RNA, 19 nt, Artificial Sequence
  Description of Artificial Sequence: Synthetic oligonucleotide
aaccugcucacuucuagac

SEQ ID NO: 296814 - RNA, 19 nt, Artificial Sequence
  Description of Artificial Sequence: Synthetic oligonucleotide
ugugcuagcucucuguuga

SEQ ID NO: 296815 - RNA, 19 nt, Artificial Sequence
  Description of Artificial Sequence: Synthetic oligonucleotide
aaguguaucaccugcugca

SEQ ID NO: 296816 - RNA, 19 nt, Artificial Sequence
  Description of Artificial Sequence: Synthetic oligonucleotide
aguaucuacggcauggucg

SEQ ID NO: 296817 - RNA, 19 nt, Artificial Sequence
  Description of Artificial Sequence: Synthetic oligonucleotide
gaagugacggcgcugcugg

SEQ ID NO: 296818 - RNA, 19 nt, Artificial Sequence
  Description of Artificial Sequence: Synthetic oligonucleotide
aauacaauaggaggcauau

SEQ ID NO: 296819 - RNA, 19 nt, Artificial Sequence
  Description of Artificial Sequence: Synthetic oligonucleotide
gaaguguuacacaaguugc

SEQ ID NO: 296820 - RNA, 19 nt, Artificial Sequence
  Description of Artificial Sequence: Synthetic oligonucleotide
agagccaagaaccaucuca

SEQ ID NO: 296821 - RNA, 19 nt, Artificial Sequence
  Description of Artificial Sequence: Synthetic oligonucleotide
agguaaaugcaacaggugu

SEQ ID NO: 296822 - RNA, 19 nt, Artificial Sequence
  Description of Artificial Sequence: Synthetic oligonucleotide
cugaucaaugcgacgaugg

SEQ ID NO: 296823 - RNA, 19 nt, Artificial Sequence
  Description of Artificial Sequence: Synthetic oligonucleotide
aaauacucaucccuuucca

SEQ ID NO: 296824 - RNA, 19 nt, Artificial Sequence
  Description of Artificial Sequence: Synthetic oligonucleotide
aagauaccaaugcugauuu

SEQ ID NO: 296825 - RNA, 19 nt, Artificial Sequence
  Description of Artificial Sequence: Synthetic oligonucleotide
gacgacgaaacucuaauuc

SEQ ID NO: 296826 - RNA, 19 nt, Artificial Sequence
  Description of Artificial Sequence: Synthetic oligonucleotide
ugcaugacucugaacagcc

SEQ ID NO: 296827 - RNA, 19 nt, Artificial Sequence
  Description of Artificial Sequence: Synthetic oligonucleotide
uaagguaugguuuucucua

SEQ ID NO: 296828 - RNA, 19 nt, Artificial Sequence
  Description of Artificial Sequence: Synthetic oligonucleotide
uucuugacuacgacgacga

SEQ ID NO: 296829 - RNA, 19 nt, Artificial Sequence
  Description of Artificial Sequence: Synthetic oligonucleotide
caccaaugaacaaaaggcc

SEQ ID NO: 296830 - RNA, 19 nt, Artificial Sequence
  Description of Artificial Sequence: Synthetic oligonucleotide
uguuuauauccucagggua

SEQ ID NO: 296831 - RNA, 19 nt, Artificial Sequence
  Description of Artificial Sequence: Synthetic oligonucleotide
uucaugcuauacuuuaaug

SEQ ID NO: 296832 - RNA, 19 nt, Artificial Sequence
  Description of Artificial Sequence: Synthetic oligonucleotide
ucugcuuaguuucuagggu

SEQ ID NO: 296833 - RNA, 19 nt, Artificial Sequence
  Description of Artificial Sequence: Synthetic oligonucleotide
uggaguaucuacggcaugg

SEQ ID NO: 296834 - RNA, 19 nt, Artificial Sequence
  Description of Artificial Sequence: Synthetic oligonucleotide
aguaagguaugguuuucuc

SEQ ID NO: 296835 - RNA, 19 nt, Artificial Sequence
  Description of Artificial Sequence: Synthetic oligonucleotide
ugcguaaauucauuaucag

SEQ ID NO: 296836 - RNA, 19 nt, Artificial Sequence
  Description of Artificial Sequence: Synthetic oligonucleotide
cuucuaaacucuuggcuag

SEQ ID NO: 296837 - RNA, 19 nt, Artificial Sequence
  Description of Artificial Sequence: Synthetic oligonucleotide
uuauacgagguuugguccc

SEQ ID NO: 296838 - RNA, 19 nt, Artificial Sequence
  Description of Artificial Sequence: Synthetic oligonucleotide
ugaucaguaaaaccugaaa

SEQ ID NO: 296839 - RNA, 19 nt, Artificial Sequence
  Description of Artificial Sequence: Synthetic oligonucleotide
aaguugcaaauaaagccuc

SEQ ID NO: 296840 - RNA, 19 nt, Artificial Sequence
  Description of Artificial Sequence: Synthetic oligonucleotide
augaacaaaaggccagcuc

SEQ ID NO: 296841 - RNA, 19 nt, Artificial Sequence
  Description of Artificial Sequence: Synthetic oligonucleotide
uaggccuuacucuugcugc

SEQ ID NO: 296842 - RNA, 19 nt, Artificial Sequence
  Description of Artificial Sequence: Synthetic oligonucleotide
acuaucauguugugaagcu

SEQ ID NO: 296843 - RNA, 19 nt, Artificial Sequence
  Description of Artificial Sequence: Synthetic oligonucleotide
ugucagcuaggucagaaau

SEQ ID NO: 296844 - RNA, 19 nt, Artificial Sequence
  Description of Artificial Sequence: Synthetic oligonucleotide
uccacuaucugcuuaguuu

SEQ ID NO: 296845 - RNA, 19 nt, Artificial Sequence
  Description of Artificial Sequence: Synthetic oligonucleotide
uaaagccugcguaaauuca

SEQ ID NO: 296846 - RNA, 19 nt, Artificial Sequence
  Description of Artificial Sequence: Synthetic oligonucleotide
ugcuauacuuuaaugccuc

SEQ ID NO: 296847 - RNA, 19 nt, Artificial Sequence
  Description of Artificial Sequence: Synthetic oligonucleotide
cucucaaccuggcauaggc

SEQ ID NO: 296848 - RNA, 19 nt, Artificial Sequence
  Description of Artificial Sequence: Synthetic oligonucleotide
aggaguaaggacugcaagu

SEQ ID NO: 296849 - RNA, 19 nt, Artificial Sequence
  Description of Artificial Sequence: Synthetic oligonucleotide
aauacucaucccuuuccau

SEQ ID NO: 296850 - RNA, 19 nt, Artificial Sequence
  Description of Artificial Sequence: Synthetic oligonucleotide
acgacgaaacucuaauucu

SEQ ID NO: 296851 - RNA, 19 nt, Artificial Sequence
  Description of Artificial Sequence: Synthetic oligonucleotide
aaugcgacgaugggcauga

SEQ ID NO: 296852 - RNA, 19 nt, Artificial Sequence
  Description of Artificial Sequence: Synthetic oligonucleotide
agccugaucaguaaaaccu

SEQ ID NO: 296853 - RNA, 19 nt, Artificial Sequence
  Description of Artificial Sequence: Synthetic oligonucleotide
aagggcagaaucaauagua

SEQ ID NO: 296854 - RNA, 19 nt, Artificial Sequence
  Description of Artificial Sequence: Synthetic oligonucleotide
aaugaacaaaaggccagcu

SEQ ID NO: 296855 - RNA, 19 nt, Artificial Sequence
  Description of Artificial Sequence: Synthetic oligonucleotide
gaucaaugcgacgaugggc

SEQ ID NO: 296856 - RNA, 19 nt, Artificial Sequence
  Description of Artificial Sequence: Synthetic oligonucleotide
ugcuuaguuucuaggguca

SEQ ID NO: 296857 - RNA, 19 nt, Artificial Sequence
  Description of Artificial Sequence: Synthetic oligonucleotide
acuacgacgacgaaacucu

SEQ ID NO: 296858 - RNA, 19 nt, Artificial Sequence
  Description of Artificial Sequence: Synthetic oligonucleotide
aucaaugcgacgaugggca

SEQ ID NO: 296859 - RNA, 19 nt, Artificial Sequence
  Description of Artificial Sequence: Synthetic oligonucleotide
uucaugauacugagacacc

SEQ ID NO: 296860 - RNA, 19 nt, Artificial Sequence
  Description of Artificial Sequence: Synthetic oligonucleotide
uuucgucaaucauugcuac

SEQ ID NO: 296861 - RNA, 19 nt, Artificial Sequence
  Description of Artificial Sequence: Synthetic oligonucleotide
ucuagacaauucugggacc

SEQ ID NO: 296862 - RNA, 19 nt, Artificial Sequence
  Description of Artificial Sequence: Synthetic oligonucleotide
cuagacaauucugggaccc

SEQ ID NO: 296863 - RNA, 19 nt, Artificial Sequence
  Description of Artificial Sequence: Synthetic oligonucleotide
cacaaguucaugauacuga

SEQ ID NO: 296864 - RNA, 19 nt, Artificial Sequence
  Description of Artificial Sequence: Synthetic oligonucleotide
guugcuuaggcuggaacag

SEQ ID NO: 296865 - RNA, 19 nt, Artificial Sequence
  Description of Artificial Sequence: Synthetic oligonucleotide
aagguaaaugcaacaggug

SEQ ID NO: 296866 - RNA, 19 nt, Artificial Sequence
  Description of Artificial Sequence: Synthetic oligonucleotide
aucaauaguagggaucaca

SEQ ID NO: 296867 - RNA, 19 nt, Artificial Sequence
  Description of Artificial Sequence: Synthetic oligonucleotide
caauaggaggcauaugaga

SEQ ID NO: 296868 - RNA, 19 nt, Artificial Sequence
  Description of Artificial Sequence: Synthetic oligonucleotide
uuuugccuuuccaaggcua

SEQ ID NO: 296869 - RNA, 19 nt, Artificial Sequence
  Description of Artificial Sequence: Synthetic oligonucleotide
gauagugccaccaaccccu

SEQ ID NO: 296870 - RNA, 19 nt, Artificial Sequence
  Description of Artificial Sequence: Synthetic oligonucleotide
agaguacucaguuuucauu

SEQ ID NO: 296871 - RNA, 19 nt, Artificial Sequence
  Description of Artificial Sequence: Synthetic oligonucleotide
auugcuacccuuugggcua

SEQ ID NO: 296872 - RNA, 19 nt, Artificial Sequence
  Description of Artificial Sequence: Synthetic oligonucleotide
uagcugauugacaaacuuu

SEQ ID NO: 296873 - RNA, 19 nt, Artificial Sequence
  Description of Artificial Sequence: Synthetic oligonucleotide
ucguagugggcggaggacg

SEQ ID NO: 296874 - RNA, 19 nt, Artificial Sequence
  Description of Artificial Sequence: Synthetic oligonucleotide
caugauacugagacaccac

SEQ ID NO: 296875 - RNA, 19 nt, Artificial Sequence
  Description of Artificial Sequence: Synthetic oligonucleotide
guaaaugaucagugugggc

SEQ ID NO: 296876 - RNA, 19 nt, Artificial Sequence
  Description of Artificial Sequence: Synthetic oligonucleotide
ugucgucgaagcugggucc

SEQ ID NO: 296877 - RNA, 19 nt, Artificial Sequence
  Description of Artificial Sequence: Synthetic oligonucleotide
ucaaccuggcauaggcugu

SEQ ID NO: 296878 - RNA, 19 nt, Artificial Sequence
  Description of Artificial Sequence: Synthetic oligonucleotide
gacugcaaguaugaaagga

SEQ ID NO: 296879 - RNA, 19 nt, Artificial Sequence
  Description of Artificial Sequence: Synthetic oligonucleotide
acgacgacgaaacucuaau

SEQ ID NO: 296880 - RNA, 19 nt, Artificial Sequence
  Description of Artificial Sequence: Synthetic oligonucleotide
auauaggauagugccacca

SEQ ID NO: 296881 - RNA, 19 nt, Artificial Sequence
  Description of Artificial Sequence: Synthetic oligonucleotide
gacuacgacgacgaaacuc

SEQ ID NO: 296882 - RNA, 19 nt, Artificial Sequence
  Description of Artificial Sequence: Synthetic oligonucleotide
ugcgacgaugggcaugagc

SEQ ID NO: 296883 - RNA, 19 nt, Artificial Sequence
  Description of Artificial Sequence: Synthetic oligonucleotide
aguauguuggagugugcau

SEQ ID NO: 296884 - RNA, 19 nt, Artificial Sequence
  Description of Artificial Sequence: Synthetic oligonucleotide
ugcucagccuguauuucac

SEQ ID NO: 296885 - RNA, 19 nt, Artificial Sequence
  Description of Artificial Sequence: Synthetic oligonucleotide
uugugcuagcucucuguug

SEQ ID NO: 296886 - RNA, 19 nt, Artificial Sequence
  Description of Artificial Sequence: Synthetic oligonucleotide
uuucccggaaaugggaauc

SEQ ID NO: 296887 - RNA, 19 nt, Artificial Sequence
  Description of Artificial Sequence: Synthetic oligonucleotide
uacgcggggacgaccgcgg

SEQ ID NO: 296888 - RNA, 19 nt, Artificial Sequence
  Description of Artificial Sequence: Synthetic oligonucleotide
ggcguaugcagucaggauc

SEQ ID NO: 296889 - RNA, 19 nt, Artificial Sequence
  Description of Artificial Sequence: Synthetic oligonucleotide
cugucgucgaagcuggguc

SEQ ID NO: 296890 - RNA, 19 nt, Artificial Sequence
  Description of Artificial Sequence: Synthetic oligonucleotide
ggcauggucguagugggcg

SEQ ID NO: 296891 - RNA, 19 nt, Artificial Sequence
  Description of Artificial Sequence: Synthetic oligonucleotide
agauaggcccugcucaaau

SEQ ID NO: 296892 - RNA, 19 nt, Artificial Sequence
  Description of Artificial Sequence: Synthetic oligonucleotide
uggcaugauagcaguguaa

SEQ ID NO: 296893 - RNA, 19 nt, Artificial Sequence
  Description of Artificial Sequence: Synthetic oligonucleotide
agcaguuauacgagguuug

SEQ ID NO: 296894 - RNA, 19 nt, Artificial Sequence
  Description of Artificial Sequence: Synthetic oligonucleotide
uacgacgacgaaacucuaa

SEQ ID NO: 296895 - RNA, 19 nt, Artificial Sequence
  Description of Artificial Sequence: Synthetic oligonucleotide
aucuacggcauggucguag

SEQ ID NO: 296896 - RNA, 19 nt, Artificial Sequence
  Description of Artificial Sequence: Synthetic oligonucleotide
gaacaguauaaggugcaga

SEQ ID NO: 296897 - RNA, 19 nt, Artificial Sequence
  Description of Artificial Sequence: Synthetic oligonucleotide
gaaccugcucacuucuaga

SEQ ID NO: 296898 - RNA, 19 nt, Artificial Sequence
  Description of Artificial Sequence: Synthetic oligonucleotide
guaagguaugguuuucucu

SEQ ID NO: 296899 - RNA, 19 nt, Artificial Sequence
  Description of Artificial Sequence: Synthetic oligonucleotide
ccggauaacugacaggccc

SEQ ID NO: 296900 - RNA, 19 nt, Artificial Sequence
  Description of Artificial Sequence: Synthetic oligonucleotide
ucuacggcauggucguagu

SEQ ID NO: 296901 - RNA, 19 nt, Artificial Sequence
  Description of Artificial Sequence: Synthetic oligonucleotide
caacugcacuccccaaugg

SEQ ID NO: 296902 - RNA, 19 nt, Artificial Sequence
  Description of Artificial Sequence: Synthetic oligonucleotide
caacucugggccgcgacgg

SEQ ID NO: 296903 - RNA, 19 nt, Artificial Sequence
  Description of Artificial Sequence: Synthetic oligonucleotide
ugcacuccccaaugggaug

SEQ ID NO: 296904 - RNA, 19 nt, Artificial Sequence
  Description of Artificial Sequence: Synthetic oligonucleotide
aaguauugguacaggcuau

SEQ ID NO: 296905 - RNA, 19 nt, Artificial Sequence
  Description of Artificial Sequence: Synthetic oligonucleotide
gaguaucuacggcaugguc

SEQ ID NO: 296906 - RNA, 19 nt, Artificial Sequence
  Description of Artificial Sequence: Synthetic oligonucleotide
uuccuaggccuuacucuug

SEQ ID NO: 296907 - RNA, 19 nt, Artificial Sequence
  Description of Artificial Sequence: Synthetic oligonucleotide
gcuagaggaaaguguauca

SEQ ID NO: 296908 - RNA, 19 nt, Artificial Sequence
  Description of Artificial Sequence: Synthetic oligonucleotide
ccugcguaaauucauuauc

SEQ ID NO: 296909 - RNA, 19 nt, Artificial Sequence
  Description of Artificial Sequence: Synthetic oligonucleotide
guguuuauauccucagggu

SEQ ID NO: 296910 - RNA, 19 nt, Artificial Sequence
  Description of Artificial Sequence: Synthetic oligonucleotide
guguacgcggggacgaccg

SEQ ID NO: 296911 - RNA, 19 nt, Artificial Sequence
  Description of Artificial Sequence: Synthetic oligonucleotide
ucugggacccuuguugcaa

SEQ ID NO: 296912 - RNA, 19 nt, Artificial Sequence
  Description of Artificial Sequence: Synthetic oligonucleotide
cuauacuuuaaugccucca

SEQ ID NO: 296913 - RNA, 19 nt, Artificial Sequence
  Description of Artificial Sequence: Synthetic oligonucleotide
gacaacucugggccgcgac

SEQ ID NO: 296914 - RNA, 19 nt, Artificial Sequence
  Description of Artificial Sequence: Synthetic oligonucleotide
uccucucaaccuggcauag

SEQ ID NO: 296915 - RNA, 19 nt, Artificial Sequence
  Description of Artificial Sequence: Synthetic oligonucleotide
cuugacuacgacgacgaaa

SEQ ID NO: 296916 - RNA, 19 nt, Artificial Sequence
  Description of Artificial Sequence: Synthetic oligonucleotide
uuuauucaguuugcuccaa

SEQ ID NO: 296917 - RNA, 19 nt, Artificial Sequence
  Description of Artificial Sequence: Synthetic oligonucleotide
acgaugggcaugagcaauc

SEQ ID NO: 296918 - RNA, 19 nt, Artificial Sequence
  Description of Artificial Sequence: Synthetic oligonucleotide
cugccugucgucgaagcug

SEQ ID NO: 296919 - RNA, 19 nt, Artificial Sequence
  Description of Artificial Sequence: Synthetic oligonucleotide
ggacugcaaguaugaaagg

SEQ ID NO: 296920 - RNA, 19 nt, Artificial Sequence
  Description of Artificial Sequence: Synthetic oligonucleotide
aguggaguaucuacggcau

SEQ ID NO: 296921 - RNA, 19 nt, Artificial Sequence
  Description of Artificial Sequence: Synthetic oligonucleotide
gcaguuauacgagguuugg

SEQ ID NO: 296922 - RNA, 19 nt, Artificial Sequence
  Description of Artificial Sequence: Synthetic oligonucleotide
acggucaccccggauaacu

SEQ ID NO: 296923 - RNA, 19 nt, Artificial Sequence
  Description of Artificial Sequence: Synthetic oligonucleotide
gggaugguagguguuucgg

SEQ ID NO: 296924 - RNA, 19 nt, Artificial Sequence
  Description of Artificial Sequence: Synthetic oligonucleotide
cguaaaugaucaguguggg

SEQ ID NO: 296925 - RNA, 19 nt, Artificial Sequence
  Description of Artificial Sequence: Synthetic oligonucleotide
auaaagccuccuggaguuc

SEQ ID NO: 296926 - RNA, 19 nt, Artificial Sequence
  Description of Artificial Sequence: Synthetic oligonucleotide
uggcuagaggaaaguguau

SEQ ID NO: 296927 - RNA, 19 nt, Artificial Sequence
  Description of Artificial Sequence: Synthetic oligonucleotide
caauacaauaggaggcaua

SEQ ID NO: 296928 - RNA, 19 nt, Artificial Sequence
  Description of Artificial Sequence: Synthetic oligonucleotide
cuggagugauacuguccag

SEQ ID NO: 296929 - RNA, 19 nt, Artificial Sequence
  Description of Artificial Sequence: Synthetic oligonucleotide
ggcuauuucugguuucguc

SEQ ID NO: 296930 - RNA, 19 nt, Artificial Sequence
  Description of Artificial Sequence: Synthetic oligonucleotide
aaacgggcucuuagggucu

SEQ ID NO: 296931 - RNA, 19 nt, Artificial Sequence
  Description of Artificial Sequence: Synthetic oligonucleotide
ugacuacgacgacgaaacu

SEQ ID NO: 296932 - RNA, 19 nt, Artificial Sequence
  Description of Artificial Sequence: Synthetic oligonucleotide
ugguuucgucaaucauugc

SEQ ID NO: 296933 - RNA, 19 nt, Artificial Sequence
  Description of Artificial Sequence: Synthetic oligonucleotide
agccugcguaaauucauua

SEQ ID NO: 296934 - RNA, 19 nt, Artificial Sequence
  Description of Artificial Sequence: Synthetic oligonucleotide
augugccguuucucugugg

SEQ ID NO: 296935 - RNA, 19 nt, Artificial Sequence
  Description of Artificial Sequence: Synthetic oligonucleotide
cuucugauacgcuggagau

SEQ ID NO: 296936 - RNA, 19 nt, Artificial Sequence
  Description of Artificial Sequence: Synthetic oligonucleotide
guacgcggggacgaccgcg

SEQ ID NO: 296937 - RNA, 19 nt, Artificial Sequence
  Description of Artificial Sequence: Synthetic oligonucleotide
uguacgcggggacgaccgc

SEQ ID NO: 296938 - RNA, 19 nt, Artificial Sequence
  Description of Artificial Sequence: Synthetic oligonucleotide
uggcguaugcagucaggau

SEQ ID NO: 296939 - RNA, 19 nt, Artificial Sequence
  Description of Artificial Sequence: Synthetic oligonucleotide
ucuugacuacgacgacgaa

SEQ ID NO: 296940 - RNA, 19 nt, Artificial Sequence
  Description of Artificial Sequence: Synthetic oligonucleotide
aacgggcucuuagggucuc

SEQ ID NO: 296941 - RNA, 19 nt, Artificial Sequence
  Description of Artificial Sequence: Synthetic oligonucleotide
agcugaucaaugcgacgau

SEQ ID NO: 296942 - RNA, 19 nt, Artificial Sequence
  Description of Artificial Sequence: Synthetic oligonucleotide
ggaguaaggacugcaagua

SEQ ID NO: 296943 - RNA, 19 nt, Artificial Sequence
  Description of Artificial Sequence: Synthetic oligonucleotide
cggauaacugacaggcccg

SEQ ID NO: 296944 - RNA, 19 nt, Artificial Sequence
  Description of Artificial Sequence: Synthetic oligonucleotide
ccacaaguucaugauacug

SEQ ID NO: 296945 - RNA, 19 nt, Artificial Sequence
  Description of Artificial Sequence: Synthetic oligonucleotide
gcugauugacaaacuuugc

SEQ ID NO: 296946 - RNA, 19 nt, Artificial Sequence
  Description of Artificial Sequence: Synthetic oligonucleotide
ucccggaaaugggaauccc

SEQ ID NO: 296947 - RNA, 19 nt, Artificial Sequence
  Description of Artificial Sequence: Synthetic oligonucleotide
cacaagccugaucaguaaa

SEQ ID NO: 296948 - RNA, 19 nt, Artificial Sequence
  Description of Artificial Sequence: Synthetic oligonucleotide
ucaaugcgacgaugggcau

SEQ ID NO: 296949 - RNA, 19 nt, Artificial Sequence
  Description of Artificial Sequence: Synthetic oligonucleotide
gcacuccccaaugggaugg

SEQ ID NO: 296950 - RNA, 19 nt, Artificial Sequence
  Description of Artificial Sequence: Synthetic oligonucleotide
caaugcgacgaugggcaug

SEQ ID NO: 296951 - RNA, 19 nt, Artificial Sequence
  Description of Artificial Sequence: Synthetic oligonucleotide
cugaguaagguaugguuuu

SEQ ID NO: 296952 - RNA, 19 nt, Artificial Sequence
  Description of Artificial Sequence: Synthetic oligonucleotide
uccuacagcgcuggcguau

SEQ ID NO: 296953 - RNA, 19 nt, Artificial Sequence
  Description of Artificial Sequence: Synthetic oligonucleotide
cuggcguaugcagucagga

SEQ ID NO: 296954 - RNA, 19 nt, Artificial Sequence
  Description of Artificial Sequence: Synthetic oligonucleotide
gauaacugacaggcccgca

SEQ ID NO: 296955 - RNA, 19 nt, Artificial Sequence
  Description of Artificial Sequence: Synthetic oligonucleotide
aagccugcguaaauucauu

SEQ ID NO: 296956 - RNA, 19 nt, Artificial Sequence
  Description of Artificial Sequence: Synthetic oligonucleotide
accuucgaucucagaauug

SEQ ID NO: 296957 - RNA, 19 nt, Artificial Sequence
  Description of Artificial Sequence: Synthetic oligonucleotide
ucgaagcuggguccucauu

SEQ ID NO: 296958 - RNA, 19 nt, Artificial Sequence
  Description of Artificial Sequence: Synthetic oligonucleotide
cagacaacucugggccgcg

SEQ ID NO: 296959 - RNA, 19 nt, Artificial Sequence
  Description of Artificial Sequence: Synthetic oligonucleotide
gcauaggcuguguuuaugu

SEQ ID NO: 296960 - RNA, 19 nt, Artificial Sequence
  Description of Artificial Sequence: Synthetic oligonucleotide
cacuucugauacgcuggag

SEQ ID NO: 296961 - RNA, 19 nt, Artificial Sequence
  Description of Artificial Sequence: Synthetic oligonucleotide
gcugaucaaugcgacgaug

SEQ ID NO: 296962 - RNA, 19 nt, Artificial Sequence
  Description of Artificial Sequence: Synthetic oligonucleotide
acgcggggacgaccgcggc

SEQ ID NO: 296963 - RNA, 19 nt, Artificial Sequence
  Description of Artificial Sequence: Synthetic oligonucleotide
cgcgagacgagggagggcg

SEQ ID NO: 296964 - RNA, 19 nt, Artificial Sequence
  Description of Artificial Sequence: Synthetic oligonucleotide
auacgagguuuggucccag

SEQ ID NO: 296965 - RNA, 19 nt, Artificial Sequence
  Description of Artificial Sequence: Synthetic oligonucleotide
gucguagugggcggaggac

SEQ ID NO: 296966 - RNA, 19 nt, Artificial Sequence
  Description of Artificial Sequence: Synthetic oligonucleotide
aaccuggcauaggcugugu

SEQ ID NO: 296967 - RNA, 19 nt, Artificial Sequence
  Description of Artificial Sequence: Synthetic oligonucleotide
acggcgcugcugguguacg

SEQ ID NO: 296968 - RNA, 19 nt, Artificial Sequence
  Description of Artificial Sequence: Synthetic oligonucleotide
gauaggcccugcucaaauu

SEQ ID NO: 296969 - RNA, 19 nt, Artificial Sequence
  Description of Artificial Sequence: Synthetic oligonucleotide
guugugcuagcucucuguu

SEQ ID NO: 296970 - RNA, 19 nt, Artificial Sequence
  Description of Artificial Sequence: Synthetic oligonucleotide
ugccgaagugacggcgcug

SEQ ID NO: 296971 - RNA, 19 nt, Artificial Sequence
  Description of Artificial Sequence: Synthetic oligonucleotide
caccuugaggacaucucgu

SEQ ID NO: 296972 - RNA, 19 nt, Artificial Sequence
  Description of Artificial Sequence: Synthetic oligonucleotide
cuagggucauccgggccuc

SEQ ID NO: 296973 - RNA, 19 nt, Artificial Sequence
  Description of Artificial Sequence: Synthetic oligonucleotide
cagaaauacucaucccuuu

SEQ ID NO: 296974 - RNA, 19 nt, Artificial Sequence
  Description of Artificial Sequence: Synthetic oligonucleotide
gggacccuuguugcaaacc

SEQ ID NO: 296975 - RNA, 19 nt, Artificial Sequence
  Description of Artificial Sequence: Synthetic oligonucleotide
gcgcugcugguguacgcgg

SEQ ID NO: 296976 - RNA, 19 nt, Artificial Sequence
  Description of Artificial Sequence: Synthetic oligonucleotide
gugacggcgcugcuggugu

SEQ ID NO: 296977 - RNA, 19 nt, Artificial Sequence
  Description of Artificial Sequence: Synthetic oligonucleotide
gaccgcggcggcgcgagac

SEQ ID NO: 296978 - RNA, 19 nt, Artificial Sequence
  Description of Artificial Sequence: Synthetic oligonucleotide
acgaccgcggcggcgcgag

SEQ ID NO: 296979 - RNA, 19 nt, Artificial Sequence
  Description of Artificial Sequence: Synthetic oligonucleotide
cuuucccggaaaugggaau

SEQ ID NO: 296980 - RNA, 19 nt, Artificial Sequence
  Description of Artificial Sequence: Synthetic oligonucleotide
gggacgaccgcggcggcgc

SEQ ID NO: 296981 - RNA, 19 nt, Artificial Sequence
  Description of Artificial Sequence: Synthetic oligonucleotide
caguuauacgagguuuggu

SEQ ID NO: 296982 - RNA, 19 nt, Artificial Sequence
  Description of Artificial Sequence: Synthetic oligonucleotide
gacggucaccccggauaac

SEQ ID NO: 296983 - RNA, 19 nt, Artificial Sequence
  Description of Artificial Sequence: Synthetic oligonucleotide
cagcaguuauacgagguuu

SEQ ID NO: 296984 - RNA, 19 nt, Artificial Sequence
  Description of Artificial Sequence: Synthetic oligonucleotide
cuacgacgacgaaacucua

SEQ ID NO: 296985 - RNA, 19 nt, Artificial Sequence
  Description of Artificial Sequence: Synthetic oligonucleotide
agacaacucugggccgcga

SEQ ID NO: 296986 - RNA, 19 nt, Artificial Sequence
  Description of Artificial Sequence: Synthetic oligonucleotide
gccugcguaaauucauuau

SEQ ID NO: 296987 - RNA, 19 nt, Artificial Sequence
  Description of Artificial Sequence: Synthetic oligonucleotide
ccccuuuagcugauugaca

SEQ ID NO: 296988 - RNA, 19 nt, Artificial Sequence
  Description of Artificial Sequence: Synthetic oligonucleotide
ucgucgaagcuggguccuc

SEQ ID NO: 296989 - RNA, 19 nt, Artificial Sequence
  Description of Artificial Sequence: Synthetic oligonucleotide
ggccuuacucuugcugcac

SEQ ID NO: 296990 - RNA, 19 nt, Artificial Sequence
  Description of Artificial Sequence: Synthetic oligonucleotide
gcggcgcgagacgagggag

SEQ ID NO: 296991 - RNA, 19 nt, Artificial Sequence
  Description of Artificial Sequence: Synthetic oligonucleotide
ggaguaucuacggcauggu

SEQ ID NO: 296992 - RNA, 19 nt, Artificial Sequence
  Description of Artificial Sequence: Synthetic oligonucleotide
ggggacgaccgcggcggcg

SEQ ID NO: 296993 - RNA, 19 nt, Artificial Sequence
  Description of Artificial Sequence: Synthetic oligonucleotide
cguagugggcggaggacga

SEQ ID NO: 296994 - RNA, 19 nt, Artificial Sequence
  Description of Artificial Sequence: Synthetic oligonucleotide
gaaucccauuuggcauaua

SEQ ID NO: 296995 - RNA, 19 nt, Artificial Sequence
  Description of Artificial Sequence: Synthetic oligonucleotide
augcgacgaugggcaugag

SEQ ID NO: 296996 - RNA, 19 nt, Artificial Sequence
  Description of Artificial Sequence: Synthetic oligonucleotide
cgacgaaacucuaauucuu

SEQ ID NO: 296997 - RNA, 19 nt, Artificial Sequence
  Description of Artificial Sequence: Synthetic oligonucleotide
cuguggcgcuccaaugcuu

SEQ ID NO: 296998 - RNA, 19 nt, Artificial Sequence
  Description of Artificial Sequence: Synthetic oligonucleotide
gcuuaguuucuagggucau

SEQ ID NO: 296999 - RNA, 19 nt, Artificial Sequence
  Description of Artificial Sequence: Synthetic oligonucleotide
ccgggacagggauucugaa

SEQ ID NO: 297000 - RNA, 19 nt, Artificial Sequence
  Description of Artificial Sequence: Synthetic oligonucleotide
cgaugggcaugagcaauca

SEQ ID NO: 297001 - RNA, 19 nt, Artificial Sequence
  Description of Artificial Sequence: Synthetic oligonucleotide
ccagaucaacuaucauguu

SEQ ID NO: 297002 - RNA, 19 nt, Artificial Sequence
  Description of Artificial Sequence: Synthetic oligonucleotide
cgacgacgaaacucuaauu

SEQ ID NO: 297003 - RNA, 19 nt, Artificial Sequence
  Description of Artificial Sequence: Synthetic oligonucleotide
cggggacgaccgcggcggc

SEQ ID NO: 297004 - RNA, 19 nt, Artificial Sequence
  Description of Artificial Sequence: Synthetic oligonucleotide
ccgcgacggucaccccgga

SEQ ID NO: 297005 - RNA, 19 nt, Artificial Sequence
  Description of Artificial Sequence: Synthetic oligonucleotide
cgcgacggucaccccggau

SEQ ID NO: 297006 - RNA, 19 nt, Artificial Sequence
  Description of Artificial Sequence: Synthetic oligonucleotide
cgaccgcggcggcgcgaga

SEQ ID NO: 297007 - RNA, 19 nt, Artificial Sequence
  Description of Artificial Sequence: Synthetic oligonucleotide
aaaugaaaccccuuagcgc

SEQ ID NO: 297008 - RNA, 19 nt, Artificial Sequence
  Description of Artificial Sequence: Synthetic oligonucleotide
ucaaucacgagaaacaaag

SEQ ID NO: 297009 - RNA, 19 nt, Artificial Sequence
  Description of Artificial Sequence: Synthetic oligonucleotide
ucuuguaucucccaggucc

SEQ ID NO: 297010 - RNA, 19 nt, Artificial Sequence
  Description of Artificial Sequence: Synthetic oligonucleotide
aaugaaaccccuuagcgcu

SEQ ID NO: 297011 - RNA, 19 nt, Artificial Sequence
  Description of Artificial Sequence: Synthetic oligonucleotide
auuacccagaauaagaugc

SEQ ID NO: 297012 - RNA, 19 nt, Artificial Sequence
  Description of Artificial Sequence: Synthetic oligonucleotide
gauagacuaagccacauag

SEQ ID NO: 297013 - RNA, 19 nt, Artificial Sequence
  Description of Artificial Sequence: Synthetic oligonucleotide
ugugucacguagaagaacg

SEQ ID NO: 297014 - RNA, 19 nt, Artificial Sequence
  Description of Artificial Sequence: Synthetic oligonucleotide
cacagaaacgcuuaguucg

SEQ ID NO: 297015 - RNA, 19 nt, Artificial Sequence
  Description of Artificial Sequence: Synthetic oligonucleotide
ucacguagaagaacgaugg

SEQ ID NO: 297016 - RNA, 19 nt, Artificial Sequence
  Description of Artificial Sequence: Synthetic oligonucleotide
aaguacauguuugauggcc

SEQ ID NO: 297017 - RNA, 19 nt, Artificial Sequence
  Description of Artificial Sequence: Synthetic oligonucleotide
aaaguauccaggcggcggc

SEQ ID NO: 297018 - RNA, 19 nt, Artificial Sequence
  Description of Artificial Sequence: Synthetic oligonucleotide
uuaaaugaaaccccuuagc

SEQ ID NO: 297019 - RNA, 19 nt, Artificial Sequence
  Description of Artificial Sequence: Synthetic oligonucleotide
gaugcugauagacuaagcc

SEQ ID NO: 297020 - RNA, 19 nt, Artificial Sequence
  Description of Artificial Sequence: Synthetic oligonucleotide
uagacuaagccacauagcu

SEQ ID NO: 297021 - RNA, 19 nt, Artificial Sequence
  Description of Artificial Sequence: Synthetic oligonucleotide
aaucacgagaaacaaagaa

SEQ ID NO: 297022 - RNA, 19 nt, Artificial Sequence
  Description of Artificial Sequence: Synthetic oligonucleotide
aaacucaaaacaaauccuc

SEQ ID NO: 297023 - RNA, 19 nt, Artificial Sequence
  Description of Artificial Sequence: Synthetic oligonucleotide
aaucaaagacccuuccuug

SEQ ID NO: 297024 - RNA, 19 nt, Artificial Sequence
  Description of Artificial Sequence: Synthetic oligonucleotide
aacguagccccucaaucac

SEQ ID NO: 297025 - RNA, 19 nt, Artificial Sequence
  Description of Artificial Sequence: Synthetic oligonucleotide
auagcuuagcuguuccgcc

SEQ ID NO: 297026 - RNA, 19 nt, Artificial Sequence
  Description of Artificial Sequence: Synthetic oligonucleotide
ugcugauagacuaagccac

SEQ ID NO: 297027 - RNA, 19 nt, Artificial Sequence
  Description of Artificial Sequence: Synthetic oligonucleotide
uggugcuucaguuuuagca

SEQ ID NO: 297028 - RNA, 19 nt, Artificial Sequence
  Description of Artificial Sequence: Synthetic oligonucleotide
agaaacgcuuaguucgucc

SEQ ID NO: 297029 - RNA, 19 nt, Artificial Sequence
  Description of Artificial Sequence: Synthetic oligonucleotide
ugcggucauagacagaucc

SEQ ID NO: 297030 - RNA, 19 nt, Artificial Sequence
  Description of Artificial Sequence: Synthetic oligonucleotide
aaacguagccccucaauca

SEQ ID NO: 297031 - RNA, 19 nt, Artificial Sequence
  Description of Artificial Sequence: Synthetic oligonucleotide
ggugcuuucaucaaugagg

SEQ ID NO: 297032 - RNA, 19 nt, Artificial Sequence
  Description of Artificial Sequence: Synthetic oligonucleotide
agcaaucaggccuccaccc

SEQ ID NO: 297033 - RNA, 19 nt, Artificial Sequence
  Description of Artificial Sequence: Synthetic oligonucleotide
uuauuacccagaauaagau

SEQ ID NO: 297034 - RNA, 19 nt, Artificial Sequence
  Description of Artificial Sequence: Synthetic oligonucleotide
gaauaagaugcugauagac

SEQ ID NO: 297035 - RNA, 19 nt, Artificial Sequence
  Description of Artificial Sequence: Synthetic oligonucleotide
uuaaguuccauugcguuga

SEQ ID NO: 297036 - RNA, 19 nt, Artificial Sequence
  Description of Artificial Sequence: Synthetic oligonucleotide
uuuggguuacccacaauga

SEQ ID NO: 297037 - RNA, 19 nt, Artificial Sequence
  Description of Artificial Sequence: Synthetic oligonucleotide
caucaaugaggauggaacg

SEQ ID NO: 297038 - RNA, 19 nt, Artificial Sequence
  Description of Artificial Sequence: Synthetic oligonucleotide
auaagaugcugauagacua

SEQ ID NO: 297039 - RNA, 19 nt, Artificial Sequence
  Description of Artificial Sequence: Synthetic oligonucleotide
ucgggcaucauacauggcu

SEQ ID NO: 297040 - RNA, 19 nt, Artificial Sequence
  Description of Artificial Sequence: Synthetic oligonucleotide
guauguggagucuugggag

SEQ ID NO: 297041 - RNA, 19 nt, Artificial Sequence
  Description of Artificial Sequence: Synthetic oligonucleotide
accacuaaggucuuagaga

SEQ ID NO: 297042 - RNA, 19 nt, Artificial Sequence
  Description of Artificial Sequence: Synthetic oligonucleotide
gaagauguuggacgggaag

SEQ ID NO: 297043 - RNA, 19 nt, Artificial Sequence
  Description of Artificial Sequence: Synthetic oligonucleotide
ugcguugccucucuggaag

SEQ ID NO: 297044 - RNA, 19 nt, Artificial Sequence
  Description of Artificial Sequence: Synthetic oligonucleotide
uguugacgagcuuucgagg

SEQ ID NO: 297045 - RNA, 19 nt, Artificial Sequence
  Description of Artificial Sequence: Synthetic oligonucleotide
augaucacgccauaccuug

SEQ ID NO: 297046 - RNA, 19 nt, Artificial Sequence
  Description of Artificial Sequence: Synthetic oligonucleotide
cuaguacugggacagcccg

SEQ ID NO: 297047 - RNA, 19 nt, Artificial Sequence
  Description of Artificial Sequence: Synthetic oligonucleotide
auuggucacgcucaggagu

SEQ ID NO: 297048 - RNA, 19 nt, Artificial Sequence
  Description of Artificial Sequence: Synthetic oligonucleotide
ucuaguacugggacagccc

SEQ ID NO: 297049 - RNA, 19 nt, Artificial Sequence
  Description of Artificial Sequence: Synthetic oligonucleotide
guguugacgagcuuucgag

SEQ ID NO: 297050 - RNA, 19 nt, Artificial Sequence
  Description of Artificial Sequence: Synthetic oligonucleotide
aucaaugaggauggaacgg

SEQ ID NO: 297051 - RNA, 19 nt, Artificial Sequence
  Description of Artificial Sequence: Synthetic oligonucleotide
guuacccacaaugaucacg

SEQ ID NO: 297052 - RNA, 19 nt, Artificial Sequence
  Description of Artificial Sequence: Synthetic oligonucleotide
acacgcauuggucacgcuc

SEQ ID NO: 297053 - RNA, 19 nt, Artificial Sequence
  Description of Artificial Sequence: Synthetic oligonucleotide
uugggcuaaagugaagaag

SEQ ID NO: 297054 - RNA, 19 nt, Artificial Sequence
  Description of Artificial Sequence: Synthetic oligonucleotide
cuugguugggcuaaaguga

SEQ ID NO: 297055 - RNA, 19 nt, Artificial Sequence
  Description of Artificial Sequence: Synthetic oligonucleotide
ugguauguggagucuuggg

SEQ ID NO: 297056 - RNA, 19 nt, Artificial Sequence
  Description of Artificial Sequence: Synthetic oligonucleotide
aaguugaagggaaugggga

SEQ ID NO: 297057 - RNA, 19 nt, Artificial Sequence
  Description of Artificial Sequence: Synthetic oligonucleotide
cauaccuugcucuggugag

SEQ ID NO: 297058 - RNA, 19 nt, Artificial Sequence
  Description of Artificial Sequence: Synthetic oligonucleotide
uaaaacguagccccucaau

SEQ ID NO: 297059 - RNA, 19 nt, Artificial Sequence
  Description of Artificial Sequence: Synthetic oligonucleotide
agcuuagcuguuccgccgc

SEQ ID NO: 297060 - RNA, 19 nt, Artificial Sequence
  Description of Artificial Sequence: Synthetic oligonucleotide
uuguacacgauccgcugca

SEQ ID NO: 297061 - RNA, 19 nt, Artificial Sequence
  Description of Artificial Sequence: Synthetic oligonucleotide
gacaguccggccuuggcug

SEQ ID NO: 297062 - RNA, 19 nt, Artificial Sequence
  Description of Artificial Sequence: Synthetic oligonucleotide
aucauacauggcuguaguc

SEQ ID NO: 297063 - RNA, 19 nt, Artificial Sequence
  Description of Artificial Sequence: Synthetic oligonucleotide
uauauugcaccagguagga

SEQ ID NO: 297064 - RNA, 19 nt, Artificial Sequence
  Description of Artificial Sequence: Synthetic oligonucleotide
aaacgcuuaguucguccug

SEQ ID NO: 297065 - RNA, 19 nt, Artificial Sequence
  Description of Artificial Sequence: Synthetic oligonucleotide
gaacggaacugcaucuugg

SEQ ID NO: 297066 - RNA, 19 nt, Artificial Sequence
  Description of Artificial Sequence: Synthetic oligonucleotide
uagcuuagcuguuccgccg

SEQ ID NO: 297067 - RNA, 19 nt, Artificial Sequence
  Description of Artificial Sequence: Synthetic oligonucleotide
acgggaaggcggcugagcg

SEQ ID NO: 297068 - RNA, 19 nt, Artificial Sequence
  Description of Artificial Sequence: Synthetic oligonucleotide
gagagugccacaucaaucu

SEQ ID NO: 297069 - RNA, 19 nt, Artificial Sequence
  Description of Artificial Sequence: Synthetic oligonucleotide
uggcaugcgguacugcacc

SEQ ID NO: 297070 - RNA, 19 nt, Artificial Sequence
  Description of Artificial Sequence: Synthetic oligonucleotide
uccuuguacacgauccgcu

SEQ ID NO: 297071 - RNA, 19 nt, Artificial Sequence
  Description of Artificial Sequence: Synthetic oligonucleotide
uuacccagaauaagaugcu

SEQ ID NO: 297072 - RNA, 19 nt, Artificial Sequence
  Description of Artificial Sequence: Synthetic oligonucleotide
aaggccgauucucuucuug

SEQ ID NO: 297073 - RNA, 19 nt, Artificial Sequence
  Description of Artificial Sequence: Synthetic oligonucleotide
aacaccguguuuucuuuaa

SEQ ID NO: 297074 - RNA, 19 nt, Artificial Sequence
  Description of Artificial Sequence: Synthetic oligonucleotide
agucuugggagagugccac

SEQ ID NO: 297075 - RNA, 19 nt, Artificial Sequence
  Description of Artificial Sequence: Synthetic oligonucleotide
uccuguugagguaggacgu

SEQ ID NO: 297076 - RNA, 19 nt, Artificial Sequence
  Description of Artificial Sequence: Synthetic oligonucleotide
caccacuaaggucuuagag

SEQ ID NO: 297077 - RNA, 19 nt, Artificial Sequence
  Description of Artificial Sequence: Synthetic oligonucleotide
gacagauccagggaugaug

SEQ ID NO: 297078 - RNA, 19 nt, Artificial Sequence
  Description of Artificial Sequence: Synthetic oligonucleotide
uucuaguacugggacagcc

SEQ ID NO: 297079 - RNA, 19 nt, Artificial Sequence
  Description of Artificial Sequence: Synthetic oligonucleotide
aagcgguucuucuggcguc

SEQ ID NO: 297080 - RNA, 19 nt, Artificial Sequence
  Description of Artificial Sequence: Synthetic oligonucleotide
uugguugggcuaaagugaa

SEQ ID NO: 297081 - RNA, 19 nt, Artificial Sequence
  Description of Artificial Sequence: Synthetic oligonucleotide
ugaccgugauguuaucuug

SEQ ID NO: 297082 - RNA, 19 nt, Artificial Sequence
  Description of Artificial Sequence: Synthetic oligonucleotide
ccacuaaggucuuagagac

SEQ ID NO: 297083 - RNA, 19 nt, Artificial Sequence
  Description of Artificial Sequence: Synthetic oligonucleotide
ucauuggcgcgcacgcagg

SEQ ID NO: 297084 - RNA, 19 nt, Artificial Sequence
  Description of Artificial Sequence: Synthetic oligonucleotide
acguagaagaacgauggcu

SEQ ID NO: 297085 - RNA, 19 nt, Artificial Sequence
  Description of Artificial Sequence: Synthetic oligonucleotide
aucacgagaaacaaagaaa

SEQ ID NO: 297086 - RNA, 19 nt, Artificial Sequence
  Description of Artificial Sequence: Synthetic oligonucleotide
acacauagcccugugugag

SEQ ID NO: 297087 - RNA, 19 nt, Artificial Sequence
  Description of Artificial Sequence: Synthetic oligonucleotide
cacauagcuuagcuguucc

SEQ ID NO: 297088 - RNA, 19 nt, Artificial Sequence
  Description of Artificial Sequence: Synthetic oligonucleotide
gucacguagaagaacgaug

SEQ ID NO: 297089 - RNA, 19 nt, Artificial Sequence
  Description of Artificial Sequence: Synthetic oligonucleotide
ggaggcaugaccaaguuga

SEQ ID NO: 297090 - RNA, 19 nt, Artificial Sequence
  Description of Artificial Sequence: Synthetic oligonucleotide
gacccuuccuuguacacga

SEQ ID NO: 297091 - RNA, 19 nt, Artificial Sequence
  Description of Artificial Sequence: Synthetic oligonucleotide
aucaccgagguagcugucc

SEQ ID NO: 297092 - RNA, 19 nt, Artificial Sequence
  Description of Artificial Sequence: Synthetic oligonucleotide
uucccauacuccuuugaaa

SEQ ID NO: 297093 - RNA, 19 nt, Artificial Sequence
  Description of Artificial Sequence: Synthetic oligonucleotide
accgugauguuaucuugag

SEQ ID NO: 297094 - RNA, 19 nt, Artificial Sequence
  Description of Artificial Sequence: Synthetic oligonucleotide
agaagaacgauggcuguca

SEQ ID NO: 297095 - RNA, 19 nt, Artificial Sequence
  Description of Artificial Sequence: Synthetic oligonucleotide
cuaaagugaagaaggccga

SEQ ID NO: 297096 - RNA, 19 nt, Artificial Sequence
  Description of Artificial Sequence: Synthetic oligonucleotide
gaagaacgauggcugucag

SEQ ID NO: 297097 - RNA, 19 nt, Artificial Sequence
  Description of Artificial Sequence: Synthetic oligonucleotide
cuuagcgcugggacgugcg

SEQ ID NO: 297098 - RNA, 19 nt, Artificial Sequence
  Description of Artificial Sequence: Synthetic oligonucleotide
caugcgguacugcaccugc

SEQ ID NO: 297099 - RNA, 19 nt, Artificial Sequence
  Description of Artificial Sequence: Synthetic oligonucleotide
aaaagaacagcgggccggu

SEQ ID NO: 297100 - RNA, 19 nt, Artificial Sequence
  Description of Artificial Sequence: Synthetic oligonucleotide
ucccaccugaccgugaugu

SEQ ID NO: 297101 - RNA, 19 nt, Artificial Sequence
  Description of Artificial Sequence: Synthetic oligonucleotide
ugggacgugcgcgaugacg

SEQ ID NO: 297102 - RNA, 19 nt, Artificial Sequence
  Description of Artificial Sequence: Synthetic oligonucleotide
ggugaucccaggcugcggg

SEQ ID NO: 297103 - RNA, 19 nt, Artificial Sequence
  Description of Artificial Sequence: Synthetic oligonucleotide
guugagguaggacgugccc

SEQ ID NO: 297104 - RNA, 19 nt, Artificial Sequence
  Description of Artificial Sequence: Synthetic oligonucleotide
auguuggacgggaaggcgg

SEQ ID NO: 297105 - RNA, 19 nt, Artificial Sequence
  Description of Artificial Sequence: Synthetic oligonucleotide
agcgcuggcccucguaggg

SEQ ID NO: 297106 - RNA, 19 nt, Artificial Sequence
  Description of Artificial Sequence: Synthetic oligonucleotide
aaugaucacgccauaccuu

SEQ ID NO: 297107 - RNA, 19 nt, Artificial Sequence
  Description of Artificial Sequence: Synthetic oligonucleotide
agacccuuccuuguacacg

SEQ ID NO: 297108 - RNA, 19 nt, Artificial Sequence
  Description of Artificial Sequence: Synthetic oligonucleotide
acgaugggaagaccccgcg

SEQ ID NO: 297109 - RNA, 19 nt, Artificial Sequence
  Description of Artificial Sequence: Synthetic oligonucleotide
ugaaaccccuuagcgcugg

SEQ ID NO: 297110 - RNA, 19 nt, Artificial Sequence
  Description of Artificial Sequence: Synthetic oligonucleotide
uggucgugggucuggaagu

SEQ ID NO: 297111 - RNA, 19 nt, Artificial Sequence
  Description of Artificial Sequence: Synthetic oligonucleotide
gguauguggagucuuggga

SEQ ID NO: 297112 - RNA, 19 nt, Artificial Sequence
  Description of Artificial Sequence: Synthetic oligonucleotide
acaguccggccuuggcugc

SEQ ID NO: 297113 - RNA, 19 nt, Artificial Sequence
  Description of Artificial Sequence: Synthetic oligonucleotide
cguagaagauguuggacgg

SEQ ID NO: 297114 - RNA, 19 nt, Artificial Sequence
  Description of Artificial Sequence: Synthetic oligonucleotide
accccuuagcgcugggacg

SEQ ID NO: 297115 - RNA, 19 nt, Artificial Sequence
  Description of Artificial Sequence: Synthetic oligonucleotide
gugcuuucaucaaugagga

SEQ ID NO: 297116 - RNA, 19 nt, Artificial Sequence
  Description of Artificial Sequence: Synthetic oligonucleotide
cacugcgggagguuggggc

SEQ ID NO: 297117 - RNA, 19 nt, Artificial Sequence
  Description of Artificial Sequence: Synthetic oligonucleotide
agugccacaucaaucugug

SEQ ID NO: 297118 - RNA, 19 nt, Artificial Sequence
  Description of Artificial Sequence: Synthetic oligonucleotide
agaacagcgggccgguccu

SEQ ID NO: 297119 - RNA, 19 nt, Artificial Sequence
  Description of Artificial Sequence: Synthetic oligonucleotide
agagcgcccagcaaucagg

SEQ ID NO: 297120 - RNA, 19 nt, Artificial Sequence
  Description of Artificial Sequence: Synthetic oligonucleotide
cucggcugcucacacagug

SEQ ID NO: 297121 - RNA, 19 nt, Artificial Sequence
  Description of Artificial Sequence: Synthetic oligonucleotide
uguugagcggccccuccac

SEQ ID NO: 297122 - RNA, 19 nt, Artificial Sequence
  Description of Artificial Sequence: Synthetic oligonucleotide
cugcugcggucauagacag

SEQ ID NO: 297123 - RNA, 19 nt, Artificial Sequence
  Description of Artificial Sequence: Synthetic oligonucleotide
ugcaugaggcucucacgca

SEQ ID NO: 297124 - RNA, 19 nt, Artificial Sequence
  Description of Artificial Sequence: Synthetic oligonucleotide
gaagggaauggggauguuc

SEQ ID NO: 297125 - RNA, 19 nt, Artificial Sequence
  Description of Artificial Sequence: Synthetic oligonucleotide
gaaacgcuuaguucguccu

SEQ ID NO: 297126 - RNA, 19 nt, Artificial Sequence
  Description of Artificial Sequence: Synthetic oligonucleotide
ugucacguagaagaacgau

SEQ ID NO: 297127 - RNA, 19 nt, Artificial Sequence
  Description of Artificial Sequence: Synthetic oligonucleotide
cacgcauuggucacgcuca

SEQ ID NO: 297128 - RNA, 19 nt, Artificial Sequence
  Description of Artificial Sequence: Synthetic oligonucleotide
gcugaucaugccaaucugg

SEQ ID NO: 297129 - RNA, 19 nt, Artificial Sequence
  Description of Artificial Sequence: Synthetic oligonucleotide
augaccaaguugaagggaa

SEQ ID NO: 297130 - RNA, 19 nt, Artificial Sequence
  Description of Artificial Sequence: Synthetic oligonucleotide
aguggucacccacaaggau

SEQ ID NO: 297131 - RNA, 19 nt, Artificial Sequence
  Description of Artificial Sequence: Synthetic oligonucleotide
uuagcgcugggacgugcgc

SEQ ID NO: 297132 - RNA, 19 nt, Artificial Sequence
  Description of Artificial Sequence: Synthetic oligonucleotide
aggccgauucucuucuugu

SEQ ID NO: 297133 - RNA, 19 nt, Artificial Sequence
  Description of Artificial Sequence: Synthetic oligonucleotide
acgcucaggaguucgccug

SEQ ID NO: 297134 - RNA, 19 nt, Artificial Sequence
  Description of Artificial Sequence: Synthetic oligonucleotide
cugguauguggagucuugg

SEQ ID NO: 297135 - RNA, 19 nt, Artificial Sequence
  Description of Artificial Sequence: Synthetic oligonucleotide
auaccuugcucuggugagg

SEQ ID NO: 297136 - RNA, 19 nt, Artificial Sequence
  Description of Artificial Sequence: Synthetic oligonucleotide
uucagcagcuuuguaguua

SEQ ID NO: 297137 - RNA, 19 nt, Artificial Sequence
  Description of Artificial Sequence: Synthetic oligonucleotide
cacaaggaucagcugcuug

SEQ ID NO: 297138 - RNA, 19 nt, Artificial Sequence
  Description of Artificial Sequence: Synthetic oligonucleotide
acgcaggacaggaugauga

SEQ ID NO: 297139 - RNA, 19 nt, Artificial Sequence
  Description of Artificial Sequence: Synthetic oligonucleotide
acugcgggagguuggggca

SEQ ID NO: 297140 - RNA, 19 nt, Artificial Sequence
  Description of Artificial Sequence: Synthetic oligonucleotide
guggaaaacagguauccau

SEQ ID NO: 297141 - RNA, 19 nt, Artificial Sequence
  Description of Artificial Sequence: Synthetic oligonucleotide
aaugggccggaugccagca

SEQ ID NO: 297142 - RNA, 19 nt, Artificial Sequence
  Description of Artificial Sequence: Synthetic oligonucleotide
aguggaaaacagguaucca

SEQ ID NO: 297143 - RNA, 19 nt, Artificial Sequence
  Description of Artificial Sequence: Synthetic oligonucleotide
accugcgcugaucaugcca

SEQ ID NO: 297144 - RNA, 19 nt, Artificial Sequence
  Description of Artificial Sequence: Synthetic oligonucleotide
cacguagaagaacgauggc

SEQ ID NO: 297145 - RNA, 19 nt, Artificial Sequence
  Description of Artificial Sequence: Synthetic oligonucleotide
ggguuacccacaaugauca

SEQ ID NO: 297146 - RNA, 19 nt, Artificial Sequence
  Description of Artificial Sequence: Synthetic oligonucleotide
uagcgcugggacgugcgcg

SEQ ID NO: 297147 - RNA, 19 nt, Artificial Sequence
  Description of Artificial Sequence: Synthetic oligonucleotide
gaagcgguucuucuggcgu

SEQ ID NO: 297148 - RNA, 19 nt, Artificial Sequence
  Description of Artificial Sequence: Synthetic oligonucleotide
aguacugggacagcccggu

SEQ ID NO: 297149 - RNA, 19 nt, Artificial Sequence
  Description of Artificial Sequence: Synthetic oligonucleotide
agcgcccagcaaucaggcc

SEQ ID NO: 297150 - RNA, 19 nt, Artificial Sequence
  Description of Artificial Sequence: Synthetic oligonucleotide
ggaacggaacugcaucuug

SEQ ID NO: 297151 - RNA, 19 nt, Artificial Sequence
  Description of Artificial Sequence: Synthetic oligonucleotide
augccaaucugguccggcu

SEQ ID NO: 297152 - RNA, 19 nt, Artificial Sequence
  Description of Artificial Sequence: Synthetic oligonucleotide
agcgccuuuggguuaccca

SEQ ID NO: 297153 - RNA, 19 nt, Artificial Sequence
  Description of Artificial Sequence: Synthetic oligonucleotide
cagcugacaguggucaccc

SEQ ID NO: 297154 - RNA, 19 nt, Artificial Sequence
  Description of Artificial Sequence: Synthetic oligonucleotide
aaagaacagcgggccgguc

SEQ ID NO: 297155 - RNA, 19 nt, Artificial Sequence
  Description of Artificial Sequence: Synthetic oligonucleotide
cuuaguucguccugcuaaa

SEQ ID NO: 297156 - RNA, 19 nt, Artificial Sequence
  Description of Artificial Sequence: Synthetic oligonucleotide
ucuccucggcugcucacac

SEQ ID NO: 297157 - RNA, 19 nt, Artificial Sequence
  Description of Artificial Sequence: Synthetic oligonucleotide
ccguguuuucuuuaaauga

SEQ ID NO: 297158 - RNA, 19 nt, Artificial Sequence
  Description of Artificial Sequence: Synthetic oligonucleotide
ucacgcucaggaguucgcc

SEQ ID NO: 297159 - RNA, 19 nt, Artificial Sequence
  Description of Artificial Sequence: Synthetic oligonucleotide
gggugcuuucaucaaugag

SEQ ID NO: 297160 - RNA, 19 nt, Artificial Sequence
  Description of Artificial Sequence: Synthetic oligonucleotide
caacacgcauuggucacgc

SEQ ID NO: 297161 - RNA, 19 nt, Artificial Sequence
  Description of Artificial Sequence: Synthetic oligonucleotide
guugggcuaaagugaagaa

SEQ ID NO: 297162 - RNA, 19 nt, Artificial Sequence
  Description of Artificial Sequence: Synthetic oligonucleotide
guuccauugcguugacgca

SEQ ID NO: 297163 - RNA, 19 nt, Artificial Sequence
  Description of Artificial Sequence: Synthetic oligonucleotide
gaccgugauguuaucuuga

SEQ ID NO: 297164 - RNA, 19 nt, Artificial Sequence
  Description of Artificial Sequence: Synthetic oligonucleotide
cucucacgcagguuguuga

SEQ ID NO: 297165 - RNA, 19 nt, Artificial Sequence
  Description of Artificial Sequence: Synthetic oligonucleotide
gugaucccaggcugcgggg

SEQ ID NO: 297166 - RNA, 19 nt, Artificial Sequence
  Description of Artificial Sequence: Synthetic oligonucleotide
ugaucccaggcugcggggc

SEQ ID NO: 297167 - RNA, 19 nt, Artificial Sequence
  Description of Artificial Sequence: Synthetic oligonucleotide
gaaaccccuuagcgcuggg

SEQ ID NO: 297168 - RNA, 19 nt, Artificial Sequence
  Description of Artificial Sequence: Synthetic oligonucleotide
acagaaacgcuuaguucgu

SEQ ID NO: 297169 - RNA, 19 nt, Artificial Sequence
  Description of Artificial Sequence: Synthetic oligonucleotide
gacggugaucccaggcugc

SEQ ID NO: 297170 - RNA, 19 nt, Artificial Sequence
  Description of Artificial Sequence: Synthetic oligonucleotide
gggacgugcgcgaugacgc

SEQ ID NO: 297171 - RNA, 19 nt, Artificial Sequence
  Description of Artificial Sequence: Synthetic oligonucleotide
cuccucuccucuccucucc

SEQ ID NO: 297172 - RNA, 19 nt, Artificial Sequence
  Description of Artificial Sequence: Synthetic oligonucleotide
uuaguucguccugcuaaaa

SEQ ID NO: 297173 - RNA, 19 nt, Artificial Sequence
  Description of Artificial Sequence: Synthetic oligonucleotide
aaaccccuuagcgcuggga

SEQ ID NO: 297174 - RNA, 19 nt, Artificial Sequence
  Description of Artificial Sequence: Synthetic oligonucleotide
acgagcuuucgaggcuugc

SEQ ID NO: 297175 - RNA, 19 nt, Artificial Sequence
  Description of Artificial Sequence: Synthetic oligonucleotide
uuggacgggaaggcggcug

SEQ ID NO: 297176 - RNA, 19 nt, Artificial Sequence
  Description of Artificial Sequence: Synthetic oligonucleotide
cucguagggugugaugaug

SEQ ID NO: 297177 - RNA, 19 nt, Artificial Sequence
  Description of Artificial Sequence: Synthetic oligonucleotide
gguguugacgagcuuucga

SEQ ID NO: 297178 - RNA, 19 nt, Artificial Sequence
  Description of Artificial Sequence: Synthetic oligonucleotide
cacgauccgcugcagugac

SEQ ID NO: 297179 - RNA, 19 nt, Artificial Sequence
  Description of Artificial Sequence: Synthetic oligonucleotide
agccccucaaucacgagaa

SEQ ID NO: 297180 - RNA, 19 nt, Artificial Sequence
  Description of Artificial Sequence: Synthetic oligonucleotide
cagagcgcccagcaaucag

SEQ ID NO: 297181 - RNA, 19 nt, Artificial Sequence
  Description of Artificial Sequence: Synthetic oligonucleotide
ugggguaccccggccagca

SEQ ID NO: 297182 - RNA, 19 nt, Artificial Sequence
  Description of Artificial Sequence: Synthetic oligonucleotide
acuaagccacauagcuuag

SEQ ID NO: 297183 - RNA, 19 nt, Artificial Sequence
  Description of Artificial Sequence: Synthetic oligonucleotide
caccagguaggagcgcugg

SEQ ID NO: 297184 - RNA, 19 nt, Artificial Sequence
  Description of Artificial Sequence: Synthetic oligonucleotide
ugacgcaggugugccuggg

SEQ ID NO: 297185 - RNA, 19 nt, Artificial Sequence
  Description of Artificial Sequence: Synthetic oligonucleotide
gaaggcggcugagcgcggg

SEQ ID NO: 297186 - RNA, 19 nt, Artificial Sequence
  Description of Artificial Sequence: Synthetic oligonucleotide
caucauacauggcuguagu

SEQ ID NO: 297187 - RNA, 19 nt, Artificial Sequence
  Description of Artificial Sequence: Synthetic oligonucleotide
ggaccugcgcugaucaugc

SEQ ID NO: 297188 - RNA, 19 nt, Artificial Sequence
  Description of Artificial Sequence: Synthetic oligonucleotide
acguagccccucaaucacg

SEQ ID NO: 297189 - RNA, 19 nt, Artificial Sequence
  Description of Artificial Sequence: Synthetic oligonucleotide
gucuuagagacaaacugau

SEQ ID NO: 297190 - RNA, 19 nt, Artificial Sequence
  Description of Artificial Sequence: Synthetic oligonucleotide
gacugcgacaguccggccu

SEQ ID NO: 297191 - RNA, 19 nt, Artificial Sequence
  Description of Artificial Sequence: Synthetic oligonucleotide
gcuaaaacguagccccuca

SEQ ID NO: 297192 - RNA, 19 nt, Artificial Sequence
  Description of Artificial Sequence: Synthetic oligonucleotide
ccucucaccgcccgcaggg

SEQ ID NO: 297193 - RNA, 19 nt, Artificial Sequence
  Description of Artificial Sequence: Synthetic oligonucleotide
acacgauccgcugcaguga

SEQ ID NO: 297194 - RNA, 19 nt, Artificial Sequence
  Description of Artificial Sequence: Synthetic oligonucleotide
ucuccucuccucuccucuc

SEQ ID NO: 297195 - RNA, 19 nt, Artificial Sequence
  Description of Artificial Sequence: Synthetic oligonucleotide
cugugugagggcgcccugg

SEQ ID NO: 297196 - RNA, 19 nt, Artificial Sequence
  Description of Artificial Sequence: Synthetic oligonucleotide
cugguagagcuuggugugc

SEQ ID NO: 297197 - RNA, 19 nt, Artificial Sequence
  Description of Artificial Sequence: Synthetic oligonucleotide
ugcgcugaucaugccaauc

SEQ ID NO: 297198 - RNA, 19 nt, Artificial Sequence
  Description of Artificial Sequence: Synthetic oligonucleotide
agacuaagccacauagcuu

SEQ ID NO: 297199 - RNA, 19 nt, Artificial Sequence
  Description of Artificial Sequence: Synthetic oligonucleotide
augggccggaugccagcac

SEQ ID NO: 297200 - RNA, 19 nt, Artificial Sequence
  Description of Artificial Sequence: Synthetic oligonucleotide
cucaggaguucgccugcag

SEQ ID NO: 297201 - RNA, 19 nt, Artificial Sequence
  Description of Artificial Sequence: Synthetic oligonucleotide
cugcaggcgaaugggccgg

SEQ ID NO: 297202 - RNA, 19 nt, Artificial Sequence
  Description of Artificial Sequence: Synthetic oligonucleotide
acagcccggugaccccgcc

SEQ ID NO: 297203 - RNA, 19 nt, Artificial Sequence
  Description of Artificial Sequence: Synthetic oligonucleotide
ggucacgcucaggaguucg

SEQ ID NO: 297204 - RNA, 19 nt, Artificial Sequence
  Description of Artificial Sequence: Synthetic oligonucleotide
ugacgagcuuucgaggcuu

SEQ ID NO: 297205 - RNA, 19 nt, Artificial Sequence
  Description of Artificial Sequence: Synthetic oligonucleotide
ugcgacaguccggccuugg

SEQ ID NO: 297206 - RNA, 19 nt, Artificial Sequence
  Description of Artificial Sequence: Synthetic oligonucleotide
gacagcgccuuuggguuac

SEQ ID NO: 297207 - RNA, 19 nt, Artificial Sequence
  Description of Artificial Sequence: Synthetic oligonucleotide
gacgggaaggcggcugagc

SEQ ID NO: 297208 - RNA, 19 nt, Artificial Sequence
  Description of Artificial Sequence: Synthetic oligonucleotide
caguggucacccacaagga

SEQ ID NO: 297209 - RNA, 19 nt, Artificial Sequence
  Description of Artificial Sequence: Synthetic oligonucleotide
ucucugcguugccucucug

SEQ ID NO: 297210 - RNA, 19 nt, Artificial Sequence
  Description of Artificial Sequence: Synthetic oligonucleotide
agcgacugcgacaguccgg

SEQ ID NO: 297211 - RNA, 19 nt, Artificial Sequence
  Description of Artificial Sequence: Synthetic oligonucleotide
auacauggcuguagucaug

SEQ ID NO: 297212 - RNA, 19 nt, Artificial Sequence
  Description of Artificial Sequence: Synthetic oligonucleotide
uccucucuccucuccucuc

SEQ ID NO: 297213 - RNA, 19 nt, Artificial Sequence
  Description of Artificial Sequence: Synthetic oligonucleotide
gggaggcaugaccaaguug

SEQ ID NO: 297214 - RNA, 19 nt, Artificial Sequence
  Description of Artificial Sequence: Synthetic oligonucleotide
gccaacacgcauuggucac

SEQ ID NO: 297215 - RNA, 19 nt, Artificial Sequence
  Description of Artificial Sequence: Synthetic oligonucleotide
ucucuccucuccucuccuc

SEQ ID NO: 297216 - RNA, 19 nt, Artificial Sequence
  Description of Artificial Sequence: Synthetic oligonucleotide
accugaccgugauguuauc

SEQ ID NO: 297217 - RNA, 19 nt, Artificial Sequence
  Description of Artificial Sequence: Synthetic oligonucleotide
agggcgcccugggaaaagg

SEQ ID NO: 297218 - RNA, 19 nt, Artificial Sequence
  Description of Artificial Sequence: Synthetic oligonucleotide
augacgcuccuggccgccc

SEQ ID NO: 297219 - RNA, 19 nt, Artificial Sequence
  Description of Artificial Sequence: Synthetic oligonucleotide
acgcuuaguucguccugcu

SEQ ID NO: 297220 - RNA, 19 nt, Artificial Sequence
  Description of Artificial Sequence: Synthetic oligonucleotide
guaggagcgcuggcccucg

SEQ ID NO: 297221 - RNA, 19 nt, Artificial Sequence
  Description of Artificial Sequence: Synthetic oligonucleotide
aggaacccgaugcccuggu

SEQ ID NO: 297222 - RNA, 19 nt, Artificial Sequence
  Description of Artificial Sequence: Synthetic oligonucleotide
cuaaaacguagccccucaa

SEQ ID NO: 297223 - RNA, 19 nt, Artificial Sequence
  Description of Artificial Sequence: Synthetic oligonucleotide
gacgguguugacgagcuuu

SEQ ID NO: 297224 - RNA, 19 nt, Artificial Sequence
  Description of Artificial Sequence: Synthetic oligonucleotide
gcaaugagcccucguagaa

SEQ ID NO: 297225 - RNA, 19 nt, Artificial Sequence
  Description of Artificial Sequence: Synthetic oligonucleotide
gagaggccgggcuggcuca

SEQ ID NO: 297226 - RNA, 19 nt, Artificial Sequence
  Description of Artificial Sequence: Synthetic oligonucleotide
gcaggugugccuggguagg

SEQ ID NO: 297227 - RNA, 19 nt, Artificial Sequence
  Description of Artificial Sequence: Synthetic oligonucleotide
cccgcucgggcacagaaac

SEQ ID NO: 297228 - RNA, 19 nt, Artificial Sequence
  Description of Artificial Sequence: Synthetic oligonucleotide
gggaccugcgcugaucaug

SEQ ID NO: 297229 - RNA, 19 nt, Artificial Sequence
  Description of Artificial Sequence: Synthetic oligonucleotide
gagucuugggagagugcca

SEQ ID NO: 297230 - RNA, 19 nt, Artificial Sequence
  Description of Artificial Sequence: Synthetic oligonucleotide
guggcaugcgguacugcac

SEQ ID NO: 297231 - RNA, 19 nt, Artificial Sequence
  Description of Artificial Sequence: Synthetic oligonucleotide
gaccccgccaugcugguau

SEQ ID NO: 297232 - RNA, 19 nt, Artificial Sequence
  Description of Artificial Sequence: Synthetic oligonucleotide
ugacagcgccuuuggguua

SEQ ID NO: 297233 - RNA, 19 nt, Artificial Sequence
  Description of Artificial Sequence: Synthetic oligonucleotide
ggguaccccggccagcagc

SEQ ID NO: 297234 - RNA, 19 nt, Artificial Sequence
  Description of Artificial Sequence: Synthetic oligonucleotide
augaaaccccuuagcgcug

SEQ ID NO: 297235 - RNA, 19 nt, Artificial Sequence
  Description of Artificial Sequence: Synthetic oligonucleotide
cacuaaggucuuagagaca

SEQ ID NO: 297236 - RNA, 19 nt, Artificial Sequence
  Description of Artificial Sequence: Synthetic oligonucleotide
gcgcacgcaggacaggaug

SEQ ID NO: 297237 - RNA, 19 nt, Artificial Sequence
  Description of Artificial Sequence: Synthetic oligonucleotide
caccguguuuucuuuaaau

SEQ ID NO: 297238 - RNA, 19 nt, Artificial Sequence
  Description of Artificial Sequence: Synthetic oligonucleotide
cacgcaggacaggaugaug

SEQ ID NO: 297239 - RNA, 19 nt, Artificial Sequence
  Description of Artificial Sequence: Synthetic oligonucleotide
guaggacgugcccgagcug

SEQ ID NO: 297240 - RNA, 19 nt, Artificial Sequence
  Description of Artificial Sequence: Synthetic oligonucleotide
ccauaccuugcucugguga

SEQ ID NO: 297241 - RNA, 19 nt, Artificial Sequence
  Description of Artificial Sequence: Synthetic oligonucleotide
gacgagcuuucgaggcuug

SEQ ID NO: 297242 - RNA, 19 nt, Artificial Sequence
  Description of Artificial Sequence: Synthetic oligonucleotide
cauacuccuuugaaagaau

SEQ ID NO: 297243 - RNA, 19 nt, Artificial Sequence
  Description of Artificial Sequence: Synthetic oligonucleotide
cagacggugaucccaggcu

SEQ ID NO: 297244 - RNA, 19 nt, Artificial Sequence
  Description of Artificial Sequence: Synthetic oligonucleotide
caccgagguagcuguccug

SEQ ID NO: 297245 - RNA, 19 nt, Artificial Sequence
  Description of Artificial Sequence: Synthetic oligonucleotide
cugaccgugauguuaucuu

SEQ ID NO: 297246 - RNA, 19 nt, Artificial Sequence
  Description of Artificial Sequence: Synthetic oligonucleotide
gucacgcucaggaguucgc

SEQ ID NO: 297247 - RNA, 19 nt, Artificial Sequence
  Description of Artificial Sequence: Synthetic oligonucleotide
cgggcaucauacauggcug

SEQ ID NO: 297248 - RNA, 19 nt, Artificial Sequence
  Description of Artificial Sequence: Synthetic oligonucleotide
caggugugccuggguaggg

SEQ ID NO: 297249 - RNA, 19 nt, Artificial Sequence
  Description of Artificial Sequence: Synthetic oligonucleotide
uucuggcguccuccacggc

SEQ ID NO: 297250 - RNA, 19 nt, Artificial Sequence
  Description of Artificial Sequence: Synthetic oligonucleotide
gacgugcgcgaugacgcuc

SEQ ID NO: 297251 - RNA, 19 nt, Artificial Sequence
  Description of Artificial Sequence: Synthetic oligonucleotide
ccccucaaucacgagaaac

SEQ ID NO: 297252 - RNA, 19 nt, Artificial Sequence
  Description of Artificial Sequence: Synthetic oligonucleotide
gcugcggucauagacagau

SEQ ID NO: 297253 - RNA, 19 nt, Artificial Sequence
  Description of Artificial Sequence: Synthetic oligonucleotide
gggucguucaggaacccga

SEQ ID NO: 297254 - RNA, 19 nt, Artificial Sequence
  Description of Artificial Sequence: Synthetic oligonucleotide
cagaaacgcuuaguucguc

SEQ ID NO: 297255 - RNA, 19 nt, Artificial Sequence
  Description of Artificial Sequence: Synthetic oligonucleotide
aagaccccgcgggccaaca

SEQ ID NO: 297256 - RNA, 19 nt, Artificial Sequence
  Description of Artificial Sequence: Synthetic oligonucleotide
gagggcgcccugggaaaag

SEQ ID NO: 297257 - RNA, 19 nt, Artificial Sequence
  Description of Artificial Sequence: Synthetic oligonucleotide
gaccugcgcugaucaugcc

SEQ ID NO: 297258 - RNA, 19 nt, Artificial Sequence
  Description of Artificial Sequence: Synthetic oligonucleotide
cuggccgcucucagcucgc

SEQ ID NO: 297259 - RNA, 19 nt, Artificial Sequence
  Description of Artificial Sequence: Synthetic oligonucleotide
aguauccaggcggcggcau

SEQ ID NO: 297260 - RNA, 19 nt, Artificial Sequence
  Description of Artificial Sequence: Synthetic oligonucleotide
ccucucuccucuccucucc

SEQ ID NO: 297261 - RNA, 19 nt, Artificial Sequence
  Description of Artificial Sequence: Synthetic oligonucleotide
ugagggcgcccugggaaaa

SEQ ID NO: 297262 - RNA, 19 nt, Artificial Sequence
  Description of Artificial Sequence: Synthetic oligonucleotide
auccaggcggcggcauggg

SEQ ID NO: 297263 - RNA, 19 nt, Artificial Sequence
  Description of Artificial Sequence: Synthetic oligonucleotide
gguugacgguguugacgag

SEQ ID NO: 297264 - RNA, 19 nt, Artificial Sequence
  Description of Artificial Sequence: Synthetic oligonucleotide
gugagggcgcccugggaaa

SEQ ID NO: 297265 - RNA, 19 nt, Artificial Sequence
  Description of Artificial Sequence: Synthetic oligonucleotide
guacugggacagcccggug

SEQ ID NO: 297266 - RNA, 19 nt, Artificial Sequence
  Description of Artificial Sequence: Synthetic oligonucleotide
gugucacguagaagaacga

SEQ ID NO: 297267 - RNA, 19 nt, Artificial Sequence
  Description of Artificial Sequence: Synthetic oligonucleotide
caaacaccguguuuucuuu

SEQ ID NO: 297268 - RNA, 19 nt, Artificial Sequence
  Description of Artificial Sequence: Synthetic oligonucleotide
cuccucucaccgcccgcag

SEQ ID NO: 297269 - RNA, 19 nt, Artificial Sequence
  Description of Artificial Sequence: Synthetic oligonucleotide
ccaacacgcauuggucacg

SEQ ID NO: 297270 - RNA, 19 nt, Artificial Sequence
  Description of Artificial Sequence: Synthetic oligonucleotide
caccugaccgugauguuau

SEQ ID NO: 297271 - RNA, 19 nt, Artificial Sequence
  Description of Artificial Sequence: Synthetic oligonucleotide
cgcucgggcacagaaacgc

SEQ ID NO: 297272 - RNA, 19 nt, Artificial Sequence
  Description of Artificial Sequence: Synthetic oligonucleotide
ggcgcccugggaaaagggc

SEQ ID NO: 297273 - RNA, 19 nt, Artificial Sequence
  Description of Artificial Sequence: Synthetic oligonucleotide
gcgcccagcaaucaggccu

SEQ ID NO: 297274 - RNA, 19 nt, Artificial Sequence
  Description of Artificial Sequence: Synthetic oligonucleotide
cucucaccgcccgcagggg

SEQ ID NO: 297275 - RNA, 19 nt, Artificial Sequence
  Description of Artificial Sequence: Synthetic oligonucleotide
gguccggcuuggcaccugc

SEQ ID NO: 297276 - RNA, 19 nt, Artificial Sequence
  Description of Artificial Sequence: Synthetic oligonucleotide
ggggucguucaggaacccg

SEQ ID NO: 297277 - RNA, 19 nt, Artificial Sequence
  Description of Artificial Sequence: Synthetic oligonucleotide
cauuggcgcgcacgcagga

SEQ ID NO: 297278 - RNA, 19 nt, Artificial Sequence
  Description of Artificial Sequence: Synthetic oligonucleotide
ccugcgcugaucaugccaa

SEQ ID NO: 297279 - RNA, 19 nt, Artificial Sequence
  Description of Artificial Sequence: Synthetic oligonucleotide
gcugggacgugcgcgauga

SEQ ID NO: 297280 - RNA, 19 nt, Artificial Sequence
  Description of Artificial Sequence: Synthetic oligonucleotide
gcgcugaucaugccaaucu

SEQ ID NO: 297281 - RNA, 19 nt, Artificial Sequence
  Description of Artificial Sequence: Synthetic oligonucleotide
gcugauagacuaagccaca

SEQ ID NO: 297282 - RNA, 19 nt, Artificial Sequence
  Description of Artificial Sequence: Synthetic oligonucleotide
cugcggucauagacagauc

SEQ ID NO: 297283 - RNA, 19 nt, Artificial Sequence
  Description of Artificial Sequence: Synthetic oligonucleotide
cuuagcuguuccgccgcca

SEQ ID NO: 297284 - RNA, 19 nt, Artificial Sequence
  Description of Artificial Sequence: Synthetic oligonucleotide
gucgugggucuggaaguac

SEQ ID NO: 297285 - RNA, 19 nt, Artificial Sequence
  Description of Artificial Sequence: Synthetic oligonucleotide
acagcgccuuuggguuacc

SEQ ID NO: 297286 - RNA, 19 nt, Artificial Sequence
  Description of Artificial Sequence: Synthetic oligonucleotide
gaggcaugaccaaguugaa

SEQ ID NO: 297287 - RNA, 19 nt, Artificial Sequence
  Description of Artificial Sequence: Synthetic oligonucleotide
guacacgauccgcugcagu

SEQ ID NO: 297288 - RNA, 19 nt, Artificial Sequence
  Description of Artificial Sequence: Synthetic oligonucleotide
cucuggcgggcacggcgcc

SEQ ID NO: 297289 - RNA, 19 nt, Artificial Sequence
  Description of Artificial Sequence: Synthetic oligonucleotide
gguuacccacaaugaucac

SEQ ID NO: 297290 - RNA, 19 nt, Artificial Sequence
  Description of Artificial Sequence: Synthetic oligonucleotide
acgugcccgagcuggcgau

SEQ ID NO: 297291 - RNA, 19 nt, Artificial Sequence
  Description of Artificial Sequence: Synthetic oligonucleotide
acgauccgcugcagugacg

SEQ ID NO: 297292 - RNA, 19 nt, Artificial Sequence
  Description of Artificial Sequence: Synthetic oligonucleotide
ccucuggcgggcacggcgc

SEQ ID NO: 297293 - RNA, 19 nt, Artificial Sequence
  Description of Artificial Sequence: Synthetic oligonucleotide
ccgccaugcugguaugccc

SEQ ID NO: 297294 - RNA, 19 nt, Artificial Sequence
  Description of Artificial Sequence: Synthetic oligonucleotide
gcuuagcuguuccgccgcc

SEQ ID NO: 297295 - RNA, 19 nt, Artificial Sequence
  Description of Artificial Sequence: Synthetic oligonucleotide
cucuccucuccucuccucu

SEQ ID NO: 297296 - RNA, 19 nt, Artificial Sequence
  Description of Artificial Sequence: Synthetic oligonucleotide
gucccaccugaccgugaug

SEQ ID NO: 297297 - RNA, 19 nt, Artificial Sequence
  Description of Artificial Sequence: Synthetic oligonucleotide
gcguugacgcaggugugcc

SEQ ID NO: 297298 - RNA, 19 nt, Artificial Sequence
  Description of Artificial Sequence: Synthetic oligonucleotide
gugccacaucaaucuguga

SEQ ID NO: 297299 - RNA, 19 nt, Artificial Sequence
  Description of Artificial Sequence: Synthetic oligonucleotide
ggaacccgaugcccuggug

SEQ ID NO: 297300 - RNA, 19 nt, Artificial Sequence
  Description of Artificial Sequence: Synthetic oligonucleotide
gccacugcgggagguuggg

SEQ ID NO: 297301 - RNA, 19 nt, Artificial Sequence
  Description of Artificial Sequence: Synthetic oligonucleotide
ggacgugcccgagcuggcg

SEQ ID NO: 297302 - RNA, 19 nt, Artificial Sequence
  Description of Artificial Sequence: Synthetic oligonucleotide
cugcguugccucucuggaa

SEQ ID NO: 297303 - RNA, 19 nt, Artificial Sequence
  Description of Artificial Sequence: Synthetic oligonucleotide
cucuccucggcugcucaca

SEQ ID NO: 297304 - RNA, 19 nt, Artificial Sequence
  Description of Artificial Sequence: Synthetic oligonucleotide
gcgacaguccggccuuggc

SEQ ID NO: 297305 - RNA, 19 nt, Artificial Sequence
  Description of Artificial Sequence: Synthetic oligonucleotide
aggcgcucaaagagcgacu

SEQ ID NO: 297306 - RNA, 19 nt, Artificial Sequence
  Description of Artificial Sequence: Synthetic oligonucleotide
gccgcugaacugcauauau

SEQ ID NO: 297307 - RNA, 19 nt, Artificial Sequence
  Description of Artificial Sequence: Synthetic oligonucleotide
ccucaaucacgagaaacaa

SEQ ID NO: 297308 - RNA, 19 nt, Artificial Sequence
  Description of Artificial Sequence: Synthetic oligonucleotide
cagcgccuuuggguuaccc

SEQ ID NO: 297309 - RNA, 19 nt, Artificial Sequence
  Description of Artificial Sequence: Synthetic oligonucleotide
gaagaccccgcgggccaac

SEQ ID NO: 297310 - RNA, 19 nt, Artificial Sequence
  Description of Artificial Sequence: Synthetic oligonucleotide
ggcagagcgcccagcaauc

SEQ ID NO: 297311 - RNA, 19 nt, Artificial Sequence
  Description of Artificial Sequence: Synthetic oligonucleotide
ccacauagcuuagcuguuc

SEQ ID NO: 297312 - RNA, 19 nt, Artificial Sequence
  Description of Artificial Sequence: Synthetic oligonucleotide
gugugccuggguagggguc

SEQ ID NO: 297313 - RNA, 19 nt, Artificial Sequence
  Description of Artificial Sequence: Synthetic oligonucleotide
gguaggagcgcuggcccuc

SEQ ID NO: 297314 - RNA, 19 nt, Artificial Sequence
  Description of Artificial Sequence: Synthetic oligonucleotide
gaacagcgggccgguccug

SEQ ID NO: 297315 - RNA, 19 nt, Artificial Sequence
  Description of Artificial Sequence: Synthetic oligonucleotide
cugauagacuaagccacau

SEQ ID NO: 297316 - RNA, 19 nt, Artificial Sequence
  Description of Artificial Sequence: Synthetic oligonucleotide
gcggucauagacagaucca

SEQ ID NO: 297317 - RNA, 19 nt, Artificial Sequence
  Description of Artificial Sequence: Synthetic oligonucleotide
gacgcaggugugccugggu

SEQ ID NO: 297318 - RNA, 19 nt, Artificial Sequence
  Description of Artificial Sequence: Synthetic oligonucleotide
gggcgcccugggaaaaggg

SEQ ID NO: 297319 - RNA, 19 nt, Artificial Sequence
  Description of Artificial Sequence: Synthetic oligonucleotide
ugcccgagcuggcgaucuc

SEQ ID NO: 297320 - RNA, 19 nt, Artificial Sequence
  Description of Artificial Sequence: Synthetic oligonucleotide
ccgcucgggcacagaaacg

SEQ ID NO: 297321 - RNA, 19 nt, Artificial Sequence
  Description of Artificial Sequence: Synthetic oligonucleotide
cuccgucguccucccuggc

SEQ ID NO: 297322 - RNA, 19 nt, Artificial Sequence
  Description of Artificial Sequence: Synthetic oligonucleotide
cccggugaccccgccaugc

SEQ ID NO: 297323 - RNA, 19 nt, Artificial Sequence
  Description of Artificial Sequence: Synthetic oligonucleotide
ugcaggcgaaugggccgga

SEQ ID NO: 297324 - RNA, 19 nt, Artificial Sequence
  Description of Artificial Sequence: Synthetic oligonucleotide
cuccucucuccucuccucu

SEQ ID NO: 297325 - RNA, 19 nt, Artificial Sequence
  Description of Artificial Sequence: Synthetic oligonucleotide
cccgccaugcugguaugcc

SEQ ID NO: 297326 - RNA, 19 nt, Artificial Sequence
  Description of Artificial Sequence: Synthetic oligonucleotide
cguagccccucaaucacga

SEQ ID NO: 297327 - RNA, 19 nt, Artificial Sequence
  Description of Artificial Sequence: Synthetic oligonucleotide
cccagaauaagaugcugau

SEQ ID NO: 297328 - RNA, 19 nt, Artificial Sequence
  Description of Artificial Sequence: Synthetic oligonucleotide
uggucacgcucaggaguuc

SEQ ID NO: 297329 - RNA, 19 nt, Artificial Sequence
  Description of Artificial Sequence: Synthetic oligonucleotide
cucgggcacagaaacgcuu

SEQ ID NO: 297330 - RNA, 19 nt, Artificial Sequence
  Description of Artificial Sequence: Synthetic oligonucleotide
agccgcugaacugcauaua

SEQ ID NO: 297331 - RNA, 19 nt, Artificial Sequence
  Description of Artificial Sequence: Synthetic oligonucleotide
ccucgcagcggugcgggcc

SEQ ID NO: 297332 - RNA, 19 nt, Artificial Sequence
  Description of Artificial Sequence: Synthetic oligonucleotide
ggcguccacacuggcaauc

SEQ ID NO: 297333 - RNA, 19 nt, Artificial Sequence
  Description of Artificial Sequence: Synthetic oligonucleotide
gcaugcgguacugcaccug

SEQ ID NO: 297334 - RNA, 19 nt, Artificial Sequence
  Description of Artificial Sequence: Synthetic oligonucleotide
augagcccucguagaagau

SEQ ID NO: 297335 - RNA, 19 nt, Artificial Sequence
  Description of Artificial Sequence: Synthetic oligonucleotide
gcccgagcuggcgaucucc

SEQ ID NO: 297336 - RNA, 19 nt, Artificial Sequence
  Description of Artificial Sequence: Synthetic oligonucleotide
gcccucguagggugugaug

SEQ ID NO: 297337 - RNA, 19 nt, Artificial Sequence
  Description of Artificial Sequence: Synthetic oligonucleotide
gugcgggccucucuccucu

SEQ ID NO: 297338 - RNA, 19 nt, Artificial Sequence
  Description of Artificial Sequence: Synthetic oligonucleotide
ugguccggcuuggcaccug

SEQ ID NO: 297339 - RNA, 19 nt, Artificial Sequence
  Description of Artificial Sequence: Synthetic oligonucleotide
ggaagcccgaagcgguucu

SEQ ID NO: 297340 - RNA, 19 nt, Artificial Sequence
  Description of Artificial Sequence: Synthetic oligonucleotide
cugggacgugcgcgaugac

SEQ ID NO: 297341 - RNA, 19 nt, Artificial Sequence
  Description of Artificial Sequence: Synthetic oligonucleotide
gggguggcaugcgguacug

SEQ ID NO: 297342 - RNA, 19 nt, Artificial Sequence
  Description of Artificial Sequence: Synthetic oligonucleotide
guccggcuuggcaccugcc

SEQ ID NO: 297343 - RNA, 19 nt, Artificial Sequence
  Description of Artificial Sequence: Synthetic oligonucleotide
ggugcucauuggcgcgcac

SEQ ID NO: 297344 - RNA, 19 nt, Artificial Sequence
  Description of Artificial Sequence: Synthetic oligonucleotide
cucucuccucuccucuccu

SEQ ID NO: 297345 - RNA, 19 nt, Artificial Sequence
  Description of Artificial Sequence: Synthetic oligonucleotide
gggccgguccuggcgaggc

SEQ ID NO: 297346 - RNA, 19 nt, Artificial Sequence
  Description of Artificial Sequence: Synthetic oligonucleotide
gcgcgaugacgcuccuggc

SEQ ID NO: 297347 - RNA, 19 nt, Artificial Sequence
  Description of Artificial Sequence: Synthetic oligonucleotide
ggugugcagggagccgcug

SEQ ID NO: 297348 - RNA, 19 nt, Artificial Sequence
  Description of Artificial Sequence: Synthetic oligonucleotide
cucgcagcggugcgggccu

SEQ ID NO: 297349 - RNA, 19 nt, Artificial Sequence
  Description of Artificial Sequence: Synthetic oligonucleotide
gugcgcgaugacgcuccug

SEQ ID NO: 297350 - RNA, 19 nt, Artificial Sequence
  Description of Artificial Sequence: Synthetic oligonucleotide
cgcacgcaggacaggauga

SEQ ID NO: 297351 - RNA, 19 nt, Artificial Sequence
  Description of Artificial Sequence: Synthetic oligonucleotide
ggacgggaaggcggcugag

SEQ ID NO: 297352 - RNA, 19 nt, Artificial Sequence
  Description of Artificial Sequence: Synthetic oligonucleotide
gguaccccggccagcagcu

SEQ ID NO: 297353 - RNA, 19 nt, Artificial Sequence
  Description of Artificial Sequence: Synthetic oligonucleotide
gaaggccgauucucuucuu

SEQ ID NO: 297354 - RNA, 19 nt, Artificial Sequence
  Description of Artificial Sequence: Synthetic oligonucleotide
ccucuccucuccucuccuc

SEQ ID NO: 297355 - RNA, 19 nt, Artificial Sequence
  Description of Artificial Sequence: Synthetic oligonucleotide
ggaaggcggcugagcgcgg

SEQ ID NO: 297356 - RNA, 19 nt, Artificial Sequence
  Description of Artificial Sequence: Synthetic oligonucleotide
ggucccaccugaccgugau

SEQ ID NO: 297357 - RNA, 19 nt, Artificial Sequence
  Description of Artificial Sequence: Synthetic oligonucleotide
gcagagcgcccagcaauca

SEQ ID NO: 297358 - RNA, 19 nt, Artificial Sequence
  Description of Artificial Sequence: Synthetic oligonucleotide
cgcgggccaacacgcauug

SEQ ID NO: 297359 - RNA, 19 nt, Artificial Sequence
  Description of Artificial Sequence: Synthetic oligonucleotide
guaccccggccagcagcug

SEQ ID NO: 297360 - RNA, 19 nt, Artificial Sequence
  Description of Artificial Sequence: Synthetic oligonucleotide
ggcgcgcacgcaggacagg

SEQ ID NO: 297361 - RNA, 19 nt, Artificial Sequence
  Description of Artificial Sequence: Synthetic oligonucleotide
ggucgugggucuggaagua

SEQ ID NO: 297362 - RNA, 19 nt, Artificial Sequence
  Description of Artificial Sequence: Synthetic oligonucleotide
gcucauuggcgcgcacgca

SEQ ID NO: 297363 - RNA, 19 nt, Artificial Sequence
  Description of Artificial Sequence: Synthetic oligonucleotide
gcgcccugggaaaagggcu

SEQ ID NO: 297364 - RNA, 19 nt, Artificial Sequence
  Description of Artificial Sequence: Synthetic oligonucleotide
gugcccgagcuggcgaucu

SEQ ID NO: 297365 - RNA, 19 nt, Artificial Sequence
  Description of Artificial Sequence: Synthetic oligonucleotide
gugaccccgccaugcuggu

SEQ ID NO: 297366 - RNA, 19 nt, Artificial Sequence
  Description of Artificial Sequence: Synthetic oligonucleotide
guuggacgggaaggcggcu

SEQ ID NO: 297367 - RNA, 19 nt, Artificial Sequence
  Description of Artificial Sequence: Synthetic oligonucleotide
guuccgccgccaccuucua

SEQ ID NO: 297368 - RNA, 19 nt, Artificial Sequence
  Description of Artificial Sequence: Synthetic oligonucleotide
ggccggaugccagcaccac

SEQ ID NO: 297369 - RNA, 19 nt, Artificial Sequence
  Description of Artificial Sequence: Synthetic oligonucleotide
ccugaccgugauguuaucu

SEQ ID NO: 297370 - RNA, 19 nt, Artificial Sequence
  Description of Artificial Sequence: Synthetic oligonucleotide
gcccauuggccuguccaaa

SEQ ID NO: 297371 - RNA, 19 nt, Artificial Sequence
  Description of Artificial Sequence: Synthetic oligonucleotide
ggacgugcgcgaugacgcu

SEQ ID NO: 297372 - RNA, 19 nt, Artificial Sequence
  Description of Artificial Sequence: Synthetic oligonucleotide
ggucguucaggaacccgau

SEQ ID NO: 297373 - RNA, 19 nt, Artificial Sequence
  Description of Artificial Sequence: Synthetic oligonucleotide
gcgggccaacacgcauugg

SEQ ID NO: 297374 - RNA, 19 nt, Artificial Sequence
  Description of Artificial Sequence: Synthetic oligonucleotide
gaagcccgaagcgguucuu

SEQ ID NO: 297375 - RNA, 19 nt, Artificial Sequence
  Description of Artificial Sequence: Synthetic oligonucleotide
ccgugauguuaucuugagu

SEQ ID NO: 297376 - RNA, 19 nt, Artificial Sequence
  Description of Artificial Sequence: Synthetic oligonucleotide
gcggcaugggaggcaugac

SEQ ID NO: 297377 - RNA, 19 nt, Artificial Sequence
  Description of Artificial Sequence: Synthetic oligonucleotide
cacggcgccgggccggccu

SEQ ID NO: 297378 - RNA, 19 nt, Artificial Sequence
  Description of Artificial Sequence: Synthetic oligonucleotide
cggugaucccaggcugcgg

SEQ ID NO: 297379 - RNA, 19 nt, Artificial Sequence
  Description of Artificial Sequence: Synthetic oligonucleotide
gccucgcagcggugcgggc

SEQ ID NO: 297380 - RNA, 19 nt, Artificial Sequence
  Description of Artificial Sequence: Synthetic oligonucleotide
gcccggugaccccgccaug

SEQ ID NO: 297381 - RNA, 19 nt, Artificial Sequence
  Description of Artificial Sequence: Synthetic oligonucleotide
cugcgcugaucaugccaau

SEQ ID NO: 297382 - RNA, 19 nt, Artificial Sequence
  Description of Artificial Sequence: Synthetic oligonucleotide
gccccucaaucacgagaaa

SEQ ID NO: 297383 - RNA, 19 nt, Artificial Sequence
  Description of Artificial Sequence: Synthetic oligonucleotide
cgacugcgacaguccggcc

SEQ ID NO: 297384 - RNA, 19 nt, Artificial Sequence
  Description of Artificial Sequence: Synthetic oligonucleotide
gccgguccuggcgaggccu

SEQ ID NO: 297385 - RNA, 19 nt, Artificial Sequence
  Description of Artificial Sequence: Synthetic oligonucleotide
ccucguagggugugaugau

SEQ ID NO: 297386 - RNA, 19 nt, Artificial Sequence
  Description of Artificial Sequence: Synthetic oligonucleotide
cacggccagucuugcuuuu

SEQ ID NO: 297387 - RNA, 19 nt, Artificial Sequence
  Description of Artificial Sequence: Synthetic oligonucleotide
gcacgcaggacaggaugau

SEQ ID NO: 297388 - RNA, 19 nt, Artificial Sequence
  Description of Artificial Sequence: Synthetic oligonucleotide
ccacggccagucuugcuuu

SEQ ID NO: 297389 - RNA, 19 nt, Artificial Sequence
  Description of Artificial Sequence: Synthetic oligonucleotide
cugguccggcuuggcaccu

SEQ ID NO: 297390 - RNA, 19 nt, Artificial Sequence
  Description of Artificial Sequence: Synthetic oligonucleotide
ccggcuuggcaccugccuu

SEQ ID NO: 297391 - RNA, 19 nt, Artificial Sequence
  Description of Artificial Sequence: Synthetic oligonucleotide
cgcccgcucgggcacagaa

SEQ ID NO: 297392 - RNA, 19 nt, Artificial Sequence
  Description of Artificial Sequence: Synthetic oligonucleotide
cguugacgcaggugugccu

SEQ ID NO: 297393 - RNA, 19 nt, Artificial Sequence
  Description of Artificial Sequence: Synthetic oligonucleotide
gcggcggcaugggaggcau

SEQ ID NO: 297394 - RNA, 19 nt, Artificial Sequence
  Description of Artificial Sequence: Synthetic oligonucleotide
cgugcccgagcuggcgauc

SEQ ID NO: 297395 - RNA, 19 nt, Artificial Sequence
  Description of Artificial Sequence: Synthetic oligonucleotide
gcgcuggcccucguagggu

SEQ ID NO: 297396 - RNA, 19 nt, Artificial Sequence
  Description of Artificial Sequence: Synthetic oligonucleotide
cguugccucucuggaagcu

SEQ ID NO: 297397 - RNA, 19 nt, Artificial Sequence
  Description of Artificial Sequence: Synthetic oligonucleotide
gcgguucuucuggcguccu

SEQ ID NO: 297398 - RNA, 19 nt, Artificial Sequence
  Description of Artificial Sequence: Synthetic oligonucleotide
ccgcgggccaacacgcauu

SEQ ID NO: 297399 - RNA, 19 nt, Artificial Sequence
  Description of Artificial Sequence: Synthetic oligonucleotide
cggcggcaugggaggcaug

SEQ ID NO: 297400 - RNA, 19 nt, Artificial Sequence
  Description of Artificial Sequence: Synthetic oligonucleotide
cgcgcacgcaggacaggau

SEQ ID NO: 297401 - RNA, 19 nt, Artificial Sequence
  Description of Artificial Sequence: Synthetic oligonucleotide
gcgcugggacgugcgcgau

SEQ ID NO: 297402 - RNA, 19 nt, Artificial Sequence
  Description of Artificial Sequence: Synthetic oligonucleotide
cgugcgcgaugacgcuccu

SEQ ID NO: 297403 - RNA, 19 nt, Artificial Sequence
  Description of Artificial Sequence: Synthetic oligonucleotide
aauaaguugggguggguuc

SEQ ID NO: 297404 - RNA, 19 nt, Artificial Sequence
  Description of Artificial Sequence: Synthetic oligonucleotide
uggaaugucagguuuaaug

SEQ ID NO: 297405 - RNA, 19 nt, Artificial Sequence
  Description of Artificial Sequence: Synthetic oligonucleotide
aaguagucacagcucaggc

SEQ ID NO: 297406 - RNA, 19 nt, Artificial Sequence
  Description of Artificial Sequence: Synthetic oligonucleotide
uuauugaccuuccaggaug

SEQ ID NO: 297407 - RNA, 19 nt, Artificial Sequence
  Description of Artificial Sequence: Synthetic oligonucleotide
aauuacggcuccgaguugc

SEQ ID NO: 297408 - RNA, 19 nt, Artificial Sequence
  Description of Artificial Sequence: Synthetic oligonucleotide
guauucagccuccagaggg

SEQ ID NO: 297409 - RNA, 19 nt, Artificial Sequence
  Description of Artificial Sequence: Synthetic oligonucleotide
uuaguguucuuuauugacc

SEQ ID NO: 297410 - RNA, 19 nt, Artificial Sequence
  Description of Artificial Sequence: Synthetic oligonucleotide
uuaaugaguucuuaucacc

SEQ ID NO: 297411 - RNA, 19 nt, Artificial Sequence
  Description of Artificial Sequence: Synthetic oligonucleotide
ugcaacagaguuuaaauaa

SEQ ID NO: 297412 - RNA, 19 nt, Artificial Sequence
  Description of Artificial Sequence: Synthetic oligonucleotide
uucauucugacuccccucg

SEQ ID NO: 297413 - RNA, 19 nt, Artificial Sequence
  Description of Artificial Sequence: Synthetic oligonucleotide
ugaguauucagccuccaga

SEQ ID NO: 297414 - RNA, 19 nt, Artificial Sequence
  Description of Artificial Sequence: Synthetic oligonucleotide
agcauagguucuuugaauc

SEQ ID NO: 297415 - RNA, 19 nt, Artificial Sequence
  Description of Artificial Sequence: Synthetic oligonucleotide
uggguucuggagcagaggg

SEQ ID NO: 297416 - RNA, 19 nt, Artificial Sequence
  Description of Artificial Sequence: Synthetic oligonucleotide
uauacagccucacacugca

SEQ ID NO: 297417 - RNA, 19 nt, Artificial Sequence
  Description of Artificial Sequence: Synthetic oligonucleotide
ucacaacgcaacaugaaac

SEQ ID NO: 297418 - RNA, 19 nt, Artificial Sequence
  Description of Artificial Sequence: Synthetic oligonucleotide
uagaugagcaguccuagga

SEQ ID NO: 297419 - RNA, 19 nt, Artificial Sequence
  Description of Artificial Sequence: Synthetic oligonucleotide
uauugaccuuccaggaugg

SEQ ID NO: 297420 - RNA, 19 nt, Artificial Sequence
  Description of Artificial Sequence: Synthetic oligonucleotide
acuguauucccuaauuacg

SEQ ID NO: 297421 - RNA, 19 nt, Artificial Sequence
  Description of Artificial Sequence: Synthetic oligonucleotide
aagaugcaucuuugcaggc

SEQ ID NO: 297422 - RNA, 19 nt, Artificial Sequence
  Description of Artificial Sequence: Synthetic oligonucleotide
uugugaguuguucagguuc

SEQ ID NO: 297423 - RNA, 19 nt, Artificial Sequence
  Description of Artificial Sequence: Synthetic oligonucleotide
ucggaauucugacucauuc

SEQ ID NO: 297424 - RNA, 19 nt, Artificial Sequence
  Description of Artificial Sequence: Synthetic oligonucleotide
aacucuccggauccaacuc

SEQ ID NO: 297425 - RNA, 19 nt, Artificial Sequence
  Description of Artificial Sequence: Synthetic oligonucleotide
ugggaaacucuccggaucc

SEQ ID NO: 297426 - RNA, 19 nt, Artificial Sequence
  Description of Artificial Sequence: Synthetic oligonucleotide
auucccuaauuacggcucc

SEQ ID NO: 297427 - RNA, 19 nt, Artificial Sequence
  Description of Artificial Sequence: Synthetic oligonucleotide
ucuccaaaaugcugaaggc

SEQ ID NO: 297428 - RNA, 19 nt, Artificial Sequence
  Description of Artificial Sequence: Synthetic oligonucleotide
ugcuuugugaguuguucag

SEQ ID NO: 297429 - RNA, 19 nt, Artificial Sequence
  Description of Artificial Sequence: Synthetic oligonucleotide
agaugagcaguccuaggag

SEQ ID NO: 297430 - RNA, 19 nt, Artificial Sequence
  Description of Artificial Sequence: Synthetic oligonucleotide
gaccacguugcuuugugag

SEQ ID NO: 297431 - RNA, 19 nt, Artificial Sequence
  Description of Artificial Sequence: Synthetic oligonucleotide
ugagcauagguucuuugaa

SEQ ID NO: 297432 - RNA, 19 nt, Artificial Sequence
  Description of Artificial Sequence: Synthetic oligonucleotide
uuaucacccagguacacau

SEQ ID NO: 297433 - RNA, 19 nt, Artificial Sequence
  Description of Artificial Sequence: Synthetic oligonucleotide
agaguuuaaauaaguuggg

SEQ ID NO: 297434 - RNA, 19 nt, Artificial Sequence
  Description of Artificial Sequence: Synthetic oligonucleotide
acaccauuaagggagaccu

SEQ ID NO: 297435 - RNA, 19 nt, Artificial Sequence
  Description of Artificial Sequence: Synthetic oligonucleotide
uauucccuaauuacggcuc

SEQ ID NO: 297436 - RNA, 19 nt, Artificial Sequence
  Description of Artificial Sequence: Synthetic oligonucleotide
uuuauugaccuuccaggau

SEQ ID NO: 297437 - RNA, 19 nt, Artificial Sequence
  Description of Artificial Sequence: Synthetic oligonucleotide
ucggaaaugcagcugcaga

SEQ ID NO: 297438 - RNA, 19 nt, Artificial Sequence
  Description of Artificial Sequence: Synthetic oligonucleotide
uucgaucucuggaaaggcc

SEQ ID NO: 297439 - RNA, 19 nt, Artificial Sequence
  Description of Artificial Sequence: Synthetic oligonucleotide
guaaggguggccugcuugg

SEQ ID NO: 297440 - RNA, 19 nt, Artificial Sequence
  Description of Artificial Sequence: Synthetic oligonucleotide
guaguguaggacuggccgg

SEQ ID NO: 297441 - RNA, 19 nt, Artificial Sequence
  Description of Artificial Sequence: Synthetic oligonucleotide
gauuugguagggcaucuuc

SEQ ID NO: 297442 - RNA, 19 nt, Artificial Sequence
  Description of Artificial Sequence: Synthetic oligonucleotide
uuugggcauggaaugucag

SEQ ID NO: 297443 - RNA, 19 nt, Artificial Sequence
  Description of Artificial Sequence: Synthetic oligonucleotide
augugaaucggugagaguu

SEQ ID NO: 297444 - RNA, 19 nt, Artificial Sequence
  Description of Artificial Sequence: Synthetic oligonucleotide
acaacgcaacaugaaacac

SEQ ID NO: 297445 - RNA, 19 nt, Artificial Sequence
  Description of Artificial Sequence: Synthetic oligonucleotide
aauuuugggcauggaaugu

SEQ ID NO: 297446 - RNA, 19 nt, Artificial Sequence
  Description of Artificial Sequence: Synthetic oligonucleotide
aaccuguggcccugaggcc

SEQ ID NO: 297447 - RNA, 19 nt, Artificial Sequence
  Description of Artificial Sequence: Synthetic oligonucleotide
auauacagccucacacugc

SEQ ID NO: 297448 - RNA, 19 nt, Artificial Sequence
  Description of Artificial Sequence: Synthetic oligonucleotide
ugccguaugggagggagcg

SEQ ID NO: 297449 - RNA, 19 nt, Artificial Sequence
  Description of Artificial Sequence: Synthetic oligonucleotide
guugagggcaaugugaauc

SEQ ID NO: 297450 - RNA, 19 nt, Artificial Sequence
  Description of Artificial Sequence: Synthetic oligonucleotide
gguuuaaugaguucuuauc

SEQ ID NO: 297451 - RNA, 19 nt, Artificial Sequence
  Description of Artificial Sequence: Synthetic oligonucleotide
aacgcaacaugaaacacuu

SEQ ID NO: 297452 - RNA, 19 nt, Artificial Sequence
  Description of Artificial Sequence: Synthetic oligonucleotide
ugacuguauucccuaauua

SEQ ID NO: 297453 - RNA, 19 nt, Artificial Sequence
  Description of Artificial Sequence: Synthetic oligonucleotide
cucaccgcaguccagcaag

SEQ ID NO: 297454 - RNA, 19 nt, Artificial Sequence
  Description of Artificial Sequence: Synthetic oligonucleotide
uugcaacagaguuuaaaua

SEQ ID NO: 297455 - RNA, 19 nt, Artificial Sequence
  Description of Artificial Sequence: Synthetic oligonucleotide
aaauaaguugggguggguu

SEQ ID NO: 297456 - RNA, 19 nt, Artificial Sequence
  Description of Artificial Sequence: Synthetic oligonucleotide
uuguuugggaacuguccug

SEQ ID NO: 297457 - RNA, 19 nt, Artificial Sequence
  Description of Artificial Sequence: Synthetic oligonucleotide
aacucacaacgcaacauga

SEQ ID NO: 297458 - RNA, 19 nt, Artificial Sequence
  Description of Artificial Sequence: Synthetic oligonucleotide
uuccuuucgaucucuggaa

SEQ ID NO: 297459 - RNA, 19 nt, Artificial Sequence
  Description of Artificial Sequence: Synthetic oligonucleotide
ugugccguaugggagggag

SEQ ID NO: 297460 - RNA, 19 nt, Artificial Sequence
  Description of Artificial Sequence: Synthetic oligonucleotide
agauguuguccucaccgca

SEQ ID NO: 297461 - RNA, 19 nt, Artificial Sequence
  Description of Artificial Sequence: Synthetic oligonucleotide
agcaaaguagucacagcuc

SEQ ID NO: 297462 - RNA, 19 nt, Artificial Sequence
  Description of Artificial Sequence: Synthetic oligonucleotide
uggagacaccauuaaggga

SEQ ID NO: 297463 - RNA, 19 nt, Artificial Sequence
  Description of Artificial Sequence: Synthetic oligonucleotide
uggcaugcacggcucagag

SEQ ID NO: 297464 - RNA, 19 nt, Artificial Sequence
  Description of Artificial Sequence: Synthetic oligonucleotide
agccucauaggcgccaccc

SEQ ID NO: 297465 - RNA, 19 nt, Artificial Sequence
  Description of Artificial Sequence: Synthetic oligonucleotide
ugacaaguccugaguauuc

SEQ ID NO: 297466 - RNA, 19 nt, Artificial Sequence
  Description of Artificial Sequence: Synthetic oligonucleotide
ugcaguggcccaaacucac

SEQ ID NO: 297467 - RNA, 19 nt, Artificial Sequence
  Description of Artificial Sequence: Synthetic oligonucleotide
cacaacgcaacaugaaaca

SEQ ID NO: 297468 - RNA, 19 nt, Artificial Sequence
  Description of Artificial Sequence: Synthetic oligonucleotide
uggaggcuugagcugagcu

SEQ ID NO: 297469 - RNA, 19 nt, Artificial Sequence
  Description of Artificial Sequence: Synthetic oligonucleotide
gauggcuaggaugaugauc

SEQ ID NO: 297470 - RNA, 19 nt, Artificial Sequence
  Description of Artificial Sequence: Synthetic oligonucleotide
uccuaagucagggaugaaa

SEQ ID NO: 297471 - RNA, 19 nt, Artificial Sequence
  Description of Artificial Sequence: Synthetic oligonucleotide
uucugacuccccucgacgu

SEQ ID NO: 297472 - RNA, 19 nt, Artificial Sequence
  Description of Artificial Sequence: Synthetic oligonucleotide
gagaccacguugcuuugug

SEQ ID NO: 297473 - RNA, 19 nt, Artificial Sequence
  Description of Artificial Sequence: Synthetic oligonucleotide
cagaucaaccccaggcccc

SEQ ID NO: 297474 - RNA, 19 nt, Artificial Sequence
  Description of Artificial Sequence: Synthetic oligonucleotide
ucuuugugucuugaagaug

SEQ ID NO: 297475 - RNA, 19 nt, Artificial Sequence
  Description of Artificial Sequence: Synthetic oligonucleotide
gcauuucagaaccuguggc

SEQ ID NO: 297476 - RNA, 19 nt, Artificial Sequence
  Description of Artificial Sequence: Synthetic oligonucleotide
gauaagcagggucugggua

SEQ ID NO: 297477 - RNA, 19 nt, Artificial Sequence
  Description of Artificial Sequence: Synthetic oligonucleotide
ucucuuggcggugcagugg

SEQ ID NO: 297478 - RNA, 19 nt, Artificial Sequence
  Description of Artificial Sequence: Synthetic oligonucleotide
agggcauguguaaacgagg

SEQ ID NO: 297479 - RNA, 19 nt, Artificial Sequence
  Description of Artificial Sequence: Synthetic oligonucleotide
cuaauuacggcuccgaguu

SEQ ID NO: 297480 - RNA, 19 nt, Artificial Sequence
  Description of Artificial Sequence: Synthetic oligonucleotide
aacuccugccuggagccuc

SEQ ID NO: 297481 - RNA, 19 nt, Artificial Sequence
  Description of Artificial Sequence: Synthetic oligonucleotide
agcaucggccuuuguuugg

SEQ ID NO: 297482 - RNA, 19 nt, Artificial Sequence
  Description of Artificial Sequence: Synthetic oligonucleotide
acuaggucuggcuccauuu

SEQ ID NO: 297483 - RNA, 19 nt, Artificial Sequence
  Description of Artificial Sequence: Synthetic oligonucleotide
ugugaaucggugagaguuu

SEQ ID NO: 297484 - RNA, 19 nt, Artificial Sequence
  Description of Artificial Sequence: Synthetic oligonucleotide
ugguaguguaggacuggcc

SEQ ID NO: 297485 - RNA, 19 nt, Artificial Sequence
  Description of Artificial Sequence: Synthetic oligonucleotide
ucggccuuuguuugggaac

SEQ ID NO: 297486 - RNA, 19 nt, Artificial Sequence
  Description of Artificial Sequence: Synthetic oligonucleotide
aggacguagaugagcaguc

SEQ ID NO: 297487 - RNA, 19 nt, Artificial Sequence
  Description of Artificial Sequence: Synthetic oligonucleotide
auaaguugggguggguucu

SEQ ID NO: 297488 - RNA, 19 nt, Artificial Sequence
  Description of Artificial Sequence: Synthetic oligonucleotide
aguccugaguauucagccu

SEQ ID NO: 297489 - RNA, 19 nt, Artificial Sequence
  Description of Artificial Sequence: Synthetic oligonucleotide
uccuaggaguaagaggcca

SEQ ID NO: 297490 - RNA, 19 nt, Artificial Sequence
  Description of Artificial Sequence: Synthetic oligonucleotide
cuggauuguuuucuuugug

SEQ ID NO: 297491 - RNA, 19 nt, Artificial Sequence
  Description of Artificial Sequence: Synthetic oligonucleotide
uaugggagggagcguuuga

SEQ ID NO: 297492 - RNA, 19 nt, Artificial Sequence
  Description of Artificial Sequence: Synthetic oligonucleotide
aaccaugacuguauucccu

SEQ ID NO: 297493 - RNA, 19 nt, Artificial Sequence
  Description of Artificial Sequence: Synthetic oligonucleotide
ggaugaaaagagcccuagg

SEQ ID NO: 297494 - RNA, 19 nt, Artificial Sequence
  Description of Artificial Sequence: Synthetic oligonucleotide
gaugagcaguccuaggagu

SEQ ID NO: 297495 - RNA, 19 nt, Artificial Sequence
  Description of Artificial Sequence: Synthetic oligonucleotide
uauccgacucuugcucugg

SEQ ID NO: 297496 - RNA, 19 nt, Artificial Sequence
  Description of Artificial Sequence: Synthetic oligonucleotide
gcaugcacggcucagagaa

SEQ ID NO: 297497 - RNA, 19 nt, Artificial Sequence
  Description of Artificial Sequence: Synthetic oligonucleotide
gcauguguaaacgaggguc

SEQ ID NO: 297498 - RNA, 19 nt, Artificial Sequence
  Description of Artificial Sequence: Synthetic oligonucleotide
cuccggauccaacuccagg

SEQ ID NO: 297499 - RNA, 19 nt, Artificial Sequence
  Description of Artificial Sequence: Synthetic oligonucleotide
uaauuacggcuccgaguug

SEQ ID NO: 297500 - RNA, 19 nt, Artificial Sequence
  Description of Artificial Sequence: Synthetic oligonucleotide
ugugggaaacucuccggau

SEQ ID NO: 297501 - RNA, 19 nt, Artificial Sequence
  Description of Artificial Sequence: Synthetic oligonucleotide
cucacaacgcaacaugaaa

SEQ ID NO: 297502 - RNA, 19 nt, Artificial Sequence
  Description of Artificial Sequence: Synthetic oligonucleotide
ggcuauuggagcugccagg

SEQ ID NO: 297503 - RNA, 19 nt, Artificial Sequence
  Description of Artificial Sequence: Synthetic oligonucleotide
uguugcuacuguggccugg

SEQ ID NO: 297504 - RNA, 19 nt, Artificial Sequence
  Description of Artificial Sequence: Synthetic oligonucleotide
agggcaaugugaaucggug

SEQ ID NO: 297505 - RNA, 19 nt, Artificial Sequence
  Description of Artificial Sequence: Synthetic oligonucleotide
acugcaggcuaaauggcug

SEQ ID NO: 297506 - RNA, 19 nt, Artificial Sequence
  Description of Artificial Sequence: Synthetic oligonucleotide
cugagucccgucacccugg

SEQ ID NO: 297507 - RNA, 19 nt, Artificial Sequence
  Description of Artificial Sequence: Synthetic oligonucleotide
ccagacucggaaaugcagc

SEQ ID NO: 297508 - RNA, 19 nt, Artificial Sequence
  Description of Artificial Sequence: Synthetic oligonucleotide
agggagcguuugaagaagc

SEQ ID NO: 297509 - RNA, 19 nt, Artificial Sequence
  Description of Artificial Sequence: Synthetic oligonucleotide
acggcuccgaguugcuuuc

SEQ ID NO: 297510 - RNA, 19 nt, Artificial Sequence
  Description of Artificial Sequence: Synthetic oligonucleotide
ugggcagaacccaggucug

SEQ ID NO: 297511 - RNA, 19 nt, Artificial Sequence
  Description of Artificial Sequence: Synthetic oligonucleotide
ugaaucggugagaguuugu

SEQ ID NO: 297512 - RNA, 19 nt, Artificial Sequence
  Description of Artificial Sequence: Synthetic oligonucleotide
accacguugcuuugugagu

SEQ ID NO: 297513 - RNA, 19 nt, Artificial Sequence
  Description of Artificial Sequence: Synthetic oligonucleotide
uaguguaggacuggccgga

SEQ ID NO: 297514 - RNA, 19 nt, Artificial Sequence
  Description of Artificial Sequence: Synthetic oligonucleotide
guauucccuaauuacggcu

SEQ ID NO: 297515 - RNA, 19 nt, Artificial Sequence
  Description of Artificial Sequence: Synthetic oligonucleotide
uucccuaauuacggcuccg

SEQ ID NO: 297516 - RNA, 19 nt, Artificial Sequence
  Description of Artificial Sequence: Synthetic oligonucleotide
aacgaggguccuucacagu

SEQ ID NO: 297517 - RNA, 19 nt, Artificial Sequence
  Description of Artificial Sequence: Synthetic oligonucleotide
cauccuaagucagggauga

SEQ ID NO: 297518 - RNA, 19 nt, Artificial Sequence
  Description of Artificial Sequence: Synthetic oligonucleotide
ucuuaucacccagguacac

SEQ ID NO: 297519 - RNA, 19 nt, Artificial Sequence
  Description of Artificial Sequence: Synthetic oligonucleotide
agaugcaucuuugcaggcu

SEQ ID NO: 297520 - RNA, 19 nt, Artificial Sequence
  Description of Artificial Sequence: Synthetic oligonucleotide
guucccuggugucugacaa

SEQ ID NO: 297521 - RNA, 19 nt, Artificial Sequence
  Description of Artificial Sequence: Synthetic oligonucleotide
gugugggaaacucuccgga

SEQ ID NO: 297522 - RNA, 19 nt, Artificial Sequence
  Description of Artificial Sequence: Synthetic oligonucleotide
guguaaacgaggguccuuc

SEQ ID NO: 297523 - RNA, 19 nt, Artificial Sequence
  Description of Artificial Sequence: Synthetic oligonucleotide
acuccccucgacguggguc

SEQ ID NO: 297524 - RNA, 19 nt, Artificial Sequence
  Description of Artificial Sequence: Synthetic oligonucleotide
ucuccggauccaacuccag

SEQ ID NO: 297525 - RNA, 19 nt, Artificial Sequence
  Description of Artificial Sequence: Synthetic oligonucleotide
gguucccacggucacacac

SEQ ID NO: 297526 - RNA, 19 nt, Artificial Sequence
  Description of Artificial Sequence: Synthetic oligonucleotide
ggcaggauuugguagggca

SEQ ID NO: 297527 - RNA, 19 nt, Artificial Sequence
  Description of Artificial Sequence: Synthetic oligonucleotide
ugacuccccucgacguggg

SEQ ID NO: 297528 - RNA, 19 nt, Artificial Sequence
  Description of Artificial Sequence: Synthetic oligonucleotide
gugaaucggugagaguuug

SEQ ID NO: 297529 - RNA, 19 nt, Artificial Sequence
  Description of Artificial Sequence: Synthetic oligonucleotide
cagcaucggccuuuguuug

SEQ ID NO: 297530 - RNA, 19 nt, Artificial Sequence
  Description of Artificial Sequence: Synthetic oligonucleotide
gcuaaauggcugguguucc

SEQ ID NO: 297531 - RNA, 19 nt, Artificial Sequence
  Description of Artificial Sequence: Synthetic oligonucleotide
ccgacucuugcucugguag

SEQ ID NO: 297532 - RNA, 19 nt, Artificial Sequence
  Description of Artificial Sequence: Synthetic oligonucleotide
ccuaagucagggaugaaaa

SEQ ID NO: 297533 - RNA, 19 nt, Artificial Sequence
  Description of Artificial Sequence: Synthetic oligonucleotide
guucccacggucacacacc

SEQ ID NO: 297534 - RNA, 19 nt, Artificial Sequence
  Description of Artificial Sequence: Synthetic oligonucleotide
ucccuaauuacggcuccga

SEQ ID NO: 297535 - RNA, 19 nt, Artificial Sequence
  Description of Artificial Sequence: Synthetic oligonucleotide
caacgcaacaugaaacacu

SEQ ID NO: 297536 - RNA, 19 nt, Artificial Sequence
  Description of Artificial Sequence: Synthetic oligonucleotide
gaggacguagaugagcagu

SEQ ID NO: 297537 - RNA, 19 nt, Artificial Sequence
  Description of Artificial Sequence: Synthetic oligonucleotide
cucggaaaugcagcugcag

SEQ ID NO: 297538 - RNA, 19 nt, Artificial Sequence
  Description of Artificial Sequence: Synthetic oligonucleotide
gugagaguuugucucggaa

SEQ ID NO: 297539 - RNA, 19 nt, Artificial Sequence
  Description of Artificial Sequence: Synthetic oligonucleotide
ugguuaggguccugggcaa

SEQ ID NO: 297540 - RNA, 19 nt, Artificial Sequence
  Description of Artificial Sequence: Synthetic oligonucleotide
ucucggaauucugacucau

SEQ ID NO: 297541 - RNA, 19 nt, Artificial Sequence
  Description of Artificial Sequence: Synthetic oligonucleotide
ccacaaugggacaccauug

SEQ ID NO: 297542 - RNA, 19 nt, Artificial Sequence
  Description of Artificial Sequence: Synthetic oligonucleotide
aucggccuuuguuugggaa

SEQ ID NO: 297543 - RNA, 19 nt, Artificial Sequence
  Description of Artificial Sequence: Synthetic oligonucleotide
acggagagcgggaaggaga

SEQ ID NO: 297544 - RNA, 19 nt, Artificial Sequence
  Description of Artificial Sequence: Synthetic oligonucleotide
ugaggccguagaacuccug

SEQ ID NO: 297545 - RNA, 19 nt, Artificial Sequence
  Description of Artificial Sequence: Synthetic oligonucleotide
augucagguuuaaugaguu

SEQ ID NO: 297546 - RNA, 19 nt, Artificial Sequence
  Description of Artificial Sequence: Synthetic oligonucleotide
aggauuugguagggcaucu

SEQ ID NO: 297547 - RNA, 19 nt, Artificial Sequence
  Description of Artificial Sequence: Synthetic oligonucleotide
gauccacaaugggacacca

SEQ ID NO: 297548 - RNA, 19 nt, Artificial Sequence
  Description of Artificial Sequence: Synthetic oligonucleotide
cacggucacacaccagcug

SEQ ID NO: 297549 - RNA, 19 nt, Artificial Sequence
  Description of Artificial Sequence: Synthetic oligonucleotide
cacguugcuuugugaguug

SEQ ID NO: 297550 - RNA, 19 nt, Artificial Sequence
  Description of Artificial Sequence: Synthetic oligonucleotide
gugggucugugccagcauc

SEQ ID NO: 297551 - RNA, 19 nt, Artificial Sequence
  Description of Artificial Sequence: Synthetic oligonucleotide
agacucggaaaugcagcug

SEQ ID NO: 297552 - RNA, 19 nt, Artificial Sequence
  Description of Artificial Sequence: Synthetic oligonucleotide
guaugggagggagcguuug

SEQ ID NO: 297553 - RNA, 19 nt, Artificial Sequence
  Description of Artificial Sequence: Synthetic oligonucleotide
cccagacucggaaaugcag

SEQ ID NO: 297554 - RNA, 19 nt, Artificial Sequence
  Description of Artificial Sequence: Synthetic oligonucleotide
gacucauuccugagguaga

SEQ ID NO: 297555 - RNA, 19 nt, Artificial Sequence
  Description of Artificial Sequence: Synthetic oligonucleotide
aggcaggauuugguagggc

SEQ ID NO: 297556 - RNA, 19 nt, Artificial Sequence
  Description of Artificial Sequence: Synthetic oligonucleotide
ggaucaggagucugggauc

SEQ ID NO: 297557 - RNA, 19 nt, Artificial Sequence
  Description of Artificial Sequence: Synthetic oligonucleotide
auguguaaacgaggguccu

SEQ ID NO: 297558 - RNA, 19 nt, Artificial Sequence
  Description of Artificial Sequence: Synthetic oligonucleotide
caccauuaagggagaccug

SEQ ID NO: 297559 - RNA, 19 nt, Artificial Sequence
  Description of Artificial Sequence: Synthetic oligonucleotide
cagugaaccgaaggccacc

SEQ ID NO: 297560 - RNA, 19 nt, Artificial Sequence
  Description of Artificial Sequence: Synthetic oligonucleotide
cucuccggauccaacucca

SEQ ID NO: 297561 - RNA, 19 nt, Artificial Sequence
  Description of Artificial Sequence: Synthetic oligonucleotide
uguguaaacgaggguccuu

SEQ ID NO: 297562 - RNA, 19 nt, Artificial Sequence
  Description of Artificial Sequence: Synthetic oligonucleotide
aggagaccacguugcuuug

SEQ ID NO: 297563 - RNA, 19 nt, Artificial Sequence
  Description of Artificial Sequence: Synthetic oligonucleotide
acucacaacgcaacaugaa

SEQ ID NO: 297564 - RNA, 19 nt, Artificial Sequence
  Description of Artificial Sequence: Synthetic oligonucleotide
ggagggagcguuugaagaa

SEQ ID NO: 297565 - RNA, 19 nt, Artificial Sequence
  Description of Artificial Sequence: Synthetic oligonucleotide
ggucuuggcccagacucgg

SEQ ID NO: 297566 - RNA, 19 nt, Artificial Sequence
  Description of Artificial Sequence: Synthetic oligonucleotide
ugggguccaaggagaaguu

SEQ ID NO: 297567 - RNA, 19 nt, Artificial Sequence
  Description of Artificial Sequence: Synthetic oligonucleotide
ggagcguuugaagaagcca

SEQ ID NO: 297568 - RNA, 19 nt, Artificial Sequence
  Description of Artificial Sequence: Synthetic oligonucleotide
ggcuaaauggcugguguuc

SEQ ID NO: 297569 - RNA, 19 nt, Artificial Sequence
  Description of Artificial Sequence: Synthetic oligonucleotide
agaucaaccccaggcccca

SEQ ID NO: 297570 - RNA, 19 nt, Artificial Sequence
  Description of Artificial Sequence: Synthetic oligonucleotide
cugccgaggcaggauuugg

SEQ ID NO: 297571 - RNA, 19 nt, Artificial Sequence
  Description of Artificial Sequence: Synthetic oligonucleotide
cuuugggguccaaggagaa

SEQ ID NO: 297572 - RNA, 19 nt, Artificial Sequence
  Description of Artificial Sequence: Synthetic oligonucleotide
ccguagaacuccugccugg

SEQ ID NO: 297573 - RNA, 19 nt, Artificial Sequence
  Description of Artificial Sequence: Synthetic oligonucleotide
ugcaggcuaaauggcuggu

SEQ ID NO: 297574 - RNA, 19 nt, Artificial Sequence
  Description of Artificial Sequence: Synthetic oligonucleotide
ccugaggccguagaacucc

SEQ ID NO: 297575 - RNA, 19 nt, Artificial Sequence
  Description of Artificial Sequence: Synthetic oligonucleotide
agaaaggucuuggcccaga

SEQ ID NO: 297576 - RNA, 19 nt, Artificial Sequence
  Description of Artificial Sequence: Synthetic oligonucleotide
ugagucccgucacccuggu

SEQ ID NO: 297577 - RNA, 19 nt, Artificial Sequence
  Description of Artificial Sequence: Synthetic oligonucleotide
auacuggugccugccuuca

SEQ ID NO: 297578 - RNA, 19 nt, Artificial Sequence
  Description of Artificial Sequence: Synthetic oligonucleotide
gccguagaacuccugccug

SEQ ID NO: 297579 - RNA, 19 nt, Artificial Sequence
  Description of Artificial Sequence: Synthetic oligonucleotide
aguguaggacuggccggag

SEQ ID NO: 297580 - RNA, 19 nt, Artificial Sequence
  Description of Artificial Sequence: Synthetic oligonucleotide
gucucggaauucugacuca

SEQ ID NO: 297581 - RNA, 19 nt, Artificial Sequence
  Description of Artificial Sequence: Synthetic oligonucleotide
ucccacggucacacaccag

SEQ ID NO: 297582 - RNA, 19 nt, Artificial Sequence
  Description of Artificial Sequence: Synthetic oligonucleotide
gcaucggccuuuguuuggg

SEQ ID NO: 297583 - RNA, 19 nt, Artificial Sequence
  Description of Artificial Sequence: Synthetic oligonucleotide
uggcuaggaugaugaucca

SEQ ID NO: 297584 - RNA, 19 nt, Artificial Sequence
  Description of Artificial Sequence: Synthetic oligonucleotide
gaacagcgcccgccgaauc

SEQ ID NO: 297585 - RNA, 19 nt, Artificial Sequence
  Description of Artificial Sequence: Synthetic oligonucleotide
cuacuguggccugguuagg

SEQ ID NO: 297586 - RNA, 19 nt, Artificial Sequence
  Description of Artificial Sequence: Synthetic oligonucleotide
cagacucggaaaugcagcu

SEQ ID NO: 297587 - RNA, 19 nt, Artificial Sequence
  Description of Artificial Sequence: Synthetic oligonucleotide
cacggagagcgggaaggag

SEQ ID NO: 297588 - RNA, 19 nt, Artificial Sequence
  Description of Artificial Sequence: Synthetic oligonucleotide
cuuggcccagacucggaaa

SEQ ID NO: 297589 - RNA, 19 nt, Artificial Sequence
  Description of Artificial Sequence: Synthetic oligonucleotide
gggcaaugugaaucgguga

SEQ ID NO: 297590 - RNA, 19 nt, Artificial Sequence
  Description of Artificial Sequence: Synthetic oligonucleotide
ccaucauuaguguucuuua

SEQ ID NO: 297591 - RNA, 19 nt, Artificial Sequence
  Description of Artificial Sequence: Synthetic oligonucleotide
cccuaauuacggcuccgag

SEQ ID NO: 297592 - RNA, 19 nt, Artificial Sequence
  Description of Artificial Sequence: Synthetic oligonucleotide
ccgaguugcuuucauaaaa

SEQ ID NO: 297593 - RNA, 19 nt, Artificial Sequence
  Description of Artificial Sequence: Synthetic oligonucleotide
ccggauccaacuccaggcc

SEQ ID NO: 297594 - RNA, 19 nt, Artificial Sequence
  Description of Artificial Sequence: Synthetic oligonucleotide
ggaaaggccaaagaugcau

SEQ ID NO: 297595 - RNA, 19 nt, Artificial Sequence
  Description of Artificial Sequence: Synthetic oligonucleotide
gucccgucacccuggucac

SEQ ID NO: 297596 - RNA, 19 nt, Artificial Sequence
  Description of Artificial Sequence: Synthetic oligonucleotide
ggacguagaugagcagucc

SEQ ID NO: 297597 - RNA, 19 nt, Artificial Sequence
  Description of Artificial Sequence: Synthetic oligonucleotide
gugcaguugcugagucccg

SEQ ID NO: 297598 - RNA, 19 nt, Artificial Sequence
  Description of Artificial Sequence: Synthetic oligonucleotide
ggcagaacccaggucuggc

SEQ ID NO: 297599 - RNA, 19 nt, Artificial Sequence
  Description of Artificial Sequence: Synthetic oligonucleotide
auccgugagagggcaugug

SEQ ID NO: 297600 - RNA, 19 nt, Artificial Sequence
  Description of Artificial Sequence: Synthetic oligonucleotide
auuacggcuccgaguugcu

SEQ ID NO: 297601 - RNA, 19 nt, Artificial Sequence
  Description of Artificial Sequence: Synthetic oligonucleotide
ggcuaggaugaugauccac

SEQ ID NO: 297602 - RNA, 19 nt, Artificial Sequence
  Description of Artificial Sequence: Synthetic oligonucleotide
caggaucaggagucuggga

SEQ ID NO: 297603 - RNA, 19 nt, Artificial Sequence
  Description of Artificial Sequence: Synthetic oligonucleotide
ccuaauuacggcuccgagu

SEQ ID NO: 297604 - RNA, 19 nt, Artificial Sequence
  Description of Artificial Sequence: Synthetic oligonucleotide
gggucugugccagcaucgg

SEQ ID NO: 297605 - RNA, 19 nt, Artificial Sequence
  Description of Artificial Sequence: Synthetic oligonucleotide
caugacuguauucccuaau

SEQ ID NO: 297606 - RNA, 19 nt, Artificial Sequence
  Description of Artificial Sequence: Synthetic oligonucleotide
ggcuuggagacaccauuaa

SEQ ID NO: 297607 - RNA, 19 nt, Artificial Sequence
  Description of Artificial Sequence: Synthetic oligonucleotide
gcaaugugaaucggugaga

SEQ ID NO: 297608 - RNA, 19 nt, Artificial Sequence
  Description of Artificial Sequence: Synthetic oligonucleotide
gguggcaugcacggcucag

SEQ ID NO: 297609 - RNA, 19 nt, Artificial Sequence
  Description of Artificial Sequence: Synthetic oligonucleotide
ggugagaguuugucucgga

SEQ ID NO: 297610 - RNA, 19 nt, Artificial Sequence
  Description of Artificial Sequence: Synthetic oligonucleotide
uacuggugccugccuucau

SEQ ID NO: 297611 - RNA, 19 nt, Artificial Sequence
  Description of Artificial Sequence: Synthetic oligonucleotide
gcagaacccaggucuggca

SEQ ID NO: 297612 - RNA, 19 nt, Artificial Sequence
  Description of Artificial Sequence: Synthetic oligonucleotide
gcaggcuaaauggcuggug

SEQ ID NO: 297613 - RNA, 19 nt, Artificial Sequence
  Description of Artificial Sequence: Synthetic oligonucleotide
cugugacccgaagcucagc

SEQ ID NO: 297614 - RNA, 19 nt, Artificial Sequence
  Description of Artificial Sequence: Synthetic oligonucleotide
cuccccucgacgugggucu

SEQ ID NO: 297615 - RNA, 19 nt, Artificial Sequence
  Description of Artificial Sequence: Synthetic oligonucleotide
cggauccaacuccaggccc

SEQ ID NO: 297616 - RNA, 19 nt, Artificial Sequence
  Description of Artificial Sequence: Synthetic oligonucleotide
cagccucauaggcgccacc

SEQ ID NO: 297617 - RNA, 19 nt, Artificial Sequence
  Description of Artificial Sequence: Synthetic oligonucleotide
guggcaugcacggcucaga

SEQ ID NO: 297618 - RNA, 19 nt, Artificial Sequence
  Description of Artificial Sequence: Synthetic oligonucleotide
ggcccugaggccguagaac

SEQ ID NO: 297619 - RNA, 19 nt, Artificial Sequence
  Description of Artificial Sequence: Synthetic oligonucleotide
gcaguugcugagucccguc

SEQ ID NO: 297620 - RNA, 19 nt, Artificial Sequence
  Description of Artificial Sequence: Synthetic oligonucleotide
gugccguaugggagggagc

SEQ ID NO: 297621 - RNA, 19 nt, Artificial Sequence
  Description of Artificial Sequence: Synthetic oligonucleotide
acgcaacaugaaacacuug

SEQ ID NO: 297622 - RNA, 19 nt, Artificial Sequence
  Description of Artificial Sequence: Synthetic oligonucleotide
uuacggcuccgaguugcuu

SEQ ID NO: 297623 - RNA, 19 nt, Artificial Sequence
  Description of Artificial Sequence: Synthetic oligonucleotide
cugacucauuccugaggua

SEQ ID NO: 297624 - RNA, 19 nt, Artificial Sequence
  Description of Artificial Sequence: Synthetic oligonucleotide
gcccugaggccguagaacu

SEQ ID NO: 297625 - RNA, 19 nt, Artificial Sequence
  Description of Artificial Sequence: Synthetic oligonucleotide
cccuucaaguaugucucug

SEQ ID NO: 297626 - RNA, 19 nt, Artificial Sequence
  Description of Artificial Sequence: Synthetic oligonucleotide
ccauccgugagagggcaug

SEQ ID NO: 297627 - RNA, 19 nt, Artificial Sequence
  Description of Artificial Sequence: Synthetic oligonucleotide
ggaaacucuccggauccaa

SEQ ID NO: 297628 - RNA, 19 nt, Artificial Sequence
  Description of Artificial Sequence: Synthetic oligonucleotide
cagcugacccaaaugccau

SEQ ID NO: 297629 - RNA, 19 nt, Artificial Sequence
  Description of Artificial Sequence: Synthetic oligonucleotide
caucggccuuuguuuggga

SEQ ID NO: 297630 - RNA, 19 nt, Artificial Sequence
  Description of Artificial Sequence: Synthetic oligonucleotide
cuggccggaggccauggcu

SEQ ID NO: 297631 - RNA, 19 nt, Artificial Sequence
  Description of Artificial Sequence: Synthetic oligonucleotide
gggucugugagcauagguu

SEQ ID NO: 297632 - RNA, 19 nt, Artificial Sequence
  Description of Artificial Sequence: Synthetic oligonucleotide
cuaggucuggcuccauuuu

SEQ ID NO: 297633 - RNA, 19 nt, Artificial Sequence
  Description of Artificial Sequence: Synthetic oligonucleotide
ggcauguguaaacgagggu

SEQ ID NO: 297634 - RNA, 19 nt, Artificial Sequence
  Description of Artificial Sequence: Synthetic oligonucleotide
gggguuuauugcacuugca

SEQ ID NO: 297635 - RNA, 19 nt, Artificial Sequence
  Description of Artificial Sequence: Synthetic oligonucleotide
gcccaaacucacaacgcaa

SEQ ID NO: 297636 - RNA, 19 nt, Artificial Sequence
  Description of Artificial Sequence: Synthetic oligonucleotide
gcugccgaggcaggauuug

SEQ ID NO: 297637 - RNA, 19 nt, Artificial Sequence
  Description of Artificial Sequence: Synthetic oligonucleotide
ccagcaucggccuuuguuu

SEQ ID NO: 297638 - RNA, 19 nt, Artificial Sequence
  Description of Artificial Sequence: Synthetic oligonucleotide
ugccagcaucggccuuugu

SEQ ID NO: 297639 - RNA, 19 nt, Artificial Sequence
  Description of Artificial Sequence: Synthetic oligonucleotide
agcugccgaggcaggauuu

SEQ ID NO: 297640 - RNA, 19 nt, Artificial Sequence
  Description of Artificial Sequence: Synthetic oligonucleotide
cgugagagggcauguguaa

SEQ ID NO: 297641 - RNA, 19 nt, Artificial Sequence
  Description of Artificial Sequence: Synthetic oligonucleotide
uccccucgacgugggucug

SEQ ID NO: 297642 - RNA, 19 nt, Artificial Sequence
  Description of Artificial Sequence: Synthetic oligonucleotide
cccugaggccguagaacuc

SEQ ID NO: 297643 - RNA, 19 nt, Artificial Sequence
  Description of Artificial Sequence: Synthetic oligonucleotide
cggugagaguuugucucgg

SEQ ID NO: 297644 - RNA, 19 nt, Artificial Sequence
  Description of Artificial Sequence: Synthetic oligonucleotide
ccgugagagggcaugugua

SEQ ID NO: 297645 - RNA, 19 nt, Artificial Sequence
  Description of Artificial Sequence: Synthetic oligonucleotide
auccuaagucagggaugaa

SEQ ID NO: 297646 - RNA, 19 nt, Artificial Sequence
  Description of Artificial Sequence: Synthetic oligonucleotide
cgagcaccauucuggauaa

SEQ ID NO: 297647 - RNA, 19 nt, Artificial Sequence
  Description of Artificial Sequence: Synthetic oligonucleotide
cucggaauucugacucauu

SEQ ID NO: 297648 - RNA, 19 nt, Artificial Sequence
  Description of Artificial Sequence: Synthetic oligonucleotide
ccaugacuguauucccuaa

SEQ ID NO: 297649 - RNA, 19 nt, Artificial Sequence
  Description of Artificial Sequence: Synthetic oligonucleotide
gggaaacucuccggaucca

SEQ ID NO: 297650 - RNA, 19 nt, Artificial Sequence
  Description of Artificial Sequence: Synthetic oligonucleotide
cacuugcaacagaguuuaa

SEQ ID NO: 297651 - RNA, 19 nt, Artificial Sequence
  Description of Artificial Sequence: Synthetic oligonucleotide
cauccgugagagggcaugu

SEQ ID NO: 297652 - RNA, 19 nt, Artificial Sequence
  Description of Artificial Sequence: Synthetic oligonucleotide
agacuaggucuggcuccau

SEQ ID NO: 297653 - RNA, 19 nt, Artificial Sequence
  Description of Artificial Sequence: Synthetic oligonucleotide
ccggcucucuuggcggugc

SEQ ID NO: 297654 - RNA, 19 nt, Artificial Sequence
  Description of Artificial Sequence: Synthetic oligonucleotide
ggauggcuaggaugaugau

SEQ ID NO: 297655 - RNA, 19 nt, Artificial Sequence
  Description of Artificial Sequence: Synthetic oligonucleotide
cccucgacgugggucugug

SEQ ID NO: 297656 - RNA, 19 nt, Artificial Sequence
  Description of Artificial Sequence: Synthetic oligonucleotide
ccggcuugguucacagcaa

SEQ ID NO: 297657 - RNA, 19 nt, Artificial Sequence
  Description of Artificial Sequence: Synthetic oligonucleotide
gcccuucaaguaugucucu

SEQ ID NO: 297658 - RNA, 19 nt, Artificial Sequence
  Description of Artificial Sequence: Synthetic oligonucleotide
ggaacagcgcccgccgaau

SEQ ID NO: 297659 - RNA, 19 nt, Artificial Sequence
  Description of Artificial Sequence: Synthetic oligonucleotide
ggcuccgaguugcuuucau

SEQ ID NO: 297660 - RNA, 19 nt, Artificial Sequence
  Description of Artificial Sequence: Synthetic oligonucleotide
gggacaccauugcugccuu

SEQ ID NO: 297661 - RNA, 19 nt, Artificial Sequence
  Description of Artificial Sequence: Synthetic oligonucleotide
cugugccguaugggaggga

SEQ ID NO: 297662 - RNA, 19 nt, Artificial Sequence
  Description of Artificial Sequence: Synthetic oligonucleotide
ccucaccgcaguccagcaa

SEQ ID NO: 297663 - RNA, 19 nt, Artificial Sequence
  Description of Artificial Sequence: Synthetic oligonucleotide
ggauuugguagggcaucuu

SEQ ID NO: 297664 - RNA, 19 nt, Artificial Sequence
  Description of Artificial Sequence: Synthetic oligonucleotide
caccgcaguccagcaagau

SEQ ID NO: 297665 - RNA, 19 nt, Artificial Sequence
  Description of Artificial Sequence: Synthetic oligonucleotide
cagcgcccgccgaaucccu

SEQ ID NO: 297666 - RNA, 19 nt, Artificial Sequence
  Description of Artificial Sequence: Synthetic oligonucleotide
ccguaugggagggagcguu

SEQ ID NO: 297667 - RNA, 19 nt, Artificial Sequence
  Description of Artificial Sequence: Synthetic oligonucleotide
cggccuuuguuugggaacu

SEQ ID NO: 297668 - RNA, 19 nt, Artificial Sequence
  Description of Artificial Sequence: Synthetic oligonucleotide
gccguaugggagggagcgu

SEQ ID NO: 297669 - RNA, 19 nt, Artificial Sequence
  Description of Artificial Sequence: Synthetic oligonucleotide
cguaugggagggagcguuu

SEQ ID NO: 297670 - RNA, 19 nt, Artificial Sequence
  Description of Artificial Sequence: Synthetic oligonucleotide
cccauccgugagagggcau

SEQ ID NO: 297671 - RNA, 19 nt, Artificial Sequence
  Description of Artificial Sequence: Synthetic oligonucleotide
ccccucgacgugggucugu

SEQ ID NO: 297672 - RNA, 19 nt, Artificial Sequence
  Description of Artificial Sequence: Synthetic oligonucleotide
agaccuauaaaauaacucc

SEQ ID NO: 297673 - RNA, 19 nt, Artificial Sequence
  Description of Artificial Sequence: Synthetic oligonucleotide
aaauauuagaaaaggaggg

SEQ ID NO: 297674 - RNA, 19 nt, Artificial Sequence
  Description of Artificial Sequence: Synthetic oligonucleotide
aacucuuuaggacacacuc

SEQ ID NO: 297675 - RNA, 19 nt, Artificial Sequence
  Description of Artificial Sequence: Synthetic oligonucleotide
aaaccuaccacagugggcc

SEQ ID NO: 297676 - RNA, 19 nt, Artificial Sequence
  Description of Artificial Sequence: Synthetic oligonucleotide
ucuuauuugauguucaaca

SEQ ID NO: 297677 - RNA, 19 nt, Artificial Sequence
  Description of Artificial Sequence: Synthetic oligonucleotide
uuauauuuagccuucuucu

SEQ ID NO: 297678 - RNA, 19 nt, Artificial Sequence
  Description of Artificial Sequence: Synthetic oligonucleotide
ucuaagugaaaacauucca

SEQ ID NO: 297679 - RNA, 19 nt, Artificial Sequence
  Description of Artificial Sequence: Synthetic oligonucleotide
aaaugggaggaacacaugu

SEQ ID NO: 297680 - RNA, 19 nt, Artificial Sequence
  Description of Artificial Sequence: Synthetic oligonucleotide
agggcauucaaacaagagg

SEQ ID NO: 297681 - RNA, 19 nt, Artificial Sequence
  Description of Artificial Sequence: Synthetic oligonucleotide
ucguugacagcucagagcu

SEQ ID NO: 297682 - RNA, 19 nt, Artificial Sequence
  Description of Artificial Sequence: Synthetic oligonucleotide
auuuuagucucauuccauc

SEQ ID NO: 297683 - RNA, 19 nt, Artificial Sequence
  Description of Artificial Sequence: Synthetic oligonucleotide
uacaaauucaaguggggug

SEQ ID NO: 297684 - RNA, 19 nt, Artificial Sequence
  Description of Artificial Sequence: Synthetic oligonucleotide
uguauucuuuguaugcugc

SEQ ID NO: 297685 - RNA, 19 nt, Artificial Sequence
  Description of Artificial Sequence: Synthetic oligonucleotide
guucguagcagcuggaggg

SEQ ID NO: 297686 - RNA, 19 nt, Artificial Sequence
  Description of Artificial Sequence: Synthetic oligonucleotide
acacacacacaccacauuc

SEQ ID NO: 297687 - RNA, 19 nt, Artificial Sequence
  Description of Artificial Sequence: Synthetic oligonucleotide
uuuagucucauuccauccc

SEQ ID NO: 297688 - RNA, 19 nt, Artificial Sequence
  Description of Artificial Sequence: Synthetic oligonucleotide
uuuuagucucauuccaucc

SEQ ID NO: 297689 - RNA, 19 nt, Artificial Sequence
  Description of Artificial Sequence: Synthetic oligonucleotide
cuagacuuaggauuugggc

SEQ ID NO: 297690 - RNA, 19 nt, Artificial Sequence
  Description of Artificial Sequence: Synthetic oligonucleotide
aauauuagaaaaggaggga

SEQ ID NO: 297691 - RNA, 19 nt, Artificial Sequence
  Description of Artificial Sequence: Synthetic oligonucleotide
gagacggcagccgagaucg

SEQ ID NO: 297692 - RNA, 19 nt, Artificial Sequence
  Description of Artificial Sequence: Synthetic oligonucleotide
uuaggaaacgucucguuga

SEQ ID NO: 297693 - RNA, 19 nt, Artificial Sequence
  Description of Artificial Sequence: Synthetic oligonucleotide
aaauguacccugggcaacc

SEQ ID NO: 297694 - RNA, 19 nt, Artificial Sequence
  Description of Artificial Sequence: Synthetic oligonucleotide
aacuccuuaaauauuagaa

SEQ ID NO: 297695 - RNA, 19 nt, Artificial Sequence
  Description of Artificial Sequence: Synthetic oligonucleotide
agucguuccacaugcgggc

SEQ ID NO: 297696 - RNA, 19 nt, Artificial Sequence
  Description of Artificial Sequence: Synthetic oligonucleotide
uccacacacacacacacac

SEQ ID NO: 297697 - RNA, 19 nt, Artificial Sequence
  Description of Artificial Sequence: Synthetic oligonucleotide
uccgacuuagacugcaggg

SEQ ID NO: 297698 - RNA, 19 nt, Artificial Sequence
  Description of Artificial Sequence: Synthetic oligonucleotide
ugagaccuauaaaauaacu

SEQ ID NO: 297699 - RNA, 19 nt, Artificial Sequence
  Description of Artificial Sequence: Synthetic oligonucleotide
ucagcucgcucucugagag

SEQ ID NO: 297700 - RNA, 19 nt, Artificial Sequence
  Description of Artificial Sequence: Synthetic oligonucleotide
ucgguuaggaaacgucucg

SEQ ID NO: 297701 - RNA, 19 nt, Artificial Sequence
  Description of Artificial Sequence: Synthetic oligonucleotide
aggcucuugacccagaggu

SEQ ID NO: 297702 - RNA, 19 nt, Artificial Sequence
  Description of Artificial Sequence: Synthetic oligonucleotide
aaucucuaccaugcgcucc

SEQ ID NO: 297703 - RNA, 19 nt, Artificial Sequence
  Description of Artificial Sequence: Synthetic oligonucleotide
uuacguuuauuggagaugu

SEQ ID NO: 297704 - RNA, 19 nt, Artificial Sequence
  Description of Artificial Sequence: Synthetic oligonucleotide
ucuccacacacacacacac

SEQ ID NO: 297705 - RNA, 19 nt, Artificial Sequence
  Description of Artificial Sequence: Synthetic oligonucleotide
agauagucuccaaugacac

SEQ ID NO: 297706 - RNA, 19 nt, Artificial Sequence
  Description of Artificial Sequence: Synthetic oligonucleotide
ugcuaaaauguacccuggg

SEQ ID NO: 297707 - RNA, 19 nt, Artificial Sequence
  Description of Artificial Sequence: Synthetic oligonucleotide
uuuauuggagauguauucu

SEQ ID NO: 297708 - RNA, 19 nt, Artificial Sequence
  Description of Artificial Sequence: Synthetic oligonucleotide
cauguugcguucaaaguug

SEQ ID NO: 297709 - RNA, 19 nt, Artificial Sequence
  Description of Artificial Sequence: Synthetic oligonucleotide
uuagucucauuccauccca

SEQ ID NO: 297710 - RNA, 19 nt, Artificial Sequence
  Description of Artificial Sequence: Synthetic oligonucleotide
ggaaacgucucguugacag

SEQ ID NO: 297711 - RNA, 19 nt, Artificial Sequence
  Description of Artificial Sequence: Synthetic oligonucleotide
uccaagugcaccuuauacu

SEQ ID NO: 297712 - RNA, 19 nt, Artificial Sequence
  Description of Artificial Sequence: Synthetic oligonucleotide
cuugccucgcucuucacgc

SEQ ID NO: 297713 - RNA, 19 nt, Artificial Sequence
  Description of Artificial Sequence: Synthetic oligonucleotide
cacucaaguguaauagucc

SEQ ID NO: 297714 - RNA, 19 nt, Artificial Sequence
  Description of Artificial Sequence: Synthetic oligonucleotide
guuaggaaacgucucguug

SEQ ID NO: 297715 - RNA, 19 nt, Artificial Sequence
  Description of Artificial Sequence: Synthetic oligonucleotide
uguggugcgugccacacac

SEQ ID NO: 297716 - RNA, 19 nt, Artificial Sequence
  Description of Artificial Sequence: Synthetic oligonucleotide
uucggcuagacuuaggauu

SEQ ID NO: 297717 - RNA, 19 nt, Artificial Sequence
  Description of Artificial Sequence: Synthetic oligonucleotide
aguucguagcagcuggagg

SEQ ID NO: 297718 - RNA, 19 nt, Artificial Sequence
  Description of Artificial Sequence: Synthetic oligonucleotide
uuuaggacacacucccacc

SEQ ID NO: 297719 - RNA, 19 nt, Artificial Sequence
  Description of Artificial Sequence: Synthetic oligonucleotide
aaccgcagcaguucuaccu

SEQ ID NO: 297720 - RNA, 19 nt, Artificial Sequence
  Description of Artificial Sequence: Synthetic oligonucleotide
augggaggaacacauguug

SEQ ID NO: 297721 - RNA, 19 nt, Artificial Sequence
  Description of Artificial Sequence: Synthetic oligonucleotide
cugccugcuuucuugaagg

SEQ ID NO: 297722 - RNA, 19 nt, Artificial Sequence
  Description of Artificial Sequence: Synthetic oligonucleotide
cacacacacacacacacac

SEQ ID NO: 297723 - RNA, 19 nt, Artificial Sequence
  Description of Artificial Sequence: Synthetic oligonucleotide
acuuaacucucucucauau

SEQ ID NO: 297724 - RNA, 19 nt, Artificial Sequence
  Description of Artificial Sequence: Synthetic oligonucleotide
ugcuagacucugaagaguc

SEQ ID NO: 297725 - RNA, 19 nt, Artificial Sequence
  Description of Artificial Sequence: Synthetic oligonucleotide
ucucguugacagcucagag

SEQ ID NO: 297726 - RNA, 19 nt, Artificial Sequence
  Description of Artificial Sequence: Synthetic oligonucleotide
uagcuuuuaaggcuuugac

SEQ ID NO: 297727 - RNA, 19 nt, Artificial Sequence
  Description of Artificial Sequence: Synthetic oligonucleotide
ucuaccaugcgcuccuuca

SEQ ID NO: 297728 - RNA, 19 nt, Artificial Sequence
  Description of Artificial Sequence: Synthetic oligonucleotide
uaacuccuuaaauauuaga

SEQ ID NO: 297729 - RNA, 19 nt, Artificial Sequence
  Description of Artificial Sequence: Synthetic oligonucleotide
uugagaccuauaaaauaac

SEQ ID NO: 297730 - RNA, 19 nt, Artificial Sequence
  Description of Artificial Sequence: Synthetic oligonucleotide
uguuucuuauuugauguuc

SEQ ID NO: 297731 - RNA, 19 nt, Artificial Sequence
  Description of Artificial Sequence: Synthetic oligonucleotide
ucuuacguuuauuggagau

SEQ ID NO: 297732 - RNA, 19 nt, Artificial Sequence
  Description of Artificial Sequence: Synthetic oligonucleotide
auguauucuuuguaugcug

SEQ ID NO: 297733 - RNA, 19 nt, Artificial Sequence
  Description of Artificial Sequence: Synthetic oligonucleotide
aggaacacauguugcguuc

SEQ ID NO: 297734 - RNA, 19 nt, Artificial Sequence
  Description of Artificial Sequence: Synthetic oligonucleotide
ucaccgaacucuuuaggac

SEQ ID NO: 297735 - RNA, 19 nt, Artificial Sequence
  Description of Artificial Sequence: Synthetic oligonucleotide
cucguugacagcucagagc

SEQ ID NO: 297736 - RNA, 19 nt, Artificial Sequence
  Description of Artificial Sequence: Synthetic oligonucleotide
aacuccccgguccauuguc

SEQ ID NO: 297737 - RNA, 19 nt, Artificial Sequence
  Description of Artificial Sequence: Synthetic oligonucleotide
gacagcaccgacaaucccc

SEQ ID NO: 297738 - RNA, 19 nt, Artificial Sequence
  Description of Artificial Sequence: Synthetic oligonucleotide
uuauuggagauguauucuu

SEQ ID NO: 297739 - RNA, 19 nt, Artificial Sequence
  Description of Artificial Sequence: Synthetic oligonucleotide
ugguaaccguucaugggag

SEQ ID NO: 297740 - RNA, 19 nt, Artificial Sequence
  Description of Artificial Sequence: Synthetic oligonucleotide
ucaugcagucuuccuaccc

SEQ ID NO: 297741 - RNA, 19 nt, Artificial Sequence
  Description of Artificial Sequence: Synthetic oligonucleotide
cuucuccacacacacacac

SEQ ID NO: 297742 - RNA, 19 nt, Artificial Sequence
  Description of Artificial Sequence: Synthetic oligonucleotide
caaaguuguuucuaaguga

SEQ ID NO: 297743 - RNA, 19 nt, Artificial Sequence
  Description of Artificial Sequence: Synthetic oligonucleotide
cuagccugggcucaugcag

SEQ ID NO: 297744 - RNA, 19 nt, Artificial Sequence
  Description of Artificial Sequence: Synthetic oligonucleotide
agcaccguucucucccucc

SEQ ID NO: 297745 - RNA, 19 nt, Artificial Sequence
  Description of Artificial Sequence: Synthetic oligonucleotide
gucucauuccaucccaccc

SEQ ID NO: 297746 - RNA, 19 nt, Artificial Sequence
  Description of Artificial Sequence: Synthetic oligonucleotide
uguguguguguguggugcg

SEQ ID NO: 297747 - RNA, 19 nt, Artificial Sequence
  Description of Artificial Sequence: Synthetic oligonucleotide
ugugugugugugugugugg

SEQ ID NO: 297748 - RNA, 19 nt, Artificial Sequence
  Description of Artificial Sequence: Synthetic oligonucleotide
aguagcuguucggaggugg

SEQ ID NO: 297749 - RNA, 19 nt, Artificial Sequence
  Description of Artificial Sequence: Synthetic oligonucleotide
aguccaggcggcaagcccc

SEQ ID NO: 297750 - RNA, 19 nt, Artificial Sequence
  Description of Artificial Sequence: Synthetic oligonucleotide
uuaagcugggucagucaug

SEQ ID NO: 297751 - RNA, 19 nt, Artificial Sequence
  Description of Artificial Sequence: Synthetic oligonucleotide
gacucaggcagcuugccuc

SEQ ID NO: 297752 - RNA, 19 nt, Artificial Sequence
  Description of Artificial Sequence: Synthetic oligonucleotide
aacuucugguaaccguuca

SEQ ID NO: 297753 - RNA, 19 nt, Artificial Sequence
  Description of Artificial Sequence: Synthetic oligonucleotide
uggugcgugccacacacac

SEQ ID NO: 297754 - RNA, 19 nt, Artificial Sequence
  Description of Artificial Sequence: Synthetic oligonucleotide
gacagugugugugugugug

SEQ ID NO: 297755 - RNA, 19 nt, Artificial Sequence
  Description of Artificial Sequence: Synthetic oligonucleotide
agaguccuagccugggcuc

SEQ ID NO: 297756 - RNA, 19 nt, Artificial Sequence
  Description of Artificial Sequence: Synthetic oligonucleotide
uccaugccggaacugcaag

SEQ ID NO: 297757 - RNA, 19 nt, Artificial Sequence
  Description of Artificial Sequence: Synthetic oligonucleotide
ucccgagccuuauauuuag

SEQ ID NO: 297758 - RNA, 19 nt, Artificial Sequence
  Description of Artificial Sequence: Synthetic oligonucleotide
aacugcaagugcagaagag

SEQ ID NO: 297759 - RNA, 19 nt, Artificial Sequence
  Description of Artificial Sequence: Synthetic oligonucleotide
cacacacacacacacacca

SEQ ID NO: 297760 - RNA, 19 nt, Artificial Sequence
  Description of Artificial Sequence: Synthetic oligonucleotide
agucugaugguugcuguuc

SEQ ID NO: 297761 - RNA, 19 nt, Artificial Sequence
  Description of Artificial Sequence: Synthetic oligonucleotide
cuuacguuuauuggagaug

SEQ ID NO: 297762 - RNA, 19 nt, Artificial Sequence
  Description of Artificial Sequence: Synthetic oligonucleotide
caagaggacagugugugug

SEQ ID NO: 297763 - RNA, 19 nt, Artificial Sequence
  Description of Artificial Sequence: Synthetic oligonucleotide
agaucgguuaggaaacguc

SEQ ID NO: 297764 - RNA, 19 nt, Artificial Sequence
  Description of Artificial Sequence: Synthetic oligonucleotide
ucggcuagacuuaggauuu

SEQ ID NO: 297765 - RNA, 19 nt, Artificial Sequence
  Description of Artificial Sequence: Synthetic oligonucleotide
auucaaguggggugguugu

SEQ ID NO: 297766 - RNA, 19 nt, Artificial Sequence
  Description of Artificial Sequence: Synthetic oligonucleotide
ucagucugaugguugcugu

SEQ ID NO: 297767 - RNA, 19 nt, Artificial Sequence
  Description of Artificial Sequence: Synthetic oligonucleotide
uaggaaacgucucguugac

SEQ ID NO: 297768 - RNA, 19 nt, Artificial Sequence
  Description of Artificial Sequence: Synthetic oligonucleotide
gucaugucuaagccgcucc

SEQ ID NO: 297769 - RNA, 19 nt, Artificial Sequence
  Description of Artificial Sequence: Synthetic oligonucleotide
gcuacauagcaccaugcgc

SEQ ID NO: 297770 - RNA, 19 nt, Artificial Sequence
  Description of Artificial Sequence: Synthetic oligonucleotide
uggcuacauagcaccaugc

SEQ ID NO: 297771 - RNA, 19 nt, Artificial Sequence
  Description of Artificial Sequence: Synthetic oligonucleotide
ugaagcgagccagauaguc

SEQ ID NO: 297772 - RNA, 19 nt, Artificial Sequence
  Description of Artificial Sequence: Synthetic oligonucleotide
gaaacgucucguugacagc

SEQ ID NO: 297773 - RNA, 19 nt, Artificial Sequence
  Description of Artificial Sequence: Synthetic oligonucleotide
uuguaugcugcacgguccu

SEQ ID NO: 297774 - RNA, 19 nt, Artificial Sequence
  Description of Artificial Sequence: Synthetic oligonucleotide
uucuuacguuuauuggaga

SEQ ID NO: 297775 - RNA, 19 nt, Artificial Sequence
  Description of Artificial Sequence: Synthetic oligonucleotide
gcucccaugguacaaauuc

SEQ ID NO: 297776 - RNA, 19 nt, Artificial Sequence
  Description of Artificial Sequence: Synthetic oligonucleotide
uucuccacacacacacaca

SEQ ID NO: 297777 - RNA, 19 nt, Artificial Sequence
  Description of Artificial Sequence: Synthetic oligonucleotide
ggcuacauagcaccaugcg

SEQ ID NO: 297778 - RNA, 19 nt, Artificial Sequence
  Description of Artificial Sequence: Synthetic oligonucleotide
uaacucucucucauaucgu

SEQ ID NO: 297779 - RNA, 19 nt, Artificial Sequence
  Description of Artificial Sequence: Synthetic oligonucleotide
cucaccgaacucuuuagga

SEQ ID NO: 297780 - RNA, 19 nt, Artificial Sequence
  Description of Artificial Sequence: Synthetic oligonucleotide
uucguagcagcuggagggg

SEQ ID NO: 297781 - RNA, 19 nt, Artificial Sequence
  Description of Artificial Sequence: Synthetic oligonucleotide
acguuuauuggagauguau

SEQ ID NO: 297782 - RNA, 19 nt, Artificial Sequence
  Description of Artificial Sequence: Synthetic oligonucleotide
ugucuguaacaauuuccaa

SEQ ID NO: 297783 - RNA, 19 nt, Artificial Sequence
  Description of Artificial Sequence: Synthetic oligonucleotide
acacacacacacauuuuag

SEQ ID NO: 297784 - RNA, 19 nt, Artificial Sequence
  Description of Artificial Sequence: Synthetic oligonucleotide
gugccacacacacacacac

SEQ ID NO: 297785 - RNA, 19 nt, Artificial Sequence
  Description of Artificial Sequence: Synthetic oligonucleotide
gguccauuguccaugccgg

SEQ ID NO: 297786 - RNA, 19 nt, Artificial Sequence
  Description of Artificial Sequence: Synthetic oligonucleotide
accgaacucuuuaggacac

SEQ ID NO: 297787 - RNA, 19 nt, Artificial Sequence
  Description of Artificial Sequence: Synthetic oligonucleotide
aaaugacaacagagacggc

SEQ ID NO: 297788 - RNA, 19 nt, Artificial Sequence
  Description of Artificial Sequence: Synthetic oligonucleotide
cuccgacuuagacugcagg

SEQ ID NO: 297789 - RNA, 19 nt, Artificial Sequence
  Description of Artificial Sequence: Synthetic oligonucleotide
ugguugcuguuccuggaga

SEQ ID NO: 297790 - RNA, 19 nt, Artificial Sequence
  Description of Artificial Sequence: Synthetic oligonucleotide
guguguguguguguggugc

SEQ ID NO: 297791 - RNA, 19 nt, Artificial Sequence
  Description of Artificial Sequence: Synthetic oligonucleotide
aucgguuaggaaacgucuc

SEQ ID NO: 297792 - RNA, 19 nt, Artificial Sequence
  Description of Artificial Sequence: Synthetic oligonucleotide
uccaguucauugugggagu

SEQ ID NO: 297793 - RNA, 19 nt, Artificial Sequence
  Description of Artificial Sequence: Synthetic oligonucleotide
acacacacacacacacacc

SEQ ID NO: 297794 - RNA, 19 nt, Artificial Sequence
  Description of Artificial Sequence: Synthetic oligonucleotide
caugcgggccagcaggcgg

SEQ ID NO: 297795 - RNA, 19 nt, Artificial Sequence
  Description of Artificial Sequence: Synthetic oligonucleotide
ugucuaagccgcucccaug

SEQ ID NO: 297796 - RNA, 19 nt, Artificial Sequence
  Description of Artificial Sequence: Synthetic oligonucleotide
acuugaaaugggaggaaca

SEQ ID NO: 297797 - RNA, 19 nt, Artificial Sequence
  Description of Artificial Sequence: Synthetic oligonucleotide
gauguauucuuuguaugcu

SEQ ID NO: 297798 - RNA, 19 nt, Artificial Sequence
  Description of Artificial Sequence: Synthetic oligonucleotide
uccuagccugggcucaugc

SEQ ID NO: 297799 - RNA, 19 nt, Artificial Sequence
  Description of Artificial Sequence: Synthetic oligonucleotide
aggacagugugugugugug

SEQ ID NO: 297800 - RNA, 19 nt, Artificial Sequence
  Description of Artificial Sequence: Synthetic oligonucleotide
aacagagacggcagccgag

SEQ ID NO: 297801 - RNA, 19 nt, Artificial Sequence
  Description of Artificial Sequence: Synthetic oligonucleotide
uucuuggaggcuggacugg

SEQ ID NO: 297802 - RNA, 19 nt, Artificial Sequence
  Description of Artificial Sequence: Synthetic oligonucleotide
aaugggaggaacacauguu

SEQ ID NO: 297803 - RNA, 19 nt, Artificial Sequence
  Description of Artificial Sequence: Synthetic oligonucleotide
ucuucuccacacacacaca

SEQ ID NO: 297804 - RNA, 19 nt, Artificial Sequence
  Description of Artificial Sequence: Synthetic oligonucleotide
gccacacacacacacacac

SEQ ID NO: 297805 - RNA, 19 nt, Artificial Sequence
  Description of Artificial Sequence: Synthetic oligonucleotide
gaaaugggaggaacacaug

SEQ ID NO: 297806 - RNA, 19 nt, Artificial Sequence
  Description of Artificial Sequence: Synthetic oligonucleotide
gugcuaaaauguacccugg

SEQ ID NO: 297807 - RNA, 19 nt, Artificial Sequence
  Description of Artificial Sequence: Synthetic oligonucleotide
uguguguguguguguggug

SEQ ID NO: 297808 - RNA, 19 nt, Artificial Sequence
  Description of Artificial Sequence: Synthetic oligonucleotide
uucagcggcaggugauuca

SEQ ID NO: 297809 - RNA, 19 nt, Artificial Sequence
  Description of Artificial Sequence: Synthetic oligonucleotide
cuugguaggucgcccauca

SEQ ID NO: 297810 - RNA, 19 nt, Artificial Sequence
  Description of Artificial Sequence: Synthetic oligonucleotide
gguucggcuagacuuagga

SEQ ID NO: 297811 - RNA, 19 nt, Artificial Sequence
  Description of Artificial Sequence: Synthetic oligonucleotide
ucagagccgcccuugccac

SEQ ID NO: 297812 - RNA, 19 nt, Artificial Sequence
  Description of Artificial Sequence: Synthetic oligonucleotide
uacauagcaccaugcgcuc

SEQ ID NO: 297813 - RNA, 19 nt, Artificial Sequence
  Description of Artificial Sequence: Synthetic oligonucleotide
ccgagccuuauauuuagcc

SEQ ID NO: 297814 - RNA, 19 nt, Artificial Sequence
  Description of Artificial Sequence: Synthetic oligonucleotide
uguguguguguggugcgug

SEQ ID NO: 297815 - RNA, 19 nt, Artificial Sequence
  Description of Artificial Sequence: Synthetic oligonucleotide
cacacacacacacaccaca

SEQ ID NO: 297816 - RNA, 19 nt, Artificial Sequence
  Description of Artificial Sequence: Synthetic oligonucleotide
gaguucguagcagcuggag

SEQ ID NO: 297817 - RNA, 19 nt, Artificial Sequence
  Description of Artificial Sequence: Synthetic oligonucleotide
ugugugugugugugugugu

SEQ ID NO: 297818 - RNA, 19 nt, Artificial Sequence
  Description of Artificial Sequence: Synthetic oligonucleotide
gaucgguuaggaaacgucu

SEQ ID NO: 297819 - RNA, 19 nt, Artificial Sequence
  Description of Artificial Sequence: Synthetic oligonucleotide
ugccacacacacacacaca

SEQ ID NO: 297820 - RNA, 19 nt, Artificial Sequence
  Description of Artificial Sequence: Synthetic oligonucleotide
ugggcuuuucagagccgcc

SEQ ID NO: 297821 - RNA, 19 nt, Artificial Sequence
  Description of Artificial Sequence: Synthetic oligonucleotide
cucgggcaagcucucgagg

SEQ ID NO: 297822 - RNA, 19 nt, Artificial Sequence
  Description of Artificial Sequence: Synthetic oligonucleotide
aacacauguugcguucaaa

SEQ ID NO: 297823 - RNA, 19 nt, Artificial Sequence
  Description of Artificial Sequence: Synthetic oligonucleotide
gugugugugugugugugug

SEQ ID NO: 297824 - RNA, 19 nt, Artificial Sequence
  Description of Artificial Sequence: Synthetic oligonucleotide
ugguucggcuagacuuagg

SEQ ID NO: 297825 - RNA, 19 nt, Artificial Sequence
  Description of Artificial Sequence: Synthetic oligonucleotide
uguguggugcgugccacac

SEQ ID NO: 297826 - RNA, 19 nt, Artificial Sequence
  Description of Artificial Sequence: Synthetic oligonucleotide
agugugugugugugugugu

SEQ ID NO: 297827 - RNA, 19 nt, Artificial Sequence
  Description of Artificial Sequence: Synthetic oligonucleotide
gguaggucgcccaucaaac

SEQ ID NO: 297828 - RNA, 19 nt, Artificial Sequence
  Description of Artificial Sequence: Synthetic oligonucleotide
uggaggggcccgcaucuca

SEQ ID NO: 297829 - RNA, 19 nt, Artificial Sequence
  Description of Artificial Sequence: Synthetic oligonucleotide
cugggagaugcgcugccag

SEQ ID NO: 297830 - RNA, 19 nt, Artificial Sequence
  Description of Artificial Sequence: Synthetic oligonucleotide
aauguacccugggcaaccu

SEQ ID NO: 297831 - RNA, 19 nt, Artificial Sequence
  Description of Artificial Sequence: Synthetic oligonucleotide
acacacacacacacaccac

SEQ ID NO: 297832 - RNA, 19 nt, Artificial Sequence
  Description of Artificial Sequence: Synthetic oligonucleotide
ugggucagucaugucuaag

SEQ ID NO: 297833 - RNA, 19 nt, Artificial Sequence
  Description of Artificial Sequence: Synthetic oligonucleotide
ucgaggaaccgcagcaguu

SEQ ID NO: 297834 - RNA, 19 nt, Artificial Sequence
  Description of Artificial Sequence: Synthetic oligonucleotide
gcuugccucgcucuucacg

SEQ ID NO: 297835 - RNA, 19 nt, Artificial Sequence
  Description of Artificial Sequence: Synthetic oligonucleotide
gcggcugccaaucucuacc

SEQ ID NO: 297836 - RNA, 19 nt, Artificial Sequence
  Description of Artificial Sequence: Synthetic oligonucleotide
aaccguucaugggagguuu

SEQ ID NO: 297837 - RNA, 19 nt, Artificial Sequence
  Description of Artificial Sequence: Synthetic oligonucleotide
accaugcgcucugugcucg

SEQ ID NO: 297838 - RNA, 19 nt, Artificial Sequence
  Description of Artificial Sequence: Synthetic oligonucleotide
cucccaugguacaaauuca

SEQ ID NO: 297839 - RNA, 19 nt, Artificial Sequence
  Description of Artificial Sequence: Synthetic oligonucleotide
ugccuucuuaauccacauc

SEQ ID NO: 297840 - RNA, 19 nt, Artificial Sequence
  Description of Artificial Sequence: Synthetic oligonucleotide
ugagcuggcguucggccuu

SEQ ID NO: 297841 - RNA, 19 nt, Artificial Sequence
  Description of Artificial Sequence: Synthetic oligonucleotide
gcaaccucugacagcaccg

SEQ ID NO: 297842 - RNA, 19 nt, Artificial Sequence
  Description of Artificial Sequence: Synthetic oligonucleotide
cagugugugugugugugug

SEQ ID NO: 297843 - RNA, 19 nt, Artificial Sequence
  Description of Artificial Sequence: Synthetic oligonucleotide
caguacaaugaguagcugu

SEQ ID NO: 297844 - RNA, 19 nt, Artificial Sequence
  Description of Artificial Sequence: Synthetic oligonucleotide
ucuucgcugcuagacucug

SEQ ID NO: 297845 - RNA, 19 nt, Artificial Sequence
  Description of Artificial Sequence: Synthetic oligonucleotide
ucgcugcuagacucugaag

SEQ ID NO: 297846 - RNA, 19 nt, Artificial Sequence
  Description of Artificial Sequence: Synthetic oligonucleotide
acuuagacugcaggguggu

SEQ ID NO: 297847 - RNA, 19 nt, Artificial Sequence
  Description of Artificial Sequence: Synthetic oligonucleotide
ucuaagccgcucccauggu

SEQ ID NO: 297848 - RNA, 19 nt, Artificial Sequence
  Description of Artificial Sequence: Synthetic oligonucleotide
cacacacacacacauuuua

SEQ ID NO: 297849 - RNA, 19 nt, Artificial Sequence
  Description of Artificial Sequence: Synthetic oligonucleotide
caaucucuaccaugcgcuc

SEQ ID NO: 297850 - RNA, 19 nt, Artificial Sequence
  Description of Artificial Sequence: Synthetic oligonucleotide
auguacccugggcaaccuc

SEQ ID NO: 297851 - RNA, 19 nt, Artificial Sequence
  Description of Artificial Sequence: Synthetic oligonucleotide
gguaaccguucaugggagg

SEQ ID NO: 297852 - RNA, 19 nt, Artificial Sequence
  Description of Artificial Sequence: Synthetic oligonucleotide
acuccccgguccauugucc

SEQ ID NO: 297853 - RNA, 19 nt, Artificial Sequence
  Description of Artificial Sequence: Synthetic oligonucleotide
ccgagaucgguuaggaaac

SEQ ID NO: 297854 - RNA, 19 nt, Artificial Sequence
  Description of Artificial Sequence: Synthetic oligonucleotide
ucuucacgcuccccaccug

SEQ ID NO: 297855 - RNA, 19 nt, Artificial Sequence
  Description of Artificial Sequence: Synthetic oligonucleotide
ggagauguauucuuuguau

SEQ ID NO: 297856 - RNA, 19 nt, Artificial Sequence
  Description of Artificial Sequence: Synthetic oligonucleotide
acagugugugugugugugu

SEQ ID NO: 297857 - RNA, 19 nt, Artificial Sequence
  Description of Artificial Sequence: Synthetic oligonucleotide
gaaccgcagcaguucuacc

SEQ ID NO: 297858 - RNA, 19 nt, Artificial Sequence
  Description of Artificial Sequence: Synthetic oligonucleotide
acgcuccccaccuggcuuc

SEQ ID NO: 297859 - RNA, 19 nt, Artificial Sequence
  Description of Artificial Sequence: Synthetic oligonucleotide
guacaaauucaaguggggu

SEQ ID NO: 297860 - RNA, 19 nt, Artificial Sequence
  Description of Artificial Sequence: Synthetic oligonucleotide
ugggcucaugcagucuucc

SEQ ID NO: 297861 - RNA, 19 nt, Artificial Sequence
  Description of Artificial Sequence: Synthetic oligonucleotide
uuugggccucgaagcuuag

SEQ ID NO: 297862 - RNA, 19 nt, Artificial Sequence
  Description of Artificial Sequence: Synthetic oligonucleotide
cucggcacguccuucaugu

SEQ ID NO: 297863 - RNA, 19 nt, Artificial Sequence
  Description of Artificial Sequence: Synthetic oligonucleotide
aaccuaccacagugggccu

SEQ ID NO: 297864 - RNA, 19 nt, Artificial Sequence
  Description of Artificial Sequence: Synthetic oligonucleotide
aagccgcucccaugguaca

SEQ ID NO: 297865 - RNA, 19 nt, Artificial Sequence
  Description of Artificial Sequence: Synthetic oligonucleotide
caguucauugugggagucc

SEQ ID NO: 297866 - RNA, 19 nt, Artificial Sequence
  Description of Artificial Sequence: Synthetic oligonucleotide
cacacacacacacacauuu

SEQ ID NO: 297867 - RNA, 19 nt, Artificial Sequence
  Description of Artificial Sequence: Synthetic oligonucleotide
cacacacacacacacacau

SEQ ID NO: 297868 - RNA, 19 nt, Artificial Sequence
  Description of Artificial Sequence: Synthetic oligonucleotide
acagagacggcagccgaga

SEQ ID NO: 297869 - RNA, 19 nt, Artificial Sequence
  Description of Artificial Sequence: Synthetic oligonucleotide
ucacgcuccccaccuggcu

SEQ ID NO: 297870 - RNA, 19 nt, Artificial Sequence
  Description of Artificial Sequence: Synthetic oligonucleotide
cuuaagcugggucagucau

SEQ ID NO: 297871 - RNA, 19 nt, Artificial Sequence
  Description of Artificial Sequence: Synthetic oligonucleotide
cacacacacacauuuuagu

SEQ ID NO: 297872 - RNA, 19 nt, Artificial Sequence
  Description of Artificial Sequence: Synthetic oligonucleotide
gauggaggccucaccgaac

SEQ ID NO: 297873 - RNA, 19 nt, Artificial Sequence
  Description of Artificial Sequence: Synthetic oligonucleotide
acaagucguuccacaugcg

SEQ ID NO: 297874 - RNA, 19 nt, Artificial Sequence
  Description of Artificial Sequence: Synthetic oligonucleotide
aaauucaaguggggugguu

SEQ ID NO: 297875 - RNA, 19 nt, Artificial Sequence
  Description of Artificial Sequence: Synthetic oligonucleotide
ggcaagccccucuggaaag

SEQ ID NO: 297876 - RNA, 19 nt, Artificial Sequence
  Description of Artificial Sequence: Synthetic oligonucleotide
ugcacgguccuggggagac

SEQ ID NO: 297877 - RNA, 19 nt, Artificial Sequence
  Description of Artificial Sequence: Synthetic oligonucleotide
cccaugaauggguccaggc

SEQ ID NO: 297878 - RNA, 19 nt, Artificial Sequence
  Description of Artificial Sequence: Synthetic oligonucleotide
cgguccauuguccaugccg

SEQ ID NO: 297879 - RNA, 19 nt, Artificial Sequence
  Description of Artificial Sequence: Synthetic oligonucleotide
auuugggccucgaagcuua

SEQ ID NO: 297880 - RNA, 19 nt, Artificial Sequence
  Description of Artificial Sequence: Synthetic oligonucleotide
gaacacauguugcguucaa

SEQ ID NO: 297881 - RNA, 19 nt, Artificial Sequence
  Description of Artificial Sequence: Synthetic oligonucleotide
gggucccagugcuaaaaug

SEQ ID NO: 297882 - RNA, 19 nt, Artificial Sequence
  Description of Artificial Sequence: Synthetic oligonucleotide
uacguuuauuggagaugua

SEQ ID NO: 297883 - RNA, 19 nt, Artificial Sequence
  Description of Artificial Sequence: Synthetic oligonucleotide
acuuaggauuugggccucg

SEQ ID NO: 297884 - RNA, 19 nt, Artificial Sequence
  Description of Artificial Sequence: Synthetic oligonucleotide
gaagcgagccagauagucu

SEQ ID NO: 297885 - RNA, 19 nt, Artificial Sequence
  Description of Artificial Sequence: Synthetic oligonucleotide
acacacacacacaccacau

SEQ ID NO: 297886 - RNA, 19 nt, Artificial Sequence
  Description of Artificial Sequence: Synthetic oligonucleotide
ggaaccgcagcaguucuac

SEQ ID NO: 297887 - RNA, 19 nt, Artificial Sequence
  Description of Artificial Sequence: Synthetic oligonucleotide
agaguccccgccauccuca

SEQ ID NO: 297888 - RNA, 19 nt, Artificial Sequence
  Description of Artificial Sequence: Synthetic oligonucleotide
ccucaccgaacucuuuagg

SEQ ID NO: 297889 - RNA, 19 nt, Artificial Sequence
  Description of Artificial Sequence: Synthetic oligonucleotide
cuugggcgacucaggcagc

SEQ ID NO: 297890 - RNA, 19 nt, Artificial Sequence
  Description of Artificial Sequence: Synthetic oligonucleotide
gcgugccacacacacacac

SEQ ID NO: 297891 - RNA, 19 nt, Artificial Sequence
  Description of Artificial Sequence: Synthetic oligonucleotide
cucgcccaggacccgcugc

SEQ ID NO: 297892 - RNA, 19 nt, Artificial Sequence
  Description of Artificial Sequence: Synthetic oligonucleotide
uaaccguucaugggagguu

SEQ ID NO: 297893 - RNA, 19 nt, Artificial Sequence
  Description of Artificial Sequence: Synthetic oligonucleotide
gccucaccgaacucuuuag

SEQ ID NO: 297894 - RNA, 19 nt, Artificial Sequence
  Description of Artificial Sequence: Synthetic oligonucleotide
ccauauuuccucagcucuc

SEQ ID NO: 297895 - RNA, 19 nt, Artificial Sequence
  Description of Artificial Sequence: Synthetic oligonucleotide
gucucguugacagcucaga

SEQ ID NO: 297896 - RNA, 19 nt, Artificial Sequence
  Description of Artificial Sequence: Synthetic oligonucleotide
ccgcuugggcuuuucagag

SEQ ID NO: 297897 - RNA, 19 nt, Artificial Sequence
  Description of Artificial Sequence: Synthetic oligonucleotide
gucauauucuuacguuuau

SEQ ID NO: 297898 - RNA, 19 nt, Artificial Sequence
  Description of Artificial Sequence: Synthetic oligonucleotide
ugacucggucauucuugaa

SEQ ID NO: 297899 - RNA, 19 nt, Artificial Sequence
  Description of Artificial Sequence: Synthetic oligonucleotide
cccgcaucucacuuaacuc

SEQ ID NO: 297900 - RNA, 19 nt, Artificial Sequence
  Description of Artificial Sequence: Synthetic oligonucleotide
acacacacacacacacaca

SEQ ID NO: 297901 - RNA, 19 nt, Artificial Sequence
  Description of Artificial Sequence: Synthetic oligonucleotide
guaaccguucaugggaggu

SEQ ID NO: 297902 - RNA, 19 nt, Artificial Sequence
  Description of Artificial Sequence: Synthetic oligonucleotide
auguugcguucaaaguugu

SEQ ID NO: 297903 - RNA, 19 nt, Artificial Sequence
  Description of Artificial Sequence: Synthetic oligonucleotide
cacacacacaccacauucu

SEQ ID NO: 297904 - RNA, 19 nt, Artificial Sequence
  Description of Artificial Sequence: Synthetic oligonucleotide
uugguaggucgcccaucaa

SEQ ID NO: 297905 - RNA, 19 nt, Artificial Sequence
  Description of Artificial Sequence: Synthetic oligonucleotide
gaguccccgccauccucag

SEQ ID NO: 297906 - RNA, 19 nt, Artificial Sequence
  Description of Artificial Sequence: Synthetic oligonucleotide
ggguagauuuggugaugcc

SEQ ID NO: 297907 - RNA, 19 nt, Artificial Sequence
  Description of Artificial Sequence: Synthetic oligonucleotide
cucuugacccagaggucca

SEQ ID NO: 297908 - RNA, 19 nt, Artificial Sequence
  Description of Artificial Sequence: Synthetic oligonucleotide
ugcgugccacacacacaca

SEQ ID NO: 297909 - RNA, 19 nt, Artificial Sequence
  Description of Artificial Sequence: Synthetic oligonucleotide
agcuguucggagguggcuu

SEQ ID NO: 297910 - RNA, 19 nt, Artificial Sequence
  Description of Artificial Sequence: Synthetic oligonucleotide
gggugguucggcuagacuu

SEQ ID NO: 297911 - RNA, 19 nt, Artificial Sequence
  Description of Artificial Sequence: Synthetic oligonucleotide
cuccacacacacacacaca

SEQ ID NO: 297912 - RNA, 19 nt, Artificial Sequence
  Description of Artificial Sequence: Synthetic oligonucleotide
gucguuccacaugcgggcc

SEQ ID NO: 297913 - RNA, 19 nt, Artificial Sequence
  Description of Artificial Sequence: Synthetic oligonucleotide
cauauuuccucagcucucu

SEQ ID NO: 297914 - RNA, 19 nt, Artificial Sequence
  Description of Artificial Sequence: Synthetic oligonucleotide
caggcagcuugccucgcuc

SEQ ID NO: 297915 - RNA, 19 nt, Artificial Sequence
  Description of Artificial Sequence: Synthetic oligonucleotide
gcuguucggagguggcuug

SEQ ID NO: 297916 - RNA, 19 nt, Artificial Sequence
  Description of Artificial Sequence: Synthetic oligonucleotide
acuccgacuuagacugcag

SEQ ID NO: 297917 - RNA, 19 nt, Artificial Sequence
  Description of Artificial Sequence: Synthetic oligonucleotide
aucuucgcugcuagacucu

SEQ ID NO: 297918 - RNA, 19 nt, Artificial Sequence
  Description of Artificial Sequence: Synthetic oligonucleotide
gaggacagugugugugugu

SEQ ID NO: 297919 - RNA, 19 nt, Artificial Sequence
  Description of Artificial Sequence: Synthetic oligonucleotide
cagaguccuagccugggcu

SEQ ID NO: 297920 - RNA, 19 nt, Artificial Sequence
  Description of Artificial Sequence: Synthetic oligonucleotide
gaacucuuuaggacacacu

SEQ ID NO: 297921 - RNA, 19 nt, Artificial Sequence
  Description of Artificial Sequence: Synthetic oligonucleotide
augacacucugcugccaua

SEQ ID NO: 297922 - RNA, 19 nt, Artificial Sequence
  Description of Artificial Sequence: Synthetic oligonucleotide
cgacuuagacugcagggug

SEQ ID NO: 297923 - RNA, 19 nt, Artificial Sequence
  Description of Artificial Sequence: Synthetic oligonucleotide
agccgcccuugccaccuuc

SEQ ID NO: 297924 - RNA, 19 nt, Artificial Sequence
  Description of Artificial Sequence: Synthetic oligonucleotide
aggaaacgucucguugaca

SEQ ID NO: 297925 - RNA, 19 nt, Artificial Sequence
  Description of Artificial Sequence: Synthetic oligonucleotide
guaggucgcccaucaaacu

SEQ ID NO: 297926 - RNA, 19 nt, Artificial Sequence
  Description of Artificial Sequence: Synthetic oligonucleotide
uucaaguggggugguuguu

SEQ ID NO: 297927 - RNA, 19 nt, Artificial Sequence
  Description of Artificial Sequence: Synthetic oligonucleotide
gcuagacucugaagagucc

SEQ ID NO: 297928 - RNA, 19 nt, Artificial Sequence
  Description of Artificial Sequence: Synthetic oligonucleotide
gcagccgagaucgguuagg

SEQ ID NO: 297929 - RNA, 19 nt, Artificial Sequence
  Description of Artificial Sequence: Synthetic oligonucleotide
uuccucgcccaggacccgc

SEQ ID NO: 297930 - RNA, 19 nt, Artificial Sequence
  Description of Artificial Sequence: Synthetic oligonucleotide
ggcucaugcagucuuccua

SEQ ID NO: 297931 - RNA, 19 nt, Artificial Sequence
  Description of Artificial Sequence: Synthetic oligonucleotide
cacuuaacucucucucaua

SEQ ID NO: 297932 - RNA, 19 nt, Artificial Sequence
  Description of Artificial Sequence: Synthetic oligonucleotide
gagaucgguuaggaaacgu

SEQ ID NO: 297933 - RNA, 19 nt, Artificial Sequence
  Description of Artificial Sequence: Synthetic oligonucleotide
cagagcccugucuguaaca

SEQ ID NO: 297934 - RNA, 19 nt, Artificial Sequence
  Description of Artificial Sequence: Synthetic oligonucleotide
gaagaguccccgccauccu

SEQ ID NO: 297935 - RNA, 19 nt, Artificial Sequence
  Description of Artificial Sequence: Synthetic oligonucleotide
caccguucucucccuccag

SEQ ID NO: 297936 - RNA, 19 nt, Artificial Sequence
  Description of Artificial Sequence: Synthetic oligonucleotide
agaguucguagcagcugga

SEQ ID NO: 297937 - RNA, 19 nt, Artificial Sequence
  Description of Artificial Sequence: Synthetic oligonucleotide
agccgagaucgguuaggaa

SEQ ID NO: 297938 - RNA, 19 nt, Artificial Sequence
  Description of Artificial Sequence: Synthetic oligonucleotide
cuaagccgcucccauggua

SEQ ID NO: 297939 - RNA, 19 nt, Artificial Sequence
  Description of Artificial Sequence: Synthetic oligonucleotide
guucggcuagacuuaggau

SEQ ID NO: 297940 - RNA, 19 nt, Artificial Sequence
  Description of Artificial Sequence: Synthetic oligonucleotide
caugcgcucugugcucggc

SEQ ID NO: 297941 - RNA, 19 nt, Artificial Sequence
  Description of Artificial Sequence: Synthetic oligonucleotide
gugcucggcacguccuuca

SEQ ID NO: 297942 - RNA, 19 nt, Artificial Sequence
  Description of Artificial Sequence: Synthetic oligonucleotide
caccgacaauccccagagc

SEQ ID NO: 297943 - RNA, 19 nt, Artificial Sequence
  Description of Artificial Sequence: Synthetic oligonucleotide
ggaacacauguugcguuca

SEQ ID NO: 297944 - RNA, 19 nt, Artificial Sequence
  Description of Artificial Sequence: Synthetic oligonucleotide
acacacacacacacauuuu

SEQ ID NO: 297945 - RNA, 19 nt, Artificial Sequence
  Description of Artificial Sequence: Synthetic oligonucleotide
guguguguguguguguggu

SEQ ID NO: 297946 - RNA, 19 nt, Artificial Sequence
  Description of Artificial Sequence: Synthetic oligonucleotide
ggcagccgagaucgguuag

SEQ ID NO: 297947 - RNA, 19 nt, Artificial Sequence
  Description of Artificial Sequence: Synthetic oligonucleotide
cuuaggauuugggccucga

SEQ ID NO: 297948 - RNA, 19 nt, Artificial Sequence
  Description of Artificial Sequence: Synthetic oligonucleotide
cguucggccuuggugaggg

SEQ ID NO: 297949 - RNA, 19 nt, Artificial Sequence
  Description of Artificial Sequence: Synthetic oligonucleotide
guccauuguccaugccgga

SEQ ID NO: 297950 - RNA, 19 nt, Artificial Sequence
  Description of Artificial Sequence: Synthetic oligonucleotide
cuccccgguccauugucca

SEQ ID NO: 297951 - RNA, 19 nt, Artificial Sequence
  Description of Artificial Sequence: Synthetic oligonucleotide
ggcguucggccuuggugag

SEQ ID NO: 297952 - RNA, 19 nt, Artificial Sequence
  Description of Artificial Sequence: Synthetic oligonucleotide
uccccgguccauuguccau

SEQ ID NO: 297953 - RNA, 19 nt, Artificial Sequence
  Description of Artificial Sequence: Synthetic oligonucleotide
aggccgcuugggcuuuuca

SEQ ID NO: 297954 - RNA, 19 nt, Artificial Sequence
  Description of Artificial Sequence: Synthetic oligonucleotide
uugggccucgaagcuuagu

SEQ ID NO: 297955 - RNA, 19 nt, Artificial Sequence
  Description of Artificial Sequence: Synthetic oligonucleotide
agguccaagugcaccuuau

SEQ ID NO: 297956 - RNA, 19 nt, Artificial Sequence
  Description of Artificial Sequence: Synthetic oligonucleotide
caaccucugacagcaccga

SEQ ID NO: 297957 - RNA, 19 nt, Artificial Sequence
  Description of Artificial Sequence: Synthetic oligonucleotide
acacacacacacacacauu

SEQ ID NO: 297958 - RNA, 19 nt, Artificial Sequence
  Description of Artificial Sequence: Synthetic oligonucleotide
ggcgacucaggcagcuugc

SEQ ID NO: 297959 - RNA, 19 nt, Artificial Sequence
  Description of Artificial Sequence: Synthetic oligonucleotide
ccuuaagcugggucaguca

SEQ ID NO: 297960 - RNA, 19 nt, Artificial Sequence
  Description of Artificial Sequence: Synthetic oligonucleotide
cauuccacucaaguguaau

SEQ ID NO: 297961 - RNA, 19 nt, Artificial Sequence
  Description of Artificial Sequence: Synthetic oligonucleotide
ccgcaucucacuuaacucu

SEQ ID NO: 297962 - RNA, 19 nt, Artificial Sequence
  Description of Artificial Sequence: Synthetic oligonucleotide
cagccgagaucgguuagga

SEQ ID NO: 297963 - RNA, 19 nt, Artificial Sequence
  Description of Artificial Sequence: Synthetic oligonucleotide
ggccucaccgaacucuuua

SEQ ID NO: 297964 - RNA, 19 nt, Artificial Sequence
  Description of Artificial Sequence: Synthetic oligonucleotide
ggccucgaagcuuagucau

SEQ ID NO: 297965 - RNA, 19 nt, Artificial Sequence
  Description of Artificial Sequence: Synthetic oligonucleotide
cccgagccuuauauuuagc

SEQ ID NO: 297966 - RNA, 19 nt, Artificial Sequence
  Description of Artificial Sequence: Synthetic oligonucleotide
gcugggucagucaugucua

SEQ ID NO: 297967 - RNA, 19 nt, Artificial Sequence
  Description of Artificial Sequence: Synthetic oligonucleotide
acggcagccgagaucgguu

SEQ ID NO: 297968 - RNA, 19 nt, Artificial Sequence
  Description of Artificial Sequence: Synthetic oligonucleotide
guguggugcgugccacaca

SEQ ID NO: 297969 - RNA, 19 nt, Artificial Sequence
  Description of Artificial Sequence: Synthetic oligonucleotide
gcucggcacguccuucaug

SEQ ID NO: 297970 - RNA, 19 nt, Artificial Sequence
  Description of Artificial Sequence: Synthetic oligonucleotide
gguuaggaaacgucucguu

SEQ ID NO: 297971 - RNA, 19 nt, Artificial Sequence
  Description of Artificial Sequence: Synthetic oligonucleotide
cagcaccgacaauccccag

SEQ ID NO: 297972 - RNA, 19 nt, Artificial Sequence
  Description of Artificial Sequence: Synthetic oligonucleotide
gacggcagccgagaucggu

SEQ ID NO: 297973 - RNA, 19 nt, Artificial Sequence
  Description of Artificial Sequence: Synthetic oligonucleotide
ucggcacguccuucauguu

SEQ ID NO: 297974 - RNA, 19 nt, Artificial Sequence
  Description of Artificial Sequence: Synthetic oligonucleotide
caggcgggucagcucgcuc

SEQ ID NO: 297975 - RNA, 19 nt, Artificial Sequence
  Description of Artificial Sequence: Synthetic oligonucleotide
ccacacacacacacacaca

SEQ ID NO: 297976 - RNA, 19 nt, Artificial Sequence
  Description of Artificial Sequence: Synthetic oligonucleotide
caaauucaagugggguggu

SEQ ID NO: 297977 - RNA, 19 nt, Artificial Sequence
  Description of Artificial Sequence: Synthetic oligonucleotide
cgucucguugacagcucag

SEQ ID NO: 297978 - RNA, 19 nt, Artificial Sequence
  Description of Artificial Sequence: Synthetic oligonucleotide
gcguucaaaguuguuucua

SEQ ID NO: 297979 - RNA, 19 nt, Artificial Sequence
  Description of Artificial Sequence: Synthetic oligonucleotide
cgagaucgguuaggaaacg

SEQ ID NO: 297980 - RNA, 19 nt, Artificial Sequence
  Description of Artificial Sequence: Synthetic oligonucleotide
ggcucuugacccagagguc

SEQ ID NO: 297981 - RNA, 19 nt, Artificial Sequence
  Description of Artificial Sequence: Synthetic oligonucleotide
gcggcaagccccucuggaa

SEQ ID NO: 297982 - RNA, 19 nt, Artificial Sequence
  Description of Artificial Sequence: Synthetic oligonucleotide
gcgacucaggcagcuugcc

SEQ ID NO: 297983 - RNA, 19 nt, Artificial Sequence
  Description of Artificial Sequence: Synthetic oligonucleotide
ccuagccugggcucaugca

SEQ ID NO: 297984 - RNA, 19 nt, Artificial Sequence
  Description of Artificial Sequence: Synthetic oligonucleotide
ccaugagcucugcacagua

SEQ ID NO: 297985 - RNA, 19 nt, Artificial Sequence
  Description of Artificial Sequence: Synthetic oligonucleotide
cacacacacacaccacauu

SEQ ID NO: 297986 - RNA, 19 nt, Artificial Sequence
  Description of Artificial Sequence: Synthetic oligonucleotide
aggaaccgcagcaguucua

SEQ ID NO: 297987 - RNA, 19 nt, Artificial Sequence
  Description of Artificial Sequence: Synthetic oligonucleotide
agacggcagccgagaucgg

SEQ ID NO: 297988 - RNA, 19 nt, Artificial Sequence
  Description of Artificial Sequence: Synthetic oligonucleotide
ccccgguccauuguccaug

SEQ ID NO: 297989 - RNA, 19 nt, Artificial Sequence
  Description of Artificial Sequence: Synthetic oligonucleotide
gcuugguaggucgcccauc

SEQ ID NO: 297990 - RNA, 19 nt, Artificial Sequence
  Description of Artificial Sequence: Synthetic oligonucleotide
caccuuccugagaaggcuu

SEQ ID NO: 297991 - RNA, 19 nt, Artificial Sequence
  Description of Artificial Sequence: Synthetic oligonucleotide
cgugccacacacacacaca

SEQ ID NO: 297992 - RNA, 19 nt, Artificial Sequence
  Description of Artificial Sequence: Synthetic oligonucleotide
cagucaugucuaagccgcu

SEQ ID NO: 297993 - RNA, 19 nt, Artificial Sequence
  Description of Artificial Sequence: Synthetic oligonucleotide
guguguguguguggugcgu

SEQ ID NO: 297994 - RNA, 19 nt, Artificial Sequence
  Description of Artificial Sequence: Synthetic oligonucleotide
cuggaggggcccgcaucuc

SEQ ID NO: 297995 - RNA, 19 nt, Artificial Sequence
  Description of Artificial Sequence: Synthetic oligonucleotide
cagucugaugguugcuguu

SEQ ID NO: 297996 - RNA, 19 nt, Artificial Sequence
  Description of Artificial Sequence: Synthetic oligonucleotide
ggacagugugugugugugu

SEQ ID NO: 297997 - RNA, 19 nt, Artificial Sequence
  Description of Artificial Sequence: Synthetic oligonucleotide
accguucaugggagguuuu

SEQ ID NO: 297998 - RNA, 19 nt, Artificial Sequence
  Description of Artificial Sequence: Synthetic oligonucleotide
gcguucggccuuggugagg

SEQ ID NO: 297999 - RNA, 19 nt, Artificial Sequence
  Description of Artificial Sequence: Synthetic oligonucleotide
gggccgguccagugcuggc

SEQ ID NO: 298000 - RNA, 19 nt, Artificial Sequence
  Description of Artificial Sequence: Synthetic oligonucleotide
ccgacuuagacugcagggu

SEQ ID NO: 298001 - RNA, 19 nt, Artificial Sequence
  Description of Artificial Sequence: Synthetic oligonucleotide
ccucagacuccgacuuaga

SEQ ID NO: 298002 - RNA, 19 nt, Artificial Sequence
  Description of Artificial Sequence: Synthetic oligonucleotide
gucgcccaucaaacuuguc

SEQ ID NO: 298003 - RNA, 19 nt, Artificial Sequence
  Description of Artificial Sequence: Synthetic oligonucleotide
guggugcgugccacacaca

SEQ ID NO: 298004 - RNA, 19 nt, Artificial Sequence
  Description of Artificial Sequence: Synthetic oligonucleotide
cagcggcugccaaucucua

SEQ ID NO: 298005 - RNA, 19 nt, Artificial Sequence
  Description of Artificial Sequence: Synthetic oligonucleotide
gggcucaugcagucuuccu

SEQ ID NO: 298006 - RNA, 19 nt, Artificial Sequence
  Description of Artificial Sequence: Synthetic oligonucleotide
ccccgccauccucagagga

SEQ ID NO: 298007 - RNA, 19 nt, Artificial Sequence
  Description of Artificial Sequence: Synthetic oligonucleotide
ccucgaagcuuagucauau

SEQ ID NO: 298008 - RNA, 19 nt, Artificial Sequence
  Description of Artificial Sequence: Synthetic oligonucleotide
ccuuauauuuagccuucuu

SEQ ID NO: 298009 - RNA, 19 nt, Artificial Sequence
  Description of Artificial Sequence: Synthetic oligonucleotide
cagagacggcagccgagau

SEQ ID NO: 298010 - RNA, 19 nt, Artificial Sequence
  Description of Artificial Sequence: Synthetic oligonucleotide
caggccgcuugggcuuuuc

SEQ ID NO: 298011 - RNA, 19 nt, Artificial Sequence
  Description of Artificial Sequence: Synthetic oligonucleotide
ggucgcccaucaaacuugu

SEQ ID NO: 298012 - RNA, 19 nt, Artificial Sequence
  Description of Artificial Sequence: Synthetic oligonucleotide
ccgguccauuguccaugcc

SEQ ID NO: 298013 - RNA, 19 nt, Artificial Sequence
  Description of Artificial Sequence: Synthetic oligonucleotide
cggcugccaaucucuacca

SEQ ID NO: 298014 - RNA, 19 nt, Artificial Sequence
  Description of Artificial Sequence: Synthetic oligonucleotide
gccgcucccaugguacaaa

SEQ ID NO: 298015 - RNA, 19 nt, Artificial Sequence
  Description of Artificial Sequence: Synthetic oligonucleotide
ggcugccaaucucuaccau

SEQ ID NO: 298016 - RNA, 19 nt, Artificial Sequence
  Description of Artificial Sequence: Synthetic oligonucleotide
cugugcucggcacguccuu

SEQ ID NO: 298017 - RNA, 19 nt, Artificial Sequence
  Description of Artificial Sequence: Synthetic oligonucleotide
cuuagacugcagggugguu

SEQ ID NO: 298018 - RNA, 19 nt, Artificial Sequence
  Description of Artificial Sequence: Synthetic oligonucleotide
cagccucccgagccuuaua

SEQ ID NO: 298019 - RNA, 19 nt, Artificial Sequence
  Description of Artificial Sequence: Synthetic oligonucleotide
gccuuggugaggguagauu

SEQ ID NO: 298020 - RNA, 19 nt, Artificial Sequence
  Description of Artificial Sequence: Synthetic oligonucleotide
gcagggugguucggcuaga

SEQ ID NO: 298021 - RNA, 19 nt, Artificial Sequence
  Description of Artificial Sequence: Synthetic oligonucleotide
ggccgguccagugcuggcu

SEQ ID NO: 298022 - RNA, 19 nt, Artificial Sequence
  Description of Artificial Sequence: Synthetic oligonucleotide
ccgaacucuuuaggacaca

SEQ ID NO: 298023 - RNA, 19 nt, Artificial Sequence
  Description of Artificial Sequence: Synthetic oligonucleotide
gccucccgagccuuauauu

SEQ ID NO: 298024 - RNA, 19 nt, Artificial Sequence
  Description of Artificial Sequence: Synthetic oligonucleotide
cggcuagacuuaggauuug

SEQ ID NO: 298025 - RNA, 19 nt, Artificial Sequence
  Description of Artificial Sequence: Synthetic oligonucleotide
ccguucucucccuccaguu

SEQ ID NO: 298026 - RNA, 19 nt, Artificial Sequence
  Description of Artificial Sequence: Synthetic oligonucleotide
cgguuaggaaacgucucgu

SEQ ID NO: 298027 - RNA, 19 nt, Artificial Sequence
  Description of Artificial Sequence: Synthetic oligonucleotide
gcacgguccuggggagaca

SEQ ID NO: 298028 - RNA, 19 nt, Artificial Sequence
  Description of Artificial Sequence: Synthetic oligonucleotide
cguugacagcucagagcuu

SEQ ID NO: 298029 - RNA, 19 nt, Artificial Sequence
  Description of Artificial Sequence: Synthetic oligonucleotide
uguauaaagucacaaaucc

SEQ ID NO: 298030 - RNA, 19 nt, Artificial Sequence
  Description of Artificial Sequence: Synthetic oligonucleotide
uuuuauagagaccaucucg

SEQ ID NO: 298031 - RNA, 19 nt, Artificial Sequence
  Description of Artificial Sequence: Synthetic oligonucleotide
uauuuuaacagcuuccagg

SEQ ID NO: 298032 - RNA, 19 nt, Artificial Sequence
  Description of Artificial Sequence: Synthetic oligonucleotide
aaacuuuagucccauauuc

SEQ ID NO: 298033 - RNA, 19 nt, Artificial Sequence
  Description of Artificial Sequence: Synthetic oligonucleotide
aauaaugcaauguuggggu

SEQ ID NO: 298034 - RNA, 19 nt, Artificial Sequence
  Description of Artificial Sequence: Synthetic oligonucleotide
acuuguaacgcuuaccugc

SEQ ID NO: 298035 - RNA, 19 nt, Artificial Sequence
  Description of Artificial Sequence: Synthetic oligonucleotide
uccauaauacaguacaugg

SEQ ID NO: 298036 - RNA, 19 nt, Artificial Sequence
  Description of Artificial Sequence: Synthetic oligonucleotide
auaaggaucacaccaaaac

SEQ ID NO: 298037 - RNA, 19 nt, Artificial Sequence
  Description of Artificial Sequence: Synthetic oligonucleotide
aauuaauguaacacaaccc

SEQ ID NO: 298038 - RNA, 19 nt, Artificial Sequence
  Description of Artificial Sequence: Synthetic oligonucleotide
aagugaaagaguuuugguc

SEQ ID NO: 298039 - RNA, 19 nt, Artificial Sequence
  Description of Artificial Sequence: Synthetic oligonucleotide
acagcuaucuacuaggagg

SEQ ID NO: 298040 - RNA, 19 nt, Artificial Sequence
  Description of Artificial Sequence: Synthetic oligonucleotide
aacaaccccaucuuucucc

SEQ ID NO: 298041 - RNA, 19 nt, Artificial Sequence
  Description of Artificial Sequence: Synthetic oligonucleotide
aaauaaugcaauguugggg

SEQ ID NO: 298042 - RNA, 19 nt, Artificial Sequence
  Description of Artificial Sequence: Synthetic oligonucleotide
uuuauagagaccaucucgc

SEQ ID NO: 298043 - RNA, 19 nt, Artificial Sequence
  Description of Artificial Sequence: Synthetic oligonucleotide
uaauuugucccauuguagg

SEQ ID NO: 298044 - RNA, 19 nt, Artificial Sequence
  Description of Artificial Sequence: Synthetic oligonucleotide
uguaauuugagucugcaau

SEQ ID NO: 298045 - RNA, 19 nt, Artificial Sequence
  Description of Artificial Sequence: Synthetic oligonucleotide
aacaucuaaccgcugaggg

SEQ ID NO: 298046 - RNA, 19 nt, Artificial Sequence
  Description of Artificial Sequence: Synthetic oligonucleotide
accaguuguaauuugaguc

SEQ ID NO: 298047 - RNA, 19 nt, Artificial Sequence
  Description of Artificial Sequence: Synthetic oligonucleotide
aaacuuguaacgcuuaccu

SEQ ID NO: 298048 - RNA, 19 nt, Artificial Sequence
  Description of Artificial Sequence: Synthetic oligonucleotide
aauuugucccauuguaggg

SEQ ID NO: 298049 - RNA, 19 nt, Artificial Sequence
  Description of Artificial Sequence: Synthetic oligonucleotide
uacgaaaacaucuaaccgc

SEQ ID NO: 298050 - RNA, 19 nt, Artificial Sequence
  Description of Artificial Sequence: Synthetic oligonucleotide
aauuugagucugcaauggc

SEQ ID NO: 298051 - RNA, 19 nt, Artificial Sequence
  Description of Artificial Sequence: Synthetic oligonucleotide
cacaccaaaacuuuagucc

SEQ ID NO: 298052 - RNA, 19 nt, Artificial Sequence
  Description of Artificial Sequence: Synthetic oligonucleotide
uguggaagaaacuugcagc

SEQ ID NO: 298053 - RNA, 19 nt, Artificial Sequence
  Description of Artificial Sequence: Synthetic oligonucleotide
aauaagucaguugcauugc

SEQ ID NO: 298054 - RNA, 19 nt, Artificial Sequence
  Description of Artificial Sequence: Synthetic oligonucleotide
aaagauaauuaucuguaau

SEQ ID NO: 298055 - RNA, 19 nt, Artificial Sequence
  Description of Artificial Sequence: Synthetic oligonucleotide
aauaucugggacggcaucc

SEQ ID NO: 298056 - RNA, 19 nt, Artificial Sequence
  Description of Artificial Sequence: Synthetic oligonucleotide
aagauaauuaucuguaauu

SEQ ID NO: 298057 - RNA, 19 nt, Artificial Sequence
  Description of Artificial Sequence: Synthetic oligonucleotide
aaaacaucuaaccgcugag

SEQ ID NO: 298058 - RNA, 19 nt, Artificial Sequence
  Description of Artificial Sequence: Synthetic oligonucleotide
gaugcuaaagcucuggaca

SEQ ID NO: 298059 - RNA, 19 nt, Artificial Sequence
  Description of Artificial Sequence: Synthetic oligonucleotide
aucaagaagagucuggugu

SEQ ID NO: 298060 - RNA, 19 nt, Artificial Sequence
  Description of Artificial Sequence: Synthetic oligonucleotide
ugaaaacuuuacuauuggg

SEQ ID NO: 298061 - RNA, 19 nt, Artificial Sequence
  Description of Artificial Sequence: Synthetic oligonucleotide
gaauugaccaauaucauca

SEQ ID NO: 298062 - RNA, 19 nt, Artificial Sequence
  Description of Artificial Sequence: Synthetic oligonucleotide
aguaucauccauccaguac

SEQ ID NO: 298063 - RNA, 19 nt, Artificial Sequence
  Description of Artificial Sequence: Synthetic oligonucleotide
aagucaguugcauugccag

SEQ ID NO: 298064 - RNA, 19 nt, Artificial Sequence
  Description of Artificial Sequence: Synthetic oligonucleotide
ucucuuaucagaaaaccuc

SEQ ID NO: 298065 - RNA, 19 nt, Artificial Sequence
  Description of Artificial Sequence: Synthetic oligonucleotide
uucguauguaacaucagca

SEQ ID NO: 298066 - RNA, 19 nt, Artificial Sequence
  Description of Artificial Sequence: Synthetic oligonucleotide
aacuacucuccccugacag

SEQ ID NO: 298067 - RNA, 19 nt, Artificial Sequence
  Description of Artificial Sequence: Synthetic oligonucleotide
uuucguauguaacaucagc

SEQ ID NO: 298068 - RNA, 19 nt, Artificial Sequence
  Description of Artificial Sequence: Synthetic oligonucleotide
uaucagaaaaccucagcag

SEQ ID NO: 298069 - RNA, 19 nt, Artificial Sequence
  Description of Artificial Sequence: Synthetic oligonucleotide
aaagugaaagaguuuuggu

SEQ ID NO: 298070 - RNA, 19 nt, Artificial Sequence
  Description of Artificial Sequence: Synthetic oligonucleotide
aaacuuuacuauugggucu

SEQ ID NO: 298071 - RNA, 19 nt, Artificial Sequence
  Description of Artificial Sequence: Synthetic oligonucleotide
uacuucggcccauagaggg

SEQ ID NO: 298072 - RNA, 19 nt, Artificial Sequence
  Description of Artificial Sequence: Synthetic oligonucleotide
aguauguuccauaauacag

SEQ ID NO: 298073 - RNA, 19 nt, Artificial Sequence
  Description of Artificial Sequence: Synthetic oligonucleotide
uguuaugccaucauuuuau

SEQ ID NO: 298074 - RNA, 19 nt, Artificial Sequence
  Description of Artificial Sequence: Synthetic oligonucleotide
cauccaguacauuuuauag

SEQ ID NO: 298075 - RNA, 19 nt, Artificial Sequence
  Description of Artificial Sequence: Synthetic oligonucleotide
cuacgaaaacaucuaaccg

SEQ ID NO: 298076 - RNA, 19 nt, Artificial Sequence
  Description of Artificial Sequence: Synthetic oligonucleotide
auuuuauccagguaacacu

SEQ ID NO: 298077 - RNA, 19 nt, Artificial Sequence
  Description of Artificial Sequence: Synthetic oligonucleotide
gaugaaagcuccauggacc

SEQ ID NO: 298078 - RNA, 19 nt, Artificial Sequence
  Description of Artificial Sequence: Synthetic oligonucleotide
caugcuuguauuuugacca

SEQ ID NO: 298079 - RNA, 19 nt, Artificial Sequence
  Description of Artificial Sequence: Synthetic oligonucleotide
uuauauagaagggaaagau

SEQ ID NO: 298080 - RNA, 19 nt, Artificial Sequence
  Description of Artificial Sequence: Synthetic oligonucleotide
aagucacaaaucccaugcc

SEQ ID NO: 298081 - RNA, 19 nt, Artificial Sequence
  Description of Artificial Sequence: Synthetic oligonucleotide
acuaauuggcuuucuggac

SEQ ID NO: 298082 - RNA, 19 nt, Artificial Sequence
  Description of Artificial Sequence: Synthetic oligonucleotide
uguguagagugcaccagcg

SEQ ID NO: 298083 - RNA, 19 nt, Artificial Sequence
  Description of Artificial Sequence: Synthetic oligonucleotide
auuugagucugcaauggcc

SEQ ID NO: 298084 - RNA, 19 nt, Artificial Sequence
  Description of Artificial Sequence: Synthetic oligonucleotide
auuaucuguaauuauguua

SEQ ID NO: 298085 - RNA, 19 nt, Artificial Sequence
  Description of Artificial Sequence: Synthetic oligonucleotide
uggaccauaaaaccaguug

SEQ ID NO: 298086 - RNA, 19 nt, Artificial Sequence
  Description of Artificial Sequence: Synthetic oligonucleotide
uaauuugagucugcaaugg

SEQ ID NO: 298087 - RNA, 19 nt, Artificial Sequence
  Description of Artificial Sequence: Synthetic oligonucleotide
ucaguauguuccauaauac

SEQ ID NO: 298088 - RNA, 19 nt, Artificial Sequence
  Description of Artificial Sequence: Synthetic oligonucleotide
uuacgcaugacaaauuuua

SEQ ID NO: 298089 - RNA, 19 nt, Artificial Sequence
  Description of Artificial Sequence: Synthetic oligonucleotide
uucacuucggggacggugg

SEQ ID NO: 298090 - RNA, 19 nt, Artificial Sequence
  Description of Artificial Sequence: Synthetic oligonucleotide
aaauaucugggacggcauc

SEQ ID NO: 298091 - RNA, 19 nt, Artificial Sequence
  Description of Artificial Sequence: Synthetic oligonucleotide
acaguuacaguucccauca

SEQ ID NO: 298092 - RNA, 19 nt, Artificial Sequence
  Description of Artificial Sequence: Synthetic oligonucleotide
ucaguaaugaaaggcacgc

SEQ ID NO: 298093 - RNA, 19 nt, Artificial Sequence
  Description of Artificial Sequence: Synthetic oligonucleotide
auaagucaguugcauugcc

SEQ ID NO: 298094 - RNA, 19 nt, Artificial Sequence
  Description of Artificial Sequence: Synthetic oligonucleotide
ucaugcuuguauuuugacc

SEQ ID NO: 298095 - RNA, 19 nt, Artificial Sequence
  Description of Artificial Sequence: Synthetic oligonucleotide
guaucauccauccaguaca

SEQ ID NO: 298096 - RNA, 19 nt, Artificial Sequence
  Description of Artificial Sequence: Synthetic oligonucleotide
guaauuugagucugcaaug

SEQ ID NO: 298097 - RNA, 19 nt, Artificial Sequence
  Description of Artificial Sequence: Synthetic oligonucleotide
ucugauuuggucagcuagc

SEQ ID NO: 298098 - RNA, 19 nt, Artificial Sequence
  Description of Artificial Sequence: Synthetic oligonucleotide
cuaucuacuaggaggacug

SEQ ID NO: 298099 - RNA, 19 nt, Artificial Sequence
  Description of Artificial Sequence: Synthetic oligonucleotide
cugaugaucugcaaucacc

SEQ ID NO: 298100 - RNA, 19 nt, Artificial Sequence
  Description of Artificial Sequence: Synthetic oligonucleotide
agaaaaccucagcaggcgc

SEQ ID NO: 298101 - RNA, 19 nt, Artificial Sequence
  Description of Artificial Sequence: Synthetic oligonucleotide
agaggaacgaucuauuaau

SEQ ID NO: 298102 - RNA, 19 nt, Artificial Sequence
  Description of Artificial Sequence: Synthetic oligonucleotide
ugaccaauaucaucaaaga

SEQ ID NO: 298103 - RNA, 19 nt, Artificial Sequence
  Description of Artificial Sequence: Synthetic oligonucleotide
guauugagauucaagauac

SEQ ID NO: 298104 - RNA, 19 nt, Artificial Sequence
  Description of Artificial Sequence: Synthetic oligonucleotide
auugaccucaaucugugca

SEQ ID NO: 298105 - RNA, 19 nt, Artificial Sequence
  Description of Artificial Sequence: Synthetic oligonucleotide
aaacaucuaaccgcugagg

SEQ ID NO: 298106 - RNA, 19 nt, Artificial Sequence
  Description of Artificial Sequence: Synthetic oligonucleotide
gcuacgaaaacaucuaacc

SEQ ID NO: 298107 - RNA, 19 nt, Artificial Sequence
  Description of Artificial Sequence: Synthetic oligonucleotide
aguacauuuuauagagacc

SEQ ID NO: 298108 - RNA, 19 nt, Artificial Sequence
  Description of Artificial Sequence: Synthetic oligonucleotide
ugaauugaccaauaucauc

SEQ ID NO: 298109 - RNA, 19 nt, Artificial Sequence
  Description of Artificial Sequence: Synthetic oligonucleotide
cuuaucagaaaaccucagc

SEQ ID NO: 298110 - RNA, 19 nt, Artificial Sequence
  Description of Artificial Sequence: Synthetic oligonucleotide
ucuuaucagaaaaccucag

SEQ ID NO: 298111 - RNA, 19 nt, Artificial Sequence
  Description of Artificial Sequence: Synthetic oligonucleotide
aaucaagaagagucuggug

SEQ ID NO: 298112 - RNA, 19 nt, Artificial Sequence
  Description of Artificial Sequence: Synthetic oligonucleotide
ugcaaaggcagauugcccu

SEQ ID NO: 298113 - RNA, 19 nt, Artificial Sequence
  Description of Artificial Sequence: Synthetic oligonucleotide
uguagggauagccccgagg

SEQ ID NO: 298114 - RNA, 19 nt, Artificial Sequence
  Description of Artificial Sequence: Synthetic oligonucleotide
acgcaugacaaauuuuauc

SEQ ID NO: 298115 - RNA, 19 nt, Artificial Sequence
  Description of Artificial Sequence: Synthetic oligonucleotide
ccugaauugaccaauauca

SEQ ID NO: 298116 - RNA, 19 nt, Artificial Sequence
  Description of Artificial Sequence: Synthetic oligonucleotide
ugaauguauaaagucacaa

SEQ ID NO: 298117 - RNA, 19 nt, Artificial Sequence
  Description of Artificial Sequence: Synthetic oligonucleotide
ugugaccugacccucccag

SEQ ID NO: 298118 - RNA, 19 nt, Artificial Sequence
  Description of Artificial Sequence: Synthetic oligonucleotide
agaagggaaagauaauuau

SEQ ID NO: 298119 - RNA, 19 nt, Artificial Sequence
  Description of Artificial Sequence: Synthetic oligonucleotide
aaaucccaugccugaauug

SEQ ID NO: 298120 - RNA, 19 nt, Artificial Sequence
  Description of Artificial Sequence: Synthetic oligonucleotide
gaacacuggcuuaaaaugc

SEQ ID NO: 298121 - RNA, 19 nt, Artificial Sequence
  Description of Artificial Sequence: Synthetic oligonucleotide
uucacugguagcuacgaaa

SEQ ID NO: 298122 - RNA, 19 nt, Artificial Sequence
  Description of Artificial Sequence: Synthetic oligonucleotide
cuaugucauaaaucgcacg

SEQ ID NO: 298123 - RNA, 19 nt, Artificial Sequence
  Description of Artificial Sequence: Synthetic oligonucleotide
augauugguuuauuuagca

SEQ ID NO: 298124 - RNA, 19 nt, Artificial Sequence
  Description of Artificial Sequence: Synthetic oligonucleotide
ucgagauaggaucugcuuc

SEQ ID NO: 298125 - RNA, 19 nt, Artificial Sequence
  Description of Artificial Sequence: Synthetic oligonucleotide
aaacaaccccaucuuucuc

SEQ ID NO: 298126 - RNA, 19 nt, Artificial Sequence
  Description of Artificial Sequence: Synthetic oligonucleotide
aacuuguaacgcuuaccug

SEQ ID NO: 298127 - RNA, 19 nt, Artificial Sequence
  Description of Artificial Sequence: Synthetic oligonucleotide
agauaggaucugcuucucc

SEQ ID NO: 298128 - RNA, 19 nt, Artificial Sequence
  Description of Artificial Sequence: Synthetic oligonucleotide
gacuugaaggagaggaacg

SEQ ID NO: 298129 - RNA, 19 nt, Artificial Sequence
  Description of Artificial Sequence: Synthetic oligonucleotide
gaauguauaaagucacaaa

SEQ ID NO: 298130 - RNA, 19 nt, Artificial Sequence
  Description of Artificial Sequence: Synthetic oligonucleotide
aaucccaugccugaauuga

SEQ ID NO: 298131 - RNA, 19 nt, Artificial Sequence
  Description of Artificial Sequence: Synthetic oligonucleotide
aacgcuuaccugcccuucg

SEQ ID NO: 298132 - RNA, 19 nt, Artificial Sequence
  Description of Artificial Sequence: Synthetic oligonucleotide
acuacucuccccugacagc

SEQ ID NO: 298133 - RNA, 19 nt, Artificial Sequence
  Description of Artificial Sequence: Synthetic oligonucleotide
cuggacucgagauaggauc

SEQ ID NO: 298134 - RNA, 19 nt, Artificial Sequence
  Description of Artificial Sequence: Synthetic oligonucleotide
ucacugguagcuacgaaaa

SEQ ID NO: 298135 - RNA, 19 nt, Artificial Sequence
  Description of Artificial Sequence: Synthetic oligonucleotide
uuaugccaucauuuuauca

SEQ ID NO: 298136 - RNA, 19 nt, Artificial Sequence
  Description of Artificial Sequence: Synthetic oligonucleotide
agaguuuuggucaggaugu

SEQ ID NO: 298137 - RNA, 19 nt, Artificial Sequence
  Description of Artificial Sequence: Synthetic oligonucleotide
cgcaugacaaauuuuaucc

SEQ ID NO: 298138 - RNA, 19 nt, Artificial Sequence
  Description of Artificial Sequence: Synthetic oligonucleotide
uguaacgcuuaccugcccu

SEQ ID NO: 298139 - RNA, 19 nt, Artificial Sequence
  Description of Artificial Sequence: Synthetic oligonucleotide
uguggacuaugucauaaau

SEQ ID NO: 298140 - RNA, 19 nt, Artificial Sequence
  Description of Artificial Sequence: Synthetic oligonucleotide
uugguguuagcauugugau

SEQ ID NO: 298141 - RNA, 19 nt, Artificial Sequence
  Description of Artificial Sequence: Synthetic oligonucleotide
agucaguugcauugccagc

SEQ ID NO: 298142 - RNA, 19 nt, Artificial Sequence
  Description of Artificial Sequence: Synthetic oligonucleotide
acuaugucauaaaucgcac

SEQ ID NO: 298143 - RNA, 19 nt, Artificial Sequence
  Description of Artificial Sequence: Synthetic oligonucleotide
uggaaauaagucaguugca

SEQ ID NO: 298144 - RNA, 19 nt, Artificial Sequence
  Description of Artificial Sequence: Synthetic oligonucleotide
agauaauuaucuguaauua

SEQ ID NO: 298145 - RNA, 19 nt, Artificial Sequence
  Description of Artificial Sequence: Synthetic oligonucleotide
ucguauguaacaucagcaa

SEQ ID NO: 298146 - RNA, 19 nt, Artificial Sequence
  Description of Artificial Sequence: Synthetic oligonucleotide
aagcuccuacgccuucucc

SEQ ID NO: 298147 - RNA, 19 nt, Artificial Sequence
  Description of Artificial Sequence: Synthetic oligonucleotide
ucuacuaggaggacugcau

SEQ ID NO: 298148 - RNA, 19 nt, Artificial Sequence
  Description of Artificial Sequence: Synthetic oligonucleotide
ggaacgaucuauuaauuuc

SEQ ID NO: 298149 - RNA, 19 nt, Artificial Sequence
  Description of Artificial Sequence: Synthetic oligonucleotide
acuucggggacgguggugc

SEQ ID NO: 298150 - RNA, 19 nt, Artificial Sequence
  Description of Artificial Sequence: Synthetic oligonucleotide
ugcucuugauggcugaacu

SEQ ID NO: 298151 - RNA, 19 nt, Artificial Sequence
  Description of Artificial Sequence: Synthetic oligonucleotide
gucaacaagcaggagaagc

SEQ ID NO: 298152 - RNA, 19 nt, Artificial Sequence
  Description of Artificial Sequence: Synthetic oligonucleotide
agacacagcuaucuacuag

SEQ ID NO: 298153 - RNA, 19 nt, Artificial Sequence
  Description of Artificial Sequence: Synthetic oligonucleotide
uacaguuacaguucccauc

SEQ ID NO: 298154 - RNA, 19 nt, Artificial Sequence
  Description of Artificial Sequence: Synthetic oligonucleotide
aguugcauaggcauguuca

SEQ ID NO: 298155 - RNA, 19 nt, Artificial Sequence
  Description of Artificial Sequence: Synthetic oligonucleotide
uccccggaugaaaacaacc

SEQ ID NO: 298156 - RNA, 19 nt, Artificial Sequence
  Description of Artificial Sequence: Synthetic oligonucleotide
ugccaaaaucuggaggugg

SEQ ID NO: 298157 - RNA, 19 nt, Artificial Sequence
  Description of Artificial Sequence: Synthetic oligonucleotide
guagggauagccccgagga

SEQ ID NO: 298158 - RNA, 19 nt, Artificial Sequence
  Description of Artificial Sequence: Synthetic oligonucleotide
uaccagagaaauucugugu

SEQ ID NO: 298159 - RNA, 19 nt, Artificial Sequence
  Description of Artificial Sequence: Synthetic oligonucleotide
guguaugaggcugacagug

SEQ ID NO: 298160 - RNA, 19 nt, Artificial Sequence
  Description of Artificial Sequence: Synthetic oligonucleotide
uuauccagguaacacuaau

SEQ ID NO: 298161 - RNA, 19 nt, Artificial Sequence
  Description of Artificial Sequence: Synthetic oligonucleotide
auggaccccauccaccacg

SEQ ID NO: 298162 - RNA, 19 nt, Artificial Sequence
  Description of Artificial Sequence: Synthetic oligonucleotide
agcuacgaaaacaucuaac

SEQ ID NO: 298163 - RNA, 19 nt, Artificial Sequence
  Description of Artificial Sequence: Synthetic oligonucleotide
aacuuuagucccauauucu

SEQ ID NO: 298164 - RNA, 19 nt, Artificial Sequence
  Description of Artificial Sequence: Synthetic oligonucleotide
ucucgcugccggaugaaag

SEQ ID NO: 298165 - RNA, 19 nt, Artificial Sequence
  Description of Artificial Sequence: Synthetic oligonucleotide
ucaccuguccacagguaag

SEQ ID NO: 298166 - RNA, 19 nt, Artificial Sequence
  Description of Artificial Sequence: Synthetic oligonucleotide
auugcgcugaauguucuuc

SEQ ID NO: 298167 - RNA, 19 nt, Artificial Sequence
  Description of Artificial Sequence: Synthetic oligonucleotide
cucaguauguuccauaaua

SEQ ID NO: 298168 - RNA, 19 nt, Artificial Sequence
  Description of Artificial Sequence: Synthetic oligonucleotide
uaaugcaauguuggggugc

SEQ ID NO: 298169 - RNA, 19 nt, Artificial Sequence
  Description of Artificial Sequence: Synthetic oligonucleotide
ucuguguguagagugcacc

SEQ ID NO: 298170 - RNA, 19 nt, Artificial Sequence
  Description of Artificial Sequence: Synthetic oligonucleotide
caucuaaccgcugaggguc

SEQ ID NO: 298171 - RNA, 19 nt, Artificial Sequence
  Description of Artificial Sequence: Synthetic oligonucleotide
aacacuggcuuaaaaugcu

SEQ ID NO: 298172 - RNA, 19 nt, Artificial Sequence
  Description of Artificial Sequence: Synthetic oligonucleotide
ucuuucacuucggggacgg

SEQ ID NO: 298173 - RNA, 19 nt, Artificial Sequence
  Description of Artificial Sequence: Synthetic oligonucleotide
gagaaauucuguguguaga

SEQ ID NO: 298174 - RNA, 19 nt, Artificial Sequence
  Description of Artificial Sequence: Synthetic oligonucleotide
ggaauuaugugucucagua

SEQ ID NO: 298175 - RNA, 19 nt, Artificial Sequence
  Description of Artificial Sequence: Synthetic oligonucleotide
cauggaaguuucuacuauc

SEQ ID NO: 298176 - RNA, 19 nt, Artificial Sequence
  Description of Artificial Sequence: Synthetic oligonucleotide
uacaauguuaugccaucau

SEQ ID NO: 298177 - RNA, 19 nt, Artificial Sequence
  Description of Artificial Sequence: Synthetic oligonucleotide
cacuaauuggcuuucugga

SEQ ID NO: 298178 - RNA, 19 nt, Artificial Sequence
  Description of Artificial Sequence: Synthetic oligonucleotide
ucugggacggcauccacaa

SEQ ID NO: 298179 - RNA, 19 nt, Artificial Sequence
  Description of Artificial Sequence: Synthetic oligonucleotide
cauguucacugguagcuac

SEQ ID NO: 298180 - RNA, 19 nt, Artificial Sequence
  Description of Artificial Sequence: Synthetic oligonucleotide
ucuguagauguuuuccaua

SEQ ID NO: 298181 - RNA, 19 nt, Artificial Sequence
  Description of Artificial Sequence: Synthetic oligonucleotide
cuugccuuguugcugccgc

SEQ ID NO: 298182 - RNA, 19 nt, Artificial Sequence
  Description of Artificial Sequence: Synthetic oligonucleotide
caucagcaaaauccaaaag

SEQ ID NO: 298183 - RNA, 19 nt, Artificial Sequence
  Description of Artificial Sequence: Synthetic oligonucleotide
gguauugagauucaagaua

SEQ ID NO: 298184 - RNA, 19 nt, Artificial Sequence
  Description of Artificial Sequence: Synthetic oligonucleotide
gaaaacaucaggacguugu

SEQ ID NO: 298185 - RNA, 19 nt, Artificial Sequence
  Description of Artificial Sequence: Synthetic oligonucleotide
uacgccuucuccccggaug

SEQ ID NO: 298186 - RNA, 19 nt, Artificial Sequence
  Description of Artificial Sequence: Synthetic oligonucleotide
ugggucugcaaacauuuua

SEQ ID NO: 298187 - RNA, 19 nt, Artificial Sequence
  Description of Artificial Sequence: Synthetic oligonucleotide
uuucacuucggggacggug

SEQ ID NO: 298188 - RNA, 19 nt, Artificial Sequence
  Description of Artificial Sequence: Synthetic oligonucleotide
acaauguuaugccaucauu

SEQ ID NO: 298189 - RNA, 19 nt, Artificial Sequence
  Description of Artificial Sequence: Synthetic oligonucleotide
acgaaaacaucuaaccgcu

SEQ ID NO: 298190 - RNA, 19 nt, Artificial Sequence
  Description of Artificial Sequence: Synthetic oligonucleotide
ggaauacaaccacaguaag

SEQ ID NO: 298191 - RNA, 19 nt, Artificial Sequence
  Description of Artificial Sequence: Synthetic oligonucleotide
agguggaacugauuucaag

SEQ ID NO: 298192 - RNA, 19 nt, Artificial Sequence
  Description of Artificial Sequence: Synthetic oligonucleotide
aacgaucuauuaauuucug

SEQ ID NO: 298193 - RNA, 19 nt, Artificial Sequence
  Description of Artificial Sequence: Synthetic oligonucleotide
ugcaacuacucuccccuga

SEQ ID NO: 298194 - RNA, 19 nt, Artificial Sequence
  Description of Artificial Sequence: Synthetic oligonucleotide
auaaugcaauguuggggug

SEQ ID NO: 298195 - RNA, 19 nt, Artificial Sequence
  Description of Artificial Sequence: Synthetic oligonucleotide
uuacaauguuaugccauca

SEQ ID NO: 298196 - RNA, 19 nt, Artificial Sequence
  Description of Artificial Sequence: Synthetic oligonucleotide
cucgcugccggaugaaagc

SEQ ID NO: 298197 - RNA, 19 nt, Artificial Sequence
  Description of Artificial Sequence: Synthetic oligonucleotide
ugagcccucuggaaauaag

SEQ ID NO: 298198 - RNA, 19 nt, Artificial Sequence
  Description of Artificial Sequence: Synthetic oligonucleotide
guaacacaacccaauucag

SEQ ID NO: 298199 - RNA, 19 nt, Artificial Sequence
  Description of Artificial Sequence: Synthetic oligonucleotide
aggucaugcuuguauuuug

SEQ ID NO: 298200 - RNA, 19 nt, Artificial Sequence
  Description of Artificial Sequence: Synthetic oligonucleotide
agucccauauucuuuggua

SEQ ID NO: 298201 - RNA, 19 nt, Artificial Sequence
  Description of Artificial Sequence: Synthetic oligonucleotide
gggguuguaagcuccuacg

SEQ ID NO: 298202 - RNA, 19 nt, Artificial Sequence
  Description of Artificial Sequence: Synthetic oligonucleotide
uguugcgacuuguugucac

SEQ ID NO: 298203 - RNA, 19 nt, Artificial Sequence
  Description of Artificial Sequence: Synthetic oligonucleotide
uuguaauuugagucugcaa

SEQ ID NO: 298204 - RNA, 19 nt, Artificial Sequence
  Description of Artificial Sequence: Synthetic oligonucleotide
gguuguaagcuccuacgcc

SEQ ID NO: 298205 - RNA, 19 nt, Artificial Sequence
  Description of Artificial Sequence: Synthetic oligonucleotide
aaaauccugucaauggcuu

SEQ ID NO: 298206 - RNA, 19 nt, Artificial Sequence
  Description of Artificial Sequence: Synthetic oligonucleotide
aggaacgaucuauuaauuu

SEQ ID NO: 298207 - RNA, 19 nt, Artificial Sequence
  Description of Artificial Sequence: Synthetic oligonucleotide
uacgcaugacaaauuuuau

SEQ ID NO: 298208 - RNA, 19 nt, Artificial Sequence
  Description of Artificial Sequence: Synthetic oligonucleotide
ugucgaaccuucuucucau

SEQ ID NO: 298209 - RNA, 19 nt, Artificial Sequence
  Description of Artificial Sequence: Synthetic oligonucleotide
agccaccuuucacggaacc

SEQ ID NO: 298210 - RNA, 19 nt, Artificial Sequence
  Description of Artificial Sequence: Synthetic oligonucleotide
cagauugcgcugaauguuc

SEQ ID NO: 298211 - RNA, 19 nt, Artificial Sequence
  Description of Artificial Sequence: Synthetic oligonucleotide
guguguagagugcaccagc

SEQ ID NO: 298212 - RNA, 19 nt, Artificial Sequence
  Description of Artificial Sequence: Synthetic oligonucleotide
uggaauuaugugucucagu

SEQ ID NO: 298213 - RNA, 19 nt, Artificial Sequence
  Description of Artificial Sequence: Synthetic oligonucleotide
guugcauaggcauguucac

SEQ ID NO: 298214 - RNA, 19 nt, Artificial Sequence
  Description of Artificial Sequence: Synthetic oligonucleotide
auuugucccauuguaggga

SEQ ID NO: 298215 - RNA, 19 nt, Artificial Sequence
  Description of Artificial Sequence: Synthetic oligonucleotide
ugaccauuuugaugaacaa

SEQ ID NO: 298216 - RNA, 19 nt, Artificial Sequence
  Description of Artificial Sequence: Synthetic oligonucleotide
acgauagcagcauaaucuu

SEQ ID NO: 298217 - RNA, 19 nt, Artificial Sequence
  Description of Artificial Sequence: Synthetic oligonucleotide
auugccagcaugacaagga

SEQ ID NO: 298218 - RNA, 19 nt, Artificial Sequence
  Description of Artificial Sequence: Synthetic oligonucleotide
uagagggccucaguaauga

SEQ ID NO: 298219 - RNA, 19 nt, Artificial Sequence
  Description of Artificial Sequence: Synthetic oligonucleotide
ugcgcugaauguucuucag

SEQ ID NO: 298220 - RNA, 19 nt, Artificial Sequence
  Description of Artificial Sequence: Synthetic oligonucleotide
acaagcaggagaagcugcg

SEQ ID NO: 298221 - RNA, 19 nt, Artificial Sequence
  Description of Artificial Sequence: Synthetic oligonucleotide
uugcgcugaauguucuuca

SEQ ID NO: 298222 - RNA, 19 nt, Artificial Sequence
  Description of Artificial Sequence: Synthetic oligonucleotide
uucggcuuuucuucgacuu

SEQ ID NO: 298223 - RNA, 19 nt, Artificial Sequence
  Description of Artificial Sequence: Synthetic oligonucleotide
ucuccccggaugaaaacaa

SEQ ID NO: 298224 - RNA, 19 nt, Artificial Sequence
  Description of Artificial Sequence: Synthetic oligonucleotide
gaacgaucuauuaauuucu

SEQ ID NO: 298225 - RNA, 19 nt, Artificial Sequence
  Description of Artificial Sequence: Synthetic oligonucleotide
uagcuacgaaaacaucuaa

SEQ ID NO: 298226 - RNA, 19 nt, Artificial Sequence
  Description of Artificial Sequence: Synthetic oligonucleotide
uucgacuugccuuguugcu

SEQ ID NO: 298227 - RNA, 19 nt, Artificial Sequence
  Description of Artificial Sequence: Synthetic oligonucleotide
cuaugggcaguucuuucug

SEQ ID NO: 298228 - RNA, 19 nt, Artificial Sequence
  Description of Artificial Sequence: Synthetic oligonucleotide
acuauugggucugcaaaca

SEQ ID NO: 298229 - RNA, 19 nt, Artificial Sequence
  Description of Artificial Sequence: Synthetic oligonucleotide
gaagguguacuucggccca

SEQ ID NO: 298230 - RNA, 19 nt, Artificial Sequence
  Description of Artificial Sequence: Synthetic oligonucleotide
aguaagacacagcuaucua

SEQ ID NO: 298231 - RNA, 19 nt, Artificial Sequence
  Description of Artificial Sequence: Synthetic oligonucleotide
ucuggacucgagauaggau

SEQ ID NO: 298232 - RNA, 19 nt, Artificial Sequence
  Description of Artificial Sequence: Synthetic oligonucleotide
guaagucacaacaccccag

SEQ ID NO: 298233 - RNA, 19 nt, Artificial Sequence
  Description of Artificial Sequence: Synthetic oligonucleotide
acagauggcccgaugaaga

SEQ ID NO: 298234 - RNA, 19 nt, Artificial Sequence
  Description of Artificial Sequence: Synthetic oligonucleotide
uucuccccggaugaaaaca

SEQ ID NO: 298235 - RNA, 19 nt, Artificial Sequence
  Description of Artificial Sequence: Synthetic oligonucleotide
cagcuaucuacuaggagga

SEQ ID NO: 298236 - RNA, 19 nt, Artificial Sequence
  Description of Artificial Sequence: Synthetic oligonucleotide
uguucacugguagcuacga

SEQ ID NO: 298237 - RNA, 19 nt, Artificial Sequence
  Description of Artificial Sequence: Synthetic oligonucleotide
ugucucaguauguuccaua

SEQ ID NO: 298238 - RNA, 19 nt, Artificial Sequence
  Description of Artificial Sequence: Synthetic oligonucleotide
agacugugcuccacgauag

SEQ ID NO: 298239 - RNA, 19 nt, Artificial Sequence
  Description of Artificial Sequence: Synthetic oligonucleotide
agcccucuggaaauaaguc

SEQ ID NO: 298240 - RNA, 19 nt, Artificial Sequence
  Description of Artificial Sequence: Synthetic oligonucleotide
guugcgacuuguugucacc

SEQ ID NO: 298241 - RNA, 19 nt, Artificial Sequence
  Description of Artificial Sequence: Synthetic oligonucleotide
uuaugugucucaguauguu

SEQ ID NO: 298242 - RNA, 19 nt, Artificial Sequence
  Description of Artificial Sequence: Synthetic oligonucleotide
uagcauugugauugagaac

SEQ ID NO: 298243 - RNA, 19 nt, Artificial Sequence
  Description of Artificial Sequence: Synthetic oligonucleotide
caggacguuguugaagaag

SEQ ID NO: 298244 - RNA, 19 nt, Artificial Sequence
  Description of Artificial Sequence: Synthetic oligonucleotide
gucaugcuuguauuuugac

SEQ ID NO: 298245 - RNA, 19 nt, Artificial Sequence
  Description of Artificial Sequence: Synthetic oligonucleotide
cuucggcccauagagggcc

SEQ ID NO: 298246 - RNA, 19 nt, Artificial Sequence
  Description of Artificial Sequence: Synthetic oligonucleotide
uuccacugccauuacgcau

SEQ ID NO: 298247 - RNA, 19 nt, Artificial Sequence
  Description of Artificial Sequence: Synthetic oligonucleotide
ggaccauaaaaccaguugu

SEQ ID NO: 298248 - RNA, 19 nt, Artificial Sequence
  Description of Artificial Sequence: Synthetic oligonucleotide
cagauggcccgaugaagag

SEQ ID NO: 298249 - RNA, 19 nt, Artificial Sequence
  Description of Artificial Sequence: Synthetic oligonucleotide
aaccaguaucauccaucca

SEQ ID NO: 298250 - RNA, 19 nt, Artificial Sequence
  Description of Artificial Sequence: Synthetic oligonucleotide
cgaucuauuaauuucugca

SEQ ID NO: 298251 - RNA, 19 nt, Artificial Sequence
  Description of Artificial Sequence: Synthetic oligonucleotide
gacucgagauaggaucugc

SEQ ID NO: 298252 - RNA, 19 nt, Artificial Sequence
  Description of Artificial Sequence: Synthetic oligonucleotide
gcuaaagcucuggacaucc

SEQ ID NO: 298253 - RNA, 19 nt, Artificial Sequence
  Description of Artificial Sequence: Synthetic oligonucleotide
gaaggggcucuguugcgac

SEQ ID NO: 298254 - RNA, 19 nt, Artificial Sequence
  Description of Artificial Sequence: Synthetic oligonucleotide
cuucgcaggugcaugguga

SEQ ID NO: 298255 - RNA, 19 nt, Artificial Sequence
  Description of Artificial Sequence: Synthetic oligonucleotide
uugagucugcaauggccac

SEQ ID NO: 298256 - RNA, 19 nt, Artificial Sequence
  Description of Artificial Sequence: Synthetic oligonucleotide
ucccauauucuuugguauu

SEQ ID NO: 298257 - RNA, 19 nt, Artificial Sequence
  Description of Artificial Sequence: Synthetic oligonucleotide
ccgaugaagagguaagcug

SEQ ID NO: 298258 - RNA, 19 nt, Artificial Sequence
  Description of Artificial Sequence: Synthetic oligonucleotide
gugaccugacccucccagg

SEQ ID NO: 298259 - RNA, 19 nt, Artificial Sequence
  Description of Artificial Sequence: Synthetic oligonucleotide
caccauccgcaucuguccg

SEQ ID NO: 298260 - RNA, 19 nt, Artificial Sequence
  Description of Artificial Sequence: Synthetic oligonucleotide
acuucggcccauagagggc

SEQ ID NO: 298261 - RNA, 19 nt, Artificial Sequence
  Description of Artificial Sequence: Synthetic oligonucleotide
gguagcuacgaaaacaucu

SEQ ID NO: 298262 - RNA, 19 nt, Artificial Sequence
  Description of Artificial Sequence: Synthetic oligonucleotide
ugccauuacgcaugacaaa

SEQ ID NO: 298263 - RNA, 19 nt, Artificial Sequence
  Description of Artificial Sequence: Synthetic oligonucleotide
ggguuguaagcuccuacgc

SEQ ID NO: 298264 - RNA, 19 nt, Artificial Sequence
  Description of Artificial Sequence: Synthetic oligonucleotide
gaauuaugugucucaguau

SEQ ID NO: 298265 - RNA, 19 nt, Artificial Sequence
  Description of Artificial Sequence: Synthetic oligonucleotide
guaacacuaauuggcuuuc

SEQ ID NO: 298266 - RNA, 19 nt, Artificial Sequence
  Description of Artificial Sequence: Synthetic oligonucleotide
ugguagcuacgaaaacauc

SEQ ID NO: 298267 - RNA, 19 nt, Artificial Sequence
  Description of Artificial Sequence: Synthetic oligonucleotide
auguucacugguagcuacg

SEQ ID NO: 298268 - RNA, 19 nt, Artificial Sequence
  Description of Artificial Sequence: Synthetic oligonucleotide
cacagguaaguugcauagg

SEQ ID NO: 298269 - RNA, 19 nt, Artificial Sequence
  Description of Artificial Sequence: Synthetic oligonucleotide
guaaguugcauaggcaugu

SEQ ID NO: 298270 - RNA, 19 nt, Artificial Sequence
  Description of Artificial Sequence: Synthetic oligonucleotide
guaugaggcugacagugaa

SEQ ID NO: 298271 - RNA, 19 nt, Artificial Sequence
  Description of Artificial Sequence: Synthetic oligonucleotide
agguaacacuaauuggcuu

SEQ ID NO: 298272 - RNA, 19 nt, Artificial Sequence
  Description of Artificial Sequence: Synthetic oligonucleotide
uugcgacuuguugucacca

SEQ ID NO: 298273 - RNA, 19 nt, Artificial Sequence
  Description of Artificial Sequence: Synthetic oligonucleotide
uuaccugcccuucggcuuu

SEQ ID NO: 298274 - RNA, 19 nt, Artificial Sequence
  Description of Artificial Sequence: Synthetic oligonucleotide
aucuacuaggaggacugca

SEQ ID NO: 298275 - RNA, 19 nt, Artificial Sequence
  Description of Artificial Sequence: Synthetic oligonucleotide
guacuucggcccauagagg

SEQ ID NO: 298276 - RNA, 19 nt, Artificial Sequence
  Description of Artificial Sequence: Synthetic oligonucleotide
cugucgaaccuucuucuca

SEQ ID NO: 298277 - RNA, 19 nt, Artificial Sequence
  Description of Artificial Sequence: Synthetic oligonucleotide
acuaggaggacugcauaaa

SEQ ID NO: 298278 - RNA, 19 nt, Artificial Sequence
  Description of Artificial Sequence: Synthetic oligonucleotide
ccccggaugaaaacaaccc

SEQ ID NO: 298279 - RNA, 19 nt, Artificial Sequence
  Description of Artificial Sequence: Synthetic oligonucleotide
auaugucacugaggcaaag

SEQ ID NO: 298280 - RNA, 19 nt, Artificial Sequence
  Description of Artificial Sequence: Synthetic oligonucleotide
auagccccgaggauauguc

SEQ ID NO: 298281 - RNA, 19 nt, Artificial Sequence
  Description of Artificial Sequence: Synthetic oligonucleotide
acgccuucuccccggauga

SEQ ID NO: 298282 - RNA, 19 nt, Artificial Sequence
  Description of Artificial Sequence: Synthetic oligonucleotide
auccauccaguacauuuua

SEQ ID NO: 298283 - RNA, 19 nt, Artificial Sequence
  Description of Artificial Sequence: Synthetic oligonucleotide
auuguagggauagccccga

SEQ ID NO: 298284 - RNA, 19 nt, Artificial Sequence
  Description of Artificial Sequence: Synthetic oligonucleotide
uaucuacuaggaggacugc

SEQ ID NO: 298285 - RNA, 19 nt, Artificial Sequence
  Description of Artificial Sequence: Synthetic oligonucleotide
aagccaccuuucacggaac

SEQ ID NO: 298286 - RNA, 19 nt, Artificial Sequence
  Description of Artificial Sequence: Synthetic oligonucleotide
ggcuuucuggaccauaaaa

SEQ ID NO: 298287 - RNA, 19 nt, Artificial Sequence
  Description of Artificial Sequence: Synthetic oligonucleotide
gcaugacaaauuuuaucca

SEQ ID NO: 298288 - RNA, 19 nt, Artificial Sequence
  Description of Artificial Sequence: Synthetic oligonucleotide
auagagggccucaguaaug

SEQ ID NO: 298289 - RNA, 19 nt, Artificial Sequence
  Description of Artificial Sequence: Synthetic oligonucleotide
gccugaauugaccaauauc

SEQ ID NO: 298290 - RNA, 19 nt, Artificial Sequence
  Description of Artificial Sequence: Synthetic oligonucleotide
aaggggcucuguugcgacu

SEQ ID NO: 298291 - RNA, 19 nt, Artificial Sequence
  Description of Artificial Sequence: Synthetic oligonucleotide
agagugcaccagcgcugcc

SEQ ID NO: 298292 - RNA, 19 nt, Artificial Sequence
  Description of Artificial Sequence: Synthetic oligonucleotide
agcuaucuacuaggaggac

SEQ ID NO: 298293 - RNA, 19 nt, Artificial Sequence
  Description of Artificial Sequence: Synthetic oligonucleotide
uccggucaaacagaauuuu

SEQ ID NO: 298294 - RNA, 19 nt, Artificial Sequence
  Description of Artificial Sequence: Synthetic oligonucleotide
cccagucuucaaaauaaug

SEQ ID NO: 298295 - RNA, 19 nt, Artificial Sequence
  Description of Artificial Sequence: Synthetic oligonucleotide
cccggaugaaaacaacccc

SEQ ID NO: 298296 - RNA, 19 nt, Artificial Sequence
  Description of Artificial Sequence: Synthetic oligonucleotide
gacugugcuccacgauagc

SEQ ID NO: 298297 - RNA, 19 nt, Artificial Sequence
  Description of Artificial Sequence: Synthetic oligonucleotide
ccacggucuccucaaaagg

SEQ ID NO: 298298 - RNA, 19 nt, Artificial Sequence
  Description of Artificial Sequence: Synthetic oligonucleotide
ccgaggauaugucacugag

SEQ ID NO: 298299 - RNA, 19 nt, Artificial Sequence
  Description of Artificial Sequence: Synthetic oligonucleotide
uccacccuuugauccaauc

SEQ ID NO: 298300 - RNA, 19 nt, Artificial Sequence
  Description of Artificial Sequence: Synthetic oligonucleotide
cuaaagcuagcuguguucu

SEQ ID NO: 298301 - RNA, 19 nt, Artificial Sequence
  Description of Artificial Sequence: Synthetic oligonucleotide
cacugguagcuacgaaaac

SEQ ID NO: 298302 - RNA, 19 nt, Artificial Sequence
  Description of Artificial Sequence: Synthetic oligonucleotide
ugguguuagcauugugauu

SEQ ID NO: 298303 - RNA, 19 nt, Artificial Sequence
  Description of Artificial Sequence: Synthetic oligonucleotide
ccgaagccaccuuucacgg

SEQ ID NO: 298304 - RNA, 19 nt, Artificial Sequence
  Description of Artificial Sequence: Synthetic oligonucleotide
gguaacacuaauuggcuuu

SEQ ID NO: 298305 - RNA, 19 nt, Artificial Sequence
  Description of Artificial Sequence: Synthetic oligonucleotide
acuugccuuguugcugccg

SEQ ID NO: 298306 - RNA, 19 nt, Artificial Sequence
  Description of Artificial Sequence: Synthetic oligonucleotide
aagcuccauggaccccauc

SEQ ID NO: 298307 - RNA, 19 nt, Artificial Sequence
  Description of Artificial Sequence: Synthetic oligonucleotide
gcgcugaauguucuucagg

SEQ ID NO: 298308 - RNA, 19 nt, Artificial Sequence
  Description of Artificial Sequence: Synthetic oligonucleotide
acggucuccucaaaaggca

SEQ ID NO: 298309 - RNA, 19 nt, Artificial Sequence
  Description of Artificial Sequence: Synthetic oligonucleotide
gauagccccgaggauaugu

SEQ ID NO: 298310 - RNA, 19 nt, Artificial Sequence
  Description of Artificial Sequence: Synthetic oligonucleotide
cagguaacacuaauuggcu

SEQ ID NO: 298311 - RNA, 19 nt, Artificial Sequence
  Description of Artificial Sequence: Synthetic oligonucleotide
ucggggacgguggugcucu

SEQ ID NO: 298312 - RNA, 19 nt, Artificial Sequence
  Description of Artificial Sequence: Synthetic oligonucleotide
ucaggacguuguugaagaa

SEQ ID NO: 298313 - RNA, 19 nt, Artificial Sequence
  Description of Artificial Sequence: Synthetic oligonucleotide
uggcccgaugaagagguaa

SEQ ID NO: 298314 - RNA, 19 nt, Artificial Sequence
  Description of Artificial Sequence: Synthetic oligonucleotide
gauaugucacugaggcaaa

SEQ ID NO: 298315 - RNA, 19 nt, Artificial Sequence
  Description of Artificial Sequence: Synthetic oligonucleotide
cauuacgcaugacaaauuu

SEQ ID NO: 298316 - RNA, 19 nt, Artificial Sequence
  Description of Artificial Sequence: Synthetic oligonucleotide
ccggaugaaaacaacccca

SEQ ID NO: 298317 - RNA, 19 nt, Artificial Sequence
  Description of Artificial Sequence: Synthetic oligonucleotide
gcaaaggcagauugcccug

SEQ ID NO: 298318 - RNA, 19 nt, Artificial Sequence
  Description of Artificial Sequence: Synthetic oligonucleotide
gucccauauucuuugguau

SEQ ID NO: 298319 - RNA, 19 nt, Artificial Sequence
  Description of Artificial Sequence: Synthetic oligonucleotide
ucgcugccggaugaaagcu

SEQ ID NO: 298320 - RNA, 19 nt, Artificial Sequence
  Description of Artificial Sequence: Synthetic oligonucleotide
acucgagauaggaucugcu

SEQ ID NO: 298321 - RNA, 19 nt, Artificial Sequence
  Description of Artificial Sequence: Synthetic oligonucleotide
auggcugaacuccggucaa

SEQ ID NO: 298322 - RNA, 19 nt, Artificial Sequence
  Description of Artificial Sequence: Synthetic oligonucleotide
gguguacuucggcccauag

SEQ ID NO: 298323 - RNA, 19 nt, Artificial Sequence
  Description of Artificial Sequence: Synthetic oligonucleotide
uaaccgcugagggucucca

SEQ ID NO: 298324 - RNA, 19 nt, Artificial Sequence
  Description of Artificial Sequence: Synthetic oligonucleotide
cuccccggaugaaaacaac

SEQ ID NO: 298325 - RNA, 19 nt, Artificial Sequence
  Description of Artificial Sequence: Synthetic oligonucleotide
ugcgacuuguugucaccau

SEQ ID NO: 298326 - RNA, 19 nt, Artificial Sequence
  Description of Artificial Sequence: Synthetic oligonucleotide
ggcaucauaccagagaaau

SEQ ID NO: 298327 - RNA, 19 nt, Artificial Sequence
  Description of Artificial Sequence: Synthetic oligonucleotide
gcaacuacucuccccugac

SEQ ID NO: 298328 - RNA, 19 nt, Artificial Sequence
  Description of Artificial Sequence: Synthetic oligonucleotide
ugcuaaagcucuggacauc

SEQ ID NO: 298329 - RNA, 19 nt, Artificial Sequence
  Description of Artificial Sequence: Synthetic oligonucleotide
agauugcgcugaauguucu

SEQ ID NO: 298330 - RNA, 19 nt, Artificial Sequence
  Description of Artificial Sequence: Synthetic oligonucleotide
gaacuccggucaaacagaa

SEQ ID NO: 298331 - RNA, 19 nt, Artificial Sequence
  Description of Artificial Sequence: Synthetic oligonucleotide
cuaaccgcugagggucucc

SEQ ID NO: 298332 - RNA, 19 nt, Artificial Sequence
  Description of Artificial Sequence: Synthetic oligonucleotide
uaacgcuuaccugcccuuc

SEQ ID NO: 298333 - RNA, 19 nt, Artificial Sequence
  Description of Artificial Sequence: Synthetic oligonucleotide
cugaauugaccaauaucau

SEQ ID NO: 298334 - RNA, 19 nt, Artificial Sequence
  Description of Artificial Sequence: Synthetic oligonucleotide
gauugcccugggcucucac

SEQ ID NO: 298335 - RNA, 19 nt, Artificial Sequence
  Description of Artificial Sequence: Synthetic oligonucleotide
cgaggauaugucacugagg

SEQ ID NO: 298336 - RNA, 19 nt, Artificial Sequence
  Description of Artificial Sequence: Synthetic oligonucleotide
guauugcauggaauuaugu

SEQ ID NO: 298337 - RNA, 19 nt, Artificial Sequence
  Description of Artificial Sequence: Synthetic oligonucleotide
guaagcugcccuggugaug

SEQ ID NO: 298338 - RNA, 19 nt, Artificial Sequence
  Description of Artificial Sequence: Synthetic oligonucleotide
gggcuucgcaggugcaugg

SEQ ID NO: 298339 - RNA, 19 nt, Artificial Sequence
  Description of Artificial Sequence: Synthetic oligonucleotide
gacuugccuuguugcugcc

SEQ ID NO: 298340 - RNA, 19 nt, Artificial Sequence
  Description of Artificial Sequence: Synthetic oligonucleotide
cuacuaggaggacugcaua

SEQ ID NO: 298341 - RNA, 19 nt, Artificial Sequence
  Description of Artificial Sequence: Synthetic oligonucleotide
gagcccucuggaaauaagu

SEQ ID NO: 298342 - RNA, 19 nt, Artificial Sequence
  Description of Artificial Sequence: Synthetic oligonucleotide
ggaaauaagucaguugcau

SEQ ID NO: 298343 - RNA, 19 nt, Artificial Sequence
  Description of Artificial Sequence: Synthetic oligonucleotide
cgacuugccuuguugcugc

SEQ ID NO: 298344 - RNA, 19 nt, Artificial Sequence
  Description of Artificial Sequence: Synthetic oligonucleotide
ggagaggaacgaucuauua

SEQ ID NO: 298345 - RNA, 19 nt, Artificial Sequence
  Description of Artificial Sequence: Synthetic oligonucleotide
ggcccgaugaagagguaag

SEQ ID NO: 298346 - RNA, 19 nt, Artificial Sequence
  Description of Artificial Sequence: Synthetic oligonucleotide
cugcaacuacucuccccug

SEQ ID NO: 298347 - RNA, 19 nt, Artificial Sequence
  Description of Artificial Sequence: Synthetic oligonucleotide
cucccagguguaucugguc

SEQ ID NO: 298348 - RNA, 19 nt, Artificial Sequence
  Description of Artificial Sequence: Synthetic oligonucleotide
ccacgauagcagcauaauc

SEQ ID NO: 298349 - RNA, 19 nt, Artificial Sequence
  Description of Artificial Sequence: Synthetic oligonucleotide
cuguggacuaugucauaaa

SEQ ID NO: 298350 - RNA, 19 nt, Artificial Sequence
  Description of Artificial Sequence: Synthetic oligonucleotide
ccgucugucucuuaucaga

SEQ ID NO: 298351 - RNA, 19 nt, Artificial Sequence
  Description of Artificial Sequence: Synthetic oligonucleotide
cauggaccccauccaccac

SEQ ID NO: 298352 - RNA, 19 nt, Artificial Sequence
  Description of Artificial Sequence: Synthetic oligonucleotide
gcccuucggcuuuucuucg

SEQ ID NO: 298353 - RNA, 19 nt, Artificial Sequence
  Description of Artificial Sequence: Synthetic oligonucleotide
ggacauccacagauggccc

SEQ ID NO: 298354 - RNA, 19 nt, Artificial Sequence
  Description of Artificial Sequence: Synthetic oligonucleotide
gcuucgcaggugcauggug

SEQ ID NO: 298355 - RNA, 19 nt, Artificial Sequence
  Description of Artificial Sequence: Synthetic oligonucleotide
caacuacucuccccugaca

SEQ ID NO: 298356 - RNA, 19 nt, Artificial Sequence
  Description of Artificial Sequence: Synthetic oligonucleotide
uucggcccauagagggccu

SEQ ID NO: 298357 - RNA, 19 nt, Artificial Sequence
  Description of Artificial Sequence: Synthetic oligonucleotide
cuguauugcauggaauuau

SEQ ID NO: 298358 - RNA, 19 nt, Artificial Sequence
  Description of Artificial Sequence: Synthetic oligonucleotide
aagguguacuucggcccau

SEQ ID NO: 298359 - RNA, 19 nt, Artificial Sequence
  Description of Artificial Sequence: Synthetic oligonucleotide
gcugaacuccggucaaaca

SEQ ID NO: 298360 - RNA, 19 nt, Artificial Sequence
  Description of Artificial Sequence: Synthetic oligonucleotide
gcgacuuguugucaccauc

SEQ ID NO: 298361 - RNA, 19 nt, Artificial Sequence
  Description of Artificial Sequence: Synthetic oligonucleotide
cacuuccguaagucacaac

SEQ ID NO: 298362 - RNA, 19 nt, Artificial Sequence
  Description of Artificial Sequence: Synthetic oligonucleotide
gcgaaagugaaagaguuuu

SEQ ID NO: 298363 - RNA, 19 nt, Artificial Sequence
  Description of Artificial Sequence: Synthetic oligonucleotide
ggcugaacuccggucaaac

SEQ ID NO: 298364 - RNA, 19 nt, Artificial Sequence
  Description of Artificial Sequence: Synthetic oligonucleotide
aggaccagauugcgcugaa

SEQ ID NO: 298365 - RNA, 19 nt, Artificial Sequence
  Description of Artificial Sequence: Synthetic oligonucleotide
gccauuacgcaugacaaau

SEQ ID NO: 298366 - RNA, 19 nt, Artificial Sequence
  Description of Artificial Sequence: Synthetic oligonucleotide
cucgagauaggaucugcuu

SEQ ID NO: 298367 - RNA, 19 nt, Artificial Sequence
  Description of Artificial Sequence: Synthetic oligonucleotide
gaggaacgaucuauuaauu

SEQ ID NO: 298368 - RNA, 19 nt, Artificial Sequence
  Description of Artificial Sequence: Synthetic oligonucleotide
cuacaguuacaguucccau

SEQ ID NO: 298369 - RNA, 19 nt, Artificial Sequence
  Description of Artificial Sequence: Synthetic oligonucleotide
cagguguaucuggucaaca

SEQ ID NO: 298370 - RNA, 19 nt, Artificial Sequence
  Description of Artificial Sequence: Synthetic oligonucleotide
ucuaaccgcugagggucuc

SEQ ID NO: 298371 - RNA, 19 nt, Artificial Sequence
  Description of Artificial Sequence: Synthetic oligonucleotide
aucuaaccgcugagggucu

SEQ ID NO: 298372 - RNA, 19 nt, Artificial Sequence
  Description of Artificial Sequence: Synthetic oligonucleotide
gcuaucuacuaggaggacu

SEQ ID NO: 298373 - RNA, 19 nt, Artificial Sequence
  Description of Artificial Sequence: Synthetic oligonucleotide
cauggaggcucugagcccu

SEQ ID NO: 298374 - RNA, 19 nt, Artificial Sequence
  Description of Artificial Sequence: Synthetic oligonucleotide
gacugcauaaagacaccuu

SEQ ID NO: 298375 - RNA, 19 nt, Artificial Sequence
  Description of Artificial Sequence: Synthetic oligonucleotide
uucggggacgguggugcuc

SEQ ID NO: 298376 - RNA, 19 nt, Artificial Sequence
  Description of Artificial Sequence: Synthetic oligonucleotide
ugccgcuguuguugggaua

SEQ ID NO: 298377 - RNA, 19 nt, Artificial Sequence
  Description of Artificial Sequence: Synthetic oligonucleotide
gauugcgcugaauguucuu

SEQ ID NO: 298378 - RNA, 19 nt, Artificial Sequence
  Description of Artificial Sequence: Synthetic oligonucleotide
guaacgcuuaccugcccuu

SEQ ID NO: 298379 - RNA, 19 nt, Artificial Sequence
  Description of Artificial Sequence: Synthetic oligonucleotide
caccagcgcugcccuuugg

SEQ ID NO: 298380 - RNA, 19 nt, Artificial Sequence
  Description of Artificial Sequence: Synthetic oligonucleotide
gcuuaccugcccuucggcu

SEQ ID NO: 298381 - RNA, 19 nt, Artificial Sequence
  Description of Artificial Sequence: Synthetic oligonucleotide
ggacugcauaaagacaccu

SEQ ID NO: 298382 - RNA, 19 nt, Artificial Sequence
  Description of Artificial Sequence: Synthetic oligonucleotide
ccaguaucauccauccagu

SEQ ID NO: 298383 - RNA, 19 nt, Artificial Sequence
  Description of Artificial Sequence: Synthetic oligonucleotide
cuguugcgacuuguuguca

SEQ ID NO: 298384 - RNA, 19 nt, Artificial Sequence
  Description of Artificial Sequence: Synthetic oligonucleotide
gggcgaaagugaaagaguu

SEQ ID NO: 298385 - RNA, 19 nt, Artificial Sequence
  Description of Artificial Sequence: Synthetic oligonucleotide
ggggcgaaagugaaagagu

SEQ ID NO: 298386 - RNA, 19 nt, Artificial Sequence
  Description of Artificial Sequence: Synthetic oligonucleotide
ccagguguaucuggucaac

SEQ ID NO: 298387 - RNA, 19 nt, Artificial Sequence
  Description of Artificial Sequence: Synthetic oligonucleotide
ccuccgucugucucuuauc

SEQ ID NO: 298388 - RNA, 19 nt, Artificial Sequence
  Description of Artificial Sequence: Synthetic oligonucleotide
cugccggaugaaagcucca

SEQ ID NO: 298389 - RNA, 19 nt, Artificial Sequence
  Description of Artificial Sequence: Synthetic oligonucleotide
caccuguccacagguaagu

SEQ ID NO: 298390 - RNA, 19 nt, Artificial Sequence
  Description of Artificial Sequence: Synthetic oligonucleotide
agauugcccugggcucuca

SEQ ID NO: 298391 - RNA, 19 nt, Artificial Sequence
  Description of Artificial Sequence: Synthetic oligonucleotide
caggucaugcuuguauuuu

SEQ ID NO: 298392 - RNA, 19 nt, Artificial Sequence
  Description of Artificial Sequence: Synthetic oligonucleotide
agguguacuucggcccaua

SEQ ID NO: 298393 - RNA, 19 nt, Artificial Sequence
  Description of Artificial Sequence: Synthetic oligonucleotide
cccgaggauaugucacuga

SEQ ID NO: 298394 - RNA, 19 nt, Artificial Sequence
  Description of Artificial Sequence: Synthetic oligonucleotide
cagguccuacaguuacagu

SEQ ID NO: 298395 - RNA, 19 nt, Artificial Sequence
  Description of Artificial Sequence: Synthetic oligonucleotide
ccccgaggauaugucacug

SEQ ID NO: 298396 - RNA, 19 nt, Artificial Sequence
  Description of Artificial Sequence: Synthetic oligonucleotide
gggacggcauccacaaacu

SEQ ID NO: 298397 - RNA, 19 nt, Artificial Sequence
  Description of Artificial Sequence: Synthetic oligonucleotide
gcacuuccguaagucacaa

SEQ ID NO: 298398 - RNA, 19 nt, Artificial Sequence
  Description of Artificial Sequence: Synthetic oligonucleotide
cuuuggccauggaggcucu

SEQ ID NO: 298399 - RNA, 19 nt, Artificial Sequence
  Description of Artificial Sequence: Synthetic oligonucleotide
gccgcuguuguugggauau

SEQ ID NO: 298400 - RNA, 19 nt, Artificial Sequence
  Description of Artificial Sequence: Synthetic oligonucleotide
uuccuccgucugucucuua

SEQ ID NO: 298401 - RNA, 19 nt, Artificial Sequence
  Description of Artificial Sequence: Synthetic oligonucleotide
ggugcucuugauggcugaa

SEQ ID NO: 298402 - RNA, 19 nt, Artificial Sequence
  Description of Artificial Sequence: Synthetic oligonucleotide
cccgaugaagagguaagcu

SEQ ID NO: 298403 - RNA, 19 nt, Artificial Sequence
  Description of Artificial Sequence: Synthetic oligonucleotide
ggggacgguggugcucuug

SEQ ID NO: 298404 - RNA, 19 nt, Artificial Sequence
  Description of Artificial Sequence: Synthetic oligonucleotide
caucucgcugccggaugaa

SEQ ID NO: 298405 - RNA, 19 nt, Artificial Sequence
  Description of Artificial Sequence: Synthetic oligonucleotide
cugccgcuguuguugggau

SEQ ID NO: 298406 - RNA, 19 nt, Artificial Sequence
  Description of Artificial Sequence: Synthetic oligonucleotide
ccagauugcgcugaauguu

SEQ ID NO: 298407 - RNA, 19 nt, Artificial Sequence
  Description of Artificial Sequence: Synthetic oligonucleotide
ggauagccccgaggauaug

SEQ ID NO: 298408 - RNA, 19 nt, Artificial Sequence
  Description of Artificial Sequence: Synthetic oligonucleotide
ggcucauggcuuugguguu

SEQ ID NO: 298409 - RNA, 19 nt, Artificial Sequence
  Description of Artificial Sequence: Synthetic oligonucleotide
ggcgaaagugaaagaguuu

SEQ ID NO: 298410 - RNA, 19 nt, Artificial Sequence
  Description of Artificial Sequence: Synthetic oligonucleotide
cgcugccggaugaaagcuc

SEQ ID NO: 298411 - RNA, 19 nt, Artificial Sequence
  Description of Artificial Sequence: Synthetic oligonucleotide
cuucggggacgguggugcu

SEQ ID NO: 298412 - RNA, 19 nt, Artificial Sequence
  Description of Artificial Sequence: Synthetic oligonucleotide
ccugacccucccagggaga

SEQ ID NO: 298413 - RNA, 19 nt, Artificial Sequence
  Description of Artificial Sequence: Synthetic oligonucleotide
cugggacggcauccacaaa

SEQ ID NO: 298414 - RNA, 19 nt, Artificial Sequence
  Description of Artificial Sequence: Synthetic oligonucleotide
gcucauggcuuugguguua

SEQ ID NO: 298415 - RNA, 19 nt, Artificial Sequence
  Description of Artificial Sequence: Synthetic oligonucleotide
cccuucggcuuuucuucga

SEQ ID NO: 298416 - RNA, 19 nt, Artificial Sequence
  Description of Artificial Sequence: Synthetic oligonucleotide
ccauuacgcaugacaaauu

SEQ ID NO: 298417 - RNA, 19 nt, Artificial Sequence
  Description of Artificial Sequence: Synthetic oligonucleotide
ccgcaucuguccgaagcca

SEQ ID NO: 298418 - RNA, 19 nt, Artificial Sequence
  Description of Artificial Sequence: Synthetic oligonucleotide
ccuacgccuucuccccgga

SEQ ID NO: 298419 - RNA, 19 nt, Artificial Sequence
  Description of Artificial Sequence: Synthetic oligonucleotide
auggcccgaugaagaggua

SEQ ID NO: 298420 - RNA, 19 nt, Artificial Sequence
  Description of Artificial Sequence: Synthetic oligonucleotide
cauccacagauggcccgau

SEQ ID NO: 298421 - RNA, 19 nt, Artificial Sequence
  Description of Artificial Sequence: Synthetic oligonucleotide
cuuucacuucggggacggu

SEQ ID NO: 298422 - RNA, 19 nt, Artificial Sequence
  Description of Artificial Sequence: Synthetic oligonucleotide
ggcucuguugcgacuuguu

SEQ ID NO: 298423 - RNA, 19 nt, Artificial Sequence
  Description of Artificial Sequence: Synthetic oligonucleotide
gggcucuguugcgacuugu

SEQ ID NO: 298424 - RNA, 19 nt, Artificial Sequence
  Description of Artificial Sequence: Synthetic oligonucleotide
ccgcuguuguugggauaug

SEQ ID NO: 298425 - RNA, 19 nt, Artificial Sequence
  Description of Artificial Sequence: Synthetic oligonucleotide
uuaacucagugucagagcg

SEQ ID NO: 298426 - RNA, 19 nt, Artificial Sequence
  Description of Artificial Sequence: Synthetic oligonucleotide
aaaucguugaugcuacucg

SEQ ID NO: 298427 - RNA, 19 nt, Artificial Sequence
  Description of Artificial Sequence: Synthetic oligonucleotide
uucuauuuggccuuuacag

SEQ ID NO: 298428 - RNA, 19 nt, Artificial Sequence
  Description of Artificial Sequence: Synthetic oligonucleotide
gauugcaugacacuccugg

SEQ ID NO: 298429 - RNA, 19 nt, Artificial Sequence
  Description of Artificial Sequence: Synthetic oligonucleotide
uucaaguuccuucaaaacc

SEQ ID NO: 298430 - RNA, 19 nt, Artificial Sequence
  Description of Artificial Sequence: Synthetic oligonucleotide
ucuaguguggcuuucagcu

SEQ ID NO: 298431 - RNA, 19 nt, Artificial Sequence
  Description of Artificial Sequence: Synthetic oligonucleotide
auucaugugugucagggac

SEQ ID NO: 298432 - RNA, 19 nt, Artificial Sequence
  Description of Artificial Sequence: Synthetic oligonucleotide
guuccuauggcucugauac

SEQ ID NO: 298433 - RNA, 19 nt, Artificial Sequence
  Description of Artificial Sequence: Synthetic oligonucleotide
gcuaucaucaggcagaagg

SEQ ID NO: 298434 - RNA, 19 nt, Artificial Sequence
  Description of Artificial Sequence: Synthetic oligonucleotide
agcaucacguuccugaagg

SEQ ID NO: 298435 - RNA, 19 nt, Artificial Sequence
  Description of Artificial Sequence: Synthetic oligonucleotide
ucaagaauguuccuauggc

SEQ ID NO: 298436 - RNA, 19 nt, Artificial Sequence
  Description of Artificial Sequence: Synthetic oligonucleotide
ugucuugagauucccgucg

SEQ ID NO: 298437 - RNA, 19 nt, Artificial Sequence
  Description of Artificial Sequence: Synthetic oligonucleotide
uguaagaagagggugagac

SEQ ID NO: 298438 - RNA, 19 nt, Artificial Sequence
  Description of Artificial Sequence: Synthetic oligonucleotide
agacuuaugagcucaccac

SEQ ID NO: 298439 - RNA, 19 nt, Artificial Sequence
  Description of Artificial Sequence: Synthetic oligonucleotide
ucuuauagcauaagcacaa

SEQ ID NO: 298440 - RNA, 19 nt, Artificial Sequence
  Description of Artificial Sequence: Synthetic oligonucleotide
ucguagauauacuggauag

SEQ ID NO: 298441 - RNA, 19 nt, Artificial Sequence
  Description of Artificial Sequence: Synthetic oligonucleotide
aaacgugugagcuggguca

SEQ ID NO: 298442 - RNA, 19 nt, Artificial Sequence
  Description of Artificial Sequence: Synthetic oligonucleotide
ucuagucugcaauucacag

SEQ ID NO: 298443 - RNA, 19 nt, Artificial Sequence
  Description of Artificial Sequence: Synthetic oligonucleotide
ucuucaguacaugagaaca

SEQ ID NO: 298444 - RNA, 19 nt, Artificial Sequence
  Description of Artificial Sequence: Synthetic oligonucleotide
uuugccauugugcagccug

SEQ ID NO: 298445 - RNA, 19 nt, Artificial Sequence
  Description of Artificial Sequence: Synthetic oligonucleotide
uucuuauagcauaagcaca

SEQ ID NO: 298446 - RNA, 19 nt, Artificial Sequence
  Description of Artificial Sequence: Synthetic oligonucleotide
aagauaucaguucucuaga

SEQ ID NO: 298447 - RNA, 19 nt, Artificial Sequence
  Description of Artificial Sequence: Synthetic oligonucleotide
uuaggugucuuagugaccc

SEQ ID NO: 298448 - RNA, 19 nt, Artificial Sequence
  Description of Artificial Sequence: Synthetic oligonucleotide
aguaaaagaaguucccaca

SEQ ID NO: 298449 - RNA, 19 nt, Artificial Sequence
  Description of Artificial Sequence: Synthetic oligonucleotide
cauucuuauagcauaagca

SEQ ID NO: 298450 - RNA, 19 nt, Artificial Sequence
  Description of Artificial Sequence: Synthetic oligonucleotide
agacacuuguucaaguucc

SEQ ID NO: 298451 - RNA, 19 nt, Artificial Sequence
  Description of Artificial Sequence: Synthetic oligonucleotide
agugcuggacagcucagcc

SEQ ID NO: 298452 - RNA, 19 nt, Artificial Sequence
  Description of Artificial Sequence: Synthetic oligonucleotide
augcugauaugucuucucc

SEQ ID NO: 298453 - RNA, 19 nt, Artificial Sequence
  Description of Artificial Sequence: Synthetic oligonucleotide
ggugaaagcacucuuauca

SEQ ID NO: 298454 - RNA, 19 nt, Artificial Sequence
  Description of Artificial Sequence: Synthetic oligonucleotide
guuuaggugucuuagugac

SEQ ID NO: 298455 - RNA, 19 nt, Artificial Sequence
  Description of Artificial Sequence: Synthetic oligonucleotide
ugagaaugcugauaugucu

SEQ ID NO: 298456 - RNA, 19 nt, Artificial Sequence
  Description of Artificial Sequence: Synthetic oligonucleotide
guagauauacuggauagug

SEQ ID NO: 298457 - RNA, 19 nt, Artificial Sequence
  Description of Artificial Sequence: Synthetic oligonucleotide
gaguaaaagaaguucccac

SEQ ID NO: 298458 - RNA, 19 nt, Artificial Sequence
  Description of Artificial Sequence: Synthetic oligonucleotide
uugucuaucugcccuaaga

SEQ ID NO: 298459 - RNA, 19 nt, Artificial Sequence
  Description of Artificial Sequence: Synthetic oligonucleotide
auguuuaggugucuuagug

SEQ ID NO: 298460 - RNA, 19 nt, Artificial Sequence
  Description of Artificial Sequence: Synthetic oligonucleotide
uuuaacucagugucagagc

SEQ ID NO: 298461 - RNA, 19 nt, Artificial Sequence
  Description of Artificial Sequence: Synthetic oligonucleotide
uccaguacugccucugccg

SEQ ID NO: 298462 - RNA, 19 nt, Artificial Sequence
  Description of Artificial Sequence: Synthetic oligonucleotide
aaguugacccaacaacuca

SEQ ID NO: 298463 - RNA, 19 nt, Artificial Sequence
  Description of Artificial Sequence: Synthetic oligonucleotide
agcucuaguaacauaguac

SEQ ID NO: 298464 - RNA, 19 nt, Artificial Sequence
  Description of Artificial Sequence: Synthetic oligonucleotide
ucuauuuggccuuuacagu

SEQ ID NO: 298465 - RNA, 19 nt, Artificial Sequence
  Description of Artificial Sequence: Synthetic oligonucleotide
guaggcugaaaggaaaucg

SEQ ID NO: 298466 - RNA, 19 nt, Artificial Sequence
  Description of Artificial Sequence: Synthetic oligonucleotide
agagcggucagucugugug

SEQ ID NO: 298467 - RNA, 19 nt, Artificial Sequence
  Description of Artificial Sequence: Synthetic oligonucleotide
uuagacuccugcagcagag

SEQ ID NO: 298468 - RNA, 19 nt, Artificial Sequence
  Description of Artificial Sequence: Synthetic oligonucleotide
uguuuaggugucuuaguga

SEQ ID NO: 298469 - RNA, 19 nt, Artificial Sequence
  Description of Artificial Sequence: Synthetic oligonucleotide
aggaccgcagccuaagagg

SEQ ID NO: 298470 - RNA, 19 nt, Artificial Sequence
  Description of Artificial Sequence: Synthetic oligonucleotide
uucucuagagacuaacauc

SEQ ID NO: 298471 - RNA, 19 nt, Artificial Sequence
  Description of Artificial Sequence: Synthetic oligonucleotide
caugauugcaugacacucc

SEQ ID NO: 298472 - RNA, 19 nt, Artificial Sequence
  Description of Artificial Sequence: Synthetic oligonucleotide
gaugcuacucgggugaaag

SEQ ID NO: 298473 - RNA, 19 nt, Artificial Sequence
  Description of Artificial Sequence: Synthetic oligonucleotide
gguaaguugacccaacaac

SEQ ID NO: 298474 - RNA, 19 nt, Artificial Sequence
  Description of Artificial Sequence: Synthetic oligonucleotide
aaggcgacuauuuuccgau

SEQ ID NO: 298475 - RNA, 19 nt, Artificial Sequence
  Description of Artificial Sequence: Synthetic oligonucleotide
cuuuaguuuugccuguaag

SEQ ID NO: 298476 - RNA, 19 nt, Artificial Sequence
  Description of Artificial Sequence: Synthetic oligonucleotide
uugaucaccaguuuugcuu

SEQ ID NO: 298477 - RNA, 19 nt, Artificial Sequence
  Description of Artificial Sequence: Synthetic oligonucleotide
ugcauagauguaaaauccu

SEQ ID NO: 298478 - RNA, 19 nt, Artificial Sequence
  Description of Artificial Sequence: Synthetic oligonucleotide
ugugugaagcccuaucagu

SEQ ID NO: 298479 - RNA, 19 nt, Artificial Sequence
  Description of Artificial Sequence: Synthetic oligonucleotide
gagucucguagauauacug

SEQ ID NO: 298480 - RNA, 19 nt, Artificial Sequence
  Description of Artificial Sequence: Synthetic oligonucleotide
agcccuaucaguugggucu

SEQ ID NO: 298481 - RNA, 19 nt, Artificial Sequence
  Description of Artificial Sequence: Synthetic oligonucleotide
uuuagacuccugcagcaga

SEQ ID NO: 298482 - RNA, 19 nt, Artificial Sequence
  Description of Artificial Sequence: Synthetic oligonucleotide
aacucuugcauagauguaa

SEQ ID NO: 298483 - RNA, 19 nt, Artificial Sequence
  Description of Artificial Sequence: Synthetic oligonucleotide
uaguuuugccuguaagaag

SEQ ID NO: 298484 - RNA, 19 nt, Artificial Sequence
  Description of Artificial Sequence: Synthetic oligonucleotide
ucaguacaugagaacagga

SEQ ID NO: 298485 - RNA, 19 nt, Artificial Sequence
  Description of Artificial Sequence: Synthetic oligonucleotide
aggugaagcaaagauauca

SEQ ID NO: 298486 - RNA, 19 nt, Artificial Sequence
  Description of Artificial Sequence: Synthetic oligonucleotide
gauaucaguucucuagaga

SEQ ID NO: 298487 - RNA, 19 nt, Artificial Sequence
  Description of Artificial Sequence: Synthetic oligonucleotide
uuucuuagcucagaaacuc

SEQ ID NO: 298488 - RNA, 19 nt, Artificial Sequence
  Description of Artificial Sequence: Synthetic oligonucleotide
uuaguagccaucagcugac

SEQ ID NO: 298489 - RNA, 19 nt, Artificial Sequence
  Description of Artificial Sequence: Synthetic oligonucleotide
ugcuaguuagacucugcag

SEQ ID NO: 298490 - RNA, 19 nt, Artificial Sequence
  Description of Artificial Sequence: Synthetic oligonucleotide
cuucaguacaugagaacag

SEQ ID NO: 298491 - RNA, 19 nt, Artificial Sequence
  Description of Artificial Sequence: Synthetic oligonucleotide
ugugguaaggcgacuauuu

SEQ ID NO: 298492 - RNA, 19 nt, Artificial Sequence
  Description of Artificial Sequence: Synthetic oligonucleotide
ugaccccacaaggagagcg

SEQ ID NO: 298493 - RNA, 19 nt, Artificial Sequence
  Description of Artificial Sequence: Synthetic oligonucleotide
acaggugaagcaaagauau

SEQ ID NO: 298494 - RNA, 19 nt, Artificial Sequence
  Description of Artificial Sequence: Synthetic oligonucleotide
uccuggauccaguuaguag

SEQ ID NO: 298495 - RNA, 19 nt, Artificial Sequence
  Description of Artificial Sequence: Synthetic oligonucleotide
caguaaacgugugagcugg

SEQ ID NO: 298496 - RNA, 19 nt, Artificial Sequence
  Description of Artificial Sequence: Synthetic oligonucleotide
ugaaagcacucuuaucacu

SEQ ID NO: 298497 - RNA, 19 nt, Artificial Sequence
  Description of Artificial Sequence: Synthetic oligonucleotide
agucaugucgggacaaggc

SEQ ID NO: 298498 - RNA, 19 nt, Artificial Sequence
  Description of Artificial Sequence: Synthetic oligonucleotide
aagcccuaucaguuggguc

SEQ ID NO: 298499 - RNA, 19 nt, Artificial Sequence
  Description of Artificial Sequence: Synthetic oligonucleotide
caagcaauggcacgacggg

SEQ ID NO: 298500 - RNA, 19 nt, Artificial Sequence
  Description of Artificial Sequence: Synthetic oligonucleotide
ucuuaucacuuccaagcaa

SEQ ID NO: 298501 - RNA, 19 nt, Artificial Sequence
  Description of Artificial Sequence: Synthetic oligonucleotide
aguuagacucugcagcuga

SEQ ID NO: 298502 - RNA, 19 nt, Artificial Sequence
  Description of Artificial Sequence: Synthetic oligonucleotide
uggugccuacuucuggugg

SEQ ID NO: 298503 - RNA, 19 nt, Artificial Sequence
  Description of Artificial Sequence: Synthetic oligonucleotide
agugcuaucaucaggcaga

SEQ ID NO: 298504 - RNA, 19 nt, Artificial Sequence
  Description of Artificial Sequence: Synthetic oligonucleotide
auccaugauugcaugacac

SEQ ID NO: 298505 - RNA, 19 nt, Artificial Sequence
  Description of Artificial Sequence: Synthetic oligonucleotide
cuagcaugugcacggaaag

SEQ ID NO: 298506 - RNA, 19 nt, Artificial Sequence
  Description of Artificial Sequence: Synthetic oligonucleotide
cugugaguucucgagaccg

SEQ ID NO: 298507 - RNA, 19 nt, Artificial Sequence
  Description of Artificial Sequence: Synthetic oligonucleotide
uguucuauuuggccuuuac

SEQ ID NO: 298508 - RNA, 19 nt, Artificial Sequence
  Description of Artificial Sequence: Synthetic oligonucleotide
uccacaauccuguuggauu

SEQ ID NO: 298509 - RNA, 19 nt, Artificial Sequence
  Description of Artificial Sequence: Synthetic oligonucleotide
uuuaggugucuuagugacc

SEQ ID NO: 298510 - RNA, 19 nt, Artificial Sequence
  Description of Artificial Sequence: Synthetic oligonucleotide
ucgagggacagugagcugc

SEQ ID NO: 298511 - RNA, 19 nt, Artificial Sequence
  Description of Artificial Sequence: Synthetic oligonucleotide
ugacacucaaucuggccca

SEQ ID NO: 298512 - RNA, 19 nt, Artificial Sequence
  Description of Artificial Sequence: Synthetic oligonucleotide
ucucgagaccgacucagca

SEQ ID NO: 298513 - RNA, 19 nt, Artificial Sequence
  Description of Artificial Sequence: Synthetic oligonucleotide
ugucuuagugaccccacaa

SEQ ID NO: 298514 - RNA, 19 nt, Artificial Sequence
  Description of Artificial Sequence: Synthetic oligonucleotide
gguaaggcgacuauuuucc

SEQ ID NO: 298515 - RNA, 19 nt, Artificial Sequence
  Description of Artificial Sequence: Synthetic oligonucleotide
acaaggagagcggucaguc

SEQ ID NO: 298516 - RNA, 19 nt, Artificial Sequence
  Description of Artificial Sequence: Synthetic oligonucleotide
ucgagaccgacucagcaaa

SEQ ID NO: 298517 - RNA, 19 nt, Artificial Sequence
  Description of Artificial Sequence: Synthetic oligonucleotide
ucucugugaguucucgaga

SEQ ID NO: 298518 - RNA, 19 nt, Artificial Sequence
  Description of Artificial Sequence: Synthetic oligonucleotide
agucuagucugcaauucac

SEQ ID NO: 298519 - RNA, 19 nt, Artificial Sequence
  Description of Artificial Sequence: Synthetic oligonucleotide
ugguaaggcgacuauuuuc

SEQ ID NO: 298520 - RNA, 19 nt, Artificial Sequence
  Description of Artificial Sequence: Synthetic oligonucleotide
gaggaccgcagccuaagag

SEQ ID NO: 298521 - RNA, 19 nt, Artificial Sequence
  Description of Artificial Sequence: Synthetic oligonucleotide
ugugcuaguuagacucugc

SEQ ID NO: 298522 - RNA, 19 nt, Artificial Sequence
  Description of Artificial Sequence: Synthetic oligonucleotide
ucccgcagcacuucuagug

SEQ ID NO: 298523 - RNA, 19 nt, Artificial Sequence
  Description of Artificial Sequence: Synthetic oligonucleotide
gucgggacaaggcagucag

SEQ ID NO: 298524 - RNA, 19 nt, Artificial Sequence
  Description of Artificial Sequence: Synthetic oligonucleotide
auuuuccgauuucaguugu

SEQ ID NO: 298525 - RNA, 19 nt, Artificial Sequence
  Description of Artificial Sequence: Synthetic oligonucleotide
acggaaagccuccaguacu

SEQ ID NO: 298526 - RNA, 19 nt, Artificial Sequence
  Description of Artificial Sequence: Synthetic oligonucleotide
gaguucucgagaccgacuc

SEQ ID NO: 298527 - RNA, 19 nt, Artificial Sequence
  Description of Artificial Sequence: Synthetic oligonucleotide
uugucugugcuaguuagac

SEQ ID NO: 298528 - RNA, 19 nt, Artificial Sequence
  Description of Artificial Sequence: Synthetic oligonucleotide
uguugacacugcaacucug

SEQ ID NO: 298529 - RNA, 19 nt, Artificial Sequence
  Description of Artificial Sequence: Synthetic oligonucleotide
ucguugaugcuacucgggu

SEQ ID NO: 298530 - RNA, 19 nt, Artificial Sequence
  Description of Artificial Sequence: Synthetic oligonucleotide
acuuaugagcucaccacuc

SEQ ID NO: 298531 - RNA, 19 nt, Artificial Sequence
  Description of Artificial Sequence: Synthetic oligonucleotide
aguuaguagccaucagcug

SEQ ID NO: 298532 - RNA, 19 nt, Artificial Sequence
  Description of Artificial Sequence: Synthetic oligonucleotide
cugcaugccgcaguaaacg

SEQ ID NO: 298533 - RNA, 19 nt, Artificial Sequence
  Description of Artificial Sequence: Synthetic oligonucleotide
cuuagugaccccacaagga

SEQ ID NO: 298534 - RNA, 19 nt, Artificial Sequence
  Description of Artificial Sequence: Synthetic oligonucleotide
uccaugauugcaugacacu

SEQ ID NO: 298535 - RNA, 19 nt, Artificial Sequence
  Description of Artificial Sequence: Synthetic oligonucleotide
agcacaaccugugcugggc

SEQ ID NO: 298536 - RNA, 19 nt, Artificial Sequence
  Description of Artificial Sequence: Synthetic oligonucleotide
agaaacuccagcaaucuuu

SEQ ID NO: 298537 - RNA, 19 nt, Artificial Sequence
  Description of Artificial Sequence: Synthetic oligonucleotide
ugcgcuggcuagcaugugc

SEQ ID NO: 298538 - RNA, 19 nt, Artificial Sequence
  Description of Artificial Sequence: Synthetic oligonucleotide
gaaaucguugaugcuacuc

SEQ ID NO: 298539 - RNA, 19 nt, Artificial Sequence
  Description of Artificial Sequence: Synthetic oligonucleotide
uagugaccccacaaggaga

SEQ ID NO: 298540 - RNA, 19 nt, Artificial Sequence
  Description of Artificial Sequence: Synthetic oligonucleotide
ugcccauguuccacaaucc

SEQ ID NO: 298541 - RNA, 19 nt, Artificial Sequence
  Description of Artificial Sequence: Synthetic oligonucleotide
uuccuugauugcagcauca

SEQ ID NO: 298542 - RNA, 19 nt, Artificial Sequence
  Description of Artificial Sequence: Synthetic oligonucleotide
uaacucagugucagagcgc

SEQ ID NO: 298543 - RNA, 19 nt, Artificial Sequence
  Description of Artificial Sequence: Synthetic oligonucleotide
uucucaugcuuugcuacag

SEQ ID NO: 298544 - RNA, 19 nt, Artificial Sequence
  Description of Artificial Sequence: Synthetic oligonucleotide
ugacacuccuggcuugcag

SEQ ID NO: 298545 - RNA, 19 nt, Artificial Sequence
  Description of Artificial Sequence: Synthetic oligonucleotide
gacucaaugucugcugagc

SEQ ID NO: 298546 - RNA, 19 nt, Artificial Sequence
  Description of Artificial Sequence: Synthetic oligonucleotide
cugugugaagcccuaucag

SEQ ID NO: 298547 - RNA, 19 nt, Artificial Sequence
  Description of Artificial Sequence: Synthetic oligonucleotide
agaccgacucagcaaagcu

SEQ ID NO: 298548 - RNA, 19 nt, Artificial Sequence
  Description of Artificial Sequence: Synthetic oligonucleotide
uccaguuggcugaugcgcu

SEQ ID NO: 298549 - RNA, 19 nt, Artificial Sequence
  Description of Artificial Sequence: Synthetic oligonucleotide
cuuguagcuggugggaaag

SEQ ID NO: 298550 - RNA, 19 nt, Artificial Sequence
  Description of Artificial Sequence: Synthetic oligonucleotide
auauacuggauagugucau

SEQ ID NO: 298551 - RNA, 19 nt, Artificial Sequence
  Description of Artificial Sequence: Synthetic oligonucleotide
uccaguuaguagccaucag

SEQ ID NO: 298552 - RNA, 19 nt, Artificial Sequence
  Description of Artificial Sequence: Synthetic oligonucleotide
guaaggcgacuauuuuccg

SEQ ID NO: 298553 - RNA, 19 nt, Artificial Sequence
  Description of Artificial Sequence: Synthetic oligonucleotide
uuuccgauuucaguuguuc

SEQ ID NO: 298554 - RNA, 19 nt, Artificial Sequence
  Description of Artificial Sequence: Synthetic oligonucleotide
agcauaagcacaaggccug

SEQ ID NO: 298555 - RNA, 19 nt, Artificial Sequence
  Description of Artificial Sequence: Synthetic oligonucleotide
caguccucuaaaugggcag

SEQ ID NO: 298556 - RNA, 19 nt, Artificial Sequence
  Description of Artificial Sequence: Synthetic oligonucleotide
gagauucccgucgagggac

SEQ ID NO: 298557 - RNA, 19 nt, Artificial Sequence
  Description of Artificial Sequence: Synthetic oligonucleotide
cagugcuaucaucaggcag

SEQ ID NO: 298558 - RNA, 19 nt, Artificial Sequence
  Description of Artificial Sequence: Synthetic oligonucleotide
ucucguagauauacuggau

SEQ ID NO: 298559 - RNA, 19 nt, Artificial Sequence
  Description of Artificial Sequence: Synthetic oligonucleotide
ugaguucucgagaccgacu

SEQ ID NO: 298560 - RNA, 19 nt, Artificial Sequence
  Description of Artificial Sequence: Synthetic oligonucleotide
cucugucucugcaugccgc

SEQ ID NO: 298561 - RNA, 19 nt, Artificial Sequence
  Description of Artificial Sequence: Synthetic oligonucleotide
gagaucugugguaaggcga

SEQ ID NO: 298562 - RNA, 19 nt, Artificial Sequence
  Description of Artificial Sequence: Synthetic oligonucleotide
agcaaagauaucaguucuc

SEQ ID NO: 298563 - RNA, 19 nt, Artificial Sequence
  Description of Artificial Sequence: Synthetic oligonucleotide
guaaguugacccaacaacu

SEQ ID NO: 298564 - RNA, 19 nt, Artificial Sequence
  Description of Artificial Sequence: Synthetic oligonucleotide
uugcaacucuucacuaccu

SEQ ID NO: 298565 - RNA, 19 nt, Artificial Sequence
  Description of Artificial Sequence: Synthetic oligonucleotide
cucuaguaacauaguacuc

SEQ ID NO: 298566 - RNA, 19 nt, Artificial Sequence
  Description of Artificial Sequence: Synthetic oligonucleotide
gacgggaacugguucuggc

SEQ ID NO: 298567 - RNA, 19 nt, Artificial Sequence
  Description of Artificial Sequence: Synthetic oligonucleotide
gucaugucgggacaaggca

SEQ ID NO: 298568 - RNA, 19 nt, Artificial Sequence
  Description of Artificial Sequence: Synthetic oligonucleotide
cagagaucugugguaaggc

SEQ ID NO: 298569 - RNA, 19 nt, Artificial Sequence
  Description of Artificial Sequence: Synthetic oligonucleotide
uucccgucgagggacagug

SEQ ID NO: 298570 - RNA, 19 nt, Artificial Sequence
  Description of Artificial Sequence: Synthetic oligonucleotide
ugcaacucuucacuaccuc

SEQ ID NO: 298571 - RNA, 19 nt, Artificial Sequence
  Description of Artificial Sequence: Synthetic oligonucleotide
uuaugagcucaccacucuu

SEQ ID NO: 298572 - RNA, 19 nt, Artificial Sequence
  Description of Artificial Sequence: Synthetic oligonucleotide
agagcgccgaagguucucc

SEQ ID NO: 298573 - RNA, 19 nt, Artificial Sequence
  Description of Artificial Sequence: Synthetic oligonucleotide
caugugcacggaaagccuc

SEQ ID NO: 298574 - RNA, 19 nt, Artificial Sequence
  Description of Artificial Sequence: Synthetic oligonucleotide
cucugauacuugaucacca

SEQ ID NO: 298575 - RNA, 19 nt, Artificial Sequence
  Description of Artificial Sequence: Synthetic oligonucleotide
caguuaguagccaucagcu

SEQ ID NO: 298576 - RNA, 19 nt, Artificial Sequence
  Description of Artificial Sequence: Synthetic oligonucleotide
ucugugguaaggcgacuau

SEQ ID NO: 298577 - RNA, 19 nt, Artificial Sequence
  Description of Artificial Sequence: Synthetic oligonucleotide
gacuuaugagcucaccacu

SEQ ID NO: 298578 - RNA, 19 nt, Artificial Sequence
  Description of Artificial Sequence: Synthetic oligonucleotide
ggaggaguaaaagaaguuc

SEQ ID NO: 298579 - RNA, 19 nt, Artificial Sequence
  Description of Artificial Sequence: Synthetic oligonucleotide
cuuauagcauaagcacaag

SEQ ID NO: 298580 - RNA, 19 nt, Artificial Sequence
  Description of Artificial Sequence: Synthetic oligonucleotide
ugagacuuaugagcucacc

SEQ ID NO: 298581 - RNA, 19 nt, Artificial Sequence
  Description of Artificial Sequence: Synthetic oligonucleotide
gaccgacucagcaaagcug

SEQ ID NO: 298582 - RNA, 19 nt, Artificial Sequence
  Description of Artificial Sequence: Synthetic oligonucleotide
ugcaugccgcaguaaacgu

SEQ ID NO: 298583 - RNA, 19 nt, Artificial Sequence
  Description of Artificial Sequence: Synthetic oligonucleotide
uguagcuggugggaaagaa

SEQ ID NO: 298584 - RNA, 19 nt, Artificial Sequence
  Description of Artificial Sequence: Synthetic oligonucleotide
ucuggguaaguugacccaa

SEQ ID NO: 298585 - RNA, 19 nt, Artificial Sequence
  Description of Artificial Sequence: Synthetic oligonucleotide
aucguugaugcuacucggg

SEQ ID NO: 298586 - RNA, 19 nt, Artificial Sequence
  Description of Artificial Sequence: Synthetic oligonucleotide
cacaacaagggaguucaac

SEQ ID NO: 298587 - RNA, 19 nt, Artificial Sequence
  Description of Artificial Sequence: Synthetic oligonucleotide
gucugcaaacuccaagguc

SEQ ID NO: 298588 - RNA, 19 nt, Artificial Sequence
  Description of Artificial Sequence: Synthetic oligonucleotide
cuaguguggcuuucagcug

SEQ ID NO: 298589 - RNA, 19 nt, Artificial Sequence
  Description of Artificial Sequence: Synthetic oligonucleotide
uguuccuauggcucugaua

SEQ ID NO: 298590 - RNA, 19 nt, Artificial Sequence
  Description of Artificial Sequence: Synthetic oligonucleotide
gagaccgacucagcaaagc

SEQ ID NO: 298591 - RNA, 19 nt, Artificial Sequence
  Description of Artificial Sequence: Synthetic oligonucleotide
uugagacuuaugagcucac

SEQ ID NO: 298592 - RNA, 19 nt, Artificial Sequence
  Description of Artificial Sequence: Synthetic oligonucleotide
gucagggccuuuucugaag

SEQ ID NO: 298593 - RNA, 19 nt, Artificial Sequence
  Description of Artificial Sequence: Synthetic oligonucleotide
ugacacugcaacucugcuu

SEQ ID NO: 298594 - RNA, 19 nt, Artificial Sequence
  Description of Artificial Sequence: Synthetic oligonucleotide
gagcacaaccugugcuggg

SEQ ID NO: 298595 - RNA, 19 nt, Artificial Sequence
  Description of Artificial Sequence: Synthetic oligonucleotide
gacuaacauccaugauugc

SEQ ID NO: 298596 - RNA, 19 nt, Artificial Sequence
  Description of Artificial Sequence: Synthetic oligonucleotide
uucucgagaccgacucagc

SEQ ID NO: 298597 - RNA, 19 nt, Artificial Sequence
  Description of Artificial Sequence: Synthetic oligonucleotide
ugugugcuacugucuugag

SEQ ID NO: 298598 - RNA, 19 nt, Artificial Sequence
  Description of Artificial Sequence: Synthetic oligonucleotide
uucugccacgccgagacuc

SEQ ID NO: 298599 - RNA, 19 nt, Artificial Sequence
  Description of Artificial Sequence: Synthetic oligonucleotide
gucuaaucucuuuugcugu

SEQ ID NO: 298600 - RNA, 19 nt, Artificial Sequence
  Description of Artificial Sequence: Synthetic oligonucleotide
acgggaacugguucuggcu

SEQ ID NO: 298601 - RNA, 19 nt, Artificial Sequence
  Description of Artificial Sequence: Synthetic oligonucleotide
ccuugauugcagcaucacg

SEQ ID NO: 298602 - RNA, 19 nt, Artificial Sequence
  Description of Artificial Sequence: Synthetic oligonucleotide
agcgccgaagguucuccuc

SEQ ID NO: 298603 - RNA, 19 nt, Artificial Sequence
  Description of Artificial Sequence: Synthetic oligonucleotide
agagacuaacauccaugau

SEQ ID NO: 298604 - RNA, 19 nt, Artificial Sequence
  Description of Artificial Sequence: Synthetic oligonucleotide
aguacugugcuuggugccu

SEQ ID NO: 298605 - RNA, 19 nt, Artificial Sequence
  Description of Artificial Sequence: Synthetic oligonucleotide
ugccgcaguaaacguguga

SEQ ID NO: 298606 - RNA, 19 nt, Artificial Sequence
  Description of Artificial Sequence: Synthetic oligonucleotide
gugcuaguuagacucugca

SEQ ID NO: 298607 - RNA, 19 nt, Artificial Sequence
  Description of Artificial Sequence: Synthetic oligonucleotide
aggaggaaaccaggguuuc

SEQ ID NO: 298608 - RNA, 19 nt, Artificial Sequence
  Description of Artificial Sequence: Synthetic oligonucleotide
gagcggucagucugugugc

SEQ ID NO: 298609 - RNA, 19 nt, Artificial Sequence
  Description of Artificial Sequence: Synthetic oligonucleotide
uaguuagacucugcagcug

SEQ ID NO: 298610 - RNA, 19 nt, Artificial Sequence
  Description of Artificial Sequence: Synthetic oligonucleotide
gaccccacaaggagagcgg

SEQ ID NO: 298611 - RNA, 19 nt, Artificial Sequence
  Description of Artificial Sequence: Synthetic oligonucleotide
cacaaccugugcugggcag

SEQ ID NO: 298612 - RNA, 19 nt, Artificial Sequence
  Description of Artificial Sequence: Synthetic oligonucleotide
ucuuugccgugaagggcca

SEQ ID NO: 298613 - RNA, 19 nt, Artificial Sequence
  Description of Artificial Sequence: Synthetic oligonucleotide
gccgcaguaaacgugugag

SEQ ID NO: 298614 - RNA, 19 nt, Artificial Sequence
  Description of Artificial Sequence: Synthetic oligonucleotide
cuauggcucugauacuuga

SEQ ID NO: 298615 - RNA, 19 nt, Artificial Sequence
  Description of Artificial Sequence: Synthetic oligonucleotide
aguugacccaacaacucau

SEQ ID NO: 298616 - RNA, 19 nt, Artificial Sequence
  Description of Artificial Sequence: Synthetic oligonucleotide
cuaucaucaggcagaaggu

SEQ ID NO: 298617 - RNA, 19 nt, Artificial Sequence
  Description of Artificial Sequence: Synthetic oligonucleotide
gccgugaagggccaucucc

SEQ ID NO: 298618 - RNA, 19 nt, Artificial Sequence
  Description of Artificial Sequence: Synthetic oligonucleotide
aguucucgagaccgacuca

SEQ ID NO: 298619 - RNA, 19 nt, Artificial Sequence
  Description of Artificial Sequence: Synthetic oligonucleotide
caugacacuccuggcuugc

SEQ ID NO: 298620 - RNA, 19 nt, Artificial Sequence
  Description of Artificial Sequence: Synthetic oligonucleotide
uacucgggugaaagcacuc

SEQ ID NO: 298621 - RNA, 19 nt, Artificial Sequence
  Description of Artificial Sequence: Synthetic oligonucleotide
gaaagcacucuuaucacuu

SEQ ID NO: 298622 - RNA, 19 nt, Artificial Sequence
  Description of Artificial Sequence: Synthetic oligonucleotide
uggcacgacgggaacuggu

SEQ ID NO: 298623 - RNA, 19 nt, Artificial Sequence
  Description of Artificial Sequence: Synthetic oligonucleotide
gucagagcgccgaagguuc

SEQ ID NO: 298624 - RNA, 19 nt, Artificial Sequence
  Description of Artificial Sequence: Synthetic oligonucleotide
cuggguaaguugacccaac

SEQ ID NO: 298625 - RNA, 19 nt, Artificial Sequence
  Description of Artificial Sequence: Synthetic oligonucleotide
ggugccuacuucugguggc

SEQ ID NO: 298626 - RNA, 19 nt, Artificial Sequence
  Description of Artificial Sequence: Synthetic oligonucleotide
gcaguaaacgugugagcug

SEQ ID NO: 298627 - RNA, 19 nt, Artificial Sequence
  Description of Artificial Sequence: Synthetic oligonucleotide
caugccgcaguaaacgugu

SEQ ID NO: 298628 - RNA, 19 nt, Artificial Sequence
  Description of Artificial Sequence: Synthetic oligonucleotide
uccuugauugcagcaucac

SEQ ID NO: 298629 - RNA, 19 nt, Artificial Sequence
  Description of Artificial Sequence: Synthetic oligonucleotide
aguccucuaaaugggcaga

SEQ ID NO: 298630 - RNA, 19 nt, Artificial Sequence
  Description of Artificial Sequence: Synthetic oligonucleotide
cuugucuaucugcccuaag

SEQ ID NO: 298631 - RNA, 19 nt, Artificial Sequence
  Description of Artificial Sequence: Synthetic oligonucleotide
gcucugauacuugaucacc

SEQ ID NO: 298632 - RNA, 19 nt, Artificial Sequence
  Description of Artificial Sequence: Synthetic oligonucleotide
cucacauugcaggcugcgc

SEQ ID NO: 298633 - RNA, 19 nt, Artificial Sequence
  Description of Artificial Sequence: Synthetic oligonucleotide
uuccuauggcucugauacu

SEQ ID NO: 298634 - RNA, 19 nt, Artificial Sequence
  Description of Artificial Sequence: Synthetic oligonucleotide
ugucgggacaaggcaguca

SEQ ID NO: 298635 - RNA, 19 nt, Artificial Sequence
  Description of Artificial Sequence: Synthetic oligonucleotide
ggcucugauacuugaucac

SEQ ID NO: 298636 - RNA, 19 nt, Artificial Sequence
  Description of Artificial Sequence: Synthetic oligonucleotide
gucuagucugcaauucaca

SEQ ID NO: 298637 - RNA, 19 nt, Artificial Sequence
  Description of Artificial Sequence: Synthetic oligonucleotide
guaagaagagggugagacu

SEQ ID NO: 298638 - RNA, 19 nt, Artificial Sequence
  Description of Artificial Sequence: Synthetic oligonucleotide
ccaugauugcaugacacuc

SEQ ID NO: 298639 - RNA, 19 nt, Artificial Sequence
  Description of Artificial Sequence: Synthetic oligonucleotide
ucagagcgccgaagguucu

SEQ ID NO: 298640 - RNA, 19 nt, Artificial Sequence
  Description of Artificial Sequence: Synthetic oligonucleotide
cucagugucagagcgccga

SEQ ID NO: 298641 - RNA, 19 nt, Artificial Sequence
  Description of Artificial Sequence: Synthetic oligonucleotide
gaucaccaguuuugcuuuc

SEQ ID NO: 298642 - RNA, 19 nt, Artificial Sequence
  Description of Artificial Sequence: Synthetic oligonucleotide
aguaaacgugugagcuggg

SEQ ID NO: 298643 - RNA, 19 nt, Artificial Sequence
  Description of Artificial Sequence: Synthetic oligonucleotide
caagucaugucgggacaag

SEQ ID NO: 298644 - RNA, 19 nt, Artificial Sequence
  Description of Artificial Sequence: Synthetic oligonucleotide
agguucuccucaagaaugu

SEQ ID NO: 298645 - RNA, 19 nt, Artificial Sequence
  Description of Artificial Sequence: Synthetic oligonucleotide
cucgagaccgacucagcaa

SEQ ID NO: 298646 - RNA, 19 nt, Artificial Sequence
  Description of Artificial Sequence: Synthetic oligonucleotide
uugccgugaagggccaucu

SEQ ID NO: 298647 - RNA, 19 nt, Artificial Sequence
  Description of Artificial Sequence: Synthetic oligonucleotide
gcaucacguuccugaaggg

SEQ ID NO: 298648 - RNA, 19 nt, Artificial Sequence
  Description of Artificial Sequence: Synthetic oligonucleotide
acucgggugaaagcacucu

SEQ ID NO: 298649 - RNA, 19 nt, Artificial Sequence
  Description of Artificial Sequence: Synthetic oligonucleotide
cucuagagacuaacaucca

SEQ ID NO: 298650 - RNA, 19 nt, Artificial Sequence
  Description of Artificial Sequence: Synthetic oligonucleotide
cugugcuaguuagacucug

SEQ ID NO: 298651 - RNA, 19 nt, Artificial Sequence
  Description of Artificial Sequence: Synthetic oligonucleotide
cagaggaccgcagccuaag

SEQ ID NO: 298652 - RNA, 19 nt, Artificial Sequence
  Description of Artificial Sequence: Synthetic oligonucleotide
gcagccuaagaggaggcgc

SEQ ID NO: 298653 - RNA, 19 nt, Artificial Sequence
  Description of Artificial Sequence: Synthetic oligonucleotide
gccucagcucuugagaaug

SEQ ID NO: 298654 - RNA, 19 nt, Artificial Sequence
  Description of Artificial Sequence: Synthetic oligonucleotide
gaaggccucugaacucuug

SEQ ID NO: 298655 - RNA, 19 nt, Artificial Sequence
  Description of Artificial Sequence: Synthetic oligonucleotide
cuuaugagcucaccacucu

SEQ ID NO: 298656 - RNA, 19 nt, Artificial Sequence
  Description of Artificial Sequence: Synthetic oligonucleotide
cuguuggauugauguccag

SEQ ID NO: 298657 - RNA, 19 nt, Artificial Sequence
  Description of Artificial Sequence: Synthetic oligonucleotide
agaggaccgcagccuaaga

SEQ ID NO: 298658 - RNA, 19 nt, Artificial Sequence
  Description of Artificial Sequence: Synthetic oligonucleotide
guugacccaacaacucauc

SEQ ID NO: 298659 - RNA, 19 nt, Artificial Sequence
  Description of Artificial Sequence: Synthetic oligonucleotide
uuccuggauccaguuagua

SEQ ID NO: 298660 - RNA, 19 nt, Artificial Sequence
  Description of Artificial Sequence: Synthetic oligonucleotide
gugucuuagugaccccaca

SEQ ID NO: 298661 - RNA, 19 nt, Artificial Sequence
  Description of Artificial Sequence: Synthetic oligonucleotide
ggguaaguugacccaacaa

SEQ ID NO: 298662 - RNA, 19 nt, Artificial Sequence
  Description of Artificial Sequence: Synthetic oligonucleotide
uuucugccacgccgagacu

SEQ ID NO: 298663 - RNA, 19 nt, Artificial Sequence
  Description of Artificial Sequence: Synthetic oligonucleotide
aucugugguaaggcgacua

SEQ ID NO: 298664 - RNA, 19 nt, Artificial Sequence
  Description of Artificial Sequence: Synthetic oligonucleotide
cugauacuugaucaccagu

SEQ ID NO: 298665 - RNA, 19 nt, Artificial Sequence
  Description of Artificial Sequence: Synthetic oligonucleotide
gcgacuauuuuccgauuuc

SEQ ID NO: 298666 - RNA, 19 nt, Artificial Sequence
  Description of Artificial Sequence: Synthetic oligonucleotide
gcaaagauaucaguucucu

SEQ ID NO: 298667 - RNA, 19 nt, Artificial Sequence
  Description of Artificial Sequence: Synthetic oligonucleotide
agcggucagucugugugcu

SEQ ID NO: 298668 - RNA, 19 nt, Artificial Sequence
  Description of Artificial Sequence: Synthetic oligonucleotide
acaauccuguuggauugau

SEQ ID NO: 298669 - RNA, 19 nt, Artificial Sequence
  Description of Artificial Sequence: Synthetic oligonucleotide
cuacagugcuggacagcuc

SEQ ID NO: 298670 - RNA, 19 nt, Artificial Sequence
  Description of Artificial Sequence: Synthetic oligonucleotide
auggcacgacgggaacugg

SEQ ID NO: 298671 - RNA, 19 nt, Artificial Sequence
  Description of Artificial Sequence: Synthetic oligonucleotide
uccuuuaguuuugccugua

SEQ ID NO: 298672 - RNA, 19 nt, Artificial Sequence
  Description of Artificial Sequence: Synthetic oligonucleotide
gaccgcagccuaagaggag

SEQ ID NO: 298673 - RNA, 19 nt, Artificial Sequence
  Description of Artificial Sequence: Synthetic oligonucleotide
ccuauggcucugauacuug

SEQ ID NO: 298674 - RNA, 19 nt, Artificial Sequence
  Description of Artificial Sequence: Synthetic oligonucleotide
gcaacucuucacuaccucu

SEQ ID NO: 298675 - RNA, 19 nt, Artificial Sequence
  Description of Artificial Sequence: Synthetic oligonucleotide
cccgucgagggacagugag

SEQ ID NO: 298676 - RNA, 19 nt, Artificial Sequence
  Description of Artificial Sequence: Synthetic oligonucleotide
ggcgcucugucucugaagu

SEQ ID NO: 298677 - RNA, 19 nt, Artificial Sequence
  Description of Artificial Sequence: Synthetic oligonucleotide
augcuuugcuacagugcug

SEQ ID NO: 298678 - RNA, 19 nt, Artificial Sequence
  Description of Artificial Sequence: Synthetic oligonucleotide
auguuccuauggcucugau

SEQ ID NO: 298679 - RNA, 19 nt, Artificial Sequence
  Description of Artificial Sequence: Synthetic oligonucleotide
gggugaaagcacucuuauc

SEQ ID NO: 298680 - RNA, 19 nt, Artificial Sequence
  Description of Artificial Sequence: Synthetic oligonucleotide
aggagagcggucagucugu

SEQ ID NO: 298681 - RNA, 19 nt, Artificial Sequence
  Description of Artificial Sequence: Synthetic oligonucleotide
ggccuuuacaguccucuaa

SEQ ID NO: 298682 - RNA, 19 nt, Artificial Sequence
  Description of Artificial Sequence: Synthetic oligonucleotide
caauggguaugcuggcucu

SEQ ID NO: 298683 - RNA, 19 nt, Artificial Sequence
  Description of Artificial Sequence: Synthetic oligonucleotide
cuacucgggugaaagcacu

SEQ ID NO: 298684 - RNA, 19 nt, Artificial Sequence
  Description of Artificial Sequence: Synthetic oligonucleotide
ugaugcuacucgggugaaa

SEQ ID NO: 298685 - RNA, 19 nt, Artificial Sequence
  Description of Artificial Sequence: Synthetic oligonucleotide
cacgacgggaacugguucu

SEQ ID NO: 298686 - RNA, 19 nt, Artificial Sequence
  Description of Artificial Sequence: Synthetic oligonucleotide
ccucaagaauguuccuaug

SEQ ID NO: 298687 - RNA, 19 nt, Artificial Sequence
  Description of Artificial Sequence: Synthetic oligonucleotide
ggggcgugguugccaauag

SEQ ID NO: 298688 - RNA, 19 nt, Artificial Sequence
  Description of Artificial Sequence: Synthetic oligonucleotide
gcuacucgggugaaagcac

SEQ ID NO: 298689 - RNA, 19 nt, Artificial Sequence
  Description of Artificial Sequence: Synthetic oligonucleotide
ggaccgcagccuaagagga

SEQ ID NO: 298690 - RNA, 19 nt, Artificial Sequence
  Description of Artificial Sequence: Synthetic oligonucleotide
ugccgugaagggccaucuc

SEQ ID NO: 298691 - RNA, 19 nt, Artificial Sequence
  Description of Artificial Sequence: Synthetic oligonucleotide
ggugucuuagugaccccac

SEQ ID NO: 298692 - RNA, 19 nt, Artificial Sequence
  Description of Artificial Sequence: Synthetic oligonucleotide
gaagcccuaucaguugggu

SEQ ID NO: 298693 - RNA, 19 nt, Artificial Sequence
  Description of Artificial Sequence: Synthetic oligonucleotide
gucgagggacagugagcug

SEQ ID NO: 298694 - RNA, 19 nt, Artificial Sequence
  Description of Artificial Sequence: Synthetic oligonucleotide
cgcagcacuucuagugugg

SEQ ID NO: 298695 - RNA, 19 nt, Artificial Sequence
  Description of Artificial Sequence: Synthetic oligonucleotide
ucccgucgagggacaguga

SEQ ID NO: 298696 - RNA, 19 nt, Artificial Sequence
  Description of Artificial Sequence: Synthetic oligonucleotide
ccuaucaguugggucuggg

SEQ ID NO: 298697 - RNA, 19 nt, Artificial Sequence
  Description of Artificial Sequence: Synthetic oligonucleotide
ccgcaguaaacgugugagc

SEQ ID NO: 298698 - RNA, 19 nt, Artificial Sequence
  Description of Artificial Sequence: Synthetic oligonucleotide
gcaugccgcaguaaacgug

SEQ ID NO: 298699 - RNA, 19 nt, Artificial Sequence
  Description of Artificial Sequence: Synthetic oligonucleotide
accccacaaggagagcggu

SEQ ID NO: 298700 - RNA, 19 nt, Artificial Sequence
  Description of Artificial Sequence: Synthetic oligonucleotide
ccucacauugcaggcugcg

SEQ ID NO: 298701 - RNA, 19 nt, Artificial Sequence
  Description of Artificial Sequence: Synthetic oligonucleotide
gccggcucuugguugugag

SEQ ID NO: 298702 - RNA, 19 nt, Artificial Sequence
  Description of Artificial Sequence: Synthetic oligonucleotide
ccaauagcagcaucuugaa

SEQ ID NO: 298703 - RNA, 19 nt, Artificial Sequence
  Description of Artificial Sequence: Synthetic oligonucleotide
cagccuaagaggaggcgcu

SEQ ID NO: 298704 - RNA, 19 nt, Artificial Sequence
  Description of Artificial Sequence: Synthetic oligonucleotide
gcucuugguugugaguuuc

SEQ ID NO: 298705 - RNA, 19 nt, Artificial Sequence
  Description of Artificial Sequence: Synthetic oligonucleotide
gcuuguagcuggugggaaa

SEQ ID NO: 298706 - RNA, 19 nt, Artificial Sequence
  Description of Artificial Sequence: Synthetic oligonucleotide
aggggcgugguugccaaua

SEQ ID NO: 298707 - RNA, 19 nt, Artificial Sequence
  Description of Artificial Sequence: Synthetic oligonucleotide
gugguaaggcgacuauuuu

SEQ ID NO: 298708 - RNA, 19 nt, Artificial Sequence
  Description of Artificial Sequence: Synthetic oligonucleotide
uuguucuauuuggccuuua

SEQ ID NO: 298709 - RNA, 19 nt, Artificial Sequence
  Description of Artificial Sequence: Synthetic oligonucleotide
gggcgugguugccaauagc

SEQ ID NO: 298710 - RNA, 19 nt, Artificial Sequence
  Description of Artificial Sequence: Synthetic oligonucleotide
aggcgacuauuuuccgauu

SEQ ID NO: 298711 - RNA, 19 nt, Artificial Sequence
  Description of Artificial Sequence: Synthetic oligonucleotide
augacacuccuggcuugca

SEQ ID NO: 298712 - RNA, 19 nt, Artificial Sequence
  Description of Artificial Sequence: Synthetic oligonucleotide
gcacgacgggaacugguuc

SEQ ID NO: 298713 - RNA, 19 nt, Artificial Sequence
  Description of Artificial Sequence: Synthetic oligonucleotide
ggguuucugccacgccgag

SEQ ID NO: 298714 - RNA, 19 nt, Artificial Sequence
  Description of Artificial Sequence: Synthetic oligonucleotide
auguccaguccugcugcaa

SEQ ID NO: 298715 - RNA, 19 nt, Artificial Sequence
  Description of Artificial Sequence: Synthetic oligonucleotide
gccgagacuccugacucac

SEQ ID NO: 298716 - RNA, 19 nt, Artificial Sequence
  Description of Artificial Sequence: Synthetic oligonucleotide
ggcgacuauuuuccgauuu

SEQ ID NO: 298717 - RNA, 19 nt, Artificial Sequence
  Description of Artificial Sequence: Synthetic oligonucleotide
gagagcggucagucugugu

SEQ ID NO: 298718 - RNA, 19 nt, Artificial Sequence
  Description of Artificial Sequence: Synthetic oligonucleotide
cuugaugcucuggguaagu

SEQ ID NO: 298719 - RNA, 19 nt, Artificial Sequence
  Description of Artificial Sequence: Synthetic oligonucleotide
ccgacucagcaaagcugcc

SEQ ID NO: 298720 - RNA, 19 nt, Artificial Sequence
  Description of Artificial Sequence: Synthetic oligonucleotide
cagagcgccgaagguucuc

SEQ ID NO: 298721 - RNA, 19 nt, Artificial Sequence
  Description of Artificial Sequence: Synthetic oligonucleotide
cggucagucugugugcuac

SEQ ID NO: 298722 - RNA, 19 nt, Artificial Sequence
  Description of Artificial Sequence: Synthetic oligonucleotide
guacugugcuuggugccua

SEQ ID NO: 298723 - RNA, 19 nt, Artificial Sequence
  Description of Artificial Sequence: Synthetic oligonucleotide
ggagagcggucagucugug

SEQ ID NO: 298724 - RNA, 19 nt, Artificial Sequence
  Description of Artificial Sequence: Synthetic oligonucleotide
cucgggugaaagcacucuu

SEQ ID NO: 298725 - RNA, 19 nt, Artificial Sequence
  Description of Artificial Sequence: Synthetic oligonucleotide
cagaaacuccagcaaucuu

SEQ ID NO: 298726 - RNA, 19 nt, Artificial Sequence
  Description of Artificial Sequence: Synthetic oligonucleotide
gcgcuggcuagcaugugca

SEQ ID NO: 298727 - RNA, 19 nt, Artificial Sequence
  Description of Artificial Sequence: Synthetic oligonucleotide
cgcaguaaacgugugagcu

SEQ ID NO: 298728 - RNA, 19 nt, Artificial Sequence
  Description of Artificial Sequence: Synthetic oligonucleotide
cgagaccgacucagcaaag

SEQ ID NO: 298729 - RNA, 19 nt, Artificial Sequence
  Description of Artificial Sequence: Synthetic oligonucleotide
cugccgcaucuuugccgug

SEQ ID NO: 298730 - RNA, 19 nt, Artificial Sequence
  Description of Artificial Sequence: Synthetic oligonucleotide
cugugcuuggugccuacuu

SEQ ID NO: 298731 - RNA, 19 nt, Artificial Sequence
  Description of Artificial Sequence: Synthetic oligonucleotide
cagcuccagaugagcaacu

SEQ ID NO: 298732 - RNA, 19 nt, Artificial Sequence
  Description of Artificial Sequence: Synthetic oligonucleotide
guuguucuauuuggccuuu

SEQ ID NO: 298733 - RNA, 19 nt, Artificial Sequence
  Description of Artificial Sequence: Synthetic oligonucleotide
ggagcacuuucgucucugu

SEQ ID NO: 298734 - RNA, 19 nt, Artificial Sequence
  Description of Artificial Sequence: Synthetic oligonucleotide
cagcagagucucguagaua

SEQ ID NO: 298735 - RNA, 19 nt, Artificial Sequence
  Description of Artificial Sequence: Synthetic oligonucleotide
gccuacuucugguggcacu

SEQ ID NO: 298736 - RNA, 19 nt, Artificial Sequence
  Description of Artificial Sequence: Synthetic oligonucleotide
cugugguaaggcgacuauu

SEQ ID NO: 298737 - RNA, 19 nt, Artificial Sequence
  Description of Artificial Sequence: Synthetic oligonucleotide
ccaagucaugucgggacaa

SEQ ID NO: 298738 - RNA, 19 nt, Artificial Sequence
  Description of Artificial Sequence: Synthetic oligonucleotide
cgcagccuaagaggaggcg

SEQ ID NO: 298739 - RNA, 19 nt, Artificial Sequence
  Description of Artificial Sequence: Synthetic oligonucleotide
ggaggaaaccaggguuucu

SEQ ID NO: 298740 - RNA, 19 nt, Artificial Sequence
  Description of Artificial Sequence: Synthetic oligonucleotide
cgucgagggacagugagcu

SEQ ID NO: 298741 - RNA, 19 nt, Artificial Sequence
  Description of Artificial Sequence: Synthetic oligonucleotide
cugccggcucuugguugug

SEQ ID NO: 298742 - RNA, 19 nt, Artificial Sequence
  Description of Artificial Sequence: Synthetic oligonucleotide
ccgcaucuuugccgugaag

SEQ ID NO: 298743 - RNA, 19 nt, Artificial Sequence
  Description of Artificial Sequence: Synthetic oligonucleotide
ccugacucacugucauucu

SEQ ID NO: 298744 - RNA, 19 nt, Artificial Sequence
  Description of Artificial Sequence: Synthetic oligonucleotide
cccuaucaguugggucugg

SEQ ID NO: 298745 - RNA, 19 nt, Artificial Sequence
  Description of Artificial Sequence: Synthetic oligonucleotide
cccgcagcacuucuagugu

SEQ ID NO: 298746 - RNA, 19 nt, Artificial Sequence
  Description of Artificial Sequence: Synthetic oligonucleotide
gggccugccggcucuuggu

SEQ ID NO: 298747 - RNA, 19 nt, Artificial Sequence
  Description of Artificial Sequence: Synthetic oligonucleotide
cguagauauacuggauagu

SEQ ID NO: 298748 - RNA, 19 nt, Artificial Sequence
  Description of Artificial Sequence: Synthetic oligonucleotide
ccugccggcucuugguugu

SEQ ID NO: 298749 - RNA, 19 nt, Artificial Sequence
  Description of Artificial Sequence: Synthetic oligonucleotide
ggcacgacgggaacugguu

SEQ ID NO: 298750 - RNA, 19 nt, Artificial Sequence
  Description of Artificial Sequence: Synthetic oligonucleotide
gcccuaagaucuucucguu

SEQ ID NO: 298751 - RNA, 19 nt, Artificial Sequence
  Description of Artificial Sequence: Synthetic oligonucleotide
gaggggcgugguugccaau

SEQ ID NO: 298752 - RNA, 19 nt, Artificial Sequence
  Description of Artificial Sequence: Synthetic oligonucleotide
ccggcucuugguugugagu

SEQ ID NO: 298753 - RNA, 19 nt, Artificial Sequence
  Description of Artificial Sequence: Synthetic oligonucleotide
cgccgaagguucuccucaa

SEQ ID NO: 298754 - RNA, 19 nt, Artificial Sequence
  Description of Artificial Sequence: Synthetic oligonucleotide
aaaugcguauguuacaugc

SEQ ID NO: 298755 - RNA, 19 nt, Artificial Sequence
  Description of Artificial Sequence: Synthetic oligonucleotide
aaaaccauguuauagguca

SEQ ID NO: 298756 - RNA, 19 nt, Artificial Sequence
  Description of Artificial Sequence: Synthetic oligonucleotide
aauauaaagccuaacagug

SEQ ID NO: 298757 - RNA, 19 nt, Artificial Sequence
  Description of Artificial Sequence: Synthetic oligonucleotide
augaauauauuccucaauc

SEQ ID NO: 298758 - RNA, 19 nt, Artificial Sequence
  Description of Artificial Sequence: Synthetic oligonucleotide
aauaguagccgaaagaaag

SEQ ID NO: 298759 - RNA, 19 nt, Artificial Sequence
  Description of Artificial Sequence: Synthetic oligonucleotide
ucuuaaaacacgcuuacga

SEQ ID NO: 298760 - RNA, 19 nt, Artificial Sequence
  Description of Artificial Sequence: Synthetic oligonucleotide
aacgccaucaggaaaacgc

SEQ ID NO: 298761 - RNA, 19 nt, Artificial Sequence
  Description of Artificial Sequence: Synthetic oligonucleotide
auuuucgucgaccacaagg

SEQ ID NO: 298762 - RNA, 19 nt, Artificial Sequence
  Description of Artificial Sequence: Synthetic oligonucleotide
cauacaacgaauuaugcug

SEQ ID NO: 298763 - RNA, 19 nt, Artificial Sequence
  Description of Artificial Sequence: Synthetic oligonucleotide
agaugcuauguacaaaugc

SEQ ID NO: 298764 - RNA, 19 nt, Artificial Sequence
  Description of Artificial Sequence: Synthetic oligonucleotide
ugcucuauaaugcugaaac

SEQ ID NO: 298765 - RNA, 19 nt, Artificial Sequence
  Description of Artificial Sequence: Synthetic oligonucleotide
aauguugcaacggaguagg

SEQ ID NO: 298766 - RNA, 19 nt, Artificial Sequence
  Description of Artificial Sequence: Synthetic oligonucleotide
guugcaacggaguaggucg

SEQ ID NO: 298767 - RNA, 19 nt, Artificial Sequence
  Description of Artificial Sequence: Synthetic oligonucleotide
gaugcuauguacaaaugcg

SEQ ID NO: 298768 - RNA, 19 nt, Artificial Sequence
  Description of Artificial Sequence: Synthetic oligonucleotide
cauucgaugcucaaaagcc

SEQ ID NO: 298769 - RNA, 19 nt, Artificial Sequence
  Description of Artificial Sequence: Synthetic oligonucleotide
ucgauaaucaguauaaauu

SEQ ID NO: 298770 - RNA, 19 nt, Artificial Sequence
  Description of Artificial Sequence: Synthetic oligonucleotide
uauuauacugcucuuccga

SEQ ID NO: 298771 - RNA, 19 nt, Artificial Sequence
  Description of Artificial Sequence: Synthetic oligonucleotide
uuaaaacacgcuuacgaca

SEQ ID NO: 298772 - RNA, 19 nt, Artificial Sequence
  Description of Artificial Sequence: Synthetic oligonucleotide
gaguucauccauuugcagg

SEQ ID NO: 298773 - RNA, 19 nt, Artificial Sequence
  Description of Artificial Sequence: Synthetic oligonucleotide
aacuggaacgaccugcauc

SEQ ID NO: 298774 - RNA, 19 nt, Artificial Sequence
  Description of Artificial Sequence: Synthetic oligonucleotide
uaauaaaaugcuugggaca

SEQ ID NO: 298775 - RNA, 19 nt, Artificial Sequence
  Description of Artificial Sequence: Synthetic oligonucleotide
ucuacucguaguaaguuca

SEQ ID NO: 298776 - RNA, 19 nt, Artificial Sequence
  Description of Artificial Sequence: Synthetic oligonucleotide
uuagaaugauaucugauuu

SEQ ID NO: 298777 - RNA, 19 nt, Artificial Sequence
  Description of Artificial Sequence: Synthetic oligonucleotide
cagauaugagcaaaugugg

SEQ ID NO: 298778 - RNA, 19 nt, Artificial Sequence
  Description of Artificial Sequence: Synthetic oligonucleotide
uugaacucuauaaguagag

SEQ ID NO: 298779 - RNA, 19 nt, Artificial Sequence
  Description of Artificial Sequence: Synthetic oligonucleotide
aauaaaaugcuugggacaa

SEQ ID NO: 298780 - RNA, 19 nt, Artificial Sequence
  Description of Artificial Sequence: Synthetic oligonucleotide
uuuaaucaauccuucagaa

SEQ ID NO: 298781 - RNA, 19 nt, Artificial Sequence
  Description of Artificial Sequence: Synthetic oligonucleotide
aggaaaacgcuucugaacu

SEQ ID NO: 298782 - RNA, 19 nt, Artificial Sequence
  Description of Artificial Sequence: Synthetic oligonucleotide
agccuaacagugcugaugg

SEQ ID NO: 298783 - RNA, 19 nt, Artificial Sequence
  Description of Artificial Sequence: Synthetic oligonucleotide
uauguaauguugcaacgga

SEQ ID NO: 298784 - RNA, 19 nt, Artificial Sequence
  Description of Artificial Sequence: Synthetic oligonucleotide
cauauuaauucccauagca

SEQ ID NO: 298785 - RNA, 19 nt, Artificial Sequence
  Description of Artificial Sequence: Synthetic oligonucleotide
uuuucgucgaccacaaggu

SEQ ID NO: 298786 - RNA, 19 nt, Artificial Sequence
  Description of Artificial Sequence: Synthetic oligonucleotide
uacuuguaagcauuuguag

SEQ ID NO: 298787 - RNA, 19 nt, Artificial Sequence
  Description of Artificial Sequence: Synthetic oligonucleotide
aauuacaugacagggcugu

SEQ ID NO: 298788 - RNA, 19 nt, Artificial Sequence
  Description of Artificial Sequence: Synthetic oligonucleotide
gaugcacuaaaacuggaac

SEQ ID NO: 298789 - RNA, 19 nt, Artificial Sequence
  Description of Artificial Sequence: Synthetic oligonucleotide
uuauuauacugcucuuccg

SEQ ID NO: 298790 - RNA, 19 nt, Artificial Sequence
  Description of Artificial Sequence: Synthetic oligonucleotide
uaaaacacgcuuacgacau

SEQ ID NO: 298791 - RNA, 19 nt, Artificial Sequence
  Description of Artificial Sequence: Synthetic oligonucleotide
cuuaaaacacgcuuacgac

SEQ ID NO: 298792 - RNA, 19 nt, Artificial Sequence
  Description of Artificial Sequence: Synthetic oligonucleotide
aacgaauuaugcugccuuc

SEQ ID NO: 298793 - RNA, 19 nt, Artificial Sequence
  Description of Artificial Sequence: Synthetic oligonucleotide
auauaauaaaaugcuuggg

SEQ ID NO: 298794 - RNA, 19 nt, Artificial Sequence
  Description of Artificial Sequence: Synthetic oligonucleotide
aauuaggcuuaacauuuga

SEQ ID NO: 298795 - RNA, 19 nt, Artificial Sequence
  Description of Artificial Sequence: Synthetic oligonucleotide
auggugaauaccaaucccc

SEQ ID NO: 298796 - RNA, 19 nt, Artificial Sequence
  Description of Artificial Sequence: Synthetic oligonucleotide
gaguacuuccaccacauac

SEQ ID NO: 298797 - RNA, 19 nt, Artificial Sequence
  Description of Artificial Sequence: Synthetic oligonucleotide
acuuguaagcauuuguagu

SEQ ID NO: 298798 - RNA, 19 nt, Artificial Sequence
  Description of Artificial Sequence: Synthetic oligonucleotide
ggcauauuaauucccauag

SEQ ID NO: 298799 - RNA, 19 nt, Artificial Sequence
  Description of Artificial Sequence: Synthetic oligonucleotide
uggaauaguagccgaaaga

SEQ ID NO: 298800 - RNA, 19 nt, Artificial Sequence
  Description of Artificial Sequence: Synthetic oligonucleotide
uaauaguuucuucccauac

SEQ ID NO: 298801 - RNA, 19 nt, Artificial Sequence
  Description of Artificial Sequence: Synthetic oligonucleotide
aaugcguauguuacaugcc

SEQ ID NO: 298802 - RNA, 19 nt, Artificial Sequence
  Description of Artificial Sequence: Synthetic oligonucleotide
cauaucaucaggaacgcca

SEQ ID NO: 298803 - RNA, 19 nt, Artificial Sequence
  Description of Artificial Sequence: Synthetic oligonucleotide
ucaccuuuggccaaaucac

SEQ ID NO: 298804 - RNA, 19 nt, Artificial Sequence
  Description of Artificial Sequence: Synthetic oligonucleotide
cuuaauagugcaguugccc

SEQ ID NO: 298805 - RNA, 19 nt, Artificial Sequence
  Description of Artificial Sequence: Synthetic oligonucleotide
auacaacgaauuaugcugc

SEQ ID NO: 298806 - RNA, 19 nt, Artificial Sequence
  Description of Artificial Sequence: Synthetic oligonucleotide
uugaauacuuguaagcauu

SEQ ID NO: 298807 - RNA, 19 nt, Artificial Sequence
  Description of Artificial Sequence: Synthetic oligonucleotide
uuggaauaguagccgaaag

SEQ ID NO: 298808 - RNA, 19 nt, Artificial Sequence
  Description of Artificial Sequence: Synthetic oligonucleotide
ugucuaaucuuguaauaga

SEQ ID NO: 298809 - RNA, 19 nt, Artificial Sequence
  Description of Artificial Sequence: Synthetic oligonucleotide
acgaacuuagguaaguuuc

SEQ ID NO: 298810 - RNA, 19 nt, Artificial Sequence
  Description of Artificial Sequence: Synthetic oligonucleotide
uucuucuacucguaguaag

SEQ ID NO: 298811 - RNA, 19 nt, Artificial Sequence
  Description of Artificial Sequence: Synthetic oligonucleotide
auuauacugcucuuccgag

SEQ ID NO: 298812 - RNA, 19 nt, Artificial Sequence
  Description of Artificial Sequence: Synthetic oligonucleotide
ucagacaaacagucaauug

SEQ ID NO: 298813 - RNA, 19 nt, Artificial Sequence
  Description of Artificial Sequence: Synthetic oligonucleotide
uucaccuuuacuaggcgac

SEQ ID NO: 298814 - RNA, 19 nt, Artificial Sequence
  Description of Artificial Sequence: Synthetic oligonucleotide
uuuguagucaacuguugaa

SEQ ID NO: 298815 - RNA, 19 nt, Artificial Sequence
  Description of Artificial Sequence: Synthetic oligonucleotide
aauuuacgggcauuuguaa

SEQ ID NO: 298816 - RNA, 19 nt, Artificial Sequence
  Description of Artificial Sequence: Synthetic oligonucleotide
uggaugugaauacauucga

SEQ ID NO: 298817 - RNA, 19 nt, Artificial Sequence
  Description of Artificial Sequence: Synthetic oligonucleotide
uugagaaauucacuacuac

SEQ ID NO: 298818 - RNA, 19 nt, Artificial Sequence
  Description of Artificial Sequence: Synthetic oligonucleotide
uuuacgggcauuuguaaau

SEQ ID NO: 298819 - RNA, 19 nt, Artificial Sequence
  Description of Artificial Sequence: Synthetic oligonucleotide
uccauuugcaggacagucc

SEQ ID NO: 298820 - RNA, 19 nt, Artificial Sequence
  Description of Artificial Sequence: Synthetic oligonucleotide
uucgucgaccacaagguga

SEQ ID NO: 298821 - RNA, 19 nt, Artificial Sequence
  Description of Artificial Sequence: Synthetic oligonucleotide
guuaauuugggcaucucac

SEQ ID NO: 298822 - RNA, 19 nt, Artificial Sequence
  Description of Artificial Sequence: Synthetic oligonucleotide
cacuaaaacuggaacgacc

SEQ ID NO: 298823 - RNA, 19 nt, Artificial Sequence
  Description of Artificial Sequence: Synthetic oligonucleotide
uguuacaugccuucuuaga

SEQ ID NO: 298824 - RNA, 19 nt, Artificial Sequence
  Description of Artificial Sequence: Synthetic oligonucleotide
cauacaaaggauccaguuc

SEQ ID NO: 298825 - RNA, 19 nt, Artificial Sequence
  Description of Artificial Sequence: Synthetic oligonucleotide
uguaauagaugacuacauu

SEQ ID NO: 298826 - RNA, 19 nt, Artificial Sequence
  Description of Artificial Sequence: Synthetic oligonucleotide
gaucacuauuuuauuauac

SEQ ID NO: 298827 - RNA, 19 nt, Artificial Sequence
  Description of Artificial Sequence: Synthetic oligonucleotide
uguacucgggauuaauuuc

SEQ ID NO: 298828 - RNA, 19 nt, Artificial Sequence
  Description of Artificial Sequence: Synthetic oligonucleotide
cuugaacgaacuuagguaa

SEQ ID NO: 298829 - RNA, 19 nt, Artificial Sequence
  Description of Artificial Sequence: Synthetic oligonucleotide
cuuuaaucaauccuucaga

SEQ ID NO: 298830 - RNA, 19 nt, Artificial Sequence
  Description of Artificial Sequence: Synthetic oligonucleotide
auuaggcuuaacauuugac

SEQ ID NO: 298831 - RNA, 19 nt, Artificial Sequence
  Description of Artificial Sequence: Synthetic oligonucleotide
acuaaaacuggaacgaccu

SEQ ID NO: 298832 - RNA, 19 nt, Artificial Sequence
  Description of Artificial Sequence: Synthetic oligonucleotide
ugcauugcaguguuaaaau

SEQ ID NO: 298833 - RNA, 19 nt, Artificial Sequence
  Description of Artificial Sequence: Synthetic oligonucleotide
ucgaccacaaggugaaggc

SEQ ID NO: 298834 - RNA, 19 nt, Artificial Sequence
  Description of Artificial Sequence: Synthetic oligonucleotide
aacgaacuuagguaaguuu

SEQ ID NO: 298835 - RNA, 19 nt, Artificial Sequence
  Description of Artificial Sequence: Synthetic oligonucleotide
uaaaaugcuugggacaacu

SEQ ID NO: 298836 - RNA, 19 nt, Artificial Sequence
  Description of Artificial Sequence: Synthetic oligonucleotide
acgcuuacgacauuugagu

SEQ ID NO: 298837 - RNA, 19 nt, Artificial Sequence
  Description of Artificial Sequence: Synthetic oligonucleotide
cauggugaauaccaauccc

SEQ ID NO: 298838 - RNA, 19 nt, Artificial Sequence
  Description of Artificial Sequence: Synthetic oligonucleotide
accacuugaauacuuguaa

SEQ ID NO: 298839 - RNA, 19 nt, Artificial Sequence
  Description of Artificial Sequence: Synthetic oligonucleotide
ugggacaacucucuugaga

SEQ ID NO: 298840 - RNA, 19 nt, Artificial Sequence
  Description of Artificial Sequence: Synthetic oligonucleotide
aaauuuacgggcauuugua

SEQ ID NO: 298841 - RNA, 19 nt, Artificial Sequence
  Description of Artificial Sequence: Synthetic oligonucleotide
cacgcuuacgacauuugag

SEQ ID NO: 298842 - RNA, 19 nt, Artificial Sequence
  Description of Artificial Sequence: Synthetic oligonucleotide
ccuguauggauuuuaaaac

SEQ ID NO: 298843 - RNA, 19 nt, Artificial Sequence
  Description of Artificial Sequence: Synthetic oligonucleotide
uaauagugcaguugcccug

SEQ ID NO: 298844 - RNA, 19 nt, Artificial Sequence
  Description of Artificial Sequence: Synthetic oligonucleotide
ugaaacuuuugcaauccuu

SEQ ID NO: 298845 - RNA, 19 nt, Artificial Sequence
  Description of Artificial Sequence: Synthetic oligonucleotide
guagguggcaaauccauuc

SEQ ID NO: 298846 - RNA, 19 nt, Artificial Sequence
  Description of Artificial Sequence: Synthetic oligonucleotide
uaggucgauaaucaguaua

SEQ ID NO: 298847 - RNA, 19 nt, Artificial Sequence
  Description of Artificial Sequence: Synthetic oligonucleotide
uuguagucaacuguugaac

SEQ ID NO: 298848 - RNA, 19 nt, Artificial Sequence
  Description of Artificial Sequence: Synthetic oligonucleotide
uucacaagccacacguccu

SEQ ID NO: 298849 - RNA, 19 nt, Artificial Sequence
  Description of Artificial Sequence: Synthetic oligonucleotide
guuacaugccuucuuagaa

SEQ ID NO: 298850 - RNA, 19 nt, Artificial Sequence
  Description of Artificial Sequence: Synthetic oligonucleotide
uucccauacuacaccacgc

SEQ ID NO: 298851 - RNA, 19 nt, Artificial Sequence
  Description of Artificial Sequence: Synthetic oligonucleotide
caggaaaacgcuucugaac

SEQ ID NO: 298852 - RNA, 19 nt, Artificial Sequence
  Description of Artificial Sequence: Synthetic oligonucleotide
uucgaugcucaaaagccuc

SEQ ID NO: 298853 - RNA, 19 nt, Artificial Sequence
  Description of Artificial Sequence: Synthetic oligonucleotide
augcguauguuacaugccu

SEQ ID NO: 298854 - RNA, 19 nt, Artificial Sequence
  Description of Artificial Sequence: Synthetic oligonucleotide
uuacaugccuucuuagaau

SEQ ID NO: 298855 - RNA, 19 nt, Artificial Sequence
  Description of Artificial Sequence: Synthetic oligonucleotide
aaaaugcuugggacaacuc

SEQ ID NO: 298856 - RNA, 19 nt, Artificial Sequence
  Description of Artificial Sequence: Synthetic oligonucleotide
acggaguaggucgauaauc

SEQ ID NO: 298857 - RNA, 19 nt, Artificial Sequence
  Description of Artificial Sequence: Synthetic oligonucleotide
gucgguuguccacaggccg

SEQ ID NO: 298858 - RNA, 19 nt, Artificial Sequence
  Description of Artificial Sequence: Synthetic oligonucleotide
acugucgugcauuuggaau

SEQ ID NO: 298859 - RNA, 19 nt, Artificial Sequence
  Description of Artificial Sequence: Synthetic oligonucleotide
ucccauagcaaaagucucu

SEQ ID NO: 298860 - RNA, 19 nt, Artificial Sequence
  Description of Artificial Sequence: Synthetic oligonucleotide
ucgcuuugcagacuuaaua

SEQ ID NO: 298861 - RNA, 19 nt, Artificial Sequence
  Description of Artificial Sequence: Synthetic oligonucleotide
cuuacgacauuugaguuca

SEQ ID NO: 298862 - RNA, 19 nt, Artificial Sequence
  Description of Artificial Sequence: Synthetic oligonucleotide
auguuacaugccuucuuag

SEQ ID NO: 298863 - RNA, 19 nt, Artificial Sequence
  Description of Artificial Sequence: Synthetic oligonucleotide
acauacaaaggauccaguu

SEQ ID NO: 298864 - RNA, 19 nt, Artificial Sequence
  Description of Artificial Sequence: Synthetic oligonucleotide
cuuuugcaauccuuuuagc

SEQ ID NO: 298865 - RNA, 19 nt, Artificial Sequence
  Description of Artificial Sequence: Synthetic oligonucleotide
ugaauacuuguaagcauuu

SEQ ID NO: 298866 - RNA, 19 nt, Artificial Sequence
  Description of Artificial Sequence: Synthetic oligonucleotide
gacuuaauaucuauugcaa

SEQ ID NO: 298867 - RNA, 19 nt, Artificial Sequence
  Description of Artificial Sequence: Synthetic oligonucleotide
auuuacgggcauuuguaaa

SEQ ID NO: 298868 - RNA, 19 nt, Artificial Sequence
  Description of Artificial Sequence: Synthetic oligonucleotide
ucaaauuuacgggcauuug

SEQ ID NO: 298869 - RNA, 19 nt, Artificial Sequence
  Description of Artificial Sequence: Synthetic oligonucleotide
cagguugaaaauuccuuuc

SEQ ID NO: 298870 - RNA, 19 nt, Artificial Sequence
  Description of Artificial Sequence: Synthetic oligonucleotide
aguaggucgauaaucagua

SEQ ID NO: 298871 - RNA, 19 nt, Artificial Sequence
  Description of Artificial Sequence: Synthetic oligonucleotide
gaaguacgugcucaaccug

SEQ ID NO: 298872 - RNA, 19 nt, Artificial Sequence
  Description of Artificial Sequence: Synthetic oligonucleotide
uaguagccgaaagaaagac

SEQ ID NO: 298873 - RNA, 19 nt, Artificial Sequence
  Description of Artificial Sequence: Synthetic oligonucleotide
uacaacgaauuaugcugcc

SEQ ID NO: 298874 - RNA, 19 nt, Artificial Sequence
  Description of Artificial Sequence: Synthetic oligonucleotide
guagucaacuguugaacuc

SEQ ID NO: 298875 - RNA, 19 nt, Artificial Sequence
  Description of Artificial Sequence: Synthetic oligonucleotide
uuuauguagguggcaaauc

SEQ ID NO: 298876 - RNA, 19 nt, Artificial Sequence
  Description of Artificial Sequence: Synthetic oligonucleotide
ugaacgaacuuagguaagu

SEQ ID NO: 298877 - RNA, 19 nt, Artificial Sequence
  Description of Artificial Sequence: Synthetic oligonucleotide
ucgugcauuuggaauagua

SEQ ID NO: 298878 - RNA, 19 nt, Artificial Sequence
  Description of Artificial Sequence: Synthetic oligonucleotide
uuccaggcgccucauacaa

SEQ ID NO: 298879 - RNA, 19 nt, Artificial Sequence
  Description of Artificial Sequence: Synthetic oligonucleotide
ccucauacaacgaauuaug

SEQ ID NO: 298880 - RNA, 19 nt, Artificial Sequence
  Description of Artificial Sequence: Synthetic oligonucleotide
gucgaagugguccagcuaa

SEQ ID NO: 298881 - RNA, 19 nt, Artificial Sequence
  Description of Artificial Sequence: Synthetic oligonucleotide
auguagcaaagcccaaucu

SEQ ID NO: 298882 - RNA, 19 nt, Artificial Sequence
  Description of Artificial Sequence: Synthetic oligonucleotide
ucgucgaccacaaggugaa

SEQ ID NO: 298883 - RNA, 19 nt, Artificial Sequence
  Description of Artificial Sequence: Synthetic oligonucleotide
gaauacuuguaagcauuug

SEQ ID NO: 298884 - RNA, 19 nt, Artificial Sequence
  Description of Artificial Sequence: Synthetic oligonucleotide
guugaacucuauaaguaga

SEQ ID NO: 298885 - RNA, 19 nt, Artificial Sequence
  Description of Artificial Sequence: Synthetic oligonucleotide
ucgggauuaauuucuucua

SEQ ID NO: 298886 - RNA, 19 nt, Artificial Sequence
  Description of Artificial Sequence: Synthetic oligonucleotide
cauaagaauuacaauuccu

SEQ ID NO: 298887 - RNA, 19 nt, Artificial Sequence
  Description of Artificial Sequence: Synthetic oligonucleotide
aaacacgcuuacgacauuu

SEQ ID NO: 298888 - RNA, 19 nt, Artificial Sequence
  Description of Artificial Sequence: Synthetic oligonucleotide
auaaggccuuuaaucaauc

SEQ ID NO: 298889 - RNA, 19 nt, Artificial Sequence
  Description of Artificial Sequence: Synthetic oligonucleotide
gcauuuggaauaguagccg

SEQ ID NO: 298890 - RNA, 19 nt, Artificial Sequence
  Description of Artificial Sequence: Synthetic oligonucleotide
ccauaagaauuacaauucc

SEQ ID NO: 298891 - RNA, 19 nt, Artificial Sequence
  Description of Artificial Sequence: Synthetic oligonucleotide
guaauguugcaacggagua

SEQ ID NO: 298892 - RNA, 19 nt, Artificial Sequence
  Description of Artificial Sequence: Synthetic oligonucleotide
guaagcaguauuuuggcuu

SEQ ID NO: 298893 - RNA, 19 nt, Artificial Sequence
  Description of Artificial Sequence: Synthetic oligonucleotide
acacgcuuacgacauuuga

SEQ ID NO: 298894 - RNA, 19 nt, Artificial Sequence
  Description of Artificial Sequence: Synthetic oligonucleotide
gaauuaggcuuaacauuug

SEQ ID NO: 298895 - RNA, 19 nt, Artificial Sequence
  Description of Artificial Sequence: Synthetic oligonucleotide
aacggaguaggucgauaau

SEQ ID NO: 298896 - RNA, 19 nt, Artificial Sequence
  Description of Artificial Sequence: Synthetic oligonucleotide
auaguagccgaaagaaaga

SEQ ID NO: 298897 - RNA, 19 nt, Artificial Sequence
  Description of Artificial Sequence: Synthetic oligonucleotide
auacuuguaagcauuugua

SEQ ID NO: 298898 - RNA, 19 nt, Artificial Sequence
  Description of Artificial Sequence: Synthetic oligonucleotide
uuggaauauaaagccuaac

SEQ ID NO: 298899 - RNA, 19 nt, Artificial Sequence
  Description of Artificial Sequence: Synthetic oligonucleotide
aaaucaccugcaucccgaa

SEQ ID NO: 298900 - RNA, 19 nt, Artificial Sequence
  Description of Artificial Sequence: Synthetic oligonucleotide
ucgguuguccacaggccga

SEQ ID NO: 298901 - RNA, 19 nt, Artificial Sequence
  Description of Artificial Sequence: Synthetic oligonucleotide
uuaaaacacucugucgguu

SEQ ID NO: 298902 - RNA, 19 nt, Artificial Sequence
  Description of Artificial Sequence: Synthetic oligonucleotide
cauuugauggaccuuuugu

SEQ ID NO: 298903 - RNA, 19 nt, Artificial Sequence
  Description of Artificial Sequence: Synthetic oligonucleotide
caaauuuacgggcauuugu

SEQ ID NO: 298904 - RNA, 19 nt, Artificial Sequence
  Description of Artificial Sequence: Synthetic oligonucleotide
guagccgaaagaaagacau

SEQ ID NO: 298905 - RNA, 19 nt, Artificial Sequence
  Description of Artificial Sequence: Synthetic oligonucleotide
ggaaagcacuauucagggg

SEQ ID NO: 298906 - RNA, 19 nt, Artificial Sequence
  Description of Artificial Sequence: Synthetic oligonucleotide
ugcucaaccugagggagcu

SEQ ID NO: 298907 - RNA, 19 nt, Artificial Sequence
  Description of Artificial Sequence: Synthetic oligonucleotide
uguagguggcaaauccauu

SEQ ID NO: 298908 - RNA, 19 nt, Artificial Sequence
  Description of Artificial Sequence: Synthetic oligonucleotide
cauuugucgaaguggucca

SEQ ID NO: 298909 - RNA, 19 nt, Artificial Sequence
  Description of Artificial Sequence: Synthetic oligonucleotide
uugaucuugaaugcccaua

SEQ ID NO: 298910 - RNA, 19 nt, Artificial Sequence
  Description of Artificial Sequence: Synthetic oligonucleotide
auucgaugcucaaaagccu

SEQ ID NO: 298911 - RNA, 19 nt, Artificial Sequence
  Description of Artificial Sequence: Synthetic oligonucleotide
aacacgcuuacgacauuug

SEQ ID NO: 298912 - RNA, 19 nt, Artificial Sequence
  Description of Artificial Sequence: Synthetic oligonucleotide
gcuugaacgaacuuaggua

SEQ ID NO: 298913 - RNA, 19 nt, Artificial Sequence
  Description of Artificial Sequence: Synthetic oligonucleotide
ccauggugaauaccaaucc

SEQ ID NO: 298914 - RNA, 19 nt, Artificial Sequence
  Description of Artificial Sequence: Synthetic oligonucleotide
ugcguauguuacaugccuu

SEQ ID NO: 298915 - RNA, 19 nt, Artificial Sequence
  Description of Artificial Sequence: Synthetic oligonucleotide
ucaccuuuacuaggcgacc

SEQ ID NO: 298916 - RNA, 19 nt, Artificial Sequence
  Description of Artificial Sequence: Synthetic oligonucleotide
gauguacucaccagaggaa

SEQ ID NO: 298917 - RNA, 19 nt, Artificial Sequence
  Description of Artificial Sequence: Synthetic oligonucleotide
gaaccacuugaauacuugu

SEQ ID NO: 298918 - RNA, 19 nt, Artificial Sequence
  Description of Artificial Sequence: Synthetic oligonucleotide
cucuuccgaguucuugacc

SEQ ID NO: 298919 - RNA, 19 nt, Artificial Sequence
  Description of Artificial Sequence: Synthetic oligonucleotide
acgaauuaugcugccuuca

SEQ ID NO: 298920 - RNA, 19 nt, Artificial Sequence
  Description of Artificial Sequence: Synthetic oligonucleotide
ggaguaggucgauaaucag

SEQ ID NO: 298921 - RNA, 19 nt, Artificial Sequence
  Description of Artificial Sequence: Synthetic oligonucleotide
uacgggcauuuguaaauaa

SEQ ID NO: 298922 - RNA, 19 nt, Artificial Sequence
  Description of Artificial Sequence: Synthetic oligonucleotide
guacgugcucaaccugagg

SEQ ID NO: 298923 - RNA, 19 nt, Artificial Sequence
  Description of Artificial Sequence: Synthetic oligonucleotide
aguagccgaaagaaagaca

SEQ ID NO: 298924 - RNA, 19 nt, Artificial Sequence
  Description of Artificial Sequence: Synthetic oligonucleotide
uugcaacggaguaggucga

SEQ ID NO: 298925 - RNA, 19 nt, Artificial Sequence
  Description of Artificial Sequence: Synthetic oligonucleotide
auguacucaccagaggaaa

SEQ ID NO: 298926 - RNA, 19 nt, Artificial Sequence
  Description of Artificial Sequence: Synthetic oligonucleotide
cagaauuaggcuuaacauu

SEQ ID NO: 298927 - RNA, 19 nt, Artificial Sequence
  Description of Artificial Sequence: Synthetic oligonucleotide
auaaagccuaacagugcug

SEQ ID NO: 298928 - RNA, 19 nt, Artificial Sequence
  Description of Artificial Sequence: Synthetic oligonucleotide
uccgauggcuuuugcugcu

SEQ ID NO: 298929 - RNA, 19 nt, Artificial Sequence
  Description of Artificial Sequence: Synthetic oligonucleotide
aaacgcuucugaacuuccu

SEQ ID NO: 298930 - RNA, 19 nt, Artificial Sequence
  Description of Artificial Sequence: Synthetic oligonucleotide
caacggaguaggucgauaa

SEQ ID NO: 298931 - RNA, 19 nt, Artificial Sequence
  Description of Artificial Sequence: Synthetic oligonucleotide
ugucgaagugguccagcua

SEQ ID NO: 298932 - RNA, 19 nt, Artificial Sequence
  Description of Artificial Sequence: Synthetic oligonucleotide
auguagguggcaaauccau

SEQ ID NO: 298933 - RNA, 19 nt, Artificial Sequence
  Description of Artificial Sequence: Synthetic oligonucleotide
aaaacacgcuuacgacauu

SEQ ID NO: 298934 - RNA, 19 nt, Artificial Sequence
  Description of Artificial Sequence: Synthetic oligonucleotide
cgauaaucaguauaaauua

SEQ ID NO: 298935 - RNA, 19 nt, Artificial Sequence
  Description of Artificial Sequence: Synthetic oligonucleotide
agucaccauuuucgucgac

SEQ ID NO: 298936 - RNA, 19 nt, Artificial Sequence
  Description of Artificial Sequence: Synthetic oligonucleotide
ggaaguacgugcucaaccu

SEQ ID NO: 298937 - RNA, 19 nt, Artificial Sequence
  Description of Artificial Sequence: Synthetic oligonucleotide
uacucgggauuaauuucuu

SEQ ID NO: 298938 - RNA, 19 nt, Artificial Sequence
  Description of Artificial Sequence: Synthetic oligonucleotide
cacaaucuugaacacauuu

SEQ ID NO: 298939 - RNA, 19 nt, Artificial Sequence
  Description of Artificial Sequence: Synthetic oligonucleotide
uacucguaguaaguucaaa

SEQ ID NO: 298940 - RNA, 19 nt, Artificial Sequence
  Description of Artificial Sequence: Synthetic oligonucleotide
uagccgaaagaaagacaua

SEQ ID NO: 298941 - RNA, 19 nt, Artificial Sequence
  Description of Artificial Sequence: Synthetic oligonucleotide
gucuaaucuuguaauagau

SEQ ID NO: 298942 - RNA, 19 nt, Artificial Sequence
  Description of Artificial Sequence: Synthetic oligonucleotide
ccaguucaccagaauuagg

SEQ ID NO: 298943 - RNA, 19 nt, Artificial Sequence
  Description of Artificial Sequence: Synthetic oligonucleotide
guacucgggauuaauuucu

SEQ ID NO: 298944 - RNA, 19 nt, Artificial Sequence
  Description of Artificial Sequence: Synthetic oligonucleotide
gaacuuagguaaguuuccu

SEQ ID NO: 298945 - RNA, 19 nt, Artificial Sequence
  Description of Artificial Sequence: Synthetic oligonucleotide
cuuccaggcgccucauaca

SEQ ID NO: 298946 - RNA, 19 nt, Artificial Sequence
  Description of Artificial Sequence: Synthetic oligonucleotide
gcguauguuacaugccuuc

SEQ ID NO: 298947 - RNA, 19 nt, Artificial Sequence
  Description of Artificial Sequence: Synthetic oligonucleotide
acgccaucaggaaaacgcu

SEQ ID NO: 298948 - RNA, 19 nt, Artificial Sequence
  Description of Artificial Sequence: Synthetic oligonucleotide
ccagaauuaggcuuaacau

SEQ ID NO: 298949 - RNA, 19 nt, Artificial Sequence
  Description of Artificial Sequence: Synthetic oligonucleotide
cuuagguaaguuuccucau

SEQ ID NO: 298950 - RNA, 19 nt, Artificial Sequence
  Description of Artificial Sequence: Synthetic oligonucleotide
acgggcauuuguaaauaaa

SEQ ID NO: 298951 - RNA, 19 nt, Artificial Sequence
  Description of Artificial Sequence: Synthetic oligonucleotide
gguaagcaguauuuuggcu

SEQ ID NO: 298952 - RNA, 19 nt, Artificial Sequence
  Description of Artificial Sequence: Synthetic oligonucleotide
cauguacucgggauuaauu

SEQ ID NO: 298953 - RNA, 19 nt, Artificial Sequence
  Description of Artificial Sequence: Synthetic oligonucleotide
cagauaagagaugcacuaa

SEQ ID NO: 298954 - RNA, 19 nt, Artificial Sequence
  Description of Artificial Sequence: Synthetic oligonucleotide
cccaucaaauuuacgggca

SEQ ID NO: 298955 - RNA, 19 nt, Artificial Sequence
  Description of Artificial Sequence: Synthetic oligonucleotide
cacauacaaaggauccagu

SEQ ID NO: 298956 - RNA, 19 nt, Artificial Sequence
  Description of Artificial Sequence: Synthetic oligonucleotide
gguauacaccacauccauc

SEQ ID NO: 298957 - RNA, 19 nt, Artificial Sequence
  Description of Artificial Sequence: Synthetic oligonucleotide
caggaacgccaucaggaaa

SEQ ID NO: 298958 - RNA, 19 nt, Artificial Sequence
  Description of Artificial Sequence: Synthetic oligonucleotide
cagcgcaggaguacuucca

SEQ ID NO: 298959 - RNA, 19 nt, Artificial Sequence
  Description of Artificial Sequence: Synthetic oligonucleotide
cugagcccuuaaguaguug

SEQ ID NO: 298960 - RNA, 19 nt, Artificial Sequence
  Description of Artificial Sequence: Synthetic oligonucleotide
gcucuauaaugcugaaacu

SEQ ID NO: 298961 - RNA, 19 nt, Artificial Sequence
  Description of Artificial Sequence: Synthetic oligonucleotide
auuacaugacagggcuguu

SEQ ID NO: 298962 - RNA, 19 nt, Artificial Sequence
  Description of Artificial Sequence: Synthetic oligonucleotide
cugaaacuuuugcaauccu

SEQ ID NO: 298963 - RNA, 19 nt, Artificial Sequence
  Description of Artificial Sequence: Synthetic oligonucleotide
ugcaacggaguaggucgau

SEQ ID NO: 298964 - RNA, 19 nt, Artificial Sequence
  Description of Artificial Sequence: Synthetic oligonucleotide
uuacgacauuugaguucau

SEQ ID NO: 298965 - RNA, 19 nt, Artificial Sequence
  Description of Artificial Sequence: Synthetic oligonucleotide
ggcagauaagagaugcacu

SEQ ID NO: 298966 - RNA, 19 nt, Artificial Sequence
  Description of Artificial Sequence: Synthetic oligonucleotide
agcauguacucgggauuaa

SEQ ID NO: 298967 - RNA, 19 nt, Artificial Sequence
  Description of Artificial Sequence: Synthetic oligonucleotide
caccauggugaauaccaau

SEQ ID NO: 298968 - RNA, 19 nt, Artificial Sequence
  Description of Artificial Sequence: Synthetic oligonucleotide
cuacuacuccccagccaaa

SEQ ID NO: 298969 - RNA, 19 nt, Artificial Sequence
  Description of Artificial Sequence: Synthetic oligonucleotide
ccauaucaucaggaacgcc

SEQ ID NO: 298970 - RNA, 19 nt, Artificial Sequence
  Description of Artificial Sequence: Synthetic oligonucleotide
guaggucgauaaucaguau

SEQ ID NO: 298971 - RNA, 19 nt, Artificial Sequence
  Description of Artificial Sequence: Synthetic oligonucleotide
gccucauacaacgaauuau

SEQ ID NO: 298972 - RNA, 19 nt, Artificial Sequence
  Description of Artificial Sequence: Synthetic oligonucleotide
gcgaccuggcuguagaaau

SEQ ID NO: 298973 - RNA, 19 nt, Artificial Sequence
  Description of Artificial Sequence: Synthetic oligonucleotide
ccacacguccuuucaucuc

SEQ ID NO: 298974 - RNA, 19 nt, Artificial Sequence
  Description of Artificial Sequence: Synthetic oligonucleotide
caggcgccucauacaacga

SEQ ID NO: 298975 - RNA, 19 nt, Artificial Sequence
  Description of Artificial Sequence: Synthetic oligonucleotide
ggcaucucacuagaauucu

SEQ ID NO: 298976 - RNA, 19 nt, Artificial Sequence
  Description of Artificial Sequence: Synthetic oligonucleotide
gccuaacagugcugauggc

SEQ ID NO: 298977 - RNA, 19 nt, Artificial Sequence
  Description of Artificial Sequence: Synthetic oligonucleotide
cucaaccugagggagcuuu

SEQ ID NO: 298978 - RNA, 19 nt, Artificial Sequence
  Description of Artificial Sequence: Synthetic oligonucleotide
ggaugugaauacauucgau

SEQ ID NO: 298979 - RNA, 19 nt, Artificial Sequence
  Description of Artificial Sequence: Synthetic oligonucleotide
ccccguuucaaaagaggaa

SEQ ID NO: 298980 - RNA, 19 nt, Artificial Sequence
  Description of Artificial Sequence: Synthetic oligonucleotide
ggaaaacgcuucugaacuu

SEQ ID NO: 298981 - RNA, 19 nt, Artificial Sequence
  Description of Artificial Sequence: Synthetic oligonucleotide
caucaaauuuacgggcauu

SEQ ID NO: 298982 - RNA, 19 nt, Artificial Sequence
  Description of Artificial Sequence: Synthetic oligonucleotide
cuauugcaaucugugcuuu

SEQ ID NO: 298983 - RNA, 19 nt, Artificial Sequence
  Description of Artificial Sequence: Synthetic oligonucleotide
ccguuucaaaagaggaagu

SEQ ID NO: 298984 - RNA, 19 nt, Artificial Sequence
  Description of Artificial Sequence: Synthetic oligonucleotide
ggcgaccuggcuguagaaa

SEQ ID NO: 298985 - RNA, 19 nt, Artificial Sequence
  Description of Artificial Sequence: Synthetic oligonucleotide
gccagacaucuggauguac

SEQ ID NO: 298986 - RNA, 19 nt, Artificial Sequence
  Description of Artificial Sequence: Synthetic oligonucleotide
ggauccaguucaccagaau

SEQ ID NO: 298987 - RNA, 19 nt, Artificial Sequence
  Description of Artificial Sequence: Synthetic oligonucleotide
cacggccagacaucuggau

SEQ ID NO: 298988 - RNA, 19 nt, Artificial Sequence
  Description of Artificial Sequence: Synthetic oligonucleotide
ggcgccucauacaacgaau

SEQ ID NO: 298989 - RNA, 19 nt, Artificial Sequence
  Description of Artificial Sequence: Synthetic oligonucleotide
cuacagcgcaggaguacuu

SEQ ID NO: 298990 - RNA, 19 nt, Artificial Sequence
  Description of Artificial Sequence: Synthetic oligonucleotide
gcaacggaguaggucgaua

SEQ ID NO: 298991 - RNA, 19 nt, Artificial Sequence
  Description of Artificial Sequence: Synthetic oligonucleotide
acuaggcgaccuggcugua

SEQ ID NO: 298992 - RNA, 19 nt, Artificial Sequence
  Description of Artificial Sequence: Synthetic oligonucleotide
gcacggccagacaucugga

SEQ ID NO: 298993 - RNA, 19 nt, Artificial Sequence
  Description of Artificial Sequence: Synthetic oligonucleotide
cgccucauacaacgaauua

SEQ ID NO: 298994 - RNA, 19 nt, Artificial Sequence
  Description of Artificial Sequence: Synthetic oligonucleotide
ccagcacggccagacaucu

SEQ ID NO: 298995 - RNA, 19 nt, Artificial Sequence
  Description of Artificial Sequence: Synthetic oligonucleotide
gcgccucauacaacgaauu

SEQ ID NO: 298996 - RNA, 19 nt, Artificial Sequence
  Description of Artificial Sequence: Synthetic oligonucleotide
cgcuuacgacauuugaguu

SEQ ID NO: 298997 - RNA, 19 nt, Artificial Sequence
  Description of Artificial Sequence: Synthetic oligonucleotide
gcugagcccuuaaguaguu

SEQ ID NO: 298998 - RNA, 19 nt, Artificial Sequence
  Description of Artificial Sequence: Synthetic oligonucleotide
cgucgaccacaaggugaag

SEQ ID NO: 298999 - RNA, 19 nt, Artificial Sequence
  Description of Artificial Sequence: Synthetic oligonucleotide
ccggcccuucuggucaccu

SEQ ID NO: 299000 - RNA, 19 nt, Artificial Sequence
  Description of Artificial Sequence: Synthetic oligonucleotide
gcucaaccugagggagcuu

SEQ ID NO: 299001 - RNA, 19 nt, Artificial Sequence
  Description of Artificial Sequence: Synthetic oligonucleotide
aauggguuggcaaugacac

SEQ ID NO: 299002 - RNA, 19 nt, Artificial Sequence
  Description of Artificial Sequence: Synthetic oligonucleotide
uuagucagaagccauaacu

SEQ ID NO: 299003 - RNA, 19 nt, Artificial Sequence
  Description of Artificial Sequence: Synthetic oligonucleotide
aggaaugucauuucgggac

SEQ ID NO: 299004 - RNA, 19 nt, Artificial Sequence
  Description of Artificial Sequence: Synthetic oligonucleotide
uuuagcuguccucacaggg

SEQ ID NO: 299005 - RNA, 19 nt, Artificial Sequence
  Description of Artificial Sequence: Synthetic oligonucleotide
uuucgcaaguucaauagcc

SEQ ID NO: 299006 - RNA, 19 nt, Artificial Sequence
  Description of Artificial Sequence: Synthetic oligonucleotide
acugcuaggaugccggucc

SEQ ID NO: 299007 - RNA, 19 nt, Artificial Sequence
  Description of Artificial Sequence: Synthetic oligonucleotide
aaggcuaaaagacuugggu

SEQ ID NO: 299008 - RNA, 19 nt, Artificial Sequence
  Description of Artificial Sequence: Synthetic oligonucleotide
uguacaaacaucacuaguu

SEQ ID NO: 299009 - RNA, 19 nt, Artificial Sequence
  Description of Artificial Sequence: Synthetic oligonucleotide
agcaagagcuccucgaggc

SEQ ID NO: 299010 - RNA, 19 nt, Artificial Sequence
  Description of Artificial Sequence: Synthetic oligonucleotide
ucaauagccggaagaaggg

SEQ ID NO: 299011 - RNA, 19 nt, Artificial Sequence
  Description of Artificial Sequence: Synthetic oligonucleotide
ugaaguuagcuacuucagg

SEQ ID NO: 299012 - RNA, 19 nt, Artificial Sequence
  Description of Artificial Sequence: Synthetic oligonucleotide
gauuuaagcagguucuccc

SEQ ID NO: 299013 - RNA, 19 nt, Artificial Sequence
  Description of Artificial Sequence: Synthetic oligonucleotide
ucuuccguaagucaucagc

SEQ ID NO: 299014 - RNA, 19 nt, Artificial Sequence
  Description of Artificial Sequence: Synthetic oligonucleotide
uuggcgucgagcaagagcu

SEQ ID NO: 299015 - RNA, 19 nt, Artificial Sequence
  Description of Artificial Sequence: Synthetic oligonucleotide
aggguuaucaaguuggcca

SEQ ID NO: 299016 - RNA, 19 nt, Artificial Sequence
  Description of Artificial Sequence: Synthetic oligonucleotide
aaguuagcuacuucaggag

SEQ ID NO: 299017 - RNA, 19 nt, Artificial Sequence
  Description of Artificial Sequence: Synthetic oligonucleotide
acuaguuacagucucgcca

SEQ ID NO: 299018 - RNA, 19 nt, Artificial Sequence
  Description of Artificial Sequence: Synthetic oligonucleotide
uuuaagcagguucucccgg

SEQ ID NO: 299019 - RNA, 19 nt, Artificial Sequence
  Description of Artificial Sequence: Synthetic oligonucleotide
uaucgaagccaucacagac

SEQ ID NO: 299020 - RNA, 19 nt, Artificial Sequence
  Description of Artificial Sequence: Synthetic oligonucleotide
uucgcaaguucaauagccg

SEQ ID NO: 299021 - RNA, 19 nt, Artificial Sequence
  Description of Artificial Sequence: Synthetic oligonucleotide
aguacuuuugccguucccg

SEQ ID NO: 299022 - RNA, 19 nt, Artificial Sequence
  Description of Artificial Sequence: Synthetic oligonucleotide
aaaagacuuggguaaggga

SEQ ID NO: 299023 - RNA, 19 nt, Artificial Sequence
  Description of Artificial Sequence: Synthetic oligonucleotide
aaaucuggugacgcaagcg

SEQ ID NO: 299024 - RNA, 19 nt, Artificial Sequence
  Description of Artificial Sequence: Synthetic oligonucleotide
augugugaggcccagcagg

SEQ ID NO: 299025 - RNA, 19 nt, Artificial Sequence
  Description of Artificial Sequence: Synthetic oligonucleotide
agcgucaugucuucagggc

SEQ ID NO: 299026 - RNA, 19 nt, Artificial Sequence
  Description of Artificial Sequence: Synthetic oligonucleotide
aacuuuaugcucucgggua

SEQ ID NO: 299027 - RNA, 19 nt, Artificial Sequence
  Description of Artificial Sequence: Synthetic oligonucleotide
cuaguuacagucucgccac

SEQ ID NO: 299028 - RNA, 19 nt, Artificial Sequence
  Description of Artificial Sequence: Synthetic oligonucleotide
acggcuacugcacagcguc

SEQ ID NO: 299029 - RNA, 19 nt, Artificial Sequence
  Description of Artificial Sequence: Synthetic oligonucleotide
cagggagagauuuaagcag

SEQ ID NO: 299030 - RNA, 19 nt, Artificial Sequence
  Description of Artificial Sequence: Synthetic oligonucleotide
uguagacucaggcucccag

SEQ ID NO: 299031 - RNA, 19 nt, Artificial Sequence
  Description of Artificial Sequence: Synthetic oligonucleotide
aguuugacuggucaacucu

SEQ ID NO: 299032 - RNA, 19 nt, Artificial Sequence
  Description of Artificial Sequence: Synthetic oligonucleotide
ucgcaaguucaauagccgg

SEQ ID NO: 299033 - RNA, 19 nt, Artificial Sequence
  Description of Artificial Sequence: Synthetic oligonucleotide
ugggagaugguuccaaacu

SEQ ID NO: 299034 - RNA, 19 nt, Artificial Sequence
  Description of Artificial Sequence: Synthetic oligonucleotide
ugagggccugccaagaagc

SEQ ID NO: 299035 - RNA, 19 nt, Artificial Sequence
  Description of Artificial Sequence: Synthetic oligonucleotide
uguucuagcuugaccagga

SEQ ID NO: 299036 - RNA, 19 nt, Artificial Sequence
  Description of Artificial Sequence: Synthetic oligonucleotide
gucugcaaucuccagagcc

SEQ ID NO: 299037 - RNA, 19 nt, Artificial Sequence
  Description of Artificial Sequence: Synthetic oligonucleotide
uaugcucucggguaucuca

SEQ ID NO: 299038 - RNA, 19 nt, Artificial Sequence
  Description of Artificial Sequence: Synthetic oligonucleotide
cagacuccgacccagaguc

SEQ ID NO: 299039 - RNA, 19 nt, Artificial Sequence
  Description of Artificial Sequence: Synthetic oligonucleotide
agagauuuaagcagguucu

SEQ ID NO: 299040 - RNA, 19 nt, Artificial Sequence
  Description of Artificial Sequence: Synthetic oligonucleotide
caacccgaaggccacagcg

SEQ ID NO: 299041 - RNA, 19 nt, Artificial Sequence
  Description of Artificial Sequence: Synthetic oligonucleotide
guagcgguagaucuccucc

SEQ ID NO: 299042 - RNA, 19 nt, Artificial Sequence
  Description of Artificial Sequence: Synthetic oligonucleotide
ucugaggugagccccgugu

SEQ ID NO: 299043 - RNA, 19 nt, Artificial Sequence
  Description of Artificial Sequence: Synthetic oligonucleotide
aaccucuggaucucguugu

SEQ ID NO: 299044 - RNA, 19 nt, Artificial Sequence
  Description of Artificial Sequence: Synthetic oligonucleotide
ggaaccuggcccuaggagg

SEQ ID NO: 299045 - RNA, 19 nt, Artificial Sequence
  Description of Artificial Sequence: Synthetic oligonucleotide
uuugcgggcugccagggga

SEQ ID NO: 299046 - RNA, 19 nt, Artificial Sequence
  Description of Artificial Sequence: Synthetic oligonucleotide
cuuugguuguacaaacauc

SEQ ID NO: 299047 - RNA, 19 nt, Artificial Sequence
  Description of Artificial Sequence: Synthetic oligonucleotide
aauagccggaagaagggcu

SEQ ID NO: 299048 - RNA, 19 nt, Artificial Sequence
  Description of Artificial Sequence: Synthetic oligonucleotide
cucagcaugugugaggccc

SEQ ID NO: 299049 - RNA, 19 nt, Artificial Sequence
  Description of Artificial Sequence: Synthetic oligonucleotide
agcaagacacagcuccagg

SEQ ID NO: 299050 - RNA, 19 nt, Artificial Sequence
  Description of Artificial Sequence: Synthetic oligonucleotide
acagcgucaugucuucagg

SEQ ID NO: 299051 - RNA, 19 nt, Artificial Sequence
  Description of Artificial Sequence: Synthetic oligonucleotide
ggcucaagucuucuaaugg

SEQ ID NO: 299052 - RNA, 19 nt, Artificial Sequence
  Description of Artificial Sequence: Synthetic oligonucleotide
ugguaucgaagccaucaca

SEQ ID NO: 299053 - RNA, 19 nt, Artificial Sequence
  Description of Artificial Sequence: Synthetic oligonucleotide
uccuguugaucaucugggg

SEQ ID NO: 299054 - RNA, 19 nt, Artificial Sequence
  Description of Artificial Sequence: Synthetic oligonucleotide
ucgaagccaucacagacaa

SEQ ID NO: 299055 - RNA, 19 nt, Artificial Sequence
  Description of Artificial Sequence: Synthetic oligonucleotide
uucuagcuugaccaggaaa

SEQ ID NO: 299056 - RNA, 19 nt, Artificial Sequence
  Description of Artificial Sequence: Synthetic oligonucleotide
gcuuucgcaaguucaauag

SEQ ID NO: 299057 - RNA, 19 nt, Artificial Sequence
  Description of Artificial Sequence: Synthetic oligonucleotide
ugcgcaaccgcuccugaug

SEQ ID NO: 299058 - RNA, 19 nt, Artificial Sequence
  Description of Artificial Sequence: Synthetic oligonucleotide
uuuugccguucccggaagg

SEQ ID NO: 299059 - RNA, 19 nt, Artificial Sequence
  Description of Artificial Sequence: Synthetic oligonucleotide
cacgcagccguccaucucg

SEQ ID NO: 299060 - RNA, 19 nt, Artificial Sequence
  Description of Artificial Sequence: Synthetic oligonucleotide
cuuucgcaaguucaauagc

SEQ ID NO: 299061 - RNA, 19 nt, Artificial Sequence
  Description of Artificial Sequence: Synthetic oligonucleotide
guagacucaggcucccagg

SEQ ID NO: 299062 - RNA, 19 nt, Artificial Sequence
  Description of Artificial Sequence: Synthetic oligonucleotide
uuugacuggucaacucucu

SEQ ID NO: 299063 - RNA, 19 nt, Artificial Sequence
  Description of Artificial Sequence: Synthetic oligonucleotide
ggagggacugcucuggagg

SEQ ID NO: 299064 - RNA, 19 nt, Artificial Sequence
  Description of Artificial Sequence: Synthetic oligonucleotide
cuuccguaagucaucagca

SEQ ID NO: 299065 - RNA, 19 nt, Artificial Sequence
  Description of Artificial Sequence: Synthetic oligonucleotide
gaugccgguccccaacccg

SEQ ID NO: 299066 - RNA, 19 nt, Artificial Sequence
  Description of Artificial Sequence: Synthetic oligonucleotide
gagcaagagcuccucgagg

SEQ ID NO: 299067 - RNA, 19 nt, Artificial Sequence
  Description of Artificial Sequence: Synthetic oligonucleotide
aggaugccgguccccaacc

SEQ ID NO: 299068 - RNA, 19 nt, Artificial Sequence
  Description of Artificial Sequence: Synthetic oligonucleotide
cuugccacggccguccugg

SEQ ID NO: 299069 - RNA, 19 nt, Artificial Sequence
  Description of Artificial Sequence: Synthetic oligonucleotide
gcuggaaccuccugcaugg

SEQ ID NO: 299070 - RNA, 19 nt, Artificial Sequence
  Description of Artificial Sequence: Synthetic oligonucleotide
uuaagcagguucucccgga

SEQ ID NO: 299071 - RNA, 19 nt, Artificial Sequence
  Description of Artificial Sequence: Synthetic oligonucleotide
guagggcucaccuuggaga

SEQ ID NO: 299072 - RNA, 19 nt, Artificial Sequence
  Description of Artificial Sequence: Synthetic oligonucleotide
agagucuuugguuguacaa

SEQ ID NO: 299073 - RNA, 19 nt, Artificial Sequence
  Description of Artificial Sequence: Synthetic oligonucleotide
agcagucguagccccacac

SEQ ID NO: 299074 - RNA, 19 nt, Artificial Sequence
  Description of Artificial Sequence: Synthetic oligonucleotide
cuucuaaugguguggguga

SEQ ID NO: 299075 - RNA, 19 nt, Artificial Sequence
  Description of Artificial Sequence: Synthetic oligonucleotide
uacugccucuucucgaagc

SEQ ID NO: 299076 - RNA, 19 nt, Artificial Sequence
  Description of Artificial Sequence: Synthetic oligonucleotide
gaggugacgaagccagcag

SEQ ID NO: 299077 - RNA, 19 nt, Artificial Sequence
  Description of Artificial Sequence: Synthetic oligonucleotide
cuuuagcuguccucacagg

SEQ ID NO: 299078 - RNA, 19 nt, Artificial Sequence
  Description of Artificial Sequence: Synthetic oligonucleotide
cuugauguguggccucccg

SEQ ID NO: 299079 - RNA, 19 nt, Artificial Sequence
  Description of Artificial Sequence: Synthetic oligonucleotide
caucacuaguuacagucuc

SEQ ID NO: 299080 - RNA, 19 nt, Artificial Sequence
  Description of Artificial Sequence: Synthetic oligonucleotide
aagcaagacacagcuccag

SEQ ID NO: 299081 - RNA, 19 nt, Artificial Sequence
  Description of Artificial Sequence: Synthetic oligonucleotide
ugacgaagccagcaggcuc

SEQ ID NO: 299082 - RNA, 19 nt, Artificial Sequence
  Description of Artificial Sequence: Synthetic oligonucleotide
uagagucuuugguuguaca

SEQ ID NO: 299083 - RNA, 19 nt, Artificial Sequence
  Description of Artificial Sequence: Synthetic oligonucleotide
agggguuucccgcguggcc

SEQ ID NO: 299084 - RNA, 19 nt, Artificial Sequence
  Description of Artificial Sequence: Synthetic oligonucleotide
cagcgucaugucuucaggg

SEQ ID NO: 299085 - RNA, 19 nt, Artificial Sequence
  Description of Artificial Sequence: Synthetic oligonucleotide
ucugcaugcgcaaccgcuc

SEQ ID NO: 299086 - RNA, 19 nt, Artificial Sequence
  Description of Artificial Sequence: Synthetic oligonucleotide
ugaucaucuggggacuccc

SEQ ID NO: 299087 - RNA, 19 nt, Artificial Sequence
  Description of Artificial Sequence: Synthetic oligonucleotide
acccagagucucuguagac

SEQ ID NO: 299088 - RNA, 19 nt, Artificial Sequence
  Description of Artificial Sequence: Synthetic oligonucleotide
gaacuuuaugcucucgggu

SEQ ID NO: 299089 - RNA, 19 nt, Artificial Sequence
  Description of Artificial Sequence: Synthetic oligonucleotide
gucguagccccacacgcag

SEQ ID NO: 299090 - RNA, 19 nt, Artificial Sequence
  Description of Artificial Sequence: Synthetic oligonucleotide
uuagcuacuucaggaggca

SEQ ID NO: 299091 - RNA, 19 nt, Artificial Sequence
  Description of Artificial Sequence: Synthetic oligonucleotide
gguagaguuugacugguca

SEQ ID NO: 299092 - RNA, 19 nt, Artificial Sequence
  Description of Artificial Sequence: Synthetic oligonucleotide
aaccgcuccugauggcguc

SEQ ID NO: 299093 - RNA, 19 nt, Artificial Sequence
  Description of Artificial Sequence: Synthetic oligonucleotide
ucggguaucucaggaaugu

SEQ ID NO: 299094 - RNA, 19 nt, Artificial Sequence
  Description of Artificial Sequence: Synthetic oligonucleotide
cucgccacgagaucccggc

SEQ ID NO: 299095 - RNA, 19 nt, Artificial Sequence
  Description of Artificial Sequence: Synthetic oligonucleotide
uucacauuggcuggcaguu

SEQ ID NO: 299096 - RNA, 19 nt, Artificial Sequence
  Description of Artificial Sequence: Synthetic oligonucleotide
cacagcgucaugucuucag

SEQ ID NO: 299097 - RNA, 19 nt, Artificial Sequence
  Description of Artificial Sequence: Synthetic oligonucleotide
uuacugccucuucucgaag

SEQ ID NO: 299098 - RNA, 19 nt, Artificial Sequence
  Description of Artificial Sequence: Synthetic oligonucleotide
uguugaucaucuggggacu

SEQ ID NO: 299099 - RNA, 19 nt, Artificial Sequence
  Description of Artificial Sequence: Synthetic oligonucleotide
agaguuugacuggucaacu

SEQ ID NO: 299100 - RNA, 19 nt, Artificial Sequence
  Description of Artificial Sequence: Synthetic oligonucleotide
cuugcgggcuuccuccucc

SEQ ID NO: 299101 - RNA, 19 nt, Artificial Sequence
  Description of Artificial Sequence: Synthetic oligonucleotide
acgagaucccggcuacggg

SEQ ID NO: 299102 - RNA, 19 nt, Artificial Sequence
  Description of Artificial Sequence: Synthetic oligonucleotide
cagucucgccacgagaucc

SEQ ID NO: 299103 - RNA, 19 nt, Artificial Sequence
  Description of Artificial Sequence: Synthetic oligonucleotide
ucagcaugugugaggccca

SEQ ID NO: 299104 - RNA, 19 nt, Artificial Sequence
  Description of Artificial Sequence: Synthetic oligonucleotide
gaguuugacuggucaacuc

SEQ ID NO: 299105 - RNA, 19 nt, Artificial Sequence
  Description of Artificial Sequence: Synthetic oligonucleotide
aguuagucagaagccauaa

SEQ ID NO: 299106 - RNA, 19 nt, Artificial Sequence
  Description of Artificial Sequence: Synthetic oligonucleotide
aauagagucuuugguugua

SEQ ID NO: 299107 - RNA, 19 nt, Artificial Sequence
  Description of Artificial Sequence: Synthetic oligonucleotide
ucgcucuggggcaggaagc

SEQ ID NO: 299108 - RNA, 19 nt, Artificial Sequence
  Description of Artificial Sequence: Synthetic oligonucleotide
gugacgcaagcguccaggg

SEQ ID NO: 299109 - RNA, 19 nt, Artificial Sequence
  Description of Artificial Sequence: Synthetic oligonucleotide
agcuuucgcaaguucaaua

SEQ ID NO: 299110 - RNA, 19 nt, Artificial Sequence
  Description of Artificial Sequence: Synthetic oligonucleotide
acagucucgccacgagauc

SEQ ID NO: 299111 - RNA, 19 nt, Artificial Sequence
  Description of Artificial Sequence: Synthetic oligonucleotide
uuuaugcucucggguaucu

SEQ ID NO: 299112 - RNA, 19 nt, Artificial Sequence
  Description of Artificial Sequence: Synthetic oligonucleotide
gccuucgggacucaguucc

SEQ ID NO: 299113 - RNA, 19 nt, Artificial Sequence
  Description of Artificial Sequence: Synthetic oligonucleotide
guuagucagaagccauaac

SEQ ID NO: 299114 - RNA, 19 nt, Artificial Sequence
  Description of Artificial Sequence: Synthetic oligonucleotide
caucucguccggcagcccc

SEQ ID NO: 299115 - RNA, 19 nt, Artificial Sequence
  Description of Artificial Sequence: Synthetic oligonucleotide
cuuggcgccuccucggaug

SEQ ID NO: 299116 - RNA, 19 nt, Artificial Sequence
  Description of Artificial Sequence: Synthetic oligonucleotide
guagaguuugacuggucaa

SEQ ID NO: 299117 - RNA, 19 nt, Artificial Sequence
  Description of Artificial Sequence: Synthetic oligonucleotide
ucucgccacgagaucccgg

SEQ ID NO: 299118 - RNA, 19 nt, Artificial Sequence
  Description of Artificial Sequence: Synthetic oligonucleotide
acagaacuuuaugcucucg

SEQ ID NO: 299119 - RNA, 19 nt, Artificial Sequence
  Description of Artificial Sequence: Synthetic oligonucleotide
uuugccguucccggaagga

SEQ ID NO: 299120 - RNA, 19 nt, Artificial Sequence
  Description of Artificial Sequence: Synthetic oligonucleotide
uagcucgcgcagcugguug

SEQ ID NO: 299121 - RNA, 19 nt, Artificial Sequence
  Description of Artificial Sequence: Synthetic oligonucleotide
caauagccggaagaagggc

SEQ ID NO: 299122 - RNA, 19 nt, Artificial Sequence
  Description of Artificial Sequence: Synthetic oligonucleotide
cucggguaucucaggaaug

SEQ ID NO: 299123 - RNA, 19 nt, Artificial Sequence
  Description of Artificial Sequence: Synthetic oligonucleotide
caugugugaggcccagcag

SEQ ID NO: 299124 - RNA, 19 nt, Artificial Sequence
  Description of Artificial Sequence: Synthetic oligonucleotide
aucgaagccaucacagaca

SEQ ID NO: 299125 - RNA, 19 nt, Artificial Sequence
  Description of Artificial Sequence: Synthetic oligonucleotide
cacgagaucccggcuacgg

SEQ ID NO: 299126 - RNA, 19 nt, Artificial Sequence
  Description of Artificial Sequence: Synthetic oligonucleotide
cuuagguagcucgcgcagc

SEQ ID NO: 299127 - RNA, 19 nt, Artificial Sequence
  Description of Artificial Sequence: Synthetic oligonucleotide
agucucgccacgagauccc

SEQ ID NO: 299128 - RNA, 19 nt, Artificial Sequence
  Description of Artificial Sequence: Synthetic oligonucleotide
ugccucuagagcccgccgu

SEQ ID NO: 299129 - RNA, 19 nt, Artificial Sequence
  Description of Artificial Sequence: Synthetic oligonucleotide
guaucgaagccaucacaga

SEQ ID NO: 299130 - RNA, 19 nt, Artificial Sequence
  Description of Artificial Sequence: Synthetic oligonucleotide
ggugacgcaagcguccagg

SEQ ID NO: 299131 - RNA, 19 nt, Artificial Sequence
  Description of Artificial Sequence: Synthetic oligonucleotide
ggucacagggguuucccgc

SEQ ID NO: 299132 - RNA, 19 nt, Artificial Sequence
  Description of Artificial Sequence: Synthetic oligonucleotide
uggcccgacggcuacugca

SEQ ID NO: 299133 - RNA, 19 nt, Artificial Sequence
  Description of Artificial Sequence: Synthetic oligonucleotide
cugugugaagccauccgga

SEQ ID NO: 299134 - RNA, 19 nt, Artificial Sequence
  Description of Artificial Sequence: Synthetic oligonucleotide
guucccgaucaauggauga

SEQ ID NO: 299135 - RNA, 19 nt, Artificial Sequence
  Description of Artificial Sequence: Synthetic oligonucleotide
guuugacuggucaacucuc

SEQ ID NO: 299136 - RNA, 19 nt, Artificial Sequence
  Description of Artificial Sequence: Synthetic oligonucleotide
uggccucccgaacauccug

SEQ ID NO: 299137 - RNA, 19 nt, Artificial Sequence
  Description of Artificial Sequence: Synthetic oligonucleotide
cugguaucgaagccaucac

SEQ ID NO: 299138 - RNA, 19 nt, Artificial Sequence
  Description of Artificial Sequence: Synthetic oligonucleotide
gagauuuaagcagguucuc

SEQ ID NO: 299139 - RNA, 19 nt, Artificial Sequence
  Description of Artificial Sequence: Synthetic oligonucleotide
agggcuuagguagcucgcg

SEQ ID NO: 299140 - RNA, 19 nt, Artificial Sequence
  Description of Artificial Sequence: Synthetic oligonucleotide
cacccuaagucuggggagg

SEQ ID NO: 299141 - RNA, 19 nt, Artificial Sequence
  Description of Artificial Sequence: Synthetic oligonucleotide
ggcccuauaggccugcuuc

SEQ ID NO: 299142 - RNA, 19 nt, Artificial Sequence
  Description of Artificial Sequence: Synthetic oligonucleotide
acaucacuaguuacagucu

SEQ ID NO: 299143 - RNA, 19 nt, Artificial Sequence
  Description of Artificial Sequence: Synthetic oligonucleotide
caggguuaucaaguuggcc

SEQ ID NO: 299144 - RNA, 19 nt, Artificial Sequence
  Description of Artificial Sequence: Synthetic oligonucleotide
cgcagggagagauuuaagc

SEQ ID NO: 299145 - RNA, 19 nt, Artificial Sequence
  Description of Artificial Sequence: Synthetic oligonucleotide
cugcaugcgcaaccgcucc

SEQ ID NO: 299146 - RNA, 19 nt, Artificial Sequence
  Description of Artificial Sequence: Synthetic oligonucleotide
uucccgaucaauggaugaa

SEQ ID NO: 299147 - RNA, 19 nt, Artificial Sequence
  Description of Artificial Sequence: Synthetic oligonucleotide
caggaaugucauuucggga

SEQ ID NO: 299148 - RNA, 19 nt, Artificial Sequence
  Description of Artificial Sequence: Synthetic oligonucleotide
gacucccugucugagguga

SEQ ID NO: 299149 - RNA, 19 nt, Artificial Sequence
  Description of Artificial Sequence: Synthetic oligonucleotide
aguuacagucucgccacga

SEQ ID NO: 299150 - RNA, 19 nt, Artificial Sequence
  Description of Artificial Sequence: Synthetic oligonucleotide
gcuuagguagcucgcgcag

SEQ ID NO: 299151 - RNA, 19 nt, Artificial Sequence
  Description of Artificial Sequence: Synthetic oligonucleotide
aacccgaaggccacagcga

SEQ ID NO: 299152 - RNA, 19 nt, Artificial Sequence
  Description of Artificial Sequence: Synthetic oligonucleotide
gcaccuaccagggacacac

SEQ ID NO: 299153 - RNA, 19 nt, Artificial Sequence
  Description of Artificial Sequence: Synthetic oligonucleotide
ugcaugaaguuagcuacuu

SEQ ID NO: 299154 - RNA, 19 nt, Artificial Sequence
  Description of Artificial Sequence: Synthetic oligonucleotide
augucauuucgggacacau

SEQ ID NO: 299155 - RNA, 19 nt, Artificial Sequence
  Description of Artificial Sequence: Synthetic oligonucleotide
ugguuggcgucgagcaaga

SEQ ID NO: 299156 - RNA, 19 nt, Artificial Sequence
  Description of Artificial Sequence: Synthetic oligonucleotide
gacgcagggagagauuuaa

SEQ ID NO: 299157 - RNA, 19 nt, Artificial Sequence
  Description of Artificial Sequence: Synthetic oligonucleotide
auaacuccugaggggucuc

SEQ ID NO: 299158 - RNA, 19 nt, Artificial Sequence
  Description of Artificial Sequence: Synthetic oligonucleotide
cuucgggacucaguucccg

SEQ ID NO: 299159 - RNA, 19 nt, Artificial Sequence
  Description of Artificial Sequence: Synthetic oligonucleotide
gcgucaugucuucagggcc

SEQ ID NO: 299160 - RNA, 19 nt, Artificial Sequence
  Description of Artificial Sequence: Synthetic oligonucleotide
ucccuccgcacaagcaaga

SEQ ID NO: 299161 - RNA, 19 nt, Artificial Sequence
  Description of Artificial Sequence: Synthetic oligonucleotide
aguucccgaucaauggaug

SEQ ID NO: 299162 - RNA, 19 nt, Artificial Sequence
  Description of Artificial Sequence: Synthetic oligonucleotide
ggcaccgcugcaaaggccc

SEQ ID NO: 299163 - RNA, 19 nt, Artificial Sequence
  Description of Artificial Sequence: Synthetic oligonucleotide
gucggggagccccuuggcc

SEQ ID NO: 299164 - RNA, 19 nt, Artificial Sequence
  Description of Artificial Sequence: Synthetic oligonucleotide
agacaagcacagugagggu

SEQ ID NO: 299165 - RNA, 19 nt, Artificial Sequence
  Description of Artificial Sequence: Synthetic oligonucleotide
gcgcaaccgcuccugaugg

SEQ ID NO: 299166 - RNA, 19 nt, Artificial Sequence
  Description of Artificial Sequence: Synthetic oligonucleotide
accccggcguccuggccgc

SEQ ID NO: 299167 - RNA, 19 nt, Artificial Sequence
  Description of Artificial Sequence: Synthetic oligonucleotide
ucguagccccacacgcagc

SEQ ID NO: 299168 - RNA, 19 nt, Artificial Sequence
  Description of Artificial Sequence: Synthetic oligonucleotide
gacuccgacccagagucuc

SEQ ID NO: 299169 - RNA, 19 nt, Artificial Sequence
  Description of Artificial Sequence: Synthetic oligonucleotide
agacuuggguaagggaggu

SEQ ID NO: 299170 - RNA, 19 nt, Artificial Sequence
  Description of Artificial Sequence: Synthetic oligonucleotide
gacuguagcgguagaucuc

SEQ ID NO: 299171 - RNA, 19 nt, Artificial Sequence
  Description of Artificial Sequence: Synthetic oligonucleotide
cugaggugagccccguguc

SEQ ID NO: 299172 - RNA, 19 nt, Artificial Sequence
  Description of Artificial Sequence: Synthetic oligonucleotide
uggggacucccugucugag

SEQ ID NO: 299173 - RNA, 19 nt, Artificial Sequence
  Description of Artificial Sequence: Synthetic oligonucleotide
agagccuuacagaacuuua

SEQ ID NO: 299174 - RNA, 19 nt, Artificial Sequence
  Description of Artificial Sequence: Synthetic oligonucleotide
uccugaggggucucuuaaa

SEQ ID NO: 299175 - RNA, 19 nt, Artificial Sequence
  Description of Artificial Sequence: Synthetic oligonucleotide
ucacagggguuucccgcgu

SEQ ID NO: 299176 - RNA, 19 nt, Artificial Sequence
  Description of Artificial Sequence: Synthetic oligonucleotide
ggguaucucaggaauguca

SEQ ID NO: 299177 - RNA, 19 nt, Artificial Sequence
  Description of Artificial Sequence: Synthetic oligonucleotide
cgagaucccggcuacgggg

SEQ ID NO: 299178 - RNA, 19 nt, Artificial Sequence
  Description of Artificial Sequence: Synthetic oligonucleotide
uugccguucccggaaggac

SEQ ID NO: 299179 - RNA, 19 nt, Artificial Sequence
  Description of Artificial Sequence: Synthetic oligonucleotide
guuccgguggccaaggccu

SEQ ID NO: 299180 - RNA, 19 nt, Artificial Sequence
  Description of Artificial Sequence: Synthetic oligonucleotide
uggugacgcaagcguccag

SEQ ID NO: 299181 - RNA, 19 nt, Artificial Sequence
  Description of Artificial Sequence: Synthetic oligonucleotide
gguuaucaaguuggccagg

SEQ ID NO: 299182 - RNA, 19 nt, Artificial Sequence
  Description of Artificial Sequence: Synthetic oligonucleotide
ugcgacuguagcgguagau

SEQ ID NO: 299183 - RNA, 19 nt, Artificial Sequence
  Description of Artificial Sequence: Synthetic oligonucleotide
cuagcuugaccaggaaaga

SEQ ID NO: 299184 - RNA, 19 nt, Artificial Sequence
  Description of Artificial Sequence: Synthetic oligonucleotide
gagaugguuccaaacuccu

SEQ ID NO: 299185 - RNA, 19 nt, Artificial Sequence
  Description of Artificial Sequence: Synthetic oligonucleotide
gucccuccgcacaagcaag

SEQ ID NO: 299186 - RNA, 19 nt, Artificial Sequence
  Description of Artificial Sequence: Synthetic oligonucleotide
gccuucugaagaguucccg

SEQ ID NO: 299187 - RNA, 19 nt, Artificial Sequence
  Description of Artificial Sequence: Synthetic oligonucleotide
ggcaguuagucagaagcca

SEQ ID NO: 299188 - RNA, 19 nt, Artificial Sequence
  Description of Artificial Sequence: Synthetic oligonucleotide
guuaucaaguuggccaggu

SEQ ID NO: 299189 - RNA, 19 nt, Artificial Sequence
  Description of Artificial Sequence: Synthetic oligonucleotide
ucacugcuaggaugccggu

SEQ ID NO: 299190 - RNA, 19 nt, Artificial Sequence
  Description of Artificial Sequence: Synthetic oligonucleotide
ugacugccucuugaugugu

SEQ ID NO: 299191 - RNA, 19 nt, Artificial Sequence
  Description of Artificial Sequence: Synthetic oligonucleotide
gcaagcguccaggggaggg

SEQ ID NO: 299192 - RNA, 19 nt, Artificial Sequence
  Description of Artificial Sequence: Synthetic oligonucleotide
ggcccuuggcgccuccucg

SEQ ID NO: 299193 - RNA, 19 nt, Artificial Sequence
  Description of Artificial Sequence: Synthetic oligonucleotide
gaggcaaccucuggaucuc

SEQ ID NO: 299194 - RNA, 19 nt, Artificial Sequence
  Description of Artificial Sequence: Synthetic oligonucleotide
cugcuaggaugccgguccc

SEQ ID NO: 299195 - RNA, 19 nt, Artificial Sequence
  Description of Artificial Sequence: Synthetic oligonucleotide
ggcuuagguagcucgcgca

SEQ ID NO: 299196 - RNA, 19 nt, Artificial Sequence
  Description of Artificial Sequence: Synthetic oligonucleotide
ccaggguuaucaaguuggc

SEQ ID NO: 299197 - RNA, 19 nt, Artificial Sequence
  Description of Artificial Sequence: Synthetic oligonucleotide
uccucgaggcugcgacugu

SEQ ID NO: 299198 - RNA, 19 nt, Artificial Sequence
  Description of Artificial Sequence: Synthetic oligonucleotide
auagccggaagaagggcuu

SEQ ID NO: 299199 - RNA, 19 nt, Artificial Sequence
  Description of Artificial Sequence: Synthetic oligonucleotide
uccgacccagagucucugu

SEQ ID NO: 299200 - RNA, 19 nt, Artificial Sequence
  Description of Artificial Sequence: Synthetic oligonucleotide
ccgguccccaacccgaagg

SEQ ID NO: 299201 - RNA, 19 nt, Artificial Sequence
  Description of Artificial Sequence: Synthetic oligonucleotide
gggcuuagguagcucgcgc

SEQ ID NO: 299202 - RNA, 19 nt, Artificial Sequence
  Description of Artificial Sequence: Synthetic oligonucleotide
ccgaacauccugcccauuc

SEQ ID NO: 299203 - RNA, 19 nt, Artificial Sequence
  Description of Artificial Sequence: Synthetic oligonucleotide
ucguccggcagccccugua

SEQ ID NO: 299204 - RNA, 19 nt, Artificial Sequence
  Description of Artificial Sequence: Synthetic oligonucleotide
ggccagguugcccacaucu

SEQ ID NO: 299205 - RNA, 19 nt, Artificial Sequence
  Description of Artificial Sequence: Synthetic oligonucleotide
uaacuccugaggggucucu

SEQ ID NO: 299206 - RNA, 19 nt, Artificial Sequence
  Description of Artificial Sequence: Synthetic oligonucleotide
acgcaagcguccaggggag

SEQ ID NO: 299207 - RNA, 19 nt, Artificial Sequence
  Description of Artificial Sequence: Synthetic oligonucleotide
cagugcccgcuucucugcc

SEQ ID NO: 299208 - RNA, 19 nt, Artificial Sequence
  Description of Artificial Sequence: Synthetic oligonucleotide
cauggcccgacggcuacug

SEQ ID NO: 299209 - RNA, 19 nt, Artificial Sequence
  Description of Artificial Sequence: Synthetic oligonucleotide
uagguagcucgcgcagcug

SEQ ID NO: 299210 - RNA, 19 nt, Artificial Sequence
  Description of Artificial Sequence: Synthetic oligonucleotide
agccccuguagggcucacc

SEQ ID NO: 299211 - RNA, 19 nt, Artificial Sequence
  Description of Artificial Sequence: Synthetic oligonucleotide
gucucgccacgagaucccg

SEQ ID NO: 299212 - RNA, 19 nt, Artificial Sequence
  Description of Artificial Sequence: Synthetic oligonucleotide
ucgccacgagaucccggcu

SEQ ID NO: 299213 - RNA, 19 nt, Artificial Sequence
  Description of Artificial Sequence: Synthetic oligonucleotide
cuggccgcauggcccgacg

SEQ ID NO: 299214 - RNA, 19 nt, Artificial Sequence
  Description of Artificial Sequence: Synthetic oligonucleotide
ccauccggaagccuggaca

SEQ ID NO: 299215 - RNA, 19 nt, Artificial Sequence
  Description of Artificial Sequence: Synthetic oligonucleotide
ugcugguaucgaagccauc

SEQ ID NO: 299216 - RNA, 19 nt, Artificial Sequence
  Description of Artificial Sequence: Synthetic oligonucleotide
gcucucggguaucucagga

SEQ ID NO: 299217 - RNA, 19 nt, Artificial Sequence
  Description of Artificial Sequence: Synthetic oligonucleotide
augcgcaaccgcuccugau

SEQ ID NO: 299218 - RNA, 19 nt, Artificial Sequence
  Description of Artificial Sequence: Synthetic oligonucleotide
caaucuccagagccuuaca

SEQ ID NO: 299219 - RNA, 19 nt, Artificial Sequence
  Description of Artificial Sequence: Synthetic oligonucleotide
acgcagggagagauuuaag

SEQ ID NO: 299220 - RNA, 19 nt, Artificial Sequence
  Description of Artificial Sequence: Synthetic oligonucleotide
cgagcaagagcuccucgag

SEQ ID NO: 299221 - RNA, 19 nt, Artificial Sequence
  Description of Artificial Sequence: Synthetic oligonucleotide
gcuguuccgguggccaagg

SEQ ID NO: 299222 - RNA, 19 nt, Artificial Sequence
  Description of Artificial Sequence: Synthetic oligonucleotide
uggcccuuggcgccuccuc

SEQ ID NO: 299223 - RNA, 19 nt, Artificial Sequence
  Description of Artificial Sequence: Synthetic oligonucleotide
cgucgcucagcuuuagcug

SEQ ID NO: 299224 - RNA, 19 nt, Artificial Sequence
  Description of Artificial Sequence: Synthetic oligonucleotide
cauaacuccugaggggucu

SEQ ID NO: 299225 - RNA, 19 nt, Artificial Sequence
  Description of Artificial Sequence: Synthetic oligonucleotide
aggcugcgcagcuguguga

SEQ ID NO: 299226 - RNA, 19 nt, Artificial Sequence
  Description of Artificial Sequence: Synthetic oligonucleotide
gggucucagucaucuuccc

SEQ ID NO: 299227 - RNA, 19 nt, Artificial Sequence
  Description of Artificial Sequence: Synthetic oligonucleotide
gccacgagaucccggcuac

SEQ ID NO: 299228 - RNA, 19 nt, Artificial Sequence
  Description of Artificial Sequence: Synthetic oligonucleotide
cacugcuaggaugccgguc

SEQ ID NO: 299229 - RNA, 19 nt, Artificial Sequence
  Description of Artificial Sequence: Synthetic oligonucleotide
cuguuccgguggccaaggc

SEQ ID NO: 299230 - RNA, 19 nt, Artificial Sequence
  Description of Artificial Sequence: Synthetic oligonucleotide
cgacccagagucucuguag

SEQ ID NO: 299231 - RNA, 19 nt, Artificial Sequence
  Description of Artificial Sequence: Synthetic oligonucleotide
gcccuuggcgccuccucgg

SEQ ID NO: 299232 - RNA, 19 nt, Artificial Sequence
  Description of Artificial Sequence: Synthetic oligonucleotide
gcgucgcucagcuuuagcu

SEQ ID NO: 299233 - RNA, 19 nt, Artificial Sequence
  Description of Artificial Sequence: Synthetic oligonucleotide
gcgguagaucuccuccggc

SEQ ID NO: 299234 - RNA, 19 nt, Artificial Sequence
  Description of Artificial Sequence: Synthetic oligonucleotide
gucugaggugagccccgug

SEQ ID NO: 299235 - RNA, 19 nt, Artificial Sequence
  Description of Artificial Sequence: Synthetic oligonucleotide
acccuaagucuggggagga

SEQ ID NO: 299236 - RNA, 19 nt, Artificial Sequence
  Description of Artificial Sequence: Synthetic oligonucleotide
gcgacuguagcgguagauc

SEQ ID NO: 299237 - RNA, 19 nt, Artificial Sequence
  Description of Artificial Sequence: Synthetic oligonucleotide
ggaugccgguccccaaccc

SEQ ID NO: 299238 - RNA, 19 nt, Artificial Sequence
  Description of Artificial Sequence: Synthetic oligonucleotide
cugaggggucucuuaaaau

SEQ ID NO: 299239 - RNA, 19 nt, Artificial Sequence
  Description of Artificial Sequence: Synthetic oligonucleotide
gccggaagaagggcuuagg

SEQ ID NO: 299240 - RNA, 19 nt, Artificial Sequence
  Description of Artificial Sequence: Synthetic oligonucleotide
aaggcccuauaggccugcu

SEQ ID NO: 299241 - RNA, 19 nt, Artificial Sequence
  Description of Artificial Sequence: Synthetic oligonucleotide
caugcgcaaccgcuccuga

SEQ ID NO: 299242 - RNA, 19 nt, Artificial Sequence
  Description of Artificial Sequence: Synthetic oligonucleotide
uggcgucgagcaagagcuc

SEQ ID NO: 299243 - RNA, 19 nt, Artificial Sequence
  Description of Artificial Sequence: Synthetic oligonucleotide
uucccgcguggcccuuggc

SEQ ID NO: 299244 - RNA, 19 nt, Artificial Sequence
  Description of Artificial Sequence: Synthetic oligonucleotide
aggcuguuccgguggccaa

SEQ ID NO: 299245 - RNA, 19 nt, Artificial Sequence
  Description of Artificial Sequence: Synthetic oligonucleotide
agcccgccguucugcagga

SEQ ID NO: 299246 - RNA, 19 nt, Artificial Sequence
  Description of Artificial Sequence: Synthetic oligonucleotide
ccgccguucugcaggagac

SEQ ID NO: 299247 - RNA, 19 nt, Artificial Sequence
  Description of Artificial Sequence: Synthetic oligonucleotide
gcguccuggccgcauggcc

SEQ ID NO: 299248 - RNA, 19 nt, Artificial Sequence
  Description of Artificial Sequence: Synthetic oligonucleotide
gcccuauaggccugcuuca

SEQ ID NO: 299249 - RNA, 19 nt, Artificial Sequence
  Description of Artificial Sequence: Synthetic oligonucleotide
caagcguccaggggaggga

SEQ ID NO: 299250 - RNA, 19 nt, Artificial Sequence
  Description of Artificial Sequence: Synthetic oligonucleotide
ccauaacuccugagggguc

SEQ ID NO: 299251 - RNA, 19 nt, Artificial Sequence
  Description of Artificial Sequence: Synthetic oligonucleotide
cccgacggcuacugcacag

SEQ ID NO: 299252 - RNA, 19 nt, Artificial Sequence
  Description of Artificial Sequence: Synthetic oligonucleotide
cuguagggcucaccuugga

SEQ ID NO: 299253 - RNA, 19 nt, Artificial Sequence
  Description of Artificial Sequence: Synthetic oligonucleotide
ggcgucgcucagcuuuagc

SEQ ID NO: 299254 - RNA, 19 nt, Artificial Sequence
  Description of Artificial Sequence: Synthetic oligonucleotide
ggucggggagccccuuggc

SEQ ID NO: 299255 - RNA, 19 nt, Artificial Sequence
  Description of Artificial Sequence: Synthetic oligonucleotide
uggcgucgcucagcuuuag

SEQ ID NO: 299256 - RNA, 19 nt, Artificial Sequence
  Description of Artificial Sequence: Synthetic oligonucleotide
ugcuaacaccaaggcuaaa

SEQ ID NO: 299257 - RNA, 19 nt, Artificial Sequence
  Description of Artificial Sequence: Synthetic oligonucleotide
ccagaccccggcguccugg

SEQ ID NO: 299258 - RNA, 19 nt, Artificial Sequence
  Description of Artificial Sequence: Synthetic oligonucleotide
ggguaagggaggugacgaa

SEQ ID NO: 299259 - RNA, 19 nt, Artificial Sequence
  Description of Artificial Sequence: Synthetic oligonucleotide
ggcccgacggcuacugcac

SEQ ID NO: 299260 - RNA, 19 nt, Artificial Sequence
  Description of Artificial Sequence: Synthetic oligonucleotide
cacacgcagccguccaucu

SEQ ID NO: 299261 - RNA, 19 nt, Artificial Sequence
  Description of Artificial Sequence: Synthetic oligonucleotide
ggccuucgggacucaguuc

SEQ ID NO: 299262 - RNA, 19 nt, Artificial Sequence
  Description of Artificial Sequence: Synthetic oligonucleotide
cgaacauccugcccauuca

SEQ ID NO: 299263 - RNA, 19 nt, Artificial Sequence
  Description of Artificial Sequence: Synthetic oligonucleotide
gcugcgcagcugugugaag

SEQ ID NO: 299264 - RNA, 19 nt, Artificial Sequence
  Description of Artificial Sequence: Synthetic oligonucleotide
agccauccggaagccugga

SEQ ID NO: 299265 - RNA, 19 nt, Artificial Sequence
  Description of Artificial Sequence: Synthetic oligonucleotide
cgacuguagcgguagaucu

SEQ ID NO: 299266 - RNA, 19 nt, Artificial Sequence
  Description of Artificial Sequence: Synthetic oligonucleotide
ccgacggcuacugcacagc

SEQ ID NO: 299267 - RNA, 19 nt, Artificial Sequence
  Description of Artificial Sequence: Synthetic oligonucleotide
ccuccgcacaagcaagaca

SEQ ID NO: 299268 - RNA, 19 nt, Artificial Sequence
  Description of Artificial Sequence: Synthetic oligonucleotide
gcaguuagucagaagccau

SEQ ID NO: 299269 - RNA, 19 nt, Artificial Sequence
  Description of Artificial Sequence: Synthetic oligonucleotide
ggcugcgcagcugugugaa

SEQ ID NO: 299270 - RNA, 19 nt, Artificial Sequence
  Description of Artificial Sequence: Synthetic oligonucleotide
acggccguccugggacuug

SEQ ID NO: 299271 - RNA, 19 nt, Artificial Sequence
  Description of Artificial Sequence: Synthetic oligonucleotide
cguccggcagccccuguag

SEQ ID NO: 299272 - RNA, 19 nt, Artificial Sequence
  Description of Artificial Sequence: Synthetic oligonucleotide
cgguccccaacccgaaggc

SEQ ID NO: 299273 - RNA, 19 nt, Artificial Sequence
  Description of Artificial Sequence: Synthetic oligonucleotide
auggcgucgcucagcuuua

SEQ ID NO: 299274 - RNA, 19 nt, Artificial Sequence
  Description of Artificial Sequence: Synthetic oligonucleotide
gccauccggaagccuggac

SEQ ID NO: 299275 - RNA, 19 nt, Artificial Sequence
  Description of Artificial Sequence: Synthetic oligonucleotide
cucccggaguuccaggguu

SEQ ID NO: 299276 - RNA, 19 nt, Artificial Sequence
  Description of Artificial Sequence: Synthetic oligonucleotide
gcugguuggcgucgagcaa

SEQ ID NO: 299277 - RNA, 19 nt, Artificial Sequence
  Description of Artificial Sequence: Synthetic oligonucleotide
gggcacugacugccucuug

SEQ ID NO: 299278 - RNA, 19 nt, Artificial Sequence
  Description of Artificial Sequence: Synthetic oligonucleotide
acgcagccguccaucucgu

SEQ ID NO: 299279 - RNA, 19 nt, Artificial Sequence
  Description of Artificial Sequence: Synthetic oligonucleotide
cagcagucguagccccaca

SEQ ID NO: 299280 - RNA, 19 nt, Artificial Sequence
  Description of Artificial Sequence: Synthetic oligonucleotide
cccgccguucugcaggaga

SEQ ID NO: 299281 - RNA, 19 nt, Artificial Sequence
  Description of Artificial Sequence: Synthetic oligonucleotide
cugcgacuguagcgguaga

SEQ ID NO: 299282 - RNA, 19 nt, Artificial Sequence
  Description of Artificial Sequence: Synthetic oligonucleotide
cccuccgcacaagcaagac

SEQ ID NO: 299283 - RNA, 19 nt, Artificial Sequence
  Description of Artificial Sequence: Synthetic oligonucleotide
ccacgagaucccggcuacg

SEQ ID NO: 299284 - RNA, 19 nt, Artificial Sequence
  Description of Artificial Sequence: Synthetic oligonucleotide
ggacugggagaugguucca

SEQ ID NO: 299285 - RNA, 19 nt, Artificial Sequence
  Description of Artificial Sequence: Synthetic oligonucleotide
ggcuacugcacagcgucau

SEQ ID NO: 299286 - RNA, 19 nt, Artificial Sequence
  Description of Artificial Sequence: Synthetic oligonucleotide
cagcuuucgcaaguucaau

SEQ ID NO: 299287 - RNA, 19 nt, Artificial Sequence
  Description of Artificial Sequence: Synthetic oligonucleotide
gcccauucacugcuaggau

SEQ ID NO: 299288 - RNA, 19 nt, Artificial Sequence
  Description of Artificial Sequence: Synthetic oligonucleotide
cgcaaccgcuccugauggc

SEQ ID NO: 299289 - RNA, 19 nt, Artificial Sequence
  Description of Artificial Sequence: Synthetic oligonucleotide
cgagcagccagcuguucua

SEQ ID NO: 299290 - RNA, 19 nt, Artificial Sequence
  Description of Artificial Sequence: Synthetic oligonucleotide
gcccacaucuccaggcagu

SEQ ID NO: 299291 - RNA, 19 nt, Artificial Sequence
  Description of Artificial Sequence: Synthetic oligonucleotide
gcccgacggcuacugcaca

SEQ ID NO: 299292 - RNA, 19 nt, Artificial Sequence
  Description of Artificial Sequence: Synthetic oligonucleotide
ggacgcagggagagauuua

SEQ ID NO: 299293 - RNA, 19 nt, Artificial Sequence
  Description of Artificial Sequence: Synthetic oligonucleotide
cggguaucucaggaauguc

SEQ ID NO: 299294 - RNA, 19 nt, Artificial Sequence
  Description of Artificial Sequence: Synthetic oligonucleotide
ccaucucguccggcagccc

SEQ ID NO: 299295 - RNA, 19 nt, Artificial Sequence
  Description of Artificial Sequence: Synthetic oligonucleotide
caccgcugcaaaggcccua

SEQ ID NO: 299296 - RNA, 19 nt, Artificial Sequence
  Description of Artificial Sequence: Synthetic oligonucleotide
cccuuggcgccuccucgga

SEQ ID NO: 299297 - RNA, 19 nt, Artificial Sequence
  Description of Artificial Sequence: Synthetic oligonucleotide
cgccacgagaucccggcua

SEQ ID NO: 299298 - RNA, 19 nt, Artificial Sequence
  Description of Artificial Sequence: Synthetic oligonucleotide
cggcuacugcacagcguca

SEQ ID NO: 299299 - RNA, 19 nt, Artificial Sequence
  Description of Artificial Sequence: Synthetic oligonucleotide
ccucgaggcugcgacugua

SEQ ID NO: 299300 - RNA, 19 nt, Artificial Sequence
  Description of Artificial Sequence: Synthetic oligonucleotide
cccuaagucuggggaggaa

SEQ ID NO: 299301 - RNA, 19 nt, Artificial Sequence
  Description of Artificial Sequence: Synthetic oligonucleotide
gcccgccguucugcaggag

SEQ ID NO: 299302 - RNA, 19 nt, Artificial Sequence
  Description of Artificial Sequence: Synthetic oligonucleotide
gcaccgcugcaaaggcccu

SEQ ID NO: 299303 - RNA, 19 nt, Artificial Sequence
  Description of Artificial Sequence: Synthetic oligonucleotide
ccacggccguccugggacu

SEQ ID NO: 299304 - RNA, 19 nt, Artificial Sequence
  Description of Artificial Sequence: Synthetic oligonucleotide
cacggccguccugggacuu

SEQ ID NO: 299305 - RNA, 19 nt, Artificial Sequence
  Description of Artificial Sequence: Synthetic oligonucleotide
cccggaguuccaggguuau

SEQ ID NO: 299306 - RNA, 19 nt, Artificial Sequence
  Description of Artificial Sequence: Synthetic oligonucleotide
cccgccacagugcccgcuu

SEQ ID NO: 299307 - RNA, 19 nt, Artificial Sequence
  Description of Artificial Sequence: Synthetic oligonucleotide
ccgcugcaaaggcccuaua

SEQ ID NO: 299308 - RNA, 19 nt, Artificial Sequence
  Description of Artificial Sequence: Synthetic oligonucleotide
gcccgccacagugcccgcu

SEQ ID NO: 299309 - RNA, 19 nt, Artificial Sequence
  Description of Artificial Sequence: Synthetic oligonucleotide
gguuucccgcguggcccuu

SEQ ID NO: 299310 - RNA, 19 nt, Artificial Sequence
  Description of Artificial Sequence: Synthetic oligonucleotide
ccguucccggaaggacagu

SEQ ID NO: 299311 - RNA, 19 nt, Artificial Sequence
  Description of Artificial Sequence: Synthetic oligonucleotide
cccgaacauccugcccauu

SEQ ID NO: 299312 - RNA, 19 nt, Artificial Sequence
  Description of Artificial Sequence: Synthetic oligonucleotide
aaauuguacagugauggcc

SEQ ID NO: 299313 - RNA, 19 nt, Artificial Sequence
  Description of Artificial Sequence: Synthetic oligonucleotide
aaaucaggaaccucuccgc

SEQ ID NO: 299314 - RNA, 19 nt, Artificial Sequence
  Description of Artificial Sequence: Synthetic oligonucleotide
uuuaaagcuagggacaggg

SEQ ID NO: 299315 - RNA, 19 nt, Artificial Sequence
  Description of Artificial Sequence: Synthetic oligonucleotide
cuaaguguaaacagggagg

SEQ ID NO: 299316 - RNA, 19 nt, Artificial Sequence
  Description of Artificial Sequence: Synthetic oligonucleotide
aguguaaacagggaggccc

SEQ ID NO: 299317 - RNA, 19 nt, Artificial Sequence
  Description of Artificial Sequence: Synthetic oligonucleotide
acagcugucguucauguuc

SEQ ID NO: 299318 - RNA, 19 nt, Artificial Sequence
  Description of Artificial Sequence: Synthetic oligonucleotide
uuuagcaucagauuaucaa

SEQ ID NO: 299319 - RNA, 19 nt, Artificial Sequence
  Description of Artificial Sequence: Synthetic oligonucleotide
cugagaacaauguacagac

SEQ ID NO: 299320 - RNA, 19 nt, Artificial Sequence
  Description of Artificial Sequence: Synthetic oligonucleotide
cacacauacacacacacac

SEQ ID NO: 299321 - RNA, 19 nt, Artificial Sequence
  Description of Artificial Sequence: Synthetic oligonucleotide
aagcgggucaguuucuugg

SEQ ID NO: 299322 - RNA, 19 nt, Artificial Sequence
  Description of Artificial Sequence: Synthetic oligonucleotide
auacacguaaacaucaggg

SEQ ID NO: 299323 - RNA, 19 nt, Artificial Sequence
  Description of Artificial Sequence: Synthetic oligonucleotide
gguuauggcacauaugggg

SEQ ID NO: 299324 - RNA, 19 nt, Artificial Sequence
  Description of Artificial Sequence: Synthetic oligonucleotide
acuaaauguggggagaaac

SEQ ID NO: 299325 - RNA, 19 nt, Artificial Sequence
  Description of Artificial Sequence: Synthetic oligonucleotide
uuaucaaagaucaccuccu

SEQ ID NO: 299326 - RNA, 19 nt, Artificial Sequence
  Description of Artificial Sequence: Synthetic oligonucleotide
uacacacacacacacacac

SEQ ID NO: 299327 - RNA, 19 nt, Artificial Sequence
  Description of Artificial Sequence: Synthetic oligonucleotide
aucagauuaucaaagauca

SEQ ID NO: 299328 - RNA, 19 nt, Artificial Sequence
  Description of Artificial Sequence: Synthetic oligonucleotide
cauacacacacacacacac

SEQ ID NO: 299329 - RNA, 19 nt, Artificial Sequence
  Description of Artificial Sequence: Synthetic oligonucleotide
cuccgcaucaggaagaaag

SEQ ID NO: 299330 - RNA, 19 nt, Artificial Sequence
  Description of Artificial Sequence: Synthetic oligonucleotide
caucagauuaucaaagauc

SEQ ID NO: 299331 - RNA, 19 nt, Artificial Sequence
  Description of Artificial Sequence: Synthetic oligonucleotide
uacacacauacacacacac

SEQ ID NO: 299332 - RNA, 19 nt, Artificial Sequence
  Description of Artificial Sequence: Synthetic oligonucleotide
uuagcaucagauuaucaaa

SEQ ID NO: 299333 - RNA, 19 nt, Artificial Sequence
  Description of Artificial Sequence: Synthetic oligonucleotide
acgguuuagaucacaaugc

SEQ ID NO: 299334 - RNA, 19 nt, Artificial Sequence
  Description of Artificial Sequence: Synthetic oligonucleotide
uggacguguaauccgaacc

SEQ ID NO: 299335 - RNA, 19 nt, Artificial Sequence
  Description of Artificial Sequence: Synthetic oligonucleotide
aacucggcggguuuggcag

SEQ ID NO: 299336 - RNA, 19 nt, Artificial Sequence
  Description of Artificial Sequence: Synthetic oligonucleotide
aauguggggagaaacacca

SEQ ID NO: 299337 - RNA, 19 nt, Artificial Sequence
  Description of Artificial Sequence: Synthetic oligonucleotide
uuuagaucacaaugccagg

SEQ ID NO: 299338 - RNA, 19 nt, Artificial Sequence
  Description of Artificial Sequence: Synthetic oligonucleotide
cacgguuuagaucacaaug

SEQ ID NO: 299339 - RNA, 19 nt, Artificial Sequence
  Description of Artificial Sequence: Synthetic oligonucleotide
uauuguaggcuuacggcug

SEQ ID NO: 299340 - RNA, 19 nt, Artificial Sequence
  Description of Artificial Sequence: Synthetic oligonucleotide
gauagguucuguucaggag

SEQ ID NO: 299341 - RNA, 19 nt, Artificial Sequence
  Description of Artificial Sequence: Synthetic oligonucleotide
uuaaaucaggaaccucucc

SEQ ID NO: 299342 - RNA, 19 nt, Artificial Sequence
  Description of Artificial Sequence: Synthetic oligonucleotide
guugauucuggccucuagg

SEQ ID NO: 299343 - RNA, 19 nt, Artificial Sequence
  Description of Artificial Sequence: Synthetic oligonucleotide
gucagcuaaguguaaacag

SEQ ID NO: 299344 - RNA, 19 nt, Artificial Sequence
  Description of Artificial Sequence: Synthetic oligonucleotide
ugggacaguacccaaacuc

SEQ ID NO: 299345 - RNA, 19 nt, Artificial Sequence
  Description of Artificial Sequence: Synthetic oligonucleotide
uuuggcuuagugccucugg

SEQ ID NO: 299346 - RNA, 19 nt, Artificial Sequence
  Description of Artificial Sequence: Synthetic oligonucleotide
acaguacccaaacucggcg

SEQ ID NO: 299347 - RNA, 19 nt, Artificial Sequence
  Description of Artificial Sequence: Synthetic oligonucleotide
cacguaaacaucaggggag

SEQ ID NO: 299348 - RNA, 19 nt, Artificial Sequence
  Description of Artificial Sequence: Synthetic oligonucleotide
cacacacacacacacauac

SEQ ID NO: 299349 - RNA, 19 nt, Artificial Sequence
  Description of Artificial Sequence: Synthetic oligonucleotide
uucacgaauggcaugcgac

SEQ ID NO: 299350 - RNA, 19 nt, Artificial Sequence
  Description of Artificial Sequence: Synthetic oligonucleotide
uguaauccgaacccugcug

SEQ ID NO: 299351 - RNA, 19 nt, Artificial Sequence
  Description of Artificial Sequence: Synthetic oligonucleotide
ucgauuggcuggcucaggg

SEQ ID NO: 299352 - RNA, 19 nt, Artificial Sequence
  Description of Artificial Sequence: Synthetic oligonucleotide
cacauacacacacacacac

SEQ ID NO: 299353 - RNA, 19 nt, Artificial Sequence
  Description of Artificial Sequence: Synthetic oligonucleotide
cauacacguaaacaucagg

SEQ ID NO: 299354 - RNA, 19 nt, Artificial Sequence
  Description of Artificial Sequence: Synthetic oligonucleotide
cacacacacacacauacac

SEQ ID NO: 299355 - RNA, 19 nt, Artificial Sequence
  Description of Artificial Sequence: Synthetic oligonucleotide
aggaacuaaauguggggag

SEQ ID NO: 299356 - RNA, 19 nt, Artificial Sequence
  Description of Artificial Sequence: Synthetic oligonucleotide
gcuaaguguaaacagggag

SEQ ID NO: 299357 - RNA, 19 nt, Artificial Sequence
  Description of Artificial Sequence: Synthetic oligonucleotide
agauuaucaaagaucaccu

SEQ ID NO: 299358 - RNA, 19 nt, Artificial Sequence
  Description of Artificial Sequence: Synthetic oligonucleotide
ugccacucugguaaaauac

SEQ ID NO: 299359 - RNA, 19 nt, Artificial Sequence
  Description of Artificial Sequence: Synthetic oligonucleotide
aguaggauaccaaugccag

SEQ ID NO: 299360 - RNA, 19 nt, Artificial Sequence
  Description of Artificial Sequence: Synthetic oligonucleotide
cagagaaccgccugcagcc

SEQ ID NO: 299361 - RNA, 19 nt, Artificial Sequence
  Description of Artificial Sequence: Synthetic oligonucleotide
cacacacacacacacacac

SEQ ID NO: 299362 - RNA, 19 nt, Artificial Sequence
  Description of Artificial Sequence: Synthetic oligonucleotide
aguacccaaacucggcggg

SEQ ID NO: 299363 - RNA, 19 nt, Artificial Sequence
  Description of Artificial Sequence: Synthetic oligonucleotide
uugauucuggccucuaggu

SEQ ID NO: 299364 - RNA, 19 nt, Artificial Sequence
  Description of Artificial Sequence: Synthetic oligonucleotide
cugauuuccuuguuggaug

SEQ ID NO: 299365 - RNA, 19 nt, Artificial Sequence
  Description of Artificial Sequence: Synthetic oligonucleotide
guaauccgaacccugcugc

SEQ ID NO: 299366 - RNA, 19 nt, Artificial Sequence
  Description of Artificial Sequence: Synthetic oligonucleotide
uuagaucacaaugccagga

SEQ ID NO: 299367 - RNA, 19 nt, Artificial Sequence
  Description of Artificial Sequence: Synthetic oligonucleotide
ugaucgauuggcuggcuca

SEQ ID NO: 299368 - RNA, 19 nt, Artificial Sequence
  Description of Artificial Sequence: Synthetic oligonucleotide
gcaaguaggauaccaaugc

SEQ ID NO: 299369 - RNA, 19 nt, Artificial Sequence
  Description of Artificial Sequence: Synthetic oligonucleotide
cacgcuaggguccacaaug

SEQ ID NO: 299370 - RNA, 19 nt, Artificial Sequence
  Description of Artificial Sequence: Synthetic oligonucleotide
uguccaccgaggcagaagu

SEQ ID NO: 299371 - RNA, 19 nt, Artificial Sequence
  Description of Artificial Sequence: Synthetic oligonucleotide
gagguggacguguaauccg

SEQ ID NO: 299372 - RNA, 19 nt, Artificial Sequence
  Description of Artificial Sequence: Synthetic oligonucleotide
ucgagguucacgcuagggu

SEQ ID NO: 299373 - RNA, 19 nt, Artificial Sequence
  Description of Artificial Sequence: Synthetic oligonucleotide
ugggacacgggguuuagca

SEQ ID NO: 299374 - RNA, 19 nt, Artificial Sequence
  Description of Artificial Sequence: Synthetic oligonucleotide
ugcaguuaccacucugugc

SEQ ID NO: 299375 - RNA, 19 nt, Artificial Sequence
  Description of Artificial Sequence: Synthetic oligonucleotide
ggggacacgguuuagauca

SEQ ID NO: 299376 - RNA, 19 nt, Artificial Sequence
  Description of Artificial Sequence: Synthetic oligonucleotide
aggggcaaaguacucuuuc

SEQ ID NO: 299377 - RNA, 19 nt, Artificial Sequence
  Description of Artificial Sequence: Synthetic oligonucleotide
caaguaggauaccaaugcc

SEQ ID NO: 299378 - RNA, 19 nt, Artificial Sequence
  Description of Artificial Sequence: Synthetic oligonucleotide
uguuuaggggagcuguggu

SEQ ID NO: 299379 - RNA, 19 nt, Artificial Sequence
  Description of Artificial Sequence: Synthetic oligonucleotide
cacauacacguaaacauca

SEQ ID NO: 299380 - RNA, 19 nt, Artificial Sequence
  Description of Artificial Sequence: Synthetic oligonucleotide
ggcuauuguaggcuuacgg

SEQ ID NO: 299381 - RNA, 19 nt, Artificial Sequence
  Description of Artificial Sequence: Synthetic oligonucleotide
ucacgaauggcaugcgaca

SEQ ID NO: 299382 - RNA, 19 nt, Artificial Sequence
  Description of Artificial Sequence: Synthetic oligonucleotide
agccauuuacuauggggag

SEQ ID NO: 299383 - RNA, 19 nt, Artificial Sequence
  Description of Artificial Sequence: Synthetic oligonucleotide
uggaaugcgcuguaccagc

SEQ ID NO: 299384 - RNA, 19 nt, Artificial Sequence
  Description of Artificial Sequence: Synthetic oligonucleotide
uucgccaucgacagccuca

SEQ ID NO: 299385 - RNA, 19 nt, Artificial Sequence
  Description of Artificial Sequence: Synthetic oligonucleotide
agcgggucaguuucuuggc

SEQ ID NO: 299386 - RNA, 19 nt, Artificial Sequence
  Description of Artificial Sequence: Synthetic oligonucleotide
guaaacaucaggggaguug

SEQ ID NO: 299387 - RNA, 19 nt, Artificial Sequence
  Description of Artificial Sequence: Synthetic oligonucleotide
guuggcaugaguccauuca

SEQ ID NO: 299388 - RNA, 19 nt, Artificial Sequence
  Description of Artificial Sequence: Synthetic oligonucleotide
uccaagcccuugcugaaug

SEQ ID NO: 299389 - RNA, 19 nt, Artificial Sequence
  Description of Artificial Sequence: Synthetic oligonucleotide
uuucacgaauggcaugcga

SEQ ID NO: 299390 - RNA, 19 nt, Artificial Sequence
  Description of Artificial Sequence: Synthetic oligonucleotide
uguguuuaggggagcugug

SEQ ID NO: 299391 - RNA, 19 nt, Artificial Sequence
  Description of Artificial Sequence: Synthetic oligonucleotide
acacgcauaagaaggcugg

SEQ ID NO: 299392 - RNA, 19 nt, Artificial Sequence
  Description of Artificial Sequence: Synthetic oligonucleotide
guaggcuuacggcuggugc

SEQ ID NO: 299393 - RNA, 19 nt, Artificial Sequence
  Description of Artificial Sequence: Synthetic oligonucleotide
uguaugacucgcugucagc

SEQ ID NO: 299394 - RNA, 19 nt, Artificial Sequence
  Description of Artificial Sequence: Synthetic oligonucleotide
aaacucggcggguuuggca

SEQ ID NO: 299395 - RNA, 19 nt, Artificial Sequence
  Description of Artificial Sequence: Synthetic oligonucleotide
accaauuugugcauuaaaa

SEQ ID NO: 299396 - RNA, 19 nt, Artificial Sequence
  Description of Artificial Sequence: Synthetic oligonucleotide
acgcauaagaaggcuggcc

SEQ ID NO: 299397 - RNA, 19 nt, Artificial Sequence
  Description of Artificial Sequence: Synthetic oligonucleotide
ggauaccaaugccaggucg

SEQ ID NO: 299398 - RNA, 19 nt, Artificial Sequence
  Description of Artificial Sequence: Synthetic oligonucleotide
ggcguuguguguuuagggg

SEQ ID NO: 299399 - RNA, 19 nt, Artificial Sequence
  Description of Artificial Sequence: Synthetic oligonucleotide
guguaugacucgcugucag

SEQ ID NO: 299400 - RNA, 19 nt, Artificial Sequence
  Description of Artificial Sequence: Synthetic oligonucleotide
cuacgaaggaucaggccac

SEQ ID NO: 299401 - RNA, 19 nt, Artificial Sequence
  Description of Artificial Sequence: Synthetic oligonucleotide
cugauccaaguugugagag

SEQ ID NO: 299402 - RNA, 19 nt, Artificial Sequence
  Description of Artificial Sequence: Synthetic oligonucleotide
aggggcaacagugucgggg

SEQ ID NO: 299403 - RNA, 19 nt, Artificial Sequence
  Description of Artificial Sequence: Synthetic oligonucleotide
ucuagguccucccgcggcc

SEQ ID NO: 299404 - RNA, 19 nt, Artificial Sequence
  Description of Artificial Sequence: Synthetic oligonucleotide
cuugucuuauuggccaggg

SEQ ID NO: 299405 - RNA, 19 nt, Artificial Sequence
  Description of Artificial Sequence: Synthetic oligonucleotide
ugugaaggagccugcccgc

SEQ ID NO: 299406 - RNA, 19 nt, Artificial Sequence
  Description of Artificial Sequence: Synthetic oligonucleotide
caguacccaaacucggcgg

SEQ ID NO: 299407 - RNA, 19 nt, Artificial Sequence
  Description of Artificial Sequence: Synthetic oligonucleotide
accucuccgcaucaggaag

SEQ ID NO: 299408 - RNA, 19 nt, Artificial Sequence
  Description of Artificial Sequence: Synthetic oligonucleotide
uagguuaaaucaggaaccu

SEQ ID NO: 299409 - RNA, 19 nt, Artificial Sequence
  Description of Artificial Sequence: Synthetic oligonucleotide
acacacacacacauacacg

SEQ ID NO: 299410 - RNA, 19 nt, Artificial Sequence
  Description of Artificial Sequence: Synthetic oligonucleotide
aguuggcaugaguccauuc

SEQ ID NO: 299411 - RNA, 19 nt, Artificial Sequence
  Description of Artificial Sequence: Synthetic oligonucleotide
cacacgcauaagaaggcug

SEQ ID NO: 299412 - RNA, 19 nt, Artificial Sequence
  Description of Artificial Sequence: Synthetic oligonucleotide
gacacacgcauaagaaggc

SEQ ID NO: 299413 - RNA, 19 nt, Artificial Sequence
  Description of Artificial Sequence: Synthetic oligonucleotide
caugcgacagcugggacac

SEQ ID NO: 299414 - RNA, 19 nt, Artificial Sequence
  Description of Artificial Sequence: Synthetic oligonucleotide
uaauccgaacccugcugcc

SEQ ID NO: 299415 - RNA, 19 nt, Artificial Sequence
  Description of Artificial Sequence: Synthetic oligonucleotide
gucgauacgggaugcuccc

SEQ ID NO: 299416 - RNA, 19 nt, Artificial Sequence
  Description of Artificial Sequence: Synthetic oligonucleotide
gcuuagaccugcaaagggg

SEQ ID NO: 299417 - RNA, 19 nt, Artificial Sequence
  Description of Artificial Sequence: Synthetic oligonucleotide
agcauacccaguagugggc

SEQ ID NO: 299418 - RNA, 19 nt, Artificial Sequence
  Description of Artificial Sequence: Synthetic oligonucleotide
gacaguacccaaacucggc

SEQ ID NO: 299419 - RNA, 19 nt, Artificial Sequence
  Description of Artificial Sequence: Synthetic oligonucleotide
auccgaacccugcugccuc

SEQ ID NO: 299420 - RNA, 19 nt, Artificial Sequence
  Description of Artificial Sequence: Synthetic oligonucleotide
aggaggcacccauccaugg

SEQ ID NO: 299421 - RNA, 19 nt, Artificial Sequence
  Description of Artificial Sequence: Synthetic oligonucleotide
aucgacagccucagugucc

SEQ ID NO: 299422 - RNA, 19 nt, Artificial Sequence
  Description of Artificial Sequence: Synthetic oligonucleotide
cacauaugggguuuucaca

SEQ ID NO: 299423 - RNA, 19 nt, Artificial Sequence
  Description of Artificial Sequence: Synthetic oligonucleotide
cacaguuggcccguugugg

SEQ ID NO: 299424 - RNA, 19 nt, Artificial Sequence
  Description of Artificial Sequence: Synthetic oligonucleotide
cgaacaaauccugagaaag

SEQ ID NO: 299425 - RNA, 19 nt, Artificial Sequence
  Description of Artificial Sequence: Synthetic oligonucleotide
uucacgaugccaggcaagu

SEQ ID NO: 299426 - RNA, 19 nt, Artificial Sequence
  Description of Artificial Sequence: Synthetic oligonucleotide
cagccgaacaaauccugag

SEQ ID NO: 299427 - RNA, 19 nt, Artificial Sequence
  Description of Artificial Sequence: Synthetic oligonucleotide
uugucuuauuggccagggc

SEQ ID NO: 299428 - RNA, 19 nt, Artificial Sequence
  Description of Artificial Sequence: Synthetic oligonucleotide
aggcaaguaggauaccaau

SEQ ID NO: 299429 - RNA, 19 nt, Artificial Sequence
  Description of Artificial Sequence: Synthetic oligonucleotide
ugcuucugcacacgucgca

SEQ ID NO: 299430 - RNA, 19 nt, Artificial Sequence
  Description of Artificial Sequence: Synthetic oligonucleotide
cacacacacacauacacgu

SEQ ID NO: 299431 - RNA, 19 nt, Artificial Sequence
  Description of Artificial Sequence: Synthetic oligonucleotide
guguuuaggggagcugugg

SEQ ID NO: 299432 - RNA, 19 nt, Artificial Sequence
  Description of Artificial Sequence: Synthetic oligonucleotide
ugauccaaguugugagagu

SEQ ID NO: 299433 - RNA, 19 nt, Artificial Sequence
  Description of Artificial Sequence: Synthetic oligonucleotide
aaccucuccgcaucaggaa

SEQ ID NO: 299434 - RNA, 19 nt, Artificial Sequence
  Description of Artificial Sequence: Synthetic oligonucleotide
guguaaacagggaggcccg

SEQ ID NO: 299435 - RNA, 19 nt, Artificial Sequence
  Description of Artificial Sequence: Synthetic oligonucleotide
gggcugaucgauuggcugg

SEQ ID NO: 299436 - RNA, 19 nt, Artificial Sequence
  Description of Artificial Sequence: Synthetic oligonucleotide
uuacggcuggugcuguaga

SEQ ID NO: 299437 - RNA, 19 nt, Artificial Sequence
  Description of Artificial Sequence: Synthetic oligonucleotide
auguucugauccaaguugu

SEQ ID NO: 299438 - RNA, 19 nt, Artificial Sequence
  Description of Artificial Sequence: Synthetic oligonucleotide
gguuaaaucaggaaccucu

SEQ ID NO: 299439 - RNA, 19 nt, Artificial Sequence
  Description of Artificial Sequence: Synthetic oligonucleotide
augacucgcugucagcuaa

SEQ ID NO: 299440 - RNA, 19 nt, Artificial Sequence
  Description of Artificial Sequence: Synthetic oligonucleotide
ugugagggacaugcagggg

SEQ ID NO: 299441 - RNA, 19 nt, Artificial Sequence
  Description of Artificial Sequence: Synthetic oligonucleotide
agguuaaaucaggaaccuc

SEQ ID NO: 299442 - RNA, 19 nt, Artificial Sequence
  Description of Artificial Sequence: Synthetic oligonucleotide
gggguuuagcaucagauua

SEQ ID NO: 299443 - RNA, 19 nt, Artificial Sequence
  Description of Artificial Sequence: Synthetic oligonucleotide
gaauggacccugcaggagu

SEQ ID NO: 299444 - RNA, 19 nt, Artificial Sequence
  Description of Artificial Sequence: Synthetic oligonucleotide
accuucacgaugccaggca

SEQ ID NO: 299445 - RNA, 19 nt, Artificial Sequence
  Description of Artificial Sequence: Synthetic oligonucleotide
ccuacgaaggaucaggcca

SEQ ID NO: 299446 - RNA, 19 nt, Artificial Sequence
  Description of Artificial Sequence: Synthetic oligonucleotide
acauacacguaaacaucag

SEQ ID NO: 299447 - RNA, 19 nt, Artificial Sequence
  Description of Artificial Sequence: Synthetic oligonucleotide
cagagguggacguguaauc

SEQ ID NO: 299448 - RNA, 19 nt, Artificial Sequence
  Description of Artificial Sequence: Synthetic oligonucleotide
agccagcgggcucuuuggc

SEQ ID NO: 299449 - RNA, 19 nt, Artificial Sequence
  Description of Artificial Sequence: Synthetic oligonucleotide
cacgaauggcaugcgacag

SEQ ID NO: 299450 - RNA, 19 nt, Artificial Sequence
  Description of Artificial Sequence: Synthetic oligonucleotide
gagaaccgccugcagccag

SEQ ID NO: 299451 - RNA, 19 nt, Artificial Sequence
  Description of Artificial Sequence: Synthetic oligonucleotide
ccaguagugggccuguccc

SEQ ID NO: 299452 - RNA, 19 nt, Artificial Sequence
  Description of Artificial Sequence: Synthetic oligonucleotide
gcggaagaugguuuauuag

SEQ ID NO: 299453 - RNA, 19 nt, Artificial Sequence
  Description of Artificial Sequence: Synthetic oligonucleotide
cugaauggacccugcagga

SEQ ID NO: 299454 - RNA, 19 nt, Artificial Sequence
  Description of Artificial Sequence: Synthetic oligonucleotide
cuuggucgauacgggaugc

SEQ ID NO: 299455 - RNA, 19 nt, Artificial Sequence
  Description of Artificial Sequence: Synthetic oligonucleotide
aucgaggacggcaggggac

SEQ ID NO: 299456 - RNA, 19 nt, Artificial Sequence
  Description of Artificial Sequence: Synthetic oligonucleotide
gccccagccgaacaaaucc

SEQ ID NO: 299457 - RNA, 19 nt, Artificial Sequence
  Description of Artificial Sequence: Synthetic oligonucleotide
cuuacggcuggugcuguag

SEQ ID NO: 299458 - RNA, 19 nt, Artificial Sequence
  Description of Artificial Sequence: Synthetic oligonucleotide
accaccugagaacaaugua

SEQ ID NO: 299459 - RNA, 19 nt, Artificial Sequence
  Description of Artificial Sequence: Synthetic oligonucleotide
uucacgcuaggguccacaa

SEQ ID NO: 299460 - RNA, 19 nt, Artificial Sequence
  Description of Artificial Sequence: Synthetic oligonucleotide
agguggcaccuucuggaag

SEQ ID NO: 299461 - RNA, 19 nt, Artificial Sequence
  Description of Artificial Sequence: Synthetic oligonucleotide
caggaacuaaaugugggga

SEQ ID NO: 299462 - RNA, 19 nt, Artificial Sequence
  Description of Artificial Sequence: Synthetic oligonucleotide
gaacuaaauguggggagaa

SEQ ID NO: 299463 - RNA, 19 nt, Artificial Sequence
  Description of Artificial Sequence: Synthetic oligonucleotide
acccguguaugacucgcug

SEQ ID NO: 299464 - RNA, 19 nt, Artificial Sequence
  Description of Artificial Sequence: Synthetic oligonucleotide
caggacccguguaugacuc

SEQ ID NO: 299465 - RNA, 19 nt, Artificial Sequence
  Description of Artificial Sequence: Synthetic oligonucleotide
cugcaguuaccacucugug

SEQ ID NO: 299466 - RNA, 19 nt, Artificial Sequence
  Description of Artificial Sequence: Synthetic oligonucleotide
gaaacaccaauuugugcau

SEQ ID NO: 299467 - RNA, 19 nt, Artificial Sequence
  Description of Artificial Sequence: Synthetic oligonucleotide
gaugucccaagcgggucag

SEQ ID NO: 299468 - RNA, 19 nt, Artificial Sequence
  Description of Artificial Sequence: Synthetic oligonucleotide
aguccauucaggaggacuu

SEQ ID NO: 299469 - RNA, 19 nt, Artificial Sequence
  Description of Artificial Sequence: Synthetic oligonucleotide
ucggcuauuguaggcuuac

SEQ ID NO: 299470 - RNA, 19 nt, Artificial Sequence
  Description of Artificial Sequence: Synthetic oligonucleotide
cuagggacaggggcaacag

SEQ ID NO: 299471 - RNA, 19 nt, Artificial Sequence
  Description of Artificial Sequence: Synthetic oligonucleotide
acgggguuuagcaucagau

SEQ ID NO: 299472 - RNA, 19 nt, Artificial Sequence
  Description of Artificial Sequence: Synthetic oligonucleotide
uaugacucgcugucagcua

SEQ ID NO: 299473 - RNA, 19 nt, Artificial Sequence
  Description of Artificial Sequence: Synthetic oligonucleotide
acacgguuuagaucacaau

SEQ ID NO: 299474 - RNA, 19 nt, Artificial Sequence
  Description of Artificial Sequence: Synthetic oligonucleotide
uaccaaugccaggucgaag

SEQ ID NO: 299475 - RNA, 19 nt, Artificial Sequence
  Description of Artificial Sequence: Synthetic oligonucleotide
cuacacacauacacacaca

SEQ ID NO: 299476 - RNA, 19 nt, Artificial Sequence
  Description of Artificial Sequence: Synthetic oligonucleotide
gauaccccaggggcuaggc

SEQ ID NO: 299477 - RNA, 19 nt, Artificial Sequence
  Description of Artificial Sequence: Synthetic oligonucleotide
ucgaggacggcaggggaca

SEQ ID NO: 299478 - RNA, 19 nt, Artificial Sequence
  Description of Artificial Sequence: Synthetic oligonucleotide
caucgacagccucaguguc

SEQ ID NO: 299479 - RNA, 19 nt, Artificial Sequence
  Description of Artificial Sequence: Synthetic oligonucleotide
uuacuauggggagcaggcu

SEQ ID NO: 299480 - RNA, 19 nt, Artificial Sequence
  Description of Artificial Sequence: Synthetic oligonucleotide
cacacgucgcaguuccuuc

SEQ ID NO: 299481 - RNA, 19 nt, Artificial Sequence
  Description of Artificial Sequence: Synthetic oligonucleotide
acacgucgcaguuccuuca

SEQ ID NO: 299482 - RNA, 19 nt, Artificial Sequence
  Description of Artificial Sequence: Synthetic oligonucleotide
aguuaccacucugugccca

SEQ ID NO: 299483 - RNA, 19 nt, Artificial Sequence
  Description of Artificial Sequence: Synthetic oligonucleotide
acgucgcaguuccuucagg

SEQ ID NO: 299484 - RNA, 19 nt, Artificial Sequence
  Description of Artificial Sequence: Synthetic oligonucleotide
uuauuggccagggcauccu

SEQ ID NO: 299485 - RNA, 19 nt, Artificial Sequence
  Description of Artificial Sequence: Synthetic oligonucleotide
guggacguguaauccgaac

SEQ ID NO: 299486 - RNA, 19 nt, Artificial Sequence
  Description of Artificial Sequence: Synthetic oligonucleotide
ugccaggagcuuccaaauc

SEQ ID NO: 299487 - RNA, 19 nt, Artificial Sequence
  Description of Artificial Sequence: Synthetic oligonucleotide
caggaggcacccauccaug

SEQ ID NO: 299488 - RNA, 19 nt, Artificial Sequence
  Description of Artificial Sequence: Synthetic oligonucleotide
acacauacacacacacaca

SEQ ID NO: 299489 - RNA, 19 nt, Artificial Sequence
  Description of Artificial Sequence: Synthetic oligonucleotide
acauacacacacacacaca

SEQ ID NO: 299490 - RNA, 19 nt, Artificial Sequence
  Description of Artificial Sequence: Synthetic oligonucleotide
aggacccguguaugacucg

SEQ ID NO: 299491 - RNA, 19 nt, Artificial Sequence
  Description of Artificial Sequence: Synthetic oligonucleotide
gcuuggucgauacgggaug

SEQ ID NO: 299492 - RNA, 19 nt, Artificial Sequence
  Description of Artificial Sequence: Synthetic oligonucleotide
caggccccuacgaaggauc

SEQ ID NO: 299493 - RNA, 19 nt, Artificial Sequence
  Description of Artificial Sequence: Synthetic oligonucleotide
ggucgauacgggaugcucc

SEQ ID NO: 299494 - RNA, 19 nt, Artificial Sequence
  Description of Artificial Sequence: Synthetic oligonucleotide
acguaaacaucaggggagu

SEQ ID NO: 299495 - RNA, 19 nt, Artificial Sequence
  Description of Artificial Sequence: Synthetic oligonucleotide
cacacaggacccguguaug

SEQ ID NO: 299496 - RNA, 19 nt, Artificial Sequence
  Description of Artificial Sequence: Synthetic oligonucleotide
ccucguucgccaucgacag

SEQ ID NO: 299497 - RNA, 19 nt, Artificial Sequence
  Description of Artificial Sequence: Synthetic oligonucleotide
ggacacgggguuuagcauc

SEQ ID NO: 299498 - RNA, 19 nt, Artificial Sequence
  Description of Artificial Sequence: Synthetic oligonucleotide
ucucagcguugauucuggc

SEQ ID NO: 299499 - RNA, 19 nt, Artificial Sequence
  Description of Artificial Sequence: Synthetic oligonucleotide
acgcuaggguccacaaugg

SEQ ID NO: 299500 - RNA, 19 nt, Artificial Sequence
  Description of Artificial Sequence: Synthetic oligonucleotide
ucgccaucgacagccucag

SEQ ID NO: 299501 - RNA, 19 nt, Artificial Sequence
  Description of Artificial Sequence: Synthetic oligonucleotide
gacacgggguuuagcauca

SEQ ID NO: 299502 - RNA, 19 nt, Artificial Sequence
  Description of Artificial Sequence: Synthetic oligonucleotide
acacacgcauaagaaggcu

SEQ ID NO: 299503 - RNA, 19 nt, Artificial Sequence
  Description of Artificial Sequence: Synthetic oligonucleotide
cauaugggguuuucacaga

SEQ ID NO: 299504 - RNA, 19 nt, Artificial Sequence
  Description of Artificial Sequence: Synthetic oligonucleotide
uaaggaggcccaggguccc

SEQ ID NO: 299505 - RNA, 19 nt, Artificial Sequence
  Description of Artificial Sequence: Synthetic oligonucleotide
cacacacacacacacacau

SEQ ID NO: 299506 - RNA, 19 nt, Artificial Sequence
  Description of Artificial Sequence: Synthetic oligonucleotide
gguuuagaucacaaugcca

SEQ ID NO: 299507 - RNA, 19 nt, Artificial Sequence
  Description of Artificial Sequence: Synthetic oligonucleotide
cugaucgauuggcuggcuc

SEQ ID NO: 299508 - RNA, 19 nt, Artificial Sequence
  Description of Artificial Sequence: Synthetic oligonucleotide
ggaacuaaauguggggaga

SEQ ID NO: 299509 - RNA, 19 nt, Artificial Sequence
  Description of Artificial Sequence: Synthetic oligonucleotide
ggguuauggcacauauggg

SEQ ID NO: 299510 - RNA, 19 nt, Artificial Sequence
  Description of Artificial Sequence: Synthetic oligonucleotide
acacacauacacacacaca

SEQ ID NO: 299511 - RNA, 19 nt, Artificial Sequence
  Description of Artificial Sequence: Synthetic oligonucleotide
uggucgauacgggaugcuc

SEQ ID NO: 299512 - RNA, 19 nt, Artificial Sequence
  Description of Artificial Sequence: Synthetic oligonucleotide
guaugacucgcugucagcu

SEQ ID NO: 299513 - RNA, 19 nt, Artificial Sequence
  Description of Artificial Sequence: Synthetic oligonucleotide
ccagcuuggucgauacggg

SEQ ID NO: 299514 - RNA, 19 nt, Artificial Sequence
  Description of Artificial Sequence: Synthetic oligonucleotide
acgguuccgaggccuuguc

SEQ ID NO: 299515 - RNA, 19 nt, Artificial Sequence
  Description of Artificial Sequence: Synthetic oligonucleotide
acguguaauccgaacccug

SEQ ID NO: 299516 - RNA, 19 nt, Artificial Sequence
  Description of Artificial Sequence: Synthetic oligonucleotide
cacgucgcaguuccuucag

SEQ ID NO: 299517 - RNA, 19 nt, Artificial Sequence
  Description of Artificial Sequence: Synthetic oligonucleotide
auacacacacacacacaca

SEQ ID NO: 299518 - RNA, 19 nt, Artificial Sequence
  Description of Artificial Sequence: Synthetic oligonucleotide
cacaggacccguguaugac

SEQ ID NO: 299519 - RNA, 19 nt, Artificial Sequence
  Description of Artificial Sequence: Synthetic oligonucleotide
ugcggucccucguucgcca

SEQ ID NO: 299520 - RNA, 19 nt, Artificial Sequence
  Description of Artificial Sequence: Synthetic oligonucleotide
gccccuacgaaggaucagg

SEQ ID NO: 299521 - RNA, 19 nt, Artificial Sequence
  Description of Artificial Sequence: Synthetic oligonucleotide
aggucgagguucacgcuag

SEQ ID NO: 299522 - RNA, 19 nt, Artificial Sequence
  Description of Artificial Sequence: Synthetic oligonucleotide
acagugucggggaggaggu

SEQ ID NO: 299523 - RNA, 19 nt, Artificial Sequence
  Description of Artificial Sequence: Synthetic oligonucleotide
uccgaacccugcugccucc

SEQ ID NO: 299524 - RNA, 19 nt, Artificial Sequence
  Description of Artificial Sequence: Synthetic oligonucleotide
agaaccgccugcagccagg

SEQ ID NO: 299525 - RNA, 19 nt, Artificial Sequence
  Description of Artificial Sequence: Synthetic oligonucleotide
caccaaaggcuuagaccug

SEQ ID NO: 299526 - RNA, 19 nt, Artificial Sequence
  Description of Artificial Sequence: Synthetic oligonucleotide
cccgaguuggcaugagucc

SEQ ID NO: 299527 - RNA, 19 nt, Artificial Sequence
  Description of Artificial Sequence: Synthetic oligonucleotide
cacgcauaagaaggcuggc

SEQ ID NO: 299528 - RNA, 19 nt, Artificial Sequence
  Description of Artificial Sequence: Synthetic oligonucleotide
agccugcccgcuuccgggg

SEQ ID NO: 299529 - RNA, 19 nt, Artificial Sequence
  Description of Artificial Sequence: Synthetic oligonucleotide
uuggcggggccccguguug

SEQ ID NO: 299530 - RNA, 19 nt, Artificial Sequence
  Description of Artificial Sequence: Synthetic oligonucleotide
cgguuuagaucacaaugcc

SEQ ID NO: 299531 - RNA, 19 nt, Artificial Sequence
  Description of Artificial Sequence: Synthetic oligonucleotide
uguaaacagggaggcccgu

SEQ ID NO: 299532 - RNA, 19 nt, Artificial Sequence
  Description of Artificial Sequence: Synthetic oligonucleotide
agcuuggucgauacgggau

SEQ ID NO: 299533 - RNA, 19 nt, Artificial Sequence
  Description of Artificial Sequence: Synthetic oligonucleotide
ggucccucguucgccaucg

SEQ ID NO: 299534 - RNA, 19 nt, Artificial Sequence
  Description of Artificial Sequence: Synthetic oligonucleotide
cccgugcuaccccugaggg

SEQ ID NO: 299535 - RNA, 19 nt, Artificial Sequence
  Description of Artificial Sequence: Synthetic oligonucleotide
cacacccgugccagcuugg

SEQ ID NO: 299536 - RNA, 19 nt, Artificial Sequence
  Description of Artificial Sequence: Synthetic oligonucleotide
cacaggacacacgcauaag

SEQ ID NO: 299537 - RNA, 19 nt, Artificial Sequence
  Description of Artificial Sequence: Synthetic oligonucleotide
aggcuuacggcuggugcug

SEQ ID NO: 299538 - RNA, 19 nt, Artificial Sequence
  Description of Artificial Sequence: Synthetic oligonucleotide
aucuucucagcaagaugcu

SEQ ID NO: 299539 - RNA, 19 nt, Artificial Sequence
  Description of Artificial Sequence: Synthetic oligonucleotide
cgagguucacgcuaggguc

SEQ ID NO: 299540 - RNA, 19 nt, Artificial Sequence
  Description of Artificial Sequence: Synthetic oligonucleotide
gccauuuacuauggggagc

SEQ ID NO: 299541 - RNA, 19 nt, Artificial Sequence
  Description of Artificial Sequence: Synthetic oligonucleotide
aguuggcccguuguggaaa

SEQ ID NO: 299542 - RNA, 19 nt, Artificial Sequence
  Description of Artificial Sequence: Synthetic oligonucleotide
guguguuuaggggagcugu

SEQ ID NO: 299543 - RNA, 19 nt, Artificial Sequence
  Description of Artificial Sequence: Synthetic oligonucleotide
acacacacacacacauaca

SEQ ID NO: 299544 - RNA, 19 nt, Artificial Sequence
  Description of Artificial Sequence: Synthetic oligonucleotide
uggacccugcaggaguccu

SEQ ID NO: 299545 - RNA, 19 nt, Artificial Sequence
  Description of Artificial Sequence: Synthetic oligonucleotide
acgaaggaucaggccacag

SEQ ID NO: 299546 - RNA, 19 nt, Artificial Sequence
  Description of Artificial Sequence: Synthetic oligonucleotide
ucgauacgggaugcucccc

SEQ ID NO: 299547 - RNA, 19 nt, Artificial Sequence
  Description of Artificial Sequence: Synthetic oligonucleotide
acacacacacacacacaca

SEQ ID NO: 299548 - RNA, 19 nt, Artificial Sequence
  Description of Artificial Sequence: Synthetic oligonucleotide
guguccaccgaggcagaag

SEQ ID NO: 299549 - RNA, 19 nt, Artificial Sequence
  Description of Artificial Sequence: Synthetic oligonucleotide
uacgaaggaucaggccaca

SEQ ID NO: 299550 - RNA, 19 nt, Artificial Sequence
  Description of Artificial Sequence: Synthetic oligonucleotide
caaacucggcggguuuggc

SEQ ID NO: 299551 - RNA, 19 nt, Artificial Sequence
  Description of Artificial Sequence: Synthetic oligonucleotide
agcagucuuccuggcagca

SEQ ID NO: 299552 - RNA, 19 nt, Artificial Sequence
  Description of Artificial Sequence: Synthetic oligonucleotide
gcaucgaggacggcagggg

SEQ ID NO: 299553 - RNA, 19 nt, Artificial Sequence
  Description of Artificial Sequence: Synthetic oligonucleotide
cagacaccuucacgaugcc

SEQ ID NO: 299554 - RNA, 19 nt, Artificial Sequence
  Description of Artificial Sequence: Synthetic oligonucleotide
caucgaggacggcagggga

SEQ ID NO: 299555 - RNA, 19 nt, Artificial Sequence
  Description of Artificial Sequence: Synthetic oligonucleotide
uuggucgauacgggaugcu

SEQ ID NO: 299556 - RNA, 19 nt, Artificial Sequence
  Description of Artificial Sequence: Synthetic oligonucleotide
gaaccgccugcagccaggc

SEQ ID NO: 299557 - RNA, 19 nt, Artificial Sequence
  Description of Artificial Sequence: Synthetic oligonucleotide
gacguguaauccgaacccu

SEQ ID NO: 299558 - RNA, 19 nt, Artificial Sequence
  Description of Artificial Sequence: Synthetic oligonucleotide
guguaauccgaacccugcu

SEQ ID NO: 299559 - RNA, 19 nt, Artificial Sequence
  Description of Artificial Sequence: Synthetic oligonucleotide
uggauaccccaggggcuag

SEQ ID NO: 299560 - RNA, 19 nt, Artificial Sequence
  Description of Artificial Sequence: Synthetic oligonucleotide
gggccucggcuauuguagg

SEQ ID NO: 299561 - RNA, 19 nt, Artificial Sequence
  Description of Artificial Sequence: Synthetic oligonucleotide
cagcguugauucuggccuc

SEQ ID NO: 299562 - RNA, 19 nt, Artificial Sequence
  Description of Artificial Sequence: Synthetic oligonucleotide
gaccaccugagaacaaugu

SEQ ID NO: 299563 - RNA, 19 nt, Artificial Sequence
  Description of Artificial Sequence: Synthetic oligonucleotide
ggcugcggucccucguucg

SEQ ID NO: 299564 - RNA, 19 nt, Artificial Sequence
  Description of Artificial Sequence: Synthetic oligonucleotide
cagcuuggucgauacggga

SEQ ID NO: 299565 - RNA, 19 nt, Artificial Sequence
  Description of Artificial Sequence: Synthetic oligonucleotide
cccuacgaaggaucaggcc

SEQ ID NO: 299566 - RNA, 19 nt, Artificial Sequence
  Description of Artificial Sequence: Synthetic oligonucleotide
ugggacccauacuccuccu

SEQ ID NO: 299567 - RNA, 19 nt, Artificial Sequence
  Description of Artificial Sequence: Synthetic oligonucleotide
aaggggcaaaguacucuuu

SEQ ID NO: 299568 - RNA, 19 nt, Artificial Sequence
  Description of Artificial Sequence: Synthetic oligonucleotide
ggcccuuggcaguggauac

SEQ ID NO: 299569 - RNA, 19 nt, Artificial Sequence
  Description of Artificial Sequence: Synthetic oligonucleotide
cucguucgccaucgacagc

SEQ ID NO: 299570 - RNA, 19 nt, Artificial Sequence
  Description of Artificial Sequence: Synthetic oligonucleotide
caggucgagguucacgcua

SEQ ID NO: 299571 - RNA, 19 nt, Artificial Sequence
  Description of Artificial Sequence: Synthetic oligonucleotide
ugccacgcggaagaugguu

SEQ ID NO: 299572 - RNA, 19 nt, Artificial Sequence
  Description of Artificial Sequence: Synthetic oligonucleotide
cugccacucugguaaaaua

SEQ ID NO: 299573 - RNA, 19 nt, Artificial Sequence
  Description of Artificial Sequence: Synthetic oligonucleotide
guucacgcuaggguccaca

SEQ ID NO: 299574 - RNA, 19 nt, Artificial Sequence
  Description of Artificial Sequence: Synthetic oligonucleotide
cccuacugaaggguuggcg

SEQ ID NO: 299575 - RNA, 19 nt, Artificial Sequence
  Description of Artificial Sequence: Synthetic oligonucleotide
ccccuacgaaggaucaggc

SEQ ID NO: 299576 - RNA, 19 nt, Artificial Sequence
  Description of Artificial Sequence: Synthetic oligonucleotide
agcguugauucuggccucu

SEQ ID NO: 299577 - RNA, 19 nt, Artificial Sequence
  Description of Artificial Sequence: Synthetic oligonucleotide
uacccaaacucggcggguu

SEQ ID NO: 299578 - RNA, 19 nt, Artificial Sequence
  Description of Artificial Sequence: Synthetic oligonucleotide
agagaaccgccugcagcca

SEQ ID NO: 299579 - RNA, 19 nt, Artificial Sequence
  Description of Artificial Sequence: Synthetic oligonucleotide
agguucacgcuagggucca

SEQ ID NO: 299580 - RNA, 19 nt, Artificial Sequence
  Description of Artificial Sequence: Synthetic oligonucleotide
uacccaguagugggccugu

SEQ ID NO: 299581 - RNA, 19 nt, Artificial Sequence
  Description of Artificial Sequence: Synthetic oligonucleotide
ggcugaucgauuggcuggc

SEQ ID NO: 299582 - RNA, 19 nt, Artificial Sequence
  Description of Artificial Sequence: Synthetic oligonucleotide
gcaacagugucggggagga

SEQ ID NO: 299583 - RNA, 19 nt, Artificial Sequence
  Description of Artificial Sequence: Synthetic oligonucleotide
cccaguagugggccugucc

SEQ ID NO: 299584 - RNA, 19 nt, Artificial Sequence
  Description of Artificial Sequence: Synthetic oligonucleotide
ggcgggcccuacugaaggg

SEQ ID NO: 299585 - RNA, 19 nt, Artificial Sequence
  Description of Artificial Sequence: Synthetic oligonucleotide
acucggcggguuuggcagu

SEQ ID NO: 299586 - RNA, 19 nt, Artificial Sequence
  Description of Artificial Sequence: Synthetic oligonucleotide
cacgucaggcagggcacag

SEQ ID NO: 299587 - RNA, 19 nt, Artificial Sequence
  Description of Artificial Sequence: Synthetic oligonucleotide
uggcugcggucccucguuc

SEQ ID NO: 299588 - RNA, 19 nt, Artificial Sequence
  Description of Artificial Sequence: Synthetic oligonucleotide
gcacacccgugccagcuug

SEQ ID NO: 299589 - RNA, 19 nt, Artificial Sequence
  Description of Artificial Sequence: Synthetic oligonucleotide
acccaaacucggcggguuu

SEQ ID NO: 299590 - RNA, 19 nt, Artificial Sequence
  Description of Artificial Sequence: Synthetic oligonucleotide
ggucgagguucacgcuagg

SEQ ID NO: 299591 - RNA, 19 nt, Artificial Sequence
  Description of Artificial Sequence: Synthetic oligonucleotide
cacgggguuuagcaucaga

SEQ ID NO: 299592 - RNA, 19 nt, Artificial Sequence
  Description of Artificial Sequence: Synthetic oligonucleotide
ugaguccauucaggaggac

SEQ ID NO: 299593 - RNA, 19 nt, Artificial Sequence
  Description of Artificial Sequence: Synthetic oligonucleotide
ggcaaaguacucuuuccuu

SEQ ID NO: 299594 - RNA, 19 nt, Artificial Sequence
  Description of Artificial Sequence: Synthetic oligonucleotide
ggggccgucucagagucac

SEQ ID NO: 299595 - RNA, 19 nt, Artificial Sequence
  Description of Artificial Sequence: Synthetic oligonucleotide
uccgaggccuugucuuauu

SEQ ID NO: 299596 - RNA, 19 nt, Artificial Sequence
  Description of Artificial Sequence: Synthetic oligonucleotide
ccucccgcggccuguauuc

SEQ ID NO: 299597 - RNA, 19 nt, Artificial Sequence
  Description of Artificial Sequence: Synthetic oligonucleotide
uuggcccguuguggaaagc

SEQ ID NO: 299598 - RNA, 19 nt, Artificial Sequence
  Description of Artificial Sequence: Synthetic oligonucleotide
acacacacacacacacaua

SEQ ID NO: 299599 - RNA, 19 nt, Artificial Sequence
  Description of Artificial Sequence: Synthetic oligonucleotide
gcugucguucauguucuga

SEQ ID NO: 299600 - RNA, 19 nt, Artificial Sequence
  Description of Artificial Sequence: Synthetic oligonucleotide
uggccuugccugucucaua

SEQ ID NO: 299601 - RNA, 19 nt, Artificial Sequence
  Description of Artificial Sequence: Synthetic oligonucleotide
ccacaguuggcccguugug

SEQ ID NO: 299602 - RNA, 19 nt, Artificial Sequence
  Description of Artificial Sequence: Synthetic oligonucleotide
cguugauucuggccucuag

SEQ ID NO: 299603 - RNA, 19 nt, Artificial Sequence
  Description of Artificial Sequence: Synthetic oligonucleotide
ucuccgcaucaggaagaaa

SEQ ID NO: 299604 - RNA, 19 nt, Artificial Sequence
  Description of Artificial Sequence: Synthetic oligonucleotide
ccaggcaaguaggauacca

SEQ ID NO: 299605 - RNA, 19 nt, Artificial Sequence
  Description of Artificial Sequence: Synthetic oligonucleotide
ggcacagagcacacccgug

SEQ ID NO: 299606 - RNA, 19 nt, Artificial Sequence
  Description of Artificial Sequence: Synthetic oligonucleotide
ccagccgaacaaauccuga

SEQ ID NO: 299607 - RNA, 19 nt, Artificial Sequence
  Description of Artificial Sequence: Synthetic oligonucleotide
cucggcuauuguaggcuua

SEQ ID NO: 299608 - RNA, 19 nt, Artificial Sequence
  Description of Artificial Sequence: Synthetic oligonucleotide
ggcaugcgacagcugggac

SEQ ID NO: 299609 - RNA, 19 nt, Artificial Sequence
  Description of Artificial Sequence: Synthetic oligonucleotide
ggauaccccaggggcuagg

SEQ ID NO: 299610 - RNA, 19 nt, Artificial Sequence
  Description of Artificial Sequence: Synthetic oligonucleotide
ccgaggccuugucuuauug

SEQ ID NO: 299611 - RNA, 19 nt, Artificial Sequence
  Description of Artificial Sequence: Synthetic oligonucleotide
acgucaggcagggcacaga

SEQ ID NO: 299612 - RNA, 19 nt, Artificial Sequence
  Description of Artificial Sequence: Synthetic oligonucleotide
cguuguggaaagcuccuga

SEQ ID NO: 299613 - RNA, 19 nt, Artificial Sequence
  Description of Artificial Sequence: Synthetic oligonucleotide
cacucugugcccacagcau

SEQ ID NO: 299614 - RNA, 19 nt, Artificial Sequence
  Description of Artificial Sequence: Synthetic oligonucleotide
acccaguagugggccuguc

SEQ ID NO: 299615 - RNA, 19 nt, Artificial Sequence
  Description of Artificial Sequence: Synthetic oligonucleotide
ggaaagcuccugaggggca

SEQ ID NO: 299616 - RNA, 19 nt, Artificial Sequence
  Description of Artificial Sequence: Synthetic oligonucleotide
ccucuccgcaucaggaaga

SEQ ID NO: 299617 - RNA, 19 nt, Artificial Sequence
  Description of Artificial Sequence: Synthetic oligonucleotide
ccgugcuaccccugagggc

SEQ ID NO: 299618 - RNA, 19 nt, Artificial Sequence
  Description of Artificial Sequence: Synthetic oligonucleotide
cgucgcaguuccuucagga

SEQ ID NO: 299619 - RNA, 19 nt, Artificial Sequence
  Description of Artificial Sequence: Synthetic oligonucleotide
ccggggccgucucagaguc

SEQ ID NO: 299620 - RNA, 19 nt, Artificial Sequence
  Description of Artificial Sequence: Synthetic oligonucleotide
caacagugucggggaggag

SEQ ID NO: 299621 - RNA, 19 nt, Artificial Sequence
  Description of Artificial Sequence: Synthetic oligonucleotide
gggaugucccaagcggguc

SEQ ID NO: 299622 - RNA, 19 nt, Artificial Sequence
  Description of Artificial Sequence: Synthetic oligonucleotide
cccguguuggcagcaggag

SEQ ID NO: 299623 - RNA, 19 nt, Artificial Sequence
  Description of Artificial Sequence: Synthetic oligonucleotide
cgcauaagaaggcuggccu

SEQ ID NO: 299624 - RNA, 19 nt, Artificial Sequence
  Description of Artificial Sequence: Synthetic oligonucleotide
gcggguuuggcaguugugu

SEQ ID NO: 299625 - RNA, 19 nt, Artificial Sequence
  Description of Artificial Sequence: Synthetic oligonucleotide
ggcggguuuggcaguugug

SEQ ID NO: 299626 - RNA, 19 nt, Artificial Sequence
  Description of Artificial Sequence: Synthetic oligonucleotide
gucccgaguuggcaugagu

SEQ ID NO: 299627 - RNA, 19 nt, Artificial Sequence
  Description of Artificial Sequence: Synthetic oligonucleotide
cccaaacucggcggguuug

SEQ ID NO: 299628 - RNA, 19 nt, Artificial Sequence
  Description of Artificial Sequence: Synthetic oligonucleotide
ggacacgguuuagaucaca

SEQ ID NO: 299629 - RNA, 19 nt, Artificial Sequence
  Description of Artificial Sequence: Synthetic oligonucleotide
cugggacaguacccaaacu

SEQ ID NO: 299630 - RNA, 19 nt, Artificial Sequence
  Description of Artificial Sequence: Synthetic oligonucleotide
gcauaagaaggcuggccuu

SEQ ID NO: 299631 - RNA, 19 nt, Artificial Sequence
  Description of Artificial Sequence: Synthetic oligonucleotide
aggccccagccgaacaaau

SEQ ID NO: 299632 - RNA, 19 nt, Artificial Sequence
  Description of Artificial Sequence: Synthetic oligonucleotide
ccgcagcuaccucuucccc

SEQ ID NO: 299633 - RNA, 19 nt, Artificial Sequence
  Description of Artificial Sequence: Synthetic oligonucleotide
cgugcuaccccugagggcu

SEQ ID NO: 299634 - RNA, 19 nt, Artificial Sequence
  Description of Artificial Sequence: Synthetic oligonucleotide
gucccaagcgggucaguuu

SEQ ID NO: 299635 - RNA, 19 nt, Artificial Sequence
  Description of Artificial Sequence: Synthetic oligonucleotide
gugucggggaggaggugaa

SEQ ID NO: 299636 - RNA, 19 nt, Artificial Sequence
  Description of Artificial Sequence: Synthetic oligonucleotide
guuggcggggccccguguu

SEQ ID NO: 299637 - RNA, 19 nt, Artificial Sequence
  Description of Artificial Sequence: Synthetic oligonucleotide
guacccaaacucggcgggu

SEQ ID NO: 299638 - RNA, 19 nt, Artificial Sequence
  Description of Artificial Sequence: Synthetic oligonucleotide
gacccguguaugacucgcu

SEQ ID NO: 299639 - RNA, 19 nt, Artificial Sequence
  Description of Artificial Sequence: Synthetic oligonucleotide
cagugucggggaggaggug

SEQ ID NO: 299640 - RNA, 19 nt, Artificial Sequence
  Description of Artificial Sequence: Synthetic oligonucleotide
aggguuggcggggccccgu

SEQ ID NO: 299641 - RNA, 19 nt, Artificial Sequence
  Description of Artificial Sequence: Synthetic oligonucleotide
cuguggugggacccauacu

SEQ ID NO: 299642 - RNA, 19 nt, Artificial Sequence
  Description of Artificial Sequence: Synthetic oligonucleotide
gggacacgggguuuagcau

SEQ ID NO: 299643 - RNA, 19 nt, Artificial Sequence
  Description of Artificial Sequence: Synthetic oligonucleotide
cgcggaagaugguuuauua

SEQ ID NO: 299644 - RNA, 19 nt, Artificial Sequence
  Description of Artificial Sequence: Synthetic oligonucleotide
gccgcgugcuggaagagua

SEQ ID NO: 299645 - RNA, 19 nt, Artificial Sequence
  Description of Artificial Sequence: Synthetic oligonucleotide
aggugaaggugggccucaa

SEQ ID NO: 299646 - RNA, 19 nt, Artificial Sequence
  Description of Artificial Sequence: Synthetic oligonucleotide
gguggacguguaauccgaa

SEQ ID NO: 299647 - RNA, 19 nt, Artificial Sequence
  Description of Artificial Sequence: Synthetic oligonucleotide
ggguuggcggggccccgug

SEQ ID NO: 299648 - RNA, 19 nt, Artificial Sequence
  Description of Artificial Sequence: Synthetic oligonucleotide
gcccacaguuggcccguug

SEQ ID NO: 299649 - RNA, 19 nt, Artificial Sequence
  Description of Artificial Sequence: Synthetic oligonucleotide
ggcgcugcccgggcgggcc

SEQ ID NO: 299650 - RNA, 19 nt, Artificial Sequence
  Description of Artificial Sequence: Synthetic oligonucleotide
gccucggcuauuguaggcu

SEQ ID NO: 299651 - RNA, 19 nt, Artificial Sequence
  Description of Artificial Sequence: Synthetic oligonucleotide
ggaggcccgugcuaccccu

SEQ ID NO: 299652 - RNA, 19 nt, Artificial Sequence
  Description of Artificial Sequence: Synthetic oligonucleotide
cccacaguuggcccguugu

SEQ ID NO: 299653 - RNA, 19 nt, Artificial Sequence
  Description of Artificial Sequence: Synthetic oligonucleotide
ccgaacccugcugccuccg

SEQ ID NO: 299654 - RNA, 19 nt, Artificial Sequence
  Description of Artificial Sequence: Synthetic oligonucleotide
gcgugcuggaagaguaucu

SEQ ID NO: 299655 - RNA, 19 nt, Artificial Sequence
  Description of Artificial Sequence: Synthetic oligonucleotide
cccguguaugacucgcugu

SEQ ID NO: 299656 - RNA, 19 nt, Artificial Sequence
  Description of Artificial Sequence: Synthetic oligonucleotide
gccaggcaaguaggauacc

SEQ ID NO: 299657 - RNA, 19 nt, Artificial Sequence
  Description of Artificial Sequence: Synthetic oligonucleotide
cacccauccaugggguuau

SEQ ID NO: 299658 - RNA, 19 nt, Artificial Sequence
  Description of Artificial Sequence: Synthetic oligonucleotide
cacgguuccgaggccuugu

SEQ ID NO: 299659 - RNA, 19 nt, Artificial Sequence
  Description of Artificial Sequence: Synthetic oligonucleotide
cucacgguuccgaggccuu

SEQ ID NO: 299660 - RNA, 19 nt, Artificial Sequence
  Description of Artificial Sequence: Synthetic oligonucleotide
ccacgcggaagaugguuua

SEQ ID NO: 299661 - RNA, 19 nt, Artificial Sequence
  Description of Artificial Sequence: Synthetic oligonucleotide
cgcgugcuggaagaguauc

SEQ ID NO: 299662 - RNA, 19 nt, Artificial Sequence
  Description of Artificial Sequence: Synthetic oligonucleotide
cggcuauuguaggcuuacg

SEQ ID NO: 299663 - RNA, 19 nt, Artificial Sequence
  Description of Artificial Sequence: Synthetic oligonucleotide
gugcuaccccugagggcuc

SEQ ID NO: 299664 - RNA, 19 nt, Artificial Sequence
  Description of Artificial Sequence: Synthetic oligonucleotide
gucccucguucgccaucga

SEQ ID NO: 299665 - RNA, 19 nt, Artificial Sequence
  Description of Artificial Sequence: Synthetic oligonucleotide
ccugucucauagguuaaau

SEQ ID NO: 299666 - RNA, 19 nt, Artificial Sequence
  Description of Artificial Sequence: Synthetic oligonucleotide
ccccagccgaacaaauccu

SEQ ID NO: 299667 - RNA, 19 nt, Artificial Sequence
  Description of Artificial Sequence: Synthetic oligonucleotide
gguucacgcuaggguccac

SEQ ID NO: 299668 - RNA, 19 nt, Artificial Sequence
  Description of Artificial Sequence: Synthetic oligonucleotide
gccggggccgucucagagu

SEQ ID NO: 299669 - RNA, 19 nt, Artificial Sequence
  Description of Artificial Sequence: Synthetic oligonucleotide
gccacgcggaagaugguuu

SEQ ID NO: 299670 - RNA, 19 nt, Artificial Sequence
  Description of Artificial Sequence: Synthetic oligonucleotide
cugccacgcggaagauggu

SEQ ID NO: 299671 - RNA, 19 nt, Artificial Sequence
  Description of Artificial Sequence: Synthetic oligonucleotide
cucgggccucggcuauugu

SEQ ID NO: 299672 - RNA, 19 nt, Artificial Sequence
  Description of Artificial Sequence: Synthetic oligonucleotide
ggcuuacggcuggugcugu

SEQ ID NO: 299673 - RNA, 19 nt, Artificial Sequence
  Description of Artificial Sequence: Synthetic oligonucleotide
ccucggcuauuguaggcuu

SEQ ID NO: 299674 - RNA, 19 nt, Artificial Sequence
  Description of Artificial Sequence: Synthetic oligonucleotide
gcugaucgauuggcuggcu

SEQ ID NO: 299675 - RNA, 19 nt, Artificial Sequence
  Description of Artificial Sequence: Synthetic oligonucleotide
cccgggcgggcccuacuga

SEQ ID NO: 299676 - RNA, 19 nt, Artificial Sequence
  Description of Artificial Sequence: Synthetic oligonucleotide
cucccgcggccuguauucu

SEQ ID NO: 299677 - RNA, 19 nt, Artificial Sequence
  Description of Artificial Sequence: Synthetic oligonucleotide
cgaggacggcaggggacac

SEQ ID NO: 299678 - RNA, 19 nt, Artificial Sequence
  Description of Artificial Sequence: Synthetic oligonucleotide
cucggcggguuuggcaguu

SEQ ID NO: 299679 - RNA, 19 nt, Artificial Sequence
  Description of Artificial Sequence: Synthetic oligonucleotide
gcggggccccguguuggca

SEQ ID NO: 299680 - RNA, 19 nt, Artificial Sequence
  Description of Artificial Sequence: Synthetic oligonucleotide
cgugccagcuuggucgaua

SEQ ID NO: 299681 - RNA, 19 nt, Artificial Sequence
  Description of Artificial Sequence: Synthetic oligonucleotide
cggguuuggcaguuguguu

SEQ ID NO: 299682 - RNA, 19 nt, Artificial Sequence
  Description of Artificial Sequence: Synthetic oligonucleotide
ccucacagcugucguucau

SEQ ID NO: 299683 - RNA, 19 nt, Artificial Sequence
  Description of Artificial Sequence: Synthetic oligonucleotide
gguagccauugagcucaau

SEQ ID NO: 299684 - RNA, 19 nt, Artificial Sequence
  Description of Artificial Sequence: Synthetic oligonucleotide
cgguuccgaggccuugucu

SEQ ID NO: 299685 - RNA, 19 nt, Artificial Sequence
  Description of Artificial Sequence: Synthetic oligonucleotide
gcggucccucguucgccau

SEQ ID NO: 299686 - RNA, 19 nt, Artificial Sequence
  Description of Artificial Sequence: Synthetic oligonucleotide
cggcggguuuggcaguugu

SEQ ID NO: 299687 - RNA, 19 nt, Artificial Sequence
  Description of Artificial Sequence: Synthetic oligonucleotide
cguaaacaucaggggaguu

SEQ ID NO: 299688 - RNA, 19 nt, Artificial Sequence
  Description of Artificial Sequence: Synthetic oligonucleotide
ggacggcaggggacacggu

SEQ ID NO: 299689 - RNA, 19 nt, Artificial Sequence
  Description of Artificial Sequence: Synthetic oligonucleotide
gggccgucucagagucacu

SEQ ID NO: 299690 - RNA, 19 nt, Artificial Sequence
  Description of Artificial Sequence: Synthetic oligonucleotide
gcgggcucuuuggcuuagu

SEQ ID NO: 299691 - RNA, 19 nt, Artificial Sequence
  Description of Artificial Sequence: Synthetic oligonucleotide
cgccgcgugcuggaagagu

SEQ ID NO: 299692 - RNA, 19 nt, Artificial Sequence
  Description of Artificial Sequence: Synthetic oligonucleotide
ccgugccagcuuggucgau

SEQ ID NO: 299693 - RNA, 19 nt, Artificial Sequence
  Description of Artificial Sequence: Synthetic oligonucleotide
aauuaguacaauuagacuc

SEQ ID NO: 299694 - RNA, 19 nt, Artificial Sequence
  Description of Artificial Sequence: Synthetic oligonucleotide
aaaucuaccucuuagcagc

SEQ ID NO: 299695 - RNA, 19 nt, Artificial Sequence
  Description of Artificial Sequence: Synthetic oligonucleotide
aauacuuucaaguuccaag

SEQ ID NO: 299696 - RNA, 19 nt, Artificial Sequence
  Description of Artificial Sequence: Synthetic oligonucleotide
cuacuauuuaaauugaugc

SEQ ID NO: 299697 - RNA, 19 nt, Artificial Sequence
  Description of Artificial Sequence: Synthetic oligonucleotide
ugaaauacuuucaaguucc

SEQ ID NO: 299698 - RNA, 19 nt, Artificial Sequence
  Description of Artificial Sequence: Synthetic oligonucleotide
aaaucggcaaccuagauaa

SEQ ID NO: 299699 - RNA, 19 nt, Artificial Sequence
  Description of Artificial Sequence: Synthetic oligonucleotide
ucaauuaguacaauuagac

SEQ ID NO: 299700 - RNA, 19 nt, Artificial Sequence
  Description of Artificial Sequence: Synthetic oligonucleotide
aauacacucaggcaacucg

SEQ ID NO: 299701 - RNA, 19 nt, Artificial Sequence
  Description of Artificial Sequence: Synthetic oligonucleotide
uuuaauacucuuuguauag

SEQ ID NO: 299702 - RNA, 19 nt, Artificial Sequence
  Description of Artificial Sequence: Synthetic oligonucleotide
uguguauuaccucaaaaug

SEQ ID NO: 299703 - RNA, 19 nt, Artificial Sequence
  Description of Artificial Sequence: Synthetic oligonucleotide
uaaccguggaauaagacag

SEQ ID NO: 299704 - RNA, 19 nt, Artificial Sequence
  Description of Artificial Sequence: Synthetic oligonucleotide
uuaggaacaaauacaaucu

SEQ ID NO: 299705 - RNA, 19 nt, Artificial Sequence
  Description of Artificial Sequence: Synthetic oligonucleotide
uuuuagaacaggaacucag

SEQ ID NO: 299706 - RNA, 19 nt, Artificial Sequence
  Description of Artificial Sequence: Synthetic oligonucleotide
aacuaucccacauaaaacu

SEQ ID NO: 299707 - RNA, 19 nt, Artificial Sequence
  Description of Artificial Sequence: Synthetic oligonucleotide
uguauuaccucaaaaugug

SEQ ID NO: 299708 - RNA, 19 nt, Artificial Sequence
  Description of Artificial Sequence: Synthetic oligonucleotide
uacuauuuaaauugaugcg

SEQ ID NO: 299709 - RNA, 19 nt, Artificial Sequence
  Description of Artificial Sequence: Synthetic oligonucleotide
aauauaggucagcagaucu

SEQ ID NO: 299710 - RNA, 19 nt, Artificial Sequence
  Description of Artificial Sequence: Synthetic oligonucleotide
ucauccaaaauuaugcaug

SEQ ID NO: 299711 - RNA, 19 nt, Artificial Sequence
  Description of Artificial Sequence: Synthetic oligonucleotide
agaaguauauauaaugugg

SEQ ID NO: 299712 - RNA, 19 nt, Artificial Sequence
  Description of Artificial Sequence: Synthetic oligonucleotide
auaacuaucccacauaaaa

SEQ ID NO: 299713 - RNA, 19 nt, Artificial Sequence
  Description of Artificial Sequence: Synthetic oligonucleotide
aauguggcaugguuagucc

SEQ ID NO: 299714 - RNA, 19 nt, Artificial Sequence
  Description of Artificial Sequence: Synthetic oligonucleotide
ucucaauuaguacaauuag

SEQ ID NO: 299715 - RNA, 19 nt, Artificial Sequence
  Description of Artificial Sequence: Synthetic oligonucleotide
auuaguacaauuagacucc

SEQ ID NO: 299716 - RNA, 19 nt, Artificial Sequence
  Description of Artificial Sequence: Synthetic oligonucleotide
agaauguucaaauguauug

SEQ ID NO: 299717 - RNA, 19 nt, Artificial Sequence
  Description of Artificial Sequence: Synthetic oligonucleotide
gacgaaauuagaguaacgg

SEQ ID NO: 299718 - RNA, 19 nt, Artificial Sequence
  Description of Artificial Sequence: Synthetic oligonucleotide
augaaauacuuucaaguuc

SEQ ID NO: 299719 - RNA, 19 nt, Artificial Sequence
  Description of Artificial Sequence: Synthetic oligonucleotide
uuuagaacaggaacucagg

SEQ ID NO: 299720 - RNA, 19 nt, Artificial Sequence
  Description of Artificial Sequence: Synthetic oligonucleotide
gacgauaguacauaauccc

SEQ ID NO: 299721 - RNA, 19 nt, Artificial Sequence
  Description of Artificial Sequence: Synthetic oligonucleotide
ucuacucaaucgaaggacg

SEQ ID NO: 299722 - RNA, 19 nt, Artificial Sequence
  Description of Artificial Sequence: Synthetic oligonucleotide
gacucagcuacucuuacgg

SEQ ID NO: 299723 - RNA, 19 nt, Artificial Sequence
  Description of Artificial Sequence: Synthetic oligonucleotide
aaaauuaugcauggaucac

SEQ ID NO: 299724 - RNA, 19 nt, Artificial Sequence
  Description of Artificial Sequence: Synthetic oligonucleotide
aauacaaucucaauuagua

SEQ ID NO: 299725 - RNA, 19 nt, Artificial Sequence
  Description of Artificial Sequence: Synthetic oligonucleotide
aaaagaauacuguacccaa

SEQ ID NO: 299726 - RNA, 19 nt, Artificial Sequence
  Description of Artificial Sequence: Synthetic oligonucleotide
uagaaguauauauaaugug

SEQ ID NO: 299727 - RNA, 19 nt, Artificial Sequence
  Description of Artificial Sequence: Synthetic oligonucleotide
uguauugcuacuauuuaaa

SEQ ID NO: 299728 - RNA, 19 nt, Artificial Sequence
  Description of Artificial Sequence: Synthetic oligonucleotide
aagaaugcagggaagguuc

SEQ ID NO: 299729 - RNA, 19 nt, Artificial Sequence
  Description of Artificial Sequence: Synthetic oligonucleotide
ucgaaggacgaaauuagag

SEQ ID NO: 299730 - RNA, 19 nt, Artificial Sequence
  Description of Artificial Sequence: Synthetic oligonucleotide
uagauaacuccucuugucc

SEQ ID NO: 299731 - RNA, 19 nt, Artificial Sequence
  Description of Artificial Sequence: Synthetic oligonucleotide
guauauauaauguggcaug

SEQ ID NO: 299732 - RNA, 19 nt, Artificial Sequence
  Description of Artificial Sequence: Synthetic oligonucleotide
ugacgauaguacauaaucc

SEQ ID NO: 299733 - RNA, 19 nt, Artificial Sequence
  Description of Artificial Sequence: Synthetic oligonucleotide
uauuaccucaaaaugugac

SEQ ID NO: 299734 - RNA, 19 nt, Artificial Sequence
  Description of Artificial Sequence: Synthetic oligonucleotide
gaaaucuaccucuuagcag

SEQ ID NO: 299735 - RNA, 19 nt, Artificial Sequence
  Description of Artificial Sequence: Synthetic oligonucleotide
caaacagcguguuuguugg

SEQ ID NO: 299736 - RNA, 19 nt, Artificial Sequence
  Description of Artificial Sequence: Synthetic oligonucleotide
aaacagggaauggauaccg

SEQ ID NO: 299737 - RNA, 19 nt, Artificial Sequence
  Description of Artificial Sequence: Synthetic oligonucleotide
auacaaucucaauuaguac

SEQ ID NO: 299738 - RNA, 19 nt, Artificial Sequence
  Description of Artificial Sequence: Synthetic oligonucleotide
uccuagcuaaucaaaaugu

SEQ ID NO: 299739 - RNA, 19 nt, Artificial Sequence
  Description of Artificial Sequence: Synthetic oligonucleotide
uguuuguuggcuuuuaaua

SEQ ID NO: 299740 - RNA, 19 nt, Artificial Sequence
  Description of Artificial Sequence: Synthetic oligonucleotide
acaauuagacuccagaguu

SEQ ID NO: 299741 - RNA, 19 nt, Artificial Sequence
  Description of Artificial Sequence: Synthetic oligonucleotide
acuauuuaaauugaugcgu

SEQ ID NO: 299742 - RNA, 19 nt, Artificial Sequence
  Description of Artificial Sequence: Synthetic oligonucleotide
uggaucacaaauaacuauc

SEQ ID NO: 299743 - RNA, 19 nt, Artificial Sequence
  Description of Artificial Sequence: Synthetic oligonucleotide
aaucgaaggacgaaauuag

SEQ ID NO: 299744 - RNA, 19 nt, Artificial Sequence
  Description of Artificial Sequence: Synthetic oligonucleotide
agaugcaguacaaacaggg

SEQ ID NO: 299745 - RNA, 19 nt, Artificial Sequence
  Description of Artificial Sequence: Synthetic oligonucleotide
auuagaguaacggauggag

SEQ ID NO: 299746 - RNA, 19 nt, Artificial Sequence
  Description of Artificial Sequence: Synthetic oligonucleotide
cauccugguagcauuaucc

SEQ ID NO: 299747 - RNA, 19 nt, Artificial Sequence
  Description of Artificial Sequence: Synthetic oligonucleotide
gaugcgugaaauuauaugu

SEQ ID NO: 299748 - RNA, 19 nt, Artificial Sequence
  Description of Artificial Sequence: Synthetic oligonucleotide
uagaguaacggauggagcu

SEQ ID NO: 299749 - RNA, 19 nt, Artificial Sequence
  Description of Artificial Sequence: Synthetic oligonucleotide
aauguguauuaccucaaaa

SEQ ID NO: 299750 - RNA, 19 nt, Artificial Sequence
  Description of Artificial Sequence: Synthetic oligonucleotide
aaucggucucuacucaauc

SEQ ID NO: 299751 - RNA, 19 nt, Artificial Sequence
  Description of Artificial Sequence: Synthetic oligonucleotide
aacggauggagcuaacacu

SEQ ID NO: 299752 - RNA, 19 nt, Artificial Sequence
  Description of Artificial Sequence: Synthetic oligonucleotide
uaacuaucccacauaaaac

SEQ ID NO: 299753 - RNA, 19 nt, Artificial Sequence
  Description of Artificial Sequence: Synthetic oligonucleotide
uuuaaaggggagagcaggc

SEQ ID NO: 299754 - RNA, 19 nt, Artificial Sequence
  Description of Artificial Sequence: Synthetic oligonucleotide
ugaugcgugaaauuauaug

SEQ ID NO: 299755 - RNA, 19 nt, Artificial Sequence
  Description of Artificial Sequence: Synthetic oligonucleotide
uuaaaugcaucauuagcau

SEQ ID NO: 299756 - RNA, 19 nt, Artificial Sequence
  Description of Artificial Sequence: Synthetic oligonucleotide
ugcgugaaauuauaugugc

SEQ ID NO: 299757 - RNA, 19 nt, Artificial Sequence
  Description of Artificial Sequence: Synthetic oligonucleotide
uuagaguaacggauggagc

SEQ ID NO: 299758 - RNA, 19 nt, Artificial Sequence
  Description of Artificial Sequence: Synthetic oligonucleotide
uuaaauugaugcgugaaau

SEQ ID NO: 299759 - RNA, 19 nt, Artificial Sequence
  Description of Artificial Sequence: Synthetic oligonucleotide
auguguauuaccucaaaau

SEQ ID NO: 299760 - RNA, 19 nt, Artificial Sequence
  Description of Artificial Sequence: Synthetic oligonucleotide
gugacgauaguacauaauc

SEQ ID NO: 299761 - RNA, 19 nt, Artificial Sequence
  Description of Artificial Sequence: Synthetic oligonucleotide
acgaaagaaaucggcaacc

SEQ ID NO: 299762 - RNA, 19 nt, Artificial Sequence
  Description of Artificial Sequence: Synthetic oligonucleotide
auaagacagaggaauauag

SEQ ID NO: 299763 - RNA, 19 nt, Artificial Sequence
  Description of Artificial Sequence: Synthetic oligonucleotide
aaucucaauuaguacaauu

SEQ ID NO: 299764 - RNA, 19 nt, Artificial Sequence
  Description of Artificial Sequence: Synthetic oligonucleotide
aaauuaugcauggaucaca

SEQ ID NO: 299765 - RNA, 19 nt, Artificial Sequence
  Description of Artificial Sequence: Synthetic oligonucleotide
ugggaaucauccaaaauua

SEQ ID NO: 299766 - RNA, 19 nt, Artificial Sequence
  Description of Artificial Sequence: Synthetic oligonucleotide
uccgcugccagcaaagggc

SEQ ID NO: 299767 - RNA, 19 nt, Artificial Sequence
  Description of Artificial Sequence: Synthetic oligonucleotide
guagguaguagccucccgg

SEQ ID NO: 299768 - RNA, 19 nt, Artificial Sequence
  Description of Artificial Sequence: Synthetic oligonucleotide
uuauguuaaaugggaauca

SEQ ID NO: 299769 - RNA, 19 nt, Artificial Sequence
  Description of Artificial Sequence: Synthetic oligonucleotide
uaacggauggagcuaacac

SEQ ID NO: 299770 - RNA, 19 nt, Artificial Sequence
  Description of Artificial Sequence: Synthetic oligonucleotide
caaagcgaagaaugcaggg

SEQ ID NO: 299771 - RNA, 19 nt, Artificial Sequence
  Description of Artificial Sequence: Synthetic oligonucleotide
acgaaauuagaguaacgga

SEQ ID NO: 299772 - RNA, 19 nt, Artificial Sequence
  Description of Artificial Sequence: Synthetic oligonucleotide
uuuguauagaauguucaaa

SEQ ID NO: 299773 - RNA, 19 nt, Artificial Sequence
  Description of Artificial Sequence: Synthetic oligonucleotide
agcauuauccugcaguuaa

SEQ ID NO: 299774 - RNA, 19 nt, Artificial Sequence
  Description of Artificial Sequence: Synthetic oligonucleotide
aacaccacgagaaaucggu

SEQ ID NO: 299775 - RNA, 19 nt, Artificial Sequence
  Description of Artificial Sequence: Synthetic oligonucleotide
accuuuguuagcuacaguu

SEQ ID NO: 299776 - RNA, 19 nt, Artificial Sequence
  Description of Artificial Sequence: Synthetic oligonucleotide
ucccacauaaaacuuucac

SEQ ID NO: 299777 - RNA, 19 nt, Artificial Sequence
  Description of Artificial Sequence: Synthetic oligonucleotide
cugaaucagauaaccgugg

SEQ ID NO: 299778 - RNA, 19 nt, Artificial Sequence
  Description of Artificial Sequence: Synthetic oligonucleotide
uaccuacagaagcugaccc

SEQ ID NO: 299779 - RNA, 19 nt, Artificial Sequence
  Description of Artificial Sequence: Synthetic oligonucleotide
accuagauaacuccucuug

SEQ ID NO: 299780 - RNA, 19 nt, Artificial Sequence
  Description of Artificial Sequence: Synthetic oligonucleotide
uggguguucagcccgaccu

SEQ ID NO: 299781 - RNA, 19 nt, Artificial Sequence
  Description of Artificial Sequence: Synthetic oligonucleotide
agaaaugccaaagaacaga

SEQ ID NO: 299782 - RNA, 19 nt, Artificial Sequence
  Description of Artificial Sequence: Synthetic oligonucleotide
aucggucucuacucaaucg

SEQ ID NO: 299783 - RNA, 19 nt, Artificial Sequence
  Description of Artificial Sequence: Synthetic oligonucleotide
gagaaaucggucucuacuc

SEQ ID NO: 299784 - RNA, 19 nt, Artificial Sequence
  Description of Artificial Sequence: Synthetic oligonucleotide
ucuaccucuuagcagcuac

SEQ ID NO: 299785 - RNA, 19 nt, Artificial Sequence
  Description of Artificial Sequence: Synthetic oligonucleotide
aaugggaaucauccaaaau

SEQ ID NO: 299786 - RNA, 19 nt, Artificial Sequence
  Description of Artificial Sequence: Synthetic oligonucleotide
guccuagcuaaucaaaaug

SEQ ID NO: 299787 - RNA, 19 nt, Artificial Sequence
  Description of Artificial Sequence: Synthetic oligonucleotide
uuccaagugaagaauuuau

SEQ ID NO: 299788 - RNA, 19 nt, Artificial Sequence
  Description of Artificial Sequence: Synthetic oligonucleotide
uaucccacauaaaacuuuc

SEQ ID NO: 299789 - RNA, 19 nt, Artificial Sequence
  Description of Artificial Sequence: Synthetic oligonucleotide
aaagcgaagaaugcaggga

SEQ ID NO: 299790 - RNA, 19 nt, Artificial Sequence
  Description of Artificial Sequence: Synthetic oligonucleotide
aggacgaaauuagaguaac

SEQ ID NO: 299791 - RNA, 19 nt, Artificial Sequence
  Description of Artificial Sequence: Synthetic oligonucleotide
uuaguccuagcuaaucaaa

SEQ ID NO: 299792 - RNA, 19 nt, Artificial Sequence
  Description of Artificial Sequence: Synthetic oligonucleotide
agguuaaaugcaucauuag

SEQ ID NO: 299793 - RNA, 19 nt, Artificial Sequence
  Description of Artificial Sequence: Synthetic oligonucleotide
gaguuuauguuaaauggga

SEQ ID NO: 299794 - RNA, 19 nt, Artificial Sequence
  Description of Artificial Sequence: Synthetic oligonucleotide
aagaaaugccaaagaacag

SEQ ID NO: 299795 - RNA, 19 nt, Artificial Sequence
  Description of Artificial Sequence: Synthetic oligonucleotide
aauuagacuccagaguuua

SEQ ID NO: 299796 - RNA, 19 nt, Artificial Sequence
  Description of Artificial Sequence: Synthetic oligonucleotide
accacgagaaaucggucuc

SEQ ID NO: 299797 - RNA, 19 nt, Artificial Sequence
  Description of Artificial Sequence: Synthetic oligonucleotide
ugccacgaaagaaaucggc

SEQ ID NO: 299798 - RNA, 19 nt, Artificial Sequence
  Description of Artificial Sequence: Synthetic oligonucleotide
uagaauguucaaauguauu

SEQ ID NO: 299799 - RNA, 19 nt, Artificial Sequence
  Description of Artificial Sequence: Synthetic oligonucleotide
ucggucucuacucaaucga

SEQ ID NO: 299800 - RNA, 19 nt, Artificial Sequence
  Description of Artificial Sequence: Synthetic oligonucleotide
cuagauaacuccucuuguc

SEQ ID NO: 299801 - RNA, 19 nt, Artificial Sequence
  Description of Artificial Sequence: Synthetic oligonucleotide
aauuaugcauggaucacaa

SEQ ID NO: 299802 - RNA, 19 nt, Artificial Sequence
  Description of Artificial Sequence: Synthetic oligonucleotide
cacugagugacgauaguac

SEQ ID NO: 299803 - RNA, 19 nt, Artificial Sequence
  Description of Artificial Sequence: Synthetic oligonucleotide
acgauaguacauaaucccg

SEQ ID NO: 299804 - RNA, 19 nt, Artificial Sequence
  Description of Artificial Sequence: Synthetic oligonucleotide
agauaacuccucuuguccu

SEQ ID NO: 299805 - RNA, 19 nt, Artificial Sequence
  Description of Artificial Sequence: Synthetic oligonucleotide
auggaucacaaauaacuau

SEQ ID NO: 299806 - RNA, 19 nt, Artificial Sequence
  Description of Artificial Sequence: Synthetic oligonucleotide
acucagcuacucuuacggc

SEQ ID NO: 299807 - RNA, 19 nt, Artificial Sequence
  Description of Artificial Sequence: Synthetic oligonucleotide
aaauguguauuaccucaaa

SEQ ID NO: 299808 - RNA, 19 nt, Artificial Sequence
  Description of Artificial Sequence: Synthetic oligonucleotide
ugcucugaauacacucagg

SEQ ID NO: 299809 - RNA, 19 nt, Artificial Sequence
  Description of Artificial Sequence: Synthetic oligonucleotide
agcuuuuagaacaggaacu

SEQ ID NO: 299810 - RNA, 19 nt, Artificial Sequence
  Description of Artificial Sequence: Synthetic oligonucleotide
ccugccacgaaagaaaucg

SEQ ID NO: 299811 - RNA, 19 nt, Artificial Sequence
  Description of Artificial Sequence: Synthetic oligonucleotide
agaauacuguacccaaaca

SEQ ID NO: 299812 - RNA, 19 nt, Artificial Sequence
  Description of Artificial Sequence: Synthetic oligonucleotide
uaaauugaugcgugaaauu

SEQ ID NO: 299813 - RNA, 19 nt, Artificial Sequence
  Description of Artificial Sequence: Synthetic oligonucleotide
uugcuacuauuuaaauuga

SEQ ID NO: 299814 - RNA, 19 nt, Artificial Sequence
  Description of Artificial Sequence: Synthetic oligonucleotide
uaguccuagcuaaucaaaa

SEQ ID NO: 299815 - RNA, 19 nt, Artificial Sequence
  Description of Artificial Sequence: Synthetic oligonucleotide
uuaauacucuuuguauaga

SEQ ID NO: 299816 - RNA, 19 nt, Artificial Sequence
  Description of Artificial Sequence: Synthetic oligonucleotide
aauugaugcgugaaauuau

SEQ ID NO: 299817 - RNA, 19 nt, Artificial Sequence
  Description of Artificial Sequence: Synthetic oligonucleotide
aauuagaguaacggaugga

SEQ ID NO: 299818 - RNA, 19 nt, Artificial Sequence
  Description of Artificial Sequence: Synthetic oligonucleotide
caugguuaguccuagcuaa

SEQ ID NO: 299819 - RNA, 19 nt, Artificial Sequence
  Description of Artificial Sequence: Synthetic oligonucleotide
aagaugcaguacaaacagg

SEQ ID NO: 299820 - RNA, 19 nt, Artificial Sequence
  Description of Artificial Sequence: Synthetic oligonucleotide
gagaauacagccuuguguu

SEQ ID NO: 299821 - RNA, 19 nt, Artificial Sequence
  Description of Artificial Sequence: Synthetic oligonucleotide
agaggaauauaggucagca

SEQ ID NO: 299822 - RNA, 19 nt, Artificial Sequence
  Description of Artificial Sequence: Synthetic oligonucleotide
acucuuacggcucccgucu

SEQ ID NO: 299823 - RNA, 19 nt, Artificial Sequence
  Description of Artificial Sequence: Synthetic oligonucleotide
ucaccuuuguuagcuacag

SEQ ID NO: 299824 - RNA, 19 nt, Artificial Sequence
  Description of Artificial Sequence: Synthetic oligonucleotide
agaaaucggucucuacuca

SEQ ID NO: 299825 - RNA, 19 nt, Artificial Sequence
  Description of Artificial Sequence: Synthetic oligonucleotide
cacgaaagaaaucggcaac

SEQ ID NO: 299826 - RNA, 19 nt, Artificial Sequence
  Description of Artificial Sequence: Synthetic oligonucleotide
cucgaugccugcaggagag

SEQ ID NO: 299827 - RNA, 19 nt, Artificial Sequence
  Description of Artificial Sequence: Synthetic oligonucleotide
uccugcaguuaacagaaua

SEQ ID NO: 299828 - RNA, 19 nt, Artificial Sequence
  Description of Artificial Sequence: Synthetic oligonucleotide
gaaaucggcaaccuagaua

SEQ ID NO: 299829 - RNA, 19 nt, Artificial Sequence
  Description of Artificial Sequence: Synthetic oligonucleotide
augcauggaucacaaauaa

SEQ ID NO: 299830 - RNA, 19 nt, Artificial Sequence
  Description of Artificial Sequence: Synthetic oligonucleotide
agacucagcuacucuuacg

SEQ ID NO: 299831 - RNA, 19 nt, Artificial Sequence
  Description of Artificial Sequence: Synthetic oligonucleotide
agguaguagccucccgggc

SEQ ID NO: 299832 - RNA, 19 nt, Artificial Sequence
  Description of Artificial Sequence: Synthetic oligonucleotide
cucuacucaaucgaaggac

SEQ ID NO: 299833 - RNA, 19 nt, Artificial Sequence
  Description of Artificial Sequence: Synthetic oligonucleotide
ccucagaccccuuuuaucc

SEQ ID NO: 299834 - RNA, 19 nt, Artificial Sequence
  Description of Artificial Sequence: Synthetic oligonucleotide
ccaaaauuaugcauggauc

SEQ ID NO: 299835 - RNA, 19 nt, Artificial Sequence
  Description of Artificial Sequence: Synthetic oligonucleotide
ucagaccccuuuuauccgc

SEQ ID NO: 299836 - RNA, 19 nt, Artificial Sequence
  Description of Artificial Sequence: Synthetic oligonucleotide
aacucgaugccugcaggag

SEQ ID NO: 299837 - RNA, 19 nt, Artificial Sequence
  Description of Artificial Sequence: Synthetic oligonucleotide
ccagaguuuauguuaaaug

SEQ ID NO: 299838 - RNA, 19 nt, Artificial Sequence
  Description of Artificial Sequence: Synthetic oligonucleotide
uggccugaaucagauaacc

SEQ ID NO: 299839 - RNA, 19 nt, Artificial Sequence
  Description of Artificial Sequence: Synthetic oligonucleotide
gauaaccguggaauaagac

SEQ ID NO: 299840 - RNA, 19 nt, Artificial Sequence
  Description of Artificial Sequence: Synthetic oligonucleotide
aucucaauuaguacaauua

SEQ ID NO: 299841 - RNA, 19 nt, Artificial Sequence
  Description of Artificial Sequence: Synthetic oligonucleotide
agaauacagccuuguguug

SEQ ID NO: 299842 - RNA, 19 nt, Artificial Sequence
  Description of Artificial Sequence: Synthetic oligonucleotide
uauguuaaaugggaaucau

SEQ ID NO: 299843 - RNA, 19 nt, Artificial Sequence
  Description of Artificial Sequence: Synthetic oligonucleotide
aagaaaucggcaaccuaga

SEQ ID NO: 299844 - RNA, 19 nt, Artificial Sequence
  Description of Artificial Sequence: Synthetic oligonucleotide
agaucugcuuuuauuagga

SEQ ID NO: 299845 - RNA, 19 nt, Artificial Sequence
  Description of Artificial Sequence: Synthetic oligonucleotide
cucagaccccuuuuauccg

SEQ ID NO: 299846 - RNA, 19 nt, Artificial Sequence
  Description of Artificial Sequence: Synthetic oligonucleotide
acgagaaaucggucucuac

SEQ ID NO: 299847 - RNA, 19 nt, Artificial Sequence
  Description of Artificial Sequence: Synthetic oligonucleotide
ucaaucgaaggacgaaauu

SEQ ID NO: 299848 - RNA, 19 nt, Artificial Sequence
  Description of Artificial Sequence: Synthetic oligonucleotide
ugcuacuauuuaaauugau

SEQ ID NO: 299849 - RNA, 19 nt, Artificial Sequence
  Description of Artificial Sequence: Synthetic oligonucleotide
auaggaugacgguguuugg

SEQ ID NO: 299850 - RNA, 19 nt, Artificial Sequence
  Description of Artificial Sequence: Synthetic oligonucleotide
auacuguacccaaacaggu

SEQ ID NO: 299851 - RNA, 19 nt, Artificial Sequence
  Description of Artificial Sequence: Synthetic oligonucleotide
guuaguccuagcuaaucaa

SEQ ID NO: 299852 - RNA, 19 nt, Artificial Sequence
  Description of Artificial Sequence: Synthetic oligonucleotide
guuuauguuaaaugggaau

SEQ ID NO: 299853 - RNA, 19 nt, Artificial Sequence
  Description of Artificial Sequence: Synthetic oligonucleotide
acagaagcugacccucaag

SEQ ID NO: 299854 - RNA, 19 nt, Artificial Sequence
  Description of Artificial Sequence: Synthetic oligonucleotide
augugaccaaagcuuucuc

SEQ ID NO: 299855 - RNA, 19 nt, Artificial Sequence
  Description of Artificial Sequence: Synthetic oligonucleotide
caaagggcaaagugcgcag

SEQ ID NO: 299856 - RNA, 19 nt, Artificial Sequence
  Description of Artificial Sequence: Synthetic oligonucleotide
agcccgaccugguugugcg

SEQ ID NO: 299857 - RNA, 19 nt, Artificial Sequence
  Description of Artificial Sequence: Synthetic oligonucleotide
ugagugacgauaguacaua

SEQ ID NO: 299858 - RNA, 19 nt, Artificial Sequence
  Description of Artificial Sequence: Synthetic oligonucleotide
caaacagggaauggauacc

SEQ ID NO: 299859 - RNA, 19 nt, Artificial Sequence
  Description of Artificial Sequence: Synthetic oligonucleotide
guaguagccucccgggcag

SEQ ID NO: 299860 - RNA, 19 nt, Artificial Sequence
  Description of Artificial Sequence: Synthetic oligonucleotide
uguuccgcgggaugggugu

SEQ ID NO: 299861 - RNA, 19 nt, Artificial Sequence
  Description of Artificial Sequence: Synthetic oligonucleotide
gaaucagauaaccguggaa

SEQ ID NO: 299862 - RNA, 19 nt, Artificial Sequence
  Description of Artificial Sequence: Synthetic oligonucleotide
uggugcgggcgauuggccg

SEQ ID NO: 299863 - RNA, 19 nt, Artificial Sequence
  Description of Artificial Sequence: Synthetic oligonucleotide
caagcuagccaaggaagcc

SEQ ID NO: 299864 - RNA, 19 nt, Artificial Sequence
  Description of Artificial Sequence: Synthetic oligonucleotide
uuaguacaauuagacucca

SEQ ID NO: 299865 - RNA, 19 nt, Artificial Sequence
  Description of Artificial Sequence: Synthetic oligonucleotide
ucuuacggcucccgucucc

SEQ ID NO: 299866 - RNA, 19 nt, Artificial Sequence
  Description of Artificial Sequence: Synthetic oligonucleotide
uaccgugcucaucaccuca

SEQ ID NO: 299867 - RNA, 19 nt, Artificial Sequence
  Description of Artificial Sequence: Synthetic oligonucleotide
uguggcaugguuaguccua

SEQ ID NO: 299868 - RNA, 19 nt, Artificial Sequence
  Description of Artificial Sequence: Synthetic oligonucleotide
agcaugugggcaggcaucg

SEQ ID NO: 299869 - RNA, 19 nt, Artificial Sequence
  Description of Artificial Sequence: Synthetic oligonucleotide
ggaucacaaauaacuaucc

SEQ ID NO: 299870 - RNA, 19 nt, Artificial Sequence
  Description of Artificial Sequence: Synthetic oligonucleotide
aucagauaaccguggaaua

SEQ ID NO: 299871 - RNA, 19 nt, Artificial Sequence
  Description of Artificial Sequence: Synthetic oligonucleotide
uuccggagcccgcuggugc

SEQ ID NO: 299872 - RNA, 19 nt, Artificial Sequence
  Description of Artificial Sequence: Synthetic oligonucleotide
aaggacgaaauuagaguaa

SEQ ID NO: 299873 - RNA, 19 nt, Artificial Sequence
  Description of Artificial Sequence: Synthetic oligonucleotide
accguggaauaagacagag

SEQ ID NO: 299874 - RNA, 19 nt, Artificial Sequence
  Description of Artificial Sequence: Synthetic oligonucleotide
guucagcccgaccugguug

SEQ ID NO: 299875 - RNA, 19 nt, Artificial Sequence
  Description of Artificial Sequence: Synthetic oligonucleotide
aaccuagauaacuccucuu

SEQ ID NO: 299876 - RNA, 19 nt, Artificial Sequence
  Description of Artificial Sequence: Synthetic oligonucleotide
agagcaggcgauaggauga

SEQ ID NO: 299877 - RNA, 19 nt, Artificial Sequence
  Description of Artificial Sequence: Synthetic oligonucleotide
gaaaucggucucuacucaa

SEQ ID NO: 299878 - RNA, 19 nt, Artificial Sequence
  Description of Artificial Sequence: Synthetic oligonucleotide
gaauauaggucagcagauc

SEQ ID NO: 299879 - RNA, 19 nt, Artificial Sequence
  Description of Artificial Sequence: Synthetic oligonucleotide
agggcuucauuuagaaauc

SEQ ID NO: 299880 - RNA, 19 nt, Artificial Sequence
  Description of Artificial Sequence: Synthetic oligonucleotide
guguauuaccucaaaaugu

SEQ ID NO: 299881 - RNA, 19 nt, Artificial Sequence
  Description of Artificial Sequence: Synthetic oligonucleotide
augcgugaaauuauaugug

SEQ ID NO: 299882 - RNA, 19 nt, Artificial Sequence
  Description of Artificial Sequence: Synthetic oligonucleotide
cuaccucuuagcagcuacc

SEQ ID NO: 299883 - RNA, 19 nt, Artificial Sequence
  Description of Artificial Sequence: Synthetic oligonucleotide
cauggaucacaaauaacua

SEQ ID NO: 299884 - RNA, 19 nt, Artificial Sequence
  Description of Artificial Sequence: Synthetic oligonucleotide
ugcgcuccuguuccgcggg

SEQ ID NO: 299885 - RNA, 19 nt, Artificial Sequence
  Description of Artificial Sequence: Synthetic oligonucleotide
agaccgagcguggacuucg

SEQ ID NO: 299886 - RNA, 19 nt, Artificial Sequence
  Description of Artificial Sequence: Synthetic oligonucleotide
acuucgguuccggagcccg

SEQ ID NO: 299887 - RNA, 19 nt, Artificial Sequence
  Description of Artificial Sequence: Synthetic oligonucleotide
caaucgaaggacgaaauua

SEQ ID NO: 299888 - RNA, 19 nt, Artificial Sequence
  Description of Artificial Sequence: Synthetic oligonucleotide
uacucuuacggcucccguc

SEQ ID NO: 299889 - RNA, 19 nt, Artificial Sequence
  Description of Artificial Sequence: Synthetic oligonucleotide
gguuaguccuagcuaauca

SEQ ID NO: 299890 - RNA, 19 nt, Artificial Sequence
  Description of Artificial Sequence: Synthetic oligonucleotide
cgggcuggcaauuuaaagg

SEQ ID NO: 299891 - RNA, 19 nt, Artificial Sequence
  Description of Artificial Sequence: Synthetic oligonucleotide
cugccacgaaagaaaucgg

SEQ ID NO: 299892 - RNA, 19 nt, Artificial Sequence
  Description of Artificial Sequence: Synthetic oligonucleotide
accuacagaagcugacccu

SEQ ID NO: 299893 - RNA, 19 nt, Artificial Sequence
  Description of Artificial Sequence: Synthetic oligonucleotide
gacgguguuuggucuuucc

SEQ ID NO: 299894 - RNA, 19 nt, Artificial Sequence
  Description of Artificial Sequence: Synthetic oligonucleotide
cucugaauacacucaggca

SEQ ID NO: 299895 - RNA, 19 nt, Artificial Sequence
  Description of Artificial Sequence: Synthetic oligonucleotide
uaugugcauuuauuguaua

SEQ ID NO: 299896 - RNA, 19 nt, Artificial Sequence
  Description of Artificial Sequence: Synthetic oligonucleotide
auaccgugcucaucaccuc

SEQ ID NO: 299897 - RNA, 19 nt, Artificial Sequence
  Description of Artificial Sequence: Synthetic oligonucleotide
acucgaugccugcaggaga

SEQ ID NO: 299898 - RNA, 19 nt, Artificial Sequence
  Description of Artificial Sequence: Synthetic oligonucleotide
agaaaucggcaaccuagau

SEQ ID NO: 299899 - RNA, 19 nt, Artificial Sequence
  Description of Artificial Sequence: Synthetic oligonucleotide
gcauggaucacaaauaacu

SEQ ID NO: 299900 - RNA, 19 nt, Artificial Sequence
  Description of Artificial Sequence: Synthetic oligonucleotide
gaugcaguacaaacaggga

SEQ ID NO: 299901 - RNA, 19 nt, Artificial Sequence
  Description of Artificial Sequence: Synthetic oligonucleotide
acucaaucgaaggacgaaa

SEQ ID NO: 299902 - RNA, 19 nt, Artificial Sequence
  Description of Artificial Sequence: Synthetic oligonucleotide
ggggagaucucuuggagca

SEQ ID NO: 299903 - RNA, 19 nt, Artificial Sequence
  Description of Artificial Sequence: Synthetic oligonucleotide
uaccucuuagcagcuaccu

SEQ ID NO: 299904 - RNA, 19 nt, Artificial Sequence
  Description of Artificial Sequence: Synthetic oligonucleotide
gcaggcgauaggaugacgg

SEQ ID NO: 299905 - RNA, 19 nt, Artificial Sequence
  Description of Artificial Sequence: Synthetic oligonucleotide
uccggagcccgcuggugcg

SEQ ID NO: 299906 - RNA, 19 nt, Artificial Sequence
  Description of Artificial Sequence: Synthetic oligonucleotide
ccuagcuaaucaaaaugug

SEQ ID NO: 299907 - RNA, 19 nt, Artificial Sequence
  Description of Artificial Sequence: Synthetic oligonucleotide
aaaucggucucuacucaau

SEQ ID NO: 299908 - RNA, 19 nt, Artificial Sequence
  Description of Artificial Sequence: Synthetic oligonucleotide
uauccgcugccagcaaagg

SEQ ID NO: 299909 - RNA, 19 nt, Artificial Sequence
  Description of Artificial Sequence: Synthetic oligonucleotide
auggccugaaucagauaac

SEQ ID NO: 299910 - RNA, 19 nt, Artificial Sequence
  Description of Artificial Sequence: Synthetic oligonucleotide
agauaaccguggaauaaga

SEQ ID NO: 299911 - RNA, 19 nt, Artificial Sequence
  Description of Artificial Sequence: Synthetic oligonucleotide
uacucaaucgaaggacgaa

SEQ ID NO: 299912 - RNA, 19 nt, Artificial Sequence
  Description of Artificial Sequence: Synthetic oligonucleotide
guugugcgcagaucuuccc

SEQ ID NO: 299913 - RNA, 19 nt, Artificial Sequence
  Description of Artificial Sequence: Synthetic oligonucleotide
gucuccguucauucugcag

SEQ ID NO: 299914 - RNA, 19 nt, Artificial Sequence
  Description of Artificial Sequence: Synthetic oligonucleotide
cuacucaaucgaaggacga

SEQ ID NO: 299915 - RNA, 19 nt, Artificial Sequence
  Description of Artificial Sequence: Synthetic oligonucleotide
acggauggagcuaacacuu

SEQ ID NO: 299916 - RNA, 19 nt, Artificial Sequence
  Description of Artificial Sequence: Synthetic oligonucleotide
agccagaucugcuuuuauu

SEQ ID NO: 299917 - RNA, 19 nt, Artificial Sequence
  Description of Artificial Sequence: Synthetic oligonucleotide
gggcgauuggccgagcugg

SEQ ID NO: 299918 - RNA, 19 nt, Artificial Sequence
  Description of Artificial Sequence: Synthetic oligonucleotide
gaauacacucaggcaacuc

SEQ ID NO: 299919 - RNA, 19 nt, Artificial Sequence
  Description of Artificial Sequence: Synthetic oligonucleotide
uacggcucccgucuccagu

SEQ ID NO: 299920 - RNA, 19 nt, Artificial Sequence
  Description of Artificial Sequence: Synthetic oligonucleotide
acucuuuguauagaauguu

SEQ ID NO: 299921 - RNA, 19 nt, Artificial Sequence
  Description of Artificial Sequence: Synthetic oligonucleotide
cuuggagcaugugggcagg

SEQ ID NO: 299922 - RNA, 19 nt, Artificial Sequence
  Description of Artificial Sequence: Synthetic oligonucleotide
gguaguagccucccgggca

SEQ ID NO: 299923 - RNA, 19 nt, Artificial Sequence
  Description of Artificial Sequence: Synthetic oligonucleotide
gcuuuuagaacaggaacuc

SEQ ID NO: 299924 - RNA, 19 nt, Artificial Sequence
  Description of Artificial Sequence: Synthetic oligonucleotide
cagaggaauauaggucagc

SEQ ID NO: 299925 - RNA, 19 nt, Artificial Sequence
  Description of Artificial Sequence: Synthetic oligonucleotide
ugguuaguccuagcuaauc

SEQ ID NO: 299926 - RNA, 19 nt, Artificial Sequence
  Description of Artificial Sequence: Synthetic oligonucleotide
aggcgauaggaugacggug

SEQ ID NO: 299927 - RNA, 19 nt, Artificial Sequence
  Description of Artificial Sequence: Synthetic oligonucleotide
acuaucccacauaaaacuu

SEQ ID NO: 299928 - RNA, 19 nt, Artificial Sequence
  Description of Artificial Sequence: Synthetic oligonucleotide
gaucugcuuuuauuaggaa

SEQ ID NO: 299929 - RNA, 19 nt, Artificial Sequence
  Description of Artificial Sequence: Synthetic oligonucleotide
caaagugcgcagggcaagc

SEQ ID NO: 299930 - RNA, 19 nt, Artificial Sequence
  Description of Artificial Sequence: Synthetic oligonucleotide
gauguaggcuggguggcca

SEQ ID NO: 299931 - RNA, 19 nt, Artificial Sequence
  Description of Artificial Sequence: Synthetic oligonucleotide
uuccggauuccuggcagug

SEQ ID NO: 299932 - RNA, 19 nt, Artificial Sequence
  Description of Artificial Sequence: Synthetic oligonucleotide
accucaaaaugugaccaaa

SEQ ID NO: 299933 - RNA, 19 nt, Artificial Sequence
  Description of Artificial Sequence: Synthetic oligonucleotide
ggacgaaauuagaguaacg

SEQ ID NO: 299934 - RNA, 19 nt, Artificial Sequence
  Description of Artificial Sequence: Synthetic oligonucleotide
aacagggaauggauaccgu

SEQ ID NO: 299935 - RNA, 19 nt, Artificial Sequence
  Description of Artificial Sequence: Synthetic oligonucleotide
ggagcuaacacuuccggau

SEQ ID NO: 299936 - RNA, 19 nt, Artificial Sequence
  Description of Artificial Sequence: Synthetic oligonucleotide
guagcauuauccugcaguu

SEQ ID NO: 299937 - RNA, 19 nt, Artificial Sequence
  Description of Artificial Sequence: Synthetic oligonucleotide
ggucucuacucaaucgaag

SEQ ID NO: 299938 - RNA, 19 nt, Artificial Sequence
  Description of Artificial Sequence: Synthetic oligonucleotide
cugcccagauagcuuuuag

SEQ ID NO: 299939 - RNA, 19 nt, Artificial Sequence
  Description of Artificial Sequence: Synthetic oligonucleotide
gguagguaguagccucccg

SEQ ID NO: 299940 - RNA, 19 nt, Artificial Sequence
  Description of Artificial Sequence: Synthetic oligonucleotide
ucacaccagcucaccuuug

SEQ ID NO: 299941 - RNA, 19 nt, Artificial Sequence
  Description of Artificial Sequence: Synthetic oligonucleotide
gugcgcagaucuucccggg

SEQ ID NO: 299942 - RNA, 19 nt, Artificial Sequence
  Description of Artificial Sequence: Synthetic oligonucleotide
aaccguggaauaagacaga

SEQ ID NO: 299943 - RNA, 19 nt, Artificial Sequence
  Description of Artificial Sequence: Synthetic oligonucleotide
aucgaaggacgaaauuaga

SEQ ID NO: 299944 - RNA, 19 nt, Artificial Sequence
  Description of Artificial Sequence: Synthetic oligonucleotide
guaacggauggagcuaaca

SEQ ID NO: 299945 - RNA, 19 nt, Artificial Sequence
  Description of Artificial Sequence: Synthetic oligonucleotide
agcuacucuuacggcuccc

SEQ ID NO: 299946 - RNA, 19 nt, Artificial Sequence
  Description of Artificial Sequence: Synthetic oligonucleotide
ggauaccgugcucaucacc

SEQ ID NO: 299947 - RNA, 19 nt, Artificial Sequence
  Description of Artificial Sequence: Synthetic oligonucleotide
ucccgggcuggcaauuuaa

SEQ ID NO: 299948 - RNA, 19 nt, Artificial Sequence
  Description of Artificial Sequence: Synthetic oligonucleotide
acaccacgagaaaucgguc

SEQ ID NO: 299949 - RNA, 19 nt, Artificial Sequence
  Description of Artificial Sequence: Synthetic oligonucleotide
gccugaaucagauaaccgu

SEQ ID NO: 299950 - RNA, 19 nt, Artificial Sequence
  Description of Artificial Sequence: Synthetic oligonucleotide
acagcguguuuguuggcuu

SEQ ID NO: 299951 - RNA, 19 nt, Artificial Sequence
  Description of Artificial Sequence: Synthetic oligonucleotide
gcaagcuagccaaggaagc

SEQ ID NO: 299952 - RNA, 19 nt, Artificial Sequence
  Description of Artificial Sequence: Synthetic oligonucleotide
ggccugaaucagauaaccg

SEQ ID NO: 299953 - RNA, 19 nt, Artificial Sequence
  Description of Artificial Sequence: Synthetic oligonucleotide
gcgggauggguguucagcc

SEQ ID NO: 299954 - RNA, 19 nt, Artificial Sequence
  Description of Artificial Sequence: Synthetic oligonucleotide
uccugccacgaaagaaauc

SEQ ID NO: 299955 - RNA, 19 nt, Artificial Sequence
  Description of Artificial Sequence: Synthetic oligonucleotide
gguuggaaaccugcgcucc

SEQ ID NO: 299956 - RNA, 19 nt, Artificial Sequence
  Description of Artificial Sequence: Synthetic oligonucleotide
gaguaacggauggagcuaa

SEQ ID NO: 299957 - RNA, 19 nt, Artificial Sequence
  Description of Artificial Sequence: Synthetic oligonucleotide
ccucaagcuuuccacuucc

SEQ ID NO: 299958 - RNA, 19 nt, Artificial Sequence
  Description of Artificial Sequence: Synthetic oligonucleotide
agugacgauaguacauaau

SEQ ID NO: 299959 - RNA, 19 nt, Artificial Sequence
  Description of Artificial Sequence: Synthetic oligonucleotide
agaguaacggauggagcua

SEQ ID NO: 299960 - RNA, 19 nt, Artificial Sequence
  Description of Artificial Sequence: Synthetic oligonucleotide
uggauaccgugcucaucac

SEQ ID NO: 299961 - RNA, 19 nt, Artificial Sequence
  Description of Artificial Sequence: Synthetic oligonucleotide
cuggugcgggcgauuggcc

SEQ ID NO: 299962 - RNA, 19 nt, Artificial Sequence
  Description of Artificial Sequence: Synthetic oligonucleotide
gguugugcgcagaucuucc

SEQ ID NO: 299963 - RNA, 19 nt, Artificial Sequence
  Description of Artificial Sequence: Synthetic oligonucleotide
cagcuacucuuacggcucc

SEQ ID NO: 299964 - RNA, 19 nt, Artificial Sequence
  Description of Artificial Sequence: Synthetic oligonucleotide
uuacggcucccgucuccag

SEQ ID NO: 299965 - RNA, 19 nt, Artificial Sequence
  Description of Artificial Sequence: Synthetic oligonucleotide
agcuaccuacagaagcuga

SEQ ID NO: 299966 - RNA, 19 nt, Artificial Sequence
  Description of Artificial Sequence: Synthetic oligonucleotide
guacaaacagggaauggau

SEQ ID NO: 299967 - RNA, 19 nt, Artificial Sequence
  Description of Artificial Sequence: Synthetic oligonucleotide
ccguggaauaagacagagg

SEQ ID NO: 299968 - RNA, 19 nt, Artificial Sequence
  Description of Artificial Sequence: Synthetic oligonucleotide
cgaaauuagaguaacggau

SEQ ID NO: 299969 - RNA, 19 nt, Artificial Sequence
  Description of Artificial Sequence: Synthetic oligonucleotide
cugagugacgauaguacau

SEQ ID NO: 299970 - RNA, 19 nt, Artificial Sequence
  Description of Artificial Sequence: Synthetic oligonucleotide
gcuacucuuacggcucccg

SEQ ID NO: 299971 - RNA, 19 nt, Artificial Sequence
  Description of Artificial Sequence: Synthetic oligonucleotide
agcaggcgauaggaugacg

SEQ ID NO: 299972 - RNA, 19 nt, Artificial Sequence
  Description of Artificial Sequence: Synthetic oligonucleotide
cuaucccacauaaaacuuu

SEQ ID NO: 299973 - RNA, 19 nt, Artificial Sequence
  Description of Artificial Sequence: Synthetic oligonucleotide
agaccccuuuuauccgcug

SEQ ID NO: 299974 - RNA, 19 nt, Artificial Sequence
  Description of Artificial Sequence: Synthetic oligonucleotide
cucaaucgaaggacgaaau

SEQ ID NO: 299975 - RNA, 19 nt, Artificial Sequence
  Description of Artificial Sequence: Synthetic oligonucleotide
gccacgaaagaaaucggca

SEQ ID NO: 299976 - RNA, 19 nt, Artificial Sequence
  Description of Artificial Sequence: Synthetic oligonucleotide
cuucgguuccggagcccgc

SEQ ID NO: 299977 - RNA, 19 nt, Artificial Sequence
  Description of Artificial Sequence: Synthetic oligonucleotide
cagcuaccuacagaagcug

SEQ ID NO: 299978 - RNA, 19 nt, Artificial Sequence
  Description of Artificial Sequence: Synthetic oligonucleotide
cuguacccaaacagguuaa

SEQ ID NO: 299979 - RNA, 19 nt, Artificial Sequence
  Description of Artificial Sequence: Synthetic oligonucleotide
uagcauuauccugcaguua

SEQ ID NO: 299980 - RNA, 19 nt, Artificial Sequence
  Description of Artificial Sequence: Synthetic oligonucleotide
ucgguuccggagcccgcug

SEQ ID NO: 299981 - RNA, 19 nt, Artificial Sequence
  Description of Artificial Sequence: Synthetic oligonucleotide
caucauuagcauccuggua

SEQ ID NO: 299982 - RNA, 19 nt, Artificial Sequence
  Description of Artificial Sequence: Synthetic oligonucleotide
auuggccgagcugggguug

SEQ ID NO: 299983 - RNA, 19 nt, Artificial Sequence
  Description of Artificial Sequence: Synthetic oligonucleotide
guggaauaagacagaggaa

SEQ ID NO: 299984 - RNA, 19 nt, Artificial Sequence
  Description of Artificial Sequence: Synthetic oligonucleotide
caccacgagaaaucggucu

SEQ ID NO: 299985 - RNA, 19 nt, Artificial Sequence
  Description of Artificial Sequence: Synthetic oligonucleotide
gcuaccuacagaagcugac

SEQ ID NO: 299986 - RNA, 19 nt, Artificial Sequence
  Description of Artificial Sequence: Synthetic oligonucleotide
uccggauuccuggcagugu

SEQ ID NO: 299987 - RNA, 19 nt, Artificial Sequence
  Description of Artificial Sequence: Synthetic oligonucleotide
gaauggauaccgugcucau

SEQ ID NO: 299988 - RNA, 19 nt, Artificial Sequence
  Description of Artificial Sequence: Synthetic oligonucleotide
gcgugaaauuauaugugca

SEQ ID NO: 299989 - RNA, 19 nt, Artificial Sequence
  Description of Artificial Sequence: Synthetic oligonucleotide
cgagcguggacuucgguuc

SEQ ID NO: 299990 - RNA, 19 nt, Artificial Sequence
  Description of Artificial Sequence: Synthetic oligonucleotide
gcuggugcgggcgauuggc

SEQ ID NO: 299991 - RNA, 19 nt, Artificial Sequence
  Description of Artificial Sequence: Synthetic oligonucleotide
ccgagcugggguuggaaac

SEQ ID NO: 299992 - RNA, 19 nt, Artificial Sequence
  Description of Artificial Sequence: Synthetic oligonucleotide
agcguggacuucgguuccg

SEQ ID NO: 299993 - RNA, 19 nt, Artificial Sequence
  Description of Artificial Sequence: Synthetic oligonucleotide
gcaugguuaguccuagcua

SEQ ID NO: 299994 - RNA, 19 nt, Artificial Sequence
  Description of Artificial Sequence: Synthetic oligonucleotide
uccgcgggauggguguuca

SEQ ID NO: 299995 - RNA, 19 nt, Artificial Sequence
  Description of Artificial Sequence: Synthetic oligonucleotide
gaugacgguguuuggucuu

SEQ ID NO: 299996 - RNA, 19 nt, Artificial Sequence
  Description of Artificial Sequence: Synthetic oligonucleotide
cgugcucaucaccucagcc

SEQ ID NO: 299997 - RNA, 19 nt, Artificial Sequence
  Description of Artificial Sequence: Synthetic oligonucleotide
ccggauuccuggcagugug

SEQ ID NO: 299998 - RNA, 19 nt, Artificial Sequence
  Description of Artificial Sequence: Synthetic oligonucleotide
ggaauauaggucagcagau

SEQ ID NO: 299999 - RNA, 19 nt, Artificial Sequence
  Description of Artificial Sequence: Synthetic oligonucleotide
aaggggagagcaggcgaua

SEQ ID NO: 300000 - RNA, 19 nt, Artificial Sequence
  Description of Artificial Sequence: Synthetic oligonucleotide
gauggguguucagcccgac

SEQ ID NO: 300001 - RNA, 19 nt, Artificial Sequence
  Description of Artificial Sequence: Synthetic oligonucleotide
ggguguucagcccgaccug

SEQ ID NO: 300002 - RNA, 19 nt, Artificial Sequence
  Description of Artificial Sequence: Synthetic oligonucleotide
gaccgagcguggacuucgg

SEQ ID NO: 300003 - RNA, 19 nt, Artificial Sequence
  Description of Artificial Sequence: Synthetic oligonucleotide
augguuaguccuagcuaau

SEQ ID NO: 300004 - RNA, 19 nt, Artificial Sequence
  Description of Artificial Sequence: Synthetic oligonucleotide
ccaaggaagccaggcgugg

SEQ ID NO: 300005 - RNA, 19 nt, Artificial Sequence
  Description of Artificial Sequence: Synthetic oligonucleotide
caauuagacuccagaguuu

SEQ ID NO: 300006 - RNA, 19 nt, Artificial Sequence
  Description of Artificial Sequence: Synthetic oligonucleotide
accgagcguggacuucggu

SEQ ID NO: 300007 - RNA, 19 nt, Artificial Sequence
  Description of Artificial Sequence: Synthetic oligonucleotide
ggcgauaggaugacggugu

SEQ ID NO: 300008 - RNA, 19 nt, Artificial Sequence
  Description of Artificial Sequence: Synthetic oligonucleotide
agcugacccucaagcuuuc

SEQ ID NO: 300009 - RNA, 19 nt, Artificial Sequence
  Description of Artificial Sequence: Synthetic oligonucleotide
ggugcgggcgauuggccga

SEQ ID NO: 300010 - RNA, 19 nt, Artificial Sequence
  Description of Artificial Sequence: Synthetic oligonucleotide
cucuuacggcucccgucuc

SEQ ID NO: 300011 - RNA, 19 nt, Artificial Sequence
  Description of Artificial Sequence: Synthetic oligonucleotide
ugacgguguuuggucuuuc

SEQ ID NO: 300012 - RNA, 19 nt, Artificial Sequence
  Description of Artificial Sequence: Synthetic oligonucleotide
cagcccgaccugguugugc

SEQ ID NO: 300013 - RNA, 19 nt, Artificial Sequence
  Description of Artificial Sequence: Synthetic oligonucleotide
augacgguguuuggucuuu

SEQ ID NO: 300014 - RNA, 19 nt, Artificial Sequence
  Description of Artificial Sequence: Synthetic oligonucleotide
gagaccgagcguggacuuc

SEQ ID NO: 300015 - RNA, 19 nt, Artificial Sequence
  Description of Artificial Sequence: Synthetic oligonucleotide
agcuacaguuucagagaau

SEQ ID NO: 300016 - RNA, 19 nt, Artificial Sequence
  Description of Artificial Sequence: Synthetic oligonucleotide
ggguagguaguagccuccc

SEQ ID NO: 300017 - RNA, 19 nt, Artificial Sequence
  Description of Artificial Sequence: Synthetic oligonucleotide
ucgaugccugcaggagaga

SEQ ID NO: 300018 - RNA, 19 nt, Artificial Sequence
  Description of Artificial Sequence: Synthetic oligonucleotide
caggcgauaggaugacggu

SEQ ID NO: 300019 - RNA, 19 nt, Artificial Sequence
  Description of Artificial Sequence: Synthetic oligonucleotide
agcguguuuguuggcuuuu

SEQ ID NO: 300020 - RNA, 19 nt, Artificial Sequence
  Description of Artificial Sequence: Synthetic oligonucleotide
uaguagccucccgggcagc

SEQ ID NO: 300021 - RNA, 19 nt, Artificial Sequence
  Description of Artificial Sequence: Synthetic oligonucleotide
cugucccagcgccgagacc

SEQ ID NO: 300022 - RNA, 19 nt, Artificial Sequence
  Description of Artificial Sequence: Synthetic oligonucleotide
cgagaaaucggucucuacu

SEQ ID NO: 300023 - RNA, 19 nt, Artificial Sequence
  Description of Artificial Sequence: Synthetic oligonucleotide
ccaagacaagaugcaguac

SEQ ID NO: 300024 - RNA, 19 nt, Artificial Sequence
  Description of Artificial Sequence: Synthetic oligonucleotide
ccuagauaacuccucuugu

SEQ ID NO: 300025 - RNA, 19 nt, Artificial Sequence
  Description of Artificial Sequence: Synthetic oligonucleotide
ggcaaccuagauaacuccu

SEQ ID NO: 300026 - RNA, 19 nt, Artificial Sequence
  Description of Artificial Sequence: Synthetic oligonucleotide
cgggcagcaugauguaggc

SEQ ID NO: 300027 - RNA, 19 nt, Artificial Sequence
  Description of Artificial Sequence: Synthetic oligonucleotide
gugcgggcgauuggccgag

SEQ ID NO: 300028 - RNA, 19 nt, Artificial Sequence
  Description of Artificial Sequence: Synthetic oligonucleotide
gcgauuggccgagcugggg

SEQ ID NO: 300029 - RNA, 19 nt, Artificial Sequence
  Description of Artificial Sequence: Synthetic oligonucleotide
cuacucuuacggcucccgu

SEQ ID NO: 300030 - RNA, 19 nt, Artificial Sequence
  Description of Artificial Sequence: Synthetic oligonucleotide
gccgagaccgagcguggac

SEQ ID NO: 300031 - RNA, 19 nt, Artificial Sequence
  Description of Artificial Sequence: Synthetic oligonucleotide
uuccgcgggauggguguuc

SEQ ID NO: 300032 - RNA, 19 nt, Artificial Sequence
  Description of Artificial Sequence: Synthetic oligonucleotide
ccagagugcucugaauaca

SEQ ID NO: 300033 - RNA, 19 nt, Artificial Sequence
  Description of Artificial Sequence: Synthetic oligonucleotide
cacgagaaaucggucucua

SEQ ID NO: 300034 - RNA, 19 nt, Artificial Sequence
  Description of Artificial Sequence: Synthetic oligonucleotide
agcccgcuggugcgggcga

SEQ ID NO: 300035 - RNA, 19 nt, Artificial Sequence
  Description of Artificial Sequence: Synthetic oligonucleotide
aucuaccucuuagcagcua

SEQ ID NO: 300036 - RNA, 19 nt, Artificial Sequence
  Description of Artificial Sequence: Synthetic oligonucleotide
gccgagcugggguuggaaa

SEQ ID NO: 300037 - RNA, 19 nt, Artificial Sequence
  Description of Artificial Sequence: Synthetic oligonucleotide
cgcgggauggguguucagc

SEQ ID NO: 300038 - RNA, 19 nt, Artificial Sequence
  Description of Artificial Sequence: Synthetic oligonucleotide
cagaccccuuuuauccgcu

SEQ ID NO: 300039 - RNA, 19 nt, Artificial Sequence
  Description of Artificial Sequence: Synthetic oligonucleotide
agccucccgggcagcauga

SEQ ID NO: 300040 - RNA, 19 nt, Artificial Sequence
  Description of Artificial Sequence: Synthetic oligonucleotide
ccaaggcacugagugacga

SEQ ID NO: 300041 - RNA, 19 nt, Artificial Sequence
  Description of Artificial Sequence: Synthetic oligonucleotide
caccuuuguuagcuacagu

SEQ ID NO: 300042 - RNA, 19 nt, Artificial Sequence
  Description of Artificial Sequence: Synthetic oligonucleotide
gcugacccucaagcuuucc

SEQ ID NO: 300043 - RNA, 19 nt, Artificial Sequence
  Description of Artificial Sequence: Synthetic oligonucleotide
cgguuccggagcccgcugg

SEQ ID NO: 300044 - RNA, 19 nt, Artificial Sequence
  Description of Artificial Sequence: Synthetic oligonucleotide
cccgggcagcaugauguag

SEQ ID NO: 300045 - RNA, 19 nt, Artificial Sequence
  Description of Artificial Sequence: Synthetic oligonucleotide
ggcaucguggcugccggcu

SEQ ID NO: 300046 - RNA, 19 nt, Artificial Sequence
  Description of Artificial Sequence: Synthetic oligonucleotide
cagcguguuuguuggcuuu

SEQ ID NO: 300047 - RNA, 19 nt, Artificial Sequence
  Description of Artificial Sequence: Synthetic oligonucleotide
gcgccgagaccgagcgugg

SEQ ID NO: 300048 - RNA, 19 nt, Artificial Sequence
  Description of Artificial Sequence: Synthetic oligonucleotide
cucaaacagcguguuuguu

SEQ ID NO: 300049 - RNA, 19 nt, Artificial Sequence
  Description of Artificial Sequence: Synthetic oligonucleotide
cgggcgauuggccgagcug

SEQ ID NO: 300050 - RNA, 19 nt, Artificial Sequence
  Description of Artificial Sequence: Synthetic oligonucleotide
gcccgaccugguugugcgc

SEQ ID NO: 300051 - RNA, 19 nt, Artificial Sequence
  Description of Artificial Sequence: Synthetic oligonucleotide
cccgaccugguugugcgca

SEQ ID NO: 300052 - RNA, 19 nt, Artificial Sequence
  Description of Artificial Sequence: Synthetic oligonucleotide
ccccuuuuauccgcugcca

SEQ ID NO: 300053 - RNA, 19 nt, Artificial Sequence
  Description of Artificial Sequence: Synthetic oligonucleotide
cccgggcuggcaauuuaaa

SEQ ID NO: 300054 - RNA, 19 nt, Artificial Sequence
  Description of Artificial Sequence: Synthetic oligonucleotide
ccgagcguggacuucgguu

SEQ ID NO: 300055 - RNA, 19 nt, Artificial Sequence
  Description of Artificial Sequence: Synthetic oligonucleotide
ccgagaccgagcguggacu

SEQ ID NO: 300056 - RNA, 19 nt, Artificial Sequence
  Description of Artificial Sequence: Synthetic oligonucleotide
gcgauaggaugacgguguu

SEQ ID NO: 300057 - RNA, 19 nt, Artificial Sequence
  Description of Artificial Sequence: Synthetic oligonucleotide
gcgggcgauuggccgagcu

SEQ ID NO: 300058 - RNA, 19 nt, Artificial Sequence
  Description of Artificial Sequence: Synthetic oligonucleotide
ccgcgggauggguguucag

SEQ ID NO: 300059 - RNA, 19 nt, Artificial Sequence
  Description of Artificial Sequence: Synthetic oligonucleotide
ccacgagaaaucggucucu

SEQ ID NO: 300060 - RNA, 19 nt, Artificial Sequence
  Description of Artificial Sequence: Synthetic oligonucleotide
ggccgagcugggguuggaa

SEQ ID NO: 300061 - RNA, 19 nt, Artificial Sequence
  Description of Artificial Sequence: Synthetic oligonucleotide
gggcagcaugauguaggcu

SEQ ID NO: 300062 - RNA, 19 nt, Artificial Sequence
  Description of Artificial Sequence: Synthetic oligonucleotide
gggagaucucuuggagcau

SEQ ID NO: 300063 - RNA, 19 nt, Artificial Sequence
  Description of Artificial Sequence: Synthetic oligonucleotide
guuccgcgggauggguguu

SEQ ID NO: 300064 - RNA, 19 nt, Artificial Sequence
  Description of Artificial Sequence: Synthetic oligonucleotide
ccuguuccgcgggaugggu

SEQ ID NO: 300065 - RNA, 19 nt, Artificial Sequence
  Description of Artificial Sequence: Synthetic oligonucleotide
cgaccugguugugcgcaga

SEQ ID NO: 300066 - RNA, 19 nt, Artificial Sequence
  Description of Artificial Sequence: Synthetic oligonucleotide
cagcgccgagaccgagcgu

SEQ ID NO: 300067 - RNA, 19 nt, Artificial Sequence
  Description of Artificial Sequence: Synthetic oligonucleotide
cgagaccgagcguggacuu

SEQ ID NO: 300068 - RNA, 19 nt, Artificial Sequence
  Description of Artificial Sequence: Synthetic oligonucleotide
cgauaggaugacgguguuu

SEQ ID NO: 300069 - RNA, 19 nt, Artificial Sequence
  Description of Artificial Sequence: Synthetic oligonucleotide
cgccgagaccgagcgugga

SEQ ID NO: 300070 - RNA, 19 nt, Artificial Sequence
  Description of Artificial Sequence: Synthetic oligonucleotide
cccgcuggugcgggcgauu

SEQ ID NO: 300071 - RNA, 19 nt, Artificial Sequence
  Description of Artificial Sequence: Synthetic oligonucleotide
uguagcuugacacaaaugc

SEQ ID NO: 300072 - RNA, 19 nt, Artificial Sequence
  Description of Artificial Sequence: Synthetic oligonucleotide
aagcgguucacuuuuaagc

SEQ ID NO: 300073 - RNA, 19 nt, Artificial Sequence
  Description of Artificial Sequence: Synthetic oligonucleotide
uuuucuagaaauaugucgc

SEQ ID NO: 300074 - RNA, 19 nt, Artificial Sequence
  Description of Artificial Sequence: Synthetic oligonucleotide
aagaacccuagauugauac

SEQ ID NO: 300075 - RNA, 19 nt, Artificial Sequence
  Description of Artificial Sequence: Synthetic oligonucleotide
auuguuauaucaaaucugc

SEQ ID NO: 300076 - RNA, 19 nt, Artificial Sequence
  Description of Artificial Sequence: Synthetic oligonucleotide
uaugauaugagucggaaau

SEQ ID NO: 300077 - RNA, 19 nt, Artificial Sequence
  Description of Artificial Sequence: Synthetic oligonucleotide
ucaugaaagagagagagag

SEQ ID NO: 300078 - RNA, 19 nt, Artificial Sequence
  Description of Artificial Sequence: Synthetic oligonucleotide
auucaguacaacuuuuggc

SEQ ID NO: 300079 - RNA, 19 nt, Artificial Sequence
  Description of Artificial Sequence: Synthetic oligonucleotide
agcaacucgaugcagaaac

SEQ ID NO: 300080 - RNA, 19 nt, Artificial Sequence
  Description of Artificial Sequence: Synthetic oligonucleotide
aauguuagauucaguagcc

SEQ ID NO: 300081 - RNA, 19 nt, Artificial Sequence
  Description of Artificial Sequence: Synthetic oligonucleotide
uagauugauacuaagcaac

SEQ ID NO: 300082 - RNA, 19 nt, Artificial Sequence
  Description of Artificial Sequence: Synthetic oligonucleotide
aauagaauugacgacagaa

SEQ ID NO: 300083 - RNA, 19 nt, Artificial Sequence
  Description of Artificial Sequence: Synthetic oligonucleotide
aacguagaauuguuggugg

SEQ ID NO: 300084 - RNA, 19 nt, Artificial Sequence
  Description of Artificial Sequence: Synthetic oligonucleotide
uuaagccugaaauagcaag

SEQ ID NO: 300085 - RNA, 19 nt, Artificial Sequence
  Description of Artificial Sequence: Synthetic oligonucleotide
gaaucuucugcguugcucg

SEQ ID NO: 300086 - RNA, 19 nt, Artificial Sequence
  Description of Artificial Sequence: Synthetic oligonucleotide
aauuguugguggcuuaauc

SEQ ID NO: 300087 - RNA, 19 nt, Artificial Sequence
  Description of Artificial Sequence: Synthetic oligonucleotide
agcgguucacuuuuaagcc

SEQ ID NO: 300088 - RNA, 19 nt, Artificial Sequence
  Description of Artificial Sequence: Synthetic oligonucleotide
agauucaguagccaguggg

SEQ ID NO: 300089 - RNA, 19 nt, Artificial Sequence
  Description of Artificial Sequence: Synthetic oligonucleotide
uuccuaagugaaaagauac

SEQ ID NO: 300090 - RNA, 19 nt, Artificial Sequence
  Description of Artificial Sequence: Synthetic oligonucleotide
ucguuuaaaagcacaaaca

SEQ ID NO: 300091 - RNA, 19 nt, Artificial Sequence
  Description of Artificial Sequence: Synthetic oligonucleotide
gaaagagagagagagauca

SEQ ID NO: 300092 - RNA, 19 nt, Artificial Sequence
  Description of Artificial Sequence: Synthetic oligonucleotide
gaucaggcauuccagagag

SEQ ID NO: 300093 - RNA, 19 nt, Artificial Sequence
  Description of Artificial Sequence: Synthetic oligonucleotide
cucacuugaaacuucccgg

SEQ ID NO: 300094 - RNA, 19 nt, Artificial Sequence
  Description of Artificial Sequence: Synthetic oligonucleotide
aauuuaccaguccuuuaag

SEQ ID NO: 300095 - RNA, 19 nt, Artificial Sequence
  Description of Artificial Sequence: Synthetic oligonucleotide
auucccaacguuugaaccg

SEQ ID NO: 300096 - RNA, 19 nt, Artificial Sequence
  Description of Artificial Sequence: Synthetic oligonucleotide
ugguauugccacaagauuc

SEQ ID NO: 300097 - RNA, 19 nt, Artificial Sequence
  Description of Artificial Sequence: Synthetic oligonucleotide
caacguuugaaccggaugc

SEQ ID NO: 300098 - RNA, 19 nt, Artificial Sequence
  Description of Artificial Sequence: Synthetic oligonucleotide
cacgguaugauaugagucg

SEQ ID NO: 300099 - RNA, 19 nt, Artificial Sequence
  Description of Artificial Sequence: Synthetic oligonucleotide
aagagagagagagaucagg

SEQ ID NO: 300100 - RNA, 19 nt, Artificial Sequence
  Description of Artificial Sequence: Synthetic oligonucleotide
acuguuacaaugugcagca

SEQ ID NO: 300101 - RNA, 19 nt, Artificial Sequence
  Description of Artificial Sequence: Synthetic oligonucleotide
cuaucuagcagcugaacug

SEQ ID NO: 300102 - RNA, 19 nt, Artificial Sequence
  Description of Artificial Sequence: Synthetic oligonucleotide
agaacggggagguuggcac

SEQ ID NO: 300103 - RNA, 19 nt, Artificial Sequence
  Description of Artificial Sequence: Synthetic oligonucleotide
guuugaaccggaugcacgg

SEQ ID NO: 300104 - RNA, 19 nt, Artificial Sequence
  Description of Artificial Sequence: Synthetic oligonucleotide
auuaacuuccuaaaagcag

SEQ ID NO: 300105 - RNA, 19 nt, Artificial Sequence
  Description of Artificial Sequence: Synthetic oligonucleotide
agagagagagagaucaggc

SEQ ID NO: 300106 - RNA, 19 nt, Artificial Sequence
  Description of Artificial Sequence: Synthetic oligonucleotide
ggaucaaauguauagcugc

SEQ ID NO: 300107 - RNA, 19 nt, Artificial Sequence
  Description of Artificial Sequence: Synthetic oligonucleotide
auagaauugacgacagaac

SEQ ID NO: 300108 - RNA, 19 nt, Artificial Sequence
  Description of Artificial Sequence: Synthetic oligonucleotide
uguauguugaggcuuggau

SEQ ID NO: 300109 - RNA, 19 nt, Artificial Sequence
  Description of Artificial Sequence: Synthetic oligonucleotide
cucacuugguaccuaauag

SEQ ID NO: 300110 - RNA, 19 nt, Artificial Sequence
  Description of Artificial Sequence: Synthetic oligonucleotide
uaauugcagccucugaaca

SEQ ID NO: 300111 - RNA, 19 nt, Artificial Sequence
  Description of Artificial Sequence: Synthetic oligonucleotide
gaugguauaucuacugcag

SEQ ID NO: 300112 - RNA, 19 nt, Artificial Sequence
  Description of Artificial Sequence: Synthetic oligonucleotide
uuaaugcaagcaucaauga

SEQ ID NO: 300113 - RNA, 19 nt, Artificial Sequence
  Description of Artificial Sequence: Synthetic oligonucleotide
aacuuuuggcaugugaaca

SEQ ID NO: 300114 - RNA, 19 nt, Artificial Sequence
  Description of Artificial Sequence: Synthetic oligonucleotide
uggcauuagauaaaguuuu

SEQ ID NO: 300115 - RNA, 19 nt, Artificial Sequence
  Description of Artificial Sequence: Synthetic oligonucleotide
augcaagcaucaaugaccc

SEQ ID NO: 300116 - RNA, 19 nt, Artificial Sequence
  Description of Artificial Sequence: Synthetic oligonucleotide
ucuucugcguugcucgagg

SEQ ID NO: 300117 - RNA, 19 nt, Artificial Sequence
  Description of Artificial Sequence: Synthetic oligonucleotide
augaaagagagagagagau

SEQ ID NO: 300118 - RNA, 19 nt, Artificial Sequence
  Description of Artificial Sequence: Synthetic oligonucleotide
uggaucauuuucccgacac

SEQ ID NO: 300119 - RNA, 19 nt, Artificial Sequence
  Description of Artificial Sequence: Synthetic oligonucleotide
ugagaaauagacuguggau

SEQ ID NO: 300120 - RNA, 19 nt, Artificial Sequence
  Description of Artificial Sequence: Synthetic oligonucleotide
uccguugucuaacauuucu

SEQ ID NO: 300121 - RNA, 19 nt, Artificial Sequence
  Description of Artificial Sequence: Synthetic oligonucleotide
gaacguagaauuguuggug

SEQ ID NO: 300122 - RNA, 19 nt, Artificial Sequence
  Description of Artificial Sequence: Synthetic oligonucleotide
agacuguggaucauuuucc

SEQ ID NO: 300123 - RNA, 19 nt, Artificial Sequence
  Description of Artificial Sequence: Synthetic oligonucleotide
ucacuugguaccuaauagu

SEQ ID NO: 300124 - RNA, 19 nt, Artificial Sequence
  Description of Artificial Sequence: Synthetic oligonucleotide
ccuuaagaacccuagauug

SEQ ID NO: 300125 - RNA, 19 nt, Artificial Sequence
  Description of Artificial Sequence: Synthetic oligonucleotide
ucguuagcaguguagcuug

SEQ ID NO: 300126 - RNA, 19 nt, Artificial Sequence
  Description of Artificial Sequence: Synthetic oligonucleotide
agugcuugcuuaauggcac

SEQ ID NO: 300127 - RNA, 19 nt, Artificial Sequence
  Description of Artificial Sequence: Synthetic oligonucleotide
aauccguugucuaacauuu

SEQ ID NO: 300128 - RNA, 19 nt, Artificial Sequence
  Description of Artificial Sequence: Synthetic oligonucleotide
auuuaccaguccuuuaaga

SEQ ID NO: 300129 - RNA, 19 nt, Artificial Sequence
  Description of Artificial Sequence: Synthetic oligonucleotide
ucaaauguauagcugccuu

SEQ ID NO: 300130 - RNA, 19 nt, Artificial Sequence
  Description of Artificial Sequence: Synthetic oligonucleotide
uuacuacugccuguaauag

SEQ ID NO: 300131 - RNA, 19 nt, Artificial Sequence
  Description of Artificial Sequence: Synthetic oligonucleotide
ucccauauucuguuuaggu

SEQ ID NO: 300132 - RNA, 19 nt, Artificial Sequence
  Description of Artificial Sequence: Synthetic oligonucleotide
agaacguagaauuguuggu

SEQ ID NO: 300133 - RNA, 19 nt, Artificial Sequence
  Description of Artificial Sequence: Synthetic oligonucleotide
cauuauccuuaauugcagc

SEQ ID NO: 300134 - RNA, 19 nt, Artificial Sequence
  Description of Artificial Sequence: Synthetic oligonucleotide
uguuacaaugugcagcauu

SEQ ID NO: 300135 - RNA, 19 nt, Artificial Sequence
  Description of Artificial Sequence: Synthetic oligonucleotide
auacacuaugaccacauua

SEQ ID NO: 300136 - RNA, 19 nt, Artificial Sequence
  Description of Artificial Sequence: Synthetic oligonucleotide
ugauaugagucggaaauuc

SEQ ID NO: 300137 - RNA, 19 nt, Artificial Sequence
  Description of Artificial Sequence: Synthetic oligonucleotide
gaaauagcaagcugcugga

SEQ ID NO: 300138 - RNA, 19 nt, Artificial Sequence
  Description of Artificial Sequence: Synthetic oligonucleotide
uuagguccaauuguuauau

SEQ ID NO: 300139 - RNA, 19 nt, Artificial Sequence
  Description of Artificial Sequence: Synthetic oligonucleotide
agcaguugaugagaaauag

SEQ ID NO: 300140 - RNA, 19 nt, Artificial Sequence
  Description of Artificial Sequence: Synthetic oligonucleotide
ugaguaaggcaaacacuug

SEQ ID NO: 300141 - RNA, 19 nt, Artificial Sequence
  Description of Artificial Sequence: Synthetic oligonucleotide
ugauuugagauggcuaaca

SEQ ID NO: 300142 - RNA, 19 nt, Artificial Sequence
  Description of Artificial Sequence: Synthetic oligonucleotide
uugacgacagaacguagaa

SEQ ID NO: 300143 - RNA, 19 nt, Artificial Sequence
  Description of Artificial Sequence: Synthetic oligonucleotide
ccuguaauagaauugacga

SEQ ID NO: 300144 - RNA, 19 nt, Artificial Sequence
  Description of Artificial Sequence: Synthetic oligonucleotide
cuguaauagaauugacgac

SEQ ID NO: 300145 - RNA, 19 nt, Artificial Sequence
  Description of Artificial Sequence: Synthetic oligonucleotide
cauuguuuguguacuuuac

SEQ ID NO: 300146 - RNA, 19 nt, Artificial Sequence
  Description of Artificial Sequence: Synthetic oligonucleotide
uuuagguccaauuguuaua

SEQ ID NO: 300147 - RNA, 19 nt, Artificial Sequence
  Description of Artificial Sequence: Synthetic oligonucleotide
gaaggugugacacuuggcu

SEQ ID NO: 300148 - RNA, 19 nt, Artificial Sequence
  Description of Artificial Sequence: Synthetic oligonucleotide
ucucuuuuacuacuuugau

SEQ ID NO: 300149 - RNA, 19 nt, Artificial Sequence
  Description of Artificial Sequence: Synthetic oligonucleotide
agugaaaagcugaguaagg

SEQ ID NO: 300150 - RNA, 19 nt, Artificial Sequence
  Description of Artificial Sequence: Synthetic oligonucleotide
acuuuacuccugcucgacg

SEQ ID NO: 300151 - RNA, 19 nt, Artificial Sequence
  Description of Artificial Sequence: Synthetic oligonucleotide
ucauuguuuguguacuuua

SEQ ID NO: 300152 - RNA, 19 nt, Artificial Sequence
  Description of Artificial Sequence: Synthetic oligonucleotide
ugacacgguaugauaugag

SEQ ID NO: 300153 - RNA, 19 nt, Artificial Sequence
  Description of Artificial Sequence: Synthetic oligonucleotide
uuucccgacaccugggcga

SEQ ID NO: 300154 - RNA, 19 nt, Artificial Sequence
  Description of Artificial Sequence: Synthetic oligonucleotide
uuaagaacccuagauugau

SEQ ID NO: 300155 - RNA, 19 nt, Artificial Sequence
  Description of Artificial Sequence: Synthetic oligonucleotide
uuuacuccugcucgacgcc

SEQ ID NO: 300156 - RNA, 19 nt, Artificial Sequence
  Description of Artificial Sequence: Synthetic oligonucleotide
aacuucguuagcaguguag

SEQ ID NO: 300157 - RNA, 19 nt, Artificial Sequence
  Description of Artificial Sequence: Synthetic oligonucleotide
uucccaacguuugaaccgg

SEQ ID NO: 300158 - RNA, 19 nt, Artificial Sequence
  Description of Artificial Sequence: Synthetic oligonucleotide
cuuauacuucuccccauac

SEQ ID NO: 300159 - RNA, 19 nt, Artificial Sequence
  Description of Artificial Sequence: Synthetic oligonucleotide
acuacugccuguaauagaa

SEQ ID NO: 300160 - RNA, 19 nt, Artificial Sequence
  Description of Artificial Sequence: Synthetic oligonucleotide
gacgacagaacguagaauu

SEQ ID NO: 300161 - RNA, 19 nt, Artificial Sequence
  Description of Artificial Sequence: Synthetic oligonucleotide
uagauucaguagccagugg

SEQ ID NO: 300162 - RNA, 19 nt, Artificial Sequence
  Description of Artificial Sequence: Synthetic oligonucleotide
uucggggugcccaacagau

SEQ ID NO: 300163 - RNA, 19 nt, Artificial Sequence
  Description of Artificial Sequence: Synthetic oligonucleotide
acaacgcucuuccagugcu

SEQ ID NO: 300164 - RNA, 19 nt, Artificial Sequence
  Description of Artificial Sequence: Synthetic oligonucleotide
ugaaagagagagagagauc

SEQ ID NO: 300165 - RNA, 19 nt, Artificial Sequence
  Description of Artificial Sequence: Synthetic oligonucleotide
gaaccggaugcacgggugg

SEQ ID NO: 300166 - RNA, 19 nt, Artificial Sequence
  Description of Artificial Sequence: Synthetic oligonucleotide
uaacuuccuaaaagcagaa

SEQ ID NO: 300167 - RNA, 19 nt, Artificial Sequence
  Description of Artificial Sequence: Synthetic oligonucleotide
aguacaacuuuuggcaugu

SEQ ID NO: 300168 - RNA, 19 nt, Artificial Sequence
  Description of Artificial Sequence: Synthetic oligonucleotide
gagagagagagaucaggca

SEQ ID NO: 300169 - RNA, 19 nt, Artificial Sequence
  Description of Artificial Sequence: Synthetic oligonucleotide
uuacaacgcucuuccagug

SEQ ID NO: 300170 - RNA, 19 nt, Artificial Sequence
  Description of Artificial Sequence: Synthetic oligonucleotide
caagcgguucacuuuuaag

SEQ ID NO: 300171 - RNA, 19 nt, Artificial Sequence
  Description of Artificial Sequence: Synthetic oligonucleotide
agaauugacgacagaacgu

SEQ ID NO: 300172 - RNA, 19 nt, Artificial Sequence
  Description of Artificial Sequence: Synthetic oligonucleotide
ugaaccggaugcacgggug

SEQ ID NO: 300173 - RNA, 19 nt, Artificial Sequence
  Description of Artificial Sequence: Synthetic oligonucleotide
aaagagagagagagaucag

SEQ ID NO: 300174 - RNA, 19 nt, Artificial Sequence
  Description of Artificial Sequence: Synthetic oligonucleotide
uucccauauucuguuuagg

SEQ ID NO: 300175 - RNA, 19 nt, Artificial Sequence
  Description of Artificial Sequence: Synthetic oligonucleotide
cuuaucccgguagauacug

SEQ ID NO: 300176 - RNA, 19 nt, Artificial Sequence
  Description of Artificial Sequence: Synthetic oligonucleotide
aacucuccuuagcuuuaag

SEQ ID NO: 300177 - RNA, 19 nt, Artificial Sequence
  Description of Artificial Sequence: Synthetic oligonucleotide
gaauugacgacagaacgua

SEQ ID NO: 300178 - RNA, 19 nt, Artificial Sequence
  Description of Artificial Sequence: Synthetic oligonucleotide
auauaauaccaaguacagu

SEQ ID NO: 300179 - RNA, 19 nt, Artificial Sequence
  Description of Artificial Sequence: Synthetic oligonucleotide
gaacccuagauugauacua

SEQ ID NO: 300180 - RNA, 19 nt, Artificial Sequence
  Description of Artificial Sequence: Synthetic oligonucleotide
uugaaccggaugcacgggu

SEQ ID NO: 300181 - RNA, 19 nt, Artificial Sequence
  Description of Artificial Sequence: Synthetic oligonucleotide
gguuggcacucccugagcg

SEQ ID NO: 300182 - RNA, 19 nt, Artificial Sequence
  Description of Artificial Sequence: Synthetic oligonucleotide
uuugaaccggaugcacggg

SEQ ID NO: 300183 - RNA, 19 nt, Artificial Sequence
  Description of Artificial Sequence: Synthetic oligonucleotide
uucguuagcaguguagcuu

SEQ ID NO: 300184 - RNA, 19 nt, Artificial Sequence
  Description of Artificial Sequence: Synthetic oligonucleotide
gccuguaauagaauugacg

SEQ ID NO: 300185 - RNA, 19 nt, Artificial Sequence
  Description of Artificial Sequence: Synthetic oligonucleotide
uacuacugccuguaauaga

SEQ ID NO: 300186 - RNA, 19 nt, Artificial Sequence
  Description of Artificial Sequence: Synthetic oligonucleotide
auguuggauagcugcccgg

SEQ ID NO: 300187 - RNA, 19 nt, Artificial Sequence
  Description of Artificial Sequence: Synthetic oligonucleotide
ggaagcugacaucaucuag

SEQ ID NO: 300188 - RNA, 19 nt, Artificial Sequence
  Description of Artificial Sequence: Synthetic oligonucleotide
agauugauacuaagcaacu

SEQ ID NO: 300189 - RNA, 19 nt, Artificial Sequence
  Description of Artificial Sequence: Synthetic oligonucleotide
ggcggaaaggcguucagug

SEQ ID NO: 300190 - RNA, 19 nt, Artificial Sequence
  Description of Artificial Sequence: Synthetic oligonucleotide
cuacagugcuugcuuaaug

SEQ ID NO: 300191 - RNA, 19 nt, Artificial Sequence
  Description of Artificial Sequence: Synthetic oligonucleotide
ccucacuugaaacuucccg

SEQ ID NO: 300192 - RNA, 19 nt, Artificial Sequence
  Description of Artificial Sequence: Synthetic oligonucleotide
agaacccuagauugauacu

SEQ ID NO: 300193 - RNA, 19 nt, Artificial Sequence
  Description of Artificial Sequence: Synthetic oligonucleotide
acccuagauugauacuaag

SEQ ID NO: 300194 - RNA, 19 nt, Artificial Sequence
  Description of Artificial Sequence: Synthetic oligonucleotide
acuugaaacuucccggcuu

SEQ ID NO: 300195 - RNA, 19 nt, Artificial Sequence
  Description of Artificial Sequence: Synthetic oligonucleotide
ugcucgacgccaugggaug

SEQ ID NO: 300196 - RNA, 19 nt, Artificial Sequence
  Description of Artificial Sequence: Synthetic oligonucleotide
cccuagauugauacuaagc

SEQ ID NO: 300197 - RNA, 19 nt, Artificial Sequence
  Description of Artificial Sequence: Synthetic oligonucleotide
aguguguccccaacauuac

SEQ ID NO: 300198 - RNA, 19 nt, Artificial Sequence
  Description of Artificial Sequence: Synthetic oligonucleotide
uguuggauagcugcccggu

SEQ ID NO: 300199 - RNA, 19 nt, Artificial Sequence
  Description of Artificial Sequence: Synthetic oligonucleotide
acguuugaaccggaugcac

SEQ ID NO: 300200 - RNA, 19 nt, Artificial Sequence
  Description of Artificial Sequence: Synthetic oligonucleotide
gacacgguaugauaugagu

SEQ ID NO: 300201 - RNA, 19 nt, Artificial Sequence
  Description of Artificial Sequence: Synthetic oligonucleotide
ugggaauccguugucuaac

SEQ ID NO: 300202 - RNA, 19 nt, Artificial Sequence
  Description of Artificial Sequence: Synthetic oligonucleotide
ugccuguaauagaauugac

SEQ ID NO: 300203 - RNA, 19 nt, Artificial Sequence
  Description of Artificial Sequence: Synthetic oligonucleotide
uaagaacccuagauugaua

SEQ ID NO: 300204 - RNA, 19 nt, Artificial Sequence
  Description of Artificial Sequence: Synthetic oligonucleotide
aucaaauguauagcugccu

SEQ ID NO: 300205 - RNA, 19 nt, Artificial Sequence
  Description of Artificial Sequence: Synthetic oligonucleotide
gagucggaaauucccaucu

SEQ ID NO: 300206 - RNA, 19 nt, Artificial Sequence
  Description of Artificial Sequence: Synthetic oligonucleotide
cuuacaacgcucuuccagu

SEQ ID NO: 300207 - RNA, 19 nt, Artificial Sequence
  Description of Artificial Sequence: Synthetic oligonucleotide
uguguacuuuacuccugcu

SEQ ID NO: 300208 - RNA, 19 nt, Artificial Sequence
  Description of Artificial Sequence: Synthetic oligonucleotide
cacuugguaccuaauagua

SEQ ID NO: 300209 - RNA, 19 nt, Artificial Sequence
  Description of Artificial Sequence: Synthetic oligonucleotide
gagagcuuaaugcaagcau

SEQ ID NO: 300210 - RNA, 19 nt, Artificial Sequence
  Description of Artificial Sequence: Synthetic oligonucleotide
gcuuuauauguauucccac

SEQ ID NO: 300211 - RNA, 19 nt, Artificial Sequence
  Description of Artificial Sequence: Synthetic oligonucleotide
acagaacguagaauuguug

SEQ ID NO: 300212 - RNA, 19 nt, Artificial Sequence
  Description of Artificial Sequence: Synthetic oligonucleotide
uugccugacuagcagccuc

SEQ ID NO: 300213 - RNA, 19 nt, Artificial Sequence
  Description of Artificial Sequence: Synthetic oligonucleotide
gccccuuugaugcaaauga

SEQ ID NO: 300214 - RNA, 19 nt, Artificial Sequence
  Description of Artificial Sequence: Synthetic oligonucleotide
uggcuuaaucaguucuuuc

SEQ ID NO: 300215 - RNA, 19 nt, Artificial Sequence
  Description of Artificial Sequence: Synthetic oligonucleotide
uguccccaacauuacuacu

SEQ ID NO: 300216 - RNA, 19 nt, Artificial Sequence
  Description of Artificial Sequence: Synthetic oligonucleotide
guguccccaacauuacuac

SEQ ID NO: 300217 - RNA, 19 nt, Artificial Sequence
  Description of Artificial Sequence: Synthetic oligonucleotide
caugaaagagagagagaga

SEQ ID NO: 300218 - RNA, 19 nt, Artificial Sequence
  Description of Artificial Sequence: Synthetic oligonucleotide
uuaucccgguagauacuga

SEQ ID NO: 300219 - RNA, 19 nt, Artificial Sequence
  Description of Artificial Sequence: Synthetic oligonucleotide
uugccacaagauucuguga

SEQ ID NO: 300220 - RNA, 19 nt, Artificial Sequence
  Description of Artificial Sequence: Synthetic oligonucleotide
ggcuuacuagguuggagug

SEQ ID NO: 300221 - RNA, 19 nt, Artificial Sequence
  Description of Artificial Sequence: Synthetic oligonucleotide
gacgccaugggauguugga

SEQ ID NO: 300222 - RNA, 19 nt, Artificial Sequence
  Description of Artificial Sequence: Synthetic oligonucleotide
cagccucugaacacucacc

SEQ ID NO: 300223 - RNA, 19 nt, Artificial Sequence
  Description of Artificial Sequence: Synthetic oligonucleotide
agucggaaauucccaucug

SEQ ID NO: 300224 - RNA, 19 nt, Artificial Sequence
  Description of Artificial Sequence: Synthetic oligonucleotide
guuggcacucccugagcgc

SEQ ID NO: 300225 - RNA, 19 nt, Artificial Sequence
  Description of Artificial Sequence: Synthetic oligonucleotide
acuagguuggaguggcauu

SEQ ID NO: 300226 - RNA, 19 nt, Artificial Sequence
  Description of Artificial Sequence: Synthetic oligonucleotide
aaauagcaagcugcuggau

SEQ ID NO: 300227 - RNA, 19 nt, Artificial Sequence
  Description of Artificial Sequence: Synthetic oligonucleotide
gguuaauuaauaggcuuuc

SEQ ID NO: 300228 - RNA, 19 nt, Artificial Sequence
  Description of Artificial Sequence: Synthetic oligonucleotide
acgacagaacguagaauug

SEQ ID NO: 300229 - RNA, 19 nt, Artificial Sequence
  Description of Artificial Sequence: Synthetic oligonucleotide
gaauccguugucuaacauu

SEQ ID NO: 300230 - RNA, 19 nt, Artificial Sequence
  Description of Artificial Sequence: Synthetic oligonucleotide
ugggcgagucagugauucg

SEQ ID NO: 300231 - RNA, 19 nt, Artificial Sequence
  Description of Artificial Sequence: Synthetic oligonucleotide
uagaauuguugguggcuua

SEQ ID NO: 300232 - RNA, 19 nt, Artificial Sequence
  Description of Artificial Sequence: Synthetic oligonucleotide
uacuuuacuccugcucgac

SEQ ID NO: 300233 - RNA, 19 nt, Artificial Sequence
  Description of Artificial Sequence: Synthetic oligonucleotide
aacccuagauugauacuaa

SEQ ID NO: 300234 - RNA, 19 nt, Artificial Sequence
  Description of Artificial Sequence: Synthetic oligonucleotide
agacuggcuuacaacgcuc

SEQ ID NO: 300235 - RNA, 19 nt, Artificial Sequence
  Description of Artificial Sequence: Synthetic oligonucleotide
uucugcguugcucgagguc

SEQ ID NO: 300236 - RNA, 19 nt, Artificial Sequence
  Description of Artificial Sequence: Synthetic oligonucleotide
agcugacacgguaugauau

SEQ ID NO: 300237 - RNA, 19 nt, Artificial Sequence
  Description of Artificial Sequence: Synthetic oligonucleotide
guauguugaggcuuggauu

SEQ ID NO: 300238 - RNA, 19 nt, Artificial Sequence
  Description of Artificial Sequence: Synthetic oligonucleotide
auugugcuaucuagcagcu

SEQ ID NO: 300239 - RNA, 19 nt, Artificial Sequence
  Description of Artificial Sequence: Synthetic oligonucleotide
aaaagggcggaaaggcguu

SEQ ID NO: 300240 - RNA, 19 nt, Artificial Sequence
  Description of Artificial Sequence: Synthetic oligonucleotide
cugaaauagcaagcugcug

SEQ ID NO: 300241 - RNA, 19 nt, Artificial Sequence
  Description of Artificial Sequence: Synthetic oligonucleotide
gaugcacggguggaagcug

SEQ ID NO: 300242 - RNA, 19 nt, Artificial Sequence
  Description of Artificial Sequence: Synthetic oligonucleotide
uuacuagguuggaguggca

SEQ ID NO: 300243 - RNA, 19 nt, Artificial Sequence
  Description of Artificial Sequence: Synthetic oligonucleotide
acuugguaccuaauaguaa

SEQ ID NO: 300244 - RNA, 19 nt, Artificial Sequence
  Description of Artificial Sequence: Synthetic oligonucleotide
acucgaugcagaaacucaa

SEQ ID NO: 300245 - RNA, 19 nt, Artificial Sequence
  Description of Artificial Sequence: Synthetic oligonucleotide
cacugugauuccuucaaua

SEQ ID NO: 300246 - RNA, 19 nt, Artificial Sequence
  Description of Artificial Sequence: Synthetic oligonucleotide
gcugaacugaugauugaug

SEQ ID NO: 300247 - RNA, 19 nt, Artificial Sequence
  Description of Artificial Sequence: Synthetic oligonucleotide
aagggcggaaaggcguuca

SEQ ID NO: 300248 - RNA, 19 nt, Artificial Sequence
  Description of Artificial Sequence: Synthetic oligonucleotide
gggcgagucagugauucgg

SEQ ID NO: 300249 - RNA, 19 nt, Artificial Sequence
  Description of Artificial Sequence: Synthetic oligonucleotide
gcugacacgguaugauaug

SEQ ID NO: 300250 - RNA, 19 nt, Artificial Sequence
  Description of Artificial Sequence: Synthetic oligonucleotide
guaguccugaaaaguguca

SEQ ID NO: 300251 - RNA, 19 nt, Artificial Sequence
  Description of Artificial Sequence: Synthetic oligonucleotide
aaacucuccuuagcuuuaa

SEQ ID NO: 300252 - RNA, 19 nt, Artificial Sequence
  Description of Artificial Sequence: Synthetic oligonucleotide
uggggaguguguccccaac

SEQ ID NO: 300253 - RNA, 19 nt, Artificial Sequence
  Description of Artificial Sequence: Synthetic oligonucleotide
augauaugagucggaaauu

SEQ ID NO: 300254 - RNA, 19 nt, Artificial Sequence
  Description of Artificial Sequence: Synthetic oligonucleotide
cacuugugccugcauuaac

SEQ ID NO: 300255 - RNA, 19 nt, Artificial Sequence
  Description of Artificial Sequence: Synthetic oligonucleotide
ccaacguuugaaccggaug

SEQ ID NO: 300256 - RNA, 19 nt, Artificial Sequence
  Description of Artificial Sequence: Synthetic oligonucleotide
cugacacgguaugauauga

SEQ ID NO: 300257 - RNA, 19 nt, Artificial Sequence
  Description of Artificial Sequence: Synthetic oligonucleotide
ugccggguccgucucugga

SEQ ID NO: 300258 - RNA, 19 nt, Artificial Sequence
  Description of Artificial Sequence: Synthetic oligonucleotide
agcuugacacaaaugcuuu

SEQ ID NO: 300259 - RNA, 19 nt, Artificial Sequence
  Description of Artificial Sequence: Synthetic oligonucleotide
cucuggaccgaagcugaag

SEQ ID NO: 300260 - RNA, 19 nt, Artificial Sequence
  Description of Artificial Sequence: Synthetic oligonucleotide
guggcauuagauaaaguuu

SEQ ID NO: 300261 - RNA, 19 nt, Artificial Sequence
  Description of Artificial Sequence: Synthetic oligonucleotide
acauuacuacugccuguaa

SEQ ID NO: 300262 - RNA, 19 nt, Artificial Sequence
  Description of Artificial Sequence: Synthetic oligonucleotide
gguaugauaugagucggaa

SEQ ID NO: 300263 - RNA, 19 nt, Artificial Sequence
  Description of Artificial Sequence: Synthetic oligonucleotide
gcuaucuagcagcugaacu

SEQ ID NO: 300264 - RNA, 19 nt, Artificial Sequence
  Description of Artificial Sequence: Synthetic oligonucleotide
aaccggaugcacgggugga

SEQ ID NO: 300265 - RNA, 19 nt, Artificial Sequence
  Description of Artificial Sequence: Synthetic oligonucleotide
gguuacuggaucaaaugua

SEQ ID NO: 300266 - RNA, 19 nt, Artificial Sequence
  Description of Artificial Sequence: Synthetic oligonucleotide
ccugcauuaacuuccuaaa

SEQ ID NO: 300267 - RNA, 19 nt, Artificial Sequence
  Description of Artificial Sequence: Synthetic oligonucleotide
gagagagaucaggcauucc

SEQ ID NO: 300268 - RNA, 19 nt, Artificial Sequence
  Description of Artificial Sequence: Synthetic oligonucleotide
cauuacuacugccuguaau

SEQ ID NO: 300269 - RNA, 19 nt, Artificial Sequence
  Description of Artificial Sequence: Synthetic oligonucleotide
ugcacggguggaagcugac

SEQ ID NO: 300270 - RNA, 19 nt, Artificial Sequence
  Description of Artificial Sequence: Synthetic oligonucleotide
gugagguguugaaaugaca

SEQ ID NO: 300271 - RNA, 19 nt, Artificial Sequence
  Description of Artificial Sequence: Synthetic oligonucleotide
gguauugccacaagauucu

SEQ ID NO: 300272 - RNA, 19 nt, Artificial Sequence
  Description of Artificial Sequence: Synthetic oligonucleotide
ucccaacguuugaaccgga

SEQ ID NO: 300273 - RNA, 19 nt, Artificial Sequence
  Description of Artificial Sequence: Synthetic oligonucleotide
cugauucccaacguuugaa

SEQ ID NO: 300274 - RNA, 19 nt, Artificial Sequence
  Description of Artificial Sequence: Synthetic oligonucleotide
ucgacgccaugggauguug

SEQ ID NO: 300275 - RNA, 19 nt, Artificial Sequence
  Description of Artificial Sequence: Synthetic oligonucleotide
gaccccguguucggggugc

SEQ ID NO: 300276 - RNA, 19 nt, Artificial Sequence
  Description of Artificial Sequence: Synthetic oligonucleotide
acaucccaugcuaguaccu

SEQ ID NO: 300277 - RNA, 19 nt, Artificial Sequence
  Description of Artificial Sequence: Synthetic oligonucleotide
auccguugucuaacauuuc

SEQ ID NO: 300278 - RNA, 19 nt, Artificial Sequence
  Description of Artificial Sequence: Synthetic oligonucleotide
gcauuagauaaaguuuuaa

SEQ ID NO: 300279 - RNA, 19 nt, Artificial Sequence
  Description of Artificial Sequence: Synthetic oligonucleotide
gcuugcuuaauggcacaag

SEQ ID NO: 300280 - RNA, 19 nt, Artificial Sequence
  Description of Artificial Sequence: Synthetic oligonucleotide
caagagcuguuuuccuuaa

SEQ ID NO: 300281 - RNA, 19 nt, Artificial Sequence
  Description of Artificial Sequence: Synthetic oligonucleotide
gacagaacguagaauuguu

SEQ ID NO: 300282 - RNA, 19 nt, Artificial Sequence
  Description of Artificial Sequence: Synthetic oligonucleotide
ccacaucccaugcuaguac

SEQ ID NO: 300283 - RNA, 19 nt, Artificial Sequence
  Description of Artificial Sequence: Synthetic oligonucleotide
acggggagguuggcacucc

SEQ ID NO: 300284 - RNA, 19 nt, Artificial Sequence
  Description of Artificial Sequence: Synthetic oligonucleotide
aaggagggccgcaggacua

SEQ ID NO: 300285 - RNA, 19 nt, Artificial Sequence
  Description of Artificial Sequence: Synthetic oligonucleotide
gguagauacugaugaggua

SEQ ID NO: 300286 - RNA, 19 nt, Artificial Sequence
  Description of Artificial Sequence: Synthetic oligonucleotide
cgguucacuuuuaagccug

SEQ ID NO: 300287 - RNA, 19 nt, Artificial Sequence
  Description of Artificial Sequence: Synthetic oligonucleotide
gggaauccguugucuaaca

SEQ ID NO: 300288 - RNA, 19 nt, Artificial Sequence
  Description of Artificial Sequence: Synthetic oligonucleotide
auucggugccggguccguc

SEQ ID NO: 300289 - RNA, 19 nt, Artificial Sequence
  Description of Artificial Sequence: Synthetic oligonucleotide
gaaucuccucuugugggau

SEQ ID NO: 300290 - RNA, 19 nt, Artificial Sequence
  Description of Artificial Sequence: Synthetic oligonucleotide
acgccaugggauguuggau

SEQ ID NO: 300291 - RNA, 19 nt, Artificial Sequence
  Description of Artificial Sequence: Synthetic oligonucleotide
gaacggggagguuggcacu

SEQ ID NO: 300292 - RNA, 19 nt, Artificial Sequence
  Description of Artificial Sequence: Synthetic oligonucleotide
ucggugccggguccgucuc

SEQ ID NO: 300293 - RNA, 19 nt, Artificial Sequence
  Description of Artificial Sequence: Synthetic oligonucleotide
gcggaaaggcguucaguga

SEQ ID NO: 300294 - RNA, 19 nt, Artificial Sequence
  Description of Artificial Sequence: Synthetic oligonucleotide
gaauuguugguggcuuaau

SEQ ID NO: 300295 - RNA, 19 nt, Artificial Sequence
  Description of Artificial Sequence: Synthetic oligonucleotide
cucgaugcagaaacucaau

SEQ ID NO: 300296 - RNA, 19 nt, Artificial Sequence
  Description of Artificial Sequence: Synthetic oligonucleotide
cacuugaaacuucccggcu

SEQ ID NO: 300297 - RNA, 19 nt, Artificial Sequence
  Description of Artificial Sequence: Synthetic oligonucleotide
cugcucgacgccaugggau

SEQ ID NO: 300298 - RNA, 19 nt, Artificial Sequence
  Description of Artificial Sequence: Synthetic oligonucleotide
cuaugaccacauuauccuu

SEQ ID NO: 300299 - RNA, 19 nt, Artificial Sequence
  Description of Artificial Sequence: Synthetic oligonucleotide
ccggguccgucucuggacc

SEQ ID NO: 300300 - RNA, 19 nt, Artificial Sequence
  Description of Artificial Sequence: Synthetic oligonucleotide
gcaaagguuuugcuuaauu

SEQ ID NO: 300301 - RNA, 19 nt, Artificial Sequence
  Description of Artificial Sequence: Synthetic oligonucleotide
gacgccaaggagggccgca

SEQ ID NO: 300302 - RNA, 19 nt, Artificial Sequence
  Description of Artificial Sequence: Synthetic oligonucleotide
ggcauuagauaaaguuuua

SEQ ID NO: 300303 - RNA, 19 nt, Artificial Sequence
  Description of Artificial Sequence: Synthetic oligonucleotide
gggaguguguccccaacau

SEQ ID NO: 300304 - RNA, 19 nt, Artificial Sequence
  Description of Artificial Sequence: Synthetic oligonucleotide
gccggguccgucucuggac

SEQ ID NO: 300305 - RNA, 19 nt, Artificial Sequence
  Description of Artificial Sequence: Synthetic oligonucleotide
gcgguucacuuuuaagccu

SEQ ID NO: 300306 - RNA, 19 nt, Artificial Sequence
  Description of Artificial Sequence: Synthetic oligonucleotide
guggcuuaaucaguucuuu

SEQ ID NO: 300307 - RNA, 19 nt, Artificial Sequence
  Description of Artificial Sequence: Synthetic oligonucleotide
cugccuuguguugguguca

SEQ ID NO: 300308 - RNA, 19 nt, Artificial Sequence
  Description of Artificial Sequence: Synthetic oligonucleotide
cccgguggggagugugucc

SEQ ID NO: 300309 - RNA, 19 nt, Artificial Sequence
  Description of Artificial Sequence: Synthetic oligonucleotide
cagcgaggaccccguguuc

SEQ ID NO: 300310 - RNA, 19 nt, Artificial Sequence
  Description of Artificial Sequence: Synthetic oligonucleotide
auaugucgccagagcaguu

SEQ ID NO: 300311 - RNA, 19 nt, Artificial Sequence
  Description of Artificial Sequence: Synthetic oligonucleotide
ggugcuccugacuguaaau

SEQ ID NO: 300312 - RNA, 19 nt, Artificial Sequence
  Description of Artificial Sequence: Synthetic oligonucleotide
cggaugcacggguggaagc

SEQ ID NO: 300313 - RNA, 19 nt, Artificial Sequence
  Description of Artificial Sequence: Synthetic oligonucleotide
ggaauccguugucuaacau

SEQ ID NO: 300314 - RNA, 19 nt, Artificial Sequence
  Description of Artificial Sequence: Synthetic oligonucleotide
cuacugccuguaauagaau

SEQ ID NO: 300315 - RNA, 19 nt, Artificial Sequence
  Description of Artificial Sequence: Synthetic oligonucleotide
ccggaugcacggguggaag

SEQ ID NO: 300316 - RNA, 19 nt, Artificial Sequence
  Description of Artificial Sequence: Synthetic oligonucleotide
ggaccccguguucggggug

SEQ ID NO: 300317 - RNA, 19 nt, Artificial Sequence
  Description of Artificial Sequence: Synthetic oligonucleotide
cgacaccugggcgagucag

SEQ ID NO: 300318 - RNA, 19 nt, Artificial Sequence
  Description of Artificial Sequence: Synthetic oligonucleotide
gauucggugccggguccgu

SEQ ID NO: 300319 - RNA, 19 nt, Artificial Sequence
  Description of Artificial Sequence: Synthetic oligonucleotide
caucccaugcuaguaccuu

SEQ ID NO: 300320 - RNA, 19 nt, Artificial Sequence
  Description of Artificial Sequence: Synthetic oligonucleotide
ggcgagucagugauucggu

SEQ ID NO: 300321 - RNA, 19 nt, Artificial Sequence
  Description of Artificial Sequence: Synthetic oligonucleotide
gggagcuuuuguggaguaa

SEQ ID NO: 300322 - RNA, 19 nt, Artificial Sequence
  Description of Artificial Sequence: Synthetic oligonucleotide
cggguccgucucuggaccg

SEQ ID NO: 300323 - RNA, 19 nt, Artificial Sequence
  Description of Artificial Sequence: Synthetic oligonucleotide
gcuuaucccgguagauacu

SEQ ID NO: 300324 - RNA, 19 nt, Artificial Sequence
  Description of Artificial Sequence: Synthetic oligonucleotide
ucccggcuuuugugacaua

SEQ ID NO: 300325 - RNA, 19 nt, Artificial Sequence
  Description of Artificial Sequence: Synthetic oligonucleotide
cccguguucggggugccca

SEQ ID NO: 300326 - RNA, 19 nt, Artificial Sequence
  Description of Artificial Sequence: Synthetic oligonucleotide
ggguccgucucuggaccga

SEQ ID NO: 300327 - RNA, 19 nt, Artificial Sequence
  Description of Artificial Sequence: Synthetic oligonucleotide
gggcggaaaggcguucagu

SEQ ID NO: 300328 - RNA, 19 nt, Artificial Sequence
  Description of Artificial Sequence: Synthetic oligonucleotide
cccaacguuugaaccggau

SEQ ID NO: 300329 - RNA, 19 nt, Artificial Sequence
  Description of Artificial Sequence: Synthetic oligonucleotide
cucgacgccaugggauguu

SEQ ID NO: 300330 - RNA, 19 nt, Artificial Sequence
  Description of Artificial Sequence: Synthetic oligonucleotide
gcucgacgccaugggaugu

SEQ ID NO: 300331 - RNA, 19 nt, Artificial Sequence
  Description of Artificial Sequence: Synthetic oligonucleotide
ccgacaccugggcgaguca

SEQ ID NO: 300332 - RNA, 19 nt, Artificial Sequence
  Description of Artificial Sequence: Synthetic oligonucleotide
ccccguguucggggugccc

SEQ ID NO: 300333 - RNA, 19 nt, Artificial Sequence
  Description of Artificial Sequence: Synthetic oligonucleotide
cggugccggguccgucucu

SEQ ID NO: 300334 - RNA, 19 nt, Artificial Sequence
  Description of Artificial Sequence: Synthetic oligonucleotide
aacauaaucgaccacuugg

SEQ ID NO: 300335 - RNA, 19 nt, Artificial Sequence
  Description of Artificial Sequence: Synthetic oligonucleotide
uaaaccauugguaaugucg

SEQ ID NO: 300336 - RNA, 19 nt, Artificial Sequence
  Description of Artificial Sequence: Synthetic oligonucleotide
acaaauucugcauaacggc

SEQ ID NO: 300337 - RNA, 19 nt, Artificial Sequence
  Description of Artificial Sequence: Synthetic oligonucleotide
uaaguaucgaaguagcucc

SEQ ID NO: 300338 - RNA, 19 nt, Artificial Sequence
  Description of Artificial Sequence: Synthetic oligonucleotide
aauacaguacucuuguacu

SEQ ID NO: 300339 - RNA, 19 nt, Artificial Sequence
  Description of Artificial Sequence: Synthetic oligonucleotide
aaaucuaagauuuccggga

SEQ ID NO: 300340 - RNA, 19 nt, Artificial Sequence
  Description of Artificial Sequence: Synthetic oligonucleotide
uuugcgagagugcagaaag

SEQ ID NO: 300341 - RNA, 19 nt, Artificial Sequence
  Description of Artificial Sequence: Synthetic oligonucleotide
auauaaaagccauaggugu

SEQ ID NO: 300342 - RNA, 19 nt, Artificial Sequence
  Description of Artificial Sequence: Synthetic oligonucleotide
uuauguuagccuuuggucc

SEQ ID NO: 300343 - RNA, 19 nt, Artificial Sequence
  Description of Artificial Sequence: Synthetic oligonucleotide
ugcauaacggcauugaaga

SEQ ID NO: 300344 - RNA, 19 nt, Artificial Sequence
  Description of Artificial Sequence: Synthetic oligonucleotide
uuugcguagguuaaaacca

SEQ ID NO: 300345 - RNA, 19 nt, Artificial Sequence
  Description of Artificial Sequence: Synthetic oligonucleotide
ucauguaccaaggagacag

SEQ ID NO: 300346 - RNA, 19 nt, Artificial Sequence
  Description of Artificial Sequence: Synthetic oligonucleotide
uuaagacacagccacacug

SEQ ID NO: 300347 - RNA, 19 nt, Artificial Sequence
  Description of Artificial Sequence: Synthetic oligonucleotide
ucuauauuuaucucaucag

SEQ ID NO: 300348 - RNA, 19 nt, Artificial Sequence
  Description of Artificial Sequence: Synthetic oligonucleotide
uugcaucucauuaagaaac

SEQ ID NO: 300349 - RNA, 19 nt, Artificial Sequence
  Description of Artificial Sequence: Synthetic oligonucleotide
cuuugcguagguuaaaacc

SEQ ID NO: 300350 - RNA, 19 nt, Artificial Sequence
  Description of Artificial Sequence: Synthetic oligonucleotide
aacaacuccauauaaggaa

SEQ ID NO: 300351 - RNA, 19 nt, Artificial Sequence
  Description of Artificial Sequence: Synthetic oligonucleotide
acaugauuguacuaguuag

SEQ ID NO: 300352 - RNA, 19 nt, Artificial Sequence
  Description of Artificial Sequence: Synthetic oligonucleotide
uucuguuagugccagauca

SEQ ID NO: 300353 - RNA, 19 nt, Artificial Sequence
  Description of Artificial Sequence: Synthetic oligonucleotide
aguuguccaaacuaagcac

SEQ ID NO: 300354 - RNA, 19 nt, Artificial Sequence
  Description of Artificial Sequence: Synthetic oligonucleotide
uuuauguuagccuuugguc

SEQ ID NO: 300355 - RNA, 19 nt, Artificial Sequence
  Description of Artificial Sequence: Synthetic oligonucleotide
uguuuucuaacauaaucga

SEQ ID NO: 300356 - RNA, 19 nt, Artificial Sequence
  Description of Artificial Sequence: Synthetic oligonucleotide
uucaacaacuccauauaag

SEQ ID NO: 300357 - RNA, 19 nt, Artificial Sequence
  Description of Artificial Sequence: Synthetic oligonucleotide
caaaucuaagauuuccggg

SEQ ID NO: 300358 - RNA, 19 nt, Artificial Sequence
  Description of Artificial Sequence: Synthetic oligonucleotide
aaugucgccaugaagaaca

SEQ ID NO: 300359 - RNA, 19 nt, Artificial Sequence
  Description of Artificial Sequence: Synthetic oligonucleotide
uguuuguuaacuuugcgua

SEQ ID NO: 300360 - RNA, 19 nt, Artificial Sequence
  Description of Artificial Sequence: Synthetic oligonucleotide
agauucauguaccaaggag

SEQ ID NO: 300361 - RNA, 19 nt, Artificial Sequence
  Description of Artificial Sequence: Synthetic oligonucleotide
ugaagaaacaaguguuucc

SEQ ID NO: 300362 - RNA, 19 nt, Artificial Sequence
  Description of Artificial Sequence: Synthetic oligonucleotide
auuuccgggaacuuuaugu

SEQ ID NO: 300363 - RNA, 19 nt, Artificial Sequence
  Description of Artificial Sequence: Synthetic oligonucleotide
uucaaauggagagugagga

SEQ ID NO: 300364 - RNA, 19 nt, Artificial Sequence
  Description of Artificial Sequence: Synthetic oligonucleotide
uugaacuacaguauuugac

SEQ ID NO: 300365 - RNA, 19 nt, Artificial Sequence
  Description of Artificial Sequence: Synthetic oligonucleotide
uucgcuaaggcuuucuuca

SEQ ID NO: 300366 - RNA, 19 nt, Artificial Sequence
  Description of Artificial Sequence: Synthetic oligonucleotide
aucgguuugaacuacagua

SEQ ID NO: 300367 - RNA, 19 nt, Artificial Sequence
  Description of Artificial Sequence: Synthetic oligonucleotide
acauugguucugcagauuc

SEQ ID NO: 300368 - RNA, 19 nt, Artificial Sequence
  Description of Artificial Sequence: Synthetic oligonucleotide
uaauguccugaccucauag

SEQ ID NO: 300369 - RNA, 19 nt, Artificial Sequence
  Description of Artificial Sequence: Synthetic oligonucleotide
cauggcuaaaguaagagga

SEQ ID NO: 300370 - RNA, 19 nt, Artificial Sequence
  Description of Artificial Sequence: Synthetic oligonucleotide
aagcacgagguagugaggc

SEQ ID NO: 300371 - RNA, 19 nt, Artificial Sequence
  Description of Artificial Sequence: Synthetic oligonucleotide
uguaugugcuuacuugucc

SEQ ID NO: 300372 - RNA, 19 nt, Artificial Sequence
  Description of Artificial Sequence: Synthetic oligonucleotide
augguuggauucaauaucc

SEQ ID NO: 300373 - RNA, 19 nt, Artificial Sequence
  Description of Artificial Sequence: Synthetic oligonucleotide
ucugaucaucuaaaacugg

SEQ ID NO: 300374 - RNA, 19 nt, Artificial Sequence
  Description of Artificial Sequence: Synthetic oligonucleotide
ugaugugaaaccacugccc

SEQ ID NO: 300375 - RNA, 19 nt, Artificial Sequence
  Description of Artificial Sequence: Synthetic oligonucleotide
uuuaggagucacaauucgc

SEQ ID NO: 300376 - RNA, 19 nt, Artificial Sequence
  Description of Artificial Sequence: Synthetic oligonucleotide
ucuucaaauggagagugag

SEQ ID NO: 300377 - RNA, 19 nt, Artificial Sequence
  Description of Artificial Sequence: Synthetic oligonucleotide
aguuaccuuguuccaaccc

SEQ ID NO: 300378 - RNA, 19 nt, Artificial Sequence
  Description of Artificial Sequence: Synthetic oligonucleotide
uucuguaugugcuuacuug

SEQ ID NO: 300379 - RNA, 19 nt, Artificial Sequence
  Description of Artificial Sequence: Synthetic oligonucleotide
auugguacuuuccuccagg

SEQ ID NO: 300380 - RNA, 19 nt, Artificial Sequence
  Description of Artificial Sequence: Synthetic oligonucleotide
acccuuuaaaacguguugc

SEQ ID NO: 300381 - RNA, 19 nt, Artificial Sequence
  Description of Artificial Sequence: Synthetic oligonucleotide
uaaggugucugcacauugg

SEQ ID NO: 300382 - RNA, 19 nt, Artificial Sequence
  Description of Artificial Sequence: Synthetic oligonucleotide
gauauuccacuccacauuc

SEQ ID NO: 300383 - RNA, 19 nt, Artificial Sequence
  Description of Artificial Sequence: Synthetic oligonucleotide
uuaacuuugcguagguuaa

SEQ ID NO: 300384 - RNA, 19 nt, Artificial Sequence
  Description of Artificial Sequence: Synthetic oligonucleotide
uguaccaaggagacagucc

SEQ ID NO: 300385 - RNA, 19 nt, Artificial Sequence
  Description of Artificial Sequence: Synthetic oligonucleotide
ugcagaaagccguuucugg

SEQ ID NO: 300386 - RNA, 19 nt, Artificial Sequence
  Description of Artificial Sequence: Synthetic oligonucleotide
caguagaauuaccaaaugc

SEQ ID NO: 300387 - RNA, 19 nt, Artificial Sequence
  Description of Artificial Sequence: Synthetic oligonucleotide
gauucauguaccaaggaga

SEQ ID NO: 300388 - RNA, 19 nt, Artificial Sequence
  Description of Artificial Sequence: Synthetic oligonucleotide
agagaugacuacuuggagu

SEQ ID NO: 300389 - RNA, 19 nt, Artificial Sequence
  Description of Artificial Sequence: Synthetic oligonucleotide
agccaaaucuaagauuucc

SEQ ID NO: 300390 - RNA, 19 nt, Artificial Sequence
  Description of Artificial Sequence: Synthetic oligonucleotide
aaaucaaggaaagauucau

SEQ ID NO: 300391 - RNA, 19 nt, Artificial Sequence
  Description of Artificial Sequence: Synthetic oligonucleotide
aacaugguuggauucaaua

SEQ ID NO: 300392 - RNA, 19 nt, Artificial Sequence
  Description of Artificial Sequence: Synthetic oligonucleotide
ucgaguagugcuucaaggc

SEQ ID NO: 300393 - RNA, 19 nt, Artificial Sequence
  Description of Artificial Sequence: Synthetic oligonucleotide
ugaguuuaguacuuuaguu

SEQ ID NO: 300394 - RNA, 19 nt, Artificial Sequence
  Description of Artificial Sequence: Synthetic oligonucleotide
uuuaggugaagaacuuucu

SEQ ID NO: 300395 - RNA, 19 nt, Artificial Sequence
  Description of Artificial Sequence: Synthetic oligonucleotide
auucauguaccaaggagac

SEQ ID NO: 300396 - RNA, 19 nt, Artificial Sequence
  Description of Artificial Sequence: Synthetic oligonucleotide
uacagauaucauuuaggug

SEQ ID NO: 300397 - RNA, 19 nt, Artificial Sequence
  Description of Artificial Sequence: Synthetic oligonucleotide
auauuuaucucaucaggau

SEQ ID NO: 300398 - RNA, 19 nt, Artificial Sequence
  Description of Artificial Sequence: Synthetic oligonucleotide
gauaucauuuaggugaaga

SEQ ID NO: 300399 - RNA, 19 nt, Artificial Sequence
  Description of Artificial Sequence: Synthetic oligonucleotide
ucuucggccacauucuuac

SEQ ID NO: 300400 - RNA, 19 nt, Artificial Sequence
  Description of Artificial Sequence: Synthetic oligonucleotide
caugauuguacuaguuagc

SEQ ID NO: 300401 - RNA, 19 nt, Artificial Sequence
  Description of Artificial Sequence: Synthetic oligonucleotide
cacuuguaacaccagacgc

SEQ ID NO: 300402 - RNA, 19 nt, Artificial Sequence
  Description of Artificial Sequence: Synthetic oligonucleotide
gucgaguagugcuucaagg

SEQ ID NO: 300403 - RNA, 19 nt, Artificial Sequence
  Description of Artificial Sequence: Synthetic oligonucleotide
uuugaacuacaguauuuga

SEQ ID NO: 300404 - RNA, 19 nt, Artificial Sequence
  Description of Artificial Sequence: Synthetic oligonucleotide
ugguccauuacccugccgu

SEQ ID NO: 300405 - RNA, 19 nt, Artificial Sequence
  Description of Artificial Sequence: Synthetic oligonucleotide
cugaugugaaaccacugcc

SEQ ID NO: 300406 - RNA, 19 nt, Artificial Sequence
  Description of Artificial Sequence: Synthetic oligonucleotide
aguauggucagugcuacag

SEQ ID NO: 300407 - RNA, 19 nt, Artificial Sequence
  Description of Artificial Sequence: Synthetic oligonucleotide
auucgcuaaggcuuucuuc

SEQ ID NO: 300408 - RNA, 19 nt, Artificial Sequence
  Description of Artificial Sequence: Synthetic oligonucleotide
uuuccgggaacuuuaugug

SEQ ID NO: 300409 - RNA, 19 nt, Artificial Sequence
  Description of Artificial Sequence: Synthetic oligonucleotide
caaacuccccacaucaccc

SEQ ID NO: 300410 - RNA, 19 nt, Artificial Sequence
  Description of Artificial Sequence: Synthetic oligonucleotide
caguaaguaucgaaguagc

SEQ ID NO: 300411 - RNA, 19 nt, Artificial Sequence
  Description of Artificial Sequence: Synthetic oligonucleotide
ucuaagauuuccgggaacu

SEQ ID NO: 300412 - RNA, 19 nt, Artificial Sequence
  Description of Artificial Sequence: Synthetic oligonucleotide
cuaaaguaagaggaccugg

SEQ ID NO: 300413 - RNA, 19 nt, Artificial Sequence
  Description of Artificial Sequence: Synthetic oligonucleotide
uuaguacuuuaguuacagg

SEQ ID NO: 300414 - RNA, 19 nt, Artificial Sequence
  Description of Artificial Sequence: Synthetic oligonucleotide
cacacuuguaacaccagac

SEQ ID NO: 300415 - RNA, 19 nt, Artificial Sequence
  Description of Artificial Sequence: Synthetic oligonucleotide
aaucgguuugaacuacagu

SEQ ID NO: 300416 - RNA, 19 nt, Artificial Sequence
  Description of Artificial Sequence: Synthetic oligonucleotide
ucgaguucuccauugguac

SEQ ID NO: 300417 - RNA, 19 nt, Artificial Sequence
  Description of Artificial Sequence: Synthetic oligonucleotide
guuuguuaacuuugcguag

SEQ ID NO: 300418 - RNA, 19 nt, Artificial Sequence
  Description of Artificial Sequence: Synthetic oligonucleotide
uuaggugaagaacuuucuc

SEQ ID NO: 300419 - RNA, 19 nt, Artificial Sequence
  Description of Artificial Sequence: Synthetic oligonucleotide
ucgaaguagcuccuggcug

SEQ ID NO: 300420 - RNA, 19 nt, Artificial Sequence
  Description of Artificial Sequence: Synthetic oligonucleotide
uagcucgccaccaaagaug

SEQ ID NO: 300421 - RNA, 19 nt, Artificial Sequence
  Description of Artificial Sequence: Synthetic oligonucleotide
uguuagugccagaucaggu

SEQ ID NO: 300422 - RNA, 19 nt, Artificial Sequence
  Description of Artificial Sequence: Synthetic oligonucleotide
guacuuuaguuacaggcac

SEQ ID NO: 300423 - RNA, 19 nt, Artificial Sequence
  Description of Artificial Sequence: Synthetic oligonucleotide
guaugugcuuacuuguccc

SEQ ID NO: 300424 - RNA, 19 nt, Artificial Sequence
  Description of Artificial Sequence: Synthetic oligonucleotide
uugcguagguuaaaaccag

SEQ ID NO: 300425 - RNA, 19 nt, Artificial Sequence
  Description of Artificial Sequence: Synthetic oligonucleotide
ugucgaguagugcuucaag

SEQ ID NO: 300426 - RNA, 19 nt, Artificial Sequence
  Description of Artificial Sequence: Synthetic oligonucleotide
ugcugguacccuuuaaaac

SEQ ID NO: 300427 - RNA, 19 nt, Artificial Sequence
  Description of Artificial Sequence: Synthetic oligonucleotide
ugccauuuccgauuccugc

SEQ ID NO: 300428 - RNA, 19 nt, Artificial Sequence
  Description of Artificial Sequence: Synthetic oligonucleotide
uacuaguuagcucgccacc

SEQ ID NO: 300429 - RNA, 19 nt, Artificial Sequence
  Description of Artificial Sequence: Synthetic oligonucleotide
uuauuugcaucuugaaguu

SEQ ID NO: 300430 - RNA, 19 nt, Artificial Sequence
  Description of Artificial Sequence: Synthetic oligonucleotide
ugcgagagugcagaaagcc

SEQ ID NO: 300431 - RNA, 19 nt, Artificial Sequence
  Description of Artificial Sequence: Synthetic oligonucleotide
augauuguacuaguuagcu

SEQ ID NO: 300432 - RNA, 19 nt, Artificial Sequence
  Description of Artificial Sequence: Synthetic oligonucleotide
uuguuauuacaguauucuc

SEQ ID NO: 300433 - RNA, 19 nt, Artificial Sequence
  Description of Artificial Sequence: Synthetic oligonucleotide
guugcgggugaacugauac

SEQ ID NO: 300434 - RNA, 19 nt, Artificial Sequence
  Description of Artificial Sequence: Synthetic oligonucleotide
ucuucaguauggucagugc

SEQ ID NO: 300435 - RNA, 19 nt, Artificial Sequence
  Description of Artificial Sequence: Synthetic oligonucleotide
ucgguuugaacuacaguau

SEQ ID NO: 300436 - RNA, 19 nt, Artificial Sequence
  Description of Artificial Sequence: Synthetic oligonucleotide
uggcagauauuccacucca

SEQ ID NO: 300437 - RNA, 19 nt, Artificial Sequence
  Description of Artificial Sequence: Synthetic oligonucleotide
ugcgguccacaaaacuugg

SEQ ID NO: 300438 - RNA, 19 nt, Artificial Sequence
  Description of Artificial Sequence: Synthetic oligonucleotide
gguagugaggcucagaucu

SEQ ID NO: 300439 - RNA, 19 nt, Artificial Sequence
  Description of Artificial Sequence: Synthetic oligonucleotide
ugguugauuccauuucaca

SEQ ID NO: 300440 - RNA, 19 nt, Artificial Sequence
  Description of Artificial Sequence: Synthetic oligonucleotide
gaccucauacaccuuugcc

SEQ ID NO: 300441 - RNA, 19 nt, Artificial Sequence
  Description of Artificial Sequence: Synthetic oligonucleotide
aguucaauauguccauuau

SEQ ID NO: 300442 - RNA, 19 nt, Artificial Sequence
  Description of Artificial Sequence: Synthetic oligonucleotide
uuacccugccgucuugugc

SEQ ID NO: 300443 - RNA, 19 nt, Artificial Sequence
  Description of Artificial Sequence: Synthetic oligonucleotide
ggugucugcacauugguuc

SEQ ID NO: 300444 - RNA, 19 nt, Artificial Sequence
  Description of Artificial Sequence: Synthetic oligonucleotide
gaaugacugucauucacaa

SEQ ID NO: 300445 - RNA, 19 nt, Artificial Sequence
  Description of Artificial Sequence: Synthetic oligonucleotide
aucgaaguagcuccuggcu

SEQ ID NO: 300446 - RNA, 19 nt, Artificial Sequence
  Description of Artificial Sequence: Synthetic oligonucleotide
guucaauauguccauuauc

SEQ ID NO: 300447 - RNA, 19 nt, Artificial Sequence
  Description of Artificial Sequence: Synthetic oligonucleotide
aaacuaagcacgagguagu

SEQ ID NO: 300448 - RNA, 19 nt, Artificial Sequence
  Description of Artificial Sequence: Synthetic oligonucleotide
uguacaugugugucacuga

SEQ ID NO: 300449 - RNA, 19 nt, Artificial Sequence
  Description of Artificial Sequence: Synthetic oligonucleotide
auuguacuaguuagcucgc

SEQ ID NO: 300450 - RNA, 19 nt, Artificial Sequence
  Description of Artificial Sequence: Synthetic oligonucleotide
auggcuaaaguaagaggac

SEQ ID NO: 300451 - RNA, 19 nt, Artificial Sequence
  Description of Artificial Sequence: Synthetic oligonucleotide
ucugcauaacggcauugaa

SEQ ID NO: 300452 - RNA, 19 nt, Artificial Sequence
  Description of Artificial Sequence: Synthetic oligonucleotide
cauucuguagcagauguca

SEQ ID NO: 300453 - RNA, 19 nt, Artificial Sequence
  Description of Artificial Sequence: Synthetic oligonucleotide
uacaugugugucacugaug

SEQ ID NO: 300454 - RNA, 19 nt, Artificial Sequence
  Description of Artificial Sequence: Synthetic oligonucleotide
caaucgguuugaacuacag

SEQ ID NO: 300455 - RNA, 19 nt, Artificial Sequence
  Description of Artificial Sequence: Synthetic oligonucleotide
uucggccacauucuuacau

SEQ ID NO: 300456 - RNA, 19 nt, Artificial Sequence
  Description of Artificial Sequence: Synthetic oligonucleotide
caguuguccaaacuaagca

SEQ ID NO: 300457 - RNA, 19 nt, Artificial Sequence
  Description of Artificial Sequence: Synthetic oligonucleotide
ugauuguacuaguuagcuc

SEQ ID NO: 300458 - RNA, 19 nt, Artificial Sequence
  Description of Artificial Sequence: Synthetic oligonucleotide
ugugcuuacuugucccuga

SEQ ID NO: 300459 - RNA, 19 nt, Artificial Sequence
  Description of Artificial Sequence: Synthetic oligonucleotide
guacuaguuagcucgccac

SEQ ID NO: 300460 - RNA, 19 nt, Artificial Sequence
  Description of Artificial Sequence: Synthetic oligonucleotide
ugcguagguuaaaaccagc

SEQ ID NO: 300461 - RNA, 19 nt, Artificial Sequence
  Description of Artificial Sequence: Synthetic oligonucleotide
uguaauguccugaccucau

SEQ ID NO: 300462 - RNA, 19 nt, Artificial Sequence
  Description of Artificial Sequence: Synthetic oligonucleotide
gaugaauagcagcauucaa

SEQ ID NO: 300463 - RNA, 19 nt, Artificial Sequence
  Description of Artificial Sequence: Synthetic oligonucleotide
aacccuuuccuaagguguc

SEQ ID NO: 300464 - RNA, 19 nt, Artificial Sequence
  Description of Artificial Sequence: Synthetic oligonucleotide
ugauuaaccucagcuccag

SEQ ID NO: 300465 - RNA, 19 nt, Artificial Sequence
  Description of Artificial Sequence: Synthetic oligonucleotide
caaaucaaggaaagauuca

SEQ ID NO: 300466 - RNA, 19 nt, Artificial Sequence
  Description of Artificial Sequence: Synthetic oligonucleotide
gcagaaagccguuucuggg

SEQ ID NO: 300467 - RNA, 19 nt, Artificial Sequence
  Description of Artificial Sequence: Synthetic oligonucleotide
gguaaugucgaguucucca

SEQ ID NO: 300468 - RNA, 19 nt, Artificial Sequence
  Description of Artificial Sequence: Synthetic oligonucleotide
ugugaaaccacugcccuuu

SEQ ID NO: 300469 - RNA, 19 nt, Artificial Sequence
  Description of Artificial Sequence: Synthetic oligonucleotide
agaugcgguccacaaaacu

SEQ ID NO: 300470 - RNA, 19 nt, Artificial Sequence
  Description of Artificial Sequence: Synthetic oligonucleotide
agaaugacugucauucaca

SEQ ID NO: 300471 - RNA, 19 nt, Artificial Sequence
  Description of Artificial Sequence: Synthetic oligonucleotide
cuuuuauguuagccuuugg

SEQ ID NO: 300472 - RNA, 19 nt, Artificial Sequence
  Description of Artificial Sequence: Synthetic oligonucleotide
ucgcucgcucuucagagcu

SEQ ID NO: 300473 - RNA, 19 nt, Artificial Sequence
  Description of Artificial Sequence: Synthetic oligonucleotide
aaacuccccacaucacccu

SEQ ID NO: 300474 - RNA, 19 nt, Artificial Sequence
  Description of Artificial Sequence: Synthetic oligonucleotide
ugcgggugaacugauacaa

SEQ ID NO: 300475 - RNA, 19 nt, Artificial Sequence
  Description of Artificial Sequence: Synthetic oligonucleotide
cuuacuugucccugaagga

SEQ ID NO: 300476 - RNA, 19 nt, Artificial Sequence
  Description of Artificial Sequence: Synthetic oligonucleotide
uuacaggcacagcuuguac

SEQ ID NO: 300477 - RNA, 19 nt, Artificial Sequence
  Description of Artificial Sequence: Synthetic oligonucleotide
aaaccacugcccuuugguu

SEQ ID NO: 300478 - RNA, 19 nt, Artificial Sequence
  Description of Artificial Sequence: Synthetic oligonucleotide
acuuguaacaccagacgcu

SEQ ID NO: 300479 - RNA, 19 nt, Artificial Sequence
  Description of Artificial Sequence: Synthetic oligonucleotide
gaugugaaaccacugcccu

SEQ ID NO: 300480 - RNA, 19 nt, Artificial Sequence
  Description of Artificial Sequence: Synthetic oligonucleotide
aggagcaagcgagaccagc

SEQ ID NO: 300481 - RNA, 19 nt, Artificial Sequence
  Description of Artificial Sequence: Synthetic oligonucleotide
gagaugacuacuuggaguu

SEQ ID NO: 300482 - RNA, 19 nt, Artificial Sequence
  Description of Artificial Sequence: Synthetic oligonucleotide
ucaaguuaccuuguuccaa

SEQ ID NO: 300483 - RNA, 19 nt, Artificial Sequence
  Description of Artificial Sequence: Synthetic oligonucleotide
aggagauaggcuugugagu

SEQ ID NO: 300484 - RNA, 19 nt, Artificial Sequence
  Description of Artificial Sequence: Synthetic oligonucleotide
cuguuagugccagaucagg

SEQ ID NO: 300485 - RNA, 19 nt, Artificial Sequence
  Description of Artificial Sequence: Synthetic oligonucleotide
auguaccaaggagacaguc

SEQ ID NO: 300486 - RNA, 19 nt, Artificial Sequence
  Description of Artificial Sequence: Synthetic oligonucleotide
cacauuuaagacacagcca

SEQ ID NO: 300487 - RNA, 19 nt, Artificial Sequence
  Description of Artificial Sequence: Synthetic oligonucleotide
aaggaacgucacuucuugu

SEQ ID NO: 300488 - RNA, 19 nt, Artificial Sequence
  Description of Artificial Sequence: Synthetic oligonucleotide
ucuuguggaaugucgccau

SEQ ID NO: 300489 - RNA, 19 nt, Artificial Sequence
  Description of Artificial Sequence: Synthetic oligonucleotide
caacaacuccauauaagga

SEQ ID NO: 300490 - RNA, 19 nt, Artificial Sequence
  Description of Artificial Sequence: Synthetic oligonucleotide
agagcucuuuaggagucac

SEQ ID NO: 300491 - RNA, 19 nt, Artificial Sequence
  Description of Artificial Sequence: Synthetic oligonucleotide
ugucauucacaaucucuau

SEQ ID NO: 300492 - RNA, 19 nt, Artificial Sequence
  Description of Artificial Sequence: Synthetic oligonucleotide
aacuaagcacgagguagug

SEQ ID NO: 300493 - RNA, 19 nt, Artificial Sequence
  Description of Artificial Sequence: Synthetic oligonucleotide
aaucccuagugcauucugu

SEQ ID NO: 300494 - RNA, 19 nt, Artificial Sequence
  Description of Artificial Sequence: Synthetic oligonucleotide
gaggcucagaucuuggugu

SEQ ID NO: 300495 - RNA, 19 nt, Artificial Sequence
  Description of Artificial Sequence: Synthetic oligonucleotide
uucugcauaacggcauuga

SEQ ID NO: 300496 - RNA, 19 nt, Artificial Sequence
  Description of Artificial Sequence: Synthetic oligonucleotide
uucccgguuugcgagagug

SEQ ID NO: 300497 - RNA, 19 nt, Artificial Sequence
  Description of Artificial Sequence: Synthetic oligonucleotide
guguuuguuaacuuugcgu

SEQ ID NO: 300498 - RNA, 19 nt, Artificial Sequence
  Description of Artificial Sequence: Synthetic oligonucleotide
aguuagcucgccaccaaag

SEQ ID NO: 300499 - RNA, 19 nt, Artificial Sequence
  Description of Artificial Sequence: Synthetic oligonucleotide
ccauauaaggaauacagua

SEQ ID NO: 300500 - RNA, 19 nt, Artificial Sequence
  Description of Artificial Sequence: Synthetic oligonucleotide
uucuaacauaaucgaccac

SEQ ID NO: 300501 - RNA, 19 nt, Artificial Sequence
  Description of Artificial Sequence: Synthetic oligonucleotide
ucgccaugaagaacaaaau

SEQ ID NO: 300502 - RNA, 19 nt, Artificial Sequence
  Description of Artificial Sequence: Synthetic oligonucleotide
ucucguugcgggugaacug

SEQ ID NO: 300503 - RNA, 19 nt, Artificial Sequence
  Description of Artificial Sequence: Synthetic oligonucleotide
uuccgcucucaucccaucc

SEQ ID NO: 300504 - RNA, 19 nt, Artificial Sequence
  Description of Artificial Sequence: Synthetic oligonucleotide
ugguuggauucaauaucca

SEQ ID NO: 300505 - RNA, 19 nt, Artificial Sequence
  Description of Artificial Sequence: Synthetic oligonucleotide
uccgauuccugcucauugu

SEQ ID NO: 300506 - RNA, 19 nt, Artificial Sequence
  Description of Artificial Sequence: Synthetic oligonucleotide
auguccugaccucauagua

SEQ ID NO: 300507 - RNA, 19 nt, Artificial Sequence
  Description of Artificial Sequence: Synthetic oligonucleotide
uccgcucucaucccaucca

SEQ ID NO: 300508 - RNA, 19 nt, Artificial Sequence
  Description of Artificial Sequence: Synthetic oligonucleotide
gguguacuuccagagaaag

SEQ ID NO: 300509 - RNA, 19 nt, Artificial Sequence
  Description of Artificial Sequence: Synthetic oligonucleotide
gaacacucagcagugcuga

SEQ ID NO: 300510 - RNA, 19 nt, Artificial Sequence
  Description of Artificial Sequence: Synthetic oligonucleotide
gaaagccguuucugggucc

SEQ ID NO: 300511 - RNA, 19 nt, Artificial Sequence
  Description of Artificial Sequence: Synthetic oligonucleotide
guugcugguacccuuuaaa

SEQ ID NO: 300512 - RNA, 19 nt, Artificial Sequence
  Description of Artificial Sequence: Synthetic oligonucleotide
uucuuacauuuaaggguac

SEQ ID NO: 300513 - RNA, 19 nt, Artificial Sequence
  Description of Artificial Sequence: Synthetic oligonucleotide
ugucagucuuacagucuug

SEQ ID NO: 300514 - RNA, 19 nt, Artificial Sequence
  Description of Artificial Sequence: Synthetic oligonucleotide
acuaguuagcucgccacca

SEQ ID NO: 300515 - RNA, 19 nt, Artificial Sequence
  Description of Artificial Sequence: Synthetic oligonucleotide
uugcgagagugcagaaagc

SEQ ID NO: 300516 - RNA, 19 nt, Artificial Sequence
  Description of Artificial Sequence: Synthetic oligonucleotide
cuuaccacucugaucaucu

SEQ ID NO: 300517 - RNA, 19 nt, Artificial Sequence
  Description of Artificial Sequence: Synthetic oligonucleotide
acuugggauugucuuuucu

SEQ ID NO: 300518 - RNA, 19 nt, Artificial Sequence
  Description of Artificial Sequence: Synthetic oligonucleotide
uugccggaggagaaugacu

SEQ ID NO: 300519 - RNA, 19 nt, Artificial Sequence
  Description of Artificial Sequence: Synthetic oligonucleotide
agaucagguggcucuauuu

SEQ ID NO: 300520 - RNA, 19 nt, Artificial Sequence
  Description of Artificial Sequence: Synthetic oligonucleotide
guuagcucgccaccaaaga

SEQ ID NO: 300521 - RNA, 19 nt, Artificial Sequence
  Description of Artificial Sequence: Synthetic oligonucleotide
cauaacggcauugaagaaa

SEQ ID NO: 300522 - RNA, 19 nt, Artificial Sequence
  Description of Artificial Sequence: Synthetic oligonucleotide
agcuguacuuucuaccauu

SEQ ID NO: 300523 - RNA, 19 nt, Artificial Sequence
  Description of Artificial Sequence: Synthetic oligonucleotide
ggaggagcaagcgagacca

SEQ ID NO: 300524 - RNA, 19 nt, Artificial Sequence
  Description of Artificial Sequence: Synthetic oligonucleotide
aggagccaaaucuaagauu

SEQ ID NO: 300525 - RNA, 19 nt, Artificial Sequence
  Description of Artificial Sequence: Synthetic oligonucleotide
aguaaguaucgaaguagcu

SEQ ID NO: 300526 - RNA, 19 nt, Artificial Sequence
  Description of Artificial Sequence: Synthetic oligonucleotide
agcgagaccagcaucugcu

SEQ ID NO: 300527 - RNA, 19 nt, Artificial Sequence
  Description of Artificial Sequence: Synthetic oligonucleotide
gugaguuuaguacuuuagu

SEQ ID NO: 300528 - RNA, 19 nt, Artificial Sequence
  Description of Artificial Sequence: Synthetic oligonucleotide
aguuucucguugcggguga

SEQ ID NO: 300529 - RNA, 19 nt, Artificial Sequence
  Description of Artificial Sequence: Synthetic oligonucleotide
agcccugauggccacauuu

SEQ ID NO: 300530 - RNA, 19 nt, Artificial Sequence
  Description of Artificial Sequence: Synthetic oligonucleotide
uugcgggugaacugauaca

SEQ ID NO: 300531 - RNA, 19 nt, Artificial Sequence
  Description of Artificial Sequence: Synthetic oligonucleotide
cauugguacuuuccuccag

SEQ ID NO: 300532 - RNA, 19 nt, Artificial Sequence
  Description of Artificial Sequence: Synthetic oligonucleotide
gagguagugaggcucagau

SEQ ID NO: 300533 - RNA, 19 nt, Artificial Sequence
  Description of Artificial Sequence: Synthetic oligonucleotide
augcgguccacaaaacuug

SEQ ID NO: 300534 - RNA, 19 nt, Artificial Sequence
  Description of Artificial Sequence: Synthetic oligonucleotide
cacaugauuguacuaguua

SEQ ID NO: 300535 - RNA, 19 nt, Artificial Sequence
  Description of Artificial Sequence: Synthetic oligonucleotide
ugguacccuuuaaaacgug

SEQ ID NO: 300536 - RNA, 19 nt, Artificial Sequence
  Description of Artificial Sequence: Synthetic oligonucleotide
ggcccaaucgguuugaacu

SEQ ID NO: 300537 - RNA, 19 nt, Artificial Sequence
  Description of Artificial Sequence: Synthetic oligonucleotide
aguucuugccuuggcguag

SEQ ID NO: 300538 - RNA, 19 nt, Artificial Sequence
  Description of Artificial Sequence: Synthetic oligonucleotide
uagugaggcucagaucuug

SEQ ID NO: 300539 - RNA, 19 nt, Artificial Sequence
  Description of Artificial Sequence: Synthetic oligonucleotide
auauuccacuccacauucg

SEQ ID NO: 300540 - RNA, 19 nt, Artificial Sequence
  Description of Artificial Sequence: Synthetic oligonucleotide
uaaaucccuagugcauucu

SEQ ID NO: 300541 - RNA, 19 nt, Artificial Sequence
  Description of Artificial Sequence: Synthetic oligonucleotide
uccauuacccugccgucuu

SEQ ID NO: 300542 - RNA, 19 nt, Artificial Sequence
  Description of Artificial Sequence: Synthetic oligonucleotide
uccuaaggugucugcacau

SEQ ID NO: 300543 - RNA, 19 nt, Artificial Sequence
  Description of Artificial Sequence: Synthetic oligonucleotide
cccuuuaaaacguguugcc

SEQ ID NO: 300544 - RNA, 19 nt, Artificial Sequence
  Description of Artificial Sequence: Synthetic oligonucleotide
uuggugucgaguagugcuu

SEQ ID NO: 300545 - RNA, 19 nt, Artificial Sequence
  Description of Artificial Sequence: Synthetic oligonucleotide
gaaugucgccaugaagaac

SEQ ID NO: 300546 - RNA, 19 nt, Artificial Sequence
  Description of Artificial Sequence: Synthetic oligonucleotide
cgaguagugcuucaaggcg

SEQ ID NO: 300547 - RNA, 19 nt, Artificial Sequence
  Description of Artificial Sequence: Synthetic oligonucleotide
agguuuacuucuaaagguu

SEQ ID NO: 300548 - RNA, 19 nt, Artificial Sequence
  Description of Artificial Sequence: Synthetic oligonucleotide
cuuuaguuacaggcacagc

SEQ ID NO: 300549 - RNA, 19 nt, Artificial Sequence
  Description of Artificial Sequence: Synthetic oligonucleotide
ugacuacuuggaguucuug

SEQ ID NO: 300550 - RNA, 19 nt, Artificial Sequence
  Description of Artificial Sequence: Synthetic oligonucleotide
cagaucuuggugucgagua

SEQ ID NO: 300551 - RNA, 19 nt, Artificial Sequence
  Description of Artificial Sequence: Synthetic oligonucleotide
aguaucgaaguagcuccug

SEQ ID NO: 300552 - RNA, 19 nt, Artificial Sequence
  Description of Artificial Sequence: Synthetic oligonucleotide
gauaggcuugugaguuuag

SEQ ID NO: 300553 - RNA, 19 nt, Artificial Sequence
  Description of Artificial Sequence: Synthetic oligonucleotide
auaggcuugugaguuuagu

SEQ ID NO: 300554 - RNA, 19 nt, Artificial Sequence
  Description of Artificial Sequence: Synthetic oligonucleotide
accucuucaaauggagagu

SEQ ID NO: 300555 - RNA, 19 nt, Artificial Sequence
  Description of Artificial Sequence: Synthetic oligonucleotide
ggcaguguaauguccugac

SEQ ID NO: 300556 - RNA, 19 nt, Artificial Sequence
  Description of Artificial Sequence: Synthetic oligonucleotide
ugccgucuugugcacacau

SEQ ID NO: 300557 - RNA, 19 nt, Artificial Sequence
  Description of Artificial Sequence: Synthetic oligonucleotide
ucgaccacuuggcccaauc

SEQ ID NO: 300558 - RNA, 19 nt, Artificial Sequence
  Description of Artificial Sequence: Synthetic oligonucleotide
guauggucagugcuacaga

SEQ ID NO: 300559 - RNA, 19 nt, Artificial Sequence
  Description of Artificial Sequence: Synthetic oligonucleotide
aguuguagugccagcuugu

SEQ ID NO: 300560 - RNA, 19 nt, Artificial Sequence
  Description of Artificial Sequence: Synthetic oligonucleotide
agaugacuacuuggaguuc

SEQ ID NO: 300561 - RNA, 19 nt, Artificial Sequence
  Description of Artificial Sequence: Synthetic oligonucleotide
uucauguagcugucgucuu

SEQ ID NO: 300562 - RNA, 19 nt, Artificial Sequence
  Description of Artificial Sequence: Synthetic oligonucleotide
gaugcgguccacaaaacuu

SEQ ID NO: 300563 - RNA, 19 nt, Artificial Sequence
  Description of Artificial Sequence: Synthetic oligonucleotide
cgggugaacugauacaagc

SEQ ID NO: 300564 - RNA, 19 nt, Artificial Sequence
  Description of Artificial Sequence: Synthetic oligonucleotide
ucccgguuugcgagagugc

SEQ ID NO: 300565 - RNA, 19 nt, Artificial Sequence
  Description of Artificial Sequence: Synthetic oligonucleotide
uaacggcauugaagaaaca

SEQ ID NO: 300566 - RNA, 19 nt, Artificial Sequence
  Description of Artificial Sequence: Synthetic oligonucleotide
cucgcucgcucuucagagc

SEQ ID NO: 300567 - RNA, 19 nt, Artificial Sequence
  Description of Artificial Sequence: Synthetic oligonucleotide
agauaggcuugugaguuua

SEQ ID NO: 300568 - RNA, 19 nt, Artificial Sequence
  Description of Artificial Sequence: Synthetic oligonucleotide
uauuugcaucuugaaguuu

SEQ ID NO: 300569 - RNA, 19 nt, Artificial Sequence
  Description of Artificial Sequence: Synthetic oligonucleotide
gaguucuugccuuggcgua

SEQ ID NO: 300570 - RNA, 19 nt, Artificial Sequence
  Description of Artificial Sequence: Synthetic oligonucleotide
cuuguggaaugucgccaug

SEQ ID NO: 300571 - RNA, 19 nt, Artificial Sequence
  Description of Artificial Sequence: Synthetic oligonucleotide
gcguagguuaaaaccagcc

SEQ ID NO: 300572 - RNA, 19 nt, Artificial Sequence
  Description of Artificial Sequence: Synthetic oligonucleotide
auuuccgauuccugcucau

SEQ ID NO: 300573 - RNA, 19 nt, Artificial Sequence
  Description of Artificial Sequence: Synthetic oligonucleotide
uggcccaaucgguuugaac

SEQ ID NO: 300574 - RNA, 19 nt, Artificial Sequence
  Description of Artificial Sequence: Synthetic oligonucleotide
guacaugugugucacugau

SEQ ID NO: 300575 - RNA, 19 nt, Artificial Sequence
  Description of Artificial Sequence: Synthetic oligonucleotide
agauaucauuuaggugaag

SEQ ID NO: 300576 - RNA, 19 nt, Artificial Sequence
  Description of Artificial Sequence: Synthetic oligonucleotide
gcgagagugcagaaagccg

SEQ ID NO: 300577 - RNA, 19 nt, Artificial Sequence
  Description of Artificial Sequence: Synthetic oligonucleotide
uaacuuugcguagguuaaa

SEQ ID NO: 300578 - RNA, 19 nt, Artificial Sequence
  Description of Artificial Sequence: Synthetic oligonucleotide
auuccacuccacauucgcu

SEQ ID NO: 300579 - RNA, 19 nt, Artificial Sequence
  Description of Artificial Sequence: Synthetic oligonucleotide
aguuacaggcacagcuugu

SEQ ID NO: 300580 - RNA, 19 nt, Artificial Sequence
  Description of Artificial Sequence: Synthetic oligonucleotide
ucugggaagcagaguccau

SEQ ID NO: 300581 - RNA, 19 nt, Artificial Sequence
  Description of Artificial Sequence: Synthetic oligonucleotide
cuugugcacacaucacaaa

SEQ ID NO: 300582 - RNA, 19 nt, Artificial Sequence
  Description of Artificial Sequence: Synthetic oligonucleotide
ccucgcucgcucuucagag

SEQ ID NO: 300583 - RNA, 19 nt, Artificial Sequence
  Description of Artificial Sequence: Synthetic oligonucleotide
cugguacccuuuaaaacgu

SEQ ID NO: 300584 - RNA, 19 nt, Artificial Sequence
  Description of Artificial Sequence: Synthetic oligonucleotide
ggaguucuugccuuggcgu

SEQ ID NO: 300585 - RNA, 19 nt, Artificial Sequence
  Description of Artificial Sequence: Synthetic oligonucleotide
cuacuuggaguucuugccu

SEQ ID NO: 300586 - RNA, 19 nt, Artificial Sequence
  Description of Artificial Sequence: Synthetic oligonucleotide
acauucgcuaaggcuuucu

SEQ ID NO: 300587 - RNA, 19 nt, Artificial Sequence
  Description of Artificial Sequence: Synthetic oligonucleotide
ggaaagauucauguaccaa

SEQ ID NO: 300588 - RNA, 19 nt, Artificial Sequence
  Description of Artificial Sequence: Synthetic oligonucleotide
gucgaguucuccauuggua

SEQ ID NO: 300589 - RNA, 19 nt, Artificial Sequence
  Description of Artificial Sequence: Synthetic oligonucleotide
uuucucguugcgggugaac

SEQ ID NO: 300590 - RNA, 19 nt, Artificial Sequence
  Description of Artificial Sequence: Synthetic oligonucleotide
gaacgucacuucuuguuuu

SEQ ID NO: 300591 - RNA, 19 nt, Artificial Sequence
  Description of Artificial Sequence: Synthetic oligonucleotide
uggugucgaguagugcuuc

SEQ ID NO: 300592 - RNA, 19 nt, Artificial Sequence
  Description of Artificial Sequence: Synthetic oligonucleotide
gggugaacugauacaagca

SEQ ID NO: 300593 - RNA, 19 nt, Artificial Sequence
  Description of Artificial Sequence: Synthetic oligonucleotide
caccuuuuauguuagccuu

SEQ ID NO: 300594 - RNA, 19 nt, Artificial Sequence
  Description of Artificial Sequence: Synthetic oligonucleotide
cacuucugacugucagcug

SEQ ID NO: 300595 - RNA, 19 nt, Artificial Sequence
  Description of Artificial Sequence: Synthetic oligonucleotide
guaauguccugaccucaua

SEQ ID NO: 300596 - RNA, 19 nt, Artificial Sequence
  Description of Artificial Sequence: Synthetic oligonucleotide
ucguugcgggugaacugau

SEQ ID NO: 300597 - RNA, 19 nt, Artificial Sequence
  Description of Artificial Sequence: Synthetic oligonucleotide
guuugcgagagugcagaaa

SEQ ID NO: 300598 - RNA, 19 nt, Artificial Sequence
  Description of Artificial Sequence: Synthetic oligonucleotide
gccugcugaaaccucuuca

SEQ ID NO: 300599 - RNA, 19 nt, Artificial Sequence
  Description of Artificial Sequence: Synthetic oligonucleotide
gauuaaccucagcuccagu

SEQ ID NO: 300600 - RNA, 19 nt, Artificial Sequence
  Description of Artificial Sequence: Synthetic oligonucleotide
cuucguugguucuuggcuu

SEQ ID NO: 300601 - RNA, 19 nt, Artificial Sequence
  Description of Artificial Sequence: Synthetic oligonucleotide
aagccguuucuggguccuc

SEQ ID NO: 300602 - RNA, 19 nt, Artificial Sequence
  Description of Artificial Sequence: Synthetic oligonucleotide
gguccauuacccugccguc

SEQ ID NO: 300603 - RNA, 19 nt, Artificial Sequence
  Description of Artificial Sequence: Synthetic oligonucleotide
agauuuccgggaacuuuau

SEQ ID NO: 300604 - RNA, 19 nt, Artificial Sequence
  Description of Artificial Sequence: Synthetic oligonucleotide
cuuuagccauguuuuccgu

SEQ ID NO: 300605 - RNA, 19 nt, Artificial Sequence
  Description of Artificial Sequence: Synthetic oligonucleotide
ccauccaguaaguaucgaa

SEQ ID NO: 300606 - RNA, 19 nt, Artificial Sequence
  Description of Artificial Sequence: Synthetic oligonucleotide
accuuuuauguuagccuuu

SEQ ID NO: 300607 - RNA, 19 nt, Artificial Sequence
  Description of Artificial Sequence: Synthetic oligonucleotide
ggcuaaaguaagaggaccu

SEQ ID NO: 300608 - RNA, 19 nt, Artificial Sequence
  Description of Artificial Sequence: Synthetic oligonucleotide
gcguaggcaguguaauguc

SEQ ID NO: 300609 - RNA, 19 nt, Artificial Sequence
  Description of Artificial Sequence: Synthetic oligonucleotide
agguguacuuccagagaaa

SEQ ID NO: 300610 - RNA, 19 nt, Artificial Sequence
  Description of Artificial Sequence: Synthetic oligonucleotide
aaacuggcucauggcuaaa

SEQ ID NO: 300611 - RNA, 19 nt, Artificial Sequence
  Description of Artificial Sequence: Synthetic oligonucleotide
gaggagcaagcgagaccag

SEQ ID NO: 300612 - RNA, 19 nt, Artificial Sequence
  Description of Artificial Sequence: Synthetic oligonucleotide
ccuuugccggaggagaaug

SEQ ID NO: 300613 - RNA, 19 nt, Artificial Sequence
  Description of Artificial Sequence: Synthetic oligonucleotide
ggaacgucacuucuuguuu

SEQ ID NO: 300614 - RNA, 19 nt, Artificial Sequence
  Description of Artificial Sequence: Synthetic oligonucleotide
gagcaagcgagaccagcau

SEQ ID NO: 300615 - RNA, 19 nt, Artificial Sequence
  Description of Artificial Sequence: Synthetic oligonucleotide
ccgauuccugcucauuguc

SEQ ID NO: 300616 - RNA, 19 nt, Artificial Sequence
  Description of Artificial Sequence: Synthetic oligonucleotide
gcaagcgagaccagcaucu

SEQ ID NO: 300617 - RNA, 19 nt, Artificial Sequence
  Description of Artificial Sequence: Synthetic oligonucleotide
caccuuugccggaggagaa

SEQ ID NO: 300618 - RNA, 19 nt, Artificial Sequence
  Description of Artificial Sequence: Synthetic oligonucleotide
guauccccuccuccugaga

SEQ ID NO: 300619 - RNA, 19 nt, Artificial Sequence
  Description of Artificial Sequence: Synthetic oligonucleotide
ggagucacaauucgcuuuu

SEQ ID NO: 300620 - RNA, 19 nt, Artificial Sequence
  Description of Artificial Sequence: Synthetic oligonucleotide
ggugucgaguagugcuuca

SEQ ID NO: 300621 - RNA, 19 nt, Artificial Sequence
  Description of Artificial Sequence: Synthetic oligonucleotide
gagauaggcuugugaguuu

SEQ ID NO: 300622 - RNA, 19 nt, Artificial Sequence
  Description of Artificial Sequence: Synthetic oligonucleotide
ggcagauauuccacuccac

SEQ ID NO: 300623 - RNA, 19 nt, Artificial Sequence
  Description of Artificial Sequence: Synthetic oligonucleotide
caggaugaauagcagcauu

SEQ ID NO: 300624 - RNA, 19 nt, Artificial Sequence
  Description of Artificial Sequence: Synthetic oligonucleotide
auguuagccuuugguccau

SEQ ID NO: 300625 - RNA, 19 nt, Artificial Sequence
  Description of Artificial Sequence: Synthetic oligonucleotide
gcauaacggcauugaagaa

SEQ ID NO: 300626 - RNA, 19 nt, Artificial Sequence
  Description of Artificial Sequence: Synthetic oligonucleotide
aaucgaccacuuggcccaa

SEQ ID NO: 300627 - RNA, 19 nt, Artificial Sequence
  Description of Artificial Sequence: Synthetic oligonucleotide
gguuugaacuacaguauuu

SEQ ID NO: 300628 - RNA, 19 nt, Artificial Sequence
  Description of Artificial Sequence: Synthetic oligonucleotide
ccggaggagaaugacuguc

SEQ ID NO: 300629 - RNA, 19 nt, Artificial Sequence
  Description of Artificial Sequence: Synthetic oligonucleotide
gcuucccgguuugcgagag

SEQ ID NO: 300630 - RNA, 19 nt, Artificial Sequence
  Description of Artificial Sequence: Synthetic oligonucleotide
augacuacuuggaguucuu

SEQ ID NO: 300631 - RNA, 19 nt, Artificial Sequence
  Description of Artificial Sequence: Synthetic oligonucleotide
caguauggucagugcuaca

SEQ ID NO: 300632 - RNA, 19 nt, Artificial Sequence
  Description of Artificial Sequence: Synthetic oligonucleotide
ggaggagaaugacugucau

SEQ ID NO: 300633 - RNA, 19 nt, Artificial Sequence
  Description of Artificial Sequence: Synthetic oligonucleotide
gcccaaucgguuugaacua

SEQ ID NO: 300634 - RNA, 19 nt, Artificial Sequence
  Description of Artificial Sequence: Synthetic oligonucleotide
ccgguuugcgagagugcag

SEQ ID NO: 300635 - RNA, 19 nt, Artificial Sequence
  Description of Artificial Sequence: Synthetic oligonucleotide
gugucgaguagugcuucaa

SEQ ID NO: 300636 - RNA, 19 nt, Artificial Sequence
  Description of Artificial Sequence: Synthetic oligonucleotide
ccaaucgguuugaacuaca

SEQ ID NO: 300637 - RNA, 19 nt, Artificial Sequence
  Description of Artificial Sequence: Synthetic oligonucleotide
ccgcucucaucccauccag

SEQ ID NO: 300638 - RNA, 19 nt, Artificial Sequence
  Description of Artificial Sequence: Synthetic oligonucleotide
gcgggugaacugauacaag

SEQ ID NO: 300639 - RNA, 19 nt, Artificial Sequence
  Description of Artificial Sequence: Synthetic oligonucleotide
cgucuugugcacacaucac

SEQ ID NO: 300640 - RNA, 19 nt, Artificial Sequence
  Description of Artificial Sequence: Synthetic oligonucleotide
cacauucgcuaaggcuuuc

SEQ ID NO: 300641 - RNA, 19 nt, Artificial Sequence
  Description of Artificial Sequence: Synthetic oligonucleotide
guccauuacccugccgucu

SEQ ID NO: 300642 - RNA, 19 nt, Artificial Sequence
  Description of Artificial Sequence: Synthetic oligonucleotide
cgagagugcagaaagccgu

SEQ ID NO: 300643 - RNA, 19 nt, Artificial Sequence
  Description of Artificial Sequence: Synthetic oligonucleotide
cuacaguauuugacuuccu

SEQ ID NO: 300644 - RNA, 19 nt, Artificial Sequence
  Description of Artificial Sequence: Synthetic oligonucleotide
cauucgcuaaggcuuucuu

SEQ ID NO: 300645 - RNA, 19 nt, Artificial Sequence
  Description of Artificial Sequence: Synthetic oligonucleotide
cccgguuugcgagagugca

SEQ ID NO: 300646 - RNA, 19 nt, Artificial Sequence
  Description of Artificial Sequence: Synthetic oligonucleotide
ggaguuguagugccagcuu

SEQ ID NO: 300647 - RNA, 19 nt, Artificial Sequence
  Description of Artificial Sequence: Synthetic oligonucleotide
cacccucgcucgcucuuca

SEQ ID NO: 300648 - RNA, 19 nt, Artificial Sequence
  Description of Artificial Sequence: Synthetic oligonucleotide
cgaaguagcuccuggcugu

SEQ ID NO: 300649 - RNA, 19 nt, Artificial Sequence
  Description of Artificial Sequence: Synthetic oligonucleotide
guuucucguugcgggugaa

SEQ ID NO: 300650 - RNA, 19 nt, Artificial Sequence
  Description of Artificial Sequence: Synthetic oligonucleotide
ccauuacccugccgucuug

SEQ ID NO: 300651 - RNA, 19 nt, Artificial Sequence
  Description of Artificial Sequence: Synthetic oligonucleotide
caucacccucgcucgcucu

SEQ ID NO: 300652 - RNA, 19 nt, Artificial Sequence
  Description of Artificial Sequence: Synthetic oligonucleotide
cgguuugcgagagugcaga

SEQ ID NO: 300653 - RNA, 19 nt, Artificial Sequence
  Description of Artificial Sequence: Synthetic oligonucleotide
cagaucagguggcucuauu

SEQ ID NO: 300654 - RNA, 19 nt, Artificial Sequence
  Description of Artificial Sequence: Synthetic oligonucleotide
gcucgccaccaaagaugcg

SEQ ID NO: 300655 - RNA, 19 nt, Artificial Sequence
  Description of Artificial Sequence: Synthetic oligonucleotide
guagugaggcucagaucuu

SEQ ID NO: 300656 - RNA, 19 nt, Artificial Sequence
  Description of Artificial Sequence: Synthetic oligonucleotide
aucgaccacuuggcccaau

SEQ ID NO: 300657 - RNA, 19 nt, Artificial Sequence
  Description of Artificial Sequence: Synthetic oligonucleotide
cgauuccugcucauugucu

SEQ ID NO: 300658 - RNA, 19 nt, Artificial Sequence
  Description of Artificial Sequence: Synthetic oligonucleotide
cugccgucuugugcacaca

SEQ ID NO: 300659 - RNA, 19 nt, Artificial Sequence
  Description of Artificial Sequence: Synthetic oligonucleotide
ccacauucgcuaaggcuuu

SEQ ID NO: 300660 - RNA, 19 nt, Artificial Sequence
  Description of Artificial Sequence: Synthetic oligonucleotide
gcccuuugguugauuccau

SEQ ID NO: 300661 - RNA, 19 nt, Artificial Sequence
  Description of Artificial Sequence: Synthetic oligonucleotide
cguugcgggugaacugaua

SEQ ID NO: 300662 - RNA, 19 nt, Artificial Sequence
  Description of Artificial Sequence: Synthetic oligonucleotide
ccguuucuggguccucauu

SEQ ID NO: 300663 - RNA, 19 nt, Artificial Sequence
  Description of Artificial Sequence: Synthetic oligonucleotide
cgcucgcucuucagagcua

SEQ ID NO: 300664 - RNA, 19 nt, Artificial Sequence
  Description of Artificial Sequence: Synthetic oligonucleotide
aaaagcaaccgacugaccc

SEQ ID NO: 300665 - RNA, 19 nt, Artificial Sequence
  Description of Artificial Sequence: Synthetic oligonucleotide
uuuacguucggccugaagc

SEQ ID NO: 300666 - RNA, 19 nt, Artificial Sequence
  Description of Artificial Sequence: Synthetic oligonucleotide
ugcuuuacgaacaagggcu

SEQ ID NO: 300667 - RNA, 19 nt, Artificial Sequence
  Description of Artificial Sequence: Synthetic oligonucleotide
uuauuggagcaaaugaagc

SEQ ID NO: 300668 - RNA, 19 nt, Artificial Sequence
  Description of Artificial Sequence: Synthetic oligonucleotide
uugauaauacauuuucaca

SEQ ID NO: 300669 - RNA, 19 nt, Artificial Sequence
  Description of Artificial Sequence: Synthetic oligonucleotide
aguuauuuugcucugcaca

SEQ ID NO: 300670 - RNA, 19 nt, Artificial Sequence
  Description of Artificial Sequence: Synthetic oligonucleotide
uaaguggccacaucaaucc

SEQ ID NO: 300671 - RNA, 19 nt, Artificial Sequence
  Description of Artificial Sequence: Synthetic oligonucleotide
ucaucguccaacuugacuc

SEQ ID NO: 300672 - RNA, 19 nt, Artificial Sequence
  Description of Artificial Sequence: Synthetic oligonucleotide
cuuggaagcaaagagagac

SEQ ID NO: 300673 - RNA, 19 nt, Artificial Sequence
  Description of Artificial Sequence: Synthetic oligonucleotide
uucuuggggaccgagaacg

SEQ ID NO: 300674 - RNA, 19 nt, Artificial Sequence
  Description of Artificial Sequence: Synthetic oligonucleotide
ucuuaaacucauaguaggc

SEQ ID NO: 300675 - RNA, 19 nt, Artificial Sequence
  Description of Artificial Sequence: Synthetic oligonucleotide
acaaaagcaaccgacugac

SEQ ID NO: 300676 - RNA, 19 nt, Artificial Sequence
  Description of Artificial Sequence: Synthetic oligonucleotide
gaacucaaaucucugauca

SEQ ID NO: 300677 - RNA, 19 nt, Artificial Sequence
  Description of Artificial Sequence: Synthetic oligonucleotide
uuaaacucauaguaggcgu

SEQ ID NO: 300678 - RNA, 19 nt, Artificial Sequence
  Description of Artificial Sequence: Synthetic oligonucleotide
uagugcgagaccgugaucg

SEQ ID NO: 300679 - RNA, 19 nt, Artificial Sequence
  Description of Artificial Sequence: Synthetic oligonucleotide
uggaugaauuuguaguagg

SEQ ID NO: 300680 - RNA, 19 nt, Artificial Sequence
  Description of Artificial Sequence: Synthetic oligonucleotide
cuuaaacucauaguaggcg

SEQ ID NO: 300681 - RNA, 19 nt, Artificial Sequence
  Description of Artificial Sequence: Synthetic oligonucleotide
ucuuacuuuggccaugaga

SEQ ID NO: 300682 - RNA, 19 nt, Artificial Sequence
  Description of Artificial Sequence: Synthetic oligonucleotide
ugaguuucgugcuugcuug

SEQ ID NO: 300683 - RNA, 19 nt, Artificial Sequence
  Description of Artificial Sequence: Synthetic oligonucleotide
uccugaguuauuuugcucu

SEQ ID NO: 300684 - RNA, 19 nt, Artificial Sequence
  Description of Artificial Sequence: Synthetic oligonucleotide
gagauccugaguuauuuug

SEQ ID NO: 300685 - RNA, 19 nt, Artificial Sequence
  Description of Artificial Sequence: Synthetic oligonucleotide
ucgaacgccgcacuguccg

SEQ ID NO: 300686 - RNA, 19 nt, Artificial Sequence
  Description of Artificial Sequence: Synthetic oligonucleotide
gaagacgagugguacuugg

SEQ ID NO: 300687 - RNA, 19 nt, Artificial Sequence
  Description of Artificial Sequence: Synthetic oligonucleotide
agucguguacuccaccugg

SEQ ID NO: 300688 - RNA, 19 nt, Artificial Sequence
  Description of Artificial Sequence: Synthetic oligonucleotide
cuuacuuuggccaugagau

SEQ ID NO: 300689 - RNA, 19 nt, Artificial Sequence
  Description of Artificial Sequence: Synthetic oligonucleotide
ugcgagaccgugaucgccg

SEQ ID NO: 300690 - RNA, 19 nt, Artificial Sequence
  Description of Artificial Sequence: Synthetic oligonucleotide
ucugaucauucuuggcucg

SEQ ID NO: 300691 - RNA, 19 nt, Artificial Sequence
  Description of Artificial Sequence: Synthetic oligonucleotide
aaggaacucaaaucucuga

SEQ ID NO: 300692 - RNA, 19 nt, Artificial Sequence
  Description of Artificial Sequence: Synthetic oligonucleotide
uagugaucaaaccgcagga

SEQ ID NO: 300693 - RNA, 19 nt, Artificial Sequence
  Description of Artificial Sequence: Synthetic oligonucleotide
ucuacauugaaagcacucu

SEQ ID NO: 300694 - RNA, 19 nt, Artificial Sequence
  Description of Artificial Sequence: Synthetic oligonucleotide
aacauguaguagcuguagu

SEQ ID NO: 300695 - RNA, 19 nt, Artificial Sequence
  Description of Artificial Sequence: Synthetic oligonucleotide
aagaaccucggcucuccac

SEQ ID NO: 300696 - RNA, 19 nt, Artificial Sequence
  Description of Artificial Sequence: Synthetic oligonucleotide
gugaucaaaccgcaggaag

SEQ ID NO: 300697 - RNA, 19 nt, Artificial Sequence
  Description of Artificial Sequence: Synthetic oligonucleotide
uucucgucgucucucagga

SEQ ID NO: 300698 - RNA, 19 nt, Artificial Sequence
  Description of Artificial Sequence: Synthetic oligonucleotide
acaugggcagaguucugcc

SEQ ID NO: 300699 - RNA, 19 nt, Artificial Sequence
  Description of Artificial Sequence: Synthetic oligonucleotide
gagcauugcucuuacuuug

SEQ ID NO: 300700 - RNA, 19 nt, Artificial Sequence
  Description of Artificial Sequence: Synthetic oligonucleotide
uggccuuagugcgagaccg

SEQ ID NO: 300701 - RNA, 19 nt, Artificial Sequence
  Description of Artificial Sequence: Synthetic oligonucleotide
acgagugguagucacacca

SEQ ID NO: 300702 - RNA, 19 nt, Artificial Sequence
  Description of Artificial Sequence: Synthetic oligonucleotide
uuggcucgaacacuggucu

SEQ ID NO: 300703 - RNA, 19 nt, Artificial Sequence
  Description of Artificial Sequence: Synthetic oligonucleotide
gaugcuaccugugugcuac

SEQ ID NO: 300704 - RNA, 19 nt, Artificial Sequence
  Description of Artificial Sequence: Synthetic oligonucleotide
aaauuuaaggccguuccua

SEQ ID NO: 300705 - RNA, 19 nt, Artificial Sequence
  Description of Artificial Sequence: Synthetic oligonucleotide
cauggggacuucuggaacg

SEQ ID NO: 300706 - RNA, 19 nt, Artificial Sequence
  Description of Artificial Sequence: Synthetic oligonucleotide
cuagaccugggcuuggaag

SEQ ID NO: 300707 - RNA, 19 nt, Artificial Sequence
  Description of Artificial Sequence: Synthetic oligonucleotide
gagacgaucgcugaggaga

SEQ ID NO: 300708 - RNA, 19 nt, Artificial Sequence
  Description of Artificial Sequence: Synthetic oligonucleotide
uuacguucggccugaagcu

SEQ ID NO: 300709 - RNA, 19 nt, Artificial Sequence
  Description of Artificial Sequence: Synthetic oligonucleotide
aagacgguccuccagcuuu

SEQ ID NO: 300710 - RNA, 19 nt, Artificial Sequence
  Description of Artificial Sequence: Synthetic oligonucleotide
ugggaucuagaccugggcu

SEQ ID NO: 300711 - RNA, 19 nt, Artificial Sequence
  Description of Artificial Sequence: Synthetic oligonucleotide
cauugcucuuacuuuggcc

SEQ ID NO: 300712 - RNA, 19 nt, Artificial Sequence
  Description of Artificial Sequence: Synthetic oligonucleotide
ucuggaacggguccguuuc

SEQ ID NO: 300713 - RNA, 19 nt, Artificial Sequence
  Description of Artificial Sequence: Synthetic oligonucleotide
uccuuuuacguucggccug

SEQ ID NO: 300714 - RNA, 19 nt, Artificial Sequence
  Description of Artificial Sequence: Synthetic oligonucleotide
uaccguccuuccuucaugg

SEQ ID NO: 300715 - RNA, 19 nt, Artificial Sequence
  Description of Artificial Sequence: Synthetic oligonucleotide
gagugguagucacaccagg

SEQ ID NO: 300716 - RNA, 19 nt, Artificial Sequence
  Description of Artificial Sequence: Synthetic oligonucleotide
ggucucaaauuuaaggccg

SEQ ID NO: 300717 - RNA, 19 nt, Artificial Sequence
  Description of Artificial Sequence: Synthetic oligonucleotide
uuccuagcgacguacucug

SEQ ID NO: 300718 - RNA, 19 nt, Artificial Sequence
  Description of Artificial Sequence: Synthetic oligonucleotide
agaaccucggcucuccaca

SEQ ID NO: 300719 - RNA, 19 nt, Artificial Sequence
  Description of Artificial Sequence: Synthetic oligonucleotide
uggcuuuugagugggaucu

SEQ ID NO: 300720 - RNA, 19 nt, Artificial Sequence
  Description of Artificial Sequence: Synthetic oligonucleotide
uuugauuccuuggacgccu

SEQ ID NO: 300721 - RNA, 19 nt, Artificial Sequence
  Description of Artificial Sequence: Synthetic oligonucleotide
ucagagguagacccagacu

SEQ ID NO: 300722 - RNA, 19 nt, Artificial Sequence
  Description of Artificial Sequence: Synthetic oligonucleotide
agcguuccugggaagaacc

SEQ ID NO: 300723 - RNA, 19 nt, Artificial Sequence
  Description of Artificial Sequence: Synthetic oligonucleotide
uuccuuuuacguucggccu

SEQ ID NO: 300724 - RNA, 19 nt, Artificial Sequence
  Description of Artificial Sequence: Synthetic oligonucleotide
cauccgguaggcaguaggg

SEQ ID NO: 300725 - RNA, 19 nt, Artificial Sequence
  Description of Artificial Sequence: Synthetic oligonucleotide
gacguacucugccagcuug

SEQ ID NO: 300726 - RNA, 19 nt, Artificial Sequence
  Description of Artificial Sequence: Synthetic oligonucleotide
uguugacugggaccgggcc

SEQ ID NO: 300727 - RNA, 19 nt, Artificial Sequence
  Description of Artificial Sequence: Synthetic oligonucleotide
agcgguuucuguggaagcc

SEQ ID NO: 300728 - RNA, 19 nt, Artificial Sequence
  Description of Artificial Sequence: Synthetic oligonucleotide
guugagguagugaucaaac

SEQ ID NO: 300729 - RNA, 19 nt, Artificial Sequence
  Description of Artificial Sequence: Synthetic oligonucleotide
auuugauaauacauuuuca

SEQ ID NO: 300730 - RNA, 19 nt, Artificial Sequence
  Description of Artificial Sequence: Synthetic oligonucleotide
guuguauuggugccagggc

SEQ ID NO: 300731 - RNA, 19 nt, Artificial Sequence
  Description of Artificial Sequence: Synthetic oligonucleotide
uuuuacguucggccugaag

SEQ ID NO: 300732 - RNA, 19 nt, Artificial Sequence
  Description of Artificial Sequence: Synthetic oligonucleotide
agcggcaagacgguccucc

SEQ ID NO: 300733 - RNA, 19 nt, Artificial Sequence
  Description of Artificial Sequence: Synthetic oligonucleotide
cacaucaaucccagguggg

SEQ ID NO: 300734 - RNA, 19 nt, Artificial Sequence
  Description of Artificial Sequence: Synthetic oligonucleotide
gaacaagggcugcuagggg

SEQ ID NO: 300735 - RNA, 19 nt, Artificial Sequence
  Description of Artificial Sequence: Synthetic oligonucleotide
gguaugauggccacgggag

SEQ ID NO: 300736 - RNA, 19 nt, Artificial Sequence
  Description of Artificial Sequence: Synthetic oligonucleotide
caucguccaacuugacucg

SEQ ID NO: 300737 - RNA, 19 nt, Artificial Sequence
  Description of Artificial Sequence: Synthetic oligonucleotide
uccgccauacccucaggag

SEQ ID NO: 300738 - RNA, 19 nt, Artificial Sequence
  Description of Artificial Sequence: Synthetic oligonucleotide
ucauggggacuucuggaac

SEQ ID NO: 300739 - RNA, 19 nt, Artificial Sequence
  Description of Artificial Sequence: Synthetic oligonucleotide
gaacggguccguuuccugc

SEQ ID NO: 300740 - RNA, 19 nt, Artificial Sequence
  Description of Artificial Sequence: Synthetic oligonucleotide
uccguuuccugcuggcucc

SEQ ID NO: 300741 - RNA, 19 nt, Artificial Sequence
  Description of Artificial Sequence: Synthetic oligonucleotide
ucuuggcucgaacacuggu

SEQ ID NO: 300742 - RNA, 19 nt, Artificial Sequence
  Description of Artificial Sequence: Synthetic oligonucleotide
agugcgagaccgugaucgc

SEQ ID NO: 300743 - RNA, 19 nt, Artificial Sequence
  Description of Artificial Sequence: Synthetic oligonucleotide
aagcaaccgacugacccag

SEQ ID NO: 300744 - RNA, 19 nt, Artificial Sequence
  Description of Artificial Sequence: Synthetic oligonucleotide
uugacucuucagcagcggu

SEQ ID NO: 300745 - RNA, 19 nt, Artificial Sequence
  Description of Artificial Sequence: Synthetic oligonucleotide
uccuguuuuauuugauaau

SEQ ID NO: 300746 - RNA, 19 nt, Artificial Sequence
  Description of Artificial Sequence: Synthetic oligonucleotide
cauaggucggcacagagcu

SEQ ID NO: 300747 - RNA, 19 nt, Artificial Sequence
  Description of Artificial Sequence: Synthetic oligonucleotide
agcgacguacucugccagc

SEQ ID NO: 300748 - RNA, 19 nt, Artificial Sequence
  Description of Artificial Sequence: Synthetic oligonucleotide
cuuuucccgggcagcagcg

SEQ ID NO: 300749 - RNA, 19 nt, Artificial Sequence
  Description of Artificial Sequence: Synthetic oligonucleotide
aacucaaaucucugaucau

SEQ ID NO: 300750 - RNA, 19 nt, Artificial Sequence
  Description of Artificial Sequence: Synthetic oligonucleotide
uuggagcaaaugaagcuuu

SEQ ID NO: 300751 - RNA, 19 nt, Artificial Sequence
  Description of Artificial Sequence: Synthetic oligonucleotide
cuuggcucgaacacugguc

SEQ ID NO: 300752 - RNA, 19 nt, Artificial Sequence
  Description of Artificial Sequence: Synthetic oligonucleotide
uuagcuagaaaagguguuu

SEQ ID NO: 300753 - RNA, 19 nt, Artificial Sequence
  Description of Artificial Sequence: Synthetic oligonucleotide
ucggugggucucuacaucu

SEQ ID NO: 300754 - RNA, 19 nt, Artificial Sequence
  Description of Artificial Sequence: Synthetic oligonucleotide
uuaaggccguuccuagcga

SEQ ID NO: 300755 - RNA, 19 nt, Artificial Sequence
  Description of Artificial Sequence: Synthetic oligonucleotide
acacccgaugcucugcuug

SEQ ID NO: 300756 - RNA, 19 nt, Artificial Sequence
  Description of Artificial Sequence: Synthetic oligonucleotide
cugaaugggcugagggacg

SEQ ID NO: 300757 - RNA, 19 nt, Artificial Sequence
  Description of Artificial Sequence: Synthetic oligonucleotide
guacucugccagcuugucg

SEQ ID NO: 300758 - RNA, 19 nt, Artificial Sequence
  Description of Artificial Sequence: Synthetic oligonucleotide
agaggagacgaucgcugag

SEQ ID NO: 300759 - RNA, 19 nt, Artificial Sequence
  Description of Artificial Sequence: Synthetic oligonucleotide
uagcgacguacucugccag

SEQ ID NO: 300760 - RNA, 19 nt, Artificial Sequence
  Description of Artificial Sequence: Synthetic oligonucleotide
gacacuuguuuccucuaca

SEQ ID NO: 300761 - RNA, 19 nt, Artificial Sequence
  Description of Artificial Sequence: Synthetic oligonucleotide
gaguuucgugcuugcuugg

SEQ ID NO: 300762 - RNA, 19 nt, Artificial Sequence
  Description of Artificial Sequence: Synthetic oligonucleotide
uuggaagacgagugguacu

SEQ ID NO: 300763 - RNA, 19 nt, Artificial Sequence
  Description of Artificial Sequence: Synthetic oligonucleotide
gggaccucguucgagaccg

SEQ ID NO: 300764 - RNA, 19 nt, Artificial Sequence
  Description of Artificial Sequence: Synthetic oligonucleotide
uugucgaucacaggcugga

SEQ ID NO: 300765 - RNA, 19 nt, Artificial Sequence
  Description of Artificial Sequence: Synthetic oligonucleotide
aaccucggcucuccacagg

SEQ ID NO: 300766 - RNA, 19 nt, Artificial Sequence
  Description of Artificial Sequence: Synthetic oligonucleotide
cacuccugucuucucgucg

SEQ ID NO: 300767 - RNA, 19 nt, Artificial Sequence
  Description of Artificial Sequence: Synthetic oligonucleotide
cucaaauuuaaggccguuc

SEQ ID NO: 300768 - RNA, 19 nt, Artificial Sequence
  Description of Artificial Sequence: Synthetic oligonucleotide
ugugcuuuccuggcacucc

SEQ ID NO: 300769 - RNA, 19 nt, Artificial Sequence
  Description of Artificial Sequence: Synthetic oligonucleotide
gguaagagacugcugguca

SEQ ID NO: 300770 - RNA, 19 nt, Artificial Sequence
  Description of Artificial Sequence: Synthetic oligonucleotide
acgaucgcugaggagaucu

SEQ ID NO: 300771 - RNA, 19 nt, Artificial Sequence
  Description of Artificial Sequence: Synthetic oligonucleotide
acugugaguuucgugcuug

SEQ ID NO: 300772 - RNA, 19 nt, Artificial Sequence
  Description of Artificial Sequence: Synthetic oligonucleotide
gaaccucggcucuccacag

SEQ ID NO: 300773 - RNA, 19 nt, Artificial Sequence
  Description of Artificial Sequence: Synthetic oligonucleotide
guacgagugguagucacac

SEQ ID NO: 300774 - RNA, 19 nt, Artificial Sequence
  Description of Artificial Sequence: Synthetic oligonucleotide
ucguguacuccaccuggga

SEQ ID NO: 300775 - RNA, 19 nt, Artificial Sequence
  Description of Artificial Sequence: Synthetic oligonucleotide
agcauugcucuuacuuugg

SEQ ID NO: 300776 - RNA, 19 nt, Artificial Sequence
  Description of Artificial Sequence: Synthetic oligonucleotide
uaggggugccaucugcagu

SEQ ID NO: 300777 - RNA, 19 nt, Artificial Sequence
  Description of Artificial Sequence: Synthetic oligonucleotide
gggagcgggaccucguucg

SEQ ID NO: 300778 - RNA, 19 nt, Artificial Sequence
  Description of Artificial Sequence: Synthetic oligonucleotide
uaaggccguuccuagcgac

SEQ ID NO: 300779 - RNA, 19 nt, Artificial Sequence
  Description of Artificial Sequence: Synthetic oligonucleotide
agcaagcgcacuuguggug

SEQ ID NO: 300780 - RNA, 19 nt, Artificial Sequence
  Description of Artificial Sequence: Synthetic oligonucleotide
aaggccguuccuagcgacg

SEQ ID NO: 300781 - RNA, 19 nt, Artificial Sequence
  Description of Artificial Sequence: Synthetic oligonucleotide
cuuggccuuagugcgagac

SEQ ID NO: 300782 - RNA, 19 nt, Artificial Sequence
  Description of Artificial Sequence: Synthetic oligonucleotide
ggaacucaaaucucugauc

SEQ ID NO: 300783 - RNA, 19 nt, Artificial Sequence
  Description of Artificial Sequence: Synthetic oligonucleotide
ucuagaccugggcuuggaa

SEQ ID NO: 300784 - RNA, 19 nt, Artificial Sequence
  Description of Artificial Sequence: Synthetic oligonucleotide
cauacccucaggagugcug

SEQ ID NO: 300785 - RNA, 19 nt, Artificial Sequence
  Description of Artificial Sequence: Synthetic oligonucleotide
cuuuacgaacaagggcugc

SEQ ID NO: 300786 - RNA, 19 nt, Artificial Sequence
  Description of Artificial Sequence: Synthetic oligonucleotide
acguucggccugaagcugc

SEQ ID NO: 300787 - RNA, 19 nt, Artificial Sequence
  Description of Artificial Sequence: Synthetic oligonucleotide
aggagacgaucgcugagga

SEQ ID NO: 300788 - RNA, 19 nt, Artificial Sequence
  Description of Artificial Sequence: Synthetic oligonucleotide
gugggaucuagaccugggc

SEQ ID NO: 300789 - RNA, 19 nt, Artificial Sequence
  Description of Artificial Sequence: Synthetic oligonucleotide
augagauccugaguuauuu

SEQ ID NO: 300790 - RNA, 19 nt, Artificial Sequence
  Description of Artificial Sequence: Synthetic oligonucleotide
guggugguacgagugguag

SEQ ID NO: 300791 - RNA, 19 nt, Artificial Sequence
  Description of Artificial Sequence: Synthetic oligonucleotide
cuaacaugggcagaguucu

SEQ ID NO: 300792 - RNA, 19 nt, Artificial Sequence
  Description of Artificial Sequence: Synthetic oligonucleotide
acaccaggugagcuggaca

SEQ ID NO: 300793 - RNA, 19 nt, Artificial Sequence
  Description of Artificial Sequence: Synthetic oligonucleotide
agcgcacuugugguggugg

SEQ ID NO: 300794 - RNA, 19 nt, Artificial Sequence
  Description of Artificial Sequence: Synthetic oligonucleotide
cugaguuauuuugcucugc

SEQ ID NO: 300795 - RNA, 19 nt, Artificial Sequence
  Description of Artificial Sequence: Synthetic oligonucleotide
ucucggugggucucuacau

SEQ ID NO: 300796 - RNA, 19 nt, Artificial Sequence
  Description of Artificial Sequence: Synthetic oligonucleotide
auacccucaggagugcugu

SEQ ID NO: 300797 - RNA, 19 nt, Artificial Sequence
  Description of Artificial Sequence: Synthetic oligonucleotide
agaccugggcuuggaagac

SEQ ID NO: 300798 - RNA, 19 nt, Artificial Sequence
  Description of Artificial Sequence: Synthetic oligonucleotide
gcugaaugggcugagggac

SEQ ID NO: 300799 - RNA, 19 nt, Artificial Sequence
  Description of Artificial Sequence: Synthetic oligonucleotide
uccugggaagaaccucggc

SEQ ID NO: 300800 - RNA, 19 nt, Artificial Sequence
  Description of Artificial Sequence: Synthetic oligonucleotide
ugcgcugguuugcagguuu

SEQ ID NO: 300801 - RNA, 19 nt, Artificial Sequence
  Description of Artificial Sequence: Synthetic oligonucleotide
gucgucucucaggagagug

SEQ ID NO: 300802 - RNA, 19 nt, Artificial Sequence
  Description of Artificial Sequence: Synthetic oligonucleotide
agaccgugaucgccgcuuc

SEQ ID NO: 300803 - RNA, 19 nt, Artificial Sequence
  Description of Artificial Sequence: Synthetic oligonucleotide
uaaccccgcuacuuguuuc

SEQ ID NO: 300804 - RNA, 19 nt, Artificial Sequence
  Description of Artificial Sequence: Synthetic oligonucleotide
gcuuuuaccagcuucccgu

SEQ ID NO: 300805 - RNA, 19 nt, Artificial Sequence
  Description of Artificial Sequence: Synthetic oligonucleotide
cuagcgacguacucugcca

SEQ ID NO: 300806 - RNA, 19 nt, Artificial Sequence
  Description of Artificial Sequence: Synthetic oligonucleotide
ugaccucgaacgccgcacu

SEQ ID NO: 300807 - RNA, 19 nt, Artificial Sequence
  Description of Artificial Sequence: Synthetic oligonucleotide
cagagguagacccagacuu

SEQ ID NO: 300808 - RNA, 19 nt, Artificial Sequence
  Description of Artificial Sequence: Synthetic oligonucleotide
agcgggaccucguucgaga

SEQ ID NO: 300809 - RNA, 19 nt, Artificial Sequence
  Description of Artificial Sequence: Synthetic oligonucleotide
gacaaggcaugacacuugu

SEQ ID NO: 300810 - RNA, 19 nt, Artificial Sequence
  Description of Artificial Sequence: Synthetic oligonucleotide
cugccagcaccguguaccg

SEQ ID NO: 300811 - RNA, 19 nt, Artificial Sequence
  Description of Artificial Sequence: Synthetic oligonucleotide
gcaagcgcacuuguggugg

SEQ ID NO: 300812 - RNA, 19 nt, Artificial Sequence
  Description of Artificial Sequence: Synthetic oligonucleotide
agacgggugcagguaacuc

SEQ ID NO: 300813 - RNA, 19 nt, Artificial Sequence
  Description of Artificial Sequence: Synthetic oligonucleotide
uggagcguuccugggaaga

SEQ ID NO: 300814 - RNA, 19 nt, Artificial Sequence
  Description of Artificial Sequence: Synthetic oligonucleotide
guaagagacugcuggucaa

SEQ ID NO: 300815 - RNA, 19 nt, Artificial Sequence
  Description of Artificial Sequence: Synthetic oligonucleotide
gagagacgggugcagguaa

SEQ ID NO: 300816 - RNA, 19 nt, Artificial Sequence
  Description of Artificial Sequence: Synthetic oligonucleotide
ggugguacgagugguaguc

SEQ ID NO: 300817 - RNA, 19 nt, Artificial Sequence
  Description of Artificial Sequence: Synthetic oligonucleotide
uugcucuuacuuuggccau

SEQ ID NO: 300818 - RNA, 19 nt, Artificial Sequence
  Description of Artificial Sequence: Synthetic oligonucleotide
cagcgguuucuguggaagc

SEQ ID NO: 300819 - RNA, 19 nt, Artificial Sequence
  Description of Artificial Sequence: Synthetic oligonucleotide
uacguucggccugaagcug

SEQ ID NO: 300820 - RNA, 19 nt, Artificial Sequence
  Description of Artificial Sequence: Synthetic oligonucleotide
agucagucguguacuccac

SEQ ID NO: 300821 - RNA, 19 nt, Artificial Sequence
  Description of Artificial Sequence: Synthetic oligonucleotide
ucguccaacuugacucggu

SEQ ID NO: 300822 - RNA, 19 nt, Artificial Sequence
  Description of Artificial Sequence: Synthetic oligonucleotide
aucguccaacuugacucgg

SEQ ID NO: 300823 - RNA, 19 nt, Artificial Sequence
  Description of Artificial Sequence: Synthetic oligonucleotide
gucguguacuccaccuggg

SEQ ID NO: 300824 - RNA, 19 nt, Artificial Sequence
  Description of Artificial Sequence: Synthetic oligonucleotide
cacggucacuccaggcagg

SEQ ID NO: 300825 - RNA, 19 nt, Artificial Sequence
  Description of Artificial Sequence: Synthetic oligonucleotide
uucuggaacggguccguuu

SEQ ID NO: 300826 - RNA, 19 nt, Artificial Sequence
  Description of Artificial Sequence: Synthetic oligonucleotide
agagacgggugcagguaac

SEQ ID NO: 300827 - RNA, 19 nt, Artificial Sequence
  Description of Artificial Sequence: Synthetic oligonucleotide
caccguguaccguccuucc

SEQ ID NO: 300828 - RNA, 19 nt, Artificial Sequence
  Description of Artificial Sequence: Synthetic oligonucleotide
agcuugucgaucacaggcu

SEQ ID NO: 300829 - RNA, 19 nt, Artificial Sequence
  Description of Artificial Sequence: Synthetic oligonucleotide
ugcucuuacuuuggccaug

SEQ ID NO: 300830 - RNA, 19 nt, Artificial Sequence
  Description of Artificial Sequence: Synthetic oligonucleotide
agcuucccguccacggugc

SEQ ID NO: 300831 - RNA, 19 nt, Artificial Sequence
  Description of Artificial Sequence: Synthetic oligonucleotide
guuguggagguaaccccgc

SEQ ID NO: 300832 - RNA, 19 nt, Artificial Sequence
  Description of Artificial Sequence: Synthetic oligonucleotide
uuagugcgagaccgugauc

SEQ ID NO: 300833 - RNA, 19 nt, Artificial Sequence
  Description of Artificial Sequence: Synthetic oligonucleotide
ccuagcgacguacucugcc

SEQ ID NO: 300834 - RNA, 19 nt, Artificial Sequence
  Description of Artificial Sequence: Synthetic oligonucleotide
cgaacaagggcugcuaggg

SEQ ID NO: 300835 - RNA, 19 nt, Artificial Sequence
  Description of Artificial Sequence: Synthetic oligonucleotide
cucgaacgccgcacugucc

SEQ ID NO: 300836 - RNA, 19 nt, Artificial Sequence
  Description of Artificial Sequence: Synthetic oligonucleotide
cucggugggucucuacauc

SEQ ID NO: 300837 - RNA, 19 nt, Artificial Sequence
  Description of Artificial Sequence: Synthetic oligonucleotide
uggccacauugcuugugcu

SEQ ID NO: 300838 - RNA, 19 nt, Artificial Sequence
  Description of Artificial Sequence: Synthetic oligonucleotide
cucucggugggucucuaca

SEQ ID NO: 300839 - RNA, 19 nt, Artificial Sequence
  Description of Artificial Sequence: Synthetic oligonucleotide
cuuagcuagaaaagguguu

SEQ ID NO: 300840 - RNA, 19 nt, Artificial Sequence
  Description of Artificial Sequence: Synthetic oligonucleotide
gagcaagcgcacuuguggu

SEQ ID NO: 300841 - RNA, 19 nt, Artificial Sequence
  Description of Artificial Sequence: Synthetic oligonucleotide
gaccucgaacgccgcacug

SEQ ID NO: 300842 - RNA, 19 nt, Artificial Sequence
  Description of Artificial Sequence: Synthetic oligonucleotide
cuuagugcgagaccgugau

SEQ ID NO: 300843 - RNA, 19 nt, Artificial Sequence
  Description of Artificial Sequence: Synthetic oligonucleotide
uccuagcgacguacucugc

SEQ ID NO: 300844 - RNA, 19 nt, Artificial Sequence
  Description of Artificial Sequence: Synthetic oligonucleotide
aggaagggugcuguaguaa

SEQ ID NO: 300845 - RNA, 19 nt, Artificial Sequence
  Description of Artificial Sequence: Synthetic oligonucleotide
cucggcucuccacaggaga

SEQ ID NO: 300846 - RNA, 19 nt, Artificial Sequence
  Description of Artificial Sequence: Synthetic oligonucleotide
guuccuagcgacguacucu

SEQ ID NO: 300847 - RNA, 19 nt, Artificial Sequence
  Description of Artificial Sequence: Synthetic oligonucleotide
ucucaaauuuaaggccguu

SEQ ID NO: 300848 - RNA, 19 nt, Artificial Sequence
  Description of Artificial Sequence: Synthetic oligonucleotide
ugaugcuaccugugugcua

SEQ ID NO: 300849 - RNA, 19 nt, Artificial Sequence
  Description of Artificial Sequence: Synthetic oligonucleotide
ccugaguuauuuugcucug

SEQ ID NO: 300850 - RNA, 19 nt, Artificial Sequence
  Description of Artificial Sequence: Synthetic oligonucleotide
gcauugcucuuacuuuggc

SEQ ID NO: 300851 - RNA, 19 nt, Artificial Sequence
  Description of Artificial Sequence: Synthetic oligonucleotide
ggcguuguauuggugccag

SEQ ID NO: 300852 - RNA, 19 nt, Artificial Sequence
  Description of Artificial Sequence: Synthetic oligonucleotide
gagcguuccugggaagaac

SEQ ID NO: 300853 - RNA, 19 nt, Artificial Sequence
  Description of Artificial Sequence: Synthetic oligonucleotide
ggaagucaaacugugaguu

SEQ ID NO: 300854 - RNA, 19 nt, Artificial Sequence
  Description of Artificial Sequence: Synthetic oligonucleotide
agguguagucccaggggug

SEQ ID NO: 300855 - RNA, 19 nt, Artificial Sequence
  Description of Artificial Sequence: Synthetic oligonucleotide
accguguaccguccuuccu

SEQ ID NO: 300856 - RNA, 19 nt, Artificial Sequence
  Description of Artificial Sequence: Synthetic oligonucleotide
ggagacgaucgcugaggag

SEQ ID NO: 300857 - RNA, 19 nt, Artificial Sequence
  Description of Artificial Sequence: Synthetic oligonucleotide
cugcgagcauugcucuuac

SEQ ID NO: 300858 - RNA, 19 nt, Artificial Sequence
  Description of Artificial Sequence: Synthetic oligonucleotide
aacgccgcacuguccggua

SEQ ID NO: 300859 - RNA, 19 nt, Artificial Sequence
  Description of Artificial Sequence: Synthetic oligonucleotide
accucgaacgccgcacugu

SEQ ID NO: 300860 - RNA, 19 nt, Artificial Sequence
  Description of Artificial Sequence: Synthetic oligonucleotide
caggaaguaggucaauuuu

SEQ ID NO: 300861 - RNA, 19 nt, Artificial Sequence
  Description of Artificial Sequence: Synthetic oligonucleotide
guauuggugccagggcuga

SEQ ID NO: 300862 - RNA, 19 nt, Artificial Sequence
  Description of Artificial Sequence: Synthetic oligonucleotide
acgccugugccagcuuuuc

SEQ ID NO: 300863 - RNA, 19 nt, Artificial Sequence
  Description of Artificial Sequence: Synthetic oligonucleotide
cuggagcguuccugggaag

SEQ ID NO: 300864 - RNA, 19 nt, Artificial Sequence
  Description of Artificial Sequence: Synthetic oligonucleotide
gcuuuacgaacaagggcug

SEQ ID NO: 300865 - RNA, 19 nt, Artificial Sequence
  Description of Artificial Sequence: Synthetic oligonucleotide
caaaccgcaggaagucaaa

SEQ ID NO: 300866 - RNA, 19 nt, Artificial Sequence
  Description of Artificial Sequence: Synthetic oligonucleotide
cguguacuccaccugggag

SEQ ID NO: 300867 - RNA, 19 nt, Artificial Sequence
  Description of Artificial Sequence: Synthetic oligonucleotide
aggccguuccuagcgacgu

SEQ ID NO: 300868 - RNA, 19 nt, Artificial Sequence
  Description of Artificial Sequence: Synthetic oligonucleotide
gugcgagaccgugaucgcc

SEQ ID NO: 300869 - RNA, 19 nt, Artificial Sequence
  Description of Artificial Sequence: Synthetic oligonucleotide
cucuuacuuuggccaugag

SEQ ID NO: 300870 - RNA, 19 nt, Artificial Sequence
  Description of Artificial Sequence: Synthetic oligonucleotide
uggcucgaacacuggucuc

SEQ ID NO: 300871 - RNA, 19 nt, Artificial Sequence
  Description of Artificial Sequence: Synthetic oligonucleotide
gucucucaggagagugugc

SEQ ID NO: 300872 - RNA, 19 nt, Artificial Sequence
  Description of Artificial Sequence: Synthetic oligonucleotide
ugcgagcauugcucuuacu

SEQ ID NO: 300873 - RNA, 19 nt, Artificial Sequence
  Description of Artificial Sequence: Synthetic oligonucleotide
gagcgggaccucguucgag

SEQ ID NO: 300874 - RNA, 19 nt, Artificial Sequence
  Description of Artificial Sequence: Synthetic oligonucleotide
acgccgcacuguccgguag

SEQ ID NO: 300875 - RNA, 19 nt, Artificial Sequence
  Description of Artificial Sequence: Synthetic oligonucleotide
agagguagacccagacuuu

SEQ ID NO: 300876 - RNA, 19 nt, Artificial Sequence
  Description of Artificial Sequence: Synthetic oligonucleotide
cuuggacgccugugccagc

SEQ ID NO: 300877 - RNA, 19 nt, Artificial Sequence
  Description of Artificial Sequence: Synthetic oligonucleotide
agacgaucgcugaggagau

SEQ ID NO: 300878 - RNA, 19 nt, Artificial Sequence
  Description of Artificial Sequence: Synthetic oligonucleotide
ccuuggacgccugugccag

SEQ ID NO: 300879 - RNA, 19 nt, Artificial Sequence
  Description of Artificial Sequence: Synthetic oligonucleotide
gacucuucagcagcgguuu

SEQ ID NO: 300880 - RNA, 19 nt, Artificial Sequence
  Description of Artificial Sequence: Synthetic oligonucleotide
uggcacucccugcuuucuu

SEQ ID NO: 300881 - RNA, 19 nt, Artificial Sequence
  Description of Artificial Sequence: Synthetic oligonucleotide
agcaccguguaccguccuu

SEQ ID NO: 300882 - RNA, 19 nt, Artificial Sequence
  Description of Artificial Sequence: Synthetic oligonucleotide
gccuugauggcuaaaacuu

SEQ ID NO: 300883 - RNA, 19 nt, Artificial Sequence
  Description of Artificial Sequence: Synthetic oligonucleotide
gaucgccgcuucuucuucu

SEQ ID NO: 300884 - RNA, 19 nt, Artificial Sequence
  Description of Artificial Sequence: Synthetic oligonucleotide
ugugugcuacugccuccuu

SEQ ID NO: 300885 - RNA, 19 nt, Artificial Sequence
  Description of Artificial Sequence: Synthetic oligonucleotide
ccaaccagcagaggacaag

SEQ ID NO: 300886 - RNA, 19 nt, Artificial Sequence
  Description of Artificial Sequence: Synthetic oligonucleotide
cgagugguagucacaccag

SEQ ID NO: 300887 - RNA, 19 nt, Artificial Sequence
  Description of Artificial Sequence: Synthetic oligonucleotide
gcgagcauugcucuuacuu

SEQ ID NO: 300888 - RNA, 19 nt, Artificial Sequence
  Description of Artificial Sequence: Synthetic oligonucleotide
cagguaagagacugcuggu

SEQ ID NO: 300889 - RNA, 19 nt, Artificial Sequence
  Description of Artificial Sequence: Synthetic oligonucleotide
ggaagacgagugguacuug

SEQ ID NO: 300890 - RNA, 19 nt, Artificial Sequence
  Description of Artificial Sequence: Synthetic oligonucleotide
gguacgagugguagucaca

SEQ ID NO: 300891 - RNA, 19 nt, Artificial Sequence
  Description of Artificial Sequence: Synthetic oligonucleotide
ugucgaucacaggcuggau

SEQ ID NO: 300892 - RNA, 19 nt, Artificial Sequence
  Description of Artificial Sequence: Synthetic oligonucleotide
accgacugacccagggagu

SEQ ID NO: 300893 - RNA, 19 nt, Artificial Sequence
  Description of Artificial Sequence: Synthetic oligonucleotide
gcuugcucggggauguuga

SEQ ID NO: 300894 - RNA, 19 nt, Artificial Sequence
  Description of Artificial Sequence: Synthetic oligonucleotide
ucgugcuugcuuggccuuc

SEQ ID NO: 300895 - RNA, 19 nt, Artificial Sequence
  Description of Artificial Sequence: Synthetic oligonucleotide
uacccucaggagugcuguc

SEQ ID NO: 300896 - RNA, 19 nt, Artificial Sequence
  Description of Artificial Sequence: Synthetic oligonucleotide
ggcggagguaugauggcca

SEQ ID NO: 300897 - RNA, 19 nt, Artificial Sequence
  Description of Artificial Sequence: Synthetic oligonucleotide
ggguccguuuccugcuggc

SEQ ID NO: 300898 - RNA, 19 nt, Artificial Sequence
  Description of Artificial Sequence: Synthetic oligonucleotide
gccuuagugcgagaccgug

SEQ ID NO: 300899 - RNA, 19 nt, Artificial Sequence
  Description of Artificial Sequence: Synthetic oligonucleotide
ggccacgggagcaagcgca

SEQ ID NO: 300900 - RNA, 19 nt, Artificial Sequence
  Description of Artificial Sequence: Synthetic oligonucleotide
gucucaaauuuaaggccgu

SEQ ID NO: 300901 - RNA, 19 nt, Artificial Sequence
  Description of Artificial Sequence: Synthetic oligonucleotide
gccguuccuagcgacguac

SEQ ID NO: 300902 - RNA, 19 nt, Artificial Sequence
  Description of Artificial Sequence: Synthetic oligonucleotide
ggauguugacugggaccgg

SEQ ID NO: 300903 - RNA, 19 nt, Artificial Sequence
  Description of Artificial Sequence: Synthetic oligonucleotide
gugguacgagugguaguca

SEQ ID NO: 300904 - RNA, 19 nt, Artificial Sequence
  Description of Artificial Sequence: Synthetic oligonucleotide
gcucuuacuuuggccauga

SEQ ID NO: 300905 - RNA, 19 nt, Artificial Sequence
  Description of Artificial Sequence: Synthetic oligonucleotide
gcugagucagucguguacu

SEQ ID NO: 300906 - RNA, 19 nt, Artificial Sequence
  Description of Artificial Sequence: Synthetic oligonucleotide
gagacgggugcagguaacu

SEQ ID NO: 300907 - RNA, 19 nt, Artificial Sequence
  Description of Artificial Sequence: Synthetic oligonucleotide
gcguuguauuggugccagg

SEQ ID NO: 300908 - RNA, 19 nt, Artificial Sequence
  Description of Artificial Sequence: Synthetic oligonucleotide
gagaccgugaucgccgcuu

SEQ ID NO: 300909 - RNA, 19 nt, Artificial Sequence
  Description of Artificial Sequence: Synthetic oligonucleotide
cucauccgguaggcaguag

SEQ ID NO: 300910 - RNA, 19 nt, Artificial Sequence
  Description of Artificial Sequence: Synthetic oligonucleotide
ccgguaggcaguagggaca

SEQ ID NO: 300911 - RNA, 19 nt, Artificial Sequence
  Description of Artificial Sequence: Synthetic oligonucleotide
ccuuagugcgagaccguga

SEQ ID NO: 300912 - RNA, 19 nt, Artificial Sequence
  Description of Artificial Sequence: Synthetic oligonucleotide
cguguaccguccuuccuuc

SEQ ID NO: 300913 - RNA, 19 nt, Artificial Sequence
  Description of Artificial Sequence: Synthetic oligonucleotide
ccuggagcguuccugggaa

SEQ ID NO: 300914 - RNA, 19 nt, Artificial Sequence
  Description of Artificial Sequence: Synthetic oligonucleotide
gacgaucgcugaggagauc

SEQ ID NO: 300915 - RNA, 19 nt, Artificial Sequence
  Description of Artificial Sequence: Synthetic oligonucleotide
ccgacugacccagggaguc

SEQ ID NO: 300916 - RNA, 19 nt, Artificial Sequence
  Description of Artificial Sequence: Synthetic oligonucleotide
ggcaugacacuuguuuccu

SEQ ID NO: 300917 - RNA, 19 nt, Artificial Sequence
  Description of Artificial Sequence: Synthetic oligonucleotide
gcaccguguaccguccuuc

SEQ ID NO: 300918 - RNA, 19 nt, Artificial Sequence
  Description of Artificial Sequence: Synthetic oligonucleotide
gcgggaccucguucgagac

SEQ ID NO: 300919 - RNA, 19 nt, Artificial Sequence
  Description of Artificial Sequence: Synthetic oligonucleotide
gcgagaccgugaucgccgc

SEQ ID NO: 300920 - RNA, 19 nt, Artificial Sequence
  Description of Artificial Sequence: Synthetic oligonucleotide
cgagaacgugaccucgaac

SEQ ID NO: 300921 - RNA, 19 nt, Artificial Sequence
  Description of Artificial Sequence: Synthetic oligonucleotide
gaacgccgcacuguccggu

SEQ ID NO: 300922 - RNA, 19 nt, Artificial Sequence
  Description of Artificial Sequence: Synthetic oligonucleotide
ggggagcgggaccucguuc

SEQ ID NO: 300923 - RNA, 19 nt, Artificial Sequence
  Description of Artificial Sequence: Synthetic oligonucleotide
gcugcgagcauugcucuua

SEQ ID NO: 300924 - RNA, 19 nt, Artificial Sequence
  Description of Artificial Sequence: Synthetic oligonucleotide
gcaagacgguccuccagcu

SEQ ID NO: 300925 - RNA, 19 nt, Artificial Sequence
  Description of Artificial Sequence: Synthetic oligonucleotide
cguuccuagcgacguacuc

SEQ ID NO: 300926 - RNA, 19 nt, Artificial Sequence
  Description of Artificial Sequence: Synthetic oligonucleotide
gaccgugaucgccgcuucu

SEQ ID NO: 300927 - RNA, 19 nt, Artificial Sequence
  Description of Artificial Sequence: Synthetic oligonucleotide
ggagcguuccugggaagaa

SEQ ID NO: 300928 - RNA, 19 nt, Artificial Sequence
  Description of Artificial Sequence: Synthetic oligonucleotide
ccgugaucgccgcuucuuc

SEQ ID NO: 300929 - RNA, 19 nt, Artificial Sequence
  Description of Artificial Sequence: Synthetic oligonucleotide
cggggauguugacugggac

SEQ ID NO: 300930 - RNA, 19 nt, Artificial Sequence
  Description of Artificial Sequence: Synthetic oligonucleotide
gccauacccucaggagugc

SEQ ID NO: 300931 - RNA, 19 nt, Artificial Sequence
  Description of Artificial Sequence: Synthetic oligonucleotide
auaggucggcacagagcuu

SEQ ID NO: 300932 - RNA, 19 nt, Artificial Sequence
  Description of Artificial Sequence: Synthetic oligonucleotide
ggagcgggaccucguucga

SEQ ID NO: 300933 - RNA, 19 nt, Artificial Sequence
  Description of Artificial Sequence: Synthetic oligonucleotide
guacuccaccugggagggc

SEQ ID NO: 300934 - RNA, 19 nt, Artificial Sequence
  Description of Artificial Sequence: Synthetic oligonucleotide
cacgggagcaagcgcacuu

SEQ ID NO: 300935 - RNA, 19 nt, Artificial Sequence
  Description of Artificial Sequence: Synthetic oligonucleotide
cgaacgccgcacuguccgg

SEQ ID NO: 300936 - RNA, 19 nt, Artificial Sequence
  Description of Artificial Sequence: Synthetic oligonucleotide
gccgggcauaggucggcac

SEQ ID NO: 300937 - RNA, 19 nt, Artificial Sequence
  Description of Artificial Sequence: Synthetic oligonucleotide
caagcgcacuugugguggu

SEQ ID NO: 300938 - RNA, 19 nt, Artificial Sequence
  Description of Artificial Sequence: Synthetic oligonucleotide
gcggcaagacgguccucca

SEQ ID NO: 300939 - RNA, 19 nt, Artificial Sequence
  Description of Artificial Sequence: Synthetic oligonucleotide
ccgccauacccucaggagu

SEQ ID NO: 300940 - RNA, 19 nt, Artificial Sequence
  Description of Artificial Sequence: Synthetic oligonucleotide
cgggaccucguucgagacc

SEQ ID NO: 300941 - RNA, 19 nt, Artificial Sequence
  Description of Artificial Sequence: Synthetic oligonucleotide
gcugcucauccgguaggca

SEQ ID NO: 300942 - RNA, 19 nt, Artificial Sequence
  Description of Artificial Sequence: Synthetic oligonucleotide
cggguccguuuccugcugg

SEQ ID NO: 300943 - RNA, 19 nt, Artificial Sequence
  Description of Artificial Sequence: Synthetic oligonucleotide
gccacgggagcaagcgcac

SEQ ID NO: 300944 - RNA, 19 nt, Artificial Sequence
  Description of Artificial Sequence: Synthetic oligonucleotide
gcgguuucuguggaagccu

SEQ ID NO: 300945 - RNA, 19 nt, Artificial Sequence
  Description of Artificial Sequence: Synthetic oligonucleotide
gcucgaacacuggucucaa

SEQ ID NO: 300946 - RNA, 19 nt, Artificial Sequence
  Description of Artificial Sequence: Synthetic oligonucleotide
cgagcauugcucuuacuuu

SEQ ID NO: 300947 - RNA, 19 nt, Artificial Sequence
  Description of Artificial Sequence: Synthetic oligonucleotide
cggagguaugauggccacg

SEQ ID NO: 300948 - RNA, 19 nt, Artificial Sequence
  Description of Artificial Sequence: Synthetic oligonucleotide
gaccucguucgagaccguu

SEQ ID NO: 300949 - RNA, 19 nt, Artificial Sequence
  Description of Artificial Sequence: Synthetic oligonucleotide
ccaugagauccugaguuau

SEQ ID NO: 300950 - RNA, 19 nt, Artificial Sequence
  Description of Artificial Sequence: Synthetic oligonucleotide
ccguccuuccuucauggau

SEQ ID NO: 300951 - RNA, 19 nt, Artificial Sequence
  Description of Artificial Sequence: Synthetic oligonucleotide
caagacgguccuccagcuu

SEQ ID NO: 300952 - RNA, 19 nt, Artificial Sequence
  Description of Artificial Sequence: Synthetic oligonucleotide
cguccuuccuucauggauu

SEQ ID NO: 300953 - RNA, 19 nt, Artificial Sequence
  Description of Artificial Sequence: Synthetic oligonucleotide
gggcauaggucggcacaga

SEQ ID NO: 300954 - RNA, 19 nt, Artificial Sequence
  Description of Artificial Sequence: Synthetic oligonucleotide
gcucauccgguaggcagua

SEQ ID NO: 300955 - RNA, 19 nt, Artificial Sequence
  Description of Artificial Sequence: Synthetic oligonucleotide
gagggacgcugugcugccu

SEQ ID NO: 300956 - RNA, 19 nt, Artificial Sequence
  Description of Artificial Sequence: Synthetic oligonucleotide
ccguguaccguccuuccuu

SEQ ID NO: 300957 - RNA, 19 nt, Artificial Sequence
  Description of Artificial Sequence: Synthetic oligonucleotide
cgugaucgccgcuucuucu

SEQ ID NO: 300958 - RNA, 19 nt, Artificial Sequence
  Description of Artificial Sequence: Synthetic oligonucleotide
cgugaccucgaacgccgca

SEQ ID NO: 300959 - RNA, 19 nt, Artificial Sequence
  Description of Artificial Sequence: Synthetic oligonucleotide
cacacccgaugcucugcuu

SEQ ID NO: 300960 - RNA, 19 nt, Artificial Sequence
  Description of Artificial Sequence: Synthetic oligonucleotide
ggccguuccuagcgacgua

SEQ ID NO: 300961 - RNA, 19 nt, Artificial Sequence
  Description of Artificial Sequence: Synthetic oligonucleotide
gggaccgggccuuggccuu

SEQ ID NO: 300962 - RNA, 19 nt, Artificial Sequence
  Description of Artificial Sequence: Synthetic oligonucleotide
ggccuuagugcgagaccgu

SEQ ID NO: 300963 - RNA, 19 nt, Artificial Sequence
  Description of Artificial Sequence: Synthetic oligonucleotide
ccguuccuagcgacguacu

SEQ ID NO: 300964 - RNA, 19 nt, Artificial Sequence
  Description of Artificial Sequence: Synthetic oligonucleotide
cccagggguggugguacga

SEQ ID NO: 300965 - RNA, 19 nt, Artificial Sequence
  Description of Artificial Sequence: Synthetic oligonucleotide
cguccaacuugacucgguu

SEQ ID NO: 300966 - RNA, 19 nt, Artificial Sequence
  Description of Artificial Sequence: Synthetic oligonucleotide
ccguuuccugcuggcucca

SEQ ID NO: 300967 - RNA, 19 nt, Artificial Sequence
  Description of Artificial Sequence: Synthetic oligonucleotide
ggaccgggccuuggccuua

SEQ ID NO: 300968 - RNA, 19 nt, Artificial Sequence
  Description of Artificial Sequence: Synthetic oligonucleotide
cgagaccgugaucgccgcu

SEQ ID NO: 300969 - RNA, 19 nt, Artificial Sequence
  Description of Artificial Sequence: Synthetic oligonucleotide
cgucgucucucaggagagu

SEQ ID NO: 300970 - RNA, 19 nt, Artificial Sequence
  Description of Artificial Sequence: Synthetic oligonucleotide
aaugagaccaaacuagagc

SEQ ID NO: 300971 - RNA, 19 nt, Artificial Sequence
  Description of Artificial Sequence: Synthetic oligonucleotide
aauaugaacaggucagggc

SEQ ID NO: 300972 - RNA, 19 nt, Artificial Sequence
  Description of Artificial Sequence: Synthetic oligonucleotide
auaugaacaggucagggcc

SEQ ID NO: 300973 - RNA, 19 nt, Artificial Sequence
  Description of Artificial Sequence: Synthetic oligonucleotide
aagacauacuuuucaaacc

SEQ ID NO: 300974 - RNA, 19 nt, Artificial Sequence
  Description of Artificial Sequence: Synthetic oligonucleotide
auuaaaaugggcugggacg

SEQ ID NO: 300975 - RNA, 19 nt, Artificial Sequence
  Description of Artificial Sequence: Synthetic oligonucleotide
acauuaaacacacaauagg

SEQ ID NO: 300976 - RNA, 19 nt, Artificial Sequence
  Description of Artificial Sequence: Synthetic oligonucleotide
ugugguauagaaaugauau

SEQ ID NO: 300977 - RNA, 19 nt, Artificial Sequence
  Description of Artificial Sequence: Synthetic oligonucleotide
ugacuagucagccucaugg

SEQ ID NO: 300978 - RNA, 19 nt, Artificial Sequence
  Description of Artificial Sequence: Synthetic oligonucleotide
aauugugauagucuuagca

SEQ ID NO: 300979 - RNA, 19 nt, Artificial Sequence
  Description of Artificial Sequence: Synthetic oligonucleotide
guaacuaccaccuugggug

SEQ ID NO: 300980 - RNA, 19 nt, Artificial Sequence
  Description of Artificial Sequence: Synthetic oligonucleotide
cauuaaacacacaauaggc

SEQ ID NO: 300981 - RNA, 19 nt, Artificial Sequence
  Description of Artificial Sequence: Synthetic oligonucleotide
ugccaugaaacgaaaaugg

SEQ ID NO: 300982 - RNA, 19 nt, Artificial Sequence
  Description of Artificial Sequence: Synthetic oligonucleotide
aaauguaggguccccacac

SEQ ID NO: 300983 - RNA, 19 nt, Artificial Sequence
  Description of Artificial Sequence: Synthetic oligonucleotide
uaaucuuccucauagaagu

SEQ ID NO: 300984 - RNA, 19 nt, Artificial Sequence
  Description of Artificial Sequence: Synthetic oligonucleotide
uuaggaaacaauuuccuga

SEQ ID NO: 300985 - RNA, 19 nt, Artificial Sequence
  Description of Artificial Sequence: Synthetic oligonucleotide
auagacaaguuccugaaag

SEQ ID NO: 300986 - RNA, 19 nt, Artificial Sequence
  Description of Artificial Sequence: Synthetic oligonucleotide
accauaaauagacaaguuc

SEQ ID NO: 300987 - RNA, 19 nt, Artificial Sequence
  Description of Artificial Sequence: Synthetic oligonucleotide
acuugcuagaaacuaauuc

SEQ ID NO: 300988 - RNA, 19 nt, Artificial Sequence
  Description of Artificial Sequence: Synthetic oligonucleotide
guaaagagcaaauuauucc

SEQ ID NO: 300989 - RNA, 19 nt, Artificial Sequence
  Description of Artificial Sequence: Synthetic oligonucleotide
ugugacuaaguuuagggug

SEQ ID NO: 300990 - RNA, 19 nt, Artificial Sequence
  Description of Artificial Sequence: Synthetic oligonucleotide
uggguuuguauucacaugc

SEQ ID NO: 300991 - RNA, 19 nt, Artificial Sequence
  Description of Artificial Sequence: Synthetic oligonucleotide
auugugauagucuuagcag

SEQ ID NO: 300992 - RNA, 19 nt, Artificial Sequence
  Description of Artificial Sequence: Synthetic oligonucleotide
ucaguaacuaccaccuugg

SEQ ID NO: 300993 - RNA, 19 nt, Artificial Sequence
  Description of Artificial Sequence: Synthetic oligonucleotide
cauucaaaagcucacacac

SEQ ID NO: 300994 - RNA, 19 nt, Artificial Sequence
  Description of Artificial Sequence: Synthetic oligonucleotide
ucuuuaccgaauaaacuag

SEQ ID NO: 300995 - RNA, 19 nt, Artificial Sequence
  Description of Artificial Sequence: Synthetic oligonucleotide
ucugucuacguuaaggaca

SEQ ID NO: 300996 - RNA, 19 nt, Artificial Sequence
  Description of Artificial Sequence: Synthetic oligonucleotide
cugacaacaaagaacacac

SEQ ID NO: 300997 - RNA, 19 nt, Artificial Sequence
  Description of Artificial Sequence: Synthetic oligonucleotide
uguaaagagcaaauuauuc

SEQ ID NO: 300998 - RNA, 19 nt, Artificial Sequence
  Description of Artificial Sequence: Synthetic oligonucleotide
uaccgaauaaacuagaguu

SEQ ID NO: 300999 - RNA, 19 nt, Artificial Sequence
  Description of Artificial Sequence: Synthetic oligonucleotide
ugguaaauuguucaaggca

SEQ ID NO: 301000 - RNA, 19 nt, Artificial Sequence
  Description of Artificial Sequence: Synthetic oligonucleotide
acauucagcaguauguugc

SEQ ID NO: 301001 - RNA, 19 nt, Artificial Sequence
  Description of Artificial Sequence: Synthetic oligonucleotide
acugagauuauacugucug

SEQ ID NO: 301002 - RNA, 19 nt, Artificial Sequence
  Description of Artificial Sequence: Synthetic oligonucleotide
caugaaacgaaaaugguga

SEQ ID NO: 301003 - RNA, 19 nt, Artificial Sequence
  Description of Artificial Sequence: Synthetic oligonucleotide
aacucugucuacguuaagg

SEQ ID NO: 301004 - RNA, 19 nt, Artificial Sequence
  Description of Artificial Sequence: Synthetic oligonucleotide
uuuaccgaauaaacuagag

SEQ ID NO: 301005 - RNA, 19 nt, Artificial Sequence
  Description of Artificial Sequence: Synthetic oligonucleotide
ucuuacauccccuuuacaa

SEQ ID NO: 301006 - RNA, 19 nt, Artificial Sequence
  Description of Artificial Sequence: Synthetic oligonucleotide
gauuguuacacuuccuuac

SEQ ID NO: 301007 - RNA, 19 nt, Artificial Sequence
  Description of Artificial Sequence: Synthetic oligonucleotide
ucuacguuaaggacagucc

SEQ ID NO: 301008 - RNA, 19 nt, Artificial Sequence
  Description of Artificial Sequence: Synthetic oligonucleotide
ugguauagaaaugauauaa

SEQ ID NO: 301009 - RNA, 19 nt, Artificial Sequence
  Description of Artificial Sequence: Synthetic oligonucleotide
gcuacuaacacaguuaagg

SEQ ID NO: 301010 - RNA, 19 nt, Artificial Sequence
  Description of Artificial Sequence: Synthetic oligonucleotide
cuacuaacacaguuaaggg

SEQ ID NO: 301011 - RNA, 19 nt, Artificial Sequence
  Description of Artificial Sequence: Synthetic oligonucleotide
ucaaucgucgccaaguauc

SEQ ID NO: 301012 - RNA, 19 nt, Artificial Sequence
  Description of Artificial Sequence: Synthetic oligonucleotide
acaaguuccugaaaguacc

SEQ ID NO: 301013 - RNA, 19 nt, Artificial Sequence
  Description of Artificial Sequence: Synthetic oligonucleotide
aauguaggguccccacacc

SEQ ID NO: 301014 - RNA, 19 nt, Artificial Sequence
  Description of Artificial Sequence: Synthetic oligonucleotide
gaaccagcuacuaacacag

SEQ ID NO: 301015 - RNA, 19 nt, Artificial Sequence
  Description of Artificial Sequence: Synthetic oligonucleotide
caguauguugccuagguug

SEQ ID NO: 301016 - RNA, 19 nt, Artificial Sequence
  Description of Artificial Sequence: Synthetic oligonucleotide
uccaaucccggacagagca

SEQ ID NO: 301017 - RNA, 19 nt, Artificial Sequence
  Description of Artificial Sequence: Synthetic oligonucleotide
uuacucuuuugguaaauug

SEQ ID NO: 301018 - RNA, 19 nt, Artificial Sequence
  Description of Artificial Sequence: Synthetic oligonucleotide
acauuucauggauuguuac

SEQ ID NO: 301019 - RNA, 19 nt, Artificial Sequence
  Description of Artificial Sequence: Synthetic oligonucleotide
aucuuuaccgaauaaacua

SEQ ID NO: 301020 - RNA, 19 nt, Artificial Sequence
  Description of Artificial Sequence: Synthetic oligonucleotide
ugggcaugcggcuacacgg

SEQ ID NO: 301021 - RNA, 19 nt, Artificial Sequence
  Description of Artificial Sequence: Synthetic oligonucleotide
guuggaaccagcuacuaac

SEQ ID NO: 301022 - RNA, 19 nt, Artificial Sequence
  Description of Artificial Sequence: Synthetic oligonucleotide
uaaugagaccaaacuagag

SEQ ID NO: 301023 - RNA, 19 nt, Artificial Sequence
  Description of Artificial Sequence: Synthetic oligonucleotide
ugcuauuacauuugggacu

SEQ ID NO: 301024 - RNA, 19 nt, Artificial Sequence
  Description of Artificial Sequence: Synthetic oligonucleotide
aaauuauuccauguguuaa

SEQ ID NO: 301025 - RNA, 19 nt, Artificial Sequence
  Description of Artificial Sequence: Synthetic oligonucleotide
aacauucagcaguauguug

SEQ ID NO: 301026 - RNA, 19 nt, Artificial Sequence
  Description of Artificial Sequence: Synthetic oligonucleotide
uuaccgaauaaacuagagu

SEQ ID NO: 301027 - RNA, 19 nt, Artificial Sequence
  Description of Artificial Sequence: Synthetic oligonucleotide
cuugcuguaguuuuguuga

SEQ ID NO: 301028 - RNA, 19 nt, Artificial Sequence
  Description of Artificial Sequence: Synthetic oligonucleotide
ugugauagucuuagcagca

SEQ ID NO: 301029 - RNA, 19 nt, Artificial Sequence
  Description of Artificial Sequence: Synthetic oligonucleotide
cauggauuguuacacuucc

SEQ ID NO: 301030 - RNA, 19 nt, Artificial Sequence
  Description of Artificial Sequence: Synthetic oligonucleotide
cuuacauccccuuuacaac

SEQ ID NO: 301031 - RNA, 19 nt, Artificial Sequence
  Description of Artificial Sequence: Synthetic oligonucleotide
ugugacagacuuucuagug

SEQ ID NO: 301032 - RNA, 19 nt, Artificial Sequence
  Description of Artificial Sequence: Synthetic oligonucleotide
cauagaaguucccauuacc

SEQ ID NO: 301033 - RNA, 19 nt, Artificial Sequence
  Description of Artificial Sequence: Synthetic oligonucleotide
aagcuaccaaauuugugcu

SEQ ID NO: 301034 - RNA, 19 nt, Artificial Sequence
  Description of Artificial Sequence: Synthetic oligonucleotide
ucauucaaaagcucacaca

SEQ ID NO: 301035 - RNA, 19 nt, Artificial Sequence
  Description of Artificial Sequence: Synthetic oligonucleotide
agucuuacauccccuuuac

SEQ ID NO: 301036 - RNA, 19 nt, Artificial Sequence
  Description of Artificial Sequence: Synthetic oligonucleotide
uuuagaaggcaauccaguc

SEQ ID NO: 301037 - RNA, 19 nt, Artificial Sequence
  Description of Artificial Sequence: Synthetic oligonucleotide
agagugcucacagagcccc

SEQ ID NO: 301038 - RNA, 19 nt, Artificial Sequence
  Description of Artificial Sequence: Synthetic oligonucleotide
uuaagaagucuuacauccc

SEQ ID NO: 301039 - RNA, 19 nt, Artificial Sequence
  Description of Artificial Sequence: Synthetic oligonucleotide
uuacauccccuuuacaacu

SEQ ID NO: 301040 - RNA, 19 nt, Artificial Sequence
  Description of Artificial Sequence: Synthetic oligonucleotide
uguuaagaagucuuacauc

SEQ ID NO: 301041 - RNA, 19 nt, Artificial Sequence
  Description of Artificial Sequence: Synthetic oligonucleotide
augaaacgaaaauggugac

SEQ ID NO: 301042 - RNA, 19 nt, Artificial Sequence
  Description of Artificial Sequence: Synthetic oligonucleotide
uagcuccuaaagcauaaag

SEQ ID NO: 301043 - RNA, 19 nt, Artificial Sequence
  Description of Artificial Sequence: Synthetic oligonucleotide
uuguuacacuuccuuacag

SEQ ID NO: 301044 - RNA, 19 nt, Artificial Sequence
  Description of Artificial Sequence: Synthetic oligonucleotide
agcaauguggcaacauucc

SEQ ID NO: 301045 - RNA, 19 nt, Artificial Sequence
  Description of Artificial Sequence: Synthetic oligonucleotide
acccgaaucagcauggugg

SEQ ID NO: 301046 - RNA, 19 nt, Artificial Sequence
  Description of Artificial Sequence: Synthetic oligonucleotide
aacuaauucucaauguuaa

SEQ ID NO: 301047 - RNA, 19 nt, Artificial Sequence
  Description of Artificial Sequence: Synthetic oligonucleotide
agaaguucccauuaccuaa

SEQ ID NO: 301048 - RNA, 19 nt, Artificial Sequence
  Description of Artificial Sequence: Synthetic oligonucleotide
gagcauacaagugugcacc

SEQ ID NO: 301049 - RNA, 19 nt, Artificial Sequence
  Description of Artificial Sequence: Synthetic oligonucleotide
uugcuagaaacuaauucuc

SEQ ID NO: 301050 - RNA, 19 nt, Artificial Sequence
  Description of Artificial Sequence: Synthetic oligonucleotide
agacuuucuagugauucac

SEQ ID NO: 301051 - RNA, 19 nt, Artificial Sequence
  Description of Artificial Sequence: Synthetic oligonucleotide
ugcgaaaucaugagauaca

SEQ ID NO: 301052 - RNA, 19 nt, Artificial Sequence
  Description of Artificial Sequence: Synthetic oligonucleotide
aagaggcugcuuuacuuug

SEQ ID NO: 301053 - RNA, 19 nt, Artificial Sequence
  Description of Artificial Sequence: Synthetic oligonucleotide
uucacuauccaaucccgga

SEQ ID NO: 301054 - RNA, 19 nt, Artificial Sequence
  Description of Artificial Sequence: Synthetic oligonucleotide
ugaaaucuuuucauuccac

SEQ ID NO: 301055 - RNA, 19 nt, Artificial Sequence
  Description of Artificial Sequence: Synthetic oligonucleotide
gauaggcacucccagagca

SEQ ID NO: 301056 - RNA, 19 nt, Artificial Sequence
  Description of Artificial Sequence: Synthetic oligonucleotide
uuaaauguaggguccccac

SEQ ID NO: 301057 - RNA, 19 nt, Artificial Sequence
  Description of Artificial Sequence: Synthetic oligonucleotide
auuaaacacacaauaggca

SEQ ID NO: 301058 - RNA, 19 nt, Artificial Sequence
  Description of Artificial Sequence: Synthetic oligonucleotide
aaguaucucucauagucuu

SEQ ID NO: 301059 - RNA, 19 nt, Artificial Sequence
  Description of Artificial Sequence: Synthetic oligonucleotide
guguaacucaucugcaucc

SEQ ID NO: 301060 - RNA, 19 nt, Artificial Sequence
  Description of Artificial Sequence: Synthetic oligonucleotide
cugucuacguuaaggacag

SEQ ID NO: 301061 - RNA, 19 nt, Artificial Sequence
  Description of Artificial Sequence: Synthetic oligonucleotide
aaaaugggcgucaggucac

SEQ ID NO: 301062 - RNA, 19 nt, Artificial Sequence
  Description of Artificial Sequence: Synthetic oligonucleotide
uguggcaacauuccuuggu

SEQ ID NO: 301063 - RNA, 19 nt, Artificial Sequence
  Description of Artificial Sequence: Synthetic oligonucleotide
aaggcaagcaauguggcaa

SEQ ID NO: 301064 - RNA, 19 nt, Artificial Sequence
  Description of Artificial Sequence: Synthetic oligonucleotide
agcauacaagugugcaccc

SEQ ID NO: 301065 - RNA, 19 nt, Artificial Sequence
  Description of Artificial Sequence: Synthetic oligonucleotide
agcaguucaagccagccaa

SEQ ID NO: 301066 - RNA, 19 nt, Artificial Sequence
  Description of Artificial Sequence: Synthetic oligonucleotide
ugauuaauguaaagagcaa

SEQ ID NO: 301067 - RNA, 19 nt, Artificial Sequence
  Description of Artificial Sequence: Synthetic oligonucleotide
gacguuuagaaggcaaucc

SEQ ID NO: 301068 - RNA, 19 nt, Artificial Sequence
  Description of Artificial Sequence: Synthetic oligonucleotide
gacuagucagccucauggg

SEQ ID NO: 301069 - RNA, 19 nt, Artificial Sequence
  Description of Artificial Sequence: Synthetic oligonucleotide
ugguccuaguguugaaugg

SEQ ID NO: 301070 - RNA, 19 nt, Artificial Sequence
  Description of Artificial Sequence: Synthetic oligonucleotide
acacugagauuauacuguc

SEQ ID NO: 301071 - RNA, 19 nt, Artificial Sequence
  Description of Artificial Sequence: Synthetic oligonucleotide
uaaauguaggguccccaca

SEQ ID NO: 301072 - RNA, 19 nt, Artificial Sequence
  Description of Artificial Sequence: Synthetic oligonucleotide
gaaugugacuaaguuuagg

SEQ ID NO: 301073 - RNA, 19 nt, Artificial Sequence
  Description of Artificial Sequence: Synthetic oligonucleotide
aauguggcuccccucauuu

SEQ ID NO: 301074 - RNA, 19 nt, Artificial Sequence
  Description of Artificial Sequence: Synthetic oligonucleotide
acucugucuacguuaagga

SEQ ID NO: 301075 - RNA, 19 nt, Artificial Sequence
  Description of Artificial Sequence: Synthetic oligonucleotide
aguauguugccuagguugg

SEQ ID NO: 301076 - RNA, 19 nt, Artificial Sequence
  Description of Artificial Sequence: Synthetic oligonucleotide
uuaagugcagagugcugag

SEQ ID NO: 301077 - RNA, 19 nt, Artificial Sequence
  Description of Artificial Sequence: Synthetic oligonucleotide
aaacuaauucucaauguua

SEQ ID NO: 301078 - RNA, 19 nt, Artificial Sequence
  Description of Artificial Sequence: Synthetic oligonucleotide
auaaauagacaaguuccug

SEQ ID NO: 301079 - RNA, 19 nt, Artificial Sequence
  Description of Artificial Sequence: Synthetic oligonucleotide
uaaaguccauucuuccuga

SEQ ID NO: 301080 - RNA, 19 nt, Artificial Sequence
  Description of Artificial Sequence: Synthetic oligonucleotide
cuagguuggugucugcccg

SEQ ID NO: 301081 - RNA, 19 nt, Artificial Sequence
  Description of Artificial Sequence: Synthetic oligonucleotide
caauaugaacaggucaggg

SEQ ID NO: 301082 - RNA, 19 nt, Artificial Sequence
  Description of Artificial Sequence: Synthetic oligonucleotide
aaaggcuuguuugugguau

SEQ ID NO: 301083 - RNA, 19 nt, Artificial Sequence
  Description of Artificial Sequence: Synthetic oligonucleotide
uuuaaauguagggucccca

SEQ ID NO: 301084 - RNA, 19 nt, Artificial Sequence
  Description of Artificial Sequence: Synthetic oligonucleotide
cuagugauucacacucagg

SEQ ID NO: 301085 - RNA, 19 nt, Artificial Sequence
  Description of Artificial Sequence: Synthetic oligonucleotide
ccaaguaucucucauaguc

SEQ ID NO: 301086 - RNA, 19 nt, Artificial Sequence
  Description of Artificial Sequence: Synthetic oligonucleotide
aauagacaaguuccugaaa

SEQ ID NO: 301087 - RNA, 19 nt, Artificial Sequence
  Description of Artificial Sequence: Synthetic oligonucleotide
guaaacuccuuuucagaug

SEQ ID NO: 301088 - RNA, 19 nt, Artificial Sequence
  Description of Artificial Sequence: Synthetic oligonucleotide
auagaaguucccauuaccu

SEQ ID NO: 301089 - RNA, 19 nt, Artificial Sequence
  Description of Artificial Sequence: Synthetic oligonucleotide
ucccauuaccuaaaaguuc

SEQ ID NO: 301090 - RNA, 19 nt, Artificial Sequence
  Description of Artificial Sequence: Synthetic oligonucleotide
uaacuaccaccuugggugg

SEQ ID NO: 301091 - RNA, 19 nt, Artificial Sequence
  Description of Artificial Sequence: Synthetic oligonucleotide
gcugcuauuacauuuggga

SEQ ID NO: 301092 - RNA, 19 nt, Artificial Sequence
  Description of Artificial Sequence: Synthetic oligonucleotide
gagauuauacugucugaca

SEQ ID NO: 301093 - RNA, 19 nt, Artificial Sequence
  Description of Artificial Sequence: Synthetic oligonucleotide
cuuaaucuuccucauagaa

SEQ ID NO: 301094 - RNA, 19 nt, Artificial Sequence
  Description of Artificial Sequence: Synthetic oligonucleotide
guuugugguauagaaauga

SEQ ID NO: 301095 - RNA, 19 nt, Artificial Sequence
  Description of Artificial Sequence: Synthetic oligonucleotide
uagacaaguuccugaaagu

SEQ ID NO: 301096 - RNA, 19 nt, Artificial Sequence
  Description of Artificial Sequence: Synthetic oligonucleotide
acguuuagaaggcaaucca

SEQ ID NO: 301097 - RNA, 19 nt, Artificial Sequence
  Description of Artificial Sequence: Synthetic oligonucleotide
agcuaaugagaccaaacua

SEQ ID NO: 301098 - RNA, 19 nt, Artificial Sequence
  Description of Artificial Sequence: Synthetic oligonucleotide
cugagcuagcuccuaaagc

SEQ ID NO: 301099 - RNA, 19 nt, Artificial Sequence
  Description of Artificial Sequence: Synthetic oligonucleotide
aaacuagagcucuggcacu

SEQ ID NO: 301100 - RNA, 19 nt, Artificial Sequence
  Description of Artificial Sequence: Synthetic oligonucleotide
ucuugugauugcuuuugga

SEQ ID NO: 301101 - RNA, 19 nt, Artificial Sequence
  Description of Artificial Sequence: Synthetic oligonucleotide
uucucaaucgucgccaagu

SEQ ID NO: 301102 - RNA, 19 nt, Artificial Sequence
  Description of Artificial Sequence: Synthetic oligonucleotide
ugcuuuuacucuuuuggua

SEQ ID NO: 301103 - RNA, 19 nt, Artificial Sequence
  Description of Artificial Sequence: Synthetic oligonucleotide
agugaagaggcugcuuuac

SEQ ID NO: 301104 - RNA, 19 nt, Artificial Sequence
  Description of Artificial Sequence: Synthetic oligonucleotide
uggcuguggguuuuaaaug

SEQ ID NO: 301105 - RNA, 19 nt, Artificial Sequence
  Description of Artificial Sequence: Synthetic oligonucleotide
aucgucgccaaguaucucu

SEQ ID NO: 301106 - RNA, 19 nt, Artificial Sequence
  Description of Artificial Sequence: Synthetic oligonucleotide
uggugcuuuagcagaaaac

SEQ ID NO: 301107 - RNA, 19 nt, Artificial Sequence
  Description of Artificial Sequence: Synthetic oligonucleotide
accucaguucacauuaaac

SEQ ID NO: 301108 - RNA, 19 nt, Artificial Sequence
  Description of Artificial Sequence: Synthetic oligonucleotide
uauuggguggaaucagaac

SEQ ID NO: 301109 - RNA, 19 nt, Artificial Sequence
  Description of Artificial Sequence: Synthetic oligonucleotide
acuauccaaucccggacag

SEQ ID NO: 301110 - RNA, 19 nt, Artificial Sequence
  Description of Artificial Sequence: Synthetic oligonucleotide
uucauggauuguuacacuu

SEQ ID NO: 301111 - RNA, 19 nt, Artificial Sequence
  Description of Artificial Sequence: Synthetic oligonucleotide
guacccaagagucugacua

SEQ ID NO: 301112 - RNA, 19 nt, Artificial Sequence
  Description of Artificial Sequence: Synthetic oligonucleotide
cacccuucucuuuaaauuc

SEQ ID NO: 301113 - RNA, 19 nt, Artificial Sequence
  Description of Artificial Sequence: Synthetic oligonucleotide
agcaguauguugccuaggu

SEQ ID NO: 301114 - RNA, 19 nt, Artificial Sequence
  Description of Artificial Sequence: Synthetic oligonucleotide
aaguacccaagagucugac

SEQ ID NO: 301115 - RNA, 19 nt, Artificial Sequence
  Description of Artificial Sequence: Synthetic oligonucleotide
cuucacuauccaaucccgg

SEQ ID NO: 301116 - RNA, 19 nt, Artificial Sequence
  Description of Artificial Sequence: Synthetic oligonucleotide
cagaacauucagcaguaug

SEQ ID NO: 301117 - RNA, 19 nt, Artificial Sequence
  Description of Artificial Sequence: Synthetic oligonucleotide
ucgggugcacggcauauug

SEQ ID NO: 301118 - RNA, 19 nt, Artificial Sequence
  Description of Artificial Sequence: Synthetic oligonucleotide
cuaaugagaccaaacuaga

SEQ ID NO: 301119 - RNA, 19 nt, Artificial Sequence
  Description of Artificial Sequence: Synthetic oligonucleotide
aacccaauaugaacagguc

SEQ ID NO: 301120 - RNA, 19 nt, Artificial Sequence
  Description of Artificial Sequence: Synthetic oligonucleotide
gugacuaaguuuagggugc

SEQ ID NO: 301121 - RNA, 19 nt, Artificial Sequence
  Description of Artificial Sequence: Synthetic oligonucleotide
ugggacuugaaaucuuuuc

SEQ ID NO: 301122 - RNA, 19 nt, Artificial Sequence
  Description of Artificial Sequence: Synthetic oligonucleotide
ugaaacgaaaauggugacu

SEQ ID NO: 301123 - RNA, 19 nt, Artificial Sequence
  Description of Artificial Sequence: Synthetic oligonucleotide
uagucuuagcagcaaacuu

SEQ ID NO: 301124 - RNA, 19 nt, Artificial Sequence
  Description of Artificial Sequence: Synthetic oligonucleotide
uuauuccauguguuaagaa

SEQ ID NO: 301125 - RNA, 19 nt, Artificial Sequence
  Description of Artificial Sequence: Synthetic oligonucleotide
aagguaguagggccauuca

SEQ ID NO: 301126 - RNA, 19 nt, Artificial Sequence
  Description of Artificial Sequence: Synthetic oligonucleotide
uuucauggauuguuacacu

SEQ ID NO: 301127 - RNA, 19 nt, Artificial Sequence
  Description of Artificial Sequence: Synthetic oligonucleotide
caaguuccugaaaguaccc

SEQ ID NO: 301128 - RNA, 19 nt, Artificial Sequence
  Description of Artificial Sequence: Synthetic oligonucleotide
acacaauaggcaaauuucu

SEQ ID NO: 301129 - RNA, 19 nt, Artificial Sequence
  Description of Artificial Sequence: Synthetic oligonucleotide
aggcaagcaauguggcaac

SEQ ID NO: 301130 - RNA, 19 nt, Artificial Sequence
  Description of Artificial Sequence: Synthetic oligonucleotide
ggaaacaauuuccugauua

SEQ ID NO: 301131 - RNA, 19 nt, Artificial Sequence
  Description of Artificial Sequence: Synthetic oligonucleotide
cugguccuaguguugaaug

SEQ ID NO: 301132 - RNA, 19 nt, Artificial Sequence
  Description of Artificial Sequence: Synthetic oligonucleotide
gguuuuaaauguagggucc

SEQ ID NO: 301133 - RNA, 19 nt, Artificial Sequence
  Description of Artificial Sequence: Synthetic oligonucleotide
acacacugaguucggucac

SEQ ID NO: 301134 - RNA, 19 nt, Artificial Sequence
  Description of Artificial Sequence: Synthetic oligonucleotide
cacggcuucacuuuuaucu

SEQ ID NO: 301135 - RNA, 19 nt, Artificial Sequence
  Description of Artificial Sequence: Synthetic oligonucleotide
gaccaaacuagagcucugg

SEQ ID NO: 301136 - RNA, 19 nt, Artificial Sequence
  Description of Artificial Sequence: Synthetic oligonucleotide
aaggcauggggagagugcu

SEQ ID NO: 301137 - RNA, 19 nt, Artificial Sequence
  Description of Artificial Sequence: Synthetic oligonucleotide
agcuccuaaagcauaaaga

SEQ ID NO: 301138 - RNA, 19 nt, Artificial Sequence
  Description of Artificial Sequence: Synthetic oligonucleotide
caguaacagagcagcaagc

SEQ ID NO: 301139 - RNA, 19 nt, Artificial Sequence
  Description of Artificial Sequence: Synthetic oligonucleotide
gcuuuuggagagcacgugg

SEQ ID NO: 301140 - RNA, 19 nt, Artificial Sequence
  Description of Artificial Sequence: Synthetic oligonucleotide
cauuucauggauuguuaca

SEQ ID NO: 301141 - RNA, 19 nt, Artificial Sequence
  Description of Artificial Sequence: Synthetic oligonucleotide
aacgaaaauggugacucuu

SEQ ID NO: 301142 - RNA, 19 nt, Artificial Sequence
  Description of Artificial Sequence: Synthetic oligonucleotide
ccaugaaacgaaaauggug

SEQ ID NO: 301143 - RNA, 19 nt, Artificial Sequence
  Description of Artificial Sequence: Synthetic oligonucleotide
ugauaggcacucccagagc

SEQ ID NO: 301144 - RNA, 19 nt, Artificial Sequence
  Description of Artificial Sequence: Synthetic oligonucleotide
gcuuuagcagaaaacagug

SEQ ID NO: 301145 - RNA, 19 nt, Artificial Sequence
  Description of Artificial Sequence: Synthetic oligonucleotide
cucugucuacguuaaggac

SEQ ID NO: 301146 - RNA, 19 nt, Artificial Sequence
  Description of Artificial Sequence: Synthetic oligonucleotide
augugcgaaaucaugagau

SEQ ID NO: 301147 - RNA, 19 nt, Artificial Sequence
  Description of Artificial Sequence: Synthetic oligonucleotide
uaauugugauagucuuagc

SEQ ID NO: 301148 - RNA, 19 nt, Artificial Sequence
  Description of Artificial Sequence: Synthetic oligonucleotide
augggcaugcggcuacacg

SEQ ID NO: 301149 - RNA, 19 nt, Artificial Sequence
  Description of Artificial Sequence: Synthetic oligonucleotide
cuccuaaagcauaaagaca

SEQ ID NO: 301150 - RNA, 19 nt, Artificial Sequence
  Description of Artificial Sequence: Synthetic oligonucleotide
ggaguagaaagcauccucc

SEQ ID NO: 301151 - RNA, 19 nt, Artificial Sequence
  Description of Artificial Sequence: Synthetic oligonucleotide
gugcgaaaucaugagauac

SEQ ID NO: 301152 - RNA, 19 nt, Artificial Sequence
  Description of Artificial Sequence: Synthetic oligonucleotide
cgucaggucacaaaguggg

SEQ ID NO: 301153 - RNA, 19 nt, Artificial Sequence
  Description of Artificial Sequence: Synthetic oligonucleotide
uguugccaugaaacgaaaa

SEQ ID NO: 301154 - RNA, 19 nt, Artificial Sequence
  Description of Artificial Sequence: Synthetic oligonucleotide
ggcaauccagucuacgacc

SEQ ID NO: 301155 - RNA, 19 nt, Artificial Sequence
  Description of Artificial Sequence: Synthetic oligonucleotide
gggugcacggcauauuggg

SEQ ID NO: 301156 - RNA, 19 nt, Artificial Sequence
  Description of Artificial Sequence: Synthetic oligonucleotide
uuccaauugaugcccuguc

SEQ ID NO: 301157 - RNA, 19 nt, Artificial Sequence
  Description of Artificial Sequence: Synthetic oligonucleotide
cacaucccuuuucagcacg

SEQ ID NO: 301158 - RNA, 19 nt, Artificial Sequence
  Description of Artificial Sequence: Synthetic oligonucleotide
aaccucaguucacauuaaa

SEQ ID NO: 301159 - RNA, 19 nt, Artificial Sequence
  Description of Artificial Sequence: Synthetic oligonucleotide
cuuuaccgaauaaacuaga

SEQ ID NO: 301160 - RNA, 19 nt, Artificial Sequence
  Description of Artificial Sequence: Synthetic oligonucleotide
acuccuuuucagauguguc

SEQ ID NO: 301161 - RNA, 19 nt, Artificial Sequence
  Description of Artificial Sequence: Synthetic oligonucleotide
acuaauucucaauguuaaa

SEQ ID NO: 301162 - RNA, 19 nt, Artificial Sequence
  Description of Artificial Sequence: Synthetic oligonucleotide
gcaaauuucuaacauguua

SEQ ID NO: 301163 - RNA, 19 nt, Artificial Sequence
  Description of Artificial Sequence: Synthetic oligonucleotide
agccaacugcuugugauag

SEQ ID NO: 301164 - RNA, 19 nt, Artificial Sequence
  Description of Artificial Sequence: Synthetic oligonucleotide
gggaauguuaggaaaagga

SEQ ID NO: 301165 - RNA, 19 nt, Artificial Sequence
  Description of Artificial Sequence: Synthetic oligonucleotide
cauaaauagacaaguuccu

SEQ ID NO: 301166 - RNA, 19 nt, Artificial Sequence
  Description of Artificial Sequence: Synthetic oligonucleotide
agugauucacacucagguu

SEQ ID NO: 301167 - RNA, 19 nt, Artificial Sequence
  Description of Artificial Sequence: Synthetic oligonucleotide
guguuaagaagucuuacau

SEQ ID NO: 301168 - RNA, 19 nt, Artificial Sequence
  Description of Artificial Sequence: Synthetic oligonucleotide
ggcaaacccaauaugaaca

SEQ ID NO: 301169 - RNA, 19 nt, Artificial Sequence
  Description of Artificial Sequence: Synthetic oligonucleotide
uggcaacauuccuugguca

SEQ ID NO: 301170 - RNA, 19 nt, Artificial Sequence
  Description of Artificial Sequence: Synthetic oligonucleotide
cugucugacaauucaagua

SEQ ID NO: 301171 - RNA, 19 nt, Artificial Sequence
  Description of Artificial Sequence: Synthetic oligonucleotide
gaaguuuaagccauggguu

SEQ ID NO: 301172 - RNA, 19 nt, Artificial Sequence
  Description of Artificial Sequence: Synthetic oligonucleotide
uccccuuuacaacucuguc

SEQ ID NO: 301173 - RNA, 19 nt, Artificial Sequence
  Description of Artificial Sequence: Synthetic oligonucleotide
ugugcgaaaucaugagaua

SEQ ID NO: 301174 - RNA, 19 nt, Artificial Sequence
  Description of Artificial Sequence: Synthetic oligonucleotide
gucuacguuaaggacaguc

SEQ ID NO: 301175 - RNA, 19 nt, Artificial Sequence
  Description of Artificial Sequence: Synthetic oligonucleotide
ucucaaucgucgccaagua

SEQ ID NO: 301176 - RNA, 19 nt, Artificial Sequence
  Description of Artificial Sequence: Synthetic oligonucleotide
cuuuagcagaaaacaguga

SEQ ID NO: 301177 - RNA, 19 nt, Artificial Sequence
  Description of Artificial Sequence: Synthetic oligonucleotide
ucuccccucccuguaauug

SEQ ID NO: 301178 - RNA, 19 nt, Artificial Sequence
  Description of Artificial Sequence: Synthetic oligonucleotide
ggaaugugcgaaaucauga

SEQ ID NO: 301179 - RNA, 19 nt, Artificial Sequence
  Description of Artificial Sequence: Synthetic oligonucleotide
guggcaacauuccuugguc

SEQ ID NO: 301180 - RNA, 19 nt, Artificial Sequence
  Description of Artificial Sequence: Synthetic oligonucleotide
auuccaauugaugcccugu

SEQ ID NO: 301181 - RNA, 19 nt, Artificial Sequence
  Description of Artificial Sequence: Synthetic oligonucleotide
cucccugugacagacuuuc

SEQ ID NO: 301182 - RNA, 19 nt, Artificial Sequence
  Description of Artificial Sequence: Synthetic oligonucleotide
uccuaguguugaaugguuu

SEQ ID NO: 301183 - RNA, 19 nt, Artificial Sequence
  Description of Artificial Sequence: Synthetic oligonucleotide
uacauccccuuuacaacuc

SEQ ID NO: 301184 - RNA, 19 nt, Artificial Sequence
  Description of Artificial Sequence: Synthetic oligonucleotide
ggcgucaggucacaaagug

SEQ ID NO: 301185 - RNA, 19 nt, Artificial Sequence
  Description of Artificial Sequence: Synthetic oligonucleotide
aaauguggcuccccucauu

SEQ ID NO: 301186 - RNA, 19 nt, Artificial Sequence
  Description of Artificial Sequence: Synthetic oligonucleotide
agaagucuuacauccccuu

SEQ ID NO: 301187 - RNA, 19 nt, Artificial Sequence
  Description of Artificial Sequence: Synthetic oligonucleotide
gcgaaaucaugagauacag

SEQ ID NO: 301188 - RNA, 19 nt, Artificial Sequence
  Description of Artificial Sequence: Synthetic oligonucleotide
gugcuucuaaaguccauuc

SEQ ID NO: 301189 - RNA, 19 nt, Artificial Sequence
  Description of Artificial Sequence: Synthetic oligonucleotide
aaucgucgccaaguaucuc

SEQ ID NO: 301190 - RNA, 19 nt, Artificial Sequence
  Description of Artificial Sequence: Synthetic oligonucleotide
cacacccugacaacaaaga

SEQ ID NO: 301191 - RNA, 19 nt, Artificial Sequence
  Description of Artificial Sequence: Synthetic oligonucleotide
guaguuuuguugaacuaaa

SEQ ID NO: 301192 - RNA, 19 nt, Artificial Sequence
  Description of Artificial Sequence: Synthetic oligonucleotide
acgguacuguucugaaaug

SEQ ID NO: 301193 - RNA, 19 nt, Artificial Sequence
  Description of Artificial Sequence: Synthetic oligonucleotide
cuuguguugugucugauuu

SEQ ID NO: 301194 - RNA, 19 nt, Artificial Sequence
  Description of Artificial Sequence: Synthetic oligonucleotide
cauuaccuaaaaguucuca

SEQ ID NO: 301195 - RNA, 19 nt, Artificial Sequence
  Description of Artificial Sequence: Synthetic oligonucleotide
aaaaugggcugggacguuu

SEQ ID NO: 301196 - RNA, 19 nt, Artificial Sequence
  Description of Artificial Sequence: Synthetic oligonucleotide
uccccucccuguaauugug

SEQ ID NO: 301197 - RNA, 19 nt, Artificial Sequence
  Description of Artificial Sequence: Synthetic oligonucleotide
cuagaaacuaauucucaau

SEQ ID NO: 301198 - RNA, 19 nt, Artificial Sequence
  Description of Artificial Sequence: Synthetic oligonucleotide
cauuccaauugaugcccug

SEQ ID NO: 301199 - RNA, 19 nt, Artificial Sequence
  Description of Artificial Sequence: Synthetic oligonucleotide
cugauugcugcuauuacau

SEQ ID NO: 301200 - RNA, 19 nt, Artificial Sequence
  Description of Artificial Sequence: Synthetic oligonucleotide
acuagaguuuccagggaga

SEQ ID NO: 301201 - RNA, 19 nt, Artificial Sequence
  Description of Artificial Sequence: Synthetic oligonucleotide
auguggcaacauuccuugg

SEQ ID NO: 301202 - RNA, 19 nt, Artificial Sequence
  Description of Artificial Sequence: Synthetic oligonucleotide
gcuucacuauccaaucccg

SEQ ID NO: 301203 - RNA, 19 nt, Artificial Sequence
  Description of Artificial Sequence: Synthetic oligonucleotide
acccgucuucacccgaauc

SEQ ID NO: 301204 - RNA, 19 nt, Artificial Sequence
  Description of Artificial Sequence: Synthetic oligonucleotide
gagcaguucaagccagcca

SEQ ID NO: 301205 - RNA, 19 nt, Artificial Sequence
  Description of Artificial Sequence: Synthetic oligonucleotide
uggggacacagacgaugag

SEQ ID NO: 301206 - RNA, 19 nt, Artificial Sequence
  Description of Artificial Sequence: Synthetic oligonucleotide
gcuagaaacuaauucucaa

SEQ ID NO: 301207 - RNA, 19 nt, Artificial Sequence
  Description of Artificial Sequence: Synthetic oligonucleotide
ggaagcuacacccacuacu

SEQ ID NO: 301208 - RNA, 19 nt, Artificial Sequence
  Description of Artificial Sequence: Synthetic oligonucleotide
ucgucgccaaguaucucuc

SEQ ID NO: 301209 - RNA, 19 nt, Artificial Sequence
  Description of Artificial Sequence: Synthetic oligonucleotide
acggcuucacuuuuaucuu

SEQ ID NO: 301210 - RNA, 19 nt, Artificial Sequence
  Description of Artificial Sequence: Synthetic oligonucleotide
ugcugagcuagcuccuaaa

SEQ ID NO: 301211 - RNA, 19 nt, Artificial Sequence
  Description of Artificial Sequence: Synthetic oligonucleotide
cugagcauacaagugugca

SEQ ID NO: 301212 - RNA, 19 nt, Artificial Sequence
  Description of Artificial Sequence: Synthetic oligonucleotide
gacuuucuagugauucaca

SEQ ID NO: 301213 - RNA, 19 nt, Artificial Sequence
  Description of Artificial Sequence: Synthetic oligonucleotide
cuuucuagugauucacacu

SEQ ID NO: 301214 - RNA, 19 nt, Artificial Sequence
  Description of Artificial Sequence: Synthetic oligonucleotide
cauccccuuuacaacucug

SEQ ID NO: 301215 - RNA, 19 nt, Artificial Sequence
  Description of Artificial Sequence: Synthetic oligonucleotide
cuacguuaaggacaguccu

SEQ ID NO: 301216 - RNA, 19 nt, Artificial Sequence
  Description of Artificial Sequence: Synthetic oligonucleotide
ugcggcuacacgguacugu

SEQ ID NO: 301217 - RNA, 19 nt, Artificial Sequence
  Description of Artificial Sequence: Synthetic oligonucleotide
cacgguacuguucugaaau

SEQ ID NO: 301218 - RNA, 19 nt, Artificial Sequence
  Description of Artificial Sequence: Synthetic oligonucleotide
cacuauccaaucccggaca

SEQ ID NO: 301219 - RNA, 19 nt, Artificial Sequence
  Description of Artificial Sequence: Synthetic oligonucleotide
accgaauaaacuagaguuu

SEQ ID NO: 301220 - RNA, 19 nt, Artificial Sequence
  Description of Artificial Sequence: Synthetic oligonucleotide
aaggcuuguuugugguaua

SEQ ID NO: 301221 - RNA, 19 nt, Artificial Sequence
  Description of Artificial Sequence: Synthetic oligonucleotide
agcaaacuuugcugggaau

SEQ ID NO: 301222 - RNA, 19 nt, Artificial Sequence
  Description of Artificial Sequence: Synthetic oligonucleotide
ccgaauaaacuagaguuuc

SEQ ID NO: 301223 - RNA, 19 nt, Artificial Sequence
  Description of Artificial Sequence: Synthetic oligonucleotide
guacuggacacagggccag

SEQ ID NO: 301224 - RNA, 19 nt, Artificial Sequence
  Description of Artificial Sequence: Synthetic oligonucleotide
aagcuacacccacuacuuu

SEQ ID NO: 301225 - RNA, 19 nt, Artificial Sequence
  Description of Artificial Sequence: Synthetic oligonucleotide
agcacggcuucacuuuuau

SEQ ID NO: 301226 - RNA, 19 nt, Artificial Sequence
  Description of Artificial Sequence: Synthetic oligonucleotide
gugguauagaaaugauaua

SEQ ID NO: 301227 - RNA, 19 nt, Artificial Sequence
  Description of Artificial Sequence: Synthetic oligonucleotide
ucgccaaguaucucucaua

SEQ ID NO: 301228 - RNA, 19 nt, Artificial Sequence
  Description of Artificial Sequence: Synthetic oligonucleotide
acaucccuuuucagcacgg

SEQ ID NO: 301229 - RNA, 19 nt, Artificial Sequence
  Description of Artificial Sequence: Synthetic oligonucleotide
uuuaagccauggguuggaa

SEQ ID NO: 301230 - RNA, 19 nt, Artificial Sequence
  Description of Artificial Sequence: Synthetic oligonucleotide
ccuagguuggugucugccc

SEQ ID NO: 301231 - RNA, 19 nt, Artificial Sequence
  Description of Artificial Sequence: Synthetic oligonucleotide
gcauauuggguggaaucag

SEQ ID NO: 301232 - RNA, 19 nt, Artificial Sequence
  Description of Artificial Sequence: Synthetic oligonucleotide
ggaaggcaagcaauguggc

SEQ ID NO: 301233 - RNA, 19 nt, Artificial Sequence
  Description of Artificial Sequence: Synthetic oligonucleotide
ggcauauuggguggaauca

SEQ ID NO: 301234 - RNA, 19 nt, Artificial Sequence
  Description of Artificial Sequence: Synthetic oligonucleotide
ccaauaugaacaggucagg

SEQ ID NO: 301235 - RNA, 19 nt, Artificial Sequence
  Description of Artificial Sequence: Synthetic oligonucleotide
ggauuguuacacuuccuua

SEQ ID NO: 301236 - RNA, 19 nt, Artificial Sequence
  Description of Artificial Sequence: Synthetic oligonucleotide
ucacccgucuucacccgaa

SEQ ID NO: 301237 - RNA, 19 nt, Artificial Sequence
  Description of Artificial Sequence: Synthetic oligonucleotide
gaagcuacacccacuacuu

SEQ ID NO: 301238 - RNA, 19 nt, Artificial Sequence
  Description of Artificial Sequence: Synthetic oligonucleotide
uugcuccuuguguuguguc

SEQ ID NO: 301239 - RNA, 19 nt, Artificial Sequence
  Description of Artificial Sequence: Synthetic oligonucleotide
auacaagugugcaccccug

SEQ ID NO: 301240 - RNA, 19 nt, Artificial Sequence
  Description of Artificial Sequence: Synthetic oligonucleotide
uguucgggugcacggcaua

SEQ ID NO: 301241 - RNA, 19 nt, Artificial Sequence
  Description of Artificial Sequence: Synthetic oligonucleotide
aaaugggcgucaggucaca

SEQ ID NO: 301242 - RNA, 19 nt, Artificial Sequence
  Description of Artificial Sequence: Synthetic oligonucleotide
cgccaaguaucucucauag

SEQ ID NO: 301243 - RNA, 19 nt, Artificial Sequence
  Description of Artificial Sequence: Synthetic oligonucleotide
cccgaaucagcaugguggc

SEQ ID NO: 301244 - RNA, 19 nt, Artificial Sequence
  Description of Artificial Sequence: Synthetic oligonucleotide
cccauuaccuaaaaguucu

SEQ ID NO: 301245 - RNA, 19 nt, Artificial Sequence
  Description of Artificial Sequence: Synthetic oligonucleotide
ggcuguggguuuuaaaugu

SEQ ID NO: 301246 - RNA, 19 nt, Artificial Sequence
  Description of Artificial Sequence: Synthetic oligonucleotide
cuacacgguacuguucuga

SEQ ID NO: 301247 - RNA, 19 nt, Artificial Sequence
  Description of Artificial Sequence: Synthetic oligonucleotide
caaucgucgccaaguaucu

SEQ ID NO: 301248 - RNA, 19 nt, Artificial Sequence
  Description of Artificial Sequence: Synthetic oligonucleotide
ggcuacacgguacuguucu

SEQ ID NO: 301249 - RNA, 19 nt, Artificial Sequence
  Description of Artificial Sequence: Synthetic oligonucleotide
gcugggacguuuagaaggc

SEQ ID NO: 301250 - RNA, 19 nt, Artificial Sequence
  Description of Artificial Sequence: Synthetic oligonucleotide
cggccaugagcacacaucc

SEQ ID NO: 301251 - RNA, 19 nt, Artificial Sequence
  Description of Artificial Sequence: Synthetic oligonucleotide
acgugguggcccugugcag

SEQ ID NO: 301252 - RNA, 19 nt, Artificial Sequence
  Description of Artificial Sequence: Synthetic oligonucleotide
gcgucaggucacaaagugg

SEQ ID NO: 301253 - RNA, 19 nt, Artificial Sequence
  Description of Artificial Sequence: Synthetic oligonucleotide
gucuuacauccccuuuaca

SEQ ID NO: 301254 - RNA, 19 nt, Artificial Sequence
  Description of Artificial Sequence: Synthetic oligonucleotide
cagcaguauguugccuagg

SEQ ID NO: 301255 - RNA, 19 nt, Artificial Sequence
  Description of Artificial Sequence: Synthetic oligonucleotide
agaccaaacuagagcucug

SEQ ID NO: 301256 - RNA, 19 nt, Artificial Sequence
  Description of Artificial Sequence: Synthetic oligonucleotide
gccaugagcacacaucccu

SEQ ID NO: 301257 - RNA, 19 nt, Artificial Sequence
  Description of Artificial Sequence: Synthetic oligonucleotide
ugcuugugauaggcacucc

SEQ ID NO: 301258 - RNA, 19 nt, Artificial Sequence
  Description of Artificial Sequence: Synthetic oligonucleotide
aaugggcgucaggucacaa

SEQ ID NO: 301259 - RNA, 19 nt, Artificial Sequence
  Description of Artificial Sequence: Synthetic oligonucleotide
accaagguaguagggccau

SEQ ID NO: 301260 - RNA, 19 nt, Artificial Sequence
  Description of Artificial Sequence: Synthetic oligonucleotide
gguuggaaccagcuacuaa

SEQ ID NO: 301261 - RNA, 19 nt, Artificial Sequence
  Description of Artificial Sequence: Synthetic oligonucleotide
ggcauggggagagugcuca

SEQ ID NO: 301262 - RNA, 19 nt, Artificial Sequence
  Description of Artificial Sequence: Synthetic oligonucleotide
uaaaaugggcugggacguu

SEQ ID NO: 301263 - RNA, 19 nt, Artificial Sequence
  Description of Artificial Sequence: Synthetic oligonucleotide
gccagcaguaacagagcag

SEQ ID NO: 301264 - RNA, 19 nt, Artificial Sequence
  Description of Artificial Sequence: Synthetic oligonucleotide
cacucccagagcaaacugu

SEQ ID NO: 301265 - RNA, 19 nt, Artificial Sequence
  Description of Artificial Sequence: Synthetic oligonucleotide
uggcuccccucauuucauc

SEQ ID NO: 301266 - RNA, 19 nt, Artificial Sequence
  Description of Artificial Sequence: Synthetic oligonucleotide
ucaugggcaugcggcuaca

SEQ ID NO: 301267 - RNA, 19 nt, Artificial Sequence
  Description of Artificial Sequence: Synthetic oligonucleotide
acggcauauuggguggaau

SEQ ID NO: 301268 - RNA, 19 nt, Artificial Sequence
  Description of Artificial Sequence: Synthetic oligonucleotide
gaguucggucacaucccuc

SEQ ID NO: 301269 - RNA, 19 nt, Artificial Sequence
  Description of Artificial Sequence: Synthetic oligonucleotide
gucgccaaguaucucucau

SEQ ID NO: 301270 - RNA, 19 nt, Artificial Sequence
  Description of Artificial Sequence: Synthetic oligonucleotide
caugcggcuacacgguacu

SEQ ID NO: 301271 - RNA, 19 nt, Artificial Sequence
  Description of Artificial Sequence: Synthetic oligonucleotide
gggagaacagagcccucca

SEQ ID NO: 301272 - RNA, 19 nt, Artificial Sequence
  Description of Artificial Sequence: Synthetic oligonucleotide
caccauaaauagacaaguu

SEQ ID NO: 301273 - RNA, 19 nt, Artificial Sequence
  Description of Artificial Sequence: Synthetic oligonucleotide
cacugagauuauacugucu

SEQ ID NO: 301274 - RNA, 19 nt, Artificial Sequence
  Description of Artificial Sequence: Synthetic oligonucleotide
cggcauauuggguggaauc

SEQ ID NO: 301275 - RNA, 19 nt, Artificial Sequence
  Description of Artificial Sequence: Synthetic oligonucleotide
gcuauuacauuugggacuu

SEQ ID NO: 301276 - RNA, 19 nt, Artificial Sequence
  Description of Artificial Sequence: Synthetic oligonucleotide
gcuacacgguacuguucug

SEQ ID NO: 301277 - RNA, 19 nt, Artificial Sequence
  Description of Artificial Sequence: Synthetic oligonucleotide
cccaagagucugacuaguc

SEQ ID NO: 301278 - RNA, 19 nt, Artificial Sequence
  Description of Artificial Sequence: Synthetic oligonucleotide
uggccgggacugugggcug

SEQ ID NO: 301279 - RNA, 19 nt, Artificial Sequence
  Description of Artificial Sequence: Synthetic oligonucleotide
cagagcuaaugagaccaaa

SEQ ID NO: 301280 - RNA, 19 nt, Artificial Sequence
  Description of Artificial Sequence: Synthetic oligonucleotide
uucgggugcacggcauauu

SEQ ID NO: 301281 - RNA, 19 nt, Artificial Sequence
  Description of Artificial Sequence: Synthetic oligonucleotide
gacugggaaugugcgaaau

SEQ ID NO: 301282 - RNA, 19 nt, Artificial Sequence
  Description of Artificial Sequence: Synthetic oligonucleotide
cacacugaguucggucaca

SEQ ID NO: 301283 - RNA, 19 nt, Artificial Sequence
  Description of Artificial Sequence: Synthetic oligonucleotide
gcacgugguggcccugugc

SEQ ID NO: 301284 - RNA, 19 nt, Artificial Sequence
  Description of Artificial Sequence: Synthetic oligonucleotide
caaucccggacagagcagu

SEQ ID NO: 301285 - RNA, 19 nt, Artificial Sequence
  Description of Artificial Sequence: Synthetic oligonucleotide
cucaaucgucgccaaguau

SEQ ID NO: 301286 - RNA, 19 nt, Artificial Sequence
  Description of Artificial Sequence: Synthetic oligonucleotide
cagagcguggggcuagacu

SEQ ID NO: 301287 - RNA, 19 nt, Artificial Sequence
  Description of Artificial Sequence: Synthetic oligonucleotide
cucacccgucuucacccga

SEQ ID NO: 301288 - RNA, 19 nt, Artificial Sequence
  Description of Artificial Sequence: Synthetic oligonucleotide
cuccccucccuguaauugu

SEQ ID NO: 301289 - RNA, 19 nt, Artificial Sequence
  Description of Artificial Sequence: Synthetic oligonucleotide
ccucacccgucuucacccg

SEQ ID NO: 301290 - RNA, 19 nt, Artificial Sequence
  Description of Artificial Sequence: Synthetic oligonucleotide
cgggugcacggcauauugg

SEQ ID NO: 301291 - RNA, 19 nt, Artificial Sequence
  Description of Artificial Sequence: Synthetic oligonucleotide
cguuaaggacaguccucag

SEQ ID NO: 301292 - RNA, 19 nt, Artificial Sequence
  Description of Artificial Sequence: Synthetic oligonucleotide
gcaugcggcuacacgguac

SEQ ID NO: 301293 - RNA, 19 nt, Artificial Sequence
  Description of Artificial Sequence: Synthetic oligonucleotide
augcggcuacacgguacug

SEQ ID NO: 301294 - RNA, 19 nt, Artificial Sequence
  Description of Artificial Sequence: Synthetic oligonucleotide
ggcuccccucauuucaucu

SEQ ID NO: 301295 - RNA, 19 nt, Artificial Sequence
  Description of Artificial Sequence: Synthetic oligonucleotide
cccugacaacaaagaacac

SEQ ID NO: 301296 - RNA, 19 nt, Artificial Sequence
  Description of Artificial Sequence: Synthetic oligonucleotide
ugucuacguuaaggacagu

SEQ ID NO: 301297 - RNA, 19 nt, Artificial Sequence
  Description of Artificial Sequence: Synthetic oligonucleotide
gcaguucaagccagccaac

SEQ ID NO: 301298 - RNA, 19 nt, Artificial Sequence
  Description of Artificial Sequence: Synthetic oligonucleotide
gcaauccagucuacgaccu

SEQ ID NO: 301299 - RNA, 19 nt, Artificial Sequence
  Description of Artificial Sequence: Synthetic oligonucleotide
ccgcaccaagagcugaguc

SEQ ID NO: 301300 - RNA, 19 nt, Artificial Sequence
  Description of Artificial Sequence: Synthetic oligonucleotide
guccuaguguugaaugguu

SEQ ID NO: 301301 - RNA, 19 nt, Artificial Sequence
  Description of Artificial Sequence: Synthetic oligonucleotide
ccuguucgggugcacggca

SEQ ID NO: 301302 - RNA, 19 nt, Artificial Sequence
  Description of Artificial Sequence: Synthetic oligonucleotide
gcacggcuucacuuuuauc

SEQ ID NO: 301303 - RNA, 19 nt, Artificial Sequence
  Description of Artificial Sequence: Synthetic oligonucleotide
cccuguucgggugcacggc

SEQ ID NO: 301304 - RNA, 19 nt, Artificial Sequence
  Description of Artificial Sequence: Synthetic oligonucleotide
gggacguuuagaaggcaau

SEQ ID NO: 301305 - RNA, 19 nt, Artificial Sequence
  Description of Artificial Sequence: Synthetic oligonucleotide
guucgggugcacggcauau

SEQ ID NO: 301306 - RNA, 19 nt, Artificial Sequence
  Description of Artificial Sequence: Synthetic oligonucleotide
cagcacggcuucacuuuua

SEQ ID NO: 301307 - RNA, 19 nt, Artificial Sequence
  Description of Artificial Sequence: Synthetic oligonucleotide
cacggcauauuggguggaa

SEQ ID NO: 301308 - RNA, 19 nt, Artificial Sequence
  Description of Artificial Sequence: Synthetic oligonucleotide
gcaguauguugccuagguu

SEQ ID NO: 301309 - RNA, 19 nt, Artificial Sequence
  Description of Artificial Sequence: Synthetic oligonucleotide
ggcaugcggcuacacggua

SEQ ID NO: 301310 - RNA, 19 nt, Artificial Sequence
  Description of Artificial Sequence: Synthetic oligonucleotide
ccucccuguaauugugaua

SEQ ID NO: 301311 - RNA, 19 nt, Artificial Sequence
  Description of Artificial Sequence: Synthetic oligonucleotide
cuguucgggugcacggcau

SEQ ID NO: 301312 - RNA, 19 nt, Artificial Sequence
  Description of Artificial Sequence: Synthetic oligonucleotide
ggacagcugauugcugcua

SEQ ID NO: 301313 - RNA, 19 nt, Artificial Sequence
  Description of Artificial Sequence: Synthetic oligonucleotide
gcggcuacacgguacuguu

SEQ ID NO: 301314 - RNA, 19 nt, Artificial Sequence
  Description of Artificial Sequence: Synthetic oligonucleotide
ccagagcuaaugagaccaa

SEQ ID NO: 301315 - RNA, 19 nt, Artificial Sequence
  Description of Artificial Sequence: Synthetic oligonucleotide
cacugacccugagccuuca

SEQ ID NO: 301316 - RNA, 19 nt, Artificial Sequence
  Description of Artificial Sequence: Synthetic oligonucleotide
ccccucccuguaauuguga

SEQ ID NO: 301317 - RNA, 19 nt, Artificial Sequence
  Description of Artificial Sequence: Synthetic oligonucleotide
cggcuacacgguacuguuc

SEQ ID NO: 301318 - RNA, 19 nt, Artificial Sequence
  Description of Artificial Sequence: Synthetic oligonucleotide
gggcaugcggcuacacggu

SEQ ID NO: 301319 - RNA, 19 nt, Artificial Sequence
  Description of Artificial Sequence: Synthetic oligonucleotide
gcacggcauauugggugga

SEQ ID NO: 301320 - RNA, 19 nt, Artificial Sequence
  Description of Artificial Sequence: Synthetic oligonucleotide
gggcacugacccugagccu

SEQ ID NO: 301321 - RNA, 19 nt, Artificial Sequence
  Description of Artificial Sequence: Synthetic oligonucleotide
caacggccaugagcacaca

SEQ ID NO: 301322 - RNA, 19 nt, Artificial Sequence
  Description of Artificial Sequence: Synthetic oligonucleotide
cugugcccguagggcucac

SEQ ID NO: 301323 - RNA, 19 nt, Artificial Sequence
  Description of Artificial Sequence: Synthetic oligonucleotide
cccggacagagcaguucaa

SEQ ID NO: 301324 - RNA, 19 nt, Artificial Sequence
  Description of Artificial Sequence: Synthetic oligonucleotide
cacccgucuucacccgaau

SEQ ID NO: 301325 - RNA, 19 nt, Artificial Sequence
  Description of Artificial Sequence: Synthetic oligonucleotide
gcguggggcuagacuggga

SEQ ID NO: 301326 - RNA, 19 nt, Artificial Sequence
  Description of Artificial Sequence: Synthetic oligonucleotide
ccucccugugacagacuuu

SEQ ID NO: 301327 - RNA, 19 nt, Artificial Sequence
  Description of Artificial Sequence: Synthetic oligonucleotide
cccgcaccaagagcugagu

SEQ ID NO: 301328 - RNA, 19 nt, Artificial Sequence
  Description of Artificial Sequence: Synthetic oligonucleotide
ccaagguaguagggccauu

SEQ ID NO: 301329 - RNA, 19 nt, Artificial Sequence
  Description of Artificial Sequence: Synthetic oligonucleotide
caaacuagcaccauuaacc

SEQ ID NO: 301330 - RNA, 19 nt, Artificial Sequence
  Description of Artificial Sequence: Synthetic oligonucleotide
uaacuauccaguaacaaag

SEQ ID NO: 301331 - RNA, 19 nt, Artificial Sequence
  Description of Artificial Sequence: Synthetic oligonucleotide
ugaguacugaaucugaugc

SEQ ID NO: 301332 - RNA, 19 nt, Artificial Sequence
  Description of Artificial Sequence: Synthetic oligonucleotide
cuuauaaugauguggggcg

SEQ ID NO: 301333 - RNA, 19 nt, Artificial Sequence
  Description of Artificial Sequence: Synthetic oligonucleotide
aaacauaucccuuuugaca

SEQ ID NO: 301334 - RNA, 19 nt, Artificial Sequence
  Description of Artificial Sequence: Synthetic oligonucleotide
gacuauagcagacaaauac

SEQ ID NO: 301335 - RNA, 19 nt, Artificial Sequence
  Description of Artificial Sequence: Synthetic oligonucleotide
aaucaauuggaauuuggca

SEQ ID NO: 301336 - RNA, 19 nt, Artificial Sequence
  Description of Artificial Sequence: Synthetic oligonucleotide
auugugaucauuuccuagg

SEQ ID NO: 301337 - RNA, 19 nt, Artificial Sequence
  Description of Artificial Sequence: Synthetic oligonucleotide
aucaaguauuucuacaggg

SEQ ID NO: 301338 - RNA, 19 nt, Artificial Sequence
  Description of Artificial Sequence: Synthetic oligonucleotide
uucuaaacugcauauagcu

SEQ ID NO: 301339 - RNA, 19 nt, Artificial Sequence
  Description of Artificial Sequence: Synthetic oligonucleotide
aauggcauacaguggguac

SEQ ID NO: 301340 - RNA, 19 nt, Artificial Sequence
  Description of Artificial Sequence: Synthetic oligonucleotide
aagggaaugagucauuagu

SEQ ID NO: 301341 - RNA, 19 nt, Artificial Sequence
  Description of Artificial Sequence: Synthetic oligonucleotide
ugagcaucaaguauuguga

SEQ ID NO: 301342 - RNA, 19 nt, Artificial Sequence
  Description of Artificial Sequence: Synthetic oligonucleotide
ucauaaaccgggucuaccg

SEQ ID NO: 301343 - RNA, 19 nt, Artificial Sequence
  Description of Artificial Sequence: Synthetic oligonucleotide
ugauaauguaccuuuuccc

SEQ ID NO: 301344 - RNA, 19 nt, Artificial Sequence
  Description of Artificial Sequence: Synthetic oligonucleotide
aaccccguuauaaagaauc

SEQ ID NO: 301345 - RNA, 19 nt, Artificial Sequence
  Description of Artificial Sequence: Synthetic oligonucleotide
uuaacuauccaguaacaaa

SEQ ID NO: 301346 - RNA, 19 nt, Artificial Sequence
  Description of Artificial Sequence: Synthetic oligonucleotide
aucaauuggaauuuggcau

SEQ ID NO: 301347 - RNA, 19 nt, Artificial Sequence
  Description of Artificial Sequence: Synthetic oligonucleotide
gaaccagcuauuuuguacc

SEQ ID NO: 301348 - RNA, 19 nt, Artificial Sequence
  Description of Artificial Sequence: Synthetic oligonucleotide
uccauuagaacuccauacc

SEQ ID NO: 301349 - RNA, 19 nt, Artificial Sequence
  Description of Artificial Sequence: Synthetic oligonucleotide
auaccuaaaacacacuuaa

SEQ ID NO: 301350 - RNA, 19 nt, Artificial Sequence
  Description of Artificial Sequence: Synthetic oligonucleotide
uuuuacggucugcagagcc

SEQ ID NO: 301351 - RNA, 19 nt, Artificial Sequence
  Description of Artificial Sequence: Synthetic oligonucleotide
cuuuugacggucuugccag

SEQ ID NO: 301352 - RNA, 19 nt, Artificial Sequence
  Description of Artificial Sequence: Synthetic oligonucleotide
uuuguuaccacaucagaua

SEQ ID NO: 301353 - RNA, 19 nt, Artificial Sequence
  Description of Artificial Sequence: Synthetic oligonucleotide
acuagcaccauuaaccuag

SEQ ID NO: 301354 - RNA, 19 nt, Artificial Sequence
  Description of Artificial Sequence: Synthetic oligonucleotide
gaagccaauagacuauagc

SEQ ID NO: 301355 - RNA, 19 nt, Artificial Sequence
  Description of Artificial Sequence: Synthetic oligonucleotide
aauugcgccugauauagaa

SEQ ID NO: 301356 - RNA, 19 nt, Artificial Sequence
  Description of Artificial Sequence: Synthetic oligonucleotide
ugaaccagcuauuuuguac

SEQ ID NO: 301357 - RNA, 19 nt, Artificial Sequence
  Description of Artificial Sequence: Synthetic oligonucleotide
aaauacuaaauggaauaca

SEQ ID NO: 301358 - RNA, 19 nt, Artificial Sequence
  Description of Artificial Sequence: Synthetic oligonucleotide
auagcagacaaauaccuaa

SEQ ID NO: 301359 - RNA, 19 nt, Artificial Sequence
  Description of Artificial Sequence: Synthetic oligonucleotide
agaccuuuuaggugugacc

SEQ ID NO: 301360 - RNA, 19 nt, Artificial Sequence
  Description of Artificial Sequence: Synthetic oligonucleotide
aaagggaaugagucauuag

SEQ ID NO: 301361 - RNA, 19 nt, Artificial Sequence
  Description of Artificial Sequence: Synthetic oligonucleotide
ugcaccagagcacagcuga

SEQ ID NO: 301362 - RNA, 19 nt, Artificial Sequence
  Description of Artificial Sequence: Synthetic oligonucleotide
gaacacaugaaccgagacc

SEQ ID NO: 301363 - RNA, 19 nt, Artificial Sequence
  Description of Artificial Sequence: Synthetic oligonucleotide
aaaucauggcagaaagagg

SEQ ID NO: 301364 - RNA, 19 nt, Artificial Sequence
  Description of Artificial Sequence: Synthetic oligonucleotide
aacacaucuaaaacugguc

SEQ ID NO: 301365 - RNA, 19 nt, Artificial Sequence
  Description of Artificial Sequence: Synthetic oligonucleotide
gaccuuuuaggugugaccc

SEQ ID NO: 301366 - RNA, 19 nt, Artificial Sequence
  Description of Artificial Sequence: Synthetic oligonucleotide
uuaguuguaauugcgccug

SEQ ID NO: 301367 - RNA, 19 nt, Artificial Sequence
  Description of Artificial Sequence: Synthetic oligonucleotide
ugcagucgauuucuggucg

SEQ ID NO: 301368 - RNA, 19 nt, Artificial Sequence
  Description of Artificial Sequence: Synthetic oligonucleotide
uaaaccgggucuaccgucg

SEQ ID NO: 301369 - RNA, 19 nt, Artificial Sequence
  Description of Artificial Sequence: Synthetic oligonucleotide
uagcgaauacccaaaguac

SEQ ID NO: 301370 - RNA, 19 nt, Artificial Sequence
  Description of Artificial Sequence: Synthetic oligonucleotide
aacccguccacuucagcuc

SEQ ID NO: 301371 - RNA, 19 nt, Artificial Sequence
  Description of Artificial Sequence: Synthetic oligonucleotide
auacaguggguaccugucc

SEQ ID NO: 301372 - RNA, 19 nt, Artificial Sequence
  Description of Artificial Sequence: Synthetic oligonucleotide
uugaguacugaaucugaug

SEQ ID NO: 301373 - RNA, 19 nt, Artificial Sequence
  Description of Artificial Sequence: Synthetic oligonucleotide
uaugaagccaauagacuau

SEQ ID NO: 301374 - RNA, 19 nt, Artificial Sequence
  Description of Artificial Sequence: Synthetic oligonucleotide
auaaaccgggucuaccguc

SEQ ID NO: 301375 - RNA, 19 nt, Artificial Sequence
  Description of Artificial Sequence: Synthetic oligonucleotide
gaagcgauugcgguaaagc

SEQ ID NO: 301376 - RNA, 19 nt, Artificial Sequence
  Description of Artificial Sequence: Synthetic oligonucleotide
uuauuaucuguucuacuuu

SEQ ID NO: 301377 - RNA, 19 nt, Artificial Sequence
  Description of Artificial Sequence: Synthetic oligonucleotide
auuggaauuuggcauuuga

SEQ ID NO: 301378 - RNA, 19 nt, Artificial Sequence
  Description of Artificial Sequence: Synthetic oligonucleotide
acggacgcuacccaaggac

SEQ ID NO: 301379 - RNA, 19 nt, Artificial Sequence
  Description of Artificial Sequence: Synthetic oligonucleotide
ucuacggacgcuacccaag

SEQ ID NO: 301380 - RNA, 19 nt, Artificial Sequence
  Description of Artificial Sequence: Synthetic oligonucleotide
uaaagaauccggacggaau

SEQ ID NO: 301381 - RNA, 19 nt, Artificial Sequence
  Description of Artificial Sequence: Synthetic oligonucleotide
guagcgaauacccaaagua

SEQ ID NO: 301382 - RNA, 19 nt, Artificial Sequence
  Description of Artificial Sequence: Synthetic oligonucleotide
aguuuguuaccacaucaga

SEQ ID NO: 301383 - RNA, 19 nt, Artificial Sequence
  Description of Artificial Sequence: Synthetic oligonucleotide
aacgcagccugugagccac

SEQ ID NO: 301384 - RNA, 19 nt, Artificial Sequence
  Description of Artificial Sequence: Synthetic oligonucleotide
uuaaagaucaggggucagc

SEQ ID NO: 301385 - RNA, 19 nt, Artificial Sequence
  Description of Artificial Sequence: Synthetic oligonucleotide
acauuguggcaaaaguggc

SEQ ID NO: 301386 - RNA, 19 nt, Artificial Sequence
  Description of Artificial Sequence: Synthetic oligonucleotide
agcaucaaguauugugauc

SEQ ID NO: 301387 - RNA, 19 nt, Artificial Sequence
  Description of Artificial Sequence: Synthetic oligonucleotide
uguuuugggaauggcauac

SEQ ID NO: 301388 - RNA, 19 nt, Artificial Sequence
  Description of Artificial Sequence: Synthetic oligonucleotide
ugcaacuauagcaggcugu

SEQ ID NO: 301389 - RNA, 19 nt, Artificial Sequence
  Description of Artificial Sequence: Synthetic oligonucleotide
uugcgccugauauagaaaa

SEQ ID NO: 301390 - RNA, 19 nt, Artificial Sequence
  Description of Artificial Sequence: Synthetic oligonucleotide
guuucuacggacgcuaccc

SEQ ID NO: 301391 - RNA, 19 nt, Artificial Sequence
  Description of Artificial Sequence: Synthetic oligonucleotide
cuaaucugcauccauuaga

SEQ ID NO: 301392 - RNA, 19 nt, Artificial Sequence
  Description of Artificial Sequence: Synthetic oligonucleotide
aucccuuuugacaaagcgg

SEQ ID NO: 301393 - RNA, 19 nt, Artificial Sequence
  Description of Artificial Sequence: Synthetic oligonucleotide
cccguuauaaagaauccgg

SEQ ID NO: 301394 - RNA, 19 nt, Artificial Sequence
  Description of Artificial Sequence: Synthetic oligonucleotide
acccaauguuuauuucccc

SEQ ID NO: 301395 - RNA, 19 nt, Artificial Sequence
  Description of Artificial Sequence: Synthetic oligonucleotide
uguaccuuuucccucccuc

SEQ ID NO: 301396 - RNA, 19 nt, Artificial Sequence
  Description of Artificial Sequence: Synthetic oligonucleotide
ugugcucggcuacacucgg

SEQ ID NO: 301397 - RNA, 19 nt, Artificial Sequence
  Description of Artificial Sequence: Synthetic oligonucleotide
accaagaagcgauugcggu

SEQ ID NO: 301398 - RNA, 19 nt, Artificial Sequence
  Description of Artificial Sequence: Synthetic oligonucleotide
ucugacccaauguuuauuu

SEQ ID NO: 301399 - RNA, 19 nt, Artificial Sequence
  Description of Artificial Sequence: Synthetic oligonucleotide
uguaauugcgccugauaua

SEQ ID NO: 301400 - RNA, 19 nt, Artificial Sequence
  Description of Artificial Sequence: Synthetic oligonucleotide
cuaaacugcauauagcuau

SEQ ID NO: 301401 - RNA, 19 nt, Artificial Sequence
  Description of Artificial Sequence: Synthetic oligonucleotide
gacccaauguuuauuuccc

SEQ ID NO: 301402 - RNA, 19 nt, Artificial Sequence
  Description of Artificial Sequence: Synthetic oligonucleotide
uguuucuacggacgcuacc

SEQ ID NO: 301403 - RNA, 19 nt, Artificial Sequence
  Description of Artificial Sequence: Synthetic oligonucleotide
gcuuaguuguaauugcgcc

SEQ ID NO: 301404 - RNA, 19 nt, Artificial Sequence
  Description of Artificial Sequence: Synthetic oligonucleotide
uacacucggaauguugcag

SEQ ID NO: 301405 - RNA, 19 nt, Artificial Sequence
  Description of Artificial Sequence: Synthetic oligonucleotide
uacuguuaugugcuuccug

SEQ ID NO: 301406 - RNA, 19 nt, Artificial Sequence
  Description of Artificial Sequence: Synthetic oligonucleotide
aauccggacggaauguuca

SEQ ID NO: 301407 - RNA, 19 nt, Artificial Sequence
  Description of Artificial Sequence: Synthetic oligonucleotide
acuagagugcagucgauuu

SEQ ID NO: 301408 - RNA, 19 nt, Artificial Sequence
  Description of Artificial Sequence: Synthetic oligonucleotide
cucggcuacacucggaaug

SEQ ID NO: 301409 - RNA, 19 nt, Artificial Sequence
  Description of Artificial Sequence: Synthetic oligonucleotide
gaccaaguucucaagagga

SEQ ID NO: 301410 - RNA, 19 nt, Artificial Sequence
  Description of Artificial Sequence: Synthetic oligonucleotide
uagagugcagucgauuucu

SEQ ID NO: 301411 - RNA, 19 nt, Artificial Sequence
  Description of Artificial Sequence: Synthetic oligonucleotide
cagauauagacccaguucu

SEQ ID NO: 301412 - RNA, 19 nt, Artificial Sequence
  Description of Artificial Sequence: Synthetic oligonucleotide
aguagcgaauacccaaagu

SEQ ID NO: 301413 - RNA, 19 nt, Artificial Sequence
  Description of Artificial Sequence: Synthetic oligonucleotide
uucauaaaccgggucuacc

SEQ ID NO: 301414 - RNA, 19 nt, Artificial Sequence
  Description of Artificial Sequence: Synthetic oligonucleotide
ccagcuuauaaugaugugg

SEQ ID NO: 301415 - RNA, 19 nt, Artificial Sequence
  Description of Artificial Sequence: Synthetic oligonucleotide
ucggaauguugcaguacag

SEQ ID NO: 301416 - RNA, 19 nt, Artificial Sequence
  Description of Artificial Sequence: Synthetic oligonucleotide
uauaaugauguggggcgug

SEQ ID NO: 301417 - RNA, 19 nt, Artificial Sequence
  Description of Artificial Sequence: Synthetic oligonucleotide
gacuaacgaaagcuuccag

SEQ ID NO: 301418 - RNA, 19 nt, Artificial Sequence
  Description of Artificial Sequence: Synthetic oligonucleotide
gcaucaaguauugugauca

SEQ ID NO: 301419 - RNA, 19 nt, Artificial Sequence
  Description of Artificial Sequence: Synthetic oligonucleotide
gucgugagcagaguagagg

SEQ ID NO: 301420 - RNA, 19 nt, Artificial Sequence
  Description of Artificial Sequence: Synthetic oligonucleotide
ugugcauggaccaggucuu

SEQ ID NO: 301421 - RNA, 19 nt, Artificial Sequence
  Description of Artificial Sequence: Synthetic oligonucleotide
gauugaguacugaaucuga

SEQ ID NO: 301422 - RNA, 19 nt, Artificial Sequence
  Description of Artificial Sequence: Synthetic oligonucleotide
ggcgaaugaacacaugaac

SEQ ID NO: 301423 - RNA, 19 nt, Artificial Sequence
  Description of Artificial Sequence: Synthetic oligonucleotide
uuucuacggacgcuaccca

SEQ ID NO: 301424 - RNA, 19 nt, Artificial Sequence
  Description of Artificial Sequence: Synthetic oligonucleotide
aaaccgggucuaccgucgg

SEQ ID NO: 301425 - RNA, 19 nt, Artificial Sequence
  Description of Artificial Sequence: Synthetic oligonucleotide
gcgaaugaacacaugaacc

SEQ ID NO: 301426 - RNA, 19 nt, Artificial Sequence
  Description of Artificial Sequence: Synthetic oligonucleotide
ugacuaacgaaagcuucca

SEQ ID NO: 301427 - RNA, 19 nt, Artificial Sequence
  Description of Artificial Sequence: Synthetic oligonucleotide
caguuuaggccccuucccc

SEQ ID NO: 301428 - RNA, 19 nt, Artificial Sequence
  Description of Artificial Sequence: Synthetic oligonucleotide
aaagcggaccaaguucuca

SEQ ID NO: 301429 - RNA, 19 nt, Artificial Sequence
  Description of Artificial Sequence: Synthetic oligonucleotide
ccagcuuagggugauaagg

SEQ ID NO: 301430 - RNA, 19 nt, Artificial Sequence
  Description of Artificial Sequence: Synthetic oligonucleotide
gacgucgugagcagaguag

SEQ ID NO: 301431 - RNA, 19 nt, Artificial Sequence
  Description of Artificial Sequence: Synthetic oligonucleotide
agcgaauacccaaaguaca

SEQ ID NO: 301432 - RNA, 19 nt, Artificial Sequence
  Description of Artificial Sequence: Synthetic oligonucleotide
cuacggacgcuacccaagg

SEQ ID NO: 301433 - RNA, 19 nt, Artificial Sequence
  Description of Artificial Sequence: Synthetic oligonucleotide
auuuaacuauccaguaaca

SEQ ID NO: 301434 - RNA, 19 nt, Artificial Sequence
  Description of Artificial Sequence: Synthetic oligonucleotide
uuuaggugugacccuuuua

SEQ ID NO: 301435 - RNA, 19 nt, Artificial Sequence
  Description of Artificial Sequence: Synthetic oligonucleotide
uuauaaugauguggggcgu

SEQ ID NO: 301436 - RNA, 19 nt, Artificial Sequence
  Description of Artificial Sequence: Synthetic oligonucleotide
uccagcuuagggugauaag

SEQ ID NO: 301437 - RNA, 19 nt, Artificial Sequence
  Description of Artificial Sequence: Synthetic oligonucleotide
agagugacgucgugagcag

SEQ ID NO: 301438 - RNA, 19 nt, Artificial Sequence
  Description of Artificial Sequence: Synthetic oligonucleotide
accugcccuaaucugcauc

SEQ ID NO: 301439 - RNA, 19 nt, Artificial Sequence
  Description of Artificial Sequence: Synthetic oligonucleotide
accaaguucucaagaggac

SEQ ID NO: 301440 - RNA, 19 nt, Artificial Sequence
  Description of Artificial Sequence: Synthetic oligonucleotide
gagccuaagauugaguacu

SEQ ID NO: 301441 - RNA, 19 nt, Artificial Sequence
  Description of Artificial Sequence: Synthetic oligonucleotide
augcaacuauagcaggcug

SEQ ID NO: 301442 - RNA, 19 nt, Artificial Sequence
  Description of Artificial Sequence: Synthetic oligonucleotide
ugcucggcuacacucggaa

SEQ ID NO: 301443 - RNA, 19 nt, Artificial Sequence
  Description of Artificial Sequence: Synthetic oligonucleotide
cuagagugcagucgauuuc

SEQ ID NO: 301444 - RNA, 19 nt, Artificial Sequence
  Description of Artificial Sequence: Synthetic oligonucleotide
auaaagaauccggacggaa

SEQ ID NO: 301445 - RNA, 19 nt, Artificial Sequence
  Description of Artificial Sequence: Synthetic oligonucleotide
auccggacggaauguucac

SEQ ID NO: 301446 - RNA, 19 nt, Artificial Sequence
  Description of Artificial Sequence: Synthetic oligonucleotide
uuaggccccuuccccauga

SEQ ID NO: 301447 - RNA, 19 nt, Artificial Sequence
  Description of Artificial Sequence: Synthetic oligonucleotide
aaccgggucuaccgucggg

SEQ ID NO: 301448 - RNA, 19 nt, Artificial Sequence
  Description of Artificial Sequence: Synthetic oligonucleotide
gaacccguccacuucagcu

SEQ ID NO: 301449 - RNA, 19 nt, Artificial Sequence
  Description of Artificial Sequence: Synthetic oligonucleotide
uguccgaaaccuugggcau

SEQ ID NO: 301450 - RNA, 19 nt, Artificial Sequence
  Description of Artificial Sequence: Synthetic oligonucleotide
accagcuuauaaugaugug

SEQ ID NO: 301451 - RNA, 19 nt, Artificial Sequence
  Description of Artificial Sequence: Synthetic oligonucleotide
uccccuugaguuuguuacc

SEQ ID NO: 301452 - RNA, 19 nt, Artificial Sequence
  Description of Artificial Sequence: Synthetic oligonucleotide
gacgucaaccccguuauaa

SEQ ID NO: 301453 - RNA, 19 nt, Artificial Sequence
  Description of Artificial Sequence: Synthetic oligonucleotide
cuaagauugaguacugaau

SEQ ID NO: 301454 - RNA, 19 nt, Artificial Sequence
  Description of Artificial Sequence: Synthetic oligonucleotide
uuaguacuacugccaucca

SEQ ID NO: 301455 - RNA, 19 nt, Artificial Sequence
  Description of Artificial Sequence: Synthetic oligonucleotide
gcaccaagaagcgauugcg

SEQ ID NO: 301456 - RNA, 19 nt, Artificial Sequence
  Description of Artificial Sequence: Synthetic oligonucleotide
guauugccggcgcugcucc

SEQ ID NO: 301457 - RNA, 19 nt, Artificial Sequence
  Description of Artificial Sequence: Synthetic oligonucleotide
cuuaguuguaauugcgccu

SEQ ID NO: 301458 - RNA, 19 nt, Artificial Sequence
  Description of Artificial Sequence: Synthetic oligonucleotide
cugugcauggaccaggucu

SEQ ID NO: 301459 - RNA, 19 nt, Artificial Sequence
  Description of Artificial Sequence: Synthetic oligonucleotide
gcuacacucggaauguugc

SEQ ID NO: 301460 - RNA, 19 nt, Artificial Sequence
  Description of Artificial Sequence: Synthetic oligonucleotide
augaaccgagaccagcuua

SEQ ID NO: 301461 - RNA, 19 nt, Artificial Sequence
  Description of Artificial Sequence: Synthetic oligonucleotide
ccaauagacuauagcagac

SEQ ID NO: 301462 - RNA, 19 nt, Artificial Sequence
  Description of Artificial Sequence: Synthetic oligonucleotide
ucggcuacacucggaaugu

SEQ ID NO: 301463 - RNA, 19 nt, Artificial Sequence
  Description of Artificial Sequence: Synthetic oligonucleotide
uucuacggacgcuacccaa

SEQ ID NO: 301464 - RNA, 19 nt, Artificial Sequence
  Description of Artificial Sequence: Synthetic oligonucleotide
uuccagcuuagggugauaa

SEQ ID NO: 301465 - RNA, 19 nt, Artificial Sequence
  Description of Artificial Sequence: Synthetic oligonucleotide
uuuaggccccuuccccaug

SEQ ID NO: 301466 - RNA, 19 nt, Artificial Sequence
  Description of Artificial Sequence: Synthetic oligonucleotide
accgggucuaccgucgggg

SEQ ID NO: 301467 - RNA, 19 nt, Artificial Sequence
  Description of Artificial Sequence: Synthetic oligonucleotide
acccuuuuacggucugcag

SEQ ID NO: 301468 - RNA, 19 nt, Artificial Sequence
  Description of Artificial Sequence: Synthetic oligonucleotide
uggcagcgaaccuugggaa

SEQ ID NO: 301469 - RNA, 19 nt, Artificial Sequence
  Description of Artificial Sequence: Synthetic oligonucleotide
uaauugcgccugauauaga

SEQ ID NO: 301470 - RNA, 19 nt, Artificial Sequence
  Description of Artificial Sequence: Synthetic oligonucleotide
auaaugauguggggcguga

SEQ ID NO: 301471 - RNA, 19 nt, Artificial Sequence
  Description of Artificial Sequence: Synthetic oligonucleotide
agggaaugagucauuaguu

SEQ ID NO: 301472 - RNA, 19 nt, Artificial Sequence
  Description of Artificial Sequence: Synthetic oligonucleotide
acgcuacccaaggaccugc

SEQ ID NO: 301473 - RNA, 19 nt, Artificial Sequence
  Description of Artificial Sequence: Synthetic oligonucleotide
ugcgccugauauagaaaau

SEQ ID NO: 301474 - RNA, 19 nt, Artificial Sequence
  Description of Artificial Sequence: Synthetic oligonucleotide
cuacagcuugucaaaggga

SEQ ID NO: 301475 - RNA, 19 nt, Artificial Sequence
  Description of Artificial Sequence: Synthetic oligonucleotide
acgucaaccccguuauaaa

SEQ ID NO: 301476 - RNA, 19 nt, Artificial Sequence
  Description of Artificial Sequence: Synthetic oligonucleotide
aagcuauuuugugccacaa

SEQ ID NO: 301477 - RNA, 19 nt, Artificial Sequence
  Description of Artificial Sequence: Synthetic oligonucleotide
auugaguacugaaucugau

SEQ ID NO: 301478 - RNA, 19 nt, Artificial Sequence
  Description of Artificial Sequence: Synthetic oligonucleotide
gacccuuuuacggucugca

SEQ ID NO: 301479 - RNA, 19 nt, Artificial Sequence
  Description of Artificial Sequence: Synthetic oligonucleotide
gcuuuugacggucuugcca

SEQ ID NO: 301480 - RNA, 19 nt, Artificial Sequence
  Description of Artificial Sequence: Synthetic oligonucleotide
gcuaugauaauguaccuuu

SEQ ID NO: 301481 - RNA, 19 nt, Artificial Sequence
  Description of Artificial Sequence: Synthetic oligonucleotide
ugccggaaaugcaacuaua

SEQ ID NO: 301482 - RNA, 19 nt, Artificial Sequence
  Description of Artificial Sequence: Synthetic oligonucleotide
caagaagcgauugcgguaa

SEQ ID NO: 301483 - RNA, 19 nt, Artificial Sequence
  Description of Artificial Sequence: Synthetic oligonucleotide
uaguuguaauugcgccuga

SEQ ID NO: 301484 - RNA, 19 nt, Artificial Sequence
  Description of Artificial Sequence: Synthetic oligonucleotide
guuuguuaccacaucagau

SEQ ID NO: 301485 - RNA, 19 nt, Artificial Sequence
  Description of Artificial Sequence: Synthetic oligonucleotide
gagguauugccggcgcugc

SEQ ID NO: 301486 - RNA, 19 nt, Artificial Sequence
  Description of Artificial Sequence: Synthetic oligonucleotide
agaagcgauugcgguaaag

SEQ ID NO: 301487 - RNA, 19 nt, Artificial Sequence
  Description of Artificial Sequence: Synthetic oligonucleotide
ucgcuuuguuuugggaaug

SEQ ID NO: 301488 - RNA, 19 nt, Artificial Sequence
  Description of Artificial Sequence: Synthetic oligonucleotide
uacggacgcuacccaagga

SEQ ID NO: 301489 - RNA, 19 nt, Artificial Sequence
  Description of Artificial Sequence: Synthetic oligonucleotide
gcgguaaagcauuauuauc

SEQ ID NO: 301490 - RNA, 19 nt, Artificial Sequence
  Description of Artificial Sequence: Synthetic oligonucleotide
ggcgugaccuuccaugcug

SEQ ID NO: 301491 - RNA, 19 nt, Artificial Sequence
  Description of Artificial Sequence: Synthetic oligonucleotide
agagcuucauaaaccgggu

SEQ ID NO: 301492 - RNA, 19 nt, Artificial Sequence
  Description of Artificial Sequence: Synthetic oligonucleotide
gaauccggacggaauguuc

SEQ ID NO: 301493 - RNA, 19 nt, Artificial Sequence
  Description of Artificial Sequence: Synthetic oligonucleotide
ccccgaguagcgaauaccc

SEQ ID NO: 301494 - RNA, 19 nt, Artificial Sequence
  Description of Artificial Sequence: Synthetic oligonucleotide
gccggaaaugcaacuauag

SEQ ID NO: 301495 - RNA, 19 nt, Artificial Sequence
  Description of Artificial Sequence: Synthetic oligonucleotide
ggucgcuuuguuuugggaa

SEQ ID NO: 301496 - RNA, 19 nt, Artificial Sequence
  Description of Artificial Sequence: Synthetic oligonucleotide
uuacggucugcagagccua

SEQ ID NO: 301497 - RNA, 19 nt, Artificial Sequence
  Description of Artificial Sequence: Synthetic oligonucleotide
gccacuagagugcagucga

SEQ ID NO: 301498 - RNA, 19 nt, Artificial Sequence
  Description of Artificial Sequence: Synthetic oligonucleotide
gggaaugagucauuaguua

SEQ ID NO: 301499 - RNA, 19 nt, Artificial Sequence
  Description of Artificial Sequence: Synthetic oligonucleotide
ccuaagauugaguacugaa

SEQ ID NO: 301500 - RNA, 19 nt, Artificial Sequence
  Description of Artificial Sequence: Synthetic oligonucleotide
ccauuagaacuccauacca

SEQ ID NO: 301501 - RNA, 19 nt, Artificial Sequence
  Description of Artificial Sequence: Synthetic oligonucleotide
ccgguugacugucugauuc

SEQ ID NO: 301502 - RNA, 19 nt, Artificial Sequence
  Description of Artificial Sequence: Synthetic oligonucleotide
acgucgugagcagaguaga

SEQ ID NO: 301503 - RNA, 19 nt, Artificial Sequence
  Description of Artificial Sequence: Synthetic oligonucleotide
gguaccuguccccguggcg

SEQ ID NO: 301504 - RNA, 19 nt, Artificial Sequence
  Description of Artificial Sequence: Synthetic oligonucleotide
cugaugcuagcauucuaaa

SEQ ID NO: 301505 - RNA, 19 nt, Artificial Sequence
  Description of Artificial Sequence: Synthetic oligonucleotide
cuggugugucuugaucacc

SEQ ID NO: 301506 - RNA, 19 nt, Artificial Sequence
  Description of Artificial Sequence: Synthetic oligonucleotide
aucugaugcuagcauucua

SEQ ID NO: 301507 - RNA, 19 nt, Artificial Sequence
  Description of Artificial Sequence: Synthetic oligonucleotide
cuacacucggaauguugca

SEQ ID NO: 301508 - RNA, 19 nt, Artificial Sequence
  Description of Artificial Sequence: Synthetic oligonucleotide
agugccggaaaugcaacua

SEQ ID NO: 301509 - RNA, 19 nt, Artificial Sequence
  Description of Artificial Sequence: Synthetic oligonucleotide
ugacccuuuuacggucugc

SEQ ID NO: 301510 - RNA, 19 nt, Artificial Sequence
  Description of Artificial Sequence: Synthetic oligonucleotide
cuuuuacggucugcagagc

SEQ ID NO: 301511 - RNA, 19 nt, Artificial Sequence
  Description of Artificial Sequence: Synthetic oligonucleotide
caucaugagcaucaaguau

SEQ ID NO: 301512 - RNA, 19 nt, Artificial Sequence
  Description of Artificial Sequence: Synthetic oligonucleotide
auacuguuaugugcuuccu

SEQ ID NO: 301513 - RNA, 19 nt, Artificial Sequence
  Description of Artificial Sequence: Synthetic oligonucleotide
gcagcgaaccuugggaacc

SEQ ID NO: 301514 - RNA, 19 nt, Artificial Sequence
  Description of Artificial Sequence: Synthetic oligonucleotide
cuggugacagagugacguc

SEQ ID NO: 301515 - RNA, 19 nt, Artificial Sequence
  Description of Artificial Sequence: Synthetic oligonucleotide
uagaaaccaagggcuuagu

SEQ ID NO: 301516 - RNA, 19 nt, Artificial Sequence
  Description of Artificial Sequence: Synthetic oligonucleotide
ggugacgucaaccccguua

SEQ ID NO: 301517 - RNA, 19 nt, Artificial Sequence
  Description of Artificial Sequence: Synthetic oligonucleotide
uccggacggaauguucacu

SEQ ID NO: 301518 - RNA, 19 nt, Artificial Sequence
  Description of Artificial Sequence: Synthetic oligonucleotide
aagaagcgauugcgguaaa

SEQ ID NO: 301519 - RNA, 19 nt, Artificial Sequence
  Description of Artificial Sequence: Synthetic oligonucleotide
cgucaaccccguuauaaag

SEQ ID NO: 301520 - RNA, 19 nt, Artificial Sequence
  Description of Artificial Sequence: Synthetic oligonucleotide
ccggacggaauguucacug

SEQ ID NO: 301521 - RNA, 19 nt, Artificial Sequence
  Description of Artificial Sequence: Synthetic oligonucleotide
uagcaccauuaaccuagaa

SEQ ID NO: 301522 - RNA, 19 nt, Artificial Sequence
  Description of Artificial Sequence: Synthetic oligonucleotide
ccccguuauaaagaauccg

SEQ ID NO: 301523 - RNA, 19 nt, Artificial Sequence
  Description of Artificial Sequence: Synthetic oligonucleotide
ccguuauaaagaauccgga

SEQ ID NO: 301524 - RNA, 19 nt, Artificial Sequence
  Description of Artificial Sequence: Synthetic oligonucleotide
auugcgccugauauagaaa

SEQ ID NO: 301525 - RNA, 19 nt, Artificial Sequence
  Description of Artificial Sequence: Synthetic oligonucleotide
cauaaaccgggucuaccgu

SEQ ID NO: 301526 - RNA, 19 nt, Artificial Sequence
  Description of Artificial Sequence: Synthetic oligonucleotide
ugccccaauucagcuuuug

SEQ ID NO: 301527 - RNA, 19 nt, Artificial Sequence
  Description of Artificial Sequence: Synthetic oligonucleotide
auguaccuuuucccucccu

SEQ ID NO: 301528 - RNA, 19 nt, Artificial Sequence
  Description of Artificial Sequence: Synthetic oligonucleotide
agaauccggacggaauguu

SEQ ID NO: 301529 - RNA, 19 nt, Artificial Sequence
  Description of Artificial Sequence: Synthetic oligonucleotide
ggcagcgaaccuugggaac

SEQ ID NO: 301530 - RNA, 19 nt, Artificial Sequence
  Description of Artificial Sequence: Synthetic oligonucleotide
uagacccaguucuguguuu

SEQ ID NO: 301531 - RNA, 19 nt, Artificial Sequence
  Description of Artificial Sequence: Synthetic oligonucleotide
agacuauagcagacaaaua

SEQ ID NO: 301532 - RNA, 19 nt, Artificial Sequence
  Description of Artificial Sequence: Synthetic oligonucleotide
uacggucugcagagccuaa

SEQ ID NO: 301533 - RNA, 19 nt, Artificial Sequence
  Description of Artificial Sequence: Synthetic oligonucleotide
agccuggcagcgaaccuug

SEQ ID NO: 301534 - RNA, 19 nt, Artificial Sequence
  Description of Artificial Sequence: Synthetic oligonucleotide
cggacgcuacccaaggacc

SEQ ID NO: 301535 - RNA, 19 nt, Artificial Sequence
  Description of Artificial Sequence: Synthetic oligonucleotide
cccuuuuacggucugcaga

SEQ ID NO: 301536 - RNA, 19 nt, Artificial Sequence
  Description of Artificial Sequence: Synthetic oligonucleotide
agagugcagucgauuucug

SEQ ID NO: 301537 - RNA, 19 nt, Artificial Sequence
  Description of Artificial Sequence: Synthetic oligonucleotide
auccgggaggaagccguag

SEQ ID NO: 301538 - RNA, 19 nt, Artificial Sequence
  Description of Artificial Sequence: Synthetic oligonucleotide
guguuucuacggacgcuac

SEQ ID NO: 301539 - RNA, 19 nt, Artificial Sequence
  Description of Artificial Sequence: Synthetic oligonucleotide
gguauugccggcgcugcuc

SEQ ID NO: 301540 - RNA, 19 nt, Artificial Sequence
  Description of Artificial Sequence: Synthetic oligonucleotide
caucagauauagacccagu

SEQ ID NO: 301541 - RNA, 19 nt, Artificial Sequence
  Description of Artificial Sequence: Synthetic oligonucleotide
ugacgucaaccccguuaua

SEQ ID NO: 301542 - RNA, 19 nt, Artificial Sequence
  Description of Artificial Sequence: Synthetic oligonucleotide
ugggucgggcaugauccuc

SEQ ID NO: 301543 - RNA, 19 nt, Artificial Sequence
  Description of Artificial Sequence: Synthetic oligonucleotide
gcauacaguggguaccugu

SEQ ID NO: 301544 - RNA, 19 nt, Artificial Sequence
  Description of Artificial Sequence: Synthetic oligonucleotide
gcuacccaaggaccugcug

SEQ ID NO: 301545 - RNA, 19 nt, Artificial Sequence
  Description of Artificial Sequence: Synthetic oligonucleotide
gagugacgucgugagcaga

SEQ ID NO: 301546 - RNA, 19 nt, Artificial Sequence
  Description of Artificial Sequence: Synthetic oligonucleotide
gcuucauaaaccgggucua

SEQ ID NO: 301547 - RNA, 19 nt, Artificial Sequence
  Description of Artificial Sequence: Synthetic oligonucleotide
gcucucaaagugccggaaa

SEQ ID NO: 301548 - RNA, 19 nt, Artificial Sequence
  Description of Artificial Sequence: Synthetic oligonucleotide
aauccgggaggaagccgua

SEQ ID NO: 301549 - RNA, 19 nt, Artificial Sequence
  Description of Artificial Sequence: Synthetic oligonucleotide
gauugcgguaaagcauuau

SEQ ID NO: 301550 - RNA, 19 nt, Artificial Sequence
  Description of Artificial Sequence: Synthetic oligonucleotide
ccaagaagcgauugcggua

SEQ ID NO: 301551 - RNA, 19 nt, Artificial Sequence
  Description of Artificial Sequence: Synthetic oligonucleotide
gcgccugauauagaaaaua

SEQ ID NO: 301552 - RNA, 19 nt, Artificial Sequence
  Description of Artificial Sequence: Synthetic oligonucleotide
gaaccgagaccagcuuaua

SEQ ID NO: 301553 - RNA, 19 nt, Artificial Sequence
  Description of Artificial Sequence: Synthetic oligonucleotide
caucaaguauugugaucau

SEQ ID NO: 301554 - RNA, 19 nt, Artificial Sequence
  Description of Artificial Sequence: Synthetic oligonucleotide
gccuaagauugaguacuga

SEQ ID NO: 301555 - RNA, 19 nt, Artificial Sequence
  Description of Artificial Sequence: Synthetic oligonucleotide
gggaacgcuuguggaaauc

SEQ ID NO: 301556 - RNA, 19 nt, Artificial Sequence
  Description of Artificial Sequence: Synthetic oligonucleotide
gcgauugcgguaaagcauu

SEQ ID NO: 301557 - RNA, 19 nt, Artificial Sequence
  Description of Artificial Sequence: Synthetic oligonucleotide
gcaacuauagcaggcuguu

SEQ ID NO: 301558 - RNA, 19 nt, Artificial Sequence
  Description of Artificial Sequence: Synthetic oligonucleotide
ccaacccggaacccgucca

SEQ ID NO: 301559 - RNA, 19 nt, Artificial Sequence
  Description of Artificial Sequence: Synthetic oligonucleotide
cccggaacccguccacuuc

SEQ ID NO: 301560 - RNA, 19 nt, Artificial Sequence
  Description of Artificial Sequence: Synthetic oligonucleotide
aggugacgucaaccccguu

SEQ ID NO: 301561 - RNA, 19 nt, Artificial Sequence
  Description of Artificial Sequence: Synthetic oligonucleotide
gccguagagcaaggccagc

SEQ ID NO: 301562 - RNA, 19 nt, Artificial Sequence
  Description of Artificial Sequence: Synthetic oligonucleotide
cagcgaaccuugggaaccu

SEQ ID NO: 301563 - RNA, 19 nt, Artificial Sequence
  Description of Artificial Sequence: Synthetic oligonucleotide
gcucggcuacacucggaau

SEQ ID NO: 301564 - RNA, 19 nt, Artificial Sequence
  Description of Artificial Sequence: Synthetic oligonucleotide
ccguggcgaaugaacacau

SEQ ID NO: 301565 - RNA, 19 nt, Artificial Sequence
  Description of Artificial Sequence: Synthetic oligonucleotide
acgcagccugugagccaca

SEQ ID NO: 301566 - RNA, 19 nt, Artificial Sequence
  Description of Artificial Sequence: Synthetic oligonucleotide
caccugcccuaaucugcau

SEQ ID NO: 301567 - RNA, 19 nt, Artificial Sequence
  Description of Artificial Sequence: Synthetic oligonucleotide
cgauugcgguaaagcauua

SEQ ID NO: 301568 - RNA, 19 nt, Artificial Sequence
  Description of Artificial Sequence: Synthetic oligonucleotide
gcagcacgcugcauccggu

SEQ ID NO: 301569 - RNA, 19 nt, Artificial Sequence
  Description of Artificial Sequence: Synthetic oligonucleotide
cgcuacccaaggaccugcu

SEQ ID NO: 301570 - RNA, 19 nt, Artificial Sequence
  Description of Artificial Sequence: Synthetic oligonucleotide
aauguaucuagucugaggg

SEQ ID NO: 301571 - RNA, 19 nt, Artificial Sequence
  Description of Artificial Sequence: Synthetic oligonucleotide
auaaaaucgggcccgaucc

SEQ ID NO: 301572 - RNA, 19 nt, Artificial Sequence
  Description of Artificial Sequence: Synthetic oligonucleotide
uccauuacgaagcacaggc

SEQ ID NO: 301573 - RNA, 19 nt, Artificial Sequence
  Description of Artificial Sequence: Synthetic oligonucleotide
uuugagauaaucgaaguca

SEQ ID NO: 301574 - RNA, 19 nt, Artificial Sequence
  Description of Artificial Sequence: Synthetic oligonucleotide
cacacuuauacucuaaggc

SEQ ID NO: 301575 - RNA, 19 nt, Artificial Sequence
  Description of Artificial Sequence: Synthetic oligonucleotide
uuuacacaagccaaaguca

SEQ ID NO: 301576 - RNA, 19 nt, Artificial Sequence
  Description of Artificial Sequence: Synthetic oligonucleotide
uaccguacaaauaugacaa

SEQ ID NO: 301577 - RNA, 19 nt, Artificial Sequence
  Description of Artificial Sequence: Synthetic oligonucleotide
ucucagauaaacauacaca

SEQ ID NO: 301578 - RNA, 19 nt, Artificial Sequence
  Description of Artificial Sequence: Synthetic oligonucleotide
auugugaucgacugggcgg

SEQ ID NO: 301579 - RNA, 19 nt, Artificial Sequence
  Description of Artificial Sequence: Synthetic oligonucleotide
gaugucacgguacaccacg

SEQ ID NO: 301580 - RNA, 19 nt, Artificial Sequence
  Description of Artificial Sequence: Synthetic oligonucleotide
uuggcgaccaucuggauag

SEQ ID NO: 301581 - RNA, 19 nt, Artificial Sequence
  Description of Artificial Sequence: Synthetic oligonucleotide
augacuuugccgaaggugc

SEQ ID NO: 301582 - RNA, 19 nt, Artificial Sequence
  Description of Artificial Sequence: Synthetic oligonucleotide
aauacugucucggugugag

SEQ ID NO: 301583 - RNA, 19 nt, Artificial Sequence
  Description of Artificial Sequence: Synthetic oligonucleotide
cuggauauacaagugaggg

SEQ ID NO: 301584 - RNA, 19 nt, Artificial Sequence
  Description of Artificial Sequence: Synthetic oligonucleotide
aacucaucgucgaaguacc

SEQ ID NO: 301585 - RNA, 19 nt, Artificial Sequence
  Description of Artificial Sequence: Synthetic oligonucleotide
cauuacgaagcacaggcgg

SEQ ID NO: 301586 - RNA, 19 nt, Artificial Sequence
  Description of Artificial Sequence: Synthetic oligonucleotide
uggagagucuacauggaag

SEQ ID NO: 301587 - RNA, 19 nt, Artificial Sequence
  Description of Artificial Sequence: Synthetic oligonucleotide
gauugugaucgacugggcg

SEQ ID NO: 301588 - RNA, 19 nt, Artificial Sequence
  Description of Artificial Sequence: Synthetic oligonucleotide
uaugacaaguaagggaagg

SEQ ID NO: 301589 - RNA, 19 nt, Artificial Sequence
  Description of Artificial Sequence: Synthetic oligonucleotide
ugggauaggaaaaccagga

SEQ ID NO: 301590 - RNA, 19 nt, Artificial Sequence
  Description of Artificial Sequence: Synthetic oligonucleotide
ucuccgcaccauaaaaucg

SEQ ID NO: 301591 - RNA, 19 nt, Artificial Sequence
  Description of Artificial Sequence: Synthetic oligonucleotide
acacuuauacucuaaggca

SEQ ID NO: 301592 - RNA, 19 nt, Artificial Sequence
  Description of Artificial Sequence: Synthetic oligonucleotide
gagauaaucgaagucauuc

SEQ ID NO: 301593 - RNA, 19 nt, Artificial Sequence
  Description of Artificial Sequence: Synthetic oligonucleotide
uggauauacaagugagggg

SEQ ID NO: 301594 - RNA, 19 nt, Artificial Sequence
  Description of Artificial Sequence: Synthetic oligonucleotide
uccagaaucaagagagcag

SEQ ID NO: 301595 - RNA, 19 nt, Artificial Sequence
  Description of Artificial Sequence: Synthetic oligonucleotide
ucuguguccccucucaggc

SEQ ID NO: 301596 - RNA, 19 nt, Artificial Sequence
  Description of Artificial Sequence: Synthetic oligonucleotide
ugugauugugaucgacugg

SEQ ID NO: 301597 - RNA, 19 nt, Artificial Sequence
  Description of Artificial Sequence: Synthetic oligonucleotide
acgaggaugacuuugccga

SEQ ID NO: 301598 - RNA, 19 nt, Artificial Sequence
  Description of Artificial Sequence: Synthetic oligonucleotide
caugcaucugggaauagag

SEQ ID NO: 301599 - RNA, 19 nt, Artificial Sequence
  Description of Artificial Sequence: Synthetic oligonucleotide
ucaucgucgaaguaccuug

SEQ ID NO: 301600 - RNA, 19 nt, Artificial Sequence
  Description of Artificial Sequence: Synthetic oligonucleotide
uuguaccguacaaauauga

SEQ ID NO: 301601 - RNA, 19 nt, Artificial Sequence
  Description of Artificial Sequence: Synthetic oligonucleotide
gugauugugaucgacuggg

SEQ ID NO: 301602 - RNA, 19 nt, Artificial Sequence
  Description of Artificial Sequence: Synthetic oligonucleotide
aucuccgcaccauaaaauc

SEQ ID NO: 301603 - RNA, 19 nt, Artificial Sequence
  Description of Artificial Sequence: Synthetic oligonucleotide
aguuccagcgagcccaggc

SEQ ID NO: 301604 - RNA, 19 nt, Artificial Sequence
  Description of Artificial Sequence: Synthetic oligonucleotide
cauaagguuuuccagcuug

SEQ ID NO: 301605 - RNA, 19 nt, Artificial Sequence
  Description of Artificial Sequence: Synthetic oligonucleotide
gaguuugagauaaucgaag

SEQ ID NO: 301606 - RNA, 19 nt, Artificial Sequence
  Description of Artificial Sequence: Synthetic oligonucleotide
aaucaagagagcagcuugg

SEQ ID NO: 301607 - RNA, 19 nt, Artificial Sequence
  Description of Artificial Sequence: Synthetic oligonucleotide
uuuauugcuuguaccguac

SEQ ID NO: 301608 - RNA, 19 nt, Artificial Sequence
  Description of Artificial Sequence: Synthetic oligonucleotide
aguuugagauaaucgaagu

SEQ ID NO: 301609 - RNA, 19 nt, Artificial Sequence
  Description of Artificial Sequence: Synthetic oligonucleotide
uguaccguacaaauaugac

SEQ ID NO: 301610 - RNA, 19 nt, Artificial Sequence
  Description of Artificial Sequence: Synthetic oligonucleotide
gagucuacauggaaggucc

SEQ ID NO: 301611 - RNA, 19 nt, Artificial Sequence
  Description of Artificial Sequence: Synthetic oligonucleotide
agcacggacagacucgcac

SEQ ID NO: 301612 - RNA, 19 nt, Artificial Sequence
  Description of Artificial Sequence: Synthetic oligonucleotide
gagauauuggggauggggc

SEQ ID NO: 301613 - RNA, 19 nt, Artificial Sequence
  Description of Artificial Sequence: Synthetic oligonucleotide
agauaaucgaagucauuca

SEQ ID NO: 301614 - RNA, 19 nt, Artificial Sequence
  Description of Artificial Sequence: Synthetic oligonucleotide
cuccgcaccauaaaaucgg

SEQ ID NO: 301615 - RNA, 19 nt, Artificial Sequence
  Description of Artificial Sequence: Synthetic oligonucleotide
uuccgaaggccucugcccg

SEQ ID NO: 301616 - RNA, 19 nt, Artificial Sequence
  Description of Artificial Sequence: Synthetic oligonucleotide
acacauucgccuuaaggcu

SEQ ID NO: 301617 - RNA, 19 nt, Artificial Sequence
  Description of Artificial Sequence: Synthetic oligonucleotide
ugacaaguaagggaaggcc

SEQ ID NO: 301618 - RNA, 19 nt, Artificial Sequence
  Description of Artificial Sequence: Synthetic oligonucleotide
gaacucaucgucgaaguac

SEQ ID NO: 301619 - RNA, 19 nt, Artificial Sequence
  Description of Artificial Sequence: Synthetic oligonucleotide
uugagauaaucgaagucau

SEQ ID NO: 301620 - RNA, 19 nt, Artificial Sequence
  Description of Artificial Sequence: Synthetic oligonucleotide
aaaaucgggcccgauccuc

SEQ ID NO: 301621 - RNA, 19 nt, Artificial Sequence
  Description of Artificial Sequence: Synthetic oligonucleotide
aagaaccugugcuccauga

SEQ ID NO: 301622 - RNA, 19 nt, Artificial Sequence
  Description of Artificial Sequence: Synthetic oligonucleotide
gagguuugaagggugguag

SEQ ID NO: 301623 - RNA, 19 nt, Artificial Sequence
  Description of Artificial Sequence: Synthetic oligonucleotide
ucacgguacaccacguccc

SEQ ID NO: 301624 - RNA, 19 nt, Artificial Sequence
  Description of Artificial Sequence: Synthetic oligonucleotide
gacagacucgcacucacac

SEQ ID NO: 301625 - RNA, 19 nt, Artificial Sequence
  Description of Artificial Sequence: Synthetic oligonucleotide
agagcugacacgaucuccg

SEQ ID NO: 301626 - RNA, 19 nt, Artificial Sequence
  Description of Artificial Sequence: Synthetic oligonucleotide
agauauuggggauggggca

SEQ ID NO: 301627 - RNA, 19 nt, Artificial Sequence
  Description of Artificial Sequence: Synthetic oligonucleotide
acguccguagucauugucc

SEQ ID NO: 301628 - RNA, 19 nt, Artificial Sequence
  Description of Artificial Sequence: Synthetic oligonucleotide
uacaccacgucccucgagu

SEQ ID NO: 301629 - RNA, 19 nt, Artificial Sequence
  Description of Artificial Sequence: Synthetic oligonucleotide
cuuaccaaggaguuugaga

SEQ ID NO: 301630 - RNA, 19 nt, Artificial Sequence
  Description of Artificial Sequence: Synthetic oligonucleotide
uucgccuuaaggcuccaga

SEQ ID NO: 301631 - RNA, 19 nt, Artificial Sequence
  Description of Artificial Sequence: Synthetic oligonucleotide
uauugcuuguaccguacaa

SEQ ID NO: 301632 - RNA, 19 nt, Artificial Sequence
  Description of Artificial Sequence: Synthetic oligonucleotide
gaccaaacacuccggcugg

SEQ ID NO: 301633 - RNA, 19 nt, Artificial Sequence
  Description of Artificial Sequence: Synthetic oligonucleotide
uaccuuguguccacuucgg

SEQ ID NO: 301634 - RNA, 19 nt, Artificial Sequence
  Description of Artificial Sequence: Synthetic oligonucleotide
ucgccuuaaggcuccagag

SEQ ID NO: 301635 - RNA, 19 nt, Artificial Sequence
  Description of Artificial Sequence: Synthetic oligonucleotide
ucuacauggaagguccucu

SEQ ID NO: 301636 - RNA, 19 nt, Artificial Sequence
  Description of Artificial Sequence: Synthetic oligonucleotide
cuuaaggcuccagagcagg

SEQ ID NO: 301637 - RNA, 19 nt, Artificial Sequence
  Description of Artificial Sequence: Synthetic oligonucleotide
gucacgguacaccacgucc

SEQ ID NO: 301638 - RNA, 19 nt, Artificial Sequence
  Description of Artificial Sequence: Synthetic oligonucleotide
cauaaaaucgggcccgauc

SEQ ID NO: 301639 - RNA, 19 nt, Artificial Sequence
  Description of Artificial Sequence: Synthetic oligonucleotide
uaucuagucugaggggugg

SEQ ID NO: 301640 - RNA, 19 nt, Artificial Sequence
  Description of Artificial Sequence: Synthetic oligonucleotide
cacgaggaugacuuugccg

SEQ ID NO: 301641 - RNA, 19 nt, Artificial Sequence
  Description of Artificial Sequence: Synthetic oligonucleotide
aaucgaagucauucauggu

SEQ ID NO: 301642 - RNA, 19 nt, Artificial Sequence
  Description of Artificial Sequence: Synthetic oligonucleotide
guuugagauaaucgaaguc

SEQ ID NO: 301643 - RNA, 19 nt, Artificial Sequence
  Description of Artificial Sequence: Synthetic oligonucleotide
gugugauugugaucgacug

SEQ ID NO: 301644 - RNA, 19 nt, Artificial Sequence
  Description of Artificial Sequence: Synthetic oligonucleotide
uuauagccucucuccaucc

SEQ ID NO: 301645 - RNA, 19 nt, Artificial Sequence
  Description of Artificial Sequence: Synthetic oligonucleotide
uugcuuguaccguacaaau

SEQ ID NO: 301646 - RNA, 19 nt, Artificial Sequence
  Description of Artificial Sequence: Synthetic oligonucleotide
gucauuuauagccucucuc

SEQ ID NO: 301647 - RNA, 19 nt, Artificial Sequence
  Description of Artificial Sequence: Synthetic oligonucleotide
uccgcaccauaaaaucggg

SEQ ID NO: 301648 - RNA, 19 nt, Artificial Sequence
  Description of Artificial Sequence: Synthetic oligonucleotide
ucgggugccaaguacucug

SEQ ID NO: 301649 - RNA, 19 nt, Artificial Sequence
  Description of Artificial Sequence: Synthetic oligonucleotide
ucgucgaaguaccuugugu

SEQ ID NO: 301650 - RNA, 19 nt, Artificial Sequence
  Description of Artificial Sequence: Synthetic oligonucleotide
ucuuuauugcuuguaccgu

SEQ ID NO: 301651 - RNA, 19 nt, Artificial Sequence
  Description of Artificial Sequence: Synthetic oligonucleotide
gacaaguaagggaaggcca

SEQ ID NO: 301652 - RNA, 19 nt, Artificial Sequence
  Description of Artificial Sequence: Synthetic oligonucleotide
gucgaaguaccuugugucc

SEQ ID NO: 301653 - RNA, 19 nt, Artificial Sequence
  Description of Artificial Sequence: Synthetic oligonucleotide
uuauugcuuguaccguaca

SEQ ID NO: 301654 - RNA, 19 nt, Artificial Sequence
  Description of Artificial Sequence: Synthetic oligonucleotide
uggucugaaaugagugucu

SEQ ID NO: 301655 - RNA, 19 nt, Artificial Sequence
  Description of Artificial Sequence: Synthetic oligonucleotide
agguuugaagggugguagg

SEQ ID NO: 301656 - RNA, 19 nt, Artificial Sequence
  Description of Artificial Sequence: Synthetic oligonucleotide
cuuguaccguacaaauaug

SEQ ID NO: 301657 - RNA, 19 nt, Artificial Sequence
  Description of Artificial Sequence: Synthetic oligonucleotide
acaaguaagggaaggccag

SEQ ID NO: 301658 - RNA, 19 nt, Artificial Sequence
  Description of Artificial Sequence: Synthetic oligonucleotide
caccauaaaaucgggcccg

SEQ ID NO: 301659 - RNA, 19 nt, Artificial Sequence
  Description of Artificial Sequence: Synthetic oligonucleotide
ccagucaaguccaaggggc

SEQ ID NO: 301660 - RNA, 19 nt, Artificial Sequence
  Description of Artificial Sequence: Synthetic oligonucleotide
ucaccgcuagagcagggug

SEQ ID NO: 301661 - RNA, 19 nt, Artificial Sequence
  Description of Artificial Sequence: Synthetic oligonucleotide
aaucgggcccgauccuccg

SEQ ID NO: 301662 - RNA, 19 nt, Artificial Sequence
  Description of Artificial Sequence: Synthetic oligonucleotide
uaaucugggcaagaacuga

SEQ ID NO: 301663 - RNA, 19 nt, Artificial Sequence
  Description of Artificial Sequence: Synthetic oligonucleotide
ggaccaaacacuccggcug

SEQ ID NO: 301664 - RNA, 19 nt, Artificial Sequence
  Description of Artificial Sequence: Synthetic oligonucleotide
ugggaccaaacacuccggc

SEQ ID NO: 301665 - RNA, 19 nt, Artificial Sequence
  Description of Artificial Sequence: Synthetic oligonucleotide
gauaaucgaagucauucau

SEQ ID NO: 301666 - RNA, 19 nt, Artificial Sequence
  Description of Artificial Sequence: Synthetic oligonucleotide
ugacuuugccgaaggugcc

SEQ ID NO: 301667 - RNA, 19 nt, Artificial Sequence
  Description of Artificial Sequence: Synthetic oligonucleotide
agguggaccggcugcacuc

SEQ ID NO: 301668 - RNA, 19 nt, Artificial Sequence
  Description of Artificial Sequence: Synthetic oligonucleotide
cugggcggugaacucaucg

SEQ ID NO: 301669 - RNA, 19 nt, Artificial Sequence
  Description of Artificial Sequence: Synthetic oligonucleotide
ugggcgacuucauccuugg

SEQ ID NO: 301670 - RNA, 19 nt, Artificial Sequence
  Description of Artificial Sequence: Synthetic oligonucleotide
cucgagugcaaauacucca

SEQ ID NO: 301671 - RNA, 19 nt, Artificial Sequence
  Description of Artificial Sequence: Synthetic oligonucleotide
cagacagcccaguaacagc

SEQ ID NO: 301672 - RNA, 19 nt, Artificial Sequence
  Description of Artificial Sequence: Synthetic oligonucleotide
ugauugugaucgacugggc

SEQ ID NO: 301673 - RNA, 19 nt, Artificial Sequence
  Description of Artificial Sequence: Synthetic oligonucleotide
uaaaaucgggcccgauccu

SEQ ID NO: 301674 - RNA, 19 nt, Artificial Sequence
  Description of Artificial Sequence: Synthetic oligonucleotide
uucucccgcacgaggauga

SEQ ID NO: 301675 - RNA, 19 nt, Artificial Sequence
  Description of Artificial Sequence: Synthetic oligonucleotide
acauucgccuuaaggcucc

SEQ ID NO: 301676 - RNA, 19 nt, Artificial Sequence
  Description of Artificial Sequence: Synthetic oligonucleotide
aguccgcauccacucuucc

SEQ ID NO: 301677 - RNA, 19 nt, Artificial Sequence
  Description of Artificial Sequence: Synthetic oligonucleotide
uauagccucucuccauccu

SEQ ID NO: 301678 - RNA, 19 nt, Artificial Sequence
  Description of Artificial Sequence: Synthetic oligonucleotide
ucccgagacagguggaaga

SEQ ID NO: 301679 - RNA, 19 nt, Artificial Sequence
  Description of Artificial Sequence: Synthetic oligonucleotide
caacagcccauccuugggc

SEQ ID NO: 301680 - RNA, 19 nt, Artificial Sequence
  Description of Artificial Sequence: Synthetic oligonucleotide
uuauacucuaaggcauugu

SEQ ID NO: 301681 - RNA, 19 nt, Artificial Sequence
  Description of Artificial Sequence: Synthetic oligonucleotide
gugugagauguguaacagc

SEQ ID NO: 301682 - RNA, 19 nt, Artificial Sequence
  Description of Artificial Sequence: Synthetic oligonucleotide
aaguccaaggggcccaaua

SEQ ID NO: 301683 - RNA, 19 nt, Artificial Sequence
  Description of Artificial Sequence: Synthetic oligonucleotide
agacucgcucccgagacag

SEQ ID NO: 301684 - RNA, 19 nt, Artificial Sequence
  Description of Artificial Sequence: Synthetic oligonucleotide
ugcccucuuuacacaagcc

SEQ ID NO: 301685 - RNA, 19 nt, Artificial Sequence
  Description of Artificial Sequence: Synthetic oligonucleotide
accggcugcacuccauggg

SEQ ID NO: 301686 - RNA, 19 nt, Artificial Sequence
  Description of Artificial Sequence: Synthetic oligonucleotide
auugucaccugggucccgg

SEQ ID NO: 301687 - RNA, 19 nt, Artificial Sequence
  Description of Artificial Sequence: Synthetic oligonucleotide
ucggaagugaccugagguu

SEQ ID NO: 301688 - RNA, 19 nt, Artificial Sequence
  Description of Artificial Sequence: Synthetic oligonucleotide
caucgggaggcaaggcugg

SEQ ID NO: 301689 - RNA, 19 nt, Artificial Sequence
  Description of Artificial Sequence: Synthetic oligonucleotide
cugagaugcucaccgcuag

SEQ ID NO: 301690 - RNA, 19 nt, Artificial Sequence
  Description of Artificial Sequence: Synthetic oligonucleotide
cagucaaguccaaggggcc

SEQ ID NO: 301691 - RNA, 19 nt, Artificial Sequence
  Description of Artificial Sequence: Synthetic oligonucleotide
accguacaaauaugacaag

SEQ ID NO: 301692 - RNA, 19 nt, Artificial Sequence
  Description of Artificial Sequence: Synthetic oligonucleotide
uguaacagccaagguuggc

SEQ ID NO: 301693 - RNA, 19 nt, Artificial Sequence
  Description of Artificial Sequence: Synthetic oligonucleotide
ccacacuuauacucuaagg

SEQ ID NO: 301694 - RNA, 19 nt, Artificial Sequence
  Description of Artificial Sequence: Synthetic oligonucleotide
aagugcguccgcuggucca

SEQ ID NO: 301695 - RNA, 19 nt, Artificial Sequence
  Description of Artificial Sequence: Synthetic oligonucleotide
ugggguuucggcugagccu

SEQ ID NO: 301696 - RNA, 19 nt, Artificial Sequence
  Description of Artificial Sequence: Synthetic oligonucleotide
caaaaggcaaaauaagguu

SEQ ID NO: 301697 - RNA, 19 nt, Artificial Sequence
  Description of Artificial Sequence: Synthetic oligonucleotide
ugagauaaucgaagucauu

SEQ ID NO: 301698 - RNA, 19 nt, Artificial Sequence
  Description of Artificial Sequence: Synthetic oligonucleotide
caccgcuagagcagggugc

SEQ ID NO: 301699 - RNA, 19 nt, Artificial Sequence
  Description of Artificial Sequence: Synthetic oligonucleotide
ugagaugcucaccgcuaga

SEQ ID NO: 301700 - RNA, 19 nt, Artificial Sequence
  Description of Artificial Sequence: Synthetic oligonucleotide
auauuggggauggggcaac

SEQ ID NO: 301701 - RNA, 19 nt, Artificial Sequence
  Description of Artificial Sequence: Synthetic oligonucleotide
ugcuuguaccguacaaaua

SEQ ID NO: 301702 - RNA, 19 nt, Artificial Sequence
  Description of Artificial Sequence: Synthetic oligonucleotide
ggugugagauguguaacag

SEQ ID NO: 301703 - RNA, 19 nt, Artificial Sequence
  Description of Artificial Sequence: Synthetic oligonucleotide
gggagccacacuuauacuc

SEQ ID NO: 301704 - RNA, 19 nt, Artificial Sequence
  Description of Artificial Sequence: Synthetic oligonucleotide
gcaccauaaaaucgggccc

SEQ ID NO: 301705 - RNA, 19 nt, Artificial Sequence
  Description of Artificial Sequence: Synthetic oligonucleotide
cagcuugaugucacgguac

SEQ ID NO: 301706 - RNA, 19 nt, Artificial Sequence
  Description of Artificial Sequence: Synthetic oligonucleotide
agguuucauccagaugugg

SEQ ID NO: 301707 - RNA, 19 nt, Artificial Sequence
  Description of Artificial Sequence: Synthetic oligonucleotide
uugugaucgacugggcggu

SEQ ID NO: 301708 - RNA, 19 nt, Artificial Sequence
  Description of Artificial Sequence: Synthetic oligonucleotide
gguggcagguuucauccag

SEQ ID NO: 301709 - RNA, 19 nt, Artificial Sequence
  Description of Artificial Sequence: Synthetic oligonucleotide
auaugacaaguaagggaag

SEQ ID NO: 301710 - RNA, 19 nt, Artificial Sequence
  Description of Artificial Sequence: Synthetic oligonucleotide
cuggauaguccgcauccac

SEQ ID NO: 301711 - RNA, 19 nt, Artificial Sequence
  Description of Artificial Sequence: Synthetic oligonucleotide
aagacucgcucccgagaca

SEQ ID NO: 301712 - RNA, 19 nt, Artificial Sequence
  Description of Artificial Sequence: Synthetic oligonucleotide
guaggagcuuucucuguac

SEQ ID NO: 301713 - RNA, 19 nt, Artificial Sequence
  Description of Artificial Sequence: Synthetic oligonucleotide
uuccaaacacccagagaua

SEQ ID NO: 301714 - RNA, 19 nt, Artificial Sequence
  Description of Artificial Sequence: Synthetic oligonucleotide
gcuuguaccguacaaauau

SEQ ID NO: 301715 - RNA, 19 nt, Artificial Sequence
  Description of Artificial Sequence: Synthetic oligonucleotide
ggauaguccgcauccacuc

SEQ ID NO: 301716 - RNA, 19 nt, Artificial Sequence
  Description of Artificial Sequence: Synthetic oligonucleotide
uccggcugggguuucggcu

SEQ ID NO: 301717 - RNA, 19 nt, Artificial Sequence
  Description of Artificial Sequence: Synthetic oligonucleotide
ucccucgagugcaaauacu
